United States Patent Application Publication US 2018/0305689 A1 - sequence listing, part 99

SEQ ID NO: 1428773 - RNA, 19 nt, Artificial Sequence
  Description of Artificial Sequence: Synthetic oligonucleotide
  Antisense strand to SEQ ID NO: 1428772
aauuucgucucuaaacggu

SEQ ID NO: 1428774 - RNA, 19 nt, Artificial Sequence
  Description of Artificial Sequence: Synthetic oligonucleotide
  Sense strand starting at position 2774 of SEQ ID NO: 1243614
agacgaaauucccucuaag

SEQ ID NO: 1428775 - RNA, 19 nt, Artificial Sequence
  Description of Artificial Sequence: Synthetic oligonucleotide
  Antisense strand to SEQ ID NO: 1428774
cuuagagggaauuucgucu

SEQ ID NO: 1428776 - RNA, 19 nt, Artificial Sequence
  Description of Artificial Sequence: Synthetic oligonucleotide
  Sense strand starting at position 2854 of SEQ ID NO: 1243614
cugauucugugggagccau

SEQ ID NO: 1428777 - RNA, 19 nt, Artificial Sequence
  Description of Artificial Sequence: Synthetic oligonucleotide
  Antisense strand to SEQ ID NO: 1428776
auggcucccacagaaucag

SEQ ID NO: 1428778 - RNA, 19 nt, Artificial Sequence
  Description of Artificial Sequence: Synthetic oligonucleotide
  Sense strand starting at position 3620 of SEQ ID NO: 1243614
gggcgugcaucuccaauga

SEQ ID NO: 1428779 - RNA, 19 nt, Artificial Sequence
  Description of Artificial Sequence: Synthetic oligonucleotide
  Antisense strand to SEQ ID NO: 1428778
ucauuggagaugcacgccc

SEQ ID NO: 1428780 - RNA, 19 nt, Artificial Sequence
  Description of Artificial Sequence: Synthetic oligonucleotide
  Sense strand starting at position 3648 of SEQ ID NO: 1243614
gaaauagagcuucggcaug

SEQ ID NO: 1428781 - RNA, 19 nt, Artificial Sequence
  Description of Artificial Sequence: Synthetic oligonucleotide
  Antisense strand to SEQ ID NO: 1428780
caugccgaagcucuauuuc

SEQ ID NO: 1428782 - RNA, 19 nt, Artificial Sequence
  Description of Artificial Sequence: Synthetic oligonucleotide
  Sense strand starting at position 3924 of SEQ ID NO: 1243614
cugugagggagcuauggau

SEQ ID NO: 1428783 - RNA, 19 nt, Artificial Sequence
  Description of Artificial Sequence: Synthetic oligonucleotide
  Antisense strand to SEQ ID NO: 1428782
auccauagcucccucacag

SEQ ID NO: 1428784 - RNA, 19 nt, Artificial Sequence
  Description of Artificial Sequence: Synthetic oligonucleotide
  Sense strand starting at position 3940 of SEQ ID NO: 1243614
gauguaugcuucugcguga

SEQ ID NO: 1428785 - RNA, 19 nt, Artificial Sequence
  Description of Artificial Sequence: Synthetic oligonucleotide
  Antisense strand to SEQ ID NO: 1428784
ucacgcagaagcauacauc

SEQ ID NO: 1428786 - RNA, 19 nt, Artificial Sequence
  Description of Artificial Sequence: Synthetic oligonucleotide
  Sense strand starting at position 3944 of SEQ ID NO: 1243614
uaugcuucugcgugaguca

SEQ ID NO: 1428787 - RNA, 19 nt, Artificial Sequence
  Description of Artificial Sequence: Synthetic oligonucleotide
  Antisense strand to SEQ ID NO: 1428786
ugacucacgcagaagcaua

SEQ ID NO: 1428788 - RNA, 19 nt, Artificial Sequence
  Description of Artificial Sequence: Synthetic oligonucleotide
  Sense strand starting at position 3947 of SEQ ID NO: 1243614
gcuucugcgugagucacau

SEQ ID NO: 1428789 - RNA, 19 nt, Artificial Sequence
  Description of Artificial Sequence: Synthetic oligonucleotide
  Antisense strand to SEQ ID NO: 1428788
augugacucacgcagaagc

SEQ ID NO: 1428790 - RNA, 19 nt, Artificial Sequence
  Description of Artificial Sequence: Synthetic oligonucleotide
  Sense strand starting at position 3951 of SEQ ID NO: 1243614
cugcgugagucacauacau

SEQ ID NO: 1428791 - RNA, 19 nt, Artificial Sequence
  Description of Artificial Sequence: Synthetic oligonucleotide
  Antisense strand to SEQ ID NO: 1428790
auguaugugacucacgcag

SEQ ID NO: 1428792 - RNA, 19 nt, Artificial Sequence
  Description of Artificial Sequence: Synthetic oligonucleotide
  Sense strand starting at position 3962 of SEQ ID NO: 1243614
acauacauuugcguacauu

SEQ ID NO: 1428793 - RNA, 19 nt, Artificial Sequence
  Description of Artificial Sequence: Synthetic oligonucleotide
  Antisense strand to SEQ ID NO: 1428792
aauguacgcaaauguaugu

SEQ ID NO: 1428794 - RNA, 19 nt, Artificial Sequence
  Description of Artificial Sequence: Synthetic oligonucleotide
  Sense strand starting at position 159 of SEQ ID NO: 1243615
gauacaugaucugccuuga

SEQ ID NO: 1428795 - RNA, 19 nt, Artificial Sequence
  Description of Artificial Sequence: Synthetic oligonucleotide
  Antisense strand to SEQ ID NO: 1428794
ucaaggcagaucauguauc

SEQ ID NO: 1428796 - RNA, 19 nt, Artificial Sequence
  Description of Artificial Sequence: Synthetic oligonucleotide
  Sense strand starting at position 277 of SEQ ID NO: 1243615
gcuucucuucuaggauagu

SEQ ID NO: 1428797 - RNA, 19 nt, Artificial Sequence
  Description of Artificial Sequence: Synthetic oligonucleotide
  Antisense strand to SEQ ID NO: 1428796
acuauccuagaagagaagc

SEQ ID NO: 1428798 - RNA, 19 nt, Artificial Sequence
  Description of Artificial Sequence: Synthetic oligonucleotide
  Sense strand starting at position 286 of SEQ ID NO: 1243615
cuaggauaguuucccucua

SEQ ID NO: 1428799 - RNA, 19 nt, Artificial Sequence
  Description of Artificial Sequence: Synthetic oligonucleotide
  Antisense strand to SEQ ID NO: 1428798
uagagggaaacuauccuag

SEQ ID NO: 1428800 - RNA, 19 nt, Artificial Sequence
  Description of Artificial Sequence: Synthetic oligonucleotide
  Sense strand starting at position 288 of SEQ ID NO: 1243615
aggauaguuucccucuaga

SEQ ID NO: 1428801 - RNA, 19 nt, Artificial Sequence
  Description of Artificial Sequence: Synthetic oligonucleotide
  Antisense strand to SEQ ID NO: 1428800
ucuagagggaaacuauccu

SEQ ID NO: 1428802 - RNA, 19 nt, Artificial Sequence
  Description of Artificial Sequence: Synthetic oligonucleotide
  Sense strand starting at position 301 of SEQ ID NO: 1243615
ucuagaaauccauguugcu

SEQ ID NO: 1428803 - RNA, 19 nt, Artificial Sequence
  Description of Artificial Sequence: Synthetic oligonucleotide
  Antisense strand to SEQ ID NO: 1428802
agcaacauggauuucuaga

SEQ ID NO: 1428804 - RNA, 19 nt, Artificial Sequence
  Description of Artificial Sequence: Synthetic oligonucleotide
  Sense strand starting at position 342 of SEQ ID NO: 1243615
auauuuaugugccuccuua

SEQ ID NO: 1428805 - RNA, 19 nt, Artificial Sequence
  Description of Artificial Sequence: Synthetic oligonucleotide
  Antisense strand to SEQ ID NO: 1428804
uaaggaggcacauaaauau

SEQ ID NO: 1428806 - RNA, 19 nt, Artificial Sequence
  Description of Artificial Sequence: Synthetic oligonucleotide
  Sense strand starting at position 449 of SEQ ID NO: 1243615
gccacauuacugggcauua

SEQ ID NO: 1428807 - RNA, 19 nt, Artificial Sequence
  Description of Artificial Sequence: Synthetic oligonucleotide
  Antisense strand to SEQ ID NO: 1428806
uaaugcccaguaauguggc

SEQ ID NO: 1428808 - RNA, 19 nt, Artificial Sequence
  Description of Artificial Sequence: Synthetic oligonucleotide
  Sense strand starting at position 450 of SEQ ID NO: 1243615
ccacauuacugggcauuau

SEQ ID NO: 1428809 - RNA, 19 nt, Artificial Sequence
  Description of Artificial Sequence: Synthetic oligonucleotide
  Antisense strand to SEQ ID NO: 1428808
auaaugcccaguaaugugg

SEQ ID NO: 1428810 - RNA, 19 nt, Artificial Sequence
  Description of Artificial Sequence: Synthetic oligonucleotide
  Sense strand starting at position 461 of SEQ ID NO: 1243615
ggcauuaucuaucauuuag

SEQ ID NO: 1428811 - RNA, 19 nt, Artificial Sequence
  Description of Artificial Sequence: Synthetic oligonucleotide
  Antisense strand to SEQ ID NO: 1428810
cuaaaugauagauaaugcc

SEQ ID NO: 1428812 - RNA, 19 nt, Artificial Sequence
  Description of Artificial Sequence: Synthetic oligonucleotide
  Sense strand starting at position 483 of SEQ ID NO: 1243615
uguguauauugcuuauuga

SEQ ID NO: 1428813 - RNA, 19 nt, Artificial Sequence
  Description of Artificial Sequence: Synthetic oligonucleotide
  Antisense strand to SEQ ID NO: 1428812
ucaauaagcaauauacaca

SEQ ID NO: 1428814 - RNA, 19 nt, Artificial Sequence
  Description of Artificial Sequence: Synthetic oligonucleotide
  Sense strand starting at position 484 of SEQ ID NO: 1243615
guguauauugcuuauugac

SEQ ID NO: 1428815 - RNA, 19 nt, Artificial Sequence
  Description of Artificial Sequence: Synthetic oligonucleotide
  Antisense strand to SEQ ID NO: 1428814
gucaauaagcaauauacac

SEQ ID NO: 1428816 - RNA, 19 nt, Artificial Sequence
  Description of Artificial Sequence: Synthetic oligonucleotide
  Sense strand starting at position 498 of SEQ ID NO: 1243615
uugacagucuucccuacua

SEQ ID NO: 1428817 - RNA, 19 nt, Artificial Sequence
  Description of Artificial Sequence: Synthetic oligonucleotide
  Antisense strand to SEQ ID NO: 1428816
uaguagggaagacugucaa

SEQ ID NO: 1428818 - RNA, 19 nt, Artificial Sequence
  Description of Artificial Sequence: Synthetic oligonucleotide
  Sense strand starting at position 650 of SEQ ID NO: 1243615
auuuauugaugugaugcau

SEQ ID NO: 1428819 - RNA, 19 nt, Artificial Sequence
  Description of Artificial Sequence: Synthetic oligonucleotide
  Antisense strand to SEQ ID NO: 1428818
augcaucacaucaauaaau

SEQ ID NO: 1428820 - RNA, 19 nt, Artificial Sequence
  Description of Artificial Sequence: Synthetic oligonucleotide
  Sense strand starting at position 803 of SEQ ID NO: 1243615
aagaucuuggcucauugua

SEQ ID NO: 1428821 - RNA, 19 nt, Artificial Sequence
  Description of Artificial Sequence: Synthetic oligonucleotide
  Antisense strand to SEQ ID NO: 1428820
uacaaugagccaagaucuu

SEQ ID NO: 1428822 - RNA, 19 nt, Artificial Sequence
  Description of Artificial Sequence: Synthetic oligonucleotide
  Sense strand starting at position 1074 of SEQ ID NO: 1243615
uuguauuaugcauauacca

SEQ ID NO: 1428823 - RNA, 19 nt, Artificial Sequence
  Description of Artificial Sequence: Synthetic oligonucleotide
  Antisense strand to SEQ ID NO: 1428822
ugguauaugcauaauacaa

SEQ ID NO: 1428824 - RNA, 19 nt, Artificial Sequence
  Description of Artificial Sequence: Synthetic oligonucleotide
  Sense strand starting at position 1116 of SEQ ID NO: 1243615
aggcauaaaguguaaguga

SEQ ID NO: 1428825 - RNA, 19 nt, Artificial Sequence
  Description of Artificial Sequence: Synthetic oligonucleotide
  Antisense strand to SEQ ID NO: 1428824
ucacuuacacuuuaugccu

SEQ ID NO: 1428826 - RNA, 19 nt, Artificial Sequence
  Description of Artificial Sequence: Synthetic oligonucleotide
  Sense strand starting at position 1119 of SEQ ID NO: 1243615
cauaaaguguaagugaauu

SEQ ID NO: 1428827 - RNA, 19 nt, Artificial Sequence
  Description of Artificial Sequence: Synthetic oligonucleotide
  Antisense strand to SEQ ID NO: 1428826
aauucacuuacacuuuaug

SEQ ID NO: 1428828 - RNA, 19 nt, Artificial Sequence
  Description of Artificial Sequence: Synthetic oligonucleotide
  Sense strand starting at position 1261 of SEQ ID NO: 1243615
uuauuuaugucagugccua

SEQ ID NO: 1428829 - RNA, 19 nt, Artificial Sequence
  Description of Artificial Sequence: Synthetic oligonucleotide
  Antisense strand to SEQ ID NO: 1428828
uaggcacugacauaaauaa

SEQ ID NO: 1428830 - RNA, 19 nt, Artificial Sequence
  Description of Artificial Sequence: Synthetic oligonucleotide
  Sense strand starting at position 1262 of SEQ ID NO: 1243615
uauuuaugucagugccuag

SEQ ID NO: 1428831 - RNA, 19 nt, Artificial Sequence
  Description of Artificial Sequence: Synthetic oligonucleotide
  Antisense strand to SEQ ID NO: 1428830
cuaggcacugacauaaaua

SEQ ID NO: 1428832 - RNA, 19 nt, Artificial Sequence
  Description of Artificial Sequence: Synthetic oligonucleotide
  Sense strand starting at position 1265 of SEQ ID NO: 1243615
uuaugucagugccuagauu

SEQ ID NO: 1428833 - RNA, 19 nt, Artificial Sequence
  Description of Artificial Sequence: Synthetic oligonucleotide
  Antisense strand to SEQ ID NO: 1428832
aaucuaggcacugacauaa

SEQ ID NO: 1428834 - RNA, 19 nt, Artificial Sequence
  Description of Artificial Sequence: Synthetic oligonucleotide
  Sense strand starting at position 1362 of SEQ ID NO: 1243615
gugcaaugucuggcaugca

SEQ ID NO: 1428835 - RNA, 19 nt, Artificial Sequence
  Description of Artificial Sequence: Synthetic oligonucleotide
  Antisense strand to SEQ ID NO: 1428834
ugcaugccagacauugcac

SEQ ID NO: 1428836 - RNA, 19 nt, Artificial Sequence
  Description of Artificial Sequence: Synthetic oligonucleotide
  Sense strand starting at position 1377 of SEQ ID NO: 1243615
ugcaauaaguacucgacaa

SEQ ID NO: 1428837 - RNA, 19 nt, Artificial Sequence
  Description of Artificial Sequence: Synthetic oligonucleotide
  Antisense strand to SEQ ID NO: 1428836
uugucgaguacuuauugca

SEQ ID NO: 1428838 - RNA, 19 nt, Artificial Sequence
  Description of Artificial Sequence: Synthetic oligonucleotide
  Sense strand starting at position 1391 of SEQ ID NO: 1243615
gacaaaugguagcuauuag

SEQ ID NO: 1428839 - RNA, 19 nt, Artificial Sequence
  Description of Artificial Sequence: Synthetic oligonucleotide
  Antisense strand to SEQ ID NO: 1428838
cuaauagcuaccauuuguc

SEQ ID NO: 1428840 - RNA, 19 nt, Artificial Sequence
  Description of Artificial Sequence: Synthetic oligonucleotide
  Sense strand starting at position 1432 of SEQ ID NO: 1243615
aagagaucuugggacauac

SEQ ID NO: 1428841 - RNA, 19 nt, Artificial Sequence
  Description of Artificial Sequence: Synthetic oligonucleotide
  Antisense strand to SEQ ID NO: 1428840
guaugucccaagaucucuu

SEQ ID NO: 1428842 - RNA, 19 nt, Artificial Sequence
  Description of Artificial Sequence: Synthetic oligonucleotide
  Sense strand starting at position 1572 of SEQ ID NO: 1243615
aggagcaucugauugaaac

SEQ ID NO: 1428843 - RNA, 19 nt, Artificial Sequence
  Description of Artificial Sequence: Synthetic oligonucleotide
  Antisense strand to SEQ ID NO: 1428842
guuucaaucagaugcuccu

SEQ ID NO: 1428844 - RNA, 19 nt, Artificial Sequence
  Description of Artificial Sequence: Synthetic oligonucleotide
  Sense strand starting at position 1855 of SEQ ID NO: 1243615
agugauuacuggucggauc

SEQ ID NO: 1428845 - RNA, 19 nt, Artificial Sequence
  Description of Artificial Sequence: Synthetic oligonucleotide
  Antisense strand to SEQ ID NO: 1428844
gauccgaccaguaaucacu

SEQ ID NO: 1428846 - RNA, 19 nt, Artificial Sequence
  Description of Artificial Sequence: Synthetic oligonucleotide
  Sense strand starting at position 1856 of SEQ ID NO: 1243615
gugauuacuggucggauca

SEQ ID NO: 1428847 - RNA, 19 nt, Artificial Sequence
  Description of Artificial Sequence: Synthetic oligonucleotide
  Antisense strand to SEQ ID NO: 1428846
ugauccgaccaguaaucac

SEQ ID NO: 1428848 - RNA, 19 nt, Artificial Sequence
  Description of Artificial Sequence: Synthetic oligonucleotide
  Sense strand starting at position 1857 of SEQ ID NO: 1243615
ugauuacuggucggaucaa

SEQ ID NO: 1428849 - RNA, 19 nt, Artificial Sequence
  Description of Artificial Sequence: Synthetic oligonucleotide
  Antisense strand to SEQ ID NO: 1428848
uugauccgaccaguaauca

SEQ ID NO: 1428850 - RNA, 19 nt, Artificial Sequence
  Description of Artificial Sequence: Synthetic oligonucleotide
  Sense strand starting at position 2682 of SEQ ID NO: 1243615
cccgguaacugauucgaau

SEQ ID NO: 1428851 - RNA, 19 nt, Artificial Sequence
  Description of Artificial Sequence: Synthetic oligonucleotide
  Antisense strand to SEQ ID NO: 1428850
auucgaaucaguuaccggg

SEQ ID NO: 1428852 - RNA, 19 nt, Artificial Sequence
  Description of Artificial Sequence: Synthetic oligonucleotide
  Sense strand starting at position 2694 of SEQ ID NO: 1243615
uucgaauuuggcgauuguu

SEQ ID NO: 1428853 - RNA, 19 nt, Artificial Sequence
  Description of Artificial Sequence: Synthetic oligonucleotide
  Antisense strand to SEQ ID NO: 1428852
aacaaucgccaaauucgaa

SEQ ID NO: 1428854 - RNA, 19 nt, Artificial Sequence
  Description of Artificial Sequence: Synthetic oligonucleotide
  Sense strand starting at position 2697 of SEQ ID NO: 1243615
gaauuuggcgauuguuagu

SEQ ID NO: 1428855 - RNA, 19 nt, Artificial Sequence
  Description of Artificial Sequence: Synthetic oligonucleotide
  Antisense strand to SEQ ID NO: 1428854
acuaacaaucgccaaauuc

SEQ ID NO: 1428856 - RNA, 19 nt, Artificial Sequence
  Description of Artificial Sequence: Synthetic oligonucleotide
  Sense strand starting at position 2718 of SEQ ID NO: 1243615
ggagcuagcgccaguguuu

SEQ ID NO: 1428857 - RNA, 19 nt, Artificial Sequence
  Description of Artificial Sequence: Synthetic oligonucleotide
  Antisense strand to SEQ ID NO: 1428856
aaacacuggcgcuagcucc

SEQ ID NO: 1428858 - RNA, 19 nt, Artificial Sequence
  Description of Artificial Sequence: Synthetic oligonucleotide
  Sense strand starting at position 2751 of SEQ ID NO: 1243615
gucagaauguggucucuug

SEQ ID NO: 1428859 - RNA, 19 nt, Artificial Sequence
  Description of Artificial Sequence: Synthetic oligonucleotide
  Antisense strand to SEQ ID NO: 1428858
caagagaccacauucugac

SEQ ID NO: 1428860 - RNA, 19 nt, Artificial Sequence
  Description of Artificial Sequence: Synthetic oligonucleotide
  Sense strand starting at position 2785 of SEQ ID NO: 1243615
gaagauucugcagacugca

SEQ ID NO: 1428861 - RNA, 19 nt, Artificial Sequence
  Description of Artificial Sequence: Synthetic oligonucleotide
  Antisense strand to SEQ ID NO: 1428860
ugcagucugcagaaucuuc

SEQ ID NO: 1428862 - RNA, 19 nt, Artificial Sequence
  Description of Artificial Sequence: Synthetic oligonucleotide
  Sense strand starting at position 3393 of SEQ ID NO: 1243615
gaguguugaucagucccua

SEQ ID NO: 1428863 - RNA, 19 nt, Artificial Sequence
  Description of Artificial Sequence: Synthetic oligonucleotide
  Antisense strand to SEQ ID NO: 1428862
uagggacugaucaacacuc

SEQ ID NO: 1428864 - RNA, 19 nt, Artificial Sequence
  Description of Artificial Sequence: Synthetic oligonucleotide
  Sense strand starting at position 3397 of SEQ ID NO: 1243615
guugaucagucccuauuga

SEQ ID NO: 1428865 - RNA, 19 nt, Artificial Sequence
  Description of Artificial Sequence: Synthetic oligonucleotide
  Antisense strand to SEQ ID NO: 1428864
ucaauagggacugaucaac

SEQ ID NO: 1428866 - RNA, 19 nt, Artificial Sequence
  Description of Artificial Sequence: Synthetic oligonucleotide
  Sense strand starting at position 3743 of SEQ ID NO: 1243615
acaucuguauuugaaauga

SEQ ID NO: 1428867 - RNA, 19 nt, Artificial Sequence
  Description of Artificial Sequence: Synthetic oligonucleotide
  Antisense strand to SEQ ID NO: 1428866
ucauuucaaauacagaugu

SEQ ID NO: 1428868 - RNA, 19 nt, Artificial Sequence
  Description of Artificial Sequence: Synthetic oligonucleotide
  Sense strand starting at position 3763 of SEQ ID NO: 1243615
acagcuaucccuuguaaga

SEQ ID NO: 1428869 - RNA, 19 nt, Artificial Sequence
  Description of Artificial Sequence: Synthetic oligonucleotide
  Antisense strand to SEQ ID NO: 1428868
ucuuacaagggauagcugu

SEQ ID NO: 1428870 - RNA, 19 nt, Artificial Sequence
  Description of Artificial Sequence: Synthetic oligonucleotide
  Sense strand starting at position 3935 of SEQ ID NO: 1243615
uugauugcugcguucguaa

SEQ ID NO: 1428871 - RNA, 19 nt, Artificial Sequence
  Description of Artificial Sequence: Synthetic oligonucleotide
  Antisense strand to SEQ ID NO: 1428870
uuacgaacgcagcaaucaa

SEQ ID NO: 1428872 - RNA, 19 nt, Artificial Sequence
  Description of Artificial Sequence: Synthetic oligonucleotide
  Sense strand starting at position 3950 of SEQ ID NO: 1243615
guaauacacccuugcuaga

SEQ ID NO: 1428873 - RNA, 19 nt, Artificial Sequence
  Description of Artificial Sequence: Synthetic oligonucleotide
  Antisense strand to SEQ ID NO: 1428872
ucuagcaaggguguauuac

SEQ ID NO: 1428874 - RNA, 19 nt, Artificial Sequence
  Description of Artificial Sequence: Synthetic oligonucleotide
  Sense strand starting at position 41 of SEQ ID NO: 1243616
uuaaucuuaugcuugaugu

SEQ ID NO: 1428875 - RNA, 19 nt, Artificial Sequence
  Description of Artificial Sequence: Synthetic oligonucleotide
  Antisense strand to SEQ ID NO: 1428874
acaucaagcauaagauuaa

SEQ ID NO: 1428876 - RNA, 19 nt, Artificial Sequence
  Description of Artificial Sequence: Synthetic oligonucleotide
  Sense strand starting at position 63 of SEQ ID NO: 1243616
ucuauuaugcacugguaaa

SEQ ID NO: 1428877 - RNA, 19 nt, Artificial Sequence
  Description of Artificial Sequence: Synthetic oligonucleotide
  Antisense strand to SEQ ID NO: 1428876
uuuaccagugcauaauaga

SEQ ID NO: 1428878 - RNA, 19 nt, Artificial Sequence
  Description of Artificial Sequence: Synthetic oligonucleotide
  Sense strand starting at position 486 of SEQ ID NO: 1243616
uguuuaauauucuuggguu

SEQ ID NO: 1428879 - RNA, 19 nt, Artificial Sequence
  Description of Artificial Sequence: Synthetic oligonucleotide
  Antisense strand to SEQ ID NO: 1428878
aacccaagaauauuaaaca

SEQ ID NO: 1428880 - RNA, 19 nt, Artificial Sequence
  Description of Artificial Sequence: Synthetic oligonucleotide
  Sense strand starting at position 596 of SEQ ID NO: 1243616
gcaggcaucuaucuggaca

SEQ ID NO: 1428881 - RNA, 19 nt, Artificial Sequence
  Description of Artificial Sequence: Synthetic oligonucleotide
  Antisense strand to SEQ ID NO: 1428880
uguccagauagaugccugc

SEQ ID NO: 1428882 - RNA, 19 nt, Artificial Sequence
  Description of Artificial Sequence: Synthetic oligonucleotide
  Sense strand starting at position 631 of SEQ ID NO: 1243616
gcucuauuaggccacaaug

SEQ ID NO: 1428883 - RNA, 19 nt, Artificial Sequence
  Description of Artificial Sequence: Synthetic oligonucleotide
  Antisense strand to SEQ ID NO: 1428882
cauuguggccuaauagagc

SEQ ID NO: 1428884 - RNA, 19 nt, Artificial Sequence
  Description of Artificial Sequence: Synthetic oligonucleotide
  Sense strand starting at position 730 of SEQ ID NO: 1243616
ggacaaauaugaguauucu

SEQ ID NO: 1428885 - RNA, 19 nt, Artificial Sequence
  Description of Artificial Sequence: Synthetic oligonucleotide
  Antisense strand to SEQ ID NO: 1428884
agaauacucauauuugucc

SEQ ID NO: 1428886 - RNA, 19 nt, Artificial Sequence
  Description of Artificial Sequence: Synthetic oligonucleotide
  Sense strand starting at position 740 of SEQ ID NO: 1243616
gaguauucuucccugcuga

SEQ ID NO: 1428887 - RNA, 19 nt, Artificial Sequence
  Description of Artificial Sequence: Synthetic oligonucleotide
  Antisense strand to SEQ ID NO: 1428886
ucagcagggaagaauacuc

SEQ ID NO: 1428888 - RNA, 19 nt, Artificial Sequence
  Description of Artificial Sequence: Synthetic oligonucleotide
  Sense strand starting at position 859 of SEQ ID NO: 1243616
auaaacuucugagacugaa

SEQ ID NO: 1428889 - RNA, 19 nt, Artificial Sequence
  Description of Artificial Sequence: Synthetic oligonucleotide
  Antisense strand to SEQ ID NO: 1428888
uucagucucagaaguuuau

SEQ ID NO: 1428890 - RNA, 19 nt, Artificial Sequence
  Description of Artificial Sequence: Synthetic oligonucleotide
  Sense strand starting at position 883 of SEQ ID NO: 1243616
gguuauuagguuuauccac

SEQ ID NO: 1428891 - RNA, 19 nt, Artificial Sequence
  Description of Artificial Sequence: Synthetic oligonucleotide
  Antisense strand to SEQ ID NO: 1428890
guggauaaaccuaauaacc

SEQ ID NO: 1428892 - RNA, 19 nt, Artificial Sequence
  Description of Artificial Sequence: Synthetic oligonucleotide
  Sense strand starting at position 915 of SEQ ID NO: 1243616
acugaaacaucgcuuaagu

SEQ ID NO: 1428893 - RNA, 19 nt, Artificial Sequence
  Description of Artificial Sequence: Synthetic oligonucleotide
  Antisense strand to SEQ ID NO: 1428892
acuuaagcgauguuucagu

SEQ ID NO: 1428894 - RNA, 19 nt, Artificial Sequence
  Description of Artificial Sequence: Synthetic oligonucleotide
  Sense strand starting at position 917 of SEQ ID NO: 1243616
ugaaacaucgcuuaaguag

SEQ ID NO: 1428895 - RNA, 19 nt, Artificial Sequence
  Description of Artificial Sequence: Synthetic oligonucleotide
  Antisense strand to SEQ ID NO: 1428894
cuacuuaagcgauguuuca

SEQ ID NO: 1428896 - RNA, 19 nt, Artificial Sequence
  Description of Artificial Sequence: Synthetic oligonucleotide
  Sense strand starting at position 1026 of SEQ ID NO: 1243616
gcaguuauauucuuaaaug

SEQ ID NO: 1428897 - RNA, 19 nt, Artificial Sequence
  Description of Artificial Sequence: Synthetic oligonucleotide
  Antisense strand to SEQ ID NO: 1428896
cauuuaagaauauaacugc

SEQ ID NO: 1428898 - RNA, 19 nt, Artificial Sequence
  Description of Artificial Sequence: Synthetic oligonucleotide
  Sense strand starting at position 1185 of SEQ ID NO: 1243616
cugugaaaucauuagcuuc

SEQ ID NO: 1428899 - RNA, 19 nt, Artificial Sequence
  Description of Artificial Sequence: Synthetic oligonucleotide
  Antisense strand to SEQ ID NO: 1428898
gaagcuaaugauuucacag

SEQ ID NO: 1428900 - RNA, 19 nt, Artificial Sequence
  Description of Artificial Sequence: Synthetic oligonucleotide
  Sense strand starting at position 1230 of SEQ ID NO: 1243616
aguaacuucccuugaucag

SEQ ID NO: 1428901 - RNA, 19 nt, Artificial Sequence
  Description of Artificial Sequence: Synthetic oligonucleotide
  Antisense strand to SEQ ID NO: 1428900
cugaucaagggaaguuacu

SEQ ID NO: 1428902 - RNA, 19 nt, Artificial Sequence
  Description of Artificial Sequence: Synthetic oligonucleotide
  Sense strand starting at position 1239 of SEQ ID NO: 1243616
ccuugaucagcauggcaaa

SEQ ID NO: 1428903 - RNA, 19 nt, Artificial Sequence
  Description of Artificial Sequence: Synthetic oligonucleotide
  Antisense strand to SEQ ID NO: 1428902
uuugccaugcugaucaagg

SEQ ID NO: 1428904 - RNA, 19 nt, Artificial Sequence
  Description of Artificial Sequence: Synthetic oligonucleotide
  Sense strand starting at position 1293 of SEQ ID NO: 1243616
gucccucgcagagaacaua

SEQ ID NO: 1428905 - RNA, 19 nt, Artificial Sequence
  Description of Artificial Sequence: Synthetic oligonucleotide
  Antisense strand to SEQ ID NO: 1428904
uauguucucugcgagggac

SEQ ID NO: 1428906 - RNA, 19 nt, Artificial Sequence
  Description of Artificial Sequence: Synthetic oligonucleotide
  Sense strand starting at position 2525 of SEQ ID NO: 1243616
agaauuaaggcgggcuaga

SEQ ID NO: 1428907 - RNA, 19 nt, Artificial Sequence
  Description of Artificial Sequence: Synthetic oligonucleotide
  Antisense strand to SEQ ID NO: 1428906
ucuagcccgccuuaauucu

SEQ ID NO: 1428908 - RNA, 19 nt, Artificial Sequence
  Description of Artificial Sequence: Synthetic oligonucleotide
  Sense strand starting at position 2565 of SEQ ID NO: 1243616
cccguuugucuguuuaauc

SEQ ID NO: 1428909 - RNA, 19 nt, Artificial Sequence
  Description of Artificial Sequence: Synthetic oligonucleotide
  Antisense strand to SEQ ID NO: 1428908
gauuaaacagacaaacggg

SEQ ID NO: 1428910 - RNA, 19 nt, Artificial Sequence
  Description of Artificial Sequence: Synthetic oligonucleotide
  Sense strand starting at position 2603 of SEQ ID NO: 1243616
ugggcaaucgcguccacua

SEQ ID NO: 1428911 - RNA, 19 nt, Artificial Sequence
  Description of Artificial Sequence: Synthetic oligonucleotide
  Antisense strand to SEQ ID NO: 1428910
uaguggacgcgauugccca

SEQ ID NO: 1428912 - RNA, 19 nt, Artificial Sequence
  Description of Artificial Sequence: Synthetic oligonucleotide
  Sense strand starting at position 2648 of SEQ ID NO: 1243616
ccaagucugggcgagcuaa

SEQ ID NO: 1428913 - RNA, 19 nt, Artificial Sequence
  Description of Artificial Sequence: Synthetic oligonucleotide
  Antisense strand to SEQ ID NO: 1428912
uuagcucgcccagacuugg

SEQ ID NO: 1428914 - RNA, 19 nt, Artificial Sequence
  Description of Artificial Sequence: Synthetic oligonucleotide
  Sense strand starting at position 2737 of SEQ ID NO: 1243616
agguguuauacaugcugga

SEQ ID NO: 1428915 - RNA, 19 nt, Artificial Sequence
  Description of Artificial Sequence: Synthetic oligonucleotide
  Antisense strand to SEQ ID NO: 1428914
uccagcauguauaacaccu

SEQ ID NO: 1428916 - RNA, 19 nt, Artificial Sequence
  Description of Artificial Sequence: Synthetic oligonucleotide
  Sense strand starting at position 2784 of SEQ ID NO: 1243616
aaacgaagcucaguaagaa

SEQ ID NO: 1428917 - RNA, 19 nt, Artificial Sequence
  Description of Artificial Sequence: Synthetic oligonucleotide
  Antisense strand to SEQ ID NO: 1428916
uucuuacugagcuucguuu

SEQ ID NO: 1428918 - RNA, 19 nt, Artificial Sequence
  Description of Artificial Sequence: Synthetic oligonucleotide
  Sense strand starting at position 3034 of SEQ ID NO: 1243616
acaaacauugcguagggaa

SEQ ID NO: 1428919 - RNA, 19 nt, Artificial Sequence
  Description of Artificial Sequence: Synthetic oligonucleotide
  Antisense strand to SEQ ID NO: 1428918
uucccuacgcaauguuugu

SEQ ID NO: 1428920 - RNA, 19 nt, Artificial Sequence
  Description of Artificial Sequence: Synthetic oligonucleotide
  Sense strand starting at position 3036 of SEQ ID NO: 1243616
aaacauugcguagggaaga

SEQ ID NO: 1428921 - RNA, 19 nt, Artificial Sequence
  Description of Artificial Sequence: Synthetic oligonucleotide
  Antisense strand to SEQ ID NO: 1428920
ucuucccuacgcaauguuu

SEQ ID NO: 1428922 - RNA, 19 nt, Artificial Sequence
  Description of Artificial Sequence: Synthetic oligonucleotide
  Sense strand starting at position 3107 of SEQ ID NO: 1243616
ggaggaauuuaaugaagca

SEQ ID NO: 1428923 - RNA, 19 nt, Artificial Sequence
  Description of Artificial Sequence: Synthetic oligonucleotide
  Antisense strand to SEQ ID NO: 1428922
ugcuucauuaaauuccucc

SEQ ID NO: 1428924 - RNA, 19 nt, Artificial Sequence
  Description of Artificial Sequence: Synthetic oligonucleotide
  Sense strand starting at position 3184 of SEQ ID NO: 1243616
gaugacaguuugguaggaa

SEQ ID NO: 1428925 - RNA, 19 nt, Artificial Sequence
  Description of Artificial Sequence: Synthetic oligonucleotide
  Antisense strand to SEQ ID NO: 1428924
uuccuaccaaacugucauc

SEQ ID NO: 1428926 - RNA, 19 nt, Artificial Sequence
  Description of Artificial Sequence: Synthetic oligonucleotide
  Sense strand starting at position 3187 of SEQ ID NO: 1243616
gacaguuugguaggaagaa

SEQ ID NO: 1428927 - RNA, 19 nt, Artificial Sequence
  Description of Artificial Sequence: Synthetic oligonucleotide
  Antisense strand to SEQ ID NO: 1428926
uucuuccuaccaaacuguc

SEQ ID NO: 1428928 - RNA, 19 nt, Artificial Sequence
  Description of Artificial Sequence: Synthetic oligonucleotide
  Sense strand starting at position 3200 of SEQ ID NO: 1243616
gaagaaguuccacgccaga

SEQ ID NO: 1428929 - RNA, 19 nt, Artificial Sequence
  Description of Artificial Sequence: Synthetic oligonucleotide
  Antisense strand to SEQ ID NO: 1428928
ucuggcguggaacuucuuc

SEQ ID NO: 1428930 - RNA, 19 nt, Artificial Sequence
  Description of Artificial Sequence: Synthetic oligonucleotide
  Sense strand starting at position 3239 of SEQ ID NO: 1243616
agaaauacaugcccaggua

SEQ ID NO: 1428931 - RNA, 19 nt, Artificial Sequence
  Description of Artificial Sequence: Synthetic oligonucleotide
  Antisense strand to SEQ ID NO: 1428930
uaccugggcauguauuucu

SEQ ID NO: 1428932 - RNA, 19 nt, Artificial Sequence
  Description of Artificial Sequence: Synthetic oligonucleotide
  Sense strand starting at position 3242 of SEQ ID NO: 1243616
aauacaugcccagguaaga

SEQ ID NO: 1428933 - RNA, 19 nt, Artificial Sequence
  Description of Artificial Sequence: Synthetic oligonucleotide
  Antisense strand to SEQ ID NO: 1428932
ucuuaccugggcauguauu

SEQ ID NO: 1428934 - RNA, 19 nt, Artificial Sequence
  Description of Artificial Sequence: Synthetic oligonucleotide
  Sense strand starting at position 3256 of SEQ ID NO: 1243616
uaagaaguucuuggcggaa

SEQ ID NO: 1428935 - RNA, 19 nt, Artificial Sequence
  Description of Artificial Sequence: Synthetic oligonucleotide
  Antisense strand to SEQ ID NO: 1428934
uuccgccaagaacuucuua

SEQ ID NO: 1428936 - RNA, 19 nt, Artificial Sequence
  Description of Artificial Sequence: Synthetic oligonucleotide
  Sense strand starting at position 3351 of SEQ ID NO: 1243616
gggcuucccuaagaauuua

SEQ ID NO: 1428937 - RNA, 19 nt, Artificial Sequence
  Description of Artificial Sequence: Synthetic oligonucleotide
  Antisense strand to SEQ ID NO: 1428936
uaaauucuuagggaagccc

SEQ ID NO: 1428938 - RNA, 19 nt, Artificial Sequence
  Description of Artificial Sequence: Synthetic oligonucleotide
  Sense strand starting at position 3498 of SEQ ID NO: 1243616
gugccugcgccugugaaua

SEQ ID NO: 1428939 - RNA, 19 nt, Artificial Sequence
  Description of Artificial Sequence: Synthetic oligonucleotide
  Antisense strand to SEQ ID NO: 1428938
uauucacaggcgcaggcac

SEQ ID NO: 1428940 - RNA, 19 nt, Artificial Sequence
  Description of Artificial Sequence: Synthetic oligonucleotide
  Sense strand starting at position 3597 of SEQ ID NO: 1243616
cagagaacuuaggaaagau

SEQ ID NO: 1428941 - RNA, 19 nt, Artificial Sequence
  Description of Artificial Sequence: Synthetic oligonucleotide
  Antisense strand to SEQ ID NO: 1428940
aucuuuccuaaguucucug

SEQ ID NO: 1428942 - RNA, 19 nt, Artificial Sequence
  Description of Artificial Sequence: Synthetic oligonucleotide
  Sense strand starting at position 3711 of SEQ ID NO: 1243616
gggcaagacuuccugguuu

SEQ ID NO: 1428943 - RNA, 19 nt, Artificial Sequence
  Description of Artificial Sequence: Synthetic oligonucleotide
  Antisense strand to SEQ ID NO: 1428942
aaaccaggaagucuugccc

SEQ ID NO: 1428944 - RNA, 19 nt, Artificial Sequence
  Description of Artificial Sequence: Synthetic oligonucleotide
  Sense strand starting at position 3713 of SEQ ID NO: 1243616
gcaagacuuccugguuuag

SEQ ID NO: 1428945 - RNA, 19 nt, Artificial Sequence
  Description of Artificial Sequence: Synthetic oligonucleotide
  Antisense strand to SEQ ID NO: 1428944
cuaaaccaggaagucuugc

SEQ ID NO: 1428946 - RNA, 19 nt, Artificial Sequence
  Description of Artificial Sequence: Synthetic oligonucleotide
  Sense strand starting at position 3715 of SEQ ID NO: 1243616
aagacuuccugguuuagua

SEQ ID NO: 1428947 - RNA, 19 nt, Artificial Sequence
  Description of Artificial Sequence: Synthetic oligonucleotide
  Antisense strand to SEQ ID NO: 1428946
uacuaaaccaggaagucuu

SEQ ID NO: 1428948 - RNA, 19 nt, Artificial Sequence
  Description of Artificial Sequence: Synthetic oligonucleotide
  Sense strand starting at position 3719 of SEQ ID NO: 1243616
cuuccugguuuaguaagau

SEQ ID NO: 1428949 - RNA, 19 nt, Artificial Sequence
  Description of Artificial Sequence: Synthetic oligonucleotide
  Antisense strand to SEQ ID NO: 1428948
aucuuacuaaaccaggaag

SEQ ID NO: 1428950 - RNA, 19 nt, Artificial Sequence
  Description of Artificial Sequence: Synthetic oligonucleotide
  Sense strand starting at position 3725 of SEQ ID NO: 1243616
gguuuaguaagauguuuga

SEQ ID NO: 1428951 - RNA, 19 nt, Artificial Sequence
  Description of Artificial Sequence: Synthetic oligonucleotide
  Antisense strand to SEQ ID NO: 1428950
ucaaacaucuuacuaaacc

SEQ ID NO: 1428952 - RNA, 19 nt, Artificial Sequence
  Description of Artificial Sequence: Synthetic oligonucleotide
  Sense strand starting at position 3852 of SEQ ID NO: 1243616
ugcgguugccucuuacuuu

SEQ ID NO: 1428953 - RNA, 19 nt, Artificial Sequence
  Description of Artificial Sequence: Synthetic oligonucleotide
  Antisense strand to SEQ ID NO: 1428952
aaaguaagaggcaaccgca

SEQ ID NO: 1428954 - RNA, 19 nt, Artificial Sequence
  Description of Artificial Sequence: Synthetic oligonucleotide
  Sense strand starting at position 252 of SEQ ID NO: 1243617
aggaauauaucucccugca

SEQ ID NO: 1428955 - RNA, 19 nt, Artificial Sequence
  Description of Artificial Sequence: Synthetic oligonucleotide
  Antisense strand to SEQ ID NO: 1428954
ugcagggagauauauuccu

SEQ ID NO: 1428956 - RNA, 19 nt, Artificial Sequence
  Description of Artificial Sequence: Synthetic oligonucleotide
  Sense strand starting at position 687 of SEQ ID NO: 1243617
gcagaauugcuugaguaua

SEQ ID NO: 1428957 - RNA, 19 nt, Artificial Sequence
  Description of Artificial Sequence: Synthetic oligonucleotide
  Antisense strand to SEQ ID NO: 1428956
uauacucaagcaauucugc

SEQ ID NO: 1428958 - RNA, 19 nt, Artificial Sequence
  Description of Artificial Sequence: Synthetic oligonucleotide
  Sense strand starting at position 910 of SEQ ID NO: 1243617
ugucaauucucugcaggga

SEQ ID NO: 1428959 - RNA, 19 nt, Artificial Sequence
  Description of Artificial Sequence: Synthetic oligonucleotide
  Antisense strand to SEQ ID NO: 1428958
ucccugcagagaauugaca

SEQ ID NO: 1428960 - RNA, 19 nt, Artificial Sequence
  Description of Artificial Sequence: Synthetic oligonucleotide
  Sense strand starting at position 938 of SEQ ID NO: 1243617
cugcaagaggccugaagaa

SEQ ID NO: 1428961 - RNA, 19 nt, Artificial Sequence
  Description of Artificial Sequence: Synthetic oligonucleotide
  Antisense strand to SEQ ID NO: 1428960
uucuucaggccucuugcag

SEQ ID NO: 1428962 - RNA, 19 nt, Artificial Sequence
  Description of Artificial Sequence: Synthetic oligonucleotide
  Sense strand starting at position 1173 of SEQ ID NO: 1243617
uggaaauacuagccaaauc

SEQ ID NO: 1428963 - RNA, 19 nt, Artificial Sequence
  Description of Artificial Sequence: Synthetic oligonucleotide
  Antisense strand to SEQ ID NO: 1428962
gauuuggcuaguauuucca

SEQ ID NO: 1428964 - RNA, 19 nt, Artificial Sequence
  Description of Artificial Sequence: Synthetic oligonucleotide
  Sense strand starting at position 1183 of SEQ ID NO: 1243617
agccaaauccagggaguaa

SEQ ID NO: 1428965 - RNA, 19 nt, Artificial Sequence
  Description of Artificial Sequence: Synthetic oligonucleotide
  Antisense strand to SEQ ID NO: 1428964
uuacucccuggauuuggcu

SEQ ID NO: 1428966 - RNA, 19 nt, Artificial Sequence
  Description of Artificial Sequence: Synthetic oligonucleotide
  Sense strand starting at position 1511 of SEQ ID NO: 1243617
accuuugaagcauguaaua

SEQ ID NO: 1428967 - RNA, 19 nt, Artificial Sequence
  Description of Artificial Sequence: Synthetic oligonucleotide
  Antisense strand to SEQ ID NO: 1428966
uauuacaugcuucaaaggu

SEQ ID NO: 1428968 - RNA, 19 nt, Artificial Sequence
  Description of Artificial Sequence: Synthetic oligonucleotide
  Sense strand starting at position 1600 of SEQ ID NO: 1243617
agauuucggccuuguaaac

SEQ ID NO: 1428969 - RNA, 19 nt, Artificial Sequence
  Description of Artificial Sequence: Synthetic oligonucleotide
  Antisense strand to SEQ ID NO: 1428968
guuuacaaggccgaaaucu

SEQ ID NO: 1428970 - RNA, 19 nt, Artificial Sequence
  Description of Artificial Sequence: Synthetic oligonucleotide
  Sense strand starting at position 1714 of SEQ ID NO: 1243617
uccugauggccucaaacua

SEQ ID NO: 1428971 - RNA, 19 nt, Artificial Sequence
  Description of Artificial Sequence: Synthetic oligonucleotide
  Antisense strand to SEQ ID NO: 1428970
uaguuugaggccaucagga

SEQ ID NO: 1428972 - RNA, 19 nt, Artificial Sequence
  Description of Artificial Sequence: Synthetic oligonucleotide
  Sense strand starting at position 1881 of SEQ ID NO: 1243617
cuuguuuaacuagaaagua

SEQ ID NO: 1428973 - RNA, 19 nt, Artificial Sequence
  Description of Artificial Sequence: Synthetic oligonucleotide
  Antisense strand to SEQ ID NO: 1428972
uacuuucuaguuaaacaag

SEQ ID NO: 1428974 - RNA, 19 nt, Artificial Sequence
  Description of Artificial Sequence: Synthetic oligonucleotide
  Sense strand starting at position 1957 of SEQ ID NO: 1243617
cugacagucaacggagaaa

SEQ ID NO: 1428975 - RNA, 19 nt, Artificial Sequence
  Description of Artificial Sequence: Synthetic oligonucleotide
  Antisense strand to SEQ ID NO: 1428974
uuucuccguugacugucag

SEQ ID NO: 1428976 - RNA, 19 nt, Artificial Sequence
  Description of Artificial Sequence: Synthetic oligonucleotide
  Sense strand starting at position 2105 of SEQ ID NO: 1243617
ucggucuaaagagguaauu

SEQ ID NO: 1428977 - RNA, 19 nt, Artificial Sequence
  Description of Artificial Sequence: Synthetic oligonucleotide
  Antisense strand to SEQ ID NO: 1428976
aauuaccucuuuagaccga

SEQ ID NO: 1428978 - RNA, 19 nt, Artificial Sequence
  Description of Artificial Sequence: Synthetic oligonucleotide
  Sense strand starting at position 2115 of SEQ ID NO: 1243617
gagguaauuucugagaucc

SEQ ID NO: 1428979 - RNA, 19 nt, Artificial Sequence
  Description of Artificial Sequence: Synthetic oligonucleotide
  Antisense strand to SEQ ID NO: 1428978
ggaucucagaaauuaccuc

SEQ ID NO: 1428980 - RNA, 19 nt, Artificial Sequence
  Description of Artificial Sequence: Synthetic oligonucleotide
  Sense strand starting at position 2117 of SEQ ID NO: 1243617
gguaauuucugagauccaa

SEQ ID NO: 1428981 - RNA, 19 nt, Artificial Sequence
  Description of Artificial Sequence: Synthetic oligonucleotide
  Antisense strand to SEQ ID NO: 1428980
uuggaucucagaaauuacc

SEQ ID NO: 1428982 - RNA, 19 nt, Artificial Sequence
  Description of Artificial Sequence: Synthetic oligonucleotide
  Sense strand starting at position 2314 of SEQ ID NO: 1243617
ugcaccaaagcuugagaau

SEQ ID NO: 1428983 - RNA, 19 nt, Artificial Sequence
  Description of Artificial Sequence: Synthetic oligonucleotide
  Antisense strand to SEQ ID NO: 1428982
auucucaagcuuuggugca

SEQ ID NO: 1428984 - RNA, 19 nt, Artificial Sequence
  Description of Artificial Sequence: Synthetic oligonucleotide
  Sense strand starting at position 2315 of SEQ ID NO: 1243617
gcaccaaagcuugagaaua

SEQ ID NO: 1428985 - RNA, 19 nt, Artificial Sequence
  Description of Artificial Sequence: Synthetic oligonucleotide
  Antisense strand to SEQ ID NO: 1428984
uauucucaagcuuuggugc

SEQ ID NO: 1428986 - RNA, 19 nt, Artificial Sequence
  Description of Artificial Sequence: Synthetic oligonucleotide
  Sense strand starting at position 2581 of SEQ ID NO: 1243617
uuaaguagaugcucaugau

SEQ ID NO: 1428987 - RNA, 19 nt, Artificial Sequence
  Description of Artificial Sequence: Synthetic oligonucleotide
  Antisense strand to SEQ ID NO: 1428986
aucaugagcaucuacuuaa

SEQ ID NO: 1428988 - RNA, 19 nt, Artificial Sequence
  Description of Artificial Sequence: Synthetic oligonucleotide
  Sense strand starting at position 2582 of SEQ ID NO: 1243617
uaaguagaugcucaugaua

SEQ ID NO: 1428989 - RNA, 19 nt, Artificial Sequence
  Description of Artificial Sequence: Synthetic oligonucleotide
  Antisense strand to SEQ ID NO: 1428988
uaucaugagcaucuacuua

SEQ ID NO: 1428990 - RNA, 19 nt, Artificial Sequence
  Description of Artificial Sequence: Synthetic oligonucleotide
  Sense strand starting at position 2585 of SEQ ID NO: 1243617
guagaugcucaugauauuc

SEQ ID NO: 1428991 - RNA, 19 nt, Artificial Sequence
  Description of Artificial Sequence: Synthetic oligonucleotide
  Antisense strand to SEQ ID NO: 1428990
gaauaucaugagcaucuac

SEQ ID NO: 1428992 - RNA, 19 nt, Artificial Sequence
  Description of Artificial Sequence: Synthetic oligonucleotide
  Sense strand starting at position 2595 of SEQ ID NO: 1243617
augauauucuguguauuag

SEQ ID NO: 1428993 - RNA, 19 nt, Artificial Sequence
  Description of Artificial Sequence: Synthetic oligonucleotide
  Antisense strand to SEQ ID NO: 1428992
cuaauacacagaauaucau

SEQ ID NO: 1428994 - RNA, 19 nt, Artificial Sequence
  Description of Artificial Sequence: Synthetic oligonucleotide
  Sense strand starting at position 2673 of SEQ ID NO: 1243617
gaggcaaguccucaggacu

SEQ ID NO: 1428995 - RNA, 19 nt, Artificial Sequence
  Description of Artificial Sequence: Synthetic oligonucleotide
  Antisense strand to SEQ ID NO: 1428994
aguccugaggacuugccuc

SEQ ID NO: 1428996 - RNA, 19 nt, Artificial Sequence
  Description of Artificial Sequence: Synthetic oligonucleotide
  Sense strand starting at position 2676 of SEQ ID NO: 1243617
gcaaguccucaggacugua

SEQ ID NO: 1428997 - RNA, 19 nt, Artificial Sequence
  Description of Artificial Sequence: Synthetic oligonucleotide
  Antisense strand to SEQ ID NO: 1428996
uacaguccugaggacuugc

SEQ ID NO: 1428998 - RNA, 19 nt, Artificial Sequence
  Description of Artificial Sequence: Synthetic oligonucleotide
  Sense strand starting at position 2780 of SEQ ID NO: 1243617
ccacgcugagaauauauua

SEQ ID NO: 1428999 - RNA, 19 nt, Artificial Sequence
  Description of Artificial Sequence: Synthetic oligonucleotide
  Antisense strand to SEQ ID NO: 1428998
uaauauauucucagcgugg

SEQ ID NO: 1429000 - RNA, 19 nt, Artificial Sequence
  Description of Artificial Sequence: Synthetic oligonucleotide
  Sense strand starting at position 2911 of SEQ ID NO: 1243617
aggacauucgggcaacuua

SEQ ID NO: 1429001 - RNA, 19 nt, Artificial Sequence
  Description of Artificial Sequence: Synthetic oligonucleotide
  Antisense strand to SEQ ID NO: 1429000
uaaguugcccgaauguccu

SEQ ID NO: 1429002 - RNA, 19 nt, Artificial Sequence
  Description of Artificial Sequence: Synthetic oligonucleotide
  Sense strand starting at position 2921 of SEQ ID NO: 1243617
ggcaacuuaaguuguaaag

SEQ ID NO: 1429003 - RNA, 19 nt, Artificial Sequence
  Description of Artificial Sequence: Synthetic oligonucleotide
  Antisense strand to SEQ ID NO: 1429002
cuuuacaacuuaaguugcc

SEQ ID NO: 1429004 - RNA, 19 nt, Artificial Sequence
  Description of Artificial Sequence: Synthetic oligonucleotide
  Sense strand starting at position 2931 of SEQ ID NO: 1243617
guuguaaagacucaaguug

SEQ ID NO: 1429005 - RNA, 19 nt, Artificial Sequence
  Description of Artificial Sequence: Synthetic oligonucleotide
  Antisense strand to SEQ ID NO: 1429004
caacuugagucuuuacaac

SEQ ID NO: 1429006 - RNA, 19 nt, Artificial Sequence
  Description of Artificial Sequence: Synthetic oligonucleotide
  Sense strand starting at position 3064 of SEQ ID NO: 1243617
gccaaugcccauuaaguua

SEQ ID NO: 1429007 - RNA, 19 nt, Artificial Sequence
  Description of Artificial Sequence: Synthetic oligonucleotide
  Antisense strand to SEQ ID NO: 1429006
uaacuuaaugggcauuggc

SEQ ID NO: 1429008 - RNA, 19 nt, Artificial Sequence
  Description of Artificial Sequence: Synthetic oligonucleotide
  Sense strand starting at position 3238 of SEQ ID NO: 1243617
acacuuaagugucuacaaa

SEQ ID NO: 1429009 - RNA, 19 nt, Artificial Sequence
  Description of Artificial Sequence: Synthetic oligonucleotide
  Antisense strand to SEQ ID NO: 1429008
uuuguagacacuuaagugu

SEQ ID NO: 1429010 - RNA, 19 nt, Artificial Sequence
  Description of Artificial Sequence: Synthetic oligonucleotide
  Sense strand starting at position 3405 of SEQ ID NO: 1243617
cggaucuuucuacgacaac

SEQ ID NO: 1429011 - RNA, 19 nt, Artificial Sequence
  Description of Artificial Sequence: Synthetic oligonucleotide
  Antisense strand to SEQ ID NO: 1429010
guugucguagaaagauccg

SEQ ID NO: 1429012 - RNA, 19 nt, Artificial Sequence
  Description of Artificial Sequence: Synthetic oligonucleotide
  Sense strand starting at position 3487 of SEQ ID NO: 1243617
agacacugcugcucacaau

SEQ ID NO: 1429013 - RNA, 19 nt, Artificial Sequence
  Description of Artificial Sequence: Synthetic oligonucleotide
  Antisense strand to SEQ ID NO: 1429012
auugugagcagcagugucu

SEQ ID NO: 1429014 - RNA, 19 nt, Artificial Sequence
  Description of Artificial Sequence: Synthetic oligonucleotide
  Sense strand starting at position 3739 of SEQ ID NO: 1243617
ugaguuauacugcagcaca

SEQ ID NO: 1429015 - RNA, 19 nt, Artificial Sequence
  Description of Artificial Sequence: Synthetic oligonucleotide
  Antisense strand to SEQ ID NO: 1429014
ugugcugcaguauaacuca

SEQ ID NO: 1429016 - RNA, 19 nt, Artificial Sequence
  Description of Artificial Sequence: Synthetic oligonucleotide
  Sense strand starting at position 3809 of SEQ ID NO: 1243617
ggaucaaggaugugucucu

SEQ ID NO: 1429017 - RNA, 19 nt, Artificial Sequence
  Description of Artificial Sequence: Synthetic oligonucleotide
  Antisense strand to SEQ ID NO: 1429016
agagacacauccuugaucc

SEQ ID NO: 1429018 - RNA, 19 nt, Artificial Sequence
  Description of Artificial Sequence: Synthetic oligonucleotide
  Sense strand starting at position 3814 of SEQ ID NO: 1243617
aaggaugugucucugucaa

SEQ ID NO: 1429019 - RNA, 19 nt, Artificial Sequence
  Description of Artificial Sequence: Synthetic oligonucleotide
  Antisense strand to SEQ ID NO: 1429018
uugacagagacacauccuu

SEQ ID NO: 1429020 - RNA, 19 nt, Artificial Sequence
  Description of Artificial Sequence: Synthetic oligonucleotide
  Sense strand starting at position 3855 of SEQ ID NO: 1243617
aaagguuucuuuguggacu

SEQ ID NO: 1429021 - RNA, 19 nt, Artificial Sequence
  Description of Artificial Sequence: Synthetic oligonucleotide
  Antisense strand to SEQ ID NO: 1429020
aguccacaaagaaaccuuu

SEQ ID NO: 1429022 - RNA, 19 nt, Artificial Sequence
  Description of Artificial Sequence: Synthetic oligonucleotide
  Sense strand starting at position 3858 of SEQ ID NO: 1243617
gguuucuuuguggacucua

SEQ ID NO: 1429023 - RNA, 19 nt, Artificial Sequence
  Description of Artificial Sequence: Synthetic oligonucleotide
  Antisense strand to SEQ ID NO: 1429022
uagaguccacaaagaaacc

SEQ ID NO: 1429024 - RNA, 19 nt, Artificial Sequence
  Description of Artificial Sequence: Synthetic oligonucleotide
  Sense strand starting at position 3863 of SEQ ID NO: 1243617
cuuuguggacucuaaauuc

SEQ ID NO: 1429025 - RNA, 19 nt, Artificial Sequence
  Description of Artificial Sequence: Synthetic oligonucleotide
  Antisense strand to SEQ ID NO: 1429024
gaauuuagaguccacaaag

SEQ ID NO: 1429026 - RNA, 19 nt, Artificial Sequence
  Description of Artificial Sequence: Synthetic oligonucleotide
  Sense strand starting at position 3919 of SEQ ID NO: 1243617
ccacauggucuugauaacu

SEQ ID NO: 1429027 - RNA, 19 nt, Artificial Sequence
  Description of Artificial Sequence: Synthetic oligonucleotide
  Antisense strand to SEQ ID NO: 1429026
aguuaucaagaccaugugg

SEQ ID NO: 1429028 - RNA, 19 nt, Artificial Sequence
  Description of Artificial Sequence: Synthetic oligonucleotide
  Sense strand starting at position 3925 of SEQ ID NO: 1243617
ggucuugauaacugugacu

SEQ ID NO: 1429029 - RNA, 19 nt, Artificial Sequence
  Description of Artificial Sequence: Synthetic oligonucleotide
  Antisense strand to SEQ ID NO: 1429028
agucacaguuaucaagacc

SEQ ID NO: 1429030 - RNA, 19 nt, Artificial Sequence
  Description of Artificial Sequence: Synthetic oligonucleotide
  Sense strand starting at position 3927 of SEQ ID NO: 1243617
ucuugauaacugugacuuu

SEQ ID NO: 1429031 - RNA, 19 nt, Artificial Sequence
  Description of Artificial Sequence: Synthetic oligonucleotide
  Antisense strand to SEQ ID NO: 1429030
aaagucacaguuaucaaga

SEQ ID NO: 1429032 - RNA, 19 nt, Artificial Sequence
  Description of Artificial Sequence: Synthetic oligonucleotide
  Sense strand starting at position 3930 of SEQ ID NO: 1243617
ugauaacugugacuuuaua

SEQ ID NO: 1429033 - RNA, 19 nt, Artificial Sequence
  Description of Artificial Sequence: Synthetic oligonucleotide
  Antisense strand to SEQ ID NO: 1429032
uauaaagucacaguuauca

SEQ ID NO: 1429034 - RNA, 19 nt, Artificial Sequence
  Description of Artificial Sequence: Synthetic oligonucleotide
  Sense strand starting at position 50 of SEQ ID NO: 1243618
cugaaaugcucagccaucu

SEQ ID NO: 1429035 - RNA, 19 nt, Artificial Sequence
  Description of Artificial Sequence: Synthetic oligonucleotide
  Antisense strand to SEQ ID NO: 1429034
agauggcugagcauuucag

SEQ ID NO: 1429036 - RNA, 19 nt, Artificial Sequence
  Description of Artificial Sequence: Synthetic oligonucleotide
  Sense strand starting at position 62 of SEQ ID NO: 1243618
gccaucugauaaucuaagu

SEQ ID NO: 1429037 - RNA, 19 nt, Artificial Sequence
  Description of Artificial Sequence: Synthetic oligonucleotide
  Antisense strand to SEQ ID NO: 1429036
acuuagauuaucagauggc

SEQ ID NO: 1429038 - RNA, 19 nt, Artificial Sequence
  Description of Artificial Sequence: Synthetic oligonucleotide
  Sense strand starting at position 67 of SEQ ID NO: 1243618
cugauaaucuaagugccaa

SEQ ID NO: 1429039 - RNA, 19 nt, Artificial Sequence
  Description of Artificial Sequence: Synthetic oligonucleotide
  Antisense strand to SEQ ID NO: 1429038
uuggcacuuagauuaucag

SEQ ID NO: 1429040 - RNA, 19 nt, Artificial Sequence
  Description of Artificial Sequence: Synthetic oligonucleotide
  Sense strand starting at position 471 of SEQ ID NO: 1243618
agagaaugcuggucugucu

SEQ ID NO: 1429041 - RNA, 19 nt, Artificial Sequence
  Description of Artificial Sequence: Synthetic oligonucleotide
  Antisense strand to SEQ ID NO: 1429040
agacagaccagcauucucu

SEQ ID NO: 1429042 - RNA, 19 nt, Artificial Sequence
  Description of Artificial Sequence: Synthetic oligonucleotide
  Sense strand starting at position 513 of SEQ ID NO: 1243618
ugcuacuagucagucuauu

SEQ ID NO: 1429043 - RNA, 19 nt, Artificial Sequence
  Description of Artificial Sequence: Synthetic oligonucleotide
  Antisense strand to SEQ ID NO: 1429042
aauagacugacuaguagca

SEQ ID NO: 1429044 - RNA, 19 nt, Artificial Sequence
  Description of Artificial Sequence: Synthetic oligonucleotide
  Sense strand starting at position 521 of SEQ ID NO: 1243618
gucagucuauuguuaggca

SEQ ID NO: 1429045 - RNA, 19 nt, Artificial Sequence
  Description of Artificial Sequence: Synthetic oligonucleotide
  Antisense strand to SEQ ID NO: 1429044
ugccuaacaauagacugac

SEQ ID NO: 1429046 - RNA, 19 nt, Artificial Sequence
  Description of Artificial Sequence: Synthetic oligonucleotide
  Sense strand starting at position 548 of SEQ ID NO: 1243618
cuuagagauuuguaaggac

SEQ ID NO: 1429047 - RNA, 19 nt, Artificial Sequence
  Description of Artificial Sequence: Synthetic oligonucleotide
  Antisense strand to SEQ ID NO: 1429046
guccuuacaaaucucuaag

SEQ ID NO: 1429048 - RNA, 19 nt, Artificial Sequence
  Description of Artificial Sequence: Synthetic oligonucleotide
  Sense strand starting at position 556 of SEQ ID NO: 1243618
uuuguaaggacuugggaac

SEQ ID NO: 1429049 - RNA, 19 nt, Artificial Sequence
  Description of Artificial Sequence: Synthetic oligonucleotide
  Antisense strand to SEQ ID NO: 1429048
guucccaaguccuuacaaa

SEQ ID NO: 1429050 - RNA, 19 nt, Artificial Sequence
  Description of Artificial Sequence: Synthetic oligonucleotide
  Sense strand starting at position 607 of SEQ ID NO: 1243618
cugcauguaaauuguguua

SEQ ID NO: 1429051 - RNA, 19 nt, Artificial Sequence
  Description of Artificial Sequence: Synthetic oligonucleotide
  Antisense strand to SEQ ID NO: 1429050
uaacacaauuuacaugcag

SEQ ID NO: 1429052 - RNA, 19 nt, Artificial Sequence
  Description of Artificial Sequence: Synthetic oligonucleotide
  Sense strand starting at position 610 of SEQ ID NO: 1243618
cauguaaauuguguuaugu

SEQ ID NO: 1429053 - RNA, 19 nt, Artificial Sequence
  Description of Artificial Sequence: Synthetic oligonucleotide
  Antisense strand to SEQ ID NO: 1429052
acauaacacaauuuacaug

SEQ ID NO: 1429054 - RNA, 19 nt, Artificial Sequence
  Description of Artificial Sequence: Synthetic oligonucleotide
  Sense strand starting at position 618 of SEQ ID NO: 1243618
uuguguuauguuuggacag

SEQ ID NO: 1429055 - RNA, 19 nt, Artificial Sequence
  Description of Artificial Sequence: Synthetic oligonucleotide
  Antisense strand to SEQ ID NO: 1429054
cuguccaaacauaacacaa

SEQ ID NO: 1429056 - RNA, 19 nt, Artificial Sequence
  Description of Artificial Sequence: Synthetic oligonucleotide
  Sense strand starting at position 668 of SEQ ID NO: 1243618
gugcuuagaagagaccuua

SEQ ID NO: 1429057 - RNA, 19 nt, Artificial Sequence
  Description of Artificial Sequence: Synthetic oligonucleotide
  Antisense strand to SEQ ID NO: 1429056
uaaggucucuucuaagcac

SEQ ID NO: 1429058 - RNA, 19 nt, Artificial Sequence
  Description of Artificial Sequence: Synthetic oligonucleotide
  Sense strand starting at position 694 of SEQ ID NO: 1243618
ucucuaggucuauggcaaa

SEQ ID NO: 1429059 - RNA, 19 nt, Artificial Sequence
  Description of Artificial Sequence: Synthetic oligonucleotide
  Antisense strand to SEQ ID NO: 1429058
uuugccauagaccuagaga

SEQ ID NO: 1429060 - RNA, 19 nt, Artificial Sequence
  Description of Artificial Sequence: Synthetic oligonucleotide
  Sense strand starting at position 989 of SEQ ID NO: 1243618
agucauuccuuaccucgaa

SEQ ID NO: 1429061 - RNA, 19 nt, Artificial Sequence
  Description of Artificial Sequence: Synthetic oligonucleotide
  Antisense strand to SEQ ID NO: 1429060
uucgagguaaggaaugacu

SEQ ID NO: 1429062 - RNA, 19 nt, Artificial Sequence
  Description of Artificial Sequence: Synthetic oligonucleotide
  Sense strand starting at position 1217 of SEQ ID NO: 1243618
ggacuuagauuccugggca

SEQ ID NO: 1429063 - RNA, 19 nt, Artificial Sequence
  Description of Artificial Sequence: Synthetic oligonucleotide
  Antisense strand to SEQ ID NO: 1429062
ugcccaggaaucuaagucc

SEQ ID NO: 1429064 - RNA, 19 nt, Artificial Sequence
  Description of Artificial Sequence: Synthetic oligonucleotide
  Sense strand starting at position 1218 of SEQ ID NO: 1243618
gacuuagauuccugggcag

SEQ ID NO: 1429065 - RNA, 19 nt, Artificial Sequence
  Description of Artificial Sequence: Synthetic oligonucleotide
  Antisense strand to SEQ ID NO: 1429064
cugcccaggaaucuaaguc

SEQ ID NO: 1429066 - RNA, 19 nt, Artificial Sequence
  Description of Artificial Sequence: Synthetic oligonucleotide
  Sense strand starting at position 1220 of SEQ ID NO: 1243618
cuuagauuccugggcagag

SEQ ID NO: 1429067 - RNA, 19 nt, Artificial Sequence
  Description of Artificial Sequence: Synthetic oligonucleotide
  Antisense strand to SEQ ID NO: 1429066
cucugcccaggaaucuaag

SEQ ID NO: 1429068 - RNA, 19 nt, Artificial Sequence
  Description of Artificial Sequence: Synthetic oligonucleotide
  Sense strand starting at position 1221 of SEQ ID NO: 1243618
uuagauuccugggcagaga

SEQ ID NO: 1429069 - RNA, 19 nt, Artificial Sequence
  Description of Artificial Sequence: Synthetic oligonucleotide
  Antisense strand to SEQ ID NO: 1429068
ucucugcccaggaaucuaa

SEQ ID NO: 1429070 - RNA, 19 nt, Artificial Sequence
  Description of Artificial Sequence: Synthetic oligonucleotide
  Sense strand starting at position 1403 of SEQ ID NO: 1243618
ggacuuccgcugugucaag

SEQ ID NO: 1429071 - RNA, 19 nt, Artificial Sequence
  Description of Artificial Sequence: Synthetic oligonucleotide
  Antisense strand to SEQ ID NO: 1429070
cuugacacagcggaagucc

SEQ ID NO: 1429072 - RNA, 19 nt, Artificial Sequence
  Description of Artificial Sequence: Synthetic oligonucleotide
  Sense strand starting at position 1556 of SEQ ID NO: 1243618
gagggagaucccugccgau

SEQ ID NO: 1429073 - RNA, 19 nt, Artificial Sequence
  Description of Artificial Sequence: Synthetic oligonucleotide
  Antisense strand to SEQ ID NO: 1429072
aucggcagggaucucccuc

SEQ ID NO: 1429074 - RNA, 19 nt, Artificial Sequence
  Description of Artificial Sequence: Synthetic oligonucleotide
  Sense strand starting at position 2230 of SEQ ID NO: 1243618
agagaaguguaagguagau

SEQ ID NO: 1429075 - RNA, 19 nt, Artificial Sequence
  Description of Artificial Sequence: Synthetic oligonucleotide
  Antisense strand to SEQ ID NO: 1429074
aucuaccuuacacuucucu

SEQ ID NO: 1429076 - RNA, 19 nt, Artificial Sequence
  Description of Artificial Sequence: Synthetic oligonucleotide
  Sense strand starting at position 2280 of SEQ ID NO: 1243618
uaggguuccugaugaaauc

SEQ ID NO: 1429077 - RNA, 19 nt, Artificial Sequence
  Description of Artificial Sequence: Synthetic oligonucleotide
  Antisense strand to SEQ ID NO: 1429076
gauuucaucaggaacccua

SEQ ID NO: 1429078 - RNA, 19 nt, Artificial Sequence
  Description of Artificial Sequence: Synthetic oligonucleotide
  Sense strand starting at position 2351 of SEQ ID NO: 1243618
gggugugaguacccuaagu

SEQ ID NO: 1429079 - RNA, 19 nt, Artificial Sequence
  Description of Artificial Sequence: Synthetic oligonucleotide
  Antisense strand to SEQ ID NO: 1429078
acuuaggguacucacaccc

SEQ ID NO: 1429080 - RNA, 19 nt, Artificial Sequence
  Description of Artificial Sequence: Synthetic oligonucleotide
  Sense strand starting at position 2353 of SEQ ID NO: 1243618
gugugaguacccuaagugu

SEQ ID NO: 1429081 - RNA, 19 nt, Artificial Sequence
  Description of Artificial Sequence: Synthetic oligonucleotide
  Antisense strand to SEQ ID NO: 1429080
acacuuaggguacucacac

SEQ ID NO: 1429082 - RNA, 19 nt, Artificial Sequence
  Description of Artificial Sequence: Synthetic oligonucleotide
  Sense strand starting at position 2370 of SEQ ID NO: 1243618
guauucuucugagauguag

SEQ ID NO: 1429083 - RNA, 19 nt, Artificial Sequence
  Description of Artificial Sequence: Synthetic oligonucleotide
  Antisense strand to SEQ ID NO: 1429082
cuacaucucagaagaauac

SEQ ID NO: 1429084 - RNA, 19 nt, Artificial Sequence
  Description of Artificial Sequence: Synthetic oligonucleotide
  Sense strand starting at position 2376 of SEQ ID NO: 1243618
uucugagauguaggccauu

SEQ ID NO: 1429085 - RNA, 19 nt, Artificial Sequence
  Description of Artificial Sequence: Synthetic oligonucleotide
  Antisense strand to SEQ ID NO: 1429084
aauggccuacaucucagaa

SEQ ID NO: 1429086 - RNA, 19 nt, Artificial Sequence
  Description of Artificial Sequence: Synthetic oligonucleotide
  Sense strand starting at position 2472 of SEQ ID NO: 1243618
cugagaccuuccugaacau

SEQ ID NO: 1429087 - RNA, 19 nt, Artificial Sequence
  Description of Artificial Sequence: Synthetic oligonucleotide
  Antisense strand to SEQ ID NO: 1429086
auguucaggaaggucucag

SEQ ID NO: 1429088 - RNA, 19 nt, Artificial Sequence
  Description of Artificial Sequence: Synthetic oligonucleotide
  Sense strand starting at position 2505 of SEQ ID NO: 1243618
gcccucuguuccuuccaga

SEQ ID NO: 1429089 - RNA, 19 nt, Artificial Sequence
  Description of Artificial Sequence: Synthetic oligonucleotide
  Antisense strand to SEQ ID NO: 1429088
ucuggaaggaacagagggc

SEQ ID NO: 1429090 - RNA, 19 nt, Artificial Sequence
  Description of Artificial Sequence: Synthetic oligonucleotide
  Sense strand starting at position 2959 of SEQ ID NO: 1243618
agauuaaagugagagaaga

SEQ ID NO: 1429091 - RNA, 19 nt, Artificial Sequence
  Description of Artificial Sequence: Synthetic oligonucleotide
  Antisense strand to SEQ ID NO: 1429090
ucuucucucacuuuaaucu

SEQ ID NO: 1429092 - RNA, 19 nt, Artificial Sequence
  Description of Artificial Sequence: Synthetic oligonucleotide
  Sense strand starting at position 3127 of SEQ ID NO: 1243618
gugacaguguguucaucuu

SEQ ID NO: 1429093 - RNA, 19 nt, Artificial Sequence
  Description of Artificial Sequence: Synthetic oligonucleotide
  Antisense strand to SEQ ID NO: 1429092
aagaugaacacacugucac

SEQ ID NO: 1429094 - RNA, 19 nt, Artificial Sequence
  Description of Artificial Sequence: Synthetic oligonucleotide
  Sense strand starting at position 3280 of SEQ ID NO: 1243618
aggccuugcugggugagua

SEQ ID NO: 1429095 - RNA, 19 nt, Artificial Sequence
  Description of Artificial Sequence: Synthetic oligonucleotide
  Antisense strand to SEQ ID NO: 1429094
uacucacccagcaaggccu

SEQ ID NO: 1429096 - RNA, 19 nt, Artificial Sequence
  Description of Artificial Sequence: Synthetic oligonucleotide
  Sense strand starting at position 3365 of SEQ ID NO: 1243618
cagagaucauuugguccaa

SEQ ID NO: 1429097 - RNA, 19 nt, Artificial Sequence
  Description of Artificial Sequence: Synthetic oligonucleotide
  Antisense strand to SEQ ID NO: 1429096
uuggaccaaaugaucucug

SEQ ID NO: 1429098 - RNA, 19 nt, Artificial Sequence
  Description of Artificial Sequence: Synthetic oligonucleotide
  Sense strand starting at position 3410 of SEQ ID NO: 1243618
uaugguguccuccaugagu

SEQ ID NO: 1429099 - RNA, 19 nt, Artificial Sequence
  Description of Artificial Sequence: Synthetic oligonucleotide
  Antisense strand to SEQ ID NO: 1429098
acucauggaggacaccaua

SEQ ID NO: 1429100 - RNA, 19 nt, Artificial Sequence
  Description of Artificial Sequence: Synthetic oligonucleotide
  Sense strand starting at position 3412 of SEQ ID NO: 1243618
ugguguccuccaugagugu

SEQ ID NO: 1429101 - RNA, 19 nt, Artificial Sequence
  Description of Artificial Sequence: Synthetic oligonucleotide
  Antisense strand to SEQ ID NO: 1429100
acacucauggaggacacca

SEQ ID NO: 1429102 - RNA, 19 nt, Artificial Sequence
  Description of Artificial Sequence: Synthetic oligonucleotide
  Sense strand starting at position 3521 of SEQ ID NO: 1243618
ggagguaacucaguucugu

SEQ ID NO: 1429103 - RNA, 19 nt, Artificial Sequence
  Description of Artificial Sequence: Synthetic oligonucleotide
  Antisense strand to SEQ ID NO: 1429102
acagaacugaguuaccucc

SEQ ID NO: 1429104 - RNA, 19 nt, Artificial Sequence
  Description of Artificial Sequence: Synthetic oligonucleotide
  Sense strand starting at position 3536 of SEQ ID NO: 1243618
cuguuccugugacagacau

SEQ ID NO: 1429105 - RNA, 19 nt, Artificial Sequence
  Description of Artificial Sequence: Synthetic oligonucleotide
  Antisense strand to SEQ ID NO: 1429104
augucugucacaggaacag

SEQ ID NO: 1429106 - RNA, 19 nt, Artificial Sequence
  Description of Artificial Sequence: Synthetic oligonucleotide
  Sense strand starting at position 3645 of SEQ ID NO: 1243618
gggugagccaaauaucacu

SEQ ID NO: 1429107 - RNA, 19 nt, Artificial Sequence
  Description of Artificial Sequence: Synthetic oligonucleotide
  Antisense strand to SEQ ID NO: 1429106
agugauauuuggcucaccc

SEQ ID NO: 1429108 - RNA, 19 nt, Artificial Sequence
  Description of Artificial Sequence: Synthetic oligonucleotide
  Sense strand starting at position 3811 of SEQ ID NO: 1243618
uaaagagucuagggcuuaa

SEQ ID NO: 1429109 - RNA, 19 nt, Artificial Sequence
  Description of Artificial Sequence: Synthetic oligonucleotide
  Antisense strand to SEQ ID NO: 1429108
uuaagcccuagacucuuua

SEQ ID NO: 1429110 - RNA, 19 nt, Artificial Sequence
  Description of Artificial Sequence: Synthetic oligonucleotide
  Sense strand starting at position 3815 of SEQ ID NO: 1243618
gagucuagggcuuaacuuu

SEQ ID NO: 1429111 - RNA, 19 nt, Artificial Sequence
  Description of Artificial Sequence: Synthetic oligonucleotide
  Antisense strand to SEQ ID NO: 1429110
aaaguuaagcccuagacuc

SEQ ID NO: 1429112 - RNA, 19 nt, Artificial Sequence
  Description of Artificial Sequence: Synthetic oligonucleotide
  Sense strand starting at position 3847 of SEQ ID NO: 1243618
ugagaaaccugagggagaa

SEQ ID NO: 1429113 - RNA, 19 nt, Artificial Sequence
  Description of Artificial Sequence: Synthetic oligonucleotide
  Antisense strand to SEQ ID NO: 1429112
uucucccucagguuucuca

SEQ ID NO: 1429114 - RNA, 19 nt, Artificial Sequence
  Description of Artificial Sequence: Synthetic oligonucleotide
  Sense strand starting at position 253 of SEQ ID NO: 1243619
agauuaaagugagagaaga

SEQ ID NO: 1429115 - RNA, 19 nt, Artificial Sequence
  Description of Artificial Sequence: Synthetic oligonucleotide
  Antisense strand to SEQ ID NO: 1429114
ucuucucucacuuuaaucu

SEQ ID NO: 1429116 - RNA, 19 nt, Artificial Sequence
  Description of Artificial Sequence: Synthetic oligonucleotide
  Sense strand starting at position 421 of SEQ ID NO: 1243619
gugacaguguguucaucuu

SEQ ID NO: 1429117 - RNA, 19 nt, Artificial Sequence
  Description of Artificial Sequence: Synthetic oligonucleotide
  Antisense strand to SEQ ID NO: 1429116
aagaugaacacacugucac

SEQ ID NO: 1429118 - RNA, 19 nt, Artificial Sequence
  Description of Artificial Sequence: Synthetic oligonucleotide
  Sense strand starting at position 574 of SEQ ID NO: 1243619
aggccuugcugggugagua

SEQ ID NO: 1429119 - RNA, 19 nt, Artificial Sequence
  Description of Artificial Sequence: Synthetic oligonucleotide
  Antisense strand to SEQ ID NO: 1429118
uacucacccagcaaggccu

SEQ ID NO: 1429120 - RNA, 19 nt, Artificial Sequence
  Description of Artificial Sequence: Synthetic oligonucleotide
  Sense strand starting at position 659 of SEQ ID NO: 1243619
cagagaucauuugguccaa

SEQ ID NO: 1429121 - RNA, 19 nt, Artificial Sequence
  Description of Artificial Sequence: Synthetic oligonucleotide
  Antisense strand to SEQ ID NO: 1429120
uuggaccaaaugaucucug

SEQ ID NO: 1429122 - RNA, 19 nt, Artificial Sequence
  Description of Artificial Sequence: Synthetic oligonucleotide
  Sense strand starting at position 704 of SEQ ID NO: 1243619
uaugguguccuccaugagu

SEQ ID NO: 1429123 - RNA, 19 nt, Artificial Sequence
  Description of Artificial Sequence: Synthetic oligonucleotide
  Antisense strand to SEQ ID NO: 1429122
acucauggaggacaccaua

SEQ ID NO: 1429124 - RNA, 19 nt, Artificial Sequence
  Description of Artificial Sequence: Synthetic oligonucleotide
  Sense strand starting at position 706 of SEQ ID NO: 1243619
ugguguccuccaugagugu

SEQ ID NO: 1429125 - RNA, 19 nt, Artificial Sequence
  Description of Artificial Sequence: Synthetic oligonucleotide
  Antisense strand to SEQ ID NO: 1429124
acacucauggaggacacca

SEQ ID NO: 1429126 - RNA, 19 nt, Artificial Sequence
  Description of Artificial Sequence: Synthetic oligonucleotide
  Sense strand starting at position 815 of SEQ ID NO: 1243619
ggagguaacucaguucugu

SEQ ID NO: 1429127 - RNA, 19 nt, Artificial Sequence
  Description of Artificial Sequence: Synthetic oligonucleotide
  Antisense strand to SEQ ID NO: 1429126
acagaacugaguuaccucc

SEQ ID NO: 1429128 - RNA, 19 nt, Artificial Sequence
  Description of Artificial Sequence: Synthetic oligonucleotide
  Sense strand starting at position 939 of SEQ ID NO: 1243619
gggugagccaaauaucacu

SEQ ID NO: 1429129 - RNA, 19 nt, Artificial Sequence
  Description of Artificial Sequence: Synthetic oligonucleotide
  Antisense strand to SEQ ID NO: 1429128
agugauauuuggcucaccc

SEQ ID NO: 1429130 - RNA, 19 nt, Artificial Sequence
  Description of Artificial Sequence: Synthetic oligonucleotide
  Sense strand starting at position 1109 of SEQ ID NO: 1243619
gagucuagggcuuaacuuu

SEQ ID NO: 1429131 - RNA, 19 nt, Artificial Sequence
  Description of Artificial Sequence: Synthetic oligonucleotide
  Antisense strand to SEQ ID NO: 1429130
aaaguuaagcccuagacuc

SEQ ID NO: 1429132 - RNA, 19 nt, Artificial Sequence
  Description of Artificial Sequence: Synthetic oligonucleotide
  Sense strand starting at position 1141 of SEQ ID NO: 1243619
ugagaaaccugagggagaa

SEQ ID NO: 1429133 - RNA, 19 nt, Artificial Sequence
  Description of Artificial Sequence: Synthetic oligonucleotide
  Antisense strand to SEQ ID NO: 1429132
uucucccucagguuucuca

SEQ ID NO: 1429134 - RNA, 19 nt, Artificial Sequence
  Description of Artificial Sequence: Synthetic oligonucleotide
  Sense strand starting at position 1424 of SEQ ID NO: 1243619
aggaguuaacucugccaag

SEQ ID NO: 1429135 - RNA, 19 nt, Artificial Sequence
  Description of Artificial Sequence: Synthetic oligonucleotide
  Antisense strand to SEQ ID NO: 1429134
cuuggcagaguuaacuccu

SEQ ID NO: 1429136 - RNA, 19 nt, Artificial Sequence
  Description of Artificial Sequence: Synthetic oligonucleotide
  Sense strand starting at position 1920 of SEQ ID NO: 1243619
gaacgaaacuccgaugaag

SEQ ID NO: 1429137 - RNA, 19 nt, Artificial Sequence
  Description of Artificial Sequence: Synthetic oligonucleotide
  Antisense strand to SEQ ID NO: 1429136
cuucaucggaguuucguuc

SEQ ID NO: 1429138 - RNA, 19 nt, Artificial Sequence
  Description of Artificial Sequence: Synthetic oligonucleotide
  Sense strand starting at position 1989 of SEQ ID NO: 1243619
ucuguauagugacaaccaa

SEQ ID NO: 1429139 - RNA, 19 nt, Artificial Sequence
  Description of Artificial Sequence: Synthetic oligonucleotide
  Antisense strand to SEQ ID NO: 1429138
uugguugucacuauacaga

SEQ ID NO: 1429140 - RNA, 19 nt, Artificial Sequence
  Description of Artificial Sequence: Synthetic oligonucleotide
  Sense strand starting at position 2196 of SEQ ID NO: 1243619
gagugaucccuuuguaccu

SEQ ID NO: 1429141 - RNA, 19 nt, Artificial Sequence
  Description of Artificial Sequence: Synthetic oligonucleotide
  Antisense strand to SEQ ID NO: 1429140
agguacaaagggaucacuc

SEQ ID NO: 1429142 - RNA, 19 nt, Artificial Sequence
  Description of Artificial Sequence: Synthetic oligonucleotide
  Sense strand starting at position 2206 of SEQ ID NO: 1243619
uuuguaccuguagggauau

SEQ ID NO: 1429143 - RNA, 19 nt, Artificial Sequence
  Description of Artificial Sequence: Synthetic oligonucleotide
  Antisense strand to SEQ ID NO: 1429142
auaucccuacagguacaaa

SEQ ID NO: 1429144 - RNA, 19 nt, Artificial Sequence
  Description of Artificial Sequence: Synthetic oligonucleotide
  Sense strand starting at position 2295 of SEQ ID NO: 1243619
agacuuauuuaaggagaag

SEQ ID NO: 1429145 - RNA, 19 nt, Artificial Sequence
  Description of Artificial Sequence: Synthetic oligonucleotide
  Antisense strand to SEQ ID NO: 1429144
cuucuccuuaaauaagucu

SEQ ID NO: 1429146 - RNA, 19 nt, Artificial Sequence
  Description of Artificial Sequence: Synthetic oligonucleotide
  Sense strand starting at position 2307 of SEQ ID NO: 1243619
ggagaagccuggcucauaa

SEQ ID NO: 1429147 - RNA, 19 nt, Artificial Sequence
  Description of Artificial Sequence: Synthetic oligonucleotide
  Antisense strand to SEQ ID NO: 1429146
uuaugagccaggcuucucc

SEQ ID NO: 1429148 - RNA, 19 nt, Artificial Sequence
  Description of Artificial Sequence: Synthetic oligonucleotide
  Sense strand starting at position 2326 of SEQ ID NO: 1243619
gggaguccugcugguguau

SEQ ID NO: 1429149 - RNA, 19 nt, Artificial Sequence
  Description of Artificial Sequence: Synthetic oligonucleotide
  Antisense strand to SEQ ID NO: 1429148
auacaccagcaggacuccc

SEQ ID NO: 1429150 - RNA, 19 nt, Artificial Sequence
  Description of Artificial Sequence: Synthetic oligonucleotide
  Sense strand starting at position 2446 of SEQ ID NO: 1243619
aagguuauugguugugagu

SEQ ID NO: 1429151 - RNA, 19 nt, Artificial Sequence
  Description of Artificial Sequence: Synthetic oligonucleotide
  Antisense strand to SEQ ID NO: 1429150
acucacaaccaauaaccuu

SEQ ID NO: 1429152 - RNA, 19 nt, Artificial Sequence
  Description of Artificial Sequence: Synthetic oligonucleotide
  Sense strand starting at position 2457 of SEQ ID NO: 1243619
uugugagugccugacugau

SEQ ID NO: 1429153 - RNA, 19 nt, Artificial Sequence
  Description of Artificial Sequence: Synthetic oligonucleotide
  Antisense strand to SEQ ID NO: 1429152
aucagucaggcacucacaa

SEQ ID NO: 1429154 - RNA, 19 nt, Artificial Sequence
  Description of Artificial Sequence: Synthetic oligonucleotide
  Sense strand starting at position 2459 of SEQ ID NO: 1243619
gugagugccugacugaucu

SEQ ID NO: 1429155 - RNA, 19 nt, Artificial Sequence
  Description of Artificial Sequence: Synthetic oligonucleotide
  Antisense strand to SEQ ID NO: 1429154
agaucagucaggcacucac

SEQ ID NO: 1429156 - RNA, 19 nt, Artificial Sequence
  Description of Artificial Sequence: Synthetic oligonucleotide
  Sense strand starting at position 2558 of SEQ ID NO: 1243619
cucucaauuugagggaacu

SEQ ID NO: 1429157 - RNA, 19 nt, Artificial Sequence
  Description of Artificial Sequence: Synthetic oligonucleotide
  Antisense strand to SEQ ID NO: 1429156
aguucccucaaauugagag

SEQ ID NO: 1429158 - RNA, 19 nt, Artificial Sequence
  Description of Artificial Sequence: Synthetic oligonucleotide
  Sense strand starting at position 2593 of SEQ ID NO: 1243619
gucauauagaauggaggua

SEQ ID NO: 1429159 - RNA, 19 nt, Artificial Sequence
  Description of Artificial Sequence: Synthetic oligonucleotide
  Antisense strand to SEQ ID NO: 1429158
uaccuccauucuauaugac

SEQ ID NO: 1429160 - RNA, 19 nt, Artificial Sequence
  Description of Artificial Sequence: Synthetic oligonucleotide
  Sense strand starting at position 2609 of SEQ ID NO: 1243619
guaguuggaaguugucaga

SEQ ID NO: 1429161 - RNA, 19 nt, Artificial Sequence
  Description of Artificial Sequence: Synthetic oligonucleotide
  Antisense strand to SEQ ID NO: 1429160
ucugacaacuuccaacuac

SEQ ID NO: 1429162 - RNA, 19 nt, Artificial Sequence
  Description of Artificial Sequence: Synthetic oligonucleotide
  Sense strand starting at position 2859 of SEQ ID NO: 1243619
uguaucuagcccugaucaa

SEQ ID NO: 1429163 - RNA, 19 nt, Artificial Sequence
  Description of Artificial Sequence: Synthetic oligonucleotide
  Antisense strand to SEQ ID NO: 1429162
uugaucagggcuagauaca

SEQ ID NO: 1429164 - RNA, 19 nt, Artificial Sequence
  Description of Artificial Sequence: Synthetic oligonucleotide
  Sense strand starting at position 2860 of SEQ ID NO: 1243619
guaucuagcccugaucaag

SEQ ID NO: 1429165 - RNA, 19 nt, Artificial Sequence
  Description of Artificial Sequence: Synthetic oligonucleotide
  Antisense strand to SEQ ID NO: 1429164
cuugaucagggcuagauac

SEQ ID NO: 1429166 - RNA, 19 nt, Artificial Sequence
  Description of Artificial Sequence: Synthetic oligonucleotide
  Sense strand starting at position 2971 of SEQ ID NO: 1243619
gagggcuuaugaccgaagu

SEQ ID NO: 1429167 - RNA, 19 nt, Artificial Sequence
  Description of Artificial Sequence: Synthetic oligonucleotide
  Antisense strand to SEQ ID NO: 1429166
acuucggucauaagcccuc

SEQ ID NO: 1429168 - RNA, 19 nt, Artificial Sequence
  Description of Artificial Sequence: Synthetic oligonucleotide
  Sense strand starting at position 2972 of SEQ ID NO: 1243619
agggcuuaugaccgaaguu

SEQ ID NO: 1429169 - RNA, 19 nt, Artificial Sequence
  Description of Artificial Sequence: Synthetic oligonucleotide
  Antisense strand to SEQ ID NO: 1429168
aacuucggucauaagcccu

SEQ ID NO: 1429170 - RNA, 19 nt, Artificial Sequence
  Description of Artificial Sequence: Synthetic oligonucleotide
  Sense strand starting at position 2973 of SEQ ID NO: 1243619
gggcuuaugaccgaaguua

SEQ ID NO: 1429171 - RNA, 19 nt, Artificial Sequence
  Description of Artificial Sequence: Synthetic oligonucleotide
  Antisense strand to SEQ ID NO: 1429170
uaacuucggucauaagccc

SEQ ID NO: 1429172 - RNA, 19 nt, Artificial Sequence
  Description of Artificial Sequence: Synthetic oligonucleotide
  Sense strand starting at position 2982 of SEQ ID NO: 1243619
accgaaguuacugagguua

SEQ ID NO: 1429173 - RNA, 19 nt, Artificial Sequence
  Description of Artificial Sequence: Synthetic oligonucleotide
  Antisense strand to SEQ ID NO: 1429172
uaaccucaguaacuucggu

SEQ ID NO: 1429174 - RNA, 19 nt, Artificial Sequence
  Description of Artificial Sequence: Synthetic oligonucleotide
  Sense strand starting at position 3054 of SEQ ID NO: 1243619
gcaagagugucccucuggu

SEQ ID NO: 1429175 - RNA, 19 nt, Artificial Sequence
  Description of Artificial Sequence: Synthetic oligonucleotide
  Antisense strand to SEQ ID NO: 1429174
accagagggacacucuugc

SEQ ID NO: 1429176 - RNA, 19 nt, Artificial Sequence
  Description of Artificial Sequence: Synthetic oligonucleotide
  Sense strand starting at position 3088 of SEQ ID NO: 1243619
gcaggagaucucggaugga

SEQ ID NO: 1429177 - RNA, 19 nt, Artificial Sequence
  Description of Artificial Sequence: Synthetic oligonucleotide
  Antisense strand to SEQ ID NO: 1429176
uccauccgagaucuccugc

SEQ ID NO: 1429178 - RNA, 19 nt, Artificial Sequence
  Description of Artificial Sequence: Synthetic oligonucleotide
  Sense strand starting at position 3091 of SEQ ID NO: 1243619
ggagaucucggauggagca

SEQ ID NO: 1429179 - RNA, 19 nt, Artificial Sequence
  Description of Artificial Sequence: Synthetic oligonucleotide
  Antisense strand to SEQ ID NO: 1429178
ugcuccauccgagaucucc

SEQ ID NO: 1429180 - RNA, 19 nt, Artificial Sequence
  Description of Artificial Sequence: Synthetic oligonucleotide
  Sense strand starting at position 3294 of SEQ ID NO: 1243619
gguuauauuuagugggaac

SEQ ID NO: 1429181 - RNA, 19 nt, Artificial Sequence
  Description of Artificial Sequence: Synthetic oligonucleotide
  Antisense strand to SEQ ID NO: 1429180
guucccacuaaauauaacc

SEQ ID NO: 1429182 - RNA, 19 nt, Artificial Sequence
  Description of Artificial Sequence: Synthetic oligonucleotide
  Sense strand starting at position 3343 of SEQ ID NO: 1243619
acacauguucccugccaca

SEQ ID NO: 1429183 - RNA, 19 nt, Artificial Sequence
  Description of Artificial Sequence: Synthetic oligonucleotide
  Antisense strand to SEQ ID NO: 1429182
uguggcagggaacaugugu

SEQ ID NO: 1429184 - RNA, 19 nt, Artificial Sequence
  Description of Artificial Sequence: Synthetic oligonucleotide
  Sense strand starting at position 3399 of SEQ ID NO: 1243619
ugaggaugguuggaagaga

SEQ ID NO: 1429185 - RNA, 19 nt, Artificial Sequence
  Description of Artificial Sequence: Synthetic oligonucleotide
  Antisense strand to SEQ ID NO: 1429184
ucucuuccaaccauccuca

SEQ ID NO: 1429186 - RNA, 19 nt, Artificial Sequence
  Description of Artificial Sequence: Synthetic oligonucleotide
  Sense strand starting at position 3535 of SEQ ID NO: 1243619
ccuguaguuucgguggauu

SEQ ID NO: 1429187 - RNA, 19 nt, Artificial Sequence
  Description of Artificial Sequence: Synthetic oligonucleotide
  Antisense strand to SEQ ID NO: 1429186
aauccaccgaaacuacagg

SEQ ID NO: 1429188 - RNA, 19 nt, Artificial Sequence
  Description of Artificial Sequence: Synthetic oligonucleotide
  Sense strand starting at position 3648 of SEQ ID NO: 1243619
cccugcauuccagguguaa

SEQ ID NO: 1429189 - RNA, 19 nt, Artificial Sequence
  Description of Artificial Sequence: Synthetic oligonucleotide
  Antisense strand to SEQ ID NO: 1429188
uuacaccuggaaugcaggg

SEQ ID NO: 1429190 - RNA, 19 nt, Artificial Sequence
  Description of Artificial Sequence: Synthetic oligonucleotide
  Sense strand starting at position 3854 of SEQ ID NO: 1243619
cagagcagaucaugcauuu

SEQ ID NO: 1429191 - RNA, 19 nt, Artificial Sequence
  Description of Artificial Sequence: Synthetic oligonucleotide
  Antisense strand to SEQ ID NO: 1429190
aaaugcaugaucugcucug

SEQ ID NO: 1429192 - RNA, 19 nt, Artificial Sequence
  Description of Artificial Sequence: Synthetic oligonucleotide
  Sense strand starting at position 3905 of SEQ ID NO: 1243619
ccacauuccuuggcuggaa

SEQ ID NO: 1429193 - RNA, 19 nt, Artificial Sequence
  Description of Artificial Sequence: Synthetic oligonucleotide
  Antisense strand to SEQ ID NO: 1429192
uuccagccaaggaaugugg

SEQ ID NO: 1429194 - RNA, 19 nt, Artificial Sequence
  Description of Artificial Sequence: Synthetic oligonucleotide
  Sense strand starting at position 400 of SEQ ID NO: 1243620
augugucagagguaaaugu

SEQ ID NO: 1429195 - RNA, 19 nt, Artificial Sequence
  Description of Artificial Sequence: Synthetic oligonucleotide
  Antisense strand to SEQ ID NO: 1429194
acauuuaccucugacacau

SEQ ID NO: 1429196 - RNA, 19 nt, Artificial Sequence
  Description of Artificial Sequence: Synthetic oligonucleotide
  Sense strand starting at position 466 of SEQ ID NO: 1243620
uguguauuugugugaacau

SEQ ID NO: 1429197 - RNA, 19 nt, Artificial Sequence
  Description of Artificial Sequence: Synthetic oligonucleotide
  Antisense strand to SEQ ID NO: 1429196
auguucacacaaauacaca

SEQ ID NO: 1429198 - RNA, 19 nt, Artificial Sequence
  Description of Artificial Sequence: Synthetic oligonucleotide
  Sense strand starting at position 478 of SEQ ID NO: 1243620
ugaacaugcuguuugauag

SEQ ID NO: 1429199 - RNA, 19 nt, Artificial Sequence
  Description of Artificial Sequence: Synthetic oligonucleotide
  Antisense strand to SEQ ID NO: 1429198
cuaucaaacagcauguuca

SEQ ID NO: 1429200 - RNA, 19 nt, Artificial Sequence
  Description of Artificial Sequence: Synthetic oligonucleotide
  Sense strand starting at position 479 of SEQ ID NO: 1243620
gaacaugcuguuugauaga

SEQ ID NO: 1429201 - RNA, 19 nt, Artificial Sequence
  Description of Artificial Sequence: Synthetic oligonucleotide
  Antisense strand to SEQ ID NO: 1429200
ucuaucaaacagcauguuc

SEQ ID NO: 1429202 - RNA, 19 nt, Artificial Sequence
  Description of Artificial Sequence: Synthetic oligonucleotide
  Sense strand starting at position 512 of SEQ ID NO: 1243620
ccuuacugucuugaauuga

SEQ ID NO: 1429203 - RNA, 19 nt, Artificial Sequence
  Description of Artificial Sequence: Synthetic oligonucleotide
  Antisense strand to SEQ ID NO: 1429202
ucaauucaagacaguaagg

SEQ ID NO: 1429204 - RNA, 19 nt, Artificial Sequence
  Description of Artificial Sequence: Synthetic oligonucleotide
  Sense strand starting at position 539 of SEQ ID NO: 1243620
acugguuugucuucuaguc

SEQ ID NO: 1429205 - RNA, 19 nt, Artificial Sequence
  Description of Artificial Sequence: Synthetic oligonucleotide
  Antisense strand to SEQ ID NO: 1429204
gacuagaagacaaaccagu

SEQ ID NO: 1429206 - RNA, 19 nt, Artificial Sequence
  Description of Artificial Sequence: Synthetic oligonucleotide
  Sense strand starting at position 808 of SEQ ID NO: 1243620
gccacuaagccuggaugau

SEQ ID NO: 1429207 - RNA, 19 nt, Artificial Sequence
  Description of Artificial Sequence: Synthetic oligonucleotide
  Antisense strand to SEQ ID NO: 1429206
aucauccaggcuuaguggc

SEQ ID NO: 1429208 - RNA, 19 nt, Artificial Sequence
  Description of Artificial Sequence: Synthetic oligonucleotide
  Sense strand starting at position 809 of SEQ ID NO: 1243620
ccacuaagccuggaugauu

SEQ ID NO: 1429209 - RNA, 19 nt, Artificial Sequence
  Description of Artificial Sequence: Synthetic oligonucleotide
  Antisense strand to SEQ ID NO: 1429208
aaucauccaggcuuagugg

SEQ ID NO: 1429210 - RNA, 19 nt, Artificial Sequence
  Description of Artificial Sequence: Synthetic oligonucleotide
  Sense strand starting at position 978 of SEQ ID NO: 1243620
ccaagauccugagcuucuu

SEQ ID NO: 1429211 - RNA, 19 nt, Artificial Sequence
  Description of Artificial Sequence: Synthetic oligonucleotide
  Antisense strand to SEQ ID NO: 1429210
aagaagcucaggaucuugg

SEQ ID NO: 1429212 - RNA, 19 nt, Artificial Sequence
  Description of Artificial Sequence: Synthetic oligonucleotide
  Sense strand starting at position 990 of SEQ ID NO: 1243620
gcuucuugucgguacagaa

SEQ ID NO: 1429213 - RNA, 19 nt, Artificial Sequence
  Description of Artificial Sequence: Synthetic oligonucleotide
  Antisense strand to SEQ ID NO: 1429212
uucuguaccgacaagaagc

SEQ ID NO: 1429214 - RNA, 19 nt, Artificial Sequence
  Description of Artificial Sequence: Synthetic oligonucleotide
  Sense strand starting at position 1074 of SEQ ID NO: 1243620
gaugcauucugugucucca

SEQ ID NO: 1429215 - RNA, 19 nt, Artificial Sequence
  Description of Artificial Sequence: Synthetic oligonucleotide
  Antisense strand to SEQ ID NO: 1429214
uggagacacagaaugcauc

SEQ ID NO: 1429216 - RNA, 19 nt, Artificial Sequence
  Description of Artificial Sequence: Synthetic oligonucleotide
  Sense strand starting at position 1311 of SEQ ID NO: 1243620
aggagaaagcugcagaguu

SEQ ID NO: 1429217 - RNA, 19 nt, Artificial Sequence
  Description of Artificial Sequence: Synthetic oligonucleotide
  Antisense strand to SEQ ID NO: 1429216
aacucugcagcuuucuccu

SEQ ID NO: 1429218 - RNA, 19 nt, Artificial Sequence
  Description of Artificial Sequence: Synthetic oligonucleotide
  Sense strand starting at position 1312 of SEQ ID NO: 1243620
ggagaaagcugcagaguug

SEQ ID NO: 1429219 - RNA, 19 nt, Artificial Sequence
  Description of Artificial Sequence: Synthetic oligonucleotide
  Antisense strand to SEQ ID NO: 1429218
caacucugcagcuuucucc

SEQ ID NO: 1429220 - RNA, 19 nt, Artificial Sequence
  Description of Artificial Sequence: Synthetic oligonucleotide
  Sense strand starting at position 1313 of SEQ ID NO: 1243620
gagaaagcugcagaguuga

SEQ ID NO: 1429221 - RNA, 19 nt, Artificial Sequence
  Description of Artificial Sequence: Synthetic oligonucleotide
  Antisense strand to SEQ ID NO: 1429220
ucaacucugcagcuuucuc

SEQ ID NO: 1429222 - RNA, 19 nt, Artificial Sequence
  Description of Artificial Sequence: Synthetic oligonucleotide
  Sense strand starting at position 1565 of SEQ ID NO: 1243620
ggcagagagcauuggagua

SEQ ID NO: 1429223 - RNA, 19 nt, Artificial Sequence
  Description of Artificial Sequence: Synthetic oligonucleotide
  Antisense strand to SEQ ID NO: 1429222
uacuccaaugcucucugcc

SEQ ID NO: 1429224 - RNA, 19 nt, Artificial Sequence
  Description of Artificial Sequence: Synthetic oligonucleotide
  Sense strand starting at position 2172 of SEQ ID NO: 1243620
ggcucugucacuuagaggu

SEQ ID NO: 1429225 - RNA, 19 nt, Artificial Sequence
  Description of Artificial Sequence: Synthetic oligonucleotide
  Antisense strand to SEQ ID NO: 1429224
accucuaagugacagagcc

SEQ ID NO: 1429226 - RNA, 19 nt, Artificial Sequence
  Description of Artificial Sequence: Synthetic oligonucleotide
  Sense strand starting at position 2176 of SEQ ID NO: 1243620
cugucacuuagagguuaug

SEQ ID NO: 1429227 - RNA, 19 nt, Artificial Sequence
  Description of Artificial Sequence: Synthetic oligonucleotide
  Antisense strand to SEQ ID NO: 1429226
cauaaccucuaagugacag

SEQ ID NO: 1429228 - RNA, 19 nt, Artificial Sequence
  Description of Artificial Sequence: Synthetic oligonucleotide
  Sense strand starting at position 2205 of SEQ ID NO: 1243620
cgagcucucugauuccuca

SEQ ID NO: 1429229 - RNA, 19 nt, Artificial Sequence
  Description of Artificial Sequence: Synthetic oligonucleotide
  Antisense strand to SEQ ID NO: 1429228
ugaggaaucagagagcucg

SEQ ID NO: 1429230 - RNA, 19 nt, Artificial Sequence
  Description of Artificial Sequence: Synthetic oligonucleotide
  Sense strand starting at position 2267 of SEQ ID NO: 1243620
ggcuguacgaagugaagaa

SEQ ID NO: 1429231 - RNA, 19 nt, Artificial Sequence
  Description of Artificial Sequence: Synthetic oligonucleotide
  Antisense strand to SEQ ID NO: 1429230
uucuucacuucguacagcc

SEQ ID NO: 1429232 - RNA, 19 nt, Artificial Sequence
  Description of Artificial Sequence: Synthetic oligonucleotide
  Sense strand starting at position 2274 of SEQ ID NO: 1243620
cgaagugaagaaggugaua

SEQ ID NO: 1429233 - RNA, 19 nt, Artificial Sequence
  Description of Artificial Sequence: Synthetic oligonucleotide
  Antisense strand to SEQ ID NO: 1429232
uaucaccuucuucacuucg

SEQ ID NO: 1429234 - RNA, 19 nt, Artificial Sequence
  Description of Artificial Sequence: Synthetic oligonucleotide
  Sense strand starting at position 2285 of SEQ ID NO: 1243620
aggugauagcaguaaauuc

SEQ ID NO: 1429235 - RNA, 19 nt, Artificial Sequence
  Description of Artificial Sequence: Synthetic oligonucleotide
  Antisense strand to SEQ ID NO: 1429234
gaauuuacugcuaucaccu

SEQ ID NO: 1429236 - RNA, 19 nt, Artificial Sequence
  Description of Artificial Sequence: Synthetic oligonucleotide
  Sense strand starting at position 2509 of SEQ ID NO: 1243620
caccuuguuggucagacuu

SEQ ID NO: 1429237 - RNA, 19 nt, Artificial Sequence
  Description of Artificial Sequence: Synthetic oligonucleotide
  Antisense strand to SEQ ID NO: 1429236
aagucugaccaacaaggug

SEQ ID NO: 1429238 - RNA, 19 nt, Artificial Sequence
  Description of Artificial Sequence: Synthetic oligonucleotide
  Sense strand starting at position 2628 of SEQ ID NO: 1243620
uugcaucagucauugucau

SEQ ID NO: 1429239 - RNA, 19 nt, Artificial Sequence
  Description of Artificial Sequence: Synthetic oligonucleotide
  Antisense strand to SEQ ID NO: 1429238
augacaaugacugaugcaa

SEQ ID NO: 1429240 - RNA, 19 nt, Artificial Sequence
  Description of Artificial Sequence: Synthetic oligonucleotide
  Sense strand starting at position 2844 of SEQ ID NO: 1243620
uucauaggguggucaugaa

SEQ ID NO: 1429241 - RNA, 19 nt, Artificial Sequence
  Description of Artificial Sequence: Synthetic oligonucleotide
  Antisense strand to SEQ ID NO: 1429240
uucaugaccacccuaugaa

SEQ ID NO: 1429242 - RNA, 19 nt, Artificial Sequence
  Description of Artificial Sequence: Synthetic oligonucleotide
  Sense strand starting at position 2923 of SEQ ID NO: 1243620
ucuugaguccauugaaguc

SEQ ID NO: 1429243 - RNA, 19 nt, Artificial Sequence
  Description of Artificial Sequence: Synthetic oligonucleotide
  Antisense strand to SEQ ID NO: 1429242
gacuucaauggacucaaga

SEQ ID NO: 1429244 - RNA, 19 nt, Artificial Sequence
  Description of Artificial Sequence: Synthetic oligonucleotide
  Sense strand starting at position 2957 of SEQ ID NO: 1243620
gagagaagaguuugaguuc

SEQ ID NO: 1429245 - RNA, 19 nt, Artificial Sequence
  Description of Artificial Sequence: Synthetic oligonucleotide
  Antisense strand to SEQ ID NO: 1429244
gaacucaaacucuucucuc

SEQ ID NO: 1429246 - RNA, 19 nt, Artificial Sequence
  Description of Artificial Sequence: Synthetic oligonucleotide
  Sense strand starting at position 2960 of SEQ ID NO: 1243620
agaagaguuugaguucaug

SEQ ID NO: 1429247 - RNA, 19 nt, Artificial Sequence
  Description of Artificial Sequence: Synthetic oligonucleotide
  Antisense strand to SEQ ID NO: 1429246
caugaacucaaacucuucu

SEQ ID NO: 1429248 - RNA, 19 nt, Artificial Sequence
  Description of Artificial Sequence: Synthetic oligonucleotide
  Sense strand starting at position 2983 of SEQ ID NO: 1243620
ucucguagcaggcaugaga

SEQ ID NO: 1429249 - RNA, 19 nt, Artificial Sequence
  Description of Artificial Sequence: Synthetic oligonucleotide
  Antisense strand to SEQ ID NO: 1429248
ucucaugccugcuacgaga

SEQ ID NO: 1429250 - RNA, 19 nt, Artificial Sequence
  Description of Artificial Sequence: Synthetic oligonucleotide
  Sense strand starting at position 2996 of SEQ ID NO: 1243620
augagaucuuguccaugug

SEQ ID NO: 1429251 - RNA, 19 nt, Artificial Sequence
  Description of Artificial Sequence: Synthetic oligonucleotide
  Antisense strand to SEQ ID NO: 1429250
cacauggacaagaucucau

SEQ ID NO: 1429252 - RNA, 19 nt, Artificial Sequence
  Description of Artificial Sequence: Synthetic oligonucleotide
  Sense strand starting at position 2997 of SEQ ID NO: 1243620
ugagaucuuguccauguga

SEQ ID NO: 1429253 - RNA, 19 nt, Artificial Sequence
  Description of Artificial Sequence: Synthetic oligonucleotide
  Antisense strand to SEQ ID NO: 1429252
ucacauggacaagaucuca

SEQ ID NO: 1429254 - RNA, 19 nt, Artificial Sequence
  Description of Artificial Sequence: Synthetic oligonucleotide
  Sense strand starting at position 2999 of SEQ ID NO: 1243620
agaucuuguccaugugacu

SEQ ID NO: 1429255 - RNA, 19 nt, Artificial Sequence
  Description of Artificial Sequence: Synthetic oligonucleotide
  Antisense strand to SEQ ID NO: 1429254
agucacauggacaagaucu

SEQ ID NO: 1429256 - RNA, 19 nt, Artificial Sequence
  Description of Artificial Sequence: Synthetic oligonucleotide
  Sense strand starting at position 3210 of SEQ ID NO: 1243620
acuugagacucacugucuu

SEQ ID NO: 1429257 - RNA, 19 nt, Artificial Sequence
  Description of Artificial Sequence: Synthetic oligonucleotide
  Antisense strand to SEQ ID NO: 1429256
aagacagugagucucaagu

SEQ ID NO: 1429258 - RNA, 19 nt, Artificial Sequence
  Description of Artificial Sequence: Synthetic oligonucleotide
  Sense strand starting at position 3221 of SEQ ID NO: 1243620
acugucuuuggaggacaga

SEQ ID NO: 1429259 - RNA, 19 nt, Artificial Sequence
  Description of Artificial Sequence: Synthetic oligonucleotide
  Antisense strand to SEQ ID NO: 1429258
ucuguccuccaaagacagu

SEQ ID NO: 1429260 - RNA, 19 nt, Artificial Sequence
  Description of Artificial Sequence: Synthetic oligonucleotide
  Sense strand starting at position 3414 of SEQ ID NO: 1243620
gauguacuggccugaaaga

SEQ ID NO: 1429261 - RNA, 19 nt, Artificial Sequence
  Description of Artificial Sequence: Synthetic oligonucleotide
  Antisense strand to SEQ ID NO: 1429260
ucuuucaggccaguacauc

SEQ ID NO: 1429262 - RNA, 19 nt, Artificial Sequence
  Description of Artificial Sequence: Synthetic oligonucleotide
  Sense strand starting at position 3543 of SEQ ID NO: 1243620
guggccuugugaucccuaa

SEQ ID NO: 1429263 - RNA, 19 nt, Artificial Sequence
  Description of Artificial Sequence: Synthetic oligonucleotide
  Antisense strand to SEQ ID NO: 1429262
uuagggaucacaaggccac

SEQ ID NO: 1429264 - RNA, 19 nt, Artificial Sequence
  Description of Artificial Sequence: Synthetic oligonucleotide
  Sense strand starting at position 3586 of SEQ ID NO: 1243620
gguggacuucagugcuuac

SEQ ID NO: 1429265 - RNA, 19 nt, Artificial Sequence
  Description of Artificial Sequence: Synthetic oligonucleotide
  Antisense strand to SEQ ID NO: 1429264
guaagcacugaaguccacc

SEQ ID NO: 1429266 - RNA, 19 nt, Artificial Sequence
  Description of Artificial Sequence: Synthetic oligonucleotide
  Sense strand starting at position 3783 of SEQ ID NO: 1243620
cagguauaguccuuugcca

SEQ ID NO: 1429267 - RNA, 19 nt, Artificial Sequence
  Description of Artificial Sequence: Synthetic oligonucleotide
  Antisense strand to SEQ ID NO: 1429266
uggcaaaggacuauaccug

SEQ ID NO: 1429268 - RNA, 19 nt, Artificial Sequence
  Description of Artificial Sequence: Synthetic oligonucleotide
  Sense strand starting at position 3791 of SEQ ID NO: 1243620
guccuuugccaucauauuc

SEQ ID NO: 1429269 - RNA, 19 nt, Artificial Sequence
  Description of Artificial Sequence: Synthetic oligonucleotide
  Antisense strand to SEQ ID NO: 1429268
gaauaugauggcaaaggac

SEQ ID NO: 1429270 - RNA, 19 nt, Artificial Sequence
  Description of Artificial Sequence: Synthetic oligonucleotide
  Sense strand starting at position 3799 of SEQ ID NO: 1243620
ccaucauauuccuugugcu

SEQ ID NO: 1429271 - RNA, 19 nt, Artificial Sequence
  Description of Artificial Sequence: Synthetic oligonucleotide
  Antisense strand to SEQ ID NO: 1429270
agcacaaggaauaugaugg

SEQ ID NO: 1429272 - RNA, 19 nt, Artificial Sequence
  Description of Artificial Sequence: Synthetic oligonucleotide
  Sense strand starting at position 3881 of SEQ ID NO: 1243620
ggaggaaucugaggaauca

SEQ ID NO: 1429273 - RNA, 19 nt, Artificial Sequence
  Description of Artificial Sequence: Synthetic oligonucleotide
  Antisense strand to SEQ ID NO: 1429272
ugauuccucagauuccucc

SEQ ID NO: 1429274 - RNA, 19 nt, Artificial Sequence
  Description of Artificial Sequence: Synthetic oligonucleotide
  Sense strand starting at position 154 of SEQ ID NO: 1243621
gcagaagucucauuauguu

SEQ ID NO: 1429275 - RNA, 19 nt, Artificial Sequence
  Description of Artificial Sequence: Synthetic oligonucleotide
  Antisense strand to SEQ ID NO: 1429274
aacauaaugagacuucugc

SEQ ID NO: 1429276 - RNA, 19 nt, Artificial Sequence
  Description of Artificial Sequence: Synthetic oligonucleotide
  Sense strand starting at position 350 of SEQ ID NO: 1243621
gcaagagaauugcuuugag

SEQ ID NO: 1429277 - RNA, 19 nt, Artificial Sequence
  Description of Artificial Sequence: Synthetic oligonucleotide
  Antisense strand to SEQ ID NO: 1429276
cucaaagcaauucucuugc

SEQ ID NO: 1429278 - RNA, 19 nt, Artificial Sequence
  Description of Artificial Sequence: Synthetic oligonucleotide
  Sense strand starting at position 353 of SEQ ID NO: 1243621
agagaauugcuuugaggcu

SEQ ID NO: 1429279 - RNA, 19 nt, Artificial Sequence
  Description of Artificial Sequence: Synthetic oligonucleotide
  Antisense strand to SEQ ID NO: 1429278
agccucaaagcaauucucu

SEQ ID NO: 1429280 - RNA, 19 nt, Artificial Sequence
  Description of Artificial Sequence: Synthetic oligonucleotide
  Sense strand starting at position 473 of SEQ ID NO: 1243621
gcggaauuggaauguuccu

SEQ ID NO: 1429281 - RNA, 19 nt, Artificial Sequence
  Description of Artificial Sequence: Synthetic oligonucleotide
  Antisense strand to SEQ ID NO: 1429280
aggaacauuccaauuccgc

SEQ ID NO: 1429282 - RNA, 19 nt, Artificial Sequence
  Description of Artificial Sequence: Synthetic oligonucleotide
  Sense strand starting at position 515 of SEQ ID NO: 1243621
ugaggugaugguuacuuca

SEQ ID NO: 1429283 - RNA, 19 nt, Artificial Sequence
  Description of Artificial Sequence: Synthetic oligonucleotide
  Antisense strand to SEQ ID NO: 1429282
ugaaguaaccaucaccuca

SEQ ID NO: 1429284 - RNA, 19 nt, Artificial Sequence
  Description of Artificial Sequence: Synthetic oligonucleotide
  Sense strand starting at position 607 of SEQ ID NO: 1243621
acuauuaaguguccauaac

SEQ ID NO: 1429285 - RNA, 19 nt, Artificial Sequence
  Description of Artificial Sequence: Synthetic oligonucleotide
  Antisense strand to SEQ ID NO: 1429284
guuauggacacuuaauagu

SEQ ID NO: 1429286 - RNA, 19 nt, Artificial Sequence
  Description of Artificial Sequence: Synthetic oligonucleotide
  Sense strand starting at position 608 of SEQ ID NO: 1243621
cuauuaaguguccauaaca

SEQ ID NO: 1429287 - RNA, 19 nt, Artificial Sequence
  Description of Artificial Sequence: Synthetic oligonucleotide
  Antisense strand to SEQ ID NO: 1429286
uguuauggacacuuaauag

SEQ ID NO: 1429288 - RNA, 19 nt, Artificial Sequence
  Description of Artificial Sequence: Synthetic oligonucleotide
  Sense strand starting at position 639 of SEQ ID NO: 1243621
guagacuuagccuauccaa

SEQ ID NO: 1429289 - RNA, 19 nt, Artificial Sequence
  Description of Artificial Sequence: Synthetic oligonucleotide
  Antisense strand to SEQ ID NO: 1429288
uuggauaggcuaagucuac

SEQ ID NO: 1429290 - RNA, 19 nt, Artificial Sequence
  Description of Artificial Sequence: Synthetic oligonucleotide
  Sense strand starting at position 686 of SEQ ID NO: 1243621
gagaauaaggaagguuguu

SEQ ID NO: 1429291 - RNA, 19 nt, Artificial Sequence
  Description of Artificial Sequence: Synthetic oligonucleotide
  Antisense strand to SEQ ID NO: 1429290
aacaaccuuccuuauucuc

SEQ ID NO: 1429292 - RNA, 19 nt, Artificial Sequence
  Description of Artificial Sequence: Synthetic oligonucleotide
  Sense strand starting at position 698 of SEQ ID NO: 1243621
gguuguuucuggaggaagg

SEQ ID NO: 1429293 - RNA, 19 nt, Artificial Sequence
  Description of Artificial Sequence: Synthetic oligonucleotide
  Antisense strand to SEQ ID NO: 1429292
ccuuccuccagaaacaacc

SEQ ID NO: 1429294 - RNA, 19 nt, Artificial Sequence
  Description of Artificial Sequence: Synthetic oligonucleotide
  Sense strand starting at position 699 of SEQ ID NO: 1243621
guuguuucuggaggaagga

SEQ ID NO: 1429295 - RNA, 19 nt, Artificial Sequence
  Description of Artificial Sequence: Synthetic oligonucleotide
  Antisense strand to SEQ ID NO: 1429294
uccuuccuccagaaacaac

SEQ ID NO: 1429296 - RNA, 19 nt, Artificial Sequence
  Description of Artificial Sequence: Synthetic oligonucleotide
  Sense strand starting at position 739 of SEQ ID NO: 1243621
aggcgaauacgauaaucaa

SEQ ID NO: 1429297 - RNA, 19 nt, Artificial Sequence
  Description of Artificial Sequence: Synthetic oligonucleotide
  Antisense strand to SEQ ID NO: 1429296
uugauuaucguauucgccu

SEQ ID NO: 1429298 - RNA, 19 nt, Artificial Sequence
  Description of Artificial Sequence: Synthetic oligonucleotide
  Sense strand starting at position 1326 of SEQ ID NO: 1243621
gcacucuggugcuugcaua

SEQ ID NO: 1429299 - RNA, 19 nt, Artificial Sequence
  Description of Artificial Sequence: Synthetic oligonucleotide
  Antisense strand to SEQ ID NO: 1429298
uaugcaagcaccagagugc

SEQ ID NO: 1429300 - RNA, 19 nt, Artificial Sequence
  Description of Artificial Sequence: Synthetic oligonucleotide
  Sense strand starting at position 1333 of SEQ ID NO: 1243621
ggugcuugcauauaaauag

SEQ ID NO: 1429301 - RNA, 19 nt, Artificial Sequence
  Description of Artificial Sequence: Synthetic oligonucleotide
  Antisense strand to SEQ ID NO: 1429300
cuauuuauaugcaagcacc

SEQ ID NO: 1429302 - RNA, 19 nt, Artificial Sequence
  Description of Artificial Sequence: Synthetic oligonucleotide
  Sense strand starting at position 1580 of SEQ ID NO: 1243621
ggagguuaauccuaugacg

SEQ ID NO: 1429303 - RNA, 19 nt, Artificial Sequence
  Description of Artificial Sequence: Synthetic oligonucleotide
  Antisense strand to SEQ ID NO: 1429302
cgucauaggauuaaccucc

SEQ ID NO: 1429304 - RNA, 19 nt, Artificial Sequence
  Description of Artificial Sequence: Synthetic oligonucleotide
  Sense strand starting at position 1582 of SEQ ID NO: 1243621
agguuaauccuaugacguc

SEQ ID NO: 1429305 - RNA, 19 nt, Artificial Sequence
  Description of Artificial Sequence: Synthetic oligonucleotide
  Antisense strand to SEQ ID NO: 1429304
gacgucauaggauuaaccu

SEQ ID NO: 1429306 - RNA, 19 nt, Artificial Sequence
  Description of Artificial Sequence: Synthetic oligonucleotide
  Sense strand starting at position 1808 of SEQ ID NO: 1243621
ggugucugugccagaggau

SEQ ID NO: 1429307 - RNA, 19 nt, Artificial Sequence
  Description of Artificial Sequence: Synthetic oligonucleotide
  Antisense strand to SEQ ID NO: 1429306
auccucuggcacagacacc

SEQ ID NO: 1429308 - RNA, 19 nt, Artificial Sequence
  Description of Artificial Sequence: Synthetic oligonucleotide
  Sense strand starting at position 2553 of SEQ ID NO: 1243621
ggguguucuuugcuuccca

SEQ ID NO: 1429309 - RNA, 19 nt, Artificial Sequence
  Description of Artificial Sequence: Synthetic oligonucleotide
  Antisense strand to SEQ ID NO: 1429308
ugggaagcaaagaacaccc

SEQ ID NO: 1429310 - RNA, 19 nt, Artificial Sequence
  Description of Artificial Sequence: Synthetic oligonucleotide
  Sense strand starting at position 2734 of SEQ ID NO: 1243621
uuaggaaggaugcgaguuu

SEQ ID NO: 1429311 - RNA, 19 nt, Artificial Sequence
  Description of Artificial Sequence: Synthetic oligonucleotide
  Antisense strand to SEQ ID NO: 1429310
aaacucgcauccuuccuaa

SEQ ID NO: 1429312 - RNA, 19 nt, Artificial Sequence
  Description of Artificial Sequence: Synthetic oligonucleotide
  Sense strand starting at position 2897 of SEQ ID NO: 1243621
gaagucagucguggagaag

SEQ ID NO: 1429313 - RNA, 19 nt, Artificial Sequence
  Description of Artificial Sequence: Synthetic oligonucleotide
  Antisense strand to SEQ ID NO: 1429312
cuucuccacgacugacuuc

SEQ ID NO: 1429314 - RNA, 19 nt, Artificial Sequence
  Description of Artificial Sequence: Synthetic oligonucleotide
  Sense strand starting at position 2900 of SEQ ID NO: 1243621
gucagucguggagaaggaa

SEQ ID NO: 1429315 - RNA, 19 nt, Artificial Sequence
  Description of Artificial Sequence: Synthetic oligonucleotide
  Antisense strand to SEQ ID NO: 1429314
uuccuucuccacgacugac

SEQ ID NO: 1429316 - RNA, 19 nt, Artificial Sequence
  Description of Artificial Sequence: Synthetic oligonucleotide
  Sense strand starting at position 2920 of SEQ ID NO: 1243621
guaacuguggcucauugga

SEQ ID NO: 1429317 - RNA, 19 nt, Artificial Sequence
  Description of Artificial Sequence: Synthetic oligonucleotide
  Antisense strand to SEQ ID NO: 1429316
uccaaugagccacaguuac

SEQ ID NO: 1429318 - RNA, 19 nt, Artificial Sequence
  Description of Artificial Sequence: Synthetic oligonucleotide
  Sense strand starting at position 2984 of SEQ ID NO: 1243621
cuugcaaucuuccucgacu

SEQ ID NO: 1429319 - RNA, 19 nt, Artificial Sequence
  Description of Artificial Sequence: Synthetic oligonucleotide
  Antisense strand to SEQ ID NO: 1429318
agucgaggaagauugcaag

SEQ ID NO: 1429320 - RNA, 19 nt, Artificial Sequence
  Description of Artificial Sequence: Synthetic oligonucleotide
  Sense strand starting at position 2985 of SEQ ID NO: 1243621
uugcaaucuuccucgacuu

SEQ ID NO: 1429321 - RNA, 19 nt, Artificial Sequence
  Description of Artificial Sequence: Synthetic oligonucleotide
  Antisense strand to SEQ ID NO: 1429320
aagucgaggaagauugcaa

SEQ ID NO: 1429322 - RNA, 19 nt, Artificial Sequence
  Description of Artificial Sequence: Synthetic oligonucleotide
  Sense strand starting at position 3146 of SEQ ID NO: 1243621
ccucucagagucugggaaa

SEQ ID NO: 1429323 - RNA, 19 nt, Artificial Sequence
  Description of Artificial Sequence: Synthetic oligonucleotide
  Antisense strand to SEQ ID NO: 1429322
uuucccagacucugagagg

SEQ ID NO: 1429324 - RNA, 19 nt, Artificial Sequence
  Description of Artificial Sequence: Synthetic oligonucleotide
  Sense strand starting at position 3199 of SEQ ID NO: 1243621
agagggugugugcgagaau

SEQ ID NO: 1429325 - RNA, 19 nt, Artificial Sequence
  Description of Artificial Sequence: Synthetic oligonucleotide
  Antisense strand to SEQ ID NO: 1429324
auucucgcacacacccucu

SEQ ID NO: 1429326 - RNA, 19 nt, Artificial Sequence
  Description of Artificial Sequence: Synthetic oligonucleotide
  Sense strand starting at position 3202 of SEQ ID NO: 1243621
gggugugugcgagaauguu

SEQ ID NO: 1429327 - RNA, 19 nt, Artificial Sequence
  Description of Artificial Sequence: Synthetic oligonucleotide
  Antisense strand to SEQ ID NO: 1429326
aacauucucgcacacaccc

SEQ ID NO: 1429328 - RNA, 19 nt, Artificial Sequence
  Description of Artificial Sequence: Synthetic oligonucleotide
  Sense strand starting at position 3210 of SEQ ID NO: 1243621
gcgagaauguugucugacg

SEQ ID NO: 1429329 - RNA, 19 nt, Artificial Sequence
  Description of Artificial Sequence: Synthetic oligonucleotide
  Antisense strand to SEQ ID NO: 1429328
cgucagacaacauucucgc

SEQ ID NO: 1429330 - RNA, 19 nt, Artificial Sequence
  Description of Artificial Sequence: Synthetic oligonucleotide
  Sense strand starting at position 3211 of SEQ ID NO: 1243621
cgagaauguugucugacgu

SEQ ID NO: 1429331 - RNA, 19 nt, Artificial Sequence
  Description of Artificial Sequence: Synthetic oligonucleotide
  Antisense strand to SEQ ID NO: 1429330
acgucagacaacauucucg

SEQ ID NO: 1429332 - RNA, 19 nt, Artificial Sequence
  Description of Artificial Sequence: Synthetic oligonucleotide
  Sense strand starting at position 3217 of SEQ ID NO: 1243621
uguugucugacguggaaag

SEQ ID NO: 1429333 - RNA, 19 nt, Artificial Sequence
  Description of Artificial Sequence: Synthetic oligonucleotide
  Antisense strand to SEQ ID NO: 1429332
cuuuccacgucagacaaca

SEQ ID NO: 1429334 - RNA, 19 nt, Artificial Sequence
  Description of Artificial Sequence: Synthetic oligonucleotide
  Sense strand starting at position 3260 of SEQ ID NO: 1243621
uggaccugccauugguaga

SEQ ID NO: 1429335 - RNA, 19 nt, Artificial Sequence
  Description of Artificial Sequence: Synthetic oligonucleotide
  Antisense strand to SEQ ID NO: 1429334
ucuaccaauggcaggucca

SEQ ID NO: 1429336 - RNA, 19 nt, Artificial Sequence
  Description of Artificial Sequence: Synthetic oligonucleotide
  Sense strand starting at position 3261 of SEQ ID NO: 1243621
ggaccugccauugguagaa

SEQ ID NO: 1429337 - RNA, 19 nt, Artificial Sequence
  Description of Artificial Sequence: Synthetic oligonucleotide
  Antisense strand to SEQ ID NO: 1429336
uucuaccaauggcaggucc

SEQ ID NO: 1429338 - RNA, 19 nt, Artificial Sequence
  Description of Artificial Sequence: Synthetic oligonucleotide
  Sense strand starting at position 3265 of SEQ ID NO: 1243621
cugccauugguagaauagu

SEQ ID NO: 1429339 - RNA, 19 nt, Artificial Sequence
  Description of Artificial Sequence: Synthetic oligonucleotide
  Antisense strand to SEQ ID NO: 1429338
acuauucuaccaauggcag

SEQ ID NO: 1429340 - RNA, 19 nt, Artificial Sequence
  Description of Artificial Sequence: Synthetic oligonucleotide
  Sense strand starting at position 3275 of SEQ ID NO: 1243621
uagaauagucagugaugga

SEQ ID NO: 1429341 - RNA, 19 nt, Artificial Sequence
  Description of Artificial Sequence: Synthetic oligonucleotide
  Antisense strand to SEQ ID NO: 1429340
uccaucacugacuauucua

SEQ ID NO: 1429342 - RNA, 19 nt, Artificial Sequence
  Description of Artificial Sequence: Synthetic oligonucleotide
  Sense strand starting at position 3394 of SEQ ID NO: 1243621
ucuuguuaccucgacucau

SEQ ID NO: 1429343 - RNA, 19 nt, Artificial Sequence
  Description of Artificial Sequence: Synthetic oligonucleotide
  Antisense strand to SEQ ID NO: 1429342
augagucgagguaacaaga

SEQ ID NO: 1429344 - RNA, 19 nt, Artificial Sequence
  Description of Artificial Sequence: Synthetic oligonucleotide
  Sense strand starting at position 3455 of SEQ ID NO: 1243621
ucugguuacugagacauag

SEQ ID NO: 1429345 - RNA, 19 nt, Artificial Sequence
  Description of Artificial Sequence: Synthetic oligonucleotide
  Antisense strand to SEQ ID NO: 1429344
cuaugucucaguaaccaga

SEQ ID NO: 1429346 - RNA, 19 nt, Artificial Sequence
  Description of Artificial Sequence: Synthetic oligonucleotide
  Sense strand starting at position 3504 of SEQ ID NO: 1243621
cugugcaugcauuggacaa

SEQ ID NO: 1429347 - RNA, 19 nt, Artificial Sequence
  Description of Artificial Sequence: Synthetic oligonucleotide
  Antisense strand to SEQ ID NO: 1429346
uuguccaaugcaugcacag

SEQ ID NO: 1429348 - RNA, 19 nt, Artificial Sequence
  Description of Artificial Sequence: Synthetic oligonucleotide
  Sense strand starting at position 3597 of SEQ ID NO: 1243621
gggcucuugcauuagagag

SEQ ID NO: 1429349 - RNA, 19 nt, Artificial Sequence
  Description of Artificial Sequence: Synthetic oligonucleotide
  Antisense strand to SEQ ID NO: 1429348
cucucuaaugcaagagccc

SEQ ID NO: 1429350 - RNA, 19 nt, Artificial Sequence
  Description of Artificial Sequence: Synthetic oligonucleotide
  Sense strand starting at position 3605 of SEQ ID NO: 1243621
gcauuagagagcugagguu

SEQ ID NO: 1429351 - RNA, 19 nt, Artificial Sequence
  Description of Artificial Sequence: Synthetic oligonucleotide
  Antisense strand to SEQ ID NO: 1429350
aaccucagcucucuaaugc

SEQ ID NO: 1429352 - RNA, 19 nt, Artificial Sequence
  Description of Artificial Sequence: Synthetic oligonucleotide
  Sense strand starting at position 3927 of SEQ ID NO: 1243621
ugaggaguuaguugggcaa

SEQ ID NO: 1429353 - RNA, 19 nt, Artificial Sequence
  Description of Artificial Sequence: Synthetic oligonucleotide
  Antisense strand to SEQ ID NO: 1429352
uugcccaacuaacuccuca

SEQ ID NO: 1429354 - RNA, 19 nt, Artificial Sequence
  Description of Artificial Sequence: Synthetic oligonucleotide
  Sense strand starting at position 1016 of SEQ ID NO: 1243622
cagggagcucaccacuuau

SEQ ID NO: 1429355 - RNA, 19 nt, Artificial Sequence
  Description of Artificial Sequence: Synthetic oligonucleotide
  Antisense strand to SEQ ID NO: 1429354
auaaguggugagcucccug

SEQ ID NO: 1429356 - RNA, 19 nt, Artificial Sequence
  Description of Artificial Sequence: Synthetic oligonucleotide
  Sense strand starting at position 1212 of SEQ ID NO: 1243622
ggagaacccugcuuggaaa

SEQ ID NO: 1429357 - RNA, 19 nt, Artificial Sequence
  Description of Artificial Sequence: Synthetic oligonucleotide
  Antisense strand to SEQ ID NO: 1429356
uuuccaagcaggguucucc

SEQ ID NO: 1429358 - RNA, 19 nt, Artificial Sequence
  Description of Artificial Sequence: Synthetic oligonucleotide
  Sense strand starting at position 1331 of SEQ ID NO: 1243622
ugcagugaucaggaccauu

SEQ ID NO: 1429359 - RNA, 19 nt, Artificial Sequence
  Description of Artificial Sequence: Synthetic oligonucleotide
  Antisense strand to SEQ ID NO: 1429358
aaugguccugaucacugca

SEQ ID NO: 1429360 - RNA, 19 nt, Artificial Sequence
  Description of Artificial Sequence: Synthetic oligonucleotide
  Sense strand starting at position 2340 of SEQ ID NO: 1243622
agguguucuagaggaagga

SEQ ID NO: 1429361 - RNA, 19 nt, Artificial Sequence
  Description of Artificial Sequence: Synthetic oligonucleotide
  Antisense strand to SEQ ID NO: 1429360
uccuuccucuagaacaccu

SEQ ID NO: 1429362 - RNA, 19 nt, Artificial Sequence
  Description of Artificial Sequence: Synthetic oligonucleotide
  Sense strand starting at position 2777 of SEQ ID NO: 1243622
gauccaguguucgguagca

SEQ ID NO: 1429363 - RNA, 19 nt, Artificial Sequence
  Description of Artificial Sequence: Synthetic oligonucleotide
  Antisense strand to SEQ ID NO: 1429362
ugcuaccgaacacuggauc

SEQ ID NO: 1429364 - RNA, 19 nt, Artificial Sequence
  Description of Artificial Sequence: Synthetic oligonucleotide
  Sense strand starting at position 2779 of SEQ ID NO: 1243622
uccaguguucgguagcaca

SEQ ID NO: 1429365 - RNA, 19 nt, Artificial Sequence
  Description of Artificial Sequence: Synthetic oligonucleotide
  Antisense strand to SEQ ID NO: 1429364
ugugcuaccgaacacugga

SEQ ID NO: 1429366 - RNA, 19 nt, Artificial Sequence
  Description of Artificial Sequence: Synthetic oligonucleotide
  Sense strand starting at position 2782 of SEQ ID NO: 1243622
aguguucgguagcacaaua

SEQ ID NO: 1429367 - RNA, 19 nt, Artificial Sequence
  Description of Artificial Sequence: Synthetic oligonucleotide
  Antisense strand to SEQ ID NO: 1429366
uauugugcuaccgaacacu

SEQ ID NO: 1429368 - RNA, 19 nt, Artificial Sequence
  Description of Artificial Sequence: Synthetic oligonucleotide
  Sense strand starting at position 2792 of SEQ ID NO: 1243622
agcacaauacaacgauuau

SEQ ID NO: 1429369 - RNA, 19 nt, Artificial Sequence
  Description of Artificial Sequence: Synthetic oligonucleotide
  Antisense strand to SEQ ID NO: 1429368
auaaucguuguauugugcu

SEQ ID NO: 1429370 - RNA, 19 nt, Artificial Sequence
  Description of Artificial Sequence: Synthetic oligonucleotide
  Sense strand starting at position 2804 of SEQ ID NO: 1243622
cgauuauaguuaccaauaa

SEQ ID NO: 1429371 - RNA, 19 nt, Artificial Sequence
  Description of Artificial Sequence: Synthetic oligonucleotide
  Antisense strand to SEQ ID NO: 1429370
uuauugguaacuauaaucg

SEQ ID NO: 1429372 - RNA, 19 nt, Artificial Sequence
  Description of Artificial Sequence: Synthetic oligonucleotide
  Sense strand starting at position 3201 of SEQ ID NO: 1243622
gcagaagucucauuauguu

SEQ ID NO: 1429373 - RNA, 19 nt, Artificial Sequence
  Description of Artificial Sequence: Synthetic oligonucleotide
  Antisense strand to SEQ ID NO: 1429372
aacauaaugagacuucugc

SEQ ID NO: 1429374 - RNA, 19 nt, Artificial Sequence
  Description of Artificial Sequence: Synthetic oligonucleotide
  Sense strand starting at position 3397 of SEQ ID NO: 1243622
gcaagagaauugcuuugag

SEQ ID NO: 1429375 - RNA, 19 nt, Artificial Sequence
  Description of Artificial Sequence: Synthetic oligonucleotide
  Antisense strand to SEQ ID NO: 1429374
cucaaagcaauucucuugc

SEQ ID NO: 1429376 - RNA, 19 nt, Artificial Sequence
  Description of Artificial Sequence: Synthetic oligonucleotide
  Sense strand starting at position 3400 of SEQ ID NO: 1243622
agagaauugcuuugaggcu

SEQ ID NO: 1429377 - RNA, 19 nt, Artificial Sequence
  Description of Artificial Sequence: Synthetic oligonucleotide
  Antisense strand to SEQ ID NO: 1429376
agccucaaagcaauucucu

SEQ ID NO: 1429378 - RNA, 19 nt, Artificial Sequence
  Description of Artificial Sequence: Synthetic oligonucleotide
  Sense strand starting at position 3520 of SEQ ID NO: 1243622
gcggaauuggaauguuccu

SEQ ID NO: 1429379 - RNA, 19 nt, Artificial Sequence
  Description of Artificial Sequence: Synthetic oligonucleotide
  Antisense strand to SEQ ID NO: 1429378
aggaacauuccaauuccgc

SEQ ID NO: 1429380 - RNA, 19 nt, Artificial Sequence
  Description of Artificial Sequence: Synthetic oligonucleotide
  Sense strand starting at position 3562 of SEQ ID NO: 1243622
ugaggugaugguuacuuca

SEQ ID NO: 1429381 - RNA, 19 nt, Artificial Sequence
  Description of Artificial Sequence: Synthetic oligonucleotide
  Antisense strand to SEQ ID NO: 1429380
ugaaguaaccaucaccuca

SEQ ID NO: 1429382 - RNA, 19 nt, Artificial Sequence
  Description of Artificial Sequence: Synthetic oligonucleotide
  Sense strand starting at position 3654 of SEQ ID NO: 1243622
acuauuaaguguccauaac

SEQ ID NO: 1429383 - RNA, 19 nt, Artificial Sequence
  Description of Artificial Sequence: Synthetic oligonucleotide
  Antisense strand to SEQ ID NO: 1429382
guuauggacacuuaauagu

SEQ ID NO: 1429384 - RNA, 19 nt, Artificial Sequence
  Description of Artificial Sequence: Synthetic oligonucleotide
  Sense strand starting at position 3655 of SEQ ID NO: 1243622
cuauuaaguguccauaaca

SEQ ID NO: 1429385 - RNA, 19 nt, Artificial Sequence
  Description of Artificial Sequence: Synthetic oligonucleotide
  Antisense strand to SEQ ID NO: 1429384
uguuauggacacuuaauag

SEQ ID NO: 1429386 - RNA, 19 nt, Artificial Sequence
  Description of Artificial Sequence: Synthetic oligonucleotide
  Sense strand starting at position 3686 of SEQ ID NO: 1243622
guagacuuagccuauccaa

SEQ ID NO: 1429387 - RNA, 19 nt, Artificial Sequence
  Description of Artificial Sequence: Synthetic oligonucleotide
  Antisense strand to SEQ ID NO: 1429386
uuggauaggcuaagucuac

SEQ ID NO: 1429388 - RNA, 19 nt, Artificial Sequence
  Description of Artificial Sequence: Synthetic oligonucleotide
  Sense strand starting at position 3733 of SEQ ID NO: 1243622
gagaauaaggaagguuguu

SEQ ID NO: 1429389 - RNA, 19 nt, Artificial Sequence
  Description of Artificial Sequence: Synthetic oligonucleotide
  Antisense strand to SEQ ID NO: 1429388
aacaaccuuccuuauucuc

SEQ ID NO: 1429390 - RNA, 19 nt, Artificial Sequence
  Description of Artificial Sequence: Synthetic oligonucleotide
  Sense strand starting at position 3742 of SEQ ID NO: 1243622
gaagguuguuucuggagga

SEQ ID NO: 1429391 - RNA, 19 nt, Artificial Sequence
  Description of Artificial Sequence: Synthetic oligonucleotide
  Antisense strand to SEQ ID NO: 1429390
uccuccagaaacaaccuuc

SEQ ID NO: 1429392 - RNA, 19 nt, Artificial Sequence
  Description of Artificial Sequence: Synthetic oligonucleotide
  Sense strand starting at position 3743 of SEQ ID NO: 1243622
aagguuguuucuggaggaa

SEQ ID NO: 1429393 - RNA, 19 nt, Artificial Sequence
  Description of Artificial Sequence: Synthetic oligonucleotide
  Antisense strand to SEQ ID NO: 1429392
uuccuccagaaacaaccuu

SEQ ID NO: 1429394 - RNA, 19 nt, Artificial Sequence
  Description of Artificial Sequence: Synthetic oligonucleotide
  Sense strand starting at position 3745 of SEQ ID NO: 1243622
gguuguuucuggaggaagg

SEQ ID NO: 1429395 - RNA, 19 nt, Artificial Sequence
  Description of Artificial Sequence: Synthetic oligonucleotide
  Antisense strand to SEQ ID NO: 1429394
ccuuccuccagaaacaacc

SEQ ID NO: 1429396 - RNA, 19 nt, Artificial Sequence
  Description of Artificial Sequence: Synthetic oligonucleotide
  Sense strand starting at position 3746 of SEQ ID NO: 1243622
guuguuucuggaggaagga

SEQ ID NO: 1429397 - RNA, 19 nt, Artificial Sequence
  Description of Artificial Sequence: Synthetic oligonucleotide
  Antisense strand to SEQ ID NO: 1429396
uccuuccuccagaaacaac

SEQ ID NO: 1429398 - RNA, 19 nt, Artificial Sequence
  Description of Artificial Sequence: Synthetic oligonucleotide
  Sense strand starting at position 3786 of SEQ ID NO: 1243622
aggcgaauacgauaaucaa

SEQ ID NO: 1429399 - RNA, 19 nt, Artificial Sequence
  Description of Artificial Sequence: Synthetic oligonucleotide
  Antisense strand to SEQ ID NO: 1429398
uugauuaucguauucgccu

SEQ ID NO: 1429400 - RNA, 19 nt, Artificial Sequence
  Description of Artificial Sequence: Synthetic oligonucleotide
  Sense strand starting at position 71 of SEQ ID NO: 1243623
ggaggaaugcuccagugac

SEQ ID NO: 1429401 - RNA, 19 nt, Artificial Sequence
  Description of Artificial Sequence: Synthetic oligonucleotide
  Antisense strand to SEQ ID NO: 1429400
gucacuggagcauuccucc

SEQ ID NO: 1429402 - RNA, 19 nt, Artificial Sequence
  Description of Artificial Sequence: Synthetic oligonucleotide
  Sense strand starting at position 143 of SEQ ID NO: 1243623
guggauguagcuuggacaa

SEQ ID NO: 1429403 - RNA, 19 nt, Artificial Sequence
  Description of Artificial Sequence: Synthetic oligonucleotide
  Antisense strand to SEQ ID NO: 1429402
uuguccaagcuacauccac

SEQ ID NO: 1429404 - RNA, 19 nt, Artificial Sequence
  Description of Artificial Sequence: Synthetic oligonucleotide
  Sense strand starting at position 180 of SEQ ID NO: 1243623
gggcacuucugaucacuaa

SEQ ID NO: 1429405 - RNA, 19 nt, Artificial Sequence
  Description of Artificial Sequence: Synthetic oligonucleotide
  Antisense strand to SEQ ID NO: 1429404
uuagugaucagaagugccc

SEQ ID NO: 1429406 - RNA, 19 nt, Artificial Sequence
  Description of Artificial Sequence: Synthetic oligonucleotide
  Sense strand starting at position 184 of SEQ ID NO: 1243623
acuucugaucacuaagugu

SEQ ID NO: 1429407 - RNA, 19 nt, Artificial Sequence
  Description of Artificial Sequence: Synthetic oligonucleotide
  Antisense strand to SEQ ID NO: 1429406
acacuuagugaucagaagu

SEQ ID NO: 1429408 - RNA, 19 nt, Artificial Sequence
  Description of Artificial Sequence: Synthetic oligonucleotide
  Sense strand starting at position 736 of SEQ ID NO: 1243623
uuggcuuccuacuccagaa

SEQ ID NO: 1429409 - RNA, 19 nt, Artificial Sequence
  Description of Artificial Sequence: Synthetic oligonucleotide
  Antisense strand to SEQ ID NO: 1429408
uucuggaguaggaagccaa

SEQ ID NO: 1429410 - RNA, 19 nt, Artificial Sequence
  Description of Artificial Sequence: Synthetic oligonucleotide
  Sense strand starting at position 812 of SEQ ID NO: 1243623
gaaagccauucugugcuua

SEQ ID NO: 1429411 - RNA, 19 nt, Artificial Sequence
  Description of Artificial Sequence: Synthetic oligonucleotide
  Antisense strand to SEQ ID NO: 1429410
uaagcacagaauggcuuuc

SEQ ID NO: 1429412 - RNA, 19 nt, Artificial Sequence
  Description of Artificial Sequence: Synthetic oligonucleotide
  Sense strand starting at position 1161 of SEQ ID NO: 1243623
guaggacccugcuuagaug

SEQ ID NO: 1429413 - RNA, 19 nt, Artificial Sequence
  Description of Artificial Sequence: Synthetic oligonucleotide
  Antisense strand to SEQ ID NO: 1429412
caucuaagcaggguccuac

SEQ ID NO: 1429414 - RNA, 19 nt, Artificial Sequence
  Description of Artificial Sequence: Synthetic oligonucleotide
  Sense strand starting at position 1252 of SEQ ID NO: 1243623
gggagaucccugcgggaga

SEQ ID NO: 1429415 - RNA, 19 nt, Artificial Sequence
  Description of Artificial Sequence: Synthetic oligonucleotide
  Antisense strand to SEQ ID NO: 1429414
ucucccgcagggaucuccc

SEQ ID NO: 1429416 - RNA, 19 nt, Artificial Sequence
  Description of Artificial Sequence: Synthetic oligonucleotide
  Sense strand starting at position 1267 of SEQ ID NO: 1243623
gagaccuuaguuugcggaa

SEQ ID NO: 1429417 - RNA, 19 nt, Artificial Sequence
  Description of Artificial Sequence: Synthetic oligonucleotide
  Antisense strand to SEQ ID NO: 1429416
uuccgcaaacuaaggucuc

SEQ ID NO: 1429418 - RNA, 19 nt, Artificial Sequence
  Description of Artificial Sequence: Synthetic oligonucleotide
  Sense strand starting at position 1309 of SEQ ID NO: 1243623
gaaucugccucaugggaau

SEQ ID NO: 1429419 - RNA, 19 nt, Artificial Sequence
  Description of Artificial Sequence: Synthetic oligonucleotide
  Antisense strand to SEQ ID NO: 1429418
auucccaugaggcagauuc

SEQ ID NO: 1429420 - RNA, 19 nt, Artificial Sequence
  Description of Artificial Sequence: Synthetic oligonucleotide
  Sense strand starting at position 2014 of SEQ ID NO: 1243623
ccgcccugcggguuauaaa

SEQ ID NO: 1429421 - RNA, 19 nt, Artificial Sequence
  Description of Artificial Sequence: Synthetic oligonucleotide
  Antisense strand to SEQ ID NO: 1429420
uuuauaacccgcagggcgg

SEQ ID NO: 1429422 - RNA, 19 nt, Artificial Sequence
  Description of Artificial Sequence: Synthetic oligonucleotide
  Sense strand starting at position 2215 of SEQ ID NO: 1243623
ggccuccucucuuuagaag

SEQ ID NO: 1429423 - RNA, 19 nt, Artificial Sequence
  Description of Artificial Sequence: Synthetic oligonucleotide
  Antisense strand to SEQ ID NO: 1429422
cuucuaaagagaggaggcc

SEQ ID NO: 1429424 - RNA, 19 nt, Artificial Sequence
  Description of Artificial Sequence: Synthetic oligonucleotide
  Sense strand starting at position 2216 of SEQ ID NO: 1243623
gccuccucucuuuagaaga

SEQ ID NO: 1429425 - RNA, 19 nt, Artificial Sequence
  Description of Artificial Sequence: Synthetic oligonucleotide
  Antisense strand to SEQ ID NO: 1429424
ucuucuaaagagaggaggc

SEQ ID NO: 1429426 - RNA, 19 nt, Artificial Sequence
  Description of Artificial Sequence: Synthetic oligonucleotide
  Sense strand starting at position 2682 of SEQ ID NO: 1243623
gccagucgcucagcagaaa

SEQ ID NO: 1429427 - RNA, 19 nt, Artificial Sequence
  Description of Artificial Sequence: Synthetic oligonucleotide
  Antisense strand to SEQ ID NO: 1429426
uuucugcugagcgacuggc

SEQ ID NO: 1429428 - RNA, 19 nt, Artificial Sequence
  Description of Artificial Sequence: Synthetic oligonucleotide
  Sense strand starting at position 2745 of SEQ ID NO: 1243623
aggcuuugagagcgacaca

SEQ ID NO: 1429429 - RNA, 19 nt, Artificial Sequence
  Description of Artificial Sequence: Synthetic oligonucleotide
  Antisense strand to SEQ ID NO: 1429428
ugugucgcucucaaagccu

SEQ ID NO: 1429430 - RNA, 19 nt, Artificial Sequence
  Description of Artificial Sequence: Synthetic oligonucleotide
  Sense strand starting at position 2746 of SEQ ID NO: 1243623
ggcuuugagagcgacacaa

SEQ ID NO: 1429431 - RNA, 19 nt, Artificial Sequence
  Description of Artificial Sequence: Synthetic oligonucleotide
  Antisense strand to SEQ ID NO: 1429430
uugugucgcucucaaagcc

SEQ ID NO: 1429432 - RNA, 19 nt, Artificial Sequence
  Description of Artificial Sequence: Synthetic oligonucleotide
  Sense strand starting at position 2825 of SEQ ID NO: 1243623
agaggcuugcuccaaguca

SEQ ID NO: 1429433 - RNA, 19 nt, Artificial Sequence
  Description of Artificial Sequence: Synthetic oligonucleotide
  Antisense strand to SEQ ID NO: 1429432
ugacuuggagcaagccucu

SEQ ID NO: 1429434 - RNA, 19 nt, Artificial Sequence
  Description of Artificial Sequence: Synthetic oligonucleotide
  Sense strand starting at position 2917 of SEQ ID NO: 1243623
ggaggacagucuuguccua

SEQ ID NO: 1429435 - RNA, 19 nt, Artificial Sequence
  Description of Artificial Sequence: Synthetic oligonucleotide
  Antisense strand to SEQ ID NO: 1429434
uaggacaagacuguccucc

SEQ ID NO: 1429436 - RNA, 19 nt, Artificial Sequence
  Description of Artificial Sequence: Synthetic oligonucleotide
  Sense strand starting at position 2919 of SEQ ID NO: 1243623
aggacagucuuguccuauu

SEQ ID NO: 1429437 - RNA, 19 nt, Artificial Sequence
  Description of Artificial Sequence: Synthetic oligonucleotide
  Antisense strand to SEQ ID NO: 1429436
aauaggacaagacuguccu

SEQ ID NO: 1429438 - RNA, 19 nt, Artificial Sequence
  Description of Artificial Sequence: Synthetic oligonucleotide
  Sense strand starting at position 3145 of SEQ ID NO: 1243623
uugggaaucacuugggcuu

SEQ ID NO: 1429439 - RNA, 19 nt, Artificial Sequence
  Description of Artificial Sequence: Synthetic oligonucleotide
  Antisense strand to SEQ ID NO: 1429438
aagcccaagugauucccaa

SEQ ID NO: 1429440 - RNA, 19 nt, Artificial Sequence
  Description of Artificial Sequence: Synthetic oligonucleotide
  Sense strand starting at position 3252 of SEQ ID NO: 1243623
cgcguuccugugagaugca

SEQ ID NO: 1429441 - RNA, 19 nt, Artificial Sequence
  Description of Artificial Sequence: Synthetic oligonucleotide
  Antisense strand to SEQ ID NO: 1429440
ugcaucucacaggaacgcg

SEQ ID NO: 1429442 - RNA, 19 nt, Artificial Sequence
  Description of Artificial Sequence: Synthetic oligonucleotide
  Sense strand starting at position 3277 of SEQ ID NO: 1243623
gugagaucgcacugacuug

SEQ ID NO: 1429443 - RNA, 19 nt, Artificial Sequence
  Description of Artificial Sequence: Synthetic oligonucleotide
  Antisense strand to SEQ ID NO: 1429442
caagucagugcgaucucac

SEQ ID NO: 1429444 - RNA, 19 nt, Artificial Sequence
  Description of Artificial Sequence: Synthetic oligonucleotide
  Sense strand starting at position 3282 of SEQ ID NO: 1243623
aucgcacugacuugucaga

SEQ ID NO: 1429445 - RNA, 19 nt, Artificial Sequence
  Description of Artificial Sequence: Synthetic oligonucleotide
  Antisense strand to SEQ ID NO: 1429444
ucugacaagucagugcgau

SEQ ID NO: 1429446 - RNA, 19 nt, Artificial Sequence
  Description of Artificial Sequence: Synthetic oligonucleotide
  Sense strand starting at position 3284 of SEQ ID NO: 1243623
cgcacugacuugucagaug

SEQ ID NO: 1429447 - RNA, 19 nt, Artificial Sequence
  Description of Artificial Sequence: Synthetic oligonucleotide
  Antisense strand to SEQ ID NO: 1429446
caucugacaagucagugcg

SEQ ID NO: 1429448 - RNA, 19 nt, Artificial Sequence
  Description of Artificial Sequence: Synthetic oligonucleotide
  Sense strand starting at position 3289 of SEQ ID NO: 1243623
ugacuugucagaugacgug

SEQ ID NO: 1429449 - RNA, 19 nt, Artificial Sequence
  Description of Artificial Sequence: Synthetic oligonucleotide
  Antisense strand to SEQ ID NO: 1429448
cacgucaucugacaaguca

SEQ ID NO: 1429450 - RNA, 19 nt, Artificial Sequence
  Description of Artificial Sequence: Synthetic oligonucleotide
  Sense strand starting at position 3370 of SEQ ID NO: 1243623
aaggcagggccuuguuaaa

SEQ ID NO: 1429451 - RNA, 19 nt, Artificial Sequence
  Description of Artificial Sequence: Synthetic oligonucleotide
  Antisense strand to SEQ ID NO: 1429450
uuuaacaaggcccugccuu

SEQ ID NO: 1429452 - RNA, 19 nt, Artificial Sequence
  Description of Artificial Sequence: Synthetic oligonucleotide
  Sense strand starting at position 3564 of SEQ ID NO: 1243623
gguggacguuugugaucag

SEQ ID NO: 1429453 - RNA, 19 nt, Artificial Sequence
  Description of Artificial Sequence: Synthetic oligonucleotide
  Antisense strand to SEQ ID NO: 1429452
cugaucacaaacguccacc

SEQ ID NO: 1429454 - RNA, 19 nt, Artificial Sequence
  Description of Artificial Sequence: Synthetic oligonucleotide
  Sense strand starting at position 3565 of SEQ ID NO: 1243623
guggacguuugugaucaga

SEQ ID NO: 1429455 - RNA, 19 nt, Artificial Sequence
  Description of Artificial Sequence: Synthetic oligonucleotide
  Antisense strand to SEQ ID NO: 1429454
ucugaucacaaacguccac

SEQ ID NO: 1429456 - RNA, 19 nt, Artificial Sequence
  Description of Artificial Sequence: Synthetic oligonucleotide
  Sense strand starting at position 3567 of SEQ ID NO: 1243623
ggacguuugugaucagagc

SEQ ID NO: 1429457 - RNA, 19 nt, Artificial Sequence
  Description of Artificial Sequence: Synthetic oligonucleotide
  Antisense strand to SEQ ID NO: 1429456
gcucugaucacaaacgucc

SEQ ID NO: 1429458 - RNA, 19 nt, Artificial Sequence
  Description of Artificial Sequence: Synthetic oligonucleotide
  Sense strand starting at position 3568 of SEQ ID NO: 1243623
gacguuugugaucagagca

SEQ ID NO: 1429459 - RNA, 19 nt, Artificial Sequence
  Description of Artificial Sequence: Synthetic oligonucleotide
  Antisense strand to SEQ ID NO: 1429458
ugcucugaucacaaacguc

SEQ ID NO: 1429460 - RNA, 19 nt, Artificial Sequence
  Description of Artificial Sequence: Synthetic oligonucleotide
  Sense strand starting at position 3703 of SEQ ID NO: 1243623
gggugucugugugcaaaug

SEQ ID NO: 1429461 - RNA, 19 nt, Artificial Sequence
  Description of Artificial Sequence: Synthetic oligonucleotide
  Antisense strand to SEQ ID NO: 1429460
cauuugcacacagacaccc

SEQ ID NO: 1429462 - RNA, 19 nt, Artificial Sequence
  Description of Artificial Sequence: Synthetic oligonucleotide
  Sense strand starting at position 3704 of SEQ ID NO: 1243623
ggugucugugugcaaauga

SEQ ID NO: 1429463 - RNA, 19 nt, Artificial Sequence
  Description of Artificial Sequence: Synthetic oligonucleotide
  Antisense strand to SEQ ID NO: 1429462
ucauuugcacacagacacc

SEQ ID NO: 1429464 - RNA, 19 nt, Artificial Sequence
  Description of Artificial Sequence: Synthetic oligonucleotide
  Sense strand starting at position 3741 of SEQ ID NO: 1243623
gaagcagucuuucugugga

SEQ ID NO: 1429465 - RNA, 19 nt, Artificial Sequence
  Description of Artificial Sequence: Synthetic oligonucleotide
  Antisense strand to SEQ ID NO: 1429464
uccacagaaagacugcuuc

SEQ ID NO: 1429466 - RNA, 19 nt, Artificial Sequence
  Description of Artificial Sequence: Synthetic oligonucleotide
  Sense strand starting at position 3743 of SEQ ID NO: 1243623
agcagucuuucuguggaaa

SEQ ID NO: 1429467 - RNA, 19 nt, Artificial Sequence
  Description of Artificial Sequence: Synthetic oligonucleotide
  Antisense strand to SEQ ID NO: 1429466
uuuccacagaaagacugcu

SEQ ID NO: 1429468 - RNA, 19 nt, Artificial Sequence
  Description of Artificial Sequence: Synthetic oligonucleotide
  Sense strand starting at position 3744 of SEQ ID NO: 1243623
gcagucuuucuguggaaag

SEQ ID NO: 1429469 - RNA, 19 nt, Artificial Sequence
  Description of Artificial Sequence: Synthetic oligonucleotide
  Antisense strand to SEQ ID NO: 1429468
cuuuccacagaaagacugc

SEQ ID NO: 1429470 - RNA, 19 nt, Artificial Sequence
  Description of Artificial Sequence: Synthetic oligonucleotide
  Sense strand starting at position 3745 of SEQ ID NO: 1243623
cagucuuucuguggaaaga

SEQ ID NO: 1429471 - RNA, 19 nt, Artificial Sequence
  Description of Artificial Sequence: Synthetic oligonucleotide
  Antisense strand to SEQ ID NO: 1429470
ucuuuccacagaaagacug

SEQ ID NO: 1429472 - RNA, 19 nt, Artificial Sequence
  Description of Artificial Sequence: Synthetic oligonucleotide
  Sense strand starting at position 3746 of SEQ ID NO: 1243623
agucuuucuguggaaagag

SEQ ID NO: 1429473 - RNA, 19 nt, Artificial Sequence
  Description of Artificial Sequence: Synthetic oligonucleotide
  Antisense strand to SEQ ID NO: 1429472
cucuuuccacagaaagacu

SEQ ID NO: 1429474 - RNA, 19 nt, Artificial Sequence
  Description of Artificial Sequence: Synthetic oligonucleotide
  Sense strand starting at position 3903 of SEQ ID NO: 1243623
uccaaagaguuccugagaa

SEQ ID NO: 1429475 - RNA, 19 nt, Artificial Sequence
  Description of Artificial Sequence: Synthetic oligonucleotide
  Antisense strand to SEQ ID NO: 1429474
uucucaggaacucuuugga

SEQ ID NO: 1429476 - RNA, 19 nt, Artificial Sequence
  Description of Artificial Sequence: Synthetic oligonucleotide
  Sense strand starting at position 3907 of SEQ ID NO: 1243623
aagaguuccugagaacccu

SEQ ID NO: 1429477 - RNA, 19 nt, Artificial Sequence
  Description of Artificial Sequence: Synthetic oligonucleotide
  Antisense strand to SEQ ID NO: 1429476
aggguucucaggaacucuu

SEQ ID NO: 1429478 - RNA, 19 nt, Artificial Sequence
  Description of Artificial Sequence: Synthetic oligonucleotide
  Sense strand starting at position 371 of SEQ ID NO: 1243624
ggaauuaaguugcaaccuu

SEQ ID NO: 1429479 - RNA, 19 nt, Artificial Sequence
  Description of Artificial Sequence: Synthetic oligonucleotide
  Antisense strand to SEQ ID NO: 1429478
aagguugcaacuuaauucc

SEQ ID NO: 1429480 - RNA, 19 nt, Artificial Sequence
  Description of Artificial Sequence: Synthetic oligonucleotide
  Sense strand starting at position 379 of SEQ ID NO: 1243624
guugcaaccuuugccuaua

SEQ ID NO: 1429481 - RNA, 19 nt, Artificial Sequence
  Description of Artificial Sequence: Synthetic oligonucleotide
  Antisense strand to SEQ ID NO: 1429480
uauaggcaaagguugcaac

SEQ ID NO: 1429482 - RNA, 19 nt, Artificial Sequence
  Description of Artificial Sequence: Synthetic oligonucleotide
  Sense strand starting at position 382 of SEQ ID NO: 1243624
gcaaccuuugccuauaaga

SEQ ID NO: 1429483 - RNA, 19 nt, Artificial Sequence
  Description of Artificial Sequence: Synthetic oligonucleotide
  Antisense strand to SEQ ID NO: 1429482
ucuuauaggcaaagguugc

SEQ ID NO: 1429484 - RNA, 19 nt, Artificial Sequence
  Description of Artificial Sequence: Synthetic oligonucleotide
  Sense strand starting at position 393 of SEQ ID NO: 1243624
cuauaagacucucugcaag

SEQ ID NO: 1429485 - RNA, 19 nt, Artificial Sequence
  Description of Artificial Sequence: Synthetic oligonucleotide
  Antisense strand to SEQ ID NO: 1429484
cuugcagagagucuuauag

SEQ ID NO: 1429486 - RNA, 19 nt, Artificial Sequence
  Description of Artificial Sequence: Synthetic oligonucleotide
  Sense strand starting at position 563 of SEQ ID NO: 1243624
cuuucugaaccucagaguu

SEQ ID NO: 1429487 - RNA, 19 nt, Artificial Sequence
  Description of Artificial Sequence: Synthetic oligonucleotide
  Antisense strand to SEQ ID NO: 1429486
aacucugagguucagaaag

SEQ ID NO: 1429488 - RNA, 19 nt, Artificial Sequence
  Description of Artificial Sequence: Synthetic oligonucleotide
  Sense strand starting at position 565 of SEQ ID NO: 1243624
uucugaaccucagaguuaa

SEQ ID NO: 1429489 - RNA, 19 nt, Artificial Sequence
  Description of Artificial Sequence: Synthetic oligonucleotide
  Antisense strand to SEQ ID NO: 1429488
uuaacucugagguucagaa

SEQ ID NO: 1429490 - RNA, 19 nt, Artificial Sequence
  Description of Artificial Sequence: Synthetic oligonucleotide
  Sense strand starting at position 625 of SEQ ID NO: 1243624
uugcaaggcuguugagaaa

SEQ ID NO: 1429491 - RNA, 19 nt, Artificial Sequence
  Description of Artificial Sequence: Synthetic oligonucleotide
  Antisense strand to SEQ ID NO: 1429490
uuucucaacagccuugcaa

SEQ ID NO: 1429492 - RNA, 19 nt, Artificial Sequence
  Description of Artificial Sequence: Synthetic oligonucleotide
  Sense strand starting at position 688 of SEQ ID NO: 1243624
guggcucaguggcauaauu

SEQ ID NO: 1429493 - RNA, 19 nt, Artificial Sequence
  Description of Artificial Sequence: Synthetic oligonucleotide
  Antisense strand to SEQ ID NO: 1429492
aauuaugccacugagccac

SEQ ID NO: 1429494 - RNA, 19 nt, Artificial Sequence
  Description of Artificial Sequence: Synthetic oligonucleotide
  Sense strand starting at position 801 of SEQ ID NO: 1243624
cgacuugagcaccacuuau

SEQ ID NO: 1429495 - RNA, 19 nt, Artificial Sequence
  Description of Artificial Sequence: Synthetic oligonucleotide
  Antisense strand to SEQ ID NO: 1429494
auaaguggugcucaagucg

SEQ ID NO: 1429496 - RNA, 19 nt, Artificial Sequence
  Description of Artificial Sequence: Synthetic oligonucleotide
  Sense strand starting at position 830 of SEQ ID NO: 1243624
auuauucuguuacuagaga

SEQ ID NO: 1429497 - RNA, 19 nt, Artificial Sequence
  Description of Artificial Sequence: Synthetic oligonucleotide
  Antisense strand to SEQ ID NO: 1429496
ucucuaguaacagaauaau

SEQ ID NO: 1429498 - RNA, 19 nt, Artificial Sequence
  Description of Artificial Sequence: Synthetic oligonucleotide
  Sense strand starting at position 831 of SEQ ID NO: 1243624
uuauucuguuacuagagau

SEQ ID NO: 1429499 - RNA, 19 nt, Artificial Sequence
  Description of Artificial Sequence: Synthetic oligonucleotide
  Antisense strand to SEQ ID NO: 1429498
aucucuaguaacagaauaa

SEQ ID NO: 1429500 - RNA, 19 nt, Artificial Sequence
  Description of Artificial Sequence: Synthetic oligonucleotide
  Sense strand starting at position 975 of SEQ ID NO: 1243624
agaagaauugcucaggcau

SEQ ID NO: 1429501 - RNA, 19 nt, Artificial Sequence
  Description of Artificial Sequence: Synthetic oligonucleotide
  Antisense strand to SEQ ID NO: 1429500
augccugagcaauucuucu

SEQ ID NO: 1429502 - RNA, 19 nt, Artificial Sequence
  Description of Artificial Sequence: Synthetic oligonucleotide
  Sense strand starting at position 977 of SEQ ID NO: 1243624
aagaauugcucaggcauug

SEQ ID NO: 1429503 - RNA, 19 nt, Artificial Sequence
  Description of Artificial Sequence: Synthetic oligonucleotide
  Antisense strand to SEQ ID NO: 1429502
caaugccugagcaauucuu

SEQ ID NO: 1429504 - RNA, 19 nt, Artificial Sequence
  Description of Artificial Sequence: Synthetic oligonucleotide
  Sense strand starting at position 982 of SEQ ID NO: 1243624
uugcucaggcauugaguaa

SEQ ID NO: 1429505 - RNA, 19 nt, Artificial Sequence
  Description of Artificial Sequence: Synthetic oligonucleotide
  Antisense strand to SEQ ID NO: 1429504
uuacucaaugccugagcaa

SEQ ID NO: 1429506 - RNA, 19 nt, Artificial Sequence
  Description of Artificial Sequence: Synthetic oligonucleotide
  Sense strand starting at position 983 of SEQ ID NO: 1243624
ugcucaggcauugaguaaa

SEQ ID NO: 1429507 - RNA, 19 nt, Artificial Sequence
  Description of Artificial Sequence: Synthetic oligonucleotide
  Antisense strand to SEQ ID NO: 1429506
uuuacucaaugccugagca

SEQ ID NO: 1429508 - RNA, 19 nt, Artificial Sequence
  Description of Artificial Sequence: Synthetic oligonucleotide
  Sense strand starting at position 986 of SEQ ID NO: 1243624
ucaggcauugaguaaaugu

SEQ ID NO: 1429509 - RNA, 19 nt, Artificial Sequence
  Description of Artificial Sequence: Synthetic oligonucleotide
  Antisense strand to SEQ ID NO: 1429508
acauuuacucaaugccuga

SEQ ID NO: 1429510 - RNA, 19 nt, Artificial Sequence
  Description of Artificial Sequence: Synthetic oligonucleotide
  Sense strand starting at position 1317 of SEQ ID NO: 1243624
gcccgaaauugaguauugu

SEQ ID NO: 1429511 - RNA, 19 nt, Artificial Sequence
  Description of Artificial Sequence: Synthetic oligonucleotide
  Antisense strand to SEQ ID NO: 1429510
acaauacucaauuucgggc

SEQ ID NO: 1429512 - RNA, 19 nt, Artificial Sequence
  Description of Artificial Sequence: Synthetic oligonucleotide
  Sense strand starting at position 1318 of SEQ ID NO: 1243624
cccgaaauugaguauuguu

SEQ ID NO: 1429513 - RNA, 19 nt, Artificial Sequence
  Description of Artificial Sequence: Synthetic oligonucleotide
  Antisense strand to SEQ ID NO: 1429512
aacaauacucaauuucggg

SEQ ID NO: 1429514 - RNA, 19 nt, Artificial Sequence
  Description of Artificial Sequence: Synthetic oligonucleotide
  Sense strand starting at position 1387 of SEQ ID NO: 1243624
gacagcaucucugugugua

SEQ ID NO: 1429515 - RNA, 19 nt, Artificial Sequence
  Description of Artificial Sequence: Synthetic oligonucleotide
  Antisense strand to SEQ ID NO: 1429514
uacacacagagaugcuguc

SEQ ID NO: 1429516 - RNA, 19 nt, Artificial Sequence
  Description of Artificial Sequence: Synthetic oligonucleotide
  Sense strand starting at position 1388 of SEQ ID NO: 1243624
acagcaucucuguguguau

SEQ ID NO: 1429517 - RNA, 19 nt, Artificial Sequence
  Description of Artificial Sequence: Synthetic oligonucleotide
  Antisense strand to SEQ ID NO: 1429516
auacacacagagaugcugu

SEQ ID NO: 1429518 - RNA, 19 nt, Artificial Sequence
  Description of Artificial Sequence: Synthetic oligonucleotide
  Sense strand starting at position 2591 of SEQ ID NO: 1243624
ugcagaaacuguggcaaua

SEQ ID NO: 1429519 - RNA, 19 nt, Artificial Sequence
  Description of Artificial Sequence: Synthetic oligonucleotide
  Antisense strand to SEQ ID NO: 1429518
uauugccacaguuucugca

SEQ ID NO: 1429520 - RNA, 19 nt, Artificial Sequence
  Description of Artificial Sequence: Synthetic oligonucleotide
  Sense strand starting at position 2622 of SEQ ID NO: 1243624
cugggaucucucugauggu

SEQ ID NO: 1429521 - RNA, 19 nt, Artificial Sequence
  Description of Artificial Sequence: Synthetic oligonucleotide
  Antisense strand to SEQ ID NO: 1429520
accaucagagagaucccag

SEQ ID NO: 1429522 - RNA, 19 nt, Artificial Sequence
  Description of Artificial Sequence: Synthetic oligonucleotide
  Sense strand starting at position 2982 of SEQ ID NO: 1243624
ggugggagucagggaagau

SEQ ID NO: 1429523 - RNA, 19 nt, Artificial Sequence
  Description of Artificial Sequence: Synthetic oligonucleotide
  Antisense strand to SEQ ID NO: 1429522
aucuucccugacucccacc

SEQ ID NO: 1429524 - RNA, 19 nt, Artificial Sequence
  Description of Artificial Sequence: Synthetic oligonucleotide
  Sense strand starting at position 3138 of SEQ ID NO: 1243624
gccuuugaggucuggagga

SEQ ID NO: 1429525 - RNA, 19 nt, Artificial Sequence
  Description of Artificial Sequence: Synthetic oligonucleotide
  Antisense strand to SEQ ID NO: 1429524
uccuccagaccucaaaggc

SEQ ID NO: 1429526 - RNA, 19 nt, Artificial Sequence
  Description of Artificial Sequence: Synthetic oligonucleotide
  Sense strand starting at position 3207 of SEQ ID NO: 1243624
guggauugagggugugaca

SEQ ID NO: 1429527 - RNA, 19 nt, Artificial Sequence
  Description of Artificial Sequence: Synthetic oligonucleotide
  Antisense strand to SEQ ID NO: 1429526
ugucacacccucaauccac

SEQ ID NO: 1429528 - RNA, 19 nt, Artificial Sequence
  Description of Artificial Sequence: Synthetic oligonucleotide
  Sense strand starting at position 3249 of SEQ ID NO: 1243624
ggcgcuaauaccugaugua

SEQ ID NO: 1429529 - RNA, 19 nt, Artificial Sequence
  Description of Artificial Sequence: Synthetic oligonucleotide
  Antisense strand to SEQ ID NO: 1429528
uacaucagguauuagcgcc

SEQ ID NO: 1429530 - RNA, 19 nt, Artificial Sequence
  Description of Artificial Sequence: Synthetic oligonucleotide
  Sense strand starting at position 3250 of SEQ ID NO: 1243624
gcgcuaauaccugauguau

SEQ ID NO: 1429531 - RNA, 19 nt, Artificial Sequence
  Description of Artificial Sequence: Synthetic oligonucleotide
  Antisense strand to SEQ ID NO: 1429530
auacaucagguauuagcgc

SEQ ID NO: 1429532 - RNA, 19 nt, Artificial Sequence
  Description of Artificial Sequence: Synthetic oligonucleotide
  Sense strand starting at position 3345 of SEQ ID NO: 1243624
ccugauacuugguucugga

SEQ ID NO: 1429533 - RNA, 19 nt, Artificial Sequence
  Description of Artificial Sequence: Synthetic oligonucleotide
  Antisense strand to SEQ ID NO: 1429532
uccagaaccaaguaucagg

SEQ ID NO: 1429534 - RNA, 19 nt, Artificial Sequence
  Description of Artificial Sequence: Synthetic oligonucleotide
  Sense strand starting at position 3374 of SEQ ID NO: 1243624
uaaauugucuuagggccua

SEQ ID NO: 1429535 - RNA, 19 nt, Artificial Sequence
  Description of Artificial Sequence: Synthetic oligonucleotide
  Antisense strand to SEQ ID NO: 1429534
uaggcccuaagacaauuua

SEQ ID NO: 1429536 - RNA, 19 nt, Artificial Sequence
  Description of Artificial Sequence: Synthetic oligonucleotide
  Sense strand starting at position 3379 of SEQ ID NO: 1243624
ugucuuagggccuagaggu

SEQ ID NO: 1429537 - RNA, 19 nt, Artificial Sequence
  Description of Artificial Sequence: Synthetic oligonucleotide
  Antisense strand to SEQ ID NO: 1429536
accucuaggcccuaagaca

SEQ ID NO: 1429538 - RNA, 19 nt, Artificial Sequence
  Description of Artificial Sequence: Synthetic oligonucleotide
  Sense strand starting at position 3533 of SEQ ID NO: 1243624
gggacaucauuagagagga

SEQ ID NO: 1429539 - RNA, 19 nt, Artificial Sequence
  Description of Artificial Sequence: Synthetic oligonucleotide
  Antisense strand to SEQ ID NO: 1429538
uccucucuaaugauguccc

SEQ ID NO: 1429540 - RNA, 19 nt, Artificial Sequence
  Description of Artificial Sequence: Synthetic oligonucleotide
  Sense strand starting at position 3782 of SEQ ID NO: 1243624
gucacuuucuguugggaga

SEQ ID NO: 1429541 - RNA, 19 nt, Artificial Sequence
  Description of Artificial Sequence: Synthetic oligonucleotide
  Antisense strand to SEQ ID NO: 1429540
ucucccaacagaaagugac

SEQ ID NO: 1429542 - RNA, 19 nt, Artificial Sequence
  Description of Artificial Sequence: Synthetic oligonucleotide
  Sense strand starting at position 3783 of SEQ ID NO: 1243624
ucacuuucuguugggagau

SEQ ID NO: 1429543 - RNA, 19 nt, Artificial Sequence
  Description of Artificial Sequence: Synthetic oligonucleotide
  Antisense strand to SEQ ID NO: 1429542
aucucccaacagaaaguga

SEQ ID NO: 1429544 - RNA, 19 nt, Artificial Sequence
  Description of Artificial Sequence: Synthetic oligonucleotide
  Sense strand starting at position 3785 of SEQ ID NO: 1243624
acuuucuguugggagauga

SEQ ID NO: 1429545 - RNA, 19 nt, Artificial Sequence
  Description of Artificial Sequence: Synthetic oligonucleotide
  Antisense strand to SEQ ID NO: 1429544
ucaucucccaacagaaagu

SEQ ID NO: 1429546 - RNA, 19 nt, Artificial Sequence
  Description of Artificial Sequence: Synthetic oligonucleotide
  Sense strand starting at position 257 of SEQ ID NO: 1243625
agaugauugggcugagcuu

SEQ ID NO: 1429547 - RNA, 19 nt, Artificial Sequence
  Description of Artificial Sequence: Synthetic oligonucleotide
  Antisense strand to SEQ ID NO: 1429546
aagcucagcccaaucaucu

SEQ ID NO: 1429548 - RNA, 19 nt, Artificial Sequence
  Description of Artificial Sequence: Synthetic oligonucleotide
  Sense strand starting at position 284 of SEQ ID NO: 1243625
ggaacuguuacuugguaac

SEQ ID NO: 1429549 - RNA, 19 nt, Artificial Sequence
  Description of Artificial Sequence: Synthetic oligonucleotide
  Antisense strand to SEQ ID NO: 1429548
guuaccaaguaacaguucc

SEQ ID NO: 1429550 - RNA, 19 nt, Artificial Sequence
  Description of Artificial Sequence: Synthetic oligonucleotide
  Sense strand starting at position 326 of SEQ ID NO: 1243625
gggaaaucaugccaaggaa

SEQ ID NO: 1429551 - RNA, 19 nt, Artificial Sequence
  Description of Artificial Sequence: Synthetic oligonucleotide
  Antisense strand to SEQ ID NO: 1429550
uuccuuggcaugauuuccc

SEQ ID NO: 1429552 - RNA, 19 nt, Artificial Sequence
  Description of Artificial Sequence: Synthetic oligonucleotide
  Sense strand starting at position 384 of SEQ ID NO: 1243625
gccuuaugagcugaaugga

SEQ ID NO: 1429553 - RNA, 19 nt, Artificial Sequence
  Description of Artificial Sequence: Synthetic oligonucleotide
  Antisense strand to SEQ ID NO: 1429552
uccauucagcucauaaggc

SEQ ID NO: 1429554 - RNA, 19 nt, Artificial Sequence
  Description of Artificial Sequence: Synthetic oligonucleotide
  Sense strand starting at position 397 of SEQ ID NO: 1243625
aauggagucuuucugcaga

SEQ ID NO: 1429555 - RNA, 19 nt, Artificial Sequence
  Description of Artificial Sequence: Synthetic oligonucleotide
  Antisense strand to SEQ ID NO: 1429554
ucugcagaaagacuccauu

SEQ ID NO: 1429556 - RNA, 19 nt, Artificial Sequence
  Description of Artificial Sequence: Synthetic oligonucleotide
  Sense strand starting at position 419 of SEQ ID NO: 1243625
gugagugacccaggauuga

SEQ ID NO: 1429557 - RNA, 19 nt, Artificial Sequence
  Description of Artificial Sequence: Synthetic oligonucleotide
  Antisense strand to SEQ ID NO: 1429556
ucaauccugggucacucac

SEQ ID NO: 1429558 - RNA, 19 nt, Artificial Sequence
  Description of Artificial Sequence: Synthetic oligonucleotide
  Sense strand starting at position 595 of SEQ ID NO: 1243625
aagguuaguaucugcagga

SEQ ID NO: 1429559 - RNA, 19 nt, Artificial Sequence
  Description of Artificial Sequence: Synthetic oligonucleotide
  Antisense strand to SEQ ID NO: 1429558
uccugcagauacuaaccuu

SEQ ID NO: 1429560 - RNA, 19 nt, Artificial Sequence
  Description of Artificial Sequence: Synthetic oligonucleotide
  Sense strand starting at position 596 of SEQ ID NO: 1243625
agguuaguaucugcaggau

SEQ ID NO: 1429561 - RNA, 19 nt, Artificial Sequence
  Description of Artificial Sequence: Synthetic oligonucleotide
  Antisense strand to SEQ ID NO: 1429560
auccugcagauacuaaccu

SEQ ID NO: 1429562 - RNA, 19 nt, Artificial Sequence
  Description of Artificial Sequence: Synthetic oligonucleotide
  Sense strand starting at position 610 of SEQ ID NO: 1243625
aggauugggacuuacguau

SEQ ID NO: 1429563 - RNA, 19 nt, Artificial Sequence
  Description of Artificial Sequence: Synthetic oligonucleotide
  Antisense strand to SEQ ID NO: 1429562
auacguaagucccaauccu

SEQ ID NO: 1429564 - RNA, 19 nt, Artificial Sequence
  Description of Artificial Sequence: Synthetic oligonucleotide
  Sense strand starting at position 616 of SEQ ID NO: 1243625
gggacuuacguauguaggu

SEQ ID NO: 1429565 - RNA, 19 nt, Artificial Sequence
  Description of Artificial Sequence: Synthetic oligonucleotide
  Antisense strand to SEQ ID NO: 1429564
accuacauacguaaguccc

SEQ ID NO: 1429566 - RNA, 19 nt, Artificial Sequence
  Description of Artificial Sequence: Synthetic oligonucleotide
  Sense strand starting at position 617 of SEQ ID NO: 1243625
ggacuuacguauguaggua

SEQ ID NO: 1429567 - RNA, 19 nt, Artificial Sequence
  Description of Artificial Sequence: Synthetic oligonucleotide
  Antisense strand to SEQ ID NO: 1429566
uaccuacauacguaagucc

SEQ ID NO: 1429568 - RNA, 19 nt, Artificial Sequence
  Description of Artificial Sequence: Synthetic oligonucleotide
  Sense strand starting at position 618 of SEQ ID NO: 1243625
gacuuacguauguagguau

SEQ ID NO: 1429569 - RNA, 19 nt, Artificial Sequence
  Description of Artificial Sequence: Synthetic oligonucleotide
  Antisense strand to SEQ ID NO: 1429568
auaccuacauacguaaguc

SEQ ID NO: 1429570 - RNA, 19 nt, Artificial Sequence
  Description of Artificial Sequence: Synthetic oligonucleotide
  Sense strand starting at position 621 of SEQ ID NO: 1243625
uuacguauguagguauuua

SEQ ID NO: 1429571 - RNA, 19 nt, Artificial Sequence
  Description of Artificial Sequence: Synthetic oligonucleotide
  Antisense strand to SEQ ID NO: 1429570
uaaauaccuacauacguaa

SEQ ID NO: 1429572 - RNA, 19 nt, Artificial Sequence
  Description of Artificial Sequence: Synthetic oligonucleotide
  Sense strand starting at position 660 of SEQ ID NO: 1243625
acaggcaaucccuggagua

SEQ ID NO: 1429573 - RNA, 19 nt, Artificial Sequence
  Description of Artificial Sequence: Synthetic oligonucleotide
  Antisense strand to SEQ ID NO: 1429572
uacuccagggauugccugu

SEQ ID NO: 1429574 - RNA, 19 nt, Artificial Sequence
  Description of Artificial Sequence: Synthetic oligonucleotide
  Sense strand starting at position 661 of SEQ ID NO: 1243625
caggcaaucccuggaguaa

SEQ ID NO: 1429575 - RNA, 19 nt, Artificial Sequence
  Description of Artificial Sequence: Synthetic oligonucleotide
  Antisense strand to SEQ ID NO: 1429574
uuacuccagggauugccug

SEQ ID NO: 1429576 - RNA, 19 nt, Artificial Sequence
  Description of Artificial Sequence: Synthetic oligonucleotide
  Sense strand starting at position 672 of SEQ ID NO: 1243625
uggaguaaauucuagagag

SEQ ID NO: 1429577 - RNA, 19 nt, Artificial Sequence
  Description of Artificial Sequence: Synthetic oligonucleotide
  Antisense strand to SEQ ID NO: 1429576
cucucuagaauuuacucca

SEQ ID NO: 1429578 - RNA, 19 nt, Artificial Sequence
  Description of Artificial Sequence: Synthetic oligonucleotide
  Sense strand starting at position 690 of SEQ ID NO: 1243625
ggcagaauucugugagugc

SEQ ID NO: 1429579 - RNA, 19 nt, Artificial Sequence
  Description of Artificial Sequence: Synthetic oligonucleotide
  Antisense strand to SEQ ID NO: 1429578
gcacucacagaauucugcc

SEQ ID NO: 1429580 - RNA, 19 nt, Artificial Sequence
  Description of Artificial Sequence: Synthetic oligonucleotide
  Sense strand starting at position 752 of SEQ ID NO: 1243625
uaagcuguccagugucuga

SEQ ID NO: 1429581 - RNA, 19 nt, Artificial Sequence
  Description of Artificial Sequence: Synthetic oligonucleotide
  Antisense strand to SEQ ID NO: 1429580
ucagacacuggacagcuua

SEQ ID NO: 1429582 - RNA, 19 nt, Artificial Sequence
  Description of Artificial Sequence: Synthetic oligonucleotide
  Sense strand starting at position 806 of SEQ ID NO: 1243625
gaagguuucuaagagguga

SEQ ID NO: 1429583 - RNA, 19 nt, Artificial Sequence
  Description of Artificial Sequence: Synthetic oligonucleotide
  Antisense strand to SEQ ID NO: 1429582
ucaccucuuagaaaccuuc

SEQ ID NO: 1429584 - RNA, 19 nt, Artificial Sequence
  Description of Artificial Sequence: Synthetic oligonucleotide
  Sense strand starting at position 808 of SEQ ID NO: 1243625
agguuucuaagaggugaaa

SEQ ID NO: 1429585 - RNA, 19 nt, Artificial Sequence
  Description of Artificial Sequence: Synthetic oligonucleotide
  Antisense strand to SEQ ID NO: 1429584
uuucaccucuuagaaaccu

SEQ ID NO: 1429586 - RNA, 19 nt, Artificial Sequence
  Description of Artificial Sequence: Synthetic oligonucleotide
  Sense strand starting at position 1238 of SEQ ID NO: 1243625
ggguccuugcugcgagauu

SEQ ID NO: 1429587 - RNA, 19 nt, Artificial Sequence
  Description of Artificial Sequence: Synthetic oligonucleotide
  Antisense strand to SEQ ID NO: 1429586
aaucucgcagcaaggaccc

SEQ ID NO: 1429588 - RNA, 19 nt, Artificial Sequence
  Description of Artificial Sequence: Synthetic oligonucleotide
  Sense strand starting at position 2327 of SEQ ID NO: 1243625
agcuuugggaccuggagua

SEQ ID NO: 1429589 - RNA, 19 nt, Artificial Sequence
  Description of Artificial Sequence: Synthetic oligonucleotide
  Antisense strand to SEQ ID NO: 1429588
uacuccaggucccaaagcu

SEQ ID NO: 1429590 - RNA, 19 nt, Artificial Sequence
  Description of Artificial Sequence: Synthetic oligonucleotide
  Sense strand starting at position 2350 of SEQ ID NO: 1243625
ugcuccuucccuugggaga

SEQ ID NO: 1429591 - RNA, 19 nt, Artificial Sequence
  Description of Artificial Sequence: Synthetic oligonucleotide
  Antisense strand to SEQ ID NO: 1429590
ucucccaagggaaggagca

SEQ ID NO: 1429592 - RNA, 19 nt, Artificial Sequence
  Description of Artificial Sequence: Synthetic oligonucleotide
  Sense strand starting at position 2351 of SEQ ID NO: 1243625
gcuccuucccuugggagaa

SEQ ID NO: 1429593 - RNA, 19 nt, Artificial Sequence
  Description of Artificial Sequence: Synthetic oligonucleotide
  Antisense strand to SEQ ID NO: 1429592
uucucccaagggaaggagc

SEQ ID NO: 1429594 - RNA, 19 nt, Artificial Sequence
  Description of Artificial Sequence: Synthetic oligonucleotide
  Sense strand starting at position 2396 of SEQ ID NO: 1243625
gaauccgauugcuuagaca

SEQ ID NO: 1429595 - RNA, 19 nt, Artificial Sequence
  Description of Artificial Sequence: Synthetic oligonucleotide
  Antisense strand to SEQ ID NO: 1429594
ugucuaagcaaucggauuc

SEQ ID NO: 1429596 - RNA, 19 nt, Artificial Sequence
  Description of Artificial Sequence: Synthetic oligonucleotide
  Sense strand starting at position 2527 of SEQ ID NO: 1243625
agagcauacuucccagugu

SEQ ID NO: 1429597 - RNA, 19 nt, Artificial Sequence
  Description of Artificial Sequence: Synthetic oligonucleotide
  Antisense strand to SEQ ID NO: 1429596
acacugggaaguaugcucu

SEQ ID NO: 1429598 - RNA, 19 nt, Artificial Sequence
  Description of Artificial Sequence: Synthetic oligonucleotide
  Sense strand starting at position 2531 of SEQ ID NO: 1243625
cauacuucccaguguggga

SEQ ID NO: 1429599 - RNA, 19 nt, Artificial Sequence
  Description of Artificial Sequence: Synthetic oligonucleotide
  Antisense strand to SEQ ID NO: 1429598
ucccacacugggaaguaug

SEQ ID NO: 1429600 - RNA, 19 nt, Artificial Sequence
  Description of Artificial Sequence: Synthetic oligonucleotide
  Sense strand starting at position 2722 of SEQ ID NO: 1243625
ggcuuagacacuggaauga

SEQ ID NO: 1429601 - RNA, 19 nt, Artificial Sequence
  Description of Artificial Sequence: Synthetic oligonucleotide
  Antisense strand to SEQ ID NO: 1429600
ucauuccagugucuaagcc

SEQ ID NO: 1429602 - RNA, 19 nt, Artificial Sequence
  Description of Artificial Sequence: Synthetic oligonucleotide
  Sense strand starting at position 2763 of SEQ ID NO: 1243625
uccauuaccugagacagau

SEQ ID NO: 1429603 - RNA, 19 nt, Artificial Sequence
  Description of Artificial Sequence: Synthetic oligonucleotide
  Antisense strand to SEQ ID NO: 1429602
aucugucucagguaaugga

SEQ ID NO: 1429604 - RNA, 19 nt, Artificial Sequence
  Description of Artificial Sequence: Synthetic oligonucleotide
  Sense strand starting at position 2841 of SEQ ID NO: 1243625
ggcagaauaugugaaauca

SEQ ID NO: 1429605 - RNA, 19 nt, Artificial Sequence
  Description of Artificial Sequence: Synthetic oligonucleotide
  Antisense strand to SEQ ID NO: 1429604
ugauuucacauauucugcc

SEQ ID NO: 1429606 - RNA, 19 nt, Artificial Sequence
  Description of Artificial Sequence: Synthetic oligonucleotide
  Sense strand starting at position 2852 of SEQ ID NO: 1243625
ugaaaucaguccuggaaau

SEQ ID NO: 1429607 - RNA, 19 nt, Artificial Sequence
  Description of Artificial Sequence: Synthetic oligonucleotide
  Antisense strand to SEQ ID NO: 1429606
auuuccaggacugauuuca

SEQ ID NO: 1429608 - RNA, 19 nt, Artificial Sequence
  Description of Artificial Sequence: Synthetic oligonucleotide
  Sense strand starting at position 2853 of SEQ ID NO: 1243625
gaaaucaguccuggaaauc

SEQ ID NO: 1429609 - RNA, 19 nt, Artificial Sequence
  Description of Artificial Sequence: Synthetic oligonucleotide
  Antisense strand to SEQ ID NO: 1429608
gauuuccaggacugauuuc

SEQ ID NO: 1429610 - RNA, 19 nt, Artificial Sequence
  Description of Artificial Sequence: Synthetic oligonucleotide
  Sense strand starting at position 3098 of SEQ ID NO: 1243625
uugcgacauuugcagacaa

SEQ ID NO: 1429611 - RNA, 19 nt, Artificial Sequence
  Description of Artificial Sequence: Synthetic oligonucleotide
  Antisense strand to SEQ ID NO: 1429610
uugucugcaaaugucgcaa

SEQ ID NO: 1429612 - RNA, 19 nt, Artificial Sequence
  Description of Artificial Sequence: Synthetic oligonucleotide
  Sense strand starting at position 3158 of SEQ ID NO: 1243625
ggaguaagguaacugaacu

SEQ ID NO: 1429613 - RNA, 19 nt, Artificial Sequence
  Description of Artificial Sequence: Synthetic oligonucleotide
  Antisense strand to SEQ ID NO: 1429612
aguucaguuaccuuacucc

SEQ ID NO: 1429614 - RNA, 19 nt, Artificial Sequence
  Description of Artificial Sequence: Synthetic oligonucleotide
  Sense strand starting at position 3190 of SEQ ID NO: 1243625
ugaaucaaguguucccuga

SEQ ID NO: 1429615 - RNA, 19 nt, Artificial Sequence
  Description of Artificial Sequence: Synthetic oligonucleotide
  Antisense strand to SEQ ID NO: 1429614
ucagggaacacuugauuca

SEQ ID NO: 1429616 - RNA, 19 nt, Artificial Sequence
  Description of Artificial Sequence: Synthetic oligonucleotide
  Sense strand starting at position 3192 of SEQ ID NO: 1243625
aaucaaguguucccugaug

SEQ ID NO: 1429617 - RNA, 19 nt, Artificial Sequence
  Description of Artificial Sequence: Synthetic oligonucleotide
  Antisense strand to SEQ ID NO: 1429616
caucagggaacacuugauu

SEQ ID NO: 1429618 - RNA, 19 nt, Artificial Sequence
  Description of Artificial Sequence: Synthetic oligonucleotide
  Sense strand starting at position 3194 of SEQ ID NO: 1243625
ucaaguguucccugaugau

SEQ ID NO: 1429619 - RNA, 19 nt, Artificial Sequence
  Description of Artificial Sequence: Synthetic oligonucleotide
  Antisense strand to SEQ ID NO: 1429618
aucaucagggaacacuuga

SEQ ID NO: 1429620 - RNA, 19 nt, Artificial Sequence
  Description of Artificial Sequence: Synthetic oligonucleotide
  Sense strand starting at position 3435 of SEQ ID NO: 1243625
guggcacacgccuauaaau

SEQ ID NO: 1429621 - RNA, 19 nt, Artificial Sequence
  Description of Artificial Sequence: Synthetic oligonucleotide
  Antisense strand to SEQ ID NO: 1429620
auuuauaggcgugugccac

SEQ ID NO: 1429622 - RNA, 19 nt, Artificial Sequence
  Description of Artificial Sequence: Synthetic oligonucleotide
  Sense strand starting at position 3554 of SEQ ID NO: 1243625
agagaaggauucuaucuca

SEQ ID NO: 1429623 - RNA, 19 nt, Artificial Sequence
  Description of Artificial Sequence: Synthetic oligonucleotide
  Antisense strand to SEQ ID NO: 1429622
ugagauagaauccuucucu

SEQ ID NO: 1429624 - RNA, 19 nt, Artificial Sequence
  Description of Artificial Sequence: Synthetic oligonucleotide
  Sense strand starting at position 3817 of SEQ ID NO: 1243625
accugaguucgaggucaag

SEQ ID NO: 1429625 - RNA, 19 nt, Artificial Sequence
  Description of Artificial Sequence: Synthetic oligonucleotide
  Antisense strand to SEQ ID NO: 1429624
cuugaccucgaacucaggu

SEQ ID NO: 1429626 - RNA, 19 nt, Artificial Sequence
  Description of Artificial Sequence: Synthetic oligonucleotide
  Sense strand starting at position 276 of SEQ ID NO: 1243626
cagaacuacuggguucuua

SEQ ID NO: 1429627 - RNA, 19 nt, Artificial Sequence
  Description of Artificial Sequence: Synthetic oligonucleotide
  Antisense strand to SEQ ID NO: 1429626
uaagaacccaguaguucug

SEQ ID NO: 1429628 - RNA, 19 nt, Artificial Sequence
  Description of Artificial Sequence: Synthetic oligonucleotide
  Sense strand starting at position 280 of SEQ ID NO: 1243626
acuacuggguucuuagacu

SEQ ID NO: 1429629 - RNA, 19 nt, Artificial Sequence
  Description of Artificial Sequence: Synthetic oligonucleotide
  Antisense strand to SEQ ID NO: 1429628
agucuaagaacccaguagu

SEQ ID NO: 1429630 - RNA, 19 nt, Artificial Sequence
  Description of Artificial Sequence: Synthetic oligonucleotide
  Sense strand starting at position 311 of SEQ ID NO: 1243626
agaggcgucacagaucauu

SEQ ID NO: 1429631 - RNA, 19 nt, Artificial Sequence
  Description of Artificial Sequence: Synthetic oligonucleotide
  Antisense strand to SEQ ID NO: 1429630
aaugaucugugacgccucu

SEQ ID NO: 1429632 - RNA, 19 nt, Artificial Sequence
  Description of Artificial Sequence: Synthetic oligonucleotide
  Sense strand starting at position 380 of SEQ ID NO: 1243626
auauuuaaauggucgugca

SEQ ID NO: 1429633 - RNA, 19 nt, Artificial Sequence
  Description of Artificial Sequence: Synthetic oligonucleotide
  Antisense strand to SEQ ID NO: 1429632
ugcacgaccauuuaaauau

SEQ ID NO: 1429634 - RNA, 19 nt, Artificial Sequence
  Description of Artificial Sequence: Synthetic oligonucleotide
  Sense strand starting at position 381 of SEQ ID NO: 1243626
uauuuaaauggucgugcaa

SEQ ID NO: 1429635 - RNA, 19 nt, Artificial Sequence
  Description of Artificial Sequence: Synthetic oligonucleotide
  Antisense strand to SEQ ID NO: 1429634
uugcacgaccauuuaaaua

SEQ ID NO: 1429636 - RNA, 19 nt, Artificial Sequence
  Description of Artificial Sequence: Synthetic oligonucleotide
  Sense strand starting at position 478 of SEQ ID NO: 1243626
agucaaauuugaguugcuu

SEQ ID NO: 1429637 - RNA, 19 nt, Artificial Sequence
  Description of Artificial Sequence: Synthetic oligonucleotide
  Antisense strand to SEQ ID NO: 1429636
aagcaacucaaauuugacu

SEQ ID NO: 1429638 - RNA, 19 nt, Artificial Sequence
  Description of Artificial Sequence: Synthetic oligonucleotide
  Sense strand starting at position 490 of SEQ ID NO: 1243626
guugcuugggcagaacaau

SEQ ID NO: 1429639 - RNA, 19 nt, Artificial Sequence
  Description of Artificial Sequence: Synthetic oligonucleotide
  Antisense strand to SEQ ID NO: 1429638
auuguucugcccaagcaac

SEQ ID NO: 1429640 - RNA, 19 nt, Artificial Sequence
  Description of Artificial Sequence: Synthetic oligonucleotide
  Sense strand starting at position 530 of SEQ ID NO: 1243626
cuguacucuugagaacaaa

SEQ ID NO: 1429641 - RNA, 19 nt, Artificial Sequence
  Description of Artificial Sequence: Synthetic oligonucleotide
  Antisense strand to SEQ ID NO: 1429640
uuuguucucaagaguacag

SEQ ID NO: 1429642 - RNA, 19 nt, Artificial Sequence
  Description of Artificial Sequence: Synthetic oligonucleotide
  Sense strand starting at position 1122 of SEQ ID NO: 1243626
cagggucagcgaugccaaa

SEQ ID NO: 1429643 - RNA, 19 nt, Artificial Sequence
  Description of Artificial Sequence: Synthetic oligonucleotide
  Antisense strand to SEQ ID NO: 1429642
uuuggcaucgcugacccug

SEQ ID NO: 1429644 - RNA, 19 nt, Artificial Sequence
  Description of Artificial Sequence: Synthetic oligonucleotide
  Sense strand starting at position 1227 of SEQ ID NO: 1243626
gcuggaagucugggucguu

SEQ ID NO: 1429645 - RNA, 19 nt, Artificial Sequence
  Description of Artificial Sequence: Synthetic oligonucleotide
  Antisense strand to SEQ ID NO: 1429644
aacgacccagacuuccagc

SEQ ID NO: 1429646 - RNA, 19 nt, Artificial Sequence
  Description of Artificial Sequence: Synthetic oligonucleotide
  Sense strand starting at position 1245 of SEQ ID NO: 1243626
ucaggaucauguucucuga

SEQ ID NO: 1429647 - RNA, 19 nt, Artificial Sequence
  Description of Artificial Sequence: Synthetic oligonucleotide
  Antisense strand to SEQ ID NO: 1429646
ucagagaacaugauccuga

SEQ ID NO: 1429648 - RNA, 19 nt, Artificial Sequence
  Description of Artificial Sequence: Synthetic oligonucleotide
  Sense strand starting at position 1247 of SEQ ID NO: 1243626
aggaucauguucucugaaa

SEQ ID NO: 1429649 - RNA, 19 nt, Artificial Sequence
  Description of Artificial Sequence: Synthetic oligonucleotide
  Antisense strand to SEQ ID NO: 1429648
uuucagagaacaugauccu

SEQ ID NO: 1429650 - RNA, 19 nt, Artificial Sequence
  Description of Artificial Sequence: Synthetic oligonucleotide
  Sense strand starting at position 1248 of SEQ ID NO: 1243626
ggaucauguucucugaaag

SEQ ID NO: 1429651 - RNA, 19 nt, Artificial Sequence
  Description of Artificial Sequence: Synthetic oligonucleotide
  Antisense strand to SEQ ID NO: 1429650
cuuucagagaacaugaucc

SEQ ID NO: 1429652 - RNA, 19 nt, Artificial Sequence
  Description of Artificial Sequence: Synthetic oligonucleotide
  Sense strand starting at position 1249 of SEQ ID NO: 1243626
gaucauguucucugaaagg

SEQ ID NO: 1429653 - RNA, 19 nt, Artificial Sequence
  Description of Artificial Sequence: Synthetic oligonucleotide
  Antisense strand to SEQ ID NO: 1429652
ccuuucagagaacaugauc

SEQ ID NO: 1429654 - RNA, 19 nt, Artificial Sequence
  Description of Artificial Sequence: Synthetic oligonucleotide
  Sense strand starting at position 2122 of SEQ ID NO: 1243626
agggauugcgccugcacuu

SEQ ID NO: 1429655 - RNA, 19 nt, Artificial Sequence
  Description of Artificial Sequence: Synthetic oligonucleotide
  Antisense strand to SEQ ID NO: 1429654
aagugcaggcgcaaucccu

SEQ ID NO: 1429656 - RNA, 19 nt, Artificial Sequence
  Description of Artificial Sequence: Synthetic oligonucleotide
  Sense strand starting at position 2193 of SEQ ID NO: 1243626
gccucuccgaaaugagagu

SEQ ID NO: 1429657 - RNA, 19 nt, Artificial Sequence
  Description of Artificial Sequence: Synthetic oligonucleotide
  Antisense strand to SEQ ID NO: 1429656
acucucauuucggagaggc

SEQ ID NO: 1429658 - RNA, 19 nt, Artificial Sequence
  Description of Artificial Sequence: Synthetic oligonucleotide
  Sense strand starting at position 2481 of SEQ ID NO: 1243626
uaagccuucugucugggaa

SEQ ID NO: 1429659 - RNA, 19 nt, Artificial Sequence
  Description of Artificial Sequence: Synthetic oligonucleotide
  Antisense strand to SEQ ID NO: 1429658
uucccagacagaaggcuua

SEQ ID NO: 1429660 - RNA, 19 nt, Artificial Sequence
  Description of Artificial Sequence: Synthetic oligonucleotide
  Sense strand starting at position 2482 of SEQ ID NO: 1243626
aagccuucugucugggaaa

SEQ ID NO: 1429661 - RNA, 19 nt, Artificial Sequence
  Description of Artificial Sequence: Synthetic oligonucleotide
  Antisense strand to SEQ ID NO: 1429660
uuucccagacagaaggcuu

SEQ ID NO: 1429662 - RNA, 19 nt, Artificial Sequence
  Description of Artificial Sequence: Synthetic oligonucleotide
  Sense strand starting at position 2565 of SEQ ID NO: 1243626
cgccaucaccgucaucaaa

SEQ ID NO: 1429663 - RNA, 19 nt, Artificial Sequence
  Description of Artificial Sequence: Synthetic oligonucleotide
  Antisense strand to SEQ ID NO: 1429662
uuugaugacggugauggcg

SEQ ID NO: 1429664 - RNA, 19 nt, Artificial Sequence
  Description of Artificial Sequence: Synthetic oligonucleotide
  Sense strand starting at position 2567 of SEQ ID NO: 1243626
ccaucaccgucaucaaagu

SEQ ID NO: 1429665 - RNA, 19 nt, Artificial Sequence
  Description of Artificial Sequence: Synthetic oligonucleotide
  Antisense strand to SEQ ID NO: 1429664
acuuugaugacggugaugg

SEQ ID NO: 1429666 - RNA, 19 nt, Artificial Sequence
  Description of Artificial Sequence: Synthetic oligonucleotide
  Sense strand starting at position 2573 of SEQ ID NO: 1243626
ccgucaucaaagugggaaa

SEQ ID NO: 1429667 - RNA, 19 nt, Artificial Sequence
  Description of Artificial Sequence: Synthetic oligonucleotide
  Antisense strand to SEQ ID NO: 1429666
uuucccacuuugaugacgg

SEQ ID NO: 1429668 - RNA, 19 nt, Artificial Sequence
  Description of Artificial Sequence: Synthetic oligonucleotide
  Sense strand starting at position 2574 of SEQ ID NO: 1243626
cgucaucaaagugggaaau

SEQ ID NO: 1429669 - RNA, 19 nt, Artificial Sequence
  Description of Artificial Sequence: Synthetic oligonucleotide
  Antisense strand to SEQ ID NO: 1429668
auuucccacuuugaugacg

SEQ ID NO: 1429670 - RNA, 19 nt, Artificial Sequence
  Description of Artificial Sequence: Synthetic oligonucleotide
  Sense strand starting at position 2932 of SEQ ID NO: 1243626
aguucugcccagugggauu

SEQ ID NO: 1429671 - RNA, 19 nt, Artificial Sequence
  Description of Artificial Sequence: Synthetic oligonucleotide
  Antisense strand to SEQ ID NO: 1429670
aaucccacugggcagaacu

SEQ ID NO: 1429672 - RNA, 19 nt, Artificial Sequence
  Description of Artificial Sequence: Synthetic oligonucleotide
  Sense strand starting at position 2976 of SEQ ID NO: 1243626
guugaaucaucucuaguca

SEQ ID NO: 1429673 - RNA, 19 nt, Artificial Sequence
  Description of Artificial Sequence: Synthetic oligonucleotide
  Antisense strand to SEQ ID NO: 1429672
ugacuagagaugauucaac

SEQ ID NO: 1429674 - RNA, 19 nt, Artificial Sequence
  Description of Artificial Sequence: Synthetic oligonucleotide
  Sense strand starting at position 3207 of SEQ ID NO: 1243626
ucucgaauuccugaccugu

SEQ ID NO: 1429675 - RNA, 19 nt, Artificial Sequence
  Description of Artificial Sequence: Synthetic oligonucleotide
  Antisense strand to SEQ ID NO: 1429674
acaggucaggaauucgaga

SEQ ID NO: 1429676 - RNA, 19 nt, Artificial Sequence
  Description of Artificial Sequence: Synthetic oligonucleotide
  Sense strand starting at position 3288 of SEQ ID NO: 1243626
cugucuguagucuguguaa

SEQ ID NO: 1429677 - RNA, 19 nt, Artificial Sequence
  Description of Artificial Sequence: Synthetic oligonucleotide
  Antisense strand to SEQ ID NO: 1429676
uuacacagacuacagacag

SEQ ID NO: 1429678 - RNA, 19 nt, Artificial Sequence
  Description of Artificial Sequence: Synthetic oligonucleotide
  Sense strand starting at position 3290 of SEQ ID NO: 1243626
gucuguagucuguguaaua

SEQ ID NO: 1429679 - RNA, 19 nt, Artificial Sequence
  Description of Artificial Sequence: Synthetic oligonucleotide
  Antisense strand to SEQ ID NO: 1429678
uauuacacagacuacagac

SEQ ID NO: 1429680 - RNA, 19 nt, Artificial Sequence
  Description of Artificial Sequence: Synthetic oligonucleotide
  Sense strand starting at position 3291 of SEQ ID NO: 1243626
ucuguagucuguguaauac

SEQ ID NO: 1429681 - RNA, 19 nt, Artificial Sequence
  Description of Artificial Sequence: Synthetic oligonucleotide
  Antisense strand to SEQ ID NO: 1429680
guauuacacagacuacaga

SEQ ID NO: 1429682 - RNA, 19 nt, Artificial Sequence
  Description of Artificial Sequence: Synthetic oligonucleotide
  Sense strand starting at position 3300 of SEQ ID NO: 1243626
uguguaauacuaugacuuu

SEQ ID NO: 1429683 - RNA, 19 nt, Artificial Sequence
  Description of Artificial Sequence: Synthetic oligonucleotide
  Antisense strand to SEQ ID NO: 1429682
aaagucauaguauuacaca

SEQ ID NO: 1429684 - RNA, 19 nt, Artificial Sequence
  Description of Artificial Sequence: Synthetic oligonucleotide
  Sense strand starting at position 3460 of SEQ ID NO: 1243626
cagagagggugucuaguuu

SEQ ID NO: 1429685 - RNA, 19 nt, Artificial Sequence
  Description of Artificial Sequence: Synthetic oligonucleotide
  Antisense strand to SEQ ID NO: 1429684
aaacuagacacccucucug

SEQ ID NO: 1429686 - RNA, 19 nt, Artificial Sequence
  Description of Artificial Sequence: Synthetic oligonucleotide
  Sense strand starting at position 3464 of SEQ ID NO: 1243626
gagggugucuaguuuauuc

SEQ ID NO: 1429687 - RNA, 19 nt, Artificial Sequence
  Description of Artificial Sequence: Synthetic oligonucleotide
  Antisense strand to SEQ ID NO: 1429686
gaauaaacuagacacccuc

SEQ ID NO: 1429688 - RNA, 19 nt, Artificial Sequence
  Description of Artificial Sequence: Synthetic oligonucleotide
  Sense strand starting at position 3508 of SEQ ID NO: 1243626
cgcuaaaggugcucaggaa

SEQ ID NO: 1429689 - RNA, 19 nt, Artificial Sequence
  Description of Artificial Sequence: Synthetic oligonucleotide
  Antisense strand to SEQ ID NO: 1429688
uuccugagcaccuuuagcg

SEQ ID NO: 1429690 - RNA, 19 nt, Artificial Sequence
  Description of Artificial Sequence: Synthetic oligonucleotide
  Sense strand starting at position 3509 of SEQ ID NO: 1243626
gcuaaaggugcucaggaaa

SEQ ID NO: 1429691 - RNA, 19 nt, Artificial Sequence
  Description of Artificial Sequence: Synthetic oligonucleotide
  Antisense strand to SEQ ID NO: 1429690
uuuccugagcaccuuuagc

SEQ ID NO: 1429692 - RNA, 19 nt, Artificial Sequence
  Description of Artificial Sequence: Synthetic oligonucleotide
  Sense strand starting at position 3520 of SEQ ID NO: 1243626
ucaggaaaucuuuguggag

SEQ ID NO: 1429693 - RNA, 19 nt, Artificial Sequence
  Description of Artificial Sequence: Synthetic oligonucleotide
  Antisense strand to SEQ ID NO: 1429692
cuccacaaagauuuccuga

SEQ ID NO: 1429694 - RNA, 19 nt, Artificial Sequence
  Description of Artificial Sequence: Synthetic oligonucleotide
  Sense strand starting at position 3521 of SEQ ID NO: 1243626
caggaaaucuuuguggagu

SEQ ID NO: 1429695 - RNA, 19 nt, Artificial Sequence
  Description of Artificial Sequence: Synthetic oligonucleotide
  Antisense strand to SEQ ID NO: 1429694
acuccacaaagauuuccug

SEQ ID NO: 1429696 - RNA, 19 nt, Artificial Sequence
  Description of Artificial Sequence: Synthetic oligonucleotide
  Sense strand starting at position 3527 of SEQ ID NO: 1243626
aucuuuguggagugaacaa

SEQ ID NO: 1429697 - RNA, 19 nt, Artificial Sequence
  Description of Artificial Sequence: Synthetic oligonucleotide
  Antisense strand to SEQ ID NO: 1429696
uuguucacuccacaaagau

SEQ ID NO: 1429698 - RNA, 19 nt, Artificial Sequence
  Description of Artificial Sequence: Synthetic oligonucleotide
  Sense strand starting at position 3572 of SEQ ID NO: 1243626
guucuaauauucuaggaaa

SEQ ID NO: 1429699 - RNA, 19 nt, Artificial Sequence
  Description of Artificial Sequence: Synthetic oligonucleotide
  Antisense strand to SEQ ID NO: 1429698
uuuccuagaauauuagaac

SEQ ID NO: 1429700 - RNA, 19 nt, Artificial Sequence
  Description of Artificial Sequence: Synthetic oligonucleotide
  Sense strand starting at position 3623 of SEQ ID NO: 1243626
uguacuuagcauugaauag

SEQ ID NO: 1429701 - RNA, 19 nt, Artificial Sequence
  Description of Artificial Sequence: Synthetic oligonucleotide
  Antisense strand to SEQ ID NO: 1429700
cuauucaaugcuaaguaca

SEQ ID NO: 1429702 - RNA, 19 nt, Artificial Sequence
  Description of Artificial Sequence: Synthetic oligonucleotide
  Sense strand starting at position 3658 of SEQ ID NO: 1243626
gagcuaaauuugcugaguu

SEQ ID NO: 1429703 - RNA, 19 nt, Artificial Sequence
  Description of Artificial Sequence: Synthetic oligonucleotide
  Antisense strand to SEQ ID NO: 1429702
aacucagcaaauuuagcuc

SEQ ID NO: 1429704 - RNA, 19 nt, Artificial Sequence
  Description of Artificial Sequence: Synthetic oligonucleotide
  Sense strand starting at position 3702 of SEQ ID NO: 1243626
acacgagaauuacaagaau

SEQ ID NO: 1429705 - RNA, 19 nt, Artificial Sequence
  Description of Artificial Sequence: Synthetic oligonucleotide
  Antisense strand to SEQ ID NO: 1429704
auucuuguaauucucgugu

SEQ ID NO: 1429706 - RNA, 19 nt, Artificial Sequence
  Description of Artificial Sequence: Synthetic oligonucleotide
  Sense strand starting at position 299 of SEQ ID NO: 1243627
gaagcuuggugcucucaga

SEQ ID NO: 1429707 - RNA, 19 nt, Artificial Sequence
  Description of Artificial Sequence: Synthetic oligonucleotide
  Antisense strand to SEQ ID NO: 1429706
ucugagagcaccaagcuuc

SEQ ID NO: 1429708 - RNA, 19 nt, Artificial Sequence
  Description of Artificial Sequence: Synthetic oligonucleotide
  Sense strand starting at position 379 of SEQ ID NO: 1243627
ucagaaauguugccaugug

SEQ ID NO: 1429709 - RNA, 19 nt, Artificial Sequence
  Description of Artificial Sequence: Synthetic oligonucleotide
  Antisense strand to SEQ ID NO: 1429708
cacauggcaacauuucuga

SEQ ID NO: 1429710 - RNA, 19 nt, Artificial Sequence
  Description of Artificial Sequence: Synthetic oligonucleotide
  Sense strand starting at position 389 of SEQ ID NO: 1243627
ugccauguggccugauuua

SEQ ID NO: 1429711 - RNA, 19 nt, Artificial Sequence
  Description of Artificial Sequence: Synthetic oligonucleotide
  Antisense strand to SEQ ID NO: 1429710
uaaaucaggccacauggca

SEQ ID NO: 1429712 - RNA, 19 nt, Artificial Sequence
  Description of Artificial Sequence: Synthetic oligonucleotide
  Sense strand starting at position 486 of SEQ ID NO: 1243627
uggccugauuuagugugau

SEQ ID NO: 1429713 - RNA, 19 nt, Artificial Sequence
  Description of Artificial Sequence: Synthetic oligonucleotide
  Antisense strand to SEQ ID NO: 1429712
aucacacuaaaucaggcca

SEQ ID NO: 1429714 - RNA, 19 nt, Artificial Sequence
  Description of Artificial Sequence: Synthetic oligonucleotide
  Sense strand starting at position 522 of SEQ ID NO: 1243627
ggaaguaacuuuccucaga

SEQ ID NO: 1429715 - RNA, 19 nt, Artificial Sequence
  Description of Artificial Sequence: Synthetic oligonucleotide
  Antisense strand to SEQ ID NO: 1429714
ucugaggaaaguuacuucc

SEQ ID NO: 1429716 - RNA, 19 nt, Artificial Sequence
  Description of Artificial Sequence: Synthetic oligonucleotide
  Sense strand starting at position 523 of SEQ ID NO: 1243627
gaaguaacuuuccucagag

SEQ ID NO: 1429717 - RNA, 19 nt, Artificial Sequence
  Description of Artificial Sequence: Synthetic oligonucleotide
  Antisense strand to SEQ ID NO: 1429716
cucugaggaaaguuacuuc

SEQ ID NO: 1429718 - RNA, 19 nt, Artificial Sequence
  Description of Artificial Sequence: Synthetic oligonucleotide
  Sense strand starting at position 525 of SEQ ID NO: 1243627
aguaacuuuccucagaguc

SEQ ID NO: 1429719 - RNA, 19 nt, Artificial Sequence
  Description of Artificial Sequence: Synthetic oligonucleotide
  Antisense strand to SEQ ID NO: 1429718
gacucugaggaaaguuacu

SEQ ID NO: 1429720 - RNA, 19 nt, Artificial Sequence
  Description of Artificial Sequence: Synthetic oligonucleotide
  Sense strand starting at position 610 of SEQ ID NO: 1243627
ggccgaacuugucuaggga

SEQ ID NO: 1429721 - RNA, 19 nt, Artificial Sequence
  Description of Artificial Sequence: Synthetic oligonucleotide
  Antisense strand to SEQ ID NO: 1429720
ucccuagacaaguucggcc

SEQ ID NO: 1429722 - RNA, 19 nt, Artificial Sequence
  Description of Artificial Sequence: Synthetic oligonucleotide
  Sense strand starting at position 613 of SEQ ID NO: 1243627
cgaacuugucuagggagac

SEQ ID NO: 1429723 - RNA, 19 nt, Artificial Sequence
  Description of Artificial Sequence: Synthetic oligonucleotide
  Antisense strand to SEQ ID NO: 1429722
gucucccuagacaaguucg

SEQ ID NO: 1429724 - RNA, 19 nt, Artificial Sequence
  Description of Artificial Sequence: Synthetic oligonucleotide
  Sense strand starting at position 636 of SEQ ID NO: 1243627
ggaaguagugagugacuuc

SEQ ID NO: 1429725 - RNA, 19 nt, Artificial Sequence
  Description of Artificial Sequence: Synthetic oligonucleotide
  Antisense strand to SEQ ID NO: 1429724
gaagucacucacuacuucc

SEQ ID NO: 1429726 - RNA, 19 nt, Artificial Sequence
  Description of Artificial Sequence: Synthetic oligonucleotide
  Sense strand starting at position 647 of SEQ ID NO: 1243627
gugacuucccagggucacu

SEQ ID NO: 1429727 - RNA, 19 nt, Artificial Sequence
  Description of Artificial Sequence: Synthetic oligonucleotide
  Antisense strand to SEQ ID NO: 1429726
agugacccugggaagucac

SEQ ID NO: 1429728 - RNA, 19 nt, Artificial Sequence
  Description of Artificial Sequence: Synthetic oligonucleotide
  Sense strand starting at position 736 of SEQ ID NO: 1243627
gcaaauuaggcagagugau

SEQ ID NO: 1429729 - RNA, 19 nt, Artificial Sequence
  Description of Artificial Sequence: Synthetic oligonucleotide
  Antisense strand to SEQ ID NO: 1429728
aucacucugccuaauuugc

SEQ ID NO: 1429730 - RNA, 19 nt, Artificial Sequence
  Description of Artificial Sequence: Synthetic oligonucleotide
  Sense strand starting at position 799 of SEQ ID NO: 1243627
cagaaagugugaucuugga

SEQ ID NO: 1429731 - RNA, 19 nt, Artificial Sequence
  Description of Artificial Sequence: Synthetic oligonucleotide
  Antisense strand to SEQ ID NO: 1429730
uccaagaucacacuuucug

SEQ ID NO: 1429732 - RNA, 19 nt, Artificial Sequence
  Description of Artificial Sequence: Synthetic oligonucleotide
  Sense strand starting at position 803 of SEQ ID NO: 1243627
aagugugaucuuggaguuc

SEQ ID NO: 1429733 - RNA, 19 nt, Artificial Sequence
  Description of Artificial Sequence: Synthetic oligonucleotide
  Antisense strand to SEQ ID NO: 1429732
gaacuccaagaucacacuu

SEQ ID NO: 1429734 - RNA, 19 nt, Artificial Sequence
  Description of Artificial Sequence: Synthetic oligonucleotide
  Sense strand starting at position 968 of SEQ ID NO: 1243627
aagugcuguccugaccaua

SEQ ID NO: 1429735 - RNA, 19 nt, Artificial Sequence
  Description of Artificial Sequence: Synthetic oligonucleotide
  Antisense strand to SEQ ID NO: 1429734
uauggucaggacagcacuu

SEQ ID NO: 1429736 - RNA, 19 nt, Artificial Sequence
  Description of Artificial Sequence: Synthetic oligonucleotide
  Sense strand starting at position 991 of SEQ ID NO: 1243627
uaguaucuggccgaguuga

SEQ ID NO: 1429737 - RNA, 19 nt, Artificial Sequence
  Description of Artificial Sequence: Synthetic oligonucleotide
  Antisense strand to SEQ ID NO: 1429736
ucaacucggccagauacua

SEQ ID NO: 1429738 - RNA, 19 nt, Artificial Sequence
  Description of Artificial Sequence: Synthetic oligonucleotide
  Sense strand starting at position 1061 of SEQ ID NO: 1243627
gcuaacagcccugauaaca

SEQ ID NO: 1429739 - RNA, 19 nt, Artificial Sequence
  Description of Artificial Sequence: Synthetic oligonucleotide
  Antisense strand to SEQ ID NO: 1429738
uguuaucagggcuguuagc

SEQ ID NO: 1429740 - RNA, 19 nt, Artificial Sequence
  Description of Artificial Sequence: Synthetic oligonucleotide
  Sense strand starting at position 1295 of SEQ ID NO: 1243627
gaauuaaagccauguuagu

SEQ ID NO: 1429741 - RNA, 19 nt, Artificial Sequence
  Description of Artificial Sequence: Synthetic oligonucleotide
  Antisense strand to SEQ ID NO: 1429740
acuaacauggcuuuaauuc

SEQ ID NO: 1429742 - RNA, 19 nt, Artificial Sequence
  Description of Artificial Sequence: Synthetic oligonucleotide
  Sense strand starting at position 1334 of SEQ ID NO: 1243627
ggagacugcuaaguuuagu

SEQ ID NO: 1429743 - RNA, 19 nt, Artificial Sequence
  Description of Artificial Sequence: Synthetic oligonucleotide
  Antisense strand to SEQ ID NO: 1429742
acuaaacuuagcagucucc

SEQ ID NO: 1429744 - RNA, 19 nt, Artificial Sequence
  Description of Artificial Sequence: Synthetic oligonucleotide
  Sense strand starting at position 1464 of SEQ ID NO: 1243627
aucggaauauucuccuuaa

SEQ ID NO: 1429745 - RNA, 19 nt, Artificial Sequence
  Description of Artificial Sequence: Synthetic oligonucleotide
  Antisense strand to SEQ ID NO: 1429744
uuaaggagaauauuccgau

SEQ ID NO: 1429746 - RNA, 19 nt, Artificial Sequence
  Description of Artificial Sequence: Synthetic oligonucleotide
  Sense strand starting at position 1465 of SEQ ID NO: 1243627
ucggaauauucuccuuaaa

SEQ ID NO: 1429747 - RNA, 19 nt, Artificial Sequence
  Description of Artificial Sequence: Synthetic oligonucleotide
  Antisense strand to SEQ ID NO: 1429746
uuuaaggagaauauuccga

SEQ ID NO: 1429748 - RNA, 19 nt, Artificial Sequence
  Description of Artificial Sequence: Synthetic oligonucleotide
  Sense strand starting at position 1467 of SEQ ID NO: 1243627
ggaauauucuccuuaaagc

SEQ ID NO: 1429749 - RNA, 19 nt, Artificial Sequence
  Description of Artificial Sequence: Synthetic oligonucleotide
  Antisense strand to SEQ ID NO: 1429748
gcuuuaaggagaauauucc

SEQ ID NO: 1429750 - RNA, 19 nt, Artificial Sequence
  Description of Artificial Sequence: Synthetic oligonucleotide
  Sense strand starting at position 2102 of SEQ ID NO: 1243627
ccucccacccucgaagaau

SEQ ID NO: 1429751 - RNA, 19 nt, Artificial Sequence
  Description of Artificial Sequence: Synthetic oligonucleotide
  Antisense strand to SEQ ID NO: 1429750
auucuucgagggugggagg

SEQ ID NO: 1429752 - RNA, 19 nt, Artificial Sequence
  Description of Artificial Sequence: Synthetic oligonucleotide
  Sense strand starting at position 2114 of SEQ ID NO: 1243627
gaagaauagcccugguuuc

SEQ ID NO: 1429753 - RNA, 19 nt, Artificial Sequence
  Description of Artificial Sequence: Synthetic oligonucleotide
  Antisense strand to SEQ ID NO: 1429752
gaaaccagggcuauucuuc

SEQ ID NO: 1429754 - RNA, 19 nt, Artificial Sequence
  Description of Artificial Sequence: Synthetic oligonucleotide
  Sense strand starting at position 2611 of SEQ ID NO: 1243627
gggacugggaccuguguau

SEQ ID NO: 1429755 - RNA, 19 nt, Artificial Sequence
  Description of Artificial Sequence: Synthetic oligonucleotide
  Antisense strand to SEQ ID NO: 1429754
auacacaggucccaguccc

SEQ ID NO: 1429756 - RNA, 19 nt, Artificial Sequence
  Description of Artificial Sequence: Synthetic oligonucleotide
  Sense strand starting at position 2749 of SEQ ID NO: 1243627
guacuaagaccugggcaga

SEQ ID NO: 1429757 - RNA, 19 nt, Artificial Sequence
  Description of Artificial Sequence: Synthetic oligonucleotide
  Antisense strand to SEQ ID NO: 1429756
ucugcccaggucuuaguac

SEQ ID NO: 1429758 - RNA, 19 nt, Artificial Sequence
  Description of Artificial Sequence: Synthetic oligonucleotide
  Sense strand starting at position 2783 of SEQ ID NO: 1243627
aggugauagcucugguccu

SEQ ID NO: 1429759 - RNA, 19 nt, Artificial Sequence
  Description of Artificial Sequence: Synthetic oligonucleotide
  Antisense strand to SEQ ID NO: 1429758
aggaccagagcuaucaccu

SEQ ID NO: 1429760 - RNA, 19 nt, Artificial Sequence
  Description of Artificial Sequence: Synthetic oligonucleotide
  Sense strand starting at position 2793 of SEQ ID NO: 1243627
ucugguccuggcuaggaaa

SEQ ID NO: 1429761 - RNA, 19 nt, Artificial Sequence
  Description of Artificial Sequence: Synthetic oligonucleotide
  Antisense strand to SEQ ID NO: 1429760
uuuccuagccaggaccaga

SEQ ID NO: 1429762 - RNA, 19 nt, Artificial Sequence
  Description of Artificial Sequence: Synthetic oligonucleotide
  Sense strand starting at position 2827 of SEQ ID NO: 1243627
caaagaguagcacaguuua

SEQ ID NO: 1429763 - RNA, 19 nt, Artificial Sequence
  Description of Artificial Sequence: Synthetic oligonucleotide
  Antisense strand to SEQ ID NO: 1429762
uaaacugugcuacucuuug

SEQ ID NO: 1429764 - RNA, 19 nt, Artificial Sequence
  Description of Artificial Sequence: Synthetic oligonucleotide
  Sense strand starting at position 2841 of SEQ ID NO: 1243627
guuuauaccuguuccaggu

SEQ ID NO: 1429765 - RNA, 19 nt, Artificial Sequence
  Description of Artificial Sequence: Synthetic oligonucleotide
  Antisense strand to SEQ ID NO: 1429764
accuggaacagguauaaac

SEQ ID NO: 1429766 - RNA, 19 nt, Artificial Sequence
  Description of Artificial Sequence: Synthetic oligonucleotide
  Sense strand starting at position 3096 of SEQ ID NO: 1243627
ucuugagcgugaccucaaa

SEQ ID NO: 1429767 - RNA, 19 nt, Artificial Sequence
  Description of Artificial Sequence: Synthetic oligonucleotide
  Antisense strand to SEQ ID NO: 1429766
uuugaggucacgcucaaga

SEQ ID NO: 1429768 - RNA, 19 nt, Artificial Sequence
  Description of Artificial Sequence: Synthetic oligonucleotide
  Sense strand starting at position 3225 of SEQ ID NO: 1243627
gggugugcuuuccuaauua

SEQ ID NO: 1429769 - RNA, 19 nt, Artificial Sequence
  Description of Artificial Sequence: Synthetic oligonucleotide
  Antisense strand to SEQ ID NO: 1429768
uaauuaggaaagcacaccc

SEQ ID NO: 1429770 - RNA, 19 nt, Artificial Sequence
  Description of Artificial Sequence: Synthetic oligonucleotide
  Sense strand starting at position 3229 of SEQ ID NO: 1243627
gugcuuuccuaauuagacu

SEQ ID NO: 1429771 - RNA, 19 nt, Artificial Sequence
  Description of Artificial Sequence: Synthetic oligonucleotide
  Antisense strand to SEQ ID NO: 1429770
agucuaauuaggaaagcac

SEQ ID NO: 1429772 - RNA, 19 nt, Artificial Sequence
  Description of Artificial Sequence: Synthetic oligonucleotide
  Sense strand starting at position 3244 of SEQ ID NO: 1243627
gacuaacugucuuugauag

SEQ ID NO: 1429773 - RNA, 19 nt, Artificial Sequence
  Description of Artificial Sequence: Synthetic oligonucleotide
  Antisense strand to SEQ ID NO: 1429772
cuaucaaagacaguuaguc

SEQ ID NO: 1429774 - RNA, 19 nt, Artificial Sequence
  Description of Artificial Sequence: Synthetic oligonucleotide
  Sense strand starting at position 3343 of SEQ ID NO: 1243627
cugggugacccuggguaaa

SEQ ID NO: 1429775 - RNA, 19 nt, Artificial Sequence
  Description of Artificial Sequence: Synthetic oligonucleotide
  Antisense strand to SEQ ID NO: 1429774
uuuacccagggucacccag

SEQ ID NO: 1429776 - RNA, 19 nt, Artificial Sequence
  Description of Artificial Sequence: Synthetic oligonucleotide
  Sense strand starting at position 3466 of SEQ ID NO: 1243627
gugaguuccuccuugaacu

SEQ ID NO: 1429777 - RNA, 19 nt, Artificial Sequence
  Description of Artificial Sequence: Synthetic oligonucleotide
  Antisense strand to SEQ ID NO: 1429776
aguucaaggaggaacucac

SEQ ID NO: 1429778 - RNA, 19 nt, Artificial Sequence
  Description of Artificial Sequence: Synthetic oligonucleotide
  Sense strand starting at position 3467 of SEQ ID NO: 1243627
ugaguuccuccuugaacuu

SEQ ID NO: 1429779 - RNA, 19 nt, Artificial Sequence
  Description of Artificial Sequence: Synthetic oligonucleotide
  Antisense strand to SEQ ID NO: 1429778
aaguucaaggaggaacuca

SEQ ID NO: 1429780 - RNA, 19 nt, Artificial Sequence
  Description of Artificial Sequence: Synthetic oligonucleotide
  Sense strand starting at position 3524 of SEQ ID NO: 1243627
gacucuuccuaggugcaca

SEQ ID NO: 1429781 - RNA, 19 nt, Artificial Sequence
  Description of Artificial Sequence: Synthetic oligonucleotide
  Antisense strand to SEQ ID NO: 1429780
ugugcaccuaggaagaguc

SEQ ID NO: 1429782 - RNA, 19 nt, Artificial Sequence
  Description of Artificial Sequence: Synthetic oligonucleotide
  Sense strand starting at position 3827 of SEQ ID NO: 1243627
ggguaagaauugaguaggu

SEQ ID NO: 1429783 - RNA, 19 nt, Artificial Sequence
  Description of Artificial Sequence: Synthetic oligonucleotide
  Antisense strand to SEQ ID NO: 1429782
accuacucaauucuuaccc

SEQ ID NO: 1429784 - RNA, 19 nt, Artificial Sequence
  Description of Artificial Sequence: Synthetic oligonucleotide
  Sense strand starting at position 3928 of SEQ ID NO: 1243627
ccuuccucuguguaggaau

SEQ ID NO: 1429785 - RNA, 19 nt, Artificial Sequence
  Description of Artificial Sequence: Synthetic oligonucleotide
  Antisense strand to SEQ ID NO: 1429784
auuccuacacagaggaagg

SEQ ID NO: 1429786 - RNA, 19 nt, Artificial Sequence
  Description of Artificial Sequence: Synthetic oligonucleotide
  Sense strand starting at position 219 of SEQ ID NO: 1243628
cguggaugccgcaagauuc

SEQ ID NO: 1429787 - RNA, 19 nt, Artificial Sequence
  Description of Artificial Sequence: Synthetic oligonucleotide
  Antisense strand to SEQ ID NO: 1429786
gaaucuugcggcauccacg

SEQ ID NO: 1429788 - RNA, 19 nt, Artificial Sequence
  Description of Artificial Sequence: Synthetic oligonucleotide
  Sense strand starting at position 252 of SEQ ID NO: 1243628
agagcccucccuuagugau

SEQ ID NO: 1429789 - RNA, 19 nt, Artificial Sequence
  Description of Artificial Sequence: Synthetic oligonucleotide
  Antisense strand to SEQ ID NO: 1429788
aucacuaagggagggcucu

SEQ ID NO: 1429790 - RNA, 19 nt, Artificial Sequence
  Description of Artificial Sequence: Synthetic oligonucleotide
  Sense strand starting at position 272 of SEQ ID NO: 1243628
cugugucaccgaggaugua

SEQ ID NO: 1429791 - RNA, 19 nt, Artificial Sequence
  Description of Artificial Sequence: Synthetic oligonucleotide
  Antisense strand to SEQ ID NO: 1429790
uacauccucggugacacag

SEQ ID NO: 1429792 - RNA, 19 nt, Artificial Sequence
  Description of Artificial Sequence: Synthetic oligonucleotide
  Sense strand starting at position 273 of SEQ ID NO: 1243628
ugugucaccgaggauguaa

SEQ ID NO: 1429793 - RNA, 19 nt, Artificial Sequence
  Description of Artificial Sequence: Synthetic oligonucleotide
  Antisense strand to SEQ ID NO: 1429792
uuacauccucggugacaca

SEQ ID NO: 1429794 - RNA, 19 nt, Artificial Sequence
  Description of Artificial Sequence: Synthetic oligonucleotide
  Sense strand starting at position 293 of SEQ ID NO: 1243628
aguagaaaccuuuagcuca

SEQ ID NO: 1429795 - RNA, 19 nt, Artificial Sequence
  Description of Artificial Sequence: Synthetic oligonucleotide
  Antisense strand to SEQ ID NO: 1429794
ugagcuaaagguuucuacu

SEQ ID NO: 1429796 - RNA, 19 nt, Artificial Sequence
  Description of Artificial Sequence: Synthetic oligonucleotide
  Sense strand starting at position 403 of SEQ ID NO: 1243628
cguagcucuucuccagaga

SEQ ID NO: 1429797 - RNA, 19 nt, Artificial Sequence
  Description of Artificial Sequence: Synthetic oligonucleotide
  Antisense strand to SEQ ID NO: 1429796
ucucuggagaagagcuacg

SEQ ID NO: 1429798 - RNA, 19 nt, Artificial Sequence
  Description of Artificial Sequence: Synthetic oligonucleotide
  Sense strand starting at position 404 of SEQ ID NO: 1243628
guagcucuucuccagagaa

SEQ ID NO: 1429799 - RNA, 19 nt, Artificial Sequence
  Description of Artificial Sequence: Synthetic oligonucleotide
  Antisense strand to SEQ ID NO: 1429798
uucucuggagaagagcuac

SEQ ID NO: 1429800 - RNA, 19 nt, Artificial Sequence
  Description of Artificial Sequence: Synthetic oligonucleotide
  Sense strand starting at position 485 of SEQ ID NO: 1243628
cuugaugucgcgcacgauu

SEQ ID NO: 1429801 - RNA, 19 nt, Artificial Sequence
  Description of Artificial Sequence: Synthetic oligonucleotide
  Antisense strand to SEQ ID NO: 1429800
aaucgugcgcgacaucaag

SEQ ID NO: 1429802 - RNA, 19 nt, Artificial Sequence
  Description of Artificial Sequence: Synthetic oligonucleotide
  Sense strand starting at position 613 of SEQ ID NO: 1243628
gggcguagcccucguagau

SEQ ID NO: 1429803 - RNA, 19 nt, Artificial Sequence
  Description of Artificial Sequence: Synthetic oligonucleotide
  Antisense strand to SEQ ID NO: 1429802
aucuacgagggcuacgccc

SEQ ID NO: 1429804 - RNA, 19 nt, Artificial Sequence
  Description of Artificial Sequence: Synthetic oligonucleotide
  Sense strand starting at position 614 of SEQ ID NO: 1243628
ggcguagcccucguagaug

SEQ ID NO: 1429805 - RNA, 19 nt, Artificial Sequence
  Description of Artificial Sequence: Synthetic oligonucleotide
  Antisense strand to SEQ ID NO: 1429804
caucuacgagggcuacgcc

SEQ ID NO: 1429806 - RNA, 19 nt, Artificial Sequence
  Description of Artificial Sequence: Synthetic oligonucleotide
  Sense strand starting at position 753 of SEQ ID NO: 1243628
aacauaaucugagaaggga

SEQ ID NO: 1429807 - RNA, 19 nt, Artificial Sequence
  Description of Artificial Sequence: Synthetic oligonucleotide
  Antisense strand to SEQ ID NO: 1429806
ucccuucucagauuauguu

SEQ ID NO: 1429808 - RNA, 19 nt, Artificial Sequence
  Description of Artificial Sequence: Synthetic oligonucleotide
  Sense strand starting at position 779 of SEQ ID NO: 1243628
cggcuuagucagggacaga

SEQ ID NO: 1429809 - RNA, 19 nt, Artificial Sequence
  Description of Artificial Sequence: Synthetic oligonucleotide
  Antisense strand to SEQ ID NO: 1429808
ucugucccugacuaagccg

SEQ ID NO: 1429810 - RNA, 19 nt, Artificial Sequence
  Description of Artificial Sequence: Synthetic oligonucleotide
  Sense strand starting at position 834 of SEQ ID NO: 1243628
gcugcaugccagugugaug

SEQ ID NO: 1429811 - RNA, 19 nt, Artificial Sequence
  Description of Artificial Sequence: Synthetic oligonucleotide
  Antisense strand to SEQ ID NO: 1429810
caucacacuggcaugcagc

SEQ ID NO: 1429812 - RNA, 19 nt, Artificial Sequence
  Description of Artificial Sequence: Synthetic oligonucleotide
  Sense strand starting at position 843 of SEQ ID NO: 1243628
cagugugauguguggagaa

SEQ ID NO: 1429813 - RNA, 19 nt, Artificial Sequence
  Description of Artificial Sequence: Synthetic oligonucleotide
  Antisense strand to SEQ ID NO: 1429812
uucuccacacaucacacug

SEQ ID NO: 1429814 - RNA, 19 nt, Artificial Sequence
  Description of Artificial Sequence: Synthetic oligonucleotide
  Sense strand starting at position 1114 of SEQ ID NO: 1243628
cgcgcagcucguuguagaa

SEQ ID NO: 1429815 - RNA, 19 nt, Artificial Sequence
  Description of Artificial Sequence: Synthetic oligonucleotide
  Antisense strand to SEQ ID NO: 1429814
uucuacaacgagcugcgcg

SEQ ID NO: 1429816 - RNA, 19 nt, Artificial Sequence
  Description of Artificial Sequence: Synthetic oligonucleotide
  Sense strand starting at position 1471 of SEQ ID NO: 1243628
ggcgaucucuucuuccauu

SEQ ID NO: 1429817 - RNA, 19 nt, Artificial Sequence
  Description of Artificial Sequence: Synthetic oligonucleotide
  Antisense strand to SEQ ID NO: 1429816
aauggaagaagagaucgcc

SEQ ID NO: 1429818 - RNA, 19 nt, Artificial Sequence
  Description of Artificial Sequence: Synthetic oligonucleotide
  Sense strand starting at position 1952 of SEQ ID NO: 1243628
cgccguuauuuaagcggaa

SEQ ID NO: 1429819 - RNA, 19 nt, Artificial Sequence
  Description of Artificial Sequence: Synthetic oligonucleotide
  Antisense strand to SEQ ID NO: 1429818
uuccgcuuaaauaacggcg

SEQ ID NO: 1429820 - RNA, 19 nt, Artificial Sequence
  Description of Artificial Sequence: Synthetic oligonucleotide
  Sense strand starting at position 2016 of SEQ ID NO: 1243628
guccauauauggcgaucuu

SEQ ID NO: 1429821 - RNA, 19 nt, Artificial Sequence
  Description of Artificial Sequence: Synthetic oligonucleotide
  Antisense strand to SEQ ID NO: 1429820
aagaucgccauauauggac

SEQ ID NO: 1429822 - RNA, 19 nt, Artificial Sequence
  Description of Artificial Sequence: Synthetic oligonucleotide
  Sense strand starting at position 2017 of SEQ ID NO: 1243628
uccauauauggcgaucuuu

SEQ ID NO: 1429823 - RNA, 19 nt, Artificial Sequence
  Description of Artificial Sequence: Synthetic oligonucleotide
  Antisense strand to SEQ ID NO: 1429822
aaagaucgccauauaugga

SEQ ID NO: 1429824 - RNA, 19 nt, Artificial Sequence
  Description of Artificial Sequence: Synthetic oligonucleotide
  Sense strand starting at position 2368 of SEQ ID NO: 1243628
ggacgucccuugcaaucuu

SEQ ID NO: 1429825 - RNA, 19 nt, Artificial Sequence
  Description of Artificial Sequence: Synthetic oligonucleotide
  Antisense strand to SEQ ID NO: 1429824
aagauugcaagggacgucc

SEQ ID NO: 1429826 - RNA, 19 nt, Artificial Sequence
  Description of Artificial Sequence: Synthetic oligonucleotide
  Sense strand starting at position 2585 of SEQ ID NO: 1243628
cccggaucuccguucguuu

SEQ ID NO: 1429827 - RNA, 19 nt, Artificial Sequence
  Description of Artificial Sequence: Synthetic oligonucleotide
  Antisense strand to SEQ ID NO: 1429826
aaacgaacggagauccggg

SEQ ID NO: 1429828 - RNA, 19 nt, Artificial Sequence
  Description of Artificial Sequence: Synthetic oligonucleotide
  Sense strand starting at position 2588 of SEQ ID NO: 1243628
ggaucuccguucguuugaa

SEQ ID NO: 1429829 - RNA, 19 nt, Artificial Sequence
  Description of Artificial Sequence: Synthetic oligonucleotide
  Antisense strand to SEQ ID NO: 1429828
uucaaacgaacggagaucc

SEQ ID NO: 1429830 - RNA, 19 nt, Artificial Sequence
  Description of Artificial Sequence: Synthetic oligonucleotide
  Sense strand starting at position 2752 of SEQ ID NO: 1243628
ucuggucaccuguagacau

SEQ ID NO: 1429831 - RNA, 19 nt, Artificial Sequence
  Description of Artificial Sequence: Synthetic oligonucleotide
  Antisense strand to SEQ ID NO: 1429830
augucuacaggugaccaga

SEQ ID NO: 1429832 - RNA, 19 nt, Artificial Sequence
  Description of Artificial Sequence: Synthetic oligonucleotide
  Sense strand starting at position 2754 of SEQ ID NO: 1243628
uggucaccuguagacauua

SEQ ID NO: 1429833 - RNA, 19 nt, Artificial Sequence
  Description of Artificial Sequence: Synthetic oligonucleotide
  Antisense strand to SEQ ID NO: 1429832
uaaugucuacaggugacca

SEQ ID NO: 1429834 - RNA, 19 nt, Artificial Sequence
  Description of Artificial Sequence: Synthetic oligonucleotide
  Sense strand starting at position 2845 of SEQ ID NO: 1243628
gggauacccucuucuguuu

SEQ ID NO: 1429835 - RNA, 19 nt, Artificial Sequence
  Description of Artificial Sequence: Synthetic oligonucleotide
  Antisense strand to SEQ ID NO: 1429834
aaacagaagaggguauccc

SEQ ID NO: 1429836 - RNA, 19 nt, Artificial Sequence
  Description of Artificial Sequence: Synthetic oligonucleotide
  Sense strand starting at position 2850 of SEQ ID NO: 1243628
acccucuucuguuuacgau

SEQ ID NO: 1429837 - RNA, 19 nt, Artificial Sequence
  Description of Artificial Sequence: Synthetic oligonucleotide
  Antisense strand to SEQ ID NO: 1429836
aucguaaacagaagagggu

SEQ ID NO: 1429838 - RNA, 19 nt, Artificial Sequence
  Description of Artificial Sequence: Synthetic oligonucleotide
  Sense strand starting at position 2856 of SEQ ID NO: 1243628
uucuguuuacgaugcuagu

SEQ ID NO: 1429839 - RNA, 19 nt, Artificial Sequence
  Description of Artificial Sequence: Synthetic oligonucleotide
  Antisense strand to SEQ ID NO: 1429838
acuagcaucguaaacagaa

SEQ ID NO: 1429840 - RNA, 19 nt, Artificial Sequence
  Description of Artificial Sequence: Synthetic oligonucleotide
  Sense strand starting at position 2859 of SEQ ID NO: 1243628
uguuuacgaugcuaguuaa

SEQ ID NO: 1429841 - RNA, 19 nt, Artificial Sequence
  Description of Artificial Sequence: Synthetic oligonucleotide
  Antisense strand to SEQ ID NO: 1429840
uuaacuagcaucguaaaca

SEQ ID NO: 1429842 - RNA, 19 nt, Artificial Sequence
  Description of Artificial Sequence: Synthetic oligonucleotide
  Sense strand starting at position 2862 of SEQ ID NO: 1243628
uuacgaugcuaguuaagag

SEQ ID NO: 1429843 - RNA, 19 nt, Artificial Sequence
  Description of Artificial Sequence: Synthetic oligonucleotide
  Antisense strand to SEQ ID NO: 1429842
cucuuaacuagcaucguaa

SEQ ID NO: 1429844 - RNA, 19 nt, Artificial Sequence
  Description of Artificial Sequence: Synthetic oligonucleotide
  Sense strand starting at position 3086 of SEQ ID NO: 1243628
ggucgcagagcguucagau

SEQ ID NO: 1429845 - RNA, 19 nt, Artificial Sequence
  Description of Artificial Sequence: Synthetic oligonucleotide
  Antisense strand to SEQ ID NO: 1429844
aucugaacgcucugcgacc

SEQ ID NO: 1429846 - RNA, 19 nt, Artificial Sequence
  Description of Artificial Sequence: Synthetic oligonucleotide
  Sense strand starting at position 3087 of SEQ ID NO: 1243628
gucgcagagcguucagauu

SEQ ID NO: 1429847 - RNA, 19 nt, Artificial Sequence
  Description of Artificial Sequence: Synthetic oligonucleotide
  Antisense strand to SEQ ID NO: 1429846
aaucugaacgcucugcgac

SEQ ID NO: 1429848 - RNA, 19 nt, Artificial Sequence
  Description of Artificial Sequence: Synthetic oligonucleotide
  Sense strand starting at position 3180 of SEQ ID NO: 1243628
cguguuugggagugacaac

SEQ ID NO: 1429849 - RNA, 19 nt, Artificial Sequence
  Description of Artificial Sequence: Synthetic oligonucleotide
  Antisense strand to SEQ ID NO: 1429848
guugucacucccaaacacg

SEQ ID NO: 1429850 - RNA, 19 nt, Artificial Sequence
  Description of Artificial Sequence: Synthetic oligonucleotide
  Sense strand starting at position 3181 of SEQ ID NO: 1243628
guguuugggagugacaaca

SEQ ID NO: 1429851 - RNA, 19 nt, Artificial Sequence
  Description of Artificial Sequence: Synthetic oligonucleotide
  Antisense strand to SEQ ID NO: 1429850
uguugucacucccaaacac

SEQ ID NO: 1429852 - RNA, 19 nt, Artificial Sequence
  Description of Artificial Sequence: Synthetic oligonucleotide
  Sense strand starting at position 3340 of SEQ ID NO: 1243628
gggcaaggcugucagguau

SEQ ID NO: 1429853 - RNA, 19 nt, Artificial Sequence
  Description of Artificial Sequence: Synthetic oligonucleotide
  Antisense strand to SEQ ID NO: 1429852
auaccugacagccuugccc

SEQ ID NO: 1429854 - RNA, 19 nt, Artificial Sequence
  Description of Artificial Sequence: Synthetic oligonucleotide
  Sense strand starting at position 3614 of SEQ ID NO: 1243628
uccgaagcuucuuugucua

SEQ ID NO: 1429855 - RNA, 19 nt, Artificial Sequence
  Description of Artificial Sequence: Synthetic oligonucleotide
  Antisense strand to SEQ ID NO: 1429854
uagacaaagaagcuucgga

SEQ ID NO: 1429856 - RNA, 19 nt, Artificial Sequence
  Description of Artificial Sequence: Synthetic oligonucleotide
  Sense strand starting at position 3617 of SEQ ID NO: 1243628
gaagcuucuuugucuagga

SEQ ID NO: 1429857 - RNA, 19 nt, Artificial Sequence
  Description of Artificial Sequence: Synthetic oligonucleotide
  Antisense strand to SEQ ID NO: 1429856
uccuagacaaagaagcuuc

SEQ ID NO: 1429858 - RNA, 19 nt, Artificial Sequence
  Description of Artificial Sequence: Synthetic oligonucleotide
  Sense strand starting at position 3618 of SEQ ID NO: 1243628
aagcuucuuugucuaggaa

SEQ ID NO: 1429859 - RNA, 19 nt, Artificial Sequence
  Description of Artificial Sequence: Synthetic oligonucleotide
  Antisense strand to SEQ ID NO: 1429858
uuccuagacaaagaagcuu

SEQ ID NO: 1429860 - RNA, 19 nt, Artificial Sequence
  Description of Artificial Sequence: Synthetic oligonucleotide
  Sense strand starting at position 239 of SEQ ID NO: 1243629
ugguccaucuauuaugcau

SEQ ID NO: 1429861 - RNA, 19 nt, Artificial Sequence
  Description of Artificial Sequence: Synthetic oligonucleotide
  Antisense strand to SEQ ID NO: 1429860
augcauaauagauggacca

SEQ ID NO: 1429862 - RNA, 19 nt, Artificial Sequence
  Description of Artificial Sequence: Synthetic oligonucleotide
  Sense strand starting at position 370 of SEQ ID NO: 1243629
agaugccagucugacagau

SEQ ID NO: 1429863 - RNA, 19 nt, Artificial Sequence
  Description of Artificial Sequence: Synthetic oligonucleotide
  Antisense strand to SEQ ID NO: 1429862
aucugucagacuggcaucu

SEQ ID NO: 1429864 - RNA, 19 nt, Artificial Sequence
  Description of Artificial Sequence: Synthetic oligonucleotide
  Sense strand starting at position 379 of SEQ ID NO: 1243629
ucugacagauguccguaau

SEQ ID NO: 1429865 - RNA, 19 nt, Artificial Sequence
  Description of Artificial Sequence: Synthetic oligonucleotide
  Antisense strand to SEQ ID NO: 1429864
auuacggacaucugucaga

SEQ ID NO: 1429866 - RNA, 19 nt, Artificial Sequence
  Description of Artificial Sequence: Synthetic oligonucleotide
  Sense strand starting at position 380 of SEQ ID NO: 1243629
cugacagauguccguaaug

SEQ ID NO: 1429867 - RNA, 19 nt, Artificial Sequence
  Description of Artificial Sequence: Synthetic oligonucleotide
  Antisense strand to SEQ ID NO: 1429866
cauuacggacaucugucag

SEQ ID NO: 1429868 - RNA, 19 nt, Artificial Sequence
  Description of Artificial Sequence: Synthetic oligonucleotide
  Sense strand starting at position 382 of SEQ ID NO: 1243629
gacagauguccguaauguu

SEQ ID NO: 1429869 - RNA, 19 nt, Artificial Sequence
  Description of Artificial Sequence: Synthetic oligonucleotide
  Antisense strand to SEQ ID NO: 1429868
aacauuacggacaucuguc

SEQ ID NO: 1429870 - RNA, 19 nt, Artificial Sequence
  Description of Artificial Sequence: Synthetic oligonucleotide
  Sense strand starting at position 607 of SEQ ID NO: 1243629
gggugugcugaaugaauau

SEQ ID NO: 1429871 - RNA, 19 nt, Artificial Sequence
  Description of Artificial Sequence: Synthetic oligonucleotide
  Antisense strand to SEQ ID NO: 1429870
auauucauucagcacaccc

SEQ ID NO: 1429872 - RNA, 19 nt, Artificial Sequence
  Description of Artificial Sequence: Synthetic oligonucleotide
  Sense strand starting at position 621 of SEQ ID NO: 1243629
aauauuccaucugggugau

SEQ ID NO: 1429873 - RNA, 19 nt, Artificial Sequence
  Description of Artificial Sequence: Synthetic oligonucleotide
  Antisense strand to SEQ ID NO: 1429872
aucacccagauggaauauu

SEQ ID NO: 1429874 - RNA, 19 nt, Artificial Sequence
  Description of Artificial Sequence: Synthetic oligonucleotide
  Sense strand starting at position 622 of SEQ ID NO: 1243629
auauuccaucugggugauu

SEQ ID NO: 1429875 - RNA, 19 nt, Artificial Sequence
  Description of Artificial Sequence: Synthetic oligonucleotide
  Antisense strand to SEQ ID NO: 1429874
aaucacccagauggaauau

SEQ ID NO: 1429876 - RNA, 19 nt, Artificial Sequence
  Description of Artificial Sequence: Synthetic oligonucleotide
  Sense strand starting at position 623 of SEQ ID NO: 1243629
uauuccaucugggugauua

SEQ ID NO: 1429877 - RNA, 19 nt, Artificial Sequence
  Description of Artificial Sequence: Synthetic oligonucleotide
  Antisense strand to SEQ ID NO: 1429876
uaaucacccagauggaaua

SEQ ID NO: 1429878 - RNA, 19 nt, Artificial Sequence
  Description of Artificial Sequence: Synthetic oligonucleotide
  Sense strand starting at position 624 of SEQ ID NO: 1243629
auuccaucugggugauuau

SEQ ID NO: 1429879 - RNA, 19 nt, Artificial Sequence
  Description of Artificial Sequence: Synthetic oligonucleotide
  Antisense strand to SEQ ID NO: 1429878
auaaucacccagauggaau

SEQ ID NO: 1429880 - RNA, 19 nt, Artificial Sequence
  Description of Artificial Sequence: Synthetic oligonucleotide
  Sense strand starting at position 625 of SEQ ID NO: 1243629
uuccaucugggugauuauu

SEQ ID NO: 1429881 - RNA, 19 nt, Artificial Sequence
  Description of Artificial Sequence: Synthetic oligonucleotide
  Antisense strand to SEQ ID NO: 1429880
aauaaucacccagauggaa

SEQ ID NO: 1429882 - RNA, 19 nt, Artificial Sequence
  Description of Artificial Sequence: Synthetic oligonucleotide
  Sense strand starting at position 627 of SEQ ID NO: 1243629
ccaucugggugauuauuau

SEQ ID NO: 1429883 - RNA, 19 nt, Artificial Sequence
  Description of Artificial Sequence: Synthetic oligonucleotide
  Antisense strand to SEQ ID NO: 1429882
auaauaaucacccagaugg

SEQ ID NO: 1429884 - RNA, 19 nt, Artificial Sequence
  Description of Artificial Sequence: Synthetic oligonucleotide
  Sense strand starting at position 862 of SEQ ID NO: 1243629
gcacuaaguuguuccaaga

SEQ ID NO: 1429885 - RNA, 19 nt, Artificial Sequence
  Description of Artificial Sequence: Synthetic oligonucleotide
  Antisense strand to SEQ ID NO: 1429884
ucuuggaacaacuuagugc

SEQ ID NO: 1429886 - RNA, 19 nt, Artificial Sequence
  Description of Artificial Sequence: Synthetic oligonucleotide
  Sense strand starting at position 916 of SEQ ID NO: 1243629
gcccuaaucccugacugga

SEQ ID NO: 1429887 - RNA, 19 nt, Artificial Sequence
  Description of Artificial Sequence: Synthetic oligonucleotide
  Antisense strand to SEQ ID NO: 1429886
uccagucagggauuagggc

SEQ ID NO: 1429888 - RNA, 19 nt, Artificial Sequence
  Description of Artificial Sequence: Synthetic oligonucleotide
  Sense strand starting at position 918 of SEQ ID NO: 1243629
ccuaaucccugacuggaau

SEQ ID NO: 1429889 - RNA, 19 nt, Artificial Sequence
  Description of Artificial Sequence: Synthetic oligonucleotide
  Antisense strand to SEQ ID NO: 1429888
auuccagucagggauuagg

SEQ ID NO: 1429890 - RNA, 19 nt, Artificial Sequence
  Description of Artificial Sequence: Synthetic oligonucleotide
  Sense strand starting at position 998 of SEQ ID NO: 1243629
uagcuuuggccagagcaga

SEQ ID NO: 1429891 - RNA, 19 nt, Artificial Sequence
  Description of Artificial Sequence: Synthetic oligonucleotide
  Antisense strand to SEQ ID NO: 1429890
ucugcucuggccaaagcua

SEQ ID NO: 1429892 - RNA, 19 nt, Artificial Sequence
  Description of Artificial Sequence: Synthetic oligonucleotide
  Sense strand starting at position 1050 of SEQ ID NO: 1243629
accugagaccuaggcauua

SEQ ID NO: 1429893 - RNA, 19 nt, Artificial Sequence
  Description of Artificial Sequence: Synthetic oligonucleotide
  Antisense strand to SEQ ID NO: 1429892
uaaugccuaggucucaggu

SEQ ID NO: 1429894 - RNA, 19 nt, Artificial Sequence
  Description of Artificial Sequence: Synthetic oligonucleotide
  Sense strand starting at position 1052 of SEQ ID NO: 1243629
cugagaccuaggcauuagu

SEQ ID NO: 1429895 - RNA, 19 nt, Artificial Sequence
  Description of Artificial Sequence: Synthetic oligonucleotide
  Antisense strand to SEQ ID NO: 1429894
acuaaugccuaggucucag

SEQ ID NO: 1429896 - RNA, 19 nt, Artificial Sequence
  Description of Artificial Sequence: Synthetic oligonucleotide
  Sense strand starting at position 1995 of SEQ ID NO: 1243629
gccucauggcucgcucauu

SEQ ID NO: 1429897 - RNA, 19 nt, Artificial Sequence
  Description of Artificial Sequence: Synthetic oligonucleotide
  Antisense strand to SEQ ID NO: 1429896
aaugagcgagccaugaggc

SEQ ID NO: 1429898 - RNA, 19 nt, Artificial Sequence
  Description of Artificial Sequence: Synthetic oligonucleotide
  Sense strand starting at position 2649 of SEQ ID NO: 1243629
ggcaaaggcucuuggcgaa

SEQ ID NO: 1429899 - RNA, 19 nt, Artificial Sequence
  Description of Artificial Sequence: Synthetic oligonucleotide
  Antisense strand to SEQ ID NO: 1429898
uucgccaagagccuuugcc

SEQ ID NO: 1429900 - RNA, 19 nt, Artificial Sequence
  Description of Artificial Sequence: Synthetic oligonucleotide
  Sense strand starting at position 2674 of SEQ ID NO: 1243629
gcucuacgccucugggauu

SEQ ID NO: 1429901 - RNA, 19 nt, Artificial Sequence
  Description of Artificial Sequence: Synthetic oligonucleotide
  Antisense strand to SEQ ID NO: 1429900
aaucccagaggcguagagc

SEQ ID NO: 1429902 - RNA, 19 nt, Artificial Sequence
  Description of Artificial Sequence: Synthetic oligonucleotide
  Sense strand starting at position 2912 of SEQ ID NO: 1243629
cuagccaggucacuuauau

SEQ ID NO: 1429903 - RNA, 19 nt, Artificial Sequence
  Description of Artificial Sequence: Synthetic oligonucleotide
  Antisense strand to SEQ ID NO: 1429902
auauaagugaccuggcuag

SEQ ID NO: 1429904 - RNA, 19 nt, Artificial Sequence
  Description of Artificial Sequence: Synthetic oligonucleotide
  Sense strand starting at position 3254 of SEQ ID NO: 1243629
accacagguugcugaagaa

SEQ ID NO: 1429905 - RNA, 19 nt, Artificial Sequence
  Description of Artificial Sequence: Synthetic oligonucleotide
  Antisense strand to SEQ ID NO: 1429904
uucuucagcaaccuguggu

SEQ ID NO: 1429906 - RNA, 19 nt, Artificial Sequence
  Description of Artificial Sequence: Synthetic oligonucleotide
  Sense strand starting at position 3351 of SEQ ID NO: 1243629
cugccucuagcuugugaca

SEQ ID NO: 1429907 - RNA, 19 nt, Artificial Sequence
  Description of Artificial Sequence: Synthetic oligonucleotide
  Antisense strand to SEQ ID NO: 1429906
ugucacaagcuagaggcag

SEQ ID NO: 1429908 - RNA, 19 nt, Artificial Sequence
  Description of Artificial Sequence: Synthetic oligonucleotide
  Sense strand starting at position 3501 of SEQ ID NO: 1243629
caguaaggcugagccaauu

SEQ ID NO: 1429909 - RNA, 19 nt, Artificial Sequence
  Description of Artificial Sequence: Synthetic oligonucleotide
  Antisense strand to SEQ ID NO: 1429908
aauuggcucagccuuacug

SEQ ID NO: 1429910 - RNA, 19 nt, Artificial Sequence
  Description of Artificial Sequence: Synthetic oligonucleotide
  Sense strand starting at position 3522 of SEQ ID NO: 1243629
uccuucgcucuggagacau

SEQ ID NO: 1429911 - RNA, 19 nt, Artificial Sequence
  Description of Artificial Sequence: Synthetic oligonucleotide
  Antisense strand to SEQ ID NO: 1429910
augucuccagagcgaagga

SEQ ID NO: 1429912 - RNA, 19 nt, Artificial Sequence
  Description of Artificial Sequence: Synthetic oligonucleotide
  Sense strand starting at position 3569 of SEQ ID NO: 1243629
ugaggaggcuccugggaau

SEQ ID NO: 1429913 - RNA, 19 nt, Artificial Sequence
  Description of Artificial Sequence: Synthetic oligonucleotide
  Antisense strand to SEQ ID NO: 1429912
auucccaggagccuccuca

SEQ ID NO: 1429914 - RNA, 19 nt, Artificial Sequence
  Description of Artificial Sequence: Synthetic oligonucleotide
  Sense strand starting at position 3600 of SEQ ID NO: 1243629
ggugguauuccuggaaacu

SEQ ID NO: 1429915 - RNA, 19 nt, Artificial Sequence
  Description of Artificial Sequence: Synthetic oligonucleotide
  Antisense strand to SEQ ID NO: 1429914
aguuuccaggaauaccacc

SEQ ID NO: 1429916 - RNA, 19 nt, Artificial Sequence
  Description of Artificial Sequence: Synthetic oligonucleotide
  Sense strand starting at position 3601 of SEQ ID NO: 1243629
gugguauuccuggaaacuc

SEQ ID NO: 1429917 - RNA, 19 nt, Artificial Sequence
  Description of Artificial Sequence: Synthetic oligonucleotide
  Antisense strand to SEQ ID NO: 1429916
gaguuuccaggaauaccac

SEQ ID NO: 1429918 - RNA, 19 nt, Artificial Sequence
  Description of Artificial Sequence: Synthetic oligonucleotide
  Sense strand starting at position 3689 of SEQ ID NO: 1243629
augugagcuucucaaaguc

SEQ ID NO: 1429919 - RNA, 19 nt, Artificial Sequence
  Description of Artificial Sequence: Synthetic oligonucleotide
  Antisense strand to SEQ ID NO: 1429918
gacuuugagaagcucacau

SEQ ID NO: 1429920 - RNA, 19 nt, Artificial Sequence
  Description of Artificial Sequence: Synthetic oligonucleotide
  Sense strand starting at position 3811 of SEQ ID NO: 1243629
ugguauaucuggucccaug

SEQ ID NO: 1429921 - RNA, 19 nt, Artificial Sequence
  Description of Artificial Sequence: Synthetic oligonucleotide
  Antisense strand to SEQ ID NO: 1429920
caugggaccagauauacca

SEQ ID NO: 1429922 - RNA, 19 nt, Artificial Sequence
  Description of Artificial Sequence: Synthetic oligonucleotide
  Sense strand starting at position 3935 of SEQ ID NO: 1243629
cugggugagguuugucauu

SEQ ID NO: 1429923 - RNA, 19 nt, Artificial Sequence
  Description of Artificial Sequence: Synthetic oligonucleotide
  Antisense strand to SEQ ID NO: 1429922
aaugacaaaccucacccag

SEQ ID NO: 1429924 - RNA, 19 nt, Artificial Sequence
  Description of Artificial Sequence: Synthetic oligonucleotide
  Sense strand starting at position 3937 of SEQ ID NO: 1243629
gggugagguuugucauuuc

SEQ ID NO: 1429925 - RNA, 19 nt, Artificial Sequence
  Description of Artificial Sequence: Synthetic oligonucleotide
  Antisense strand to SEQ ID NO: 1429924
gaaaugacaaaccucaccc

SEQ ID NO: 1429926 - RNA, 19 nt, Artificial Sequence
  Description of Artificial Sequence: Synthetic oligonucleotide
  Sense strand starting at position 3979 of SEQ ID NO: 1243629
gagucuggguccuccaaca

SEQ ID NO: 1429927 - RNA, 19 nt, Artificial Sequence
  Description of Artificial Sequence: Synthetic oligonucleotide
  Antisense strand to SEQ ID NO: 1429926
uguuggaggacccagacuc

SEQ ID NO: 1429928 - RNA, 19 nt, Artificial Sequence
  Description of Artificial Sequence: Synthetic oligonucleotide
  Sense strand starting at position 58 of SEQ ID NO: 1243630
aagagaaauggugguggua

SEQ ID NO: 1429929 - RNA, 19 nt, Artificial Sequence
  Description of Artificial Sequence: Synthetic oligonucleotide
  Antisense strand to SEQ ID NO: 1429928
uaccaccaccauuucucuu

SEQ ID NO: 1429930 - RNA, 19 nt, Artificial Sequence
  Description of Artificial Sequence: Synthetic oligonucleotide
  Sense strand starting at position 70 of SEQ ID NO: 1243630
ggugguaucccuugaauac

SEQ ID NO: 1429931 - RNA, 19 nt, Artificial Sequence
  Description of Artificial Sequence: Synthetic oligonucleotide
  Antisense strand to SEQ ID NO: 1429930
guauucaagggauaccacc

SEQ ID NO: 1429932 - RNA, 19 nt, Artificial Sequence
  Description of Artificial Sequence: Synthetic oligonucleotide
  Sense strand starting at position 71 of SEQ ID NO: 1243630
gugguaucccuugaauaca

SEQ ID NO: 1429933 - RNA, 19 nt, Artificial Sequence
  Description of Artificial Sequence: Synthetic oligonucleotide
  Antisense strand to SEQ ID NO: 1429932
uguauucaagggauaccac

SEQ ID NO: 1429934 - RNA, 19 nt, Artificial Sequence
  Description of Artificial Sequence: Synthetic oligonucleotide
  Sense strand starting at position 2021 of SEQ ID NO: 1243630
ucaguuuccgcgucuauga

SEQ ID NO: 1429935 - RNA, 19 nt, Artificial Sequence
  Description of Artificial Sequence: Synthetic oligonucleotide
  Antisense strand to SEQ ID NO: 1429934
ucauagacgcggaaacuga

SEQ ID NO: 1429936 - RNA, 19 nt, Artificial Sequence
  Description of Artificial Sequence: Synthetic oligonucleotide
  Sense strand starting at position 2022 of SEQ ID NO: 1243630
caguuuccgcgucuaugaa

SEQ ID NO: 1429937 - RNA, 19 nt, Artificial Sequence
  Description of Artificial Sequence: Synthetic oligonucleotide
  Antisense strand to SEQ ID NO: 1429936
uucauagacgcggaaacug

SEQ ID NO: 1429938 - RNA, 19 nt, Artificial Sequence
  Description of Artificial Sequence: Synthetic oligonucleotide
  Sense strand starting at position 2052 of SEQ ID NO: 1243630
ggcauaugucugcaucuca

SEQ ID NO: 1429939 - RNA, 19 nt, Artificial Sequence
  Description of Artificial Sequence: Synthetic oligonucleotide
  Antisense strand to SEQ ID NO: 1429938
ugagaugcagacauaugcc

SEQ ID NO: 1429940 - RNA, 19 nt, Artificial Sequence
  Description of Artificial Sequence: Synthetic oligonucleotide
  Sense strand starting at position 2103 of SEQ ID NO: 1243630
ucuguuaaagcguucuguu

SEQ ID NO: 1429941 - RNA, 19 nt, Artificial Sequence
  Description of Artificial Sequence: Synthetic oligonucleotide
  Antisense strand to SEQ ID NO: 1429940
aacagaacgcuuuaacaga

SEQ ID NO: 1429942 - RNA, 19 nt, Artificial Sequence
  Description of Artificial Sequence: Synthetic oligonucleotide
  Sense strand starting at position 2104 of SEQ ID NO: 1243630
cuguuaaagcguucuguua

SEQ ID NO: 1429943 - RNA, 19 nt, Artificial Sequence
  Description of Artificial Sequence: Synthetic oligonucleotide
  Antisense strand to SEQ ID NO: 1429942
uaacagaacgcuuuaacag

SEQ ID NO: 1429944 - RNA, 19 nt, Artificial Sequence
  Description of Artificial Sequence: Synthetic oligonucleotide
  Sense strand starting at position 2177 of SEQ ID NO: 1243630
caggaagcccucugugaua

SEQ ID NO: 1429945 - RNA, 19 nt, Artificial Sequence
  Description of Artificial Sequence: Synthetic oligonucleotide
  Antisense strand to SEQ ID NO: 1429944
uaucacagagggcuuccug

SEQ ID NO: 1429946 - RNA, 19 nt, Artificial Sequence
  Description of Artificial Sequence: Synthetic oligonucleotide
  Sense strand starting at position 2193 of SEQ ID NO: 1243630
auacccugccuggaguaau

SEQ ID NO: 1429947 - RNA, 19 nt, Artificial Sequence
  Description of Artificial Sequence: Synthetic oligonucleotide
  Antisense strand to SEQ ID NO: 1429946
auuacuccaggcaggguau

SEQ ID NO: 1429948 - RNA, 19 nt, Artificial Sequence
  Description of Artificial Sequence: Synthetic oligonucleotide
  Sense strand starting at position 2204 of SEQ ID NO: 1243630
ggaguaaucuuuccagccu

SEQ ID NO: 1429949 - RNA, 19 nt, Artificial Sequence
  Description of Artificial Sequence: Synthetic oligonucleotide
  Antisense strand to SEQ ID NO: 1429948
aggcuggaaagauuacucc

SEQ ID NO: 1429950 - RNA, 19 nt, Artificial Sequence
  Description of Artificial Sequence: Synthetic oligonucleotide
  Sense strand starting at position 2219 of SEQ ID NO: 1243630
gccucugggucuccaagaa

SEQ ID NO: 1429951 - RNA, 19 nt, Artificial Sequence
  Description of Artificial Sequence: Synthetic oligonucleotide
  Antisense strand to SEQ ID NO: 1429950
uucuuggagacccagaggc

SEQ ID NO: 1429952 - RNA, 19 nt, Artificial Sequence
  Description of Artificial Sequence: Synthetic oligonucleotide
  Sense strand starting at position 2245 of SEQ ID NO: 1243630
guaguaucugucuauuugu

SEQ ID NO: 1429953 - RNA, 19 nt, Artificial Sequence
  Description of Artificial Sequence: Synthetic oligonucleotide
  Antisense strand to SEQ ID NO: 1429952
acaaauagacagauacuac

SEQ ID NO: 1429954 - RNA, 19 nt, Artificial Sequence
  Description of Artificial Sequence: Synthetic oligonucleotide
  Sense strand starting at position 2293 of SEQ ID NO: 1243630
gcaucacgguuauuuauau

SEQ ID NO: 1429955 - RNA, 19 nt, Artificial Sequence
  Description of Artificial Sequence: Synthetic oligonucleotide
  Antisense strand to SEQ ID NO: 1429954
auauaaauaaccgugaugc

SEQ ID NO: 1429956 - RNA, 19 nt, Artificial Sequence
  Description of Artificial Sequence: Synthetic oligonucleotide
  Sense strand starting at position 2505 of SEQ ID NO: 1243630
ggcacuuuaaccugugaag

SEQ ID NO: 1429957 - RNA, 19 nt, Artificial Sequence
  Description of Artificial Sequence: Synthetic oligonucleotide
  Antisense strand to SEQ ID NO: 1429956
cuucacagguuaaagugcc

SEQ ID NO: 1429958 - RNA, 19 nt, Artificial Sequence
  Description of Artificial Sequence: Synthetic oligonucleotide
  Sense strand starting at position 2546 of SEQ ID NO: 1243630
caggguauagguggucuua

SEQ ID NO: 1429959 - RNA, 19 nt, Artificial Sequence
  Description of Artificial Sequence: Synthetic oligonucleotide
  Antisense strand to SEQ ID NO: 1429958
uaagaccaccuauacccug

SEQ ID NO: 1429960 - RNA, 19 nt, Artificial Sequence
  Description of Artificial Sequence: Synthetic oligonucleotide
  Sense strand starting at position 2548 of SEQ ID NO: 1243630
ggguauagguggucuuaaa

SEQ ID NO: 1429961 - RNA, 19 nt, Artificial Sequence
  Description of Artificial Sequence: Synthetic oligonucleotide
  Antisense strand to SEQ ID NO: 1429960
uuuaagaccaccuauaccc

SEQ ID NO: 1429962 - RNA, 19 nt, Artificial Sequence
  Description of Artificial Sequence: Synthetic oligonucleotide
  Sense strand starting at position 2559 of SEQ ID NO: 1243630
gucuuaaaugugggcauuu

SEQ ID NO: 1429963 - RNA, 19 nt, Artificial Sequence
  Description of Artificial Sequence: Synthetic oligonucleotide
  Antisense strand to SEQ ID NO: 1429962
aaaugcccacauuuaagac

SEQ ID NO: 1429964 - RNA, 19 nt, Artificial Sequence
  Description of Artificial Sequence: Synthetic oligonucleotide
  Sense strand starting at position 2605 of SEQ ID NO: 1243630
uuguuacugcuugacauca

SEQ ID NO: 1429965 - RNA, 19 nt, Artificial Sequence
  Description of Artificial Sequence: Synthetic oligonucleotide
  Antisense strand to SEQ ID NO: 1429964
ugaugucaagcaguaacaa

SEQ ID NO: 1429966 - RNA, 19 nt, Artificial Sequence
  Description of Artificial Sequence: Synthetic oligonucleotide
  Sense strand starting at position 2627 of SEQ ID NO: 1243630
ucguuacuccuugacauca

SEQ ID NO: 1429967 - RNA, 19 nt, Artificial Sequence
  Description of Artificial Sequence: Synthetic oligonucleotide
  Antisense strand to SEQ ID NO: 1429966
ugaugucaaggaguaacga

SEQ ID NO: 1429968 - RNA, 19 nt, Artificial Sequence
  Description of Artificial Sequence: Synthetic oligonucleotide
  Sense strand starting at position 2637 of SEQ ID NO: 1243630
uugacaucaucugcaauga

SEQ ID NO: 1429969 - RNA, 19 nt, Artificial Sequence
  Description of Artificial Sequence: Synthetic oligonucleotide
  Antisense strand to SEQ ID NO: 1429968
ucauugcagaugaugucaa

SEQ ID NO: 1429970 - RNA, 19 nt, Artificial Sequence
  Description of Artificial Sequence: Synthetic oligonucleotide
  Sense strand starting at position 2661 of SEQ ID NO: 1243630
gggccuccuggugaaauau

SEQ ID NO: 1429971 - RNA, 19 nt, Artificial Sequence
  Description of Artificial Sequence: Synthetic oligonucleotide
  Antisense strand to SEQ ID NO: 1429970
auauuucaccaggaggccc

SEQ ID NO: 1429972 - RNA, 19 nt, Artificial Sequence
  Description of Artificial Sequence: Synthetic oligonucleotide
  Sense strand starting at position 2698 of SEQ ID NO: 1243630
aucuucuauguagguuaau

SEQ ID NO: 1429973 - RNA, 19 nt, Artificial Sequence
  Description of Artificial Sequence: Synthetic oligonucleotide
  Antisense strand to SEQ ID NO: 1429972
auuaaccuacauagaagau

SEQ ID NO: 1429974 - RNA, 19 nt, Artificial Sequence
  Description of Artificial Sequence: Synthetic oligonucleotide
  Sense strand starting at position 2699 of SEQ ID NO: 1243630
ucuucuauguagguuaaua

SEQ ID NO: 1429975 - RNA, 19 nt, Artificial Sequence
  Description of Artificial Sequence: Synthetic oligonucleotide
  Antisense strand to SEQ ID NO: 1429974
uauuaaccuacauagaaga

SEQ ID NO: 1429976 - RNA, 19 nt, Artificial Sequence
  Description of Artificial Sequence: Synthetic oligonucleotide
  Sense strand starting at position 2707 of SEQ ID NO: 1243630
guagguuaauaccuuaaug

SEQ ID NO: 1429977 - RNA, 19 nt, Artificial Sequence
  Description of Artificial Sequence: Synthetic oligonucleotide
  Antisense strand to SEQ ID NO: 1429976
cauuaagguauuaaccuac

SEQ ID NO: 1429978 - RNA, 19 nt, Artificial Sequence
  Description of Artificial Sequence: Synthetic oligonucleotide
  Sense strand starting at position 2709 of SEQ ID NO: 1243630
agguuaauaccuuaaugca

SEQ ID NO: 1429979 - RNA, 19 nt, Artificial Sequence
  Description of Artificial Sequence: Synthetic oligonucleotide
  Antisense strand to SEQ ID NO: 1429978
ugcauuaagguauuaaccu

SEQ ID NO: 1429980 - RNA, 19 nt, Artificial Sequence
  Description of Artificial Sequence: Synthetic oligonucleotide
  Sense strand starting at position 2734 of SEQ ID NO: 1243630
ugcauuaagccauaugcau

SEQ ID NO: 1429981 - RNA, 19 nt, Artificial Sequence
  Description of Artificial Sequence: Synthetic oligonucleotide
  Antisense strand to SEQ ID NO: 1429980
augcauauggcuuaaugca

SEQ ID NO: 1429982 - RNA, 19 nt, Artificial Sequence
  Description of Artificial Sequence: Synthetic oligonucleotide
  Sense strand starting at position 2751 of SEQ ID NO: 1243630
auaugauagacagguguua

SEQ ID NO: 1429983 - RNA, 19 nt, Artificial Sequence
  Description of Artificial Sequence: Synthetic oligonucleotide
  Antisense strand to SEQ ID NO: 1429982
uaacaccugucuaucauau

SEQ ID NO: 1429984 - RNA, 19 nt, Artificial Sequence
  Description of Artificial Sequence: Synthetic oligonucleotide
  Sense strand starting at position 2753 of SEQ ID NO: 1243630
augauagacagguguuaac

SEQ ID NO: 1429985 - RNA, 19 nt, Artificial Sequence
  Description of Artificial Sequence: Synthetic oligonucleotide
  Antisense strand to SEQ ID NO: 1429984
guuaacaccugucuaucau

SEQ ID NO: 1429986 - RNA, 19 nt, Artificial Sequence
  Description of Artificial Sequence: Synthetic oligonucleotide
  Sense strand starting at position 2788 of SEQ ID NO: 1243630
gguuuccauccuggugaau

SEQ ID NO: 1429987 - RNA, 19 nt, Artificial Sequence
  Description of Artificial Sequence: Synthetic oligonucleotide
  Antisense strand to SEQ ID NO: 1429986
auucaccaggauggaaacc

SEQ ID NO: 1429988 - RNA, 19 nt, Artificial Sequence
  Description of Artificial Sequence: Synthetic oligonucleotide
  Sense strand starting at position 2890 of SEQ ID NO: 1243630
agcaauaugguguaaugga

SEQ ID NO: 1429989 - RNA, 19 nt, Artificial Sequence
  Description of Artificial Sequence: Synthetic oligonucleotide
  Antisense strand to SEQ ID NO: 1429988
uccauuacaccauauugcu

SEQ ID NO: 1429990 - RNA, 19 nt, Artificial Sequence
  Description of Artificial Sequence: Synthetic oligonucleotide
  Sense strand starting at position 2898 of SEQ ID NO: 1243630
gguguaauggaaugaauuc

SEQ ID NO: 1429991 - RNA, 19 nt, Artificial Sequence
  Description of Artificial Sequence: Synthetic oligonucleotide
  Antisense strand to SEQ ID NO: 1429990
gaauucauuccauuacacc

SEQ ID NO: 1429992 - RNA, 19 nt, Artificial Sequence
  Description of Artificial Sequence: Synthetic oligonucleotide
  Sense strand starting at position 3025 of SEQ ID NO: 1243630
cuguuaaauggagagcgua

SEQ ID NO: 1429993 - RNA, 19 nt, Artificial Sequence
  Description of Artificial Sequence: Synthetic oligonucleotide
  Antisense strand to SEQ ID NO: 1429992
uacgcucuccauuuaacag

SEQ ID NO: 1429994 - RNA, 19 nt, Artificial Sequence
  Description of Artificial Sequence: Synthetic oligonucleotide
  Sense strand starting at position 3051 of SEQ ID NO: 1243630
cuaauagggucauugaaau

SEQ ID NO: 1429995 - RNA, 19 nt, Artificial Sequence
  Description of Artificial Sequence: Synthetic oligonucleotide
  Antisense strand to SEQ ID NO: 1429994
auuucaaugacccuauuag

SEQ ID NO: 1429996 - RNA, 19 nt, Artificial Sequence
  Description of Artificial Sequence: Synthetic oligonucleotide
  Sense strand starting at position 3057 of SEQ ID NO: 1243630
gggucauugaaauggcaca

SEQ ID NO: 1429997 - RNA, 19 nt, Artificial Sequence
  Description of Artificial Sequence: Synthetic oligonucleotide
  Antisense strand to SEQ ID NO: 1429996
ugugccauuucaaugaccc

SEQ ID NO: 1429998 - RNA, 19 nt, Artificial Sequence
  Description of Artificial Sequence: Synthetic oligonucleotide
  Sense strand starting at position 3058 of SEQ ID NO: 1243630
ggucauugaaauggcacaa

SEQ ID NO: 1429999 - RNA, 19 nt, Artificial Sequence
  Description of Artificial Sequence: Synthetic oligonucleotide
  Antisense strand to SEQ ID NO: 1429998
uugugccauuucaaugacc

SEQ ID NO: 1430000 - RNA, 19 nt, Artificial Sequence
  Description of Artificial Sequence: Synthetic oligonucleotide
  Sense strand starting at position 3134 of SEQ ID NO: 1243630
ggaauugucgcuuggaaug

SEQ ID NO: 1430001 - RNA, 19 nt, Artificial Sequence
  Description of Artificial Sequence: Synthetic oligonucleotide
  Antisense strand to SEQ ID NO: 1430000
cauuccaagcgacaauucc

SEQ ID NO: 1430002 - RNA, 19 nt, Artificial Sequence
  Description of Artificial Sequence: Synthetic oligonucleotide
  Sense strand starting at position 3347 of SEQ ID NO: 1243630
guuuauuaaaccggcugaa

SEQ ID NO: 1430003 - RNA, 19 nt, Artificial Sequence
  Description of Artificial Sequence: Synthetic oligonucleotide
  Antisense strand to SEQ ID NO: 1430002
uucagccgguuuaauaaac

SEQ ID NO: 1430004 - RNA, 19 nt, Artificial Sequence
  Description of Artificial Sequence: Synthetic oligonucleotide
  Sense strand starting at position 3350 of SEQ ID NO: 1243630
uauuaaaccggcugaaaga

SEQ ID NO: 1430005 - RNA, 19 nt, Artificial Sequence
  Description of Artificial Sequence: Synthetic oligonucleotide
  Antisense strand to SEQ ID NO: 1430004
ucuuucagccgguuuaaua

SEQ ID NO: 1430006 - RNA, 19 nt, Artificial Sequence
  Description of Artificial Sequence: Synthetic oligonucleotide
  Sense strand starting at position 3373 of SEQ ID NO: 1243630
ucauuuccguugcuuuaga

SEQ ID NO: 1430007 - RNA, 19 nt, Artificial Sequence
  Description of Artificial Sequence: Synthetic oligonucleotide
  Antisense strand to SEQ ID NO: 1430006
ucuaaagcaacggaaauga

SEQ ID NO: 1430008 - RNA, 19 nt, Artificial Sequence
  Description of Artificial Sequence: Synthetic oligonucleotide
  Sense strand starting at position 223 of SEQ ID NO: 1243631
cuacgagaugaagguuaca

SEQ ID NO: 1430009 - RNA, 19 nt, Artificial Sequence
  Description of Artificial Sequence: Synthetic oligonucleotide
  Antisense strand to SEQ ID NO: 1430008
uguaaccuucaucucguag

SEQ ID NO: 1430010 - RNA, 19 nt, Artificial Sequence
  Description of Artificial Sequence: Synthetic oligonucleotide
  Sense strand starting at position 277 of SEQ ID NO: 1243631
gggacacguuuauuauaaa

SEQ ID NO: 1430011 - RNA, 19 nt, Artificial Sequence
  Description of Artificial Sequence: Synthetic oligonucleotide
  Antisense strand to SEQ ID NO: 1430010
uuuauaauaaacguguccc

SEQ ID NO: 1430012 - RNA, 19 nt, Artificial Sequence
  Description of Artificial Sequence: Synthetic oligonucleotide
  Sense strand starting at position 278 of SEQ ID NO: 1243631
ggacacguuuauuauaaac

SEQ ID NO: 1430013 - RNA, 19 nt, Artificial Sequence
  Description of Artificial Sequence: Synthetic oligonucleotide
  Antisense strand to SEQ ID NO: 1430012
guuuauaauaaacgugucc

SEQ ID NO: 1430014 - RNA, 19 nt, Artificial Sequence
  Description of Artificial Sequence: Synthetic oligonucleotide
  Sense strand starting at position 342 of SEQ ID NO: 1243631
uuccuacucugugauuuag

SEQ ID NO: 1430015 - RNA, 19 nt, Artificial Sequence
  Description of Artificial Sequence: Synthetic oligonucleotide
  Antisense strand to SEQ ID NO: 1430014
cuaaaucacagaguaggaa

SEQ ID NO: 1430016 - RNA, 19 nt, Artificial Sequence
  Description of Artificial Sequence: Synthetic oligonucleotide
  Sense strand starting at position 344 of SEQ ID NO: 1243631
ccuacucugugauuuaguu

SEQ ID NO: 1430017 - RNA, 19 nt, Artificial Sequence
  Description of Artificial Sequence: Synthetic oligonucleotide
  Antisense strand to SEQ ID NO: 1430016
aacuaaaucacagaguagg

SEQ ID NO: 1430018 - RNA, 19 nt, Artificial Sequence
  Description of Artificial Sequence: Synthetic oligonucleotide
  Sense strand starting at position 566 of SEQ ID NO: 1243631
caaguaaguucgccaccau

SEQ ID NO: 1430019 - RNA, 19 nt, Artificial Sequence
  Description of Artificial Sequence: Synthetic oligonucleotide
  Antisense strand to SEQ ID NO: 1430018
augguggcgaacuuacuug

SEQ ID NO: 1430020 - RNA, 19 nt, Artificial Sequence
  Description of Artificial Sequence: Synthetic oligonucleotide
  Sense strand starting at position 567 of SEQ ID NO: 1243631
aaguaaguucgccaccauu

SEQ ID NO: 1430021 - RNA, 19 nt, Artificial Sequence
  Description of Artificial Sequence: Synthetic oligonucleotide
  Antisense strand to SEQ ID NO: 1430020
aaugguggcgaacuuacuu

SEQ ID NO: 1430022 - RNA, 19 nt, Artificial Sequence
  Description of Artificial Sequence: Synthetic oligonucleotide
  Sense strand starting at position 659 of SEQ ID NO: 1243631
ggccguuugccagacacga

SEQ ID NO: 1430023 - RNA, 19 nt, Artificial Sequence
  Description of Artificial Sequence: Synthetic oligonucleotide
  Antisense strand to SEQ ID NO: 1430022
ucgugucuggcaaacggcc

SEQ ID NO: 1430024 - RNA, 19 nt, Artificial Sequence
  Description of Artificial Sequence: Synthetic oligonucleotide
  Sense strand starting at position 704 of SEQ ID NO: 1243631
uauauaaucugaguccgua

SEQ ID NO: 1430025 - RNA, 19 nt, Artificial Sequence
  Description of Artificial Sequence: Synthetic oligonucleotide
  Antisense strand to SEQ ID NO: 1430024
uacggacucagauuauaua

SEQ ID NO: 1430026 - RNA, 19 nt, Artificial Sequence
  Description of Artificial Sequence: Synthetic oligonucleotide
  Sense strand starting at position 813 of SEQ ID NO: 1243631
ccauucugacggugcgaau

SEQ ID NO: 1430027 - RNA, 19 nt, Artificial Sequence
  Description of Artificial Sequence: Synthetic oligonucleotide
  Antisense strand to SEQ ID NO: 1430026
auucgcaccgucagaaugg

SEQ ID NO: 1430028 - RNA, 19 nt, Artificial Sequence
  Description of Artificial Sequence: Synthetic oligonucleotide
  Sense strand starting at position 2736 of SEQ ID NO: 1243631
cugggacccuguucguuau

SEQ ID NO: 1430029 - RNA, 19 nt, Artificial Sequence
  Description of Artificial Sequence: Synthetic oligonucleotide
  Antisense strand to SEQ ID NO: 1430028
auaacgaacagggucccag

SEQ ID NO: 1430030 - RNA, 19 nt, Artificial Sequence
  Description of Artificial Sequence: Synthetic oligonucleotide
  Sense strand starting at position 2739 of SEQ ID NO: 1243631
ggacccuguucguuauuga

SEQ ID NO: 1430031 - RNA, 19 nt, Artificial Sequence
  Description of Artificial Sequence: Synthetic oligonucleotide
  Antisense strand to SEQ ID NO: 1430030
ucaauaacgaacagggucc

SEQ ID NO: 1430032 - RNA, 19 nt, Artificial Sequence
  Description of Artificial Sequence: Synthetic oligonucleotide
  Sense strand starting at position 2740 of SEQ ID NO: 1243631
gacccuguucguuauugac

SEQ ID NO: 1430033 - RNA, 19 nt, Artificial Sequence
  Description of Artificial Sequence: Synthetic oligonucleotide
  Antisense strand to SEQ ID NO: 1430032
gucaauaacgaacaggguc

SEQ ID NO: 1430034 - RNA, 19 nt, Artificial Sequence
  Description of Artificial Sequence: Synthetic oligonucleotide
  Sense strand starting at position 2746 of SEQ ID NO: 1243631
guucguuauugaccuggca

SEQ ID NO: 1430035 - RNA, 19 nt, Artificial Sequence
  Description of Artificial Sequence: Synthetic oligonucleotide
  Antisense strand to SEQ ID NO: 1430034
ugccaggucaauaacgaac

SEQ ID NO: 1430036 - RNA, 19 nt, Artificial Sequence
  Description of Artificial Sequence: Synthetic oligonucleotide
  Sense strand starting at position 2748 of SEQ ID NO: 1243631
ucguuauugaccuggcaac

SEQ ID NO: 1430037 - RNA, 19 nt, Artificial Sequence
  Description of Artificial Sequence: Synthetic oligonucleotide
  Antisense strand to SEQ ID NO: 1430036
guugccaggucaauaacga

SEQ ID NO: 1430038 - RNA, 19 nt, Artificial Sequence
  Description of Artificial Sequence: Synthetic oligonucleotide
  Sense strand starting at position 2969 of SEQ ID NO: 1243631
acaccauuguucuagagca

SEQ ID NO: 1430039 - RNA, 19 nt, Artificial Sequence
  Description of Artificial Sequence: Synthetic oligonucleotide
  Antisense strand to SEQ ID NO: 1430038
ugcucuagaacaauggugu

SEQ ID NO: 1430040 - RNA, 19 nt, Artificial Sequence
  Description of Artificial Sequence: Synthetic oligonucleotide
  Sense strand starting at position 2971 of SEQ ID NO: 1243631
accauuguucuagagcacu

SEQ ID NO: 1430041 - RNA, 19 nt, Artificial Sequence
  Description of Artificial Sequence: Synthetic oligonucleotide
  Antisense strand to SEQ ID NO: 1430040
agugcucuagaacaauggu

SEQ ID NO: 1430042 - RNA, 19 nt, Artificial Sequence
  Description of Artificial Sequence: Synthetic oligonucleotide
  Sense strand starting at position 3012 of SEQ ID NO: 1243631
ccgaaagccuuugcugaca

SEQ ID NO: 1430043 - RNA, 19 nt, Artificial Sequence
  Description of Artificial Sequence: Synthetic oligonucleotide
  Antisense strand to SEQ ID NO: 1430042
ugucagcaaaggcuuucgg

SEQ ID NO: 1430044 - RNA, 19 nt, Artificial Sequence
  Description of Artificial Sequence: Synthetic oligonucleotide
  Sense strand starting at position 3014 of SEQ ID NO: 1243631
gaaagccuuugcugacagu

SEQ ID NO: 1430045 - RNA, 19 nt, Artificial Sequence
  Description of Artificial Sequence: Synthetic oligonucleotide
  Antisense strand to SEQ ID NO: 1430044
acugucagcaaaggcuuuc

SEQ ID NO: 1430046 - RNA, 19 nt, Artificial Sequence
  Description of Artificial Sequence: Synthetic oligonucleotide
  Sense strand starting at position 3117 of SEQ ID NO: 1243631
gugacugcuaaaggguaaa

SEQ ID NO: 1430047 - RNA, 19 nt, Artificial Sequence
  Description of Artificial Sequence: Synthetic oligonucleotide
  Antisense strand to SEQ ID NO: 1430046
uuuacccuuuagcagucac

SEQ ID NO: 1430048 - RNA, 19 nt, Artificial Sequence
  Description of Artificial Sequence: Synthetic oligonucleotide
  Sense strand starting at position 3176 of SEQ ID NO: 1243631
caauguggugaugguugua

SEQ ID NO: 1430049 - RNA, 19 nt, Artificial Sequence
  Description of Artificial Sequence: Synthetic oligonucleotide
  Antisense strand to SEQ ID NO: 1430048
uacaaccaucaccacauug

SEQ ID NO: 1430050 - RNA, 19 nt, Artificial Sequence
  Description of Artificial Sequence: Synthetic oligonucleotide
  Sense strand starting at position 3189 of SEQ ID NO: 1243631
guuguacgguucuguggau

SEQ ID NO: 1430051 - RNA, 19 nt, Artificial Sequence
  Description of Artificial Sequence: Synthetic oligonucleotide
  Antisense strand to SEQ ID NO: 1430050
auccacagaaccguacaac

SEQ ID NO: 1430052 - RNA, 19 nt, Artificial Sequence
  Description of Artificial Sequence: Synthetic oligonucleotide
  Sense strand starting at position 3190 of SEQ ID NO: 1243631
uuguacgguucuguggaua

SEQ ID NO: 1430053 - RNA, 19 nt, Artificial Sequence
  Description of Artificial Sequence: Synthetic oligonucleotide
  Antisense strand to SEQ ID NO: 1430052
uauccacagaaccguacaa

SEQ ID NO: 1430054 - RNA, 19 nt, Artificial Sequence
  Description of Artificial Sequence: Synthetic oligonucleotide
  Sense strand starting at position 3243 of SEQ ID NO: 1243631
caugcauuguguggcacau

SEQ ID NO: 1430055 - RNA, 19 nt, Artificial Sequence
  Description of Artificial Sequence: Synthetic oligonucleotide
  Antisense strand to SEQ ID NO: 1430054
augugccacacaaugcaug

SEQ ID NO: 1430056 - RNA, 19 nt, Artificial Sequence
  Description of Artificial Sequence: Synthetic oligonucleotide
  Sense strand starting at position 3245 of SEQ ID NO: 1243631
ugcauuguguggcacauaa

SEQ ID NO: 1430057 - RNA, 19 nt, Artificial Sequence
  Description of Artificial Sequence: Synthetic oligonucleotide
  Antisense strand to SEQ ID NO: 1430056
uuaugugccacacaaugca

SEQ ID NO: 1430058 - RNA, 19 nt, Artificial Sequence
  Description of Artificial Sequence: Synthetic oligonucleotide
  Sense strand starting at position 3247 of SEQ ID NO: 1243631
cauuguguggcacauaaau

SEQ ID NO: 1430059 - RNA, 19 nt, Artificial Sequence
  Description of Artificial Sequence: Synthetic oligonucleotide
  Antisense strand to SEQ ID NO: 1430058
auuuaugugccacacaaug

SEQ ID NO: 1430060 - RNA, 19 nt, Artificial Sequence
  Description of Artificial Sequence: Synthetic oligonucleotide
  Sense strand starting at position 3269 of SEQ ID NO: 1243631
aucucaauguagcuguaau

SEQ ID NO: 1430061 - RNA, 19 nt, Artificial Sequence
  Description of Artificial Sequence: Synthetic oligonucleotide
  Antisense strand to SEQ ID NO: 1430060
auuacagcuacauugagau

SEQ ID NO: 1430062 - RNA, 19 nt, Artificial Sequence
  Description of Artificial Sequence: Synthetic oligonucleotide
  Sense strand starting at position 3279 of SEQ ID NO: 1243631
agcuguaaugacgacaaca

SEQ ID NO: 1430063 - RNA, 19 nt, Artificial Sequence
  Description of Artificial Sequence: Synthetic oligonucleotide
  Antisense strand to SEQ ID NO: 1430062
uguugucgucauuacagcu

SEQ ID NO: 1430064 - RNA, 19 nt, Artificial Sequence
  Description of Artificial Sequence: Synthetic oligonucleotide
  Sense strand starting at position 3818 of SEQ ID NO: 1243631
ucacgugaguucuggaauc

SEQ ID NO: 1430065 - RNA, 19 nt, Artificial Sequence
  Description of Artificial Sequence: Synthetic oligonucleotide
  Antisense strand to SEQ ID NO: 1430064
gauuccagaacucacguga

SEQ ID NO: 1430066 - RNA, 19 nt, Artificial Sequence
  Description of Artificial Sequence: Synthetic oligonucleotide
  Sense strand starting at position 3820 of SEQ ID NO: 1243631
acgugaguucuggaaucac

SEQ ID NO: 1430067 - RNA, 19 nt, Artificial Sequence
  Description of Artificial Sequence: Synthetic oligonucleotide
  Antisense strand to SEQ ID NO: 1430066
gugauuccagaacucacgu

SEQ ID NO: 1430068 - RNA, 19 nt, Artificial Sequence
  Description of Artificial Sequence: Synthetic oligonucleotide
  Sense strand starting at position 560 of SEQ ID NO: 1243632
agaagcacuuuagcaaaua

SEQ ID NO: 1430069 - RNA, 19 nt, Artificial Sequence
  Description of Artificial Sequence: Synthetic oligonucleotide
  Antisense strand to SEQ ID NO: 1430068
uauuugcuaaagugcuucu

SEQ ID NO: 1430070 - RNA, 19 nt, Artificial Sequence
  Description of Artificial Sequence: Synthetic oligonucleotide
  Sense strand starting at position 680 of SEQ ID NO: 1243632
ugcuaucugccugacuaca

SEQ ID NO: 1430071 - RNA, 19 nt, Artificial Sequence
  Description of Artificial Sequence: Synthetic oligonucleotide
  Antisense strand to SEQ ID NO: 1430070
uguagucaggcagauagca

SEQ ID NO: 1430072 - RNA, 19 nt, Artificial Sequence
  Description of Artificial Sequence: Synthetic oligonucleotide
  Sense strand starting at position 821 of SEQ ID NO: 1243632
ugauuaacgacuugaagug

SEQ ID NO: 1430073 - RNA, 19 nt, Artificial Sequence
  Description of Artificial Sequence: Synthetic oligonucleotide
  Antisense strand to SEQ ID NO: 1430072
cacuucaagucguuaauca

SEQ ID NO: 1430074 - RNA, 19 nt, Artificial Sequence
  Description of Artificial Sequence: Synthetic oligonucleotide
  Sense strand starting at position 925 of SEQ ID NO: 1243632
ccguuacuggguuagagaa

SEQ ID NO: 1430075 - RNA, 19 nt, Artificial Sequence
  Description of Artificial Sequence: Synthetic oligonucleotide
  Antisense strand to SEQ ID NO: 1430074
uucucuaacccaguaacgg

SEQ ID NO: 1430076 - RNA, 19 nt, Artificial Sequence
  Description of Artificial Sequence: Synthetic oligonucleotide
  Sense strand starting at position 1008 of SEQ ID NO: 1243632
caaucaucagagcacgagu

SEQ ID NO: 1430077 - RNA, 19 nt, Artificial Sequence
  Description of Artificial Sequence: Synthetic oligonucleotide
  Antisense strand to SEQ ID NO: 1430076
acucgugcucugaugauug

SEQ ID NO: 1430078 - RNA, 19 nt, Artificial Sequence
  Description of Artificial Sequence: Synthetic oligonucleotide
  Sense strand starting at position 1077 of SEQ ID NO: 1243632
cgggaucuguaguuaagga

SEQ ID NO: 1430079 - RNA, 19 nt, Artificial Sequence
  Description of Artificial Sequence: Synthetic oligonucleotide
  Antisense strand to SEQ ID NO: 1430078
uccuuaacuacagaucccg

SEQ ID NO: 1430080 - RNA, 19 nt, Artificial Sequence
  Description of Artificial Sequence: Synthetic oligonucleotide
  Sense strand starting at position 1167 of SEQ ID NO: 1243632
gggagggagugguuaauau

SEQ ID NO: 1430081 - RNA, 19 nt, Artificial Sequence
  Description of Artificial Sequence: Synthetic oligonucleotide
  Antisense strand to SEQ ID NO: 1430080
auauuaaccacucccuccc

SEQ ID NO: 1430082 - RNA, 19 nt, Artificial Sequence
  Description of Artificial Sequence: Synthetic oligonucleotide
  Sense strand starting at position 1178 of SEQ ID NO: 1243632
guuaauauugcggauauua

SEQ ID NO: 1430083 - RNA, 19 nt, Artificial Sequence
  Description of Artificial Sequence: Synthetic oligonucleotide
  Antisense strand to SEQ ID NO: 1430082
uaauauccgcaauauuaac

SEQ ID NO: 1430084 - RNA, 19 nt, Artificial Sequence
  Description of Artificial Sequence: Synthetic oligonucleotide
  Sense strand starting at position 1180 of SEQ ID NO: 1243632
uaauauugcggauauuaag

SEQ ID NO: 1430085 - RNA, 19 nt, Artificial Sequence
  Description of Artificial Sequence: Synthetic oligonucleotide
  Antisense strand to SEQ ID NO: 1430084
cuuaauauccgcaauauua

SEQ ID NO: 1430086 - RNA, 19 nt, Artificial Sequence
  Description of Artificial Sequence: Synthetic oligonucleotide
  Sense strand starting at position 1344 of SEQ ID NO: 1243632
aagggaguccgugagagua

SEQ ID NO: 1430087 - RNA, 19 nt, Artificial Sequence
  Description of Artificial Sequence: Synthetic oligonucleotide
  Antisense strand to SEQ ID NO: 1430086
uacucucacggacucccuu

SEQ ID NO: 1430088 - RNA, 19 nt, Artificial Sequence
  Description of Artificial Sequence: Synthetic oligonucleotide
  Sense strand starting at position 1390 of SEQ ID NO: 1243632
uaaguuaacggaugggaua

SEQ ID NO: 1430089 - RNA, 19 nt, Artificial Sequence
  Description of Artificial Sequence: Synthetic oligonucleotide
  Antisense strand to SEQ ID NO: 1430088
uaucccauccguuaacuua

SEQ ID NO: 1430090 - RNA, 19 nt, Artificial Sequence
  Description of Artificial Sequence: Synthetic oligonucleotide
  Sense strand starting at position 1391 of SEQ ID NO: 1243632
aaguuaacggaugggauau

SEQ ID NO: 1430091 - RNA, 19 nt, Artificial Sequence
  Description of Artificial Sequence: Synthetic oligonucleotide
  Antisense strand to SEQ ID NO: 1430090
auaucccauccguuaacuu

SEQ ID NO: 1430092 - RNA, 19 nt, Artificial Sequence
  Description of Artificial Sequence: Synthetic oligonucleotide
  Sense strand starting at position 1412 of SEQ ID NO: 1243632
ugcugucuauauuucuuua

SEQ ID NO: 1430093 - RNA, 19 nt, Artificial Sequence
  Description of Artificial Sequence: Synthetic oligonucleotide
  Antisense strand to SEQ ID NO: 1430092
uaaagaaauauagacagca

SEQ ID NO: 1430094 - RNA, 19 nt, Artificial Sequence
  Description of Artificial Sequence: Synthetic oligonucleotide
  Sense strand starting at position 2688 of SEQ ID NO: 1243632
accuaaaguuuaccgugau

SEQ ID NO: 1430095 - RNA, 19 nt, Artificial Sequence
  Description of Artificial Sequence: Synthetic oligonucleotide
  Antisense strand to SEQ ID NO: 1430094
aucacgguaaacuuuaggu

SEQ ID NO: 1430096 - RNA, 19 nt, Artificial Sequence
  Description of Artificial Sequence: Synthetic oligonucleotide
  Sense strand starting at position 2691 of SEQ ID NO: 1243632
uaaaguuuaccgugauuga

SEQ ID NO: 1430097 - RNA, 19 nt, Artificial Sequence
  Description of Artificial Sequence: Synthetic oligonucleotide
  Antisense strand to SEQ ID NO: 1430096
ucaaucacgguaaacuuua

SEQ ID NO: 1430098 - RNA, 19 nt, Artificial Sequence
  Description of Artificial Sequence: Synthetic oligonucleotide
  Sense strand starting at position 2692 of SEQ ID NO: 1243632
aaaguuuaccgugauugag

SEQ ID NO: 1430099 - RNA, 19 nt, Artificial Sequence
  Description of Artificial Sequence: Synthetic oligonucleotide
  Antisense strand to SEQ ID NO: 1430098
cucaaucacgguaaacuuu

SEQ ID NO: 1430100 - RNA, 19 nt, Artificial Sequence
  Description of Artificial Sequence: Synthetic oligonucleotide
  Sense strand starting at position 2694 of SEQ ID NO: 1243632
aguuuaccgugauugagaa

SEQ ID NO: 1430101 - RNA, 19 nt, Artificial Sequence
  Description of Artificial Sequence: Synthetic oligonucleotide
  Antisense strand to SEQ ID NO: 1430100
uucucaaucacgguaaacu

SEQ ID NO: 1430102 - RNA, 19 nt, Artificial Sequence
  Description of Artificial Sequence: Synthetic oligonucleotide
  Sense strand starting at position 2749 of SEQ ID NO: 1243632
uccagaguuccauguauac

SEQ ID NO: 1430103 - RNA, 19 nt, Artificial Sequence
  Description of Artificial Sequence: Synthetic oligonucleotide
  Antisense strand to SEQ ID NO: 1430102
guauacauggaacucugga

SEQ ID NO: 1430104 - RNA, 19 nt, Artificial Sequence
  Description of Artificial Sequence: Synthetic oligonucleotide
  Sense strand starting at position 2756 of SEQ ID NO: 1243632
uuccauguauacguugaaa

SEQ ID NO: 1430105 - RNA, 19 nt, Artificial Sequence
  Description of Artificial Sequence: Synthetic oligonucleotide
  Antisense strand to SEQ ID NO: 1430104
uuucaacguauacauggaa

SEQ ID NO: 1430106 - RNA, 19 nt, Artificial Sequence
  Description of Artificial Sequence: Synthetic oligonucleotide
  Sense strand starting at position 2759 of SEQ ID NO: 1243632
cauguauacguugaaauug

SEQ ID NO: 1430107 - RNA, 19 nt, Artificial Sequence
  Description of Artificial Sequence: Synthetic oligonucleotide
  Antisense strand to SEQ ID NO: 1430106
caauuucaacguauacaug

SEQ ID NO: 1430108 - RNA, 19 nt, Artificial Sequence
  Description of Artificial Sequence: Synthetic oligonucleotide
  Sense strand starting at position 2787 of SEQ ID NO: 1243632
guggaacuuaguuaugugu

SEQ ID NO: 1430109 - RNA, 19 nt, Artificial Sequence
  Description of Artificial Sequence: Synthetic oligonucleotide
  Antisense strand to SEQ ID NO: 1430108
acacauaacuaaguuccac

SEQ ID NO: 1430110 - RNA, 19 nt, Artificial Sequence
  Description of Artificial Sequence: Synthetic oligonucleotide
  Sense strand starting at position 2790 of SEQ ID NO: 1243632
gaacuuaguuaugugugga

SEQ ID NO: 1430111 - RNA, 19 nt, Artificial Sequence
  Description of Artificial Sequence: Synthetic oligonucleotide
  Antisense strand to SEQ ID NO: 1430110
uccacacauaacuaaguuc

SEQ ID NO: 1430112 - RNA, 19 nt, Artificial Sequence
  Description of Artificial Sequence: Synthetic oligonucleotide
  Sense strand starting at position 2879 of SEQ ID NO: 1243632
ugguaagagaaguggguuu

SEQ ID NO: 1430113 - RNA, 19 nt, Artificial Sequence
  Description of Artificial Sequence: Synthetic oligonucleotide
  Antisense strand to SEQ ID NO: 1430112
aaacccacuucucuuacca

SEQ ID NO: 1430114 - RNA, 19 nt, Artificial Sequence
  Description of Artificial Sequence: Synthetic oligonucleotide
  Sense strand starting at position 2901 of SEQ ID NO: 1243632
gagcuacgggaagguuaau

SEQ ID NO: 1430115 - RNA, 19 nt, Artificial Sequence
  Description of Artificial Sequence: Synthetic oligonucleotide
  Antisense strand to SEQ ID NO: 1430114
auuaaccuucccguagcuc

SEQ ID NO: 1430116 - RNA, 19 nt, Artificial Sequence
  Description of Artificial Sequence: Synthetic oligonucleotide
  Sense strand starting at position 2918 of SEQ ID NO: 1243632
augaguuaggccuagucua

SEQ ID NO: 1430117 - RNA, 19 nt, Artificial Sequence
  Description of Artificial Sequence: Synthetic oligonucleotide
  Antisense strand to SEQ ID NO: 1430116
uagacuaggccuaacucau

SEQ ID NO: 1430118 - RNA, 19 nt, Artificial Sequence
  Description of Artificial Sequence: Synthetic oligonucleotide
  Sense strand starting at position 3053 of SEQ ID NO: 1243632
ggaagccagaguuaaguua

SEQ ID NO: 1430119 - RNA, 19 nt, Artificial Sequence
  Description of Artificial Sequence: Synthetic oligonucleotide
  Antisense strand to SEQ ID NO: 1430118
uaacuuaacucuggcuucc

SEQ ID NO: 1430120 - RNA, 19 nt, Artificial Sequence
  Description of Artificial Sequence: Synthetic oligonucleotide
  Sense strand starting at position 3075 of SEQ ID NO: 1243632
ucccaaauuucguuugguc

SEQ ID NO: 1430121 - RNA, 19 nt, Artificial Sequence
  Description of Artificial Sequence: Synthetic oligonucleotide
  Antisense strand to SEQ ID NO: 1430120
gaccaaacgaaauuuggga

SEQ ID NO: 1430122 - RNA, 19 nt, Artificial Sequence
  Description of Artificial Sequence: Synthetic oligonucleotide
  Sense strand starting at position 3077 of SEQ ID NO: 1243632
ccaaauuucguuuggucua

SEQ ID NO: 1430123 - RNA, 19 nt, Artificial Sequence
  Description of Artificial Sequence: Synthetic oligonucleotide
  Antisense strand to SEQ ID NO: 1430122
uagaccaaacgaaauuugg

SEQ ID NO: 1430124 - RNA, 19 nt, Artificial Sequence
  Description of Artificial Sequence: Synthetic oligonucleotide
  Sense strand starting at position 3079 of SEQ ID NO: 1243632
aaauuucguuuggucuauu

SEQ ID NO: 1430125 - RNA, 19 nt, Artificial Sequence
  Description of Artificial Sequence: Synthetic oligonucleotide
  Antisense strand to SEQ ID NO: 1430124
aauagaccaaacgaaauuu

SEQ ID NO: 1430126 - RNA, 19 nt, Artificial Sequence
  Description of Artificial Sequence: Synthetic oligonucleotide
  Sense strand starting at position 3082 of SEQ ID NO: 1243632
uuucguuuggucuauuuau

SEQ ID NO: 1430127 - RNA, 19 nt, Artificial Sequence
  Description of Artificial Sequence: Synthetic oligonucleotide
  Antisense strand to SEQ ID NO: 1430126
auaaauagaccaaacgaaa

SEQ ID NO: 1430128 - RNA, 19 nt, Artificial Sequence
  Description of Artificial Sequence: Synthetic oligonucleotide
  Sense strand starting at position 3088 of SEQ ID NO: 1243632
uuggucuauuuaucucagu

SEQ ID NO: 1430129 - RNA, 19 nt, Artificial Sequence
  Description of Artificial Sequence: Synthetic oligonucleotide
  Antisense strand to SEQ ID NO: 1430128
acugagauaaauagaccaa

SEQ ID NO: 1430130 - RNA, 19 nt, Artificial Sequence
  Description of Artificial Sequence: Synthetic oligonucleotide
  Sense strand starting at position 3578 of SEQ ID NO: 1243632
ggagaugaaugccuuugua

SEQ ID NO: 1430131 - RNA, 19 nt, Artificial Sequence
  Description of Artificial Sequence: Synthetic oligonucleotide
  Antisense strand to SEQ ID NO: 1430130
uacaaaggcauucaucucc

SEQ ID NO: 1430132 - RNA, 19 nt, Artificial Sequence
  Description of Artificial Sequence: Synthetic oligonucleotide
  Sense strand starting at position 3714 of SEQ ID NO: 1243632
aaguuuguaugguuaaaug

SEQ ID NO: 1430133 - RNA, 19 nt, Artificial Sequence
  Description of Artificial Sequence: Synthetic oligonucleotide
  Antisense strand to SEQ ID NO: 1430132
cauuuaaccauacaaacuu

SEQ ID NO: 1430134 - RNA, 19 nt, Artificial Sequence
  Description of Artificial Sequence: Synthetic oligonucleotide
  Sense strand starting at position 3732 of SEQ ID NO: 1243632
guuugcaucuuacuagaau

SEQ ID NO: 1430135 - RNA, 19 nt, Artificial Sequence
  Description of Artificial Sequence: Synthetic oligonucleotide
  Antisense strand to SEQ ID NO: 1430134
auucuaguaagaugcaaac

SEQ ID NO: 1430136 - RNA, 19 nt, Artificial Sequence
  Description of Artificial Sequence: Synthetic oligonucleotide
  Sense strand starting at position 3787 of SEQ ID NO: 1243632
ccuggaagucuuuagcaau

SEQ ID NO: 1430137 - RNA, 19 nt, Artificial Sequence
  Description of Artificial Sequence: Synthetic oligonucleotide
  Antisense strand to SEQ ID NO: 1430136
auugcuaaagacuuccagg

SEQ ID NO: 1430138 - RNA, 19 nt, Artificial Sequence
  Description of Artificial Sequence: Synthetic oligonucleotide
  Sense strand starting at position 3823 of SEQ ID NO: 1243632
gagcuuuacuggcuggaau

SEQ ID NO: 1430139 - RNA, 19 nt, Artificial Sequence
  Description of Artificial Sequence: Synthetic oligonucleotide
  Antisense strand to SEQ ID NO: 1430138
auuccagccaguaaagcuc

SEQ ID NO: 1430140 - RNA, 19 nt, Artificial Sequence
  Description of Artificial Sequence: Synthetic oligonucleotide
  Sense strand starting at position 3825 of SEQ ID NO: 1243632
gcuuuacuggcuggaauga

SEQ ID NO: 1430141 - RNA, 19 nt, Artificial Sequence
  Description of Artificial Sequence: Synthetic oligonucleotide
  Antisense strand to SEQ ID NO: 1430140
ucauuccagccaguaaagc

SEQ ID NO: 1430142 - RNA, 19 nt, Artificial Sequence
  Description of Artificial Sequence: Synthetic oligonucleotide
  Sense strand starting at position 3863 of SEQ ID NO: 1243632
ggcagagaguaaguagauu

SEQ ID NO: 1430143 - RNA, 19 nt, Artificial Sequence
  Description of Artificial Sequence: Synthetic oligonucleotide
  Antisense strand to SEQ ID NO: 1430142
aaucuacuuacucucugcc

SEQ ID NO: 1430144 - RNA, 19 nt, Artificial Sequence
  Description of Artificial Sequence: Synthetic oligonucleotide
  Sense strand starting at position 3888 of SEQ ID NO: 1243632
ugcucagcccuguauaaag

SEQ ID NO: 1430145 - RNA, 19 nt, Artificial Sequence
  Description of Artificial Sequence: Synthetic oligonucleotide
  Antisense strand to SEQ ID NO: 1430144
cuuuauacagggcugagca

SEQ ID NO: 1430146 - RNA, 19 nt, Artificial Sequence
  Description of Artificial Sequence: Synthetic oligonucleotide
  Sense strand starting at position 3905 of SEQ ID NO: 1243632
aggucuuccuggcuaugga

SEQ ID NO: 1430147 - RNA, 19 nt, Artificial Sequence
  Description of Artificial Sequence: Synthetic oligonucleotide
  Antisense strand to SEQ ID NO: 1430146
uccauagccaggaagaccu

SEQ ID NO: 1430148 - RNA, 19 nt, Artificial Sequence
  Description of Artificial Sequence: Synthetic oligonucleotide
  Sense strand starting at position 235 of SEQ ID NO: 1243633
guuacuuagucucugagau

SEQ ID NO: 1430149 - RNA, 19 nt, Artificial Sequence
  Description of Artificial Sequence: Synthetic oligonucleotide
  Antisense strand to SEQ ID NO: 1430148
aucucagagacuaaguaac

SEQ ID NO: 1430150 - RNA, 19 nt, Artificial Sequence
  Description of Artificial Sequence: Synthetic oligonucleotide
  Sense strand starting at position 236 of SEQ ID NO: 1243633
uuacuuagucucugagauu

SEQ ID NO: 1430151 - RNA, 19 nt, Artificial Sequence
  Description of Artificial Sequence: Synthetic oligonucleotide
  Antisense strand to SEQ ID NO: 1430150
aaucucagagacuaaguaa

SEQ ID NO: 1430152 - RNA, 19 nt, Artificial Sequence
  Description of Artificial Sequence: Synthetic oligonucleotide
  Sense strand starting at position 255 of SEQ ID NO: 1243633
caguuuccugacugguaga

SEQ ID NO: 1430153 - RNA, 19 nt, Artificial Sequence
  Description of Artificial Sequence: Synthetic oligonucleotide
  Antisense strand to SEQ ID NO: 1430152
ucuaccagucaggaaacug

SEQ ID NO: 1430154 - RNA, 19 nt, Artificial Sequence
  Description of Artificial Sequence: Synthetic oligonucleotide
  Sense strand starting at position 256 of SEQ ID NO: 1243633
aguuuccugacugguagaa

SEQ ID NO: 1430155 - RNA, 19 nt, Artificial Sequence
  Description of Artificial Sequence: Synthetic oligonucleotide
  Antisense strand to SEQ ID NO: 1430154
uucuaccagucaggaaacu

SEQ ID NO: 1430156 - RNA, 19 nt, Artificial Sequence
  Description of Artificial Sequence: Synthetic oligonucleotide
  Sense strand starting at position 260 of SEQ ID NO: 1243633
uccugacugguagaaggua

SEQ ID NO: 1430157 - RNA, 19 nt, Artificial Sequence
  Description of Artificial Sequence: Synthetic oligonucleotide
  Antisense strand to SEQ ID NO: 1430156
uaccuucuaccagucagga

SEQ ID NO: 1430158 - RNA, 19 nt, Artificial Sequence
  Description of Artificial Sequence: Synthetic oligonucleotide
  Sense strand starting at position 268 of SEQ ID NO: 1243633
gguagaagguaucuaucca

SEQ ID NO: 1430159 - RNA, 19 nt, Artificial Sequence
  Description of Artificial Sequence: Synthetic oligonucleotide
  Antisense strand to SEQ ID NO: 1430158
uggauagauaccuucuacc

SEQ ID NO: 1430160 - RNA, 19 nt, Artificial Sequence
  Description of Artificial Sequence: Synthetic oligonucleotide
  Sense strand starting at position 617 of SEQ ID NO: 1243633
uggcgugaacccuggaaga

SEQ ID NO: 1430161 - RNA, 19 nt, Artificial Sequence
  Description of Artificial Sequence: Synthetic oligonucleotide
  Antisense strand to SEQ ID NO: 1430160
ucuuccaggguucacgcca

SEQ ID NO: 1430162 - RNA, 19 nt, Artificial Sequence
  Description of Artificial Sequence: Synthetic oligonucleotide
  Sense strand starting at position 619 of SEQ ID NO: 1243633
gcgugaacccuggaagaag

SEQ ID NO: 1430163 - RNA, 19 nt, Artificial Sequence
  Description of Artificial Sequence: Synthetic oligonucleotide
  Antisense strand to SEQ ID NO: 1430162
cuucuuccaggguucacgc

SEQ ID NO: 1430164 - RNA, 19 nt, Artificial Sequence
  Description of Artificial Sequence: Synthetic oligonucleotide
  Sense strand starting at position 888 of SEQ ID NO: 1243633
gaaggcauguauccaaauc

SEQ ID NO: 1430165 - RNA, 19 nt, Artificial Sequence
  Description of Artificial Sequence: Synthetic oligonucleotide
  Antisense strand to SEQ ID NO: 1430164
gauuuggauacaugccuuc

SEQ ID NO: 1430166 - RNA, 19 nt, Artificial Sequence
  Description of Artificial Sequence: Synthetic oligonucleotide
  Sense strand starting at position 918 of SEQ ID NO: 1243633
agagauaaagcaugcgagu

SEQ ID NO: 1430167 - RNA, 19 nt, Artificial Sequence
  Description of Artificial Sequence: Synthetic oligonucleotide
  Antisense strand to SEQ ID NO: 1430166
acucgcaugcuuuaucucu

SEQ ID NO: 1430168 - RNA, 19 nt, Artificial Sequence
  Description of Artificial Sequence: Synthetic oligonucleotide
  Sense strand starting at position 920 of SEQ ID NO: 1243633
agauaaagcaugcgaguaa

SEQ ID NO: 1430169 - RNA, 19 nt, Artificial Sequence
  Description of Artificial Sequence: Synthetic oligonucleotide
  Antisense strand to SEQ ID NO: 1430168
uuacucgcaugcuuuaucu

SEQ ID NO: 1430170 - RNA, 19 nt, Artificial Sequence
  Description of Artificial Sequence: Synthetic oligonucleotide
  Sense strand starting at position 969 of SEQ ID NO: 1243633
ucuuccucccagugaagga

SEQ ID NO: 1430171 - RNA, 19 nt, Artificial Sequence
  Description of Artificial Sequence: Synthetic oligonucleotide
  Antisense strand to SEQ ID NO: 1430170
uccuucacugggaggaaga

SEQ ID NO: 1430172 - RNA, 19 nt, Artificial Sequence
  Description of Artificial Sequence: Synthetic oligonucleotide
  Sense strand starting at position 982 of SEQ ID NO: 1243633
gaaggagcucuuugucaga

SEQ ID NO: 1430173 - RNA, 19 nt, Artificial Sequence
  Description of Artificial Sequence: Synthetic oligonucleotide
  Antisense strand to SEQ ID NO: 1430172
ucugacaaagagcuccuuc

SEQ ID NO: 1430174 - RNA, 19 nt, Artificial Sequence
  Description of Artificial Sequence: Synthetic oligonucleotide
  Sense strand starting at position 995 of SEQ ID NO: 1243633
gucagagguccuuggaucu

SEQ ID NO: 1430175 - RNA, 19 nt, Artificial Sequence
  Description of Artificial Sequence: Synthetic oligonucleotide
  Antisense strand to SEQ ID NO: 1430174
agauccaaggaccucugac

SEQ ID NO: 1430176 - RNA, 19 nt, Artificial Sequence
  Description of Artificial Sequence: Synthetic oligonucleotide
  Sense strand starting at position 1001 of SEQ ID NO: 1243633
gguccuuggaucuguccaa

SEQ ID NO: 1430177 - RNA, 19 nt, Artificial Sequence
  Description of Artificial Sequence: Synthetic oligonucleotide
  Antisense strand to SEQ ID NO: 1430176
uuggacagauccaaggacc

SEQ ID NO: 1430178 - RNA, 19 nt, Artificial Sequence
  Description of Artificial Sequence: Synthetic oligonucleotide
  Sense strand starting at position 1002 of SEQ ID NO: 1243633
guccuuggaucuguccaau

SEQ ID NO: 1430179 - RNA, 19 nt, Artificial Sequence
  Description of Artificial Sequence: Synthetic oligonucleotide
  Antisense strand to SEQ ID NO: 1430178
auuggacagauccaaggac

SEQ ID NO: 1430180 - RNA, 19 nt, Artificial Sequence
  Description of Artificial Sequence: Synthetic oligonucleotide
  Sense strand starting at position 1015 of SEQ ID NO: 1243633
uccaaucuguaccuggaaa

SEQ ID NO: 1430181 - RNA, 19 nt, Artificial Sequence
  Description of Artificial Sequence: Synthetic oligonucleotide
  Antisense strand to SEQ ID NO: 1430180
uuuccagguacagauugga

SEQ ID NO: 1430182 - RNA, 19 nt, Artificial Sequence
  Description of Artificial Sequence: Synthetic oligonucleotide
  Sense strand starting at position 1034 of SEQ ID NO: 1243633
gguuauuaccuguaggauc

SEQ ID NO: 1430183 - RNA, 19 nt, Artificial Sequence
  Description of Artificial Sequence: Synthetic oligonucleotide
  Antisense strand to SEQ ID NO: 1430182
gauccuacagguaauaacc

SEQ ID NO: 1430184 - RNA, 19 nt, Artificial Sequence
  Description of Artificial Sequence: Synthetic oligonucleotide
  Sense strand starting at position 1091 of SEQ ID NO: 1243633
ccaucuuuguugcuauuau

SEQ ID NO: 1430185 - RNA, 19 nt, Artificial Sequence
  Description of Artificial Sequence: Synthetic oligonucleotide
  Antisense strand to SEQ ID NO: 1430184
auaauagcaacaaagaugg

SEQ ID NO: 1430186 - RNA, 19 nt, Artificial Sequence
  Description of Artificial Sequence: Synthetic oligonucleotide
  Sense strand starting at position 1102 of SEQ ID NO: 1243633
gcuauuauuuaugaucaug

SEQ ID NO: 1430187 - RNA, 19 nt, Artificial Sequence
  Description of Artificial Sequence: Synthetic oligonucleotide
  Antisense strand to SEQ ID NO: 1430186
caugaucauaaauaauagc

SEQ ID NO: 1430188 - RNA, 19 nt, Artificial Sequence
  Description of Artificial Sequence: Synthetic oligonucleotide
  Sense strand starting at position 1113 of SEQ ID NO: 1243633
ugaucaugauuauacaaug

SEQ ID NO: 1430189 - RNA, 19 nt, Artificial Sequence
  Description of Artificial Sequence: Synthetic oligonucleotide
  Antisense strand to SEQ ID NO: 1430188
cauuguauaaucaugauca

SEQ ID NO: 1430190 - RNA, 19 nt, Artificial Sequence
  Description of Artificial Sequence: Synthetic oligonucleotide
  Sense strand starting at position 1118 of SEQ ID NO: 1243633
augauuauacaauggguuu

SEQ ID NO: 1430191 - RNA, 19 nt, Artificial Sequence
  Description of Artificial Sequence: Synthetic oligonucleotide
  Antisense strand to SEQ ID NO: 1430190
aaacccauuguauaaucau

SEQ ID NO: 1430192 - RNA, 19 nt, Artificial Sequence
  Description of Artificial Sequence: Synthetic oligonucleotide
  Sense strand starting at position 1359 of SEQ ID NO: 1243633
agacuaagucuuggucuau

SEQ ID NO: 1430193 - RNA, 19 nt, Artificial Sequence
  Description of Artificial Sequence: Synthetic oligonucleotide
  Antisense strand to SEQ ID NO: 1430192
auagaccaagacuuagucu

SEQ ID NO: 1430194 - RNA, 19 nt, Artificial Sequence
  Description of Artificial Sequence: Synthetic oligonucleotide
  Sense strand starting at position 1360 of SEQ ID NO: 1243633
gacuaagucuuggucuauc

SEQ ID NO: 1430195 - RNA, 19 nt, Artificial Sequence
  Description of Artificial Sequence: Synthetic oligonucleotide
  Antisense strand to SEQ ID NO: 1430194
gauagaccaagacuuaguc

SEQ ID NO: 1430196 - RNA, 19 nt, Artificial Sequence
  Description of Artificial Sequence: Synthetic oligonucleotide
  Sense strand starting at position 1399 of SEQ ID NO: 1243633
guacaaauggcaugaucuc

SEQ ID NO: 1430197 - RNA, 19 nt, Artificial Sequence
  Description of Artificial Sequence: Synthetic oligonucleotide
  Antisense strand to SEQ ID NO: 1430196
gagaucaugccauuuguac

SEQ ID NO: 1430198 - RNA, 19 nt, Artificial Sequence
  Description of Artificial Sequence: Synthetic oligonucleotide
  Sense strand starting at position 1633 of SEQ ID NO: 1243633
agggucuacggauauuauu

SEQ ID NO: 1430199 - RNA, 19 nt, Artificial Sequence
  Description of Artificial Sequence: Synthetic oligonucleotide
  Antisense strand to SEQ ID NO: 1430198
aauaauauccguagacccu

SEQ ID NO: 1430200 - RNA, 19 nt, Artificial Sequence
  Description of Artificial Sequence: Synthetic oligonucleotide
  Sense strand starting at position 1641 of SEQ ID NO: 1243633
cggauauuauuagcauagu

SEQ ID NO: 1430201 - RNA, 19 nt, Artificial Sequence
  Description of Artificial Sequence: Synthetic oligonucleotide
  Antisense strand to SEQ ID NO: 1430200
acuaugcuaauaauauccg

SEQ ID NO: 1430202 - RNA, 19 nt, Artificial Sequence
  Description of Artificial Sequence: Synthetic oligonucleotide
  Sense strand starting at position 2284 of SEQ ID NO: 1243633
cuuggagaguacucggguu

SEQ ID NO: 1430203 - RNA, 19 nt, Artificial Sequence
  Description of Artificial Sequence: Synthetic oligonucleotide
  Antisense strand to SEQ ID NO: 1430202
aacccgaguacucuccaag

SEQ ID NO: 1430204 - RNA, 19 nt, Artificial Sequence
  Description of Artificial Sequence: Synthetic oligonucleotide
  Sense strand starting at position 2487 of SEQ ID NO: 1243633
ccuucucuccuaggugauu

SEQ ID NO: 1430205 - RNA, 19 nt, Artificial Sequence
  Description of Artificial Sequence: Synthetic oligonucleotide
  Antisense strand to SEQ ID NO: 1430204
aaucaccuaggagagaagg

SEQ ID NO: 1430206 - RNA, 19 nt, Artificial Sequence
  Description of Artificial Sequence: Synthetic oligonucleotide
  Sense strand starting at position 2695 of SEQ ID NO: 1243633
gggugcuccucccuugaau

SEQ ID NO: 1430207 - RNA, 19 nt, Artificial Sequence
  Description of Artificial Sequence: Synthetic oligonucleotide
  Antisense strand to SEQ ID NO: 1430206
auucaagggaggagcaccc

SEQ ID NO: 1430208 - RNA, 19 nt, Artificial Sequence
  Description of Artificial Sequence: Synthetic oligonucleotide
  Sense strand starting at position 2826 of SEQ ID NO: 1243633
cccaccaaguccucugaga

SEQ ID NO: 1430209 - RNA, 19 nt, Artificial Sequence
  Description of Artificial Sequence: Synthetic oligonucleotide
  Antisense strand to SEQ ID NO: 1430208
ucucagaggacuugguggg

SEQ ID NO: 1430210 - RNA, 19 nt, Artificial Sequence
  Description of Artificial Sequence: Synthetic oligonucleotide
  Sense strand starting at position 2828 of SEQ ID NO: 1243633
caccaaguccucugagaag

SEQ ID NO: 1430211 - RNA, 19 nt, Artificial Sequence
  Description of Artificial Sequence: Synthetic oligonucleotide
  Antisense strand to SEQ ID NO: 1430210
cuucucagaggacuuggug

SEQ ID NO: 1430212 - RNA, 19 nt, Artificial Sequence
  Description of Artificial Sequence: Synthetic oligonucleotide
  Sense strand starting at position 2977 of SEQ ID NO: 1243633
gcucuccugaggugauaga

SEQ ID NO: 1430213 - RNA, 19 nt, Artificial Sequence
  Description of Artificial Sequence: Synthetic oligonucleotide
  Antisense strand to SEQ ID NO: 1430212
ucuaucaccucaggagagc

SEQ ID NO: 1430214 - RNA, 19 nt, Artificial Sequence
  Description of Artificial Sequence: Synthetic oligonucleotide
  Sense strand starting at position 3023 of SEQ ID NO: 1243633
ugaguuucuugaguaaacu

SEQ ID NO: 1430215 - RNA, 19 nt, Artificial Sequence
  Description of Artificial Sequence: Synthetic oligonucleotide
  Antisense strand to SEQ ID NO: 1430214
aguuuacucaagaaacuca

SEQ ID NO: 1430216 - RNA, 19 nt, Artificial Sequence
  Description of Artificial Sequence: Synthetic oligonucleotide
  Sense strand starting at position 3024 of SEQ ID NO: 1243633
gaguuucuugaguaaacua

SEQ ID NO: 1430217 - RNA, 19 nt, Artificial Sequence
  Description of Artificial Sequence: Synthetic oligonucleotide
  Antisense strand to SEQ ID NO: 1430216
uaguuuacucaagaaacuc

SEQ ID NO: 1430218 - RNA, 19 nt, Artificial Sequence
  Description of Artificial Sequence: Synthetic oligonucleotide
  Sense strand starting at position 3072 of SEQ ID NO: 1243633
uguucuucuagagguagga

SEQ ID NO: 1430219 - RNA, 19 nt, Artificial Sequence
  Description of Artificial Sequence: Synthetic oligonucleotide
  Antisense strand to SEQ ID NO: 1430218
uccuaccucuagaagaaca

SEQ ID NO: 1430220 - RNA, 19 nt, Artificial Sequence
  Description of Artificial Sequence: Synthetic oligonucleotide
  Sense strand starting at position 3393 of SEQ ID NO: 1243633
gaagauguggcucagaguu

SEQ ID NO: 1430221 - RNA, 19 nt, Artificial Sequence
  Description of Artificial Sequence: Synthetic oligonucleotide
  Antisense strand to SEQ ID NO: 1430220
aacucugagccacaucuuc

SEQ ID NO: 1430222 - RNA, 19 nt, Artificial Sequence
  Description of Artificial Sequence: Synthetic oligonucleotide
  Sense strand starting at position 3543 of SEQ ID NO: 1243633
cguugaucacuugagguua

SEQ ID NO: 1430223 - RNA, 19 nt, Artificial Sequence
  Description of Artificial Sequence: Synthetic oligonucleotide
  Antisense strand to SEQ ID NO: 1430222
uaaccucaagugaucaacg

SEQ ID NO: 1430224 - RNA, 19 nt, Artificial Sequence
  Description of Artificial Sequence: Synthetic oligonucleotide
  Sense strand starting at position 3845 of SEQ ID NO: 1243633
gcagguucccucuacaugu

SEQ ID NO: 1430225 - RNA, 19 nt, Artificial Sequence
  Description of Artificial Sequence: Synthetic oligonucleotide
  Antisense strand to SEQ ID NO: 1430224
acauguagagggaaccugc

SEQ ID NO: 1430226 - RNA, 19 nt, Artificial Sequence
  Description of Artificial Sequence: Synthetic oligonucleotide
  Sense strand starting at position 3980 of SEQ ID NO: 1243633
acccucuuuguagggauau

SEQ ID NO: 1430227 - RNA, 19 nt, Artificial Sequence
  Description of Artificial Sequence: Synthetic oligonucleotide
  Antisense strand to SEQ ID NO: 1430226
auaucccuacaaagagggu

SEQ ID NO: 1430228 - RNA, 19 nt, Artificial Sequence
  Description of Artificial Sequence: Synthetic oligonucleotide
  Sense strand starting at position 109 of SEQ ID NO: 1243634
aggacuuagccgggcaaga

SEQ ID NO: 1430229 - RNA, 19 nt, Artificial Sequence
  Description of Artificial Sequence: Synthetic oligonucleotide
  Antisense strand to SEQ ID NO: 1430228
ucuugcccggcuaaguccu

SEQ ID NO: 1430230 - RNA, 19 nt, Artificial Sequence
  Description of Artificial Sequence: Synthetic oligonucleotide
  Sense strand starting at position 339 of SEQ ID NO: 1243634
ccauaauuacgcuacugca

SEQ ID NO: 1430231 - RNA, 19 nt, Artificial Sequence
  Description of Artificial Sequence: Synthetic oligonucleotide
  Antisense strand to SEQ ID NO: 1430230
ugcaguagcguaauuaugg

SEQ ID NO: 1430232 - RNA, 19 nt, Artificial Sequence
  Description of Artificial Sequence: Synthetic oligonucleotide
  Sense strand starting at position 483 of SEQ ID NO: 1243634
cucacuccugcuggucaua

SEQ ID NO: 1430233 - RNA, 19 nt, Artificial Sequence
  Description of Artificial Sequence: Synthetic oligonucleotide
  Antisense strand to SEQ ID NO: 1430232
uaugaccagcaggagugag

SEQ ID NO: 1430234 - RNA, 19 nt, Artificial Sequence
  Description of Artificial Sequence: Synthetic oligonucleotide
  Sense strand starting at position 584 of SEQ ID NO: 1243634
ggaauaaguuugcaggacu

SEQ ID NO: 1430235 - RNA, 19 nt, Artificial Sequence
  Description of Artificial Sequence: Synthetic oligonucleotide
  Antisense strand to SEQ ID NO: 1430234
aguccugcaaacuuauucc

SEQ ID NO: 1430236 - RNA, 19 nt, Artificial Sequence
  Description of Artificial Sequence: Synthetic oligonucleotide
  Sense strand starting at position 608 of SEQ ID NO: 1243634
ugcaaagcuucgcuugagu

SEQ ID NO: 1430237 - RNA, 19 nt, Artificial Sequence
  Description of Artificial Sequence: Synthetic oligonucleotide
  Antisense strand to SEQ ID NO: 1430236
acucaagcgaagcuuugca

SEQ ID NO: 1430238 - RNA, 19 nt, Artificial Sequence
  Description of Artificial Sequence: Synthetic oligonucleotide
  Sense strand starting at position 679 of SEQ ID NO: 1243634
aaagacuagucccaggaga

SEQ ID NO: 1430239 - RNA, 19 nt, Artificial Sequence
  Description of Artificial Sequence: Synthetic oligonucleotide
  Antisense strand to SEQ ID NO: 1430238
ucuccugggacuagucuuu

SEQ ID NO: 1430240 - RNA, 19 nt, Artificial Sequence
  Description of Artificial Sequence: Synthetic oligonucleotide
  Sense strand starting at position 782 of SEQ ID NO: 1243634
agaccucgagcuugaacau

SEQ ID NO: 1430241 - RNA, 19 nt, Artificial Sequence
  Description of Artificial Sequence: Synthetic oligonucleotide
  Antisense strand to SEQ ID NO: 1430240
auguucaagcucgaggucu

SEQ ID NO: 1430242 - RNA, 19 nt, Artificial Sequence
  Description of Artificial Sequence: Synthetic oligonucleotide
  Sense strand starting at position 791 of SEQ ID NO: 1243634
gcuugaacauguuuccgau

SEQ ID NO: 1430243 - RNA, 19 nt, Artificial Sequence
  Description of Artificial Sequence: Synthetic oligonucleotide
  Antisense strand to SEQ ID NO: 1430242
aucggaaacauguucaagc

SEQ ID NO: 1430244 - RNA, 19 nt, Artificial Sequence
  Description of Artificial Sequence: Synthetic oligonucleotide
  Sense strand starting at position 795 of SEQ ID NO: 1243634
gaacauguuuccgaugaug

SEQ ID NO: 1430245 - RNA, 19 nt, Artificial Sequence
  Description of Artificial Sequence: Synthetic oligonucleotide
  Antisense strand to SEQ ID NO: 1430244
caucaucggaaacauguuc

SEQ ID NO: 1430246 - RNA, 19 nt, Artificial Sequence
  Description of Artificial Sequence: Synthetic oligonucleotide
  Sense strand starting at position 797 of SEQ ID NO: 1243634
acauguuuccgaugaugau

SEQ ID NO: 1430247 - RNA, 19 nt, Artificial Sequence
  Description of Artificial Sequence: Synthetic oligonucleotide
  Antisense strand to SEQ ID NO: 1430246
aucaucaucggaaacaugu

SEQ ID NO: 1430248 - RNA, 19 nt, Artificial Sequence
  Description of Artificial Sequence: Synthetic oligonucleotide
  Sense strand starting at position 798 of SEQ ID NO: 1243634
cauguuuccgaugaugaug

SEQ ID NO: 1430249 - RNA, 19 nt, Artificial Sequence
  Description of Artificial Sequence: Synthetic oligonucleotide
  Antisense strand to SEQ ID NO: 1430248
caucaucaucggaaacaug

SEQ ID NO: 1430250 - RNA, 19 nt, Artificial Sequence
  Description of Artificial Sequence: Synthetic oligonucleotide
  Sense strand starting at position 835 of SEQ ID NO: 1243634
ugccgacugucgucaauga

SEQ ID NO: 1430251 - RNA, 19 nt, Artificial Sequence
  Description of Artificial Sequence: Synthetic oligonucleotide
  Antisense strand to SEQ ID NO: 1430250
ucauugacgacagucggca

SEQ ID NO: 1430252 - RNA, 19 nt, Artificial Sequence
  Description of Artificial Sequence: Synthetic oligonucleotide
  Sense strand starting at position 839 of SEQ ID NO: 1243634
gacugucgucaaugacugu

SEQ ID NO: 1430253 - RNA, 19 nt, Artificial Sequence
  Description of Artificial Sequence: Synthetic oligonucleotide
  Antisense strand to SEQ ID NO: 1430252
acagucauugacgacaguc

SEQ ID NO: 1430254 - RNA, 19 nt, Artificial Sequence
  Description of Artificial Sequence: Synthetic oligonucleotide
  Sense strand starting at position 872 of SEQ ID NO: 1243634
auuucauggugcggaaaug

SEQ ID NO: 1430255 - RNA, 19 nt, Artificial Sequence
  Description of Artificial Sequence: Synthetic oligonucleotide
  Antisense strand to SEQ ID NO: 1430254
cauuuccgcaccaugaaau

SEQ ID NO: 1430256 - RNA, 19 nt, Artificial Sequence
  Description of Artificial Sequence: Synthetic oligonucleotide
  Sense strand starting at position 873 of SEQ ID NO: 1243634
uuucauggugcggaaauga

SEQ ID NO: 1430257 - RNA, 19 nt, Artificial Sequence
  Description of Artificial Sequence: Synthetic oligonucleotide
  Antisense strand to SEQ ID NO: 1430256
ucauuuccgcaccaugaaa

SEQ ID NO: 1430258 - RNA, 19 nt, Artificial Sequence
  Description of Artificial Sequence: Synthetic oligonucleotide
  Sense strand starting at position 1140 of SEQ ID NO: 1243634
ucaaguaagcccgaguucu

SEQ ID NO: 1430259 - RNA, 19 nt, Artificial Sequence
  Description of Artificial Sequence: Synthetic oligonucleotide
  Antisense strand to SEQ ID NO: 1430258
agaacucgggcuuacuuga

SEQ ID NO: 1430260 - RNA, 19 nt, Artificial Sequence
  Description of Artificial Sequence: Synthetic oligonucleotide
  Sense strand starting at position 1286 of SEQ ID NO: 1243634
aguaucugaacugggauua

SEQ ID NO: 1430261 - RNA, 19 nt, Artificial Sequence
  Description of Artificial Sequence: Synthetic oligonucleotide
  Antisense strand to SEQ ID NO: 1430260
uaaucccaguucagauacu

SEQ ID NO: 1430262 - RNA, 19 nt, Artificial Sequence
  Description of Artificial Sequence: Synthetic oligonucleotide
  Sense strand starting at position 1462 of SEQ ID NO: 1243634
gcccgaauucuguagccac

SEQ ID NO: 1430263 - RNA, 19 nt, Artificial Sequence
  Description of Artificial Sequence: Synthetic oligonucleotide
  Antisense strand to SEQ ID NO: 1430262
guggcuacagaauucgggc

SEQ ID NO: 1430264 - RNA, 19 nt, Artificial Sequence
  Description of Artificial Sequence: Synthetic oligonucleotide
  Sense strand starting at position 1465 of SEQ ID NO: 1243634
cgaauucuguagccacaga

SEQ ID NO: 1430265 - RNA, 19 nt, Artificial Sequence
  Description of Artificial Sequence: Synthetic oligonucleotide
  Antisense strand to SEQ ID NO: 1430264
ucuguggcuacagaauucg

SEQ ID NO: 1430266 - RNA, 19 nt, Artificial Sequence
  Description of Artificial Sequence: Synthetic oligonucleotide
  Sense strand starting at position 1616 of SEQ ID NO: 1243634
aaaguugaaucugcaaagu

SEQ ID NO: 1430267 - RNA, 19 nt, Artificial Sequence
  Description of Artificial Sequence: Synthetic oligonucleotide
  Antisense strand to SEQ ID NO: 1430266
acuuugcagauucaacuuu

SEQ ID NO: 1430268 - RNA, 19 nt, Artificial Sequence
  Description of Artificial Sequence: Synthetic oligonucleotide
  Sense strand starting at position 1719 of SEQ ID NO: 1243634
gcugaaagcuguuuacagu

SEQ ID NO: 1430269 - RNA, 19 nt, Artificial Sequence
  Description of Artificial Sequence: Synthetic oligonucleotide
  Antisense strand to SEQ ID NO: 1430268
acuguaaacagcuuucagc

SEQ ID NO: 1430270 - RNA, 19 nt, Artificial Sequence
  Description of Artificial Sequence: Synthetic oligonucleotide
  Sense strand starting at position 1977 of SEQ ID NO: 1243634
cugagacucugggauuuac

SEQ ID NO: 1430271 - RNA, 19 nt, Artificial Sequence
  Description of Artificial Sequence: Synthetic oligonucleotide
  Antisense strand to SEQ ID NO: 1430270
guaaaucccagagucucag

SEQ ID NO: 1430272 - RNA, 19 nt, Artificial Sequence
  Description of Artificial Sequence: Synthetic oligonucleotide
  Sense strand starting at position 2201 of SEQ ID NO: 1243634
guccgcugagcuuucuuaa

SEQ ID NO: 1430273 - RNA, 19 nt, Artificial Sequence
  Description of Artificial Sequence: Synthetic oligonucleotide
  Antisense strand to SEQ ID NO: 1430272
uuaagaaagcucagcggac

SEQ ID NO: 1430274 - RNA, 19 nt, Artificial Sequence
  Description of Artificial Sequence: Synthetic oligonucleotide
  Sense strand starting at position 2204 of SEQ ID NO: 1243634
cgcugagcuuucuuaaaga

SEQ ID NO: 1430275 - RNA, 19 nt, Artificial Sequence
  Description of Artificial Sequence: Synthetic oligonucleotide
  Antisense strand to SEQ ID NO: 1430274
ucuuuaagaaagcucagcg

SEQ ID NO: 1430276 - RNA, 19 nt, Artificial Sequence
  Description of Artificial Sequence: Synthetic oligonucleotide
  Sense strand starting at position 2698 of SEQ ID NO: 1243634
acagguuucuggcuuggga

SEQ ID NO: 1430277 - RNA, 19 nt, Artificial Sequence
  Description of Artificial Sequence: Synthetic oligonucleotide
  Antisense strand to SEQ ID NO: 1430276
ucccaagccagaaaccugu

SEQ ID NO: 1430278 - RNA, 19 nt, Artificial Sequence
  Description of Artificial Sequence: Synthetic oligonucleotide
  Sense strand starting at position 2700 of SEQ ID NO: 1243634
agguuucuggcuugggaga

SEQ ID NO: 1430279 - RNA, 19 nt, Artificial Sequence
  Description of Artificial Sequence: Synthetic oligonucleotide
  Antisense strand to SEQ ID NO: 1430278
ucucccaagccagaaaccu

SEQ ID NO: 1430280 - RNA, 19 nt, Artificial Sequence
  Description of Artificial Sequence: Synthetic oligonucleotide
  Sense strand starting at position 2744 of SEQ ID NO: 1243634
ggguggguuuggguaaagu

SEQ ID NO: 1430281 - RNA, 19 nt, Artificial Sequence
  Description of Artificial Sequence: Synthetic oligonucleotide
  Antisense strand to SEQ ID NO: 1430280
acuuuacccaaacccaccc

SEQ ID NO: 1430282 - RNA, 19 nt, Artificial Sequence
  Description of Artificial Sequence: Synthetic oligonucleotide
  Sense strand starting at position 2745 of SEQ ID NO: 1243634
gguggguuuggguaaaguu

SEQ ID NO: 1430283 - RNA, 19 nt, Artificial Sequence
  Description of Artificial Sequence: Synthetic oligonucleotide
  Antisense strand to SEQ ID NO: 1430282
aacuuuacccaaacccacc

SEQ ID NO: 1430284 - RNA, 19 nt, Artificial Sequence
  Description of Artificial Sequence: Synthetic oligonucleotide
  Sense strand starting at position 2896 of SEQ ID NO: 1243634
gaguuuauugagggcauca

SEQ ID NO: 1430285 - RNA, 19 nt, Artificial Sequence
  Description of Artificial Sequence: Synthetic oligonucleotide
  Antisense strand to SEQ ID NO: 1430284
ugaugcccucaauaaacuc

SEQ ID NO: 1430286 - RNA, 19 nt, Artificial Sequence
  Description of Artificial Sequence: Synthetic oligonucleotide
  Sense strand starting at position 2944 of SEQ ID NO: 1243634
augcgaagaccugguguuu

SEQ ID NO: 1430287 - RNA, 19 nt, Artificial Sequence
  Description of Artificial Sequence: Synthetic oligonucleotide
  Antisense strand to SEQ ID NO: 1430286
aaacaccaggucuucgcau

SEQ ID NO: 1430288 - RNA, 19 nt, Artificial Sequence
  Description of Artificial Sequence: Synthetic oligonucleotide
  Sense strand starting at position 3016 of SEQ ID NO: 1243634
uggacucagcuccacgaaa

SEQ ID NO: 1430289 - RNA, 19 nt, Artificial Sequence
  Description of Artificial Sequence: Synthetic oligonucleotide
  Antisense strand to SEQ ID NO: 1430288
uuucguggagcugagucca

SEQ ID NO: 1430290 - RNA, 19 nt, Artificial Sequence
  Description of Artificial Sequence: Synthetic oligonucleotide
  Sense strand starting at position 3168 of SEQ ID NO: 1243634
uuuaguagucuguacuaaa

SEQ ID NO: 1430291 - RNA, 19 nt, Artificial Sequence
  Description of Artificial Sequence: Synthetic oligonucleotide
  Antisense strand to SEQ ID NO: 1430290
uuuaguacagacuacuaaa

SEQ ID NO: 1430292 - RNA, 19 nt, Artificial Sequence
  Description of Artificial Sequence: Synthetic oligonucleotide
  Sense strand starting at position 3440 of SEQ ID NO: 1243634
caccucagaucaggaguua

SEQ ID NO: 1430293 - RNA, 19 nt, Artificial Sequence
  Description of Artificial Sequence: Synthetic oligonucleotide
  Antisense strand to SEQ ID NO: 1430292
uaacuccugaucugaggug

SEQ ID NO: 1430294 - RNA, 19 nt, Artificial Sequence
  Description of Artificial Sequence: Synthetic oligonucleotide
  Sense strand starting at position 3646 of SEQ ID NO: 1243634
gugagacugugucagaaga

SEQ ID NO: 1430295 - RNA, 19 nt, Artificial Sequence
  Description of Artificial Sequence: Synthetic oligonucleotide
  Antisense strand to SEQ ID NO: 1430294
ucuucugacacagucucac

SEQ ID NO: 1430296 - RNA, 19 nt, Artificial Sequence
  Description of Artificial Sequence: Synthetic oligonucleotide
  Sense strand starting at position 3648 of SEQ ID NO: 1243634
gagacugugucagaagaag

SEQ ID NO: 1430297 - RNA, 19 nt, Artificial Sequence
  Description of Artificial Sequence: Synthetic oligonucleotide
  Antisense strand to SEQ ID NO: 1430296
cuucuucugacacagucuc

SEQ ID NO: 1430298 - RNA, 19 nt, Artificial Sequence
  Description of Artificial Sequence: Synthetic oligonucleotide
  Sense strand starting at position 3787 of SEQ ID NO: 1243634
ggcugauccuuuccuauuu

SEQ ID NO: 1430299 - RNA, 19 nt, Artificial Sequence
  Description of Artificial Sequence: Synthetic oligonucleotide
  Antisense strand to SEQ ID NO: 1430298
aaauaggaaaggaucagcc

SEQ ID NO: 1430300 - RNA, 19 nt, Artificial Sequence
  Description of Artificial Sequence: Synthetic oligonucleotide
  Sense strand starting at position 3931 of SEQ ID NO: 1243634
ccugaaauccggcacucau

SEQ ID NO: 1430301 - RNA, 19 nt, Artificial Sequence
  Description of Artificial Sequence: Synthetic oligonucleotide
  Antisense strand to SEQ ID NO: 1430300
augagugccggauuucagg

SEQ ID NO: 1430302 - RNA, 19 nt, Artificial Sequence
  Description of Artificial Sequence: Synthetic oligonucleotide
  Sense strand starting at position 3956 of SEQ ID NO: 1243634
cuugcuucccgugaggagu

SEQ ID NO: 1430303 - RNA, 19 nt, Artificial Sequence
  Description of Artificial Sequence: Synthetic oligonucleotide
  Antisense strand to SEQ ID NO: 1430302
acuccucacgggaagcaag

SEQ ID NO: 1430304 - RNA, 19 nt, Artificial Sequence
  Description of Artificial Sequence: Synthetic oligonucleotide
  Sense strand starting at position 3967 of SEQ ID NO: 1243634
ugaggagucauuggcauag

SEQ ID NO: 1430305 - RNA, 19 nt, Artificial Sequence
  Description of Artificial Sequence: Synthetic oligonucleotide
  Antisense strand to SEQ ID NO: 1430304
cuaugccaaugacuccuca

SEQ ID NO: 1430306 - RNA, 19 nt, Artificial Sequence
  Description of Artificial Sequence: Synthetic oligonucleotide
  Sense strand starting at position 3969 of SEQ ID NO: 1243634
aggagucauuggcauagag

SEQ ID NO: 1430307 - RNA, 19 nt, Artificial Sequence
  Description of Artificial Sequence: Synthetic oligonucleotide
  Antisense strand to SEQ ID NO: 1430306
cucuaugccaaugacuccu

SEQ ID NO: 1430308 - RNA, 19 nt, Artificial Sequence
  Description of Artificial Sequence: Synthetic oligonucleotide
  Sense strand starting at position 31 of SEQ ID NO: 1243635
gaagcuaacuuauaggagu

SEQ ID NO: 1430309 - RNA, 19 nt, Artificial Sequence
  Description of Artificial Sequence: Synthetic oligonucleotide
  Antisense strand to SEQ ID NO: 1430308
acuccuauaaguuagcuuc

SEQ ID NO: 1430310 - RNA, 19 nt, Artificial Sequence
  Description of Artificial Sequence: Synthetic oligonucleotide
  Sense strand starting at position 34 of SEQ ID NO: 1243635
gcuaacuuauaggaguaau

SEQ ID NO: 1430311 - RNA, 19 nt, Artificial Sequence
  Description of Artificial Sequence: Synthetic oligonucleotide
  Antisense strand to SEQ ID NO: 1430310
auuacuccuauaaguuagc

SEQ ID NO: 1430312 - RNA, 19 nt, Artificial Sequence
  Description of Artificial Sequence: Synthetic oligonucleotide
  Sense strand starting at position 54 of SEQ ID NO: 1243635
uacggagugccauaaauag

SEQ ID NO: 1430313 - RNA, 19 nt, Artificial Sequence
  Description of Artificial Sequence: Synthetic oligonucleotide
  Antisense strand to SEQ ID NO: 1430312
cuauuuauggcacuccgua

SEQ ID NO: 1430314 - RNA, 19 nt, Artificial Sequence
  Description of Artificial Sequence: Synthetic oligonucleotide
  Sense strand starting at position 176 of SEQ ID NO: 1243635
aggacuuagccgggcaaga

SEQ ID NO: 1430315 - RNA, 19 nt, Artificial Sequence
  Description of Artificial Sequence: Synthetic oligonucleotide
  Antisense strand to SEQ ID NO: 1430314
ucuugcccggcuaaguccu

SEQ ID NO: 1430316 - RNA, 19 nt, Artificial Sequence
  Description of Artificial Sequence: Synthetic oligonucleotide
  Sense strand starting at position 406 of SEQ ID NO: 1243635
ccauaauuacgcuacugca

SEQ ID NO: 1430317 - RNA, 19 nt, Artificial Sequence
  Description of Artificial Sequence: Synthetic oligonucleotide
  Antisense strand to SEQ ID NO: 1430316
ugcaguagcguaauuaugg

SEQ ID NO: 1430318 - RNA, 19 nt, Artificial Sequence
  Description of Artificial Sequence: Synthetic oligonucleotide
  Sense strand starting at position 550 of SEQ ID NO: 1243635
cucacuccugcuggucaua

SEQ ID NO: 1430319 - RNA, 19 nt, Artificial Sequence
  Description of Artificial Sequence: Synthetic oligonucleotide
  Antisense strand to SEQ ID NO: 1430318
uaugaccagcaggagugag

SEQ ID NO: 1430320 - RNA, 19 nt, Artificial Sequence
  Description of Artificial Sequence: Synthetic oligonucleotide
  Sense strand starting at position 651 of SEQ ID NO: 1243635
ggaauaaguuugcaggacu

SEQ ID NO: 1430321 - RNA, 19 nt, Artificial Sequence
  Description of Artificial Sequence: Synthetic oligonucleotide
  Antisense strand to SEQ ID NO: 1430320
aguccugcaaacuuauucc

SEQ ID NO: 1430322 - RNA, 19 nt, Artificial Sequence
  Description of Artificial Sequence: Synthetic oligonucleotide
  Sense strand starting at position 675 of SEQ ID NO: 1243635
ugcaaagcuucgcuugagu

SEQ ID NO: 1430323 - RNA, 19 nt, Artificial Sequence
  Description of Artificial Sequence: Synthetic oligonucleotide
  Antisense strand to SEQ ID NO: 1430322
acucaagcgaagcuuugca

SEQ ID NO: 1430324 - RNA, 19 nt, Artificial Sequence
  Description of Artificial Sequence: Synthetic oligonucleotide
  Sense strand starting at position 746 of SEQ ID NO: 1243635
aaagacuagucccaggaga

SEQ ID NO: 1430325 - RNA, 19 nt, Artificial Sequence
  Description of Artificial Sequence: Synthetic oligonucleotide
  Antisense strand to SEQ ID NO: 1430324
ucuccugggacuagucuuu

SEQ ID NO: 1430326 - RNA, 19 nt, Artificial Sequence
  Description of Artificial Sequence: Synthetic oligonucleotide
  Sense strand starting at position 849 of SEQ ID NO: 1243635
agaccucgagcuugaacau

SEQ ID NO: 1430327 - RNA, 19 nt, Artificial Sequence
  Description of Artificial Sequence: Synthetic oligonucleotide
  Antisense strand to SEQ ID NO: 1430326
auguucaagcucgaggucu

SEQ ID NO: 1430328 - RNA, 19 nt, Artificial Sequence
  Description of Artificial Sequence: Synthetic oligonucleotide
  Sense strand starting at position 858 of SEQ ID NO: 1243635
gcuugaacauguuuccgau

SEQ ID NO: 1430329 - RNA, 19 nt, Artificial Sequence
  Description of Artificial Sequence: Synthetic oligonucleotide
  Antisense strand to SEQ ID NO: 1430328
aucggaaacauguucaagc

SEQ ID NO: 1430330 - RNA, 19 nt, Artificial Sequence
  Description of Artificial Sequence: Synthetic oligonucleotide
  Sense strand starting at position 861 of SEQ ID NO: 1243635
ugaacauguuuccgaugau

SEQ ID NO: 1430331 - RNA, 19 nt, Artificial Sequence
  Description of Artificial Sequence: Synthetic oligonucleotide
  Antisense strand to SEQ ID NO: 1430330
aucaucggaaacauguuca

SEQ ID NO: 1430332 - RNA, 19 nt, Artificial Sequence
  Description of Artificial Sequence: Synthetic oligonucleotide
  Sense strand starting at position 862 of SEQ ID NO: 1243635
gaacauguuuccgaugaug

SEQ ID NO: 1430333 - RNA, 19 nt, Artificial Sequence
  Description of Artificial Sequence: Synthetic oligonucleotide
  Antisense strand to SEQ ID NO: 1430332
caucaucggaaacauguuc

SEQ ID NO: 1430334 - RNA, 19 nt, Artificial Sequence
  Description of Artificial Sequence: Synthetic oligonucleotide
  Sense strand starting at position 864 of SEQ ID NO: 1243635
acauguuuccgaugaugau

SEQ ID NO: 1430335 - RNA, 19 nt, Artificial Sequence
  Description of Artificial Sequence: Synthetic oligonucleotide
  Antisense strand to SEQ ID NO: 1430334
aucaucaucggaaacaugu

SEQ ID NO: 1430336 - RNA, 19 nt, Artificial Sequence
  Description of Artificial Sequence: Synthetic oligonucleotide
  Sense strand starting at position 865 of SEQ ID NO: 1243635
cauguuuccgaugaugaug

SEQ ID NO: 1430337 - RNA, 19 nt, Artificial Sequence
  Description of Artificial Sequence: Synthetic oligonucleotide
  Antisense strand to SEQ ID NO: 1430336
caucaucaucggaaacaug

SEQ ID NO: 1430338 - RNA, 19 nt, Artificial Sequence
  Description of Artificial Sequence: Synthetic oligonucleotide
  Sense strand starting at position 902 of SEQ ID NO: 1243635
ugccgacugucgucaauga

SEQ ID NO: 1430339 - RNA, 19 nt, Artificial Sequence
  Description of Artificial Sequence: Synthetic oligonucleotide
  Antisense strand to SEQ ID NO: 1430338
ucauugacgacagucggca

SEQ ID NO: 1430340 - RNA, 19 nt, Artificial Sequence
  Description of Artificial Sequence: Synthetic oligonucleotide
  Sense strand starting at position 906 of SEQ ID NO: 1243635
gacugucgucaaugacugu

SEQ ID NO: 1430341 - RNA, 19 nt, Artificial Sequence
  Description of Artificial Sequence: Synthetic oligonucleotide
  Antisense strand to SEQ ID NO: 1430340
acagucauugacgacaguc

SEQ ID NO: 1430342 - RNA, 19 nt, Artificial Sequence
  Description of Artificial Sequence: Synthetic oligonucleotide
  Sense strand starting at position 939 of SEQ ID NO: 1243635
auuucauggugcggaaaug

SEQ ID NO: 1430343 - RNA, 19 nt, Artificial Sequence
  Description of Artificial Sequence: Synthetic oligonucleotide
  Antisense strand to SEQ ID NO: 1430342
cauuuccgcaccaugaaau

SEQ ID NO: 1430344 - RNA, 19 nt, Artificial Sequence
  Description of Artificial Sequence: Synthetic oligonucleotide
  Sense strand starting at position 940 of SEQ ID NO: 1243635
uuucauggugcggaaauga

SEQ ID NO: 1430345 - RNA, 19 nt, Artificial Sequence
  Description of Artificial Sequence: Synthetic oligonucleotide
  Antisense strand to SEQ ID NO: 1430344
ucauuuccgcaccaugaaa

SEQ ID NO: 1430346 - RNA, 19 nt, Artificial Sequence
  Description of Artificial Sequence: Synthetic oligonucleotide
  Sense strand starting at position 1207 of SEQ ID NO: 1243635
ucaaguaagcccgaguucu

SEQ ID NO: 1430347 - RNA, 19 nt, Artificial Sequence
  Description of Artificial Sequence: Synthetic oligonucleotide
  Antisense strand to SEQ ID NO: 1430346
agaacucgggcuuacuuga

SEQ ID NO: 1430348 - RNA, 19 nt, Artificial Sequence
  Description of Artificial Sequence: Synthetic oligonucleotide
  Sense strand starting at position 1353 of SEQ ID NO: 1243635
aguaucugaacugggauua

SEQ ID NO: 1430349 - RNA, 19 nt, Artificial Sequence
  Description of Artificial Sequence: Synthetic oligonucleotide
  Antisense strand to SEQ ID NO: 1430348
uaaucccaguucagauacu

SEQ ID NO: 1430350 - RNA, 19 nt, Artificial Sequence
  Description of Artificial Sequence: Synthetic oligonucleotide
  Sense strand starting at position 1529 of SEQ ID NO: 1243635
gcccgaauucuguagccac

SEQ ID NO: 1430351 - RNA, 19 nt, Artificial Sequence
  Description of Artificial Sequence: Synthetic oligonucleotide
  Antisense strand to SEQ ID NO: 1430350
guggcuacagaauucgggc

SEQ ID NO: 1430352 - RNA, 19 nt, Artificial Sequence
  Description of Artificial Sequence: Synthetic oligonucleotide
  Sense strand starting at position 1532 of SEQ ID NO: 1243635
cgaauucuguagccacaga

SEQ ID NO: 1430353 - RNA, 19 nt, Artificial Sequence
  Description of Artificial Sequence: Synthetic oligonucleotide
  Antisense strand to SEQ ID NO: 1430352
ucuguggcuacagaauucg

SEQ ID NO: 1430354 - RNA, 19 nt, Artificial Sequence
  Description of Artificial Sequence: Synthetic oligonucleotide
  Sense strand starting at position 1683 of SEQ ID NO: 1243635
aaaguugaaucugcaaagu

SEQ ID NO: 1430355 - RNA, 19 nt, Artificial Sequence
  Description of Artificial Sequence: Synthetic oligonucleotide
  Antisense strand to SEQ ID NO: 1430354
acuuugcagauucaacuuu

SEQ ID NO: 1430356 - RNA, 19 nt, Artificial Sequence
  Description of Artificial Sequence: Synthetic oligonucleotide
  Sense strand starting at position 1786 of SEQ ID NO: 1243635
gcugaaagcuguuuacagu

SEQ ID NO: 1430357 - RNA, 19 nt, Artificial Sequence
  Description of Artificial Sequence: Synthetic oligonucleotide
  Antisense strand to SEQ ID NO: 1430356
acuguaaacagcuuucagc

SEQ ID NO: 1430358 - RNA, 19 nt, Artificial Sequence
  Description of Artificial Sequence: Synthetic oligonucleotide
  Sense strand starting at position 2044 of SEQ ID NO: 1243635
cugagacucugggauuuac

SEQ ID NO: 1430359 - RNA, 19 nt, Artificial Sequence
  Description of Artificial Sequence: Synthetic oligonucleotide
  Antisense strand to SEQ ID NO: 1430358
guaaaucccagagucucag

SEQ ID NO: 1430360 - RNA, 19 nt, Artificial Sequence
  Description of Artificial Sequence: Synthetic oligonucleotide
  Sense strand starting at position 2268 of SEQ ID NO: 1243635
guccgcugagcuuucuuaa

SEQ ID NO: 1430361 - RNA, 19 nt, Artificial Sequence
  Description of Artificial Sequence: Synthetic oligonucleotide
  Antisense strand to SEQ ID NO: 1430360
uuaagaaagcucagcggac

SEQ ID NO: 1430362 - RNA, 19 nt, Artificial Sequence
  Description of Artificial Sequence: Synthetic oligonucleotide
  Sense strand starting at position 2271 of SEQ ID NO: 1243635
cgcugagcuuucuuaaaga

SEQ ID NO: 1430363 - RNA, 19 nt, Artificial Sequence
  Description of Artificial Sequence: Synthetic oligonucleotide
  Antisense strand to SEQ ID NO: 1430362
ucuuuaagaaagcucagcg

SEQ ID NO: 1430364 - RNA, 19 nt, Artificial Sequence
  Description of Artificial Sequence: Synthetic oligonucleotide
  Sense strand starting at position 2765 of SEQ ID NO: 1243635
acagguuucuggcuuggga

SEQ ID NO: 1430365 - RNA, 19 nt, Artificial Sequence
  Description of Artificial Sequence: Synthetic oligonucleotide
  Antisense strand to SEQ ID NO: 1430364
ucccaagccagaaaccugu

SEQ ID NO: 1430366 - RNA, 19 nt, Artificial Sequence
  Description of Artificial Sequence: Synthetic oligonucleotide
  Sense strand starting at position 2767 of SEQ ID NO: 1243635
agguuucuggcuugggaga

SEQ ID NO: 1430367 - RNA, 19 nt, Artificial Sequence
  Description of Artificial Sequence: Synthetic oligonucleotide
  Antisense strand to SEQ ID NO: 1430366
ucucccaagccagaaaccu

SEQ ID NO: 1430368 - RNA, 19 nt, Artificial Sequence
  Description of Artificial Sequence: Synthetic oligonucleotide
  Sense strand starting at position 2811 of SEQ ID NO: 1243635
ggguggguuuggguaaagu

SEQ ID NO: 1430369 - RNA, 19 nt, Artificial Sequence
  Description of Artificial Sequence: Synthetic oligonucleotide
  Antisense strand to SEQ ID NO: 1430368
acuuuacccaaacccaccc

SEQ ID NO: 1430370 - RNA, 19 nt, Artificial Sequence
  Description of Artificial Sequence: Synthetic oligonucleotide
  Sense strand starting at position 2812 of SEQ ID NO: 1243635
gguggguuuggguaaaguu

SEQ ID NO: 1430371 - RNA, 19 nt, Artificial Sequence
  Description of Artificial Sequence: Synthetic oligonucleotide
  Antisense strand to SEQ ID NO: 1430370
aacuuuacccaaacccacc

SEQ ID NO: 1430372 - RNA, 19 nt, Artificial Sequence
  Description of Artificial Sequence: Synthetic oligonucleotide
  Sense strand starting at position 2963 of SEQ ID NO: 1243635
gaguuuauugagggcauca

SEQ ID NO: 1430373 - RNA, 19 nt, Artificial Sequence
  Description of Artificial Sequence: Synthetic oligonucleotide
  Antisense strand to SEQ ID NO: 1430372
ugaugcccucaauaaacuc

SEQ ID NO: 1430374 - RNA, 19 nt, Artificial Sequence
  Description of Artificial Sequence: Synthetic oligonucleotide
  Sense strand starting at position 3011 of SEQ ID NO: 1243635
augcgaagaccugguguuu

SEQ ID NO: 1430375 - RNA, 19 nt, Artificial Sequence
  Description of Artificial Sequence: Synthetic oligonucleotide
  Antisense strand to SEQ ID NO: 1430374
aaacaccaggucuucgcau

SEQ ID NO: 1430376 - RNA, 19 nt, Artificial Sequence
  Description of Artificial Sequence: Synthetic oligonucleotide
  Sense strand starting at position 3083 of SEQ ID NO: 1243635
uggacucagcuccacgaaa

SEQ ID NO: 1430377 - RNA, 19 nt, Artificial Sequence
  Description of Artificial Sequence: Synthetic oligonucleotide
  Antisense strand to SEQ ID NO: 1430376
uuucguggagcugagucca

SEQ ID NO: 1430378 - RNA, 19 nt, Artificial Sequence
  Description of Artificial Sequence: Synthetic oligonucleotide
  Sense strand starting at position 3235 of SEQ ID NO: 1243635
uuuaguagucuguacuaaa

SEQ ID NO: 1430379 - RNA, 19 nt, Artificial Sequence
  Description of Artificial Sequence: Synthetic oligonucleotide
  Antisense strand to SEQ ID NO: 1430378
uuuaguacagacuacuaaa

SEQ ID NO: 1430380 - RNA, 19 nt, Artificial Sequence
  Description of Artificial Sequence: Synthetic oligonucleotide
  Sense strand starting at position 3507 of SEQ ID NO: 1243635
caccucagaucaggaguua

SEQ ID NO: 1430381 - RNA, 19 nt, Artificial Sequence
  Description of Artificial Sequence: Synthetic oligonucleotide
  Antisense strand to SEQ ID NO: 1430380
uaacuccugaucugaggug

SEQ ID NO: 1430382 - RNA, 19 nt, Artificial Sequence
  Description of Artificial Sequence: Synthetic oligonucleotide
  Sense strand starting at position 3713 of SEQ ID NO: 1243635
gugagacugugucagaaga

SEQ ID NO: 1430383 - RNA, 19 nt, Artificial Sequence
  Description of Artificial Sequence: Synthetic oligonucleotide
  Antisense strand to SEQ ID NO: 1430382
ucuucugacacagucucac

SEQ ID NO: 1430384 - RNA, 19 nt, Artificial Sequence
  Description of Artificial Sequence: Synthetic oligonucleotide
  Sense strand starting at position 3715 of SEQ ID NO: 1243635
gagacugugucagaagaag

SEQ ID NO: 1430385 - RNA, 19 nt, Artificial Sequence
  Description of Artificial Sequence: Synthetic oligonucleotide
  Antisense strand to SEQ ID NO: 1430384
cuucuucugacacagucuc

SEQ ID NO: 1430386 - RNA, 19 nt, Artificial Sequence
  Description of Artificial Sequence: Synthetic oligonucleotide
  Sense strand starting at position 3854 of SEQ ID NO: 1243635
ggcugauccuuuccuauuu

SEQ ID NO: 1430387 - RNA, 19 nt, Artificial Sequence
  Description of Artificial Sequence: Synthetic oligonucleotide
  Antisense strand to SEQ ID NO: 1430386
aaauaggaaaggaucagcc

SEQ ID NO: 1430388 - RNA, 19 nt, Artificial Sequence
  Description of Artificial Sequence: Synthetic oligonucleotide
  Sense strand starting at position 108 of SEQ ID NO: 1243636
caaagucagucucagggau

SEQ ID NO: 1430389 - RNA, 19 nt, Artificial Sequence
  Description of Artificial Sequence: Synthetic oligonucleotide
  Antisense strand to SEQ ID NO: 1430388
aucccugagacugacuuug

SEQ ID NO: 1430390 - RNA, 19 nt, Artificial Sequence
  Description of Artificial Sequence: Synthetic oligonucleotide
  Sense strand starting at position 112 of SEQ ID NO: 1243636
gucagucucagggauuguu

SEQ ID NO: 1430391 - RNA, 19 nt, Artificial Sequence
  Description of Artificial Sequence: Synthetic oligonucleotide
  Antisense strand to SEQ ID NO: 1430390
aacaaucccugagacugac

SEQ ID NO: 1430392 - RNA, 19 nt, Artificial Sequence
  Description of Artificial Sequence: Synthetic oligonucleotide
  Sense strand starting at position 121 of SEQ ID NO: 1243636
agggauuguucagggagga

SEQ ID NO: 1430393 - RNA, 19 nt, Artificial Sequence
  Description of Artificial Sequence: Synthetic oligonucleotide
  Antisense strand to SEQ ID NO: 1430392
uccucccugaacaaucccu

SEQ ID NO: 1430394 - RNA, 19 nt, Artificial Sequence
  Description of Artificial Sequence: Synthetic oligonucleotide
  Sense strand starting at position 280 of SEQ ID NO: 1243636
auguccaaagcucaagaau

SEQ ID NO: 1430395 - RNA, 19 nt, Artificial Sequence
  Description of Artificial Sequence: Synthetic oligonucleotide
  Antisense strand to SEQ ID NO: 1430394
auucuugagcuuuggacau

SEQ ID NO: 1430396 - RNA, 19 nt, Artificial Sequence
  Description of Artificial Sequence: Synthetic oligonucleotide
  Sense strand starting at position 473 of SEQ ID NO: 1243636
gagagauauuccuacaagg

SEQ ID NO: 1430397 - RNA, 19 nt, Artificial Sequence
  Description of Artificial Sequence: Synthetic oligonucleotide
  Antisense strand to SEQ ID NO: 1430396
ccuuguaggaauaucucuc

SEQ ID NO: 1430398 - RNA, 19 nt, Artificial Sequence
  Description of Artificial Sequence: Synthetic oligonucleotide
  Sense strand starting at position 521 of SEQ ID NO: 1243636
cugucucacucauuggcua

SEQ ID NO: 1430399 - RNA, 19 nt, Artificial Sequence
  Description of Artificial Sequence: Synthetic oligonucleotide
  Antisense strand to SEQ ID NO: 1430398
uagccaaugagugagacag

SEQ ID NO: 1430400 - RNA, 19 nt, Artificial Sequence
  Description of Artificial Sequence: Synthetic oligonucleotide
  Sense strand starting at position 538 of SEQ ID NO: 1243636
uaggaucuguuaccugcaa

SEQ ID NO: 1430401 - RNA, 19 nt, Artificial Sequence
  Description of Artificial Sequence: Synthetic oligonucleotide
  Antisense strand to SEQ ID NO: 1430400
uugcagguaacagauccua

SEQ ID NO: 1430402 - RNA, 19 nt, Artificial Sequence
  Description of Artificial Sequence: Synthetic oligonucleotide
  Sense strand starting at position 540 of SEQ ID NO: 1243636
ggaucuguuaccugcaagu

SEQ ID NO: 1430403 - RNA, 19 nt, Artificial Sequence
  Description of Artificial Sequence: Synthetic oligonucleotide
  Antisense strand to SEQ ID NO: 1430402
acuugcagguaacagaucc

SEQ ID NO: 1430404 - RNA, 19 nt, Artificial Sequence
  Description of Artificial Sequence: Synthetic oligonucleotide
  Sense strand starting at position 592 of SEQ ID NO: 1243636
agagccuauuaauccagua

SEQ ID NO: 1430405 - RNA, 19 nt, Artificial Sequence
  Description of Artificial Sequence: Synthetic oligonucleotide
  Antisense strand to SEQ ID NO: 1430404
uacuggauuaauaggcucu

SEQ ID NO: 1430406 - RNA, 19 nt, Artificial Sequence
  Description of Artificial Sequence: Synthetic oligonucleotide
  Sense strand starting at position 613 of SEQ ID NO: 1243636
ggacucaagcuuuagugau

SEQ ID NO: 1430407 - RNA, 19 nt, Artificial Sequence
  Description of Artificial Sequence: Synthetic oligonucleotide
  Antisense strand to SEQ ID NO: 1430406
aucacuaaagcuugagucc

SEQ ID NO: 1430408 - RNA, 19 nt, Artificial Sequence
  Description of Artificial Sequence: Synthetic oligonucleotide
  Sense strand starting at position 619 of SEQ ID NO: 1243636
aagcuuuagugauuugcau

SEQ ID NO: 1430409 - RNA, 19 nt, Artificial Sequence
  Description of Artificial Sequence: Synthetic oligonucleotide
  Antisense strand to SEQ ID NO: 1430408
augcaaaucacuaaagcuu

SEQ ID NO: 1430410 - RNA, 19 nt, Artificial Sequence
  Description of Artificial Sequence: Synthetic oligonucleotide
  Sense strand starting at position 625 of SEQ ID NO: 1243636
uagugauuugcaugccugu

SEQ ID NO: 1430411 - RNA, 19 nt, Artificial Sequence
  Description of Artificial Sequence: Synthetic oligonucleotide
  Antisense strand to SEQ ID NO: 1430410
acaggcaugcaaaucacua

SEQ ID NO: 1430412 - RNA, 19 nt, Artificial Sequence
  Description of Artificial Sequence: Synthetic oligonucleotide
  Sense strand starting at position 694 of SEQ ID NO: 1243636
acccaagaauuaugcagaa

SEQ ID NO: 1430413 - RNA, 19 nt, Artificial Sequence
  Description of Artificial Sequence: Synthetic oligonucleotide
  Antisense strand to SEQ ID NO: 1430412
uucugcauaauucuugggu

SEQ ID NO: 1430414 - RNA, 19 nt, Artificial Sequence
  Description of Artificial Sequence: Synthetic oligonucleotide
  Sense strand starting at position 788 of SEQ ID NO: 1243636
uccagugcucagggucuua

SEQ ID NO: 1430415 - RNA, 19 nt, Artificial Sequence
  Description of Artificial Sequence: Synthetic oligonucleotide
  Antisense strand to SEQ ID NO: 1430414
uaagacccugagcacugga

SEQ ID NO: 1430416 - RNA, 19 nt, Artificial Sequence
  Description of Artificial Sequence: Synthetic oligonucleotide
  Sense strand starting at position 832 of SEQ ID NO: 1243636
augccaagaucagaggaau

SEQ ID NO: 1430417 - RNA, 19 nt, Artificial Sequence
  Description of Artificial Sequence: Synthetic oligonucleotide
  Antisense strand to SEQ ID NO: 1430416
auuccucugaucuuggcau

SEQ ID NO: 1430418 - RNA, 19 nt, Artificial Sequence
  Description of Artificial Sequence: Synthetic oligonucleotide
  Sense strand starting at position 891 of SEQ ID NO: 1243636
gauguucuguaccuuuaag

SEQ ID NO: 1430419 - RNA, 19 nt, Artificial Sequence
  Description of Artificial Sequence: Synthetic oligonucleotide
  Antisense strand to SEQ ID NO: 1430418
cuuaaagguacagaacauc

SEQ ID NO: 1430420 - RNA, 19 nt, Artificial Sequence
  Description of Artificial Sequence: Synthetic oligonucleotide
  Sense strand starting at position 927 of SEQ ID NO: 1243636
gugcuaagaguccaagcuu

SEQ ID NO: 1430421 - RNA, 19 nt, Artificial Sequence
  Description of Artificial Sequence: Synthetic oligonucleotide
  Antisense strand to SEQ ID NO: 1430420
aagcuuggacucuuagcac

SEQ ID NO: 1430422 - RNA, 19 nt, Artificial Sequence
  Description of Artificial Sequence: Synthetic oligonucleotide
  Sense strand starting at position 978 of SEQ ID NO: 1243636
gguacuaauuugggaagga

SEQ ID NO: 1430423 - RNA, 19 nt, Artificial Sequence
  Description of Artificial Sequence: Synthetic oligonucleotide
  Antisense strand to SEQ ID NO: 1430422
uccuucccaaauuaguacc

SEQ ID NO: 1430424 - RNA, 19 nt, Artificial Sequence
  Description of Artificial Sequence: Synthetic oligonucleotide
  Sense strand starting at position 979 of SEQ ID NO: 1243636
guacuaauuugggaaggac

SEQ ID NO: 1430425 - RNA, 19 nt, Artificial Sequence
  Description of Artificial Sequence: Synthetic oligonucleotide
  Antisense strand to SEQ ID NO: 1430424
guccuucccaaauuaguac

SEQ ID NO: 1430426 - RNA, 19 nt, Artificial Sequence
  Description of Artificial Sequence: Synthetic oligonucleotide
  Sense strand starting at position 1021 of SEQ ID NO: 1243636
ggcuacuaguugccagaau

SEQ ID NO: 1430427 - RNA, 19 nt, Artificial Sequence
  Description of Artificial Sequence: Synthetic oligonucleotide
  Antisense strand to SEQ ID NO: 1430426
auucuggcaacuaguagcc

SEQ ID NO: 1430428 - RNA, 19 nt, Artificial Sequence
  Description of Artificial Sequence: Synthetic oligonucleotide
  Sense strand starting at position 1058 of SEQ ID NO: 1243636
gguguuccuugaucaguaa

SEQ ID NO: 1430429 - RNA, 19 nt, Artificial Sequence
  Description of Artificial Sequence: Synthetic oligonucleotide
  Antisense strand to SEQ ID NO: 1430428
uuacugaucaaggaacacc

SEQ ID NO: 1430430 - RNA, 19 nt, Artificial Sequence
  Description of Artificial Sequence: Synthetic oligonucleotide
  Sense strand starting at position 1061 of SEQ ID NO: 1243636
guuccuugaucaguaacua

SEQ ID NO: 1430431 - RNA, 19 nt, Artificial Sequence
  Description of Artificial Sequence: Synthetic oligonucleotide
  Antisense strand to SEQ ID NO: 1430430
uaguuacugaucaaggaac

SEQ ID NO: 1430432 - RNA, 19 nt, Artificial Sequence
  Description of Artificial Sequence: Synthetic oligonucleotide
  Sense strand starting at position 1174 of SEQ ID NO: 1243636
agguuaaccucacuaauug

SEQ ID NO: 1430433 - RNA, 19 nt, Artificial Sequence
  Description of Artificial Sequence: Synthetic oligonucleotide
  Antisense strand to SEQ ID NO: 1430432
caauuagugagguuaaccu

SEQ ID NO: 1430434 - RNA, 19 nt, Artificial Sequence
  Description of Artificial Sequence: Synthetic oligonucleotide
  Sense strand starting at position 2183 of SEQ ID NO: 1243636
gaaagaugggccugccuga

SEQ ID NO: 1430435 - RNA, 19 nt, Artificial Sequence
  Description of Artificial Sequence: Synthetic oligonucleotide
  Antisense strand to SEQ ID NO: 1430434
ucaggcaggcccaucuuuc

SEQ ID NO: 1430436 - RNA, 19 nt, Artificial Sequence
  Description of Artificial Sequence: Synthetic oligonucleotide
  Sense strand starting at position 2862 of SEQ ID NO: 1243636
ccuugucucgaagggucaa

SEQ ID NO: 1430437 - RNA, 19 nt, Artificial Sequence
  Description of Artificial Sequence: Synthetic oligonucleotide
  Antisense strand to SEQ ID NO: 1430436
uugacccuucgagacaagg

SEQ ID NO: 1430438 - RNA, 19 nt, Artificial Sequence
  Description of Artificial Sequence: Synthetic oligonucleotide
  Sense strand starting at position 2991 of SEQ ID NO: 1243636
uuccuuguagcguauaauu

SEQ ID NO: 1430439 - RNA, 19 nt, Artificial Sequence
  Description of Artificial Sequence: Synthetic oligonucleotide
  Antisense strand to SEQ ID NO: 1430438
aauuauacgcuacaaggaa

SEQ ID NO: 1430440 - RNA, 19 nt, Artificial Sequence
  Description of Artificial Sequence: Synthetic oligonucleotide
  Sense strand starting at position 3002 of SEQ ID NO: 1243636
guauaauuggguuggccau

SEQ ID NO: 1430441 - RNA, 19 nt, Artificial Sequence
  Description of Artificial Sequence: Synthetic oligonucleotide
  Antisense strand to SEQ ID NO: 1430440
auggccaacccaauuauac

SEQ ID NO: 1430442 - RNA, 19 nt, Artificial Sequence
  Description of Artificial Sequence: Synthetic oligonucleotide
  Sense strand starting at position 3009 of SEQ ID NO: 1243636
uggguuggccauuaauaau

SEQ ID NO: 1430443 - RNA, 19 nt, Artificial Sequence
  Description of Artificial Sequence: Synthetic oligonucleotide
  Antisense strand to SEQ ID NO: 1430442
auuauuaauggccaaccca

SEQ ID NO: 1430444 - RNA, 19 nt, Artificial Sequence
  Description of Artificial Sequence: Synthetic oligonucleotide
  Sense strand starting at position 3020 of SEQ ID NO: 1243636
uuaauaauugcucgauaac

SEQ ID NO: 1430445 - RNA, 19 nt, Artificial Sequence
  Description of Artificial Sequence: Synthetic oligonucleotide
  Antisense strand to SEQ ID NO: 1430444
guuaucgagcaauuauuaa

SEQ ID NO: 1430446 - RNA, 19 nt, Artificial Sequence
  Description of Artificial Sequence: Synthetic oligonucleotide
  Sense strand starting at position 3029 of SEQ ID NO: 1243636
gcucgauaacugcauaaug

SEQ ID NO: 1430447 - RNA, 19 nt, Artificial Sequence
  Description of Artificial Sequence: Synthetic oligonucleotide
  Antisense strand to SEQ ID NO: 1430446
cauuaugcaguuaucgagc

SEQ ID NO: 1430448 - RNA, 19 nt, Artificial Sequence
  Description of Artificial Sequence: Synthetic oligonucleotide
  Sense strand starting at position 3031 of SEQ ID NO: 1243636
ucgauaacugcauaauggu

SEQ ID NO: 1430449 - RNA, 19 nt, Artificial Sequence
  Description of Artificial Sequence: Synthetic oligonucleotide
  Antisense strand to SEQ ID NO: 1430448
accauuaugcaguuaucga

SEQ ID NO: 1430450 - RNA, 19 nt, Artificial Sequence
  Description of Artificial Sequence: Synthetic oligonucleotide
  Sense strand starting at position 3047 of SEQ ID NO: 1243636
ggugaaaccugguaccacu

SEQ ID NO: 1430451 - RNA, 19 nt, Artificial Sequence
  Description of Artificial Sequence: Synthetic oligonucleotide
  Antisense strand to SEQ ID NO: 1430450
agugguaccagguuucacc

SEQ ID NO: 1430452 - RNA, 19 nt, Artificial Sequence
  Description of Artificial Sequence: Synthetic oligonucleotide
  Sense strand starting at position 3096 of SEQ ID NO: 1243636
gucgauguuaucgaaauga

SEQ ID NO: 1430453 - RNA, 19 nt, Artificial Sequence
  Description of Artificial Sequence: Synthetic oligonucleotide
  Antisense strand to SEQ ID NO: 1430452
ucauuucgauaacaucgac

SEQ ID NO: 1430454 - RNA, 19 nt, Artificial Sequence
  Description of Artificial Sequence: Synthetic oligonucleotide
  Sense strand starting at position 3100 of SEQ ID NO: 1243636
auguuaucgaaaugaagca

SEQ ID NO: 1430455 - RNA, 19 nt, Artificial Sequence
  Description of Artificial Sequence: Synthetic oligonucleotide
  Antisense strand to SEQ ID NO: 1430454
ugcuucauuucgauaacau

SEQ ID NO: 1430456 - RNA, 19 nt, Artificial Sequence
  Description of Artificial Sequence: Synthetic oligonucleotide
  Sense strand starting at position 3125 of SEQ ID NO: 1243636
ucugaauugguguggguuu

SEQ ID NO: 1430457 - RNA, 19 nt, Artificial Sequence
  Description of Artificial Sequence: Synthetic oligonucleotide
  Antisense strand to SEQ ID NO: 1430456
aaacccacaccaauucaga

SEQ ID NO: 1430458 - RNA, 19 nt, Artificial Sequence
  Description of Artificial Sequence: Synthetic oligonucleotide
  Sense strand starting at position 3159 of SEQ ID NO: 1243636
agagauagucacggugagu

SEQ ID NO: 1430459 - RNA, 19 nt, Artificial Sequence
  Description of Artificial Sequence: Synthetic oligonucleotide
  Antisense strand to SEQ ID NO: 1430458
acucaccgugacuaucucu

SEQ ID NO: 1430460 - RNA, 19 nt, Artificial Sequence
  Description of Artificial Sequence: Synthetic oligonucleotide
  Sense strand starting at position 3176 of SEQ ID NO: 1243636
gucacuaucucugccagga

SEQ ID NO: 1430461 - RNA, 19 nt, Artificial Sequence
  Description of Artificial Sequence: Synthetic oligonucleotide
  Antisense strand to SEQ ID NO: 1430460
uccuggcagagauagugac

SEQ ID NO: 1430462 - RNA, 19 nt, Artificial Sequence
  Description of Artificial Sequence: Synthetic oligonucleotide
  Sense strand starting at position 3319 of SEQ ID NO: 1243636
agaucaugcuaagaacuaa

SEQ ID NO: 1430463 - RNA, 19 nt, Artificial Sequence
  Description of Artificial Sequence: Synthetic oligonucleotide
  Antisense strand to SEQ ID NO: 1430462
uuaguucuuagcaugaucu

SEQ ID NO: 1430464 - RNA, 19 nt, Artificial Sequence
  Description of Artificial Sequence: Synthetic oligonucleotide
  Sense strand starting at position 3850 of SEQ ID NO: 1243636
uagguccuguggucagaaa

SEQ ID NO: 1430465 - RNA, 19 nt, Artificial Sequence
  Description of Artificial Sequence: Synthetic oligonucleotide
  Antisense strand to SEQ ID NO: 1430464
uuucugaccacaggaccua

SEQ ID NO: 1430466 - RNA, 19 nt, Artificial Sequence
  Description of Artificial Sequence: Synthetic oligonucleotide
  Sense strand starting at position 3949 of SEQ ID NO: 1243636
ggaggaguauuccuagcag

SEQ ID NO: 1430467 - RNA, 19 nt, Artificial Sequence
  Description of Artificial Sequence: Synthetic oligonucleotide
  Antisense strand to SEQ ID NO: 1430466
cugcuaggaauacuccucc

SEQ ID NO: 1430468 - RNA, 19 nt, Artificial Sequence
  Description of Artificial Sequence: Synthetic oligonucleotide
  Sense strand starting at position 55 of SEQ ID NO: 1243637
gucagucucagggauuguu

SEQ ID NO: 1430469 - RNA, 19 nt, Artificial Sequence
  Description of Artificial Sequence: Synthetic oligonucleotide
  Antisense strand to SEQ ID NO: 1430468
aacaaucccugagacugac

SEQ ID NO: 1430470 - RNA, 19 nt, Artificial Sequence
  Description of Artificial Sequence: Synthetic oligonucleotide
  Sense strand starting at position 64 of SEQ ID NO: 1243637
agggauuguucagggagga

SEQ ID NO: 1430471 - RNA, 19 nt, Artificial Sequence
  Description of Artificial Sequence: Synthetic oligonucleotide
  Antisense strand to SEQ ID NO: 1430470
uccucccugaacaaucccu

SEQ ID NO: 1430472 - RNA, 19 nt, Artificial Sequence
  Description of Artificial Sequence: Synthetic oligonucleotide
  Sense strand starting at position 223 of SEQ ID NO: 1243637
auguccaaagcucaagaau

SEQ ID NO: 1430473 - RNA, 19 nt, Artificial Sequence
  Description of Artificial Sequence: Synthetic oligonucleotide
  Antisense strand to SEQ ID NO: 1430472
auucuugagcuuuggacau

SEQ ID NO: 1430474 - RNA, 19 nt, Artificial Sequence
  Description of Artificial Sequence: Synthetic oligonucleotide
  Sense strand starting at position 416 of SEQ ID NO: 1243637
gagagauauuccuacaagg

SEQ ID NO: 1430475 - RNA, 19 nt, Artificial Sequence
  Description of Artificial Sequence: Synthetic oligonucleotide
  Antisense strand to SEQ ID NO: 1430474
ccuuguaggaauaucucuc

SEQ ID NO: 1430476 - RNA, 19 nt, Artificial Sequence
  Description of Artificial Sequence: Synthetic oligonucleotide
  Sense strand starting at position 464 of SEQ ID NO: 1243637
cugucucacucauuggcua

SEQ ID NO: 1430477 - RNA, 19 nt, Artificial Sequence
  Description of Artificial Sequence: Synthetic oligonucleotide
  Antisense strand to SEQ ID NO: 1430476
uagccaaugagugagacag

SEQ ID NO: 1430478 - RNA, 19 nt, Artificial Sequence
  Description of Artificial Sequence: Synthetic oligonucleotide
  Sense strand starting at position 481 of SEQ ID NO: 1243637
uaggaucuguuaccugcaa

SEQ ID NO: 1430479 - RNA, 19 nt, Artificial Sequence
  Description of Artificial Sequence: Synthetic oligonucleotide
  Antisense strand to SEQ ID NO: 1430478
uugcagguaacagauccua

SEQ ID NO: 1430480 - RNA, 19 nt, Artificial Sequence
  Description of Artificial Sequence: Synthetic oligonucleotide
  Sense strand starting at position 483 of SEQ ID NO: 1243637
ggaucuguuaccugcaagu

SEQ ID NO: 1430481 - RNA, 19 nt, Artificial Sequence
  Description of Artificial Sequence: Synthetic oligonucleotide
  Antisense strand to SEQ ID NO: 1430480
acuugcagguaacagaucc

SEQ ID NO: 1430482 - RNA, 19 nt, Artificial Sequence
  Description of Artificial Sequence: Synthetic oligonucleotide
  Sense strand starting at position 535 of SEQ ID NO: 1243637
agagccuauuaauccagua

SEQ ID NO: 1430483 - RNA, 19 nt, Artificial Sequence
  Description of Artificial Sequence: Synthetic oligonucleotide
  Antisense strand to SEQ ID NO: 1430482
uacuggauuaauaggcucu

SEQ ID NO: 1430484 - RNA, 19 nt, Artificial Sequence
  Description of Artificial Sequence: Synthetic oligonucleotide
  Sense strand starting at position 556 of SEQ ID NO: 1243637
ggacucaagcuuuagugau

SEQ ID NO: 1430485 - RNA, 19 nt, Artificial Sequence
  Description of Artificial Sequence: Synthetic oligonucleotide
  Antisense strand to SEQ ID NO: 1430484
aucacuaaagcuugagucc

SEQ ID NO: 1430486 - RNA, 19 nt, Artificial Sequence
  Description of Artificial Sequence: Synthetic oligonucleotide
  Sense strand starting at position 562 of SEQ ID NO: 1243637
aagcuuuagugauuugcau

SEQ ID NO: 1430487 - RNA, 19 nt, Artificial Sequence
  Description of Artificial Sequence: Synthetic oligonucleotide
  Antisense strand to SEQ ID NO: 1430486
augcaaaucacuaaagcuu

SEQ ID NO: 1430488 - RNA, 19 nt, Artificial Sequence
  Description of Artificial Sequence: Synthetic oligonucleotide
  Sense strand starting at position 568 of SEQ ID NO: 1243637
uagugauuugcaugccugu

SEQ ID NO: 1430489 - RNA, 19 nt, Artificial Sequence
  Description of Artificial Sequence: Synthetic oligonucleotide
  Antisense strand to SEQ ID NO: 1430488
acaggcaugcaaaucacua

SEQ ID NO: 1430490 - RNA, 19 nt, Artificial Sequence
  Description of Artificial Sequence: Synthetic oligonucleotide
  Sense strand starting at position 731 of SEQ ID NO: 1243637
uccagugcucagggucuua

SEQ ID NO: 1430491 - RNA, 19 nt, Artificial Sequence
  Description of Artificial Sequence: Synthetic oligonucleotide
  Antisense strand to SEQ ID NO: 1430490
uaagacccugagcacugga

SEQ ID NO: 1430492 - RNA, 19 nt, Artificial Sequence
  Description of Artificial Sequence: Synthetic oligonucleotide
  Sense strand starting at position 775 of SEQ ID NO: 1243637
augccaagaucagaggaau

SEQ ID NO: 1430493 - RNA, 19 nt, Artificial Sequence
  Description of Artificial Sequence: Synthetic oligonucleotide
  Antisense strand to SEQ ID NO: 1430492
auuccucugaucuuggcau

SEQ ID NO: 1430494 - RNA, 19 nt, Artificial Sequence
  Description of Artificial Sequence: Synthetic oligonucleotide
  Sense strand starting at position 834 of SEQ ID NO: 1243637
gauguucuguaccuuuaag

SEQ ID NO: 1430495 - RNA, 19 nt, Artificial Sequence
  Description of Artificial Sequence: Synthetic oligonucleotide
  Antisense strand to SEQ ID NO: 1430494
cuuaaagguacagaacauc

SEQ ID NO: 1430496 - RNA, 19 nt, Artificial Sequence
  Description of Artificial Sequence: Synthetic oligonucleotide
  Sense strand starting at position 870 of SEQ ID NO: 1243637
gugcuaagaguccaagcuu

SEQ ID NO: 1430497 - RNA, 19 nt, Artificial Sequence
  Description of Artificial Sequence: Synthetic oligonucleotide
  Antisense strand to SEQ ID NO: 1430496
aagcuuggacucuuagcac

SEQ ID NO: 1430498 - RNA, 19 nt, Artificial Sequence
  Description of Artificial Sequence: Synthetic oligonucleotide
  Sense strand starting at position 921 of SEQ ID NO: 1243637
gguacuaauuugggaagga

SEQ ID NO: 1430499 - RNA, 19 nt, Artificial Sequence
  Description of Artificial Sequence: Synthetic oligonucleotide
  Antisense strand to SEQ ID NO: 1430498
uccuucccaaauuaguacc

SEQ ID NO: 1430500 - RNA, 19 nt, Artificial Sequence
  Description of Artificial Sequence: Synthetic oligonucleotide
  Sense strand starting at position 922 of SEQ ID NO: 1243637
guacuaauuugggaaggac

SEQ ID NO: 1430501 - RNA, 19 nt, Artificial Sequence
  Description of Artificial Sequence: Synthetic oligonucleotide
  Antisense strand to SEQ ID NO: 1430500
guccuucccaaauuaguac

SEQ ID NO: 1430502 - RNA, 19 nt, Artificial Sequence
  Description of Artificial Sequence: Synthetic oligonucleotide
  Sense strand starting at position 964 of SEQ ID NO: 1243637
ggcuacuaguugccagaau

SEQ ID NO: 1430503 - RNA, 19 nt, Artificial Sequence
  Description of Artificial Sequence: Synthetic oligonucleotide
  Antisense strand to SEQ ID NO: 1430502
auucuggcaacuaguagcc

SEQ ID NO: 1430504 - RNA, 19 nt, Artificial Sequence
  Description of Artificial Sequence: Synthetic oligonucleotide
  Sense strand starting at position 1001 of SEQ ID NO: 1243637
gguguuccuugaucaguaa

SEQ ID NO: 1430505 - RNA, 19 nt, Artificial Sequence
  Description of Artificial Sequence: Synthetic oligonucleotide
  Antisense strand to SEQ ID NO: 1430504
uuacugaucaaggaacacc

SEQ ID NO: 1430506 - RNA, 19 nt, Artificial Sequence
  Description of Artificial Sequence: Synthetic oligonucleotide
  Sense strand starting at position 1004 of SEQ ID NO: 1243637
guuccuugaucaguaacua

SEQ ID NO: 1430507 - RNA, 19 nt, Artificial Sequence
  Description of Artificial Sequence: Synthetic oligonucleotide
  Antisense strand to SEQ ID NO: 1430506
uaguuacugaucaaggaac

SEQ ID NO: 1430508 - RNA, 19 nt, Artificial Sequence
  Description of Artificial Sequence: Synthetic oligonucleotide
  Sense strand starting at position 1117 of SEQ ID NO: 1243637
agguuaaccucacuaauug

SEQ ID NO: 1430509 - RNA, 19 nt, Artificial Sequence
  Description of Artificial Sequence: Synthetic oligonucleotide
  Antisense strand to SEQ ID NO: 1430508
caauuagugagguuaaccu

SEQ ID NO: 1430510 - RNA, 19 nt, Artificial Sequence
  Description of Artificial Sequence: Synthetic oligonucleotide
  Sense strand starting at position 2126 of SEQ ID NO: 1243637
gaaagaugggccugccuga

SEQ ID NO: 1430511 - RNA, 19 nt, Artificial Sequence
  Description of Artificial Sequence: Synthetic oligonucleotide
  Antisense strand to SEQ ID NO: 1430510
ucaggcaggcccaucuuuc

SEQ ID NO: 1430512 - RNA, 19 nt, Artificial Sequence
  Description of Artificial Sequence: Synthetic oligonucleotide
  Sense strand starting at position 2805 of SEQ ID NO: 1243637
ccuugucucgaagggucaa

SEQ ID NO: 1430513 - RNA, 19 nt, Artificial Sequence
  Description of Artificial Sequence: Synthetic oligonucleotide
  Antisense strand to SEQ ID NO: 1430512
uugacccuucgagacaagg

SEQ ID NO: 1430514 - RNA, 19 nt, Artificial Sequence
  Description of Artificial Sequence: Synthetic oligonucleotide
  Sense strand starting at position 2934 of SEQ ID NO: 1243637
uuccuuguagcguauaauu

SEQ ID NO: 1430515 - RNA, 19 nt, Artificial Sequence
  Description of Artificial Sequence: Synthetic oligonucleotide
  Antisense strand to SEQ ID NO: 1430514
aauuauacgcuacaaggaa

SEQ ID NO: 1430516 - RNA, 19 nt, Artificial Sequence
  Description of Artificial Sequence: Synthetic oligonucleotide
  Sense strand starting at position 2945 of SEQ ID NO: 1243637
guauaauuggguuggccau

SEQ ID NO: 1430517 - RNA, 19 nt, Artificial Sequence
  Description of Artificial Sequence: Synthetic oligonucleotide
  Antisense strand to SEQ ID NO: 1430516
auggccaacccaauuauac

SEQ ID NO: 1430518 - RNA, 19 nt, Artificial Sequence
  Description of Artificial Sequence: Synthetic oligonucleotide
  Sense strand starting at position 2952 of SEQ ID NO: 1243637
uggguuggccauuaauaau

SEQ ID NO: 1430519 - RNA, 19 nt, Artificial Sequence
  Description of Artificial Sequence: Synthetic oligonucleotide
  Antisense strand to SEQ ID NO: 1430518
auuauuaauggccaaccca

SEQ ID NO: 1430520 - RNA, 19 nt, Artificial Sequence
  Description of Artificial Sequence: Synthetic oligonucleotide
  Sense strand starting at position 2963 of SEQ ID NO: 1243637
uuaauaauugcucgauaac

SEQ ID NO: 1430521 - RNA, 19 nt, Artificial Sequence
  Description of Artificial Sequence: Synthetic oligonucleotide
  Antisense strand to SEQ ID NO: 1430520
guuaucgagcaauuauuaa

SEQ ID NO: 1430522 - RNA, 19 nt, Artificial Sequence
  Description of Artificial Sequence: Synthetic oligonucleotide
  Sense strand starting at position 2972 of SEQ ID NO: 1243637
gcucgauaacugcauaaug

SEQ ID NO: 1430523 - RNA, 19 nt, Artificial Sequence
  Description of Artificial Sequence: Synthetic oligonucleotide
  Antisense strand to SEQ ID NO: 1430522
cauuaugcaguuaucgagc

SEQ ID NO: 1430524 - RNA, 19 nt, Artificial Sequence
  Description of Artificial Sequence: Synthetic oligonucleotide
  Sense strand starting at position 2974 of SEQ ID NO: 1243637
ucgauaacugcauaauggu

SEQ ID NO: 1430525 - RNA, 19 nt, Artificial Sequence
  Description of Artificial Sequence: Synthetic oligonucleotide
  Antisense strand to SEQ ID NO: 1430524
accauuaugcaguuaucga

SEQ ID NO: 1430526 - RNA, 19 nt, Artificial Sequence
  Description of Artificial Sequence: Synthetic oligonucleotide
  Sense strand starting at position 3039 of SEQ ID NO: 1243637
gucgauguuaucgaaauga

SEQ ID NO: 1430527 - RNA, 19 nt, Artificial Sequence
  Description of Artificial Sequence: Synthetic oligonucleotide
  Antisense strand to SEQ ID NO: 1430526
ucauuucgauaacaucgac

SEQ ID NO: 1430528 - RNA, 19 nt, Artificial Sequence
  Description of Artificial Sequence: Synthetic oligonucleotide
  Sense strand starting at position 3043 of SEQ ID NO: 1243637
auguuaucgaaaugaagca

SEQ ID NO: 1430529 - RNA, 19 nt, Artificial Sequence
  Description of Artificial Sequence: Synthetic oligonucleotide
  Antisense strand to SEQ ID NO: 1430528
ugcuucauuucgauaacau

SEQ ID NO: 1430530 - RNA, 19 nt, Artificial Sequence
  Description of Artificial Sequence: Synthetic oligonucleotide
  Sense strand starting at position 3068 of SEQ ID NO: 1243637
ucugaauugguguggguuu

SEQ ID NO: 1430531 - RNA, 19 nt, Artificial Sequence
  Description of Artificial Sequence: Synthetic oligonucleotide
  Antisense strand to SEQ ID NO: 1430530
aaacccacaccaauucaga

SEQ ID NO: 1430532 - RNA, 19 nt, Artificial Sequence
  Description of Artificial Sequence: Synthetic oligonucleotide
  Sense strand starting at position 3102 of SEQ ID NO: 1243637
agagauagucacggugagu

SEQ ID NO: 1430533 - RNA, 19 nt, Artificial Sequence
  Description of Artificial Sequence: Synthetic oligonucleotide
  Antisense strand to SEQ ID NO: 1430532
acucaccgugacuaucucu

SEQ ID NO: 1430534 - RNA, 19 nt, Artificial Sequence
  Description of Artificial Sequence: Synthetic oligonucleotide
  Sense strand starting at position 3119 of SEQ ID NO: 1243637
gucacuaucucugccagga

SEQ ID NO: 1430535 - RNA, 19 nt, Artificial Sequence
  Description of Artificial Sequence: Synthetic oligonucleotide
  Antisense strand to SEQ ID NO: 1430534
uccuggcagagauagugac

SEQ ID NO: 1430536 - RNA, 19 nt, Artificial Sequence
  Description of Artificial Sequence: Synthetic oligonucleotide
  Sense strand starting at position 3262 of SEQ ID NO: 1243637
agaucaugcuaagaacuaa

SEQ ID NO: 1430537 - RNA, 19 nt, Artificial Sequence
  Description of Artificial Sequence: Synthetic oligonucleotide
  Antisense strand to SEQ ID NO: 1430536
uuaguucuuagcaugaucu

SEQ ID NO: 1430538 - RNA, 19 nt, Artificial Sequence
  Description of Artificial Sequence: Synthetic oligonucleotide
  Sense strand starting at position 3793 of SEQ ID NO: 1243637
uagguccuguggucagaaa

SEQ ID NO: 1430539 - RNA, 19 nt, Artificial Sequence
  Description of Artificial Sequence: Synthetic oligonucleotide
  Antisense strand to SEQ ID NO: 1430538
uuucugaccacaggaccua

SEQ ID NO: 1430540 - RNA, 19 nt, Artificial Sequence
  Description of Artificial Sequence: Synthetic oligonucleotide
  Sense strand starting at position 3892 of SEQ ID NO: 1243637
ggaggaguauuccuagcag

SEQ ID NO: 1430541 - RNA, 19 nt, Artificial Sequence
  Description of Artificial Sequence: Synthetic oligonucleotide
  Antisense strand to SEQ ID NO: 1430540
cugcuaggaauacuccucc

SEQ ID NO: 1430542 - RNA, 19 nt, Artificial Sequence
  Description of Artificial Sequence: Synthetic oligonucleotide
  Sense strand starting at position 3952 of SEQ ID NO: 1243637
cuggaagaccaguguggau

SEQ ID NO: 1430543 - RNA, 19 nt, Artificial Sequence
  Description of Artificial Sequence: Synthetic oligonucleotide
  Antisense strand to SEQ ID NO: 1430542
auccacacuggucuuccag

SEQ ID NO: 1430544 - RNA, 19 nt, Artificial Sequence
  Description of Artificial Sequence: Synthetic oligonucleotide
  Sense strand starting at position 3964 of SEQ ID NO: 1243637
uguggaugguauguauuga

SEQ ID NO: 1430545 - RNA, 19 nt, Artificial Sequence
  Description of Artificial Sequence: Synthetic oligonucleotide
  Antisense strand to SEQ ID NO: 1430544
ucaauacauaccauccaca

SEQ ID NO: 1430546 - RNA, 19 nt, Artificial Sequence
  Description of Artificial Sequence: Synthetic oligonucleotide
  Sense strand starting at position 3972 of SEQ ID NO: 1243637
guauguauugagggaggga

SEQ ID NO: 1430547 - RNA, 19 nt, Artificial Sequence
  Description of Artificial Sequence: Synthetic oligonucleotide
  Antisense strand to SEQ ID NO: 1430546
ucccucccucaauacauac

SEQ ID NO: 1430548 - RNA, 19 nt, Artificial Sequence
  Description of Artificial Sequence: Synthetic oligonucleotide
  Sense strand starting at position 10 of SEQ ID NO: 1243638
agagccuauuaauccagua

SEQ ID NO: 1430549 - RNA, 19 nt, Artificial Sequence
  Description of Artificial Sequence: Synthetic oligonucleotide
  Antisense strand to SEQ ID NO: 1430548
uacuggauuaauaggcucu

SEQ ID NO: 1430550 - RNA, 19 nt, Artificial Sequence
  Description of Artificial Sequence: Synthetic oligonucleotide
  Sense strand starting at position 31 of SEQ ID NO: 1243638
ggacucaagcuuuagugau

SEQ ID NO: 1430551 - RNA, 19 nt, Artificial Sequence
  Description of Artificial Sequence: Synthetic oligonucleotide
  Antisense strand to SEQ ID NO: 1430550
aucacuaaagcuugagucc

SEQ ID NO: 1430552 - RNA, 19 nt, Artificial Sequence
  Description of Artificial Sequence: Synthetic oligonucleotide
  Sense strand starting at position 37 of SEQ ID NO: 1243638
aagcuuuagugauuugcau

SEQ ID NO: 1430553 - RNA, 19 nt, Artificial Sequence
  Description of Artificial Sequence: Synthetic oligonucleotide
  Antisense strand to SEQ ID NO: 1430552
augcaaaucacuaaagcuu

SEQ ID NO: 1430554 - RNA, 19 nt, Artificial Sequence
  Description of Artificial Sequence: Synthetic oligonucleotide
  Sense strand starting at position 43 of SEQ ID NO: 1243638
uagugauuugcaugccugu

SEQ ID NO: 1430555 - RNA, 19 nt, Artificial Sequence
  Description of Artificial Sequence: Synthetic oligonucleotide
  Antisense strand to SEQ ID NO: 1430554
acaggcaugcaaaucacua

SEQ ID NO: 1430556 - RNA, 19 nt, Artificial Sequence
  Description of Artificial Sequence: Synthetic oligonucleotide
  Sense strand starting at position 206 of SEQ ID NO: 1243638
uccagugcucagggucuua

SEQ ID NO: 1430557 - RNA, 19 nt, Artificial Sequence
  Description of Artificial Sequence: Synthetic oligonucleotide
  Antisense strand to SEQ ID NO: 1430556
uaagacccugagcacugga

SEQ ID NO: 1430558 - RNA, 19 nt, Artificial Sequence
  Description of Artificial Sequence: Synthetic oligonucleotide
  Sense strand starting at position 250 of SEQ ID NO: 1243638
augccaagaucagaggaau

SEQ ID NO: 1430559 - RNA, 19 nt, Artificial Sequence
  Description of Artificial Sequence: Synthetic oligonucleotide
  Antisense strand to SEQ ID NO: 1430558
auuccucugaucuuggcau

SEQ ID NO: 1430560 - RNA, 19 nt, Artificial Sequence
  Description of Artificial Sequence: Synthetic oligonucleotide
  Sense strand starting at position 309 of SEQ ID NO: 1243638
gauguucuguaccuuuaag

SEQ ID NO: 1430561 - RNA, 19 nt, Artificial Sequence
  Description of Artificial Sequence: Synthetic oligonucleotide
  Antisense strand to SEQ ID NO: 1430560
cuuaaagguacagaacauc

SEQ ID NO: 1430562 - RNA, 19 nt, Artificial Sequence
  Description of Artificial Sequence: Synthetic oligonucleotide
  Sense strand starting at position 345 of SEQ ID NO: 1243638
gugcuaagaguccaagcuu

SEQ ID NO: 1430563 - RNA, 19 nt, Artificial Sequence
  Description of Artificial Sequence: Synthetic oligonucleotide
  Antisense strand to SEQ ID NO: 1430562
aagcuuggacucuuagcac

SEQ ID NO: 1430564 - RNA, 19 nt, Artificial Sequence
  Description of Artificial Sequence: Synthetic oligonucleotide
  Sense strand starting at position 396 of SEQ ID NO: 1243638
gguacuaauuugggaagga

SEQ ID NO: 1430565 - RNA, 19 nt, Artificial Sequence
  Description of Artificial Sequence: Synthetic oligonucleotide
  Antisense strand to SEQ ID NO: 1430564
uccuucccaaauuaguacc

SEQ ID NO: 1430566 - RNA, 19 nt, Artificial Sequence
  Description of Artificial Sequence: Synthetic oligonucleotide
  Sense strand starting at position 397 of SEQ ID NO: 1243638
guacuaauuugggaaggac

SEQ ID NO: 1430567 - RNA, 19 nt, Artificial Sequence
  Description of Artificial Sequence: Synthetic oligonucleotide
  Antisense strand to SEQ ID NO: 1430566
guccuucccaaauuaguac

SEQ ID NO: 1430568 - RNA, 19 nt, Artificial Sequence
  Description of Artificial Sequence: Synthetic oligonucleotide
  Sense strand starting at position 439 of SEQ ID NO: 1243638
ggcuacuaguugccagaau

SEQ ID NO: 1430569 - RNA, 19 nt, Artificial Sequence
  Description of Artificial Sequence: Synthetic oligonucleotide
  Antisense strand to SEQ ID NO: 1430568
auucuggcaacuaguagcc

SEQ ID NO: 1430570 - RNA, 19 nt, Artificial Sequence
  Description of Artificial Sequence: Synthetic oligonucleotide
  Sense strand starting at position 476 of SEQ ID NO: 1243638
gguguuccuugaucaguaa

SEQ ID NO: 1430571 - RNA, 19 nt, Artificial Sequence
  Description of Artificial Sequence: Synthetic oligonucleotide
  Antisense strand to SEQ ID NO: 1430570
uuacugaucaaggaacacc

SEQ ID NO: 1430572 - RNA, 19 nt, Artificial Sequence
  Description of Artificial Sequence: Synthetic oligonucleotide
  Sense strand starting at position 479 of SEQ ID NO: 1243638
guuccuugaucaguaacua

SEQ ID NO: 1430573 - RNA, 19 nt, Artificial Sequence
  Description of Artificial Sequence: Synthetic oligonucleotide
  Antisense strand to SEQ ID NO: 1430572
uaguuacugaucaaggaac

SEQ ID NO: 1430574 - RNA, 19 nt, Artificial Sequence
  Description of Artificial Sequence: Synthetic oligonucleotide
  Sense strand starting at position 592 of SEQ ID NO: 1243638
agguuaaccucacuaauug

SEQ ID NO: 1430575 - RNA, 19 nt, Artificial Sequence
  Description of Artificial Sequence: Synthetic oligonucleotide
  Antisense strand to SEQ ID NO: 1430574
caauuagugagguuaaccu

SEQ ID NO: 1430576 - RNA, 19 nt, Artificial Sequence
  Description of Artificial Sequence: Synthetic oligonucleotide
  Sense strand starting at position 1601 of SEQ ID NO: 1243638
gaaagaugggccugccuga

SEQ ID NO: 1430577 - RNA, 19 nt, Artificial Sequence
  Description of Artificial Sequence: Synthetic oligonucleotide
  Antisense strand to SEQ ID NO: 1430576
ucaggcaggcccaucuuuc

SEQ ID NO: 1430578 - RNA, 19 nt, Artificial Sequence
  Description of Artificial Sequence: Synthetic oligonucleotide
  Sense strand starting at position 2280 of SEQ ID NO: 1243638
ccuugucucgaagggucaa

SEQ ID NO: 1430579 - RNA, 19 nt, Artificial Sequence
  Description of Artificial Sequence: Synthetic oligonucleotide
  Antisense strand to SEQ ID NO: 1430578
uugacccuucgagacaagg

SEQ ID NO: 1430580 - RNA, 19 nt, Artificial Sequence
  Description of Artificial Sequence: Synthetic oligonucleotide
  Sense strand starting at position 2409 of SEQ ID NO: 1243638
uuccuuguagcguauaauu

SEQ ID NO: 1430581 - RNA, 19 nt, Artificial Sequence
  Description of Artificial Sequence: Synthetic oligonucleotide
  Antisense strand to SEQ ID NO: 1430580
aauuauacgcuacaaggaa

SEQ ID NO: 1430582 - RNA, 19 nt, Artificial Sequence
  Description of Artificial Sequence: Synthetic oligonucleotide
  Sense strand starting at position 2420 of SEQ ID NO: 1243638
guauaauuggguuggccau

SEQ ID NO: 1430583 - RNA, 19 nt, Artificial Sequence
  Description of Artificial Sequence: Synthetic oligonucleotide
  Antisense strand to SEQ ID NO: 1430582
auggccaacccaauuauac

SEQ ID NO: 1430584 - RNA, 19 nt, Artificial Sequence
  Description of Artificial Sequence: Synthetic oligonucleotide
  Sense strand starting at position 2427 of SEQ ID NO: 1243638
uggguuggccauuaauaau

SEQ ID NO: 1430585 - RNA, 19 nt, Artificial Sequence
  Description of Artificial Sequence: Synthetic oligonucleotide
  Antisense strand to SEQ ID NO: 1430584
auuauuaauggccaaccca

SEQ ID NO: 1430586 - RNA, 19 nt, Artificial Sequence
  Description of Artificial Sequence: Synthetic oligonucleotide
  Sense strand starting at position 2438 of SEQ ID NO: 1243638
uuaauaauugcucgauaac

SEQ ID NO: 1430587 - RNA, 19 nt, Artificial Sequence
  Description of Artificial Sequence: Synthetic oligonucleotide
  Antisense strand to SEQ ID NO: 1430586
guuaucgagcaauuauuaa

SEQ ID NO: 1430588 - RNA, 19 nt, Artificial Sequence
  Description of Artificial Sequence: Synthetic oligonucleotide
  Sense strand starting at position 2447 of SEQ ID NO: 1243638
gcucgauaacugcauaaug

SEQ ID NO: 1430589 - RNA, 19 nt, Artificial Sequence
  Description of Artificial Sequence: Synthetic oligonucleotide
  Antisense strand to SEQ ID NO: 1430588
cauuaugcaguuaucgagc

SEQ ID NO: 1430590 - RNA, 19 nt, Artificial Sequence
  Description of Artificial Sequence: Synthetic oligonucleotide
  Sense strand starting at position 2449 of SEQ ID NO: 1243638
ucgauaacugcauaauggu

SEQ ID NO: 1430591 - RNA, 19 nt, Artificial Sequence
  Description of Artificial Sequence: Synthetic oligonucleotide
  Antisense strand to SEQ ID NO: 1430590
accauuaugcaguuaucga

SEQ ID NO: 1430592 - RNA, 19 nt, Artificial Sequence
  Description of Artificial Sequence: Synthetic oligonucleotide
  Sense strand starting at position 2514 of SEQ ID NO: 1243638
gucgauguuaucgaaauga

SEQ ID NO: 1430593 - RNA, 19 nt, Artificial Sequence
  Description of Artificial Sequence: Synthetic oligonucleotide
  Antisense strand to SEQ ID NO: 1430592
ucauuucgauaacaucgac

SEQ ID NO: 1430594 - RNA, 19 nt, Artificial Sequence
  Description of Artificial Sequence: Synthetic oligonucleotide
  Sense strand starting at position 2518 of SEQ ID NO: 1243638
auguuaucgaaaugaagca

SEQ ID NO: 1430595 - RNA, 19 nt, Artificial Sequence
  Description of Artificial Sequence: Synthetic oligonucleotide
  Antisense strand to SEQ ID NO: 1430594
ugcuucauuucgauaacau

SEQ ID NO: 1430596 - RNA, 19 nt, Artificial Sequence
  Description of Artificial Sequence: Synthetic oligonucleotide
  Sense strand starting at position 2543 of SEQ ID NO: 1243638
ucugaauugguguggguuu

SEQ ID NO: 1430597 - RNA, 19 nt, Artificial Sequence
  Description of Artificial Sequence: Synthetic oligonucleotide
  Antisense strand to SEQ ID NO: 1430596
aaacccacaccaauucaga

SEQ ID NO: 1430598 - RNA, 19 nt, Artificial Sequence
  Description of Artificial Sequence: Synthetic oligonucleotide
  Sense strand starting at position 2577 of SEQ ID NO: 1243638
agagauagucacggugagu

SEQ ID NO: 1430599 - RNA, 19 nt, Artificial Sequence
  Description of Artificial Sequence: Synthetic oligonucleotide
  Antisense strand to SEQ ID NO: 1430598
acucaccgugacuaucucu

SEQ ID NO: 1430600 - RNA, 19 nt, Artificial Sequence
  Description of Artificial Sequence: Synthetic oligonucleotide
  Sense strand starting at position 2594 of SEQ ID NO: 1243638
gucacuaucucugccagga

SEQ ID NO: 1430601 - RNA, 19 nt, Artificial Sequence
  Description of Artificial Sequence: Synthetic oligonucleotide
  Antisense strand to SEQ ID NO: 1430600
uccuggcagagauagugac

SEQ ID NO: 1430602 - RNA, 19 nt, Artificial Sequence
  Description of Artificial Sequence: Synthetic oligonucleotide
  Sense strand starting at position 2737 of SEQ ID NO: 1243638
agaucaugcuaagaacuaa

SEQ ID NO: 1430603 - RNA, 19 nt, Artificial Sequence
  Description of Artificial Sequence: Synthetic oligonucleotide
  Antisense strand to SEQ ID NO: 1430602
uuaguucuuagcaugaucu

SEQ ID NO: 1430604 - RNA, 19 nt, Artificial Sequence
  Description of Artificial Sequence: Synthetic oligonucleotide
  Sense strand starting at position 3268 of SEQ ID NO: 1243638
uagguccuguggucagaaa

SEQ ID NO: 1430605 - RNA, 19 nt, Artificial Sequence
  Description of Artificial Sequence: Synthetic oligonucleotide
  Antisense strand to SEQ ID NO: 1430604
uuucugaccacaggaccua

SEQ ID NO: 1430606 - RNA, 19 nt, Artificial Sequence
  Description of Artificial Sequence: Synthetic oligonucleotide
  Sense strand starting at position 3367 of SEQ ID NO: 1243638
ggaggaguauuccuagcag

SEQ ID NO: 1430607 - RNA, 19 nt, Artificial Sequence
  Description of Artificial Sequence: Synthetic oligonucleotide
  Antisense strand to SEQ ID NO: 1430606
cugcuaggaauacuccucc

SEQ ID NO: 1430608 - RNA, 19 nt, Artificial Sequence
  Description of Artificial Sequence: Synthetic oligonucleotide
  Sense strand starting at position 3408 of SEQ ID NO: 1243638
ggaaacaacuucugguaaa

SEQ ID NO: 1430609 - RNA, 19 nt, Artificial Sequence
  Description of Artificial Sequence: Synthetic oligonucleotide
  Antisense strand to SEQ ID NO: 1430608
uuuaccagaaguuguuucc

SEQ ID NO: 1430610 - RNA, 19 nt, Artificial Sequence
  Description of Artificial Sequence: Synthetic oligonucleotide
  Sense strand starting at position 3427 of SEQ ID NO: 1243638
cuggaagaccaguguggau

SEQ ID NO: 1430611 - RNA, 19 nt, Artificial Sequence
  Description of Artificial Sequence: Synthetic oligonucleotide
  Antisense strand to SEQ ID NO: 1430610
auccacacuggucuuccag

SEQ ID NO: 1430612 - RNA, 19 nt, Artificial Sequence
  Description of Artificial Sequence: Synthetic oligonucleotide
  Sense strand starting at position 3439 of SEQ ID NO: 1243638
uguggaugguauguauuga

SEQ ID NO: 1430613 - RNA, 19 nt, Artificial Sequence
  Description of Artificial Sequence: Synthetic oligonucleotide
  Antisense strand to SEQ ID NO: 1430612
ucaauacauaccauccaca

SEQ ID NO: 1430614 - RNA, 19 nt, Artificial Sequence
  Description of Artificial Sequence: Synthetic oligonucleotide
  Sense strand starting at position 3447 of SEQ ID NO: 1243638
guauguauugagggaggga

SEQ ID NO: 1430615 - RNA, 19 nt, Artificial Sequence
  Description of Artificial Sequence: Synthetic oligonucleotide
  Antisense strand to SEQ ID NO: 1430614
ucccucccucaauacauac

SEQ ID NO: 1430616 - RNA, 19 nt, Artificial Sequence
  Description of Artificial Sequence: Synthetic oligonucleotide
  Sense strand starting at position 3528 of SEQ ID NO: 1243638
ugggcugccuuaguaaaua

SEQ ID NO: 1430617 - RNA, 19 nt, Artificial Sequence
  Description of Artificial Sequence: Synthetic oligonucleotide
  Antisense strand to SEQ ID NO: 1430616
uauuuacuaaggcagccca

SEQ ID NO: 1430618 - RNA, 19 nt, Artificial Sequence
  Description of Artificial Sequence: Synthetic oligonucleotide
  Sense strand starting at position 3547 of SEQ ID NO: 1243638
cuuaguauuugccauagua

SEQ ID NO: 1430619 - RNA, 19 nt, Artificial Sequence
  Description of Artificial Sequence: Synthetic oligonucleotide
  Antisense strand to SEQ ID NO: 1430618
uacuauggcaaauacuaag

SEQ ID NO: 1430620 - RNA, 19 nt, Artificial Sequence
  Description of Artificial Sequence: Synthetic oligonucleotide
  Sense strand starting at position 3706 of SEQ ID NO: 1243638
uacucagacucagugaagu

SEQ ID NO: 1430621 - RNA, 19 nt, Artificial Sequence
  Description of Artificial Sequence: Synthetic oligonucleotide
  Antisense strand to SEQ ID NO: 1430620
acuucacugagucugagua

SEQ ID NO: 1430622 - RNA, 19 nt, Artificial Sequence
  Description of Artificial Sequence: Synthetic oligonucleotide
  Sense strand starting at position 3717 of SEQ ID NO: 1243638
agugaagucuucccuggac

SEQ ID NO: 1430623 - RNA, 19 nt, Artificial Sequence
  Description of Artificial Sequence: Synthetic oligonucleotide
  Antisense strand to SEQ ID NO: 1430622
guccagggaagacuucacu

SEQ ID NO: 1430624 - RNA, 19 nt, Artificial Sequence
  Description of Artificial Sequence: Synthetic oligonucleotide
  Sense strand starting at position 3719 of SEQ ID NO: 1243638
ugaagucuucccuggacuc

SEQ ID NO: 1430625 - RNA, 19 nt, Artificial Sequence
  Description of Artificial Sequence: Synthetic oligonucleotide
  Antisense strand to SEQ ID NO: 1430624
gaguccagggaagacuuca

SEQ ID NO: 1430626 - RNA, 19 nt, Artificial Sequence
  Description of Artificial Sequence: Synthetic oligonucleotide
  Sense strand starting at position 3720 of SEQ ID NO: 1243638
gaagucuucccuggacucu

SEQ ID NO: 1430627 - RNA, 19 nt, Artificial Sequence
  Description of Artificial Sequence: Synthetic oligonucleotide
  Antisense strand to SEQ ID NO: 1430626
agaguccagggaagacuuc

SEQ ID NO: 1430628 - RNA, 19 nt, Artificial Sequence
  Description of Artificial Sequence: Synthetic oligonucleotide
  Sense strand starting at position 159 of SEQ ID NO: 1243639
cguguacccacuuaagaag

SEQ ID NO: 1430629 - RNA, 19 nt, Artificial Sequence
  Description of Artificial Sequence: Synthetic oligonucleotide
  Antisense strand to SEQ ID NO: 1430628
cuucuuaaguggguacacg

SEQ ID NO: 1430630 - RNA, 19 nt, Artificial Sequence
  Description of Artificial Sequence: Synthetic oligonucleotide
  Sense strand starting at position 654 of SEQ ID NO: 1243639
cccauuucugucugguacu

SEQ ID NO: 1430631 - RNA, 19 nt, Artificial Sequence
  Description of Artificial Sequence: Synthetic oligonucleotide
  Antisense strand to SEQ ID NO: 1430630
aguaccagacagaaauggg

SEQ ID NO: 1430632 - RNA, 19 nt, Artificial Sequence
  Description of Artificial Sequence: Synthetic oligonucleotide
  Sense strand starting at position 1030 of SEQ ID NO: 1243639
acuugcucacuucggauau

SEQ ID NO: 1430633 - RNA, 19 nt, Artificial Sequence
  Description of Artificial Sequence: Synthetic oligonucleotide
  Antisense strand to SEQ ID NO: 1430632
auauccgaagugagcaagu

SEQ ID NO: 1430634 - RNA, 19 nt, Artificial Sequence
  Description of Artificial Sequence: Synthetic oligonucleotide
  Sense strand starting at position 1034 of SEQ ID NO: 1243639
gcucacuucggauauguau

SEQ ID NO: 1430635 - RNA, 19 nt, Artificial Sequence
  Description of Artificial Sequence: Synthetic oligonucleotide
  Antisense strand to SEQ ID NO: 1430634
auacauauccgaagugagc

SEQ ID NO: 1430636 - RNA, 19 nt, Artificial Sequence
  Description of Artificial Sequence: Synthetic oligonucleotide
  Sense strand starting at position 1107 of SEQ ID NO: 1243639
aaacauugggcagguaaua

SEQ ID NO: 1430637 - RNA, 19 nt, Artificial Sequence
  Description of Artificial Sequence: Synthetic oligonucleotide
  Antisense strand to SEQ ID NO: 1430636
uauuaccugcccaauguuu

SEQ ID NO: 1430638 - RNA, 19 nt, Artificial Sequence
  Description of Artificial Sequence: Synthetic oligonucleotide
  Sense strand starting at position 1140 of SEQ ID NO: 1243639
aaauguaaguaguucguuu

SEQ ID NO: 1430639 - RNA, 19 nt, Artificial Sequence
  Description of Artificial Sequence: Synthetic oligonucleotide
  Antisense strand to SEQ ID NO: 1430638
aaacgaacuacuuacauuu

SEQ ID NO: 1430640 - RNA, 19 nt, Artificial Sequence
  Description of Artificial Sequence: Synthetic oligonucleotide
  Sense strand starting at position 1167 of SEQ ID NO: 1243639
ggguuccaguaguuagcaa

SEQ ID NO: 1430641 - RNA, 19 nt, Artificial Sequence
  Description of Artificial Sequence: Synthetic oligonucleotide
  Antisense strand to SEQ ID NO: 1430640
uugcuaacuacuggaaccc

SEQ ID NO: 1430642 - RNA, 19 nt, Artificial Sequence
  Description of Artificial Sequence: Synthetic oligonucleotide
  Sense strand starting at position 1168 of SEQ ID NO: 1243639
gguuccaguaguuagcaaa

SEQ ID NO: 1430643 - RNA, 19 nt, Artificial Sequence
  Description of Artificial Sequence: Synthetic oligonucleotide
  Antisense strand to SEQ ID NO: 1430642
uuugcuaacuacuggaacc

SEQ ID NO: 1430644 - RNA, 19 nt, Artificial Sequence
  Description of Artificial Sequence: Synthetic oligonucleotide
  Sense strand starting at position 1179 of SEQ ID NO: 1243639
uuagcaaacuugccaaagu

SEQ ID NO: 1430645 - RNA, 19 nt, Artificial Sequence
  Description of Artificial Sequence: Synthetic oligonucleotide
  Antisense strand to SEQ ID NO: 1430644
acuuuggcaaguuugcuaa

SEQ ID NO: 1430646 - RNA, 19 nt, Artificial Sequence
  Description of Artificial Sequence: Synthetic oligonucleotide
  Sense strand starting at position 1373 of SEQ ID NO: 1243639
agacuuccauaauaagguu

SEQ ID NO: 1430647 - RNA, 19 nt, Artificial Sequence
  Description of Artificial Sequence: Synthetic oligonucleotide
  Antisense strand to SEQ ID NO: 1430646
aaccuuauuauggaagucu

SEQ ID NO: 1430648 - RNA, 19 nt, Artificial Sequence
  Description of Artificial Sequence: Synthetic oligonucleotide
  Sense strand starting at position 1381 of SEQ ID NO: 1243639
auaauaagguucuaaagag

SEQ ID NO: 1430649 - RNA, 19 nt, Artificial Sequence
  Description of Artificial Sequence: Synthetic oligonucleotide
  Antisense strand to SEQ ID NO: 1430648
cucuuuagaaccuuauuau

SEQ ID NO: 1430650 - RNA, 19 nt, Artificial Sequence
  Description of Artificial Sequence: Synthetic oligonucleotide
  Sense strand starting at position 1414 of SEQ ID NO: 1243639
gauccacgguccucaaaga

SEQ ID NO: 1430651 - RNA, 19 nt, Artificial Sequence
  Description of Artificial Sequence: Synthetic oligonucleotide
  Antisense strand to SEQ ID NO: 1430650
ucuuugaggaccguggauc

SEQ ID NO: 1430652 - RNA, 19 nt, Artificial Sequence
  Description of Artificial Sequence: Synthetic oligonucleotide
  Sense strand starting at position 1484 of SEQ ID NO: 1243639
ggaacuucuaugggcuuua

SEQ ID NO: 1430653 - RNA, 19 nt, Artificial Sequence
  Description of Artificial Sequence: Synthetic oligonucleotide
  Antisense strand to SEQ ID NO: 1430652
uaaagcccauagaaguucc

SEQ ID NO: 1430654 - RNA, 19 nt, Artificial Sequence
  Description of Artificial Sequence: Synthetic oligonucleotide
  Sense strand starting at position 1489 of SEQ ID NO: 1243639
uucuaugggcuuuagcaau

SEQ ID NO: 1430655 - RNA, 19 nt, Artificial Sequence
  Description of Artificial Sequence: Synthetic oligonucleotide
  Antisense strand to SEQ ID NO: 1430654
auugcuaaagcccauagaa

SEQ ID NO: 1430656 - RNA, 19 nt, Artificial Sequence
  Description of Artificial Sequence: Synthetic oligonucleotide
  Sense strand starting at position 1572 of SEQ ID NO: 1243639
agaagagucccggagcaga

SEQ ID NO: 1430657 - RNA, 19 nt, Artificial Sequence
  Description of Artificial Sequence: Synthetic oligonucleotide
  Antisense strand to SEQ ID NO: 1430656
ucugcuccgggacucuucu

SEQ ID NO: 1430658 - RNA, 19 nt, Artificial Sequence
  Description of Artificial Sequence: Synthetic oligonucleotide
  Sense strand starting at position 1732 of SEQ ID NO: 1243639
cuaccuuuccgccggaaga

SEQ ID NO: 1430659 - RNA, 19 nt, Artificial Sequence
  Description of Artificial Sequence: Synthetic oligonucleotide
  Antisense strand to SEQ ID NO: 1430658
ucuuccggcggaaagguag

SEQ ID NO: 1430660 - RNA, 19 nt, Artificial Sequence
  Description of Artificial Sequence: Synthetic oligonucleotide
  Sense strand starting at position 1733 of SEQ ID NO: 1243639
uaccuuuccgccggaagaa

SEQ ID NO: 1430661 - RNA, 19 nt, Artificial Sequence
  Description of Artificial Sequence: Synthetic oligonucleotide
  Antisense strand to SEQ ID NO: 1430660
uucuuccggcggaaaggua

SEQ ID NO: 1430662 - RNA, 19 nt, Artificial Sequence
  Description of Artificial Sequence: Synthetic oligonucleotide
  Sense strand starting at position 1937 of SEQ ID NO: 1243639
gccgccauauuaucaacaa

SEQ ID NO: 1430663 - RNA, 19 nt, Artificial Sequence
  Description of Artificial Sequence: Synthetic oligonucleotide
  Antisense strand to SEQ ID NO: 1430662
uuguugauaauauggcggc

SEQ ID NO: 1430664 - RNA, 19 nt, Artificial Sequence
  Description of Artificial Sequence: Synthetic oligonucleotide
  Sense strand starting at position 2464 of SEQ ID NO: 1243639
gaugcagaacccugauuag

SEQ ID NO: 1430665 - RNA, 19 nt, Artificial Sequence
  Description of Artificial Sequence: Synthetic oligonucleotide
  Antisense strand to SEQ ID NO: 1430664
cuaaucaggguucugcauc

SEQ ID NO: 1430666 - RNA, 19 nt, Artificial Sequence
  Description of Artificial Sequence: Synthetic oligonucleotide
  Sense strand starting at position 2467 of SEQ ID NO: 1243639
gcagaacccugauuaggaa

SEQ ID NO: 1430667 - RNA, 19 nt, Artificial Sequence
  Description of Artificial Sequence: Synthetic oligonucleotide
  Antisense strand to SEQ ID NO: 1430666
uuccuaaucaggguucugc

SEQ ID NO: 1430668 - RNA, 19 nt, Artificial Sequence
  Description of Artificial Sequence: Synthetic oligonucleotide
  Sense strand starting at position 2513 of SEQ ID NO: 1243639
agcagcucccuggaucauu

SEQ ID NO: 1430669 - RNA, 19 nt, Artificial Sequence
  Description of Artificial Sequence: Synthetic oligonucleotide
  Antisense strand to SEQ ID NO: 1430668
aaugauccagggagcugcu

SEQ ID NO: 1430670 - RNA, 19 nt, Artificial Sequence
  Description of Artificial Sequence: Synthetic oligonucleotide
  Sense strand starting at position 2521 of SEQ ID NO: 1243639
ccuggaucauuagcgaaug

SEQ ID NO: 1430671 - RNA, 19 nt, Artificial Sequence
  Description of Artificial Sequence: Synthetic oligonucleotide
  Antisense strand to SEQ ID NO: 1430670
cauucgcuaaugauccagg

SEQ ID NO: 1430672 - RNA, 19 nt, Artificial Sequence
  Description of Artificial Sequence: Synthetic oligonucleotide
  Sense strand starting at position 2612 of SEQ ID NO: 1243639
aagccucgccaguauuuaa

SEQ ID NO: 1430673 - RNA, 19 nt, Artificial Sequence
  Description of Artificial Sequence: Synthetic oligonucleotide
  Antisense strand to SEQ ID NO: 1430672
uuaaauacuggcgaggcuu

SEQ ID NO: 1430674 - RNA, 19 nt, Artificial Sequence
  Description of Artificial Sequence: Synthetic oligonucleotide
  Sense strand starting at position 2642 of SEQ ID NO: 1243639
agugaaucauccuugcuca

SEQ ID NO: 1430675 - RNA, 19 nt, Artificial Sequence
  Description of Artificial Sequence: Synthetic oligonucleotide
  Antisense strand to SEQ ID NO: 1430674
ugagcaaggaugauucacu

SEQ ID NO: 1430676 - RNA, 19 nt, Artificial Sequence
  Description of Artificial Sequence: Synthetic oligonucleotide
  Sense strand starting at position 2643 of SEQ ID NO: 1243639
gugaaucauccuugcucaa

SEQ ID NO: 1430677 - RNA, 19 nt, Artificial Sequence
  Description of Artificial Sequence: Synthetic oligonucleotide
  Antisense strand to SEQ ID NO: 1430676
uugagcaaggaugauucac

SEQ ID NO: 1430678 - RNA, 19 nt, Artificial Sequence
  Description of Artificial Sequence: Synthetic oligonucleotide
  Sense strand starting at position 2724 of SEQ ID NO: 1243639
ugucuuuggugcuucuuaa

SEQ ID NO: 1430679 - RNA, 19 nt, Artificial Sequence
  Description of Artificial Sequence: Synthetic oligonucleotide
  Antisense strand to SEQ ID NO: 1430678
uuaagaagcaccaaagaca

SEQ ID NO: 1430680 - RNA, 19 nt, Artificial Sequence
  Description of Artificial Sequence: Synthetic oligonucleotide
  Sense strand starting at position 2812 of SEQ ID NO: 1243639
agguaauaguaacucaaua

SEQ ID NO: 1430681 - RNA, 19 nt, Artificial Sequence
  Description of Artificial Sequence: Synthetic oligonucleotide
  Antisense strand to SEQ ID NO: 1430680
uauugaguuacuauuaccu

SEQ ID NO: 1430682 - RNA, 19 nt, Artificial Sequence
  Description of Artificial Sequence: Synthetic oligonucleotide
  Sense strand starting at position 2854 of SEQ ID NO: 1243639
caaugaaguuuaucaugug

SEQ ID NO: 1430683 - RNA, 19 nt, Artificial Sequence
  Description of Artificial Sequence: Synthetic oligonucleotide
  Antisense strand to SEQ ID NO: 1430682
cacaugauaaacuucauug

SEQ ID NO: 1430684 - RNA, 19 nt, Artificial Sequence
  Description of Artificial Sequence: Synthetic oligonucleotide
  Sense strand starting at position 2859 of SEQ ID NO: 1243639
aaguuuaucaugugacgga

SEQ ID NO: 1430685 - RNA, 19 nt, Artificial Sequence
  Description of Artificial Sequence: Synthetic oligonucleotide
  Antisense strand to SEQ ID NO: 1430684
uccgucacaugauaaacuu

SEQ ID NO: 1430686 - RNA, 19 nt, Artificial Sequence
  Description of Artificial Sequence: Synthetic oligonucleotide
  Sense strand starting at position 3034 of SEQ ID NO: 1243639
ugcucaaucgcagauggaa

SEQ ID NO: 1430687 - RNA, 19 nt, Artificial Sequence
  Description of Artificial Sequence: Synthetic oligonucleotide
  Antisense strand to SEQ ID NO: 1430686
uuccaucugcgauugagca

SEQ ID NO: 1430688 - RNA, 19 nt, Artificial Sequence
  Description of Artificial Sequence: Synthetic oligonucleotide
  Sense strand starting at position 3050 of SEQ ID NO: 1243639
gaacgaugucgagagcaca

SEQ ID NO: 1430689 - RNA, 19 nt, Artificial Sequence
  Description of Artificial Sequence: Synthetic oligonucleotide
  Antisense strand to SEQ ID NO: 1430688
ugugcucucgacaucguuc

SEQ ID NO: 1430690 - RNA, 19 nt, Artificial Sequence
  Description of Artificial Sequence: Synthetic oligonucleotide
  Sense strand starting at position 3125 of SEQ ID NO: 1243639
ugcuauguccugcauccau

SEQ ID NO: 1430691 - RNA, 19 nt, Artificial Sequence
  Description of Artificial Sequence: Synthetic oligonucleotide
  Antisense strand to SEQ ID NO: 1430690
auggaugcaggacauagca

SEQ ID NO: 1430692 - RNA, 19 nt, Artificial Sequence
  Description of Artificial Sequence: Synthetic oligonucleotide
  Sense strand starting at position 3175 of SEQ ID NO: 1243639
gauagccgauuugcuaaua

SEQ ID NO: 1430693 - RNA, 19 nt, Artificial Sequence
  Description of Artificial Sequence: Synthetic oligonucleotide
  Antisense strand to SEQ ID NO: 1430692
uauuagcaaaucggcuauc

SEQ ID NO: 1430694 - RNA, 19 nt, Artificial Sequence
  Description of Artificial Sequence: Synthetic oligonucleotide
  Sense strand starting at position 3241 of SEQ ID NO: 1243639
gaggaaguugcuuaccgaa

SEQ ID NO: 1430695 - RNA, 19 nt, Artificial Sequence
  Description of Artificial Sequence: Synthetic oligonucleotide
  Antisense strand to SEQ ID NO: 1430694
uucgguaagcaacuuccuc

SEQ ID NO: 1430696 - RNA, 19 nt, Artificial Sequence
  Description of Artificial Sequence: Synthetic oligonucleotide
  Sense strand starting at position 3243 of SEQ ID NO: 1243639
ggaaguugcuuaccgaaag

SEQ ID NO: 1430697 - RNA, 19 nt, Artificial Sequence
  Description of Artificial Sequence: Synthetic oligonucleotide
  Antisense strand to SEQ ID NO: 1430696
cuuucgguaagcaacuucc

SEQ ID NO: 1430698 - RNA, 19 nt, Artificial Sequence
  Description of Artificial Sequence: Synthetic oligonucleotide
  Sense strand starting at position 3249 of SEQ ID NO: 1243639
ugcuuaccgaaagguuuaa

SEQ ID NO: 1430699 - RNA, 19 nt, Artificial Sequence
  Description of Artificial Sequence: Synthetic oligonucleotide
  Antisense strand to SEQ ID NO: 1430698
uuaaaccuuucgguaagca

SEQ ID NO: 1430700 - RNA, 19 nt, Artificial Sequence
  Description of Artificial Sequence: Synthetic oligonucleotide
  Sense strand starting at position 3491 of SEQ ID NO: 1243639
cuacaagaauguccaaguu

SEQ ID NO: 1430701 - RNA, 19 nt, Artificial Sequence
  Description of Artificial Sequence: Synthetic oligonucleotide
  Antisense strand to SEQ ID NO: 1430700
aacuuggacauucuuguag

SEQ ID NO: 1430702 - RNA, 19 nt, Artificial Sequence
  Description of Artificial Sequence: Synthetic oligonucleotide
  Sense strand starting at position 3583 of SEQ ID NO: 1243639
auuguuagagcagguuaaa

SEQ ID NO: 1430703 - RNA, 19 nt, Artificial Sequence
  Description of Artificial Sequence: Synthetic oligonucleotide
  Antisense strand to SEQ ID NO: 1430702
uuuaaccugcucuaacaau

SEQ ID NO: 1430704 - RNA, 19 nt, Artificial Sequence
  Description of Artificial Sequence: Synthetic oligonucleotide
  Sense strand starting at position 3951 of SEQ ID NO: 1243639
gugcaugaaagguaaccaa

SEQ ID NO: 1430705 - RNA, 19 nt, Artificial Sequence
  Description of Artificial Sequence: Synthetic oligonucleotide
  Antisense strand to SEQ ID NO: 1430704
uugguuaccuuucaugcac

SEQ ID NO: 1430706 - RNA, 19 nt, Artificial Sequence
  Description of Artificial Sequence: Synthetic oligonucleotide
  Sense strand starting at position 3977 of SEQ ID NO: 1243639
auggaaauuuacuaugcga

SEQ ID NO: 1430707 - RNA, 19 nt, Artificial Sequence
  Description of Artificial Sequence: Synthetic oligonucleotide
  Antisense strand to SEQ ID NO: 1430706
ucgcauaguaaauuuccau

SEQ ID NO: 1430708 - RNA, 19 nt, Artificial Sequence
  Description of Artificial Sequence: Synthetic oligonucleotide
  Sense strand starting at position 410 of SEQ ID NO: 1243640
ccucuuaugcaauguuuga

SEQ ID NO: 1430709 - RNA, 19 nt, Artificial Sequence
  Description of Artificial Sequence: Synthetic oligonucleotide
  Antisense strand to SEQ ID NO: 1430708
ucaaacauugcauaagagg

SEQ ID NO: 1430710 - RNA, 19 nt, Artificial Sequence
  Description of Artificial Sequence: Synthetic oligonucleotide
  Sense strand starting at position 414 of SEQ ID NO: 1243640
uuaugcaauguuugacuuu

SEQ ID NO: 1430711 - RNA, 19 nt, Artificial Sequence
  Description of Artificial Sequence: Synthetic oligonucleotide
  Antisense strand to SEQ ID NO: 1430710
aaagucaaacauugcauaa

SEQ ID NO: 1430712 - RNA, 19 nt, Artificial Sequence
  Description of Artificial Sequence: Synthetic oligonucleotide
  Sense strand starting at position 433 of SEQ ID NO: 1243640
uugcaaugagcuuguauuu

SEQ ID NO: 1430713 - RNA, 19 nt, Artificial Sequence
  Description of Artificial Sequence: Synthetic oligonucleotide
  Antisense strand to SEQ ID NO: 1430712
aaauacaagcucauugcaa

SEQ ID NO: 1430714 - RNA, 19 nt, Artificial Sequence
  Description of Artificial Sequence: Synthetic oligonucleotide
  Sense strand starting at position 478 of SEQ ID NO: 1243640
ggcacuacaugcucaugaa

SEQ ID NO: 1430715 - RNA, 19 nt, Artificial Sequence
  Description of Artificial Sequence: Synthetic oligonucleotide
  Antisense strand to SEQ ID NO: 1430714
uucaugagcauguagugcc

SEQ ID NO: 1430716 - RNA, 19 nt, Artificial Sequence
  Description of Artificial Sequence: Synthetic oligonucleotide
  Sense strand starting at position 479 of SEQ ID NO: 1243640
gcacuacaugcucaugaaa

SEQ ID NO: 1430717 - RNA, 19 nt, Artificial Sequence
  Description of Artificial Sequence: Synthetic oligonucleotide
  Antisense strand to SEQ ID NO: 1430716
uuucaugagcauguagugc

SEQ ID NO: 1430718 - RNA, 19 nt, Artificial Sequence
  Description of Artificial Sequence: Synthetic oligonucleotide
  Sense strand starting at position 618 of SEQ ID NO: 1243640
cugagauacucagcccacu

SEQ ID NO: 1430719 - RNA, 19 nt, Artificial Sequence
  Description of Artificial Sequence: Synthetic oligonucleotide
  Antisense strand to SEQ ID NO: 1430718
agugggcugaguaucucag

SEQ ID NO: 1430720 - RNA, 19 nt, Artificial Sequence
  Description of Artificial Sequence: Synthetic oligonucleotide
  Sense strand starting at position 889 of SEQ ID NO: 1243640
cccucccuauguucugaua

SEQ ID NO: 1430721 - RNA, 19 nt, Artificial Sequence
  Description of Artificial Sequence: Synthetic oligonucleotide
  Antisense strand to SEQ ID NO: 1430720
uaucagaacauagggaggg

SEQ ID NO: 1430722 - RNA, 19 nt, Artificial Sequence
  Description of Artificial Sequence: Synthetic oligonucleotide
  Sense strand starting at position 1374 of SEQ ID NO: 1243640
uguagugaugcccaugaag

SEQ ID NO: 1430723 - RNA, 19 nt, Artificial Sequence
  Description of Artificial Sequence: Synthetic oligonucleotide
  Antisense strand to SEQ ID NO: 1430722
cuucaugggcaucacuaca

SEQ ID NO: 1430724 - RNA, 19 nt, Artificial Sequence
  Description of Artificial Sequence: Synthetic oligonucleotide
  Sense strand starting at position 1376 of SEQ ID NO: 1243640
uagugaugcccaugaagaa

SEQ ID NO: 1430725 - RNA, 19 nt, Artificial Sequence
  Description of Artificial Sequence: Synthetic oligonucleotide
  Antisense strand to SEQ ID NO: 1430724
uucuucaugggcaucacua

SEQ ID NO: 1430726 - RNA, 19 nt, Artificial Sequence
  Description of Artificial Sequence: Synthetic oligonucleotide
  Sense strand starting at position 1397 of SEQ ID NO: 1243640
aacgguuaugagugcauuu

SEQ ID NO: 1430727 - RNA, 19 nt, Artificial Sequence
  Description of Artificial Sequence: Synthetic oligonucleotide
  Antisense strand to SEQ ID NO: 1430726
aaaugcacucauaaccguu

SEQ ID NO: 1430728 - RNA, 19 nt, Artificial Sequence
  Description of Artificial Sequence: Synthetic oligonucleotide
  Sense strand starting at position 1436 of SEQ ID NO: 1243640
cugagaaacguuuaaugcu

SEQ ID NO: 1430729 - RNA, 19 nt, Artificial Sequence
  Description of Artificial Sequence: Synthetic oligonucleotide
  Antisense strand to SEQ ID NO: 1430728
agcauuaaacguuucucag

SEQ ID NO: 1430730 - RNA, 19 nt, Artificial Sequence
  Description of Artificial Sequence: Synthetic oligonucleotide
  Sense strand starting at position 1444 of SEQ ID NO: 1243640
cguuuaaugcuguaucuga

SEQ ID NO: 1430731 - RNA, 19 nt, Artificial Sequence
  Description of Artificial Sequence: Synthetic oligonucleotide
  Antisense strand to SEQ ID NO: 1430730
ucagauacagcauuaaacg

SEQ ID NO: 1430732 - RNA, 19 nt, Artificial Sequence
  Description of Artificial Sequence: Synthetic oligonucleotide
  Sense strand starting at position 1451 of SEQ ID NO: 1243640
ugcuguaucugaucucaca

SEQ ID NO: 1430733 - RNA, 19 nt, Artificial Sequence
  Description of Artificial Sequence: Synthetic oligonucleotide
  Antisense strand to SEQ ID NO: 1430732
ugugagaucagauacagca

SEQ ID NO: 1430734 - RNA, 19 nt, Artificial Sequence
  Description of Artificial Sequence: Synthetic oligonucleotide
  Sense strand starting at position 1478 of SEQ ID NO: 1243640
guggcaugucaggguuuga

SEQ ID NO: 1430735 - RNA, 19 nt, Artificial Sequence
  Description of Artificial Sequence: Synthetic oligonucleotide
  Antisense strand to SEQ ID NO: 1430734
ucaaacccugacaugccac

SEQ ID NO: 1430736 - RNA, 19 nt, Artificial Sequence
  Description of Artificial Sequence: Synthetic oligonucleotide
  Sense strand starting at position 1670 of SEQ ID NO: 1243640
gccagagguccaggaggau

SEQ ID NO: 1430737 - RNA, 19 nt, Artificial Sequence
  Description of Artificial Sequence: Synthetic oligonucleotide
  Antisense strand to SEQ ID NO: 1430736
auccuccuggaccucuggc

SEQ ID NO: 1430738 - RNA, 19 nt, Artificial Sequence
  Description of Artificial Sequence: Synthetic oligonucleotide
  Sense strand starting at position 1922 of SEQ ID NO: 1243640
uggaguuccugcccaggaa

SEQ ID NO: 1430739 - RNA, 19 nt, Artificial Sequence
  Description of Artificial Sequence: Synthetic oligonucleotide
  Antisense strand to SEQ ID NO: 1430738
uuccugggcaggaacucca

SEQ ID NO: 1430740 - RNA, 19 nt, Artificial Sequence
  Description of Artificial Sequence: Synthetic oligonucleotide
  Sense strand starting at position 1935 of SEQ ID NO: 1243640
caggaaguuugcgugacaa

SEQ ID NO: 1430741 - RNA, 19 nt, Artificial Sequence
  Description of Artificial Sequence: Synthetic oligonucleotide
  Antisense strand to SEQ ID NO: 1430740
uugucacgcaaacuuccug

SEQ ID NO: 1430742 - RNA, 19 nt, Artificial Sequence
  Description of Artificial Sequence: Synthetic oligonucleotide
  Sense strand starting at position 1937 of SEQ ID NO: 1243640
ggaaguuugcgugacaaga

SEQ ID NO: 1430743 - RNA, 19 nt, Artificial Sequence
  Description of Artificial Sequence: Synthetic oligonucleotide
  Antisense strand to SEQ ID NO: 1430742
ucuugucacgcaaacuucc

SEQ ID NO: 1430744 - RNA, 19 nt, Artificial Sequence
  Description of Artificial Sequence: Synthetic oligonucleotide
  Sense strand starting at position 2052 of SEQ ID NO: 1243640
ucacuucugaaaugcgaga

SEQ ID NO: 1430745 - RNA, 19 nt, Artificial Sequence
  Description of Artificial Sequence: Synthetic oligonucleotide
  Antisense strand to SEQ ID NO: 1430744
ucucgcauuucagaaguga

SEQ ID NO: 1430746 - RNA, 19 nt, Artificial Sequence
  Description of Artificial Sequence: Synthetic oligonucleotide
  Sense strand starting at position 2057 of SEQ ID NO: 1243640
ucugaaaugcgagaauguu

SEQ ID NO: 1430747 - RNA, 19 nt, Artificial Sequence
  Description of Artificial Sequence: Synthetic oligonucleotide
  Antisense strand to SEQ ID NO: 1430746
aacauucucgcauuucaga

SEQ ID NO: 1430748 - RNA, 19 nt, Artificial Sequence
  Description of Artificial Sequence: Synthetic oligonucleotide
  Sense strand starting at position 2063 of SEQ ID NO: 1243640
augcgagaauguuucugaa

SEQ ID NO: 1430749 - RNA, 19 nt, Artificial Sequence
  Description of Artificial Sequence: Synthetic oligonucleotide
  Antisense strand to SEQ ID NO: 1430748
uucagaaacauucucgcau

SEQ ID NO: 1430750 - RNA, 19 nt, Artificial Sequence
  Description of Artificial Sequence: Synthetic oligonucleotide
  Sense strand starting at position 2209 of SEQ ID NO: 1243640
uucucugaguucucugguu

SEQ ID NO: 1430751 - RNA, 19 nt, Artificial Sequence
  Description of Artificial Sequence: Synthetic oligonucleotide
  Antisense strand to SEQ ID NO: 1430750
aaccagagaacucagagaa

SEQ ID NO: 1430752 - RNA, 19 nt, Artificial Sequence
  Description of Artificial Sequence: Synthetic oligonucleotide
  Sense strand starting at position 2211 of SEQ ID NO: 1243640
cucugaguucucugguuac

SEQ ID NO: 1430753 - RNA, 19 nt, Artificial Sequence
  Description of Artificial Sequence: Synthetic oligonucleotide
  Antisense strand to SEQ ID NO: 1430752
guaaccagagaacucagag

SEQ ID NO: 1430754 - RNA, 19 nt, Artificial Sequence
  Description of Artificial Sequence: Synthetic oligonucleotide
  Sense strand starting at position 2214 of SEQ ID NO: 1243640
ugaguucucugguuacaua

SEQ ID NO: 1430755 - RNA, 19 nt, Artificial Sequence
  Description of Artificial Sequence: Synthetic oligonucleotide
  Antisense strand to SEQ ID NO: 1430754
uauguaaccagagaacuca

SEQ ID NO: 1430756 - RNA, 19 nt, Artificial Sequence
  Description of Artificial Sequence: Synthetic oligonucleotide
  Sense strand starting at position 2215 of SEQ ID NO: 1243640
gaguucucugguuacauaa

SEQ ID NO: 1430757 - RNA, 19 nt, Artificial Sequence
  Description of Artificial Sequence: Synthetic oligonucleotide
  Antisense strand to SEQ ID NO: 1430756
uuauguaaccagagaacuc

SEQ ID NO: 1430758 - RNA, 19 nt, Artificial Sequence
  Description of Artificial Sequence: Synthetic oligonucleotide
  Sense strand starting at position 2425 of SEQ ID NO: 1243640
cucguugaauagcugagaa

SEQ ID NO: 1430759 - RNA, 19 nt, Artificial Sequence
  Description of Artificial Sequence: Synthetic oligonucleotide
  Antisense strand to SEQ ID NO: 1430758
uucucagcuauucaacgag

SEQ ID NO: 1430760 - RNA, 19 nt, Artificial Sequence
  Description of Artificial Sequence: Synthetic oligonucleotide
  Sense strand starting at position 2427 of SEQ ID NO: 1243640
cguugaauagcugagaaga

SEQ ID NO: 1430761 - RNA, 19 nt, Artificial Sequence
  Description of Artificial Sequence: Synthetic oligonucleotide
  Antisense strand to SEQ ID NO: 1430760
ucuucucagcuauucaacg

SEQ ID NO: 1430762 - RNA, 19 nt, Artificial Sequence
  Description of Artificial Sequence: Synthetic oligonucleotide
  Sense strand starting at position 2474 of SEQ ID NO: 1243640
accagagaugcuugggaag

SEQ ID NO: 1430763 - RNA, 19 nt, Artificial Sequence
  Description of Artificial Sequence: Synthetic oligonucleotide
  Antisense strand to SEQ ID NO: 1430762
cuucccaagcaucucuggu

SEQ ID NO: 1430764 - RNA, 19 nt, Artificial Sequence
  Description of Artificial Sequence: Synthetic oligonucleotide
  Sense strand starting at position 2477 of SEQ ID NO: 1243640
agagaugcuugggaaggaa

SEQ ID NO: 1430765 - RNA, 19 nt, Artificial Sequence
  Description of Artificial Sequence: Synthetic oligonucleotide
  Antisense strand to SEQ ID NO: 1430764
uuccuucccaagcaucucu

SEQ ID NO: 1430766 - RNA, 19 nt, Artificial Sequence
  Description of Artificial Sequence: Synthetic oligonucleotide
  Sense strand starting at position 2829 of SEQ ID NO: 1243640
gucgucuuccuccauuauu

SEQ ID NO: 1430767 - RNA, 19 nt, Artificial Sequence
  Description of Artificial Sequence: Synthetic oligonucleotide
  Antisense strand to SEQ ID NO: 1430766
aauaauggaggaagacgac

SEQ ID NO: 1430768 - RNA, 19 nt, Artificial Sequence
  Description of Artificial Sequence: Synthetic oligonucleotide
  Sense strand starting at position 2860 of SEQ ID NO: 1243640
cguuuauaucuuguuugcu

SEQ ID NO: 1430769 - RNA, 19 nt, Artificial Sequence
  Description of Artificial Sequence: Synthetic oligonucleotide
  Antisense strand to SEQ ID NO: 1430768
agcaaacaagauauaaacg

SEQ ID NO: 1430770 - RNA, 19 nt, Artificial Sequence
  Description of Artificial Sequence: Synthetic oligonucleotide
  Sense strand starting at position 3003 of SEQ ID NO: 1243640
uaaugugaacacuguagua

SEQ ID NO: 1430771 - RNA, 19 nt, Artificial Sequence
  Description of Artificial Sequence: Synthetic oligonucleotide
  Antisense strand to SEQ ID NO: 1430770
uacuacaguguucacauua

SEQ ID NO: 1430772 - RNA, 19 nt, Artificial Sequence
  Description of Artificial Sequence: Synthetic oligonucleotide
  Sense strand starting at position 3005 of SEQ ID NO: 1243640
augugaacacuguaguaac

SEQ ID NO: 1430773 - RNA, 19 nt, Artificial Sequence
  Description of Artificial Sequence: Synthetic oligonucleotide
  Antisense strand to SEQ ID NO: 1430772
guuacuacaguguucacau

SEQ ID NO: 1430774 - RNA, 19 nt, Artificial Sequence
  Description of Artificial Sequence: Synthetic oligonucleotide
  Sense strand starting at position 3203 of SEQ ID NO: 1243640
aggagguguggaggugaau

SEQ ID NO: 1430775 - RNA, 19 nt, Artificial Sequence
  Description of Artificial Sequence: Synthetic oligonucleotide
  Antisense strand to SEQ ID NO: 1430774
auucaccuccacaccuccu

SEQ ID NO: 1430776 - RNA, 19 nt, Artificial Sequence
  Description of Artificial Sequence: Synthetic oligonucleotide
  Sense strand starting at position 3289 of SEQ ID NO: 1243640
aggagauuaucagacagac

SEQ ID NO: 1430777 - RNA, 19 nt, Artificial Sequence
  Description of Artificial Sequence: Synthetic oligonucleotide
  Antisense strand to SEQ ID NO: 1430776
gucugucugauaaucuccu

SEQ ID NO: 1430778 - RNA, 19 nt, Artificial Sequence
  Description of Artificial Sequence: Synthetic oligonucleotide
  Sense strand starting at position 3357 of SEQ ID NO: 1243640
gugagaaaggucuagccca

SEQ ID NO: 1430779 - RNA, 19 nt, Artificial Sequence
  Description of Artificial Sequence: Synthetic oligonucleotide
  Antisense strand to SEQ ID NO: 1430778
ugggcuagaccuuucucac

SEQ ID NO: 1430780 - RNA, 19 nt, Artificial Sequence
  Description of Artificial Sequence: Synthetic oligonucleotide
  Sense strand starting at position 3592 of SEQ ID NO: 1243640
cugauuaucuuugcaggca

SEQ ID NO: 1430781 - RNA, 19 nt, Artificial Sequence
  Description of Artificial Sequence: Synthetic oligonucleotide
  Antisense strand to SEQ ID NO: 1430780
ugccugcaaagauaaucag

SEQ ID NO: 1430782 - RNA, 19 nt, Artificial Sequence
  Description of Artificial Sequence: Synthetic oligonucleotide
  Sense strand starting at position 3614 of SEQ ID NO: 1243640
ccuuccuacuuggugagau

SEQ ID NO: 1430783 - RNA, 19 nt, Artificial Sequence
  Description of Artificial Sequence: Synthetic oligonucleotide
  Antisense strand to SEQ ID NO: 1430782
aucucaccaaguaggaagg

SEQ ID NO: 1430784 - RNA, 19 nt, Artificial Sequence
  Description of Artificial Sequence: Synthetic oligonucleotide
  Sense strand starting at position 3694 of SEQ ID NO: 1243640
ccugacucuccugggaauu

SEQ ID NO: 1430785 - RNA, 19 nt, Artificial Sequence
  Description of Artificial Sequence: Synthetic oligonucleotide
  Antisense strand to SEQ ID NO: 1430784
aauucccaggagagucagg

SEQ ID NO: 1430786 - RNA, 19 nt, Artificial Sequence
  Description of Artificial Sequence: Synthetic oligonucleotide
  Sense strand starting at position 3708 of SEQ ID NO: 1243640
gaauuuggaucuugaguag

SEQ ID NO: 1430787 - RNA, 19 nt, Artificial Sequence
  Description of Artificial Sequence: Synthetic oligonucleotide
  Antisense strand to SEQ ID NO: 1430786
cuacucaagauccaaauuc

SEQ ID NO: 1430788 - RNA, 19 nt, Artificial Sequence
  Description of Artificial Sequence: Synthetic oligonucleotide
  Sense strand starting at position 166 of SEQ ID NO: 1243641
agauucaggcagugggaau

SEQ ID NO: 1430789 - RNA, 19 nt, Artificial Sequence
  Description of Artificial Sequence: Synthetic oligonucleotide
  Antisense strand to SEQ ID NO: 1430788
auucccacugccugaaucu

SEQ ID NO: 1430790 - RNA, 19 nt, Artificial Sequence
  Description of Artificial Sequence: Synthetic oligonucleotide
  Sense strand starting at position 446 of SEQ ID NO: 1243641
uguuguuucugguuuaaga

SEQ ID NO: 1430791 - RNA, 19 nt, Artificial Sequence
  Description of Artificial Sequence: Synthetic oligonucleotide
  Antisense strand to SEQ ID NO: 1430790
ucuuaaaccagaaacaaca

SEQ ID NO: 1430792 - RNA, 19 nt, Artificial Sequence
  Description of Artificial Sequence: Synthetic oligonucleotide
  Sense strand starting at position 448 of SEQ ID NO: 1243641
uuguuucugguuuaagaug

SEQ ID NO: 1430793 - RNA, 19 nt, Artificial Sequence
  Description of Artificial Sequence: Synthetic oligonucleotide
  Antisense strand to SEQ ID NO: 1430792
caucuuaaaccagaaacaa

SEQ ID NO: 1430794 - RNA, 19 nt, Artificial Sequence
  Description of Artificial Sequence: Synthetic oligonucleotide
  Sense strand starting at position 464 of SEQ ID NO: 1243641
augagaaguccugagccau

SEQ ID NO: 1430795 - RNA, 19 nt, Artificial Sequence
  Description of Artificial Sequence: Synthetic oligonucleotide
  Antisense strand to SEQ ID NO: 1430794
auggcucaggacuucucau

SEQ ID NO: 1430796 - RNA, 19 nt, Artificial Sequence
  Description of Artificial Sequence: Synthetic oligonucleotide
  Sense strand starting at position 552 of SEQ ID NO: 1243641
gagaacuccuccugaggaa

SEQ ID NO: 1430797 - RNA, 19 nt, Artificial Sequence
  Description of Artificial Sequence: Synthetic oligonucleotide
  Antisense strand to SEQ ID NO: 1430796
uuccucaggaggaguucuc

SEQ ID NO: 1430798 - RNA, 19 nt, Artificial Sequence
  Description of Artificial Sequence: Synthetic oligonucleotide
  Sense strand starting at position 912 of SEQ ID NO: 1243641
ugcagaggugucuggucuu

SEQ ID NO: 1430799 - RNA, 19 nt, Artificial Sequence
  Description of Artificial Sequence: Synthetic oligonucleotide
  Antisense strand to SEQ ID NO: 1430798
aagaccagacaccucugca

SEQ ID NO: 1430800 - RNA, 19 nt, Artificial Sequence
  Description of Artificial Sequence: Synthetic oligonucleotide
  Sense strand starting at position 1582 of SEQ ID NO: 1243641
cugccugaauucuauagga

SEQ ID NO: 1430801 - RNA, 19 nt, Artificial Sequence
  Description of Artificial Sequence: Synthetic oligonucleotide
  Antisense strand to SEQ ID NO: 1430800
uccuauagaauucaggcag

SEQ ID NO: 1430802 - RNA, 19 nt, Artificial Sequence
  Description of Artificial Sequence: Synthetic oligonucleotide
  Sense strand starting at position 1587 of SEQ ID NO: 1243641
ugaauucuauaggaaggga

SEQ ID NO: 1430803 - RNA, 19 nt, Artificial Sequence
  Description of Artificial Sequence: Synthetic oligonucleotide
  Antisense strand to SEQ ID NO: 1430802
ucccuuccuauagaauuca

SEQ ID NO: 1430804 - RNA, 19 nt, Artificial Sequence
  Description of Artificial Sequence: Synthetic oligonucleotide
  Sense strand starting at position 1976 of SEQ ID NO: 1243641
uggcuaagccauuguucua

SEQ ID NO: 1430805 - RNA, 19 nt, Artificial Sequence
  Description of Artificial Sequence: Synthetic oligonucleotide
  Antisense strand to SEQ ID NO: 1430804
uagaacaauggcuuagcca

SEQ ID NO: 1430806 - RNA, 19 nt, Artificial Sequence
  Description of Artificial Sequence: Synthetic oligonucleotide
  Sense strand starting at position 2004 of SEQ ID NO: 1243641
gguuucuuggcagagcuga

SEQ ID NO: 1430807 - RNA, 19 nt, Artificial Sequence
  Description of Artificial Sequence: Synthetic oligonucleotide
  Antisense strand to SEQ ID NO: 1430806
ucagcucugccaagaaacc

SEQ ID NO: 1430808 - RNA, 19 nt, Artificial Sequence
  Description of Artificial Sequence: Synthetic oligonucleotide
  Sense strand starting at position 2024 of SEQ ID NO: 1243641
ccaggcuugguguguaaac

SEQ ID NO: 1430809 - RNA, 19 nt, Artificial Sequence
  Description of Artificial Sequence: Synthetic oligonucleotide
  Antisense strand to SEQ ID NO: 1430808
guuuacacaccaagccugg

SEQ ID NO: 1430810 - RNA, 19 nt, Artificial Sequence
  Description of Artificial Sequence: Synthetic oligonucleotide
  Sense strand starting at position 2026 of SEQ ID NO: 1243641
aggcuugguguguaaacca

SEQ ID NO: 1430811 - RNA, 19 nt, Artificial Sequence
  Description of Artificial Sequence: Synthetic oligonucleotide
  Antisense strand to SEQ ID NO: 1430810
ugguuuacacaccaagccu

SEQ ID NO: 1430812 - RNA, 19 nt, Artificial Sequence
  Description of Artificial Sequence: Synthetic oligonucleotide
  Sense strand starting at position 2096 of SEQ ID NO: 1243641
gcugcagauuuccacaaag

SEQ ID NO: 1430813 - RNA, 19 nt, Artificial Sequence
  Description of Artificial Sequence: Synthetic oligonucleotide
  Antisense strand to SEQ ID NO: 1430812
cuuuguggaaaucugcagc

SEQ ID NO: 1430814 - RNA, 19 nt, Artificial Sequence
  Description of Artificial Sequence: Synthetic oligonucleotide
  Sense strand starting at position 2217 of SEQ ID NO: 1243641
acauacuucucugugacga

SEQ ID NO: 1430815 - RNA, 19 nt, Artificial Sequence
  Description of Artificial Sequence: Synthetic oligonucleotide
  Antisense strand to SEQ ID NO: 1430814
ucgucacagagaaguaugu

SEQ ID NO: 1430816 - RNA, 19 nt, Artificial Sequence
  Description of Artificial Sequence: Synthetic oligonucleotide
  Sense strand starting at position 2218 of SEQ ID NO: 1243641
cauacuucucugugacgaa

SEQ ID NO: 1430817 - RNA, 19 nt, Artificial Sequence
  Description of Artificial Sequence: Synthetic oligonucleotide
  Antisense strand to SEQ ID NO: 1430816
uucgucacagagaaguaug

SEQ ID NO: 1430818 - RNA, 19 nt, Artificial Sequence
  Description of Artificial Sequence: Synthetic oligonucleotide
  Sense strand starting at position 2219 of SEQ ID NO: 1243641
auacuucucugugacgaaa

SEQ ID NO: 1430819 - RNA, 19 nt, Artificial Sequence
  Description of Artificial Sequence: Synthetic oligonucleotide
  Antisense strand to SEQ ID NO: 1430818
uuucgucacagagaaguau

SEQ ID NO: 1430820 - RNA, 19 nt, Artificial Sequence
  Description of Artificial Sequence: Synthetic oligonucleotide
  Sense strand starting at position 2269 of SEQ ID NO: 1243641
auaagaaagucaucacugu

SEQ ID NO: 1430821 - RNA, 19 nt, Artificial Sequence
  Description of Artificial Sequence: Synthetic oligonucleotide
  Antisense strand to SEQ ID NO: 1430820
acagugaugacuuucuuau

SEQ ID NO: 1430822 - RNA, 19 nt, Artificial Sequence
  Description of Artificial Sequence: Synthetic oligonucleotide
  Sense strand starting at position 2288 of SEQ ID NO: 1243641
uuucuauaacagggaagua

SEQ ID NO: 1430823 - RNA, 19 nt, Artificial Sequence
  Description of Artificial Sequence: Synthetic oligonucleotide
  Antisense strand to SEQ ID NO: 1430822
uacuucccuguuauagaaa

SEQ ID NO: 1430824 - RNA, 19 nt, Artificial Sequence
  Description of Artificial Sequence: Synthetic oligonucleotide
  Sense strand starting at position 2298 of SEQ ID NO: 1243641
agggaaguauuguaaacau

SEQ ID NO: 1430825 - RNA, 19 nt, Artificial Sequence
  Description of Artificial Sequence: Synthetic oligonucleotide
  Antisense strand to SEQ ID NO: 1430824
auguuuacaauacuucccu

SEQ ID NO: 1430826 - RNA, 19 nt, Artificial Sequence
  Description of Artificial Sequence: Synthetic oligonucleotide
  Sense strand starting at position 2316 of SEQ ID NO: 1243641
ucccaaagauccgaaagaa

SEQ ID NO: 1430827 - RNA, 19 nt, Artificial Sequence
  Description of Artificial Sequence: Synthetic oligonucleotide
  Antisense strand to SEQ ID NO: 1430826
uucuuucggaucuuuggga

SEQ ID NO: 1430828 - RNA, 19 nt, Artificial Sequence
  Description of Artificial Sequence: Synthetic oligonucleotide
  Sense strand starting at position 2371 of SEQ ID NO: 1243641
aaggguuuacugugcagua

SEQ ID NO: 1430829 - RNA, 19 nt, Artificial Sequence
  Description of Artificial Sequence: Synthetic oligonucleotide
  Antisense strand to SEQ ID NO: 1430828
uacugcacaguaaacccuu

SEQ ID NO: 1430830 - RNA, 19 nt, Artificial Sequence
  Description of Artificial Sequence: Synthetic oligonucleotide
  Sense strand starting at position 2372 of SEQ ID NO: 1243641
aggguuuacugugcaguau

SEQ ID NO: 1430831 - RNA, 19 nt, Artificial Sequence
  Description of Artificial Sequence: Synthetic oligonucleotide
  Antisense strand to SEQ ID NO: 1430830
auacugcacaguaaacccu

SEQ ID NO: 1430832 - RNA, 19 nt, Artificial Sequence
  Description of Artificial Sequence: Synthetic oligonucleotide
  Sense strand starting at position 2373 of SEQ ID NO: 1243641
ggguuuacugugcaguauu

SEQ ID NO: 1430833 - RNA, 19 nt, Artificial Sequence
  Description of Artificial Sequence: Synthetic oligonucleotide
  Antisense strand to SEQ ID NO: 1430832
aauacugcacaguaaaccc

SEQ ID NO: 1430834 - RNA, 19 nt, Artificial Sequence
  Description of Artificial Sequence: Synthetic oligonucleotide
  Sense strand starting at position 2383 of SEQ ID NO: 1243641
ugcaguauuuagggauuag

SEQ ID NO: 1430835 - RNA, 19 nt, Artificial Sequence
  Description of Artificial Sequence: Synthetic oligonucleotide
  Antisense strand to SEQ ID NO: 1430834
cuaaucccuaaauacugca

SEQ ID NO: 1430836 - RNA, 19 nt, Artificial Sequence
  Description of Artificial Sequence: Synthetic oligonucleotide
  Sense strand starting at position 2751 of SEQ ID NO: 1243641
agcacuuugaccgggagaa

SEQ ID NO: 1430837 - RNA, 19 nt, Artificial Sequence
  Description of Artificial Sequence: Synthetic oligonucleotide
  Antisense strand to SEQ ID NO: 1430836
uucucccggucaaagugcu

SEQ ID NO: 1430838 - RNA, 19 nt, Artificial Sequence
  Description of Artificial Sequence: Synthetic oligonucleotide
  Sense strand starting at position 2752 of SEQ ID NO: 1243641
gcacuuugaccgggagaau

SEQ ID NO: 1430839 - RNA, 19 nt, Artificial Sequence
  Description of Artificial Sequence: Synthetic oligonucleotide
  Antisense strand to SEQ ID NO: 1430838
auucucccggucaaagugc

SEQ ID NO: 1430840 - RNA, 19 nt, Artificial Sequence
  Description of Artificial Sequence: Synthetic oligonucleotide
  Sense strand starting at position 2772 of SEQ ID NO: 1243641
gagccauaaucacagaguu

SEQ ID NO: 1430841 - RNA, 19 nt, Artificial Sequence
  Description of Artificial Sequence: Synthetic oligonucleotide
  Antisense strand to SEQ ID NO: 1430840
aacucugugauuauggcuc

SEQ ID NO: 1430842 - RNA, 19 nt, Artificial Sequence
  Description of Artificial Sequence: Synthetic oligonucleotide
  Sense strand starting at position 2780 of SEQ ID NO: 1243641
aucacagaguucuccuauu

SEQ ID NO: 1430843 - RNA, 19 nt, Artificial Sequence
  Description of Artificial Sequence: Synthetic oligonucleotide
  Antisense strand to SEQ ID NO: 1430842
aauaggagaacucugugau

SEQ ID NO: 1430844 - RNA, 19 nt, Artificial Sequence
  Description of Artificial Sequence: Synthetic oligonucleotide
  Sense strand starting at position 2799 of SEQ ID NO: 1243641
agauuagugguaggaggua

SEQ ID NO: 1430845 - RNA, 19 nt, Artificial Sequence
  Description of Artificial Sequence: Synthetic oligonucleotide
  Antisense strand to SEQ ID NO: 1430844
uaccuccuaccacuaaucu

SEQ ID NO: 1430846 - RNA, 19 nt, Artificial Sequence
  Description of Artificial Sequence: Synthetic oligonucleotide
  Sense strand starting at position 2818 of SEQ ID NO: 1243641
aggcaagguuagugagauu

SEQ ID NO: 1430847 - RNA, 19 nt, Artificial Sequence
  Description of Artificial Sequence: Synthetic oligonucleotide
  Antisense strand to SEQ ID NO: 1430846
aaucucacuaaccuugccu

SEQ ID NO: 1430848 - RNA, 19 nt, Artificial Sequence
  Description of Artificial Sequence: Synthetic oligonucleotide
  Sense strand starting at position 2882 of SEQ ID NO: 1243641
ucggguaaguaauauaauu

SEQ ID NO: 1430849 - RNA, 19 nt, Artificial Sequence
  Description of Artificial Sequence: Synthetic oligonucleotide
  Antisense strand to SEQ ID NO: 1430848
aauuauauuacuuacccga

SEQ ID NO: 1430850 - RNA, 19 nt, Artificial Sequence
  Description of Artificial Sequence: Synthetic oligonucleotide
  Sense strand starting at position 3208 of SEQ ID NO: 1243641
uggaauuauugaugaucug

SEQ ID NO: 1430851 - RNA, 19 nt, Artificial Sequence
  Description of Artificial Sequence: Synthetic oligonucleotide
  Antisense strand to SEQ ID NO: 1430850
cagaucaucaauaauucca

SEQ ID NO: 1430852 - RNA, 19 nt, Artificial Sequence
  Description of Artificial Sequence: Synthetic oligonucleotide
  Sense strand starting at position 3231 of SEQ ID NO: 1243641
ccucuuaugcaauguuuga

SEQ ID NO: 1430853 - RNA, 19 nt, Artificial Sequence
  Description of Artificial Sequence: Synthetic oligonucleotide
  Antisense strand to SEQ ID NO: 1430852
ucaaacauugcauaagagg

SEQ ID NO: 1430854 - RNA, 19 nt, Artificial Sequence
  Description of Artificial Sequence: Synthetic oligonucleotide
  Sense strand starting at position 3235 of SEQ ID NO: 1243641
uuaugcaauguuugacuuu

SEQ ID NO: 1430855 - RNA, 19 nt, Artificial Sequence
  Description of Artificial Sequence: Synthetic oligonucleotide
  Antisense strand to SEQ ID NO: 1430854
aaagucaaacauugcauaa

SEQ ID NO: 1430856 - RNA, 19 nt, Artificial Sequence
  Description of Artificial Sequence: Synthetic oligonucleotide
  Sense strand starting at position 3254 of SEQ ID NO: 1243641
uugcaaugagcuuguauuu

SEQ ID NO: 1430857 - RNA, 19 nt, Artificial Sequence
  Description of Artificial Sequence: Synthetic oligonucleotide
  Antisense strand to SEQ ID NO: 1430856
aaauacaagcucauugcaa

SEQ ID NO: 1430858 - RNA, 19 nt, Artificial Sequence
  Description of Artificial Sequence: Synthetic oligonucleotide
  Sense strand starting at position 3299 of SEQ ID NO: 1243641
ggcacuacaugcucaugaa

SEQ ID NO: 1430859 - RNA, 19 nt, Artificial Sequence
  Description of Artificial Sequence: Synthetic oligonucleotide
  Antisense strand to SEQ ID NO: 1430858
uucaugagcauguagugcc

SEQ ID NO: 1430860 - RNA, 19 nt, Artificial Sequence
  Description of Artificial Sequence: Synthetic oligonucleotide
  Sense strand starting at position 3300 of SEQ ID NO: 1243641
gcacuacaugcucaugaaa

SEQ ID NO: 1430861 - RNA, 19 nt, Artificial Sequence
  Description of Artificial Sequence: Synthetic oligonucleotide
  Antisense strand to SEQ ID NO: 1430860
uuucaugagcauguagugc

SEQ ID NO: 1430862 - RNA, 19 nt, Artificial Sequence
  Description of Artificial Sequence: Synthetic oligonucleotide
  Sense strand starting at position 3439 of SEQ ID NO: 1243641
cugagauacucagcccacu

SEQ ID NO: 1430863 - RNA, 19 nt, Artificial Sequence
  Description of Artificial Sequence: Synthetic oligonucleotide
  Antisense strand to SEQ ID NO: 1430862
agugggcugaguaucucag

SEQ ID NO: 1430864 - RNA, 19 nt, Artificial Sequence
  Description of Artificial Sequence: Synthetic oligonucleotide
  Sense strand starting at position 3710 of SEQ ID NO: 1243641
cccucccuauguucugaua

SEQ ID NO: 1430865 - RNA, 19 nt, Artificial Sequence
  Description of Artificial Sequence: Synthetic oligonucleotide
  Antisense strand to SEQ ID NO: 1430864
uaucagaacauagggaggg

SEQ ID NO: 1430866 - RNA, 19 nt, Artificial Sequence
  Description of Artificial Sequence: Synthetic oligonucleotide
  Sense strand starting at position 3713 of SEQ ID NO: 1243641
ucccuauguucugauagga

SEQ ID NO: 1430867 - RNA, 19 nt, Artificial Sequence
  Description of Artificial Sequence: Synthetic oligonucleotide
  Antisense strand to SEQ ID NO: 1430866
uccuaucagaacauaggga

SEQ ID NO: 1430868 - RNA, 19 nt, Artificial Sequence
  Description of Artificial Sequence: Synthetic oligonucleotide
  Sense strand starting at position 319 of SEQ ID NO: 1243642
agauucaggcagugggaau

SEQ ID NO: 1430869 - RNA, 19 nt, Artificial Sequence
  Description of Artificial Sequence: Synthetic oligonucleotide
  Antisense strand to SEQ ID NO: 1430868
auucccacugccugaaucu

SEQ ID NO: 1430870 - RNA, 19 nt, Artificial Sequence
  Description of Artificial Sequence: Synthetic oligonucleotide
  Sense strand starting at position 599 of SEQ ID NO: 1243642
uguuguuucugguuuaaga

SEQ ID NO: 1430871 - RNA, 19 nt, Artificial Sequence
  Description of Artificial Sequence: Synthetic oligonucleotide
  Antisense strand to SEQ ID NO: 1430870
ucuuaaaccagaaacaaca

SEQ ID NO: 1430872 - RNA, 19 nt, Artificial Sequence
  Description of Artificial Sequence: Synthetic oligonucleotide
  Sense strand starting at position 601 of SEQ ID NO: 1243642
uuguuucugguuuaagaug

SEQ ID NO: 1430873 - RNA, 19 nt, Artificial Sequence
  Description of Artificial Sequence: Synthetic oligonucleotide
  Antisense strand to SEQ ID NO: 1430872
caucuuaaaccagaaacaa

SEQ ID NO: 1430874 - RNA, 19 nt, Artificial Sequence
  Description of Artificial Sequence: Synthetic oligonucleotide
  Sense strand starting at position 617 of SEQ ID NO: 1243642
augagaaguccugagccau

SEQ ID NO: 1430875 - RNA, 19 nt, Artificial Sequence
  Description of Artificial Sequence: Synthetic oligonucleotide
  Antisense strand to SEQ ID NO: 1430874
auggcucaggacuucucau

SEQ ID NO: 1430876 - RNA, 19 nt, Artificial Sequence
  Description of Artificial Sequence: Synthetic oligonucleotide
  Sense strand starting at position 705 of SEQ ID NO: 1243642
gagaacuccuccugaggaa

SEQ ID NO: 1430877 - RNA, 19 nt, Artificial Sequence
  Description of Artificial Sequence: Synthetic oligonucleotide
  Antisense strand to SEQ ID NO: 1430876
uuccucaggaggaguucuc

SEQ ID NO: 1430878 - RNA, 19 nt, Artificial Sequence
  Description of Artificial Sequence: Synthetic oligonucleotide
  Sense strand starting at position 1065 of SEQ ID NO: 1243642
ugcagaggugucuggucuu

SEQ ID NO: 1430879 - RNA, 19 nt, Artificial Sequence
  Description of Artificial Sequence: Synthetic oligonucleotide
  Antisense strand to SEQ ID NO: 1430878
aagaccagacaccucugca

SEQ ID NO: 1430880 - RNA, 19 nt, Artificial Sequence
  Description of Artificial Sequence: Synthetic oligonucleotide
  Sense strand starting at position 1735 of SEQ ID NO: 1243642
cugccugaauucuauagga

SEQ ID NO: 1430881 - RNA, 19 nt, Artificial Sequence
  Description of Artificial Sequence: Synthetic oligonucleotide
  Antisense strand to SEQ ID NO: 1430880
uccuauagaauucaggcag

SEQ ID NO: 1430882 - RNA, 19 nt, Artificial Sequence
  Description of Artificial Sequence: Synthetic oligonucleotide
  Sense strand starting at position 1740 of SEQ ID NO: 1243642
ugaauucuauaggaaggga

SEQ ID NO: 1430883 - RNA, 19 nt, Artificial Sequence
  Description of Artificial Sequence: Synthetic oligonucleotide
  Antisense strand to SEQ ID NO: 1430882
ucccuuccuauagaauuca

SEQ ID NO: 1430884 - RNA, 19 nt, Artificial Sequence
  Description of Artificial Sequence: Synthetic oligonucleotide
  Sense strand starting at position 2129 of SEQ ID NO: 1243642
uggcuaagccauuguucua

SEQ ID NO: 1430885 - RNA, 19 nt, Artificial Sequence
  Description of Artificial Sequence: Synthetic oligonucleotide
  Antisense strand to SEQ ID NO: 1430884
uagaacaauggcuuagcca

SEQ ID NO: 1430886 - RNA, 19 nt, Artificial Sequence
  Description of Artificial Sequence: Synthetic oligonucleotide
  Sense strand starting at position 2157 of SEQ ID NO: 1243642
gguuucuuggcagagcuga

SEQ ID NO: 1430887 - RNA, 19 nt, Artificial Sequence
  Description of Artificial Sequence: Synthetic oligonucleotide
  Antisense strand to SEQ ID NO: 1430886
ucagcucugccaagaaacc

SEQ ID NO: 1430888 - RNA, 19 nt, Artificial Sequence
  Description of Artificial Sequence: Synthetic oligonucleotide
  Sense strand starting at position 2177 of SEQ ID NO: 1243642
ccaggcuugguguguaaac

SEQ ID NO: 1430889 - RNA, 19 nt, Artificial Sequence
  Description of Artificial Sequence: Synthetic oligonucleotide
  Antisense strand to SEQ ID NO: 1430888
guuuacacaccaagccugg

SEQ ID NO: 1430890 - RNA, 19 nt, Artificial Sequence
  Description of Artificial Sequence: Synthetic oligonucleotide
  Sense strand starting at position 2179 of SEQ ID NO: 1243642
aggcuugguguguaaacca

SEQ ID NO: 1430891 - RNA, 19 nt, Artificial Sequence
  Description of Artificial Sequence: Synthetic oligonucleotide
  Antisense strand to SEQ ID NO: 1430890
ugguuuacacaccaagccu

SEQ ID NO: 1430892 - RNA, 19 nt, Artificial Sequence
  Description of Artificial Sequence: Synthetic oligonucleotide
  Sense strand starting at position 2249 of SEQ ID NO: 1243642
gcugcagauuuccacaaag

SEQ ID NO: 1430893 - RNA, 19 nt, Artificial Sequence
  Description of Artificial Sequence: Synthetic oligonucleotide
  Antisense strand to SEQ ID NO: 1430892
cuuuguggaaaucugcagc

SEQ ID NO: 1430894 - RNA, 19 nt, Artificial Sequence
  Description of Artificial Sequence: Synthetic oligonucleotide
  Sense strand starting at position 2370 of SEQ ID NO: 1243642
acauacuucucugugacga

SEQ ID NO: 1430895 - RNA, 19 nt, Artificial Sequence
  Description of Artificial Sequence: Synthetic oligonucleotide
  Antisense strand to SEQ ID NO: 1430894
ucgucacagagaaguaugu

SEQ ID NO: 1430896 - RNA, 19 nt, Artificial Sequence
  Description of Artificial Sequence: Synthetic oligonucleotide
  Sense strand starting at position 2371 of SEQ ID NO: 1243642
cauacuucucugugacgaa

SEQ ID NO: 1430897 - RNA, 19 nt, Artificial Sequence
  Description of Artificial Sequence: Synthetic oligonucleotide
  Antisense strand to SEQ ID NO: 1430896
uucgucacagagaaguaug

SEQ ID NO: 1430898 - RNA, 19 nt, Artificial Sequence
  Description of Artificial Sequence: Synthetic oligonucleotide
  Sense strand starting at position 2372 of SEQ ID NO: 1243642
auacuucucugugacgaaa

SEQ ID NO: 1430899 - RNA, 19 nt, Artificial Sequence
  Description of Artificial Sequence: Synthetic oligonucleotide
  Antisense strand to SEQ ID NO: 1430898
uuucgucacagagaaguau

SEQ ID NO: 1430900 - RNA, 19 nt, Artificial Sequence
  Description of Artificial Sequence: Synthetic oligonucleotide
  Sense strand starting at position 2422 of SEQ ID NO: 1243642
auaagaaagucaucacugu

SEQ ID NO: 1430901 - RNA, 19 nt, Artificial Sequence
  Description of Artificial Sequence: Synthetic oligonucleotide
  Antisense strand to SEQ ID NO: 1430900
acagugaugacuuucuuau

SEQ ID NO: 1430902 - RNA, 19 nt, Artificial Sequence
  Description of Artificial Sequence: Synthetic oligonucleotide
  Sense strand starting at position 2441 of SEQ ID NO: 1243642
uuucuauaacagggaagua

SEQ ID NO: 1430903 - RNA, 19 nt, Artificial Sequence
  Description of Artificial Sequence: Synthetic oligonucleotide
  Antisense strand to SEQ ID NO: 1430902
uacuucccuguuauagaaa

SEQ ID NO: 1430904 - RNA, 19 nt, Artificial Sequence
  Description of Artificial Sequence: Synthetic oligonucleotide
  Sense strand starting at position 2451 of SEQ ID NO: 1243642
agggaaguauuguaaacau

SEQ ID NO: 1430905 - RNA, 19 nt, Artificial Sequence
  Description of Artificial Sequence: Synthetic oligonucleotide
  Antisense strand to SEQ ID NO: 1430904
auguuuacaauacuucccu

SEQ ID NO: 1430906 - RNA, 19 nt, Artificial Sequence
  Description of Artificial Sequence: Synthetic oligonucleotide
  Sense strand starting at position 2469 of SEQ ID NO: 1243642
ucccaaagauccgaaagaa

SEQ ID NO: 1430907 - RNA, 19 nt, Artificial Sequence
  Description of Artificial Sequence: Synthetic oligonucleotide
  Antisense strand to SEQ ID NO: 1430906
uucuuucggaucuuuggga

SEQ ID NO: 1430908 - RNA, 19 nt, Artificial Sequence
  Description of Artificial Sequence: Synthetic oligonucleotide
  Sense strand starting at position 2524 of SEQ ID NO: 1243642
aaggguuuacugugcagua

SEQ ID NO: 1430909 - RNA, 19 nt, Artificial Sequence
  Description of Artificial Sequence: Synthetic oligonucleotide
  Antisense strand to SEQ ID NO: 1430908
uacugcacaguaaacccuu

SEQ ID NO: 1430910 - RNA, 19 nt, Artificial Sequence
  Description of Artificial Sequence: Synthetic oligonucleotide
  Sense strand starting at position 2525 of SEQ ID NO: 1243642
aggguuuacugugcaguau

SEQ ID NO: 1430911 - RNA, 19 nt, Artificial Sequence
  Description of Artificial Sequence: Synthetic oligonucleotide
  Antisense strand to SEQ ID NO: 1430910
auacugcacaguaaacccu

SEQ ID NO: 1430912 - RNA, 19 nt, Artificial Sequence
  Description of Artificial Sequence: Synthetic oligonucleotide
  Sense strand starting at position 2526 of SEQ ID NO: 1243642
ggguuuacugugcaguauu

SEQ ID NO: 1430913 - RNA, 19 nt, Artificial Sequence
  Description of Artificial Sequence: Synthetic oligonucleotide
  Antisense strand to SEQ ID NO: 1430912
aauacugcacaguaaaccc

SEQ ID NO: 1430914 - RNA, 19 nt, Artificial Sequence
  Description of Artificial Sequence: Synthetic oligonucleotide
  Sense strand starting at position 2536 of SEQ ID NO: 1243642
ugcaguauuuagggauuag

SEQ ID NO: 1430915 - RNA, 19 nt, Artificial Sequence
  Description of Artificial Sequence: Synthetic oligonucleotide
  Antisense strand to SEQ ID NO: 1430914
cuaaucccuaaauacugca

SEQ ID NO: 1430916 - RNA, 19 nt, Artificial Sequence
  Description of Artificial Sequence: Synthetic oligonucleotide
  Sense strand starting at position 2904 of SEQ ID NO: 1243642
agcacuuugaccgggagaa

SEQ ID NO: 1430917 - RNA, 19 nt, Artificial Sequence
  Description of Artificial Sequence: Synthetic oligonucleotide
  Antisense strand to SEQ ID NO: 1430916
uucucccggucaaagugcu

SEQ ID NO: 1430918 - RNA, 19 nt, Artificial Sequence
  Description of Artificial Sequence: Synthetic oligonucleotide
  Sense strand starting at position 2905 of SEQ ID NO: 1243642
gcacuuugaccgggagaau

SEQ ID NO: 1430919 - RNA, 19 nt, Artificial Sequence
  Description of Artificial Sequence: Synthetic oligonucleotide
  Antisense strand to SEQ ID NO: 1430918
auucucccggucaaagugc

SEQ ID NO: 1430920 - RNA, 19 nt, Artificial Sequence
  Description of Artificial Sequence: Synthetic oligonucleotide
  Sense strand starting at position 2925 of SEQ ID NO: 1243642
gagccauaaucacagaguu

SEQ ID NO: 1430921 - RNA, 19 nt, Artificial Sequence
  Description of Artificial Sequence: Synthetic oligonucleotide
  Antisense strand to SEQ ID NO: 1430920
aacucugugauuauggcuc

SEQ ID NO: 1430922 - RNA, 19 nt, Artificial Sequence
  Description of Artificial Sequence: Synthetic oligonucleotide
  Sense strand starting at position 2933 of SEQ ID NO: 1243642
aucacagaguucuccuauu

SEQ ID NO: 1430923 - RNA, 19 nt, Artificial Sequence
  Description of Artificial Sequence: Synthetic oligonucleotide
  Antisense strand to SEQ ID NO: 1430922
aauaggagaacucugugau

SEQ ID NO: 1430924 - RNA, 19 nt, Artificial Sequence
  Description of Artificial Sequence: Synthetic oligonucleotide
  Sense strand starting at position 2952 of SEQ ID NO: 1243642
agauuagugguaggaggua

SEQ ID NO: 1430925 - RNA, 19 nt, Artificial Sequence
  Description of Artificial Sequence: Synthetic oligonucleotide
  Antisense strand to SEQ ID NO: 1430924
uaccuccuaccacuaaucu

SEQ ID NO: 1430926 - RNA, 19 nt, Artificial Sequence
  Description of Artificial Sequence: Synthetic oligonucleotide
  Sense strand starting at position 2971 of SEQ ID NO: 1243642
aggcaagguuagugagauu

SEQ ID NO: 1430927 - RNA, 19 nt, Artificial Sequence
  Description of Artificial Sequence: Synthetic oligonucleotide
  Antisense strand to SEQ ID NO: 1430926
aaucucacuaaccuugccu

SEQ ID NO: 1430928 - RNA, 19 nt, Artificial Sequence
  Description of Artificial Sequence: Synthetic oligonucleotide
  Sense strand starting at position 3035 of SEQ ID NO: 1243642
ucggguaaguaauauaauu

SEQ ID NO: 1430929 - RNA, 19 nt, Artificial Sequence
  Description of Artificial Sequence: Synthetic oligonucleotide
  Antisense strand to SEQ ID NO: 1430928
aauuauauuacuuacccga

SEQ ID NO: 1430930 - RNA, 19 nt, Artificial Sequence
  Description of Artificial Sequence: Synthetic oligonucleotide
  Sense strand starting at position 3361 of SEQ ID NO: 1243642
uggaauuauugaugaucug

SEQ ID NO: 1430931 - RNA, 19 nt, Artificial Sequence
  Description of Artificial Sequence: Synthetic oligonucleotide
  Antisense strand to SEQ ID NO: 1430930
cagaucaucaauaauucca

SEQ ID NO: 1430932 - RNA, 19 nt, Artificial Sequence
  Description of Artificial Sequence: Synthetic oligonucleotide
  Sense strand starting at position 3384 of SEQ ID NO: 1243642
ccucuuaugcaauguuuga

SEQ ID NO: 1430933 - RNA, 19 nt, Artificial Sequence
  Description of Artificial Sequence: Synthetic oligonucleotide
  Antisense strand to SEQ ID NO: 1430932
ucaaacauugcauaagagg

SEQ ID NO: 1430934 - RNA, 19 nt, Artificial Sequence
  Description of Artificial Sequence: Synthetic oligonucleotide
  Sense strand starting at position 3388 of SEQ ID NO: 1243642
uuaugcaauguuugacuuu

SEQ ID NO: 1430935 - RNA, 19 nt, Artificial Sequence
  Description of Artificial Sequence: Synthetic oligonucleotide
  Antisense strand to SEQ ID NO: 1430934
aaagucaaacauugcauaa

SEQ ID NO: 1430936 - RNA, 19 nt, Artificial Sequence
  Description of Artificial Sequence: Synthetic oligonucleotide
  Sense strand starting at position 3407 of SEQ ID NO: 1243642
uugcaaugagcuuguauuu

SEQ ID NO: 1430937 - RNA, 19 nt, Artificial Sequence
  Description of Artificial Sequence: Synthetic oligonucleotide
  Antisense strand to SEQ ID NO: 1430936
aaauacaagcucauugcaa

SEQ ID NO: 1430938 - RNA, 19 nt, Artificial Sequence
  Description of Artificial Sequence: Synthetic oligonucleotide
  Sense strand starting at position 3452 of SEQ ID NO: 1243642
ggcacuacaugcucaugaa

SEQ ID NO: 1430939 - RNA, 19 nt, Artificial Sequence
  Description of Artificial Sequence: Synthetic oligonucleotide
  Antisense strand to SEQ ID NO: 1430938
uucaugagcauguagugcc

SEQ ID NO: 1430940 - RNA, 19 nt, Artificial Sequence
  Description of Artificial Sequence: Synthetic oligonucleotide
  Sense strand starting at position 3453 of SEQ ID NO: 1243642
gcacuacaugcucaugaaa

SEQ ID NO: 1430941 - RNA, 19 nt, Artificial Sequence
  Description of Artificial Sequence: Synthetic oligonucleotide
  Antisense strand to SEQ ID NO: 1430940
uuucaugagcauguagugc

SEQ ID NO: 1430942 - RNA, 19 nt, Artificial Sequence
  Description of Artificial Sequence: Synthetic oligonucleotide
  Sense strand starting at position 3592 of SEQ ID NO: 1243642
cugagauacucagcccacu

SEQ ID NO: 1430943 - RNA, 19 nt, Artificial Sequence
  Description of Artificial Sequence: Synthetic oligonucleotide
  Antisense strand to SEQ ID NO: 1430942
agugggcugaguaucucag

SEQ ID NO: 1430944 - RNA, 19 nt, Artificial Sequence
  Description of Artificial Sequence: Synthetic oligonucleotide
  Sense strand starting at position 3863 of SEQ ID NO: 1243642
cccucccuauguucugaua

SEQ ID NO: 1430945 - RNA, 19 nt, Artificial Sequence
  Description of Artificial Sequence: Synthetic oligonucleotide
  Antisense strand to SEQ ID NO: 1430944
uaucagaacauagggaggg

SEQ ID NO: 1430946 - RNA, 19 nt, Artificial Sequence
  Description of Artificial Sequence: Synthetic oligonucleotide
  Sense strand starting at position 3866 of SEQ ID NO: 1243642
ucccuauguucugauagga

SEQ ID NO: 1430947 - RNA, 19 nt, Artificial Sequence
  Description of Artificial Sequence: Synthetic oligonucleotide
  Antisense strand to SEQ ID NO: 1430946
uccuaucagaacauaggga

SEQ ID NO: 1430948 - RNA, 19 nt, Artificial Sequence
  Description of Artificial Sequence: Synthetic oligonucleotide
  Sense strand starting at position 312 of SEQ ID NO: 1243643
agaugauagccucaugccu

SEQ ID NO: 1430949 - RNA, 19 nt, Artificial Sequence
  Description of Artificial Sequence: Synthetic oligonucleotide
  Antisense strand to SEQ ID NO: 1430948
aggcaugaggcuaucaucu

SEQ ID NO: 1430950 - RNA, 19 nt, Artificial Sequence
  Description of Artificial Sequence: Synthetic oligonucleotide
  Sense strand starting at position 438 of SEQ ID NO: 1243643
gggagacccuguccguuua

SEQ ID NO: 1430951 - RNA, 19 nt, Artificial Sequence
  Description of Artificial Sequence: Synthetic oligonucleotide
  Antisense strand to SEQ ID NO: 1430950
uaaacggacagggucuccc

SEQ ID NO: 1430952 - RNA, 19 nt, Artificial Sequence
  Description of Artificial Sequence: Synthetic oligonucleotide
  Sense strand starting at position 440 of SEQ ID NO: 1243643
gagacccuguccguuuaaa

SEQ ID NO: 1430953 - RNA, 19 nt, Artificial Sequence
  Description of Artificial Sequence: Synthetic oligonucleotide
  Antisense strand to SEQ ID NO: 1430952
uuuaaacggacagggucuc

SEQ ID NO: 1430954 - RNA, 19 nt, Artificial Sequence
  Description of Artificial Sequence: Synthetic oligonucleotide
  Sense strand starting at position 894 of SEQ ID NO: 1243643
cacaaagcgugcuuccaaa

SEQ ID NO: 1430955 - RNA, 19 nt, Artificial Sequence
  Description of Artificial Sequence: Synthetic oligonucleotide
  Antisense strand to SEQ ID NO: 1430954
uuuggaagcacgcuuugug

SEQ ID NO: 1430956 - RNA, 19 nt, Artificial Sequence
  Description of Artificial Sequence: Synthetic oligonucleotide
  Sense strand starting at position 933 of SEQ ID NO: 1243643
gggaccuuguuagaaacuu

SEQ ID NO: 1430957 - RNA, 19 nt, Artificial Sequence
  Description of Artificial Sequence: Synthetic oligonucleotide
  Antisense strand to SEQ ID NO: 1430956
aaguuucuaacaagguccc

SEQ ID NO: 1430958 - RNA, 19 nt, Artificial Sequence
  Description of Artificial Sequence: Synthetic oligonucleotide
  Sense strand starting at position 941 of SEQ ID NO: 1243643
guuagaaacuuggaaucuc

SEQ ID NO: 1430959 - RNA, 19 nt, Artificial Sequence
  Description of Artificial Sequence: Synthetic oligonucleotide
  Antisense strand to SEQ ID NO: 1430958
gagauuccaaguuucuaac

SEQ ID NO: 1430960 - RNA, 19 nt, Artificial Sequence
  Description of Artificial Sequence: Synthetic oligonucleotide
  Sense strand starting at position 949 of SEQ ID NO: 1243643
cuuggaaucucagauccca

SEQ ID NO: 1430961 - RNA, 19 nt, Artificial Sequence
  Description of Artificial Sequence: Synthetic oligonucleotide
  Antisense strand to SEQ ID NO: 1430960
ugggaucugagauuccaag

SEQ ID NO: 1430962 - RNA, 19 nt, Artificial Sequence
  Description of Artificial Sequence: Synthetic oligonucleotide
  Sense strand starting at position 1012 of SEQ ID NO: 1243643
aggugacuguuagugcauu

SEQ ID NO: 1430963 - RNA, 19 nt, Artificial Sequence
  Description of Artificial Sequence: Synthetic oligonucleotide
  Antisense strand to SEQ ID NO: 1430962
aaugcacuaacagucaccu

SEQ ID NO: 1430964 - RNA, 19 nt, Artificial Sequence
  Description of Artificial Sequence: Synthetic oligonucleotide
  Sense strand starting at position 1059 of SEQ ID NO: 1243643
acacaaaguuaugaagaaa

SEQ ID NO: 1430965 - RNA, 19 nt, Artificial Sequence
  Description of Artificial Sequence: Synthetic oligonucleotide
  Antisense strand to SEQ ID NO: 1430964
uuucuucauaacuuugugu

SEQ ID NO: 1430966 - RNA, 19 nt, Artificial Sequence
  Description of Artificial Sequence: Synthetic oligonucleotide
  Sense strand starting at position 1177 of SEQ ID NO: 1243643
gguaauggguuauucagaa

SEQ ID NO: 1430967 - RNA, 19 nt, Artificial Sequence
  Description of Artificial Sequence: Synthetic oligonucleotide
  Antisense strand to SEQ ID NO: 1430966
uucugaauaacccauuacc

SEQ ID NO: 1430968 - RNA, 19 nt, Artificial Sequence
  Description of Artificial Sequence: Synthetic oligonucleotide
  Sense strand starting at position 1418 of SEQ ID NO: 1243643
cacagaagcuagguaacau

SEQ ID NO: 1430969 - RNA, 19 nt, Artificial Sequence
  Description of Artificial Sequence: Synthetic oligonucleotide
  Antisense strand to SEQ ID NO: 1430968
auguuaccuagcuucugug

SEQ ID NO: 1430970 - RNA, 19 nt, Artificial Sequence
  Description of Artificial Sequence: Synthetic oligonucleotide
  Sense strand starting at position 1438 of SEQ ID NO: 1243643
ugcccuucugagugcuaga

SEQ ID NO: 1430971 - RNA, 19 nt, Artificial Sequence
  Description of Artificial Sequence: Synthetic oligonucleotide
  Antisense strand to SEQ ID NO: 1430970
ucuagcacucagaagggca

SEQ ID NO: 1430972 - RNA, 19 nt, Artificial Sequence
  Description of Artificial Sequence: Synthetic oligonucleotide
  Sense strand starting at position 1441 of SEQ ID NO: 1243643
ccuucugagugcuagagga

SEQ ID NO: 1430973 - RNA, 19 nt, Artificial Sequence
  Description of Artificial Sequence: Synthetic oligonucleotide
  Antisense strand to SEQ ID NO: 1430972
uccucuagcacucagaagg

SEQ ID NO: 1430974 - RNA, 19 nt, Artificial Sequence
  Description of Artificial Sequence: Synthetic oligonucleotide
  Sense strand starting at position 1464 of SEQ ID NO: 1243643
gaaagucugcgggaacuuu

SEQ ID NO: 1430975 - RNA, 19 nt, Artificial Sequence
  Description of Artificial Sequence: Synthetic oligonucleotide
  Antisense strand to SEQ ID NO: 1430974
aaaguucccgcagacuuuc

SEQ ID NO: 1430976 - RNA, 19 nt, Artificial Sequence
  Description of Artificial Sequence: Synthetic oligonucleotide
  Sense strand starting at position 1472 of SEQ ID NO: 1243643
gcgggaacuuuggcuuuau

SEQ ID NO: 1430977 - RNA, 19 nt, Artificial Sequence
  Description of Artificial Sequence: Synthetic oligonucleotide
  Antisense strand to SEQ ID NO: 1430976
auaaagccaaaguucccgc

SEQ ID NO: 1430978 - RNA, 19 nt, Artificial Sequence
  Description of Artificial Sequence: Synthetic oligonucleotide
  Sense strand starting at position 1473 of SEQ ID NO: 1243643
cgggaacuuuggcuuuauc

SEQ ID NO: 1430979 - RNA, 19 nt, Artificial Sequence
  Description of Artificial Sequence: Synthetic oligonucleotide
  Antisense strand to SEQ ID NO: 1430978
gauaaagccaaaguucccg

SEQ ID NO: 1430980 - RNA, 19 nt, Artificial Sequence
  Description of Artificial Sequence: Synthetic oligonucleotide
  Sense strand starting at position 1476 of SEQ ID NO: 1243643
gaacuuuggcuuuaucugu

SEQ ID NO: 1430981 - RNA, 19 nt, Artificial Sequence
  Description of Artificial Sequence: Synthetic oligonucleotide
  Antisense strand to SEQ ID NO: 1430980
acagauaaagccaaaguuc

SEQ ID NO: 1430982 - RNA, 19 nt, Artificial Sequence
  Description of Artificial Sequence: Synthetic oligonucleotide
  Sense strand starting at position 1482 of SEQ ID NO: 1243643
uggcuuuaucuguaucgcu

SEQ ID NO: 1430983 - RNA, 19 nt, Artificial Sequence
  Description of Artificial Sequence: Synthetic oligonucleotide
  Antisense strand to SEQ ID NO: 1430982
agcgauacagauaaagcca

SEQ ID NO: 1430984 - RNA, 19 nt, Artificial Sequence
  Description of Artificial Sequence: Synthetic oligonucleotide
  Sense strand starting at position 1487 of SEQ ID NO: 1243643
uuaucuguaucgcuggaga

SEQ ID NO: 1430985 - RNA, 19 nt, Artificial Sequence
  Description of Artificial Sequence: Synthetic oligonucleotide
  Antisense strand to SEQ ID NO: 1430984
ucuccagcgauacagauaa

SEQ ID NO: 1430986 - RNA, 19 nt, Artificial Sequence
  Description of Artificial Sequence: Synthetic oligonucleotide
  Sense strand starting at position 1489 of SEQ ID NO: 1243643
aucuguaucgcuggagauc

SEQ ID NO: 1430987 - RNA, 19 nt, Artificial Sequence
  Description of Artificial Sequence: Synthetic oligonucleotide
  Antisense strand to SEQ ID NO: 1430986
gaucuccagcgauacagau

SEQ ID NO: 1430988 - RNA, 19 nt, Artificial Sequence
  Description of Artificial Sequence: Synthetic oligonucleotide
  Sense strand starting at position 1490 of SEQ ID NO: 1243643
ucuguaucgcuggagauca

SEQ ID NO: 1430989 - RNA, 19 nt, Artificial Sequence
  Description of Artificial Sequence: Synthetic oligonucleotide
  Antisense strand to SEQ ID NO: 1430988
ugaucuccagcgauacaga

SEQ ID NO: 1430990 - RNA, 19 nt, Artificial Sequence
  Description of Artificial Sequence: Synthetic oligonucleotide
  Sense strand starting at position 1492 of SEQ ID NO: 1243643
uguaucgcuggagaucaua

SEQ ID NO: 1430991 - RNA, 19 nt, Artificial Sequence
  Description of Artificial Sequence: Synthetic oligonucleotide
  Antisense strand to SEQ ID NO: 1430990
uaugaucuccagcgauaca

SEQ ID NO: 1430992 - RNA, 19 nt, Artificial Sequence
  Description of Artificial Sequence: Synthetic oligonucleotide
  Sense strand starting at position 1500 of SEQ ID NO: 1243643
uggagaucauacucccagu

SEQ ID NO: 1430993 - RNA, 19 nt, Artificial Sequence
  Description of Artificial Sequence: Synthetic oligonucleotide
  Antisense strand to SEQ ID NO: 1430992
acugggaguaugaucucca

SEQ ID NO: 1430994 - RNA, 19 nt, Artificial Sequence
  Description of Artificial Sequence: Synthetic oligonucleotide
  Sense strand starting at position 1511 of SEQ ID NO: 1243643
cucccagugcuggaguaau

SEQ ID NO: 1430995 - RNA, 19 nt, Artificial Sequence
  Description of Artificial Sequence: Synthetic oligonucleotide
  Antisense strand to SEQ ID NO: 1430994
auuacuccagcacugggag

SEQ ID NO: 1430996 - RNA, 19 nt, Artificial Sequence
  Description of Artificial Sequence: Synthetic oligonucleotide
  Sense strand starting at position 1519 of SEQ ID NO: 1243643
gcuggaguaauccgaaaug

SEQ ID NO: 1430997 - RNA, 19 nt, Artificial Sequence
  Description of Artificial Sequence: Synthetic oligonucleotide
  Antisense strand to SEQ ID NO: 1430996
cauuucggauuacuccagc

SEQ ID NO: 1430998 - RNA, 19 nt, Artificial Sequence
  Description of Artificial Sequence: Synthetic oligonucleotide
  Sense strand starting at position 2561 of SEQ ID NO: 1243643
gucauuuccuucuugcaca

SEQ ID NO: 1430999 - RNA, 19 nt, Artificial Sequence
  Description of Artificial Sequence: Synthetic oligonucleotide
  Antisense strand to SEQ ID NO: 1430998
ugugcaagaaggaaaugac

SEQ ID NO: 1431000 - RNA, 19 nt, Artificial Sequence
  Description of Artificial Sequence: Synthetic oligonucleotide
  Sense strand starting at position 2707 of SEQ ID NO: 1243643
uugccuuucgggcgagaga

SEQ ID NO: 1431001 - RNA, 19 nt, Artificial Sequence
  Description of Artificial Sequence: Synthetic oligonucleotide
  Antisense strand to SEQ ID NO: 1431000
ucucucgcccgaaaggcaa

SEQ ID NO: 1431002 - RNA, 19 nt, Artificial Sequence
  Description of Artificial Sequence: Synthetic oligonucleotide
  Sense strand starting at position 2709 of SEQ ID NO: 1243643
gccuuucgggcgagagacu

SEQ ID NO: 1431003 - RNA, 19 nt, Artificial Sequence
  Description of Artificial Sequence: Synthetic oligonucleotide
  Antisense strand to SEQ ID NO: 1431002
agucucucgcccgaaaggc

SEQ ID NO: 1431004 - RNA, 19 nt, Artificial Sequence
  Description of Artificial Sequence: Synthetic oligonucleotide
  Sense strand starting at position 2774 of SEQ ID NO: 1243643
uccugucuuguggaaagcu

SEQ ID NO: 1431005 - RNA, 19 nt, Artificial Sequence
  Description of Artificial Sequence: Synthetic oligonucleotide
  Antisense strand to SEQ ID NO: 1431004
agcuuuccacaagacagga

SEQ ID NO: 1431006 - RNA, 19 nt, Artificial Sequence
  Description of Artificial Sequence: Synthetic oligonucleotide
  Sense strand starting at position 2861 of SEQ ID NO: 1243643
ggguuccuuugcuggauuu

SEQ ID NO: 1431007 - RNA, 19 nt, Artificial Sequence
  Description of Artificial Sequence: Synthetic oligonucleotide
  Antisense strand to SEQ ID NO: 1431006
aaauccagcaaaggaaccc

SEQ ID NO: 1431008 - RNA, 19 nt, Artificial Sequence
  Description of Artificial Sequence: Synthetic oligonucleotide
  Sense strand starting at position 2957 of SEQ ID NO: 1243643
auguaaucccaugaauagu

SEQ ID NO: 1431009 - RNA, 19 nt, Artificial Sequence
  Description of Artificial Sequence: Synthetic oligonucleotide
  Antisense strand to SEQ ID NO: 1431008
acuauucaugggauuacau

SEQ ID NO: 1431010 - RNA, 19 nt, Artificial Sequence
  Description of Artificial Sequence: Synthetic oligonucleotide
  Sense strand starting at position 2966 of SEQ ID NO: 1243643
caugaauagugcucacaga

SEQ ID NO: 1431011 - RNA, 19 nt, Artificial Sequence
  Description of Artificial Sequence: Synthetic oligonucleotide
  Antisense strand to SEQ ID NO: 1431010
ucugugagcacuauucaug

SEQ ID NO: 1431012 - RNA, 19 nt, Artificial Sequence
  Description of Artificial Sequence: Synthetic oligonucleotide
  Sense strand starting at position 3173 of SEQ ID NO: 1243643
cuaugucccuaagcagaua

SEQ ID NO: 1431013 - RNA, 19 nt, Artificial Sequence
  Description of Artificial Sequence: Synthetic oligonucleotide
  Antisense strand to SEQ ID NO: 1431012
uaucugcuuagggacauag

SEQ ID NO: 1431014 - RNA, 19 nt, Artificial Sequence
  Description of Artificial Sequence: Synthetic oligonucleotide
  Sense strand starting at position 3870 of SEQ ID NO: 1243643
ggacccuauuccuagguaa

SEQ ID NO: 1431015 - RNA, 19 nt, Artificial Sequence
  Description of Artificial Sequence: Synthetic oligonucleotide
  Antisense strand to SEQ ID NO: 1431014
uuaccuaggaauagggucc

SEQ ID NO: 1431016 - RNA, 19 nt, Artificial Sequence
  Description of Artificial Sequence: Synthetic oligonucleotide
  Sense strand starting at position 3873 of SEQ ID NO: 1243643
cccuauuccuagguaagca

SEQ ID NO: 1431017 - RNA, 19 nt, Artificial Sequence
  Description of Artificial Sequence: Synthetic oligonucleotide
  Antisense strand to SEQ ID NO: 1431016
ugcuuaccuaggaauaggg

SEQ ID NO: 1431018 - RNA, 19 nt, Artificial Sequence
  Description of Artificial Sequence: Synthetic oligonucleotide
  Sense strand starting at position 3912 of SEQ ID NO: 1243643
uggaaacucuccuugguga

SEQ ID NO: 1431019 - RNA, 19 nt, Artificial Sequence
  Description of Artificial Sequence: Synthetic oligonucleotide
  Antisense strand to SEQ ID NO: 1431018
ucaccaaggagaguuucca

SEQ ID NO: 1431020 - RNA, 19 nt, Artificial Sequence
  Description of Artificial Sequence: Synthetic oligonucleotide
  Sense strand starting at position 3914 of SEQ ID NO: 1243643
gaaacucuccuuggugacu

SEQ ID NO: 1431021 - RNA, 19 nt, Artificial Sequence
  Description of Artificial Sequence: Synthetic oligonucleotide
  Antisense strand to SEQ ID NO: 1431020
agucaccaaggagaguuuc

SEQ ID NO: 1431022 - RNA, 19 nt, Artificial Sequence
  Description of Artificial Sequence: Synthetic oligonucleotide
  Sense strand starting at position 3919 of SEQ ID NO: 1243643
ucuccuuggugacuaaagu

SEQ ID NO: 1431023 - RNA, 19 nt, Artificial Sequence
  Description of Artificial Sequence: Synthetic oligonucleotide
  Antisense strand to SEQ ID NO: 1431022
acuuuagucaccaaggaga

SEQ ID NO: 1431024 - RNA, 19 nt, Artificial Sequence
  Description of Artificial Sequence: Synthetic oligonucleotide
  Sense strand starting at position 3920 of SEQ ID NO: 1243643
cuccuuggugacuaaaguu

SEQ ID NO: 1431025 - RNA, 19 nt, Artificial Sequence
  Description of Artificial Sequence: Synthetic oligonucleotide
  Antisense strand to SEQ ID NO: 1431024
aacuuuagucaccaaggag

SEQ ID NO: 1431026 - RNA, 19 nt, Artificial Sequence
  Description of Artificial Sequence: Synthetic oligonucleotide
  Sense strand starting at position 3971 of SEQ ID NO: 1243643
uuaccauuagagcgcucaa

SEQ ID NO: 1431027 - RNA, 19 nt, Artificial Sequence
  Description of Artificial Sequence: Synthetic oligonucleotide
  Antisense strand to SEQ ID NO: 1431026
uugagcgcucuaaugguaa

SEQ ID NO: 1431028 - RNA, 19 nt, Artificial Sequence
  Description of Artificial Sequence: Synthetic oligonucleotide
  Sense strand starting at position 98 of SEQ ID NO: 1243644
guugaauccaggcaggauu

SEQ ID NO: 1431029 - RNA, 19 nt, Artificial Sequence
  Description of Artificial Sequence: Synthetic oligonucleotide
  Antisense strand to SEQ ID NO: 1431028
aauccugccuggauucaac

SEQ ID NO: 1431030 - RNA, 19 nt, Artificial Sequence
  Description of Artificial Sequence: Synthetic oligonucleotide
  Sense strand starting at position 208 of SEQ ID NO: 1243644
gcccuuauccuggaugguu

SEQ ID NO: 1431031 - RNA, 19 nt, Artificial Sequence
  Description of Artificial Sequence: Synthetic oligonucleotide
  Antisense strand to SEQ ID NO: 1431030
aaccauccaggauaagggc

SEQ ID NO: 1431032 - RNA, 19 nt, Artificial Sequence
  Description of Artificial Sequence: Synthetic oligonucleotide
  Sense strand starting at position 242 of SEQ ID NO: 1243644
ccauuaucaucuuucuggu

SEQ ID NO: 1431033 - RNA, 19 nt, Artificial Sequence
  Description of Artificial Sequence: Synthetic oligonucleotide
  Antisense strand to SEQ ID NO: 1431032
accagaaagaugauaaugg

SEQ ID NO: 1431034 - RNA, 19 nt, Artificial Sequence
  Description of Artificial Sequence: Synthetic oligonucleotide
  Sense strand starting at position 468 of SEQ ID NO: 1243644
ggcuacagauguccacuua

SEQ ID NO: 1431035 - RNA, 19 nt, Artificial Sequence
  Description of Artificial Sequence: Synthetic oligonucleotide
  Antisense strand to SEQ ID NO: 1431034
uaaguggacaucuguagcc

SEQ ID NO: 1431036 - RNA, 19 nt, Artificial Sequence
  Description of Artificial Sequence: Synthetic oligonucleotide
  Sense strand starting at position 557 of SEQ ID NO: 1243644
ccuucuucugcucagcaga

SEQ ID NO: 1431037 - RNA, 19 nt, Artificial Sequence
  Description of Artificial Sequence: Synthetic oligonucleotide
  Antisense strand to SEQ ID NO: 1431036
ucugcugagcagaagaagg

SEQ ID NO: 1431038 - RNA, 19 nt, Artificial Sequence
  Description of Artificial Sequence: Synthetic oligonucleotide
  Sense strand starting at position 1016 of SEQ ID NO: 1243644
gggaaaguguacuuacuuc

SEQ ID NO: 1431039 - RNA, 19 nt, Artificial Sequence
  Description of Artificial Sequence: Synthetic oligonucleotide
  Antisense strand to SEQ ID NO: 1431038
gaaguaaguacacuuuccc

SEQ ID NO: 1431040 - RNA, 19 nt, Artificial Sequence
  Description of Artificial Sequence: Synthetic oligonucleotide
  Sense strand starting at position 1240 of SEQ ID NO: 1243644
gcugcagugauguaggaaa

SEQ ID NO: 1431041 - RNA, 19 nt, Artificial Sequence
  Description of Artificial Sequence: Synthetic oligonucleotide
  Antisense strand to SEQ ID NO: 1431040
uuuccuacaucacugcagc

SEQ ID NO: 1431042 - RNA, 19 nt, Artificial Sequence
  Description of Artificial Sequence: Synthetic oligonucleotide
  Sense strand starting at position 1242 of SEQ ID NO: 1243644
ugcagugauguaggaaaga

SEQ ID NO: 1431043 - RNA, 19 nt, Artificial Sequence
  Description of Artificial Sequence: Synthetic oligonucleotide
  Antisense strand to SEQ ID NO: 1431042
ucuuuccuacaucacugca

SEQ ID NO: 1431044 - RNA, 19 nt, Artificial Sequence
  Description of Artificial Sequence: Synthetic oligonucleotide
  Sense strand starting at position 1270 of SEQ ID NO: 1243644
gggucagcuguguuagugu

SEQ ID NO: 1431045 - RNA, 19 nt, Artificial Sequence
  Description of Artificial Sequence: Synthetic oligonucleotide
  Antisense strand to SEQ ID NO: 1431044
acacuaacacagcugaccc

SEQ ID NO: 1431046 - RNA, 19 nt, Artificial Sequence
  Description of Artificial Sequence: Synthetic oligonucleotide
  Sense strand starting at position 1345 of SEQ ID NO: 1243644
accuguuuggcaggaggau

SEQ ID NO: 1431047 - RNA, 19 nt, Artificial Sequence
  Description of Artificial Sequence: Synthetic oligonucleotide
  Antisense strand to SEQ ID NO: 1431046
auccuccugccaaacaggu

SEQ ID NO: 1431048 - RNA, 19 nt, Artificial Sequence
  Description of Artificial Sequence: Synthetic oligonucleotide
  Sense strand starting at position 1346 of SEQ ID NO: 1243644
ccuguuuggcaggaggaua

SEQ ID NO: 1431049 - RNA, 19 nt, Artificial Sequence
  Description of Artificial Sequence: Synthetic oligonucleotide
  Antisense strand to SEQ ID NO: 1431048
uauccuccugccaaacagg

SEQ ID NO: 1431050 - RNA, 19 nt, Artificial Sequence
  Description of Artificial Sequence: Synthetic oligonucleotide
  Sense strand starting at position 1911 of SEQ ID NO: 1243644
gguucugauccgcaaacag

SEQ ID NO: 1431051 - RNA, 19 nt, Artificial Sequence
  Description of Artificial Sequence: Synthetic oligonucleotide
  Antisense strand to SEQ ID NO: 1431050
cuguuugcggaucagaacc

SEQ ID NO: 1431052 - RNA, 19 nt, Artificial Sequence
  Description of Artificial Sequence: Synthetic oligonucleotide
  Sense strand starting at position 1968 of SEQ ID NO: 1243644
ugcggaugucgcagagcua

SEQ ID NO: 1431053 - RNA, 19 nt, Artificial Sequence
  Description of Artificial Sequence: Synthetic oligonucleotide
  Antisense strand to SEQ ID NO: 1431052
uagcucugcgacauccgca

SEQ ID NO: 1431054 - RNA, 19 nt, Artificial Sequence
  Description of Artificial Sequence: Synthetic oligonucleotide
  Sense strand starting at position 2110 of SEQ ID NO: 1243644
caggcauccguggcuguua

SEQ ID NO: 1431055 - RNA, 19 nt, Artificial Sequence
  Description of Artificial Sequence: Synthetic oligonucleotide
  Antisense strand to SEQ ID NO: 1431054
uaacagccacggaugccug

SEQ ID NO: 1431056 - RNA, 19 nt, Artificial Sequence
  Description of Artificial Sequence: Synthetic oligonucleotide
  Sense strand starting at position 2622 of SEQ ID NO: 1243644
uuccguaagcuuggagaaa

SEQ ID NO: 1431057 - RNA, 19 nt, Artificial Sequence
  Description of Artificial Sequence: Synthetic oligonucleotide
  Antisense strand to SEQ ID NO: 1431056
uuucuccaagcuuacggaa

SEQ ID NO: 1431058 - RNA, 19 nt, Artificial Sequence
  Description of Artificial Sequence: Synthetic oligonucleotide
  Sense strand starting at position 2667 of SEQ ID NO: 1243644
gcauuuaucucaguuggcu

SEQ ID NO: 1431059 - RNA, 19 nt, Artificial Sequence
  Description of Artificial Sequence: Synthetic oligonucleotide
  Antisense strand to SEQ ID NO: 1431058
agccaacugagauaaaugc

SEQ ID NO: 1431060 - RNA, 19 nt, Artificial Sequence
  Description of Artificial Sequence: Synthetic oligonucleotide
  Sense strand starting at position 2758 of SEQ ID NO: 1243644
ucaguuucuuagcucagaa

SEQ ID NO: 1431061 - RNA, 19 nt, Artificial Sequence
  Description of Artificial Sequence: Synthetic oligonucleotide
  Antisense strand to SEQ ID NO: 1431060
uucugagcuaagaaacuga

SEQ ID NO: 1431062 - RNA, 19 nt, Artificial Sequence
  Description of Artificial Sequence: Synthetic oligonucleotide
  Sense strand starting at position 2760 of SEQ ID NO: 1243644
aguuucuuagcucagaaau

SEQ ID NO: 1431063 - RNA, 19 nt, Artificial Sequence
  Description of Artificial Sequence: Synthetic oligonucleotide
  Antisense strand to SEQ ID NO: 1431062
auuucugagcuaagaaacu

SEQ ID NO: 1431064 - RNA, 19 nt, Artificial Sequence
  Description of Artificial Sequence: Synthetic oligonucleotide
  Sense strand starting at position 2943 of SEQ ID NO: 1243644
cagagaagccugcaauagu

SEQ ID NO: 1431065 - RNA, 19 nt, Artificial Sequence
  Description of Artificial Sequence: Synthetic oligonucleotide
  Antisense strand to SEQ ID NO: 1431064
acuauugcaggcuucucug

SEQ ID NO: 1431066 - RNA, 19 nt, Artificial Sequence
  Description of Artificial Sequence: Synthetic oligonucleotide
  Sense strand starting at position 2992 of SEQ ID NO: 1243644
gaaccagaucugugcucau

SEQ ID NO: 1431067 - RNA, 19 nt, Artificial Sequence
  Description of Artificial Sequence: Synthetic oligonucleotide
  Antisense strand to SEQ ID NO: 1431066
augagcacagaucugguuc

SEQ ID NO: 1431068 - RNA, 19 nt, Artificial Sequence
  Description of Artificial Sequence: Synthetic oligonucleotide
  Sense strand starting at position 2995 of SEQ ID NO: 1243644
ccagaucugugcucauuag

SEQ ID NO: 1431069 - RNA, 19 nt, Artificial Sequence
  Description of Artificial Sequence: Synthetic oligonucleotide
  Antisense strand to SEQ ID NO: 1431068
cuaaugagcacagaucugg

SEQ ID NO: 1431070 - RNA, 19 nt, Artificial Sequence
  Description of Artificial Sequence: Synthetic oligonucleotide
  Sense strand starting at position 2996 of SEQ ID NO: 1243644
cagaucugugcucauuagu

SEQ ID NO: 1431071 - RNA, 19 nt, Artificial Sequence
  Description of Artificial Sequence: Synthetic oligonucleotide
  Antisense strand to SEQ ID NO: 1431070
acuaaugagcacagaucug

SEQ ID NO: 1431072 - RNA, 19 nt, Artificial Sequence
  Description of Artificial Sequence: Synthetic oligonucleotide
  Sense strand starting at position 3090 of SEQ ID NO: 1243644
ugaacaaugucaucuaguu

SEQ ID NO: 1431073 - RNA, 19 nt, Artificial Sequence
  Description of Artificial Sequence: Synthetic oligonucleotide
  Antisense strand to SEQ ID NO: 1431072
aacuagaugacauuguuca

SEQ ID NO: 1431074 - RNA, 19 nt, Artificial Sequence
  Description of Artificial Sequence: Synthetic oligonucleotide
  Sense strand starting at position 3136 of SEQ ID NO: 1243644
gguucuccucuaggauauu

SEQ ID NO: 1431075 - RNA, 19 nt, Artificial Sequence
  Description of Artificial Sequence: Synthetic oligonucleotide
  Antisense strand to SEQ ID NO: 1431074
aauauccuagaggagaacc

SEQ ID NO: 1431076 - RNA, 19 nt, Artificial Sequence
  Description of Artificial Sequence: Synthetic oligonucleotide
  Sense strand starting at position 3235 of SEQ ID NO: 1243644
uuuguuaacgaugguagga

SEQ ID NO: 1431077 - RNA, 19 nt, Artificial Sequence
  Description of Artificial Sequence: Synthetic oligonucleotide
  Antisense strand to SEQ ID NO: 1431076
uccuaccaucguuaacaaa

SEQ ID NO: 1431078 - RNA, 19 nt, Artificial Sequence
  Description of Artificial Sequence: Synthetic oligonucleotide
  Sense strand starting at position 3250 of SEQ ID NO: 1243644
aggaaauggcccuggaaug

SEQ ID NO: 1431079 - RNA, 19 nt, Artificial Sequence
  Description of Artificial Sequence: Synthetic oligonucleotide
  Antisense strand to SEQ ID NO: 1431078
cauuccagggccauuuccu

SEQ ID NO: 1431080 - RNA, 19 nt, Artificial Sequence
  Description of Artificial Sequence: Synthetic oligonucleotide
  Sense strand starting at position 3260 of SEQ ID NO: 1243644
ccuggaauggcauggacau

SEQ ID NO: 1431081 - RNA, 19 nt, Artificial Sequence
  Description of Artificial Sequence: Synthetic oligonucleotide
  Antisense strand to SEQ ID NO: 1431080
auguccaugccauuccagg

SEQ ID NO: 1431082 - RNA, 19 nt, Artificial Sequence
  Description of Artificial Sequence: Synthetic oligonucleotide
  Sense strand starting at position 3261 of SEQ ID NO: 1243644
cuggaauggcauggacauu

SEQ ID NO: 1431083 - RNA, 19 nt, Artificial Sequence
  Description of Artificial Sequence: Synthetic oligonucleotide
  Antisense strand to SEQ ID NO: 1431082
aauguccaugccauuccag

SEQ ID NO: 1431084 - RNA, 19 nt, Artificial Sequence
  Description of Artificial Sequence: Synthetic oligonucleotide
  Sense strand starting at position 3280 of SEQ ID NO: 1243644
cuuacauggcucuggaacu

SEQ ID NO: 1431085 - RNA, 19 nt, Artificial Sequence
  Description of Artificial Sequence: Synthetic oligonucleotide
  Antisense strand to SEQ ID NO: 1431084
aguuccagagccauguaag

SEQ ID NO: 1431086 - RNA, 19 nt, Artificial Sequence
  Description of Artificial Sequence: Synthetic oligonucleotide
  Sense strand starting at position 3287 of SEQ ID NO: 1243644
ggcucuggaacuugaucau

SEQ ID NO: 1431087 - RNA, 19 nt, Artificial Sequence
  Description of Artificial Sequence: Synthetic oligonucleotide
  Antisense strand to SEQ ID NO: 1431086
augaucaaguuccagagcc

SEQ ID NO: 1431088 - RNA, 19 nt, Artificial Sequence
  Description of Artificial Sequence: Synthetic oligonucleotide
  Sense strand starting at position 3360 of SEQ ID NO: 1243644
cuagaaauauguccagauc

SEQ ID NO: 1431089 - RNA, 19 nt, Artificial Sequence
  Description of Artificial Sequence: Synthetic oligonucleotide
  Antisense strand to SEQ ID NO: 1431088
gaucuggacauauuucuag

SEQ ID NO: 1431090 - RNA, 19 nt, Artificial Sequence
  Description of Artificial Sequence: Synthetic oligonucleotide
  Sense strand starting at position 3451 of SEQ ID NO: 1243644
gccacacuuucuccuggau

SEQ ID NO: 1431091 - RNA, 19 nt, Artificial Sequence
  Description of Artificial Sequence: Synthetic oligonucleotide
  Antisense strand to SEQ ID NO: 1431090
auccaggagaaaguguggc

SEQ ID NO: 1431092 - RNA, 19 nt, Artificial Sequence
  Description of Artificial Sequence: Synthetic oligonucleotide
  Sense strand starting at position 3467 of SEQ ID NO: 1243644
gauccaauugguggccaua

SEQ ID NO: 1431093 - RNA, 19 nt, Artificial Sequence
  Description of Artificial Sequence: Synthetic oligonucleotide
  Antisense strand to SEQ ID NO: 1431092
uauggccaccaauuggauc

SEQ ID NO: 1431094 - RNA, 19 nt, Artificial Sequence
  Description of Artificial Sequence: Synthetic oligonucleotide
  Sense strand starting at position 3585 of SEQ ID NO: 1243644
ucucuaaggcucugggaau

SEQ ID NO: 1431095 - RNA, 19 nt, Artificial Sequence
  Description of Artificial Sequence: Synthetic oligonucleotide
  Antisense strand to SEQ ID NO: 1431094
auucccagagccuuagaga

SEQ ID NO: 1431096 - RNA, 19 nt, Artificial Sequence
  Description of Artificial Sequence: Synthetic oligonucleotide
  Sense strand starting at position 3591 of SEQ ID NO: 1243644
aggcucugggaaugagaau

SEQ ID NO: 1431097 - RNA, 19 nt, Artificial Sequence
  Description of Artificial Sequence: Synthetic oligonucleotide
  Antisense strand to SEQ ID NO: 1431096
auucucauucccagagccu

SEQ ID NO: 1431098 - RNA, 19 nt, Artificial Sequence
  Description of Artificial Sequence: Synthetic oligonucleotide
  Sense strand starting at position 3614 of SEQ ID NO: 1243644
agguguccaauaggacaua

SEQ ID NO: 1431099 - RNA, 19 nt, Artificial Sequence
  Description of Artificial Sequence: Synthetic oligonucleotide
  Antisense strand to SEQ ID NO: 1431098
uauguccuauuggacaccu

SEQ ID NO: 1431100 - RNA, 19 nt, Artificial Sequence
  Description of Artificial Sequence: Synthetic oligonucleotide
  Sense strand starting at position 3755 of SEQ ID NO: 1243644
uugucuaucuguucuagga

SEQ ID NO: 1431101 - RNA, 19 nt, Artificial Sequence
  Description of Artificial Sequence: Synthetic oligonucleotide
  Antisense strand to SEQ ID NO: 1431100
uccuagaacagauagacaa

SEQ ID NO: 1431102 - RNA, 19 nt, Artificial Sequence
  Description of Artificial Sequence: Synthetic oligonucleotide
  Sense strand starting at position 3759 of SEQ ID NO: 1243644
cuaucuguucuaggaucuu

SEQ ID NO: 1431103 - RNA, 19 nt, Artificial Sequence
  Description of Artificial Sequence: Synthetic oligonucleotide
  Antisense strand to SEQ ID NO: 1431102
aagauccuagaacagauag

SEQ ID NO: 1431104 - RNA, 19 nt, Artificial Sequence
  Description of Artificial Sequence: Synthetic oligonucleotide
  Sense strand starting at position 3889 of SEQ ID NO: 1243644
gagagagugccugacccau

SEQ ID NO: 1431105 - RNA, 19 nt, Artificial Sequence
  Description of Artificial Sequence: Synthetic oligonucleotide
  Antisense strand to SEQ ID NO: 1431104
augggucaggcacucucuc

SEQ ID NO: 1431106 - RNA, 19 nt, Artificial Sequence
  Description of Artificial Sequence: Synthetic oligonucleotide
  Sense strand starting at position 3929 of SEQ ID NO: 1243644
uugauaucacgccaauucu

SEQ ID NO: 1431107 - RNA, 19 nt, Artificial Sequence
  Description of Artificial Sequence: Synthetic oligonucleotide
  Antisense strand to SEQ ID NO: 1431106
agaauuggcgugauaucaa

SEQ ID NO: 1431108 - RNA, 19 nt, Artificial Sequence
  Description of Artificial Sequence: Synthetic oligonucleotide
  Sense strand starting at position 71 of SEQ ID NO: 1243645
ggccuuugccugugacuac

SEQ ID NO: 1431109 - RNA, 19 nt, Artificial Sequence
  Description of Artificial Sequence: Synthetic oligonucleotide
  Antisense strand to SEQ ID NO: 1431108
guagucacaggcaaaggcc

SEQ ID NO: 1431110 - RNA, 19 nt, Artificial Sequence
  Description of Artificial Sequence: Synthetic oligonucleotide
  Sense strand starting at position 82 of SEQ ID NO: 1243645
gugacuacuuucucuguua

SEQ ID NO: 1431111 - RNA, 19 nt, Artificial Sequence
  Description of Artificial Sequence: Synthetic oligonucleotide
  Antisense strand to SEQ ID NO: 1431110
uaacagagaaaguagucac

SEQ ID NO: 1431112 - RNA, 19 nt, Artificial Sequence
  Description of Artificial Sequence: Synthetic oligonucleotide
  Sense strand starting at position 215 of SEQ ID NO: 1243645
agggacuuaugcuaagaaa

SEQ ID NO: 1431113 - RNA, 19 nt, Artificial Sequence
  Description of Artificial Sequence: Synthetic oligonucleotide
  Antisense strand to SEQ ID NO: 1431112
uuucuuagcauaagucccu

SEQ ID NO: 1431114 - RNA, 19 nt, Artificial Sequence
  Description of Artificial Sequence: Synthetic oligonucleotide
  Sense strand starting at position 218 of SEQ ID NO: 1243645
gacuuaugcuaagaaaugg

SEQ ID NO: 1431115 - RNA, 19 nt, Artificial Sequence
  Description of Artificial Sequence: Synthetic oligonucleotide
  Antisense strand to SEQ ID NO: 1431114
ccauuucuuagcauaaguc

SEQ ID NO: 1431116 - RNA, 19 nt, Artificial Sequence
  Description of Artificial Sequence: Synthetic oligonucleotide
  Sense strand starting at position 229 of SEQ ID NO: 1243645
agaaauggauggugggaaa

SEQ ID NO: 1431117 - RNA, 19 nt, Artificial Sequence
  Description of Artificial Sequence: Synthetic oligonucleotide
  Antisense strand to SEQ ID NO: 1431116
uuucccaccauccauuucu

SEQ ID NO: 1431118 - RNA, 19 nt, Artificial Sequence
  Description of Artificial Sequence: Synthetic oligonucleotide
  Sense strand starting at position 277 of SEQ ID NO: 1243645
aaagauggcuuucgaugaa

SEQ ID NO: 1431119 - RNA, 19 nt, Artificial Sequence
  Description of Artificial Sequence: Synthetic oligonucleotide
  Antisense strand to SEQ ID NO: 1431118
uucaucgaaagccaucuuu

SEQ ID NO: 1431120 - RNA, 19 nt, Artificial Sequence
  Description of Artificial Sequence: Synthetic oligonucleotide
  Sense strand starting at position 280 of SEQ ID NO: 1243645
gauggcuuucgaugaauuc

SEQ ID NO: 1431121 - RNA, 19 nt, Artificial Sequence
  Description of Artificial Sequence: Synthetic oligonucleotide
  Antisense strand to SEQ ID NO: 1431120
gaauucaucgaaagccauc

SEQ ID NO: 1431122 - RNA, 19 nt, Artificial Sequence
  Description of Artificial Sequence: Synthetic oligonucleotide
  Sense strand starting at position 281 of SEQ ID NO: 1243645
auggcuuucgaugaauucu

SEQ ID NO: 1431123 - RNA, 19 nt, Artificial Sequence
  Description of Artificial Sequence: Synthetic oligonucleotide
  Antisense strand to SEQ ID NO: 1431122
agaauucaucgaaagccau

SEQ ID NO: 1431124 - RNA, 19 nt, Artificial Sequence
  Description of Artificial Sequence: Synthetic oligonucleotide
  Sense strand starting at position 290 of SEQ ID NO: 1243645
gaugaauucucagccaagu

SEQ ID NO: 1431125 - RNA, 19 nt, Artificial Sequence
  Description of Artificial Sequence: Synthetic oligonucleotide
  Antisense strand to SEQ ID NO: 1431124
acuuggcugagaauucauc

SEQ ID NO: 1431126 - RNA, 19 nt, Artificial Sequence
  Description of Artificial Sequence: Synthetic oligonucleotide
  Sense strand starting at position 309 of SEQ ID NO: 1243645
cagugaucccgucaaaccu

SEQ ID NO: 1431127 - RNA, 19 nt, Artificial Sequence
  Description of Artificial Sequence: Synthetic oligonucleotide
  Antisense strand to SEQ ID NO: 1431126
agguuugacgggaucacug

SEQ ID NO: 1431128 - RNA, 19 nt, Artificial Sequence
  Description of Artificial Sequence: Synthetic oligonucleotide
  Sense strand starting at position 369 of SEQ ID NO: 1243645
ugcuauagguaucuuaaac

SEQ ID NO: 1431129 - RNA, 19 nt, Artificial Sequence
  Description of Artificial Sequence: Synthetic oligonucleotide
  Antisense strand to SEQ ID NO: 1431128
guuuaagauaccuauagca

SEQ ID NO: 1431130 - RNA, 19 nt, Artificial Sequence
  Description of Artificial Sequence: Synthetic oligonucleotide
  Sense strand starting at position 2027 of SEQ ID NO: 1243645
gggcgcauucaccagggaa

SEQ ID NO: 1431131 - RNA, 19 nt, Artificial Sequence
  Description of Artificial Sequence: Synthetic oligonucleotide
  Antisense strand to SEQ ID NO: 1431130
uucccuggugaaugcgccc

SEQ ID NO: 1431132 - RNA, 19 nt, Artificial Sequence
  Description of Artificial Sequence: Synthetic oligonucleotide
  Sense strand starting at position 2135 of SEQ ID NO: 1243645
acuggaguuuccggaaguc

SEQ ID NO: 1431133 - RNA, 19 nt, Artificial Sequence
  Description of Artificial Sequence: Synthetic oligonucleotide
  Antisense strand to SEQ ID NO: 1431132
gacuuccggaaacuccagu

SEQ ID NO: 1431134 - RNA, 19 nt, Artificial Sequence
  Description of Artificial Sequence: Synthetic oligonucleotide
  Sense strand starting at position 2138 of SEQ ID NO: 1243645
ggaguuuccggaagucggu

SEQ ID NO: 1431135 - RNA, 19 nt, Artificial Sequence
  Description of Artificial Sequence: Synthetic oligonucleotide
  Antisense strand to SEQ ID NO: 1431134
accgacuuccggaaacucc

SEQ ID NO: 1431136 - RNA, 19 nt, Artificial Sequence
  Description of Artificial Sequence: Synthetic oligonucleotide
  Sense strand starting at position 2145 of SEQ ID NO: 1243645
ccggaagucgguugguaau

SEQ ID NO: 1431137 - RNA, 19 nt, Artificial Sequence
  Description of Artificial Sequence: Synthetic oligonucleotide
  Antisense strand to SEQ ID NO: 1431136
auuaccaaccgacuuccgg

SEQ ID NO: 1431138 - RNA, 19 nt, Artificial Sequence
  Description of Artificial Sequence: Synthetic oligonucleotide
  Sense strand starting at position 2147 of SEQ ID NO: 1243645
ggaagucgguugguaauca

SEQ ID NO: 1431139 - RNA, 19 nt, Artificial Sequence
  Description of Artificial Sequence: Synthetic oligonucleotide
  Antisense strand to SEQ ID NO: 1431138
ugauuaccaaccgacuucc

SEQ ID NO: 1431140 - RNA, 19 nt, Artificial Sequence
  Description of Artificial Sequence: Synthetic oligonucleotide
  Sense strand starting at position 2148 of SEQ ID NO: 1243645
gaagucgguugguaaucau

SEQ ID NO: 1431141 - RNA, 19 nt, Artificial Sequence
  Description of Artificial Sequence: Synthetic oligonucleotide
  Antisense strand to SEQ ID NO: 1431140
augauuaccaaccgacuuc

SEQ ID NO: 1431142 - RNA, 19 nt, Artificial Sequence
  Description of Artificial Sequence: Synthetic oligonucleotide
  Sense strand starting at position 2156 of SEQ ID NO: 1243645
uugguaaucaugcguguca

SEQ ID NO: 1431143 - RNA, 19 nt, Artificial Sequence
  Description of Artificial Sequence: Synthetic oligonucleotide
  Antisense strand to SEQ ID NO: 1431142
ugacacgcaugauuaccaa

SEQ ID NO: 1431144 - RNA, 19 nt, Artificial Sequence
  Description of Artificial Sequence: Synthetic oligonucleotide
  Sense strand starting at position 2157 of SEQ ID NO: 1243645
ugguaaucaugcgugucaa

SEQ ID NO: 1431145 - RNA, 19 nt, Artificial Sequence
  Description of Artificial Sequence: Synthetic oligonucleotide
  Antisense strand to SEQ ID NO: 1431144
uugacacgcaugauuacca

SEQ ID NO: 1431146 - RNA, 19 nt, Artificial Sequence
  Description of Artificial Sequence: Synthetic oligonucleotide
  Sense strand starting at position 2158 of SEQ ID NO: 1243645
gguaaucaugcgugucaau

SEQ ID NO: 1431147 - RNA, 19 nt, Artificial Sequence
  Description of Artificial Sequence: Synthetic oligonucleotide
  Antisense strand to SEQ ID NO: 1431146
auugacacgcaugauuacc

SEQ ID NO: 1431148 - RNA, 19 nt, Artificial Sequence
  Description of Artificial Sequence: Synthetic oligonucleotide
  Sense strand starting at position 2177 of SEQ ID NO: 1243645
caggcagucuccuuagcua

SEQ ID NO: 1431149 - RNA, 19 nt, Artificial Sequence
  Description of Artificial Sequence: Synthetic oligonucleotide
  Antisense strand to SEQ ID NO: 1431148
uagcuaaggagacugccug

SEQ ID NO: 1431150 - RNA, 19 nt, Artificial Sequence
  Description of Artificial Sequence: Synthetic oligonucleotide
  Sense strand starting at position 2196 of SEQ ID NO: 1243645
cuguguccgucacuuaauu

SEQ ID NO: 1431151 - RNA, 19 nt, Artificial Sequence
  Description of Artificial Sequence: Synthetic oligonucleotide
  Antisense strand to SEQ ID NO: 1431150
aauuaagugacggacacag

SEQ ID NO: 1431152 - RNA, 19 nt, Artificial Sequence
  Description of Artificial Sequence: Synthetic oligonucleotide
  Sense strand starting at position 2257 of SEQ ID NO: 1243645
ugguuaaauaagugccuga

SEQ ID NO: 1431153 - RNA, 19 nt, Artificial Sequence
  Description of Artificial Sequence: Synthetic oligonucleotide
  Antisense strand to SEQ ID NO: 1431152
ucaggcacuuauuuaacca

SEQ ID NO: 1431154 - RNA, 19 nt, Artificial Sequence
  Description of Artificial Sequence: Synthetic oligonucleotide
  Sense strand starting at position 2278 of SEQ ID NO: 1243645
ggagacuccaccugaguaa

SEQ ID NO: 1431155 - RNA, 19 nt, Artificial Sequence
  Description of Artificial Sequence: Synthetic oligonucleotide
  Antisense strand to SEQ ID NO: 1431154
uuacucagguggagucucc

SEQ ID NO: 1431156 - RNA, 19 nt, Artificial Sequence
  Description of Artificial Sequence: Synthetic oligonucleotide
  Sense strand starting at position 3040 of SEQ ID NO: 1243645
ucccaugucucccaggaua

SEQ ID NO: 1431157 - RNA, 19 nt, Artificial Sequence
  Description of Artificial Sequence: Synthetic oligonucleotide
  Antisense strand to SEQ ID NO: 1431156
uauccugggagacauggga

SEQ ID NO: 1431158 - RNA, 19 nt, Artificial Sequence
  Description of Artificial Sequence: Synthetic oligonucleotide
  Sense strand starting at position 3042 of SEQ ID NO: 1243645
ccaugucucccaggauaaa

SEQ ID NO: 1431159 - RNA, 19 nt, Artificial Sequence
  Description of Artificial Sequence: Synthetic oligonucleotide
  Antisense strand to SEQ ID NO: 1431158
uuuauccugggagacaugg

SEQ ID NO: 1431160 - RNA, 19 nt, Artificial Sequence
  Description of Artificial Sequence: Synthetic oligonucleotide
  Sense strand starting at position 3067 of SEQ ID NO: 1243645
cugcuuuauuuggcacuca

SEQ ID NO: 1431161 - RNA, 19 nt, Artificial Sequence
  Description of Artificial Sequence: Synthetic oligonucleotide
  Antisense strand to SEQ ID NO: 1431160
ugagugccaaauaaagcag

SEQ ID NO: 1431162 - RNA, 19 nt, Artificial Sequence
  Description of Artificial Sequence: Synthetic oligonucleotide
  Sense strand starting at position 3068 of SEQ ID NO: 1243645
ugcuuuauuuggcacucaa

SEQ ID NO: 1431163 - RNA, 19 nt, Artificial Sequence
  Description of Artificial Sequence: Synthetic oligonucleotide
  Antisense strand to SEQ ID NO: 1431162
uugagugccaaauaaagca

SEQ ID NO: 1431164 - RNA, 19 nt, Artificial Sequence
  Description of Artificial Sequence: Synthetic oligonucleotide
  Sense strand starting at position 3096 of SEQ ID NO: 1243645
ucaagacucuucuggccuu

SEQ ID NO: 1431165 - RNA, 19 nt, Artificial Sequence
  Description of Artificial Sequence: Synthetic oligonucleotide
  Antisense strand to SEQ ID NO: 1431164
aaggccagaagagucuuga

SEQ ID NO: 1431166 - RNA, 19 nt, Artificial Sequence
  Description of Artificial Sequence: Synthetic oligonucleotide
  Sense strand starting at position 3490 of SEQ ID NO: 1243645
ucaccauguugucaaauug

SEQ ID NO: 1431167 - RNA, 19 nt, Artificial Sequence
  Description of Artificial Sequence: Synthetic oligonucleotide
  Antisense strand to SEQ ID NO: 1431166
caauuugacaacaugguga

SEQ ID NO: 1431168 - RNA, 19 nt, Artificial Sequence
  Description of Artificial Sequence: Synthetic oligonucleotide
  Sense strand starting at position 3498 of SEQ ID NO: 1243645
uugucaaauuggucuugga

SEQ ID NO: 1431169 - RNA, 19 nt, Artificial Sequence
  Description of Artificial Sequence: Synthetic oligonucleotide
  Antisense strand to SEQ ID NO: 1431168
uccaagaccaauuugacaa

SEQ ID NO: 1431170 - RNA, 19 nt, Artificial Sequence
  Description of Artificial Sequence: Synthetic oligonucleotide
  Sense strand starting at position 3501 of SEQ ID NO: 1243645
ucaaauuggucuuggaacu

SEQ ID NO: 1431171 - RNA, 19 nt, Artificial Sequence
  Description of Artificial Sequence: Synthetic oligonucleotide
  Antisense strand to SEQ ID NO: 1431170
aguuccaagaccaauuuga

SEQ ID NO: 1431172 - RNA, 19 nt, Artificial Sequence
  Description of Artificial Sequence: Synthetic oligonucleotide
  Sense strand starting at position 3502 of SEQ ID NO: 1243645
caaauuggucuuggaacua

SEQ ID NO: 1431173 - RNA, 19 nt, Artificial Sequence
  Description of Artificial Sequence: Synthetic oligonucleotide
  Antisense strand to SEQ ID NO: 1431172
uaguuccaagaccaauuug

SEQ ID NO: 1431174 - RNA, 19 nt, Artificial Sequence
  Description of Artificial Sequence: Synthetic oligonucleotide
  Sense strand starting at position 3641 of SEQ ID NO: 1243645
aggaccugugcauauacua

SEQ ID NO: 1431175 - RNA, 19 nt, Artificial Sequence
  Description of Artificial Sequence: Synthetic oligonucleotide
  Antisense strand to SEQ ID NO: 1431174
uaguauaugcacagguccu

SEQ ID NO: 1431176 - RNA, 19 nt, Artificial Sequence
  Description of Artificial Sequence: Synthetic oligonucleotide
  Sense strand starting at position 3772 of SEQ ID NO: 1243645
gaguauguggccuagugau

SEQ ID NO: 1431177 - RNA, 19 nt, Artificial Sequence
  Description of Artificial Sequence: Synthetic oligonucleotide
  Antisense strand to SEQ ID NO: 1431176
aucacuaggccacauacuc

SEQ ID NO: 1431178 - RNA, 19 nt, Artificial Sequence
  Description of Artificial Sequence: Synthetic oligonucleotide
  Sense strand starting at position 3778 of SEQ ID NO: 1243645
guggccuagugaugauuca

SEQ ID NO: 1431179 - RNA, 19 nt, Artificial Sequence
  Description of Artificial Sequence: Synthetic oligonucleotide
  Antisense strand to SEQ ID NO: 1431178
ugaaucaucacuaggccac

SEQ ID NO: 1431180 - RNA, 19 nt, Artificial Sequence
  Description of Artificial Sequence: Synthetic oligonucleotide
  Sense strand starting at position 3889 of SEQ ID NO: 1243645
cagggaagcuuccaaugca

SEQ ID NO: 1431181 - RNA, 19 nt, Artificial Sequence
  Description of Artificial Sequence: Synthetic oligonucleotide
  Antisense strand to SEQ ID NO: 1431180
ugcauuggaagcuucccug

SEQ ID NO: 1431182 - RNA, 19 nt, Artificial Sequence
  Description of Artificial Sequence: Synthetic oligonucleotide
  Sense strand starting at position 3904 of SEQ ID NO: 1243645
ugcaguguccguuauggga

SEQ ID NO: 1431183 - RNA, 19 nt, Artificial Sequence
  Description of Artificial Sequence: Synthetic oligonucleotide
  Antisense strand to SEQ ID NO: 1431182
ucccauaacggacacugca

SEQ ID NO: 1431184 - RNA, 19 nt, Artificial Sequence
  Description of Artificial Sequence: Synthetic oligonucleotide
  Sense strand starting at position 3963 of SEQ ID NO: 1243645
gcucaaccuggaugaucua

SEQ ID NO: 1431185 - RNA, 19 nt, Artificial Sequence
  Description of Artificial Sequence: Synthetic oligonucleotide
  Antisense strand to SEQ ID NO: 1431184
uagaucauccagguugagc

SEQ ID NO: 1431186 - RNA, 19 nt, Artificial Sequence
  Description of Artificial Sequence: Synthetic oligonucleotide
  Sense strand starting at position 3974 of SEQ ID NO: 1243645
augaucuacuuccaagaag

SEQ ID NO: 1431187 - RNA, 19 nt, Artificial Sequence
  Description of Artificial Sequence: Synthetic oligonucleotide
  Antisense strand to SEQ ID NO: 1431186
cuucuuggaaguagaucau

SEQ ID NO: 1431188 - RNA, 19 nt, Artificial Sequence
  Description of Artificial Sequence: Synthetic oligonucleotide
  Sense strand starting at position 55 of SEQ ID NO: 1243646
aucuguaucuauggacuua

SEQ ID NO: 1431189 - RNA, 19 nt, Artificial Sequence
  Description of Artificial Sequence: Synthetic oligonucleotide
  Antisense strand to SEQ ID NO: 1431188
uaaguccauagauacagau

SEQ ID NO: 1431190 - RNA, 19 nt, Artificial Sequence
  Description of Artificial Sequence: Synthetic oligonucleotide
  Sense strand starting at position 67 of SEQ ID NO: 1243646
ggacuuauucugggucuuu

SEQ ID NO: 1431191 - RNA, 19 nt, Artificial Sequence
  Description of Artificial Sequence: Synthetic oligonucleotide
  Antisense strand to SEQ ID NO: 1431190
aaagacccagaauaagucc

SEQ ID NO: 1431192 - RNA, 19 nt, Artificial Sequence
  Description of Artificial Sequence: Synthetic oligonucleotide
  Sense strand starting at position 105 of SEQ ID NO: 1243646
gucucaaagucauagauuu

SEQ ID NO: 1431193 - RNA, 19 nt, Artificial Sequence
  Description of Artificial Sequence: Synthetic oligonucleotide
  Antisense strand to SEQ ID NO: 1431192
aaaucuaugacuuugagac

SEQ ID NO: 1431194 - RNA, 19 nt, Artificial Sequence
  Description of Artificial Sequence: Synthetic oligonucleotide
  Sense strand starting at position 574 of SEQ ID NO: 1243646
cgggugucuuccguguuau

SEQ ID NO: 1431195 - RNA, 19 nt, Artificial Sequence
  Description of Artificial Sequence: Synthetic oligonucleotide
  Antisense strand to SEQ ID NO: 1431194
auaacacggaagacacccg

SEQ ID NO: 1431196 - RNA, 19 nt, Artificial Sequence
  Description of Artificial Sequence: Synthetic oligonucleotide
  Sense strand starting at position 575 of SEQ ID NO: 1243646
gggugucuuccguguuauu

SEQ ID NO: 1431197 - RNA, 19 nt, Artificial Sequence
  Description of Artificial Sequence: Synthetic oligonucleotide
  Antisense strand to SEQ ID NO: 1431196
aauaacacggaagacaccc

SEQ ID NO: 1431198 - RNA, 19 nt, Artificial Sequence
  Description of Artificial Sequence: Synthetic oligonucleotide
  Sense strand starting at position 576 of SEQ ID NO: 1243646
ggugucuuccguguuauuc

SEQ ID NO: 1431199 - RNA, 19 nt, Artificial Sequence
  Description of Artificial Sequence: Synthetic oligonucleotide
  Antisense strand to SEQ ID NO: 1431198
gaauaacacggaagacacc

SEQ ID NO: 1431200 - RNA, 19 nt, Artificial Sequence
  Description of Artificial Sequence: Synthetic oligonucleotide
  Sense strand starting at position 698 of SEQ ID NO: 1243646
cugagucaccuuuacaucu

SEQ ID NO: 1431201 - RNA, 19 nt, Artificial Sequence
  Description of Artificial Sequence: Synthetic oligonucleotide
  Antisense strand to SEQ ID NO: 1431200
agauguaaaggugacucag

SEQ ID NO: 1431202 - RNA, 19 nt, Artificial Sequence
  Description of Artificial Sequence: Synthetic oligonucleotide
  Sense strand starting at position 841 of SEQ ID NO: 1243646
ccucucuuagccuguguaa

SEQ ID NO: 1431203 - RNA, 19 nt, Artificial Sequence
  Description of Artificial Sequence: Synthetic oligonucleotide
  Antisense strand to SEQ ID NO: 1431202
uuacacaggcuaagagagg

SEQ ID NO: 1431204 - RNA, 19 nt, Artificial Sequence
  Description of Artificial Sequence: Synthetic oligonucleotide
  Sense strand starting at position 1641 of SEQ ID NO: 1243646
ggacccugucccuaaucuu

SEQ ID NO: 1431205 - RNA, 19 nt, Artificial Sequence
  Description of Artificial Sequence: Synthetic oligonucleotide
  Antisense strand to SEQ ID NO: 1431204
aagauuagggacagggucc

SEQ ID NO: 1431206 - RNA, 19 nt, Artificial Sequence
  Description of Artificial Sequence: Synthetic oligonucleotide
  Sense strand starting at position 2178 of SEQ ID NO: 1243646
guagcugcaggaugauaaa

SEQ ID NO: 1431207 - RNA, 19 nt, Artificial Sequence
  Description of Artificial Sequence: Synthetic oligonucleotide
  Antisense strand to SEQ ID NO: 1431206
uuuaucauccugcagcuac

SEQ ID NO: 1431208 - RNA, 19 nt, Artificial Sequence
  Description of Artificial Sequence: Synthetic oligonucleotide
  Sense strand starting at position 2288 of SEQ ID NO: 1243646
ccggguuggagcgaacaua

SEQ ID NO: 1431209 - RNA, 19 nt, Artificial Sequence
  Description of Artificial Sequence: Synthetic oligonucleotide
  Antisense strand to SEQ ID NO: 1431208
uauguucgcuccaacccgg

SEQ ID NO: 1431210 - RNA, 19 nt, Artificial Sequence
  Description of Artificial Sequence: Synthetic oligonucleotide
  Sense strand starting at position 2505 of SEQ ID NO: 1243646
gcccauguguccuccagua

SEQ ID NO: 1431211 - RNA, 19 nt, Artificial Sequence
  Description of Artificial Sequence: Synthetic oligonucleotide
  Antisense strand to SEQ ID NO: 1431210
uacuggaggacacaugggc

SEQ ID NO: 1431212 - RNA, 19 nt, Artificial Sequence
  Description of Artificial Sequence: Synthetic oligonucleotide
  Sense strand starting at position 2677 of SEQ ID NO: 1243646
gggccagaccuuugagaga

SEQ ID NO: 1431213 - RNA, 19 nt, Artificial Sequence
  Description of Artificial Sequence: Synthetic oligonucleotide
  Antisense strand to SEQ ID NO: 1431212
ucucucaaaggucuggccc

SEQ ID NO: 1431214 - RNA, 19 nt, Artificial Sequence
  Description of Artificial Sequence: Synthetic oligonucleotide
  Sense strand starting at position 2829 of SEQ ID NO: 1243646
gccaguucccaagaacuuu

SEQ ID NO: 1431215 - RNA, 19 nt, Artificial Sequence
  Description of Artificial Sequence: Synthetic oligonucleotide
  Antisense strand to SEQ ID NO: 1431214
aaaguucuugggaacuggc

SEQ ID NO: 1431216 - RNA, 19 nt, Artificial Sequence
  Description of Artificial Sequence: Synthetic oligonucleotide
  Sense strand starting at position 2879 of SEQ ID NO: 1243646
uccaguagguuccagauua

SEQ ID NO: 1431217 - RNA, 19 nt, Artificial Sequence
  Description of Artificial Sequence: Synthetic oligonucleotide
  Antisense strand to SEQ ID NO: 1431216
uaaucuggaaccuacugga

SEQ ID NO: 1431218 - RNA, 19 nt, Artificial Sequence
  Description of Artificial Sequence: Synthetic oligonucleotide
  Sense strand starting at position 2934 of SEQ ID NO: 1243646
ggucucaggucuccuggaa

SEQ ID NO: 1431219 - RNA, 19 nt, Artificial Sequence
  Description of Artificial Sequence: Synthetic oligonucleotide
  Antisense strand to SEQ ID NO: 1431218
uuccaggagaccugagacc

SEQ ID NO: 1431220 - RNA, 19 nt, Artificial Sequence
  Description of Artificial Sequence: Synthetic oligonucleotide
  Sense strand starting at position 2990 of SEQ ID NO: 1243646
cuuuguaaacauugaagga

SEQ ID NO: 1431221 - RNA, 19 nt, Artificial Sequence
  Description of Artificial Sequence: Synthetic oligonucleotide
  Antisense strand to SEQ ID NO: 1431220
uccuucaauguuuacaaag

SEQ ID NO: 1431222 - RNA, 19 nt, Artificial Sequence
  Description of Artificial Sequence: Synthetic oligonucleotide
  Sense strand starting at position 3004 of SEQ ID NO: 1243646
aaggaugauucggagcuua

SEQ ID NO: 1431223 - RNA, 19 nt, Artificial Sequence
  Description of Artificial Sequence: Synthetic oligonucleotide
  Antisense strand to SEQ ID NO: 1431222
uaagcuccgaaucauccuu

SEQ ID NO: 1431224 - RNA, 19 nt, Artificial Sequence
  Description of Artificial Sequence: Synthetic oligonucleotide
  Sense strand starting at position 3041 of SEQ ID NO: 1243646
aggaaucagucagaugaag

SEQ ID NO: 1431225 - RNA, 19 nt, Artificial Sequence
  Description of Artificial Sequence: Synthetic oligonucleotide
  Antisense strand to SEQ ID NO: 1431224
cuucaucugacugauuccu

SEQ ID NO: 1431226 - RNA, 19 nt, Artificial Sequence
  Description of Artificial Sequence: Synthetic oligonucleotide
  Sense strand starting at position 3140 of SEQ ID NO: 1243646
gggcuaggccaguguaagu

SEQ ID NO: 1431227 - RNA, 19 nt, Artificial Sequence
  Description of Artificial Sequence: Synthetic oligonucleotide
  Antisense strand to SEQ ID NO: 1431226
acuuacacuggccuagccc

SEQ ID NO: 1431228 - RNA, 19 nt, Artificial Sequence
  Description of Artificial Sequence: Synthetic oligonucleotide
  Sense strand starting at position 3145 of SEQ ID NO: 1243646
aggccaguguaaguuaaau

SEQ ID NO: 1431229 - RNA, 19 nt, Artificial Sequence
  Description of Artificial Sequence: Synthetic oligonucleotide
  Antisense strand to SEQ ID NO: 1431228
auuuaacuuacacuggccu

SEQ ID NO: 1431230 - RNA, 19 nt, Artificial Sequence
  Description of Artificial Sequence: Synthetic oligonucleotide
  Sense strand starting at position 3156 of SEQ ID NO: 1243646
aguuaaaucugcuuucuug

SEQ ID NO: 1431231 - RNA, 19 nt, Artificial Sequence
  Description of Artificial Sequence: Synthetic oligonucleotide
  Antisense strand to SEQ ID NO: 1431230
caagaaagcagauuuaacu

SEQ ID NO: 1431232 - RNA, 19 nt, Artificial Sequence
  Description of Artificial Sequence: Synthetic oligonucleotide
  Sense strand starting at position 3172 of SEQ ID NO: 1243646
uugagccaguccucagaaa

SEQ ID NO: 1431233 - RNA, 19 nt, Artificial Sequence
  Description of Artificial Sequence: Synthetic oligonucleotide
  Antisense strand to SEQ ID NO: 1431232
uuucugaggacuggcucaa

SEQ ID NO: 1431234 - RNA, 19 nt, Artificial Sequence
  Description of Artificial Sequence: Synthetic oligonucleotide
  Sense strand starting at position 3173 of SEQ ID NO: 1243646
ugagccaguccucagaaau

SEQ ID NO: 1431235 - RNA, 19 nt, Artificial Sequence
  Description of Artificial Sequence: Synthetic oligonucleotide
  Antisense strand to SEQ ID NO: 1431234
auuucugaggacuggcuca

SEQ ID NO: 1431236 - RNA, 19 nt, Artificial Sequence
  Description of Artificial Sequence: Synthetic oligonucleotide
  Sense strand starting at position 3206 of SEQ ID NO: 1243646
guuguugguagagguaagu

SEQ ID NO: 1431237 - RNA, 19 nt, Artificial Sequence
  Description of Artificial Sequence: Synthetic oligonucleotide
  Antisense strand to SEQ ID NO: 1431236
acuuaccucuaccaacaac

SEQ ID NO: 1431238 - RNA, 19 nt, Artificial Sequence
  Description of Artificial Sequence: Synthetic oligonucleotide
  Sense strand starting at position 3314 of SEQ ID NO: 1243646
gugucugucccuuacugga

SEQ ID NO: 1431239 - RNA, 19 nt, Artificial Sequence
  Description of Artificial Sequence: Synthetic oligonucleotide
  Antisense strand to SEQ ID NO: 1431238
uccaguaagggacagacac

SEQ ID NO: 1431240 - RNA, 19 nt, Artificial Sequence
  Description of Artificial Sequence: Synthetic oligonucleotide
  Sense strand starting at position 3676 of SEQ ID NO: 1243646
gcuacugcgcaugcuaaau

SEQ ID NO: 1431241 - RNA, 19 nt, Artificial Sequence
  Description of Artificial Sequence: Synthetic oligonucleotide
  Antisense strand to SEQ ID NO: 1431240
auuuagcaugcgcaguagc

SEQ ID NO: 1431242 - RNA, 19 nt, Artificial Sequence
  Description of Artificial Sequence: Synthetic oligonucleotide
  Sense strand starting at position 3682 of SEQ ID NO: 1243646
gcgcaugcuaaaugaguga

SEQ ID NO: 1431243 - RNA, 19 nt, Artificial Sequence
  Description of Artificial Sequence: Synthetic oligonucleotide
  Antisense strand to SEQ ID NO: 1431242
ucacucauuuagcaugcgc

SEQ ID NO: 1431244 - RNA, 19 nt, Artificial Sequence
  Description of Artificial Sequence: Synthetic oligonucleotide
  Sense strand starting at position 3685 of SEQ ID NO: 1243646
caugcuaaaugagugaaua

SEQ ID NO: 1431245 - RNA, 19 nt, Artificial Sequence
  Description of Artificial Sequence: Synthetic oligonucleotide
  Antisense strand to SEQ ID NO: 1431244
uauucacucauuuagcaug

SEQ ID NO: 1431246 - RNA, 19 nt, Artificial Sequence
  Description of Artificial Sequence: Synthetic oligonucleotide
  Sense strand starting at position 3686 of SEQ ID NO: 1243646
augcuaaaugagugaauau

SEQ ID NO: 1431247 - RNA, 19 nt, Artificial Sequence
  Description of Artificial Sequence: Synthetic oligonucleotide
  Antisense strand to SEQ ID NO: 1431246
auauucacucauuuagcau

SEQ ID NO: 1431248 - RNA, 19 nt, Artificial Sequence
  Description of Artificial Sequence: Synthetic oligonucleotide
  Sense strand starting at position 3693 of SEQ ID NO: 1243646
augagugaauauggcuaaa

SEQ ID NO: 1431249 - RNA, 19 nt, Artificial Sequence
  Description of Artificial Sequence: Synthetic oligonucleotide
  Antisense strand to SEQ ID NO: 1431248
uuuagccauauucacucau

SEQ ID NO: 1431250 - RNA, 19 nt, Artificial Sequence
  Description of Artificial Sequence: Synthetic oligonucleotide
  Sense strand starting at position 3695 of SEQ ID NO: 1243646
gagugaauauggcuaaaca

SEQ ID NO: 1431251 - RNA, 19 nt, Artificial Sequence
  Description of Artificial Sequence: Synthetic oligonucleotide
  Antisense strand to SEQ ID NO: 1431250
uguuuagccauauucacuc

SEQ ID NO: 1431252 - RNA, 19 nt, Artificial Sequence
  Description of Artificial Sequence: Synthetic oligonucleotide
  Sense strand starting at position 3730 of SEQ ID NO: 1243646
gcguguagucccucuaugu

SEQ ID NO: 1431253 - RNA, 19 nt, Artificial Sequence
  Description of Artificial Sequence: Synthetic oligonucleotide
  Antisense strand to SEQ ID NO: 1431252
acauagagggacuacacgc

SEQ ID NO: 1431254 - RNA, 19 nt, Artificial Sequence
  Description of Artificial Sequence: Synthetic oligonucleotide
  Sense strand starting at position 3731 of SEQ ID NO: 1243646
cguguagucccucuaugua

SEQ ID NO: 1431255 - RNA, 19 nt, Artificial Sequence
  Description of Artificial Sequence: Synthetic oligonucleotide
  Antisense strand to SEQ ID NO: 1431254
uacauagagggacuacacg

SEQ ID NO: 1431256 - RNA, 19 nt, Artificial Sequence
  Description of Artificial Sequence: Synthetic oligonucleotide
  Sense strand starting at position 3734 of SEQ ID NO: 1243646
guagucccucuauguauua

SEQ ID NO: 1431257 - RNA, 19 nt, Artificial Sequence
  Description of Artificial Sequence: Synthetic oligonucleotide
  Antisense strand to SEQ ID NO: 1431256
uaauacauagagggacuac

SEQ ID NO: 1431258 - RNA, 19 nt, Artificial Sequence
  Description of Artificial Sequence: Synthetic oligonucleotide
  Sense strand starting at position 3752 of SEQ ID NO: 1243646
agcugcuaugauuguauua

SEQ ID NO: 1431259 - RNA, 19 nt, Artificial Sequence
  Description of Artificial Sequence: Synthetic oligonucleotide
  Antisense strand to SEQ ID NO: 1431258
uaauacaaucauagcagcu

SEQ ID NO: 1431260 - RNA, 19 nt, Artificial Sequence
  Description of Artificial Sequence: Synthetic oligonucleotide
  Sense strand starting at position 3780 of SEQ ID NO: 1243646
gaauguuagcguugcuccu

SEQ ID NO: 1431261 - RNA, 19 nt, Artificial Sequence
  Description of Artificial Sequence: Synthetic oligonucleotide
  Antisense strand to SEQ ID NO: 1431260
aggagcaacgcuaacauuc

SEQ ID NO: 1431262 - RNA, 19 nt, Artificial Sequence
  Description of Artificial Sequence: Synthetic oligonucleotide
  Sense strand starting at position 3814 of SEQ ID NO: 1243646
gcaugcuauuucuccaugu

SEQ ID NO: 1431263 - RNA, 19 nt, Artificial Sequence
  Description of Artificial Sequence: Synthetic oligonucleotide
  Antisense strand to SEQ ID NO: 1431262
acauggagaaauagcaugc

SEQ ID NO: 1431264 - RNA, 19 nt, Artificial Sequence
  Description of Artificial Sequence: Synthetic oligonucleotide
  Sense strand starting at position 3915 of SEQ ID NO: 1243646
augcgcuauguugggagaa

SEQ ID NO: 1431265 - RNA, 19 nt, Artificial Sequence
  Description of Artificial Sequence: Synthetic oligonucleotide
  Antisense strand to SEQ ID NO: 1431264
uucucccaacauagcgcau

SEQ ID NO: 1431266 - RNA, 19 nt, Artificial Sequence
  Description of Artificial Sequence: Synthetic oligonucleotide
  Sense strand starting at position 3978 of SEQ ID NO: 1243646
ccacgaaaguagugaagaa

SEQ ID NO: 1431267 - RNA, 19 nt, Artificial Sequence
  Description of Artificial Sequence: Synthetic oligonucleotide
  Antisense strand to SEQ ID NO: 1431266
uucuucacuacuuucgugg

SEQ ID NO: 1431268 - RNA, 19 nt, Artificial Sequence
  Description of Artificial Sequence: Synthetic oligonucleotide
  Sense strand starting at position 148 of SEQ ID NO: 1243647
agcacugacugagggaaau

SEQ ID NO: 1431269 - RNA, 19 nt, Artificial Sequence
  Description of Artificial Sequence: Synthetic oligonucleotide
  Antisense strand to SEQ ID NO: 1431268
auuucccucagucagugcu

SEQ ID NO: 1431270 - RNA, 19 nt, Artificial Sequence
  Description of Artificial Sequence: Synthetic oligonucleotide
  Sense strand starting at position 158 of SEQ ID NO: 1243647
gagggaaaugugugacagu

SEQ ID NO: 1431271 - RNA, 19 nt, Artificial Sequence
  Description of Artificial Sequence: Synthetic oligonucleotide
  Antisense strand to SEQ ID NO: 1431270
acugucacacauuucccuc

SEQ ID NO: 1431272 - RNA, 19 nt, Artificial Sequence
  Description of Artificial Sequence: Synthetic oligonucleotide
  Sense strand starting at position 391 of SEQ ID NO: 1243647
gggcacagaucugcacaua

SEQ ID NO: 1431273 - RNA, 19 nt, Artificial Sequence
  Description of Artificial Sequence: Synthetic oligonucleotide
  Antisense strand to SEQ ID NO: 1431272
uaugugcagaucugugccc

SEQ ID NO: 1431274 - RNA, 19 nt, Artificial Sequence
  Description of Artificial Sequence: Synthetic oligonucleotide
  Sense strand starting at position 656 of SEQ ID NO: 1243647
ugaccugaucauugagcuu

SEQ ID NO: 1431275 - RNA, 19 nt, Artificial Sequence
  Description of Artificial Sequence: Synthetic oligonucleotide
  Antisense strand to SEQ ID NO: 1431274
aagcucaaugaucagguca

SEQ ID NO: 1431276 - RNA, 19 nt, Artificial Sequence
  Description of Artificial Sequence: Synthetic oligonucleotide
  Sense strand starting at position 928 of SEQ ID NO: 1243647
uagauagagugaccuauua

SEQ ID NO: 1431277 - RNA, 19 nt, Artificial Sequence
  Description of Artificial Sequence: Synthetic oligonucleotide
  Antisense strand to SEQ ID NO: 1431276
uaauaggucacucuaucua

SEQ ID NO: 1431278 - RNA, 19 nt, Artificial Sequence
  Description of Artificial Sequence: Synthetic oligonucleotide
  Sense strand starting at position 1051 of SEQ ID NO: 1243647
cagagaauccagugcaaau

SEQ ID NO: 1431279 - RNA, 19 nt, Artificial Sequence
  Description of Artificial Sequence: Synthetic oligonucleotide
  Antisense strand to SEQ ID NO: 1431278
auuugcacuggauucucug

SEQ ID NO: 1431280 - RNA, 19 nt, Artificial Sequence
  Description of Artificial Sequence: Synthetic oligonucleotide
  Sense strand starting at position 1062 of SEQ ID NO: 1243647
gugcaaaugugagacaguu

SEQ ID NO: 1431281 - RNA, 19 nt, Artificial Sequence
  Description of Artificial Sequence: Synthetic oligonucleotide
  Antisense strand to SEQ ID NO: 1431280
aacugucucacauuugcac

SEQ ID NO: 1431282 - RNA, 19 nt, Artificial Sequence
  Description of Artificial Sequence: Synthetic oligonucleotide
  Sense strand starting at position 1079 of SEQ ID NO: 1243647
uuaggaggcagcugaauua

SEQ ID NO: 1431283 - RNA, 19 nt, Artificial Sequence
  Description of Artificial Sequence: Synthetic oligonucleotide
  Antisense strand to SEQ ID NO: 1431282
uaauucagcugccuccuaa

SEQ ID NO: 1431284 - RNA, 19 nt, Artificial Sequence
  Description of Artificial Sequence: Synthetic oligonucleotide
  Sense strand starting at position 1331 of SEQ ID NO: 1243647
ggcccagagaucugggaca

SEQ ID NO: 1431285 - RNA, 19 nt, Artificial Sequence
  Description of Artificial Sequence: Synthetic oligonucleotide
  Antisense strand to SEQ ID NO: 1431284
ugucccagaucucugggcc

SEQ ID NO: 1431286 - RNA, 19 nt, Artificial Sequence
  Description of Artificial Sequence: Synthetic oligonucleotide
  Sense strand starting at position 1600 of SEQ ID NO: 1243647
guugcaaagucucucccaa

SEQ ID NO: 1431287 - RNA, 19 nt, Artificial Sequence
  Description of Artificial Sequence: Synthetic oligonucleotide
  Antisense strand to SEQ ID NO: 1431286
uugggagagacuuugcaac

SEQ ID NO: 1431288 - RNA, 19 nt, Artificial Sequence
  Description of Artificial Sequence: Synthetic oligonucleotide
  Sense strand starting at position 1602 of SEQ ID NO: 1243647
ugcaaagucucucccaaag

SEQ ID NO: 1431289 - RNA, 19 nt, Artificial Sequence
  Description of Artificial Sequence: Synthetic oligonucleotide
  Antisense strand to SEQ ID NO: 1431288
cuuugggagagacuuugca

SEQ ID NO: 1431290 - RNA, 19 nt, Artificial Sequence
  Description of Artificial Sequence: Synthetic oligonucleotide
  Sense strand starting at position 1658 of SEQ ID NO: 1243647
ccacaauggucagugagau

SEQ ID NO: 1431291 - RNA, 19 nt, Artificial Sequence
  Description of Artificial Sequence: Synthetic oligonucleotide
  Antisense strand to SEQ ID NO: 1431290
aucucacugaccauugugg

SEQ ID NO: 1431292 - RNA, 19 nt, Artificial Sequence
  Description of Artificial Sequence: Synthetic oligonucleotide
  Sense strand starting at position 1659 of SEQ ID NO: 1243647
cacaauggucagugagaug

SEQ ID NO: 1431293 - RNA, 19 nt, Artificial Sequence
  Description of Artificial Sequence: Synthetic oligonucleotide
  Antisense strand to SEQ ID NO: 1431292
caucucacugaccauugug

SEQ ID NO: 1431294 - RNA, 19 nt, Artificial Sequence
  Description of Artificial Sequence: Synthetic oligonucleotide
  Sense strand starting at position 1681 of SEQ ID NO: 1243647
ucccguguucccgacaaga

SEQ ID NO: 1431295 - RNA, 19 nt, Artificial Sequence
  Description of Artificial Sequence: Synthetic oligonucleotide
  Antisense strand to SEQ ID NO: 1431294
ucuugucgggaacacggga

SEQ ID NO: 1431296 - RNA, 19 nt, Artificial Sequence
  Description of Artificial Sequence: Synthetic oligonucleotide
  Sense strand starting at position 1988 of SEQ ID NO: 1243647
gcaggugucugggcuccaa

SEQ ID NO: 1431297 - RNA, 19 nt, Artificial Sequence
  Description of Artificial Sequence: Synthetic oligonucleotide
  Antisense strand to SEQ ID NO: 1431296
uuggagcccagacaccugc

SEQ ID NO: 1431298 - RNA, 19 nt, Artificial Sequence
  Description of Artificial Sequence: Synthetic oligonucleotide
  Sense strand starting at position 2070 of SEQ ID NO: 1243647
gauagaagaugccguggau

SEQ ID NO: 1431299 - RNA, 19 nt, Artificial Sequence
  Description of Artificial Sequence: Synthetic oligonucleotide
  Antisense strand to SEQ ID NO: 1431298
auccacggcaucuucuauc

SEQ ID NO: 1431300 - RNA, 19 nt, Artificial Sequence
  Description of Artificial Sequence: Synthetic oligonucleotide
  Sense strand starting at position 2073 of SEQ ID NO: 1243647
agaagaugccguggaugaa

SEQ ID NO: 1431301 - RNA, 19 nt, Artificial Sequence
  Description of Artificial Sequence: Synthetic oligonucleotide
  Antisense strand to SEQ ID NO: 1431300
uucauccacggcaucuucu

SEQ ID NO: 1431302 - RNA, 19 nt, Artificial Sequence
  Description of Artificial Sequence: Synthetic oligonucleotide
  Sense strand starting at position 2260 of SEQ ID NO: 1243647
cagugagugacuugcauug

SEQ ID NO: 1431303 - RNA, 19 nt, Artificial Sequence
  Description of Artificial Sequence: Synthetic oligonucleotide
  Antisense strand to SEQ ID NO: 1431302
caaugcaagucacucacug

SEQ ID NO: 1431304 - RNA, 19 nt, Artificial Sequence
  Description of Artificial Sequence: Synthetic oligonucleotide
  Sense strand starting at position 2448 of SEQ ID NO: 1243647
gugggagguguugaagcua

SEQ ID NO: 1431305 - RNA, 19 nt, Artificial Sequence
  Description of Artificial Sequence: Synthetic oligonucleotide
  Antisense strand to SEQ ID NO: 1431304
uagcuucaacaccucccac

SEQ ID NO: 1431306 - RNA, 19 nt, Artificial Sequence
  Description of Artificial Sequence: Synthetic oligonucleotide
  Sense strand starting at position 2487 of SEQ ID NO: 1243647
ugcccaaaggccugaagau

SEQ ID NO: 1431307 - RNA, 19 nt, Artificial Sequence
  Description of Artificial Sequence: Synthetic oligonucleotide
  Antisense strand to SEQ ID NO: 1431306
aucuucaggccuuugggca

SEQ ID NO: 1431308 - RNA, 19 nt, Artificial Sequence
  Description of Artificial Sequence: Synthetic oligonucleotide
  Sense strand starting at position 3072 of SEQ ID NO: 1243647
gcggaugagucucacaaag

SEQ ID NO: 1431309 - RNA, 19 nt, Artificial Sequence
  Description of Artificial Sequence: Synthetic oligonucleotide
  Antisense strand to SEQ ID NO: 1431308
cuuugugagacucauccgc

SEQ ID NO: 1431310 - RNA, 19 nt, Artificial Sequence
  Description of Artificial Sequence: Synthetic oligonucleotide
  Sense strand starting at position 3074 of SEQ ID NO: 1243647
ggaugagucucacaaagau

SEQ ID NO: 1431311 - RNA, 19 nt, Artificial Sequence
  Description of Artificial Sequence: Synthetic oligonucleotide
  Antisense strand to SEQ ID NO: 1431310
aucuuugugagacucaucc

SEQ ID NO: 1431312 - RNA, 19 nt, Artificial Sequence
  Description of Artificial Sequence: Synthetic oligonucleotide
  Sense strand starting at position 3129 of SEQ ID NO: 1243647
acguucuguuauccauuga

SEQ ID NO: 1431313 - RNA, 19 nt, Artificial Sequence
  Description of Artificial Sequence: Synthetic oligonucleotide
  Antisense strand to SEQ ID NO: 1431312
ucaauggauaacagaacgu

SEQ ID NO: 1431314 - RNA, 19 nt, Artificial Sequence
  Description of Artificial Sequence: Synthetic oligonucleotide
  Sense strand starting at position 3133 of SEQ ID NO: 1243647
ucuguuauccauugauagg

SEQ ID NO: 1431315 - RNA, 19 nt, Artificial Sequence
  Description of Artificial Sequence: Synthetic oligonucleotide
  Antisense strand to SEQ ID NO: 1431314
ccuaucaauggauaacaga

SEQ ID NO: 1431316 - RNA, 19 nt, Artificial Sequence
  Description of Artificial Sequence: Synthetic oligonucleotide
  Sense strand starting at position 3172 of SEQ ID NO: 1243647
cugagcaauucucagacaa

SEQ ID NO: 1431317 - RNA, 19 nt, Artificial Sequence
  Description of Artificial Sequence: Synthetic oligonucleotide
  Antisense strand to SEQ ID NO: 1431316
uugucugagaauugcucag

SEQ ID NO: 1431318 - RNA, 19 nt, Artificial Sequence
  Description of Artificial Sequence: Synthetic oligonucleotide
  Sense strand starting at position 3200 of SEQ ID NO: 1243647
gugaguaucccuggcagag

SEQ ID NO: 1431319 - RNA, 19 nt, Artificial Sequence
  Description of Artificial Sequence: Synthetic oligonucleotide
  Antisense strand to SEQ ID NO: 1431318
cucugccagggauacucac

SEQ ID NO: 1431320 - RNA, 19 nt, Artificial Sequence
  Description of Artificial Sequence: Synthetic oligonucleotide
  Sense strand starting at position 3240 of SEQ ID NO: 1243647
agguguucuuaucuugauc

SEQ ID NO: 1431321 - RNA, 19 nt, Artificial Sequence
  Description of Artificial Sequence: Synthetic oligonucleotide
  Antisense strand to SEQ ID NO: 1431320
gaucaagauaagaacaccu

SEQ ID NO: 1431322 - RNA, 19 nt, Artificial Sequence
  Description of Artificial Sequence: Synthetic oligonucleotide
  Sense strand starting at position 3243 of SEQ ID NO: 1243647
uguucuuaucuugaucuga

SEQ ID NO: 1431323 - RNA, 19 nt, Artificial Sequence
  Description of Artificial Sequence: Synthetic oligonucleotide
  Antisense strand to SEQ ID NO: 1431322
ucagaucaagauaagaaca

SEQ ID NO: 1431324 - RNA, 19 nt, Artificial Sequence
  Description of Artificial Sequence: Synthetic oligonucleotide
  Sense strand starting at position 3414 of SEQ ID NO: 1243647
ggucguuccucccucagau

SEQ ID NO: 1431325 - RNA, 19 nt, Artificial Sequence
  Description of Artificial Sequence: Synthetic oligonucleotide
  Antisense strand to SEQ ID NO: 1431324
aucugagggaggaacgacc

SEQ ID NO: 1431326 - RNA, 19 nt, Artificial Sequence
  Description of Artificial Sequence: Synthetic oligonucleotide
  Sense strand starting at position 3416 of SEQ ID NO: 1243647
ucguuccucccucagauau

SEQ ID NO: 1431327 - RNA, 19 nt, Artificial Sequence
  Description of Artificial Sequence: Synthetic oligonucleotide
  Antisense strand to SEQ ID NO: 1431326
auaucugagggaggaacga

SEQ ID NO: 1431328 - RNA, 19 nt, Artificial Sequence
  Description of Artificial Sequence: Synthetic oligonucleotide
  Sense strand starting at position 3506 of SEQ ID NO: 1243647
cggaauagcugggaaagaa

SEQ ID NO: 1431329 - RNA, 19 nt, Artificial Sequence
  Description of Artificial Sequence: Synthetic oligonucleotide
  Antisense strand to SEQ ID NO: 1431328
uucuuucccagcuauuccg

SEQ ID NO: 1431330 - RNA, 19 nt, Artificial Sequence
  Description of Artificial Sequence: Synthetic oligonucleotide
  Sense strand starting at position 3567 of SEQ ID NO: 1243647
gauacuaagugcucugaag

SEQ ID NO: 1431331 - RNA, 19 nt, Artificial Sequence
  Description of Artificial Sequence: Synthetic oligonucleotide
  Antisense strand to SEQ ID NO: 1431330
cuucagagcacuuaguauc

SEQ ID NO: 1431332 - RNA, 19 nt, Artificial Sequence
  Description of Artificial Sequence: Synthetic oligonucleotide
  Sense strand starting at position 3609 of SEQ ID NO: 1243647
uugggaacuaguugcugau

SEQ ID NO: 1431333 - RNA, 19 nt, Artificial Sequence
  Description of Artificial Sequence: Synthetic oligonucleotide
  Antisense strand to SEQ ID NO: 1431332
aucagcaacuaguucccaa

SEQ ID NO: 1431334 - RNA, 19 nt, Artificial Sequence
  Description of Artificial Sequence: Synthetic oligonucleotide
  Sense strand starting at position 3612 of SEQ ID NO: 1243647
ggaacuaguugcugauaga

SEQ ID NO: 1431335 - RNA, 19 nt, Artificial Sequence
  Description of Artificial Sequence: Synthetic oligonucleotide
  Antisense strand to SEQ ID NO: 1431334
ucuaucagcaacuaguucc

SEQ ID NO: 1431336 - RNA, 19 nt, Artificial Sequence
  Description of Artificial Sequence: Synthetic oligonucleotide
  Sense strand starting at position 3615 of SEQ ID NO: 1243647
acuaguugcugauagaauc

SEQ ID NO: 1431337 - RNA, 19 nt, Artificial Sequence
  Description of Artificial Sequence: Synthetic oligonucleotide
  Antisense strand to SEQ ID NO: 1431336
gauucuaucagcaacuagu

SEQ ID NO: 1431338 - RNA, 19 nt, Artificial Sequence
  Description of Artificial Sequence: Synthetic oligonucleotide
  Sense strand starting at position 3623 of SEQ ID NO: 1243647
cugauagaaucacagaagu

SEQ ID NO: 1431339 - RNA, 19 nt, Artificial Sequence
  Description of Artificial Sequence: Synthetic oligonucleotide
  Antisense strand to SEQ ID NO: 1431338
acuucugugauucuaucag

SEQ ID NO: 1431340 - RNA, 19 nt, Artificial Sequence
  Description of Artificial Sequence: Synthetic oligonucleotide
  Sense strand starting at position 3657 of SEQ ID NO: 1243647
gggagaagguguuaggagu

SEQ ID NO: 1431341 - RNA, 19 nt, Artificial Sequence
  Description of Artificial Sequence: Synthetic oligonucleotide
  Antisense strand to SEQ ID NO: 1431340
acuccuaacaccuucuccc

SEQ ID NO: 1431342 - RNA, 19 nt, Artificial Sequence
  Description of Artificial Sequence: Synthetic oligonucleotide
  Sense strand starting at position 3672 of SEQ ID NO: 1243647
gaguaaggugaagagcauu

SEQ ID NO: 1431343 - RNA, 19 nt, Artificial Sequence
  Description of Artificial Sequence: Synthetic oligonucleotide
  Antisense strand to SEQ ID NO: 1431342
aaugcucuucaccuuacuc

SEQ ID NO: 1431344 - RNA, 19 nt, Artificial Sequence
  Description of Artificial Sequence: Synthetic oligonucleotide
  Sense strand starting at position 3680 of SEQ ID NO: 1243647
ugaagagcauuaugagaga

SEQ ID NO: 1431345 - RNA, 19 nt, Artificial Sequence
  Description of Artificial Sequence: Synthetic oligonucleotide
  Antisense strand to SEQ ID NO: 1431344
ucucucauaaugcucuuca

SEQ ID NO: 1431346 - RNA, 19 nt, Artificial Sequence
  Description of Artificial Sequence: Synthetic oligonucleotide
  Sense strand starting at position 3923 of SEQ ID NO: 1243647
cugggauugugagaugaag

SEQ ID NO: 1431347 - RNA, 19 nt, Artificial Sequence
  Description of Artificial Sequence: Synthetic oligonucleotide
  Antisense strand to SEQ ID NO: 1431346
cuucaucucacaaucccag

SEQ ID NO: 1431348 - RNA, 19 nt, Artificial Sequence
  Description of Artificial Sequence: Synthetic oligonucleotide
  Sense strand starting at position 560 of SEQ ID NO: 1243648
uggauuuggucccgagaac

SEQ ID NO: 1431349 - RNA, 19 nt, Artificial Sequence
  Description of Artificial Sequence: Synthetic oligonucleotide
  Antisense strand to SEQ ID NO: 1431348
guucucgggaccaaaucca

SEQ ID NO: 1431350 - RNA, 19 nt, Artificial Sequence
  Description of Artificial Sequence: Synthetic oligonucleotide
  Sense strand starting at position 586 of SEQ ID NO: 1243648
agccguucgaauguguuaa

SEQ ID NO: 1431351 - RNA, 19 nt, Artificial Sequence
  Description of Artificial Sequence: Synthetic oligonucleotide
  Antisense strand to SEQ ID NO: 1431350
uuaacacauucgaacggcu

SEQ ID NO: 1431352 - RNA, 19 nt, Artificial Sequence
  Description of Artificial Sequence: Synthetic oligonucleotide
  Sense strand starting at position 610 of SEQ ID NO: 1243648
gggagugaauuagggagaa

SEQ ID NO: 1431353 - RNA, 19 nt, Artificial Sequence
  Description of Artificial Sequence: Synthetic oligonucleotide
  Antisense strand to SEQ ID NO: 1431352
uucucccuaauucacuccc

SEQ ID NO: 1431354 - RNA, 19 nt, Artificial Sequence
  Description of Artificial Sequence: Synthetic oligonucleotide
  Sense strand starting at position 685 of SEQ ID NO: 1243648
ggagguuugaaauggcuuu

SEQ ID NO: 1431355 - RNA, 19 nt, Artificial Sequence
  Description of Artificial Sequence: Synthetic oligonucleotide
  Antisense strand to SEQ ID NO: 1431354
aaagccauuucaaaccucc

SEQ ID NO: 1431356 - RNA, 19 nt, Artificial Sequence
  Description of Artificial Sequence: Synthetic oligonucleotide
  Sense strand starting at position 747 of SEQ ID NO: 1243648
gcaguuuccaggcaccaga

SEQ ID NO: 1431357 - RNA, 19 nt, Artificial Sequence
  Description of Artificial Sequence: Synthetic oligonucleotide
  Antisense strand to SEQ ID NO: 1431356
ucuggugccuggaaacugc

SEQ ID NO: 1431358 - RNA, 19 nt, Artificial Sequence
  Description of Artificial Sequence: Synthetic oligonucleotide
  Sense strand starting at position 758 of SEQ ID NO: 1243648
gcaccagagcuguguggaa

SEQ ID NO: 1431359 - RNA, 19 nt, Artificial Sequence
  Description of Artificial Sequence: Synthetic oligonucleotide
  Antisense strand to SEQ ID NO: 1431358
uuccacacagcucuggugc

SEQ ID NO: 1431360 - RNA, 19 nt, Artificial Sequence
  Description of Artificial Sequence: Synthetic oligonucleotide
  Sense strand starting at position 799 of SEQ ID NO: 1243648
ccuuaauuccaaggagauc

SEQ ID NO: 1431361 - RNA, 19 nt, Artificial Sequence
  Description of Artificial Sequence: Synthetic oligonucleotide
  Antisense strand to SEQ ID NO: 1431360
gaucuccuuggaauuaagg

SEQ ID NO: 1431362 - RNA, 19 nt, Artificial Sequence
  Description of Artificial Sequence: Synthetic oligonucleotide
  Sense strand starting at position 814 of SEQ ID NO: 1243648
gaucgaguagcgggaacau

SEQ ID NO: 1431363 - RNA, 19 nt, Artificial Sequence
  Description of Artificial Sequence: Synthetic oligonucleotide
  Antisense strand to SEQ ID NO: 1431362
auguucccgcuacucgauc

SEQ ID NO: 1431364 - RNA, 19 nt, Artificial Sequence
  Description of Artificial Sequence: Synthetic oligonucleotide
  Sense strand starting at position 1131 of SEQ ID NO: 1243648
gccggauucuuguuuagag

SEQ ID NO: 1431365 - RNA, 19 nt, Artificial Sequence
  Description of Artificial Sequence: Synthetic oligonucleotide
  Antisense strand to SEQ ID NO: 1431364
cucuaaacaagaauccggc

SEQ ID NO: 1431366 - RNA, 19 nt, Artificial Sequence
  Description of Artificial Sequence: Synthetic oligonucleotide
  Sense strand starting at position 1249 of SEQ ID NO: 1243648
uuugacguucccugagaca

SEQ ID NO: 1431367 - RNA, 19 nt, Artificial Sequence
  Description of Artificial Sequence: Synthetic oligonucleotide
  Antisense strand to SEQ ID NO: 1431366
ugucucagggaacgucaaa

SEQ ID NO: 1431368 - RNA, 19 nt, Artificial Sequence
  Description of Artificial Sequence: Synthetic oligonucleotide
  Sense strand starting at position 1299 of SEQ ID NO: 1243648
uagagcagugaugggaauu

SEQ ID NO: 1431369 - RNA, 19 nt, Artificial Sequence
  Description of Artificial Sequence: Synthetic oligonucleotide
  Antisense strand to SEQ ID NO: 1431368
aauucccaucacugcucua

SEQ ID NO: 1431370 - RNA, 19 nt, Artificial Sequence
  Description of Artificial Sequence: Synthetic oligonucleotide
  Sense strand starting at position 1317 of SEQ ID NO: 1243648
uugggcuuucgcggaagaa

SEQ ID NO: 1431371 - RNA, 19 nt, Artificial Sequence
  Description of Artificial Sequence: Synthetic oligonucleotide
  Antisense strand to SEQ ID NO: 1431370
uucuuccgcgaaagcccaa

SEQ ID NO: 1431372 - RNA, 19 nt, Artificial Sequence
  Description of Artificial Sequence: Synthetic oligonucleotide
  Sense strand starting at position 1318 of SEQ ID NO: 1243648
ugggcuuucgcggaagaaa

SEQ ID NO: 1431373 - RNA, 19 nt, Artificial Sequence
  Description of Artificial Sequence: Synthetic oligonucleotide
  Antisense strand to SEQ ID NO: 1431372
uuucuuccgcgaaagccca

SEQ ID NO: 1431374 - RNA, 19 nt, Artificial Sequence
  Description of Artificial Sequence: Synthetic oligonucleotide
  Sense strand starting at position 1354 of SEQ ID NO: 1243648
gguagaacacccgguagau

SEQ ID NO: 1431375 - RNA, 19 nt, Artificial Sequence
  Description of Artificial Sequence: Synthetic oligonucleotide
  Antisense strand to SEQ ID NO: 1431374
aucuaccggguguucuacc

SEQ ID NO: 1431376 - RNA, 19 nt, Artificial Sequence
  Description of Artificial Sequence: Synthetic oligonucleotide
  Sense strand starting at position 1367 of SEQ ID NO: 1243648
guagaugugacaugagaua

SEQ ID NO: 1431377 - RNA, 19 nt, Artificial Sequence
  Description of Artificial Sequence: Synthetic oligonucleotide
  Antisense strand to SEQ ID NO: 1431376
uaucucaugucacaucuac

SEQ ID NO: 1431378 - RNA, 19 nt, Artificial Sequence
  Description of Artificial Sequence: Synthetic oligonucleotide
  Sense strand starting at position 1390 of SEQ ID NO: 1243648
gggaggugggucgggaaau

SEQ ID NO: 1431379 - RNA, 19 nt, Artificial Sequence
  Description of Artificial Sequence: Synthetic oligonucleotide
  Antisense strand to SEQ ID NO: 1431378
auuucccgacccaccuccc

SEQ ID NO: 1431380 - RNA, 19 nt, Artificial Sequence
  Description of Artificial Sequence: Synthetic oligonucleotide
  Sense strand starting at position 1400 of SEQ ID NO: 1243648
ucgggaaaucgagagcguu

SEQ ID NO: 1431381 - RNA, 19 nt, Artificial Sequence
  Description of Artificial Sequence: Synthetic oligonucleotide
  Antisense strand to SEQ ID NO: 1431380
aacgcucucgauuucccga

SEQ ID NO: 1431382 - RNA, 19 nt, Artificial Sequence
  Description of Artificial Sequence: Synthetic oligonucleotide
  Sense strand starting at position 1470 of SEQ ID NO: 1243648
gugauaaagccugaaaggu

SEQ ID NO: 1431383 - RNA, 19 nt, Artificial Sequence
  Description of Artificial Sequence: Synthetic oligonucleotide
  Antisense strand to SEQ ID NO: 1431382
accuuucaggcuuuaucac

SEQ ID NO: 1431384 - RNA, 19 nt, Artificial Sequence
  Description of Artificial Sequence: Synthetic oligonucleotide
  Sense strand starting at position 1564 of SEQ ID NO: 1243648
acugcugaguuuccagaca

SEQ ID NO: 1431385 - RNA, 19 nt, Artificial Sequence
  Description of Artificial Sequence: Synthetic oligonucleotide
  Antisense strand to SEQ ID NO: 1431384
ugucuggaaacucagcagu

SEQ ID NO: 1431386 - RNA, 19 nt, Artificial Sequence
  Description of Artificial Sequence: Synthetic oligonucleotide
  Sense strand starting at position 1621 of SEQ ID NO: 1243648
ccucaauuccaaggagauc

SEQ ID NO: 1431387 - RNA, 19 nt, Artificial Sequence
  Description of Artificial Sequence: Synthetic oligonucleotide
  Antisense strand to SEQ ID NO: 1431386
gaucuccuuggaauugagg

SEQ ID NO: 1431388 - RNA, 19 nt, Artificial Sequence
  Description of Artificial Sequence: Synthetic oligonucleotide
  Sense strand starting at position 1993 of SEQ ID NO: 1243648
caaagauguuucgcuccuu

SEQ ID NO: 1431389 - RNA, 19 nt, Artificial Sequence
  Description of Artificial Sequence: Synthetic oligonucleotide
  Antisense strand to SEQ ID NO: 1431388
aaggagcgaaacaucuuug

SEQ ID NO: 1431390 - RNA, 19 nt, Artificial Sequence
  Description of Artificial Sequence: Synthetic oligonucleotide
  Sense strand starting at position 2092 of SEQ ID NO: 1243648
guggcaggucuccaaucaa

SEQ ID NO: 1431391 - RNA, 19 nt, Artificial Sequence
  Description of Artificial Sequence: Synthetic oligonucleotide
  Antisense strand to SEQ ID NO: 1431390
uugauuggagaccugccac

SEQ ID NO: 1431392 - RNA, 19 nt, Artificial Sequence
  Description of Artificial Sequence: Synthetic oligonucleotide
  Sense strand starting at position 2277 of SEQ ID NO: 1243648
ggaaucaacgccugguaca

SEQ ID NO: 1431393 - RNA, 19 nt, Artificial Sequence
  Description of Artificial Sequence: Synthetic oligonucleotide
  Antisense strand to SEQ ID NO: 1431392
uguaccaggcguugauucc

SEQ ID NO: 1431394 - RNA, 19 nt, Artificial Sequence
  Description of Artificial Sequence: Synthetic oligonucleotide
  Sense strand starting at position 2315 of SEQ ID NO: 1243648
guaggaguuaugcacgugu

SEQ ID NO: 1431395 - RNA, 19 nt, Artificial Sequence
  Description of Artificial Sequence: Synthetic oligonucleotide
  Antisense strand to SEQ ID NO: 1431394
acacgugcauaacuccuac

SEQ ID NO: 1431396 - RNA, 19 nt, Artificial Sequence
  Description of Artificial Sequence: Synthetic oligonucleotide
  Sense strand starting at position 2318 of SEQ ID NO: 1243648
ggaguuaugcacgugugua

SEQ ID NO: 1431397 - RNA, 19 nt, Artificial Sequence
  Description of Artificial Sequence: Synthetic oligonucleotide
  Antisense strand to SEQ ID NO: 1431396
uacacacgugcauaacucc

SEQ ID NO: 1431398 - RNA, 19 nt, Artificial Sequence
  Description of Artificial Sequence: Synthetic oligonucleotide
  Sense strand starting at position 2613 of SEQ ID NO: 1243648
cccuguugccugcagaaua

SEQ ID NO: 1431399 - RNA, 19 nt, Artificial Sequence
  Description of Artificial Sequence: Synthetic oligonucleotide
  Antisense strand to SEQ ID NO: 1431398
uauucugcaggcaacaggg

SEQ ID NO: 1431400 - RNA, 19 nt, Artificial Sequence
  Description of Artificial Sequence: Synthetic oligonucleotide
  Sense strand starting at position 2635 of SEQ ID NO: 1243648
guccaaauguuucuggcau

SEQ ID NO: 1431401 - RNA, 19 nt, Artificial Sequence
  Description of Artificial Sequence: Synthetic oligonucleotide
  Antisense strand to SEQ ID NO: 1431400
augccagaaacauuuggac

SEQ ID NO: 1431402 - RNA, 19 nt, Artificial Sequence
  Description of Artificial Sequence: Synthetic oligonucleotide
  Sense strand starting at position 2783 of SEQ ID NO: 1243648
aacucacuucuggguuagu

SEQ ID NO: 1431403 - RNA, 19 nt, Artificial Sequence
  Description of Artificial Sequence: Synthetic oligonucleotide
  Antisense strand to SEQ ID NO: 1431402
acuaacccagaagugaguu

SEQ ID NO: 1431404 - RNA, 19 nt, Artificial Sequence
  Description of Artificial Sequence: Synthetic oligonucleotide
  Sense strand starting at position 2820 of SEQ ID NO: 1243648
ccuaauucgucuccaguuu

SEQ ID NO: 1431405 - RNA, 19 nt, Artificial Sequence
  Description of Artificial Sequence: Synthetic oligonucleotide
  Antisense strand to SEQ ID NO: 1431404
aaacuggagacgaauuagg

SEQ ID NO: 1431406 - RNA, 19 nt, Artificial Sequence
  Description of Artificial Sequence: Synthetic oligonucleotide
  Sense strand starting at position 2894 of SEQ ID NO: 1243648
gaacuugcuccuggauuag

SEQ ID NO: 1431407 - RNA, 19 nt, Artificial Sequence
  Description of Artificial Sequence: Synthetic oligonucleotide
  Antisense strand to SEQ ID NO: 1431406
cuaauccaggagcaaguuc

SEQ ID NO: 1431408 - RNA, 19 nt, Artificial Sequence
  Description of Artificial Sequence: Synthetic oligonucleotide
  Sense strand starting at position 2952 of SEQ ID NO: 1243648
ccgguuucucaggaaaguc

SEQ ID NO: 1431409 - RNA, 19 nt, Artificial Sequence
  Description of Artificial Sequence: Synthetic oligonucleotide
  Antisense strand to SEQ ID NO: 1431408
gacuuuccugagaaaccgg

SEQ ID NO: 1431410 - RNA, 19 nt, Artificial Sequence
  Description of Artificial Sequence: Synthetic oligonucleotide
  Sense strand starting at position 2962 of SEQ ID NO: 1243648
aggaaagucuuacccggua

SEQ ID NO: 1431411 - RNA, 19 nt, Artificial Sequence
  Description of Artificial Sequence: Synthetic oligonucleotide
  Antisense strand to SEQ ID NO: 1431410
uaccggguaagacuuuccu

SEQ ID NO: 1431412 - RNA, 19 nt, Artificial Sequence
  Description of Artificial Sequence: Synthetic oligonucleotide
  Sense strand starting at position 2965 of SEQ ID NO: 1243648
aaagucuuacccgguacuu

SEQ ID NO: 1431413 - RNA, 19 nt, Artificial Sequence
  Description of Artificial Sequence: Synthetic oligonucleotide
  Antisense strand to SEQ ID NO: 1431412
aaguaccggguaagacuuu

SEQ ID NO: 1431414 - RNA, 19 nt, Artificial Sequence
  Description of Artificial Sequence: Synthetic oligonucleotide
  Sense strand starting at position 3365 of SEQ ID NO: 1243648
ucuacuguugcacaguuaa

SEQ ID NO: 1431415 - RNA, 19 nt, Artificial Sequence
  Description of Artificial Sequence: Synthetic oligonucleotide
  Antisense strand to SEQ ID NO: 1431414
uuaacugugcaacaguaga

SEQ ID NO: 1431416 - RNA, 19 nt, Artificial Sequence
  Description of Artificial Sequence: Synthetic oligonucleotide
  Sense strand starting at position 3394 of SEQ ID NO: 1243648
ugagcauuuguaugugugu

SEQ ID NO: 1431417 - RNA, 19 nt, Artificial Sequence
  Description of Artificial Sequence: Synthetic oligonucleotide
  Antisense strand to SEQ ID NO: 1431416
acacacauacaaaugcuca

SEQ ID NO: 1431418 - RNA, 19 nt, Artificial Sequence
  Description of Artificial Sequence: Synthetic oligonucleotide
  Sense strand starting at position 3395 of SEQ ID NO: 1243648
gagcauuuguaugugugua

SEQ ID NO: 1431419 - RNA, 19 nt, Artificial Sequence
  Description of Artificial Sequence: Synthetic oligonucleotide
  Antisense strand to SEQ ID NO: 1431418
uacacacauacaaaugcuc

SEQ ID NO: 1431420 - RNA, 19 nt, Artificial Sequence
  Description of Artificial Sequence: Synthetic oligonucleotide
  Sense strand starting at position 3397 of SEQ ID NO: 1243648
gcauuuguauguguguauc

SEQ ID NO: 1431421 - RNA, 19 nt, Artificial Sequence
  Description of Artificial Sequence: Synthetic oligonucleotide
  Antisense strand to SEQ ID NO: 1431420
gauacacacauacaaaugc

SEQ ID NO: 1431422 - RNA, 19 nt, Artificial Sequence
  Description of Artificial Sequence: Synthetic oligonucleotide
  Sense strand starting at position 3501 of SEQ ID NO: 1243648
caggguuugugggugucaa

SEQ ID NO: 1431423 - RNA, 19 nt, Artificial Sequence
  Description of Artificial Sequence: Synthetic oligonucleotide
  Antisense strand to SEQ ID NO: 1431422
uugacacccacaaacccug

SEQ ID NO: 1431424 - RNA, 19 nt, Artificial Sequence
  Description of Artificial Sequence: Synthetic oligonucleotide
  Sense strand starting at position 3502 of SEQ ID NO: 1243648
aggguuugugggugucaau

SEQ ID NO: 1431425 - RNA, 19 nt, Artificial Sequence
  Description of Artificial Sequence: Synthetic oligonucleotide
  Antisense strand to SEQ ID NO: 1431424
auugacacccacaaacccu

SEQ ID NO: 1431426 - RNA, 19 nt, Artificial Sequence
  Description of Artificial Sequence: Synthetic oligonucleotide
  Sense strand starting at position 3654 of SEQ ID NO: 1243648
uuacaaucagccugguaac

SEQ ID NO: 1431427 - RNA, 19 nt, Artificial Sequence
  Description of Artificial Sequence: Synthetic oligonucleotide
  Antisense strand to SEQ ID NO: 1431426
guuaccaggcugauuguaa

SEQ ID NO: 1431428 - RNA, 19 nt, Artificial Sequence
  Description of Artificial Sequence: Synthetic oligonucleotide
  Sense strand starting at position 34 of SEQ ID NO: 1243649
ccaggcuuuagauagcaga

SEQ ID NO: 1431429 - RNA, 19 nt, Artificial Sequence
  Description of Artificial Sequence: Synthetic oligonucleotide
  Antisense strand to SEQ ID NO: 1431428
ucugcuaucuaaagccugg

SEQ ID NO: 1431430 - RNA, 19 nt, Artificial Sequence
  Description of Artificial Sequence: Synthetic oligonucleotide
  Sense strand starting at position 37 of SEQ ID NO: 1243649
ggcuuuagauagcagauga

SEQ ID NO: 1431431 - RNA, 19 nt, Artificial Sequence
  Description of Artificial Sequence: Synthetic oligonucleotide
  Antisense strand to SEQ ID NO: 1431430
ucaucugcuaucuaaagcc

SEQ ID NO: 1431432 - RNA, 19 nt, Artificial Sequence
  Description of Artificial Sequence: Synthetic oligonucleotide
  Sense strand starting at position 50 of SEQ ID NO: 1243649
agaugaguuggccggauca

SEQ ID NO: 1431433 - RNA, 19 nt, Artificial Sequence
  Description of Artificial Sequence: Synthetic oligonucleotide
  Antisense strand to SEQ ID NO: 1431432
ugauccggccaacucaucu

SEQ ID NO: 1431434 - RNA, 19 nt, Artificial Sequence
  Description of Artificial Sequence: Synthetic oligonucleotide
  Sense strand starting at position 52 of SEQ ID NO: 1243649
augaguuggccggaucaag

SEQ ID NO: 1431435 - RNA, 19 nt, Artificial Sequence
  Description of Artificial Sequence: Synthetic oligonucleotide
  Antisense strand to SEQ ID NO: 1431434
cuugauccggccaacucau

SEQ ID NO: 1431436 - RNA, 19 nt, Artificial Sequence
  Description of Artificial Sequence: Synthetic oligonucleotide
  Sense strand starting at position 83 of SEQ ID NO: 1243649
ucuguuucugaaugcaguu

SEQ ID NO: 1431437 - RNA, 19 nt, Artificial Sequence
  Description of Artificial Sequence: Synthetic oligonucleotide
  Antisense strand to SEQ ID NO: 1431436
aacugcauucagaaacaga

SEQ ID NO: 1431438 - RNA, 19 nt, Artificial Sequence
  Description of Artificial Sequence: Synthetic oligonucleotide
  Sense strand starting at position 172 of SEQ ID NO: 1243649
cccugugaucuccaaugcu

SEQ ID NO: 1431439 - RNA, 19 nt, Artificial Sequence
  Description of Artificial Sequence: Synthetic oligonucleotide
  Antisense strand to SEQ ID NO: 1431438
agcauuggagaucacaggg

SEQ ID NO: 1431440 - RNA, 19 nt, Artificial Sequence
  Description of Artificial Sequence: Synthetic oligonucleotide
  Sense strand starting at position 266 of SEQ ID NO: 1243649
gcguguuucuggcucuacu

SEQ ID NO: 1431441 - RNA, 19 nt, Artificial Sequence
  Description of Artificial Sequence: Synthetic oligonucleotide
  Antisense strand to SEQ ID NO: 1431440
aguagagccagaaacacgc

SEQ ID NO: 1431442 - RNA, 19 nt, Artificial Sequence
  Description of Artificial Sequence: Synthetic oligonucleotide
  Sense strand starting at position 275 of SEQ ID NO: 1243649
uggcucuacucagauuucu

SEQ ID NO: 1431443 - RNA, 19 nt, Artificial Sequence
  Description of Artificial Sequence: Synthetic oligonucleotide
  Antisense strand to SEQ ID NO: 1431442
agaaaucugaguagagcca

SEQ ID NO: 1431444 - RNA, 19 nt, Artificial Sequence
  Description of Artificial Sequence: Synthetic oligonucleotide
  Sense strand starting at position 284 of SEQ ID NO: 1243649
ucagauuucugggaggaca

SEQ ID NO: 1431445 - RNA, 19 nt, Artificial Sequence
  Description of Artificial Sequence: Synthetic oligonucleotide
  Antisense strand to SEQ ID NO: 1431444
uguccucccagaaaucuga

SEQ ID NO: 1431446 - RNA, 19 nt, Artificial Sequence
  Description of Artificial Sequence: Synthetic oligonucleotide
  Sense strand starting at position 602 of SEQ ID NO: 1243649
ccauguagcugagaauaca

SEQ ID NO: 1431447 - RNA, 19 nt, Artificial Sequence
  Description of Artificial Sequence: Synthetic oligonucleotide
  Antisense strand to SEQ ID NO: 1431446
uguauucucagcuacaugg

SEQ ID NO: 1431448 - RNA, 19 nt, Artificial Sequence
  Description of Artificial Sequence: Synthetic oligonucleotide
  Sense strand starting at position 906 of SEQ ID NO: 1243649
ucuaauacguuccuguaga

SEQ ID NO: 1431449 - RNA, 19 nt, Artificial Sequence
  Description of Artificial Sequence: Synthetic oligonucleotide
  Antisense strand to SEQ ID NO: 1431448
ucuacaggaacguauuaga

SEQ ID NO: 1431450 - RNA, 19 nt, Artificial Sequence
  Description of Artificial Sequence: Synthetic oligonucleotide
  Sense strand starting at position 983 of SEQ ID NO: 1243649
cugucaugaccaggacacu

SEQ ID NO: 1431451 - RNA, 19 nt, Artificial Sequence
  Description of Artificial Sequence: Synthetic oligonucleotide
  Antisense strand to SEQ ID NO: 1431450
aguguccuggucaugacag

SEQ ID NO: 1431452 - RNA, 19 nt, Artificial Sequence
  Description of Artificial Sequence: Synthetic oligonucleotide
  Sense strand starting at position 1662 of SEQ ID NO: 1243649
ggagguuaaguaugcguca

SEQ ID NO: 1431453 - RNA, 19 nt, Artificial Sequence
  Description of Artificial Sequence: Synthetic oligonucleotide
  Antisense strand to SEQ ID NO: 1431452
ugacgcauacuuaaccucc

SEQ ID NO: 1431454 - RNA, 19 nt, Artificial Sequence
  Description of Artificial Sequence: Synthetic oligonucleotide
  Sense strand starting at position 2114 of SEQ ID NO: 1243649
cuaagaauacccugagguu

SEQ ID NO: 1431455 - RNA, 19 nt, Artificial Sequence
  Description of Artificial Sequence: Synthetic oligonucleotide
  Antisense strand to SEQ ID NO: 1431454
aaccucaggguauucuuag

SEQ ID NO: 1431456 - RNA, 19 nt, Artificial Sequence
  Description of Artificial Sequence: Synthetic oligonucleotide
  Sense strand starting at position 2235 of SEQ ID NO: 1243649
ccuucuuagccuuagaagu

SEQ ID NO: 1431457 - RNA, 19 nt, Artificial Sequence
  Description of Artificial Sequence: Synthetic oligonucleotide
  Antisense strand to SEQ ID NO: 1431456
acuucuaaggcuaagaagg

SEQ ID NO: 1431458 - RNA, 19 nt, Artificial Sequence
  Description of Artificial Sequence: Synthetic oligonucleotide
  Sense strand starting at position 2243 of SEQ ID NO: 1243649
gccuuagaagucuaugcaa

SEQ ID NO: 1431459 - RNA, 19 nt, Artificial Sequence
  Description of Artificial Sequence: Synthetic oligonucleotide
  Antisense strand to SEQ ID NO: 1431458
uugcauagacuucuaaggc

SEQ ID NO: 1431460 - RNA, 19 nt, Artificial Sequence
  Description of Artificial Sequence: Synthetic oligonucleotide
  Sense strand starting at position 2292 of SEQ ID NO: 1243649
ugggccugcguucauuauu

SEQ ID NO: 1431461 - RNA, 19 nt, Artificial Sequence
  Description of Artificial Sequence: Synthetic oligonucleotide
  Antisense strand to SEQ ID NO: 1431460
aauaaugaacgcaggccca

SEQ ID NO: 1431462 - RNA, 19 nt, Artificial Sequence
  Description of Artificial Sequence: Synthetic oligonucleotide
  Sense strand starting at position 2674 of SEQ ID NO: 1243649
gugcuaugcucacugcuau

SEQ ID NO: 1431463 - RNA, 19 nt, Artificial Sequence
  Description of Artificial Sequence: Synthetic oligonucleotide
  Antisense strand to SEQ ID NO: 1431462
auagcagugagcauagcac

SEQ ID NO: 1431464 - RNA, 19 nt, Artificial Sequence
  Description of Artificial Sequence: Synthetic oligonucleotide
  Sense strand starting at position 2675 of SEQ ID NO: 1243649
ugcuaugcucacugcuauu

SEQ ID NO: 1431465 - RNA, 19 nt, Artificial Sequence
  Description of Artificial Sequence: Synthetic oligonucleotide
  Antisense strand to SEQ ID NO: 1431464
aauagcagugagcauagca

SEQ ID NO: 1431466 - RNA, 19 nt, Artificial Sequence
  Description of Artificial Sequence: Synthetic oligonucleotide
  Sense strand starting at position 2897 of SEQ ID NO: 1243649
agguuucagugaggugaag

SEQ ID NO: 1431467 - RNA, 19 nt, Artificial Sequence
  Description of Artificial Sequence: Synthetic oligonucleotide
  Antisense strand to SEQ ID NO: 1431466
cuucaccucacugaaaccu

SEQ ID NO: 1431468 - RNA, 19 nt, Artificial Sequence
  Description of Artificial Sequence: Synthetic oligonucleotide
  Sense strand starting at position 2945 of SEQ ID NO: 1243649
agagcaaaucucggucuaa

SEQ ID NO: 1431469 - RNA, 19 nt, Artificial Sequence
  Description of Artificial Sequence: Synthetic oligonucleotide
  Antisense strand to SEQ ID NO: 1431468
uuagaccgagauuugcucu

SEQ ID NO: 1431470 - RNA, 19 nt, Artificial Sequence
  Description of Artificial Sequence: Synthetic oligonucleotide
  Sense strand starting at position 2946 of SEQ ID NO: 1243649
gagcaaaucucggucuaaa

SEQ ID NO: 1431471 - RNA, 19 nt, Artificial Sequence
  Description of Artificial Sequence: Synthetic oligonucleotide
  Antisense strand to SEQ ID NO: 1431470
uuuagaccgagauuugcuc

SEQ ID NO: 1431472 - RNA, 19 nt, Artificial Sequence
  Description of Artificial Sequence: Synthetic oligonucleotide
  Sense strand starting at position 3014 of SEQ ID NO: 1243649
agaugauaauaagugcaau

SEQ ID NO: 1431473 - RNA, 19 nt, Artificial Sequence
  Description of Artificial Sequence: Synthetic oligonucleotide
  Antisense strand to SEQ ID NO: 1431472
auugcacuuauuaucaucu

SEQ ID NO: 1431474 - RNA, 19 nt, Artificial Sequence
  Description of Artificial Sequence: Synthetic oligonucleotide
  Sense strand starting at position 3020 of SEQ ID NO: 1243649
uaauaagugcaaugaagga

SEQ ID NO: 1431475 - RNA, 19 nt, Artificial Sequence
  Description of Artificial Sequence: Synthetic oligonucleotide
  Antisense strand to SEQ ID NO: 1431474
uccuucauugcacuuauua

SEQ ID NO: 1431476 - RNA, 19 nt, Artificial Sequence
  Description of Artificial Sequence: Synthetic oligonucleotide
  Sense strand starting at position 3042 of SEQ ID NO: 1243649
gaaacagacuaaugugaag

SEQ ID NO: 1431477 - RNA, 19 nt, Artificial Sequence
  Description of Artificial Sequence: Synthetic oligonucleotide
  Antisense strand to SEQ ID NO: 1431476
cuucacauuagucuguuuc

SEQ ID NO: 1431478 - RNA, 19 nt, Artificial Sequence
  Description of Artificial Sequence: Synthetic oligonucleotide
  Sense strand starting at position 3048 of SEQ ID NO: 1243649
gacuaaugugaaggaguga

SEQ ID NO: 1431479 - RNA, 19 nt, Artificial Sequence
  Description of Artificial Sequence: Synthetic oligonucleotide
  Antisense strand to SEQ ID NO: 1431478
ucacuccuucacauuaguc

SEQ ID NO: 1431480 - RNA, 19 nt, Artificial Sequence
  Description of Artificial Sequence: Synthetic oligonucleotide
  Sense strand starting at position 3147 of SEQ ID NO: 1243649
ggaaacuguuccugaagag

SEQ ID NO: 1431481 - RNA, 19 nt, Artificial Sequence
  Description of Artificial Sequence: Synthetic oligonucleotide
  Antisense strand to SEQ ID NO: 1431480
cucuucaggaacaguuucc

SEQ ID NO: 1431482 - RNA, 19 nt, Artificial Sequence
  Description of Artificial Sequence: Synthetic oligonucleotide
  Sense strand starting at position 3164 of SEQ ID NO: 1243649
aggcccugugguuaggaaa

SEQ ID NO: 1431483 - RNA, 19 nt, Artificial Sequence
  Description of Artificial Sequence: Synthetic oligonucleotide
  Antisense strand to SEQ ID NO: 1431482
uuuccuaaccacagggccu

SEQ ID NO: 1431484 - RNA, 19 nt, Artificial Sequence
  Description of Artificial Sequence: Synthetic oligonucleotide
  Sense strand starting at position 3318 of SEQ ID NO: 1243649
cuaaguuugagauggccau

SEQ ID NO: 1431485 - RNA, 19 nt, Artificial Sequence
  Description of Artificial Sequence: Synthetic oligonucleotide
  Antisense strand to SEQ ID NO: 1431484
auggccaucucaaacuuag

SEQ ID NO: 1431486 - RNA, 19 nt, Artificial Sequence
  Description of Artificial Sequence: Synthetic oligonucleotide
  Sense strand starting at position 3319 of SEQ ID NO: 1243649
uaaguuugagauggccauu

SEQ ID NO: 1431487 - RNA, 19 nt, Artificial Sequence
  Description of Artificial Sequence: Synthetic oligonucleotide
  Antisense strand to SEQ ID NO: 1431486
aauggccaucucaaacuua

SEQ ID NO: 1431488 - RNA, 19 nt, Artificial Sequence
  Description of Artificial Sequence: Synthetic oligonucleotide
  Sense strand starting at position 3322 of SEQ ID NO: 1243649
guuugagauggccauuaga

SEQ ID NO: 1431489 - RNA, 19 nt, Artificial Sequence
  Description of Artificial Sequence: Synthetic oligonucleotide
  Antisense strand to SEQ ID NO: 1431488
ucuaauggccaucucaaac

SEQ ID NO: 1431490 - RNA, 19 nt, Artificial Sequence
  Description of Artificial Sequence: Synthetic oligonucleotide
  Sense strand starting at position 3390 of SEQ ID NO: 1243649
gugcaucuuugagucacaa

SEQ ID NO: 1431491 - RNA, 19 nt, Artificial Sequence
  Description of Artificial Sequence: Synthetic oligonucleotide
  Antisense strand to SEQ ID NO: 1431490
uugugacucaaagaugcac

SEQ ID NO: 1431492 - RNA, 19 nt, Artificial Sequence
  Description of Artificial Sequence: Synthetic oligonucleotide
  Sense strand starting at position 3497 of SEQ ID NO: 1243649
gcccuaagguccucugaua

SEQ ID NO: 1431493 - RNA, 19 nt, Artificial Sequence
  Description of Artificial Sequence: Synthetic oligonucleotide
  Antisense strand to SEQ ID NO: 1431492
uaucagaggaccuuagggc

SEQ ID NO: 1431494 - RNA, 19 nt, Artificial Sequence
  Description of Artificial Sequence: Synthetic oligonucleotide
  Sense strand starting at position 3508 of SEQ ID NO: 1243649
cucugauauuuggaaguca

SEQ ID NO: 1431495 - RNA, 19 nt, Artificial Sequence
  Description of Artificial Sequence: Synthetic oligonucleotide
  Antisense strand to SEQ ID NO: 1431494
ugacuuccaaauaucagag

SEQ ID NO: 1431496 - RNA, 19 nt, Artificial Sequence
  Description of Artificial Sequence: Synthetic oligonucleotide
  Sense strand starting at position 3596 of SEQ ID NO: 1243649
uccucuugugccugucaca

SEQ ID NO: 1431497 - RNA, 19 nt, Artificial Sequence
  Description of Artificial Sequence: Synthetic oligonucleotide
  Antisense strand to SEQ ID NO: 1431496
ugugacaggcacaagagga

SEQ ID NO: 1431498 - RNA, 19 nt, Artificial Sequence
  Description of Artificial Sequence: Synthetic oligonucleotide
  Sense strand starting at position 3636 of SEQ ID NO: 1243649
aagugagagugacuuauca

SEQ ID NO: 1431499 - RNA, 19 nt, Artificial Sequence
  Description of Artificial Sequence: Synthetic oligonucleotide
  Antisense strand to SEQ ID NO: 1431498
ugauaagucacucucacuu

SEQ ID NO: 1431500 - RNA, 19 nt, Artificial Sequence
  Description of Artificial Sequence: Synthetic oligonucleotide
  Sense strand starting at position 3638 of SEQ ID NO: 1243649
gugagagugacuuaucaug

SEQ ID NO: 1431501 - RNA, 19 nt, Artificial Sequence
  Description of Artificial Sequence: Synthetic oligonucleotide
  Antisense strand to SEQ ID NO: 1431500
caugauaagucacucucac

SEQ ID NO: 1431502 - RNA, 19 nt, Artificial Sequence
  Description of Artificial Sequence: Synthetic oligonucleotide
  Sense strand starting at position 3640 of SEQ ID NO: 1243649
gagagugacuuaucaugua

SEQ ID NO: 1431503 - RNA, 19 nt, Artificial Sequence
  Description of Artificial Sequence: Synthetic oligonucleotide
  Antisense strand to SEQ ID NO: 1431502
uacaugauaagucacucuc

SEQ ID NO: 1431504 - RNA, 19 nt, Artificial Sequence
  Description of Artificial Sequence: Synthetic oligonucleotide
  Sense strand starting at position 3702 of SEQ ID NO: 1243649
augagaucauggucaggca

SEQ ID NO: 1431505 - RNA, 19 nt, Artificial Sequence
  Description of Artificial Sequence: Synthetic oligonucleotide
  Antisense strand to SEQ ID NO: 1431504
ugccugaccaugaucucau

SEQ ID NO: 1431506 - RNA, 19 nt, Artificial Sequence
  Description of Artificial Sequence: Synthetic oligonucleotide
  Sense strand starting at position 3703 of SEQ ID NO: 1243649
ugagaucauggucaggcau

SEQ ID NO: 1431507 - RNA, 19 nt, Artificial Sequence
  Description of Artificial Sequence: Synthetic oligonucleotide
  Antisense strand to SEQ ID NO: 1431506
augccugaccaugaucuca

SEQ ID NO: 1431508 - RNA, 19 nt, Artificial Sequence
  Description of Artificial Sequence: Synthetic oligonucleotide
  Sense strand starting at position 50 of SEQ ID NO: 1243650
cuuguacuucuguaccuga

SEQ ID NO: 1431509 - RNA, 19 nt, Artificial Sequence
  Description of Artificial Sequence: Synthetic oligonucleotide
  Antisense strand to SEQ ID NO: 1431508
ucagguacagaaguacaag

SEQ ID NO: 1431510 - RNA, 19 nt, Artificial Sequence
  Description of Artificial Sequence: Synthetic oligonucleotide
  Sense strand starting at position 677 of SEQ ID NO: 1243650
ucaauuaugggaggaguuu

SEQ ID NO: 1431511 - RNA, 19 nt, Artificial Sequence
  Description of Artificial Sequence: Synthetic oligonucleotide
  Antisense strand to SEQ ID NO: 1431510
aaacuccucccauaauuga

SEQ ID NO: 1431512 - RNA, 19 nt, Artificial Sequence
  Description of Artificial Sequence: Synthetic oligonucleotide
  Sense strand starting at position 838 of SEQ ID NO: 1243650
gcaggaucucaagagucca

SEQ ID NO: 1431513 - RNA, 19 nt, Artificial Sequence
  Description of Artificial Sequence: Synthetic oligonucleotide
  Antisense strand to SEQ ID NO: 1431512
uggacucuugagauccugc

SEQ ID NO: 1431514 - RNA, 19 nt, Artificial Sequence
  Description of Artificial Sequence: Synthetic oligonucleotide
  Sense strand starting at position 916 of SEQ ID NO: 1243650
cuuuguacucaccgaucca

SEQ ID NO: 1431515 - RNA, 19 nt, Artificial Sequence
  Description of Artificial Sequence: Synthetic oligonucleotide
  Antisense strand to SEQ ID NO: 1431514
uggaucggugaguacaaag

SEQ ID NO: 1431516 - RNA, 19 nt, Artificial Sequence
  Description of Artificial Sequence: Synthetic oligonucleotide
  Sense strand starting at position 1005 of SEQ ID NO: 1243650
cagagauguuguccagugu

SEQ ID NO: 1431517 - RNA, 19 nt, Artificial Sequence
  Description of Artificial Sequence: Synthetic oligonucleotide
  Antisense strand to SEQ ID NO: 1431516
acacuggacaacaucucug

SEQ ID NO: 1431518 - RNA, 19 nt, Artificial Sequence
  Description of Artificial Sequence: Synthetic oligonucleotide
  Sense strand starting at position 1317 of SEQ ID NO: 1243650
uuugcuugccucugacaca

SEQ ID NO: 1431519 - RNA, 19 nt, Artificial Sequence
  Description of Artificial Sequence: Synthetic oligonucleotide
  Antisense strand to SEQ ID NO: 1431518
ugugucagaggcaagcaaa

SEQ ID NO: 1431520 - RNA, 19 nt, Artificial Sequence
  Description of Artificial Sequence: Synthetic oligonucleotide
  Sense strand starting at position 1352 of SEQ ID NO: 1243650
ggcucacccagauggauau

SEQ ID NO: 1431521 - RNA, 19 nt, Artificial Sequence
  Description of Artificial Sequence: Synthetic oligonucleotide
  Antisense strand to SEQ ID NO: 1431520
auauccaucugggugagcc

SEQ ID NO: 1431522 - RNA, 19 nt, Artificial Sequence
  Description of Artificial Sequence: Synthetic oligonucleotide
  Sense strand starting at position 1425 of SEQ ID NO: 1243650
ggagguaacgccuguauaa

SEQ ID NO: 1431523 - RNA, 19 nt, Artificial Sequence
  Description of Artificial Sequence: Synthetic oligonucleotide
  Antisense strand to SEQ ID NO: 1431522
uuauacaggcguuaccucc

SEQ ID NO: 1431524 - RNA, 19 nt, Artificial Sequence
  Description of Artificial Sequence: Synthetic oligonucleotide
  Sense strand starting at position 1427 of SEQ ID NO: 1243650
agguaacgccuguauaauu

SEQ ID NO: 1431525 - RNA, 19 nt, Artificial Sequence
  Description of Artificial Sequence: Synthetic oligonucleotide
  Antisense strand to SEQ ID NO: 1431524
aauuauacaggcguuaccu

SEQ ID NO: 1431526 - RNA, 19 nt, Artificial Sequence
  Description of Artificial Sequence: Synthetic oligonucleotide
  Sense strand starting at position 1573 of SEQ ID NO: 1243650
cauuccuacgugugaauca

SEQ ID NO: 1431527 - RNA, 19 nt, Artificial Sequence
  Description of Artificial Sequence: Synthetic oligonucleotide
  Antisense strand to SEQ ID NO: 1431526
ugauucacacguaggaaug

SEQ ID NO: 1431528 - RNA, 19 nt, Artificial Sequence
  Description of Artificial Sequence: Synthetic oligonucleotide
  Sense strand starting at position 1583 of SEQ ID NO: 1243650
ugugaaucauccgugugaa

SEQ ID NO: 1431529 - RNA, 19 nt, Artificial Sequence
  Description of Artificial Sequence: Synthetic oligonucleotide
  Antisense strand to SEQ ID NO: 1431528
uucacacggaugauucaca

SEQ ID NO: 1431530 - RNA, 19 nt, Artificial Sequence
  Description of Artificial Sequence: Synthetic oligonucleotide
  Sense strand starting at position 1584 of SEQ ID NO: 1243650
gugaaucauccgugugaau

SEQ ID NO: 1431531 - RNA, 19 nt, Artificial Sequence
  Description of Artificial Sequence: Synthetic oligonucleotide
  Antisense strand to SEQ ID NO: 1431530
auucacacggaugauucac

SEQ ID NO: 1431532 - RNA, 19 nt, Artificial Sequence
  Description of Artificial Sequence: Synthetic oligonucleotide
  Sense strand starting at position 1586 of SEQ ID NO: 1243650
gaaucauccgugugaauca

SEQ ID NO: 1431533 - RNA, 19 nt, Artificial Sequence
  Description of Artificial Sequence: Synthetic oligonucleotide
  Antisense strand to SEQ ID NO: 1431532
ugauucacacggaugauuc

SEQ ID NO: 1431534 - RNA, 19 nt, Artificial Sequence
  Description of Artificial Sequence: Synthetic oligonucleotide
  Sense strand starting at position 1593 of SEQ ID NO: 1243650
ccgugugaaucacuaaaca

SEQ ID NO: 1431535 - RNA, 19 nt, Artificial Sequence
  Description of Artificial Sequence: Synthetic oligonucleotide
  Antisense strand to SEQ ID NO: 1431534
uguuuagugauucacacgg

SEQ ID NO: 1431536 - RNA, 19 nt, Artificial Sequence
  Description of Artificial Sequence: Synthetic oligonucleotide
  Sense strand starting at position 1602 of SEQ ID NO: 1243650
ucacuaaacaguggagagu

SEQ ID NO: 1431537 - RNA, 19 nt, Artificial Sequence
  Description of Artificial Sequence: Synthetic oligonucleotide
  Antisense strand to SEQ ID NO: 1431536
acucuccacuguuuaguga

SEQ ID NO: 1431538 - RNA, 19 nt, Artificial Sequence
  Description of Artificial Sequence: Synthetic oligonucleotide
  Sense strand starting at position 1615 of SEQ ID NO: 1243650
gagaguugcacuuggucau

SEQ ID NO: 1431539 - RNA, 19 nt, Artificial Sequence
  Description of Artificial Sequence: Synthetic oligonucleotide
  Antisense strand to SEQ ID NO: 1431538
augaccaagugcaacucuc

SEQ ID NO: 1431540 - RNA, 19 nt, Artificial Sequence
  Description of Artificial Sequence: Synthetic oligonucleotide
  Sense strand starting at position 1616 of SEQ ID NO: 1243650
agaguugcacuuggucaua

SEQ ID NO: 1431541 - RNA, 19 nt, Artificial Sequence
  Description of Artificial Sequence: Synthetic oligonucleotide
  Antisense strand to SEQ ID NO: 1431540
uaugaccaagugcaacucu

SEQ ID NO: 1431542 - RNA, 19 nt, Artificial Sequence
  Description of Artificial Sequence: Synthetic oligonucleotide
  Sense strand starting at position 1618 of SEQ ID NO: 1243650
aguugcacuuggucauaaa

SEQ ID NO: 1431543 - RNA, 19 nt, Artificial Sequence
  Description of Artificial Sequence: Synthetic oligonucleotide
  Antisense strand to SEQ ID NO: 1431542
uuuaugaccaagugcaacu

SEQ ID NO: 1431544 - RNA, 19 nt, Artificial Sequence
  Description of Artificial Sequence: Synthetic oligonucleotide
  Sense strand starting at position 1619 of SEQ ID NO: 1243650
guugcacuuggucauaaau

SEQ ID NO: 1431545 - RNA, 19 nt, Artificial Sequence
  Description of Artificial Sequence: Synthetic oligonucleotide
  Antisense strand to SEQ ID NO: 1431544
auuuaugaccaagugcaac

SEQ ID NO: 1431546 - RNA, 19 nt, Artificial Sequence
  Description of Artificial Sequence: Synthetic oligonucleotide
  Sense strand starting at position 1687 of SEQ ID NO: 1243650
caugucaaauggucaggaa

SEQ ID NO: 1431547 - RNA, 19 nt, Artificial Sequence
  Description of Artificial Sequence: Synthetic oligonucleotide
  Antisense strand to SEQ ID NO: 1431546
uuccugaccauuugacaug

SEQ ID NO: 1431548 - RNA, 19 nt, Artificial Sequence
  Description of Artificial Sequence: Synthetic oligonucleotide
  Sense strand starting at position 1782 of SEQ ID NO: 1243650
cauucucugcucuggagua

SEQ ID NO: 1431549 - RNA, 19 nt, Artificial Sequence
  Description of Artificial Sequence: Synthetic oligonucleotide
  Antisense strand to SEQ ID NO: 1431548
uacuccagagcagagaaug

SEQ ID NO: 1431550 - RNA, 19 nt, Artificial Sequence
  Description of Artificial Sequence: Synthetic oligonucleotide
  Sense strand starting at position 1946 of SEQ ID NO: 1243650
ggaggaaccucucagagaa

SEQ ID NO: 1431551 - RNA, 19 nt, Artificial Sequence
  Description of Artificial Sequence: Synthetic oligonucleotide
  Antisense strand to SEQ ID NO: 1431550
uucucugagagguuccucc

SEQ ID NO: 1431552 - RNA, 19 nt, Artificial Sequence
  Description of Artificial Sequence: Synthetic oligonucleotide
  Sense strand starting at position 2141 of SEQ ID NO: 1243650
uucuaugcugcacagauaa

SEQ ID NO: 1431553 - RNA, 19 nt, Artificial Sequence
  Description of Artificial Sequence: Synthetic oligonucleotide
  Antisense strand to SEQ ID NO: 1431552
uuaucugugcagcauagaa

SEQ ID NO: 1431554 - RNA, 19 nt, Artificial Sequence
  Description of Artificial Sequence: Synthetic oligonucleotide
  Sense strand starting at position 2701 of SEQ ID NO: 1243650
ucaagugcucgauaacggu

SEQ ID NO: 1431555 - RNA, 19 nt, Artificial Sequence
  Description of Artificial Sequence: Synthetic oligonucleotide
  Antisense strand to SEQ ID NO: 1431554
accguuaucgagcacuuga

SEQ ID NO: 1431556 - RNA, 19 nt, Artificial Sequence
  Description of Artificial Sequence: Synthetic oligonucleotide
  Sense strand starting at position 2710 of SEQ ID NO: 1243650
cgauaacggugucuaccau

SEQ ID NO: 1431557 - RNA, 19 nt, Artificial Sequence
  Description of Artificial Sequence: Synthetic oligonucleotide
  Antisense strand to SEQ ID NO: 1431556
augguagacaccguuaucg

SEQ ID NO: 1431558 - RNA, 19 nt, Artificial Sequence
  Description of Artificial Sequence: Synthetic oligonucleotide
  Sense strand starting at position 2711 of SEQ ID NO: 1243650
gauaacggugucuaccaua

SEQ ID NO: 1431559 - RNA, 19 nt, Artificial Sequence
  Description of Artificial Sequence: Synthetic oligonucleotide
  Antisense strand to SEQ ID NO: 1431558
uaugguagacaccguuauc

SEQ ID NO: 1431560 - RNA, 19 nt, Artificial Sequence
  Description of Artificial Sequence: Synthetic oligonucleotide
  Sense strand starting at position 2716 of SEQ ID NO: 1243650
cggugucuaccauauccaa

SEQ ID NO: 1431561 - RNA, 19 nt, Artificial Sequence
  Description of Artificial Sequence: Synthetic oligonucleotide
  Antisense strand to SEQ ID NO: 1431560
uuggauaugguagacaccg

SEQ ID NO: 1431562 - RNA, 19 nt, Artificial Sequence
  Description of Artificial Sequence: Synthetic oligonucleotide
  Sense strand starting at position 2790 of SEQ ID NO: 1243650
uagaauguccaguaaugua

SEQ ID NO: 1431563 - RNA, 19 nt, Artificial Sequence
  Description of Artificial Sequence: Synthetic oligonucleotide
  Antisense strand to SEQ ID NO: 1431562
uacauuacuggacauucua

SEQ ID NO: 1431564 - RNA, 19 nt, Artificial Sequence
  Description of Artificial Sequence: Synthetic oligonucleotide
  Sense strand starting at position 2921 of SEQ ID NO: 1243650
uuaauaucagcauguugaa

SEQ ID NO: 1431565 - RNA, 19 nt, Artificial Sequence
  Description of Artificial Sequence: Synthetic oligonucleotide
  Antisense strand to SEQ ID NO: 1431564
uucaacaugcugauauuaa

SEQ ID NO: 1431566 - RNA, 19 nt, Artificial Sequence
  Description of Artificial Sequence: Synthetic oligonucleotide
  Sense strand starting at position 2964 of SEQ ID NO: 1243650
gggauacuccuaugaccca

SEQ ID NO: 1431567 - RNA, 19 nt, Artificial Sequence
  Description of Artificial Sequence: Synthetic oligonucleotide
  Antisense strand to SEQ ID NO: 1431566
ugggucauaggaguauccc

SEQ ID NO: 1431568 - RNA, 19 nt, Artificial Sequence
  Description of Artificial Sequence: Synthetic oligonucleotide
  Sense strand starting at position 3037 of SEQ ID NO: 1243650
uuuccuaccggauaauuga

SEQ ID NO: 1431569 - RNA, 19 nt, Artificial Sequence
  Description of Artificial Sequence: Synthetic oligonucleotide
  Antisense strand to SEQ ID NO: 1431568
ucaauuauccgguaggaaa

SEQ ID NO: 1431570 - RNA, 19 nt, Artificial Sequence
  Description of Artificial Sequence: Synthetic oligonucleotide
  Sense strand starting at position 3044 of SEQ ID NO: 1243650
ccggauaauugaguccuau

SEQ ID NO: 1431571 - RNA, 19 nt, Artificial Sequence
  Description of Artificial Sequence: Synthetic oligonucleotide
  Antisense strand to SEQ ID NO: 1431570
auaggacucaauuauccgg

SEQ ID NO: 1431572 - RNA, 19 nt, Artificial Sequence
  Description of Artificial Sequence: Synthetic oligonucleotide
  Sense strand starting at position 3058 of SEQ ID NO: 1243650
ccuauaacacaguguuaag

SEQ ID NO: 1431573 - RNA, 19 nt, Artificial Sequence
  Description of Artificial Sequence: Synthetic oligonucleotide
  Antisense strand to SEQ ID NO: 1431572
cuuaacacuguguuauagg

SEQ ID NO: 1431574 - RNA, 19 nt, Artificial Sequence
  Description of Artificial Sequence: Synthetic oligonucleotide
  Sense strand starting at position 3069 of SEQ ID NO: 1243650
guguuaagagaacguacaa

SEQ ID NO: 1431575 - RNA, 19 nt, Artificial Sequence
  Description of Artificial Sequence: Synthetic oligonucleotide
  Antisense strand to SEQ ID NO: 1431574
uuguacguucucuuaacac

SEQ ID NO: 1431576 - RNA, 19 nt, Artificial Sequence
  Description of Artificial Sequence: Synthetic oligonucleotide
  Sense strand starting at position 3104 of SEQ ID NO: 1243650
guuggaaguugagcuaaca

SEQ ID NO: 1431577 - RNA, 19 nt, Artificial Sequence
  Description of Artificial Sequence: Synthetic oligonucleotide
  Antisense strand to SEQ ID NO: 1431576
uguuagcucaacuuccaac

SEQ ID NO: 1431578 - RNA, 19 nt, Artificial Sequence
  Description of Artificial Sequence: Synthetic oligonucleotide
  Sense strand starting at position 3141 of SEQ ID NO: 1243650
uagagauguuaugaagaaa

SEQ ID NO: 1431579 - RNA, 19 nt, Artificial Sequence
  Description of Artificial Sequence: Synthetic oligonucleotide
  Antisense strand to SEQ ID NO: 1431578
uuucuucauaacaucucua

SEQ ID NO: 1431580 - RNA, 19 nt, Artificial Sequence
  Description of Artificial Sequence: Synthetic oligonucleotide
  Sense strand starting at position 3240 of SEQ ID NO: 1243650
ggccuaugaucucucugga

SEQ ID NO: 1431581 - RNA, 19 nt, Artificial Sequence
  Description of Artificial Sequence: Synthetic oligonucleotide
  Antisense strand to SEQ ID NO: 1431580
uccagagagaucauaggcc

SEQ ID NO: 1431582 - RNA, 19 nt, Artificial Sequence
  Description of Artificial Sequence: Synthetic oligonucleotide
  Sense strand starting at position 3243 of SEQ ID NO: 1243650
cuaugaucucucuggaaga

SEQ ID NO: 1431583 - RNA, 19 nt, Artificial Sequence
  Description of Artificial Sequence: Synthetic oligonucleotide
  Antisense strand to SEQ ID NO: 1431582
ucuuccagagagaucauag

SEQ ID NO: 1431584 - RNA, 19 nt, Artificial Sequence
  Description of Artificial Sequence: Synthetic oligonucleotide
  Sense strand starting at position 3693 of SEQ ID NO: 1243650
uuauuugggugggacuaua

SEQ ID NO: 1431585 - RNA, 19 nt, Artificial Sequence
  Description of Artificial Sequence: Synthetic oligonucleotide
  Antisense strand to SEQ ID NO: 1431584
uauagucccacccaaauaa

SEQ ID NO: 1431586 - RNA, 19 nt, Artificial Sequence
  Description of Artificial Sequence: Synthetic oligonucleotide
  Sense strand starting at position 3702 of SEQ ID NO: 1243650
ugggacuauaucugggagu

SEQ ID NO: 1431587 - RNA, 19 nt, Artificial Sequence
  Description of Artificial Sequence: Synthetic oligonucleotide
  Antisense strand to SEQ ID NO: 1431586
acucccagauauaguccca

SEQ ID NO: 1431588 - RNA, 19 nt, Artificial Sequence
  Description of Artificial Sequence: Synthetic oligonucleotide
  Sense strand starting at position 24 of SEQ ID NO: 1243651
cuaugugagucuccagaag

SEQ ID NO: 1431589 - RNA, 19 nt, Artificial Sequence
  Description of Artificial Sequence: Synthetic oligonucleotide
  Antisense strand to SEQ ID NO: 1431588
cuucuggagacucacauag

SEQ ID NO: 1431590 - RNA, 19 nt, Artificial Sequence
  Description of Artificial Sequence: Synthetic oligonucleotide
  Sense strand starting at position 343 of SEQ ID NO: 1243651
agaguccuugcggaagaaa

SEQ ID NO: 1431591 - RNA, 19 nt, Artificial Sequence
  Description of Artificial Sequence: Synthetic oligonucleotide
  Antisense strand to SEQ ID NO: 1431590
uuucuuccgcaaggacucu

SEQ ID NO: 1431592 - RNA, 19 nt, Artificial Sequence
  Description of Artificial Sequence: Synthetic oligonucleotide
  Sense strand starting at position 424 of SEQ ID NO: 1243651
cuuguacuucuguaccuga

SEQ ID NO: 1431593 - RNA, 19 nt, Artificial Sequence
  Description of Artificial Sequence: Synthetic oligonucleotide
  Antisense strand to SEQ ID NO: 1431592
ucagguacagaaguacaag

SEQ ID NO: 1431594 - RNA, 19 nt, Artificial Sequence
  Description of Artificial Sequence: Synthetic oligonucleotide
  Sense strand starting at position 1051 of SEQ ID NO: 1243651
ucaauuaugggaggaguuu

SEQ ID NO: 1431595 - RNA, 19 nt, Artificial Sequence
  Description of Artificial Sequence: Synthetic oligonucleotide
  Antisense strand to SEQ ID NO: 1431594
aaacuccucccauaauuga

SEQ ID NO: 1431596 - RNA, 19 nt, Artificial Sequence
  Description of Artificial Sequence: Synthetic oligonucleotide
  Sense strand starting at position 1212 of SEQ ID NO: 1243651
gcaggaucucaagagucca

SEQ ID NO: 1431597 - RNA, 19 nt, Artificial Sequence
  Description of Artificial Sequence: Synthetic oligonucleotide
  Antisense strand to SEQ ID NO: 1431596
uggacucuugagauccugc

SEQ ID NO: 1431598 - RNA, 19 nt, Artificial Sequence
  Description of Artificial Sequence: Synthetic oligonucleotide
  Sense strand starting at position 1290 of SEQ ID NO: 1243651
cuuuguacucaccgaucca

SEQ ID NO: 1431599 - RNA, 19 nt, Artificial Sequence
  Description of Artificial Sequence: Synthetic oligonucleotide
  Antisense strand to SEQ ID NO: 1431598
uggaucggugaguacaaag

SEQ ID NO: 1431600 - RNA, 19 nt, Artificial Sequence
  Description of Artificial Sequence: Synthetic oligonucleotide
  Sense strand starting at position 1379 of SEQ ID NO: 1243651
cagagauguuguccagugu

SEQ ID NO: 1431601 - RNA, 19 nt, Artificial Sequence
  Description of Artificial Sequence: Synthetic oligonucleotide
  Antisense strand to SEQ ID NO: 1431600
acacuggacaacaucucug

SEQ ID NO: 1431602 - RNA, 19 nt, Artificial Sequence
  Description of Artificial Sequence: Synthetic oligonucleotide
  Sense strand starting at position 1691 of SEQ ID NO: 1243651
uuugcuugccucugacaca

SEQ ID NO: 1431603 - RNA, 19 nt, Artificial Sequence
  Description of Artificial Sequence: Synthetic oligonucleotide
  Antisense strand to SEQ ID NO: 1431602
ugugucagaggcaagcaaa

SEQ ID NO: 1431604 - RNA, 19 nt, Artificial Sequence
  Description of Artificial Sequence: Synthetic oligonucleotide
  Sense strand starting at position 1726 of SEQ ID NO: 1243651
ggcucacccagauggauau

SEQ ID NO: 1431605 - RNA, 19 nt, Artificial Sequence
  Description of Artificial Sequence: Synthetic oligonucleotide
  Antisense strand to SEQ ID NO: 1431604
auauccaucugggugagcc

SEQ ID NO: 1431606 - RNA, 19 nt, Artificial Sequence
  Description of Artificial Sequence: Synthetic oligonucleotide
  Sense strand starting at position 1799 of SEQ ID NO: 1243651
ggagguaacgccuguauaa

SEQ ID NO: 1431607 - RNA, 19 nt, Artificial Sequence
  Description of Artificial Sequence: Synthetic oligonucleotide
  Antisense strand to SEQ ID NO: 1431606
uuauacaggcguuaccucc

SEQ ID NO: 1431608 - RNA, 19 nt, Artificial Sequence
  Description of Artificial Sequence: Synthetic oligonucleotide
  Sense strand starting at position 1801 of SEQ ID NO: 1243651
agguaacgccuguauaauu

SEQ ID NO: 1431609 - RNA, 19 nt, Artificial Sequence
  Description of Artificial Sequence: Synthetic oligonucleotide
  Antisense strand to SEQ ID NO: 1431608
aauuauacaggcguuaccu

SEQ ID NO: 1431610 - RNA, 19 nt, Artificial Sequence
  Description of Artificial Sequence: Synthetic oligonucleotide
  Sense strand starting at position 1947 of SEQ ID NO: 1243651
cauuccuacgugugaauca

SEQ ID NO: 1431611 - RNA, 19 nt, Artificial Sequence
  Description of Artificial Sequence: Synthetic oligonucleotide
  Antisense strand to SEQ ID NO: 1431610
ugauucacacguaggaaug

SEQ ID NO: 1431612 - RNA, 19 nt, Artificial Sequence
  Description of Artificial Sequence: Synthetic oligonucleotide
  Sense strand starting at position 1957 of SEQ ID NO: 1243651
ugugaaucauccgugugaa

SEQ ID NO: 1431613 - RNA, 19 nt, Artificial Sequence
  Description of Artificial Sequence: Synthetic oligonucleotide
  Antisense strand to SEQ ID NO: 1431612
uucacacggaugauucaca

SEQ ID NO: 1431614 - RNA, 19 nt, Artificial Sequence
  Description of Artificial Sequence: Synthetic oligonucleotide
  Sense strand starting at position 1958 of SEQ ID NO: 1243651
gugaaucauccgugugaau

SEQ ID NO: 1431615 - RNA, 19 nt, Artificial Sequence
  Description of Artificial Sequence: Synthetic oligonucleotide
  Antisense strand to SEQ ID NO: 1431614
auucacacggaugauucac

SEQ ID NO: 1431616 - RNA, 19 nt, Artificial Sequence
  Description of Artificial Sequence: Synthetic oligonucleotide
  Sense strand starting at position 1960 of SEQ ID NO: 1243651
gaaucauccgugugaauca

SEQ ID NO: 1431617 - RNA, 19 nt, Artificial Sequence
  Description of Artificial Sequence: Synthetic oligonucleotide
  Antisense strand to SEQ ID NO: 1431616
ugauucacacggaugauuc

SEQ ID NO: 1431618 - RNA, 19 nt, Artificial Sequence
  Description of Artificial Sequence: Synthetic oligonucleotide
  Sense strand starting at position 1967 of SEQ ID NO: 1243651
ccgugugaaucacuaaaca

SEQ ID NO: 1431619 - RNA, 19 nt, Artificial Sequence
  Description of Artificial Sequence: Synthetic oligonucleotide
  Antisense strand to SEQ ID NO: 1431618
uguuuagugauucacacgg

SEQ ID NO: 1431620 - RNA, 19 nt, Artificial Sequence
  Description of Artificial Sequence: Synthetic oligonucleotide
  Sense strand starting at position 1976 of SEQ ID NO: 1243651
ucacuaaacaguggagagu

SEQ ID NO: 1431621 - RNA, 19 nt, Artificial Sequence
  Description of Artificial Sequence: Synthetic oligonucleotide
  Antisense strand to SEQ ID NO: 1431620
acucuccacuguuuaguga

SEQ ID NO: 1431622 - RNA, 19 nt, Artificial Sequence
  Description of Artificial Sequence: Synthetic oligonucleotide
  Sense strand starting at position 1989 of SEQ ID NO: 1243651
gagaguugcacuuggucau

SEQ ID NO: 1431623 - RNA, 19 nt, Artificial Sequence
  Description of Artificial Sequence: Synthetic oligonucleotide
  Antisense strand to SEQ ID NO: 1431622
augaccaagugcaacucuc

SEQ ID NO: 1431624 - RNA, 19 nt, Artificial Sequence
  Description of Artificial Sequence: Synthetic oligonucleotide
  Sense strand starting at position 1990 of SEQ ID NO: 1243651
agaguugcacuuggucaua

SEQ ID NO: 1431625 - RNA, 19 nt, Artificial Sequence
  Description of Artificial Sequence: Synthetic oligonucleotide
  Antisense strand to SEQ ID NO: 1431624
uaugaccaagugcaacucu

SEQ ID NO: 1431626 - RNA, 19 nt, Artificial Sequence
  Description of Artificial Sequence: Synthetic oligonucleotide
  Sense strand starting at position 1992 of SEQ ID NO: 1243651
aguugcacuuggucauaaa

SEQ ID NO: 1431627 - RNA, 19 nt, Artificial Sequence
  Description of Artificial Sequence: Synthetic oligonucleotide
  Antisense strand to SEQ ID NO: 1431626
uuuaugaccaagugcaacu

SEQ ID NO: 1431628 - RNA, 19 nt, Artificial Sequence
  Description of Artificial Sequence: Synthetic oligonucleotide
  Sense strand starting at position 1993 of SEQ ID NO: 1243651
guugcacuuggucauaaau

SEQ ID NO: 1431629 - RNA, 19 nt, Artificial Sequence
  Description of Artificial Sequence: Synthetic oligonucleotide
  Antisense strand to SEQ ID NO: 1431628
auuuaugaccaagugcaac

SEQ ID NO: 1431630 - RNA, 19 nt, Artificial Sequence
  Description of Artificial Sequence: Synthetic oligonucleotide
  Sense strand starting at position 2061 of SEQ ID NO: 1243651
caugucaaauggucaggaa

SEQ ID NO: 1431631 - RNA, 19 nt, Artificial Sequence
  Description of Artificial Sequence: Synthetic oligonucleotide
  Antisense strand to SEQ ID NO: 1431630
uuccugaccauuugacaug

SEQ ID NO: 1431632 - RNA, 19 nt, Artificial Sequence
  Description of Artificial Sequence: Synthetic oligonucleotide
  Sense strand starting at position 2156 of SEQ ID NO: 1243651
cauucucugcucuggagua

SEQ ID NO: 1431633 - RNA, 19 nt, Artificial Sequence
  Description of Artificial Sequence: Synthetic oligonucleotide
  Antisense strand to SEQ ID NO: 1431632
uacuccagagcagagaaug

SEQ ID NO: 1431634 - RNA, 19 nt, Artificial Sequence
  Description of Artificial Sequence: Synthetic oligonucleotide
  Sense strand starting at position 2320 of SEQ ID NO: 1243651
ggaggaaccucucagagaa

SEQ ID NO: 1431635 - RNA, 19 nt, Artificial Sequence
  Description of Artificial Sequence: Synthetic oligonucleotide
  Antisense strand to SEQ ID NO: 1431634
uucucugagagguuccucc

SEQ ID NO: 1431636 - RNA, 19 nt, Artificial Sequence
  Description of Artificial Sequence: Synthetic oligonucleotide
  Sense strand starting at position 2515 of SEQ ID NO: 1243651
uucuaugcugcacagauaa

SEQ ID NO: 1431637 - RNA, 19 nt, Artificial Sequence
  Description of Artificial Sequence: Synthetic oligonucleotide
  Antisense strand to SEQ ID NO: 1431636
uuaucugugcagcauagaa

SEQ ID NO: 1431638 - RNA, 19 nt, Artificial Sequence
  Description of Artificial Sequence: Synthetic oligonucleotide
  Sense strand starting at position 3075 of SEQ ID NO: 1243651
ucaagugcucgauaacggu

SEQ ID NO: 1431639 - RNA, 19 nt, Artificial Sequence
  Description of Artificial Sequence: Synthetic oligonucleotide
  Antisense strand to SEQ ID NO: 1431638
accguuaucgagcacuuga

SEQ ID NO: 1431640 - RNA, 19 nt, Artificial Sequence
  Description of Artificial Sequence: Synthetic oligonucleotide
  Sense strand starting at position 3084 of SEQ ID NO: 1243651
cgauaacggugucuaccau

SEQ ID NO: 1431641 - RNA, 19 nt, Artificial Sequence
  Description of Artificial Sequence: Synthetic oligonucleotide
  Antisense strand to SEQ ID NO: 1431640
augguagacaccguuaucg

SEQ ID NO: 1431642 - RNA, 19 nt, Artificial Sequence
  Description of Artificial Sequence: Synthetic oligonucleotide
  Sense strand starting at position 3085 of SEQ ID NO: 1243651
gauaacggugucuaccaua

SEQ ID NO: 1431643 - RNA, 19 nt, Artificial Sequence
  Description of Artificial Sequence: Synthetic oligonucleotide
  Antisense strand to SEQ ID NO: 1431642
uaugguagacaccguuauc

SEQ ID NO: 1431644 - RNA, 19 nt, Artificial Sequence
  Description of Artificial Sequence: Synthetic oligonucleotide
  Sense strand starting at position 3090 of SEQ ID NO: 1243651
cggugucuaccauauccaa

SEQ ID NO: 1431645 - RNA, 19 nt, Artificial Sequence
  Description of Artificial Sequence: Synthetic oligonucleotide
  Antisense strand to SEQ ID NO: 1431644
uuggauaugguagacaccg

SEQ ID NO: 1431646 - RNA, 19 nt, Artificial Sequence
  Description of Artificial Sequence: Synthetic oligonucleotide
  Sense strand starting at position 3164 of SEQ ID NO: 1243651
uagaauguccaguaaugua

SEQ ID NO: 1431647 - RNA, 19 nt, Artificial Sequence
  Description of Artificial Sequence: Synthetic oligonucleotide
  Antisense strand to SEQ ID NO: 1431646
uacauuacuggacauucua

SEQ ID NO: 1431648 - RNA, 19 nt, Artificial Sequence
  Description of Artificial Sequence: Synthetic oligonucleotide
  Sense strand starting at position 3295 of SEQ ID NO: 1243651
uuaauaucagcauguugaa

SEQ ID NO: 1431649 - RNA, 19 nt, Artificial Sequence
  Description of Artificial Sequence: Synthetic oligonucleotide
  Antisense strand to SEQ ID NO: 1431648
uucaacaugcugauauuaa

SEQ ID NO: 1431650 - RNA, 19 nt, Artificial Sequence
  Description of Artificial Sequence: Synthetic oligonucleotide
  Sense strand starting at position 3338 of SEQ ID NO: 1243651
gggauacuccuaugaccca

SEQ ID NO: 1431651 - RNA, 19 nt, Artificial Sequence
  Description of Artificial Sequence: Synthetic oligonucleotide
  Antisense strand to SEQ ID NO: 1431650
ugggucauaggaguauccc

SEQ ID NO: 1431652 - RNA, 19 nt, Artificial Sequence
  Description of Artificial Sequence: Synthetic oligonucleotide
  Sense strand starting at position 3411 of SEQ ID NO: 1243651
uuuccuaccggauaauuga

SEQ ID NO: 1431653 - RNA, 19 nt, Artificial Sequence
  Description of Artificial Sequence: Synthetic oligonucleotide
  Antisense strand to SEQ ID NO: 1431652
ucaauuauccgguaggaaa

SEQ ID NO: 1431654 - RNA, 19 nt, Artificial Sequence
  Description of Artificial Sequence: Synthetic oligonucleotide
  Sense strand starting at position 3418 of SEQ ID NO: 1243651
ccggauaauugaguccuau

SEQ ID NO: 1431655 - RNA, 19 nt, Artificial Sequence
  Description of Artificial Sequence: Synthetic oligonucleotide
  Antisense strand to SEQ ID NO: 1431654
auaggacucaauuauccgg

SEQ ID NO: 1431656 - RNA, 19 nt, Artificial Sequence
  Description of Artificial Sequence: Synthetic oligonucleotide
  Sense strand starting at position 3432 of SEQ ID NO: 1243651
ccuauaacacaguguuaag

SEQ ID NO: 1431657 - RNA, 19 nt, Artificial Sequence
  Description of Artificial Sequence: Synthetic oligonucleotide
  Antisense strand to SEQ ID NO: 1431656
cuuaacacuguguuauagg

SEQ ID NO: 1431658 - RNA, 19 nt, Artificial Sequence
  Description of Artificial Sequence: Synthetic oligonucleotide
  Sense strand starting at position 3443 of SEQ ID NO: 1243651
guguuaagagaacguacaa

SEQ ID NO: 1431659 - RNA, 19 nt, Artificial Sequence
  Description of Artificial Sequence: Synthetic oligonucleotide
  Antisense strand to SEQ ID NO: 1431658
uuguacguucucuuaacac

SEQ ID NO: 1431660 - RNA, 19 nt, Artificial Sequence
  Description of Artificial Sequence: Synthetic oligonucleotide
  Sense strand starting at position 3478 of SEQ ID NO: 1243651
guuggaaguugagcuaaca

SEQ ID NO: 1431661 - RNA, 19 nt, Artificial Sequence
  Description of Artificial Sequence: Synthetic oligonucleotide
  Antisense strand to SEQ ID NO: 1431660
uguuagcucaacuuccaac

SEQ ID NO: 1431662 - RNA, 19 nt, Artificial Sequence
  Description of Artificial Sequence: Synthetic oligonucleotide
  Sense strand starting at position 3515 of SEQ ID NO: 1243651
uagagauguuaugaagaaa

SEQ ID NO: 1431663 - RNA, 19 nt, Artificial Sequence
  Description of Artificial Sequence: Synthetic oligonucleotide
  Antisense strand to SEQ ID NO: 1431662
uuucuucauaacaucucua

SEQ ID NO: 1431664 - RNA, 19 nt, Artificial Sequence
  Description of Artificial Sequence: Synthetic oligonucleotide
  Sense strand starting at position 3614 of SEQ ID NO: 1243651
ggccuaugaucucucugga

SEQ ID NO: 1431665 - RNA, 19 nt, Artificial Sequence
  Description of Artificial Sequence: Synthetic oligonucleotide
  Antisense strand to SEQ ID NO: 1431664
uccagagagaucauaggcc

SEQ ID NO: 1431666 - RNA, 19 nt, Artificial Sequence
  Description of Artificial Sequence: Synthetic oligonucleotide
  Sense strand starting at position 3617 of SEQ ID NO: 1243651
cuaugaucucucuggaaga

SEQ ID NO: 1431667 - RNA, 19 nt, Artificial Sequence
  Description of Artificial Sequence: Synthetic oligonucleotide
  Antisense strand to SEQ ID NO: 1431666
ucuuccagagagaucauag

SEQ ID NO: 1431668 - RNA, 19 nt, Artificial Sequence
  Description of Artificial Sequence: Synthetic oligonucleotide
  Sense strand starting at position 107 of SEQ ID NO: 1243652
gaagcaguccgauaucaga

SEQ ID NO: 1431669 - RNA, 19 nt, Artificial Sequence
  Description of Artificial Sequence: Synthetic oligonucleotide
  Antisense strand to SEQ ID NO: 1431668
ucugauaucggacugcuuc

SEQ ID NO: 1431670 - RNA, 19 nt, Artificial Sequence
  Description of Artificial Sequence: Synthetic oligonucleotide
  Sense strand starting at position 129 of SEQ ID NO: 1243652
gcuugaagggccuguagau

SEQ ID NO: 1431671 - RNA, 19 nt, Artificial Sequence
  Description of Artificial Sequence: Synthetic oligonucleotide
  Antisense strand to SEQ ID NO: 1431670
aucuacaggcccuucaagc

SEQ ID NO: 1431672 - RNA, 19 nt, Artificial Sequence
  Description of Artificial Sequence: Synthetic oligonucleotide
  Sense strand starting at position 180 of SEQ ID NO: 1243652
ggcagauucuggcucaccu

SEQ ID NO: 1431673 - RNA, 19 nt, Artificial Sequence
  Description of Artificial Sequence: Synthetic oligonucleotide
  Antisense strand to SEQ ID NO: 1431672
aggugagccagaaucugcc

SEQ ID NO: 1431674 - RNA, 19 nt, Artificial Sequence
  Description of Artificial Sequence: Synthetic oligonucleotide
  Sense strand starting at position 223 of SEQ ID NO: 1243652
gcggcaaagucugaaguca

SEQ ID NO: 1431675 - RNA, 19 nt, Artificial Sequence
  Description of Artificial Sequence: Synthetic oligonucleotide
  Antisense strand to SEQ ID NO: 1431674
ugacuucagacuuugccgc

SEQ ID NO: 1431676 - RNA, 19 nt, Artificial Sequence
  Description of Artificial Sequence: Synthetic oligonucleotide
  Sense strand starting at position 241 of SEQ ID NO: 1243652
aagcgcugucauggaaacu

SEQ ID NO: 1431677 - RNA, 19 nt, Artificial Sequence
  Description of Artificial Sequence: Synthetic oligonucleotide
  Antisense strand to SEQ ID NO: 1431676
aguuuccaugacagcgcuu

SEQ ID NO: 1431678 - RNA, 19 nt, Artificial Sequence
  Description of Artificial Sequence: Synthetic oligonucleotide
  Sense strand starting at position 530 of SEQ ID NO: 1243652
uugaaaugccauugggauu

SEQ ID NO: 1431679 - RNA, 19 nt, Artificial Sequence
  Description of Artificial Sequence: Synthetic oligonucleotide
  Antisense strand to SEQ ID NO: 1431678
aaucccaauggcauuucaa

SEQ ID NO: 1431680 - RNA, 19 nt, Artificial Sequence
  Description of Artificial Sequence: Synthetic oligonucleotide
  Sense strand starting at position 593 of SEQ ID NO: 1243652
auuugagagucaugucacu

SEQ ID NO: 1431681 - RNA, 19 nt, Artificial Sequence
  Description of Artificial Sequence: Synthetic oligonucleotide
  Antisense strand to SEQ ID NO: 1431680
agugacaugacucucaaau

SEQ ID NO: 1431682 - RNA, 19 nt, Artificial Sequence
  Description of Artificial Sequence: Synthetic oligonucleotide
  Sense strand starting at position 648 of SEQ ID NO: 1243652
cguacaaggucuuuauaag

SEQ ID NO: 1431683 - RNA, 19 nt, Artificial Sequence
  Description of Artificial Sequence: Synthetic oligonucleotide
  Antisense strand to SEQ ID NO: 1431682
cuuauaaagaccuuguacg

SEQ ID NO: 1431684 - RNA, 19 nt, Artificial Sequence
  Description of Artificial Sequence: Synthetic oligonucleotide
  Sense strand starting at position 654 of SEQ ID NO: 1243652
aggucuuuauaagacagua

SEQ ID NO: 1431685 - RNA, 19 nt, Artificial Sequence
  Description of Artificial Sequence: Synthetic oligonucleotide
  Antisense strand to SEQ ID NO: 1431684
uacugucuuauaaagaccu

SEQ ID NO: 1431686 - RNA, 19 nt, Artificial Sequence
  Description of Artificial Sequence: Synthetic oligonucleotide
  Sense strand starting at position 826 of SEQ ID NO: 1243652
agucuuugucccuguuaga

SEQ ID NO: 1431687 - RNA, 19 nt, Artificial Sequence
  Description of Artificial Sequence: Synthetic oligonucleotide
  Antisense strand to SEQ ID NO: 1431686
ucuaacagggacaaagacu

SEQ ID NO: 1431688 - RNA, 19 nt, Artificial Sequence
  Description of Artificial Sequence: Synthetic oligonucleotide
  Sense strand starting at position 829 of SEQ ID NO: 1243652
cuuugucccuguuagaaac

SEQ ID NO: 1431689 - RNA, 19 nt, Artificial Sequence
  Description of Artificial Sequence: Synthetic oligonucleotide
  Antisense strand to SEQ ID NO: 1431688
guuucuaacagggacaaag

SEQ ID NO: 1431690 - RNA, 19 nt, Artificial Sequence
  Description of Artificial Sequence: Synthetic oligonucleotide
  Sense strand starting at position 1081 of SEQ ID NO: 1243652
ccgagaagcccucgucucu

SEQ ID NO: 1431691 - RNA, 19 nt, Artificial Sequence
  Description of Artificial Sequence: Synthetic oligonucleotide
  Antisense strand to SEQ ID NO: 1431690
agagacgagggcuucucgg

SEQ ID NO: 1431692 - RNA, 19 nt, Artificial Sequence
  Description of Artificial Sequence: Synthetic oligonucleotide
  Sense strand starting at position 1090 of SEQ ID NO: 1243652
ccucgucucuuaccugaau

SEQ ID NO: 1431693 - RNA, 19 nt, Artificial Sequence
  Description of Artificial Sequence: Synthetic oligonucleotide
  Antisense strand to SEQ ID NO: 1431692
auucagguaagagacgagg

SEQ ID NO: 1431694 - RNA, 19 nt, Artificial Sequence
  Description of Artificial Sequence: Synthetic oligonucleotide
  Sense strand starting at position 1091 of SEQ ID NO: 1243652
cucgucucuuaccugaaua

SEQ ID NO: 1431695 - RNA, 19 nt, Artificial Sequence
  Description of Artificial Sequence: Synthetic oligonucleotide
  Antisense strand to SEQ ID NO: 1431694
uauucagguaagagacgag

SEQ ID NO: 1431696 - RNA, 19 nt, Artificial Sequence
  Description of Artificial Sequence: Synthetic oligonucleotide
  Sense strand starting at position 1093 of SEQ ID NO: 1243652
cgucucuuaccugaauauc

SEQ ID NO: 1431697 - RNA, 19 nt, Artificial Sequence
  Description of Artificial Sequence: Synthetic oligonucleotide
  Antisense strand to SEQ ID NO: 1431696
gauauucagguaagagacg

SEQ ID NO: 1431698 - RNA, 19 nt, Artificial Sequence
  Description of Artificial Sequence: Synthetic oligonucleotide
  Sense strand starting at position 1102 of SEQ ID NO: 1243652
ccugaauaucggcgucuga

SEQ ID NO: 1431699 - RNA, 19 nt, Artificial Sequence
  Description of Artificial Sequence: Synthetic oligonucleotide
  Antisense strand to SEQ ID NO: 1431698
ucagacgccgauauucagg

SEQ ID NO: 1431700 - RNA, 19 nt, Artificial Sequence
  Description of Artificial Sequence: Synthetic oligonucleotide
  Sense strand starting at position 1255 of SEQ ID NO: 1243652
agagcagaucugugagucu

SEQ ID NO: 1431701 - RNA, 19 nt, Artificial Sequence
  Description of Artificial Sequence: Synthetic oligonucleotide
  Antisense strand to SEQ ID NO: 1431700
agacucacagaucugcucu

SEQ ID NO: 1431702 - RNA, 19 nt, Artificial Sequence
  Description of Artificial Sequence: Synthetic oligonucleotide
  Sense strand starting at position 1919 of SEQ ID NO: 1243652
ggcuccgguucaguuuaau

SEQ ID NO: 1431703 - RNA, 19 nt, Artificial Sequence
  Description of Artificial Sequence: Synthetic oligonucleotide
  Antisense strand to SEQ ID NO: 1431702
auuaaacugaaccggagcc

SEQ ID NO: 1431704 - RNA, 19 nt, Artificial Sequence
  Description of Artificial Sequence: Synthetic oligonucleotide
  Sense strand starting at position 1935 of SEQ ID NO: 1243652
aaugaugucguccagagac

SEQ ID NO: 1431705 - RNA, 19 nt, Artificial Sequence
  Description of Artificial Sequence: Synthetic oligonucleotide
  Antisense strand to SEQ ID NO: 1431704
gucucuggacgacaucauu

SEQ ID NO: 1431706 - RNA, 19 nt, Artificial Sequence
  Description of Artificial Sequence: Synthetic oligonucleotide
  Sense strand starting at position 1937 of SEQ ID NO: 1243652
ugaugucguccagagacau

SEQ ID NO: 1431707 - RNA, 19 nt, Artificial Sequence
  Description of Artificial Sequence: Synthetic oligonucleotide
  Antisense strand to SEQ ID NO: 1431706
augucucuggacgacauca

SEQ ID NO: 1431708 - RNA, 19 nt, Artificial Sequence
  Description of Artificial Sequence: Synthetic oligonucleotide
  Sense strand starting at position 1943 of SEQ ID NO: 1243652
cguccagagacauguccau

SEQ ID NO: 1431709 - RNA, 19 nt, Artificial Sequence
  Description of Artificial Sequence: Synthetic oligonucleotide
  Antisense strand to SEQ ID NO: 1431708
auggacaugucucuggacg

SEQ ID NO: 1431710 - RNA, 19 nt, Artificial Sequence
  Description of Artificial Sequence: Synthetic oligonucleotide
  Sense strand starting at position 2552 of SEQ ID NO: 1243652
ccaagucugcacugucaca

SEQ ID NO: 1431711 - RNA, 19 nt, Artificial Sequence
  Description of Artificial Sequence: Synthetic oligonucleotide
  Antisense strand to SEQ ID NO: 1431710
ugugacagugcagacuugg

SEQ ID NO: 1431712 - RNA, 19 nt, Artificial Sequence
  Description of Artificial Sequence: Synthetic oligonucleotide
  Sense strand starting at position 2578 of SEQ ID NO: 1243652
agucauauccuuuacaagu

SEQ ID NO: 1431713 - RNA, 19 nt, Artificial Sequence
  Description of Artificial Sequence: Synthetic oligonucleotide
  Antisense strand to SEQ ID NO: 1431712
acuuguaaaggauaugacu

SEQ ID NO: 1431714 - RNA, 19 nt, Artificial Sequence
  Description of Artificial Sequence: Synthetic oligonucleotide
  Sense strand starting at position 36 of SEQ ID NO: 1243653
ggaaccugcucccauuaca

SEQ ID NO: 1431715 - RNA, 19 nt, Artificial Sequence
  Description of Artificial Sequence: Synthetic oligonucleotide
  Antisense strand to SEQ ID NO: 1431714
uguaaugggagcagguucc

SEQ ID NO: 1431716 - RNA, 19 nt, Artificial Sequence
  Description of Artificial Sequence: Synthetic oligonucleotide
  Sense strand starting at position 197 of SEQ ID NO: 1243653
ugggcauaguugugcacau

SEQ ID NO: 1431717 - RNA, 19 nt, Artificial Sequence
  Description of Artificial Sequence: Synthetic oligonucleotide
  Antisense strand to SEQ ID NO: 1431716
augugcacaacuaugccca

SEQ ID NO: 1431718 - RNA, 19 nt, Artificial Sequence
  Description of Artificial Sequence: Synthetic oligonucleotide
  Sense strand starting at position 397 of SEQ ID NO: 1243653
gaauaauauuggccuggca

SEQ ID NO: 1431719 - RNA, 19 nt, Artificial Sequence
  Description of Artificial Sequence: Synthetic oligonucleotide
  Antisense strand to SEQ ID NO: 1431718
ugccaggccaauauuauuc

SEQ ID NO: 1431720 - RNA, 19 nt, Artificial Sequence
  Description of Artificial Sequence: Synthetic oligonucleotide
  Sense strand starting at position 399 of SEQ ID NO: 1243653
auaauauuggccuggcaca

SEQ ID NO: 1431721 - RNA, 19 nt, Artificial Sequence
  Description of Artificial Sequence: Synthetic oligonucleotide
  Antisense strand to SEQ ID NO: 1431720
ugugccaggccaauauuau

SEQ ID NO: 1431722 - RNA, 19 nt, Artificial Sequence
  Description of Artificial Sequence: Synthetic oligonucleotide
  Sense strand starting at position 474 of SEQ ID NO: 1243653
agccuaggagucugaaauc

SEQ ID NO: 1431723 - RNA, 19 nt, Artificial Sequence
  Description of Artificial Sequence: Synthetic oligonucleotide
  Antisense strand to SEQ ID NO: 1431722
gauuucagacuccuaggcu

SEQ ID NO: 1431724 - RNA, 19 nt, Artificial Sequence
  Description of Artificial Sequence: Synthetic oligonucleotide
  Sense strand starting at position 486 of SEQ ID NO: 1243653
ugaaaucagcuucgacauc

SEQ ID NO: 1431725 - RNA, 19 nt, Artificial Sequence
  Description of Artificial Sequence: Synthetic oligonucleotide
  Antisense strand to SEQ ID NO: 1431724
gaugucgaagcugauuuca

SEQ ID NO: 1431726 - RNA, 19 nt, Artificial Sequence
  Description of Artificial Sequence: Synthetic oligonucleotide
  Sense strand starting at position 726 of SEQ ID NO: 1243653
caucguuucuaaugugacu

SEQ ID NO: 1431727 - RNA, 19 nt, Artificial Sequence
  Description of Artificial Sequence: Synthetic oligonucleotide
  Antisense strand to SEQ ID NO: 1431726
agucacauuagaaacgaug

SEQ ID NO: 1431728 - RNA, 19 nt, Artificial Sequence
  Description of Artificial Sequence: Synthetic oligonucleotide
  Sense strand starting at position 729 of SEQ ID NO: 1243653
cguuucuaaugugacucaa

SEQ ID NO: 1431729 - RNA, 19 nt, Artificial Sequence
  Description of Artificial Sequence: Synthetic oligonucleotide
  Antisense strand to SEQ ID NO: 1431728
uugagucacauuagaaacg

SEQ ID NO: 1431730 - RNA, 19 nt, Artificial Sequence
  Description of Artificial Sequence: Synthetic oligonucleotide
  Sense strand starting at position 731 of SEQ ID NO: 1243653
uuucuaaugugacucaaag

SEQ ID NO: 1431731 - RNA, 19 nt, Artificial Sequence
  Description of Artificial Sequence: Synthetic oligonucleotide
  Antisense strand to SEQ ID NO: 1431730
cuuugagucacauuagaaa

SEQ ID NO: 1431732 - RNA, 19 nt, Artificial Sequence
  Description of Artificial Sequence: Synthetic oligonucleotide
  Sense strand starting at position 826 of SEQ ID NO: 1243653
cagcuuagccacugaaguu

SEQ ID NO: 1431733 - RNA, 19 nt, Artificial Sequence
  Description of Artificial Sequence: Synthetic oligonucleotide
  Antisense strand to SEQ ID NO: 1431732
aacuucaguggcuaagcug

SEQ ID NO: 1431734 - RNA, 19 nt, Artificial Sequence
  Description of Artificial Sequence: Synthetic oligonucleotide
  Sense strand starting at position 838 of SEQ ID NO: 1243653
ugaaguuuauggccucaaa

SEQ ID NO: 1431735 - RNA, 19 nt, Artificial Sequence
  Description of Artificial Sequence: Synthetic oligonucleotide
  Antisense strand to SEQ ID NO: 1431734
uuugaggccauaaacuuca

SEQ ID NO: 1431736 - RNA, 19 nt, Artificial Sequence
  Description of Artificial Sequence: Synthetic oligonucleotide
  Sense strand starting at position 841 of SEQ ID NO: 1243653
aguuuauggccucaaaguc

SEQ ID NO: 1431737 - RNA, 19 nt, Artificial Sequence
  Description of Artificial Sequence: Synthetic oligonucleotide
  Antisense strand to SEQ ID NO: 1431736
gacuuugaggccauaaacu

SEQ ID NO: 1431738 - RNA, 19 nt, Artificial Sequence
  Description of Artificial Sequence: Synthetic oligonucleotide
  Sense strand starting at position 849 of SEQ ID NO: 1243653
gccucaaagucaugucaca

SEQ ID NO: 1431739 - RNA, 19 nt, Artificial Sequence
  Description of Artificial Sequence: Synthetic oligonucleotide
  Antisense strand to SEQ ID NO: 1431738
ugugacaugacuuugaggc

SEQ ID NO: 1431740 - RNA, 19 nt, Artificial Sequence
  Description of Artificial Sequence: Synthetic oligonucleotide
  Sense strand starting at position 965 of SEQ ID NO: 1243653
cuugaauggguccgauguu

SEQ ID NO: 1431741 - RNA, 19 nt, Artificial Sequence
  Description of Artificial Sequence: Synthetic oligonucleotide
  Antisense strand to SEQ ID NO: 1431740
aacaucggacccauucaag

SEQ ID NO: 1431742 - RNA, 19 nt, Artificial Sequence
  Description of Artificial Sequence: Synthetic oligonucleotide
  Sense strand starting at position 1075 of SEQ ID NO: 1243653
uuuaaugauagacgauuga

SEQ ID NO: 1431743 - RNA, 19 nt, Artificial Sequence
  Description of Artificial Sequence: Synthetic oligonucleotide
  Antisense strand to SEQ ID NO: 1431742
ucaaucgucuaucauuaaa

SEQ ID NO: 1431744 - RNA, 19 nt, Artificial Sequence
  Description of Artificial Sequence: Synthetic oligonucleotide
  Sense strand starting at position 1082 of SEQ ID NO: 1243653
auagacgauugaugggaaa

SEQ ID NO: 1431745 - RNA, 19 nt, Artificial Sequence
  Description of Artificial Sequence: Synthetic oligonucleotide
  Antisense strand to SEQ ID NO: 1431744
uuucccaucaaucgucuau

SEQ ID NO: 1431746 - RNA, 19 nt, Artificial Sequence
  Description of Artificial Sequence: Synthetic oligonucleotide
  Sense strand starting at position 1143 of SEQ ID NO: 1243653
gguugaagaggcugacuaa

SEQ ID NO: 1431747 - RNA, 19 nt, Artificial Sequence
  Description of Artificial Sequence: Synthetic oligonucleotide
  Antisense strand to SEQ ID NO: 1431746
uuagucagccucuucaacc

SEQ ID NO: 1431748 - RNA, 19 nt, Artificial Sequence
  Description of Artificial Sequence: Synthetic oligonucleotide
  Sense strand starting at position 1273 of SEQ ID NO: 1243653
agauguaccuuccuguagu

SEQ ID NO: 1431749 - RNA, 19 nt, Artificial Sequence
  Description of Artificial Sequence: Synthetic oligonucleotide
  Antisense strand to SEQ ID NO: 1431748
acuacaggaagguacaucu

SEQ ID NO: 1431750 - RNA, 19 nt, Artificial Sequence
  Description of Artificial Sequence: Synthetic oligonucleotide
  Sense strand starting at position 1276 of SEQ ID NO: 1243653
uguaccuuccuguagucua

SEQ ID NO: 1431751 - RNA, 19 nt, Artificial Sequence
  Description of Artificial Sequence: Synthetic oligonucleotide
  Antisense strand to SEQ ID NO: 1431750
uagacuacaggaagguaca

SEQ ID NO: 1431752 - RNA, 19 nt, Artificial Sequence
  Description of Artificial Sequence: Synthetic oligonucleotide
  Sense strand starting at position 2124 of SEQ ID NO: 1243653
acccgccucuuccagaaua

SEQ ID NO: 1431753 - RNA, 19 nt, Artificial Sequence
  Description of Artificial Sequence: Synthetic oligonucleotide
  Antisense strand to SEQ ID NO: 1431752
uauucuggaagaggcgggu

SEQ ID NO: 1431754 - RNA, 19 nt, Artificial Sequence
  Description of Artificial Sequence: Synthetic oligonucleotide
  Sense strand starting at position 2126 of SEQ ID NO: 1243653
ccgccucuuccagaauaga

SEQ ID NO: 1431755 - RNA, 19 nt, Artificial Sequence
  Description of Artificial Sequence: Synthetic oligonucleotide
  Antisense strand to SEQ ID NO: 1431754
ucuauucuggaagaggcgg

SEQ ID NO: 1431756 - RNA, 19 nt, Artificial Sequence
  Description of Artificial Sequence: Synthetic oligonucleotide
  Sense strand starting at position 2561 of SEQ ID NO: 1243653
cggcauuagggcugagcua

SEQ ID NO: 1431757 - RNA, 19 nt, Artificial Sequence
  Description of Artificial Sequence: Synthetic oligonucleotide
  Antisense strand to SEQ ID NO: 1431756
uagcucagcccuaaugccg

SEQ ID NO: 1431758 - RNA, 19 nt, Artificial Sequence
  Description of Artificial Sequence: Synthetic oligonucleotide
  Sense strand starting at position 3203 of SEQ ID NO: 1243653
cuuguuggcucuccuuaga

SEQ ID NO: 1431759 - RNA, 19 nt, Artificial Sequence
  Description of Artificial Sequence: Synthetic oligonucleotide
  Antisense strand to SEQ ID NO: 1431758
ucuaaggagagccaacaag

SEQ ID NO: 1431760 - RNA, 19 nt, Artificial Sequence
  Description of Artificial Sequence: Synthetic oligonucleotide
  Sense strand starting at position 3206 of SEQ ID NO: 1243653
guuggcucuccuuagagga

SEQ ID NO: 1431761 - RNA, 19 nt, Artificial Sequence
  Description of Artificial Sequence: Synthetic oligonucleotide
  Antisense strand to SEQ ID NO: 1431760
uccucuaaggagagccaac

SEQ ID NO: 1431762 - RNA, 19 nt, Artificial Sequence
  Description of Artificial Sequence: Synthetic oligonucleotide
  Sense strand starting at position 3222 of SEQ ID NO: 1243653
ggacauuaacucugaaccu

SEQ ID NO: 1431763 - RNA, 19 nt, Artificial Sequence
  Description of Artificial Sequence: Synthetic oligonucleotide
  Antisense strand to SEQ ID NO: 1431762
agguucagaguuaaugucc

SEQ ID NO: 1431764 - RNA, 19 nt, Artificial Sequence
  Description of Artificial Sequence: Synthetic oligonucleotide
  Sense strand starting at position 3249 of SEQ ID NO: 1243653
cgaggaucucuuuagcccu

SEQ ID NO: 1431765 - RNA, 19 nt, Artificial Sequence
  Description of Artificial Sequence: Synthetic oligonucleotide
  Antisense strand to SEQ ID NO: 1431764
agggcuaaagagauccucg

SEQ ID NO: 1431766 - RNA, 19 nt, Artificial Sequence
  Description of Artificial Sequence: Synthetic oligonucleotide
  Sense strand starting at position 3377 of SEQ ID NO: 1243653
ccaugacuguucucaaagu

SEQ ID NO: 1431767 - RNA, 19 nt, Artificial Sequence
  Description of Artificial Sequence: Synthetic oligonucleotide
  Antisense strand to SEQ ID NO: 1431766
acuuugagaacagucaugg

SEQ ID NO: 1431768 - RNA, 19 nt, Artificial Sequence
  Description of Artificial Sequence: Synthetic oligonucleotide
  Sense strand starting at position 3385 of SEQ ID NO: 1243653
guucucaaaguuugaaguu

SEQ ID NO: 1431769 - RNA, 19 nt, Artificial Sequence
  Description of Artificial Sequence: Synthetic oligonucleotide
  Antisense strand to SEQ ID NO: 1431768
aacuucaaacuuugagaac

SEQ ID NO: 1431770 - RNA, 19 nt, Artificial Sequence
  Description of Artificial Sequence: Synthetic oligonucleotide
  Sense strand starting at position 3437 of SEQ ID NO: 1243653
uugagaagucgugggcuuu

SEQ ID NO: 1431771 - RNA, 19 nt, Artificial Sequence
  Description of Artificial Sequence: Synthetic oligonucleotide
  Antisense strand to SEQ ID NO: 1431770
aaagcccacgacuucucaa

SEQ ID NO: 1431772 - RNA, 19 nt, Artificial Sequence
  Description of Artificial Sequence: Synthetic oligonucleotide
  Sense strand starting at position 3520 of SEQ ID NO: 1243653
gaagguggucugugcuuga

SEQ ID NO: 1431773 - RNA, 19 nt, Artificial Sequence
  Description of Artificial Sequence: Synthetic oligonucleotide
  Antisense strand to SEQ ID NO: 1431772
ucaagcacagaccaccuuc

SEQ ID NO: 1431774 - RNA, 19 nt, Artificial Sequence
  Description of Artificial Sequence: Synthetic oligonucleotide
  Sense strand starting at position 3523 of SEQ ID NO: 1243653
gguggucugugcuugaauc

SEQ ID NO: 1431775 - RNA, 19 nt, Artificial Sequence
  Description of Artificial Sequence: Synthetic oligonucleotide
  Antisense strand to SEQ ID NO: 1431774
gauucaagcacagaccacc

SEQ ID NO: 1431776 - RNA, 19 nt, Artificial Sequence
  Description of Artificial Sequence: Synthetic oligonucleotide
  Sense strand starting at position 3832 of SEQ ID NO: 1243653
uucgucauguuagccaauu

SEQ ID NO: 1431777 - RNA, 19 nt, Artificial Sequence
  Description of Artificial Sequence: Synthetic oligonucleotide
  Antisense strand to SEQ ID NO: 1431776
aauuggcuaacaugacgaa

SEQ ID NO: 1431778 - RNA, 19 nt, Artificial Sequence
  Description of Artificial Sequence: Synthetic oligonucleotide
  Sense strand starting at position 3833 of SEQ ID NO: 1243653
ucgucauguuagccaauuu

SEQ ID NO: 1431779 - RNA, 19 nt, Artificial Sequence
  Description of Artificial Sequence: Synthetic oligonucleotide
  Antisense strand to SEQ ID NO: 1431778
aaauuggcuaacaugacga

SEQ ID NO: 1431780 - RNA, 19 nt, Artificial Sequence
  Description of Artificial Sequence: Synthetic oligonucleotide
  Sense strand starting at position 73 of SEQ ID NO: 1243654
acaggacagucaggaguuu

SEQ ID NO: 1431781 - RNA, 19 nt, Artificial Sequence
  Description of Artificial Sequence: Synthetic oligonucleotide
  Antisense strand to SEQ ID NO: 1431780
aaacuccugacuguccugu

SEQ ID NO: 1431782 - RNA, 19 nt, Artificial Sequence
  Description of Artificial Sequence: Synthetic oligonucleotide
  Sense strand starting at position 96 of SEQ ID NO: 1243654
uuaccucacguugaggaua

SEQ ID NO: 1431783 - RNA, 19 nt, Artificial Sequence
  Description of Artificial Sequence: Synthetic oligonucleotide
  Antisense strand to SEQ ID NO: 1431782
uauccucaacgugagguaa

SEQ ID NO: 1431784 - RNA, 19 nt, Artificial Sequence
  Description of Artificial Sequence: Synthetic oligonucleotide
  Sense strand starting at position 2168 of SEQ ID NO: 1243654
uggacaugucucuggacga

SEQ ID NO: 1431785 - RNA, 19 nt, Artificial Sequence
  Description of Artificial Sequence: Synthetic oligonucleotide
  Antisense strand to SEQ ID NO: 1431784
ucguccagagacaugucca

SEQ ID NO: 1431786 - RNA, 19 nt, Artificial Sequence
  Description of Artificial Sequence: Synthetic oligonucleotide
  Sense strand starting at position 2169 of SEQ ID NO: 1243654
ggacaugucucuggacgac

SEQ ID NO: 1431787 - RNA, 19 nt, Artificial Sequence
  Description of Artificial Sequence: Synthetic oligonucleotide
  Antisense strand to SEQ ID NO: 1431786
gucguccagagacaugucc

SEQ ID NO: 1431788 - RNA, 19 nt, Artificial Sequence
  Description of Artificial Sequence: Synthetic oligonucleotide
  Sense strand starting at position 2175 of SEQ ID NO: 1243654
gucucuggacgacaucauu

SEQ ID NO: 1431789 - RNA, 19 nt, Artificial Sequence
  Description of Artificial Sequence: Synthetic oligonucleotide
  Antisense strand to SEQ ID NO: 1431788
aaugaugucguccagagac

SEQ ID NO: 1431790 - RNA, 19 nt, Artificial Sequence
  Description of Artificial Sequence: Synthetic oligonucleotide
  Sense strand starting at position 2611 of SEQ ID NO: 1243654
uuuguuuguuccggacguu

SEQ ID NO: 1431791 - RNA, 19 nt, Artificial Sequence
  Description of Artificial Sequence: Synthetic oligonucleotide
  Antisense strand to SEQ ID NO: 1431790
aacguccggaacaaacaaa

SEQ ID NO: 1431792 - RNA, 19 nt, Artificial Sequence
  Description of Artificial Sequence: Synthetic oligonucleotide
  Sense strand starting at position 2682 of SEQ ID NO: 1243654
aaguuagucuaagggaacu

SEQ ID NO: 1431793 - RNA, 19 nt, Artificial Sequence
  Description of Artificial Sequence: Synthetic oligonucleotide
  Antisense strand to SEQ ID NO: 1431792
aguucccuuagacuaacuu

SEQ ID NO: 1431794 - RNA, 19 nt, Artificial Sequence
  Description of Artificial Sequence: Synthetic oligonucleotide
  Sense strand starting at position 2850 of SEQ ID NO: 1243654
gacugagacucacagaucu

SEQ ID NO: 1431795 - RNA, 19 nt, Artificial Sequence
  Description of Artificial Sequence: Synthetic oligonucleotide
  Antisense strand to SEQ ID NO: 1431794
agaucugugagucucaguc

SEQ ID NO: 1431796 - RNA, 19 nt, Artificial Sequence
  Description of Artificial Sequence: Synthetic oligonucleotide
  Sense strand starting at position 2973 of SEQ ID NO: 1243654
ggaaacugcugguguccaa

SEQ ID NO: 1431797 - RNA, 19 nt, Artificial Sequence
  Description of Artificial Sequence: Synthetic oligonucleotide
  Antisense strand to SEQ ID NO: 1431796
uuggacaccagcaguuucc

SEQ ID NO: 1431798 - RNA, 19 nt, Artificial Sequence
  Description of Artificial Sequence: Synthetic oligonucleotide
  Sense strand starting at position 3004 of SEQ ID NO: 1243654
agucucagacgccgauauu

SEQ ID NO: 1431799 - RNA, 19 nt, Artificial Sequence
  Description of Artificial Sequence: Synthetic oligonucleotide
  Antisense strand to SEQ ID NO: 1431798
aauaucggcgucugagacu

SEQ ID NO: 1431800 - RNA, 19 nt, Artificial Sequence
  Description of Artificial Sequence: Synthetic oligonucleotide
  Sense strand starting at position 3013 of SEQ ID NO: 1243654
cgccgauauucagguaaga

SEQ ID NO: 1431801 - RNA, 19 nt, Artificial Sequence
  Description of Artificial Sequence: Synthetic oligonucleotide
  Antisense strand to SEQ ID NO: 1431800
ucuuaccugaauaucggcg

SEQ ID NO: 1431802 - RNA, 19 nt, Artificial Sequence
  Description of Artificial Sequence: Synthetic oligonucleotide
  Sense strand starting at position 3155 of SEQ ID NO: 1243654
cagacccagugcuaguaaa

SEQ ID NO: 1431803 - RNA, 19 nt, Artificial Sequence
  Description of Artificial Sequence: Synthetic oligonucleotide
  Antisense strand to SEQ ID NO: 1431802
uuuacuagcacugggucug

SEQ ID NO: 1431804 - RNA, 19 nt, Artificial Sequence
  Description of Artificial Sequence: Synthetic oligonucleotide
  Sense strand starting at position 3226 of SEQ ID NO: 1243654
ugcuguuagucugaagaug

SEQ ID NO: 1431805 - RNA, 19 nt, Artificial Sequence
  Description of Artificial Sequence: Synthetic oligonucleotide
  Antisense strand to SEQ ID NO: 1431804
caucuucagacuaacagca

SEQ ID NO: 1431806 - RNA, 19 nt, Artificial Sequence
  Description of Artificial Sequence: Synthetic oligonucleotide
  Sense strand starting at position 3238 of SEQ ID NO: 1243654
gaagauggguucugugagu

SEQ ID NO: 1431807 - RNA, 19 nt, Artificial Sequence
  Description of Artificial Sequence: Synthetic oligonucleotide
  Antisense strand to SEQ ID NO: 1431806
acucacagaacccaucuuc

SEQ ID NO: 1431808 - RNA, 19 nt, Artificial Sequence
  Description of Artificial Sequence: Synthetic oligonucleotide
  Sense strand starting at position 3362 of SEQ ID NO: 1243654
gccugucuuaguggguuaa

SEQ ID NO: 1431809 - RNA, 19 nt, Artificial Sequence
  Description of Artificial Sequence: Synthetic oligonucleotide
  Antisense strand to SEQ ID NO: 1431808
uuaacccacuaagacaggc

SEQ ID NO: 1431810 - RNA, 19 nt, Artificial Sequence
  Description of Artificial Sequence: Synthetic oligonucleotide
  Sense strand starting at position 3363 of SEQ ID NO: 1243654
ccugucuuaguggguuaau

SEQ ID NO: 1431811 - RNA, 19 nt, Artificial Sequence
  Description of Artificial Sequence: Synthetic oligonucleotide
  Antisense strand to SEQ ID NO: 1431810
auuaacccacuaagacagg

SEQ ID NO: 1431812 - RNA, 19 nt, Artificial Sequence
  Description of Artificial Sequence: Synthetic oligonucleotide
  Sense strand starting at position 3364 of SEQ ID NO: 1243654
cugucuuaguggguuaaug

SEQ ID NO: 1431813 - RNA, 19 nt, Artificial Sequence
  Description of Artificial Sequence: Synthetic oligonucleotide
  Antisense strand to SEQ ID NO: 1431812
cauuaacccacuaagacag

SEQ ID NO: 1431814 - RNA, 19 nt, Artificial Sequence
  Description of Artificial Sequence: Synthetic oligonucleotide
  Sense strand starting at position 3366 of SEQ ID NO: 1243654
gucuuaguggguuaaugug

SEQ ID NO: 1431815 - RNA, 19 nt, Artificial Sequence
  Description of Artificial Sequence: Synthetic oligonucleotide
  Antisense strand to SEQ ID NO: 1431814
cacauuaacccacuaagac

SEQ ID NO: 1431816 - RNA, 19 nt, Artificial Sequence
  Description of Artificial Sequence: Synthetic oligonucleotide
  Sense strand starting at position 3397 of SEQ ID NO: 1243654
uucuuuauguaucuuguga

SEQ ID NO: 1431817 - RNA, 19 nt, Artificial Sequence
  Description of Artificial Sequence: Synthetic oligonucleotide
  Antisense strand to SEQ ID NO: 1431816
ucacaagauacauaaagaa

SEQ ID NO: 1431818 - RNA, 19 nt, Artificial Sequence
  Description of Artificial Sequence: Synthetic oligonucleotide
  Sense strand starting at position 3399 of SEQ ID NO: 1243654
cuuuauguaucuugugaag

SEQ ID NO: 1431819 - RNA, 19 nt, Artificial Sequence
  Description of Artificial Sequence: Synthetic oligonucleotide
  Antisense strand to SEQ ID NO: 1431818
cuucacaagauacauaaag

SEQ ID NO: 1431820 - RNA, 19 nt, Artificial Sequence
  Description of Artificial Sequence: Synthetic oligonucleotide
  Sense strand starting at position 3401 of SEQ ID NO: 1243654
uuauguaucuugugaagca

SEQ ID NO: 1431821 - RNA, 19 nt, Artificial Sequence
  Description of Artificial Sequence: Synthetic oligonucleotide
  Antisense strand to SEQ ID NO: 1431820
ugcuucacaagauacauaa

SEQ ID NO: 1431822 - RNA, 19 nt, Artificial Sequence
  Description of Artificial Sequence: Synthetic oligonucleotide
  Sense strand starting at position 3402 of SEQ ID NO: 1243654
uauguaucuugugaagcac

SEQ ID NO: 1431823 - RNA, 19 nt, Artificial Sequence
  Description of Artificial Sequence: Synthetic oligonucleotide
  Antisense strand to SEQ ID NO: 1431822
gugcuucacaagauacaua

SEQ ID NO: 1431824 - RNA, 19 nt, Artificial Sequence
  Description of Artificial Sequence: Synthetic oligonucleotide
  Sense strand starting at position 3440 of SEQ ID NO: 1243654
cucuguuugccuugaguac

SEQ ID NO: 1431825 - RNA, 19 nt, Artificial Sequence
  Description of Artificial Sequence: Synthetic oligonucleotide
  Antisense strand to SEQ ID NO: 1431824
guacucaaggcaaacagag

SEQ ID NO: 1431826 - RNA, 19 nt, Artificial Sequence
  Description of Artificial Sequence: Synthetic oligonucleotide
  Sense strand starting at position 3441 of SEQ ID NO: 1243654
ucuguuugccuugaguacu

SEQ ID NO: 1431827 - RNA, 19 nt, Artificial Sequence
  Description of Artificial Sequence: Synthetic oligonucleotide
  Antisense strand to SEQ ID NO: 1431826
aguacucaaggcaaacaga

SEQ ID NO: 1431828 - RNA, 19 nt, Artificial Sequence
  Description of Artificial Sequence: Synthetic oligonucleotide
  Sense strand starting at position 3447 of SEQ ID NO: 1243654
ugccuugaguacugucuua

SEQ ID NO: 1431829 - RNA, 19 nt, Artificial Sequence
  Description of Artificial Sequence: Synthetic oligonucleotide
  Antisense strand to SEQ ID NO: 1431828
uaagacaguacucaaggca

SEQ ID NO: 1431830 - RNA, 19 nt, Artificial Sequence
  Description of Artificial Sequence: Synthetic oligonucleotide
  Sense strand starting at position 3452 of SEQ ID NO: 1243654
ugaguacugucuuauaaag

SEQ ID NO: 1431831 - RNA, 19 nt, Artificial Sequence
  Description of Artificial Sequence: Synthetic oligonucleotide
  Antisense strand to SEQ ID NO: 1431830
cuuuauaagacaguacuca

SEQ ID NO: 1431832 - RNA, 19 nt, Artificial Sequence
  Description of Artificial Sequence: Synthetic oligonucleotide
  Sense strand starting at position 3454 of SEQ ID NO: 1243654
aguacugucuuauaaagac

SEQ ID NO: 1431833 - RNA, 19 nt, Artificial Sequence
  Description of Artificial Sequence: Synthetic oligonucleotide
  Antisense strand to SEQ ID NO: 1431832
gucuuuauaagacaguacu

SEQ ID NO: 1431834 - RNA, 19 nt, Artificial Sequence
  Description of Artificial Sequence: Synthetic oligonucleotide
  Sense strand starting at position 3503 of SEQ ID NO: 1243654
cgccgugucccgucaguga

SEQ ID NO: 1431835 - RNA, 19 nt, Artificial Sequence
  Description of Artificial Sequence: Synthetic oligonucleotide
  Antisense strand to SEQ ID NO: 1431834
ucacugacgggacacggcg

SEQ ID NO: 1431836 - RNA, 19 nt, Artificial Sequence
  Description of Artificial Sequence: Synthetic oligonucleotide
  Sense strand starting at position 3505 of SEQ ID NO: 1243654
ccgugucccgucagugaca

SEQ ID NO: 1431837 - RNA, 19 nt, Artificial Sequence
  Description of Artificial Sequence: Synthetic oligonucleotide
  Antisense strand to SEQ ID NO: 1431836
ugucacugacgggacacgg

SEQ ID NO: 1431838 - RNA, 19 nt, Artificial Sequence
  Description of Artificial Sequence: Synthetic oligonucleotide
  Sense strand starting at position 181 of SEQ ID NO: 1243655
aagaacuaucugugagguu

SEQ ID NO: 1431839 - RNA, 19 nt, Artificial Sequence
  Description of Artificial Sequence: Synthetic oligonucleotide
  Antisense strand to SEQ ID NO: 1431838
aaccucacagauaguucuu

SEQ ID NO: 1431840 - RNA, 19 nt, Artificial Sequence
  Description of Artificial Sequence: Synthetic oligonucleotide
  Sense strand starting at position 182 of SEQ ID NO: 1243655
agaacuaucugugagguuu

SEQ ID NO: 1431841 - RNA, 19 nt, Artificial Sequence
  Description of Artificial Sequence: Synthetic oligonucleotide
  Antisense strand to SEQ ID NO: 1431840
aaaccucacagauaguucu

SEQ ID NO: 1431842 - RNA, 19 nt, Artificial Sequence
  Description of Artificial Sequence: Synthetic oligonucleotide
  Sense strand starting at position 194 of SEQ ID NO: 1243655
gagguuucuuuagccaucu

SEQ ID NO: 1431843 - RNA, 19 nt, Artificial Sequence
  Description of Artificial Sequence: Synthetic oligonucleotide
  Antisense strand to SEQ ID NO: 1431842
agauggcuaaagaaaccuc

SEQ ID NO: 1431844 - RNA, 19 nt, Artificial Sequence
  Description of Artificial Sequence: Synthetic oligonucleotide
  Sense strand starting at position 195 of SEQ ID NO: 1243655
agguuucuuuagccaucua

SEQ ID NO: 1431845 - RNA, 19 nt, Artificial Sequence
  Description of Artificial Sequence: Synthetic oligonucleotide
  Antisense strand to SEQ ID NO: 1431844
uagauggcuaaagaaaccu

SEQ ID NO: 1431846 - RNA, 19 nt, Artificial Sequence
  Description of Artificial Sequence: Synthetic oligonucleotide
  Sense strand starting at position 287 of SEQ ID NO: 1243655
acaggacagucaggaguuu

SEQ ID NO: 1431847 - RNA, 19 nt, Artificial Sequence
  Description of Artificial Sequence: Synthetic oligonucleotide
  Antisense strand to SEQ ID NO: 1431846
aaacuccugacuguccugu

SEQ ID NO: 1431848 - RNA, 19 nt, Artificial Sequence
  Description of Artificial Sequence: Synthetic oligonucleotide
  Sense strand starting at position 310 of SEQ ID NO: 1243655
uuaccucacguugaggaua

SEQ ID NO: 1431849 - RNA, 19 nt, Artificial Sequence
  Description of Artificial Sequence: Synthetic oligonucleotide
  Antisense strand to SEQ ID NO: 1431848
uauccucaacgugagguaa

SEQ ID NO: 1431850 - RNA, 19 nt, Artificial Sequence
  Description of Artificial Sequence: Synthetic oligonucleotide
  Sense strand starting at position 2382 of SEQ ID NO: 1243655
uggacaugucucuggacga

SEQ ID NO: 1431851 - RNA, 19 nt, Artificial Sequence
  Description of Artificial Sequence: Synthetic oligonucleotide
  Antisense strand to SEQ ID NO: 1431850
ucguccagagacaugucca

SEQ ID NO: 1431852 - RNA, 19 nt, Artificial Sequence
  Description of Artificial Sequence: Synthetic oligonucleotide
  Sense strand starting at position 2383 of SEQ ID NO: 1243655
ggacaugucucuggacgac

SEQ ID NO: 1431853 - RNA, 19 nt, Artificial Sequence
  Description of Artificial Sequence: Synthetic oligonucleotide
  Antisense strand to SEQ ID NO: 1431852
gucguccagagacaugucc

SEQ ID NO: 1431854 - RNA, 19 nt, Artificial Sequence
  Description of Artificial Sequence: Synthetic oligonucleotide
  Sense strand starting at position 2389 of SEQ ID NO: 1243655
gucucuggacgacaucauu

SEQ ID NO: 1431855 - RNA, 19 nt, Artificial Sequence
  Description of Artificial Sequence: Synthetic oligonucleotide
  Antisense strand to SEQ ID NO: 1431854
aaugaugucguccagagac

SEQ ID NO: 1431856 - RNA, 19 nt, Artificial Sequence
  Description of Artificial Sequence: Synthetic oligonucleotide
  Sense strand starting at position 2825 of SEQ ID NO: 1243655
uuuguuuguuccggacguu

SEQ ID NO: 1431857 - RNA, 19 nt, Artificial Sequence
  Description of Artificial Sequence: Synthetic oligonucleotide
  Antisense strand to SEQ ID NO: 1431856
aacguccggaacaaacaaa

SEQ ID NO: 1431858 - RNA, 19 nt, Artificial Sequence
  Description of Artificial Sequence: Synthetic oligonucleotide
  Sense strand starting at position 2896 of SEQ ID NO: 1243655
aaguuagucuaagggaacu

SEQ ID NO: 1431859 - RNA, 19 nt, Artificial Sequence
  Description of Artificial Sequence: Synthetic oligonucleotide
  Antisense strand to SEQ ID NO: 1431858
aguucccuuagacuaacuu

SEQ ID NO: 1431860 - RNA, 19 nt, Artificial Sequence
  Description of Artificial Sequence: Synthetic oligonucleotide
  Sense strand starting at position 3064 of SEQ ID NO: 1243655
gacugagacucacagaucu

SEQ ID NO: 1431861 - RNA, 19 nt, Artificial Sequence
  Description of Artificial Sequence: Synthetic oligonucleotide
  Antisense strand to SEQ ID NO: 1431860
agaucugugagucucaguc

SEQ ID NO: 1431862 - RNA, 19 nt, Artificial Sequence
  Description of Artificial Sequence: Synthetic oligonucleotide
  Sense strand starting at position 3187 of SEQ ID NO: 1243655
ggaaacugcugguguccaa

SEQ ID NO: 1431863 - RNA, 19 nt, Artificial Sequence
  Description of Artificial Sequence: Synthetic oligonucleotide
  Antisense strand to SEQ ID NO: 1431862
uuggacaccagcaguuucc

SEQ ID NO: 1431864 - RNA, 19 nt, Artificial Sequence
  Description of Artificial Sequence: Synthetic oligonucleotide
  Sense strand starting at position 3218 of SEQ ID NO: 1243655
agucucagacgccgauauu

SEQ ID NO: 1431865 - RNA, 19 nt, Artificial Sequence
  Description of Artificial Sequence: Synthetic oligonucleotide
  Antisense strand to SEQ ID NO: 1431864
aauaucggcgucugagacu

SEQ ID NO: 1431866 - RNA, 19 nt, Artificial Sequence
  Description of Artificial Sequence: Synthetic oligonucleotide
  Sense strand starting at position 3227 of SEQ ID NO: 1243655
cgccgauauucagguaaga

SEQ ID NO: 1431867 - RNA, 19 nt, Artificial Sequence
  Description of Artificial Sequence: Synthetic oligonucleotide
  Antisense strand to SEQ ID NO: 1431866
ucuuaccugaauaucggcg

SEQ ID NO: 1431868 - RNA, 19 nt, Artificial Sequence
  Description of Artificial Sequence: Synthetic oligonucleotide
  Sense strand starting at position 3369 of SEQ ID NO: 1243655
cagacccagugcuaguaaa

SEQ ID NO: 1431869 - RNA, 19 nt, Artificial Sequence
  Description of Artificial Sequence: Synthetic oligonucleotide
  Antisense strand to SEQ ID NO: 1431868
uuuacuagcacugggucug

SEQ ID NO: 1431870 - RNA, 19 nt, Artificial Sequence
  Description of Artificial Sequence: Synthetic oligonucleotide
  Sense strand starting at position 3440 of SEQ ID NO: 1243655
ugcuguuagucugaagaug

SEQ ID NO: 1431871 - RNA, 19 nt, Artificial Sequence
  Description of Artificial Sequence: Synthetic oligonucleotide
  Antisense strand to SEQ ID NO: 1431870
caucuucagacuaacagca

SEQ ID NO: 1431872 - RNA, 19 nt, Artificial Sequence
  Description of Artificial Sequence: Synthetic oligonucleotide
  Sense strand starting at position 3452 of SEQ ID NO: 1243655
gaagauggguucugugagu

SEQ ID NO: 1431873 - RNA, 19 nt, Artificial Sequence
  Description of Artificial Sequence: Synthetic oligonucleotide
  Antisense strand to SEQ ID NO: 1431872
acucacagaacccaucuuc

SEQ ID NO: 1431874 - RNA, 19 nt, Artificial Sequence
  Description of Artificial Sequence: Synthetic oligonucleotide
  Sense strand starting at position 3576 of SEQ ID NO: 1243655
gccugucuuaguggguuaa

SEQ ID NO: 1431875 - RNA, 19 nt, Artificial Sequence
  Description of Artificial Sequence: Synthetic oligonucleotide
  Antisense strand to SEQ ID NO: 1431874
uuaacccacuaagacaggc

SEQ ID NO: 1431876 - RNA, 19 nt, Artificial Sequence
  Description of Artificial Sequence: Synthetic oligonucleotide
  Sense strand starting at position 3577 of SEQ ID NO: 1243655
ccugucuuaguggguuaau

SEQ ID NO: 1431877 - RNA, 19 nt, Artificial Sequence
  Description of Artificial Sequence: Synthetic oligonucleotide
  Antisense strand to SEQ ID NO: 1431876
auuaacccacuaagacagg

SEQ ID NO: 1431878 - RNA, 19 nt, Artificial Sequence
  Description of Artificial Sequence: Synthetic oligonucleotide
  Sense strand starting at position 3578 of SEQ ID NO: 1243655
cugucuuaguggguuaaug

SEQ ID NO: 1431879 - RNA, 19 nt, Artificial Sequence
  Description of Artificial Sequence: Synthetic oligonucleotide
  Antisense strand to SEQ ID NO: 1431878
cauuaacccacuaagacag

SEQ ID NO: 1431880 - RNA, 19 nt, Artificial Sequence
  Description of Artificial Sequence: Synthetic oligonucleotide
  Sense strand starting at position 3580 of SEQ ID NO: 1243655
gucuuaguggguuaaugug

SEQ ID NO: 1431881 - RNA, 19 nt, Artificial Sequence
  Description of Artificial Sequence: Synthetic oligonucleotide
  Antisense strand to SEQ ID NO: 1431880
cacauuaacccacuaagac

SEQ ID NO: 1431882 - RNA, 19 nt, Artificial Sequence
  Description of Artificial Sequence: Synthetic oligonucleotide
  Sense strand starting at position 3611 of SEQ ID NO: 1243655
uucuuuauguaucuuguga

SEQ ID NO: 1431883 - RNA, 19 nt, Artificial Sequence
  Description of Artificial Sequence: Synthetic oligonucleotide
  Antisense strand to SEQ ID NO: 1431882
ucacaagauacauaaagaa

SEQ ID NO: 1431884 - RNA, 19 nt, Artificial Sequence
  Description of Artificial Sequence: Synthetic oligonucleotide
  Sense strand starting at position 3613 of SEQ ID NO: 1243655
cuuuauguaucuugugaag

SEQ ID NO: 1431885 - RNA, 19 nt, Artificial Sequence
  Description of Artificial Sequence: Synthetic oligonucleotide
  Antisense strand to SEQ ID NO: 1431884
cuucacaagauacauaaag

SEQ ID NO: 1431886 - RNA, 19 nt, Artificial Sequence
  Description of Artificial Sequence: Synthetic oligonucleotide
  Sense strand starting at position 3615 of SEQ ID NO: 1243655
uuauguaucuugugaagca

SEQ ID NO: 1431887 - RNA, 19 nt, Artificial Sequence
  Description of Artificial Sequence: Synthetic oligonucleotide
  Antisense strand to SEQ ID NO: 1431886
ugcuucacaagauacauaa

SEQ ID NO: 1431888 - RNA, 19 nt, Artificial Sequence
  Description of Artificial Sequence: Synthetic oligonucleotide
  Sense strand starting at position 3616 of SEQ ID NO: 1243655
uauguaucuugugaagcac

SEQ ID NO: 1431889 - RNA, 19 nt, Artificial Sequence
  Description of Artificial Sequence: Synthetic oligonucleotide
  Antisense strand to SEQ ID NO: 1431888
gugcuucacaagauacaua

SEQ ID NO: 1431890 - RNA, 19 nt, Artificial Sequence
  Description of Artificial Sequence: Synthetic oligonucleotide
  Sense strand starting at position 3654 of SEQ ID NO: 1243655
cucuguuugccuugaguac

SEQ ID NO: 1431891 - RNA, 19 nt, Artificial Sequence
  Description of Artificial Sequence: Synthetic oligonucleotide
  Antisense strand to SEQ ID NO: 1431890
guacucaaggcaaacagag

SEQ ID NO: 1431892 - RNA, 19 nt, Artificial Sequence
  Description of Artificial Sequence: Synthetic oligonucleotide
  Sense strand starting at position 3655 of SEQ ID NO: 1243655
ucuguuugccuugaguacu

SEQ ID NO: 1431893 - RNA, 19 nt, Artificial Sequence
  Description of Artificial Sequence: Synthetic oligonucleotide
  Antisense strand to SEQ ID NO: 1431892
aguacucaaggcaaacaga

SEQ ID NO: 1431894 - RNA, 19 nt, Artificial Sequence
  Description of Artificial Sequence: Synthetic oligonucleotide
  Sense strand starting at position 3661 of SEQ ID NO: 1243655
ugccuugaguacugucuua

SEQ ID NO: 1431895 - RNA, 19 nt, Artificial Sequence
  Description of Artificial Sequence: Synthetic oligonucleotide
  Antisense strand to SEQ ID NO: 1431894
uaagacaguacucaaggca

SEQ ID NO: 1431896 - RNA, 19 nt, Artificial Sequence
  Description of Artificial Sequence: Synthetic oligonucleotide
  Sense strand starting at position 3666 of SEQ ID NO: 1243655
ugaguacugucuuauaaag

SEQ ID NO: 1431897 - RNA, 19 nt, Artificial Sequence
  Description of Artificial Sequence: Synthetic oligonucleotide
  Antisense strand to SEQ ID NO: 1431896
cuuuauaagacaguacuca

SEQ ID NO: 1431898 - RNA, 19 nt, Artificial Sequence
  Description of Artificial Sequence: Synthetic oligonucleotide
  Sense strand starting at position 3668 of SEQ ID NO: 1243655
aguacugucuuauaaagac

SEQ ID NO: 1431899 - RNA, 19 nt, Artificial Sequence
  Description of Artificial Sequence: Synthetic oligonucleotide
  Antisense strand to SEQ ID NO: 1431898
gucuuuauaagacaguacu

SEQ ID NO: 1431900 - RNA, 19 nt, Artificial Sequence
  Description of Artificial Sequence: Synthetic oligonucleotide
  Sense strand starting at position 3717 of SEQ ID NO: 1243655
cgccgugucccgucaguga

SEQ ID NO: 1431901 - RNA, 19 nt, Artificial Sequence
  Description of Artificial Sequence: Synthetic oligonucleotide
  Antisense strand to SEQ ID NO: 1431900
ucacugacgggacacggcg

SEQ ID NO: 1431902 - RNA, 19 nt, Artificial Sequence
  Description of Artificial Sequence: Synthetic oligonucleotide
  Sense strand starting at position 3719 of SEQ ID NO: 1243655
ccgugucccgucagugaca

SEQ ID NO: 1431903 - RNA, 19 nt, Artificial Sequence
  Description of Artificial Sequence: Synthetic oligonucleotide
  Antisense strand to SEQ ID NO: 1431902
ugucacugacgggacacgg

SEQ ID NO: 1431904 - RNA, 19 nt, Artificial Sequence
  Description of Artificial Sequence: Synthetic oligonucleotide
  Sense strand starting at position 1245 of SEQ ID NO: 1243656
uggacaugucucuggacga

SEQ ID NO: 1431905 - RNA, 19 nt, Artificial Sequence
  Description of Artificial Sequence: Synthetic oligonucleotide
  Antisense strand to SEQ ID NO: 1431904
ucguccagagacaugucca

SEQ ID NO: 1431906 - RNA, 19 nt, Artificial Sequence
  Description of Artificial Sequence: Synthetic oligonucleotide
  Sense strand starting at position 1246 of SEQ ID NO: 1243656
ggacaugucucuggacgac

SEQ ID NO: 1431907 - RNA, 19 nt, Artificial Sequence
  Description of Artificial Sequence: Synthetic oligonucleotide
  Antisense strand to SEQ ID NO: 1431906
gucguccagagacaugucc

SEQ ID NO: 1431908 - RNA, 19 nt, Artificial Sequence
  Description of Artificial Sequence: Synthetic oligonucleotide
  Sense strand starting at position 1252 of SEQ ID NO: 1243656
gucucuggacgacaucauu

SEQ ID NO: 1431909 - RNA, 19 nt, Artificial Sequence
  Description of Artificial Sequence: Synthetic oligonucleotide
  Antisense strand to SEQ ID NO: 1431908
aaugaugucguccagagac

SEQ ID NO: 1431910 - RNA, 19 nt, Artificial Sequence
  Description of Artificial Sequence: Synthetic oligonucleotide
  Sense strand starting at position 1688 of SEQ ID NO: 1243656
uuuguuuguuccggacguu

SEQ ID NO: 1431911 - RNA, 19 nt, Artificial Sequence
  Description of Artificial Sequence: Synthetic oligonucleotide
  Antisense strand to SEQ ID NO: 1431910
aacguccggaacaaacaaa

SEQ ID NO: 1431912 - RNA, 19 nt, Artificial Sequence
  Description of Artificial Sequence: Synthetic oligonucleotide
  Sense strand starting at position 1759 of SEQ ID NO: 1243656
aaguuagucuaagggaacu

SEQ ID NO: 1431913 - RNA, 19 nt, Artificial Sequence
  Description of Artificial Sequence: Synthetic oligonucleotide
  Antisense strand to SEQ ID NO: 1431912
aguucccuuagacuaacuu

SEQ ID NO: 1431914 - RNA, 19 nt, Artificial Sequence
  Description of Artificial Sequence: Synthetic oligonucleotide
  Sense strand starting at position 1927 of SEQ ID NO: 1243656
gacugagacucacagaucu

SEQ ID NO: 1431915 - RNA, 19 nt, Artificial Sequence
  Description of Artificial Sequence: Synthetic oligonucleotide
  Antisense strand to SEQ ID NO: 1431914
agaucugugagucucaguc

SEQ ID NO: 1431916 - RNA, 19 nt, Artificial Sequence
  Description of Artificial Sequence: Synthetic oligonucleotide
  Sense strand starting at position 2050 of SEQ ID NO: 1243656
ggaaacugcugguguccaa

SEQ ID NO: 1431917 - RNA, 19 nt, Artificial Sequence
  Description of Artificial Sequence: Synthetic oligonucleotide
  Antisense strand to SEQ ID NO: 1431916
uuggacaccagcaguuucc

SEQ ID NO: 1431918 - RNA, 19 nt, Artificial Sequence
  Description of Artificial Sequence: Synthetic oligonucleotide
  Sense strand starting at position 2081 of SEQ ID NO: 1243656
agucucagacgccgauauu

SEQ ID NO: 1431919 - RNA, 19 nt, Artificial Sequence
  Description of Artificial Sequence: Synthetic oligonucleotide
  Antisense strand to SEQ ID NO: 1431918
aauaucggcgucugagacu

SEQ ID NO: 1431920 - RNA, 19 nt, Artificial Sequence
  Description of Artificial Sequence: Synthetic oligonucleotide
  Sense strand starting at position 2090 of SEQ ID NO: 1243656
cgccgauauucagguaaga

SEQ ID NO: 1431921 - RNA, 19 nt, Artificial Sequence
  Description of Artificial Sequence: Synthetic oligonucleotide
  Antisense strand to SEQ ID NO: 1431920
ucuuaccugaauaucggcg

SEQ ID NO: 1431922 - RNA, 19 nt, Artificial Sequence
  Description of Artificial Sequence: Synthetic oligonucleotide
  Sense strand starting at position 2232 of SEQ ID NO: 1243656
cagacccagugcuaguaaa

SEQ ID NO: 1431923 - RNA, 19 nt, Artificial Sequence
  Description of Artificial Sequence: Synthetic oligonucleotide
  Antisense strand to SEQ ID NO: 1431922
uuuacuagcacugggucug

SEQ ID NO: 1431924 - RNA, 19 nt, Artificial Sequence
  Description of Artificial Sequence: Synthetic oligonucleotide
  Sense strand starting at position 2303 of SEQ ID NO: 1243656
ugcuguuagucugaagaug

SEQ ID NO: 1431925 - RNA, 19 nt, Artificial Sequence
  Description of Artificial Sequence: Synthetic oligonucleotide
  Antisense strand to SEQ ID NO: 1431924
caucuucagacuaacagca

SEQ ID NO: 1431926 - RNA, 19 nt, Artificial Sequence
  Description of Artificial Sequence: Synthetic oligonucleotide
  Sense strand starting at position 2315 of SEQ ID NO: 1243656
gaagauggguucugugagu

SEQ ID NO: 1431927 - RNA, 19 nt, Artificial Sequence
  Description of Artificial Sequence: Synthetic oligonucleotide
  Antisense strand to SEQ ID NO: 1431926
acucacagaacccaucuuc

SEQ ID NO: 1431928 - RNA, 19 nt, Artificial Sequence
  Description of Artificial Sequence: Synthetic oligonucleotide
  Sense strand starting at position 2439 of SEQ ID NO: 1243656
gccugucuuaguggguuaa

SEQ ID NO: 1431929 - RNA, 19 nt, Artificial Sequence
  Description of Artificial Sequence: Synthetic oligonucleotide
  Antisense strand to SEQ ID NO: 1431928
uuaacccacuaagacaggc

SEQ ID NO: 1431930 - RNA, 19 nt, Artificial Sequence
  Description of Artificial Sequence: Synthetic oligonucleotide
  Sense strand starting at position 2440 of SEQ ID NO: 1243656
ccugucuuaguggguuaau

SEQ ID NO: 1431931 - RNA, 19 nt, Artificial Sequence
  Description of Artificial Sequence: Synthetic oligonucleotide
  Antisense strand to SEQ ID NO: 1431930
auuaacccacuaagacagg

SEQ ID NO: 1431932 - RNA, 19 nt, Artificial Sequence
  Description of Artificial Sequence: Synthetic oligonucleotide
  Sense strand starting at position 2441 of SEQ ID NO: 1243656
cugucuuaguggguuaaug

SEQ ID NO: 1431933 - RNA, 19 nt, Artificial Sequence
  Description of Artificial Sequence: Synthetic oligonucleotide
  Antisense strand to SEQ ID NO: 1431932
cauuaacccacuaagacag

SEQ ID NO: 1431934 - RNA, 19 nt, Artificial Sequence
  Description of Artificial Sequence: Synthetic oligonucleotide
  Sense strand starting at position 2443 of SEQ ID NO: 1243656
gucuuaguggguuaaugug

SEQ ID NO: 1431935 - RNA, 19 nt, Artificial Sequence
  Description of Artificial Sequence: Synthetic oligonucleotide
  Antisense strand to SEQ ID NO: 1431934
cacauuaacccacuaagac

SEQ ID NO: 1431936 - RNA, 19 nt, Artificial Sequence
  Description of Artificial Sequence: Synthetic oligonucleotide
  Sense strand starting at position 2474 of SEQ ID NO: 1243656
uucuuuauguaucuuguga

SEQ ID NO: 1431937 - RNA, 19 nt, Artificial Sequence
  Description of Artificial Sequence: Synthetic oligonucleotide
  Antisense strand to SEQ ID NO: 1431936
ucacaagauacauaaagaa

SEQ ID NO: 1431938 - RNA, 19 nt, Artificial Sequence
  Description of Artificial Sequence: Synthetic oligonucleotide
  Sense strand starting at position 2476 of SEQ ID NO: 1243656
cuuuauguaucuugugaag

SEQ ID NO: 1431939 - RNA, 19 nt, Artificial Sequence
  Description of Artificial Sequence: Synthetic oligonucleotide
  Antisense strand to SEQ ID NO: 1431938
cuucacaagauacauaaag

SEQ ID NO: 1431940 - RNA, 19 nt, Artificial Sequence
  Description of Artificial Sequence: Synthetic oligonucleotide
  Sense strand starting at position 2478 of SEQ ID NO: 1243656
uuauguaucuugugaagca

SEQ ID NO: 1431941 - RNA, 19 nt, Artificial Sequence
  Description of Artificial Sequence: Synthetic oligonucleotide
  Antisense strand to SEQ ID NO: 1431940
ugcuucacaagauacauaa

SEQ ID NO: 1431942 - RNA, 19 nt, Artificial Sequence
  Description of Artificial Sequence: Synthetic oligonucleotide
  Sense strand starting at position 2479 of SEQ ID NO: 1243656
uauguaucuugugaagcac

SEQ ID NO: 1431943 - RNA, 19 nt, Artificial Sequence
  Description of Artificial Sequence: Synthetic oligonucleotide
  Antisense strand to SEQ ID NO: 1431942
gugcuucacaagauacaua

SEQ ID NO: 1431944 - RNA, 19 nt, Artificial Sequence
  Description of Artificial Sequence: Synthetic oligonucleotide
  Sense strand starting at position 2517 of SEQ ID NO: 1243656
cucuguuugccuugaguac

SEQ ID NO: 1431945 - RNA, 19 nt, Artificial Sequence
  Description of Artificial Sequence: Synthetic oligonucleotide
  Antisense strand to SEQ ID NO: 1431944
guacucaaggcaaacagag

SEQ ID NO: 1431946 - RNA, 19 nt, Artificial Sequence
  Description of Artificial Sequence: Synthetic oligonucleotide
  Sense strand starting at position 2518 of SEQ ID NO: 1243656
ucuguuugccuugaguacu

SEQ ID NO: 1431947 - RNA, 19 nt, Artificial Sequence
  Description of Artificial Sequence: Synthetic oligonucleotide
  Antisense strand to SEQ ID NO: 1431946
aguacucaaggcaaacaga

SEQ ID NO: 1431948 - RNA, 19 nt, Artificial Sequence
  Description of Artificial Sequence: Synthetic oligonucleotide
  Sense strand starting at position 2524 of SEQ ID NO: 1243656
ugccuugaguacugucuua

SEQ ID NO: 1431949 - RNA, 19 nt, Artificial Sequence
  Description of Artificial Sequence: Synthetic oligonucleotide
  Antisense strand to SEQ ID NO: 1431948
uaagacaguacucaaggca

SEQ ID NO: 1431950 - RNA, 19 nt, Artificial Sequence
  Description of Artificial Sequence: Synthetic oligonucleotide
  Sense strand starting at position 2529 of SEQ ID NO: 1243656
ugaguacugucuuauaaag

SEQ ID NO: 1431951 - RNA, 19 nt, Artificial Sequence
  Description of Artificial Sequence: Synthetic oligonucleotide
  Antisense strand to SEQ ID NO: 1431950
cuuuauaagacaguacuca

SEQ ID NO: 1431952 - RNA, 19 nt, Artificial Sequence
  Description of Artificial Sequence: Synthetic oligonucleotide
  Sense strand starting at position 2531 of SEQ ID NO: 1243656
aguacugucuuauaaagac

SEQ ID NO: 1431953 - RNA, 19 nt, Artificial Sequence
  Description of Artificial Sequence: Synthetic oligonucleotide
  Antisense strand to SEQ ID NO: 1431952
gucuuuauaagacaguacu

SEQ ID NO: 1431954 - RNA, 19 nt, Artificial Sequence
  Description of Artificial Sequence: Synthetic oligonucleotide
  Sense strand starting at position 2580 of SEQ ID NO: 1243656
cgccgugucccgucaguga

SEQ ID NO: 1431955 - RNA, 19 nt, Artificial Sequence
  Description of Artificial Sequence: Synthetic oligonucleotide
  Antisense strand to SEQ ID NO: 1431954
ucacugacgggacacggcg

SEQ ID NO: 1431956 - RNA, 19 nt, Artificial Sequence
  Description of Artificial Sequence: Synthetic oligonucleotide
  Sense strand starting at position 2582 of SEQ ID NO: 1243656
ccgugucccgucagugaca

SEQ ID NO: 1431957 - RNA, 19 nt, Artificial Sequence
  Description of Artificial Sequence: Synthetic oligonucleotide
  Antisense strand to SEQ ID NO: 1431956
ugucacugacgggacacgg

SEQ ID NO: 1431958 - RNA, 19 nt, Artificial Sequence
  Description of Artificial Sequence: Synthetic oligonucleotide
  Sense strand starting at position 3117 of SEQ ID NO: 1243656
ccuuuaccguuucuuggaa

SEQ ID NO: 1431959 - RNA, 19 nt, Artificial Sequence
  Description of Artificial Sequence: Synthetic oligonucleotide
  Antisense strand to SEQ ID NO: 1431958
uuccaagaaacgguaaagg

SEQ ID NO: 1431960 - RNA, 19 nt, Artificial Sequence
  Description of Artificial Sequence: Synthetic oligonucleotide
  Sense strand starting at position 3142 of SEQ ID NO: 1243656
uuggguguguuguacauuu

SEQ ID NO: 1431961 - RNA, 19 nt, Artificial Sequence
  Description of Artificial Sequence: Synthetic oligonucleotide
  Antisense strand to SEQ ID NO: 1431960
aaauguacaacacacccaa

SEQ ID NO: 1431962 - RNA, 19 nt, Artificial Sequence
  Description of Artificial Sequence: Synthetic oligonucleotide
  Sense strand starting at position 3163 of SEQ ID NO: 1243656
cuuuguugaagaggauagu

SEQ ID NO: 1431963 - RNA, 19 nt, Artificial Sequence
  Description of Artificial Sequence: Synthetic oligonucleotide
  Antisense strand to SEQ ID NO: 1431962
acuauccucuucaacaaag

SEQ ID NO: 1431964 - RNA, 19 nt, Artificial Sequence
  Description of Artificial Sequence: Synthetic oligonucleotide
  Sense strand starting at position 3172 of SEQ ID NO: 1243656
agaggauaguggcuuaauu

SEQ ID NO: 1431965 - RNA, 19 nt, Artificial Sequence
  Description of Artificial Sequence: Synthetic oligonucleotide
  Antisense strand to SEQ ID NO: 1431964
aauuaagccacuauccucu

SEQ ID NO: 1431966 - RNA, 19 nt, Artificial Sequence
  Description of Artificial Sequence: Synthetic oligonucleotide
  Sense strand starting at position 3280 of SEQ ID NO: 1243656
ccaggugcucuuggaaguu

SEQ ID NO: 1431967 - RNA, 19 nt, Artificial Sequence
  Description of Artificial Sequence: Synthetic oligonucleotide
  Antisense strand to SEQ ID NO: 1431966
aacuuccaagagcaccugg

SEQ ID NO: 1431968 - RNA, 19 nt, Artificial Sequence
  Description of Artificial Sequence: Synthetic oligonucleotide
  Sense strand starting at position 3343 of SEQ ID NO: 1243656
uguccugccucccagagaa

SEQ ID NO: 1431969 - RNA, 19 nt, Artificial Sequence
  Description of Artificial Sequence: Synthetic oligonucleotide
  Antisense strand to SEQ ID NO: 1431968
uucucugggaggcaggaca

SEQ ID NO: 1431970 - RNA, 19 nt, Artificial Sequence
  Description of Artificial Sequence: Synthetic oligonucleotide
  Sense strand starting at position 3458 of SEQ ID NO: 1243656
ccaggaacucuuugcugaa

SEQ ID NO: 1431971 - RNA, 19 nt, Artificial Sequence
  Description of Artificial Sequence: Synthetic oligonucleotide
  Antisense strand to SEQ ID NO: 1431970
uucagcaaagaguuccugg

SEQ ID NO: 1431972 - RNA, 19 nt, Artificial Sequence
  Description of Artificial Sequence: Synthetic oligonucleotide
  Sense strand starting at position 3460 of SEQ ID NO: 1243656
aggaacucuuugcugaauu

SEQ ID NO: 1431973 - RNA, 19 nt, Artificial Sequence
  Description of Artificial Sequence: Synthetic oligonucleotide
  Antisense strand to SEQ ID NO: 1431972
aauucagcaaagaguuccu

SEQ ID NO: 1431974 - RNA, 19 nt, Artificial Sequence
  Description of Artificial Sequence: Synthetic oligonucleotide
  Sense strand starting at position 3461 of SEQ ID NO: 1243656
ggaacucuuugcugaauuu

SEQ ID NO: 1431975 - RNA, 19 nt, Artificial Sequence
  Description of Artificial Sequence: Synthetic oligonucleotide
  Antisense strand to SEQ ID NO: 1431974
aaauucagcaaagaguucc

SEQ ID NO: 1431976 - RNA, 19 nt, Artificial Sequence
  Description of Artificial Sequence: Synthetic oligonucleotide
  Sense strand starting at position 3503 of SEQ ID NO: 1243656
gcacuaugaucgcucuggu

SEQ ID NO: 1431977 - RNA, 19 nt, Artificial Sequence
  Description of Artificial Sequence: Synthetic oligonucleotide
  Antisense strand to SEQ ID NO: 1431976
accagagcgaucauagugc

SEQ ID NO: 1431978 - RNA, 19 nt, Artificial Sequence
  Description of Artificial Sequence: Synthetic oligonucleotide
  Sense strand starting at position 3773 of SEQ ID NO: 1243656
ggaccaaccucuugugaac

SEQ ID NO: 1431979 - RNA, 19 nt, Artificial Sequence
  Description of Artificial Sequence: Synthetic oligonucleotide
  Antisense strand to SEQ ID NO: 1431978
guucacaagagguuggucc

SEQ ID NO: 1431980 - RNA, 19 nt, Artificial Sequence
  Description of Artificial Sequence: Synthetic oligonucleotide
  Sense strand starting at position 3824 of SEQ ID NO: 1243656
ucagcuccuuccggaagau

SEQ ID NO: 1431981 - RNA, 19 nt, Artificial Sequence
  Description of Artificial Sequence: Synthetic oligonucleotide
  Antisense strand to SEQ ID NO: 1431980
aucuuccggaaggagcuga

SEQ ID NO: 1431982 - RNA, 19 nt, Artificial Sequence
  Description of Artificial Sequence: Synthetic oligonucleotide
  Sense strand starting at position 3850 of SEQ ID NO: 1243656
ugugaagccuucucagaac

SEQ ID NO: 1431983 - RNA, 19 nt, Artificial Sequence
  Description of Artificial Sequence: Synthetic oligonucleotide
  Antisense strand to SEQ ID NO: 1431982
guucugagaaggcuucaca

SEQ ID NO: 1431984 - RNA, 19 nt, Artificial Sequence
  Description of Artificial Sequence: Synthetic oligonucleotide
  Sense strand starting at position 140 of SEQ ID NO: 1243657
gguagcuugcuugccuaua

SEQ ID NO: 1431985 - RNA, 19 nt, Artificial Sequence
  Description of Artificial Sequence: Synthetic oligonucleotide
  Antisense strand to SEQ ID NO: 1431984
uauaggcaagcaagcuacc

SEQ ID NO: 1431986 - RNA, 19 nt, Artificial Sequence
  Description of Artificial Sequence: Synthetic oligonucleotide
  Sense strand starting at position 241 of SEQ ID NO: 1243657
gucucaugacucugaauaa

SEQ ID NO: 1431987 - RNA, 19 nt, Artificial Sequence
  Description of Artificial Sequence: Synthetic oligonucleotide
  Antisense strand to SEQ ID NO: 1431986
uuauucagagucaugagac

SEQ ID NO: 1431988 - RNA, 19 nt, Artificial Sequence
  Description of Artificial Sequence: Synthetic oligonucleotide
  Sense strand starting at position 281 of SEQ ID NO: 1243657
ugaggaguccucuaagguc

SEQ ID NO: 1431989 - RNA, 19 nt, Artificial Sequence
  Description of Artificial Sequence: Synthetic oligonucleotide
  Antisense strand to SEQ ID NO: 1431988
gaccuuagaggacuccuca

SEQ ID NO: 1431990 - RNA, 19 nt, Artificial Sequence
  Description of Artificial Sequence: Synthetic oligonucleotide
  Sense strand starting at position 441 of SEQ ID NO: 1243657
gcaugaaggcuuuagauaa

SEQ ID NO: 1431991 - RNA, 19 nt, Artificial Sequence
  Description of Artificial Sequence: Synthetic oligonucleotide
  Antisense strand to SEQ ID NO: 1431990
uuaucuaaagccuucaugc

SEQ ID NO: 1431992 - RNA, 19 nt, Artificial Sequence
  Description of Artificial Sequence: Synthetic oligonucleotide
  Sense strand starting at position 448 of SEQ ID NO: 1243657
ggcuuuagauaacuacuuu

SEQ ID NO: 1431993 - RNA, 19 nt, Artificial Sequence
  Description of Artificial Sequence: Synthetic oligonucleotide
  Antisense strand to SEQ ID NO: 1431992
aaaguaguuaucuaaagcc

SEQ ID NO: 1431994 - RNA, 19 nt, Artificial Sequence
  Description of Artificial Sequence: Synthetic oligonucleotide
  Sense strand starting at position 512 of SEQ ID NO: 1243657
ugaagaaacugaguguuag

SEQ ID NO: 1431995 - RNA, 19 nt, Artificial Sequence
  Description of Artificial Sequence: Synthetic oligonucleotide
  Antisense strand to SEQ ID NO: 1431994
cuaacacucaguuucuuca

SEQ ID NO: 1431996 - RNA, 19 nt, Artificial Sequence
  Description of Artificial Sequence: Synthetic oligonucleotide
  Sense strand starting at position 524 of SEQ ID NO: 1243657
guguuagagaacugaaaua

SEQ ID NO: 1431997 - RNA, 19 nt, Artificial Sequence
  Description of Artificial Sequence: Synthetic oligonucleotide
  Antisense strand to SEQ ID NO: 1431996
uauuucaguucucuaacac

SEQ ID NO: 1431998 - RNA, 19 nt, Artificial Sequence
  Description of Artificial Sequence: Synthetic oligonucleotide
  Sense strand starting at position 596 of SEQ ID NO: 1243657
gucuucugaccacaagacu

SEQ ID NO: 1431999 - RNA, 19 nt, Artificial Sequence
  Description of Artificial Sequence: Synthetic oligonucleotide
  Antisense strand to SEQ ID NO: 1431998
agucuuguggucagaagac

SEQ ID NO: 1432000 - RNA, 19 nt, Artificial Sequence
  Description of Artificial Sequence: Synthetic oligonucleotide
  Sense strand starting at position 838 of SEQ ID NO: 1243657
uuggcauauugguuaauag

SEQ ID NO: 1432001 - RNA, 19 nt, Artificial Sequence
  Description of Artificial Sequence: Synthetic oligonucleotide
  Antisense strand to SEQ ID NO: 1432000
cuauuaaccaauaugccaa

SEQ ID NO: 1432002 - RNA, 19 nt, Artificial Sequence
  Description of Artificial Sequence: Synthetic oligonucleotide
  Sense strand starting at position 847 of SEQ ID NO: 1243657
ugguuaauagguuaaugca

SEQ ID NO: 1432003 - RNA, 19 nt, Artificial Sequence
  Description of Artificial Sequence: Synthetic oligonucleotide
  Antisense strand to SEQ ID NO: 1432002
ugcauuaaccuauuaacca

SEQ ID NO: 1432004 - RNA, 19 nt, Artificial Sequence
  Description of Artificial Sequence: Synthetic oligonucleotide
  Sense strand starting at position 1221 of SEQ ID NO: 1243657
ccuucugaauuauuguaga

SEQ ID NO: 1432005 - RNA, 19 nt, Artificial Sequence
  Description of Artificial Sequence: Synthetic oligonucleotide
  Antisense strand to SEQ ID NO: 1432004
ucuacaauaauucagaagg

SEQ ID NO: 1432006 - RNA, 19 nt, Artificial Sequence
  Description of Artificial Sequence: Synthetic oligonucleotide
  Sense strand starting at position 1234 of SEQ ID NO: 1243657
uguagaaaccugugauuag

SEQ ID NO: 1432007 - RNA, 19 nt, Artificial Sequence
  Description of Artificial Sequence: Synthetic oligonucleotide
  Antisense strand to SEQ ID NO: 1432006
cuaaucacagguuucuaca

SEQ ID NO: 1432008 - RNA, 19 nt, Artificial Sequence
  Description of Artificial Sequence: Synthetic oligonucleotide
  Sense strand starting at position 1237 of SEQ ID NO: 1243657
agaaaccugugauuaguau

SEQ ID NO: 1432009 - RNA, 19 nt, Artificial Sequence
  Description of Artificial Sequence: Synthetic oligonucleotide
  Antisense strand to SEQ ID NO: 1432008
auacuaaucacagguuucu

SEQ ID NO: 1432010 - RNA, 19 nt, Artificial Sequence
  Description of Artificial Sequence: Synthetic oligonucleotide
  Sense strand starting at position 1238 of SEQ ID NO: 1243657
gaaaccugugauuaguauu

SEQ ID NO: 1432011 - RNA, 19 nt, Artificial Sequence
  Description of Artificial Sequence: Synthetic oligonucleotide
  Antisense strand to SEQ ID NO: 1432010
aauacuaaucacagguuuc

SEQ ID NO: 1432012 - RNA, 19 nt, Artificial Sequence
  Description of Artificial Sequence: Synthetic oligonucleotide
  Sense strand starting at position 1314 of SEQ ID NO: 1243657
ggaccaaucugggucagua

SEQ ID NO: 1432013 - RNA, 19 nt, Artificial Sequence
  Description of Artificial Sequence: Synthetic oligonucleotide
  Antisense strand to SEQ ID NO: 1432012
uacugacccagauuggucc

SEQ ID NO: 1432014 - RNA, 19 nt, Artificial Sequence
  Description of Artificial Sequence: Synthetic oligonucleotide
  Sense strand starting at position 1585 of SEQ ID NO: 1243657
uggcauuaacauggagaca

SEQ ID NO: 1432015 - RNA, 19 nt, Artificial Sequence
  Description of Artificial Sequence: Synthetic oligonucleotide
  Antisense strand to SEQ ID NO: 1432014
ugucuccauguuaaugcca

SEQ ID NO: 1432016 - RNA, 19 nt, Artificial Sequence
  Description of Artificial Sequence: Synthetic oligonucleotide
  Sense strand starting at position 1939 of SEQ ID NO: 1243657
uuccuacccugguuagaga

SEQ ID NO: 1432017 - RNA, 19 nt, Artificial Sequence
  Description of Artificial Sequence: Synthetic oligonucleotide
  Antisense strand to SEQ ID NO: 1432016
ucucuaaccaggguaggaa

SEQ ID NO: 1432018 - RNA, 19 nt, Artificial Sequence
  Description of Artificial Sequence: Synthetic oligonucleotide
  Sense strand starting at position 2066 of SEQ ID NO: 1243657
uggcuuuauccagggagac

SEQ ID NO: 1432019 - RNA, 19 nt, Artificial Sequence
  Description of Artificial Sequence: Synthetic oligonucleotide
  Antisense strand to SEQ ID NO: 1432018
gucucccuggauaaagcca

SEQ ID NO: 1432020 - RNA, 19 nt, Artificial Sequence
  Description of Artificial Sequence: Synthetic oligonucleotide
  Sense strand starting at position 2067 of SEQ ID NO: 1243657
ggcuuuauccagggagacu

SEQ ID NO: 1432021 - RNA, 19 nt, Artificial Sequence
  Description of Artificial Sequence: Synthetic oligonucleotide
  Antisense strand to SEQ ID NO: 1432020
agucucccuggauaaagcc

SEQ ID NO: 1432022 - RNA, 19 nt, Artificial Sequence
  Description of Artificial Sequence: Synthetic oligonucleotide
  Sense strand starting at position 2068 of SEQ ID NO: 1243657
gcuuuauccagggagacug

SEQ ID NO: 1432023 - RNA, 19 nt, Artificial Sequence
  Description of Artificial Sequence: Synthetic oligonucleotide
  Antisense strand to SEQ ID NO: 1432022
cagucucccuggauaaagc

SEQ ID NO: 1432024 - RNA, 19 nt, Artificial Sequence
  Description of Artificial Sequence: Synthetic oligonucleotide
  Sense strand starting at position 2321 of SEQ ID NO: 1243657
ucgaaaguauaucugaaag

SEQ ID NO: 1432025 - RNA, 19 nt, Artificial Sequence
  Description of Artificial Sequence: Synthetic oligonucleotide
  Antisense strand to SEQ ID NO: 1432024
cuuucagauauacuuucga

SEQ ID NO: 1432026 - RNA, 19 nt, Artificial Sequence
  Description of Artificial Sequence: Synthetic oligonucleotide
  Sense strand starting at position 2416 of SEQ ID NO: 1243657
gcggaugcugaauacuaau

SEQ ID NO: 1432027 - RNA, 19 nt, Artificial Sequence
  Description of Artificial Sequence: Synthetic oligonucleotide
  Antisense strand to SEQ ID NO: 1432026
auuaguauucagcauccgc

SEQ ID NO: 1432028 - RNA, 19 nt, Artificial Sequence
  Description of Artificial Sequence: Synthetic oligonucleotide
  Sense strand starting at position 2422 of SEQ ID NO: 1243657
gcugaauacuaaucaggua

SEQ ID NO: 1432029 - RNA, 19 nt, Artificial Sequence
  Description of Artificial Sequence: Synthetic oligonucleotide
  Antisense strand to SEQ ID NO: 1432028
uaccugauuaguauucagc

SEQ ID NO: 1432030 - RNA, 19 nt, Artificial Sequence
  Description of Artificial Sequence: Synthetic oligonucleotide
  Sense strand starting at position 2454 of SEQ ID NO: 1243657
uuaagaugcucaguugaag

SEQ ID NO: 1432031 - RNA, 19 nt, Artificial Sequence
  Description of Artificial Sequence: Synthetic oligonucleotide
  Antisense strand to SEQ ID NO: 1432030
cuucaacugagcaucuuaa

SEQ ID NO: 1432032 - RNA, 19 nt, Artificial Sequence
  Description of Artificial Sequence: Synthetic oligonucleotide
  Sense strand starting at position 2469 of SEQ ID NO: 1243657
gaagcuuuggaauggauua

SEQ ID NO: 1432033 - RNA, 19 nt, Artificial Sequence
  Description of Artificial Sequence: Synthetic oligonucleotide
  Antisense strand to SEQ ID NO: 1432032
uaauccauuccaaagcuuc

SEQ ID NO: 1432034 - RNA, 19 nt, Artificial Sequence
  Description of Artificial Sequence: Synthetic oligonucleotide
  Sense strand starting at position 2639 of SEQ ID NO: 1243657
gugaaaucucuugggaagu

SEQ ID NO: 1432035 - RNA, 19 nt, Artificial Sequence
  Description of Artificial Sequence: Synthetic oligonucleotide
  Antisense strand to SEQ ID NO: 1432034
acuucccaagagauuucac

SEQ ID NO: 1432036 - RNA, 19 nt, Artificial Sequence
  Description of Artificial Sequence: Synthetic oligonucleotide
  Sense strand starting at position 2863 of SEQ ID NO: 1243657
ggaugaguacuuugaagca

SEQ ID NO: 1432037 - RNA, 19 nt, Artificial Sequence
  Description of Artificial Sequence: Synthetic oligonucleotide
  Antisense strand to SEQ ID NO: 1432036
ugcuucaaaguacucaucc

SEQ ID NO: 1432038 - RNA, 19 nt, Artificial Sequence
  Description of Artificial Sequence: Synthetic oligonucleotide
  Sense strand starting at position 2918 of SEQ ID NO: 1243657
acagaugaaugggaacaaa

SEQ ID NO: 1432039 - RNA, 19 nt, Artificial Sequence
  Description of Artificial Sequence: Synthetic oligonucleotide
  Antisense strand to SEQ ID NO: 1432038
uuuguucccauucaucugu

SEQ ID NO: 1432040 - RNA, 19 nt, Artificial Sequence
  Description of Artificial Sequence: Synthetic oligonucleotide
  Sense strand starting at position 2968 of SEQ ID NO: 1243657
cuugaucaugaaugucuaa

SEQ ID NO: 1432041 - RNA, 19 nt, Artificial Sequence
  Description of Artificial Sequence: Synthetic oligonucleotide
  Antisense strand to SEQ ID NO: 1432040
uuagacauucaugaucaag

SEQ ID NO: 1432042 - RNA, 19 nt, Artificial Sequence
  Description of Artificial Sequence: Synthetic oligonucleotide
  Sense strand starting at position 2971 of SEQ ID NO: 1243657
gaucaugaaugucuaauug

SEQ ID NO: 1432043 - RNA, 19 nt, Artificial Sequence
  Description of Artificial Sequence: Synthetic oligonucleotide
  Antisense strand to SEQ ID NO: 1432042
caauuagacauucaugauc

SEQ ID NO: 1432044 - RNA, 19 nt, Artificial Sequence
  Description of Artificial Sequence: Synthetic oligonucleotide
  Sense strand starting at position 3090 of SEQ ID NO: 1243657
uagguaucucugcagguga

SEQ ID NO: 1432045 - RNA, 19 nt, Artificial Sequence
  Description of Artificial Sequence: Synthetic oligonucleotide
  Antisense strand to SEQ ID NO: 1432044
ucaccugcagagauaccua

SEQ ID NO: 1432046 - RNA, 19 nt, Artificial Sequence
  Description of Artificial Sequence: Synthetic oligonucleotide
  Sense strand starting at position 3105 of SEQ ID NO: 1243657
gugaucugggcuuaacaug

SEQ ID NO: 1432047 - RNA, 19 nt, Artificial Sequence
  Description of Artificial Sequence: Synthetic oligonucleotide
  Antisense strand to SEQ ID NO: 1432046
cauguuaagcccagaucac

SEQ ID NO: 1432048 - RNA, 19 nt, Artificial Sequence
  Description of Artificial Sequence: Synthetic oligonucleotide
  Sense strand starting at position 3359 of SEQ ID NO: 1243657
ucagaaugcuuaucaaaug

SEQ ID NO: 1432049 - RNA, 19 nt, Artificial Sequence
  Description of Artificial Sequence: Synthetic oligonucleotide
  Antisense strand to SEQ ID NO: 1432048
cauuugauaagcauucuga

SEQ ID NO: 1432050 - RNA, 19 nt, Artificial Sequence
  Description of Artificial Sequence: Synthetic oligonucleotide
  Sense strand starting at position 3504 of SEQ ID NO: 1243657
acgcuuguuacauaggaag

SEQ ID NO: 1432051 - RNA, 19 nt, Artificial Sequence
  Description of Artificial Sequence: Synthetic oligonucleotide
  Antisense strand to SEQ ID NO: 1432050
cuuccuauguaacaagcgu

SEQ ID NO: 1432052 - RNA, 19 nt, Artificial Sequence
  Description of Artificial Sequence: Synthetic oligonucleotide
  Sense strand starting at position 3515 of SEQ ID NO: 1243657
auaggaagugcaugauaca

SEQ ID NO: 1432053 - RNA, 19 nt, Artificial Sequence
  Description of Artificial Sequence: Synthetic oligonucleotide
  Antisense strand to SEQ ID NO: 1432052
uguaucaugcacuuccuau

SEQ ID NO: 1432054 - RNA, 19 nt, Artificial Sequence
  Description of Artificial Sequence: Synthetic oligonucleotide
  Sense strand starting at position 3591 of SEQ ID NO: 1243657
cugcauuaagcucaaggga

SEQ ID NO: 1432055 - RNA, 19 nt, Artificial Sequence
  Description of Artificial Sequence: Synthetic oligonucleotide
  Antisense strand to SEQ ID NO: 1432054
ucccuugagcuuaaugcag

SEQ ID NO: 1432056 - RNA, 19 nt, Artificial Sequence
  Description of Artificial Sequence: Synthetic oligonucleotide
  Sense strand starting at position 3675 of SEQ ID NO: 1243657
gaaggugacuuggucuuua

SEQ ID NO: 1432057 - RNA, 19 nt, Artificial Sequence
  Description of Artificial Sequence: Synthetic oligonucleotide
  Antisense strand to SEQ ID NO: 1432056
uaaagaccaagucaccuuc

SEQ ID NO: 1432058 - RNA, 19 nt, Artificial Sequence
  Description of Artificial Sequence: Synthetic oligonucleotide
  Sense strand starting at position 3680 of SEQ ID NO: 1243657
ugacuuggucuuuaauguu

SEQ ID NO: 1432059 - RNA, 19 nt, Artificial Sequence
  Description of Artificial Sequence: Synthetic oligonucleotide
  Antisense strand to SEQ ID NO: 1432058
aacauuaaagaccaaguca

SEQ ID NO: 1432060 - RNA, 19 nt, Artificial Sequence
  Description of Artificial Sequence: Synthetic oligonucleotide
  Sense strand starting at position 3792 of SEQ ID NO: 1243657
ucagauuguggcuaugaaa

SEQ ID NO: 1432061 - RNA, 19 nt, Artificial Sequence
  Description of Artificial Sequence: Synthetic oligonucleotide
  Antisense strand to SEQ ID NO: 1432060
uuucauagccacaaucuga

SEQ ID NO: 1432062 - RNA, 19 nt, Artificial Sequence
  Description of Artificial Sequence: Synthetic oligonucleotide
  Sense strand starting at position 3930 of SEQ ID NO: 1243657
gcguguuuccuaguaguag

SEQ ID NO: 1432063 - RNA, 19 nt, Artificial Sequence
  Description of Artificial Sequence: Synthetic oligonucleotide
  Antisense strand to SEQ ID NO: 1432062
cuacuacuaggaaacacgc

SEQ ID NO: 1432064 - RNA, 19 nt, Artificial Sequence
  Description of Artificial Sequence: Synthetic oligonucleotide
  Sense strand starting at position 36 of SEQ ID NO: 1243658
gucugcuguguacaacauu

SEQ ID NO: 1432065 - RNA, 19 nt, Artificial Sequence
  Description of Artificial Sequence: Synthetic oligonucleotide
  Antisense strand to SEQ ID NO: 1432064
aauguuguacacagcagac

SEQ ID NO: 1432066 - RNA, 19 nt, Artificial Sequence
  Description of Artificial Sequence: Synthetic oligonucleotide
  Sense strand starting at position 45 of SEQ ID NO: 1243658
guacaacauuccgugauuu

SEQ ID NO: 1432067 - RNA, 19 nt, Artificial Sequence
  Description of Artificial Sequence: Synthetic oligonucleotide
  Antisense strand to SEQ ID NO: 1432066
aaaucacggaauguuguac

SEQ ID NO: 1432068 - RNA, 19 nt, Artificial Sequence
  Description of Artificial Sequence: Synthetic oligonucleotide
  Sense strand starting at position 80 of SEQ ID NO: 1243658
cagggaaucccuuggguuu

SEQ ID NO: 1432069 - RNA, 19 nt, Artificial Sequence
  Description of Artificial Sequence: Synthetic oligonucleotide
  Antisense strand to SEQ ID NO: 1432068
aaacccaagggauucccug

SEQ ID NO: 1432070 - RNA, 19 nt, Artificial Sequence
  Description of Artificial Sequence: Synthetic oligonucleotide
  Sense strand starting at position 290 of SEQ ID NO: 1243658
ggugacauagugugaccua

SEQ ID NO: 1432071 - RNA, 19 nt, Artificial Sequence
  Description of Artificial Sequence: Synthetic oligonucleotide
  Antisense strand to SEQ ID NO: 1432070
uaggucacacuaugucacc

SEQ ID NO: 1432072 - RNA, 19 nt, Artificial Sequence
  Description of Artificial Sequence: Synthetic oligonucleotide
  Sense strand starting at position 408 of SEQ ID NO: 1243658
cuaguauuacugcgaggac

SEQ ID NO: 1432073 - RNA, 19 nt, Artificial Sequence
  Description of Artificial Sequence: Synthetic oligonucleotide
  Antisense strand to SEQ ID NO: 1432072
guccucgcaguaauacuag

SEQ ID NO: 1432074 - RNA, 19 nt, Artificial Sequence
  Description of Artificial Sequence: Synthetic oligonucleotide
  Sense strand starting at position 1011 of SEQ ID NO: 1243658
ucacgagguuaucugaagu

SEQ ID NO: 1432075 - RNA, 19 nt, Artificial Sequence
  Description of Artificial Sequence: Synthetic oligonucleotide
  Antisense strand to SEQ ID NO: 1432074
acuucagauaaccucguga

SEQ ID NO: 1432076 - RNA, 19 nt, Artificial Sequence
  Description of Artificial Sequence: Synthetic oligonucleotide
  Sense strand starting at position 1230 of SEQ ID NO: 1243658
caacaaugucccugcacga

SEQ ID NO: 1432077 - RNA, 19 nt, Artificial Sequence
  Description of Artificial Sequence: Synthetic oligonucleotide
  Antisense strand to SEQ ID NO: 1432076
ucgugcagggacauuguug

SEQ ID NO: 1432078 - RNA, 19 nt, Artificial Sequence
  Description of Artificial Sequence: Synthetic oligonucleotide
  Sense strand starting at position 1246 of SEQ ID NO: 1243658
cgauuccugacagguaacu

SEQ ID NO: 1432079 - RNA, 19 nt, Artificial Sequence
  Description of Artificial Sequence: Synthetic oligonucleotide
  Antisense strand to SEQ ID NO: 1432078
aguuaccugucaggaaucg

SEQ ID NO: 1432080 - RNA, 19 nt, Artificial Sequence
  Description of Artificial Sequence: Synthetic oligonucleotide
  Sense strand starting at position 1298 of SEQ ID NO: 1243658
acaauaaggcuuugacaau

SEQ ID NO: 1432081 - RNA, 19 nt, Artificial Sequence
  Description of Artificial Sequence: Synthetic oligonucleotide
  Antisense strand to SEQ ID NO: 1432080
auugucaaagccuuauugu

SEQ ID NO: 1432082 - RNA, 19 nt, Artificial Sequence
  Description of Artificial Sequence: Synthetic oligonucleotide
  Sense strand starting at position 1723 of SEQ ID NO: 1243658
ucgauuuccuaaggagaag

SEQ ID NO: 1432083 - RNA, 19 nt, Artificial Sequence
  Description of Artificial Sequence: Synthetic oligonucleotide
  Antisense strand to SEQ ID NO: 1432082
cuucuccuuaggaaaucga

SEQ ID NO: 1432084 - RNA, 19 nt, Artificial Sequence
  Description of Artificial Sequence: Synthetic oligonucleotide
  Sense strand starting at position 1886 of SEQ ID NO: 1243658
cgggagggacguugucaua

SEQ ID NO: 1432085 - RNA, 19 nt, Artificial Sequence
  Description of Artificial Sequence: Synthetic oligonucleotide
  Antisense strand to SEQ ID NO: 1432084
uaugacaacgucccucccg

SEQ ID NO: 1432086 - RNA, 19 nt, Artificial Sequence
  Description of Artificial Sequence: Synthetic oligonucleotide
  Sense strand starting at position 2112 of SEQ ID NO: 1243658
cugcaaccucgcgagaagu

SEQ ID NO: 1432087 - RNA, 19 nt, Artificial Sequence
  Description of Artificial Sequence: Synthetic oligonucleotide
  Antisense strand to SEQ ID NO: 1432086
acuucucgcgagguugcag

SEQ ID NO: 1432088 - RNA, 19 nt, Artificial Sequence
  Description of Artificial Sequence: Synthetic oligonucleotide
  Sense strand starting at position 2304 of SEQ ID NO: 1243658
gcucgagauuuauuaagca

SEQ ID NO: 1432089 - RNA, 19 nt, Artificial Sequence
  Description of Artificial Sequence: Synthetic oligonucleotide
  Antisense strand to SEQ ID NO: 1432088
ugcuuaauaaaucucgagc

SEQ ID NO: 1432090 - RNA, 19 nt, Artificial Sequence
  Description of Artificial Sequence: Synthetic oligonucleotide
  Sense strand starting at position 2312 of SEQ ID NO: 1243658
uuuauuaagcacugacuga

SEQ ID NO: 1432091 - RNA, 19 nt, Artificial Sequence
  Description of Artificial Sequence: Synthetic oligonucleotide
  Antisense strand to SEQ ID NO: 1432090
ucagucagugcuuaauaaa

SEQ ID NO: 1432092 - RNA, 19 nt, Artificial Sequence
  Description of Artificial Sequence: Synthetic oligonucleotide
  Sense strand starting at position 2323 of SEQ ID NO: 1243658
cugacugagcccugucaua

SEQ ID NO: 1432093 - RNA, 19 nt, Artificial Sequence
  Description of Artificial Sequence: Synthetic oligonucleotide
  Antisense strand to SEQ ID NO: 1432092
uaugacagggcucagucag

SEQ ID NO: 1432094 - RNA, 19 nt, Artificial Sequence
  Description of Artificial Sequence: Synthetic oligonucleotide
  Sense strand starting at position 2385 of SEQ ID NO: 1243658
ugcagacuacucuggagaa

SEQ ID NO: 1432095 - RNA, 19 nt, Artificial Sequence
  Description of Artificial Sequence: Synthetic oligonucleotide
  Antisense strand to SEQ ID NO: 1432094
uucuccagaguagucugca

SEQ ID NO: 1432096 - RNA, 19 nt, Artificial Sequence
  Description of Artificial Sequence: Synthetic oligonucleotide
  Sense strand starting at position 2395 of SEQ ID NO: 1243658
ucuggagaagcuuggcaau

SEQ ID NO: 1432097 - RNA, 19 nt, Artificial Sequence
  Description of Artificial Sequence: Synthetic oligonucleotide
  Antisense strand to SEQ ID NO: 1432096
auugccaagcuucuccaga

SEQ ID NO: 1432098 - RNA, 19 nt, Artificial Sequence
  Description of Artificial Sequence: Synthetic oligonucleotide
  Sense strand starting at position 2397 of SEQ ID NO: 1243658
uggagaagcuuggcaauga

SEQ ID NO: 1432099 - RNA, 19 nt, Artificial Sequence
  Description of Artificial Sequence: Synthetic oligonucleotide
  Antisense strand to SEQ ID NO: 1432098
ucauugccaagcuucucca

SEQ ID NO: 1432100 - RNA, 19 nt, Artificial Sequence
  Description of Artificial Sequence: Synthetic oligonucleotide
  Sense strand starting at position 2440 of SEQ ID NO: 1243658
gguccuuagguuuguaaag

SEQ ID NO: 1432101 - RNA, 19 nt, Artificial Sequence
  Description of Artificial Sequence: Synthetic oligonucleotide
  Antisense strand to SEQ ID NO: 1432100
cuuuacaaaccuaaggacc

SEQ ID NO: 1432102 - RNA, 19 nt, Artificial Sequence
  Description of Artificial Sequence: Synthetic oligonucleotide
  Sense strand starting at position 2441 of SEQ ID NO: 1243658
guccuuagguuuguaaaga

SEQ ID NO: 1432103 - RNA, 19 nt, Artificial Sequence
  Description of Artificial Sequence: Synthetic oligonucleotide
  Antisense strand to SEQ ID NO: 1432102
ucuuuacaaaccuaaggac

SEQ ID NO: 1432104 - RNA, 19 nt, Artificial Sequence
  Description of Artificial Sequence: Synthetic oligonucleotide
  Sense strand starting at position 2503 of SEQ ID NO: 1243658
gagguaggaugcucugcau

SEQ ID NO: 1432105 - RNA, 19 nt, Artificial Sequence
  Description of Artificial Sequence: Synthetic oligonucleotide
  Antisense strand to SEQ ID NO: 1432104
augcagagcauccuaccuc

SEQ ID NO: 1432106 - RNA, 19 nt, Artificial Sequence
  Description of Artificial Sequence: Synthetic oligonucleotide
  Sense strand starting at position 2568 of SEQ ID NO: 1243658
gucaccuguuauuccacua

SEQ ID NO: 1432107 - RNA, 19 nt, Artificial Sequence
  Description of Artificial Sequence: Synthetic oligonucleotide
  Antisense strand to SEQ ID NO: 1432106
uaguggaauaacaggugac

SEQ ID NO: 1432108 - RNA, 19 nt, Artificial Sequence
  Description of Artificial Sequence: Synthetic oligonucleotide
  Sense strand starting at position 2600 of SEQ ID NO: 1243658
caagaacaugcgugcagau

SEQ ID NO: 1432109 - RNA, 19 nt, Artificial Sequence
  Description of Artificial Sequence: Synthetic oligonucleotide
  Antisense strand to SEQ ID NO: 1432108
aucugcacgcauguucuug

SEQ ID NO: 1432110 - RNA, 19 nt, Artificial Sequence
  Description of Artificial Sequence: Synthetic oligonucleotide
  Sense strand starting at position 2602 of SEQ ID NO: 1243658
agaacaugcgugcagauau

SEQ ID NO: 1432111 - RNA, 19 nt, Artificial Sequence
  Description of Artificial Sequence: Synthetic oligonucleotide
  Antisense strand to SEQ ID NO: 1432110
auaucugcacgcauguucu

SEQ ID NO: 1432112 - RNA, 19 nt, Artificial Sequence
  Description of Artificial Sequence: Synthetic oligonucleotide
  Sense strand starting at position 2735 of SEQ ID NO: 1243658
guuggaaggccugguuuca

SEQ ID NO: 1432113 - RNA, 19 nt, Artificial Sequence
  Description of Artificial Sequence: Synthetic oligonucleotide
  Antisense strand to SEQ ID NO: 1432112
ugaaaccaggccuuccaac

SEQ ID NO: 1432114 - RNA, 19 nt, Artificial Sequence
  Description of Artificial Sequence: Synthetic oligonucleotide
  Sense strand starting at position 2761 of SEQ ID NO: 1243658
cauguauguguugauggau

SEQ ID NO: 1432115 - RNA, 19 nt, Artificial Sequence
  Description of Artificial Sequence: Synthetic oligonucleotide
  Antisense strand to SEQ ID NO: 1432114
auccaucaacacauacaug

SEQ ID NO: 1432116 - RNA, 19 nt, Artificial Sequence
  Description of Artificial Sequence: Synthetic oligonucleotide
  Sense strand starting at position 2764 of SEQ ID NO: 1243658
guauguguugauggaucac

SEQ ID NO: 1432117 - RNA, 19 nt, Artificial Sequence
  Description of Artificial Sequence: Synthetic oligonucleotide
  Antisense strand to SEQ ID NO: 1432116
gugauccaucaacacauac

SEQ ID NO: 1432118 - RNA, 19 nt, Artificial Sequence
  Description of Artificial Sequence: Synthetic oligonucleotide
  Sense strand starting at position 2850 of SEQ ID NO: 1243658
uugggauugcauugcccaa

SEQ ID NO: 1432119 - RNA, 19 nt, Artificial Sequence
  Description of Artificial Sequence: Synthetic oligonucleotide
  Antisense strand to SEQ ID NO: 1432118
uugggcaaugcaaucccaa

SEQ ID NO: 1432120 - RNA, 19 nt, Artificial Sequence
  Description of Artificial Sequence: Synthetic oligonucleotide
  Sense strand starting at position 2868 of SEQ ID NO: 1243658
aaauaaauugagggugcua

SEQ ID NO: 1432121 - RNA, 19 nt, Artificial Sequence
  Description of Artificial Sequence: Synthetic oligonucleotide
  Antisense strand to SEQ ID NO: 1432120
uagcacccucaauuuauuu

SEQ ID NO: 1432122 - RNA, 19 nt, Artificial Sequence
  Description of Artificial Sequence: Synthetic oligonucleotide
  Sense strand starting at position 2904 of SEQ ID NO: 1243658
ccaucaaacgugggauaca

SEQ ID NO: 1432123 - RNA, 19 nt, Artificial Sequence
  Description of Artificial Sequence: Synthetic oligonucleotide
  Antisense strand to SEQ ID NO: 1432122
uguaucccacguuugaugg

SEQ ID NO: 1432124 - RNA, 19 nt, Artificial Sequence
  Description of Artificial Sequence: Synthetic oligonucleotide
  Sense strand starting at position 2954 of SEQ ID NO: 1243658
aacugcaggucucugauaa

SEQ ID NO: 1432125 - RNA, 19 nt, Artificial Sequence
  Description of Artificial Sequence: Synthetic oligonucleotide
  Antisense strand to SEQ ID NO: 1432124
uuaucagagaccugcaguu

SEQ ID NO: 1432126 - RNA, 19 nt, Artificial Sequence
  Description of Artificial Sequence: Synthetic oligonucleotide
  Sense strand starting at position 2955 of SEQ ID NO: 1243658
acugcaggucucugauaau

SEQ ID NO: 1432127 - RNA, 19 nt, Artificial Sequence
  Description of Artificial Sequence: Synthetic oligonucleotide
  Antisense strand to SEQ ID NO: 1432126
auuaucagagaccugcagu

SEQ ID NO: 1432128 - RNA, 19 nt, Artificial Sequence
  Description of Artificial Sequence: Synthetic oligonucleotide
  Sense strand starting at position 3005 of SEQ ID NO: 1243658
agagcuuggugguuaaagu

SEQ ID NO: 1432129 - RNA, 19 nt, Artificial Sequence
  Description of Artificial Sequence: Synthetic oligonucleotide
  Antisense strand to SEQ ID NO: 1432128
acuuuaaccaccaagcucu

SEQ ID NO: 1432130 - RNA, 19 nt, Artificial Sequence
  Description of Artificial Sequence: Synthetic oligonucleotide
  Sense strand starting at position 3131 of SEQ ID NO: 1243658
ggugaaucaccugaagucu

SEQ ID NO: 1432131 - RNA, 19 nt, Artificial Sequence
  Description of Artificial Sequence: Synthetic oligonucleotide
  Antisense strand to SEQ ID NO: 1432130
agacuucaggugauucacc

SEQ ID NO: 1432132 - RNA, 19 nt, Artificial Sequence
  Description of Artificial Sequence: Synthetic oligonucleotide
  Sense strand starting at position 3139 of SEQ ID NO: 1243658
accugaagucuagagcuca

SEQ ID NO: 1432133 - RNA, 19 nt, Artificial Sequence
  Description of Artificial Sequence: Synthetic oligonucleotide
  Antisense strand to SEQ ID NO: 1432132
ugagcucuagacuucaggu

SEQ ID NO: 1432134 - RNA, 19 nt, Artificial Sequence
  Description of Artificial Sequence: Synthetic oligonucleotide
  Sense strand starting at position 3432 of SEQ ID NO: 1243658
auuagauguugggauuuag

SEQ ID NO: 1432135 - RNA, 19 nt, Artificial Sequence
  Description of Artificial Sequence: Synthetic oligonucleotide
  Antisense strand to SEQ ID NO: 1432134
cuaaaucccaacaucuaau

SEQ ID NO: 1432136 - RNA, 19 nt, Artificial Sequence
  Description of Artificial Sequence: Synthetic oligonucleotide
  Sense strand starting at position 3506 of SEQ ID NO: 1243658
acuauacgauuaguuaaga

SEQ ID NO: 1432137 - RNA, 19 nt, Artificial Sequence
  Description of Artificial Sequence: Synthetic oligonucleotide
  Antisense strand to SEQ ID NO: 1432136
ucuuaacuaaucguauagu

SEQ ID NO: 1432138 - RNA, 19 nt, Artificial Sequence
  Description of Artificial Sequence: Synthetic oligonucleotide
  Sense strand starting at position 3547 of SEQ ID NO: 1243658
acaguaacauagcugaaua

SEQ ID NO: 1432139 - RNA, 19 nt, Artificial Sequence
  Description of Artificial Sequence: Synthetic oligonucleotide
  Antisense strand to SEQ ID NO: 1432138
uauucagcuauguuacugu

SEQ ID NO: 1432140 - RNA, 19 nt, Artificial Sequence
  Description of Artificial Sequence: Synthetic oligonucleotide
  Sense strand starting at position 3781 of SEQ ID NO: 1243658
ucaggauugcagggaaagu

SEQ ID NO: 1432141 - RNA, 19 nt, Artificial Sequence
  Description of Artificial Sequence: Synthetic oligonucleotide
  Antisense strand to SEQ ID NO: 1432140
acuuucccugcaauccuga

SEQ ID NO: 1432142 - RNA, 19 nt, Artificial Sequence
  Description of Artificial Sequence: Synthetic oligonucleotide
  Sense strand starting at position 3843 of SEQ ID NO: 1243658
aaggaaggaucugaauuag

SEQ ID NO: 1432143 - RNA, 19 nt, Artificial Sequence
  Description of Artificial Sequence: Synthetic oligonucleotide
  Antisense strand to SEQ ID NO: 1432142
cuaauucagauccuuccuu

SEQ ID NO: 1432144 - RNA, 19 nt, Artificial Sequence
  Description of Artificial Sequence: Synthetic oligonucleotide
  Sense strand starting at position 158 of SEQ ID NO: 1243659
ggugacauagugugaccua

SEQ ID NO: 1432145 - RNA, 19 nt, Artificial Sequence
  Description of Artificial Sequence: Synthetic oligonucleotide
  Antisense strand to SEQ ID NO: 1432144
uaggucacacuaugucacc

SEQ ID NO: 1432146 - RNA, 19 nt, Artificial Sequence
  Description of Artificial Sequence: Synthetic oligonucleotide
  Sense strand starting at position 276 of SEQ ID NO: 1243659
cuaguauuacugcgaggac

SEQ ID NO: 1432147 - RNA, 19 nt, Artificial Sequence
  Description of Artificial Sequence: Synthetic oligonucleotide
  Antisense strand to SEQ ID NO: 1432146
guccucgcaguaauacuag

SEQ ID NO: 1432148 - RNA, 19 nt, Artificial Sequence
  Description of Artificial Sequence: Synthetic oligonucleotide
  Sense strand starting at position 879 of SEQ ID NO: 1243659
ucacgagguuaucugaagu

SEQ ID NO: 1432149 - RNA, 19 nt, Artificial Sequence
  Description of Artificial Sequence: Synthetic oligonucleotide
  Antisense strand to SEQ ID NO: 1432148
acuucagauaaccucguga

SEQ ID NO: 1432150 - RNA, 19 nt, Artificial Sequence
  Description of Artificial Sequence: Synthetic oligonucleotide
  Sense strand starting at position 1098 of SEQ ID NO: 1243659
caacaaugucccugcacga

SEQ ID NO: 1432151 - RNA, 19 nt, Artificial Sequence
  Description of Artificial Sequence: Synthetic oligonucleotide
  Antisense strand to SEQ ID NO: 1432150
ucgugcagggacauuguug

SEQ ID NO: 1432152 - RNA, 19 nt, Artificial Sequence
  Description of Artificial Sequence: Synthetic oligonucleotide
  Sense strand starting at position 1114 of SEQ ID NO: 1243659
cgauuccugacagguaacu

SEQ ID NO: 1432153 - RNA, 19 nt, Artificial Sequence
  Description of Artificial Sequence: Synthetic oligonucleotide
  Antisense strand to SEQ ID NO: 1432152
aguuaccugucaggaaucg

SEQ ID NO: 1432154 - RNA, 19 nt, Artificial Sequence
  Description of Artificial Sequence: Synthetic oligonucleotide
  Sense strand starting at position 1166 of SEQ ID NO: 1243659
acaauaaggcuuugacaau

SEQ ID NO: 1432155 - RNA, 19 nt, Artificial Sequence
  Description of Artificial Sequence: Synthetic oligonucleotide
  Antisense strand to SEQ ID NO: 1432154
auugucaaagccuuauugu

SEQ ID NO: 1432156 - RNA, 19 nt, Artificial Sequence
  Description of Artificial Sequence: Synthetic oligonucleotide
  Sense strand starting at position 1591 of SEQ ID NO: 1243659
ucgauuuccuaaggagaag

SEQ ID NO: 1432157 - RNA, 19 nt, Artificial Sequence
  Description of Artificial Sequence: Synthetic oligonucleotide
  Antisense strand to SEQ ID NO: 1432156
cuucuccuuaggaaaucga

SEQ ID NO: 1432158 - RNA, 19 nt, Artificial Sequence
  Description of Artificial Sequence: Synthetic oligonucleotide
  Sense strand starting at position 1754 of SEQ ID NO: 1243659
cgggagggacguugucaua

SEQ ID NO: 1432159 - RNA, 19 nt, Artificial Sequence
  Description of Artificial Sequence: Synthetic oligonucleotide
  Antisense strand to SEQ ID NO: 1432158
uaugacaacgucccucccg

SEQ ID NO: 1432160 - RNA, 19 nt, Artificial Sequence
  Description of Artificial Sequence: Synthetic oligonucleotide
  Sense strand starting at position 1980 of SEQ ID NO: 1243659
cugcaaccucgcgagaagu

SEQ ID NO: 1432161 - RNA, 19 nt, Artificial Sequence
  Description of Artificial Sequence: Synthetic oligonucleotide
  Antisense strand to SEQ ID NO: 1432160
acuucucgcgagguugcag

SEQ ID NO: 1432162 - RNA, 19 nt, Artificial Sequence
  Description of Artificial Sequence: Synthetic oligonucleotide
  Sense strand starting at position 2172 of SEQ ID NO: 1243659
gcucgagauuuauuaagca

SEQ ID NO: 1432163 - RNA, 19 nt, Artificial Sequence
  Description of Artificial Sequence: Synthetic oligonucleotide
  Antisense strand to SEQ ID NO: 1432162
ugcuuaauaaaucucgagc

SEQ ID NO: 1432164 - RNA, 19 nt, Artificial Sequence
  Description of Artificial Sequence: Synthetic oligonucleotide
  Sense strand starting at position 2180 of SEQ ID NO: 1243659
uuuauuaagcacugacuga

SEQ ID NO: 1432165 - RNA, 19 nt, Artificial Sequence
  Description of Artificial Sequence: Synthetic oligonucleotide
  Antisense strand to SEQ ID NO: 1432164
ucagucagugcuuaauaaa

SEQ ID NO: 1432166 - RNA, 19 nt, Artificial Sequence
  Description of Artificial Sequence: Synthetic oligonucleotide
  Sense strand starting at position 2191 of SEQ ID NO: 1243659
cugacugagcccugucaua

SEQ ID NO: 1432167 - RNA, 19 nt, Artificial Sequence
  Description of Artificial Sequence: Synthetic oligonucleotide
  Antisense strand to SEQ ID NO: 1432166
uaugacagggcucagucag

SEQ ID NO: 1432168 - RNA, 19 nt, Artificial Sequence
  Description of Artificial Sequence: Synthetic oligonucleotide
  Sense strand starting at position 2253 of SEQ ID NO: 1243659
ugcagacuacucuggagaa

SEQ ID NO: 1432169 - RNA, 19 nt, Artificial Sequence
  Description of Artificial Sequence: Synthetic oligonucleotide
  Antisense strand to SEQ ID NO: 1432168
uucuccagaguagucugca

SEQ ID NO: 1432170 - RNA, 19 nt, Artificial Sequence
  Description of Artificial Sequence: Synthetic oligonucleotide
  Sense strand starting at position 2263 of SEQ ID NO: 1243659
ucuggagaagcuuggcaau

SEQ ID NO: 1432171 - RNA, 19 nt, Artificial Sequence
  Description of Artificial Sequence: Synthetic oligonucleotide
  Antisense strand to SEQ ID NO: 1432170
auugccaagcuucuccaga

SEQ ID NO: 1432172 - RNA, 19 nt, Artificial Sequence
  Description of Artificial Sequence: Synthetic oligonucleotide
  Sense strand starting at position 2265 of SEQ ID NO: 1243659
uggagaagcuuggcaauga

SEQ ID NO: 1432173 - RNA, 19 nt, Artificial Sequence
  Description of Artificial Sequence: Synthetic oligonucleotide
  Antisense strand to SEQ ID NO: 1432172
ucauugccaagcuucucca

SEQ ID NO: 1432174 - RNA, 19 nt, Artificial Sequence
  Description of Artificial Sequence: Synthetic oligonucleotide
  Sense strand starting at position 2308 of SEQ ID NO: 1243659
gguccuuagguuuguaaag

SEQ ID NO: 1432175 - RNA, 19 nt, Artificial Sequence
  Description of Artificial Sequence: Synthetic oligonucleotide
  Antisense strand to SEQ ID NO: 1432174
cuuuacaaaccuaaggacc

SEQ ID NO: 1432176 - RNA, 19 nt, Artificial Sequence
  Description of Artificial Sequence: Synthetic oligonucleotide
  Sense strand starting at position 2309 of SEQ ID NO: 1243659
guccuuagguuuguaaaga

SEQ ID NO: 1432177 - RNA, 19 nt, Artificial Sequence
  Description of Artificial Sequence: Synthetic oligonucleotide
  Antisense strand to SEQ ID NO: 1432176
ucuuuacaaaccuaaggac

SEQ ID NO: 1432178 - RNA, 19 nt, Artificial Sequence
  Description of Artificial Sequence: Synthetic oligonucleotide
  Sense strand starting at position 2371 of SEQ ID NO: 1243659
gagguaggaugcucugcau

SEQ ID NO: 1432179 - RNA, 19 nt, Artificial Sequence
  Description of Artificial Sequence: Synthetic oligonucleotide
  Antisense strand to SEQ ID NO: 1432178
augcagagcauccuaccuc

SEQ ID NO: 1432180 - RNA, 19 nt, Artificial Sequence
  Description of Artificial Sequence: Synthetic oligonucleotide
  Sense strand starting at position 2436 of SEQ ID NO: 1243659
gucaccuguuauuccacua

SEQ ID NO: 1432181 - RNA, 19 nt, Artificial Sequence
  Description of Artificial Sequence: Synthetic oligonucleotide
  Antisense strand to SEQ ID NO: 1432180
uaguggaauaacaggugac

SEQ ID NO: 1432182 - RNA, 19 nt, Artificial Sequence
  Description of Artificial Sequence: Synthetic oligonucleotide
  Sense strand starting at position 2468 of SEQ ID NO: 1243659
caagaacaugcgugcagau

SEQ ID NO: 1432183 - RNA, 19 nt, Artificial Sequence
  Description of Artificial Sequence: Synthetic oligonucleotide
  Antisense strand to SEQ ID NO: 1432182
aucugcacgcauguucuug

SEQ ID NO: 1432184 - RNA, 19 nt, Artificial Sequence
  Description of Artificial Sequence: Synthetic oligonucleotide
  Sense strand starting at position 2470 of SEQ ID NO: 1243659
agaacaugcgugcagauau

SEQ ID NO: 1432185 - RNA, 19 nt, Artificial Sequence
  Description of Artificial Sequence: Synthetic oligonucleotide
  Antisense strand to SEQ ID NO: 1432184
auaucugcacgcauguucu

SEQ ID NO: 1432186 - RNA, 19 nt, Artificial Sequence
  Description of Artificial Sequence: Synthetic oligonucleotide
  Sense strand starting at position 2603 of SEQ ID NO: 1243659
guuggaaggccugguuuca

SEQ ID NO: 1432187 - RNA, 19 nt, Artificial Sequence
  Description of Artificial Sequence: Synthetic oligonucleotide
  Antisense strand to SEQ ID NO: 1432186
ugaaaccaggccuuccaac

SEQ ID NO: 1432188 - RNA, 19 nt, Artificial Sequence
  Description of Artificial Sequence: Synthetic oligonucleotide
  Sense strand starting at position 2629 of SEQ ID NO: 1243659
cauguauguguugauggau

SEQ ID NO: 1432189 - RNA, 19 nt, Artificial Sequence
  Description of Artificial Sequence: Synthetic oligonucleotide
  Antisense strand to SEQ ID NO: 1432188
auccaucaacacauacaug

SEQ ID NO: 1432190 - RNA, 19 nt, Artificial Sequence
  Description of Artificial Sequence: Synthetic oligonucleotide
  Sense strand starting at position 2632 of SEQ ID NO: 1243659
guauguguugauggaucac

SEQ ID NO: 1432191 - RNA, 19 nt, Artificial Sequence
  Description of Artificial Sequence: Synthetic oligonucleotide
  Antisense strand to SEQ ID NO: 1432190
gugauccaucaacacauac

SEQ ID NO: 1432192 - RNA, 19 nt, Artificial Sequence
  Description of Artificial Sequence: Synthetic oligonucleotide
  Sense strand starting at position 2718 of SEQ ID NO: 1243659
uugggauugcauugcccaa

SEQ ID NO: 1432193 - RNA, 19 nt, Artificial Sequence
  Description of Artificial Sequence: Synthetic oligonucleotide
  Antisense strand to SEQ ID NO: 1432192
uugggcaaugcaaucccaa

SEQ ID NO: 1432194 - RNA, 19 nt, Artificial Sequence
  Description of Artificial Sequence: Synthetic oligonucleotide
  Sense strand starting at position 2736 of SEQ ID NO: 1243659
aaauaaauugagggugcua

SEQ ID NO: 1432195 - RNA, 19 nt, Artificial Sequence
  Description of Artificial Sequence: Synthetic oligonucleotide
  Antisense strand to SEQ ID NO: 1432194
uagcacccucaauuuauuu

SEQ ID NO: 1432196 - RNA, 19 nt, Artificial Sequence
  Description of Artificial Sequence: Synthetic oligonucleotide
  Sense strand starting at position 2772 of SEQ ID NO: 1243659
ccaucaaacgugggauaca

SEQ ID NO: 1432197 - RNA, 19 nt, Artificial Sequence
  Description of Artificial Sequence: Synthetic oligonucleotide
  Antisense strand to SEQ ID NO: 1432196
uguaucccacguuugaugg

SEQ ID NO: 1432198 - RNA, 19 nt, Artificial Sequence
  Description of Artificial Sequence: Synthetic oligonucleotide
  Sense strand starting at position 2822 of SEQ ID NO: 1243659
aacugcaggucucugauaa

SEQ ID NO: 1432199 - RNA, 19 nt, Artificial Sequence
  Description of Artificial Sequence: Synthetic oligonucleotide
  Antisense strand to SEQ ID NO: 1432198
uuaucagagaccugcaguu

SEQ ID NO: 1432200 - RNA, 19 nt, Artificial Sequence
  Description of Artificial Sequence: Synthetic oligonucleotide
  Sense strand starting at position 2823 of SEQ ID NO: 1243659
acugcaggucucugauaau

SEQ ID NO: 1432201 - RNA, 19 nt, Artificial Sequence
  Description of Artificial Sequence: Synthetic oligonucleotide
  Antisense strand to SEQ ID NO: 1432200
auuaucagagaccugcagu

SEQ ID NO: 1432202 - RNA, 19 nt, Artificial Sequence
  Description of Artificial Sequence: Synthetic oligonucleotide
  Sense strand starting at position 2873 of SEQ ID NO: 1243659
agagcuuggugguuaaagu

SEQ ID NO: 1432203 - RNA, 19 nt, Artificial Sequence
  Description of Artificial Sequence: Synthetic oligonucleotide
  Antisense strand to SEQ ID NO: 1432202
acuuuaaccaccaagcucu

SEQ ID NO: 1432204 - RNA, 19 nt, Artificial Sequence
  Description of Artificial Sequence: Synthetic oligonucleotide
  Sense strand starting at position 2999 of SEQ ID NO: 1243659
ggugaaucaccugaagucu

SEQ ID NO: 1432205 - RNA, 19 nt, Artificial Sequence
  Description of Artificial Sequence: Synthetic oligonucleotide
  Antisense strand to SEQ ID NO: 1432204
agacuucaggugauucacc

SEQ ID NO: 1432206 - RNA, 19 nt, Artificial Sequence
  Description of Artificial Sequence: Synthetic oligonucleotide
  Sense strand starting at position 3007 of SEQ ID NO: 1243659
accugaagucuagagcuca

SEQ ID NO: 1432207 - RNA, 19 nt, Artificial Sequence
  Description of Artificial Sequence: Synthetic oligonucleotide
  Antisense strand to SEQ ID NO: 1432206
ugagcucuagacuucaggu

SEQ ID NO: 1432208 - RNA, 19 nt, Artificial Sequence
  Description of Artificial Sequence: Synthetic oligonucleotide
  Sense strand starting at position 3300 of SEQ ID NO: 1243659
auuagauguugggauuuag

SEQ ID NO: 1432209 - RNA, 19 nt, Artificial Sequence
  Description of Artificial Sequence: Synthetic oligonucleotide
  Antisense strand to SEQ ID NO: 1432208
cuaaaucccaacaucuaau

SEQ ID NO: 1432210 - RNA, 19 nt, Artificial Sequence
  Description of Artificial Sequence: Synthetic oligonucleotide
  Sense strand starting at position 3374 of SEQ ID NO: 1243659
acuauacgauuaguuaaga

SEQ ID NO: 1432211 - RNA, 19 nt, Artificial Sequence
  Description of Artificial Sequence: Synthetic oligonucleotide
  Antisense strand to SEQ ID NO: 1432210
ucuuaacuaaucguauagu

SEQ ID NO: 1432212 - RNA, 19 nt, Artificial Sequence
  Description of Artificial Sequence: Synthetic oligonucleotide
  Sense strand starting at position 3415 of SEQ ID NO: 1243659
acaguaacauagcugaaua

SEQ ID NO: 1432213 - RNA, 19 nt, Artificial Sequence
  Description of Artificial Sequence: Synthetic oligonucleotide
  Antisense strand to SEQ ID NO: 1432212
uauucagcuauguuacugu

SEQ ID NO: 1432214 - RNA, 19 nt, Artificial Sequence
  Description of Artificial Sequence: Synthetic oligonucleotide
  Sense strand starting at position 3649 of SEQ ID NO: 1243659
ucaggauugcagggaaagu

SEQ ID NO: 1432215 - RNA, 19 nt, Artificial Sequence
  Description of Artificial Sequence: Synthetic oligonucleotide
  Antisense strand to SEQ ID NO: 1432214
acuuucccugcaauccuga

SEQ ID NO: 1432216 - RNA, 19 nt, Artificial Sequence
  Description of Artificial Sequence: Synthetic oligonucleotide
  Sense strand starting at position 3711 of SEQ ID NO: 1243659
aaggaaggaucugaauuag

SEQ ID NO: 1432217 - RNA, 19 nt, Artificial Sequence
  Description of Artificial Sequence: Synthetic oligonucleotide
  Antisense strand to SEQ ID NO: 1432216
cuaauucagauccuuccuu

SEQ ID NO: 1432218 - RNA, 19 nt, Artificial Sequence
  Description of Artificial Sequence: Synthetic oligonucleotide
  Sense strand starting at position 3915 of SEQ ID NO: 1243659
agaagaaucugagaacaga

SEQ ID NO: 1432219 - RNA, 19 nt, Artificial Sequence
  Description of Artificial Sequence: Synthetic oligonucleotide
  Antisense strand to SEQ ID NO: 1432218
ucuguucucagauucuucu

SEQ ID NO: 1432220 - RNA, 19 nt, Artificial Sequence
  Description of Artificial Sequence: Synthetic oligonucleotide
  Sense strand starting at position 3932 of SEQ ID NO: 1243659
gaauaagagugucagaaac

SEQ ID NO: 1432221 - RNA, 19 nt, Artificial Sequence
  Description of Artificial Sequence: Synthetic oligonucleotide
  Antisense strand to SEQ ID NO: 1432220
guuucugacacucuuauuc

SEQ ID NO: 1432222 - RNA, 19 nt, Artificial Sequence
  Description of Artificial Sequence: Synthetic oligonucleotide
  Sense strand starting at position 3962 of SEQ ID NO: 1243659
uuuaaaguuggagaagcuu

SEQ ID NO: 1432223 - RNA, 19 nt, Artificial Sequence
  Description of Artificial Sequence: Synthetic oligonucleotide
  Antisense strand to SEQ ID NO: 1432222
aagcuucuccaacuuuaaa

SEQ ID NO: 1432224 - RNA, 19 nt, Artificial Sequence
  Description of Artificial Sequence: Synthetic oligonucleotide
  Sense strand starting at position 35 of SEQ ID NO: 1243660
ucuccagucucugcaguaa

SEQ ID NO: 1432225 - RNA, 19 nt, Artificial Sequence
  Description of Artificial Sequence: Synthetic oligonucleotide
  Antisense strand to SEQ ID NO: 1432224
uuacugcagagacuggaga

SEQ ID NO: 1432226 - RNA, 19 nt, Artificial Sequence
  Description of Artificial Sequence: Synthetic oligonucleotide
  Sense strand starting at position 106 of SEQ ID NO: 1243660
cagccuucugccuagugau

SEQ ID NO: 1432227 - RNA, 19 nt, Artificial Sequence
  Description of Artificial Sequence: Synthetic oligonucleotide
  Antisense strand to SEQ ID NO: 1432226
aucacuaggcagaaggcug

SEQ ID NO: 1432228 - RNA, 19 nt, Artificial Sequence
  Description of Artificial Sequence: Synthetic oligonucleotide
  Sense strand starting at position 138 of SEQ ID NO: 1243660
ggaaguucuucccacauga

SEQ ID NO: 1432229 - RNA, 19 nt, Artificial Sequence
  Description of Artificial Sequence: Synthetic oligonucleotide
  Antisense strand to SEQ ID NO: 1432228
ucaugugggaagaacuucc

SEQ ID NO: 1432230 - RNA, 19 nt, Artificial Sequence
  Description of Artificial Sequence: Synthetic oligonucleotide
  Sense strand starting at position 151 of SEQ ID NO: 1243660
acaugaggcuugucuucuu

SEQ ID NO: 1432231 - RNA, 19 nt, Artificial Sequence
  Description of Artificial Sequence: Synthetic oligonucleotide
  Antisense strand to SEQ ID NO: 1432230
aagaagacaagccucaugu

SEQ ID NO: 1432232 - RNA, 19 nt, Artificial Sequence
  Description of Artificial Sequence: Synthetic oligonucleotide
  Sense strand starting at position 209 of SEQ ID NO: 1243660
gcuggcuggccaugucuua

SEQ ID NO: 1432233 - RNA, 19 nt, Artificial Sequence
  Description of Artificial Sequence: Synthetic oligonucleotide
  Antisense strand to SEQ ID NO: 1432232
uaagacauggccagccagc

SEQ ID NO: 1432234 - RNA, 19 nt, Artificial Sequence
  Description of Artificial Sequence: Synthetic oligonucleotide
  Sense strand starting at position 221 of SEQ ID NO: 1243660
ugucuuagcgcuuugcaca

SEQ ID NO: 1432235 - RNA, 19 nt, Artificial Sequence
  Description of Artificial Sequence: Synthetic oligonucleotide
  Antisense strand to SEQ ID NO: 1432234
ugugcaaagcgcuaagaca

SEQ ID NO: 1432236 - RNA, 19 nt, Artificial Sequence
  Description of Artificial Sequence: Synthetic oligonucleotide
  Sense strand starting at position 222 of SEQ ID NO: 1243660
gucuuagcgcuuugcacau

SEQ ID NO: 1432237 - RNA, 19 nt, Artificial Sequence
  Description of Artificial Sequence: Synthetic oligonucleotide
  Antisense strand to SEQ ID NO: 1432236
augugcaaagcgcuaagac

SEQ ID NO: 1432238 - RNA, 19 nt, Artificial Sequence
  Description of Artificial Sequence: Synthetic oligonucleotide
  Sense strand starting at position 234 of SEQ ID NO: 1243660
ugcacaucacccuggaauu

SEQ ID NO: 1432239 - RNA, 19 nt, Artificial Sequence
  Description of Artificial Sequence: Synthetic oligonucleotide
  Antisense strand to SEQ ID NO: 1432238
aauuccagggugaugugca

SEQ ID NO: 1432240 - RNA, 19 nt, Artificial Sequence
  Description of Artificial Sequence: Synthetic oligonucleotide
  Sense strand starting at position 377 of SEQ ID NO: 1243660
gagcacugccuuuaugaua

SEQ ID NO: 1432241 - RNA, 19 nt, Artificial Sequence
  Description of Artificial Sequence: Synthetic oligonucleotide
  Antisense strand to SEQ ID NO: 1432240
uaucauaaaggcagugcuc

SEQ ID NO: 1432242 - RNA, 19 nt, Artificial Sequence
  Description of Artificial Sequence: Synthetic oligonucleotide
  Sense strand starting at position 382 of SEQ ID NO: 1243660
cugccuuuaugauagauaa

SEQ ID NO: 1432243 - RNA, 19 nt, Artificial Sequence
  Description of Artificial Sequence: Synthetic oligonucleotide
  Antisense strand to SEQ ID NO: 1432242
uuaucuaucauaaaggcag

SEQ ID NO: 1432244 - RNA, 19 nt, Artificial Sequence
  Description of Artificial Sequence: Synthetic oligonucleotide
  Sense strand starting at position 418 of SEQ ID NO: 1243660
ggaguucagucugaggaga

SEQ ID NO: 1432245 - RNA, 19 nt, Artificial Sequence
  Description of Artificial Sequence: Synthetic oligonucleotide
  Antisense strand to SEQ ID NO: 1432244
ucuccucagacugaacucc

SEQ ID NO: 1432246 - RNA, 19 nt, Artificial Sequence
  Description of Artificial Sequence: Synthetic oligonucleotide
  Sense strand starting at position 420 of SEQ ID NO: 1243660
aguucagucugaggagaaa

SEQ ID NO: 1432247 - RNA, 19 nt, Artificial Sequence
  Description of Artificial Sequence: Synthetic oligonucleotide
  Antisense strand to SEQ ID NO: 1432246
uuucuccucagacugaacu

SEQ ID NO: 1432248 - RNA, 19 nt, Artificial Sequence
  Description of Artificial Sequence: Synthetic oligonucleotide
  Sense strand starting at position 509 of SEQ ID NO: 1243660
acaggucacucgcauauuu

SEQ ID NO: 1432249 - RNA, 19 nt, Artificial Sequence
  Description of Artificial Sequence: Synthetic oligonucleotide
  Antisense strand to SEQ ID NO: 1432248
aaauaugcgagugaccugu

SEQ ID NO: 1432250 - RNA, 19 nt, Artificial Sequence
  Description of Artificial Sequence: Synthetic oligonucleotide
  Sense strand starting at position 645 of SEQ ID NO: 1243660
ccaugcuucccuuggcgau

SEQ ID NO: 1432251 - RNA, 19 nt, Artificial Sequence
  Description of Artificial Sequence: Synthetic oligonucleotide
  Antisense strand to SEQ ID NO: 1432250
aucgccaagggaagcaugg

SEQ ID NO: 1432252 - RNA, 19 nt, Artificial Sequence
  Description of Artificial Sequence: Synthetic oligonucleotide
  Sense strand starting at position 1131 of SEQ ID NO: 1243660
gcuuccucugcgccuagaa

SEQ ID NO: 1432253 - RNA, 19 nt, Artificial Sequence
  Description of Artificial Sequence: Synthetic oligonucleotide
  Antisense strand to SEQ ID NO: 1432252
uucuaggcgcagaggaagc

SEQ ID NO: 1432254 - RNA, 19 nt, Artificial Sequence
  Description of Artificial Sequence: Synthetic oligonucleotide
  Sense strand starting at position 1436 of SEQ ID NO: 1243660
gggaggugucgccgcucaa

SEQ ID NO: 1432255 - RNA, 19 nt, Artificial Sequence
  Description of Artificial Sequence: Synthetic oligonucleotide
  Antisense strand to SEQ ID NO: 1432254
uugagcggcgacaccuccc

SEQ ID NO: 1432256 - RNA, 19 nt, Artificial Sequence
  Description of Artificial Sequence: Synthetic oligonucleotide
  Sense strand starting at position 1556 of SEQ ID NO: 1243660
uacucucaucuaggugagu

SEQ ID NO: 1432257 - RNA, 19 nt, Artificial Sequence
  Description of Artificial Sequence: Synthetic oligonucleotide
  Antisense strand to SEQ ID NO: 1432256
acucaccuagaugagagua

SEQ ID NO: 1432258 - RNA, 19 nt, Artificial Sequence
  Description of Artificial Sequence: Synthetic oligonucleotide
  Sense strand starting at position 2439 of SEQ ID NO: 1243660
uguaguccgccucgugaaa

SEQ ID NO: 1432259 - RNA, 19 nt, Artificial Sequence
  Description of Artificial Sequence: Synthetic oligonucleotide
  Antisense strand to SEQ ID NO: 1432258
uuucacgaggcggacuaca

SEQ ID NO: 1432260 - RNA, 19 nt, Artificial Sequence
  Description of Artificial Sequence: Synthetic oligonucleotide
  Sense strand starting at position 2660 of SEQ ID NO: 1243660
agguguggucuucagaauu

SEQ ID NO: 1432261 - RNA, 19 nt, Artificial Sequence
  Description of Artificial Sequence: Synthetic oligonucleotide
  Antisense strand to SEQ ID NO: 1432260
aauucugaagaccacaccu

SEQ ID NO: 1432262 - RNA, 19 nt, Artificial Sequence
  Description of Artificial Sequence: Synthetic oligonucleotide
  Sense strand starting at position 2725 of SEQ ID NO: 1243660
gagagcgucugauugggaa

SEQ ID NO: 1432263 - RNA, 19 nt, Artificial Sequence
  Description of Artificial Sequence: Synthetic oligonucleotide
  Antisense strand to SEQ ID NO: 1432262
uucccaaucagacgcucuc

SEQ ID NO: 1432264 - RNA, 19 nt, Artificial Sequence
  Description of Artificial Sequence: Synthetic oligonucleotide
  Sense strand starting at position 2739 of SEQ ID NO: 1243660
gggaacuccugagaaaggu

SEQ ID NO: 1432265 - RNA, 19 nt, Artificial Sequence
  Description of Artificial Sequence: Synthetic oligonucleotide
  Antisense strand to SEQ ID NO: 1432264
accuuucucaggaguuccc

SEQ ID NO: 1432266 - RNA, 19 nt, Artificial Sequence
  Description of Artificial Sequence: Synthetic oligonucleotide
  Sense strand starting at position 2809 of SEQ ID NO: 1243660
gaacauuucugaggagucu

SEQ ID NO: 1432267 - RNA, 19 nt, Artificial Sequence
  Description of Artificial Sequence: Synthetic oligonucleotide
  Antisense strand to SEQ ID NO: 1432266
agacuccucagaaauguuc

SEQ ID NO: 1432268 - RNA, 19 nt, Artificial Sequence
  Description of Artificial Sequence: Synthetic oligonucleotide
  Sense strand starting at position 2861 of SEQ ID NO: 1243660
ccacacaugucauuggaaa

SEQ ID NO: 1432269 - RNA, 19 nt, Artificial Sequence
  Description of Artificial Sequence: Synthetic oligonucleotide
  Antisense strand to SEQ ID NO: 1432268
uuuccaaugacaugugugg

SEQ ID NO: 1432270 - RNA, 19 nt, Artificial Sequence
  Description of Artificial Sequence: Synthetic oligonucleotide
  Sense strand starting at position 2887 of SEQ ID NO: 1243660
uccaguaacgcgggaaaga

SEQ ID NO: 1432271 - RNA, 19 nt, Artificial Sequence
  Description of Artificial Sequence: Synthetic oligonucleotide
  Antisense strand to SEQ ID NO: 1432270
ucuuucccgcguuacugga

SEQ ID NO: 1432272 - RNA, 19 nt, Artificial Sequence
  Description of Artificial Sequence: Synthetic oligonucleotide
  Sense strand starting at position 2888 of SEQ ID NO: 1243660
ccaguaacgcgggaaagau

SEQ ID NO: 1432273 - RNA, 19 nt, Artificial Sequence
  Description of Artificial Sequence: Synthetic oligonucleotide
  Antisense strand to SEQ ID NO: 1432272
aucuuucccgcguuacugg

SEQ ID NO: 1432274 - RNA, 19 nt, Artificial Sequence
  Description of Artificial Sequence: Synthetic oligonucleotide
  Sense strand starting at position 2897 of SEQ ID NO: 1243660
cgggaaagauggucccuuu

SEQ ID NO: 1432275 - RNA, 19 nt, Artificial Sequence
  Description of Artificial Sequence: Synthetic oligonucleotide
  Antisense strand to SEQ ID NO: 1432274
aaagggaccaucuuucccg

SEQ ID NO: 1432276 - RNA, 19 nt, Artificial Sequence
  Description of Artificial Sequence: Synthetic oligonucleotide
  Sense strand starting at position 3032 of SEQ ID NO: 1243660
gagacugucuccuuccuga

SEQ ID NO: 1432277 - RNA, 19 nt, Artificial Sequence
  Description of Artificial Sequence: Synthetic oligonucleotide
  Antisense strand to SEQ ID NO: 1432276
ucaggaaggagacagucuc

SEQ ID NO: 1432278 - RNA, 19 nt, Artificial Sequence
  Description of Artificial Sequence: Synthetic oligonucleotide
  Sense strand starting at position 3067 of SEQ ID NO: 1243660
gagguacuuccagaauggu

SEQ ID NO: 1432279 - RNA, 19 nt, Artificial Sequence
  Description of Artificial Sequence: Synthetic oligonucleotide
  Antisense strand to SEQ ID NO: 1432278
accauucuggaaguaccuc

SEQ ID NO: 1432280 - RNA, 19 nt, Artificial Sequence
  Description of Artificial Sequence: Synthetic oligonucleotide
  Sense strand starting at position 3076 of SEQ ID NO: 1243660
ccagaauggucccugcaga

SEQ ID NO: 1432281 - RNA, 19 nt, Artificial Sequence
  Description of Artificial Sequence: Synthetic oligonucleotide
  Antisense strand to SEQ ID NO: 1432280
ucugcagggaccauucugg

SEQ ID NO: 1432282 - RNA, 19 nt, Artificial Sequence
  Description of Artificial Sequence: Synthetic oligonucleotide
  Sense strand starting at position 3077 of SEQ ID NO: 1243660
cagaauggucccugcagag

SEQ ID NO: 1432283 - RNA, 19 nt, Artificial Sequence
  Description of Artificial Sequence: Synthetic oligonucleotide
  Antisense strand to SEQ ID NO: 1432282
cucugcagggaccauucug

SEQ ID NO: 1432284 - RNA, 19 nt, Artificial Sequence
  Description of Artificial Sequence: Synthetic oligonucleotide
  Sense strand starting at position 3326 of SEQ ID NO: 1243660
gauaaugacugcccuggaa

SEQ ID NO: 1432285 - RNA, 19 nt, Artificial Sequence
  Description of Artificial Sequence: Synthetic oligonucleotide
  Antisense strand to SEQ ID NO: 1432284
uuccagggcagucauuauc

SEQ ID NO: 1432286 - RNA, 19 nt, Artificial Sequence
  Description of Artificial Sequence: Synthetic oligonucleotide
  Sense strand starting at position 3525 of SEQ ID NO: 1243660
gguuucuuuguguggucuu

SEQ ID NO: 1432287 - RNA, 19 nt, Artificial Sequence
  Description of Artificial Sequence: Synthetic oligonucleotide
  Antisense strand to SEQ ID NO: 1432286
aagaccacacaaagaaacc

SEQ ID NO: 1432288 - RNA, 19 nt, Artificial Sequence
  Description of Artificial Sequence: Synthetic oligonucleotide
  Sense strand starting at position 3768 of SEQ ID NO: 1243660
ggagcaugccugugcauuu

SEQ ID NO: 1432289 - RNA, 19 nt, Artificial Sequence
  Description of Artificial Sequence: Synthetic oligonucleotide
  Antisense strand to SEQ ID NO: 1432288
aaaugcacaggcaugcucc

SEQ ID NO: 1432290 - RNA, 19 nt, Artificial Sequence
  Description of Artificial Sequence: Synthetic oligonucleotide
  Sense strand starting at position 3775 of SEQ ID NO: 1243660
gccugugcauuuccuuauu

SEQ ID NO: 1432291 - RNA, 19 nt, Artificial Sequence
  Description of Artificial Sequence: Synthetic oligonucleotide
  Antisense strand to SEQ ID NO: 1432290
aauaaggaaaugcacaggc

SEQ ID NO: 1432292 - RNA, 19 nt, Artificial Sequence
  Description of Artificial Sequence: Synthetic oligonucleotide
  Sense strand starting at position 3815 of SEQ ID NO: 1243660
gugugauuccacuguagca

SEQ ID NO: 1432293 - RNA, 19 nt, Artificial Sequence
  Description of Artificial Sequence: Synthetic oligonucleotide
  Antisense strand to SEQ ID NO: 1432292
ugcuacaguggaaucacac

SEQ ID NO: 1432294 - RNA, 19 nt, Artificial Sequence
  Description of Artificial Sequence: Synthetic oligonucleotide
  Sense strand starting at position 3817 of SEQ ID NO: 1243660
gugauuccacuguagcagu

SEQ ID NO: 1432295 - RNA, 19 nt, Artificial Sequence
  Description of Artificial Sequence: Synthetic oligonucleotide
  Antisense strand to SEQ ID NO: 1432294
acugcuacaguggaaucac

SEQ ID NO: 1432296 - RNA, 19 nt, Artificial Sequence
  Description of Artificial Sequence: Synthetic oligonucleotide
  Sense strand starting at position 3902 of SEQ ID NO: 1243660
cccagaaguuuggcuguga

SEQ ID NO: 1432297 - RNA, 19 nt, Artificial Sequence
  Description of Artificial Sequence: Synthetic oligonucleotide
  Antisense strand to SEQ ID NO: 1432296
ucacagccaaacuucuggg

SEQ ID NO: 1432298 - RNA, 19 nt, Artificial Sequence
  Description of Artificial Sequence: Synthetic oligonucleotide
  Sense strand starting at position 3932 of SEQ ID NO: 1243660
gaaacaaaguuuggacgau

SEQ ID NO: 1432299 - RNA, 19 nt, Artificial Sequence
  Description of Artificial Sequence: Synthetic oligonucleotide
  Antisense strand to SEQ ID NO: 1432298
aucguccaaacuuuguuuc

SEQ ID NO: 1432300 - RNA, 19 nt, Artificial Sequence
  Description of Artificial Sequence: Synthetic oligonucleotide
  Sense strand starting at position 3972 of SEQ ID NO: 1243660
ccagguagucucugagcca

SEQ ID NO: 1432301 - RNA, 19 nt, Artificial Sequence
  Description of Artificial Sequence: Synthetic oligonucleotide
  Antisense strand to SEQ ID NO: 1432300
uggcucagagacuaccugg

SEQ ID NO: 1432302 - RNA, 19 nt, Artificial Sequence
  Description of Artificial Sequence: Synthetic oligonucleotide
  Sense strand starting at position 3973 of SEQ ID NO: 1243660
cagguagucucugagccaa

SEQ ID NO: 1432303 - RNA, 19 nt, Artificial Sequence
  Description of Artificial Sequence: Synthetic oligonucleotide
  Antisense strand to SEQ ID NO: 1432302
uuggcucagagacuaccug

SEQ ID NO: 1432304 - RNA, 19 nt, Artificial Sequence
  Description of Artificial Sequence: Synthetic oligonucleotide
  Sense strand starting at position 126 of SEQ ID NO: 1243661
caaguuauucucugugguu

SEQ ID NO: 1432305 - RNA, 19 nt, Artificial Sequence
  Description of Artificial Sequence: Synthetic oligonucleotide
  Antisense strand to SEQ ID NO: 1432304
aaccacagagaauaacuug

SEQ ID NO: 1432306 - RNA, 19 nt, Artificial Sequence
  Description of Artificial Sequence: Synthetic oligonucleotide
  Sense strand starting at position 127 of SEQ ID NO: 1243661
aaguuauucucugugguug

SEQ ID NO: 1432307 - RNA, 19 nt, Artificial Sequence
  Description of Artificial Sequence: Synthetic oligonucleotide
  Antisense strand to SEQ ID NO: 1432306
caaccacagagaauaacuu

SEQ ID NO: 1432308 - RNA, 19 nt, Artificial Sequence
  Description of Artificial Sequence: Synthetic oligonucleotide
  Sense strand starting at position 128 of SEQ ID NO: 1243661
aguuauucucugugguuga

SEQ ID NO: 1432309 - RNA, 19 nt, Artificial Sequence
  Description of Artificial Sequence: Synthetic oligonucleotide
  Antisense strand to SEQ ID NO: 1432308
ucaaccacagagaauaacu

SEQ ID NO: 1432310 - RNA, 19 nt, Artificial Sequence
  Description of Artificial Sequence: Synthetic oligonucleotide
  Sense strand starting at position 141 of SEQ ID NO: 1243661
gguugagccucucuccauu

SEQ ID NO: 1432311 - RNA, 19 nt, Artificial Sequence
  Description of Artificial Sequence: Synthetic oligonucleotide
  Antisense strand to SEQ ID NO: 1432310
aauggagagaggcucaacc

SEQ ID NO: 1432312 - RNA, 19 nt, Artificial Sequence
  Description of Artificial Sequence: Synthetic oligonucleotide
  Sense strand starting at position 512 of SEQ ID NO: 1243661
ggcuaagcauuaccugaau

SEQ ID NO: 1432313 - RNA, 19 nt, Artificial Sequence
  Description of Artificial Sequence: Synthetic oligonucleotide
  Antisense strand to SEQ ID NO: 1432312
auucagguaaugcuuagcc

SEQ ID NO: 1432314 - RNA, 19 nt, Artificial Sequence
  Description of Artificial Sequence: Synthetic oligonucleotide
  Sense strand starting at position 601 of SEQ ID NO: 1243661
gcaacaucuuaagaugaga

SEQ ID NO: 1432315 - RNA, 19 nt, Artificial Sequence
  Description of Artificial Sequence: Synthetic oligonucleotide
  Antisense strand to SEQ ID NO: 1432314
ucucaucuuaagauguugc

SEQ ID NO: 1432316 - RNA, 19 nt, Artificial Sequence
  Description of Artificial Sequence: Synthetic oligonucleotide
  Sense strand starting at position 623 of SEQ ID NO: 1243661
cuuauuuaauugggaagaa

SEQ ID NO: 1432317 - RNA, 19 nt, Artificial Sequence
  Description of Artificial Sequence: Synthetic oligonucleotide
  Antisense strand to SEQ ID NO: 1432316
uucuucccaauuaaauaag

SEQ ID NO: 1432318 - RNA, 19 nt, Artificial Sequence
  Description of Artificial Sequence: Synthetic oligonucleotide
  Sense strand starting at position 663 of SEQ ID NO: 1243661
uaaagucuugggugacauu

SEQ ID NO: 1432319 - RNA, 19 nt, Artificial Sequence
  Description of Artificial Sequence: Synthetic oligonucleotide
  Antisense strand to SEQ ID NO: 1432318
aaugucacccaagacuuua

SEQ ID NO: 1432320 - RNA, 19 nt, Artificial Sequence
  Description of Artificial Sequence: Synthetic oligonucleotide
  Sense strand starting at position 1088 of SEQ ID NO: 1243661
gcagcaaaucgguugcagu

SEQ ID NO: 1432321 - RNA, 19 nt, Artificial Sequence
  Description of Artificial Sequence: Synthetic oligonucleotide
  Antisense strand to SEQ ID NO: 1432320
acugcaaccgauuugcugc

SEQ ID NO: 1432322 - RNA, 19 nt, Artificial Sequence
  Description of Artificial Sequence: Synthetic oligonucleotide
  Sense strand starting at position 1095 of SEQ ID NO: 1243661
aucgguugcagugaaacaa

SEQ ID NO: 1432323 - RNA, 19 nt, Artificial Sequence
  Description of Artificial Sequence: Synthetic oligonucleotide
  Antisense strand to SEQ ID NO: 1432322
uuguuucacugcaaccgau

SEQ ID NO: 1432324 - RNA, 19 nt, Artificial Sequence
  Description of Artificial Sequence: Synthetic oligonucleotide
  Sense strand starting at position 1127 of SEQ ID NO: 1243661
uggugaugcaaauguguuu

SEQ ID NO: 1432325 - RNA, 19 nt, Artificial Sequence
  Description of Artificial Sequence: Synthetic oligonucleotide
  Antisense strand to SEQ ID NO: 1432324
aaacacauuugcaucacca

SEQ ID NO: 1432326 - RNA, 19 nt, Artificial Sequence
  Description of Artificial Sequence: Synthetic oligonucleotide
  Sense strand starting at position 1152 of SEQ ID NO: 1243661
ccuggucuuggcuaaggaa

SEQ ID NO: 1432327 - RNA, 19 nt, Artificial Sequence
  Description of Artificial Sequence: Synthetic oligonucleotide
  Antisense strand to SEQ ID NO: 1432326
uuccuuagccaagaccagg

SEQ ID NO: 1432328 - RNA, 19 nt, Artificial Sequence
  Description of Artificial Sequence: Synthetic oligonucleotide
  Sense strand starting at position 1161 of SEQ ID NO: 1243661
ggcuaaggaaaucgugcua

SEQ ID NO: 1432329 - RNA, 19 nt, Artificial Sequence
  Description of Artificial Sequence: Synthetic oligonucleotide
  Antisense strand to SEQ ID NO: 1432328
uagcacgauuuccuuagcc

SEQ ID NO: 1432330 - RNA, 19 nt, Artificial Sequence
  Description of Artificial Sequence: Synthetic oligonucleotide
  Sense strand starting at position 1226 of SEQ ID NO: 1243661
caagaugcguucuccagaa

SEQ ID NO: 1432331 - RNA, 19 nt, Artificial Sequence
  Description of Artificial Sequence: Synthetic oligonucleotide
  Antisense strand to SEQ ID NO: 1432330
uucuggagaacgcaucuug

SEQ ID NO: 1432332 - RNA, 19 nt, Artificial Sequence
  Description of Artificial Sequence: Synthetic oligonucleotide
  Sense strand starting at position 1292 of SEQ ID NO: 1243661
cgcauagucgcugagaauc

SEQ ID NO: 1432333 - RNA, 19 nt, Artificial Sequence
  Description of Artificial Sequence: Synthetic oligonucleotide
  Antisense strand to SEQ ID NO: 1432332
gauucucagcgacuaugcg

SEQ ID NO: 1432334 - RNA, 19 nt, Artificial Sequence
  Description of Artificial Sequence: Synthetic oligonucleotide
  Sense strand starting at position 2064 of SEQ ID NO: 1243661
cuggcuguuuauguaacua

SEQ ID NO: 1432335 - RNA, 19 nt, Artificial Sequence
  Description of Artificial Sequence: Synthetic oligonucleotide
  Antisense strand to SEQ ID NO: 1432334
uaguuacauaaacagccag

SEQ ID NO: 1432336 - RNA, 19 nt, Artificial Sequence
  Description of Artificial Sequence: Synthetic oligonucleotide
  Sense strand starting at position 2240 of SEQ ID NO: 1243661
aaauaauugguggguucuu

SEQ ID NO: 1432337 - RNA, 19 nt, Artificial Sequence
  Description of Artificial Sequence: Synthetic oligonucleotide
  Antisense strand to SEQ ID NO: 1432336
aagaacccaccaauuauuu

SEQ ID NO: 1432338 - RNA, 19 nt, Artificial Sequence
  Description of Artificial Sequence: Synthetic oligonucleotide
  Sense strand starting at position 2526 of SEQ ID NO: 1243661
uuuauauugugcucacagu

SEQ ID NO: 1432339 - RNA, 19 nt, Artificial Sequence
  Description of Artificial Sequence: Synthetic oligonucleotide
  Antisense strand to SEQ ID NO: 1432338
acugugagcacaauauaaa

SEQ ID NO: 1432340 - RNA, 19 nt, Artificial Sequence
  Description of Artificial Sequence: Synthetic oligonucleotide
  Sense strand starting at position 2527 of SEQ ID NO: 1243661
uuauauugugcucacaguu

SEQ ID NO: 1432341 - RNA, 19 nt, Artificial Sequence
  Description of Artificial Sequence: Synthetic oligonucleotide
  Antisense strand to SEQ ID NO: 1432340
aacugugagcacaauauaa

SEQ ID NO: 1432342 - RNA, 19 nt, Artificial Sequence
  Description of Artificial Sequence: Synthetic oligonucleotide
  Sense strand starting at position 2543 of SEQ ID NO: 1243661
guuuaugaacuguaauuac

SEQ ID NO: 1432343 - RNA, 19 nt, Artificial Sequence
  Description of Artificial Sequence: Synthetic oligonucleotide
  Antisense strand to SEQ ID NO: 1432342
guaauuacaguucauaaac

SEQ ID NO: 1432344 - RNA, 19 nt, Artificial Sequence
  Description of Artificial Sequence: Synthetic oligonucleotide
  Sense strand starting at position 2553 of SEQ ID NO: 1243661
uguaauuacugcuuacaga

SEQ ID NO: 1432345 - RNA, 19 nt, Artificial Sequence
  Description of Artificial Sequence: Synthetic oligonucleotide
  Antisense strand to SEQ ID NO: 1432344
ucuguaagcaguaauuaca

SEQ ID NO: 1432346 - RNA, 19 nt, Artificial Sequence
  Description of Artificial Sequence: Synthetic oligonucleotide
  Sense strand starting at position 2561 of SEQ ID NO: 1243661
cugcuuacagauuguaauu

SEQ ID NO: 1432347 - RNA, 19 nt, Artificial Sequence
  Description of Artificial Sequence: Synthetic oligonucleotide
  Antisense strand to SEQ ID NO: 1432346
aauuacaaucuguaagcag

SEQ ID NO: 1432348 - RNA, 19 nt, Artificial Sequence
  Description of Artificial Sequence: Synthetic oligonucleotide
  Sense strand starting at position 2657 of SEQ ID NO: 1243661
gauuccaagugcucuggga

SEQ ID NO: 1432349 - RNA, 19 nt, Artificial Sequence
  Description of Artificial Sequence: Synthetic oligonucleotide
  Antisense strand to SEQ ID NO: 1432348
ucccagagcacuuggaauc

SEQ ID NO: 1432350 - RNA, 19 nt, Artificial Sequence
  Description of Artificial Sequence: Synthetic oligonucleotide
  Sense strand starting at position 2661 of SEQ ID NO: 1243661
ccaagugcucugggaagag

SEQ ID NO: 1432351 - RNA, 19 nt, Artificial Sequence
  Description of Artificial Sequence: Synthetic oligonucleotide
  Antisense strand to SEQ ID NO: 1432350
cucuucccagagcacuugg

SEQ ID NO: 1432352 - RNA, 19 nt, Artificial Sequence
  Description of Artificial Sequence: Synthetic oligonucleotide
  Sense strand starting at position 2671 of SEQ ID NO: 1243661
ugggaagagcuguggugua

SEQ ID NO: 1432353 - RNA, 19 nt, Artificial Sequence
  Description of Artificial Sequence: Synthetic oligonucleotide
  Antisense strand to SEQ ID NO: 1432352
uacaccacagcucuuccca

SEQ ID NO: 1432354 - RNA, 19 nt, Artificial Sequence
  Description of Artificial Sequence: Synthetic oligonucleotide
  Sense strand starting at position 2678 of SEQ ID NO: 1243661
agcugugguguacauguaa

SEQ ID NO: 1432355 - RNA, 19 nt, Artificial Sequence
  Description of Artificial Sequence: Synthetic oligonucleotide
  Antisense strand to SEQ ID NO: 1432354
uuacauguacaccacagcu

SEQ ID NO: 1432356 - RNA, 19 nt, Artificial Sequence
  Description of Artificial Sequence: Synthetic oligonucleotide
  Sense strand starting at position 2710 of SEQ ID NO: 1243661
ucacuucuugcccgaucua

SEQ ID NO: 1432357 - RNA, 19 nt, Artificial Sequence
  Description of Artificial Sequence: Synthetic oligonucleotide
  Antisense strand to SEQ ID NO: 1432356
uagaucgggcaagaaguga

SEQ ID NO: 1432358 - RNA, 19 nt, Artificial Sequence
  Description of Artificial Sequence: Synthetic oligonucleotide
  Sense strand starting at position 2719 of SEQ ID NO: 1243661
gcccgaucuaucuaaugag

SEQ ID NO: 1432359 - RNA, 19 nt, Artificial Sequence
  Description of Artificial Sequence: Synthetic oligonucleotide
  Antisense strand to SEQ ID NO: 1432358
cucauuagauagaucgggc

SEQ ID NO: 1432360 - RNA, 19 nt, Artificial Sequence
  Description of Artificial Sequence: Synthetic oligonucleotide
  Sense strand starting at position 2860 of SEQ ID NO: 1243661
ggucaagauuaaggaaaua

SEQ ID NO: 1432361 - RNA, 19 nt, Artificial Sequence
  Description of Artificial Sequence: Synthetic oligonucleotide
  Antisense strand to SEQ ID NO: 1432360
uauuuccuuaaucuugacc

SEQ ID NO: 1432362 - RNA, 19 nt, Artificial Sequence
  Description of Artificial Sequence: Synthetic oligonucleotide
  Sense strand starting at position 3002 of SEQ ID NO: 1243661
cuugcuacaguuuaagaaa

SEQ ID NO: 1432363 - RNA, 19 nt, Artificial Sequence
  Description of Artificial Sequence: Synthetic oligonucleotide
  Antisense strand to SEQ ID NO: 1432362
uuucuuaaacuguagcaag

SEQ ID NO: 1432364 - RNA, 19 nt, Artificial Sequence
  Description of Artificial Sequence: Synthetic oligonucleotide
  Sense strand starting at position 3022 of SEQ ID NO: 1243661
accaaugucuguuuguuua

SEQ ID NO: 1432365 - RNA, 19 nt, Artificial Sequence
  Description of Artificial Sequence: Synthetic oligonucleotide
  Antisense strand to SEQ ID NO: 1432364
uaaacaaacagacauuggu

SEQ ID NO: 1432366 - RNA, 19 nt, Artificial Sequence
  Description of Artificial Sequence: Synthetic oligonucleotide
  Sense strand starting at position 3025 of SEQ ID NO: 1243661
aaugucuguuuguuuagua

SEQ ID NO: 1432367 - RNA, 19 nt, Artificial Sequence
  Description of Artificial Sequence: Synthetic oligonucleotide
  Antisense strand to SEQ ID NO: 1432366
uacuaaacaaacagacauu

SEQ ID NO: 1432368 - RNA, 19 nt, Artificial Sequence
  Description of Artificial Sequence: Synthetic oligonucleotide
  Sense strand starting at position 3029 of SEQ ID NO: 1243661
ucuguuuguuuaguaugau

SEQ ID NO: 1432369 - RNA, 19 nt, Artificial Sequence
  Description of Artificial Sequence: Synthetic oligonucleotide
  Antisense strand to SEQ ID NO: 1432368
aucauacuaaacaaacaga

SEQ ID NO: 1432370 - RNA, 19 nt, Artificial Sequence
  Description of Artificial Sequence: Synthetic oligonucleotide
  Sense strand starting at position 3032 of SEQ ID NO: 1243661
guuuguuuaguaugauaca

SEQ ID NO: 1432371 - RNA, 19 nt, Artificial Sequence
  Description of Artificial Sequence: Synthetic oligonucleotide
  Antisense strand to SEQ ID NO: 1432370
uguaucauacuaaacaaac

SEQ ID NO: 1432372 - RNA, 19 nt, Artificial Sequence
  Description of Artificial Sequence: Synthetic oligonucleotide
  Sense strand starting at position 3077 of SEQ ID NO: 1243661
ccagguggugcugaauaua

SEQ ID NO: 1432373 - RNA, 19 nt, Artificial Sequence
  Description of Artificial Sequence: Synthetic oligonucleotide
  Antisense strand to SEQ ID NO: 1432372
uauauucagcaccaccugg

SEQ ID NO: 1432374 - RNA, 19 nt, Artificial Sequence
  Description of Artificial Sequence: Synthetic oligonucleotide
  Sense strand starting at position 3080 of SEQ ID NO: 1243661
gguggugcugaauauaaac

SEQ ID NO: 1432375 - RNA, 19 nt, Artificial Sequence
  Description of Artificial Sequence: Synthetic oligonucleotide
  Antisense strand to SEQ ID NO: 1432374
guuuauauucagcaccacc

SEQ ID NO: 1432376 - RNA, 19 nt, Artificial Sequence
  Description of Artificial Sequence: Synthetic oligonucleotide
  Sense strand starting at position 3214 of SEQ ID NO: 1243661
gaaacugauguguauggca

SEQ ID NO: 1432377 - RNA, 19 nt, Artificial Sequence
  Description of Artificial Sequence: Synthetic oligonucleotide
  Antisense strand to SEQ ID NO: 1432376
ugccauacacaucaguuuc

SEQ ID NO: 1432378 - RNA, 19 nt, Artificial Sequence
  Description of Artificial Sequence: Synthetic oligonucleotide
  Sense strand starting at position 3216 of SEQ ID NO: 1243661
aacugauguguauggcacu

SEQ ID NO: 1432379 - RNA, 19 nt, Artificial Sequence
  Description of Artificial Sequence: Synthetic oligonucleotide
  Antisense strand to SEQ ID NO: 1432378
agugccauacacaucaguu

SEQ ID NO: 1432380 - RNA, 19 nt, Artificial Sequence
  Description of Artificial Sequence: Synthetic oligonucleotide
  Sense strand starting at position 3222 of SEQ ID NO: 1243661
uguguauggcacuggauuu

SEQ ID NO: 1432381 - RNA, 19 nt, Artificial Sequence
  Description of Artificial Sequence: Synthetic oligonucleotide
  Antisense strand to SEQ ID NO: 1432380
aaauccagugccauacaca

SEQ ID NO: 1432382 - RNA, 19 nt, Artificial Sequence
  Description of Artificial Sequence: Synthetic oligonucleotide
  Sense strand starting at position 3708 of SEQ ID NO: 1243661
ggaggaguuucgcucucau

SEQ ID NO: 1432383 - RNA, 19 nt, Artificial Sequence
  Description of Artificial Sequence: Synthetic oligonucleotide
  Antisense strand to SEQ ID NO: 1432382
augagagcgaaacuccucc

SEQ ID NO: 1432384 - RNA, 19 nt, Artificial Sequence
  Description of Artificial Sequence: Synthetic oligonucleotide
  Sense strand starting at position 4 of SEQ ID NO: 1243662
cccucagaauuaggaagaa

SEQ ID NO: 1432385 - RNA, 19 nt, Artificial Sequence
  Description of Artificial Sequence: Synthetic oligonucleotide
  Antisense strand to SEQ ID NO: 1432384
uucuuccuaauucugaggg

SEQ ID NO: 1432386 - RNA, 19 nt, Artificial Sequence
  Description of Artificial Sequence: Synthetic oligonucleotide
  Sense strand starting at position 243 of SEQ ID NO: 1243662
ccacuagagcugugguguu

SEQ ID NO: 1432387 - RNA, 19 nt, Artificial Sequence
  Description of Artificial Sequence: Synthetic oligonucleotide
  Antisense strand to SEQ ID NO: 1432386
aacaccacagcucuagugg

SEQ ID NO: 1432388 - RNA, 19 nt, Artificial Sequence
  Description of Artificial Sequence: Synthetic oligonucleotide
  Sense strand starting at position 291 of SEQ ID NO: 1243662
ucagcuugaccugggagau

SEQ ID NO: 1432389 - RNA, 19 nt, Artificial Sequence
  Description of Artificial Sequence: Synthetic oligonucleotide
  Antisense strand to SEQ ID NO: 1432388
aucucccaggucaagcuga

SEQ ID NO: 1432390 - RNA, 19 nt, Artificial Sequence
  Description of Artificial Sequence: Synthetic oligonucleotide
  Sense strand starting at position 292 of SEQ ID NO: 1243662
cagcuugaccugggagauu

SEQ ID NO: 1432391 - RNA, 19 nt, Artificial Sequence
  Description of Artificial Sequence: Synthetic oligonucleotide
  Antisense strand to SEQ ID NO: 1432390
aaucucccaggucaagcug

SEQ ID NO: 1432392 - RNA, 19 nt, Artificial Sequence
  Description of Artificial Sequence: Synthetic oligonucleotide
  Sense strand starting at position 2011 of SEQ ID NO: 1243662
uccaguuacugacaucaag

SEQ ID NO: 1432393 - RNA, 19 nt, Artificial Sequence
  Description of Artificial Sequence: Synthetic oligonucleotide
  Antisense strand to SEQ ID NO: 1432392
cuugaugucaguaacugga

SEQ ID NO: 1432394 - RNA, 19 nt, Artificial Sequence
  Description of Artificial Sequence: Synthetic oligonucleotide
  Sense strand starting at position 2033 of SEQ ID NO: 1243662
ggguuuauauucgcuagga

SEQ ID NO: 1432395 - RNA, 19 nt, Artificial Sequence
  Description of Artificial Sequence: Synthetic oligonucleotide
  Antisense strand to SEQ ID NO: 1432394
uccuagcgaauauaaaccc

SEQ ID NO: 1432396 - RNA, 19 nt, Artificial Sequence
  Description of Artificial Sequence: Synthetic oligonucleotide
  Sense strand starting at position 2034 of SEQ ID NO: 1243662
gguuuauauucgcuaggau

SEQ ID NO: 1432397 - RNA, 19 nt, Artificial Sequence
  Description of Artificial Sequence: Synthetic oligonucleotide
  Antisense strand to SEQ ID NO: 1432396
auccuagcgaauauaaacc

SEQ ID NO: 1432398 - RNA, 19 nt, Artificial Sequence
  Description of Artificial Sequence: Synthetic oligonucleotide
  Sense strand starting at position 2035 of SEQ ID NO: 1243662
guuuauauucgcuaggaug

SEQ ID NO: 1432399 - RNA, 19 nt, Artificial Sequence
  Description of Artificial Sequence: Synthetic oligonucleotide
  Antisense strand to SEQ ID NO: 1432398
cauccuagcgaauauaaac

SEQ ID NO: 1432400 - RNA, 19 nt, Artificial Sequence
  Description of Artificial Sequence: Synthetic oligonucleotide
  Sense strand starting at position 2037 of SEQ ID NO: 1243662
uuauauucgcuaggaugga

SEQ ID NO: 1432401 - RNA, 19 nt, Artificial Sequence
  Description of Artificial Sequence: Synthetic oligonucleotide
  Antisense strand to SEQ ID NO: 1432400
uccauccuagcgaauauaa

SEQ ID NO: 1432402 - RNA, 19 nt, Artificial Sequence
  Description of Artificial Sequence: Synthetic oligonucleotide
  Sense strand starting at position 2038 of SEQ ID NO: 1243662
uauauucgcuaggauggau

SEQ ID NO: 1432403 - RNA, 19 nt, Artificial Sequence
  Description of Artificial Sequence: Synthetic oligonucleotide
  Antisense strand to SEQ ID NO: 1432402
auccauccuagcgaauaua

SEQ ID NO: 1432404 - RNA, 19 nt, Artificial Sequence
  Description of Artificial Sequence: Synthetic oligonucleotide
  Sense strand starting at position 2080 of SEQ ID NO: 1243662
auggguugggcaggaaauu

SEQ ID NO: 1432405 - RNA, 19 nt, Artificial Sequence
  Description of Artificial Sequence: Synthetic oligonucleotide
  Antisense strand to SEQ ID NO: 1432404
aauuuccugcccaacccau

SEQ ID NO: 1432406 - RNA, 19 nt, Artificial Sequence
  Description of Artificial Sequence: Synthetic oligonucleotide
  Sense strand starting at position 2089 of SEQ ID NO: 1243662
gcaggaaauuucugaccuu

SEQ ID NO: 1432407 - RNA, 19 nt, Artificial Sequence
  Description of Artificial Sequence: Synthetic oligonucleotide
  Antisense strand to SEQ ID NO: 1432406
aaggucagaaauuuccugc

SEQ ID NO: 1432408 - RNA, 19 nt, Artificial Sequence
  Description of Artificial Sequence: Synthetic oligonucleotide
  Sense strand starting at position 2111 of SEQ ID NO: 1243662
uuauguaauucuguuccaa

SEQ ID NO: 1432409 - RNA, 19 nt, Artificial Sequence
  Description of Artificial Sequence: Synthetic oligonucleotide
  Antisense strand to SEQ ID NO: 1432408
uuggaacagaauuacauaa

SEQ ID NO: 1432410 - RNA, 19 nt, Artificial Sequence
  Description of Artificial Sequence: Synthetic oligonucleotide
  Sense strand starting at position 2113 of SEQ ID NO: 1243662
auguaauucuguuccaauu

SEQ ID NO: 1432411 - RNA, 19 nt, Artificial Sequence
  Description of Artificial Sequence: Synthetic oligonucleotide
  Antisense strand to SEQ ID NO: 1432410
aauuggaacagaauuacau

SEQ ID NO: 1432412 - RNA, 19 nt, Artificial Sequence
  Description of Artificial Sequence: Synthetic oligonucleotide
  Sense strand starting at position 2260 of SEQ ID NO: 1243662
cuggguuaacgaugcuaac

SEQ ID NO: 1432413 - RNA, 19 nt, Artificial Sequence
  Description of Artificial Sequence: Synthetic oligonucleotide
  Antisense strand to SEQ ID NO: 1432412
guuagcaucguuaacccag

SEQ ID NO: 1432414 - RNA, 19 nt, Artificial Sequence
  Description of Artificial Sequence: Synthetic oligonucleotide
  Sense strand starting at position 2470 of SEQ ID NO: 1243662
agcccuugauuuguaguca

SEQ ID NO: 1432415 - RNA, 19 nt, Artificial Sequence
  Description of Artificial Sequence: Synthetic oligonucleotide
  Antisense strand to SEQ ID NO: 1432414
ugacuacaaaucaagggcu

SEQ ID NO: 1432416 - RNA, 19 nt, Artificial Sequence
  Description of Artificial Sequence: Synthetic oligonucleotide
  Sense strand starting at position 2516 of SEQ ID NO: 1243662
agggccugggcuuaguaau

SEQ ID NO: 1432417 - RNA, 19 nt, Artificial Sequence
  Description of Artificial Sequence: Synthetic oligonucleotide
  Antisense strand to SEQ ID NO: 1432416
auuacuaagcccaggcccu

SEQ ID NO: 1432418 - RNA, 19 nt, Artificial Sequence
  Description of Artificial Sequence: Synthetic oligonucleotide
  Sense strand starting at position 2522 of SEQ ID NO: 1243662
ugggcuuaguaaucagguu

SEQ ID NO: 1432419 - RNA, 19 nt, Artificial Sequence
  Description of Artificial Sequence: Synthetic oligonucleotide
  Antisense strand to SEQ ID NO: 1432418
aaccugauuacuaagccca

SEQ ID NO: 1432420 - RNA, 19 nt, Artificial Sequence
  Description of Artificial Sequence: Synthetic oligonucleotide
  Sense strand starting at position 2523 of SEQ ID NO: 1243662
gggcuuaguaaucagguuu

SEQ ID NO: 1432421 - RNA, 19 nt, Artificial Sequence
  Description of Artificial Sequence: Synthetic oligonucleotide
  Antisense strand to SEQ ID NO: 1432420
aaaccugauuacuaagccc

SEQ ID NO: 1432422 - RNA, 19 nt, Artificial Sequence
  Description of Artificial Sequence: Synthetic oligonucleotide
  Sense strand starting at position 2555 of SEQ ID NO: 1243662
aguucccucagcuguguaa

SEQ ID NO: 1432423 - RNA, 19 nt, Artificial Sequence
  Description of Artificial Sequence: Synthetic oligonucleotide
  Antisense strand to SEQ ID NO: 1432422
uuacacagcugagggaacu

SEQ ID NO: 1432424 - RNA, 19 nt, Artificial Sequence
  Description of Artificial Sequence: Synthetic oligonucleotide
  Sense strand starting at position 2567 of SEQ ID NO: 1243662
uguguaaccuuagcggaaa

SEQ ID NO: 1432425 - RNA, 19 nt, Artificial Sequence
  Description of Artificial Sequence: Synthetic oligonucleotide
  Antisense strand to SEQ ID NO: 1432424
uuuccgcuaagguuacaca

SEQ ID NO: 1432426 - RNA, 19 nt, Artificial Sequence
  Description of Artificial Sequence: Synthetic oligonucleotide
  Sense strand starting at position 2568 of SEQ ID NO: 1243662
guguaaccuuagcggaaau

SEQ ID NO: 1432427 - RNA, 19 nt, Artificial Sequence
  Description of Artificial Sequence: Synthetic oligonucleotide
  Antisense strand to SEQ ID NO: 1432426
auuuccgcuaagguuacac

SEQ ID NO: 1432428 - RNA, 19 nt, Artificial Sequence
  Description of Artificial Sequence: Synthetic oligonucleotide
  Sense strand starting at position 2569 of SEQ ID NO: 1243662
uguaaccuuagcggaaaua

SEQ ID NO: 1432429 - RNA, 19 nt, Artificial Sequence
  Description of Artificial Sequence: Synthetic oligonucleotide
  Antisense strand to SEQ ID NO: 1432428
uauuuccgcuaagguuaca

SEQ ID NO: 1432430 - RNA, 19 nt, Artificial Sequence
  Description of Artificial Sequence: Synthetic oligonucleotide
  Sense strand starting at position 2580 of SEQ ID NO: 1243662
cggaaauacuuauccugag

SEQ ID NO: 1432431 - RNA, 19 nt, Artificial Sequence
  Description of Artificial Sequence: Synthetic oligonucleotide
  Antisense strand to SEQ ID NO: 1432430
cucaggauaaguauuuccg

SEQ ID NO: 1432432 - RNA, 19 nt, Artificial Sequence
  Description of Artificial Sequence: Synthetic oligonucleotide
  Sense strand starting at position 2581 of SEQ ID NO: 1243662
ggaaauacuuauccugagu

SEQ ID NO: 1432433 - RNA, 19 nt, Artificial Sequence
  Description of Artificial Sequence: Synthetic oligonucleotide
  Antisense strand to SEQ ID NO: 1432432
acucaggauaaguauuucc

SEQ ID NO: 1432434 - RNA, 19 nt, Artificial Sequence
  Description of Artificial Sequence: Synthetic oligonucleotide
  Sense strand starting at position 2605 of SEQ ID NO: 1243662
uguccucaucuguaacaaa

SEQ ID NO: 1432435 - RNA, 19 nt, Artificial Sequence
  Description of Artificial Sequence: Synthetic oligonucleotide
  Antisense strand to SEQ ID NO: 1432434
uuuguuacagaugaggaca

SEQ ID NO: 1432436 - RNA, 19 nt, Artificial Sequence
  Description of Artificial Sequence: Synthetic oligonucleotide
  Sense strand starting at position 2637 of SEQ ID NO: 1243662
ccuauagauuccugaagau

SEQ ID NO: 1432437 - RNA, 19 nt, Artificial Sequence
  Description of Artificial Sequence: Synthetic oligonucleotide
  Antisense strand to SEQ ID NO: 1432436
aucuucaggaaucuauagg

SEQ ID NO: 1432438 - RNA, 19 nt, Artificial Sequence
  Description of Artificial Sequence: Synthetic oligonucleotide
  Sense strand starting at position 2651 of SEQ ID NO: 1243662
aagauuaaaugugaucaug

SEQ ID NO: 1432439 - RNA, 19 nt, Artificial Sequence
  Description of Artificial Sequence: Synthetic oligonucleotide
  Antisense strand to SEQ ID NO: 1432438
caugaucacauuuaaucuu

SEQ ID NO: 1432440 - RNA, 19 nt, Artificial Sequence
  Description of Artificial Sequence: Synthetic oligonucleotide
  Sense strand starting at position 2727 of SEQ ID NO: 1243662
gguagucaucucugaaaca

SEQ ID NO: 1432441 - RNA, 19 nt, Artificial Sequence
  Description of Artificial Sequence: Synthetic oligonucleotide
  Antisense strand to SEQ ID NO: 1432440
uguuucagagaugacuacc

SEQ ID NO: 1432442 - RNA, 19 nt, Artificial Sequence
  Description of Artificial Sequence: Synthetic oligonucleotide
  Sense strand starting at position 2728 of SEQ ID NO: 1243662
guagucaucucugaaacag

SEQ ID NO: 1432443 - RNA, 19 nt, Artificial Sequence
  Description of Artificial Sequence: Synthetic oligonucleotide
  Antisense strand to SEQ ID NO: 1432442
cuguuucagagaugacuac

SEQ ID NO: 1432444 - RNA, 19 nt, Artificial Sequence
  Description of Artificial Sequence: Synthetic oligonucleotide
  Sense strand starting at position 13 of SEQ ID NO: 1243663
ucccaagaucuuuggauga

SEQ ID NO: 1432445 - RNA, 19 nt, Artificial Sequence
  Description of Artificial Sequence: Synthetic oligonucleotide
  Antisense strand to SEQ ID NO: 1432444
ucauccaaagaucuuggga

SEQ ID NO: 1432446 - RNA, 19 nt, Artificial Sequence
  Description of Artificial Sequence: Synthetic oligonucleotide
  Sense strand starting at position 143 of SEQ ID NO: 1243663
cgucuuccuuucugggaua

SEQ ID NO: 1432447 - RNA, 19 nt, Artificial Sequence
  Description of Artificial Sequence: Synthetic oligonucleotide
  Antisense strand to SEQ ID NO: 1432446
uaucccagaaaggaagacg

SEQ ID NO: 1432448 - RNA, 19 nt, Artificial Sequence
  Description of Artificial Sequence: Synthetic oligonucleotide
  Sense strand starting at position 144 of SEQ ID NO: 1243663
gucuuccuuucugggauaa

SEQ ID NO: 1432449 - RNA, 19 nt, Artificial Sequence
  Description of Artificial Sequence: Synthetic oligonucleotide
  Antisense strand to SEQ ID NO: 1432448
uuaucccagaaaggaagac

SEQ ID NO: 1432450 - RNA, 19 nt, Artificial Sequence
  Description of Artificial Sequence: Synthetic oligonucleotide
  Sense strand starting at position 145 of SEQ ID NO: 1243663
ucuuccuuucugggauaau

SEQ ID NO: 1432451 - RNA, 19 nt, Artificial Sequence
  Description of Artificial Sequence: Synthetic oligonucleotide
  Antisense strand to SEQ ID NO: 1432450
auuaucccagaaaggaaga

SEQ ID NO: 1432452 - RNA, 19 nt, Artificial Sequence
  Description of Artificial Sequence: Synthetic oligonucleotide
  Sense strand starting at position 146 of SEQ ID NO: 1243663
cuuccuuucugggauaauc

SEQ ID NO: 1432453 - RNA, 19 nt, Artificial Sequence
  Description of Artificial Sequence: Synthetic oligonucleotide
  Antisense strand to SEQ ID NO: 1432452
gauuaucccagaaaggaag

SEQ ID NO: 1432454 - RNA, 19 nt, Artificial Sequence
  Description of Artificial Sequence: Synthetic oligonucleotide
  Sense strand starting at position 2057 of SEQ ID NO: 1243663
agcugugauuuccacagac

SEQ ID NO: 1432455 - RNA, 19 nt, Artificial Sequence
  Description of Artificial Sequence: Synthetic oligonucleotide
  Antisense strand to SEQ ID NO: 1432454
gucuguggaaaucacagcu

SEQ ID NO: 1432456 - RNA, 19 nt, Artificial Sequence
  Description of Artificial Sequence: Synthetic oligonucleotide
  Sense strand starting at position 2201 of SEQ ID NO: 1243663
gcaggaucugugcagagca

SEQ ID NO: 1432457 - RNA, 19 nt, Artificial Sequence
  Description of Artificial Sequence: Synthetic oligonucleotide
  Antisense strand to SEQ ID NO: 1432456
ugcucugcacagauccugc

SEQ ID NO: 1432458 - RNA, 19 nt, Artificial Sequence
  Description of Artificial Sequence: Synthetic oligonucleotide
  Sense strand starting at position 2258 of SEQ ID NO: 1243663
ccacuuagucagggccaga

SEQ ID NO: 1432459 - RNA, 19 nt, Artificial Sequence
  Description of Artificial Sequence: Synthetic oligonucleotide
  Antisense strand to SEQ ID NO: 1432458
ucuggcccugacuaagugg

SEQ ID NO: 1432460 - RNA, 19 nt, Artificial Sequence
  Description of Artificial Sequence: Synthetic oligonucleotide
  Sense strand starting at position 2261 of SEQ ID NO: 1243663
cuuagucagggccagauau

SEQ ID NO: 1432461 - RNA, 19 nt, Artificial Sequence
  Description of Artificial Sequence: Synthetic oligonucleotide
  Antisense strand to SEQ ID NO: 1432460
auaucuggcccugacuaag

SEQ ID NO: 1432462 - RNA, 19 nt, Artificial Sequence
  Description of Artificial Sequence: Synthetic oligonucleotide
  Sense strand starting at position 2394 of SEQ ID NO: 1243663
gcgcuaauuucccuggcca

SEQ ID NO: 1432463 - RNA, 19 nt, Artificial Sequence
  Description of Artificial Sequence: Synthetic oligonucleotide
  Antisense strand to SEQ ID NO: 1432462
uggccagggaaauuagcgc

SEQ ID NO: 1432464 - RNA, 19 nt, Artificial Sequence
  Description of Artificial Sequence: Synthetic oligonucleotide
  Sense strand starting at position 2396 of SEQ ID NO: 1243663
gcuaauuucccuggccaga

SEQ ID NO: 1432465 - RNA, 19 nt, Artificial Sequence
  Description of Artificial Sequence: Synthetic oligonucleotide
  Antisense strand to SEQ ID NO: 1432464
ucuggccagggaaauuagc

SEQ ID NO: 1432466 - RNA, 19 nt, Artificial Sequence
  Description of Artificial Sequence: Synthetic oligonucleotide
  Sense strand starting at position 2407 of SEQ ID NO: 1243663
uggccagacuccuuaguau

SEQ ID NO: 1432467 - RNA, 19 nt, Artificial Sequence
  Description of Artificial Sequence: Synthetic oligonucleotide
  Antisense strand to SEQ ID NO: 1432466
auacuaaggagucuggcca

SEQ ID NO: 1432468 - RNA, 19 nt, Artificial Sequence
  Description of Artificial Sequence: Synthetic oligonucleotide
  Sense strand starting at position 2416 of SEQ ID NO: 1243663
uccuuaguauucuccagag

SEQ ID NO: 1432469 - RNA, 19 nt, Artificial Sequence
  Description of Artificial Sequence: Synthetic oligonucleotide
  Antisense strand to SEQ ID NO: 1432468
cucuggagaauacuaagga

SEQ ID NO: 1432470 - RNA, 19 nt, Artificial Sequence
  Description of Artificial Sequence: Synthetic oligonucleotide
  Sense strand starting at position 3229 of SEQ ID NO: 1243663
cguggagcaauccauguaa

SEQ ID NO: 1432471 - RNA, 19 nt, Artificial Sequence
  Description of Artificial Sequence: Synthetic oligonucleotide
  Antisense strand to SEQ ID NO: 1432470
uuacauggauugcuccacg

SEQ ID NO: 1432472 - RNA, 19 nt, Artificial Sequence
  Description of Artificial Sequence: Synthetic oligonucleotide
  Sense strand starting at position 3272 of SEQ ID NO: 1243663
gccagugucccagagcuaa

SEQ ID NO: 1432473 - RNA, 19 nt, Artificial Sequence
  Description of Artificial Sequence: Synthetic oligonucleotide
  Antisense strand to SEQ ID NO: 1432472
uuagcucugggacacuggc

SEQ ID NO: 1432474 - RNA, 19 nt, Artificial Sequence
  Description of Artificial Sequence: Synthetic oligonucleotide
  Sense strand starting at position 3303 of SEQ ID NO: 1243663
agggaugaccuguguuggu

SEQ ID NO: 1432475 - RNA, 19 nt, Artificial Sequence
  Description of Artificial Sequence: Synthetic oligonucleotide
  Antisense strand to SEQ ID NO: 1432474
accaacacaggucaucccu

SEQ ID NO: 1432476 - RNA, 19 nt, Artificial Sequence
  Description of Artificial Sequence: Synthetic oligonucleotide
  Sense strand starting at position 3310 of SEQ ID NO: 1243663
accuguguuggucaucaga

SEQ ID NO: 1432477 - RNA, 19 nt, Artificial Sequence
  Description of Artificial Sequence: Synthetic oligonucleotide
  Antisense strand to SEQ ID NO: 1432476
ucugaugaccaacacaggu

SEQ ID NO: 1432478 - RNA, 19 nt, Artificial Sequence
  Description of Artificial Sequence: Synthetic oligonucleotide
  Sense strand starting at position 3312 of SEQ ID NO: 1243663
cuguguuggucaucagaaa

SEQ ID NO: 1432479 - RNA, 19 nt, Artificial Sequence
  Description of Artificial Sequence: Synthetic oligonucleotide
  Antisense strand to SEQ ID NO: 1432478
uuucugaugaccaacacag

SEQ ID NO: 1432480 - RNA, 19 nt, Artificial Sequence
  Description of Artificial Sequence: Synthetic oligonucleotide
  Sense strand starting at position 3577 of SEQ ID NO: 1243663
gcugguaucuggccaggaa

SEQ ID NO: 1432481 - RNA, 19 nt, Artificial Sequence
  Description of Artificial Sequence: Synthetic oligonucleotide
  Antisense strand to SEQ ID NO: 1432480
uuccuggccagauaccagc

SEQ ID NO: 1432482 - RNA, 19 nt, Artificial Sequence
  Description of Artificial Sequence: Synthetic oligonucleotide
  Sense strand starting at position 3578 of SEQ ID NO: 1243663
cugguaucuggccaggaau

SEQ ID NO: 1432483 - RNA, 19 nt, Artificial Sequence
  Description of Artificial Sequence: Synthetic oligonucleotide
  Antisense strand to SEQ ID NO: 1432482
auuccuggccagauaccag

SEQ ID NO: 1432484 - RNA, 19 nt, Artificial Sequence
  Description of Artificial Sequence: Synthetic oligonucleotide
  Sense strand starting at position 3580 of SEQ ID NO: 1243663
gguaucuggccaggaauca

SEQ ID NO: 1432485 - RNA, 19 nt, Artificial Sequence
  Description of Artificial Sequence: Synthetic oligonucleotide
  Antisense strand to SEQ ID NO: 1432484
ugauuccuggccagauacc

SEQ ID NO: 1432486 - RNA, 19 nt, Artificial Sequence
  Description of Artificial Sequence: Synthetic oligonucleotide
  Sense strand starting at position 3581 of SEQ ID NO: 1243663
guaucuggccaggaaucau

SEQ ID NO: 1432487 - RNA, 19 nt, Artificial Sequence
  Description of Artificial Sequence: Synthetic oligonucleotide
  Antisense strand to SEQ ID NO: 1432486
augauuccuggccagauac

SEQ ID NO: 1432488 - RNA, 19 nt, Artificial Sequence
  Description of Artificial Sequence: Synthetic oligonucleotide
  Sense strand starting at position 3593 of SEQ ID NO: 1243663
gaaucauaagaaggugguu

SEQ ID NO: 1432489 - RNA, 19 nt, Artificial Sequence
  Description of Artificial Sequence: Synthetic oligonucleotide
  Antisense strand to SEQ ID NO: 1432488
aaccaccuucuuaugauuc

SEQ ID NO: 1432490 - RNA, 19 nt, Artificial Sequence
  Description of Artificial Sequence: Synthetic oligonucleotide
  Sense strand starting at position 3615 of SEQ ID NO: 1243663
ggaaaugucaagugccuuu

SEQ ID NO: 1432491 - RNA, 19 nt, Artificial Sequence
  Description of Artificial Sequence: Synthetic oligonucleotide
  Antisense strand to SEQ ID NO: 1432490
aaaggcacuugacauuucc

SEQ ID NO: 1432492 - RNA, 19 nt, Artificial Sequence
  Description of Artificial Sequence: Synthetic oligonucleotide
  Sense strand starting at position 3655 of SEQ ID NO: 1243663
auccgauucugugugagac

SEQ ID NO: 1432493 - RNA, 19 nt, Artificial Sequence
  Description of Artificial Sequence: Synthetic oligonucleotide
  Antisense strand to SEQ ID NO: 1432492
gucucacacagaaucggau

SEQ ID NO: 1432494 - RNA, 19 nt, Artificial Sequence
  Description of Artificial Sequence: Synthetic oligonucleotide
  Sense strand starting at position 3657 of SEQ ID NO: 1243663
ccgauucugugugagacca

SEQ ID NO: 1432495 - RNA, 19 nt, Artificial Sequence
  Description of Artificial Sequence: Synthetic oligonucleotide
  Antisense strand to SEQ ID NO: 1432494
uggucucacacagaaucgg

SEQ ID NO: 1432496 - RNA, 19 nt, Artificial Sequence
  Description of Artificial Sequence: Synthetic oligonucleotide
  Sense strand starting at position 3659 of SEQ ID NO: 1243663
gauucugugugagaccauu

SEQ ID NO: 1432497 - RNA, 19 nt, Artificial Sequence
  Description of Artificial Sequence: Synthetic oligonucleotide
  Antisense strand to SEQ ID NO: 1432496
aauggucucacacagaauc

SEQ ID NO: 1432498 - RNA, 19 nt, Artificial Sequence
  Description of Artificial Sequence: Synthetic oligonucleotide
  Sense strand starting at position 3685 of SEQ ID NO: 1243663
guguaucuaacuuggguuu

SEQ ID NO: 1432499 - RNA, 19 nt, Artificial Sequence
  Description of Artificial Sequence: Synthetic oligonucleotide
  Antisense strand to SEQ ID NO: 1432498
aaacccaaguuagauacac

SEQ ID NO: 1432500 - RNA, 19 nt, Artificial Sequence
  Description of Artificial Sequence: Synthetic oligonucleotide
  Sense strand starting at position 3687 of SEQ ID NO: 1243663
guaucuaacuuggguuuga

SEQ ID NO: 1432501 - RNA, 19 nt, Artificial Sequence
  Description of Artificial Sequence: Synthetic oligonucleotide
  Antisense strand to SEQ ID NO: 1432500
ucaaacccaaguuagauac

SEQ ID NO: 1432502 - RNA, 19 nt, Artificial Sequence
  Description of Artificial Sequence: Synthetic oligonucleotide
  Sense strand starting at position 3738 of SEQ ID NO: 1243663
aagggaguuugucuccaag

SEQ ID NO: 1432503 - RNA, 19 nt, Artificial Sequence
  Description of Artificial Sequence: Synthetic oligonucleotide
  Antisense strand to SEQ ID NO: 1432502
cuuggagacaaacucccuu

SEQ ID NO: 1432504 - RNA, 19 nt, Artificial Sequence
  Description of Artificial Sequence: Synthetic oligonucleotide
  Sense strand starting at position 3740 of SEQ ID NO: 1243663
gggaguuugucuccaagga

SEQ ID NO: 1432505 - RNA, 19 nt, Artificial Sequence
  Description of Artificial Sequence: Synthetic oligonucleotide
  Antisense strand to SEQ ID NO: 1432504
uccuuggagacaaacuccc

SEQ ID NO: 1432506 - RNA, 19 nt, Artificial Sequence
  Description of Artificial Sequence: Synthetic oligonucleotide
  Sense strand starting at position 3741 of SEQ ID NO: 1243663
ggaguuugucuccaaggac

SEQ ID NO: 1432507 - RNA, 19 nt, Artificial Sequence
  Description of Artificial Sequence: Synthetic oligonucleotide
  Antisense strand to SEQ ID NO: 1432506
guccuuggagacaaacucc

SEQ ID NO: 1432508 - RNA, 19 nt, Artificial Sequence
  Description of Artificial Sequence: Synthetic oligonucleotide
  Sense strand starting at position 64 of SEQ ID NO: 1243664
ccaucaugguuucuuugga

SEQ ID NO: 1432509 - RNA, 19 nt, Artificial Sequence
  Description of Artificial Sequence: Synthetic oligonucleotide
  Antisense strand to SEQ ID NO: 1432508
uccaaagaaaccaugaugg

SEQ ID NO: 1432510 - RNA, 19 nt, Artificial Sequence
  Description of Artificial Sequence: Synthetic oligonucleotide
  Sense strand starting at position 65 of SEQ ID NO: 1243664
caucaugguuucuuuggau

SEQ ID NO: 1432511 - RNA, 19 nt, Artificial Sequence
  Description of Artificial Sequence: Synthetic oligonucleotide
  Antisense strand to SEQ ID NO: 1432510
auccaaagaaaccaugaug

SEQ ID NO: 1432512 - RNA, 19 nt, Artificial Sequence
  Description of Artificial Sequence: Synthetic oligonucleotide
  Sense strand starting at position 68 of SEQ ID NO: 1243664
caugguuucuuuggauaac

SEQ ID NO: 1432513 - RNA, 19 nt, Artificial Sequence
  Description of Artificial Sequence: Synthetic oligonucleotide
  Antisense strand to SEQ ID NO: 1432512
guuauccaaagaaaccaug

SEQ ID NO: 1432514 - RNA, 19 nt, Artificial Sequence
  Description of Artificial Sequence: Synthetic oligonucleotide
  Sense strand starting at position 69 of SEQ ID NO: 1243664
augguuucuuuggauaacu

SEQ ID NO: 1432515 - RNA, 19 nt, Artificial Sequence
  Description of Artificial Sequence: Synthetic oligonucleotide
  Antisense strand to SEQ ID NO: 1432514
aguuauccaaagaaaccau

SEQ ID NO: 1432516 - RNA, 19 nt, Artificial Sequence
  Description of Artificial Sequence: Synthetic oligonucleotide
  Sense strand starting at position 443 of SEQ ID NO: 1243664
cugaguguccgccaacacu

SEQ ID NO: 1432517 - RNA, 19 nt, Artificial Sequence
  Description of Artificial Sequence: Synthetic oligonucleotide
  Antisense strand to SEQ ID NO: 1432516
aguguuggcggacacucag

SEQ ID NO: 1432518 - RNA, 19 nt, Artificial Sequence
  Description of Artificial Sequence: Synthetic oligonucleotide
  Sense strand starting at position 956 of SEQ ID NO: 1243664
caaagcuguugaccuguaa

SEQ ID NO: 1432519 - RNA, 19 nt, Artificial Sequence
  Description of Artificial Sequence: Synthetic oligonucleotide
  Antisense strand to SEQ ID NO: 1432518
uuacaggucaacagcuuug

SEQ ID NO: 1432520 - RNA, 19 nt, Artificial Sequence
  Description of Artificial Sequence: Synthetic oligonucleotide
  Sense strand starting at position 960 of SEQ ID NO: 1243664
gcuguugaccuguaaauua

SEQ ID NO: 1432521 - RNA, 19 nt, Artificial Sequence
  Description of Artificial Sequence: Synthetic oligonucleotide
  Antisense strand to SEQ ID NO: 1432520
uaauuuacaggucaacagc

SEQ ID NO: 1432522 - RNA, 19 nt, Artificial Sequence
  Description of Artificial Sequence: Synthetic oligonucleotide
  Sense strand starting at position 1123 of SEQ ID NO: 1243664
acuggccuguccugugaga

SEQ ID NO: 1432523 - RNA, 19 nt, Artificial Sequence
  Description of Artificial Sequence: Synthetic oligonucleotide
  Antisense strand to SEQ ID NO: 1432522
ucucacaggacaggccagu

SEQ ID NO: 1432524 - RNA, 19 nt, Artificial Sequence
  Description of Artificial Sequence: Synthetic oligonucleotide
  Sense strand starting at position 1154 of SEQ ID NO: 1243664
aggcaacuuccggaucaca

SEQ ID NO: 1432525 - RNA, 19 nt, Artificial Sequence
  Description of Artificial Sequence: Synthetic oligonucleotide
  Antisense strand to SEQ ID NO: 1432524
ugugauccggaaguugccu

SEQ ID NO: 1432526 - RNA, 19 nt, Artificial Sequence
  Description of Artificial Sequence: Synthetic oligonucleotide
  Sense strand starting at position 1307 of SEQ ID NO: 1243664
cugacuguaacaugugaag

SEQ ID NO: 1432527 - RNA, 19 nt, Artificial Sequence
  Description of Artificial Sequence: Synthetic oligonucleotide
  Antisense strand to SEQ ID NO: 1432526
cuucacauguuacagucag

SEQ ID NO: 1432528 - RNA, 19 nt, Artificial Sequence
  Description of Artificial Sequence: Synthetic oligonucleotide
  Sense strand starting at position 1309 of SEQ ID NO: 1243664
gacuguaacaugugaagug

SEQ ID NO: 1432529 - RNA, 19 nt, Artificial Sequence
  Description of Artificial Sequence: Synthetic oligonucleotide
  Antisense strand to SEQ ID NO: 1432528
cacuucacauguuacaguc

SEQ ID NO: 1432530 - RNA, 19 nt, Artificial Sequence
  Description of Artificial Sequence: Synthetic oligonucleotide
  Sense strand starting at position 1340 of SEQ ID NO: 1243664
cauggagaauuugggugua

SEQ ID NO: 1432531 - RNA, 19 nt, Artificial Sequence
  Description of Artificial Sequence: Synthetic oligonucleotide
  Antisense strand to SEQ ID NO: 1432530
uacacccaaauucuccaug

SEQ ID NO: 1432532 - RNA, 19 nt, Artificial Sequence
  Description of Artificial Sequence: Synthetic oligonucleotide
  Sense strand starting at position 1451 of SEQ ID NO: 1243664
gaaagugagagcugaguaa

SEQ ID NO: 1432533 - RNA, 19 nt, Artificial Sequence
  Description of Artificial Sequence: Synthetic oligonucleotide
  Antisense strand to SEQ ID NO: 1432532
uuacucagcucucacuuuc

SEQ ID NO: 1432534 - RNA, 19 nt, Artificial Sequence
  Description of Artificial Sequence: Synthetic oligonucleotide
  Sense strand starting at position 1757 of SEQ ID NO: 1243664
uccagaaugcuccacggga

SEQ ID NO: 1432535 - RNA, 19 nt, Artificial Sequence
  Description of Artificial Sequence: Synthetic oligonucleotide
  Antisense strand to SEQ ID NO: 1432534
ucccguggagcauucugga

SEQ ID NO: 1432536 - RNA, 19 nt, Artificial Sequence
  Description of Artificial Sequence: Synthetic oligonucleotide
  Sense strand starting at position 1786 of SEQ ID NO: 1243664
cccucacacuuaggugaau

SEQ ID NO: 1432537 - RNA, 19 nt, Artificial Sequence
  Description of Artificial Sequence: Synthetic oligonucleotide
  Antisense strand to SEQ ID NO: 1432536
auucaccuaagugugaggg

SEQ ID NO: 1432538 - RNA, 19 nt, Artificial Sequence
  Description of Artificial Sequence: Synthetic oligonucleotide
  Sense strand starting at position 1787 of SEQ ID NO: 1243664
ccucacacuuaggugaauu

SEQ ID NO: 1432539 - RNA, 19 nt, Artificial Sequence
  Description of Artificial Sequence: Synthetic oligonucleotide
  Antisense strand to SEQ ID NO: 1432538
aauucaccuaagugugagg

SEQ ID NO: 1432540 - RNA, 19 nt, Artificial Sequence
  Description of Artificial Sequence: Synthetic oligonucleotide
  Sense strand starting at position 1798 of SEQ ID NO: 1243664
ggugaauugugcccagaga

SEQ ID NO: 1432541 - RNA, 19 nt, Artificial Sequence
  Description of Artificial Sequence: Synthetic oligonucleotide
  Antisense strand to SEQ ID NO: 1432540
ucucugggcacaauucacc

SEQ ID NO: 1432542 - RNA, 19 nt, Artificial Sequence
  Description of Artificial Sequence: Synthetic oligonucleotide
  Sense strand starting at position 1799 of SEQ ID NO: 1243664
gugaauugugcccagagaa

SEQ ID NO: 1432543 - RNA, 19 nt, Artificial Sequence
  Description of Artificial Sequence: Synthetic oligonucleotide
  Antisense strand to SEQ ID NO: 1432542
uucucugggcacaauucac

SEQ ID NO: 1432544 - RNA, 19 nt, Artificial Sequence
  Description of Artificial Sequence: Synthetic oligonucleotide
  Sense strand starting at position 2026 of SEQ ID NO: 1243664
ggacacuguuagcccaaau

SEQ ID NO: 1432545 - RNA, 19 nt, Artificial Sequence
  Description of Artificial Sequence: Synthetic oligonucleotide
  Antisense strand to SEQ ID NO: 1432544
auuugggcuaacagugucc

SEQ ID NO: 1432546 - RNA, 19 nt, Artificial Sequence
  Description of Artificial Sequence: Synthetic oligonucleotide
  Sense strand starting at position 2072 of SEQ ID NO: 1243664
ucccaagaucuuuggauga

SEQ ID NO: 1432547 - RNA, 19 nt, Artificial Sequence
  Description of Artificial Sequence: Synthetic oligonucleotide
  Antisense strand to SEQ ID NO: 1432546
ucauccaaagaucuuggga

SEQ ID NO: 1432548 - RNA, 19 nt, Artificial Sequence
  Description of Artificial Sequence: Synthetic oligonucleotide
  Sense strand starting at position 2202 of SEQ ID NO: 1243664
cgucuuccuuucugggaua

SEQ ID NO: 1432549 - RNA, 19 nt, Artificial Sequence
  Description of Artificial Sequence: Synthetic oligonucleotide
  Antisense strand to SEQ ID NO: 1432548
uaucccagaaaggaagacg

SEQ ID NO: 1432550 - RNA, 19 nt, Artificial Sequence
  Description of Artificial Sequence: Synthetic oligonucleotide
  Sense strand starting at position 2203 of SEQ ID NO: 1243664
gucuuccuuucugggauaa

SEQ ID NO: 1432551 - RNA, 19 nt, Artificial Sequence
  Description of Artificial Sequence: Synthetic oligonucleotide
  Antisense strand to SEQ ID NO: 1432550
uuaucccagaaaggaagac

SEQ ID NO: 1432552 - RNA, 19 nt, Artificial Sequence
  Description of Artificial Sequence: Synthetic oligonucleotide
  Sense strand starting at position 2204 of SEQ ID NO: 1243664
ucuuccuuucugggauaau

SEQ ID NO: 1432553 - RNA, 19 nt, Artificial Sequence
  Description of Artificial Sequence: Synthetic oligonucleotide
  Antisense strand to SEQ ID NO: 1432552
auuaucccagaaaggaaga

SEQ ID NO: 1432554 - RNA, 19 nt, Artificial Sequence
  Description of Artificial Sequence: Synthetic oligonucleotide
  Sense strand starting at position 2205 of SEQ ID NO: 1243664
cuuccuuucugggauaauc

SEQ ID NO: 1432555 - RNA, 19 nt, Artificial Sequence
  Description of Artificial Sequence: Synthetic oligonucleotide
  Antisense strand to SEQ ID NO: 1432554
gauuaucccagaaaggaag

SEQ ID NO: 1432556 - RNA, 19 nt, Artificial Sequence
  Description of Artificial Sequence: Synthetic oligonucleotide
  Sense strand starting at position 51 of SEQ ID NO: 1243665
acaauagcaucaucaggua

SEQ ID NO: 1432557 - RNA, 19 nt, Artificial Sequence
  Description of Artificial Sequence: Synthetic oligonucleotide
  Antisense strand to SEQ ID NO: 1432556
uaccugaugaugcuauugu

SEQ ID NO: 1432558 - RNA, 19 nt, Artificial Sequence
  Description of Artificial Sequence: Synthetic oligonucleotide
  Sense strand starting at position 378 of SEQ ID NO: 1243665
acuggacuuccuugaguuu

SEQ ID NO: 1432559 - RNA, 19 nt, Artificial Sequence
  Description of Artificial Sequence: Synthetic oligonucleotide
  Antisense strand to SEQ ID NO: 1432558
aaacucaaggaaguccagu

SEQ ID NO: 1432560 - RNA, 19 nt, Artificial Sequence
  Description of Artificial Sequence: Synthetic oligonucleotide
  Sense strand starting at position 455 of SEQ ID NO: 1243665
ggauguuugcauuauacau

SEQ ID NO: 1432561 - RNA, 19 nt, Artificial Sequence
  Description of Artificial Sequence: Synthetic oligonucleotide
  Antisense strand to SEQ ID NO: 1432560
auguauaaugcaaacaucc

SEQ ID NO: 1432562 - RNA, 19 nt, Artificial Sequence
  Description of Artificial Sequence: Synthetic oligonucleotide
  Sense strand starting at position 540 of SEQ ID NO: 1243665
acgcuuagucaucacugga

SEQ ID NO: 1432563 - RNA, 19 nt, Artificial Sequence
  Description of Artificial Sequence: Synthetic oligonucleotide
  Antisense strand to SEQ ID NO: 1432562
uccagugaugacuaagcgu

SEQ ID NO: 1432564 - RNA, 19 nt, Artificial Sequence
  Description of Artificial Sequence: Synthetic oligonucleotide
  Sense strand starting at position 543 of SEQ ID NO: 1243665
cuuagucaucacuggaaug

SEQ ID NO: 1432565 - RNA, 19 nt, Artificial Sequence
  Description of Artificial Sequence: Synthetic oligonucleotide
  Antisense strand to SEQ ID NO: 1432564
cauuccagugaugacuaag

SEQ ID NO: 1432566 - RNA, 19 nt, Artificial Sequence
  Description of Artificial Sequence: Synthetic oligonucleotide
  Sense strand starting at position 548 of SEQ ID NO: 1243665
ucaucacuggaaugucuua

SEQ ID NO: 1432567 - RNA, 19 nt, Artificial Sequence
  Description of Artificial Sequence: Synthetic oligonucleotide
  Antisense strand to SEQ ID NO: 1432566
uaagacauuccagugauga

SEQ ID NO: 1432568 - RNA, 19 nt, Artificial Sequence
  Description of Artificial Sequence: Synthetic oligonucleotide
  Sense strand starting at position 637 of SEQ ID NO: 1243665
aggcuaagcaauugaagua

SEQ ID NO: 1432569 - RNA, 19 nt, Artificial Sequence
  Description of Artificial Sequence: Synthetic oligonucleotide
  Antisense strand to SEQ ID NO: 1432568
uacuucaauugcuuagccu

SEQ ID NO: 1432570 - RNA, 19 nt, Artificial Sequence
  Description of Artificial Sequence: Synthetic oligonucleotide
  Sense strand starting at position 638 of SEQ ID NO: 1243665
ggcuaagcaauugaaguau

SEQ ID NO: 1432571 - RNA, 19 nt, Artificial Sequence
  Description of Artificial Sequence: Synthetic oligonucleotide
  Antisense strand to SEQ ID NO: 1432570
auacuucaauugcuuagcc

SEQ ID NO: 1432572 - RNA, 19 nt, Artificial Sequence
  Description of Artificial Sequence: Synthetic oligonucleotide
  Sense strand starting at position 682 of SEQ ID NO: 1243665
auugauucucauugagacc

SEQ ID NO: 1432573 - RNA, 19 nt, Artificial Sequence
  Description of Artificial Sequence: Synthetic oligonucleotide
  Antisense strand to SEQ ID NO: 1432572
ggucucaaugagaaucaau

SEQ ID NO: 1432574 - RNA, 19 nt, Artificial Sequence
  Description of Artificial Sequence: Synthetic oligonucleotide
  Sense strand starting at position 768 of SEQ ID NO: 1243665
uaugauaagucuuuggcag

SEQ ID NO: 1432575 - RNA, 19 nt, Artificial Sequence
  Description of Artificial Sequence: Synthetic oligonucleotide
  Antisense strand to SEQ ID NO: 1432574
cugccaaagacuuaucaua

SEQ ID NO: 1432576 - RNA, 19 nt, Artificial Sequence
  Description of Artificial Sequence: Synthetic oligonucleotide
  Sense strand starting at position 981 of SEQ ID NO: 1243665
ugaagcauccgcgugaguu

SEQ ID NO: 1432577 - RNA, 19 nt, Artificial Sequence
  Description of Artificial Sequence: Synthetic oligonucleotide
  Antisense strand to SEQ ID NO: 1432576
aacucacgcggaugcuuca

SEQ ID NO: 1432578 - RNA, 19 nt, Artificial Sequence
  Description of Artificial Sequence: Synthetic oligonucleotide
  Sense strand starting at position 1246 of SEQ ID NO: 1243665
gggucaauucuggagguua

SEQ ID NO: 1432579 - RNA, 19 nt, Artificial Sequence
  Description of Artificial Sequence: Synthetic oligonucleotide
  Antisense strand to SEQ ID NO: 1432578
uaaccuccagaauugaccc

SEQ ID NO: 1432580 - RNA, 19 nt, Artificial Sequence
  Description of Artificial Sequence: Synthetic oligonucleotide
  Sense strand starting at position 1306 of SEQ ID NO: 1243665
ccagguggucaagauucua

SEQ ID NO: 1432581 - RNA, 19 nt, Artificial Sequence
  Description of Artificial Sequence: Synthetic oligonucleotide
  Antisense strand to SEQ ID NO: 1432580
uagaaucuugaccaccugg

SEQ ID NO: 1432582 - RNA, 19 nt, Artificial Sequence
  Description of Artificial Sequence: Synthetic oligonucleotide
  Sense strand starting at position 1352 of SEQ ID NO: 1243665
ggaagagguugucucuuac

SEQ ID NO: 1432583 - RNA, 19 nt, Artificial Sequence
  Description of Artificial Sequence: Synthetic oligonucleotide
  Antisense strand to SEQ ID NO: 1432582
guaagagacaaccucuucc

SEQ ID NO: 1432584 - RNA, 19 nt, Artificial Sequence
  Description of Artificial Sequence: Synthetic oligonucleotide
  Sense strand starting at position 1362 of SEQ ID NO: 1243665
gucucuuacccucaaguua

SEQ ID NO: 1432585 - RNA, 19 nt, Artificial Sequence
  Description of Artificial Sequence: Synthetic oligonucleotide
  Antisense strand to SEQ ID NO: 1432584
uaacuugaggguaagagac

SEQ ID NO: 1432586 - RNA, 19 nt, Artificial Sequence
  Description of Artificial Sequence: Synthetic oligonucleotide
  Sense strand starting at position 1371 of SEQ ID NO: 1243665
ccucaaguuacccgagaga

SEQ ID NO: 1432587 - RNA, 19 nt, Artificial Sequence
  Description of Artificial Sequence: Synthetic oligonucleotide
  Antisense strand to SEQ ID NO: 1432586
ucucucggguaacuugagg

SEQ ID NO: 1432588 - RNA, 19 nt, Artificial Sequence
  Description of Artificial Sequence: Synthetic oligonucleotide
  Sense strand starting at position 1374 of SEQ ID NO: 1243665
caaguuacccgagagacga

SEQ ID NO: 1432589 - RNA, 19 nt, Artificial Sequence
  Description of Artificial Sequence: Synthetic oligonucleotide
  Antisense strand to SEQ ID NO: 1432588
ucgucucucggguaacuug

SEQ ID NO: 1432590 - RNA, 19 nt, Artificial Sequence
  Description of Artificial Sequence: Synthetic oligonucleotide
  Sense strand starting at position 1407 of SEQ ID NO: 1243665
ugagcaaaccuuugaggga

SEQ ID NO: 1432591 - RNA, 19 nt, Artificial Sequence
  Description of Artificial Sequence: Synthetic oligonucleotide
  Antisense strand to SEQ ID NO: 1432590
ucccucaaagguuugcuca

SEQ ID NO: 1432592 - RNA, 19 nt, Artificial Sequence
  Description of Artificial Sequence: Synthetic oligonucleotide
  Sense strand starting at position 2141 of SEQ ID NO: 1243665
ggcuacuccaaagggauau

SEQ ID NO: 1432593 - RNA, 19 nt, Artificial Sequence
  Description of Artificial Sequence: Synthetic oligonucleotide
  Antisense strand to SEQ ID NO: 1432592
auaucccuuuggaguagcc

SEQ ID NO: 1432594 - RNA, 19 nt, Artificial Sequence
  Description of Artificial Sequence: Synthetic oligonucleotide
  Sense strand starting at position 2179 of SEQ ID NO: 1243665
ggauuuguuuccucgcaca

SEQ ID NO: 1432595 - RNA, 19 nt, Artificial Sequence
  Description of Artificial Sequence: Synthetic oligonucleotide
  Antisense strand to SEQ ID NO: 1432594
ugugcgaggaaacaaaucc

SEQ ID NO: 1432596 - RNA, 19 nt, Artificial Sequence
  Description of Artificial Sequence: Synthetic oligonucleotide
  Sense strand starting at position 2405 of SEQ ID NO: 1243665
ccugaaugugacugagaca

SEQ ID NO: 1432597 - RNA, 19 nt, Artificial Sequence
  Description of Artificial Sequence: Synthetic oligonucleotide
  Antisense strand to SEQ ID NO: 1432596
ugucucagucacauucagg

SEQ ID NO: 1432598 - RNA, 19 nt, Artificial Sequence
  Description of Artificial Sequence: Synthetic oligonucleotide
  Sense strand starting at position 2440 of SEQ ID NO: 1243665
ccuucuuaucugugaaaug

SEQ ID NO: 1432599 - RNA, 19 nt, Artificial Sequence
  Description of Artificial Sequence: Synthetic oligonucleotide
  Antisense strand to SEQ ID NO: 1432598
cauuucacagauaagaagg

SEQ ID NO: 1432600 - RNA, 19 nt, Artificial Sequence
  Description of Artificial Sequence: Synthetic oligonucleotide
  Sense strand starting at position 2484 of SEQ ID NO: 1243665
gcaugugaaguuuaaacca

SEQ ID NO: 1432601 - RNA, 19 nt, Artificial Sequence
  Description of Artificial Sequence: Synthetic oligonucleotide
  Antisense strand to SEQ ID NO: 1432600
ugguuuaaacuucacaugc

SEQ ID NO: 1432602 - RNA, 19 nt, Artificial Sequence
  Description of Artificial Sequence: Synthetic oligonucleotide
  Sense strand starting at position 2511 of SEQ ID NO: 1243665
agguaaagugccuaguaua

SEQ ID NO: 1432603 - RNA, 19 nt, Artificial Sequence
  Description of Artificial Sequence: Synthetic oligonucleotide
  Antisense strand to SEQ ID NO: 1432602
uauacuaggcacuuuaccu

SEQ ID NO: 1432604 - RNA, 19 nt, Artificial Sequence
  Description of Artificial Sequence: Synthetic oligonucleotide
  Sense strand starting at position 2556 of SEQ ID NO: 1243665
guuucuuucggacacuaag

SEQ ID NO: 1432605 - RNA, 19 nt, Artificial Sequence
  Description of Artificial Sequence: Synthetic oligonucleotide
  Antisense strand to SEQ ID NO: 1432604
cuuaguguccgaaagaaac

SEQ ID NO: 1432606 - RNA, 19 nt, Artificial Sequence
  Description of Artificial Sequence: Synthetic oligonucleotide
  Sense strand starting at position 2668 of SEQ ID NO: 1243665
uggagagcaaagugaugau

SEQ ID NO: 1432607 - RNA, 19 nt, Artificial Sequence
  Description of Artificial Sequence: Synthetic oligonucleotide
  Antisense strand to SEQ ID NO: 1432606
aucaucacuuugcucucca

SEQ ID NO: 1432608 - RNA, 19 nt, Artificial Sequence
  Description of Artificial Sequence: Synthetic oligonucleotide
  Sense strand starting at position 2703 of SEQ ID NO: 1243665
cuaugaacucugugaguca

SEQ ID NO: 1432609 - RNA, 19 nt, Artificial Sequence
  Description of Artificial Sequence: Synthetic oligonucleotide
  Antisense strand to SEQ ID NO: 1432608
ugacucacagaguucauag

SEQ ID NO: 1432610 - RNA, 19 nt, Artificial Sequence
  Description of Artificial Sequence: Synthetic oligonucleotide
  Sense strand starting at position 2785 of SEQ ID NO: 1243665
uguauaacauacucaugua

SEQ ID NO: 1432611 - RNA, 19 nt, Artificial Sequence
  Description of Artificial Sequence: Synthetic oligonucleotide
  Antisense strand to SEQ ID NO: 1432610
uacaugaguauguuauaca

SEQ ID NO: 1432612 - RNA, 19 nt, Artificial Sequence
  Description of Artificial Sequence: Synthetic oligonucleotide
  Sense strand starting at position 2801 of SEQ ID NO: 1243665
guauuauuauuuccucugu

SEQ ID NO: 1432613 - RNA, 19 nt, Artificial Sequence
  Description of Artificial Sequence: Synthetic oligonucleotide
  Antisense strand to SEQ ID NO: 1432612
acagaggaaauaauaauac

SEQ ID NO: 1432614 - RNA, 19 nt, Artificial Sequence
  Description of Artificial Sequence: Synthetic oligonucleotide
  Sense strand starting at position 2844 of SEQ ID NO: 1243665
auuagaaagccagguauaa

SEQ ID NO: 1432615 - RNA, 19 nt, Artificial Sequence
  Description of Artificial Sequence: Synthetic oligonucleotide
  Antisense strand to SEQ ID NO: 1432614
uuauaccuggcuuucuaau

SEQ ID NO: 1432616 - RNA, 19 nt, Artificial Sequence
  Description of Artificial Sequence: Synthetic oligonucleotide
  Sense strand starting at position 2853 of SEQ ID NO: 1243665
ccagguauaaggugagaga

SEQ ID NO: 1432617 - RNA, 19 nt, Artificial Sequence
  Description of Artificial Sequence: Synthetic oligonucleotide
  Antisense strand to SEQ ID NO: 1432616
ucucucaccuuauaccugg

SEQ ID NO: 1432618 - RNA, 19 nt, Artificial Sequence
  Description of Artificial Sequence: Synthetic oligonucleotide
  Sense strand starting at position 2891 of SEQ ID NO: 1243665
aucagauagcugcauaaug

SEQ ID NO: 1432619 - RNA, 19 nt, Artificial Sequence
  Description of Artificial Sequence: Synthetic oligonucleotide
  Antisense strand to SEQ ID NO: 1432618
cauuaugcagcuaucugau

SEQ ID NO: 1432620 - RNA, 19 nt, Artificial Sequence
  Description of Artificial Sequence: Synthetic oligonucleotide
  Sense strand starting at position 2893 of SEQ ID NO: 1243665
cagauagcugcauaauguu

SEQ ID NO: 1432621 - RNA, 19 nt, Artificial Sequence
  Description of Artificial Sequence: Synthetic oligonucleotide
  Antisense strand to SEQ ID NO: 1432620
aacauuaugcagcuaucug

SEQ ID NO: 1432622 - RNA, 19 nt, Artificial Sequence
  Description of Artificial Sequence: Synthetic oligonucleotide
  Sense strand starting at position 2980 of SEQ ID NO: 1243665
acaguaugacuauauaugu

SEQ ID NO: 1432623 - RNA, 19 nt, Artificial Sequence
  Description of Artificial Sequence: Synthetic oligonucleotide
  Antisense strand to SEQ ID NO: 1432622
acauauauagucauacugu

SEQ ID NO: 1432624 - RNA, 19 nt, Artificial Sequence
  Description of Artificial Sequence: Synthetic oligonucleotide
  Sense strand starting at position 3280 of SEQ ID NO: 1243665
guaacaaagccagacucau

SEQ ID NO: 1432625 - RNA, 19 nt, Artificial Sequence
  Description of Artificial Sequence: Synthetic oligonucleotide
  Antisense strand to SEQ ID NO: 1432624
augagucuggcuuuguuac

SEQ ID NO: 1432626 - RNA, 19 nt, Artificial Sequence
  Description of Artificial Sequence: Synthetic oligonucleotide
  Sense strand starting at position 3328 of SEQ ID NO: 1243665
ggauauucagcagaacguu

SEQ ID NO: 1432627 - RNA, 19 nt, Artificial Sequence
  Description of Artificial Sequence: Synthetic oligonucleotide
  Antisense strand to SEQ ID NO: 1432626
aacguucugcugaauaucc

SEQ ID NO: 1432628 - RNA, 19 nt, Artificial Sequence
  Description of Artificial Sequence: Synthetic oligonucleotide
  Sense strand starting at position 3352 of SEQ ID NO: 1243665
ugguuauugcaggauagug

SEQ ID NO: 1432629 - RNA, 19 nt, Artificial Sequence
  Description of Artificial Sequence: Synthetic oligonucleotide
  Antisense strand to SEQ ID NO: 1432628
cacuauccugcaauaacca

SEQ ID NO: 1432630 - RNA, 19 nt, Artificial Sequence
  Description of Artificial Sequence: Synthetic oligonucleotide
  Sense strand starting at position 3413 of SEQ ID NO: 1243665
aguguucuacaaugaacau

SEQ ID NO: 1432631 - RNA, 19 nt, Artificial Sequence
  Description of Artificial Sequence: Synthetic oligonucleotide
  Antisense strand to SEQ ID NO: 1432630
auguucauuguagaacacu

SEQ ID NO: 1432632 - RNA, 19 nt, Artificial Sequence
  Description of Artificial Sequence: Synthetic oligonucleotide
  Sense strand starting at position 3573 of SEQ ID NO: 1243665
cugggugcugauuacaaau

SEQ ID NO: 1432633 - RNA, 19 nt, Artificial Sequence
  Description of Artificial Sequence: Synthetic oligonucleotide
  Antisense strand to SEQ ID NO: 1432632
auuuguaaucagcacccag

SEQ ID NO: 1432634 - RNA, 19 nt, Artificial Sequence
  Description of Artificial Sequence: Synthetic oligonucleotide
  Sense strand starting at position 3838 of SEQ ID NO: 1243665
cgaugauggugguuuaaac

SEQ ID NO: 1432635 - RNA, 19 nt, Artificial Sequence
  Description of Artificial Sequence: Synthetic oligonucleotide
  Antisense strand to SEQ ID NO: 1432634
guuuaaaccaccaucaucg

SEQ ID NO: 1432636 - RNA, 19 nt, Artificial Sequence
  Description of Artificial Sequence: Synthetic oligonucleotide
  Sense strand starting at position 687 of SEQ ID NO: 1243666
cuucuccuggcucauagaa

SEQ ID NO: 1432637 - RNA, 19 nt, Artificial Sequence
  Description of Artificial Sequence: Synthetic oligonucleotide
  Antisense strand to SEQ ID NO: 1432636
uucuaugagccaggagaag

SEQ ID NO: 1432638 - RNA, 19 nt, Artificial Sequence
  Description of Artificial Sequence: Synthetic oligonucleotide
  Sense strand starting at position 736 of SEQ ID NO: 1243666
uaaaucaucuggcuuggga

SEQ ID NO: 1432639 - RNA, 19 nt, Artificial Sequence
  Description of Artificial Sequence: Synthetic oligonucleotide
  Antisense strand to SEQ ID NO: 1432638
ucccaagccagaugauuua

SEQ ID NO: 1432640 - RNA, 19 nt, Artificial Sequence
  Description of Artificial Sequence: Synthetic oligonucleotide
  Sense strand starting at position 738 of SEQ ID NO: 1243666
aaucaucuggcuugggaca

SEQ ID NO: 1432641 - RNA, 19 nt, Artificial Sequence
  Description of Artificial Sequence: Synthetic oligonucleotide
  Antisense strand to SEQ ID NO: 1432640
ugucccaagccagaugauu

SEQ ID NO: 1432642 - RNA, 19 nt, Artificial Sequence
  Description of Artificial Sequence: Synthetic oligonucleotide
  Sense strand starting at position 769 of SEQ ID NO: 1243666
gcacaaagcagaugguuaa

SEQ ID NO: 1432643 - RNA, 19 nt, Artificial Sequence
  Description of Artificial Sequence: Synthetic oligonucleotide
  Antisense strand to SEQ ID NO: 1432642
uuaaccaucugcuuugugc

SEQ ID NO: 1432644 - RNA, 19 nt, Artificial Sequence
  Description of Artificial Sequence: Synthetic oligonucleotide
  Sense strand starting at position 989 of SEQ ID NO: 1243666
guaucuuacagaggagcuu

SEQ ID NO: 1432645 - RNA, 19 nt, Artificial Sequence
  Description of Artificial Sequence: Synthetic oligonucleotide
  Antisense strand to SEQ ID NO: 1432644
aagcuccucuguaagauac

SEQ ID NO: 1432646 - RNA, 19 nt, Artificial Sequence
  Description of Artificial Sequence: Synthetic oligonucleotide
  Sense strand starting at position 1936 of SEQ ID NO: 1243666
aaucauuguggaugaguca

SEQ ID NO: 1432647 - RNA, 19 nt, Artificial Sequence
  Description of Artificial Sequence: Synthetic oligonucleotide
  Antisense strand to SEQ ID NO: 1432646
ugacucauccacaaugauu

SEQ ID NO: 1432648 - RNA, 19 nt, Artificial Sequence
  Description of Artificial Sequence: Synthetic oligonucleotide
  Sense strand starting at position 2011 of SEQ ID NO: 1243666
gcgcuuaaacauuaaccau

SEQ ID NO: 1432649 - RNA, 19 nt, Artificial Sequence
  Description of Artificial Sequence: Synthetic oligonucleotide
  Antisense strand to SEQ ID NO: 1432648
augguuaauguuuaagcgc

SEQ ID NO: 1432650 - RNA, 19 nt, Artificial Sequence
  Description of Artificial Sequence: Synthetic oligonucleotide
  Sense strand starting at position 2068 of SEQ ID NO: 1243666
guaucaugauuugaaugga

SEQ ID NO: 1432651 - RNA, 19 nt, Artificial Sequence
  Description of Artificial Sequence: Synthetic oligonucleotide
  Antisense strand to SEQ ID NO: 1432650
uccauucaaaucaugauac

SEQ ID NO: 1432652 - RNA, 19 nt, Artificial Sequence
  Description of Artificial Sequence: Synthetic oligonucleotide
  Sense strand starting at position 2215 of SEQ ID NO: 1243666
gacagaaacuuguuguuuc

SEQ ID NO: 1432653 - RNA, 19 nt, Artificial Sequence
  Description of Artificial Sequence: Synthetic oligonucleotide
  Antisense strand to SEQ ID NO: 1432652
gaaacaacaaguuucuguc

SEQ ID NO: 1432654 - RNA, 19 nt, Artificial Sequence
  Description of Artificial Sequence: Synthetic oligonucleotide
  Sense strand starting at position 2273 of SEQ ID NO: 1243666
guguauguuguagauggaa

SEQ ID NO: 1432655 - RNA, 19 nt, Artificial Sequence
  Description of Artificial Sequence: Synthetic oligonucleotide
  Antisense strand to SEQ ID NO: 1432654
uuccaucuacaacauacac

SEQ ID NO: 1432656 - RNA, 19 nt, Artificial Sequence
  Description of Artificial Sequence: Synthetic oligonucleotide
  Sense strand starting at position 2275 of SEQ ID NO: 1243666
guauguuguagauggaaca

SEQ ID NO: 1432657 - RNA, 19 nt, Artificial Sequence
  Description of Artificial Sequence: Synthetic oligonucleotide
  Antisense strand to SEQ ID NO: 1432656
uguuccaucuacaacauac

SEQ ID NO: 1432658 - RNA, 19 nt, Artificial Sequence
  Description of Artificial Sequence: Synthetic oligonucleotide
  Sense strand starting at position 2331 of SEQ ID NO: 1243666
gcauauaaacuuuggacaa

SEQ ID NO: 1432659 - RNA, 19 nt, Artificial Sequence
  Description of Artificial Sequence: Synthetic oligonucleotide
  Antisense strand to SEQ ID NO: 1432658
uuguccaaaguuuauaugc

SEQ ID NO: 1432660 - RNA, 19 nt, Artificial Sequence
  Description of Artificial Sequence: Synthetic oligonucleotide
  Sense strand starting at position 2417 of SEQ ID NO: 1243666
caaagaaugucuuccagga

SEQ ID NO: 1432661 - RNA, 19 nt, Artificial Sequence
  Description of Artificial Sequence: Synthetic oligonucleotide
  Antisense strand to SEQ ID NO: 1432660
uccuggaagacauucuuug

SEQ ID NO: 1432662 - RNA, 19 nt, Artificial Sequence
  Description of Artificial Sequence: Synthetic oligonucleotide
  Sense strand starting at position 2421 of SEQ ID NO: 1243666
gaaugucuuccaggaggca

SEQ ID NO: 1432663 - RNA, 19 nt, Artificial Sequence
  Description of Artificial Sequence: Synthetic oligonucleotide
  Antisense strand to SEQ ID NO: 1432662
ugccuccuggaagacauuc

SEQ ID NO: 1432664 - RNA, 19 nt, Artificial Sequence
  Description of Artificial Sequence: Synthetic oligonucleotide
  Sense strand starting at position 2515 of SEQ ID NO: 1243666
agagcuauccuugaauucu

SEQ ID NO: 1432665 - RNA, 19 nt, Artificial Sequence
  Description of Artificial Sequence: Synthetic oligonucleotide
  Antisense strand to SEQ ID NO: 1432664
agaauucaaggauagcucu

SEQ ID NO: 1432666 - RNA, 19 nt, Artificial Sequence
  Description of Artificial Sequence: Synthetic oligonucleotide
  Sense strand starting at position 2538 of SEQ ID NO: 1243666
cuucucuuacgucagauca

SEQ ID NO: 1432667 - RNA, 19 nt, Artificial Sequence
  Description of Artificial Sequence: Synthetic oligonucleotide
  Antisense strand to SEQ ID NO: 1432666
ugaucugacguaagagaag

SEQ ID NO: 1432668 - RNA, 19 nt, Artificial Sequence
  Description of Artificial Sequence: Synthetic oligonucleotide
  Sense strand starting at position 2578 of SEQ ID NO: 1243666
uucuuaauaugucuuggau

SEQ ID NO: 1432669 - RNA, 19 nt, Artificial Sequence
  Description of Artificial Sequence: Synthetic oligonucleotide
  Antisense strand to SEQ ID NO: 1432668
auccaagacauauuaagaa

SEQ ID NO: 1432670 - RNA, 19 nt, Artificial Sequence
  Description of Artificial Sequence: Synthetic oligonucleotide
  Sense strand starting at position 2581 of SEQ ID NO: 1243666
uuaauaugucuuggaucug

SEQ ID NO: 1432671 - RNA, 19 nt, Artificial Sequence
  Description of Artificial Sequence: Synthetic oligonucleotide
  Antisense strand to SEQ ID NO: 1432670
cagauccaagacauauuaa

SEQ ID NO: 1432672 - RNA, 19 nt, Artificial Sequence
  Description of Artificial Sequence: Synthetic oligonucleotide
  Sense strand starting at position 2814 of SEQ ID NO: 1243666
ggacaauagccaggccaua

SEQ ID NO: 1432673 - RNA, 19 nt, Artificial Sequence
  Description of Artificial Sequence: Synthetic oligonucleotide
  Antisense strand to SEQ ID NO: 1432672
uauggccuggcuauugucc

SEQ ID NO: 1432674 - RNA, 19 nt, Artificial Sequence
  Description of Artificial Sequence: Synthetic oligonucleotide
  Sense strand starting at position 3164 of SEQ ID NO: 1243666
gcucucauuugggugaucu

SEQ ID NO: 1432675 - RNA, 19 nt, Artificial Sequence
  Description of Artificial Sequence: Synthetic oligonucleotide
  Antisense strand to SEQ ID NO: 1432674
agaucacccaaaugagagc

SEQ ID NO: 1432676 - RNA, 19 nt, Artificial Sequence
  Description of Artificial Sequence: Synthetic oligonucleotide
  Sense strand starting at position 3182 of SEQ ID NO: 1243666
uugguuuauauccagaggu

SEQ ID NO: 1432677 - RNA, 19 nt, Artificial Sequence
  Description of Artificial Sequence: Synthetic oligonucleotide
  Antisense strand to SEQ ID NO: 1432676
accucuggauauaaaccaa

SEQ ID NO: 1432678 - RNA, 19 nt, Artificial Sequence
  Description of Artificial Sequence: Synthetic oligonucleotide
  Sense strand starting at position 3184 of SEQ ID NO: 1243666
gguuuauauccagaggucu

SEQ ID NO: 1432679 - RNA, 19 nt, Artificial Sequence
  Description of Artificial Sequence: Synthetic oligonucleotide
  Antisense strand to SEQ ID NO: 1432678
agaccucuggauauaaacc

SEQ ID NO: 1432680 - RNA, 19 nt, Artificial Sequence
  Description of Artificial Sequence: Synthetic oligonucleotide
  Sense strand starting at position 3226 of SEQ ID NO: 1243666
uugagaaaucuccaucugu

SEQ ID NO: 1432681 - RNA, 19 nt, Artificial Sequence
  Description of Artificial Sequence: Synthetic oligonucleotide
  Antisense strand to SEQ ID NO: 1432680
acagauggagauuucucaa

SEQ ID NO: 1432682 - RNA, 19 nt, Artificial Sequence
  Description of Artificial Sequence: Synthetic oligonucleotide
  Sense strand starting at position 3237 of SEQ ID NO: 1243666
ccaucugucaggcagauga

SEQ ID NO: 1432683 - RNA, 19 nt, Artificial Sequence
  Description of Artificial Sequence: Synthetic oligonucleotide
  Antisense strand to SEQ ID NO: 1432682
ucaucugccugacagaugg

SEQ ID NO: 1432684 - RNA, 19 nt, Artificial Sequence
  Description of Artificial Sequence: Synthetic oligonucleotide
  Sense strand starting at position 3239 of SEQ ID NO: 1243666
aucugucaggcagaugauu

SEQ ID NO: 1432685 - RNA, 19 nt, Artificial Sequence
  Description of Artificial Sequence: Synthetic oligonucleotide
  Antisense strand to SEQ ID NO: 1432684
aaucaucugccugacagau

SEQ ID NO: 1432686 - RNA, 19 nt, Artificial Sequence
  Description of Artificial Sequence: Synthetic oligonucleotide
  Sense strand starting at position 3244 of SEQ ID NO: 1243666
ucaggcagaugauucuuaa

SEQ ID NO: 1432687 - RNA, 19 nt, Artificial Sequence
  Description of Artificial Sequence: Synthetic oligonucleotide
  Antisense strand to SEQ ID NO: 1432686
uuaagaaucaucugccuga

SEQ ID NO: 1432688 - RNA, 19 nt, Artificial Sequence
  Description of Artificial Sequence: Synthetic oligonucleotide
  Sense strand starting at position 3247 of SEQ ID NO: 1243666
ggcagaugauucuuaaauu

SEQ ID NO: 1432689 - RNA, 19 nt, Artificial Sequence
  Description of Artificial Sequence: Synthetic oligonucleotide
  Antisense strand to SEQ ID NO: 1432688
aauuuaagaaucaucugcc

SEQ ID NO: 1432690 - RNA, 19 nt, Artificial Sequence
  Description of Artificial Sequence: Synthetic oligonucleotide
  Sense strand starting at position 3280 of SEQ ID NO: 1243666
cauuguguuccaugauaag

SEQ ID NO: 1432691 - RNA, 19 nt, Artificial Sequence
  Description of Artificial Sequence: Synthetic oligonucleotide
  Antisense strand to SEQ ID NO: 1432690
cuuaucauggaacacaaug

SEQ ID NO: 1432692 - RNA, 19 nt, Artificial Sequence
  Description of Artificial Sequence: Synthetic oligonucleotide
  Sense strand starting at position 3362 of SEQ ID NO: 1243666
aggagauucuuguucucug

SEQ ID NO: 1432693 - RNA, 19 nt, Artificial Sequence
  Description of Artificial Sequence: Synthetic oligonucleotide
  Antisense strand to SEQ ID NO: 1432692
cagagaacaagaaucuccu

SEQ ID NO: 1432694 - RNA, 19 nt, Artificial Sequence
  Description of Artificial Sequence: Synthetic oligonucleotide
  Sense strand starting at position 3365 of SEQ ID NO: 1243666
agauucuuguucucuggau

SEQ ID NO: 1432695 - RNA, 19 nt, Artificial Sequence
  Description of Artificial Sequence: Synthetic oligonucleotide
  Antisense strand to SEQ ID NO: 1432694
auccagagaacaagaaucu

SEQ ID NO: 1432696 - RNA, 19 nt, Artificial Sequence
  Description of Artificial Sequence: Synthetic oligonucleotide
  Sense strand starting at position 3366 of SEQ ID NO: 1243666
gauucuuguucucuggaua

SEQ ID NO: 1432697 - RNA, 19 nt, Artificial Sequence
  Description of Artificial Sequence: Synthetic oligonucleotide
  Antisense strand to SEQ ID NO: 1432696
uauccagagaacaagaauc

SEQ ID NO: 1432698 - RNA, 19 nt, Artificial Sequence
  Description of Artificial Sequence: Synthetic oligonucleotide
  Sense strand starting at position 3367 of SEQ ID NO: 1243666
auucuuguucucuggauaa

SEQ ID NO: 1432699 - RNA, 19 nt, Artificial Sequence
  Description of Artificial Sequence: Synthetic oligonucleotide
  Antisense strand to SEQ ID NO: 1432698
uuauccagagaacaagaau

SEQ ID NO: 1432700 - RNA, 19 nt, Artificial Sequence
  Description of Artificial Sequence: Synthetic oligonucleotide
  Sense strand starting at position 3377 of SEQ ID NO: 1243666
ucuggauaauucccagguu

SEQ ID NO: 1432701 - RNA, 19 nt, Artificial Sequence
  Description of Artificial Sequence: Synthetic oligonucleotide
  Antisense strand to SEQ ID NO: 1432700
aaccugggaauuauccaga

SEQ ID NO: 1432702 - RNA, 19 nt, Artificial Sequence
  Description of Artificial Sequence: Synthetic oligonucleotide
  Sense strand starting at position 3389 of SEQ ID NO: 1243666
ccagguuccgcuuuauugu

SEQ ID NO: 1432703 - RNA, 19 nt, Artificial Sequence
  Description of Artificial Sequence: Synthetic oligonucleotide
  Antisense strand to SEQ ID NO: 1432702
acaauaaagcggaaccugg

SEQ ID NO: 1432704 - RNA, 19 nt, Artificial Sequence
  Description of Artificial Sequence: Synthetic oligonucleotide
  Sense strand starting at position 3405 of SEQ ID NO: 1243666
uguggagaaucuccuugau

SEQ ID NO: 1432705 - RNA, 19 nt, Artificial Sequence
  Description of Artificial Sequence: Synthetic oligonucleotide
  Antisense strand to SEQ ID NO: 1432704
aucaaggagauucuccaca

SEQ ID NO: 1432706 - RNA, 19 nt, Artificial Sequence
  Description of Artificial Sequence: Synthetic oligonucleotide
  Sense strand starting at position 3525 of SEQ ID NO: 1243666
ucgggcaucaguuaaagaa

SEQ ID NO: 1432707 - RNA, 19 nt, Artificial Sequence
  Description of Artificial Sequence: Synthetic oligonucleotide
  Antisense strand to SEQ ID NO: 1432706
uucuuuaacugaugcccga

SEQ ID NO: 1432708 - RNA, 19 nt, Artificial Sequence
  Description of Artificial Sequence: Synthetic oligonucleotide
  Sense strand starting at position 3594 of SEQ ID NO: 1243666
caaacugagugccugauau

SEQ ID NO: 1432709 - RNA, 19 nt, Artificial Sequence
  Description of Artificial Sequence: Synthetic oligonucleotide
  Antisense strand to SEQ ID NO: 1432708
auaucaggcacucaguuug

SEQ ID NO: 1432710 - RNA, 19 nt, Artificial Sequence
  Description of Artificial Sequence: Synthetic oligonucleotide
  Sense strand starting at position 3596 of SEQ ID NO: 1243666
aacugagugccugauauug

SEQ ID NO: 1432711 - RNA, 19 nt, Artificial Sequence
  Description of Artificial Sequence: Synthetic oligonucleotide
  Antisense strand to SEQ ID NO: 1432710
caauaucaggcacucaguu

SEQ ID NO: 1432712 - RNA, 19 nt, Artificial Sequence
  Description of Artificial Sequence: Synthetic oligonucleotide
  Sense strand starting at position 3662 of SEQ ID NO: 1243666
gcucccuugcauuaggaaa

SEQ ID NO: 1432713 - RNA, 19 nt, Artificial Sequence
  Description of Artificial Sequence: Synthetic oligonucleotide
  Antisense strand to SEQ ID NO: 1432712
uuuccuaaugcaagggagc

SEQ ID NO: 1432714 - RNA, 19 nt, Artificial Sequence
  Description of Artificial Sequence: Synthetic oligonucleotide
  Sense strand starting at position 3695 of SEQ ID NO: 1243666
gucgaaauaguuuauauuc

SEQ ID NO: 1432715 - RNA, 19 nt, Artificial Sequence
  Description of Artificial Sequence: Synthetic oligonucleotide
  Antisense strand to SEQ ID NO: 1432714
gaauauaaacuauuucgac

SEQ ID NO: 1432716 - RNA, 19 nt, Artificial Sequence
  Description of Artificial Sequence: Synthetic oligonucleotide
  Sense strand starting at position 14 of SEQ ID NO: 1243667
augauuuccucugagagau

SEQ ID NO: 1432717 - RNA, 19 nt, Artificial Sequence
  Description of Artificial Sequence: Synthetic oligonucleotide
  Antisense strand to SEQ ID NO: 1432716
aucucucagaggaaaucau

SEQ ID NO: 1432718 - RNA, 19 nt, Artificial Sequence
  Description of Artificial Sequence: Synthetic oligonucleotide
  Sense strand starting at position 16 of SEQ ID NO: 1243667
gauuuccucugagagauua

SEQ ID NO: 1432719 - RNA, 19 nt, Artificial Sequence
  Description of Artificial Sequence: Synthetic oligonucleotide
  Antisense strand to SEQ ID NO: 1432718
uaaucucucagaggaaauc

SEQ ID NO: 1432720 - RNA, 19 nt, Artificial Sequence
  Description of Artificial Sequence: Synthetic oligonucleotide
  Sense strand starting at position 97 of SEQ ID NO: 1243667
aguuucccaggcugagaaa

SEQ ID NO: 1432721 - RNA, 19 nt, Artificial Sequence
  Description of Artificial Sequence: Synthetic oligonucleotide
  Antisense strand to SEQ ID NO: 1432720
uuucucagccugggaaacu

SEQ ID NO: 1432722 - RNA, 19 nt, Artificial Sequence
  Description of Artificial Sequence: Synthetic oligonucleotide
  Sense strand starting at position 307 of SEQ ID NO: 1243667
auuguuagaauuggugcaa

SEQ ID NO: 1432723 - RNA, 19 nt, Artificial Sequence
  Description of Artificial Sequence: Synthetic oligonucleotide
  Antisense strand to SEQ ID NO: 1432722
uugcaccaauucuaacaau

SEQ ID NO: 1432724 - RNA, 19 nt, Artificial Sequence
  Description of Artificial Sequence: Synthetic oligonucleotide
  Sense strand starting at position 308 of SEQ ID NO: 1243667
uuguuagaauuggugcaaa

SEQ ID NO: 1432725 - RNA, 19 nt, Artificial Sequence
  Description of Artificial Sequence: Synthetic oligonucleotide
  Antisense strand to SEQ ID NO: 1432724
uuugcaccaauucuaacaa

SEQ ID NO: 1432726 - RNA, 19 nt, Artificial Sequence
  Description of Artificial Sequence: Synthetic oligonucleotide
  Sense strand starting at position 311 of SEQ ID NO: 1243667
uuagaauuggugcaaagca

SEQ ID NO: 1432727 - RNA, 19 nt, Artificial Sequence
  Description of Artificial Sequence: Synthetic oligonucleotide
  Antisense strand to SEQ ID NO: 1432726
ugcuuugcaccaauucuaa

SEQ ID NO: 1432728 - RNA, 19 nt, Artificial Sequence
  Description of Artificial Sequence: Synthetic oligonucleotide
  Sense strand starting at position 450 of SEQ ID NO: 1243667
cacuguacauacguaagaa

SEQ ID NO: 1432729 - RNA, 19 nt, Artificial Sequence
  Description of Artificial Sequence: Synthetic oligonucleotide
  Antisense strand to SEQ ID NO: 1432728
uucuuacguauguacagug

SEQ ID NO: 1432730 - RNA, 19 nt, Artificial Sequence
  Description of Artificial Sequence: Synthetic oligonucleotide
  Sense strand starting at position 526 of SEQ ID NO: 1243667
ggaaguauuuaaggucuaa

SEQ ID NO: 1432731 - RNA, 19 nt, Artificial Sequence
  Description of Artificial Sequence: Synthetic oligonucleotide
  Antisense strand to SEQ ID NO: 1432730
uuagaccuuaaauacuucc

SEQ ID NO: 1432732 - RNA, 19 nt, Artificial Sequence
  Description of Artificial Sequence: Synthetic oligonucleotide
  Sense strand starting at position 758 of SEQ ID NO: 1243667
ccuugaaacuccuuggaga

SEQ ID NO: 1432733 - RNA, 19 nt, Artificial Sequence
  Description of Artificial Sequence: Synthetic oligonucleotide
  Antisense strand to SEQ ID NO: 1432732
ucuccaaggaguuucaagg

SEQ ID NO: 1432734 - RNA, 19 nt, Artificial Sequence
  Description of Artificial Sequence: Synthetic oligonucleotide
  Sense strand starting at position 760 of SEQ ID NO: 1243667
uugaaacuccuuggagagu

SEQ ID NO: 1432735 - RNA, 19 nt, Artificial Sequence
  Description of Artificial Sequence: Synthetic oligonucleotide
  Antisense strand to SEQ ID NO: 1432734
acucuccaaggaguuucaa

SEQ ID NO: 1432736 - RNA, 19 nt, Artificial Sequence
  Description of Artificial Sequence: Synthetic oligonucleotide
  Sense strand starting at position 821 of SEQ ID NO: 1243667
uuaagaaugcugcaagauu

SEQ ID NO: 1432737 - RNA, 19 nt, Artificial Sequence
  Description of Artificial Sequence: Synthetic oligonucleotide
  Antisense strand to SEQ ID NO: 1432736
aaucuugcagcauucuuaa

SEQ ID NO: 1432738 - RNA, 19 nt, Artificial Sequence
  Description of Artificial Sequence: Synthetic oligonucleotide
  Sense strand starting at position 1614 of SEQ ID NO: 1243667
gauguaguuguccacgaca

SEQ ID NO: 1432739 - RNA, 19 nt, Artificial Sequence
  Description of Artificial Sequence: Synthetic oligonucleotide
  Antisense strand to SEQ ID NO: 1432738
ugucguggacaacuacauc

SEQ ID NO: 1432740 - RNA, 19 nt, Artificial Sequence
  Description of Artificial Sequence: Synthetic oligonucleotide
  Sense strand starting at position 1633 of SEQ ID NO: 1243667
gcggagauggcgguguuau

SEQ ID NO: 1432741 - RNA, 19 nt, Artificial Sequence
  Description of Artificial Sequence: Synthetic oligonucleotide
  Antisense strand to SEQ ID NO: 1432740
auaacaccgccaucuccgc

SEQ ID NO: 1432742 - RNA, 19 nt, Artificial Sequence
  Description of Artificial Sequence: Synthetic oligonucleotide
  Sense strand starting at position 1649 of SEQ ID NO: 1243667
uauagagagucucugggau

SEQ ID NO: 1432743 - RNA, 19 nt, Artificial Sequence
  Description of Artificial Sequence: Synthetic oligonucleotide
  Antisense strand to SEQ ID NO: 1432742
aucccagagacucucuaua

SEQ ID NO: 1432744 - RNA, 19 nt, Artificial Sequence
  Description of Artificial Sequence: Synthetic oligonucleotide
  Sense strand starting at position 2159 of SEQ ID NO: 1243667
gggacaaauuauuacagga

SEQ ID NO: 1432745 - RNA, 19 nt, Artificial Sequence
  Description of Artificial Sequence: Synthetic oligonucleotide
  Antisense strand to SEQ ID NO: 1432744
uccuguaauaauuuguccc

SEQ ID NO: 1432746 - RNA, 19 nt, Artificial Sequence
  Description of Artificial Sequence: Synthetic oligonucleotide
  Sense strand starting at position 2593 of SEQ ID NO: 1243667
cgugauaggacuuaauggu

SEQ ID NO: 1432747 - RNA, 19 nt, Artificial Sequence
  Description of Artificial Sequence: Synthetic oligonucleotide
  Antisense strand to SEQ ID NO: 1432746
accauuaaguccuaucacg

SEQ ID NO: 1432748 - RNA, 19 nt, Artificial Sequence
  Description of Artificial Sequence: Synthetic oligonucleotide
  Sense strand starting at position 2651 of SEQ ID NO: 1243667
uguugaauaauugggagua

SEQ ID NO: 1432749 - RNA, 19 nt, Artificial Sequence
  Description of Artificial Sequence: Synthetic oligonucleotide
  Antisense strand to SEQ ID NO: 1432748
uacucccaauuauucaaca

SEQ ID NO: 1432750 - RNA, 19 nt, Artificial Sequence
  Description of Artificial Sequence: Synthetic oligonucleotide
  Sense strand starting at position 2702 of SEQ ID NO: 1243667
acaucugcuguuuauguaa

SEQ ID NO: 1432751 - RNA, 19 nt, Artificial Sequence
  Description of Artificial Sequence: Synthetic oligonucleotide
  Antisense strand to SEQ ID NO: 1432750
uuacauaaacagcagaugu

SEQ ID NO: 1432752 - RNA, 19 nt, Artificial Sequence
  Description of Artificial Sequence: Synthetic oligonucleotide
  Sense strand starting at position 2725 of SEQ ID NO: 1243667
auuuccuaagucugcgauu

SEQ ID NO: 1432753 - RNA, 19 nt, Artificial Sequence
  Description of Artificial Sequence: Synthetic oligonucleotide
  Antisense strand to SEQ ID NO: 1432752
aaucgcagacuuaggaaau

SEQ ID NO: 1432754 - RNA, 19 nt, Artificial Sequence
  Description of Artificial Sequence: Synthetic oligonucleotide
  Sense strand starting at position 2726 of SEQ ID NO: 1243667
uuuccuaagucugcgauuu

SEQ ID NO: 1432755 - RNA, 19 nt, Artificial Sequence
  Description of Artificial Sequence: Synthetic oligonucleotide
  Antisense strand to SEQ ID NO: 1432754
aaaucgcagacuuaggaaa

SEQ ID NO: 1432756 - RNA, 19 nt, Artificial Sequence
  Description of Artificial Sequence: Synthetic oligonucleotide
  Sense strand starting at position 2727 of SEQ ID NO: 1243667
uuccuaagucugcgauuuc

SEQ ID NO: 1432757 - RNA, 19 nt, Artificial Sequence
  Description of Artificial Sequence: Synthetic oligonucleotide
  Antisense strand to SEQ ID NO: 1432756
gaaaucgcagacuuaggaa

SEQ ID NO: 1432758 - RNA, 19 nt, Artificial Sequence
  Description of Artificial Sequence: Synthetic oligonucleotide
  Sense strand starting at position 2744 of SEQ ID NO: 1243667
ucaagaauuugaugcaaca

SEQ ID NO: 1432759 - RNA, 19 nt, Artificial Sequence
  Description of Artificial Sequence: Synthetic oligonucleotide
  Antisense strand to SEQ ID NO: 1432758
uguugcaucaaauucuuga

SEQ ID NO: 1432760 - RNA, 19 nt, Artificial Sequence
  Description of Artificial Sequence: Synthetic oligonucleotide
  Sense strand starting at position 2760 of SEQ ID NO: 1243667
acaucuuucuguucuagga

SEQ ID NO: 1432761 - RNA, 19 nt, Artificial Sequence
  Description of Artificial Sequence: Synthetic oligonucleotide
  Antisense strand to SEQ ID NO: 1432760
uccuagaacagaaagaugu

SEQ ID NO: 1432762 - RNA, 19 nt, Artificial Sequence
  Description of Artificial Sequence: Synthetic oligonucleotide
  Sense strand starting at position 2773 of SEQ ID NO: 1243667
cuaggaauuuaccauggaa

SEQ ID NO: 1432763 - RNA, 19 nt, Artificial Sequence
  Description of Artificial Sequence: Synthetic oligonucleotide
  Antisense strand to SEQ ID NO: 1432762
uuccaugguaaauuccuag

SEQ ID NO: 1432764 - RNA, 19 nt, Artificial Sequence
  Description of Artificial Sequence: Synthetic oligonucleotide
  Sense strand starting at position 2787 of SEQ ID NO: 1243667
uggaaauuauuggccauaa

SEQ ID NO: 1432765 - RNA, 19 nt, Artificial Sequence
  Description of Artificial Sequence: Synthetic oligonucleotide
  Antisense strand to SEQ ID NO: 1432764
uuauggccaauaauuucca

SEQ ID NO: 1432766 - RNA, 19 nt, Artificial Sequence
  Description of Artificial Sequence: Synthetic oligonucleotide
  Sense strand starting at position 2788 of SEQ ID NO: 1243667
ggaaauuauuggccauaau

SEQ ID NO: 1432767 - RNA, 19 nt, Artificial Sequence
  Description of Artificial Sequence: Synthetic oligonucleotide
  Antisense strand to SEQ ID NO: 1432766
auuauggccaauaauuucc

SEQ ID NO: 1432768 - RNA, 19 nt, Artificial Sequence
  Description of Artificial Sequence: Synthetic oligonucleotide
  Sense strand starting at position 2797 of SEQ ID NO: 1243667
uggccauaauuguugguga

SEQ ID NO: 1432769 - RNA, 19 nt, Artificial Sequence
  Description of Artificial Sequence: Synthetic oligonucleotide
  Antisense strand to SEQ ID NO: 1432768
ucaccaacaauuauggcca

SEQ ID NO: 1432770 - RNA, 19 nt, Artificial Sequence
  Description of Artificial Sequence: Synthetic oligonucleotide
  Sense strand starting at position 2799 of SEQ ID NO: 1243667
gccauaauuguuggugaca

SEQ ID NO: 1432771 - RNA, 19 nt, Artificial Sequence
  Description of Artificial Sequence: Synthetic oligonucleotide
  Antisense strand to SEQ ID NO: 1432770
ugucaccaacaauuauggc

SEQ ID NO: 1432772 - RNA, 19 nt, Artificial Sequence
  Description of Artificial Sequence: Synthetic oligonucleotide
  Sense strand starting at position 2800 of SEQ ID NO: 1243667
ccauaauuguuggugacac

SEQ ID NO: 1432773 - RNA, 19 nt, Artificial Sequence
  Description of Artificial Sequence: Synthetic oligonucleotide
  Antisense strand to SEQ ID NO: 1432772
gugucaccaacaauuaugg

SEQ ID NO: 1432774 - RNA, 19 nt, Artificial Sequence
  Description of Artificial Sequence: Synthetic oligonucleotide
  Sense strand starting at position 2802 of SEQ ID NO: 1243667
auaauuguuggugacacua

SEQ ID NO: 1432775 - RNA, 19 nt, Artificial Sequence
  Description of Artificial Sequence: Synthetic oligonucleotide
  Antisense strand to SEQ ID NO: 1432774
uagugucaccaacaauuau

SEQ ID NO: 1432776 - RNA, 19 nt, Artificial Sequence
  Description of Artificial Sequence: Synthetic oligonucleotide
  Sense strand starting at position 2829 of SEQ ID NO: 1243667
auagucacucuauaacgau

SEQ ID NO: 1432777 - RNA, 19 nt, Artificial Sequence
  Description of Artificial Sequence: Synthetic oligonucleotide
  Antisense strand to SEQ ID NO: 1432776
aucguuauagagugacuau

SEQ ID NO: 1432778 - RNA, 19 nt, Artificial Sequence
  Description of Artificial Sequence: Synthetic oligonucleotide
  Sense strand starting at position 2835 of SEQ ID NO: 1243667
acucuauaacgauguaagu

SEQ ID NO: 1432779 - RNA, 19 nt, Artificial Sequence
  Description of Artificial Sequence: Synthetic oligonucleotide
  Antisense strand to SEQ ID NO: 1432778
acuuacaucguuauagagu

SEQ ID NO: 1432780 - RNA, 19 nt, Artificial Sequence
  Description of Artificial Sequence: Synthetic oligonucleotide
  Sense strand starting at position 2877 of SEQ ID NO: 1243667
uguccugauugauauuuag

SEQ ID NO: 1432781 - RNA, 19 nt, Artificial Sequence
  Description of Artificial Sequence: Synthetic oligonucleotide
  Antisense strand to SEQ ID NO: 1432780
cuaaauaucaaucaggaca

SEQ ID NO: 1432782 - RNA, 19 nt, Artificial Sequence
  Description of Artificial Sequence: Synthetic oligonucleotide
  Sense strand starting at position 2948 of SEQ ID NO: 1243667
aguguuaagugguuaaaua

SEQ ID NO: 1432783 - RNA, 19 nt, Artificial Sequence
  Description of Artificial Sequence: Synthetic oligonucleotide
  Antisense strand to SEQ ID NO: 1432782
uauuuaaccacuuaacacu

SEQ ID NO: 1432784 - RNA, 19 nt, Artificial Sequence
  Description of Artificial Sequence: Synthetic oligonucleotide
  Sense strand starting at position 2949 of SEQ ID NO: 1243667
guguuaagugguuaaauaa

SEQ ID NO: 1432785 - RNA, 19 nt, Artificial Sequence
  Description of Artificial Sequence: Synthetic oligonucleotide
  Antisense strand to SEQ ID NO: 1432784
uuauuuaaccacuuaacac

SEQ ID NO: 1432786 - RNA, 19 nt, Artificial Sequence
  Description of Artificial Sequence: Synthetic oligonucleotide
  Sense strand starting at position 2956 of SEQ ID NO: 1243667
gugguuaaauaauuccaca

SEQ ID NO: 1432787 - RNA, 19 nt, Artificial Sequence
  Description of Artificial Sequence: Synthetic oligonucleotide
  Antisense strand to SEQ ID NO: 1432786
uguggaauuauuuaaccac

SEQ ID NO: 1432788 - RNA, 19 nt, Artificial Sequence
  Description of Artificial Sequence: Synthetic oligonucleotide
  Sense strand starting at position 3044 of SEQ ID NO: 1243667
uguggauggccucaagauc

SEQ ID NO: 1432789 - RNA, 19 nt, Artificial Sequence
  Description of Artificial Sequence: Synthetic oligonucleotide
  Antisense strand to SEQ ID NO: 1432788
gaucuugaggccauccaca

SEQ ID NO: 1432790 - RNA, 19 nt, Artificial Sequence
  Description of Artificial Sequence: Synthetic oligonucleotide
  Sense strand starting at position 3055 of SEQ ID NO: 1243667
ucaagaucagauugccagu

SEQ ID NO: 1432791 - RNA, 19 nt, Artificial Sequence
  Description of Artificial Sequence: Synthetic oligonucleotide
  Antisense strand to SEQ ID NO: 1432790
acuggcaaucugaucuuga

SEQ ID NO: 1432792 - RNA, 19 nt, Artificial Sequence
  Description of Artificial Sequence: Synthetic oligonucleotide
  Sense strand starting at position 3763 of SEQ ID NO: 1243667
uguugagugagccaugauc

SEQ ID NO: 1432793 - RNA, 19 nt, Artificial Sequence
  Description of Artificial Sequence: Synthetic oligonucleotide
  Antisense strand to SEQ ID NO: 1432792
gaucauggcucacucaaca

SEQ ID NO: 1432794 - RNA, 19 nt, Artificial Sequence
  Description of Artificial Sequence: Synthetic oligonucleotide
  Sense strand starting at position 3944 of SEQ ID NO: 1243667
gcacauguucuuggacauu

SEQ ID NO: 1432795 - RNA, 19 nt, Artificial Sequence
  Description of Artificial Sequence: Synthetic oligonucleotide
  Antisense strand to SEQ ID NO: 1432794
aauguccaagaacaugugc

SEQ ID NO: 1432796 - RNA, 19 nt, Artificial Sequence
  Description of Artificial Sequence: Synthetic oligonucleotide
  Sense strand starting at position 16 of SEQ ID NO: 1243668
ccaagaaugcugcacuucu

SEQ ID NO: 1432797 - RNA, 19 nt, Artificial Sequence
  Description of Artificial Sequence: Synthetic oligonucleotide
  Antisense strand to SEQ ID NO: 1432796
agaagugcagcauucuugg

SEQ ID NO: 1432798 - RNA, 19 nt, Artificial Sequence
  Description of Artificial Sequence: Synthetic oligonucleotide
  Sense strand starting at position 135 of SEQ ID NO: 1243668
gaccuauucccguagucag

SEQ ID NO: 1432799 - RNA, 19 nt, Artificial Sequence
  Description of Artificial Sequence: Synthetic oligonucleotide
  Antisense strand to SEQ ID NO: 1432798
cugacuacgggaauagguc

SEQ ID NO: 1432800 - RNA, 19 nt, Artificial Sequence
  Description of Artificial Sequence: Synthetic oligonucleotide
  Sense strand starting at position 207 of SEQ ID NO: 1243668
ucaaguguccuggguucuu

SEQ ID NO: 1432801 - RNA, 19 nt, Artificial Sequence
  Description of Artificial Sequence: Synthetic oligonucleotide
  Antisense strand to SEQ ID NO: 1432800
aagaacccaggacacuuga

SEQ ID NO: 1432802 - RNA, 19 nt, Artificial Sequence
  Description of Artificial Sequence: Synthetic oligonucleotide
  Sense strand starting at position 229 of SEQ ID NO: 1243668
ugggcacugucacuacaua

SEQ ID NO: 1432803 - RNA, 19 nt, Artificial Sequence
  Description of Artificial Sequence: Synthetic oligonucleotide
  Antisense strand to SEQ ID NO: 1432802
uauguagugacagugccca

SEQ ID NO: 1432804 - RNA, 19 nt, Artificial Sequence
  Description of Artificial Sequence: Synthetic oligonucleotide
  Sense strand starting at position 251 of SEQ ID NO: 1243668
ucagacccucucugugaaa

SEQ ID NO: 1432805 - RNA, 19 nt, Artificial Sequence
  Description of Artificial Sequence: Synthetic oligonucleotide
  Antisense strand to SEQ ID NO: 1432804
uuucacagagagggucuga

SEQ ID NO: 1432806 - RNA, 19 nt, Artificial Sequence
  Description of Artificial Sequence: Synthetic oligonucleotide
  Sense strand starting at position 253 of SEQ ID NO: 1243668
agacccucucugugaaaug

SEQ ID NO: 1432807 - RNA, 19 nt, Artificial Sequence
  Description of Artificial Sequence: Synthetic oligonucleotide
  Antisense strand to SEQ ID NO: 1432806
cauuucacagagagggucu

SEQ ID NO: 1432808 - RNA, 19 nt, Artificial Sequence
  Description of Artificial Sequence: Synthetic oligonucleotide
  Sense strand starting at position 328 of SEQ ID NO: 1243668
cuuugaauccagcacugaa

SEQ ID NO: 1432809 - RNA, 19 nt, Artificial Sequence
  Description of Artificial Sequence: Synthetic oligonucleotide
  Antisense strand to SEQ ID NO: 1432808
uucagugcuggauucaaag

SEQ ID NO: 1432810 - RNA, 19 nt, Artificial Sequence
  Description of Artificial Sequence: Synthetic oligonucleotide
  Sense strand starting at position 363 of SEQ ID NO: 1243668
cucccaugguucccaagaa

SEQ ID NO: 1432811 - RNA, 19 nt, Artificial Sequence
  Description of Artificial Sequence: Synthetic oligonucleotide
  Antisense strand to SEQ ID NO: 1432810
uucuugggaaccaugggag

SEQ ID NO: 1432812 - RNA, 19 nt, Artificial Sequence
  Description of Artificial Sequence: Synthetic oligonucleotide
  Sense strand starting at position 397 of SEQ ID NO: 1243668
gaugcaggaucuuggaauu

SEQ ID NO: 1432813 - RNA, 19 nt, Artificial Sequence
  Description of Artificial Sequence: Synthetic oligonucleotide
  Antisense strand to SEQ ID NO: 1432812
aauuccaagauccugcauc

SEQ ID NO: 1432814 - RNA, 19 nt, Artificial Sequence
  Description of Artificial Sequence: Synthetic oligonucleotide
  Sense strand starting at position 500 of SEQ ID NO: 1243668
aggcgaaaugacugguuau

SEQ ID NO: 1432815 - RNA, 19 nt, Artificial Sequence
  Description of Artificial Sequence: Synthetic oligonucleotide
  Antisense strand to SEQ ID NO: 1432814
auaaccagucauuucgccu

SEQ ID NO: 1432816 - RNA, 19 nt, Artificial Sequence
  Description of Artificial Sequence: Synthetic oligonucleotide
  Sense strand starting at position 501 of SEQ ID NO: 1243668
ggcgaaaugacugguuaua

SEQ ID NO: 1432817 - RNA, 19 nt, Artificial Sequence
  Description of Artificial Sequence: Synthetic oligonucleotide
  Antisense strand to SEQ ID NO: 1432816
uauaaccagucauuucgcc

SEQ ID NO: 1432818 - RNA, 19 nt, Artificial Sequence
  Description of Artificial Sequence: Synthetic oligonucleotide
  Sense strand starting at position 503 of SEQ ID NO: 1243668
cgaaaugacugguuauaua

SEQ ID NO: 1432819 - RNA, 19 nt, Artificial Sequence
  Description of Artificial Sequence: Synthetic oligonucleotide
  Antisense strand to SEQ ID NO: 1432818
uauauaaccagucauuucg

SEQ ID NO: 1432820 - RNA, 19 nt, Artificial Sequence
  Description of Artificial Sequence: Synthetic oligonucleotide
  Sense strand starting at position 511 of SEQ ID NO: 1243668
cugguuauauaaucgagau

SEQ ID NO: 1432821 - RNA, 19 nt, Artificial Sequence
  Description of Artificial Sequence: Synthetic oligonucleotide
  Antisense strand to SEQ ID NO: 1432820
aucucgauuauauaaccag

SEQ ID NO: 1432822 - RNA, 19 nt, Artificial Sequence
  Description of Artificial Sequence: Synthetic oligonucleotide
  Sense strand starting at position 512 of SEQ ID NO: 1243668
ugguuauauaaucgagauu

SEQ ID NO: 1432823 - RNA, 19 nt, Artificial Sequence
  Description of Artificial Sequence: Synthetic oligonucleotide
  Antisense strand to SEQ ID NO: 1432822
aaucucgauuauauaacca

SEQ ID NO: 1432824 - RNA, 19 nt, Artificial Sequence
  Description of Artificial Sequence: Synthetic oligonucleotide
  Sense strand starting at position 513 of SEQ ID NO: 1243668
gguuauauaaucgagauuc

SEQ ID NO: 1432825 - RNA, 19 nt, Artificial Sequence
  Description of Artificial Sequence: Synthetic oligonucleotide
  Antisense strand to SEQ ID NO: 1432824
gaaucucgauuauauaacc

SEQ ID NO: 1432826 - RNA, 19 nt, Artificial Sequence
  Description of Artificial Sequence: Synthetic oligonucleotide
  Sense strand starting at position 555 of SEQ ID NO: 1243668
ggcagugagagcugucacu

SEQ ID NO: 1432827 - RNA, 19 nt, Artificial Sequence
  Description of Artificial Sequence: Synthetic oligonucleotide
  Antisense strand to SEQ ID NO: 1432826
agugacagcucucacugcc

SEQ ID NO: 1432828 - RNA, 19 nt, Artificial Sequence
  Description of Artificial Sequence: Synthetic oligonucleotide
  Sense strand starting at position 690 of SEQ ID NO: 1243668
agaugaaguauguguugcu

SEQ ID NO: 1432829 - RNA, 19 nt, Artificial Sequence
  Description of Artificial Sequence: Synthetic oligonucleotide
  Antisense strand to SEQ ID NO: 1432828
agcaacacauacuucaucu

SEQ ID NO: 1432830 - RNA, 19 nt, Artificial Sequence
  Description of Artificial Sequence: Synthetic oligonucleotide
  Sense strand starting at position 693 of SEQ ID NO: 1243668
ugaaguauguguugcuggu

SEQ ID NO: 1432831 - RNA, 19 nt, Artificial Sequence
  Description of Artificial Sequence: Synthetic oligonucleotide
  Antisense strand to SEQ ID NO: 1432830
accagcaacacauacuuca

SEQ ID NO: 1432832 - RNA, 19 nt, Artificial Sequence
  Description of Artificial Sequence: Synthetic oligonucleotide
  Sense strand starting at position 727 of SEQ ID NO: 1243668
agggacucaugcuuggauu

SEQ ID NO: 1432833 - RNA, 19 nt, Artificial Sequence
  Description of Artificial Sequence: Synthetic oligonucleotide
  Antisense strand to SEQ ID NO: 1432832
aauccaagcaugagucccu

SEQ ID NO: 1432834 - RNA, 19 nt, Artificial Sequence
  Description of Artificial Sequence: Synthetic oligonucleotide
  Sense strand starting at position 728 of SEQ ID NO: 1243668
gggacucaugcuuggauuc

SEQ ID NO: 1432835 - RNA, 19 nt, Artificial Sequence
  Description of Artificial Sequence: Synthetic oligonucleotide
  Antisense strand to SEQ ID NO: 1432834
gaauccaagcaugaguccc

SEQ ID NO: 1432836 - RNA, 19 nt, Artificial Sequence
  Description of Artificial Sequence: Synthetic oligonucleotide
  Sense strand starting at position 1046 of SEQ ID NO: 1243668
ggaaacuguuggccugaca

SEQ ID NO: 1432837 - RNA, 19 nt, Artificial Sequence
  Description of Artificial Sequence: Synthetic oligonucleotide
  Antisense strand to SEQ ID NO: 1432836
ugucaggccaacaguuucc

SEQ ID NO: 1432838 - RNA, 19 nt, Artificial Sequence
  Description of Artificial Sequence: Synthetic oligonucleotide
  Sense strand starting at position 2413 of SEQ ID NO: 1243668
cagagauggucagaaacag

SEQ ID NO: 1432839 - RNA, 19 nt, Artificial Sequence
  Description of Artificial Sequence: Synthetic oligonucleotide
  Antisense strand to SEQ ID NO: 1432838
cuguuucugaccaucucug

SEQ ID NO: 1432840 - RNA, 19 nt, Artificial Sequence
  Description of Artificial Sequence: Synthetic oligonucleotide
  Sense strand starting at position 2587 of SEQ ID NO: 1243668
ccuagacauugagacacaa

SEQ ID NO: 1432841 - RNA, 19 nt, Artificial Sequence
  Description of Artificial Sequence: Synthetic oligonucleotide
  Antisense strand to SEQ ID NO: 1432840
uugugucucaaugucuagg

SEQ ID NO: 1432842 - RNA, 19 nt, Artificial Sequence
  Description of Artificial Sequence: Synthetic oligonucleotide
  Sense strand starting at position 2798 of SEQ ID NO: 1243668
aguccugcucugcagugaa

SEQ ID NO: 1432843 - RNA, 19 nt, Artificial Sequence
  Description of Artificial Sequence: Synthetic oligonucleotide
  Antisense strand to SEQ ID NO: 1432842
uucacugcagagcaggacu

SEQ ID NO: 1432844 - RNA, 19 nt, Artificial Sequence
  Description of Artificial Sequence: Synthetic oligonucleotide
  Sense strand starting at position 3229 of SEQ ID NO: 1243668
aagugauauucgccugccu

SEQ ID NO: 1432845 - RNA, 19 nt, Artificial Sequence
  Description of Artificial Sequence: Synthetic oligonucleotide
  Antisense strand to SEQ ID NO: 1432844
aggcaggcgaauaucacuu

SEQ ID NO: 1432846 - RNA, 19 nt, Artificial Sequence
  Description of Artificial Sequence: Synthetic oligonucleotide
  Sense strand starting at position 3231 of SEQ ID NO: 1243668
gugauauucgccugccuca

SEQ ID NO: 1432847 - RNA, 19 nt, Artificial Sequence
  Description of Artificial Sequence: Synthetic oligonucleotide
  Antisense strand to SEQ ID NO: 1432846
ugaggcaggcgaauaucac

SEQ ID NO: 1432848 - RNA, 19 nt, Artificial Sequence
  Description of Artificial Sequence: Synthetic oligonucleotide
  Sense strand starting at position 3433 of SEQ ID NO: 1243668
uuucccagauuauguagaa

SEQ ID NO: 1432849 - RNA, 19 nt, Artificial Sequence
  Description of Artificial Sequence: Synthetic oligonucleotide
  Antisense strand to SEQ ID NO: 1432848
uucuacauaaucugggaaa

SEQ ID NO: 1432850 - RNA, 19 nt, Artificial Sequence
  Description of Artificial Sequence: Synthetic oligonucleotide
  Sense strand starting at position 3434 of SEQ ID NO: 1243668
uucccagauuauguagaaa

SEQ ID NO: 1432851 - RNA, 19 nt, Artificial Sequence
  Description of Artificial Sequence: Synthetic oligonucleotide
  Antisense strand to SEQ ID NO: 1432850
uuucuacauaaucugggaa

SEQ ID NO: 1432852 - RNA, 19 nt, Artificial Sequence
  Description of Artificial Sequence: Synthetic oligonucleotide
  Sense strand starting at position 3667 of SEQ ID NO: 1243668
cugugaaccugaggaauga

SEQ ID NO: 1432853 - RNA, 19 nt, Artificial Sequence
  Description of Artificial Sequence: Synthetic oligonucleotide
  Antisense strand to SEQ ID NO: 1432852
ucauuccucagguucacag

SEQ ID NO: 1432854 - RNA, 19 nt, Artificial Sequence
  Description of Artificial Sequence: Synthetic oligonucleotide
  Sense strand starting at position 3697 of SEQ ID NO: 1243668
ggguuuagcucauaugcuu

SEQ ID NO: 1432855 - RNA, 19 nt, Artificial Sequence
  Description of Artificial Sequence: Synthetic oligonucleotide
  Antisense strand to SEQ ID NO: 1432854
aagcauaugagcuaaaccc

SEQ ID NO: 1432856 - RNA, 19 nt, Artificial Sequence
  Description of Artificial Sequence: Synthetic oligonucleotide
  Sense strand starting at position 3846 of SEQ ID NO: 1243668
gccuccacuucuggaaagu

SEQ ID NO: 1432857 - RNA, 19 nt, Artificial Sequence
  Description of Artificial Sequence: Synthetic oligonucleotide
  Antisense strand to SEQ ID NO: 1432856
acuuuccagaaguggaggc

SEQ ID NO: 1432858 - RNA, 19 nt, Artificial Sequence
  Description of Artificial Sequence: Synthetic oligonucleotide
  Sense strand starting at position 3862 of SEQ ID NO: 1243668
aguccuuccugcugucuaa

SEQ ID NO: 1432859 - RNA, 19 nt, Artificial Sequence
  Description of Artificial Sequence: Synthetic oligonucleotide
  Antisense strand to SEQ ID NO: 1432858
uuagacagcaggaaggacu

SEQ ID NO: 1432860 - RNA, 19 nt, Artificial Sequence
  Description of Artificial Sequence: Synthetic oligonucleotide
  Sense strand starting at position 3869 of SEQ ID NO: 1243668
ccugcugucuaacuguaau

SEQ ID NO: 1432861 - RNA, 19 nt, Artificial Sequence
  Description of Artificial Sequence: Synthetic oligonucleotide
  Antisense strand to SEQ ID NO: 1432860
auuacaguuagacagcagg

SEQ ID NO: 1432862 - RNA, 19 nt, Artificial Sequence
  Description of Artificial Sequence: Synthetic oligonucleotide
  Sense strand starting at position 3875 of SEQ ID NO: 1243668
gucuaacuguaaucuguca

SEQ ID NO: 1432863 - RNA, 19 nt, Artificial Sequence
  Description of Artificial Sequence: Synthetic oligonucleotide
  Antisense strand to SEQ ID NO: 1432862
ugacagauuacaguuagac

SEQ ID NO: 1432864 - RNA, 19 nt, Artificial Sequence
  Description of Artificial Sequence: Synthetic oligonucleotide
  Sense strand starting at position 3880 of SEQ ID NO: 1243668
acuguaaucugucauacug

SEQ ID NO: 1432865 - RNA, 19 nt, Artificial Sequence
  Description of Artificial Sequence: Synthetic oligonucleotide
  Antisense strand to SEQ ID NO: 1432864
caguaugacagauuacagu

SEQ ID NO: 1432866 - RNA, 19 nt, Artificial Sequence
  Description of Artificial Sequence: Synthetic oligonucleotide
  Sense strand starting at position 3888 of SEQ ID NO: 1243668
cugucauacugccuggauu

SEQ ID NO: 1432867 - RNA, 19 nt, Artificial Sequence
  Description of Artificial Sequence: Synthetic oligonucleotide
  Antisense strand to SEQ ID NO: 1432866
aauccaggcaguaugacag

SEQ ID NO: 1432868 - RNA, 19 nt, Artificial Sequence
  Description of Artificial Sequence: Synthetic oligonucleotide
  Sense strand starting at position 51 of SEQ ID NO: 1243669
gaagccuuaccucguuuaa

SEQ ID NO: 1432869 - RNA, 19 nt, Artificial Sequence
  Description of Artificial Sequence: Synthetic oligonucleotide
  Antisense strand to SEQ ID NO: 1432868
uuaaacgagguaaggcuuc

SEQ ID NO: 1432870 - RNA, 19 nt, Artificial Sequence
  Description of Artificial Sequence: Synthetic oligonucleotide
  Sense strand starting at position 127 of SEQ ID NO: 1243669
ggaacguccucgcguguaa

SEQ ID NO: 1432871 - RNA, 19 nt, Artificial Sequence
  Description of Artificial Sequence: Synthetic oligonucleotide
  Antisense strand to SEQ ID NO: 1432870
uuacacgcgaggacguucc

SEQ ID NO: 1432872 - RNA, 19 nt, Artificial Sequence
  Description of Artificial Sequence: Synthetic oligonucleotide
  Sense strand starting at position 131 of SEQ ID NO: 1243669
cguccucgcguguaaguua

SEQ ID NO: 1432873 - RNA, 19 nt, Artificial Sequence
  Description of Artificial Sequence: Synthetic oligonucleotide
  Antisense strand to SEQ ID NO: 1432872
uaacuuacacgcgaggacg

SEQ ID NO: 1432874 - RNA, 19 nt, Artificial Sequence
  Description of Artificial Sequence: Synthetic oligonucleotide
  Sense strand starting at position 132 of SEQ ID NO: 1243669
guccucgcguguaaguuaa

SEQ ID NO: 1432875 - RNA, 19 nt, Artificial Sequence
  Description of Artificial Sequence: Synthetic oligonucleotide
  Antisense strand to SEQ ID NO: 1432874
uuaacuuacacgcgaggac

SEQ ID NO: 1432876 - RNA, 19 nt, Artificial Sequence
  Description of Artificial Sequence: Synthetic oligonucleotide
  Sense strand starting at position 489 of SEQ ID NO: 1243669
gcagaacgguucugagcau

SEQ ID NO: 1432877 - RNA, 19 nt, Artificial Sequence
  Description of Artificial Sequence: Synthetic oligonucleotide
  Antisense strand to SEQ ID NO: 1432876
augcucagaaccguucugc

SEQ ID NO: 1432878 - RNA, 19 nt, Artificial Sequence
  Description of Artificial Sequence: Synthetic oligonucleotide
  Sense strand starting at position 570 of SEQ ID NO: 1243669
ccuagaguguucugaggau

SEQ ID NO: 1432879 - RNA, 19 nt, Artificial Sequence
  Description of Artificial Sequence: Synthetic oligonucleotide
  Antisense strand to SEQ ID NO: 1432878
auccucagaacacucuagg

SEQ ID NO: 1432880 - RNA, 19 nt, Artificial Sequence
  Description of Artificial Sequence: Synthetic oligonucleotide
  Sense strand starting at position 576 of SEQ ID NO: 1243669
guguucugaggauguaaga

SEQ ID NO: 1432881 - RNA, 19 nt, Artificial Sequence
  Description of Artificial Sequence: Synthetic oligonucleotide
  Antisense strand to SEQ ID NO: 1432880
ucuuacauccucagaacac

SEQ ID NO: 1432882 - RNA, 19 nt, Artificial Sequence
  Description of Artificial Sequence: Synthetic oligonucleotide
  Sense strand starting at position 683 of SEQ ID NO: 1243669
ggacgucuuucugaaacaa

SEQ ID NO: 1432883 - RNA, 19 nt, Artificial Sequence
  Description of Artificial Sequence: Synthetic oligonucleotide
  Antisense strand to SEQ ID NO: 1432882
uuguuucagaaagacgucc

SEQ ID NO: 1432884 - RNA, 19 nt, Artificial Sequence
  Description of Artificial Sequence: Synthetic oligonucleotide
  Sense strand starting at position 865 of SEQ ID NO: 1243669
ccagaugcgcuucggaaua

SEQ ID NO: 1432885 - RNA, 19 nt, Artificial Sequence
  Description of Artificial Sequence: Synthetic oligonucleotide
  Antisense strand to SEQ ID NO: 1432884
uauuccgaagcgcaucugg

SEQ ID NO: 1432886 - RNA, 19 nt, Artificial Sequence
  Description of Artificial Sequence: Synthetic oligonucleotide
  Sense strand starting at position 924 of SEQ ID NO: 1243669
ccugcaguagguuauauaa

SEQ ID NO: 1432887 - RNA, 19 nt, Artificial Sequence
  Description of Artificial Sequence: Synthetic oligonucleotide
  Antisense strand to SEQ ID NO: 1432886
uuauauaaccuacugcagg

SEQ ID NO: 1432888 - RNA, 19 nt, Artificial Sequence
  Description of Artificial Sequence: Synthetic oligonucleotide
  Sense strand starting at position 985 of SEQ ID NO: 1243669
uuugcauuucugcagcgaa

SEQ ID NO: 1432889 - RNA, 19 nt, Artificial Sequence
  Description of Artificial Sequence: Synthetic oligonucleotide
  Antisense strand to SEQ ID NO: 1432888
uucgcugcagaaaugcaaa

SEQ ID NO: 1432890 - RNA, 19 nt, Artificial Sequence
  Description of Artificial Sequence: Synthetic oligonucleotide
  Sense strand starting at position 988 of SEQ ID NO: 1243669
gcauuucugcagcgaaaca

SEQ ID NO: 1432891 - RNA, 19 nt, Artificial Sequence
  Description of Artificial Sequence: Synthetic oligonucleotide
  Antisense strand to SEQ ID NO: 1432890
uguuucgcugcagaaaugc

SEQ ID NO: 1432892 - RNA, 19 nt, Artificial Sequence
  Description of Artificial Sequence: Synthetic oligonucleotide
  Sense strand starting at position 1114 of SEQ ID NO: 1243669
agcuuuggagcuugggaau

SEQ ID NO: 1432893 - RNA, 19 nt, Artificial Sequence
  Description of Artificial Sequence: Synthetic oligonucleotide
  Antisense strand to SEQ ID NO: 1432892
auucccaagcuccaaagcu

SEQ ID NO: 1432894 - RNA, 19 nt, Artificial Sequence
  Description of Artificial Sequence: Synthetic oligonucleotide
  Sense strand starting at position 1121 of SEQ ID NO: 1243669
gagcuugggaauugcugau

SEQ ID NO: 1432895 - RNA, 19 nt, Artificial Sequence
  Description of Artificial Sequence: Synthetic oligonucleotide
  Antisense strand to SEQ ID NO: 1432894
aucagcaauucccaagcuc

SEQ ID NO: 1432896 - RNA, 19 nt, Artificial Sequence
  Description of Artificial Sequence: Synthetic oligonucleotide
  Sense strand starting at position 1127 of SEQ ID NO: 1243669
gggaauugcugaugaggga

SEQ ID NO: 1432897 - RNA, 19 nt, Artificial Sequence
  Description of Artificial Sequence: Synthetic oligonucleotide
  Antisense strand to SEQ ID NO: 1432896
ucccucaucagcaauuccc

SEQ ID NO: 1432898 - RNA, 19 nt, Artificial Sequence
  Description of Artificial Sequence: Synthetic oligonucleotide
  Sense strand starting at position 1194 of SEQ ID NO: 1243669
uccgaagucuucggacaga

SEQ ID NO: 1432899 - RNA, 19 nt, Artificial Sequence
  Description of Artificial Sequence: Synthetic oligonucleotide
  Antisense strand to SEQ ID NO: 1432898
ucuguccgaagacuucgga

SEQ ID NO: 1432900 - RNA, 19 nt, Artificial Sequence
  Description of Artificial Sequence: Synthetic oligonucleotide
  Sense strand starting at position 1197 of SEQ ID NO: 1243669
gaagucuucggacagaggu

SEQ ID NO: 1432901 - RNA, 19 nt, Artificial Sequence
  Description of Artificial Sequence: Synthetic oligonucleotide
  Antisense strand to SEQ ID NO: 1432900
accucuguccgaagacuuc

SEQ ID NO: 1432902 - RNA, 19 nt, Artificial Sequence
  Description of Artificial Sequence: Synthetic oligonucleotide
  Sense strand starting at position 1354 of SEQ ID NO: 1243669
acgugcaaguccuggauga

SEQ ID NO: 1432903 - RNA, 19 nt, Artificial Sequence
  Description of Artificial Sequence: Synthetic oligonucleotide
  Antisense strand to SEQ ID NO: 1432902
ucauccaggacuugcacgu

SEQ ID NO: 1432904 - RNA, 19 nt, Artificial Sequence
  Description of Artificial Sequence: Synthetic oligonucleotide
  Sense strand starting at position 2163 of SEQ ID NO: 1243669
auguaaggcuuccauucuu

SEQ ID NO: 1432905 - RNA, 19 nt, Artificial Sequence
  Description of Artificial Sequence: Synthetic oligonucleotide
  Antisense strand to SEQ ID NO: 1432904
aagaauggaagccuuacau

SEQ ID NO: 1432906 - RNA, 19 nt, Artificial Sequence
  Description of Artificial Sequence: Synthetic oligonucleotide
  Sense strand starting at position 2222 of SEQ ID NO: 1243669
gguugauucuaagauuuga

SEQ ID NO: 1432907 - RNA, 19 nt, Artificial Sequence
  Description of Artificial Sequence: Synthetic oligonucleotide
  Antisense strand to SEQ ID NO: 1432906
ucaaaucuuagaaucaacc

SEQ ID NO: 1432908 - RNA, 19 nt, Artificial Sequence
  Description of Artificial Sequence: Synthetic oligonucleotide
  Sense strand starting at position 2299 of SEQ ID NO: 1243669
gagggaagccuuggcuuua

SEQ ID NO: 1432909 - RNA, 19 nt, Artificial Sequence
  Description of Artificial Sequence: Synthetic oligonucleotide
  Antisense strand to SEQ ID NO: 1432908
uaaagccaaggcuucccuc

SEQ ID NO: 1432910 - RNA, 19 nt, Artificial Sequence
  Description of Artificial Sequence: Synthetic oligonucleotide
  Sense strand starting at position 2300 of SEQ ID NO: 1243669
agggaagccuuggcuuuaa

SEQ ID NO: 1432911 - RNA, 19 nt, Artificial Sequence
  Description of Artificial Sequence: Synthetic oligonucleotide
  Antisense strand to SEQ ID NO: 1432910
uuaaagccaaggcuucccu

SEQ ID NO: 1432912 - RNA, 19 nt, Artificial Sequence
  Description of Artificial Sequence: Synthetic oligonucleotide
  Sense strand starting at position 2349 of SEQ ID NO: 1243669
acaccacgcuugcuuaaua

SEQ ID NO: 1432913 - RNA, 19 nt, Artificial Sequence
  Description of Artificial Sequence: Synthetic oligonucleotide
  Antisense strand to SEQ ID NO: 1432912
uauuaagcaagcguggugu

SEQ ID NO: 1432914 - RNA, 19 nt, Artificial Sequence
  Description of Artificial Sequence: Synthetic oligonucleotide
  Sense strand starting at position 2368 of SEQ ID NO: 1243669
guugacugcgccuuaguuu

SEQ ID NO: 1432915 - RNA, 19 nt, Artificial Sequence
  Description of Artificial Sequence: Synthetic oligonucleotide
  Antisense strand to SEQ ID NO: 1432914
aaacuaaggcgcagucaac

SEQ ID NO: 1432916 - RNA, 19 nt, Artificial Sequence
  Description of Artificial Sequence: Synthetic oligonucleotide
  Sense strand starting at position 2958 of SEQ ID NO: 1243669
gggagagccuaacuaaauc

SEQ ID NO: 1432917 - RNA, 19 nt, Artificial Sequence
  Description of Artificial Sequence: Synthetic oligonucleotide
  Antisense strand to SEQ ID NO: 1432916
gauuuaguuaggcucuccc

SEQ ID NO: 1432918 - RNA, 19 nt, Artificial Sequence
  Description of Artificial Sequence: Synthetic oligonucleotide
  Sense strand starting at position 3171 of SEQ ID NO: 1243669
agcguuccucgacgaggaa

SEQ ID NO: 1432919 - RNA, 19 nt, Artificial Sequence
  Description of Artificial Sequence: Synthetic oligonucleotide
  Antisense strand to SEQ ID NO: 1432918
uuccucgucgaggaacgcu

SEQ ID NO: 1432920 - RNA, 19 nt, Artificial Sequence
  Description of Artificial Sequence: Synthetic oligonucleotide
  Sense strand starting at position 3172 of SEQ ID NO: 1243669
gcguuccucgacgaggaaa

SEQ ID NO: 1432921 - RNA, 19 nt, Artificial Sequence
  Description of Artificial Sequence: Synthetic oligonucleotide
  Antisense strand to SEQ ID NO: 1432920
uuuccucgucgaggaacgc

SEQ ID NO: 1432922 - RNA, 19 nt, Artificial Sequence
  Description of Artificial Sequence: Synthetic oligonucleotide
  Sense strand starting at position 3192 of SEQ ID NO: 1243669
gguguaaacugagucacua

SEQ ID NO: 1432923 - RNA, 19 nt, Artificial Sequence
  Description of Artificial Sequence: Synthetic oligonucleotide
  Antisense strand to SEQ ID NO: 1432922
uagugacucaguuuacacc

SEQ ID NO: 1432924 - RNA, 19 nt, Artificial Sequence
  Description of Artificial Sequence: Synthetic oligonucleotide
  Sense strand starting at position 3495 of SEQ ID NO: 1243669
ugcugucaccgauacccaa

SEQ ID NO: 1432925 - RNA, 19 nt, Artificial Sequence
  Description of Artificial Sequence: Synthetic oligonucleotide
  Antisense strand to SEQ ID NO: 1432924
uuggguaucggugacagca

SEQ ID NO: 1432926 - RNA, 19 nt, Artificial Sequence
  Description of Artificial Sequence: Synthetic oligonucleotide
  Sense strand starting at position 3734 of SEQ ID NO: 1243669
ggauuugcuguccgggagu

SEQ ID NO: 1432927 - RNA, 19 nt, Artificial Sequence
  Description of Artificial Sequence: Synthetic oligonucleotide
  Antisense strand to SEQ ID NO: 1432926
acucccggacagcaaaucc

SEQ ID NO: 1432928 - RNA, 19 nt, Artificial Sequence
  Description of Artificial Sequence: Synthetic oligonucleotide
  Sense strand starting at position 339 of SEQ ID NO: 1243670
gggagagccuaacuaaauc

SEQ ID NO: 1432929 - RNA, 19 nt, Artificial Sequence
  Description of Artificial Sequence: Synthetic oligonucleotide
  Antisense strand to SEQ ID NO: 1432928
gauuuaguuaggcucuccc

SEQ ID NO: 1432930 - RNA, 19 nt, Artificial Sequence
  Description of Artificial Sequence: Synthetic oligonucleotide
  Sense strand starting at position 552 of SEQ ID NO: 1243670
agcguuccucgacgaggaa

SEQ ID NO: 1432931 - RNA, 19 nt, Artificial Sequence
  Description of Artificial Sequence: Synthetic oligonucleotide
  Antisense strand to SEQ ID NO: 1432930
uuccucgucgaggaacgcu

SEQ ID NO: 1432932 - RNA, 19 nt, Artificial Sequence
  Description of Artificial Sequence: Synthetic oligonucleotide
  Sense strand starting at position 553 of SEQ ID NO: 1243670
gcguuccucgacgaggaaa

SEQ ID NO: 1432933 - RNA, 19 nt, Artificial Sequence
  Description of Artificial Sequence: Synthetic oligonucleotide
  Antisense strand to SEQ ID NO: 1432932
uuuccucgucgaggaacgc

SEQ ID NO: 1432934 - RNA, 19 nt, Artificial Sequence
  Description of Artificial Sequence: Synthetic oligonucleotide
  Sense strand starting at position 573 of SEQ ID NO: 1243670
gguguaaacugagucacua

SEQ ID NO: 1432935 - RNA, 19 nt, Artificial Sequence
  Description of Artificial Sequence: Synthetic oligonucleotide
  Antisense strand to SEQ ID NO: 1432934
uagugacucaguuuacacc

SEQ ID NO: 1432936 - RNA, 19 nt, Artificial Sequence
  Description of Artificial Sequence: Synthetic oligonucleotide
  Sense strand starting at position 876 of SEQ ID NO: 1243670
ugcugucaccgauacccaa

SEQ ID NO: 1432937 - RNA, 19 nt, Artificial Sequence
  Description of Artificial Sequence: Synthetic oligonucleotide
  Antisense strand to SEQ ID NO: 1432936
uuggguaucggugacagca

SEQ ID NO: 1432938 - RNA, 19 nt, Artificial Sequence
  Description of Artificial Sequence: Synthetic oligonucleotide
  Sense strand starting at position 1115 of SEQ ID NO: 1243670
ggauuugcuguccgggagu

SEQ ID NO: 1432939 - RNA, 19 nt, Artificial Sequence
  Description of Artificial Sequence: Synthetic oligonucleotide
  Antisense strand to SEQ ID NO: 1432938
acucccggacagcaaaucc

SEQ ID NO: 1432940 - RNA, 19 nt, Artificial Sequence
  Description of Artificial Sequence: Synthetic oligonucleotide
  Sense strand starting at position 1382 of SEQ ID NO: 1243670
gaugucucgggcuggauaa

SEQ ID NO: 1432941 - RNA, 19 nt, Artificial Sequence
  Description of Artificial Sequence: Synthetic oligonucleotide
  Antisense strand to SEQ ID NO: 1432940
uuauccagcccgagacauc

SEQ ID NO: 1432942 - RNA, 19 nt, Artificial Sequence
  Description of Artificial Sequence: Synthetic oligonucleotide
  Sense strand starting at position 2141 of SEQ ID NO: 1243670
ggcugucuccagggagaaa

SEQ ID NO: 1432943 - RNA, 19 nt, Artificial Sequence
  Description of Artificial Sequence: Synthetic oligonucleotide
  Antisense strand to SEQ ID NO: 1432942
uuucucccuggagacagcc

SEQ ID NO: 1432944 - RNA, 19 nt, Artificial Sequence
  Description of Artificial Sequence: Synthetic oligonucleotide
  Sense strand starting at position 2354 of SEQ ID NO: 1243670
gggucuucuguuggagaau

SEQ ID NO: 1432945 - RNA, 19 nt, Artificial Sequence
  Description of Artificial Sequence: Synthetic oligonucleotide
  Antisense strand to SEQ ID NO: 1432944
auucuccaacagaagaccc

SEQ ID NO: 1432946 - RNA, 19 nt, Artificial Sequence
  Description of Artificial Sequence: Synthetic oligonucleotide
  Sense strand starting at position 2355 of SEQ ID NO: 1243670
ggucuucuguuggagaauu

SEQ ID NO: 1432947 - RNA, 19 nt, Artificial Sequence
  Description of Artificial Sequence: Synthetic oligonucleotide
  Antisense strand to SEQ ID NO: 1432946
aauucuccaacagaagacc

SEQ ID NO: 1432948 - RNA, 19 nt, Artificial Sequence
  Description of Artificial Sequence: Synthetic oligonucleotide
  Sense strand starting at position 2531 of SEQ ID NO: 1243670
ggccaguguucugggagga

SEQ ID NO: 1432949 - RNA, 19 nt, Artificial Sequence
  Description of Artificial Sequence: Synthetic oligonucleotide
  Antisense strand to SEQ ID NO: 1432948
uccucccagaacacuggcc

SEQ ID NO: 1432950 - RNA, 19 nt, Artificial Sequence
  Description of Artificial Sequence: Synthetic oligonucleotide
  Sense strand starting at position 2532 of SEQ ID NO: 1243670
gccaguguucugggaggaa

SEQ ID NO: 1432951 - RNA, 19 nt, Artificial Sequence
  Description of Artificial Sequence: Synthetic oligonucleotide
  Antisense strand to SEQ ID NO: 1432950
uuccucccagaacacuggc

SEQ ID NO: 1432952 - RNA, 19 nt, Artificial Sequence
  Description of Artificial Sequence: Synthetic oligonucleotide
  Sense strand starting at position 2535 of SEQ ID NO: 1243670
aguguucugggaggaagaa

SEQ ID NO: 1432953 - RNA, 19 nt, Artificial Sequence
  Description of Artificial Sequence: Synthetic oligonucleotide
  Antisense strand to SEQ ID NO: 1432952
uucuuccucccagaacacu

SEQ ID NO: 1432954 - RNA, 19 nt, Artificial Sequence
  Description of Artificial Sequence: Synthetic oligonucleotide
  Sense strand starting at position 2785 of SEQ ID NO: 1243670
guccacacuuccucugaga

SEQ ID NO: 1432955 - RNA, 19 nt, Artificial Sequence
  Description of Artificial Sequence: Synthetic oligonucleotide
  Antisense strand to SEQ ID NO: 1432954
ucucagaggaaguguggac

SEQ ID NO: 1432956 - RNA, 19 nt, Artificial Sequence
  Description of Artificial Sequence: Synthetic oligonucleotide
  Sense strand starting at position 2799 of SEQ ID NO: 1243670
ugagaaucugugugucuga

SEQ ID NO: 1432957 - RNA, 19 nt, Artificial Sequence
  Description of Artificial Sequence: Synthetic oligonucleotide
  Antisense strand to SEQ ID NO: 1432956
ucagacacacagauucuca

SEQ ID NO: 1432958 - RNA, 19 nt, Artificial Sequence
  Description of Artificial Sequence: Synthetic oligonucleotide
  Sense strand starting at position 3430 of SEQ ID NO: 1243670
cuuuccugucaaugggaua

SEQ ID NO: 1432959 - RNA, 19 nt, Artificial Sequence
  Description of Artificial Sequence: Synthetic oligonucleotide
  Antisense strand to SEQ ID NO: 1432958
uaucccauugacaggaaag

SEQ ID NO: 1432960 - RNA, 19 nt, Artificial Sequence
  Description of Artificial Sequence: Synthetic oligonucleotide
  Sense strand starting at position 3433 of SEQ ID NO: 1243670
uccugucaaugggauagua

SEQ ID NO: 1432961 - RNA, 19 nt, Artificial Sequence
  Description of Artificial Sequence: Synthetic oligonucleotide
  Antisense strand to SEQ ID NO: 1432960
uacuaucccauugacagga

SEQ ID NO: 1432962 - RNA, 19 nt, Artificial Sequence
  Description of Artificial Sequence: Synthetic oligonucleotide
  Sense strand starting at position 3825 of SEQ ID NO: 1243670
ggguacaucagcuauuaug

SEQ ID NO: 1432963 - RNA, 19 nt, Artificial Sequence
  Description of Artificial Sequence: Synthetic oligonucleotide
  Antisense strand to SEQ ID NO: 1432962
cauaauagcugauguaccc

SEQ ID NO: 1432964 - RNA, 19 nt, Artificial Sequence
  Description of Artificial Sequence: Synthetic oligonucleotide
  Sense strand starting at position 107 of SEQ ID NO: 1243671
cuaggugaauaugguaaau

SEQ ID NO: 1432965 - RNA, 19 nt, Artificial Sequence
  Description of Artificial Sequence: Synthetic oligonucleotide
  Antisense strand to SEQ ID NO: 1432964
auuuaccauauucaccuag

SEQ ID NO: 1432966 - RNA, 19 nt, Artificial Sequence
  Description of Artificial Sequence: Synthetic oligonucleotide
  Sense strand starting at position 109 of SEQ ID NO: 1243671
aggugaauaugguaaauga

SEQ ID NO: 1432967 - RNA, 19 nt, Artificial Sequence
  Description of Artificial Sequence: Synthetic oligonucleotide
  Antisense strand to SEQ ID NO: 1432966
ucauuuaccauauucaccu

SEQ ID NO: 1432968 - RNA, 19 nt, Artificial Sequence
  Description of Artificial Sequence: Synthetic oligonucleotide
  Sense strand starting at position 137 of SEQ ID NO: 1243671
aggcacaaucgucauuaca

SEQ ID NO: 1432969 - RNA, 19 nt, Artificial Sequence
  Description of Artificial Sequence: Synthetic oligonucleotide
  Antisense strand to SEQ ID NO: 1432968
uguaaugacgauugugccu

SEQ ID NO: 1432970 - RNA, 19 nt, Artificial Sequence
  Description of Artificial Sequence: Synthetic oligonucleotide
  Sense strand starting at position 139 of SEQ ID NO: 1243671
gcacaaucgucauuacacu

SEQ ID NO: 1432971 - RNA, 19 nt, Artificial Sequence
  Description of Artificial Sequence: Synthetic oligonucleotide
  Antisense strand to SEQ ID NO: 1432970
aguguaaugacgauugugc

SEQ ID NO: 1432972 - RNA, 19 nt, Artificial Sequence
  Description of Artificial Sequence: Synthetic oligonucleotide
  Sense strand starting at position 145 of SEQ ID NO: 1243671
ucgucauuacacugugaug

SEQ ID NO: 1432973 - RNA, 19 nt, Artificial Sequence
  Description of Artificial Sequence: Synthetic oligonucleotide
  Antisense strand to SEQ ID NO: 1432972
caucacaguguaaugacga

SEQ ID NO: 1432974 - RNA, 19 nt, Artificial Sequence
  Description of Artificial Sequence: Synthetic oligonucleotide
  Sense strand starting at position 147 of SEQ ID NO: 1243671
gucauuacacugugauguc

SEQ ID NO: 1432975 - RNA, 19 nt, Artificial Sequence
  Description of Artificial Sequence: Synthetic oligonucleotide
  Antisense strand to SEQ ID NO: 1432974
gacaucacaguguaaugac

SEQ ID NO: 1432976 - RNA, 19 nt, Artificial Sequence
  Description of Artificial Sequence: Synthetic oligonucleotide
  Sense strand starting at position 156 of SEQ ID NO: 1243671
cugugaugucucuacggga

SEQ ID NO: 1432977 - RNA, 19 nt, Artificial Sequence
  Description of Artificial Sequence: Synthetic oligonucleotide
  Antisense strand to SEQ ID NO: 1432976
ucccguagagacaucacag

SEQ ID NO: 1432978 - RNA, 19 nt, Artificial Sequence
  Description of Artificial Sequence: Synthetic oligonucleotide
  Sense strand starting at position 227 of SEQ ID NO: 1243671
ugcucacagucauucgauu

SEQ ID NO: 1432979 - RNA, 19 nt, Artificial Sequence
  Description of Artificial Sequence: Synthetic oligonucleotide
  Antisense strand to SEQ ID NO: 1432978
aaucgaaugacugugagca

SEQ ID NO: 1432980 - RNA, 19 nt, Artificial Sequence
  Description of Artificial Sequence: Synthetic oligonucleotide
  Sense strand starting at position 233 of SEQ ID NO: 1243671
cagucauucgauugagauu

SEQ ID NO: 1432981 - RNA, 19 nt, Artificial Sequence
  Description of Artificial Sequence: Synthetic oligonucleotide
  Antisense strand to SEQ ID NO: 1432980
aaucucaaucgaaugacug

SEQ ID NO: 1432982 - RNA, 19 nt, Artificial Sequence
  Description of Artificial Sequence: Synthetic oligonucleotide
  Sense strand starting at position 359 of SEQ ID NO: 1243671
ugggaugauucugcaggca

SEQ ID NO: 1432983 - RNA, 19 nt, Artificial Sequence
  Description of Artificial Sequence: Synthetic oligonucleotide
  Antisense strand to SEQ ID NO: 1432982
ugccugcagaaucauccca

SEQ ID NO: 1432984 - RNA, 19 nt, Artificial Sequence
  Description of Artificial Sequence: Synthetic oligonucleotide
  Sense strand starting at position 572 of SEQ ID NO: 1243671
gcaacaguucuggaaguuc

SEQ ID NO: 1432985 - RNA, 19 nt, Artificial Sequence
  Description of Artificial Sequence: Synthetic oligonucleotide
  Antisense strand to SEQ ID NO: 1432984
gaacuuccagaacuguugc

SEQ ID NO: 1432986 - RNA, 19 nt, Artificial Sequence
  Description of Artificial Sequence: Synthetic oligonucleotide
  Sense strand starting at position 580 of SEQ ID NO: 1243671
ucuggaaguucccucaaca

SEQ ID NO: 1432987 - RNA, 19 nt, Artificial Sequence
  Description of Artificial Sequence: Synthetic oligonucleotide
  Antisense strand to SEQ ID NO: 1432986
uguugagggaacuuccaga

SEQ ID NO: 1432988 - RNA, 19 nt, Artificial Sequence
  Description of Artificial Sequence: Synthetic oligonucleotide
  Sense strand starting at position 786 of SEQ ID NO: 1243671
cgaccacaucccugaucau

SEQ ID NO: 1432989 - RNA, 19 nt, Artificial Sequence
  Description of Artificial Sequence: Synthetic oligonucleotide
  Antisense strand to SEQ ID NO: 1432988
augaucagggauguggucg

SEQ ID NO: 1432990 - RNA, 19 nt, Artificial Sequence
  Description of Artificial Sequence: Synthetic oligonucleotide
  Sense strand starting at position 943 of SEQ ID NO: 1243671
acaggucuaugggagcuaa

SEQ ID NO: 1432991 - RNA, 19 nt, Artificial Sequence
  Description of Artificial Sequence: Synthetic oligonucleotide
  Antisense strand to SEQ ID NO: 1432990
uuagcucccauagaccugu

SEQ ID NO: 1432992 - RNA, 19 nt, Artificial Sequence
  Description of Artificial Sequence: Synthetic oligonucleotide
  Sense strand starting at position 947 of SEQ ID NO: 1243671
gucuaugggagcuaagcua

SEQ ID NO: 1432993 - RNA, 19 nt, Artificial Sequence
  Description of Artificial Sequence: Synthetic oligonucleotide
  Antisense strand to SEQ ID NO: 1432992
uagcuuagcucccauagac

SEQ ID NO: 1432994 - RNA, 19 nt, Artificial Sequence
  Description of Artificial Sequence: Synthetic oligonucleotide
  Sense strand starting at position 1384 of SEQ ID NO: 1243671
gggagaucucuggguggac

SEQ ID NO: 1432995 - RNA, 19 nt, Artificial Sequence
  Description of Artificial Sequence: Synthetic oligonucleotide
  Antisense strand to SEQ ID NO: 1432994
guccacccagagaucuccc

SEQ ID NO: 1432996 - RNA, 19 nt, Artificial Sequence
  Description of Artificial Sequence: Synthetic oligonucleotide
  Sense strand starting at position 1385 of SEQ ID NO: 1243671
ggagaucucuggguggaca

SEQ ID NO: 1432997 - RNA, 19 nt, Artificial Sequence
  Description of Artificial Sequence: Synthetic oligonucleotide
  Antisense strand to SEQ ID NO: 1432996
uguccacccagagaucucc

SEQ ID NO: 1432998 - RNA, 19 nt, Artificial Sequence
  Description of Artificial Sequence: Synthetic oligonucleotide
  Sense strand starting at position 1524 of SEQ ID NO: 1243671
cugggucagguguaaagaa

SEQ ID NO: 1432999 - RNA, 19 nt, Artificial Sequence
  Description of Artificial Sequence: Synthetic oligonucleotide
  Antisense strand to SEQ ID NO: 1432998
uucuuuacaccugacccag

SEQ ID NO: 1433000 - RNA, 19 nt, Artificial Sequence
  Description of Artificial Sequence: Synthetic oligonucleotide
  Sense strand starting at position 1772 of SEQ ID NO: 1243671
cuuggaguuuguccuagga

SEQ ID NO: 1433001 - RNA, 19 nt, Artificial Sequence
  Description of Artificial Sequence: Synthetic oligonucleotide
  Antisense strand to SEQ ID NO: 1433000
uccuaggacaaacuccaag

SEQ ID NO: 1433002 - RNA, 19 nt, Artificial Sequence
  Description of Artificial Sequence: Synthetic oligonucleotide
  Sense strand starting at position 1774 of SEQ ID NO: 1243671
uggaguuuguccuaggaag

SEQ ID NO: 1433003 - RNA, 19 nt, Artificial Sequence
  Description of Artificial Sequence: Synthetic oligonucleotide
  Antisense strand to SEQ ID NO: 1433002
cuuccuaggacaaacucca

SEQ ID NO: 1433004 - RNA, 19 nt, Artificial Sequence
  Description of Artificial Sequence: Synthetic oligonucleotide
  Sense strand starting at position 1917 of SEQ ID NO: 1243671
cucaguucccaguggagga

SEQ ID NO: 1433005 - RNA, 19 nt, Artificial Sequence
  Description of Artificial Sequence: Synthetic oligonucleotide
  Antisense strand to SEQ ID NO: 1433004
uccuccacugggaacugag

SEQ ID NO: 1433006 - RNA, 19 nt, Artificial Sequence
  Description of Artificial Sequence: Synthetic oligonucleotide
  Sense strand starting at position 2228 of SEQ ID NO: 1243671
gccucuuugugggagagga

SEQ ID NO: 1433007 - RNA, 19 nt, Artificial Sequence
  Description of Artificial Sequence: Synthetic oligonucleotide
  Antisense strand to SEQ ID NO: 1433006
uccucucccacaaagaggc

SEQ ID NO: 1433008 - RNA, 19 nt, Artificial Sequence
  Description of Artificial Sequence: Synthetic oligonucleotide
  Sense strand starting at position 2522 of SEQ ID NO: 1243671
cuggaacuguccugaacac

SEQ ID NO: 1433009 - RNA, 19 nt, Artificial Sequence
  Description of Artificial Sequence: Synthetic oligonucleotide
  Antisense strand to SEQ ID NO: 1433008
guguucaggacaguuccag

SEQ ID NO: 1433010 - RNA, 19 nt, Artificial Sequence
  Description of Artificial Sequence: Synthetic oligonucleotide
  Sense strand starting at position 2560 of SEQ ID NO: 1243671
gagcuucgucgugucacua

SEQ ID NO: 1433011 - RNA, 19 nt, Artificial Sequence
  Description of Artificial Sequence: Synthetic oligonucleotide
  Antisense strand to SEQ ID NO: 1433010
uagugacacgacgaagcuc

SEQ ID NO: 1433012 - RNA, 19 nt, Artificial Sequence
  Description of Artificial Sequence: Synthetic oligonucleotide
  Sense strand starting at position 2561 of SEQ ID NO: 1243671
agcuucgucgugucacuaa

SEQ ID NO: 1433013 - RNA, 19 nt, Artificial Sequence
  Description of Artificial Sequence: Synthetic oligonucleotide
  Antisense strand to SEQ ID NO: 1433012
uuagugacacgacgaagcu

SEQ ID NO: 1433014 - RNA, 19 nt, Artificial Sequence
  Description of Artificial Sequence: Synthetic oligonucleotide
  Sense strand starting at position 2707 of SEQ ID NO: 1243671
gggacugcaucuuaccaca

SEQ ID NO: 1433015 - RNA, 19 nt, Artificial Sequence
  Description of Artificial Sequence: Synthetic oligonucleotide
  Antisense strand to SEQ ID NO: 1433014
ugugguaagaugcaguccc

SEQ ID NO: 1433016 - RNA, 19 nt, Artificial Sequence
  Description of Artificial Sequence: Synthetic oligonucleotide
  Sense strand starting at position 2768 of SEQ ID NO: 1243671
ugcucaauaugcgcgauua

SEQ ID NO: 1433017 - RNA, 19 nt, Artificial Sequence
  Description of Artificial Sequence: Synthetic oligonucleotide
  Antisense strand to SEQ ID NO: 1433016
uaaucgcgcauauugagca

SEQ ID NO: 1433018 - RNA, 19 nt, Artificial Sequence
  Description of Artificial Sequence: Synthetic oligonucleotide
  Sense strand starting at position 2769 of SEQ ID NO: 1243671
gcucaauaugcgcgauuag

SEQ ID NO: 1433019 - RNA, 19 nt, Artificial Sequence
  Description of Artificial Sequence: Synthetic oligonucleotide
  Antisense strand to SEQ ID NO: 1433018
cuaaucgcgcauauugagc

SEQ ID NO: 1433020 - RNA, 19 nt, Artificial Sequence
  Description of Artificial Sequence: Synthetic oligonucleotide
  Sense strand starting at position 2770 of SEQ ID NO: 1243671
cucaauaugcgcgauuaga

SEQ ID NO: 1433021 - RNA, 19 nt, Artificial Sequence
  Description of Artificial Sequence: Synthetic oligonucleotide
  Antisense strand to SEQ ID NO: 1433020
ucuaaucgcgcauauugag

SEQ ID NO: 1433022 - RNA, 19 nt, Artificial Sequence
  Description of Artificial Sequence: Synthetic oligonucleotide
  Sense strand starting at position 2886 of SEQ ID NO: 1243671
ugagcugcugccugacaga

SEQ ID NO: 1433023 - RNA, 19 nt, Artificial Sequence
  Description of Artificial Sequence: Synthetic oligonucleotide
  Antisense strand to SEQ ID NO: 1433022
ucugucaggcagcagcuca

SEQ ID NO: 1433024 - RNA, 19 nt, Artificial Sequence
  Description of Artificial Sequence: Synthetic oligonucleotide
  Sense strand starting at position 2988 of SEQ ID NO: 1243671
ugagaucccuucucagcaa

SEQ ID NO: 1433025 - RNA, 19 nt, Artificial Sequence
  Description of Artificial Sequence: Synthetic oligonucleotide
  Antisense strand to SEQ ID NO: 1433024
uugcugagaagggaucuca

SEQ ID NO: 1433026 - RNA, 19 nt, Artificial Sequence
  Description of Artificial Sequence: Synthetic oligonucleotide
  Sense strand starting at position 3203 of SEQ ID NO: 1243671
agcgucuaguggucacuua

SEQ ID NO: 1433027 - RNA, 19 nt, Artificial Sequence
  Description of Artificial Sequence: Synthetic oligonucleotide
  Antisense strand to SEQ ID NO: 1433026
uaagugaccacuagacgcu

SEQ ID NO: 1433028 - RNA, 19 nt, Artificial Sequence
  Description of Artificial Sequence: Synthetic oligonucleotide
  Sense strand starting at position 3216 of SEQ ID NO: 1243671
cacuuaggguaaguguuau

SEQ ID NO: 1433029 - RNA, 19 nt, Artificial Sequence
  Description of Artificial Sequence: Synthetic oligonucleotide
  Antisense strand to SEQ ID NO: 1433028
auaacacuuacccuaagug

SEQ ID NO: 1433030 - RNA, 19 nt, Artificial Sequence
  Description of Artificial Sequence: Synthetic oligonucleotide
  Sense strand starting at position 3224 of SEQ ID NO: 1243671
guaaguguuauacggccuu

SEQ ID NO: 1433031 - RNA, 19 nt, Artificial Sequence
  Description of Artificial Sequence: Synthetic oligonucleotide
  Antisense strand to SEQ ID NO: 1433030
aaggccguauaacacuuac

SEQ ID NO: 1433032 - RNA, 19 nt, Artificial Sequence
  Description of Artificial Sequence: Synthetic oligonucleotide
  Sense strand starting at position 3278 of SEQ ID NO: 1243671
gacacuucuuggccucuga

SEQ ID NO: 1433033 - RNA, 19 nt, Artificial Sequence
  Description of Artificial Sequence: Synthetic oligonucleotide
  Antisense strand to SEQ ID NO: 1433032
ucagaggccaagaaguguc

SEQ ID NO: 1433034 - RNA, 19 nt, Artificial Sequence
  Description of Artificial Sequence: Synthetic oligonucleotide
  Sense strand starting at position 3621 of SEQ ID NO: 1243671
gcaggauaaugugcacauu

SEQ ID NO: 1433035 - RNA, 19 nt, Artificial Sequence
  Description of Artificial Sequence: Synthetic oligonucleotide
  Antisense strand to SEQ ID NO: 1433034
aaugugcacauuauccugc

SEQ ID NO: 1433036 - RNA, 19 nt, Artificial Sequence
  Description of Artificial Sequence: Synthetic oligonucleotide
  Sense strand starting at position 3826 of SEQ ID NO: 1243671
gcuaguugaugccuaauga

SEQ ID NO: 1433037 - RNA, 19 nt, Artificial Sequence
  Description of Artificial Sequence: Synthetic oligonucleotide
  Antisense strand to SEQ ID NO: 1433036
ucauuaggcaucaacuagc

SEQ ID NO: 1433038 - RNA, 19 nt, Artificial Sequence
  Description of Artificial Sequence: Synthetic oligonucleotide
  Sense strand starting at position 3827 of SEQ ID NO: 1243671
cuaguugaugccuaaugaa

SEQ ID NO: 1433039 - RNA, 19 nt, Artificial Sequence
  Description of Artificial Sequence: Synthetic oligonucleotide
  Antisense strand to SEQ ID NO: 1433038
uucauuaggcaucaacuag

SEQ ID NO: 1433040 - RNA, 19 nt, Artificial Sequence
  Description of Artificial Sequence: Synthetic oligonucleotide
  Sense strand starting at position 3876 of SEQ ID NO: 1243671
ggaaacucugccugggaca

SEQ ID NO: 1433041 - RNA, 19 nt, Artificial Sequence
  Description of Artificial Sequence: Synthetic oligonucleotide
  Antisense strand to SEQ ID NO: 1433040
ugucccaggcagaguuucc

SEQ ID NO: 1433042 - RNA, 19 nt, Artificial Sequence
  Description of Artificial Sequence: Synthetic oligonucleotide
  Sense strand starting at position 3877 of SEQ ID NO: 1243671
gaaacucugccugggacaa

SEQ ID NO: 1433043 - RNA, 19 nt, Artificial Sequence
  Description of Artificial Sequence: Synthetic oligonucleotide
  Antisense strand to SEQ ID NO: 1433042
uugucccaggcagaguuuc

SEQ ID NO: 1433044 - RNA, 19 nt, Artificial Sequence
  Description of Artificial Sequence: Synthetic oligonucleotide
  Sense strand starting at position 164 of SEQ ID NO: 1243672
acacuaucucggcauccaa

SEQ ID NO: 1433045 - RNA, 19 nt, Artificial Sequence
  Description of Artificial Sequence: Synthetic oligonucleotide
  Antisense strand to SEQ ID NO: 1433044
uuggaugccgagauagugu

SEQ ID NO: 1433046 - RNA, 19 nt, Artificial Sequence
  Description of Artificial Sequence: Synthetic oligonucleotide
  Sense strand starting at position 231 of SEQ ID NO: 1243672
ccagaaaucugggcuaauc

SEQ ID NO: 1433047 - RNA, 19 nt, Artificial Sequence
  Description of Artificial Sequence: Synthetic oligonucleotide
  Antisense strand to SEQ ID NO: 1433046
gauuagcccagauuucugg

SEQ ID NO: 1433048 - RNA, 19 nt, Artificial Sequence
  Description of Artificial Sequence: Synthetic oligonucleotide
  Sense strand starting at position 284 of SEQ ID NO: 1243672
aagcacauguguuugggaa

SEQ ID NO: 1433049 - RNA, 19 nt, Artificial Sequence
  Description of Artificial Sequence: Synthetic oligonucleotide
  Antisense strand to SEQ ID NO: 1433048
uucccaaacacaugugcuu

SEQ ID NO: 1433050 - RNA, 19 nt, Artificial Sequence
  Description of Artificial Sequence: Synthetic oligonucleotide
  Sense strand starting at position 285 of SEQ ID NO: 1243672
agcacauguguuugggaag

SEQ ID NO: 1433051 - RNA, 19 nt, Artificial Sequence
  Description of Artificial Sequence: Synthetic oligonucleotide
  Antisense strand to SEQ ID NO: 1433050
cuucccaaacacaugugcu

SEQ ID NO: 1433052 - RNA, 19 nt, Artificial Sequence
  Description of Artificial Sequence: Synthetic oligonucleotide
  Sense strand starting at position 328 of SEQ ID NO: 1243672
agacauuguuacuuggaaa

SEQ ID NO: 1433053 - RNA, 19 nt, Artificial Sequence
  Description of Artificial Sequence: Synthetic oligonucleotide
  Antisense strand to SEQ ID NO: 1433052
uuuccaaguaacaaugucu

SEQ ID NO: 1433054 - RNA, 19 nt, Artificial Sequence
  Description of Artificial Sequence: Synthetic oligonucleotide
  Sense strand starting at position 512 of SEQ ID NO: 1243672
caagaaagguauucgguuu

SEQ ID NO: 1433055 - RNA, 19 nt, Artificial Sequence
  Description of Artificial Sequence: Synthetic oligonucleotide
  Antisense strand to SEQ ID NO: 1433054
aaaccgaauaccuuucuug

SEQ ID NO: 1433056 - RNA, 19 nt, Artificial Sequence
  Description of Artificial Sequence: Synthetic oligonucleotide
  Sense strand starting at position 558 of SEQ ID NO: 1243672
agguguugagcuugcauuu

SEQ ID NO: 1433057 - RNA, 19 nt, Artificial Sequence
  Description of Artificial Sequence: Synthetic oligonucleotide
  Antisense strand to SEQ ID NO: 1433056
aaaugcaagcucaacaccu

SEQ ID NO: 1433058 - RNA, 19 nt, Artificial Sequence
  Description of Artificial Sequence: Synthetic oligonucleotide
  Sense strand starting at position 606 of SEQ ID NO: 1243672
uucugauugcuuuagaaca

SEQ ID NO: 1433059 - RNA, 19 nt, Artificial Sequence
  Description of Artificial Sequence: Synthetic oligonucleotide
  Antisense strand to SEQ ID NO: 1433058
uguucuaaagcaaucagaa

SEQ ID NO: 1433060 - RNA, 19 nt, Artificial Sequence
  Description of Artificial Sequence: Synthetic oligonucleotide
  Sense strand starting at position 864 of SEQ ID NO: 1243672
gggccugacucuucugacu

SEQ ID NO: 1433061 - RNA, 19 nt, Artificial Sequence
  Description of Artificial Sequence: Synthetic oligonucleotide
  Antisense strand to SEQ ID NO: 1433060
agucagaagagucaggccc

SEQ ID NO: 1433062 - RNA, 19 nt, Artificial Sequence
  Description of Artificial Sequence: Synthetic oligonucleotide
  Sense strand starting at position 930 of SEQ ID NO: 1243672
ucucaucuucccgaggacu

SEQ ID NO: 1433063 - RNA, 19 nt, Artificial Sequence
  Description of Artificial Sequence: Synthetic oligonucleotide
  Antisense strand to SEQ ID NO: 1433062
aguccucgggaagaugaga

SEQ ID NO: 1433064 - RNA, 19 nt, Artificial Sequence
  Description of Artificial Sequence: Synthetic oligonucleotide
  Sense strand starting at position 1103 of SEQ ID NO: 1243672
cagaaucucguacagucau

SEQ ID NO: 1433065 - RNA, 19 nt, Artificial Sequence
  Description of Artificial Sequence: Synthetic oligonucleotide
  Antisense strand to SEQ ID NO: 1433064
augacuguacgagauucug

SEQ ID NO: 1433066 - RNA, 19 nt, Artificial Sequence
  Description of Artificial Sequence: Synthetic oligonucleotide
  Sense strand starting at position 2100 of SEQ ID NO: 1243672
cuuuccucuguccaaaguu

SEQ ID NO: 1433067 - RNA, 19 nt, Artificial Sequence
  Description of Artificial Sequence: Synthetic oligonucleotide
  Antisense strand to SEQ ID NO: 1433066
aacuuuggacagaggaaag

SEQ ID NO: 1433068 - RNA, 19 nt, Artificial Sequence
  Description of Artificial Sequence: Synthetic oligonucleotide
  Sense strand starting at position 2112 of SEQ ID NO: 1243672
caaaguuugcaaggacagu

SEQ ID NO: 1433069 - RNA, 19 nt, Artificial Sequence
  Description of Artificial Sequence: Synthetic oligonucleotide
  Antisense strand to SEQ ID NO: 1433068
acuguccuugcaaacuuug

SEQ ID NO: 1433070 - RNA, 19 nt, Artificial Sequence
  Description of Artificial Sequence: Synthetic oligonucleotide
  Sense strand starting at position 2171 of SEQ ID NO: 1243672
ugcacuuuagcguucgagu

SEQ ID NO: 1433071 - RNA, 19 nt, Artificial Sequence
  Description of Artificial Sequence: Synthetic oligonucleotide
  Antisense strand to SEQ ID NO: 1433070
acucgaacgcuaaagugca

SEQ ID NO: 1433072 - RNA, 19 nt, Artificial Sequence
  Description of Artificial Sequence: Synthetic oligonucleotide
  Sense strand starting at position 2172 of SEQ ID NO: 1243672
gcacuuuagcguucgagua

SEQ ID NO: 1433073 - RNA, 19 nt, Artificial Sequence
  Description of Artificial Sequence: Synthetic oligonucleotide
  Antisense strand to SEQ ID NO: 1433072
uacucgaacgcuaaagugc

SEQ ID NO: 1433074 - RNA, 19 nt, Artificial Sequence
  Description of Artificial Sequence: Synthetic oligonucleotide
  Sense strand starting at position 2264 of SEQ ID NO: 1243672
ucugucucucauuguauuu

SEQ ID NO: 1433075 - RNA, 19 nt, Artificial Sequence
  Description of Artificial Sequence: Synthetic oligonucleotide
  Antisense strand to SEQ ID NO: 1433074
aaauacaaugagagacaga

SEQ ID NO: 1433076 - RNA, 19 nt, Artificial Sequence
  Description of Artificial Sequence: Synthetic oligonucleotide
  Sense strand starting at position 2286 of SEQ ID NO: 1243672
gugaaugugagguaucagu

SEQ ID NO: 1433077 - RNA, 19 nt, Artificial Sequence
  Description of Artificial Sequence: Synthetic oligonucleotide
  Antisense strand to SEQ ID NO: 1433076
acugauaccucacauucac

SEQ ID NO: 1433078 - RNA, 19 nt, Artificial Sequence
  Description of Artificial Sequence: Synthetic oligonucleotide
  Sense strand starting at position 2295 of SEQ ID NO: 1243672
agguaucaguguucugaau

SEQ ID NO: 1433079 - RNA, 19 nt, Artificial Sequence
  Description of Artificial Sequence: Synthetic oligonucleotide
  Antisense strand to SEQ ID NO: 1433078
auucagaacacugauaccu

SEQ ID NO: 1433080 - RNA, 19 nt, Artificial Sequence
  Description of Artificial Sequence: Synthetic oligonucleotide
  Sense strand starting at position 2338 of SEQ ID NO: 1243672
cagauacguggcugauaaa

SEQ ID NO: 1433081 - RNA, 19 nt, Artificial Sequence
  Description of Artificial Sequence: Synthetic oligonucleotide
  Antisense strand to SEQ ID NO: 1433080
uuuaucagccacguaucug

SEQ ID NO: 1433082 - RNA, 19 nt, Artificial Sequence
  Description of Artificial Sequence: Synthetic oligonucleotide
  Sense strand starting at position 2359 of SEQ ID NO: 1243672
ggucuaaggucaccugauu

SEQ ID NO: 1433083 - RNA, 19 nt, Artificial Sequence
  Description of Artificial Sequence: Synthetic oligonucleotide
  Antisense strand to SEQ ID NO: 1433082
aaucaggugaccuuagacc

SEQ ID NO: 1433084 - RNA, 19 nt, Artificial Sequence
  Description of Artificial Sequence: Synthetic oligonucleotide
  Sense strand starting at position 2364 of SEQ ID NO: 1243672
aaggucaccugauuaauga

SEQ ID NO: 1433085 - RNA, 19 nt, Artificial Sequence
  Description of Artificial Sequence: Synthetic oligonucleotide
  Antisense strand to SEQ ID NO: 1433084
ucauuaaucaggugaccuu

SEQ ID NO: 1433086 - RNA, 19 nt, Artificial Sequence
  Description of Artificial Sequence: Synthetic oligonucleotide
  Sense strand starting at position 2450 of SEQ ID NO: 1243672
ccagaagucugauucuuaa

SEQ ID NO: 1433087 - RNA, 19 nt, Artificial Sequence
  Description of Artificial Sequence: Synthetic oligonucleotide
  Antisense strand to SEQ ID NO: 1433086
uuaagaaucagacuucugg

SEQ ID NO: 1433088 - RNA, 19 nt, Artificial Sequence
  Description of Artificial Sequence: Synthetic oligonucleotide
  Sense strand starting at position 2535 of SEQ ID NO: 1243672
gcccaaccugucugagaca

SEQ ID NO: 1433089 - RNA, 19 nt, Artificial Sequence
  Description of Artificial Sequence: Synthetic oligonucleotide
  Antisense strand to SEQ ID NO: 1433088
ugucucagacagguugggc

SEQ ID NO: 1433090 - RNA, 19 nt, Artificial Sequence
  Description of Artificial Sequence: Synthetic oligonucleotide
  Sense strand starting at position 2645 of SEQ ID NO: 1243672
ccaaguguccugcaccaca

SEQ ID NO: 1433091 - RNA, 19 nt, Artificial Sequence
  Description of Artificial Sequence: Synthetic oligonucleotide
  Antisense strand to SEQ ID NO: 1433090
uguggugcaggacacuugg

SEQ ID NO: 1433092 - RNA, 19 nt, Artificial Sequence
  Description of Artificial Sequence: Synthetic oligonucleotide
  Sense strand starting at position 2678 of SEQ ID NO: 1243672
ucaguugacuccuuggaag

SEQ ID NO: 1433093 - RNA, 19 nt, Artificial Sequence
  Description of Artificial Sequence: Synthetic oligonucleotide
  Antisense strand to SEQ ID NO: 1433092
cuuccaaggagucaacuga

SEQ ID NO: 1433094 - RNA, 19 nt, Artificial Sequence
  Description of Artificial Sequence: Synthetic oligonucleotide
  Sense strand starting at position 2710 of SEQ ID NO: 1243672
uuuggucucuauccuuaga

SEQ ID NO: 1433095 - RNA, 19 nt, Artificial Sequence
  Description of Artificial Sequence: Synthetic oligonucleotide
  Antisense strand to SEQ ID NO: 1433094
ucuaaggauagagaccaaa

SEQ ID NO: 1433096 - RNA, 19 nt, Artificial Sequence
  Description of Artificial Sequence: Synthetic oligonucleotide
  Sense strand starting at position 2712 of SEQ ID NO: 1243672
uggucucuauccuuagaaa

SEQ ID NO: 1433097 - RNA, 19 nt, Artificial Sequence
  Description of Artificial Sequence: Synthetic oligonucleotide
  Antisense strand to SEQ ID NO: 1433096
uuucuaaggauagagacca

SEQ ID NO: 1433098 - RNA, 19 nt, Artificial Sequence
  Description of Artificial Sequence: Synthetic oligonucleotide
  Sense strand starting at position 3055 of SEQ ID NO: 1243672
aaagauuggugauugcagu

SEQ ID NO: 1433099 - RNA, 19 nt, Artificial Sequence
  Description of Artificial Sequence: Synthetic oligonucleotide
  Antisense strand to SEQ ID NO: 1433098
acugcaaucaccaaucuuu

SEQ ID NO: 1433100 - RNA, 19 nt, Artificial Sequence
  Description of Artificial Sequence: Synthetic oligonucleotide
  Sense strand starting at position 3056 of SEQ ID NO: 1243672
aagauuggugauugcaguu

SEQ ID NO: 1433101 - RNA, 19 nt, Artificial Sequence
  Description of Artificial Sequence: Synthetic oligonucleotide
  Antisense strand to SEQ ID NO: 1433100
aacugcaaucaccaaucuu

SEQ ID NO: 1433102 - RNA, 19 nt, Artificial Sequence
  Description of Artificial Sequence: Synthetic oligonucleotide
  Sense strand starting at position 3166 of SEQ ID NO: 1243672
gaguuccugcaucagaauu

SEQ ID NO: 1433103 - RNA, 19 nt, Artificial Sequence
  Description of Artificial Sequence: Synthetic oligonucleotide
  Antisense strand to SEQ ID NO: 1433102
aauucugaugcaggaacuc

SEQ ID NO: 1433104 - RNA, 19 nt, Artificial Sequence
  Description of Artificial Sequence: Synthetic oligonucleotide
  Sense strand starting at position 3459 of SEQ ID NO: 1243672
gcauauguugauuauaguu

SEQ ID NO: 1433105 - RNA, 19 nt, Artificial Sequence
  Description of Artificial Sequence: Synthetic oligonucleotide
  Antisense strand to SEQ ID NO: 1433104
aacuauaaucaacauaugc

SEQ ID NO: 1433106 - RNA, 19 nt, Artificial Sequence
  Description of Artificial Sequence: Synthetic oligonucleotide
  Sense strand starting at position 3465 of SEQ ID NO: 1243672
guugauuauaguugcaaga

SEQ ID NO: 1433107 - RNA, 19 nt, Artificial Sequence
  Description of Artificial Sequence: Synthetic oligonucleotide
  Antisense strand to SEQ ID NO: 1433106
ucuugcaacuauaaucaac

SEQ ID NO: 1433108 - RNA, 19 nt, Artificial Sequence
  Description of Artificial Sequence: Synthetic oligonucleotide
  Sense strand starting at position 3542 of SEQ ID NO: 1243672
caugucuuggcugaaugaa

SEQ ID NO: 1433109 - RNA, 19 nt, Artificial Sequence
  Description of Artificial Sequence: Synthetic oligonucleotide
  Antisense strand to SEQ ID NO: 1433108
uucauucagccaagacaug

SEQ ID NO: 1433110 - RNA, 19 nt, Artificial Sequence
  Description of Artificial Sequence: Synthetic oligonucleotide
  Sense strand starting at position 3595 of SEQ ID NO: 1243672
ugcuuauuaggucagacaa

SEQ ID NO: 1433111 - RNA, 19 nt, Artificial Sequence
  Description of Artificial Sequence: Synthetic oligonucleotide
  Antisense strand to SEQ ID NO: 1433110
uugucugaccuaauaagca

SEQ ID NO: 1433112 - RNA, 19 nt, Artificial Sequence
  Description of Artificial Sequence: Synthetic oligonucleotide
  Sense strand starting at position 3753 of SEQ ID NO: 1243672
auguguauaaacgguaaga

SEQ ID NO: 1433113 - RNA, 19 nt, Artificial Sequence
  Description of Artificial Sequence: Synthetic oligonucleotide
  Antisense strand to SEQ ID NO: 1433112
ucuuaccguuuauacacau

SEQ ID NO: 1433114 - RNA, 19 nt, Artificial Sequence
  Description of Artificial Sequence: Synthetic oligonucleotide
  Sense strand starting at position 3755 of SEQ ID NO: 1243672
guguauaaacgguaagaca

SEQ ID NO: 1433115 - RNA, 19 nt, Artificial Sequence
  Description of Artificial Sequence: Synthetic oligonucleotide
  Antisense strand to SEQ ID NO: 1433114
ugucuuaccguuuauacac

SEQ ID NO: 1433116 - RNA, 19 nt, Artificial Sequence
  Description of Artificial Sequence: Synthetic oligonucleotide
  Sense strand starting at position 3772 of SEQ ID NO: 1243672
cauuaaggucacuguauga

SEQ ID NO: 1433117 - RNA, 19 nt, Artificial Sequence
  Description of Artificial Sequence: Synthetic oligonucleotide
  Antisense strand to SEQ ID NO: 1433116
ucauacagugaccuuaaug

SEQ ID NO: 1433118 - RNA, 19 nt, Artificial Sequence
  Description of Artificial Sequence: Synthetic oligonucleotide
  Sense strand starting at position 3797 of SEQ ID NO: 1243672
gcaacacuaucucugguaa

SEQ ID NO: 1433119 - RNA, 19 nt, Artificial Sequence
  Description of Artificial Sequence: Synthetic oligonucleotide
  Antisense strand to SEQ ID NO: 1433118
uuaccagagauaguguugc

SEQ ID NO: 1433120 - RNA, 19 nt, Artificial Sequence
  Description of Artificial Sequence: Synthetic oligonucleotide
  Sense strand starting at position 3819 of SEQ ID NO: 1243672
ccagaacugcacuguugaa

SEQ ID NO: 1433121 - RNA, 19 nt, Artificial Sequence
  Description of Artificial Sequence: Synthetic oligonucleotide
  Antisense strand to SEQ ID NO: 1433120
uucaacagugcaguucugg

SEQ ID NO: 1433122 - RNA, 19 nt, Artificial Sequence
  Description of Artificial Sequence: Synthetic oligonucleotide
  Sense strand starting at position 3826 of SEQ ID NO: 1243672
ugcacuguugaauauagua

SEQ ID NO: 1433123 - RNA, 19 nt, Artificial Sequence
  Description of Artificial Sequence: Synthetic oligonucleotide
  Antisense strand to SEQ ID NO: 1433122
uacuauauucaacagugca

SEQ ID NO: 1433124 - RNA, 19 nt, Artificial Sequence
  Description of Artificial Sequence: Synthetic oligonucleotide
  Sense strand starting at position 84 of SEQ ID NO: 1243673
uguagucagucuugucaac

SEQ ID NO: 1433125 - RNA, 19 nt, Artificial Sequence
  Description of Artificial Sequence: Synthetic oligonucleotide
  Antisense strand to SEQ ID NO: 1433124
guugacaagacugacuaca

SEQ ID NO: 1433126 - RNA, 19 nt, Artificial Sequence
  Description of Artificial Sequence: Synthetic oligonucleotide
  Sense strand starting at position 86 of SEQ ID NO: 1243673
uagucagucuugucaacug

SEQ ID NO: 1433127 - RNA, 19 nt, Artificial Sequence
  Description of Artificial Sequence: Synthetic oligonucleotide
  Antisense strand to SEQ ID NO: 1433126
caguugacaagacugacua

SEQ ID NO: 1433128 - RNA, 19 nt, Artificial Sequence
  Description of Artificial Sequence: Synthetic oligonucleotide
  Sense strand starting at position 203 of SEQ ID NO: 1243673
gacgccuuuccuguacgua

SEQ ID NO: 1433129 - RNA, 19 nt, Artificial Sequence
  Description of Artificial Sequence: Synthetic oligonucleotide
  Antisense strand to SEQ ID NO: 1433128
uacguacaggaaaggcguc

SEQ ID NO: 1433130 - RNA, 19 nt, Artificial Sequence
  Description of Artificial Sequence: Synthetic oligonucleotide
  Sense strand starting at position 204 of SEQ ID NO: 1243673
acgccuuuccuguacguau

SEQ ID NO: 1433131 - RNA, 19 nt, Artificial Sequence
  Description of Artificial Sequence: Synthetic oligonucleotide
  Antisense strand to SEQ ID NO: 1433130
auacguacaggaaaggcgu

SEQ ID NO: 1433132 - RNA, 19 nt, Artificial Sequence
  Description of Artificial Sequence: Synthetic oligonucleotide
  Sense strand starting at position 226 of SEQ ID NO: 1243673
ggauguacuucaugccgga

SEQ ID NO: 1433133 - RNA, 19 nt, Artificial Sequence
  Description of Artificial Sequence: Synthetic oligonucleotide
  Antisense strand to SEQ ID NO: 1433132
uccggcaugaaguacaucc

SEQ ID NO: 1433134 - RNA, 19 nt, Artificial Sequence
  Description of Artificial Sequence: Synthetic oligonucleotide
  Sense strand starting at position 243 of SEQ ID NO: 1243673
gacacuaucucucgguuaa

SEQ ID NO: 1433135 - RNA, 19 nt, Artificial Sequence
  Description of Artificial Sequence: Synthetic oligonucleotide
  Antisense strand to SEQ ID NO: 1433134
uuaaccgagagauaguguc

SEQ ID NO: 1433136 - RNA, 19 nt, Artificial Sequence
  Description of Artificial Sequence: Synthetic oligonucleotide
  Sense strand starting at position 244 of SEQ ID NO: 1243673
acacuaucucucgguuaac

SEQ ID NO: 1433137 - RNA, 19 nt, Artificial Sequence
  Description of Artificial Sequence: Synthetic oligonucleotide
  Antisense strand to SEQ ID NO: 1433136
guuaaccgagagauagugu

SEQ ID NO: 1433138 - RNA, 19 nt, Artificial Sequence
  Description of Artificial Sequence: Synthetic oligonucleotide
  Sense strand starting at position 346 of SEQ ID NO: 1243673
uguagcuuacccggaaaga

SEQ ID NO: 1433139 - RNA, 19 nt, Artificial Sequence
  Description of Artificial Sequence: Synthetic oligonucleotide
  Antisense strand to SEQ ID NO: 1433138
ucuuuccggguaagcuaca

SEQ ID NO: 1433140 - RNA, 19 nt, Artificial Sequence
  Description of Artificial Sequence: Synthetic oligonucleotide
  Sense strand starting at position 347 of SEQ ID NO: 1243673
guagcuuacccggaaagag

SEQ ID NO: 1433141 - RNA, 19 nt, Artificial Sequence
  Description of Artificial Sequence: Synthetic oligonucleotide
  Antisense strand to SEQ ID NO: 1433140
cucuuuccggguaagcuac

SEQ ID NO: 1433142 - RNA, 19 nt, Artificial Sequence
  Description of Artificial Sequence: Synthetic oligonucleotide
  Sense strand starting at position 899 of SEQ ID NO: 1243673
ccucguucuccgcugcaau

SEQ ID NO: 1433143 - RNA, 19 nt, Artificial Sequence
  Description of Artificial Sequence: Synthetic oligonucleotide
  Antisense strand to SEQ ID NO: 1433142
auugcagcggagaacgagg

SEQ ID NO: 1433144 - RNA, 19 nt, Artificial Sequence
  Description of Artificial Sequence: Synthetic oligonucleotide
  Sense strand starting at position 1032 of SEQ ID NO: 1243673
cgcacuucugagcaggagu

SEQ ID NO: 1433145 - RNA, 19 nt, Artificial Sequence
  Description of Artificial Sequence: Synthetic oligonucleotide
  Antisense strand to SEQ ID NO: 1433144
acuccugcucagaagugcg

SEQ ID NO: 1433146 - RNA, 19 nt, Artificial Sequence
  Description of Artificial Sequence: Synthetic oligonucleotide
  Sense strand starting at position 1413 of SEQ ID NO: 1243673
gugguagucacauguaaac

SEQ ID NO: 1433147 - RNA, 19 nt, Artificial Sequence
  Description of Artificial Sequence: Synthetic oligonucleotide
  Antisense strand to SEQ ID NO: 1433146
guuuacaugugacuaccac

SEQ ID NO: 1433148 - RNA, 19 nt, Artificial Sequence
  Description of Artificial Sequence: Synthetic oligonucleotide
  Sense strand starting at position 1415 of SEQ ID NO: 1243673
gguagucacauguaaacgu

SEQ ID NO: 1433149 - RNA, 19 nt, Artificial Sequence
  Description of Artificial Sequence: Synthetic oligonucleotide
  Antisense strand to SEQ ID NO: 1433148
acguuuacaugugacuacc

SEQ ID NO: 1433150 - RNA, 19 nt, Artificial Sequence
  Description of Artificial Sequence: Synthetic oligonucleotide
  Sense strand starting at position 1534 of SEQ ID NO: 1243673
cuaaguaucugcgguuucu

SEQ ID NO: 1433151 - RNA, 19 nt, Artificial Sequence
  Description of Artificial Sequence: Synthetic oligonucleotide
  Antisense strand to SEQ ID NO: 1433150
agaaaccgcagauacuuag

SEQ ID NO: 1433152 - RNA, 19 nt, Artificial Sequence
  Description of Artificial Sequence: Synthetic oligonucleotide
  Sense strand starting at position 1544 of SEQ ID NO: 1243673
gcgguuucuccacaauugu

SEQ ID NO: 1433153 - RNA, 19 nt, Artificial Sequence
  Description of Artificial Sequence: Synthetic oligonucleotide
  Antisense strand to SEQ ID NO: 1433152
acaauuguggagaaaccgc

SEQ ID NO: 1433154 - RNA, 19 nt, Artificial Sequence
  Description of Artificial Sequence: Synthetic oligonucleotide
  Sense strand starting at position 1565 of SEQ ID NO: 1243673
gggucugugaccuacaacu

SEQ ID NO: 1433155 - RNA, 19 nt, Artificial Sequence
  Description of Artificial Sequence: Synthetic oligonucleotide
  Antisense strand to SEQ ID NO: 1433154
aguuguaggucacagaccc

SEQ ID NO: 1433156 - RNA, 19 nt, Artificial Sequence
  Description of Artificial Sequence: Synthetic oligonucleotide
  Sense strand starting at position 2820 of SEQ ID NO: 1243673
gggauuaaguucucguuaa

SEQ ID NO: 1433157 - RNA, 19 nt, Artificial Sequence
  Description of Artificial Sequence: Synthetic oligonucleotide
  Antisense strand to SEQ ID NO: 1433156
uuaacgagaacuuaauccc

SEQ ID NO: 1433158 - RNA, 19 nt, Artificial Sequence
  Description of Artificial Sequence: Synthetic oligonucleotide
  Sense strand starting at position 2821 of SEQ ID NO: 1243673
ggauuaaguucucguuaaa

SEQ ID NO: 1433159 - RNA, 19 nt, Artificial Sequence
  Description of Artificial Sequence: Synthetic oligonucleotide
  Antisense strand to SEQ ID NO: 1433158
uuuaacgagaacuuaaucc

SEQ ID NO: 1433160 - RNA, 19 nt, Artificial Sequence
  Description of Artificial Sequence: Synthetic oligonucleotide
  Sense strand starting at position 2824 of SEQ ID NO: 1243673
uuaaguucucguuaaacac

SEQ ID NO: 1433161 - RNA, 19 nt, Artificial Sequence
  Description of Artificial Sequence: Synthetic oligonucleotide
  Antisense strand to SEQ ID NO: 1433160
guguuuaacgagaacuuaa

SEQ ID NO: 1433162 - RNA, 19 nt, Artificial Sequence
  Description of Artificial Sequence: Synthetic oligonucleotide
  Sense strand starting at position 3046 of SEQ ID NO: 1243673
gcccuagugucccugagga

SEQ ID NO: 1433163 - RNA, 19 nt, Artificial Sequence
  Description of Artificial Sequence: Synthetic oligonucleotide
  Antisense strand to SEQ ID NO: 1433162
uccucagggacacuagggc

SEQ ID NO: 1433164 - RNA, 19 nt, Artificial Sequence
  Description of Artificial Sequence: Synthetic oligonucleotide
  Sense strand starting at position 3048 of SEQ ID NO: 1243673
ccuagugucccugaggaau

SEQ ID NO: 1433165 - RNA, 19 nt, Artificial Sequence
  Description of Artificial Sequence: Synthetic oligonucleotide
  Antisense strand to SEQ ID NO: 1433164
auuccucagggacacuagg

SEQ ID NO: 1433166 - RNA, 19 nt, Artificial Sequence
  Description of Artificial Sequence: Synthetic oligonucleotide
  Sense strand starting at position 3166 of SEQ ID NO: 1243673
cuccgcuuguuccgagauu

SEQ ID NO: 1433167 - RNA, 19 nt, Artificial Sequence
  Description of Artificial Sequence: Synthetic oligonucleotide
  Antisense strand to SEQ ID NO: 1433166
aaucucggaacaagcggag

SEQ ID NO: 1433168 - RNA, 19 nt, Artificial Sequence
  Description of Artificial Sequence: Synthetic oligonucleotide
  Sense strand starting at position 3197 of SEQ ID NO: 1243673
ccacaagggccguguugaa

SEQ ID NO: 1433169 - RNA, 19 nt, Artificial Sequence
  Description of Artificial Sequence: Synthetic oligonucleotide
  Antisense strand to SEQ ID NO: 1433168
uucaacacggcccuugugg

SEQ ID NO: 1433170 - RNA, 19 nt, Artificial Sequence
  Description of Artificial Sequence: Synthetic oligonucleotide
  Sense strand starting at position 467 of SEQ ID NO: 1243674
ccucguucuccgcugcaau

SEQ ID NO: 1433171 - RNA, 19 nt, Artificial Sequence
  Description of Artificial Sequence: Synthetic oligonucleotide
  Antisense strand to SEQ ID NO: 1433170
auugcagcggagaacgagg

SEQ ID NO: 1433172 - RNA, 19 nt, Artificial Sequence
  Description of Artificial Sequence: Synthetic oligonucleotide
  Sense strand starting at position 600 of SEQ ID NO: 1243674
cgcacuucugagcaggagu

SEQ ID NO: 1433173 - RNA, 19 nt, Artificial Sequence
  Description of Artificial Sequence: Synthetic oligonucleotide
  Antisense strand to SEQ ID NO: 1433172
acuccugcucagaagugcg

SEQ ID NO: 1433174 - RNA, 19 nt, Artificial Sequence
  Description of Artificial Sequence: Synthetic oligonucleotide
  Sense strand starting at position 981 of SEQ ID NO: 1243674
gugguagucacauguaaac

SEQ ID NO: 1433175 - RNA, 19 nt, Artificial Sequence
  Description of Artificial Sequence: Synthetic oligonucleotide
  Antisense strand to SEQ ID NO: 1433174
guuuacaugugacuaccac

SEQ ID NO: 1433176 - RNA, 19 nt, Artificial Sequence
  Description of Artificial Sequence: Synthetic oligonucleotide
  Sense strand starting at position 983 of SEQ ID NO: 1243674
gguagucacauguaaacgu

SEQ ID NO: 1433177 - RNA, 19 nt, Artificial Sequence
  Description of Artificial Sequence: Synthetic oligonucleotide
  Antisense strand to SEQ ID NO: 1433176
acguuuacaugugacuacc

SEQ ID NO: 1433178 - RNA, 19 nt, Artificial Sequence
  Description of Artificial Sequence: Synthetic oligonucleotide
  Sense strand starting at position 1102 of SEQ ID NO: 1243674
cuaaguaucugcgguuucu

SEQ ID NO: 1433179 - RNA, 19 nt, Artificial Sequence
  Description of Artificial Sequence: Synthetic oligonucleotide
  Antisense strand to SEQ ID NO: 1433178
agaaaccgcagauacuuag

SEQ ID NO: 1433180 - RNA, 19 nt, Artificial Sequence
  Description of Artificial Sequence: Synthetic oligonucleotide
  Sense strand starting at position 1112 of SEQ ID NO: 1243674
gcgguuucuccacaauugu

SEQ ID NO: 1433181 - RNA, 19 nt, Artificial Sequence
  Description of Artificial Sequence: Synthetic oligonucleotide
  Antisense strand to SEQ ID NO: 1433180
acaauuguggagaaaccgc

SEQ ID NO: 1433182 - RNA, 19 nt, Artificial Sequence
  Description of Artificial Sequence: Synthetic oligonucleotide
  Sense strand starting at position 1133 of SEQ ID NO: 1243674
gggucugugaccuacaacu

SEQ ID NO: 1433183 - RNA, 19 nt, Artificial Sequence
  Description of Artificial Sequence: Synthetic oligonucleotide
  Antisense strand to SEQ ID NO: 1433182
aguuguaggucacagaccc

SEQ ID NO: 1433184 - RNA, 19 nt, Artificial Sequence
  Description of Artificial Sequence: Synthetic oligonucleotide
  Sense strand starting at position 2388 of SEQ ID NO: 1243674
gggauuaaguucucguuaa

SEQ ID NO: 1433185 - RNA, 19 nt, Artificial Sequence
  Description of Artificial Sequence: Synthetic oligonucleotide
  Antisense strand to SEQ ID NO: 1433184
uuaacgagaacuuaauccc

SEQ ID NO: 1433186 - RNA, 19 nt, Artificial Sequence
  Description of Artificial Sequence: Synthetic oligonucleotide
  Sense strand starting at position 2389 of SEQ ID NO: 1243674
ggauuaaguucucguuaaa

SEQ ID NO: 1433187 - RNA, 19 nt, Artificial Sequence
  Description of Artificial Sequence: Synthetic oligonucleotide
  Antisense strand to SEQ ID NO: 1433186
uuuaacgagaacuuaaucc

SEQ ID NO: 1433188 - RNA, 19 nt, Artificial Sequence
  Description of Artificial Sequence: Synthetic oligonucleotide
  Sense strand starting at position 2392 of SEQ ID NO: 1243674
uuaaguucucguuaaacac

SEQ ID NO: 1433189 - RNA, 19 nt, Artificial Sequence
  Description of Artificial Sequence: Synthetic oligonucleotide
  Antisense strand to SEQ ID NO: 1433188
guguuuaacgagaacuuaa

SEQ ID NO: 1433190 - RNA, 19 nt, Artificial Sequence
  Description of Artificial Sequence: Synthetic oligonucleotide
  Sense strand starting at position 2614 of SEQ ID NO: 1243674
gcccuagugucccugagga

SEQ ID NO: 1433191 - RNA, 19 nt, Artificial Sequence
  Description of Artificial Sequence: Synthetic oligonucleotide
  Antisense strand to SEQ ID NO: 1433190
uccucagggacacuagggc

SEQ ID NO: 1433192 - RNA, 19 nt, Artificial Sequence
  Description of Artificial Sequence: Synthetic oligonucleotide
  Sense strand starting at position 2616 of SEQ ID NO: 1243674
ccuagugucccugaggaau

SEQ ID NO: 1433193 - RNA, 19 nt, Artificial Sequence
  Description of Artificial Sequence: Synthetic oligonucleotide
  Antisense strand to SEQ ID NO: 1433192
auuccucagggacacuagg

SEQ ID NO: 1433194 - RNA, 19 nt, Artificial Sequence
  Description of Artificial Sequence: Synthetic oligonucleotide
  Sense strand starting at position 2734 of SEQ ID NO: 1243674
cuccgcuuguuccgagauu

SEQ ID NO: 1433195 - RNA, 19 nt, Artificial Sequence
  Description of Artificial Sequence: Synthetic oligonucleotide
  Antisense strand to SEQ ID NO: 1433194
aaucucggaacaagcggag

SEQ ID NO: 1433196 - RNA, 19 nt, Artificial Sequence
  Description of Artificial Sequence: Synthetic oligonucleotide
  Sense strand starting at position 2765 of SEQ ID NO: 1243674
ccacaagggccguguugaa

SEQ ID NO: 1433197 - RNA, 19 nt, Artificial Sequence
  Description of Artificial Sequence: Synthetic oligonucleotide
  Antisense strand to SEQ ID NO: 1433196
uucaacacggcccuugugg

SEQ ID NO: 1433198 - RNA, 19 nt, Artificial Sequence
  Description of Artificial Sequence: Synthetic oligonucleotide
  Sense strand starting at position 3798 of SEQ ID NO: 1243674
uucugaauguuggagggau

SEQ ID NO: 1433199 - RNA, 19 nt, Artificial Sequence
  Description of Artificial Sequence: Synthetic oligonucleotide
  Antisense strand to SEQ ID NO: 1433198
aucccuccaacauucagaa

SEQ ID NO: 1433200 - RNA, 19 nt, Artificial Sequence
  Description of Artificial Sequence: Synthetic oligonucleotide
  Sense strand starting at position 3800 of SEQ ID NO: 1243674
cugaauguuggagggauau

SEQ ID NO: 1433201 - RNA, 19 nt, Artificial Sequence
  Description of Artificial Sequence: Synthetic oligonucleotide
  Antisense strand to SEQ ID NO: 1433200
auaucccuccaacauucag

SEQ ID NO: 1433202 - RNA, 19 nt, Artificial Sequence
  Description of Artificial Sequence: Synthetic oligonucleotide
  Sense strand starting at position 3819 of SEQ ID NO: 1243674
uugagaguuucuguaacug

SEQ ID NO: 1433203 - RNA, 19 nt, Artificial Sequence
  Description of Artificial Sequence: Synthetic oligonucleotide
  Antisense strand to SEQ ID NO: 1433202
caguuacagaaacucucaa

SEQ ID NO: 1433204 - RNA, 19 nt, Artificial Sequence
  Description of Artificial Sequence: Synthetic oligonucleotide
  Sense strand starting at position 3824 of SEQ ID NO: 1243674
aguuucuguaacugaguca

SEQ ID NO: 1433205 - RNA, 19 nt, Artificial Sequence
  Description of Artificial Sequence: Synthetic oligonucleotide
  Antisense strand to SEQ ID NO: 1433204
ugacucaguuacagaaacu

SEQ ID NO: 1433206 - RNA, 19 nt, Artificial Sequence
  Description of Artificial Sequence: Synthetic oligonucleotide
  Sense strand starting at position 3845 of SEQ ID NO: 1243674
cugucagugccaugucauc

SEQ ID NO: 1433207 - RNA, 19 nt, Artificial Sequence
  Description of Artificial Sequence: Synthetic oligonucleotide
  Antisense strand to SEQ ID NO: 1433206
gaugacauggcacugacag

SEQ ID NO: 1433208 - RNA, 19 nt, Artificial Sequence
  Description of Artificial Sequence: Synthetic oligonucleotide
  Sense strand starting at position 3851 of SEQ ID NO: 1243674
gugccaugucaucagcaca

SEQ ID NO: 1433209 - RNA, 19 nt, Artificial Sequence
  Description of Artificial Sequence: Synthetic oligonucleotide
  Antisense strand to SEQ ID NO: 1433208
ugugcugaugacauggcac

SEQ ID NO: 1433210 - RNA, 19 nt, Artificial Sequence
  Description of Artificial Sequence: Synthetic oligonucleotide
  Sense strand starting at position 3872 of SEQ ID NO: 1243674
guuuccuaaucagguguga

SEQ ID NO: 1433211 - RNA, 19 nt, Artificial Sequence
  Description of Artificial Sequence: Synthetic oligonucleotide
  Antisense strand to SEQ ID NO: 1433210
ucacaccugauuaggaaac

SEQ ID NO: 1433212 - RNA, 19 nt, Artificial Sequence
  Description of Artificial Sequence: Synthetic oligonucleotide
  Sense strand starting at position 3876 of SEQ ID NO: 1243674
ccuaaucaggugugaaaug

SEQ ID NO: 1433213 - RNA, 19 nt, Artificial Sequence
  Description of Artificial Sequence: Synthetic oligonucleotide
  Antisense strand to SEQ ID NO: 1433212
cauuucacaccugauuagg

SEQ ID NO: 1433214 - RNA, 19 nt, Artificial Sequence
  Description of Artificial Sequence: Synthetic oligonucleotide
  Sense strand starting at position 3926 of SEQ ID NO: 1243674
aggugaucauguugcccaa

SEQ ID NO: 1433215 - RNA, 19 nt, Artificial Sequence
  Description of Artificial Sequence: Synthetic oligonucleotide
  Antisense strand to SEQ ID NO: 1433214
uugggcaacaugaucaccu

SEQ ID NO: 1433216 - RNA, 19 nt, Artificial Sequence
  Description of Artificial Sequence: Synthetic oligonucleotide
  Sense strand starting at position 3 of SEQ ID NO: 1243675
gguccaggcaucuauagau

SEQ ID NO: 1433217 - RNA, 19 nt, Artificial Sequence
  Description of Artificial Sequence: Synthetic oligonucleotide
  Antisense strand to SEQ ID NO: 1433216
aucuauagaugccuggacc

SEQ ID NO: 1433218 - RNA, 19 nt, Artificial Sequence
  Description of Artificial Sequence: Synthetic oligonucleotide
  Sense strand starting at position 105 of SEQ ID NO: 1243675
ccugaaaguuguuagcacu

SEQ ID NO: 1433219 - RNA, 19 nt, Artificial Sequence
  Description of Artificial Sequence: Synthetic oligonucleotide
  Antisense strand to SEQ ID NO: 1433218
agugcuaacaacuuucagg

SEQ ID NO: 1433220 - RNA, 19 nt, Artificial Sequence
  Description of Artificial Sequence: Synthetic oligonucleotide
  Sense strand starting at position 108 of SEQ ID NO: 1243675
gaaaguuguuagcacugaa

SEQ ID NO: 1433221 - RNA, 19 nt, Artificial Sequence
  Description of Artificial Sequence: Synthetic oligonucleotide
  Antisense strand to SEQ ID NO: 1433220
uucagugcuaacaacuuuc

SEQ ID NO: 1433222 - RNA, 19 nt, Artificial Sequence
  Description of Artificial Sequence: Synthetic oligonucleotide
  Sense strand starting at position 129 of SEQ ID NO: 1243675
cggagaagauggguggauu

SEQ ID NO: 1433223 - RNA, 19 nt, Artificial Sequence
  Description of Artificial Sequence: Synthetic oligonucleotide
  Antisense strand to SEQ ID NO: 1433222
aauccacccaucuucuccg

SEQ ID NO: 1433224 - RNA, 19 nt, Artificial Sequence
  Description of Artificial Sequence: Synthetic oligonucleotide
  Sense strand starting at position 1014 of SEQ ID NO: 1243675
ggaguguguuguggagguu

SEQ ID NO: 1433225 - RNA, 19 nt, Artificial Sequence
  Description of Artificial Sequence: Synthetic oligonucleotide
  Antisense strand to SEQ ID NO: 1433224
aaccuccacaacacacucc

SEQ ID NO: 1433226 - RNA, 19 nt, Artificial Sequence
  Description of Artificial Sequence: Synthetic oligonucleotide
  Sense strand starting at position 1015 of SEQ ID NO: 1243675
gaguguguuguggagguuu

SEQ ID NO: 1433227 - RNA, 19 nt, Artificial Sequence
  Description of Artificial Sequence: Synthetic oligonucleotide
  Antisense strand to SEQ ID NO: 1433226
aaaccuccacaacacacuc

SEQ ID NO: 1433228 - RNA, 19 nt, Artificial Sequence
  Description of Artificial Sequence: Synthetic oligonucleotide
  Sense strand starting at position 1017 of SEQ ID NO: 1243675
guguguuguggagguuugu

SEQ ID NO: 1433229 - RNA, 19 nt, Artificial Sequence
  Description of Artificial Sequence: Synthetic oligonucleotide
  Antisense strand to SEQ ID NO: 1433228
acaaaccuccacaacacac

SEQ ID NO: 1433230 - RNA, 19 nt, Artificial Sequence
  Description of Artificial Sequence: Synthetic oligonucleotide
  Sense strand starting at position 1056 of SEQ ID NO: 1243675
ggcaugguguguugugagu

SEQ ID NO: 1433231 - RNA, 19 nt, Artificial Sequence
  Description of Artificial Sequence: Synthetic oligonucleotide
  Antisense strand to SEQ ID NO: 1433230
acucacaacacaccaugcc

SEQ ID NO: 1433232 - RNA, 19 nt, Artificial Sequence
  Description of Artificial Sequence: Synthetic oligonucleotide
  Sense strand starting at position 1062 of SEQ ID NO: 1243675
guguguugugagugugcga

SEQ ID NO: 1433233 - RNA, 19 nt, Artificial Sequence
  Description of Artificial Sequence: Synthetic oligonucleotide
  Antisense strand to SEQ ID NO: 1433232
ucgcacacucacaacacac

SEQ ID NO: 1433234 - RNA, 19 nt, Artificial Sequence
  Description of Artificial Sequence: Synthetic oligonucleotide
  Sense strand starting at position 1069 of SEQ ID NO: 1243675
gugagugugcgaguucugu

SEQ ID NO: 1433235 - RNA, 19 nt, Artificial Sequence
  Description of Artificial Sequence: Synthetic oligonucleotide
  Antisense strand to SEQ ID NO: 1433234
acagaacucgcacacucac

SEQ ID NO: 1433236 - RNA, 19 nt, Artificial Sequence
  Description of Artificial Sequence: Synthetic oligonucleotide
  Sense strand starting at position 1073 of SEQ ID NO: 1243675
gugugcgaguucugugcuu

SEQ ID NO: 1433237 - RNA, 19 nt, Artificial Sequence
  Description of Artificial Sequence: Synthetic oligonucleotide
  Antisense strand to SEQ ID NO: 1433236
aagcacagaacucgcacac

SEQ ID NO: 1433238 - RNA, 19 nt, Artificial Sequence
  Description of Artificial Sequence: Synthetic oligonucleotide
  Sense strand starting at position 1148 of SEQ ID NO: 1243675
uaggaaguucucgguguga

SEQ ID NO: 1433239 - RNA, 19 nt, Artificial Sequence
  Description of Artificial Sequence: Synthetic oligonucleotide
  Antisense strand to SEQ ID NO: 1433238
ucacaccgagaacuuccua

SEQ ID NO: 1433240 - RNA, 19 nt, Artificial Sequence
  Description of Artificial Sequence: Synthetic oligonucleotide
  Sense strand starting at position 1150 of SEQ ID NO: 1243675
ggaaguucucggugugagu

SEQ ID NO: 1433241 - RNA, 19 nt, Artificial Sequence
  Description of Artificial Sequence: Synthetic oligonucleotide
  Antisense strand to SEQ ID NO: 1433240
acucacaccgagaacuucc

SEQ ID NO: 1433242 - RNA, 19 nt, Artificial Sequence
  Description of Artificial Sequence: Synthetic oligonucleotide
  Sense strand starting at position 1159 of SEQ ID NO: 1243675
cggugugagugucugagau

SEQ ID NO: 1433243 - RNA, 19 nt, Artificial Sequence
  Description of Artificial Sequence: Synthetic oligonucleotide
  Antisense strand to SEQ ID NO: 1433242
aucucagacacucacaccg

SEQ ID NO: 1433244 - RNA, 19 nt, Artificial Sequence
  Description of Artificial Sequence: Synthetic oligonucleotide
  Sense strand starting at position 1161 of SEQ ID NO: 1243675
gugugagugucugagauag

SEQ ID NO: 1433245 - RNA, 19 nt, Artificial Sequence
  Description of Artificial Sequence: Synthetic oligonucleotide
  Antisense strand to SEQ ID NO: 1433244
cuaucucagacacucacac

SEQ ID NO: 1433246 - RNA, 19 nt, Artificial Sequence
  Description of Artificial Sequence: Synthetic oligonucleotide
  Sense strand starting at position 1336 of SEQ ID NO: 1243675
ucucccuuuccggauuauu

SEQ ID NO: 1433247 - RNA, 19 nt, Artificial Sequence
  Description of Artificial Sequence: Synthetic oligonucleotide
  Antisense strand to SEQ ID NO: 1433246
aauaauccggaaagggaga

SEQ ID NO: 1433248 - RNA, 19 nt, Artificial Sequence
  Description of Artificial Sequence: Synthetic oligonucleotide
  Sense strand starting at position 1433 of SEQ ID NO: 1243675
cuguccugcgucugaucau

SEQ ID NO: 1433249 - RNA, 19 nt, Artificial Sequence
  Description of Artificial Sequence: Synthetic oligonucleotide
  Antisense strand to SEQ ID NO: 1433248
augaucagacgcaggacag

SEQ ID NO: 1433250 - RNA, 19 nt, Artificial Sequence
  Description of Artificial Sequence: Synthetic oligonucleotide
  Sense strand starting at position 1710 of SEQ ID NO: 1243675
cggacuggcuccuugagaa

SEQ ID NO: 1433251 - RNA, 19 nt, Artificial Sequence
  Description of Artificial Sequence: Synthetic oligonucleotide
  Antisense strand to SEQ ID NO: 1433250
uucucaaggagccaguccg

SEQ ID NO: 1433252 - RNA, 19 nt, Artificial Sequence
  Description of Artificial Sequence: Synthetic oligonucleotide
  Sense strand starting at position 1714 of SEQ ID NO: 1243675
cuggcuccuugagaaauga

SEQ ID NO: 1433253 - RNA, 19 nt, Artificial Sequence
  Description of Artificial Sequence: Synthetic oligonucleotide
  Antisense strand to SEQ ID NO: 1433252
ucauuucucaaggagccag

SEQ ID NO: 1433254 - RNA, 19 nt, Artificial Sequence
  Description of Artificial Sequence: Synthetic oligonucleotide
  Sense strand starting at position 1781 of SEQ ID NO: 1243675
gccucuguguucuggcaga

SEQ ID NO: 1433255 - RNA, 19 nt, Artificial Sequence
  Description of Artificial Sequence: Synthetic oligonucleotide
  Antisense strand to SEQ ID NO: 1433254
ucugccagaacacagaggc

SEQ ID NO: 1433256 - RNA, 19 nt, Artificial Sequence
  Description of Artificial Sequence: Synthetic oligonucleotide
  Sense strand starting at position 1786 of SEQ ID NO: 1243675
uguguucuggcagaaaguc

SEQ ID NO: 1433257 - RNA, 19 nt, Artificial Sequence
  Description of Artificial Sequence: Synthetic oligonucleotide
  Antisense strand to SEQ ID NO: 1433256
gacuuucugccagaacaca

SEQ ID NO: 1433258 - RNA, 19 nt, Artificial Sequence
  Description of Artificial Sequence: Synthetic oligonucleotide
  Sense strand starting at position 2109 of SEQ ID NO: 1243675
agagguauccagggucuca

SEQ ID NO: 1433259 - RNA, 19 nt, Artificial Sequence
  Description of Artificial Sequence: Synthetic oligonucleotide
  Antisense strand to SEQ ID NO: 1433258
ugagacccuggauaccucu

SEQ ID NO: 1433260 - RNA, 19 nt, Artificial Sequence
  Description of Artificial Sequence: Synthetic oligonucleotide
  Sense strand starting at position 2118 of SEQ ID NO: 1243675
cagggucucagagguuaaa

SEQ ID NO: 1433261 - RNA, 19 nt, Artificial Sequence
  Description of Artificial Sequence: Synthetic oligonucleotide
  Antisense strand to SEQ ID NO: 1433260
uuuaaccucugagacccug

SEQ ID NO: 1433262 - RNA, 19 nt, Artificial Sequence
  Description of Artificial Sequence: Synthetic oligonucleotide
  Sense strand starting at position 2341 of SEQ ID NO: 1243675
cggcgagucucaccaucuu

SEQ ID NO: 1433263 - RNA, 19 nt, Artificial Sequence
  Description of Artificial Sequence: Synthetic oligonucleotide
  Antisense strand to SEQ ID NO: 1433262
aagauggugagacucgccg

SEQ ID NO: 1433264 - RNA, 19 nt, Artificial Sequence
  Description of Artificial Sequence: Synthetic oligonucleotide
  Sense strand starting at position 2604 of SEQ ID NO: 1243675
gauugagaucucugcggag

SEQ ID NO: 1433265 - RNA, 19 nt, Artificial Sequence
  Description of Artificial Sequence: Synthetic oligonucleotide
  Antisense strand to SEQ ID NO: 1433264
cuccgcagagaucucaauc

SEQ ID NO: 1433266 - RNA, 19 nt, Artificial Sequence
  Description of Artificial Sequence: Synthetic oligonucleotide
  Sense strand starting at position 2606 of SEQ ID NO: 1243675
uugagaucucugcggagga

SEQ ID NO: 1433267 - RNA, 19 nt, Artificial Sequence
  Description of Artificial Sequence: Synthetic oligonucleotide
  Antisense strand to SEQ ID NO: 1433266
uccuccgcagagaucucaa

SEQ ID NO: 1433268 - RNA, 19 nt, Artificial Sequence
  Description of Artificial Sequence: Synthetic oligonucleotide
  Sense strand starting at position 2607 of SEQ ID NO: 1243675
ugagaucucugcggaggaa

SEQ ID NO: 1433269 - RNA, 19 nt, Artificial Sequence
  Description of Artificial Sequence: Synthetic oligonucleotide
  Antisense strand to SEQ ID NO: 1433268
uuccuccgcagagaucuca

SEQ ID NO: 1433270 - RNA, 19 nt, Artificial Sequence
  Description of Artificial Sequence: Synthetic oligonucleotide
  Sense strand starting at position 2812 of SEQ ID NO: 1243675
cgugguugcucauccuuau

SEQ ID NO: 1433271 - RNA, 19 nt, Artificial Sequence
  Description of Artificial Sequence: Synthetic oligonucleotide
  Antisense strand to SEQ ID NO: 1433270
auaaggaugagcaaccacg

SEQ ID NO: 1433272 - RNA, 19 nt, Artificial Sequence
  Description of Artificial Sequence: Synthetic oligonucleotide
  Sense strand starting at position 2815 of SEQ ID NO: 1243675
gguugcucauccuuauaau

SEQ ID NO: 1433273 - RNA, 19 nt, Artificial Sequence
  Description of Artificial Sequence: Synthetic oligonucleotide
  Antisense strand to SEQ ID NO: 1433272
auuauaaggaugagcaacc

SEQ ID NO: 1433274 - RNA, 19 nt, Artificial Sequence
  Description of Artificial Sequence: Synthetic oligonucleotide
  Sense strand starting at position 3361 of SEQ ID NO: 1243675
agagcaauaugcugucuga

SEQ ID NO: 1433275 - RNA, 19 nt, Artificial Sequence
  Description of Artificial Sequence: Synthetic oligonucleotide
  Antisense strand to SEQ ID NO: 1433274
ucagacagcauauugcucu

SEQ ID NO: 1433276 - RNA, 19 nt, Artificial Sequence
  Description of Artificial Sequence: Synthetic oligonucleotide
  Sense strand starting at position 3727 of SEQ ID NO: 1243675
cgccuauaauccuagcaga

SEQ ID NO: 1433277 - RNA, 19 nt, Artificial Sequence
  Description of Artificial Sequence: Synthetic oligonucleotide
  Antisense strand to SEQ ID NO: 1433276
ucugcuaggauuauaggcg

SEQ ID NO: 1433278 - RNA, 19 nt, Artificial Sequence
  Description of Artificial Sequence: Synthetic oligonucleotide
  Sense strand starting at position 3730 of SEQ ID NO: 1243675
cuauaauccuagcagauug

SEQ ID NO: 1433279 - RNA, 19 nt, Artificial Sequence
  Description of Artificial Sequence: Synthetic oligonucleotide
  Antisense strand to SEQ ID NO: 1433278
caaucugcuaggauuauag

SEQ ID NO: 1433280 - RNA, 19 nt, Artificial Sequence
  Description of Artificial Sequence: Synthetic oligonucleotide
  Sense strand starting at position 430 of SEQ ID NO: 1243676
ggaguguguuguggagguu

SEQ ID NO: 1433281 - RNA, 19 nt, Artificial Sequence
  Description of Artificial Sequence: Synthetic oligonucleotide
  Antisense strand to SEQ ID NO: 1433280
aaccuccacaacacacucc

SEQ ID NO: 1433282 - RNA, 19 nt, Artificial Sequence
  Description of Artificial Sequence: Synthetic oligonucleotide
  Sense strand starting at position 431 of SEQ ID NO: 1243676
gaguguguuguggagguuu

SEQ ID NO: 1433283 - RNA, 19 nt, Artificial Sequence
  Description of Artificial Sequence: Synthetic oligonucleotide
  Antisense strand to SEQ ID NO: 1433282
aaaccuccacaacacacuc

SEQ ID NO: 1433284 - RNA, 19 nt, Artificial Sequence
  Description of Artificial Sequence: Synthetic oligonucleotide
  Sense strand starting at position 433 of SEQ ID NO: 1243676
guguguuguggagguuugu

SEQ ID NO: 1433285 - RNA, 19 nt, Artificial Sequence
  Description of Artificial Sequence: Synthetic oligonucleotide
  Antisense strand to SEQ ID NO: 1433284
acaaaccuccacaacacac

SEQ ID NO: 1433286 - RNA, 19 nt, Artificial Sequence
  Description of Artificial Sequence: Synthetic oligonucleotide
  Sense strand starting at position 472 of SEQ ID NO: 1243676
ggcaugguguguugugagu

SEQ ID NO: 1433287 - RNA, 19 nt, Artificial Sequence
  Description of Artificial Sequence: Synthetic oligonucleotide
  Antisense strand to SEQ ID NO: 1433286
acucacaacacaccaugcc

SEQ ID NO: 1433288 - RNA, 19 nt, Artificial Sequence
  Description of Artificial Sequence: Synthetic oligonucleotide
  Sense strand starting at position 478 of SEQ ID NO: 1243676
guguguugugagugugcga

SEQ ID NO: 1433289 - RNA, 19 nt, Artificial Sequence
  Description of Artificial Sequence: Synthetic oligonucleotide
  Antisense strand to SEQ ID NO: 1433288
ucgcacacucacaacacac

SEQ ID NO: 1433290 - RNA, 19 nt, Artificial Sequence
  Description of Artificial Sequence: Synthetic oligonucleotide
  Sense strand starting at position 485 of SEQ ID NO: 1243676
gugagugugcgaguucugu

SEQ ID NO: 1433291 - RNA, 19 nt, Artificial Sequence
  Description of Artificial Sequence: Synthetic oligonucleotide
  Antisense strand to SEQ ID NO: 1433290
acagaacucgcacacucac

SEQ ID NO: 1433292 - RNA, 19 nt, Artificial Sequence
  Description of Artificial Sequence: Synthetic oligonucleotide
  Sense strand starting at position 489 of SEQ ID NO: 1243676
gugugcgaguucugugcuu

SEQ ID NO: 1433293 - RNA, 19 nt, Artificial Sequence
  Description of Artificial Sequence: Synthetic oligonucleotide
  Antisense strand to SEQ ID NO: 1433292
aagcacagaacucgcacac

SEQ ID NO: 1433294 - RNA, 19 nt, Artificial Sequence
  Description of Artificial Sequence: Synthetic oligonucleotide
  Sense strand starting at position 564 of SEQ ID NO: 1243676
uaggaaguucucgguguga

SEQ ID NO: 1433295 - RNA, 19 nt, Artificial Sequence
  Description of Artificial Sequence: Synthetic oligonucleotide
  Antisense strand to SEQ ID NO: 1433294
ucacaccgagaacuuccua

SEQ ID NO: 1433296 - RNA, 19 nt, Artificial Sequence
  Description of Artificial Sequence: Synthetic oligonucleotide
  Sense strand starting at position 566 of SEQ ID NO: 1243676
ggaaguucucggugugagu

SEQ ID NO: 1433297 - RNA, 19 nt, Artificial Sequence
  Description of Artificial Sequence: Synthetic oligonucleotide
  Antisense strand to SEQ ID NO: 1433296
acucacaccgagaacuucc

SEQ ID NO: 1433298 - RNA, 19 nt, Artificial Sequence
  Description of Artificial Sequence: Synthetic oligonucleotide
  Sense strand starting at position 575 of SEQ ID NO: 1243676
cggugugagugucugagau

SEQ ID NO: 1433299 - RNA, 19 nt, Artificial Sequence
  Description of Artificial Sequence: Synthetic oligonucleotide
  Antisense strand to SEQ ID NO: 1433298
aucucagacacucacaccg

SEQ ID NO: 1433300 - RNA, 19 nt, Artificial Sequence
  Description of Artificial Sequence: Synthetic oligonucleotide
  Sense strand starting at position 577 of SEQ ID NO: 1243676
gugugagugucugagauag

SEQ ID NO: 1433301 - RNA, 19 nt, Artificial Sequence
  Description of Artificial Sequence: Synthetic oligonucleotide
  Antisense strand to SEQ ID NO: 1433300
cuaucucagacacucacac

SEQ ID NO: 1433302 - RNA, 19 nt, Artificial Sequence
  Description of Artificial Sequence: Synthetic oligonucleotide
  Sense strand starting at position 752 of SEQ ID NO: 1243676
ucucccuuuccggauuauu

SEQ ID NO: 1433303 - RNA, 19 nt, Artificial Sequence
  Description of Artificial Sequence: Synthetic oligonucleotide
  Antisense strand to SEQ ID NO: 1433302
aauaauccggaaagggaga

SEQ ID NO: 1433304 - RNA, 19 nt, Artificial Sequence
  Description of Artificial Sequence: Synthetic oligonucleotide
  Sense strand starting at position 849 of SEQ ID NO: 1243676
cuguccugcgucugaucau

SEQ ID NO: 1433305 - RNA, 19 nt, Artificial Sequence
  Description of Artificial Sequence: Synthetic oligonucleotide
  Antisense strand to SEQ ID NO: 1433304
augaucagacgcaggacag

SEQ ID NO: 1433306 - RNA, 19 nt, Artificial Sequence
  Description of Artificial Sequence: Synthetic oligonucleotide
  Sense strand starting at position 1126 of SEQ ID NO: 1243676
cggacuggcuccuugagaa

SEQ ID NO: 1433307 - RNA, 19 nt, Artificial Sequence
  Description of Artificial Sequence: Synthetic oligonucleotide
  Antisense strand to SEQ ID NO: 1433306
uucucaaggagccaguccg

SEQ ID NO: 1433308 - RNA, 19 nt, Artificial Sequence
  Description of Artificial Sequence: Synthetic oligonucleotide
  Sense strand starting at position 1130 of SEQ ID NO: 1243676
cuggcuccuugagaaauga

SEQ ID NO: 1433309 - RNA, 19 nt, Artificial Sequence
  Description of Artificial Sequence: Synthetic oligonucleotide
  Antisense strand to SEQ ID NO: 1433308
ucauuucucaaggagccag

SEQ ID NO: 1433310 - RNA, 19 nt, Artificial Sequence
  Description of Artificial Sequence: Synthetic oligonucleotide
  Sense strand starting at position 1197 of SEQ ID NO: 1243676
gccucuguguucuggcaga

SEQ ID NO: 1433311 - RNA, 19 nt, Artificial Sequence
  Description of Artificial Sequence: Synthetic oligonucleotide
  Antisense strand to SEQ ID NO: 1433310
ucugccagaacacagaggc

SEQ ID NO: 1433312 - RNA, 19 nt, Artificial Sequence
  Description of Artificial Sequence: Synthetic oligonucleotide
  Sense strand starting at position 1202 of SEQ ID NO: 1243676
uguguucuggcagaaaguc

SEQ ID NO: 1433313 - RNA, 19 nt, Artificial Sequence
  Description of Artificial Sequence: Synthetic oligonucleotide
  Antisense strand to SEQ ID NO: 1433312
gacuuucugccagaacaca

SEQ ID NO: 1433314 - RNA, 19 nt, Artificial Sequence
  Description of Artificial Sequence: Synthetic oligonucleotide
  Sense strand starting at position 1525 of SEQ ID NO: 1243676
agagguauccagggucuca

SEQ ID NO: 1433315 - RNA, 19 nt, Artificial Sequence
  Description of Artificial Sequence: Synthetic oligonucleotide
  Antisense strand to SEQ ID NO: 1433314
ugagacccuggauaccucu

SEQ ID NO: 1433316 - RNA, 19 nt, Artificial Sequence
  Description of Artificial Sequence: Synthetic oligonucleotide
  Sense strand starting at position 1534 of SEQ ID NO: 1243676
cagggucucagagguuaaa

SEQ ID NO: 1433317 - RNA, 19 nt, Artificial Sequence
  Description of Artificial Sequence: Synthetic oligonucleotide
  Antisense strand to SEQ ID NO: 1433316
uuuaaccucugagacccug

SEQ ID NO: 1433318 - RNA, 19 nt, Artificial Sequence
  Description of Artificial Sequence: Synthetic oligonucleotide
  Sense strand starting at position 1757 of SEQ ID NO: 1243676
cggcgagucucaccaucuu

SEQ ID NO: 1433319 - RNA, 19 nt, Artificial Sequence
  Description of Artificial Sequence: Synthetic oligonucleotide
  Antisense strand to SEQ ID NO: 1433318
aagauggugagacucgccg

SEQ ID NO: 1433320 - RNA, 19 nt, Artificial Sequence
  Description of Artificial Sequence: Synthetic oligonucleotide
  Sense strand starting at position 2020 of SEQ ID NO: 1243676
gauugagaucucugcggag

SEQ ID NO: 1433321 - RNA, 19 nt, Artificial Sequence
  Description of Artificial Sequence: Synthetic oligonucleotide
  Antisense strand to SEQ ID NO: 1433320
cuccgcagagaucucaauc

SEQ ID NO: 1433322 - RNA, 19 nt, Artificial Sequence
  Description of Artificial Sequence: Synthetic oligonucleotide
  Sense strand starting at position 2022 of SEQ ID NO: 1243676
uugagaucucugcggagga

SEQ ID NO: 1433323 - RNA, 19 nt, Artificial Sequence
  Description of Artificial Sequence: Synthetic oligonucleotide
  Antisense strand to SEQ ID NO: 1433322
uccuccgcagagaucucaa

SEQ ID NO: 1433324 - RNA, 19 nt, Artificial Sequence
  Description of Artificial Sequence: Synthetic oligonucleotide
  Sense strand starting at position 2023 of SEQ ID NO: 1243676
ugagaucucugcggaggaa

SEQ ID NO: 1433325 - RNA, 19 nt, Artificial Sequence
  Description of Artificial Sequence: Synthetic oligonucleotide
  Antisense strand to SEQ ID NO: 1433324
uuccuccgcagagaucuca

SEQ ID NO: 1433326 - RNA, 19 nt, Artificial Sequence
  Description of Artificial Sequence: Synthetic oligonucleotide
  Sense strand starting at position 2228 of SEQ ID NO: 1243676
cgugguugcucauccuuau

SEQ ID NO: 1433327 - RNA, 19 nt, Artificial Sequence
  Description of Artificial Sequence: Synthetic oligonucleotide
  Antisense strand to SEQ ID NO: 1433326
auaaggaugagcaaccacg

SEQ ID NO: 1433328 - RNA, 19 nt, Artificial Sequence
  Description of Artificial Sequence: Synthetic oligonucleotide
  Sense strand starting at position 2231 of SEQ ID NO: 1243676
gguugcucauccuuauaau

SEQ ID NO: 1433329 - RNA, 19 nt, Artificial Sequence
  Description of Artificial Sequence: Synthetic oligonucleotide
  Antisense strand to SEQ ID NO: 1433328
auuauaaggaugagcaacc

SEQ ID NO: 1433330 - RNA, 19 nt, Artificial Sequence
  Description of Artificial Sequence: Synthetic oligonucleotide
  Sense strand starting at position 2777 of SEQ ID NO: 1243676
agagcaauaugcugucuga

SEQ ID NO: 1433331 - RNA, 19 nt, Artificial Sequence
  Description of Artificial Sequence: Synthetic oligonucleotide
  Antisense strand to SEQ ID NO: 1433330
ucagacagcauauugcucu

SEQ ID NO: 1433332 - RNA, 19 nt, Artificial Sequence
  Description of Artificial Sequence: Synthetic oligonucleotide
  Sense strand starting at position 3143 of SEQ ID NO: 1243676
cgccuauaauccuagcaga

SEQ ID NO: 1433333 - RNA, 19 nt, Artificial Sequence
  Description of Artificial Sequence: Synthetic oligonucleotide
  Antisense strand to SEQ ID NO: 1433332
ucugcuaggauuauaggcg

SEQ ID NO: 1433334 - RNA, 19 nt, Artificial Sequence
  Description of Artificial Sequence: Synthetic oligonucleotide
  Sense strand starting at position 3146 of SEQ ID NO: 1243676
cuauaauccuagcagauug

SEQ ID NO: 1433335 - RNA, 19 nt, Artificial Sequence
  Description of Artificial Sequence: Synthetic oligonucleotide
  Antisense strand to SEQ ID NO: 1433334
caaucugcuaggauuauag

SEQ ID NO: 1433336 - RNA, 19 nt, Artificial Sequence
  Description of Artificial Sequence: Synthetic oligonucleotide
  Sense strand starting at position 144 of SEQ ID NO: 1243677
caaguuguucugcagaaag

SEQ ID NO: 1433337 - RNA, 19 nt, Artificial Sequence
  Description of Artificial Sequence: Synthetic oligonucleotide
  Antisense strand to SEQ ID NO: 1433336
cuuucugcagaacaacuug

SEQ ID NO: 1433338 - RNA, 19 nt, Artificial Sequence
  Description of Artificial Sequence: Synthetic oligonucleotide
  Sense strand starting at position 146 of SEQ ID NO: 1243677
aguuguucugcagaaagga

SEQ ID NO: 1433339 - RNA, 19 nt, Artificial Sequence
  Description of Artificial Sequence: Synthetic oligonucleotide
  Antisense strand to SEQ ID NO: 1433338
uccuuucugcagaacaacu

SEQ ID NO: 1433340 - RNA, 19 nt, Artificial Sequence
  Description of Artificial Sequence: Synthetic oligonucleotide
  Sense strand starting at position 205 of SEQ ID NO: 1243677
gucagaggcguccaucaca

SEQ ID NO: 1433341 - RNA, 19 nt, Artificial Sequence
  Description of Artificial Sequence: Synthetic oligonucleotide
  Antisense strand to SEQ ID NO: 1433340
ugugauggacgccucugac

SEQ ID NO: 1433342 - RNA, 19 nt, Artificial Sequence
  Description of Artificial Sequence: Synthetic oligonucleotide
  Sense strand starting at position 614 of SEQ ID NO: 1243677
ggcccaaaguagcuuuaaa

SEQ ID NO: 1433343 - RNA, 19 nt, Artificial Sequence
  Description of Artificial Sequence: Synthetic oligonucleotide
  Antisense strand to SEQ ID NO: 1433342
uuuaaagcuacuuugggcc

SEQ ID NO: 1433344 - RNA, 19 nt, Artificial Sequence
  Description of Artificial Sequence: Synthetic oligonucleotide
  Sense strand starting at position 768 of SEQ ID NO: 1243677
caaccagagguacguauaa

SEQ ID NO: 1433345 - RNA, 19 nt, Artificial Sequence
  Description of Artificial Sequence: Synthetic oligonucleotide
  Antisense strand to SEQ ID NO: 1433344
uuauacguaccucugguug

SEQ ID NO: 1433346 - RNA, 19 nt, Artificial Sequence
  Description of Artificial Sequence: Synthetic oligonucleotide
  Sense strand starting at position 770 of SEQ ID NO: 1243677
accagagguacguauaagu

SEQ ID NO: 1433347 - RNA, 19 nt, Artificial Sequence
  Description of Artificial Sequence: Synthetic oligonucleotide
  Antisense strand to SEQ ID NO: 1433346
acuuauacguaccucuggu

SEQ ID NO: 1433348 - RNA, 19 nt, Artificial Sequence
  Description of Artificial Sequence: Synthetic oligonucleotide
  Sense strand starting at position 968 of SEQ ID NO: 1243677
ugaguaguauagucacuaa

SEQ ID NO: 1433349 - RNA, 19 nt, Artificial Sequence
  Description of Artificial Sequence: Synthetic oligonucleotide
  Antisense strand to SEQ ID NO: 1433348
uuagugacuauacuacuca

SEQ ID NO: 1433350 - RNA, 19 nt, Artificial Sequence
  Description of Artificial Sequence: Synthetic oligonucleotide
  Sense strand starting at position 971 of SEQ ID NO: 1243677
guaguauagucacuaaaua

SEQ ID NO: 1433351 - RNA, 19 nt, Artificial Sequence
  Description of Artificial Sequence: Synthetic oligonucleotide
  Antisense strand to SEQ ID NO: 1433350
uauuuagugacuauacuac

SEQ ID NO: 1433352 - RNA, 19 nt, Artificial Sequence
  Description of Artificial Sequence: Synthetic oligonucleotide
  Sense strand starting at position 1159 of SEQ ID NO: 1243677
gugaucuuucucugugcca

SEQ ID NO: 1433353 - RNA, 19 nt, Artificial Sequence
  Description of Artificial Sequence: Synthetic oligonucleotide
  Antisense strand to SEQ ID NO: 1433352
uggcacagagaaagaucac

SEQ ID NO: 1433354 - RNA, 19 nt, Artificial Sequence
  Description of Artificial Sequence: Synthetic oligonucleotide
  Sense strand starting at position 1187 of SEQ ID NO: 1243677
uaagauuggugcccaccua

SEQ ID NO: 1433355 - RNA, 19 nt, Artificial Sequence
  Description of Artificial Sequence: Synthetic oligonucleotide
  Antisense strand to SEQ ID NO: 1433354
uaggugggcaccaaucuua

SEQ ID NO: 1433356 - RNA, 19 nt, Artificial Sequence
  Description of Artificial Sequence: Synthetic oligonucleotide
  Sense strand starting at position 1188 of SEQ ID NO: 1243677
aagauuggugcccaccuau

SEQ ID NO: 1433357 - RNA, 19 nt, Artificial Sequence
  Description of Artificial Sequence: Synthetic oligonucleotide
  Antisense strand to SEQ ID NO: 1433356
auaggugggcaccaaucuu

SEQ ID NO: 1433358 - RNA, 19 nt, Artificial Sequence
  Description of Artificial Sequence: Synthetic oligonucleotide
  Sense strand starting at position 1239 of SEQ ID NO: 1243677
accgcugucccguugugaa

SEQ ID NO: 1433359 - RNA, 19 nt, Artificial Sequence
  Description of Artificial Sequence: Synthetic oligonucleotide
  Antisense strand to SEQ ID NO: 1433358
uucacaacgggacagcggu

SEQ ID NO: 1433360 - RNA, 19 nt, Artificial Sequence
  Description of Artificial Sequence: Synthetic oligonucleotide
  Sense strand starting at position 1496 of SEQ ID NO: 1243677
gccuuaagucacgaccuga

SEQ ID NO: 1433361 - RNA, 19 nt, Artificial Sequence
  Description of Artificial Sequence: Synthetic oligonucleotide
  Antisense strand to SEQ ID NO: 1433360
ucaggucgugacuuaaggc

SEQ ID NO: 1433362 - RNA, 19 nt, Artificial Sequence
  Description of Artificial Sequence: Synthetic oligonucleotide
  Sense strand starting at position 1889 of SEQ ID NO: 1243677
cggccacucucauuggaua

SEQ ID NO: 1433363 - RNA, 19 nt, Artificial Sequence
  Description of Artificial Sequence: Synthetic oligonucleotide
  Antisense strand to SEQ ID NO: 1433362
uauccaaugagaguggccg

SEQ ID NO: 1433364 - RNA, 19 nt, Artificial Sequence
  Description of Artificial Sequence: Synthetic oligonucleotide
  Sense strand starting at position 1900 of SEQ ID NO: 1243677
auuggauaguucucaccuu

SEQ ID NO: 1433365 - RNA, 19 nt, Artificial Sequence
  Description of Artificial Sequence: Synthetic oligonucleotide
  Antisense strand to SEQ ID NO: 1433364
aaggugagaacuauccaau

SEQ ID NO: 1433366 - RNA, 19 nt, Artificial Sequence
  Description of Artificial Sequence: Synthetic oligonucleotide
  Sense strand starting at position 1933 of SEQ ID NO: 1243677
guucuuagggcucauuguu

SEQ ID NO: 1433367 - RNA, 19 nt, Artificial Sequence
  Description of Artificial Sequence: Synthetic oligonucleotide
  Antisense strand to SEQ ID NO: 1433366
aacaaugagcccuaagaac

SEQ ID NO: 1433368 - RNA, 19 nt, Artificial Sequence
  Description of Artificial Sequence: Synthetic oligonucleotide
  Sense strand starting at position 2499 of SEQ ID NO: 1243677
gccacaaggccugagucau

SEQ ID NO: 1433369 - RNA, 19 nt, Artificial Sequence
  Description of Artificial Sequence: Synthetic oligonucleotide
  Antisense strand to SEQ ID NO: 1433368
augacucaggccuuguggc

SEQ ID NO: 1433370 - RNA, 19 nt, Artificial Sequence
  Description of Artificial Sequence: Synthetic oligonucleotide
  Sense strand starting at position 2511 of SEQ ID NO: 1243677
gagucaugaaaguggguga

SEQ ID NO: 1433371 - RNA, 19 nt, Artificial Sequence
  Description of Artificial Sequence: Synthetic oligonucleotide
  Antisense strand to SEQ ID NO: 1433370
ucacccacuuucaugacuc

SEQ ID NO: 1433372 - RNA, 19 nt, Artificial Sequence
  Description of Artificial Sequence: Synthetic oligonucleotide
  Sense strand starting at position 2522 of SEQ ID NO: 1243677
gugggugacucagucggau

SEQ ID NO: 1433373 - RNA, 19 nt, Artificial Sequence
  Description of Artificial Sequence: Synthetic oligonucleotide
  Antisense strand to SEQ ID NO: 1433372
auccgacugagucacccac

SEQ ID NO: 1433374 - RNA, 19 nt, Artificial Sequence
  Description of Artificial Sequence: Synthetic oligonucleotide
  Sense strand starting at position 2537 of SEQ ID NO: 1243677
ggauguuaggcucgcacuu

SEQ ID NO: 1433375 - RNA, 19 nt, Artificial Sequence
  Description of Artificial Sequence: Synthetic oligonucleotide
  Antisense strand to SEQ ID NO: 1433374
aagugcgagccuaacaucc

SEQ ID NO: 1433376 - RNA, 19 nt, Artificial Sequence
  Description of Artificial Sequence: Synthetic oligonucleotide
  Sense strand starting at position 2601 of SEQ ID NO: 1243677
guguucucucugggaccuu

SEQ ID NO: 1433377 - RNA, 19 nt, Artificial Sequence
  Description of Artificial Sequence: Synthetic oligonucleotide
  Antisense strand to SEQ ID NO: 1433376
aaggucccagagagaacac

SEQ ID NO: 1433378 - RNA, 19 nt, Artificial Sequence
  Description of Artificial Sequence: Synthetic oligonucleotide
  Sense strand starting at position 2675 of SEQ ID NO: 1243677
ucgggaagugccuaauggu

SEQ ID NO: 1433379 - RNA, 19 nt, Artificial Sequence
  Description of Artificial Sequence: Synthetic oligonucleotide
  Antisense strand to SEQ ID NO: 1433378
accauuaggcacuucccga

SEQ ID NO: 1433380 - RNA, 19 nt, Artificial Sequence
  Description of Artificial Sequence: Synthetic oligonucleotide
  Sense strand starting at position 2683 of SEQ ID NO: 1243677
ugccuaaugguuuaggaag

SEQ ID NO: 1433381 - RNA, 19 nt, Artificial Sequence
  Description of Artificial Sequence: Synthetic oligonucleotide
  Antisense strand to SEQ ID NO: 1433380
cuuccuaaaccauuaggca

SEQ ID NO: 1433382 - RNA, 19 nt, Artificial Sequence
  Description of Artificial Sequence: Synthetic oligonucleotide
  Sense strand starting at position 2723 of SEQ ID NO: 1243677
ggugaaagcugauccuauc

SEQ ID NO: 1433383 - RNA, 19 nt, Artificial Sequence
  Description of Artificial Sequence: Synthetic oligonucleotide
  Antisense strand to SEQ ID NO: 1433382
gauaggaucagcuuucacc

SEQ ID NO: 1433384 - RNA, 19 nt, Artificial Sequence
  Description of Artificial Sequence: Synthetic oligonucleotide
  Sense strand starting at position 2770 of SEQ ID NO: 1243677
gagggaaacgaauguugau

SEQ ID NO: 1433385 - RNA, 19 nt, Artificial Sequence
  Description of Artificial Sequence: Synthetic oligonucleotide
  Antisense strand to SEQ ID NO: 1433384
aucaacauucguuucccuc

SEQ ID NO: 1433386 - RNA, 19 nt, Artificial Sequence
  Description of Artificial Sequence: Synthetic oligonucleotide
  Sense strand starting at position 3031 of SEQ ID NO: 1243677
uggcuuggcuuguuagauc

SEQ ID NO: 1433387 - RNA, 19 nt, Artificial Sequence
  Description of Artificial Sequence: Synthetic oligonucleotide
  Antisense strand to SEQ ID NO: 1433386
gaucuaacaagccaagcca

SEQ ID NO: 1433388 - RNA, 19 nt, Artificial Sequence
  Description of Artificial Sequence: Synthetic oligonucleotide
  Sense strand starting at position 3042 of SEQ ID NO: 1243677
guuagaucguuucuguauc

SEQ ID NO: 1433389 - RNA, 19 nt, Artificial Sequence
  Description of Artificial Sequence: Synthetic oligonucleotide
  Antisense strand to SEQ ID NO: 1433388
gauacagaaacgaucuaac

SEQ ID NO: 1433390 - RNA, 19 nt, Artificial Sequence
  Description of Artificial Sequence: Synthetic oligonucleotide
  Sense strand starting at position 3049 of SEQ ID NO: 1243677
cguuucuguauccgggaaa

SEQ ID NO: 1433391 - RNA, 19 nt, Artificial Sequence
  Description of Artificial Sequence: Synthetic oligonucleotide
  Antisense strand to SEQ ID NO: 1433390
uuucccggauacagaaacg

SEQ ID NO: 1433392 - RNA, 19 nt, Artificial Sequence
  Description of Artificial Sequence: Synthetic oligonucleotide
  Sense strand starting at position 3104 of SEQ ID NO: 1243677
gggccaguuguuggagaca

SEQ ID NO: 1433393 - RNA, 19 nt, Artificial Sequence
  Description of Artificial Sequence: Synthetic oligonucleotide
  Antisense strand to SEQ ID NO: 1433392
ugucuccaacaacuggccc

SEQ ID NO: 1433394 - RNA, 19 nt, Artificial Sequence
  Description of Artificial Sequence: Synthetic oligonucleotide
  Sense strand starting at position 3313 of SEQ ID NO: 1243677
gugauaggguucuuuguug

SEQ ID NO: 1433395 - RNA, 19 nt, Artificial Sequence
  Description of Artificial Sequence: Synthetic oligonucleotide
  Antisense strand to SEQ ID NO: 1433394
caacaaagaacccuaucac

SEQ ID NO: 1433396 - RNA, 19 nt, Artificial Sequence
  Description of Artificial Sequence: Synthetic oligonucleotide
  Sense strand starting at position 3317 of SEQ ID NO: 1243677
uaggguucuuuguugagaa

SEQ ID NO: 1433397 - RNA, 19 nt, Artificial Sequence
  Description of Artificial Sequence: Synthetic oligonucleotide
  Antisense strand to SEQ ID NO: 1433396
uucucaacaaagaacccua

SEQ ID NO: 1433398 - RNA, 19 nt, Artificial Sequence
  Description of Artificial Sequence: Synthetic oligonucleotide
  Sense strand starting at position 3342 of SEQ ID NO: 1243677
gagccugauguuuaagagu

SEQ ID NO: 1433399 - RNA, 19 nt, Artificial Sequence
  Description of Artificial Sequence: Synthetic oligonucleotide
  Antisense strand to SEQ ID NO: 1433398
acucuuaaacaucaggcuc

SEQ ID NO: 1433400 - RNA, 19 nt, Artificial Sequence
  Description of Artificial Sequence: Synthetic oligonucleotide
  Sense strand starting at position 3348 of SEQ ID NO: 1243677
gauguuuaagagugaauca

SEQ ID NO: 1433401 - RNA, 19 nt, Artificial Sequence
  Description of Artificial Sequence: Synthetic oligonucleotide
  Antisense strand to SEQ ID NO: 1433400
ugauucacucuuaaacauc

SEQ ID NO: 1433402 - RNA, 19 nt, Artificial Sequence
  Description of Artificial Sequence: Synthetic oligonucleotide
  Sense strand starting at position 3378 of SEQ ID NO: 1243677
uggugagcugugugacuca

SEQ ID NO: 1433403 - RNA, 19 nt, Artificial Sequence
  Description of Artificial Sequence: Synthetic oligonucleotide
  Antisense strand to SEQ ID NO: 1433402
ugagucacacagcucacca

SEQ ID NO: 1433404 - RNA, 19 nt, Artificial Sequence
  Description of Artificial Sequence: Synthetic oligonucleotide
  Sense strand starting at position 3860 of SEQ ID NO: 1243677
ccguguuaggcucuuaugu

SEQ ID NO: 1433405 - RNA, 19 nt, Artificial Sequence
  Description of Artificial Sequence: Synthetic oligonucleotide
  Antisense strand to SEQ ID NO: 1433404
acauaagagccuaacacgg

SEQ ID NO: 1433406 - RNA, 19 nt, Artificial Sequence
  Description of Artificial Sequence: Synthetic oligonucleotide
  Sense strand starting at position 3868 of SEQ ID NO: 1243677
ggcucuuauguggagaacu

SEQ ID NO: 1433407 - RNA, 19 nt, Artificial Sequence
  Description of Artificial Sequence: Synthetic oligonucleotide
  Antisense strand to SEQ ID NO: 1433406
aguucuccacauaagagcc

SEQ ID NO: 1433408 - RNA, 19 nt, Artificial Sequence
  Description of Artificial Sequence: Synthetic oligonucleotide
  Sense strand starting at position 3878 of SEQ ID NO: 1243677
uggagaacugcaugggcua

SEQ ID NO: 1433409 - RNA, 19 nt, Artificial Sequence
  Description of Artificial Sequence: Synthetic oligonucleotide
  Antisense strand to SEQ ID NO: 1433408
uagcccaugcaguucucca

SEQ ID NO: 1433410 - RNA, 19 nt, Artificial Sequence
  Description of Artificial Sequence: Synthetic oligonucleotide
  Sense strand starting at position 3910 of SEQ ID NO: 1243677
uuugacaucuuggaggauu

SEQ ID NO: 1433411 - RNA, 19 nt, Artificial Sequence
  Description of Artificial Sequence: Synthetic oligonucleotide
  Antisense strand to SEQ ID NO: 1433410
aauccuccaagaugucaaa

SEQ ID NO: 1433412 - RNA, 19 nt, Artificial Sequence
  Description of Artificial Sequence: Synthetic oligonucleotide
  Sense strand starting at position 3952 of SEQ ID NO: 1243677
gcagauaccugguuauguu

SEQ ID NO: 1433413 - RNA, 19 nt, Artificial Sequence
  Description of Artificial Sequence: Synthetic oligonucleotide
  Antisense strand to SEQ ID NO: 1433412
aacauaaccagguaucugc

SEQ ID NO: 1433414 - RNA, 19 nt, Artificial Sequence
  Description of Artificial Sequence: Synthetic oligonucleotide
  Sense strand starting at position 3953 of SEQ ID NO: 1243677
cagauaccugguuauguuu

SEQ ID NO: 1433415 - RNA, 19 nt, Artificial Sequence
  Description of Artificial Sequence: Synthetic oligonucleotide
  Antisense strand to SEQ ID NO: 1433414
aaacauaaccagguaucug

SEQ ID NO: 1433416 - RNA, 19 nt, Artificial Sequence
  Description of Artificial Sequence: Synthetic oligonucleotide
  Sense strand starting at position 2048 of SEQ ID NO: 1243678
gacgacauaucuggccaau

SEQ ID NO: 1433417 - RNA, 19 nt, Artificial Sequence
  Description of Artificial Sequence: Synthetic oligonucleotide
  Antisense strand to SEQ ID NO: 1433416
auuggccagauaugucguc

SEQ ID NO: 1433418 - RNA, 19 nt, Artificial Sequence
  Description of Artificial Sequence: Synthetic oligonucleotide
  Sense strand starting at position 2601 of SEQ ID NO: 1243678
ccaacuuguuagcuaaaga

SEQ ID NO: 1433419 - RNA, 19 nt, Artificial Sequence
  Description of Artificial Sequence: Synthetic oligonucleotide
  Antisense strand to SEQ ID NO: 1433418
ucuuuagcuaacaaguugg

SEQ ID NO: 1433420 - RNA, 19 nt, Artificial Sequence
  Description of Artificial Sequence: Synthetic oligonucleotide
  Sense strand starting at position 2606 of SEQ ID NO: 1243678
uuguuagcuaaagagguua

SEQ ID NO: 1433421 - RNA, 19 nt, Artificial Sequence
  Description of Artificial Sequence: Synthetic oligonucleotide
  Antisense strand to SEQ ID NO: 1433420
uaaccucuuuagcuaacaa

SEQ ID NO: 1433422 - RNA, 19 nt, Artificial Sequence
  Description of Artificial Sequence: Synthetic oligonucleotide
  Sense strand starting at position 2051 of SEQ ID NO: 1243679
gacauaucuggccaacgca

SEQ ID NO: 1433423 - RNA, 19 nt, Artificial Sequence
  Description of Artificial Sequence: Synthetic oligonucleotide
  Antisense strand to SEQ ID NO: 1433422
ugcguuggccagauauguc

SEQ ID NO: 1433424 - RNA, 19 nt, Artificial Sequence
  Description of Artificial Sequence: Synthetic oligonucleotide
  Sense strand starting at position 2278 of SEQ ID NO: 1243679
gagcuaaccucggagcguu

SEQ ID NO: 1433425 - RNA, 19 nt, Artificial Sequence
  Description of Artificial Sequence: Synthetic oligonucleotide
  Antisense strand to SEQ ID NO: 1433424
aacgcuccgagguuagcuc

SEQ ID NO: 1433426 - RNA, 19 nt, Artificial Sequence
  Description of Artificial Sequence: Synthetic oligonucleotide
  Sense strand starting at position 2077 of SEQ ID NO: 1243680
gacgacauaucuggccaau

SEQ ID NO: 1433427 - RNA, 19 nt, Artificial Sequence
  Description of Artificial Sequence: Synthetic oligonucleotide
  Antisense strand to SEQ ID NO: 1433426
auuggccagauaugucguc

SEQ ID NO: 1433428 - RNA, 19 nt, Artificial Sequence
  Description of Artificial Sequence: Synthetic oligonucleotide
  Sense strand starting at position 2630 of SEQ ID NO: 1243680
ccaacuuguuagcuaaaga

SEQ ID NO: 1433429 - RNA, 19 nt, Artificial Sequence
  Description of Artificial Sequence: Synthetic oligonucleotide
  Antisense strand to SEQ ID NO: 1433428
ucuuuagcuaacaaguugg

SEQ ID NO: 1433430 - RNA, 19 nt, Artificial Sequence
  Description of Artificial Sequence: Synthetic oligonucleotide
  Sense strand starting at position 2635 of SEQ ID NO: 1243680
uuguuagcuaaagagguua

SEQ ID NO: 1433431 - RNA, 19 nt, Artificial Sequence
  Description of Artificial Sequence: Synthetic oligonucleotide
  Antisense strand to SEQ ID NO: 1433430
uaaccucuuuagcuaacaa

SEQ ID NO: 1433432 - RNA, 19 nt, Artificial Sequence
  Description of Artificial Sequence: Synthetic oligonucleotide
  Sense strand starting at position 2080 of SEQ ID NO: 1243681
gacauaucuggccaacgca

SEQ ID NO: 1433433 - RNA, 19 nt, Artificial Sequence
  Description of Artificial Sequence: Synthetic oligonucleotide
  Antisense strand to SEQ ID NO: 1433432
ugcguuggccagauauguc

SEQ ID NO: 1433434 - RNA, 19 nt, Artificial Sequence
  Description of Artificial Sequence: Synthetic oligonucleotide
  Sense strand starting at position 2307 of SEQ ID NO: 1243681
gagcuaaccucggagcguu

SEQ ID NO: 1433435 - RNA, 19 nt, Artificial Sequence
  Description of Artificial Sequence: Synthetic oligonucleotide
  Antisense strand to SEQ ID NO: 1433434
aacgcuccgagguuagcuc

SEQ ID NO: 1433436 - RNA, 19 nt, Artificial Sequence
  Description of Artificial Sequence: Synthetic oligonucleotide
  Sense strand starting at position 1356 of SEQ ID NO: 1243682
ggagacguuuaauaauaca

SEQ ID NO: 1433437 - RNA, 19 nt, Artificial Sequence
  Description of Artificial Sequence: Synthetic oligonucleotide
  Antisense strand to SEQ ID NO: 1433436
uguauuauuaaacgucucc

SEQ ID NO: 1433438 - RNA, 19 nt, Artificial Sequence
  Description of Artificial Sequence: Synthetic oligonucleotide
  Sense strand starting at position 1558 of SEQ ID NO: 1243682
gggugagggcucgauccau

SEQ ID NO: 1433439 - RNA, 19 nt, Artificial Sequence
  Description of Artificial Sequence: Synthetic oligonucleotide
  Antisense strand to SEQ ID NO: 1433438
auggaucgagcccucaccc

SEQ ID NO: 1433440 - RNA, 19 nt, Artificial Sequence
  Description of Artificial Sequence: Synthetic oligonucleotide
  Sense strand starting at position 1589 of SEQ ID NO: 1243682
ucuagagccucuucucaga

SEQ ID NO: 1433441 - RNA, 19 nt, Artificial Sequence
  Description of Artificial Sequence: Synthetic oligonucleotide
  Antisense strand to SEQ ID NO: 1433440
ucugagaagaggcucuaga

SEQ ID NO: 1433442 - RNA, 19 nt, Artificial Sequence
  Description of Artificial Sequence: Synthetic oligonucleotide
  Sense strand starting at position 1594 of SEQ ID NO: 1243682
agccucuucucagagcuua

SEQ ID NO: 1433443 - RNA, 19 nt, Artificial Sequence
  Description of Artificial Sequence: Synthetic oligonucleotide
  Antisense strand to SEQ ID NO: 1433442
uaagcucugagaagaggcu

SEQ ID NO: 1433444 - RNA, 19 nt, Artificial Sequence
  Description of Artificial Sequence: Synthetic oligonucleotide
  Sense strand starting at position 1883 of SEQ ID NO: 1243682
guccguuuaccucucguga

SEQ ID NO: 1433445 - RNA, 19 nt, Artificial Sequence
  Description of Artificial Sequence: Synthetic oligonucleotide
  Antisense strand to SEQ ID NO: 1433444
ucacgagagguaaacggac

SEQ ID NO: 1433446 - RNA, 19 nt, Artificial Sequence
  Description of Artificial Sequence: Synthetic oligonucleotide
  Sense strand starting at position 2116 of SEQ ID NO: 1243682
gggcguuugcuuaauccgu

SEQ ID NO: 1433447 - RNA, 19 nt, Artificial Sequence
  Description of Artificial Sequence: Synthetic oligonucleotide
  Antisense strand to SEQ ID NO: 1433446
acggauuaagcaaacgccc

SEQ ID NO: 1433448 - RNA, 19 nt, Artificial Sequence
  Description of Artificial Sequence: Synthetic oligonucleotide
  Sense strand starting at position 2238 of SEQ ID NO: 1243682
acguuugacucgggaggaa

SEQ ID NO: 1433449 - RNA, 19 nt, Artificial Sequence
  Description of Artificial Sequence: Synthetic oligonucleotide
  Antisense strand to SEQ ID NO: 1433448
uuccucccgagucaaacgu

SEQ ID NO: 1433450 - RNA, 19 nt, Artificial Sequence
  Description of Artificial Sequence: Synthetic oligonucleotide
  Sense strand starting at position 2327 of SEQ ID NO: 1243682
ggacacuccuucggccaaa

SEQ ID NO: 1433451 - RNA, 19 nt, Artificial Sequence
  Description of Artificial Sequence: Synthetic oligonucleotide
  Antisense strand to SEQ ID NO: 1433450
uuuggccgaaggagugucc

SEQ ID NO: 1433452 - RNA, 19 nt, Artificial Sequence
  Description of Artificial Sequence: Synthetic oligonucleotide
  Sense strand starting at position 2480 of SEQ ID NO: 1243682
gggacuguugucugccuuu

SEQ ID NO: 1433453 - RNA, 19 nt, Artificial Sequence
  Description of Artificial Sequence: Synthetic oligonucleotide
  Antisense strand to SEQ ID NO: 1433452
aaaggcagacaacaguccc

SEQ ID NO: 1433454 - RNA, 19 nt, Artificial Sequence
  Description of Artificial Sequence: Synthetic oligonucleotide
  Sense strand starting at position 2529 of SEQ ID NO: 1243682
ugaccuauuugagguuaca

SEQ ID NO: 1433455 - RNA, 19 nt, Artificial Sequence
  Description of Artificial Sequence: Synthetic oligonucleotide
  Antisense strand to SEQ ID NO: 1433454
uguaaccucaaauagguca

SEQ ID NO: 1433456 - RNA, 19 nt, Artificial Sequence
  Description of Artificial Sequence: Synthetic oligonucleotide
  Sense strand starting at position 2569 of SEQ ID NO: 1243682
aguggaucauaccuguaaa

SEQ ID NO: 1433457 - RNA, 19 nt, Artificial Sequence
  Description of Artificial Sequence: Synthetic oligonucleotide
  Antisense strand to SEQ ID NO: 1433456
uuuacagguaugauccacu

SEQ ID NO: 1433458 - RNA, 19 nt, Artificial Sequence
  Description of Artificial Sequence: Synthetic oligonucleotide
  Sense strand starting at position 3033 of SEQ ID NO: 1243682
gcgccuguaauugcaacua

SEQ ID NO: 1433459 - RNA, 19 nt, Artificial Sequence
  Description of Artificial Sequence: Synthetic oligonucleotide
  Antisense strand to SEQ ID NO: 1433458
uaguugcaauuacaggcgc

SEQ ID NO: 1433460 - RNA, 19 nt, Artificial Sequence
  Description of Artificial Sequence: Synthetic oligonucleotide
  Sense strand starting at position 3201 of SEQ ID NO: 1243682
uguguuuauugaccucauu

SEQ ID NO: 1433461 - RNA, 19 nt, Artificial Sequence
  Description of Artificial Sequence: Synthetic oligonucleotide
  Antisense strand to SEQ ID NO: 1433460
aaugaggucaauaaacaca

SEQ ID NO: 1433462 - RNA, 19 nt, Artificial Sequence
  Description of Artificial Sequence: Synthetic oligonucleotide
  Sense strand starting at position 3220 of SEQ ID NO: 1243682
cauacugugugcucugaau

SEQ ID NO: 1433463 - RNA, 19 nt, Artificial Sequence
  Description of Artificial Sequence: Synthetic oligonucleotide
  Antisense strand to SEQ ID NO: 1433462
auucagagcacacaguaug

SEQ ID NO: 1433464 - RNA, 19 nt, Artificial Sequence
  Description of Artificial Sequence: Synthetic oligonucleotide
  Sense strand starting at position 3222 of SEQ ID NO: 1243682
uacugugugcucugaauga

SEQ ID NO: 1433465 - RNA, 19 nt, Artificial Sequence
  Description of Artificial Sequence: Synthetic oligonucleotide
  Antisense strand to SEQ ID NO: 1433464
ucauucagagcacacagua

SEQ ID NO: 1433466 - RNA, 19 nt, Artificial Sequence
  Description of Artificial Sequence: Synthetic oligonucleotide
  Sense strand starting at position 3226 of SEQ ID NO: 1243682
gugugcucugaaugagaca

SEQ ID NO: 1433467 - RNA, 19 nt, Artificial Sequence
  Description of Artificial Sequence: Synthetic oligonucleotide
  Antisense strand to SEQ ID NO: 1433466
ugucucauucagagcacac

SEQ ID NO: 1433468 - RNA, 19 nt, Artificial Sequence
  Description of Artificial Sequence: Synthetic oligonucleotide
  Sense strand starting at position 3263 of SEQ ID NO: 1243682
agaggaugucucggcugua

SEQ ID NO: 1433469 - RNA, 19 nt, Artificial Sequence
  Description of Artificial Sequence: Synthetic oligonucleotide
  Antisense strand to SEQ ID NO: 1433468
uacagccgagacauccucu

SEQ ID NO: 1433470 - RNA, 19 nt, Artificial Sequence
  Description of Artificial Sequence: Synthetic oligonucleotide
  Sense strand starting at position 3266 of SEQ ID NO: 1243682
ggaugucucggcuguagaa

SEQ ID NO: 1433471 - RNA, 19 nt, Artificial Sequence
  Description of Artificial Sequence: Synthetic oligonucleotide
  Antisense strand to SEQ ID NO: 1433470
uucuacagccgagacaucc

SEQ ID NO: 1433472 - RNA, 19 nt, Artificial Sequence
  Description of Artificial Sequence: Synthetic oligonucleotide
  Sense strand starting at position 3341 of SEQ ID NO: 1243682
uguauugggucuuuguaaa

SEQ ID NO: 1433473 - RNA, 19 nt, Artificial Sequence
  Description of Artificial Sequence: Synthetic oligonucleotide
  Antisense strand to SEQ ID NO: 1433472
uuuacaaagacccaauaca

SEQ ID NO: 1433474 - RNA, 19 nt, Artificial Sequence
  Description of Artificial Sequence: Synthetic oligonucleotide
  Sense strand starting at position 3351 of SEQ ID NO: 1243682
cuuuguaaaucaugagaua

SEQ ID NO: 1433475 - RNA, 19 nt, Artificial Sequence
  Description of Artificial Sequence: Synthetic oligonucleotide
  Antisense strand to SEQ ID NO: 1433474
uaucucaugauuuacaaag

SEQ ID NO: 1433476 - RNA, 19 nt, Artificial Sequence
  Description of Artificial Sequence: Synthetic oligonucleotide
  Sense strand starting at position 3354 of SEQ ID NO: 1243682
uguaaaucaugagauagca

SEQ ID NO: 1433477 - RNA, 19 nt, Artificial Sequence
  Description of Artificial Sequence: Synthetic oligonucleotide
  Antisense strand to SEQ ID NO: 1433476
ugcuaucucaugauuuaca

SEQ ID NO: 1433478 - RNA, 19 nt, Artificial Sequence
  Description of Artificial Sequence: Synthetic oligonucleotide
  Sense strand starting at position 3363 of SEQ ID NO: 1243682
ugagauagcacuuguagga

SEQ ID NO: 1433479 - RNA, 19 nt, Artificial Sequence
  Description of Artificial Sequence: Synthetic oligonucleotide
  Antisense strand to SEQ ID NO: 1433478
uccuacaagugcuaucuca

SEQ ID NO: 1433480 - RNA, 19 nt, Artificial Sequence
  Description of Artificial Sequence: Synthetic oligonucleotide
  Sense strand starting at position 3437 of SEQ ID NO: 1243682
guucuuuagcccuaucuag

SEQ ID NO: 1433481 - RNA, 19 nt, Artificial Sequence
  Description of Artificial Sequence: Synthetic oligonucleotide
  Antisense strand to SEQ ID NO: 1433480
cuagauagggcuaaagaac

SEQ ID NO: 1433482 - RNA, 19 nt, Artificial Sequence
  Description of Artificial Sequence: Synthetic oligonucleotide
  Sense strand starting at position 3932 of SEQ ID NO: 1243682
uuuacaggcguggauuauu

SEQ ID NO: 1433483 - RNA, 19 nt, Artificial Sequence
  Description of Artificial Sequence: Synthetic oligonucleotide
  Antisense strand to SEQ ID NO: 1433482
aauaauccacgccuguaaa

SEQ ID NO: 1433484 - RNA, 19 nt, Artificial Sequence
  Description of Artificial Sequence: Synthetic oligonucleotide
  Sense strand starting at position 108 of SEQ ID NO: 1243683
gugacuggucuguagacca

SEQ ID NO: 1433485 - RNA, 19 nt, Artificial Sequence
  Description of Artificial Sequence: Synthetic oligonucleotide
  Antisense strand to SEQ ID NO: 1433484
uggucuacagaccagucac

SEQ ID NO: 1433486 - RNA, 19 nt, Artificial Sequence
  Description of Artificial Sequence: Synthetic oligonucleotide
  Sense strand starting at position 173 of SEQ ID NO: 1243683
ggacaucagagaggugcuu

SEQ ID NO: 1433487 - RNA, 19 nt, Artificial Sequence
  Description of Artificial Sequence: Synthetic oligonucleotide
  Antisense strand to SEQ ID NO: 1433486
aagcaccucucugaugucc

SEQ ID NO: 1433488 - RNA, 19 nt, Artificial Sequence
  Description of Artificial Sequence: Synthetic oligonucleotide
  Sense strand starting at position 182 of SEQ ID NO: 1243683
agaggugcuuuguuuaaag

SEQ ID NO: 1433489 - RNA, 19 nt, Artificial Sequence
  Description of Artificial Sequence: Synthetic oligonucleotide
  Antisense strand to SEQ ID NO: 1433488
cuuuaaacaaagcaccucu

SEQ ID NO: 1433490 - RNA, 19 nt, Artificial Sequence
  Description of Artificial Sequence: Synthetic oligonucleotide
  Sense strand starting at position 231 of SEQ ID NO: 1243683
uguaaauaaugcuucugaa

SEQ ID NO: 1433491 - RNA, 19 nt, Artificial Sequence
  Description of Artificial Sequence: Synthetic oligonucleotide
  Antisense strand to SEQ ID NO: 1433490
uucagaagcauuauuuaca

SEQ ID NO: 1433492 - RNA, 19 nt, Artificial Sequence
  Description of Artificial Sequence: Synthetic oligonucleotide
  Sense strand starting at position 316 of SEQ ID NO: 1243683
ccguguauuccuccauugu

SEQ ID NO: 1433493 - RNA, 19 nt, Artificial Sequence
  Description of Artificial Sequence: Synthetic oligonucleotide
  Antisense strand to SEQ ID NO: 1433492
acaauggaggaauacacgg

SEQ ID NO: 1433494 - RNA, 19 nt, Artificial Sequence
  Description of Artificial Sequence: Synthetic oligonucleotide
  Sense strand starting at position 320 of SEQ ID NO: 1243683
guauuccuccauuguuuga

SEQ ID NO: 1433495 - RNA, 19 nt, Artificial Sequence
  Description of Artificial Sequence: Synthetic oligonucleotide
  Antisense strand to SEQ ID NO: 1433494
ucaaacaauggaggaauac

SEQ ID NO: 1433496 - RNA, 19 nt, Artificial Sequence
  Description of Artificial Sequence: Synthetic oligonucleotide
  Sense strand starting at position 393 of SEQ ID NO: 1243683
agcuucuccuaaguaaagu

SEQ ID NO: 1433497 - RNA, 19 nt, Artificial Sequence
  Description of Artificial Sequence: Synthetic oligonucleotide
  Antisense strand to SEQ ID NO: 1433496
acuuuacuuaggagaagcu

SEQ ID NO: 1433498 - RNA, 19 nt, Artificial Sequence
  Description of Artificial Sequence: Synthetic oligonucleotide
  Sense strand starting at position 465 of SEQ ID NO: 1243683
aaagcugcgaucgguauuu

SEQ ID NO: 1433499 - RNA, 19 nt, Artificial Sequence
  Description of Artificial Sequence: Synthetic oligonucleotide
  Antisense strand to SEQ ID NO: 1433498
aaauaccgaucgcagcuuu

SEQ ID NO: 1433500 - RNA, 19 nt, Artificial Sequence
  Description of Artificial Sequence: Synthetic oligonucleotide
  Sense strand starting at position 539 of SEQ ID NO: 1243683
gugagccuuuggguuugaa

SEQ ID NO: 1433501 - RNA, 19 nt, Artificial Sequence
  Description of Artificial Sequence: Synthetic oligonucleotide
  Antisense strand to SEQ ID NO: 1433500
uucaaacccaaaggcucac

SEQ ID NO: 1433502 - RNA, 19 nt, Artificial Sequence
  Description of Artificial Sequence: Synthetic oligonucleotide
  Sense strand starting at position 542 of SEQ ID NO: 1243683
agccuuuggguuugaagaa

SEQ ID NO: 1433503 - RNA, 19 nt, Artificial Sequence
  Description of Artificial Sequence: Synthetic oligonucleotide
  Antisense strand to SEQ ID NO: 1433502
uucuucaaacccaaaggcu

SEQ ID NO: 1433504 - RNA, 19 nt, Artificial Sequence
  Description of Artificial Sequence: Synthetic oligonucleotide
  Sense strand starting at position 901 of SEQ ID NO: 1243683
gcccgagagucacuuacaa

SEQ ID NO: 1433505 - RNA, 19 nt, Artificial Sequence
  Description of Artificial Sequence: Synthetic oligonucleotide
  Antisense strand to SEQ ID NO: 1433504
uuguaagugacucucgggc

SEQ ID NO: 1433506 - RNA, 19 nt, Artificial Sequence
  Description of Artificial Sequence: Synthetic oligonucleotide
  Sense strand starting at position 909 of SEQ ID NO: 1243683
gucacuuacaaccgguaga

SEQ ID NO: 1433507 - RNA, 19 nt, Artificial Sequence
  Description of Artificial Sequence: Synthetic oligonucleotide
  Antisense strand to SEQ ID NO: 1433506
ucuaccgguuguaagugac

SEQ ID NO: 1433508 - RNA, 19 nt, Artificial Sequence
  Description of Artificial Sequence: Synthetic oligonucleotide
  Sense strand starting at position 949 of SEQ ID NO: 1243683
uguccagucccacgaugau

SEQ ID NO: 1433509 - RNA, 19 nt, Artificial Sequence
  Description of Artificial Sequence: Synthetic oligonucleotide
  Antisense strand to SEQ ID NO: 1433508
aucaucgugggacuggaca

SEQ ID NO: 1433510 - RNA, 19 nt, Artificial Sequence
  Description of Artificial Sequence: Synthetic oligonucleotide
  Sense strand starting at position 1233 of SEQ ID NO: 1243683
aagagacgguguuuagaga

SEQ ID NO: 1433511 - RNA, 19 nt, Artificial Sequence
  Description of Artificial Sequence: Synthetic oligonucleotide
  Antisense strand to SEQ ID NO: 1433510
ucucuaaacaccgucucuu

SEQ ID NO: 1433512 - RNA, 19 nt, Artificial Sequence
  Description of Artificial Sequence: Synthetic oligonucleotide
  Sense strand starting at position 1268 of SEQ ID NO: 1243683
gucacaaucgcaggaaacu

SEQ ID NO: 1433513 - RNA, 19 nt, Artificial Sequence
  Description of Artificial Sequence: Synthetic oligonucleotide
  Antisense strand to SEQ ID NO: 1433512
aguuuccugcgauugugac

SEQ ID NO: 1433514 - RNA, 19 nt, Artificial Sequence
  Description of Artificial Sequence: Synthetic oligonucleotide
  Sense strand starting at position 1563 of SEQ ID NO: 1243683
cgaagaugcucauuaacuu

SEQ ID NO: 1433515 - RNA, 19 nt, Artificial Sequence
  Description of Artificial Sequence: Synthetic oligonucleotide
  Antisense strand to SEQ ID NO: 1433514
aaguuaaugagcaucuucg

SEQ ID NO: 1433516 - RNA, 19 nt, Artificial Sequence
  Description of Artificial Sequence: Synthetic oligonucleotide
  Sense strand starting at position 1571 of SEQ ID NO: 1243683
cucauuaacuuggcgauca

SEQ ID NO: 1433517 - RNA, 19 nt, Artificial Sequence
  Description of Artificial Sequence: Synthetic oligonucleotide
  Antisense strand to SEQ ID NO: 1433516
ugaucgccaaguuaaugag

SEQ ID NO: 1433518 - RNA, 19 nt, Artificial Sequence
  Description of Artificial Sequence: Synthetic oligonucleotide
  Sense strand starting at position 1886 of SEQ ID NO: 1243683
cugaguucuccggguggac

SEQ ID NO: 1433519 - RNA, 19 nt, Artificial Sequence
  Description of Artificial Sequence: Synthetic oligonucleotide
  Antisense strand to SEQ ID NO: 1433518
guccacccggagaacucag

SEQ ID NO: 1433520 - RNA, 19 nt, Artificial Sequence
  Description of Artificial Sequence: Synthetic oligonucleotide
  Sense strand starting at position 2070 of SEQ ID NO: 1243683
cucucugagcugggagaau

SEQ ID NO: 1433521 - RNA, 19 nt, Artificial Sequence
  Description of Artificial Sequence: Synthetic oligonucleotide
  Antisense strand to SEQ ID NO: 1433520
auucucccagcucagagag

SEQ ID NO: 1433522 - RNA, 19 nt, Artificial Sequence
  Description of Artificial Sequence: Synthetic oligonucleotide
  Sense strand starting at position 2182 of SEQ ID NO: 1243683
ccuugaugcuuggcaacuu

SEQ ID NO: 1433523 - RNA, 19 nt, Artificial Sequence
  Description of Artificial Sequence: Synthetic oligonucleotide
  Antisense strand to SEQ ID NO: 1433522
aaguugccaagcaucaagg

SEQ ID NO: 1433524 - RNA, 19 nt, Artificial Sequence
  Description of Artificial Sequence: Synthetic oligonucleotide
  Sense strand starting at position 2192 of SEQ ID NO: 1243683
uggcaacuucuaggauaaa

SEQ ID NO: 1433525 - RNA, 19 nt, Artificial Sequence
  Description of Artificial Sequence: Synthetic oligonucleotide
  Antisense strand to SEQ ID NO: 1433524
uuuauccuagaaguugcca

SEQ ID NO: 1433526 - RNA, 19 nt, Artificial Sequence
  Description of Artificial Sequence: Synthetic oligonucleotide
  Sense strand starting at position 2434 of SEQ ID NO: 1243683
gugaauuucuuucuuugcu

SEQ ID NO: 1433527 - RNA, 19 nt, Artificial Sequence
  Description of Artificial Sequence: Synthetic oligonucleotide
  Antisense strand to SEQ ID NO: 1433526
agcaaagaaagaaauucac

SEQ ID NO: 1433528 - RNA, 19 nt, Artificial Sequence
  Description of Artificial Sequence: Synthetic oligonucleotide
  Sense strand starting at position 2767 of SEQ ID NO: 1243683
cccuauugcucacuggauu

SEQ ID NO: 1433529 - RNA, 19 nt, Artificial Sequence
  Description of Artificial Sequence: Synthetic oligonucleotide
  Antisense strand to SEQ ID NO: 1433528
aauccagugagcaauaggg

SEQ ID NO: 1433530 - RNA, 19 nt, Artificial Sequence
  Description of Artificial Sequence: Synthetic oligonucleotide
  Sense strand starting at position 2871 of SEQ ID NO: 1243683
acugguuccugccuauaca

SEQ ID NO: 1433531 - RNA, 19 nt, Artificial Sequence
  Description of Artificial Sequence: Synthetic oligonucleotide
  Antisense strand to SEQ ID NO: 1433530
uguauaggcaggaaccagu

SEQ ID NO: 1433532 - RNA, 19 nt, Artificial Sequence
  Description of Artificial Sequence: Synthetic oligonucleotide
  Sense strand starting at position 2872 of SEQ ID NO: 1243683
cugguuccugccuauacau

SEQ ID NO: 1433533 - RNA, 19 nt, Artificial Sequence
  Description of Artificial Sequence: Synthetic oligonucleotide
  Antisense strand to SEQ ID NO: 1433532
auguauaggcaggaaccag

SEQ ID NO: 1433534 - RNA, 19 nt, Artificial Sequence
  Description of Artificial Sequence: Synthetic oligonucleotide
  Sense strand starting at position 3060 of SEQ ID NO: 1243683
ggcuuauagacgggcaagu

SEQ ID NO: 1433535 - RNA, 19 nt, Artificial Sequence
  Description of Artificial Sequence: Synthetic oligonucleotide
  Antisense strand to SEQ ID NO: 1433534
acuugcccgucuauaagcc

SEQ ID NO: 1433536 - RNA, 19 nt, Artificial Sequence
  Description of Artificial Sequence: Synthetic oligonucleotide
  Sense strand starting at position 3123 of SEQ ID NO: 1243683
auuguuaaccagcauauga

SEQ ID NO: 1433537 - RNA, 19 nt, Artificial Sequence
  Description of Artificial Sequence: Synthetic oligonucleotide
  Antisense strand to SEQ ID NO: 1433536
ucauaugcugguuaacaau

SEQ ID NO: 1433538 - RNA, 19 nt, Artificial Sequence
  Description of Artificial Sequence: Synthetic oligonucleotide
  Sense strand starting at position 3214 of SEQ ID NO: 1243683
acugauguagaaugaguua

SEQ ID NO: 1433539 - RNA, 19 nt, Artificial Sequence
  Description of Artificial Sequence: Synthetic oligonucleotide
  Antisense strand to SEQ ID NO: 1433538
uaacucauucuacaucagu

SEQ ID NO: 1433540 - RNA, 19 nt, Artificial Sequence
  Description of Artificial Sequence: Synthetic oligonucleotide
  Sense strand starting at position 3219 of SEQ ID NO: 1243683
uguagaaugaguuaagcua

SEQ ID NO: 1433541 - RNA, 19 nt, Artificial Sequence
  Description of Artificial Sequence: Synthetic oligonucleotide
  Antisense strand to SEQ ID NO: 1433540
uagcuuaacucauucuaca

SEQ ID NO: 1433542 - RNA, 19 nt, Artificial Sequence
  Description of Artificial Sequence: Synthetic oligonucleotide
  Sense strand starting at position 3245 of SEQ ID NO: 1243683
agaaauggcacuuggagua

SEQ ID NO: 1433543 - RNA, 19 nt, Artificial Sequence
  Description of Artificial Sequence: Synthetic oligonucleotide
  Antisense strand to SEQ ID NO: 1433542
uacuccaagugccauuucu

SEQ ID NO: 1433544 - RNA, 19 nt, Artificial Sequence
  Description of Artificial Sequence: Synthetic oligonucleotide
  Sense strand starting at position 3250 of SEQ ID NO: 1243683
uggcacuuggaguauuaaa

SEQ ID NO: 1433545 - RNA, 19 nt, Artificial Sequence
  Description of Artificial Sequence: Synthetic oligonucleotide
  Antisense strand to SEQ ID NO: 1433544
uuuaauacuccaagugcca

SEQ ID NO: 1433546 - RNA, 19 nt, Artificial Sequence
  Description of Artificial Sequence: Synthetic oligonucleotide
  Sense strand starting at position 3310 of SEQ ID NO: 1243683
gggaaguuugcgggaagaa

SEQ ID NO: 1433547 - RNA, 19 nt, Artificial Sequence
  Description of Artificial Sequence: Synthetic oligonucleotide
  Antisense strand to SEQ ID NO: 1433546
uucuucccgcaaacuuccc

SEQ ID NO: 1433548 - RNA, 19 nt, Artificial Sequence
  Description of Artificial Sequence: Synthetic oligonucleotide
  Sense strand starting at position 3393 of SEQ ID NO: 1243683
gauagaguugacugccaga

SEQ ID NO: 1433549 - RNA, 19 nt, Artificial Sequence
  Description of Artificial Sequence: Synthetic oligonucleotide
  Antisense strand to SEQ ID NO: 1433548
ucuggcagucaacucuauc

SEQ ID NO: 1433550 - RNA, 19 nt, Artificial Sequence
  Description of Artificial Sequence: Synthetic oligonucleotide
  Sense strand starting at position 3588 of SEQ ID NO: 1243683
cuccucuuugcagaauuga

SEQ ID NO: 1433551 - RNA, 19 nt, Artificial Sequence
  Description of Artificial Sequence: Synthetic oligonucleotide
  Antisense strand to SEQ ID NO: 1433550
ucaauucugcaaagaggag

SEQ ID NO: 1433552 - RNA, 19 nt, Artificial Sequence
  Description of Artificial Sequence: Synthetic oligonucleotide
  Sense strand starting at position 3655 of SEQ ID NO: 1243683
agggcaucucucugagcau

SEQ ID NO: 1433553 - RNA, 19 nt, Artificial Sequence
  Description of Artificial Sequence: Synthetic oligonucleotide
  Antisense strand to SEQ ID NO: 1433552
augcucagagagaugcccu

SEQ ID NO: 1433554 - RNA, 19 nt, Artificial Sequence
  Description of Artificial Sequence: Synthetic oligonucleotide
  Sense strand starting at position 3658 of SEQ ID NO: 1243683
gcaucucucugagcauacu

SEQ ID NO: 1433555 - RNA, 19 nt, Artificial Sequence
  Description of Artificial Sequence: Synthetic oligonucleotide
  Antisense strand to SEQ ID NO: 1433554
aguaugcucagagagaugc

SEQ ID NO: 1433556 - RNA, 19 nt, Artificial Sequence
  Description of Artificial Sequence: Synthetic oligonucleotide
  Sense strand starting at position 3682 of SEQ ID NO: 1243683
ucuggaagcugccugauua

SEQ ID NO: 1433557 - RNA, 19 nt, Artificial Sequence
  Description of Artificial Sequence: Synthetic oligonucleotide
  Antisense strand to SEQ ID NO: 1433556
uaaucaggcagcuuccaga

SEQ ID NO: 1433558 - RNA, 19 nt, Artificial Sequence
  Description of Artificial Sequence: Synthetic oligonucleotide
  Sense strand starting at position 3683 of SEQ ID NO: 1243683
cuggaagcugccugauuaa

SEQ ID NO: 1433559 - RNA, 19 nt, Artificial Sequence
  Description of Artificial Sequence: Synthetic oligonucleotide
  Antisense strand to SEQ ID NO: 1433558
uuaaucaggcagcuuccag

SEQ ID NO: 1433560 - RNA, 19 nt, Artificial Sequence
  Description of Artificial Sequence: Synthetic oligonucleotide
  Sense strand starting at position 3793 of SEQ ID NO: 1243683
ggaccuggaucuuaagaag

SEQ ID NO: 1433561 - RNA, 19 nt, Artificial Sequence
  Description of Artificial Sequence: Synthetic oligonucleotide
  Antisense strand to SEQ ID NO: 1433560
cuucuuaagauccaggucc

SEQ ID NO: 1433562 - RNA, 19 nt, Artificial Sequence
  Description of Artificial Sequence: Synthetic oligonucleotide
  Sense strand starting at position 3876 of SEQ ID NO: 1243683
agaccuaguccagguguuu

SEQ ID NO: 1433563 - RNA, 19 nt, Artificial Sequence
  Description of Artificial Sequence: Synthetic oligonucleotide
  Antisense strand to SEQ ID NO: 1433562
aaacaccuggacuaggucu

SEQ ID NO: 1433564 - RNA, 19 nt, Artificial Sequence
  Description of Artificial Sequence: Synthetic oligonucleotide
  Sense strand starting at position 85 of SEQ ID NO: 1243684
agagcaguagcuugcauau

SEQ ID NO: 1433565 - RNA, 19 nt, Artificial Sequence
  Description of Artificial Sequence: Synthetic oligonucleotide
  Antisense strand to SEQ ID NO: 1433564
auaugcaagcuacugcucu

SEQ ID NO: 1433566 - RNA, 19 nt, Artificial Sequence
  Description of Artificial Sequence: Synthetic oligonucleotide
  Sense strand starting at position 104 of SEQ ID NO: 1243684
acgguacacgcgcaauaaa

SEQ ID NO: 1433567 - RNA, 19 nt, Artificial Sequence
  Description of Artificial Sequence: Synthetic oligonucleotide
  Antisense strand to SEQ ID NO: 1433566
uuuauugcgcguguaccgu

SEQ ID NO: 1433568 - RNA, 19 nt, Artificial Sequence
  Description of Artificial Sequence: Synthetic oligonucleotide
  Sense strand starting at position 107 of SEQ ID NO: 1243684
guacacgcgcaauaaauau

SEQ ID NO: 1433569 - RNA, 19 nt, Artificial Sequence
  Description of Artificial Sequence: Synthetic oligonucleotide
  Antisense strand to SEQ ID NO: 1433568
auauuuauugcgcguguac

SEQ ID NO: 1433570 - RNA, 19 nt, Artificial Sequence
  Description of Artificial Sequence: Synthetic oligonucleotide
  Sense strand starting at position 141 of SEQ ID NO: 1243684
cucaauaggucuuaagauc

SEQ ID NO: 1433571 - RNA, 19 nt, Artificial Sequence
  Description of Artificial Sequence: Synthetic oligonucleotide
  Antisense strand to SEQ ID NO: 1433570
gaucuuaagaccuauugag

SEQ ID NO: 1433572 - RNA, 19 nt, Artificial Sequence
  Description of Artificial Sequence: Synthetic oligonucleotide
  Sense strand starting at position 201 of SEQ ID NO: 1243684
cucugcuucucuugauaug

SEQ ID NO: 1433573 - RNA, 19 nt, Artificial Sequence
  Description of Artificial Sequence: Synthetic oligonucleotide
  Antisense strand to SEQ ID NO: 1433572
cauaucaagagaagcagag

SEQ ID NO: 1433574 - RNA, 19 nt, Artificial Sequence
  Description of Artificial Sequence: Synthetic oligonucleotide
  Sense strand starting at position 204 of SEQ ID NO: 1243684
ugcuucucuugauaugaaa

SEQ ID NO: 1433575 - RNA, 19 nt, Artificial Sequence
  Description of Artificial Sequence: Synthetic oligonucleotide
  Antisense strand to SEQ ID NO: 1433574
uuucauaucaagagaagca

SEQ ID NO: 1433576 - RNA, 19 nt, Artificial Sequence
  Description of Artificial Sequence: Synthetic oligonucleotide
  Sense strand starting at position 514 of SEQ ID NO: 1243684
accucacccgccugaaauu

SEQ ID NO: 1433577 - RNA, 19 nt, Artificial Sequence
  Description of Artificial Sequence: Synthetic oligonucleotide
  Antisense strand to SEQ ID NO: 1433576
aauuucaggcgggugaggu

SEQ ID NO: 1433578 - RNA, 19 nt, Artificial Sequence
  Description of Artificial Sequence: Synthetic oligonucleotide
  Sense strand starting at position 1373 of SEQ ID NO: 1243684
cgcccuuaccaauagcaaa

SEQ ID NO: 1433579 - RNA, 19 nt, Artificial Sequence
  Description of Artificial Sequence: Synthetic oligonucleotide
  Antisense strand to SEQ ID NO: 1433578
uuugcuauugguaagggcg

SEQ ID NO: 1433580 - RNA, 19 nt, Artificial Sequence
  Description of Artificial Sequence: Synthetic oligonucleotide
  Sense strand starting at position 2222 of SEQ ID NO: 1243684
aucccauguccagaugcaa

SEQ ID NO: 1433581 - RNA, 19 nt, Artificial Sequence
  Description of Artificial Sequence: Synthetic oligonucleotide
  Antisense strand to SEQ ID NO: 1433580
uugcaucuggacaugggau

SEQ ID NO: 1433582 - RNA, 19 nt, Artificial Sequence
  Description of Artificial Sequence: Synthetic oligonucleotide
  Sense strand starting at position 2424 of SEQ ID NO: 1243684
ggaauuccgccaggagcaa

SEQ ID NO: 1433583 - RNA, 19 nt, Artificial Sequence
  Description of Artificial Sequence: Synthetic oligonucleotide
  Antisense strand to SEQ ID NO: 1433582
uugcuccuggcggaauucc

SEQ ID NO: 1433584 - RNA, 19 nt, Artificial Sequence
  Description of Artificial Sequence: Synthetic oligonucleotide
  Sense strand starting at position 2698 of SEQ ID NO: 1243684
gggucauguccuggugcuu

SEQ ID NO: 1433585 - RNA, 19 nt, Artificial Sequence
  Description of Artificial Sequence: Synthetic oligonucleotide
  Antisense strand to SEQ ID NO: 1433584
aagcaccaggacaugaccc

SEQ ID NO: 1433586 - RNA, 19 nt, Artificial Sequence
  Description of Artificial Sequence: Synthetic oligonucleotide
  Sense strand starting at position 2795 of SEQ ID NO: 1243684
gggcuuucuggaugcugaa

SEQ ID NO: 1433587 - RNA, 19 nt, Artificial Sequence
  Description of Artificial Sequence: Synthetic oligonucleotide
  Antisense strand to SEQ ID NO: 1433586
uucagcauccagaaagccc

SEQ ID NO: 1433588 - RNA, 19 nt, Artificial Sequence
  Description of Artificial Sequence: Synthetic oligonucleotide
  Sense strand starting at position 2822 of SEQ ID NO: 1243684
gccgauuccuucucggaga

SEQ ID NO: 1433589 - RNA, 19 nt, Artificial Sequence
  Description of Artificial Sequence: Synthetic oligonucleotide
  Antisense strand to SEQ ID NO: 1433588
ucuccgagaaggaaucggc

SEQ ID NO: 1433590 - RNA, 19 nt, Artificial Sequence
  Description of Artificial Sequence: Synthetic oligonucleotide
  Sense strand starting at position 2823 of SEQ ID NO: 1243684
ccgauuccuucucggagau

SEQ ID NO: 1433591 - RNA, 19 nt, Artificial Sequence
  Description of Artificial Sequence: Synthetic oligonucleotide
  Antisense strand to SEQ ID NO: 1433590
aucuccgagaaggaaucgg

SEQ ID NO: 1433592 - RNA, 19 nt, Artificial Sequence
  Description of Artificial Sequence: Synthetic oligonucleotide
  Sense strand starting at position 2824 of SEQ ID NO: 1243684
cgauuccuucucggagauu

SEQ ID NO: 1433593 - RNA, 19 nt, Artificial Sequence
  Description of Artificial Sequence: Synthetic oligonucleotide
  Antisense strand to SEQ ID NO: 1433592
aaucuccgagaaggaaucg

SEQ ID NO: 1433594 - RNA, 19 nt, Artificial Sequence
  Description of Artificial Sequence: Synthetic oligonucleotide
  Sense strand starting at position 2825 of SEQ ID NO: 1243684
gauuccuucucggagauua

SEQ ID NO: 1433595 - RNA, 19 nt, Artificial Sequence
  Description of Artificial Sequence: Synthetic oligonucleotide
  Antisense strand to SEQ ID NO: 1433594
uaaucuccgagaaggaauc

SEQ ID NO: 1433596 - RNA, 19 nt, Artificial Sequence
  Description of Artificial Sequence: Synthetic oligonucleotide
  Sense strand starting at position 2827 of SEQ ID NO: 1243684
uuccuucucggagauuauc

SEQ ID NO: 1433597 - RNA, 19 nt, Artificial Sequence
  Description of Artificial Sequence: Synthetic oligonucleotide
  Antisense strand to SEQ ID NO: 1433596
gauaaucuccgagaaggaa

SEQ ID NO: 1433598 - RNA, 19 nt, Artificial Sequence
  Description of Artificial Sequence: Synthetic oligonucleotide
  Sense strand starting at position 2851 of SEQ ID NO: 1243684
gcgggugugugauagauug

SEQ ID NO: 1433599 - RNA, 19 nt, Artificial Sequence
  Description of Artificial Sequence: Synthetic oligonucleotide
  Antisense strand to SEQ ID NO: 1433598
caaucuaucacacacccgc

SEQ ID NO: 1433600 - RNA, 19 nt, Artificial Sequence
  Description of Artificial Sequence: Synthetic oligonucleotide
  Sense strand starting at position 2859 of SEQ ID NO: 1243684
gugauagauugcucguggu

SEQ ID NO: 1433601 - RNA, 19 nt, Artificial Sequence
  Description of Artificial Sequence: Synthetic oligonucleotide
  Antisense strand to SEQ ID NO: 1433600
accacgagcaaucuaucac

SEQ ID NO: 1433602 - RNA, 19 nt, Artificial Sequence
  Description of Artificial Sequence: Synthetic oligonucleotide
  Sense strand starting at position 2862 of SEQ ID NO: 1243684
auagauugcucgugguuac

SEQ ID NO: 1433603 - RNA, 19 nt, Artificial Sequence
  Description of Artificial Sequence: Synthetic oligonucleotide
  Antisense strand to SEQ ID NO: 1433602
guaaccacgagcaaucuau

SEQ ID NO: 1433604 - RNA, 19 nt, Artificial Sequence
  Description of Artificial Sequence: Synthetic oligonucleotide
  Sense strand starting at position 2863 of SEQ ID NO: 1243684
uagauugcucgugguuaca

SEQ ID NO: 1433605 - RNA, 19 nt, Artificial Sequence
  Description of Artificial Sequence: Synthetic oligonucleotide
  Antisense strand to SEQ ID NO: 1433604
uguaaccacgagcaaucua

SEQ ID NO: 1433606 - RNA, 19 nt, Artificial Sequence
  Description of Artificial Sequence: Synthetic oligonucleotide
  Sense strand starting at position 2924 of SEQ ID NO: 1243684
caucgcauuugacaacgua

SEQ ID NO: 1433607 - RNA, 19 nt, Artificial Sequence
  Description of Artificial Sequence: Synthetic oligonucleotide
  Antisense strand to SEQ ID NO: 1433606
uacguugucaaaugcgaug

SEQ ID NO: 1433608 - RNA, 19 nt, Artificial Sequence
  Description of Artificial Sequence: Synthetic oligonucleotide
  Sense strand starting at position 3067 of SEQ ID NO: 1243684
aggguucucgugcauaaau

SEQ ID NO: 1433609 - RNA, 19 nt, Artificial Sequence
  Description of Artificial Sequence: Synthetic oligonucleotide
  Antisense strand to SEQ ID NO: 1433608
auuuaugcacgagaacccu

SEQ ID NO: 1433610 - RNA, 19 nt, Artificial Sequence
  Description of Artificial Sequence: Synthetic oligonucleotide
  Sense strand starting at position 3069 of SEQ ID NO: 1243684
gguucucgugcauaaauac

SEQ ID NO: 1433611 - RNA, 19 nt, Artificial Sequence
  Description of Artificial Sequence: Synthetic oligonucleotide
  Antisense strand to SEQ ID NO: 1433610
guauuuaugcacgagaacc

SEQ ID NO: 1433612 - RNA, 19 nt, Artificial Sequence
  Description of Artificial Sequence: Synthetic oligonucleotide
  Sense strand starting at position 3076 of SEQ ID NO: 1243684
gugcauaaauaccugauaa

SEQ ID NO: 1433613 - RNA, 19 nt, Artificial Sequence
  Description of Artificial Sequence: Synthetic oligonucleotide
  Antisense strand to SEQ ID NO: 1433612
uuaucagguauuuaugcac

SEQ ID NO: 1433614 - RNA, 19 nt, Artificial Sequence
  Description of Artificial Sequence: Synthetic oligonucleotide
  Sense strand starting at position 3211 of SEQ ID NO: 1243684
agcggucacccuuguuauu

SEQ ID NO: 1433615 - RNA, 19 nt, Artificial Sequence
  Description of Artificial Sequence: Synthetic oligonucleotide
  Antisense strand to SEQ ID NO: 1433614
aauaacaagggugaccgcu

SEQ ID NO: 1433616 - RNA, 19 nt, Artificial Sequence
  Description of Artificial Sequence: Synthetic oligonucleotide
  Sense strand starting at position 3213 of SEQ ID NO: 1243684
cggucacccuuguuauuaa

SEQ ID NO: 1433617 - RNA, 19 nt, Artificial Sequence
  Description of Artificial Sequence: Synthetic oligonucleotide
  Antisense strand to SEQ ID NO: 1433616
uuaauaacaagggugaccg

SEQ ID NO: 1433618 - RNA, 19 nt, Artificial Sequence
  Description of Artificial Sequence: Synthetic oligonucleotide
  Sense strand starting at position 3214 of SEQ ID NO: 1243684
ggucacccuuguuauuaau

SEQ ID NO: 1433619 - RNA, 19 nt, Artificial Sequence
  Description of Artificial Sequence: Synthetic oligonucleotide
  Antisense strand to SEQ ID NO: 1433618
auuaauaacaagggugacc

SEQ ID NO: 1433620 - RNA, 19 nt, Artificial Sequence
  Description of Artificial Sequence: Synthetic oligonucleotide
  Sense strand starting at position 3326 of SEQ ID NO: 1243684
aguuuacuauggcauggau

SEQ ID NO: 1433621 - RNA, 19 nt, Artificial Sequence
  Description of Artificial Sequence: Synthetic oligonucleotide
  Antisense strand to SEQ ID NO: 1433620
auccaugccauaguaaacu

SEQ ID NO: 1433622 - RNA, 19 nt, Artificial Sequence
  Description of Artificial Sequence: Synthetic oligonucleotide
  Sense strand starting at position 3329 of SEQ ID NO: 1243684
uuacuauggcauggauacu

SEQ ID NO: 1433623 - RNA, 19 nt, Artificial Sequence
  Description of Artificial Sequence: Synthetic oligonucleotide
  Antisense strand to SEQ ID NO: 1433622
aguauccaugccauaguaa

SEQ ID NO: 1433624 - RNA, 19 nt, Artificial Sequence
  Description of Artificial Sequence: Synthetic oligonucleotide
  Sense strand starting at position 3341 of SEQ ID NO: 1243684
ggauacuaccauugcaaug

SEQ ID NO: 1433625 - RNA, 19 nt, Artificial Sequence
  Description of Artificial Sequence: Synthetic oligonucleotide
  Antisense strand to SEQ ID NO: 1433624
cauugcaaugguaguaucc

SEQ ID NO: 1433626 - RNA, 19 nt, Artificial Sequence
  Description of Artificial Sequence: Synthetic oligonucleotide
  Sense strand starting at position 3572 of SEQ ID NO: 1243684
aggaguuucuaacuuaguc

SEQ ID NO: 1433627 - RNA, 19 nt, Artificial Sequence
  Description of Artificial Sequence: Synthetic oligonucleotide
  Antisense strand to SEQ ID NO: 1433626
gacuaaguuagaaacuccu

SEQ ID NO: 1433628 - RNA, 19 nt, Artificial Sequence
  Description of Artificial Sequence: Synthetic oligonucleotide
  Sense strand starting at position 3582 of SEQ ID NO: 1243684
aacuuagucuggguaccua

SEQ ID NO: 1433629 - RNA, 19 nt, Artificial Sequence
  Description of Artificial Sequence: Synthetic oligonucleotide
  Antisense strand to SEQ ID NO: 1433628
uagguacccagacuaaguu

SEQ ID NO: 1433630 - RNA, 19 nt, Artificial Sequence
  Description of Artificial Sequence: Synthetic oligonucleotide
  Sense strand starting at position 3695 of SEQ ID NO: 1243684
cugccucuugcuggacaga

SEQ ID NO: 1433631 - RNA, 19 nt, Artificial Sequence
  Description of Artificial Sequence: Synthetic oligonucleotide
  Antisense strand to SEQ ID NO: 1433630
ucuguccagcaagaggcag

SEQ ID NO: 1433632 - RNA, 19 nt, Artificial Sequence
  Description of Artificial Sequence: Synthetic oligonucleotide
  Sense strand starting at position 97 of SEQ ID NO: 1243685
ccuacaugguuucuaccau

SEQ ID NO: 1433633 - RNA, 19 nt, Artificial Sequence
  Description of Artificial Sequence: Synthetic oligonucleotide
  Antisense strand to SEQ ID NO: 1433632
augguagaaaccauguagg

SEQ ID NO: 1433634 - RNA, 19 nt, Artificial Sequence
  Description of Artificial Sequence: Synthetic oligonucleotide
  Sense strand starting at position 98 of SEQ ID NO: 1243685
cuacaugguuucuaccaua

SEQ ID NO: 1433635 - RNA, 19 nt, Artificial Sequence
  Description of Artificial Sequence: Synthetic oligonucleotide
  Antisense strand to SEQ ID NO: 1433634
uaugguagaaaccauguag

SEQ ID NO: 1433636 - RNA, 19 nt, Artificial Sequence
  Description of Artificial Sequence: Synthetic oligonucleotide
  Sense strand starting at position 117 of SEQ ID NO: 1243685
ggcccaguuucugcuacaa

SEQ ID NO: 1433637 - RNA, 19 nt, Artificial Sequence
  Description of Artificial Sequence: Synthetic oligonucleotide
  Antisense strand to SEQ ID NO: 1433636
uuguagcagaaacugggcc

SEQ ID NO: 1433638 - RNA, 19 nt, Artificial Sequence
  Description of Artificial Sequence: Synthetic oligonucleotide
  Sense strand starting at position 240 of SEQ ID NO: 1243685
cgauaugguagccgcuaga

SEQ ID NO: 1433639 - RNA, 19 nt, Artificial Sequence
  Description of Artificial Sequence: Synthetic oligonucleotide
  Antisense strand to SEQ ID NO: 1433638
ucuagcggcuaccauaucg

SEQ ID NO: 1433640 - RNA, 19 nt, Artificial Sequence
  Description of Artificial Sequence: Synthetic oligonucleotide
  Sense strand starting at position 243 of SEQ ID NO: 1243685
uaugguagccgcuagaaua

SEQ ID NO: 1433641 - RNA, 19 nt, Artificial Sequence
  Description of Artificial Sequence: Synthetic oligonucleotide
  Antisense strand to SEQ ID NO: 1433640
uauucuagcggcuaccaua

SEQ ID NO: 1433642 - RNA, 19 nt, Artificial Sequence
  Description of Artificial Sequence: Synthetic oligonucleotide
  Sense strand starting at position 631 of SEQ ID NO: 1243685
uuuccuguggcccagaauu

SEQ ID NO: 1433643 - RNA, 19 nt, Artificial Sequence
  Description of Artificial Sequence: Synthetic oligonucleotide
  Antisense strand to SEQ ID NO: 1433642
aauucugggccacaggaaa

SEQ ID NO: 1433644 - RNA, 19 nt, Artificial Sequence
  Description of Artificial Sequence: Synthetic oligonucleotide
  Sense strand starting at position 660 of SEQ ID NO: 1243685
gagggaaauugugccaagu

SEQ ID NO: 1433645 - RNA, 19 nt, Artificial Sequence
  Description of Artificial Sequence: Synthetic oligonucleotide
  Antisense strand to SEQ ID NO: 1433644
acuuggcacaauuucccuc

SEQ ID NO: 1433646 - RNA, 19 nt, Artificial Sequence
  Description of Artificial Sequence: Synthetic oligonucleotide
  Sense strand starting at position 662 of SEQ ID NO: 1243685
gggaaauugugccaaguua

SEQ ID NO: 1433647 - RNA, 19 nt, Artificial Sequence
  Description of Artificial Sequence: Synthetic oligonucleotide
  Antisense strand to SEQ ID NO: 1433646
uaacuuggcacaauuuccc

SEQ ID NO: 1433648 - RNA, 19 nt, Artificial Sequence
  Description of Artificial Sequence: Synthetic oligonucleotide
  Sense strand starting at position 762 of SEQ ID NO: 1243685
cuuucucugggauguuuaa

SEQ ID NO: 1433649 - RNA, 19 nt, Artificial Sequence
  Description of Artificial Sequence: Synthetic oligonucleotide
  Antisense strand to SEQ ID NO: 1433648
uuaaacaucccagagaaag

SEQ ID NO: 1433650 - RNA, 19 nt, Artificial Sequence
  Description of Artificial Sequence: Synthetic oligonucleotide
  Sense strand starting at position 795 of SEQ ID NO: 1243685
gacggaucaucucucugau

SEQ ID NO: 1433651 - RNA, 19 nt, Artificial Sequence
  Description of Artificial Sequence: Synthetic oligonucleotide
  Antisense strand to SEQ ID NO: 1433650
aucagagagaugauccguc

SEQ ID NO: 1433652 - RNA, 19 nt, Artificial Sequence
  Description of Artificial Sequence: Synthetic oligonucleotide
  Sense strand starting at position 797 of SEQ ID NO: 1243685
cggaucaucucucugauga

SEQ ID NO: 1433653 - RNA, 19 nt, Artificial Sequence
  Description of Artificial Sequence: Synthetic oligonucleotide
  Antisense strand to SEQ ID NO: 1433652
ucaucagagagaugauccg

SEQ ID NO: 1433654 - RNA, 19 nt, Artificial Sequence
  Description of Artificial Sequence: Synthetic oligonucleotide
  Sense strand starting at position 798 of SEQ ID NO: 1243685
ggaucaucucucugaugau

SEQ ID NO: 1433655 - RNA, 19 nt, Artificial Sequence
  Description of Artificial Sequence: Synthetic oligonucleotide
  Antisense strand to SEQ ID NO: 1433654
aucaucagagagaugaucc

SEQ ID NO: 1433656 - RNA, 19 nt, Artificial Sequence
  Description of Artificial Sequence: Synthetic oligonucleotide
  Sense strand starting at position 821 of SEQ ID NO: 1243685
uucugaugcucgucuacuu

SEQ ID NO: 1433657 - RNA, 19 nt, Artificial Sequence
  Description of Artificial Sequence: Synthetic oligonucleotide
  Antisense strand to SEQ ID NO: 1433656
aaguagacgagcaucagaa

SEQ ID NO: 1433658 - RNA, 19 nt, Artificial Sequence
  Description of Artificial Sequence: Synthetic oligonucleotide
  Sense strand starting at position 833 of SEQ ID NO: 1243685
ucuacuugaugcucagaaa

SEQ ID NO: 1433659 - RNA, 19 nt, Artificial Sequence
  Description of Artificial Sequence: Synthetic oligonucleotide
  Antisense strand to SEQ ID NO: 1433658
uuucugagcaucaaguaga

SEQ ID NO: 1433660 - RNA, 19 nt, Artificial Sequence
  Description of Artificial Sequence: Synthetic oligonucleotide
  Sense strand starting at position 857 of SEQ ID NO: 1243685
guucucauacucuauaggu

SEQ ID NO: 1433661 - RNA, 19 nt, Artificial Sequence
  Description of Artificial Sequence: Synthetic oligonucleotide
  Antisense strand to SEQ ID NO: 1433660
accuauagaguaugagaac

SEQ ID NO: 1433662 - RNA, 19 nt, Artificial Sequence
  Description of Artificial Sequence: Synthetic oligonucleotide
  Sense strand starting at position 911 of SEQ ID NO: 1243685
gccagagcucaggaccaau

SEQ ID NO: 1433663 - RNA, 19 nt, Artificial Sequence
  Description of Artificial Sequence: Synthetic oligonucleotide
  Antisense strand to SEQ ID NO: 1433662
auugguccugagcucuggc

SEQ ID NO: 1433664 - RNA, 19 nt, Artificial Sequence
  Description of Artificial Sequence: Synthetic oligonucleotide
  Sense strand starting at position 939 of SEQ ID NO: 1243685
cugauacccucugaguuga

SEQ ID NO: 1433665 - RNA, 19 nt, Artificial Sequence
  Description of Artificial Sequence: Synthetic oligonucleotide
  Antisense strand to SEQ ID NO: 1433664
ucaacucagaggguaucag

SEQ ID NO: 1433666 - RNA, 19 nt, Artificial Sequence
  Description of Artificial Sequence: Synthetic oligonucleotide
  Sense strand starting at position 1088 of SEQ ID NO: 1243685
ggguaucaguggaaggaaa

SEQ ID NO: 1433667 - RNA, 19 nt, Artificial Sequence
  Description of Artificial Sequence: Synthetic oligonucleotide
  Antisense strand to SEQ ID NO: 1433666
uuuccuuccacugauaccc

SEQ ID NO: 1433668 - RNA, 19 nt, Artificial Sequence
  Description of Artificial Sequence: Synthetic oligonucleotide
  Sense strand starting at position 1270 of SEQ ID NO: 1243685
guagaaguuugggugagga

SEQ ID NO: 1433669 - RNA, 19 nt, Artificial Sequence
  Description of Artificial Sequence: Synthetic oligonucleotide
  Antisense strand to SEQ ID NO: 1433668
uccucacccaaacuucuac

SEQ ID NO: 1433670 - RNA, 19 nt, Artificial Sequence
  Description of Artificial Sequence: Synthetic oligonucleotide
  Sense strand starting at position 1586 of SEQ ID NO: 1243685
cccucauuauccucgagga

SEQ ID NO: 1433671 - RNA, 19 nt, Artificial Sequence
  Description of Artificial Sequence: Synthetic oligonucleotide
  Antisense strand to SEQ ID NO: 1433670
uccucgaggauaaugaggg

SEQ ID NO: 1433672 - RNA, 19 nt, Artificial Sequence
  Description of Artificial Sequence: Synthetic oligonucleotide
  Sense strand starting at position 1587 of SEQ ID NO: 1243685
ccucauuauccucgaggac

SEQ ID NO: 1433673 - RNA, 19 nt, Artificial Sequence
  Description of Artificial Sequence: Synthetic oligonucleotide
  Antisense strand to SEQ ID NO: 1433672
guccucgaggauaaugagg

SEQ ID NO: 1433674 - RNA, 19 nt, Artificial Sequence
  Description of Artificial Sequence: Synthetic oligonucleotide
  Sense strand starting at position 2160 of SEQ ID NO: 1243685
ggaucuaagucuuucgauu

SEQ ID NO: 1433675 - RNA, 19 nt, Artificial Sequence
  Description of Artificial Sequence: Synthetic oligonucleotide
  Antisense strand to SEQ ID NO: 1433674
aaucgaaagacuuagaucc

SEQ ID NO: 1433676 - RNA, 19 nt, Artificial Sequence
  Description of Artificial Sequence: Synthetic oligonucleotide
  Sense strand starting at position 2216 of SEQ ID NO: 1243685
cuuuguuugcuuucucagu

SEQ ID NO: 1433677 - RNA, 19 nt, Artificial Sequence
  Description of Artificial Sequence: Synthetic oligonucleotide
  Antisense strand to SEQ ID NO: 1433676
acugagaaagcaaacaaag

SEQ ID NO: 1433678 - RNA, 19 nt, Artificial Sequence
  Description of Artificial Sequence: Synthetic oligonucleotide
  Sense strand starting at position 2327 of SEQ ID NO: 1243685
gguucaauugcgugaugcu

SEQ ID NO: 1433679 - RNA, 19 nt, Artificial Sequence
  Description of Artificial Sequence: Synthetic oligonucleotide
  Antisense strand to SEQ ID NO: 1433678
agcaucacgcaauugaacc

SEQ ID NO: 1433680 - RNA, 19 nt, Artificial Sequence
  Description of Artificial Sequence: Synthetic oligonucleotide
  Sense strand starting at position 2328 of SEQ ID NO: 1243685
guucaauugcgugaugcuu

SEQ ID NO: 1433681 - RNA, 19 nt, Artificial Sequence
  Description of Artificial Sequence: Synthetic oligonucleotide
  Antisense strand to SEQ ID NO: 1433680
aagcaucacgcaauugaac

SEQ ID NO: 1433682 - RNA, 19 nt, Artificial Sequence
  Description of Artificial Sequence: Synthetic oligonucleotide
  Sense strand starting at position 2442 of SEQ ID NO: 1243685
gguguuugcauuugaucuu

SEQ ID NO: 1433683 - RNA, 19 nt, Artificial Sequence
  Description of Artificial Sequence: Synthetic oligonucleotide
  Antisense strand to SEQ ID NO: 1433682
aagaucaaaugcaaacacc

SEQ ID NO: 1433684 - RNA, 19 nt, Artificial Sequence
  Description of Artificial Sequence: Synthetic oligonucleotide
  Sense strand starting at position 2451 of SEQ ID NO: 1243685
auuugaucuucgcaggguu

SEQ ID NO: 1433685 - RNA, 19 nt, Artificial Sequence
  Description of Artificial Sequence: Synthetic oligonucleotide
  Antisense strand to SEQ ID NO: 1433684
aacccugcgaagaucaaau

SEQ ID NO: 1433686 - RNA, 19 nt, Artificial Sequence
  Description of Artificial Sequence: Synthetic oligonucleotide
  Sense strand starting at position 2640 of SEQ ID NO: 1243685
ccugccuuccuagaauagu

SEQ ID NO: 1433687 - RNA, 19 nt, Artificial Sequence
  Description of Artificial Sequence: Synthetic oligonucleotide
  Antisense strand to SEQ ID NO: 1433686
acuauucuaggaaggcagg

SEQ ID NO: 1433688 - RNA, 19 nt, Artificial Sequence
  Description of Artificial Sequence: Synthetic oligonucleotide
  Sense strand starting at position 2650 of SEQ ID NO: 1243685
uagaauaguugaggagaca

SEQ ID NO: 1433689 - RNA, 19 nt, Artificial Sequence
  Description of Artificial Sequence: Synthetic oligonucleotide
  Antisense strand to SEQ ID NO: 1433688
ugucuccucaacuauucua

SEQ ID NO: 1433690 - RNA, 19 nt, Artificial Sequence
  Description of Artificial Sequence: Synthetic oligonucleotide
  Sense strand starting at position 2677 of SEQ ID NO: 1243685
gguauuacccaggaaugcu

SEQ ID NO: 1433691 - RNA, 19 nt, Artificial Sequence
  Description of Artificial Sequence: Synthetic oligonucleotide
  Antisense strand to SEQ ID NO: 1433690
agcauuccuggguaauacc

SEQ ID NO: 1433692 - RNA, 19 nt, Artificial Sequence
  Description of Artificial Sequence: Synthetic oligonucleotide
  Sense strand starting at position 2686 of SEQ ID NO: 1243685
caggaaugcuauuacagag

SEQ ID NO: 1433693 - RNA, 19 nt, Artificial Sequence
  Description of Artificial Sequence: Synthetic oligonucleotide
  Antisense strand to SEQ ID NO: 1433692
cucuguaauagcauuccug

SEQ ID NO: 1433694 - RNA, 19 nt, Artificial Sequence
  Description of Artificial Sequence: Synthetic oligonucleotide
  Sense strand starting at position 2692 of SEQ ID NO: 1243685
ugcuauuacagaggucuga

SEQ ID NO: 1433695 - RNA, 19 nt, Artificial Sequence
  Description of Artificial Sequence: Synthetic oligonucleotide
  Antisense strand to SEQ ID NO: 1433694
ucagaccucuguaauagca

SEQ ID NO: 1433696 - RNA, 19 nt, Artificial Sequence
  Description of Artificial Sequence: Synthetic oligonucleotide
  Sense strand starting at position 2696 of SEQ ID NO: 1243685
auuacagaggucugaguca

SEQ ID NO: 1433697 - RNA, 19 nt, Artificial Sequence
  Description of Artificial Sequence: Synthetic oligonucleotide
  Antisense strand to SEQ ID NO: 1433696
ugacucagaccucuguaau

SEQ ID NO: 1433698 - RNA, 19 nt, Artificial Sequence
  Description of Artificial Sequence: Synthetic oligonucleotide
  Sense strand starting at position 2703 of SEQ ID NO: 1243685
aggucugagucagaagaca

SEQ ID NO: 1433699 - RNA, 19 nt, Artificial Sequence
  Description of Artificial Sequence: Synthetic oligonucleotide
  Antisense strand to SEQ ID NO: 1433698
ugucuucugacucagaccu

SEQ ID NO: 1433700 - RNA, 19 nt, Artificial Sequence
  Description of Artificial Sequence: Synthetic oligonucleotide
  Sense strand starting at position 2790 of SEQ ID NO: 1243685
ugaggacagucuuucugaa

SEQ ID NO: 1433701 - RNA, 19 nt, Artificial Sequence
  Description of Artificial Sequence: Synthetic oligonucleotide
  Antisense strand to SEQ ID NO: 1433700
uucagaaagacuguccuca

SEQ ID NO: 1433702 - RNA, 19 nt, Artificial Sequence
  Description of Artificial Sequence: Synthetic oligonucleotide
  Sense strand starting at position 2794 of SEQ ID NO: 1243685
gacagucuuucugaaggau

SEQ ID NO: 1433703 - RNA, 19 nt, Artificial Sequence
  Description of Artificial Sequence: Synthetic oligonucleotide
  Antisense strand to SEQ ID NO: 1433702
auccuucagaaagacuguc

SEQ ID NO: 1433704 - RNA, 19 nt, Artificial Sequence
  Description of Artificial Sequence: Synthetic oligonucleotide
  Sense strand starting at position 2806 of SEQ ID NO: 1243685
gaaggaugcgcagaaguuu

SEQ ID NO: 1433705 - RNA, 19 nt, Artificial Sequence
  Description of Artificial Sequence: Synthetic oligonucleotide
  Antisense strand to SEQ ID NO: 1433704
aaacuucugcgcauccuuc

SEQ ID NO: 1433706 - RNA, 19 nt, Artificial Sequence
  Description of Artificial Sequence: Synthetic oligonucleotide
  Sense strand starting at position 3894 of SEQ ID NO: 1243685
ggguacucuucuguuaggu

SEQ ID NO: 1433707 - RNA, 19 nt, Artificial Sequence
  Description of Artificial Sequence: Synthetic oligonucleotide
  Antisense strand to SEQ ID NO: 1433706
accuaacagaagaguaccc

SEQ ID NO: 1433708 - RNA, 19 nt, Artificial Sequence
  Description of Artificial Sequence: Synthetic oligonucleotide
  Sense strand starting at position 3978 of SEQ ID NO: 1243685
gccuuuaugagcuguagua

SEQ ID NO: 1433709 - RNA, 19 nt, Artificial Sequence
  Description of Artificial Sequence: Synthetic oligonucleotide
  Antisense strand to SEQ ID NO: 1433708
uacuacagcucauaaaggc

SEQ ID NO: 1433710 - RNA, 19 nt, Artificial Sequence
  Description of Artificial Sequence: Synthetic oligonucleotide
  Sense strand starting at position 3980 of SEQ ID NO: 1243685
cuuuaugagcuguaguacu

SEQ ID NO: 1433711 - RNA, 19 nt, Artificial Sequence
  Description of Artificial Sequence: Synthetic oligonucleotide
  Antisense strand to SEQ ID NO: 1433710
aguacuacagcucauaaag

SEQ ID NO: 1433712 - RNA, 19 nt, Artificial Sequence
  Description of Artificial Sequence: Synthetic oligonucleotide
  Sense strand starting at position 88 of SEQ ID NO: 1243686
uagguauaauuugagucau

SEQ ID NO: 1433713 - RNA, 19 nt, Artificial Sequence
  Description of Artificial Sequence: Synthetic oligonucleotide
  Antisense strand to SEQ ID NO: 1433712
augacucaaauuauaccua

SEQ ID NO: 1433714 - RNA, 19 nt, Artificial Sequence
  Description of Artificial Sequence: Synthetic oligonucleotide
  Sense strand starting at position 151 of SEQ ID NO: 1243686
cuucgagucacucagguau

SEQ ID NO: 1433715 - RNA, 19 nt, Artificial Sequence
  Description of Artificial Sequence: Synthetic oligonucleotide
  Antisense strand to SEQ ID NO: 1433714
auaccugagugacucgaag

SEQ ID NO: 1433716 - RNA, 19 nt, Artificial Sequence
  Description of Artificial Sequence: Synthetic oligonucleotide
  Sense strand starting at position 216 of SEQ ID NO: 1243686
ugucauauugcacaugaua

SEQ ID NO: 1433717 - RNA, 19 nt, Artificial Sequence
  Description of Artificial Sequence: Synthetic oligonucleotide
  Antisense strand to SEQ ID NO: 1433716
uaucaugugcaauaugaca

SEQ ID NO: 1433718 - RNA, 19 nt, Artificial Sequence
  Description of Artificial Sequence: Synthetic oligonucleotide
  Sense strand starting at position 236 of SEQ ID NO: 1243686
uuccauauagaguacagua

SEQ ID NO: 1433719 - RNA, 19 nt, Artificial Sequence
  Description of Artificial Sequence: Synthetic oligonucleotide
  Antisense strand to SEQ ID NO: 1433718
uacuguacucuauauggaa

SEQ ID NO: 1433720 - RNA, 19 nt, Artificial Sequence
  Description of Artificial Sequence: Synthetic oligonucleotide
  Sense strand starting at position 427 of SEQ ID NO: 1243686
auuaauuggccuugguaaa

SEQ ID NO: 1433721 - RNA, 19 nt, Artificial Sequence
  Description of Artificial Sequence: Synthetic oligonucleotide
  Antisense strand to SEQ ID NO: 1433720
uuuaccaaggccaauuaau

SEQ ID NO: 1433722 - RNA, 19 nt, Artificial Sequence
  Description of Artificial Sequence: Synthetic oligonucleotide
  Sense strand starting at position 428 of SEQ ID NO: 1243686
uuaauuggccuugguaaag

SEQ ID NO: 1433723 - RNA, 19 nt, Artificial Sequence
  Description of Artificial Sequence: Synthetic oligonucleotide
  Antisense strand to SEQ ID NO: 1433722
cuuuaccaaggccaauuaa

SEQ ID NO: 1433724 - RNA, 19 nt, Artificial Sequence
  Description of Artificial Sequence: Synthetic oligonucleotide
  Sense strand starting at position 542 of SEQ ID NO: 1243686
ccuccaauucugggaauac

SEQ ID NO: 1433725 - RNA, 19 nt, Artificial Sequence
  Description of Artificial Sequence: Synthetic oligonucleotide
  Antisense strand to SEQ ID NO: 1433724
guauucccagaauuggagg

SEQ ID NO: 1433726 - RNA, 19 nt, Artificial Sequence
  Description of Artificial Sequence: Synthetic oligonucleotide
  Sense strand starting at position 599 of SEQ ID NO: 1243686
gcucuacgagguuaaauua

SEQ ID NO: 1433727 - RNA, 19 nt, Artificial Sequence
  Description of Artificial Sequence: Synthetic oligonucleotide
  Antisense strand to SEQ ID NO: 1433726
uaauuuaaccucguagagc

SEQ ID NO: 1433728 - RNA, 19 nt, Artificial Sequence
  Description of Artificial Sequence: Synthetic oligonucleotide
  Sense strand starting at position 719 of SEQ ID NO: 1243686
agaacuugucaacggcaaa

SEQ ID NO: 1433729 - RNA, 19 nt, Artificial Sequence
  Description of Artificial Sequence: Synthetic oligonucleotide
  Antisense strand to SEQ ID NO: 1433728
uuugccguugacaaguucu

SEQ ID NO: 1433730 - RNA, 19 nt, Artificial Sequence
  Description of Artificial Sequence: Synthetic oligonucleotide
  Sense strand starting at position 732 of SEQ ID NO: 1243686
ggcaaaggauggcauuuaa

SEQ ID NO: 1433731 - RNA, 19 nt, Artificial Sequence
  Description of Artificial Sequence: Synthetic oligonucleotide
  Antisense strand to SEQ ID NO: 1433730
uuaaaugccauccuuugcc

SEQ ID NO: 1433732 - RNA, 19 nt, Artificial Sequence
  Description of Artificial Sequence: Synthetic oligonucleotide
  Sense strand starting at position 777 of SEQ ID NO: 1243686
gagagaacucagcgagcaa

SEQ ID NO: 1433733 - RNA, 19 nt, Artificial Sequence
  Description of Artificial Sequence: Synthetic oligonucleotide
  Antisense strand to SEQ ID NO: 1433732
uugcucgcugaguucucuc

SEQ ID NO: 1433734 - RNA, 19 nt, Artificial Sequence
  Description of Artificial Sequence: Synthetic oligonucleotide
  Sense strand starting at position 864 of SEQ ID NO: 1243686
aaacuaggcucucuugagu

SEQ ID NO: 1433735 - RNA, 19 nt, Artificial Sequence
  Description of Artificial Sequence: Synthetic oligonucleotide
  Antisense strand to SEQ ID NO: 1433734
acucaagagagccuaguuu

SEQ ID NO: 1433736 - RNA, 19 nt, Artificial Sequence
  Description of Artificial Sequence: Synthetic oligonucleotide
  Sense strand starting at position 873 of SEQ ID NO: 1243686
ucucuugaguuucugacau

SEQ ID NO: 1433737 - RNA, 19 nt, Artificial Sequence
  Description of Artificial Sequence: Synthetic oligonucleotide
  Antisense strand to SEQ ID NO: 1433736
augucagaaacucaagaga

SEQ ID NO: 1433738 - RNA, 19 nt, Artificial Sequence
  Description of Artificial Sequence: Synthetic oligonucleotide
  Sense strand starting at position 968 of SEQ ID NO: 1243686
cuuugcuuccgagcaguuu

SEQ ID NO: 1433739 - RNA, 19 nt, Artificial Sequence
  Description of Artificial Sequence: Synthetic oligonucleotide
  Antisense strand to SEQ ID NO: 1433738
aaacugcucggaagcaaag

SEQ ID NO: 1433740 - RNA, 19 nt, Artificial Sequence
  Description of Artificial Sequence: Synthetic oligonucleotide
  Sense strand starting at position 989 of SEQ ID NO: 1243686
aaauuugcccucgggaugu

SEQ ID NO: 1433741 - RNA, 19 nt, Artificial Sequence
  Description of Artificial Sequence: Synthetic oligonucleotide
  Antisense strand to SEQ ID NO: 1433740
acaucccgagggcaaauuu

SEQ ID NO: 1433742 - RNA, 19 nt, Artificial Sequence
  Description of Artificial Sequence: Synthetic oligonucleotide
  Sense strand starting at position 1049 of SEQ ID NO: 1243686
cugaaaugucuaggaucug

SEQ ID NO: 1433743 - RNA, 19 nt, Artificial Sequence
  Description of Artificial Sequence: Synthetic oligonucleotide
  Antisense strand to SEQ ID NO: 1433742
cagauccuagacauuucag

SEQ ID NO: 1433744 - RNA, 19 nt, Artificial Sequence
  Description of Artificial Sequence: Synthetic oligonucleotide
  Sense strand starting at position 1108 of SEQ ID NO: 1243686
gugcaucauccgcuuaguu

SEQ ID NO: 1433745 - RNA, 19 nt, Artificial Sequence
  Description of Artificial Sequence: Synthetic oligonucleotide
  Antisense strand to SEQ ID NO: 1433744
aacuaagcggaugaugcac

SEQ ID NO: 1433746 - RNA, 19 nt, Artificial Sequence
  Description of Artificial Sequence: Synthetic oligonucleotide
  Sense strand starting at position 2540 of SEQ ID NO: 1243686
uggagagguuauucccaaa

SEQ ID NO: 1433747 - RNA, 19 nt, Artificial Sequence
  Description of Artificial Sequence: Synthetic oligonucleotide
  Antisense strand to SEQ ID NO: 1433746
uuugggaauaaccucucca

SEQ ID NO: 1433748 - RNA, 19 nt, Artificial Sequence
  Description of Artificial Sequence: Synthetic oligonucleotide
  Sense strand starting at position 2565 of SEQ ID NO: 1243686
cgcucugacaguuaggaau

SEQ ID NO: 1433749 - RNA, 19 nt, Artificial Sequence
  Description of Artificial Sequence: Synthetic oligonucleotide
  Antisense strand to SEQ ID NO: 1433748
auuccuaacugucagagcg

SEQ ID NO: 1433750 - RNA, 19 nt, Artificial Sequence
  Description of Artificial Sequence: Synthetic oligonucleotide
  Sense strand starting at position 2808 of SEQ ID NO: 1243686
cgaaaugucagagguaccu

SEQ ID NO: 1433751 - RNA, 19 nt, Artificial Sequence
  Description of Artificial Sequence: Synthetic oligonucleotide
  Antisense strand to SEQ ID NO: 1433750
agguaccucugacauuucg

SEQ ID NO: 1433752 - RNA, 19 nt, Artificial Sequence
  Description of Artificial Sequence: Synthetic oligonucleotide
  Sense strand starting at position 3192 of SEQ ID NO: 1243686
cauagaaguuuguuaggug

SEQ ID NO: 1433753 - RNA, 19 nt, Artificial Sequence
  Description of Artificial Sequence: Synthetic oligonucleotide
  Antisense strand to SEQ ID NO: 1433752
caccuaacaaacuucuaug

SEQ ID NO: 1433754 - RNA, 19 nt, Artificial Sequence
  Description of Artificial Sequence: Synthetic oligonucleotide
  Sense strand starting at position 3199 of SEQ ID NO: 1243686
guuuguuagguggcguaua

SEQ ID NO: 1433755 - RNA, 19 nt, Artificial Sequence
  Description of Artificial Sequence: Synthetic oligonucleotide
  Antisense strand to SEQ ID NO: 1433754
uauacgccaccuaacaaac

SEQ ID NO: 1433756 - RNA, 19 nt, Artificial Sequence
  Description of Artificial Sequence: Synthetic oligonucleotide
  Sense strand starting at position 3407 of SEQ ID NO: 1243686
uuugcaaaucaugguaaga

SEQ ID NO: 1433757 - RNA, 19 nt, Artificial Sequence
  Description of Artificial Sequence: Synthetic oligonucleotide
  Antisense strand to SEQ ID NO: 1433756
ucuuaccaugauuugcaaa

SEQ ID NO: 1433758 - RNA, 19 nt, Artificial Sequence
  Description of Artificial Sequence: Synthetic oligonucleotide
  Sense strand starting at position 3418 of SEQ ID NO: 1243686
ugguaagauaggugucuug

SEQ ID NO: 1433759 - RNA, 19 nt, Artificial Sequence
  Description of Artificial Sequence: Synthetic oligonucleotide
  Antisense strand to SEQ ID NO: 1433758
caagacaccuaucuuacca

SEQ ID NO: 1433760 - RNA, 19 nt, Artificial Sequence
  Description of Artificial Sequence: Synthetic oligonucleotide
  Sense strand starting at position 3455 of SEQ ID NO: 1243686
agugcuuaugcugaaaucu

SEQ ID NO: 1433761 - RNA, 19 nt, Artificial Sequence
  Description of Artificial Sequence: Synthetic oligonucleotide
  Antisense strand to SEQ ID NO: 1433760
agauuucagcauaagcacu

SEQ ID NO: 1433762 - RNA, 19 nt, Artificial Sequence
  Description of Artificial Sequence: Synthetic oligonucleotide
  Sense strand starting at position 3532 of SEQ ID NO: 1243686
aauacauccggccagauga

SEQ ID NO: 1433763 - RNA, 19 nt, Artificial Sequence
  Description of Artificial Sequence: Synthetic oligonucleotide
  Antisense strand to SEQ ID NO: 1433762
ucaucuggccggauguauu

SEQ ID NO: 1433764 - RNA, 19 nt, Artificial Sequence
  Description of Artificial Sequence: Synthetic oligonucleotide
  Sense strand starting at position 3534 of SEQ ID NO: 1243686
uacauccggccagaugaua

SEQ ID NO: 1433765 - RNA, 19 nt, Artificial Sequence
  Description of Artificial Sequence: Synthetic oligonucleotide
  Antisense strand to SEQ ID NO: 1433764
uaucaucuggccggaugua

SEQ ID NO: 1433766 - RNA, 19 nt, Artificial Sequence
  Description of Artificial Sequence: Synthetic oligonucleotide
  Sense strand starting at position 3599 of SEQ ID NO: 1243686
aggaacuuacaguguguaa

SEQ ID NO: 1433767 - RNA, 19 nt, Artificial Sequence
  Description of Artificial Sequence: Synthetic oligonucleotide
  Antisense strand to SEQ ID NO: 1433766
uuacacacuguaaguuccu

SEQ ID NO: 1433768 - RNA, 19 nt, Artificial Sequence
  Description of Artificial Sequence: Synthetic oligonucleotide
  Sense strand starting at position 3601 of SEQ ID NO: 1243686
gaacuuacaguguguaaau

SEQ ID NO: 1433769 - RNA, 19 nt, Artificial Sequence
  Description of Artificial Sequence: Synthetic oligonucleotide
  Antisense strand to SEQ ID NO: 1433768
auuuacacacuguaaguuc

SEQ ID NO: 1433770 - RNA, 19 nt, Artificial Sequence
  Description of Artificial Sequence: Synthetic oligonucleotide
  Sense strand starting at position 3603 of SEQ ID NO: 1243686
acuuacaguguguaaauaa

SEQ ID NO: 1433771 - RNA, 19 nt, Artificial Sequence
  Description of Artificial Sequence: Synthetic oligonucleotide
  Antisense strand to SEQ ID NO: 1433770
uuauuuacacacuguaagu

SEQ ID NO: 1433772 - RNA, 19 nt, Artificial Sequence
  Description of Artificial Sequence: Synthetic oligonucleotide
  Sense strand starting at position 3651 of SEQ ID NO: 1243686
caguguaaugaguaccacu

SEQ ID NO: 1433773 - RNA, 19 nt, Artificial Sequence
  Description of Artificial Sequence: Synthetic oligonucleotide
  Antisense strand to SEQ ID NO: 1433772
agugguacucauuacacug

SEQ ID NO: 1433774 - RNA, 19 nt, Artificial Sequence
  Description of Artificial Sequence: Synthetic oligonucleotide
  Sense strand starting at position 3704 of SEQ ID NO: 1243686
ggacuuuccucaguggaac

SEQ ID NO: 1433775 - RNA, 19 nt, Artificial Sequence
  Description of Artificial Sequence: Synthetic oligonucleotide
  Antisense strand to SEQ ID NO: 1433774
guuccacugaggaaagucc

SEQ ID NO: 1433776 - RNA, 19 nt, Artificial Sequence
  Description of Artificial Sequence: Synthetic oligonucleotide
  Sense strand starting at position 3705 of SEQ ID NO: 1243686
gacuuuccucaguggaacu

SEQ ID NO: 1433777 - RNA, 19 nt, Artificial Sequence
  Description of Artificial Sequence: Synthetic oligonucleotide
  Antisense strand to SEQ ID NO: 1433776
aguuccacugaggaaaguc

SEQ ID NO: 1433778 - RNA, 19 nt, Artificial Sequence
  Description of Artificial Sequence: Synthetic oligonucleotide
  Sense strand starting at position 3826 of SEQ ID NO: 1243686
ccagguuagguuuggaaau

SEQ ID NO: 1433779 - RNA, 19 nt, Artificial Sequence
  Description of Artificial Sequence: Synthetic oligonucleotide
  Antisense strand to SEQ ID NO: 1433778
auuuccaaaccuaaccugg

SEQ ID NO: 1433780 - RNA, 19 nt, Artificial Sequence
  Description of Artificial Sequence: Synthetic oligonucleotide
  Sense strand starting at position 3828 of SEQ ID NO: 1243686
agguuagguuuggaaauuu

SEQ ID NO: 1433781 - RNA, 19 nt, Artificial Sequence
  Description of Artificial Sequence: Synthetic oligonucleotide
  Antisense strand to SEQ ID NO: 1433780
aaauuuccaaaccuaaccu

SEQ ID NO: 1433782 - RNA, 19 nt, Artificial Sequence
  Description of Artificial Sequence: Synthetic oligonucleotide
  Sense strand starting at position 3863 of SEQ ID NO: 1243686
gcagaugaacuuuagccaa

SEQ ID NO: 1433783 - RNA, 19 nt, Artificial Sequence
  Description of Artificial Sequence: Synthetic oligonucleotide
  Antisense strand to SEQ ID NO: 1433782
uuggcuaaaguucaucugc

SEQ ID NO: 1433784 - RNA, 19 nt, Artificial Sequence
  Description of Artificial Sequence: Synthetic oligonucleotide
  Sense strand starting at position 3865 of SEQ ID NO: 1243686
agaugaacuuuagccaaau

SEQ ID NO: 1433785 - RNA, 19 nt, Artificial Sequence
  Description of Artificial Sequence: Synthetic oligonucleotide
  Antisense strand to SEQ ID NO: 1433784
auuuggcuaaaguucaucu

SEQ ID NO: 1433786 - RNA, 19 nt, Artificial Sequence
  Description of Artificial Sequence: Synthetic oligonucleotide
  Sense strand starting at position 3937 of SEQ ID NO: 1243686
gggcuacgccuuuaagaag

SEQ ID NO: 1433787 - RNA, 19 nt, Artificial Sequence
  Description of Artificial Sequence: Synthetic oligonucleotide
  Antisense strand to SEQ ID NO: 1433786
cuucuuaaaggcguagccc

SEQ ID NO: 1433788 - RNA, 19 nt, Artificial Sequence
  Description of Artificial Sequence: Synthetic oligonucleotide
  Sense strand starting at position 3956 of SEQ ID NO: 1243686
aagagaaauccgcagugcu

SEQ ID NO: 1433789 - RNA, 19 nt, Artificial Sequence
  Description of Artificial Sequence: Synthetic oligonucleotide
  Antisense strand to SEQ ID NO: 1433788
agcacugcggauuucucuu

SEQ ID NO: 1433790 - RNA, 19 nt, Artificial Sequence
  Description of Artificial Sequence: Synthetic oligonucleotide
  Sense strand starting at position 3982 of SEQ ID NO: 1243686
gaggucugccuacaacagu

SEQ ID NO: 1433791 - RNA, 19 nt, Artificial Sequence
  Description of Artificial Sequence: Synthetic oligonucleotide
  Antisense strand to SEQ ID NO: 1433790
acuguuguaggcagaccuc

SEQ ID NO: 1433792 - RNA, 19 nt, Artificial Sequence
  Description of Artificial Sequence: Synthetic oligonucleotide
  Sense strand starting at position 148 of SEQ ID NO: 1243687
ccagcaguaguguacuaua

SEQ ID NO: 1433793 - RNA, 19 nt, Artificial Sequence
  Description of Artificial Sequence: Synthetic oligonucleotide
  Antisense strand to SEQ ID NO: 1433792
uauaguacacuacugcugg

SEQ ID NO: 1433794 - RNA, 19 nt, Artificial Sequence
  Description of Artificial Sequence: Synthetic oligonucleotide
  Sense strand starting at position 159 of SEQ ID NO: 1243687
guacuauauggguggguca

SEQ ID NO: 1433795 - RNA, 19 nt, Artificial Sequence
  Description of Artificial Sequence: Synthetic oligonucleotide
  Antisense strand to SEQ ID NO: 1433794
ugacccacccauauaguac

SEQ ID NO: 1433796 - RNA, 19 nt, Artificial Sequence
  Description of Artificial Sequence: Synthetic oligonucleotide
  Sense strand starting at position 166 of SEQ ID NO: 1243687
augggugggucaguuguaa

SEQ ID NO: 1433797 - RNA, 19 nt, Artificial Sequence
  Description of Artificial Sequence: Synthetic oligonucleotide
  Antisense strand to SEQ ID NO: 1433796
uuacaacugacccacccau

SEQ ID NO: 1433798 - RNA, 19 nt, Artificial Sequence
  Description of Artificial Sequence: Synthetic oligonucleotide
  Sense strand starting at position 235 of SEQ ID NO: 1243687
aaucaauacuggguuaagu

SEQ ID NO: 1433799 - RNA, 19 nt, Artificial Sequence
  Description of Artificial Sequence: Synthetic oligonucleotide
  Antisense strand to SEQ ID NO: 1433798
acuuaacccaguauugauu

SEQ ID NO: 1433800 - RNA, 19 nt, Artificial Sequence
  Description of Artificial Sequence: Synthetic oligonucleotide
  Sense strand starting at position 237 of SEQ ID NO: 1243687
ucaauacuggguuaaguau

SEQ ID NO: 1433801 - RNA, 19 nt, Artificial Sequence
  Description of Artificial Sequence: Synthetic oligonucleotide
  Antisense strand to SEQ ID NO: 1433800
auacuuaacccaguauuga

SEQ ID NO: 1433802 - RNA, 19 nt, Artificial Sequence
  Description of Artificial Sequence: Synthetic oligonucleotide
  Sense strand starting at position 348 of SEQ ID NO: 1243687
gccucaacuagucggaaga

SEQ ID NO: 1433803 - RNA, 19 nt, Artificial Sequence
  Description of Artificial Sequence: Synthetic oligonucleotide
  Antisense strand to SEQ ID NO: 1433802
ucuuccgacuaguugaggc

SEQ ID NO: 1433804 - RNA, 19 nt, Artificial Sequence
  Description of Artificial Sequence: Synthetic oligonucleotide
  Sense strand starting at position 359 of SEQ ID NO: 1243687
ucggaagagcuuuacuaaa

SEQ ID NO: 1433805 - RNA, 19 nt, Artificial Sequence
  Description of Artificial Sequence: Synthetic oligonucleotide
  Antisense strand to SEQ ID NO: 1433804
uuuaguaaagcucuuccga

SEQ ID NO: 1433806 - RNA, 19 nt, Artificial Sequence
  Description of Artificial Sequence: Synthetic oligonucleotide
  Sense strand starting at position 711 of SEQ ID NO: 1243687
gguacuaaggcagaaguau

SEQ ID NO: 1433807 - RNA, 19 nt, Artificial Sequence
  Description of Artificial Sequence: Synthetic oligonucleotide
  Antisense strand to SEQ ID NO: 1433806
auacuucugccuuaguacc

SEQ ID NO: 1433808 - RNA, 19 nt, Artificial Sequence
  Description of Artificial Sequence: Synthetic oligonucleotide
  Sense strand starting at position 790 of SEQ ID NO: 1243687
uugacaguuuaaucgugua

SEQ ID NO: 1433809 - RNA, 19 nt, Artificial Sequence
  Description of Artificial Sequence: Synthetic oligonucleotide
  Antisense strand to SEQ ID NO: 1433808
uacacgauuaaacugucaa

SEQ ID NO: 1433810 - RNA, 19 nt, Artificial Sequence
  Description of Artificial Sequence: Synthetic oligonucleotide
  Sense strand starting at position 795 of SEQ ID NO: 1243687
aguuuaaucguguauaauc

SEQ ID NO: 1433811 - RNA, 19 nt, Artificial Sequence
  Description of Artificial Sequence: Synthetic oligonucleotide
  Antisense strand to SEQ ID NO: 1433810
gauuauacacgauuaaacu

SEQ ID NO: 1433812 - RNA, 19 nt, Artificial Sequence
  Description of Artificial Sequence: Synthetic oligonucleotide
  Sense strand starting at position 805 of SEQ ID NO: 1243687
uguauaaucccuuguaaac

SEQ ID NO: 1433813 - RNA, 19 nt, Artificial Sequence
  Description of Artificial Sequence: Synthetic oligonucleotide
  Antisense strand to SEQ ID NO: 1433812
guuuacaagggauuauaca

SEQ ID NO: 1433814 - RNA, 19 nt, Artificial Sequence
  Description of Artificial Sequence: Synthetic oligonucleotide
  Sense strand starting at position 842 of SEQ ID NO: 1243687
uuagguucugguuggugau

SEQ ID NO: 1433815 - RNA, 19 nt, Artificial Sequence
  Description of Artificial Sequence: Synthetic oligonucleotide
  Antisense strand to SEQ ID NO: 1433814
aucaccaaccagaaccuaa

SEQ ID NO: 1433816 - RNA, 19 nt, Artificial Sequence
  Description of Artificial Sequence: Synthetic oligonucleotide
  Sense strand starting at position 843 of SEQ ID NO: 1243687
uagguucugguuggugaua

SEQ ID NO: 1433817 - RNA, 19 nt, Artificial Sequence
  Description of Artificial Sequence: Synthetic oligonucleotide
  Antisense strand to SEQ ID NO: 1433816
uaucaccaaccagaaccua

SEQ ID NO: 1433818 - RNA, 19 nt, Artificial Sequence
  Description of Artificial Sequence: Synthetic oligonucleotide
  Sense strand starting at position 1029 of SEQ ID NO: 1243687
uuauuaaugcuuuacgacu

SEQ ID NO: 1433819 - RNA, 19 nt, Artificial Sequence
  Description of Artificial Sequence: Synthetic oligonucleotide
  Antisense strand to SEQ ID NO: 1433818
agucguaaagcauuaauaa

SEQ ID NO: 1433820 - RNA, 19 nt, Artificial Sequence
  Description of Artificial Sequence: Synthetic oligonucleotide
  Sense strand starting at position 1040 of SEQ ID NO: 1243687
uuacgacucugcuuuccaa

SEQ ID NO: 1433821 - RNA, 19 nt, Artificial Sequence
  Description of Artificial Sequence: Synthetic oligonucleotide
  Antisense strand to SEQ ID NO: 1433820
uuggaaagcagagucguaa

SEQ ID NO: 1433822 - RNA, 19 nt, Artificial Sequence
  Description of Artificial Sequence: Synthetic oligonucleotide
  Sense strand starting at position 1063 of SEQ ID NO: 1243687
ggaaaugcauuugaagaca

SEQ ID NO: 1433823 - RNA, 19 nt, Artificial Sequence
  Description of Artificial Sequence: Synthetic oligonucleotide
  Antisense strand to SEQ ID NO: 1433822
ugucuucaaaugcauuucc

SEQ ID NO: 1433824 - RNA, 19 nt, Artificial Sequence
  Description of Artificial Sequence: Synthetic oligonucleotide
  Sense strand starting at position 1175 of SEQ ID NO: 1243687
gccagaggccuuuaaugua

SEQ ID NO: 1433825 - RNA, 19 nt, Artificial Sequence
  Description of Artificial Sequence: Synthetic oligonucleotide
  Antisense strand to SEQ ID NO: 1433824
uacauuaaaggccucuggc

SEQ ID NO: 1433826 - RNA, 19 nt, Artificial Sequence
  Description of Artificial Sequence: Synthetic oligonucleotide
  Sense strand starting at position 1182 of SEQ ID NO: 1243687
gccuuuaauguagacauua

SEQ ID NO: 1433827 - RNA, 19 nt, Artificial Sequence
  Description of Artificial Sequence: Synthetic oligonucleotide
  Antisense strand to SEQ ID NO: 1433826
uaaugucuacauuaaaggc

SEQ ID NO: 1433828 - RNA, 19 nt, Artificial Sequence
  Description of Artificial Sequence: Synthetic oligonucleotide
  Sense strand starting at position 1194 of SEQ ID NO: 1243687
gacauuaaacggugucuac

SEQ ID NO: 1433829 - RNA, 19 nt, Artificial Sequence
  Description of Artificial Sequence: Synthetic oligonucleotide
  Antisense strand to SEQ ID NO: 1433828
guagacaccguuuaauguc

SEQ ID NO: 1433830 - RNA, 19 nt, Artificial Sequence
  Description of Artificial Sequence: Synthetic oligonucleotide
  Sense strand starting at position 1197 of SEQ ID NO: 1243687
auuaaacggugucuacaua

SEQ ID NO: 1433831 - RNA, 19 nt, Artificial Sequence
  Description of Artificial Sequence: Synthetic oligonucleotide
  Antisense strand to SEQ ID NO: 1433830
uauguagacaccguuuaau

SEQ ID NO: 1433832 - RNA, 19 nt, Artificial Sequence
  Description of Artificial Sequence: Synthetic oligonucleotide
  Sense strand starting at position 1244 of SEQ ID NO: 1243687
gcuguacugacagaagauu

SEQ ID NO: 1433833 - RNA, 19 nt, Artificial Sequence
  Description of Artificial Sequence: Synthetic oligonucleotide
  Antisense strand to SEQ ID NO: 1433832
aaucuucugucaguacagc

SEQ ID NO: 1433834 - RNA, 19 nt, Artificial Sequence
  Description of Artificial Sequence: Synthetic oligonucleotide
  Sense strand starting at position 1420 of SEQ ID NO: 1243687
gccaguuggaaguaagaug

SEQ ID NO: 1433835 - RNA, 19 nt, Artificial Sequence
  Description of Artificial Sequence: Synthetic oligonucleotide
  Antisense strand to SEQ ID NO: 1433834
caucuuacuuccaacuggc

SEQ ID NO: 1433836 - RNA, 19 nt, Artificial Sequence
  Description of Artificial Sequence: Synthetic oligonucleotide
  Sense strand starting at position 1427 of SEQ ID NO: 1243687
ggaaguaagauguacugca

SEQ ID NO: 1433837 - RNA, 19 nt, Artificial Sequence
  Description of Artificial Sequence: Synthetic oligonucleotide
  Antisense strand to SEQ ID NO: 1433836
ugcaguacaucuuacuucc

SEQ ID NO: 1433838 - RNA, 19 nt, Artificial Sequence
  Description of Artificial Sequence: Synthetic oligonucleotide
  Sense strand starting at position 1529 of SEQ ID NO: 1243687
uuuggaugcauuggauuaa

SEQ ID NO: 1433839 - RNA, 19 nt, Artificial Sequence
  Description of Artificial Sequence: Synthetic oligonucleotide
  Antisense strand to SEQ ID NO: 1433838
uuaauccaaugcauccaaa

SEQ ID NO: 1433840 - RNA, 19 nt, Artificial Sequence
  Description of Artificial Sequence: Synthetic oligonucleotide
  Sense strand starting at position 1594 of SEQ ID NO: 1243687
ugcuaauacgacuacuaga

SEQ ID NO: 1433841 - RNA, 19 nt, Artificial Sequence
  Description of Artificial Sequence: Synthetic oligonucleotide
  Antisense strand to SEQ ID NO: 1433840
ucuaguagucguauuagca

SEQ ID NO: 1433842 - RNA, 19 nt, Artificial Sequence
  Description of Artificial Sequence: Synthetic oligonucleotide
  Sense strand starting at position 1658 of SEQ ID NO: 1243687
ggugccacucuagauauca

SEQ ID NO: 1433843 - RNA, 19 nt, Artificial Sequence
  Description of Artificial Sequence: Synthetic oligonucleotide
  Antisense strand to SEQ ID NO: 1433842
ugauaucuagaguggcacc

SEQ ID NO: 1433844 - RNA, 19 nt, Artificial Sequence
  Description of Artificial Sequence: Synthetic oligonucleotide
  Sense strand starting at position 1681 of SEQ ID NO: 1243687
cuacaaagugacugagauu

SEQ ID NO: 1433845 - RNA, 19 nt, Artificial Sequence
  Description of Artificial Sequence: Synthetic oligonucleotide
  Antisense strand to SEQ ID NO: 1433844
aaucucagucacuuuguag

SEQ ID NO: 1433846 - RNA, 19 nt, Artificial Sequence
  Description of Artificial Sequence: Synthetic oligonucleotide
  Sense strand starting at position 2127 of SEQ ID NO: 1243687
ccucguagggcuugaaaug

SEQ ID NO: 1433847 - RNA, 19 nt, Artificial Sequence
  Description of Artificial Sequence: Synthetic oligonucleotide
  Antisense strand to SEQ ID NO: 1433846
cauuucaagcccuacgagg

SEQ ID NO: 1433848 - RNA, 19 nt, Artificial Sequence
  Description of Artificial Sequence: Synthetic oligonucleotide
  Sense strand starting at position 2128 of SEQ ID NO: 1243687
cucguagggcuugaaaugu

SEQ ID NO: 1433849 - RNA, 19 nt, Artificial Sequence
  Description of Artificial Sequence: Synthetic oligonucleotide
  Antisense strand to SEQ ID NO: 1433848
acauuucaagcccuacgag

SEQ ID NO: 1433850 - RNA, 19 nt, Artificial Sequence
  Description of Artificial Sequence: Synthetic oligonucleotide
  Sense strand starting at position 2192 of SEQ ID NO: 1243687
acaagaaccgacggguaau

SEQ ID NO: 1433851 - RNA, 19 nt, Artificial Sequence
  Description of Artificial Sequence: Synthetic oligonucleotide
  Antisense strand to SEQ ID NO: 1433850
auuacccgucgguucuugu

SEQ ID NO: 1433852 - RNA, 19 nt, Artificial Sequence
  Description of Artificial Sequence: Synthetic oligonucleotide
  Sense strand starting at position 2202 of SEQ ID NO: 1243687
acggguaauccucgacaaa

SEQ ID NO: 1433853 - RNA, 19 nt, Artificial Sequence
  Description of Artificial Sequence: Synthetic oligonucleotide
  Antisense strand to SEQ ID NO: 1433852
uuugucgaggauuacccgu

SEQ ID NO: 1433854 - RNA, 19 nt, Artificial Sequence
  Description of Artificial Sequence: Synthetic oligonucleotide
  Sense strand starting at position 2203 of SEQ ID NO: 1243687
cggguaauccucgacaaau

SEQ ID NO: 1433855 - RNA, 19 nt, Artificial Sequence
  Description of Artificial Sequence: Synthetic oligonucleotide
  Antisense strand to SEQ ID NO: 1433854
auuugucgaggauuacccg

SEQ ID NO: 1433856 - RNA, 19 nt, Artificial Sequence
  Description of Artificial Sequence: Synthetic oligonucleotide
  Sense strand starting at position 2205 of SEQ ID NO: 1243687
gguaauccucgacaaauuc

SEQ ID NO: 1433857 - RNA, 19 nt, Artificial Sequence
  Description of Artificial Sequence: Synthetic oligonucleotide
  Antisense strand to SEQ ID NO: 1433856
gaauuugucgaggauuacc

SEQ ID NO: 1433858 - RNA, 19 nt, Artificial Sequence
  Description of Artificial Sequence: Synthetic oligonucleotide
  Sense strand starting at position 2636 of SEQ ID NO: 1243687
aagagugaaugacuucuua

SEQ ID NO: 1433859 - RNA, 19 nt, Artificial Sequence
  Description of Artificial Sequence: Synthetic oligonucleotide
  Antisense strand to SEQ ID NO: 1433858
uaagaagucauucacucuu

SEQ ID NO: 1433860 - RNA, 19 nt, Artificial Sequence
  Description of Artificial Sequence: Synthetic oligonucleotide
  Sense strand starting at position 2640 of SEQ ID NO: 1243687
gugaaugacuucuuagaug

SEQ ID NO: 1433861 - RNA, 19 nt, Artificial Sequence
  Description of Artificial Sequence: Synthetic oligonucleotide
  Antisense strand to SEQ ID NO: 1433860
caucuaagaagucauucac

SEQ ID NO: 1433862 - RNA, 19 nt, Artificial Sequence
  Description of Artificial Sequence: Synthetic oligonucleotide
  Sense strand starting at position 2773 of SEQ ID NO: 1243687
cgugcuugccuuguaggaa

SEQ ID NO: 1433863 - RNA, 19 nt, Artificial Sequence
  Description of Artificial Sequence: Synthetic oligonucleotide
  Antisense strand to SEQ ID NO: 1433862
uuccuacaaggcaagcacg

SEQ ID NO: 1433864 - RNA, 19 nt, Artificial Sequence
  Description of Artificial Sequence: Synthetic oligonucleotide
  Sense strand starting at position 3008 of SEQ ID NO: 1243687
accacugacucagauauga

SEQ ID NO: 1433865 - RNA, 19 nt, Artificial Sequence
  Description of Artificial Sequence: Synthetic oligonucleotide
  Antisense strand to SEQ ID NO: 1433864
ucauaucugagucaguggu

SEQ ID NO: 1433866 - RNA, 19 nt, Artificial Sequence
  Description of Artificial Sequence: Synthetic oligonucleotide
  Sense strand starting at position 3200 of SEQ ID NO: 1243687
cugucugcucacugauauu

SEQ ID NO: 1433867 - RNA, 19 nt, Artificial Sequence
  Description of Artificial Sequence: Synthetic oligonucleotide
  Antisense strand to SEQ ID NO: 1433866
aauaucagugagcagacag

SEQ ID NO: 1433868 - RNA, 19 nt, Artificial Sequence
  Description of Artificial Sequence: Synthetic oligonucleotide
  Sense strand starting at position 3433 of SEQ ID NO: 1243687
ggaggacauuauuacugaa

SEQ ID NO: 1433869 - RNA, 19 nt, Artificial Sequence
  Description of Artificial Sequence: Synthetic oligonucleotide
  Antisense strand to SEQ ID NO: 1433868
uucaguaauaauguccucc

SEQ ID NO: 1433870 - RNA, 19 nt, Artificial Sequence
  Description of Artificial Sequence: Synthetic oligonucleotide
  Sense strand starting at position 3726 of SEQ ID NO: 1243687
agguaaugcacuugagaca

SEQ ID NO: 1433871 - RNA, 19 nt, Artificial Sequence
  Description of Artificial Sequence: Synthetic oligonucleotide
  Antisense strand to SEQ ID NO: 1433870
ugucucaagugcauuaccu

SEQ ID NO: 1433872 - RNA, 19 nt, Artificial Sequence
  Description of Artificial Sequence: Synthetic oligonucleotide
  Sense strand starting at position 80 of SEQ ID NO: 1243688
cagcuagguuuggcuacaa

SEQ ID NO: 1433873 - RNA, 19 nt, Artificial Sequence
  Description of Artificial Sequence: Synthetic oligonucleotide
  Antisense strand to SEQ ID NO: 1433872
uuguagccaaaccuagcug

SEQ ID NO: 1433874 - RNA, 19 nt, Artificial Sequence
  Description of Artificial Sequence: Synthetic oligonucleotide
  Sense strand starting at position 246 of SEQ ID NO: 1243688
gucuccagguuauugugaa

SEQ ID NO: 1433875 - RNA, 19 nt, Artificial Sequence
  Description of Artificial Sequence: Synthetic oligonucleotide
  Antisense strand to SEQ ID NO: 1433874
uucacaauaaccuggagac

SEQ ID NO: 1433876 - RNA, 19 nt, Artificial Sequence
  Description of Artificial Sequence: Synthetic oligonucleotide
  Sense strand starting at position 250 of SEQ ID NO: 1243688
ccagguuauugugaagaug

SEQ ID NO: 1433877 - RNA, 19 nt, Artificial Sequence
  Description of Artificial Sequence: Synthetic oligonucleotide
  Antisense strand to SEQ ID NO: 1433876
caucuucacaauaaccugg

SEQ ID NO: 1433878 - RNA, 19 nt, Artificial Sequence
  Description of Artificial Sequence: Synthetic oligonucleotide
  Sense strand starting at position 253 of SEQ ID NO: 1243688
gguuauugugaagaugugu

SEQ ID NO: 1433879 - RNA, 19 nt, Artificial Sequence
  Description of Artificial Sequence: Synthetic oligonucleotide
  Antisense strand to SEQ ID NO: 1433878
acacaucuucacaauaacc

SEQ ID NO: 1433880 - RNA, 19 nt, Artificial Sequence
  Description of Artificial Sequence: Synthetic oligonucleotide
  Sense strand starting at position 268 of SEQ ID NO: 1243688
guguauaugcggugcuuua

SEQ ID NO: 1433881 - RNA, 19 nt, Artificial Sequence
  Description of Artificial Sequence: Synthetic oligonucleotide
  Antisense strand to SEQ ID NO: 1433880
uaaagcaccgcauauacac

SEQ ID NO: 1433882 - RNA, 19 nt, Artificial Sequence
  Description of Artificial Sequence: Synthetic oligonucleotide
  Sense strand starting at position 269 of SEQ ID NO: 1243688
uguauaugcggugcuuuau

SEQ ID NO: 1433883 - RNA, 19 nt, Artificial Sequence
  Description of Artificial Sequence: Synthetic oligonucleotide
  Antisense strand to SEQ ID NO: 1433882
auaaagcaccgcauauaca

SEQ ID NO: 1433884 - RNA, 19 nt, Artificial Sequence
  Description of Artificial Sequence: Synthetic oligonucleotide
  Sense strand starting at position 682 of SEQ ID NO: 1243688
ugggaggugguguauaaga

SEQ ID NO: 1433885 - RNA, 19 nt, Artificial Sequence
  Description of Artificial Sequence: Synthetic oligonucleotide
  Antisense strand to SEQ ID NO: 1433884
ucuuauacaccaccuccca

SEQ ID NO: 1433886 - RNA, 19 nt, Artificial Sequence
  Description of Artificial Sequence: Synthetic oligonucleotide
  Sense strand starting at position 765 of SEQ ID NO: 1243688
augguuugcugagcacaaa

SEQ ID NO: 1433887 - RNA, 19 nt, Artificial Sequence
  Description of Artificial Sequence: Synthetic oligonucleotide
  Antisense strand to SEQ ID NO: 1433886
uuugugcucagcaaaccau

SEQ ID NO: 1433888 - RNA, 19 nt, Artificial Sequence
  Description of Artificial Sequence: Synthetic oligonucleotide
  Sense strand starting at position 942 of SEQ ID NO: 1243688
uagagugacucccauuaag

SEQ ID NO: 1433889 - RNA, 19 nt, Artificial Sequence
  Description of Artificial Sequence: Synthetic oligonucleotide
  Antisense strand to SEQ ID NO: 1433888
cuuaaugggagucacucua

SEQ ID NO: 1433890 - RNA, 19 nt, Artificial Sequence
  Description of Artificial Sequence: Synthetic oligonucleotide
  Sense strand starting at position 958 of SEQ ID NO: 1243688
aaggaaaucucagcgucuu

SEQ ID NO: 1433891 - RNA, 19 nt, Artificial Sequence
  Description of Artificial Sequence: Synthetic oligonucleotide
  Antisense strand to SEQ ID NO: 1433890
aagacgcugagauuuccuu

SEQ ID NO: 1433892 - RNA, 19 nt, Artificial Sequence
  Description of Artificial Sequence: Synthetic oligonucleotide
  Sense strand starting at position 959 of SEQ ID NO: 1243688
aggaaaucucagcgucuuu

SEQ ID NO: 1433893 - RNA, 19 nt, Artificial Sequence
  Description of Artificial Sequence: Synthetic oligonucleotide
  Antisense strand to SEQ ID NO: 1433892
aaagacgcugagauuuccu

SEQ ID NO: 1433894 - RNA, 19 nt, Artificial Sequence
  Description of Artificial Sequence: Synthetic oligonucleotide
  Sense strand starting at position 964 of SEQ ID NO: 1243688
aucucagcgucuuugaaug

SEQ ID NO: 1433895 - RNA, 19 nt, Artificial Sequence
  Description of Artificial Sequence: Synthetic oligonucleotide
  Antisense strand to SEQ ID NO: 1433894
cauucaaagacgcugagau

SEQ ID NO: 1433896 - RNA, 19 nt, Artificial Sequence
  Description of Artificial Sequence: Synthetic oligonucleotide
  Sense strand starting at position 969 of SEQ ID NO: 1243688
agcgucuuugaauggcuaa

SEQ ID NO: 1433897 - RNA, 19 nt, Artificial Sequence
  Description of Artificial Sequence: Synthetic oligonucleotide
  Antisense strand to SEQ ID NO: 1433896
uuagccauucaaagacgcu

SEQ ID NO: 1433898 - RNA, 19 nt, Artificial Sequence
  Description of Artificial Sequence: Synthetic oligonucleotide
  Sense strand starting at position 970 of SEQ ID NO: 1243688
gcgucuuugaauggcuaau

SEQ ID NO: 1433899 - RNA, 19 nt, Artificial Sequence
  Description of Artificial Sequence: Synthetic oligonucleotide
  Antisense strand to SEQ ID NO: 1433898
auuagccauucaaagacgc

SEQ ID NO: 1433900 - RNA, 19 nt, Artificial Sequence
  Description of Artificial Sequence: Synthetic oligonucleotide
  Sense strand starting at position 979 of SEQ ID NO: 1243688
aauggcuaauagugucaaa

SEQ ID NO: 1433901 - RNA, 19 nt, Artificial Sequence
  Description of Artificial Sequence: Synthetic oligonucleotide
  Antisense strand to SEQ ID NO: 1433900
uuugacacuauuagccauu

SEQ ID NO: 1433902 - RNA, 19 nt, Artificial Sequence
  Description of Artificial Sequence: Synthetic oligonucleotide
  Sense strand starting at position 1498 of SEQ ID NO: 1243688
gguggaaagggcugcuaua

SEQ ID NO: 1433903 - RNA, 19 nt, Artificial Sequence
  Description of Artificial Sequence: Synthetic oligonucleotide
  Antisense strand to SEQ ID NO: 1433902
uauagcagcccuuuccacc

SEQ ID NO: 1433904 - RNA, 19 nt, Artificial Sequence
  Description of Artificial Sequence: Synthetic oligonucleotide
  Sense strand starting at position 1517 of SEQ ID NO: 1243688
gucuguggucugcagggaa

SEQ ID NO: 1433905 - RNA, 19 nt, Artificial Sequence
  Description of Artificial Sequence: Synthetic oligonucleotide
  Antisense strand to SEQ ID NO: 1433904
uucccugcagaccacagac

SEQ ID NO: 1433906 - RNA, 19 nt, Artificial Sequence
  Description of Artificial Sequence: Synthetic oligonucleotide
  Sense strand starting at position 2035 of SEQ ID NO: 1243688
agcagcugaggcuauaaau

SEQ ID NO: 1433907 - RNA, 19 nt, Artificial Sequence
  Description of Artificial Sequence: Synthetic oligonucleotide
  Antisense strand to SEQ ID NO: 1433906
auuuauagccucagcugcu

SEQ ID NO: 1433908 - RNA, 19 nt, Artificial Sequence
  Description of Artificial Sequence: Synthetic oligonucleotide
  Sense strand starting at position 2073 of SEQ ID NO: 1243688
uaaacaugguuugcucaga

SEQ ID NO: 1433909 - RNA, 19 nt, Artificial Sequence
  Description of Artificial Sequence: Synthetic oligonucleotide
  Antisense strand to SEQ ID NO: 1433908
ucugagcaaaccauguuua

SEQ ID NO: 1433910 - RNA, 19 nt, Artificial Sequence
  Description of Artificial Sequence: Synthetic oligonucleotide
  Sense strand starting at position 2078 of SEQ ID NO: 1243688
augguuugcucagagucau

SEQ ID NO: 1433911 - RNA, 19 nt, Artificial Sequence
  Description of Artificial Sequence: Synthetic oligonucleotide
  Antisense strand to SEQ ID NO: 1433910
augacucugagcaaaccau

SEQ ID NO: 1433912 - RNA, 19 nt, Artificial Sequence
  Description of Artificial Sequence: Synthetic oligonucleotide
  Sense strand starting at position 2084 of SEQ ID NO: 1243688
ugcucagagucaugauccu

SEQ ID NO: 1433913 - RNA, 19 nt, Artificial Sequence
  Description of Artificial Sequence: Synthetic oligonucleotide
  Antisense strand to SEQ ID NO: 1433912
aggaucaugacucugagca

SEQ ID NO: 1433914 - RNA, 19 nt, Artificial Sequence
  Description of Artificial Sequence: Synthetic oligonucleotide
  Sense strand starting at position 2282 of SEQ ID NO: 1243688
aaaggucagucauggagau

SEQ ID NO: 1433915 - RNA, 19 nt, Artificial Sequence
  Description of Artificial Sequence: Synthetic oligonucleotide
  Antisense strand to SEQ ID NO: 1433914
aucuccaugacugaccuuu

SEQ ID NO: 1433916 - RNA, 19 nt, Artificial Sequence
  Description of Artificial Sequence: Synthetic oligonucleotide
  Sense strand starting at position 2487 of SEQ ID NO: 1243688
uguacauaugcacagaguu

SEQ ID NO: 1433917 - RNA, 19 nt, Artificial Sequence
  Description of Artificial Sequence: Synthetic oligonucleotide
  Antisense strand to SEQ ID NO: 1433916
aacucugugcauauguaca

SEQ ID NO: 1433918 - RNA, 19 nt, Artificial Sequence
  Description of Artificial Sequence: Synthetic oligonucleotide
  Sense strand starting at position 2500 of SEQ ID NO: 1243688
agaguuucacgguguuuaa

SEQ ID NO: 1433919 - RNA, 19 nt, Artificial Sequence
  Description of Artificial Sequence: Synthetic oligonucleotide
  Antisense strand to SEQ ID NO: 1433918
uuaaacaccgugaaacucu

SEQ ID NO: 1433920 - RNA, 19 nt, Artificial Sequence
  Description of Artificial Sequence: Synthetic oligonucleotide
  Sense strand starting at position 2575 of SEQ ID NO: 1243688
uuaguaaacuugguuugga

SEQ ID NO: 1433921 - RNA, 19 nt, Artificial Sequence
  Description of Artificial Sequence: Synthetic oligonucleotide
  Antisense strand to SEQ ID NO: 1433920
uccaaaccaaguuuacuaa

SEQ ID NO: 1433922 - RNA, 19 nt, Artificial Sequence
  Description of Artificial Sequence: Synthetic oligonucleotide
  Sense strand starting at position 2580 of SEQ ID NO: 1243688
aaacuugguuuggacaaua

SEQ ID NO: 1433923 - RNA, 19 nt, Artificial Sequence
  Description of Artificial Sequence: Synthetic oligonucleotide
  Antisense strand to SEQ ID NO: 1433922
uauuguccaaaccaaguuu

SEQ ID NO: 1433924 - RNA, 19 nt, Artificial Sequence
  Description of Artificial Sequence: Synthetic oligonucleotide
  Sense strand starting at position 2600 of SEQ ID NO: 1243688
augaaauuaucacaguuga

SEQ ID NO: 1433925 - RNA, 19 nt, Artificial Sequence
  Description of Artificial Sequence: Synthetic oligonucleotide
  Antisense strand to SEQ ID NO: 1433924
ucaacugugauaauuucau

SEQ ID NO: 1433926 - RNA, 19 nt, Artificial Sequence
  Description of Artificial Sequence: Synthetic oligonucleotide
  Sense strand starting at position 2623 of SEQ ID NO: 1243688
cccugagauggguggucuu

SEQ ID NO: 1433927 - RNA, 19 nt, Artificial Sequence
  Description of Artificial Sequence: Synthetic oligonucleotide
  Antisense strand to SEQ ID NO: 1433926
aagaccacccaucucaggg

SEQ ID NO: 1433928 - RNA, 19 nt, Artificial Sequence
  Description of Artificial Sequence: Synthetic oligonucleotide
  Sense strand starting at position 2626 of SEQ ID NO: 1243688
ugagauggguggucuuauc

SEQ ID NO: 1433929 - RNA, 19 nt, Artificial Sequence
  Description of Artificial Sequence: Synthetic oligonucleotide
  Antisense strand to SEQ ID NO: 1433928
gauaagaccacccaucuca

SEQ ID NO: 1433930 - RNA, 19 nt, Artificial Sequence
  Description of Artificial Sequence: Synthetic oligonucleotide
  Sense strand starting at position 2658 of SEQ ID NO: 1243688
ugaggaauuuaaggcuuaa

SEQ ID NO: 1433931 - RNA, 19 nt, Artificial Sequence
  Description of Artificial Sequence: Synthetic oligonucleotide
  Antisense strand to SEQ ID NO: 1433930
uuaagccuuaaauuccuca

SEQ ID NO: 1433932 - RNA, 19 nt, Artificial Sequence
  Description of Artificial Sequence: Synthetic oligonucleotide
  Sense strand starting at position 2742 of SEQ ID NO: 1243688
ugugcuuugggccaagaau

SEQ ID NO: 1433933 - RNA, 19 nt, Artificial Sequence
  Description of Artificial Sequence: Synthetic oligonucleotide
  Antisense strand to SEQ ID NO: 1433932
auucuuggcccaaagcaca

SEQ ID NO: 1433934 - RNA, 19 nt, Artificial Sequence
  Description of Artificial Sequence: Synthetic oligonucleotide
  Sense strand starting at position 3277 of SEQ ID NO: 1243688
gacagacuagucuguagaa

SEQ ID NO: 1433935 - RNA, 19 nt, Artificial Sequence
  Description of Artificial Sequence: Synthetic oligonucleotide
  Antisense strand to SEQ ID NO: 1433934
uucuacagacuagucuguc

SEQ ID NO: 1433936 - RNA, 19 nt, Artificial Sequence
  Description of Artificial Sequence: Synthetic oligonucleotide
  Sense strand starting at position 3278 of SEQ ID NO: 1243688
acagacuagucuguagaaa

SEQ ID NO: 1433937 - RNA, 19 nt, Artificial Sequence
  Description of Artificial Sequence: Synthetic oligonucleotide
  Antisense strand to SEQ ID NO: 1433936
uuucuacagacuagucugu

SEQ ID NO: 1433938 - RNA, 19 nt, Artificial Sequence
  Description of Artificial Sequence: Synthetic oligonucleotide
  Sense strand starting at position 3679 of SEQ ID NO: 1243688
cgccguauuagccaagaau

SEQ ID NO: 1433939 - RNA, 19 nt, Artificial Sequence
  Description of Artificial Sequence: Synthetic oligonucleotide
  Antisense strand to SEQ ID NO: 1433938
auucuuggcuaauacggcg

SEQ ID NO: 1433940 - RNA, 19 nt, Artificial Sequence
  Description of Artificial Sequence: Synthetic oligonucleotide
  Sense strand starting at position 3693 of SEQ ID NO: 1243688
agaauaggaugguuucgau

SEQ ID NO: 1433941 - RNA, 19 nt, Artificial Sequence
  Description of Artificial Sequence: Synthetic oligonucleotide
  Antisense strand to SEQ ID NO: 1433940
aucgaaaccauccuauucu

SEQ ID NO: 1433942 - RNA, 19 nt, Artificial Sequence
  Description of Artificial Sequence: Synthetic oligonucleotide
  Sense strand starting at position 144 of SEQ ID NO: 1243689
gguuucuuucucuguccau

SEQ ID NO: 1433943 - RNA, 19 nt, Artificial Sequence
  Description of Artificial Sequence: Synthetic oligonucleotide
  Antisense strand to SEQ ID NO: 1433942
auggacagagaaagaaacc

SEQ ID NO: 1433944 - RNA, 19 nt, Artificial Sequence
  Description of Artificial Sequence: Synthetic oligonucleotide
  Sense strand starting at position 616 of SEQ ID NO: 1243689
gggcgugacuucgucauag

SEQ ID NO: 1433945 - RNA, 19 nt, Artificial Sequence
  Description of Artificial Sequence: Synthetic oligonucleotide
  Antisense strand to SEQ ID NO: 1433944
cuaugacgaagucacgccc

SEQ ID NO: 1433946 - RNA, 19 nt, Artificial Sequence
  Description of Artificial Sequence: Synthetic oligonucleotide
  Sense strand starting at position 618 of SEQ ID NO: 1243689
gcgugacuucgucauagga

SEQ ID NO: 1433947 - RNA, 19 nt, Artificial Sequence
  Description of Artificial Sequence: Synthetic oligonucleotide
  Antisense strand to SEQ ID NO: 1433946
uccuaugacgaagucacgc

SEQ ID NO: 1433948 - RNA, 19 nt, Artificial Sequence
  Description of Artificial Sequence: Synthetic oligonucleotide
  Sense strand starting at position 620 of SEQ ID NO: 1243689
gugacuucgucauaggaag

SEQ ID NO: 1433949 - RNA, 19 nt, Artificial Sequence
  Description of Artificial Sequence: Synthetic oligonucleotide
  Antisense strand to SEQ ID NO: 1433948
cuuccuaugacgaagucac

SEQ ID NO: 1433950 - RNA, 19 nt, Artificial Sequence
  Description of Artificial Sequence: Synthetic oligonucleotide
  Sense strand starting at position 725 of SEQ ID NO: 1243689
gggcaccugucaccaauaa

SEQ ID NO: 1433951 - RNA, 19 nt, Artificial Sequence
  Description of Artificial Sequence: Synthetic oligonucleotide
  Antisense strand to SEQ ID NO: 1433950
uuauuggugacaggugccc

SEQ ID NO: 1433952 - RNA, 19 nt, Artificial Sequence
  Description of Artificial Sequence: Synthetic oligonucleotide
  Sense strand starting at position 726 of SEQ ID NO: 1243689
ggcaccugucaccaauaaa

SEQ ID NO: 1433953 - RNA, 19 nt, Artificial Sequence
  Description of Artificial Sequence: Synthetic oligonucleotide
  Antisense strand to SEQ ID NO: 1433952
uuuauuggugacaggugcc

SEQ ID NO: 1433954 - RNA, 19 nt, Artificial Sequence
  Description of Artificial Sequence: Synthetic oligonucleotide
  Sense strand starting at position 887 of SEQ ID NO: 1243689
gccaaauucucgccuugca

SEQ ID NO: 1433955 - RNA, 19 nt, Artificial Sequence
  Description of Artificial Sequence: Synthetic oligonucleotide
  Antisense strand to SEQ ID NO: 1433954
ugcaaggcgagaauuuggc

SEQ ID NO: 1433956 - RNA, 19 nt, Artificial Sequence
  Description of Artificial Sequence: Synthetic oligonucleotide
  Sense strand starting at position 945 of SEQ ID NO: 1243689
gguggucacucuccucauu

SEQ ID NO: 1433957 - RNA, 19 nt, Artificial Sequence
  Description of Artificial Sequence: Synthetic oligonucleotide
  Antisense strand to SEQ ID NO: 1433956
aaugaggagagugaccacc

SEQ ID NO: 1433958 - RNA, 19 nt, Artificial Sequence
  Description of Artificial Sequence: Synthetic oligonucleotide
  Sense strand starting at position 971 of SEQ ID NO: 1243689
ugcugaaggucuugauacu

SEQ ID NO: 1433959 - RNA, 19 nt, Artificial Sequence
  Description of Artificial Sequence: Synthetic oligonucleotide
  Antisense strand to SEQ ID NO: 1433958
aguaucaagaccuucagca

SEQ ID NO: 1433960 - RNA, 19 nt, Artificial Sequence
  Description of Artificial Sequence: Synthetic oligonucleotide
  Sense strand starting at position 972 of SEQ ID NO: 1243689
gcugaaggucuugauacuc

SEQ ID NO: 1433961 - RNA, 19 nt, Artificial Sequence
  Description of Artificial Sequence: Synthetic oligonucleotide
  Antisense strand to SEQ ID NO: 1433960
gaguaucaagaccuucagc

SEQ ID NO: 1433962 - RNA, 19 nt, Artificial Sequence
  Description of Artificial Sequence: Synthetic oligonucleotide
  Sense strand starting at position 980 of SEQ ID NO: 1243689
ucuugauacuccuugguca

SEQ ID NO: 1433963 - RNA, 19 nt, Artificial Sequence
  Description of Artificial Sequence: Synthetic oligonucleotide
  Antisense strand to SEQ ID NO: 1433962
ugaccaaggaguaucaaga

SEQ ID NO: 1433964 - RNA, 19 nt, Artificial Sequence
  Description of Artificial Sequence: Synthetic oligonucleotide
  Sense strand starting at position 981 of SEQ ID NO: 1243689
cuugauacuccuuggucau

SEQ ID NO: 1433965 - RNA, 19 nt, Artificial Sequence
  Description of Artificial Sequence: Synthetic oligonucleotide
  Antisense strand to SEQ ID NO: 1433964
augaccaaggaguaucaag

SEQ ID NO: 1433966 - RNA, 19 nt, Artificial Sequence
  Description of Artificial Sequence: Synthetic oligonucleotide
  Sense strand starting at position 982 of SEQ ID NO: 1243689
uugauacuccuuggucaug

SEQ ID NO: 1433967 - RNA, 19 nt, Artificial Sequence
  Description of Artificial Sequence: Synthetic oligonucleotide
  Antisense strand to SEQ ID NO: 1433966
caugaccaaggaguaucaa

SEQ ID NO: 1433968 - RNA, 19 nt, Artificial Sequence
  Description of Artificial Sequence: Synthetic oligonucleotide
  Sense strand starting at position 983 of SEQ ID NO: 1243689
ugauacuccuuggucauga

SEQ ID NO: 1433969 - RNA, 19 nt, Artificial Sequence
  Description of Artificial Sequence: Synthetic oligonucleotide
  Antisense strand to SEQ ID NO: 1433968
ucaugaccaaggaguauca

SEQ ID NO: 1433970 - RNA, 19 nt, Artificial Sequence
  Description of Artificial Sequence: Synthetic oligonucleotide
  Sense strand starting at position 984 of SEQ ID NO: 1243689
gauacuccuuggucaugau

SEQ ID NO: 1433971 - RNA, 19 nt, Artificial Sequence
  Description of Artificial Sequence: Synthetic oligonucleotide
  Antisense strand to SEQ ID NO: 1433970
aucaugaccaaggaguauc

SEQ ID NO: 1433972 - RNA, 19 nt, Artificial Sequence
  Description of Artificial Sequence: Synthetic oligonucleotide
  Sense strand starting at position 985 of SEQ ID NO: 1243689
auacuccuuggucaugaua

SEQ ID NO: 1433973 - RNA, 19 nt, Artificial Sequence
  Description of Artificial Sequence: Synthetic oligonucleotide
  Antisense strand to SEQ ID NO: 1433972
uaucaugaccaaggaguau

SEQ ID NO: 1433974 - RNA, 19 nt, Artificial Sequence
  Description of Artificial Sequence: Synthetic oligonucleotide
  Sense strand starting at position 1506 of SEQ ID NO: 1243689
gccugacauccagaaucca

SEQ ID NO: 1433975 - RNA, 19 nt, Artificial Sequence
  Description of Artificial Sequence: Synthetic oligonucleotide
  Antisense strand to SEQ ID NO: 1433974
uggauucuggaugucaggc

SEQ ID NO: 1433976 - RNA, 19 nt, Artificial Sequence
  Description of Artificial Sequence: Synthetic oligonucleotide
  Sense strand starting at position 1643 of SEQ ID NO: 1243689
gucugauucccagguucuu

SEQ ID NO: 1433977 - RNA, 19 nt, Artificial Sequence
  Description of Artificial Sequence: Synthetic oligonucleotide
  Antisense strand to SEQ ID NO: 1433976
aagaaccugggaaucagac

SEQ ID NO: 1433978 - RNA, 19 nt, Artificial Sequence
  Description of Artificial Sequence: Synthetic oligonucleotide
  Sense strand starting at position 1693 of SEQ ID NO: 1243689
ggcugaagcuuggagaaug

SEQ ID NO: 1433979 - RNA, 19 nt, Artificial Sequence
  Description of Artificial Sequence: Synthetic oligonucleotide
  Antisense strand to SEQ ID NO: 1433978
cauucuccaagcuucagcc

SEQ ID NO: 1433980 - RNA, 19 nt, Artificial Sequence
  Description of Artificial Sequence: Synthetic oligonucleotide
  Sense strand starting at position 1867 of SEQ ID NO: 1243689
ggaaauggauuggaacuua

SEQ ID NO: 1433981 - RNA, 19 nt, Artificial Sequence
  Description of Artificial Sequence: Synthetic oligonucleotide
  Antisense strand to SEQ ID NO: 1433980
uaaguuccaauccauuucc

SEQ ID NO: 1433982 - RNA, 19 nt, Artificial Sequence
  Description of Artificial Sequence: Synthetic oligonucleotide
  Sense strand starting at position 2061 of SEQ ID NO: 1243689
uucgcuuccugccucuaaa

SEQ ID NO: 1433983 - RNA, 19 nt, Artificial Sequence
  Description of Artificial Sequence: Synthetic oligonucleotide
  Antisense strand to SEQ ID NO: 1433982
uuuagaggcaggaagcgaa

SEQ ID NO: 1433984 - RNA, 19 nt, Artificial Sequence
  Description of Artificial Sequence: Synthetic oligonucleotide
  Sense strand starting at position 2254 of SEQ ID NO: 1243689
ggaguaaaguccuccaagc

SEQ ID NO: 1433985 - RNA, 19 nt, Artificial Sequence
  Description of Artificial Sequence: Synthetic oligonucleotide
  Antisense strand to SEQ ID NO: 1433984
gcuuggaggacuuuacucc

SEQ ID NO: 1433986 - RNA, 19 nt, Artificial Sequence
  Description of Artificial Sequence: Synthetic oligonucleotide
  Sense strand starting at position 2460 of SEQ ID NO: 1243689
agggucaugcugcaaggaa

SEQ ID NO: 1433987 - RNA, 19 nt, Artificial Sequence
  Description of Artificial Sequence: Synthetic oligonucleotide
  Antisense strand to SEQ ID NO: 1433986
uuccuugcagcaugacccu

SEQ ID NO: 1433988 - RNA, 19 nt, Artificial Sequence
  Description of Artificial Sequence: Synthetic oligonucleotide
  Sense strand starting at position 2566 of SEQ ID NO: 1243689
aucccaucccguugacaca

SEQ ID NO: 1433989 - RNA, 19 nt, Artificial Sequence
  Description of Artificial Sequence: Synthetic oligonucleotide
  Antisense strand to SEQ ID NO: 1433988
ugugucaacgggaugggau

SEQ ID NO: 1433990 - RNA, 19 nt, Artificial Sequence
  Description of Artificial Sequence: Synthetic oligonucleotide
  Sense strand starting at position 2590 of SEQ ID NO: 1243689
gcuccagugucccagagau

SEQ ID NO: 1433991 - RNA, 19 nt, Artificial Sequence
  Description of Artificial Sequence: Synthetic oligonucleotide
  Antisense strand to SEQ ID NO: 1433990
aucucugggacacuggagc

SEQ ID NO: 1433992 - RNA, 19 nt, Artificial Sequence
  Description of Artificial Sequence: Synthetic oligonucleotide
  Sense strand starting at position 2596 of SEQ ID NO: 1243689
gugucccagagaugcuaaa

SEQ ID NO: 1433993 - RNA, 19 nt, Artificial Sequence
  Description of Artificial Sequence: Synthetic oligonucleotide
  Antisense strand to SEQ ID NO: 1433992
uuuagcaucucugggacac

SEQ ID NO: 1433994 - RNA, 19 nt, Artificial Sequence
  Description of Artificial Sequence: Synthetic oligonucleotide
  Sense strand starting at position 2653 of SEQ ID NO: 1243689
ccaugugaauuugaauuau

SEQ ID NO: 1433995 - RNA, 19 nt, Artificial Sequence
  Description of Artificial Sequence: Synthetic oligonucleotide
  Antisense strand to SEQ ID NO: 1433994
auaauucaaauucacaugg

SEQ ID NO: 1433996 - RNA, 19 nt, Artificial Sequence
  Description of Artificial Sequence: Synthetic oligonucleotide
  Sense strand starting at position 2662 of SEQ ID NO: 1243689
uuugaauuaugcucacuug

SEQ ID NO: 1433997 - RNA, 19 nt, Artificial Sequence
  Description of Artificial Sequence: Synthetic oligonucleotide
  Antisense strand to SEQ ID NO: 1433996
caagugagcauaauucaaa

SEQ ID NO: 1433998 - RNA, 19 nt, Artificial Sequence
  Description of Artificial Sequence: Synthetic oligonucleotide
  Sense strand starting at position 2668 of SEQ ID NO: 1243689
uuaugcucacuuggaaauc

SEQ ID NO: 1433999 - RNA, 19 nt, Artificial Sequence
  Description of Artificial Sequence: Synthetic oligonucleotide
  Antisense strand to SEQ ID NO: 1433998
gauuuccaagugagcauaa

SEQ ID NO: 1434000 - RNA, 19 nt, Artificial Sequence
  Description of Artificial Sequence: Synthetic oligonucleotide
  Sense strand starting at position 3029 of SEQ ID NO: 1243689
uaaguaucagcuggguaca

SEQ ID NO: 1434001 - RNA, 19 nt, Artificial Sequence
  Description of Artificial Sequence: Synthetic oligonucleotide
  Antisense strand to SEQ ID NO: 1434000
uguacccagcugauacuua

SEQ ID NO: 1434002 - RNA, 19 nt, Artificial Sequence
  Description of Artificial Sequence: Synthetic oligonucleotide
  Sense strand starting at position 3349 of SEQ ID NO: 1243689
ucacuuuaggcccaaaugu

SEQ ID NO: 1434003 - RNA, 19 nt, Artificial Sequence
  Description of Artificial Sequence: Synthetic oligonucleotide
  Antisense strand to SEQ ID NO: 1434002
acauuugggccuaaaguga

SEQ ID NO: 1434004 - RNA, 19 nt, Artificial Sequence
  Description of Artificial Sequence: Synthetic oligonucleotide
  Sense strand starting at position 3500 of SEQ ID NO: 1243689
cuuugucuguguccugaca

SEQ ID NO: 1434005 - RNA, 19 nt, Artificial Sequence
  Description of Artificial Sequence: Synthetic oligonucleotide
  Antisense strand to SEQ ID NO: 1434004
ugucaggacacagacaaag

SEQ ID NO: 1434006 - RNA, 19 nt, Artificial Sequence
  Description of Artificial Sequence: Synthetic oligonucleotide
  Sense strand starting at position 3502 of SEQ ID NO: 1243689
uugucuguguccugacaac

SEQ ID NO: 1434007 - RNA, 19 nt, Artificial Sequence
  Description of Artificial Sequence: Synthetic oligonucleotide
  Antisense strand to SEQ ID NO: 1434006
guugucaggacacagacaa

SEQ ID NO: 1434008 - RNA, 19 nt, Artificial Sequence
  Description of Artificial Sequence: Synthetic oligonucleotide
  Sense strand starting at position 3530 of SEQ ID NO: 1243689
auuuauaugugcugggaca

SEQ ID NO: 1434009 - RNA, 19 nt, Artificial Sequence
  Description of Artificial Sequence: Synthetic oligonucleotide
  Antisense strand to SEQ ID NO: 1434008
ugucccagcacauauaaau

SEQ ID NO: 1434010 - RNA, 19 nt, Artificial Sequence
  Description of Artificial Sequence: Synthetic oligonucleotide
  Sense strand starting at position 3531 of SEQ ID NO: 1243689
uuuauaugugcugggacaa

SEQ ID NO: 1434011 - RNA, 19 nt, Artificial Sequence
  Description of Artificial Sequence: Synthetic oligonucleotide
  Antisense strand to SEQ ID NO: 1434010
uugucccagcacauauaaa

SEQ ID NO: 1434012 - RNA, 19 nt, Artificial Sequence
  Description of Artificial Sequence: Synthetic oligonucleotide
  Sense strand starting at position 3572 of SEQ ID NO: 1243689
uugggcuguuaauuaaaca

SEQ ID NO: 1434013 - RNA, 19 nt, Artificial Sequence
  Description of Artificial Sequence: Synthetic oligonucleotide
  Antisense strand to SEQ ID NO: 1434012
uguuuaauuaacagcccaa

SEQ ID NO: 1434014 - RNA, 19 nt, Artificial Sequence
  Description of Artificial Sequence: Synthetic oligonucleotide
  Sense strand starting at position 3638 of SEQ ID NO: 1243689
cuacauuauuucggucgga

SEQ ID NO: 1434015 - RNA, 19 nt, Artificial Sequence
  Description of Artificial Sequence: Synthetic oligonucleotide
  Antisense strand to SEQ ID NO: 1434014
uccgaccgaaauaauguag

SEQ ID NO: 1434016 - RNA, 19 nt, Artificial Sequence
  Description of Artificial Sequence: Synthetic oligonucleotide
  Sense strand starting at position 3643 of SEQ ID NO: 1243689
uuauuucggucggaauagu

SEQ ID NO: 1434017 - RNA, 19 nt, Artificial Sequence
  Description of Artificial Sequence: Synthetic oligonucleotide
  Antisense strand to SEQ ID NO: 1434016
acuauuccgaccgaaauaa

SEQ ID NO: 1434018 - RNA, 19 nt, Artificial Sequence
  Description of Artificial Sequence: Synthetic oligonucleotide
  Sense strand starting at position 3968 of SEQ ID NO: 1243689
aguggucacccucacagaa

SEQ ID NO: 1434019 - RNA, 19 nt, Artificial Sequence
  Description of Artificial Sequence: Synthetic oligonucleotide
  Antisense strand to SEQ ID NO: 1434018
uucugugagggugaccacu

SEQ ID NO: 1434020 - RNA, 19 nt, Artificial Sequence
  Description of Artificial Sequence: Synthetic oligonucleotide
  Sense strand starting at position 3970 of SEQ ID NO: 1243689
uggucacccucacagaaau

SEQ ID NO: 1434021 - RNA, 19 nt, Artificial Sequence
  Description of Artificial Sequence: Synthetic oligonucleotide
  Antisense strand to SEQ ID NO: 1434020
auuucugugagggugacca

SEQ ID NO: 1434022 - RNA, 19 nt, Artificial Sequence
  Description of Artificial Sequence: Synthetic oligonucleotide
  Sense strand starting at position 1065 of SEQ ID NO: 1243690
auguguucuuggguuggga

SEQ ID NO: 1434023 - RNA, 19 nt, Artificial Sequence
  Description of Artificial Sequence: Synthetic oligonucleotide
  Antisense strand to SEQ ID NO: 1434022
ucccaacccaagaacacau

SEQ ID NO: 1434024 - RNA, 19 nt, Artificial Sequence
  Description of Artificial Sequence: Synthetic oligonucleotide
  Sense strand starting at position 1250 of SEQ ID NO: 1243690
gagcaaucaugagcugaga

SEQ ID NO: 1434025 - RNA, 19 nt, Artificial Sequence
  Description of Artificial Sequence: Synthetic oligonucleotide
  Antisense strand to SEQ ID NO: 1434024
ucucagcucaugauugcuc

SEQ ID NO: 1434026 - RNA, 19 nt, Artificial Sequence
  Description of Artificial Sequence: Synthetic oligonucleotide
  Sense strand starting at position 1252 of SEQ ID NO: 1243690
gcaaucaugagcugagaca

SEQ ID NO: 1434027 - RNA, 19 nt, Artificial Sequence
  Description of Artificial Sequence: Synthetic oligonucleotide
  Antisense strand to SEQ ID NO: 1434026
ugucucagcucaugauugc

SEQ ID NO: 1434028 - RNA, 19 nt, Artificial Sequence
  Description of Artificial Sequence: Synthetic oligonucleotide
  Sense strand starting at position 1399 of SEQ ID NO: 1243690
gcugcuggauaucuugaaa

SEQ ID NO: 1434029 - RNA, 19 nt, Artificial Sequence
  Description of Artificial Sequence: Synthetic oligonucleotide
  Antisense strand to SEQ ID NO: 1434028
uuucaagauauccagcagc

SEQ ID NO: 1434030 - RNA, 19 nt, Artificial Sequence
  Description of Artificial Sequence: Synthetic oligonucleotide
  Sense strand starting at position 1402 of SEQ ID NO: 1243690
gcuggauaucuugaaaguc

SEQ ID NO: 1434031 - RNA, 19 nt, Artificial Sequence
  Description of Artificial Sequence: Synthetic oligonucleotide
  Antisense strand to SEQ ID NO: 1434030
gacuuucaagauauccagc

SEQ ID NO: 1434032 - RNA, 19 nt, Artificial Sequence
  Description of Artificial Sequence: Synthetic oligonucleotide
  Sense strand starting at position 1410 of SEQ ID NO: 1243690
ucuugaaaguccuuggcca

SEQ ID NO: 1434033 - RNA, 19 nt, Artificial Sequence
  Description of Artificial Sequence: Synthetic oligonucleotide
  Antisense strand to SEQ ID NO: 1434032
uggccaaggacuuucaaga

SEQ ID NO: 1434034 - RNA, 19 nt, Artificial Sequence
  Description of Artificial Sequence: Synthetic oligonucleotide
  Sense strand starting at position 1411 of SEQ ID NO: 1243690
cuugaaaguccuuggccau

SEQ ID NO: 1434035 - RNA, 19 nt, Artificial Sequence
  Description of Artificial Sequence: Synthetic oligonucleotide
  Antisense strand to SEQ ID NO: 1434034
auggccaaggacuuucaag

SEQ ID NO: 1434036 - RNA, 19 nt, Artificial Sequence
  Description of Artificial Sequence: Synthetic oligonucleotide
  Sense strand starting at position 1414 of SEQ ID NO: 1243690
gaaaguccuuggccaugau

SEQ ID NO: 1434037 - RNA, 19 nt, Artificial Sequence
  Description of Artificial Sequence: Synthetic oligonucleotide
  Antisense strand to SEQ ID NO: 1434036
aucauggccaaggacuuuc

SEQ ID NO: 1434038 - RNA, 19 nt, Artificial Sequence
  Description of Artificial Sequence: Synthetic oligonucleotide
  Sense strand starting at position 1607 of SEQ ID NO: 1243690
ugggaugagguuugaaauc

SEQ ID NO: 1434039 - RNA, 19 nt, Artificial Sequence
  Description of Artificial Sequence: Synthetic oligonucleotide
  Antisense strand to SEQ ID NO: 1434038
gauuucaaaccucauccca

SEQ ID NO: 1434040 - RNA, 19 nt, Artificial Sequence
  Description of Artificial Sequence: Synthetic oligonucleotide
  Sense strand starting at position 1795 of SEQ ID NO: 1243690
cucaguuaccugugaaagg

SEQ ID NO: 1434041 - RNA, 19 nt, Artificial Sequence
  Description of Artificial Sequence: Synthetic oligonucleotide
  Antisense strand to SEQ ID NO: 1434040
ccuuucacagguaacugag

SEQ ID NO: 1434042 - RNA, 19 nt, Artificial Sequence
  Description of Artificial Sequence: Synthetic oligonucleotide
  Sense strand starting at position 2021 of SEQ ID NO: 1243690
aggaaacagagcuguaacu

SEQ ID NO: 1434043 - RNA, 19 nt, Artificial Sequence
  Description of Artificial Sequence: Synthetic oligonucleotide
  Antisense strand to SEQ ID NO: 1434042
aguuacagcucuguuuccu

SEQ ID NO: 1434044 - RNA, 19 nt, Artificial Sequence
  Description of Artificial Sequence: Synthetic oligonucleotide
  Sense strand starting at position 2073 of SEQ ID NO: 1243690
cucuguucuuauucccaga

SEQ ID NO: 1434045 - RNA, 19 nt, Artificial Sequence
  Description of Artificial Sequence: Synthetic oligonucleotide
  Antisense strand to SEQ ID NO: 1434044
ucugggaauaagaacagag

SEQ ID NO: 1434046 - RNA, 19 nt, Artificial Sequence
  Description of Artificial Sequence: Synthetic oligonucleotide
  Sense strand starting at position 2075 of SEQ ID NO: 1243690
cuguucuuauucccagaga

SEQ ID NO: 1434047 - RNA, 19 nt, Artificial Sequence
  Description of Artificial Sequence: Synthetic oligonucleotide
  Antisense strand to SEQ ID NO: 1434046
ucucugggaauaagaacag

SEQ ID NO: 1434048 - RNA, 19 nt, Artificial Sequence
  Description of Artificial Sequence: Synthetic oligonucleotide
  Sense strand starting at position 2231 of SEQ ID NO: 1243690
cuccgaauuuaccagaacu

SEQ ID NO: 1434049 - RNA, 19 nt, Artificial Sequence
  Description of Artificial Sequence: Synthetic oligonucleotide
  Antisense strand to SEQ ID NO: 1434048
aguucugguaaauucggag

SEQ ID NO: 1434050 - RNA, 19 nt, Artificial Sequence
  Description of Artificial Sequence: Synthetic oligonucleotide
  Sense strand starting at position 2246 of SEQ ID NO: 1243690
aacugugggugucuccaaa

SEQ ID NO: 1434051 - RNA, 19 nt, Artificial Sequence
  Description of Artificial Sequence: Synthetic oligonucleotide
  Antisense strand to SEQ ID NO: 1434050
uuuggagacacccacaguu

SEQ ID NO: 1434052 - RNA, 19 nt, Artificial Sequence
  Description of Artificial Sequence: Synthetic oligonucleotide
  Sense strand starting at position 2286 of SEQ ID NO: 1243690
cgaccaguucucuacucuu

SEQ ID NO: 1434053 - RNA, 19 nt, Artificial Sequence
  Description of Artificial Sequence: Synthetic oligonucleotide
  Antisense strand to SEQ ID NO: 1434052
aagaguagagaacuggucg

SEQ ID NO: 1434054 - RNA, 19 nt, Artificial Sequence
  Description of Artificial Sequence: Synthetic oligonucleotide
  Sense strand starting at position 2559 of SEQ ID NO: 1243690
gcccuaaauucuccaaggu

SEQ ID NO: 1434055 - RNA, 19 nt, Artificial Sequence
  Description of Artificial Sequence: Synthetic oligonucleotide
  Antisense strand to SEQ ID NO: 1434054
accuuggagaauuuagggc

SEQ ID NO: 1434056 - RNA, 19 nt, Artificial Sequence
  Description of Artificial Sequence: Synthetic oligonucleotide
  Sense strand starting at position 2617 of SEQ ID NO: 1243690
ggacuucuguuacucccau

SEQ ID NO: 1434057 - RNA, 19 nt, Artificial Sequence
  Description of Artificial Sequence: Synthetic oligonucleotide
  Antisense strand to SEQ ID NO: 1434056
augggaguaacagaagucc

SEQ ID NO: 1434058 - RNA, 19 nt, Artificial Sequence
  Description of Artificial Sequence: Synthetic oligonucleotide
  Sense strand starting at position 2982 of SEQ ID NO: 1243690
gguugcauuagccaagauu

SEQ ID NO: 1434059 - RNA, 19 nt, Artificial Sequence
  Description of Artificial Sequence: Synthetic oligonucleotide
  Antisense strand to SEQ ID NO: 1434058
aaucuuggcuaaugcaacc

SEQ ID NO: 1434060 - RNA, 19 nt, Artificial Sequence
  Description of Artificial Sequence: Synthetic oligonucleotide
  Sense strand starting at position 3102 of SEQ ID NO: 1243690
gaggaagacuggcuuccau

SEQ ID NO: 1434061 - RNA, 19 nt, Artificial Sequence
  Description of Artificial Sequence: Synthetic oligonucleotide
  Antisense strand to SEQ ID NO: 1434060
auggaagccagucuuccuc

SEQ ID NO: 1434062 - RNA, 19 nt, Artificial Sequence
  Description of Artificial Sequence: Synthetic oligonucleotide
  Sense strand starting at position 3145 of SEQ ID NO: 1243690
cuacacuugcgcuaacaau

SEQ ID NO: 1434063 - RNA, 19 nt, Artificial Sequence
  Description of Artificial Sequence: Synthetic oligonucleotide
  Antisense strand to SEQ ID NO: 1434062
auuguuagcgcaaguguag

SEQ ID NO: 1434064 - RNA, 19 nt, Artificial Sequence
  Description of Artificial Sequence: Synthetic oligonucleotide
  Sense strand starting at position 3156 of SEQ ID NO: 1243690
cuaacaauagcucgggaaa

SEQ ID NO: 1434065 - RNA, 19 nt, Artificial Sequence
  Description of Artificial Sequence: Synthetic oligonucleotide
  Antisense strand to SEQ ID NO: 1434064
uuucccgagcuauuguuag

SEQ ID NO: 1434066 - RNA, 19 nt, Artificial Sequence
  Description of Artificial Sequence: Synthetic oligonucleotide
  Sense strand starting at position 3157 of SEQ ID NO: 1243690
uaacaauagcucgggaaag

SEQ ID NO: 1434067 - RNA, 19 nt, Artificial Sequence
  Description of Artificial Sequence: Synthetic oligonucleotide
  Antisense strand to SEQ ID NO: 1434066
cuuucccgagcuauuguua

SEQ ID NO: 1434068 - RNA, 19 nt, Artificial Sequence
  Description of Artificial Sequence: Synthetic oligonucleotide
  Sense strand starting at position 3233 of SEQ ID NO: 1243690
cgggcaggguuucuuauaa

SEQ ID NO: 1434069 - RNA, 19 nt, Artificial Sequence
  Description of Artificial Sequence: Synthetic oligonucleotide
  Antisense strand to SEQ ID NO: 1434068
uuauaagaaacccugcccg

SEQ ID NO: 1434070 - RNA, 19 nt, Artificial Sequence
  Description of Artificial Sequence: Synthetic oligonucleotide
  Sense strand starting at position 3433 of SEQ ID NO: 1243690
ugcugugauccagaacaua

SEQ ID NO: 1434071 - RNA, 19 nt, Artificial Sequence
  Description of Artificial Sequence: Synthetic oligonucleotide
  Antisense strand to SEQ ID NO: 1434070
uauguucuggaucacagca

SEQ ID NO: 1434072 - RNA, 19 nt, Artificial Sequence
  Description of Artificial Sequence: Synthetic oligonucleotide
  Sense strand starting at position 3474 of SEQ ID NO: 1243690
ggugcauuuguauguguua

SEQ ID NO: 1434073 - RNA, 19 nt, Artificial Sequence
  Description of Artificial Sequence: Synthetic oligonucleotide
  Antisense strand to SEQ ID NO: 1434072
uaacacauacaaaugcacc

SEQ ID NO: 1434074 - RNA, 19 nt, Artificial Sequence
  Description of Artificial Sequence: Synthetic oligonucleotide
  Sense strand starting at position 3476 of SEQ ID NO: 1243690
ugcauuuguauguguuacu

SEQ ID NO: 1434075 - RNA, 19 nt, Artificial Sequence
  Description of Artificial Sequence: Synthetic oligonucleotide
  Antisense strand to SEQ ID NO: 1434074
aguaacacauacaaaugca

SEQ ID NO: 1434076 - RNA, 19 nt, Artificial Sequence
  Description of Artificial Sequence: Synthetic oligonucleotide
  Sense strand starting at position 3477 of SEQ ID NO: 1243690
gcauuuguauguguuacuu

SEQ ID NO: 1434077 - RNA, 19 nt, Artificial Sequence
  Description of Artificial Sequence: Synthetic oligonucleotide
  Antisense strand to SEQ ID NO: 1434076
aaguaacacauacaaaugc

SEQ ID NO: 1434078 - RNA, 19 nt, Artificial Sequence
  Description of Artificial Sequence: Synthetic oligonucleotide
  Sense strand starting at position 3525 of SEQ ID NO: 1243690
guagcugcucaacaaguau

SEQ ID NO: 1434079 - RNA, 19 nt, Artificial Sequence
  Description of Artificial Sequence: Synthetic oligonucleotide
  Antisense strand to SEQ ID NO: 1434078
auacuuguugagcagcuac

SEQ ID NO: 1434080 - RNA, 19 nt, Artificial Sequence
  Description of Artificial Sequence: Synthetic oligonucleotide
  Sense strand starting at position 3540 of SEQ ID NO: 1243690
guaucuacugagugaguga

SEQ ID NO: 1434081 - RNA, 19 nt, Artificial Sequence
  Description of Artificial Sequence: Synthetic oligonucleotide
  Antisense strand to SEQ ID NO: 1434080
ucacucacucaguagauac

SEQ ID NO: 1434082 - RNA, 19 nt, Artificial Sequence
  Description of Artificial Sequence: Synthetic oligonucleotide
  Sense strand starting at position 3547 of SEQ ID NO: 1243690
cugagugagugagugaaua

SEQ ID NO: 1434083 - RNA, 19 nt, Artificial Sequence
  Description of Artificial Sequence: Synthetic oligonucleotide
  Antisense strand to SEQ ID NO: 1434082
uauucacucacucacucag

SEQ ID NO: 1434084 - RNA, 19 nt, Artificial Sequence
  Description of Artificial Sequence: Synthetic oligonucleotide
  Sense strand starting at position 3563 of SEQ ID NO: 1243690
auagaauaaugcguuugga

SEQ ID NO: 1434085 - RNA, 19 nt, Artificial Sequence
  Description of Artificial Sequence: Synthetic oligonucleotide
  Antisense strand to SEQ ID NO: 1434084
uccaaacgcauuauucuau

SEQ ID NO: 1434086 - RNA, 19 nt, Artificial Sequence
  Description of Artificial Sequence: Synthetic oligonucleotide
  Sense strand starting at position 3566 of SEQ ID NO: 1243690
gaauaaugcguuuggaaau

SEQ ID NO: 1434087 - RNA, 19 nt, Artificial Sequence
  Description of Artificial Sequence: Synthetic oligonucleotide
  Antisense strand to SEQ ID NO: 1434086
auuuccaaacgcauuauuc

SEQ ID NO: 1434088 - RNA, 19 nt, Artificial Sequence
  Description of Artificial Sequence: Synthetic oligonucleotide
  Sense strand starting at position 3580 of SEQ ID NO: 1243690
gaaauacacgguugacacu

SEQ ID NO: 1434089 - RNA, 19 nt, Artificial Sequence
  Description of Artificial Sequence: Synthetic oligonucleotide
  Antisense strand to SEQ ID NO: 1434088
agugucaaccguguauuuc

SEQ ID NO: 1434090 - RNA, 19 nt, Artificial Sequence
  Description of Artificial Sequence: Synthetic oligonucleotide
  Sense strand starting at position 3586 of SEQ ID NO: 1243690
cacgguugacacuaaaguu

SEQ ID NO: 1434091 - RNA, 19 nt, Artificial Sequence
  Description of Artificial Sequence: Synthetic oligonucleotide
  Antisense strand to SEQ ID NO: 1434090
aacuuuagugucaaccgug

SEQ ID NO: 1434092 - RNA, 19 nt, Artificial Sequence
  Description of Artificial Sequence: Synthetic oligonucleotide
  Sense strand starting at position 3608 of SEQ ID NO: 1243690
ugggacaaugcucaccuua

SEQ ID NO: 1434093 - RNA, 19 nt, Artificial Sequence
  Description of Artificial Sequence: Synthetic oligonucleotide
  Antisense strand to SEQ ID NO: 1434092
uaaggugagcauuguccca

SEQ ID NO: 1434094 - RNA, 19 nt, Artificial Sequence
  Description of Artificial Sequence: Synthetic oligonucleotide
  Sense strand starting at position 3610 of SEQ ID NO: 1243690
ggacaaugcucaccuuacu

SEQ ID NO: 1434095 - RNA, 19 nt, Artificial Sequence
  Description of Artificial Sequence: Synthetic oligonucleotide
  Antisense strand to SEQ ID NO: 1434094
aguaaggugagcauugucc

SEQ ID NO: 1434096 - RNA, 19 nt, Artificial Sequence
  Description of Artificial Sequence: Synthetic oligonucleotide
  Sense strand starting at position 3644 of SEQ ID NO: 1243690
aguuucccaguccauuaau

SEQ ID NO: 1434097 - RNA, 19 nt, Artificial Sequence
  Description of Artificial Sequence: Synthetic oligonucleotide
  Antisense strand to SEQ ID NO: 1434096
auuaauggacugggaaacu

SEQ ID NO: 1434098 - RNA, 19 nt, Artificial Sequence
  Description of Artificial Sequence: Synthetic oligonucleotide
  Sense strand starting at position 3653 of SEQ ID NO: 1243690
guccauuaaugggucacaa

SEQ ID NO: 1434099 - RNA, 19 nt, Artificial Sequence
  Description of Artificial Sequence: Synthetic oligonucleotide
  Antisense strand to SEQ ID NO: 1434098
uugugacccauuaauggac

SEQ ID NO: 1434100 - RNA, 19 nt, Artificial Sequence
  Description of Artificial Sequence: Synthetic oligonucleotide
  Sense strand starting at position 3761 of SEQ ID NO: 1243690
gauugucuacugcauguca

SEQ ID NO: 1434101 - RNA, 19 nt, Artificial Sequence
  Description of Artificial Sequence: Synthetic oligonucleotide
  Antisense strand to SEQ ID NO: 1434100
ugacaugcaguagacaauc

SEQ ID NO: 1434102 - RNA, 19 nt, Artificial Sequence
  Description of Artificial Sequence: Synthetic oligonucleotide
  Sense strand starting at position 47 of SEQ ID NO: 1243691
agggaaaugcggugacuuu

SEQ ID NO: 1434103 - RNA, 19 nt, Artificial Sequence
  Description of Artificial Sequence: Synthetic oligonucleotide
  Antisense strand to SEQ ID NO: 1434102
aaagucaccgcauuucccu

SEQ ID NO: 1434104 - RNA, 19 nt, Artificial Sequence
  Description of Artificial Sequence: Synthetic oligonucleotide
  Sense strand starting at position 183 of SEQ ID NO: 1243691
uucugucacccucagaaga

SEQ ID NO: 1434105 - RNA, 19 nt, Artificial Sequence
  Description of Artificial Sequence: Synthetic oligonucleotide
  Antisense strand to SEQ ID NO: 1434104
ucuucugagggugacagaa

SEQ ID NO: 1434106 - RNA, 19 nt, Artificial Sequence
  Description of Artificial Sequence: Synthetic oligonucleotide
  Sense strand starting at position 213 of SEQ ID NO: 1243691
cccguauucucucugagug

SEQ ID NO: 1434107 - RNA, 19 nt, Artificial Sequence
  Description of Artificial Sequence: Synthetic oligonucleotide
  Antisense strand to SEQ ID NO: 1434106
cacucagagagaauacggg

SEQ ID NO: 1434108 - RNA, 19 nt, Artificial Sequence
  Description of Artificial Sequence: Synthetic oligonucleotide
  Sense strand starting at position 463 of SEQ ID NO: 1243691
ugaggagucccucauucca

SEQ ID NO: 1434109 - RNA, 19 nt, Artificial Sequence
  Description of Artificial Sequence: Synthetic oligonucleotide
  Antisense strand to SEQ ID NO: 1434108
uggaaugagggacuccuca

SEQ ID NO: 1434110 - RNA, 19 nt, Artificial Sequence
  Description of Artificial Sequence: Synthetic oligonucleotide
  Sense strand starting at position 885 of SEQ ID NO: 1243691
agggaagggucuugggaga

SEQ ID NO: 1434111 - RNA, 19 nt, Artificial Sequence
  Description of Artificial Sequence: Synthetic oligonucleotide
  Antisense strand to SEQ ID NO: 1434110
ucucccaagacccuucccu

SEQ ID NO: 1434112 - RNA, 19 nt, Artificial Sequence
  Description of Artificial Sequence: Synthetic oligonucleotide
  Sense strand starting at position 1562 of SEQ ID NO: 1243691
gcacauguguucuuggguu

SEQ ID NO: 1434113 - RNA, 19 nt, Artificial Sequence
  Description of Artificial Sequence: Synthetic oligonucleotide
  Antisense strand to SEQ ID NO: 1434112
aacccaagaacacaugugc

SEQ ID NO: 1434114 - RNA, 19 nt, Artificial Sequence
  Description of Artificial Sequence: Synthetic oligonucleotide
  Sense strand starting at position 1566 of SEQ ID NO: 1243691
auguguucuuggguuggga

SEQ ID NO: 1434115 - RNA, 19 nt, Artificial Sequence
  Description of Artificial Sequence: Synthetic oligonucleotide
  Antisense strand to SEQ ID NO: 1434114
ucccaacccaagaacacau

SEQ ID NO: 1434116 - RNA, 19 nt, Artificial Sequence
  Description of Artificial Sequence: Synthetic oligonucleotide
  Sense strand starting at position 1751 of SEQ ID NO: 1243691
gagcaaucaugagcugaga

SEQ ID NO: 1434117 - RNA, 19 nt, Artificial Sequence
  Description of Artificial Sequence: Synthetic oligonucleotide
  Antisense strand to SEQ ID NO: 1434116
ucucagcucaugauugcuc

SEQ ID NO: 1434118 - RNA, 19 nt, Artificial Sequence
  Description of Artificial Sequence: Synthetic oligonucleotide
  Sense strand starting at position 1753 of SEQ ID NO: 1243691
gcaaucaugagcugagaca

SEQ ID NO: 1434119 - RNA, 19 nt, Artificial Sequence
  Description of Artificial Sequence: Synthetic oligonucleotide
  Antisense strand to SEQ ID NO: 1434118
ugucucagcucaugauugc

SEQ ID NO: 1434120 - RNA, 19 nt, Artificial Sequence
  Description of Artificial Sequence: Synthetic oligonucleotide
  Sense strand starting at position 1831 of SEQ ID NO: 1243691
ugggauucagccugcgagu

SEQ ID NO: 1434121 - RNA, 19 nt, Artificial Sequence
  Description of Artificial Sequence: Synthetic oligonucleotide
  Antisense strand to SEQ ID NO: 1434120
acucgcaggcugaauccca

SEQ ID NO: 1434122 - RNA, 19 nt, Artificial Sequence
  Description of Artificial Sequence: Synthetic oligonucleotide
  Sense strand starting at position 1900 of SEQ ID NO: 1243691
gcugcuggauaucuugaaa

SEQ ID NO: 1434123 - RNA, 19 nt, Artificial Sequence
  Description of Artificial Sequence: Synthetic oligonucleotide
  Antisense strand to SEQ ID NO: 1434122
uuucaagauauccagcagc

SEQ ID NO: 1434124 - RNA, 19 nt, Artificial Sequence
  Description of Artificial Sequence: Synthetic oligonucleotide
  Sense strand starting at position 1903 of SEQ ID NO: 1243691
gcuggauaucuugaaaguc

SEQ ID NO: 1434125 - RNA, 19 nt, Artificial Sequence
  Description of Artificial Sequence: Synthetic oligonucleotide
  Antisense strand to SEQ ID NO: 1434124
gacuuucaagauauccagc

SEQ ID NO: 1434126 - RNA, 19 nt, Artificial Sequence
  Description of Artificial Sequence: Synthetic oligonucleotide
  Sense strand starting at position 1911 of SEQ ID NO: 1243691
ucuugaaaguccuuggcca

SEQ ID NO: 1434127 - RNA, 19 nt, Artificial Sequence
  Description of Artificial Sequence: Synthetic oligonucleotide
  Antisense strand to SEQ ID NO: 1434126
uggccaaggacuuucaaga

SEQ ID NO: 1434128 - RNA, 19 nt, Artificial Sequence
  Description of Artificial Sequence: Synthetic oligonucleotide
  Sense strand starting at position 1912 of SEQ ID NO: 1243691
cuugaaaguccuuggccau

SEQ ID NO: 1434129 - RNA, 19 nt, Artificial Sequence
  Description of Artificial Sequence: Synthetic oligonucleotide
  Antisense strand to SEQ ID NO: 1434128
auggccaaggacuuucaag

SEQ ID NO: 1434130 - RNA, 19 nt, Artificial Sequence
  Description of Artificial Sequence: Synthetic oligonucleotide
  Sense strand starting at position 1915 of SEQ ID NO: 1243691
gaaaguccuuggccaugau

SEQ ID NO: 1434131 - RNA, 19 nt, Artificial Sequence
  Description of Artificial Sequence: Synthetic oligonucleotide
  Antisense strand to SEQ ID NO: 1434130
aucauggccaaggacuuuc

SEQ ID NO: 1434132 - RNA, 19 nt, Artificial Sequence
  Description of Artificial Sequence: Synthetic oligonucleotide
  Sense strand starting at position 2013 of SEQ ID NO: 1243691
ugcagauucacguggaggu

SEQ ID NO: 1434133 - RNA, 19 nt, Artificial Sequence
  Description of Artificial Sequence: Synthetic oligonucleotide
  Antisense strand to SEQ ID NO: 1434132
accuccacgugaaucugca

SEQ ID NO: 1434134 - RNA, 19 nt, Artificial Sequence
  Description of Artificial Sequence: Synthetic oligonucleotide
  Sense strand starting at position 2014 of SEQ ID NO: 1243691
gcagauucacguggagguu

SEQ ID NO: 1434135 - RNA, 19 nt, Artificial Sequence
  Description of Artificial Sequence: Synthetic oligonucleotide
  Antisense strand to SEQ ID NO: 1434134
aaccuccacgugaaucugc

SEQ ID NO: 1434136 - RNA, 19 nt, Artificial Sequence
  Description of Artificial Sequence: Synthetic oligonucleotide
  Sense strand starting at position 2029 of SEQ ID NO: 1243691
gguugauggugggauggaa

SEQ ID NO: 1434137 - RNA, 19 nt, Artificial Sequence
  Description of Artificial Sequence: Synthetic oligonucleotide
  Antisense strand to SEQ ID NO: 1434136
uuccaucccaccaucaacc

SEQ ID NO: 1434138 - RNA, 19 nt, Artificial Sequence
  Description of Artificial Sequence: Synthetic oligonucleotide
  Sense strand starting at position 2101 of SEQ ID NO: 1243691
gggcguuugggaugagguu

SEQ ID NO: 1434139 - RNA, 19 nt, Artificial Sequence
  Description of Artificial Sequence: Synthetic oligonucleotide
  Antisense strand to SEQ ID NO: 1434138
aaccucaucccaaacgccc

SEQ ID NO: 1434140 - RNA, 19 nt, Artificial Sequence
  Description of Artificial Sequence: Synthetic oligonucleotide
  Sense strand starting at position 2108 of SEQ ID NO: 1243691
ugggaugagguuugaaauc

SEQ ID NO: 1434141 - RNA, 19 nt, Artificial Sequence
  Description of Artificial Sequence: Synthetic oligonucleotide
  Antisense strand to SEQ ID NO: 1434140
gauuucaaaccucauccca

SEQ ID NO: 1434142 - RNA, 19 nt, Artificial Sequence
  Description of Artificial Sequence: Synthetic oligonucleotide
  Sense strand starting at position 2296 of SEQ ID NO: 1243691
cucaguuaccugugaaagg

SEQ ID NO: 1434143 - RNA, 19 nt, Artificial Sequence
  Description of Artificial Sequence: Synthetic oligonucleotide
  Antisense strand to SEQ ID NO: 1434142
ccuuucacagguaacugag

SEQ ID NO: 1434144 - RNA, 19 nt, Artificial Sequence
  Description of Artificial Sequence: Synthetic oligonucleotide
  Sense strand starting at position 2522 of SEQ ID NO: 1243691
aggaaacagagcuguaacu

SEQ ID NO: 1434145 - RNA, 19 nt, Artificial Sequence
  Description of Artificial Sequence: Synthetic oligonucleotide
  Antisense strand to SEQ ID NO: 1434144
aguuacagcucuguuuccu

SEQ ID NO: 1434146 - RNA, 19 nt, Artificial Sequence
  Description of Artificial Sequence: Synthetic oligonucleotide
  Sense strand starting at position 2568 of SEQ ID NO: 1243691
ggcuaucucuguucuuauu

SEQ ID NO: 1434147 - RNA, 19 nt, Artificial Sequence
  Description of Artificial Sequence: Synthetic oligonucleotide
  Antisense strand to SEQ ID NO: 1434146
aauaagaacagagauagcc

SEQ ID NO: 1434148 - RNA, 19 nt, Artificial Sequence
  Description of Artificial Sequence: Synthetic oligonucleotide
  Sense strand starting at position 2574 of SEQ ID NO: 1243691
cucuguucuuauucccaga

SEQ ID NO: 1434149 - RNA, 19 nt, Artificial Sequence
  Description of Artificial Sequence: Synthetic oligonucleotide
  Antisense strand to SEQ ID NO: 1434148
ucugggaauaagaacagag

SEQ ID NO: 1434150 - RNA, 19 nt, Artificial Sequence
  Description of Artificial Sequence: Synthetic oligonucleotide
  Sense strand starting at position 2576 of SEQ ID NO: 1243691
cuguucuuauucccagaga

SEQ ID NO: 1434151 - RNA, 19 nt, Artificial Sequence
  Description of Artificial Sequence: Synthetic oligonucleotide
  Antisense strand to SEQ ID NO: 1434150
ucucugggaauaagaacag

SEQ ID NO: 1434152 - RNA, 19 nt, Artificial Sequence
  Description of Artificial Sequence: Synthetic oligonucleotide
  Sense strand starting at position 2732 of SEQ ID NO: 1243691
cuccgaauuuaccagaacu

SEQ ID NO: 1434153 - RNA, 19 nt, Artificial Sequence
  Description of Artificial Sequence: Synthetic oligonucleotide
  Antisense strand to SEQ ID NO: 1434152
aguucugguaaauucggag

SEQ ID NO: 1434154 - RNA, 19 nt, Artificial Sequence
  Description of Artificial Sequence: Synthetic oligonucleotide
  Sense strand starting at position 2747 of SEQ ID NO: 1243691
aacugugggugucuccaaa

SEQ ID NO: 1434155 - RNA, 19 nt, Artificial Sequence
  Description of Artificial Sequence: Synthetic oligonucleotide
  Antisense strand to SEQ ID NO: 1434154
uuuggagacacccacaguu

SEQ ID NO: 1434156 - RNA, 19 nt, Artificial Sequence
  Description of Artificial Sequence: Synthetic oligonucleotide
  Sense strand starting at position 2787 of SEQ ID NO: 1243691
cgaccaguucucuacucuu

SEQ ID NO: 1434157 - RNA, 19 nt, Artificial Sequence
  Description of Artificial Sequence: Synthetic oligonucleotide
  Antisense strand to SEQ ID NO: 1434156
aagaguagagaacuggucg

SEQ ID NO: 1434158 - RNA, 19 nt, Artificial Sequence
  Description of Artificial Sequence: Synthetic oligonucleotide
  Sense strand starting at position 3060 of SEQ ID NO: 1243691
gcccuaaauucuccaaggu

SEQ ID NO: 1434159 - RNA, 19 nt, Artificial Sequence
  Description of Artificial Sequence: Synthetic oligonucleotide
  Antisense strand to SEQ ID NO: 1434158
accuuggagaauuuagggc

SEQ ID NO: 1434160 - RNA, 19 nt, Artificial Sequence
  Description of Artificial Sequence: Synthetic oligonucleotide
  Sense strand starting at position 3118 of SEQ ID NO: 1243691
ggacuucuguuacucccau

SEQ ID NO: 1434161 - RNA, 19 nt, Artificial Sequence
  Description of Artificial Sequence: Synthetic oligonucleotide
  Antisense strand to SEQ ID NO: 1434160
augggaguaacagaagucc

SEQ ID NO: 1434162 - RNA, 19 nt, Artificial Sequence
  Description of Artificial Sequence: Synthetic oligonucleotide
  Sense strand starting at position 3483 of SEQ ID NO: 1243691
gguugcauuagccaagauu

SEQ ID NO: 1434163 - RNA, 19 nt, Artificial Sequence
  Description of Artificial Sequence: Synthetic oligonucleotide
  Antisense strand to SEQ ID NO: 1434162
aaucuuggcuaaugcaacc

SEQ ID NO: 1434164 - RNA, 19 nt, Artificial Sequence
  Description of Artificial Sequence: Synthetic oligonucleotide
  Sense strand starting at position 3603 of SEQ ID NO: 1243691
gaggaagacuggcuuccau

SEQ ID NO: 1434165 - RNA, 19 nt, Artificial Sequence
  Description of Artificial Sequence: Synthetic oligonucleotide
  Antisense strand to SEQ ID NO: 1434164
auggaagccagucuuccuc

SEQ ID NO: 1434166 - RNA, 19 nt, Artificial Sequence
  Description of Artificial Sequence: Synthetic oligonucleotide
  Sense strand starting at position 3646 of SEQ ID NO: 1243691
cuacacuugcgcuaacaau

SEQ ID NO: 1434167 - RNA, 19 nt, Artificial Sequence
  Description of Artificial Sequence: Synthetic oligonucleotide
  Antisense strand to SEQ ID NO: 1434166
auuguuagcgcaaguguag

SEQ ID NO: 1434168 - RNA, 19 nt, Artificial Sequence
  Description of Artificial Sequence: Synthetic oligonucleotide
  Sense strand starting at position 3657 of SEQ ID NO: 1243691
cuaacaauagcucgggaaa

SEQ ID NO: 1434169 - RNA, 19 nt, Artificial Sequence
  Description of Artificial Sequence: Synthetic oligonucleotide
  Antisense strand to SEQ ID NO: 1434168
uuucccgagcuauuguuag

SEQ ID NO: 1434170 - RNA, 19 nt, Artificial Sequence
  Description of Artificial Sequence: Synthetic oligonucleotide
  Sense strand starting at position 3658 of SEQ ID NO: 1243691
uaacaauagcucgggaaag

SEQ ID NO: 1434171 - RNA, 19 nt, Artificial Sequence
  Description of Artificial Sequence: Synthetic oligonucleotide
  Antisense strand to SEQ ID NO: 1434170
cuuucccgagcuauuguua

SEQ ID NO: 1434172 - RNA, 19 nt, Artificial Sequence
  Description of Artificial Sequence: Synthetic oligonucleotide
  Sense strand starting at position 3734 of SEQ ID NO: 1243691
cgggcaggguuucuuauaa

SEQ ID NO: 1434173 - RNA, 19 nt, Artificial Sequence
  Description of Artificial Sequence: Synthetic oligonucleotide
  Antisense strand to SEQ ID NO: 1434172
uuauaagaaacccugcccg

SEQ ID NO: 1434174 - RNA, 19 nt, Artificial Sequence
  Description of Artificial Sequence: Synthetic oligonucleotide
  Sense strand starting at position 3934 of SEQ ID NO: 1243691
ugcugugauccagaacaua

SEQ ID NO: 1434175 - RNA, 19 nt, Artificial Sequence
  Description of Artificial Sequence: Synthetic oligonucleotide
  Antisense strand to SEQ ID NO: 1434174
uauguucuggaucacagca

SEQ ID NO: 1434176 - RNA, 19 nt, Artificial Sequence
  Description of Artificial Sequence: Synthetic oligonucleotide
  Sense strand starting at position 3975 of SEQ ID NO: 1243691
ggugcauuuguauguguua

SEQ ID NO: 1434177 - RNA, 19 nt, Artificial Sequence
  Description of Artificial Sequence: Synthetic oligonucleotide
  Antisense strand to SEQ ID NO: 1434176
uaacacauacaaaugcacc

SEQ ID NO: 1434178 - RNA, 19 nt, Artificial Sequence
  Description of Artificial Sequence: Synthetic oligonucleotide
  Sense strand starting at position 3977 of SEQ ID NO: 1243691
ugcauuuguauguguuacu

SEQ ID NO: 1434179 - RNA, 19 nt, Artificial Sequence
  Description of Artificial Sequence: Synthetic oligonucleotide
  Antisense strand to SEQ ID NO: 1434178
aguaacacauacaaaugca

SEQ ID NO: 1434180 - RNA, 19 nt, Artificial Sequence
  Description of Artificial Sequence: Synthetic oligonucleotide
  Sense strand starting at position 3978 of SEQ ID NO: 1243691
gcauuuguauguguuacuu

SEQ ID NO: 1434181 - RNA, 19 nt, Artificial Sequence
  Description of Artificial Sequence: Synthetic oligonucleotide
  Antisense strand to SEQ ID NO: 1434180
aaguaacacauacaaaugc

SEQ ID NO: 1434182 - RNA, 19 nt, Artificial Sequence
  Description of Artificial Sequence: Synthetic oligonucleotide
  Sense strand starting at position 107 of SEQ ID NO: 1243692
gcugcuguaugaccuauua

SEQ ID NO: 1434183 - RNA, 19 nt, Artificial Sequence
  Description of Artificial Sequence: Synthetic oligonucleotide
  Antisense strand to SEQ ID NO: 1434182
uaauaggucauacagcagc

SEQ ID NO: 1434184 - RNA, 19 nt, Artificial Sequence
  Description of Artificial Sequence: Synthetic oligonucleotide
  Sense strand starting at position 330 of SEQ ID NO: 1243692
ccugcauccacgucguuaa

SEQ ID NO: 1434185 - RNA, 19 nt, Artificial Sequence
  Description of Artificial Sequence: Synthetic oligonucleotide
  Antisense strand to SEQ ID NO: 1434184
uuaacgacguggaugcagg

SEQ ID NO: 1434186 - RNA, 19 nt, Artificial Sequence
  Description of Artificial Sequence: Synthetic oligonucleotide
  Sense strand starting at position 334 of SEQ ID NO: 1243692
cauccacgucguuaaguga

SEQ ID NO: 1434187 - RNA, 19 nt, Artificial Sequence
  Description of Artificial Sequence: Synthetic oligonucleotide
  Antisense strand to SEQ ID NO: 1434186
ucacuuaacgacguggaug

SEQ ID NO: 1434188 - RNA, 19 nt, Artificial Sequence
  Description of Artificial Sequence: Synthetic oligonucleotide
  Sense strand starting at position 341 of SEQ ID NO: 1243692
gucguuaagugauuauaca

SEQ ID NO: 1434189 - RNA, 19 nt, Artificial Sequence
  Description of Artificial Sequence: Synthetic oligonucleotide
  Antisense strand to SEQ ID NO: 1434188
uguauaaucacuuaacgac

SEQ ID NO: 1434190 - RNA, 19 nt, Artificial Sequence
  Description of Artificial Sequence: Synthetic oligonucleotide
  Sense strand starting at position 342 of SEQ ID NO: 1243692
ucguuaagugauuauacag

SEQ ID NO: 1434191 - RNA, 19 nt, Artificial Sequence
  Description of Artificial Sequence: Synthetic oligonucleotide
  Antisense strand to SEQ ID NO: 1434190
cuguauaaucacuuaacga

SEQ ID NO: 1434192 - RNA, 19 nt, Artificial Sequence
  Description of Artificial Sequence: Synthetic oligonucleotide
  Sense strand starting at position 485 of SEQ ID NO: 1243692
gcccaagcacucugaacau

SEQ ID NO: 1434193 - RNA, 19 nt, Artificial Sequence
  Description of Artificial Sequence: Synthetic oligonucleotide
  Antisense strand to SEQ ID NO: 1434192
auguucagagugcuugggc

SEQ ID NO: 1434194 - RNA, 19 nt, Artificial Sequence
  Description of Artificial Sequence: Synthetic oligonucleotide
  Sense strand starting at position 1120 of SEQ ID NO: 1243692
gcaccacuucuccagagga

SEQ ID NO: 1434195 - RNA, 19 nt, Artificial Sequence
  Description of Artificial Sequence: Synthetic oligonucleotide
  Antisense strand to SEQ ID NO: 1434194
uccucuggagaaguggugc

SEQ ID NO: 1434196 - RNA, 19 nt, Artificial Sequence
  Description of Artificial Sequence: Synthetic oligonucleotide
  Sense strand starting at position 1162 of SEQ ID NO: 1243692
aaguacucacuguggugaa

SEQ ID NO: 1434197 - RNA, 19 nt, Artificial Sequence
  Description of Artificial Sequence: Synthetic oligonucleotide
  Antisense strand to SEQ ID NO: 1434196
uucaccacagugaguacuu

SEQ ID NO: 1434198 - RNA, 19 nt, Artificial Sequence
  Description of Artificial Sequence: Synthetic oligonucleotide
  Sense strand starting at position 1653 of SEQ ID NO: 1243692
guggagguguuggcaaaga

SEQ ID NO: 1434199 - RNA, 19 nt, Artificial Sequence
  Description of Artificial Sequence: Synthetic oligonucleotide
  Antisense strand to SEQ ID NO: 1434198
ucuuugccaacaccuccac

SEQ ID NO: 1434200 - RNA, 19 nt, Artificial Sequence
  Description of Artificial Sequence: Synthetic oligonucleotide
  Sense strand starting at position 1664 of SEQ ID NO: 1243692
ggcaaagaucuggaugcua

SEQ ID NO: 1434201 - RNA, 19 nt, Artificial Sequence
  Description of Artificial Sequence: Synthetic oligonucleotide
  Antisense strand to SEQ ID NO: 1434200
uagcauccagaucuuugcc

SEQ ID NO: 1434202 - RNA, 19 nt, Artificial Sequence
  Description of Artificial Sequence: Synthetic oligonucleotide
  Sense strand starting at position 1666 of SEQ ID NO: 1243692
caaagaucuggaugcuaga

SEQ ID NO: 1434203 - RNA, 19 nt, Artificial Sequence
  Description of Artificial Sequence: Synthetic oligonucleotide
  Antisense strand to SEQ ID NO: 1434202
ucuagcauccagaucuuug

SEQ ID NO: 1434204 - RNA, 19 nt, Artificial Sequence
  Description of Artificial Sequence: Synthetic oligonucleotide
  Sense strand starting at position 1753 of SEQ ID NO: 1243692
gcuucagguugaucgaauu

SEQ ID NO: 1434205 - RNA, 19 nt, Artificial Sequence
  Description of Artificial Sequence: Synthetic oligonucleotide
  Antisense strand to SEQ ID NO: 1434204
aauucgaucaaccugaagc

SEQ ID NO: 1434206 - RNA, 19 nt, Artificial Sequence
  Description of Artificial Sequence: Synthetic oligonucleotide
  Sense strand starting at position 1800 of SEQ ID NO: 1243692
cugcuuaaaccuugacguu

SEQ ID NO: 1434207 - RNA, 19 nt, Artificial Sequence
  Description of Artificial Sequence: Synthetic oligonucleotide
  Antisense strand to SEQ ID NO: 1434206
aacgucaagguuuaagcag

SEQ ID NO: 1434208 - RNA, 19 nt, Artificial Sequence
  Description of Artificial Sequence: Synthetic oligonucleotide
  Sense strand starting at position 1846 of SEQ ID NO: 1243692
gcgccagaugcugugaguu

SEQ ID NO: 1434209 - RNA, 19 nt, Artificial Sequence
  Description of Artificial Sequence: Synthetic oligonucleotide
  Antisense strand to SEQ ID NO: 1434208
aacucacagcaucuggcgc

SEQ ID NO: 1434210 - RNA, 19 nt, Artificial Sequence
  Description of Artificial Sequence: Synthetic oligonucleotide
  Sense strand starting at position 1856 of SEQ ID NO: 1243692
cugugaguuuauccugaga

SEQ ID NO: 1434211 - RNA, 19 nt, Artificial Sequence
  Description of Artificial Sequence: Synthetic oligonucleotide
  Antisense strand to SEQ ID NO: 1434210
ucucaggauaaacucacag

SEQ ID NO: 1434212 - RNA, 19 nt, Artificial Sequence
  Description of Artificial Sequence: Synthetic oligonucleotide
  Sense strand starting at position 2018 of SEQ ID NO: 1243692
gagcuuagccaauggaaau

SEQ ID NO: 1434213 - RNA, 19 nt, Artificial Sequence
  Description of Artificial Sequence: Synthetic oligonucleotide
  Antisense strand to SEQ ID NO: 1434212
auuuccauuggcuaagcuc

SEQ ID NO: 1434214 - RNA, 19 nt, Artificial Sequence
  Description of Artificial Sequence: Synthetic oligonucleotide
  Sense strand starting at position 2057 of SEQ ID NO: 1243692
cgccacuagagacaagauu

SEQ ID NO: 1434215 - RNA, 19 nt, Artificial Sequence
  Description of Artificial Sequence: Synthetic oligonucleotide
  Antisense strand to SEQ ID NO: 1434214
aaucuugucucuaguggcg

SEQ ID NO: 1434216 - RNA, 19 nt, Artificial Sequence
  Description of Artificial Sequence: Synthetic oligonucleotide
  Sense strand starting at position 2129 of SEQ ID NO: 1243692
gccuguuaaccagcgcaua

SEQ ID NO: 1434217 - RNA, 19 nt, Artificial Sequence
  Description of Artificial Sequence: Synthetic oligonucleotide
  Antisense strand to SEQ ID NO: 1434216
uaugcgcugguuaacaggc

SEQ ID NO: 1434218 - RNA, 19 nt, Artificial Sequence
  Description of Artificial Sequence: Synthetic oligonucleotide
  Sense strand starting at position 2652 of SEQ ID NO: 1243692
gggcuucuucgaggguuga

SEQ ID NO: 1434219 - RNA, 19 nt, Artificial Sequence
  Description of Artificial Sequence: Synthetic oligonucleotide
  Antisense strand to SEQ ID NO: 1434218
ucaacccucgaagaagccc

SEQ ID NO: 1434220 - RNA, 19 nt, Artificial Sequence
  Description of Artificial Sequence: Synthetic oligonucleotide
  Sense strand starting at position 2694 of SEQ ID NO: 1243692
gcaggaagacagugcuaaa

SEQ ID NO: 1434221 - RNA, 19 nt, Artificial Sequence
  Description of Artificial Sequence: Synthetic oligonucleotide
  Antisense strand to SEQ ID NO: 1434220
uuuagcacugucuuccugc

SEQ ID NO: 1434222 - RNA, 19 nt, Artificial Sequence
  Description of Artificial Sequence: Synthetic oligonucleotide
  Sense strand starting at position 2742 of SEQ ID NO: 1243692
cggcauuccuuugcaucaa

SEQ ID NO: 1434223 - RNA, 19 nt, Artificial Sequence
  Description of Artificial Sequence: Synthetic oligonucleotide
  Antisense strand to SEQ ID NO: 1434222
uugaugcaaaggaaugccg

SEQ ID NO: 1434224 - RNA, 19 nt, Artificial Sequence
  Description of Artificial Sequence: Synthetic oligonucleotide
  Sense strand starting at position 2993 of SEQ ID NO: 1243692
gagucuguauuugaaagag

SEQ ID NO: 1434225 - RNA, 19 nt, Artificial Sequence
  Description of Artificial Sequence: Synthetic oligonucleotide
  Antisense strand to SEQ ID NO: 1434224
cucuuucaaauacagacuc

SEQ ID NO: 1434226 - RNA, 19 nt, Artificial Sequence
  Description of Artificial Sequence: Synthetic oligonucleotide
  Sense strand starting at position 3108 of SEQ ID NO: 1243692
uguguauucugauccugga

SEQ ID NO: 1434227 - RNA, 19 nt, Artificial Sequence
  Description of Artificial Sequence: Synthetic oligonucleotide
  Antisense strand to SEQ ID NO: 1434226
uccaggaucagaauacaca

SEQ ID NO: 1434228 - RNA, 19 nt, Artificial Sequence
  Description of Artificial Sequence: Synthetic oligonucleotide
  Sense strand starting at position 3111 of SEQ ID NO: 1243692
guauucugauccuggauuu

SEQ ID NO: 1434229 - RNA, 19 nt, Artificial Sequence
  Description of Artificial Sequence: Synthetic oligonucleotide
  Antisense strand to SEQ ID NO: 1434228
aaauccaggaucagaauac

SEQ ID NO: 1434230 - RNA, 19 nt, Artificial Sequence
  Description of Artificial Sequence: Synthetic oligonucleotide
  Sense strand starting at position 3122 of SEQ ID NO: 1243692
cuggauuugucagauggaa

SEQ ID NO: 1434231 - RNA, 19 nt, Artificial Sequence
  Description of Artificial Sequence: Synthetic oligonucleotide
  Antisense strand to SEQ ID NO: 1434230
uuccaucugacaaauccag

SEQ ID NO: 1434232 - RNA, 19 nt, Artificial Sequence
  Description of Artificial Sequence: Synthetic oligonucleotide
  Sense strand starting at position 3215 of SEQ ID NO: 1243692
gaaguacagccggaacuau

SEQ ID NO: 1434233 - RNA, 19 nt, Artificial Sequence
  Description of Artificial Sequence: Synthetic oligonucleotide
  Antisense strand to SEQ ID NO: 1434232
auaguuccggcuguacuuc

SEQ ID NO: 1434234 - RNA, 19 nt, Artificial Sequence
  Description of Artificial Sequence: Synthetic oligonucleotide
  Sense strand starting at position 3227 of SEQ ID NO: 1243692
gaacuauaggugggagcaa

SEQ ID NO: 1434235 - RNA, 19 nt, Artificial Sequence
  Description of Artificial Sequence: Synthetic oligonucleotide
  Antisense strand to SEQ ID NO: 1434234
uugcucccaccuauaguuc

SEQ ID NO: 1434236 - RNA, 19 nt, Artificial Sequence
  Description of Artificial Sequence: Synthetic oligonucleotide
  Sense strand starting at position 3497 of SEQ ID NO: 1243692
cagggcuuuccaggcuuaa

SEQ ID NO: 1434237 - RNA, 19 nt, Artificial Sequence
  Description of Artificial Sequence: Synthetic oligonucleotide
  Antisense strand to SEQ ID NO: 1434236
uuaagccuggaaagcccug

SEQ ID NO: 1434238 - RNA, 19 nt, Artificial Sequence
  Description of Artificial Sequence: Synthetic oligonucleotide
  Sense strand starting at position 3501 of SEQ ID NO: 1243692
gcuuuccaggcuuaaauca

SEQ ID NO: 1434239 - RNA, 19 nt, Artificial Sequence
  Description of Artificial Sequence: Synthetic oligonucleotide
  Antisense strand to SEQ ID NO: 1434238
ugauuuaagccuggaaagc

SEQ ID NO: 1434240 - RNA, 19 nt, Artificial Sequence
  Description of Artificial Sequence: Synthetic oligonucleotide
  Sense strand starting at position 3657 of SEQ ID NO: 1243692
ugaagcaaccuguagcauu

SEQ ID NO: 1434241 - RNA, 19 nt, Artificial Sequence
  Description of Artificial Sequence: Synthetic oligonucleotide
  Antisense strand to SEQ ID NO: 1434240
aaugcuacagguugcuuca

SEQ ID NO: 1434242 - RNA, 19 nt, Artificial Sequence
  Description of Artificial Sequence: Synthetic oligonucleotide
  Sense strand starting at position 3670 of SEQ ID NO: 1243692
agcauuaaaucagugguuu

SEQ ID NO: 1434243 - RNA, 19 nt, Artificial Sequence
  Description of Artificial Sequence: Synthetic oligonucleotide
  Antisense strand to SEQ ID NO: 1434242
aaaccacugauuuaaugcu

SEQ ID NO: 1434244 - RNA, 19 nt, Artificial Sequence
  Description of Artificial Sequence: Synthetic oligonucleotide
  Sense strand starting at position 3671 of SEQ ID NO: 1243692
gcauuaaaucagugguuua

SEQ ID NO: 1434245 - RNA, 19 nt, Artificial Sequence
  Description of Artificial Sequence: Synthetic oligonucleotide
  Antisense strand to SEQ ID NO: 1434244
uaaaccacugauuuaaugc

SEQ ID NO: 1434246 - RNA, 19 nt, Artificial Sequence
  Description of Artificial Sequence: Synthetic oligonucleotide
  Sense strand starting at position 3676 of SEQ ID NO: 1243692
aaaucagugguuuauugau

SEQ ID NO: 1434247 - RNA, 19 nt, Artificial Sequence
  Description of Artificial Sequence: Synthetic oligonucleotide
  Antisense strand to SEQ ID NO: 1434246
aucaauaaaccacugauuu

SEQ ID NO: 1434248 - RNA, 19 nt, Artificial Sequence
  Description of Artificial Sequence: Synthetic oligonucleotide
  Sense strand starting at position 3686 of SEQ ID NO: 1243692
uuuauugauccugggagcu

SEQ ID NO: 1434249 - RNA, 19 nt, Artificial Sequence
  Description of Artificial Sequence: Synthetic oligonucleotide
  Antisense strand to SEQ ID NO: 1434248
agcucccaggaucaauaaa

SEQ ID NO: 1434250 - RNA, 19 nt, Artificial Sequence
  Description of Artificial Sequence: Synthetic oligonucleotide
  Sense strand starting at position 3737 of SEQ ID NO: 1243692
ggcaaagauugauaaacuu

SEQ ID NO: 1434251 - RNA, 19 nt, Artificial Sequence
  Description of Artificial Sequence: Synthetic oligonucleotide
  Antisense strand to SEQ ID NO: 1434250
aaguuuaucaaucuuugcc

SEQ ID NO: 1434252 - RNA, 19 nt, Artificial Sequence
  Description of Artificial Sequence: Synthetic oligonucleotide
  Sense strand starting at position 3833 of SEQ ID NO: 1243692
aaaggucuaccauguguca

SEQ ID NO: 1434253 - RNA, 19 nt, Artificial Sequence
  Description of Artificial Sequence: Synthetic oligonucleotide
  Antisense strand to SEQ ID NO: 1434252
ugacacaugguagaccuuu

SEQ ID NO: 1434254 - RNA, 19 nt, Artificial Sequence
  Description of Artificial Sequence: Synthetic oligonucleotide
  Sense strand starting at position 3865 of SEQ ID NO: 1243692
ggugucauaucaucuuacu

SEQ ID NO: 1434255 - RNA, 19 nt, Artificial Sequence
  Description of Artificial Sequence: Synthetic oligonucleotide
  Antisense strand to SEQ ID NO: 1434254
aguaagaugauaugacacc

SEQ ID NO: 1434256 - RNA, 19 nt, Artificial Sequence
  Description of Artificial Sequence: Synthetic oligonucleotide
  Sense strand starting at position 3906 of SEQ ID NO: 1243692
agguacauguucuuguuau

SEQ ID NO: 1434257 - RNA, 19 nt, Artificial Sequence
  Description of Artificial Sequence: Synthetic oligonucleotide
  Antisense strand to SEQ ID NO: 1434256
auaacaagaacauguaccu

SEQ ID NO: 1434258 - RNA, 19 nt, Artificial Sequence
  Description of Artificial Sequence: Synthetic oligonucleotide
  Sense strand starting at position 3964 of SEQ ID NO: 1243692
aguaaagugcuguguccaa

SEQ ID NO: 1434259 - RNA, 19 nt, Artificial Sequence
  Description of Artificial Sequence: Synthetic oligonucleotide
  Antisense strand to SEQ ID NO: 1434258
uuggacacagcacuuuacu

SEQ ID NO: 1434260 - RNA, 19 nt, Artificial Sequence
  Description of Artificial Sequence: Synthetic oligonucleotide
  Sense strand starting at position 3968 of SEQ ID NO: 1243692
aagugcuguguccaaguua

SEQ ID NO: 1434261 - RNA, 19 nt, Artificial Sequence
  Description of Artificial Sequence: Synthetic oligonucleotide
  Antisense strand to SEQ ID NO: 1434260
uaacuuggacacagcacuu

SEQ ID NO: 1434262 - RNA, 19 nt, Artificial Sequence
  Description of Artificial Sequence: Synthetic oligonucleotide
  Sense strand starting at position 21 of SEQ ID NO: 1243693
acaagaaguccgcacuuaa

SEQ ID NO: 1434263 - RNA, 19 nt, Artificial Sequence
  Description of Artificial Sequence: Synthetic oligonucleotide
  Antisense strand to SEQ ID NO: 1434262
uuaagugcggacuucuugu

SEQ ID NO: 1434264 - RNA, 19 nt, Artificial Sequence
  Description of Artificial Sequence: Synthetic oligonucleotide
  Sense strand starting at position 89 of SEQ ID NO: 1243693
ggaguugaggucgggaaga

SEQ ID NO: 1434265 - RNA, 19 nt, Artificial Sequence
  Description of Artificial Sequence: Synthetic oligonucleotide
  Antisense strand to SEQ ID NO: 1434264
ucuucccgaccucaacucc

SEQ ID NO: 1434266 - RNA, 19 nt, Artificial Sequence
  Description of Artificial Sequence: Synthetic oligonucleotide
  Sense strand starting at position 217 of SEQ ID NO: 1243693
cgacuccuccuacaguuaa

SEQ ID NO: 1434267 - RNA, 19 nt, Artificial Sequence
  Description of Artificial Sequence: Synthetic oligonucleotide
  Antisense strand to SEQ ID NO: 1434266
uuaacuguaggaggagucg

SEQ ID NO: 1434268 - RNA, 19 nt, Artificial Sequence
  Description of Artificial Sequence: Synthetic oligonucleotide
  Sense strand starting at position 1399 of SEQ ID NO: 1243693
ccuggucuuccuggaggau

SEQ ID NO: 1434269 - RNA, 19 nt, Artificial Sequence
  Description of Artificial Sequence: Synthetic oligonucleotide
  Antisense strand to SEQ ID NO: 1434268
auccuccaggaagaccagg

SEQ ID NO: 1434270 - RNA, 19 nt, Artificial Sequence
  Description of Artificial Sequence: Synthetic oligonucleotide
  Sense strand starting at position 1559 of SEQ ID NO: 1243693
uacgcugguccugggagaa

SEQ ID NO: 1434271 - RNA, 19 nt, Artificial Sequence
  Description of Artificial Sequence: Synthetic oligonucleotide
  Antisense strand to SEQ ID NO: 1434270
uucucccaggaccagcgua

SEQ ID NO: 1434272 - RNA, 19 nt, Artificial Sequence
  Description of Artificial Sequence: Synthetic oligonucleotide
  Sense strand starting at position 2499 of SEQ ID NO: 1243693
uacagaugugcucaggugu

SEQ ID NO: 1434273 - RNA, 19 nt, Artificial Sequence
  Description of Artificial Sequence: Synthetic oligonucleotide
  Antisense strand to SEQ ID NO: 1434272
acaccugagcacaucugua

SEQ ID NO: 1434274 - RNA, 19 nt, Artificial Sequence
  Description of Artificial Sequence: Synthetic oligonucleotide
  Sense strand starting at position 2522 of SEQ ID NO: 1243693
gcuugugggagagauaagu

SEQ ID NO: 1434275 - RNA, 19 nt, Artificial Sequence
  Description of Artificial Sequence: Synthetic oligonucleotide
  Antisense strand to SEQ ID NO: 1434274
acuuaucucucccacaagc

SEQ ID NO: 1434276 - RNA, 19 nt, Artificial Sequence
  Description of Artificial Sequence: Synthetic oligonucleotide
  Sense strand starting at position 2589 of SEQ ID NO: 1243693
gacuccugagggugugaga

SEQ ID NO: 1434277 - RNA, 19 nt, Artificial Sequence
  Description of Artificial Sequence: Synthetic oligonucleotide
  Antisense strand to SEQ ID NO: 1434276
ucucacacccucaggaguc

SEQ ID NO: 1434278 - RNA, 19 nt, Artificial Sequence
  Description of Artificial Sequence: Synthetic oligonucleotide
  Sense strand starting at position 2621 of SEQ ID NO: 1243693
gagcgaguugcuguguagu

SEQ ID NO: 1434279 - RNA, 19 nt, Artificial Sequence
  Description of Artificial Sequence: Synthetic oligonucleotide
  Antisense strand to SEQ ID NO: 1434278
acuacacagcaacucgcuc

SEQ ID NO: 1434280 - RNA, 19 nt, Artificial Sequence
  Description of Artificial Sequence: Synthetic oligonucleotide
  Sense strand starting at position 2660 of SEQ ID NO: 1243693
gcgaguguggugccaagua

SEQ ID NO: 1434281 - RNA, 19 nt, Artificial Sequence
  Description of Artificial Sequence: Synthetic oligonucleotide
  Antisense strand to SEQ ID NO: 1434280
uacuuggcaccacacucgc

SEQ ID NO: 1434282 - RNA, 19 nt, Artificial Sequence
  Description of Artificial Sequence: Synthetic oligonucleotide
  Sense strand starting at position 2673 of SEQ ID NO: 1243693
caaguauugggugugcgua

SEQ ID NO: 1434283 - RNA, 19 nt, Artificial Sequence
  Description of Artificial Sequence: Synthetic oligonucleotide
  Antisense strand to SEQ ID NO: 1434282
uacgcacacccaauacuug

SEQ ID NO: 1434284 - RNA, 19 nt, Artificial Sequence
  Description of Artificial Sequence: Synthetic oligonucleotide
  Sense strand starting at position 2705 of SEQ ID NO: 1243693
guaugugugaaugggcauu

SEQ ID NO: 1434285 - RNA, 19 nt, Artificial Sequence
  Description of Artificial Sequence: Synthetic oligonucleotide
  Antisense strand to SEQ ID NO: 1434284
aaugcccauucacacauac

SEQ ID NO: 1434286 - RNA, 19 nt, Artificial Sequence
  Description of Artificial Sequence: Synthetic oligonucleotide
  Sense strand starting at position 2726 of SEQ ID NO: 1243693
ugugaaacucuugaaugug

SEQ ID NO: 1434287 - RNA, 19 nt, Artificial Sequence
  Description of Artificial Sequence: Synthetic oligonucleotide
  Antisense strand to SEQ ID NO: 1434286
cacauucaagaguuucaca

SEQ ID NO: 1434288 - RNA, 19 nt, Artificial Sequence
  Description of Artificial Sequence: Synthetic oligonucleotide
  Sense strand starting at position 2849 of SEQ ID NO: 1243693
gaguccuggguuugaaaug

SEQ ID NO: 1434289 - RNA, 19 nt, Artificial Sequence
  Description of Artificial Sequence: Synthetic oligonucleotide
  Antisense strand to SEQ ID NO: 1434288
cauuucaaacccaggacuc

SEQ ID NO: 1434290 - RNA, 19 nt, Artificial Sequence
  Description of Artificial Sequence: Synthetic oligonucleotide
  Sense strand starting at position 2854 of SEQ ID NO: 1243693
cuggguuugaaaugcaugu

SEQ ID NO: 1434291 - RNA, 19 nt, Artificial Sequence
  Description of Artificial Sequence: Synthetic oligonucleotide
  Antisense strand to SEQ ID NO: 1434290
acaugcauuucaaacccag

SEQ ID NO: 1434292 - RNA, 19 nt, Artificial Sequence
  Description of Artificial Sequence: Synthetic oligonucleotide
  Sense strand starting at position 2860 of SEQ ID NO: 1243693
uugaaaugcauguguugau

SEQ ID NO: 1434293 - RNA, 19 nt, Artificial Sequence
  Description of Artificial Sequence: Synthetic oligonucleotide
  Antisense strand to SEQ ID NO: 1434292
aucaacacaugcauuucaa

SEQ ID NO: 1434294 - RNA, 19 nt, Artificial Sequence
  Description of Artificial Sequence: Synthetic oligonucleotide
  Sense strand starting at position 2872 of SEQ ID NO: 1243693
uguugauguguggauggau

SEQ ID NO: 1434295 - RNA, 19 nt, Artificial Sequence
  Description of Artificial Sequence: Synthetic oligonucleotide
  Antisense strand to SEQ ID NO: 1434294
auccauccacacaucaaca

SEQ ID NO: 1434296 - RNA, 19 nt, Artificial Sequence
  Description of Artificial Sequence: Synthetic oligonucleotide
  Sense strand starting at position 2875 of SEQ ID NO: 1243693
ugauguguggauggauauc

SEQ ID NO: 1434297 - RNA, 19 nt, Artificial Sequence
  Description of Artificial Sequence: Synthetic oligonucleotide
  Antisense strand to SEQ ID NO: 1434296
gauauccauccacacauca

SEQ ID NO: 1434298 - RNA, 19 nt, Artificial Sequence
  Description of Artificial Sequence: Synthetic oligonucleotide
  Sense strand starting at position 2884 of SEQ ID NO: 1243693
gauggauaucaggguuucu

SEQ ID NO: 1434299 - RNA, 19 nt, Artificial Sequence
  Description of Artificial Sequence: Synthetic oligonucleotide
  Antisense strand to SEQ ID NO: 1434298
agaaacccugauauccauc

SEQ ID NO: 1434300 - RNA, 19 nt, Artificial Sequence
  Description of Artificial Sequence: Synthetic oligonucleotide
  Sense strand starting at position 2889 of SEQ ID NO: 1243693
auaucaggguuucuagaug

SEQ ID NO: 1434301 - RNA, 19 nt, Artificial Sequence
  Description of Artificial Sequence: Synthetic oligonucleotide
  Antisense strand to SEQ ID NO: 1434300
caucuagaaacccugauau

SEQ ID NO: 1434302 - RNA, 19 nt, Artificial Sequence
  Description of Artificial Sequence: Synthetic oligonucleotide
  Sense strand starting at position 2943 of SEQ ID NO: 1243693
ugugcauguguuguaugua

SEQ ID NO: 1434303 - RNA, 19 nt, Artificial Sequence
  Description of Artificial Sequence: Synthetic oligonucleotide
  Antisense strand to SEQ ID NO: 1434302
uacauacaacacaugcaca

SEQ ID NO: 1434304 - RNA, 19 nt, Artificial Sequence
  Description of Artificial Sequence: Synthetic oligonucleotide
  Sense strand starting at position 2948 of SEQ ID NO: 1243693
auguguuguauguaaugag

SEQ ID NO: 1434305 - RNA, 19 nt, Artificial Sequence
  Description of Artificial Sequence: Synthetic oligonucleotide
  Antisense strand to SEQ ID NO: 1434304
cucauuacauacaacacau

SEQ ID NO: 1434306 - RNA, 19 nt, Artificial Sequence
  Description of Artificial Sequence: Synthetic oligonucleotide
  Sense strand starting at position 2952 of SEQ ID NO: 1243693
guuguauguaaugaguaug

SEQ ID NO: 1434307 - RNA, 19 nt, Artificial Sequence
  Description of Artificial Sequence: Synthetic oligonucleotide
  Antisense strand to SEQ ID NO: 1434306
cauacucauuacauacaac

SEQ ID NO: 1434308 - RNA, 19 nt, Artificial Sequence
  Description of Artificial Sequence: Synthetic oligonucleotide
  Sense strand starting at position 2955 of SEQ ID NO: 1243693
guauguaaugaguaugugu

SEQ ID NO: 1434309 - RNA, 19 nt, Artificial Sequence
  Description of Artificial Sequence: Synthetic oligonucleotide
  Antisense strand to SEQ ID NO: 1434308
acacauacucauuacauac

SEQ ID NO: 1434310 - RNA, 19 nt, Artificial Sequence
  Description of Artificial Sequence: Synthetic oligonucleotide
  Sense strand starting at position 2960 of SEQ ID NO: 1243693
uaaugaguauguguguuga

SEQ ID NO: 1434311 - RNA, 19 nt, Artificial Sequence
  Description of Artificial Sequence: Synthetic oligonucleotide
  Antisense strand to SEQ ID NO: 1434310
ucaacacacauacucauua

SEQ ID NO: 1434312 - RNA, 19 nt, Artificial Sequence
  Description of Artificial Sequence: Synthetic oligonucleotide
  Sense strand starting at position 3030 of SEQ ID NO: 1243693
agggacaucccaugugugu

SEQ ID NO: 1434313 - RNA, 19 nt, Artificial Sequence
  Description of Artificial Sequence: Synthetic oligonucleotide
  Antisense strand to SEQ ID NO: 1434312
acacacaugggaugucccu

SEQ ID NO: 1434314 - RNA, 19 nt, Artificial Sequence
  Description of Artificial Sequence: Synthetic oligonucleotide
  Sense strand starting at position 3230 of SEQ ID NO: 1243693
uccagacauuauccggaga

SEQ ID NO: 1434315 - RNA, 19 nt, Artificial Sequence
  Description of Artificial Sequence: Synthetic oligonucleotide
  Antisense strand to SEQ ID NO: 1434314
ucuccggauaaugucugga

SEQ ID NO: 1434316 - RNA, 19 nt, Artificial Sequence
  Description of Artificial Sequence: Synthetic oligonucleotide
  Sense strand starting at position 3248 of SEQ ID NO: 1243693
aguagaauuugguggugga

SEQ ID NO: 1434317 - RNA, 19 nt, Artificial Sequence
  Description of Artificial Sequence: Synthetic oligonucleotide
  Antisense strand to SEQ ID NO: 1434316
uccaccaccaaauucuacu

SEQ ID NO: 1434318 - RNA, 19 nt, Artificial Sequence
  Description of Artificial Sequence: Synthetic oligonucleotide
  Sense strand starting at position 3293 of SEQ ID NO: 1243693
ggaggaugcuccaguggaa

SEQ ID NO: 1434319 - RNA, 19 nt, Artificial Sequence
  Description of Artificial Sequence: Synthetic oligonucleotide
  Antisense strand to SEQ ID NO: 1434318
uuccacuggagcauccucc

SEQ ID NO: 1434320 - RNA, 19 nt, Artificial Sequence
  Description of Artificial Sequence: Synthetic oligonucleotide
  Sense strand starting at position 3296 of SEQ ID NO: 1243693
ggaugcuccaguggaagaa

SEQ ID NO: 1434321 - RNA, 19 nt, Artificial Sequence
  Description of Artificial Sequence: Synthetic oligonucleotide
  Antisense strand to SEQ ID NO: 1434320
uucuuccacuggagcaucc

SEQ ID NO: 1434322 - RNA, 19 nt, Artificial Sequence
  Description of Artificial Sequence: Synthetic oligonucleotide
  Sense strand starting at position 3312 of SEQ ID NO: 1243693
gaaggaccaacguguguau

SEQ ID NO: 1434323 - RNA, 19 nt, Artificial Sequence
  Description of Artificial Sequence: Synthetic oligonucleotide
  Antisense strand to SEQ ID NO: 1434322
auacacacguugguccuuc

SEQ ID NO: 1434324 - RNA, 19 nt, Artificial Sequence
  Description of Artificial Sequence: Synthetic oligonucleotide
  Sense strand starting at position 3388 of SEQ ID NO: 1243693
cgucuuuguaaugaugaau

SEQ ID NO: 1434325 - RNA, 19 nt, Artificial Sequence
  Description of Artificial Sequence: Synthetic oligonucleotide
  Antisense strand to SEQ ID NO: 1434324
auucaucauuacaaagacg

SEQ ID NO: 1434326 - RNA, 19 nt, Artificial Sequence
  Description of Artificial Sequence: Synthetic oligonucleotide
  Sense strand starting at position 3416 of SEQ ID NO: 1243693
uuuggccagaucuguugaa

SEQ ID NO: 1434327 - RNA, 19 nt, Artificial Sequence
  Description of Artificial Sequence: Synthetic oligonucleotide
  Antisense strand to SEQ ID NO: 1434326
uucaacagaucuggccaaa

SEQ ID NO: 1434328 - RNA, 19 nt, Artificial Sequence
  Description of Artificial Sequence: Synthetic oligonucleotide
  Sense strand starting at position 3417 of SEQ ID NO: 1243693
uuggccagaucuguugaau

SEQ ID NO: 1434329 - RNA, 19 nt, Artificial Sequence
  Description of Artificial Sequence: Synthetic oligonucleotide
  Antisense strand to SEQ ID NO: 1434328
auucaacagaucuggccaa

SEQ ID NO: 1434330 - RNA, 19 nt, Artificial Sequence
  Description of Artificial Sequence: Synthetic oligonucleotide
  Sense strand starting at position 3420 of SEQ ID NO: 1243693
gccagaucuguugaaugag

SEQ ID NO: 1434331 - RNA, 19 nt, Artificial Sequence
  Description of Artificial Sequence: Synthetic oligonucleotide
  Antisense strand to SEQ ID NO: 1434330
cucauucaacagaucuggc

SEQ ID NO: 1434332 - RNA, 19 nt, Artificial Sequence
  Description of Artificial Sequence: Synthetic oligonucleotide
  Sense strand starting at position 3430 of SEQ ID NO: 1243693
uugaaugagcuguggguuu

SEQ ID NO: 1434333 - RNA, 19 nt, Artificial Sequence
  Description of Artificial Sequence: Synthetic oligonucleotide
  Antisense strand to SEQ ID NO: 1434332
aaacccacagcucauucaa

SEQ ID NO: 1434334 - RNA, 19 nt, Artificial Sequence
  Description of Artificial Sequence: Synthetic oligonucleotide
  Sense strand starting at position 3442 of SEQ ID NO: 1243693
uggguuuccaagcaggaga

SEQ ID NO: 1434335 - RNA, 19 nt, Artificial Sequence
  Description of Artificial Sequence: Synthetic oligonucleotide
  Antisense strand to SEQ ID NO: 1434334
ucuccugcuuggaaaccca

SEQ ID NO: 1434336 - RNA, 19 nt, Artificial Sequence
  Description of Artificial Sequence: Synthetic oligonucleotide
  Sense strand starting at position 3507 of SEQ ID NO: 1243693
cccuuacagcgugaugacu

SEQ ID NO: 1434337 - RNA, 19 nt, Artificial Sequence
  Description of Artificial Sequence: Synthetic oligonucleotide
  Antisense strand to SEQ ID NO: 1434336
agucaucacgcuguaaggg

SEQ ID NO: 1434338 - RNA, 19 nt, Artificial Sequence
  Description of Artificial Sequence: Synthetic oligonucleotide
  Sense strand starting at position 3530 of SEQ ID NO: 1243693
gcaucuggucucuggagaa

SEQ ID NO: 1434339 - RNA, 19 nt, Artificial Sequence
  Description of Artificial Sequence: Synthetic oligonucleotide
  Antisense strand to SEQ ID NO: 1434338
uucuccagagaccagaugc

SEQ ID NO: 1434340 - RNA, 19 nt, Artificial Sequence
  Description of Artificial Sequence: Synthetic oligonucleotide
  Sense strand starting at position 3844 of SEQ ID NO: 1243693
ggguuugguugcuugaaga

SEQ ID NO: 1434341 - RNA, 19 nt, Artificial Sequence
  Description of Artificial Sequence: Synthetic oligonucleotide
  Antisense strand to SEQ ID NO: 1434340
ucuucaagcaaccaaaccc

SEQ ID NO: 1434342 - RNA, 19 nt, Artificial Sequence
  Description of Artificial Sequence: Synthetic oligonucleotide
  Sense strand starting at position 189 of SEQ ID NO: 1243694
uggcacaguuuccugagaa

SEQ ID NO: 1434343 - RNA, 19 nt, Artificial Sequence
  Description of Artificial Sequence: Synthetic oligonucleotide
  Antisense strand to SEQ ID NO: 1434342
uucucaggaaacugugcca

SEQ ID NO: 1434344 - RNA, 19 nt, Artificial Sequence
  Description of Artificial Sequence: Synthetic oligonucleotide
  Sense strand starting at position 564 of SEQ ID NO: 1243694
agcaaauauguggagucau

SEQ ID NO: 1434345 - RNA, 19 nt, Artificial Sequence
  Description of Artificial Sequence: Synthetic oligonucleotide
  Antisense strand to SEQ ID NO: 1434344
augacuccacauauuugcu

SEQ ID NO: 1434346 - RNA, 19 nt, Artificial Sequence
  Description of Artificial Sequence: Synthetic oligonucleotide
  Sense strand starting at position 578 of SEQ ID NO: 1243694
gucauauuauauccacagu

SEQ ID NO: 1434347 - RNA, 19 nt, Artificial Sequence
  Description of Artificial Sequence: Synthetic oligonucleotide
  Antisense strand to SEQ ID NO: 1434346
acuguggauauaauaugac

SEQ ID NO: 1434348 - RNA, 19 nt, Artificial Sequence
  Description of Artificial Sequence: Synthetic oligonucleotide
  Sense strand starting at position 581 of SEQ ID NO: 1243694
auauuauauccacaguggu

SEQ ID NO: 1434349 - RNA, 19 nt, Artificial Sequence
  Description of Artificial Sequence: Synthetic oligonucleotide
  Antisense strand to SEQ ID NO: 1434348
accacuguggauauaauau

SEQ ID NO: 1434350 - RNA, 19 nt, Artificial Sequence
  Description of Artificial Sequence: Synthetic oligonucleotide
  Sense strand starting at position 601 of SEQ ID NO: 1243694
gcuauuaugauguaaacga

SEQ ID NO: 1434351 - RNA, 19 nt, Artificial Sequence
  Description of Artificial Sequence: Synthetic oligonucleotide
  Antisense strand to SEQ ID NO: 1434350
ucguuuacaucauaauagc

SEQ ID NO: 1434352 - RNA, 19 nt, Artificial Sequence
  Description of Artificial Sequence: Synthetic oligonucleotide
  Sense strand starting at position 1335 of SEQ ID NO: 1243694
uucuauuuauugucucagu

SEQ ID NO: 1434353 - RNA, 19 nt, Artificial Sequence
  Description of Artificial Sequence: Synthetic oligonucleotide
  Antisense strand to SEQ ID NO: 1434352
acugagacaauaaauagaa

SEQ ID NO: 1434354 - RNA, 19 nt, Artificial Sequence
  Description of Artificial Sequence: Synthetic oligonucleotide
  Sense strand starting at position 1345 of SEQ ID NO: 1243694
ugucucagucuguauacau

SEQ ID NO: 1434355 - RNA, 19 nt, Artificial Sequence
  Description of Artificial Sequence: Synthetic oligonucleotide
  Antisense strand to SEQ ID NO: 1434354
auguauacagacugagaca

SEQ ID NO: 1434356 - RNA, 19 nt, Artificial Sequence
  Description of Artificial Sequence: Synthetic oligonucleotide
  Sense strand starting at position 1380 of SEQ ID NO: 1243694
auaaucuggugcuuaagaa

SEQ ID NO: 1434357 - RNA, 19 nt, Artificial Sequence
  Description of Artificial Sequence: Synthetic oligonucleotide
  Antisense strand to SEQ ID NO: 1434356
uucuuaagcaccagauuau

SEQ ID NO: 1434358 - RNA, 19 nt, Artificial Sequence
  Description of Artificial Sequence: Synthetic oligonucleotide
  Sense strand starting at position 1381 of SEQ ID NO: 1243694
uaaucuggugcuuaagaag

SEQ ID NO: 1434359 - RNA, 19 nt, Artificial Sequence
  Description of Artificial Sequence: Synthetic oligonucleotide
  Antisense strand to SEQ ID NO: 1434358
cuucuuaagcaccagauua

SEQ ID NO: 1434360 - RNA, 19 nt, Artificial Sequence
  Description of Artificial Sequence: Synthetic oligonucleotide
  Sense strand starting at position 1418 of SEQ ID NO: 1243694
gaaugcccaguuuagauaa

SEQ ID NO: 1434361 - RNA, 19 nt, Artificial Sequence
  Description of Artificial Sequence: Synthetic oligonucleotide
  Antisense strand to SEQ ID NO: 1434360
uuaucuaaacugggcauuc

SEQ ID NO: 1434362 - RNA, 19 nt, Artificial Sequence
  Description of Artificial Sequence: Synthetic oligonucleotide
  Sense strand starting at position 1466 of SEQ ID NO: 1243694
aagugaaagugaucuuauu

SEQ ID NO: 1434363 - RNA, 19 nt, Artificial Sequence
  Description of Artificial Sequence: Synthetic oligonucleotide
  Antisense strand to SEQ ID NO: 1434362
aauaagaucacuuucacuu

SEQ ID NO: 1434364 - RNA, 19 nt, Artificial Sequence
  Description of Artificial Sequence: Synthetic oligonucleotide
  Sense strand starting at position 1595 of SEQ ID NO: 1243694
agcauagucuuacccaaga

SEQ ID NO: 1434365 - RNA, 19 nt, Artificial Sequence
  Description of Artificial Sequence: Synthetic oligonucleotide
  Antisense strand to SEQ ID NO: 1434364
ucuuggguaagacuaugcu

SEQ ID NO: 1434366 - RNA, 19 nt, Artificial Sequence
  Description of Artificial Sequence: Synthetic oligonucleotide
  Sense strand starting at position 2047 of SEQ ID NO: 1243694
uugccauauuuggauuaaa

SEQ ID NO: 1434367 - RNA, 19 nt, Artificial Sequence
  Description of Artificial Sequence: Synthetic oligonucleotide
  Antisense strand to SEQ ID NO: 1434366
uuuaauccaaauauggcaa

SEQ ID NO: 1434368 - RNA, 19 nt, Artificial Sequence
  Description of Artificial Sequence: Synthetic oligonucleotide
  Sense strand starting at position 2117 of SEQ ID NO: 1243694
cucagauggucaguagauc

SEQ ID NO: 1434369 - RNA, 19 nt, Artificial Sequence
  Description of Artificial Sequence: Synthetic oligonucleotide
  Antisense strand to SEQ ID NO: 1434368
gaucuacugaccaucugag

SEQ ID NO: 1434370 - RNA, 19 nt, Artificial Sequence
  Description of Artificial Sequence: Synthetic oligonucleotide
  Sense strand starting at position 2118 of SEQ ID NO: 1243694
ucagauggucaguagaucu

SEQ ID NO: 1434371 - RNA, 19 nt, Artificial Sequence
  Description of Artificial Sequence: Synthetic oligonucleotide
  Antisense strand to SEQ ID NO: 1434370
agaucuacugaccaucuga

SEQ ID NO: 1434372 - RNA, 19 nt, Artificial Sequence
  Description of Artificial Sequence: Synthetic oligonucleotide
  Sense strand starting at position 2200 of SEQ ID NO: 1243694
augucauccagugaggcuu

SEQ ID NO: 1434373 - RNA, 19 nt, Artificial Sequence
  Description of Artificial Sequence: Synthetic oligonucleotide
  Antisense strand to SEQ ID NO: 1434372
aagccucacuggaugacau

SEQ ID NO: 1434374 - RNA, 19 nt, Artificial Sequence
  Description of Artificial Sequence: Synthetic oligonucleotide
  Sense strand starting at position 2288 of SEQ ID NO: 1243694
ucaguauuuccacgggcau

SEQ ID NO: 1434375 - RNA, 19 nt, Artificial Sequence
  Description of Artificial Sequence: Synthetic oligonucleotide
  Antisense strand to SEQ ID NO: 1434374
augcccguggaaauacuga

SEQ ID NO: 1434376 - RNA, 19 nt, Artificial Sequence
  Description of Artificial Sequence: Synthetic oligonucleotide
  Sense strand starting at position 2289 of SEQ ID NO: 1243694
caguauuuccacgggcauu

SEQ ID NO: 1434377 - RNA, 19 nt, Artificial Sequence
  Description of Artificial Sequence: Synthetic oligonucleotide
  Antisense strand to SEQ ID NO: 1434376
aaugcccguggaaauacug

SEQ ID NO: 1434378 - RNA, 19 nt, Artificial Sequence
  Description of Artificial Sequence: Synthetic oligonucleotide
  Sense strand starting at position 2549 of SEQ ID NO: 1243694
uguguuaacuuacuuauga

SEQ ID NO: 1434379 - RNA, 19 nt, Artificial Sequence
  Description of Artificial Sequence: Synthetic oligonucleotide
  Antisense strand to SEQ ID NO: 1434378
ucauaaguaaguuaacaca

SEQ ID NO: 1434380 - RNA, 19 nt, Artificial Sequence
  Description of Artificial Sequence: Synthetic oligonucleotide
  Sense strand starting at position 2550 of SEQ ID NO: 1243694
guguuaacuuacuuaugaa

SEQ ID NO: 1434381 - RNA, 19 nt, Artificial Sequence
  Description of Artificial Sequence: Synthetic oligonucleotide
  Antisense strand to SEQ ID NO: 1434380
uucauaaguaaguuaacac

SEQ ID NO: 1434382 - RNA, 19 nt, Artificial Sequence
  Description of Artificial Sequence: Synthetic oligonucleotide
  Sense strand starting at position 2597 of SEQ ID NO: 1243694
aggaaagacaacuguuagu

SEQ ID NO: 1434383 - RNA, 19 nt, Artificial Sequence
  Description of Artificial Sequence: Synthetic oligonucleotide
  Antisense strand to SEQ ID NO: 1434382
acuaacaguugucuuuccu

SEQ ID NO: 1434384 - RNA, 19 nt, Artificial Sequence
  Description of Artificial Sequence: Synthetic oligonucleotide
  Sense strand starting at position 2602 of SEQ ID NO: 1243694
agacaacuguuaguacuuu

SEQ ID NO: 1434385 - RNA, 19 nt, Artificial Sequence
  Description of Artificial Sequence: Synthetic oligonucleotide
  Antisense strand to SEQ ID NO: 1434384
aaaguacuaacaguugucu

SEQ ID NO: 1434386 - RNA, 19 nt, Artificial Sequence
  Description of Artificial Sequence: Synthetic oligonucleotide
  Sense strand starting at position 2787 of SEQ ID NO: 1243694
augauuacaucccuuugga

SEQ ID NO: 1434387 - RNA, 19 nt, Artificial Sequence
  Description of Artificial Sequence: Synthetic oligonucleotide
  Antisense strand to SEQ ID NO: 1434386
uccaaagggauguaaucau

SEQ ID NO: 1434388 - RNA, 19 nt, Artificial Sequence
  Description of Artificial Sequence: Synthetic oligonucleotide
  Sense strand starting at position 2790 of SEQ ID NO: 1243694
auuacaucccuuuggagaa

SEQ ID NO: 1434389 - RNA, 19 nt, Artificial Sequence
  Description of Artificial Sequence: Synthetic oligonucleotide
  Antisense strand to SEQ ID NO: 1434388
uucuccaaagggauguaau

SEQ ID NO: 1434390 - RNA, 19 nt, Artificial Sequence
  Description of Artificial Sequence: Synthetic oligonucleotide
  Sense strand starting at position 2804 of SEQ ID NO: 1243694
gagaaaugacucugagcca

SEQ ID NO: 1434391 - RNA, 19 nt, Artificial Sequence
  Description of Artificial Sequence: Synthetic oligonucleotide
  Antisense strand to SEQ ID NO: 1434390
uggcucagagucauuucuc

SEQ ID NO: 1434392 - RNA, 19 nt, Artificial Sequence
  Description of Artificial Sequence: Synthetic oligonucleotide
  Sense strand starting at position 2876 of SEQ ID NO: 1243694
cugggaauaccauguacua

SEQ ID NO: 1434393 - RNA, 19 nt, Artificial Sequence
  Description of Artificial Sequence: Synthetic oligonucleotide
  Antisense strand to SEQ ID NO: 1434392
uaguacaugguauucccag

SEQ ID NO: 1434394 - RNA, 19 nt, Artificial Sequence
  Description of Artificial Sequence: Synthetic oligonucleotide
  Sense strand starting at position 2904 of SEQ ID NO: 1243694
gguuguuugauagagggua

SEQ ID NO: 1434395 - RNA, 19 nt, Artificial Sequence
  Description of Artificial Sequence: Synthetic oligonucleotide
  Antisense strand to SEQ ID NO: 1434394
uacccucuaucaaacaacc

SEQ ID NO: 1434396 - RNA, 19 nt, Artificial Sequence
  Description of Artificial Sequence: Synthetic oligonucleotide
  Sense strand starting at position 2906 of SEQ ID NO: 1243694
uuguuugauagaggguaca

SEQ ID NO: 1434397 - RNA, 19 nt, Artificial Sequence
  Description of Artificial Sequence: Synthetic oligonucleotide
  Antisense strand to SEQ ID NO: 1434396
uguacccucuaucaaacaa

SEQ ID NO: 1434398 - RNA, 19 nt, Artificial Sequence
  Description of Artificial Sequence: Synthetic oligonucleotide
  Sense strand starting at position 2938 of SEQ ID NO: 1243694
auuacaauugcagaguuua

SEQ ID NO: 1434399 - RNA, 19 nt, Artificial Sequence
  Description of Artificial Sequence: Synthetic oligonucleotide
  Antisense strand to SEQ ID NO: 1434398
uaaacucugcaauuguaau

SEQ ID NO: 1434400 - RNA, 19 nt, Artificial Sequence
  Description of Artificial Sequence: Synthetic oligonucleotide
  Sense strand starting at position 3054 of SEQ ID NO: 1243694
gagguuaaguaacucaguu

SEQ ID NO: 1434401 - RNA, 19 nt, Artificial Sequence
  Description of Artificial Sequence: Synthetic oligonucleotide
  Antisense strand to SEQ ID NO: 1434400
aacugaguuacuuaaccuc

SEQ ID NO: 1434402 - RNA, 19 nt, Artificial Sequence
  Description of Artificial Sequence: Synthetic oligonucleotide
  Sense strand starting at position 3073 of SEQ ID NO: 1243694
aagguucugcagggaugua

SEQ ID NO: 1434403 - RNA, 19 nt, Artificial Sequence
  Description of Artificial Sequence: Synthetic oligonucleotide
  Antisense strand to SEQ ID NO: 1434402
uacaucccugcagaaccuu

SEQ ID NO: 1434404 - RNA, 19 nt, Artificial Sequence
  Description of Artificial Sequence: Synthetic oligonucleotide
  Sense strand starting at position 3101 of SEQ ID NO: 1243694
aggccugagacccauguuu

SEQ ID NO: 1434405 - RNA, 19 nt, Artificial Sequence
  Description of Artificial Sequence: Synthetic oligonucleotide
  Antisense strand to SEQ ID NO: 1434404
aaacaugggucucaggccu

SEQ ID NO: 1434406 - RNA, 19 nt, Artificial Sequence
  Description of Artificial Sequence: Synthetic oligonucleotide
  Sense strand starting at position 3155 of SEQ ID NO: 1243694
gggugccucucuguuauuu

SEQ ID NO: 1434407 - RNA, 19 nt, Artificial Sequence
  Description of Artificial Sequence: Synthetic oligonucleotide
  Antisense strand to SEQ ID NO: 1434406
aaauaacagagaggcaccc

SEQ ID NO: 1434408 - RNA, 19 nt, Artificial Sequence
  Description of Artificial Sequence: Synthetic oligonucleotide
  Sense strand starting at position 3227 of SEQ ID NO: 1243694
auuacagugugcucaggaa

SEQ ID NO: 1434409 - RNA, 19 nt, Artificial Sequence
  Description of Artificial Sequence: Synthetic oligonucleotide
  Antisense strand to SEQ ID NO: 1434408
uuccugagcacacuguaau

SEQ ID NO: 1434410 - RNA, 19 nt, Artificial Sequence
  Description of Artificial Sequence: Synthetic oligonucleotide
  Sense strand starting at position 3231 of SEQ ID NO: 1243694
cagugugcucaggaaacaa

SEQ ID NO: 1434411 - RNA, 19 nt, Artificial Sequence
  Description of Artificial Sequence: Synthetic oligonucleotide
  Antisense strand to SEQ ID NO: 1434410
uuguuuccugagcacacug

SEQ ID NO: 1434412 - RNA, 19 nt, Artificial Sequence
  Description of Artificial Sequence: Synthetic oligonucleotide
  Sense strand starting at position 3331 of SEQ ID NO: 1243694
ccuuuaagagcuuauaaug

SEQ ID NO: 1434413 - RNA, 19 nt, Artificial Sequence
  Description of Artificial Sequence: Synthetic oligonucleotide
  Antisense strand to SEQ ID NO: 1434412
cauuauaagcucuuaaagg

SEQ ID NO: 1434414 - RNA, 19 nt, Artificial Sequence
  Description of Artificial Sequence: Synthetic oligonucleotide
  Sense strand starting at position 3340 of SEQ ID NO: 1243694
gcuuauaaugcagagauag

SEQ ID NO: 1434415 - RNA, 19 nt, Artificial Sequence
  Description of Artificial Sequence: Synthetic oligonucleotide
  Antisense strand to SEQ ID NO: 1434414
cuaucucugcauuauaagc

SEQ ID NO: 1434416 - RNA, 19 nt, Artificial Sequence
  Description of Artificial Sequence: Synthetic oligonucleotide
  Sense strand starting at position 3510 of SEQ ID NO: 1243694
acagaugacaguuguuuag

SEQ ID NO: 1434417 - RNA, 19 nt, Artificial Sequence
  Description of Artificial Sequence: Synthetic oligonucleotide
  Antisense strand to SEQ ID NO: 1434416
cuaaacaacugucaucugu

SEQ ID NO: 1434418 - RNA, 19 nt, Artificial Sequence
  Description of Artificial Sequence: Synthetic oligonucleotide
  Sense strand starting at position 3512 of SEQ ID NO: 1243694
agaugacaguuguuuaguu

SEQ ID NO: 1434419 - RNA, 19 nt, Artificial Sequence
  Description of Artificial Sequence: Synthetic oligonucleotide
  Antisense strand to SEQ ID NO: 1434418
aacuaaacaacugucaucu

SEQ ID NO: 1434420 - RNA, 19 nt, Artificial Sequence
  Description of Artificial Sequence: Synthetic oligonucleotide
  Sense strand starting at position 3545 of SEQ ID NO: 1243694
agcaguaaccauggugaau

SEQ ID NO: 1434421 - RNA, 19 nt, Artificial Sequence
  Description of Artificial Sequence: Synthetic oligonucleotide
  Antisense strand to SEQ ID NO: 1434420
auucaccaugguuacugcu

SEQ ID NO: 1434422 - RNA, 19 nt, Artificial Sequence
  Description of Artificial Sequence: Synthetic oligonucleotide
  Sense strand starting at position 225 of SEQ ID NO: 1243695
cucagauggucaguagauc

SEQ ID NO: 1434423 - RNA, 19 nt, Artificial Sequence
  Description of Artificial Sequence: Synthetic oligonucleotide
  Antisense strand to SEQ ID NO: 1434422
gaucuacugaccaucugag

SEQ ID NO: 1434424 - RNA, 19 nt, Artificial Sequence
  Description of Artificial Sequence: Synthetic oligonucleotide
  Sense strand starting at position 226 of SEQ ID NO: 1243695
ucagauggucaguagaucu

SEQ ID NO: 1434425 - RNA, 19 nt, Artificial Sequence
  Description of Artificial Sequence: Synthetic oligonucleotide
  Antisense strand to SEQ ID NO: 1434424
agaucuacugaccaucuga

SEQ ID NO: 1434426 - RNA, 19 nt, Artificial Sequence
  Description of Artificial Sequence: Synthetic oligonucleotide
  Sense strand starting at position 396 of SEQ ID NO: 1243695
ucaguauuuccacgggcau

SEQ ID NO: 1434427 - RNA, 19 nt, Artificial Sequence
  Description of Artificial Sequence: Synthetic oligonucleotide
  Antisense strand to SEQ ID NO: 1434426
augcccguggaaauacuga

SEQ ID NO: 1434428 - RNA, 19 nt, Artificial Sequence
  Description of Artificial Sequence: Synthetic oligonucleotide
  Sense strand starting at position 397 of SEQ ID NO: 1243695
caguauuuccacgggcauu

SEQ ID NO: 1434429 - RNA, 19 nt, Artificial Sequence
  Description of Artificial Sequence: Synthetic oligonucleotide
  Antisense strand to SEQ ID NO: 1434428
aaugcccguggaaauacug

SEQ ID NO: 1434430 - RNA, 19 nt, Artificial Sequence
  Description of Artificial Sequence: Synthetic oligonucleotide
  Sense strand starting at position 658 of SEQ ID NO: 1243695
guguuaacuuacuuaugaa

SEQ ID NO: 1434431 - RNA, 19 nt, Artificial Sequence
  Description of Artificial Sequence: Synthetic oligonucleotide
  Antisense strand to SEQ ID NO: 1434430
uucauaaguaaguuaacac

SEQ ID NO: 1434432 - RNA, 19 nt, Artificial Sequence
  Description of Artificial Sequence: Synthetic oligonucleotide
  Sense strand starting at position 705 of SEQ ID NO: 1243695
aggaaagacaacuguuagu

SEQ ID NO: 1434433 - RNA, 19 nt, Artificial Sequence
  Description of Artificial Sequence: Synthetic oligonucleotide
  Antisense strand to SEQ ID NO: 1434432
acuaacaguugucuuuccu

SEQ ID NO: 1434434 - RNA, 19 nt, Artificial Sequence
  Description of Artificial Sequence: Synthetic oligonucleotide
  Sense strand starting at position 710 of SEQ ID NO: 1243695
agacaacuguuaguacuuu

SEQ ID NO: 1434435 - RNA, 19 nt, Artificial Sequence
  Description of Artificial Sequence: Synthetic oligonucleotide
  Antisense strand to SEQ ID NO: 1434434
aaaguacuaacaguugucu

SEQ ID NO: 1434436 - RNA, 19 nt, Artificial Sequence
  Description of Artificial Sequence: Synthetic oligonucleotide
  Sense strand starting at position 895 of SEQ ID NO: 1243695
augauuacaucccuuugga

SEQ ID NO: 1434437 - RNA, 19 nt, Artificial Sequence
  Description of Artificial Sequence: Synthetic oligonucleotide
  Antisense strand to SEQ ID NO: 1434436
uccaaagggauguaaucau

SEQ ID NO: 1434438 - RNA, 19 nt, Artificial Sequence
  Description of Artificial Sequence: Synthetic oligonucleotide
  Sense strand starting at position 898 of SEQ ID NO: 1243695
auuacaucccuuuggagaa

SEQ ID NO: 1434439 - RNA, 19 nt, Artificial Sequence
  Description of Artificial Sequence: Synthetic oligonucleotide
  Antisense strand to SEQ ID NO: 1434438
uucuccaaagggauguaau

SEQ ID NO: 1434440 - RNA, 19 nt, Artificial Sequence
  Description of Artificial Sequence: Synthetic oligonucleotide
  Sense strand starting at position 912 of SEQ ID NO: 1243695
gagaaaugacucugagcca

SEQ ID NO: 1434441 - RNA, 19 nt, Artificial Sequence
  Description of Artificial Sequence: Synthetic oligonucleotide
  Antisense strand to SEQ ID NO: 1434440
uggcucagagucauuucuc

SEQ ID NO: 1434442 - RNA, 19 nt, Artificial Sequence
  Description of Artificial Sequence: Synthetic oligonucleotide
  Sense strand starting at position 984 of SEQ ID NO: 1243695
cugggaauaccauguacua

SEQ ID NO: 1434443 - RNA, 19 nt, Artificial Sequence
  Description of Artificial Sequence: Synthetic oligonucleotide
  Antisense strand to SEQ ID NO: 1434442
uaguacaugguauucccag

SEQ ID NO: 1434444 - RNA, 19 nt, Artificial Sequence
  Description of Artificial Sequence: Synthetic oligonucleotide
  Sense strand starting at position 1012 of SEQ ID NO: 1243695
gguuguuugauagagggua

SEQ ID NO: 1434445 - RNA, 19 nt, Artificial Sequence
  Description of Artificial Sequence: Synthetic oligonucleotide
  Antisense strand to SEQ ID NO: 1434444
uacccucuaucaaacaacc

SEQ ID NO: 1434446 - RNA, 19 nt, Artificial Sequence
  Description of Artificial Sequence: Synthetic oligonucleotide
  Sense strand starting at position 1014 of SEQ ID NO: 1243695
uuguuugauagaggguaca

SEQ ID NO: 1434447 - RNA, 19 nt, Artificial Sequence
  Description of Artificial Sequence: Synthetic oligonucleotide
  Antisense strand to SEQ ID NO: 1434446
uguacccucuaucaaacaa

SEQ ID NO: 1434448 - RNA, 19 nt, Artificial Sequence
  Description of Artificial Sequence: Synthetic oligonucleotide
  Sense strand starting at position 1046 of SEQ ID NO: 1243695
auuacaauugcagaguuua

SEQ ID NO: 1434449 - RNA, 19 nt, Artificial Sequence
  Description of Artificial Sequence: Synthetic oligonucleotide
  Antisense strand to SEQ ID NO: 1434448
uaaacucugcaauuguaau

SEQ ID NO: 1434450 - RNA, 19 nt, Artificial Sequence
  Description of Artificial Sequence: Synthetic oligonucleotide
  Sense strand starting at position 1162 of SEQ ID NO: 1243695
gagguuaaguaacucaguu

SEQ ID NO: 1434451 - RNA, 19 nt, Artificial Sequence
  Description of Artificial Sequence: Synthetic oligonucleotide
  Antisense strand to SEQ ID NO: 1434450
aacugaguuacuuaaccuc

SEQ ID NO: 1434452 - RNA, 19 nt, Artificial Sequence
  Description of Artificial Sequence: Synthetic oligonucleotide
  Sense strand starting at position 1209 of SEQ ID NO: 1243695
aggccugagacccauguuu

SEQ ID NO: 1434453 - RNA, 19 nt, Artificial Sequence
  Description of Artificial Sequence: Synthetic oligonucleotide
  Antisense strand to SEQ ID NO: 1434452
aaacaugggucucaggccu

SEQ ID NO: 1434454 - RNA, 19 nt, Artificial Sequence
  Description of Artificial Sequence: Synthetic oligonucleotide
  Sense strand starting at position 1263 of SEQ ID NO: 1243695
gggugccucucuguuauuu

SEQ ID NO: 1434455 - RNA, 19 nt, Artificial Sequence
  Description of Artificial Sequence: Synthetic oligonucleotide
  Antisense strand to SEQ ID NO: 1434454
aaauaacagagaggcaccc

SEQ ID NO: 1434456 - RNA, 19 nt, Artificial Sequence
  Description of Artificial Sequence: Synthetic oligonucleotide
  Sense strand starting at position 1339 of SEQ ID NO: 1243695
cagugugcucaggaaacaa

SEQ ID NO: 1434457 - RNA, 19 nt, Artificial Sequence
  Description of Artificial Sequence: Synthetic oligonucleotide
  Antisense strand to SEQ ID NO: 1434456
uuguuuccugagcacacug

SEQ ID NO: 1434458 - RNA, 19 nt, Artificial Sequence
  Description of Artificial Sequence: Synthetic oligonucleotide
  Sense strand starting at position 1439 of SEQ ID NO: 1243695
ccuuuaagagcuuauaaug

SEQ ID NO: 1434459 - RNA, 19 nt, Artificial Sequence
  Description of Artificial Sequence: Synthetic oligonucleotide
  Antisense strand to SEQ ID NO: 1434458
cauuauaagcucuuaaagg

SEQ ID NO: 1434460 - RNA, 19 nt, Artificial Sequence
  Description of Artificial Sequence: Synthetic oligonucleotide
  Sense strand starting at position 1448 of SEQ ID NO: 1243695
gcuuauaaugcagagauag

SEQ ID NO: 1434461 - RNA, 19 nt, Artificial Sequence
  Description of Artificial Sequence: Synthetic oligonucleotide
  Antisense strand to SEQ ID NO: 1434460
cuaucucugcauuauaagc

SEQ ID NO: 1434462 - RNA, 19 nt, Artificial Sequence
  Description of Artificial Sequence: Synthetic oligonucleotide
  Sense strand starting at position 1618 of SEQ ID NO: 1243695
acagaugacaguuguuuag

SEQ ID NO: 1434463 - RNA, 19 nt, Artificial Sequence
  Description of Artificial Sequence: Synthetic oligonucleotide
  Antisense strand to SEQ ID NO: 1434462
cuaaacaacugucaucugu

SEQ ID NO: 1434464 - RNA, 19 nt, Artificial Sequence
  Description of Artificial Sequence: Synthetic oligonucleotide
  Sense strand starting at position 1653 of SEQ ID NO: 1243695
agcaguaaccauggugaau

SEQ ID NO: 1434465 - RNA, 19 nt, Artificial Sequence
  Description of Artificial Sequence: Synthetic oligonucleotide
  Antisense strand to SEQ ID NO: 1434464
auucaccaugguuacugcu

SEQ ID NO: 1434466 - RNA, 19 nt, Artificial Sequence
  Description of Artificial Sequence: Synthetic oligonucleotide
  Sense strand starting at position 2128 of SEQ ID NO: 1243695
uuaguucucagcgaacuga

SEQ ID NO: 1434467 - RNA, 19 nt, Artificial Sequence
  Description of Artificial Sequence: Synthetic oligonucleotide
  Antisense strand to SEQ ID NO: 1434466
ucaguucgcugagaacuaa

SEQ ID NO: 1434468 - RNA, 19 nt, Artificial Sequence
  Description of Artificial Sequence: Synthetic oligonucleotide
  Sense strand starting at position 2169 of SEQ ID NO: 1243695
ucgaauugucacuaucuca

SEQ ID NO: 1434469 - RNA, 19 nt, Artificial Sequence
  Description of Artificial Sequence: Synthetic oligonucleotide
  Antisense strand to SEQ ID NO: 1434468
ugagauagugacaauucga

SEQ ID NO: 1434470 - RNA, 19 nt, Artificial Sequence
  Description of Artificial Sequence: Synthetic oligonucleotide
  Sense strand starting at position 2263 of SEQ ID NO: 1243695
gggauagaguugccugaug

SEQ ID NO: 1434471 - RNA, 19 nt, Artificial Sequence
  Description of Artificial Sequence: Synthetic oligonucleotide
  Antisense strand to SEQ ID NO: 1434470
caucaggcaacucuauccc

SEQ ID NO: 1434472 - RNA, 19 nt, Artificial Sequence
  Description of Artificial Sequence: Synthetic oligonucleotide
  Sense strand starting at position 2853 of SEQ ID NO: 1243695
accaacuuuccagguggaa

SEQ ID NO: 1434473 - RNA, 19 nt, Artificial Sequence
  Description of Artificial Sequence: Synthetic oligonucleotide
  Antisense strand to SEQ ID NO: 1434472
uuccaccuggaaaguuggu

SEQ ID NO: 1434474 - RNA, 19 nt, Artificial Sequence
  Description of Artificial Sequence: Synthetic oligonucleotide
  Sense strand starting at position 2947 of SEQ ID NO: 1243695
gucugcagucccuacagaa

SEQ ID NO: 1434475 - RNA, 19 nt, Artificial Sequence
  Description of Artificial Sequence: Synthetic oligonucleotide
  Antisense strand to SEQ ID NO: 1434474
uucuguagggacugcagac

SEQ ID NO: 1434476 - RNA, 19 nt, Artificial Sequence
  Description of Artificial Sequence: Synthetic oligonucleotide
  Sense strand starting at position 2960 of SEQ ID NO: 1243695
acagaaguaaucggcuuaa

SEQ ID NO: 1434477 - RNA, 19 nt, Artificial Sequence
  Description of Artificial Sequence: Synthetic oligonucleotide
  Antisense strand to SEQ ID NO: 1434476
uuaagccgauuacuucugu

SEQ ID NO: 1434478 - RNA, 19 nt, Artificial Sequence
  Description of Artificial Sequence: Synthetic oligonucleotide
  Sense strand starting at position 2964 of SEQ ID NO: 1243695
aaguaaucggcuuaaggug

SEQ ID NO: 1434479 - RNA, 19 nt, Artificial Sequence
  Description of Artificial Sequence: Synthetic oligonucleotide
  Antisense strand to SEQ ID NO: 1434478
caccuuaagccgauuacuu

SEQ ID NO: 1434480 - RNA, 19 nt, Artificial Sequence
  Description of Artificial Sequence: Synthetic oligonucleotide
  Sense strand starting at position 3055 of SEQ ID NO: 1243695
uccguauguagauaucaag

SEQ ID NO: 1434481 - RNA, 19 nt, Artificial Sequence
  Description of Artificial Sequence: Synthetic oligonucleotide
  Antisense strand to SEQ ID NO: 1434480
cuugauaucuacauacgga

SEQ ID NO: 1434482 - RNA, 19 nt, Artificial Sequence
  Description of Artificial Sequence: Synthetic oligonucleotide
  Sense strand starting at position 3190 of SEQ ID NO: 1243695
auggcccuauuccuugaaa

SEQ ID NO: 1434483 - RNA, 19 nt, Artificial Sequence
  Description of Artificial Sequence: Synthetic oligonucleotide
  Antisense strand to SEQ ID NO: 1434482
uuucaaggaauagggccau

SEQ ID NO: 1434484 - RNA, 19 nt, Artificial Sequence
  Description of Artificial Sequence: Synthetic oligonucleotide
  Sense strand starting at position 3191 of SEQ ID NO: 1243695
uggcccuauuccuugaaag

SEQ ID NO: 1434485 - RNA, 19 nt, Artificial Sequence
  Description of Artificial Sequence: Synthetic oligonucleotide
  Antisense strand to SEQ ID NO: 1434484
cuuucaaggaauagggcca

SEQ ID NO: 1434486 - RNA, 19 nt, Artificial Sequence
  Description of Artificial Sequence: Synthetic oligonucleotide
  Sense strand starting at position 3248 of SEQ ID NO: 1243695
ggucucagucuacaucuaa

SEQ ID NO: 1434487 - RNA, 19 nt, Artificial Sequence
  Description of Artificial Sequence: Synthetic oligonucleotide
  Antisense strand to SEQ ID NO: 1434486
uuagauguagacugagacc

SEQ ID NO: 1434488 - RNA, 19 nt, Artificial Sequence
  Description of Artificial Sequence: Synthetic oligonucleotide
  Sense strand starting at position 3442 of SEQ ID NO: 1243695
cucagacagcucuagaauc

SEQ ID NO: 1434489 - RNA, 19 nt, Artificial Sequence
  Description of Artificial Sequence: Synthetic oligonucleotide
  Antisense strand to SEQ ID NO: 1434488
gauucuagagcugucugag

SEQ ID NO: 1434490 - RNA, 19 nt, Artificial Sequence
  Description of Artificial Sequence: Synthetic oligonucleotide
  Sense strand starting at position 3475 of SEQ ID NO: 1243695
uaguaaguuccggauaaau

SEQ ID NO: 1434491 - RNA, 19 nt, Artificial Sequence
  Description of Artificial Sequence: Synthetic oligonucleotide
  Antisense strand to SEQ ID NO: 1434490
auuuauccggaacuuacua

SEQ ID NO: 1434492 - RNA, 19 nt, Artificial Sequence
  Description of Artificial Sequence: Synthetic oligonucleotide
  Sense strand starting at position 3477 of SEQ ID NO: 1243695
guaaguuccggauaaaugg

SEQ ID NO: 1434493 - RNA, 19 nt, Artificial Sequence
  Description of Artificial Sequence: Synthetic oligonucleotide
  Antisense strand to SEQ ID NO: 1434492
ccauuuauccggaacuuac

SEQ ID NO: 1434494 - RNA, 19 nt, Artificial Sequence
  Description of Artificial Sequence: Synthetic oligonucleotide
  Sense strand starting at position 3537 of SEQ ID NO: 1243695
gggcauuuacugugugcca

SEQ ID NO: 1434495 - RNA, 19 nt, Artificial Sequence
  Description of Artificial Sequence: Synthetic oligonucleotide
  Antisense strand to SEQ ID NO: 1434494
uggcacacaguaaaugccc

SEQ ID NO: 1434496 - RNA, 19 nt, Artificial Sequence
  Description of Artificial Sequence: Synthetic oligonucleotide
  Sense strand starting at position 3550 of SEQ ID NO: 1243695
gugccaggauugucuauuu

SEQ ID NO: 1434497 - RNA, 19 nt, Artificial Sequence
  Description of Artificial Sequence: Synthetic oligonucleotide
  Antisense strand to SEQ ID NO: 1434496
aaauagacaauccuggcac

SEQ ID NO: 1434498 - RNA, 19 nt, Artificial Sequence
  Description of Artificial Sequence: Synthetic oligonucleotide
  Sense strand starting at position 3621 of SEQ ID NO: 1243695
uccagaggguguucaguaa

SEQ ID NO: 1434499 - RNA, 19 nt, Artificial Sequence
  Description of Artificial Sequence: Synthetic oligonucleotide
  Antisense strand to SEQ ID NO: 1434498
uuacugaacacccucugga

SEQ ID NO: 1434500 - RNA, 19 nt, Artificial Sequence
  Description of Artificial Sequence: Synthetic oligonucleotide
  Sense strand starting at position 3625 of SEQ ID NO: 1243695
gaggguguucaguaaguaa

SEQ ID NO: 1434501 - RNA, 19 nt, Artificial Sequence
  Description of Artificial Sequence: Synthetic oligonucleotide
  Antisense strand to SEQ ID NO: 1434500
uuacuuacugaacacccuc

SEQ ID NO: 1434502 - RNA, 19 nt, Artificial Sequence
  Description of Artificial Sequence: Synthetic oligonucleotide
  Sense strand starting at position 92 of SEQ ID NO: 1243696
aacgcuuggagccaugaga

SEQ ID NO: 1434503 - RNA, 19 nt, Artificial Sequence
  Description of Artificial Sequence: Synthetic oligonucleotide
  Antisense strand to SEQ ID NO: 1434502
ucucauggcuccaagcguu

SEQ ID NO: 1434504 - RNA, 19 nt, Artificial Sequence
  Description of Artificial Sequence: Synthetic oligonucleotide
  Sense strand starting at position 128 of SEQ ID NO: 1243696
gggauucucccuuagggca

SEQ ID NO: 1434505 - RNA, 19 nt, Artificial Sequence
  Description of Artificial Sequence: Synthetic oligonucleotide
  Antisense strand to SEQ ID NO: 1434504
ugcccuaagggagaauccc

SEQ ID NO: 1434506 - RNA, 19 nt, Artificial Sequence
  Description of Artificial Sequence: Synthetic oligonucleotide
  Sense strand starting at position 194 of SEQ ID NO: 1243696
gagggaauauaugacuguu

SEQ ID NO: 1434507 - RNA, 19 nt, Artificial Sequence
  Description of Artificial Sequence: Synthetic oligonucleotide
  Antisense strand to SEQ ID NO: 1434506
aacagucauauauucccuc

SEQ ID NO: 1434508 - RNA, 19 nt, Artificial Sequence
  Description of Artificial Sequence: Synthetic oligonucleotide
  Sense strand starting at position 196 of SEQ ID NO: 1243696
gggaauauaugacuguuua

SEQ ID NO: 1434509 - RNA, 19 nt, Artificial Sequence
  Description of Artificial Sequence: Synthetic oligonucleotide
  Antisense strand to SEQ ID NO: 1434508
uaaacagucauauauuccc

SEQ ID NO: 1434510 - RNA, 19 nt, Artificial Sequence
  Description of Artificial Sequence: Synthetic oligonucleotide
  Sense strand starting at position 692 of SEQ ID NO: 1243696
gccuuaaacuugccuagca

SEQ ID NO: 1434511 - RNA, 19 nt, Artificial Sequence
  Description of Artificial Sequence: Synthetic oligonucleotide
  Antisense strand to SEQ ID NO: 1434510
ugcuaggcaaguuuaaggc

SEQ ID NO: 1434512 - RNA, 19 nt, Artificial Sequence
  Description of Artificial Sequence: Synthetic oligonucleotide
  Sense strand starting at position 987 of SEQ ID NO: 1243696
gcagcagaggcucaauaaa

SEQ ID NO: 1434513 - RNA, 19 nt, Artificial Sequence
  Description of Artificial Sequence: Synthetic oligonucleotide
  Antisense strand to SEQ ID NO: 1434512
uuuauugagccucugcugc

SEQ ID NO: 1434514 - RNA, 19 nt, Artificial Sequence
  Description of Artificial Sequence: Synthetic oligonucleotide
  Sense strand starting at position 1364 of SEQ ID NO: 1243696
cagugagugacucggcaaa

SEQ ID NO: 1434515 - RNA, 19 nt, Artificial Sequence
  Description of Artificial Sequence: Synthetic oligonucleotide
  Antisense strand to SEQ ID NO: 1434514
uuugccgagucacucacug

SEQ ID NO: 1434516 - RNA, 19 nt, Artificial Sequence
  Description of Artificial Sequence: Synthetic oligonucleotide
  Sense strand starting at position 1529 of SEQ ID NO: 1243696
ccgaguacucgaugcgggu

SEQ ID NO: 1434517 - RNA, 19 nt, Artificial Sequence
  Description of Artificial Sequence: Synthetic oligonucleotide
  Antisense strand to SEQ ID NO: 1434516
acccgcaucgaguacucgg

SEQ ID NO: 1434518 - RNA, 19 nt, Artificial Sequence
  Description of Artificial Sequence: Synthetic oligonucleotide
  Sense strand starting at position 2499 of SEQ ID NO: 1243696
gucccuaaaccugagggua

SEQ ID NO: 1434519 - RNA, 19 nt, Artificial Sequence
  Description of Artificial Sequence: Synthetic oligonucleotide
  Antisense strand to SEQ ID NO: 1434518
uacccucagguuuagggac

SEQ ID NO: 1434520 - RNA, 19 nt, Artificial Sequence
  Description of Artificial Sequence: Synthetic oligonucleotide
  Sense strand starting at position 2986 of SEQ ID NO: 1243696
ccggcagucauugcugagu

SEQ ID NO: 1434521 - RNA, 19 nt, Artificial Sequence
  Description of Artificial Sequence: Synthetic oligonucleotide
  Antisense strand to SEQ ID NO: 1434520
acucagcaaugacugccgg

SEQ ID NO: 1434522 - RNA, 19 nt, Artificial Sequence
  Description of Artificial Sequence: Synthetic oligonucleotide
  Sense strand starting at position 2989 of SEQ ID NO: 1243696
gcagucauugcugagucua

SEQ ID NO: 1434523 - RNA, 19 nt, Artificial Sequence
  Description of Artificial Sequence: Synthetic oligonucleotide
  Antisense strand to SEQ ID NO: 1434522
uagacucagcaaugacugc

SEQ ID NO: 1434524 - RNA, 19 nt, Artificial Sequence
  Description of Artificial Sequence: Synthetic oligonucleotide
  Sense strand starting at position 2991 of SEQ ID NO: 1243696
agucauugcugagucuaag

SEQ ID NO: 1434525 - RNA, 19 nt, Artificial Sequence
  Description of Artificial Sequence: Synthetic oligonucleotide
  Antisense strand to SEQ ID NO: 1434524
cuuagacucagcaaugacu

SEQ ID NO: 1434526 - RNA, 19 nt, Artificial Sequence
  Description of Artificial Sequence: Synthetic oligonucleotide
  Sense strand starting at position 3034 of SEQ ID NO: 1243696
ugccuuccugucgaugaca

SEQ ID NO: 1434527 - RNA, 19 nt, Artificial Sequence
  Description of Artificial Sequence: Synthetic oligonucleotide
  Antisense strand to SEQ ID NO: 1434526
ugucaucgacaggaaggca

SEQ ID NO: 1434528 - RNA, 19 nt, Artificial Sequence
  Description of Artificial Sequence: Synthetic oligonucleotide
  Sense strand starting at position 3036 of SEQ ID NO: 1243696
ccuuccugucgaugacaua

SEQ ID NO: 1434529 - RNA, 19 nt, Artificial Sequence
  Description of Artificial Sequence: Synthetic oligonucleotide
  Antisense strand to SEQ ID NO: 1434528
uaugucaucgacaggaagg

SEQ ID NO: 1434530 - RNA, 19 nt, Artificial Sequence
  Description of Artificial Sequence: Synthetic oligonucleotide
  Sense strand starting at position 3037 of SEQ ID NO: 1243696
cuuccugucgaugacauau

SEQ ID NO: 1434531 - RNA, 19 nt, Artificial Sequence
  Description of Artificial Sequence: Synthetic oligonucleotide
  Antisense strand to SEQ ID NO: 1434530
auaugucaucgacaggaag

SEQ ID NO: 1434532 - RNA, 19 nt, Artificial Sequence
  Description of Artificial Sequence: Synthetic oligonucleotide
  Sense strand starting at position 3047 of SEQ ID NO: 1243696
augacauauccaugucacc

SEQ ID NO: 1434533 - RNA, 19 nt, Artificial Sequence
  Description of Artificial Sequence: Synthetic oligonucleotide
  Antisense strand to SEQ ID NO: 1434532
ggugacauggauaugucau

SEQ ID NO: 1434534 - RNA, 19 nt, Artificial Sequence
  Description of Artificial Sequence: Synthetic oligonucleotide
  Sense strand starting at position 3071 of SEQ ID NO: 1243696
acaccuguaugcugacaaa

SEQ ID NO: 1434535 - RNA, 19 nt, Artificial Sequence
  Description of Artificial Sequence: Synthetic oligonucleotide
  Antisense strand to SEQ ID NO: 1434534
uuugucagcauacaggugu

SEQ ID NO: 1434536 - RNA, 19 nt, Artificial Sequence
  Description of Artificial Sequence: Synthetic oligonucleotide
  Sense strand starting at position 3090 of SEQ ID NO: 1243696
cacggacaucuauguacau

SEQ ID NO: 1434537 - RNA, 19 nt, Artificial Sequence
  Description of Artificial Sequence: Synthetic oligonucleotide
  Antisense strand to SEQ ID NO: 1434536
auguacauagauguccgug

SEQ ID NO: 1434538 - RNA, 19 nt, Artificial Sequence
  Description of Artificial Sequence: Synthetic oligonucleotide
  Sense strand starting at position 3091 of SEQ ID NO: 1243696
acggacaucuauguacauu

SEQ ID NO: 1434539 - RNA, 19 nt, Artificial Sequence
  Description of Artificial Sequence: Synthetic oligonucleotide
  Antisense strand to SEQ ID NO: 1434538
aauguacauagauguccgu

SEQ ID NO: 1434540 - RNA, 19 nt, Artificial Sequence
  Description of Artificial Sequence: Synthetic oligonucleotide
  Sense strand starting at position 3097 of SEQ ID NO: 1243696
aucuauguacauuggagaa

SEQ ID NO: 1434541 - RNA, 19 nt, Artificial Sequence
  Description of Artificial Sequence: Synthetic oligonucleotide
  Antisense strand to SEQ ID NO: 1434540
uucuccaauguacauagau

SEQ ID NO: 1434542 - RNA, 19 nt, Artificial Sequence
  Description of Artificial Sequence: Synthetic oligonucleotide
  Sense strand starting at position 3241 of SEQ ID NO: 1243696
uuugaagagucuguuccua

SEQ ID NO: 1434543 - RNA, 19 nt, Artificial Sequence
  Description of Artificial Sequence: Synthetic oligonucleotide
  Antisense strand to SEQ ID NO: 1434542
uaggaacagacucuucaaa

SEQ ID NO: 1434544 - RNA, 19 nt, Artificial Sequence
  Description of Artificial Sequence: Synthetic oligonucleotide
  Sense strand starting at position 3243 of SEQ ID NO: 1243696
ugaagagucuguuccuauu

SEQ ID NO: 1434545 - RNA, 19 nt, Artificial Sequence
  Description of Artificial Sequence: Synthetic oligonucleotide
  Antisense strand to SEQ ID NO: 1434544
aauaggaacagacucuuca

SEQ ID NO: 1434546 - RNA, 19 nt, Artificial Sequence
  Description of Artificial Sequence: Synthetic oligonucleotide
  Sense strand starting at position 3279 of SEQ ID NO: 1243696
cagucuggauccuugguua

SEQ ID NO: 1434547 - RNA, 19 nt, Artificial Sequence
  Description of Artificial Sequence: Synthetic oligonucleotide
  Antisense strand to SEQ ID NO: 1434546
uaaccaaggauccagacug

SEQ ID NO: 1434548 - RNA, 19 nt, Artificial Sequence
  Description of Artificial Sequence: Synthetic oligonucleotide
  Sense strand starting at position 3282 of SEQ ID NO: 1243696
ucuggauccuugguuaaac

SEQ ID NO: 1434549 - RNA, 19 nt, Artificial Sequence
  Description of Artificial Sequence: Synthetic oligonucleotide
  Antisense strand to SEQ ID NO: 1434548
guuuaaccaaggauccaga

SEQ ID NO: 1434550 - RNA, 19 nt, Artificial Sequence
  Description of Artificial Sequence: Synthetic oligonucleotide
  Sense strand starting at position 3395 of SEQ ID NO: 1243696
cagcuuugggucugcugaa

SEQ ID NO: 1434551 - RNA, 19 nt, Artificial Sequence
  Description of Artificial Sequence: Synthetic oligonucleotide
  Antisense strand to SEQ ID NO: 1434550
uucagcagacccaaagcug

SEQ ID NO: 1434552 - RNA, 19 nt, Artificial Sequence
  Description of Artificial Sequence: Synthetic oligonucleotide
  Sense strand starting at position 3396 of SEQ ID NO: 1243696
agcuuugggucugcugaau

SEQ ID NO: 1434553 - RNA, 19 nt, Artificial Sequence
  Description of Artificial Sequence: Synthetic oligonucleotide
  Antisense strand to SEQ ID NO: 1434552
auucagcagacccaaagcu

SEQ ID NO: 1434554 - RNA, 19 nt, Artificial Sequence
  Description of Artificial Sequence: Synthetic oligonucleotide
  Sense strand starting at position 3408 of SEQ ID NO: 1243696
gcugaauuccuccaugguc

SEQ ID NO: 1434555 - RNA, 19 nt, Artificial Sequence
  Description of Artificial Sequence: Synthetic oligonucleotide
  Antisense strand to SEQ ID NO: 1434554
gaccauggaggaauucagc

SEQ ID NO: 1434556 - RNA, 19 nt, Artificial Sequence
  Description of Artificial Sequence: Synthetic oligonucleotide
  Sense strand starting at position 3410 of SEQ ID NO: 1243696
ugaauuccuccauggucaa

SEQ ID NO: 1434557 - RNA, 19 nt, Artificial Sequence
  Description of Artificial Sequence: Synthetic oligonucleotide
  Antisense strand to SEQ ID NO: 1434556
uugaccauggaggaauuca

SEQ ID NO: 1434558 - RNA, 19 nt, Artificial Sequence
  Description of Artificial Sequence: Synthetic oligonucleotide
  Sense strand starting at position 3435 of SEQ ID NO: 1243696
uggcuccuuguggaguaau

SEQ ID NO: 1434559 - RNA, 19 nt, Artificial Sequence
  Description of Artificial Sequence: Synthetic oligonucleotide
  Antisense strand to SEQ ID NO: 1434558
auuacuccacaaggagcca

SEQ ID NO: 1434560 - RNA, 19 nt, Artificial Sequence
  Description of Artificial Sequence: Synthetic oligonucleotide
  Sense strand starting at position 3438 of SEQ ID NO: 1243696
cuccuuguggaguaauuaa

SEQ ID NO: 1434561 - RNA, 19 nt, Artificial Sequence
  Description of Artificial Sequence: Synthetic oligonucleotide
  Antisense strand to SEQ ID NO: 1434560
uuaauuacuccacaaggag

SEQ ID NO: 1434562 - RNA, 19 nt, Artificial Sequence
  Description of Artificial Sequence: Synthetic oligonucleotide
  Sense strand starting at position 3447 of SEQ ID NO: 1243696
gaguaauuaaggcaugcgu

SEQ ID NO: 1434563 - RNA, 19 nt, Artificial Sequence
  Description of Artificial Sequence: Synthetic oligonucleotide
  Antisense strand to SEQ ID NO: 1434562
acgcaugccuuaauuacuc

SEQ ID NO: 1434564 - RNA, 19 nt, Artificial Sequence
  Description of Artificial Sequence: Synthetic oligonucleotide
  Sense strand starting at position 3449 of SEQ ID NO: 1243696
guaauuaaggcaugcguga

SEQ ID NO: 1434565 - RNA, 19 nt, Artificial Sequence
  Description of Artificial Sequence: Synthetic oligonucleotide
  Antisense strand to SEQ ID NO: 1434564
ucacgcaugccuuaauuac

SEQ ID NO: 1434566 - RNA, 19 nt, Artificial Sequence
  Description of Artificial Sequence: Synthetic oligonucleotide
  Sense strand starting at position 3467 of SEQ ID NO: 1243696
aggucauucucugagacca

SEQ ID NO: 1434567 - RNA, 19 nt, Artificial Sequence
  Description of Artificial Sequence: Synthetic oligonucleotide
  Antisense strand to SEQ ID NO: 1434566
uggucucagagaaugaccu

SEQ ID NO: 1434568 - RNA, 19 nt, Artificial Sequence
  Description of Artificial Sequence: Synthetic oligonucleotide
  Sense strand starting at position 3469 of SEQ ID NO: 1243696
gucauucucugagaccaca

SEQ ID NO: 1434569 - RNA, 19 nt, Artificial Sequence
  Description of Artificial Sequence: Synthetic oligonucleotide
  Antisense strand to SEQ ID NO: 1434568
uguggucucagagaaugac

SEQ ID NO: 1434570 - RNA, 19 nt, Artificial Sequence
  Description of Artificial Sequence: Synthetic oligonucleotide
  Sense strand starting at position 3529 of SEQ ID NO: 1243696
gcaucaguuaaugaguaga

SEQ ID NO: 1434571 - RNA, 19 nt, Artificial Sequence
  Description of Artificial Sequence: Synthetic oligonucleotide
  Antisense strand to SEQ ID NO: 1434570
ucuacucauuaacugaugc

SEQ ID NO: 1434572 - RNA, 19 nt, Artificial Sequence
  Description of Artificial Sequence: Synthetic oligonucleotide
  Sense strand starting at position 3531 of SEQ ID NO: 1243696
aucaguuaaugaguagauu

SEQ ID NO: 1434573 - RNA, 19 nt, Artificial Sequence
  Description of Artificial Sequence: Synthetic oligonucleotide
  Antisense strand to SEQ ID NO: 1434572
aaucuacucauuaacugau

SEQ ID NO: 1434574 - RNA, 19 nt, Artificial Sequence
  Description of Artificial Sequence: Synthetic oligonucleotide
  Sense strand starting at position 3532 of SEQ ID NO: 1243696
ucaguuaaugaguagauuc

SEQ ID NO: 1434575 - RNA, 19 nt, Artificial Sequence
  Description of Artificial Sequence: Synthetic oligonucleotide
  Antisense strand to SEQ ID NO: 1434574
gaaucuacucauuaacuga

SEQ ID NO: 1434576 - RNA, 19 nt, Artificial Sequence
  Description of Artificial Sequence: Synthetic oligonucleotide
  Sense strand starting at position 3551 of SEQ ID NO: 1243696
aguguuaaaccguaaagcu

SEQ ID NO: 1434577 - RNA, 19 nt, Artificial Sequence
  Description of Artificial Sequence: Synthetic oligonucleotide
  Antisense strand to SEQ ID NO: 1434576
agcuuuacgguuuaacacu

SEQ ID NO: 1434578 - RNA, 19 nt, Artificial Sequence
  Description of Artificial Sequence: Synthetic oligonucleotide
  Sense strand starting at position 3590 of SEQ ID NO: 1243696
guuuauuguuucuucuaca

SEQ ID NO: 1434579 - RNA, 19 nt, Artificial Sequence
  Description of Artificial Sequence: Synthetic oligonucleotide
  Antisense strand to SEQ ID NO: 1434578
uguagaagaaacaauaaac

SEQ ID NO: 1434580 - RNA, 19 nt, Artificial Sequence
  Description of Artificial Sequence: Synthetic oligonucleotide
  Sense strand starting at position 3615 of SEQ ID NO: 1243696
gucacuuucggucaagcuu

SEQ ID NO: 1434581 - RNA, 19 nt, Artificial Sequence
  Description of Artificial Sequence: Synthetic oligonucleotide
  Antisense strand to SEQ ID NO: 1434580
aagcuugaccgaaagugac

SEQ ID NO: 1434582 - RNA, 19 nt, Artificial Sequence
  Description of Artificial Sequence: Synthetic oligonucleotide
  Sense strand starting at position 410 of SEQ ID NO: 1243697
aggcaaaucuaaguuaaau

SEQ ID NO: 1434583 - RNA, 19 nt, Artificial Sequence
  Description of Artificial Sequence: Synthetic oligonucleotide
  Antisense strand to SEQ ID NO: 1434582
auuuaacuuagauuugccu

SEQ ID NO: 1434584 - RNA, 19 nt, Artificial Sequence
  Description of Artificial Sequence: Synthetic oligonucleotide
  Sense strand starting at position 558 of SEQ ID NO: 1243697
agaucauaggguugcuauu

SEQ ID NO: 1434585 - RNA, 19 nt, Artificial Sequence
  Description of Artificial Sequence: Synthetic oligonucleotide
  Antisense strand to SEQ ID NO: 1434584
aauagcaacccuaugaucu

SEQ ID NO: 1434586 - RNA, 19 nt, Artificial Sequence
  Description of Artificial Sequence: Synthetic oligonucleotide
  Sense strand starting at position 640 of SEQ ID NO: 1243697
gaaauaggguuucuuagca

SEQ ID NO: 1434587 - RNA, 19 nt, Artificial Sequence
  Description of Artificial Sequence: Synthetic oligonucleotide
  Antisense strand to SEQ ID NO: 1434586
ugcuaagaaacccuauuuc

SEQ ID NO: 1434588 - RNA, 19 nt, Artificial Sequence
  Description of Artificial Sequence: Synthetic oligonucleotide
  Sense strand starting at position 648 of SEQ ID NO: 1243697
guuucuuagcauuagggca

SEQ ID NO: 1434589 - RNA, 19 nt, Artificial Sequence
  Description of Artificial Sequence: Synthetic oligonucleotide
  Antisense strand to SEQ ID NO: 1434588
ugcccuaaugcuaagaaac

SEQ ID NO: 1434590 - RNA, 19 nt, Artificial Sequence
  Description of Artificial Sequence: Synthetic oligonucleotide
  Sense strand starting at position 718 of SEQ ID NO: 1243697
ucaagaacuguguacauca

SEQ ID NO: 1434591 - RNA, 19 nt, Artificial Sequence
  Description of Artificial Sequence: Synthetic oligonucleotide
  Antisense strand to SEQ ID NO: 1434590
ugauguacacaguucuuga

SEQ ID NO: 1434592 - RNA, 19 nt, Artificial Sequence
  Description of Artificial Sequence: Synthetic oligonucleotide
  Sense strand starting at position 757 of SEQ ID NO: 1243697
guaacuaacugccuugauu

SEQ ID NO: 1434593 - RNA, 19 nt, Artificial Sequence
  Description of Artificial Sequence: Synthetic oligonucleotide
  Antisense strand to SEQ ID NO: 1434592
aaucaaggcaguuaguuac

SEQ ID NO: 1434594 - RNA, 19 nt, Artificial Sequence
  Description of Artificial Sequence: Synthetic oligonucleotide
  Sense strand starting at position 836 of SEQ ID NO: 1243697
guagacaagucaccagauu

SEQ ID NO: 1434595 - RNA, 19 nt, Artificial Sequence
  Description of Artificial Sequence: Synthetic oligonucleotide
  Antisense strand to SEQ ID NO: 1434594
aaucuggugacuugucuac

SEQ ID NO: 1434596 - RNA, 19 nt, Artificial Sequence
  Description of Artificial Sequence: Synthetic oligonucleotide
  Sense strand starting at position 867 of SEQ ID NO: 1243697
acuggucgcaguuaaauga

SEQ ID NO: 1434597 - RNA, 19 nt, Artificial Sequence
  Description of Artificial Sequence: Synthetic oligonucleotide
  Antisense strand to SEQ ID NO: 1434596
ucauuuaacugcgaccagu

SEQ ID NO: 1434598 - RNA, 19 nt, Artificial Sequence
  Description of Artificial Sequence: Synthetic oligonucleotide
  Sense strand starting at position 871 of SEQ ID NO: 1243697
gucgcaguuaaaugaacau

SEQ ID NO: 1434599 - RNA, 19 nt, Artificial Sequence
  Description of Artificial Sequence: Synthetic oligonucleotide
  Antisense strand to SEQ ID NO: 1434598
auguucauuuaacugcgac

SEQ ID NO: 1434600 - RNA, 19 nt, Artificial Sequence
  Description of Artificial Sequence: Synthetic oligonucleotide
  Sense strand starting at position 936 of SEQ ID NO: 1243697
uuagaaugcuagucugaga

SEQ ID NO: 1434601 - RNA, 19 nt, Artificial Sequence
  Description of Artificial Sequence: Synthetic oligonucleotide
  Antisense strand to SEQ ID NO: 1434600
ucucagacuagcauucuaa

SEQ ID NO: 1434602 - RNA, 19 nt, Artificial Sequence
  Description of Artificial Sequence: Synthetic oligonucleotide
  Sense strand starting at position 1022 of SEQ ID NO: 1243697
ucuuuauaaugaccgcuua

SEQ ID NO: 1434603 - RNA, 19 nt, Artificial Sequence
  Description of Artificial Sequence: Synthetic oligonucleotide
  Antisense strand to SEQ ID NO: 1434602
uaagcggucauuauaaaga

SEQ ID NO: 1434604 - RNA, 19 nt, Artificial Sequence
  Description of Artificial Sequence: Synthetic oligonucleotide
  Sense strand starting at position 1131 of SEQ ID NO: 1243697
uuaaguaccuugcuugauu

SEQ ID NO: 1434605 - RNA, 19 nt, Artificial Sequence
  Description of Artificial Sequence: Synthetic oligonucleotide
  Antisense strand to SEQ ID NO: 1434604
aaucaagcaagguacuuaa

SEQ ID NO: 1434606 - RNA, 19 nt, Artificial Sequence
  Description of Artificial Sequence: Synthetic oligonucleotide
  Sense strand starting at position 1225 of SEQ ID NO: 1243697
agcgcuaaaguucagugau

SEQ ID NO: 1434607 - RNA, 19 nt, Artificial Sequence
  Description of Artificial Sequence: Synthetic oligonucleotide
  Antisense strand to SEQ ID NO: 1434606
aucacugaacuuuagcgcu

SEQ ID NO: 1434608 - RNA, 19 nt, Artificial Sequence
  Description of Artificial Sequence: Synthetic oligonucleotide
  Sense strand starting at position 1271 of SEQ ID NO: 1243697
cugggauccucugugacau

SEQ ID NO: 1434609 - RNA, 19 nt, Artificial Sequence
  Description of Artificial Sequence: Synthetic oligonucleotide
  Antisense strand to SEQ ID NO: 1434608
augucacagaggaucccag

SEQ ID NO: 1434610 - RNA, 19 nt, Artificial Sequence
  Description of Artificial Sequence: Synthetic oligonucleotide
  Sense strand starting at position 1272 of SEQ ID NO: 1243697
ugggauccucugugacaug

SEQ ID NO: 1434611 - RNA, 19 nt, Artificial Sequence
  Description of Artificial Sequence: Synthetic oligonucleotide
  Antisense strand to SEQ ID NO: 1434610
caugucacagaggauccca

SEQ ID NO: 1434612 - RNA, 19 nt, Artificial Sequence
  Description of Artificial Sequence: Synthetic oligonucleotide
  Sense strand starting at position 1341 of SEQ ID NO: 1243697
ggccguguuaucuuaaguc

SEQ ID NO: 1434613 - RNA, 19 nt, Artificial Sequence
  Description of Artificial Sequence: Synthetic oligonucleotide
  Antisense strand to SEQ ID NO: 1434612
gacuuaagauaacacggcc

SEQ ID NO: 1434614 - RNA, 19 nt, Artificial Sequence
  Description of Artificial Sequence: Synthetic oligonucleotide
  Sense strand starting at position 1466 of SEQ ID NO: 1243697
agcuguggguccucacaau

SEQ ID NO: 1434615 - RNA, 19 nt, Artificial Sequence
  Description of Artificial Sequence: Synthetic oligonucleotide
  Antisense strand to SEQ ID NO: 1434614
auugugaggacccacagcu

SEQ ID NO: 1434616 - RNA, 19 nt, Artificial Sequence
  Description of Artificial Sequence: Synthetic oligonucleotide
  Sense strand starting at position 1567 of SEQ ID NO: 1243697
ucaacagauccucgacuca

SEQ ID NO: 1434617 - RNA, 19 nt, Artificial Sequence
  Description of Artificial Sequence: Synthetic oligonucleotide
  Antisense strand to SEQ ID NO: 1434616
ugagucgaggaucuguuga

SEQ ID NO: 1434618 - RNA, 19 nt, Artificial Sequence
  Description of Artificial Sequence: Synthetic oligonucleotide
  Sense strand starting at position 1988 of SEQ ID NO: 1243697
cagagcuucggagggaauu

SEQ ID NO: 1434619 - RNA, 19 nt, Artificial Sequence
  Description of Artificial Sequence: Synthetic oligonucleotide
  Antisense strand to SEQ ID NO: 1434618
aauucccuccgaagcucug

SEQ ID NO: 1434620 - RNA, 19 nt, Artificial Sequence
  Description of Artificial Sequence: Synthetic oligonucleotide
  Sense strand starting at position 1999 of SEQ ID NO: 1243697
agggaauucuugucaauug

SEQ ID NO: 1434621 - RNA, 19 nt, Artificial Sequence
  Description of Artificial Sequence: Synthetic oligonucleotide
  Antisense strand to SEQ ID NO: 1434620
caauugacaagaauucccu

SEQ ID NO: 1434622 - RNA, 19 nt, Artificial Sequence
  Description of Artificial Sequence: Synthetic oligonucleotide
  Sense strand starting at position 2100 of SEQ ID NO: 1243697
aaaugacucccucggcgaa

SEQ ID NO: 1434623 - RNA, 19 nt, Artificial Sequence
  Description of Artificial Sequence: Synthetic oligonucleotide
  Antisense strand to SEQ ID NO: 1434622
uucgccgagggagucauuu

SEQ ID NO: 1434624 - RNA, 19 nt, Artificial Sequence
  Description of Artificial Sequence: Synthetic oligonucleotide
  Sense strand starting at position 2132 of SEQ ID NO: 1243697
gaaccauugcaccguggaa

SEQ ID NO: 1434625 - RNA, 19 nt, Artificial Sequence
  Description of Artificial Sequence: Synthetic oligonucleotide
  Antisense strand to SEQ ID NO: 1434624
uuccacggugcaaugguuc

SEQ ID NO: 1434626 - RNA, 19 nt, Artificial Sequence
  Description of Artificial Sequence: Synthetic oligonucleotide
  Sense strand starting at position 2134 of SEQ ID NO: 1243697
accauugcaccguggaauu

SEQ ID NO: 1434627 - RNA, 19 nt, Artificial Sequence
  Description of Artificial Sequence: Synthetic oligonucleotide
  Antisense strand to SEQ ID NO: 1434626
aauuccacggugcaauggu

SEQ ID NO: 1434628 - RNA, 19 nt, Artificial Sequence
  Description of Artificial Sequence: Synthetic oligonucleotide
  Sense strand starting at position 2202 of SEQ ID NO: 1243697
caccguugaggacgugauu

SEQ ID NO: 1434629 - RNA, 19 nt, Artificial Sequence
  Description of Artificial Sequence: Synthetic oligonucleotide
  Antisense strand to SEQ ID NO: 1434628
aaucacguccucaacggug

SEQ ID NO: 1434630 - RNA, 19 nt, Artificial Sequence
  Description of Artificial Sequence: Synthetic oligonucleotide
  Sense strand starting at position 2234 of SEQ ID NO: 1243697
uagucaguuguugacagaa

SEQ ID NO: 1434631 - RNA, 19 nt, Artificial Sequence
  Description of Artificial Sequence: Synthetic oligonucleotide
  Antisense strand to SEQ ID NO: 1434630
uucugucaacaacugacua

SEQ ID NO: 1434632 - RNA, 19 nt, Artificial Sequence
  Description of Artificial Sequence: Synthetic oligonucleotide
  Sense strand starting at position 2363 of SEQ ID NO: 1243697
gcuaauauuugggcgagcu

SEQ ID NO: 1434633 - RNA, 19 nt, Artificial Sequence
  Description of Artificial Sequence: Synthetic oligonucleotide
  Antisense strand to SEQ ID NO: 1434632
agcucgcccaaauauuagc

SEQ ID NO: 1434634 - RNA, 19 nt, Artificial Sequence
  Description of Artificial Sequence: Synthetic oligonucleotide
  Sense strand starting at position 2364 of SEQ ID NO: 1243697
cuaauauuugggcgagcuu

SEQ ID NO: 1434635 - RNA, 19 nt, Artificial Sequence
  Description of Artificial Sequence: Synthetic oligonucleotide
  Antisense strand to SEQ ID NO: 1434634
aagcucgcccaaauauuag

SEQ ID NO: 1434636 - RNA, 19 nt, Artificial Sequence
  Description of Artificial Sequence: Synthetic oligonucleotide
  Sense strand starting at position 2438 of SEQ ID NO: 1243697
agucgaaguaccuauucga

SEQ ID NO: 1434637 - RNA, 19 nt, Artificial Sequence
  Description of Artificial Sequence: Synthetic oligonucleotide
  Antisense strand to SEQ ID NO: 1434636
ucgaauagguacuucgacu

SEQ ID NO: 1434638 - RNA, 19 nt, Artificial Sequence
  Description of Artificial Sequence: Synthetic oligonucleotide
  Sense strand starting at position 2441 of SEQ ID NO: 1243697
cgaaguaccuauucgacua

SEQ ID NO: 1434639 - RNA, 19 nt, Artificial Sequence
  Description of Artificial Sequence: Synthetic oligonucleotide
  Antisense strand to SEQ ID NO: 1434638
uagucgaauagguacuucg

SEQ ID NO: 1434640 - RNA, 19 nt, Artificial Sequence
  Description of Artificial Sequence: Synthetic oligonucleotide
  Sense strand starting at position 2465 of SEQ ID NO: 1243697
gcauuucuuucuguggauu

SEQ ID NO: 1434641 - RNA, 19 nt, Artificial Sequence
  Description of Artificial Sequence: Synthetic oligonucleotide
  Antisense strand to SEQ ID NO: 1434640
aauccacagaaagaaaugc

SEQ ID NO: 1434642 - RNA, 19 nt, Artificial Sequence
  Description of Artificial Sequence: Synthetic oligonucleotide
  Sense strand starting at position 2478 of SEQ ID NO: 1243697
uggauuccauccucucgaa

SEQ ID NO: 1434643 - RNA, 19 nt, Artificial Sequence
  Description of Artificial Sequence: Synthetic oligonucleotide
  Antisense strand to SEQ ID NO: 1434642
uucgagaggauggaaucca

SEQ ID NO: 1434644 - RNA, 19 nt, Artificial Sequence
  Description of Artificial Sequence: Synthetic oligonucleotide
  Sense strand starting at position 2563 of SEQ ID NO: 1243697
gcugguuucugaucucaug

SEQ ID NO: 1434645 - RNA, 19 nt, Artificial Sequence
  Description of Artificial Sequence: Synthetic oligonucleotide
  Antisense strand to SEQ ID NO: 1434644
caugagaucagaaaccagc

SEQ ID NO: 1434646 - RNA, 19 nt, Artificial Sequence
  Description of Artificial Sequence: Synthetic oligonucleotide
  Sense strand starting at position 2731 of SEQ ID NO: 1243697
ggcugagugaccuacaggu

SEQ ID NO: 1434647 - RNA, 19 nt, Artificial Sequence
  Description of Artificial Sequence: Synthetic oligonucleotide
  Antisense strand to SEQ ID NO: 1434646
accuguaggucacucagcc

SEQ ID NO: 1434648 - RNA, 19 nt, Artificial Sequence
  Description of Artificial Sequence: Synthetic oligonucleotide
  Sense strand starting at position 2814 of SEQ ID NO: 1243697
ucuccugauccagagcuua

SEQ ID NO: 1434649 - RNA, 19 nt, Artificial Sequence
  Description of Artificial Sequence: Synthetic oligonucleotide
  Antisense strand to SEQ ID NO: 1434648
uaagcucuggaucaggaga

SEQ ID NO: 1434650 - RNA, 19 nt, Artificial Sequence
  Description of Artificial Sequence: Synthetic oligonucleotide
  Sense strand starting at position 2826 of SEQ ID NO: 1243697
gagcuuagaccucgggaac

SEQ ID NO: 1434651 - RNA, 19 nt, Artificial Sequence
  Description of Artificial Sequence: Synthetic oligonucleotide
  Antisense strand to SEQ ID NO: 1434650
guucccgaggucuaagcuc

SEQ ID NO: 1434652 - RNA, 19 nt, Artificial Sequence
  Description of Artificial Sequence: Synthetic oligonucleotide
  Sense strand starting at position 2827 of SEQ ID NO: 1243697
agcuuagaccucgggaaca

SEQ ID NO: 1434653 - RNA, 19 nt, Artificial Sequence
  Description of Artificial Sequence: Synthetic oligonucleotide
  Antisense strand to SEQ ID NO: 1434652
uguucccgaggucuaagcu

SEQ ID NO: 1434654 - RNA, 19 nt, Artificial Sequence
  Description of Artificial Sequence: Synthetic oligonucleotide
  Sense strand starting at position 2915 of SEQ ID NO: 1243697
cugaauccgcuuuaucaga

SEQ ID NO: 1434655 - RNA, 19 nt, Artificial Sequence
  Description of Artificial Sequence: Synthetic oligonucleotide
  Antisense strand to SEQ ID NO: 1434654
ucugauaaagcggauucag

SEQ ID NO: 1434656 - RNA, 19 nt, Artificial Sequence
  Description of Artificial Sequence: Synthetic oligonucleotide
  Sense strand starting at position 2963 of SEQ ID NO: 1243697
gggcuucuugcugggaaua

SEQ ID NO: 1434657 - RNA, 19 nt, Artificial Sequence
  Description of Artificial Sequence: Synthetic oligonucleotide
  Antisense strand to SEQ ID NO: 1434656
uauucccagcaagaagccc

SEQ ID NO: 1434658 - RNA, 19 nt, Artificial Sequence
  Description of Artificial Sequence: Synthetic oligonucleotide
  Sense strand starting at position 2964 of SEQ ID NO: 1243697
ggcuucuugcugggaauaa

SEQ ID NO: 1434659 - RNA, 19 nt, Artificial Sequence
  Description of Artificial Sequence: Synthetic oligonucleotide
  Antisense strand to SEQ ID NO: 1434658
uuauucccagcaagaagcc

SEQ ID NO: 1434660 - RNA, 19 nt, Artificial Sequence
  Description of Artificial Sequence: Synthetic oligonucleotide
  Sense strand starting at position 3174 of SEQ ID NO: 1243697
auguuacauuuguuugagu

SEQ ID NO: 1434661 - RNA, 19 nt, Artificial Sequence
  Description of Artificial Sequence: Synthetic oligonucleotide
  Antisense strand to SEQ ID NO: 1434660
acucaaacaaauguaacau

SEQ ID NO: 1434662 - RNA, 19 nt, Artificial Sequence
  Description of Artificial Sequence: Synthetic oligonucleotide
  Sense strand starting at position 48 of SEQ ID NO: 1243698
ugaacacaguuccugaaau

SEQ ID NO: 1434663 - RNA, 19 nt, Artificial Sequence
  Description of Artificial Sequence: Synthetic oligonucleotide
  Antisense strand to SEQ ID NO: 1434662
auuucaggaacuguguuca

SEQ ID NO: 1434664 - RNA, 19 nt, Artificial Sequence
  Description of Artificial Sequence: Synthetic oligonucleotide
  Sense strand starting at position 49 of SEQ ID NO: 1243698
gaacacaguuccugaaaug

SEQ ID NO: 1434665 - RNA, 19 nt, Artificial Sequence
  Description of Artificial Sequence: Synthetic oligonucleotide
  Antisense strand to SEQ ID NO: 1434664
cauuucaggaacuguguuc

SEQ ID NO: 1434666 - RNA, 19 nt, Artificial Sequence
  Description of Artificial Sequence: Synthetic oligonucleotide
  Sense strand starting at position 209 of SEQ ID NO: 1243698
gugggaucucuccauggcu

SEQ ID NO: 1434667 - RNA, 19 nt, Artificial Sequence
  Description of Artificial Sequence: Synthetic oligonucleotide
  Antisense strand to SEQ ID NO: 1434666
agccauggagagaucccac

SEQ ID NO: 1434668 - RNA, 19 nt, Artificial Sequence
  Description of Artificial Sequence: Synthetic oligonucleotide
  Sense strand starting at position 298 of SEQ ID NO: 1243698
gaggacacuucuuccauga

SEQ ID NO: 1434669 - RNA, 19 nt, Artificial Sequence
  Description of Artificial Sequence: Synthetic oligonucleotide
  Antisense strand to SEQ ID NO: 1434668
ucauggaagaaguguccuc

SEQ ID NO: 1434670 - RNA, 19 nt, Artificial Sequence
  Description of Artificial Sequence: Synthetic oligonucleotide
  Sense strand starting at position 300 of SEQ ID NO: 1243698
ggacacuucuuccaugaag

SEQ ID NO: 1434671 - RNA, 19 nt, Artificial Sequence
  Description of Artificial Sequence: Synthetic oligonucleotide
  Antisense strand to SEQ ID NO: 1434670
cuucauggaagaagugucc

SEQ ID NO: 1434672 - RNA, 19 nt, Artificial Sequence
  Description of Artificial Sequence: Synthetic oligonucleotide
  Sense strand starting at position 370 of SEQ ID NO: 1243698
guuugaguucccugaggga

SEQ ID NO: 1434673 - RNA, 19 nt, Artificial Sequence
  Description of Artificial Sequence: Synthetic oligonucleotide
  Antisense strand to SEQ ID NO: 1434672
ucccucagggaacucaaac

SEQ ID NO: 1434674 - RNA, 19 nt, Artificial Sequence
  Description of Artificial Sequence: Synthetic oligonucleotide
  Sense strand starting at position 373 of SEQ ID NO: 1243698
ugaguucccugagggaaug

SEQ ID NO: 1434675 - RNA, 19 nt, Artificial Sequence
  Description of Artificial Sequence: Synthetic oligonucleotide
  Antisense strand to SEQ ID NO: 1434674
cauucccucagggaacuca

SEQ ID NO: 1434676 - RNA, 19 nt, Artificial Sequence
  Description of Artificial Sequence: Synthetic oligonucleotide
  Sense strand starting at position 462 of SEQ ID NO: 1243698
gauuguaaaucgugucaca

SEQ ID NO: 1434677 - RNA, 19 nt, Artificial Sequence
  Description of Artificial Sequence: Synthetic oligonucleotide
  Antisense strand to SEQ ID NO: 1434676
ugugacacgauuuacaauc

SEQ ID NO: 1434678 - RNA, 19 nt, Artificial Sequence
  Description of Artificial Sequence: Synthetic oligonucleotide
  Sense strand starting at position 521 of SEQ ID NO: 1243698
ccaucccucuuggaagaau

SEQ ID NO: 1434679 - RNA, 19 nt, Artificial Sequence
  Description of Artificial Sequence: Synthetic oligonucleotide
  Antisense strand to SEQ ID NO: 1434678
auucuuccaagagggaugg

SEQ ID NO: 1434680 - RNA, 19 nt, Artificial Sequence
  Description of Artificial Sequence: Synthetic oligonucleotide
  Sense strand starting at position 648 of SEQ ID NO: 1243698
aagucauccgacugucaca

SEQ ID NO: 1434681 - RNA, 19 nt, Artificial Sequence
  Description of Artificial Sequence: Synthetic oligonucleotide
  Antisense strand to SEQ ID NO: 1434680
ugugacagucggaugacuu

SEQ ID NO: 1434682 - RNA, 19 nt, Artificial Sequence
  Description of Artificial Sequence: Synthetic oligonucleotide
  Sense strand starting at position 676 of SEQ ID NO: 1243698
cuggcugaugcacacaaau

SEQ ID NO: 1434683 - RNA, 19 nt, Artificial Sequence
  Description of Artificial Sequence: Synthetic oligonucleotide
  Antisense strand to SEQ ID NO: 1434682
auuugugugcaucagccag

SEQ ID NO: 1434684 - RNA, 19 nt, Artificial Sequence
  Description of Artificial Sequence: Synthetic oligonucleotide
  Sense strand starting at position 833 of SEQ ID NO: 1243698
caacuuccgccgugaagaa

SEQ ID NO: 1434685 - RNA, 19 nt, Artificial Sequence
  Description of Artificial Sequence: Synthetic oligonucleotide
  Antisense strand to SEQ ID NO: 1434684
uucuucacggcggaaguug

SEQ ID NO: 1434686 - RNA, 19 nt, Artificial Sequence
  Description of Artificial Sequence: Synthetic oligonucleotide
  Sense strand starting at position 1142 of SEQ ID NO: 1243698
gggagauuagacuggcgau

SEQ ID NO: 1434687 - RNA, 19 nt, Artificial Sequence
  Description of Artificial Sequence: Synthetic oligonucleotide
  Antisense strand to SEQ ID NO: 1434686
aucgccagucuaaucuccc

SEQ ID NO: 1434688 - RNA, 19 nt, Artificial Sequence
  Description of Artificial Sequence: Synthetic oligonucleotide
  Sense strand starting at position 1143 of SEQ ID NO: 1243698
ggagauuagacuggcgauu

SEQ ID NO: 1434689 - RNA, 19 nt, Artificial Sequence
  Description of Artificial Sequence: Synthetic oligonucleotide
  Antisense strand to SEQ ID NO: 1434688
aaucgccagucuaaucucc

SEQ ID NO: 1434690 - RNA, 19 nt, Artificial Sequence
  Description of Artificial Sequence: Synthetic oligonucleotide
  Sense strand starting at position 2024 of SEQ ID NO: 1243698
cgccgagcgcggucuuuau

SEQ ID NO: 1434691 - RNA, 19 nt, Artificial Sequence
  Description of Artificial Sequence: Synthetic oligonucleotide
  Antisense strand to SEQ ID NO: 1434690
auaaagaccgcgcucggcg

SEQ ID NO: 1434692 - RNA, 19 nt, Artificial Sequence
  Description of Artificial Sequence: Synthetic oligonucleotide
  Sense strand starting at position 2160 of SEQ ID NO: 1243698
gacuucucuuagggaccua

SEQ ID NO: 1434693 - RNA, 19 nt, Artificial Sequence
  Description of Artificial Sequence: Synthetic oligonucleotide
  Antisense strand to SEQ ID NO: 1434692
uaggucccuaagagaaguc

SEQ ID NO: 1434694 - RNA, 19 nt, Artificial Sequence
  Description of Artificial Sequence: Synthetic oligonucleotide
  Sense strand starting at position 2305 of SEQ ID NO: 1243698
gccgauauaugcucaaagg

SEQ ID NO: 1434695 - RNA, 19 nt, Artificial Sequence
  Description of Artificial Sequence: Synthetic oligonucleotide
  Antisense strand to SEQ ID NO: 1434694
ccuuugagcauauaucggc

SEQ ID NO: 1434696 - RNA, 19 nt, Artificial Sequence
  Description of Artificial Sequence: Synthetic oligonucleotide
  Sense strand starting at position 2306 of SEQ ID NO: 1243698
ccgauauaugcucaaaggu

SEQ ID NO: 1434697 - RNA, 19 nt, Artificial Sequence
  Description of Artificial Sequence: Synthetic oligonucleotide
  Antisense strand to SEQ ID NO: 1434696
accuuugagcauauaucgg

SEQ ID NO: 1434698 - RNA, 19 nt, Artificial Sequence
  Description of Artificial Sequence: Synthetic oligonucleotide
  Sense strand starting at position 2395 of SEQ ID NO: 1243698
ggcagaaugucagaggaau

SEQ ID NO: 1434699 - RNA, 19 nt, Artificial Sequence
  Description of Artificial Sequence: Synthetic oligonucleotide
  Antisense strand to SEQ ID NO: 1434698
auuccucugacauucugcc

SEQ ID NO: 1434700 - RNA, 19 nt, Artificial Sequence
  Description of Artificial Sequence: Synthetic oligonucleotide
  Sense strand starting at position 2683 of SEQ ID NO: 1243698
ccagcacugcccugagauc

SEQ ID NO: 1434701 - RNA, 19 nt, Artificial Sequence
  Description of Artificial Sequence: Synthetic oligonucleotide
  Antisense strand to SEQ ID NO: 1434700
gaucucagggcagugcugg

SEQ ID NO: 1434702 - RNA, 19 nt, Artificial Sequence
  Description of Artificial Sequence: Synthetic oligonucleotide
  Sense strand starting at position 2779 of SEQ ID NO: 1243698
gugucuacuugggucaaca

SEQ ID NO: 1434703 - RNA, 19 nt, Artificial Sequence
  Description of Artificial Sequence: Synthetic oligonucleotide
  Antisense strand to SEQ ID NO: 1434702
uguugacccaaguagacac

SEQ ID NO: 1434704 - RNA, 19 nt, Artificial Sequence
  Description of Artificial Sequence: Synthetic oligonucleotide
  Sense strand starting at position 2781 of SEQ ID NO: 1243698
gucuacuugggucaacaaa

SEQ ID NO: 1434705 - RNA, 19 nt, Artificial Sequence
  Description of Artificial Sequence: Synthetic oligonucleotide
  Antisense strand to SEQ ID NO: 1434704
uuuguugacccaaguagac

SEQ ID NO: 1434706 - RNA, 19 nt, Artificial Sequence
  Description of Artificial Sequence: Synthetic oligonucleotide
  Sense strand starting at position 2900 of SEQ ID NO: 1243698
ggaguacacuugcucuaca

SEQ ID NO: 1434707 - RNA, 19 nt, Artificial Sequence
  Description of Artificial Sequence: Synthetic oligonucleotide
  Antisense strand to SEQ ID NO: 1434706
uguagagcaaguguacucc

SEQ ID NO: 1434708 - RNA, 19 nt, Artificial Sequence
  Description of Artificial Sequence: Synthetic oligonucleotide
  Sense strand starting at position 3346 of SEQ ID NO: 1243698
aacagagcuuccgucucaa

SEQ ID NO: 1434709 - RNA, 19 nt, Artificial Sequence
  Description of Artificial Sequence: Synthetic oligonucleotide
  Antisense strand to SEQ ID NO: 1434708
uugagacggaagcucuguu

SEQ ID NO: 1434710 - RNA, 19 nt, Artificial Sequence
  Description of Artificial Sequence: Synthetic oligonucleotide
  Sense strand starting at position 3350 of SEQ ID NO: 1243698
gagcuuccgucucaauaaa

SEQ ID NO: 1434711 - RNA, 19 nt, Artificial Sequence
  Description of Artificial Sequence: Synthetic oligonucleotide
  Antisense strand to SEQ ID NO: 1434710
uuuauugagacggaagcuc

SEQ ID NO: 1434712 - RNA, 19 nt, Artificial Sequence
  Description of Artificial Sequence: Synthetic oligonucleotide
  Sense strand starting at position 3870 of SEQ ID NO: 1243698
aaugguaugcauugaauga

SEQ ID NO: 1434713 - RNA, 19 nt, Artificial Sequence
  Description of Artificial Sequence: Synthetic oligonucleotide
  Antisense strand to SEQ ID NO: 1434712
ucauucaaugcauaccauu

SEQ ID NO: 1434714 - RNA, 19 nt, Artificial Sequence
  Description of Artificial Sequence: Synthetic oligonucleotide
  Sense strand starting at position 3874 of SEQ ID NO: 1243698
guaugcauugaaugaauga

SEQ ID NO: 1434715 - RNA, 19 nt, Artificial Sequence
  Description of Artificial Sequence: Synthetic oligonucleotide
  Antisense strand to SEQ ID NO: 1434714
ucauucauucaaugcauac

SEQ ID NO: 1434716 - RNA, 19 nt, Artificial Sequence
  Description of Artificial Sequence: Synthetic oligonucleotide
  Sense strand starting at position 3929 of SEQ ID NO: 1243698
uagguagucuuccaggaca

SEQ ID NO: 1434717 - RNA, 19 nt, Artificial Sequence
  Description of Artificial Sequence: Synthetic oligonucleotide
  Antisense strand to SEQ ID NO: 1434716
uguccuggaagacuaccua

SEQ ID NO: 1434718 - RNA, 19 nt, Artificial Sequence
  Description of Artificial Sequence: Synthetic oligonucleotide
  Sense strand starting at position 3931 of SEQ ID NO: 1243698
gguagucuuccaggacaaa

SEQ ID NO: 1434719 - RNA, 19 nt, Artificial Sequence
  Description of Artificial Sequence: Synthetic oligonucleotide
  Antisense strand to SEQ ID NO: 1434718
uuuguccuggaagacuacc

SEQ ID NO: 1434720 - RNA, 19 nt, Artificial Sequence
  Description of Artificial Sequence: Synthetic oligonucleotide
  Sense strand starting at position 3968 of SEQ ID NO: 1243698
gugugaagucaggaguaag

SEQ ID NO: 1434721 - RNA, 19 nt, Artificial Sequence
  Description of Artificial Sequence: Synthetic oligonucleotide
  Antisense strand to SEQ ID NO: 1434720
cuuacuccugacuucacac

SEQ ID NO: 1434722 - RNA, 19 nt, Artificial Sequence
  Description of Artificial Sequence: Synthetic oligonucleotide
  Sense strand starting at position 263 of SEQ ID NO: 1243699
uggcuagggucguacagaa

SEQ ID NO: 1434723 - RNA, 19 nt, Artificial Sequence
  Description of Artificial Sequence: Synthetic oligonucleotide
  Antisense strand to SEQ ID NO: 1434722
uucuguacgacccuagcca

SEQ ID NO: 1434724 - RNA, 19 nt, Artificial Sequence
  Description of Artificial Sequence: Synthetic oligonucleotide
  Sense strand starting at position 278 of SEQ ID NO: 1243699
agaagcaguauuuguguga

SEQ ID NO: 1434725 - RNA, 19 nt, Artificial Sequence
  Description of Artificial Sequence: Synthetic oligonucleotide
  Antisense strand to SEQ ID NO: 1434724
ucacacaaauacugcuucu

SEQ ID NO: 1434726 - RNA, 19 nt, Artificial Sequence
  Description of Artificial Sequence: Synthetic oligonucleotide
  Sense strand starting at position 279 of SEQ ID NO: 1243699
gaagcaguauuugugugau

SEQ ID NO: 1434727 - RNA, 19 nt, Artificial Sequence
  Description of Artificial Sequence: Synthetic oligonucleotide
  Antisense strand to SEQ ID NO: 1434726
aucacacaaauacugcuuc

SEQ ID NO: 1434728 - RNA, 19 nt, Artificial Sequence
  Description of Artificial Sequence: Synthetic oligonucleotide
  Sense strand starting at position 291 of SEQ ID NO: 1243699
gugugauuccagggacagg

SEQ ID NO: 1434729 - RNA, 19 nt, Artificial Sequence
  Description of Artificial Sequence: Synthetic oligonucleotide
  Antisense strand to SEQ ID NO: 1434728
ccugucccuggaaucacac

SEQ ID NO: 1434730 - RNA, 19 nt, Artificial Sequence
  Description of Artificial Sequence: Synthetic oligonucleotide
  Sense strand starting at position 324 of SEQ ID NO: 1243699
uccaguuucccucaggaau

SEQ ID NO: 1434731 - RNA, 19 nt, Artificial Sequence
  Description of Artificial Sequence: Synthetic oligonucleotide
  Antisense strand to SEQ ID NO: 1434730
auuccugagggaaacugga

SEQ ID NO: 1434732 - RNA, 19 nt, Artificial Sequence
  Description of Artificial Sequence: Synthetic oligonucleotide
  Sense strand starting at position 457 of SEQ ID NO: 1243699
ccagcucuccugcagcaaa

SEQ ID NO: 1434733 - RNA, 19 nt, Artificial Sequence
  Description of Artificial Sequence: Synthetic oligonucleotide
  Antisense strand to SEQ ID NO: 1434732
uuugcugcaggagagcugg

SEQ ID NO: 1434734 - RNA, 19 nt, Artificial Sequence
  Description of Artificial Sequence: Synthetic oligonucleotide
  Sense strand starting at position 679 of SEQ ID NO: 1243699
caagcuagcccugaguagu

SEQ ID NO: 1434735 - RNA, 19 nt, Artificial Sequence
  Description of Artificial Sequence: Synthetic oligonucleotide
  Antisense strand to SEQ ID NO: 1434734
acuacucagggcuagcuug

SEQ ID NO: 1434736 - RNA, 19 nt, Artificial Sequence
  Description of Artificial Sequence: Synthetic oligonucleotide
  Sense strand starting at position 696 of SEQ ID NO: 1243699
guaggaucccagggcuaga

SEQ ID NO: 1434737 - RNA, 19 nt, Artificial Sequence
  Description of Artificial Sequence: Synthetic oligonucleotide
  Antisense strand to SEQ ID NO: 1434736
ucuagcccugggauccuac

SEQ ID NO: 1434738 - RNA, 19 nt, Artificial Sequence
  Description of Artificial Sequence: Synthetic oligonucleotide
  Sense strand starting at position 784 of SEQ ID NO: 1243699
caggcugcccucuguagau

SEQ ID NO: 1434739 - RNA, 19 nt, Artificial Sequence
  Description of Artificial Sequence: Synthetic oligonucleotide
  Antisense strand to SEQ ID NO: 1434738
aucuacagagggcagccug

SEQ ID NO: 1434740 - RNA, 19 nt, Artificial Sequence
  Description of Artificial Sequence: Synthetic oligonucleotide
  Sense strand starting at position 796 of SEQ ID NO: 1243699
uguagauggugaggguauu

SEQ ID NO: 1434741 - RNA, 19 nt, Artificial Sequence
  Description of Artificial Sequence: Synthetic oligonucleotide
  Antisense strand to SEQ ID NO: 1434740
aauacccucaccaucuaca

SEQ ID NO: 1434742 - RNA, 19 nt, Artificial Sequence
  Description of Artificial Sequence: Synthetic oligonucleotide
  Sense strand starting at position 808 of SEQ ID NO: 1243699
ggguauuucuccugggauc

SEQ ID NO: 1434743 - RNA, 19 nt, Artificial Sequence
  Description of Artificial Sequence: Synthetic oligonucleotide
  Antisense strand to SEQ ID NO: 1434742
gaucccaggagaaauaccc

SEQ ID NO: 1434744 - RNA, 19 nt, Artificial Sequence
  Description of Artificial Sequence: Synthetic oligonucleotide
  Sense strand starting at position 1001 of SEQ ID NO: 1243699
cccacacuccuuugaagga

SEQ ID NO: 1434745 - RNA, 19 nt, Artificial Sequence
  Description of Artificial Sequence: Synthetic oligonucleotide
  Antisense strand to SEQ ID NO: 1434744
uccuucaaaggaguguggg

SEQ ID NO: 1434746 - RNA, 19 nt, Artificial Sequence
  Description of Artificial Sequence: Synthetic oligonucleotide
  Sense strand starting at position 1578 of SEQ ID NO: 1243699
ggagcauccgaagagguuu

SEQ ID NO: 1434747 - RNA, 19 nt, Artificial Sequence
  Description of Artificial Sequence: Synthetic oligonucleotide
  Antisense strand to SEQ ID NO: 1434746
aaaccucuucggaugcucc

SEQ ID NO: 1434748 - RNA, 19 nt, Artificial Sequence
  Description of Artificial Sequence: Synthetic oligonucleotide
  Sense strand starting at position 1766 of SEQ ID NO: 1243699
ucggcugucaccgagaagu

SEQ ID NO: 1434749 - RNA, 19 nt, Artificial Sequence
  Description of Artificial Sequence: Synthetic oligonucleotide
  Antisense strand to SEQ ID NO: 1434748
acuucucggugacagccga

SEQ ID NO: 1434750 - RNA, 19 nt, Artificial Sequence
  Description of Artificial Sequence: Synthetic oligonucleotide
  Sense strand starting at position 2324 of SEQ ID NO: 1243699
gcucgaauucugcgaagug

SEQ ID NO: 1434751 - RNA, 19 nt, Artificial Sequence
  Description of Artificial Sequence: Synthetic oligonucleotide
  Antisense strand to SEQ ID NO: 1434750
cacuucgcagaauucgagc

SEQ ID NO: 1434752 - RNA, 19 nt, Artificial Sequence
  Description of Artificial Sequence: Synthetic oligonucleotide
  Sense strand starting at position 2325 of SEQ ID NO: 1243699
cucgaauucugcgaaguga

SEQ ID NO: 1434753 - RNA, 19 nt, Artificial Sequence
  Description of Artificial Sequence: Synthetic oligonucleotide
  Antisense strand to SEQ ID NO: 1434752
ucacuucgcagaauucgag

SEQ ID NO: 1434754 - RNA, 19 nt, Artificial Sequence
  Description of Artificial Sequence: Synthetic oligonucleotide
  Sense strand starting at position 2336 of SEQ ID NO: 1243699
cgaagugacuccagaggga

SEQ ID NO: 1434755 - RNA, 19 nt, Artificial Sequence
  Description of Artificial Sequence: Synthetic oligonucleotide
  Antisense strand to SEQ ID NO: 1434754
ucccucuggagucacuucg

SEQ ID NO: 1434756 - RNA, 19 nt, Artificial Sequence
  Description of Artificial Sequence: Synthetic oligonucleotide
  Sense strand starting at position 2356 of SEQ ID NO: 1243699
cccgaaagccucugaauaa

SEQ ID NO: 1434757 - RNA, 19 nt, Artificial Sequence
  Description of Artificial Sequence: Synthetic oligonucleotide
  Antisense strand to SEQ ID NO: 1434756
uuauucagaggcuuucggg

SEQ ID NO: 1434758 - RNA, 19 nt, Artificial Sequence
  Description of Artificial Sequence: Synthetic oligonucleotide
  Sense strand starting at position 2357 of SEQ ID NO: 1243699
ccgaaagccucugaauaag

SEQ ID NO: 1434759 - RNA, 19 nt, Artificial Sequence
  Description of Artificial Sequence: Synthetic oligonucleotide
  Antisense strand to SEQ ID NO: 1434758
cuuauucagaggcuuucgg

SEQ ID NO: 1434760 - RNA, 19 nt, Artificial Sequence
  Description of Artificial Sequence: Synthetic oligonucleotide
  Sense strand starting at position 2375 of SEQ ID NO: 1243699
gcgggucuucucuagagga

SEQ ID NO: 1434761 - RNA, 19 nt, Artificial Sequence
  Description of Artificial Sequence: Synthetic oligonucleotide
  Antisense strand to SEQ ID NO: 1434760
uccucuagagaagacccgc

SEQ ID NO: 1434762 - RNA, 19 nt, Artificial Sequence
  Description of Artificial Sequence: Synthetic oligonucleotide
  Sense strand starting at position 2388 of SEQ ID NO: 1243699
agaggaaagugcuggaugu

SEQ ID NO: 1434763 - RNA, 19 nt, Artificial Sequence
  Description of Artificial Sequence: Synthetic oligonucleotide
  Antisense strand to SEQ ID NO: 1434762
acauccagcacuuuccucu

SEQ ID NO: 1434764 - RNA, 19 nt, Artificial Sequence
  Description of Artificial Sequence: Synthetic oligonucleotide
  Sense strand starting at position 2389 of SEQ ID NO: 1243699
gaggaaagugcuggauguu

SEQ ID NO: 1434765 - RNA, 19 nt, Artificial Sequence
  Description of Artificial Sequence: Synthetic oligonucleotide
  Antisense strand to SEQ ID NO: 1434764
aacauccagcacuuuccuc

SEQ ID NO: 1434766 - RNA, 19 nt, Artificial Sequence
  Description of Artificial Sequence: Synthetic oligonucleotide
  Sense strand starting at position 2398 of SEQ ID NO: 1243699
gcuggauguucuccuuauu

SEQ ID NO: 1434767 - RNA, 19 nt, Artificial Sequence
  Description of Artificial Sequence: Synthetic oligonucleotide
  Antisense strand to SEQ ID NO: 1434766
aauaaggagaacauccagc

SEQ ID NO: 1434768 - RNA, 19 nt, Artificial Sequence
  Description of Artificial Sequence: Synthetic oligonucleotide
  Sense strand starting at position 2417 of SEQ ID NO: 1243699
ugguguuucugcuuucuuu

SEQ ID NO: 1434769 - RNA, 19 nt, Artificial Sequence
  Description of Artificial Sequence: Synthetic oligonucleotide
  Antisense strand to SEQ ID NO: 1434768
aaagaaagcagaaacacca

SEQ ID NO: 1434770 - RNA, 19 nt, Artificial Sequence
  Description of Artificial Sequence: Synthetic oligonucleotide
  Sense strand starting at position 2419 of SEQ ID NO: 1243699
guguuucugcuuucuuuau

SEQ ID NO: 1434771 - RNA, 19 nt, Artificial Sequence
  Description of Artificial Sequence: Synthetic oligonucleotide
  Antisense strand to SEQ ID NO: 1434770
auaaagaaagcagaaacac

SEQ ID NO: 1434772 - RNA, 19 nt, Artificial Sequence
  Description of Artificial Sequence: Synthetic oligonucleotide
  Sense strand starting at position 2566 of SEQ ID NO: 1243699
aaauguaaccagggagcaa

SEQ ID NO: 1434773 - RNA, 19 nt, Artificial Sequence
  Description of Artificial Sequence: Synthetic oligonucleotide
  Antisense strand to SEQ ID NO: 1434772
uugcucccugguuacauuu

SEQ ID NO: 1434774 - RNA, 19 nt, Artificial Sequence
  Description of Artificial Sequence: Synthetic oligonucleotide
  Sense strand starting at position 3153 of SEQ ID NO: 1243699
ugcucuuccuccugggaca

SEQ ID NO: 1434775 - RNA, 19 nt, Artificial Sequence
  Description of Artificial Sequence: Synthetic oligonucleotide
  Antisense strand to SEQ ID NO: 1434774
ugucccaggaggaagagca

SEQ ID NO: 1434776 - RNA, 19 nt, Artificial Sequence
  Description of Artificial Sequence: Synthetic oligonucleotide
  Sense strand starting at position 3264 of SEQ ID NO: 1243699
uuugaugggugauccagau

SEQ ID NO: 1434777 - RNA, 19 nt, Artificial Sequence
  Description of Artificial Sequence: Synthetic oligonucleotide
  Antisense strand to SEQ ID NO: 1434776
aucuggaucacccaucaaa

SEQ ID NO: 1434778 - RNA, 19 nt, Artificial Sequence
  Description of Artificial Sequence: Synthetic oligonucleotide
  Sense strand starting at position 3270 of SEQ ID NO: 1243699
gggugauccagauggauuc

SEQ ID NO: 1434779 - RNA, 19 nt, Artificial Sequence
  Description of Artificial Sequence: Synthetic oligonucleotide
  Antisense strand to SEQ ID NO: 1434778
gaauccaucuggaucaccc

SEQ ID NO: 1434780 - RNA, 19 nt, Artificial Sequence
  Description of Artificial Sequence: Synthetic oligonucleotide
  Sense strand starting at position 3277 of SEQ ID NO: 1243699
ccagauggauucccugaua

SEQ ID NO: 1434781 - RNA, 19 nt, Artificial Sequence
  Description of Artificial Sequence: Synthetic oligonucleotide
  Antisense strand to SEQ ID NO: 1434780
uaucagggaauccaucugg

SEQ ID NO: 1434782 - RNA, 19 nt, Artificial Sequence
  Description of Artificial Sequence: Synthetic oligonucleotide
  Sense strand starting at position 3430 of SEQ ID NO: 1243699
uuuaauuucuuugagucgu

SEQ ID NO: 1434783 - RNA, 19 nt, Artificial Sequence
  Description of Artificial Sequence: Synthetic oligonucleotide
  Antisense strand to SEQ ID NO: 1434782
acgacucaaagaaauuaaa

SEQ ID NO: 1434784 - RNA, 19 nt, Artificial Sequence
  Description of Artificial Sequence: Synthetic oligonucleotide
  Sense strand starting at position 81 of SEQ ID NO: 1243700
agucucgaccucugggauu

SEQ ID NO: 1434785 - RNA, 19 nt, Artificial Sequence
  Description of Artificial Sequence: Synthetic oligonucleotide
  Antisense strand to SEQ ID NO: 1434784
aaucccagaggucgagacu

SEQ ID NO: 1434786 - RNA, 19 nt, Artificial Sequence
  Description of Artificial Sequence: Synthetic oligonucleotide
  Sense strand starting at position 83 of SEQ ID NO: 1243700
ucucgaccucugggauuaa

SEQ ID NO: 1434787 - RNA, 19 nt, Artificial Sequence
  Description of Artificial Sequence: Synthetic oligonucleotide
  Antisense strand to SEQ ID NO: 1434786
uuaaucccagaggucgaga

SEQ ID NO: 1434788 - RNA, 19 nt, Artificial Sequence
  Description of Artificial Sequence: Synthetic oligonucleotide
  Sense strand starting at position 111 of SEQ ID NO: 1243700
ucaucucagcccuggagua

SEQ ID NO: 1434789 - RNA, 19 nt, Artificial Sequence
  Description of Artificial Sequence: Synthetic oligonucleotide
  Antisense strand to SEQ ID NO: 1434788
uacuccagggcugagauga

SEQ ID NO: 1434790 - RNA, 19 nt, Artificial Sequence
  Description of Artificial Sequence: Synthetic oligonucleotide
  Sense strand starting at position 112 of SEQ ID NO: 1243700
caucucagcccuggaguaa

SEQ ID NO: 1434791 - RNA, 19 nt, Artificial Sequence
  Description of Artificial Sequence: Synthetic oligonucleotide
  Antisense strand to SEQ ID NO: 1434790
uuacuccagggcugagaug

SEQ ID NO: 1434792 - RNA, 19 nt, Artificial Sequence
  Description of Artificial Sequence: Synthetic oligonucleotide
  Sense strand starting at position 330 of SEQ ID NO: 1243700
ucccuuaccuguuuagaug

SEQ ID NO: 1434793 - RNA, 19 nt, Artificial Sequence
  Description of Artificial Sequence: Synthetic oligonucleotide
  Antisense strand to SEQ ID NO: 1434792
caucuaaacagguaaggga

SEQ ID NO: 1434794 - RNA, 19 nt, Artificial Sequence
  Description of Artificial Sequence: Synthetic oligonucleotide
  Sense strand starting at position 331 of SEQ ID NO: 1243700
cccuuaccuguuuagauga

SEQ ID NO: 1434795 - RNA, 19 nt, Artificial Sequence
  Description of Artificial Sequence: Synthetic oligonucleotide
  Antisense strand to SEQ ID NO: 1434794
ucaucuaaacagguaaggg

SEQ ID NO: 1434796 - RNA, 19 nt, Artificial Sequence
  Description of Artificial Sequence: Synthetic oligonucleotide
  Sense strand starting at position 571 of SEQ ID NO: 1243700
agagacagcugucucaaua

SEQ ID NO: 1434797 - RNA, 19 nt, Artificial Sequence
  Description of Artificial Sequence: Synthetic oligonucleotide
  Antisense strand to SEQ ID NO: 1434796
uauugagacagcugucucu

SEQ ID NO: 1434798 - RNA, 19 nt, Artificial Sequence
  Description of Artificial Sequence: Synthetic oligonucleotide
  Sense strand starting at position 579 of SEQ ID NO: 1243700
cugucucaauagcuugaua

SEQ ID NO: 1434799 - RNA, 19 nt, Artificial Sequence
  Description of Artificial Sequence: Synthetic oligonucleotide
  Antisense strand to SEQ ID NO: 1434798
uaucaagcuauugagacag

SEQ ID NO: 1434800 - RNA, 19 nt, Artificial Sequence
  Description of Artificial Sequence: Synthetic oligonucleotide
  Sense strand starting at position 581 of SEQ ID NO: 1243700
gucucaauagcuugauaua

SEQ ID NO: 1434801 - RNA, 19 nt, Artificial Sequence
  Description of Artificial Sequence: Synthetic oligonucleotide
  Antisense strand to SEQ ID NO: 1434800
uauaucaagcuauugagac

SEQ ID NO: 1434802 - RNA, 19 nt, Artificial Sequence
  Description of Artificial Sequence: Synthetic oligonucleotide
  Sense strand starting at position 582 of SEQ ID NO: 1243700
ucucaauagcuugauauag

SEQ ID NO: 1434803 - RNA, 19 nt, Artificial Sequence
  Description of Artificial Sequence: Synthetic oligonucleotide
  Antisense strand to SEQ ID NO: 1434802
cuauaucaagcuauugaga

SEQ ID NO: 1434804 - RNA, 19 nt, Artificial Sequence
  Description of Artificial Sequence: Synthetic oligonucleotide
  Sense strand starting at position 668 of SEQ ID NO: 1243700
agcuucucagaauggaaca

SEQ ID NO: 1434805 - RNA, 19 nt, Artificial Sequence
  Description of Artificial Sequence: Synthetic oligonucleotide
  Antisense strand to SEQ ID NO: 1434804
uguuccauucugagaagcu

SEQ ID NO: 1434806 - RNA, 19 nt, Artificial Sequence
  Description of Artificial Sequence: Synthetic oligonucleotide
  Sense strand starting at position 821 of SEQ ID NO: 1243700
ccggaaaccgacuggaaua

SEQ ID NO: 1434807 - RNA, 19 nt, Artificial Sequence
  Description of Artificial Sequence: Synthetic oligonucleotide
  Antisense strand to SEQ ID NO: 1434806
uauuccagucgguuuccgg

SEQ ID NO: 1434808 - RNA, 19 nt, Artificial Sequence
  Description of Artificial Sequence: Synthetic oligonucleotide
  Sense strand starting at position 848 of SEQ ID NO: 1243700
aggagagccaucuguaaca

SEQ ID NO: 1434809 - RNA, 19 nt, Artificial Sequence
  Description of Artificial Sequence: Synthetic oligonucleotide
  Antisense strand to SEQ ID NO: 1434808
uguuacagauggcucuccu

SEQ ID NO: 1434810 - RNA, 19 nt, Artificial Sequence
  Description of Artificial Sequence: Synthetic oligonucleotide
  Sense strand starting at position 850 of SEQ ID NO: 1243700
gagagccaucuguaacaug

SEQ ID NO: 1434811 - RNA, 19 nt, Artificial Sequence
  Description of Artificial Sequence: Synthetic oligonucleotide
  Antisense strand to SEQ ID NO: 1434810
cauguuacagauggcucuc

SEQ ID NO: 1434812 - RNA, 19 nt, Artificial Sequence
  Description of Artificial Sequence: Synthetic oligonucleotide
  Sense strand starting at position 1089 of SEQ ID NO: 1243700
ucucuauggccaggacaga

SEQ ID NO: 1434813 - RNA, 19 nt, Artificial Sequence
  Description of Artificial Sequence: Synthetic oligonucleotide
  Antisense strand to SEQ ID NO: 1434812
ucuguccuggccauagaga

SEQ ID NO: 1434814 - RNA, 19 nt, Artificial Sequence
  Description of Artificial Sequence: Synthetic oligonucleotide
  Sense strand starting at position 1412 of SEQ ID NO: 1243700
cacugagacccugguuguu

SEQ ID NO: 1434815 - RNA, 19 nt, Artificial Sequence
  Description of Artificial Sequence: Synthetic oligonucleotide
  Antisense strand to SEQ ID NO: 1434814
aacaaccagggucucagug

SEQ ID NO: 1434816 - RNA, 19 nt, Artificial Sequence
  Description of Artificial Sequence: Synthetic oligonucleotide
  Sense strand starting at position 1519 of SEQ ID NO: 1243700
gagggcauuagaggucaga

SEQ ID NO: 1434817 - RNA, 19 nt, Artificial Sequence
  Description of Artificial Sequence: Synthetic oligonucleotide
  Antisense strand to SEQ ID NO: 1434816
ucugaccucuaaugcccuc

SEQ ID NO: 1434818 - RNA, 19 nt, Artificial Sequence
  Description of Artificial Sequence: Synthetic oligonucleotide
  Sense strand starting at position 1560 of SEQ ID NO: 1243700
aagcaaagucauggagauc

SEQ ID NO: 1434819 - RNA, 19 nt, Artificial Sequence
  Description of Artificial Sequence: Synthetic oligonucleotide
  Antisense strand to SEQ ID NO: 1434818
gaucuccaugacuuugcuu

SEQ ID NO: 1434820 - RNA, 19 nt, Artificial Sequence
  Description of Artificial Sequence: Synthetic oligonucleotide
  Sense strand starting at position 1577 of SEQ ID NO: 1243700
ucggaagucaaggaaaugu

SEQ ID NO: 1434821 - RNA, 19 nt, Artificial Sequence
  Description of Artificial Sequence: Synthetic oligonucleotide
  Antisense strand to SEQ ID NO: 1434820
acauuuccuugacuuccga

SEQ ID NO: 1434822 - RNA, 19 nt, Artificial Sequence
  Description of Artificial Sequence: Synthetic oligonucleotide
  Sense strand starting at position 1626 of SEQ ID NO: 1243700
agggaauggucucucggga

SEQ ID NO: 1434823 - RNA, 19 nt, Artificial Sequence
  Description of Artificial Sequence: Synthetic oligonucleotide
  Antisense strand to SEQ ID NO: 1434822
ucccgagagaccauucccu

SEQ ID NO: 1434824 - RNA, 19 nt, Artificial Sequence
  Description of Artificial Sequence: Synthetic oligonucleotide
  Sense strand starting at position 1631 of SEQ ID NO: 1243700
auggucucucgggaagacu

SEQ ID NO: 1434825 - RNA, 19 nt, Artificial Sequence
  Description of Artificial Sequence: Synthetic oligonucleotide
  Antisense strand to SEQ ID NO: 1434824
agucuucccgagagaccau

SEQ ID NO: 1434826 - RNA, 19 nt, Artificial Sequence
  Description of Artificial Sequence: Synthetic oligonucleotide
  Sense strand starting at position 1742 of SEQ ID NO: 1243700
uaccguugguaauuaacau

SEQ ID NO: 1434827 - RNA, 19 nt, Artificial Sequence
  Description of Artificial Sequence: Synthetic oligonucleotide
  Antisense strand to SEQ ID NO: 1434826
auguuaauuaccaacggua

SEQ ID NO: 1434828 - RNA, 19 nt, Artificial Sequence
  Description of Artificial Sequence: Synthetic oligonucleotide
  Sense strand starting at position 2014 of SEQ ID NO: 1243700
ucucauuggccguaauauc

SEQ ID NO: 1434829 - RNA, 19 nt, Artificial Sequence
  Description of Artificial Sequence: Synthetic oligonucleotide
  Antisense strand to SEQ ID NO: 1434828
gauauuacggccaaugaga

SEQ ID NO: 1434830 - RNA, 19 nt, Artificial Sequence
  Description of Artificial Sequence: Synthetic oligonucleotide
  Sense strand starting at position 2044 of SEQ ID NO: 1243700
auugguugacgucaucgau

SEQ ID NO: 1434831 - RNA, 19 nt, Artificial Sequence
  Description of Artificial Sequence: Synthetic oligonucleotide
  Antisense strand to SEQ ID NO: 1434830
aucgaugacgucaaccaau

SEQ ID NO: 1434832 - RNA, 19 nt, Artificial Sequence
  Description of Artificial Sequence: Synthetic oligonucleotide
  Sense strand starting at position 2156 of SEQ ID NO: 1243700
uccuacgagaucuggauua

SEQ ID NO: 1434833 - RNA, 19 nt, Artificial Sequence
  Description of Artificial Sequence: Synthetic oligonucleotide
  Antisense strand to SEQ ID NO: 1434832
uaauccagaucucguagga

SEQ ID NO: 1434834 - RNA, 19 nt, Artificial Sequence
  Description of Artificial Sequence: Synthetic oligonucleotide
  Sense strand starting at position 2161 of SEQ ID NO: 1243700
cgagaucuggauuacgauu

SEQ ID NO: 1434835 - RNA, 19 nt, Artificial Sequence
  Description of Artificial Sequence: Synthetic oligonucleotide
  Antisense strand to SEQ ID NO: 1434834
aaucguaauccagaucucg

SEQ ID NO: 1434836 - RNA, 19 nt, Artificial Sequence
  Description of Artificial Sequence: Synthetic oligonucleotide
  Sense strand starting at position 2188 of SEQ ID NO: 1243700
ccugaaacgcucgaccaua

SEQ ID NO: 1434837 - RNA, 19 nt, Artificial Sequence
  Description of Artificial Sequence: Synthetic oligonucleotide
  Antisense strand to SEQ ID NO: 1434836
uauggucgagcguuucagg

SEQ ID NO: 1434838 - RNA, 19 nt, Artificial Sequence
  Description of Artificial Sequence: Synthetic oligonucleotide
  Sense strand starting at position 2256 of SEQ ID NO: 1243700
caagguguacgcugaagaa

SEQ ID NO: 1434839 - RNA, 19 nt, Artificial Sequence
  Description of Artificial Sequence: Synthetic oligonucleotide
  Antisense strand to SEQ ID NO: 1434838
uucuucagcguacaccuug

SEQ ID NO: 1434840 - RNA, 19 nt, Artificial Sequence
  Description of Artificial Sequence: Synthetic oligonucleotide
  Sense strand starting at position 2417 of SEQ ID NO: 1243700
cugagaucccgcgagauau

SEQ ID NO: 1434841 - RNA, 19 nt, Artificial Sequence
  Description of Artificial Sequence: Synthetic oligonucleotide
  Antisense strand to SEQ ID NO: 1434840
auaucucgcgggaucucag

SEQ ID NO: 1434842 - RNA, 19 nt, Artificial Sequence
  Description of Artificial Sequence: Synthetic oligonucleotide
  Sense strand starting at position 2429 of SEQ ID NO: 1243700
gagauauucuaggccggga

SEQ ID NO: 1434843 - RNA, 19 nt, Artificial Sequence
  Description of Artificial Sequence: Synthetic oligonucleotide
  Antisense strand to SEQ ID NO: 1434842
ucccggccuagaauaucuc

SEQ ID NO: 1434844 - RNA, 19 nt, Artificial Sequence
  Description of Artificial Sequence: Synthetic oligonucleotide
  Sense strand starting at position 2431 of SEQ ID NO: 1243700
gauauucuaggccgggaga

SEQ ID NO: 1434845 - RNA, 19 nt, Artificial Sequence
  Description of Artificial Sequence: Synthetic oligonucleotide
  Antisense strand to SEQ ID NO: 1434844
ucucccggccuagaauauc

SEQ ID NO: 1434846 - RNA, 19 nt, Artificial Sequence
  Description of Artificial Sequence: Synthetic oligonucleotide
  Sense strand starting at position 2496 of SEQ ID NO: 1243700
ccgcuuuccauggagagua

SEQ ID NO: 1434847 - RNA, 19 nt, Artificial Sequence
  Description of Artificial Sequence: Synthetic oligonucleotide
  Antisense strand to SEQ ID NO: 1434846
uacucuccauggaaagcgg

SEQ ID NO: 1434848 - RNA, 19 nt, Artificial Sequence
  Description of Artificial Sequence: Synthetic oligonucleotide
  Sense strand starting at position 2498 of SEQ ID NO: 1243700
gcuuuccauggagaguaaa

SEQ ID NO: 1434849 - RNA, 19 nt, Artificial Sequence
  Description of Artificial Sequence: Synthetic oligonucleotide
  Antisense strand to SEQ ID NO: 1434848
uuuacucuccauggaaagc

SEQ ID NO: 1434850 - RNA, 19 nt, Artificial Sequence
  Description of Artificial Sequence: Synthetic oligonucleotide
  Sense strand starting at position 2585 of SEQ ID NO: 1243700
gacuaucauccagauggcu

SEQ ID NO: 1434851 - RNA, 19 nt, Artificial Sequence
  Description of Artificial Sequence: Synthetic oligonucleotide
  Antisense strand to SEQ ID NO: 1434850
agccaucuggaugauaguc

SEQ ID NO: 1434852 - RNA, 19 nt, Artificial Sequence
  Description of Artificial Sequence: Synthetic oligonucleotide
  Sense strand starting at position 3024 of SEQ ID NO: 1243700
auaugaauugcaggaacga

SEQ ID NO: 1434853 - RNA, 19 nt, Artificial Sequence
  Description of Artificial Sequence: Synthetic oligonucleotide
  Antisense strand to SEQ ID NO: 1434852
ucguuccugcaauucauau

SEQ ID NO: 1434854 - RNA, 19 nt, Artificial Sequence
  Description of Artificial Sequence: Synthetic oligonucleotide
  Sense strand starting at position 3072 of SEQ ID NO: 1243700
aguuuaaacgcuccgcuua

SEQ ID NO: 1434855 - RNA, 19 nt, Artificial Sequence
  Description of Artificial Sequence: Synthetic oligonucleotide
  Antisense strand to SEQ ID NO: 1434854
uaagcggagcguuuaaacu

SEQ ID NO: 1434856 - RNA, 19 nt, Artificial Sequence
  Description of Artificial Sequence: Synthetic oligonucleotide
  Sense strand starting at position 3144 of SEQ ID NO: 1243700
uauauugcuggugagagga

SEQ ID NO: 1434857 - RNA, 19 nt, Artificial Sequence
  Description of Artificial Sequence: Synthetic oligonucleotide
  Antisense strand to SEQ ID NO: 1434856
uccucucaccagcaauaua

SEQ ID NO: 1434858 - RNA, 19 nt, Artificial Sequence
  Description of Artificial Sequence: Synthetic oligonucleotide
  Sense strand starting at position 3246 of SEQ ID NO: 1243700
aguaauucuugaguaacua

SEQ ID NO: 1434859 - RNA, 19 nt, Artificial Sequence
  Description of Artificial Sequence: Synthetic oligonucleotide
  Antisense strand to SEQ ID NO: 1434858
uaguuacucaagaauuacu

SEQ ID NO: 1434860 - RNA, 19 nt, Artificial Sequence
  Description of Artificial Sequence: Synthetic oligonucleotide
  Sense strand starting at position 3247 of SEQ ID NO: 1243700
guaauucuugaguaacuaa

SEQ ID NO: 1434861 - RNA, 19 nt, Artificial Sequence
  Description of Artificial Sequence: Synthetic oligonucleotide
  Antisense strand to SEQ ID NO: 1434860
uuaguuacucaagaauuac

SEQ ID NO: 1434862 - RNA, 19 nt, Artificial Sequence
  Description of Artificial Sequence: Synthetic oligonucleotide
  Sense strand starting at position 3364 of SEQ ID NO: 1243700
auuugcagaguuugucgaa

SEQ ID NO: 1434863 - RNA, 19 nt, Artificial Sequence
  Description of Artificial Sequence: Synthetic oligonucleotide
  Antisense strand to SEQ ID NO: 1434862
uucgacaaacucugcaaau

SEQ ID NO: 1434864 - RNA, 19 nt, Artificial Sequence
  Description of Artificial Sequence: Synthetic oligonucleotide
  Sense strand starting at position 74 of SEQ ID NO: 1243701
cgucgacuggcuugacaga

SEQ ID NO: 1434865 - RNA, 19 nt, Artificial Sequence
  Description of Artificial Sequence: Synthetic oligonucleotide
  Antisense strand to SEQ ID NO: 1434864
ucugucaagccagucgacg

SEQ ID NO: 1434866 - RNA, 19 nt, Artificial Sequence
  Description of Artificial Sequence: Synthetic oligonucleotide
  Sense strand starting at position 811 of SEQ ID NO: 1243701
cgauauacauccucaacug

SEQ ID NO: 1434867 - RNA, 19 nt, Artificial Sequence
  Description of Artificial Sequence: Synthetic oligonucleotide
  Antisense strand to SEQ ID NO: 1434866
caguugaggauguauaucg

SEQ ID NO: 1434868 - RNA, 19 nt, Artificial Sequence
  Description of Artificial Sequence: Synthetic oligonucleotide
  Sense strand starting at position 1469 of SEQ ID NO: 1243701
ggaggugcucaaugaaucu

SEQ ID NO: 1434869 - RNA, 19 nt, Artificial Sequence
  Description of Artificial Sequence: Synthetic oligonucleotide
  Antisense strand to SEQ ID NO: 1434868
agauucauugagcaccucc

SEQ ID NO: 1434870 - RNA, 19 nt, Artificial Sequence
  Description of Artificial Sequence: Synthetic oligonucleotide
  Sense strand starting at position 1484 of SEQ ID NO: 1243701
aucuuucuugaaugaguaa

SEQ ID NO: 1434871 - RNA, 19 nt, Artificial Sequence
  Description of Artificial Sequence: Synthetic oligonucleotide
  Antisense strand to SEQ ID NO: 1434870
uuacucauucaagaaagau

SEQ ID NO: 1434872 - RNA, 19 nt, Artificial Sequence
  Description of Artificial Sequence: Synthetic oligonucleotide
  Sense strand starting at position 1524 of SEQ ID NO: 1243701
cccugaacgcucuauacgu

SEQ ID NO: 1434873 - RNA, 19 nt, Artificial Sequence
  Description of Artificial Sequence: Synthetic oligonucleotide
  Antisense strand to SEQ ID NO: 1434872
acguauagagcguucaggg

SEQ ID NO: 1434874 - RNA, 19 nt, Artificial Sequence
  Description of Artificial Sequence: Synthetic oligonucleotide
  Sense strand starting at position 1531 of SEQ ID NO: 1243701
cgcucuauacguucgaauc

SEQ ID NO: 1434875 - RNA, 19 nt, Artificial Sequence
  Description of Artificial Sequence: Synthetic oligonucleotide
  Antisense strand to SEQ ID NO: 1434874
gauucgaacguauagagcg

SEQ ID NO: 1434876 - RNA, 19 nt, Artificial Sequence
  Description of Artificial Sequence: Synthetic oligonucleotide
  Sense strand starting at position 1541 of SEQ ID NO: 1243701
guucgaauccuggaagcug

SEQ ID NO: 1434877 - RNA, 19 nt, Artificial Sequence
  Description of Artificial Sequence: Synthetic oligonucleotide
  Antisense strand to SEQ ID NO: 1434876
cagcuuccaggauucgaac

SEQ ID NO: 1434878 - RNA, 19 nt, Artificial Sequence
  Description of Artificial Sequence: Synthetic oligonucleotide
  Sense strand starting at position 1610 of SEQ ID NO: 1243701
uuaacacugucugcguaau

SEQ ID NO: 1434879 - RNA, 19 nt, Artificial Sequence
  Description of Artificial Sequence: Synthetic oligonucleotide
  Antisense strand to SEQ ID NO: 1434878
auuacgcagacaguguuaa

SEQ ID NO: 1434880 - RNA, 19 nt, Artificial Sequence
  Description of Artificial Sequence: Synthetic oligonucleotide
  Sense strand starting at position 2000 of SEQ ID NO: 1243701
acgggaagaucuuuccuca

SEQ ID NO: 1434881 - RNA, 19 nt, Artificial Sequence
  Description of Artificial Sequence: Synthetic oligonucleotide
  Antisense strand to SEQ ID NO: 1434880
ugaggaaagaucuucccgu

SEQ ID NO: 1434882 - RNA, 19 nt, Artificial Sequence
  Description of Artificial Sequence: Synthetic oligonucleotide
  Sense strand starting at position 2076 of SEQ ID NO: 1243701
gggcugguuccggaaguau

SEQ ID NO: 1434883 - RNA, 19 nt, Artificial Sequence
  Description of Artificial Sequence: Synthetic oligonucleotide
  Antisense strand to SEQ ID NO: 1434882
auacuuccggaaccagccc

SEQ ID NO: 1434884 - RNA, 19 nt, Artificial Sequence
  Description of Artificial Sequence: Synthetic oligonucleotide
  Sense strand starting at position 2203 of SEQ ID NO: 1243701
gcucucccugccgagaaau

SEQ ID NO: 1434885 - RNA, 19 nt, Artificial Sequence
  Description of Artificial Sequence: Synthetic oligonucleotide
  Antisense strand to SEQ ID NO: 1434884
auuucucggcagggagagc

SEQ ID NO: 1434886 - RNA, 19 nt, Artificial Sequence
  Description of Artificial Sequence: Synthetic oligonucleotide
  Sense strand starting at position 2828 of SEQ ID NO: 1243701
cccuucguucucugagacu

SEQ ID NO: 1434887 - RNA, 19 nt, Artificial Sequence
  Description of Artificial Sequence: Synthetic oligonucleotide
  Antisense strand to SEQ ID NO: 1434886
agucucagagaacgaaggg

SEQ ID NO: 1434888 - RNA, 19 nt, Artificial Sequence
  Description of Artificial Sequence: Synthetic oligonucleotide
  Sense strand starting at position 2916 of SEQ ID NO: 1243701
cugacaucccacugagauc

SEQ ID NO: 1434889 - RNA, 19 nt, Artificial Sequence
  Description of Artificial Sequence: Synthetic oligonucleotide
  Antisense strand to SEQ ID NO: 1434888
gaucucagugggaugucag

SEQ ID NO: 1434890 - RNA, 19 nt, Artificial Sequence
  Description of Artificial Sequence: Synthetic oligonucleotide
  Sense strand starting at position 2925 of SEQ ID NO: 1243701
cacugagaucugcaugagu

SEQ ID NO: 1434891 - RNA, 19 nt, Artificial Sequence
  Description of Artificial Sequence: Synthetic oligonucleotide
  Antisense strand to SEQ ID NO: 1434890
acucaugcagaucucagug

SEQ ID NO: 1434892 - RNA, 19 nt, Artificial Sequence
  Description of Artificial Sequence: Synthetic oligonucleotide
  Sense strand starting at position 2927 of SEQ ID NO: 1243701
cugagaucugcaugaguuu

SEQ ID NO: 1434893 - RNA, 19 nt, Artificial Sequence
  Description of Artificial Sequence: Synthetic oligonucleotide
  Antisense strand to SEQ ID NO: 1434892
aaacucaugcagaucucag

SEQ ID NO: 1434894 - RNA, 19 nt, Artificial Sequence
  Description of Artificial Sequence: Synthetic oligonucleotide
  Sense strand starting at position 3022 of SEQ ID NO: 1243701
cuuguagcuuucucagacu

SEQ ID NO: 1434895 - RNA, 19 nt, Artificial Sequence
  Description of Artificial Sequence: Synthetic oligonucleotide
  Antisense strand to SEQ ID NO: 1434894
agucugagaaagcuacaag

SEQ ID NO: 1434896 - RNA, 19 nt, Artificial Sequence
  Description of Artificial Sequence: Synthetic oligonucleotide
  Sense strand starting at position 3083 of SEQ ID NO: 1243701
ggaagcgcuccuugugaua

SEQ ID NO: 1434897 - RNA, 19 nt, Artificial Sequence
  Description of Artificial Sequence: Synthetic oligonucleotide
  Antisense strand to SEQ ID NO: 1434896
uaucacaaggagcgcuucc

SEQ ID NO: 1434898 - RNA, 19 nt, Artificial Sequence
  Description of Artificial Sequence: Synthetic oligonucleotide
  Sense strand starting at position 3116 of SEQ ID NO: 1243701
uauaguccuggucgcagaa

SEQ ID NO: 1434899 - RNA, 19 nt, Artificial Sequence
  Description of Artificial Sequence: Synthetic oligonucleotide
  Antisense strand to SEQ ID NO: 1434898
uucugcgaccaggacuaua

SEQ ID NO: 1434900 - RNA, 19 nt, Artificial Sequence
  Description of Artificial Sequence: Synthetic oligonucleotide
  Sense strand starting at position 3143 of SEQ ID NO: 1243701
uguuaacagucacugguuu

SEQ ID NO: 1434901 - RNA, 19 nt, Artificial Sequence
  Description of Artificial Sequence: Synthetic oligonucleotide
  Antisense strand to SEQ ID NO: 1434900
aaaccagugacuguuaaca

SEQ ID NO: 1434902 - RNA, 19 nt, Artificial Sequence
  Description of Artificial Sequence: Synthetic oligonucleotide
  Sense strand starting at position 3144 of SEQ ID NO: 1243701
guuaacagucacugguuua

SEQ ID NO: 1434903 - RNA, 19 nt, Artificial Sequence
  Description of Artificial Sequence: Synthetic oligonucleotide
  Antisense strand to SEQ ID NO: 1434902
uaaaccagugacuguuaac

SEQ ID NO: 1434904 - RNA, 19 nt, Artificial Sequence
  Description of Artificial Sequence: Synthetic oligonucleotide
  Sense strand starting at position 3163 of SEQ ID NO: 1243701
gguccauauuuagaucaaa

SEQ ID NO: 1434905 - RNA, 19 nt, Artificial Sequence
  Description of Artificial Sequence: Synthetic oligonucleotide
  Antisense strand to SEQ ID NO: 1434904
uuugaucuaaauauggacc

SEQ ID NO: 1434906 - RNA, 19 nt, Artificial Sequence
  Description of Artificial Sequence: Synthetic oligonucleotide
  Sense strand starting at position 3202 of SEQ ID NO: 1243701
uacuguuugccgcugcaaa

SEQ ID NO: 1434907 - RNA, 19 nt, Artificial Sequence
  Description of Artificial Sequence: Synthetic oligonucleotide
  Antisense strand to SEQ ID NO: 1434906
uuugcagcggcaaacagua

SEQ ID NO: 1434908 - RNA, 19 nt, Artificial Sequence
  Description of Artificial Sequence: Synthetic oligonucleotide
  Sense strand starting at position 3214 of SEQ ID NO: 1243701
cugcaaaucuaggcuaaga

SEQ ID NO: 1434909 - RNA, 19 nt, Artificial Sequence
  Description of Artificial Sequence: Synthetic oligonucleotide
  Antisense strand to SEQ ID NO: 1434908
ucuuagccuagauuugcag

SEQ ID NO: 1434910 - RNA, 19 nt, Artificial Sequence
  Description of Artificial Sequence: Synthetic oligonucleotide
  Sense strand starting at position 3216 of SEQ ID NO: 1243701
gcaaaucuaggcuaagaca

SEQ ID NO: 1434911 - RNA, 19 nt, Artificial Sequence
  Description of Artificial Sequence: Synthetic oligonucleotide
  Antisense strand to SEQ ID NO: 1434910
ugucuuagccuagauuugc

SEQ ID NO: 1434912 - RNA, 19 nt, Artificial Sequence
  Description of Artificial Sequence: Synthetic oligonucleotide
  Sense strand starting at position 3327 of SEQ ID NO: 1243701
uccaguuugaacuguguca

SEQ ID NO: 1434913 - RNA, 19 nt, Artificial Sequence
  Description of Artificial Sequence: Synthetic oligonucleotide
  Antisense strand to SEQ ID NO: 1434912
ugacacaguucaaacugga

SEQ ID NO: 1434914 - RNA, 19 nt, Artificial Sequence
  Description of Artificial Sequence: Synthetic oligonucleotide
  Sense strand starting at position 3329 of SEQ ID NO: 1243701
caguuugaacugugucaau

SEQ ID NO: 1434915 - RNA, 19 nt, Artificial Sequence
  Description of Artificial Sequence: Synthetic oligonucleotide
  Antisense strand to SEQ ID NO: 1434914
auugacacaguucaaacug

SEQ ID NO: 1434916 - RNA, 19 nt, Artificial Sequence
  Description of Artificial Sequence: Synthetic oligonucleotide
  Sense strand starting at position 3458 of SEQ ID NO: 1243701
gcuggaguugcguaaacau

SEQ ID NO: 1434917 - RNA, 19 nt, Artificial Sequence
  Description of Artificial Sequence: Synthetic oligonucleotide
  Antisense strand to SEQ ID NO: 1434916
auguuuacgcaacuccagc

SEQ ID NO: 1434918 - RNA, 19 nt, Artificial Sequence
  Description of Artificial Sequence: Synthetic oligonucleotide
  Sense strand starting at position 3466 of SEQ ID NO: 1243701
ugcguaaacauuuguuguu

SEQ ID NO: 1434919 - RNA, 19 nt, Artificial Sequence
  Description of Artificial Sequence: Synthetic oligonucleotide
  Antisense strand to SEQ ID NO: 1434918
aacaacaaauguuuacgca

SEQ ID NO: 1434920 - RNA, 19 nt, Artificial Sequence
  Description of Artificial Sequence: Synthetic oligonucleotide
  Sense strand starting at position 3467 of SEQ ID NO: 1243701
gcguaaacauuuguuguuu

SEQ ID NO: 1434921 - RNA, 19 nt, Artificial Sequence
  Description of Artificial Sequence: Synthetic oligonucleotide
  Antisense strand to SEQ ID NO: 1434920
aaacaacaaauguuuacgc

SEQ ID NO: 1434922 - RNA, 19 nt, Artificial Sequence
  Description of Artificial Sequence: Synthetic oligonucleotide
  Sense strand starting at position 3595 of SEQ ID NO: 1243701
cuauauccuccuuguggua

SEQ ID NO: 1434923 - RNA, 19 nt, Artificial Sequence
  Description of Artificial Sequence: Synthetic oligonucleotide
  Antisense strand to SEQ ID NO: 1434922
uaccacaaggaggauauag

SEQ ID NO: 1434924 - RNA, 19 nt, Artificial Sequence
  Description of Artificial Sequence: Synthetic oligonucleotide
  Sense strand starting at position 3644 of SEQ ID NO: 1243701
cuguaaagaugaguaggau

SEQ ID NO: 1434925 - RNA, 19 nt, Artificial Sequence
  Description of Artificial Sequence: Synthetic oligonucleotide
  Antisense strand to SEQ ID NO: 1434924
auccuacucaucuuuacag

SEQ ID NO: 1434926 - RNA, 19 nt, Artificial Sequence
  Description of Artificial Sequence: Synthetic oligonucleotide
  Sense strand starting at position 3675 of SEQ ID NO: 1243701
gagccaaguccuggcagua

SEQ ID NO: 1434927 - RNA, 19 nt, Artificial Sequence
  Description of Artificial Sequence: Synthetic oligonucleotide
  Antisense strand to SEQ ID NO: 1434926
uacugccaggacuuggcuc

SEQ ID NO: 1434928 - RNA, 19 nt, Artificial Sequence
  Description of Artificial Sequence: Synthetic oligonucleotide
  Sense strand starting at position 3727 of SEQ ID NO: 1243701
ugagauuacagcuggcagu

SEQ ID NO: 1434929 - RNA, 19 nt, Artificial Sequence
  Description of Artificial Sequence: Synthetic oligonucleotide
  Antisense strand to SEQ ID NO: 1434928
acugccagcuguaaucuca

SEQ ID NO: 1434930 - RNA, 19 nt, Artificial Sequence
  Description of Artificial Sequence: Synthetic oligonucleotide
  Sense strand starting at position 3746 of SEQ ID NO: 1243701
gcaaacucccacugauguu

SEQ ID NO: 1434931 - RNA, 19 nt, Artificial Sequence
  Description of Artificial Sequence: Synthetic oligonucleotide
  Antisense strand to SEQ ID NO: 1434930
aacaucagugggaguuugc

SEQ ID NO: 1434932 - RNA, 19 nt, Artificial Sequence
  Description of Artificial Sequence: Synthetic oligonucleotide
  Sense strand starting at position 3923 of SEQ ID NO: 1243701
agaagaauguuugucacug

SEQ ID NO: 1434933 - RNA, 19 nt, Artificial Sequence
  Description of Artificial Sequence: Synthetic oligonucleotide
  Antisense strand to SEQ ID NO: 1434932
cagugacaaacauucuucu

SEQ ID NO: 1434934 - RNA, 19 nt, Artificial Sequence
  Description of Artificial Sequence: Synthetic oligonucleotide
  Sense strand starting at position 3924 of SEQ ID NO: 1243701
gaagaauguuugucacugu

SEQ ID NO: 1434935 - RNA, 19 nt, Artificial Sequence
  Description of Artificial Sequence: Synthetic oligonucleotide
  Antisense strand to SEQ ID NO: 1434934
acagugacaaacauucuuc

SEQ ID NO: 1434936 - RNA, 19 nt, Artificial Sequence
  Description of Artificial Sequence: Synthetic oligonucleotide
  Sense strand starting at position 3927 of SEQ ID NO: 1243701
gaauguuugucacuguaau

SEQ ID NO: 1434937 - RNA, 19 nt, Artificial Sequence
  Description of Artificial Sequence: Synthetic oligonucleotide
  Antisense strand to SEQ ID NO: 1434936
auuacagugacaaacauuc

SEQ ID NO: 1434938 - RNA, 19 nt, Artificial Sequence
  Description of Artificial Sequence: Synthetic oligonucleotide
  Sense strand starting at position 3940 of SEQ ID NO: 1243701
uguaauuauuguccaggca

SEQ ID NO: 1434939 - RNA, 19 nt, Artificial Sequence
  Description of Artificial Sequence: Synthetic oligonucleotide
  Antisense strand to SEQ ID NO: 1434938
ugccuggacaauaauuaca

SEQ ID NO: 1434940 - RNA, 19 nt, Artificial Sequence
  Description of Artificial Sequence: Synthetic oligonucleotide
  Sense strand starting at position 3941 of SEQ ID NO: 1243701
guaauuauuguccaggcaa

SEQ ID NO: 1434941 - RNA, 19 nt, Artificial Sequence
  Description of Artificial Sequence: Synthetic oligonucleotide
  Antisense strand to SEQ ID NO: 1434940
uugccuggacaauaauuac

SEQ ID NO: 1434942 - RNA, 19 nt, Artificial Sequence
  Description of Artificial Sequence: Synthetic oligonucleotide
  Sense strand starting at position 3943 of SEQ ID NO: 1243701
aauuauuguccaggcaaag

SEQ ID NO: 1434943 - RNA, 19 nt, Artificial Sequence
  Description of Artificial Sequence: Synthetic oligonucleotide
  Antisense strand to SEQ ID NO: 1434942
cuuugccuggacaauaauu

SEQ ID NO: 1434944 - RNA, 19 nt, Artificial Sequence
  Description of Artificial Sequence: Synthetic oligonucleotide
  Sense strand starting at position 122 of SEQ ID NO: 1243702
uugacacccugucuagaaa

SEQ ID NO: 1434945 - RNA, 19 nt, Artificial Sequence
  Description of Artificial Sequence: Synthetic oligonucleotide
  Antisense strand to SEQ ID NO: 1434944
uuucuagacagggugucaa

SEQ ID NO: 1434946 - RNA, 19 nt, Artificial Sequence
  Description of Artificial Sequence: Synthetic oligonucleotide
  Sense strand starting at position 161 of SEQ ID NO: 1243702
aaggcaguuccugaauucu

SEQ ID NO: 1434947 - RNA, 19 nt, Artificial Sequence
  Description of Artificial Sequence: Synthetic oligonucleotide
  Antisense strand to SEQ ID NO: 1434946
agaauucaggaacugccuu

SEQ ID NO: 1434948 - RNA, 19 nt, Artificial Sequence
  Description of Artificial Sequence: Synthetic oligonucleotide
  Sense strand starting at position 170 of SEQ ID NO: 1243702
ccugaauucugucccacag

SEQ ID NO: 1434949 - RNA, 19 nt, Artificial Sequence
  Description of Artificial Sequence: Synthetic oligonucleotide
  Antisense strand to SEQ ID NO: 1434948
cugugggacagaauucagg

SEQ ID NO: 1434950 - RNA, 19 nt, Artificial Sequence
  Description of Artificial Sequence: Synthetic oligonucleotide
  Sense strand starting at position 420 of SEQ ID NO: 1243702
agaugucugccuuguaacu

SEQ ID NO: 1434951 - RNA, 19 nt, Artificial Sequence
  Description of Artificial Sequence: Synthetic oligonucleotide
  Antisense strand to SEQ ID NO: 1434950
aguuacaaggcagacaucu

SEQ ID NO: 1434952 - RNA, 19 nt, Artificial Sequence
  Description of Artificial Sequence: Synthetic oligonucleotide
  Sense strand starting at position 519 of SEQ ID NO: 1243702
aggguuuaaucuuccagau

SEQ ID NO: 1434953 - RNA, 19 nt, Artificial Sequence
  Description of Artificial Sequence: Synthetic oligonucleotide
  Antisense strand to SEQ ID NO: 1434952
aucuggaagauuaaacccu

SEQ ID NO: 1434954 - RNA, 19 nt, Artificial Sequence
  Description of Artificial Sequence: Synthetic oligonucleotide
  Sense strand starting at position 759 of SEQ ID NO: 1243702
gucaaaucucaugagccaa

SEQ ID NO: 1434955 - RNA, 19 nt, Artificial Sequence
  Description of Artificial Sequence: Synthetic oligonucleotide
  Antisense strand to SEQ ID NO: 1434954
uuggcucaugagauuugac

SEQ ID NO: 1434956 - RNA, 19 nt, Artificial Sequence
  Description of Artificial Sequence: Synthetic oligonucleotide
  Sense strand starting at position 804 of SEQ ID NO: 1243702
acuguugccggguaugaga

SEQ ID NO: 1434957 - RNA, 19 nt, Artificial Sequence
  Description of Artificial Sequence: Synthetic oligonucleotide
  Antisense strand to SEQ ID NO: 1434956
ucucauacccggcaacagu

SEQ ID NO: 1434958 - RNA, 19 nt, Artificial Sequence
  Description of Artificial Sequence: Synthetic oligonucleotide
  Sense strand starting at position 821 of SEQ ID NO: 1243702
gacaacuggcgcuaucagu

SEQ ID NO: 1434959 - RNA, 19 nt, Artificial Sequence
  Description of Artificial Sequence: Synthetic oligonucleotide
  Antisense strand to SEQ ID NO: 1434958
acugauagcgccaguuguc

SEQ ID NO: 1434960 - RNA, 19 nt, Artificial Sequence
  Description of Artificial Sequence: Synthetic oligonucleotide
  Sense strand starting at position 829 of SEQ ID NO: 1243702
gcgcuaucagugguccuga

SEQ ID NO: 1434961 - RNA, 19 nt, Artificial Sequence
  Description of Artificial Sequence: Synthetic oligonucleotide
  Antisense strand to SEQ ID NO: 1434960
ucaggaccacugauagcgc

SEQ ID NO: 1434962 - RNA, 19 nt, Artificial Sequence
  Description of Artificial Sequence: Synthetic oligonucleotide
  Sense strand starting at position 834 of SEQ ID NO: 1243702
aucagugguccugaaacug

SEQ ID NO: 1434963 - RNA, 19 nt, Artificial Sequence
  Description of Artificial Sequence: Synthetic oligonucleotide
  Antisense strand to SEQ ID NO: 1434962
caguuucaggaccacugau

SEQ ID NO: 1434964 - RNA, 19 nt, Artificial Sequence
  Description of Artificial Sequence: Synthetic oligonucleotide
  Sense strand starting at position 859 of SEQ ID NO: 1243702
uuuauucucgaucagcuaa

SEQ ID NO: 1434965 - RNA, 19 nt, Artificial Sequence
  Description of Artificial Sequence: Synthetic oligonucleotide
  Antisense strand to SEQ ID NO: 1434964
uuagcugaucgagaauaaa

SEQ ID NO: 1434966 - RNA, 19 nt, Artificial Sequence
  Description of Artificial Sequence: Synthetic oligonucleotide
  Sense strand starting at position 932 of SEQ ID NO: 1243702
gugucauaagggcaucuau

SEQ ID NO: 1434967 - RNA, 19 nt, Artificial Sequence
  Description of Artificial Sequence: Synthetic oligonucleotide
  Antisense strand to SEQ ID NO: 1434966
auagaugcccuuaugacac

SEQ ID NO: 1434968 - RNA, 19 nt, Artificial Sequence
  Description of Artificial Sequence: Synthetic oligonucleotide
  Sense strand starting at position 961 of SEQ ID NO: 1243702
gauagaugagucugacauc

SEQ ID NO: 1434969 - RNA, 19 nt, Artificial Sequence
  Description of Artificial Sequence: Synthetic oligonucleotide
  Antisense strand to SEQ ID NO: 1434968
gaugucagacucaucuauc

SEQ ID NO: 1434970 - RNA, 19 nt, Artificial Sequence
  Description of Artificial Sequence: Synthetic oligonucleotide
  Sense strand starting at position 964 of SEQ ID NO: 1243702
agaugagucugacaucaaa

SEQ ID NO: 1434971 - RNA, 19 nt, Artificial Sequence
  Description of Artificial Sequence: Synthetic oligonucleotide
  Antisense strand to SEQ ID NO: 1434970
uuugaugucagacucaucu

SEQ ID NO: 1434972 - RNA, 19 nt, Artificial Sequence
  Description of Artificial Sequence: Synthetic oligonucleotide
  Sense strand starting at position 1032 of SEQ ID NO: 1243702
cgaacaaaccuuugugcau

SEQ ID NO: 1434973 - RNA, 19 nt, Artificial Sequence
  Description of Artificial Sequence: Synthetic oligonucleotide
  Antisense strand to SEQ ID NO: 1434972
augcacaaagguuuguucg

SEQ ID NO: 1434974 - RNA, 19 nt, Artificial Sequence
  Description of Artificial Sequence: Synthetic oligonucleotide
  Sense strand starting at position 1038 of SEQ ID NO: 1243702
aaccuuugugcaugugaug

SEQ ID NO: 1434975 - RNA, 19 nt, Artificial Sequence
  Description of Artificial Sequence: Synthetic oligonucleotide
  Antisense strand to SEQ ID NO: 1434974
caucacaugcacaaagguu

SEQ ID NO: 1434976 - RNA, 19 nt, Artificial Sequence
  Description of Artificial Sequence: Synthetic oligonucleotide
  Sense strand starting at position 1110 of SEQ ID NO: 1243702
gcaggcugacuuuaagauu

SEQ ID NO: 1434977 - RNA, 19 nt, Artificial Sequence
  Description of Artificial Sequence: Synthetic oligonucleotide
  Antisense strand to SEQ ID NO: 1434976
aaucuuaaagucagccugc

SEQ ID NO: 1434978 - RNA, 19 nt, Artificial Sequence
  Description of Artificial Sequence: Synthetic oligonucleotide
  Sense strand starting at position 1285 of SEQ ID NO: 1243702
cucuuuaaugauuauaggu

SEQ ID NO: 1434979 - RNA, 19 nt, Artificial Sequence
  Description of Artificial Sequence: Synthetic oligonucleotide
  Antisense strand to SEQ ID NO: 1434978
accuauaaucauuaaagag

SEQ ID NO: 1434980 - RNA, 19 nt, Artificial Sequence
  Description of Artificial Sequence: Synthetic oligonucleotide
  Sense strand starting at position 1294 of SEQ ID NO: 1243702
gauuauaggucucccaaga

SEQ ID NO: 1434981 - RNA, 19 nt, Artificial Sequence
  Description of Artificial Sequence: Synthetic oligonucleotide
  Antisense strand to SEQ ID NO: 1434980
ucuugggagaccuauaauc

SEQ ID NO: 1434982 - RNA, 19 nt, Artificial Sequence
  Description of Artificial Sequence: Synthetic oligonucleotide
  Sense strand starting at position 1356 of SEQ ID NO: 1243702
aaaguaguucuggacgauc

SEQ ID NO: 1434983 - RNA, 19 nt, Artificial Sequence
  Description of Artificial Sequence: Synthetic oligonucleotide
  Antisense strand to SEQ ID NO: 1434982
gaucguccagaacuacuuu

SEQ ID NO: 1434984 - RNA, 19 nt, Artificial Sequence
  Description of Artificial Sequence: Synthetic oligonucleotide
  Sense strand starting at position 1359 of SEQ ID NO: 1243702
guaguucuggacgaucaca

SEQ ID NO: 1434985 - RNA, 19 nt, Artificial Sequence
  Description of Artificial Sequence: Synthetic oligonucleotide
  Antisense strand to SEQ ID NO: 1434984
ugugaucguccagaacuac

SEQ ID NO: 1434986 - RNA, 19 nt, Artificial Sequence
  Description of Artificial Sequence: Synthetic oligonucleotide
  Sense strand starting at position 1436 of SEQ ID NO: 1243702
gcgcccugccuagaagaau

SEQ ID NO: 1434987 - RNA, 19 nt, Artificial Sequence
  Description of Artificial Sequence: Synthetic oligonucleotide
  Antisense strand to SEQ ID NO: 1434986
auucuucuaggcagggcgc

SEQ ID NO: 1434988 - RNA, 19 nt, Artificial Sequence
  Description of Artificial Sequence: Synthetic oligonucleotide
  Sense strand starting at position 1447 of SEQ ID NO: 1243702
agaagaaucucacuccugu

SEQ ID NO: 1434989 - RNA, 19 nt, Artificial Sequence
  Description of Artificial Sequence: Synthetic oligonucleotide
  Antisense strand to SEQ ID NO: 1434988
acaggagugagauucuucu

SEQ ID NO: 1434990 - RNA, 19 nt, Artificial Sequence
  Description of Artificial Sequence: Synthetic oligonucleotide
  Sense strand starting at position 1526 of SEQ ID NO: 1243702
gcaggaauucucuggacuc

SEQ ID NO: 1434991 - RNA, 19 nt, Artificial Sequence
  Description of Artificial Sequence: Synthetic oligonucleotide
  Antisense strand to SEQ ID NO: 1434990
gaguccagagaauuccugc

SEQ ID NO: 1434992 - RNA, 19 nt, Artificial Sequence
  Description of Artificial Sequence: Synthetic oligonucleotide
  Sense strand starting at position 1545 of SEQ ID NO: 1243702
aggcucaucuaccuugaga

SEQ ID NO: 1434993 - RNA, 19 nt, Artificial Sequence
  Description of Artificial Sequence: Synthetic oligonucleotide
  Antisense strand to SEQ ID NO: 1434992
ucucaagguagaugagccu

SEQ ID NO: 1434994 - RNA, 19 nt, Artificial Sequence
  Description of Artificial Sequence: Synthetic oligonucleotide
  Sense strand starting at position 1547 of SEQ ID NO: 1243702
gcucaucuaccuugagaug

SEQ ID NO: 1434995 - RNA, 19 nt, Artificial Sequence
  Description of Artificial Sequence: Synthetic oligonucleotide
  Antisense strand to SEQ ID NO: 1434994
caucucaagguagaugagc

SEQ ID NO: 1434996 - RNA, 19 nt, Artificial Sequence
  Description of Artificial Sequence: Synthetic oligonucleotide
  Sense strand starting at position 1783 of SEQ ID NO: 1243702
cccgcuaauuccucugaca

SEQ ID NO: 1434997 - RNA, 19 nt, Artificial Sequence
  Description of Artificial Sequence: Synthetic oligonucleotide
  Antisense strand to SEQ ID NO: 1434996
ugucagaggaauuagcggg

SEQ ID NO: 1434998 - RNA, 19 nt, Artificial Sequence
  Description of Artificial Sequence: Synthetic oligonucleotide
  Sense strand starting at position 1785 of SEQ ID NO: 1243702
cgcuaauuccucugacaau

SEQ ID NO: 1434999 - RNA, 19 nt, Artificial Sequence
  Description of Artificial Sequence: Synthetic oligonucleotide
  Antisense strand to SEQ ID NO: 1434998
auugucagaggaauuagcg

SEQ ID NO: 1435000 - RNA, 19 nt, Artificial Sequence
  Description of Artificial Sequence: Synthetic oligonucleotide
  Sense strand starting at position 2182 of SEQ ID NO: 1243702
gugcucgaggccuuaaguu

SEQ ID NO: 1435001 - RNA, 19 nt, Artificial Sequence
  Description of Artificial Sequence: Synthetic oligonucleotide
  Antisense strand to SEQ ID NO: 1435000
aacuuaaggccucgagcac

SEQ ID NO: 1435002 - RNA, 19 nt, Artificial Sequence
  Description of Artificial Sequence: Synthetic oligonucleotide
  Sense strand starting at position 2274 of SEQ ID NO: 1243702
uuugaagucucauucuguu

SEQ ID NO: 1435003 - RNA, 19 nt, Artificial Sequence
  Description of Artificial Sequence: Synthetic oligonucleotide
  Antisense strand to SEQ ID NO: 1435002
aacagaaugagacuucaaa

SEQ ID NO: 1435004 - RNA, 19 nt, Artificial Sequence
  Description of Artificial Sequence: Synthetic oligonucleotide
  Sense strand starting at position 3054 of SEQ ID NO: 1243702
guaguagagucuuuaacgg

SEQ ID NO: 1435005 - RNA, 19 nt, Artificial Sequence
  Description of Artificial Sequence: Synthetic oligonucleotide
  Antisense strand to SEQ ID NO: 1435004
ccguuaaagacucuacuac

SEQ ID NO: 1435006 - RNA, 19 nt, Artificial Sequence
  Description of Artificial Sequence: Synthetic oligonucleotide
  Sense strand starting at position 3209 of SEQ ID NO: 1243702
cagucuuguuugguagauu

SEQ ID NO: 1435007 - RNA, 19 nt, Artificial Sequence
  Description of Artificial Sequence: Synthetic oligonucleotide
  Antisense strand to SEQ ID NO: 1435006
aaucuaccaaacaagacug

SEQ ID NO: 1435008 - RNA, 19 nt, Artificial Sequence
  Description of Artificial Sequence: Synthetic oligonucleotide
  Sense strand starting at position 3233 of SEQ ID NO: 1243702
gggcucaauugaccacuua

SEQ ID NO: 1435009 - RNA, 19 nt, Artificial Sequence
  Description of Artificial Sequence: Synthetic oligonucleotide
  Antisense strand to SEQ ID NO: 1435008
uaaguggucaauugagccc

SEQ ID NO: 1435010 - RNA, 19 nt, Artificial Sequence
  Description of Artificial Sequence: Synthetic oligonucleotide
  Sense strand starting at position 3429 of SEQ ID NO: 1243702
gaucucaagucguuuguga

SEQ ID NO: 1435011 - RNA, 19 nt, Artificial Sequence
  Description of Artificial Sequence: Synthetic oligonucleotide
  Antisense strand to SEQ ID NO: 1435010
ucacaaacgacuugagauc

SEQ ID NO: 1435012 - RNA, 19 nt, Artificial Sequence
  Description of Artificial Sequence: Synthetic oligonucleotide
  Sense strand starting at position 3442 of SEQ ID NO: 1243702
uugugauaaccagaauugu

SEQ ID NO: 1435013 - RNA, 19 nt, Artificial Sequence
  Description of Artificial Sequence: Synthetic oligonucleotide
  Antisense strand to SEQ ID NO: 1435012
acaauucugguuaucacaa

SEQ ID NO: 1435014 - RNA, 19 nt, Artificial Sequence
  Description of Artificial Sequence: Synthetic oligonucleotide
  Sense strand starting at position 3451 of SEQ ID NO: 1243702
ccagaauuguaucaggaaa

SEQ ID NO: 1435015 - RNA, 19 nt, Artificial Sequence
  Description of Artificial Sequence: Synthetic oligonucleotide
  Antisense strand to SEQ ID NO: 1435014
uuuccugauacaauucugg

SEQ ID NO: 1435016 - RNA, 19 nt, Artificial Sequence
  Description of Artificial Sequence: Synthetic oligonucleotide
  Sense strand starting at position 3664 of SEQ ID NO: 1243702
cucauauugugagugaaga

SEQ ID NO: 1435017 - RNA, 19 nt, Artificial Sequence
  Description of Artificial Sequence: Synthetic oligonucleotide
  Antisense strand to SEQ ID NO: 1435016
ucuucacucacaauaugag

SEQ ID NO: 1435018 - RNA, 19 nt, Artificial Sequence
  Description of Artificial Sequence: Synthetic oligonucleotide
  Sense strand starting at position 3665 of SEQ ID NO: 1243702
ucauauugugagugaagau

SEQ ID NO: 1435019 - RNA, 19 nt, Artificial Sequence
  Description of Artificial Sequence: Synthetic oligonucleotide
  Antisense strand to SEQ ID NO: 1435018
aucuucacucacaauauga

SEQ ID NO: 1435020 - RNA, 19 nt, Artificial Sequence
  Description of Artificial Sequence: Synthetic oligonucleotide
  Sense strand starting at position 3883 of SEQ ID NO: 1243702
gcugcuugcuaaccacaaa

SEQ ID NO: 1435021 - RNA, 19 nt, Artificial Sequence
  Description of Artificial Sequence: Synthetic oligonucleotide
  Antisense strand to SEQ ID NO: 1435020
uuugugguuagcaagcagc

SEQ ID NO: 1435022 - RNA, 19 nt, Artificial Sequence
  Description of Artificial Sequence: Synthetic oligonucleotide
  Sense strand starting at position 3925 of SEQ ID NO: 1243702
cagccuuuccuguggacuu

SEQ ID NO: 1435023 - RNA, 19 nt, Artificial Sequence
  Description of Artificial Sequence: Synthetic oligonucleotide
  Antisense strand to SEQ ID NO: 1435022
aaguccacaggaaaggcug

SEQ ID NO: 1435024 - RNA, 19 nt, Artificial Sequence
  Description of Artificial Sequence: Synthetic oligonucleotide
  Sense strand starting at position 64 of SEQ ID NO: 1243703
cccugaguccugcagguga

SEQ ID NO: 1435025 - RNA, 19 nt, Artificial Sequence
  Description of Artificial Sequence: Synthetic oligonucleotide
  Antisense strand to SEQ ID NO: 1435024
ucaccugcaggacucaggg

SEQ ID NO: 1435026 - RNA, 19 nt, Artificial Sequence
  Description of Artificial Sequence: Synthetic oligonucleotide
  Sense strand starting at position 66 of SEQ ID NO: 1243703
cugaguccugcaggugaaa

SEQ ID NO: 1435027 - RNA, 19 nt, Artificial Sequence
  Description of Artificial Sequence: Synthetic oligonucleotide
  Antisense strand to SEQ ID NO: 1435026
uuucaccugcaggacucag

SEQ ID NO: 1435028 - RNA, 19 nt, Artificial Sequence
  Description of Artificial Sequence: Synthetic oligonucleotide
  Sense strand starting at position 68 of SEQ ID NO: 1243703
gaguccugcaggugaaacu

SEQ ID NO: 1435029 - RNA, 19 nt, Artificial Sequence
  Description of Artificial Sequence: Synthetic oligonucleotide
  Antisense strand to SEQ ID NO: 1435028
aguuucaccugcaggacuc

SEQ ID NO: 1435030 - RNA, 19 nt, Artificial Sequence
  Description of Artificial Sequence: Synthetic oligonucleotide
  Sense strand starting at position 519 of SEQ ID NO: 1243703
gaaguaguugcaugcccaa

SEQ ID NO: 1435031 - RNA, 19 nt, Artificial Sequence
  Description of Artificial Sequence: Synthetic oligonucleotide
  Antisense strand to SEQ ID NO: 1435030
uugggcaugcaacuacuuc

SEQ ID NO: 1435032 - RNA, 19 nt, Artificial Sequence
  Description of Artificial Sequence: Synthetic oligonucleotide
  Sense strand starting at position 522 of SEQ ID NO: 1243703
guaguugcaugcccaagau

SEQ ID NO: 1435033 - RNA, 19 nt, Artificial Sequence
  Description of Artificial Sequence: Synthetic oligonucleotide
  Antisense strand to SEQ ID NO: 1435032
aucuugggcaugcaacuac

SEQ ID NO: 1435034 - RNA, 19 nt, Artificial Sequence
  Description of Artificial Sequence: Synthetic oligonucleotide
  Sense strand starting at position 565 of SEQ ID NO: 1243703
agcaucagauccuagauuu

SEQ ID NO: 1435035 - RNA, 19 nt, Artificial Sequence
  Description of Artificial Sequence: Synthetic oligonucleotide
  Antisense strand to SEQ ID NO: 1435034
aaaucuaggaucugaugcu

SEQ ID NO: 1435036 - RNA, 19 nt, Artificial Sequence
  Description of Artificial Sequence: Synthetic oligonucleotide
  Sense strand starting at position 601 of SEQ ID NO: 1243703
ccaaacugccugugaaguu

SEQ ID NO: 1435037 - RNA, 19 nt, Artificial Sequence
  Description of Artificial Sequence: Synthetic oligonucleotide
  Antisense strand to SEQ ID NO: 1435036
aacuucacaggcaguuugg

SEQ ID NO: 1435038 - RNA, 19 nt, Artificial Sequence
  Description of Artificial Sequence: Synthetic oligonucleotide
  Sense strand starting at position 733 of SEQ ID NO: 1243703
ucuaucauggcucagcuua

SEQ ID NO: 1435039 - RNA, 19 nt, Artificial Sequence
  Description of Artificial Sequence: Synthetic oligonucleotide
  Antisense strand to SEQ ID NO: 1435038
uaagcugagccaugauaga

SEQ ID NO: 1435040 - RNA, 19 nt, Artificial Sequence
  Description of Artificial Sequence: Synthetic oligonucleotide
  Sense strand starting at position 809 of SEQ ID NO: 1243703
guaagcgauucucuguguu

SEQ ID NO: 1435041 - RNA, 19 nt, Artificial Sequence
  Description of Artificial Sequence: Synthetic oligonucleotide
  Antisense strand to SEQ ID NO: 1435040
aacacagagaaucgcuuac

SEQ ID NO: 1435042 - RNA, 19 nt, Artificial Sequence
  Description of Artificial Sequence: Synthetic oligonucleotide
  Sense strand starting at position 811 of SEQ ID NO: 1243703
aagcgauucucuguguucu

SEQ ID NO: 1435043 - RNA, 19 nt, Artificial Sequence
  Description of Artificial Sequence: Synthetic oligonucleotide
  Antisense strand to SEQ ID NO: 1435042
agaacacagagaaucgcuu

SEQ ID NO: 1435044 - RNA, 19 nt, Artificial Sequence
  Description of Artificial Sequence: Synthetic oligonucleotide
  Sense strand starting at position 813 of SEQ ID NO: 1243703
gcgauucucuguguucuca

SEQ ID NO: 1435045 - RNA, 19 nt, Artificial Sequence
  Description of Artificial Sequence: Synthetic oligonucleotide
  Antisense strand to SEQ ID NO: 1435044
ugagaacacagagaaucgc

SEQ ID NO: 1435046 - RNA, 19 nt, Artificial Sequence
  Description of Artificial Sequence: Synthetic oligonucleotide
  Sense strand starting at position 838 of SEQ ID NO: 1243703
cuuuguaugucccuuauca

SEQ ID NO: 1435047 - RNA, 19 nt, Artificial Sequence
  Description of Artificial Sequence: Synthetic oligonucleotide
  Antisense strand to SEQ ID NO: 1435046
ugauaagggacauacaaag

SEQ ID NO: 1435048 - RNA, 19 nt, Artificial Sequence
  Description of Artificial Sequence: Synthetic oligonucleotide
  Sense strand starting at position 842 of SEQ ID NO: 1243703
guaugucccuuaucaggau

SEQ ID NO: 1435049 - RNA, 19 nt, Artificial Sequence
  Description of Artificial Sequence: Synthetic oligonucleotide
  Antisense strand to SEQ ID NO: 1435048
auccugauaagggacauac

SEQ ID NO: 1435050 - RNA, 19 nt, Artificial Sequence
  Description of Artificial Sequence: Synthetic oligonucleotide
  Sense strand starting at position 845 of SEQ ID NO: 1243703
ugucccuuaucaggauauu

SEQ ID NO: 1435051 - RNA, 19 nt, Artificial Sequence
  Description of Artificial Sequence: Synthetic oligonucleotide
  Antisense strand to SEQ ID NO: 1435050
aauauccugauaagggaca

SEQ ID NO: 1435052 - RNA, 19 nt, Artificial Sequence
  Description of Artificial Sequence: Synthetic oligonucleotide
  Sense strand starting at position 899 of SEQ ID NO: 1243703
ugcaaugaacagugaacau

SEQ ID NO: 1435053 - RNA, 19 nt, Artificial Sequence
  Description of Artificial Sequence: Synthetic oligonucleotide
  Antisense strand to SEQ ID NO: 1435052
auguucacuguucauugca

SEQ ID NO: 1435054 - RNA, 19 nt, Artificial Sequence
  Description of Artificial Sequence: Synthetic oligonucleotide
  Sense strand starting at position 968 of SEQ ID NO: 1243703
acaggugggucuuaaagac

SEQ ID NO: 1435055 - RNA, 19 nt, Artificial Sequence
  Description of Artificial Sequence: Synthetic oligonucleotide
  Antisense strand to SEQ ID NO: 1435054
gucuuuaagacccaccugu

SEQ ID NO: 1435056 - RNA, 19 nt, Artificial Sequence
  Description of Artificial Sequence: Synthetic oligonucleotide
  Sense strand starting at position 1058 of SEQ ID NO: 1243703
ugaaaugagucauucucac

SEQ ID NO: 1435057 - RNA, 19 nt, Artificial Sequence
  Description of Artificial Sequence: Synthetic oligonucleotide
  Antisense strand to SEQ ID NO: 1435056
gugagaaugacucauuuca

SEQ ID NO: 1435058 - RNA, 19 nt, Artificial Sequence
  Description of Artificial Sequence: Synthetic oligonucleotide
  Sense strand starting at position 1062 of SEQ ID NO: 1243703
augagucauucucacucuu

SEQ ID NO: 1435059 - RNA, 19 nt, Artificial Sequence
  Description of Artificial Sequence: Synthetic oligonucleotide
  Antisense strand to SEQ ID NO: 1435058
aagagugagaaugacucau

SEQ ID NO: 1435060 - RNA, 19 nt, Artificial Sequence
  Description of Artificial Sequence: Synthetic oligonucleotide
  Sense strand starting at position 1175 of SEQ ID NO: 1243703
ggugucaauuucuauuuag

SEQ ID NO: 1435061 - RNA, 19 nt, Artificial Sequence
  Description of Artificial Sequence: Synthetic oligonucleotide
  Antisense strand to SEQ ID NO: 1435060
cuaaauagaaauugacacc

SEQ ID NO: 1435062 - RNA, 19 nt, Artificial Sequence
  Description of Artificial Sequence: Synthetic oligonucleotide
  Sense strand starting at position 1363 of SEQ ID NO: 1243703
cugagagagucugccugua

SEQ ID NO: 1435063 - RNA, 19 nt, Artificial Sequence
  Description of Artificial Sequence: Synthetic oligonucleotide
  Antisense strand to SEQ ID NO: 1435062
uacaggcagacucucucag

SEQ ID NO: 1435064 - RNA, 19 nt, Artificial Sequence
  Description of Artificial Sequence: Synthetic oligonucleotide
  Sense strand starting at position 1365 of SEQ ID NO: 1243703
gagagagucugccuguaac

SEQ ID NO: 1435065 - RNA, 19 nt, Artificial Sequence
  Description of Artificial Sequence: Synthetic oligonucleotide
  Antisense strand to SEQ ID NO: 1435064
guuacaggcagacucucuc

SEQ ID NO: 1435066 - RNA, 19 nt, Artificial Sequence
  Description of Artificial Sequence: Synthetic oligonucleotide
  Sense strand starting at position 1466 of SEQ ID NO: 1243703
agccauaagcuuugagaaa

SEQ ID NO: 1435067 - RNA, 19 nt, Artificial Sequence
  Description of Artificial Sequence: Synthetic oligonucleotide
  Antisense strand to SEQ ID NO: 1435066
uuucucaaagcuuauggcu

SEQ ID NO: 1435068 - RNA, 19 nt, Artificial Sequence
  Description of Artificial Sequence: Synthetic oligonucleotide
  Sense strand starting at position 1506 of SEQ ID NO: 1243703
auuacuguaucgugcguga

SEQ ID NO: 1435069 - RNA, 19 nt, Artificial Sequence
  Description of Artificial Sequence: Synthetic oligonucleotide
  Antisense strand to SEQ ID NO: 1435068
ucacgcacgauacaguaau

SEQ ID NO: 1435070 - RNA, 19 nt, Artificial Sequence
  Description of Artificial Sequence: Synthetic oligonucleotide
  Sense strand starting at position 1508 of SEQ ID NO: 1243703
uacuguaucgugcgugacu

SEQ ID NO: 1435071 - RNA, 19 nt, Artificial Sequence
  Description of Artificial Sequence: Synthetic oligonucleotide
  Antisense strand to SEQ ID NO: 1435070
agucacgcacgauacagua

SEQ ID NO: 1435072 - RNA, 19 nt, Artificial Sequence
  Description of Artificial Sequence: Synthetic oligonucleotide
  Sense strand starting at position 1587 of SEQ ID NO: 1243703
accugacuggccugcauaa

SEQ ID NO: 1435073 - RNA, 19 nt, Artificial Sequence
  Description of Artificial Sequence: Synthetic oligonucleotide
  Antisense strand to SEQ ID NO: 1435072
uuaugcaggccagucaggu

SEQ ID NO: 1435074 - RNA, 19 nt, Artificial Sequence
  Description of Artificial Sequence: Synthetic oligonucleotide
  Sense strand starting at position 1628 of SEQ ID NO: 1243703
ucaguuacuucgcuuugca

SEQ ID NO: 1435075 - RNA, 19 nt, Artificial Sequence
  Description of Artificial Sequence: Synthetic oligonucleotide
  Antisense strand to SEQ ID NO: 1435074
ugcaaagcgaaguaacuga

SEQ ID NO: 1435076 - RNA, 19 nt, Artificial Sequence
  Description of Artificial Sequence: Synthetic oligonucleotide
  Sense strand starting at position 1694 of SEQ ID NO: 1243703
aagaacaugucauggucuu

SEQ ID NO: 1435077 - RNA, 19 nt, Artificial Sequence
  Description of Artificial Sequence: Synthetic oligonucleotide
  Antisense strand to SEQ ID NO: 1435076
aagaccaugacauguucuu

SEQ ID NO: 1435078 - RNA, 19 nt, Artificial Sequence
  Description of Artificial Sequence: Synthetic oligonucleotide
  Sense strand starting at position 1695 of SEQ ID NO: 1243703
agaacaugucauggucuua

SEQ ID NO: 1435079 - RNA, 19 nt, Artificial Sequence
  Description of Artificial Sequence: Synthetic oligonucleotide
  Antisense strand to SEQ ID NO: 1435078
uaagaccaugacauguucu

SEQ ID NO: 1435080 - RNA, 19 nt, Artificial Sequence
  Description of Artificial Sequence: Synthetic oligonucleotide
  Sense strand starting at position 1988 of SEQ ID NO: 1243703
cgccaucuuccgcaugaca

SEQ ID NO: 1435081 - RNA, 19 nt, Artificial Sequence
  Description of Artificial Sequence: Synthetic oligonucleotide
  Antisense strand to SEQ ID NO: 1435080
ugucaugcggaagauggcg

SEQ ID NO: 1435082 - RNA, 19 nt, Artificial Sequence
  Description of Artificial Sequence: Synthetic oligonucleotide
  Sense strand starting at position 3021 of SEQ ID NO: 1243703
cccucaugacucggagaag

SEQ ID NO: 1435083 - RNA, 19 nt, Artificial Sequence
  Description of Artificial Sequence: Synthetic oligonucleotide
  Antisense strand to SEQ ID NO: 1435082
cuucuccgagucaugaggg

SEQ ID NO: 1435084 - RNA, 19 nt, Artificial Sequence
  Description of Artificial Sequence: Synthetic oligonucleotide
  Sense strand starting at position 3062 of SEQ ID NO: 1243703
accugucgucccuagauca

SEQ ID NO: 1435085 - RNA, 19 nt, Artificial Sequence
  Description of Artificial Sequence: Synthetic oligonucleotide
  Antisense strand to SEQ ID NO: 1435084
ugaucuagggacgacaggu

SEQ ID NO: 1435086 - RNA, 19 nt, Artificial Sequence
  Description of Artificial Sequence: Synthetic oligonucleotide
  Sense strand starting at position 3163 of SEQ ID NO: 1243703
cacgucagauucucucaga

SEQ ID NO: 1435087 - RNA, 19 nt, Artificial Sequence
  Description of Artificial Sequence: Synthetic oligonucleotide
  Antisense strand to SEQ ID NO: 1435086
ucugagagaaucugacgug

SEQ ID NO: 1435088 - RNA, 19 nt, Artificial Sequence
  Description of Artificial Sequence: Synthetic oligonucleotide
  Sense strand starting at position 3166 of SEQ ID NO: 1243703
gucagauucucucagaccu

SEQ ID NO: 1435089 - RNA, 19 nt, Artificial Sequence
  Description of Artificial Sequence: Synthetic oligonucleotide
  Antisense strand to SEQ ID NO: 1435088
aggucugagagaaucugac

SEQ ID NO: 1435090 - RNA, 19 nt, Artificial Sequence
  Description of Artificial Sequence: Synthetic oligonucleotide
  Sense strand starting at position 3204 of SEQ ID NO: 1243703
cuuccucaguuccaggaau

SEQ ID NO: 1435091 - RNA, 19 nt, Artificial Sequence
  Description of Artificial Sequence: Synthetic oligonucleotide
  Antisense strand to SEQ ID NO: 1435090
auuccuggaacugaggaag

SEQ ID NO: 1435092 - RNA, 19 nt, Artificial Sequence
  Description of Artificial Sequence: Synthetic oligonucleotide
  Sense strand starting at position 3641 of SEQ ID NO: 1243703
guacccauguacugggaaa

SEQ ID NO: 1435093 - RNA, 19 nt, Artificial Sequence
  Description of Artificial Sequence: Synthetic oligonucleotide
  Antisense strand to SEQ ID NO: 1435092
uuucccaguacauggguac

SEQ ID NO: 1435094 - RNA, 19 nt, Artificial Sequence
  Description of Artificial Sequence: Synthetic oligonucleotide
  Sense strand starting at position 3643 of SEQ ID NO: 1243703
acccauguacugggaaauc

SEQ ID NO: 1435095 - RNA, 19 nt, Artificial Sequence
  Description of Artificial Sequence: Synthetic oligonucleotide
  Antisense strand to SEQ ID NO: 1435094
gauuucccaguacaugggu

SEQ ID NO: 1435096 - RNA, 19 nt, Artificial Sequence
  Description of Artificial Sequence: Synthetic oligonucleotide
  Sense strand starting at position 3706 of SEQ ID NO: 1243703
ugaccuggauuccugaaua

SEQ ID NO: 1435097 - RNA, 19 nt, Artificial Sequence
  Description of Artificial Sequence: Synthetic oligonucleotide
  Antisense strand to SEQ ID NO: 1435096
uauucaggaauccagguca

SEQ ID NO: 1435098 - RNA, 19 nt, Artificial Sequence
  Description of Artificial Sequence: Synthetic oligonucleotide
  Sense strand starting at position 3739 of SEQ ID NO: 1243703
cugaucagcuucggaagua

SEQ ID NO: 1435099 - RNA, 19 nt, Artificial Sequence
  Description of Artificial Sequence: Synthetic oligonucleotide
  Antisense strand to SEQ ID NO: 1435098
uacuuccgaagcugaucag

SEQ ID NO: 1435100 - RNA, 19 nt, Artificial Sequence
  Description of Artificial Sequence: Synthetic oligonucleotide
  Sense strand starting at position 3827 of SEQ ID NO: 1243703
uggaguggcaguggugaau

SEQ ID NO: 1435101 - RNA, 19 nt, Artificial Sequence
  Description of Artificial Sequence: Synthetic oligonucleotide
  Antisense strand to SEQ ID NO: 1435100
auucaccacugccacucca

SEQ ID NO: 1435102 - RNA, 19 nt, Artificial Sequence
  Description of Artificial Sequence: Synthetic oligonucleotide
  Sense strand starting at position 135 of SEQ ID NO: 1243704
gaccucagccuugagucau

SEQ ID NO: 1435103 - RNA, 19 nt, Artificial Sequence
  Description of Artificial Sequence: Synthetic oligonucleotide
  Antisense strand to SEQ ID NO: 1435102
augacucaaggcugagguc

SEQ ID NO: 1435104 - RNA, 19 nt, Artificial Sequence
  Description of Artificial Sequence: Synthetic oligonucleotide
  Sense strand starting at position 141 of SEQ ID NO: 1243704
agccuugagucaugacacu

SEQ ID NO: 1435105 - RNA, 19 nt, Artificial Sequence
  Description of Artificial Sequence: Synthetic oligonucleotide
  Antisense strand to SEQ ID NO: 1435104
agugucaugacucaaggcu

SEQ ID NO: 1435106 - RNA, 19 nt, Artificial Sequence
  Description of Artificial Sequence: Synthetic oligonucleotide
  Sense strand starting at position 182 of SEQ ID NO: 1243704
gaggguaucuguccuuuac

SEQ ID NO: 1435107 - RNA, 19 nt, Artificial Sequence
  Description of Artificial Sequence: Synthetic oligonucleotide
  Antisense strand to SEQ ID NO: 1435106
guaaaggacagauacccuc

SEQ ID NO: 1435108 - RNA, 19 nt, Artificial Sequence
  Description of Artificial Sequence: Synthetic oligonucleotide
  Sense strand starting at position 186 of SEQ ID NO: 1243704
guaucuguccuuuacccau

SEQ ID NO: 1435109 - RNA, 19 nt, Artificial Sequence
  Description of Artificial Sequence: Synthetic oligonucleotide
  Antisense strand to SEQ ID NO: 1435108
auggguaaaggacagauac

SEQ ID NO: 1435110 - RNA, 19 nt, Artificial Sequence
  Description of Artificial Sequence: Synthetic oligonucleotide
  Sense strand starting at position 249 of SEQ ID NO: 1243704
ucuucuuggcugugggaaa

SEQ ID NO: 1435111 - RNA, 19 nt, Artificial Sequence
  Description of Artificial Sequence: Synthetic oligonucleotide
  Antisense strand to SEQ ID NO: 1435110
uuucccacagccaagaaga

SEQ ID NO: 1435112 - RNA, 19 nt, Artificial Sequence
  Description of Artificial Sequence: Synthetic oligonucleotide
  Sense strand starting at position 283 of SEQ ID NO: 1243704
caggguuuccguuaaguuc

SEQ ID NO: 1435113 - RNA, 19 nt, Artificial Sequence
  Description of Artificial Sequence: Synthetic oligonucleotide
  Antisense strand to SEQ ID NO: 1435112
gaacuuaacggaaacccug

SEQ ID NO: 1435114 - RNA, 19 nt, Artificial Sequence
  Description of Artificial Sequence: Synthetic oligonucleotide
  Sense strand starting at position 290 of SEQ ID NO: 1243704
uccguuaaguucucaaucu

SEQ ID NO: 1435115 - RNA, 19 nt, Artificial Sequence
  Description of Artificial Sequence: Synthetic oligonucleotide
  Antisense strand to SEQ ID NO: 1435114
agauugagaacuuaacgga

SEQ ID NO: 1435116 - RNA, 19 nt, Artificial Sequence
  Description of Artificial Sequence: Synthetic oligonucleotide
  Sense strand starting at position 291 of SEQ ID NO: 1243704
ccguuaaguucucaaucua

SEQ ID NO: 1435117 - RNA, 19 nt, Artificial Sequence
  Description of Artificial Sequence: Synthetic oligonucleotide
  Antisense strand to SEQ ID NO: 1435116
uagauugagaacuuaacgg

SEQ ID NO: 1435118 - RNA, 19 nt, Artificial Sequence
  Description of Artificial Sequence: Synthetic oligonucleotide
  Sense strand starting at position 480 of SEQ ID NO: 1243704
gguagcacgcgacuguaau

SEQ ID NO: 1435119 - RNA, 19 nt, Artificial Sequence
  Description of Artificial Sequence: Synthetic oligonucleotide
  Antisense strand to SEQ ID NO: 1435118
auuacagucgcgugcuacc

SEQ ID NO: 1435120 - RNA, 19 nt, Artificial Sequence
  Description of Artificial Sequence: Synthetic oligonucleotide
  Sense strand starting at position 643 of SEQ ID NO: 1243704
aaggaaaucgcguaacuac

SEQ ID NO: 1435121 - RNA, 19 nt, Artificial Sequence
  Description of Artificial Sequence: Synthetic oligonucleotide
  Antisense strand to SEQ ID NO: 1435120
guaguuacgcgauuuccuu

SEQ ID NO: 1435122 - RNA, 19 nt, Artificial Sequence
  Description of Artificial Sequence: Synthetic oligonucleotide
  Sense strand starting at position 683 of SEQ ID NO: 1243704
gcaacaauuugugaccacu

SEQ ID NO: 1435123 - RNA, 19 nt, Artificial Sequence
  Description of Artificial Sequence: Synthetic oligonucleotide
  Antisense strand to SEQ ID NO: 1435122
aguggucacaaauuguugc

SEQ ID NO: 1435124 - RNA, 19 nt, Artificial Sequence
  Description of Artificial Sequence: Synthetic oligonucleotide
  Sense strand starting at position 786 of SEQ ID NO: 1243704
aggaccagucguugucauu

SEQ ID NO: 1435125 - RNA, 19 nt, Artificial Sequence
  Description of Artificial Sequence: Synthetic oligonucleotide
  Antisense strand to SEQ ID NO: 1435124
aaugacaacgacugguccu

SEQ ID NO: 1435126 - RNA, 19 nt, Artificial Sequence
  Description of Artificial Sequence: Synthetic oligonucleotide
  Sense strand starting at position 792 of SEQ ID NO: 1243704
agucguugucauugauguc

SEQ ID NO: 1435127 - RNA, 19 nt, Artificial Sequence
  Description of Artificial Sequence: Synthetic oligonucleotide
  Antisense strand to SEQ ID NO: 1435126
gacaucaaugacaacgacu

SEQ ID NO: 1435128 - RNA, 19 nt, Artificial Sequence
  Description of Artificial Sequence: Synthetic oligonucleotide
  Sense strand starting at position 793 of SEQ ID NO: 1243704
gucguugucauugauguca

SEQ ID NO: 1435129 - RNA, 19 nt, Artificial Sequence
  Description of Artificial Sequence: Synthetic oligonucleotide
  Antisense strand to SEQ ID NO: 1435128
ugacaucaaugacaacgac

SEQ ID NO: 1435130 - RNA, 19 nt, Artificial Sequence
  Description of Artificial Sequence: Synthetic oligonucleotide
  Sense strand starting at position 811 of SEQ ID NO: 1243704
aucauuaucuucuugguca

SEQ ID NO: 1435131 - RNA, 19 nt, Artificial Sequence
  Description of Artificial Sequence: Synthetic oligonucleotide
  Antisense strand to SEQ ID NO: 1435130
ugaccaagaagauaaugau

SEQ ID NO: 1435132 - RNA, 19 nt, Artificial Sequence
  Description of Artificial Sequence: Synthetic oligonucleotide
  Sense strand starting at position 812 of SEQ ID NO: 1243704
ucauuaucuucuuggucac

SEQ ID NO: 1435133 - RNA, 19 nt, Artificial Sequence
  Description of Artificial Sequence: Synthetic oligonucleotide
  Antisense strand to SEQ ID NO: 1435132
gugaccaagaagauaauga

SEQ ID NO: 1435134 - RNA, 19 nt, Artificial Sequence
  Description of Artificial Sequence: Synthetic oligonucleotide
  Sense strand starting at position 824 of SEQ ID NO: 1243704
uggucacucucagacuuau

SEQ ID NO: 1435135 - RNA, 19 nt, Artificial Sequence
  Description of Artificial Sequence: Synthetic oligonucleotide
  Antisense strand to SEQ ID NO: 1435134
auaagucugagagugacca

SEQ ID NO: 1435136 - RNA, 19 nt, Artificial Sequence
  Description of Artificial Sequence: Synthetic oligonucleotide
  Sense strand starting at position 1074 of SEQ ID NO: 1243704
uggcgauucggcugcuguu

SEQ ID NO: 1435137 - RNA, 19 nt, Artificial Sequence
  Description of Artificial Sequence: Synthetic oligonucleotide
  Antisense strand to SEQ ID NO: 1435136
aacagcagccgaaucgcca

SEQ ID NO: 1435138 - RNA, 19 nt, Artificial Sequence
  Description of Artificial Sequence: Synthetic oligonucleotide
  Sense strand starting at position 1143 of SEQ ID NO: 1243704
caaugcugcgacugcaauu

SEQ ID NO: 1435139 - RNA, 19 nt, Artificial Sequence
  Description of Artificial Sequence: Synthetic oligonucleotide
  Antisense strand to SEQ ID NO: 1435138
aauugcagucgcagcauug

SEQ ID NO: 1435140 - RNA, 19 nt, Artificial Sequence
  Description of Artificial Sequence: Synthetic oligonucleotide
  Sense strand starting at position 1358 of SEQ ID NO: 1243704
uagcacaguuuccagagaa

SEQ ID NO: 1435141 - RNA, 19 nt, Artificial Sequence
  Description of Artificial Sequence: Synthetic oligonucleotide
  Antisense strand to SEQ ID NO: 1435140
uucucuggaaacugugcua

SEQ ID NO: 1435142 - RNA, 19 nt, Artificial Sequence
  Description of Artificial Sequence: Synthetic oligonucleotide
  Sense strand starting at position 1457 of SEQ ID NO: 1243704
ggguccgugucguccaaga

SEQ ID NO: 1435143 - RNA, 19 nt, Artificial Sequence
  Description of Artificial Sequence: Synthetic oligonucleotide
  Antisense strand to SEQ ID NO: 1435142
ucuuggacgacacggaccc

SEQ ID NO: 1435144 - RNA, 19 nt, Artificial Sequence
  Description of Artificial Sequence: Synthetic oligonucleotide
  Sense strand starting at position 1459 of SEQ ID NO: 1243704
guccgugucguccaagaag

SEQ ID NO: 1435145 - RNA, 19 nt, Artificial Sequence
  Description of Artificial Sequence: Synthetic oligonucleotide
  Antisense strand to SEQ ID NO: 1435144
cuucuuggacgacacggac

SEQ ID NO: 1435146 - RNA, 19 nt, Artificial Sequence
  Description of Artificial Sequence: Synthetic oligonucleotide
  Sense strand starting at position 1536 of SEQ ID NO: 1243704
cgaccagguccgcguauau

SEQ ID NO: 1435147 - RNA, 19 nt, Artificial Sequence
  Description of Artificial Sequence: Synthetic oligonucleotide
  Antisense strand to SEQ ID NO: 1435146
auauacgcggaccuggucg

SEQ ID NO: 1435148 - RNA, 19 nt, Artificial Sequence
  Description of Artificial Sequence: Synthetic oligonucleotide
  Sense strand starting at position 1548 of SEQ ID NO: 1243704
cguauaucuccugagcgau

SEQ ID NO: 1435149 - RNA, 19 nt, Artificial Sequence
  Description of Artificial Sequence: Synthetic oligonucleotide
  Antisense strand to SEQ ID NO: 1435148
aucgcucaggagauauacg

SEQ ID NO: 1435150 - RNA, 19 nt, Artificial Sequence
  Description of Artificial Sequence: Synthetic oligonucleotide
  Sense strand starting at position 1583 of SEQ ID NO: 1243704
gagaacaucuacggucaca

SEQ ID NO: 1435151 - RNA, 19 nt, Artificial Sequence
  Description of Artificial Sequence: Synthetic oligonucleotide
  Antisense strand to SEQ ID NO: 1435150
ugugaccguagauguucuc

SEQ ID NO: 1435152 - RNA, 19 nt, Artificial Sequence
  Description of Artificial Sequence: Synthetic oligonucleotide
  Sense strand starting at position 1739 of SEQ ID NO: 1243704
ggcuauucccuuuaaggaa

SEQ ID NO: 1435153 - RNA, 19 nt, Artificial Sequence
  Description of Artificial Sequence: Synthetic oligonucleotide
  Antisense strand to SEQ ID NO: 1435152
uuccuuaaagggaauagcc

SEQ ID NO: 1435154 - RNA, 19 nt, Artificial Sequence
  Description of Artificial Sequence: Synthetic oligonucleotide
  Sense strand starting at position 1771 of SEQ ID NO: 1243704
ccaaauuccucuuuggugu

SEQ ID NO: 1435155 - RNA, 19 nt, Artificial Sequence
  Description of Artificial Sequence: Synthetic oligonucleotide
  Antisense strand to SEQ ID NO: 1435154
acaccaaagaggaauuugg

SEQ ID NO: 1435156 - RNA, 19 nt, Artificial Sequence
  Description of Artificial Sequence: Synthetic oligonucleotide
  Sense strand starting at position 1867 of SEQ ID NO: 1243704
ugcuguuauccaggccaga

SEQ ID NO: 1435157 - RNA, 19 nt, Artificial Sequence
  Description of Artificial Sequence: Synthetic oligonucleotide
  Antisense strand to SEQ ID NO: 1435156
ucuggccuggauaacagca

SEQ ID NO: 1435158 - RNA, 19 nt, Artificial Sequence
  Description of Artificial Sequence: Synthetic oligonucleotide
  Sense strand starting at position 1911 of SEQ ID NO: 1243704
uguaaacucuuguggagac

SEQ ID NO: 1435159 - RNA, 19 nt, Artificial Sequence
  Description of Artificial Sequence: Synthetic oligonucleotide
  Antisense strand to SEQ ID NO: 1435158
gucuccacaagaguuuaca

SEQ ID NO: 1435160 - RNA, 19 nt, Artificial Sequence
  Description of Artificial Sequence: Synthetic oligonucleotide
  Sense strand starting at position 1930 of SEQ ID NO: 1243704
ggcgcucugacugcucaua

SEQ ID NO: 1435161 - RNA, 19 nt, Artificial Sequence
  Description of Artificial Sequence: Synthetic oligonucleotide
  Antisense strand to SEQ ID NO: 1435160
uaugagcagucagagcgcc

SEQ ID NO: 1435162 - RNA, 19 nt, Artificial Sequence
  Description of Artificial Sequence: Synthetic oligonucleotide
  Sense strand starting at position 1989 of SEQ ID NO: 1243704
gguguuguugugaguccaa

SEQ ID NO: 1435163 - RNA, 19 nt, Artificial Sequence
  Description of Artificial Sequence: Synthetic oligonucleotide
  Antisense strand to SEQ ID NO: 1435162
uuggacucacaacaacacc

SEQ ID NO: 1435164 - RNA, 19 nt, Artificial Sequence
  Description of Artificial Sequence: Synthetic oligonucleotide
  Sense strand starting at position 2146 of SEQ ID NO: 1243704
uagucuuucccaggccuga

SEQ ID NO: 1435165 - RNA, 19 nt, Artificial Sequence
  Description of Artificial Sequence: Synthetic oligonucleotide
  Antisense strand to SEQ ID NO: 1435164
ucaggccugggaaagacua

SEQ ID NO: 1435166 - RNA, 19 nt, Artificial Sequence
  Description of Artificial Sequence: Synthetic oligonucleotide
  Sense strand starting at position 2188 of SEQ ID NO: 1243704
caaucagagucugggucua

SEQ ID NO: 1435167 - RNA, 19 nt, Artificial Sequence
  Description of Artificial Sequence: Synthetic oligonucleotide
  Antisense strand to SEQ ID NO: 1435166
uagacccagacucugauug

SEQ ID NO: 1435168 - RNA, 19 nt, Artificial Sequence
  Description of Artificial Sequence: Synthetic oligonucleotide
  Sense strand starting at position 2190 of SEQ ID NO: 1243704
aucagagucugggucuaua

SEQ ID NO: 1435169 - RNA, 19 nt, Artificial Sequence
  Description of Artificial Sequence: Synthetic oligonucleotide
  Antisense strand to SEQ ID NO: 1435168
uauagacccagacucugau

SEQ ID NO: 1435170 - RNA, 19 nt, Artificial Sequence
  Description of Artificial Sequence: Synthetic oligonucleotide
  Sense strand starting at position 2251 of SEQ ID NO: 1243704
cuuugauacccauggugca

SEQ ID NO: 1435171 - RNA, 19 nt, Artificial Sequence
  Description of Artificial Sequence: Synthetic oligonucleotide
  Antisense strand to SEQ ID NO: 1435170
ugcaccauggguaucaaag

SEQ ID NO: 1435172 - RNA, 19 nt, Artificial Sequence
  Description of Artificial Sequence: Synthetic oligonucleotide
  Sense strand starting at position 2252 of SEQ ID NO: 1243704
uuugauacccauggugcaa

SEQ ID NO: 1435173 - RNA, 19 nt, Artificial Sequence
  Description of Artificial Sequence: Synthetic oligonucleotide
  Antisense strand to SEQ ID NO: 1435172
uugcaccauggguaucaaa

SEQ ID NO: 1435174 - RNA, 19 nt, Artificial Sequence
  Description of Artificial Sequence: Synthetic oligonucleotide
  Sense strand starting at position 2423 of SEQ ID NO: 1243704
ggguacugcuaccagaagu

SEQ ID NO: 1435175 - RNA, 19 nt, Artificial Sequence
  Description of Artificial Sequence: Synthetic oligonucleotide
  Antisense strand to SEQ ID NO: 1435174
acuucugguagcaguaccc

SEQ ID NO: 1435176 - RNA, 19 nt, Artificial Sequence
  Description of Artificial Sequence: Synthetic oligonucleotide
  Sense strand starting at position 2489 of SEQ ID NO: 1243704
uugaaaucagccugccacu

SEQ ID NO: 1435177 - RNA, 19 nt, Artificial Sequence
  Description of Artificial Sequence: Synthetic oligonucleotide
  Antisense strand to SEQ ID NO: 1435176
aguggcaggcugauuucaa

SEQ ID NO: 1435178 - RNA, 19 nt, Artificial Sequence
  Description of Artificial Sequence: Synthetic oligonucleotide
  Sense strand starting at position 2682 of SEQ ID NO: 1243704
ccggaagucucuccaagag

SEQ ID NO: 1435179 - RNA, 19 nt, Artificial Sequence
  Description of Artificial Sequence: Synthetic oligonucleotide
  Antisense strand to SEQ ID NO: 1435178
cucuuggagagacuuccgg

SEQ ID NO: 1435180 - RNA, 19 nt, Artificial Sequence
  Description of Artificial Sequence: Synthetic oligonucleotide
  Sense strand starting at position 3037 of SEQ ID NO: 1243704
ccgggagggugucucuauu

SEQ ID NO: 1435181 - RNA, 19 nt, Artificial Sequence
  Description of Artificial Sequence: Synthetic oligonucleotide
  Antisense strand to SEQ ID NO: 1435180
aauagagacacccucccgg

SEQ ID NO: 1435182 - RNA, 19 nt, Artificial Sequence
  Description of Artificial Sequence: Synthetic oligonucleotide
  Sense strand starting at position 122 of SEQ ID NO: 1243705
auaaguccuguccauaaca

SEQ ID NO: 1435183 - RNA, 19 nt, Artificial Sequence
  Description of Artificial Sequence: Synthetic oligonucleotide
  Antisense strand to SEQ ID NO: 1435182
uguuauggacaggacuuau

SEQ ID NO: 1435184 - RNA, 19 nt, Artificial Sequence
  Description of Artificial Sequence: Synthetic oligonucleotide
  Sense strand starting at position 213 of SEQ ID NO: 1243705
ggguuuagcacagagguau

SEQ ID NO: 1435185 - RNA, 19 nt, Artificial Sequence
  Description of Artificial Sequence: Synthetic oligonucleotide
  Antisense strand to SEQ ID NO: 1435184
auaccucugugcuaaaccc

SEQ ID NO: 1435186 - RNA, 19 nt, Artificial Sequence
  Description of Artificial Sequence: Synthetic oligonucleotide
  Sense strand starting at position 282 of SEQ ID NO: 1243705
ugaggccuugaauguuaua

SEQ ID NO: 1435187 - RNA, 19 nt, Artificial Sequence
  Description of Artificial Sequence: Synthetic oligonucleotide
  Antisense strand to SEQ ID NO: 1435186
uauaacauucaaggccuca

SEQ ID NO: 1435188 - RNA, 19 nt, Artificial Sequence
  Description of Artificial Sequence: Synthetic oligonucleotide
  Sense strand starting at position 740 of SEQ ID NO: 1243705
aagugacaaugguuucuca

SEQ ID NO: 1435189 - RNA, 19 nt, Artificial Sequence
  Description of Artificial Sequence: Synthetic oligonucleotide
  Antisense strand to SEQ ID NO: 1435188
ugagaaaccauugucacuu

SEQ ID NO: 1435190 - RNA, 19 nt, Artificial Sequence
  Description of Artificial Sequence: Synthetic oligonucleotide
  Sense strand starting at position 785 of SEQ ID NO: 1243705
cucagugcuccaugaggga

SEQ ID NO: 1435191 - RNA, 19 nt, Artificial Sequence
  Description of Artificial Sequence: Synthetic oligonucleotide
  Antisense strand to SEQ ID NO: 1435190
ucccucauggagcacugag

SEQ ID NO: 1435192 - RNA, 19 nt, Artificial Sequence
  Description of Artificial Sequence: Synthetic oligonucleotide
  Sense strand starting at position 1060 of SEQ ID NO: 1243705
augaaaucugucuggacca

SEQ ID NO: 1435193 - RNA, 19 nt, Artificial Sequence
  Description of Artificial Sequence: Synthetic oligonucleotide
  Antisense strand to SEQ ID NO: 1435192
ugguccagacagauuucau

SEQ ID NO: 1435194 - RNA, 19 nt, Artificial Sequence
  Description of Artificial Sequence: Synthetic oligonucleotide
  Sense strand starting at position 1204 of SEQ ID NO: 1243705
ucuauuugcugucuaguuu

SEQ ID NO: 1435195 - RNA, 19 nt, Artificial Sequence
  Description of Artificial Sequence: Synthetic oligonucleotide
  Antisense strand to SEQ ID NO: 1435194
aaacuagacagcaaauaga

SEQ ID NO: 1435196 - RNA, 19 nt, Artificial Sequence
  Description of Artificial Sequence: Synthetic oligonucleotide
  Sense strand starting at position 1244 of SEQ ID NO: 1243705
ugggaaucauggccugaag

SEQ ID NO: 1435197 - RNA, 19 nt, Artificial Sequence
  Description of Artificial Sequence: Synthetic oligonucleotide
  Antisense strand to SEQ ID NO: 1435196
cuucaggccaugauuccca

SEQ ID NO: 1435198 - RNA, 19 nt, Artificial Sequence
  Description of Artificial Sequence: Synthetic oligonucleotide
  Sense strand starting at position 1276 of SEQ ID NO: 1243705
ugcucagucccagauauca

SEQ ID NO: 1435199 - RNA, 19 nt, Artificial Sequence
  Description of Artificial Sequence: Synthetic oligonucleotide
  Antisense strand to SEQ ID NO: 1435198
ugauaucugggacugagca

SEQ ID NO: 1435200 - RNA, 19 nt, Artificial Sequence
  Description of Artificial Sequence: Synthetic oligonucleotide
  Sense strand starting at position 1287 of SEQ ID NO: 1243705
agauaucauuuguauguga

SEQ ID NO: 1435201 - RNA, 19 nt, Artificial Sequence
  Description of Artificial Sequence: Synthetic oligonucleotide
  Antisense strand to SEQ ID NO: 1435200
ucacauacaaaugauaucu

SEQ ID NO: 1435202 - RNA, 19 nt, Artificial Sequence
  Description of Artificial Sequence: Synthetic oligonucleotide
  Sense strand starting at position 1399 of SEQ ID NO: 1243705
gcggguucugucgucaaac

SEQ ID NO: 1435203 - RNA, 19 nt, Artificial Sequence
  Description of Artificial Sequence: Synthetic oligonucleotide
  Antisense strand to SEQ ID NO: 1435202
guuugacgacagaacccgc

SEQ ID NO: 1435204 - RNA, 19 nt, Artificial Sequence
  Description of Artificial Sequence: Synthetic oligonucleotide
  Sense strand starting at position 1462 of SEQ ID NO: 1243705
aggauugcucauugcagga

SEQ ID NO: 1435205 - RNA, 19 nt, Artificial Sequence
  Description of Artificial Sequence: Synthetic oligonucleotide
  Antisense strand to SEQ ID NO: 1435204
uccugcaaugagcaauccu

SEQ ID NO: 1435206 - RNA, 19 nt, Artificial Sequence
  Description of Artificial Sequence: Synthetic oligonucleotide
  Sense strand starting at position 2043 of SEQ ID NO: 1243705
gcucgauguccugugacgu

SEQ ID NO: 1435207 - RNA, 19 nt, Artificial Sequence
  Description of Artificial Sequence: Synthetic oligonucleotide
  Antisense strand to SEQ ID NO: 1435206
acgucacaggacaucgagc

SEQ ID NO: 1435208 - RNA, 19 nt, Artificial Sequence
  Description of Artificial Sequence: Synthetic oligonucleotide
  Sense strand starting at position 2110 of SEQ ID NO: 1243705
uggcuuccaguuuaggaaa

SEQ ID NO: 1435209 - RNA, 19 nt, Artificial Sequence
  Description of Artificial Sequence: Synthetic oligonucleotide
  Antisense strand to SEQ ID NO: 1435208
uuuccuaaacuggaagcca

SEQ ID NO: 1435210 - RNA, 19 nt, Artificial Sequence
  Description of Artificial Sequence: Synthetic oligonucleotide
  Sense strand starting at position 2499 of SEQ ID NO: 1243705
ucuuuaauguaacuggagu

SEQ ID NO: 1435211 - RNA, 19 nt, Artificial Sequence
  Description of Artificial Sequence: Synthetic oligonucleotide
  Antisense strand to SEQ ID NO: 1435210
acuccaguuacauuaaaga

SEQ ID NO: 1435212 - RNA, 19 nt, Artificial Sequence
  Description of Artificial Sequence: Synthetic oligonucleotide
  Sense strand starting at position 2510 of SEQ ID NO: 1243705
acuggaguuuauccuuaug

SEQ ID NO: 1435213 - RNA, 19 nt, Artificial Sequence
  Description of Artificial Sequence: Synthetic oligonucleotide
  Antisense strand to SEQ ID NO: 1435212
cauaaggauaaacuccagu

SEQ ID NO: 1435214 - RNA, 19 nt, Artificial Sequence
  Description of Artificial Sequence: Synthetic oligonucleotide
  Sense strand starting at position 2512 of SEQ ID NO: 1243705
uggaguuuauccuuaugca

SEQ ID NO: 1435215 - RNA, 19 nt, Artificial Sequence
  Description of Artificial Sequence: Synthetic oligonucleotide
  Antisense strand to SEQ ID NO: 1435214
ugcauaaggauaaacucca

SEQ ID NO: 1435216 - RNA, 19 nt, Artificial Sequence
  Description of Artificial Sequence: Synthetic oligonucleotide
  Sense strand starting at position 2513 of SEQ ID NO: 1243705
ggaguuuauccuuaugcau

SEQ ID NO: 1435217 - RNA, 19 nt, Artificial Sequence
  Description of Artificial Sequence: Synthetic oligonucleotide
  Antisense strand to SEQ ID NO: 1435216
augcauaaggauaaacucc

SEQ ID NO: 1435218 - RNA, 19 nt, Artificial Sequence
  Description of Artificial Sequence: Synthetic oligonucleotide
  Sense strand starting at position 2567 of SEQ ID NO: 1243705
gcgccaguuaugucaacac

SEQ ID NO: 1435219 - RNA, 19 nt, Artificial Sequence
  Description of Artificial Sequence: Synthetic oligonucleotide
  Antisense strand to SEQ ID NO: 1435218
guguugacauaacuggcgc

SEQ ID NO: 1435220 - RNA, 19 nt, Artificial Sequence
  Description of Artificial Sequence: Synthetic oligonucleotide
  Sense strand starting at position 2692 of SEQ ID NO: 1243705
ucauuugccuguguguuua

SEQ ID NO: 1435221 - RNA, 19 nt, Artificial Sequence
  Description of Artificial Sequence: Synthetic oligonucleotide
  Antisense strand to SEQ ID NO: 1435220
uaaacacacaggcaaauga

SEQ ID NO: 1435222 - RNA, 19 nt, Artificial Sequence
  Description of Artificial Sequence: Synthetic oligonucleotide
  Sense strand starting at position 2748 of SEQ ID NO: 1243705
acauuccugggaggaguuu

SEQ ID NO: 1435223 - RNA, 19 nt, Artificial Sequence
  Description of Artificial Sequence: Synthetic oligonucleotide
  Antisense strand to SEQ ID NO: 1435222
aaacuccucccaggaaugu

SEQ ID NO: 1435224 - RNA, 19 nt, Artificial Sequence
  Description of Artificial Sequence: Synthetic oligonucleotide
  Sense strand starting at position 2915 of SEQ ID NO: 1243705
uugggccuucuaugaaaua

SEQ ID NO: 1435225 - RNA, 19 nt, Artificial Sequence
  Description of Artificial Sequence: Synthetic oligonucleotide
  Antisense strand to SEQ ID NO: 1435224
uauuucauagaaggcccaa

SEQ ID NO: 1435226 - RNA, 19 nt, Artificial Sequence
  Description of Artificial Sequence: Synthetic oligonucleotide
  Sense strand starting at position 3030 of SEQ ID NO: 1243705
uaugcagucgguuucugua

SEQ ID NO: 1435227 - RNA, 19 nt, Artificial Sequence
  Description of Artificial Sequence: Synthetic oligonucleotide
  Antisense strand to SEQ ID NO: 1435226
uacagaaaccgacugcaua

SEQ ID NO: 1435228 - RNA, 19 nt, Artificial Sequence
  Description of Artificial Sequence: Synthetic oligonucleotide
  Sense strand starting at position 3037 of SEQ ID NO: 1243705
ucgguuucuguaguaguuu

SEQ ID NO: 1435229 - RNA, 19 nt, Artificial Sequence
  Description of Artificial Sequence: Synthetic oligonucleotide
  Antisense strand to SEQ ID NO: 1435228
aaacuacuacagaaaccga

SEQ ID NO: 1435230 - RNA, 19 nt, Artificial Sequence
  Description of Artificial Sequence: Synthetic oligonucleotide
  Sense strand starting at position 3070 of SEQ ID NO: 1243705
cccaaaucccuagguugau

SEQ ID NO: 1435231 - RNA, 19 nt, Artificial Sequence
  Description of Artificial Sequence: Synthetic oligonucleotide
  Antisense strand to SEQ ID NO: 1435230
aucaaccuagggauuuggg

SEQ ID NO: 1435232 - RNA, 19 nt, Artificial Sequence
  Description of Artificial Sequence: Synthetic oligonucleotide
  Sense strand starting at position 3242 of SEQ ID NO: 1243705
ggauuauaggugcauguga

SEQ ID NO: 1435233 - RNA, 19 nt, Artificial Sequence
  Description of Artificial Sequence: Synthetic oligonucleotide
  Antisense strand to SEQ ID NO: 1435232
ucacaugcaccuauaaucc

SEQ ID NO: 1435234 - RNA, 19 nt, Artificial Sequence
  Description of Artificial Sequence: Synthetic oligonucleotide
  Sense strand starting at position 3509 of SEQ ID NO: 1243705
agauuaugguuauuggauc

SEQ ID NO: 1435235 - RNA, 19 nt, Artificial Sequence
  Description of Artificial Sequence: Synthetic oligonucleotide
  Antisense strand to SEQ ID NO: 1435234
gauccaauaaccauaaucu

SEQ ID NO: 1435236 - RNA, 19 nt, Artificial Sequence
  Description of Artificial Sequence: Synthetic oligonucleotide
  Sense strand starting at position 3515 of SEQ ID NO: 1243705
ugguuauuggaucaggcau

SEQ ID NO: 1435237 - RNA, 19 nt, Artificial Sequence
  Description of Artificial Sequence: Synthetic oligonucleotide
  Antisense strand to SEQ ID NO: 1435236
augccugauccaauaacca

SEQ ID NO: 1435238 - RNA, 19 nt, Artificial Sequence
  Description of Artificial Sequence: Synthetic oligonucleotide
  Sense strand starting at position 3529 of SEQ ID NO: 1243705
ggcauaagccugugauuua

SEQ ID NO: 1435239 - RNA, 19 nt, Artificial Sequence
  Description of Artificial Sequence: Synthetic oligonucleotide
  Antisense strand to SEQ ID NO: 1435238
uaaaucacaggcuuaugcc

SEQ ID NO: 1435240 - RNA, 19 nt, Artificial Sequence
  Description of Artificial Sequence: Synthetic oligonucleotide
  Sense strand starting at position 3538 of SEQ ID NO: 1243705
cugugauuuaagugggcca

SEQ ID NO: 1435241 - RNA, 19 nt, Artificial Sequence
  Description of Artificial Sequence: Synthetic oligonucleotide
  Antisense strand to SEQ ID NO: 1435240
uggcccacuuaaaucacag

SEQ ID NO: 1435242 - RNA, 19 nt, Artificial Sequence
  Description of Artificial Sequence: Synthetic oligonucleotide
  Sense strand starting at position 3564 of SEQ ID NO: 1243705
ggaaucaguuucuugcuca

SEQ ID NO: 1435243 - RNA, 19 nt, Artificial Sequence
  Description of Artificial Sequence: Synthetic oligonucleotide
  Antisense strand to SEQ ID NO: 1435242
ugagcaagaaacugauucc

SEQ ID NO: 1435244 - RNA, 19 nt, Artificial Sequence
  Description of Artificial Sequence: Synthetic oligonucleotide
  Sense strand starting at position 3567 of SEQ ID NO: 1243705
aucaguuucuugcucagaa

SEQ ID NO: 1435245 - RNA, 19 nt, Artificial Sequence
  Description of Artificial Sequence: Synthetic oligonucleotide
  Antisense strand to SEQ ID NO: 1435244
uucugagcaagaaacugau

SEQ ID NO: 1435246 - RNA, 19 nt, Artificial Sequence
  Description of Artificial Sequence: Synthetic oligonucleotide
  Sense strand starting at position 3569 of SEQ ID NO: 1243705
caguuucuugcucagaaug

SEQ ID NO: 1435247 - RNA, 19 nt, Artificial Sequence
  Description of Artificial Sequence: Synthetic oligonucleotide
  Antisense strand to SEQ ID NO: 1435246
cauucugagcaagaaacug

SEQ ID NO: 1435248 - RNA, 19 nt, Artificial Sequence
  Description of Artificial Sequence: Synthetic oligonucleotide
  Sense strand starting at position 3613 of SEQ ID NO: 1243705
cguuuacugguuuaucaua

SEQ ID NO: 1435249 - RNA, 19 nt, Artificial Sequence
  Description of Artificial Sequence: Synthetic oligonucleotide
  Antisense strand to SEQ ID NO: 1435248
uaugauaaaccaguaaacg

SEQ ID NO: 1435250 - RNA, 19 nt, Artificial Sequence
  Description of Artificial Sequence: Synthetic oligonucleotide
  Sense strand starting at position 3683 of SEQ ID NO: 1243705
ggaagagauuucuggaagu

SEQ ID NO: 1435251 - RNA, 19 nt, Artificial Sequence
  Description of Artificial Sequence: Synthetic oligonucleotide
  Antisense strand to SEQ ID NO: 1435250
acuuccagaaaucucuucc

SEQ ID NO: 1435252 - RNA, 19 nt, Artificial Sequence
  Description of Artificial Sequence: Synthetic oligonucleotide
  Sense strand starting at position 3734 of SEQ ID NO: 1243705
ucuagugcuacugaaggaa

SEQ ID NO: 1435253 - RNA, 19 nt, Artificial Sequence
  Description of Artificial Sequence: Synthetic oligonucleotide
  Antisense strand to SEQ ID NO: 1435252
uuccuucaguagcacuaga

SEQ ID NO: 1435254 - RNA, 19 nt, Artificial Sequence
  Description of Artificial Sequence: Synthetic oligonucleotide
  Sense strand starting at position 3747 of SEQ ID NO: 1243705
aaggaagcagcuugacauu

SEQ ID NO: 1435255 - RNA, 19 nt, Artificial Sequence
  Description of Artificial Sequence: Synthetic oligonucleotide
  Antisense strand to SEQ ID NO: 1435254
aaugucaagcugcuuccuu

SEQ ID NO: 1435256 - RNA, 19 nt, Artificial Sequence
  Description of Artificial Sequence: Synthetic oligonucleotide
  Sense strand starting at position 3924 of SEQ ID NO: 1243705
gcuauuugcuguuuaagca

SEQ ID NO: 1435257 - RNA, 19 nt, Artificial Sequence
  Description of Artificial Sequence: Synthetic oligonucleotide
  Antisense strand to SEQ ID NO: 1435256
ugcuuaaacagcaaauagc

SEQ ID NO: 1435258 - RNA, 19 nt, Artificial Sequence
  Description of Artificial Sequence: Synthetic oligonucleotide
  Sense strand starting at position 3925 of SEQ ID NO: 1243705
cuauuugcuguuuaagcau

SEQ ID NO: 1435259 - RNA, 19 nt, Artificial Sequence
  Description of Artificial Sequence: Synthetic oligonucleotide
  Antisense strand to SEQ ID NO: 1435258
augcuuaaacagcaaauag

SEQ ID NO: 1435260 - RNA, 19 nt, Artificial Sequence
  Description of Artificial Sequence: Synthetic oligonucleotide
  Sense strand starting at position 3937 of SEQ ID NO: 1243705
uaagcauauuguguagaaa

SEQ ID NO: 1435261 - RNA, 19 nt, Artificial Sequence
  Description of Artificial Sequence: Synthetic oligonucleotide
  Antisense strand to SEQ ID NO: 1435260
uuucuacacaauaugcuua

SEQ ID NO: 1435262 - RNA, 19 nt, Artificial Sequence
  Description of Artificial Sequence: Synthetic oligonucleotide
  Sense strand starting at position 25 of SEQ ID NO: 1243706
uacugccugugccaagaau

SEQ ID NO: 1435263 - RNA, 19 nt, Artificial Sequence
  Description of Artificial Sequence: Synthetic oligonucleotide
  Antisense strand to SEQ ID NO: 1435262
auucuuggcacaggcagua

SEQ ID NO: 1435264 - RNA, 19 nt, Artificial Sequence
  Description of Artificial Sequence: Synthetic oligonucleotide
  Sense strand starting at position 549 of SEQ ID NO: 1243706
agcagccuaguccagaaau

SEQ ID NO: 1435265 - RNA, 19 nt, Artificial Sequence
  Description of Artificial Sequence: Synthetic oligonucleotide
  Antisense strand to SEQ ID NO: 1435264
auuucuggacuaggcugcu

SEQ ID NO: 1435266 - RNA, 19 nt, Artificial Sequence
  Description of Artificial Sequence: Synthetic oligonucleotide
  Sense strand starting at position 963 of SEQ ID NO: 1243706
ucggauaagucuccucucu

SEQ ID NO: 1435267 - RNA, 19 nt, Artificial Sequence
  Description of Artificial Sequence: Synthetic oligonucleotide
  Antisense strand to SEQ ID NO: 1435266
agagaggagacuuauccga

SEQ ID NO: 1435268 - RNA, 19 nt, Artificial Sequence
  Description of Artificial Sequence: Synthetic oligonucleotide
  Sense strand starting at position 1920 of SEQ ID NO: 1243706
ggcuguuacugaguugcca

SEQ ID NO: 1435269 - RNA, 19 nt, Artificial Sequence
  Description of Artificial Sequence: Synthetic oligonucleotide
  Antisense strand to SEQ ID NO: 1435268
uggcaacucaguaacagcc

SEQ ID NO: 1435270 - RNA, 19 nt, Artificial Sequence
  Description of Artificial Sequence: Synthetic oligonucleotide
  Sense strand starting at position 1928 of SEQ ID NO: 1243706
cugaguugccaggaccuua

SEQ ID NO: 1435271 - RNA, 19 nt, Artificial Sequence
  Description of Artificial Sequence: Synthetic oligonucleotide
  Antisense strand to SEQ ID NO: 1435270
uaagguccuggcaacucag

SEQ ID NO: 1435272 - RNA, 19 nt, Artificial Sequence
  Description of Artificial Sequence: Synthetic oligonucleotide
  Sense strand starting at position 1933 of SEQ ID NO: 1243706
uugccaggaccuuaucaaa

SEQ ID NO: 1435273 - RNA, 19 nt, Artificial Sequence
  Description of Artificial Sequence: Synthetic oligonucleotide
  Antisense strand to SEQ ID NO: 1435272
uuugauaagguccuggcaa

SEQ ID NO: 1435274 - RNA, 19 nt, Artificial Sequence
  Description of Artificial Sequence: Synthetic oligonucleotide
  Sense strand starting at position 2278 of SEQ ID NO: 1243706
gcaacaguuucugguagca

SEQ ID NO: 1435275 - RNA, 19 nt, Artificial Sequence
  Description of Artificial Sequence: Synthetic oligonucleotide
  Antisense strand to SEQ ID NO: 1435274
ugcuaccagaaacuguugc

SEQ ID NO: 1435276 - RNA, 19 nt, Artificial Sequence
  Description of Artificial Sequence: Synthetic oligonucleotide
  Sense strand starting at position 2280 of SEQ ID NO: 1243706
aacaguuucugguagcauu

SEQ ID NO: 1435277 - RNA, 19 nt, Artificial Sequence
  Description of Artificial Sequence: Synthetic oligonucleotide
  Antisense strand to SEQ ID NO: 1435276
aaugcuaccagaaacuguu

SEQ ID NO: 1435278 - RNA, 19 nt, Artificial Sequence
  Description of Artificial Sequence: Synthetic oligonucleotide
  Sense strand starting at position 2295 of SEQ ID NO: 1243706
cauuauggccaucgcaaga

SEQ ID NO: 1435279 - RNA, 19 nt, Artificial Sequence
  Description of Artificial Sequence: Synthetic oligonucleotide
  Antisense strand to SEQ ID NO: 1435278
ucuugcgauggccauaaug

SEQ ID NO: 1435280 - RNA, 19 nt, Artificial Sequence
  Description of Artificial Sequence: Synthetic oligonucleotide
  Sense strand starting at position 2369 of SEQ ID NO: 1243706
ucaaguuucccugggaauu

SEQ ID NO: 1435281 - RNA, 19 nt, Artificial Sequence
  Description of Artificial Sequence: Synthetic oligonucleotide
  Antisense strand to SEQ ID NO: 1435280
aauucccagggaaacuuga

SEQ ID NO: 1435282 - RNA, 19 nt, Artificial Sequence
  Description of Artificial Sequence: Synthetic oligonucleotide
  Sense strand starting at position 2507 of SEQ ID NO: 1243706
ugcaucugaguucggguaa

SEQ ID NO: 1435283 - RNA, 19 nt, Artificial Sequence
  Description of Artificial Sequence: Synthetic oligonucleotide
  Antisense strand to SEQ ID NO: 1435282
uuacccgaacucagaugca

SEQ ID NO: 1435284 - RNA, 19 nt, Artificial Sequence
  Description of Artificial Sequence: Synthetic oligonucleotide
  Sense strand starting at position 2508 of SEQ ID NO: 1243706
gcaucugaguucggguaaa

SEQ ID NO: 1435285 - RNA, 19 nt, Artificial Sequence
  Description of Artificial Sequence: Synthetic oligonucleotide
  Antisense strand to SEQ ID NO: 1435284
uuuacccgaacucagaugc

SEQ ID NO: 1435286 - RNA, 19 nt, Artificial Sequence
  Description of Artificial Sequence: Synthetic oligonucleotide
  Sense strand starting at position 2547 of SEQ ID NO: 1243706
augaauugcguuugugcau

SEQ ID NO: 1435287 - RNA, 19 nt, Artificial Sequence
  Description of Artificial Sequence: Synthetic oligonucleotide
  Antisense strand to SEQ ID NO: 1435286
augcacaaacgcaauucau

SEQ ID NO: 1435288 - RNA, 19 nt, Artificial Sequence
  Description of Artificial Sequence: Synthetic oligonucleotide
  Sense strand starting at position 2553 of SEQ ID NO: 1243706
ugcguuugugcauguguga

SEQ ID NO: 1435289 - RNA, 19 nt, Artificial Sequence
  Description of Artificial Sequence: Synthetic oligonucleotide
  Antisense strand to SEQ ID NO: 1435288
ucacacaugcacaaacgca

SEQ ID NO: 1435290 - RNA, 19 nt, Artificial Sequence
  Description of Artificial Sequence: Synthetic oligonucleotide
  Sense strand starting at position 2554 of SEQ ID NO: 1243706
gcguuugugcaugugugaa

SEQ ID NO: 1435291 - RNA, 19 nt, Artificial Sequence
  Description of Artificial Sequence: Synthetic oligonucleotide
  Antisense strand to SEQ ID NO: 1435290
uucacacaugcacaaacgc

SEQ ID NO: 1435292 - RNA, 19 nt, Artificial Sequence
  Description of Artificial Sequence: Synthetic oligonucleotide
  Sense strand starting at position 2577 of SEQ ID NO: 1243706
gggugugaauccgccagua

SEQ ID NO: 1435293 - RNA, 19 nt, Artificial Sequence
  Description of Artificial Sequence: Synthetic oligonucleotide
  Antisense strand to SEQ ID NO: 1435292
uacuggcggauucacaccc

SEQ ID NO: 1435294 - RNA, 19 nt, Artificial Sequence
  Description of Artificial Sequence: Synthetic oligonucleotide
  Sense strand starting at position 2579 of SEQ ID NO: 1243706
gugugaauccgccaguaua

SEQ ID NO: 1435295 - RNA, 19 nt, Artificial Sequence
  Description of Artificial Sequence: Synthetic oligonucleotide
  Antisense strand to SEQ ID NO: 1435294
uauacuggcggauucacac

SEQ ID NO: 1435296 - RNA, 19 nt, Artificial Sequence
  Description of Artificial Sequence: Synthetic oligonucleotide
  Sense strand starting at position 2727 of SEQ ID NO: 1243706
acccguuacucuuccaaag

SEQ ID NO: 1435297 - RNA, 19 nt, Artificial Sequence
  Description of Artificial Sequence: Synthetic oligonucleotide
  Antisense strand to SEQ ID NO: 1435296
cuuuggaagaguaacgggu

SEQ ID NO: 1435298 - RNA, 19 nt, Artificial Sequence
  Description of Artificial Sequence: Synthetic oligonucleotide
  Sense strand starting at position 2729 of SEQ ID NO: 1243706
ccguuacucuuccaaaguc

SEQ ID NO: 1435299 - RNA, 19 nt, Artificial Sequence
  Description of Artificial Sequence: Synthetic oligonucleotide
  Antisense strand to SEQ ID NO: 1435298
gacuuuggaagaguaacgg

SEQ ID NO: 1435300 - RNA, 19 nt, Artificial Sequence
  Description of Artificial Sequence: Synthetic oligonucleotide
  Sense strand starting at position 2749 of SEQ ID NO: 1243706
ccucuucugccauauguua

SEQ ID NO: 1435301 - RNA, 19 nt, Artificial Sequence
  Description of Artificial Sequence: Synthetic oligonucleotide
  Antisense strand to SEQ ID NO: 1435300
uaacauauggcagaagagg

SEQ ID NO: 1435302 - RNA, 19 nt, Artificial Sequence
  Description of Artificial Sequence: Synthetic oligonucleotide
  Sense strand starting at position 2754 of SEQ ID NO: 1243706
ucugccauauguuacauau

SEQ ID NO: 1435303 - RNA, 19 nt, Artificial Sequence
  Description of Artificial Sequence: Synthetic oligonucleotide
  Antisense strand to SEQ ID NO: 1435302
auauguaacauauggcaga

SEQ ID NO: 1435304 - RNA, 19 nt, Artificial Sequence
  Description of Artificial Sequence: Synthetic oligonucleotide
  Sense strand starting at position 2756 of SEQ ID NO: 1243706
ugccauauguuacauauua

SEQ ID NO: 1435305 - RNA, 19 nt, Artificial Sequence
  Description of Artificial Sequence: Synthetic oligonucleotide
  Antisense strand to SEQ ID NO: 1435304
uaauauguaacauauggca

SEQ ID NO: 1435306 - RNA, 19 nt, Artificial Sequence
  Description of Artificial Sequence: Synthetic oligonucleotide
  Sense strand starting at position 2944 of SEQ ID NO: 1243706
gucacaaacccagagcauu

SEQ ID NO: 1435307 - RNA, 19 nt, Artificial Sequence
  Description of Artificial Sequence: Synthetic oligonucleotide
  Antisense strand to SEQ ID NO: 1435306
aaugcucuggguuugugac

SEQ ID NO: 1435308 - RNA, 19 nt, Artificial Sequence
  Description of Artificial Sequence: Synthetic oligonucleotide
  Sense strand starting at position 2950 of SEQ ID NO: 1243706
aacccagagcauuguguau

SEQ ID NO: 1435309 - RNA, 19 nt, Artificial Sequence
  Description of Artificial Sequence: Synthetic oligonucleotide
  Antisense strand to SEQ ID NO: 1435308
auacacaaugcucuggguu

SEQ ID NO: 1435310 - RNA, 19 nt, Artificial Sequence
  Description of Artificial Sequence: Synthetic oligonucleotide
  Sense strand starting at position 2952 of SEQ ID NO: 1243706
cccagagcauuguguauuu

SEQ ID NO: 1435311 - RNA, 19 nt, Artificial Sequence
  Description of Artificial Sequence: Synthetic oligonucleotide
  Antisense strand to SEQ ID NO: 1435310
aaauacacaaugcucuggg

SEQ ID NO: 1435312 - RNA, 19 nt, Artificial Sequence
  Description of Artificial Sequence: Synthetic oligonucleotide
  Sense strand starting at position 2969 of SEQ ID NO: 1243706
uuauucugcugcugcuaua

SEQ ID NO: 1435313 - RNA, 19 nt, Artificial Sequence
  Description of Artificial Sequence: Synthetic oligonucleotide
  Antisense strand to SEQ ID NO: 1435312
uauagcagcagcagaauaa

SEQ ID NO: 1435314 - RNA, 19 nt, Artificial Sequence
  Description of Artificial Sequence: Synthetic oligonucleotide
  Sense strand starting at position 2976 of SEQ ID NO: 1243706
gcugcugcuauagaaugau

SEQ ID NO: 1435315 - RNA, 19 nt, Artificial Sequence
  Description of Artificial Sequence: Synthetic oligonucleotide
  Antisense strand to SEQ ID NO: 1435314
aucauucuauagcagcagc

SEQ ID NO: 1435316 - RNA, 19 nt, Artificial Sequence
  Description of Artificial Sequence: Synthetic oligonucleotide
  Sense strand starting at position 2982 of SEQ ID NO: 1243706
gcuauagaaugauuccuua

SEQ ID NO: 1435317 - RNA, 19 nt, Artificial Sequence
  Description of Artificial Sequence: Synthetic oligonucleotide
  Antisense strand to SEQ ID NO: 1435316
uaaggaaucauucuauagc

SEQ ID NO: 1435318 - RNA, 19 nt, Artificial Sequence
  Description of Artificial Sequence: Synthetic oligonucleotide
  Sense strand starting at position 2985 of SEQ ID NO: 1243706
auagaaugauuccuuaugu

SEQ ID NO: 1435319 - RNA, 19 nt, Artificial Sequence
  Description of Artificial Sequence: Synthetic oligonucleotide
  Antisense strand to SEQ ID NO: 1435318
acauaaggaaucauucuau

SEQ ID NO: 1435320 - RNA, 19 nt, Artificial Sequence
  Description of Artificial Sequence: Synthetic oligonucleotide
  Sense strand starting at position 2990 of SEQ ID NO: 1243706
augauuccuuauguuauga

SEQ ID NO: 1435321 - RNA, 19 nt, Artificial Sequence
  Description of Artificial Sequence: Synthetic oligonucleotide
  Antisense strand to SEQ ID NO: 1435320
ucauaacauaaggaaucau

SEQ ID NO: 1435322 - RNA, 19 nt, Artificial Sequence
  Description of Artificial Sequence: Synthetic oligonucleotide
  Sense strand starting at position 2994 of SEQ ID NO: 1243706
uuccuuauguuaugagcga

SEQ ID NO: 1435323 - RNA, 19 nt, Artificial Sequence
  Description of Artificial Sequence: Synthetic oligonucleotide
  Antisense strand to SEQ ID NO: 1435322
ucgcucauaacauaaggaa

SEQ ID NO: 1435324 - RNA, 19 nt, Artificial Sequence
  Description of Artificial Sequence: Synthetic oligonucleotide
  Sense strand starting at position 2995 of SEQ ID NO: 1243706
uccuuauguuaugagcgaa

SEQ ID NO: 1435325 - RNA, 19 nt, Artificial Sequence
  Description of Artificial Sequence: Synthetic oligonucleotide
  Antisense strand to SEQ ID NO: 1435324
uucgcucauaacauaagga

SEQ ID NO: 1435326 - RNA, 19 nt, Artificial Sequence
  Description of Artificial Sequence: Synthetic oligonucleotide
  Sense strand starting at position 2998 of SEQ ID NO: 1243706
uuauguuaugagcgaauaa

SEQ ID NO: 1435327 - RNA, 19 nt, Artificial Sequence
  Description of Artificial Sequence: Synthetic oligonucleotide
  Antisense strand to SEQ ID NO: 1435326
uuauucgcucauaacauaa

SEQ ID NO: 1435328 - RNA, 19 nt, Artificial Sequence
  Description of Artificial Sequence: Synthetic oligonucleotide
  Sense strand starting at position 3367 of SEQ ID NO: 1243706
acauaaaggugugaaccaa

SEQ ID NO: 1435329 - RNA, 19 nt, Artificial Sequence
  Description of Artificial Sequence: Synthetic oligonucleotide
  Antisense strand to SEQ ID NO: 1435328
uugguucacaccuuuaugu

SEQ ID NO: 1435330 - RNA, 19 nt, Artificial Sequence
  Description of Artificial Sequence: Synthetic oligonucleotide
  Sense strand starting at position 3519 of SEQ ID NO: 1243706
caagaauuguggcucuauc

SEQ ID NO: 1435331 - RNA, 19 nt, Artificial Sequence
  Description of Artificial Sequence: Synthetic oligonucleotide
  Antisense strand to SEQ ID NO: 1435330
gauagagccacaauucuug

SEQ ID NO: 1435332 - RNA, 19 nt, Artificial Sequence
  Description of Artificial Sequence: Synthetic oligonucleotide
  Sense strand starting at position 3526 of SEQ ID NO: 1243706
uguggcucuaucuagguau

SEQ ID NO: 1435333 - RNA, 19 nt, Artificial Sequence
  Description of Artificial Sequence: Synthetic oligonucleotide
  Antisense strand to SEQ ID NO: 1435332
auaccuagauagagccaca

SEQ ID NO: 1435334 - RNA, 19 nt, Artificial Sequence
  Description of Artificial Sequence: Synthetic oligonucleotide
  Sense strand starting at position 3529 of SEQ ID NO: 1243706
ggcucuaucuagguaucca

SEQ ID NO: 1435335 - RNA, 19 nt, Artificial Sequence
  Description of Artificial Sequence: Synthetic oligonucleotide
  Antisense strand to SEQ ID NO: 1435334
uggauaccuagauagagcc

SEQ ID NO: 1435336 - RNA, 19 nt, Artificial Sequence
  Description of Artificial Sequence: Synthetic oligonucleotide
  Sense strand starting at position 3533 of SEQ ID NO: 1243706
cuaucuagguauccauaga

SEQ ID NO: 1435337 - RNA, 19 nt, Artificial Sequence
  Description of Artificial Sequence: Synthetic oligonucleotide
  Antisense strand to SEQ ID NO: 1435336
ucuauggauaccuagauag

SEQ ID NO: 1435338 - RNA, 19 nt, Artificial Sequence
  Description of Artificial Sequence: Synthetic oligonucleotide
  Sense strand starting at position 3944 of SEQ ID NO: 1243706
cuagaaagcucuuagacuu

SEQ ID NO: 1435339 - RNA, 19 nt, Artificial Sequence
  Description of Artificial Sequence: Synthetic oligonucleotide
  Antisense strand to SEQ ID NO: 1435338
aagucuaagagcuuucuag

SEQ ID NO: 1435340 - RNA, 19 nt, Artificial Sequence
  Description of Artificial Sequence: Synthetic oligonucleotide
  Sense strand starting at position 76 of SEQ ID NO: 1243707
ggaguuaagucuuaauuuc

SEQ ID NO: 1435341 - RNA, 19 nt, Artificial Sequence
  Description of Artificial Sequence: Synthetic oligonucleotide
  Antisense strand to SEQ ID NO: 1435340
gaaauuaagacuuaacucc

SEQ ID NO: 1435342 - RNA, 19 nt, Artificial Sequence
  Description of Artificial Sequence: Synthetic oligonucleotide
  Sense strand starting at position 108 of SEQ ID NO: 1243707
uuaagugauacggagcgau

SEQ ID NO: 1435343 - RNA, 19 nt, Artificial Sequence
  Description of Artificial Sequence: Synthetic oligonucleotide
  Antisense strand to SEQ ID NO: 1435342
aucgcuccguaucacuuaa

SEQ ID NO: 1435344 - RNA, 19 nt, Artificial Sequence
  Description of Artificial Sequence: Synthetic oligonucleotide
  Sense strand starting at position 111 of SEQ ID NO: 1243707
agugauacggagcgauacu

SEQ ID NO: 1435345 - RNA, 19 nt, Artificial Sequence
  Description of Artificial Sequence: Synthetic oligonucleotide
  Antisense strand to SEQ ID NO: 1435344
aguaucgcuccguaucacu

SEQ ID NO: 1435346 - RNA, 19 nt, Artificial Sequence
  Description of Artificial Sequence: Synthetic oligonucleotide
  Sense strand starting at position 112 of SEQ ID NO: 1243707
gugauacggagcgauacuu

SEQ ID NO: 1435347 - RNA, 19 nt, Artificial Sequence
  Description of Artificial Sequence: Synthetic oligonucleotide
  Antisense strand to SEQ ID NO: 1435346
aaguaucgcuccguaucac

SEQ ID NO: 1435348 - RNA, 19 nt, Artificial Sequence
  Description of Artificial Sequence: Synthetic oligonucleotide
  Sense strand starting at position 118 of SEQ ID NO: 1243707
cggagcgauacuuaagaga

SEQ ID NO: 1435349 - RNA, 19 nt, Artificial Sequence
  Description of Artificial Sequence: Synthetic oligonucleotide
  Antisense strand to SEQ ID NO: 1435348
ucucuuaaguaucgcuccg

SEQ ID NO: 1435350 - RNA, 19 nt, Artificial Sequence
  Description of Artificial Sequence: Synthetic oligonucleotide
  Sense strand starting at position 121 of SEQ ID NO: 1243707
agcgauacuuaagagauua

SEQ ID NO: 1435351 - RNA, 19 nt, Artificial Sequence
  Description of Artificial Sequence: Synthetic oligonucleotide
  Antisense strand to SEQ ID NO: 1435350
uaaucucuuaaguaucgcu

SEQ ID NO: 1435352 - RNA, 19 nt, Artificial Sequence
  Description of Artificial Sequence: Synthetic oligonucleotide
  Sense strand starting at position 131 of SEQ ID NO: 1243707
aagagauuagucuguccuc

SEQ ID NO: 1435353 - RNA, 19 nt, Artificial Sequence
  Description of Artificial Sequence: Synthetic oligonucleotide
  Antisense strand to SEQ ID NO: 1435352
gaggacagacuaaucucuu

SEQ ID NO: 1435354 - RNA, 19 nt, Artificial Sequence
  Description of Artificial Sequence: Synthetic oligonucleotide
  Sense strand starting at position 132 of SEQ ID NO: 1243707
agagauuagucuguccuca

SEQ ID NO: 1435355 - RNA, 19 nt, Artificial Sequence
  Description of Artificial Sequence: Synthetic oligonucleotide
  Antisense strand to SEQ ID NO: 1435354
ugaggacagacuaaucucu

SEQ ID NO: 1435356 - RNA, 19 nt, Artificial Sequence
  Description of Artificial Sequence: Synthetic oligonucleotide
  Sense strand starting at position 177 of SEQ ID NO: 1243707
aguugaaauuguguugaaa

SEQ ID NO: 1435357 - RNA, 19 nt, Artificial Sequence
  Description of Artificial Sequence: Synthetic oligonucleotide
  Antisense strand to SEQ ID NO: 1435356
uuucaacacaauuucaacu

SEQ ID NO: 1435358 - RNA, 19 nt, Artificial Sequence
  Description of Artificial Sequence: Synthetic oligonucleotide
  Sense strand starting at position 203 of SEQ ID NO: 1243707
uuagucaaguucuuuacaa

SEQ ID NO: 1435359 - RNA, 19 nt, Artificial Sequence
  Description of Artificial Sequence: Synthetic oligonucleotide
  Antisense strand to SEQ ID NO: 1435358
uuguaaagaacuugacuaa

SEQ ID NO: 1435360 - RNA, 19 nt, Artificial Sequence
  Description of Artificial Sequence: Synthetic oligonucleotide
  Sense strand starting at position 235 of SEQ ID NO: 1243707
cugucucuuccuggacuua

SEQ ID NO: 1435361 - RNA, 19 nt, Artificial Sequence
  Description of Artificial Sequence: Synthetic oligonucleotide
  Antisense strand to SEQ ID NO: 1435360
uaaguccaggaagagacag

SEQ ID NO: 1435362 - RNA, 19 nt, Artificial Sequence
  Description of Artificial Sequence: Synthetic oligonucleotide
  Sense strand starting at position 341 of SEQ ID NO: 1243707
aucugaugucgggaguuca

SEQ ID NO: 1435363 - RNA, 19 nt, Artificial Sequence
  Description of Artificial Sequence: Synthetic oligonucleotide
  Antisense strand to SEQ ID NO: 1435362
ugaacucccgacaucagau

SEQ ID NO: 1435364 - RNA, 19 nt, Artificial Sequence
  Description of Artificial Sequence: Synthetic oligonucleotide
  Sense strand starting at position 615 of SEQ ID NO: 1243707
uuaccuuaguuuggauuua

SEQ ID NO: 1435365 - RNA, 19 nt, Artificial Sequence
  Description of Artificial Sequence: Synthetic oligonucleotide
  Antisense strand to SEQ ID NO: 1435364
uaaauccaaacuaagguaa

SEQ ID NO: 1435366 - RNA, 19 nt, Artificial Sequence
  Description of Artificial Sequence: Synthetic oligonucleotide
  Sense strand starting at position 1142 of SEQ ID NO: 1243707
gggcaagugugccgggaau

SEQ ID NO: 1435367 - RNA, 19 nt, Artificial Sequence
  Description of Artificial Sequence: Synthetic oligonucleotide
  Antisense strand to SEQ ID NO: 1435366
auucccggcacacuugccc

SEQ ID NO: 1435368 - RNA, 19 nt, Artificial Sequence
  Description of Artificial Sequence: Synthetic oligonucleotide
  Sense strand starting at position 1144 of SEQ ID NO: 1243707
gcaagugugccgggaaugu

SEQ ID NO: 1435369 - RNA, 19 nt, Artificial Sequence
  Description of Artificial Sequence: Synthetic oligonucleotide
  Antisense strand to SEQ ID NO: 1435368
acauucccggcacacuugc

SEQ ID NO: 1435370 - RNA, 19 nt, Artificial Sequence
  Description of Artificial Sequence: Synthetic oligonucleotide
  Sense strand starting at position 1155 of SEQ ID NO: 1243707
gggaaugugugacggcaga

SEQ ID NO: 1435371 - RNA, 19 nt, Artificial Sequence
  Description of Artificial Sequence: Synthetic oligonucleotide
  Antisense strand to SEQ ID NO: 1435370
ucugccgucacacauuccc

SEQ ID NO: 1435372 - RNA, 19 nt, Artificial Sequence
  Description of Artificial Sequence: Synthetic oligonucleotide
  Sense strand starting at position 2044 of SEQ ID NO: 1243707
caggcaaucuccgauuggu

SEQ ID NO: 1435373 - RNA, 19 nt, Artificial Sequence
  Description of Artificial Sequence: Synthetic oligonucleotide
  Antisense strand to SEQ ID NO: 1435372
accaaucggagauugccug

SEQ ID NO: 1435374 - RNA, 19 nt, Artificial Sequence
  Description of Artificial Sequence: Synthetic oligonucleotide
  Sense strand starting at position 2047 of SEQ ID NO: 1243707
gcaaucuccgauuggugca

SEQ ID NO: 1435375 - RNA, 19 nt, Artificial Sequence
  Description of Artificial Sequence: Synthetic oligonucleotide
  Antisense strand to SEQ ID NO: 1435374
ugcaccaaucggagauugc

SEQ ID NO: 1435376 - RNA, 19 nt, Artificial Sequence
  Description of Artificial Sequence: Synthetic oligonucleotide
  Sense strand starting at position 2344 of SEQ ID NO: 1243707
gcuguaaagccucaagcaa

SEQ ID NO: 1435377 - RNA, 19 nt, Artificial Sequence
  Description of Artificial Sequence: Synthetic oligonucleotide
  Antisense strand to SEQ ID NO: 1435376
uugcuugaggcuuuacagc

SEQ ID NO: 1435378 - RNA, 19 nt, Artificial Sequence
  Description of Artificial Sequence: Synthetic oligonucleotide
  Sense strand starting at position 2357 of SEQ ID NO: 1243707
aagcaaggcugauauguaa

SEQ ID NO: 1435379 - RNA, 19 nt, Artificial Sequence
  Description of Artificial Sequence: Synthetic oligonucleotide
  Antisense strand to SEQ ID NO: 1435378
uuacauaucagccuugcuu

SEQ ID NO: 1435380 - RNA, 19 nt, Artificial Sequence
  Description of Artificial Sequence: Synthetic oligonucleotide
  Sense strand starting at position 2532 of SEQ ID NO: 1243707
gggugucauccaggaggaa

SEQ ID NO: 1435381 - RNA, 19 nt, Artificial Sequence
  Description of Artificial Sequence: Synthetic oligonucleotide
  Antisense strand to SEQ ID NO: 1435380
uuccuccuggaugacaccc

SEQ ID NO: 1435382 - RNA, 19 nt, Artificial Sequence
  Description of Artificial Sequence: Synthetic oligonucleotide
  Sense strand starting at position 3482 of SEQ ID NO: 1243707
uucugaacuugucaaggga

SEQ ID NO: 1435383 - RNA, 19 nt, Artificial Sequence
  Description of Artificial Sequence: Synthetic oligonucleotide
  Antisense strand to SEQ ID NO: 1435382
ucccuugacaaguucagaa

SEQ ID NO: 1435384 - RNA, 19 nt, Artificial Sequence
  Description of Artificial Sequence: Synthetic oligonucleotide
  Sense strand starting at position 3485 of SEQ ID NO: 1243707
ugaacuugucaagggagca

SEQ ID NO: 1435385 - RNA, 19 nt, Artificial Sequence
  Description of Artificial Sequence: Synthetic oligonucleotide
  Antisense strand to SEQ ID NO: 1435384
ugcucccuugacaaguuca

SEQ ID NO: 1435386 - RNA, 19 nt, Artificial Sequence
  Description of Artificial Sequence: Synthetic oligonucleotide
  Sense strand starting at position 3531 of SEQ ID NO: 1243707
cugugaggccucuggaaac

SEQ ID NO: 1435387 - RNA, 19 nt, Artificial Sequence
  Description of Artificial Sequence: Synthetic oligonucleotide
  Antisense strand to SEQ ID NO: 1435386
guuuccagaggccucacag

SEQ ID NO: 1435388 - RNA, 19 nt, Artificial Sequence
  Description of Artificial Sequence: Synthetic oligonucleotide
  Sense strand starting at position 3653 of SEQ ID NO: 1243707
ugggauuuguuccagcuga

SEQ ID NO: 1435389 - RNA, 19 nt, Artificial Sequence
  Description of Artificial Sequence: Synthetic oligonucleotide
  Antisense strand to SEQ ID NO: 1435388
ucagcuggaacaaauccca

SEQ ID NO: 1435390 - RNA, 19 nt, Artificial Sequence
  Description of Artificial Sequence: Synthetic oligonucleotide
  Sense strand starting at position 3663 of SEQ ID NO: 1243707
uccagcugaucugaaguaa

SEQ ID NO: 1435391 - RNA, 19 nt, Artificial Sequence
  Description of Artificial Sequence: Synthetic oligonucleotide
  Antisense strand to SEQ ID NO: 1435390
uuacuucagaucagcugga

SEQ ID NO: 1435392 - RNA, 19 nt, Artificial Sequence
  Description of Artificial Sequence: Synthetic oligonucleotide
  Sense strand starting at position 3726 of SEQ ID NO: 1243707
uggacaaauccuuggcugu

SEQ ID NO: 1435393 - RNA, 19 nt, Artificial Sequence
  Description of Artificial Sequence: Synthetic oligonucleotide
  Antisense strand to SEQ ID NO: 1435392
acagccaaggauuugucca

SEQ ID NO: 1435394 - RNA, 19 nt, Artificial Sequence
  Description of Artificial Sequence: Synthetic oligonucleotide
  Sense strand starting at position 3727 of SEQ ID NO: 1243707
ggacaaauccuuggcuguc

SEQ ID NO: 1435395 - RNA, 19 nt, Artificial Sequence
  Description of Artificial Sequence: Synthetic oligonucleotide
  Antisense strand to SEQ ID NO: 1435394
gacagccaaggauuugucc

SEQ ID NO: 1435396 - RNA, 19 nt, Artificial Sequence
  Description of Artificial Sequence: Synthetic oligonucleotide
  Sense strand starting at position 3847 of SEQ ID NO: 1243707
uugccuccuuguuugcaaa

SEQ ID NO: 1435397 - RNA, 19 nt, Artificial Sequence
  Description of Artificial Sequence: Synthetic oligonucleotide
  Antisense strand to SEQ ID NO: 1435396
uuugcaaacaaggaggcaa

SEQ ID NO: 1435398 - RNA, 19 nt, Artificial Sequence
  Description of Artificial Sequence: Synthetic oligonucleotide
  Sense strand starting at position 3873 of SEQ ID NO: 1243707
uuacaaguggacugcuuaa

SEQ ID NO: 1435399 - RNA, 19 nt, Artificial Sequence
  Description of Artificial Sequence: Synthetic oligonucleotide
  Antisense strand to SEQ ID NO: 1435398
uuaagcaguccacuuguaa

SEQ ID NO: 1435400 - RNA, 19 nt, Artificial Sequence
  Description of Artificial Sequence: Synthetic oligonucleotide
  Sense strand starting at position 3884 of SEQ ID NO: 1243707
cugcuuaagucacaugagu

SEQ ID NO: 1435401 - RNA, 19 nt, Artificial Sequence
  Description of Artificial Sequence: Synthetic oligonucleotide
  Antisense strand to SEQ ID NO: 1435400
acucaugugacuuaagcag

SEQ ID NO: 1435402 - RNA, 19 nt, Artificial Sequence
  Description of Artificial Sequence: Synthetic oligonucleotide
  Sense strand starting at position 3886 of SEQ ID NO: 1243707
gcuuaagucacaugaguga

SEQ ID NO: 1435403 - RNA, 19 nt, Artificial Sequence
  Description of Artificial Sequence: Synthetic oligonucleotide
  Antisense strand to SEQ ID NO: 1435402
ucacucaugugacuuaagc

SEQ ID NO: 1435404 - RNA, 19 nt, Artificial Sequence
  Description of Artificial Sequence: Synthetic oligonucleotide
  Sense strand starting at position 3963 of SEQ ID NO: 1243707
ucauguucuccagagguug

SEQ ID NO: 1435405 - RNA, 19 nt, Artificial Sequence
  Description of Artificial Sequence: Synthetic oligonucleotide
  Antisense strand to SEQ ID NO: 1435404
caaccucuggagaacauga

SEQ ID NO: 1435406 - RNA, 19 nt, Artificial Sequence
  Description of Artificial Sequence: Synthetic oligonucleotide
  Sense strand starting at position 392 of SEQ ID NO: 1243708
auugaauguuugcucccaa

SEQ ID NO: 1435407 - RNA, 19 nt, Artificial Sequence
  Description of Artificial Sequence: Synthetic oligonucleotide
  Antisense strand to SEQ ID NO: 1435406
uugggagcaaacauucaau

SEQ ID NO: 1435408 - RNA, 19 nt, Artificial Sequence
  Description of Artificial Sequence: Synthetic oligonucleotide
  Sense strand starting at position 393 of SEQ ID NO: 1243708
uugaauguuugcucccaac

SEQ ID NO: 1435409 - RNA, 19 nt, Artificial Sequence
  Description of Artificial Sequence: Synthetic oligonucleotide
  Antisense strand to SEQ ID NO: 1435408
guugggagcaaacauucaa

SEQ ID NO: 1435410 - RNA, 19 nt, Artificial Sequence
  Description of Artificial Sequence: Synthetic oligonucleotide
  Sense strand starting at position 426 of SEQ ID NO: 1243708
aacguuugagaagacguau

SEQ ID NO: 1435411 - RNA, 19 nt, Artificial Sequence
  Description of Artificial Sequence: Synthetic oligonucleotide
  Antisense strand to SEQ ID NO: 1435410
auacgucuucucaaacguu

SEQ ID NO: 1435412 - RNA, 19 nt, Artificial Sequence
  Description of Artificial Sequence: Synthetic oligonucleotide
  Sense strand starting at position 432 of SEQ ID NO: 1243708
ugagaagacguauaugcua

SEQ ID NO: 1435413 - RNA, 19 nt, Artificial Sequence
  Description of Artificial Sequence: Synthetic oligonucleotide
  Antisense strand to SEQ ID NO: 1435412
uagcauauacgucuucuca

SEQ ID NO: 1435414 - RNA, 19 nt, Artificial Sequence
  Description of Artificial Sequence: Synthetic oligonucleotide
  Sense strand starting at position 434 of SEQ ID NO: 1243708
agaagacguauaugcuaau

SEQ ID NO: 1435415 - RNA, 19 nt, Artificial Sequence
  Description of Artificial Sequence: Synthetic oligonucleotide
  Antisense strand to SEQ ID NO: 1435414
auuagcauauacgucuucu

SEQ ID NO: 1435416 - RNA, 19 nt, Artificial Sequence
  Description of Artificial Sequence: Synthetic oligonucleotide
  Sense strand starting at position 435 of SEQ ID NO: 1243708
gaagacguauaugcuaauu

SEQ ID NO: 1435417 - RNA, 19 nt, Artificial Sequence
  Description of Artificial Sequence: Synthetic oligonucleotide
  Antisense strand to SEQ ID NO: 1435416
aauuagcauauacgucuuc

SEQ ID NO: 1435418 - RNA, 19 nt, Artificial Sequence
  Description of Artificial Sequence: Synthetic oligonucleotide
  Sense strand starting at position 458 of SEQ ID NO: 1243708
ugaucuuaucacuauggua

SEQ ID NO: 1435419 - RNA, 19 nt, Artificial Sequence
  Description of Artificial Sequence: Synthetic oligonucleotide
  Antisense strand to SEQ ID NO: 1435418
uaccauagugauaagauca

SEQ ID NO: 1435420 - RNA, 19 nt, Artificial Sequence
  Description of Artificial Sequence: Synthetic oligonucleotide
  Sense strand starting at position 460 of SEQ ID NO: 1243708
aucuuaucacuaugguaug

SEQ ID NO: 1435421 - RNA, 19 nt, Artificial Sequence
  Description of Artificial Sequence: Synthetic oligonucleotide
  Antisense strand to SEQ ID NO: 1435420
cauaccauagugauaagau

SEQ ID NO: 1435422 - RNA, 19 nt, Artificial Sequence
  Description of Artificial Sequence: Synthetic oligonucleotide
  Sense strand starting at position 466 of SEQ ID NO: 1243708
ucacuaugguauguguuua

SEQ ID NO: 1435423 - RNA, 19 nt, Artificial Sequence
  Description of Artificial Sequence: Synthetic oligonucleotide
  Antisense strand to SEQ ID NO: 1435422
uaaacacauaccauaguga

SEQ ID NO: 1435424 - RNA, 19 nt, Artificial Sequence
  Description of Artificial Sequence: Synthetic oligonucleotide
  Sense strand starting at position 471 of SEQ ID NO: 1243708
augguauguguuuaucacu

SEQ ID NO: 1435425 - RNA, 19 nt, Artificial Sequence
  Description of Artificial Sequence: Synthetic oligonucleotide
  Antisense strand to SEQ ID NO: 1435424
agugauaaacacauaccau

SEQ ID NO: 1435426 - RNA, 19 nt, Artificial Sequence
  Description of Artificial Sequence: Synthetic oligonucleotide
  Sense strand starting at position 476 of SEQ ID NO: 1243708
auguguuuaucacuacaug

SEQ ID NO: 1435427 - RNA, 19 nt, Artificial Sequence
  Description of Artificial Sequence: Synthetic oligonucleotide
  Antisense strand to SEQ ID NO: 1435426
cauguagugauaaacacau

SEQ ID NO: 1435428 - RNA, 19 nt, Artificial Sequence
  Description of Artificial Sequence: Synthetic oligonucleotide
  Sense strand starting at position 477 of SEQ ID NO: 1243708
uguguuuaucacuacaugu

SEQ ID NO: 1435429 - RNA, 19 nt, Artificial Sequence
  Description of Artificial Sequence: Synthetic oligonucleotide
  Antisense strand to SEQ ID NO: 1435428
acauguagugauaaacaca

SEQ ID NO: 1435430 - RNA, 19 nt, Artificial Sequence
  Description of Artificial Sequence: Synthetic oligonucleotide
  Sense strand starting at position 479 of SEQ ID NO: 1243708
uguuuaucacuacauguau

SEQ ID NO: 1435431 - RNA, 19 nt, Artificial Sequence
  Description of Artificial Sequence: Synthetic oligonucleotide
  Antisense strand to SEQ ID NO: 1435430
auacauguagugauaaaca

SEQ ID NO: 1435432 - RNA, 19 nt, Artificial Sequence
  Description of Artificial Sequence: Synthetic oligonucleotide
  Sense strand starting at position 622 of SEQ ID NO: 1243708
gcuuuaaauuuauccgcau

SEQ ID NO: 1435433 - RNA, 19 nt, Artificial Sequence
  Description of Artificial Sequence: Synthetic oligonucleotide
  Antisense strand to SEQ ID NO: 1435432
augcggauaaauuuaaagc

SEQ ID NO: 1435434 - RNA, 19 nt, Artificial Sequence
  Description of Artificial Sequence: Synthetic oligonucleotide
  Sense strand starting at position 1154 of SEQ ID NO: 1243708
ucaugcuuacaagauguca

SEQ ID NO: 1435435 - RNA, 19 nt, Artificial Sequence
  Description of Artificial Sequence: Synthetic oligonucleotide
  Antisense strand to SEQ ID NO: 1435434
ugacaucuuguaagcauga

SEQ ID NO: 1435436 - RNA, 19 nt, Artificial Sequence
  Description of Artificial Sequence: Synthetic oligonucleotide
  Sense strand starting at position 1200 of SEQ ID NO: 1243708
ugagaugacuucuuuguca

SEQ ID NO: 1435437 - RNA, 19 nt, Artificial Sequence
  Description of Artificial Sequence: Synthetic oligonucleotide
  Antisense strand to SEQ ID NO: 1435436
ugacaaagaagucaucuca

SEQ ID NO: 1435438 - RNA, 19 nt, Artificial Sequence
  Description of Artificial Sequence: Synthetic oligonucleotide
  Sense strand starting at position 1202 of SEQ ID NO: 1243708
agaugacuucuuugucaau

SEQ ID NO: 1435439 - RNA, 19 nt, Artificial Sequence
  Description of Artificial Sequence: Synthetic oligonucleotide
  Antisense strand to SEQ ID NO: 1435438
auugacaaagaagucaucu

SEQ ID NO: 1435440 - RNA, 19 nt, Artificial Sequence
  Description of Artificial Sequence: Synthetic oligonucleotide
  Sense strand starting at position 1203 of SEQ ID NO: 1243708
gaugacuucuuugucaaug

SEQ ID NO: 1435441 - RNA, 19 nt, Artificial Sequence
  Description of Artificial Sequence: Synthetic oligonucleotide
  Antisense strand to SEQ ID NO: 1435440
cauugacaaagaagucauc

SEQ ID NO: 1435442 - RNA, 19 nt, Artificial Sequence
  Description of Artificial Sequence: Synthetic oligonucleotide
  Sense strand starting at position 1204 of SEQ ID NO: 1243708
augacuucuuugucaaugu

SEQ ID NO: 1435443 - RNA, 19 nt, Artificial Sequence
  Description of Artificial Sequence: Synthetic oligonucleotide
  Antisense strand to SEQ ID NO: 1435442
acauugacaaagaagucau

SEQ ID NO: 1435444 - RNA, 19 nt, Artificial Sequence
  Description of Artificial Sequence: Synthetic oligonucleotide
  Sense strand starting at position 1282 of SEQ ID NO: 1243708
auaccaaauguaugucuga

SEQ ID NO: 1435445 - RNA, 19 nt, Artificial Sequence
  Description of Artificial Sequence: Synthetic oligonucleotide
  Antisense strand to SEQ ID NO: 1435444
ucagacauacauuugguau

SEQ ID NO: 1435446 - RNA, 19 nt, Artificial Sequence
  Description of Artificial Sequence: Synthetic oligonucleotide
  Sense strand starting at position 1359 of SEQ ID NO: 1243708
auuauuauaucacuccgua

SEQ ID NO: 1435447 - RNA, 19 nt, Artificial Sequence
  Description of Artificial Sequence: Synthetic oligonucleotide
  Antisense strand to SEQ ID NO: 1435446
uacggagugauauaauaau

SEQ ID NO: 1435448 - RNA, 19 nt, Artificial Sequence
  Description of Artificial Sequence: Synthetic oligonucleotide
  Sense strand starting at position 1362 of SEQ ID NO: 1243708
auuauaucacuccguagag

SEQ ID NO: 1435449 - RNA, 19 nt, Artificial Sequence
  Description of Artificial Sequence: Synthetic oligonucleotide
  Antisense strand to SEQ ID NO: 1435448
cucuacggagugauauaau

SEQ ID NO: 1435450 - RNA, 19 nt, Artificial Sequence
  Description of Artificial Sequence: Synthetic oligonucleotide
  Sense strand starting at position 1811 of SEQ ID NO: 1243708
accgguuggacuuaagacu

SEQ ID NO: 1435451 - RNA, 19 nt, Artificial Sequence
  Description of Artificial Sequence: Synthetic oligonucleotide
  Antisense strand to SEQ ID NO: 1435450
agucuuaaguccaaccggu

SEQ ID NO: 1435452 - RNA, 19 nt, Artificial Sequence
  Description of Artificial Sequence: Synthetic oligonucleotide
  Sense strand starting at position 2194 of SEQ ID NO: 1243708
cucucucccgcuuaaagaa

SEQ ID NO: 1435453 - RNA, 19 nt, Artificial Sequence
  Description of Artificial Sequence: Synthetic oligonucleotide
  Antisense strand to SEQ ID NO: 1435452
uucuuuaagcgggagagag

SEQ ID NO: 1435454 - RNA, 19 nt, Artificial Sequence
  Description of Artificial Sequence: Synthetic oligonucleotide
  Sense strand starting at position 2437 of SEQ ID NO: 1243708
guggcugaauccuucuaac

SEQ ID NO: 1435455 - RNA, 19 nt, Artificial Sequence
  Description of Artificial Sequence: Synthetic oligonucleotide
  Antisense strand to SEQ ID NO: 1435454
guuagaaggauucagccac

SEQ ID NO: 1435456 - RNA, 19 nt, Artificial Sequence
  Description of Artificial Sequence: Synthetic oligonucleotide
  Sense strand starting at position 2497 of SEQ ID NO: 1243708
aagaaagagucuguugaac

SEQ ID NO: 1435457 - RNA, 19 nt, Artificial Sequence
  Description of Artificial Sequence: Synthetic oligonucleotide
  Antisense strand to SEQ ID NO: 1435456
guucaacagacucuuucuu

SEQ ID NO: 1435458 - RNA, 19 nt, Artificial Sequence
  Description of Artificial Sequence: Synthetic oligonucleotide
  Sense strand starting at position 2578 of SEQ ID NO: 1243708
ccucucacgcaugauuaua

SEQ ID NO: 1435459 - RNA, 19 nt, Artificial Sequence
  Description of Artificial Sequence: Synthetic oligonucleotide
  Antisense strand to SEQ ID NO: 1435458
uauaaucaugcgugagagg

SEQ ID NO: 1435460 - RNA, 19 nt, Artificial Sequence
  Description of Artificial Sequence: Synthetic oligonucleotide
  Sense strand starting at position 2659 of SEQ ID NO: 1243708
ccuggagugcaauagugua

SEQ ID NO: 1435461 - RNA, 19 nt, Artificial Sequence
  Description of Artificial Sequence: Synthetic oligonucleotide
  Antisense strand to SEQ ID NO: 1435460
uacacuauugcacuccagg

SEQ ID NO: 1435462 - RNA, 19 nt, Artificial Sequence
  Description of Artificial Sequence: Synthetic oligonucleotide
  Sense strand starting at position 2673 of SEQ ID NO: 1243708
guguaaucauagcucauag

SEQ ID NO: 1435463 - RNA, 19 nt, Artificial Sequence
  Description of Artificial Sequence: Synthetic oligonucleotide
  Antisense strand to SEQ ID NO: 1435462
cuaugagcuaugauuacac

SEQ ID NO: 1435464 - RNA, 19 nt, Artificial Sequence
  Description of Artificial Sequence: Synthetic oligonucleotide
  Sense strand starting at position 2915 of SEQ ID NO: 1243708
cggcaagaaucuuuaaaua

SEQ ID NO: 1435465 - RNA, 19 nt, Artificial Sequence
  Description of Artificial Sequence: Synthetic oligonucleotide
  Antisense strand to SEQ ID NO: 1435464
uauuuaaagauucuugccg

SEQ ID NO: 1435466 - RNA, 19 nt, Artificial Sequence
  Description of Artificial Sequence: Synthetic oligonucleotide
  Sense strand starting at position 2968 of SEQ ID NO: 1243708
gcggugucucaugugugua

SEQ ID NO: 1435467 - RNA, 19 nt, Artificial Sequence
  Description of Artificial Sequence: Synthetic oligonucleotide
  Antisense strand to SEQ ID NO: 1435466
uacacacaugagacaccgc

SEQ ID NO: 1435468 - RNA, 19 nt, Artificial Sequence
  Description of Artificial Sequence: Synthetic oligonucleotide
  Sense strand starting at position 3353 of SEQ ID NO: 1243708
cagcgugaucuacaacuuu

SEQ ID NO: 1435469 - RNA, 19 nt, Artificial Sequence
  Description of Artificial Sequence: Synthetic oligonucleotide
  Antisense strand to SEQ ID NO: 1435468
aaaguuguagaucacgcug

SEQ ID NO: 1435470 - RNA, 19 nt, Artificial Sequence
  Description of Artificial Sequence: Synthetic oligonucleotide
  Sense strand starting at position 3651 of SEQ ID NO: 1243708
gcacuucucagaugugaag

SEQ ID NO: 1435471 - RNA, 19 nt, Artificial Sequence
  Description of Artificial Sequence: Synthetic oligonucleotide
  Antisense strand to SEQ ID NO: 1435470
cuucacaucugagaagugc

SEQ ID NO: 1435472 - RNA, 19 nt, Artificial Sequence
  Description of Artificial Sequence: Synthetic oligonucleotide
  Sense strand starting at position 3703 of SEQ ID NO: 1243708
agcuuauguggccaguaau

SEQ ID NO: 1435473 - RNA, 19 nt, Artificial Sequence
  Description of Artificial Sequence: Synthetic oligonucleotide
  Antisense strand to SEQ ID NO: 1435472
auuacuggccacauaagcu

SEQ ID NO: 1435474 - RNA, 19 nt, Artificial Sequence
  Description of Artificial Sequence: Synthetic oligonucleotide
  Sense strand starting at position 3791 of SEQ ID NO: 1243708
accagcuguucugugaaag

SEQ ID NO: 1435475 - RNA, 19 nt, Artificial Sequence
  Description of Artificial Sequence: Synthetic oligonucleotide
  Antisense strand to SEQ ID NO: 1435474
cuuucacagaacagcuggu

SEQ ID NO: 1435476 - RNA, 19 nt, Artificial Sequence
  Description of Artificial Sequence: Synthetic oligonucleotide
  Sense strand starting at position 3792 of SEQ ID NO: 1243708
ccagcuguucugugaaagg

SEQ ID NO: 1435477 - RNA, 19 nt, Artificial Sequence
  Description of Artificial Sequence: Synthetic oligonucleotide
  Antisense strand to SEQ ID NO: 1435476
ccuuucacagaacagcugg

SEQ ID NO: 1435478 - RNA, 19 nt, Artificial Sequence
  Description of Artificial Sequence: Synthetic oligonucleotide
  Sense strand starting at position 3801 of SEQ ID NO: 1243708
cugugaaaggguuguauac

SEQ ID NO: 1435479 - RNA, 19 nt, Artificial Sequence
  Description of Artificial Sequence: Synthetic oligonucleotide
  Antisense strand to SEQ ID NO: 1435478
guauacaacccuuucacag

SEQ ID NO: 1435480 - RNA, 19 nt, Artificial Sequence
  Description of Artificial Sequence: Synthetic oligonucleotide
  Sense strand starting at position 3914 of SEQ ID NO: 1243708
uuagaagugugguccugga

SEQ ID NO: 1435481 - RNA, 19 nt, Artificial Sequence
  Description of Artificial Sequence: Synthetic oligonucleotide
  Antisense strand to SEQ ID NO: 1435480
uccaggaccacacuucuaa

SEQ ID NO: 1435482 - RNA, 19 nt, Artificial Sequence
  Description of Artificial Sequence: Synthetic oligonucleotide
  Sense strand starting at position 3942 of SEQ ID NO: 1243708
gcagguagaucucuauacu

SEQ ID NO: 1435483 - RNA, 19 nt, Artificial Sequence
  Description of Artificial Sequence: Synthetic oligonucleotide
  Antisense strand to SEQ ID NO: 1435482
aguauagagaucuaccugc

SEQ ID NO: 1435484 - RNA, 19 nt, Artificial Sequence
  Description of Artificial Sequence: Synthetic oligonucleotide
  Sense strand starting at position 3978 of SEQ ID NO: 1243708
agcauauaucuugggcaaa

SEQ ID NO: 1435485 - RNA, 19 nt, Artificial Sequence
  Description of Artificial Sequence: Synthetic oligonucleotide
  Antisense strand to SEQ ID NO: 1435484
uuugcccaagauauaugcu

SEQ ID NO: 1435486 - RNA, 19 nt, Artificial Sequence
  Description of Artificial Sequence: Synthetic oligonucleotide
  Sense strand starting at position 83 of SEQ ID NO: 1243709
auugaauguuugcucccaa

SEQ ID NO: 1435487 - RNA, 19 nt, Artificial Sequence
  Description of Artificial Sequence: Synthetic oligonucleotide
  Antisense strand to SEQ ID NO: 1435486
uugggagcaaacauucaau

SEQ ID NO: 1435488 - RNA, 19 nt, Artificial Sequence
  Description of Artificial Sequence: Synthetic oligonucleotide
  Sense strand starting at position 84 of SEQ ID NO: 1243709
uugaauguuugcucccaac

SEQ ID NO: 1435489 - RNA, 19 nt, Artificial Sequence
  Description of Artificial Sequence: Synthetic oligonucleotide
  Antisense strand to SEQ ID NO: 1435488
guugggagcaaacauucaa

SEQ ID NO: 1435490 - RNA, 19 nt, Artificial Sequence
  Description of Artificial Sequence: Synthetic oligonucleotide
  Sense strand starting at position 117 of SEQ ID NO: 1243709
aacguuugagaagacguau

SEQ ID NO: 1435491 - RNA, 19 nt, Artificial Sequence
  Description of Artificial Sequence: Synthetic oligonucleotide
  Antisense strand to SEQ ID NO: 1435490
auacgucuucucaaacguu

SEQ ID NO: 1435492 - RNA, 19 nt, Artificial Sequence
  Description of Artificial Sequence: Synthetic oligonucleotide
  Sense strand starting at position 123 of SEQ ID NO: 1243709
ugagaagacguauaugcua

SEQ ID NO: 1435493 - RNA, 19 nt, Artificial Sequence
  Description of Artificial Sequence: Synthetic oligonucleotide
  Antisense strand to SEQ ID NO: 1435492
uagcauauacgucuucuca

SEQ ID NO: 1435494 - RNA, 19 nt, Artificial Sequence
  Description of Artificial Sequence: Synthetic oligonucleotide
  Sense strand starting at position 125 of SEQ ID NO: 1243709
agaagacguauaugcuaau

SEQ ID NO: 1435495 - RNA, 19 nt, Artificial Sequence
  Description of Artificial Sequence: Synthetic oligonucleotide
  Antisense strand to SEQ ID NO: 1435494
auuagcauauacgucuucu

SEQ ID NO: 1435496 - RNA, 19 nt, Artificial Sequence
  Description of Artificial Sequence: Synthetic oligonucleotide
  Sense strand starting at position 126 of SEQ ID NO: 1243709
gaagacguauaugcuaauu

SEQ ID NO: 1435497 - RNA, 19 nt, Artificial Sequence
  Description of Artificial Sequence: Synthetic oligonucleotide
  Antisense strand to SEQ ID NO: 1435496
aauuagcauauacgucuuc

SEQ ID NO: 1435498 - RNA, 19 nt, Artificial Sequence
  Description of Artificial Sequence: Synthetic oligonucleotide
  Sense strand starting at position 149 of SEQ ID NO: 1243709
ugaucuuaucacuauggua

SEQ ID NO: 1435499 - RNA, 19 nt, Artificial Sequence
  Description of Artificial Sequence: Synthetic oligonucleotide
  Antisense strand to SEQ ID NO: 1435498
uaccauagugauaagauca

SEQ ID NO: 1435500 - RNA, 19 nt, Artificial Sequence
  Description of Artificial Sequence: Synthetic oligonucleotide
  Sense strand starting at position 151 of SEQ ID NO: 1243709
aucuuaucacuaugguaug

SEQ ID NO: 1435501 - RNA, 19 nt, Artificial Sequence
  Description of Artificial Sequence: Synthetic oligonucleotide
  Antisense strand to SEQ ID NO: 1435500
cauaccauagugauaagau

SEQ ID NO: 1435502 - RNA, 19 nt, Artificial Sequence
  Description of Artificial Sequence: Synthetic oligonucleotide
  Sense strand starting at position 162 of SEQ ID NO: 1243709
augguauguguuuaucacu

SEQ ID NO: 1435503 - RNA, 19 nt, Artificial Sequence
  Description of Artificial Sequence: Synthetic oligonucleotide
  Antisense strand to SEQ ID NO: 1435502
agugauaaacacauaccau

SEQ ID NO: 1435504 - RNA, 19 nt, Artificial Sequence
  Description of Artificial Sequence: Synthetic oligonucleotide
  Sense strand starting at position 167 of SEQ ID NO: 1243709
auguguuuaucacuacaug

SEQ ID NO: 1435505 - RNA, 19 nt, Artificial Sequence
  Description of Artificial Sequence: Synthetic oligonucleotide
  Antisense strand to SEQ ID NO: 1435504
cauguagugauaaacacau

SEQ ID NO: 1435506 - RNA, 19 nt, Artificial Sequence
  Description of Artificial Sequence: Synthetic oligonucleotide
  Sense strand starting at position 168 of SEQ ID NO: 1243709
uguguuuaucacuacaugu

SEQ ID NO: 1435507 - RNA, 19 nt, Artificial Sequence
  Description of Artificial Sequence: Synthetic oligonucleotide
  Antisense strand to SEQ ID NO: 1435506
acauguagugauaaacaca

SEQ ID NO: 1435508 - RNA, 19 nt, Artificial Sequence
  Description of Artificial Sequence: Synthetic oligonucleotide
  Sense strand starting at position 170 of SEQ ID NO: 1243709
uguuuaucacuacauguau

SEQ ID NO: 1435509 - RNA, 19 nt, Artificial Sequence
  Description of Artificial Sequence: Synthetic oligonucleotide
  Antisense strand to SEQ ID NO: 1435508
auacauguagugauaaaca

SEQ ID NO: 1435510 - RNA, 19 nt, Artificial Sequence
  Description of Artificial Sequence: Synthetic oligonucleotide
  Sense strand starting at position 313 of SEQ ID NO: 1243709
gcuuuaaauuuauccgcau

SEQ ID NO: 1435511 - RNA, 19 nt, Artificial Sequence
  Description of Artificial Sequence: Synthetic oligonucleotide
  Antisense strand to SEQ ID NO: 1435510
augcggauaaauuuaaagc

SEQ ID NO: 1435512 - RNA, 19 nt, Artificial Sequence
  Description of Artificial Sequence: Synthetic oligonucleotide
  Sense strand starting at position 845 of SEQ ID NO: 1243709
ucaugcuuacaagauguca

SEQ ID NO: 1435513 - RNA, 19 nt, Artificial Sequence
  Description of Artificial Sequence: Synthetic oligonucleotide
  Antisense strand to SEQ ID NO: 1435512
ugacaucuuguaagcauga

SEQ ID NO: 1435514 - RNA, 19 nt, Artificial Sequence
  Description of Artificial Sequence: Synthetic oligonucleotide
  Sense strand starting at position 891 of SEQ ID NO: 1243709
ugagaugacuucuuuguca

SEQ ID NO: 1435515 - RNA, 19 nt, Artificial Sequence
  Description of Artificial Sequence: Synthetic oligonucleotide
  Antisense strand to SEQ ID NO: 1435514
ugacaaagaagucaucuca

SEQ ID NO: 1435516 - RNA, 19 nt, Artificial Sequence
  Description of Artificial Sequence: Synthetic oligonucleotide
  Sense strand starting at position 893 of SEQ ID NO: 1243709
agaugacuucuuugucaau

SEQ ID NO: 1435517 - RNA, 19 nt, Artificial Sequence
  Description of Artificial Sequence: Synthetic oligonucleotide
  Antisense strand to SEQ ID NO: 1435516
auugacaaagaagucaucu

SEQ ID NO: 1435518 - RNA, 19 nt, Artificial Sequence
  Description of Artificial Sequence: Synthetic oligonucleotide
  Sense strand starting at position 894 of SEQ ID NO: 1243709
gaugacuucuuugucaaug

SEQ ID NO: 1435519 - RNA, 19 nt, Artificial Sequence
  Description of Artificial Sequence: Synthetic oligonucleotide
  Antisense strand to SEQ ID NO: 1435518
cauugacaaagaagucauc

SEQ ID NO: 1435520 - RNA, 19 nt, Artificial Sequence
  Description of Artificial Sequence: Synthetic oligonucleotide
  Sense strand starting at position 895 of SEQ ID NO: 1243709
augacuucuuugucaaugu

SEQ ID NO: 1435521 - RNA, 19 nt, Artificial Sequence
  Description of Artificial Sequence: Synthetic oligonucleotide
  Antisense strand to SEQ ID NO: 1435520
acauugacaaagaagucau

SEQ ID NO: 1435522 - RNA, 19 nt, Artificial Sequence
  Description of Artificial Sequence: Synthetic oligonucleotide
  Sense strand starting at position 973 of SEQ ID NO: 1243709
auaccaaauguaugucuga

SEQ ID NO: 1435523 - RNA, 19 nt, Artificial Sequence
  Description of Artificial Sequence: Synthetic oligonucleotide
  Antisense strand to SEQ ID NO: 1435522
ucagacauacauuugguau

SEQ ID NO: 1435524 - RNA, 19 nt, Artificial Sequence
  Description of Artificial Sequence: Synthetic oligonucleotide
  Sense strand starting at position 1050 of SEQ ID NO: 1243709
auuauuauaucacuccgua

SEQ ID NO: 1435525 - RNA, 19 nt, Artificial Sequence
  Description of Artificial Sequence: Synthetic oligonucleotide
  Antisense strand to SEQ ID NO: 1435524
uacggagugauauaauaau

SEQ ID NO: 1435526 - RNA, 19 nt, Artificial Sequence
  Description of Artificial Sequence: Synthetic oligonucleotide
  Sense strand starting at position 1053 of SEQ ID NO: 1243709
auuauaucacuccguagag

SEQ ID NO: 1435527 - RNA, 19 nt, Artificial Sequence
  Description of Artificial Sequence: Synthetic oligonucleotide
  Antisense strand to SEQ ID NO: 1435526
cucuacggagugauauaau

SEQ ID NO: 1435528 - RNA, 19 nt, Artificial Sequence
  Description of Artificial Sequence: Synthetic oligonucleotide
  Sense strand starting at position 1502 of SEQ ID NO: 1243709
accgguuggacuuaagacu

SEQ ID NO: 1435529 - RNA, 19 nt, Artificial Sequence
  Description of Artificial Sequence: Synthetic oligonucleotide
  Antisense strand to SEQ ID NO: 1435528
agucuuaaguccaaccggu

SEQ ID NO: 1435530 - RNA, 19 nt, Artificial Sequence
  Description of Artificial Sequence: Synthetic oligonucleotide
  Sense strand starting at position 1885 of SEQ ID NO: 1243709
cucucucccgcuuaaagaa

SEQ ID NO: 1435531 - RNA, 19 nt, Artificial Sequence
  Description of Artificial Sequence: Synthetic oligonucleotide
  Antisense strand to SEQ ID NO: 1435530
uucuuuaagcgggagagag

SEQ ID NO: 1435532 - RNA, 19 nt, Artificial Sequence
  Description of Artificial Sequence: Synthetic oligonucleotide
  Sense strand starting at position 2128 of SEQ ID NO: 1243709
guggcugaauccuucuaac

SEQ ID NO: 1435533 - RNA, 19 nt, Artificial Sequence
  Description of Artificial Sequence: Synthetic oligonucleotide
  Antisense strand to SEQ ID NO: 1435532
guuagaaggauucagccac

SEQ ID NO: 1435534 - RNA, 19 nt, Artificial Sequence
  Description of Artificial Sequence: Synthetic oligonucleotide
  Sense strand starting at position 2188 of SEQ ID NO: 1243709
aagaaagagucuguugaac

SEQ ID NO: 1435535 - RNA, 19 nt, Artificial Sequence
  Description of Artificial Sequence: Synthetic oligonucleotide
  Antisense strand to SEQ ID NO: 1435534
guucaacagacucuuucuu

SEQ ID NO: 1435536 - RNA, 19 nt, Artificial Sequence
  Description of Artificial Sequence: Synthetic oligonucleotide
  Sense strand starting at position 2269 of SEQ ID NO: 1243709
ccucucacgcaugauuaua

SEQ ID NO: 1435537 - RNA, 19 nt, Artificial Sequence
  Description of Artificial Sequence: Synthetic oligonucleotide
  Antisense strand to SEQ ID NO: 1435536
uauaaucaugcgugagagg

SEQ ID NO: 1435538 - RNA, 19 nt, Artificial Sequence
  Description of Artificial Sequence: Synthetic oligonucleotide
  Sense strand starting at position 2350 of SEQ ID NO: 1243709
ccuggagugcaauagugua

SEQ ID NO: 1435539 - RNA, 19 nt, Artificial Sequence
  Description of Artificial Sequence: Synthetic oligonucleotide
  Antisense strand to SEQ ID NO: 1435538
uacacuauugcacuccagg

SEQ ID NO: 1435540 - RNA, 19 nt, Artificial Sequence
  Description of Artificial Sequence: Synthetic oligonucleotide
  Sense strand starting at position 2364 of SEQ ID NO: 1243709
guguaaucauagcucauag

SEQ ID NO: 1435541 - RNA, 19 nt, Artificial Sequence
  Description of Artificial Sequence: Synthetic oligonucleotide
  Antisense strand to SEQ ID NO: 1435540
cuaugagcuaugauuacac

SEQ ID NO: 1435542 - RNA, 19 nt, Artificial Sequence
  Description of Artificial Sequence: Synthetic oligonucleotide
  Sense strand starting at position 2606 of SEQ ID NO: 1243709
cggcaagaaucuuuaaaua

SEQ ID NO: 1435543 - RNA, 19 nt, Artificial Sequence
  Description of Artificial Sequence: Synthetic oligonucleotide
  Antisense strand to SEQ ID NO: 1435542
uauuuaaagauucuugccg

SEQ ID NO: 1435544 - RNA, 19 nt, Artificial Sequence
  Description of Artificial Sequence: Synthetic oligonucleotide
  Sense strand starting at position 2659 of SEQ ID NO: 1243709
gcggugucucaugugugua

SEQ ID NO: 1435545 - RNA, 19 nt, Artificial Sequence
  Description of Artificial Sequence: Synthetic oligonucleotide
  Antisense strand to SEQ ID NO: 1435544
uacacacaugagacaccgc

SEQ ID NO: 1435546 - RNA, 19 nt, Artificial Sequence
  Description of Artificial Sequence: Synthetic oligonucleotide
  Sense strand starting at position 3044 of SEQ ID NO: 1243709
cagcgugaucuacaacuuu

SEQ ID NO: 1435547 - RNA, 19 nt, Artificial Sequence
  Description of Artificial Sequence: Synthetic oligonucleotide
  Antisense strand to SEQ ID NO: 1435546
aaaguuguagaucacgcug

SEQ ID NO: 1435548 - RNA, 19 nt, Artificial Sequence
  Description of Artificial Sequence: Synthetic oligonucleotide
  Sense strand starting at position 3342 of SEQ ID NO: 1243709
gcacuucucagaugugaag

SEQ ID NO: 1435549 - RNA, 19 nt, Artificial Sequence
  Description of Artificial Sequence: Synthetic oligonucleotide
  Antisense strand to SEQ ID NO: 1435548
cuucacaucugagaagugc

SEQ ID NO: 1435550 - RNA, 19 nt, Artificial Sequence
  Description of Artificial Sequence: Synthetic oligonucleotide
  Sense strand starting at position 3394 of SEQ ID NO: 1243709
agcuuauguggccaguaau

SEQ ID NO: 1435551 - RNA, 19 nt, Artificial Sequence
  Description of Artificial Sequence: Synthetic oligonucleotide
  Antisense strand to SEQ ID NO: 1435550
auuacuggccacauaagcu

SEQ ID NO: 1435552 - RNA, 19 nt, Artificial Sequence
  Description of Artificial Sequence: Synthetic oligonucleotide
  Sense strand starting at position 3482 of SEQ ID NO: 1243709
accagcuguucugugaaag

SEQ ID NO: 1435553 - RNA, 19 nt, Artificial Sequence
  Description of Artificial Sequence: Synthetic oligonucleotide
  Antisense strand to SEQ ID NO: 1435552
cuuucacagaacagcuggu

SEQ ID NO: 1435554 - RNA, 19 nt, Artificial Sequence
  Description of Artificial Sequence: Synthetic oligonucleotide
  Sense strand starting at position 3483 of SEQ ID NO: 1243709
ccagcuguucugugaaagg

SEQ ID NO: 1435555 - RNA, 19 nt, Artificial Sequence
  Description of Artificial Sequence: Synthetic oligonucleotide
  Antisense strand to SEQ ID NO: 1435554
ccuuucacagaacagcugg

SEQ ID NO: 1435556 - RNA, 19 nt, Artificial Sequence
  Description of Artificial Sequence: Synthetic oligonucleotide
  Sense strand starting at position 3492 of SEQ ID NO: 1243709
cugugaaaggguuguauac

SEQ ID NO: 1435557 - RNA, 19 nt, Artificial Sequence
  Description of Artificial Sequence: Synthetic oligonucleotide
  Antisense strand to SEQ ID NO: 1435556
guauacaacccuuucacag

SEQ ID NO: 1435558 - RNA, 19 nt, Artificial Sequence
  Description of Artificial Sequence: Synthetic oligonucleotide
  Sense strand starting at position 3605 of SEQ ID NO: 1243709
uuagaagugugguccugga

SEQ ID NO: 1435559 - RNA, 19 nt, Artificial Sequence
  Description of Artificial Sequence: Synthetic oligonucleotide
  Antisense strand to SEQ ID NO: 1435558
uccaggaccacacuucuaa

SEQ ID NO: 1435560 - RNA, 19 nt, Artificial Sequence
  Description of Artificial Sequence: Synthetic oligonucleotide
  Sense strand starting at position 3633 of SEQ ID NO: 1243709
gcagguagaucucuauacu

SEQ ID NO: 1435561 - RNA, 19 nt, Artificial Sequence
  Description of Artificial Sequence: Synthetic oligonucleotide
  Antisense strand to SEQ ID NO: 1435560
aguauagagaucuaccugc

SEQ ID NO: 1435562 - RNA, 19 nt, Artificial Sequence
  Description of Artificial Sequence: Synthetic oligonucleotide
  Sense strand starting at position 3669 of SEQ ID NO: 1243709
agcauauaucuugggcaaa

SEQ ID NO: 1435563 - RNA, 19 nt, Artificial Sequence
  Description of Artificial Sequence: Synthetic oligonucleotide
  Antisense strand to SEQ ID NO: 1435562
uuugcccaagauauaugcu

SEQ ID NO: 1435564 - RNA, 19 nt, Artificial Sequence
  Description of Artificial Sequence: Synthetic oligonucleotide
  Sense strand starting at position 3737 of SEQ ID NO: 1243709
ugguuucugcaacaauaag

SEQ ID NO: 1435565 - RNA, 19 nt, Artificial Sequence
  Description of Artificial Sequence: Synthetic oligonucleotide
  Antisense strand to SEQ ID NO: 1435564
cuuauuguugcagaaacca

SEQ ID NO: 1435566 - RNA, 19 nt, Artificial Sequence
  Description of Artificial Sequence: Synthetic oligonucleotide
  Sense strand starting at position 33 of SEQ ID NO: 1243710
uguaacauuguaggaugaa

SEQ ID NO: 1435567 - RNA, 19 nt, Artificial Sequence
  Description of Artificial Sequence: Synthetic oligonucleotide
  Antisense strand to SEQ ID NO: 1435566
uucauccuacaauguuaca

SEQ ID NO: 1435568 - RNA, 19 nt, Artificial Sequence
  Description of Artificial Sequence: Synthetic oligonucleotide
  Sense strand starting at position 590 of SEQ ID NO: 1243710
auugaauguuugcucccaa

SEQ ID NO: 1435569 - RNA, 19 nt, Artificial Sequence
  Description of Artificial Sequence: Synthetic oligonucleotide
  Antisense strand to SEQ ID NO: 1435568
uugggagcaaacauucaau

SEQ ID NO: 1435570 - RNA, 19 nt, Artificial Sequence
  Description of Artificial Sequence: Synthetic oligonucleotide
  Sense strand starting at position 591 of SEQ ID NO: 1243710
uugaauguuugcucccaac

SEQ ID NO: 1435571 - RNA, 19 nt, Artificial Sequence
  Description of Artificial Sequence: Synthetic oligonucleotide
  Antisense strand to SEQ ID NO: 1435570
guugggagcaaacauucaa

SEQ ID NO: 1435572 - RNA, 19 nt, Artificial Sequence
  Description of Artificial Sequence: Synthetic oligonucleotide
  Sense strand starting at position 624 of SEQ ID NO: 1243710
aacguuugagaagacguau

SEQ ID NO: 1435573 - RNA, 19 nt, Artificial Sequence
  Description of Artificial Sequence: Synthetic oligonucleotide
  Antisense strand to SEQ ID NO: 1435572
auacgucuucucaaacguu

SEQ ID NO: 1435574 - RNA, 19 nt, Artificial Sequence
  Description of Artificial Sequence: Synthetic oligonucleotide
  Sense strand starting at position 630 of SEQ ID NO: 1243710
ugagaagacguauaugcua

SEQ ID NO: 1435575 - RNA, 19 nt, Artificial Sequence
  Description of Artificial Sequence: Synthetic oligonucleotide
  Antisense strand to SEQ ID NO: 1435574
uagcauauacgucuucuca

SEQ ID NO: 1435576 - RNA, 19 nt, Artificial Sequence
  Description of Artificial Sequence: Synthetic oligonucleotide
  Sense strand starting at position 632 of SEQ ID NO: 1243710
agaagacguauaugcuaau

SEQ ID NO: 1435577 - RNA, 19 nt, Artificial Sequence
  Description of Artificial Sequence: Synthetic oligonucleotide
  Antisense strand to SEQ ID NO: 1435576
auuagcauauacgucuucu

SEQ ID NO: 1435578 - RNA, 19 nt, Artificial Sequence
  Description of Artificial Sequence: Synthetic oligonucleotide
  Sense strand starting at position 633 of SEQ ID NO: 1243710
gaagacguauaugcuaauu

SEQ ID NO: 1435579 - RNA, 19 nt, Artificial Sequence
  Description of Artificial Sequence: Synthetic oligonucleotide
  Antisense strand to SEQ ID NO: 1435578
aauuagcauauacgucuuc

SEQ ID NO: 1435580 - RNA, 19 nt, Artificial Sequence
  Description of Artificial Sequence: Synthetic oligonucleotide
  Sense strand starting at position 656 of SEQ ID NO: 1243710
ugaucuuaucacuauggua

SEQ ID NO: 1435581 - RNA, 19 nt, Artificial Sequence
  Description of Artificial Sequence: Synthetic oligonucleotide
  Antisense strand to SEQ ID NO: 1435580
uaccauagugauaagauca

SEQ ID NO: 1435582 - RNA, 19 nt, Artificial Sequence
  Description of Artificial Sequence: Synthetic oligonucleotide
  Sense strand starting at position 658 of SEQ ID NO: 1243710
aucuuaucacuaugguaug

SEQ ID NO: 1435583 - RNA, 19 nt, Artificial Sequence
  Description of Artificial Sequence: Synthetic oligonucleotide
  Antisense strand to SEQ ID NO: 1435582
cauaccauagugauaagau

SEQ ID NO: 1435584 - RNA, 19 nt, Artificial Sequence
  Description of Artificial Sequence: Synthetic oligonucleotide
  Sense strand starting at position 664 of SEQ ID NO: 1243710
ucacuaugguauguguuua

SEQ ID NO: 1435585 - RNA, 19 nt, Artificial Sequence
  Description of Artificial Sequence: Synthetic oligonucleotide
  Antisense strand to SEQ ID NO: 1435584
uaaacacauaccauaguga

SEQ ID NO: 1435586 - RNA, 19 nt, Artificial Sequence
  Description of Artificial Sequence: Synthetic oligonucleotide
  Sense strand starting at position 668 of SEQ ID NO: 1243710
uaugguauguguuuaucac

SEQ ID NO: 1435587 - RNA, 19 nt, Artificial Sequence
  Description of Artificial Sequence: Synthetic oligonucleotide
  Antisense strand to SEQ ID NO: 1435586
gugauaaacacauaccaua

SEQ ID NO: 1435588 - RNA, 19 nt, Artificial Sequence
  Description of Artificial Sequence: Synthetic oligonucleotide
  Sense strand starting at position 669 of SEQ ID NO: 1243710
augguauguguuuaucacu

SEQ ID NO: 1435589 - RNA, 19 nt, Artificial Sequence
  Description of Artificial Sequence: Synthetic oligonucleotide
  Antisense strand to SEQ ID NO: 1435588
agugauaaacacauaccau

SEQ ID NO: 1435590 - RNA, 19 nt, Artificial Sequence
  Description of Artificial Sequence: Synthetic oligonucleotide
  Sense strand starting at position 674 of SEQ ID NO: 1243710
auguguuuaucacuacaug

SEQ ID NO: 1435591 - RNA, 19 nt, Artificial Sequence
  Description of Artificial Sequence: Synthetic oligonucleotide
  Antisense strand to SEQ ID NO: 1435590
cauguagugauaaacacau

SEQ ID NO: 1435592 - RNA, 19 nt, Artificial Sequence
  Description of Artificial Sequence: Synthetic oligonucleotide
  Sense strand starting at position 675 of SEQ ID NO: 1243710
uguguuuaucacuacaugu

SEQ ID NO: 1435593 - RNA, 19 nt, Artificial Sequence
  Description of Artificial Sequence: Synthetic oligonucleotide
  Antisense strand to SEQ ID NO: 1435592
acauguagugauaaacaca

SEQ ID NO: 1435594 - RNA, 19 nt, Artificial Sequence
  Description of Artificial Sequence: Synthetic oligonucleotide
  Sense strand starting at position 677 of SEQ ID NO: 1243710
uguuuaucacuacauguau

SEQ ID NO: 1435595 - RNA, 19 nt, Artificial Sequence
  Description of Artificial Sequence: Synthetic oligonucleotide
  Antisense strand to SEQ ID NO: 1435594
auacauguagugauaaaca

SEQ ID NO: 1435596 - RNA, 19 nt, Artificial Sequence
  Description of Artificial Sequence: Synthetic oligonucleotide
  Sense strand starting at position 820 of SEQ ID NO: 1243710
gcuuuaaauuuauccgcau

SEQ ID NO: 1435597 - RNA, 19 nt, Artificial Sequence
  Description of Artificial Sequence: Synthetic oligonucleotide
  Antisense strand to SEQ ID NO: 1435596
augcggauaaauuuaaagc

SEQ ID NO: 1435598 - RNA, 19 nt, Artificial Sequence
  Description of Artificial Sequence: Synthetic oligonucleotide
  Sense strand starting at position 1352 of SEQ ID NO: 1243710
ucaugcuuacaagauguca

SEQ ID NO: 1435599 - RNA, 19 nt, Artificial Sequence
  Description of Artificial Sequence: Synthetic oligonucleotide
  Antisense strand to SEQ ID NO: 1435598
ugacaucuuguaagcauga

SEQ ID NO: 1435600 - RNA, 19 nt, Artificial Sequence
  Description of Artificial Sequence: Synthetic oligonucleotide
  Sense strand starting at position 1398 of SEQ ID NO: 1243710
ugagaugacuucuuuguca

SEQ ID NO: 1435601 - RNA, 19 nt, Artificial Sequence
  Description of Artificial Sequence: Synthetic oligonucleotide
  Antisense strand to SEQ ID NO: 1435600
ugacaaagaagucaucuca

SEQ ID NO: 1435602 - RNA, 19 nt, Artificial Sequence
  Description of Artificial Sequence: Synthetic oligonucleotide
  Sense strand starting at position 1400 of SEQ ID NO: 1243710
agaugacuucuuugucaau

SEQ ID NO: 1435603 - RNA, 19 nt, Artificial Sequence
  Description of Artificial Sequence: Synthetic oligonucleotide
  Antisense strand to SEQ ID NO: 1435602
auugacaaagaagucaucu

SEQ ID NO: 1435604 - RNA, 19 nt, Artificial Sequence
  Description of Artificial Sequence: Synthetic oligonucleotide
  Sense strand starting at position 1401 of SEQ ID NO: 1243710
gaugacuucuuugucaaug

SEQ ID NO: 1435605 - RNA, 19 nt, Artificial Sequence
  Description of Artificial Sequence: Synthetic oligonucleotide
  Antisense strand to SEQ ID NO: 1435604
cauugacaaagaagucauc

SEQ ID NO: 1435606 - RNA, 19 nt, Artificial Sequence
  Description of Artificial Sequence: Synthetic oligonucleotide
  Sense strand starting at position 1402 of SEQ ID NO: 1243710
augacuucuuugucaaugu

SEQ ID NO: 1435607 - RNA, 19 nt, Artificial Sequence
  Description of Artificial Sequence: Synthetic oligonucleotide
  Antisense strand to SEQ ID NO: 1435606
acauugacaaagaagucau

SEQ ID NO: 1435608 - RNA, 19 nt, Artificial Sequence
  Description of Artificial Sequence: Synthetic oligonucleotide
  Sense strand starting at position 1406 of SEQ ID NO: 1243710
cuucuuugucaauguuuag

SEQ ID NO: 1435609 - RNA, 19 nt, Artificial Sequence
  Description of Artificial Sequence: Synthetic oligonucleotide
  Antisense strand to SEQ ID NO: 1435608
cuaaacauugacaaagaag

SEQ ID NO: 1435610 - RNA, 19 nt, Artificial Sequence
  Description of Artificial Sequence: Synthetic oligonucleotide
  Sense strand starting at position 1410 of SEQ ID NO: 1243710
uuugucaauguuuagcgau

SEQ ID NO: 1435611 - RNA, 19 nt, Artificial Sequence
  Description of Artificial Sequence: Synthetic oligonucleotide
  Antisense strand to SEQ ID NO: 1435610
aucgcuaaacauugacaaa

SEQ ID NO: 1435612 - RNA, 19 nt, Artificial Sequence
  Description of Artificial Sequence: Synthetic oligonucleotide
  Sense strand starting at position 1480 of SEQ ID NO: 1243710
auaccaaauguaugucuga

SEQ ID NO: 1435613 - RNA, 19 nt, Artificial Sequence
  Description of Artificial Sequence: Synthetic oligonucleotide
  Antisense strand to SEQ ID NO: 1435612
ucagacauacauuugguau

SEQ ID NO: 1435614 - RNA, 19 nt, Artificial Sequence
  Description of Artificial Sequence: Synthetic oligonucleotide
  Sense strand starting at position 1557 of SEQ ID NO: 1243710
auuauuauaucacuccgua

SEQ ID NO: 1435615 - RNA, 19 nt, Artificial Sequence
  Description of Artificial Sequence: Synthetic oligonucleotide
  Antisense strand to SEQ ID NO: 1435614
uacggagugauauaauaau

SEQ ID NO: 1435616 - RNA, 19 nt, Artificial Sequence
  Description of Artificial Sequence: Synthetic oligonucleotide
  Sense strand starting at position 1560 of SEQ ID NO: 1243710
auuauaucacuccguagag

SEQ ID NO: 1435617 - RNA, 19 nt, Artificial Sequence
  Description of Artificial Sequence: Synthetic oligonucleotide
  Antisense strand to SEQ ID NO: 1435616
cucuacggagugauauaau

SEQ ID NO: 1435618 - RNA, 19 nt, Artificial Sequence
  Description of Artificial Sequence: Synthetic oligonucleotide
  Sense strand starting at position 2009 of SEQ ID NO: 1243710
accgguuggacuuaagacu

SEQ ID NO: 1435619 - RNA, 19 nt, Artificial Sequence
  Description of Artificial Sequence: Synthetic oligonucleotide
  Antisense strand to SEQ ID NO: 1435618
agucuuaaguccaaccggu

SEQ ID NO: 1435620 - RNA, 19 nt, Artificial Sequence
  Description of Artificial Sequence: Synthetic oligonucleotide
  Sense strand starting at position 2392 of SEQ ID NO: 1243710
cucucucccgcuuaaagaa

SEQ ID NO: 1435621 - RNA, 19 nt, Artificial Sequence
  Description of Artificial Sequence: Synthetic oligonucleotide
  Antisense strand to SEQ ID NO: 1435620
uucuuuaagcgggagagag

SEQ ID NO: 1435622 - RNA, 19 nt, Artificial Sequence
  Description of Artificial Sequence: Synthetic oligonucleotide
  Sense strand starting at position 2635 of SEQ ID NO: 1243710
guggcugaauccuucuaac

SEQ ID NO: 1435623 - RNA, 19 nt, Artificial Sequence
  Description of Artificial Sequence: Synthetic oligonucleotide
  Antisense strand to SEQ ID NO: 1435622
guuagaaggauucagccac

SEQ ID NO: 1435624 - RNA, 19 nt, Artificial Sequence
  Description of Artificial Sequence: Synthetic oligonucleotide
  Sense strand starting at position 2695 of SEQ ID NO: 1243710
aagaaagagucuguugaac

SEQ ID NO: 1435625 - RNA, 19 nt, Artificial Sequence
  Description of Artificial Sequence: Synthetic oligonucleotide
  Antisense strand to SEQ ID NO: 1435624
guucaacagacucuuucuu

SEQ ID NO: 1435626 - RNA, 19 nt, Artificial Sequence
  Description of Artificial Sequence: Synthetic oligonucleotide
  Sense strand starting at position 2776 of SEQ ID NO: 1243710
ccucucacgcaugauuaua

SEQ ID NO: 1435627 - RNA, 19 nt, Artificial Sequence
  Description of Artificial Sequence: Synthetic oligonucleotide
  Antisense strand to SEQ ID NO: 1435626
uauaaucaugcgugagagg

SEQ ID NO: 1435628 - RNA, 19 nt, Artificial Sequence
  Description of Artificial Sequence: Synthetic oligonucleotide
  Sense strand starting at position 2857 of SEQ ID NO: 1243710
ccuggagugcaauagugua

SEQ ID NO: 1435629 - RNA, 19 nt, Artificial Sequence
  Description of Artificial Sequence: Synthetic oligonucleotide
  Antisense strand to SEQ ID NO: 1435628
uacacuauugcacuccagg

SEQ ID NO: 1435630 - RNA, 19 nt, Artificial Sequence
  Description of Artificial Sequence: Synthetic oligonucleotide
  Sense strand starting at position 2871 of SEQ ID NO: 1243710
guguaaucauagcucauag

SEQ ID NO: 1435631 - RNA, 19 nt, Artificial Sequence
  Description of Artificial Sequence: Synthetic oligonucleotide
  Antisense strand to SEQ ID NO: 1435630
cuaugagcuaugauuacac

SEQ ID NO: 1435632 - RNA, 19 nt, Artificial Sequence
  Description of Artificial Sequence: Synthetic oligonucleotide
  Sense strand starting at position 3113 of SEQ ID NO: 1243710
cggcaagaaucuuuaaaua

SEQ ID NO: 1435633 - RNA, 19 nt, Artificial Sequence
  Description of Artificial Sequence: Synthetic oligonucleotide
  Antisense strand to SEQ ID NO: 1435632
uauuuaaagauucuugccg

SEQ ID NO: 1435634 - RNA, 19 nt, Artificial Sequence
  Description of Artificial Sequence: Synthetic oligonucleotide
  Sense strand starting at position 3166 of SEQ ID NO: 1243710
gcggugucucaugugugua

SEQ ID NO: 1435635 - RNA, 19 nt, Artificial Sequence
  Description of Artificial Sequence: Synthetic oligonucleotide
  Antisense strand to SEQ ID NO: 1435634
uacacacaugagacaccgc

SEQ ID NO: 1435636 - RNA, 19 nt, Artificial Sequence
  Description of Artificial Sequence: Synthetic oligonucleotide
  Sense strand starting at position 3542 of SEQ ID NO: 1243710
aggaaaugccagcgugauc

SEQ ID NO: 1435637 - RNA, 19 nt, Artificial Sequence
  Description of Artificial Sequence: Synthetic oligonucleotide
  Antisense strand to SEQ ID NO: 1435636
gaucacgcuggcauuuccu

SEQ ID NO: 1435638 - RNA, 19 nt, Artificial Sequence
  Description of Artificial Sequence: Synthetic oligonucleotide
  Sense strand starting at position 3549 of SEQ ID NO: 1243710
gccagcgugaucuacaacu

SEQ ID NO: 1435639 - RNA, 19 nt, Artificial Sequence
  Description of Artificial Sequence: Synthetic oligonucleotide
  Antisense strand to SEQ ID NO: 1435638
aguuguagaucacgcuggc

SEQ ID NO: 1435640 - RNA, 19 nt, Artificial Sequence
  Description of Artificial Sequence: Synthetic oligonucleotide
  Sense strand starting at position 3551 of SEQ ID NO: 1243710
cagcgugaucuacaacuuu

SEQ ID NO: 1435641 - RNA, 19 nt, Artificial Sequence
  Description of Artificial Sequence: Synthetic oligonucleotide
  Antisense strand to SEQ ID NO: 1435640
aaaguuguagaucacgcug

SEQ ID NO: 1435642 - RNA, 19 nt, Artificial Sequence
  Description of Artificial Sequence: Synthetic oligonucleotide
  Sense strand starting at position 3849 of SEQ ID NO: 1243710
gcacuucucagaugugaag

SEQ ID NO: 1435643 - RNA, 19 nt, Artificial Sequence
  Description of Artificial Sequence: Synthetic oligonucleotide
  Antisense strand to SEQ ID NO: 1435642
cuucacaucugagaagugc

SEQ ID NO: 1435644 - RNA, 19 nt, Artificial Sequence
  Description of Artificial Sequence: Synthetic oligonucleotide
  Sense strand starting at position 3901 of SEQ ID NO: 1243710
agcuuauguggccaguaau

SEQ ID NO: 1435645 - RNA, 19 nt, Artificial Sequence
  Description of Artificial Sequence: Synthetic oligonucleotide
  Antisense strand to SEQ ID NO: 1435644
auuacuggccacauaagcu

SEQ ID NO: 1435646 - RNA, 19 nt, Artificial Sequence
  Description of Artificial Sequence: Synthetic oligonucleotide
  Sense strand starting at position 21 of SEQ ID NO: 1243711
aaugauugccugugucuaa

SEQ ID NO: 1435647 - RNA, 19 nt, Artificial Sequence
  Description of Artificial Sequence: Synthetic oligonucleotide
  Antisense strand to SEQ ID NO: 1435646
uuagacacaggcaaucauu

SEQ ID NO: 1435648 - RNA, 19 nt, Artificial Sequence
  Description of Artificial Sequence: Synthetic oligonucleotide
  Sense strand starting at position 40 of SEQ ID NO: 1243711
gucugucaguuccucuaga

SEQ ID NO: 1435649 - RNA, 19 nt, Artificial Sequence
  Description of Artificial Sequence: Synthetic oligonucleotide
  Antisense strand to SEQ ID NO: 1435648
ucuagaggaacugacagac

SEQ ID NO: 1435650 - RNA, 19 nt, Artificial Sequence
  Description of Artificial Sequence: Synthetic oligonucleotide
  Sense strand starting at position 265 of SEQ ID NO: 1243711
gcuccaccuccuugucaga

SEQ ID NO: 1435651 - RNA, 19 nt, Artificial Sequence
  Description of Artificial Sequence: Synthetic oligonucleotide
  Antisense strand to SEQ ID NO: 1435650
ucugacaaggagguggagc

SEQ ID NO: 1435652 - RNA, 19 nt, Artificial Sequence
  Description of Artificial Sequence: Synthetic oligonucleotide
  Sense strand starting at position 370 of SEQ ID NO: 1243711
gaaucuaacgcaugaugau

SEQ ID NO: 1435653 - RNA, 19 nt, Artificial Sequence
  Description of Artificial Sequence: Synthetic oligonucleotide
  Antisense strand to SEQ ID NO: 1435652
aucaucaugcguuagauuc

SEQ ID NO: 1435654 - RNA, 19 nt, Artificial Sequence
  Description of Artificial Sequence: Synthetic oligonucleotide
  Sense strand starting at position 906 of SEQ ID NO: 1243711
ggaguaguaucccugauga

SEQ ID NO: 1435655 - RNA, 19 nt, Artificial Sequence
  Description of Artificial Sequence: Synthetic oligonucleotide
  Antisense strand to SEQ ID NO: 1435654
ucaucagggauacuacucc

SEQ ID NO: 1435656 - RNA, 19 nt, Artificial Sequence
  Description of Artificial Sequence: Synthetic oligonucleotide
  Sense strand starting at position 1074 of SEQ ID NO: 1243711
cagauaggcguggguucaa

SEQ ID NO: 1435657 - RNA, 19 nt, Artificial Sequence
  Description of Artificial Sequence: Synthetic oligonucleotide
  Antisense strand to SEQ ID NO: 1435656
uugaacccacgccuaucug

SEQ ID NO: 1435658 - RNA, 19 nt, Artificial Sequence
  Description of Artificial Sequence: Synthetic oligonucleotide
  Sense strand starting at position 1101 of SEQ ID NO: 1243711
caggccaguuccuuuggua

SEQ ID NO: 1435659 - RNA, 19 nt, Artificial Sequence
  Description of Artificial Sequence: Synthetic oligonucleotide
  Antisense strand to SEQ ID NO: 1435658
uaccaaaggaacuggccug

SEQ ID NO: 1435660 - RNA, 19 nt, Artificial Sequence
  Description of Artificial Sequence: Synthetic oligonucleotide
  Sense strand starting at position 1105 of SEQ ID NO: 1243711
ccaguuccuuugguauauu

SEQ ID NO: 1435661 - RNA, 19 nt, Artificial Sequence
  Description of Artificial Sequence: Synthetic oligonucleotide
  Antisense strand to SEQ ID NO: 1435660
aauauaccaaaggaacugg

SEQ ID NO: 1435662 - RNA, 19 nt, Artificial Sequence
  Description of Artificial Sequence: Synthetic oligonucleotide
  Sense strand starting at position 1149 of SEQ ID NO: 1243711
aguagugccuaucugguaa

SEQ ID NO: 1435663 - RNA, 19 nt, Artificial Sequence
  Description of Artificial Sequence: Synthetic oligonucleotide
  Antisense strand to SEQ ID NO: 1435662
uuaccagauaggcacuacu

SEQ ID NO: 1435664 - RNA, 19 nt, Artificial Sequence
  Description of Artificial Sequence: Synthetic oligonucleotide
  Sense strand starting at position 1473 of SEQ ID NO: 1243711
ggcuccugccagugaucca

SEQ ID NO: 1435665 - RNA, 19 nt, Artificial Sequence
  Description of Artificial Sequence: Synthetic oligonucleotide
  Antisense strand to SEQ ID NO: 1435664
uggaucacuggcaggagcc

SEQ ID NO: 1435666 - RNA, 19 nt, Artificial Sequence
  Description of Artificial Sequence: Synthetic oligonucleotide
  Sense strand starting at position 1534 of SEQ ID NO: 1243711
gagugugaccucgguacua

SEQ ID NO: 1435667 - RNA, 19 nt, Artificial Sequence
  Description of Artificial Sequence: Synthetic oligonucleotide
  Antisense strand to SEQ ID NO: 1435666
uaguaccgaggucacacuc

SEQ ID NO: 1435668 - RNA, 19 nt, Artificial Sequence
  Description of Artificial Sequence: Synthetic oligonucleotide
  Sense strand starting at position 1666 of SEQ ID NO: 1243711
agaggaaugacguggcucu

SEQ ID NO: 1435669 - RNA, 19 nt, Artificial Sequence
  Description of Artificial Sequence: Synthetic oligonucleotide
  Antisense strand to SEQ ID NO: 1435668
agagccacgucauuccucu

SEQ ID NO: 1435670 - RNA, 19 nt, Artificial Sequence
  Description of Artificial Sequence: Synthetic oligonucleotide
  Sense strand starting at position 1791 of SEQ ID NO: 1243711
gcccguugaccaugaguag

SEQ ID NO: 1435671 - RNA, 19 nt, Artificial Sequence
  Description of Artificial Sequence: Synthetic oligonucleotide
  Antisense strand to SEQ ID NO: 1435670
cuacucauggucaacgggc

SEQ ID NO: 1435672 - RNA, 19 nt, Artificial Sequence
  Description of Artificial Sequence: Synthetic oligonucleotide
  Sense strand starting at position 1792 of SEQ ID NO: 1243711
cccguugaccaugaguaga

SEQ ID NO: 1435673 - RNA, 19 nt, Artificial Sequence
  Description of Artificial Sequence: Synthetic oligonucleotide
  Antisense strand to SEQ ID NO: 1435672
ucuacucauggucaacggg

SEQ ID NO: 1435674 - RNA, 19 nt, Artificial Sequence
  Description of Artificial Sequence: Synthetic oligonucleotide
  Sense strand starting at position 1794 of SEQ ID NO: 1243711
cguugaccaugaguagaaa

SEQ ID NO: 1435675 - RNA, 19 nt, Artificial Sequence
  Description of Artificial Sequence: Synthetic oligonucleotide
  Antisense strand to SEQ ID NO: 1435674
uuucuacucauggucaacg

SEQ ID NO: 1435676 - RNA, 19 nt, Artificial Sequence
  Description of Artificial Sequence: Synthetic oligonucleotide
  Sense strand starting at position 1894 of SEQ ID NO: 1243711
gccggcguugcccuagaaa

SEQ ID NO: 1435677 - RNA, 19 nt, Artificial Sequence
  Description of Artificial Sequence: Synthetic oligonucleotide
  Antisense strand to SEQ ID NO: 1435676
uuucuagggcaacgccggc

SEQ ID NO: 1435678 - RNA, 19 nt, Artificial Sequence
  Description of Artificial Sequence: Synthetic oligonucleotide
  Sense strand starting at position 2074 of SEQ ID NO: 1243711
gcagguaugaccgagagcu

SEQ ID NO: 1435679 - RNA, 19 nt, Artificial Sequence
  Description of Artificial Sequence: Synthetic oligonucleotide
  Antisense strand to SEQ ID NO: 1435678
agcucucggucauaccugc

SEQ ID NO: 1435680 - RNA, 19 nt, Artificial Sequence
  Description of Artificial Sequence: Synthetic oligonucleotide
  Sense strand starting at position 2101 of SEQ ID NO: 1243711
agcguugaccugucgggua

SEQ ID NO: 1435681 - RNA, 19 nt, Artificial Sequence
  Description of Artificial Sequence: Synthetic oligonucleotide
  Antisense strand to SEQ ID NO: 1435680
uacccgacaggucaacgcu

SEQ ID NO: 1435682 - RNA, 19 nt, Artificial Sequence
  Description of Artificial Sequence: Synthetic oligonucleotide
  Sense strand starting at position 2103 of SEQ ID NO: 1243711
cguugaccugucggguaaa

SEQ ID NO: 1435683 - RNA, 19 nt, Artificial Sequence
  Description of Artificial Sequence: Synthetic oligonucleotide
  Antisense strand to SEQ ID NO: 1435682
uuuacccgacaggucaacg

SEQ ID NO: 1435684 - RNA, 19 nt, Artificial Sequence
  Description of Artificial Sequence: Synthetic oligonucleotide
  Sense strand starting at position 2260 of SEQ ID NO: 1243711
cagcaagccgaguguuuaa

SEQ ID NO: 1435685 - RNA, 19 nt, Artificial Sequence
  Description of Artificial Sequence: Synthetic oligonucleotide
  Antisense strand to SEQ ID NO: 1435684
uuaaacacucggcuugcug

SEQ ID NO: 1435686 - RNA, 19 nt, Artificial Sequence
  Description of Artificial Sequence: Synthetic oligonucleotide
  Sense strand starting at position 2662 of SEQ ID NO: 1243711
aucuuaguggccugucaca

SEQ ID NO: 1435687 - RNA, 19 nt, Artificial Sequence
  Description of Artificial Sequence: Synthetic oligonucleotide
  Antisense strand to SEQ ID NO: 1435686
ugugacaggccacuaagau

SEQ ID NO: 1435688 - RNA, 19 nt, Artificial Sequence
  Description of Artificial Sequence: Synthetic oligonucleotide
  Sense strand starting at position 2680 of SEQ ID NO: 1243711
agaguaagcacuugguaac

SEQ ID NO: 1435689 - RNA, 19 nt, Artificial Sequence
  Description of Artificial Sequence: Synthetic oligonucleotide
  Antisense strand to SEQ ID NO: 1435688
guuaccaagugcuuacucu

SEQ ID NO: 1435690 - RNA, 19 nt, Artificial Sequence
  Description of Artificial Sequence: Synthetic oligonucleotide
  Sense strand starting at position 2681 of SEQ ID NO: 1243711
gaguaagcacuugguaacu

SEQ ID NO: 1435691 - RNA, 19 nt, Artificial Sequence
  Description of Artificial Sequence: Synthetic oligonucleotide
  Antisense strand to SEQ ID NO: 1435690
aguuaccaagugcuuacuc

SEQ ID NO: 1435692 - RNA, 19 nt, Artificial Sequence
  Description of Artificial Sequence: Synthetic oligonucleotide
  Sense strand starting at position 2701 of SEQ ID NO: 1243711
cuaacuuguugauaaauga

SEQ ID NO: 1435693 - RNA, 19 nt, Artificial Sequence
  Description of Artificial Sequence: Synthetic oligonucleotide
  Antisense strand to SEQ ID NO: 1435692
ucauuuaucaacaaguuag

SEQ ID NO: 1435694 - RNA, 19 nt, Artificial Sequence
  Description of Artificial Sequence: Synthetic oligonucleotide
  Sense strand starting at position 2888 of SEQ ID NO: 1243711
aggagacguuggagacauu

SEQ ID NO: 1435695 - RNA, 19 nt, Artificial Sequence
  Description of Artificial Sequence: Synthetic oligonucleotide
  Antisense strand to SEQ ID NO: 1435694
aaugucuccaacgucuccu

SEQ ID NO: 1435696 - RNA, 19 nt, Artificial Sequence
  Description of Artificial Sequence: Synthetic oligonucleotide
  Sense strand starting at position 2900 of SEQ ID NO: 1243711
agacauuaucuuggaucca

SEQ ID NO: 1435697 - RNA, 19 nt, Artificial Sequence
  Description of Artificial Sequence: Synthetic oligonucleotide
  Antisense strand to SEQ ID NO: 1435696
uggauccaagauaaugucu

SEQ ID NO: 1435698 - RNA, 19 nt, Artificial Sequence
  Description of Artificial Sequence: Synthetic oligonucleotide
  Sense strand starting at position 2928 of SEQ ID NO: 1243711
gggauucacagguguguag

SEQ ID NO: 1435699 - RNA, 19 nt, Artificial Sequence
  Description of Artificial Sequence: Synthetic oligonucleotide
  Antisense strand to SEQ ID NO: 1435698
cuacacaccugugaauccc

SEQ ID NO: 1435700 - RNA, 19 nt, Artificial Sequence
  Description of Artificial Sequence: Synthetic oligonucleotide
  Sense strand starting at position 3098 of SEQ ID NO: 1243711
cugccuagugagcaaagau

SEQ ID NO: 1435701 - RNA, 19 nt, Artificial Sequence
  Description of Artificial Sequence: Synthetic oligonucleotide
  Antisense strand to SEQ ID NO: 1435700
aucuuugcucacuaggcag

SEQ ID NO: 1435702 - RNA, 19 nt, Artificial Sequence
  Description of Artificial Sequence: Synthetic oligonucleotide
  Sense strand starting at position 3283 of SEQ ID NO: 1243711
guccaucucuuuccaguua

SEQ ID NO: 1435703 - RNA, 19 nt, Artificial Sequence
  Description of Artificial Sequence: Synthetic oligonucleotide
  Antisense strand to SEQ ID NO: 1435702
uaacuggaaagagauggac

SEQ ID NO: 1435704 - RNA, 19 nt, Artificial Sequence
  Description of Artificial Sequence: Synthetic oligonucleotide
  Sense strand starting at position 3368 of SEQ ID NO: 1243711
cgguguugcacacaaguua

SEQ ID NO: 1435705 - RNA, 19 nt, Artificial Sequence
  Description of Artificial Sequence: Synthetic oligonucleotide
  Antisense strand to SEQ ID NO: 1435704
uaacuugugugcaacaccg

SEQ ID NO: 1435706 - RNA, 19 nt, Artificial Sequence
  Description of Artificial Sequence: Synthetic oligonucleotide
  Sense strand starting at position 3397 of SEQ ID NO: 1243711
aaaugcuuguaguuaucga

SEQ ID NO: 1435707 - RNA, 19 nt, Artificial Sequence
  Description of Artificial Sequence: Synthetic oligonucleotide
  Antisense strand to SEQ ID NO: 1435706
ucgauaacuacaagcauuu

SEQ ID NO: 1435708 - RNA, 19 nt, Artificial Sequence
  Description of Artificial Sequence: Synthetic oligonucleotide
  Sense strand starting at position 3405 of SEQ ID NO: 1243711
guaguuaucgaauaacugg

SEQ ID NO: 1435709 - RNA, 19 nt, Artificial Sequence
  Description of Artificial Sequence: Synthetic oligonucleotide
  Antisense strand to SEQ ID NO: 1435708
ccaguuauucgauaacuac

SEQ ID NO: 1435710 - RNA, 19 nt, Artificial Sequence
  Description of Artificial Sequence: Synthetic oligonucleotide
  Sense strand starting at position 3425 of SEQ ID NO: 1243711
ggcucccaguaguuuaaga

SEQ ID NO: 1435711 - RNA, 19 nt, Artificial Sequence
  Description of Artificial Sequence: Synthetic oligonucleotide
  Antisense strand to SEQ ID NO: 1435710
ucuuaaacuacugggagcc

SEQ ID NO: 1435712 - RNA, 19 nt, Artificial Sequence
  Description of Artificial Sequence: Synthetic oligonucleotide
  Sense strand starting at position 3435 of SEQ ID NO: 1243711
aguuuaagaccuggcuaua

SEQ ID NO: 1435713 - RNA, 19 nt, Artificial Sequence
  Description of Artificial Sequence: Synthetic oligonucleotide
  Antisense strand to SEQ ID NO: 1435712
uauagccaggucuuaaacu

SEQ ID NO: 1435714 - RNA, 19 nt, Artificial Sequence
  Description of Artificial Sequence: Synthetic oligonucleotide
  Sense strand starting at position 3626 of SEQ ID NO: 1243711
ggcauuagaagcgacuuua

SEQ ID NO: 1435715 - RNA, 19 nt, Artificial Sequence
  Description of Artificial Sequence: Synthetic oligonucleotide
  Antisense strand to SEQ ID NO: 1435714
uaaagucgcuucuaaugcc

SEQ ID NO: 1435716 - RNA, 19 nt, Artificial Sequence
  Description of Artificial Sequence: Synthetic oligonucleotide
  Sense strand starting at position 3792 of SEQ ID NO: 1243711
aagguaguuucugcagaug

SEQ ID NO: 1435717 - RNA, 19 nt, Artificial Sequence
  Description of Artificial Sequence: Synthetic oligonucleotide
  Antisense strand to SEQ ID NO: 1435716
caucugcagaaacuaccuu

SEQ ID NO: 1435718 - RNA, 19 nt, Artificial Sequence
  Description of Artificial Sequence: Synthetic oligonucleotide
  Sense strand starting at position 3819 of SEQ ID NO: 1243711
cagcgaucucagcaggaca

SEQ ID NO: 1435719 - RNA, 19 nt, Artificial Sequence
  Description of Artificial Sequence: Synthetic oligonucleotide
  Antisense strand to SEQ ID NO: 1435718
uguccugcugagaucgcug

SEQ ID NO: 1435720 - RNA, 19 nt, Artificial Sequence
  Description of Artificial Sequence: Synthetic oligonucleotide
  Sense strand starting at position 3858 of SEQ ID NO: 1243711
gauguagggaucugcaaug

SEQ ID NO: 1435721 - RNA, 19 nt, Artificial Sequence
  Description of Artificial Sequence: Synthetic oligonucleotide
  Antisense strand to SEQ ID NO: 1435720
cauugcagaucccuacauc

SEQ ID NO: 1435722 - RNA, 19 nt, Artificial Sequence
  Description of Artificial Sequence: Synthetic oligonucleotide
  Sense strand starting at position 3928 of SEQ ID NO: 1243711
cagccaugcugguuguuaa

SEQ ID NO: 1435723 - RNA, 19 nt, Artificial Sequence
  Description of Artificial Sequence: Synthetic oligonucleotide
  Antisense strand to SEQ ID NO: 1435722
uuaacaaccagcauggcug

SEQ ID NO: 1435724 - RNA, 19 nt, Artificial Sequence
  Description of Artificial Sequence: Synthetic oligonucleotide
  Sense strand starting at position 3931 of SEQ ID NO: 1243711
ccaugcugguuguuaacau

SEQ ID NO: 1435725 - RNA, 19 nt, Artificial Sequence
  Description of Artificial Sequence: Synthetic oligonucleotide
  Antisense strand to SEQ ID NO: 1435724
auguuaacaaccagcaugg

SEQ ID NO: 1435726 - RNA, 19 nt, Artificial Sequence
  Description of Artificial Sequence: Synthetic oligonucleotide
  Sense strand starting at position 9 of SEQ ID NO: 1243712
uugcaagggcucuggugaa

SEQ ID NO: 1435727 - RNA, 19 nt, Artificial Sequence
  Description of Artificial Sequence: Synthetic oligonucleotide
  Antisense strand to SEQ ID NO: 1435726
uucaccagagcccuugcaa

SEQ ID NO: 1435728 - RNA, 19 nt, Artificial Sequence
  Description of Artificial Sequence: Synthetic oligonucleotide
  Sense strand starting at position 41 of SEQ ID NO: 1243712
gugaccguuaauggguaua

SEQ ID NO: 1435729 - RNA, 19 nt, Artificial Sequence
  Description of Artificial Sequence: Synthetic oligonucleotide
  Antisense strand to SEQ ID NO: 1435728
uauacccauuaacggucac

SEQ ID NO: 1435730 - RNA, 19 nt, Artificial Sequence
  Description of Artificial Sequence: Synthetic oligonucleotide
  Sense strand starting at position 43 of SEQ ID NO: 1243712
gaccguuaauggguauaaa

SEQ ID NO: 1435731 - RNA, 19 nt, Artificial Sequence
  Description of Artificial Sequence: Synthetic oligonucleotide
  Antisense strand to SEQ ID NO: 1435730
uuuauacccauuaacgguc

SEQ ID NO: 1435732 - RNA, 19 nt, Artificial Sequence
  Description of Artificial Sequence: Synthetic oligonucleotide
  Sense strand starting at position 44 of SEQ ID NO: 1243712
accguuaauggguauaaac

SEQ ID NO: 1435733 - RNA, 19 nt, Artificial Sequence
  Description of Artificial Sequence: Synthetic oligonucleotide
  Antisense strand to SEQ ID NO: 1435732
guuuauacccauuaacggu

SEQ ID NO: 1435734 - RNA, 19 nt, Artificial Sequence
  Description of Artificial Sequence: Synthetic oligonucleotide
  Sense strand starting at position 46 of SEQ ID NO: 1243712
cguuaauggguauaaacca

SEQ ID NO: 1435735 - RNA, 19 nt, Artificial Sequence
  Description of Artificial Sequence: Synthetic oligonucleotide
  Antisense strand to SEQ ID NO: 1435734
ugguuuauacccauuaacg

SEQ ID NO: 1435736 - RNA, 19 nt, Artificial Sequence
  Description of Artificial Sequence: Synthetic oligonucleotide
  Sense strand starting at position 165 of SEQ ID NO: 1243712
ggaggugagaguuggacau

SEQ ID NO: 1435737 - RNA, 19 nt, Artificial Sequence
  Description of Artificial Sequence: Synthetic oligonucleotide
  Antisense strand to SEQ ID NO: 1435736
auguccaacucucaccucc

SEQ ID NO: 1435738 - RNA, 19 nt, Artificial Sequence
  Description of Artificial Sequence: Synthetic oligonucleotide
  Sense strand starting at position 755 of SEQ ID NO: 1243712
guuuaaaucuaccugugac

SEQ ID NO: 1435739 - RNA, 19 nt, Artificial Sequence
  Description of Artificial Sequence: Synthetic oligonucleotide
  Antisense strand to SEQ ID NO: 1435738
gucacagguagauuuaaac

SEQ ID NO: 1435740 - RNA, 19 nt, Artificial Sequence
  Description of Artificial Sequence: Synthetic oligonucleotide
  Sense strand starting at position 803 of SEQ ID NO: 1243712
gcccuuccagaauagacau

SEQ ID NO: 1435741 - RNA, 19 nt, Artificial Sequence
  Description of Artificial Sequence: Synthetic oligonucleotide
  Antisense strand to SEQ ID NO: 1435740
augucuauucuggaagggc

SEQ ID NO: 1435742 - RNA, 19 nt, Artificial Sequence
  Description of Artificial Sequence: Synthetic oligonucleotide
  Sense strand starting at position 876 of SEQ ID NO: 1243712
gucaaucuugcauguauug

SEQ ID NO: 1435743 - RNA, 19 nt, Artificial Sequence
  Description of Artificial Sequence: Synthetic oligonucleotide
  Antisense strand to SEQ ID NO: 1435742
caauacaugcaagauugac

SEQ ID NO: 1435744 - RNA, 19 nt, Artificial Sequence
  Description of Artificial Sequence: Synthetic oligonucleotide
  Sense strand starting at position 900 of SEQ ID NO: 1243712
uguauuaugucuuccugaa

SEQ ID NO: 1435745 - RNA, 19 nt, Artificial Sequence
  Description of Artificial Sequence: Synthetic oligonucleotide
  Antisense strand to SEQ ID NO: 1435744
uucaggaagacauaauaca

SEQ ID NO: 1435746 - RNA, 19 nt, Artificial Sequence
  Description of Artificial Sequence: Synthetic oligonucleotide
  Sense strand starting at position 919 of SEQ ID NO: 1243712
auguauaaaggcugacuau

SEQ ID NO: 1435747 - RNA, 19 nt, Artificial Sequence
  Description of Artificial Sequence: Synthetic oligonucleotide
  Antisense strand to SEQ ID NO: 1435746
auagucagccuuuauacau

SEQ ID NO: 1435748 - RNA, 19 nt, Artificial Sequence
  Description of Artificial Sequence: Synthetic oligonucleotide
  Sense strand starting at position 991 of SEQ ID NO: 1243712
uguccuuaacauuggcaaa

SEQ ID NO: 1435749 - RNA, 19 nt, Artificial Sequence
  Description of Artificial Sequence: Synthetic oligonucleotide
  Antisense strand to SEQ ID NO: 1435748
uuugccaauguuaaggaca

SEQ ID NO: 1435750 - RNA, 19 nt, Artificial Sequence
  Description of Artificial Sequence: Synthetic oligonucleotide
  Sense strand starting at position 1027 of SEQ ID NO: 1243712
acuugagacuugucucaga

SEQ ID NO: 1435751 - RNA, 19 nt, Artificial Sequence
  Description of Artificial Sequence: Synthetic oligonucleotide
  Antisense strand to SEQ ID NO: 1435750
ucugagacaagucucaagu

SEQ ID NO: 1435752 - RNA, 19 nt, Artificial Sequence
  Description of Artificial Sequence: Synthetic oligonucleotide
  Sense strand starting at position 1127 of SEQ ID NO: 1243712
gcugcucaacugugaauau

SEQ ID NO: 1435753 - RNA, 19 nt, Artificial Sequence
  Description of Artificial Sequence: Synthetic oligonucleotide
  Antisense strand to SEQ ID NO: 1435752
auauucacaguugagcagc

SEQ ID NO: 1435754 - RNA, 19 nt, Artificial Sequence
  Description of Artificial Sequence: Synthetic oligonucleotide
  Sense strand starting at position 1295 of SEQ ID NO: 1243712
gggagguagguacgaauau

SEQ ID NO: 1435755 - RNA, 19 nt, Artificial Sequence
  Description of Artificial Sequence: Synthetic oligonucleotide
  Antisense strand to SEQ ID NO: 1435754
auauucguaccuaccuccc

SEQ ID NO: 1435756 - RNA, 19 nt, Artificial Sequence
  Description of Artificial Sequence: Synthetic oligonucleotide
  Sense strand starting at position 1471 of SEQ ID NO: 1243712
ggcggugcuccauaaacau

SEQ ID NO: 1435757 - RNA, 19 nt, Artificial Sequence
  Description of Artificial Sequence: Synthetic oligonucleotide
  Antisense strand to SEQ ID NO: 1435756
auguuuauggagcaccgcc

SEQ ID NO: 1435758 - RNA, 19 nt, Artificial Sequence
  Description of Artificial Sequence: Synthetic oligonucleotide
  Sense strand starting at position 1506 of SEQ ID NO: 1243712
cgaauaaacuaucggauuu

SEQ ID NO: 1435759 - RNA, 19 nt, Artificial Sequence
  Description of Artificial Sequence: Synthetic oligonucleotide
  Antisense strand to SEQ ID NO: 1435758
aaauccgauaguuuauucg

SEQ ID NO: 1435760 - RNA, 19 nt, Artificial Sequence
  Description of Artificial Sequence: Synthetic oligonucleotide
  Sense strand starting at position 1979 of SEQ ID NO: 1243712
cugugauuggccggaugag

SEQ ID NO: 1435761 - RNA, 19 nt, Artificial Sequence
  Description of Artificial Sequence: Synthetic oligonucleotide
  Antisense strand to SEQ ID NO: 1435760
cucauccggccaaucacag

SEQ ID NO: 1435762 - RNA, 19 nt, Artificial Sequence
  Description of Artificial Sequence: Synthetic oligonucleotide
  Sense strand starting at position 2035 of SEQ ID NO: 1243712
gggcguugccuuccauuca

SEQ ID NO: 1435763 - RNA, 19 nt, Artificial Sequence
  Description of Artificial Sequence: Synthetic oligonucleotide
  Antisense strand to SEQ ID NO: 1435762
ugaauggaaggcaacgccc

SEQ ID NO: 1435764 - RNA, 19 nt, Artificial Sequence
  Description of Artificial Sequence: Synthetic oligonucleotide
  Sense strand starting at position 3044 of SEQ ID NO: 1243712
gcgaguucuggcuccaguc

SEQ ID NO: 1435765 - RNA, 19 nt, Artificial Sequence
  Description of Artificial Sequence: Synthetic oligonucleotide
  Antisense strand to SEQ ID NO: 1435764
gacuggagccagaacucgc

SEQ ID NO: 1435766 - RNA, 19 nt, Artificial Sequence
  Description of Artificial Sequence: Synthetic oligonucleotide
  Sense strand starting at position 3046 of SEQ ID NO: 1243712
gaguucuggcuccagucaa

SEQ ID NO: 1435767 - RNA, 19 nt, Artificial Sequence
  Description of Artificial Sequence: Synthetic oligonucleotide
  Antisense strand to SEQ ID NO: 1435766
uugacuggagccagaacuc

SEQ ID NO: 1435768 - RNA, 19 nt, Artificial Sequence
  Description of Artificial Sequence: Synthetic oligonucleotide
  Sense strand starting at position 3104 of SEQ ID NO: 1243712
gaggcucgguucucugaaa

SEQ ID NO: 1435769 - RNA, 19 nt, Artificial Sequence
  Description of Artificial Sequence: Synthetic oligonucleotide
  Antisense strand to SEQ ID NO: 1435768
uuucagagaaccgagccuc

SEQ ID NO: 1435770 - RNA, 19 nt, Artificial Sequence
  Description of Artificial Sequence: Synthetic oligonucleotide
  Sense strand starting at position 3208 of SEQ ID NO: 1243712
guccuucgugucuaagaga

SEQ ID NO: 1435771 - RNA, 19 nt, Artificial Sequence
  Description of Artificial Sequence: Synthetic oligonucleotide
  Antisense strand to SEQ ID NO: 1435770
ucucuuagacacgaaggac

SEQ ID NO: 1435772 - RNA, 19 nt, Artificial Sequence
  Description of Artificial Sequence: Synthetic oligonucleotide
  Sense strand starting at position 3213 of SEQ ID NO: 1243712
ucgugucuaagagagaaau

SEQ ID NO: 1435773 - RNA, 19 nt, Artificial Sequence
  Description of Artificial Sequence: Synthetic oligonucleotide
  Antisense strand to SEQ ID NO: 1435772
auuucucucuuagacacga

SEQ ID NO: 1435774 - RNA, 19 nt, Artificial Sequence
  Description of Artificial Sequence: Synthetic oligonucleotide
  Sense strand starting at position 3215 of SEQ ID NO: 1243712
gugucuaagagagaaaugu

SEQ ID NO: 1435775 - RNA, 19 nt, Artificial Sequence
  Description of Artificial Sequence: Synthetic oligonucleotide
  Antisense strand to SEQ ID NO: 1435774
acauuucucucuuagacac

SEQ ID NO: 1435776 - RNA, 19 nt, Artificial Sequence
  Description of Artificial Sequence: Synthetic oligonucleotide
  Sense strand starting at position 3224 of SEQ ID NO: 1243712
agagaaauguguucuggag

SEQ ID NO: 1435777 - RNA, 19 nt, Artificial Sequence
  Description of Artificial Sequence: Synthetic oligonucleotide
  Antisense strand to SEQ ID NO: 1435776
cuccagaacacauuucucu

SEQ ID NO: 1435778 - RNA, 19 nt, Artificial Sequence
  Description of Artificial Sequence: Synthetic oligonucleotide
  Sense strand starting at position 3274 of SEQ ID NO: 1243712
augggugaggucugagaug

SEQ ID NO: 1435779 - RNA, 19 nt, Artificial Sequence
  Description of Artificial Sequence: Synthetic oligonucleotide
  Antisense strand to SEQ ID NO: 1435778
caucucagaccucacccau

SEQ ID NO: 1435780 - RNA, 19 nt, Artificial Sequence
  Description of Artificial Sequence: Synthetic oligonucleotide
  Sense strand starting at position 3374 of SEQ ID NO: 1243712
ucucuuuaacguugaccua

SEQ ID NO: 1435781 - RNA, 19 nt, Artificial Sequence
  Description of Artificial Sequence: Synthetic oligonucleotide
  Antisense strand to SEQ ID NO: 1435780
uaggucaacguuaaagaga

SEQ ID NO: 1435782 - RNA, 19 nt, Artificial Sequence
  Description of Artificial Sequence: Synthetic oligonucleotide
  Sense strand starting at position 3375 of SEQ ID NO: 1243712
cucuuuaacguugaccuau

SEQ ID NO: 1435783 - RNA, 19 nt, Artificial Sequence
  Description of Artificial Sequence: Synthetic oligonucleotide
  Antisense strand to SEQ ID NO: 1435782
auaggucaacguuaaagag

SEQ ID NO: 1435784 - RNA, 19 nt, Artificial Sequence
  Description of Artificial Sequence: Synthetic oligonucleotide
  Sense strand starting at position 3411 of SEQ ID NO: 1243712
gggaguugugaagguaaca

SEQ ID NO: 1435785 - RNA, 19 nt, Artificial Sequence
  Description of Artificial Sequence: Synthetic oligonucleotide
  Antisense strand to SEQ ID NO: 1435784
uguuaccuucacaacuccc

SEQ ID NO: 1435786 - RNA, 19 nt, Artificial Sequence
  Description of Artificial Sequence: Synthetic oligonucleotide
  Sense strand starting at position 3416 of SEQ ID NO: 1243712
uugugaagguaacauuuaa

SEQ ID NO: 1435787 - RNA, 19 nt, Artificial Sequence
  Description of Artificial Sequence: Synthetic oligonucleotide
  Antisense strand to SEQ ID NO: 1435786
uuaaauguuaccuucacaa

SEQ ID NO: 1435788 - RNA, 19 nt, Artificial Sequence
  Description of Artificial Sequence: Synthetic oligonucleotide
  Sense strand starting at position 3513 of SEQ ID NO: 1243712
cuagaagggagguguugau

SEQ ID NO: 1435789 - RNA, 19 nt, Artificial Sequence
  Description of Artificial Sequence: Synthetic oligonucleotide
  Antisense strand to SEQ ID NO: 1435788
aucaacaccucccuucuag

SEQ ID NO: 1435790 - RNA, 19 nt, Artificial Sequence
  Description of Artificial Sequence: Synthetic oligonucleotide
  Sense strand starting at position 3560 of SEQ ID NO: 1243712
caagguauccucugguaug

SEQ ID NO: 1435791 - RNA, 19 nt, Artificial Sequence
  Description of Artificial Sequence: Synthetic oligonucleotide
  Antisense strand to SEQ ID NO: 1435790
cauaccagaggauaccuug

SEQ ID NO: 1435792 - RNA, 19 nt, Artificial Sequence
  Description of Artificial Sequence: Synthetic oligonucleotide
  Sense strand starting at position 3847 of SEQ ID NO: 1243712
agcugaaucuaaucugaag

SEQ ID NO: 1435793 - RNA, 19 nt, Artificial Sequence
  Description of Artificial Sequence: Synthetic oligonucleotide
  Antisense strand to SEQ ID NO: 1435792
cuucagauuagauucagcu

SEQ ID NO: 1435794 - RNA, 19 nt, Artificial Sequence
  Description of Artificial Sequence: Synthetic oligonucleotide
  Sense strand starting at position 3892 of SEQ ID NO: 1243712
aggaccaguucuuuagagu

SEQ ID NO: 1435795 - RNA, 19 nt, Artificial Sequence
  Description of Artificial Sequence: Synthetic oligonucleotide
  Antisense strand to SEQ ID NO: 1435794
acucuaaagaacugguccu

SEQ ID NO: 1435796 - RNA, 19 nt, Artificial Sequence
  Description of Artificial Sequence: Synthetic oligonucleotide
  Sense strand starting at position 3893 of SEQ ID NO: 1243712
ggaccaguucuuuagaguu

SEQ ID NO: 1435797 - RNA, 19 nt, Artificial Sequence
  Description of Artificial Sequence: Synthetic oligonucleotide
  Antisense strand to SEQ ID NO: 1435796
aacucuaaagaacuggucc

SEQ ID NO: 1435798 - RNA, 19 nt, Artificial Sequence
  Description of Artificial Sequence: Synthetic oligonucleotide
  Sense strand starting at position 3919 of SEQ ID NO: 1243712
ggacaacuguuauuccuca

SEQ ID NO: 1435799 - RNA, 19 nt, Artificial Sequence
  Description of Artificial Sequence: Synthetic oligonucleotide
  Antisense strand to SEQ ID NO: 1435798
ugaggaauaacaguugucc

SEQ ID NO: 1435800 - RNA, 19 nt, Artificial Sequence
  Description of Artificial Sequence: Synthetic oligonucleotide
  Sense strand starting at position 3927 of SEQ ID NO: 1243712
guuauuccucaagaagugu

SEQ ID NO: 1435801 - RNA, 19 nt, Artificial Sequence
  Description of Artificial Sequence: Synthetic oligonucleotide
  Antisense strand to SEQ ID NO: 1435800
acacuucuugaggaauaac

SEQ ID NO: 1435802 - RNA, 19 nt, Artificial Sequence
  Description of Artificial Sequence: Synthetic oligonucleotide
  Sense strand starting at position 3975 of SEQ ID NO: 1243712
uaguauauaggaugucaaa

SEQ ID NO: 1435803 - RNA, 19 nt, Artificial Sequence
  Description of Artificial Sequence: Synthetic oligonucleotide
  Antisense strand to SEQ ID NO: 1435802
uuugacauccuauauacua

SEQ ID NO: 1435804 - RNA, 19 nt, Artificial Sequence
  Description of Artificial Sequence: Synthetic oligonucleotide
  Sense strand starting at position 3982 of SEQ ID NO: 1243712
uaggaugucaaauguagga

SEQ ID NO: 1435805 - RNA, 19 nt, Artificial Sequence
  Description of Artificial Sequence: Synthetic oligonucleotide
  Antisense strand to SEQ ID NO: 1435804
uccuacauuugacauccua

SEQ ID NO: 1435806 - RNA, 19 nt, Artificial Sequence
  Description of Artificial Sequence: Synthetic oligonucleotide
  Sense strand starting at position 483 of SEQ ID NO: 1243713
cuggaagcccguuagcaau

SEQ ID NO: 1435807 - RNA, 19 nt, Artificial Sequence
  Description of Artificial Sequence: Synthetic oligonucleotide
  Antisense strand to SEQ ID NO: 1435806
auugcuaacgggcuuccag

SEQ ID NO: 1435808 - RNA, 19 nt, Artificial Sequence
  Description of Artificial Sequence: Synthetic oligonucleotide
  Sense strand starting at position 726 of SEQ ID NO: 1243713
uucugauguuuagaacaaa

SEQ ID NO: 1435809 - RNA, 19 nt, Artificial Sequence
  Description of Artificial Sequence: Synthetic oligonucleotide
  Antisense strand to SEQ ID NO: 1435808
uuuguucuaaacaucagaa

SEQ ID NO: 1435810 - RNA, 19 nt, Artificial Sequence
  Description of Artificial Sequence: Synthetic oligonucleotide
  Sense strand starting at position 1056 of SEQ ID NO: 1243713
gcucuccucuuggagcaaa

SEQ ID NO: 1435811 - RNA, 19 nt, Artificial Sequence
  Description of Artificial Sequence: Synthetic oligonucleotide
  Antisense strand to SEQ ID NO: 1435810
uuugcuccaagaggagagc

SEQ ID NO: 1435812 - RNA, 19 nt, Artificial Sequence
  Description of Artificial Sequence: Synthetic oligonucleotide
  Sense strand starting at position 1192 of SEQ ID NO: 1243713
cacgcuuuguccggcuuua

SEQ ID NO: 1435813 - RNA, 19 nt, Artificial Sequence
  Description of Artificial Sequence: Synthetic oligonucleotide
  Antisense strand to SEQ ID NO: 1435812
uaaagccggacaaagcgug

SEQ ID NO: 1435814 - RNA, 19 nt, Artificial Sequence
  Description of Artificial Sequence: Synthetic oligonucleotide
  Sense strand starting at position 1203 of SEQ ID NO: 1243713
cggcuuuagcgggauacca

SEQ ID NO: 1435815 - RNA, 19 nt, Artificial Sequence
  Description of Artificial Sequence: Synthetic oligonucleotide
  Antisense strand to SEQ ID NO: 1435814
ugguaucccgcuaaagccg

SEQ ID NO: 1435816 - RNA, 19 nt, Artificial Sequence
  Description of Artificial Sequence: Synthetic oligonucleotide
  Sense strand starting at position 1224 of SEQ ID NO: 1243713
ggcacucguuaaggcaaau

SEQ ID NO: 1435817 - RNA, 19 nt, Artificial Sequence
  Description of Artificial Sequence: Synthetic oligonucleotide
  Antisense strand to SEQ ID NO: 1435816
auuugccuuaacgagugcc

SEQ ID NO: 1435818 - RNA, 19 nt, Artificial Sequence
  Description of Artificial Sequence: Synthetic oligonucleotide
  Sense strand starting at position 1237 of SEQ ID NO: 1243713
gcaaaugcaucccugcaaa

SEQ ID NO: 1435819 - RNA, 19 nt, Artificial Sequence
  Description of Artificial Sequence: Synthetic oligonucleotide
  Antisense strand to SEQ ID NO: 1435818
uuugcagggaugcauuugc

SEQ ID NO: 1435820 - RNA, 19 nt, Artificial Sequence
  Description of Artificial Sequence: Synthetic oligonucleotide
  Sense strand starting at position 1273 of SEQ ID NO: 1243713
acuuuaaggcuuuauauag

SEQ ID NO: 1435821 - RNA, 19 nt, Artificial Sequence
  Description of Artificial Sequence: Synthetic oligonucleotide
  Antisense strand to SEQ ID NO: 1435820
cuauauaaagccuuaaagu

SEQ ID NO: 1435822 - RNA, 19 nt, Artificial Sequence
  Description of Artificial Sequence: Synthetic oligonucleotide
  Sense strand starting at position 1294 of SEQ ID NO: 1243713
acaggauuugcucgucuua

SEQ ID NO: 1435823 - RNA, 19 nt, Artificial Sequence
  Description of Artificial Sequence: Synthetic oligonucleotide
  Antisense strand to SEQ ID NO: 1435822
uaagacgagcaaauccugu

SEQ ID NO: 1435824 - RNA, 19 nt, Artificial Sequence
  Description of Artificial Sequence: Synthetic oligonucleotide
  Sense strand starting at position 1296 of SEQ ID NO: 1243713
aggauuugcucgucuuaca

SEQ ID NO: 1435825 - RNA, 19 nt, Artificial Sequence
  Description of Artificial Sequence: Synthetic oligonucleotide
  Antisense strand to SEQ ID NO: 1435824
uguaagacgagcaaauccu

SEQ ID NO: 1435826 - RNA, 19 nt, Artificial Sequence
  Description of Artificial Sequence: Synthetic oligonucleotide
  Sense strand starting at position 1420 of SEQ ID NO: 1243713
gcagaaagcgccucguugu

SEQ ID NO: 1435827 - RNA, 19 nt, Artificial Sequence
  Description of Artificial Sequence: Synthetic oligonucleotide
  Antisense strand to SEQ ID NO: 1435826
acaacgaggcgcuuucugc

SEQ ID NO: 1435828 - RNA, 19 nt, Artificial Sequence
  Description of Artificial Sequence: Synthetic oligonucleotide
  Sense strand starting at position 1449 of SEQ ID NO: 1243713
gaacgucuuagggagguga

SEQ ID NO: 1435829 - RNA, 19 nt, Artificial Sequence
  Description of Artificial Sequence: Synthetic oligonucleotide
  Antisense strand to SEQ ID NO: 1435828
ucaccucccuaagacguuc

SEQ ID NO: 1435830 - RNA, 19 nt, Artificial Sequence
  Description of Artificial Sequence: Synthetic oligonucleotide
  Sense strand starting at position 1451 of SEQ ID NO: 1243713
acgucuuagggaggugaau

SEQ ID NO: 1435831 - RNA, 19 nt, Artificial Sequence
  Description of Artificial Sequence: Synthetic oligonucleotide
  Antisense strand to SEQ ID NO: 1435830
auucaccucccuaagacgu

SEQ ID NO: 1435832 - RNA, 19 nt, Artificial Sequence
  Description of Artificial Sequence: Synthetic oligonucleotide
  Sense strand starting at position 2628 of SEQ ID NO: 1243713
aaaggugucucggaggaaa

SEQ ID NO: 1435833 - RNA, 19 nt, Artificial Sequence
  Description of Artificial Sequence: Synthetic oligonucleotide
  Antisense strand to SEQ ID NO: 1435832
uuuccuccgagacaccuuu

SEQ ID NO: 1435834 - RNA, 19 nt, Artificial Sequence
  Description of Artificial Sequence: Synthetic oligonucleotide
  Sense strand starting at position 2708 of SEQ ID NO: 1243713
cugcauuccgcuuaaccga

SEQ ID NO: 1435835 - RNA, 19 nt, Artificial Sequence
  Description of Artificial Sequence: Synthetic oligonucleotide
  Antisense strand to SEQ ID NO: 1435834
ucgguuaagcggaaugcag

SEQ ID NO: 1435836 - RNA, 19 nt, Artificial Sequence
  Description of Artificial Sequence: Synthetic oligonucleotide
  Sense strand starting at position 2716 of SEQ ID NO: 1243713
cgcuuaaccgaauaaccau

SEQ ID NO: 1435837 - RNA, 19 nt, Artificial Sequence
  Description of Artificial Sequence: Synthetic oligonucleotide
  Antisense strand to SEQ ID NO: 1435836
augguuauucgguuaagcg

SEQ ID NO: 1435838 - RNA, 19 nt, Artificial Sequence
  Description of Artificial Sequence: Synthetic oligonucleotide
  Sense strand starting at position 2722 of SEQ ID NO: 1243713
accgaauaaccaugcuaau

SEQ ID NO: 1435839 - RNA, 19 nt, Artificial Sequence
  Description of Artificial Sequence: Synthetic oligonucleotide
  Antisense strand to SEQ ID NO: 1435838
auuagcaugguuauucggu

SEQ ID NO: 1435840 - RNA, 19 nt, Artificial Sequence
  Description of Artificial Sequence: Synthetic oligonucleotide
  Sense strand starting at position 2732 of SEQ ID NO: 1243713
caugcuaauuaagcgagua

SEQ ID NO: 1435841 - RNA, 19 nt, Artificial Sequence
  Description of Artificial Sequence: Synthetic oligonucleotide
  Antisense strand to SEQ ID NO: 1435840
uacucgcuuaauuagcaug

SEQ ID NO: 1435842 - RNA, 19 nt, Artificial Sequence
  Description of Artificial Sequence: Synthetic oligonucleotide
  Sense strand starting at position 2733 of SEQ ID NO: 1243713
augcuaauuaagcgaguaa

SEQ ID NO: 1435843 - RNA, 19 nt, Artificial Sequence
  Description of Artificial Sequence: Synthetic oligonucleotide
  Antisense strand to SEQ ID NO: 1435842
uuacucgcuuaauuagcau

SEQ ID NO: 1435844 - RNA, 19 nt, Artificial Sequence
  Description of Artificial Sequence: Synthetic oligonucleotide
  Sense strand starting at position 2734 of SEQ ID NO: 1243713
ugcuaauuaagcgaguaau

SEQ ID NO: 1435845 - RNA, 19 nt, Artificial Sequence
  Description of Artificial Sequence: Synthetic oligonucleotide
  Antisense strand to SEQ ID NO: 1435844
auuacucgcuuaauuagca

SEQ ID NO: 1435846 - RNA, 19 nt, Artificial Sequence
  Description of Artificial Sequence: Synthetic oligonucleotide
  Sense strand starting at position 2834 of SEQ ID NO: 1243713
ucggcccauucuucugaau

SEQ ID NO: 1435847 - RNA, 19 nt, Artificial Sequence
  Description of Artificial Sequence: Synthetic oligonucleotide
  Antisense strand to SEQ ID NO: 1435846
auucagaagaaugggccga

SEQ ID NO: 1435848 - RNA, 19 nt, Artificial Sequence
  Description of Artificial Sequence: Synthetic oligonucleotide
  Sense strand starting at position 3020 of SEQ ID NO: 1243713
uccuguugaggcuguaaca

SEQ ID NO: 1435849 - RNA, 19 nt, Artificial Sequence
  Description of Artificial Sequence: Synthetic oligonucleotide
  Antisense strand to SEQ ID NO: 1435848
uguuacagccucaacagga

SEQ ID NO: 1435850 - RNA, 19 nt, Artificial Sequence
  Description of Artificial Sequence: Synthetic oligonucleotide
  Sense strand starting at position 3069 of SEQ ID NO: 1243713
ggaucuuccucugcggauu

SEQ ID NO: 1435851 - RNA, 19 nt, Artificial Sequence
  Description of Artificial Sequence: Synthetic oligonucleotide
  Antisense strand to SEQ ID NO: 1435850
aauccgcagaggaagaucc

SEQ ID NO: 1435852 - RNA, 19 nt, Artificial Sequence
  Description of Artificial Sequence: Synthetic oligonucleotide
  Sense strand starting at position 3150 of SEQ ID NO: 1243713
ccaaaucggcccugggauu

SEQ ID NO: 1435853 - RNA, 19 nt, Artificial Sequence
  Description of Artificial Sequence: Synthetic oligonucleotide
  Antisense strand to SEQ ID NO: 1435852
aaucccagggccgauuugg

SEQ ID NO: 1435854 - RNA, 19 nt, Artificial Sequence
  Description of Artificial Sequence: Synthetic oligonucleotide
  Sense strand starting at position 3440 of SEQ ID NO: 1243713
ggucggagccagugauaga

SEQ ID NO: 1435855 - RNA, 19 nt, Artificial Sequence
  Description of Artificial Sequence: Synthetic oligonucleotide
  Antisense strand to SEQ ID NO: 1435854
ucuaucacuggcuccgacc

SEQ ID NO: 1435856 - RNA, 19 nt, Artificial Sequence
  Description of Artificial Sequence: Synthetic oligonucleotide
  Sense strand starting at position 3441 of SEQ ID NO: 1243713
gucggagccagugauagaa

SEQ ID NO: 1435857 - RNA, 19 nt, Artificial Sequence
  Description of Artificial Sequence: Synthetic oligonucleotide
  Antisense strand to SEQ ID NO: 1435856
uucuaucacuggcuccgac

SEQ ID NO: 1435858 - RNA, 19 nt, Artificial Sequence
  Description of Artificial Sequence: Synthetic oligonucleotide
  Sense strand starting at position 3580 of SEQ ID NO: 1243713
ggagauggauaggcuugau

SEQ ID NO: 1435859 - RNA, 19 nt, Artificial Sequence
  Description of Artificial Sequence: Synthetic oligonucleotide
  Antisense strand to SEQ ID NO: 1435858
aucaagccuauccaucucc

SEQ ID NO: 1435860 - RNA, 19 nt, Artificial Sequence
  Description of Artificial Sequence: Synthetic oligonucleotide
  Sense strand starting at position 3583 of SEQ ID NO: 1243713
gauggauaggcuugauauu

SEQ ID NO: 1435861 - RNA, 19 nt, Artificial Sequence
  Description of Artificial Sequence: Synthetic oligonucleotide
  Antisense strand to SEQ ID NO: 1435860
aauaucaagccuauccauc

SEQ ID NO: 1435862 - RNA, 19 nt, Artificial Sequence
  Description of Artificial Sequence: Synthetic oligonucleotide
  Sense strand starting at position 3592 of SEQ ID NO: 1243713
gcuugauauuccuaauuag

SEQ ID NO: 1435863 - RNA, 19 nt, Artificial Sequence
  Description of Artificial Sequence: Synthetic oligonucleotide
  Antisense strand to SEQ ID NO: 1435862
cuaauuaggaauaucaagc

SEQ ID NO: 1435864 - RNA, 19 nt, Artificial Sequence
  Description of Artificial Sequence: Synthetic oligonucleotide
  Sense strand starting at position 3732 of SEQ ID NO: 1243713
acgucuuauuugcagacua

SEQ ID NO: 1435865 - RNA, 19 nt, Artificial Sequence
  Description of Artificial Sequence: Synthetic oligonucleotide
  Antisense strand to SEQ ID NO: 1435864
uagucugcaaauaagacgu

SEQ ID NO: 1435866 - RNA, 19 nt, Artificial Sequence
  Description of Artificial Sequence: Synthetic oligonucleotide
  Sense strand starting at position 3830 of SEQ ID NO: 1243713
aauauuuauucggagagcu

SEQ ID NO: 1435867 - RNA, 19 nt, Artificial Sequence
  Description of Artificial Sequence: Synthetic oligonucleotide
  Antisense strand to SEQ ID NO: 1435866
agcucuccgaauaaauauu

SEQ ID NO: 1435868 - RNA, 19 nt, Artificial Sequence
  Description of Artificial Sequence: Synthetic oligonucleotide
  Sense strand starting at position 3880 of SEQ ID NO: 1243713
gaguucucuuugucuggca

SEQ ID NO: 1435869 - RNA, 19 nt, Artificial Sequence
  Description of Artificial Sequence: Synthetic oligonucleotide
  Antisense strand to SEQ ID NO: 1435868
ugccagacaaagagaacuc

SEQ ID NO: 1435870 - RNA, 19 nt, Artificial Sequence
  Description of Artificial Sequence: Synthetic oligonucleotide
  Sense strand starting at position 3881 of SEQ ID NO: 1243713
aguucucuuugucuggcaa

SEQ ID NO: 1435871 - RNA, 19 nt, Artificial Sequence
  Description of Artificial Sequence: Synthetic oligonucleotide
  Antisense strand to SEQ ID NO: 1435870
uugccagacaaagagaacu

SEQ ID NO: 1435872 - RNA, 19 nt, Artificial Sequence
  Description of Artificial Sequence: Synthetic oligonucleotide
  Sense strand starting at position 192 of SEQ ID NO: 1243714
gccaacucucaccacgaaa

SEQ ID NO: 1435873 - RNA, 19 nt, Artificial Sequence
  Description of Artificial Sequence: Synthetic oligonucleotide
  Antisense strand to SEQ ID NO: 1435872
uuucguggugagaguuggc

SEQ ID NO: 1435874 - RNA, 19 nt, Artificial Sequence
  Description of Artificial Sequence: Synthetic oligonucleotide
  Sense strand starting at position 203 of SEQ ID NO: 1243714
ccacgaaaguuccugcuuu

SEQ ID NO: 1435875 - RNA, 19 nt, Artificial Sequence
  Description of Artificial Sequence: Synthetic oligonucleotide
  Antisense strand to SEQ ID NO: 1435874
aaagcaggaacuuucgugg

SEQ ID NO: 1435876 - RNA, 19 nt, Artificial Sequence
  Description of Artificial Sequence: Synthetic oligonucleotide
  Sense strand starting at position 294 of SEQ ID NO: 1243714
acaaacaagucguaaugga

SEQ ID NO: 1435877 - RNA, 19 nt, Artificial Sequence
  Description of Artificial Sequence: Synthetic oligonucleotide
  Antisense strand to SEQ ID NO: 1435876
uccauuacgacuuguuugu

SEQ ID NO: 1435878 - RNA, 19 nt, Artificial Sequence
  Description of Artificial Sequence: Synthetic oligonucleotide
  Sense strand starting at position 390 of SEQ ID NO: 1243714
ugccacagacucugugaaa

SEQ ID NO: 1435879 - RNA, 19 nt, Artificial Sequence
  Description of Artificial Sequence: Synthetic oligonucleotide
  Antisense strand to SEQ ID NO: 1435878
uuucacagagucuguggca

SEQ ID NO: 1435880 - RNA, 19 nt, Artificial Sequence
  Description of Artificial Sequence: Synthetic oligonucleotide
  Sense strand starting at position 391 of SEQ ID NO: 1243714
gccacagacucugugaaac

SEQ ID NO: 1435881 - RNA, 19 nt, Artificial Sequence
  Description of Artificial Sequence: Synthetic oligonucleotide
  Antisense strand to SEQ ID NO: 1435880
guuucacagagucuguggc

SEQ ID NO: 1435882 - RNA, 19 nt, Artificial Sequence
  Description of Artificial Sequence: Synthetic oligonucleotide
  Sense strand starting at position 495 of SEQ ID NO: 1243714
ggcuuuaggacucaucuag

SEQ ID NO: 1435883 - RNA, 19 nt, Artificial Sequence
  Description of Artificial Sequence: Synthetic oligonucleotide
  Antisense strand to SEQ ID NO: 1435882
cuagaugaguccuaaagcc

SEQ ID NO: 1435884 - RNA, 19 nt, Artificial Sequence
  Description of Artificial Sequence: Synthetic oligonucleotide
  Sense strand starting at position 499 of SEQ ID NO: 1243714
uuaggacucaucuagucga

SEQ ID NO: 1435885 - RNA, 19 nt, Artificial Sequence
  Description of Artificial Sequence: Synthetic oligonucleotide
  Antisense strand to SEQ ID NO: 1435884
ucgacuagaugaguccuaa

SEQ ID NO: 1435886 - RNA, 19 nt, Artificial Sequence
  Description of Artificial Sequence: Synthetic oligonucleotide
  Sense strand starting at position 565 of SEQ ID NO: 1243714
ucacaagcuuuauugaaag

SEQ ID NO: 1435887 - RNA, 19 nt, Artificial Sequence
  Description of Artificial Sequence: Synthetic oligonucleotide
  Antisense strand to SEQ ID NO: 1435886
cuuucaauaaagcuuguga

SEQ ID NO: 1435888 - RNA, 19 nt, Artificial Sequence
  Description of Artificial Sequence: Synthetic oligonucleotide
  Sense strand starting at position 781 of SEQ ID NO: 1243714
cagcgacugccggguaaau

SEQ ID NO: 1435889 - RNA, 19 nt, Artificial Sequence
  Description of Artificial Sequence: Synthetic oligonucleotide
  Antisense strand to SEQ ID NO: 1435888
auuuacccggcagucgcug

SEQ ID NO: 1435890 - RNA, 19 nt, Artificial Sequence
  Description of Artificial Sequence: Synthetic oligonucleotide
  Sense strand starting at position 903 of SEQ ID NO: 1243714
ggguuucuccucugagaaa

SEQ ID NO: 1435891 - RNA, 19 nt, Artificial Sequence
  Description of Artificial Sequence: Synthetic oligonucleotide
  Antisense strand to SEQ ID NO: 1435890
uuucucagaggagaaaccc

SEQ ID NO: 1435892 - RNA, 19 nt, Artificial Sequence
  Description of Artificial Sequence: Synthetic oligonucleotide
  Sense strand starting at position 1090 of SEQ ID NO: 1243714
ccugucauuucgcagacga

SEQ ID NO: 1435893 - RNA, 19 nt, Artificial Sequence
  Description of Artificial Sequence: Synthetic oligonucleotide
  Antisense strand to SEQ ID NO: 1435892
ucgucugcgaaaugacagg

SEQ ID NO: 1435894 - RNA, 19 nt, Artificial Sequence
  Description of Artificial Sequence: Synthetic oligonucleotide
  Sense strand starting at position 1115 of SEQ ID NO: 1243714
ggaugccacucuuaacaca

SEQ ID NO: 1435895 - RNA, 19 nt, Artificial Sequence
  Description of Artificial Sequence: Synthetic oligonucleotide
  Antisense strand to SEQ ID NO: 1435894
uguguuaagaguggcaucc

SEQ ID NO: 1435896 - RNA, 19 nt, Artificial Sequence
  Description of Artificial Sequence: Synthetic oligonucleotide
  Sense strand starting at position 1187 of SEQ ID NO: 1243714
gcgguuacauaagaugaua

SEQ ID NO: 1435897 - RNA, 19 nt, Artificial Sequence
  Description of Artificial Sequence: Synthetic oligonucleotide
  Antisense strand to SEQ ID NO: 1435896
uaucaucuuauguaaccgc

SEQ ID NO: 1435898 - RNA, 19 nt, Artificial Sequence
  Description of Artificial Sequence: Synthetic oligonucleotide
  Sense strand starting at position 1205 of SEQ ID NO: 1243714
agauuauccguccacccau

SEQ ID NO: 1435899 - RNA, 19 nt, Artificial Sequence
  Description of Artificial Sequence: Synthetic oligonucleotide
  Antisense strand to SEQ ID NO: 1435898
auggguggacggauaaucu

SEQ ID NO: 1435900 - RNA, 19 nt, Artificial Sequence
  Description of Artificial Sequence: Synthetic oligonucleotide
  Sense strand starting at position 1292 of SEQ ID NO: 1243714
gggaaagccuguugagaau

SEQ ID NO: 1435901 - RNA, 19 nt, Artificial Sequence
  Description of Artificial Sequence: Synthetic oligonucleotide
  Antisense strand to SEQ ID NO: 1435900
auucucaacaggcuuuccc

SEQ ID NO: 1435902 - RNA, 19 nt, Artificial Sequence
  Description of Artificial Sequence: Synthetic oligonucleotide
  Sense strand starting at position 1295 of SEQ ID NO: 1243714
aaagccuguugagaaugaa

SEQ ID NO: 1435903 - RNA, 19 nt, Artificial Sequence
  Description of Artificial Sequence: Synthetic oligonucleotide
  Antisense strand to SEQ ID NO: 1435902
uucauucucaacaggcuuu

SEQ ID NO: 1435904 - RNA, 19 nt, Artificial Sequence
  Description of Artificial Sequence: Synthetic oligonucleotide
  Sense strand starting at position 1298 of SEQ ID NO: 1243714
gccuguugagaaugaagug

SEQ ID NO: 1435905 - RNA, 19 nt, Artificial Sequence
  Description of Artificial Sequence: Synthetic oligonucleotide
  Antisense strand to SEQ ID NO: 1435904
cacuucauucucaacaggc

SEQ ID NO: 1435906 - RNA, 19 nt, Artificial Sequence
  Description of Artificial Sequence: Synthetic oligonucleotide
  Sense strand starting at position 1832 of SEQ ID NO: 1243714
gcgcucaccuuauagacau

SEQ ID NO: 1435907 - RNA, 19 nt, Artificial Sequence
  Description of Artificial Sequence: Synthetic oligonucleotide
  Antisense strand to SEQ ID NO: 1435906
augucuauaaggugagcgc

SEQ ID NO: 1435908 - RNA, 19 nt, Artificial Sequence
  Description of Artificial Sequence: Synthetic oligonucleotide
  Sense strand starting at position 2176 of SEQ ID NO: 1243714
auugguggguuccggagaa

SEQ ID NO: 1435909 - RNA, 19 nt, Artificial Sequence
  Description of Artificial Sequence: Synthetic oligonucleotide
  Antisense strand to SEQ ID NO: 1435908
uucuccggaacccaccaau

SEQ ID NO: 1435910 - RNA, 19 nt, Artificial Sequence
  Description of Artificial Sequence: Synthetic oligonucleotide
  Sense strand starting at position 2751 of SEQ ID NO: 1243714
gagggaggauccugcagaa

SEQ ID NO: 1435911 - RNA, 19 nt, Artificial Sequence
  Description of Artificial Sequence: Synthetic oligonucleotide
  Antisense strand to SEQ ID NO: 1435910
uucugcaggauccucccuc

SEQ ID NO: 1435912 - RNA, 19 nt, Artificial Sequence
  Description of Artificial Sequence: Synthetic oligonucleotide
  Sense strand starting at position 2754 of SEQ ID NO: 1243714
ggaggauccugcagaaggu

SEQ ID NO: 1435913 - RNA, 19 nt, Artificial Sequence
  Description of Artificial Sequence: Synthetic oligonucleotide
  Antisense strand to SEQ ID NO: 1435912
accuucugcaggauccucc

SEQ ID NO: 1435914 - RNA, 19 nt, Artificial Sequence
  Description of Artificial Sequence: Synthetic oligonucleotide
  Sense strand starting at position 2985 of SEQ ID NO: 1243714
ucagaagauucucguugga

SEQ ID NO: 1435915 - RNA, 19 nt, Artificial Sequence
  Description of Artificial Sequence: Synthetic oligonucleotide
  Antisense strand to SEQ ID NO: 1435914
uccaacgagaaucuucuga

SEQ ID NO: 1435916 - RNA, 19 nt, Artificial Sequence
  Description of Artificial Sequence: Synthetic oligonucleotide
  Sense strand starting at position 2987 of SEQ ID NO: 1243714
agaagauucucguuggagg

SEQ ID NO: 1435917 - RNA, 19 nt, Artificial Sequence
  Description of Artificial Sequence: Synthetic oligonucleotide
  Antisense strand to SEQ ID NO: 1435916
ccuccaacgagaaucuucu

SEQ ID NO: 1435918 - RNA, 19 nt, Artificial Sequence
  Description of Artificial Sequence: Synthetic oligonucleotide
  Sense strand starting at position 3002 of SEQ ID NO: 1243714
gaggcaguuuacugagaga

SEQ ID NO: 1435919 - RNA, 19 nt, Artificial Sequence
  Description of Artificial Sequence: Synthetic oligonucleotide
  Antisense strand to SEQ ID NO: 1435918
ucucucaguaaacugccuc

SEQ ID NO: 1435920 - RNA, 19 nt, Artificial Sequence
  Description of Artificial Sequence: Synthetic oligonucleotide
  Sense strand starting at position 3020 of SEQ ID NO: 1243714
agagaggucucgggaagga

SEQ ID NO: 1435921 - RNA, 19 nt, Artificial Sequence
  Description of Artificial Sequence: Synthetic oligonucleotide
  Antisense strand to SEQ ID NO: 1435920
uccuucccgagaccucucu

SEQ ID NO: 1435922 - RNA, 19 nt, Artificial Sequence
  Description of Artificial Sequence: Synthetic oligonucleotide
  Sense strand starting at position 3108 of SEQ ID NO: 1243714
ggaaccuuguaggaggaau

SEQ ID NO: 1435923 - RNA, 19 nt, Artificial Sequence
  Description of Artificial Sequence: Synthetic oligonucleotide
  Antisense strand to SEQ ID NO: 1435922
auuccuccuacaagguucc

SEQ ID NO: 1435924 - RNA, 19 nt, Artificial Sequence
  Description of Artificial Sequence: Synthetic oligonucleotide
  Sense strand starting at position 3154 of SEQ ID NO: 1243714
uaggaaggguccugcuuaa

SEQ ID NO: 1435925 - RNA, 19 nt, Artificial Sequence
  Description of Artificial Sequence: Synthetic oligonucleotide
  Antisense strand to SEQ ID NO: 1435924
uuaagcaggacccuuccua

SEQ ID NO: 1435926 - RNA, 19 nt, Artificial Sequence
  Description of Artificial Sequence: Synthetic oligonucleotide
  Sense strand starting at position 3223 of SEQ ID NO: 1243714
caggucucccgguacaauu

SEQ ID NO: 1435927 - RNA, 19 nt, Artificial Sequence
  Description of Artificial Sequence: Synthetic oligonucleotide
  Antisense strand to SEQ ID NO: 1435926
aauuguaccgggagaccug

SEQ ID NO: 1435928 - RNA, 19 nt, Artificial Sequence
  Description of Artificial Sequence: Synthetic oligonucleotide
  Sense strand starting at position 3234 of SEQ ID NO: 1243714
guacaauucccguggagaa

SEQ ID NO: 1435929 - RNA, 19 nt, Artificial Sequence
  Description of Artificial Sequence: Synthetic oligonucleotide
  Antisense strand to SEQ ID NO: 1435928
uucuccacgggaauuguac

SEQ ID NO: 1435930 - RNA, 19 nt, Artificial Sequence
  Description of Artificial Sequence: Synthetic oligonucleotide
  Sense strand starting at position 3235 of SEQ ID NO: 1243714
uacaauucccguggagaaa

SEQ ID NO: 1435931 - RNA, 19 nt, Artificial Sequence
  Description of Artificial Sequence: Synthetic oligonucleotide
  Antisense strand to SEQ ID NO: 1435930
uuucuccacgggaauugua

SEQ ID NO: 1435932 - RNA, 19 nt, Artificial Sequence
  Description of Artificial Sequence: Synthetic oligonucleotide
  Sense strand starting at position 3311 of SEQ ID NO: 1243714
agaucugagcguuuccguu

SEQ ID NO: 1435933 - RNA, 19 nt, Artificial Sequence
  Description of Artificial Sequence: Synthetic oligonucleotide
  Antisense strand to SEQ ID NO: 1435932
aacggaaacgcucagaucu

SEQ ID NO: 1435934 - RNA, 19 nt, Artificial Sequence
  Description of Artificial Sequence: Synthetic oligonucleotide
  Sense strand starting at position 3313 of SEQ ID NO: 1243714
aucugagcguuuccguuua

SEQ ID NO: 1435935 - RNA, 19 nt, Artificial Sequence
  Description of Artificial Sequence: Synthetic oligonucleotide
  Antisense strand to SEQ ID NO: 1435934
uaaacggaaacgcucagau

SEQ ID NO: 1435936 - RNA, 19 nt, Artificial Sequence
  Description of Artificial Sequence: Synthetic oligonucleotide
  Sense strand starting at position 3315 of SEQ ID NO: 1243714
cugagcguuuccguuuaau

SEQ ID NO: 1435937 - RNA, 19 nt, Artificial Sequence
  Description of Artificial Sequence: Synthetic oligonucleotide
  Antisense strand to SEQ ID NO: 1435936
auuaaacggaaacgcucag

SEQ ID NO: 1435938 - RNA, 19 nt, Artificial Sequence
  Description of Artificial Sequence: Synthetic oligonucleotide
  Sense strand starting at position 3318 of SEQ ID NO: 1243714
agcguuuccguuuaaugaa

SEQ ID NO: 1435939 - RNA, 19 nt, Artificial Sequence
  Description of Artificial Sequence: Synthetic oligonucleotide
  Antisense strand to SEQ ID NO: 1435938
uucauuaaacggaaacgcu

SEQ ID NO: 1435940 - RNA, 19 nt, Artificial Sequence
  Description of Artificial Sequence: Synthetic oligonucleotide
  Sense strand starting at position 3588 of SEQ ID NO: 1243714
ucuuuauugucuccagugu

SEQ ID NO: 1435941 - RNA, 19 nt, Artificial Sequence
  Description of Artificial Sequence: Synthetic oligonucleotide
  Antisense strand to SEQ ID NO: 1435940
acacuggagacaauaaaga

SEQ ID NO: 1435942 - RNA, 19 nt, Artificial Sequence
  Description of Artificial Sequence: Synthetic oligonucleotide
  Sense strand starting at position 3589 of SEQ ID NO: 1243714
cuuuauugucuccaguguu

SEQ ID NO: 1435943 - RNA, 19 nt, Artificial Sequence
  Description of Artificial Sequence: Synthetic oligonucleotide
  Antisense strand to SEQ ID NO: 1435942
aacacuggagacaauaaag

SEQ ID NO: 1435944 - RNA, 19 nt, Artificial Sequence
  Description of Artificial Sequence: Synthetic oligonucleotide
  Sense strand starting at position 3612 of SEQ ID NO: 1243714
gguagaucccuguguauuu

SEQ ID NO: 1435945 - RNA, 19 nt, Artificial Sequence
  Description of Artificial Sequence: Synthetic oligonucleotide
  Antisense strand to SEQ ID NO: 1435944
aaauacacagggaucuacc

SEQ ID NO: 1435946 - RNA, 19 nt, Artificial Sequence
  Description of Artificial Sequence: Synthetic oligonucleotide
  Sense strand starting at position 3613 of SEQ ID NO: 1243714
guagaucccuguguauuua

SEQ ID NO: 1435947 - RNA, 19 nt, Artificial Sequence
  Description of Artificial Sequence: Synthetic oligonucleotide
  Antisense strand to SEQ ID NO: 1435946
uaaauacacagggaucuac

SEQ ID NO: 1435948 - RNA, 19 nt, Artificial Sequence
  Description of Artificial Sequence: Synthetic oligonucleotide
  Sense strand starting at position 3646 of SEQ ID NO: 1243714
uuuggugguaaaugacaga

SEQ ID NO: 1435949 - RNA, 19 nt, Artificial Sequence
  Description of Artificial Sequence: Synthetic oligonucleotide
  Antisense strand to SEQ ID NO: 1435948
ucugucauuuaccaccaaa

SEQ ID NO: 1435950 - RNA, 19 nt, Artificial Sequence
  Description of Artificial Sequence: Synthetic oligonucleotide
  Sense strand starting at position 3660 of SEQ ID NO: 1243714
acagaaagcucgcucaaac

SEQ ID NO: 1435951 - RNA, 19 nt, Artificial Sequence
  Description of Artificial Sequence: Synthetic oligonucleotide
  Antisense strand to SEQ ID NO: 1435950
guuugagcgagcuuucugu

SEQ ID NO: 1435952 - RNA, 19 nt, Artificial Sequence
  Description of Artificial Sequence: Synthetic oligonucleotide
  Sense strand starting at position 14 of SEQ ID NO: 1243715
uuuguuaaaccuggaguuu

SEQ ID NO: 1435953 - RNA, 19 nt, Artificial Sequence
  Description of Artificial Sequence: Synthetic oligonucleotide
  Antisense strand to SEQ ID NO: 1435952
aaacuccagguuuaacaaa

SEQ ID NO: 1435954 - RNA, 19 nt, Artificial Sequence
  Description of Artificial Sequence: Synthetic oligonucleotide
  Sense strand starting at position 15 of SEQ ID NO: 1243715
uuguuaaaccuggaguuug

SEQ ID NO: 1435955 - RNA, 19 nt, Artificial Sequence
  Description of Artificial Sequence: Synthetic oligonucleotide
  Antisense strand to SEQ ID NO: 1435954
caaacuccagguuuaacaa

SEQ ID NO: 1435956 - RNA, 19 nt, Artificial Sequence
  Description of Artificial Sequence: Synthetic oligonucleotide
  Sense strand starting at position 87 of SEQ ID NO: 1243715
ugcugaauacgucaacuua

SEQ ID NO: 1435957 - RNA, 19 nt, Artificial Sequence
  Description of Artificial Sequence: Synthetic oligonucleotide
  Antisense strand to SEQ ID NO: 1435956
uaaguugacguauucagca

SEQ ID NO: 1435958 - RNA, 19 nt, Artificial Sequence
  Description of Artificial Sequence: Synthetic oligonucleotide
  Sense strand starting at position 119 of SEQ ID NO: 1243715
ucauuuggucuuggcaauu

SEQ ID NO: 1435959 - RNA, 19 nt, Artificial Sequence
  Description of Artificial Sequence: Synthetic oligonucleotide
  Antisense strand to SEQ ID NO: 1435958
aauugccaagaccaaauga

SEQ ID NO: 1435960 - RNA, 19 nt, Artificial Sequence
  Description of Artificial Sequence: Synthetic oligonucleotide
  Sense strand starting at position 207 of SEQ ID NO: 1243715
accuaaauguuaguauucu

SEQ ID NO: 1435961 - RNA, 19 nt, Artificial Sequence
  Description of Artificial Sequence: Synthetic oligonucleotide
  Antisense strand to SEQ ID NO: 1435960
agaauacuaacauuuaggu

SEQ ID NO: 1435962 - RNA, 19 nt, Artificial Sequence
  Description of Artificial Sequence: Synthetic oligonucleotide
  Sense strand starting at position 211 of SEQ ID NO: 1243715
aaauguuaguauucugagu

SEQ ID NO: 1435963 - RNA, 19 nt, Artificial Sequence
  Description of Artificial Sequence: Synthetic oligonucleotide
  Antisense strand to SEQ ID NO: 1435962
acucagaauacuaacauuu

SEQ ID NO: 1435964 - RNA, 19 nt, Artificial Sequence
  Description of Artificial Sequence: Synthetic oligonucleotide
  Sense strand starting at position 216 of SEQ ID NO: 1243715
uuaguauucugaguaaucu

SEQ ID NO: 1435965 - RNA, 19 nt, Artificial Sequence
  Description of Artificial Sequence: Synthetic oligonucleotide
  Antisense strand to SEQ ID NO: 1435964
agauuacucagaauacuaa

SEQ ID NO: 1435966 - RNA, 19 nt, Artificial Sequence
  Description of Artificial Sequence: Synthetic oligonucleotide
  Sense strand starting at position 242 of SEQ ID NO: 1243715
agcuauuggguuuaucuga

SEQ ID NO: 1435967 - RNA, 19 nt, Artificial Sequence
  Description of Artificial Sequence: Synthetic oligonucleotide
  Antisense strand to SEQ ID NO: 1435966
ucagauaaacccaauagcu

SEQ ID NO: 1435968 - RNA, 19 nt, Artificial Sequence
  Description of Artificial Sequence: Synthetic oligonucleotide
  Sense strand starting at position 257 of SEQ ID NO: 1243715
cugaaaugugcuuacguga

SEQ ID NO: 1435969 - RNA, 19 nt, Artificial Sequence
  Description of Artificial Sequence: Synthetic oligonucleotide
  Antisense strand to SEQ ID NO: 1435968
ucacguaagcacauuucag

SEQ ID NO: 1435970 - RNA, 19 nt, Artificial Sequence
  Description of Artificial Sequence: Synthetic oligonucleotide
  Sense strand starting at position 422 of SEQ ID NO: 1243715
gaggaagauuuaugauuac

SEQ ID NO: 1435971 - RNA, 19 nt, Artificial Sequence
  Description of Artificial Sequence: Synthetic oligonucleotide
  Antisense strand to SEQ ID NO: 1435970
guaaucauaaaucuuccuc

SEQ ID NO: 1435972 - RNA, 19 nt, Artificial Sequence
  Description of Artificial Sequence: Synthetic oligonucleotide
  Sense strand starting at position 466 of SEQ ID NO: 1243715
gccucaaauguaggaaacu

SEQ ID NO: 1435973 - RNA, 19 nt, Artificial Sequence
  Description of Artificial Sequence: Synthetic oligonucleotide
  Antisense strand to SEQ ID NO: 1435972
aguuuccuacauuugaggc

SEQ ID NO: 1435974 - RNA, 19 nt, Artificial Sequence
  Description of Artificial Sequence: Synthetic oligonucleotide
  Sense strand starting at position 475 of SEQ ID NO: 1243715
guaggaaacuuucccagaa

SEQ ID NO: 1435975 - RNA, 19 nt, Artificial Sequence
  Description of Artificial Sequence: Synthetic oligonucleotide
  Antisense strand to SEQ ID NO: 1435974
uucugggaaaguuuccuac

SEQ ID NO: 1435976 - RNA, 19 nt, Artificial Sequence
  Description of Artificial Sequence: Synthetic oligonucleotide
  Sense strand starting at position 1188 of SEQ ID NO: 1243715
aguagcaaguagucaaaua

SEQ ID NO: 1435977 - RNA, 19 nt, Artificial Sequence
  Description of Artificial Sequence: Synthetic oligonucleotide
  Antisense strand to SEQ ID NO: 1435976
uauuugacuacuugcuacu

SEQ ID NO: 1435978 - RNA, 19 nt, Artificial Sequence
  Description of Artificial Sequence: Synthetic oligonucleotide
  Sense strand starting at position 1259 of SEQ ID NO: 1243715
aguaaauccugauccuaga

SEQ ID NO: 1435979 - RNA, 19 nt, Artificial Sequence
  Description of Artificial Sequence: Synthetic oligonucleotide
  Antisense strand to SEQ ID NO: 1435978
ucuaggaucaggauuuacu

SEQ ID NO: 1435980 - RNA, 19 nt, Artificial Sequence
  Description of Artificial Sequence: Synthetic oligonucleotide
  Sense strand starting at position 1289 of SEQ ID NO: 1243715
cccucugaaucacugagau

SEQ ID NO: 1435981 - RNA, 19 nt, Artificial Sequence
  Description of Artificial Sequence: Synthetic oligonucleotide
  Antisense strand to SEQ ID NO: 1435980
aucucagugauucagaggg

SEQ ID NO: 1435982 - RNA, 19 nt, Artificial Sequence
  Description of Artificial Sequence: Synthetic oligonucleotide
  Sense strand starting at position 1322 of SEQ ID NO: 1243715
gucggcuugguuaagguua

SEQ ID NO: 1435983 - RNA, 19 nt, Artificial Sequence
  Description of Artificial Sequence: Synthetic oligonucleotide
  Antisense strand to SEQ ID NO: 1435982
uaaccuuaaccaagccgac

SEQ ID NO: 1435984 - RNA, 19 nt, Artificial Sequence
  Description of Artificial Sequence: Synthetic oligonucleotide
  Sense strand starting at position 2100 of SEQ ID NO: 1243715
ccuucugaauguguccaau

SEQ ID NO: 1435985 - RNA, 19 nt, Artificial Sequence
  Description of Artificial Sequence: Synthetic oligonucleotide
  Antisense strand to SEQ ID NO: 1435984
auuggacacauucagaagg

SEQ ID NO: 1435986 - RNA, 19 nt, Artificial Sequence
  Description of Artificial Sequence: Synthetic oligonucleotide
  Sense strand starting at position 2168 of SEQ ID NO: 1243715
cgaggugucagguucgguu

SEQ ID NO: 1435987 - RNA, 19 nt, Artificial Sequence
  Description of Artificial Sequence: Synthetic oligonucleotide
  Antisense strand to SEQ ID NO: 1435986
aaccgaaccugacaccucg

SEQ ID NO: 1435988 - RNA, 19 nt, Artificial Sequence
  Description of Artificial Sequence: Synthetic oligonucleotide
  Sense strand starting at position 2328 of SEQ ID NO: 1243715
cagggagacuggucuguuu

SEQ ID NO: 1435989 - RNA, 19 nt, Artificial Sequence
  Description of Artificial Sequence: Synthetic oligonucleotide
  Antisense strand to SEQ ID NO: 1435988
aaacagaccagucucccug

SEQ ID NO: 1435990 - RNA, 19 nt, Artificial Sequence
  Description of Artificial Sequence: Synthetic oligonucleotide
  Sense strand starting at position 2330 of SEQ ID NO: 1243715
gggagacuggucuguuuac

SEQ ID NO: 1435991 - RNA, 19 nt, Artificial Sequence
  Description of Artificial Sequence: Synthetic oligonucleotide
  Antisense strand to SEQ ID NO: 1435990
guaaacagaccagucuccc

SEQ ID NO: 1435992 - RNA, 19 nt, Artificial Sequence
  Description of Artificial Sequence: Synthetic oligonucleotide
  Sense strand starting at position 2331 of SEQ ID NO: 1243715
ggagacuggucuguuuaca

SEQ ID NO: 1435993 - RNA, 19 nt, Artificial Sequence
  Description of Artificial Sequence: Synthetic oligonucleotide
  Antisense strand to SEQ ID NO: 1435992
uguaaacagaccagucucc

SEQ ID NO: 1435994 - RNA, 19 nt, Artificial Sequence
  Description of Artificial Sequence: Synthetic oligonucleotide
  Sense strand starting at position 2455 of SEQ ID NO: 1243715
gcccuuggcgauguguuua

SEQ ID NO: 1435995 - RNA, 19 nt, Artificial Sequence
  Description of Artificial Sequence: Synthetic oligonucleotide
  Antisense strand to SEQ ID NO: 1435994
uaaacacaucgccaagggc

SEQ ID NO: 1435996 - RNA, 19 nt, Artificial Sequence
  Description of Artificial Sequence: Synthetic oligonucleotide
  Sense strand starting at position 2558 of SEQ ID NO: 1243715
caauuugagcuagguuugu

SEQ ID NO: 1435997 - RNA, 19 nt, Artificial Sequence
  Description of Artificial Sequence: Synthetic oligonucleotide
  Antisense strand to SEQ ID NO: 1435996
acaaaccuagcucaaauug

SEQ ID NO: 1435998 - RNA, 19 nt, Artificial Sequence
  Description of Artificial Sequence: Synthetic oligonucleotide
  Sense strand starting at position 2602 of SEQ ID NO: 1243715
ucucccuuauuguugaaga

SEQ ID NO: 1435999 - RNA, 19 nt, Artificial Sequence
  Description of Artificial Sequence: Synthetic oligonucleotide
  Antisense strand to SEQ ID NO: 1435998
ucuucaacaauaagggaga

SEQ ID NO: 1436000 - RNA, 19 nt, Artificial Sequence
  Description of Artificial Sequence: Synthetic oligonucleotide
  Sense strand starting at position 2604 of SEQ ID NO: 1243715
ucccuuauuguugaagauc

SEQ ID NO: 1436001 - RNA, 19 nt, Artificial Sequence
  Description of Artificial Sequence: Synthetic oligonucleotide
  Antisense strand to SEQ ID NO: 1436000
gaucuucaacaauaaggga

SEQ ID NO: 1436002 - RNA, 19 nt, Artificial Sequence
  Description of Artificial Sequence: Synthetic oligonucleotide
  Sense strand starting at position 2678 of SEQ ID NO: 1243715
cugacugacuucuugaaca

SEQ ID NO: 1436003 - RNA, 19 nt, Artificial Sequence
  Description of Artificial Sequence: Synthetic oligonucleotide
  Antisense strand to SEQ ID NO: 1436002
uguucaagaagucagucag

SEQ ID NO: 1436004 - RNA, 19 nt, Artificial Sequence
  Description of Artificial Sequence: Synthetic oligonucleotide
  Sense strand starting at position 2773 of SEQ ID NO: 1243715
gaggguauagcuuauuaac

SEQ ID NO: 1436005 - RNA, 19 nt, Artificial Sequence
  Description of Artificial Sequence: Synthetic oligonucleotide
  Antisense strand to SEQ ID NO: 1436004
guuaauaagcuauacccuc

SEQ ID NO: 1436006 - RNA, 19 nt, Artificial Sequence
  Description of Artificial Sequence: Synthetic oligonucleotide
  Sense strand starting at position 2775 of SEQ ID NO: 1243715
ggguauagcuuauuaacag

SEQ ID NO: 1436007 - RNA, 19 nt, Artificial Sequence
  Description of Artificial Sequence: Synthetic oligonucleotide
  Antisense strand to SEQ ID NO: 1436006
cuguuaauaagcuauaccc

SEQ ID NO: 1436008 - RNA, 19 nt, Artificial Sequence
  Description of Artificial Sequence: Synthetic oligonucleotide
  Sense strand starting at position 3064 of SEQ ID NO: 1243715
gacagagagucccucucaa

SEQ ID NO: 1436009 - RNA, 19 nt, Artificial Sequence
  Description of Artificial Sequence: Synthetic oligonucleotide
  Antisense strand to SEQ ID NO: 1436008
uugagagggacucucuguc

SEQ ID NO: 1436010 - RNA, 19 nt, Artificial Sequence
  Description of Artificial Sequence: Synthetic oligonucleotide
  Sense strand starting at position 3301 of SEQ ID NO: 1243715
ccuugccaacuuugugaaa

SEQ ID NO: 1436011 - RNA, 19 nt, Artificial Sequence
  Description of Artificial Sequence: Synthetic oligonucleotide
  Antisense strand to SEQ ID NO: 1436010
uuucacaaaguuggcaagg

SEQ ID NO: 1436012 - RNA, 19 nt, Artificial Sequence
  Description of Artificial Sequence: Synthetic oligonucleotide
  Sense strand starting at position 3410 of SEQ ID NO: 1243715
gcuugaauccgagauguga

SEQ ID NO: 1436013 - RNA, 19 nt, Artificial Sequence
  Description of Artificial Sequence: Synthetic oligonucleotide
  Antisense strand to SEQ ID NO: 1436012
ucacaucucggauucaagc

SEQ ID NO: 1436014 - RNA, 19 nt, Artificial Sequence
  Description of Artificial Sequence: Synthetic oligonucleotide
  Sense strand starting at position 3412 of SEQ ID NO: 1243715
uugaauccgagaugugaag

SEQ ID NO: 1436015 - RNA, 19 nt, Artificial Sequence
  Description of Artificial Sequence: Synthetic oligonucleotide
  Antisense strand to SEQ ID NO: 1436014
cuucacaucucggauucaa

SEQ ID NO: 1436016 - RNA, 19 nt, Artificial Sequence
  Description of Artificial Sequence: Synthetic oligonucleotide
  Sense strand starting at position 3554 of SEQ ID NO: 1243715
cuugauaaugugggauuga

SEQ ID NO: 1436017 - RNA, 19 nt, Artificial Sequence
  Description of Artificial Sequence: Synthetic oligonucleotide
  Antisense strand to SEQ ID NO: 1436016
ucaaucccacauuaucaag

SEQ ID NO: 1436018 - RNA, 19 nt, Artificial Sequence
  Description of Artificial Sequence: Synthetic oligonucleotide
  Sense strand starting at position 3578 of SEQ ID NO: 1243715
cuugauaauguggaauugu

SEQ ID NO: 1436019 - RNA, 19 nt, Artificial Sequence
  Description of Artificial Sequence: Synthetic oligonucleotide
  Antisense strand to SEQ ID NO: 1436018
acaauuccacauuaucaag

SEQ ID NO: 1436020 - RNA, 19 nt, Artificial Sequence
  Description of Artificial Sequence: Synthetic oligonucleotide
  Sense strand starting at position 3661 of SEQ ID NO: 1243715
aucggugauaucuaaguua

SEQ ID NO: 1436021 - RNA, 19 nt, Artificial Sequence
  Description of Artificial Sequence: Synthetic oligonucleotide
  Antisense strand to SEQ ID NO: 1436020
uaacuuagauaucaccgau

SEQ ID NO: 1436022 - RNA, 19 nt, Artificial Sequence
  Description of Artificial Sequence: Synthetic oligonucleotide
  Sense strand starting at position 3664 of SEQ ID NO: 1243715
ggugauaucuaaguuaacu

SEQ ID NO: 1436023 - RNA, 19 nt, Artificial Sequence
  Description of Artificial Sequence: Synthetic oligonucleotide
  Antisense strand to SEQ ID NO: 1436022
aguuaacuuagauaucacc

SEQ ID NO: 1436024 - RNA, 19 nt, Artificial Sequence
  Description of Artificial Sequence: Synthetic oligonucleotide
  Sense strand starting at position 3812 of SEQ ID NO: 1243715
aguaacaauguugagaguu

SEQ ID NO: 1436025 - RNA, 19 nt, Artificial Sequence
  Description of Artificial Sequence: Synthetic oligonucleotide
  Antisense strand to SEQ ID NO: 1436024
aacucucaacauuguuacu

SEQ ID NO: 1436026 - RNA, 19 nt, Artificial Sequence
  Description of Artificial Sequence: Synthetic oligonucleotide
  Sense strand starting at position 3837 of SEQ ID NO: 1243715
aguauugugaccugaccag

SEQ ID NO: 1436027 - RNA, 19 nt, Artificial Sequence
  Description of Artificial Sequence: Synthetic oligonucleotide
  Antisense strand to SEQ ID NO: 1436026
cuggucaggucacaauacu

SEQ ID NO: 1436028 - RNA, 19 nt, Artificial Sequence
  Description of Artificial Sequence: Synthetic oligonucleotide
  Sense strand starting at position 3900 of SEQ ID NO: 1243715
gaugucuacggucaucagu

SEQ ID NO: 1436029 - RNA, 19 nt, Artificial Sequence
  Description of Artificial Sequence: Synthetic oligonucleotide
  Antisense strand to SEQ ID NO: 1436028
acugaugaccguagacauc

SEQ ID NO: 1436030 - RNA, 19 nt, Artificial Sequence
  Description of Artificial Sequence: Synthetic oligonucleotide
  Sense strand starting at position 3971 of SEQ ID NO: 1243715
gccugaaauguguacuaac

SEQ ID NO: 1436031 - RNA, 19 nt, Artificial Sequence
  Description of Artificial Sequence: Synthetic oligonucleotide
  Antisense strand to SEQ ID NO: 1436030
guuaguacacauuucaggc

SEQ ID NO: 1436032 - RNA, 19 nt, Artificial Sequence
  Description of Artificial Sequence: Synthetic oligonucleotide
  Sense strand starting at position 28 of SEQ ID NO: 1243716
ggguucucuccugggaaau

SEQ ID NO: 1436033 - RNA, 19 nt, Artificial Sequence
  Description of Artificial Sequence: Synthetic oligonucleotide
  Antisense strand to SEQ ID NO: 1436032
auuucccaggagagaaccc

SEQ ID NO: 1436034 - RNA, 19 nt, Artificial Sequence
  Description of Artificial Sequence: Synthetic oligonucleotide
  Sense strand starting at position 29 of SEQ ID NO: 1243716
gguucucuccugggaaauu

SEQ ID NO: 1436035 - RNA, 19 nt, Artificial Sequence
  Description of Artificial Sequence: Synthetic oligonucleotide
  Antisense strand to SEQ ID NO: 1436034
aauuucccaggagagaacc

SEQ ID NO: 1436036 - RNA, 19 nt, Artificial Sequence
  Description of Artificial Sequence: Synthetic oligonucleotide
  Sense strand starting at position 30 of SEQ ID NO: 1243716
guucucuccugggaaauuu

SEQ ID NO: 1436037 - RNA, 19 nt, Artificial Sequence
  Description of Artificial Sequence: Synthetic oligonucleotide
  Antisense strand to SEQ ID NO: 1436036
aaauuucccaggagagaac

SEQ ID NO: 1436038 - RNA, 19 nt, Artificial Sequence
  Description of Artificial Sequence: Synthetic oligonucleotide
  Sense strand starting at position 38 of SEQ ID NO: 1243716
cugggaaauuuggagccaa

SEQ ID NO: 1436039 - RNA, 19 nt, Artificial Sequence
  Description of Artificial Sequence: Synthetic oligonucleotide
  Antisense strand to SEQ ID NO: 1436038
uuggcuccaaauuucccag

SEQ ID NO: 1436040 - RNA, 19 nt, Artificial Sequence
  Description of Artificial Sequence: Synthetic oligonucleotide
  Sense strand starting at position 76 of SEQ ID NO: 1243716
gagccaauauuguugacca

SEQ ID NO: 1436041 - RNA, 19 nt, Artificial Sequence
  Description of Artificial Sequence: Synthetic oligonucleotide
  Antisense strand to SEQ ID NO: 1436040
uggucaacaauauuggcuc

SEQ ID NO: 1436042 - RNA, 19 nt, Artificial Sequence
  Description of Artificial Sequence: Synthetic oligonucleotide
  Sense strand starting at position 78 of SEQ ID NO: 1243716
gccaauauuguugaccaau

SEQ ID NO: 1436043 - RNA, 19 nt, Artificial Sequence
  Description of Artificial Sequence: Synthetic oligonucleotide
  Antisense strand to SEQ ID NO: 1436042
auuggucaacaauauuggc

SEQ ID NO: 1436044 - RNA, 19 nt, Artificial Sequence
  Description of Artificial Sequence: Synthetic oligonucleotide
  Sense strand starting at position 133 of SEQ ID NO: 1243716
cugaauaaaccuggucucu

SEQ ID NO: 1436045 - RNA, 19 nt, Artificial Sequence
  Description of Artificial Sequence: Synthetic oligonucleotide
  Antisense strand to SEQ ID NO: 1436044
agagaccagguuuauucag

SEQ ID NO: 1436046 - RNA, 19 nt, Artificial Sequence
  Description of Artificial Sequence: Synthetic oligonucleotide
  Sense strand starting at position 167 of SEQ ID NO: 1243716
gugagcuagugucucugaa

SEQ ID NO: 1436047 - RNA, 19 nt, Artificial Sequence
  Description of Artificial Sequence: Synthetic oligonucleotide
  Antisense strand to SEQ ID NO: 1436046
uucagagacacuagcucac

SEQ ID NO: 1436048 - RNA, 19 nt, Artificial Sequence
  Description of Artificial Sequence: Synthetic oligonucleotide
  Sense strand starting at position 169 of SEQ ID NO: 1243716
gagcuagugucucugaaac

SEQ ID NO: 1436049 - RNA, 19 nt, Artificial Sequence
  Description of Artificial Sequence: Synthetic oligonucleotide
  Antisense strand to SEQ ID NO: 1436048
guuucagagacacuagcuc

SEQ ID NO: 1436050 - RNA, 19 nt, Artificial Sequence
  Description of Artificial Sequence: Synthetic oligonucleotide
  Sense strand starting at position 245 of SEQ ID NO: 1243716
ugaggccagcucugacaaa

SEQ ID NO: 1436051 - RNA, 19 nt, Artificial Sequence
  Description of Artificial Sequence: Synthetic oligonucleotide
  Antisense strand to SEQ ID NO: 1436050
uuugucagagcuggccuca

SEQ ID NO: 1436052 - RNA, 19 nt, Artificial Sequence
  Description of Artificial Sequence: Synthetic oligonucleotide
  Sense strand starting at position 658 of SEQ ID NO: 1243716
aagugugaugaacguuagu

SEQ ID NO: 1436053 - RNA, 19 nt, Artificial Sequence
  Description of Artificial Sequence: Synthetic oligonucleotide
  Antisense strand to SEQ ID NO: 1436052
acuaacguucaucacacuu

SEQ ID NO: 1436054 - RNA, 19 nt, Artificial Sequence
  Description of Artificial Sequence: Synthetic oligonucleotide
  Sense strand starting at position 1402 of SEQ ID NO: 1243716
cguggaaagugcucuggau

SEQ ID NO: 1436055 - RNA, 19 nt, Artificial Sequence
  Description of Artificial Sequence: Synthetic oligonucleotide
  Antisense strand to SEQ ID NO: 1436054
auccagagcacuuuccacg

SEQ ID NO: 1436056 - RNA, 19 nt, Artificial Sequence
  Description of Artificial Sequence: Synthetic oligonucleotide
  Sense strand starting at position 1593 of SEQ ID NO: 1243716
gcgcuuggagccaguugaa

SEQ ID NO: 1436057 - RNA, 19 nt, Artificial Sequence
  Description of Artificial Sequence: Synthetic oligonucleotide
  Antisense strand to SEQ ID NO: 1436056
uucaacuggcuccaagcgc

SEQ ID NO: 1436058 - RNA, 19 nt, Artificial Sequence
  Description of Artificial Sequence: Synthetic oligonucleotide
  Sense strand starting at position 2022 of SEQ ID NO: 1243716
uccuuuaucuggccgggau

SEQ ID NO: 1436059 - RNA, 19 nt, Artificial Sequence
  Description of Artificial Sequence: Synthetic oligonucleotide
  Antisense strand to SEQ ID NO: 1436058
aucccggccagauaaagga

SEQ ID NO: 1436060 - RNA, 19 nt, Artificial Sequence
  Description of Artificial Sequence: Synthetic oligonucleotide
  Sense strand starting at position 2243 of SEQ ID NO: 1243716
ggauaucgagguuggcaau

SEQ ID NO: 1436061 - RNA, 19 nt, Artificial Sequence
  Description of Artificial Sequence: Synthetic oligonucleotide
  Antisense strand to SEQ ID NO: 1436060
auugccaaccucgauaucc

SEQ ID NO: 1436062 - RNA, 19 nt, Artificial Sequence
  Description of Artificial Sequence: Synthetic oligonucleotide
  Sense strand starting at position 2244 of SEQ ID NO: 1243716
gauaucgagguuggcaaua

SEQ ID NO: 1436063 - RNA, 19 nt, Artificial Sequence
  Description of Artificial Sequence: Synthetic oligonucleotide
  Antisense strand to SEQ ID NO: 1436062
uauugccaaccucgauauc

SEQ ID NO: 1436064 - RNA, 19 nt, Artificial Sequence
  Description of Artificial Sequence: Synthetic oligonucleotide
  Sense strand starting at position 2266 of SEQ ID NO: 1243716
gagucugagucgucggaag

SEQ ID NO: 1436065 - RNA, 19 nt, Artificial Sequence
  Description of Artificial Sequence: Synthetic oligonucleotide
  Antisense strand to SEQ ID NO: 1436064
cuuccgacgacucagacuc

SEQ ID NO: 1436066 - RNA, 19 nt, Artificial Sequence
  Description of Artificial Sequence: Synthetic oligonucleotide
  Sense strand starting at position 2340 of SEQ ID NO: 1243716
accuuugcugcaggacaaa

SEQ ID NO: 1436067 - RNA, 19 nt, Artificial Sequence
  Description of Artificial Sequence: Synthetic oligonucleotide
  Antisense strand to SEQ ID NO: 1436066
uuuguccugcagcaaaggu

SEQ ID NO: 1436068 - RNA, 19 nt, Artificial Sequence
  Description of Artificial Sequence: Synthetic oligonucleotide
  Sense strand starting at position 2383 of SEQ ID NO: 1243716
ucucuuguacuguguuaag

SEQ ID NO: 1436069 - RNA, 19 nt, Artificial Sequence
  Description of Artificial Sequence: Synthetic oligonucleotide
  Antisense strand to SEQ ID NO: 1436068
cuuaacacaguacaagaga

SEQ ID NO: 1436070 - RNA, 19 nt, Artificial Sequence
  Description of Artificial Sequence: Synthetic oligonucleotide
  Sense strand starting at position 2476 of SEQ ID NO: 1243716
gaggguguggugugaauga

SEQ ID NO: 1436071 - RNA, 19 nt, Artificial Sequence
  Description of Artificial Sequence: Synthetic oligonucleotide
  Antisense strand to SEQ ID NO: 1436070
ucauucacaccacacccuc

SEQ ID NO: 1436072 - RNA, 19 nt, Artificial Sequence
  Description of Artificial Sequence: Synthetic oligonucleotide
  Sense strand starting at position 3119 of SEQ ID NO: 1243716
guuccuacccgaggugaga

SEQ ID NO: 1436073 - RNA, 19 nt, Artificial Sequence
  Description of Artificial Sequence: Synthetic oligonucleotide
  Antisense strand to SEQ ID NO: 1436072
ucucaccucggguaggaac

SEQ ID NO: 1436074 - RNA, 19 nt, Artificial Sequence
  Description of Artificial Sequence: Synthetic oligonucleotide
  Sense strand starting at position 3133 of SEQ ID NO: 1243716
ugagaaaucgcgggcuuua

SEQ ID NO: 1436075 - RNA, 19 nt, Artificial Sequence
  Description of Artificial Sequence: Synthetic oligonucleotide
  Antisense strand to SEQ ID NO: 1436074
uaaagcccgcgauuucuca

SEQ ID NO: 1436076 - RNA, 19 nt, Artificial Sequence
  Description of Artificial Sequence: Synthetic oligonucleotide
  Sense strand starting at position 3238 of SEQ ID NO: 1243716
cccagaugucuuuggaggu

SEQ ID NO: 1436077 - RNA, 19 nt, Artificial Sequence
  Description of Artificial Sequence: Synthetic oligonucleotide
  Antisense strand to SEQ ID NO: 1436076
accuccaaagacaucuggg

SEQ ID NO: 1436078 - RNA, 19 nt, Artificial Sequence
  Description of Artificial Sequence: Synthetic oligonucleotide
  Sense strand starting at position 3242 of SEQ ID NO: 1243716
gaugucuuuggaggugacu

SEQ ID NO: 1436079 - RNA, 19 nt, Artificial Sequence
  Description of Artificial Sequence: Synthetic oligonucleotide
  Antisense strand to SEQ ID NO: 1436078
agucaccuccaaagacauc

SEQ ID NO: 1436080 - RNA, 19 nt, Artificial Sequence
  Description of Artificial Sequence: Synthetic oligonucleotide
  Sense strand starting at position 3244 of SEQ ID NO: 1243716
ugucuuuggaggugacuuu

SEQ ID NO: 1436081 - RNA, 19 nt, Artificial Sequence
  Description of Artificial Sequence: Synthetic oligonucleotide
  Antisense strand to SEQ ID NO: 1436080
aaagucaccuccaaagaca

SEQ ID NO: 1436082 - RNA, 19 nt, Artificial Sequence
  Description of Artificial Sequence: Synthetic oligonucleotide
  Sense strand starting at position 3350 of SEQ ID NO: 1243716
uuugaagucccugaucuga

SEQ ID NO: 1436083 - RNA, 19 nt, Artificial Sequence
  Description of Artificial Sequence: Synthetic oligonucleotide
  Antisense strand to SEQ ID NO: 1436082
ucagaucagggacuucaaa

SEQ ID NO: 1436084 - RNA, 19 nt, Artificial Sequence
  Description of Artificial Sequence: Synthetic oligonucleotide
  Sense strand starting at position 3352 of SEQ ID NO: 1243716
ugaagucccugaucugaga

SEQ ID NO: 1436085 - RNA, 19 nt, Artificial Sequence
  Description of Artificial Sequence: Synthetic oligonucleotide
  Antisense strand to SEQ ID NO: 1436084
ucucagaucagggacuuca

SEQ ID NO: 1436086 - RNA, 19 nt, Artificial Sequence
  Description of Artificial Sequence: Synthetic oligonucleotide
  Sense strand starting at position 3361 of SEQ ID NO: 1243716
ugaucugagagaugggcau

SEQ ID NO: 1436087 - RNA, 19 nt, Artificial Sequence
  Description of Artificial Sequence: Synthetic oligonucleotide
  Antisense strand to SEQ ID NO: 1436086
augcccaucucucagauca

SEQ ID NO: 1436088 - RNA, 19 nt, Artificial Sequence
  Description of Artificial Sequence: Synthetic oligonucleotide
  Sense strand starting at position 3397 of SEQ ID NO: 1243716
uuuguuucgggagacauug

SEQ ID NO: 1436089 - RNA, 19 nt, Artificial Sequence
  Description of Artificial Sequence: Synthetic oligonucleotide
  Antisense strand to SEQ ID NO: 1436088
caaugucucccgaaacaaa

SEQ ID NO: 1436090 - RNA, 19 nt, Artificial Sequence
  Description of Artificial Sequence: Synthetic oligonucleotide
  Sense strand starting at position 3508 of SEQ ID NO: 1243716
uguacaguuggccaggaau

SEQ ID NO: 1436091 - RNA, 19 nt, Artificial Sequence
  Description of Artificial Sequence: Synthetic oligonucleotide
  Antisense strand to SEQ ID NO: 1436090
auuccuggccaacuguaca

SEQ ID NO: 1436092 - RNA, 19 nt, Artificial Sequence
  Description of Artificial Sequence: Synthetic oligonucleotide
  Sense strand starting at position 3582 of SEQ ID NO: 1243716
cggagugugucuuuauuug

SEQ ID NO: 1436093 - RNA, 19 nt, Artificial Sequence
  Description of Artificial Sequence: Synthetic oligonucleotide
  Antisense strand to SEQ ID NO: 1436092
caaauaaagacacacuccg

SEQ ID NO: 1436094 - RNA, 19 nt, Artificial Sequence
  Description of Artificial Sequence: Synthetic oligonucleotide
  Sense strand starting at position 3657 of SEQ ID NO: 1243716
ggcuuugacaugugagggu

SEQ ID NO: 1436095 - RNA, 19 nt, Artificial Sequence
  Description of Artificial Sequence: Synthetic oligonucleotide
  Antisense strand to SEQ ID NO: 1436094
acccucacaugucaaagcc

SEQ ID NO: 1436096 - RNA, 19 nt, Artificial Sequence
  Description of Artificial Sequence: Synthetic oligonucleotide
  Sense strand starting at position 3691 of SEQ ID NO: 1243716
ccagcuuggagaugagaau

SEQ ID NO: 1436097 - RNA, 19 nt, Artificial Sequence
  Description of Artificial Sequence: Synthetic oligonucleotide
  Antisense strand to SEQ ID NO: 1436096
auucucaucuccaagcugg

SEQ ID NO: 1436098 - RNA, 19 nt, Artificial Sequence
  Description of Artificial Sequence: Synthetic oligonucleotide
  Sense strand starting at position 3731 of SEQ ID NO: 1243716
ggcaucaggauggaguauu

SEQ ID NO: 1436099 - RNA, 19 nt, Artificial Sequence
  Description of Artificial Sequence: Synthetic oligonucleotide
  Antisense strand to SEQ ID NO: 1436098
aauacuccauccugaugcc

SEQ ID NO: 1436100 - RNA, 19 nt, Artificial Sequence
  Description of Artificial Sequence: Synthetic oligonucleotide
  Sense strand starting at position 3742 of SEQ ID NO: 1243716
ggaguauuauuugaucagu

SEQ ID NO: 1436101 - RNA, 19 nt, Artificial Sequence
  Description of Artificial Sequence: Synthetic oligonucleotide
  Antisense strand to SEQ ID NO: 1436100
acugaucaaauaauacucc

SEQ ID NO: 1436102 - RNA, 19 nt, Artificial Sequence
  Description of Artificial Sequence: Synthetic oligonucleotide
  Sense strand starting at position 3824 of SEQ ID NO: 1243716
cuuugaggccuauauggua

SEQ ID NO: 1436103 - RNA, 19 nt, Artificial Sequence
  Description of Artificial Sequence: Synthetic oligonucleotide
  Antisense strand to SEQ ID NO: 1436102
uaccauauaggccucaaag

SEQ ID NO: 1436104 - RNA, 19 nt, Artificial Sequence
  Description of Artificial Sequence: Synthetic oligonucleotide
  Sense strand starting at position 3906 of SEQ ID NO: 1243716
uggagauugugcucaccug

SEQ ID NO: 1436105 - RNA, 19 nt, Artificial Sequence
  Description of Artificial Sequence: Synthetic oligonucleotide
  Antisense strand to SEQ ID NO: 1436104
caggugagcacaaucucca

SEQ ID NO: 1436106 - RNA, 19 nt, Artificial Sequence
  Description of Artificial Sequence: Synthetic oligonucleotide
  Sense strand starting at position 3907 of SEQ ID NO: 1243716
ggagauugugcucaccugu

SEQ ID NO: 1436107 - RNA, 19 nt, Artificial Sequence
  Description of Artificial Sequence: Synthetic oligonucleotide
  Antisense strand to SEQ ID NO: 1436106
acaggugagcacaaucucc

SEQ ID NO: 1436108 - RNA, 19 nt, Artificial Sequence
  Description of Artificial Sequence: Synthetic oligonucleotide
  Sense strand starting at position 3918 of SEQ ID NO: 1243716
ucaccugugucaucuugga

SEQ ID NO: 1436109 - RNA, 19 nt, Artificial Sequence
  Description of Artificial Sequence: Synthetic oligonucleotide
  Antisense strand to SEQ ID NO: 1436108
uccaagaugacacagguga

SEQ ID NO: 1436110 - RNA, 19 nt, Artificial Sequence
  Description of Artificial Sequence: Synthetic oligonucleotide
  Sense strand starting at position 3922 of SEQ ID NO: 1243716
cugugucaucuuggacuau

SEQ ID NO: 1436111 - RNA, 19 nt, Artificial Sequence
  Description of Artificial Sequence: Synthetic oligonucleotide
  Antisense strand to SEQ ID NO: 1436110
auaguccaagaugacacag

SEQ ID NO: 1436112 - RNA, 19 nt, Artificial Sequence
  Description of Artificial Sequence: Synthetic oligonucleotide
  Sense strand starting at position 3 of SEQ ID NO: 1243717
gcaaauuccuaaguguuuc

SEQ ID NO: 1436113 - RNA, 19 nt, Artificial Sequence
  Description of Artificial Sequence: Synthetic oligonucleotide
  Antisense strand to SEQ ID NO: 1436112
gaaacacuuaggaauuugc

SEQ ID NO: 1436114 - RNA, 19 nt, Artificial Sequence
  Description of Artificial Sequence: Synthetic oligonucleotide
  Sense strand starting at position 725 of SEQ ID NO: 1243717
gcuguuggaccuuagguaa

SEQ ID NO: 1436115 - RNA, 19 nt, Artificial Sequence
  Description of Artificial Sequence: Synthetic oligonucleotide
  Antisense strand to SEQ ID NO: 1436114
uuaccuaagguccaacagc

SEQ ID NO: 1436116 - RNA, 19 nt, Artificial Sequence
  Description of Artificial Sequence: Synthetic oligonucleotide
  Sense strand starting at position 810 of SEQ ID NO: 1243717
cggguuguuacagggacua

SEQ ID NO: 1436117 - RNA, 19 nt, Artificial Sequence
  Description of Artificial Sequence: Synthetic oligonucleotide
  Antisense strand to SEQ ID NO: 1436116
uagucccuguaacaacccg

SEQ ID NO: 1436118 - RNA, 19 nt, Artificial Sequence
  Description of Artificial Sequence: Synthetic oligonucleotide
  Sense strand starting at position 831 of SEQ ID NO: 1243717
ugaaguaauacguguaaug

SEQ ID NO: 1436119 - RNA, 19 nt, Artificial Sequence
  Description of Artificial Sequence: Synthetic oligonucleotide
  Antisense strand to SEQ ID NO: 1436118
cauuacacguauuacuuca

SEQ ID NO: 1436120 - RNA, 19 nt, Artificial Sequence
  Description of Artificial Sequence: Synthetic oligonucleotide
  Sense strand starting at position 833 of SEQ ID NO: 1243717
aaguaauacguguaaugca

SEQ ID NO: 1436121 - RNA, 19 nt, Artificial Sequence
  Description of Artificial Sequence: Synthetic oligonucleotide
  Antisense strand to SEQ ID NO: 1436120
ugcauuacacguauuacuu

SEQ ID NO: 1436122 - RNA, 19 nt, Artificial Sequence
  Description of Artificial Sequence: Synthetic oligonucleotide
  Sense strand starting at position 843 of SEQ ID NO: 1243717
uguaaugcacuugguauua

SEQ ID NO: 1436123 - RNA, 19 nt, Artificial Sequence
  Description of Artificial Sequence: Synthetic oligonucleotide
  Antisense strand to SEQ ID NO: 1436122
uaauaccaagugcauuaca

SEQ ID NO: 1436124 - RNA, 19 nt, Artificial Sequence
  Description of Artificial Sequence: Synthetic oligonucleotide
  Sense strand starting at position 1284 of SEQ ID NO: 1243717
augucagaaugcuuuaugu

SEQ ID NO: 1436125 - RNA, 19 nt, Artificial Sequence
  Description of Artificial Sequence: Synthetic oligonucleotide
  Antisense strand to SEQ ID NO: 1436124
acauaaagcauucugacau

SEQ ID NO: 1436126 - RNA, 19 nt, Artificial Sequence
  Description of Artificial Sequence: Synthetic oligonucleotide
  Sense strand starting at position 1286 of SEQ ID NO: 1243717
gucagaaugcuuuauguuu

SEQ ID NO: 1436127 - RNA, 19 nt, Artificial Sequence
  Description of Artificial Sequence: Synthetic oligonucleotide
  Antisense strand to SEQ ID NO: 1436126
aaacauaaagcauucugac

SEQ ID NO: 1436128 - RNA, 19 nt, Artificial Sequence
  Description of Artificial Sequence: Synthetic oligonucleotide
  Sense strand starting at position 1293 of SEQ ID NO: 1243717
ugcuuuauguuuccaagga

SEQ ID NO: 1436129 - RNA, 19 nt, Artificial Sequence
  Description of Artificial Sequence: Synthetic oligonucleotide
  Antisense strand to SEQ ID NO: 1436128
uccuuggaaacauaaagca

SEQ ID NO: 1436130 - RNA, 19 nt, Artificial Sequence
  Description of Artificial Sequence: Synthetic oligonucleotide
  Sense strand starting at position 1297 of SEQ ID NO: 1243717
uuauguuuccaaggagaaa

SEQ ID NO: 1436131 - RNA, 19 nt, Artificial Sequence
  Description of Artificial Sequence: Synthetic oligonucleotide
  Antisense strand to SEQ ID NO: 1436130
uuucuccuuggaaacauaa

SEQ ID NO: 1436132 - RNA, 19 nt, Artificial Sequence
  Description of Artificial Sequence: Synthetic oligonucleotide
  Sense strand starting at position 1329 of SEQ ID NO: 1243717
ugaagugacuuuccuaggu

SEQ ID NO: 1436133 - RNA, 19 nt, Artificial Sequence
  Description of Artificial Sequence: Synthetic oligonucleotide
  Antisense strand to SEQ ID NO: 1436132
accuaggaaagucacuuca

SEQ ID NO: 1436134 - RNA, 19 nt, Artificial Sequence
  Description of Artificial Sequence: Synthetic oligonucleotide
  Sense strand starting at position 1342 of SEQ ID NO: 1243717
cuagguucacacgaugagu

SEQ ID NO: 1436135 - RNA, 19 nt, Artificial Sequence
  Description of Artificial Sequence: Synthetic oligonucleotide
  Antisense strand to SEQ ID NO: 1436134
acucaucgugugaaccuag

SEQ ID NO: 1436136 - RNA, 19 nt, Artificial Sequence
  Description of Artificial Sequence: Synthetic oligonucleotide
  Sense strand starting at position 1344 of SEQ ID NO: 1243717
agguucacacgaugaguuu

SEQ ID NO: 1436137 - RNA, 19 nt, Artificial Sequence
  Description of Artificial Sequence: Synthetic oligonucleotide
  Antisense strand to SEQ ID NO: 1436136
aaacucaucgugugaaccu

SEQ ID NO: 1436138 - RNA, 19 nt, Artificial Sequence
  Description of Artificial Sequence: Synthetic oligonucleotide
  Sense strand starting at position 1350 of SEQ ID NO: 1243717
acacgaugaguuuguggca

SEQ ID NO: 1436139 - RNA, 19 nt, Artificial Sequence
  Description of Artificial Sequence: Synthetic oligonucleotide
  Antisense strand to SEQ ID NO: 1436138
ugccacaaacucaucgugu

SEQ ID NO: 1436140 - RNA, 19 nt, Artificial Sequence
  Description of Artificial Sequence: Synthetic oligonucleotide
  Sense strand starting at position 1357 of SEQ ID NO: 1243717
gaguuuguggcagacuaca

SEQ ID NO: 1436141 - RNA, 19 nt, Artificial Sequence
  Description of Artificial Sequence: Synthetic oligonucleotide
  Antisense strand to SEQ ID NO: 1436140
uguagucugccacaaacuc

SEQ ID NO: 1436142 - RNA, 19 nt, Artificial Sequence
  Description of Artificial Sequence: Synthetic oligonucleotide
  Sense strand starting at position 1456 of SEQ ID NO: 1243717
cugugaguuccuggauggu

SEQ ID NO: 1436143 - RNA, 19 nt, Artificial Sequence
  Description of Artificial Sequence: Synthetic oligonucleotide
  Antisense strand to SEQ ID NO: 1436142
accauccaggaacucacag

SEQ ID NO: 1436144 - RNA, 19 nt, Artificial Sequence
  Description of Artificial Sequence: Synthetic oligonucleotide
  Sense strand starting at position 1796 of SEQ ID NO: 1243717
caauaagagccgugagggu

SEQ ID NO: 1436145 - RNA, 19 nt, Artificial Sequence
  Description of Artificial Sequence: Synthetic oligonucleotide
  Antisense strand to SEQ ID NO: 1436144
acccucacggcucuuauug

SEQ ID NO: 1436146 - RNA, 19 nt, Artificial Sequence
  Description of Artificial Sequence: Synthetic oligonucleotide
  Sense strand starting at position 1805 of SEQ ID NO: 1243717
ccgugaggguucccagacu

SEQ ID NO: 1436147 - RNA, 19 nt, Artificial Sequence
  Description of Artificial Sequence: Synthetic oligonucleotide
  Antisense strand to SEQ ID NO: 1436146
agucugggaacccucacgg

SEQ ID NO: 1436148 - RNA, 19 nt, Artificial Sequence
  Description of Artificial Sequence: Synthetic oligonucleotide
  Sense strand starting at position 1933 of SEQ ID NO: 1243717
gagcgaggccuccagaacu

SEQ ID NO: 1436149 - RNA, 19 nt, Artificial Sequence
  Description of Artificial Sequence: Synthetic oligonucleotide
  Antisense strand to SEQ ID NO: 1436148
aguucuggaggccucgcuc

SEQ ID NO: 1436150 - RNA, 19 nt, Artificial Sequence
  Description of Artificial Sequence: Synthetic oligonucleotide
  Sense strand starting at position 2119 of SEQ ID NO: 1243717
caagguuaccacgggaagu

SEQ ID NO: 1436151 - RNA, 19 nt, Artificial Sequence
  Description of Artificial Sequence: Synthetic oligonucleotide
  Antisense strand to SEQ ID NO: 1436150
acuucccgugguaaccuug

SEQ ID NO: 1436152 - RNA, 19 nt, Artificial Sequence
  Description of Artificial Sequence: Synthetic oligonucleotide
  Sense strand starting at position 2960 of SEQ ID NO: 1243717
ggcugguguggcuagaaga

SEQ ID NO: 1436153 - RNA, 19 nt, Artificial Sequence
  Description of Artificial Sequence: Synthetic oligonucleotide
  Antisense strand to SEQ ID NO: 1436152
ucuucuagccacaccagcc

SEQ ID NO: 1436154 - RNA, 19 nt, Artificial Sequence
  Description of Artificial Sequence: Synthetic oligonucleotide
  Sense strand starting at position 2961 of SEQ ID NO: 1243717
gcugguguggcuagaagau

SEQ ID NO: 1436155 - RNA, 19 nt, Artificial Sequence
  Description of Artificial Sequence: Synthetic oligonucleotide
  Antisense strand to SEQ ID NO: 1436154
aucuucuagccacaccagc

SEQ ID NO: 1436156 - RNA, 19 nt, Artificial Sequence
  Description of Artificial Sequence: Synthetic oligonucleotide
  Sense strand starting at position 3042 of SEQ ID NO: 1243717
ggcucuuauagggauugua

SEQ ID NO: 1436157 - RNA, 19 nt, Artificial Sequence
  Description of Artificial Sequence: Synthetic oligonucleotide
  Antisense strand to SEQ ID NO: 1436156
uacaaucccuauaagagcc

SEQ ID NO: 1436158 - RNA, 19 nt, Artificial Sequence
  Description of Artificial Sequence: Synthetic oligonucleotide
  Sense strand starting at position 3045 of SEQ ID NO: 1243717
ucuuauagggauuguaaag

SEQ ID NO: 1436159 - RNA, 19 nt, Artificial Sequence
  Description of Artificial Sequence: Synthetic oligonucleotide
  Antisense strand to SEQ ID NO: 1436158
cuuuacaaucccuauaaga

SEQ ID NO: 1436160 - RNA, 19 nt, Artificial Sequence
  Description of Artificial Sequence: Synthetic oligonucleotide
  Sense strand starting at position 3074 of SEQ ID NO: 1243717
cacuuugaaugagaugaga

SEQ ID NO: 1436161 - RNA, 19 nt, Artificial Sequence
  Description of Artificial Sequence: Synthetic oligonucleotide
  Antisense strand to SEQ ID NO: 1436160
ucucaucucauucaaagug

SEQ ID NO: 1436162 - RNA, 19 nt, Artificial Sequence
  Description of Artificial Sequence: Synthetic oligonucleotide
  Sense strand starting at position 3088 of SEQ ID NO: 1243717
ugagaugacugggucuuga

SEQ ID NO: 1436163 - RNA, 19 nt, Artificial Sequence
  Description of Artificial Sequence: Synthetic oligonucleotide
  Antisense strand to SEQ ID NO: 1436162
ucaagacccagucaucuca

SEQ ID NO: 1436164 - RNA, 19 nt, Artificial Sequence
  Description of Artificial Sequence: Synthetic oligonucleotide
  Sense strand starting at position 3743 of SEQ ID NO: 1243717
caguuauuguaguuaucau

SEQ ID NO: 1436165 - RNA, 19 nt, Artificial Sequence
  Description of Artificial Sequence: Synthetic oligonucleotide
  Antisense strand to SEQ ID NO: 1436164
augauaacuacaauaacug

SEQ ID NO: 1436166 - RNA, 19 nt, Artificial Sequence
  Description of Artificial Sequence: Synthetic oligonucleotide
  Sense strand starting at position 3744 of SEQ ID NO: 1243717
aguuauuguaguuaucaug

SEQ ID NO: 1436167 - RNA, 19 nt, Artificial Sequence
  Description of Artificial Sequence: Synthetic oligonucleotide
  Antisense strand to SEQ ID NO: 1436166
caugauaacuacaauaacu

SEQ ID NO: 1436168 - RNA, 19 nt, Artificial Sequence
  Description of Artificial Sequence: Synthetic oligonucleotide
  Sense strand starting at position 3750 of SEQ ID NO: 1243717
uguaguuaucauggcuaca

SEQ ID NO: 1436169 - RNA, 19 nt, Artificial Sequence
  Description of Artificial Sequence: Synthetic oligonucleotide
  Antisense strand to SEQ ID NO: 1436168
uguagccaugauaacuaca

SEQ ID NO: 1436170 - RNA, 19 nt, Artificial Sequence
  Description of Artificial Sequence: Synthetic oligonucleotide
  Sense strand starting at position 3753 of SEQ ID NO: 1243717
aguuaucauggcuacauua

SEQ ID NO: 1436171 - RNA, 19 nt, Artificial Sequence
  Description of Artificial Sequence: Synthetic oligonucleotide
  Antisense strand to SEQ ID NO: 1436170
uaauguagccaugauaacu

SEQ ID NO: 1436172 - RNA, 19 nt, Artificial Sequence
  Description of Artificial Sequence: Synthetic oligonucleotide
  Sense strand starting at position 3782 of SEQ ID NO: 1243717
aauguacugccuuagugua

SEQ ID NO: 1436173 - RNA, 19 nt, Artificial Sequence
  Description of Artificial Sequence: Synthetic oligonucleotide
  Antisense strand to SEQ ID NO: 1436172
uacacuaaggcaguacauu

SEQ ID NO: 1436174 - RNA, 19 nt, Artificial Sequence
  Description of Artificial Sequence: Synthetic oligonucleotide
  Sense strand starting at position 3831 of SEQ ID NO: 1243717
cccugugggugauuacaau

SEQ ID NO: 1436175 - RNA, 19 nt, Artificial Sequence
  Description of Artificial Sequence: Synthetic oligonucleotide
  Antisense strand to SEQ ID NO: 1436174
auuguaaucacccacaggg

SEQ ID NO: 1436176 - RNA, 19 nt, Artificial Sequence
  Description of Artificial Sequence: Synthetic oligonucleotide
  Sense strand starting at position 3860 of SEQ ID NO: 1243717
ugaagagcuggcuacuuau

SEQ ID NO: 1436177 - RNA, 19 nt, Artificial Sequence
  Description of Artificial Sequence: Synthetic oligonucleotide
  Antisense strand to SEQ ID NO: 1436176
auaaguagccagcucuuca

SEQ ID NO: 1436178 - RNA, 19 nt, Artificial Sequence
  Description of Artificial Sequence: Synthetic oligonucleotide
  Sense strand starting at position 3863 of SEQ ID NO: 1243717
agagcuggcuacuuaugau

SEQ ID NO: 1436179 - RNA, 19 nt, Artificial Sequence
  Description of Artificial Sequence: Synthetic oligonucleotide
  Antisense strand to SEQ ID NO: 1436178
aucauaaguagccagcucu

SEQ ID NO: 1436180 - RNA, 19 nt, Artificial Sequence
  Description of Artificial Sequence: Synthetic oligonucleotide
  Sense strand starting at position 3903 of SEQ ID NO: 1243717
cagaauuaagaguguguca

SEQ ID NO: 1436181 - RNA, 19 nt, Artificial Sequence
  Description of Artificial Sequence: Synthetic oligonucleotide
  Antisense strand to SEQ ID NO: 1436180
ugacacacucuuaauucug

SEQ ID NO: 1436182 - RNA, 19 nt, Artificial Sequence
  Description of Artificial Sequence: Synthetic oligonucleotide
  Sense strand starting at position 3910 of SEQ ID NO: 1243717
aagagugugucagcuauuu

SEQ ID NO: 1436183 - RNA, 19 nt, Artificial Sequence
  Description of Artificial Sequence: Synthetic oligonucleotide
  Antisense strand to SEQ ID NO: 1436182
aaauagcugacacacucuu

SEQ ID NO: 1436184 - RNA, 19 nt, Artificial Sequence
  Description of Artificial Sequence: Synthetic oligonucleotide
  Sense strand starting at position 3915 of SEQ ID NO: 1243717
ugugucagcuauuuaaugu

SEQ ID NO: 1436185 - RNA, 19 nt, Artificial Sequence
  Description of Artificial Sequence: Synthetic oligonucleotide
  Antisense strand to SEQ ID NO: 1436184
acauuaaauagcugacaca

SEQ ID NO: 1436186 - RNA, 19 nt, Artificial Sequence
  Description of Artificial Sequence: Synthetic oligonucleotide
  Sense strand starting at position 3916 of SEQ ID NO: 1243717
gugucagcuauuuaauguc

SEQ ID NO: 1436187 - RNA, 19 nt, Artificial Sequence
  Description of Artificial Sequence: Synthetic oligonucleotide
  Antisense strand to SEQ ID NO: 1436186
gacauuaaauagcugacac

SEQ ID NO: 1436188 - RNA, 19 nt, Artificial Sequence
  Description of Artificial Sequence: Synthetic oligonucleotide
  Sense strand starting at position 3938 of SEQ ID NO: 1243717
uccuuaacacugggaauca

SEQ ID NO: 1436189 - RNA, 19 nt, Artificial Sequence
  Description of Artificial Sequence: Synthetic oligonucleotide
  Antisense strand to SEQ ID NO: 1436188
ugauucccaguguuaagga

SEQ ID NO: 1436190 - RNA, 19 nt, Artificial Sequence
  Description of Artificial Sequence: Synthetic oligonucleotide
  Sense strand starting at position 3979 of SEQ ID NO: 1243717
acuauauucugcuuccagu

SEQ ID NO: 1436191 - RNA, 19 nt, Artificial Sequence
  Description of Artificial Sequence: Synthetic oligonucleotide
  Antisense strand to SEQ ID NO: 1436190
acuggaagcagaauauagu

SEQ ID NO: 1436192 - RNA, 19 nt, Artificial Sequence
  Description of Artificial Sequence: Synthetic oligonucleotide
  Sense strand starting at position 81 of SEQ ID NO: 1243718
gcaggcagcccuugcaaua

SEQ ID NO: 1436193 - RNA, 19 nt, Artificial Sequence
  Description of Artificial Sequence: Synthetic oligonucleotide
  Antisense strand to SEQ ID NO: 1436192
uauugcaagggcugccugc

SEQ ID NO: 1436194 - RNA, 19 nt, Artificial Sequence
  Description of Artificial Sequence: Synthetic oligonucleotide
  Sense strand starting at position 606 of SEQ ID NO: 1243718
gggucuugccaugaaugag

SEQ ID NO: 1436195 - RNA, 19 nt, Artificial Sequence
  Description of Artificial Sequence: Synthetic oligonucleotide
  Antisense strand to SEQ ID NO: 1436194
cucauucauggcaagaccc

SEQ ID NO: 1436196 - RNA, 19 nt, Artificial Sequence
  Description of Artificial Sequence: Synthetic oligonucleotide
  Sense strand starting at position 725 of SEQ ID NO: 1243718
cuggagucgugguaucgga

SEQ ID NO: 1436197 - RNA, 19 nt, Artificial Sequence
  Description of Artificial Sequence: Synthetic oligonucleotide
  Antisense strand to SEQ ID NO: 1436196
uccgauaccacgacuccag

SEQ ID NO: 1436198 - RNA, 19 nt, Artificial Sequence
  Description of Artificial Sequence: Synthetic oligonucleotide
  Sense strand starting at position 729 of SEQ ID NO: 1243718
agucgugguaucggagaga

SEQ ID NO: 1436199 - RNA, 19 nt, Artificial Sequence
  Description of Artificial Sequence: Synthetic oligonucleotide
  Antisense strand to SEQ ID NO: 1436198
ucucuccgauaccacgacu

SEQ ID NO: 1436200 - RNA, 19 nt, Artificial Sequence
  Description of Artificial Sequence: Synthetic oligonucleotide
  Sense strand starting at position 730 of SEQ ID NO: 1243718
gucgugguaucggagagaa

SEQ ID NO: 1436201 - RNA, 19 nt, Artificial Sequence
  Description of Artificial Sequence: Synthetic oligonucleotide
  Antisense strand to SEQ ID NO: 1436200
uucucuccgauaccacgac

SEQ ID NO: 1436202 - RNA, 19 nt, Artificial Sequence
  Description of Artificial Sequence: Synthetic oligonucleotide
  Sense strand starting at position 732 of SEQ ID NO: 1243718
cgugguaucggagagaaau

SEQ ID NO: 1436203 - RNA, 19 nt, Artificial Sequence
  Description of Artificial Sequence: Synthetic oligonucleotide
  Antisense strand to SEQ ID NO: 1436202
auuucucuccgauaccacg

SEQ ID NO: 1436204 - RNA, 19 nt, Artificial Sequence
  Description of Artificial Sequence: Synthetic oligonucleotide
  Sense strand starting at position 738 of SEQ ID NO: 1243718
aucggagagaaaugaguuu

SEQ ID NO: 1436205 - RNA, 19 nt, Artificial Sequence
  Description of Artificial Sequence: Synthetic oligonucleotide
  Antisense strand to SEQ ID NO: 1436204
aaacucauuucucuccgau

SEQ ID NO: 1436206 - RNA, 19 nt, Artificial Sequence
  Description of Artificial Sequence: Synthetic oligonucleotide
  Sense strand starting at position 854 of SEQ ID NO: 1243718
cacucaugugcccacgaga

SEQ ID NO: 1436207 - RNA, 19 nt, Artificial Sequence
  Description of Artificial Sequence: Synthetic oligonucleotide
  Antisense strand to SEQ ID NO: 1436206
ucucgugggcacaugagug

SEQ ID NO: 1436208 - RNA, 19 nt, Artificial Sequence
  Description of Artificial Sequence: Synthetic oligonucleotide
  Sense strand starting at position 984 of SEQ ID NO: 1243718
gcggcauuccaagacgagu

SEQ ID NO: 1436209 - RNA, 19 nt, Artificial Sequence
  Description of Artificial Sequence: Synthetic oligonucleotide
  Antisense strand to SEQ ID NO: 1436208
acucgucuuggaaugccgc

SEQ ID NO: 1436210 - RNA, 19 nt, Artificial Sequence
  Description of Artificial Sequence: Synthetic oligonucleotide
  Sense strand starting at position 1001 of SEQ ID NO: 1243718
guucgaguccaagaugagu

SEQ ID NO: 1436211 - RNA, 19 nt, Artificial Sequence
  Description of Artificial Sequence: Synthetic oligonucleotide
  Antisense strand to SEQ ID NO: 1436210
acucaucuuggacucgaac

SEQ ID NO: 1436212 - RNA, 19 nt, Artificial Sequence
  Description of Artificial Sequence: Synthetic oligonucleotide
  Sense strand starting at position 1026 of SEQ ID NO: 1243718
uccugagccuuucuggcaa

SEQ ID NO: 1436213 - RNA, 19 nt, Artificial Sequence
  Description of Artificial Sequence: Synthetic oligonucleotide
  Antisense strand to SEQ ID NO: 1436212
uugccagaaaggcucagga

SEQ ID NO: 1436214 - RNA, 19 nt, Artificial Sequence
  Description of Artificial Sequence: Synthetic oligonucleotide
  Sense strand starting at position 1196 of SEQ ID NO: 1243718
ccaguucugcucuguccaa

SEQ ID NO: 1436215 - RNA, 19 nt, Artificial Sequence
  Description of Artificial Sequence: Synthetic oligonucleotide
  Antisense strand to SEQ ID NO: 1436214
uuggacagagcagaacugg

SEQ ID NO: 1436216 - RNA, 19 nt, Artificial Sequence
  Description of Artificial Sequence: Synthetic oligonucleotide
  Sense strand starting at position 2199 of SEQ ID NO: 1243718
gcuuuauuaucggccucca

SEQ ID NO: 1436217 - RNA, 19 nt, Artificial Sequence
  Description of Artificial Sequence: Synthetic oligonucleotide
  Antisense strand to SEQ ID NO: 1436216
uggaggccgauaauaaagc

SEQ ID NO: 1436218 - RNA, 19 nt, Artificial Sequence
  Description of Artificial Sequence: Synthetic oligonucleotide
  Sense strand starting at position 2394 of SEQ ID NO: 1243718
cagauaaggugcuaaguuu

SEQ ID NO: 1436219 - RNA, 19 nt, Artificial Sequence
  Description of Artificial Sequence: Synthetic oligonucleotide
  Antisense strand to SEQ ID NO: 1436218
aaacuuagcaccuuaucug

SEQ ID NO: 1436220 - RNA, 19 nt, Artificial Sequence
  Description of Artificial Sequence: Synthetic oligonucleotide
  Sense strand starting at position 2402 of SEQ ID NO: 1243718
gugcuaaguuuggcuucua

SEQ ID NO: 1436221 - RNA, 19 nt, Artificial Sequence
  Description of Artificial Sequence: Synthetic oligonucleotide
  Antisense strand to SEQ ID NO: 1436220
uagaagccaaacuuagcac

SEQ ID NO: 1436222 - RNA, 19 nt, Artificial Sequence
  Description of Artificial Sequence: Synthetic oligonucleotide
  Sense strand starting at position 2425 of SEQ ID NO: 1243718
gagagcugauaggaauaaa

SEQ ID NO: 1436223 - RNA, 19 nt, Artificial Sequence
  Description of Artificial Sequence: Synthetic oligonucleotide
  Antisense strand to SEQ ID NO: 1436222
uuuauuccuaucagcucuc

SEQ ID NO: 1436224 - RNA, 19 nt, Artificial Sequence
  Description of Artificial Sequence: Synthetic oligonucleotide
  Sense strand starting at position 2769 of SEQ ID NO: 1243718
ccuugaaaguucuugucaa

SEQ ID NO: 1436225 - RNA, 19 nt, Artificial Sequence
  Description of Artificial Sequence: Synthetic oligonucleotide
  Antisense strand to SEQ ID NO: 1436224
uugacaagaacuuucaagg

SEQ ID NO: 1436226 - RNA, 19 nt, Artificial Sequence
  Description of Artificial Sequence: Synthetic oligonucleotide
  Sense strand starting at position 2770 of SEQ ID NO: 1243718
cuugaaaguucuugucaag

SEQ ID NO: 1436227 - RNA, 19 nt, Artificial Sequence
  Description of Artificial Sequence: Synthetic oligonucleotide
  Antisense strand to SEQ ID NO: 1436226
cuugacaagaacuuucaag

SEQ ID NO: 1436228 - RNA, 19 nt, Artificial Sequence
  Description of Artificial Sequence: Synthetic oligonucleotide
  Sense strand starting at position 3197 of SEQ ID NO: 1243718
ugauguuuauucccaaaga

SEQ ID NO: 1436229 - RNA, 19 nt, Artificial Sequence
  Description of Artificial Sequence: Synthetic oligonucleotide
  Antisense strand to SEQ ID NO: 1436228
ucuuugggaauaaacauca

SEQ ID NO: 1436230 - RNA, 19 nt, Artificial Sequence
  Description of Artificial Sequence: Synthetic oligonucleotide
  Sense strand starting at position 3223 of SEQ ID NO: 1243718
ccaguagaauuuccggcau

SEQ ID NO: 1436231 - RNA, 19 nt, Artificial Sequence
  Description of Artificial Sequence: Synthetic oligonucleotide
  Antisense strand to SEQ ID NO: 1436230
augccggaaauucuacugg

SEQ ID NO: 1436232 - RNA, 19 nt, Artificial Sequence
  Description of Artificial Sequence: Synthetic oligonucleotide
  Sense strand starting at position 3237 of SEQ ID NO: 1243718
ggcauccacagcugaguua

SEQ ID NO: 1436233 - RNA, 19 nt, Artificial Sequence
  Description of Artificial Sequence: Synthetic oligonucleotide
  Antisense strand to SEQ ID NO: 1436232
uaacucagcuguggaugcc

SEQ ID NO: 1436234 - RNA, 19 nt, Artificial Sequence
  Description of Artificial Sequence: Synthetic oligonucleotide
  Sense strand starting at position 3293 of SEQ ID NO: 1243718
uccaaaugccucuaagaug

SEQ ID NO: 1436235 - RNA, 19 nt, Artificial Sequence
  Description of Artificial Sequence: Synthetic oligonucleotide
  Antisense strand to SEQ ID NO: 1436234
caucuuagaggcauuugga

SEQ ID NO: 1436236 - RNA, 19 nt, Artificial Sequence
  Description of Artificial Sequence: Synthetic oligonucleotide
  Sense strand starting at position 3316 of SEQ ID NO: 1243718
ggccuauggcauuggaaug

SEQ ID NO: 1436237 - RNA, 19 nt, Artificial Sequence
  Description of Artificial Sequence: Synthetic oligonucleotide
  Antisense strand to SEQ ID NO: 1436236
cauuccaaugccauaggcc

SEQ ID NO: 1436238 - RNA, 19 nt, Artificial Sequence
  Description of Artificial Sequence: Synthetic oligonucleotide
  Sense strand starting at position 3332 of SEQ ID NO: 1243718
augggugugugguucacau

SEQ ID NO: 1436239 - RNA, 19 nt, Artificial Sequence
  Description of Artificial Sequence: Synthetic oligonucleotide
  Antisense strand to SEQ ID NO: 1436238
augugaaccacacacccau

SEQ ID NO: 1436240 - RNA, 19 nt, Artificial Sequence
  Description of Artificial Sequence: Synthetic oligonucleotide
  Sense strand starting at position 3336 of SEQ ID NO: 1243718
gugugugguucacauccau

SEQ ID NO: 1436241 - RNA, 19 nt, Artificial Sequence
  Description of Artificial Sequence: Synthetic oligonucleotide
  Antisense strand to SEQ ID NO: 1436240
auggaugugaaccacacac

SEQ ID NO: 1436242 - RNA, 19 nt, Artificial Sequence
  Description of Artificial Sequence: Synthetic oligonucleotide
  Sense strand starting at position 3433 of SEQ ID NO: 1243718
ggaagcagaguguauguau

SEQ ID NO: 1436243 - RNA, 19 nt, Artificial Sequence
  Description of Artificial Sequence: Synthetic oligonucleotide
  Antisense strand to SEQ ID NO: 1436242
auacauacacucugcuucc

SEQ ID NO: 1436244 - RNA, 19 nt, Artificial Sequence
  Description of Artificial Sequence: Synthetic oligonucleotide
  Sense strand starting at position 3436 of SEQ ID NO: 1243718
agcagaguguauguauuua

SEQ ID NO: 1436245 - RNA, 19 nt, Artificial Sequence
  Description of Artificial Sequence: Synthetic oligonucleotide
  Antisense strand to SEQ ID NO: 1436244
uaaauacauacacucugcu

SEQ ID NO: 1436246 - RNA, 19 nt, Artificial Sequence
  Description of Artificial Sequence: Synthetic oligonucleotide
  Sense strand starting at position 3447 of SEQ ID NO: 1243718
uguauuuacuucugugauu

SEQ ID NO: 1436247 - RNA, 19 nt, Artificial Sequence
  Description of Artificial Sequence: Synthetic oligonucleotide
  Antisense strand to SEQ ID NO: 1436246
aaucacagaaguaaauaca

SEQ ID NO: 1436248 - RNA, 19 nt, Artificial Sequence
  Description of Artificial Sequence: Synthetic oligonucleotide
  Sense strand starting at position 3506 of SEQ ID NO: 1243718
cuguauuucccagguucua

SEQ ID NO: 1436249 - RNA, 19 nt, Artificial Sequence
  Description of Artificial Sequence: Synthetic oligonucleotide
  Antisense strand to SEQ ID NO: 1436248
uagaaccugggaaauacag

SEQ ID NO: 1436250 - RNA, 19 nt, Artificial Sequence
  Description of Artificial Sequence: Synthetic oligonucleotide
  Sense strand starting at position 3536 of SEQ ID NO: 1243718
ucugcaauauaugucgaau

SEQ ID NO: 1436251 - RNA, 19 nt, Artificial Sequence
  Description of Artificial Sequence: Synthetic oligonucleotide
  Antisense strand to SEQ ID NO: 1436250
auucgacauauauugcaga

SEQ ID NO: 1436252 - RNA, 19 nt, Artificial Sequence
  Description of Artificial Sequence: Synthetic oligonucleotide
  Sense strand starting at position 3538 of SEQ ID NO: 1243718
ugcaauauaugucgaauua

SEQ ID NO: 1436253 - RNA, 19 nt, Artificial Sequence
  Description of Artificial Sequence: Synthetic oligonucleotide
  Antisense strand to SEQ ID NO: 1436252
uaauucgacauauauugca

SEQ ID NO: 1436254 - RNA, 19 nt, Artificial Sequence
  Description of Artificial Sequence: Synthetic oligonucleotide
  Sense strand starting at position 3539 of SEQ ID NO: 1243718
gcaauauaugucgaauuau

SEQ ID NO: 1436255 - RNA, 19 nt, Artificial Sequence
  Description of Artificial Sequence: Synthetic oligonucleotide
  Antisense strand to SEQ ID NO: 1436254
auaauucgacauauauugc

SEQ ID NO: 1436256 - RNA, 19 nt, Artificial Sequence
  Description of Artificial Sequence: Synthetic oligonucleotide
  Sense strand starting at position 246 of SEQ ID NO: 1243719
ggcagagaagggcauuauu

SEQ ID NO: 1436257 - RNA, 19 nt, Artificial Sequence
  Description of Artificial Sequence: Synthetic oligonucleotide
  Antisense strand to SEQ ID NO: 1436256
aauaaugcccuucucugcc

SEQ ID NO: 1436258 - RNA, 19 nt, Artificial Sequence
  Description of Artificial Sequence: Synthetic oligonucleotide
  Sense strand starting at position 317 of SEQ ID NO: 1243719
ggagucucccuguauaacu

SEQ ID NO: 1436259 - RNA, 19 nt, Artificial Sequence
  Description of Artificial Sequence: Synthetic oligonucleotide
  Antisense strand to SEQ ID NO: 1436258
aguuauacagggagacucc

SEQ ID NO: 1436260 - RNA, 19 nt, Artificial Sequence
  Description of Artificial Sequence: Synthetic oligonucleotide
  Sense strand starting at position 336 of SEQ ID NO: 1243719
gacuaucaccguuaccaga

SEQ ID NO: 1436261 - RNA, 19 nt, Artificial Sequence
  Description of Artificial Sequence: Synthetic oligonucleotide
  Antisense strand to SEQ ID NO: 1436260
ucugguaacggugauaguc

SEQ ID NO: 1436262 - RNA, 19 nt, Artificial Sequence
  Description of Artificial Sequence: Synthetic oligonucleotide
  Sense strand starting at position 602 of SEQ ID NO: 1243719
gcaacugaauccgacagaa

SEQ ID NO: 1436263 - RNA, 19 nt, Artificial Sequence
  Description of Artificial Sequence: Synthetic oligonucleotide
  Antisense strand to SEQ ID NO: 1436262
uucugucggauucaguugc

SEQ ID NO: 1436264 - RNA, 19 nt, Artificial Sequence
  Description of Artificial Sequence: Synthetic oligonucleotide
  Sense strand starting at position 640 of SEQ ID NO: 1243719
auggcauuacaguguggaa

SEQ ID NO: 1436265 - RNA, 19 nt, Artificial Sequence
  Description of Artificial Sequence: Synthetic oligonucleotide
  Antisense strand to SEQ ID NO: 1436264
uuccacacuguaaugccau

SEQ ID NO: 1436266 - RNA, 19 nt, Artificial Sequence
  Description of Artificial Sequence: Synthetic oligonucleotide
  Sense strand starting at position 642 of SEQ ID NO: 1243719
ggcauuacaguguggaaag

SEQ ID NO: 1436267 - RNA, 19 nt, Artificial Sequence
  Description of Artificial Sequence: Synthetic oligonucleotide
  Antisense strand to SEQ ID NO: 1436266
cuuuccacacuguaaugcc

SEQ ID NO: 1436268 - RNA, 19 nt, Artificial Sequence
  Description of Artificial Sequence: Synthetic oligonucleotide
  Sense strand starting at position 691 of SEQ ID NO: 1243719
gucauuaacuaggcaucuu

SEQ ID NO: 1436269 - RNA, 19 nt, Artificial Sequence
  Description of Artificial Sequence: Synthetic oligonucleotide
  Antisense strand to SEQ ID NO: 1436268
aagaugccuaguuaaugac

SEQ ID NO: 1436270 - RNA, 19 nt, Artificial Sequence
  Description of Artificial Sequence: Synthetic oligonucleotide
  Sense strand starting at position 734 of SEQ ID NO: 1243719
ugaaguauaugcuuucuuu

SEQ ID NO: 1436271 - RNA, 19 nt, Artificial Sequence
  Description of Artificial Sequence: Synthetic oligonucleotide
  Antisense strand to SEQ ID NO: 1436270
aaagaaagcauauacuuca

SEQ ID NO: 1436272 - RNA, 19 nt, Artificial Sequence
  Description of Artificial Sequence: Synthetic oligonucleotide
  Sense strand starting at position 1057 of SEQ ID NO: 1243719
uugugcuguguagguuaua

SEQ ID NO: 1436273 - RNA, 19 nt, Artificial Sequence
  Description of Artificial Sequence: Synthetic oligonucleotide
  Antisense strand to SEQ ID NO: 1436272
uauaaccuacacagcacaa

SEQ ID NO: 1436274 - RNA, 19 nt, Artificial Sequence
  Description of Artificial Sequence: Synthetic oligonucleotide
  Sense strand starting at position 1058 of SEQ ID NO: 1243719
ugugcuguguagguuauau

SEQ ID NO: 1436275 - RNA, 19 nt, Artificial Sequence
  Description of Artificial Sequence: Synthetic oligonucleotide
  Antisense strand to SEQ ID NO: 1436274
auauaaccuacacagcaca

SEQ ID NO: 1436276 - RNA, 19 nt, Artificial Sequence
  Description of Artificial Sequence: Synthetic oligonucleotide
  Sense strand starting at position 1060 of SEQ ID NO: 1243719
ugcuguguagguuauauuu

SEQ ID NO: 1436277 - RNA, 19 nt, Artificial Sequence
  Description of Artificial Sequence: Synthetic oligonucleotide
  Antisense strand to SEQ ID NO: 1436276
aaauauaaccuacacagca

SEQ ID NO: 1436278 - RNA, 19 nt, Artificial Sequence
  Description of Artificial Sequence: Synthetic oligonucleotide
  Sense strand starting at position 1156 of SEQ ID NO: 1243719
auguauucuguugaacaug

SEQ ID NO: 1436279 - RNA, 19 nt, Artificial Sequence
  Description of Artificial Sequence: Synthetic oligonucleotide
  Antisense strand to SEQ ID NO: 1436278
cauguucaacagaauacau

SEQ ID NO: 1436280 - RNA, 19 nt, Artificial Sequence
  Description of Artificial Sequence: Synthetic oligonucleotide
  Sense strand starting at position 1212 of SEQ ID NO: 1243719
uuggucaaaugagauuuaa

SEQ ID NO: 1436281 - RNA, 19 nt, Artificial Sequence
  Description of Artificial Sequence: Synthetic oligonucleotide
  Antisense strand to SEQ ID NO: 1436280
uuaaaucucauuugaccaa

SEQ ID NO: 1436282 - RNA, 19 nt, Artificial Sequence
  Description of Artificial Sequence: Synthetic oligonucleotide
  Sense strand starting at position 1222 of SEQ ID NO: 1243719
gagauuuaauuagguugua

SEQ ID NO: 1436283 - RNA, 19 nt, Artificial Sequence
  Description of Artificial Sequence: Synthetic oligonucleotide
  Antisense strand to SEQ ID NO: 1436282
uacaaccuaauuaaaucuc

SEQ ID NO: 1436284 - RNA, 19 nt, Artificial Sequence
  Description of Artificial Sequence: Synthetic oligonucleotide
  Sense strand starting at position 1227 of SEQ ID NO: 1243719
uuaauuagguuguaagcau

SEQ ID NO: 1436285 - RNA, 19 nt, Artificial Sequence
  Description of Artificial Sequence: Synthetic oligonucleotide
  Antisense strand to SEQ ID NO: 1436284
augcuuacaaccuaauuaa

SEQ ID NO: 1436286 - RNA, 19 nt, Artificial Sequence
  Description of Artificial Sequence: Synthetic oligonucleotide
  Sense strand starting at position 1284 of SEQ ID NO: 1243719
acagcuguuuaagaagcaa

SEQ ID NO: 1436287 - RNA, 19 nt, Artificial Sequence
  Description of Artificial Sequence: Synthetic oligonucleotide
  Antisense strand to SEQ ID NO: 1436286
uugcuucuuaaacagcugu

SEQ ID NO: 1436288 - RNA, 19 nt, Artificial Sequence
  Description of Artificial Sequence: Synthetic oligonucleotide
  Sense strand starting at position 2022 of SEQ ID NO: 1243719
gggugugccgggaguugua

SEQ ID NO: 1436289 - RNA, 19 nt, Artificial Sequence
  Description of Artificial Sequence: Synthetic oligonucleotide
  Antisense strand to SEQ ID NO: 1436288
uacaacucccggcacaccc

SEQ ID NO: 1436290 - RNA, 19 nt, Artificial Sequence
  Description of Artificial Sequence: Synthetic oligonucleotide
  Sense strand starting at position 2564 of SEQ ID NO: 1243719
gcgaguacaucguugacug

SEQ ID NO: 1436291 - RNA, 19 nt, Artificial Sequence
  Description of Artificial Sequence: Synthetic oligonucleotide
  Antisense strand to SEQ ID NO: 1436290
cagucaacgauguacucgc

SEQ ID NO: 1436292 - RNA, 19 nt, Artificial Sequence
  Description of Artificial Sequence: Synthetic oligonucleotide
  Sense strand starting at position 2635 of SEQ ID NO: 1243719
gggccacuaccgugauaag

SEQ ID NO: 1436293 - RNA, 19 nt, Artificial Sequence
  Description of Artificial Sequence: Synthetic oligonucleotide
  Antisense strand to SEQ ID NO: 1436292
cuuaucacgguaguggccc

SEQ ID NO: 1436294 - RNA, 19 nt, Artificial Sequence
  Description of Artificial Sequence: Synthetic oligonucleotide
  Sense strand starting at position 2636 of SEQ ID NO: 1243719
ggccacuaccgugauaaga

SEQ ID NO: 1436295 - RNA, 19 nt, Artificial Sequence
  Description of Artificial Sequence: Synthetic oligonucleotide
  Antisense strand to SEQ ID NO: 1436294
ucuuaucacgguaguggcc

SEQ ID NO: 1436296 - RNA, 19 nt, Artificial Sequence
  Description of Artificial Sequence: Synthetic oligonucleotide
  Sense strand starting at position 2638 of SEQ ID NO: 1243719
ccacuaccgugauaagaag

SEQ ID NO: 1436297 - RNA, 19 nt, Artificial Sequence
  Description of Artificial Sequence: Synthetic oligonucleotide
  Antisense strand to SEQ ID NO: 1436296
cuucuuaucacgguagugg

SEQ ID NO: 1436298 - RNA, 19 nt, Artificial Sequence
  Description of Artificial Sequence: Synthetic oligonucleotide
  Sense strand starting at position 2749 of SEQ ID NO: 1243719
caguaaguccugcagccua

SEQ ID NO: 1436299 - RNA, 19 nt, Artificial Sequence
  Description of Artificial Sequence: Synthetic oligonucleotide
  Antisense strand to SEQ ID NO: 1436298
uaggcugcaggacuuacug

SEQ ID NO: 1436300 - RNA, 19 nt, Artificial Sequence
  Description of Artificial Sequence: Synthetic oligonucleotide
  Sense strand starting at position 2754 of SEQ ID NO: 1243719
aguccugcagccuauuaaa

SEQ ID NO: 1436301 - RNA, 19 nt, Artificial Sequence
  Description of Artificial Sequence: Synthetic oligonucleotide
  Antisense strand to SEQ ID NO: 1436300
uuuaauaggcugcaggacu

SEQ ID NO: 1436302 - RNA, 19 nt, Artificial Sequence
  Description of Artificial Sequence: Synthetic oligonucleotide
  Sense strand starting at position 2784 of SEQ ID NO: 1243719
uguguccucugcuuuggaa

SEQ ID NO: 1436303 - RNA, 19 nt, Artificial Sequence
  Description of Artificial Sequence: Synthetic oligonucleotide
  Antisense strand to SEQ ID NO: 1436302
uuccaaagcagaggacaca

SEQ ID NO: 1436304 - RNA, 19 nt, Artificial Sequence
  Description of Artificial Sequence: Synthetic oligonucleotide
  Sense strand starting at position 2786 of SEQ ID NO: 1243719
uguccucugcuuuggaaca

SEQ ID NO: 1436305 - RNA, 19 nt, Artificial Sequence
  Description of Artificial Sequence: Synthetic oligonucleotide
  Antisense strand to SEQ ID NO: 1436304
uguuccaaagcagaggaca

SEQ ID NO: 1436306 - RNA, 19 nt, Artificial Sequence
  Description of Artificial Sequence: Synthetic oligonucleotide
  Sense strand starting at position 2855 of SEQ ID NO: 1243719
cugguucuauggccagaga

SEQ ID NO: 1436307 - RNA, 19 nt, Artificial Sequence
  Description of Artificial Sequence: Synthetic oligonucleotide
  Antisense strand to SEQ ID NO: 1436306
ucucuggccauagaaccag

SEQ ID NO: 1436308 - RNA, 19 nt, Artificial Sequence
  Description of Artificial Sequence: Synthetic oligonucleotide
  Sense strand starting at position 2856 of SEQ ID NO: 1243719
ugguucuauggccagagau

SEQ ID NO: 1436309 - RNA, 19 nt, Artificial Sequence
  Description of Artificial Sequence: Synthetic oligonucleotide
  Antisense strand to SEQ ID NO: 1436308
aucucuggccauagaacca

SEQ ID NO: 1436310 - RNA, 19 nt, Artificial Sequence
  Description of Artificial Sequence: Synthetic oligonucleotide
  Sense strand starting at position 2858 of SEQ ID NO: 1243719
guucuauggccagagauaa

SEQ ID NO: 1436311 - RNA, 19 nt, Artificial Sequence
  Description of Artificial Sequence: Synthetic oligonucleotide
  Antisense strand to SEQ ID NO: 1436310
uuaucucuggccauagaac

SEQ ID NO: 1436312 - RNA, 19 nt, Artificial Sequence
  Description of Artificial Sequence: Synthetic oligonucleotide
  Sense strand starting at position 3609 of SEQ ID NO: 1243719
aucccuguauguguauaua

SEQ ID NO: 1436313 - RNA, 19 nt, Artificial Sequence
  Description of Artificial Sequence: Synthetic oligonucleotide
  Antisense strand to SEQ ID NO: 1436312
uauauacacauacagggau

SEQ ID NO: 1436314 - RNA, 19 nt, Artificial Sequence
  Description of Artificial Sequence: Synthetic oligonucleotide
  Sense strand starting at position 3612 of SEQ ID NO: 1243719
ccuguauguguauauauca

SEQ ID NO: 1436315 - RNA, 19 nt, Artificial Sequence
  Description of Artificial Sequence: Synthetic oligonucleotide
  Antisense strand to SEQ ID NO: 1436314
ugauauauacacauacagg

SEQ ID NO: 1436316 - RNA, 19 nt, Artificial Sequence
  Description of Artificial Sequence: Synthetic oligonucleotide
  Sense strand starting at position 3625 of SEQ ID NO: 1243719
auaucacaugcauguauau

SEQ ID NO: 1436317 - RNA, 19 nt, Artificial Sequence
  Description of Artificial Sequence: Synthetic oligonucleotide
  Antisense strand to SEQ ID NO: 1436316
auauacaugcaugugauau

SEQ ID NO: 1436318 - RNA, 19 nt, Artificial Sequence
  Description of Artificial Sequence: Synthetic oligonucleotide
  Sense strand starting at position 3644 of SEQ ID NO: 1243719
guauguauaugggugguuu

SEQ ID NO: 1436319 - RNA, 19 nt, Artificial Sequence
  Description of Artificial Sequence: Synthetic oligonucleotide
  Antisense strand to SEQ ID NO: 1436318
aaaccacccauauacauac

SEQ ID NO: 1436320 - RNA, 19 nt, Artificial Sequence
  Description of Artificial Sequence: Synthetic oligonucleotide
  Sense strand starting at position 3645 of SEQ ID NO: 1243719
uauguauaugggugguuua

SEQ ID NO: 1436321 - RNA, 19 nt, Artificial Sequence
  Description of Artificial Sequence: Synthetic oligonucleotide
  Antisense strand to SEQ ID NO: 1436320
uaaaccacccauauacaua

SEQ ID NO: 1436322 - RNA, 19 nt, Artificial Sequence
  Description of Artificial Sequence: Synthetic oligonucleotide
  Sense strand starting at position 3655 of SEQ ID NO: 1243719
ggugguuuaccugaaccgu

SEQ ID NO: 1436323 - RNA, 19 nt, Artificial Sequence
  Description of Artificial Sequence: Synthetic oligonucleotide
  Antisense strand to SEQ ID NO: 1436322
acgguucagguaaaccacc

SEQ ID NO: 1436324 - RNA, 19 nt, Artificial Sequence
  Description of Artificial Sequence: Synthetic oligonucleotide
  Sense strand starting at position 3663 of SEQ ID NO: 1243719
accugaaccguuuguaagu

SEQ ID NO: 1436325 - RNA, 19 nt, Artificial Sequence
  Description of Artificial Sequence: Synthetic oligonucleotide
  Antisense strand to SEQ ID NO: 1436324
acuuacaaacgguucaggu

SEQ ID NO: 1436326 - RNA, 19 nt, Artificial Sequence
  Description of Artificial Sequence: Synthetic oligonucleotide
  Sense strand starting at position 3664 of SEQ ID NO: 1243719
ccugaaccguuuguaaguu

SEQ ID NO: 1436327 - RNA, 19 nt, Artificial Sequence
  Description of Artificial Sequence: Synthetic oligonucleotide
  Antisense strand to SEQ ID NO: 1436326
aacuuacaaacgguucagg

SEQ ID NO: 1436328 - RNA, 19 nt, Artificial Sequence
  Description of Artificial Sequence: Synthetic oligonucleotide
  Sense strand starting at position 3674 of SEQ ID NO: 1243719
uuguaaguugaaggcauua

SEQ ID NO: 1436329 - RNA, 19 nt, Artificial Sequence
  Description of Artificial Sequence: Synthetic oligonucleotide
  Antisense strand to SEQ ID NO: 1436328
uaaugccuucaacuuacaa

SEQ ID NO: 1436330 - RNA, 19 nt, Artificial Sequence
  Description of Artificial Sequence: Synthetic oligonucleotide
  Sense strand starting at position 3679 of SEQ ID NO: 1243719
aguugaaggcauuaccaua

SEQ ID NO: 1436331 - RNA, 19 nt, Artificial Sequence
  Description of Artificial Sequence: Synthetic oligonucleotide
  Antisense strand to SEQ ID NO: 1436330
uaugguaaugccuucaacu

SEQ ID NO: 1436332 - RNA, 19 nt, Artificial Sequence
  Description of Artificial Sequence: Synthetic oligonucleotide
  Sense strand starting at position 3758 of SEQ ID NO: 1243719
uuaacuucgcugcaguuau

SEQ ID NO: 1436333 - RNA, 19 nt, Artificial Sequence
  Description of Artificial Sequence: Synthetic oligonucleotide
  Antisense strand to SEQ ID NO: 1436332
auaacugcagcgaaguuaa

SEQ ID NO: 1436334 - RNA, 19 nt, Artificial Sequence
  Description of Artificial Sequence: Synthetic oligonucleotide
  Sense strand starting at position 3814 of SEQ ID NO: 1243719
ugcugauuggcucgcuaac

SEQ ID NO: 1436335 - RNA, 19 nt, Artificial Sequence
  Description of Artificial Sequence: Synthetic oligonucleotide
  Antisense strand to SEQ ID NO: 1436334
guuagcgagccaaucagca

SEQ ID NO: 1436336 - RNA, 19 nt, Artificial Sequence
  Description of Artificial Sequence: Synthetic oligonucleotide
  Sense strand starting at position 184 of SEQ ID NO: 1243720
guaggaccacugugacauu

SEQ ID NO: 1436337 - RNA, 19 nt, Artificial Sequence
  Description of Artificial Sequence: Synthetic oligonucleotide
  Antisense strand to SEQ ID NO: 1436336
aaugucacagugguccuac

SEQ ID NO: 1436338 - RNA, 19 nt, Artificial Sequence
  Description of Artificial Sequence: Synthetic oligonucleotide
  Sense strand starting at position 211 of SEQ ID NO: 1243720
gaucaucuguagccugaga

SEQ ID NO: 1436339 - RNA, 19 nt, Artificial Sequence
  Description of Artificial Sequence: Synthetic oligonucleotide
  Antisense strand to SEQ ID NO: 1436338
ucucaggcuacagaugauc

SEQ ID NO: 1436340 - RNA, 19 nt, Artificial Sequence
  Description of Artificial Sequence: Synthetic oligonucleotide
  Sense strand starting at position 348 of SEQ ID NO: 1243720
auguacucacguuaaaugu

SEQ ID NO: 1436341 - RNA, 19 nt, Artificial Sequence
  Description of Artificial Sequence: Synthetic oligonucleotide
  Antisense strand to SEQ ID NO: 1436340
acauuuaacgugaguacau

SEQ ID NO: 1436342 - RNA, 19 nt, Artificial Sequence
  Description of Artificial Sequence: Synthetic oligonucleotide
  Sense strand starting at position 405 of SEQ ID NO: 1243720
augugcuuccuguccguau

SEQ ID NO: 1436343 - RNA, 19 nt, Artificial Sequence
  Description of Artificial Sequence: Synthetic oligonucleotide
  Antisense strand to SEQ ID NO: 1436342
auacggacaggaagcacau

SEQ ID NO: 1436344 - RNA, 19 nt, Artificial Sequence
  Description of Artificial Sequence: Synthetic oligonucleotide
  Sense strand starting at position 497 of SEQ ID NO: 1243720
augugcuccuuauuuagau

SEQ ID NO: 1436345 - RNA, 19 nt, Artificial Sequence
  Description of Artificial Sequence: Synthetic oligonucleotide
  Antisense strand to SEQ ID NO: 1436344
aucuaaauaaggagcacau

SEQ ID NO: 1436346 - RNA, 19 nt, Artificial Sequence
  Description of Artificial Sequence: Synthetic oligonucleotide
  Sense strand starting at position 498 of SEQ ID NO: 1243720
ugugcuccuuauuuagauu

SEQ ID NO: 1436347 - RNA, 19 nt, Artificial Sequence
  Description of Artificial Sequence: Synthetic oligonucleotide
  Antisense strand to SEQ ID NO: 1436346
aaucuaaauaaggagcaca

SEQ ID NO: 1436348 - RNA, 19 nt, Artificial Sequence
  Description of Artificial Sequence: Synthetic oligonucleotide
  Sense strand starting at position 681 of SEQ ID NO: 1243720
aguuguaaccaagaagcau

SEQ ID NO: 1436349 - RNA, 19 nt, Artificial Sequence
  Description of Artificial Sequence: Synthetic oligonucleotide
  Antisense strand to SEQ ID NO: 1436348
augcuucuugguuacaacu

SEQ ID NO: 1436350 - RNA, 19 nt, Artificial Sequence
  Description of Artificial Sequence: Synthetic oligonucleotide
  Sense strand starting at position 908 of SEQ ID NO: 1243720
acguauacucauggacaug

SEQ ID NO: 1436351 - RNA, 19 nt, Artificial Sequence
  Description of Artificial Sequence: Synthetic oligonucleotide
  Antisense strand to SEQ ID NO: 1436350
cauguccaugaguauacgu

SEQ ID NO: 1436352 - RNA, 19 nt, Artificial Sequence
  Description of Artificial Sequence: Synthetic oligonucleotide
  Sense strand starting at position 909 of SEQ ID NO: 1243720
cguauacucauggacaugu

SEQ ID NO: 1436353 - RNA, 19 nt, Artificial Sequence
  Description of Artificial Sequence: Synthetic oligonucleotide
  Antisense strand to SEQ ID NO: 1436352
acauguccaugaguauacg

SEQ ID NO: 1436354 - RNA, 19 nt, Artificial Sequence
  Description of Artificial Sequence: Synthetic oligonucleotide
  Sense strand starting at position 986 of SEQ ID NO: 1243720
uggguaauguucuuagacc

SEQ ID NO: 1436355 - RNA, 19 nt, Artificial Sequence
  Description of Artificial Sequence: Synthetic oligonucleotide
  Antisense strand to SEQ ID NO: 1436354
ggucuaagaacauuaccca

SEQ ID NO: 1436356 - RNA, 19 nt, Artificial Sequence
  Description of Artificial Sequence: Synthetic oligonucleotide
  Sense strand starting at position 1017 of SEQ ID NO: 1243720
ugccucauucuuuacgaau

SEQ ID NO: 1436357 - RNA, 19 nt, Artificial Sequence
  Description of Artificial Sequence: Synthetic oligonucleotide
  Antisense strand to SEQ ID NO: 1436356
auucguaaagaaugaggca

SEQ ID NO: 1436358 - RNA, 19 nt, Artificial Sequence
  Description of Artificial Sequence: Synthetic oligonucleotide
  Sense strand starting at position 1054 of SEQ ID NO: 1243720
guacgaauuuaagaccacu

SEQ ID NO: 1436359 - RNA, 19 nt, Artificial Sequence
  Description of Artificial Sequence: Synthetic oligonucleotide
  Antisense strand to SEQ ID NO: 1436358
aguggucuuaaauucguac

SEQ ID NO: 1436360 - RNA, 19 nt, Artificial Sequence
  Description of Artificial Sequence: Synthetic oligonucleotide
  Sense strand starting at position 1264 of SEQ ID NO: 1243720
ccgacauucugggcaagua

SEQ ID NO: 1436361 - RNA, 19 nt, Artificial Sequence
  Description of Artificial Sequence: Synthetic oligonucleotide
  Antisense strand to SEQ ID NO: 1436360
uacuugcccagaaugucgg

SEQ ID NO: 1436362 - RNA, 19 nt, Artificial Sequence
  Description of Artificial Sequence: Synthetic oligonucleotide
  Sense strand starting at position 2273 of SEQ ID NO: 1243720
cccgaaggcucuuccuaua

SEQ ID NO: 1436363 - RNA, 19 nt, Artificial Sequence
  Description of Artificial Sequence: Synthetic oligonucleotide
  Antisense strand to SEQ ID NO: 1436362
uauaggaagagccuucggg

SEQ ID NO: 1436364 - RNA, 19 nt, Artificial Sequence
  Description of Artificial Sequence: Synthetic oligonucleotide
  Sense strand starting at position 2339 of SEQ ID NO: 1243720
cuuggauucucaucagaag

SEQ ID NO: 1436365 - RNA, 19 nt, Artificial Sequence
  Description of Artificial Sequence: Synthetic oligonucleotide
  Antisense strand to SEQ ID NO: 1436364
cuucugaugagaauccaag

SEQ ID NO: 1436366 - RNA, 19 nt, Artificial Sequence
  Description of Artificial Sequence: Synthetic oligonucleotide
  Sense strand starting at position 2356 of SEQ ID NO: 1243720
agcaaauaauugucuuuga

SEQ ID NO: 1436367 - RNA, 19 nt, Artificial Sequence
  Description of Artificial Sequence: Synthetic oligonucleotide
  Antisense strand to SEQ ID NO: 1436366
ucaaagacaauuauuugcu

SEQ ID NO: 1436368 - RNA, 19 nt, Artificial Sequence
  Description of Artificial Sequence: Synthetic oligonucleotide
  Sense strand starting at position 2357 of SEQ ID NO: 1243720
gcaaauaauugucuuugag

SEQ ID NO: 1436369 - RNA, 19 nt, Artificial Sequence
  Description of Artificial Sequence: Synthetic oligonucleotide
  Antisense strand to SEQ ID NO: 1436368
cucaaagacaauuauuugc

SEQ ID NO: 1436370 - RNA, 19 nt, Artificial Sequence
  Description of Artificial Sequence: Synthetic oligonucleotide
  Sense strand starting at position 2569 of SEQ ID NO: 1243720
uguuucgccgaguucucua

SEQ ID NO: 1436371 - RNA, 19 nt, Artificial Sequence
  Description of Artificial Sequence: Synthetic oligonucleotide
  Antisense strand to SEQ ID NO: 1436370
uagagaacucggcgaaaca

SEQ ID NO: 1436372 - RNA, 19 nt, Artificial Sequence
  Description of Artificial Sequence: Synthetic oligonucleotide
  Sense strand starting at position 2802 of SEQ ID NO: 1243720
guguguaaccuagaaucua

SEQ ID NO: 1436373 - RNA, 19 nt, Artificial Sequence
  Description of Artificial Sequence: Synthetic oligonucleotide
  Antisense strand to SEQ ID NO: 1436372
uagauucuagguuacacac

SEQ ID NO: 1436374 - RNA, 19 nt, Artificial Sequence
  Description of Artificial Sequence: Synthetic oligonucleotide
  Sense strand starting at position 2810 of SEQ ID NO: 1243720
ccuagaaucuaggucuucu

SEQ ID NO: 1436375 - RNA, 19 nt, Artificial Sequence
  Description of Artificial Sequence: Synthetic oligonucleotide
  Antisense strand to SEQ ID NO: 1436374
agaagaccuagauucuagg

SEQ ID NO: 1436376 - RNA, 19 nt, Artificial Sequence
  Description of Artificial Sequence: Synthetic oligonucleotide
  Sense strand starting at position 2814 of SEQ ID NO: 1243720
gaaucuaggucuucuuaga

SEQ ID NO: 1436377 - RNA, 19 nt, Artificial Sequence
  Description of Artificial Sequence: Synthetic oligonucleotide
  Antisense strand to SEQ ID NO: 1436376
ucuaagaagaccuagauuc

SEQ ID NO: 1436378 - RNA, 19 nt, Artificial Sequence
  Description of Artificial Sequence: Synthetic oligonucleotide
  Sense strand starting at position 2895 of SEQ ID NO: 1243720
ucagucauuugagaaagca

SEQ ID NO: 1436379 - RNA, 19 nt, Artificial Sequence
  Description of Artificial Sequence: Synthetic oligonucleotide
  Antisense strand to SEQ ID NO: 1436378
ugcuuucucaaaugacuga

SEQ ID NO: 1436380 - RNA, 19 nt, Artificial Sequence
  Description of Artificial Sequence: Synthetic oligonucleotide
  Sense strand starting at position 2916 of SEQ ID NO: 1243720
guuucuaugucccuagaga

SEQ ID NO: 1436381 - RNA, 19 nt, Artificial Sequence
  Description of Artificial Sequence: Synthetic oligonucleotide
  Antisense strand to SEQ ID NO: 1436380
ucucuagggacauagaaac

SEQ ID NO: 1436382 - RNA, 19 nt, Artificial Sequence
  Description of Artificial Sequence: Synthetic oligonucleotide
  Sense strand starting at position 2917 of SEQ ID NO: 1243720
uuucuaugucccuagagag

SEQ ID NO: 1436383 - RNA, 19 nt, Artificial Sequence
  Description of Artificial Sequence: Synthetic oligonucleotide
  Antisense strand to SEQ ID NO: 1436382
cucucuagggacauagaaa

SEQ ID NO: 1436384 - RNA, 19 nt, Artificial Sequence
  Description of Artificial Sequence: Synthetic oligonucleotide
  Sense strand starting at position 2927 of SEQ ID NO: 1243720
ccuagagagacucggcuaa

SEQ ID NO: 1436385 - RNA, 19 nt, Artificial Sequence
  Description of Artificial Sequence: Synthetic oligonucleotide
  Antisense strand to SEQ ID NO: 1436384
uuagccgagucucucuagg

SEQ ID NO: 1436386 - RNA, 19 nt, Artificial Sequence
  Description of Artificial Sequence: Synthetic oligonucleotide
  Sense strand starting at position 3048 of SEQ ID NO: 1243720
gaaagaaaucacugguccu

SEQ ID NO: 1436387 - RNA, 19 nt, Artificial Sequence
  Description of Artificial Sequence: Synthetic oligonucleotide
  Antisense strand to SEQ ID NO: 1436386
aggaccagugauuucuuuc

SEQ ID NO: 1436388 - RNA, 19 nt, Artificial Sequence
  Description of Artificial Sequence: Synthetic oligonucleotide
  Sense strand starting at position 3233 of SEQ ID NO: 1243720
uuuagacuaucuguaguag

SEQ ID NO: 1436389 - RNA, 19 nt, Artificial Sequence
  Description of Artificial Sequence: Synthetic oligonucleotide
  Antisense strand to SEQ ID NO: 1436388
cuacuacagauagucuaaa

SEQ ID NO: 1436390 - RNA, 19 nt, Artificial Sequence
  Description of Artificial Sequence: Synthetic oligonucleotide
  Sense strand starting at position 3242 of SEQ ID NO: 1243720
ucuguaguagcauaccaau

SEQ ID NO: 1436391 - RNA, 19 nt, Artificial Sequence
  Description of Artificial Sequence: Synthetic oligonucleotide
  Antisense strand to SEQ ID NO: 1436390
auugguaugcuacuacaga

SEQ ID NO: 1436392 - RNA, 19 nt, Artificial Sequence
  Description of Artificial Sequence: Synthetic oligonucleotide
  Sense strand starting at position 3261 of SEQ ID NO: 1243720
agugcuguagacuguagaa

SEQ ID NO: 1436393 - RNA, 19 nt, Artificial Sequence
  Description of Artificial Sequence: Synthetic oligonucleotide
  Antisense strand to SEQ ID NO: 1436392
uucuacagucuacagcacu

SEQ ID NO: 1436394 - RNA, 19 nt, Artificial Sequence
  Description of Artificial Sequence: Synthetic oligonucleotide
  Sense strand starting at position 3284 of SEQ ID NO: 1243720
ugaggagagcacugucaau

SEQ ID NO: 1436395 - RNA, 19 nt, Artificial Sequence
  Description of Artificial Sequence: Synthetic oligonucleotide
  Antisense strand to SEQ ID NO: 1436394
auugacagugcucuccuca

SEQ ID NO: 1436396 - RNA, 19 nt, Artificial Sequence
  Description of Artificial Sequence: Synthetic oligonucleotide
  Sense strand starting at position 3524 of SEQ ID NO: 1243720
guagguuugggccaagaua

SEQ ID NO: 1436397 - RNA, 19 nt, Artificial Sequence
  Description of Artificial Sequence: Synthetic oligonucleotide
  Antisense strand to SEQ ID NO: 1436396
uaucuuggcccaaaccuac

SEQ ID NO: 1436398 - RNA, 19 nt, Artificial Sequence
  Description of Artificial Sequence: Synthetic oligonucleotide
  Sense strand starting at position 3569 of SEQ ID NO: 1243720
gcaucuggacuuuaucuua

SEQ ID NO: 1436399 - RNA, 19 nt, Artificial Sequence
  Description of Artificial Sequence: Synthetic oligonucleotide
  Antisense strand to SEQ ID NO: 1436398
uaagauaaaguccagaugc

SEQ ID NO: 1436400 - RNA, 19 nt, Artificial Sequence
  Description of Artificial Sequence: Synthetic oligonucleotide
  Sense strand starting at position 3583 of SEQ ID NO: 1243720
ucuuaugguuaauuagaag

SEQ ID NO: 1436401 - RNA, 19 nt, Artificial Sequence
  Description of Artificial Sequence: Synthetic oligonucleotide
  Antisense strand to SEQ ID NO: 1436400
cuucuaauuaaccauaaga

SEQ ID NO: 1436402 - RNA, 19 nt, Artificial Sequence
  Description of Artificial Sequence: Synthetic oligonucleotide
  Sense strand starting at position 3718 of SEQ ID NO: 1243720
uuagaagguucuuccagua

SEQ ID NO: 1436403 - RNA, 19 nt, Artificial Sequence
  Description of Artificial Sequence: Synthetic oligonucleotide
  Antisense strand to SEQ ID NO: 1436402
uacuggaagaaccuucuaa

SEQ ID NO: 1436404 - RNA, 19 nt, Artificial Sequence
  Description of Artificial Sequence: Synthetic oligonucleotide
  Sense strand starting at position 3723 of SEQ ID NO: 1243720
agguucuuccaguagugaa

SEQ ID NO: 1436405 - RNA, 19 nt, Artificial Sequence
  Description of Artificial Sequence: Synthetic oligonucleotide
  Antisense strand to SEQ ID NO: 1436404
uucacuacuggaagaaccu

SEQ ID NO: 1436406 - RNA, 19 nt, Artificial Sequence
  Description of Artificial Sequence: Synthetic oligonucleotide
  Sense strand starting at position 3782 of SEQ ID NO: 1243720
aggcauugauaaucuugaa

SEQ ID NO: 1436407 - RNA, 19 nt, Artificial Sequence
  Description of Artificial Sequence: Synthetic oligonucleotide
  Antisense strand to SEQ ID NO: 1436406
uucaagauuaucaaugccu

SEQ ID NO: 1436408 - RNA, 19 nt, Artificial Sequence
  Description of Artificial Sequence: Synthetic oligonucleotide
  Sense strand starting at position 3891 of SEQ ID NO: 1243720
gcagaucugaacugaguuu

SEQ ID NO: 1436409 - RNA, 19 nt, Artificial Sequence
  Description of Artificial Sequence: Synthetic oligonucleotide
  Antisense strand to SEQ ID NO: 1436408
aaacucaguucagaucugc

SEQ ID NO: 1436410 - RNA, 19 nt, Artificial Sequence
  Description of Artificial Sequence: Synthetic oligonucleotide
  Sense strand starting at position 3902 of SEQ ID NO: 1243720
cugaguuugggccauagca

SEQ ID NO: 1436411 - RNA, 19 nt, Artificial Sequence
  Description of Artificial Sequence: Synthetic oligonucleotide
  Antisense strand to SEQ ID NO: 1436410
ugcuauggcccaaacucag

SEQ ID NO: 1436412 - RNA, 19 nt, Artificial Sequence
  Description of Artificial Sequence: Synthetic oligonucleotide
  Sense strand starting at position 3904 of SEQ ID NO: 1243720
gaguuugggccauagcaaa

SEQ ID NO: 1436413 - RNA, 19 nt, Artificial Sequence
  Description of Artificial Sequence: Synthetic oligonucleotide
  Antisense strand to SEQ ID NO: 1436412
uuugcuauggcccaaacuc

SEQ ID NO: 1436414 - RNA, 19 nt, Artificial Sequence
  Description of Artificial Sequence: Synthetic oligonucleotide
  Sense strand starting at position 3953 of SEQ ID NO: 1243720
agaaguucaggacguagau

SEQ ID NO: 1436415 - RNA, 19 nt, Artificial Sequence
  Description of Artificial Sequence: Synthetic oligonucleotide
  Antisense strand to SEQ ID NO: 1436414
aucuacguccugaacuucu

SEQ ID NO: 1436416 - RNA, 19 nt, Artificial Sequence
  Description of Artificial Sequence: Synthetic oligonucleotide
  Sense strand starting at position 8 of SEQ ID NO: 1243721
acccuagucucucugagaa

SEQ ID NO: 1436417 - RNA, 19 nt, Artificial Sequence
  Description of Artificial Sequence: Synthetic oligonucleotide
  Antisense strand to SEQ ID NO: 1436416
uucucagagagacuagggu

SEQ ID NO: 1436418 - RNA, 19 nt, Artificial Sequence
  Description of Artificial Sequence: Synthetic oligonucleotide
  Sense strand starting at position 10 of SEQ ID NO: 1243721
ccuagucucucugagaaag

SEQ ID NO: 1436419 - RNA, 19 nt, Artificial Sequence
  Description of Artificial Sequence: Synthetic oligonucleotide
  Antisense strand to SEQ ID NO: 1436418
cuuucucagagagacuagg

SEQ ID NO: 1436420 - RNA, 19 nt, Artificial Sequence
  Description of Artificial Sequence: Synthetic oligonucleotide
  Sense strand starting at position 12 of SEQ ID NO: 1243721
uagucucucugagaaagac

SEQ ID NO: 1436421 - RNA, 19 nt, Artificial Sequence
  Description of Artificial Sequence: Synthetic oligonucleotide
  Antisense strand to SEQ ID NO: 1436420
gucuuucucagagagacua

SEQ ID NO: 1436422 - RNA, 19 nt, Artificial Sequence
  Description of Artificial Sequence: Synthetic oligonucleotide
  Sense strand starting at position 172 of SEQ ID NO: 1243721
ccgguuguugcuuugguua

SEQ ID NO: 1436423 - RNA, 19 nt, Artificial Sequence
  Description of Artificial Sequence: Synthetic oligonucleotide
  Antisense strand to SEQ ID NO: 1436422
uaaccaaagcaacaaccgg

SEQ ID NO: 1436424 - RNA, 19 nt, Artificial Sequence
  Description of Artificial Sequence: Synthetic oligonucleotide
  Sense strand starting at position 177 of SEQ ID NO: 1243721
uguugcuuugguuauguua

SEQ ID NO: 1436425 - RNA, 19 nt, Artificial Sequence
  Description of Artificial Sequence: Synthetic oligonucleotide
  Antisense strand to SEQ ID NO: 1436424
uaacauaaccaaagcaaca

SEQ ID NO: 1436426 - RNA, 19 nt, Artificial Sequence
  Description of Artificial Sequence: Synthetic oligonucleotide
  Sense strand starting at position 179 of SEQ ID NO: 1243721
uugcuuugguuauguuaau

SEQ ID NO: 1436427 - RNA, 19 nt, Artificial Sequence
  Description of Artificial Sequence: Synthetic oligonucleotide
  Antisense strand to SEQ ID NO: 1436426
auuaacauaaccaaagcaa

SEQ ID NO: 1436428 - RNA, 19 nt, Artificial Sequence
  Description of Artificial Sequence: Synthetic oligonucleotide
  Sense strand starting at position 206 of SEQ ID NO: 1243721
uuaguaaauugugacuaug

SEQ ID NO: 1436429 - RNA, 19 nt, Artificial Sequence
  Description of Artificial Sequence: Synthetic oligonucleotide
  Antisense strand to SEQ ID NO: 1436428
cauagucacaauuuacuaa

SEQ ID NO: 1436430 - RNA, 19 nt, Artificial Sequence
  Description of Artificial Sequence: Synthetic oligonucleotide
  Sense strand starting at position 208 of SEQ ID NO: 1243721
aguaaauugugacuaugua

SEQ ID NO: 1436431 - RNA, 19 nt, Artificial Sequence
  Description of Artificial Sequence: Synthetic oligonucleotide
  Antisense strand to SEQ ID NO: 1436430
uacauagucacaauuuacu

SEQ ID NO: 1436432 - RNA, 19 nt, Artificial Sequence
  Description of Artificial Sequence: Synthetic oligonucleotide
  Sense strand starting at position 209 of SEQ ID NO: 1243721
guaaauugugacuauguac

SEQ ID NO: 1436433 - RNA, 19 nt, Artificial Sequence
  Description of Artificial Sequence: Synthetic oligonucleotide
  Antisense strand to SEQ ID NO: 1436432
guacauagucacaauuuac

SEQ ID NO: 1436434 - RNA, 19 nt, Artificial Sequence
  Description of Artificial Sequence: Synthetic oligonucleotide
  Sense strand starting at position 286 of SEQ ID NO: 1243721
uagagaaacuuucugugag

SEQ ID NO: 1436435 - RNA, 19 nt, Artificial Sequence
  Description of Artificial Sequence: Synthetic oligonucleotide
  Antisense strand to SEQ ID NO: 1436434
cucacagaaaguuucucua

SEQ ID NO: 1436436 - RNA, 19 nt, Artificial Sequence
  Description of Artificial Sequence: Synthetic oligonucleotide
  Sense strand starting at position 287 of SEQ ID NO: 1243721
agagaaacuuucugugaga

SEQ ID NO: 1436437 - RNA, 19 nt, Artificial Sequence
  Description of Artificial Sequence: Synthetic oligonucleotide
  Antisense strand to SEQ ID NO: 1436436
ucucacagaaaguuucucu

SEQ ID NO: 1436438 - RNA, 19 nt, Artificial Sequence
  Description of Artificial Sequence: Synthetic oligonucleotide
  Sense strand starting at position 395 of SEQ ID NO: 1243721
uguaauaaaucugauacug

SEQ ID NO: 1436439 - RNA, 19 nt, Artificial Sequence
  Description of Artificial Sequence: Synthetic oligonucleotide
  Antisense strand to SEQ ID NO: 1436438
caguaucagauuuauuaca

SEQ ID NO: 1436440 - RNA, 19 nt, Artificial Sequence
  Description of Artificial Sequence: Synthetic oligonucleotide
  Sense strand starting at position 410 of SEQ ID NO: 1243721
acugaugccgugugacuua

SEQ ID NO: 1436441 - RNA, 19 nt, Artificial Sequence
  Description of Artificial Sequence: Synthetic oligonucleotide
  Antisense strand to SEQ ID NO: 1436440
uaagucacacggcaucagu

SEQ ID NO: 1436442 - RNA, 19 nt, Artificial Sequence
  Description of Artificial Sequence: Synthetic oligonucleotide
  Sense strand starting at position 413 of SEQ ID NO: 1243721
gaugccgugugacuuagaa

SEQ ID NO: 1436443 - RNA, 19 nt, Artificial Sequence
  Description of Artificial Sequence: Synthetic oligonucleotide
  Antisense strand to SEQ ID NO: 1436442
uucuaagucacacggcauc

SEQ ID NO: 1436444 - RNA, 19 nt, Artificial Sequence
  Description of Artificial Sequence: Synthetic oligonucleotide
  Sense strand starting at position 415 of SEQ ID NO: 1243721
ugccgugugacuuagaagu

SEQ ID NO: 1436445 - RNA, 19 nt, Artificial Sequence
  Description of Artificial Sequence: Synthetic oligonucleotide
  Antisense strand to SEQ ID NO: 1436444
acuucuaagucacacggca

SEQ ID NO: 1436446 - RNA, 19 nt, Artificial Sequence
  Description of Artificial Sequence: Synthetic oligonucleotide
  Sense strand starting at position 417 of SEQ ID NO: 1243721
ccgugugacuuagaaguug

SEQ ID NO: 1436447 - RNA, 19 nt, Artificial Sequence
  Description of Artificial Sequence: Synthetic oligonucleotide
  Antisense strand to SEQ ID NO: 1436446
caacuucuaagucacacgg

SEQ ID NO: 1436448 - RNA, 19 nt, Artificial Sequence
  Description of Artificial Sequence: Synthetic oligonucleotide
  Sense strand starting at position 425 of SEQ ID NO: 1243721
cuuagaaguuguuccagaa

SEQ ID NO: 1436449 - RNA, 19 nt, Artificial Sequence
  Description of Artificial Sequence: Synthetic oligonucleotide
  Antisense strand to SEQ ID NO: 1436448
uucuggaacaacuucuaag

SEQ ID NO: 1436450 - RNA, 19 nt, Artificial Sequence
  Description of Artificial Sequence: Synthetic oligonucleotide
  Sense strand starting at position 429 of SEQ ID NO: 1243721
gaaguuguuccagaaguuc

SEQ ID NO: 1436451 - RNA, 19 nt, Artificial Sequence
  Description of Artificial Sequence: Synthetic oligonucleotide
  Antisense strand to SEQ ID NO: 1436450
gaacuucuggaacaacuuc

SEQ ID NO: 1436452 - RNA, 19 nt, Artificial Sequence
  Description of Artificial Sequence: Synthetic oligonucleotide
  Sense strand starting at position 531 of SEQ ID NO: 1243721
gcgaucaaaugaguuaaga

SEQ ID NO: 1436453 - RNA, 19 nt, Artificial Sequence
  Description of Artificial Sequence: Synthetic oligonucleotide
  Antisense strand to SEQ ID NO: 1436452
ucuuaacucauuugaucgc

SEQ ID NO: 1436454 - RNA, 19 nt, Artificial Sequence
  Description of Artificial Sequence: Synthetic oligonucleotide
  Sense strand starting at position 597 of SEQ ID NO: 1243721
aauucugaaucggaugaau

SEQ ID NO: 1436455 - RNA, 19 nt, Artificial Sequence
  Description of Artificial Sequence: Synthetic oligonucleotide
  Antisense strand to SEQ ID NO: 1436454
auucauccgauucagaauu

SEQ ID NO: 1436456 - RNA, 19 nt, Artificial Sequence
  Description of Artificial Sequence: Synthetic oligonucleotide
  Sense strand starting at position 599 of SEQ ID NO: 1243721
uucugaaucggaugaauaa

SEQ ID NO: 1436457 - RNA, 19 nt, Artificial Sequence
  Description of Artificial Sequence: Synthetic oligonucleotide
  Antisense strand to SEQ ID NO: 1436456
uuauucauccgauucagaa

SEQ ID NO: 1436458 - RNA, 19 nt, Artificial Sequence
  Description of Artificial Sequence: Synthetic oligonucleotide
  Sense strand starting at position 824 of SEQ ID NO: 1243721
guguuuguguaccacaauc

SEQ ID NO: 1436459 - RNA, 19 nt, Artificial Sequence
  Description of Artificial Sequence: Synthetic oligonucleotide
  Antisense strand to SEQ ID NO: 1436458
gauugugguacacaaacac

SEQ ID NO: 1436460 - RNA, 19 nt, Artificial Sequence
  Description of Artificial Sequence: Synthetic oligonucleotide
  Sense strand starting at position 832 of SEQ ID NO: 1243721
guaccacaaucuguccaaa

SEQ ID NO: 1436461 - RNA, 19 nt, Artificial Sequence
  Description of Artificial Sequence: Synthetic oligonucleotide
  Antisense strand to SEQ ID NO: 1436460
uuuggacagauugugguac

SEQ ID NO: 1436462 - RNA, 19 nt, Artificial Sequence
  Description of Artificial Sequence: Synthetic oligonucleotide
  Sense strand starting at position 1180 of SEQ ID NO: 1243721
acuugaugugccgucgcau

SEQ ID NO: 1436463 - RNA, 19 nt, Artificial Sequence
  Description of Artificial Sequence: Synthetic oligonucleotide
  Antisense strand to SEQ ID NO: 1436462
augcgacggcacaucaagu

SEQ ID NO: 1436464 - RNA, 19 nt, Artificial Sequence
  Description of Artificial Sequence: Synthetic oligonucleotide
  Sense strand starting at position 1181 of SEQ ID NO: 1243721
cuugaugugccgucgcauu

SEQ ID NO: 1436465 - RNA, 19 nt, Artificial Sequence
  Description of Artificial Sequence: Synthetic oligonucleotide
  Antisense strand to SEQ ID NO: 1436464
aaugcgacggcacaucaag

SEQ ID NO: 1436466 - RNA, 19 nt, Artificial Sequence
  Description of Artificial Sequence: Synthetic oligonucleotide
  Sense strand starting at position 2557 of SEQ ID NO: 1243721
uauggaaacugaugcugaa

SEQ ID NO: 1436467 - RNA, 19 nt, Artificial Sequence
  Description of Artificial Sequence: Synthetic oligonucleotide
  Antisense strand to SEQ ID NO: 1436466
uucagcaucaguuuccaua

SEQ ID NO: 1436468 - RNA, 19 nt, Artificial Sequence
  Description of Artificial Sequence: Synthetic oligonucleotide
  Sense strand starting at position 2701 of SEQ ID NO: 1243721
uuaggaaacucugaagcau

SEQ ID NO: 1436469 - RNA, 19 nt, Artificial Sequence
  Description of Artificial Sequence: Synthetic oligonucleotide
  Antisense strand to SEQ ID NO: 1436468
augcuucagaguuuccuaa

SEQ ID NO: 1436470 - RNA, 19 nt, Artificial Sequence
  Description of Artificial Sequence: Synthetic oligonucleotide
  Sense strand starting at position 2830 of SEQ ID NO: 1243721
uggaauccgcacugggaaa

SEQ ID NO: 1436471 - RNA, 19 nt, Artificial Sequence
  Description of Artificial Sequence: Synthetic oligonucleotide
  Antisense strand to SEQ ID NO: 1436470
uuucccagugcggauucca

SEQ ID NO: 1436472 - RNA, 19 nt, Artificial Sequence
  Description of Artificial Sequence: Synthetic oligonucleotide
  Sense strand starting at position 2924 of SEQ ID NO: 1243721
ucgaucaccucagcaagaa

SEQ ID NO: 1436473 - RNA, 19 nt, Artificial Sequence
  Description of Artificial Sequence: Synthetic oligonucleotide
  Antisense strand to SEQ ID NO: 1436472
uucuugcugaggugaucga

SEQ ID NO: 1436474 - RNA, 19 nt, Artificial Sequence
  Description of Artificial Sequence: Synthetic oligonucleotide
  Sense strand starting at position 3142 of SEQ ID NO: 1243721
gaggucagcucuuuagaua

SEQ ID NO: 1436475 - RNA, 19 nt, Artificial Sequence
  Description of Artificial Sequence: Synthetic oligonucleotide
  Antisense strand to SEQ ID NO: 1436474
uaucuaaagagcugaccuc

SEQ ID NO: 1436476 - RNA, 19 nt, Artificial Sequence
  Description of Artificial Sequence: Synthetic oligonucleotide
  Sense strand starting at position 3143 of SEQ ID NO: 1243721
aggucagcucuuuagauaa

SEQ ID NO: 1436477 - RNA, 19 nt, Artificial Sequence
  Description of Artificial Sequence: Synthetic oligonucleotide
  Antisense strand to SEQ ID NO: 1436476
uuaucuaaagagcugaccu

SEQ ID NO: 1436478 - RNA, 19 nt, Artificial Sequence
  Description of Artificial Sequence: Synthetic oligonucleotide
  Sense strand starting at position 3145 of SEQ ID NO: 1243721
gucagcucuuuagauaaga

SEQ ID NO: 1436479 - RNA, 19 nt, Artificial Sequence
  Description of Artificial Sequence: Synthetic oligonucleotide
  Antisense strand to SEQ ID NO: 1436478
ucuuaucuaaagagcugac

SEQ ID NO: 1436480 - RNA, 19 nt, Artificial Sequence
  Description of Artificial Sequence: Synthetic oligonucleotide
  Sense strand starting at position 3161 of SEQ ID NO: 1243721
agagaaagguguuauaaac

SEQ ID NO: 1436481 - RNA, 19 nt, Artificial Sequence
  Description of Artificial Sequence: Synthetic oligonucleotide
  Antisense strand to SEQ ID NO: 1436480
guuuauaacaccuuucucu

SEQ ID NO: 1436482 - RNA, 19 nt, Artificial Sequence
  Description of Artificial Sequence: Synthetic oligonucleotide
  Sense strand starting at position 3340 of SEQ ID NO: 1243721
aggaccucgucuuuagaaa

SEQ ID NO: 1436483 - RNA, 19 nt, Artificial Sequence
  Description of Artificial Sequence: Synthetic oligonucleotide
  Antisense strand to SEQ ID NO: 1436482
uuucuaaagacgagguccu

SEQ ID NO: 1436484 - RNA, 19 nt, Artificial Sequence
  Description of Artificial Sequence: Synthetic oligonucleotide
  Sense strand starting at position 3944 of SEQ ID NO: 1243721
agcacuaauugccagagaa

SEQ ID NO: 1436485 - RNA, 19 nt, Artificial Sequence
  Description of Artificial Sequence: Synthetic oligonucleotide
  Antisense strand to SEQ ID NO: 1436484
uucucuggcaauuagugcu

SEQ ID NO: 1436486 - RNA, 19 nt, Artificial Sequence
  Description of Artificial Sequence: Synthetic oligonucleotide
  Sense strand starting at position 291 of SEQ ID NO: 1243722
cugucuuucccggaccaca

SEQ ID NO: 1436487 - RNA, 19 nt, Artificial Sequence
  Description of Artificial Sequence: Synthetic oligonucleotide
  Antisense strand to SEQ ID NO: 1436486
ugugguccgggaaagacag

SEQ ID NO: 1436488 - RNA, 19 nt, Artificial Sequence
  Description of Artificial Sequence: Synthetic oligonucleotide
  Sense strand starting at position 443 of SEQ ID NO: 1243722
uuucuucccuaguauguaa

SEQ ID NO: 1436489 - RNA, 19 nt, Artificial Sequence
  Description of Artificial Sequence: Synthetic oligonucleotide
  Antisense strand to SEQ ID NO: 1436488
uuacauacuagggaagaaa

SEQ ID NO: 1436490 - RNA, 19 nt, Artificial Sequence
  Description of Artificial Sequence: Synthetic oligonucleotide
  Sense strand starting at position 450 of SEQ ID NO: 1243722
ccuaguauguaaggucaau

SEQ ID NO: 1436491 - RNA, 19 nt, Artificial Sequence
  Description of Artificial Sequence: Synthetic oligonucleotide
  Antisense strand to SEQ ID NO: 1436490
auugaccuuacauacuagg

SEQ ID NO: 1436492 - RNA, 19 nt, Artificial Sequence
  Description of Artificial Sequence: Synthetic oligonucleotide
  Sense strand starting at position 580 of SEQ ID NO: 1243722
guacuucuucaacgcgaag

SEQ ID NO: 1436493 - RNA, 19 nt, Artificial Sequence
  Description of Artificial Sequence: Synthetic oligonucleotide
  Antisense strand to SEQ ID NO: 1436492
cuucgcguugaagaaguac

SEQ ID NO: 1436494 - RNA, 19 nt, Artificial Sequence
  Description of Artificial Sequence: Synthetic oligonucleotide
  Sense strand starting at position 591 of SEQ ID NO: 1243722
acgcgaagagcagauaaau

SEQ ID NO: 1436495 - RNA, 19 nt, Artificial Sequence
  Description of Artificial Sequence: Synthetic oligonucleotide
  Antisense strand to SEQ ID NO: 1436494
auuuaucugcucuucgcgu

SEQ ID NO: 1436496 - RNA, 19 nt, Artificial Sequence
  Description of Artificial Sequence: Synthetic oligonucleotide
  Sense strand starting at position 929 of SEQ ID NO: 1243722
gccuuagcuuucuccaaug

SEQ ID NO: 1436497 - RNA, 19 nt, Artificial Sequence
  Description of Artificial Sequence: Synthetic oligonucleotide
  Antisense strand to SEQ ID NO: 1436496
cauuggagaaagcuaaggc

SEQ ID NO: 1436498 - RNA, 19 nt, Artificial Sequence
  Description of Artificial Sequence: Synthetic oligonucleotide
  Sense strand starting at position 1126 of SEQ ID NO: 1243722
gcgcuuucucaauggcgca

SEQ ID NO: 1436499 - RNA, 19 nt, Artificial Sequence
  Description of Artificial Sequence: Synthetic oligonucleotide
  Antisense strand to SEQ ID NO: 1436498
ugcgccauugagaaagcgc

SEQ ID NO: 1436500 - RNA, 19 nt, Artificial Sequence
  Description of Artificial Sequence: Synthetic oligonucleotide
  Sense strand starting at position 1201 of SEQ ID NO: 1243722
agacauauuccuggcaccu

SEQ ID NO: 1436501 - RNA, 19 nt, Artificial Sequence
  Description of Artificial Sequence: Synthetic oligonucleotide
  Antisense strand to SEQ ID NO: 1436500
aggugccaggaauaugucu

SEQ ID NO: 1436502 - RNA, 19 nt, Artificial Sequence
  Description of Artificial Sequence: Synthetic oligonucleotide
  Sense strand starting at position 1548 of SEQ ID NO: 1243722
aguuccuaucacgaggauu

SEQ ID NO: 1436503 - RNA, 19 nt, Artificial Sequence
  Description of Artificial Sequence: Synthetic oligonucleotide
  Antisense strand to SEQ ID NO: 1436502
aauccucgugauaggaacu

SEQ ID NO: 1436504 - RNA, 19 nt, Artificial Sequence
  Description of Artificial Sequence: Synthetic oligonucleotide
  Sense strand starting at position 1701 of SEQ ID NO: 1243722
aucugucagcuucggaaau

SEQ ID NO: 1436505 - RNA, 19 nt, Artificial Sequence
  Description of Artificial Sequence: Synthetic oligonucleotide
  Antisense strand to SEQ ID NO: 1436504
auuuccgaagcugacagau

SEQ ID NO: 1436506 - RNA, 19 nt, Artificial Sequence
  Description of Artificial Sequence: Synthetic oligonucleotide
  Sense strand starting at position 1870 of SEQ ID NO: 1243722
ggaagucucagcgagcuca

SEQ ID NO: 1436507 - RNA, 19 nt, Artificial Sequence
  Description of Artificial Sequence: Synthetic oligonucleotide
  Antisense strand to SEQ ID NO: 1436506
ugagcucgcugagacuucc

SEQ ID NO: 1436508 - RNA, 19 nt, Artificial Sequence
  Description of Artificial Sequence: Synthetic oligonucleotide
  Sense strand starting at position 1915 of SEQ ID NO: 1243722
ucuguaauucccgcgcuuu

SEQ ID NO: 1436509 - RNA, 19 nt, Artificial Sequence
  Description of Artificial Sequence: Synthetic oligonucleotide
  Antisense strand to SEQ ID NO: 1436508
aaagcgcgggaauuacaga

SEQ ID NO: 1436510 - RNA, 19 nt, Artificial Sequence
  Description of Artificial Sequence: Synthetic oligonucleotide
  Sense strand starting at position 1968 of SEQ ID NO: 1243722
gcagcagccucucagaaua

SEQ ID NO: 1436511 - RNA, 19 nt, Artificial Sequence
  Description of Artificial Sequence: Synthetic oligonucleotide
  Antisense strand to SEQ ID NO: 1436510
uauucugagaggcugcugc

SEQ ID NO: 1436512 - RNA, 19 nt, Artificial Sequence
  Description of Artificial Sequence: Synthetic oligonucleotide
  Sense strand starting at position 1973 of SEQ ID NO: 1243722
agccucucagaauacgaaa

SEQ ID NO: 1436513 - RNA, 19 nt, Artificial Sequence
  Description of Artificial Sequence: Synthetic oligonucleotide
  Antisense strand to SEQ ID NO: 1436512
uuucguauucugagaggcu

SEQ ID NO: 1436514 - RNA, 19 nt, Artificial Sequence
  Description of Artificial Sequence: Synthetic oligonucleotide
  Sense strand starting at position 2276 of SEQ ID NO: 1243722
ucuccaguuucgguaaaua

SEQ ID NO: 1436515 - RNA, 19 nt, Artificial Sequence
  Description of Artificial Sequence: Synthetic oligonucleotide
  Antisense strand to SEQ ID NO: 1436514
uauuuaccgaaacuggaga

SEQ ID NO: 1436516 - RNA, 19 nt, Artificial Sequence
  Description of Artificial Sequence: Synthetic oligonucleotide
  Sense strand starting at position 2281 of SEQ ID NO: 1243722
aguuucgguaaauauaagu

SEQ ID NO: 1436517 - RNA, 19 nt, Artificial Sequence
  Description of Artificial Sequence: Synthetic oligonucleotide
  Antisense strand to SEQ ID NO: 1436516
acuuauauuuaccgaaacu

SEQ ID NO: 1436518 - RNA, 19 nt, Artificial Sequence
  Description of Artificial Sequence: Synthetic oligonucleotide
  Sense strand starting at position 2331 of SEQ ID NO: 1243722
aauuauuuccagcaugcgu

SEQ ID NO: 1436519 - RNA, 19 nt, Artificial Sequence
  Description of Artificial Sequence: Synthetic oligonucleotide
  Antisense strand to SEQ ID NO: 1436518
acgcaugcuggaaauaauu

SEQ ID NO: 1436520 - RNA, 19 nt, Artificial Sequence
  Description of Artificial Sequence: Synthetic oligonucleotide
  Sense strand starting at position 2339 of SEQ ID NO: 1243722
ccagcaugcguugcggaau

SEQ ID NO: 1436521 - RNA, 19 nt, Artificial Sequence
  Description of Artificial Sequence: Synthetic oligonucleotide
  Antisense strand to SEQ ID NO: 1436520
auuccgcaacgcaugcugg

SEQ ID NO: 1436522 - RNA, 19 nt, Artificial Sequence
  Description of Artificial Sequence: Synthetic oligonucleotide
  Sense strand starting at position 2342 of SEQ ID NO: 1243722
gcaugcguugcggaaugaa

SEQ ID NO: 1436523 - RNA, 19 nt, Artificial Sequence
  Description of Artificial Sequence: Synthetic oligonucleotide
  Antisense strand to SEQ ID NO: 1436522
uucauuccgcaacgcaugc

SEQ ID NO: 1436524 - RNA, 19 nt, Artificial Sequence
  Description of Artificial Sequence: Synthetic oligonucleotide
  Sense strand starting at position 2356 of SEQ ID NO: 1243722
augaaaggucuucgccaca

SEQ ID NO: 1436525 - RNA, 19 nt, Artificial Sequence
  Description of Artificial Sequence: Synthetic oligonucleotide
  Antisense strand to SEQ ID NO: 1436524
uguggcgaagaccuuucau

SEQ ID NO: 1436526 - RNA, 19 nt, Artificial Sequence
  Description of Artificial Sequence: Synthetic oligonucleotide
  Sense strand starting at position 2369 of SEQ ID NO: 1243722
gccacaguguuccuuagaa

SEQ ID NO: 1436527 - RNA, 19 nt, Artificial Sequence
  Description of Artificial Sequence: Synthetic oligonucleotide
  Antisense strand to SEQ ID NO: 1436526
uucuaaggaacacuguggc

SEQ ID NO: 1436528 - RNA, 19 nt, Artificial Sequence
  Description of Artificial Sequence: Synthetic oligonucleotide
  Sense strand starting at position 2373 of SEQ ID NO: 1243722
caguguuccuuagaaacug

SEQ ID NO: 1436529 - RNA, 19 nt, Artificial Sequence
  Description of Artificial Sequence: Synthetic oligonucleotide
  Antisense strand to SEQ ID NO: 1436528
caguuucuaaggaacacug

SEQ ID NO: 1436530 - RNA, 19 nt, Artificial Sequence
  Description of Artificial Sequence: Synthetic oligonucleotide
  Sense strand starting at position 2383 of SEQ ID NO: 1243722
uagaaacuguagucuuaug

SEQ ID NO: 1436531 - RNA, 19 nt, Artificial Sequence
  Description of Artificial Sequence: Synthetic oligonucleotide
  Antisense strand to SEQ ID NO: 1436530
cauaagacuacaguuucua

SEQ ID NO: 1436532 - RNA, 19 nt, Artificial Sequence
  Description of Artificial Sequence: Synthetic oligonucleotide
  Sense strand starting at position 2472 of SEQ ID NO: 1243722
cgcgcuuguacuugucaac

SEQ ID NO: 1436533 - RNA, 19 nt, Artificial Sequence
  Description of Artificial Sequence: Synthetic oligonucleotide
  Antisense strand to SEQ ID NO: 1436532
guugacaaguacaagcgcg

SEQ ID NO: 1436534 - RNA, 19 nt, Artificial Sequence
  Description of Artificial Sequence: Synthetic oligonucleotide
  Sense strand starting at position 2473 of SEQ ID NO: 1243722
gcgcuuguacuugucaaca

SEQ ID NO: 1436535 - RNA, 19 nt, Artificial Sequence
  Description of Artificial Sequence: Synthetic oligonucleotide
  Antisense strand to SEQ ID NO: 1436534
uguugacaaguacaagcgc

SEQ ID NO: 1436536 - RNA, 19 nt, Artificial Sequence
  Description of Artificial Sequence: Synthetic oligonucleotide
  Sense strand starting at position 2478 of SEQ ID NO: 1243722
uguacuugucaacaguuau

SEQ ID NO: 1436537 - RNA, 19 nt, Artificial Sequence
  Description of Artificial Sequence: Synthetic oligonucleotide
  Antisense strand to SEQ ID NO: 1436536
auaacuguugacaaguaca

SEQ ID NO: 1436538 - RNA, 19 nt, Artificial Sequence
  Description of Artificial Sequence: Synthetic oligonucleotide
  Sense strand starting at position 2490 of SEQ ID NO: 1243722
caguuauggacuggagugu

SEQ ID NO: 1436539 - RNA, 19 nt, Artificial Sequence
  Description of Artificial Sequence: Synthetic oligonucleotide
  Antisense strand to SEQ ID NO: 1436538
acacuccaguccauaacug

SEQ ID NO: 1436540 - RNA, 19 nt, Artificial Sequence
  Description of Artificial Sequence: Synthetic oligonucleotide
  Sense strand starting at position 2553 of SEQ ID NO: 1243722
acguacaacucuuuaggga

SEQ ID NO: 1436541 - RNA, 19 nt, Artificial Sequence
  Description of Artificial Sequence: Synthetic oligonucleotide
  Antisense strand to SEQ ID NO: 1436540
ucccuaaagaguuguacgu

SEQ ID NO: 1436542 - RNA, 19 nt, Artificial Sequence
  Description of Artificial Sequence: Synthetic oligonucleotide
  Sense strand starting at position 2557 of SEQ ID NO: 1243722
acaacucuuuagggagacu

SEQ ID NO: 1436543 - RNA, 19 nt, Artificial Sequence
  Description of Artificial Sequence: Synthetic oligonucleotide
  Antisense strand to SEQ ID NO: 1436542
agucucccuaaagaguugu

SEQ ID NO: 1436544 - RNA, 19 nt, Artificial Sequence
  Description of Artificial Sequence: Synthetic oligonucleotide
  Sense strand starting at position 2607 of SEQ ID NO: 1243722
caaguagucuuguaagguc

SEQ ID NO: 1436545 - RNA, 19 nt, Artificial Sequence
  Description of Artificial Sequence: Synthetic oligonucleotide
  Antisense strand to SEQ ID NO: 1436544
gaccuuacaagacuacuug

SEQ ID NO: 1436546 - RNA, 19 nt, Artificial Sequence
  Description of Artificial Sequence: Synthetic oligonucleotide
  Sense strand starting at position 2641 of SEQ ID NO: 1243722
cgcagugagcgccgaauuu

SEQ ID NO: 1436547 - RNA, 19 nt, Artificial Sequence
  Description of Artificial Sequence: Synthetic oligonucleotide
  Antisense strand to SEQ ID NO: 1436546
aaauucggcgcucacugcg

SEQ ID NO: 1436548 - RNA, 19 nt, Artificial Sequence
  Description of Artificial Sequence: Synthetic oligonucleotide
  Sense strand starting at position 2817 of SEQ ID NO: 1243722
agugguaagagccaaucuu

SEQ ID NO: 1436549 - RNA, 19 nt, Artificial Sequence
  Description of Artificial Sequence: Synthetic oligonucleotide
  Antisense strand to SEQ ID NO: 1436548
aagauuggcucuuaccacu

SEQ ID NO: 1436550 - RNA, 19 nt, Artificial Sequence
  Description of Artificial Sequence: Synthetic oligonucleotide
  Sense strand starting at position 2827 of SEQ ID NO: 1243722
gccaaucuucuuggcgaaa

SEQ ID NO: 1436551 - RNA, 19 nt, Artificial Sequence
  Description of Artificial Sequence: Synthetic oligonucleotide
  Antisense strand to SEQ ID NO: 1436550
uuucgccaagaagauuggc

SEQ ID NO: 1436552 - RNA, 19 nt, Artificial Sequence
  Description of Artificial Sequence: Synthetic oligonucleotide
  Sense strand starting at position 3110 of SEQ ID NO: 1243722
gagagagcccuucguguuc

SEQ ID NO: 1436553 - RNA, 19 nt, Artificial Sequence
  Description of Artificial Sequence: Synthetic oligonucleotide
  Antisense strand to SEQ ID NO: 1436552
gaacacgaagggcucucuc

SEQ ID NO: 1436554 - RNA, 19 nt, Artificial Sequence
  Description of Artificial Sequence: Synthetic oligonucleotide
  Sense strand starting at position 3121 of SEQ ID NO: 1243722
ucguguucugagggaccga

SEQ ID NO: 1436555 - RNA, 19 nt, Artificial Sequence
  Description of Artificial Sequence: Synthetic oligonucleotide
  Antisense strand to SEQ ID NO: 1436554
ucggucccucagaacacga

SEQ ID NO: 1436556 - RNA, 19 nt, Artificial Sequence
  Description of Artificial Sequence: Synthetic oligonucleotide
  Sense strand starting at position 3165 of SEQ ID NO: 1243722
gagagucugugguucagaa

SEQ ID NO: 1436557 - RNA, 19 nt, Artificial Sequence
  Description of Artificial Sequence: Synthetic oligonucleotide
  Antisense strand to SEQ ID NO: 1436556
uucugaaccacagacucuc

SEQ ID NO: 1436558 - RNA, 19 nt, Artificial Sequence
  Description of Artificial Sequence: Synthetic oligonucleotide
  Sense strand starting at position 3167 of SEQ ID NO: 1243722
gagucugugguucagaaug

SEQ ID NO: 1436559 - RNA, 19 nt, Artificial Sequence
  Description of Artificial Sequence: Synthetic oligonucleotide
  Antisense strand to SEQ ID NO: 1436558
cauucugaaccacagacuc

SEQ ID NO: 1436560 - RNA, 19 nt, Artificial Sequence
  Description of Artificial Sequence: Synthetic oligonucleotide
  Sense strand starting at position 3177 of SEQ ID NO: 1243722
uucagaaugcgaggugaca

SEQ ID NO: 1436561 - RNA, 19 nt, Artificial Sequence
  Description of Artificial Sequence: Synthetic oligonucleotide
  Antisense strand to SEQ ID NO: 1436560
ugucaccucgcauucugaa

SEQ ID NO: 1436562 - RNA, 19 nt, Artificial Sequence
  Description of Artificial Sequence: Synthetic oligonucleotide
  Sense strand starting at position 3804 of SEQ ID NO: 1243722
uuaugucuagccugaggau

SEQ ID NO: 1436563 - RNA, 19 nt, Artificial Sequence
  Description of Artificial Sequence: Synthetic oligonucleotide
  Antisense strand to SEQ ID NO: 1436562
auccucaggcuagacauaa

SEQ ID NO: 1436564 - RNA, 19 nt, Artificial Sequence
  Description of Artificial Sequence: Synthetic oligonucleotide
  Sense strand starting at position 3805 of SEQ ID NO: 1243722
uaugucuagccugaggauu

SEQ ID NO: 1436565 - RNA, 19 nt, Artificial Sequence
  Description of Artificial Sequence: Synthetic oligonucleotide
  Antisense strand to SEQ ID NO: 1436564
aauccucaggcuagacaua

SEQ ID NO: 1436566 - RNA, 19 nt, Artificial Sequence
  Description of Artificial Sequence: Synthetic oligonucleotide
  Sense strand starting at position 323 of SEQ ID NO: 1243723
cugucuuucccggaccaca

SEQ ID NO: 1436567 - RNA, 19 nt, Artificial Sequence
  Description of Artificial Sequence: Synthetic oligonucleotide
  Antisense strand to SEQ ID NO: 1436566
ugugguccgggaaagacag

SEQ ID NO: 1436568 - RNA, 19 nt, Artificial Sequence
  Description of Artificial Sequence: Synthetic oligonucleotide
  Sense strand starting at position 475 of SEQ ID NO: 1243723
uuucuucccuaguauguaa

SEQ ID NO: 1436569 - RNA, 19 nt, Artificial Sequence
  Description of Artificial Sequence: Synthetic oligonucleotide
  Antisense strand to SEQ ID NO: 1436568
uuacauacuagggaagaaa

SEQ ID NO: 1436570 - RNA, 19 nt, Artificial Sequence
  Description of Artificial Sequence: Synthetic oligonucleotide
  Sense strand starting at position 482 of SEQ ID NO: 1243723
ccuaguauguaaggucaau

SEQ ID NO: 1436571 - RNA, 19 nt, Artificial Sequence
  Description of Artificial Sequence: Synthetic oligonucleotide
  Antisense strand to SEQ ID NO: 1436570
auugaccuuacauacuagg

SEQ ID NO: 1436572 - RNA, 19 nt, Artificial Sequence
  Description of Artificial Sequence: Synthetic oligonucleotide
  Sense strand starting at position 612 of SEQ ID NO: 1243723
guacuucuucaacgcgaag

SEQ ID NO: 1436573 - RNA, 19 nt, Artificial Sequence
  Description of Artificial Sequence: Synthetic oligonucleotide
  Antisense strand to SEQ ID NO: 1436572
cuucgcguugaagaaguac

SEQ ID NO: 1436574 - RNA, 19 nt, Artificial Sequence
  Description of Artificial Sequence: Synthetic oligonucleotide
  Sense strand starting at position 623 of SEQ ID NO: 1243723
acgcgaagagcagauaaau

SEQ ID NO: 1436575 - RNA, 19 nt, Artificial Sequence
  Description of Artificial Sequence: Synthetic oligonucleotide
  Antisense strand to SEQ ID NO: 1436574
auuuaucugcucuucgcgu

SEQ ID NO: 1436576 - RNA, 19 nt, Artificial Sequence
  Description of Artificial Sequence: Synthetic oligonucleotide
  Sense strand starting at position 961 of SEQ ID NO: 1243723
gccuuagcuuucuccaaug

SEQ ID NO: 1436577 - RNA, 19 nt, Artificial Sequence
  Description of Artificial Sequence: Synthetic oligonucleotide
  Antisense strand to SEQ ID NO: 1436576
cauuggagaaagcuaaggc

SEQ ID NO: 1436578 - RNA, 19 nt, Artificial Sequence
  Description of Artificial Sequence: Synthetic oligonucleotide
  Sense strand starting at position 1158 of SEQ ID NO: 1243723
gcgcuuucucaauggcgca

SEQ ID NO: 1436579 - RNA, 19 nt, Artificial Sequence
  Description of Artificial Sequence: Synthetic oligonucleotide
  Antisense strand to SEQ ID NO: 1436578
ugcgccauugagaaagcgc

SEQ ID NO: 1436580 - RNA, 19 nt, Artificial Sequence
  Description of Artificial Sequence: Synthetic oligonucleotide
  Sense strand starting at position 1233 of SEQ ID NO: 1243723
agacauauuccuggcaccu

SEQ ID NO: 1436581 - RNA, 19 nt, Artificial Sequence
  Description of Artificial Sequence: Synthetic oligonucleotide
  Antisense strand to SEQ ID NO: 1436580
aggugccaggaauaugucu

SEQ ID NO: 1436582 - RNA, 19 nt, Artificial Sequence
  Description of Artificial Sequence: Synthetic oligonucleotide
  Sense strand starting at position 1580 of SEQ ID NO: 1243723
aguuccuaucacgaggauu

SEQ ID NO: 1436583 - RNA, 19 nt, Artificial Sequence
  Description of Artificial Sequence: Synthetic oligonucleotide
  Antisense strand to SEQ ID NO: 1436582
aauccucgugauaggaacu

SEQ ID NO: 1436584 - RNA, 19 nt, Artificial Sequence
  Description of Artificial Sequence: Synthetic oligonucleotide
  Sense strand starting at position 1733 of SEQ ID NO: 1243723
aucugucagcuucggaaau

SEQ ID NO: 1436585 - RNA, 19 nt, Artificial Sequence
  Description of Artificial Sequence: Synthetic oligonucleotide
  Antisense strand to SEQ ID NO: 1436584
auuuccgaagcugacagau

SEQ ID NO: 1436586 - RNA, 19 nt, Artificial Sequence
  Description of Artificial Sequence: Synthetic oligonucleotide
  Sense strand starting at position 1902 of SEQ ID NO: 1243723
ggaagucucagcgagcuca

SEQ ID NO: 1436587 - RNA, 19 nt, Artificial Sequence
  Description of Artificial Sequence: Synthetic oligonucleotide
  Antisense strand to SEQ ID NO: 1436586
ugagcucgcugagacuucc

SEQ ID NO: 1436588 - RNA, 19 nt, Artificial Sequence
  Description of Artificial Sequence: Synthetic oligonucleotide
  Sense strand starting at position 1947 of SEQ ID NO: 1243723
ucuguaauucccgcgcuuu

SEQ ID NO: 1436589 - RNA, 19 nt, Artificial Sequence
  Description of Artificial Sequence: Synthetic oligonucleotide
  Antisense strand to SEQ ID NO: 1436588
aaagcgcgggaauuacaga

SEQ ID NO: 1436590 - RNA, 19 nt, Artificial Sequence
  Description of Artificial Sequence: Synthetic oligonucleotide
  Sense strand starting at position 2000 of SEQ ID NO: 1243723
gcagcagccucucagaaua

SEQ ID NO: 1436591 - RNA, 19 nt, Artificial Sequence
  Description of Artificial Sequence: Synthetic oligonucleotide
  Antisense strand to SEQ ID NO: 1436590
uauucugagaggcugcugc

SEQ ID NO: 1436592 - RNA, 19 nt, Artificial Sequence
  Description of Artificial Sequence: Synthetic oligonucleotide
  Sense strand starting at position 2005 of SEQ ID NO: 1243723
agccucucagaauacgaaa

SEQ ID NO: 1436593 - RNA, 19 nt, Artificial Sequence
  Description of Artificial Sequence: Synthetic oligonucleotide
  Antisense strand to SEQ ID NO: 1436592
uuucguauucugagaggcu

SEQ ID NO: 1436594 - RNA, 19 nt, Artificial Sequence
  Description of Artificial Sequence: Synthetic oligonucleotide
  Sense strand starting at position 2308 of SEQ ID NO: 1243723
ucuccaguuucgguaaaua

SEQ ID NO: 1436595 - RNA, 19 nt, Artificial Sequence
  Description of Artificial Sequence: Synthetic oligonucleotide
  Antisense strand to SEQ ID NO: 1436594
uauuuaccgaaacuggaga

SEQ ID NO: 1436596 - RNA, 19 nt, Artificial Sequence
  Description of Artificial Sequence: Synthetic oligonucleotide
  Sense strand starting at position 2313 of SEQ ID NO: 1243723
aguuucgguaaauauaagu

SEQ ID NO: 1436597 - RNA, 19 nt, Artificial Sequence
  Description of Artificial Sequence: Synthetic oligonucleotide
  Antisense strand to SEQ ID NO: 1436596
acuuauauuuaccgaaacu

SEQ ID NO: 1436598 - RNA, 19 nt, Artificial Sequence
  Description of Artificial Sequence: Synthetic oligonucleotide
  Sense strand starting at position 2363 of SEQ ID NO: 1243723
aauuauuuccagcaugcgu

SEQ ID NO: 1436599 - RNA, 19 nt, Artificial Sequence
  Description of Artificial Sequence: Synthetic oligonucleotide
  Antisense strand to SEQ ID NO: 1436598
acgcaugcuggaaauaauu

SEQ ID NO: 1436600 - RNA, 19 nt, Artificial Sequence
  Description of Artificial Sequence: Synthetic oligonucleotide
  Sense strand starting at position 2371 of SEQ ID NO: 1243723
ccagcaugcguugcggaau

SEQ ID NO: 1436601 - RNA, 19 nt, Artificial Sequence
  Description of Artificial Sequence: Synthetic oligonucleotide
  Antisense strand to SEQ ID NO: 1436600
auuccgcaacgcaugcugg

SEQ ID NO: 1436602 - RNA, 19 nt, Artificial Sequence
  Description of Artificial Sequence: Synthetic oligonucleotide
  Sense strand starting at position 2374 of SEQ ID NO: 1243723
gcaugcguugcggaaugaa

SEQ ID NO: 1436603 - RNA, 19 nt, Artificial Sequence
  Description of Artificial Sequence: Synthetic oligonucleotide
  Antisense strand to SEQ ID NO: 1436602
uucauuccgcaacgcaugc

SEQ ID NO: 1436604 - RNA, 19 nt, Artificial Sequence
  Description of Artificial Sequence: Synthetic oligonucleotide
  Sense strand starting at position 2388 of SEQ ID NO: 1243723
augaaaggucuucgccaca

SEQ ID NO: 1436605 - RNA, 19 nt, Artificial Sequence
  Description of Artificial Sequence: Synthetic oligonucleotide
  Antisense strand to SEQ ID NO: 1436604
uguggcgaagaccuuucau

SEQ ID NO: 1436606 - RNA, 19 nt, Artificial Sequence
  Description of Artificial Sequence: Synthetic oligonucleotide
  Sense strand starting at position 2401 of SEQ ID NO: 1243723
gccacaguguuccuuagaa

SEQ ID NO: 1436607 - RNA, 19 nt, Artificial Sequence
  Description of Artificial Sequence: Synthetic oligonucleotide
  Antisense strand to SEQ ID NO: 1436606
uucuaaggaacacuguggc

SEQ ID NO: 1436608 - RNA, 19 nt, Artificial Sequence
  Description of Artificial Sequence: Synthetic oligonucleotide
  Sense strand starting at position 2405 of SEQ ID NO: 1243723
caguguuccuuagaaacug

SEQ ID NO: 1436609 - RNA, 19 nt, Artificial Sequence
  Description of Artificial Sequence: Synthetic oligonucleotide
  Antisense strand to SEQ ID NO: 1436608
caguuucuaaggaacacug

SEQ ID NO: 1436610 - RNA, 19 nt, Artificial Sequence
  Description of Artificial Sequence: Synthetic oligonucleotide
  Sense strand starting at position 2415 of SEQ ID NO: 1243723
uagaaacuguagucuuaug

SEQ ID NO: 1436611 - RNA, 19 nt, Artificial Sequence
  Description of Artificial Sequence: Synthetic oligonucleotide
  Antisense strand to SEQ ID NO: 1436610
cauaagacuacaguuucua

SEQ ID NO: 1436612 - RNA, 19 nt, Artificial Sequence
  Description of Artificial Sequence: Synthetic oligonucleotide
  Sense strand starting at position 2504 of SEQ ID NO: 1243723
cgcgcuuguacuugucaac

SEQ ID NO: 1436613 - RNA, 19 nt, Artificial Sequence
  Description of Artificial Sequence: Synthetic oligonucleotide
  Antisense strand to SEQ ID NO: 1436612
guugacaaguacaagcgcg

SEQ ID NO: 1436614 - RNA, 19 nt, Artificial Sequence
  Description of Artificial Sequence: Synthetic oligonucleotide
  Sense strand starting at position 2505 of SEQ ID NO: 1243723
gcgcuuguacuugucaaca

SEQ ID NO: 1436615 - RNA, 19 nt, Artificial Sequence
  Description of Artificial Sequence: Synthetic oligonucleotide
  Antisense strand to SEQ ID NO: 1436614
uguugacaaguacaagcgc

SEQ ID NO: 1436616 - RNA, 19 nt, Artificial Sequence
  Description of Artificial Sequence: Synthetic oligonucleotide
  Sense strand starting at position 2510 of SEQ ID NO: 1243723
uguacuugucaacaguuau

SEQ ID NO: 1436617 - RNA, 19 nt, Artificial Sequence
  Description of Artificial Sequence: Synthetic oligonucleotide
  Antisense strand to SEQ ID NO: 1436616
auaacuguugacaaguaca

SEQ ID NO: 1436618 - RNA, 19 nt, Artificial Sequence
  Description of Artificial Sequence: Synthetic oligonucleotide
  Sense strand starting at position 2522 of SEQ ID NO: 1243723
caguuauggacuggagugu

SEQ ID NO: 1436619 - RNA, 19 nt, Artificial Sequence
  Description of Artificial Sequence: Synthetic oligonucleotide
  Antisense strand to SEQ ID NO: 1436618
acacuccaguccauaacug

SEQ ID NO: 1436620 - RNA, 19 nt, Artificial Sequence
  Description of Artificial Sequence: Synthetic oligonucleotide
  Sense strand starting at position 2585 of SEQ ID NO: 1243723
acguacaacucuuuaggga

SEQ ID NO: 1436621 - RNA, 19 nt, Artificial Sequence
  Description of Artificial Sequence: Synthetic oligonucleotide
  Antisense strand to SEQ ID NO: 1436620
ucccuaaagaguuguacgu

SEQ ID NO: 1436622 - RNA, 19 nt, Artificial Sequence
  Description of Artificial Sequence: Synthetic oligonucleotide
  Sense strand starting at position 2589 of SEQ ID NO: 1243723
acaacucuuuagggagacu

SEQ ID NO: 1436623 - RNA, 19 nt, Artificial Sequence
  Description of Artificial Sequence: Synthetic oligonucleotide
  Antisense strand to SEQ ID NO: 1436622
agucucccuaaagaguugu

SEQ ID NO: 1436624 - RNA, 19 nt, Artificial Sequence
  Description of Artificial Sequence: Synthetic oligonucleotide
  Sense strand starting at position 2639 of SEQ ID NO: 1243723
caaguagucuuguaagguc

SEQ ID NO: 1436625 - RNA, 19 nt, Artificial Sequence
  Description of Artificial Sequence: Synthetic oligonucleotide
  Antisense strand to SEQ ID NO: 1436624
gaccuuacaagacuacuug

SEQ ID NO: 1436626 - RNA, 19 nt, Artificial Sequence
  Description of Artificial Sequence: Synthetic oligonucleotide
  Sense strand starting at position 2673 of SEQ ID NO: 1243723
cgcagugagcgccgaauuu

SEQ ID NO: 1436627 - RNA, 19 nt, Artificial Sequence
  Description of Artificial Sequence: Synthetic oligonucleotide
  Antisense strand to SEQ ID NO: 1436626
aaauucggcgcucacugcg

SEQ ID NO: 1436628 - RNA, 19 nt, Artificial Sequence
  Description of Artificial Sequence: Synthetic oligonucleotide
  Sense strand starting at position 2849 of SEQ ID NO: 1243723
agugguaagagccaaucuu

SEQ ID NO: 1436629 - RNA, 19 nt, Artificial Sequence
  Description of Artificial Sequence: Synthetic oligonucleotide
  Antisense strand to SEQ ID NO: 1436628
aagauuggcucuuaccacu

SEQ ID NO: 1436630 - RNA, 19 nt, Artificial Sequence
  Description of Artificial Sequence: Synthetic oligonucleotide
  Sense strand starting at position 2859 of SEQ ID NO: 1243723
gccaaucuucuuggcgaaa

SEQ ID NO: 1436631 - RNA, 19 nt, Artificial Sequence
  Description of Artificial Sequence: Synthetic oligonucleotide
  Antisense strand to SEQ ID NO: 1436630
uuucgccaagaagauuggc

SEQ ID NO: 1436632 - RNA, 19 nt, Artificial Sequence
  Description of Artificial Sequence: Synthetic oligonucleotide
  Sense strand starting at position 3142 of SEQ ID NO: 1243723
gagagagcccuucguguuc

SEQ ID NO: 1436633 - RNA, 19 nt, Artificial Sequence
  Description of Artificial Sequence: Synthetic oligonucleotide
  Antisense strand to SEQ ID NO: 1436632
gaacacgaagggcucucuc

SEQ ID NO: 1436634 - RNA, 19 nt, Artificial Sequence
  Description of Artificial Sequence: Synthetic oligonucleotide
  Sense strand starting at position 3153 of SEQ ID NO: 1243723
ucguguucugagggaccga

SEQ ID NO: 1436635 - RNA, 19 nt, Artificial Sequence
  Description of Artificial Sequence: Synthetic oligonucleotide
  Antisense strand to SEQ ID NO: 1436634
ucggucccucagaacacga

SEQ ID NO: 1436636 - RNA, 19 nt, Artificial Sequence
  Description of Artificial Sequence: Synthetic oligonucleotide
  Sense strand starting at position 3197 of SEQ ID NO: 1243723
gagagucugugguucagaa

SEQ ID NO: 1436637 - RNA, 19 nt, Artificial Sequence
  Description of Artificial Sequence: Synthetic oligonucleotide
  Antisense strand to SEQ ID NO: 1436636
uucugaaccacagacucuc

SEQ ID NO: 1436638 - RNA, 19 nt, Artificial Sequence
  Description of Artificial Sequence: Synthetic oligonucleotide
  Sense strand starting at position 3199 of SEQ ID NO: 1243723
gagucugugguucagaaug

SEQ ID NO: 1436639 - RNA, 19 nt, Artificial Sequence
  Description of Artificial Sequence: Synthetic oligonucleotide
  Antisense strand to SEQ ID NO: 1436638
cauucugaaccacagacuc

SEQ ID NO: 1436640 - RNA, 19 nt, Artificial Sequence
  Description of Artificial Sequence: Synthetic oligonucleotide
  Sense strand starting at position 3209 of SEQ ID NO: 1243723
uucagaaugcgaggugaca

SEQ ID NO: 1436641 - RNA, 19 nt, Artificial Sequence
  Description of Artificial Sequence: Synthetic oligonucleotide
  Antisense strand to SEQ ID NO: 1436640
ugucaccucgcauucugaa

SEQ ID NO: 1436642 - RNA, 19 nt, Artificial Sequence
  Description of Artificial Sequence: Synthetic oligonucleotide
  Sense strand starting at position 3836 of SEQ ID NO: 1243723
uuaugucuagccugaggau

SEQ ID NO: 1436643 - RNA, 19 nt, Artificial Sequence
  Description of Artificial Sequence: Synthetic oligonucleotide
  Antisense strand to SEQ ID NO: 1436642
auccucaggcuagacauaa

SEQ ID NO: 1436644 - RNA, 19 nt, Artificial Sequence
  Description of Artificial Sequence: Synthetic oligonucleotide
  Sense strand starting at position 3837 of SEQ ID NO: 1243723
uaugucuagccugaggauu

SEQ ID NO: 1436645 - RNA, 19 nt, Artificial Sequence
  Description of Artificial Sequence: Synthetic oligonucleotide
  Antisense strand to SEQ ID NO: 1436644
aauccucaggcuagacaua

SEQ ID NO: 1436646 - RNA, 19 nt, Artificial Sequence
  Description of Artificial Sequence: Synthetic oligonucleotide
  Sense strand starting at position 1 of SEQ ID NO: 1243724
uuauaaaucuuguaucgcu

SEQ ID NO: 1436647 - RNA, 19 nt, Artificial Sequence
  Description of Artificial Sequence: Synthetic oligonucleotide
  Antisense strand to SEQ ID NO: 1436646
agcgauacaagauuuauaa

SEQ ID NO: 1436648 - RNA, 19 nt, Artificial Sequence
  Description of Artificial Sequence: Synthetic oligonucleotide
  Sense strand starting at position 6 of SEQ ID NO: 1243724
aaucuuguaucgcucugaa

SEQ ID NO: 1436649 - RNA, 19 nt, Artificial Sequence
  Description of Artificial Sequence: Synthetic oligonucleotide
  Antisense strand to SEQ ID NO: 1436648
uucagagcgauacaagauu

SEQ ID NO: 1436650 - RNA, 19 nt, Artificial Sequence
  Description of Artificial Sequence: Synthetic oligonucleotide
  Sense strand starting at position 122 of SEQ ID NO: 1243724
guaagaggcaaugguacaa

SEQ ID NO: 1436651 - RNA, 19 nt, Artificial Sequence
  Description of Artificial Sequence: Synthetic oligonucleotide
  Antisense strand to SEQ ID NO: 1436650
uuguaccauugccucuuac

SEQ ID NO: 1436652 - RNA, 19 nt, Artificial Sequence
  Description of Artificial Sequence: Synthetic oligonucleotide
  Sense strand starting at position 273 of SEQ ID NO: 1243724
cguucuaacuacugaacau

SEQ ID NO: 1436653 - RNA, 19 nt, Artificial Sequence
  Description of Artificial Sequence: Synthetic oligonucleotide
  Antisense strand to SEQ ID NO: 1436652
auguucaguaguuagaacg

SEQ ID NO: 1436654 - RNA, 19 nt, Artificial Sequence
  Description of Artificial Sequence: Synthetic oligonucleotide
  Sense strand starting at position 360 of SEQ ID NO: 1243724
auggauacauuacauagaa

SEQ ID NO: 1436655 - RNA, 19 nt, Artificial Sequence
  Description of Artificial Sequence: Synthetic oligonucleotide
  Antisense strand to SEQ ID NO: 1436654
uucuauguaauguauccau

SEQ ID NO: 1436656 - RNA, 19 nt, Artificial Sequence
  Description of Artificial Sequence: Synthetic oligonucleotide
  Sense strand starting at position 372 of SEQ ID NO: 1243724
cauagaaugucagcuagua

SEQ ID NO: 1436657 - RNA, 19 nt, Artificial Sequence
  Description of Artificial Sequence: Synthetic oligonucleotide
  Antisense strand to SEQ ID NO: 1436656
uacuagcugacauucuaug

SEQ ID NO: 1436658 - RNA, 19 nt, Artificial Sequence
  Description of Artificial Sequence: Synthetic oligonucleotide
  Sense strand starting at position 384 of SEQ ID NO: 1243724
gcuaguaaucaguguuaug

SEQ ID NO: 1436659 - RNA, 19 nt, Artificial Sequence
  Description of Artificial Sequence: Synthetic oligonucleotide
  Antisense strand to SEQ ID NO: 1436658
cauaacacugauuacuagc

SEQ ID NO: 1436660 - RNA, 19 nt, Artificial Sequence
  Description of Artificial Sequence: Synthetic oligonucleotide
  Sense strand starting at position 387 of SEQ ID NO: 1243724
aguaaucaguguuauggag

SEQ ID NO: 1436661 - RNA, 19 nt, Artificial Sequence
  Description of Artificial Sequence: Synthetic oligonucleotide
  Antisense strand to SEQ ID NO: 1436660
cuccauaacacugauuacu

SEQ ID NO: 1436662 - RNA, 19 nt, Artificial Sequence
  Description of Artificial Sequence: Synthetic oligonucleotide
  Sense strand starting at position 1265 of SEQ ID NO: 1243724
ggaguuuagcucugucgcu

SEQ ID NO: 1436663 - RNA, 19 nt, Artificial Sequence
  Description of Artificial Sequence: Synthetic oligonucleotide
  Antisense strand to SEQ ID NO: 1436662
agcgacagagcuaaacucc

SEQ ID NO: 1436664 - RNA, 19 nt, Artificial Sequence
  Description of Artificial Sequence: Synthetic oligonucleotide
  Sense strand starting at position 1659 of SEQ ID NO: 1243724
cugucuuucccggaccaca

SEQ ID NO: 1436665 - RNA, 19 nt, Artificial Sequence
  Description of Artificial Sequence: Synthetic oligonucleotide
  Antisense strand to SEQ ID NO: 1436664
ugugguccgggaaagacag

SEQ ID NO: 1436666 - RNA, 19 nt, Artificial Sequence
  Description of Artificial Sequence: Synthetic oligonucleotide
  Sense strand starting at position 1811 of SEQ ID NO: 1243724
uuucuucccuaguauguaa

SEQ ID NO: 1436667 - RNA, 19 nt, Artificial Sequence
  Description of Artificial Sequence: Synthetic oligonucleotide
  Antisense strand to SEQ ID NO: 1436666
uuacauacuagggaagaaa

SEQ ID NO: 1436668 - RNA, 19 nt, Artificial Sequence
  Description of Artificial Sequence: Synthetic oligonucleotide
  Sense strand starting at position 1818 of SEQ ID NO: 1243724
ccuaguauguaaggucaau

SEQ ID NO: 1436669 - RNA, 19 nt, Artificial Sequence
  Description of Artificial Sequence: Synthetic oligonucleotide
  Antisense strand to SEQ ID NO: 1436668
auugaccuuacauacuagg

SEQ ID NO: 1436670 - RNA, 19 nt, Artificial Sequence
  Description of Artificial Sequence: Synthetic oligonucleotide
  Sense strand starting at position 1948 of SEQ ID NO: 1243724
guacuucuucaacgcgaag

SEQ ID NO: 1436671 - RNA, 19 nt, Artificial Sequence
  Description of Artificial Sequence: Synthetic oligonucleotide
  Antisense strand to SEQ ID NO: 1436670
cuucgcguugaagaaguac

SEQ ID NO: 1436672 - RNA, 19 nt, Artificial Sequence
  Description of Artificial Sequence: Synthetic oligonucleotide
  Sense strand starting at position 1959 of SEQ ID NO: 1243724
acgcgaagagcagauaaau

SEQ ID NO: 1436673 - RNA, 19 nt, Artificial Sequence
  Description of Artificial Sequence: Synthetic oligonucleotide
  Antisense strand to SEQ ID NO: 1436672
auuuaucugcucuucgcgu

SEQ ID NO: 1436674 - RNA, 19 nt, Artificial Sequence
  Description of Artificial Sequence: Synthetic oligonucleotide
  Sense strand starting at position 2297 of SEQ ID NO: 1243724
gccuuagcuuucuccaaug

SEQ ID NO: 1436675 - RNA, 19 nt, Artificial Sequence
  Description of Artificial Sequence: Synthetic oligonucleotide
  Antisense strand to SEQ ID NO: 1436674
cauuggagaaagcuaaggc

SEQ ID NO: 1436676 - RNA, 19 nt, Artificial Sequence
  Description of Artificial Sequence: Synthetic oligonucleotide
  Sense strand starting at position 2494 of SEQ ID NO: 1243724
gcgcuuucucaauggcgca

SEQ ID NO: 1436677 - RNA, 19 nt, Artificial Sequence
  Description of Artificial Sequence: Synthetic oligonucleotide
  Antisense strand to SEQ ID NO: 1436676
ugcgccauugagaaagcgc

SEQ ID NO: 1436678 - RNA, 19 nt, Artificial Sequence
  Description of Artificial Sequence: Synthetic oligonucleotide
  Sense strand starting at position 2569 of SEQ ID NO: 1243724
agacauauuccuggcaccu

SEQ ID NO: 1436679 - RNA, 19 nt, Artificial Sequence
  Description of Artificial Sequence: Synthetic oligonucleotide
  Antisense strand to SEQ ID NO: 1436678
aggugccaggaauaugucu

SEQ ID NO: 1436680 - RNA, 19 nt, Artificial Sequence
  Description of Artificial Sequence: Synthetic oligonucleotide
  Sense strand starting at position 2916 of SEQ ID NO: 1243724
aguuccuaucacgaggauu

SEQ ID NO: 1436681 - RNA, 19 nt, Artificial Sequence
  Description of Artificial Sequence: Synthetic oligonucleotide
  Antisense strand to SEQ ID NO: 1436680
aauccucgugauaggaacu

SEQ ID NO: 1436682 - RNA, 19 nt, Artificial Sequence
  Description of Artificial Sequence: Synthetic oligonucleotide
  Sense strand starting at position 3069 of SEQ ID NO: 1243724
aucugucagcuucggaaau

SEQ ID NO: 1436683 - RNA, 19 nt, Artificial Sequence
  Description of Artificial Sequence: Synthetic oligonucleotide
  Antisense strand to SEQ ID NO: 1436682
auuuccgaagcugacagau

SEQ ID NO: 1436684 - RNA, 19 nt, Artificial Sequence
  Description of Artificial Sequence: Synthetic oligonucleotide
  Sense strand starting at position 3238 of SEQ ID NO: 1243724
ggaagucucagcgagcuca

SEQ ID NO: 1436685 - RNA, 19 nt, Artificial Sequence
  Description of Artificial Sequence: Synthetic oligonucleotide
  Antisense strand to SEQ ID NO: 1436684
ugagcucgcugagacuucc

SEQ ID NO: 1436686 - RNA, 19 nt, Artificial Sequence
  Description of Artificial Sequence: Synthetic oligonucleotide
  Sense strand starting at position 3283 of SEQ ID NO: 1243724
ucuguaauucccgcgcuuu

SEQ ID NO: 1436687 - RNA, 19 nt, Artificial Sequence
  Description of Artificial Sequence: Synthetic oligonucleotide
  Antisense strand to SEQ ID NO: 1436686
aaagcgcgggaauuacaga

SEQ ID NO: 1436688 - RNA, 19 nt, Artificial Sequence
  Description of Artificial Sequence: Synthetic oligonucleotide
  Sense strand starting at position 3336 of SEQ ID NO: 1243724
gcagcagccucucagaaua

SEQ ID NO: 1436689 - RNA, 19 nt, Artificial Sequence
  Description of Artificial Sequence: Synthetic oligonucleotide
  Antisense strand to SEQ ID NO: 1436688
uauucugagaggcugcugc

SEQ ID NO: 1436690 - RNA, 19 nt, Artificial Sequence
  Description of Artificial Sequence: Synthetic oligonucleotide
  Sense strand starting at position 3341 of SEQ ID NO: 1243724
agccucucagaauacgaaa

SEQ ID NO: 1436691 - RNA, 19 nt, Artificial Sequence
  Description of Artificial Sequence: Synthetic oligonucleotide
  Antisense strand to SEQ ID NO: 1436690
uuucguauucugagaggcu

SEQ ID NO: 1436692 - RNA, 19 nt, Artificial Sequence
  Description of Artificial Sequence: Synthetic oligonucleotide
  Sense strand starting at position 3644 of SEQ ID NO: 1243724
ucuccaguuucgguaaaua

SEQ ID NO: 1436693 - RNA, 19 nt, Artificial Sequence
  Description of Artificial Sequence: Synthetic oligonucleotide
  Antisense strand to SEQ ID NO: 1436692
uauuuaccgaaacuggaga

SEQ ID NO: 1436694 - RNA, 19 nt, Artificial Sequence
  Description of Artificial Sequence: Synthetic oligonucleotide
  Sense strand starting at position 3649 of SEQ ID NO: 1243724
aguuucgguaaauauaagu

SEQ ID NO: 1436695 - RNA, 19 nt, Artificial Sequence
  Description of Artificial Sequence: Synthetic oligonucleotide
  Antisense strand to SEQ ID NO: 1436694
acuuauauuuaccgaaacu

SEQ ID NO: 1436696 - RNA, 19 nt, Artificial Sequence
  Description of Artificial Sequence: Synthetic oligonucleotide
  Sense strand starting at position 3699 of SEQ ID NO: 1243724
aauuauuuccagcaugcgu

SEQ ID NO: 1436697 - RNA, 19 nt, Artificial Sequence
  Description of Artificial Sequence: Synthetic oligonucleotide
  Antisense strand to SEQ ID NO: 1436696
acgcaugcuggaaauaauu

SEQ ID NO: 1436698 - RNA, 19 nt, Artificial Sequence
  Description of Artificial Sequence: Synthetic oligonucleotide
  Sense strand starting at position 3707 of SEQ ID NO: 1243724
ccagcaugcguugcggaau

SEQ ID NO: 1436699 - RNA, 19 nt, Artificial Sequence
  Description of Artificial Sequence: Synthetic oligonucleotide
  Antisense strand to SEQ ID NO: 1436698
auuccgcaacgcaugcugg

SEQ ID NO: 1436700 - RNA, 19 nt, Artificial Sequence
  Description of Artificial Sequence: Synthetic oligonucleotide
  Sense strand starting at position 3710 of SEQ ID NO: 1243724
gcaugcguugcggaaugaa

SEQ ID NO: 1436701 - RNA, 19 nt, Artificial Sequence
  Description of Artificial Sequence: Synthetic oligonucleotide
  Antisense strand to SEQ ID NO: 1436700
uucauuccgcaacgcaugc

SEQ ID NO: 1436702 - RNA, 19 nt, Artificial Sequence
  Description of Artificial Sequence: Synthetic oligonucleotide
  Sense strand starting at position 3724 of SEQ ID NO: 1243724
augaaaggucuucgccaca

SEQ ID NO: 1436703 - RNA, 19 nt, Artificial Sequence
  Description of Artificial Sequence: Synthetic oligonucleotide
  Antisense strand to SEQ ID NO: 1436702
uguggcgaagaccuuucau

SEQ ID NO: 1436704 - RNA, 19 nt, Artificial Sequence
  Description of Artificial Sequence: Synthetic oligonucleotide
  Sense strand starting at position 3737 of SEQ ID NO: 1243724
gccacaguguuccuuagaa

SEQ ID NO: 1436705 - RNA, 19 nt, Artificial Sequence
  Description of Artificial Sequence: Synthetic oligonucleotide
  Antisense strand to SEQ ID NO: 1436704
uucuaaggaacacuguggc

SEQ ID NO: 1436706 - RNA, 19 nt, Artificial Sequence
  Description of Artificial Sequence: Synthetic oligonucleotide
  Sense strand starting at position 3741 of SEQ ID NO: 1243724
caguguuccuuagaaacug

SEQ ID NO: 1436707 - RNA, 19 nt, Artificial Sequence
  Description of Artificial Sequence: Synthetic oligonucleotide
  Antisense strand to SEQ ID NO: 1436706
caguuucuaaggaacacug

SEQ ID NO: 1436708 - RNA, 19 nt, Artificial Sequence
  Description of Artificial Sequence: Synthetic oligonucleotide
  Sense strand starting at position 3751 of SEQ ID NO: 1243724
uagaaacuguagucuuaug

SEQ ID NO: 1436709 - RNA, 19 nt, Artificial Sequence
  Description of Artificial Sequence: Synthetic oligonucleotide
  Antisense strand to SEQ ID NO: 1436708
cauaagacuacaguuucua

SEQ ID NO: 1436710 - RNA, 19 nt, Artificial Sequence
  Description of Artificial Sequence: Synthetic oligonucleotide
  Sense strand starting at position 3839 of SEQ ID NO: 1243724
gcgcgcuuguacuugucaa

SEQ ID NO: 1436711 - RNA, 19 nt, Artificial Sequence
  Description of Artificial Sequence: Synthetic oligonucleotide
  Antisense strand to SEQ ID NO: 1436710
uugacaaguacaagcgcgc

SEQ ID NO: 1436712 - RNA, 19 nt, Artificial Sequence
  Description of Artificial Sequence: Synthetic oligonucleotide
  Sense strand starting at position 3840 of SEQ ID NO: 1243724
cgcgcuuguacuugucaac

SEQ ID NO: 1436713 - RNA, 19 nt, Artificial Sequence
  Description of Artificial Sequence: Synthetic oligonucleotide
  Antisense strand to SEQ ID NO: 1436712
guugacaaguacaagcgcg

SEQ ID NO: 1436714 - RNA, 19 nt, Artificial Sequence
  Description of Artificial Sequence: Synthetic oligonucleotide
  Sense strand starting at position 3841 of SEQ ID NO: 1243724
gcgcuuguacuugucaaca

SEQ ID NO: 1436715 - RNA, 19 nt, Artificial Sequence
  Description of Artificial Sequence: Synthetic oligonucleotide
  Antisense strand to SEQ ID NO: 1436714
uguugacaaguacaagcgc

SEQ ID NO: 1436716 - RNA, 19 nt, Artificial Sequence
  Description of Artificial Sequence: Synthetic oligonucleotide
  Sense strand starting at position 3846 of SEQ ID NO: 1243724
uguacuugucaacaguuau

SEQ ID NO: 1436717 - RNA, 19 nt, Artificial Sequence
  Description of Artificial Sequence: Synthetic oligonucleotide
  Antisense strand to SEQ ID NO: 1436716
auaacuguugacaaguaca

SEQ ID NO: 1436718 - RNA, 19 nt, Artificial Sequence
  Description of Artificial Sequence: Synthetic oligonucleotide
  Sense strand starting at position 3858 of SEQ ID NO: 1243724
caguuauggacuggagugu

SEQ ID NO: 1436719 - RNA, 19 nt, Artificial Sequence
  Description of Artificial Sequence: Synthetic oligonucleotide
  Antisense strand to SEQ ID NO: 1436718
acacuccaguccauaacug

SEQ ID NO: 1436720 - RNA, 19 nt, Artificial Sequence
  Description of Artificial Sequence: Synthetic oligonucleotide
  Sense strand starting at position 3921 of SEQ ID NO: 1243724
acguacaacucuuuaggga

SEQ ID NO: 1436721 - RNA, 19 nt, Artificial Sequence
  Description of Artificial Sequence: Synthetic oligonucleotide
  Antisense strand to SEQ ID NO: 1436720
ucccuaaagaguuguacgu

SEQ ID NO: 1436722 - RNA, 19 nt, Artificial Sequence
  Description of Artificial Sequence: Synthetic oligonucleotide
  Sense strand starting at position 3925 of SEQ ID NO: 1243724
acaacucuuuagggagacu

SEQ ID NO: 1436723 - RNA, 19 nt, Artificial Sequence
  Description of Artificial Sequence: Synthetic oligonucleotide
  Antisense strand to SEQ ID NO: 1436722
agucucccuaaagaguugu

SEQ ID NO: 1436724 - RNA, 19 nt, Artificial Sequence
  Description of Artificial Sequence: Synthetic oligonucleotide
  Sense strand starting at position 3975 of SEQ ID NO: 1243724
caaguagucuuguaagguc

SEQ ID NO: 1436725 - RNA, 19 nt, Artificial Sequence
  Description of Artificial Sequence: Synthetic oligonucleotide
  Antisense strand to SEQ ID NO: 1436724
gaccuuacaagacuacuug

SEQ ID NO: 1436726 - RNA, 19 nt, Artificial Sequence
  Description of Artificial Sequence: Synthetic oligonucleotide
  Sense strand starting at position 182 of SEQ ID NO: 1243725
ugucuuagagucuaacaaa

SEQ ID NO: 1436727 - RNA, 19 nt, Artificial Sequence
  Description of Artificial Sequence: Synthetic oligonucleotide
  Antisense strand to SEQ ID NO: 1436726
uuuguuagacucuaagaca

SEQ ID NO: 1436728 - RNA, 19 nt, Artificial Sequence
  Description of Artificial Sequence: Synthetic oligonucleotide
  Sense strand starting at position 248 of SEQ ID NO: 1243725
gggaaaguuaguuaccuuc

SEQ ID NO: 1436729 - RNA, 19 nt, Artificial Sequence
  Description of Artificial Sequence: Synthetic oligonucleotide
  Antisense strand to SEQ ID NO: 1436728
gaagguaacuaacuuuccc

SEQ ID NO: 1436730 - RNA, 19 nt, Artificial Sequence
  Description of Artificial Sequence: Synthetic oligonucleotide
  Sense strand starting at position 302 of SEQ ID NO: 1243725
ugugguaaugauuaaguga

SEQ ID NO: 1436731 - RNA, 19 nt, Artificial Sequence
  Description of Artificial Sequence: Synthetic oligonucleotide
  Antisense strand to SEQ ID NO: 1436730
ucacuuaaucauuaccaca

SEQ ID NO: 1436732 - RNA, 19 nt, Artificial Sequence
  Description of Artificial Sequence: Synthetic oligonucleotide
  Sense strand starting at position 305 of SEQ ID NO: 1243725
gguaaugauuaagugaaau

SEQ ID NO: 1436733 - RNA, 19 nt, Artificial Sequence
  Description of Artificial Sequence: Synthetic oligonucleotide
  Antisense strand to SEQ ID NO: 1436732
auuucacuuaaucauuacc

SEQ ID NO: 1436734 - RNA, 19 nt, Artificial Sequence
  Description of Artificial Sequence: Synthetic oligonucleotide
  Sense strand starting at position 513 of SEQ ID NO: 1243725
aaagcuguugaccagaagu

SEQ ID NO: 1436735 - RNA, 19 nt, Artificial Sequence
  Description of Artificial Sequence: Synthetic oligonucleotide
  Antisense strand to SEQ ID NO: 1436734
acuucuggucaacagcuuu

SEQ ID NO: 1436736 - RNA, 19 nt, Artificial Sequence
  Description of Artificial Sequence: Synthetic oligonucleotide
  Sense strand starting at position 515 of SEQ ID NO: 1243725
agcuguugaccagaaguca

SEQ ID NO: 1436737 - RNA, 19 nt, Artificial Sequence
  Description of Artificial Sequence: Synthetic oligonucleotide
  Antisense strand to SEQ ID NO: 1436736
ugacuucuggucaacagcu

SEQ ID NO: 1436738 - RNA, 19 nt, Artificial Sequence
  Description of Artificial Sequence: Synthetic oligonucleotide
  Sense strand starting at position 629 of SEQ ID NO: 1243725
gucuaagauccuuaccugu

SEQ ID NO: 1436739 - RNA, 19 nt, Artificial Sequence
  Description of Artificial Sequence: Synthetic oligonucleotide
  Antisense strand to SEQ ID NO: 1436738
acagguaaggaucuuagac

SEQ ID NO: 1436740 - RNA, 19 nt, Artificial Sequence
  Description of Artificial Sequence: Synthetic oligonucleotide
  Sense strand starting at position 631 of SEQ ID NO: 1243725
cuaagauccuuaccuguga

SEQ ID NO: 1436741 - RNA, 19 nt, Artificial Sequence
  Description of Artificial Sequence: Synthetic oligonucleotide
  Antisense strand to SEQ ID NO: 1436740
ucacagguaaggaucuuag

SEQ ID NO: 1436742 - RNA, 19 nt, Artificial Sequence
  Description of Artificial Sequence: Synthetic oligonucleotide
  Sense strand starting at position 684 of SEQ ID NO: 1243725
aagagaaugccuuggcaca

SEQ ID NO: 1436743 - RNA, 19 nt, Artificial Sequence
  Description of Artificial Sequence: Synthetic oligonucleotide
  Antisense strand to SEQ ID NO: 1436742
ugugccaaggcauucucuu

SEQ ID NO: 1436744 - RNA, 19 nt, Artificial Sequence
  Description of Artificial Sequence: Synthetic oligonucleotide
  Sense strand starting at position 753 of SEQ ID NO: 1243725
caggaugggcuuuggagua

SEQ ID NO: 1436745 - RNA, 19 nt, Artificial Sequence
  Description of Artificial Sequence: Synthetic oligonucleotide
  Antisense strand to SEQ ID NO: 1436744
uacuccaaagcccauccug

SEQ ID NO: 1436746 - RNA, 19 nt, Artificial Sequence
  Description of Artificial Sequence: Synthetic oligonucleotide
  Sense strand starting at position 772 of SEQ ID NO: 1243725
aggcaauccuaaguuugaa

SEQ ID NO: 1436747 - RNA, 19 nt, Artificial Sequence
  Description of Artificial Sequence: Synthetic oligonucleotide
  Antisense strand to SEQ ID NO: 1436746
uucaaacuuaggauugccu

SEQ ID NO: 1436748 - RNA, 19 nt, Artificial Sequence
  Description of Artificial Sequence: Synthetic oligonucleotide
  Sense strand starting at position 974 of SEQ ID NO: 1243725
aggauccacggauguaauu

SEQ ID NO: 1436749 - RNA, 19 nt, Artificial Sequence
  Description of Artificial Sequence: Synthetic oligonucleotide
  Antisense strand to SEQ ID NO: 1436748
aauuacauccguggauccu

SEQ ID NO: 1436750 - RNA, 19 nt, Artificial Sequence
  Description of Artificial Sequence: Synthetic oligonucleotide
  Sense strand starting at position 1146 of SEQ ID NO: 1243725
auuauuugcagucguggga

SEQ ID NO: 1436751 - RNA, 19 nt, Artificial Sequence
  Description of Artificial Sequence: Synthetic oligonucleotide
  Antisense strand to SEQ ID NO: 1436750
ucccacgacugcaaauaau

SEQ ID NO: 1436752 - RNA, 19 nt, Artificial Sequence
  Description of Artificial Sequence: Synthetic oligonucleotide
  Sense strand starting at position 1325 of SEQ ID NO: 1243725
aagcucugagaaugaggua

SEQ ID NO: 1436753 - RNA, 19 nt, Artificial Sequence
  Description of Artificial Sequence: Synthetic oligonucleotide
  Antisense strand to SEQ ID NO: 1436752
uaccucauucucagagcuu

SEQ ID NO: 1436754 - RNA, 19 nt, Artificial Sequence
  Description of Artificial Sequence: Synthetic oligonucleotide
  Sense strand starting at position 1345 of SEQ ID NO: 1243725
gguggaaucuaaccucuua

SEQ ID NO: 1436755 - RNA, 19 nt, Artificial Sequence
  Description of Artificial Sequence: Synthetic oligonucleotide
  Antisense strand to SEQ ID NO: 1436754
uaagagguuagauuccacc

SEQ ID NO: 1436756 - RNA, 19 nt, Artificial Sequence
  Description of Artificial Sequence: Synthetic oligonucleotide
  Sense strand starting at position 2067 of SEQ ID NO: 1243725
cgagaacuucggcauccaa

SEQ ID NO: 1436757 - RNA, 19 nt, Artificial Sequence
  Description of Artificial Sequence: Synthetic oligonucleotide
  Antisense strand to SEQ ID NO: 1436756
uuggaugccgaaguucucg

SEQ ID NO: 1436758 - RNA, 19 nt, Artificial Sequence
  Description of Artificial Sequence: Synthetic oligonucleotide
  Sense strand starting at position 2169 of SEQ ID NO: 1243725
guuuguuuaaaguagaaag

SEQ ID NO: 1436759 - RNA, 19 nt, Artificial Sequence
  Description of Artificial Sequence: Synthetic oligonucleotide
  Antisense strand to SEQ ID NO: 1436758
cuuucuacuuuaaacaaac

SEQ ID NO: 1436760 - RNA, 19 nt, Artificial Sequence
  Description of Artificial Sequence: Synthetic oligonucleotide
  Sense strand starting at position 2228 of SEQ ID NO: 1243725
gcagcaaauuccuuggaaa

SEQ ID NO: 1436761 - RNA, 19 nt, Artificial Sequence
  Description of Artificial Sequence: Synthetic oligonucleotide
  Antisense strand to SEQ ID NO: 1436760
uuuccaaggaauuugcugc

SEQ ID NO: 1436762 - RNA, 19 nt, Artificial Sequence
  Description of Artificial Sequence: Synthetic oligonucleotide
  Sense strand starting at position 2230 of SEQ ID NO: 1243725
agcaaauuccuuggaaacu

SEQ ID NO: 1436763 - RNA, 19 nt, Artificial Sequence
  Description of Artificial Sequence: Synthetic oligonucleotide
  Antisense strand to SEQ ID NO: 1436762
aguuuccaaggaauuugcu

SEQ ID NO: 1436764 - RNA, 19 nt, Artificial Sequence
  Description of Artificial Sequence: Synthetic oligonucleotide
  Sense strand starting at position 2279 of SEQ ID NO: 1243725
gcggaaaggaaguaucuuu

SEQ ID NO: 1436765 - RNA, 19 nt, Artificial Sequence
  Description of Artificial Sequence: Synthetic oligonucleotide
  Antisense strand to SEQ ID NO: 1436764
aaagauacuuccuuuccgc

SEQ ID NO: 1436766 - RNA, 19 nt, Artificial Sequence
  Description of Artificial Sequence: Synthetic oligonucleotide
  Sense strand starting at position 2318 of SEQ ID NO: 1243725
agcauuuaucagugccacu

SEQ ID NO: 1436767 - RNA, 19 nt, Artificial Sequence
  Description of Artificial Sequence: Synthetic oligonucleotide
  Antisense strand to SEQ ID NO: 1436766
aguggcacugauaaaugcu

SEQ ID NO: 1436768 - RNA, 19 nt, Artificial Sequence
  Description of Artificial Sequence: Synthetic oligonucleotide
  Sense strand starting at position 2375 of SEQ ID NO: 1243725
gaagacucaggcgggaauu

SEQ ID NO: 1436769 - RNA, 19 nt, Artificial Sequence
  Description of Artificial Sequence: Synthetic oligonucleotide
  Antisense strand to SEQ ID NO: 1436768
aauucccgccugagucuuc

SEQ ID NO: 1436770 - RNA, 19 nt, Artificial Sequence
  Description of Artificial Sequence: Synthetic oligonucleotide
  Sense strand starting at position 2406 of SEQ ID NO: 1243725
agccaaacuuaaguaagaa

SEQ ID NO: 1436771 - RNA, 19 nt, Artificial Sequence
  Description of Artificial Sequence: Synthetic oligonucleotide
  Antisense strand to SEQ ID NO: 1436770
uucuuacuuaaguuuggcu

SEQ ID NO: 1436772 - RNA, 19 nt, Artificial Sequence
  Description of Artificial Sequence: Synthetic oligonucleotide
  Sense strand starting at position 2419 of SEQ ID NO: 1243725
uaagaaggcucugugacau

SEQ ID NO: 1436773 - RNA, 19 nt, Artificial Sequence
  Description of Artificial Sequence: Synthetic oligonucleotide
  Antisense strand to SEQ ID NO: 1436772
augucacagagccuucuua

SEQ ID NO: 1436774 - RNA, 19 nt, Artificial Sequence
  Description of Artificial Sequence: Synthetic oligonucleotide
  Sense strand starting at position 2508 of SEQ ID NO: 1243725
cagggucuccaguaucaga

SEQ ID NO: 1436775 - RNA, 19 nt, Artificial Sequence
  Description of Artificial Sequence: Synthetic oligonucleotide
  Antisense strand to SEQ ID NO: 1436774
ucugauacuggagacccug

SEQ ID NO: 1436776 - RNA, 19 nt, Artificial Sequence
  Description of Artificial Sequence: Synthetic oligonucleotide
  Sense strand starting at position 2577 of SEQ ID NO: 1243725
aguuuauuauuugccagua

SEQ ID NO: 1436777 - RNA, 19 nt, Artificial Sequence
  Description of Artificial Sequence: Synthetic oligonucleotide
  Antisense strand to SEQ ID NO: 1436776
uacuggcaaauaauaaacu

SEQ ID NO: 1436778 - RNA, 19 nt, Artificial Sequence
  Description of Artificial Sequence: Synthetic oligonucleotide
  Sense strand starting at position 2578 of SEQ ID NO: 1243725
guuuauuauuugccaguag

SEQ ID NO: 1436779 - RNA, 19 nt, Artificial Sequence
  Description of Artificial Sequence: Synthetic oligonucleotide
  Antisense strand to SEQ ID NO: 1436778
cuacuggcaaauaauaaac

SEQ ID NO: 1436780 - RNA, 19 nt, Artificial Sequence
  Description of Artificial Sequence: Synthetic oligonucleotide
  Sense strand starting at position 2756 of SEQ ID NO: 1243725
aggaguuugcugggaagaa

SEQ ID NO: 1436781 - RNA, 19 nt, Artificial Sequence
  Description of Artificial Sequence: Synthetic oligonucleotide
  Antisense strand to SEQ ID NO: 1436780
uucuucccagcaaacuccu

SEQ ID NO: 1436782 - RNA, 19 nt, Artificial Sequence
  Description of Artificial Sequence: Synthetic oligonucleotide
  Sense strand starting at position 2791 of SEQ ID NO: 1243725
aguugauuuguuugccuca

SEQ ID NO: 1436783 - RNA, 19 nt, Artificial Sequence
  Description of Artificial Sequence: Synthetic oligonucleotide
  Antisense strand to SEQ ID NO: 1436782
ugaggcaaacaaaucaacu

SEQ ID NO: 1436784 - RNA, 19 nt, Artificial Sequence
  Description of Artificial Sequence: Synthetic oligonucleotide
  Sense strand starting at position 2792 of SEQ ID NO: 1243725
guugauuuguuugccucau

SEQ ID NO: 1436785 - RNA, 19 nt, Artificial Sequence
  Description of Artificial Sequence: Synthetic oligonucleotide
  Antisense strand to SEQ ID NO: 1436784
augaggcaaacaaaucaac

SEQ ID NO: 1436786 - RNA, 19 nt, Artificial Sequence
  Description of Artificial Sequence: Synthetic oligonucleotide
  Sense strand starting at position 2793 of SEQ ID NO: 1243725
uugauuuguuugccucauu

SEQ ID NO: 1436787 - RNA, 19 nt, Artificial Sequence
  Description of Artificial Sequence: Synthetic oligonucleotide
  Antisense strand to SEQ ID NO: 1436786
aaugaggcaaacaaaucaa

SEQ ID NO: 1436788 - RNA, 19 nt, Artificial Sequence
  Description of Artificial Sequence: Synthetic oligonucleotide
  Sense strand starting at position 2915 of SEQ ID NO: 1243725
acguaaucuaaacgaaaga

SEQ ID NO: 1436789 - RNA, 19 nt, Artificial Sequence
  Description of Artificial Sequence: Synthetic oligonucleotide
  Antisense strand to SEQ ID NO: 1436788
ucuuucguuuagauuacgu

SEQ ID NO: 1436790 - RNA, 19 nt, Artificial Sequence
  Description of Artificial Sequence: Synthetic oligonucleotide
  Sense strand starting at position 2945 of SEQ ID NO: 1243725
cgcaauugacaauaauauc

SEQ ID NO: 1436791 - RNA, 19 nt, Artificial Sequence
  Description of Artificial Sequence: Synthetic oligonucleotide
  Antisense strand to SEQ ID NO: 1436790
gauauuauugucaauugcg

SEQ ID NO: 1436792 - RNA, 19 nt, Artificial Sequence
  Description of Artificial Sequence: Synthetic oligonucleotide
  Sense strand starting at position 3017 of SEQ ID NO: 1243725
gguuaugacagaugaauuc

SEQ ID NO: 1436793 - RNA, 19 nt, Artificial Sequence
  Description of Artificial Sequence: Synthetic oligonucleotide
  Antisense strand to SEQ ID NO: 1436792
gaauucaucugucauaacc

SEQ ID NO: 1436794 - RNA, 19 nt, Artificial Sequence
  Description of Artificial Sequence: Synthetic oligonucleotide
  Sense strand starting at position 3599 of SEQ ID NO: 1243725
gaguaacugcucuaguaua

SEQ ID NO: 1436795 - RNA, 19 nt, Artificial Sequence
  Description of Artificial Sequence: Synthetic oligonucleotide
  Antisense strand to SEQ ID NO: 1436794
uauacuagagcaguuacuc

SEQ ID NO: 1436796 - RNA, 19 nt, Artificial Sequence
  Description of Artificial Sequence: Synthetic oligonucleotide
  Sense strand starting at position 3679 of SEQ ID NO: 1243725
ccauuuaauguauguggca

SEQ ID NO: 1436797 - RNA, 19 nt, Artificial Sequence
  Description of Artificial Sequence: Synthetic oligonucleotide
  Antisense strand to SEQ ID NO: 1436796
ugccacauacauuaaaugg

SEQ ID NO: 1436798 - RNA, 19 nt, Artificial Sequence
  Description of Artificial Sequence: Synthetic oligonucleotide
  Sense strand starting at position 3680 of SEQ ID NO: 1243725
cauuuaauguauguggcau

SEQ ID NO: 1436799 - RNA, 19 nt, Artificial Sequence
  Description of Artificial Sequence: Synthetic oligonucleotide
  Antisense strand to SEQ ID NO: 1436798
augccacauacauuaaaug

SEQ ID NO: 1436800 - RNA, 19 nt, Artificial Sequence
  Description of Artificial Sequence: Synthetic oligonucleotide
  Sense strand starting at position 3686 of SEQ ID NO: 1243725
auguauguggcauaacaga

SEQ ID NO: 1436801 - RNA, 19 nt, Artificial Sequence
  Description of Artificial Sequence: Synthetic oligonucleotide
  Antisense strand to SEQ ID NO: 1436800
ucuguuaugccacauacau

SEQ ID NO: 1436802 - RNA, 19 nt, Artificial Sequence
  Description of Artificial Sequence: Synthetic oligonucleotide
  Sense strand starting at position 3768 of SEQ ID NO: 1243725
ucagguuaacucuagugga

SEQ ID NO: 1436803 - RNA, 19 nt, Artificial Sequence
  Description of Artificial Sequence: Synthetic oligonucleotide
  Antisense strand to SEQ ID NO: 1436802
uccacuagaguuaaccuga

SEQ ID NO: 1436804 - RNA, 19 nt, Artificial Sequence
  Description of Artificial Sequence: Synthetic oligonucleotide
  Sense strand starting at position 3772 of SEQ ID NO: 1243725
guuaacucuaguggaauga

SEQ ID NO: 1436805 - RNA, 19 nt, Artificial Sequence
  Description of Artificial Sequence: Synthetic oligonucleotide
  Antisense strand to SEQ ID NO: 1436804
ucauuccacuagaguuaac

SEQ ID NO: 1436806 - RNA, 19 nt, Artificial Sequence
  Description of Artificial Sequence: Synthetic oligonucleotide
  Sense strand starting at position 148 of SEQ ID NO: 1243726
accugaugaacuugucgaa

SEQ ID NO: 1436807 - RNA, 19 nt, Artificial Sequence
  Description of Artificial Sequence: Synthetic oligonucleotide
  Antisense strand to SEQ ID NO: 1436806
uucgacaaguucaucaggu

SEQ ID NO: 1436808 - RNA, 19 nt, Artificial Sequence
  Description of Artificial Sequence: Synthetic oligonucleotide
  Sense strand starting at position 508 of SEQ ID NO: 1243726
gagacauaugcaugggugu

SEQ ID NO: 1436809 - RNA, 19 nt, Artificial Sequence
  Description of Artificial Sequence: Synthetic oligonucleotide
  Antisense strand to SEQ ID NO: 1436808
acacccaugcauaugucuc

SEQ ID NO: 1436810 - RNA, 19 nt, Artificial Sequence
  Description of Artificial Sequence: Synthetic oligonucleotide
  Sense strand starting at position 510 of SEQ ID NO: 1243726
gacauaugcauggguguga

SEQ ID NO: 1436811 - RNA, 19 nt, Artificial Sequence
  Description of Artificial Sequence: Synthetic oligonucleotide
  Antisense strand to SEQ ID NO: 1436810
ucacacccaugcauauguc

SEQ ID NO: 1436812 - RNA, 19 nt, Artificial Sequence
  Description of Artificial Sequence: Synthetic oligonucleotide
  Sense strand starting at position 691 of SEQ ID NO: 1243726
gggagguugugcucagguu

SEQ ID NO: 1436813 - RNA, 19 nt, Artificial Sequence
  Description of Artificial Sequence: Synthetic oligonucleotide
  Antisense strand to SEQ ID NO: 1436812
aaccugagcacaaccuccc

SEQ ID NO: 1436814 - RNA, 19 nt, Artificial Sequence
  Description of Artificial Sequence: Synthetic oligonucleotide
  Sense strand starting at position 692 of SEQ ID NO: 1243726
ggagguugugcucagguuu

SEQ ID NO: 1436815 - RNA, 19 nt, Artificial Sequence
  Description of Artificial Sequence: Synthetic oligonucleotide
  Antisense strand to SEQ ID NO: 1436814
aaaccugagcacaaccucc

SEQ ID NO: 1436816 - RNA, 19 nt, Artificial Sequence
  Description of Artificial Sequence: Synthetic oligonucleotide
  Sense strand starting at position 882 of SEQ ID NO: 1243726
gcuagacauucuccuaaga

SEQ ID NO: 1436817 - RNA, 19 nt, Artificial Sequence
  Description of Artificial Sequence: Synthetic oligonucleotide
  Antisense strand to SEQ ID NO: 1436816
ucuuaggagaaugucuagc

SEQ ID NO: 1436818 - RNA, 19 nt, Artificial Sequence
  Description of Artificial Sequence: Synthetic oligonucleotide
  Sense strand starting at position 960 of SEQ ID NO: 1243726
ugacauaucaaacggguaa

SEQ ID NO: 1436819 - RNA, 19 nt, Artificial Sequence
  Description of Artificial Sequence: Synthetic oligonucleotide
  Antisense strand to SEQ ID NO: 1436818
uuacccguuugauauguca

SEQ ID NO: 1436820 - RNA, 19 nt, Artificial Sequence
  Description of Artificial Sequence: Synthetic oligonucleotide
  Sense strand starting at position 962 of SEQ ID NO: 1243726
acauaucaaacggguaaga

SEQ ID NO: 1436821 - RNA, 19 nt, Artificial Sequence
  Description of Artificial Sequence: Synthetic oligonucleotide
  Antisense strand to SEQ ID NO: 1436820
ucuuacccguuugauaugu

SEQ ID NO: 1436822 - RNA, 19 nt, Artificial Sequence
  Description of Artificial Sequence: Synthetic oligonucleotide
  Sense strand starting at position 1203 of SEQ ID NO: 1243726
gguccugaucucugagaca

SEQ ID NO: 1436823 - RNA, 19 nt, Artificial Sequence
  Description of Artificial Sequence: Synthetic oligonucleotide
  Antisense strand to SEQ ID NO: 1436822
ugucucagagaucaggacc

SEQ ID NO: 1436824 - RNA, 19 nt, Artificial Sequence
  Description of Artificial Sequence: Synthetic oligonucleotide
  Sense strand starting at position 1206 of SEQ ID NO: 1243726
ccugaucucugagacagaa

SEQ ID NO: 1436825 - RNA, 19 nt, Artificial Sequence
  Description of Artificial Sequence: Synthetic oligonucleotide
  Antisense strand to SEQ ID NO: 1436824
uucugucucagagaucagg

SEQ ID NO: 1436826 - RNA, 19 nt, Artificial Sequence
  Description of Artificial Sequence: Synthetic oligonucleotide
  Sense strand starting at position 1288 of SEQ ID NO: 1243726
auagaacuuccuggguaac

SEQ ID NO: 1436827 - RNA, 19 nt, Artificial Sequence
  Description of Artificial Sequence: Synthetic oligonucleotide
  Antisense strand to SEQ ID NO: 1436826
guuacccaggaaguucuau

SEQ ID NO: 1436828 - RNA, 19 nt, Artificial Sequence
  Description of Artificial Sequence: Synthetic oligonucleotide
  Sense strand starting at position 1289 of SEQ ID NO: 1243726
uagaacuuccuggguaacu

SEQ ID NO: 1436829 - RNA, 19 nt, Artificial Sequence
  Description of Artificial Sequence: Synthetic oligonucleotide
  Antisense strand to SEQ ID NO: 1436828
aguuacccaggaaguucua

SEQ ID NO: 1436830 - RNA, 19 nt, Artificial Sequence
  Description of Artificial Sequence: Synthetic oligonucleotide
  Sense strand starting at position 1298 of SEQ ID NO: 1243726
cuggguaacugagcauuga

SEQ ID NO: 1436831 - RNA, 19 nt, Artificial Sequence
  Description of Artificial Sequence: Synthetic oligonucleotide
  Antisense strand to SEQ ID NO: 1436830
ucaaugcucaguuacccag

SEQ ID NO: 1436832 - RNA, 19 nt, Artificial Sequence
  Description of Artificial Sequence: Synthetic oligonucleotide
  Sense strand starting at position 1371 of SEQ ID NO: 1243726
gggauaugcacucaguuau

SEQ ID NO: 1436833 - RNA, 19 nt, Artificial Sequence
  Description of Artificial Sequence: Synthetic oligonucleotide
  Antisense strand to SEQ ID NO: 1436832
auaacugagugcauauccc

SEQ ID NO: 1436834 - RNA, 19 nt, Artificial Sequence
  Description of Artificial Sequence: Synthetic oligonucleotide
  Sense strand starting at position 1550 of SEQ ID NO: 1243726
agagcaucugugcaugaga

SEQ ID NO: 1436835 - RNA, 19 nt, Artificial Sequence
  Description of Artificial Sequence: Synthetic oligonucleotide
  Antisense strand to SEQ ID NO: 1436834
ucucaugcacagaugcucu

SEQ ID NO: 1436836 - RNA, 19 nt, Artificial Sequence
  Description of Artificial Sequence: Synthetic oligonucleotide
  Sense strand starting at position 1552 of SEQ ID NO: 1243726
agcaucugugcaugagaga

SEQ ID NO: 1436837 - RNA, 19 nt, Artificial Sequence
  Description of Artificial Sequence: Synthetic oligonucleotide
  Antisense strand to SEQ ID NO: 1436836
ucucucaugcacagaugcu

SEQ ID NO: 1436838 - RNA, 19 nt, Artificial Sequence
  Description of Artificial Sequence: Synthetic oligonucleotide
  Sense strand starting at position 1609 of SEQ ID NO: 1243726
gguaguauguuucccagca

SEQ ID NO: 1436839 - RNA, 19 nt, Artificial Sequence
  Description of Artificial Sequence: Synthetic oligonucleotide
  Antisense strand to SEQ ID NO: 1436838
ugcugggaaacauacuacc

SEQ ID NO: 1436840 - RNA, 19 nt, Artificial Sequence
  Description of Artificial Sequence: Synthetic oligonucleotide
  Sense strand starting at position 2141 of SEQ ID NO: 1243726
cuccauggauugguggaaa

SEQ ID NO: 1436841 - RNA, 19 nt, Artificial Sequence
  Description of Artificial Sequence: Synthetic oligonucleotide
  Antisense strand to SEQ ID NO: 1436840
uuuccaccaauccauggag

SEQ ID NO: 1436842 - RNA, 19 nt, Artificial Sequence
  Description of Artificial Sequence: Synthetic oligonucleotide
  Sense strand starting at position 2301 of SEQ ID NO: 1243726
gugccucucccuggaaagu

SEQ ID NO: 1436843 - RNA, 19 nt, Artificial Sequence
  Description of Artificial Sequence: Synthetic oligonucleotide
  Antisense strand to SEQ ID NO: 1436842
acuuuccagggagaggcac

SEQ ID NO: 1436844 - RNA, 19 nt, Artificial Sequence
  Description of Artificial Sequence: Synthetic oligonucleotide
  Sense strand starting at position 2302 of SEQ ID NO: 1243726
ugccucucccuggaaaguu

SEQ ID NO: 1436845 - RNA, 19 nt, Artificial Sequence
  Description of Artificial Sequence: Synthetic oligonucleotide
  Antisense strand to SEQ ID NO: 1436844
aacuuuccagggagaggca

SEQ ID NO: 1436846 - RNA, 19 nt, Artificial Sequence
  Description of Artificial Sequence: Synthetic oligonucleotide
  Sense strand starting at position 2321 of SEQ ID NO: 1243726
ucaggcucucugcagaaua

SEQ ID NO: 1436847 - RNA, 19 nt, Artificial Sequence
  Description of Artificial Sequence: Synthetic oligonucleotide
  Antisense strand to SEQ ID NO: 1436846
uauucugcagagagccuga

SEQ ID NO: 1436848 - RNA, 19 nt, Artificial Sequence
  Description of Artificial Sequence: Synthetic oligonucleotide
  Sense strand starting at position 2560 of SEQ ID NO: 1243726
gagagaagcucagagaucu

SEQ ID NO: 1436849 - RNA, 19 nt, Artificial Sequence
  Description of Artificial Sequence: Synthetic oligonucleotide
  Antisense strand to SEQ ID NO: 1436848
agaucucugagcuucucuc

SEQ ID NO: 1436850 - RNA, 19 nt, Artificial Sequence
  Description of Artificial Sequence: Synthetic oligonucleotide
  Sense strand starting at position 2614 of SEQ ID NO: 1243726
ucauauucuuuguugaaga

SEQ ID NO: 1436851 - RNA, 19 nt, Artificial Sequence
  Description of Artificial Sequence: Synthetic oligonucleotide
  Antisense strand to SEQ ID NO: 1436850
ucuucaacaaagaauauga

SEQ ID NO: 1436852 - RNA, 19 nt, Artificial Sequence
  Description of Artificial Sequence: Synthetic oligonucleotide
  Sense strand starting at position 2619 of SEQ ID NO: 1243726
uucuuuguugaagaagguu

SEQ ID NO: 1436853 - RNA, 19 nt, Artificial Sequence
  Description of Artificial Sequence: Synthetic oligonucleotide
  Antisense strand to SEQ ID NO: 1436852
aaccuucuucaacaaagaa

SEQ ID NO: 1436854 - RNA, 19 nt, Artificial Sequence
  Description of Artificial Sequence: Synthetic oligonucleotide
  Sense strand starting at position 2934 of SEQ ID NO: 1243726
uuaccagcuucugucuuau

SEQ ID NO: 1436855 - RNA, 19 nt, Artificial Sequence
  Description of Artificial Sequence: Synthetic oligonucleotide
  Antisense strand to SEQ ID NO: 1436854
auaagacagaagcugguaa

SEQ ID NO: 1436856 - RNA, 19 nt, Artificial Sequence
  Description of Artificial Sequence: Synthetic oligonucleotide
  Sense strand starting at position 2936 of SEQ ID NO: 1243726
accagcuucugucuuauuu

SEQ ID NO: 1436857 - RNA, 19 nt, Artificial Sequence
  Description of Artificial Sequence: Synthetic oligonucleotide
  Antisense strand to SEQ ID NO: 1436856
aaauaagacagaagcuggu

SEQ ID NO: 1436858 - RNA, 19 nt, Artificial Sequence
  Description of Artificial Sequence: Synthetic oligonucleotide
  Sense strand starting at position 3049 of SEQ ID NO: 1243726
ugcagucucaguuggguua

SEQ ID NO: 1436859 - RNA, 19 nt, Artificial Sequence
  Description of Artificial Sequence: Synthetic oligonucleotide
  Antisense strand to SEQ ID NO: 1436858
uaacccaacugagacugca

SEQ ID NO: 1436860 - RNA, 19 nt, Artificial Sequence
  Description of Artificial Sequence: Synthetic oligonucleotide
  Sense strand starting at position 3224 of SEQ ID NO: 1243726
caguucuucgugggaggga

SEQ ID NO: 1436861 - RNA, 19 nt, Artificial Sequence
  Description of Artificial Sequence: Synthetic oligonucleotide
  Antisense strand to SEQ ID NO: 1436860
ucccucccacgaagaacug

SEQ ID NO: 1436862 - RNA, 19 nt, Artificial Sequence
  Description of Artificial Sequence: Synthetic oligonucleotide
  Sense strand starting at position 3237 of SEQ ID NO: 1243726
gagggacuccuuugagcuu

SEQ ID NO: 1436863 - RNA, 19 nt, Artificial Sequence
  Description of Artificial Sequence: Synthetic oligonucleotide
  Antisense strand to SEQ ID NO: 1436862
aagcucaaaggagucccuc

SEQ ID NO: 1436864 - RNA, 19 nt, Artificial Sequence
  Description of Artificial Sequence: Synthetic oligonucleotide
  Sense strand starting at position 3243 of SEQ ID NO: 1243726
cuccuuugagcuuggcuaa

SEQ ID NO: 1436865 - RNA, 19 nt, Artificial Sequence
  Description of Artificial Sequence: Synthetic oligonucleotide
  Antisense strand to SEQ ID NO: 1436864
uuagccaagcucaaaggag

SEQ ID NO: 1436866 - RNA, 19 nt, Artificial Sequence
  Description of Artificial Sequence: Synthetic oligonucleotide
  Sense strand starting at position 3359 of SEQ ID NO: 1243726
gccagcucgaugcauugau

SEQ ID NO: 1436867 - RNA, 19 nt, Artificial Sequence
  Description of Artificial Sequence: Synthetic oligonucleotide
  Antisense strand to SEQ ID NO: 1436866
aucaaugcaucgagcuggc

SEQ ID NO: 1436868 - RNA, 19 nt, Artificial Sequence
  Description of Artificial Sequence: Synthetic oligonucleotide
  Sense strand starting at position 3363 of SEQ ID NO: 1243726
gcucgaugcauugauuucu

SEQ ID NO: 1436869 - RNA, 19 nt, Artificial Sequence
  Description of Artificial Sequence: Synthetic oligonucleotide
  Antisense strand to SEQ ID NO: 1436868
agaaaucaaugcaucgagc

SEQ ID NO: 1436870 - RNA, 19 nt, Artificial Sequence
  Description of Artificial Sequence: Synthetic oligonucleotide
  Sense strand starting at position 3602 of SEQ ID NO: 1243726
guaccauguccuggcucaa

SEQ ID NO: 1436871 - RNA, 19 nt, Artificial Sequence
  Description of Artificial Sequence: Synthetic oligonucleotide
  Antisense strand to SEQ ID NO: 1436870
uugagccaggacaugguac

SEQ ID NO: 1436872 - RNA, 19 nt, Artificial Sequence
  Description of Artificial Sequence: Synthetic oligonucleotide
  Sense strand starting at position 3689 of SEQ ID NO: 1243726
cagugcuuucgauaggaau

SEQ ID NO: 1436873 - RNA, 19 nt, Artificial Sequence
  Description of Artificial Sequence: Synthetic oligonucleotide
  Antisense strand to SEQ ID NO: 1436872
auuccuaucgaaagcacug

SEQ ID NO: 1436874 - RNA, 19 nt, Artificial Sequence
  Description of Artificial Sequence: Synthetic oligonucleotide
  Sense strand starting at position 3691 of SEQ ID NO: 1243726
gugcuuucgauaggaaugu

SEQ ID NO: 1436875 - RNA, 19 nt, Artificial Sequence
  Description of Artificial Sequence: Synthetic oligonucleotide
  Antisense strand to SEQ ID NO: 1436874
acauuccuaucgaaagcac

SEQ ID NO: 1436876 - RNA, 19 nt, Artificial Sequence
  Description of Artificial Sequence: Synthetic oligonucleotide
  Sense strand starting at position 3695 of SEQ ID NO: 1243726
uuucgauaggaauguuauu

SEQ ID NO: 1436877 - RNA, 19 nt, Artificial Sequence
  Description of Artificial Sequence: Synthetic oligonucleotide
  Antisense strand to SEQ ID NO: 1436876
aauaacauuccuaucgaaa

SEQ ID NO: 1436878 - RNA, 19 nt, Artificial Sequence
  Description of Artificial Sequence: Synthetic oligonucleotide
  Sense strand starting at position 3707 of SEQ ID NO: 1243726
uguuauugaugauaagaga

SEQ ID NO: 1436879 - RNA, 19 nt, Artificial Sequence
  Description of Artificial Sequence: Synthetic oligonucleotide
  Antisense strand to SEQ ID NO: 1436878
ucucuuaucaucaauaaca

SEQ ID NO: 1436880 - RNA, 19 nt, Artificial Sequence
  Description of Artificial Sequence: Synthetic oligonucleotide
  Sense strand starting at position 3751 of SEQ ID NO: 1243726
ugauauuugugccucucaa

SEQ ID NO: 1436881 - RNA, 19 nt, Artificial Sequence
  Description of Artificial Sequence: Synthetic oligonucleotide
  Antisense strand to SEQ ID NO: 1436880
uugagaggcacaaauauca

SEQ ID NO: 1436882 - RNA, 19 nt, Artificial Sequence
  Description of Artificial Sequence: Synthetic oligonucleotide
  Sense strand starting at position 3973 of SEQ ID NO: 1243726
uugugucagucauucuuga

SEQ ID NO: 1436883 - RNA, 19 nt, Artificial Sequence
  Description of Artificial Sequence: Synthetic oligonucleotide
  Antisense strand to SEQ ID NO: 1436882
ucaagaaugacugacacaa

SEQ ID NO: 1436884 - RNA, 19 nt, Artificial Sequence
  Description of Artificial Sequence: Synthetic oligonucleotide
  Sense strand starting at position 3978 of SEQ ID NO: 1243726
ucagucauucuugaagggu

SEQ ID NO: 1436885 - RNA, 19 nt, Artificial Sequence
  Description of Artificial Sequence: Synthetic oligonucleotide
  Antisense strand to SEQ ID NO: 1436884
acccuucaagaaugacuga

SEQ ID NO: 1436886 - RNA, 19 nt, Artificial Sequence
  Description of Artificial Sequence: Synthetic oligonucleotide
  Sense strand starting at position 52 of SEQ ID NO: 1243727
cagagccuucccuguggaa

SEQ ID NO: 1436887 - RNA, 19 nt, Artificial Sequence
  Description of Artificial Sequence: Synthetic oligonucleotide
  Antisense strand to SEQ ID NO: 1436886
uuccacagggaaggcucug

SEQ ID NO: 1436888 - RNA, 19 nt, Artificial Sequence
  Description of Artificial Sequence: Synthetic oligonucleotide
  Sense strand starting at position 992 of SEQ ID NO: 1243727
aggaguaucagcgaugcuu

SEQ ID NO: 1436889 - RNA, 19 nt, Artificial Sequence
  Description of Artificial Sequence: Synthetic oligonucleotide
  Antisense strand to SEQ ID NO: 1436888
aagcaucgcugauacuccu

SEQ ID NO: 1436890 - RNA, 19 nt, Artificial Sequence
  Description of Artificial Sequence: Synthetic oligonucleotide
  Sense strand starting at position 1329 of SEQ ID NO: 1243727
ggguaugugagcuauguuu

SEQ ID NO: 1436891 - RNA, 19 nt, Artificial Sequence
  Description of Artificial Sequence: Synthetic oligonucleotide
  Antisense strand to SEQ ID NO: 1436890
aaacauagcucacauaccc

SEQ ID NO: 1436892 - RNA, 19 nt, Artificial Sequence
  Description of Artificial Sequence: Synthetic oligonucleotide
  Sense strand starting at position 1493 of SEQ ID NO: 1243727
gucucauguguugggaaga

SEQ ID NO: 1436893 - RNA, 19 nt, Artificial Sequence
  Description of Artificial Sequence: Synthetic oligonucleotide
  Antisense strand to SEQ ID NO: 1436892
ucuucccaacacaugagac

SEQ ID NO: 1436894 - RNA, 19 nt, Artificial Sequence
  Description of Artificial Sequence: Synthetic oligonucleotide
  Sense strand starting at position 1694 of SEQ ID NO: 1243727
ugucguugugugucuguca

SEQ ID NO: 1436895 - RNA, 19 nt, Artificial Sequence
  Description of Artificial Sequence: Synthetic oligonucleotide
  Antisense strand to SEQ ID NO: 1436894
ugacagacacacaacgaca

SEQ ID NO: 1436896 - RNA, 19 nt, Artificial Sequence
  Description of Artificial Sequence: Synthetic oligonucleotide
  Sense strand starting at position 1986 of SEQ ID NO: 1243727
agggcugagccucagaauu

SEQ ID NO: 1436897 - RNA, 19 nt, Artificial Sequence
  Description of Artificial Sequence: Synthetic oligonucleotide
  Antisense strand to SEQ ID NO: 1436896
aauucugaggcucagcccu

SEQ ID NO: 1436898 - RNA, 19 nt, Artificial Sequence
  Description of Artificial Sequence: Synthetic oligonucleotide
  Sense strand starting at position 2546 of SEQ ID NO: 1243727
cccgaauugccuggaaguu

SEQ ID NO: 1436899 - RNA, 19 nt, Artificial Sequence
  Description of Artificial Sequence: Synthetic oligonucleotide
  Antisense strand to SEQ ID NO: 1436898
aacuuccaggcaauucggg

SEQ ID NO: 1436900 - RNA, 19 nt, Artificial Sequence
  Description of Artificial Sequence: Synthetic oligonucleotide
  Sense strand starting at position 2570 of SEQ ID NO: 1243727
ucugucuagccuuagaucu

SEQ ID NO: 1436901 - RNA, 19 nt, Artificial Sequence
  Description of Artificial Sequence: Synthetic oligonucleotide
  Antisense strand to SEQ ID NO: 1436900
agaucuaaggcuagacaga

SEQ ID NO: 1436902 - RNA, 19 nt, Artificial Sequence
  Description of Artificial Sequence: Synthetic oligonucleotide
  Sense strand starting at position 2795 of SEQ ID NO: 1243727
acagaauagcagcggugau

SEQ ID NO: 1436903 - RNA, 19 nt, Artificial Sequence
  Description of Artificial Sequence: Synthetic oligonucleotide
  Antisense strand to SEQ ID NO: 1436902
aucaccgcugcuauucugu

SEQ ID NO: 1436904 - RNA, 19 nt, Artificial Sequence
  Description of Artificial Sequence: Synthetic oligonucleotide
  Sense strand starting at position 2796 of SEQ ID NO: 1243727
cagaauagcagcggugaua

SEQ ID NO: 1436905 - RNA, 19 nt, Artificial Sequence
  Description of Artificial Sequence: Synthetic oligonucleotide
  Antisense strand to SEQ ID NO: 1436904
uaucaccgcugcuauucug

SEQ ID NO: 1436906 - RNA, 19 nt, Artificial Sequence
  Description of Artificial Sequence: Synthetic oligonucleotide
  Sense strand starting at position 2947 of SEQ ID NO: 1243727
gcaugauguguugcuguuu

SEQ ID NO: 1436907 - RNA, 19 nt, Artificial Sequence
  Description of Artificial Sequence: Synthetic oligonucleotide
  Antisense strand to SEQ ID NO: 1436906
aaacagcaacacaucaugc

SEQ ID NO: 1436908 - RNA, 19 nt, Artificial Sequence
  Description of Artificial Sequence: Synthetic oligonucleotide
  Sense strand starting at position 2958 of SEQ ID NO: 1243727
ugcuguuuaggucagagua

SEQ ID NO: 1436909 - RNA, 19 nt, Artificial Sequence
  Description of Artificial Sequence: Synthetic oligonucleotide
  Antisense strand to SEQ ID NO: 1436908
uacucugaccuaaacagca

SEQ ID NO: 1436910 - RNA, 19 nt, Artificial Sequence
  Description of Artificial Sequence: Synthetic oligonucleotide
  Sense strand starting at position 2992 of SEQ ID NO: 1243727
augcgcaugcguguguaua

SEQ ID NO: 1436911 - RNA, 19 nt, Artificial Sequence
  Description of Artificial Sequence: Synthetic oligonucleotide
  Antisense strand to SEQ ID NO: 1436910
uauacacacgcaugcgcau

SEQ ID NO: 1436912 - RNA, 19 nt, Artificial Sequence
  Description of Artificial Sequence: Synthetic oligonucleotide
  Sense strand starting at position 2996 of SEQ ID NO: 1243727
gcaugcguguguauaguau

SEQ ID NO: 1436913 - RNA, 19 nt, Artificial Sequence
  Description of Artificial Sequence: Synthetic oligonucleotide
  Antisense strand to SEQ ID NO: 1436912
auacuauacacacgcaugc

SEQ ID NO: 1436914 - RNA, 19 nt, Artificial Sequence
  Description of Artificial Sequence: Synthetic oligonucleotide
  Sense strand starting at position 3004 of SEQ ID NO: 1243727
guguauaguaugcaucuau

SEQ ID NO: 1436915 - RNA, 19 nt, Artificial Sequence
  Description of Artificial Sequence: Synthetic oligonucleotide
  Antisense strand to SEQ ID NO: 1436914
auagaugcauacuauacac

SEQ ID NO: 1436916 - RNA, 19 nt, Artificial Sequence
  Description of Artificial Sequence: Synthetic oligonucleotide
  Sense strand starting at position 3058 of SEQ ID NO: 1243727
ggccauuguguguauauau

SEQ ID NO: 1436917 - RNA, 19 nt, Artificial Sequence
  Description of Artificial Sequence: Synthetic oligonucleotide
  Antisense strand to SEQ ID NO: 1436916
auauauacacacaauggcc

SEQ ID NO: 1436918 - RNA, 19 nt, Artificial Sequence
  Description of Artificial Sequence: Synthetic oligonucleotide
  Sense strand starting at position 3083 of SEQ ID NO: 1243727
gcuauuaugugucuaugag

SEQ ID NO: 1436919 - RNA, 19 nt, Artificial Sequence
  Description of Artificial Sequence: Synthetic oligonucleotide
  Antisense strand to SEQ ID NO: 1436918
cucauagacacauaauagc

SEQ ID NO: 1436920 - RNA, 19 nt, Artificial Sequence
  Description of Artificial Sequence: Synthetic oligonucleotide
  Sense strand starting at position 3084 of SEQ ID NO: 1243727
cuauuaugugucuaugagu

SEQ ID NO: 1436921 - RNA, 19 nt, Artificial Sequence
  Description of Artificial Sequence: Synthetic oligonucleotide
  Antisense strand to SEQ ID NO: 1436920
acucauagacacauaauag

SEQ ID NO: 1436922 - RNA, 19 nt, Artificial Sequence
  Description of Artificial Sequence: Synthetic oligonucleotide
  Sense strand starting at position 3089 of SEQ ID NO: 1243727
augugucuaugagucacau

SEQ ID NO: 1436923 - RNA, 19 nt, Artificial Sequence
  Description of Artificial Sequence: Synthetic oligonucleotide
  Antisense strand to SEQ ID NO: 1436922
augugacucauagacacau

SEQ ID NO: 1436924 - RNA, 19 nt, Artificial Sequence
  Description of Artificial Sequence: Synthetic oligonucleotide
  Sense strand starting at position 3199 of SEQ ID NO: 1243727
ugcuguuaugugcauggga

SEQ ID NO: 1436925 - RNA, 19 nt, Artificial Sequence
  Description of Artificial Sequence: Synthetic oligonucleotide
  Antisense strand to SEQ ID NO: 1436924
ucccaugcacauaacagca

SEQ ID NO: 1436926 - RNA, 19 nt, Artificial Sequence
  Description of Artificial Sequence: Synthetic oligonucleotide
  Sense strand starting at position 3215 of SEQ ID NO: 1243727
ggaggcuaucauugcauga

SEQ ID NO: 1436927 - RNA, 19 nt, Artificial Sequence
  Description of Artificial Sequence: Synthetic oligonucleotide
  Antisense strand to SEQ ID NO: 1436926
ucaugcaaugauagccucc

SEQ ID NO: 1436928 - RNA, 19 nt, Artificial Sequence
  Description of Artificial Sequence: Synthetic oligonucleotide
  Sense strand starting at position 3220 of SEQ ID NO: 1243727
cuaucauugcaugaguuua

SEQ ID NO: 1436929 - RNA, 19 nt, Artificial Sequence
  Description of Artificial Sequence: Synthetic oligonucleotide
  Antisense strand to SEQ ID NO: 1436928
uaaacucaugcaaugauag

SEQ ID NO: 1436930 - RNA, 19 nt, Artificial Sequence
  Description of Artificial Sequence: Synthetic oligonucleotide
  Sense strand starting at position 3222 of SEQ ID NO: 1243727
aucauugcaugaguuuaua

SEQ ID NO: 1436931 - RNA, 19 nt, Artificial Sequence
  Description of Artificial Sequence: Synthetic oligonucleotide
  Antisense strand to SEQ ID NO: 1436930
uauaaacucaugcaaugau

SEQ ID NO: 1436932 - RNA, 19 nt, Artificial Sequence
  Description of Artificial Sequence: Synthetic oligonucleotide
  Sense strand starting at position 3263 of SEQ ID NO: 1243727
uauagauauggaugcuacu

SEQ ID NO: 1436933 - RNA, 19 nt, Artificial Sequence
  Description of Artificial Sequence: Synthetic oligonucleotide
  Antisense strand to SEQ ID NO: 1436932
aguagcauccauaucuaua

SEQ ID NO: 1436934 - RNA, 19 nt, Artificial Sequence
  Description of Artificial Sequence: Synthetic oligonucleotide
  Sense strand starting at position 3293 of SEQ ID NO: 1243727
uguaguaauugauuacaca

SEQ ID NO: 1436935 - RNA, 19 nt, Artificial Sequence
  Description of Artificial Sequence: Synthetic oligonucleotide
  Antisense strand to SEQ ID NO: 1436934
uguguaaucaauuacuaca

SEQ ID NO: 1436936 - RNA, 19 nt, Artificial Sequence
  Description of Artificial Sequence: Synthetic oligonucleotide
  Sense strand starting at position 3322 of SEQ ID NO: 1243727
ugcucauaucgucauguaa

SEQ ID NO: 1436937 - RNA, 19 nt, Artificial Sequence
  Description of Artificial Sequence: Synthetic oligonucleotide
  Antisense strand to SEQ ID NO: 1436936
uuacaugacgauaugagca

SEQ ID NO: 1436938 - RNA, 19 nt, Artificial Sequence
  Description of Artificial Sequence: Synthetic oligonucleotide
  Sense strand starting at position 3336 of SEQ ID NO: 1243727
uguaaauaugcauaaugac

SEQ ID NO: 1436939 - RNA, 19 nt, Artificial Sequence
  Description of Artificial Sequence: Synthetic oligonucleotide
  Antisense strand to SEQ ID NO: 1436938
gucauuaugcauauuuaca

SEQ ID NO: 1436940 - RNA, 19 nt, Artificial Sequence
  Description of Artificial Sequence: Synthetic oligonucleotide
  Sense strand starting at position 3350 of SEQ ID NO: 1243727
augacaugguuugauuuau

SEQ ID NO: 1436941 - RNA, 19 nt, Artificial Sequence
  Description of Artificial Sequence: Synthetic oligonucleotide
  Antisense strand to SEQ ID NO: 1436940
auaaaucaaaccaugucau

SEQ ID NO: 1436942 - RNA, 19 nt, Artificial Sequence
  Description of Artificial Sequence: Synthetic oligonucleotide
  Sense strand starting at position 3420 of SEQ ID NO: 1243727
acaugucucuaucuaugua

SEQ ID NO: 1436943 - RNA, 19 nt, Artificial Sequence
  Description of Artificial Sequence: Synthetic oligonucleotide
  Antisense strand to SEQ ID NO: 1436942
uacauagauagagacaugu

SEQ ID NO: 1436944 - RNA, 19 nt, Artificial Sequence
  Description of Artificial Sequence: Synthetic oligonucleotide
  Sense strand starting at position 3455 of SEQ ID NO: 1243727
guguuuauuaugcaaaugu

SEQ ID NO: 1436945 - RNA, 19 nt, Artificial Sequence
  Description of Artificial Sequence: Synthetic oligonucleotide
  Antisense strand to SEQ ID NO: 1436944
acauuugcauaauaaacac

SEQ ID NO: 1436946 - RNA, 19 nt, Artificial Sequence
  Description of Artificial Sequence: Synthetic oligonucleotide
  Sense strand starting at position 3464 of SEQ ID NO: 1243727
augcaaaugucacuguaug

SEQ ID NO: 1436947 - RNA, 19 nt, Artificial Sequence
  Description of Artificial Sequence: Synthetic oligonucleotide
  Antisense strand to SEQ ID NO: 1436946
cauacagugacauuugcau

SEQ ID NO: 1436948 - RNA, 19 nt, Artificial Sequence
  Description of Artificial Sequence: Synthetic oligonucleotide
  Sense strand starting at position 3489 of SEQ ID NO: 1243727
cucuucuauguguaagaca

SEQ ID NO: 1436949 - RNA, 19 nt, Artificial Sequence
  Description of Artificial Sequence: Synthetic oligonucleotide
  Antisense strand to SEQ ID NO: 1436948
ugucuuacacauagaagag

SEQ ID NO: 1436950 - RNA, 19 nt, Artificial Sequence
  Description of Artificial Sequence: Synthetic oligonucleotide
  Sense strand starting at position 3532 of SEQ ID NO: 1243727
guguguacuacugaauaug

SEQ ID NO: 1436951 - RNA, 19 nt, Artificial Sequence
  Description of Artificial Sequence: Synthetic oligonucleotide
  Antisense strand to SEQ ID NO: 1436950
cauauucaguaguacacac

SEQ ID NO: 1436952 - RNA, 19 nt, Artificial Sequence
  Description of Artificial Sequence: Synthetic oligonucleotide
  Sense strand starting at position 3535 of SEQ ID NO: 1243727
uguacuacugaauauguau

SEQ ID NO: 1436953 - RNA, 19 nt, Artificial Sequence
  Description of Artificial Sequence: Synthetic oligonucleotide
  Antisense strand to SEQ ID NO: 1436952
auacauauucaguaguaca

SEQ ID NO: 1436954 - RNA, 19 nt, Artificial Sequence
  Description of Artificial Sequence: Synthetic oligonucleotide
  Sense strand starting at position 3582 of SEQ ID NO: 1243727
gugucaugccagucauguc

SEQ ID NO: 1436955 - RNA, 19 nt, Artificial Sequence
  Description of Artificial Sequence: Synthetic oligonucleotide
  Antisense strand to SEQ ID NO: 1436954
gacaugacuggcaugacac

SEQ ID NO: 1436956 - RNA, 19 nt, Artificial Sequence
  Description of Artificial Sequence: Synthetic oligonucleotide
  Sense strand starting at position 3583 of SEQ ID NO: 1243727
ugucaugccagucauguca

SEQ ID NO: 1436957 - RNA, 19 nt, Artificial Sequence
  Description of Artificial Sequence: Synthetic oligonucleotide
  Antisense strand to SEQ ID NO: 1436956
ugacaugacuggcaugaca

SEQ ID NO: 1436958 - RNA, 19 nt, Artificial Sequence
  Description of Artificial Sequence: Synthetic oligonucleotide
  Sense strand starting at position 3617 of SEQ ID NO: 1243727
guguuacuggcacacugaa

SEQ ID NO: 1436959 - RNA, 19 nt, Artificial Sequence
  Description of Artificial Sequence: Synthetic oligonucleotide
  Antisense strand to SEQ ID NO: 1436958
uucagugugccaguaacac

SEQ ID NO: 1436960 - RNA, 19 nt, Artificial Sequence
  Description of Artificial Sequence: Synthetic oligonucleotide
  Sense strand starting at position 3689 of SEQ ID NO: 1243727
gugucugugcccuugucua

SEQ ID NO: 1436961 - RNA, 19 nt, Artificial Sequence
  Description of Artificial Sequence: Synthetic oligonucleotide
  Antisense strand to SEQ ID NO: 1436960
uagacaagggcacagacac

SEQ ID NO: 1436962 - RNA, 19 nt, Artificial Sequence
  Description of Artificial Sequence: Synthetic oligonucleotide
  Sense strand starting at position 3854 of SEQ ID NO: 1243727
gugagaggaugccuuacau

SEQ ID NO: 1436963 - RNA, 19 nt, Artificial Sequence
  Description of Artificial Sequence: Synthetic oligonucleotide
  Antisense strand to SEQ ID NO: 1436962
auguaaggcauccucucac

SEQ ID NO: 1436964 - RNA, 19 nt, Artificial Sequence
  Description of Artificial Sequence: Synthetic oligonucleotide
  Sense strand starting at position 3973 of SEQ ID NO: 1243727
guaucuucuggaggagcga

SEQ ID NO: 1436965 - RNA, 19 nt, Artificial Sequence
  Description of Artificial Sequence: Synthetic oligonucleotide
  Antisense strand to SEQ ID NO: 1436964
ucgcuccuccagaagauac

SEQ ID NO: 1436966 - RNA, 19 nt, Artificial Sequence
  Description of Artificial Sequence: Synthetic oligonucleotide
  Sense strand starting at position 140 of SEQ ID NO: 1243728
uguucuucugccuagaaug

SEQ ID NO: 1436967 - RNA, 19 nt, Artificial Sequence
  Description of Artificial Sequence: Synthetic oligonucleotide
  Antisense strand to SEQ ID NO: 1436966
cauucuaggcagaagaaca

SEQ ID NO: 1436968 - RNA, 19 nt, Artificial Sequence
  Description of Artificial Sequence: Synthetic oligonucleotide
  Sense strand starting at position 154 of SEQ ID NO: 1243728
gaaugcaccuguuccagau

SEQ ID NO: 1436969 - RNA, 19 nt, Artificial Sequence
  Description of Artificial Sequence: Synthetic oligonucleotide
  Antisense strand to SEQ ID NO: 1436968
aucuggaacaggugcauuc

SEQ ID NO: 1436970 - RNA, 19 nt, Artificial Sequence
  Description of Artificial Sequence: Synthetic oligonucleotide
  Sense strand starting at position 158 of SEQ ID NO: 1243728
gcaccuguuccagaucacu

SEQ ID NO: 1436971 - RNA, 19 nt, Artificial Sequence
  Description of Artificial Sequence: Synthetic oligonucleotide
  Antisense strand to SEQ ID NO: 1436970
agugaucuggaacaggugc

SEQ ID NO: 1436972 - RNA, 19 nt, Artificial Sequence
  Description of Artificial Sequence: Synthetic oligonucleotide
  Sense strand starting at position 356 of SEQ ID NO: 1243728
gaguguaagcuccacuaga

SEQ ID NO: 1436973 - RNA, 19 nt, Artificial Sequence
  Description of Artificial Sequence: Synthetic oligonucleotide
  Antisense strand to SEQ ID NO: 1436972
ucuaguggagcuuacacuc

SEQ ID NO: 1436974 - RNA, 19 nt, Artificial Sequence
  Description of Artificial Sequence: Synthetic oligonucleotide
  Sense strand starting at position 2195 of SEQ ID NO: 1243728
uggugucuucguuuguuau

SEQ ID NO: 1436975 - RNA, 19 nt, Artificial Sequence
  Description of Artificial Sequence: Synthetic oligonucleotide
  Antisense strand to SEQ ID NO: 1436974
auaacaaacgaagacacca

SEQ ID NO: 1436976 - RNA, 19 nt, Artificial Sequence
  Description of Artificial Sequence: Synthetic oligonucleotide
  Sense strand starting at position 2244 of SEQ ID NO: 1243728
guagcucucugaucuugga

SEQ ID NO: 1436977 - RNA, 19 nt, Artificial Sequence
  Description of Artificial Sequence: Synthetic oligonucleotide
  Antisense strand to SEQ ID NO: 1436976
uccaagaucagagagcuac

SEQ ID NO: 1436978 - RNA, 19 nt, Artificial Sequence
  Description of Artificial Sequence: Synthetic oligonucleotide
  Sense strand starting at position 2260 of SEQ ID NO: 1243728
ggagucuucgcagauggaa

SEQ ID NO: 1436979 - RNA, 19 nt, Artificial Sequence
  Description of Artificial Sequence: Synthetic oligonucleotide
  Antisense strand to SEQ ID NO: 1436978
uuccaucugcgaagacucc

SEQ ID NO: 1436980 - RNA, 19 nt, Artificial Sequence
  Description of Artificial Sequence: Synthetic oligonucleotide
  Sense strand starting at position 2324 of SEQ ID NO: 1243728
uacucuuggcaggguuaau

SEQ ID NO: 1436981 - RNA, 19 nt, Artificial Sequence
  Description of Artificial Sequence: Synthetic oligonucleotide
  Antisense strand to SEQ ID NO: 1436980
auuaacccugccaagagua

SEQ ID NO: 1436982 - RNA, 19 nt, Artificial Sequence
  Description of Artificial Sequence: Synthetic oligonucleotide
  Sense strand starting at position 2335 of SEQ ID NO: 1243728
ggguuaauauuuggacaga

SEQ ID NO: 1436983 - RNA, 19 nt, Artificial Sequence
  Description of Artificial Sequence: Synthetic oligonucleotide
  Antisense strand to SEQ ID NO: 1436982
ucuguccaaauauuaaccc

SEQ ID NO: 1436984 - RNA, 19 nt, Artificial Sequence
  Description of Artificial Sequence: Synthetic oligonucleotide
  Sense strand starting at position 2336 of SEQ ID NO: 1243728
gguuaauauuuggacagag

SEQ ID NO: 1436985 - RNA, 19 nt, Artificial Sequence
  Description of Artificial Sequence: Synthetic oligonucleotide
  Antisense strand to SEQ ID NO: 1436984
cucuguccaaauauuaacc

SEQ ID NO: 1436986 - RNA, 19 nt, Artificial Sequence
  Description of Artificial Sequence: Synthetic oligonucleotide
  Sense strand starting at position 2364 of SEQ ID NO: 1243728
ggcucuuguagcgucuaga

SEQ ID NO: 1436987 - RNA, 19 nt, Artificial Sequence
  Description of Artificial Sequence: Synthetic oligonucleotide
  Antisense strand to SEQ ID NO: 1436986
ucuagacgcuacaagagcc

SEQ ID NO: 1436988 - RNA, 19 nt, Artificial Sequence
  Description of Artificial Sequence: Synthetic oligonucleotide
  Sense strand starting at position 2365 of SEQ ID NO: 1243728
gcucuuguagcgucuagaa

SEQ ID NO: 1436989 - RNA, 19 nt, Artificial Sequence
  Description of Artificial Sequence: Synthetic oligonucleotide
  Antisense strand to SEQ ID NO: 1436988
uucuagacgcuacaagagc

SEQ ID NO: 1436990 - RNA, 19 nt, Artificial Sequence
  Description of Artificial Sequence: Synthetic oligonucleotide
  Sense strand starting at position 2367 of SEQ ID NO: 1243728
ucuuguagcgucuagaaag

SEQ ID NO: 1436991 - RNA, 19 nt, Artificial Sequence
  Description of Artificial Sequence: Synthetic oligonucleotide
  Antisense strand to SEQ ID NO: 1436990
cuuucuagacgcuacaaga

SEQ ID NO: 1436992 - RNA, 19 nt, Artificial Sequence
  Description of Artificial Sequence: Synthetic oligonucleotide
  Sense strand starting at position 2486 of SEQ ID NO: 1243728
agaggacuuguguguuaaa

SEQ ID NO: 1436993 - RNA, 19 nt, Artificial Sequence
  Description of Artificial Sequence: Synthetic oligonucleotide
  Antisense strand to SEQ ID NO: 1436992
uuuaacacacaaguccucu

SEQ ID NO: 1436994 - RNA, 19 nt, Artificial Sequence
  Description of Artificial Sequence: Synthetic oligonucleotide
  Sense strand starting at position 2487 of SEQ ID NO: 1243728
gaggacuuguguguuaaac

SEQ ID NO: 1436995 - RNA, 19 nt, Artificial Sequence
  Description of Artificial Sequence: Synthetic oligonucleotide
  Antisense strand to SEQ ID NO: 1436994
guuuaacacacaaguccuc

SEQ ID NO: 1436996 - RNA, 19 nt, Artificial Sequence
  Description of Artificial Sequence: Synthetic oligonucleotide
  Sense strand starting at position 2534 of SEQ ID NO: 1243728
cucacaugagcuugccuaa

SEQ ID NO: 1436997 - RNA, 19 nt, Artificial Sequence
  Description of Artificial Sequence: Synthetic oligonucleotide
  Antisense strand to SEQ ID NO: 1436996
uuaggcaagcucaugugag

SEQ ID NO: 1436998 - RNA, 19 nt, Artificial Sequence
  Description of Artificial Sequence: Synthetic oligonucleotide
  Sense strand starting at position 2544 of SEQ ID NO: 1243728
cuugccuaaguuugaaaua

SEQ ID NO: 1436999 - RNA, 19 nt, Artificial Sequence
  Description of Artificial Sequence: Synthetic oligonucleotide
  Antisense strand to SEQ ID NO: 1436998
uauuucaaacuuaggcaag

SEQ ID NO: 1437000 - RNA, 19 nt, Artificial Sequence
  Description of Artificial Sequence: Synthetic oligonucleotide
  Sense strand starting at position 2558 of SEQ ID NO: 1243728
aaauaucgucgccagacuu

SEQ ID NO: 1437001 - RNA, 19 nt, Artificial Sequence
  Description of Artificial Sequence: Synthetic oligonucleotide
  Antisense strand to SEQ ID NO: 1437000
aagucuggcgacgauauuu

SEQ ID NO: 1437002 - RNA, 19 nt, Artificial Sequence
  Description of Artificial Sequence: Synthetic oligonucleotide
  Sense strand starting at position 2568 of SEQ ID NO: 1243728
gccagacuuguguaucauu

SEQ ID NO: 1437003 - RNA, 19 nt, Artificial Sequence
  Description of Artificial Sequence: Synthetic oligonucleotide
  Antisense strand to SEQ ID NO: 1437002
aaugauacacaagucuggc

SEQ ID NO: 1437004 - RNA, 19 nt, Artificial Sequence
  Description of Artificial Sequence: Synthetic oligonucleotide
  Sense strand starting at position 2928 of SEQ ID NO: 1243728
gcguuugcgaaacuuaauc

SEQ ID NO: 1437005 - RNA, 19 nt, Artificial Sequence
  Description of Artificial Sequence: Synthetic oligonucleotide
  Antisense strand to SEQ ID NO: 1437004
gauuaaguuucgcaaacgc

SEQ ID NO: 1437006 - RNA, 19 nt, Artificial Sequence
  Description of Artificial Sequence: Synthetic oligonucleotide
  Sense strand starting at position 2960 of SEQ ID NO: 1243728
guuacaacgcauuauuaaa

SEQ ID NO: 1437007 - RNA, 19 nt, Artificial Sequence
  Description of Artificial Sequence: Synthetic oligonucleotide
  Antisense strand to SEQ ID NO: 1437006
uuuaauaaugcguuguaac

SEQ ID NO: 1437008 - RNA, 19 nt, Artificial Sequence
  Description of Artificial Sequence: Synthetic oligonucleotide
  Sense strand starting at position 3005 of SEQ ID NO: 1243728
cuaccuuagugaucacugu

SEQ ID NO: 1437009 - RNA, 19 nt, Artificial Sequence
  Description of Artificial Sequence: Synthetic oligonucleotide
  Antisense strand to SEQ ID NO: 1437008
acagugaucacuaagguag

SEQ ID NO: 1437010 - RNA, 19 nt, Artificial Sequence
  Description of Artificial Sequence: Synthetic oligonucleotide
  Sense strand starting at position 3009 of SEQ ID NO: 1243728
cuuagugaucacuguuaaa

SEQ ID NO: 1437011 - RNA, 19 nt, Artificial Sequence
  Description of Artificial Sequence: Synthetic oligonucleotide
  Antisense strand to SEQ ID NO: 1437010
uuuaacagugaucacuaag

SEQ ID NO: 1437012 - RNA, 19 nt, Artificial Sequence
  Description of Artificial Sequence: Synthetic oligonucleotide
  Sense strand starting at position 3149 of SEQ ID NO: 1243728
uucuuagauuucgaaggaa

SEQ ID NO: 1437013 - RNA, 19 nt, Artificial Sequence
  Description of Artificial Sequence: Synthetic oligonucleotide
  Antisense strand to SEQ ID NO: 1437012
uuccuucgaaaucuaagaa

SEQ ID NO: 1437014 - RNA, 19 nt, Artificial Sequence
  Description of Artificial Sequence: Synthetic oligonucleotide
  Sense strand starting at position 3167 of SEQ ID NO: 1243728
agguuuaucuccucccacu

SEQ ID NO: 1437015 - RNA, 19 nt, Artificial Sequence
  Description of Artificial Sequence: Synthetic oligonucleotide
  Antisense strand to SEQ ID NO: 1437014
agugggaggagauaaaccu

SEQ ID NO: 1437016 - RNA, 19 nt, Artificial Sequence
  Description of Artificial Sequence: Synthetic oligonucleotide
  Sense strand starting at position 3204 of SEQ ID NO: 1243728
ucucaacauuagucagguu

SEQ ID NO: 1437017 - RNA, 19 nt, Artificial Sequence
  Description of Artificial Sequence: Synthetic oligonucleotide
  Antisense strand to SEQ ID NO: 1437016
aaccugacuaauguugaga

SEQ ID NO: 1437018 - RNA, 19 nt, Artificial Sequence
  Description of Artificial Sequence: Synthetic oligonucleotide
  Sense strand starting at position 3303 of SEQ ID NO: 1243728
cuagaugaugcuggaaauc

SEQ ID NO: 1437019 - RNA, 19 nt, Artificial Sequence
  Description of Artificial Sequence: Synthetic oligonucleotide
  Antisense strand to SEQ ID NO: 1437018
gauuuccagcaucaucuag

SEQ ID NO: 1437020 - RNA, 19 nt, Artificial Sequence
  Description of Artificial Sequence: Synthetic oligonucleotide
  Sense strand starting at position 3341 of SEQ ID NO: 1243728
guuggaauuugugcaaugu

SEQ ID NO: 1437021 - RNA, 19 nt, Artificial Sequence
  Description of Artificial Sequence: Synthetic oligonucleotide
  Antisense strand to SEQ ID NO: 1437020
acauugcacaaauuccaac

SEQ ID NO: 1437022 - RNA, 19 nt, Artificial Sequence
  Description of Artificial Sequence: Synthetic oligonucleotide
  Sense strand starting at position 3377 of SEQ ID NO: 1243728
ccuuaauuguaaguuguua

SEQ ID NO: 1437023 - RNA, 19 nt, Artificial Sequence
  Description of Artificial Sequence: Synthetic oligonucleotide
  Antisense strand to SEQ ID NO: 1437022
uaacaacuuacaauuaagg

SEQ ID NO: 1437024 - RNA, 19 nt, Artificial Sequence
  Description of Artificial Sequence: Synthetic oligonucleotide
  Sense strand starting at position 3381 of SEQ ID NO: 1243728
aauuguaaguuguuaagca

SEQ ID NO: 1437025 - RNA, 19 nt, Artificial Sequence
  Description of Artificial Sequence: Synthetic oligonucleotide
  Antisense strand to SEQ ID NO: 1437024
ugcuuaacaacuuacaauu

SEQ ID NO: 1437026 - RNA, 19 nt, Artificial Sequence
  Description of Artificial Sequence: Synthetic oligonucleotide
  Sense strand starting at position 3402 of SEQ ID NO: 1243728
ucauuaaauugaguagcua

SEQ ID NO: 1437027 - RNA, 19 nt, Artificial Sequence
  Description of Artificial Sequence: Synthetic oligonucleotide
  Antisense strand to SEQ ID NO: 1437026
uagcuacucaauuuaauga

SEQ ID NO: 1437028 - RNA, 19 nt, Artificial Sequence
  Description of Artificial Sequence: Synthetic oligonucleotide
  Sense strand starting at position 3420 of SEQ ID NO: 1243728
auuaaugauuucugacaga

SEQ ID NO: 1437029 - RNA, 19 nt, Artificial Sequence
  Description of Artificial Sequence: Synthetic oligonucleotide
  Antisense strand to SEQ ID NO: 1437028
ucugucagaaaucauuaau

SEQ ID NO: 1437030 - RNA, 19 nt, Artificial Sequence
  Description of Artificial Sequence: Synthetic oligonucleotide
  Sense strand starting at position 3475 of SEQ ID NO: 1243728
uucucaguugaaugacauu

SEQ ID NO: 1437031 - RNA, 19 nt, Artificial Sequence
  Description of Artificial Sequence: Synthetic oligonucleotide
  Antisense strand to SEQ ID NO: 1437030
aaugucauucaacugagaa

SEQ ID NO: 1437032 - RNA, 19 nt, Artificial Sequence
  Description of Artificial Sequence: Synthetic oligonucleotide
  Sense strand starting at position 3612 of SEQ ID NO: 1243728
aguuuaaggauugguuuga

SEQ ID NO: 1437033 - RNA, 19 nt, Artificial Sequence
  Description of Artificial Sequence: Synthetic oligonucleotide
  Antisense strand to SEQ ID NO: 1437032
ucaaaccaauccuuaaacu

SEQ ID NO: 1437034 - RNA, 19 nt, Artificial Sequence
  Description of Artificial Sequence: Synthetic oligonucleotide
  Sense strand starting at position 3616 of SEQ ID NO: 1243728
uaaggauugguuugaccua

SEQ ID NO: 1437035 - RNA, 19 nt, Artificial Sequence
  Description of Artificial Sequence: Synthetic oligonucleotide
  Antisense strand to SEQ ID NO: 1437034
uaggucaaaccaauccuua

SEQ ID NO: 1437036 - RNA, 19 nt, Artificial Sequence
  Description of Artificial Sequence: Synthetic oligonucleotide
  Sense strand starting at position 3658 of SEQ ID NO: 1243728
ucaguucuugcccaaagag

SEQ ID NO: 1437037 - RNA, 19 nt, Artificial Sequence
  Description of Artificial Sequence: Synthetic oligonucleotide
  Antisense strand to SEQ ID NO: 1437036
cucuuugggcaagaacuga

SEQ ID NO: 1437038 - RNA, 19 nt, Artificial Sequence
  Description of Artificial Sequence: Synthetic oligonucleotide
  Sense strand starting at position 3714 of SEQ ID NO: 1243728
auacuugcuuuacuggaaa

SEQ ID NO: 1437039 - RNA, 19 nt, Artificial Sequence
  Description of Artificial Sequence: Synthetic oligonucleotide
  Antisense strand to SEQ ID NO: 1437038
uuuccaguaaagcaaguau

SEQ ID NO: 1437040 - RNA, 19 nt, Artificial Sequence
  Description of Artificial Sequence: Synthetic oligonucleotide
  Sense strand starting at position 3903 of SEQ ID NO: 1243728
cuuguaacacugcaguaau

SEQ ID NO: 1437041 - RNA, 19 nt, Artificial Sequence
  Description of Artificial Sequence: Synthetic oligonucleotide
  Antisense strand to SEQ ID NO: 1437040
auuacugcaguguuacaag

SEQ ID NO: 1437042 - RNA, 19 nt, Artificial Sequence
  Description of Artificial Sequence: Synthetic oligonucleotide
  Sense strand starting at position 3906 of SEQ ID NO: 1243728
guaacacugcaguaaucua

SEQ ID NO: 1437043 - RNA, 19 nt, Artificial Sequence
  Description of Artificial Sequence: Synthetic oligonucleotide
  Antisense strand to SEQ ID NO: 1437042
uagauuacugcaguguuac

SEQ ID NO: 1437044 - RNA, 19 nt, Artificial Sequence
  Description of Artificial Sequence: Synthetic oligonucleotide
  Sense strand starting at position 3917 of SEQ ID NO: 1243728
guaaucuacucccugguua

SEQ ID NO: 1437045 - RNA, 19 nt, Artificial Sequence
  Description of Artificial Sequence: Synthetic oligonucleotide
  Antisense strand to SEQ ID NO: 1437044
uaaccagggaguagauuac

SEQ ID NO: 1437046 - RNA, 19 nt, Artificial Sequence
  Description of Artificial Sequence: Synthetic oligonucleotide
  Sense strand starting at position 8 of SEQ ID NO: 1243729
ggcugaaacuguguucucu

SEQ ID NO: 1437047 - RNA, 19 nt, Artificial Sequence
  Description of Artificial Sequence: Synthetic oligonucleotide
  Antisense strand to SEQ ID NO: 1437046
agagaacacaguuucagcc

SEQ ID NO: 1437048 - RNA, 19 nt, Artificial Sequence
  Description of Artificial Sequence: Synthetic oligonucleotide
  Sense strand starting at position 10 of SEQ ID NO: 1243729
cugaaacuguguucucuaa

SEQ ID NO: 1437049 - RNA, 19 nt, Artificial Sequence
  Description of Artificial Sequence: Synthetic oligonucleotide
  Antisense strand to SEQ ID NO: 1437048
uuagagaacacaguuucag

SEQ ID NO: 1437050 - RNA, 19 nt, Artificial Sequence
  Description of Artificial Sequence: Synthetic oligonucleotide
  Sense strand starting at position 12 of SEQ ID NO: 1243729
gaaacuguguucucuaaag

SEQ ID NO: 1437051 - RNA, 19 nt, Artificial Sequence
  Description of Artificial Sequence: Synthetic oligonucleotide
  Antisense strand to SEQ ID NO: 1437050
cuuuagagaacacaguuuc

SEQ ID NO: 1437052 - RNA, 19 nt, Artificial Sequence
  Description of Artificial Sequence: Synthetic oligonucleotide
  Sense strand starting at position 157 of SEQ ID NO: 1243729
ucuagaaaguuaguuccau

SEQ ID NO: 1437053 - RNA, 19 nt, Artificial Sequence
  Description of Artificial Sequence: Synthetic oligonucleotide
  Antisense strand to SEQ ID NO: 1437052
auggaacuaacuuucuaga

SEQ ID NO: 1437054 - RNA, 19 nt, Artificial Sequence
  Description of Artificial Sequence: Synthetic oligonucleotide
  Sense strand starting at position 158 of SEQ ID NO: 1243729
cuagaaaguuaguuccaug

SEQ ID NO: 1437055 - RNA, 19 nt, Artificial Sequence
  Description of Artificial Sequence: Synthetic oligonucleotide
  Antisense strand to SEQ ID NO: 1437054
cauggaacuaacuuucuag

SEQ ID NO: 1437056 - RNA, 19 nt, Artificial Sequence
  Description of Artificial Sequence: Synthetic oligonucleotide
  Sense strand starting at position 163 of SEQ ID NO: 1243729
aaguuaguuccaugaggac

SEQ ID NO: 1437057 - RNA, 19 nt, Artificial Sequence
  Description of Artificial Sequence: Synthetic oligonucleotide
  Antisense strand to SEQ ID NO: 1437056
guccucauggaacuaacuu

SEQ ID NO: 1437058 - RNA, 19 nt, Artificial Sequence
  Description of Artificial Sequence: Synthetic oligonucleotide
  Sense strand starting at position 221 of SEQ ID NO: 1243729
gccugugauguuggagaua

SEQ ID NO: 1437059 - RNA, 19 nt, Artificial Sequence
  Description of Artificial Sequence: Synthetic oligonucleotide
  Antisense strand to SEQ ID NO: 1437058
uaucuccaacaucacaggc

SEQ ID NO: 1437060 - RNA, 19 nt, Artificial Sequence
  Description of Artificial Sequence: Synthetic oligonucleotide
  Sense strand starting at position 230 of SEQ ID NO: 1243729
guuggagauaugcaccaua

SEQ ID NO: 1437061 - RNA, 19 nt, Artificial Sequence
  Description of Artificial Sequence: Synthetic oligonucleotide
  Antisense strand to SEQ ID NO: 1437060
uauggugcauaucuccaac

SEQ ID NO: 1437062 - RNA, 19 nt, Artificial Sequence
  Description of Artificial Sequence: Synthetic oligonucleotide
  Sense strand starting at position 303 of SEQ ID NO: 1243729
aaaggaaggucacauaaga

SEQ ID NO: 1437063 - RNA, 19 nt, Artificial Sequence
  Description of Artificial Sequence: Synthetic oligonucleotide
  Antisense strand to SEQ ID NO: 1437062
ucuuaugugaccuuccuuu

SEQ ID NO: 1437064 - RNA, 19 nt, Artificial Sequence
  Description of Artificial Sequence: Synthetic oligonucleotide
  Sense strand starting at position 352 of SEQ ID NO: 1243729
agagaagaauucuaugucu

SEQ ID NO: 1437065 - RNA, 19 nt, Artificial Sequence
  Description of Artificial Sequence: Synthetic oligonucleotide
  Antisense strand to SEQ ID NO: 1437064
agacauagaauucuucucu

SEQ ID NO: 1437066 - RNA, 19 nt, Artificial Sequence
  Description of Artificial Sequence: Synthetic oligonucleotide
  Sense strand starting at position 354 of SEQ ID NO: 1243729
agaagaauucuaugucuga

SEQ ID NO: 1437067 - RNA, 19 nt, Artificial Sequence
  Description of Artificial Sequence: Synthetic oligonucleotide
  Antisense strand to SEQ ID NO: 1437066
ucagacauagaauucuucu

SEQ ID NO: 1437068 - RNA, 19 nt, Artificial Sequence
  Description of Artificial Sequence: Synthetic oligonucleotide
  Sense strand starting at position 355 of SEQ ID NO: 1243729
gaagaauucuaugucugag

SEQ ID NO: 1437069 - RNA, 19 nt, Artificial Sequence
  Description of Artificial Sequence: Synthetic oligonucleotide
  Antisense strand to SEQ ID NO: 1437068
cucagacauagaauucuuc

SEQ ID NO: 1437070 - RNA, 19 nt, Artificial Sequence
  Description of Artificial Sequence: Synthetic oligonucleotide
  Sense strand starting at position 389 of SEQ ID NO: 1243729
accagaacacugugcuauu

SEQ ID NO: 1437071 - RNA, 19 nt, Artificial Sequence
  Description of Artificial Sequence: Synthetic oligonucleotide
  Antisense strand to SEQ ID NO: 1437070
aauagcacaguguucuggu

SEQ ID NO: 1437072 - RNA, 19 nt, Artificial Sequence
  Description of Artificial Sequence: Synthetic oligonucleotide
  Sense strand starting at position 398 of SEQ ID NO: 1243729
cugugcuauuuccacagau

SEQ ID NO: 1437073 - RNA, 19 nt, Artificial Sequence
  Description of Artificial Sequence: Synthetic oligonucleotide
  Antisense strand to SEQ ID NO: 1437072
aucuguggaaauagcacag

SEQ ID NO: 1437074 - RNA, 19 nt, Artificial Sequence
  Description of Artificial Sequence: Synthetic oligonucleotide
  Sense strand starting at position 411 of SEQ ID NO: 1243729
acagauggcugggagagau

SEQ ID NO: 1437075 - RNA, 19 nt, Artificial Sequence
  Description of Artificial Sequence: Synthetic oligonucleotide
  Antisense strand to SEQ ID NO: 1437074
aucucucccagccaucugu

SEQ ID NO: 1437076 - RNA, 19 nt, Artificial Sequence
  Description of Artificial Sequence: Synthetic oligonucleotide
  Sense strand starting at position 465 of SEQ ID NO: 1243729
gggaacauuugaggagaaa

SEQ ID NO: 1437077 - RNA, 19 nt, Artificial Sequence
  Description of Artificial Sequence: Synthetic oligonucleotide
  Antisense strand to SEQ ID NO: 1437076
uuucuccucaaauguuccc

SEQ ID NO: 1437078 - RNA, 19 nt, Artificial Sequence
  Description of Artificial Sequence: Synthetic oligonucleotide
  Sense strand starting at position 691 of SEQ ID NO: 1243729
gccugauugcuagcuugcu

SEQ ID NO: 1437079 - RNA, 19 nt, Artificial Sequence
  Description of Artificial Sequence: Synthetic oligonucleotide
  Antisense strand to SEQ ID NO: 1437078
agcaagcuagcaaucaggc

SEQ ID NO: 1437080 - RNA, 19 nt, Artificial Sequence
  Description of Artificial Sequence: Synthetic oligonucleotide
  Sense strand starting at position 724 of SEQ ID NO: 1243729
ugaauaagcccuuggguga

SEQ ID NO: 1437081 - RNA, 19 nt, Artificial Sequence
  Description of Artificial Sequence: Synthetic oligonucleotide
  Antisense strand to SEQ ID NO: 1437080
ucacccaagggcuuauuca

SEQ ID NO: 1437082 - RNA, 19 nt, Artificial Sequence
  Description of Artificial Sequence: Synthetic oligonucleotide
  Sense strand starting at position 737 of SEQ ID NO: 1243729
gggugacauuaauugccau

SEQ ID NO: 1437083 - RNA, 19 nt, Artificial Sequence
  Description of Artificial Sequence: Synthetic oligonucleotide
  Antisense strand to SEQ ID NO: 1437082
auggcaauuaaugucaccc

SEQ ID NO: 1437084 - RNA, 19 nt, Artificial Sequence
  Description of Artificial Sequence: Synthetic oligonucleotide
  Sense strand starting at position 744 of SEQ ID NO: 1243729
auuaauugccaucaggcau

SEQ ID NO: 1437085 - RNA, 19 nt, Artificial Sequence
  Description of Artificial Sequence: Synthetic oligonucleotide
  Antisense strand to SEQ ID NO: 1437084
augccugauggcaauuaau

SEQ ID NO: 1437086 - RNA, 19 nt, Artificial Sequence
  Description of Artificial Sequence: Synthetic oligonucleotide
  Sense strand starting at position 776 of SEQ ID NO: 1243729
agaauaaucuucuuugacg

SEQ ID NO: 1437087 - RNA, 19 nt, Artificial Sequence
  Description of Artificial Sequence: Synthetic oligonucleotide
  Antisense strand to SEQ ID NO: 1437086
cgucaaagaagauuauucu

SEQ ID NO: 1437088 - RNA, 19 nt, Artificial Sequence
  Description of Artificial Sequence: Synthetic oligonucleotide
  Sense strand starting at position 1005 of SEQ ID NO: 1243729
gucaccguccuagaugaaa

SEQ ID NO: 1437089 - RNA, 19 nt, Artificial Sequence
  Description of Artificial Sequence: Synthetic oligonucleotide
  Antisense strand to SEQ ID NO: 1437088
uuucaucuaggacggugac

SEQ ID NO: 1437090 - RNA, 19 nt, Artificial Sequence
  Description of Artificial Sequence: Synthetic oligonucleotide
  Sense strand starting at position 1179 of SEQ ID NO: 1243729
ccaguagggauauguccau

SEQ ID NO: 1437091 - RNA, 19 nt, Artificial Sequence
  Description of Artificial Sequence: Synthetic oligonucleotide
  Antisense strand to SEQ ID NO: 1437090
auggacauaucccuacugg

SEQ ID NO: 1437092 - RNA, 19 nt, Artificial Sequence
  Description of Artificial Sequence: Synthetic oligonucleotide
  Sense strand starting at position 1185 of SEQ ID NO: 1243729
gggauauguccaugggauu

SEQ ID NO: 1437093 - RNA, 19 nt, Artificial Sequence
  Description of Artificial Sequence: Synthetic oligonucleotide
  Antisense strand to SEQ ID NO: 1437092
aaucccauggacauauccc

SEQ ID NO: 1437094 - RNA, 19 nt, Artificial Sequence
  Description of Artificial Sequence: Synthetic oligonucleotide
  Sense strand starting at position 1186 of SEQ ID NO: 1243729
ggauauguccaugggauug

SEQ ID NO: 1437095 - RNA, 19 nt, Artificial Sequence
  Description of Artificial Sequence: Synthetic oligonucleotide
  Antisense strand to SEQ ID NO: 1437094
caaucccauggacauaucc

SEQ ID NO: 1437096 - RNA, 19 nt, Artificial Sequence
  Description of Artificial Sequence: Synthetic oligonucleotide
  Sense strand starting at position 1257 of SEQ ID NO: 1243729
uggaguugauacccaacga

SEQ ID NO: 1437097 - RNA, 19 nt, Artificial Sequence
  Description of Artificial Sequence: Synthetic oligonucleotide
  Antisense strand to SEQ ID NO: 1437096
ucguuggguaucaacucca

SEQ ID NO: 1437098 - RNA, 19 nt, Artificial Sequence
  Description of Artificial Sequence: Synthetic oligonucleotide
  Sense strand starting at position 1342 of SEQ ID NO: 1243729
gggucugaucuagguugca

SEQ ID NO: 1437099 - RNA, 19 nt, Artificial Sequence
  Description of Artificial Sequence: Synthetic oligonucleotide
  Antisense strand to SEQ ID NO: 1437098
ugcaaccuagaucagaccc

SEQ ID NO: 1437100 - RNA, 19 nt, Artificial Sequence
  Description of Artificial Sequence: Synthetic oligonucleotide
  Sense strand starting at position 1352 of SEQ ID NO: 1243729
uagguugcacucuaaugga

SEQ ID NO: 1437101 - RNA, 19 nt, Artificial Sequence
  Description of Artificial Sequence: Synthetic oligonucleotide
  Antisense strand to SEQ ID NO: 1437100
uccauuagagugcaaccua

SEQ ID NO: 1437102 - RNA, 19 nt, Artificial Sequence
  Description of Artificial Sequence: Synthetic oligonucleotide
  Sense strand starting at position 1479 of SEQ ID NO: 1243729
ucuuuaaaggcuugcuaaa

SEQ ID NO: 1437103 - RNA, 19 nt, Artificial Sequence
  Description of Artificial Sequence: Synthetic oligonucleotide
  Antisense strand to SEQ ID NO: 1437102
uuuagcaagccuuuaaaga

SEQ ID NO: 1437104 - RNA, 19 nt, Artificial Sequence
  Description of Artificial Sequence: Synthetic oligonucleotide
  Sense strand starting at position 1481 of SEQ ID NO: 1243729
uuuaaaggcuugcuaaaca

SEQ ID NO: 1437105 - RNA, 19 nt, Artificial Sequence
  Description of Artificial Sequence: Synthetic oligonucleotide
  Antisense strand to SEQ ID NO: 1437104
uguuuagcaagccuuuaaa

SEQ ID NO: 1437106 - RNA, 19 nt, Artificial Sequence
  Description of Artificial Sequence: Synthetic oligonucleotide
  Sense strand starting at position 1758 of SEQ ID NO: 1243729
gagcgugcauccuuugaaa

SEQ ID NO: 1437107 - RNA, 19 nt, Artificial Sequence
  Description of Artificial Sequence: Synthetic oligonucleotide
  Antisense strand to SEQ ID NO: 1437106
uuucaaaggaugcacgcuc

SEQ ID NO: 1437108 - RNA, 19 nt, Artificial Sequence
  Description of Artificial Sequence: Synthetic oligonucleotide
  Sense strand starting at position 1797 of SEQ ID NO: 1243729
uggcgucuacccuggagaa

SEQ ID NO: 1437109 - RNA, 19 nt, Artificial Sequence
  Description of Artificial Sequence: Synthetic oligonucleotide
  Antisense strand to SEQ ID NO: 1437108
uucuccaggguagacgcca

SEQ ID NO: 1437110 - RNA, 19 nt, Artificial Sequence
  Description of Artificial Sequence: Synthetic oligonucleotide
  Sense strand starting at position 1798 of SEQ ID NO: 1243729
ggcgucuacccuggagaaa

SEQ ID NO: 1437111 - RNA, 19 nt, Artificial Sequence
  Description of Artificial Sequence: Synthetic oligonucleotide
  Antisense strand to SEQ ID NO: 1437110
uuucuccaggguagacgcc

SEQ ID NO: 1437112 - RNA, 19 nt, Artificial Sequence
  Description of Artificial Sequence: Synthetic oligonucleotide
  Sense strand starting at position 1949 of SEQ ID NO: 1243729
gcccgagucucauuaagga

SEQ ID NO: 1437113 - RNA, 19 nt, Artificial Sequence
  Description of Artificial Sequence: Synthetic oligonucleotide
  Antisense strand to SEQ ID NO: 1437112
uccuuaaugagacucgggc

SEQ ID NO: 1437114 - RNA, 19 nt, Artificial Sequence
  Description of Artificial Sequence: Synthetic oligonucleotide
  Sense strand starting at position 2774 of SEQ ID NO: 1243729
cagcguuuauggucaucaa

SEQ ID NO: 1437115 - RNA, 19 nt, Artificial Sequence
  Description of Artificial Sequence: Synthetic oligonucleotide
  Antisense strand to SEQ ID NO: 1437114
uugaugaccauaaacgcug

SEQ ID NO: 1437116 - RNA, 19 nt, Artificial Sequence
  Description of Artificial Sequence: Synthetic oligonucleotide
  Sense strand starting at position 2775 of SEQ ID NO: 1243729
agcguuuauggucaucaag

SEQ ID NO: 1437117 - RNA, 19 nt, Artificial Sequence
  Description of Artificial Sequence: Synthetic oligonucleotide
  Antisense strand to SEQ ID NO: 1437116
cuugaugaccauaaacgcu

SEQ ID NO: 1437118 - RNA, 19 nt, Artificial Sequence
  Description of Artificial Sequence: Synthetic oligonucleotide
  Sense strand starting at position 3126 of SEQ ID NO: 1243729
uuuccuucuccagauggau

SEQ ID NO: 1437119 - RNA, 19 nt, Artificial Sequence
  Description of Artificial Sequence: Synthetic oligonucleotide
  Antisense strand to SEQ ID NO: 1437118
auccaucuggagaaggaaa

SEQ ID NO: 1437120 - RNA, 19 nt, Artificial Sequence
  Description of Artificial Sequence: Synthetic oligonucleotide
  Sense strand starting at position 3129 of SEQ ID NO: 1243729
ccuucuccagauggauuaa

SEQ ID NO: 1437121 - RNA, 19 nt, Artificial Sequence
  Description of Artificial Sequence: Synthetic oligonucleotide
  Antisense strand to SEQ ID NO: 1437120
uuaauccaucuggagaagg

SEQ ID NO: 1437122 - RNA, 19 nt, Artificial Sequence
  Description of Artificial Sequence: Synthetic oligonucleotide
  Sense strand starting at position 3141 of SEQ ID NO: 1243729
ggauuaaaguugucuggau

SEQ ID NO: 1437123 - RNA, 19 nt, Artificial Sequence
  Description of Artificial Sequence: Synthetic oligonucleotide
  Antisense strand to SEQ ID NO: 1437122
auccagacaacuuuaaucc

SEQ ID NO: 1437124 - RNA, 19 nt, Artificial Sequence
  Description of Artificial Sequence: Synthetic oligonucleotide
  Sense strand starting at position 3142 of SEQ ID NO: 1243729
gauuaaaguugucuggauu

SEQ ID NO: 1437125 - RNA, 19 nt, Artificial Sequence
  Description of Artificial Sequence: Synthetic oligonucleotide
  Antisense strand to SEQ ID NO: 1437124
aauccagacaacuuuaauc

SEQ ID NO: 1437126 - RNA, 19 nt, Artificial Sequence
  Description of Artificial Sequence: Synthetic oligonucleotide
  Sense strand starting at position 254 of SEQ ID NO: 1243730
gggcgcuguggccugaaau

SEQ ID NO: 1437127 - RNA, 19 nt, Artificial Sequence
  Description of Artificial Sequence: Synthetic oligonucleotide
  Antisense strand to SEQ ID NO: 1437126
auuucaggccacagcgccc

SEQ ID NO: 1437128 - RNA, 19 nt, Artificial Sequence
  Description of Artificial Sequence: Synthetic oligonucleotide
  Sense strand starting at position 255 of SEQ ID NO: 1243730
ggcgcuguggccugaaauc

SEQ ID NO: 1437129 - RNA, 19 nt, Artificial Sequence
  Description of Artificial Sequence: Synthetic oligonucleotide
  Antisense strand to SEQ ID NO: 1437128
gauuucaggccacagcgcc

SEQ ID NO: 1437130 - RNA, 19 nt, Artificial Sequence
  Description of Artificial Sequence: Synthetic oligonucleotide
  Sense strand starting at position 1068 of SEQ ID NO: 1243730
aucgguggcucgaguaaau

SEQ ID NO: 1437131 - RNA, 19 nt, Artificial Sequence
  Description of Artificial Sequence: Synthetic oligonucleotide
  Antisense strand to SEQ ID NO: 1437130
auuuacucgagccaccgau

SEQ ID NO: 1437132 - RNA, 19 nt, Artificial Sequence
  Description of Artificial Sequence: Synthetic oligonucleotide
  Sense strand starting at position 1081 of SEQ ID NO: 1243730
guaaauccauuugagaaua

SEQ ID NO: 1437133 - RNA, 19 nt, Artificial Sequence
  Description of Artificial Sequence: Synthetic oligonucleotide
  Antisense strand to SEQ ID NO: 1437132
uauucucaaauggauuuac

SEQ ID NO: 1437134 - RNA, 19 nt, Artificial Sequence
  Description of Artificial Sequence: Synthetic oligonucleotide
  Sense strand starting at position 1114 of SEQ ID NO: 1243730
ggcagaguuuacuaaagga

SEQ ID NO: 1437135 - RNA, 19 nt, Artificial Sequence
  Description of Artificial Sequence: Synthetic oligonucleotide
  Antisense strand to SEQ ID NO: 1437134
uccuuuaguaaacucugcc

SEQ ID NO: 1437136 - RNA, 19 nt, Artificial Sequence
  Description of Artificial Sequence: Synthetic oligonucleotide
  Sense strand starting at position 1132 of SEQ ID NO: 1243730
accugcgauguguagcaau

SEQ ID NO: 1437137 - RNA, 19 nt, Artificial Sequence
  Description of Artificial Sequence: Synthetic oligonucleotide
  Antisense strand to SEQ ID NO: 1437136
auugcuacacaucgcaggu

SEQ ID NO: 1437138 - RNA, 19 nt, Artificial Sequence
  Description of Artificial Sequence: Synthetic oligonucleotide
  Sense strand starting at position 1285 of SEQ ID NO: 1243730
uaggaaauaucagaaagug

SEQ ID NO: 1437139 - RNA, 19 nt, Artificial Sequence
  Description of Artificial Sequence: Synthetic oligonucleotide
  Antisense strand to SEQ ID NO: 1437138
cacuuucugauauuuccua

SEQ ID NO: 1437140 - RNA, 19 nt, Artificial Sequence
  Description of Artificial Sequence: Synthetic oligonucleotide
  Sense strand starting at position 1352 of SEQ ID NO: 1243730
ucggcuguucggcucaauu

SEQ ID NO: 1437141 - RNA, 19 nt, Artificial Sequence
  Description of Artificial Sequence: Synthetic oligonucleotide
  Antisense strand to SEQ ID NO: 1437140
aauugagccgaacagccga

SEQ ID NO: 1437142 - RNA, 19 nt, Artificial Sequence
  Description of Artificial Sequence: Synthetic oligonucleotide
  Sense strand starting at position 2196 of SEQ ID NO: 1243730
aaguaaauguguucgggau

SEQ ID NO: 1437143 - RNA, 19 nt, Artificial Sequence
  Description of Artificial Sequence: Synthetic oligonucleotide
  Antisense strand to SEQ ID NO: 1437142
aucccgaacacauuuacuu

SEQ ID NO: 1437144 - RNA, 19 nt, Artificial Sequence
  Description of Artificial Sequence: Synthetic oligonucleotide
  Sense strand starting at position 2197 of SEQ ID NO: 1243730
aguaaauguguucgggauu

SEQ ID NO: 1437145 - RNA, 19 nt, Artificial Sequence
  Description of Artificial Sequence: Synthetic oligonucleotide
  Antisense strand to SEQ ID NO: 1437144
aaucccgaacacauuuacu

SEQ ID NO: 1437146 - RNA, 19 nt, Artificial Sequence
  Description of Artificial Sequence: Synthetic oligonucleotide
  Sense strand starting at position 2198 of SEQ ID NO: 1243730
guaaauguguucgggauug

SEQ ID NO: 1437147 - RNA, 19 nt, Artificial Sequence
  Description of Artificial Sequence: Synthetic oligonucleotide
  Antisense strand to SEQ ID NO: 1437146
caaucccgaacacauuuac

SEQ ID NO: 1437148 - RNA, 19 nt, Artificial Sequence
  Description of Artificial Sequence: Synthetic oligonucleotide
  Sense strand starting at position 2237 of SEQ ID NO: 1243730
gcccgaugauuugcugaua

SEQ ID NO: 1437149 - RNA, 19 nt, Artificial Sequence
  Description of Artificial Sequence: Synthetic oligonucleotide
  Antisense strand to SEQ ID NO: 1437148
uaucagcaaaucaucgggc

SEQ ID NO: 1437150 - RNA, 19 nt, Artificial Sequence
  Description of Artificial Sequence: Synthetic oligonucleotide
  Sense strand starting at position 2273 of SEQ ID NO: 1243730
gucguggaagguugaaaga

SEQ ID NO: 1437151 - RNA, 19 nt, Artificial Sequence
  Description of Artificial Sequence: Synthetic oligonucleotide
  Antisense strand to SEQ ID NO: 1437150
ucuuucaaccuuccacgac

SEQ ID NO: 1437152 - RNA, 19 nt, Artificial Sequence
  Description of Artificial Sequence: Synthetic oligonucleotide
  Sense strand starting at position 2336 of SEQ ID NO: 1243730
cuuggaagauuugagaagu

SEQ ID NO: 1437153 - RNA, 19 nt, Artificial Sequence
  Description of Artificial Sequence: Synthetic oligonucleotide
  Antisense strand to SEQ ID NO: 1437152
acuucucaaaucuuccaag

SEQ ID NO: 1437154 - RNA, 19 nt, Artificial Sequence
  Description of Artificial Sequence: Synthetic oligonucleotide
  Sense strand starting at position 2347 of SEQ ID NO: 1243730
ugagaagucgcucagcaac

SEQ ID NO: 1437155 - RNA, 19 nt, Artificial Sequence
  Description of Artificial Sequence: Synthetic oligonucleotide
  Antisense strand to SEQ ID NO: 1437154
guugcugagcgacuucuca

SEQ ID NO: 1437156 - RNA, 19 nt, Artificial Sequence
  Description of Artificial Sequence: Synthetic oligonucleotide
  Sense strand starting at position 2448 of SEQ ID NO: 1243730
uucagaauccguuggagcu

SEQ ID NO: 1437157 - RNA, 19 nt, Artificial Sequence
  Description of Artificial Sequence: Synthetic oligonucleotide
  Antisense strand to SEQ ID NO: 1437156
agcuccaacggauucugaa

SEQ ID NO: 1437158 - RNA, 19 nt, Artificial Sequence
  Description of Artificial Sequence: Synthetic oligonucleotide
  Sense strand starting at position 2465 of SEQ ID NO: 1243730
cugcccagagacugauaua

SEQ ID NO: 1437159 - RNA, 19 nt, Artificial Sequence
  Description of Artificial Sequence: Synthetic oligonucleotide
  Antisense strand to SEQ ID NO: 1437158
uauaucagucucugggcag

SEQ ID NO: 1437160 - RNA, 19 nt, Artificial Sequence
  Description of Artificial Sequence: Synthetic oligonucleotide
  Sense strand starting at position 2468 of SEQ ID NO: 1243730
cccagagacugauauaucu

SEQ ID NO: 1437161 - RNA, 19 nt, Artificial Sequence
  Description of Artificial Sequence: Synthetic oligonucleotide
  Antisense strand to SEQ ID NO: 1437160
agauauaucagucucuggg

SEQ ID NO: 1437162 - RNA, 19 nt, Artificial Sequence
  Description of Artificial Sequence: Synthetic oligonucleotide
  Sense strand starting at position 2477 of SEQ ID NO: 1243730
ugauauaucuuguaccggu

SEQ ID NO: 1437163 - RNA, 19 nt, Artificial Sequence
  Description of Artificial Sequence: Synthetic oligonucleotide
  Antisense strand to SEQ ID NO: 1437162
accgguacaagauauauca

SEQ ID NO: 1437164 - RNA, 19 nt, Artificial Sequence
  Description of Artificial Sequence: Synthetic oligonucleotide
  Sense strand starting at position 2506 of SEQ ID NO: 1243730
cgaggagcaacuuguggau

SEQ ID NO: 1437165 - RNA, 19 nt, Artificial Sequence
  Description of Artificial Sequence: Synthetic oligonucleotide
  Antisense strand to SEQ ID NO: 1437164
auccacaaguugcuccucg

SEQ ID NO: 1437166 - RNA, 19 nt, Artificial Sequence
  Description of Artificial Sequence: Synthetic oligonucleotide
  Sense strand starting at position 2580 of SEQ ID NO: 1243730
gggcuuucaguccggguua

SEQ ID NO: 1437167 - RNA, 19 nt, Artificial Sequence
  Description of Artificial Sequence: Synthetic oligonucleotide
  Antisense strand to SEQ ID NO: 1437166
uaacccggacugaaagccc

SEQ ID NO: 1437168 - RNA, 19 nt, Artificial Sequence
  Description of Artificial Sequence: Synthetic oligonucleotide
  Sense strand starting at position 2581 of SEQ ID NO: 1243730
ggcuuucaguccggguuaa

SEQ ID NO: 1437169 - RNA, 19 nt, Artificial Sequence
  Description of Artificial Sequence: Synthetic oligonucleotide
  Antisense strand to SEQ ID NO: 1437168
uuaacccggacugaaagcc

SEQ ID NO: 1437170 - RNA, 19 nt, Artificial Sequence
  Description of Artificial Sequence: Synthetic oligonucleotide
  Sense strand starting at position 2582 of SEQ ID NO: 1243730
gcuuucaguccggguuaag

SEQ ID NO: 1437171 - RNA, 19 nt, Artificial Sequence
  Description of Artificial Sequence: Synthetic oligonucleotide
  Antisense strand to SEQ ID NO: 1437170
cuuaacccggacugaaagc

SEQ ID NO: 1437172 - RNA, 19 nt, Artificial Sequence
  Description of Artificial Sequence: Synthetic oligonucleotide
  Sense strand starting at position 2601 of SEQ ID NO: 1243730
gcauuuaaguguuaaugug

SEQ ID NO: 1437173 - RNA, 19 nt, Artificial Sequence
  Description of Artificial Sequence: Synthetic oligonucleotide
  Antisense strand to SEQ ID NO: 1437172
cacauuaacacuuaaaugc

SEQ ID NO: 1437174 - RNA, 19 nt, Artificial Sequence
  Description of Artificial Sequence: Synthetic oligonucleotide
  Sense strand starting at position 2625 of SEQ ID NO: 1243730
ugaacaaaguucgcuguga

SEQ ID NO: 1437175 - RNA, 19 nt, Artificial Sequence
  Description of Artificial Sequence: Synthetic oligonucleotide
  Antisense strand to SEQ ID NO: 1437174
ucacagcgaacuuuguuca

SEQ ID NO: 1437176 - RNA, 19 nt, Artificial Sequence
  Description of Artificial Sequence: Synthetic oligonucleotide
  Sense strand starting at position 2629 of SEQ ID NO: 1243730
caaaguucgcugugaccuu

SEQ ID NO: 1437177 - RNA, 19 nt, Artificial Sequence
  Description of Artificial Sequence: Synthetic oligonucleotide
  Antisense strand to SEQ ID NO: 1437176
aaggucacagcgaacuuug

SEQ ID NO: 1437178 - RNA, 19 nt, Artificial Sequence
  Description of Artificial Sequence: Synthetic oligonucleotide
  Sense strand starting at position 3336 of SEQ ID NO: 1243730
guuggaucuccuuauguug

SEQ ID NO: 1437179 - RNA, 19 nt, Artificial Sequence
  Description of Artificial Sequence: Synthetic oligonucleotide
  Antisense strand to SEQ ID NO: 1437178
caacauaaggagauccaac

SEQ ID NO: 1437180 - RNA, 19 nt, Artificial Sequence
  Description of Artificial Sequence: Synthetic oligonucleotide
  Sense strand starting at position 3371 of SEQ ID NO: 1243730
acugaacucuuggccugaa

SEQ ID NO: 1437181 - RNA, 19 nt, Artificial Sequence
  Description of Artificial Sequence: Synthetic oligonucleotide
  Antisense strand to SEQ ID NO: 1437180
uucaggccaagaguucagu

SEQ ID NO: 1437182 - RNA, 19 nt, Artificial Sequence
  Description of Artificial Sequence: Synthetic oligonucleotide
  Sense strand starting at position 3498 of SEQ ID NO: 1243730
augugauggucucagagaa

SEQ ID NO: 1437183 - RNA, 19 nt, Artificial Sequence
  Description of Artificial Sequence: Synthetic oligonucleotide
  Antisense strand to SEQ ID NO: 1437182
uucucugagaccaucacau

SEQ ID NO: 1437184 - RNA, 19 nt, Artificial Sequence
  Description of Artificial Sequence: Synthetic oligonucleotide
  Sense strand starting at position 3506 of SEQ ID NO: 1243730
gucucagagaaaugcuagu

SEQ ID NO: 1437185 - RNA, 19 nt, Artificial Sequence
  Description of Artificial Sequence: Synthetic oligonucleotide
  Antisense strand to SEQ ID NO: 1437184
acuagcauuucucugagac

SEQ ID NO: 1437186 - RNA, 19 nt, Artificial Sequence
  Description of Artificial Sequence: Synthetic oligonucleotide
  Sense strand starting at position 3529 of SEQ ID NO: 1243730
gucccuagacacugcuaaa

SEQ ID NO: 1437187 - RNA, 19 nt, Artificial Sequence
  Description of Artificial Sequence: Synthetic oligonucleotide
  Antisense strand to SEQ ID NO: 1437186
uuuagcagugucuagggac

SEQ ID NO: 1437188 - RNA, 19 nt, Artificial Sequence
  Description of Artificial Sequence: Synthetic oligonucleotide
  Sense strand starting at position 3676 of SEQ ID NO: 1243730
gaaguaggaggaugaguuu

SEQ ID NO: 1437189 - RNA, 19 nt, Artificial Sequence
  Description of Artificial Sequence: Synthetic oligonucleotide
  Antisense strand to SEQ ID NO: 1437188
aaacucauccuccuacuuc

SEQ ID NO: 1437190 - RNA, 19 nt, Artificial Sequence
  Description of Artificial Sequence: Synthetic oligonucleotide
  Sense strand starting at position 3701 of SEQ ID NO: 1243730
cccauauuguccugauagu

SEQ ID NO: 1437191 - RNA, 19 nt, Artificial Sequence
  Description of Artificial Sequence: Synthetic oligonucleotide
  Antisense strand to SEQ ID NO: 1437190
acuaucaggacaauauggg

SEQ ID NO: 1437192 - RNA, 19 nt, Artificial Sequence
  Description of Artificial Sequence: Synthetic oligonucleotide
  Sense strand starting at position 3702 of SEQ ID NO: 1243730
ccauauuguccugauaguu

SEQ ID NO: 1437193 - RNA, 19 nt, Artificial Sequence
  Description of Artificial Sequence: Synthetic oligonucleotide
  Antisense strand to SEQ ID NO: 1437192
aacuaucaggacaauaugg

SEQ ID NO: 1437194 - RNA, 19 nt, Artificial Sequence
  Description of Artificial Sequence: Synthetic oligonucleotide
  Sense strand starting at position 3727 of SEQ ID NO: 1243730
ggucucuacucagcuuuga

SEQ ID NO: 1437195 - RNA, 19 nt, Artificial Sequence
  Description of Artificial Sequence: Synthetic oligonucleotide
  Antisense strand to SEQ ID NO: 1437194
ucaaagcugaguagagacc

SEQ ID NO: 1437196 - RNA, 19 nt, Artificial Sequence
  Description of Artificial Sequence: Synthetic oligonucleotide
  Sense strand starting at position 3860 of SEQ ID NO: 1243730
uaaggagacuucgucucua

SEQ ID NO: 1437197 - RNA, 19 nt, Artificial Sequence
  Description of Artificial Sequence: Synthetic oligonucleotide
  Antisense strand to SEQ ID NO: 1437196
uagagacgaagucuccuua

SEQ ID NO: 1437198 - RNA, 19 nt, Artificial Sequence
  Description of Artificial Sequence: Synthetic oligonucleotide
  Sense strand starting at position 33 of SEQ ID NO: 1243731
agcugauuaggucacccua

SEQ ID NO: 1437199 - RNA, 19 nt, Artificial Sequence
  Description of Artificial Sequence: Synthetic oligonucleotide
  Antisense strand to SEQ ID NO: 1437198
uagggugaccuaaucagcu

SEQ ID NO: 1437200 - RNA, 19 nt, Artificial Sequence
  Description of Artificial Sequence: Synthetic oligonucleotide
  Sense strand starting at position 35 of SEQ ID NO: 1243731
cugauuaggucacccuaau

SEQ ID NO: 1437201 - RNA, 19 nt, Artificial Sequence
  Description of Artificial Sequence: Synthetic oligonucleotide
  Antisense strand to SEQ ID NO: 1437200
auuagggugaccuaaucag

SEQ ID NO: 1437202 - RNA, 19 nt, Artificial Sequence
  Description of Artificial Sequence: Synthetic oligonucleotide
  Sense strand starting at position 163 of SEQ ID NO: 1243731
gcaccuugaucuuuggacu

SEQ ID NO: 1437203 - RNA, 19 nt, Artificial Sequence
  Description of Artificial Sequence: Synthetic oligonucleotide
  Antisense strand to SEQ ID NO: 1437202
aguccaaagaucaaggugc

SEQ ID NO: 1437204 - RNA, 19 nt, Artificial Sequence
  Description of Artificial Sequence: Synthetic oligonucleotide
  Sense strand starting at position 177 of SEQ ID NO: 1243731
ggacuuccuugccucuaga

SEQ ID NO: 1437205 - RNA, 19 nt, Artificial Sequence
  Description of Artificial Sequence: Synthetic oligonucleotide
  Antisense strand to SEQ ID NO: 1437204
ucuagaggcaaggaagucc

SEQ ID NO: 1437206 - RNA, 19 nt, Artificial Sequence
  Description of Artificial Sequence: Synthetic oligonucleotide
  Sense strand starting at position 244 of SEQ ID NO: 1243731
gcuauagcgcccuauaaug

SEQ ID NO: 1437207 - RNA, 19 nt, Artificial Sequence
  Description of Artificial Sequence: Synthetic oligonucleotide
  Antisense strand to SEQ ID NO: 1437206
cauuauagggcgcuauagc

SEQ ID NO: 1437208 - RNA, 19 nt, Artificial Sequence
  Description of Artificial Sequence: Synthetic oligonucleotide
  Sense strand starting at position 336 of SEQ ID NO: 1243731
aagucucuucgaugaaaua

SEQ ID NO: 1437209 - RNA, 19 nt, Artificial Sequence
  Description of Artificial Sequence: Synthetic oligonucleotide
  Antisense strand to SEQ ID NO: 1437208
uauuucaucgaagagacuu

SEQ ID NO: 1437210 - RNA, 19 nt, Artificial Sequence
  Description of Artificial Sequence: Synthetic oligonucleotide
  Sense strand starting at position 407 of SEQ ID NO: 1243731
guaacauggucuguuuggu

SEQ ID NO: 1437211 - RNA, 19 nt, Artificial Sequence
  Description of Artificial Sequence: Synthetic oligonucleotide
  Antisense strand to SEQ ID NO: 1437210
accaaacagaccauguuac

SEQ ID NO: 1437212 - RNA, 19 nt, Artificial Sequence
  Description of Artificial Sequence: Synthetic oligonucleotide
  Sense strand starting at position 417 of SEQ ID NO: 1243731
cuguuugguucucccucaa

SEQ ID NO: 1437213 - RNA, 19 nt, Artificial Sequence
  Description of Artificial Sequence: Synthetic oligonucleotide
  Antisense strand to SEQ ID NO: 1437212
uugagggagaaccaaacag

SEQ ID NO: 1437214 - RNA, 19 nt, Artificial Sequence
  Description of Artificial Sequence: Synthetic oligonucleotide
  Sense strand starting at position 740 of SEQ ID NO: 1243731
cucugagaucgugggaaag

SEQ ID NO: 1437215 - RNA, 19 nt, Artificial Sequence
  Description of Artificial Sequence: Synthetic oligonucleotide
  Antisense strand to SEQ ID NO: 1437214
cuuucccacgaucucagag

SEQ ID NO: 1437216 - RNA, 19 nt, Artificial Sequence
  Description of Artificial Sequence: Synthetic oligonucleotide
  Sense strand starting at position 1128 of SEQ ID NO: 1243731
uuaacaaaucuuugaguag

SEQ ID NO: 1437217 - RNA, 19 nt, Artificial Sequence
  Description of Artificial Sequence: Synthetic oligonucleotide
  Antisense strand to SEQ ID NO: 1437216
cuacucaaagauuuguuaa

SEQ ID NO: 1437218 - RNA, 19 nt, Artificial Sequence
  Description of Artificial Sequence: Synthetic oligonucleotide
  Sense strand starting at position 1131 of SEQ ID NO: 1243731
acaaaucuuugaguagaug

SEQ ID NO: 1437219 - RNA, 19 nt, Artificial Sequence
  Description of Artificial Sequence: Synthetic oligonucleotide
  Antisense strand to SEQ ID NO: 1437218
caucuacucaaagauuugu

SEQ ID NO: 1437220 - RNA, 19 nt, Artificial Sequence
  Description of Artificial Sequence: Synthetic oligonucleotide
  Sense strand starting at position 1137 of SEQ ID NO: 1243731
cuuugaguagauggguauu

SEQ ID NO: 1437221 - RNA, 19 nt, Artificial Sequence
  Description of Artificial Sequence: Synthetic oligonucleotide
  Antisense strand to SEQ ID NO: 1437220
aauacccaucuacucaaag

SEQ ID NO: 1437222 - RNA, 19 nt, Artificial Sequence
  Description of Artificial Sequence: Synthetic oligonucleotide
  Sense strand starting at position 1154 of SEQ ID NO: 1243731
uuuagaaggcucugggaaa

SEQ ID NO: 1437223 - RNA, 19 nt, Artificial Sequence
  Description of Artificial Sequence: Synthetic oligonucleotide
  Antisense strand to SEQ ID NO: 1437222
uuucccagagccuucuaaa

SEQ ID NO: 1437224 - RNA, 19 nt, Artificial Sequence
  Description of Artificial Sequence: Synthetic oligonucleotide
  Sense strand starting at position 1304 of SEQ ID NO: 1243731
aacaguaggcuucgcuaga

SEQ ID NO: 1437225 - RNA, 19 nt, Artificial Sequence
  Description of Artificial Sequence: Synthetic oligonucleotide
  Antisense strand to SEQ ID NO: 1437224
ucuagcgaagccuacuguu

SEQ ID NO: 1437226 - RNA, 19 nt, Artificial Sequence
  Description of Artificial Sequence: Synthetic oligonucleotide
  Sense strand starting at position 1391 of SEQ ID NO: 1243731
agacaauguccuugacuaa

SEQ ID NO: 1437227 - RNA, 19 nt, Artificial Sequence
  Description of Artificial Sequence: Synthetic oligonucleotide
  Antisense strand to SEQ ID NO: 1437226
uuagucaaggacauugucu

SEQ ID NO: 1437228 - RNA, 19 nt, Artificial Sequence
  Description of Artificial Sequence: Synthetic oligonucleotide
  Sense strand starting at position 1442 of SEQ ID NO: 1243731
ucaagaaguuugguuugau

SEQ ID NO: 1437229 - RNA, 19 nt, Artificial Sequence
  Description of Artificial Sequence: Synthetic oligonucleotide
  Antisense strand to SEQ ID NO: 1437228
aucaaaccaaacuucuuga

SEQ ID NO: 1437230 - RNA, 19 nt, Artificial Sequence
  Description of Artificial Sequence: Synthetic oligonucleotide
  Sense strand starting at position 1443 of SEQ ID NO: 1243731
caagaaguuugguuugauu

SEQ ID NO: 1437231 - RNA, 19 nt, Artificial Sequence
  Description of Artificial Sequence: Synthetic oligonucleotide
  Antisense strand to SEQ ID NO: 1437230
aaucaaaccaaacuucuug

SEQ ID NO: 1437232 - RNA, 19 nt, Artificial Sequence
  Description of Artificial Sequence: Synthetic oligonucleotide
  Sense strand starting at position 1446 of SEQ ID NO: 1243731
gaaguuugguuugauuuau

SEQ ID NO: 1437233 - RNA, 19 nt, Artificial Sequence
  Description of Artificial Sequence: Synthetic oligonucleotide
  Antisense strand to SEQ ID NO: 1437232
auaaaucaaaccaaacuuc

SEQ ID NO: 1437234 - RNA, 19 nt, Artificial Sequence
  Description of Artificial Sequence: Synthetic oligonucleotide
  Sense strand starting at position 1526 of SEQ ID NO: 1243731
agagauaaauguccuucua

SEQ ID NO: 1437235 - RNA, 19 nt, Artificial Sequence
  Description of Artificial Sequence: Synthetic oligonucleotide
  Antisense strand to SEQ ID NO: 1437234
uagaaggacauuuaucucu

SEQ ID NO: 1437236 - RNA, 19 nt, Artificial Sequence
  Description of Artificial Sequence: Synthetic oligonucleotide
  Sense strand starting at position 1581 of SEQ ID NO: 1243731
auauuauuagccugucuau

SEQ ID NO: 1437237 - RNA, 19 nt, Artificial Sequence
  Description of Artificial Sequence: Synthetic oligonucleotide
  Antisense strand to SEQ ID NO: 1437236
auagacaggcuaauaauau

SEQ ID NO: 1437238 - RNA, 19 nt, Artificial Sequence
  Description of Artificial Sequence: Synthetic oligonucleotide
  Sense strand starting at position 1669 of SEQ ID NO: 1243731
cagugaacucccuggugga

SEQ ID NO: 1437239 - RNA, 19 nt, Artificial Sequence
  Description of Artificial Sequence: Synthetic oligonucleotide
  Antisense strand to SEQ ID NO: 1437238
uccaccagggaguucacug

SEQ ID NO: 1437240 - RNA, 19 nt, Artificial Sequence
  Description of Artificial Sequence: Synthetic oligonucleotide
  Sense strand starting at position 1670 of SEQ ID NO: 1243731
agugaacucccugguggaa

SEQ ID NO: 1437241 - RNA, 19 nt, Artificial Sequence
  Description of Artificial Sequence: Synthetic oligonucleotide
  Antisense strand to SEQ ID NO: 1437240
uuccaccagggaguucacu

SEQ ID NO: 1437242 - RNA, 19 nt, Artificial Sequence
  Description of Artificial Sequence: Synthetic oligonucleotide
  Sense strand starting at position 2051 of SEQ ID NO: 1243731
ugucauaguuacccaguua

SEQ ID NO: 1437243 - RNA, 19 nt, Artificial Sequence
  Description of Artificial Sequence: Synthetic oligonucleotide
  Antisense strand to SEQ ID NO: 1437242
uaacuggguaacuaugaca

SEQ ID NO: 1437244 - RNA, 19 nt, Artificial Sequence
  Description of Artificial Sequence: Synthetic oligonucleotide
  Sense strand starting at position 2311 of SEQ ID NO: 1243731
guuacacaucuugggcuau

SEQ ID NO: 1437245 - RNA, 19 nt, Artificial Sequence
  Description of Artificial Sequence: Synthetic oligonucleotide
  Antisense strand to SEQ ID NO: 1437244
auagcccaagauguguaac

SEQ ID NO: 1437246 - RNA, 19 nt, Artificial Sequence
  Description of Artificial Sequence: Synthetic oligonucleotide
  Sense strand starting at position 2333 of SEQ ID NO: 1243731
cuaaguagucuccacugca

SEQ ID NO: 1437247 - RNA, 19 nt, Artificial Sequence
  Description of Artificial Sequence: Synthetic oligonucleotide
  Antisense strand to SEQ ID NO: 1437246
ugcaguggagacuacuuag

SEQ ID NO: 1437248 - RNA, 19 nt, Artificial Sequence
  Description of Artificial Sequence: Synthetic oligonucleotide
  Sense strand starting at position 2336 of SEQ ID NO: 1243731
aguagucuccacugcaaua

SEQ ID NO: 1437249 - RNA, 19 nt, Artificial Sequence
  Description of Artificial Sequence: Synthetic oligonucleotide
  Antisense strand to SEQ ID NO: 1437248
uauugcaguggagacuacu

SEQ ID NO: 1437250 - RNA, 19 nt, Artificial Sequence
  Description of Artificial Sequence: Synthetic oligonucleotide
  Sense strand starting at position 2366 of SEQ ID NO: 1243731
ggugcaagaccacaaguuu

SEQ ID NO: 1437251 - RNA, 19 nt, Artificial Sequence
  Description of Artificial Sequence: Synthetic oligonucleotide
  Antisense strand to SEQ ID NO: 1437250
aaacuuguggucuugcacc

SEQ ID NO: 1437252 - RNA, 19 nt, Artificial Sequence
  Description of Artificial Sequence: Synthetic oligonucleotide
  Sense strand starting at position 2462 of SEQ ID NO: 1243731
gcagcaacguuacucaaga

SEQ ID NO: 1437253 - RNA, 19 nt, Artificial Sequence
  Description of Artificial Sequence: Synthetic oligonucleotide
  Antisense strand to SEQ ID NO: 1437252
ucuugaguaacguugcugc

SEQ ID NO: 1437254 - RNA, 19 nt, Artificial Sequence
  Description of Artificial Sequence: Synthetic oligonucleotide
  Sense strand starting at position 2590 of SEQ ID NO: 1243731
gcagcuuuccuccaguaca

SEQ ID NO: 1437255 - RNA, 19 nt, Artificial Sequence
  Description of Artificial Sequence: Synthetic oligonucleotide
  Antisense strand to SEQ ID NO: 1437254
uguacuggaggaaagcugc

SEQ ID NO: 1437256 - RNA, 19 nt, Artificial Sequence
  Description of Artificial Sequence: Synthetic oligonucleotide
  Sense strand starting at position 2640 of SEQ ID NO: 1243731
ggaaaugcugaguggcuua

SEQ ID NO: 1437257 - RNA, 19 nt, Artificial Sequence
  Description of Artificial Sequence: Synthetic oligonucleotide
  Antisense strand to SEQ ID NO: 1437256
uaagccacucagcauuucc

SEQ ID NO: 1437258 - RNA, 19 nt, Artificial Sequence
  Description of Artificial Sequence: Synthetic oligonucleotide
  Sense strand starting at position 2742 of SEQ ID NO: 1243731
gcucaacgcauuuguugau

SEQ ID NO: 1437259 - RNA, 19 nt, Artificial Sequence
  Description of Artificial Sequence: Synthetic oligonucleotide
  Antisense strand to SEQ ID NO: 1437258
aucaacaaaugcguugagc

SEQ ID NO: 1437260 - RNA, 19 nt, Artificial Sequence
  Description of Artificial Sequence: Synthetic oligonucleotide
  Sense strand starting at position 2798 of SEQ ID NO: 1243731
cugggugccuucuuugaau

SEQ ID NO: 1437261 - RNA, 19 nt, Artificial Sequence
  Description of Artificial Sequence: Synthetic oligonucleotide
  Antisense strand to SEQ ID NO: 1437260
auucaaagaaggcacccag

SEQ ID NO: 1437262 - RNA, 19 nt, Artificial Sequence
  Description of Artificial Sequence: Synthetic oligonucleotide
  Sense strand starting at position 2804 of SEQ ID NO: 1243731
gccuucuuugaaugucaca

SEQ ID NO: 1437263 - RNA, 19 nt, Artificial Sequence
  Description of Artificial Sequence: Synthetic oligonucleotide
  Antisense strand to SEQ ID NO: 1437262
ugugacauucaaagaaggc

SEQ ID NO: 1437264 - RNA, 19 nt, Artificial Sequence
  Description of Artificial Sequence: Synthetic oligonucleotide
  Sense strand starting at position 2949 of SEQ ID NO: 1243731
gaugacucucaaugaaugu

SEQ ID NO: 1437265 - RNA, 19 nt, Artificial Sequence
  Description of Artificial Sequence: Synthetic oligonucleotide
  Antisense strand to SEQ ID NO: 1437264
acauucauugagagucauc

SEQ ID NO: 1437266 - RNA, 19 nt, Artificial Sequence
  Description of Artificial Sequence: Synthetic oligonucleotide
  Sense strand starting at position 2953 of SEQ ID NO: 1243731
acucucaaugaauguugaa

SEQ ID NO: 1437267 - RNA, 19 nt, Artificial Sequence
  Description of Artificial Sequence: Synthetic oligonucleotide
  Antisense strand to SEQ ID NO: 1437266
uucaacauucauugagagu

SEQ ID NO: 1437268 - RNA, 19 nt, Artificial Sequence
  Description of Artificial Sequence: Synthetic oligonucleotide
  Sense strand starting at position 3137 of SEQ ID NO: 1243731
cggucccuguaaucaugaa

SEQ ID NO: 1437269 - RNA, 19 nt, Artificial Sequence
  Description of Artificial Sequence: Synthetic oligonucleotide
  Antisense strand to SEQ ID NO: 1437268
uucaugauuacagggaccg

SEQ ID NO: 1437270 - RNA, 19 nt, Artificial Sequence
  Description of Artificial Sequence: Synthetic oligonucleotide
  Sense strand starting at position 3234 of SEQ ID NO: 1243731
ccgcgcuugccaguuuaca

SEQ ID NO: 1437271 - RNA, 19 nt, Artificial Sequence
  Description of Artificial Sequence: Synthetic oligonucleotide
  Antisense strand to SEQ ID NO: 1437270
uguaaacuggcaagcgcgg

SEQ ID NO: 1437272 - RNA, 19 nt, Artificial Sequence
  Description of Artificial Sequence: Synthetic oligonucleotide
  Sense strand starting at position 3235 of SEQ ID NO: 1243731
cgcgcuugccaguuuacaa

SEQ ID NO: 1437273 - RNA, 19 nt, Artificial Sequence
  Description of Artificial Sequence: Synthetic oligonucleotide
  Antisense strand to SEQ ID NO: 1437272
uuguaaacuggcaagcgcg

SEQ ID NO: 1437274 - RNA, 19 nt, Artificial Sequence
  Description of Artificial Sequence: Synthetic oligonucleotide
  Sense strand starting at position 3236 of SEQ ID NO: 1243731
gcgcuugccaguuuacaaa

SEQ ID NO: 1437275 - RNA, 19 nt, Artificial Sequence
  Description of Artificial Sequence: Synthetic oligonucleotide
  Antisense strand to SEQ ID NO: 1437274
uuuguaaacuggcaagcgc

SEQ ID NO: 1437276 - RNA, 19 nt, Artificial Sequence
  Description of Artificial Sequence: Synthetic oligonucleotide
  Sense strand starting at position 3635 of SEQ ID NO: 1243731
gcgugagucccuuucgcga

SEQ ID NO: 1437277 - RNA, 19 nt, Artificial Sequence
  Description of Artificial Sequence: Synthetic oligonucleotide
  Antisense strand to SEQ ID NO: 1437276
ucgcgaaagggacucacgc

SEQ ID NO: 1437278 - RNA, 19 nt, Artificial Sequence
  Description of Artificial Sequence: Synthetic oligonucleotide
  Sense strand starting at position 1990 of SEQ ID NO: 1243732
agccguguuugugagguca

SEQ ID NO: 1437279 - RNA, 19 nt, Artificial Sequence
  Description of Artificial Sequence: Synthetic oligonucleotide
  Antisense strand to SEQ ID NO: 1437278
ugaccucacaaacacggcu

SEQ ID NO: 1437280 - RNA, 19 nt, Artificial Sequence
  Description of Artificial Sequence: Synthetic oligonucleotide
  Sense strand starting at position 2036 of SEQ ID NO: 1243732
gaggaacggugaugucaug

SEQ ID NO: 1437281 - RNA, 19 nt, Artificial Sequence
  Description of Artificial Sequence: Synthetic oligonucleotide
  Antisense strand to SEQ ID NO: 1437280
caugacaucaccguuccuc

SEQ ID NO: 1437282 - RNA, 19 nt, Artificial Sequence
  Description of Artificial Sequence: Synthetic oligonucleotide
  Sense strand starting at position 2098 of SEQ ID NO: 1243732
ccacgcucauugucaugaa

SEQ ID NO: 1437283 - RNA, 19 nt, Artificial Sequence
  Description of Artificial Sequence: Synthetic oligonucleotide
  Antisense strand to SEQ ID NO: 1437282
uucaugacaaugagcgugg

SEQ ID NO: 1437284 - RNA, 19 nt, Artificial Sequence
  Description of Artificial Sequence: Synthetic oligonucleotide
  Sense strand starting at position 2099 of SEQ ID NO: 1243732
cacgcucauugucaugaau

SEQ ID NO: 1437285 - RNA, 19 nt, Artificial Sequence
  Description of Artificial Sequence: Synthetic oligonucleotide
  Antisense strand to SEQ ID NO: 1437284
auucaugacaaugagcgug

SEQ ID NO: 1437286 - RNA, 19 nt, Artificial Sequence
  Description of Artificial Sequence: Synthetic oligonucleotide
  Sense strand starting at position 2101 of SEQ ID NO: 1243732
cgcucauugucaugaauug

SEQ ID NO: 1437287 - RNA, 19 nt, Artificial Sequence
  Description of Artificial Sequence: Synthetic oligonucleotide
  Antisense strand to SEQ ID NO: 1437286
caauucaugacaaugagcg

SEQ ID NO: 1437288 - RNA, 19 nt, Artificial Sequence
  Description of Artificial Sequence: Synthetic oligonucleotide
  Sense strand starting at position 2110 of SEQ ID NO: 1243732
ucaugaauugcgucaucgu

SEQ ID NO: 1437289 - RNA, 19 nt, Artificial Sequence
  Description of Artificial Sequence: Synthetic oligonucleotide
  Antisense strand to SEQ ID NO: 1437288
acgaugacgcaauucauga

SEQ ID NO: 1437290 - RNA, 19 nt, Artificial Sequence
  Description of Artificial Sequence: Synthetic oligonucleotide
  Sense strand starting at position 2119 of SEQ ID NO: 1243732
gcgucaucgugcucaacgu

SEQ ID NO: 1437291 - RNA, 19 nt, Artificial Sequence
  Description of Artificial Sequence: Synthetic oligonucleotide
  Antisense strand to SEQ ID NO: 1437290
acguugagcacgaugacgc

SEQ ID NO: 1437292 - RNA, 19 nt, Artificial Sequence
  Description of Artificial Sequence: Synthetic oligonucleotide
  Sense strand starting at position 2406 of SEQ ID NO: 1243732
ggagcgagcucguguuuga

SEQ ID NO: 1437293 - RNA, 19 nt, Artificial Sequence
  Description of Artificial Sequence: Synthetic oligonucleotide
  Antisense strand to SEQ ID NO: 1437292
ucaaacacgagcucgcucc

SEQ ID NO: 1437294 - RNA, 19 nt, Artificial Sequence
  Description of Artificial Sequence: Synthetic oligonucleotide
  Sense strand starting at position 2724 of SEQ ID NO: 1243732
gcagcugccucuuuacuga

SEQ ID NO: 1437295 - RNA, 19 nt, Artificial Sequence
  Description of Artificial Sequence: Synthetic oligonucleotide
  Antisense strand to SEQ ID NO: 1437294
ucaguaaagaggcagcugc

SEQ ID NO: 1437296 - RNA, 19 nt, Artificial Sequence
  Description of Artificial Sequence: Synthetic oligonucleotide
  Sense strand starting at position 2943 of SEQ ID NO: 1243732
ccaucuccaguaggaaauu

SEQ ID NO: 1437297 - RNA, 19 nt, Artificial Sequence
  Description of Artificial Sequence: Synthetic oligonucleotide
  Antisense strand to SEQ ID NO: 1437296
aauuuccuacuggagaugg

SEQ ID NO: 1437298 - RNA, 19 nt, Artificial Sequence
  Description of Artificial Sequence: Synthetic oligonucleotide
  Sense strand starting at position 3014 of SEQ ID NO: 1243732
gcugaucaaucugcaguuu

SEQ ID NO: 1437299 - RNA, 19 nt, Artificial Sequence
  Description of Artificial Sequence: Synthetic oligonucleotide
  Antisense strand to SEQ ID NO: 1437298
aaacugcagauugaucagc

SEQ ID NO: 1437300 - RNA, 19 nt, Artificial Sequence
  Description of Artificial Sequence: Synthetic oligonucleotide
  Sense strand starting at position 3022 of SEQ ID NO: 1243732
aucugcaguuugugaacuu

SEQ ID NO: 1437301 - RNA, 19 nt, Artificial Sequence
  Description of Artificial Sequence: Synthetic oligonucleotide
  Antisense strand to SEQ ID NO: 1437300
aaguucacaaacugcagau

SEQ ID NO: 1437302 - RNA, 19 nt, Artificial Sequence
  Description of Artificial Sequence: Synthetic oligonucleotide
  Sense strand starting at position 3133 of SEQ ID NO: 1243732
gugccagucuuccagaaag

SEQ ID NO: 1437303 - RNA, 19 nt, Artificial Sequence
  Description of Artificial Sequence: Synthetic oligonucleotide
  Antisense strand to SEQ ID NO: 1437302
cuuucuggaagacuggcac

SEQ ID NO: 1437304 - RNA, 19 nt, Artificial Sequence
  Description of Artificial Sequence: Synthetic oligonucleotide
  Sense strand starting at position 3135 of SEQ ID NO: 1243732
gccagucuuccagaaagca

SEQ ID NO: 1437305 - RNA, 19 nt, Artificial Sequence
  Description of Artificial Sequence: Synthetic oligonucleotide
  Antisense strand to SEQ ID NO: 1437304
ugcuuucuggaagacuggc

SEQ ID NO: 1437306 - RNA, 19 nt, Artificial Sequence
  Description of Artificial Sequence: Synthetic oligonucleotide
  Sense strand starting at position 3482 of SEQ ID NO: 1243732
gaggcucacucauugcaga

SEQ ID NO: 1437307 - RNA, 19 nt, Artificial Sequence
  Description of Artificial Sequence: Synthetic oligonucleotide
  Antisense strand to SEQ ID NO: 1437306
ucugcaaugagugagccuc

SEQ ID NO: 1437308 - RNA, 19 nt, Artificial Sequence
  Description of Artificial Sequence: Synthetic oligonucleotide
  Sense strand starting at position 3483 of SEQ ID NO: 1243732
aggcucacucauugcagau

SEQ ID NO: 1437309 - RNA, 19 nt, Artificial Sequence
  Description of Artificial Sequence: Synthetic oligonucleotide
  Antisense strand to SEQ ID NO: 1437308
aucugcaaugagugagccu

SEQ ID NO: 1437310 - RNA, 19 nt, Artificial Sequence
  Description of Artificial Sequence: Synthetic oligonucleotide
  Sense strand starting at position 3552 of SEQ ID NO: 1243732
agucuacaguacugacaga

SEQ ID NO: 1437311 - RNA, 19 nt, Artificial Sequence
  Description of Artificial Sequence: Synthetic oligonucleotide
  Antisense strand to SEQ ID NO: 1437310
ucugucaguacuguagacu

SEQ ID NO: 1437312 - RNA, 19 nt, Artificial Sequence
  Description of Artificial Sequence: Synthetic oligonucleotide
  Sense strand starting at position 382 of SEQ ID NO: 1243733
agaggauucuagucaugau

SEQ ID NO: 1437313 - RNA, 19 nt, Artificial Sequence
  Description of Artificial Sequence: Synthetic oligonucleotide
  Antisense strand to SEQ ID NO: 1437312
aucaugacuagaauccucu

SEQ ID NO: 1437314 - RNA, 19 nt, Artificial Sequence
  Description of Artificial Sequence: Synthetic oligonucleotide
  Sense strand starting at position 386 of SEQ ID NO: 1243733
gauucuagucaugauggua

SEQ ID NO: 1437315 - RNA, 19 nt, Artificial Sequence
  Description of Artificial Sequence: Synthetic oligonucleotide
  Antisense strand to SEQ ID NO: 1437314
uaccaucaugacuagaauc

SEQ ID NO: 1437316 - RNA, 19 nt, Artificial Sequence
  Description of Artificial Sequence: Synthetic oligonucleotide
  Sense strand starting at position 576 of SEQ ID NO: 1243733
cucuauagauaugucuaua

SEQ ID NO: 1437317 - RNA, 19 nt, Artificial Sequence
  Description of Artificial Sequence: Synthetic oligonucleotide
  Antisense strand to SEQ ID NO: 1437316
uauagacauaucuauagag

SEQ ID NO: 1437318 - RNA, 19 nt, Artificial Sequence
  Description of Artificial Sequence: Synthetic oligonucleotide
  Sense strand starting at position 648 of SEQ ID NO: 1243733
cugagagcuguggagaauu

SEQ ID NO: 1437319 - RNA, 19 nt, Artificial Sequence
  Description of Artificial Sequence: Synthetic oligonucleotide
  Antisense strand to SEQ ID NO: 1437318
aauucuccacagcucucag

SEQ ID NO: 1437320 - RNA, 19 nt, Artificial Sequence
  Description of Artificial Sequence: Synthetic oligonucleotide
  Sense strand starting at position 690 of SEQ ID NO: 1243733
gccucugaaguagaaauua

SEQ ID NO: 1437321 - RNA, 19 nt, Artificial Sequence
  Description of Artificial Sequence: Synthetic oligonucleotide
  Antisense strand to SEQ ID NO: 1437320
uaauuucuacuucagaggc

SEQ ID NO: 1437322 - RNA, 19 nt, Artificial Sequence
  Description of Artificial Sequence: Synthetic oligonucleotide
  Sense strand starting at position 879 of SEQ ID NO: 1243733
cucauaucugugcacaaga

SEQ ID NO: 1437323 - RNA, 19 nt, Artificial Sequence
  Description of Artificial Sequence: Synthetic oligonucleotide
  Antisense strand to SEQ ID NO: 1437322
ucuugugcacagauaugag

SEQ ID NO: 1437324 - RNA, 19 nt, Artificial Sequence
  Description of Artificial Sequence: Synthetic oligonucleotide
  Sense strand starting at position 929 of SEQ ID NO: 1243733
aacagugguguggaaauua

SEQ ID NO: 1437325 - RNA, 19 nt, Artificial Sequence
  Description of Artificial Sequence: Synthetic oligonucleotide
  Antisense strand to SEQ ID NO: 1437324
uaauuuccacaccacuguu

SEQ ID NO: 1437326 - RNA, 19 nt, Artificial Sequence
  Description of Artificial Sequence: Synthetic oligonucleotide
  Sense strand starting at position 1392 of SEQ ID NO: 1243733
agagcagauuaagucagua

SEQ ID NO: 1437327 - RNA, 19 nt, Artificial Sequence
  Description of Artificial Sequence: Synthetic oligonucleotide
  Antisense strand to SEQ ID NO: 1437326
uacugacuuaaucugcucu

SEQ ID NO: 1437328 - RNA, 19 nt, Artificial Sequence
  Description of Artificial Sequence: Synthetic oligonucleotide
  Sense strand starting at position 1537 of SEQ ID NO: 1243733
ggccucucacuggauugua

SEQ ID NO: 1437329 - RNA, 19 nt, Artificial Sequence
  Description of Artificial Sequence: Synthetic oligonucleotide
  Antisense strand to SEQ ID NO: 1437328
uacaauccagugagaggcc

SEQ ID NO: 1437330 - RNA, 19 nt, Artificial Sequence
  Description of Artificial Sequence: Synthetic oligonucleotide
  Sense strand starting at position 1551 of SEQ ID NO: 1243733
uuguaaacauuugagauga

SEQ ID NO: 1437331 - RNA, 19 nt, Artificial Sequence
  Description of Artificial Sequence: Synthetic oligonucleotide
  Antisense strand to SEQ ID NO: 1437330
ucaucucaaauguuuacaa

SEQ ID NO: 1437332 - RNA, 19 nt, Artificial Sequence
  Description of Artificial Sequence: Synthetic oligonucleotide
  Sense strand starting at position 1553 of SEQ ID NO: 1243733
guaaacauuugagaugaua

SEQ ID NO: 1437333 - RNA, 19 nt, Artificial Sequence
  Description of Artificial Sequence: Synthetic oligonucleotide
  Antisense strand to SEQ ID NO: 1437332
uaucaucucaaauguuuac

SEQ ID NO: 1437334 - RNA, 19 nt, Artificial Sequence
  Description of Artificial Sequence: Synthetic oligonucleotide
  Sense strand starting at position 1684 of SEQ ID NO: 1243733
gggacuucccaggguguga

SEQ ID NO: 1437335 - RNA, 19 nt, Artificial Sequence
  Description of Artificial Sequence: Synthetic oligonucleotide
  Antisense strand to SEQ ID NO: 1437334
ucacacccugggaaguccc

SEQ ID NO: 1437336 - RNA, 19 nt, Artificial Sequence
  Description of Artificial Sequence: Synthetic oligonucleotide
  Sense strand starting at position 1686 of SEQ ID NO: 1243733
gacuucccagggugugaaa

SEQ ID NO: 1437337 - RNA, 19 nt, Artificial Sequence
  Description of Artificial Sequence: Synthetic oligonucleotide
  Antisense strand to SEQ ID NO: 1437336
uuucacacccugggaaguc

SEQ ID NO: 1437338 - RNA, 19 nt, Artificial Sequence
  Description of Artificial Sequence: Synthetic oligonucleotide
  Sense strand starting at position 2130 of SEQ ID NO: 1243733
gcacaagaauguccaggaa

SEQ ID NO: 1437339 - RNA, 19 nt, Artificial Sequence
  Description of Artificial Sequence: Synthetic oligonucleotide
  Antisense strand to SEQ ID NO: 1437338
uuccuggacauucuugugc

SEQ ID NO: 1437340 - RNA, 19 nt, Artificial Sequence
  Description of Artificial Sequence: Synthetic oligonucleotide
  Sense strand starting at position 2171 of SEQ ID NO: 1243733
auuucuguguucuccuuua

SEQ ID NO: 1437341 - RNA, 19 nt, Artificial Sequence
  Description of Artificial Sequence: Synthetic oligonucleotide
  Antisense strand to SEQ ID NO: 1437340
uaaaggagaacacagaaau

SEQ ID NO: 1437342 - RNA, 19 nt, Artificial Sequence
  Description of Artificial Sequence: Synthetic oligonucleotide
  Sense strand starting at position 2211 of SEQ ID NO: 1243733
cgugaaaccuaaucauaga

SEQ ID NO: 1437343 - RNA, 19 nt, Artificial Sequence
  Description of Artificial Sequence: Synthetic oligonucleotide
  Antisense strand to SEQ ID NO: 1437342
ucuaugauuagguuucacg

SEQ ID NO: 1437344 - RNA, 19 nt, Artificial Sequence
  Description of Artificial Sequence: Synthetic oligonucleotide
  Sense strand starting at position 2294 of SEQ ID NO: 1243733
ggaaaccuuggcuaacagu

SEQ ID NO: 1437345 - RNA, 19 nt, Artificial Sequence
  Description of Artificial Sequence: Synthetic oligonucleotide
  Antisense strand to SEQ ID NO: 1437344
acuguuagccaagguuucc

SEQ ID NO: 1437346 - RNA, 19 nt, Artificial Sequence
  Description of Artificial Sequence: Synthetic oligonucleotide
  Sense strand starting at position 2442 of SEQ ID NO: 1243733
uaaaguguugugggaauac

SEQ ID NO: 1437347 - RNA, 19 nt, Artificial Sequence
  Description of Artificial Sequence: Synthetic oligonucleotide
  Antisense strand to SEQ ID NO: 1437346
guauucccacaacacuuua

SEQ ID NO: 1437348 - RNA, 19 nt, Artificial Sequence
  Description of Artificial Sequence: Synthetic oligonucleotide
  Sense strand starting at position 2688 of SEQ ID NO: 1243733
agguucucagcucaaggau

SEQ ID NO: 1437349 - RNA, 19 nt, Artificial Sequence
  Description of Artificial Sequence: Synthetic oligonucleotide
  Antisense strand to SEQ ID NO: 1437348
auccuugagcugagaaccu

SEQ ID NO: 1437350 - RNA, 19 nt, Artificial Sequence
  Description of Artificial Sequence: Synthetic oligonucleotide
  Sense strand starting at position 2713 of SEQ ID NO: 1243733
gggcaagggugaccauauu

SEQ ID NO: 1437351 - RNA, 19 nt, Artificial Sequence
  Description of Artificial Sequence: Synthetic oligonucleotide
  Antisense strand to SEQ ID NO: 1437350
aauauggucacccuugccc

SEQ ID NO: 1437352 - RNA, 19 nt, Artificial Sequence
  Description of Artificial Sequence: Synthetic oligonucleotide
  Sense strand starting at position 2933 of SEQ ID NO: 1243733
aauguuaggcuuuagaaug

SEQ ID NO: 1437353 - RNA, 19 nt, Artificial Sequence
  Description of Artificial Sequence: Synthetic oligonucleotide
  Antisense strand to SEQ ID NO: 1437352
cauucuaaagccuaacauu

SEQ ID NO: 1437354 - RNA, 19 nt, Artificial Sequence
  Description of Artificial Sequence: Synthetic oligonucleotide
  Sense strand starting at position 2938 of SEQ ID NO: 1243733
uaggcuuuagaauguuaga

SEQ ID NO: 1437355 - RNA, 19 nt, Artificial Sequence
  Description of Artificial Sequence: Synthetic oligonucleotide
  Antisense strand to SEQ ID NO: 1437354
ucuaacauucuaaagccua

SEQ ID NO: 1437356 - RNA, 19 nt, Artificial Sequence
  Description of Artificial Sequence: Synthetic oligonucleotide
  Sense strand starting at position 3163 of SEQ ID NO: 1243733
gugacuaaugacugacuaa

SEQ ID NO: 1437357 - RNA, 19 nt, Artificial Sequence
  Description of Artificial Sequence: Synthetic oligonucleotide
  Antisense strand to SEQ ID NO: 1437356
uuagucagucauuagucac

SEQ ID NO: 1437358 - RNA, 19 nt, Artificial Sequence
  Description of Artificial Sequence: Synthetic oligonucleotide
  Sense strand starting at position 3177 of SEQ ID NO: 1243733
acuaacaugagacguugua

SEQ ID NO: 1437359 - RNA, 19 nt, Artificial Sequence
  Description of Artificial Sequence: Synthetic oligonucleotide
  Antisense strand to SEQ ID NO: 1437358
uacaacgucucauguuagu

SEQ ID NO: 1437360 - RNA, 19 nt, Artificial Sequence
  Description of Artificial Sequence: Synthetic oligonucleotide
  Sense strand starting at position 3187 of SEQ ID NO: 1243733
gacguuguauuucuuguaa

SEQ ID NO: 1437361 - RNA, 19 nt, Artificial Sequence
  Description of Artificial Sequence: Synthetic oligonucleotide
  Antisense strand to SEQ ID NO: 1437360
uuacaagaaauacaacguc

SEQ ID NO: 1437362 - RNA, 19 nt, Artificial Sequence
  Description of Artificial Sequence: Synthetic oligonucleotide
  Sense strand starting at position 3312 of SEQ ID NO: 1243733
acuuguguggucuagaaca

SEQ ID NO: 1437363 - RNA, 19 nt, Artificial Sequence
  Description of Artificial Sequence: Synthetic oligonucleotide
  Antisense strand to SEQ ID NO: 1437362
uguucuagaccacacaagu

SEQ ID NO: 1437364 - RNA, 19 nt, Artificial Sequence
  Description of Artificial Sequence: Synthetic oligonucleotide
  Sense strand starting at position 3314 of SEQ ID NO: 1243733
uuguguggucuagaacaga

SEQ ID NO: 1437365 - RNA, 19 nt, Artificial Sequence
  Description of Artificial Sequence: Synthetic oligonucleotide
  Antisense strand to SEQ ID NO: 1437364
ucuguucuagaccacacaa

SEQ ID NO: 1437366 - RNA, 19 nt, Artificial Sequence
  Description of Artificial Sequence: Synthetic oligonucleotide
  Sense strand starting at position 3335 of SEQ ID NO: 1243733
auacgaucucuugaguuau

SEQ ID NO: 1437367 - RNA, 19 nt, Artificial Sequence
  Description of Artificial Sequence: Synthetic oligonucleotide
  Antisense strand to SEQ ID NO: 1437366
auaacucaagagaucguau

SEQ ID NO: 1437368 - RNA, 19 nt, Artificial Sequence
  Description of Artificial Sequence: Synthetic oligonucleotide
  Sense strand starting at position 3337 of SEQ ID NO: 1243733
acgaucucuugaguuauaa

SEQ ID NO: 1437369 - RNA, 19 nt, Artificial Sequence
  Description of Artificial Sequence: Synthetic oligonucleotide
  Antisense strand to SEQ ID NO: 1437368
uuauaacucaagagaucgu

SEQ ID NO: 1437370 - RNA, 19 nt, Artificial Sequence
  Description of Artificial Sequence: Synthetic oligonucleotide
  Sense strand starting at position 3347 of SEQ ID NO: 1243733
gaguuauaacuugguuaac

SEQ ID NO: 1437371 - RNA, 19 nt, Artificial Sequence
  Description of Artificial Sequence: Synthetic oligonucleotide
  Antisense strand to SEQ ID NO: 1437370
guuaaccaaguuauaacuc

SEQ ID NO: 1437372 - RNA, 19 nt, Artificial Sequence
  Description of Artificial Sequence: Synthetic oligonucleotide
  Sense strand starting at position 3348 of SEQ ID NO: 1243733
aguuauaacuugguuaacu

SEQ ID NO: 1437373 - RNA, 19 nt, Artificial Sequence
  Description of Artificial Sequence: Synthetic oligonucleotide
  Antisense strand to SEQ ID NO: 1437372
aguuaaccaaguuauaacu

SEQ ID NO: 1437374 - RNA, 19 nt, Artificial Sequence
  Description of Artificial Sequence: Synthetic oligonucleotide
  Sense strand starting at position 3418 of SEQ ID NO: 1243733
gagacaaugcugugaugau

SEQ ID NO: 1437375 - RNA, 19 nt, Artificial Sequence
  Description of Artificial Sequence: Synthetic oligonucleotide
  Antisense strand to SEQ ID NO: 1437374
aucaucacagcauugucuc

SEQ ID NO: 1437376 - RNA, 19 nt, Artificial Sequence
  Description of Artificial Sequence: Synthetic oligonucleotide
  Sense strand starting at position 3437 of SEQ ID NO: 1243733
uggcauuuaucugcucagu

SEQ ID NO: 1437377 - RNA, 19 nt, Artificial Sequence
  Description of Artificial Sequence: Synthetic oligonucleotide
  Antisense strand to SEQ ID NO: 1437376
acugagcagauaaaugcca

SEQ ID NO: 1437378 - RNA, 19 nt, Artificial Sequence
  Description of Artificial Sequence: Synthetic oligonucleotide
  Sense strand starting at position 3439 of SEQ ID NO: 1243733
gcauuuaucugcucaguac

SEQ ID NO: 1437379 - RNA, 19 nt, Artificial Sequence
  Description of Artificial Sequence: Synthetic oligonucleotide
  Antisense strand to SEQ ID NO: 1437378
guacugagcagauaaaugc

SEQ ID NO: 1437380 - RNA, 19 nt, Artificial Sequence
  Description of Artificial Sequence: Synthetic oligonucleotide
  Sense strand starting at position 3453 of SEQ ID NO: 1243733
aguacauggucucugaaug

SEQ ID NO: 1437381 - RNA, 19 nt, Artificial Sequence
  Description of Artificial Sequence: Synthetic oligonucleotide
  Antisense strand to SEQ ID NO: 1437380
cauucagagaccauguacu

SEQ ID NO: 1437382 - RNA, 19 nt, Artificial Sequence
  Description of Artificial Sequence: Synthetic oligonucleotide
  Sense strand starting at position 3458 of SEQ ID NO: 1243733
auggucucugaaugguaau

SEQ ID NO: 1437383 - RNA, 19 nt, Artificial Sequence
  Description of Artificial Sequence: Synthetic oligonucleotide
  Antisense strand to SEQ ID NO: 1437382
auuaccauucagagaccau

SEQ ID NO: 1437384 - RNA, 19 nt, Artificial Sequence
  Description of Artificial Sequence: Synthetic oligonucleotide
  Sense strand starting at position 3480 of SEQ ID NO: 1243733
cagccaaggcauuagugau

SEQ ID NO: 1437385 - RNA, 19 nt, Artificial Sequence
  Description of Artificial Sequence: Synthetic oligonucleotide
  Antisense strand to SEQ ID NO: 1437384
aucacuaaugccuuggcug

SEQ ID NO: 1437386 - RNA, 19 nt, Artificial Sequence
  Description of Artificial Sequence: Synthetic oligonucleotide
  Sense strand starting at position 3488 of SEQ ID NO: 1243733
gcauuagugauggagagua

SEQ ID NO: 1437387 - RNA, 19 nt, Artificial Sequence
  Description of Artificial Sequence: Synthetic oligonucleotide
  Antisense strand to SEQ ID NO: 1437386
uacucuccaucacuaaugc

SEQ ID NO: 1437388 - RNA, 19 nt, Artificial Sequence
  Description of Artificial Sequence: Synthetic oligonucleotide
  Sense strand starting at position 3732 of SEQ ID NO: 1243733
ggcauauccaguugauaag

SEQ ID NO: 1437389 - RNA, 19 nt, Artificial Sequence
  Description of Artificial Sequence: Synthetic oligonucleotide
  Antisense strand to SEQ ID NO: 1437388
cuuaucaacuggauaugcc

SEQ ID NO: 1437390 - RNA, 19 nt, Artificial Sequence
  Description of Artificial Sequence: Synthetic oligonucleotide
  Sense strand starting at position 3770 of SEQ ID NO: 1243733
gguagaagguaagauuuau

SEQ ID NO: 1437391 - RNA, 19 nt, Artificial Sequence
  Description of Artificial Sequence: Synthetic oligonucleotide
  Antisense strand to SEQ ID NO: 1437390
auaaaucuuaccuucuacc

SEQ ID NO: 1437392 - RNA, 19 nt, Artificial Sequence
  Description of Artificial Sequence: Synthetic oligonucleotide
  Sense strand starting at position 167 of SEQ ID NO: 1243734
gaaugaagagguggucuuu

SEQ ID NO: 1437393 - RNA, 19 nt, Artificial Sequence
  Description of Artificial Sequence: Synthetic oligonucleotide
  Antisense strand to SEQ ID NO: 1437392
aaagaccaccucuucauuc

SEQ ID NO: 1437394 - RNA, 19 nt, Artificial Sequence
  Description of Artificial Sequence: Synthetic oligonucleotide
  Sense strand starting at position 265 of SEQ ID NO: 1243734
gcaguaaaccuuugaaugg

SEQ ID NO: 1437395 - RNA, 19 nt, Artificial Sequence
  Description of Artificial Sequence: Synthetic oligonucleotide
  Antisense strand to SEQ ID NO: 1437394
ccauucaaagguuuacugc

SEQ ID NO: 1437396 - RNA, 19 nt, Artificial Sequence
  Description of Artificial Sequence: Synthetic oligonucleotide
  Sense strand starting at position 458 of SEQ ID NO: 1243734
gagagcacuuaggcucaaa

SEQ ID NO: 1437397 - RNA, 19 nt, Artificial Sequence
  Description of Artificial Sequence: Synthetic oligonucleotide
  Antisense strand to SEQ ID NO: 1437396
uuugagccuaagugcucuc

SEQ ID NO: 1437398 - RNA, 19 nt, Artificial Sequence
  Description of Artificial Sequence: Synthetic oligonucleotide
  Sense strand starting at position 596 of SEQ ID NO: 1243734
ccaguucugcauggaugga

SEQ ID NO: 1437399 - RNA, 19 nt, Artificial Sequence
  Description of Artificial Sequence: Synthetic oligonucleotide
  Antisense strand to SEQ ID NO: 1437398
uccauccaugcagaacugg

SEQ ID NO: 1437400 - RNA, 19 nt, Artificial Sequence
  Description of Artificial Sequence: Synthetic oligonucleotide
  Sense strand starting at position 623 of SEQ ID NO: 1243734
gcgagaguucuggauaccu

SEQ ID NO: 1437401 - RNA, 19 nt, Artificial Sequence
  Description of Artificial Sequence: Synthetic oligonucleotide
  Antisense strand to SEQ ID NO: 1437400
agguauccagaacucucgc

SEQ ID NO: 1437402 - RNA, 19 nt, Artificial Sequence
  Description of Artificial Sequence: Synthetic oligonucleotide
  Sense strand starting at position 648 of SEQ ID NO: 1243734
agguccuugggacauguaa

SEQ ID NO: 1437403 - RNA, 19 nt, Artificial Sequence
  Description of Artificial Sequence: Synthetic oligonucleotide
  Antisense strand to SEQ ID NO: 1437402
uuacaugucccaaggaccu

SEQ ID NO: 1437404 - RNA, 19 nt, Artificial Sequence
  Description of Artificial Sequence: Synthetic oligonucleotide
  Sense strand starting at position 686 of SEQ ID NO: 1243734
ggguuugcuguuuauagau

SEQ ID NO: 1437405 - RNA, 19 nt, Artificial Sequence
  Description of Artificial Sequence: Synthetic oligonucleotide
  Antisense strand to SEQ ID NO: 1437404
aucuauaaacagcaaaccc

SEQ ID NO: 1437406 - RNA, 19 nt, Artificial Sequence
  Description of Artificial Sequence: Synthetic oligonucleotide
  Sense strand starting at position 699 of SEQ ID NO: 1243734
auagaugggcucuggagua

SEQ ID NO: 1437407 - RNA, 19 nt, Artificial Sequence
  Description of Artificial Sequence: Synthetic oligonucleotide
  Antisense strand to SEQ ID NO: 1437406
uacuccagagcccaucuau

SEQ ID NO: 1437408 - RNA, 19 nt, Artificial Sequence
  Description of Artificial Sequence: Synthetic oligonucleotide
  Sense strand starting at position 757 of SEQ ID NO: 1243734
ggaacugucacauggugag

SEQ ID NO: 1437409 - RNA, 19 nt, Artificial Sequence
  Description of Artificial Sequence: Synthetic oligonucleotide
  Antisense strand to SEQ ID NO: 1437408
cucaccaugugacaguucc

SEQ ID NO: 1437410 - RNA, 19 nt, Artificial Sequence
  Description of Artificial Sequence: Synthetic oligonucleotide
  Sense strand starting at position 771 of SEQ ID NO: 1243734
gugaguuggcucuacugac

SEQ ID NO: 1437411 - RNA, 19 nt, Artificial Sequence
  Description of Artificial Sequence: Synthetic oligonucleotide
  Antisense strand to SEQ ID NO: 1437410
gucaguagagccaacucac

SEQ ID NO: 1437412 - RNA, 19 nt, Artificial Sequence
  Description of Artificial Sequence: Synthetic oligonucleotide
  Sense strand starting at position 858 of SEQ ID NO: 1243734
ggacuccaccugugaugau

SEQ ID NO: 1437413 - RNA, 19 nt, Artificial Sequence
  Description of Artificial Sequence: Synthetic oligonucleotide
  Antisense strand to SEQ ID NO: 1437412
aucaucacagguggagucc

SEQ ID NO: 1437414 - RNA, 19 nt, Artificial Sequence
  Description of Artificial Sequence: Synthetic oligonucleotide
  Sense strand starting at position 959 of SEQ ID NO: 1243734
gguguacaccaucagaauc

SEQ ID NO: 1437415 - RNA, 19 nt, Artificial Sequence
  Description of Artificial Sequence: Synthetic oligonucleotide
  Antisense strand to SEQ ID NO: 1437414
gauucugaugguguacacc

SEQ ID NO: 1437416 - RNA, 19 nt, Artificial Sequence
  Description of Artificial Sequence: Synthetic oligonucleotide
  Sense strand starting at position 986 of SEQ ID NO: 1243734
cagagaguuugagcaauga

SEQ ID NO: 1437417 - RNA, 19 nt, Artificial Sequence
  Description of Artificial Sequence: Synthetic oligonucleotide
  Antisense strand to SEQ ID NO: 1437416
ucauugcucaaacucucug

SEQ ID NO: 1437418 - RNA, 19 nt, Artificial Sequence
  Description of Artificial Sequence: Synthetic oligonucleotide
  Sense strand starting at position 996 of SEQ ID NO: 1243734
gagcaaugaguccaaguuc

SEQ ID NO: 1437419 - RNA, 19 nt, Artificial Sequence
  Description of Artificial Sequence: Synthetic oligonucleotide
  Antisense strand to SEQ ID NO: 1437418
gaacuuggacucauugcuc

SEQ ID NO: 1437420 - RNA, 19 nt, Artificial Sequence
  Description of Artificial Sequence: Synthetic oligonucleotide
  Sense strand starting at position 1065 of SEQ ID NO: 1243734
uguuucugauucuucuaca

SEQ ID NO: 1437421 - RNA, 19 nt, Artificial Sequence
  Description of Artificial Sequence: Synthetic oligonucleotide
  Antisense strand to SEQ ID NO: 1437420
uguagaagaaucagaaaca

SEQ ID NO: 1437422 - RNA, 19 nt, Artificial Sequence
  Description of Artificial Sequence: Synthetic oligonucleotide
  Sense strand starting at position 1066 of SEQ ID NO: 1243734
guuucugauucuucuacag

SEQ ID NO: 1437423 - RNA, 19 nt, Artificial Sequence
  Description of Artificial Sequence: Synthetic oligonucleotide
  Antisense strand to SEQ ID NO: 1437422
cuguagaagaaucagaaac

SEQ ID NO: 1437424 - RNA, 19 nt, Artificial Sequence
  Description of Artificial Sequence: Synthetic oligonucleotide
  Sense strand starting at position 1279 of SEQ ID NO: 1243734
gauggugggucaucuucua

SEQ ID NO: 1437425 - RNA, 19 nt, Artificial Sequence
  Description of Artificial Sequence: Synthetic oligonucleotide
  Antisense strand to SEQ ID NO: 1437424
uagaagaugacccaccauc

SEQ ID NO: 1437426 - RNA, 19 nt, Artificial Sequence
  Description of Artificial Sequence: Synthetic oligonucleotide
  Sense strand starting at position 1304 of SEQ ID NO: 1243734
gugauuguaaguuauucuu

SEQ ID NO: 1437427 - RNA, 19 nt, Artificial Sequence
  Description of Artificial Sequence: Synthetic oligonucleotide
  Antisense strand to SEQ ID NO: 1437426
aagaauaacuuacaaucac

SEQ ID NO: 1437428 - RNA, 19 nt, Artificial Sequence
  Description of Artificial Sequence: Synthetic oligonucleotide
  Sense strand starting at position 1315 of SEQ ID NO: 1243734
uuauucuucuggucuugaa

SEQ ID NO: 1437429 - RNA, 19 nt, Artificial Sequence
  Description of Artificial Sequence: Synthetic oligonucleotide
  Antisense strand to SEQ ID NO: 1437428
uucaagaccagaagaauaa

SEQ ID NO: 1437430 - RNA, 19 nt, Artificial Sequence
  Description of Artificial Sequence: Synthetic oligonucleotide
  Sense strand starting at position 1336 of SEQ ID NO: 1243734
cucaacugaugaguagauu

SEQ ID NO: 1437431 - RNA, 19 nt, Artificial Sequence
  Description of Artificial Sequence: Synthetic oligonucleotide
  Antisense strand to SEQ ID NO: 1437430
aaucuacucaucaguugag

SEQ ID NO: 1437432 - RNA, 19 nt, Artificial Sequence
  Description of Artificial Sequence: Synthetic oligonucleotide
  Sense strand starting at position 1356 of SEQ ID NO: 1243734
ggcaucugggauugaugaa

SEQ ID NO: 1437433 - RNA, 19 nt, Artificial Sequence
  Description of Artificial Sequence: Synthetic oligonucleotide
  Antisense strand to SEQ ID NO: 1437432
uucaucaaucccagaugcc

SEQ ID NO: 1437434 - RNA, 19 nt, Artificial Sequence
  Description of Artificial Sequence: Synthetic oligonucleotide
  Sense strand starting at position 1512 of SEQ ID NO: 1243734
agaggaauggcgggaugau

SEQ ID NO: 1437435 - RNA, 19 nt, Artificial Sequence
  Description of Artificial Sequence: Synthetic oligonucleotide
  Antisense strand to SEQ ID NO: 1437434
aucaucccgccauuccucu

SEQ ID NO: 1437436 - RNA, 19 nt, Artificial Sequence
  Description of Artificial Sequence: Synthetic oligonucleotide
  Sense strand starting at position 1600 of SEQ ID NO: 1243734
gagacagaucgaggguagu

SEQ ID NO: 1437437 - RNA, 19 nt, Artificial Sequence
  Description of Artificial Sequence: Synthetic oligonucleotide
  Antisense strand to SEQ ID NO: 1437436
acuacccucgaucugucuc

SEQ ID NO: 1437438 - RNA, 19 nt, Artificial Sequence
  Description of Artificial Sequence: Synthetic oligonucleotide
  Sense strand starting at position 1653 of SEQ ID NO: 1243734
uucugaucuucggugggaa

SEQ ID NO: 1437439 - RNA, 19 nt, Artificial Sequence
  Description of Artificial Sequence: Synthetic oligonucleotide
  Antisense strand to SEQ ID NO: 1437438
uucccaccgaagaucagaa

SEQ ID NO: 1437440 - RNA, 19 nt, Artificial Sequence
  Description of Artificial Sequence: Synthetic oligonucleotide
  Sense strand starting at position 1693 of SEQ ID NO: 1243734
cuucgauggcuugaggcaa

SEQ ID NO: 1437441 - RNA, 19 nt, Artificial Sequence
  Description of Artificial Sequence: Synthetic oligonucleotide
  Antisense strand to SEQ ID NO: 1437440
uugccucaagccaucgaag

SEQ ID NO: 1437442 - RNA, 19 nt, Artificial Sequence
  Description of Artificial Sequence: Synthetic oligonucleotide
  Sense strand starting at position 1875 of SEQ ID NO: 1243734
uccuaaugaugccugaaua

SEQ ID NO: 1437443 - RNA, 19 nt, Artificial Sequence
  Description of Artificial Sequence: Synthetic oligonucleotide
  Antisense strand to SEQ ID NO: 1437442
uauucaggcaucauuagga

SEQ ID NO: 1437444 - RNA, 19 nt, Artificial Sequence
  Description of Artificial Sequence: Synthetic oligonucleotide
  Sense strand starting at position 1876 of SEQ ID NO: 1243734
ccuaaugaugccugaauau

SEQ ID NO: 1437445 - RNA, 19 nt, Artificial Sequence
  Description of Artificial Sequence: Synthetic oligonucleotide
  Antisense strand to SEQ ID NO: 1437444
auauucaggcaucauuagg

SEQ ID NO: 1437446 - RNA, 19 nt, Artificial Sequence
  Description of Artificial Sequence: Synthetic oligonucleotide
  Sense strand starting at position 1947 of SEQ ID NO: 1243734
uucuaagagugucucaaau

SEQ ID NO: 1437447 - RNA, 19 nt, Artificial Sequence
  Description of Artificial Sequence: Synthetic oligonucleotide
  Antisense strand to SEQ ID NO: 1437446
auuugagacacucuuagaa

SEQ ID NO: 1437448 - RNA, 19 nt, Artificial Sequence
  Description of Artificial Sequence: Synthetic oligonucleotide
  Sense strand starting at position 2009 of SEQ ID NO: 1243734
ggagcuuccuuccuauuaa

SEQ ID NO: 1437449 - RNA, 19 nt, Artificial Sequence
  Description of Artificial Sequence: Synthetic oligonucleotide
  Antisense strand to SEQ ID NO: 1437448
uuaauaggaaggaagcucc

SEQ ID NO: 1437450 - RNA, 19 nt, Artificial Sequence
  Description of Artificial Sequence: Synthetic oligonucleotide
  Sense strand starting at position 2079 of SEQ ID NO: 1243734
aaaggaaucuguggauuug

SEQ ID NO: 1437451 - RNA, 19 nt, Artificial Sequence
  Description of Artificial Sequence: Synthetic oligonucleotide
  Antisense strand to SEQ ID NO: 1437450
caaauccacagauuccuuu

SEQ ID NO: 1437452 - RNA, 19 nt, Artificial Sequence
  Description of Artificial Sequence: Synthetic oligonucleotide
  Sense strand starting at position 2089 of SEQ ID NO: 1243734
guggauuugucuuuggagu

SEQ ID NO: 1437453 - RNA, 19 nt, Artificial Sequence
  Description of Artificial Sequence: Synthetic oligonucleotide
  Antisense strand to SEQ ID NO: 1437452
acuccaaagacaaauccac

SEQ ID NO: 1437454 - RNA, 19 nt, Artificial Sequence
  Description of Artificial Sequence: Synthetic oligonucleotide
  Sense strand starting at position 2145 of SEQ ID NO: 1243734
gggauuuccuuguacauag

SEQ ID NO: 1437455 - RNA, 19 nt, Artificial Sequence
  Description of Artificial Sequence: Synthetic oligonucleotide
  Antisense strand to SEQ ID NO: 1437454
cuauguacaaggaaauccc

SEQ ID NO: 1437456 - RNA, 19 nt, Artificial Sequence
  Description of Artificial Sequence: Synthetic oligonucleotide
  Sense strand starting at position 2388 of SEQ ID NO: 1243734
ccaggucucauggauuguu

SEQ ID NO: 1437457 - RNA, 19 nt, Artificial Sequence
  Description of Artificial Sequence: Synthetic oligonucleotide
  Antisense strand to SEQ ID NO: 1437456
aacaauccaugagaccugg

SEQ ID NO: 1437458 - RNA, 19 nt, Artificial Sequence
  Description of Artificial Sequence: Synthetic oligonucleotide
  Sense strand starting at position 2454 of SEQ ID NO: 1243734
ucacauucuugcuccagga

SEQ ID NO: 1437459 - RNA, 19 nt, Artificial Sequence
  Description of Artificial Sequence: Synthetic oligonucleotide
  Antisense strand to SEQ ID NO: 1437458
uccuggagcaagaauguga

SEQ ID NO: 1437460 - RNA, 19 nt, Artificial Sequence
  Description of Artificial Sequence: Synthetic oligonucleotide
  Sense strand starting at position 3153 of SEQ ID NO: 1243734
uggaguuaaucauugguuu

SEQ ID NO: 1437461 - RNA, 19 nt, Artificial Sequence
  Description of Artificial Sequence: Synthetic oligonucleotide
  Antisense strand to SEQ ID NO: 1437460
aaaccaaugauuaacucca

SEQ ID NO: 1437462 - RNA, 19 nt, Artificial Sequence
  Description of Artificial Sequence: Synthetic oligonucleotide
  Sense strand starting at position 3154 of SEQ ID NO: 1243734
ggaguuaaucauugguuuc

SEQ ID NO: 1437463 - RNA, 19 nt, Artificial Sequence
  Description of Artificial Sequence: Synthetic oligonucleotide
  Antisense strand to SEQ ID NO: 1437462
gaaaccaaugauuaacucc

SEQ ID NO: 1437464 - RNA, 19 nt, Artificial Sequence
  Description of Artificial Sequence: Synthetic oligonucleotide
  Sense strand starting at position 3156 of SEQ ID NO: 1243734
aguuaaucauugguuucca

SEQ ID NO: 1437465 - RNA, 19 nt, Artificial Sequence
  Description of Artificial Sequence: Synthetic oligonucleotide
  Antisense strand to SEQ ID NO: 1437464
uggaaaccaaugauuaacu

SEQ ID NO: 1437466 - RNA, 19 nt, Artificial Sequence
  Description of Artificial Sequence: Synthetic oligonucleotide
  Sense strand starting at position 3199 of SEQ ID NO: 1243734
aggagaaauuaccugccuu

SEQ ID NO: 1437467 - RNA, 19 nt, Artificial Sequence
  Description of Artificial Sequence: Synthetic oligonucleotide
  Antisense strand to SEQ ID NO: 1437466
aaggcagguaauuucuccu

SEQ ID NO: 1437468 - RNA, 19 nt, Artificial Sequence
  Description of Artificial Sequence: Synthetic oligonucleotide
  Sense strand starting at position 3469 of SEQ ID NO: 1243734
ugaacucugaagggucauu

SEQ ID NO: 1437469 - RNA, 19 nt, Artificial Sequence
  Description of Artificial Sequence: Synthetic oligonucleotide
  Antisense strand to SEQ ID NO: 1437468
aaugacccuucagaguuca

SEQ ID NO: 1437470 - RNA, 19 nt, Artificial Sequence
  Description of Artificial Sequence: Synthetic oligonucleotide
  Sense strand starting at position 3474 of SEQ ID NO: 1243734
ucugaagggucauugagau

SEQ ID NO: 1437471 - RNA, 19 nt, Artificial Sequence
  Description of Artificial Sequence: Synthetic oligonucleotide
  Antisense strand to SEQ ID NO: 1437470
aucucaaugacccuucaga

SEQ ID NO: 1437472 - RNA, 19 nt, Artificial Sequence
  Description of Artificial Sequence: Synthetic oligonucleotide
  Sense strand starting at position 229 of SEQ ID NO: 1243735
gccuuuaucugggcccuga

SEQ ID NO: 1437473 - RNA, 19 nt, Artificial Sequence
  Description of Artificial Sequence: Synthetic oligonucleotide
  Antisense strand to SEQ ID NO: 1437472
ucagggcccagauaaaggc

SEQ ID NO: 1437474 - RNA, 19 nt, Artificial Sequence
  Description of Artificial Sequence: Synthetic oligonucleotide
  Sense strand starting at position 233 of SEQ ID NO: 1243735
uuaucugggcccugaagaa

SEQ ID NO: 1437475 - RNA, 19 nt, Artificial Sequence
  Description of Artificial Sequence: Synthetic oligonucleotide
  Antisense strand to SEQ ID NO: 1437474
uucuucagggcccagauaa

SEQ ID NO: 1437476 - RNA, 19 nt, Artificial Sequence
  Description of Artificial Sequence: Synthetic oligonucleotide
  Sense strand starting at position 365 of SEQ ID NO: 1243735
uugguaggguucucacuuu

SEQ ID NO: 1437477 - RNA, 19 nt, Artificial Sequence
  Description of Artificial Sequence: Synthetic oligonucleotide
  Antisense strand to SEQ ID NO: 1437476
aaagugagaacccuaccaa

SEQ ID NO: 1437478 - RNA, 19 nt, Artificial Sequence
  Description of Artificial Sequence: Synthetic oligonucleotide
  Sense strand starting at position 374 of SEQ ID NO: 1243735
uucucacuuucucgaaguu

SEQ ID NO: 1437479 - RNA, 19 nt, Artificial Sequence
  Description of Artificial Sequence: Synthetic oligonucleotide
  Antisense strand to SEQ ID NO: 1437478
aacuucgagaaagugagaa

SEQ ID NO: 1437480 - RNA, 19 nt, Artificial Sequence
  Description of Artificial Sequence: Synthetic oligonucleotide
  Sense strand starting at position 375 of SEQ ID NO: 1243735
ucucacuuucucgaaguuu

SEQ ID NO: 1437481 - RNA, 19 nt, Artificial Sequence
  Description of Artificial Sequence: Synthetic oligonucleotide
  Antisense strand to SEQ ID NO: 1437480
aaacuucgagaaagugaga

SEQ ID NO: 1437482 - RNA, 19 nt, Artificial Sequence
  Description of Artificial Sequence: Synthetic oligonucleotide
  Sense strand starting at position 425 of SEQ ID NO: 1243735
aguggagucccugaacuga

SEQ ID NO: 1437483 - RNA, 19 nt, Artificial Sequence
  Description of Artificial Sequence: Synthetic oligonucleotide
  Antisense strand to SEQ ID NO: 1437482
ucaguucagggacuccacu

SEQ ID NO: 1437484 - RNA, 19 nt, Artificial Sequence
  Description of Artificial Sequence: Synthetic oligonucleotide
  Sense strand starting at position 436 of SEQ ID NO: 1243735
ugaacugaguagugggaaa

SEQ ID NO: 1437485 - RNA, 19 nt, Artificial Sequence
  Description of Artificial Sequence: Synthetic oligonucleotide
  Antisense strand to SEQ ID NO: 1437484
uuucccacuacucaguuca

SEQ ID NO: 1437486 - RNA, 19 nt, Artificial Sequence
  Description of Artificial Sequence: Synthetic oligonucleotide
  Sense strand starting at position 463 of SEQ ID NO: 1243735
uccuaauucucuucuggga

SEQ ID NO: 1437487 - RNA, 19 nt, Artificial Sequence
  Description of Artificial Sequence: Synthetic oligonucleotide
  Antisense strand to SEQ ID NO: 1437486
ucccagaagagaauuagga

SEQ ID NO: 1437488 - RNA, 19 nt, Artificial Sequence
  Description of Artificial Sequence: Synthetic oligonucleotide
  Sense strand starting at position 465 of SEQ ID NO: 1243735
cuaauucucuucugggaga

SEQ ID NO: 1437489 - RNA, 19 nt, Artificial Sequence
  Description of Artificial Sequence: Synthetic oligonucleotide
  Antisense strand to SEQ ID NO: 1437488
ucucccagaagagaauuag

SEQ ID NO: 1437490 - RNA, 19 nt, Artificial Sequence
  Description of Artificial Sequence: Synthetic oligonucleotide
  Sense strand starting at position 488 of SEQ ID NO: 1243735
ucagguagagcuuggugau

SEQ ID NO: 1437491 - RNA, 19 nt, Artificial Sequence
  Description of Artificial Sequence: Synthetic oligonucleotide
  Antisense strand to SEQ ID NO: 1437490
aucaccaagcucuaccuga

SEQ ID NO: 1437492 - RNA, 19 nt, Artificial Sequence
  Description of Artificial Sequence: Synthetic oligonucleotide
  Sense strand starting at position 489 of SEQ ID NO: 1243735
cagguagagcuuggugauu

SEQ ID NO: 1437493 - RNA, 19 nt, Artificial Sequence
  Description of Artificial Sequence: Synthetic oligonucleotide
  Antisense strand to SEQ ID NO: 1437492
aaucaccaagcucuaccug

SEQ ID NO: 1437494 - RNA, 19 nt, Artificial Sequence
  Description of Artificial Sequence: Synthetic oligonucleotide
  Sense strand starting at position 491 of SEQ ID NO: 1243735
gguagagcuuggugauuua

SEQ ID NO: 1437495 - RNA, 19 nt, Artificial Sequence
  Description of Artificial Sequence: Synthetic oligonucleotide
  Antisense strand to SEQ ID NO: 1437494
uaaaucaccaagcucuacc

SEQ ID NO: 1437496 - RNA, 19 nt, Artificial Sequence
  Description of Artificial Sequence: Synthetic oligonucleotide
  Sense strand starting at position 546 of SEQ ID NO: 1243735
gucaccauaucccuggaaa

SEQ ID NO: 1437497 - RNA, 19 nt, Artificial Sequence
  Description of Artificial Sequence: Synthetic oligonucleotide
  Antisense strand to SEQ ID NO: 1437496
uuuccagggauauggugac

SEQ ID NO: 1437498 - RNA, 19 nt, Artificial Sequence
  Description of Artificial Sequence: Synthetic oligonucleotide
  Sense strand starting at position 693 of SEQ ID NO: 1243735
cugaccaacugugacaauu

SEQ ID NO: 1437499 - RNA, 19 nt, Artificial Sequence
  Description of Artificial Sequence: Synthetic oligonucleotide
  Antisense strand to SEQ ID NO: 1437498
aauugucacaguuggucag

SEQ ID NO: 1437500 - RNA, 19 nt, Artificial Sequence
  Description of Artificial Sequence: Synthetic oligonucleotide
  Sense strand starting at position 954 of SEQ ID NO: 1243735
uccacuucgcacugucaga

SEQ ID NO: 1437501 - RNA, 19 nt, Artificial Sequence
  Description of Artificial Sequence: Synthetic oligonucleotide
  Antisense strand to SEQ ID NO: 1437500
ucugacagugcgaagugga

SEQ ID NO: 1437502 - RNA, 19 nt, Artificial Sequence
  Description of Artificial Sequence: Synthetic oligonucleotide
  Sense strand starting at position 1480 of SEQ ID NO: 1243735
aagggaaacuaaugucugu

SEQ ID NO: 1437503 - RNA, 19 nt, Artificial Sequence
  Description of Artificial Sequence: Synthetic oligonucleotide
  Antisense strand to SEQ ID NO: 1437502
acagacauuaguuucccuu

SEQ ID NO: 1437504 - RNA, 19 nt, Artificial Sequence
  Description of Artificial Sequence: Synthetic oligonucleotide
  Sense strand starting at position 1490 of SEQ ID NO: 1243735
aaugucugucccugugcua

SEQ ID NO: 1437505 - RNA, 19 nt, Artificial Sequence
  Description of Artificial Sequence: Synthetic oligonucleotide
  Antisense strand to SEQ ID NO: 1437504
uagcacagggacagacauu

SEQ ID NO: 1437506 - RNA, 19 nt, Artificial Sequence
  Description of Artificial Sequence: Synthetic oligonucleotide
  Sense strand starting at position 2676 of SEQ ID NO: 1243735
ggcgcuguuacguguauua

SEQ ID NO: 1437507 - RNA, 19 nt, Artificial Sequence
  Description of Artificial Sequence: Synthetic oligonucleotide
  Antisense strand to SEQ ID NO: 1437506
uaauacacguaacagcgcc

SEQ ID NO: 1437508 - RNA, 19 nt, Artificial Sequence
  Description of Artificial Sequence: Synthetic oligonucleotide
  Sense strand starting at position 2678 of SEQ ID NO: 1243735
cgcuguuacguguauuacu

SEQ ID NO: 1437509 - RNA, 19 nt, Artificial Sequence
  Description of Artificial Sequence: Synthetic oligonucleotide
  Antisense strand to SEQ ID NO: 1437508
aguaauacacguaacagcg

SEQ ID NO: 1437510 - RNA, 19 nt, Artificial Sequence
  Description of Artificial Sequence: Synthetic oligonucleotide
  Sense strand starting at position 2681 of SEQ ID NO: 1243735
uguuacguguauuacuuua

SEQ ID NO: 1437511 - RNA, 19 nt, Artificial Sequence
  Description of Artificial Sequence: Synthetic oligonucleotide
  Antisense strand to SEQ ID NO: 1437510
uaaaguaauacacguaaca

SEQ ID NO: 1437512 - RNA, 19 nt, Artificial Sequence
  Description of Artificial Sequence: Synthetic oligonucleotide
  Sense strand starting at position 2727 of SEQ ID NO: 1243735
ugagaucugucauagccau

SEQ ID NO: 1437513 - RNA, 19 nt, Artificial Sequence
  Description of Artificial Sequence: Synthetic oligonucleotide
  Antisense strand to SEQ ID NO: 1437512
auggcuaugacagaucuca

SEQ ID NO: 1437514 - RNA, 19 nt, Artificial Sequence
  Description of Artificial Sequence: Synthetic oligonucleotide
  Sense strand starting at position 2914 of SEQ ID NO: 1243735
gggccucccagacguaauu

SEQ ID NO: 1437515 - RNA, 19 nt, Artificial Sequence
  Description of Artificial Sequence: Synthetic oligonucleotide
  Antisense strand to SEQ ID NO: 1437514
aauuacgucugggaggccc

SEQ ID NO: 1437516 - RNA, 19 nt, Artificial Sequence
  Description of Artificial Sequence: Synthetic oligonucleotide
  Sense strand starting at position 2923 of SEQ ID NO: 1243735
agacguaauucugacccua

SEQ ID NO: 1437517 - RNA, 19 nt, Artificial Sequence
  Description of Artificial Sequence: Synthetic oligonucleotide
  Antisense strand to SEQ ID NO: 1437516
uagggucagaauuacgucu

SEQ ID NO: 1437518 - RNA, 19 nt, Artificial Sequence
  Description of Artificial Sequence: Synthetic oligonucleotide
  Sense strand starting at position 3060 of SEQ ID NO: 1243735
uuccgagcauuaucuggaa

SEQ ID NO: 1437519 - RNA, 19 nt, Artificial Sequence
  Description of Artificial Sequence: Synthetic oligonucleotide
  Antisense strand to SEQ ID NO: 1437518
uuccagauaaugcucggaa

SEQ ID NO: 1437520 - RNA, 19 nt, Artificial Sequence
  Description of Artificial Sequence: Synthetic oligonucleotide
  Sense strand starting at position 3087 of SEQ ID NO: 1243735
uggguagacuguugaauuc

SEQ ID NO: 1437521 - RNA, 19 nt, Artificial Sequence
  Description of Artificial Sequence: Synthetic oligonucleotide
  Antisense strand to SEQ ID NO: 1437520
gaauucaacagucuaccca

SEQ ID NO: 1437522 - RNA, 19 nt, Artificial Sequence
  Description of Artificial Sequence: Synthetic oligonucleotide
  Sense strand starting at position 3438 of SEQ ID NO: 1243735
gcuacacauuucuggaaca

SEQ ID NO: 1437523 - RNA, 19 nt, Artificial Sequence
  Description of Artificial Sequence: Synthetic oligonucleotide
  Antisense strand to SEQ ID NO: 1437522
uguuccagaaauguguagc

SEQ ID NO: 1437524 - RNA, 19 nt, Artificial Sequence
  Description of Artificial Sequence: Synthetic oligonucleotide
  Sense strand starting at position 73 of SEQ ID NO: 1243736
ggugguuauuuacagaaua

SEQ ID NO: 1437525 - RNA, 19 nt, Artificial Sequence
  Description of Artificial Sequence: Synthetic oligonucleotide
  Antisense strand to SEQ ID NO: 1437524
uauucuguaaauaaccacc

SEQ ID NO: 1437526 - RNA, 19 nt, Artificial Sequence
  Description of Artificial Sequence: Synthetic oligonucleotide
  Sense strand starting at position 126 of SEQ ID NO: 1243736
ugggccuugccuuaaggaa

SEQ ID NO: 1437527 - RNA, 19 nt, Artificial Sequence
  Description of Artificial Sequence: Synthetic oligonucleotide
  Antisense strand to SEQ ID NO: 1437526
uuccuuaaggcaaggccca

SEQ ID NO: 1437528 - RNA, 19 nt, Artificial Sequence
  Description of Artificial Sequence: Synthetic oligonucleotide
  Sense strand starting at position 187 of SEQ ID NO: 1243736
acagcaccucuguaugauu

SEQ ID NO: 1437529 - RNA, 19 nt, Artificial Sequence
  Description of Artificial Sequence: Synthetic oligonucleotide
  Antisense strand to SEQ ID NO: 1437528
aaucauacagaggugcugu

SEQ ID NO: 1437530 - RNA, 19 nt, Artificial Sequence
  Description of Artificial Sequence: Synthetic oligonucleotide
  Sense strand starting at position 192 of SEQ ID NO: 1243736
accucuguaugauuagaaa

SEQ ID NO: 1437531 - RNA, 19 nt, Artificial Sequence
  Description of Artificial Sequence: Synthetic oligonucleotide
  Antisense strand to SEQ ID NO: 1437530
uuucuaaucauacagaggu

SEQ ID NO: 1437532 - RNA, 19 nt, Artificial Sequence
  Description of Artificial Sequence: Synthetic oligonucleotide
  Sense strand starting at position 213 of SEQ ID NO: 1243736
gugccuuauaguuagggaa

SEQ ID NO: 1437533 - RNA, 19 nt, Artificial Sequence
  Description of Artificial Sequence: Synthetic oligonucleotide
  Antisense strand to SEQ ID NO: 1437532
uucccuaacuauaaggcac

SEQ ID NO: 1437534 - RNA, 19 nt, Artificial Sequence
  Description of Artificial Sequence: Synthetic oligonucleotide
  Sense strand starting at position 245 of SEQ ID NO: 1243736
ccucuaugggcagaccaau

SEQ ID NO: 1437535 - RNA, 19 nt, Artificial Sequence
  Description of Artificial Sequence: Synthetic oligonucleotide
  Antisense strand to SEQ ID NO: 1437534
auuggucugcccauagagg

SEQ ID NO: 1437536 - RNA, 19 nt, Artificial Sequence
  Description of Artificial Sequence: Synthetic oligonucleotide
  Sense strand starting at position 407 of SEQ ID NO: 1243736
cagaaaguuccugggcuga

SEQ ID NO: 1437537 - RNA, 19 nt, Artificial Sequence
  Description of Artificial Sequence: Synthetic oligonucleotide
  Antisense strand to SEQ ID NO: 1437536
ucagcccaggaacuuucug

SEQ ID NO: 1437538 - RNA, 19 nt, Artificial Sequence
  Description of Artificial Sequence: Synthetic oligonucleotide
  Sense strand starting at position 409 of SEQ ID NO: 1243736
gaaaguuccugggcugaca

SEQ ID NO: 1437539 - RNA, 19 nt, Artificial Sequence
  Description of Artificial Sequence: Synthetic oligonucleotide
  Antisense strand to SEQ ID NO: 1437538
ugucagcccaggaacuuuc

SEQ ID NO: 1437540 - RNA, 19 nt, Artificial Sequence
  Description of Artificial Sequence: Synthetic oligonucleotide
  Sense strand starting at position 505 of SEQ ID NO: 1243736
gucugucacaucuggauag

SEQ ID NO: 1437541 - RNA, 19 nt, Artificial Sequence
  Description of Artificial Sequence: Synthetic oligonucleotide
  Antisense strand to SEQ ID NO: 1437540
cuauccagaugugacagac

SEQ ID NO: 1437542 - RNA, 19 nt, Artificial Sequence
  Description of Artificial Sequence: Synthetic oligonucleotide
  Sense strand starting at position 519 of SEQ ID NO: 1243736
gauagcuagguuuguaaag

SEQ ID NO: 1437543 - RNA, 19 nt, Artificial Sequence
  Description of Artificial Sequence: Synthetic oligonucleotide
  Antisense strand to SEQ ID NO: 1437542
cuuuacaaaccuagcuauc

SEQ ID NO: 1437544 - RNA, 19 nt, Artificial Sequence
  Description of Artificial Sequence: Synthetic oligonucleotide
  Sense strand starting at position 961 of SEQ ID NO: 1243736
aaagguacugcucaugauu

SEQ ID NO: 1437545 - RNA, 19 nt, Artificial Sequence
  Description of Artificial Sequence: Synthetic oligonucleotide
  Antisense strand to SEQ ID NO: 1437544
aaucaugagcaguaccuuu

SEQ ID NO: 1437546 - RNA, 19 nt, Artificial Sequence
  Description of Artificial Sequence: Synthetic oligonucleotide
  Sense strand starting at position 981 of SEQ ID NO: 1243736
guguucuagccuucugguu

SEQ ID NO: 1437547 - RNA, 19 nt, Artificial Sequence
  Description of Artificial Sequence: Synthetic oligonucleotide
  Antisense strand to SEQ ID NO: 1437546
aaccagaaggcuagaacac

SEQ ID NO: 1437548 - RNA, 19 nt, Artificial Sequence
  Description of Artificial Sequence: Synthetic oligonucleotide
  Sense strand starting at position 1031 of SEQ ID NO: 1243736
aaggguuccagagauguuu

SEQ ID NO: 1437549 - RNA, 19 nt, Artificial Sequence
  Description of Artificial Sequence: Synthetic oligonucleotide
  Antisense strand to SEQ ID NO: 1437548
aaacaucucuggaacccuu

SEQ ID NO: 1437550 - RNA, 19 nt, Artificial Sequence
  Description of Artificial Sequence: Synthetic oligonucleotide
  Sense strand starting at position 1098 of SEQ ID NO: 1243736
uugagugcugcgcuaugga

SEQ ID NO: 1437551 - RNA, 19 nt, Artificial Sequence
  Description of Artificial Sequence: Synthetic oligonucleotide
  Antisense strand to SEQ ID NO: 1437550
uccauagcgcagcacucaa

SEQ ID NO: 1437552 - RNA, 19 nt, Artificial Sequence
  Description of Artificial Sequence: Synthetic oligonucleotide
  Sense strand starting at position 1140 of SEQ ID NO: 1243736
ugaggagccgcugaacauu

SEQ ID NO: 1437553 - RNA, 19 nt, Artificial Sequence
  Description of Artificial Sequence: Synthetic oligonucleotide
  Antisense strand to SEQ ID NO: 1437552
aauguucagcggcuccuca

SEQ ID NO: 1437554 - RNA, 19 nt, Artificial Sequence
  Description of Artificial Sequence: Synthetic oligonucleotide
  Sense strand starting at position 1192 of SEQ ID NO: 1243736
ggauguucccucugacaag

SEQ ID NO: 1437555 - RNA, 19 nt, Artificial Sequence
  Description of Artificial Sequence: Synthetic oligonucleotide
  Antisense strand to SEQ ID NO: 1437554
cuugucagagggaacaucc

SEQ ID NO: 1437556 - RNA, 19 nt, Artificial Sequence
  Description of Artificial Sequence: Synthetic oligonucleotide
  Sense strand starting at position 1291 of SEQ ID NO: 1243736
ugaugaagcagauguuaag

SEQ ID NO: 1437557 - RNA, 19 nt, Artificial Sequence
  Description of Artificial Sequence: Synthetic oligonucleotide
  Antisense strand to SEQ ID NO: 1437556
cuuaacaucugcuucauca

SEQ ID NO: 1437558 - RNA, 19 nt, Artificial Sequence
  Description of Artificial Sequence: Synthetic oligonucleotide
  Sense strand starting at position 1303 of SEQ ID NO: 1243736
uguuaagacuauucuggag

SEQ ID NO: 1437559 - RNA, 19 nt, Artificial Sequence
  Description of Artificial Sequence: Synthetic oligonucleotide
  Antisense strand to SEQ ID NO: 1437558
cuccagaauagucuuaaca

SEQ ID NO: 1437560 - RNA, 19 nt, Artificial Sequence
  Description of Artificial Sequence: Synthetic oligonucleotide
  Sense strand starting at position 2023 of SEQ ID NO: 1243736
auagaacuuugucucaugu

SEQ ID NO: 1437561 - RNA, 19 nt, Artificial Sequence
  Description of Artificial Sequence: Synthetic oligonucleotide
  Antisense strand to SEQ ID NO: 1437560
acaugagacaaaguucuau

SEQ ID NO: 1437562 - RNA, 19 nt, Artificial Sequence
  Description of Artificial Sequence: Synthetic oligonucleotide
  Sense strand starting at position 2093 of SEQ ID NO: 1243736
uaaggcucugcccaggaau

SEQ ID NO: 1437563 - RNA, 19 nt, Artificial Sequence
  Description of Artificial Sequence: Synthetic oligonucleotide
  Antisense strand to SEQ ID NO: 1437562
auuccugggcagagccuua

SEQ ID NO: 1437564 - RNA, 19 nt, Artificial Sequence
  Description of Artificial Sequence: Synthetic oligonucleotide
  Sense strand starting at position 2095 of SEQ ID NO: 1243736
aggcucugcccaggaauaa

SEQ ID NO: 1437565 - RNA, 19 nt, Artificial Sequence
  Description of Artificial Sequence: Synthetic oligonucleotide
  Antisense strand to SEQ ID NO: 1437564
uuauuccugggcagagccu

SEQ ID NO: 1437566 - RNA, 19 nt, Artificial Sequence
  Description of Artificial Sequence: Synthetic oligonucleotide
  Sense strand starting at position 2096 of SEQ ID NO: 1243736
ggcucugcccaggaauaau

SEQ ID NO: 1437567 - RNA, 19 nt, Artificial Sequence
  Description of Artificial Sequence: Synthetic oligonucleotide
  Antisense strand to SEQ ID NO: 1437566
auuauuccugggcagagcc

SEQ ID NO: 1437568 - RNA, 19 nt, Artificial Sequence
  Description of Artificial Sequence: Synthetic oligonucleotide
  Sense strand starting at position 2307 of SEQ ID NO: 1243736
cuguaagucagagauagua

SEQ ID NO: 1437569 - RNA, 19 nt, Artificial Sequence
  Description of Artificial Sequence: Synthetic oligonucleotide
  Antisense strand to SEQ ID NO: 1437568
uacuaucucugacuuacag

SEQ ID NO: 1437570 - RNA, 19 nt, Artificial Sequence
  Description of Artificial Sequence: Synthetic oligonucleotide
  Sense strand starting at position 2360 of SEQ ID NO: 1243736
cacugaaagcacuggguuu

SEQ ID NO: 1437571 - RNA, 19 nt, Artificial Sequence
  Description of Artificial Sequence: Synthetic oligonucleotide
  Antisense strand to SEQ ID NO: 1437570
aaacccagugcuuucagug

SEQ ID NO: 1437572 - RNA, 19 nt, Artificial Sequence
  Description of Artificial Sequence: Synthetic oligonucleotide
  Sense strand starting at position 2654 of SEQ ID NO: 1243736
cagagaggaauguguagau

SEQ ID NO: 1437573 - RNA, 19 nt, Artificial Sequence
  Description of Artificial Sequence: Synthetic oligonucleotide
  Antisense strand to SEQ ID NO: 1437572
aucuacacauuccucucug

SEQ ID NO: 1437574 - RNA, 19 nt, Artificial Sequence
  Description of Artificial Sequence: Synthetic oligonucleotide
  Sense strand starting at position 2657 of SEQ ID NO: 1243736
agaggaauguguagaugga

SEQ ID NO: 1437575 - RNA, 19 nt, Artificial Sequence
  Description of Artificial Sequence: Synthetic oligonucleotide
  Antisense strand to SEQ ID NO: 1437574
uccaucuacacauuccucu

SEQ ID NO: 1437576 - RNA, 19 nt, Artificial Sequence
  Description of Artificial Sequence: Synthetic oligonucleotide
  Sense strand starting at position 2661 of SEQ ID NO: 1243736
gaauguguagauggacaau

SEQ ID NO: 1437577 - RNA, 19 nt, Artificial Sequence
  Description of Artificial Sequence: Synthetic oligonucleotide
  Antisense strand to SEQ ID NO: 1437576
auuguccaucuacacauuc

SEQ ID NO: 1437578 - RNA, 19 nt, Artificial Sequence
  Description of Artificial Sequence: Synthetic oligonucleotide
  Sense strand starting at position 2703 of SEQ ID NO: 1243736
ccuccaucuguugagauga

SEQ ID NO: 1437579 - RNA, 19 nt, Artificial Sequence
  Description of Artificial Sequence: Synthetic oligonucleotide
  Antisense strand to SEQ ID NO: 1437578
ucaucucaacagauggagg

SEQ ID NO: 1437580 - RNA, 19 nt, Artificial Sequence
  Description of Artificial Sequence: Synthetic oligonucleotide
  Sense strand starting at position 2719 of SEQ ID NO: 1243736
ugaaguugcugaccucaaa

SEQ ID NO: 1437581 - RNA, 19 nt, Artificial Sequence
  Description of Artificial Sequence: Synthetic oligonucleotide
  Antisense strand to SEQ ID NO: 1437580
uuugaggucagcaacuuca

SEQ ID NO: 1437582 - RNA, 19 nt, Artificial Sequence
  Description of Artificial Sequence: Synthetic oligonucleotide
  Sense strand starting at position 2738 of SEQ ID NO: 1243736
gagagcccagucuaauagu

SEQ ID NO: 1437583 - RNA, 19 nt, Artificial Sequence
  Description of Artificial Sequence: Synthetic oligonucleotide
  Antisense strand to SEQ ID NO: 1437582
acuauuagacugggcucuc

SEQ ID NO: 1437584 - RNA, 19 nt, Artificial Sequence
  Description of Artificial Sequence: Synthetic oligonucleotide
  Sense strand starting at position 2819 of SEQ ID NO: 1243736
cuaaguuugguggaggcaa

SEQ ID NO: 1437585 - RNA, 19 nt, Artificial Sequence
  Description of Artificial Sequence: Synthetic oligonucleotide
  Antisense strand to SEQ ID NO: 1437584
uugccuccaccaaacuuag

SEQ ID NO: 1437586 - RNA, 19 nt, Artificial Sequence
  Description of Artificial Sequence: Synthetic oligonucleotide
  Sense strand starting at position 2877 of SEQ ID NO: 1243736
ggaaucucguagucacaag

SEQ ID NO: 1437587 - RNA, 19 nt, Artificial Sequence
  Description of Artificial Sequence: Synthetic oligonucleotide
  Antisense strand to SEQ ID NO: 1437586
cuugugacuacgagauucc

SEQ ID NO: 1437588 - RNA, 19 nt, Artificial Sequence
  Description of Artificial Sequence: Synthetic oligonucleotide
  Sense strand starting at position 3127 of SEQ ID NO: 1243736
agagguuugcauuacuaca

SEQ ID NO: 1437589 - RNA, 19 nt, Artificial Sequence
  Description of Artificial Sequence: Synthetic oligonucleotide
  Antisense strand to SEQ ID NO: 1437588
uguaguaaugcaaaccucu

SEQ ID NO: 1437590 - RNA, 19 nt, Artificial Sequence
  Description of Artificial Sequence: Synthetic oligonucleotide
  Sense strand starting at position 3129 of SEQ ID NO: 1243736
agguuugcauuacuacaga

SEQ ID NO: 1437591 - RNA, 19 nt, Artificial Sequence
  Description of Artificial Sequence: Synthetic oligonucleotide
  Antisense strand to SEQ ID NO: 1437590
ucuguaguaaugcaaaccu

SEQ ID NO: 1437592 - RNA, 19 nt, Artificial Sequence
  Description of Artificial Sequence: Synthetic oligonucleotide
  Sense strand starting at position 3497 of SEQ ID NO: 1243736
auaauugguagugagcaaa

SEQ ID NO: 1437593 - RNA, 19 nt, Artificial Sequence
  Description of Artificial Sequence: Synthetic oligonucleotide
  Antisense strand to SEQ ID NO: 1437592
uuugcucacuaccaauuau

SEQ ID NO: 1437594 - RNA, 19 nt, Artificial Sequence
  Description of Artificial Sequence: Synthetic oligonucleotide
  Sense strand starting at position 3633 of SEQ ID NO: 1243736
caaggagaauugucuccca

SEQ ID NO: 1437595 - RNA, 19 nt, Artificial Sequence
  Description of Artificial Sequence: Synthetic oligonucleotide
  Antisense strand to SEQ ID NO: 1437594
ugggagacaauucuccuug

SEQ ID NO: 1437596 - RNA, 19 nt, Artificial Sequence
  Description of Artificial Sequence: Synthetic oligonucleotide
  Sense strand starting at position 3700 of SEQ ID NO: 1243736
ugcacacucugguugauuu

SEQ ID NO: 1437597 - RNA, 19 nt, Artificial Sequence
  Description of Artificial Sequence: Synthetic oligonucleotide
  Antisense strand to SEQ ID NO: 1437596
aaaucaaccagagugugca

SEQ ID NO: 1437598 - RNA, 19 nt, Artificial Sequence
  Description of Artificial Sequence: Synthetic oligonucleotide
  Sense strand starting at position 3808 of SEQ ID NO: 1243736
ucaagaucgcauuacagga

SEQ ID NO: 1437599 - RNA, 19 nt, Artificial Sequence
  Description of Artificial Sequence: Synthetic oligonucleotide
  Antisense strand to SEQ ID NO: 1437598
uccuguaaugcgaucuuga

SEQ ID NO: 1437600 - RNA, 19 nt, Artificial Sequence
  Description of Artificial Sequence: Synthetic oligonucleotide
  Sense strand starting at position 3813 of SEQ ID NO: 1243736
aucgcauuacaggaacaau

SEQ ID NO: 1437601 - RNA, 19 nt, Artificial Sequence
  Description of Artificial Sequence: Synthetic oligonucleotide
  Antisense strand to SEQ ID NO: 1437600
auuguuccuguaaugcgau

SEQ ID NO: 1437602 - RNA, 19 nt, Artificial Sequence
  Description of Artificial Sequence: Synthetic oligonucleotide
  Sense strand starting at position 3879 of SEQ ID NO: 1243736
ugagcaaucucacugagac

SEQ ID NO: 1437603 - RNA, 19 nt, Artificial Sequence
  Description of Artificial Sequence: Synthetic oligonucleotide
  Antisense strand to SEQ ID NO: 1437602
gucucagugagauugcuca

SEQ ID NO: 1437604 - RNA, 19 nt, Artificial Sequence
  Description of Artificial Sequence: Synthetic oligonucleotide
  Sense strand starting at position 69 of SEQ ID NO: 1243737
gguggaacuccucaauugu

SEQ ID NO: 1437605 - RNA, 19 nt, Artificial Sequence
  Description of Artificial Sequence: Synthetic oligonucleotide
  Antisense strand to SEQ ID NO: 1437604
acaauugaggaguuccacc

SEQ ID NO: 1437606 - RNA, 19 nt, Artificial Sequence
  Description of Artificial Sequence: Synthetic oligonucleotide
  Sense strand starting at position 104 of SEQ ID NO: 1243737
gcagcuaaaugacugagau

SEQ ID NO: 1437607 - RNA, 19 nt, Artificial Sequence
  Description of Artificial Sequence: Synthetic oligonucleotide
  Antisense strand to SEQ ID NO: 1437606
aucucagucauuuagcugc

SEQ ID NO: 1437608 - RNA, 19 nt, Artificial Sequence
  Description of Artificial Sequence: Synthetic oligonucleotide
  Sense strand starting at position 194 of SEQ ID NO: 1243737
ggaaguugcauggagcaga

SEQ ID NO: 1437609 - RNA, 19 nt, Artificial Sequence
  Description of Artificial Sequence: Synthetic oligonucleotide
  Antisense strand to SEQ ID NO: 1437608
ucugcuccaugcaacuucc

SEQ ID NO: 1437610 - RNA, 19 nt, Artificial Sequence
  Description of Artificial Sequence: Synthetic oligonucleotide
  Sense strand starting at position 291 of SEQ ID NO: 1243737
guguguggacacuagcaaa

SEQ ID NO: 1437611 - RNA, 19 nt, Artificial Sequence
  Description of Artificial Sequence: Synthetic oligonucleotide
  Antisense strand to SEQ ID NO: 1437610
uuugcuaguguccacacac

SEQ ID NO: 1437612 - RNA, 19 nt, Artificial Sequence
  Description of Artificial Sequence: Synthetic oligonucleotide
  Sense strand starting at position 339 of SEQ ID NO: 1243737
gggucauagcccgaaagga

SEQ ID NO: 1437613 - RNA, 19 nt, Artificial Sequence
  Description of Artificial Sequence: Synthetic oligonucleotide
  Antisense strand to SEQ ID NO: 1437612
uccuuucgggcuaugaccc

SEQ ID NO: 1437614 - RNA, 19 nt, Artificial Sequence
  Description of Artificial Sequence: Synthetic oligonucleotide
  Sense strand starting at position 473 of SEQ ID NO: 1243737
aguauaacuuuccuggaag

SEQ ID NO: 1437615 - RNA, 19 nt, Artificial Sequence
  Description of Artificial Sequence: Synthetic oligonucleotide
  Antisense strand to SEQ ID NO: 1437614
cuuccaggaaaguuauacu

SEQ ID NO: 1437616 - RNA, 19 nt, Artificial Sequence
  Description of Artificial Sequence: Synthetic oligonucleotide
  Sense strand starting at position 830 of SEQ ID NO: 1243737
agacauaauguuugagcuu

SEQ ID NO: 1437617 - RNA, 19 nt, Artificial Sequence
  Description of Artificial Sequence: Synthetic oligonucleotide
  Antisense strand to SEQ ID NO: 1437616
aagcucaaacauuaugucu

SEQ ID NO: 1437618 - RNA, 19 nt, Artificial Sequence
  Description of Artificial Sequence: Synthetic oligonucleotide
  Sense strand starting at position 870 of SEQ ID NO: 1243737
acuaaauaguuugcuggaa

SEQ ID NO: 1437619 - RNA, 19 nt, Artificial Sequence
  Description of Artificial Sequence: Synthetic oligonucleotide
  Antisense strand to SEQ ID NO: 1437618
uuccagcaaacuauuuagu

SEQ ID NO: 1437620 - RNA, 19 nt, Artificial Sequence
  Description of Artificial Sequence: Synthetic oligonucleotide
  Sense strand starting at position 871 of SEQ ID NO: 1243737
cuaaauaguuugcuggaaa

SEQ ID NO: 1437621 - RNA, 19 nt, Artificial Sequence
  Description of Artificial Sequence: Synthetic oligonucleotide
  Antisense strand to SEQ ID NO: 1437620
uuuccagcaaacuauuuag

SEQ ID NO: 1437622 - RNA, 19 nt, Artificial Sequence
  Description of Artificial Sequence: Synthetic oligonucleotide
  Sense strand starting at position 892 of SEQ ID NO: 1243737
accacauguuccuuccaga

SEQ ID NO: 1437623 - RNA, 19 nt, Artificial Sequence
  Description of Artificial Sequence: Synthetic oligonucleotide
  Antisense strand to SEQ ID NO: 1437622
ucuggaaggaacauguggu

SEQ ID NO: 1437624 - RNA, 19 nt, Artificial Sequence
  Description of Artificial Sequence: Synthetic oligonucleotide
  Sense strand starting at position 1044 of SEQ ID NO: 1243737
aucaaaugugggugaccaa

SEQ ID NO: 1437625 - RNA, 19 nt, Artificial Sequence
  Description of Artificial Sequence: Synthetic oligonucleotide
  Antisense strand to SEQ ID NO: 1437624
uuggucacccacauuugau

SEQ ID NO: 1437626 - RNA, 19 nt, Artificial Sequence
  Description of Artificial Sequence: Synthetic oligonucleotide
  Sense strand starting at position 1245 of SEQ ID NO: 1243737
cacagauaugucugacagu

SEQ ID NO: 1437627 - RNA, 19 nt, Artificial Sequence
  Description of Artificial Sequence: Synthetic oligonucleotide
  Antisense strand to SEQ ID NO: 1437626
acugucagacauaucugug

SEQ ID NO: 1437628 - RNA, 19 nt, Artificial Sequence
  Description of Artificial Sequence: Synthetic oligonucleotide
  Sense strand starting at position 1263 of SEQ ID NO: 1243737
uuauuaccagcagaagagu

SEQ ID NO: 1437629 - RNA, 19 nt, Artificial Sequence
  Description of Artificial Sequence: Synthetic oligonucleotide
  Antisense strand to SEQ ID NO: 1437628
acucuucugcugguaauaa

SEQ ID NO: 1437630 - RNA, 19 nt, Artificial Sequence
  Description of Artificial Sequence: Synthetic oligonucleotide
  Sense strand starting at position 1362 of SEQ ID NO: 1243737
augggugcuccagaaagcu

SEQ ID NO: 1437631 - RNA, 19 nt, Artificial Sequence
  Description of Artificial Sequence: Synthetic oligonucleotide
  Antisense strand to SEQ ID NO: 1437630
agcuuucuggagcacccau

SEQ ID NO: 1437632 - RNA, 19 nt, Artificial Sequence
  Description of Artificial Sequence: Synthetic oligonucleotide
  Sense strand starting at position 1573 of SEQ ID NO: 1243737
uguguucuugcagccgaga

SEQ ID NO: 1437633 - RNA, 19 nt, Artificial Sequence
  Description of Artificial Sequence: Synthetic oligonucleotide
  Antisense strand to SEQ ID NO: 1437632
ucucggcugcaagaacaca

SEQ ID NO: 1437634 - RNA, 19 nt, Artificial Sequence
  Description of Artificial Sequence: Synthetic oligonucleotide
  Sense strand starting at position 1660 of SEQ ID NO: 1243737
gggcguaagggugaucaca

SEQ ID NO: 1437635 - RNA, 19 nt, Artificial Sequence
  Description of Artificial Sequence: Synthetic oligonucleotide
  Antisense strand to SEQ ID NO: 1437634
ugugaucacccuuacgccc

SEQ ID NO: 1437636 - RNA, 19 nt, Artificial Sequence
  Description of Artificial Sequence: Synthetic oligonucleotide
  Sense strand starting at position 1715 of SEQ ID NO: 1243737
ugggccuuuccgucgugau

SEQ ID NO: 1437637 - RNA, 19 nt, Artificial Sequence
  Description of Artificial Sequence: Synthetic oligonucleotide
  Antisense strand to SEQ ID NO: 1437636
aucacgacggaaaggccca

SEQ ID NO: 1437638 - RNA, 19 nt, Artificial Sequence
  Description of Artificial Sequence: Synthetic oligonucleotide
  Sense strand starting at position 2167 of SEQ ID NO: 1243737
ucugacaucguauacauca

SEQ ID NO: 1437639 - RNA, 19 nt, Artificial Sequence
  Description of Artificial Sequence: Synthetic oligonucleotide
  Antisense strand to SEQ ID NO: 1437638
ugauguauacgaugucaga

SEQ ID NO: 1437640 - RNA, 19 nt, Artificial Sequence
  Description of Artificial Sequence: Synthetic oligonucleotide
  Sense strand starting at position 2503 of SEQ ID NO: 1243737
ugaauuauucugcaauguu

SEQ ID NO: 1437641 - RNA, 19 nt, Artificial Sequence
  Description of Artificial Sequence: Synthetic oligonucleotide
  Antisense strand to SEQ ID NO: 1437640
aacauugcagaauaauuca

SEQ ID NO: 1437642 - RNA, 19 nt, Artificial Sequence
  Description of Artificial Sequence: Synthetic oligonucleotide
  Sense strand starting at position 2641 of SEQ ID NO: 1243737
uuugucuuugcgucguaga

SEQ ID NO: 1437643 - RNA, 19 nt, Artificial Sequence
  Description of Artificial Sequence: Synthetic oligonucleotide
  Antisense strand to SEQ ID NO: 1437642
ucuacgacgcaaagacaaa

SEQ ID NO: 1437644 - RNA, 19 nt, Artificial Sequence
  Description of Artificial Sequence: Synthetic oligonucleotide
  Sense strand starting at position 2643 of SEQ ID NO: 1243737
ugucuuugcgucguagauu

SEQ ID NO: 1437645 - RNA, 19 nt, Artificial Sequence
  Description of Artificial Sequence: Synthetic oligonucleotide
  Antisense strand to SEQ ID NO: 1437644
aaucuacgacgcaaagaca

SEQ ID NO: 1437646 - RNA, 19 nt, Artificial Sequence
  Description of Artificial Sequence: Synthetic oligonucleotide
  Sense strand starting at position 2648 of SEQ ID NO: 1243737
uugcgucguagauuaguua

SEQ ID NO: 1437647 - RNA, 19 nt, Artificial Sequence
  Description of Artificial Sequence: Synthetic oligonucleotide
  Antisense strand to SEQ ID NO: 1437646
uaacuaaucuacgacgcaa

SEQ ID NO: 1437648 - RNA, 19 nt, Artificial Sequence
  Description of Artificial Sequence: Synthetic oligonucleotide
  Sense strand starting at position 2799 of SEQ ID NO: 1243737
aagugagcauuccugaucu

SEQ ID NO: 1437649 - RNA, 19 nt, Artificial Sequence
  Description of Artificial Sequence: Synthetic oligonucleotide
  Antisense strand to SEQ ID NO: 1437648
agaucaggaaugcucacuu

SEQ ID NO: 1437650 - RNA, 19 nt, Artificial Sequence
  Description of Artificial Sequence: Synthetic oligonucleotide
  Sense strand starting at position 2909 of SEQ ID NO: 1243737
gcagauagcgcuguaucgu

SEQ ID NO: 1437651 - RNA, 19 nt, Artificial Sequence
  Description of Artificial Sequence: Synthetic oligonucleotide
  Antisense strand to SEQ ID NO: 1437650
acgauacagcgcuaucugc

SEQ ID NO: 1437652 - RNA, 19 nt, Artificial Sequence
  Description of Artificial Sequence: Synthetic oligonucleotide
  Sense strand starting at position 2960 of SEQ ID NO: 1243737
ggagaacauuucuauaacg

SEQ ID NO: 1437653 - RNA, 19 nt, Artificial Sequence
  Description of Artificial Sequence: Synthetic oligonucleotide
  Antisense strand to SEQ ID NO: 1437652
cguuauagaaauguucucc

SEQ ID NO: 1437654 - RNA, 19 nt, Artificial Sequence
  Description of Artificial Sequence: Synthetic oligonucleotide
  Sense strand starting at position 2968 of SEQ ID NO: 1243737
uuucuauaacguugagacu

SEQ ID NO: 1437655 - RNA, 19 nt, Artificial Sequence
  Description of Artificial Sequence: Synthetic oligonucleotide
  Antisense strand to SEQ ID NO: 1437654
agucucaacguuauagaaa

SEQ ID NO: 1437656 - RNA, 19 nt, Artificial Sequence
  Description of Artificial Sequence: Synthetic oligonucleotide
  Sense strand starting at position 2969 of SEQ ID NO: 1243737
uucuauaacguugagacuu

SEQ ID NO: 1437657 - RNA, 19 nt, Artificial Sequence
  Description of Artificial Sequence: Synthetic oligonucleotide
  Antisense strand to SEQ ID NO: 1437656
aagucucaacguuauagaa

SEQ ID NO: 1437658 - RNA, 19 nt, Artificial Sequence
  Description of Artificial Sequence: Synthetic oligonucleotide
  Sense strand starting at position 2990 of SEQ ID NO: 1243737
aguaaucagggcuauugau

SEQ ID NO: 1437659 - RNA, 19 nt, Artificial Sequence
  Description of Artificial Sequence: Synthetic oligonucleotide
  Antisense strand to SEQ ID NO: 1437658
aucaauagcccugauuacu

SEQ ID NO: 1437660 - RNA, 19 nt, Artificial Sequence
  Description of Artificial Sequence: Synthetic oligonucleotide
  Sense strand starting at position 3211 of SEQ ID NO: 1243737
gggcuugucauccagugaa

SEQ ID NO: 1437661 - RNA, 19 nt, Artificial Sequence
  Description of Artificial Sequence: Synthetic oligonucleotide
  Antisense strand to SEQ ID NO: 1437660
uucacuggaugacaagccc

SEQ ID NO: 1437662 - RNA, 19 nt, Artificial Sequence
  Description of Artificial Sequence: Synthetic oligonucleotide
  Sense strand starting at position 3214 of SEQ ID NO: 1243737
cuugucauccagugaauag

SEQ ID NO: 1437663 - RNA, 19 nt, Artificial Sequence
  Description of Artificial Sequence: Synthetic oligonucleotide
  Antisense strand to SEQ ID NO: 1437662
cuauucacuggaugacaag

SEQ ID NO: 1437664 - RNA, 19 nt, Artificial Sequence
  Description of Artificial Sequence: Synthetic oligonucleotide
  Sense strand starting at position 3223 of SEQ ID NO: 1243737
cagugaauagcucauaguu

SEQ ID NO: 1437665 - RNA, 19 nt, Artificial Sequence
  Description of Artificial Sequence: Synthetic oligonucleotide
  Antisense strand to SEQ ID NO: 1437664
aacuaugagcuauucacug

SEQ ID NO: 1437666 - RNA, 19 nt, Artificial Sequence
  Description of Artificial Sequence: Synthetic oligonucleotide
  Sense strand starting at position 3236 of SEQ ID NO: 1243737
auaguugacuccucuccau

SEQ ID NO: 1437667 - RNA, 19 nt, Artificial Sequence
  Description of Artificial Sequence: Synthetic oligonucleotide
  Antisense strand to SEQ ID NO: 1437666
auggagaggagucaacuau

SEQ ID NO: 1437668 - RNA, 19 nt, Artificial Sequence
  Description of Artificial Sequence: Synthetic oligonucleotide
  Sense strand starting at position 3322 of SEQ ID NO: 1243737
gugaaccauuggguaagau

SEQ ID NO: 1437669 - RNA, 19 nt, Artificial Sequence
  Description of Artificial Sequence: Synthetic oligonucleotide
  Antisense strand to SEQ ID NO: 1437668
aucuuacccaaugguucac

SEQ ID NO: 1437670 - RNA, 19 nt, Artificial Sequence
  Description of Artificial Sequence: Synthetic oligonucleotide
  Sense strand starting at position 3332 of SEQ ID NO: 1243737
ggguaagauguauaacugu

SEQ ID NO: 1437671 - RNA, 19 nt, Artificial Sequence
  Description of Artificial Sequence: Synthetic oligonucleotide
  Antisense strand to SEQ ID NO: 1437670
acaguuauacaucuuaccc

SEQ ID NO: 1437672 - RNA, 19 nt, Artificial Sequence
  Description of Artificial Sequence: Synthetic oligonucleotide
  Sense strand starting at position 3349 of SEQ ID NO: 1243737
guuacucaggcucauaauu

SEQ ID NO: 1437673 - RNA, 19 nt, Artificial Sequence
  Description of Artificial Sequence: Synthetic oligonucleotide
  Antisense strand to SEQ ID NO: 1437672
aauuaugagccugaguaac

SEQ ID NO: 1437674 - RNA, 19 nt, Artificial Sequence
  Description of Artificial Sequence: Synthetic oligonucleotide
  Sense strand starting at position 3737 of SEQ ID NO: 1243737
uaauuaagaguucgcaaag

SEQ ID NO: 1437675 - RNA, 19 nt, Artificial Sequence
  Description of Artificial Sequence: Synthetic oligonucleotide
  Antisense strand to SEQ ID NO: 1437674
cuuugcgaacucuuaauua

SEQ ID NO: 1437676 - RNA, 19 nt, Artificial Sequence
  Description of Artificial Sequence: Synthetic oligonucleotide
  Sense strand starting at position 3821 of SEQ ID NO: 1243737
cccuuaagauaguugccaa

SEQ ID NO: 1437677 - RNA, 19 nt, Artificial Sequence
  Description of Artificial Sequence: Synthetic oligonucleotide
  Antisense strand to SEQ ID NO: 1437676
uuggcaacuaucuuaaggg

SEQ ID NO: 1437678 - RNA, 19 nt, Artificial Sequence
  Description of Artificial Sequence: Synthetic oligonucleotide
  Sense strand starting at position 3860 of SEQ ID NO: 1243737
uuucauagucugggaagag

SEQ ID NO: 1437679 - RNA, 19 nt, Artificial Sequence
  Description of Artificial Sequence: Synthetic oligonucleotide
  Antisense strand to SEQ ID NO: 1437678
cucuucccagacuaugaaa

SEQ ID NO: 1437680 - RNA, 19 nt, Artificial Sequence
  Description of Artificial Sequence: Synthetic oligonucleotide
  Sense strand starting at position 3906 of SEQ ID NO: 1243737
uuuagauccuguccaaggu

SEQ ID NO: 1437681 - RNA, 19 nt, Artificial Sequence
  Description of Artificial Sequence: Synthetic oligonucleotide
  Antisense strand to SEQ ID NO: 1437680
accuuggacaggaucuaaa

SEQ ID NO: 1437682 - RNA, 19 nt, Artificial Sequence
  Description of Artificial Sequence: Synthetic oligonucleotide
  Sense strand starting at position 3907 of SEQ ID NO: 1243737
uuagauccuguccaaggua

SEQ ID NO: 1437683 - RNA, 19 nt, Artificial Sequence
  Description of Artificial Sequence: Synthetic oligonucleotide
  Antisense strand to SEQ ID NO: 1437682
uaccuuggacaggaucuaa

SEQ ID NO: 1437684 - RNA, 19 nt, Artificial Sequence
  Description of Artificial Sequence: Synthetic oligonucleotide
  Sense strand starting at position 33 of SEQ ID NO: 1243738
ggcaguucuccaggacugu

SEQ ID NO: 1437685 - RNA, 19 nt, Artificial Sequence
  Description of Artificial Sequence: Synthetic oligonucleotide
  Antisense strand to SEQ ID NO: 1437684
acaguccuggagaacugcc

SEQ ID NO: 1437686 - RNA, 19 nt, Artificial Sequence
  Description of Artificial Sequence: Synthetic oligonucleotide
  Sense strand starting at position 51 of SEQ ID NO: 1243738
ugcacaugggcguaaacau

SEQ ID NO: 1437687 - RNA, 19 nt, Artificial Sequence
  Description of Artificial Sequence: Synthetic oligonucleotide
  Antisense strand to SEQ ID NO: 1437686
auguuuacgcccaugugca

SEQ ID NO: 1437688 - RNA, 19 nt, Artificial Sequence
  Description of Artificial Sequence: Synthetic oligonucleotide
  Sense strand starting at position 993 of SEQ ID NO: 1243738
cuggcuugggccuaaggau

SEQ ID NO: 1437689 - RNA, 19 nt, Artificial Sequence
  Description of Artificial Sequence: Synthetic oligonucleotide
  Antisense strand to SEQ ID NO: 1437688
auccuuaggcccaagccag

SEQ ID NO: 1437690 - RNA, 19 nt, Artificial Sequence
  Description of Artificial Sequence: Synthetic oligonucleotide
  Sense strand starting at position 1025 of SEQ ID NO: 1243738
aaagguuucgccugaccaa

SEQ ID NO: 1437691 - RNA, 19 nt, Artificial Sequence
  Description of Artificial Sequence: Synthetic oligonucleotide
  Antisense strand to SEQ ID NO: 1437690
uuggucaggcgaaaccuuu

SEQ ID NO: 1437692 - RNA, 19 nt, Artificial Sequence
  Description of Artificial Sequence: Synthetic oligonucleotide
  Sense strand starting at position 1026 of SEQ ID NO: 1243738
aagguuucgccugaccaau

SEQ ID NO: 1437693 - RNA, 19 nt, Artificial Sequence
  Description of Artificial Sequence: Synthetic oligonucleotide
  Antisense strand to SEQ ID NO: 1437692
auuggucaggcgaaaccuu

SEQ ID NO: 1437694 - RNA, 19 nt, Artificial Sequence
  Description of Artificial Sequence: Synthetic oligonucleotide
  Sense strand starting at position 1078 of SEQ ID NO: 1243738
ccaaacaugucugcacagu

SEQ ID NO: 1437695 - RNA, 19 nt, Artificial Sequence
  Description of Artificial Sequence: Synthetic oligonucleotide
  Antisense strand to SEQ ID NO: 1437694
acugugcagacauguuugg

SEQ ID NO: 1437696 - RNA, 19 nt, Artificial Sequence
  Description of Artificial Sequence: Synthetic oligonucleotide
  Sense strand starting at position 1095 of SEQ ID NO: 1243738
guggcauuguuucugcaaa

SEQ ID NO: 1437697 - RNA, 19 nt, Artificial Sequence
  Description of Artificial Sequence: Synthetic oligonucleotide
  Antisense strand to SEQ ID NO: 1437696
uuugcagaaacaaugccac

SEQ ID NO: 1437698 - RNA, 19 nt, Artificial Sequence
  Description of Artificial Sequence: Synthetic oligonucleotide
  Sense strand starting at position 1096 of SEQ ID NO: 1243738
uggcauuguuucugcaaau

SEQ ID NO: 1437699 - RNA, 19 nt, Artificial Sequence
  Description of Artificial Sequence: Synthetic oligonucleotide
  Antisense strand to SEQ ID NO: 1437698
auuugcagaaacaaugcca

SEQ ID NO: 1437700 - RNA, 19 nt, Artificial Sequence
  Description of Artificial Sequence: Synthetic oligonucleotide
  Sense strand starting at position 1097 of SEQ ID NO: 1243738
ggcauuguuucugcaaaug

SEQ ID NO: 1437701 - RNA, 19 nt, Artificial Sequence
  Description of Artificial Sequence: Synthetic oligonucleotide
  Antisense strand to SEQ ID NO: 1437700
cauuugcagaaacaaugcc

SEQ ID NO: 1437702 - RNA, 19 nt, Artificial Sequence
  Description of Artificial Sequence: Synthetic oligonucleotide
  Sense strand starting at position 1119 of SEQ ID NO: 1243738
ccaguaguuucccuaccua

SEQ ID NO: 1437703 - RNA, 19 nt, Artificial Sequence
  Description of Artificial Sequence: Synthetic oligonucleotide
  Antisense strand to SEQ ID NO: 1437702
uagguagggaaacuacugg

SEQ ID NO: 1437704 - RNA, 19 nt, Artificial Sequence
  Description of Artificial Sequence: Synthetic oligonucleotide
  Sense strand starting at position 1220 of SEQ ID NO: 1243738
uagccaguuccugaugagu

SEQ ID NO: 1437705 - RNA, 19 nt, Artificial Sequence
  Description of Artificial Sequence: Synthetic oligonucleotide
  Antisense strand to SEQ ID NO: 1437704
acucaucaggaacuggcua

SEQ ID NO: 1437706 - RNA, 19 nt, Artificial Sequence
  Description of Artificial Sequence: Synthetic oligonucleotide
  Sense strand starting at position 1222 of SEQ ID NO: 1243738
gccaguuccugaugagugu

SEQ ID NO: 1437707 - RNA, 19 nt, Artificial Sequence
  Description of Artificial Sequence: Synthetic oligonucleotide
  Antisense strand to SEQ ID NO: 1437706
acacucaucaggaacuggc

SEQ ID NO: 1437708 - RNA, 19 nt, Artificial Sequence
  Description of Artificial Sequence: Synthetic oligonucleotide
  Sense strand starting at position 1226 of SEQ ID NO: 1243738
guuccugaugagugucaaa

SEQ ID NO: 1437709 - RNA, 19 nt, Artificial Sequence
  Description of Artificial Sequence: Synthetic oligonucleotide
  Antisense strand to SEQ ID NO: 1437708
uuugacacucaucaggaac

SEQ ID NO: 1437710 - RNA, 19 nt, Artificial Sequence
  Description of Artificial Sequence: Synthetic oligonucleotide
  Sense strand starting at position 1302 of SEQ ID NO: 1243738
cgauacaguucccaagacu

SEQ ID NO: 1437711 - RNA, 19 nt, Artificial Sequence
  Description of Artificial Sequence: Synthetic oligonucleotide
  Antisense strand to SEQ ID NO: 1437710
agucuugggaacuguaucg

SEQ ID NO: 1437712 - RNA, 19 nt, Artificial Sequence
  Description of Artificial Sequence: Synthetic oligonucleotide
  Sense strand starting at position 1319 of SEQ ID NO: 1243738
cucuaagggucagagugaa

SEQ ID NO: 1437713 - RNA, 19 nt, Artificial Sequence
  Description of Artificial Sequence: Synthetic oligonucleotide
  Antisense strand to SEQ ID NO: 1437712
uucacucugacccuuagag

SEQ ID NO: 1437714 - RNA, 19 nt, Artificial Sequence
  Description of Artificial Sequence: Synthetic oligonucleotide
  Sense strand starting at position 1406 of SEQ ID NO: 1243738
gaacgagacuucguccaaa

SEQ ID NO: 1437715 - RNA, 19 nt, Artificial Sequence
  Description of Artificial Sequence: Synthetic oligonucleotide
  Antisense strand to SEQ ID NO: 1437714
uuuggacgaagucucguuc

SEQ ID NO: 1437716 - RNA, 19 nt, Artificial Sequence
  Description of Artificial Sequence: Synthetic oligonucleotide
  Sense strand starting at position 1564 of SEQ ID NO: 1243738
ggaggagaaugcuuucuca

SEQ ID NO: 1437717 - RNA, 19 nt, Artificial Sequence
  Description of Artificial Sequence: Synthetic oligonucleotide
  Antisense strand to SEQ ID NO: 1437716
ugagaaagcauucuccucc

SEQ ID NO: 1437718 - RNA, 19 nt, Artificial Sequence
  Description of Artificial Sequence: Synthetic oligonucleotide
  Sense strand starting at position 1568 of SEQ ID NO: 1243738
gagaaugcuuucucagggu

SEQ ID NO: 1437719 - RNA, 19 nt, Artificial Sequence
  Description of Artificial Sequence: Synthetic oligonucleotide
  Antisense strand to SEQ ID NO: 1437718
acccugagaaagcauucuc

SEQ ID NO: 1437720 - RNA, 19 nt, Artificial Sequence
  Description of Artificial Sequence: Synthetic oligonucleotide
  Sense strand starting at position 2130 of SEQ ID NO: 1243738
agcacugguucaggugaga

SEQ ID NO: 1437721 - RNA, 19 nt, Artificial Sequence
  Description of Artificial Sequence: Synthetic oligonucleotide
  Antisense strand to SEQ ID NO: 1437720
ucucaccugaaccagugcu

SEQ ID NO: 1437722 - RNA, 19 nt, Artificial Sequence
  Description of Artificial Sequence: Synthetic oligonucleotide
  Sense strand starting at position 2133 of SEQ ID NO: 1243738
acugguucaggugagauca

SEQ ID NO: 1437723 - RNA, 19 nt, Artificial Sequence
  Description of Artificial Sequence: Synthetic oligonucleotide
  Antisense strand to SEQ ID NO: 1437722
ugaucucaccugaaccagu

SEQ ID NO: 1437724 - RNA, 19 nt, Artificial Sequence
  Description of Artificial Sequence: Synthetic oligonucleotide
  Sense strand starting at position 2643 of SEQ ID NO: 1243738
cacggagucucacauuguu

SEQ ID NO: 1437725 - RNA, 19 nt, Artificial Sequence
  Description of Artificial Sequence: Synthetic oligonucleotide
  Antisense strand to SEQ ID NO: 1437724
aacaaugugagacuccgug

SEQ ID NO: 1437726 - RNA, 19 nt, Artificial Sequence
  Description of Artificial Sequence: Synthetic oligonucleotide
  Sense strand starting at position 3404 of SEQ ID NO: 1243738
auguuuauuuguuguagag

SEQ ID NO: 1437727 - RNA, 19 nt, Artificial Sequence
  Description of Artificial Sequence: Synthetic oligonucleotide
  Antisense strand to SEQ ID NO: 1437726
cucuacaacaaauaaacau

SEQ ID NO: 1437728 - RNA, 19 nt, Artificial Sequence
  Description of Artificial Sequence: Synthetic oligonucleotide
  Sense strand starting at position 3406 of SEQ ID NO: 1243738
guuuauuuguuguagagau

SEQ ID NO: 1437729 - RNA, 19 nt, Artificial Sequence
  Description of Artificial Sequence: Synthetic oligonucleotide
  Antisense strand to SEQ ID NO: 1437728
aucucuacaacaaauaaac

SEQ ID NO: 1437730 - RNA, 19 nt, Artificial Sequence
  Description of Artificial Sequence: Synthetic oligonucleotide
  Sense strand starting at position 3422 of SEQ ID NO: 1243738
gaugaaggcucccuauguu

SEQ ID NO: 1437731 - RNA, 19 nt, Artificial Sequence
  Description of Artificial Sequence: Synthetic oligonucleotide
  Antisense strand to SEQ ID NO: 1437730
aacauagggagccuucauc

SEQ ID NO: 1437732 - RNA, 19 nt, Artificial Sequence
  Description of Artificial Sequence: Synthetic oligonucleotide
  Sense strand starting at position 3449 of SEQ ID NO: 1243738
ugaacaaguguuuguugaa

SEQ ID NO: 1437733 - RNA, 19 nt, Artificial Sequence
  Description of Artificial Sequence: Synthetic oligonucleotide
  Antisense strand to SEQ ID NO: 1437732
uucaacaaacacuuguuca

SEQ ID NO: 1437734 - RNA, 19 nt, Artificial Sequence
  Description of Artificial Sequence: Synthetic oligonucleotide
  Sense strand starting at position 3450 of SEQ ID NO: 1243738
gaacaaguguuuguugaau

SEQ ID NO: 1437735 - RNA, 19 nt, Artificial Sequence
  Description of Artificial Sequence: Synthetic oligonucleotide
  Antisense strand to SEQ ID NO: 1437734
auucaacaaacacuuguuc

SEQ ID NO: 1437736 - RNA, 19 nt, Artificial Sequence
  Description of Artificial Sequence: Synthetic oligonucleotide
  Sense strand starting at position 3462 of SEQ ID NO: 1243738
guugaaugacuugaugcca

SEQ ID NO: 1437737 - RNA, 19 nt, Artificial Sequence
  Description of Artificial Sequence: Synthetic oligonucleotide
  Antisense strand to SEQ ID NO: 1437736
uggcaucaagucauucaac

SEQ ID NO: 1437738 - RNA, 19 nt, Artificial Sequence
  Description of Artificial Sequence: Synthetic oligonucleotide
  Sense strand starting at position 3476 of SEQ ID NO: 1243738
ugccauuugucaggaggga

SEQ ID NO: 1437739 - RNA, 19 nt, Artificial Sequence
  Description of Artificial Sequence: Synthetic oligonucleotide
  Antisense strand to SEQ ID NO: 1437738
ucccuccugacaaauggca

SEQ ID NO: 1437740 - RNA, 19 nt, Artificial Sequence
  Description of Artificial Sequence: Synthetic oligonucleotide
  Sense strand starting at position 8 of SEQ ID NO: 1243739
aucugagcuguguaaauca

SEQ ID NO: 1437741 - RNA, 19 nt, Artificial Sequence
  Description of Artificial Sequence: Synthetic oligonucleotide
  Antisense strand to SEQ ID NO: 1437740
ugauuuacacagcucagau

SEQ ID NO: 1437742 - RNA, 19 nt, Artificial Sequence
  Description of Artificial Sequence: Synthetic oligonucleotide
  Sense strand starting at position 42 of SEQ ID NO: 1243739
guugaaucaccuugacacu

SEQ ID NO: 1437743 - RNA, 19 nt, Artificial Sequence
  Description of Artificial Sequence: Synthetic oligonucleotide
  Antisense strand to SEQ ID NO: 1437742
agugucaaggugauucaac

SEQ ID NO: 1437744 - RNA, 19 nt, Artificial Sequence
  Description of Artificial Sequence: Synthetic oligonucleotide
  Sense strand starting at position 104 of SEQ ID NO: 1243739
aagugacaccuucgagauu

SEQ ID NO: 1437745 - RNA, 19 nt, Artificial Sequence
  Description of Artificial Sequence: Synthetic oligonucleotide
  Antisense strand to SEQ ID NO: 1437744
aaucucgaaggugucacuu

SEQ ID NO: 1437746 - RNA, 19 nt, Artificial Sequence
  Description of Artificial Sequence: Synthetic oligonucleotide
  Sense strand starting at position 230 of SEQ ID NO: 1243739
ucucuugcgguccagaaau

SEQ ID NO: 1437747 - RNA, 19 nt, Artificial Sequence
  Description of Artificial Sequence: Synthetic oligonucleotide
  Antisense strand to SEQ ID NO: 1437746
auuucuggaccgcaagaga

SEQ ID NO: 1437748 - RNA, 19 nt, Artificial Sequence
  Description of Artificial Sequence: Synthetic oligonucleotide
  Sense strand starting at position 241 of SEQ ID NO: 1243739
ccagaaaugccaggauggu

SEQ ID NO: 1437749 - RNA, 19 nt, Artificial Sequence
  Description of Artificial Sequence: Synthetic oligonucleotide
  Antisense strand to SEQ ID NO: 1437748
accauccuggcauuucugg

SEQ ID NO: 1437750 - RNA, 19 nt, Artificial Sequence
  Description of Artificial Sequence: Synthetic oligonucleotide
  Sense strand starting at position 280 of SEQ ID NO: 1243739
ugaauugcaccuugaaucu

SEQ ID NO: 1437751 - RNA, 19 nt, Artificial Sequence
  Description of Artificial Sequence: Synthetic oligonucleotide
  Antisense strand to SEQ ID NO: 1437750
agauucaaggugcaauuca

SEQ ID NO: 1437752 - RNA, 19 nt, Artificial Sequence
  Description of Artificial Sequence: Synthetic oligonucleotide
  Sense strand starting at position 423 of SEQ ID NO: 1243739
guagauguggcccaucaca

SEQ ID NO: 1437753 - RNA, 19 nt, Artificial Sequence
  Description of Artificial Sequence: Synthetic oligonucleotide
  Antisense strand to SEQ ID NO: 1437752
ugugaugggccacaucuac

SEQ ID NO: 1437754 - RNA, 19 nt, Artificial Sequence
  Description of Artificial Sequence: Synthetic oligonucleotide
  Sense strand starting at position 589 of SEQ ID NO: 1243739
caggcaucugguggaaaca

SEQ ID NO: 1437755 - RNA, 19 nt, Artificial Sequence
  Description of Artificial Sequence: Synthetic oligonucleotide
  Antisense strand to SEQ ID NO: 1437754
uguuuccaccagaugccug

SEQ ID NO: 1437756 - RNA, 19 nt, Artificial Sequence
  Description of Artificial Sequence: Synthetic oligonucleotide
  Sense strand starting at position 1008 of SEQ ID NO: 1243739
cagagcacaugucuagaaa

SEQ ID NO: 1437757 - RNA, 19 nt, Artificial Sequence
  Description of Artificial Sequence: Synthetic oligonucleotide
  Antisense strand to SEQ ID NO: 1437756
uuucuagacaugugcucug

SEQ ID NO: 1437758 - RNA, 19 nt, Artificial Sequence
  Description of Artificial Sequence: Synthetic oligonucleotide
  Sense strand starting at position 1019 of SEQ ID NO: 1243739
ucuagaaagaugugggagu

SEQ ID NO: 1437759 - RNA, 19 nt, Artificial Sequence
  Description of Artificial Sequence: Synthetic oligonucleotide
  Antisense strand to SEQ ID NO: 1437758
acucccacaucuuucuaga

SEQ ID NO: 1437760 - RNA, 19 nt, Artificial Sequence
  Description of Artificial Sequence: Synthetic oligonucleotide
  Sense strand starting at position 1213 of SEQ ID NO: 1243739
gcugacagggcuuaaauca

SEQ ID NO: 1437761 - RNA, 19 nt, Artificial Sequence
  Description of Artificial Sequence: Synthetic oligonucleotide
  Antisense strand to SEQ ID NO: 1437760
ugauuuaagcccugucagc

SEQ ID NO: 1437762 - RNA, 19 nt, Artificial Sequence
  Description of Artificial Sequence: Synthetic oligonucleotide
  Sense strand starting at position 1230 of SEQ ID NO: 1243739
cacagaguggccggaauaa

SEQ ID NO: 1437763 - RNA, 19 nt, Artificial Sequence
  Description of Artificial Sequence: Synthetic oligonucleotide
  Antisense strand to SEQ ID NO: 1437762
uuauuccggccacucugug

SEQ ID NO: 1437764 - RNA, 19 nt, Artificial Sequence
  Description of Artificial Sequence: Synthetic oligonucleotide
  Sense strand starting at position 1348 of SEQ ID NO: 1243739
ggugguauaaaguacauau

SEQ ID NO: 1437765 - RNA, 19 nt, Artificial Sequence
  Description of Artificial Sequence: Synthetic oligonucleotide
  Antisense strand to SEQ ID NO: 1437764
auauguacuuuauaccacc

SEQ ID NO: 1437766 - RNA, 19 nt, Artificial Sequence
  Description of Artificial Sequence: Synthetic oligonucleotide
  Sense strand starting at position 1446 of SEQ ID NO: 1243739
acauguggacucggaagaa

SEQ ID NO: 1437767 - RNA, 19 nt, Artificial Sequence
  Description of Artificial Sequence: Synthetic oligonucleotide
  Antisense strand to SEQ ID NO: 1437766
uucuuccgaguccacaugu

SEQ ID NO: 1437768 - RNA, 19 nt, Artificial Sequence
  Description of Artificial Sequence: Synthetic oligonucleotide
  Sense strand starting at position 1772 of SEQ ID NO: 1243739
caccgaauucgcucucgca

SEQ ID NO: 1437769 - RNA, 19 nt, Artificial Sequence
  Description of Artificial Sequence: Synthetic oligonucleotide
  Antisense strand to SEQ ID NO: 1437768
ugcgagagcgaauucggug

SEQ ID NO: 1437770 - RNA, 19 nt, Artificial Sequence
  Description of Artificial Sequence: Synthetic oligonucleotide
  Sense strand starting at position 1774 of SEQ ID NO: 1243739
ccgaauucgcucucgcaga

SEQ ID NO: 1437771 - RNA, 19 nt, Artificial Sequence
  Description of Artificial Sequence: Synthetic oligonucleotide
  Antisense strand to SEQ ID NO: 1437770
ucugcgagagcgaauucgg

SEQ ID NO: 1437772 - RNA, 19 nt, Artificial Sequence
  Description of Artificial Sequence: Synthetic oligonucleotide
  Sense strand starting at position 2700 of SEQ ID NO: 1243739
ggucuugaccucuaagauu

SEQ ID NO: 1437773 - RNA, 19 nt, Artificial Sequence
  Description of Artificial Sequence: Synthetic oligonucleotide
  Antisense strand to SEQ ID NO: 1437772
aaucuuagaggucaagacc

SEQ ID NO: 1437774 - RNA, 19 nt, Artificial Sequence
  Description of Artificial Sequence: Synthetic oligonucleotide
  Sense strand starting at position 2768 of SEQ ID NO: 1243739
uuacaacacugguuagaua

SEQ ID NO: 1437775 - RNA, 19 nt, Artificial Sequence
  Description of Artificial Sequence: Synthetic oligonucleotide
  Antisense strand to SEQ ID NO: 1437774
uaucuaaccaguguuguaa

SEQ ID NO: 1437776 - RNA, 19 nt, Artificial Sequence
  Description of Artificial Sequence: Synthetic oligonucleotide
  Sense strand starting at position 3088 of SEQ ID NO: 1243739
uuaucuggcuucuuggaca

SEQ ID NO: 1437777 - RNA, 19 nt, Artificial Sequence
  Description of Artificial Sequence: Synthetic oligonucleotide
  Antisense strand to SEQ ID NO: 1437776
uguccaagaagccagauaa

SEQ ID NO: 1437778 - RNA, 19 nt, Artificial Sequence
  Description of Artificial Sequence: Synthetic oligonucleotide
  Sense strand starting at position 3186 of SEQ ID NO: 1243739
agcacacgucgcuuacauu

SEQ ID NO: 1437779 - RNA, 19 nt, Artificial Sequence
  Description of Artificial Sequence: Synthetic oligonucleotide
  Antisense strand to SEQ ID NO: 1437778
aauguaagcgacgugugcu

SEQ ID NO: 1437780 - RNA, 19 nt, Artificial Sequence
  Description of Artificial Sequence: Synthetic oligonucleotide
  Sense strand starting at position 3187 of SEQ ID NO: 1243739
gcacacgucgcuuacauuu

SEQ ID NO: 1437781 - RNA, 19 nt, Artificial Sequence
  Description of Artificial Sequence: Synthetic oligonucleotide
  Antisense strand to SEQ ID NO: 1437780
aaauguaagcgacgugugc

SEQ ID NO: 1437782 - RNA, 19 nt, Artificial Sequence
  Description of Artificial Sequence: Synthetic oligonucleotide
  Sense strand starting at position 3286 of SEQ ID NO: 1243739
ccuaguucugcagacaggu

SEQ ID NO: 1437783 - RNA, 19 nt, Artificial Sequence
  Description of Artificial Sequence: Synthetic oligonucleotide
  Antisense strand to SEQ ID NO: 1437782
accugucugcagaacuagg

SEQ ID NO: 1437784 - RNA, 19 nt, Artificial Sequence
  Description of Artificial Sequence: Synthetic oligonucleotide
  Sense strand starting at position 3438 of SEQ ID NO: 1243739
gcauuaaagagauggaucu

SEQ ID NO: 1437785 - RNA, 19 nt, Artificial Sequence
  Description of Artificial Sequence: Synthetic oligonucleotide
  Antisense strand to SEQ ID NO: 1437784
agauccaucucuuuaaugc

SEQ ID NO: 1437786 - RNA, 19 nt, Artificial Sequence
  Description of Artificial Sequence: Synthetic oligonucleotide
  Sense strand starting at position 3445 of SEQ ID NO: 1243739
agagauggaucugcccauu

SEQ ID NO: 1437787 - RNA, 19 nt, Artificial Sequence
  Description of Artificial Sequence: Synthetic oligonucleotide
  Antisense strand to SEQ ID NO: 1437786
aaugggcagauccaucucu

SEQ ID NO: 1437788 - RNA, 19 nt, Artificial Sequence
  Description of Artificial Sequence: Synthetic oligonucleotide
  Sense strand starting at position 3485 of SEQ ID NO: 1243739
uuuaaaguugaucagucuu

SEQ ID NO: 1437789 - RNA, 19 nt, Artificial Sequence
  Description of Artificial Sequence: Synthetic oligonucleotide
  Antisense strand to SEQ ID NO: 1437788
aagacugaucaacuuuaaa

SEQ ID NO: 1437790 - RNA, 19 nt, Artificial Sequence
  Description of Artificial Sequence: Synthetic oligonucleotide
  Sense strand starting at position 3543 of SEQ ID NO: 1243739
gcaauaauagcugguuaga

SEQ ID NO: 1437791 - RNA, 19 nt, Artificial Sequence
  Description of Artificial Sequence: Synthetic oligonucleotide
  Antisense strand to SEQ ID NO: 1437790
ucuaaccagcuauuauugc

SEQ ID NO: 1437792 - RNA, 19 nt, Artificial Sequence
  Description of Artificial Sequence: Synthetic oligonucleotide
  Sense strand starting at position 3545 of SEQ ID NO: 1243739
aauaauagcugguuagagu

SEQ ID NO: 1437793 - RNA, 19 nt, Artificial Sequence
  Description of Artificial Sequence: Synthetic oligonucleotide
  Antisense strand to SEQ ID NO: 1437792
acucuaaccagcuauuauu

SEQ ID NO: 1437794 - RNA, 19 nt, Artificial Sequence
  Description of Artificial Sequence: Synthetic oligonucleotide
  Sense strand starting at position 3546 of SEQ ID NO: 1243739
auaauagcugguuagaguu

SEQ ID NO: 1437795 - RNA, 19 nt, Artificial Sequence
  Description of Artificial Sequence: Synthetic oligonucleotide
  Antisense strand to SEQ ID NO: 1437794
aacucuaaccagcuauuau

SEQ ID NO: 1437796 - RNA, 19 nt, Artificial Sequence
  Description of Artificial Sequence: Synthetic oligonucleotide
  Sense strand starting at position 3581 of SEQ ID NO: 1243739
gguugauucugacucauua

SEQ ID NO: 1437797 - RNA, 19 nt, Artificial Sequence
  Description of Artificial Sequence: Synthetic oligonucleotide
  Antisense strand to SEQ ID NO: 1437796
uaaugagucagaaucaacc

SEQ ID NO: 1437798 - RNA, 19 nt, Artificial Sequence
  Description of Artificial Sequence: Synthetic oligonucleotide
  Sense strand starting at position 3633 of SEQ ID NO: 1243739
uaaaguucugguggauauc

SEQ ID NO: 1437799 - RNA, 19 nt, Artificial Sequence
  Description of Artificial Sequence: Synthetic oligonucleotide
  Antisense strand to SEQ ID NO: 1437798
gauauccaccagaacuuua

SEQ ID NO: 1437800 - RNA, 19 nt, Artificial Sequence
  Description of Artificial Sequence: Synthetic oligonucleotide
  Sense strand starting at position 3636 of SEQ ID NO: 1243739
aguucugguggauauccaa

SEQ ID NO: 1437801 - RNA, 19 nt, Artificial Sequence
  Description of Artificial Sequence: Synthetic oligonucleotide
  Antisense strand to SEQ ID NO: 1437800
uuggauauccaccagaacu

SEQ ID NO: 1437802 - RNA, 19 nt, Artificial Sequence
  Description of Artificial Sequence: Synthetic oligonucleotide
  Sense strand starting at position 3706 of SEQ ID NO: 1243739
aucuguugucaugggaaag

SEQ ID NO: 1437803 - RNA, 19 nt, Artificial Sequence
  Description of Artificial Sequence: Synthetic oligonucleotide
  Antisense strand to SEQ ID NO: 1437802
cuuucccaugacaacagau

SEQ ID NO: 1437804 - RNA, 19 nt, Artificial Sequence
  Description of Artificial Sequence: Synthetic oligonucleotide
  Sense strand starting at position 3707 of SEQ ID NO: 1243739
ucuguugucaugggaaaga

SEQ ID NO: 1437805 - RNA, 19 nt, Artificial Sequence
  Description of Artificial Sequence: Synthetic oligonucleotide
  Antisense strand to SEQ ID NO: 1437804
ucuuucccaugacaacaga

SEQ ID NO: 1437806 - RNA, 19 nt, Artificial Sequence
  Description of Artificial Sequence: Synthetic oligonucleotide
  Sense strand starting at position 3720 of SEQ ID NO: 1243739
gaaagauugucugauauuu

SEQ ID NO: 1437807 - RNA, 19 nt, Artificial Sequence
  Description of Artificial Sequence: Synthetic oligonucleotide
  Antisense strand to SEQ ID NO: 1437806
aaauaucagacaaucuuuc

SEQ ID NO: 1437808 - RNA, 19 nt, Artificial Sequence
  Description of Artificial Sequence: Synthetic oligonucleotide
  Sense strand starting at position 3788 of SEQ ID NO: 1243739
agaguaaauugcccuguga

SEQ ID NO: 1437809 - RNA, 19 nt, Artificial Sequence
  Description of Artificial Sequence: Synthetic oligonucleotide
  Antisense strand to SEQ ID NO: 1437808
ucacagggcaauuuacucu

SEQ ID NO: 1437810 - RNA, 19 nt, Artificial Sequence
  Description of Artificial Sequence: Synthetic oligonucleotide
  Sense strand starting at position 3926 of SEQ ID NO: 1243739
ucauuucgugcaugaagua

SEQ ID NO: 1437811 - RNA, 19 nt, Artificial Sequence
  Description of Artificial Sequence: Synthetic oligonucleotide
  Antisense strand to SEQ ID NO: 1437810
uacuucaugcacgaaauga

SEQ ID NO: 1437812 - RNA, 19 nt, Artificial Sequence
  Description of Artificial Sequence: Synthetic oligonucleotide
  Sense strand starting at position 3931 of SEQ ID NO: 1243739
ucgugcaugaaguauaaga

SEQ ID NO: 1437813 - RNA, 19 nt, Artificial Sequence
  Description of Artificial Sequence: Synthetic oligonucleotide
  Antisense strand to SEQ ID NO: 1437812
ucuuauacuucaugcacga

SEQ ID NO: 1437814 - RNA, 19 nt, Artificial Sequence
  Description of Artificial Sequence: Synthetic oligonucleotide
  Sense strand starting at position 3933 of SEQ ID NO: 1243739
gugcaugaaguauaagagu

SEQ ID NO: 1437815 - RNA, 19 nt, Artificial Sequence
  Description of Artificial Sequence: Synthetic oligonucleotide
  Antisense strand to SEQ ID NO: 1437814
acucuuauacuucaugcac

SEQ ID NO: 1437816 - RNA, 19 nt, Artificial Sequence
  Description of Artificial Sequence: Synthetic oligonucleotide
  Sense strand starting at position 3948 of SEQ ID NO: 1243739
gagugugugcguguuaguu

SEQ ID NO: 1437817 - RNA, 19 nt, Artificial Sequence
  Description of Artificial Sequence: Synthetic oligonucleotide
  Antisense strand to SEQ ID NO: 1437816
aacuaacacgcacacacuc

SEQ ID NO: 1437818 - RNA, 19 nt, Artificial Sequence
  Description of Artificial Sequence: Synthetic oligonucleotide
  Sense strand starting at position 3949 of SEQ ID NO: 1243739
agugugugcguguuaguua

SEQ ID NO: 1437819 - RNA, 19 nt, Artificial Sequence
  Description of Artificial Sequence: Synthetic oligonucleotide
  Antisense strand to SEQ ID NO: 1437818
uaacuaacacgcacacacu

SEQ ID NO: 1437820 - RNA, 19 nt, Artificial Sequence
  Description of Artificial Sequence: Synthetic oligonucleotide
  Sense strand starting at position 12 of SEQ ID NO: 1243740
aagggagcugcgugaacaa

SEQ ID NO: 1437821 - RNA, 19 nt, Artificial Sequence
  Description of Artificial Sequence: Synthetic oligonucleotide
  Antisense strand to SEQ ID NO: 1437820
uuguucacgcagcucccuu

SEQ ID NO: 1437822 - RNA, 19 nt, Artificial Sequence
  Description of Artificial Sequence: Synthetic oligonucleotide
  Sense strand starting at position 469 of SEQ ID NO: 1243740
ccugauuacaugugggagu

SEQ ID NO: 1437823 - RNA, 19 nt, Artificial Sequence
  Description of Artificial Sequence: Synthetic oligonucleotide
  Antisense strand to SEQ ID NO: 1437822
acucccacauguaaucagg

SEQ ID NO: 1437824 - RNA, 19 nt, Artificial Sequence
  Description of Artificial Sequence: Synthetic oligonucleotide
  Sense strand starting at position 471 of SEQ ID NO: 1243740
ugauuacaugugggaguca

SEQ ID NO: 1437825 - RNA, 19 nt, Artificial Sequence
  Description of Artificial Sequence: Synthetic oligonucleotide
  Antisense strand to SEQ ID NO: 1437824
ugacucccacauguaauca

SEQ ID NO: 1437826 - RNA, 19 nt, Artificial Sequence
  Description of Artificial Sequence: Synthetic oligonucleotide
  Sense strand starting at position 686 of SEQ ID NO: 1243740
gcugaacgcaucuggaaga

SEQ ID NO: 1437827 - RNA, 19 nt, Artificial Sequence
  Description of Artificial Sequence: Synthetic oligonucleotide
  Antisense strand to SEQ ID NO: 1437826
ucuuccagaugcguucagc

SEQ ID NO: 1437828 - RNA, 19 nt, Artificial Sequence
  Description of Artificial Sequence: Synthetic oligonucleotide
  Sense strand starting at position 754 of SEQ ID NO: 1243740
ccugaagaguccuuagggu

SEQ ID NO: 1437829 - RNA, 19 nt, Artificial Sequence
  Description of Artificial Sequence: Synthetic oligonucleotide
  Antisense strand to SEQ ID NO: 1437828
acccuaaggacucuucagg

SEQ ID NO: 1437830 - RNA, 19 nt, Artificial Sequence
  Description of Artificial Sequence: Synthetic oligonucleotide
  Sense strand starting at position 1821 of SEQ ID NO: 1243740
aagacuagggccugauguu

SEQ ID NO: 1437831 - RNA, 19 nt, Artificial Sequence
  Description of Artificial Sequence: Synthetic oligonucleotide
  Antisense strand to SEQ ID NO: 1437830
aacaucaggcccuagucuu

SEQ ID NO: 1437832 - RNA, 19 nt, Artificial Sequence
  Description of Artificial Sequence: Synthetic oligonucleotide
  Sense strand starting at position 2044 of SEQ ID NO: 1243740
ccaggaagucccggaagaa

SEQ ID NO: 1437833 - RNA, 19 nt, Artificial Sequence
  Description of Artificial Sequence: Synthetic oligonucleotide
  Antisense strand to SEQ ID NO: 1437832
uucuuccgggacuuccugg

SEQ ID NO: 1437834 - RNA, 19 nt, Artificial Sequence
  Description of Artificial Sequence: Synthetic oligonucleotide
  Sense strand starting at position 2250 of SEQ ID NO: 1243740
aacagugauugcuuagcaa

SEQ ID NO: 1437835 - RNA, 19 nt, Artificial Sequence
  Description of Artificial Sequence: Synthetic oligonucleotide
  Antisense strand to SEQ ID NO: 1437834
uugcuaagcaaucacuguu

SEQ ID NO: 1437836 - RNA, 19 nt, Artificial Sequence
  Description of Artificial Sequence: Synthetic oligonucleotide
  Sense strand starting at position 2295 of SEQ ID NO: 1243740
gguuccuagagagguucuu

SEQ ID NO: 1437837 - RNA, 19 nt, Artificial Sequence
  Description of Artificial Sequence: Synthetic oligonucleotide
  Antisense strand to SEQ ID NO: 1437836
aagaaccucucuaggaacc

SEQ ID NO: 1437838 - RNA, 19 nt, Artificial Sequence
  Description of Artificial Sequence: Synthetic oligonucleotide
  Sense strand starting at position 2346 of SEQ ID NO: 1243740
caggguugaaccuaguuga

SEQ ID NO: 1437839 - RNA, 19 nt, Artificial Sequence
  Description of Artificial Sequence: Synthetic oligonucleotide
  Antisense strand to SEQ ID NO: 1437838
ucaacuagguucaacccug

SEQ ID NO: 1437840 - RNA, 19 nt, Artificial Sequence
  Description of Artificial Sequence: Synthetic oligonucleotide
  Sense strand starting at position 2349 of SEQ ID NO: 1243740
gguugaaccuaguugacua

SEQ ID NO: 1437841 - RNA, 19 nt, Artificial Sequence
  Description of Artificial Sequence: Synthetic oligonucleotide
  Antisense strand to SEQ ID NO: 1437840
uagucaacuagguucaacc

SEQ ID NO: 1437842 - RNA, 19 nt, Artificial Sequence
  Description of Artificial Sequence: Synthetic oligonucleotide
  Sense strand starting at position 2398 of SEQ ID NO: 1243740
caugaaugguuugcucuau

SEQ ID NO: 1437843 - RNA, 19 nt, Artificial Sequence
  Description of Artificial Sequence: Synthetic oligonucleotide
  Antisense strand to SEQ ID NO: 1437842
auagagcaaaccauucaug

SEQ ID NO: 1437844 - RNA, 19 nt, Artificial Sequence
  Description of Artificial Sequence: Synthetic oligonucleotide
  Sense strand starting at position 2412 of SEQ ID NO: 1243740
ucuaucuuucuugguuaag

SEQ ID NO: 1437845 - RNA, 19 nt, Artificial Sequence
  Description of Artificial Sequence: Synthetic oligonucleotide
  Antisense strand to SEQ ID NO: 1437844
cuuaaccaagaaagauaga

SEQ ID NO: 1437846 - RNA, 19 nt, Artificial Sequence
  Description of Artificial Sequence: Synthetic oligonucleotide
  Sense strand starting at position 2414 of SEQ ID NO: 1243740
uaucuuucuugguuaagag

SEQ ID NO: 1437847 - RNA, 19 nt, Artificial Sequence
  Description of Artificial Sequence: Synthetic oligonucleotide
  Antisense strand to SEQ ID NO: 1437846
cucuuaaccaagaaagaua

SEQ ID NO: 1437848 - RNA, 19 nt, Artificial Sequence
  Description of Artificial Sequence: Synthetic oligonucleotide
  Sense strand starting at position 2490 of SEQ ID NO: 1243740
cuuuccuaugcguuuguca

SEQ ID NO: 1437849 - RNA, 19 nt, Artificial Sequence
  Description of Artificial Sequence: Synthetic oligonucleotide
  Antisense strand to SEQ ID NO: 1437848
ugacaaacgcauaggaaag

SEQ ID NO: 1437850 - RNA, 19 nt, Artificial Sequence
  Description of Artificial Sequence: Synthetic oligonucleotide
  Sense strand starting at position 2498 of SEQ ID NO: 1243740
ugcguuugucacucuuguu

SEQ ID NO: 1437851 - RNA, 19 nt, Artificial Sequence
  Description of Artificial Sequence: Synthetic oligonucleotide
  Antisense strand to SEQ ID NO: 1437850
aacaagagugacaaacgca

SEQ ID NO: 1437852 - RNA, 19 nt, Artificial Sequence
  Description of Artificial Sequence: Synthetic oligonucleotide
  Sense strand starting at position 2622 of SEQ ID NO: 1243740
ugauaugugcuauacagga

SEQ ID NO: 1437853 - RNA, 19 nt, Artificial Sequence
  Description of Artificial Sequence: Synthetic oligonucleotide
  Antisense strand to SEQ ID NO: 1437852
uccuguauagcacauauca

SEQ ID NO: 1437854 - RNA, 19 nt, Artificial Sequence
  Description of Artificial Sequence: Synthetic oligonucleotide
  Sense strand starting at position 2645 of SEQ ID NO: 1243740
aaguguuaugauugagaau

SEQ ID NO: 1437855 - RNA, 19 nt, Artificial Sequence
  Description of Artificial Sequence: Synthetic oligonucleotide
  Antisense strand to SEQ ID NO: 1437854
auucucaaucauaacacuu

SEQ ID NO: 1437856 - RNA, 19 nt, Artificial Sequence
  Description of Artificial Sequence: Synthetic oligonucleotide
  Sense strand starting at position 2660 of SEQ ID NO: 1243740
gaauauaacugagcaggca

SEQ ID NO: 1437857 - RNA, 19 nt, Artificial Sequence
  Description of Artificial Sequence: Synthetic oligonucleotide
  Antisense strand to SEQ ID NO: 1437856
ugccugcucaguuauauuc

SEQ ID NO: 1437858 - RNA, 19 nt, Artificial Sequence
  Description of Artificial Sequence: Synthetic oligonucleotide
  Sense strand starting at position 2798 of SEQ ID NO: 1243740
caaagaagucuugacguau

SEQ ID NO: 1437859 - RNA, 19 nt, Artificial Sequence
  Description of Artificial Sequence: Synthetic oligonucleotide
  Antisense strand to SEQ ID NO: 1437858
auacgucaagacuucuuug

SEQ ID NO: 1437860 - RNA, 19 nt, Artificial Sequence
  Description of Artificial Sequence: Synthetic oligonucleotide
  Sense strand starting at position 2838 of SEQ ID NO: 1243740
gcaggagacauugggacua

SEQ ID NO: 1437861 - RNA, 19 nt, Artificial Sequence
  Description of Artificial Sequence: Synthetic oligonucleotide
  Antisense strand to SEQ ID NO: 1437860
uagucccaaugucuccugc

SEQ ID NO: 1437862 - RNA, 19 nt, Artificial Sequence
  Description of Artificial Sequence: Synthetic oligonucleotide
  Sense strand starting at position 2840 of SEQ ID NO: 1243740
aggagacauugggacuaaa

SEQ ID NO: 1437863 - RNA, 19 nt, Artificial Sequence
  Description of Artificial Sequence: Synthetic oligonucleotide
  Antisense strand to SEQ ID NO: 1437862
uuuagucccaaugucuccu

SEQ ID NO: 1437864 - RNA, 19 nt, Artificial Sequence
  Description of Artificial Sequence: Synthetic oligonucleotide
  Sense strand starting at position 2943 of SEQ ID NO: 1243740
guuccuguuagggaaugga

SEQ ID NO: 1437865 - RNA, 19 nt, Artificial Sequence
  Description of Artificial Sequence: Synthetic oligonucleotide
  Antisense strand to SEQ ID NO: 1437864
uccauucccuaacaggaac

SEQ ID NO: 1437866 - RNA, 19 nt, Artificial Sequence
  Description of Artificial Sequence: Synthetic oligonucleotide
  Sense strand starting at position 2946 of SEQ ID NO: 1243740
ccuguuagggaauggagau

SEQ ID NO: 1437867 - RNA, 19 nt, Artificial Sequence
  Description of Artificial Sequence: Synthetic oligonucleotide
  Antisense strand to SEQ ID NO: 1437866
aucuccauucccuaacagg

SEQ ID NO: 1437868 - RNA, 19 nt, Artificial Sequence
  Description of Artificial Sequence: Synthetic oligonucleotide
  Sense strand starting at position 2947 of SEQ ID NO: 1243740
cuguuagggaauggagauu

SEQ ID NO: 1437869 - RNA, 19 nt, Artificial Sequence
  Description of Artificial Sequence: Synthetic oligonucleotide
  Antisense strand to SEQ ID NO: 1437868
aaucuccauucccuaacag

SEQ ID NO: 1437870 - RNA, 19 nt, Artificial Sequence
  Description of Artificial Sequence: Synthetic oligonucleotide
  Sense strand starting at position 2988 of SEQ ID NO: 1243740
cgacauuggaaagguugua

SEQ ID NO: 1437871 - RNA, 19 nt, Artificial Sequence
  Description of Artificial Sequence: Synthetic oligonucleotide
  Antisense strand to SEQ ID NO: 1437870
uacaaccuuuccaaugucg

SEQ ID NO: 1437872 - RNA, 19 nt, Artificial Sequence
  Description of Artificial Sequence: Synthetic oligonucleotide
  Sense strand starting at position 3403 of SEQ ID NO: 1243740
gcuaacucuccuuagcuga

SEQ ID NO: 1437873 - RNA, 19 nt, Artificial Sequence
  Description of Artificial Sequence: Synthetic oligonucleotide
  Antisense strand to SEQ ID NO: 1437872
ucagcuaaggagaguuagc

SEQ ID NO: 1437874 - RNA, 19 nt, Artificial Sequence
  Description of Artificial Sequence: Synthetic oligonucleotide
  Sense strand starting at position 3468 of SEQ ID NO: 1243740
ggcagugucaugccagcau

SEQ ID NO: 1437875 - RNA, 19 nt, Artificial Sequence
  Description of Artificial Sequence: Synthetic oligonucleotide
  Antisense strand to SEQ ID NO: 1437874
augcuggcaugacacugcc

SEQ ID NO: 1437876 - RNA, 19 nt, Artificial Sequence
  Description of Artificial Sequence: Synthetic oligonucleotide
  Sense strand starting at position 3564 of SEQ ID NO: 1243740
augauaguagcucaaucuu

SEQ ID NO: 1437877 - RNA, 19 nt, Artificial Sequence
  Description of Artificial Sequence: Synthetic oligonucleotide
  Antisense strand to SEQ ID NO: 1437876
aagauugagcuacuaucau

SEQ ID NO: 1437878 - RNA, 19 nt, Artificial Sequence
  Description of Artificial Sequence: Synthetic oligonucleotide
  Sense strand starting at position 3590 of SEQ ID NO: 1243740
gccugaggaguccacaauu

SEQ ID NO: 1437879 - RNA, 19 nt, Artificial Sequence
  Description of Artificial Sequence: Synthetic oligonucleotide
  Antisense strand to SEQ ID NO: 1437878
aauuguggacuccucaggc

SEQ ID NO: 1437880 - RNA, 19 nt, Artificial Sequence
  Description of Artificial Sequence: Synthetic oligonucleotide
  Sense strand starting at position 3707 of SEQ ID NO: 1243740
uggguagguagauauucuu

SEQ ID NO: 1437881 - RNA, 19 nt, Artificial Sequence
  Description of Artificial Sequence: Synthetic oligonucleotide
  Antisense strand to SEQ ID NO: 1437880
aagaauaucuaccuaccca

SEQ ID NO: 1437882 - RNA, 19 nt, Artificial Sequence
  Description of Artificial Sequence: Synthetic oligonucleotide
  Sense strand starting at position 3710 of SEQ ID NO: 1243740
guagguagauauucuuuag

SEQ ID NO: 1437883 - RNA, 19 nt, Artificial Sequence
  Description of Artificial Sequence: Synthetic oligonucleotide
  Antisense strand to SEQ ID NO: 1437882
cuaaagaauaucuaccuac

SEQ ID NO: 1437884 - RNA, 19 nt, Artificial Sequence
  Description of Artificial Sequence: Synthetic oligonucleotide
  Sense strand starting at position 3713 of SEQ ID NO: 1243740
gguagauauucuuuagaag

SEQ ID NO: 1437885 - RNA, 19 nt, Artificial Sequence
  Description of Artificial Sequence: Synthetic oligonucleotide
  Antisense strand to SEQ ID NO: 1437884
cuucuaaagaauaucuacc

SEQ ID NO: 1437886 - RNA, 19 nt, Artificial Sequence
  Description of Artificial Sequence: Synthetic oligonucleotide
  Sense strand starting at position 3776 of SEQ ID NO: 1243740
gagugaugugaugggauuc

SEQ ID NO: 1437887 - RNA, 19 nt, Artificial Sequence
  Description of Artificial Sequence: Synthetic oligonucleotide
  Antisense strand to SEQ ID NO: 1437886
gaaucccaucacaucacuc

SEQ ID NO: 1437888 - RNA, 19 nt, Artificial Sequence
  Description of Artificial Sequence: Synthetic oligonucleotide
  Sense strand starting at position 3787 of SEQ ID NO: 1243740
ugggauucauguuuaggga

SEQ ID NO: 1437889 - RNA, 19 nt, Artificial Sequence
  Description of Artificial Sequence: Synthetic oligonucleotide
  Antisense strand to SEQ ID NO: 1437888
ucccuaaacaugaauccca

SEQ ID NO: 1437890 - RNA, 19 nt, Artificial Sequence
  Description of Artificial Sequence: Synthetic oligonucleotide
  Sense strand starting at position 3802 of SEQ ID NO: 1243740
gggauuacuggcuguugua

SEQ ID NO: 1437891 - RNA, 19 nt, Artificial Sequence
  Description of Artificial Sequence: Synthetic oligonucleotide
  Antisense strand to SEQ ID NO: 1437890
uacaacagccaguaauccc

SEQ ID NO: 1437892 - RNA, 19 nt, Artificial Sequence
  Description of Artificial Sequence: Synthetic oligonucleotide
  Sense strand starting at position 3863 of SEQ ID NO: 1243740
uuccaaguaccaggugaua

SEQ ID NO: 1437893 - RNA, 19 nt, Artificial Sequence
  Description of Artificial Sequence: Synthetic oligonucleotide
  Antisense strand to SEQ ID NO: 1437892
uaucaccugguacuuggaa

SEQ ID NO: 1437894 - RNA, 19 nt, Artificial Sequence
  Description of Artificial Sequence: Synthetic oligonucleotide
  Sense strand starting at position 3865 of SEQ ID NO: 1243740
ccaaguaccaggugauagu

SEQ ID NO: 1437895 - RNA, 19 nt, Artificial Sequence
  Description of Artificial Sequence: Synthetic oligonucleotide
  Antisense strand to SEQ ID NO: 1437894
acuaucaccugguacuugg

SEQ ID NO: 1437896 - RNA, 19 nt, Artificial Sequence
  Description of Artificial Sequence: Synthetic oligonucleotide
  Sense strand starting at position 3876 of SEQ ID NO: 1243740
gugauaguagcucagccua

SEQ ID NO: 1437897 - RNA, 19 nt, Artificial Sequence
  Description of Artificial Sequence: Synthetic oligonucleotide
  Antisense strand to SEQ ID NO: 1437896
uaggcugagcuacuaucac

SEQ ID NO: 1437898 - RNA, 19 nt, Artificial Sequence
  Description of Artificial Sequence: Synthetic oligonucleotide
  Sense strand starting at position 3908 of SEQ ID NO: 1243740
ggaugcauucuagauguau

SEQ ID NO: 1437899 - RNA, 19 nt, Artificial Sequence
  Description of Artificial Sequence: Synthetic oligonucleotide
  Antisense strand to SEQ ID NO: 1437898
auacaucuagaaugcaucc

SEQ ID NO: 1437900 - RNA, 19 nt, Artificial Sequence
  Description of Artificial Sequence: Synthetic oligonucleotide
  Sense strand starting at position 103 of SEQ ID NO: 1243741
gcucauagaguauauuaaa

SEQ ID NO: 1437901 - RNA, 19 nt, Artificial Sequence
  Description of Artificial Sequence: Synthetic oligonucleotide
  Antisense strand to SEQ ID NO: 1437900
uuuaauauacucuaugagc

SEQ ID NO: 1437902 - RNA, 19 nt, Artificial Sequence
  Description of Artificial Sequence: Synthetic oligonucleotide
  Sense strand starting at position 117 of SEQ ID NO: 1243741
uuaaauacgcuggguguua

SEQ ID NO: 1437903 - RNA, 19 nt, Artificial Sequence
  Description of Artificial Sequence: Synthetic oligonucleotide
  Antisense strand to SEQ ID NO: 1437902
uaacacccagcguauuuaa

SEQ ID NO: 1437904 - RNA, 19 nt, Artificial Sequence
  Description of Artificial Sequence: Synthetic oligonucleotide
  Sense strand starting at position 126 of SEQ ID NO: 1243741
cuggguguuagugauuaaa

SEQ ID NO: 1437905 - RNA, 19 nt, Artificial Sequence
  Description of Artificial Sequence: Synthetic oligonucleotide
  Antisense strand to SEQ ID NO: 1437904
uuuaaucacuaacacccag

SEQ ID NO: 1437906 - RNA, 19 nt, Artificial Sequence
  Description of Artificial Sequence: Synthetic oligonucleotide
  Sense strand starting at position 157 of SEQ ID NO: 1243741
agacaugcauuaucuguaa

SEQ ID NO: 1437907 - RNA, 19 nt, Artificial Sequence
  Description of Artificial Sequence: Synthetic oligonucleotide
  Antisense strand to SEQ ID NO: 1437906
uuacagauaaugcaugucu

SEQ ID NO: 1437908 - RNA, 19 nt, Artificial Sequence
  Description of Artificial Sequence: Synthetic oligonucleotide
  Sense strand starting at position 643 of SEQ ID NO: 1243741
ccguuuccuguguaaggaa

SEQ ID NO: 1437909 - RNA, 19 nt, Artificial Sequence
  Description of Artificial Sequence: Synthetic oligonucleotide
  Antisense strand to SEQ ID NO: 1437908
uuccuuacacaggaaacgg

SEQ ID NO: 1437910 - RNA, 19 nt, Artificial Sequence
  Description of Artificial Sequence: Synthetic oligonucleotide
  Sense strand starting at position 700 of SEQ ID NO: 1243741
gcuguuucccgcucagacu

SEQ ID NO: 1437911 - RNA, 19 nt, Artificial Sequence
  Description of Artificial Sequence: Synthetic oligonucleotide
  Antisense strand to SEQ ID NO: 1437910
agucugagcgggaaacagc

SEQ ID NO: 1437912 - RNA, 19 nt, Artificial Sequence
  Description of Artificial Sequence: Synthetic oligonucleotide
  Sense strand starting at position 1015 of SEQ ID NO: 1243741
gcuaaucuuccacagcgga

SEQ ID NO: 1437913 - RNA, 19 nt, Artificial Sequence
  Description of Artificial Sequence: Synthetic oligonucleotide
  Antisense strand to SEQ ID NO: 1437912
uccgcuguggaagauuagc

SEQ ID NO: 1437914 - RNA, 19 nt, Artificial Sequence
  Description of Artificial Sequence: Synthetic oligonucleotide
  Sense strand starting at position 1115 of SEQ ID NO: 1243741
cagggcuuucccugugaag

SEQ ID NO: 1437915 - RNA, 19 nt, Artificial Sequence
  Description of Artificial Sequence: Synthetic oligonucleotide
  Antisense strand to SEQ ID NO: 1437914
cuucacagggaaagcccug

SEQ ID NO: 1437916 - RNA, 19 nt, Artificial Sequence
  Description of Artificial Sequence: Synthetic oligonucleotide
  Sense strand starting at position 1227 of SEQ ID NO: 1243741
gauuguuugagucacggag

SEQ ID NO: 1437917 - RNA, 19 nt, Artificial Sequence
  Description of Artificial Sequence: Synthetic oligonucleotide
  Antisense strand to SEQ ID NO: 1437916
cuccgugacucaaacaauc

SEQ ID NO: 1437918 - RNA, 19 nt, Artificial Sequence
  Description of Artificial Sequence: Synthetic oligonucleotide
  Sense strand starting at position 1490 of SEQ ID NO: 1243741
auccuagaugcugguauau

SEQ ID NO: 1437919 - RNA, 19 nt, Artificial Sequence
  Description of Artificial Sequence: Synthetic oligonucleotide
  Antisense strand to SEQ ID NO: 1437918
auauaccagcaucuaggau

SEQ ID NO: 1437920 - RNA, 19 nt, Artificial Sequence
  Description of Artificial Sequence: Synthetic oligonucleotide
  Sense strand starting at position 1538 of SEQ ID NO: 1243741
cucauugcucccgaaacac

SEQ ID NO: 1437921 - RNA, 19 nt, Artificial Sequence
  Description of Artificial Sequence: Synthetic oligonucleotide
  Antisense strand to SEQ ID NO: 1437920
guguuucgggagcaaugag

SEQ ID NO: 1437922 - RNA, 19 nt, Artificial Sequence
  Description of Artificial Sequence: Synthetic oligonucleotide
  Sense strand starting at position 1930 of SEQ ID NO: 1243741
gcgcacuuccgggauugga

SEQ ID NO: 1437923 - RNA, 19 nt, Artificial Sequence
  Description of Artificial Sequence: Synthetic oligonucleotide
  Antisense strand to SEQ ID NO: 1437922
uccaaucccggaagugcgc

SEQ ID NO: 1437924 - RNA, 19 nt, Artificial Sequence
  Description of Artificial Sequence: Synthetic oligonucleotide
  Sense strand starting at position 2162 of SEQ ID NO: 1243741
aaacguauccgacagcaaa

SEQ ID NO: 1437925 - RNA, 19 nt, Artificial Sequence
  Description of Artificial Sequence: Synthetic oligonucleotide
  Antisense strand to SEQ ID NO: 1437924
uuugcugucggauacguuu

SEQ ID NO: 1437926 - RNA, 19 nt, Artificial Sequence
  Description of Artificial Sequence: Synthetic oligonucleotide
  Sense strand starting at position 2197 of SEQ ID NO: 1243741
augaacgucuugcuaacau

SEQ ID NO: 1437927 - RNA, 19 nt, Artificial Sequence
  Description of Artificial Sequence: Synthetic oligonucleotide
  Antisense strand to SEQ ID NO: 1437926
auguuagcaagacguucau

SEQ ID NO: 1437928 - RNA, 19 nt, Artificial Sequence
  Description of Artificial Sequence: Synthetic oligonucleotide
  Sense strand starting at position 2304 of SEQ ID NO: 1243741
gaugcuccagucuguaauu

SEQ ID NO: 1437929 - RNA, 19 nt, Artificial Sequence
  Description of Artificial Sequence: Synthetic oligonucleotide
  Antisense strand to SEQ ID NO: 1437928
aauuacagacuggagcauc

SEQ ID NO: 1437930 - RNA, 19 nt, Artificial Sequence
  Description of Artificial Sequence: Synthetic oligonucleotide
  Sense strand starting at position 2420 of SEQ ID NO: 1243741
uuguccugccuuuaugaaa

SEQ ID NO: 1437931 - RNA, 19 nt, Artificial Sequence
  Description of Artificial Sequence: Synthetic oligonucleotide
  Antisense strand to SEQ ID NO: 1437930
uuucauaaaggcaggacaa

SEQ ID NO: 1437932 - RNA, 19 nt, Artificial Sequence
  Description of Artificial Sequence: Synthetic oligonucleotide
  Sense strand starting at position 2431 of SEQ ID NO: 1243741
uuaugaaauuuacagcaga

SEQ ID NO: 1437933 - RNA, 19 nt, Artificial Sequence
  Description of Artificial Sequence: Synthetic oligonucleotide
  Antisense strand to SEQ ID NO: 1437932
ucugcuguaaauuucauaa

SEQ ID NO: 1437934 - RNA, 19 nt, Artificial Sequence
  Description of Artificial Sequence: Synthetic oligonucleotide
  Sense strand starting at position 2454 of SEQ ID NO: 1243741
ccaaauacugcaugagaag

SEQ ID NO: 1437935 - RNA, 19 nt, Artificial Sequence
  Description of Artificial Sequence: Synthetic oligonucleotide
  Antisense strand to SEQ ID NO: 1437934
cuucucaugcaguauuugg

SEQ ID NO: 1437936 - RNA, 19 nt, Artificial Sequence
  Description of Artificial Sequence: Synthetic oligonucleotide
  Sense strand starting at position 2556 of SEQ ID NO: 1243741
uaggcaaugucaucaauga

SEQ ID NO: 1437937 - RNA, 19 nt, Artificial Sequence
  Description of Artificial Sequence: Synthetic oligonucleotide
  Antisense strand to SEQ ID NO: 1437936
ucauugaugacauugccua

SEQ ID NO: 1437938 - RNA, 19 nt, Artificial Sequence
  Description of Artificial Sequence: Synthetic oligonucleotide
  Sense strand starting at position 2557 of SEQ ID NO: 1243741
aggcaaugucaucaaugac

SEQ ID NO: 1437939 - RNA, 19 nt, Artificial Sequence
  Description of Artificial Sequence: Synthetic oligonucleotide
  Antisense strand to SEQ ID NO: 1437938
gucauugaugacauugccu

SEQ ID NO: 1437940 - RNA, 19 nt, Artificial Sequence
  Description of Artificial Sequence: Synthetic oligonucleotide
  Sense strand starting at position 2563 of SEQ ID NO: 1243741
ugucaucaaugacugcuaa

SEQ ID NO: 1437941 - RNA, 19 nt, Artificial Sequence
  Description of Artificial Sequence: Synthetic oligonucleotide
  Antisense strand to SEQ ID NO: 1437940
uuagcagucauugaugaca

SEQ ID NO: 1437942 - RNA, 19 nt, Artificial Sequence
  Description of Artificial Sequence: Synthetic oligonucleotide
  Sense strand starting at position 2564 of SEQ ID NO: 1243741
gucaucaaugacugcuaau

SEQ ID NO: 1437943 - RNA, 19 nt, Artificial Sequence
  Description of Artificial Sequence: Synthetic oligonucleotide
  Antisense strand to SEQ ID NO: 1437942
auuagcagucauugaugac

SEQ ID NO: 1437944 - RNA, 19 nt, Artificial Sequence
  Description of Artificial Sequence: Synthetic oligonucleotide
  Sense strand starting at position 2657 of SEQ ID NO: 1243741
ccugaaugugaacaagcuu

SEQ ID NO: 1437945 - RNA, 19 nt, Artificial Sequence
  Description of Artificial Sequence: Synthetic oligonucleotide
  Antisense strand to SEQ ID NO: 1437944
aagcuuguucacauucagg

SEQ ID NO: 1437946 - RNA, 19 nt, Artificial Sequence
  Description of Artificial Sequence: Synthetic oligonucleotide
  Sense strand starting at position 2670 of SEQ ID NO: 1243741
aagcuucuagagugaauua

SEQ ID NO: 1437947 - RNA, 19 nt, Artificial Sequence
  Description of Artificial Sequence: Synthetic oligonucleotide
  Antisense strand to SEQ ID NO: 1437946
uaauucacucuagaagcuu

SEQ ID NO: 1437948 - RNA, 19 nt, Artificial Sequence
  Description of Artificial Sequence: Synthetic oligonucleotide
  Sense strand starting at position 2704 of SEQ ID NO: 1243741
acaagacuguacuaaagga

SEQ ID NO: 1437949 - RNA, 19 nt, Artificial Sequence
  Description of Artificial Sequence: Synthetic oligonucleotide
  Antisense strand to SEQ ID NO: 1437948
uccuuuaguacagucuugu

SEQ ID NO: 1437950 - RNA, 19 nt, Artificial Sequence
  Description of Artificial Sequence: Synthetic oligonucleotide
  Sense strand starting at position 2785 of SEQ ID NO: 1243741
ccaagagcauucccaaguu

SEQ ID NO: 1437951 - RNA, 19 nt, Artificial Sequence
  Description of Artificial Sequence: Synthetic oligonucleotide
  Antisense strand to SEQ ID NO: 1437950
aacuugggaaugcucuugg

SEQ ID NO: 1437952 - RNA, 19 nt, Artificial Sequence
  Description of Artificial Sequence: Synthetic oligonucleotide
  Sense strand starting at position 3252 of SEQ ID NO: 1243741
caaaguagacucuguagca

SEQ ID NO: 1437953 - RNA, 19 nt, Artificial Sequence
  Description of Artificial Sequence: Synthetic oligonucleotide
  Antisense strand to SEQ ID NO: 1437952
ugcuacagagucuacuuug

SEQ ID NO: 1437954 - RNA, 19 nt, Artificial Sequence
  Description of Artificial Sequence: Synthetic oligonucleotide
  Sense strand starting at position 3253 of SEQ ID NO: 1243741
aaaguagacucuguagcaa

SEQ ID NO: 1437955 - RNA, 19 nt, Artificial Sequence
  Description of Artificial Sequence: Synthetic oligonucleotide
  Antisense strand to SEQ ID NO: 1437954
uugcuacagagucuacuuu

SEQ ID NO: 1437956 - RNA, 19 nt, Artificial Sequence
  Description of Artificial Sequence: Synthetic oligonucleotide
  Sense strand starting at position 3318 of SEQ ID NO: 1243741
uaggaagccuuggaagaaa

SEQ ID NO: 1437957 - RNA, 19 nt, Artificial Sequence
  Description of Artificial Sequence: Synthetic oligonucleotide
  Antisense strand to SEQ ID NO: 1437956
uuucuuccaaggcuuccua

SEQ ID NO: 1437958 - RNA, 19 nt, Artificial Sequence
  Description of Artificial Sequence: Synthetic oligonucleotide
  Sense strand starting at position 3392 of SEQ ID NO: 1243741
aaagcugucccuugugaag

SEQ ID NO: 1437959 - RNA, 19 nt, Artificial Sequence
  Description of Artificial Sequence: Synthetic oligonucleotide
  Antisense strand to SEQ ID NO: 1437958
cuucacaagggacagcuuu

SEQ ID NO: 1437960 - RNA, 19 nt, Artificial Sequence
  Description of Artificial Sequence: Synthetic oligonucleotide
  Sense strand starting at position 3414 of SEQ ID NO: 1243741
aucuacauucuguagcgaa

SEQ ID NO: 1437961 - RNA, 19 nt, Artificial Sequence
  Description of Artificial Sequence: Synthetic oligonucleotide
  Antisense strand to SEQ ID NO: 1437960
uucgcuacagaauguagau

SEQ ID NO: 1437962 - RNA, 19 nt, Artificial Sequence
  Description of Artificial Sequence: Synthetic oligonucleotide
  Sense strand starting at position 3468 of SEQ ID NO: 1243741
ggagaacucugauaagaag

SEQ ID NO: 1437963 - RNA, 19 nt, Artificial Sequence
  Description of Artificial Sequence: Synthetic oligonucleotide
  Antisense strand to SEQ ID NO: 1437962
cuucuuaucagaguucucc

SEQ ID NO: 1437964 - RNA, 19 nt, Artificial Sequence
  Description of Artificial Sequence: Synthetic oligonucleotide
  Sense strand starting at position 3522 of SEQ ID NO: 1243741
ggagacuuccucugcuuaa

SEQ ID NO: 1437965 - RNA, 19 nt, Artificial Sequence
  Description of Artificial Sequence: Synthetic oligonucleotide
  Antisense strand to SEQ ID NO: 1437964
uuaagcagaggaagucucc

SEQ ID NO: 1437966 - RNA, 19 nt, Artificial Sequence
  Description of Artificial Sequence: Synthetic oligonucleotide
  Sense strand starting at position 3540 of SEQ ID NO: 1243741
auggaaaucuuggucucca

SEQ ID NO: 1437967 - RNA, 19 nt, Artificial Sequence
  Description of Artificial Sequence: Synthetic oligonucleotide
  Antisense strand to SEQ ID NO: 1437966
uggagaccaagauuuccau

SEQ ID NO: 1437968 - RNA, 19 nt, Artificial Sequence
  Description of Artificial Sequence: Synthetic oligonucleotide
  Sense strand starting at position 3541 of SEQ ID NO: 1243741
uggaaaucuuggucuccac

SEQ ID NO: 1437969 - RNA, 19 nt, Artificial Sequence
  Description of Artificial Sequence: Synthetic oligonucleotide
  Antisense strand to SEQ ID NO: 1437968
guggagaccaagauuucca

SEQ ID NO: 1437970 - RNA, 19 nt, Artificial Sequence
  Description of Artificial Sequence: Synthetic oligonucleotide
  Sense strand starting at position 3718 of SEQ ID NO: 1243741
aauguacaucuacguguau

SEQ ID NO: 1437971 - RNA, 19 nt, Artificial Sequence
  Description of Artificial Sequence: Synthetic oligonucleotide
  Antisense strand to SEQ ID NO: 1437970
auacacguagauguacauu

SEQ ID NO: 1437972 - RNA, 19 nt, Artificial Sequence
  Description of Artificial Sequence: Synthetic oligonucleotide
  Sense strand starting at position 3732 of SEQ ID NO: 1243741
uguauugacugucuuaugu

SEQ ID NO: 1437973 - RNA, 19 nt, Artificial Sequence
  Description of Artificial Sequence: Synthetic oligonucleotide
  Antisense strand to SEQ ID NO: 1437972
acauaagacagucaauaca

SEQ ID NO: 1437974 - RNA, 19 nt, Artificial Sequence
  Description of Artificial Sequence: Synthetic oligonucleotide
  Sense strand starting at position 3739 of SEQ ID NO: 1243741
acugucuuaugucuuccaa

SEQ ID NO: 1437975 - RNA, 19 nt, Artificial Sequence
  Description of Artificial Sequence: Synthetic oligonucleotide
  Antisense strand to SEQ ID NO: 1437974
uuggaagacauaagacagu

SEQ ID NO: 1437976 - RNA, 19 nt, Artificial Sequence
  Description of Artificial Sequence: Synthetic oligonucleotide
  Sense strand starting at position 3782 of SEQ ID NO: 1243741
ggguacguguucuuaggau

SEQ ID NO: 1437977 - RNA, 19 nt, Artificial Sequence
  Description of Artificial Sequence: Synthetic oligonucleotide
  Antisense strand to SEQ ID NO: 1437976
auccuaagaacacguaccc

SEQ ID NO: 1437978 - RNA, 19 nt, Artificial Sequence
  Description of Artificial Sequence: Synthetic oligonucleotide
  Sense strand starting at position 3821 of SEQ ID NO: 1243741
ggcccuuggucacucauau

SEQ ID NO: 1437979 - RNA, 19 nt, Artificial Sequence
  Description of Artificial Sequence: Synthetic oligonucleotide
  Antisense strand to SEQ ID NO: 1437978
auaugagugaccaagggcc

SEQ ID NO: 1437980 - RNA, 19 nt, Artificial Sequence
  Description of Artificial Sequence: Synthetic oligonucleotide
  Sense strand starting at position 72 of SEQ ID NO: 1243742
ucaauaaugcaguauagcu

SEQ ID NO: 1437981 - RNA, 19 nt, Artificial Sequence
  Description of Artificial Sequence: Synthetic oligonucleotide
  Antisense strand to SEQ ID NO: 1437980
agcuauacugcauuauuga

SEQ ID NO: 1437982 - RNA, 19 nt, Artificial Sequence
  Description of Artificial Sequence: Synthetic oligonucleotide
  Sense strand starting at position 94 of SEQ ID NO: 1243742
cguaguaucacacacuugu

SEQ ID NO: 1437983 - RNA, 19 nt, Artificial Sequence
  Description of Artificial Sequence: Synthetic oligonucleotide
  Antisense strand to SEQ ID NO: 1437982
acaagugugugauacuacg

SEQ ID NO: 1437984 - RNA, 19 nt, Artificial Sequence
  Description of Artificial Sequence: Synthetic oligonucleotide
  Sense strand starting at position 277 of SEQ ID NO: 1243742
auaacugacacggguguua

SEQ ID NO: 1437985 - RNA, 19 nt, Artificial Sequence
  Description of Artificial Sequence: Synthetic oligonucleotide
  Antisense strand to SEQ ID NO: 1437984
uaacacccgugucaguuau

SEQ ID NO: 1437986 - RNA, 19 nt, Artificial Sequence
  Description of Artificial Sequence: Synthetic oligonucleotide
  Sense strand starting at position 316 of SEQ ID NO: 1243742
gccugaagacugugcacaa

SEQ ID NO: 1437987 - RNA, 19 nt, Artificial Sequence
  Description of Artificial Sequence: Synthetic oligonucleotide
  Antisense strand to SEQ ID NO: 1437986
uugugcacagucuucaggc

SEQ ID NO: 1437988 - RNA, 19 nt, Artificial Sequence
  Description of Artificial Sequence: Synthetic oligonucleotide
  Sense strand starting at position 317 of SEQ ID NO: 1243742
ccugaagacugugcacaaa

SEQ ID NO: 1437989 - RNA, 19 nt, Artificial Sequence
  Description of Artificial Sequence: Synthetic oligonucleotide
  Antisense strand to SEQ ID NO: 1437988
uuugugcacagucuucagg

SEQ ID NO: 1437990 - RNA, 19 nt, Artificial Sequence
  Description of Artificial Sequence: Synthetic oligonucleotide
  Sense strand starting at position 374 of SEQ ID NO: 1243742
ggcuguggcgugucacaaa

SEQ ID NO: 1437991 - RNA, 19 nt, Artificial Sequence
  Description of Artificial Sequence: Synthetic oligonucleotide
  Antisense strand to SEQ ID NO: 1437990
uuugugacacgccacagcc

SEQ ID NO: 1437992 - RNA, 19 nt, Artificial Sequence
  Description of Artificial Sequence: Synthetic oligonucleotide
  Sense strand starting at position 516 of SEQ ID NO: 1243742
ggcuaaguggacugugagu

SEQ ID NO: 1437993 - RNA, 19 nt, Artificial Sequence
  Description of Artificial Sequence: Synthetic oligonucleotide
  Antisense strand to SEQ ID NO: 1437992
acucacaguccacuuagcc

SEQ ID NO: 1437994 - RNA, 19 nt, Artificial Sequence
  Description of Artificial Sequence: Synthetic oligonucleotide
  Sense strand starting at position 1081 of SEQ ID NO: 1243742
cgugguuaguggacuguga

SEQ ID NO: 1437995 - RNA, 19 nt, Artificial Sequence
  Description of Artificial Sequence: Synthetic oligonucleotide
  Antisense strand to SEQ ID NO: 1437994
ucacaguccacuaaccacg

SEQ ID NO: 1437996 - RNA, 19 nt, Artificial Sequence
  Description of Artificial Sequence: Synthetic oligonucleotide
  Sense strand starting at position 1083 of SEQ ID NO: 1243742
ugguuaguggacugugagu

SEQ ID NO: 1437997 - RNA, 19 nt, Artificial Sequence
  Description of Artificial Sequence: Synthetic oligonucleotide
  Antisense strand to SEQ ID NO: 1437996
acucacaguccacuaacca

SEQ ID NO: 1437998 - RNA, 19 nt, Artificial Sequence
  Description of Artificial Sequence: Synthetic oligonucleotide
  Sense strand starting at position 1094 of SEQ ID NO: 1243742
cugugaguccuacgaagag

SEQ ID NO: 1437999 - RNA, 19 nt, Artificial Sequence
  Description of Artificial Sequence: Synthetic oligonucleotide
  Antisense strand to SEQ ID NO: 1437998
cucuucguaggacucacag

SEQ ID NO: 1438000 - RNA, 19 nt, Artificial Sequence
  Description of Artificial Sequence: Synthetic oligonucleotide
  Sense strand starting at position 1208 of SEQ ID NO: 1243742
gcucauagaguauauuaaa

SEQ ID NO: 1438001 - RNA, 19 nt, Artificial Sequence
  Description of Artificial Sequence: Synthetic oligonucleotide
  Antisense strand to SEQ ID NO: 1438000
uuuaauauacucuaugagc

SEQ ID NO: 1438002 - RNA, 19 nt, Artificial Sequence
  Description of Artificial Sequence: Synthetic oligonucleotide
  Sense strand starting at position 1222 of SEQ ID NO: 1243742
uuaaauacgcuggguguua

SEQ ID NO: 1438003 - RNA, 19 nt, Artificial Sequence
  Description of Artificial Sequence: Synthetic oligonucleotide
  Antisense strand to SEQ ID NO: 1438002
uaacacccagcguauuuaa

SEQ ID NO: 1438004 - RNA, 19 nt, Artificial Sequence
  Description of Artificial Sequence: Synthetic oligonucleotide
  Sense strand starting at position 1231 of SEQ ID NO: 1243742
cuggguguuagugauuaaa

SEQ ID NO: 1438005 - RNA, 19 nt, Artificial Sequence
  Description of Artificial Sequence: Synthetic oligonucleotide
  Antisense strand to SEQ ID NO: 1438004
uuuaaucacuaacacccag

SEQ ID NO: 1438006 - RNA, 19 nt, Artificial Sequence
  Description of Artificial Sequence: Synthetic oligonucleotide
  Sense strand starting at position 1262 of SEQ ID NO: 1243742
agacaugcauuaucuguaa

SEQ ID NO: 1438007 - RNA, 19 nt, Artificial Sequence
  Description of Artificial Sequence: Synthetic oligonucleotide
  Antisense strand to SEQ ID NO: 1438006
uuacagauaaugcaugucu

SEQ ID NO: 1438008 - RNA, 19 nt, Artificial Sequence
  Description of Artificial Sequence: Synthetic oligonucleotide
  Sense strand starting at position 1747 of SEQ ID NO: 1243742
cccguuuccuguguaagga

SEQ ID NO: 1438009 - RNA, 19 nt, Artificial Sequence
  Description of Artificial Sequence: Synthetic oligonucleotide
  Antisense strand to SEQ ID NO: 1438008
uccuuacacaggaaacggg

SEQ ID NO: 1438010 - RNA, 19 nt, Artificial Sequence
  Description of Artificial Sequence: Synthetic oligonucleotide
  Sense strand starting at position 1748 of SEQ ID NO: 1243742
ccguuuccuguguaaggaa

SEQ ID NO: 1438011 - RNA, 19 nt, Artificial Sequence
  Description of Artificial Sequence: Synthetic oligonucleotide
  Antisense strand to SEQ ID NO: 1438010
uuccuuacacaggaaacgg

SEQ ID NO: 1438012 - RNA, 19 nt, Artificial Sequence
  Description of Artificial Sequence: Synthetic oligonucleotide
  Sense strand starting at position 1805 of SEQ ID NO: 1243742
gcuguuucccgcucagacu

SEQ ID NO: 1438013 - RNA, 19 nt, Artificial Sequence
  Description of Artificial Sequence: Synthetic oligonucleotide
  Antisense strand to SEQ ID NO: 1438012
agucugagcgggaaacagc

SEQ ID NO: 1438014 - RNA, 19 nt, Artificial Sequence
  Description of Artificial Sequence: Synthetic oligonucleotide
  Sense strand starting at position 2120 of SEQ ID NO: 1243742
gcuaaucuuccacagcgga

SEQ ID NO: 1438015 - RNA, 19 nt, Artificial Sequence
  Description of Artificial Sequence: Synthetic oligonucleotide
  Antisense strand to SEQ ID NO: 1438014
uccgcuguggaagauuagc

SEQ ID NO: 1438016 - RNA, 19 nt, Artificial Sequence
  Description of Artificial Sequence: Synthetic oligonucleotide
  Sense strand starting at position 2220 of SEQ ID NO: 1243742
cagggcuuucccugugaag

SEQ ID NO: 1438017 - RNA, 19 nt, Artificial Sequence
  Description of Artificial Sequence: Synthetic oligonucleotide
  Antisense strand to SEQ ID NO: 1438016
cuucacagggaaagcccug

SEQ ID NO: 1438018 - RNA, 19 nt, Artificial Sequence
  Description of Artificial Sequence: Synthetic oligonucleotide
  Sense strand starting at position 2222 of SEQ ID NO: 1243742
gggcuuucccugugaaguc

SEQ ID NO: 1438019 - RNA, 19 nt, Artificial Sequence
  Description of Artificial Sequence: Synthetic oligonucleotide
  Antisense strand to SEQ ID NO: 1438018
gacuucacagggaaagccc

SEQ ID NO: 1438020 - RNA, 19 nt, Artificial Sequence
  Description of Artificial Sequence: Synthetic oligonucleotide
  Sense strand starting at position 2332 of SEQ ID NO: 1243742
gauuguuugagucacggag

SEQ ID NO: 1438021 - RNA, 19 nt, Artificial Sequence
  Description of Artificial Sequence: Synthetic oligonucleotide
  Antisense strand to SEQ ID NO: 1438020
cuccgugacucaaacaauc

SEQ ID NO: 1438022 - RNA, 19 nt, Artificial Sequence
  Description of Artificial Sequence: Synthetic oligonucleotide
  Sense strand starting at position 2595 of SEQ ID NO: 1243742
auccuagaugcugguauau

SEQ ID NO: 1438023 - RNA, 19 nt, Artificial Sequence
  Description of Artificial Sequence: Synthetic oligonucleotide
  Antisense strand to SEQ ID NO: 1438022
auauaccagcaucuaggau

SEQ ID NO: 1438024 - RNA, 19 nt, Artificial Sequence
  Description of Artificial Sequence: Synthetic oligonucleotide
  Sense strand starting at position 2643 of SEQ ID NO: 1243742
cucauugcucccgaaacac

SEQ ID NO: 1438025 - RNA, 19 nt, Artificial Sequence
  Description of Artificial Sequence: Synthetic oligonucleotide
  Antisense strand to SEQ ID NO: 1438024
guguuucgggagcaaugag

SEQ ID NO: 1438026 - RNA, 19 nt, Artificial Sequence
  Description of Artificial Sequence: Synthetic oligonucleotide
  Sense strand starting at position 3035 of SEQ ID NO: 1243742
gcgcacuuccgggauugga

SEQ ID NO: 1438027 - RNA, 19 nt, Artificial Sequence
  Description of Artificial Sequence: Synthetic oligonucleotide
  Antisense strand to SEQ ID NO: 1438026
uccaaucccggaagugcgc

SEQ ID NO: 1438028 - RNA, 19 nt, Artificial Sequence
  Description of Artificial Sequence: Synthetic oligonucleotide
  Sense strand starting at position 3267 of SEQ ID NO: 1243742
aaacguauccgacagcaaa

SEQ ID NO: 1438029 - RNA, 19 nt, Artificial Sequence
  Description of Artificial Sequence: Synthetic oligonucleotide
  Antisense strand to SEQ ID NO: 1438028
uuugcugucggauacguuu

SEQ ID NO: 1438030 - RNA, 19 nt, Artificial Sequence
  Description of Artificial Sequence: Synthetic oligonucleotide
  Sense strand starting at position 3302 of SEQ ID NO: 1243742
augaacgucuugcuaacau

SEQ ID NO: 1438031 - RNA, 19 nt, Artificial Sequence
  Description of Artificial Sequence: Synthetic oligonucleotide
  Antisense strand to SEQ ID NO: 1438030
auguuagcaagacguucau

SEQ ID NO: 1438032 - RNA, 19 nt, Artificial Sequence
  Description of Artificial Sequence: Synthetic oligonucleotide
  Sense strand starting at position 3335 of SEQ ID NO: 1243742
agcgguucucauugccaaa

SEQ ID NO: 1438033 - RNA, 19 nt, Artificial Sequence
  Description of Artificial Sequence: Synthetic oligonucleotide
  Antisense strand to SEQ ID NO: 1438032
uuuggcaaugagaaccgcu

SEQ ID NO: 1438034 - RNA, 19 nt, Artificial Sequence
  Description of Artificial Sequence: Synthetic oligonucleotide
  Sense strand starting at position 3409 of SEQ ID NO: 1243742
gaugcuccagucuguaauu

SEQ ID NO: 1438035 - RNA, 19 nt, Artificial Sequence
  Description of Artificial Sequence: Synthetic oligonucleotide
  Antisense strand to SEQ ID NO: 1438034
aauuacagacuggagcauc

SEQ ID NO: 1438036 - RNA, 19 nt, Artificial Sequence
  Description of Artificial Sequence: Synthetic oligonucleotide
  Sense strand starting at position 3485 of SEQ ID NO: 1243742
caguuuguggccugguuaa

SEQ ID NO: 1438037 - RNA, 19 nt, Artificial Sequence
  Description of Artificial Sequence: Synthetic oligonucleotide
  Antisense strand to SEQ ID NO: 1438036
uuaaccaggccacaaacug

SEQ ID NO: 1438038 - RNA, 19 nt, Artificial Sequence
  Description of Artificial Sequence: Synthetic oligonucleotide
  Sense strand starting at position 3525 of SEQ ID NO: 1243742
uuguccugccuuuaugaaa

SEQ ID NO: 1438039 - RNA, 19 nt, Artificial Sequence
  Description of Artificial Sequence: Synthetic oligonucleotide
  Antisense strand to SEQ ID NO: 1438038
uuucauaaaggcaggacaa

SEQ ID NO: 1438040 - RNA, 19 nt, Artificial Sequence
  Description of Artificial Sequence: Synthetic oligonucleotide
  Sense strand starting at position 3536 of SEQ ID NO: 1243742
uuaugaaauuuacagcaga

SEQ ID NO: 1438041 - RNA, 19 nt, Artificial Sequence
  Description of Artificial Sequence: Synthetic oligonucleotide
  Antisense strand to SEQ ID NO: 1438040
ucugcuguaaauuucauaa

SEQ ID NO: 1438042 - RNA, 19 nt, Artificial Sequence
  Description of Artificial Sequence: Synthetic oligonucleotide
  Sense strand starting at position 3559 of SEQ ID NO: 1243742
ccaaauacugcaugagaag

SEQ ID NO: 1438043 - RNA, 19 nt, Artificial Sequence
  Description of Artificial Sequence: Synthetic oligonucleotide
  Antisense strand to SEQ ID NO: 1438042
cuucucaugcaguauuugg

SEQ ID NO: 1438044 - RNA, 19 nt, Artificial Sequence
  Description of Artificial Sequence: Synthetic oligonucleotide
  Sense strand starting at position 3661 of SEQ ID NO: 1243742
uaggcaaugucaucaauga

SEQ ID NO: 1438045 - RNA, 19 nt, Artificial Sequence
  Description of Artificial Sequence: Synthetic oligonucleotide
  Antisense strand to SEQ ID NO: 1438044
ucauugaugacauugccua

SEQ ID NO: 1438046 - RNA, 19 nt, Artificial Sequence
  Description of Artificial Sequence: Synthetic oligonucleotide
  Sense strand starting at position 3662 of SEQ ID NO: 1243742
aggcaaugucaucaaugac

SEQ ID NO: 1438047 - RNA, 19 nt, Artificial Sequence
  Description of Artificial Sequence: Synthetic oligonucleotide
  Antisense strand to SEQ ID NO: 1438046
gucauugaugacauugccu

SEQ ID NO: 1438048 - RNA, 19 nt, Artificial Sequence
  Description of Artificial Sequence: Synthetic oligonucleotide
  Sense strand starting at position 3668 of SEQ ID NO: 1243742
ugucaucaaugacugcuaa

SEQ ID NO: 1438049 - RNA, 19 nt, Artificial Sequence
  Description of Artificial Sequence: Synthetic oligonucleotide
  Antisense strand to SEQ ID NO: 1438048
uuagcagucauugaugaca

SEQ ID NO: 1438050 - RNA, 19 nt, Artificial Sequence
  Description of Artificial Sequence: Synthetic oligonucleotide
  Sense strand starting at position 3669 of SEQ ID NO: 1243742
gucaucaaugacugcuaau

SEQ ID NO: 1438051 - RNA, 19 nt, Artificial Sequence
  Description of Artificial Sequence: Synthetic oligonucleotide
  Antisense strand to SEQ ID NO: 1438050
auuagcagucauugaugac

SEQ ID NO: 1438052 - RNA, 19 nt, Artificial Sequence
  Description of Artificial Sequence: Synthetic oligonucleotide
  Sense strand starting at position 3762 of SEQ ID NO: 1243742
ccugaaugugaacaagcuu

SEQ ID NO: 1438053 - RNA, 19 nt, Artificial Sequence
  Description of Artificial Sequence: Synthetic oligonucleotide
  Antisense strand to SEQ ID NO: 1438052
aagcuuguucacauucagg

SEQ ID NO: 1438054 - RNA, 19 nt, Artificial Sequence
  Description of Artificial Sequence: Synthetic oligonucleotide
  Sense strand starting at position 3775 of SEQ ID NO: 1243742
aagcuucuagagugaauua

SEQ ID NO: 1438055 - RNA, 19 nt, Artificial Sequence
  Description of Artificial Sequence: Synthetic oligonucleotide
  Antisense strand to SEQ ID NO: 1438054
uaauucacucuagaagcuu

SEQ ID NO: 1438056 - RNA, 19 nt, Artificial Sequence
  Description of Artificial Sequence: Synthetic oligonucleotide
  Sense strand starting at position 3809 of SEQ ID NO: 1243742
acaagacuguacuaaagga

SEQ ID NO: 1438057 - RNA, 19 nt, Artificial Sequence
  Description of Artificial Sequence: Synthetic oligonucleotide
  Antisense strand to SEQ ID NO: 1438056
uccuuuaguacagucuugu

SEQ ID NO: 1438058 - RNA, 19 nt, Artificial Sequence
  Description of Artificial Sequence: Synthetic oligonucleotide
  Sense strand starting at position 3890 of SEQ ID NO: 1243742
ccaagagcauucccaaguu

SEQ ID NO: 1438059 - RNA, 19 nt, Artificial Sequence
  Description of Artificial Sequence: Synthetic oligonucleotide
  Antisense strand to SEQ ID NO: 1438058
aacuugggaaugcucuugg

SEQ ID NO: 1438060 - RNA, 19 nt, Artificial Sequence
  Description of Artificial Sequence: Synthetic oligonucleotide
  Sense strand starting at position 40 of SEQ ID NO: 1243743
uuuauaaaguuucuaggga

SEQ ID NO: 1438061 - RNA, 19 nt, Artificial Sequence
  Description of Artificial Sequence: Synthetic oligonucleotide
  Antisense strand to SEQ ID NO: 1438060
ucccuagaaacuuuauaaa

SEQ ID NO: 1438062 - RNA, 19 nt, Artificial Sequence
  Description of Artificial Sequence: Synthetic oligonucleotide
  Sense strand starting at position 170 of SEQ ID NO: 1243743
auguuuacugacugcauca

SEQ ID NO: 1438063 - RNA, 19 nt, Artificial Sequence
  Description of Artificial Sequence: Synthetic oligonucleotide
  Antisense strand to SEQ ID NO: 1438062
ugaugcagucaguaaacau

SEQ ID NO: 1438064 - RNA, 19 nt, Artificial Sequence
  Description of Artificial Sequence: Synthetic oligonucleotide
  Sense strand starting at position 172 of SEQ ID NO: 1243743
guuuacugacugcaucaga

SEQ ID NO: 1438065 - RNA, 19 nt, Artificial Sequence
  Description of Artificial Sequence: Synthetic oligonucleotide
  Antisense strand to SEQ ID NO: 1438064
ucugaugcagucaguaaac

SEQ ID NO: 1438066 - RNA, 19 nt, Artificial Sequence
  Description of Artificial Sequence: Synthetic oligonucleotide
  Sense strand starting at position 222 of SEQ ID NO: 1243743
agcaucgucaugugauaug

SEQ ID NO: 1438067 - RNA, 19 nt, Artificial Sequence
  Description of Artificial Sequence: Synthetic oligonucleotide
  Antisense strand to SEQ ID NO: 1438066
cauaucacaugacgaugcu

SEQ ID NO: 1438068 - RNA, 19 nt, Artificial Sequence
  Description of Artificial Sequence: Synthetic oligonucleotide
  Sense strand starting at position 370 of SEQ ID NO: 1243743
ccaauuaagugaguucuca

SEQ ID NO: 1438069 - RNA, 19 nt, Artificial Sequence
  Description of Artificial Sequence: Synthetic oligonucleotide
  Antisense strand to SEQ ID NO: 1438068
ugagaacucacuuaauugg

SEQ ID NO: 1438070 - RNA, 19 nt, Artificial Sequence
  Description of Artificial Sequence: Synthetic oligonucleotide
  Sense strand starting at position 374 of SEQ ID NO: 1243743
uuaagugaguucucacucu

SEQ ID NO: 1438071 - RNA, 19 nt, Artificial Sequence
  Description of Artificial Sequence: Synthetic oligonucleotide
  Antisense strand to SEQ ID NO: 1438070
agagugagaacucacuuaa

SEQ ID NO: 1438072 - RNA, 19 nt, Artificial Sequence
  Description of Artificial Sequence: Synthetic oligonucleotide
  Sense strand starting at position 405 of SEQ ID NO: 1243743
gagagcugguugguaacaa

SEQ ID NO: 1438073 - RNA, 19 nt, Artificial Sequence
  Description of Artificial Sequence: Synthetic oligonucleotide
  Antisense strand to SEQ ID NO: 1438072
uuguuaccaaccagcucuc

SEQ ID NO: 1438074 - RNA, 19 nt, Artificial Sequence
  Description of Artificial Sequence: Synthetic oligonucleotide
  Sense strand starting at position 533 of SEQ ID NO: 1243743
agcagaugcuucguguaca

SEQ ID NO: 1438075 - RNA, 19 nt, Artificial Sequence
  Description of Artificial Sequence: Synthetic oligonucleotide
  Antisense strand to SEQ ID NO: 1438074
uguacacgaagcaucugcu

SEQ ID NO: 1438076 - RNA, 19 nt, Artificial Sequence
  Description of Artificial Sequence: Synthetic oligonucleotide
  Sense strand starting at position 594 of SEQ ID NO: 1243743
auugccuagccucaaguau

SEQ ID NO: 1438077 - RNA, 19 nt, Artificial Sequence
  Description of Artificial Sequence: Synthetic oligonucleotide
  Antisense strand to SEQ ID NO: 1438076
auacuugaggcuaggcaau

SEQ ID NO: 1438078 - RNA, 19 nt, Artificial Sequence
  Description of Artificial Sequence: Synthetic oligonucleotide
  Sense strand starting at position 608 of SEQ ID NO: 1243743
aguauuccuuuauaggaau

SEQ ID NO: 1438079 - RNA, 19 nt, Artificial Sequence
  Description of Artificial Sequence: Synthetic oligonucleotide
  Antisense strand to SEQ ID NO: 1438078
auuccuauaaaggaauacu

SEQ ID NO: 1438080 - RNA, 19 nt, Artificial Sequence
  Description of Artificial Sequence: Synthetic oligonucleotide
  Sense strand starting at position 681 of SEQ ID NO: 1243743
uggugaugaugagaaagaa

SEQ ID NO: 1438081 - RNA, 19 nt, Artificial Sequence
  Description of Artificial Sequence: Synthetic oligonucleotide
  Antisense strand to SEQ ID NO: 1438080
uucuuucucaucaucacca

SEQ ID NO: 1438082 - RNA, 19 nt, Artificial Sequence
  Description of Artificial Sequence: Synthetic oligonucleotide
  Sense strand starting at position 1343 of SEQ ID NO: 1243743
caacaaagugacugugaaa

SEQ ID NO: 1438083 - RNA, 19 nt, Artificial Sequence
  Description of Artificial Sequence: Synthetic oligonucleotide
  Antisense strand to SEQ ID NO: 1438082
uuucacagucacuuuguug

SEQ ID NO: 1438084 - RNA, 19 nt, Artificial Sequence
  Description of Artificial Sequence: Synthetic oligonucleotide
  Sense strand starting at position 1346 of SEQ ID NO: 1243743
caaagugacugugaaauaa

SEQ ID NO: 1438085 - RNA, 19 nt, Artificial Sequence
  Description of Artificial Sequence: Synthetic oligonucleotide
  Antisense strand to SEQ ID NO: 1438084
uuauuucacagucacuuug

SEQ ID NO: 1438086 - RNA, 19 nt, Artificial Sequence
  Description of Artificial Sequence: Synthetic oligonucleotide
  Sense strand starting at position 1420 of SEQ ID NO: 1243743
uaugaauucuagucugugu

SEQ ID NO: 1438087 - RNA, 19 nt, Artificial Sequence
  Description of Artificial Sequence: Synthetic oligonucleotide
  Antisense strand to SEQ ID NO: 1438086
acacagacuagaauucaua

SEQ ID NO: 1438088 - RNA, 19 nt, Artificial Sequence
  Description of Artificial Sequence: Synthetic oligonucleotide
  Sense strand starting at position 1547 of SEQ ID NO: 1243743
caggacucuggcugaucaa

SEQ ID NO: 1438089 - RNA, 19 nt, Artificial Sequence
  Description of Artificial Sequence: Synthetic oligonucleotide
  Antisense strand to SEQ ID NO: 1438088
uugaucagccagaguccug

SEQ ID NO: 1438090 - RNA, 19 nt, Artificial Sequence
  Description of Artificial Sequence: Synthetic oligonucleotide
  Sense strand starting at position 1669 of SEQ ID NO: 1243743
cccaucaucucgccaggaa

SEQ ID NO: 1438091 - RNA, 19 nt, Artificial Sequence
  Description of Artificial Sequence: Synthetic oligonucleotide
  Antisense strand to SEQ ID NO: 1438090
uuccuggcgagaugauggg

SEQ ID NO: 1438092 - RNA, 19 nt, Artificial Sequence
  Description of Artificial Sequence: Synthetic oligonucleotide
  Sense strand starting at position 1689 of SEQ ID NO: 1243743
acaggucaugcauaaacuu

SEQ ID NO: 1438093 - RNA, 19 nt, Artificial Sequence
  Description of Artificial Sequence: Synthetic oligonucleotide
  Antisense strand to SEQ ID NO: 1438092
aaguuuaugcaugaccugu

SEQ ID NO: 1438094 - RNA, 19 nt, Artificial Sequence
  Description of Artificial Sequence: Synthetic oligonucleotide
  Sense strand starting at position 1698 of SEQ ID NO: 1243743
gcauaaacuucugaaugaa

SEQ ID NO: 1438095 - RNA, 19 nt, Artificial Sequence
  Description of Artificial Sequence: Synthetic oligonucleotide
  Antisense strand to SEQ ID NO: 1438094
uucauucagaaguuuaugc

SEQ ID NO: 1438096 - RNA, 19 nt, Artificial Sequence
  Description of Artificial Sequence: Synthetic oligonucleotide
  Sense strand starting at position 1714 of SEQ ID NO: 1243743
gaaugaaaguucuugugcu

SEQ ID NO: 1438097 - RNA, 19 nt, Artificial Sequence
  Description of Artificial Sequence: Synthetic oligonucleotide
  Antisense strand to SEQ ID NO: 1438096
agcacaagaacuuucauuc

SEQ ID NO: 1438098 - RNA, 19 nt, Artificial Sequence
  Description of Artificial Sequence: Synthetic oligonucleotide
  Sense strand starting at position 1718 of SEQ ID NO: 1243743
gaaaguucuugugcuuuag

SEQ ID NO: 1438099 - RNA, 19 nt, Artificial Sequence
  Description of Artificial Sequence: Synthetic oligonucleotide
  Antisense strand to SEQ ID NO: 1438098
cuaaagcacaagaacuuuc

SEQ ID NO: 1438100 - RNA, 19 nt, Artificial Sequence
  Description of Artificial Sequence: Synthetic oligonucleotide
  Sense strand starting at position 1754 of SEQ ID NO: 1243743
guacccuaucauuguucuu

SEQ ID NO: 1438101 - RNA, 19 nt, Artificial Sequence
  Description of Artificial Sequence: Synthetic oligonucleotide
  Antisense strand to SEQ ID NO: 1438100
aagaacaaugauaggguac

SEQ ID NO: 1438102 - RNA, 19 nt, Artificial Sequence
  Description of Artificial Sequence: Synthetic oligonucleotide
  Sense strand starting at position 2010 of SEQ ID NO: 1243743
gcgguuuggcuccagaacu

SEQ ID NO: 1438103 - RNA, 19 nt, Artificial Sequence
  Description of Artificial Sequence: Synthetic oligonucleotide
  Antisense strand to SEQ ID NO: 1438102
aguucuggagccaaaccgc

SEQ ID NO: 1438104 - RNA, 19 nt, Artificial Sequence
  Description of Artificial Sequence: Synthetic oligonucleotide
  Sense strand starting at position 2166 of SEQ ID NO: 1243743
gagcgaagacuuuggcaga

SEQ ID NO: 1438105 - RNA, 19 nt, Artificial Sequence
  Description of Artificial Sequence: Synthetic oligonucleotide
  Antisense strand to SEQ ID NO: 1438104
ucugccaaagucuucgcuc

SEQ ID NO: 1438106 - RNA, 19 nt, Artificial Sequence
  Description of Artificial Sequence: Synthetic oligonucleotide
  Sense strand starting at position 2220 of SEQ ID NO: 1243743
ucccaagaauacugucaga

SEQ ID NO: 1438107 - RNA, 19 nt, Artificial Sequence
  Description of Artificial Sequence: Synthetic oligonucleotide
  Antisense strand to SEQ ID NO: 1438106
ucugacaguauucuuggga

SEQ ID NO: 1438108 - RNA, 19 nt, Artificial Sequence
  Description of Artificial Sequence: Synthetic oligonucleotide
  Sense strand starting at position 2441 of SEQ ID NO: 1243743
ccaggaaguuguuaauaau

SEQ ID NO: 1438109 - RNA, 19 nt, Artificial Sequence
  Description of Artificial Sequence: Synthetic oligonucleotide
  Antisense strand to SEQ ID NO: 1438108
auuauuaacaacuuccugg

SEQ ID NO: 1438110 - RNA, 19 nt, Artificial Sequence
  Description of Artificial Sequence: Synthetic oligonucleotide
  Sense strand starting at position 2444 of SEQ ID NO: 1243743
ggaaguuguuaauaauaag

SEQ ID NO: 1438111 - RNA, 19 nt, Artificial Sequence
  Description of Artificial Sequence: Synthetic oligonucleotide
  Antisense strand to SEQ ID NO: 1438110
cuuauuauuaacaacuucc

SEQ ID NO: 1438112 - RNA, 19 nt, Artificial Sequence
  Description of Artificial Sequence: Synthetic oligonucleotide
  Sense strand starting at position 3221 of SEQ ID NO: 1243743
gcaaacgucuuguuguuau

SEQ ID NO: 1438113 - RNA, 19 nt, Artificial Sequence
  Description of Artificial Sequence: Synthetic oligonucleotide
  Antisense strand to SEQ ID NO: 1438112
auaacaacaagacguuugc

SEQ ID NO: 1438114 - RNA, 19 nt, Artificial Sequence
  Description of Artificial Sequence: Synthetic oligonucleotide
  Sense strand starting at position 3354 of SEQ ID NO: 1243743
ggauaauuauauuggcaag

SEQ ID NO: 1438115 - RNA, 19 nt, Artificial Sequence
  Description of Artificial Sequence: Synthetic oligonucleotide
  Antisense strand to SEQ ID NO: 1438114
cuugccaauauaauuaucc

SEQ ID NO: 1438116 - RNA, 19 nt, Artificial Sequence
  Description of Artificial Sequence: Synthetic oligonucleotide
  Sense strand starting at position 3402 of SEQ ID NO: 1243743
uccuacuggcagugagauu

SEQ ID NO: 1438117 - RNA, 19 nt, Artificial Sequence
  Description of Artificial Sequence: Synthetic oligonucleotide
  Antisense strand to SEQ ID NO: 1438116
aaucucacugccaguagga

SEQ ID NO: 1438118 - RNA, 19 nt, Artificial Sequence
  Description of Artificial Sequence: Synthetic oligonucleotide
  Sense strand starting at position 3409 of SEQ ID NO: 1243743
ggcagugagauugguaaac

SEQ ID NO: 1438119 - RNA, 19 nt, Artificial Sequence
  Description of Artificial Sequence: Synthetic oligonucleotide
  Antisense strand to SEQ ID NO: 1438118
guuuaccaaucucacugcc

SEQ ID NO: 1438120 - RNA, 19 nt, Artificial Sequence
  Description of Artificial Sequence: Synthetic oligonucleotide
  Sense strand starting at position 3411 of SEQ ID NO: 1243743
cagugagauugguaaacaa

SEQ ID NO: 1438121 - RNA, 19 nt, Artificial Sequence
  Description of Artificial Sequence: Synthetic oligonucleotide
  Antisense strand to SEQ ID NO: 1438120
uuguuuaccaaucucacug

SEQ ID NO: 1438122 - RNA, 19 nt, Artificial Sequence
  Description of Artificial Sequence: Synthetic oligonucleotide
  Sense strand starting at position 3451 of SEQ ID NO: 1243743
gugcaugcucugugacuca

SEQ ID NO: 1438123 - RNA, 19 nt, Artificial Sequence
  Description of Artificial Sequence: Synthetic oligonucleotide
  Antisense strand to SEQ ID NO: 1438122
ugagucacagagcaugcac

SEQ ID NO: 1438124 - RNA, 19 nt, Artificial Sequence
  Description of Artificial Sequence: Synthetic oligonucleotide
  Sense strand starting at position 3474 of SEQ ID NO: 1243743
uucuacuuauaggaggaau

SEQ ID NO: 1438125 - RNA, 19 nt, Artificial Sequence
  Description of Artificial Sequence: Synthetic oligonucleotide
  Antisense strand to SEQ ID NO: 1438124
auuccuccuauaaguagaa

SEQ ID NO: 1438126 - RNA, 19 nt, Artificial Sequence
  Description of Artificial Sequence: Synthetic oligonucleotide
  Sense strand starting at position 3487 of SEQ ID NO: 1243743
aggaauuaguccuaaggag

SEQ ID NO: 1438127 - RNA, 19 nt, Artificial Sequence
  Description of Artificial Sequence: Synthetic oligonucleotide
  Antisense strand to SEQ ID NO: 1438126
cuccuuaggacuaauuccu

SEQ ID NO: 1438128 - RNA, 19 nt, Artificial Sequence
  Description of Artificial Sequence: Synthetic oligonucleotide
  Sense strand starting at position 3515 of SEQ ID NO: 1243743
ugaggacuguuacaauagu

SEQ ID NO: 1438129 - RNA, 19 nt, Artificial Sequence
  Description of Artificial Sequence: Synthetic oligonucleotide
  Antisense strand to SEQ ID NO: 1438128
acuauuguaacaguccuca

SEQ ID NO: 1438130 - RNA, 19 nt, Artificial Sequence
  Description of Artificial Sequence: Synthetic oligonucleotide
  Sense strand starting at position 3530 of SEQ ID NO: 1243743
uagugacaauuuggaaaca

SEQ ID NO: 1438131 - RNA, 19 nt, Artificial Sequence
  Description of Artificial Sequence: Synthetic oligonucleotide
  Antisense strand to SEQ ID NO: 1438130
uguuuccaaauugucacua

SEQ ID NO: 1438132 - RNA, 19 nt, Artificial Sequence
  Description of Artificial Sequence: Synthetic oligonucleotide
  Sense strand starting at position 3531 of SEQ ID NO: 1243743
agugacaauuuggaaacaa

SEQ ID NO: 1438133 - RNA, 19 nt, Artificial Sequence
  Description of Artificial Sequence: Synthetic oligonucleotide
  Antisense strand to SEQ ID NO: 1438132
uuguuuccaaauugucacu

SEQ ID NO: 1438134 - RNA, 19 nt, Artificial Sequence
  Description of Artificial Sequence: Synthetic oligonucleotide
  Sense strand starting at position 3549 of SEQ ID NO: 1243743
auugcagugucacuaauag

SEQ ID NO: 1438135 - RNA, 19 nt, Artificial Sequence
  Description of Artificial Sequence: Synthetic oligonucleotide
  Antisense strand to SEQ ID NO: 1438134
cuauuagugacacugcaau

SEQ ID NO: 1438136 - RNA, 19 nt, Artificial Sequence
  Description of Artificial Sequence: Synthetic oligonucleotide
  Sense strand starting at position 3608 of SEQ ID NO: 1243743
gucacuauauaucuauuga

SEQ ID NO: 1438137 - RNA, 19 nt, Artificial Sequence
  Description of Artificial Sequence: Synthetic oligonucleotide
  Antisense strand to SEQ ID NO: 1438136
ucaauagauauauagugac

SEQ ID NO: 1438138 - RNA, 19 nt, Artificial Sequence
  Description of Artificial Sequence: Synthetic oligonucleotide
  Sense strand starting at position 3871 of SEQ ID NO: 1243743
ggagcaauggcgugaucuc

SEQ ID NO: 1438139 - RNA, 19 nt, Artificial Sequence
  Description of Artificial Sequence: Synthetic oligonucleotide
  Antisense strand to SEQ ID NO: 1438138
gagaucacgccauugcucc

SEQ ID NO: 1438140 - RNA, 19 nt, Artificial Sequence
  Description of Artificial Sequence: Synthetic oligonucleotide
  Sense strand starting at position 408 of SEQ ID NO: 1243744
uaaaguaucuuccugggaa

SEQ ID NO: 1438141 - RNA, 19 nt, Artificial Sequence
  Description of Artificial Sequence: Synthetic oligonucleotide
  Antisense strand to SEQ ID NO: 1438140
uucccaggaagauacuuua

SEQ ID NO: 1438142 - RNA, 19 nt, Artificial Sequence
  Description of Artificial Sequence: Synthetic oligonucleotide
  Sense strand starting at position 410 of SEQ ID NO: 1243744
aaguaucuuccugggaaag

SEQ ID NO: 1438143 - RNA, 19 nt, Artificial Sequence
  Description of Artificial Sequence: Synthetic oligonucleotide
  Antisense strand to SEQ ID NO: 1438142
cuuucccaggaagauacuu

SEQ ID NO: 1438144 - RNA, 19 nt, Artificial Sequence
  Description of Artificial Sequence: Synthetic oligonucleotide
  Sense strand starting at position 450 of SEQ ID NO: 1243744
ggcuauugccaacaccuua

SEQ ID NO: 1438145 - RNA, 19 nt, Artificial Sequence
  Description of Artificial Sequence: Synthetic oligonucleotide
  Antisense strand to SEQ ID NO: 1438144
uaagguguuggcaauagcc

SEQ ID NO: 1438146 - RNA, 19 nt, Artificial Sequence
  Description of Artificial Sequence: Synthetic oligonucleotide
  Sense strand starting at position 480 of SEQ ID NO: 1243744
ugaugucccuuucuuaaag

SEQ ID NO: 1438147 - RNA, 19 nt, Artificial Sequence
  Description of Artificial Sequence: Synthetic oligonucleotide
  Antisense strand to SEQ ID NO: 1438146
cuuuaagaaagggacauca

SEQ ID NO: 1438148 - RNA, 19 nt, Artificial Sequence
  Description of Artificial Sequence: Synthetic oligonucleotide
  Sense strand starting at position 543 of SEQ ID NO: 1243744
ucugucucucugggaugua

SEQ ID NO: 1438149 - RNA, 19 nt, Artificial Sequence
  Description of Artificial Sequence: Synthetic oligonucleotide
  Antisense strand to SEQ ID NO: 1438148
uacaucccagagagacaga

SEQ ID NO: 1438150 - RNA, 19 nt, Artificial Sequence
  Description of Artificial Sequence: Synthetic oligonucleotide
  Sense strand starting at position 546 of SEQ ID NO: 1243744
gucucucugggauguaaug

SEQ ID NO: 1438151 - RNA, 19 nt, Artificial Sequence
  Description of Artificial Sequence: Synthetic oligonucleotide
  Antisense strand to SEQ ID NO: 1438150
cauuacaucccagagagac

SEQ ID NO: 1438152 - RNA, 19 nt, Artificial Sequence
  Description of Artificial Sequence: Synthetic oligonucleotide
  Sense strand starting at position 576 of SEQ ID NO: 1243744
ucaggaguauccuucucaa

SEQ ID NO: 1438153 - RNA, 19 nt, Artificial Sequence
  Description of Artificial Sequence: Synthetic oligonucleotide
  Antisense strand to SEQ ID NO: 1438152
uugagaaggauacuccuga

SEQ ID NO: 1438154 - RNA, 19 nt, Artificial Sequence
  Description of Artificial Sequence: Synthetic oligonucleotide
  Sense strand starting at position 579 of SEQ ID NO: 1243744
ggaguauccuucucaagaa

SEQ ID NO: 1438155 - RNA, 19 nt, Artificial Sequence
  Description of Artificial Sequence: Synthetic oligonucleotide
  Antisense strand to SEQ ID NO: 1438154
uucuugagaaggauacucc

SEQ ID NO: 1438156 - RNA, 19 nt, Artificial Sequence
  Description of Artificial Sequence: Synthetic oligonucleotide
  Sense strand starting at position 651 of SEQ ID NO: 1243744
ccaguuacugugggaggau

SEQ ID NO: 1438157 - RNA, 19 nt, Artificial Sequence
  Description of Artificial Sequence: Synthetic oligonucleotide
  Antisense strand to SEQ ID NO: 1438156
auccucccacaguaacugg

SEQ ID NO: 1438158 - RNA, 19 nt, Artificial Sequence
  Description of Artificial Sequence: Synthetic oligonucleotide
  Sense strand starting at position 818 of SEQ ID NO: 1243744
gucacuucugcacaaaguu

SEQ ID NO: 1438159 - RNA, 19 nt, Artificial Sequence
  Description of Artificial Sequence: Synthetic oligonucleotide
  Antisense strand to SEQ ID NO: 1438158
aacuuugugcagaagugac

SEQ ID NO: 1438160 - RNA, 19 nt, Artificial Sequence
  Description of Artificial Sequence: Synthetic oligonucleotide
  Sense strand starting at position 849 of SEQ ID NO: 1243744
cgagguaccuucuucccua

SEQ ID NO: 1438161 - RNA, 19 nt, Artificial Sequence
  Description of Artificial Sequence: Synthetic oligonucleotide
  Antisense strand to SEQ ID NO: 1438160
uagggaagaagguaccucg

SEQ ID NO: 1438162 - RNA, 19 nt, Artificial Sequence
  Description of Artificial Sequence: Synthetic oligonucleotide
  Sense strand starting at position 852 of SEQ ID NO: 1243744
gguaccuucuucccuauua

SEQ ID NO: 1438163 - RNA, 19 nt, Artificial Sequence
  Description of Artificial Sequence: Synthetic oligonucleotide
  Antisense strand to SEQ ID NO: 1438162
uaauagggaagaagguacc

SEQ ID NO: 1438164 - RNA, 19 nt, Artificial Sequence
  Description of Artificial Sequence: Synthetic oligonucleotide
  Sense strand starting at position 907 of SEQ ID NO: 1243744
acuagugucuagcuuuauc

SEQ ID NO: 1438165 - RNA, 19 nt, Artificial Sequence
  Description of Artificial Sequence: Synthetic oligonucleotide
  Antisense strand to SEQ ID NO: 1438164
gauaaagcuagacacuagu

SEQ ID NO: 1438166 - RNA, 19 nt, Artificial Sequence
  Description of Artificial Sequence: Synthetic oligonucleotide
  Sense strand starting at position 912 of SEQ ID NO: 1243744
ugucuagcuuuaucuucua

SEQ ID NO: 1438167 - RNA, 19 nt, Artificial Sequence
  Description of Artificial Sequence: Synthetic oligonucleotide
  Antisense strand to SEQ ID NO: 1438166
uagaagauaaagcuagaca

SEQ ID NO: 1438168 - RNA, 19 nt, Artificial Sequence
  Description of Artificial Sequence: Synthetic oligonucleotide
  Sense strand starting at position 1039 of SEQ ID NO: 1243744
uguuaugucuucucuaauc

SEQ ID NO: 1438169 - RNA, 19 nt, Artificial Sequence
  Description of Artificial Sequence: Synthetic oligonucleotide
  Antisense strand to SEQ ID NO: 1438168
gauuagagaagacauaaca

SEQ ID NO: 1438170 - RNA, 19 nt, Artificial Sequence
  Description of Artificial Sequence: Synthetic oligonucleotide
  Sense strand starting at position 1041 of SEQ ID NO: 1243744
uuaugucuucucuaaucgu

SEQ ID NO: 1438171 - RNA, 19 nt, Artificial Sequence
  Description of Artificial Sequence: Synthetic oligonucleotide
  Antisense strand to SEQ ID NO: 1438170
acgauuagagaagacauaa

SEQ ID NO: 1438172 - RNA, 19 nt, Artificial Sequence
  Description of Artificial Sequence: Synthetic oligonucleotide
  Sense strand starting at position 1047 of SEQ ID NO: 1243744
cuucucuaaucguuuggaa

SEQ ID NO: 1438173 - RNA, 19 nt, Artificial Sequence
  Description of Artificial Sequence: Synthetic oligonucleotide
  Antisense strand to SEQ ID NO: 1438172
uuccaaacgauuagagaag

SEQ ID NO: 1438174 - RNA, 19 nt, Artificial Sequence
  Description of Artificial Sequence: Synthetic oligonucleotide
  Sense strand starting at position 1049 of SEQ ID NO: 1243744
ucucuaaucguuuggaaga

SEQ ID NO: 1438175 - RNA, 19 nt, Artificial Sequence
  Description of Artificial Sequence: Synthetic oligonucleotide
  Antisense strand to SEQ ID NO: 1438174
ucuuccaaacgauuagaga

SEQ ID NO: 1438176 - RNA, 19 nt, Artificial Sequence
  Description of Artificial Sequence: Synthetic oligonucleotide
  Sense strand starting at position 1056 of SEQ ID NO: 1243744
ucguuuggaagauauuauc

SEQ ID NO: 1438177 - RNA, 19 nt, Artificial Sequence
  Description of Artificial Sequence: Synthetic oligonucleotide
  Antisense strand to SEQ ID NO: 1438176
gauaauaucuuccaaacga

SEQ ID NO: 1438178 - RNA, 19 nt, Artificial Sequence
  Description of Artificial Sequence: Synthetic oligonucleotide
  Sense strand starting at position 1059 of SEQ ID NO: 1243744
uuuggaagauauuaucaag

SEQ ID NO: 1438179 - RNA, 19 nt, Artificial Sequence
  Description of Artificial Sequence: Synthetic oligonucleotide
  Antisense strand to SEQ ID NO: 1438178
cuugauaauaucuuccaaa

SEQ ID NO: 1438180 - RNA, 19 nt, Artificial Sequence
  Description of Artificial Sequence: Synthetic oligonucleotide
  Sense strand starting at position 1062 of SEQ ID NO: 1243744
ggaagauauuaucaaguau

SEQ ID NO: 1438181 - RNA, 19 nt, Artificial Sequence
  Description of Artificial Sequence: Synthetic oligonucleotide
  Antisense strand to SEQ ID NO: 1438180
auacuugauaauaucuucc

SEQ ID NO: 1438182 - RNA, 19 nt, Artificial Sequence
  Description of Artificial Sequence: Synthetic oligonucleotide
  Sense strand starting at position 1073 of SEQ ID NO: 1243744
ucaaguauuucuuugcagu

SEQ ID NO: 1438183 - RNA, 19 nt, Artificial Sequence
  Description of Artificial Sequence: Synthetic oligonucleotide
  Antisense strand to SEQ ID NO: 1438182
acugcaaagaaauacuuga

SEQ ID NO: 1438184 - RNA, 19 nt, Artificial Sequence
  Description of Artificial Sequence: Synthetic oligonucleotide
  Sense strand starting at position 1093 of SEQ ID NO: 1243744
uuccuaugaucucugcguu

SEQ ID NO: 1438185 - RNA, 19 nt, Artificial Sequence
  Description of Artificial Sequence: Synthetic oligonucleotide
  Antisense strand to SEQ ID NO: 1438184
aacgcagagaucauaggaa

SEQ ID NO: 1438186 - RNA, 19 nt, Artificial Sequence
  Description of Artificial Sequence: Synthetic oligonucleotide
  Sense strand starting at position 1171 of SEQ ID NO: 1243744
agaggaaguccgcaagcaa

SEQ ID NO: 1438187 - RNA, 19 nt, Artificial Sequence
  Description of Artificial Sequence: Synthetic oligonucleotide
  Antisense strand to SEQ ID NO: 1438186
uugcuugcggacuuccucu

SEQ ID NO: 1438188 - RNA, 19 nt, Artificial Sequence
  Description of Artificial Sequence: Synthetic oligonucleotide
  Sense strand starting at position 1209 of SEQ ID NO: 1243744
acuccuauguauguaugua

SEQ ID NO: 1438189 - RNA, 19 nt, Artificial Sequence
  Description of Artificial Sequence: Synthetic oligonucleotide
  Antisense strand to SEQ ID NO: 1438188
uacauacauacauaggagu

SEQ ID NO: 1438190 - RNA, 19 nt, Artificial Sequence
  Description of Artificial Sequence: Synthetic oligonucleotide
  Sense strand starting at position 1816 of SEQ ID NO: 1243744
ccggcaucggcuagagguu

SEQ ID NO: 1438191 - RNA, 19 nt, Artificial Sequence
  Description of Artificial Sequence: Synthetic oligonucleotide
  Antisense strand to SEQ ID NO: 1438190
aaccucuagccgaugccgg

SEQ ID NO: 1438192 - RNA, 19 nt, Artificial Sequence
  Description of Artificial Sequence: Synthetic oligonucleotide
  Sense strand starting at position 1825 of SEQ ID NO: 1243744
gcuagagguucggcucaag

SEQ ID NO: 1438193 - RNA, 19 nt, Artificial Sequence
  Description of Artificial Sequence: Synthetic oligonucleotide
  Antisense strand to SEQ ID NO: 1438192
cuugagccgaaccucuagc

SEQ ID NO: 1438194 - RNA, 19 nt, Artificial Sequence
  Description of Artificial Sequence: Synthetic oligonucleotide
  Sense strand starting at position 3362 of SEQ ID NO: 1243744
cagguauggucuucgugga

SEQ ID NO: 1438195 - RNA, 19 nt, Artificial Sequence
  Description of Artificial Sequence: Synthetic oligonucleotide
  Antisense strand to SEQ ID NO: 1438194
uccacgaagaccauaccug

SEQ ID NO: 1438196 - RNA, 19 nt, Artificial Sequence
  Description of Artificial Sequence: Synthetic oligonucleotide
  Sense strand starting at position 3393 of SEQ ID NO: 1243744
cagaaugcgccgugggaau

SEQ ID NO: 1438197 - RNA, 19 nt, Artificial Sequence
  Description of Artificial Sequence: Synthetic oligonucleotide
  Antisense strand to SEQ ID NO: 1438196
auucccacggcgcauucug

SEQ ID NO: 1438198 - RNA, 19 nt, Artificial Sequence
  Description of Artificial Sequence: Synthetic oligonucleotide
  Sense strand starting at position 3428 of SEQ ID NO: 1243744
gguguagaggccugcuuua

SEQ ID NO: 1438199 - RNA, 19 nt, Artificial Sequence
  Description of Artificial Sequence: Synthetic oligonucleotide
  Antisense strand to SEQ ID NO: 1438198
uaaagcaggccucuacacc

SEQ ID NO: 1438200 - RNA, 19 nt, Artificial Sequence
  Description of Artificial Sequence: Synthetic oligonucleotide
  Sense strand starting at position 3440 of SEQ ID NO: 1243744
ugcuuuaaucucugcugau

SEQ ID NO: 1438201 - RNA, 19 nt, Artificial Sequence
  Description of Artificial Sequence: Synthetic oligonucleotide
  Antisense strand to SEQ ID NO: 1438200
aucagcagagauuaaagca

SEQ ID NO: 1438202 - RNA, 19 nt, Artificial Sequence
  Description of Artificial Sequence: Synthetic oligonucleotide
  Sense strand starting at position 3441 of SEQ ID NO: 1243744
gcuuuaaucucugcugaug

SEQ ID NO: 1438203 - RNA, 19 nt, Artificial Sequence
  Description of Artificial Sequence: Synthetic oligonucleotide
  Antisense strand to SEQ ID NO: 1438202
caucagcagagauuaaagc

SEQ ID NO: 1438204 - RNA, 19 nt, Artificial Sequence
  Description of Artificial Sequence: Synthetic oligonucleotide
  Sense strand starting at position 3522 of SEQ ID NO: 1243744
gcagcuuugcaguagucau

SEQ ID NO: 1438205 - RNA, 19 nt, Artificial Sequence
  Description of Artificial Sequence: Synthetic oligonucleotide
  Antisense strand to SEQ ID NO: 1438204
augacuacugcaaagcugc

SEQ ID NO: 1438206 - RNA, 19 nt, Artificial Sequence
  Description of Artificial Sequence: Synthetic oligonucleotide
  Sense strand starting at position 3530 of SEQ ID NO: 1243744
gcaguagucauuugcugag

SEQ ID NO: 1438207 - RNA, 19 nt, Artificial Sequence
  Description of Artificial Sequence: Synthetic oligonucleotide
  Antisense strand to SEQ ID NO: 1438206
cucagcaaaugacuacugc

SEQ ID NO: 1438208 - RNA, 19 nt, Artificial Sequence
  Description of Artificial Sequence: Synthetic oligonucleotide
  Sense strand starting at position 3536 of SEQ ID NO: 1243744
gucauuugcugagacgaug

SEQ ID NO: 1438209 - RNA, 19 nt, Artificial Sequence
  Description of Artificial Sequence: Synthetic oligonucleotide
  Antisense strand to SEQ ID NO: 1438208
caucgucucagcaaaugac

SEQ ID NO: 1438210 - RNA, 19 nt, Artificial Sequence
  Description of Artificial Sequence: Synthetic oligonucleotide
  Sense strand starting at position 3605 of SEQ ID NO: 1243744
ggcuccuaacguuaauaca

SEQ ID NO: 1438211 - RNA, 19 nt, Artificial Sequence
  Description of Artificial Sequence: Synthetic oligonucleotide
  Antisense strand to SEQ ID NO: 1438210
uguauuaacguuaggagcc

SEQ ID NO: 1438212 - RNA, 19 nt, Artificial Sequence
  Description of Artificial Sequence: Synthetic oligonucleotide
  Sense strand starting at position 3614 of SEQ ID NO: 1243744
cguuaauacagagguuucu

SEQ ID NO: 1438213 - RNA, 19 nt, Artificial Sequence
  Description of Artificial Sequence: Synthetic oligonucleotide
  Antisense strand to SEQ ID NO: 1438212
agaaaccucuguauuaacg

SEQ ID NO: 1438214 - RNA, 19 nt, Artificial Sequence
  Description of Artificial Sequence: Synthetic oligonucleotide
  Sense strand starting at position 3798 of SEQ ID NO: 1243744
gugucauuccaaggcagca

SEQ ID NO: 1438215 - RNA, 19 nt, Artificial Sequence
  Description of Artificial Sequence: Synthetic oligonucleotide
  Antisense strand to SEQ ID NO: 1438214
ugcugccuuggaaugacac

SEQ ID NO: 1438216 - RNA, 19 nt, Artificial Sequence
  Description of Artificial Sequence: Synthetic oligonucleotide
  Sense strand starting at position 3845 of SEQ ID NO: 1243744
ugguaccauagcgaaauau

SEQ ID NO: 1438217 - RNA, 19 nt, Artificial Sequence
  Description of Artificial Sequence: Synthetic oligonucleotide
  Antisense strand to SEQ ID NO: 1438216
auauuucgcuaugguacca

SEQ ID NO: 1438218 - RNA, 19 nt, Artificial Sequence
  Description of Artificial Sequence: Synthetic oligonucleotide
  Sense strand starting at position 3928 of SEQ ID NO: 1243744
uuagauaagugaccuugau

SEQ ID NO: 1438219 - RNA, 19 nt, Artificial Sequence
  Description of Artificial Sequence: Synthetic oligonucleotide
  Antisense strand to SEQ ID NO: 1438218
aucaaggucacuuaucuaa

SEQ ID NO: 1438220 - RNA, 19 nt, Artificial Sequence
  Description of Artificial Sequence: Synthetic oligonucleotide
  Sense strand starting at position 268 of SEQ ID NO: 1243745
ggaucuugacaagggcauu

SEQ ID NO: 1438221 - RNA, 19 nt, Artificial Sequence
  Description of Artificial Sequence: Synthetic oligonucleotide
  Antisense strand to SEQ ID NO: 1438220
aaugcccuugucaagaucc

SEQ ID NO: 1438222 - RNA, 19 nt, Artificial Sequence
  Description of Artificial Sequence: Synthetic oligonucleotide
  Sense strand starting at position 421 of SEQ ID NO: 1243745
gggcguccuccagcgugaa

SEQ ID NO: 1438223 - RNA, 19 nt, Artificial Sequence
  Description of Artificial Sequence: Synthetic oligonucleotide
  Antisense strand to SEQ ID NO: 1438222
uucacgcuggaggacgccc

SEQ ID NO: 1438224 - RNA, 19 nt, Artificial Sequence
  Description of Artificial Sequence: Synthetic oligonucleotide
  Sense strand starting at position 779 of SEQ ID NO: 1243745
ccugucauccuggcucgua

SEQ ID NO: 1438225 - RNA, 19 nt, Artificial Sequence
  Description of Artificial Sequence: Synthetic oligonucleotide
  Antisense strand to SEQ ID NO: 1438224
uacgagccaggaugacagg

SEQ ID NO: 1438226 - RNA, 19 nt, Artificial Sequence
  Description of Artificial Sequence: Synthetic oligonucleotide
  Sense strand starting at position 792 of SEQ ID NO: 1243745
cucguagaccuuugagaac

SEQ ID NO: 1438227 - RNA, 19 nt, Artificial Sequence
  Description of Artificial Sequence: Synthetic oligonucleotide
  Antisense strand to SEQ ID NO: 1438226
guucucaaaggucuacgag

SEQ ID NO: 1438228 - RNA, 19 nt, Artificial Sequence
  Description of Artificial Sequence: Synthetic oligonucleotide
  Sense strand starting at position 1011 of SEQ ID NO: 1243745
gacaccugucagcauagaa

SEQ ID NO: 1438229 - RNA, 19 nt, Artificial Sequence
  Description of Artificial Sequence: Synthetic oligonucleotide
  Antisense strand to SEQ ID NO: 1438228
uucuaugcugacagguguc

SEQ ID NO: 1438230 - RNA, 19 nt, Artificial Sequence
  Description of Artificial Sequence: Synthetic oligonucleotide
  Sense strand starting at position 1156 of SEQ ID NO: 1243745
ccagaugguguccacugau

SEQ ID NO: 1438231 - RNA, 19 nt, Artificial Sequence
  Description of Artificial Sequence: Synthetic oligonucleotide
  Antisense strand to SEQ ID NO: 1438230
aucaguggacaccaucugg

SEQ ID NO: 1438232 - RNA, 19 nt, Artificial Sequence
  Description of Artificial Sequence: Synthetic oligonucleotide
  Sense strand starting at position 1159 of SEQ ID NO: 1243745
gaugguguccacugaucac

SEQ ID NO: 1438233 - RNA, 19 nt, Artificial Sequence
  Description of Artificial Sequence: Synthetic oligonucleotide
  Antisense strand to SEQ ID NO: 1438232
gugaucaguggacaccauc

SEQ ID NO: 1438234 - RNA, 19 nt, Artificial Sequence
  Description of Artificial Sequence: Synthetic oligonucleotide
  Sense strand starting at position 1236 of SEQ ID NO: 1243745
gggcgugucucaccagaca

SEQ ID NO: 1438235 - RNA, 19 nt, Artificial Sequence
  Description of Artificial Sequence: Synthetic oligonucleotide
  Antisense strand to SEQ ID NO: 1438234
ugucuggugagacacgccc

SEQ ID NO: 1438236 - RNA, 19 nt, Artificial Sequence
  Description of Artificial Sequence: Synthetic oligonucleotide
  Sense strand starting at position 1301 of SEQ ID NO: 1243745
ugggcuuaaccaugugaac

SEQ ID NO: 1438237 - RNA, 19 nt, Artificial Sequence
  Description of Artificial Sequence: Synthetic oligonucleotide
  Antisense strand to SEQ ID NO: 1438236
guucacaugguuaagccca

SEQ ID NO: 1438238 - RNA, 19 nt, Artificial Sequence
  Description of Artificial Sequence: Synthetic oligonucleotide
  Sense strand starting at position 1326 of SEQ ID NO: 1243745
uacuaaggacugugagcaa

SEQ ID NO: 1438239 - RNA, 19 nt, Artificial Sequence
  Description of Artificial Sequence: Synthetic oligonucleotide
  Antisense strand to SEQ ID NO: 1438238
uugcucacaguccuuagua

SEQ ID NO: 1438240 - RNA, 19 nt, Artificial Sequence
  Description of Artificial Sequence: Synthetic oligonucleotide
  Sense strand starting at position 2315 of SEQ ID NO: 1243745
uugcguaaacgccucgauu

SEQ ID NO: 1438241 - RNA, 19 nt, Artificial Sequence
  Description of Artificial Sequence: Synthetic oligonucleotide
  Antisense strand to SEQ ID NO: 1438240
aaucgaggcguuuacgcaa

SEQ ID NO: 1438242 - RNA, 19 nt, Artificial Sequence
  Description of Artificial Sequence: Synthetic oligonucleotide
  Sense strand starting at position 2317 of SEQ ID NO: 1243745
gcguaaacgccucgauucu

SEQ ID NO: 1438243 - RNA, 19 nt, Artificial Sequence
  Description of Artificial Sequence: Synthetic oligonucleotide
  Antisense strand to SEQ ID NO: 1438242
agaaucgaggcguuuacgc

SEQ ID NO: 1438244 - RNA, 19 nt, Artificial Sequence
  Description of Artificial Sequence: Synthetic oligonucleotide
  Sense strand starting at position 2643 of SEQ ID NO: 1243745
ccacuuccuccaggagaga

SEQ ID NO: 1438245 - RNA, 19 nt, Artificial Sequence
  Description of Artificial Sequence: Synthetic oligonucleotide
  Antisense strand to SEQ ID NO: 1438244
ucucuccuggaggaagugg

SEQ ID NO: 1438246 - RNA, 19 nt, Artificial Sequence
  Description of Artificial Sequence: Synthetic oligonucleotide
  Sense strand starting at position 2710 of SEQ ID NO: 1243745
gcuccaugcccggaagaga

SEQ ID NO: 1438247 - RNA, 19 nt, Artificial Sequence
  Description of Artificial Sequence: Synthetic oligonucleotide
  Antisense strand to SEQ ID NO: 1438246
ucucuuccgggcauggagc

SEQ ID NO: 1438248 - RNA, 19 nt, Artificial Sequence
  Description of Artificial Sequence: Synthetic oligonucleotide
  Sense strand starting at position 2996 of SEQ ID NO: 1243745
gaugucugauucugaaugu

SEQ ID NO: 1438249 - RNA, 19 nt, Artificial Sequence
  Description of Artificial Sequence: Synthetic oligonucleotide
  Antisense strand to SEQ ID NO: 1438248
acauucagaaucagacauc

SEQ ID NO: 1438250 - RNA, 19 nt, Artificial Sequence
  Description of Artificial Sequence: Synthetic oligonucleotide
  Sense strand starting at position 2997 of SEQ ID NO: 1243745
augucugauucugaauguu

SEQ ID NO: 1438251 - RNA, 19 nt, Artificial Sequence
  Description of Artificial Sequence: Synthetic oligonucleotide
  Antisense strand to SEQ ID NO: 1438250
aacauucagaaucagacau

SEQ ID NO: 1438252 - RNA, 19 nt, Artificial Sequence
  Description of Artificial Sequence: Synthetic oligonucleotide
  Sense strand starting at position 3003 of SEQ ID NO: 1243745
gauucugaauguuggguua

SEQ ID NO: 1438253 - RNA, 19 nt, Artificial Sequence
  Description of Artificial Sequence: Synthetic oligonucleotide
  Antisense strand to SEQ ID NO: 1438252
uaacccaacauucagaauc

SEQ ID NO: 1438254 - RNA, 19 nt, Artificial Sequence
  Description of Artificial Sequence: Synthetic oligonucleotide
  Sense strand starting at position 3005 of SEQ ID NO: 1243745
uucugaauguuggguuaga

SEQ ID NO: 1438255 - RNA, 19 nt, Artificial Sequence
  Description of Artificial Sequence: Synthetic oligonucleotide
  Antisense strand to SEQ ID NO: 1438254
ucuaacccaacauucagaa

SEQ ID NO: 1438256 - RNA, 19 nt, Artificial Sequence
  Description of Artificial Sequence: Synthetic oligonucleotide
  Sense strand starting at position 3006 of SEQ ID NO: 1243745
ucugaauguuggguuagac

SEQ ID NO: 1438257 - RNA, 19 nt, Artificial Sequence
  Description of Artificial Sequence: Synthetic oligonucleotide
  Antisense strand to SEQ ID NO: 1438256
gucuaacccaacauucaga

SEQ ID NO: 1438258 - RNA, 19 nt, Artificial Sequence
  Description of Artificial Sequence: Synthetic oligonucleotide
  Sense strand starting at position 3086 of SEQ ID NO: 1243745
gaagguguuugggcuggaa

SEQ ID NO: 1438259 - RNA, 19 nt, Artificial Sequence
  Description of Artificial Sequence: Synthetic oligonucleotide
  Antisense strand to SEQ ID NO: 1438258
uuccagcccaaacaccuuc

SEQ ID NO: 1438260 - RNA, 19 nt, Artificial Sequence
  Description of Artificial Sequence: Synthetic oligonucleotide
  Sense strand starting at position 3183 of SEQ ID NO: 1243745
ugccgcaucguugugaauu

SEQ ID NO: 1438261 - RNA, 19 nt, Artificial Sequence
  Description of Artificial Sequence: Synthetic oligonucleotide
  Antisense strand to SEQ ID NO: 1438260
aauucacaacgaugcggca

SEQ ID NO: 1438262 - RNA, 19 nt, Artificial Sequence
  Description of Artificial Sequence: Synthetic oligonucleotide
  Sense strand starting at position 3184 of SEQ ID NO: 1243745
gccgcaucguugugaauuu

SEQ ID NO: 1438263 - RNA, 19 nt, Artificial Sequence
  Description of Artificial Sequence: Synthetic oligonucleotide
  Antisense strand to SEQ ID NO: 1438262
aaauucacaacgaugcggc

SEQ ID NO: 1438264 - RNA, 19 nt, Artificial Sequence
  Description of Artificial Sequence: Synthetic oligonucleotide
  Sense strand starting at position 3221 of SEQ ID NO: 1243745
cuggucuucugaccgaauu

SEQ ID NO: 1438265 - RNA, 19 nt, Artificial Sequence
  Description of Artificial Sequence: Synthetic oligonucleotide
  Antisense strand to SEQ ID NO: 1438264
aauucggucagaagaccag

SEQ ID NO: 1438266 - RNA, 19 nt, Artificial Sequence
  Description of Artificial Sequence: Synthetic oligonucleotide
  Sense strand starting at position 3257 of SEQ ID NO: 1243745
aggucuucugacugcuagu

SEQ ID NO: 1438267 - RNA, 19 nt, Artificial Sequence
  Description of Artificial Sequence: Synthetic oligonucleotide
  Antisense strand to SEQ ID NO: 1438266
acuagcagucagaagaccu

SEQ ID NO: 1438268 - RNA, 19 nt, Artificial Sequence
  Description of Artificial Sequence: Synthetic oligonucleotide
  Sense strand starting at position 3284 of SEQ ID NO: 1243745
ucugaagccuugugaguca

SEQ ID NO: 1438269 - RNA, 19 nt, Artificial Sequence
  Description of Artificial Sequence: Synthetic oligonucleotide
  Antisense strand to SEQ ID NO: 1438268
ugacucacaaggcuucaga

SEQ ID NO: 1438270 - RNA, 19 nt, Artificial Sequence
  Description of Artificial Sequence: Synthetic oligonucleotide
  Sense strand starting at position 3341 of SEQ ID NO: 1243745
ccaucucuuccauacggau

SEQ ID NO: 1438271 - RNA, 19 nt, Artificial Sequence
  Description of Artificial Sequence: Synthetic oligonucleotide
  Antisense strand to SEQ ID NO: 1438270
auccguauggaagagaugg

SEQ ID NO: 1438272 - RNA, 19 nt, Artificial Sequence
  Description of Artificial Sequence: Synthetic oligonucleotide
  Sense strand starting at position 3369 of SEQ ID NO: 1243745
ccaagacuguccuagagga

SEQ ID NO: 1438273 - RNA, 19 nt, Artificial Sequence
  Description of Artificial Sequence: Synthetic oligonucleotide
  Antisense strand to SEQ ID NO: 1438272
uccucuaggacagucuugg

SEQ ID NO: 1438274 - RNA, 19 nt, Artificial Sequence
  Description of Artificial Sequence: Synthetic oligonucleotide
  Sense strand starting at position 3384 of SEQ ID NO: 1243745
aggaaaugaucacgaucac

SEQ ID NO: 1438275 - RNA, 19 nt, Artificial Sequence
  Description of Artificial Sequence: Synthetic oligonucleotide
  Antisense strand to SEQ ID NO: 1438274
gugaucgugaucauuuccu

SEQ ID NO: 1438276 - RNA, 19 nt, Artificial Sequence
  Description of Artificial Sequence: Synthetic oligonucleotide
  Sense strand starting at position 3601 of SEQ ID NO: 1243745
gugaguuagacacaagcga

SEQ ID NO: 1438277 - RNA, 19 nt, Artificial Sequence
  Description of Artificial Sequence: Synthetic oligonucleotide
  Antisense strand to SEQ ID NO: 1438276
ucgcuugugucuaacucac

SEQ ID NO: 1438278 - RNA, 19 nt, Artificial Sequence
  Description of Artificial Sequence: Synthetic oligonucleotide
  Sense strand starting at position 3669 of SEQ ID NO: 1243745
ccuguacuuggcgaagagu

SEQ ID NO: 1438279 - RNA, 19 nt, Artificial Sequence
  Description of Artificial Sequence: Synthetic oligonucleotide
  Antisense strand to SEQ ID NO: 1438278
acucuucgccaaguacagg

SEQ ID NO: 1438280 - RNA, 19 nt, Artificial Sequence
  Description of Artificial Sequence: Synthetic oligonucleotide
  Sense strand starting at position 3672 of SEQ ID NO: 1243745
guacuuggcgaagagugau

SEQ ID NO: 1438281 - RNA, 19 nt, Artificial Sequence
  Description of Artificial Sequence: Synthetic oligonucleotide
  Antisense strand to SEQ ID NO: 1438280
aucacucuucgccaaguac

SEQ ID NO: 1438282 - RNA, 19 nt, Artificial Sequence
  Description of Artificial Sequence: Synthetic oligonucleotide
  Sense strand starting at position 3743 of SEQ ID NO: 1243745
agcggaagccuucgagaca

SEQ ID NO: 1438283 - RNA, 19 nt, Artificial Sequence
  Description of Artificial Sequence: Synthetic oligonucleotide
  Antisense strand to SEQ ID NO: 1438282
ugucucgaaggcuuccgcu

SEQ ID NO: 1438284 - RNA, 19 nt, Artificial Sequence
  Description of Artificial Sequence: Synthetic oligonucleotide
  Sense strand starting at position 3794 of SEQ ID NO: 1243745
gcccaacuuggagguguua

SEQ ID NO: 1438285 - RNA, 19 nt, Artificial Sequence
  Description of Artificial Sequence: Synthetic oligonucleotide
  Antisense strand to SEQ ID NO: 1438284
uaacaccuccaaguugggc

SEQ ID NO: 1438286 - RNA, 19 nt, Artificial Sequence
  Description of Artificial Sequence: Synthetic oligonucleotide
  Sense strand starting at position 3796 of SEQ ID NO: 1243745
ccaacuuggagguguuauc

SEQ ID NO: 1438287 - RNA, 19 nt, Artificial Sequence
  Description of Artificial Sequence: Synthetic oligonucleotide
  Antisense strand to SEQ ID NO: 1438286
gauaacaccuccaaguugg

SEQ ID NO: 1438288 - RNA, 19 nt, Artificial Sequence
  Description of Artificial Sequence: Synthetic oligonucleotide
  Sense strand starting at position 3807 of SEQ ID NO: 1243745
guguuaucaucucccuaag

SEQ ID NO: 1438289 - RNA, 19 nt, Artificial Sequence
  Description of Artificial Sequence: Synthetic oligonucleotide
  Antisense strand to SEQ ID NO: 1438288
cuuagggagaugauaacac

SEQ ID NO: 1438290 - RNA, 19 nt, Artificial Sequence
  Description of Artificial Sequence: Synthetic oligonucleotide
  Sense strand starting at position 3825 of SEQ ID NO: 1243745
gcacgaaguauaugaagga

SEQ ID NO: 1438291 - RNA, 19 nt, Artificial Sequence
  Description of Artificial Sequence: Synthetic oligonucleotide
  Antisense strand to SEQ ID NO: 1438290
uccuucauauacuucgugc

SEQ ID NO: 1438292 - RNA, 19 nt, Artificial Sequence
  Description of Artificial Sequence: Synthetic oligonucleotide
  Sense strand starting at position 3841 of SEQ ID NO: 1243745
ggagucaauuuaggucaga

SEQ ID NO: 1438293 - RNA, 19 nt, Artificial Sequence
  Description of Artificial Sequence: Synthetic oligonucleotide
  Antisense strand to SEQ ID NO: 1438292
ucugaccuaaauugacucc

SEQ ID NO: 1438294 - RNA, 19 nt, Artificial Sequence
  Description of Artificial Sequence: Synthetic oligonucleotide
  Sense strand starting at position 1439 of SEQ ID NO: 1243746
gcaagaguccaugaaguca

SEQ ID NO: 1438295 - RNA, 19 nt, Artificial Sequence
  Description of Artificial Sequence: Synthetic oligonucleotide
  Antisense strand to SEQ ID NO: 1438294
ugacuucauggacucuugc

SEQ ID NO: 1438296 - RNA, 19 nt, Artificial Sequence
  Description of Artificial Sequence: Synthetic oligonucleotide
  Sense strand starting at position 1447 of SEQ ID NO: 1243746
ccaugaagucagggcaauu

SEQ ID NO: 1438297 - RNA, 19 nt, Artificial Sequence
  Description of Artificial Sequence: Synthetic oligonucleotide
  Antisense strand to SEQ ID NO: 1438296
aauugcccugacuucaugg

SEQ ID NO: 1438298 - RNA, 19 nt, Artificial Sequence
  Description of Artificial Sequence: Synthetic oligonucleotide
  Sense strand starting at position 1456 of SEQ ID NO: 1243746
cagggcaauugucagaaga

SEQ ID NO: 1438299 - RNA, 19 nt, Artificial Sequence
  Description of Artificial Sequence: Synthetic oligonucleotide
  Antisense strand to SEQ ID NO: 1438298
ucuucugacaauugcccug

SEQ ID NO: 1438300 - RNA, 19 nt, Artificial Sequence
  Description of Artificial Sequence: Synthetic oligonucleotide
  Sense strand starting at position 1458 of SEQ ID NO: 1243746
gggcaauugucagaagagc

SEQ ID NO: 1438301 - RNA, 19 nt, Artificial Sequence
  Description of Artificial Sequence: Synthetic oligonucleotide
  Antisense strand to SEQ ID NO: 1438300
gcucuucugacaauugccc

SEQ ID NO: 1438302 - RNA, 19 nt, Artificial Sequence
  Description of Artificial Sequence: Synthetic oligonucleotide
  Sense strand starting at position 1466 of SEQ ID NO: 1243746
gucagaagagcucaagguu

SEQ ID NO: 1438303 - RNA, 19 nt, Artificial Sequence
  Description of Artificial Sequence: Synthetic oligonucleotide
  Antisense strand to SEQ ID NO: 1438302
aaccuugagcucuucugac

SEQ ID NO: 1438304 - RNA, 19 nt, Artificial Sequence
  Description of Artificial Sequence: Synthetic oligonucleotide
  Sense strand starting at position 2046 of SEQ ID NO: 1243746
gucacaaugaggugagcua

SEQ ID NO: 1438305 - RNA, 19 nt, Artificial Sequence
  Description of Artificial Sequence: Synthetic oligonucleotide
  Antisense strand to SEQ ID NO: 1438304
uagcucaccucauugugac

SEQ ID NO: 1438306 - RNA, 19 nt, Artificial Sequence
  Description of Artificial Sequence: Synthetic oligonucleotide
  Sense strand starting at position 2189 of SEQ ID NO: 1243746
ccucuaucuccacgagguu

SEQ ID NO: 1438307 - RNA, 19 nt, Artificial Sequence
  Description of Artificial Sequence: Synthetic oligonucleotide
  Antisense strand to SEQ ID NO: 1438306
aaccucguggagauagagg

SEQ ID NO: 1438308 - RNA, 19 nt, Artificial Sequence
  Description of Artificial Sequence: Synthetic oligonucleotide
  Sense strand starting at position 2190 of SEQ ID NO: 1243746
cucuaucuccacgagguuu

SEQ ID NO: 1438309 - RNA, 19 nt, Artificial Sequence
  Description of Artificial Sequence: Synthetic oligonucleotide
  Antisense strand to SEQ ID NO: 1438308
aaaccucguggagauagag

SEQ ID NO: 1438310 - RNA, 19 nt, Artificial Sequence
  Description of Artificial Sequence: Synthetic oligonucleotide
  Sense strand starting at position 2222 of SEQ ID NO: 1243746
gcugguuccugagcugaag

SEQ ID NO: 1438311 - RNA, 19 nt, Artificial Sequence
  Description of Artificial Sequence: Synthetic oligonucleotide
  Antisense strand to SEQ ID NO: 1438310
cuucagcucaggaaccagc

SEQ ID NO: 1438312 - RNA, 19 nt, Artificial Sequence
  Description of Artificial Sequence: Synthetic oligonucleotide
  Sense strand starting at position 2224 of SEQ ID NO: 1243746
ugguuccugagcugaagau

SEQ ID NO: 1438313 - RNA, 19 nt, Artificial Sequence
  Description of Artificial Sequence: Synthetic oligonucleotide
  Antisense strand to SEQ ID NO: 1438312
aucuucagcucaggaacca

SEQ ID NO: 1438314 - RNA, 19 nt, Artificial Sequence
  Description of Artificial Sequence: Synthetic oligonucleotide
  Sense strand starting at position 2225 of SEQ ID NO: 1243746
gguuccugagcugaagaua

SEQ ID NO: 1438315 - RNA, 19 nt, Artificial Sequence
  Description of Artificial Sequence: Synthetic oligonucleotide
  Antisense strand to SEQ ID NO: 1438314
uaucuucagcucaggaacc

SEQ ID NO: 1438316 - RNA, 19 nt, Artificial Sequence
  Description of Artificial Sequence: Synthetic oligonucleotide
  Sense strand starting at position 2275 of SEQ ID NO: 1243746
gguugaagcaugcaucaga

SEQ ID NO: 1438317 - RNA, 19 nt, Artificial Sequence
  Description of Artificial Sequence: Synthetic oligonucleotide
  Antisense strand to SEQ ID NO: 1438316
ucugaugcaugcuucaacc

SEQ ID NO: 1438318 - RNA, 19 nt, Artificial Sequence
  Description of Artificial Sequence: Synthetic oligonucleotide
  Sense strand starting at position 2278 of SEQ ID NO: 1243746
ugaagcaugcaucagauau

SEQ ID NO: 1438319 - RNA, 19 nt, Artificial Sequence
  Description of Artificial Sequence: Synthetic oligonucleotide
  Antisense strand to SEQ ID NO: 1438318
auaucugaugcaugcuuca

SEQ ID NO: 1438320 - RNA, 19 nt, Artificial Sequence
  Description of Artificial Sequence: Synthetic oligonucleotide
  Sense strand starting at position 2280 of SEQ ID NO: 1243746
aagcaugcaucagauaugu

SEQ ID NO: 1438321 - RNA, 19 nt, Artificial Sequence
  Description of Artificial Sequence: Synthetic oligonucleotide
  Antisense strand to SEQ ID NO: 1438320
acauaucugaugcaugcuu

SEQ ID NO: 1438322 - RNA, 19 nt, Artificial Sequence
  Description of Artificial Sequence: Synthetic oligonucleotide
  Sense strand starting at position 2316 of SEQ ID NO: 1243746
uugagacauuauggcaacu

SEQ ID NO: 1438323 - RNA, 19 nt, Artificial Sequence
  Description of Artificial Sequence: Synthetic oligonucleotide
  Antisense strand to SEQ ID NO: 1438322
aguugccauaaugucucaa

SEQ ID NO: 1438324 - RNA, 19 nt, Artificial Sequence
  Description of Artificial Sequence: Synthetic oligonucleotide
  Sense strand starting at position 2501 of SEQ ID NO: 1243746
ccaauucuuccuggccaga

SEQ ID NO: 1438325 - RNA, 19 nt, Artificial Sequence
  Description of Artificial Sequence: Synthetic oligonucleotide
  Antisense strand to SEQ ID NO: 1438324
ucuggccaggaagaauugg

SEQ ID NO: 1438326 - RNA, 19 nt, Artificial Sequence
  Description of Artificial Sequence: Synthetic oligonucleotide
  Sense strand starting at position 2664 of SEQ ID NO: 1243746
cccuuacuccaaggugaaa

SEQ ID NO: 1438327 - RNA, 19 nt, Artificial Sequence
  Description of Artificial Sequence: Synthetic oligonucleotide
  Antisense strand to SEQ ID NO: 1438326
uuucaccuuggaguaaggg

SEQ ID NO: 1438328 - RNA, 19 nt, Artificial Sequence
  Description of Artificial Sequence: Synthetic oligonucleotide
  Sense strand starting at position 2976 of SEQ ID NO: 1243746
ucgagaaucugucuccaaa

SEQ ID NO: 1438329 - RNA, 19 nt, Artificial Sequence
  Description of Artificial Sequence: Synthetic oligonucleotide
  Antisense strand to SEQ ID NO: 1438328
uuuggagacagauucucga

SEQ ID NO: 1438330 - RNA, 19 nt, Artificial Sequence
  Description of Artificial Sequence: Synthetic oligonucleotide
  Sense strand starting at position 3493 of SEQ ID NO: 1243746
uuguuuacacagugaacca

SEQ ID NO: 1438331 - RNA, 19 nt, Artificial Sequence
  Description of Artificial Sequence: Synthetic oligonucleotide
  Antisense strand to SEQ ID NO: 1438330
ugguucacuguguaaacaa

SEQ ID NO: 1438332 - RNA, 19 nt, Artificial Sequence
  Description of Artificial Sequence: Synthetic oligonucleotide
  Sense strand starting at position 3521 of SEQ ID NO: 1243746
aagaaaggccagugaucau

SEQ ID NO: 1438333 - RNA, 19 nt, Artificial Sequence
  Description of Artificial Sequence: Synthetic oligonucleotide
  Antisense strand to SEQ ID NO: 1438332
augaucacuggccuuucuu

SEQ ID NO: 1438334 - RNA, 19 nt, Artificial Sequence
  Description of Artificial Sequence: Synthetic oligonucleotide
  Sense strand starting at position 3616 of SEQ ID NO: 1243746
ucaguaacguuaguugaau

SEQ ID NO: 1438335 - RNA, 19 nt, Artificial Sequence
  Description of Artificial Sequence: Synthetic oligonucleotide
  Antisense strand to SEQ ID NO: 1438334
auucaacuaacguuacuga

SEQ ID NO: 1438336 - RNA, 19 nt, Artificial Sequence
  Description of Artificial Sequence: Synthetic oligonucleotide
  Sense strand starting at position 3618 of SEQ ID NO: 1243746
aguaacguuaguugaauga

SEQ ID NO: 1438337 - RNA, 19 nt, Artificial Sequence
  Description of Artificial Sequence: Synthetic oligonucleotide
  Antisense strand to SEQ ID NO: 1438336
ucauucaacuaacguuacu

SEQ ID NO: 1438338 - RNA, 19 nt, Artificial Sequence
  Description of Artificial Sequence: Synthetic oligonucleotide
  Sense strand starting at position 3622 of SEQ ID NO: 1243746
acguuaguugaaugagaga

SEQ ID NO: 1438339 - RNA, 19 nt, Artificial Sequence
  Description of Artificial Sequence: Synthetic oligonucleotide
  Antisense strand to SEQ ID NO: 1438338
ucucucauucaacuaacgu

SEQ ID NO: 1438340 - RNA, 19 nt, Artificial Sequence
  Description of Artificial Sequence: Synthetic oligonucleotide
  Sense strand starting at position 3625 of SEQ ID NO: 1243746
uuaguugaaugagagaagu

SEQ ID NO: 1438341 - RNA, 19 nt, Artificial Sequence
  Description of Artificial Sequence: Synthetic oligonucleotide
  Antisense strand to SEQ ID NO: 1438340
acuucucucauucaacuaa

SEQ ID NO: 1438342 - RNA, 19 nt, Artificial Sequence
  Description of Artificial Sequence: Synthetic oligonucleotide
  Sense strand starting at position 3669 of SEQ ID NO: 1243746
gcucacauuccaggaaucu

SEQ ID NO: 1438343 - RNA, 19 nt, Artificial Sequence
  Description of Artificial Sequence: Synthetic oligonucleotide
  Antisense strand to SEQ ID NO: 1438342
agauuccuggaaugugagc

SEQ ID NO: 1438344 - RNA, 19 nt, Artificial Sequence
  Description of Artificial Sequence: Synthetic oligonucleotide
  Sense strand starting at position 3678 of SEQ ID NO: 1243746
ccaggaaucugucuagagu

SEQ ID NO: 1438345 - RNA, 19 nt, Artificial Sequence
  Description of Artificial Sequence: Synthetic oligonucleotide
  Antisense strand to SEQ ID NO: 1438344
acucuagacagauuccugg

SEQ ID NO: 1438346 - RNA, 19 nt, Artificial Sequence
  Description of Artificial Sequence: Synthetic oligonucleotide
  Sense strand starting at position 3679 of SEQ ID NO: 1243746
caggaaucugucuagagug

SEQ ID NO: 1438347 - RNA, 19 nt, Artificial Sequence
  Description of Artificial Sequence: Synthetic oligonucleotide
  Antisense strand to SEQ ID NO: 1438346
cacucuagacagauuccug

SEQ ID NO: 1438348 - RNA, 19 nt, Artificial Sequence
  Description of Artificial Sequence: Synthetic oligonucleotide
  Sense strand starting at position 3744 of SEQ ID NO: 1243746
cuuguucucaagugguaug

SEQ ID NO: 1438349 - RNA, 19 nt, Artificial Sequence
  Description of Artificial Sequence: Synthetic oligonucleotide
  Antisense strand to SEQ ID NO: 1438348
cauaccacuugagaacaag

SEQ ID NO: 1438350 - RNA, 19 nt, Artificial Sequence
  Description of Artificial Sequence: Synthetic oligonucleotide
  Sense strand starting at position 3773 of SEQ ID NO: 1243746
ugcauaugaucccaauugu

SEQ ID NO: 1438351 - RNA, 19 nt, Artificial Sequence
  Description of Artificial Sequence: Synthetic oligonucleotide
  Antisense strand to SEQ ID NO: 1438350
acaauugggaucauaugca

SEQ ID NO: 1438352 - RNA, 19 nt, Artificial Sequence
  Description of Artificial Sequence: Synthetic oligonucleotide
  Sense strand starting at position 3781 of SEQ ID NO: 1243746
aucccaauuguguagcaga

SEQ ID NO: 1438353 - RNA, 19 nt, Artificial Sequence
  Description of Artificial Sequence: Synthetic oligonucleotide
  Antisense strand to SEQ ID NO: 1438352
ucugcuacacaauugggau

SEQ ID NO: 1438354 - RNA, 19 nt, Artificial Sequence
  Description of Artificial Sequence: Synthetic oligonucleotide
  Sense strand starting at position 3784 of SEQ ID NO: 1243746
ccaauuguguagcagaaag

SEQ ID NO: 1438355 - RNA, 19 nt, Artificial Sequence
  Description of Artificial Sequence: Synthetic oligonucleotide
  Antisense strand to SEQ ID NO: 1438354
cuuucugcuacacaauugg

SEQ ID NO: 1438356 - RNA, 19 nt, Artificial Sequence
  Description of Artificial Sequence: Synthetic oligonucleotide
  Sense strand starting at position 3808 of SEQ ID NO: 1243746
gccugaguuucucuguuuc

SEQ ID NO: 1438357 - RNA, 19 nt, Artificial Sequence
  Description of Artificial Sequence: Synthetic oligonucleotide
  Antisense strand to SEQ ID NO: 1438356
gaaacagagaaacucaggc

SEQ ID NO: 1438358 - RNA, 19 nt, Artificial Sequence
  Description of Artificial Sequence: Synthetic oligonucleotide
  Sense strand starting at position 3921 of SEQ ID NO: 1243746
ugagcuugauccucagugu

SEQ ID NO: 1438359 - RNA, 19 nt, Artificial Sequence
  Description of Artificial Sequence: Synthetic oligonucleotide
  Antisense strand to SEQ ID NO: 1438358
acacugaggaucaagcuca

SEQ ID NO: 1438360 - RNA, 19 nt, Artificial Sequence
  Description of Artificial Sequence: Synthetic oligonucleotide
  Sense strand starting at position 3929 of SEQ ID NO: 1243746
auccucagugucuguguaa

SEQ ID NO: 1438361 - RNA, 19 nt, Artificial Sequence
  Description of Artificial Sequence: Synthetic oligonucleotide
  Antisense strand to SEQ ID NO: 1438360
uuacacagacacugaggau

SEQ ID NO: 1438362 - RNA, 19 nt, Artificial Sequence
  Description of Artificial Sequence: Synthetic oligonucleotide
  Sense strand starting at position 39 of SEQ ID NO: 1243747
gccuuaauuccauggucag

SEQ ID NO: 1438363 - RNA, 19 nt, Artificial Sequence
  Description of Artificial Sequence: Synthetic oligonucleotide
  Antisense strand to SEQ ID NO: 1438362
cugaccauggaauuaaggc

SEQ ID NO: 1438364 - RNA, 19 nt, Artificial Sequence
  Description of Artificial Sequence: Synthetic oligonucleotide
  Sense strand starting at position 40 of SEQ ID NO: 1243747
ccuuaauuccauggucagu

SEQ ID NO: 1438365 - RNA, 19 nt, Artificial Sequence
  Description of Artificial Sequence: Synthetic oligonucleotide
  Antisense strand to SEQ ID NO: 1438364
acugaccauggaauuaagg

SEQ ID NO: 1438366 - RNA, 19 nt, Artificial Sequence
  Description of Artificial Sequence: Synthetic oligonucleotide
  Sense strand starting at position 789 of SEQ ID NO: 1243747
acacuaucaguauguggau

SEQ ID NO: 1438367 - RNA, 19 nt, Artificial Sequence
  Description of Artificial Sequence: Synthetic oligonucleotide
  Antisense strand to SEQ ID NO: 1438366
auccacauacugauagugu

SEQ ID NO: 1438368 - RNA, 19 nt, Artificial Sequence
  Description of Artificial Sequence: Synthetic oligonucleotide
  Sense strand starting at position 872 of SEQ ID NO: 1243747
ggaggaauugacgguuuga

SEQ ID NO: 1438369 - RNA, 19 nt, Artificial Sequence
  Description of Artificial Sequence: Synthetic oligonucleotide
  Antisense strand to SEQ ID NO: 1438368
ucaaaccgucaauuccucc

SEQ ID NO: 1438370 - RNA, 19 nt, Artificial Sequence
  Description of Artificial Sequence: Synthetic oligonucleotide
  Sense strand starting at position 885 of SEQ ID NO: 1243747
guuugacucagggaaagcu

SEQ ID NO: 1438371 - RNA, 19 nt, Artificial Sequence
  Description of Artificial Sequence: Synthetic oligonucleotide
  Antisense strand to SEQ ID NO: 1438370
agcuuucccugagucaaac

SEQ ID NO: 1438372 - RNA, 19 nt, Artificial Sequence
  Description of Artificial Sequence: Synthetic oligonucleotide
  Sense strand starting at position 895 of SEQ ID NO: 1243747
gggaaagcucaguggaaau

SEQ ID NO: 1438373 - RNA, 19 nt, Artificial Sequence
  Description of Artificial Sequence: Synthetic oligonucleotide
  Antisense strand to SEQ ID NO: 1438372
auuuccacugagcuuuccc

SEQ ID NO: 1438374 - RNA, 19 nt, Artificial Sequence
  Description of Artificial Sequence: Synthetic oligonucleotide
  Sense strand starting at position 913 of SEQ ID NO: 1243747
uagaguauccacugacaug

SEQ ID NO: 1438375 - RNA, 19 nt, Artificial Sequence
  Description of Artificial Sequence: Synthetic oligonucleotide
  Antisense strand to SEQ ID NO: 1438374
caugucaguggauacucua

SEQ ID NO: 1438376 - RNA, 19 nt, Artificial Sequence
  Description of Artificial Sequence: Synthetic oligonucleotide
  Sense strand starting at position 1284 of SEQ ID NO: 1243747
gcuaaauacccagaagguu

SEQ ID NO: 1438377 - RNA, 19 nt, Artificial Sequence
  Description of Artificial Sequence: Synthetic oligonucleotide
  Antisense strand to SEQ ID NO: 1438376
aaccuucuggguauuuagc

SEQ ID NO: 1438378 - RNA, 19 nt, Artificial Sequence
  Description of Artificial Sequence: Synthetic oligonucleotide
  Sense strand starting at position 1338 of SEQ ID NO: 1243747
ccaagaagguuccaggaaa

SEQ ID NO: 1438379 - RNA, 19 nt, Artificial Sequence
  Description of Artificial Sequence: Synthetic oligonucleotide
  Antisense strand to SEQ ID NO: 1438378
uuuccuggaaccuucuugg

SEQ ID NO: 1438380 - RNA, 19 nt, Artificial Sequence
  Description of Artificial Sequence: Synthetic oligonucleotide
  Sense strand starting at position 1443 of SEQ ID NO: 1243747
gggagauaaugacagaaag

SEQ ID NO: 1438381 - RNA, 19 nt, Artificial Sequence
  Description of Artificial Sequence: Synthetic oligonucleotide
  Antisense strand to SEQ ID NO: 1438380
cuuucugucauuaucuccc

SEQ ID NO: 1438382 - RNA, 19 nt, Artificial Sequence
  Description of Artificial Sequence: Synthetic oligonucleotide
  Sense strand starting at position 1797 of SEQ ID NO: 1243747
ccgcgauagcuguaaagac

SEQ ID NO: 1438383 - RNA, 19 nt, Artificial Sequence
  Description of Artificial Sequence: Synthetic oligonucleotide
  Antisense strand to SEQ ID NO: 1438382
gucuuuacagcuaucgcgg

SEQ ID NO: 1438384 - RNA, 19 nt, Artificial Sequence
  Description of Artificial Sequence: Synthetic oligonucleotide
  Sense strand starting at position 2173 of SEQ ID NO: 1243747
ugagacaucugggaaacuu

SEQ ID NO: 1438385 - RNA, 19 nt, Artificial Sequence
  Description of Artificial Sequence: Synthetic oligonucleotide
  Antisense strand to SEQ ID NO: 1438384
aaguuucccagaugucuca

SEQ ID NO: 1438386 - RNA, 19 nt, Artificial Sequence
  Description of Artificial Sequence: Synthetic oligonucleotide
  Sense strand starting at position 2184 of SEQ ID NO: 1243747
ggaaacuuucuaugugaua

SEQ ID NO: 1438387 - RNA, 19 nt, Artificial Sequence
  Description of Artificial Sequence: Synthetic oligonucleotide
  Antisense strand to SEQ ID NO: 1438386
uaucacauagaaaguuucc

SEQ ID NO: 1438388 - RNA, 19 nt, Artificial Sequence
  Description of Artificial Sequence: Synthetic oligonucleotide
  Sense strand starting at position 2280 of SEQ ID NO: 1243747
cagacacccguuugaucaa

SEQ ID NO: 1438389 - RNA, 19 nt, Artificial Sequence
  Description of Artificial Sequence: Synthetic oligonucleotide
  Antisense strand to SEQ ID NO: 1438388
uugaucaaacgggugucug

SEQ ID NO: 1438390 - RNA, 19 nt, Artificial Sequence
  Description of Artificial Sequence: Synthetic oligonucleotide
  Sense strand starting at position 2361 of SEQ ID NO: 1243747
ugaagagggucuuuccaaa

SEQ ID NO: 1438391 - RNA, 19 nt, Artificial Sequence
  Description of Artificial Sequence: Synthetic oligonucleotide
  Antisense strand to SEQ ID NO: 1438390
uuuggaaagacccucuuca

SEQ ID NO: 1438392 - RNA, 19 nt, Artificial Sequence
  Description of Artificial Sequence: Synthetic oligonucleotide
  Sense strand starting at position 2796 of SEQ ID NO: 1243747
auagucuuacaauggcaau

SEQ ID NO: 1438393 - RNA, 19 nt, Artificial Sequence
  Description of Artificial Sequence: Synthetic oligonucleotide
  Antisense strand to SEQ ID NO: 1438392
auugccauuguaagacuau

SEQ ID NO: 1438394 - RNA, 19 nt, Artificial Sequence
  Description of Artificial Sequence: Synthetic oligonucleotide
  Sense strand starting at position 2878 of SEQ ID NO: 1243747
ggcagacuggagugaugua

SEQ ID NO: 1438395 - RNA, 19 nt, Artificial Sequence
  Description of Artificial Sequence: Synthetic oligonucleotide
  Antisense strand to SEQ ID NO: 1438394
uacaucacuccagucugcc

SEQ ID NO: 1438396 - RNA, 19 nt, Artificial Sequence
  Description of Artificial Sequence: Synthetic oligonucleotide
  Sense strand starting at position 2879 of SEQ ID NO: 1243747
gcagacuggagugauguau

SEQ ID NO: 1438397 - RNA, 19 nt, Artificial Sequence
  Description of Artificial Sequence: Synthetic oligonucleotide
  Antisense strand to SEQ ID NO: 1438396
auacaucacuccagucugc

SEQ ID NO: 1438398 - RNA, 19 nt, Artificial Sequence
  Description of Artificial Sequence: Synthetic oligonucleotide
  Sense strand starting at position 2920 of SEQ ID NO: 1243747
gauugauggucaucaccag

SEQ ID NO: 1438399 - RNA, 19 nt, Artificial Sequence
  Description of Artificial Sequence: Synthetic oligonucleotide
  Antisense strand to SEQ ID NO: 1438398
cuggugaugaccaucaauc

SEQ ID NO: 1438400 - RNA, 19 nt, Artificial Sequence
  Description of Artificial Sequence: Synthetic oligonucleotide
  Sense strand starting at position 3248 of SEQ ID NO: 1243747
aacaguugagaucguuaaa

SEQ ID NO: 1438401 - RNA, 19 nt, Artificial Sequence
  Description of Artificial Sequence: Synthetic oligonucleotide
  Antisense strand to SEQ ID NO: 1438400
uuuaacgaucucaacuguu

SEQ ID NO: 1438402 - RNA, 19 nt, Artificial Sequence
  Description of Artificial Sequence: Synthetic oligonucleotide
  Sense strand starting at position 3251 of SEQ ID NO: 1243747
aguugagaucguuaaaucc

SEQ ID NO: 1438403 - RNA, 19 nt, Artificial Sequence
  Description of Artificial Sequence: Synthetic oligonucleotide
  Antisense strand to SEQ ID NO: 1438402
ggauuuaacgaucucaacu

SEQ ID NO: 1438404 - RNA, 19 nt, Artificial Sequence
  Description of Artificial Sequence: Synthetic oligonucleotide
  Sense strand starting at position 3323 of SEQ ID NO: 1243747
gcaauuauggcagagauuc

SEQ ID NO: 1438405 - RNA, 19 nt, Artificial Sequence
  Description of Artificial Sequence: Synthetic oligonucleotide
  Antisense strand to SEQ ID NO: 1438404
gaaucucugccauaauugc

SEQ ID NO: 1438406 - RNA, 19 nt, Artificial Sequence
  Description of Artificial Sequence: Synthetic oligonucleotide
  Sense strand starting at position 3397 of SEQ ID NO: 1243747
guacucauuugaugaacaa

SEQ ID NO: 1438407 - RNA, 19 nt, Artificial Sequence
  Description of Artificial Sequence: Synthetic oligonucleotide
  Antisense strand to SEQ ID NO: 1438406
uuguucaucaaaugaguac

SEQ ID NO: 1438408 - RNA, 19 nt, Artificial Sequence
  Description of Artificial Sequence: Synthetic oligonucleotide
  Sense strand starting at position 3409 of SEQ ID NO: 1243747
ugaacaagugaguauagca

SEQ ID NO: 1438409 - RNA, 19 nt, Artificial Sequence
  Description of Artificial Sequence: Synthetic oligonucleotide
  Antisense strand to SEQ ID NO: 1438408
ugcuauacucacuuguuca

SEQ ID NO: 1438410 - RNA, 19 nt, Artificial Sequence
  Description of Artificial Sequence: Synthetic oligonucleotide
  Sense strand starting at position 3443 of SEQ ID NO: 1243747
gauuguauugcagaaguua

SEQ ID NO: 1438411 - RNA, 19 nt, Artificial Sequence
  Description of Artificial Sequence: Synthetic oligonucleotide
  Antisense strand to SEQ ID NO: 1438410
uaacuucugcaauacaauc

SEQ ID NO: 1438412 - RNA, 19 nt, Artificial Sequence
  Description of Artificial Sequence: Synthetic oligonucleotide
  Sense strand starting at position 3483 of SEQ ID NO: 1243747
uggguauccucaccucuau

SEQ ID NO: 1438413 - RNA, 19 nt, Artificial Sequence
  Description of Artificial Sequence: Synthetic oligonucleotide
  Antisense strand to SEQ ID NO: 1438412
auagaggugaggauaccca

SEQ ID NO: 1438414 - RNA, 19 nt, Artificial Sequence
  Description of Artificial Sequence: Synthetic oligonucleotide
  Sense strand starting at position 3512 of SEQ ID NO: 1243747
guaacauugucaguuuccu

SEQ ID NO: 1438415 - RNA, 19 nt, Artificial Sequence
  Description of Artificial Sequence: Synthetic oligonucleotide
  Antisense strand to SEQ ID NO: 1438414
aggaaacugacaauguuac

SEQ ID NO: 1438416 - RNA, 19 nt, Artificial Sequence
  Description of Artificial Sequence: Synthetic oligonucleotide
  Sense strand starting at position 3557 of SEQ ID NO: 1243747
agaggauucugauugcgga

SEQ ID NO: 1438417 - RNA, 19 nt, Artificial Sequence
  Description of Artificial Sequence: Synthetic oligonucleotide
  Antisense strand to SEQ ID NO: 1438416
uccgcaaucagaauccucu

SEQ ID NO: 1438418 - RNA, 19 nt, Artificial Sequence
  Description of Artificial Sequence: Synthetic oligonucleotide
  Sense strand starting at position 3590 of SEQ ID NO: 1243747
ggcauuucagaucggcagu

SEQ ID NO: 1438419 - RNA, 19 nt, Artificial Sequence
  Description of Artificial Sequence: Synthetic oligonucleotide
  Antisense strand to SEQ ID NO: 1438418
acugccgaucugaaaugcc

SEQ ID NO: 1438420 - RNA, 19 nt, Artificial Sequence
  Description of Artificial Sequence: Synthetic oligonucleotide
  Sense strand starting at position 3660 of SEQ ID NO: 1243747
gagguugaguuaccacagu

SEQ ID NO: 1438421 - RNA, 19 nt, Artificial Sequence
  Description of Artificial Sequence: Synthetic oligonucleotide
  Antisense strand to SEQ ID NO: 1438420
acugugguaacucaaccuc

SEQ ID NO: 1438422 - RNA, 19 nt, Artificial Sequence
  Description of Artificial Sequence: Synthetic oligonucleotide
  Sense strand starting at position 3675 of SEQ ID NO: 1243747
cagucaugaggaugguaga

SEQ ID NO: 1438423 - RNA, 19 nt, Artificial Sequence
  Description of Artificial Sequence: Synthetic oligonucleotide
  Antisense strand to SEQ ID NO: 1438422
ucuaccauccucaugacug

SEQ ID NO: 1438424 - RNA, 19 nt, Artificial Sequence
  Description of Artificial Sequence: Synthetic oligonucleotide
  Sense strand starting at position 3676 of SEQ ID NO: 1243747
agucaugaggaugguagaa

SEQ ID NO: 1438425 - RNA, 19 nt, Artificial Sequence
  Description of Artificial Sequence: Synthetic oligonucleotide
  Antisense strand to SEQ ID NO: 1438424
uucuaccauccucaugacu

SEQ ID NO: 1438426 - RNA, 19 nt, Artificial Sequence
  Description of Artificial Sequence: Synthetic oligonucleotide
  Sense strand starting at position 3778 of SEQ ID NO: 1243747
gugaaauaucguggguuua

SEQ ID NO: 1438427 - RNA, 19 nt, Artificial Sequence
  Description of Artificial Sequence: Synthetic oligonucleotide
  Antisense strand to SEQ ID NO: 1438426
uaaacccacgauauuucac

SEQ ID NO: 1438428 - RNA, 19 nt, Artificial Sequence
  Description of Artificial Sequence: Synthetic oligonucleotide
  Sense strand starting at position 3779 of SEQ ID NO: 1243747
ugaaauaucguggguuuaa

SEQ ID NO: 1438429 - RNA, 19 nt, Artificial Sequence
  Description of Artificial Sequence: Synthetic oligonucleotide
  Antisense strand to SEQ ID NO: 1438428
uuaaacccacgauauuuca

SEQ ID NO: 1438430 - RNA, 19 nt, Artificial Sequence
  Description of Artificial Sequence: Synthetic oligonucleotide
  Sense strand starting at position 3780 of SEQ ID NO: 1243747
gaaauaucguggguuuaau

SEQ ID NO: 1438431 - RNA, 19 nt, Artificial Sequence
  Description of Artificial Sequence: Synthetic oligonucleotide
  Antisense strand to SEQ ID NO: 1438430
auuaaacccacgauauuuc

SEQ ID NO: 1438432 - RNA, 19 nt, Artificial Sequence
  Description of Artificial Sequence: Synthetic oligonucleotide
  Sense strand starting at position 3820 of SEQ ID NO: 1243747
ggugcauuguacuugaaua

SEQ ID NO: 1438433 - RNA, 19 nt, Artificial Sequence
  Description of Artificial Sequence: Synthetic oligonucleotide
  Antisense strand to SEQ ID NO: 1438432
uauucaaguacaaugcacc

SEQ ID NO: 1438434 - RNA, 19 nt, Artificial Sequence
  Description of Artificial Sequence: Synthetic oligonucleotide
  Sense strand starting at position 3821 of SEQ ID NO: 1243747
gugcauuguacuugaauag

SEQ ID NO: 1438435 - RNA, 19 nt, Artificial Sequence
  Description of Artificial Sequence: Synthetic oligonucleotide
  Antisense strand to SEQ ID NO: 1438434
cuauucaaguacaaugcac

SEQ ID NO: 1438436 - RNA, 19 nt, Artificial Sequence
  Description of Artificial Sequence: Synthetic oligonucleotide
  Sense strand starting at position 3859 of SEQ ID NO: 1243747
gguccauaucaaggaauug

SEQ ID NO: 1438437 - RNA, 19 nt, Artificial Sequence
  Description of Artificial Sequence: Synthetic oligonucleotide
  Antisense strand to SEQ ID NO: 1438436
caauuccuugauauggacc

SEQ ID NO: 1438438 - RNA, 19 nt, Artificial Sequence
  Description of Artificial Sequence: Synthetic oligonucleotide
  Sense strand starting at position 3930 of SEQ ID NO: 1243747
agccaaaucucacucagga

SEQ ID NO: 1438439 - RNA, 19 nt, Artificial Sequence
  Description of Artificial Sequence: Synthetic oligonucleotide
  Antisense strand to SEQ ID NO: 1438438
uccugagugagauuuggcu

SEQ ID NO: 1438440 - RNA, 19 nt, Artificial Sequence
  Description of Artificial Sequence: Synthetic oligonucleotide
  Sense strand starting at position 3976 of SEQ ID NO: 1243747
gacaguguaucacuuuguu

SEQ ID NO: 1438441 - RNA, 19 nt, Artificial Sequence
  Description of Artificial Sequence: Synthetic oligonucleotide
  Antisense strand to SEQ ID NO: 1438440
aacaaagugauacacuguc

SEQ ID NO: 1438442 - RNA, 19 nt, Artificial Sequence
  Description of Artificial Sequence: Synthetic oligonucleotide
  Sense strand starting at position 114 of SEQ ID NO: 1243748
agggaaugccuccauuguu

SEQ ID NO: 1438443 - RNA, 19 nt, Artificial Sequence
  Description of Artificial Sequence: Synthetic oligonucleotide
  Antisense strand to SEQ ID NO: 1438442
aacaauggaggcauucccu

SEQ ID NO: 1438444 - RNA, 19 nt, Artificial Sequence
  Description of Artificial Sequence: Synthetic oligonucleotide
  Sense strand starting at position 216 of SEQ ID NO: 1243748
ccaguuauuuccuauauug

SEQ ID NO: 1438445 - RNA, 19 nt, Artificial Sequence
  Description of Artificial Sequence: Synthetic oligonucleotide
  Antisense strand to SEQ ID NO: 1438444
caauauaggaaauaacugg

SEQ ID NO: 1438446 - RNA, 19 nt, Artificial Sequence
  Description of Artificial Sequence: Synthetic oligonucleotide
  Sense strand starting at position 425 of SEQ ID NO: 1243748
gccaacauuguagagcaau

SEQ ID NO: 1438447 - RNA, 19 nt, Artificial Sequence
  Description of Artificial Sequence: Synthetic oligonucleotide
  Antisense strand to SEQ ID NO: 1438446
auugcucuacaauguuggc

SEQ ID NO: 1438448 - RNA, 19 nt, Artificial Sequence
  Description of Artificial Sequence: Synthetic oligonucleotide
  Sense strand starting at position 431 of SEQ ID NO: 1243748
auuguagagcaaugaaguu

SEQ ID NO: 1438449 - RNA, 19 nt, Artificial Sequence
  Description of Artificial Sequence: Synthetic oligonucleotide
  Antisense strand to SEQ ID NO: 1438448
aacuucauugcucuacaau

SEQ ID NO: 1438450 - RNA, 19 nt, Artificial Sequence
  Description of Artificial Sequence: Synthetic oligonucleotide
  Sense strand starting at position 505 of SEQ ID NO: 1243748
cacagaugccagugcacau

SEQ ID NO: 1438451 - RNA, 19 nt, Artificial Sequence
  Description of Artificial Sequence: Synthetic oligonucleotide
  Antisense strand to SEQ ID NO: 1438450
augugcacuggcaucugug

SEQ ID NO: 1438452 - RNA, 19 nt, Artificial Sequence
  Description of Artificial Sequence: Synthetic oligonucleotide
  Sense strand starting at position 584 of SEQ ID NO: 1243748
guaugaggaaucugaugcu

SEQ ID NO: 1438453 - RNA, 19 nt, Artificial Sequence
  Description of Artificial Sequence: Synthetic oligonucleotide
  Antisense strand to SEQ ID NO: 1438452
agcaucagauuccucauac

SEQ ID NO: 1438454 - RNA, 19 nt, Artificial Sequence
  Description of Artificial Sequence: Synthetic oligonucleotide
  Sense strand starting at position 746 of SEQ ID NO: 1243748
cugggagugccaugugaug

SEQ ID NO: 1438455 - RNA, 19 nt, Artificial Sequence
  Description of Artificial Sequence: Synthetic oligonucleotide
  Antisense strand to SEQ ID NO: 1438454
caucacauggcacucccag

SEQ ID NO: 1438456 - RNA, 19 nt, Artificial Sequence
  Description of Artificial Sequence: Synthetic oligonucleotide
  Sense strand starting at position 748 of SEQ ID NO: 1243748
gggagugccaugugauguu

SEQ ID NO: 1438457 - RNA, 19 nt, Artificial Sequence
  Description of Artificial Sequence: Synthetic oligonucleotide
  Antisense strand to SEQ ID NO: 1438456
aacaucacauggcacuccc

SEQ ID NO: 1438458 - RNA, 19 nt, Artificial Sequence
  Description of Artificial Sequence: Synthetic oligonucleotide
  Sense strand starting at position 758 of SEQ ID NO: 1243748
ugugauguuccaggucuga

SEQ ID NO: 1438459 - RNA, 19 nt, Artificial Sequence
  Description of Artificial Sequence: Synthetic oligonucleotide
  Antisense strand to SEQ ID NO: 1438458
ucagaccuggaacaucaca

SEQ ID NO: 1438460 - RNA, 19 nt, Artificial Sequence
  Description of Artificial Sequence: Synthetic oligonucleotide
  Sense strand starting at position 884 of SEQ ID NO: 1243748
ucagguaugcacuagcaga

SEQ ID NO: 1438461 - RNA, 19 nt, Artificial Sequence
  Description of Artificial Sequence: Synthetic oligonucleotide
  Antisense strand to SEQ ID NO: 1438460
ucugcuagugcauaccuga

SEQ ID NO: 1438462 - RNA, 19 nt, Artificial Sequence
  Description of Artificial Sequence: Synthetic oligonucleotide
  Sense strand starting at position 944 of SEQ ID NO: 1243748
ggcgcauagcaccaaauau

SEQ ID NO: 1438463 - RNA, 19 nt, Artificial Sequence
  Description of Artificial Sequence: Synthetic oligonucleotide
  Antisense strand to SEQ ID NO: 1438462
auauuuggugcuaugcgcc

SEQ ID NO: 1438464 - RNA, 19 nt, Artificial Sequence
  Description of Artificial Sequence: Synthetic oligonucleotide
  Sense strand starting at position 1128 of SEQ ID NO: 1243748
gggcuuuccagcuauagca

SEQ ID NO: 1438465 - RNA, 19 nt, Artificial Sequence
  Description of Artificial Sequence: Synthetic oligonucleotide
  Antisense strand to SEQ ID NO: 1438464
ugcuauagcuggaaagccc

SEQ ID NO: 1438466 - RNA, 19 nt, Artificial Sequence
  Description of Artificial Sequence: Synthetic oligonucleotide
  Sense strand starting at position 1323 of SEQ ID NO: 1243748
ggaauaugauuccugcugu

SEQ ID NO: 1438467 - RNA, 19 nt, Artificial Sequence
  Description of Artificial Sequence: Synthetic oligonucleotide
  Antisense strand to SEQ ID NO: 1438466
acagcaggaaucauauucc

SEQ ID NO: 1438468 - RNA, 19 nt, Artificial Sequence
  Description of Artificial Sequence: Synthetic oligonucleotide
  Sense strand starting at position 1331 of SEQ ID NO: 1243748
auuccugcugucuagcaga

SEQ ID NO: 1438469 - RNA, 19 nt, Artificial Sequence
  Description of Artificial Sequence: Synthetic oligonucleotide
  Antisense strand to SEQ ID NO: 1438468
ucugcuagacagcaggaau

SEQ ID NO: 1438470 - RNA, 19 nt, Artificial Sequence
  Description of Artificial Sequence: Synthetic oligonucleotide
  Sense strand starting at position 1336 of SEQ ID NO: 1243748
ugcugucuagcagaauaag

SEQ ID NO: 1438471 - RNA, 19 nt, Artificial Sequence
  Description of Artificial Sequence: Synthetic oligonucleotide
  Antisense strand to SEQ ID NO: 1438470
cuuauucugcuagacagca

SEQ ID NO: 1438472 - RNA, 19 nt, Artificial Sequence
  Description of Artificial Sequence: Synthetic oligonucleotide
  Sense strand starting at position 1454 of SEQ ID NO: 1243748
guccuacucugucccaaau

SEQ ID NO: 1438473 - RNA, 19 nt, Artificial Sequence
  Description of Artificial Sequence: Synthetic oligonucleotide
  Antisense strand to SEQ ID NO: 1438472
auuugggacagaguaggac

SEQ ID NO: 1438474 - RNA, 19 nt, Artificial Sequence
  Description of Artificial Sequence: Synthetic oligonucleotide
  Sense strand starting at position 1495 of SEQ ID NO: 1243748
uguggaaaccacggguuau

SEQ ID NO: 1438475 - RNA, 19 nt, Artificial Sequence
  Description of Artificial Sequence: Synthetic oligonucleotide
  Antisense strand to SEQ ID NO: 1438474
auaacccgugguuuccaca

SEQ ID NO: 1438476 - RNA, 19 nt, Artificial Sequence
  Description of Artificial Sequence: Synthetic oligonucleotide
  Sense strand starting at position 1496 of SEQ ID NO: 1243748
guggaaaccacggguuaug

SEQ ID NO: 1438477 - RNA, 19 nt, Artificial Sequence
  Description of Artificial Sequence: Synthetic oligonucleotide
  Antisense strand to SEQ ID NO: 1438476
cauaacccgugguuuccac

SEQ ID NO: 1438478 - RNA, 19 nt, Artificial Sequence
  Description of Artificial Sequence: Synthetic oligonucleotide
  Sense strand starting at position 1499 of SEQ ID NO: 1243748
gaaaccacggguuauguau

SEQ ID NO: 1438479 - RNA, 19 nt, Artificial Sequence
  Description of Artificial Sequence: Synthetic oligonucleotide
  Antisense strand to SEQ ID NO: 1438478
auacauaacccgugguuuc

SEQ ID NO: 1438480 - RNA, 19 nt, Artificial Sequence
  Description of Artificial Sequence: Synthetic oligonucleotide
  Sense strand starting at position 1561 of SEQ ID NO: 1243748
ugagcaccaguuuguuuaa

SEQ ID NO: 1438481 - RNA, 19 nt, Artificial Sequence
  Description of Artificial Sequence: Synthetic oligonucleotide
  Antisense strand to SEQ ID NO: 1438480
uuaaacaaacuggugcuca

SEQ ID NO: 1438482 - RNA, 19 nt, Artificial Sequence
  Description of Artificial Sequence: Synthetic oligonucleotide
  Sense strand starting at position 1564 of SEQ ID NO: 1243748
gcaccaguuuguuuaagua

SEQ ID NO: 1438483 - RNA, 19 nt, Artificial Sequence
  Description of Artificial Sequence: Synthetic oligonucleotide
  Antisense strand to SEQ ID NO: 1438482
uacuuaaacaaacuggugc

SEQ ID NO: 1438484 - RNA, 19 nt, Artificial Sequence
  Description of Artificial Sequence: Synthetic oligonucleotide
  Sense strand starting at position 1607 of SEQ ID NO: 1243748
guugcaccucaauagacaa

SEQ ID NO: 1438485 - RNA, 19 nt, Artificial Sequence
  Description of Artificial Sequence: Synthetic oligonucleotide
  Antisense strand to SEQ ID NO: 1438484
uugucuauugaggugcaac

SEQ ID NO: 1438486 - RNA, 19 nt, Artificial Sequence
  Description of Artificial Sequence: Synthetic oligonucleotide
  Sense strand starting at position 1680 of SEQ ID NO: 1243748
agggcacugaccugauauc

SEQ ID NO: 1438487 - RNA, 19 nt, Artificial Sequence
  Description of Artificial Sequence: Synthetic oligonucleotide
  Antisense strand to SEQ ID NO: 1438486
gauaucaggucagugcccu

SEQ ID NO: 1438488 - RNA, 19 nt, Artificial Sequence
  Description of Artificial Sequence: Synthetic oligonucleotide
  Sense strand starting at position 2274 of SEQ ID NO: 1243748
uacuguguuggucaugacu

SEQ ID NO: 1438489 - RNA, 19 nt, Artificial Sequence
  Description of Artificial Sequence: Synthetic oligonucleotide
  Antisense strand to SEQ ID NO: 1438488
agucaugaccaacacagua

SEQ ID NO: 1438490 - RNA, 19 nt, Artificial Sequence
  Description of Artificial Sequence: Synthetic oligonucleotide
  Sense strand starting at position 2298 of SEQ ID NO: 1243748
ucuuucggccuguaacaaa

SEQ ID NO: 1438491 - RNA, 19 nt, Artificial Sequence
  Description of Artificial Sequence: Synthetic oligonucleotide
  Antisense strand to SEQ ID NO: 1438490
uuuguuacaggccgaaaga

SEQ ID NO: 1438492 - RNA, 19 nt, Artificial Sequence
  Description of Artificial Sequence: Synthetic oligonucleotide
  Sense strand starting at position 2337 of SEQ ID NO: 1243748
acaccaaguguuggaaaca

SEQ ID NO: 1438493 - RNA, 19 nt, Artificial Sequence
  Description of Artificial Sequence: Synthetic oligonucleotide
  Antisense strand to SEQ ID NO: 1438492
uguuuccaacacuuggugu

SEQ ID NO: 1438494 - RNA, 19 nt, Artificial Sequence
  Description of Artificial Sequence: Synthetic oligonucleotide
  Sense strand starting at position 2449 of SEQ ID NO: 1243748
auguaugcccgccagagau

SEQ ID NO: 1438495 - RNA, 19 nt, Artificial Sequence
  Description of Artificial Sequence: Synthetic oligonucleotide
  Antisense strand to SEQ ID NO: 1438494
aucucuggcgggcauacau

SEQ ID NO: 1438496 - RNA, 19 nt, Artificial Sequence
  Description of Artificial Sequence: Synthetic oligonucleotide
  Sense strand starting at position 2527 of SEQ ID NO: 1243748
cagagaccuguaugugaau

SEQ ID NO: 1438497 - RNA, 19 nt, Artificial Sequence
  Description of Artificial Sequence: Synthetic oligonucleotide
  Antisense strand to SEQ ID NO: 1438496
auucacauacaggucucug

SEQ ID NO: 1438498 - RNA, 19 nt, Artificial Sequence
  Description of Artificial Sequence: Synthetic oligonucleotide
  Sense strand starting at position 2529 of SEQ ID NO: 1243748
gagaccuguaugugaaugu

SEQ ID NO: 1438499 - RNA, 19 nt, Artificial Sequence
  Description of Artificial Sequence: Synthetic oligonucleotide
  Antisense strand to SEQ ID NO: 1438498
acauucacauacaggucuc

SEQ ID NO: 1438500 - RNA, 19 nt, Artificial Sequence
  Description of Artificial Sequence: Synthetic oligonucleotide
  Sense strand starting at position 2968 of SEQ ID NO: 1243748
aagggaauguucuacugau

SEQ ID NO: 1438501 - RNA, 19 nt, Artificial Sequence
  Description of Artificial Sequence: Synthetic oligonucleotide
  Antisense strand to SEQ ID NO: 1438500
aucaguagaacauucccuu

SEQ ID NO: 1438502 - RNA, 19 nt, Artificial Sequence
  Description of Artificial Sequence: Synthetic oligonucleotide
  Sense strand starting at position 3085 of SEQ ID NO: 1243748
acucauagauaguaagaga

SEQ ID NO: 1438503 - RNA, 19 nt, Artificial Sequence
  Description of Artificial Sequence: Synthetic oligonucleotide
  Antisense strand to SEQ ID NO: 1438502
ucucuuacuaucuaugagu

SEQ ID NO: 1438504 - RNA, 19 nt, Artificial Sequence
  Description of Artificial Sequence: Synthetic oligonucleotide
  Sense strand starting at position 3107 of SEQ ID NO: 1243748
uggaucaucccuuagcuaa

SEQ ID NO: 1438505 - RNA, 19 nt, Artificial Sequence
  Description of Artificial Sequence: Synthetic oligonucleotide
  Antisense strand to SEQ ID NO: 1438504
uuagcuaagggaugaucca

SEQ ID NO: 1438506 - RNA, 19 nt, Artificial Sequence
  Description of Artificial Sequence: Synthetic oligonucleotide
  Sense strand starting at position 3366 of SEQ ID NO: 1243748
gucagauggcauuaggacu

SEQ ID NO: 1438507 - RNA, 19 nt, Artificial Sequence
  Description of Artificial Sequence: Synthetic oligonucleotide
  Antisense strand to SEQ ID NO: 1438506
aguccuaaugccaucugac

SEQ ID NO: 1438508 - RNA, 19 nt, Artificial Sequence
  Description of Artificial Sequence: Synthetic oligonucleotide
  Sense strand starting at position 3551 of SEQ ID NO: 1243748
ggauuaugaauguguugac

SEQ ID NO: 1438509 - RNA, 19 nt, Artificial Sequence
  Description of Artificial Sequence: Synthetic oligonucleotide
  Antisense strand to SEQ ID NO: 1438508
gucaacacauucauaaucc

SEQ ID NO: 1438510 - RNA, 19 nt, Artificial Sequence
  Description of Artificial Sequence: Synthetic oligonucleotide
  Sense strand starting at position 3552 of SEQ ID NO: 1243748
gauuaugaauguguugacu

SEQ ID NO: 1438511 - RNA, 19 nt, Artificial Sequence
  Description of Artificial Sequence: Synthetic oligonucleotide
  Antisense strand to SEQ ID NO: 1438510
agucaacacauucauaauc

SEQ ID NO: 1438512 - RNA, 19 nt, Artificial Sequence
  Description of Artificial Sequence: Synthetic oligonucleotide
  Sense strand starting at position 3564 of SEQ ID NO: 1243748
guugacuguccugaucaug

SEQ ID NO: 1438513 - RNA, 19 nt, Artificial Sequence
  Description of Artificial Sequence: Synthetic oligonucleotide
  Antisense strand to SEQ ID NO: 1438512
caugaucaggacagucaac

SEQ ID NO: 1438514 - RNA, 19 nt, Artificial Sequence
  Description of Artificial Sequence: Synthetic oligonucleotide
  Sense strand starting at position 3717 of SEQ ID NO: 1243748
ugugaucucuuauuauuag

SEQ ID NO: 1438515 - RNA, 19 nt, Artificial Sequence
  Description of Artificial Sequence: Synthetic oligonucleotide
  Antisense strand to SEQ ID NO: 1438514
cuaauaauaagagaucaca

SEQ ID NO: 1438516 - RNA, 19 nt, Artificial Sequence
  Description of Artificial Sequence: Synthetic oligonucleotide
  Sense strand starting at position 3728 of SEQ ID NO: 1243748
auuauuagauugcuccuga

SEQ ID NO: 1438517 - RNA, 19 nt, Artificial Sequence
  Description of Artificial Sequence: Synthetic oligonucleotide
  Antisense strand to SEQ ID NO: 1438516
ucaggagcaaucuaauaau

SEQ ID NO: 1438518 - RNA, 19 nt, Artificial Sequence
  Description of Artificial Sequence: Synthetic oligonucleotide
  Sense strand starting at position 3729 of SEQ ID NO: 1243748
uuauuagauugcuccugaa

SEQ ID NO: 1438519 - RNA, 19 nt, Artificial Sequence
  Description of Artificial Sequence: Synthetic oligonucleotide
  Antisense strand to SEQ ID NO: 1438518
uucaggagcaaucuaauaa

SEQ ID NO: 1438520 - RNA, 19 nt, Artificial Sequence
  Description of Artificial Sequence: Synthetic oligonucleotide
  Sense strand starting at position 3744 of SEQ ID NO: 1243748
ugaagcaaacuuugaauau

SEQ ID NO: 1438521 - RNA, 19 nt, Artificial Sequence
  Description of Artificial Sequence: Synthetic oligonucleotide
  Antisense strand to SEQ ID NO: 1438520
auauucaaaguuugcuuca

SEQ ID NO: 1438522 - RNA, 19 nt, Artificial Sequence
  Description of Artificial Sequence: Synthetic oligonucleotide
  Sense strand starting at position 9 of SEQ ID NO: 1243749
gguaauaagcaguagcuga

SEQ ID NO: 1438523 - RNA, 19 nt, Artificial Sequence
  Description of Artificial Sequence: Synthetic oligonucleotide
  Antisense strand to SEQ ID NO: 1438522
ucagcuacugcuuauuacc

SEQ ID NO: 1438524 - RNA, 19 nt, Artificial Sequence
  Description of Artificial Sequence: Synthetic oligonucleotide
  Sense strand starting at position 17 of SEQ ID NO: 1243749
gcaguagcugagcaauaua

SEQ ID NO: 1438525 - RNA, 19 nt, Artificial Sequence
  Description of Artificial Sequence: Synthetic oligonucleotide
  Antisense strand to SEQ ID NO: 1438524
uauauugcucagcuacugc

SEQ ID NO: 1438526 - RNA, 19 nt, Artificial Sequence
  Description of Artificial Sequence: Synthetic oligonucleotide
  Sense strand starting at position 52 of SEQ ID NO: 1243749
acccaaagaccuugugaca

SEQ ID NO: 1438527 - RNA, 19 nt, Artificial Sequence
  Description of Artificial Sequence: Synthetic oligonucleotide
  Antisense strand to SEQ ID NO: 1438526
ugucacaaggucuuugggu

SEQ ID NO: 1438528 - RNA, 19 nt, Artificial Sequence
  Description of Artificial Sequence: Synthetic oligonucleotide
  Sense strand starting at position 106 of SEQ ID NO: 1243749
ucaauaacuccugggacua

SEQ ID NO: 1438529 - RNA, 19 nt, Artificial Sequence
  Description of Artificial Sequence: Synthetic oligonucleotide
  Antisense strand to SEQ ID NO: 1438528
uagucccaggaguuauuga

SEQ ID NO: 1438530 - RNA, 19 nt, Artificial Sequence
  Description of Artificial Sequence: Synthetic oligonucleotide
  Sense strand starting at position 124 of SEQ ID NO: 1243749
aagguaaugcucuguaaau

SEQ ID NO: 1438531 - RNA, 19 nt, Artificial Sequence
  Description of Artificial Sequence: Synthetic oligonucleotide
  Antisense strand to SEQ ID NO: 1438530
auuuacagagcauuaccuu

SEQ ID NO: 1438532 - RNA, 19 nt, Artificial Sequence
  Description of Artificial Sequence: Synthetic oligonucleotide
  Sense strand starting at position 125 of SEQ ID NO: 1243749
agguaaugcucuguaaauu

SEQ ID NO: 1438533 - RNA, 19 nt, Artificial Sequence
  Description of Artificial Sequence: Synthetic oligonucleotide
  Antisense strand to SEQ ID NO: 1438532
aauuuacagagcauuaccu

SEQ ID NO: 1438534 - RNA, 19 nt, Artificial Sequence
  Description of Artificial Sequence: Synthetic oligonucleotide
  Sense strand starting at position 126 of SEQ ID NO: 1243749
gguaaugcucuguaaauua

SEQ ID NO: 1438535 - RNA, 19 nt, Artificial Sequence
  Description of Artificial Sequence: Synthetic oligonucleotide
  Antisense strand to SEQ ID NO: 1438534
uaauuuacagagcauuacc

SEQ ID NO: 1438536 - RNA, 19 nt, Artificial Sequence
  Description of Artificial Sequence: Synthetic oligonucleotide
  Sense strand starting at position 205 of SEQ ID NO: 1243749
gugggaaucuugguggguu

SEQ ID NO: 1438537 - RNA, 19 nt, Artificial Sequence
  Description of Artificial Sequence: Synthetic oligonucleotide
  Antisense strand to SEQ ID NO: 1438536
aacccaccaagauucccac

SEQ ID NO: 1438538 - RNA, 19 nt, Artificial Sequence
  Description of Artificial Sequence: Synthetic oligonucleotide
  Sense strand starting at position 353 of SEQ ID NO: 1243749
agggaaugccuccauuguu

SEQ ID NO: 1438539 - RNA, 19 nt, Artificial Sequence
  Description of Artificial Sequence: Synthetic oligonucleotide
  Antisense strand to SEQ ID NO: 1438538
aacaauggaggcauucccu

SEQ ID NO: 1438540 - RNA, 19 nt, Artificial Sequence
  Description of Artificial Sequence: Synthetic oligonucleotide
  Sense strand starting at position 664 of SEQ ID NO: 1243749
gccaacauuguagagcaau

SEQ ID NO: 1438541 - RNA, 19 nt, Artificial Sequence
  Description of Artificial Sequence: Synthetic oligonucleotide
  Antisense strand to SEQ ID NO: 1438540
auugcucuacaauguuggc

SEQ ID NO: 1438542 - RNA, 19 nt, Artificial Sequence
  Description of Artificial Sequence: Synthetic oligonucleotide
  Sense strand starting at position 670 of SEQ ID NO: 1243749
auuguagagcaaugaaguu

SEQ ID NO: 1438543 - RNA, 19 nt, Artificial Sequence
  Description of Artificial Sequence: Synthetic oligonucleotide
  Antisense strand to SEQ ID NO: 1438542
aacuucauugcucuacaau

SEQ ID NO: 1438544 - RNA, 19 nt, Artificial Sequence
  Description of Artificial Sequence: Synthetic oligonucleotide
  Sense strand starting at position 823 of SEQ ID NO: 1243749
guaugaggaaucugaugcu

SEQ ID NO: 1438545 - RNA, 19 nt, Artificial Sequence
  Description of Artificial Sequence: Synthetic oligonucleotide
  Antisense strand to SEQ ID NO: 1438544
agcaucagauuccucauac

SEQ ID NO: 1438546 - RNA, 19 nt, Artificial Sequence
  Description of Artificial Sequence: Synthetic oligonucleotide
  Sense strand starting at position 985 of SEQ ID NO: 1243749
cugggagugccaugugaug

SEQ ID NO: 1438547 - RNA, 19 nt, Artificial Sequence
  Description of Artificial Sequence: Synthetic oligonucleotide
  Antisense strand to SEQ ID NO: 1438546
caucacauggcacucccag

SEQ ID NO: 1438548 - RNA, 19 nt, Artificial Sequence
  Description of Artificial Sequence: Synthetic oligonucleotide
  Sense strand starting at position 1123 of SEQ ID NO: 1243749
ucagguaugcacuagcaga

SEQ ID NO: 1438549 - RNA, 19 nt, Artificial Sequence
  Description of Artificial Sequence: Synthetic oligonucleotide
  Antisense strand to SEQ ID NO: 1438548
ucugcuagugcauaccuga

SEQ ID NO: 1438550 - RNA, 19 nt, Artificial Sequence
  Description of Artificial Sequence: Synthetic oligonucleotide
  Sense strand starting at position 1183 of SEQ ID NO: 1243749
ggcgcauagcaccaaauau

SEQ ID NO: 1438551 - RNA, 19 nt, Artificial Sequence
  Description of Artificial Sequence: Synthetic oligonucleotide
  Antisense strand to SEQ ID NO: 1438550
auauuuggugcuaugcgcc

SEQ ID NO: 1438552 - RNA, 19 nt, Artificial Sequence
  Description of Artificial Sequence: Synthetic oligonucleotide
  Sense strand starting at position 1367 of SEQ ID NO: 1243749
gggcuuuccagcuauagca

SEQ ID NO: 1438553 - RNA, 19 nt, Artificial Sequence
  Description of Artificial Sequence: Synthetic oligonucleotide
  Antisense strand to SEQ ID NO: 1438552
ugcuauagcuggaaagccc

SEQ ID NO: 1438554 - RNA, 19 nt, Artificial Sequence
  Description of Artificial Sequence: Synthetic oligonucleotide
  Sense strand starting at position 1562 of SEQ ID NO: 1243749
ggaauaugauuccugcugu

SEQ ID NO: 1438555 - RNA, 19 nt, Artificial Sequence
  Description of Artificial Sequence: Synthetic oligonucleotide
  Antisense strand to SEQ ID NO: 1438554
acagcaggaaucauauucc

SEQ ID NO: 1438556 - RNA, 19 nt, Artificial Sequence
  Description of Artificial Sequence: Synthetic oligonucleotide
  Sense strand starting at position 1570 of SEQ ID NO: 1243749
auuccugcugucuagcaga

SEQ ID NO: 1438557 - RNA, 19 nt, Artificial Sequence
  Description of Artificial Sequence: Synthetic oligonucleotide
  Antisense strand to SEQ ID NO: 1438556
ucugcuagacagcaggaau

SEQ ID NO: 1438558 - RNA, 19 nt, Artificial Sequence
  Description of Artificial Sequence: Synthetic oligonucleotide
  Sense strand starting at position 1575 of SEQ ID NO: 1243749
ugcugucuagcagaauaag

SEQ ID NO: 1438559 - RNA, 19 nt, Artificial Sequence
  Description of Artificial Sequence: Synthetic oligonucleotide
  Antisense strand to SEQ ID NO: 1438558
cuuauucugcuagacagca

SEQ ID NO: 1438560 - RNA, 19 nt, Artificial Sequence
  Description of Artificial Sequence: Synthetic oligonucleotide
  Sense strand starting at position 1693 of SEQ ID NO: 1243749
guccuacucugucccaaau

SEQ ID NO: 1438561 - RNA, 19 nt, Artificial Sequence
  Description of Artificial Sequence: Synthetic oligonucleotide
  Antisense strand to SEQ ID NO: 1438560
auuugggacagaguaggac

SEQ ID NO: 1438562 - RNA, 19 nt, Artificial Sequence
  Description of Artificial Sequence: Synthetic oligonucleotide
  Sense strand starting at position 1734 of SEQ ID NO: 1243749
uguggaaaccacggguuau

SEQ ID NO: 1438563 - RNA, 19 nt, Artificial Sequence
  Description of Artificial Sequence: Synthetic oligonucleotide
  Antisense strand to SEQ ID NO: 1438562
auaacccgugguuuccaca

SEQ ID NO: 1438564 - RNA, 19 nt, Artificial Sequence
  Description of Artificial Sequence: Synthetic oligonucleotide
  Sense strand starting at position 1735 of SEQ ID NO: 1243749
guggaaaccacggguuaug

SEQ ID NO: 1438565 - RNA, 19 nt, Artificial Sequence
  Description of Artificial Sequence: Synthetic oligonucleotide
  Antisense strand to SEQ ID NO: 1438564
cauaacccgugguuuccac

SEQ ID NO: 1438566 - RNA, 19 nt, Artificial Sequence
  Description of Artificial Sequence: Synthetic oligonucleotide
  Sense strand starting at position 1738 of SEQ ID NO: 1243749
gaaaccacggguuauguau

SEQ ID NO: 1438567 - RNA, 19 nt, Artificial Sequence
  Description of Artificial Sequence: Synthetic oligonucleotide
  Antisense strand to SEQ ID NO: 1438566
auacauaacccgugguuuc

SEQ ID NO: 1438568 - RNA, 19 nt, Artificial Sequence
  Description of Artificial Sequence: Synthetic oligonucleotide
  Sense strand starting at position 1846 of SEQ ID NO: 1243749
guugcaccucaauagacaa

SEQ ID NO: 1438569 - RNA, 19 nt, Artificial Sequence
  Description of Artificial Sequence: Synthetic oligonucleotide
  Antisense strand to SEQ ID NO: 1438568
uugucuauugaggugcaac

SEQ ID NO: 1438570 - RNA, 19 nt, Artificial Sequence
  Description of Artificial Sequence: Synthetic oligonucleotide
  Sense strand starting at position 1919 of SEQ ID NO: 1243749
agggcacugaccugauauc

SEQ ID NO: 1438571 - RNA, 19 nt, Artificial Sequence
  Description of Artificial Sequence: Synthetic oligonucleotide
  Antisense strand to SEQ ID NO: 1438570
gauaucaggucagugcccu

SEQ ID NO: 1438572 - RNA, 19 nt, Artificial Sequence
  Description of Artificial Sequence: Synthetic oligonucleotide
  Sense strand starting at position 2513 of SEQ ID NO: 1243749
uacuguguuggucaugacu

SEQ ID NO: 1438573 - RNA, 19 nt, Artificial Sequence
  Description of Artificial Sequence: Synthetic oligonucleotide
  Antisense strand to SEQ ID NO: 1438572
agucaugaccaacacagua

SEQ ID NO: 1438574 - RNA, 19 nt, Artificial Sequence
  Description of Artificial Sequence: Synthetic oligonucleotide
  Sense strand starting at position 2537 of SEQ ID NO: 1243749
ucuuucggccuguaacaaa

SEQ ID NO: 1438575 - RNA, 19 nt, Artificial Sequence
  Description of Artificial Sequence: Synthetic oligonucleotide
  Antisense strand to SEQ ID NO: 1438574
uuuguuacaggccgaaaga

SEQ ID NO: 1438576 - RNA, 19 nt, Artificial Sequence
  Description of Artificial Sequence: Synthetic oligonucleotide
  Sense strand starting at position 2576 of SEQ ID NO: 1243749
acaccaaguguuggaaaca

SEQ ID NO: 1438577 - RNA, 19 nt, Artificial Sequence
  Description of Artificial Sequence: Synthetic oligonucleotide
  Antisense strand to SEQ ID NO: 1438576
uguuuccaacacuuggugu

SEQ ID NO: 1438578 - RNA, 19 nt, Artificial Sequence
  Description of Artificial Sequence: Synthetic oligonucleotide
  Sense strand starting at position 2688 of SEQ ID NO: 1243749
auguaugcccgccagagau

SEQ ID NO: 1438579 - RNA, 19 nt, Artificial Sequence
  Description of Artificial Sequence: Synthetic oligonucleotide
  Antisense strand to SEQ ID NO: 1438578
aucucuggcgggcauacau

SEQ ID NO: 1438580 - RNA, 19 nt, Artificial Sequence
  Description of Artificial Sequence: Synthetic oligonucleotide
  Sense strand starting at position 2766 of SEQ ID NO: 1243749
cagagaccuguaugugaau

SEQ ID NO: 1438581 - RNA, 19 nt, Artificial Sequence
  Description of Artificial Sequence: Synthetic oligonucleotide
  Antisense strand to SEQ ID NO: 1438580
auucacauacaggucucug

SEQ ID NO: 1438582 - RNA, 19 nt, Artificial Sequence
  Description of Artificial Sequence: Synthetic oligonucleotide
  Sense strand starting at position 2768 of SEQ ID NO: 1243749
gagaccuguaugugaaugu

SEQ ID NO: 1438583 - RNA, 19 nt, Artificial Sequence
  Description of Artificial Sequence: Synthetic oligonucleotide
  Antisense strand to SEQ ID NO: 1438582
acauucacauacaggucuc

SEQ ID NO: 1438584 - RNA, 19 nt, Artificial Sequence
  Description of Artificial Sequence: Synthetic oligonucleotide
  Sense strand starting at position 3346 of SEQ ID NO: 1243749
uggaucaucccuuagcuaa

SEQ ID NO: 1438585 - RNA, 19 nt, Artificial Sequence
  Description of Artificial Sequence: Synthetic oligonucleotide
  Antisense strand to SEQ ID NO: 1438584
uuagcuaagggaugaucca

SEQ ID NO: 1438586 - RNA, 19 nt, Artificial Sequence
  Description of Artificial Sequence: Synthetic oligonucleotide
  Sense strand starting at position 3605 of SEQ ID NO: 1243749
gucagauggcauuaggacu

SEQ ID NO: 1438587 - RNA, 19 nt, Artificial Sequence
  Description of Artificial Sequence: Synthetic oligonucleotide
  Antisense strand to SEQ ID NO: 1438586
aguccuaaugccaucugac

SEQ ID NO: 1438588 - RNA, 19 nt, Artificial Sequence
  Description of Artificial Sequence: Synthetic oligonucleotide
  Sense strand starting at position 3790 of SEQ ID NO: 1243749
ggauuaugaauguguugac

SEQ ID NO: 1438589 - RNA, 19 nt, Artificial Sequence
  Description of Artificial Sequence: Synthetic oligonucleotide
  Antisense strand to SEQ ID NO: 1438588
gucaacacauucauaaucc

SEQ ID NO: 1438590 - RNA, 19 nt, Artificial Sequence
  Description of Artificial Sequence: Synthetic oligonucleotide
  Sense strand starting at position 3791 of SEQ ID NO: 1243749
gauuaugaauguguugacu

SEQ ID NO: 1438591 - RNA, 19 nt, Artificial Sequence
  Description of Artificial Sequence: Synthetic oligonucleotide
  Antisense strand to SEQ ID NO: 1438590
agucaacacauucauaauc

SEQ ID NO: 1438592 - RNA, 19 nt, Artificial Sequence
  Description of Artificial Sequence: Synthetic oligonucleotide
  Sense strand starting at position 3803 of SEQ ID NO: 1243749
guugacuguccugaucaug

SEQ ID NO: 1438593 - RNA, 19 nt, Artificial Sequence
  Description of Artificial Sequence: Synthetic oligonucleotide
  Antisense strand to SEQ ID NO: 1438592
caugaucaggacagucaac

SEQ ID NO: 1438594 - RNA, 19 nt, Artificial Sequence
  Description of Artificial Sequence: Synthetic oligonucleotide
  Sense strand starting at position 3956 of SEQ ID NO: 1243749
ugugaucucuuauuauuag

SEQ ID NO: 1438595 - RNA, 19 nt, Artificial Sequence
  Description of Artificial Sequence: Synthetic oligonucleotide
  Antisense strand to SEQ ID NO: 1438594
cuaauaauaagagaucaca

SEQ ID NO: 1438596 - RNA, 19 nt, Artificial Sequence
  Description of Artificial Sequence: Synthetic oligonucleotide
  Sense strand starting at position 3967 of SEQ ID NO: 1243749
auuauuagauugcuccuga

SEQ ID NO: 1438597 - RNA, 19 nt, Artificial Sequence
  Description of Artificial Sequence: Synthetic oligonucleotide
  Antisense strand to SEQ ID NO: 1438596
ucaggagcaaucuaauaau

SEQ ID NO: 1438598 - RNA, 19 nt, Artificial Sequence
  Description of Artificial Sequence: Synthetic oligonucleotide
  Sense strand starting at position 3968 of SEQ ID NO: 1243749
uuauuagauugcuccugaa

SEQ ID NO: 1438599 - RNA, 19 nt, Artificial Sequence
  Description of Artificial Sequence: Synthetic oligonucleotide
  Antisense strand to SEQ ID NO: 1438598
uucaggagcaaucuaauaa

SEQ ID NO: 1438600 - RNA, 19 nt, Artificial Sequence
  Description of Artificial Sequence: Synthetic oligonucleotide
  Sense strand starting at position 3983 of SEQ ID NO: 1243749
ugaagcaaacuuugaauau

SEQ ID NO: 1438601 - RNA, 19 nt, Artificial Sequence
  Description of Artificial Sequence: Synthetic oligonucleotide
  Antisense strand to SEQ ID NO: 1438600
auauucaaaguuugcuuca

SEQ ID NO: 1438602 - RNA, 19 nt, Artificial Sequence
  Description of Artificial Sequence: Synthetic oligonucleotide
  Sense strand starting at position 219 of SEQ ID NO: 1243750
agaauuuacugguacuuac

SEQ ID NO: 1438603 - RNA, 19 nt, Artificial Sequence
  Description of Artificial Sequence: Synthetic oligonucleotide
  Antisense strand to SEQ ID NO: 1438602
guaaguaccaguaaauucu

SEQ ID NO: 1438604 - RNA, 19 nt, Artificial Sequence
  Description of Artificial Sequence: Synthetic oligonucleotide
  Sense strand starting at position 240 of SEQ ID NO: 1243750
uuuagaauucugggcaaug

SEQ ID NO: 1438605 - RNA, 19 nt, Artificial Sequence
  Description of Artificial Sequence: Synthetic oligonucleotide
  Antisense strand to SEQ ID NO: 1438604
cauugcccagaauucuaaa

SEQ ID NO: 1438606 - RNA, 19 nt, Artificial Sequence
  Description of Artificial Sequence: Synthetic oligonucleotide
  Sense strand starting at position 257 of SEQ ID NO: 1243750
uggagaagauaugaaagau

SEQ ID NO: 1438607 - RNA, 19 nt, Artificial Sequence
  Description of Artificial Sequence: Synthetic oligonucleotide
  Antisense strand to SEQ ID NO: 1438606
aucuuucauaucuucucca

SEQ ID NO: 1438608 - RNA, 19 nt, Artificial Sequence
  Description of Artificial Sequence: Synthetic oligonucleotide
  Sense strand starting at position 701 of SEQ ID NO: 1243750
aguaguaguugaccuagua

SEQ ID NO: 1438609 - RNA, 19 nt, Artificial Sequence
  Description of Artificial Sequence: Synthetic oligonucleotide
  Antisense strand to SEQ ID NO: 1438608
uacuaggucaacuacuacu

SEQ ID NO: 1438610 - RNA, 19 nt, Artificial Sequence
  Description of Artificial Sequence: Synthetic oligonucleotide
  Sense strand starting at position 889 of SEQ ID NO: 1243750
ggagauuuauauugucuga

SEQ ID NO: 1438611 - RNA, 19 nt, Artificial Sequence
  Description of Artificial Sequence: Synthetic oligonucleotide
  Antisense strand to SEQ ID NO: 1438610
ucagacaauauaaaucucc

SEQ ID NO: 1438612 - RNA, 19 nt, Artificial Sequence
  Description of Artificial Sequence: Synthetic oligonucleotide
  Sense strand starting at position 905 of SEQ ID NO: 1243750
ugaccuugguaucucuaua

SEQ ID NO: 1438613 - RNA, 19 nt, Artificial Sequence
  Description of Artificial Sequence: Synthetic oligonucleotide
  Antisense strand to SEQ ID NO: 1438612
uauagagauaccaagguca

SEQ ID NO: 1438614 - RNA, 19 nt, Artificial Sequence
  Description of Artificial Sequence: Synthetic oligonucleotide
  Sense strand starting at position 910 of SEQ ID NO: 1243750
uugguaucucuauagguuu

SEQ ID NO: 1438615 - RNA, 19 nt, Artificial Sequence
  Description of Artificial Sequence: Synthetic oligonucleotide
  Antisense strand to SEQ ID NO: 1438614
aaaccuauagagauaccaa

SEQ ID NO: 1438616 - RNA, 19 nt, Artificial Sequence
  Description of Artificial Sequence: Synthetic oligonucleotide
  Sense strand starting at position 917 of SEQ ID NO: 1243750
cucuauagguuuccacaga

SEQ ID NO: 1438617 - RNA, 19 nt, Artificial Sequence
  Description of Artificial Sequence: Synthetic oligonucleotide
  Antisense strand to SEQ ID NO: 1438616
ucuguggaaaccuauagag

SEQ ID NO: 1438618 - RNA, 19 nt, Artificial Sequence
  Description of Artificial Sequence: Synthetic oligonucleotide
  Sense strand starting at position 942 of SEQ ID NO: 1243750
ggucuuaguuauuuaugcu

SEQ ID NO: 1438619 - RNA, 19 nt, Artificial Sequence
  Description of Artificial Sequence: Synthetic oligonucleotide
  Antisense strand to SEQ ID NO: 1438618
agcauaaauaacuaagacc

SEQ ID NO: 1438620 - RNA, 19 nt, Artificial Sequence
  Description of Artificial Sequence: Synthetic oligonucleotide
  Sense strand starting at position 1027 of SEQ ID NO: 1243750
ugugccauuuggucuuaau

SEQ ID NO: 1438621 - RNA, 19 nt, Artificial Sequence
  Description of Artificial Sequence: Synthetic oligonucleotide
  Antisense strand to SEQ ID NO: 1438620
auuaagaccaaauggcaca

SEQ ID NO: 1438622 - RNA, 19 nt, Artificial Sequence
  Description of Artificial Sequence: Synthetic oligonucleotide
  Sense strand starting at position 1502 of SEQ ID NO: 1243750
ccaagaauaucaccgucua

SEQ ID NO: 1438623 - RNA, 19 nt, Artificial Sequence
  Description of Artificial Sequence: Synthetic oligonucleotide
  Antisense strand to SEQ ID NO: 1438622
uagacggugauauucuugg

SEQ ID NO: 1438624 - RNA, 19 nt, Artificial Sequence
  Description of Artificial Sequence: Synthetic oligonucleotide
  Sense strand starting at position 1503 of SEQ ID NO: 1243750
caagaauaucaccgucuag

SEQ ID NO: 1438625 - RNA, 19 nt, Artificial Sequence
  Description of Artificial Sequence: Synthetic oligonucleotide
  Antisense strand to SEQ ID NO: 1438624
cuagacggugauauucuug

SEQ ID NO: 1438626 - RNA, 19 nt, Artificial Sequence
  Description of Artificial Sequence: Synthetic oligonucleotide
  Sense strand starting at position 1566 of SEQ ID NO: 1243750
guaugaauuugggaaccuu

SEQ ID NO: 1438627 - RNA, 19 nt, Artificial Sequence
  Description of Artificial Sequence: Synthetic oligonucleotide
  Antisense strand to SEQ ID NO: 1438626
aagguucccaaauucauac

SEQ ID NO: 1438628 - RNA, 19 nt, Artificial Sequence
  Description of Artificial Sequence: Synthetic oligonucleotide
  Sense strand starting at position 1672 of SEQ ID NO: 1243750
gcaucacauucucugaaga

SEQ ID NO: 1438629 - RNA, 19 nt, Artificial Sequence
  Description of Artificial Sequence: Synthetic oligonucleotide
  Antisense strand to SEQ ID NO: 1438628
ucuucagagaaugugaugc

SEQ ID NO: 1438630 - RNA, 19 nt, Artificial Sequence
  Description of Artificial Sequence: Synthetic oligonucleotide
  Sense strand starting at position 1709 of SEQ ID NO: 1243750
acagcuaucucucuggaau

SEQ ID NO: 1438631 - RNA, 19 nt, Artificial Sequence
  Description of Artificial Sequence: Synthetic oligonucleotide
  Antisense strand to SEQ ID NO: 1438630
auuccagagagauagcugu

SEQ ID NO: 1438632 - RNA, 19 nt, Artificial Sequence
  Description of Artificial Sequence: Synthetic oligonucleotide
  Sense strand starting at position 1712 of SEQ ID NO: 1243750
gcuaucucucuggaaugaa

SEQ ID NO: 1438633 - RNA, 19 nt, Artificial Sequence
  Description of Artificial Sequence: Synthetic oligonucleotide
  Antisense strand to SEQ ID NO: 1438632
uucauuccagagagauagc

SEQ ID NO: 1438634 - RNA, 19 nt, Artificial Sequence
  Description of Artificial Sequence: Synthetic oligonucleotide
  Sense strand starting at position 1780 of SEQ ID NO: 1243750
gaaaguauugcuugcugga

SEQ ID NO: 1438635 - RNA, 19 nt, Artificial Sequence
  Description of Artificial Sequence: Synthetic oligonucleotide
  Antisense strand to SEQ ID NO: 1438634
uccagcaagcaauacuuuc

SEQ ID NO: 1438636 - RNA, 19 nt, Artificial Sequence
  Description of Artificial Sequence: Synthetic oligonucleotide
  Sense strand starting at position 1785 of SEQ ID NO: 1243750
uauugcuugcuggauauca

SEQ ID NO: 1438637 - RNA, 19 nt, Artificial Sequence
  Description of Artificial Sequence: Synthetic oligonucleotide
  Antisense strand to SEQ ID NO: 1438636
ugauauccagcaagcaaua

SEQ ID NO: 1438638 - RNA, 19 nt, Artificial Sequence
  Description of Artificial Sequence: Synthetic oligonucleotide
  Sense strand starting at position 2052 of SEQ ID NO: 1243750
caaguuugacccugagaga

SEQ ID NO: 1438639 - RNA, 19 nt, Artificial Sequence
  Description of Artificial Sequence: Synthetic oligonucleotide
  Antisense strand to SEQ ID NO: 1438638
ucucucagggucaaacuug

SEQ ID NO: 1438640 - RNA, 19 nt, Artificial Sequence
  Description of Artificial Sequence: Synthetic oligonucleotide
  Sense strand starting at position 2139 of SEQ ID NO: 1243750
ggcuaauucugcuuauuaa

SEQ ID NO: 1438641 - RNA, 19 nt, Artificial Sequence
  Description of Artificial Sequence: Synthetic oligonucleotide
  Antisense strand to SEQ ID NO: 1438640
uuaauaagcagaauuagcc

SEQ ID NO: 1438642 - RNA, 19 nt, Artificial Sequence
  Description of Artificial Sequence: Synthetic oligonucleotide
  Sense strand starting at position 2221 of SEQ ID NO: 1243750
agguuucucgagcaggaag

SEQ ID NO: 1438643 - RNA, 19 nt, Artificial Sequence
  Description of Artificial Sequence: Synthetic oligonucleotide
  Antisense strand to SEQ ID NO: 1438642
cuuccugcucgagaaaccu

SEQ ID NO: 1438644 - RNA, 19 nt, Artificial Sequence
  Description of Artificial Sequence: Synthetic oligonucleotide
  Sense strand starting at position 2240 of SEQ ID NO: 1243750
gccauaaacgcccauugau

SEQ ID NO: 1438645 - RNA, 19 nt, Artificial Sequence
  Description of Artificial Sequence: Synthetic oligonucleotide
  Antisense strand to SEQ ID NO: 1438644
aucaaugggcguuuauggc

SEQ ID NO: 1438646 - RNA, 19 nt, Artificial Sequence
  Description of Artificial Sequence: Synthetic oligonucleotide
  Sense strand starting at position 2300 of SEQ ID NO: 1243750
augcaugcucacugacaca

SEQ ID NO: 1438647 - RNA, 19 nt, Artificial Sequence
  Description of Artificial Sequence: Synthetic oligonucleotide
  Antisense strand to SEQ ID NO: 1438646
ugugucagugagcaugcau

SEQ ID NO: 1438648 - RNA, 19 nt, Artificial Sequence
  Description of Artificial Sequence: Synthetic oligonucleotide
  Sense strand starting at position 2351 of SEQ ID NO: 1243750
uguggagauuucuaguaag

SEQ ID NO: 1438649 - RNA, 19 nt, Artificial Sequence
  Description of Artificial Sequence: Synthetic oligonucleotide
  Antisense strand to SEQ ID NO: 1438648
cuuacuagaaaucuccaca

SEQ ID NO: 1438650 - RNA, 19 nt, Artificial Sequence
  Description of Artificial Sequence: Synthetic oligonucleotide
  Sense strand starting at position 2354 of SEQ ID NO: 1243750
ggagauuucuaguaaggaa

SEQ ID NO: 1438651 - RNA, 19 nt, Artificial Sequence
  Description of Artificial Sequence: Synthetic oligonucleotide
  Antisense strand to SEQ ID NO: 1438650
uuccuuacuagaaaucucc

SEQ ID NO: 1438652 - RNA, 19 nt, Artificial Sequence
  Description of Artificial Sequence: Synthetic oligonucleotide
  Sense strand starting at position 2482 of SEQ ID NO: 1243750
uuacuugacuucuugggau

SEQ ID NO: 1438653 - RNA, 19 nt, Artificial Sequence
  Description of Artificial Sequence: Synthetic oligonucleotide
  Antisense strand to SEQ ID NO: 1438652
aucccaagaagucaaguaa

SEQ ID NO: 1438654 - RNA, 19 nt, Artificial Sequence
  Description of Artificial Sequence: Synthetic oligonucleotide
  Sense strand starting at position 2484 of SEQ ID NO: 1243750
acuugacuucuugggaucu

SEQ ID NO: 1438655 - RNA, 19 nt, Artificial Sequence
  Description of Artificial Sequence: Synthetic oligonucleotide
  Antisense strand to SEQ ID NO: 1438654
agaucccaagaagucaagu

SEQ ID NO: 1438656 - RNA, 19 nt, Artificial Sequence
  Description of Artificial Sequence: Synthetic oligonucleotide
  Sense strand starting at position 3127 of SEQ ID NO: 1243750
ggccgugaaccauaugauc

SEQ ID NO: 1438657 - RNA, 19 nt, Artificial Sequence
  Description of Artificial Sequence: Synthetic oligonucleotide
  Antisense strand to SEQ ID NO: 1438656
gaucauaugguucacggcc

SEQ ID NO: 1438658 - RNA, 19 nt, Artificial Sequence
  Description of Artificial Sequence: Synthetic oligonucleotide
  Sense strand starting at position 3225 of SEQ ID NO: 1243750
ugaauagugaagugaguau

SEQ ID NO: 1438659 - RNA, 19 nt, Artificial Sequence
  Description of Artificial Sequence: Synthetic oligonucleotide
  Antisense strand to SEQ ID NO: 1438658
auacucacuucacuauuca

SEQ ID NO: 1438660 - RNA, 19 nt, Artificial Sequence
  Description of Artificial Sequence: Synthetic oligonucleotide
  Sense strand starting at position 3229 of SEQ ID NO: 1243750
uagugaagugaguauuggu

SEQ ID NO: 1438661 - RNA, 19 nt, Artificial Sequence
  Description of Artificial Sequence: Synthetic oligonucleotide
  Antisense strand to SEQ ID NO: 1438660
accaauacucacuucacua

SEQ ID NO: 1438662 - RNA, 19 nt, Artificial Sequence
  Description of Artificial Sequence: Synthetic oligonucleotide
  Sense strand starting at position 3234 of SEQ ID NO: 1243750
aagugaguauugguggaca

SEQ ID NO: 1438663 - RNA, 19 nt, Artificial Sequence
  Description of Artificial Sequence: Synthetic oligonucleotide
  Antisense strand to SEQ ID NO: 1438662
uguccaccaauacucacuu

SEQ ID NO: 1438664 - RNA, 19 nt, Artificial Sequence
  Description of Artificial Sequence: Synthetic oligonucleotide
  Sense strand starting at position 3236 of SEQ ID NO: 1243750
gugaguauugguggacaac

SEQ ID NO: 1438665 - RNA, 19 nt, Artificial Sequence
  Description of Artificial Sequence: Synthetic oligonucleotide
  Antisense strand to SEQ ID NO: 1438664
guuguccaccaauacucac

SEQ ID NO: 1438666 - RNA, 19 nt, Artificial Sequence
  Description of Artificial Sequence: Synthetic oligonucleotide
  Sense strand starting at position 3348 of SEQ ID NO: 1243750
agauaacuguuguugaaga

SEQ ID NO: 1438667 - RNA, 19 nt, Artificial Sequence
  Description of Artificial Sequence: Synthetic oligonucleotide
  Antisense strand to SEQ ID NO: 1438666
ucuucaacaacaguuaucu

SEQ ID NO: 1438668 - RNA, 19 nt, Artificial Sequence
  Description of Artificial Sequence: Synthetic oligonucleotide
  Sense strand starting at position 3350 of SEQ ID NO: 1243750
auaacuguuguugaagauu

SEQ ID NO: 1438669 - RNA, 19 nt, Artificial Sequence
  Description of Artificial Sequence: Synthetic oligonucleotide
  Antisense strand to SEQ ID NO: 1438668
aaucuucaacaacaguuau

SEQ ID NO: 1438670 - RNA, 19 nt, Artificial Sequence
  Description of Artificial Sequence: Synthetic oligonucleotide
  Sense strand starting at position 3389 of SEQ ID NO: 1243750
uagugucuaguguaauaau

SEQ ID NO: 1438671 - RNA, 19 nt, Artificial Sequence
  Description of Artificial Sequence: Synthetic oligonucleotide
  Antisense strand to SEQ ID NO: 1438670
auuauuacacuagacacua

SEQ ID NO: 1438672 - RNA, 19 nt, Artificial Sequence
  Description of Artificial Sequence: Synthetic oligonucleotide
  Sense strand starting at position 3398 of SEQ ID NO: 1243750
guguaauaaucuguagacu

SEQ ID NO: 1438673 - RNA, 19 nt, Artificial Sequence
  Description of Artificial Sequence: Synthetic oligonucleotide
  Antisense strand to SEQ ID NO: 1438672
agucuacagauuauuacac

SEQ ID NO: 1438674 - RNA, 19 nt, Artificial Sequence
  Description of Artificial Sequence: Synthetic oligonucleotide
  Sense strand starting at position 3399 of SEQ ID NO: 1243750
uguaauaaucuguagacuu

SEQ ID NO: 1438675 - RNA, 19 nt, Artificial Sequence
  Description of Artificial Sequence: Synthetic oligonucleotide
  Antisense strand to SEQ ID NO: 1438674
aagucuacagauuauuaca

SEQ ID NO: 1438676 - RNA, 19 nt, Artificial Sequence
  Description of Artificial Sequence: Synthetic oligonucleotide
  Sense strand starting at position 3412 of SEQ ID NO: 1243750
agacuuugucauggcauag

SEQ ID NO: 1438677 - RNA, 19 nt, Artificial Sequence
  Description of Artificial Sequence: Synthetic oligonucleotide
  Antisense strand to SEQ ID NO: 1438676
cuaugccaugacaaagucu

SEQ ID NO: 1438678 - RNA, 19 nt, Artificial Sequence
  Description of Artificial Sequence: Synthetic oligonucleotide
  Sense strand starting at position 3416 of SEQ ID NO: 1243750
uuugucauggcauagauag

SEQ ID NO: 1438679 - RNA, 19 nt, Artificial Sequence
  Description of Artificial Sequence: Synthetic oligonucleotide
  Antisense strand to SEQ ID NO: 1438678
cuaucuaugccaugacaaa

SEQ ID NO: 1438680 - RNA, 19 nt, Artificial Sequence
  Description of Artificial Sequence: Synthetic oligonucleotide
  Sense strand starting at position 3418 of SEQ ID NO: 1243750
ugucauggcauagauagau

SEQ ID NO: 1438681 - RNA, 19 nt, Artificial Sequence
  Description of Artificial Sequence: Synthetic oligonucleotide
  Antisense strand to SEQ ID NO: 1438680
aucuaucuaugccaugaca

SEQ ID NO: 1438682 - RNA, 19 nt, Artificial Sequence
  Description of Artificial Sequence: Synthetic oligonucleotide
  Sense strand starting at position 244 of SEQ ID NO: 1243751
ggcaaauuaguuugacauc

SEQ ID NO: 1438683 - RNA, 19 nt, Artificial Sequence
  Description of Artificial Sequence: Synthetic oligonucleotide
  Antisense strand to SEQ ID NO: 1438682
gaugucaaacuaauuugcc

SEQ ID NO: 1438684 - RNA, 19 nt, Artificial Sequence
  Description of Artificial Sequence: Synthetic oligonucleotide
  Sense strand starting at position 253 of SEQ ID NO: 1243751
guuugacaucuuuguuaaa

SEQ ID NO: 1438685 - RNA, 19 nt, Artificial Sequence
  Description of Artificial Sequence: Synthetic oligonucleotide
  Antisense strand to SEQ ID NO: 1438684
uuuaacaaagaugucaaac

SEQ ID NO: 1438686 - RNA, 19 nt, Artificial Sequence
  Description of Artificial Sequence: Synthetic oligonucleotide
  Sense strand starting at position 314 of SEQ ID NO: 1243751
guauauuuguaccuguuau

SEQ ID NO: 1438687 - RNA, 19 nt, Artificial Sequence
  Description of Artificial Sequence: Synthetic oligonucleotide
  Antisense strand to SEQ ID NO: 1438686
auaacagguacaaauauac

SEQ ID NO: 1438688 - RNA, 19 nt, Artificial Sequence
  Description of Artificial Sequence: Synthetic oligonucleotide
  Sense strand starting at position 324 of SEQ ID NO: 1243751
accuguuauucuuuagagu

SEQ ID NO: 1438689 - RNA, 19 nt, Artificial Sequence
  Description of Artificial Sequence: Synthetic oligonucleotide
  Antisense strand to SEQ ID NO: 1438688
acucuaaagaauaacaggu

SEQ ID NO: 1438690 - RNA, 19 nt, Artificial Sequence
  Description of Artificial Sequence: Synthetic oligonucleotide
  Sense strand starting at position 325 of SEQ ID NO: 1243751
ccuguuauucuuuagaguc

SEQ ID NO: 1438691 - RNA, 19 nt, Artificial Sequence
  Description of Artificial Sequence: Synthetic oligonucleotide
  Antisense strand to SEQ ID NO: 1438690
gacucuaaagaauaacagg

SEQ ID NO: 1438692 - RNA, 19 nt, Artificial Sequence
  Description of Artificial Sequence: Synthetic oligonucleotide
  Sense strand starting at position 357 of SEQ ID NO: 1243751
guuuaauuccaauguuuag

SEQ ID NO: 1438693 - RNA, 19 nt, Artificial Sequence
  Description of Artificial Sequence: Synthetic oligonucleotide
  Antisense strand to SEQ ID NO: 1438692
cuaaacauuggaauuaaac

SEQ ID NO: 1438694 - RNA, 19 nt, Artificial Sequence
  Description of Artificial Sequence: Synthetic oligonucleotide
  Sense strand starting at position 363 of SEQ ID NO: 1243751
uuccaauguuuaguugaaa

SEQ ID NO: 1438695 - RNA, 19 nt, Artificial Sequence
  Description of Artificial Sequence: Synthetic oligonucleotide
  Antisense strand to SEQ ID NO: 1438694
uuucaacuaaacauuggaa

SEQ ID NO: 1438696 - RNA, 19 nt, Artificial Sequence
  Description of Artificial Sequence: Synthetic oligonucleotide
  Sense strand starting at position 364 of SEQ ID NO: 1243751
uccaauguuuaguugaaag

SEQ ID NO: 1438697 - RNA, 19 nt, Artificial Sequence
  Description of Artificial Sequence: Synthetic oligonucleotide
  Antisense strand to SEQ ID NO: 1438696
cuuucaacuaaacauugga

SEQ ID NO: 1438698 - RNA, 19 nt, Artificial Sequence
  Description of Artificial Sequence: Synthetic oligonucleotide
  Sense strand starting at position 366 of SEQ ID NO: 1243751
caauguuuaguugaaaguu

SEQ ID NO: 1438699 - RNA, 19 nt, Artificial Sequence
  Description of Artificial Sequence: Synthetic oligonucleotide
  Antisense strand to SEQ ID NO: 1438698
aacuuucaacuaaacauug

SEQ ID NO: 1438700 - RNA, 19 nt, Artificial Sequence
  Description of Artificial Sequence: Synthetic oligonucleotide
  Sense strand starting at position 652 of SEQ ID NO: 1243751
caccuuauccuguacgaag

SEQ ID NO: 1438701 - RNA, 19 nt, Artificial Sequence
  Description of Artificial Sequence: Synthetic oligonucleotide
  Antisense strand to SEQ ID NO: 1438700
cuucguacaggauaaggug

SEQ ID NO: 1438702 - RNA, 19 nt, Artificial Sequence
  Description of Artificial Sequence: Synthetic oligonucleotide
  Sense strand starting at position 865 of SEQ ID NO: 1243751
ugggauuacugggauuaag

SEQ ID NO: 1438703 - RNA, 19 nt, Artificial Sequence
  Description of Artificial Sequence: Synthetic oligonucleotide
  Antisense strand to SEQ ID NO: 1438702
cuuaaucccaguaauccca

SEQ ID NO: 1438704 - RNA, 19 nt, Artificial Sequence
  Description of Artificial Sequence: Synthetic oligonucleotide
  Sense strand starting at position 1111 of SEQ ID NO: 1243751
acagacuguuuguuuacaa

SEQ ID NO: 1438705 - RNA, 19 nt, Artificial Sequence
  Description of Artificial Sequence: Synthetic oligonucleotide
  Antisense strand to SEQ ID NO: 1438704
uuguaaacaaacagucugu

SEQ ID NO: 1438706 - RNA, 19 nt, Artificial Sequence
  Description of Artificial Sequence: Synthetic oligonucleotide
  Sense strand starting at position 1183 of SEQ ID NO: 1243751
gggcuugacaccugcuaga

SEQ ID NO: 1438707 - RNA, 19 nt, Artificial Sequence
  Description of Artificial Sequence: Synthetic oligonucleotide
  Antisense strand to SEQ ID NO: 1438706
ucuagcaggugucaagccc

SEQ ID NO: 1438708 - RNA, 19 nt, Artificial Sequence
  Description of Artificial Sequence: Synthetic oligonucleotide
  Sense strand starting at position 1239 of SEQ ID NO: 1243751
uugaaagaucccgguacau

SEQ ID NO: 1438709 - RNA, 19 nt, Artificial Sequence
  Description of Artificial Sequence: Synthetic oligonucleotide
  Antisense strand to SEQ ID NO: 1438708
auguaccgggaucuuucaa

SEQ ID NO: 1438710 - RNA, 19 nt, Artificial Sequence
  Description of Artificial Sequence: Synthetic oligonucleotide
  Sense strand starting at position 1241 of SEQ ID NO: 1243751
gaaagaucccgguacauuc

SEQ ID NO: 1438711 - RNA, 19 nt, Artificial Sequence
  Description of Artificial Sequence: Synthetic oligonucleotide
  Antisense strand to SEQ ID NO: 1438710
gaauguaccgggaucuuuc

SEQ ID NO: 1438712 - RNA, 19 nt, Artificial Sequence
  Description of Artificial Sequence: Synthetic oligonucleotide
  Sense strand starting at position 1251 of SEQ ID NO: 1243751
gguacauucccacgauaac

SEQ ID NO: 1438713 - RNA, 19 nt, Artificial Sequence
  Description of Artificial Sequence: Synthetic oligonucleotide
  Antisense strand to SEQ ID NO: 1438712
guuaucgugggaauguacc

SEQ ID NO: 1438714 - RNA, 19 nt, Artificial Sequence
  Description of Artificial Sequence: Synthetic oligonucleotide
  Sense strand starting at position 1261 of SEQ ID NO: 1243751
cacgauaacgucuauacgu

SEQ ID NO: 1438715 - RNA, 19 nt, Artificial Sequence
  Description of Artificial Sequence: Synthetic oligonucleotide
  Antisense strand to SEQ ID NO: 1438714
acguauagacguuaucgug

SEQ ID NO: 1438716 - RNA, 19 nt, Artificial Sequence
  Description of Artificial Sequence: Synthetic oligonucleotide
  Sense strand starting at position 1648 of SEQ ID NO: 1243751
ccugaaagcuguucugauu

SEQ ID NO: 1438717 - RNA, 19 nt, Artificial Sequence
  Description of Artificial Sequence: Synthetic oligonucleotide
  Antisense strand to SEQ ID NO: 1438716
aaucagaacagcuuucagg

SEQ ID NO: 1438718 - RNA, 19 nt, Artificial Sequence
  Description of Artificial Sequence: Synthetic oligonucleotide
  Sense strand starting at position 1678 of SEQ ID NO: 1243751
ucugauucugcggagugga

SEQ ID NO: 1438719 - RNA, 19 nt, Artificial Sequence
  Description of Artificial Sequence: Synthetic oligonucleotide
  Antisense strand to SEQ ID NO: 1438718
uccacuccgcagaaucaga

SEQ ID NO: 1438720 - RNA, 19 nt, Artificial Sequence
  Description of Artificial Sequence: Synthetic oligonucleotide
  Sense strand starting at position 2019 of SEQ ID NO: 1243751
cggauagguccgccuguuu

SEQ ID NO: 1438721 - RNA, 19 nt, Artificial Sequence
  Description of Artificial Sequence: Synthetic oligonucleotide
  Antisense strand to SEQ ID NO: 1438720
aaacaggcggaccuauccg

SEQ ID NO: 1438722 - RNA, 19 nt, Artificial Sequence
  Description of Artificial Sequence: Synthetic oligonucleotide
  Sense strand starting at position 2103 of SEQ ID NO: 1243751
uuugaaaccuggcuugacu

SEQ ID NO: 1438723 - RNA, 19 nt, Artificial Sequence
  Description of Artificial Sequence: Synthetic oligonucleotide
  Antisense strand to SEQ ID NO: 1438722
agucaagccagguuucaaa

SEQ ID NO: 1438724 - RNA, 19 nt, Artificial Sequence
  Description of Artificial Sequence: Synthetic oligonucleotide
  Sense strand starting at position 2682 of SEQ ID NO: 1243751
gagggaugcgcgagugauc

SEQ ID NO: 1438725 - RNA, 19 nt, Artificial Sequence
  Description of Artificial Sequence: Synthetic oligonucleotide
  Antisense strand to SEQ ID NO: 1438724
gaucacucgcgcaucccuc

SEQ ID NO: 1438726 - RNA, 19 nt, Artificial Sequence
  Description of Artificial Sequence: Synthetic oligonucleotide
  Sense strand starting at position 2960 of SEQ ID NO: 1243751
gaaagaaagguugggcuua

SEQ ID NO: 1438727 - RNA, 19 nt, Artificial Sequence
  Description of Artificial Sequence: Synthetic oligonucleotide
  Antisense strand to SEQ ID NO: 1438726
uaagcccaaccuuucuuuc

SEQ ID NO: 1438728 - RNA, 19 nt, Artificial Sequence
  Description of Artificial Sequence: Synthetic oligonucleotide
  Sense strand starting at position 2990 of SEQ ID NO: 1243751
gggaaagauucgguuagac

SEQ ID NO: 1438729 - RNA, 19 nt, Artificial Sequence
  Description of Artificial Sequence: Synthetic oligonucleotide
  Antisense strand to SEQ ID NO: 1438728
gucuaaccgaaucuuuccc

SEQ ID NO: 1438730 - RNA, 19 nt, Artificial Sequence
  Description of Artificial Sequence: Synthetic oligonucleotide
  Sense strand starting at position 3107 of SEQ ID NO: 1243751
auucuaaacuguuuggauu

SEQ ID NO: 1438731 - RNA, 19 nt, Artificial Sequence
  Description of Artificial Sequence: Synthetic oligonucleotide
  Antisense strand to SEQ ID NO: 1438730
aauccaaacaguuuagaau

SEQ ID NO: 1438732 - RNA, 19 nt, Artificial Sequence
  Description of Artificial Sequence: Synthetic oligonucleotide
  Sense strand starting at position 3260 of SEQ ID NO: 1243751
ggacuaaguugggauuucu

SEQ ID NO: 1438733 - RNA, 19 nt, Artificial Sequence
  Description of Artificial Sequence: Synthetic oligonucleotide
  Antisense strand to SEQ ID NO: 1438732
agaaaucccaacuuagucc

SEQ ID NO: 1438734 - RNA, 19 nt, Artificial Sequence
  Description of Artificial Sequence: Synthetic oligonucleotide
  Sense strand starting at position 3365 of SEQ ID NO: 1243751
acggucuuuccacaaggau

SEQ ID NO: 1438735 - RNA, 19 nt, Artificial Sequence
  Description of Artificial Sequence: Synthetic oligonucleotide
  Antisense strand to SEQ ID NO: 1438734
auccuuguggaaagaccgu

SEQ ID NO: 1438736 - RNA, 19 nt, Artificial Sequence
  Description of Artificial Sequence: Synthetic oligonucleotide
  Sense strand starting at position 3379 of SEQ ID NO: 1243751
aggauccuucucugaaaua

SEQ ID NO: 1438737 - RNA, 19 nt, Artificial Sequence
  Description of Artificial Sequence: Synthetic oligonucleotide
  Antisense strand to SEQ ID NO: 1438736
uauuucagagaaggauccu

SEQ ID NO: 1438738 - RNA, 19 nt, Artificial Sequence
  Description of Artificial Sequence: Synthetic oligonucleotide
  Sense strand starting at position 3478 of SEQ ID NO: 1243751
gcugcauuggauuauugau

SEQ ID NO: 1438739 - RNA, 19 nt, Artificial Sequence
  Description of Artificial Sequence: Synthetic oligonucleotide
  Antisense strand to SEQ ID NO: 1438738
aucaauaauccaaugcagc

SEQ ID NO: 1438740 - RNA, 19 nt, Artificial Sequence
  Description of Artificial Sequence: Synthetic oligonucleotide
  Sense strand starting at position 3582 of SEQ ID NO: 1243751
cagacaugccaucggaauu

SEQ ID NO: 1438741 - RNA, 19 nt, Artificial Sequence
  Description of Artificial Sequence: Synthetic oligonucleotide
  Antisense strand to SEQ ID NO: 1438740
aauuccgauggcaugucug

SEQ ID NO: 1438742 - RNA, 19 nt, Artificial Sequence
  Description of Artificial Sequence: Synthetic oligonucleotide
  Sense strand starting at position 3583 of SEQ ID NO: 1243751
agacaugccaucggaauua

SEQ ID NO: 1438743 - RNA, 19 nt, Artificial Sequence
  Description of Artificial Sequence: Synthetic oligonucleotide
  Antisense strand to SEQ ID NO: 1438742
uaauuccgauggcaugucu

SEQ ID NO: 1438744 - RNA, 19 nt, Artificial Sequence
  Description of Artificial Sequence: Synthetic oligonucleotide
  Sense strand starting at position 3602 of SEQ ID NO: 1243751
ggagcaagaucuuuagaua

SEQ ID NO: 1438745 - RNA, 19 nt, Artificial Sequence
  Description of Artificial Sequence: Synthetic oligonucleotide
  Antisense strand to SEQ ID NO: 1438744
uaucuaaagaucuugcucc

SEQ ID NO: 1438746 - RNA, 19 nt, Artificial Sequence
  Description of Artificial Sequence: Synthetic oligonucleotide
  Sense strand starting at position 3621 of SEQ ID NO: 1243751
cagugaaucugacccgacu

SEQ ID NO: 1438747 - RNA, 19 nt, Artificial Sequence
  Description of Artificial Sequence: Synthetic oligonucleotide
  Antisense strand to SEQ ID NO: 1438746
agucgggucagauucacug

SEQ ID NO: 1438748 - RNA, 19 nt, Artificial Sequence
  Description of Artificial Sequence: Synthetic oligonucleotide
  Sense strand starting at position 3632 of SEQ ID NO: 1243751
acccgacugccauauuauu

SEQ ID NO: 1438749 - RNA, 19 nt, Artificial Sequence
  Description of Artificial Sequence: Synthetic oligonucleotide
  Antisense strand to SEQ ID NO: 1438748
aauaauauggcagucgggu

SEQ ID NO: 1438750 - RNA, 19 nt, Artificial Sequence
  Description of Artificial Sequence: Synthetic oligonucleotide
  Sense strand starting at position 3661 of SEQ ID NO: 1243751
cccaguuuauacuuacgau

SEQ ID NO: 1438751 - RNA, 19 nt, Artificial Sequence
  Description of Artificial Sequence: Synthetic oligonucleotide
  Antisense strand to SEQ ID NO: 1438750
aucguaaguauaaacuggg

SEQ ID NO: 1438752 - RNA, 19 nt, Artificial Sequence
  Description of Artificial Sequence: Synthetic oligonucleotide
  Sense strand starting at position 3689 of SEQ ID NO: 1243751
gggugucucacauaucuga

SEQ ID NO: 1438753 - RNA, 19 nt, Artificial Sequence
  Description of Artificial Sequence: Synthetic oligonucleotide
  Antisense strand to SEQ ID NO: 1438752
ucagauaugugagacaccc

SEQ ID NO: 1438754 - RNA, 19 nt, Artificial Sequence
  Description of Artificial Sequence: Synthetic oligonucleotide
  Sense strand starting at position 3767 of SEQ ID NO: 1243751
cauuuauacuggcaguaga

SEQ ID NO: 1438755 - RNA, 19 nt, Artificial Sequence
  Description of Artificial Sequence: Synthetic oligonucleotide
  Antisense strand to SEQ ID NO: 1438754
ucuacugccaguauaaaug

SEQ ID NO: 1438756 - RNA, 19 nt, Artificial Sequence
  Description of Artificial Sequence: Synthetic oligonucleotide
  Sense strand starting at position 3860 of SEQ ID NO: 1243751
caguguuuaauggaguaug

SEQ ID NO: 1438757 - RNA, 19 nt, Artificial Sequence
  Description of Artificial Sequence: Synthetic oligonucleotide
  Antisense strand to SEQ ID NO: 1438756
cauacuccauuaaacacug

SEQ ID NO: 1438758 - RNA, 19 nt, Artificial Sequence
  Description of Artificial Sequence: Synthetic oligonucleotide
  Sense strand starting at position 3863 of SEQ ID NO: 1243751
uguuuaauggaguaugaug

SEQ ID NO: 1438759 - RNA, 19 nt, Artificial Sequence
  Description of Artificial Sequence: Synthetic oligonucleotide
  Antisense strand to SEQ ID NO: 1438758
caucauacuccauuaaaca

SEQ ID NO: 1438760 - RNA, 19 nt, Artificial Sequence
  Description of Artificial Sequence: Synthetic oligonucleotide
  Sense strand starting at position 3896 of SEQ ID NO: 1243751
gcucuaggauggucuaaga

SEQ ID NO: 1438761 - RNA, 19 nt, Artificial Sequence
  Description of Artificial Sequence: Synthetic oligonucleotide
  Antisense strand to SEQ ID NO: 1438760
ucuuagaccauccuagagc

SEQ ID NO: 1438762 - RNA, 19 nt, Artificial Sequence
  Description of Artificial Sequence: Synthetic oligonucleotide
  Sense strand starting at position 263 of SEQ ID NO: 1243752
caccuuauccuguacgaag

SEQ ID NO: 1438763 - RNA, 19 nt, Artificial Sequence
  Description of Artificial Sequence: Synthetic oligonucleotide
  Antisense strand to SEQ ID NO: 1438762
cuucguacaggauaaggug

SEQ ID NO: 1438764 - RNA, 19 nt, Artificial Sequence
  Description of Artificial Sequence: Synthetic oligonucleotide
  Sense strand starting at position 476 of SEQ ID NO: 1243752
ugggauuacugggauuaag

SEQ ID NO: 1438765 - RNA, 19 nt, Artificial Sequence
  Description of Artificial Sequence: Synthetic oligonucleotide
  Antisense strand to SEQ ID NO: 1438764
cuuaaucccaguaauccca

SEQ ID NO: 1438766 - RNA, 19 nt, Artificial Sequence
  Description of Artificial Sequence: Synthetic oligonucleotide
  Sense strand starting at position 719 of SEQ ID NO: 1243752
gccacagacuguuuguuua

SEQ ID NO: 1438767 - RNA, 19 nt, Artificial Sequence
  Description of Artificial Sequence: Synthetic oligonucleotide
  Antisense strand to SEQ ID NO: 1438766
uaaacaaacagucuguggc

SEQ ID NO: 1438768 - RNA, 19 nt, Artificial Sequence
  Description of Artificial Sequence: Synthetic oligonucleotide
  Sense strand starting at position 722 of SEQ ID NO: 1243752
acagacuguuuguuuacaa

SEQ ID NO: 1438769 - RNA, 19 nt, Artificial Sequence
  Description of Artificial Sequence: Synthetic oligonucleotide
  Antisense strand to SEQ ID NO: 1438768
uuguaaacaaacagucugu

SEQ ID NO: 1438770 - RNA, 19 nt, Artificial Sequence
  Description of Artificial Sequence: Synthetic oligonucleotide
  Sense strand starting at position 794 of SEQ ID NO: 1243752
gggcuugacaccugcuaga

SEQ ID NO: 1438771 - RNA, 19 nt, Artificial Sequence
  Description of Artificial Sequence: Synthetic oligonucleotide
  Antisense strand to SEQ ID NO: 1438770
ucuagcaggugucaagccc

SEQ ID NO: 1438772 - RNA, 19 nt, Artificial Sequence
  Description of Artificial Sequence: Synthetic oligonucleotide
  Sense strand starting at position 850 of SEQ ID NO: 1243752
uugaaagaucccgguacau

SEQ ID NO: 1438773 - RNA, 19 nt, Artificial Sequence
  Description of Artificial Sequence: Synthetic oligonucleotide
  Antisense strand to SEQ ID NO: 1438772
auguaccgggaucuuucaa

SEQ ID NO: 1438774 - RNA, 19 nt, Artificial Sequence
  Description of Artificial Sequence: Synthetic oligonucleotide
  Sense strand starting at position 852 of SEQ ID NO: 1243752
gaaagaucccgguacauuc

SEQ ID NO: 1438775 - RNA, 19 nt, Artificial Sequence
  Description of Artificial Sequence: Synthetic oligonucleotide
  Antisense strand to SEQ ID NO: 1438774
gaauguaccgggaucuuuc

SEQ ID NO: 1438776 - RNA, 19 nt, Artificial Sequence
  Description of Artificial Sequence: Synthetic oligonucleotide
  Sense strand starting at position 862 of SEQ ID NO: 1243752
gguacauucccacgauaac

SEQ ID NO: 1438777 - RNA, 19 nt, Artificial Sequence
  Description of Artificial Sequence: Synthetic oligonucleotide
  Antisense strand to SEQ ID NO: 1438776
guuaucgugggaauguacc

SEQ ID NO: 1438778 - RNA, 19 nt, Artificial Sequence
  Description of Artificial Sequence: Synthetic oligonucleotide
  Sense strand starting at position 872 of SEQ ID NO: 1243752
cacgauaacgucuauacgu

SEQ ID NO: 1438779 - RNA, 19 nt, Artificial Sequence
  Description of Artificial Sequence: Synthetic oligonucleotide
  Antisense strand to SEQ ID NO: 1438778
acguauagacguuaucgug

SEQ ID NO: 1438780 - RNA, 19 nt, Artificial Sequence
  Description of Artificial Sequence: Synthetic oligonucleotide
  Sense strand starting at position 1060 of SEQ ID NO: 1243752
gaguaaacgcggcacgaua

SEQ ID NO: 1438781 - RNA, 19 nt, Artificial Sequence
  Description of Artificial Sequence: Synthetic oligonucleotide
  Antisense strand to SEQ ID NO: 1438780
uaucgugccgcguuuacuc

SEQ ID NO: 1438782 - RNA, 19 nt, Artificial Sequence
  Description of Artificial Sequence: Synthetic oligonucleotide
  Sense strand starting at position 1259 of SEQ ID NO: 1243752
ccugaaagcuguucugauu

SEQ ID NO: 1438783 - RNA, 19 nt, Artificial Sequence
  Description of Artificial Sequence: Synthetic oligonucleotide
  Antisense strand to SEQ ID NO: 1438782
aaucagaacagcuuucagg

SEQ ID NO: 1438784 - RNA, 19 nt, Artificial Sequence
  Description of Artificial Sequence: Synthetic oligonucleotide
  Sense strand starting at position 1289 of SEQ ID NO: 1243752
ucugauucugcggagugga

SEQ ID NO: 1438785 - RNA, 19 nt, Artificial Sequence
  Description of Artificial Sequence: Synthetic oligonucleotide
  Antisense strand to SEQ ID NO: 1438784
uccacuccgcagaaucaga

SEQ ID NO: 1438786 - RNA, 19 nt, Artificial Sequence
  Description of Artificial Sequence: Synthetic oligonucleotide
  Sense strand starting at position 1630 of SEQ ID NO: 1243752
cggauagguccgccuguuu

SEQ ID NO: 1438787 - RNA, 19 nt, Artificial Sequence
  Description of Artificial Sequence: Synthetic oligonucleotide
  Antisense strand to SEQ ID NO: 1438786
aaacaggcggaccuauccg

SEQ ID NO: 1438788 - RNA, 19 nt, Artificial Sequence
  Description of Artificial Sequence: Synthetic oligonucleotide
  Sense strand starting at position 1714 of SEQ ID NO: 1243752
uuugaaaccuggcuugacu

SEQ ID NO: 1438789 - RNA, 19 nt, Artificial Sequence
  Description of Artificial Sequence: Synthetic oligonucleotide
  Antisense strand to SEQ ID NO: 1438788
agucaagccagguuucaaa

SEQ ID NO: 1438790 - RNA, 19 nt, Artificial Sequence
  Description of Artificial Sequence: Synthetic oligonucleotide
  Sense strand starting at position 2293 of SEQ ID NO: 1243752
gagggaugcgcgagugauc

SEQ ID NO: 1438791 - RNA, 19 nt, Artificial Sequence
  Description of Artificial Sequence: Synthetic oligonucleotide
  Antisense strand to SEQ ID NO: 1438790
gaucacucgcgcaucccuc

SEQ ID NO: 1438792 - RNA, 19 nt, Artificial Sequence
  Description of Artificial Sequence: Synthetic oligonucleotide
  Sense strand starting at position 2571 of SEQ ID NO: 1243752
gaaagaaagguugggcuua

SEQ ID NO: 1438793 - RNA, 19 nt, Artificial Sequence
  Description of Artificial Sequence: Synthetic oligonucleotide
  Antisense strand to SEQ ID NO: 1438792
uaagcccaaccuuucuuuc

SEQ ID NO: 1438794 - RNA, 19 nt, Artificial Sequence
  Description of Artificial Sequence: Synthetic oligonucleotide
  Sense strand starting at position 2601 of SEQ ID NO: 1243752
gggaaagauucgguuagac

SEQ ID NO: 1438795 - RNA, 19 nt, Artificial Sequence
  Description of Artificial Sequence: Synthetic oligonucleotide
  Antisense strand to SEQ ID NO: 1438794
gucuaaccgaaucuuuccc

SEQ ID NO: 1438796 - RNA, 19 nt, Artificial Sequence
  Description of Artificial Sequence: Synthetic oligonucleotide
  Sense strand starting at position 2718 of SEQ ID NO: 1243752
auucuaaacuguuuggauu

SEQ ID NO: 1438797 - RNA, 19 nt, Artificial Sequence
  Description of Artificial Sequence: Synthetic oligonucleotide
  Antisense strand to SEQ ID NO: 1438796
aauccaaacaguuuagaau

SEQ ID NO: 1438798 - RNA, 19 nt, Artificial Sequence
  Description of Artificial Sequence: Synthetic oligonucleotide
  Sense strand starting at position 2871 of SEQ ID NO: 1243752
ggacuaaguugggauuucu

SEQ ID NO: 1438799 - RNA, 19 nt, Artificial Sequence
  Description of Artificial Sequence: Synthetic oligonucleotide
  Antisense strand to SEQ ID NO: 1438798
agaaaucccaacuuagucc

SEQ ID NO: 1438800 - RNA, 19 nt, Artificial Sequence
  Description of Artificial Sequence: Synthetic oligonucleotide
  Sense strand starting at position 2957 of SEQ ID NO: 1243752
ucagaaugcucuuccuguu

SEQ ID NO: 1438801 - RNA, 19 nt, Artificial Sequence
  Description of Artificial Sequence: Synthetic oligonucleotide
  Antisense strand to SEQ ID NO: 1438800
aacaggaagagcauucuga

SEQ ID NO: 1438802 - RNA, 19 nt, Artificial Sequence
  Description of Artificial Sequence: Synthetic oligonucleotide
  Sense strand starting at position 2976 of SEQ ID NO: 1243752
acggucuuuccacaaggau

SEQ ID NO: 1438803 - RNA, 19 nt, Artificial Sequence
  Description of Artificial Sequence: Synthetic oligonucleotide
  Antisense strand to SEQ ID NO: 1438802
auccuuguggaaagaccgu

SEQ ID NO: 1438804 - RNA, 19 nt, Artificial Sequence
  Description of Artificial Sequence: Synthetic oligonucleotide
  Sense strand starting at position 2990 of SEQ ID NO: 1243752
aggauccuucucugaaaua

SEQ ID NO: 1438805 - RNA, 19 nt, Artificial Sequence
  Description of Artificial Sequence: Synthetic oligonucleotide
  Antisense strand to SEQ ID NO: 1438804
uauuucagagaaggauccu

SEQ ID NO: 1438806 - RNA, 19 nt, Artificial Sequence
  Description of Artificial Sequence: Synthetic oligonucleotide
  Sense strand starting at position 3089 of SEQ ID NO: 1243752
gcugcauuggauuauugau

SEQ ID NO: 1438807 - RNA, 19 nt, Artificial Sequence
  Description of Artificial Sequence: Synthetic oligonucleotide
  Antisense strand to SEQ ID NO: 1438806
aucaauaauccaaugcagc

SEQ ID NO: 1438808 - RNA, 19 nt, Artificial Sequence
  Description of Artificial Sequence: Synthetic oligonucleotide
  Sense strand starting at position 3098 of SEQ ID NO: 1243752
gauuauugauuugggucau

SEQ ID NO: 1438809 - RNA, 19 nt, Artificial Sequence
  Description of Artificial Sequence: Synthetic oligonucleotide
  Antisense strand to SEQ ID NO: 1438808
augacccaaaucaauaauc

SEQ ID NO: 1438810 - RNA, 19 nt, Artificial Sequence
  Description of Artificial Sequence: Synthetic oligonucleotide
  Sense strand starting at position 3193 of SEQ ID NO: 1243752
cagacaugccaucggaauu

SEQ ID NO: 1438811 - RNA, 19 nt, Artificial Sequence
  Description of Artificial Sequence: Synthetic oligonucleotide
  Antisense strand to SEQ ID NO: 1438810
aauuccgauggcaugucug

SEQ ID NO: 1438812 - RNA, 19 nt, Artificial Sequence
  Description of Artificial Sequence: Synthetic oligonucleotide
  Sense strand starting at position 3194 of SEQ ID NO: 1243752
agacaugccaucggaauua

SEQ ID NO: 1438813 - RNA, 19 nt, Artificial Sequence
  Description of Artificial Sequence: Synthetic oligonucleotide
  Antisense strand to SEQ ID NO: 1438812
uaauuccgauggcaugucu

SEQ ID NO: 1438814 - RNA, 19 nt, Artificial Sequence
  Description of Artificial Sequence: Synthetic oligonucleotide
  Sense strand starting at position 3213 of SEQ ID NO: 1243752
ggagcaagaucuuuagaua

SEQ ID NO: 1438815 - RNA, 19 nt, Artificial Sequence
  Description of Artificial Sequence: Synthetic oligonucleotide
  Antisense strand to SEQ ID NO: 1438814
uaucuaaagaucuugcucc

SEQ ID NO: 1438816 - RNA, 19 nt, Artificial Sequence
  Description of Artificial Sequence: Synthetic oligonucleotide
  Sense strand starting at position 3232 of SEQ ID NO: 1243752
cagugaaucugacccgacu

SEQ ID NO: 1438817 - RNA, 19 nt, Artificial Sequence
  Description of Artificial Sequence: Synthetic oligonucleotide
  Antisense strand to SEQ ID NO: 1438816
agucgggucagauucacug

SEQ ID NO: 1438818 - RNA, 19 nt, Artificial Sequence
  Description of Artificial Sequence: Synthetic oligonucleotide
  Sense strand starting at position 3243 of SEQ ID NO: 1243752
acccgacugccauauuauu

SEQ ID NO: 1438819 - RNA, 19 nt, Artificial Sequence
  Description of Artificial Sequence: Synthetic oligonucleotide
  Antisense strand to SEQ ID NO: 1438818
aauaauauggcagucgggu

SEQ ID NO: 1438820 - RNA, 19 nt, Artificial Sequence
  Description of Artificial Sequence: Synthetic oligonucleotide
  Sense strand starting at position 3272 of SEQ ID NO: 1243752
cccaguuuauacuuacgau

SEQ ID NO: 1438821 - RNA, 19 nt, Artificial Sequence
  Description of Artificial Sequence: Synthetic oligonucleotide
  Antisense strand to SEQ ID NO: 1438820
aucguaaguauaaacuggg

SEQ ID NO: 1438822 - RNA, 19 nt, Artificial Sequence
  Description of Artificial Sequence: Synthetic oligonucleotide
  Sense strand starting at position 3300 of SEQ ID NO: 1243752
gggugucucacauaucuga

SEQ ID NO: 1438823 - RNA, 19 nt, Artificial Sequence
  Description of Artificial Sequence: Synthetic oligonucleotide
  Antisense strand to SEQ ID NO: 1438822
ucagauaugugagacaccc

SEQ ID NO: 1438824 - RNA, 19 nt, Artificial Sequence
  Description of Artificial Sequence: Synthetic oligonucleotide
  Sense strand starting at position 3378 of SEQ ID NO: 1243752
cauuuauacuggcaguaga

SEQ ID NO: 1438825 - RNA, 19 nt, Artificial Sequence
  Description of Artificial Sequence: Synthetic oligonucleotide
  Antisense strand to SEQ ID NO: 1438824
ucuacugccaguauaaaug

SEQ ID NO: 1438826 - RNA, 19 nt, Artificial Sequence
  Description of Artificial Sequence: Synthetic oligonucleotide
  Sense strand starting at position 3471 of SEQ ID NO: 1243752
caguguuuaauggaguaug

SEQ ID NO: 1438827 - RNA, 19 nt, Artificial Sequence
  Description of Artificial Sequence: Synthetic oligonucleotide
  Antisense strand to SEQ ID NO: 1438826
cauacuccauuaaacacug

SEQ ID NO: 1438828 - RNA, 19 nt, Artificial Sequence
  Description of Artificial Sequence: Synthetic oligonucleotide
  Sense strand starting at position 3474 of SEQ ID NO: 1243752
uguuuaauggaguaugaug

SEQ ID NO: 1438829 - RNA, 19 nt, Artificial Sequence
  Description of Artificial Sequence: Synthetic oligonucleotide
  Antisense strand to SEQ ID NO: 1438828
caucauacuccauuaaaca

SEQ ID NO: 1438830 - RNA, 19 nt, Artificial Sequence
  Description of Artificial Sequence: Synthetic oligonucleotide
  Sense strand starting at position 3507 of SEQ ID NO: 1243752
gcucuaggauggucuaaga

SEQ ID NO: 1438831 - RNA, 19 nt, Artificial Sequence
  Description of Artificial Sequence: Synthetic oligonucleotide
  Antisense strand to SEQ ID NO: 1438830
ucuuagaccauccuagagc

SEQ ID NO: 1438832 - RNA, 19 nt, Artificial Sequence
  Description of Artificial Sequence: Synthetic oligonucleotide
  Sense strand starting at position 3616 of SEQ ID NO: 1243752
uggagaucacucuggccaa

SEQ ID NO: 1438833 - RNA, 19 nt, Artificial Sequence
  Description of Artificial Sequence: Synthetic oligonucleotide
  Antisense strand to SEQ ID NO: 1438832
uuggccagagugaucucca

SEQ ID NO: 1438834 - RNA, 19 nt, Artificial Sequence
  Description of Artificial Sequence: Synthetic oligonucleotide
  Sense strand starting at position 3768 of SEQ ID NO: 1243752
cggagaucacugcacucaa

SEQ ID NO: 1438835 - RNA, 19 nt, Artificial Sequence
  Description of Artificial Sequence: Synthetic oligonucleotide
  Antisense strand to SEQ ID NO: 1438834
uugagugcagugaucuccg

SEQ ID NO: 1438836 - RNA, 19 nt, Artificial Sequence
  Description of Artificial Sequence: Synthetic oligonucleotide
  Sense strand starting at position 3888 of SEQ ID NO: 1243752
gggagucccugcuuauuga

SEQ ID NO: 1438837 - RNA, 19 nt, Artificial Sequence
  Description of Artificial Sequence: Synthetic oligonucleotide
  Antisense strand to SEQ ID NO: 1438836
ucaauaagcagggacuccc

SEQ ID NO: 1438838 - RNA, 19 nt, Artificial Sequence
  Description of Artificial Sequence: Synthetic oligonucleotide
  Sense strand starting at position 3889 of SEQ ID NO: 1243752
ggagucccugcuuauugau

SEQ ID NO: 1438839 - RNA, 19 nt, Artificial Sequence
  Description of Artificial Sequence: Synthetic oligonucleotide
  Antisense strand to SEQ ID NO: 1438838
aucaauaagcagggacucc

SEQ ID NO: 1438840 - RNA, 19 nt, Artificial Sequence
  Description of Artificial Sequence: Synthetic oligonucleotide
  Sense strand starting at position 3896 of SEQ ID NO: 1243752
cugcuuauugauugauuga

SEQ ID NO: 1438841 - RNA, 19 nt, Artificial Sequence
  Description of Artificial Sequence: Synthetic oligonucleotide
  Antisense strand to SEQ ID NO: 1438840
ucaaucaaucaauaagcag

SEQ ID NO: 1438842 - RNA, 19 nt, Artificial Sequence
  Description of Artificial Sequence: Synthetic oligonucleotide
  Sense strand starting at position 109 of SEQ ID NO: 1243753
cauagaugagcauguagau

SEQ ID NO: 1438843 - RNA, 19 nt, Artificial Sequence
  Description of Artificial Sequence: Synthetic oligonucleotide
  Antisense strand to SEQ ID NO: 1438842
aucuacaugcucaucuaug

SEQ ID NO: 1438844 - RNA, 19 nt, Artificial Sequence
  Description of Artificial Sequence: Synthetic oligonucleotide
  Sense strand starting at position 151 of SEQ ID NO: 1243753
gguccuauucucugcuaca

SEQ ID NO: 1438845 - RNA, 19 nt, Artificial Sequence
  Description of Artificial Sequence: Synthetic oligonucleotide
  Antisense strand to SEQ ID NO: 1438844
uguagcagagaauaggacc

SEQ ID NO: 1438846 - RNA, 19 nt, Artificial Sequence
  Description of Artificial Sequence: Synthetic oligonucleotide
  Sense strand starting at position 248 of SEQ ID NO: 1243753
acuguauugcaguggaaau

SEQ ID NO: 1438847 - RNA, 19 nt, Artificial Sequence
  Description of Artificial Sequence: Synthetic oligonucleotide
  Antisense strand to SEQ ID NO: 1438846
auuuccacugcaauacagu

SEQ ID NO: 1438848 - RNA, 19 nt, Artificial Sequence
  Description of Artificial Sequence: Synthetic oligonucleotide
  Sense strand starting at position 249 of SEQ ID NO: 1243753
cuguauugcaguggaaaug

SEQ ID NO: 1438849 - RNA, 19 nt, Artificial Sequence
  Description of Artificial Sequence: Synthetic oligonucleotide
  Antisense strand to SEQ ID NO: 1438848
cauuuccacugcaauacag

SEQ ID NO: 1438850 - RNA, 19 nt, Artificial Sequence
  Description of Artificial Sequence: Synthetic oligonucleotide
  Sense strand starting at position 250 of SEQ ID NO: 1243753
uguauugcaguggaaauga

SEQ ID NO: 1438851 - RNA, 19 nt, Artificial Sequence
  Description of Artificial Sequence: Synthetic oligonucleotide
  Antisense strand to SEQ ID NO: 1438850
ucauuuccacugcaauaca

SEQ ID NO: 1438852 - RNA, 19 nt, Artificial Sequence
  Description of Artificial Sequence: Synthetic oligonucleotide
  Sense strand starting at position 315 of SEQ ID NO: 1243753
ggaaacguguguaggguua

SEQ ID NO: 1438853 - RNA, 19 nt, Artificial Sequence
  Description of Artificial Sequence: Synthetic oligonucleotide
  Antisense strand to SEQ ID NO: 1438852
uaacccuacacacguuucc

SEQ ID NO: 1438854 - RNA, 19 nt, Artificial Sequence
  Description of Artificial Sequence: Synthetic oligonucleotide
  Sense strand starting at position 317 of SEQ ID NO: 1243753
aaacguguguaggguuaau

SEQ ID NO: 1438855 - RNA, 19 nt, Artificial Sequence
  Description of Artificial Sequence: Synthetic oligonucleotide
  Antisense strand to SEQ ID NO: 1438854
auuaacccuacacacguuu

SEQ ID NO: 1438856 - RNA, 19 nt, Artificial Sequence
  Description of Artificial Sequence: Synthetic oligonucleotide
  Sense strand starting at position 327 of SEQ ID NO: 1243753
aggguuaaucucugagggu

SEQ ID NO: 1438857 - RNA, 19 nt, Artificial Sequence
  Description of Artificial Sequence: Synthetic oligonucleotide
  Antisense strand to SEQ ID NO: 1438856
acccucagagauuaacccu

SEQ ID NO: 1438858 - RNA, 19 nt, Artificial Sequence
  Description of Artificial Sequence: Synthetic oligonucleotide
  Sense strand starting at position 328 of SEQ ID NO: 1243753
ggguuaaucucugagggug

SEQ ID NO: 1438859 - RNA, 19 nt, Artificial Sequence
  Description of Artificial Sequence: Synthetic oligonucleotide
  Antisense strand to SEQ ID NO: 1438858
cacccucagagauuaaccc

SEQ ID NO: 1438860 - RNA, 19 nt, Artificial Sequence
  Description of Artificial Sequence: Synthetic oligonucleotide
  Sense strand starting at position 2002 of SEQ ID NO: 1243753
ggcuugagggcucggaaga

SEQ ID NO: 1438861 - RNA, 19 nt, Artificial Sequence
  Description of Artificial Sequence: Synthetic oligonucleotide
  Antisense strand to SEQ ID NO: 1438860
ucuuccgagcccucaagcc

SEQ ID NO: 1438862 - RNA, 19 nt, Artificial Sequence
  Description of Artificial Sequence: Synthetic oligonucleotide
  Sense strand starting at position 2003 of SEQ ID NO: 1243753
gcuugagggcucggaagau

SEQ ID NO: 1438863 - RNA, 19 nt, Artificial Sequence
  Description of Artificial Sequence: Synthetic oligonucleotide
  Antisense strand to SEQ ID NO: 1438862
aucuuccgagcccucaagc

SEQ ID NO: 1438864 - RNA, 19 nt, Artificial Sequence
  Description of Artificial Sequence: Synthetic oligonucleotide
  Sense strand starting at position 2012 of SEQ ID NO: 1243753
cucggaagauuccgauuaa

SEQ ID NO: 1438865 - RNA, 19 nt, Artificial Sequence
  Description of Artificial Sequence: Synthetic oligonucleotide
  Antisense strand to SEQ ID NO: 1438864
uuaaucggaaucuuccgag

SEQ ID NO: 1438866 - RNA, 19 nt, Artificial Sequence
  Description of Artificial Sequence: Synthetic oligonucleotide
  Sense strand starting at position 2013 of SEQ ID NO: 1243753
ucggaagauuccgauuaac

SEQ ID NO: 1438867 - RNA, 19 nt, Artificial Sequence
  Description of Artificial Sequence: Synthetic oligonucleotide
  Antisense strand to SEQ ID NO: 1438866
guuaaucggaaucuuccga

SEQ ID NO: 1438868 - RNA, 19 nt, Artificial Sequence
  Description of Artificial Sequence: Synthetic oligonucleotide
  Sense strand starting at position 2123 of SEQ ID NO: 1243753
ccgaguuccuccgggaauc

SEQ ID NO: 1438869 - RNA, 19 nt, Artificial Sequence
  Description of Artificial Sequence: Synthetic oligonucleotide
  Antisense strand to SEQ ID NO: 1438868
gauucccggaggaacucgg

SEQ ID NO: 1438870 - RNA, 19 nt, Artificial Sequence
  Description of Artificial Sequence: Synthetic oligonucleotide
  Sense strand starting at position 2415 of SEQ ID NO: 1243753
ggaggaggguggcuuaauu

SEQ ID NO: 1438871 - RNA, 19 nt, Artificial Sequence
  Description of Artificial Sequence: Synthetic oligonucleotide
  Antisense strand to SEQ ID NO: 1438870
aauuaagccacccuccucc

SEQ ID NO: 1438872 - RNA, 19 nt, Artificial Sequence
  Description of Artificial Sequence: Synthetic oligonucleotide
  Sense strand starting at position 2427 of SEQ ID NO: 1243753
cuuaauuggacaugggagu

SEQ ID NO: 1438873 - RNA, 19 nt, Artificial Sequence
  Description of Artificial Sequence: Synthetic oligonucleotide
  Antisense strand to SEQ ID NO: 1438872
acucccauguccaauuaag

SEQ ID NO: 1438874 - RNA, 19 nt, Artificial Sequence
  Description of Artificial Sequence: Synthetic oligonucleotide
  Sense strand starting at position 2449 of SEQ ID NO: 1243753
cuagccuuugucugggaca

SEQ ID NO: 1438875 - RNA, 19 nt, Artificial Sequence
  Description of Artificial Sequence: Synthetic oligonucleotide
  Antisense strand to SEQ ID NO: 1438874
ugucccagacaaaggcuag

SEQ ID NO: 1438876 - RNA, 19 nt, Artificial Sequence
  Description of Artificial Sequence: Synthetic oligonucleotide
  Sense strand starting at position 2450 of SEQ ID NO: 1243753
uagccuuugucugggacaa

SEQ ID NO: 1438877 - RNA, 19 nt, Artificial Sequence
  Description of Artificial Sequence: Synthetic oligonucleotide
  Antisense strand to SEQ ID NO: 1438876
uugucccagacaaaggcua

SEQ ID NO: 1438878 - RNA, 19 nt, Artificial Sequence
  Description of Artificial Sequence: Synthetic oligonucleotide
  Sense strand starting at position 2451 of SEQ ID NO: 1243753
agccuuugucugggacaag

SEQ ID NO: 1438879 - RNA, 19 nt, Artificial Sequence
  Description of Artificial Sequence: Synthetic oligonucleotide
  Antisense strand to SEQ ID NO: 1438878
cuugucccagacaaaggcu

SEQ ID NO: 1438880 - RNA, 19 nt, Artificial Sequence
  Description of Artificial Sequence: Synthetic oligonucleotide
  Sense strand starting at position 2825 of SEQ ID NO: 1243753
cuccuaauguccugcugaa

SEQ ID NO: 1438881 - RNA, 19 nt, Artificial Sequence
  Description of Artificial Sequence: Synthetic oligonucleotide
  Antisense strand to SEQ ID NO: 1438880
uucagcaggacauuaggag

SEQ ID NO: 1438882 - RNA, 19 nt, Artificial Sequence
  Description of Artificial Sequence: Synthetic oligonucleotide
  Sense strand starting at position 2870 of SEQ ID NO: 1243753
gccgcuccucuaggaguau

SEQ ID NO: 1438883 - RNA, 19 nt, Artificial Sequence
  Description of Artificial Sequence: Synthetic oligonucleotide
  Antisense strand to SEQ ID NO: 1438882
auacuccuagaggagcggc

SEQ ID NO: 1438884 - RNA, 19 nt, Artificial Sequence
  Description of Artificial Sequence: Synthetic oligonucleotide
  Sense strand starting at position 2881 of SEQ ID NO: 1243753
aggaguaugagaggcguuu

SEQ ID NO: 1438885 - RNA, 19 nt, Artificial Sequence
  Description of Artificial Sequence: Synthetic oligonucleotide
  Antisense strand to SEQ ID NO: 1438884
aaacgccucucauacuccu

SEQ ID NO: 1438886 - RNA, 19 nt, Artificial Sequence
  Description of Artificial Sequence: Synthetic oligonucleotide
  Sense strand starting at position 2890 of SEQ ID NO: 1243753
agaggcguuucagcccaaa

SEQ ID NO: 1438887 - RNA, 19 nt, Artificial Sequence
  Description of Artificial Sequence: Synthetic oligonucleotide
  Antisense strand to SEQ ID NO: 1438886
uuugggcugaaacgccucu

SEQ ID NO: 1438888 - RNA, 19 nt, Artificial Sequence
  Description of Artificial Sequence: Synthetic oligonucleotide
  Sense strand starting at position 3038 of SEQ ID NO: 1243753
ugggauacguucuacugca

SEQ ID NO: 1438889 - RNA, 19 nt, Artificial Sequence
  Description of Artificial Sequence: Synthetic oligonucleotide
  Antisense strand to SEQ ID NO: 1438888
ugcaguagaacguauccca

SEQ ID NO: 1438890 - RNA, 19 nt, Artificial Sequence
  Description of Artificial Sequence: Synthetic oligonucleotide
  Sense strand starting at position 3157 of SEQ ID NO: 1243753
ucucucgcuccuugcaaau

SEQ ID NO: 1438891 - RNA, 19 nt, Artificial Sequence
  Description of Artificial Sequence: Synthetic oligonucleotide
  Antisense strand to SEQ ID NO: 1438890
auuugcaaggagcgagaga

SEQ ID NO: 1438892 - RNA, 19 nt, Artificial Sequence
  Description of Artificial Sequence: Synthetic oligonucleotide
  Sense strand starting at position 3170 of SEQ ID NO: 1243753
gcaaauguaucggcccaca

SEQ ID NO: 1438893 - RNA, 19 nt, Artificial Sequence
  Description of Artificial Sequence: Synthetic oligonucleotide
  Antisense strand to SEQ ID NO: 1438892
ugugggccgauacauuugc

SEQ ID NO: 1438894 - RNA, 19 nt, Artificial Sequence
  Description of Artificial Sequence: Synthetic oligonucleotide
  Sense strand starting at position 3691 of SEQ ID NO: 1243753
gaguuaaaguaagaccuuu

SEQ ID NO: 1438895 - RNA, 19 nt, Artificial Sequence
  Description of Artificial Sequence: Synthetic oligonucleotide
  Antisense strand to SEQ ID NO: 1438894
aaaggucuuacuuuaacuc

SEQ ID NO: 1438896 - RNA, 19 nt, Artificial Sequence
  Description of Artificial Sequence: Synthetic oligonucleotide
  Sense strand starting at position 3749 of SEQ ID NO: 1243753
ggaggaaauguuugucuuu

SEQ ID NO: 1438897 - RNA, 19 nt, Artificial Sequence
  Description of Artificial Sequence: Synthetic oligonucleotide
  Antisense strand to SEQ ID NO: 1438896
aaagacaaacauuuccucc

SEQ ID NO: 1438898 - RNA, 19 nt, Artificial Sequence
  Description of Artificial Sequence: Synthetic oligonucleotide
  Sense strand starting at position 3750 of SEQ ID NO: 1243753
gaggaaauguuugucuuug

SEQ ID NO: 1438899 - RNA, 19 nt, Artificial Sequence
  Description of Artificial Sequence: Synthetic oligonucleotide
  Antisense strand to SEQ ID NO: 1438898
caaagacaaacauuuccuc

SEQ ID NO: 1438900 - RNA, 19 nt, Artificial Sequence
  Description of Artificial Sequence: Synthetic oligonucleotide
  Sense strand starting at position 3751 of SEQ ID NO: 1243753
aggaaauguuugucuuuga

SEQ ID NO: 1438901 - RNA, 19 nt, Artificial Sequence
  Description of Artificial Sequence: Synthetic oligonucleotide
  Antisense strand to SEQ ID NO: 1438900
ucaaagacaaacauuuccu

SEQ ID NO: 1438902 - RNA, 19 nt, Artificial Sequence
  Description of Artificial Sequence: Synthetic oligonucleotide
  Sense strand starting at position 3754 of SEQ ID NO: 1243753
aaauguuugucuuugaggu

SEQ ID NO: 1438903 - RNA, 19 nt, Artificial Sequence
  Description of Artificial Sequence: Synthetic oligonucleotide
  Antisense strand to SEQ ID NO: 1438902
accucaaagacaaacauuu

SEQ ID NO: 1438904 - RNA, 19 nt, Artificial Sequence
  Description of Artificial Sequence: Synthetic oligonucleotide
  Sense strand starting at position 3755 of SEQ ID NO: 1243753
aauguuugucuuugagguu

SEQ ID NO: 1438905 - RNA, 19 nt, Artificial Sequence
  Description of Artificial Sequence: Synthetic oligonucleotide
  Antisense strand to SEQ ID NO: 1438904
aaccucaaagacaaacauu

SEQ ID NO: 1438906 - RNA, 19 nt, Artificial Sequence
  Description of Artificial Sequence: Synthetic oligonucleotide
  Sense strand starting at position 3792 of SEQ ID NO: 1243753
gaaagaauucuaggcucag

SEQ ID NO: 1438907 - RNA, 19 nt, Artificial Sequence
  Description of Artificial Sequence: Synthetic oligonucleotide
  Antisense strand to SEQ ID NO: 1438906
cugagccuagaauucuuuc

SEQ ID NO: 1438908 - RNA, 19 nt, Artificial Sequence
  Description of Artificial Sequence: Synthetic oligonucleotide
  Sense strand starting at position 3796 of SEQ ID NO: 1243753
gaauucuaggcucagcgau

SEQ ID NO: 1438909 - RNA, 19 nt, Artificial Sequence
  Description of Artificial Sequence: Synthetic oligonucleotide
  Antisense strand to SEQ ID NO: 1438908
aucgcugagccuagaauuc

SEQ ID NO: 1438910 - RNA, 19 nt, Artificial Sequence
  Description of Artificial Sequence: Synthetic oligonucleotide
  Sense strand starting at position 3798 of SEQ ID NO: 1243753
auucuaggcucagcgauau

SEQ ID NO: 1438911 - RNA, 19 nt, Artificial Sequence
  Description of Artificial Sequence: Synthetic oligonucleotide
  Antisense strand to SEQ ID NO: 1438910
auaucgcugagccuagaau

SEQ ID NO: 1438912 - RNA, 19 nt, Artificial Sequence
  Description of Artificial Sequence: Synthetic oligonucleotide
  Sense strand starting at position 3927 of SEQ ID NO: 1243753
auggguuuccagugugguu

SEQ ID NO: 1438913 - RNA, 19 nt, Artificial Sequence
  Description of Artificial Sequence: Synthetic oligonucleotide
  Antisense strand to SEQ ID NO: 1438912
aaccacacuggaaacccau

SEQ ID NO: 1438914 - RNA, 19 nt, Artificial Sequence
  Description of Artificial Sequence: Synthetic oligonucleotide
  Sense strand starting at position 3936 of SEQ ID NO: 1243753
cagugugguuucccggaaa

SEQ ID NO: 1438915 - RNA, 19 nt, Artificial Sequence
  Description of Artificial Sequence: Synthetic oligonucleotide
  Antisense strand to SEQ ID NO: 1438914
uuuccgggaaaccacacug

SEQ ID NO: 1438916 - RNA, 19 nt, Artificial Sequence
  Description of Artificial Sequence: Synthetic oligonucleotide
  Sense strand starting at position 3938 of SEQ ID NO: 1243753
gugugguuucccggaaagg

SEQ ID NO: 1438917 - RNA, 19 nt, Artificial Sequence
  Description of Artificial Sequence: Synthetic oligonucleotide
  Antisense strand to SEQ ID NO: 1438916
ccuuuccgggaaaccacac

SEQ ID NO: 1438918 - RNA, 19 nt, Artificial Sequence
  Description of Artificial Sequence: Synthetic oligonucleotide
  Sense strand starting at position 247 of SEQ ID NO: 1243754
ggagguugagcuugaucaa

SEQ ID NO: 1438919 - RNA, 19 nt, Artificial Sequence
  Description of Artificial Sequence: Synthetic oligonucleotide
  Antisense strand to SEQ ID NO: 1438918
uugaucaagcucaaccucc

SEQ ID NO: 1438920 - RNA, 19 nt, Artificial Sequence
  Description of Artificial Sequence: Synthetic oligonucleotide
  Sense strand starting at position 248 of SEQ ID NO: 1243754
gagguugagcuugaucaag

SEQ ID NO: 1438921 - RNA, 19 nt, Artificial Sequence
  Description of Artificial Sequence: Synthetic oligonucleotide
  Antisense strand to SEQ ID NO: 1438920
cuugaucaagcucaaccuc

SEQ ID NO: 1438922 - RNA, 19 nt, Artificial Sequence
  Description of Artificial Sequence: Synthetic oligonucleotide
  Sense strand starting at position 250 of SEQ ID NO: 1243754
gguugagcuugaucaagca

SEQ ID NO: 1438923 - RNA, 19 nt, Artificial Sequence
  Description of Artificial Sequence: Synthetic oligonucleotide
  Antisense strand to SEQ ID NO: 1438922
ugcuugaucaagcucaacc

SEQ ID NO: 1438924 - RNA, 19 nt, Artificial Sequence
  Description of Artificial Sequence: Synthetic oligonucleotide
  Sense strand starting at position 706 of SEQ ID NO: 1243754
uguugaacugaaugacuaa

SEQ ID NO: 1438925 - RNA, 19 nt, Artificial Sequence
  Description of Artificial Sequence: Synthetic oligonucleotide
  Antisense strand to SEQ ID NO: 1438924
uuagucauucaguucaaca

SEQ ID NO: 1438926 - RNA, 19 nt, Artificial Sequence
  Description of Artificial Sequence: Synthetic oligonucleotide
  Sense strand starting at position 882 of SEQ ID NO: 1243754
cgugcacggccaguauauu

SEQ ID NO: 1438927 - RNA, 19 nt, Artificial Sequence
  Description of Artificial Sequence: Synthetic oligonucleotide
  Antisense strand to SEQ ID NO: 1438926
aauauacuggccgugcacg

SEQ ID NO: 1438928 - RNA, 19 nt, Artificial Sequence
  Description of Artificial Sequence: Synthetic oligonucleotide
  Sense strand starting at position 910 of SEQ ID NO: 1243754
caauauagugaaugguaaa

SEQ ID NO: 1438929 - RNA, 19 nt, Artificial Sequence
  Description of Artificial Sequence: Synthetic oligonucleotide
  Antisense strand to SEQ ID NO: 1438928
uuuaccauucacuauauug

SEQ ID NO: 1438930 - RNA, 19 nt, Artificial Sequence
  Description of Artificial Sequence: Synthetic oligonucleotide
  Sense strand starting at position 917 of SEQ ID NO: 1243754
gugaaugguaaaugcuacu

SEQ ID NO: 1438931 - RNA, 19 nt, Artificial Sequence
  Description of Artificial Sequence: Synthetic oligonucleotide
  Antisense strand to SEQ ID NO: 1438930
aguagcauuuaccauucac

SEQ ID NO: 1438932 - RNA, 19 nt, Artificial Sequence
  Description of Artificial Sequence: Synthetic oligonucleotide
  Sense strand starting at position 941 of SEQ ID NO: 1243754
agcuguuguuaaucauaau

SEQ ID NO: 1438933 - RNA, 19 nt, Artificial Sequence
  Description of Artificial Sequence: Synthetic oligonucleotide
  Antisense strand to SEQ ID NO: 1438932
auuaugauuaacaacagcu

SEQ ID NO: 1438934 - RNA, 19 nt, Artificial Sequence
  Description of Artificial Sequence: Synthetic oligonucleotide
  Sense strand starting at position 973 of SEQ ID NO: 1243754
aucucuagcgaucauacuu

SEQ ID NO: 1438935 - RNA, 19 nt, Artificial Sequence
  Description of Artificial Sequence: Synthetic oligonucleotide
  Antisense strand to SEQ ID NO: 1438934
aaguaugaucgcuagagau

SEQ ID NO: 1438936 - RNA, 19 nt, Artificial Sequence
  Description of Artificial Sequence: Synthetic oligonucleotide
  Sense strand starting at position 980 of SEQ ID NO: 1243754
gcgaucauacuuuaaccuu

SEQ ID NO: 1438937 - RNA, 19 nt, Artificial Sequence
  Description of Artificial Sequence: Synthetic oligonucleotide
  Antisense strand to SEQ ID NO: 1438936
aagguuaaaguaugaucgc

SEQ ID NO: 1438938 - RNA, 19 nt, Artificial Sequence
  Description of Artificial Sequence: Synthetic oligonucleotide
  Sense strand starting at position 1014 of SEQ ID NO: 1243754
ucuaaauauguugacaugu

SEQ ID NO: 1438939 - RNA, 19 nt, Artificial Sequence
  Description of Artificial Sequence: Synthetic oligonucleotide
  Antisense strand to SEQ ID NO: 1438938
acaugucaacauauuuaga

SEQ ID NO: 1438940 - RNA, 19 nt, Artificial Sequence
  Description of Artificial Sequence: Synthetic oligonucleotide
  Sense strand starting at position 1068 of SEQ ID NO: 1243754
aggagucauccaggccuga

SEQ ID NO: 1438941 - RNA, 19 nt, Artificial Sequence
  Description of Artificial Sequence: Synthetic oligonucleotide
  Antisense strand to SEQ ID NO: 1438940
ucaggccuggaugacuccu

SEQ ID NO: 1438942 - RNA, 19 nt, Artificial Sequence
  Description of Artificial Sequence: Synthetic oligonucleotide
  Sense strand starting at position 1091 of SEQ ID NO: 1243754
agcucugagaacuggauau

SEQ ID NO: 1438943 - RNA, 19 nt, Artificial Sequence
  Description of Artificial Sequence: Synthetic oligonucleotide
  Antisense strand to SEQ ID NO: 1438942
auauccaguucucagagcu

SEQ ID NO: 1438944 - RNA, 19 nt, Artificial Sequence
  Description of Artificial Sequence: Synthetic oligonucleotide
  Sense strand starting at position 1336 of SEQ ID NO: 1243754
gcgagugccauguuuccca

SEQ ID NO: 1438945 - RNA, 19 nt, Artificial Sequence
  Description of Artificial Sequence: Synthetic oligonucleotide
  Antisense strand to SEQ ID NO: 1438944
ugggaaacauggcacucgc

SEQ ID NO: 1438946 - RNA, 19 nt, Artificial Sequence
  Description of Artificial Sequence: Synthetic oligonucleotide
  Sense strand starting at position 1339 of SEQ ID NO: 1243754
agugccauguuucccagau

SEQ ID NO: 1438947 - RNA, 19 nt, Artificial Sequence
  Description of Artificial Sequence: Synthetic oligonucleotide
  Antisense strand to SEQ ID NO: 1438946
aucugggaaacauggcacu

SEQ ID NO: 1438948 - RNA, 19 nt, Artificial Sequence
  Description of Artificial Sequence: Synthetic oligonucleotide
  Sense strand starting at position 1340 of SEQ ID NO: 1243754
gugccauguuucccagaua

SEQ ID NO: 1438949 - RNA, 19 nt, Artificial Sequence
  Description of Artificial Sequence: Synthetic oligonucleotide
  Antisense strand to SEQ ID NO: 1438948
uaucugggaaacauggcac

SEQ ID NO: 1438950 - RNA, 19 nt, Artificial Sequence
  Description of Artificial Sequence: Synthetic oligonucleotide
  Sense strand starting at position 1792 of SEQ ID NO: 1243754
ggaucaguuccuugagcga

SEQ ID NO: 1438951 - RNA, 19 nt, Artificial Sequence
  Description of Artificial Sequence: Synthetic oligonucleotide
  Antisense strand to SEQ ID NO: 1438950
ucgcucaaggaacugaucc

SEQ ID NO: 1438952 - RNA, 19 nt, Artificial Sequence
  Description of Artificial Sequence: Synthetic oligonucleotide
  Sense strand starting at position 2268 of SEQ ID NO: 1243754
aggcuaaagcuguacuaaa

SEQ ID NO: 1438953 - RNA, 19 nt, Artificial Sequence
  Description of Artificial Sequence: Synthetic oligonucleotide
  Antisense strand to SEQ ID NO: 1438952
uuuaguacagcuuuagccu

SEQ ID NO: 1438954 - RNA, 19 nt, Artificial Sequence
  Description of Artificial Sequence: Synthetic oligonucleotide
  Sense strand starting at position 2288 of SEQ ID NO: 1243754
gccaacuuuccugagugau

SEQ ID NO: 1438955 - RNA, 19 nt, Artificial Sequence
  Description of Artificial Sequence: Synthetic oligonucleotide
  Antisense strand to SEQ ID NO: 1438954
aucacucaggaaaguuggc

SEQ ID NO: 1438956 - RNA, 19 nt, Artificial Sequence
  Description of Artificial Sequence: Synthetic oligonucleotide
  Sense strand starting at position 2294 of SEQ ID NO: 1243754
uuuccugagugaucacuau

SEQ ID NO: 1438957 - RNA, 19 nt, Artificial Sequence
  Description of Artificial Sequence: Synthetic oligonucleotide
  Antisense strand to SEQ ID NO: 1438956
auagugaucacucaggaaa

SEQ ID NO: 1438958 - RNA, 19 nt, Artificial Sequence
  Description of Artificial Sequence: Synthetic oligonucleotide
  Sense strand starting at position 2300 of SEQ ID NO: 1243754
gagugaucacuaugggcca

SEQ ID NO: 1438959 - RNA, 19 nt, Artificial Sequence
  Description of Artificial Sequence: Synthetic oligonucleotide
  Antisense strand to SEQ ID NO: 1438958
uggcccauagugaucacuc

SEQ ID NO: 1438960 - RNA, 19 nt, Artificial Sequence
  Description of Artificial Sequence: Synthetic oligonucleotide
  Sense strand starting at position 2425 of SEQ ID NO: 1243754
gacgccauuuaagggauaa

SEQ ID NO: 1438961 - RNA, 19 nt, Artificial Sequence
  Description of Artificial Sequence: Synthetic oligonucleotide
  Antisense strand to SEQ ID NO: 1438960
uuaucccuuaaauggcguc

SEQ ID NO: 1438962 - RNA, 19 nt, Artificial Sequence
  Description of Artificial Sequence: Synthetic oligonucleotide
  Sense strand starting at position 2449 of SEQ ID NO: 1243754
ggaucuaagucuuccagag

SEQ ID NO: 1438963 - RNA, 19 nt, Artificial Sequence
  Description of Artificial Sequence: Synthetic oligonucleotide
  Antisense strand to SEQ ID NO: 1438962
cucuggaagacuuagaucc

SEQ ID NO: 1438964 - RNA, 19 nt, Artificial Sequence
  Description of Artificial Sequence: Synthetic oligonucleotide
  Sense strand starting at position 2453 of SEQ ID NO: 1243754
cuaagucuuccagaguuua

SEQ ID NO: 1438965 - RNA, 19 nt, Artificial Sequence
  Description of Artificial Sequence: Synthetic oligonucleotide
  Antisense strand to SEQ ID NO: 1438964
uaaacucuggaagacuuag

SEQ ID NO: 1438966 - RNA, 19 nt, Artificial Sequence
  Description of Artificial Sequence: Synthetic oligonucleotide
  Sense strand starting at position 2463 of SEQ ID NO: 1243754
cagaguuuacaaugagccu

SEQ ID NO: 1438967 - RNA, 19 nt, Artificial Sequence
  Description of Artificial Sequence: Synthetic oligonucleotide
  Antisense strand to SEQ ID NO: 1438966
aggcucauuguaaacucug

SEQ ID NO: 1438968 - RNA, 19 nt, Artificial Sequence
  Description of Artificial Sequence: Synthetic oligonucleotide
  Sense strand starting at position 2495 of SEQ ID NO: 1243754
cuggacaaucuguagguuu

SEQ ID NO: 1438969 - RNA, 19 nt, Artificial Sequence
  Description of Artificial Sequence: Synthetic oligonucleotide
  Antisense strand to SEQ ID NO: 1438968
aaaccuacagauuguccag

SEQ ID NO: 1438970 - RNA, 19 nt, Artificial Sequence
  Description of Artificial Sequence: Synthetic oligonucleotide
  Sense strand starting at position 2497 of SEQ ID NO: 1243754
ggacaaucuguagguuuau

SEQ ID NO: 1438971 - RNA, 19 nt, Artificial Sequence
  Description of Artificial Sequence: Synthetic oligonucleotide
  Antisense strand to SEQ ID NO: 1438970
auaaaccuacagauugucc

SEQ ID NO: 1438972 - RNA, 19 nt, Artificial Sequence
  Description of Artificial Sequence: Synthetic oligonucleotide
  Sense strand starting at position 2498 of SEQ ID NO: 1243754
gacaaucuguagguuuaua

SEQ ID NO: 1438973 - RNA, 19 nt, Artificial Sequence
  Description of Artificial Sequence: Synthetic oligonucleotide
  Antisense strand to SEQ ID NO: 1438972
uauaaaccuacagauuguc

SEQ ID NO: 1438974 - RNA, 19 nt, Artificial Sequence
  Description of Artificial Sequence: Synthetic oligonucleotide
  Sense strand starting at position 2667 of SEQ ID NO: 1243754
acuguagaccugugagcau

SEQ ID NO: 1438975 - RNA, 19 nt, Artificial Sequence
  Description of Artificial Sequence: Synthetic oligonucleotide
  Antisense strand to SEQ ID NO: 1438974
augcucacaggucuacagu

SEQ ID NO: 1438976 - RNA, 19 nt, Artificial Sequence
  Description of Artificial Sequence: Synthetic oligonucleotide
  Sense strand starting at position 2685 of SEQ ID NO: 1243754
uaguuuccggcggauauuu

SEQ ID NO: 1438977 - RNA, 19 nt, Artificial Sequence
  Description of Artificial Sequence: Synthetic oligonucleotide
  Antisense strand to SEQ ID NO: 1438976
aaauauccgccggaaacua

SEQ ID NO: 1438978 - RNA, 19 nt, Artificial Sequence
  Description of Artificial Sequence: Synthetic oligonucleotide
  Sense strand starting at position 2693 of SEQ ID NO: 1243754
ggcggauauuucuaacgag

SEQ ID NO: 1438979 - RNA, 19 nt, Artificial Sequence
  Description of Artificial Sequence: Synthetic oligonucleotide
  Antisense strand to SEQ ID NO: 1438978
cucguuagaaauauccgcc

SEQ ID NO: 1438980 - RNA, 19 nt, Artificial Sequence
  Description of Artificial Sequence: Synthetic oligonucleotide
  Sense strand starting at position 2696 of SEQ ID NO: 1243754
ggauauuucuaacgagagc

SEQ ID NO: 1438981 - RNA, 19 nt, Artificial Sequence
  Description of Artificial Sequence: Synthetic oligonucleotide
  Antisense strand to SEQ ID NO: 1438980
gcucucguuagaaauaucc

SEQ ID NO: 1438982 - RNA, 19 nt, Artificial Sequence
  Description of Artificial Sequence: Synthetic oligonucleotide
  Sense strand starting at position 2939 of SEQ ID NO: 1243754
ugacuaagcuggucucgaa

SEQ ID NO: 1438983 - RNA, 19 nt, Artificial Sequence
  Description of Artificial Sequence: Synthetic oligonucleotide
  Antisense strand to SEQ ID NO: 1438982
uucgagaccagcuuaguca

SEQ ID NO: 1438984 - RNA, 19 nt, Artificial Sequence
  Description of Artificial Sequence: Synthetic oligonucleotide
  Sense strand starting at position 3337 of SEQ ID NO: 1243754
ggagguugugaggguuaaa

SEQ ID NO: 1438985 - RNA, 19 nt, Artificial Sequence
  Description of Artificial Sequence: Synthetic oligonucleotide
  Antisense strand to SEQ ID NO: 1438984
uuuaacccucacaaccucc

SEQ ID NO: 1438986 - RNA, 19 nt, Artificial Sequence
  Description of Artificial Sequence: Synthetic oligonucleotide
  Sense strand starting at position 3340 of SEQ ID NO: 1243754
gguugugaggguuaaaugu

SEQ ID NO: 1438987 - RNA, 19 nt, Artificial Sequence
  Description of Artificial Sequence: Synthetic oligonucleotide
  Antisense strand to SEQ ID NO: 1438986
acauuuaacccucacaacc

SEQ ID NO: 1438988 - RNA, 19 nt, Artificial Sequence
  Description of Artificial Sequence: Synthetic oligonucleotide
  Sense strand starting at position 3415 of SEQ ID NO: 1243754
uucuuaaauuugggcuaaa

SEQ ID NO: 1438989 - RNA, 19 nt, Artificial Sequence
  Description of Artificial Sequence: Synthetic oligonucleotide
  Antisense strand to SEQ ID NO: 1438988
uuuagcccaaauuuaagaa

SEQ ID NO: 1438990 - RNA, 19 nt, Artificial Sequence
  Description of Artificial Sequence: Synthetic oligonucleotide
  Sense strand starting at position 3456 of SEQ ID NO: 1243754
agcucuuuagaggacuagu

SEQ ID NO: 1438991 - RNA, 19 nt, Artificial Sequence
  Description of Artificial Sequence: Synthetic oligonucleotide
  Antisense strand to SEQ ID NO: 1438990
acuaguccucuaaagagcu

SEQ ID NO: 1438992 - RNA, 19 nt, Artificial Sequence
  Description of Artificial Sequence: Synthetic oligonucleotide
  Sense strand starting at position 3805 of SEQ ID NO: 1243754
auggguugaaugcauacau

SEQ ID NO: 1438993 - RNA, 19 nt, Artificial Sequence
  Description of Artificial Sequence: Synthetic oligonucleotide
  Antisense strand to SEQ ID NO: 1438992
auguaugcauucaacccau

SEQ ID NO: 1438994 - RNA, 19 nt, Artificial Sequence
  Description of Artificial Sequence: Synthetic oligonucleotide
  Sense strand starting at position 3824 of SEQ ID NO: 1243754
agaauauguacgggugugu

SEQ ID NO: 1438995 - RNA, 19 nt, Artificial Sequence
  Description of Artificial Sequence: Synthetic oligonucleotide
  Antisense strand to SEQ ID NO: 1438994
acacacccguacauauucu

SEQ ID NO: 1438996 - RNA, 19 nt, Artificial Sequence
  Description of Artificial Sequence: Synthetic oligonucleotide
  Sense strand starting at position 3888 of SEQ ID NO: 1243754
gccagcuauagguaagagu

SEQ ID NO: 1438997 - RNA, 19 nt, Artificial Sequence
  Description of Artificial Sequence: Synthetic oligonucleotide
  Antisense strand to SEQ ID NO: 1438996
acucuuaccuauagcuggc

SEQ ID NO: 1438998 - RNA, 19 nt, Artificial Sequence
  Description of Artificial Sequence: Synthetic oligonucleotide
  Sense strand starting at position 315 of SEQ ID NO: 1243755
gucuucuuggccugcaaga

SEQ ID NO: 1438999 - RNA, 19 nt, Artificial Sequence
  Description of Artificial Sequence: Synthetic oligonucleotide
  Antisense strand to SEQ ID NO: 1438998
ucuugcaggccaagaagac

SEQ ID NO: 1439000 - RNA, 19 nt, Artificial Sequence
  Description of Artificial Sequence: Synthetic oligonucleotide
  Sense strand starting at position 317 of SEQ ID NO: 1243755
cuucuuggccugcaagaua

SEQ ID NO: 1439001 - RNA, 19 nt, Artificial Sequence
  Description of Artificial Sequence: Synthetic oligonucleotide
  Antisense strand to SEQ ID NO: 1439000
uaucuugcaggccaagaag

SEQ ID NO: 1439002 - RNA, 19 nt, Artificial Sequence
  Description of Artificial Sequence: Synthetic oligonucleotide
  Sense strand starting at position 488 of SEQ ID NO: 1243755
gcagguucucugggucacu

SEQ ID NO: 1439003 - RNA, 19 nt, Artificial Sequence
  Description of Artificial Sequence: Synthetic oligonucleotide
  Antisense strand to SEQ ID NO: 1439002
agugacccagagaaccugc

SEQ ID NO: 1439004 - RNA, 19 nt, Artificial Sequence
  Description of Artificial Sequence: Synthetic oligonucleotide
  Sense strand starting at position 501 of SEQ ID NO: 1243755
gucacuuguccacgggaca

SEQ ID NO: 1439005 - RNA, 19 nt, Artificial Sequence
  Description of Artificial Sequence: Synthetic oligonucleotide
  Antisense strand to SEQ ID NO: 1439004
ugucccguggacaagugac

SEQ ID NO: 1439006 - RNA, 19 nt, Artificial Sequence
  Description of Artificial Sequence: Synthetic oligonucleotide
  Sense strand starting at position 502 of SEQ ID NO: 1243755
ucacuuguccacgggacaa

SEQ ID NO: 1439007 - RNA, 19 nt, Artificial Sequence
  Description of Artificial Sequence: Synthetic oligonucleotide
  Antisense strand to SEQ ID NO: 1439006
uugucccguggacaaguga

SEQ ID NO: 1439008 - RNA, 19 nt, Artificial Sequence
  Description of Artificial Sequence: Synthetic oligonucleotide
  Sense strand starting at position 930 of SEQ ID NO: 1243755
gcaacuucugaugaguugu

SEQ ID NO: 1439009 - RNA, 19 nt, Artificial Sequence
  Description of Artificial Sequence: Synthetic oligonucleotide
  Antisense strand to SEQ ID NO: 1439008
acaacucaucagaaguugc

SEQ ID NO: 1439010 - RNA, 19 nt, Artificial Sequence
  Description of Artificial Sequence: Synthetic oligonucleotide
  Sense strand starting at position 1025 of SEQ ID NO: 1243755
gguccaaaucuccggauua

SEQ ID NO: 1439011 - RNA, 19 nt, Artificial Sequence
  Description of Artificial Sequence: Synthetic oligonucleotide
  Antisense strand to SEQ ID NO: 1439010
uaauccggagauuuggacc

SEQ ID NO: 1439012 - RNA, 19 nt, Artificial Sequence
  Description of Artificial Sequence: Synthetic oligonucleotide
  Sense strand starting at position 1113 of SEQ ID NO: 1243755
gcggcugacacuuagggaa

SEQ ID NO: 1439013 - RNA, 19 nt, Artificial Sequence
  Description of Artificial Sequence: Synthetic oligonucleotide
  Antisense strand to SEQ ID NO: 1439012
uucccuaagugucagccgc

SEQ ID NO: 1439014 - RNA, 19 nt, Artificial Sequence
  Description of Artificial Sequence: Synthetic oligonucleotide
  Sense strand starting at position 1132 of SEQ ID NO: 1243755
ccagccucagaaugacuua

SEQ ID NO: 1439015 - RNA, 19 nt, Artificial Sequence
  Description of Artificial Sequence: Synthetic oligonucleotide
  Antisense strand to SEQ ID NO: 1439014
uaagucauucugaggcugg

SEQ ID NO: 1439016 - RNA, 19 nt, Artificial Sequence
  Description of Artificial Sequence: Synthetic oligonucleotide
  Sense strand starting at position 1135 of SEQ ID NO: 1243755
gccucagaaugacuuaaag

SEQ ID NO: 1439017 - RNA, 19 nt, Artificial Sequence
  Description of Artificial Sequence: Synthetic oligonucleotide
  Antisense strand to SEQ ID NO: 1439016
cuuuaagucauucugaggc

SEQ ID NO: 1439018 - RNA, 19 nt, Artificial Sequence
  Description of Artificial Sequence: Synthetic oligonucleotide
  Sense strand starting at position 1304 of SEQ ID NO: 1243755
gaguccuguguugggucaa

SEQ ID NO: 1439019 - RNA, 19 nt, Artificial Sequence
  Description of Artificial Sequence: Synthetic oligonucleotide
  Antisense strand to SEQ ID NO: 1439018
uugacccaacacaggacuc

SEQ ID NO: 1439020 - RNA, 19 nt, Artificial Sequence
  Description of Artificial Sequence: Synthetic oligonucleotide
  Sense strand starting at position 1315 of SEQ ID NO: 1243755
ugggucaauccuggcauga

SEQ ID NO: 1439021 - RNA, 19 nt, Artificial Sequence
  Description of Artificial Sequence: Synthetic oligonucleotide
  Antisense strand to SEQ ID NO: 1439020
ucaugccaggauugaccca

SEQ ID NO: 1439022 - RNA, 19 nt, Artificial Sequence
  Description of Artificial Sequence: Synthetic oligonucleotide
  Sense strand starting at position 1420 of SEQ ID NO: 1243755
gugccagucccgcuuuaca

SEQ ID NO: 1439023 - RNA, 19 nt, Artificial Sequence
  Description of Artificial Sequence: Synthetic oligonucleotide
  Antisense strand to SEQ ID NO: 1439022
uguaaagcgggacuggcac

SEQ ID NO: 1439024 - RNA, 19 nt, Artificial Sequence
  Description of Artificial Sequence: Synthetic oligonucleotide
  Sense strand starting at position 1483 of SEQ ID NO: 1243755
gucgauggcucggugauuu

SEQ ID NO: 1439025 - RNA, 19 nt, Artificial Sequence
  Description of Artificial Sequence: Synthetic oligonucleotide
  Antisense strand to SEQ ID NO: 1439024
aaaucaccgagccaucgac

SEQ ID NO: 1439026 - RNA, 19 nt, Artificial Sequence
  Description of Artificial Sequence: Synthetic oligonucleotide
  Sense strand starting at position 1991 of SEQ ID NO: 1243755
cguccucuuccggugucaa

SEQ ID NO: 1439027 - RNA, 19 nt, Artificial Sequence
  Description of Artificial Sequence: Synthetic oligonucleotide
  Antisense strand to SEQ ID NO: 1439026
uugacaccggaagaggacg

SEQ ID NO: 1439028 - RNA, 19 nt, Artificial Sequence
  Description of Artificial Sequence: Synthetic oligonucleotide
  Sense strand starting at position 1992 of SEQ ID NO: 1243755
guccucuuccggugucaaa

SEQ ID NO: 1439029 - RNA, 19 nt, Artificial Sequence
  Description of Artificial Sequence: Synthetic oligonucleotide
  Antisense strand to SEQ ID NO: 1439028
uuugacaccggaagaggac

SEQ ID NO: 1439030 - RNA, 19 nt, Artificial Sequence
  Description of Artificial Sequence: Synthetic oligonucleotide
  Sense strand starting at position 2145 of SEQ ID NO: 1243755
ggcuccaauuguuuacgaa

SEQ ID NO: 1439031 - RNA, 19 nt, Artificial Sequence
  Description of Artificial Sequence: Synthetic oligonucleotide
  Antisense strand to SEQ ID NO: 1439030
uucguaaacaauuggagcc

SEQ ID NO: 1439032 - RNA, 19 nt, Artificial Sequence
  Description of Artificial Sequence: Synthetic oligonucleotide
  Sense strand starting at position 2146 of SEQ ID NO: 1243755
gcuccaauuguuuacgaag

SEQ ID NO: 1439033 - RNA, 19 nt, Artificial Sequence
  Description of Artificial Sequence: Synthetic oligonucleotide
  Antisense strand to SEQ ID NO: 1439032
cuucguaaacaauuggagc

SEQ ID NO: 1439034 - RNA, 19 nt, Artificial Sequence
  Description of Artificial Sequence: Synthetic oligonucleotide
  Sense strand starting at position 2179 of SEQ ID NO: 1243755
cgcccuaccgugagggauu

SEQ ID NO: 1439035 - RNA, 19 nt, Artificial Sequence
  Description of Artificial Sequence: Synthetic oligonucleotide
  Antisense strand to SEQ ID NO: 1439034
aaucccucacgguagggcg

SEQ ID NO: 1439036 - RNA, 19 nt, Artificial Sequence
  Description of Artificial Sequence: Synthetic oligonucleotide
  Sense strand starting at position 2811 of SEQ ID NO: 1243755
uaguaaacccucugagaag

SEQ ID NO: 1439037 - RNA, 19 nt, Artificial Sequence
  Description of Artificial Sequence: Synthetic oligonucleotide
  Antisense strand to SEQ ID NO: 1439036
cuucucagaggguuuacua

SEQ ID NO: 1439038 - RNA, 19 nt, Artificial Sequence
  Description of Artificial Sequence: Synthetic oligonucleotide
  Sense strand starting at position 2851 of SEQ ID NO: 1243755
aggugucguccugagcaaa

SEQ ID NO: 1439039 - RNA, 19 nt, Artificial Sequence
  Description of Artificial Sequence: Synthetic oligonucleotide
  Antisense strand to SEQ ID NO: 1439038
uuugcucaggacgacaccu

SEQ ID NO: 1439040 - RNA, 19 nt, Artificial Sequence
  Description of Artificial Sequence: Synthetic oligonucleotide
  Sense strand starting at position 2890 of SEQ ID NO: 1243755
ugagcuuuccugggcugga

SEQ ID NO: 1439041 - RNA, 19 nt, Artificial Sequence
  Description of Artificial Sequence: Synthetic oligonucleotide
  Antisense strand to SEQ ID NO: 1439040
uccagcccaggaaagcuca

SEQ ID NO: 1439042 - RNA, 19 nt, Artificial Sequence
  Description of Artificial Sequence: Synthetic oligonucleotide
  Sense strand starting at position 2991 of SEQ ID NO: 1243755
agguuucgacauagucguu

SEQ ID NO: 1439043 - RNA, 19 nt, Artificial Sequence
  Description of Artificial Sequence: Synthetic oligonucleotide
  Antisense strand to SEQ ID NO: 1439042
aacgacuaugucgaaaccu

SEQ ID NO: 1439044 - RNA, 19 nt, Artificial Sequence
  Description of Artificial Sequence: Synthetic oligonucleotide
  Sense strand starting at position 3015 of SEQ ID NO: 1243755
cugcguucugcaguuguca

SEQ ID NO: 1439045 - RNA, 19 nt, Artificial Sequence
  Description of Artificial Sequence: Synthetic oligonucleotide
  Antisense strand to SEQ ID NO: 1439044
ugacaacugcagaacgcag

SEQ ID NO: 1439046 - RNA, 19 nt, Artificial Sequence
  Description of Artificial Sequence: Synthetic oligonucleotide
  Sense strand starting at position 3138 of SEQ ID NO: 1243755
guauguugucacuagaucu

SEQ ID NO: 1439047 - RNA, 19 nt, Artificial Sequence
  Description of Artificial Sequence: Synthetic oligonucleotide
  Antisense strand to SEQ ID NO: 1439046
agaucuagugacaacauac

SEQ ID NO: 1439048 - RNA, 19 nt, Artificial Sequence
  Description of Artificial Sequence: Synthetic oligonucleotide
  Sense strand starting at position 3199 of SEQ ID NO: 1243755
ucccaugcuuguccuguua

SEQ ID NO: 1439049 - RNA, 19 nt, Artificial Sequence
  Description of Artificial Sequence: Synthetic oligonucleotide
  Antisense strand to SEQ ID NO: 1439048
uaacaggacaagcauggga

SEQ ID NO: 1439050 - RNA, 19 nt, Artificial Sequence
  Description of Artificial Sequence: Synthetic oligonucleotide
  Sense strand starting at position 3229 of SEQ ID NO: 1243755
acucuauucuguccugaua

SEQ ID NO: 1439051 - RNA, 19 nt, Artificial Sequence
  Description of Artificial Sequence: Synthetic oligonucleotide
  Antisense strand to SEQ ID NO: 1439050
uaucaggacagaauagagu

SEQ ID NO: 1439052 - RNA, 19 nt, Artificial Sequence
  Description of Artificial Sequence: Synthetic oligonucleotide
  Sense strand starting at position 3257 of SEQ ID NO: 1243755
gcaagaaugggugguucca

SEQ ID NO: 1439053 - RNA, 19 nt, Artificial Sequence
  Description of Artificial Sequence: Synthetic oligonucleotide
  Antisense strand to SEQ ID NO: 1439052
uggaaccacccauucuugc

SEQ ID NO: 1439054 - RNA, 19 nt, Artificial Sequence
  Description of Artificial Sequence: Synthetic oligonucleotide
  Sense strand starting at position 3295 of SEQ ID NO: 1243755
guacaucuuugugccagua

SEQ ID NO: 1439055 - RNA, 19 nt, Artificial Sequence
  Description of Artificial Sequence: Synthetic oligonucleotide
  Antisense strand to SEQ ID NO: 1439054
uacuggcacaaagauguac

SEQ ID NO: 1439056 - RNA, 19 nt, Artificial Sequence
  Description of Artificial Sequence: Synthetic oligonucleotide
  Sense strand starting at position 3307 of SEQ ID NO: 1243755
gccaguaaguaagcaugaa

SEQ ID NO: 1439057 - RNA, 19 nt, Artificial Sequence
  Description of Artificial Sequence: Synthetic oligonucleotide
  Antisense strand to SEQ ID NO: 1439056
uucaugcuuacuuacuggc

SEQ ID NO: 1439058 - RNA, 19 nt, Artificial Sequence
  Description of Artificial Sequence: Synthetic oligonucleotide
  Sense strand starting at position 3498 of SEQ ID NO: 1243755
uggcuuugcuagucaguag

SEQ ID NO: 1439059 - RNA, 19 nt, Artificial Sequence
  Description of Artificial Sequence: Synthetic oligonucleotide
  Antisense strand to SEQ ID NO: 1439058
cuacugacuagcaaagcca

SEQ ID NO: 1439060 - RNA, 19 nt, Artificial Sequence
  Description of Artificial Sequence: Synthetic oligonucleotide
  Sense strand starting at position 3501 of SEQ ID NO: 1243755
cuuugcuagucaguaggua

SEQ ID NO: 1439061 - RNA, 19 nt, Artificial Sequence
  Description of Artificial Sequence: Synthetic oligonucleotide
  Antisense strand to SEQ ID NO: 1439060
uaccuacugacuagcaaag

SEQ ID NO: 1439062 - RNA, 19 nt, Artificial Sequence
  Description of Artificial Sequence: Synthetic oligonucleotide
  Sense strand starting at position 3545 of SEQ ID NO: 1243755
gccuuacaugcugguaagu

SEQ ID NO: 1439063 - RNA, 19 nt, Artificial Sequence
  Description of Artificial Sequence: Synthetic oligonucleotide
  Antisense strand to SEQ ID NO: 1439062
acuuaccagcauguaaggc

SEQ ID NO: 1439064 - RNA, 19 nt, Artificial Sequence
  Description of Artificial Sequence: Synthetic oligonucleotide
  Sense strand starting at position 3606 of SEQ ID NO: 1243755
gcagcuccuccguggagaa

SEQ ID NO: 1439065 - RNA, 19 nt, Artificial Sequence
  Description of Artificial Sequence: Synthetic oligonucleotide
  Antisense strand to SEQ ID NO: 1439064
uucuccacggaggagcugc

SEQ ID NO: 1439066 - RNA, 19 nt, Artificial Sequence
  Description of Artificial Sequence: Synthetic oligonucleotide
  Sense strand starting at position 3632 of SEQ ID NO: 1243755
ugauuugccucuucuccga

SEQ ID NO: 1439067 - RNA, 19 nt, Artificial Sequence
  Description of Artificial Sequence: Synthetic oligonucleotide
  Antisense strand to SEQ ID NO: 1439066
ucggagaagaggcaaauca

SEQ ID NO: 1439068 - RNA, 19 nt, Artificial Sequence
  Description of Artificial Sequence: Synthetic oligonucleotide
  Sense strand starting at position 3758 of SEQ ID NO: 1243755
agaggugggucguuuccau

SEQ ID NO: 1439069 - RNA, 19 nt, Artificial Sequence
  Description of Artificial Sequence: Synthetic oligonucleotide
  Antisense strand to SEQ ID NO: 1439068
auggaaacgacccaccucu

SEQ ID NO: 1439070 - RNA, 19 nt, Artificial Sequence
  Description of Artificial Sequence: Synthetic oligonucleotide
  Sense strand starting at position 3899 of SEQ ID NO: 1243755
cgggcuaccuguuugaaga

SEQ ID NO: 1439071 - RNA, 19 nt, Artificial Sequence
  Description of Artificial Sequence: Synthetic oligonucleotide
  Antisense strand to SEQ ID NO: 1439070
ucuucaaacagguagcccg

SEQ ID NO: 1439072 - RNA, 19 nt, Artificial Sequence
  Description of Artificial Sequence: Synthetic oligonucleotide
  Sense strand starting at position 3900 of SEQ ID NO: 1243755
gggcuaccuguuugaagag

SEQ ID NO: 1439073 - RNA, 19 nt, Artificial Sequence
  Description of Artificial Sequence: Synthetic oligonucleotide
  Antisense strand to SEQ ID NO: 1439072
cucuucaaacagguagccc

SEQ ID NO: 1439074 - RNA, 19 nt, Artificial Sequence
  Description of Artificial Sequence: Synthetic oligonucleotide
  Sense strand starting at position 3909 of SEQ ID NO: 1243755
guuugaagagauugcuagu

SEQ ID NO: 1439075 - RNA, 19 nt, Artificial Sequence
  Description of Artificial Sequence: Synthetic oligonucleotide
  Antisense strand to SEQ ID NO: 1439074
acuagcaaucucuucaaac

SEQ ID NO: 1439076 - RNA, 19 nt, Artificial Sequence
  Description of Artificial Sequence: Synthetic oligonucleotide
  Sense strand starting at position 3923 of SEQ ID NO: 1243755
cuaguauccuuccuugaug

SEQ ID NO: 1439077 - RNA, 19 nt, Artificial Sequence
  Description of Artificial Sequence: Synthetic oligonucleotide
  Antisense strand to SEQ ID NO: 1439076
caucaaggaaggauacuag

SEQ ID NO: 1439078 - RNA, 19 nt, Artificial Sequence
  Description of Artificial Sequence: Synthetic oligonucleotide
  Sense strand starting at position 178 of SEQ ID NO: 1243756
auuggaaucuaugucauca

SEQ ID NO: 1439079 - RNA, 19 nt, Artificial Sequence
  Description of Artificial Sequence: Synthetic oligonucleotide
  Antisense strand to SEQ ID NO: 1439078
ugaugacauagauuccaau

SEQ ID NO: 1439080 - RNA, 19 nt, Artificial Sequence
  Description of Artificial Sequence: Synthetic oligonucleotide
  Sense strand starting at position 218 of SEQ ID NO: 1243756
uggguuccucugcaaagga

SEQ ID NO: 1439081 - RNA, 19 nt, Artificial Sequence
  Description of Artificial Sequence: Synthetic oligonucleotide
  Antisense strand to SEQ ID NO: 1439080
uccuuugcagaggaaccca

SEQ ID NO: 1439082 - RNA, 19 nt, Artificial Sequence
  Description of Artificial Sequence: Synthetic oligonucleotide
  Sense strand starting at position 263 of SEQ ID NO: 1243756
aacuuaggugcuugaauga

SEQ ID NO: 1439083 - RNA, 19 nt, Artificial Sequence
  Description of Artificial Sequence: Synthetic oligonucleotide
  Antisense strand to SEQ ID NO: 1439082
ucauucaagcaccuaaguu

SEQ ID NO: 1439084 - RNA, 19 nt, Artificial Sequence
  Description of Artificial Sequence: Synthetic oligonucleotide
  Sense strand starting at position 276 of SEQ ID NO: 1243756
gaaugaagaucacuguuau

SEQ ID NO: 1439085 - RNA, 19 nt, Artificial Sequence
  Description of Artificial Sequence: Synthetic oligonucleotide
  Antisense strand to SEQ ID NO: 1439084
auaacagugaucuucauuc

SEQ ID NO: 1439086 - RNA, 19 nt, Artificial Sequence
  Description of Artificial Sequence: Synthetic oligonucleotide
  Sense strand starting at position 280 of SEQ ID NO: 1243756
gaagaucacuguuauuuag

SEQ ID NO: 1439087 - RNA, 19 nt, Artificial Sequence
  Description of Artificial Sequence: Synthetic oligonucleotide
  Antisense strand to SEQ ID NO: 1439086
cuaaauaacagugaucuuc

SEQ ID NO: 1439088 - RNA, 19 nt, Artificial Sequence
  Description of Artificial Sequence: Synthetic oligonucleotide
  Sense strand starting at position 814 of SEQ ID NO: 1243756
ggaucagacgaucgaaaug

SEQ ID NO: 1439089 - RNA, 19 nt, Artificial Sequence
  Description of Artificial Sequence: Synthetic oligonucleotide
  Antisense strand to SEQ ID NO: 1439088
cauuucgaucgucugaucc

SEQ ID NO: 1439090 - RNA, 19 nt, Artificial Sequence
  Description of Artificial Sequence: Synthetic oligonucleotide
  Sense strand starting at position 1101 of SEQ ID NO: 1243756
gcgaagcuggucguagauu

SEQ ID NO: 1439091 - RNA, 19 nt, Artificial Sequence
  Description of Artificial Sequence: Synthetic oligonucleotide
  Antisense strand to SEQ ID NO: 1439090
aaucuacgaccagcuucgc

SEQ ID NO: 1439092 - RNA, 19 nt, Artificial Sequence
  Description of Artificial Sequence: Synthetic oligonucleotide
  Sense strand starting at position 2267 of SEQ ID NO: 1243756
gggauuucgucgucgcaaa

SEQ ID NO: 1439093 - RNA, 19 nt, Artificial Sequence
  Description of Artificial Sequence: Synthetic oligonucleotide
  Antisense strand to SEQ ID NO: 1439092
uuugcgacgacgaaauccc

SEQ ID NO: 1439094 - RNA, 19 nt, Artificial Sequence
  Description of Artificial Sequence: Synthetic oligonucleotide
  Sense strand starting at position 2268 of SEQ ID NO: 1243756
ggauuucgucgucgcaaag

SEQ ID NO: 1439095 - RNA, 19 nt, Artificial Sequence
  Description of Artificial Sequence: Synthetic oligonucleotide
  Antisense strand to SEQ ID NO: 1439094
cuuugcgacgacgaaaucc

SEQ ID NO: 1439096 - RNA, 19 nt, Artificial Sequence
  Description of Artificial Sequence: Synthetic oligonucleotide
  Sense strand starting at position 2367 of SEQ ID NO: 1243756
agcuaugugaaucaacgua

SEQ ID NO: 1439097 - RNA, 19 nt, Artificial Sequence
  Description of Artificial Sequence: Synthetic oligonucleotide
  Antisense strand to SEQ ID NO: 1439096
uacguugauucacauagcu

SEQ ID NO: 1439098 - RNA, 19 nt, Artificial Sequence
  Description of Artificial Sequence: Synthetic oligonucleotide
  Sense strand starting at position 2372 of SEQ ID NO: 1243756
ugugaaucaacguagauga

SEQ ID NO: 1439099 - RNA, 19 nt, Artificial Sequence
  Description of Artificial Sequence: Synthetic oligonucleotide
  Antisense strand to SEQ ID NO: 1439098
ucaucuacguugauucaca

SEQ ID NO: 1439100 - RNA, 19 nt, Artificial Sequence
  Description of Artificial Sequence: Synthetic oligonucleotide
  Sense strand starting at position 2385 of SEQ ID NO: 1243756
agaugaaucucagaaauaa

SEQ ID NO: 1439101 - RNA, 19 nt, Artificial Sequence
  Description of Artificial Sequence: Synthetic oligonucleotide
  Antisense strand to SEQ ID NO: 1439100
uuauuucugagauucaucu

SEQ ID NO: 1439102 - RNA, 19 nt, Artificial Sequence
  Description of Artificial Sequence: Synthetic oligonucleotide
  Sense strand starting at position 2426 of SEQ ID NO: 1243756
aggcaaugguuguuuacaa

SEQ ID NO: 1439103 - RNA, 19 nt, Artificial Sequence
  Description of Artificial Sequence: Synthetic oligonucleotide
  Antisense strand to SEQ ID NO: 1439102
uuguaaacaaccauugccu

SEQ ID NO: 1439104 - RNA, 19 nt, Artificial Sequence
  Description of Artificial Sequence: Synthetic oligonucleotide
  Sense strand starting at position 2547 of SEQ ID NO: 1243756
ucaguacuuguaugcaaga

SEQ ID NO: 1439105 - RNA, 19 nt, Artificial Sequence
  Description of Artificial Sequence: Synthetic oligonucleotide
  Antisense strand to SEQ ID NO: 1439104
ucuugcauacaaguacuga

SEQ ID NO: 1439106 - RNA, 19 nt, Artificial Sequence
  Description of Artificial Sequence: Synthetic oligonucleotide
  Sense strand starting at position 2548 of SEQ ID NO: 1243756
caguacuuguaugcaagau

SEQ ID NO: 1439107 - RNA, 19 nt, Artificial Sequence
  Description of Artificial Sequence: Synthetic oligonucleotide
  Antisense strand to SEQ ID NO: 1439106
aucuugcauacaaguacug

SEQ ID NO: 1439108 - RNA, 19 nt, Artificial Sequence
  Description of Artificial Sequence: Synthetic oligonucleotide
  Sense strand starting at position 2549 of SEQ ID NO: 1243756
aguacuuguaugcaagaug

SEQ ID NO: 1439109 - RNA, 19 nt, Artificial Sequence
  Description of Artificial Sequence: Synthetic oligonucleotide
  Antisense strand to SEQ ID NO: 1439108
caucuugcauacaaguacu

SEQ ID NO: 1439110 - RNA, 19 nt, Artificial Sequence
  Description of Artificial Sequence: Synthetic oligonucleotide
  Sense strand starting at position 2552 of SEQ ID NO: 1243756
acuuguaugcaagaugaac

SEQ ID NO: 1439111 - RNA, 19 nt, Artificial Sequence
  Description of Artificial Sequence: Synthetic oligonucleotide
  Antisense strand to SEQ ID NO: 1439110
guucaucuugcauacaagu

SEQ ID NO: 1439112 - RNA, 19 nt, Artificial Sequence
  Description of Artificial Sequence: Synthetic oligonucleotide
  Sense strand starting at position 2592 of SEQ ID NO: 1243756
gugggaguguuauuacauc

SEQ ID NO: 1439113 - RNA, 19 nt, Artificial Sequence
  Description of Artificial Sequence: Synthetic oligonucleotide
  Antisense strand to SEQ ID NO: 1439112
gauguaauaacacucccac

SEQ ID NO: 1439114 - RNA, 19 nt, Artificial Sequence
  Description of Artificial Sequence: Synthetic oligonucleotide
  Sense strand starting at position 2635 of SEQ ID NO: 1243756
cucgguaucuauuuccauu

SEQ ID NO: 1439115 - RNA, 19 nt, Artificial Sequence
  Description of Artificial Sequence: Synthetic oligonucleotide
  Antisense strand to SEQ ID NO: 1439114
aauggaaauagauaccgag

SEQ ID NO: 1439116 - RNA, 19 nt, Artificial Sequence
  Description of Artificial Sequence: Synthetic oligonucleotide
  Sense strand starting at position 2686 of SEQ ID NO: 1243756
acuaaauuccgagggcuga

SEQ ID NO: 1439117 - RNA, 19 nt, Artificial Sequence
  Description of Artificial Sequence: Synthetic oligonucleotide
  Antisense strand to SEQ ID NO: 1439116
ucagcccucggaauuuagu

SEQ ID NO: 1439118 - RNA, 19 nt, Artificial Sequence
  Description of Artificial Sequence: Synthetic oligonucleotide
  Sense strand starting at position 2745 of SEQ ID NO: 1243756
ugagguuugaucugccaaa

SEQ ID NO: 1439119 - RNA, 19 nt, Artificial Sequence
  Description of Artificial Sequence: Synthetic oligonucleotide
  Antisense strand to SEQ ID NO: 1439118
uuuggcagaucaaaccuca

SEQ ID NO: 1439120 - RNA, 19 nt, Artificial Sequence
  Description of Artificial Sequence: Synthetic oligonucleotide
  Sense strand starting at position 2746 of SEQ ID NO: 1243756
gagguuugaucugccaaac

SEQ ID NO: 1439121 - RNA, 19 nt, Artificial Sequence
  Description of Artificial Sequence: Synthetic oligonucleotide
  Antisense strand to SEQ ID NO: 1439120
guuuggcagaucaaaccuc

SEQ ID NO: 1439122 - RNA, 19 nt, Artificial Sequence
  Description of Artificial Sequence: Synthetic oligonucleotide
  Sense strand starting at position 2836 of SEQ ID NO: 1243756
gugaauucccaguacaaau

SEQ ID NO: 1439123 - RNA, 19 nt, Artificial Sequence
  Description of Artificial Sequence: Synthetic oligonucleotide
  Antisense strand to SEQ ID NO: 1439122
auuuguacugggaauucac

SEQ ID NO: 1439124 - RNA, 19 nt, Artificial Sequence
  Description of Artificial Sequence: Synthetic oligonucleotide
  Sense strand starting at position 2905 of SEQ ID NO: 1243756
uuaguuucugcauagcuua

SEQ ID NO: 1439125 - RNA, 19 nt, Artificial Sequence
  Description of Artificial Sequence: Synthetic oligonucleotide
  Antisense strand to SEQ ID NO: 1439124
uaagcuaugcagaaacuaa

SEQ ID NO: 1439126 - RNA, 19 nt, Artificial Sequence
  Description of Artificial Sequence: Synthetic oligonucleotide
  Sense strand starting at position 2971 of SEQ ID NO: 1243756
cucccauuagucuggaaau

SEQ ID NO: 1439127 - RNA, 19 nt, Artificial Sequence
  Description of Artificial Sequence: Synthetic oligonucleotide
  Antisense strand to SEQ ID NO: 1439126
auuuccagacuaaugggag

SEQ ID NO: 1439128 - RNA, 19 nt, Artificial Sequence
  Description of Artificial Sequence: Synthetic oligonucleotide
  Sense strand starting at position 2994 of SEQ ID NO: 1243756
ugacgagaacuuugucuug

SEQ ID NO: 1439129 - RNA, 19 nt, Artificial Sequence
  Description of Artificial Sequence: Synthetic oligonucleotide
  Antisense strand to SEQ ID NO: 1439128
caagacaaaguucucguca

SEQ ID NO: 1439130 - RNA, 19 nt, Artificial Sequence
  Description of Artificial Sequence: Synthetic oligonucleotide
  Sense strand starting at position 2996 of SEQ ID NO: 1243756
acgagaacuuugucuugau

SEQ ID NO: 1439131 - RNA, 19 nt, Artificial Sequence
  Description of Artificial Sequence: Synthetic oligonucleotide
  Antisense strand to SEQ ID NO: 1439130
aucaagacaaaguucucgu

SEQ ID NO: 1439132 - RNA, 19 nt, Artificial Sequence
  Description of Artificial Sequence: Synthetic oligonucleotide
  Sense strand starting at position 2997 of SEQ ID NO: 1243756
cgagaacuuugucuugauc

SEQ ID NO: 1439133 - RNA, 19 nt, Artificial Sequence
  Description of Artificial Sequence: Synthetic oligonucleotide
  Antisense strand to SEQ ID NO: 1439132
gaucaagacaaaguucucg

SEQ ID NO: 1439134 - RNA, 19 nt, Artificial Sequence
  Description of Artificial Sequence: Synthetic oligonucleotide
  Sense strand starting at position 3065 of SEQ ID NO: 1243756
cucaaucaauaugugugaa

SEQ ID NO: 1439135 - RNA, 19 nt, Artificial Sequence
  Description of Artificial Sequence: Synthetic oligonucleotide
  Antisense strand to SEQ ID NO: 1439134
uucacacauauugauugag

SEQ ID NO: 1439136 - RNA, 19 nt, Artificial Sequence
  Description of Artificial Sequence: Synthetic oligonucleotide
  Sense strand starting at position 3067 of SEQ ID NO: 1243756
caaucaauaugugugaaug

SEQ ID NO: 1439137 - RNA, 19 nt, Artificial Sequence
  Description of Artificial Sequence: Synthetic oligonucleotide
  Antisense strand to SEQ ID NO: 1439136
cauucacacauauugauug

SEQ ID NO: 1439138 - RNA, 19 nt, Artificial Sequence
  Description of Artificial Sequence: Synthetic oligonucleotide
  Sense strand starting at position 3068 of SEQ ID NO: 1243756
aaucaauaugugugaauga

SEQ ID NO: 1439139 - RNA, 19 nt, Artificial Sequence
  Description of Artificial Sequence: Synthetic oligonucleotide
  Antisense strand to SEQ ID NO: 1439138
ucauucacacauauugauu

SEQ ID NO: 1439140 - RNA, 19 nt, Artificial Sequence
  Description of Artificial Sequence: Synthetic oligonucleotide
  Sense strand starting at position 3111 of SEQ ID NO: 1243756
augaauccuugggauauuu

SEQ ID NO: 1439141 - RNA, 19 nt, Artificial Sequence
  Description of Artificial Sequence: Synthetic oligonucleotide
  Antisense strand to SEQ ID NO: 1439140
aaauaucccaaggauucau

SEQ ID NO: 1439142 - RNA, 19 nt, Artificial Sequence
  Description of Artificial Sequence: Synthetic oligonucleotide
  Sense strand starting at position 3165 of SEQ ID NO: 1243756
cguuuccuaucuguggaaa

SEQ ID NO: 1439143 - RNA, 19 nt, Artificial Sequence
  Description of Artificial Sequence: Synthetic oligonucleotide
  Antisense strand to SEQ ID NO: 1439142
uuuccacagauaggaaacg

SEQ ID NO: 1439144 - RNA, 19 nt, Artificial Sequence
  Description of Artificial Sequence: Synthetic oligonucleotide
  Sense strand starting at position 3166 of SEQ ID NO: 1243756
guuuccuaucuguggaaau

SEQ ID NO: 1439145 - RNA, 19 nt, Artificial Sequence
  Description of Artificial Sequence: Synthetic oligonucleotide
  Antisense strand to SEQ ID NO: 1439144
auuuccacagauaggaaac

SEQ ID NO: 1439146 - RNA, 19 nt, Artificial Sequence
  Description of Artificial Sequence: Synthetic oligonucleotide
  Sense strand starting at position 3168 of SEQ ID NO: 1243756
uuccuaucuguggaaauac

SEQ ID NO: 1439147 - RNA, 19 nt, Artificial Sequence
  Description of Artificial Sequence: Synthetic oligonucleotide
  Antisense strand to SEQ ID NO: 1439146
guauuuccacagauaggaa

SEQ ID NO: 1439148 - RNA, 19 nt, Artificial Sequence
  Description of Artificial Sequence: Synthetic oligonucleotide
  Sense strand starting at position 3333 of SEQ ID NO: 1243756
ugacaacagagguguaguu

SEQ ID NO: 1439149 - RNA, 19 nt, Artificial Sequence
  Description of Artificial Sequence: Synthetic oligonucleotide
  Antisense strand to SEQ ID NO: 1439148
aacuacaccucuguuguca

SEQ ID NO: 1439150 - RNA, 19 nt, Artificial Sequence
  Description of Artificial Sequence: Synthetic oligonucleotide
  Sense strand starting at position 3353 of SEQ ID NO: 1243756
cccuaugugucaucaaaua

SEQ ID NO: 1439151 - RNA, 19 nt, Artificial Sequence
  Description of Artificial Sequence: Synthetic oligonucleotide
  Antisense strand to SEQ ID NO: 1439150
uauuugaugacacauaggg

SEQ ID NO: 1439152 - RNA, 19 nt, Artificial Sequence
  Description of Artificial Sequence: Synthetic oligonucleotide
  Sense strand starting at position 3414 of SEQ ID NO: 1243756
cugcaaaguccagagguaa

SEQ ID NO: 1439153 - RNA, 19 nt, Artificial Sequence
  Description of Artificial Sequence: Synthetic oligonucleotide
  Antisense strand to SEQ ID NO: 1439152
uuaccucuggacuuugcag

SEQ ID NO: 1439154 - RNA, 19 nt, Artificial Sequence
  Description of Artificial Sequence: Synthetic oligonucleotide
  Sense strand starting at position 3836 of SEQ ID NO: 1243756
auuacauaacagugcagau

SEQ ID NO: 1439155 - RNA, 19 nt, Artificial Sequence
  Description of Artificial Sequence: Synthetic oligonucleotide
  Antisense strand to SEQ ID NO: 1439154
aucugcacuguuauguaau

SEQ ID NO: 1439156 - RNA, 19 nt, Artificial Sequence
  Description of Artificial Sequence: Synthetic oligonucleotide
  Sense strand starting at position 3932 of SEQ ID NO: 1243756
ggucauuacgauugugagu

SEQ ID NO: 1439157 - RNA, 19 nt, Artificial Sequence
  Description of Artificial Sequence: Synthetic oligonucleotide
  Antisense strand to SEQ ID NO: 1439156
acucacaaucguaaugacc

SEQ ID NO: 1439158 - RNA, 19 nt, Artificial Sequence
  Description of Artificial Sequence: Synthetic oligonucleotide
  Sense strand starting at position 286 of SEQ ID NO: 1243757
uguauuacgccugagaagu

SEQ ID NO: 1439159 - RNA, 19 nt, Artificial Sequence
  Description of Artificial Sequence: Synthetic oligonucleotide
  Antisense strand to SEQ ID NO: 1439158
acuucucaggcguaauaca

SEQ ID NO: 1439160 - RNA, 19 nt, Artificial Sequence
  Description of Artificial Sequence: Synthetic oligonucleotide
  Sense strand starting at position 292 of SEQ ID NO: 1243757
acgccugagaaguacuuau

SEQ ID NO: 1439161 - RNA, 19 nt, Artificial Sequence
  Description of Artificial Sequence: Synthetic oligonucleotide
  Antisense strand to SEQ ID NO: 1439160
auaaguacuucucaggcgu

SEQ ID NO: 1439162 - RNA, 19 nt, Artificial Sequence
  Description of Artificial Sequence: Synthetic oligonucleotide
  Sense strand starting at position 587 of SEQ ID NO: 1243757
caagaagagcuuggugaga

SEQ ID NO: 1439163 - RNA, 19 nt, Artificial Sequence
  Description of Artificial Sequence: Synthetic oligonucleotide
  Antisense strand to SEQ ID NO: 1439162
ucucaccaagcucuucuug

SEQ ID NO: 1439164 - RNA, 19 nt, Artificial Sequence
  Description of Artificial Sequence: Synthetic oligonucleotide
  Sense strand starting at position 589 of SEQ ID NO: 1243757
agaagagcuuggugagaug

SEQ ID NO: 1439165 - RNA, 19 nt, Artificial Sequence
  Description of Artificial Sequence: Synthetic oligonucleotide
  Antisense strand to SEQ ID NO: 1439164
caucucaccaagcucuucu

SEQ ID NO: 1439166 - RNA, 19 nt, Artificial Sequence
  Description of Artificial Sequence: Synthetic oligonucleotide
  Sense strand starting at position 633 of SEQ ID NO: 1243757
ggguauguguguuugugaa

SEQ ID NO: 1439167 - RNA, 19 nt, Artificial Sequence
  Description of Artificial Sequence: Synthetic oligonucleotide
  Antisense strand to SEQ ID NO: 1439166
uucacaaacacacauaccc

SEQ ID NO: 1439168 - RNA, 19 nt, Artificial Sequence
  Description of Artificial Sequence: Synthetic oligonucleotide
  Sense strand starting at position 634 of SEQ ID NO: 1243757
gguauguguguuugugaag

SEQ ID NO: 1439169 - RNA, 19 nt, Artificial Sequence
  Description of Artificial Sequence: Synthetic oligonucleotide
  Antisense strand to SEQ ID NO: 1439168
cuucacaaacacacauacc

SEQ ID NO: 1439170 - RNA, 19 nt, Artificial Sequence
  Description of Artificial Sequence: Synthetic oligonucleotide
  Sense strand starting at position 639 of SEQ ID NO: 1243757
guguguuugugaagguguc

SEQ ID NO: 1439171 - RNA, 19 nt, Artificial Sequence
  Description of Artificial Sequence: Synthetic oligonucleotide
  Antisense strand to SEQ ID NO: 1439170
gacaccuucacaaacacac

SEQ ID NO: 1439172 - RNA, 19 nt, Artificial Sequence
  Description of Artificial Sequence: Synthetic oligonucleotide
  Sense strand starting at position 670 of SEQ ID NO: 1243757
ugcaauuccugccugcaua

SEQ ID NO: 1439173 - RNA, 19 nt, Artificial Sequence
  Description of Artificial Sequence: Synthetic oligonucleotide
  Antisense strand to SEQ ID NO: 1439172
uaugcaggcaggaauugca

SEQ ID NO: 1439174 - RNA, 19 nt, Artificial Sequence
  Description of Artificial Sequence: Synthetic oligonucleotide
  Sense strand starting at position 671 of SEQ ID NO: 1243757
gcaauuccugccugcauau

SEQ ID NO: 1439175 - RNA, 19 nt, Artificial Sequence
  Description of Artificial Sequence: Synthetic oligonucleotide
  Antisense strand to SEQ ID NO: 1439174
auaugcaggcaggaauugc

SEQ ID NO: 1439176 - RNA, 19 nt, Artificial Sequence
  Description of Artificial Sequence: Synthetic oligonucleotide
  Sense strand starting at position 700 of SEQ ID NO: 1243757
gcgaauggauaacguauua

SEQ ID NO: 1439177 - RNA, 19 nt, Artificial Sequence
  Description of Artificial Sequence: Synthetic oligonucleotide
  Antisense strand to SEQ ID NO: 1439176
uaauacguuauccauucgc

SEQ ID NO: 1439178 - RNA, 19 nt, Artificial Sequence
  Description of Artificial Sequence: Synthetic oligonucleotide
  Sense strand starting at position 705 of SEQ ID NO: 1243757
uggauaacguauuaacagu

SEQ ID NO: 1439179 - RNA, 19 nt, Artificial Sequence
  Description of Artificial Sequence: Synthetic oligonucleotide
  Antisense strand to SEQ ID NO: 1439178
acuguuaauacguuaucca

SEQ ID NO: 1439180 - RNA, 19 nt, Artificial Sequence
  Description of Artificial Sequence: Synthetic oligonucleotide
  Sense strand starting at position 713 of SEQ ID NO: 1243757
guauuaacagucugugugu

SEQ ID NO: 1439181 - RNA, 19 nt, Artificial Sequence
  Description of Artificial Sequence: Synthetic oligonucleotide
  Antisense strand to SEQ ID NO: 1439180
acacacagacuguuaauac

SEQ ID NO: 1439182 - RNA, 19 nt, Artificial Sequence
  Description of Artificial Sequence: Synthetic oligonucleotide
  Sense strand starting at position 728 of SEQ ID NO: 1243757
guguguagacuaggaaugu

SEQ ID NO: 1439183 - RNA, 19 nt, Artificial Sequence
  Description of Artificial Sequence: Synthetic oligonucleotide
  Antisense strand to SEQ ID NO: 1439182
acauuccuagucuacacac

SEQ ID NO: 1439184 - RNA, 19 nt, Artificial Sequence
  Description of Artificial Sequence: Synthetic oligonucleotide
  Sense strand starting at position 858 of SEQ ID NO: 1243757
ccuggaaguccuggguuca

SEQ ID NO: 1439185 - RNA, 19 nt, Artificial Sequence
  Description of Artificial Sequence: Synthetic oligonucleotide
  Antisense strand to SEQ ID NO: 1439184
ugaacccaggacuuccagg

SEQ ID NO: 1439186 - RNA, 19 nt, Artificial Sequence
  Description of Artificial Sequence: Synthetic oligonucleotide
  Sense strand starting at position 946 of SEQ ID NO: 1243757
aguuucacuguugguguua

SEQ ID NO: 1439187 - RNA, 19 nt, Artificial Sequence
  Description of Artificial Sequence: Synthetic oligonucleotide
  Antisense strand to SEQ ID NO: 1439186
uaacaccaacagugaaacu

SEQ ID NO: 1439188 - RNA, 19 nt, Artificial Sequence
  Description of Artificial Sequence: Synthetic oligonucleotide
  Sense strand starting at position 959 of SEQ ID NO: 1243757
guguuacauugauagaagg

SEQ ID NO: 1439189 - RNA, 19 nt, Artificial Sequence
  Description of Artificial Sequence: Synthetic oligonucleotide
  Antisense strand to SEQ ID NO: 1439188
ccuucuaucaauguaacac

SEQ ID NO: 1439190 - RNA, 19 nt, Artificial Sequence
  Description of Artificial Sequence: Synthetic oligonucleotide
  Sense strand starting at position 1023 of SEQ ID NO: 1243757
ggguguuacacugauauga

SEQ ID NO: 1439191 - RNA, 19 nt, Artificial Sequence
  Description of Artificial Sequence: Synthetic oligonucleotide
  Antisense strand to SEQ ID NO: 1439190
ucauaucaguguaacaccc

SEQ ID NO: 1439192 - RNA, 19 nt, Artificial Sequence
  Description of Artificial Sequence: Synthetic oligonucleotide
  Sense strand starting at position 1025 of SEQ ID NO: 1243757
guguuacacugauaugaag

SEQ ID NO: 1439193 - RNA, 19 nt, Artificial Sequence
  Description of Artificial Sequence: Synthetic oligonucleotide
  Antisense strand to SEQ ID NO: 1439192
cuucauaucaguguaacac

SEQ ID NO: 1439194 - RNA, 19 nt, Artificial Sequence
  Description of Artificial Sequence: Synthetic oligonucleotide
  Sense strand starting at position 1262 of SEQ ID NO: 1243757
cccuucucugugcaugaga

SEQ ID NO: 1439195 - RNA, 19 nt, Artificial Sequence
  Description of Artificial Sequence: Synthetic oligonucleotide
  Antisense strand to SEQ ID NO: 1439194
ucucaugcacagagaaggg

SEQ ID NO: 1439196 - RNA, 19 nt, Artificial Sequence
  Description of Artificial Sequence: Synthetic oligonucleotide
  Sense strand starting at position 1264 of SEQ ID NO: 1243757
cuucucugugcaugagagu

SEQ ID NO: 1439197 - RNA, 19 nt, Artificial Sequence
  Description of Artificial Sequence: Synthetic oligonucleotide
  Antisense strand to SEQ ID NO: 1439196
acucucaugcacagagaag

SEQ ID NO: 1439198 - RNA, 19 nt, Artificial Sequence
  Description of Artificial Sequence: Synthetic oligonucleotide
  Sense strand starting at position 1319 of SEQ ID NO: 1243757
gggaaagugucuugugagg

SEQ ID NO: 1439199 - RNA, 19 nt, Artificial Sequence
  Description of Artificial Sequence: Synthetic oligonucleotide
  Antisense strand to SEQ ID NO: 1439198
ccucacaagacacuuuccc

SEQ ID NO: 1439200 - RNA, 19 nt, Artificial Sequence
  Description of Artificial Sequence: Synthetic oligonucleotide
  Sense strand starting at position 1321 of SEQ ID NO: 1243757
gaaagugucuugugaggag

SEQ ID NO: 1439201 - RNA, 19 nt, Artificial Sequence
  Description of Artificial Sequence: Synthetic oligonucleotide
  Antisense strand to SEQ ID NO: 1439200
cuccucacaagacacuuuc

SEQ ID NO: 1439202 - RNA, 19 nt, Artificial Sequence
  Description of Artificial Sequence: Synthetic oligonucleotide
  Sense strand starting at position 1355 of SEQ ID NO: 1243757
ggcgcagacguuuaagacu

SEQ ID NO: 1439203 - RNA, 19 nt, Artificial Sequence
  Description of Artificial Sequence: Synthetic oligonucleotide
  Antisense strand to SEQ ID NO: 1439202
agucuuaaacgucugcgcc

SEQ ID NO: 1439204 - RNA, 19 nt, Artificial Sequence
  Description of Artificial Sequence: Synthetic oligonucleotide
  Sense strand starting at position 1361 of SEQ ID NO: 1243757
gacguuuaagacugccagu

SEQ ID NO: 1439205 - RNA, 19 nt, Artificial Sequence
  Description of Artificial Sequence: Synthetic oligonucleotide
  Antisense strand to SEQ ID NO: 1439204
acuggcagucuuaaacguc

SEQ ID NO: 1439206 - RNA, 19 nt, Artificial Sequence
  Description of Artificial Sequence: Synthetic oligonucleotide
  Sense strand starting at position 1425 of SEQ ID NO: 1243757
cuggaaggcucuuaggaau

SEQ ID NO: 1439207 - RNA, 19 nt, Artificial Sequence
  Description of Artificial Sequence: Synthetic oligonucleotide
  Antisense strand to SEQ ID NO: 1439206
auuccuaagagccuuccag

SEQ ID NO: 1439208 - RNA, 19 nt, Artificial Sequence
  Description of Artificial Sequence: Synthetic oligonucleotide
  Sense strand starting at position 1431 of SEQ ID NO: 1243757
ggcucuuaggaauggugga

SEQ ID NO: 1439209 - RNA, 19 nt, Artificial Sequence
  Description of Artificial Sequence: Synthetic oligonucleotide
  Antisense strand to SEQ ID NO: 1439208
uccaccauuccuaagagcc

SEQ ID NO: 1439210 - RNA, 19 nt, Artificial Sequence
  Description of Artificial Sequence: Synthetic oligonucleotide
  Sense strand starting at position 1432 of SEQ ID NO: 1243757
gcucuuaggaaugguggau

SEQ ID NO: 1439211 - RNA, 19 nt, Artificial Sequence
  Description of Artificial Sequence: Synthetic oligonucleotide
  Antisense strand to SEQ ID NO: 1439210
auccaccauuccuaagagc

SEQ ID NO: 1439212 - RNA, 19 nt, Artificial Sequence
  Description of Artificial Sequence: Synthetic oligonucleotide
  Sense strand starting at position 1594 of SEQ ID NO: 1243757
uccggucugaaggguaaau

SEQ ID NO: 1439213 - RNA, 19 nt, Artificial Sequence
  Description of Artificial Sequence: Synthetic oligonucleotide
  Antisense strand to SEQ ID NO: 1439212
auuuacccuucagaccgga

SEQ ID NO: 1439214 - RNA, 19 nt, Artificial Sequence
  Description of Artificial Sequence: Synthetic oligonucleotide
  Sense strand starting at position 2240 of SEQ ID NO: 1243757
gugcuucugucugcggaga

SEQ ID NO: 1439215 - RNA, 19 nt, Artificial Sequence
  Description of Artificial Sequence: Synthetic oligonucleotide
  Antisense strand to SEQ ID NO: 1439214
ucuccgcagacagaagcac

SEQ ID NO: 1439216 - RNA, 19 nt, Artificial Sequence
  Description of Artificial Sequence: Synthetic oligonucleotide
  Sense strand starting at position 2255 of SEQ ID NO: 1243757
gagaccuccgcgcauagaa

SEQ ID NO: 1439217 - RNA, 19 nt, Artificial Sequence
  Description of Artificial Sequence: Synthetic oligonucleotide
  Antisense strand to SEQ ID NO: 1439216
uucuaugcgcggaggucuc

SEQ ID NO: 1439218 - RNA, 19 nt, Artificial Sequence
  Description of Artificial Sequence: Synthetic oligonucleotide
  Sense strand starting at position 2286 of SEQ ID NO: 1243757
gugcgucugucggaaaccu

SEQ ID NO: 1439219 - RNA, 19 nt, Artificial Sequence
  Description of Artificial Sequence: Synthetic oligonucleotide
  Antisense strand to SEQ ID NO: 1439218
agguuuccgacagacgcac

SEQ ID NO: 1439220 - RNA, 19 nt, Artificial Sequence
  Description of Artificial Sequence: Synthetic oligonucleotide
  Sense strand starting at position 2585 of SEQ ID NO: 1243757
cuccuagaucgcugggauc

SEQ ID NO: 1439221 - RNA, 19 nt, Artificial Sequence
  Description of Artificial Sequence: Synthetic oligonucleotide
  Antisense strand to SEQ ID NO: 1439220
gaucccagcgaucuaggag

SEQ ID NO: 1439222 - RNA, 19 nt, Artificial Sequence
  Description of Artificial Sequence: Synthetic oligonucleotide
  Sense strand starting at position 2641 of SEQ ID NO: 1243757
uuuaaaugcuguguauucu

SEQ ID NO: 1439223 - RNA, 19 nt, Artificial Sequence
  Description of Artificial Sequence: Synthetic oligonucleotide
  Antisense strand to SEQ ID NO: 1439222
agaauacacagcauuuaaa

SEQ ID NO: 1439224 - RNA, 19 nt, Artificial Sequence
  Description of Artificial Sequence: Synthetic oligonucleotide
  Sense strand starting at position 2878 of SEQ ID NO: 1243757
ggguccucuccugaauggu

SEQ ID NO: 1439225 - RNA, 19 nt, Artificial Sequence
  Description of Artificial Sequence: Synthetic oligonucleotide
  Antisense strand to SEQ ID NO: 1439224
accauucaggagaggaccc

SEQ ID NO: 1439226 - RNA, 19 nt, Artificial Sequence
  Description of Artificial Sequence: Synthetic oligonucleotide
  Sense strand starting at position 2887 of SEQ ID NO: 1243757
ccugaauggucucugcuuu

SEQ ID NO: 1439227 - RNA, 19 nt, Artificial Sequence
  Description of Artificial Sequence: Synthetic oligonucleotide
  Antisense strand to SEQ ID NO: 1439226
aaagcagagaccauucagg

SEQ ID NO: 1439228 - RNA, 19 nt, Artificial Sequence
  Description of Artificial Sequence: Synthetic oligonucleotide
  Sense strand starting at position 3149 of SEQ ID NO: 1243757
gcccauucugggcaacgua

SEQ ID NO: 1439229 - RNA, 19 nt, Artificial Sequence
  Description of Artificial Sequence: Synthetic oligonucleotide
  Antisense strand to SEQ ID NO: 1439228
uacguugcccagaaugggc

SEQ ID NO: 1439230 - RNA, 19 nt, Artificial Sequence
  Description of Artificial Sequence: Synthetic oligonucleotide
  Sense strand starting at position 3631 of SEQ ID NO: 1243757
aacaaaguguggcuuacaa

SEQ ID NO: 1439231 - RNA, 19 nt, Artificial Sequence
  Description of Artificial Sequence: Synthetic oligonucleotide
  Antisense strand to SEQ ID NO: 1439230
uuguaagccacacuuuguu

SEQ ID NO: 1439232 - RNA, 19 nt, Artificial Sequence
  Description of Artificial Sequence: Synthetic oligonucleotide
  Sense strand starting at position 3643 of SEQ ID NO: 1243757
cuuacaaggccugguauga

SEQ ID NO: 1439233 - RNA, 19 nt, Artificial Sequence
  Description of Artificial Sequence: Synthetic oligonucleotide
  Antisense strand to SEQ ID NO: 1439232
ucauaccaggccuuguaag

SEQ ID NO: 1439234 - RNA, 19 nt, Artificial Sequence
  Description of Artificial Sequence: Synthetic oligonucleotide
  Sense strand starting at position 3684 of SEQ ID NO: 1243757
agguuuacccuccacagau

SEQ ID NO: 1439235 - RNA, 19 nt, Artificial Sequence
  Description of Artificial Sequence: Synthetic oligonucleotide
  Antisense strand to SEQ ID NO: 1439234
aucuguggaggguaaaccu

SEQ ID NO: 1439236 - RNA, 19 nt, Artificial Sequence
  Description of Artificial Sequence: Synthetic oligonucleotide
  Sense strand starting at position 3691 of SEQ ID NO: 1243757
cccuccacagauuguauua

SEQ ID NO: 1439237 - RNA, 19 nt, Artificial Sequence
  Description of Artificial Sequence: Synthetic oligonucleotide
  Antisense strand to SEQ ID NO: 1439236
uaauacaaucuguggaggg

SEQ ID NO: 1439238 - RNA, 19 nt, Artificial Sequence
  Description of Artificial Sequence: Synthetic oligonucleotide
  Sense strand starting at position 437 of SEQ ID NO: 1243758
ugagucaacacauguguga

SEQ ID NO: 1439239 - RNA, 19 nt, Artificial Sequence
  Description of Artificial Sequence: Synthetic oligonucleotide
  Antisense strand to SEQ ID NO: 1439238
ucacacauguguugacuca

SEQ ID NO: 1439240 - RNA, 19 nt, Artificial Sequence
  Description of Artificial Sequence: Synthetic oligonucleotide
  Sense strand starting at position 439 of SEQ ID NO: 1243758
agucaacacaugugugacu

SEQ ID NO: 1439241 - RNA, 19 nt, Artificial Sequence
  Description of Artificial Sequence: Synthetic oligonucleotide
  Antisense strand to SEQ ID NO: 1439240
agucacacauguguugacu

SEQ ID NO: 1439242 - RNA, 19 nt, Artificial Sequence
  Description of Artificial Sequence: Synthetic oligonucleotide
  Sense strand starting at position 446 of SEQ ID NO: 1243758
acaugugugacucauguau

SEQ ID NO: 1439243 - RNA, 19 nt, Artificial Sequence
  Description of Artificial Sequence: Synthetic oligonucleotide
  Antisense strand to SEQ ID NO: 1439242
auacaugagucacacaugu

SEQ ID NO: 1439244 - RNA, 19 nt, Artificial Sequence
  Description of Artificial Sequence: Synthetic oligonucleotide
  Sense strand starting at position 452 of SEQ ID NO: 1243758
gugacucauguauguccau

SEQ ID NO: 1439245 - RNA, 19 nt, Artificial Sequence
  Description of Artificial Sequence: Synthetic oligonucleotide
  Antisense strand to SEQ ID NO: 1439244
auggacauacaugagucac

SEQ ID NO: 1439246 - RNA, 19 nt, Artificial Sequence
  Description of Artificial Sequence: Synthetic oligonucleotide
  Sense strand starting at position 453 of SEQ ID NO: 1243758
ugacucauguauguccaua

SEQ ID NO: 1439247 - RNA, 19 nt, Artificial Sequence
  Description of Artificial Sequence: Synthetic oligonucleotide
  Antisense strand to SEQ ID NO: 1439246
uauggacauacaugaguca

SEQ ID NO: 1439248 - RNA, 19 nt, Artificial Sequence
  Description of Artificial Sequence: Synthetic oligonucleotide
  Sense strand starting at position 455 of SEQ ID NO: 1243758
acucauguauguccauaua

SEQ ID NO: 1439249 - RNA, 19 nt, Artificial Sequence
  Description of Artificial Sequence: Synthetic oligonucleotide
  Antisense strand to SEQ ID NO: 1439248
uauauggacauacaugagu

SEQ ID NO: 1439250 - RNA, 19 nt, Artificial Sequence
  Description of Artificial Sequence: Synthetic oligonucleotide
  Sense strand starting at position 498 of SEQ ID NO: 1243758
acaaacauuugggacuaua

SEQ ID NO: 1439251 - RNA, 19 nt, Artificial Sequence
  Description of Artificial Sequence: Synthetic oligonucleotide
  Antisense strand to SEQ ID NO: 1439250
uauagucccaaauguuugu

SEQ ID NO: 1439252 - RNA, 19 nt, Artificial Sequence
  Description of Artificial Sequence: Synthetic oligonucleotide
  Sense strand starting at position 558 of SEQ ID NO: 1243758
ccaugagucuuccugucuc

SEQ ID NO: 1439253 - RNA, 19 nt, Artificial Sequence
  Description of Artificial Sequence: Synthetic oligonucleotide
  Antisense strand to SEQ ID NO: 1439252
gagacaggaagacucaugg

SEQ ID NO: 1439254 - RNA, 19 nt, Artificial Sequence
  Description of Artificial Sequence: Synthetic oligonucleotide
  Sense strand starting at position 584 of SEQ ID NO: 1243758
caccgcuuauacguagaaa

SEQ ID NO: 1439255 - RNA, 19 nt, Artificial Sequence
  Description of Artificial Sequence: Synthetic oligonucleotide
  Antisense strand to SEQ ID NO: 1439254
uuucuacguauaagcggug

SEQ ID NO: 1439256 - RNA, 19 nt, Artificial Sequence
  Description of Artificial Sequence: Synthetic oligonucleotide
  Sense strand starting at position 585 of SEQ ID NO: 1243758
accgcuuauacguagaaac

SEQ ID NO: 1439257 - RNA, 19 nt, Artificial Sequence
  Description of Artificial Sequence: Synthetic oligonucleotide
  Antisense strand to SEQ ID NO: 1439256
guuucuacguauaagcggu

SEQ ID NO: 1439258 - RNA, 19 nt, Artificial Sequence
  Description of Artificial Sequence: Synthetic oligonucleotide
  Sense strand starting at position 587 of SEQ ID NO: 1243758
cgcuuauacguagaaacac

SEQ ID NO: 1439259 - RNA, 19 nt, Artificial Sequence
  Description of Artificial Sequence: Synthetic oligonucleotide
  Antisense strand to SEQ ID NO: 1439258
guguuucuacguauaagcg

SEQ ID NO: 1439260 - RNA, 19 nt, Artificial Sequence
  Description of Artificial Sequence: Synthetic oligonucleotide
  Sense strand starting at position 649 of SEQ ID NO: 1243758
caaacagucucggaaucuu

SEQ ID NO: 1439261 - RNA, 19 nt, Artificial Sequence
  Description of Artificial Sequence: Synthetic oligonucleotide
  Antisense strand to SEQ ID NO: 1439260
aagauuccgagacuguuug

SEQ ID NO: 1439262 - RNA, 19 nt, Artificial Sequence
  Description of Artificial Sequence: Synthetic oligonucleotide
  Sense strand starting at position 688 of SEQ ID NO: 1243758
ggagaacucugcugggaag

SEQ ID NO: 1439263 - RNA, 19 nt, Artificial Sequence
  Description of Artificial Sequence: Synthetic oligonucleotide
  Antisense strand to SEQ ID NO: 1439262
cuucccagcagaguucucc

SEQ ID NO: 1439264 - RNA, 19 nt, Artificial Sequence
  Description of Artificial Sequence: Synthetic oligonucleotide
  Sense strand starting at position 767 of SEQ ID NO: 1243758
aggugucccucccaucaga

SEQ ID NO: 1439265 - RNA, 19 nt, Artificial Sequence
  Description of Artificial Sequence: Synthetic oligonucleotide
  Antisense strand to SEQ ID NO: 1439264
ucugaugggagggacaccu

SEQ ID NO: 1439266 - RNA, 19 nt, Artificial Sequence
  Description of Artificial Sequence: Synthetic oligonucleotide
  Sense strand starting at position 914 of SEQ ID NO: 1243758
uagagaauuugcgguguga

SEQ ID NO: 1439267 - RNA, 19 nt, Artificial Sequence
  Description of Artificial Sequence: Synthetic oligonucleotide
  Antisense strand to SEQ ID NO: 1439266
ucacaccgcaaauucucua

SEQ ID NO: 1439268 - RNA, 19 nt, Artificial Sequence
  Description of Artificial Sequence: Synthetic oligonucleotide
  Sense strand starting at position 916 of SEQ ID NO: 1243758
gagaauuugcggugugagg

SEQ ID NO: 1439269 - RNA, 19 nt, Artificial Sequence
  Description of Artificial Sequence: Synthetic oligonucleotide
  Antisense strand to SEQ ID NO: 1439268
ccucacaccgcaaauucuc

SEQ ID NO: 1439270 - RNA, 19 nt, Artificial Sequence
  Description of Artificial Sequence: Synthetic oligonucleotide
  Sense strand starting at position 1034 of SEQ ID NO: 1243758
cuggaaugagucuauucuc

SEQ ID NO: 1439271 - RNA, 19 nt, Artificial Sequence
  Description of Artificial Sequence: Synthetic oligonucleotide
  Antisense strand to SEQ ID NO: 1439270
gagaauagacucauuccag

SEQ ID NO: 1439272 - RNA, 19 nt, Artificial Sequence
  Description of Artificial Sequence: Synthetic oligonucleotide
  Sense strand starting at position 1301 of SEQ ID NO: 1243758
cggcuaaucgcgaggcuga

SEQ ID NO: 1439273 - RNA, 19 nt, Artificial Sequence
  Description of Artificial Sequence: Synthetic oligonucleotide
  Antisense strand to SEQ ID NO: 1439272
ucagccucgcgauuagccg

SEQ ID NO: 1439274 - RNA, 19 nt, Artificial Sequence
  Description of Artificial Sequence: Synthetic oligonucleotide
  Sense strand starting at position 1718 of SEQ ID NO: 1243758
ggagccuucuuugugguga

SEQ ID NO: 1439275 - RNA, 19 nt, Artificial Sequence
  Description of Artificial Sequence: Synthetic oligonucleotide
  Antisense strand to SEQ ID NO: 1439274
ucaccacaaagaaggcucc

SEQ ID NO: 1439276 - RNA, 19 nt, Artificial Sequence
  Description of Artificial Sequence: Synthetic oligonucleotide
  Sense strand starting at position 1733 of SEQ ID NO: 1243758
gugagaacgcuggagugaa

SEQ ID NO: 1439277 - RNA, 19 nt, Artificial Sequence
  Description of Artificial Sequence: Synthetic oligonucleotide
  Antisense strand to SEQ ID NO: 1439276
uucacuccagcguucucac

SEQ ID NO: 1439278 - RNA, 19 nt, Artificial Sequence
  Description of Artificial Sequence: Synthetic oligonucleotide
  Sense strand starting at position 1737 of SEQ ID NO: 1243758
gaacgcuggagugaagauu

SEQ ID NO: 1439279 - RNA, 19 nt, Artificial Sequence
  Description of Artificial Sequence: Synthetic oligonucleotide
  Antisense strand to SEQ ID NO: 1439278
aaucuucacuccagcguuc

SEQ ID NO: 1439280 - RNA, 19 nt, Artificial Sequence
  Description of Artificial Sequence: Synthetic oligonucleotide
  Sense strand starting at position 1784 of SEQ ID NO: 1243758
gcuccuauaccugaucagu

SEQ ID NO: 1439281 - RNA, 19 nt, Artificial Sequence
  Description of Artificial Sequence: Synthetic oligonucleotide
  Antisense strand to SEQ ID NO: 1439280
acugaucagguauaggagc

SEQ ID NO: 1439282 - RNA, 19 nt, Artificial Sequence
  Description of Artificial Sequence: Synthetic oligonucleotide
  Sense strand starting at position 1786 of SEQ ID NO: 1243758
uccuauaccugaucaguuu

SEQ ID NO: 1439283 - RNA, 19 nt, Artificial Sequence
  Description of Artificial Sequence: Synthetic oligonucleotide
  Antisense strand to SEQ ID NO: 1439282
aaacugaucagguauagga

SEQ ID NO: 1439284 - RNA, 19 nt, Artificial Sequence
  Description of Artificial Sequence: Synthetic oligonucleotide
  Sense strand starting at position 2067 of SEQ ID NO: 1243758
gcgcauucuuacgugaugu

SEQ ID NO: 1439285 - RNA, 19 nt, Artificial Sequence
  Description of Artificial Sequence: Synthetic oligonucleotide
  Antisense strand to SEQ ID NO: 1439284
acaucacguaagaaugcgc

SEQ ID NO: 1439286 - RNA, 19 nt, Artificial Sequence
  Description of Artificial Sequence: Synthetic oligonucleotide
  Sense strand starting at position 2068 of SEQ ID NO: 1243758
cgcauucuuacgugauguc

SEQ ID NO: 1439287 - RNA, 19 nt, Artificial Sequence
  Description of Artificial Sequence: Synthetic oligonucleotide
  Antisense strand to SEQ ID NO: 1439286
gacaucacguaagaaugcg

SEQ ID NO: 1439288 - RNA, 19 nt, Artificial Sequence
  Description of Artificial Sequence: Synthetic oligonucleotide
  Sense strand starting at position 2069 of SEQ ID NO: 1243758
gcauucuuacgugauguca

SEQ ID NO: 1439289 - RNA, 19 nt, Artificial Sequence
  Description of Artificial Sequence: Synthetic oligonucleotide
  Antisense strand to SEQ ID NO: 1439288
ugacaucacguaagaaugc

SEQ ID NO: 1439290 - RNA, 19 nt, Artificial Sequence
  Description of Artificial Sequence: Synthetic oligonucleotide
  Sense strand starting at position 2193 of SEQ ID NO: 1243758
ccagacugacuaugcaaga

SEQ ID NO: 1439291 - RNA, 19 nt, Artificial Sequence
  Description of Artificial Sequence: Synthetic oligonucleotide
  Antisense strand to SEQ ID NO: 1439290
ucuugcauagucagucugg

SEQ ID NO: 1439292 - RNA, 19 nt, Artificial Sequence
  Description of Artificial Sequence: Synthetic oligonucleotide
  Sense strand starting at position 2255 of SEQ ID NO: 1243758
ggcaguuugugugcauuua

SEQ ID NO: 1439293 - RNA, 19 nt, Artificial Sequence
  Description of Artificial Sequence: Synthetic oligonucleotide
  Antisense strand to SEQ ID NO: 1439292
uaaaugcacacaaacugcc

SEQ ID NO: 1439294 - RNA, 19 nt, Artificial Sequence
  Description of Artificial Sequence: Synthetic oligonucleotide
  Sense strand starting at position 2292 of SEQ ID NO: 1243758
uuccuuuaaggugaguauu

SEQ ID NO: 1439295 - RNA, 19 nt, Artificial Sequence
  Description of Artificial Sequence: Synthetic oligonucleotide
  Antisense strand to SEQ ID NO: 1439294
aauacucaccuuaaaggaa

SEQ ID NO: 1439296 - RNA, 19 nt, Artificial Sequence
  Description of Artificial Sequence: Synthetic oligonucleotide
  Sense strand starting at position 2294 of SEQ ID NO: 1243758
ccuuuaaggugaguauucu

SEQ ID NO: 1439297 - RNA, 19 nt, Artificial Sequence
  Description of Artificial Sequence: Synthetic oligonucleotide
  Antisense strand to SEQ ID NO: 1439296
agaauacucaccuuaaagg

SEQ ID NO: 1439298 - RNA, 19 nt, Artificial Sequence
  Description of Artificial Sequence: Synthetic oligonucleotide
  Sense strand starting at position 2298 of SEQ ID NO: 1243758
uaaggugaguauucucuuu

SEQ ID NO: 1439299 - RNA, 19 nt, Artificial Sequence
  Description of Artificial Sequence: Synthetic oligonucleotide
  Antisense strand to SEQ ID NO: 1439298
aaagagaauacucaccuua

SEQ ID NO: 1439300 - RNA, 19 nt, Artificial Sequence
  Description of Artificial Sequence: Synthetic oligonucleotide
  Sense strand starting at position 2333 of SEQ ID NO: 1243758
gcuauuuccucagcucagu

SEQ ID NO: 1439301 - RNA, 19 nt, Artificial Sequence
  Description of Artificial Sequence: Synthetic oligonucleotide
  Antisense strand to SEQ ID NO: 1439300
acugagcugaggaaauagc

SEQ ID NO: 1439302 - RNA, 19 nt, Artificial Sequence
  Description of Artificial Sequence: Synthetic oligonucleotide
  Sense strand starting at position 2372 of SEQ ID NO: 1243758
cggaauugaucagaaaguu

SEQ ID NO: 1439303 - RNA, 19 nt, Artificial Sequence
  Description of Artificial Sequence: Synthetic oligonucleotide
  Antisense strand to SEQ ID NO: 1439302
aacuuucugaucaauuccg

SEQ ID NO: 1439304 - RNA, 19 nt, Artificial Sequence
  Description of Artificial Sequence: Synthetic oligonucleotide
  Sense strand starting at position 2467 of SEQ ID NO: 1243758
guuggcuuacgccaguaau

SEQ ID NO: 1439305 - RNA, 19 nt, Artificial Sequence
  Description of Artificial Sequence: Synthetic oligonucleotide
  Antisense strand to SEQ ID NO: 1439304
auuacuggcguaagccaac

SEQ ID NO: 1439306 - RNA, 19 nt, Artificial Sequence
  Description of Artificial Sequence: Synthetic oligonucleotide
  Sense strand starting at position 2583 of SEQ ID NO: 1243758
aaugaauacuuagccgagu

SEQ ID NO: 1439307 - RNA, 19 nt, Artificial Sequence
  Description of Artificial Sequence: Synthetic oligonucleotide
  Antisense strand to SEQ ID NO: 1439306
acucggcuaaguauucauu

SEQ ID NO: 1439308 - RNA, 19 nt, Artificial Sequence
  Description of Artificial Sequence: Synthetic oligonucleotide
  Sense strand starting at position 2585 of SEQ ID NO: 1243758
ugaauacuuagccgagugu

SEQ ID NO: 1439309 - RNA, 19 nt, Artificial Sequence
  Description of Artificial Sequence: Synthetic oligonucleotide
  Antisense strand to SEQ ID NO: 1439308
acacucggcuaaguauuca

SEQ ID NO: 1439310 - RNA, 19 nt, Artificial Sequence
  Description of Artificial Sequence: Synthetic oligonucleotide
  Sense strand starting at position 3621 of SEQ ID NO: 1243758
agugauuauuccgccugag

SEQ ID NO: 1439311 - RNA, 19 nt, Artificial Sequence
  Description of Artificial Sequence: Synthetic oligonucleotide
  Antisense strand to SEQ ID NO: 1439310
cucaggcggaauaaucacu

SEQ ID NO: 1439312 - RNA, 19 nt, Artificial Sequence
  Description of Artificial Sequence: Synthetic oligonucleotide
  Sense strand starting at position 3624 of SEQ ID NO: 1243758
gauuauuccgccugagccu

SEQ ID NO: 1439313 - RNA, 19 nt, Artificial Sequence
  Description of Artificial Sequence: Synthetic oligonucleotide
  Antisense strand to SEQ ID NO: 1439312
aggcucaggcggaauaauc

SEQ ID NO: 1439314 - RNA, 19 nt, Artificial Sequence
  Description of Artificial Sequence: Synthetic oligonucleotide
  Sense strand starting at position 3637 of SEQ ID NO: 1243758
gagccuuccgaguagcuga

SEQ ID NO: 1439315 - RNA, 19 nt, Artificial Sequence
  Description of Artificial Sequence: Synthetic oligonucleotide
  Antisense strand to SEQ ID NO: 1439314
ucagcuacucggaaggcuc

SEQ ID NO: 1439316 - RNA, 19 nt, Artificial Sequence
  Description of Artificial Sequence: Synthetic oligonucleotide
  Sense strand starting at position 3809 of SEQ ID NO: 1243758
cugugucuggccuauuaua

SEQ ID NO: 1439317 - RNA, 19 nt, Artificial Sequence
  Description of Artificial Sequence: Synthetic oligonucleotide
  Antisense strand to SEQ ID NO: 1439316
uauaauaggccagacacag

SEQ ID NO: 1439318 - RNA, 19 nt, Artificial Sequence
  Description of Artificial Sequence: Synthetic oligonucleotide
  Sense strand starting at position 230 of SEQ ID NO: 1243759
ggcauaagccacugaaugu

SEQ ID NO: 1439319 - RNA, 19 nt, Artificial Sequence
  Description of Artificial Sequence: Synthetic oligonucleotide
  Antisense strand to SEQ ID NO: 1439318
acauucaguggcuuaugcc

SEQ ID NO: 1439320 - RNA, 19 nt, Artificial Sequence
  Description of Artificial Sequence: Synthetic oligonucleotide
  Sense strand starting at position 237 of SEQ ID NO: 1243759
gccacugaauguucuuauu

SEQ ID NO: 1439321 - RNA, 19 nt, Artificial Sequence
  Description of Artificial Sequence: Synthetic oligonucleotide
  Antisense strand to SEQ ID NO: 1439320
aauaagaacauucaguggc

SEQ ID NO: 1439322 - RNA, 19 nt, Artificial Sequence
  Description of Artificial Sequence: Synthetic oligonucleotide
  Sense strand starting at position 306 of SEQ ID NO: 1243759
ggguuuguuucagugccuu

SEQ ID NO: 1439323 - RNA, 19 nt, Artificial Sequence
  Description of Artificial Sequence: Synthetic oligonucleotide
  Antisense strand to SEQ ID NO: 1439322
aaggcacugaaacaaaccc

SEQ ID NO: 1439324 - RNA, 19 nt, Artificial Sequence
  Description of Artificial Sequence: Synthetic oligonucleotide
  Sense strand starting at position 341 of SEQ ID NO: 1243759
cuggaauugugccugcaac

SEQ ID NO: 1439325 - RNA, 19 nt, Artificial Sequence
  Description of Artificial Sequence: Synthetic oligonucleotide
  Antisense strand to SEQ ID NO: 1439324
guugcaggcacaauuccag

SEQ ID NO: 1439326 - RNA, 19 nt, Artificial Sequence
  Description of Artificial Sequence: Synthetic oligonucleotide
  Sense strand starting at position 360 of SEQ ID NO: 1243759
caaacaggugcucaaguau

SEQ ID NO: 1439327 - RNA, 19 nt, Artificial Sequence
  Description of Artificial Sequence: Synthetic oligonucleotide
  Antisense strand to SEQ ID NO: 1439326
auacuugagcaccuguuug

SEQ ID NO: 1439328 - RNA, 19 nt, Artificial Sequence
  Description of Artificial Sequence: Synthetic oligonucleotide
  Sense strand starting at position 367 of SEQ ID NO: 1243759
gugcucaaguauuuguuga

SEQ ID NO: 1439329 - RNA, 19 nt, Artificial Sequence
  Description of Artificial Sequence: Synthetic oligonucleotide
  Antisense strand to SEQ ID NO: 1439328
ucaacaaauacuugagcac

SEQ ID NO: 1439330 - RNA, 19 nt, Artificial Sequence
  Description of Artificial Sequence: Synthetic oligonucleotide
  Sense strand starting at position 403 of SEQ ID NO: 1243759
cagucagucucuuaggagu

SEQ ID NO: 1439331 - RNA, 19 nt, Artificial Sequence
  Description of Artificial Sequence: Synthetic oligonucleotide
  Antisense strand to SEQ ID NO: 1439330
acuccuaagagacugacug

SEQ ID NO: 1439332 - RNA, 19 nt, Artificial Sequence
  Description of Artificial Sequence: Synthetic oligonucleotide
  Sense strand starting at position 406 of SEQ ID NO: 1243759
ucagucucuuaggaguuua

SEQ ID NO: 1439333 - RNA, 19 nt, Artificial Sequence
  Description of Artificial Sequence: Synthetic oligonucleotide
  Antisense strand to SEQ ID NO: 1439332
uaaacuccuaagagacuga

SEQ ID NO: 1439334 - RNA, 19 nt, Artificial Sequence
  Description of Artificial Sequence: Synthetic oligonucleotide
  Sense strand starting at position 418 of SEQ ID NO: 1243759
gaguuuaguuagcaggacu

SEQ ID NO: 1439335 - RNA, 19 nt, Artificial Sequence
  Description of Artificial Sequence: Synthetic oligonucleotide
  Antisense strand to SEQ ID NO: 1439334
aguccugcuaacuaaacuc

SEQ ID NO: 1439336 - RNA, 19 nt, Artificial Sequence
  Description of Artificial Sequence: Synthetic oligonucleotide
  Sense strand starting at position 431 of SEQ ID NO: 1243759
aggacuugguuggcaagaa

SEQ ID NO: 1439337 - RNA, 19 nt, Artificial Sequence
  Description of Artificial Sequence: Synthetic oligonucleotide
  Antisense strand to SEQ ID NO: 1439336
uucuugccaaccaaguccu

SEQ ID NO: 1439338 - RNA, 19 nt, Artificial Sequence
  Description of Artificial Sequence: Synthetic oligonucleotide
  Sense strand starting at position 432 of SEQ ID NO: 1243759
ggacuugguuggcaagaau

SEQ ID NO: 1439339 - RNA, 19 nt, Artificial Sequence
  Description of Artificial Sequence: Synthetic oligonucleotide
  Antisense strand to SEQ ID NO: 1439338
auucuugccaaccaagucc

SEQ ID NO: 1439340 - RNA, 19 nt, Artificial Sequence
  Description of Artificial Sequence: Synthetic oligonucleotide
  Sense strand starting at position 441 of SEQ ID NO: 1243759
uggcaagaaucagagaagu

SEQ ID NO: 1439341 - RNA, 19 nt, Artificial Sequence
  Description of Artificial Sequence: Synthetic oligonucleotide
  Antisense strand to SEQ ID NO: 1439340
acuucucugauucuugcca

SEQ ID NO: 1439342 - RNA, 19 nt, Artificial Sequence
  Description of Artificial Sequence: Synthetic oligonucleotide
  Sense strand starting at position 612 of SEQ ID NO: 1243759
ugagaauggcgucaucauu

SEQ ID NO: 1439343 - RNA, 19 nt, Artificial Sequence
  Description of Artificial Sequence: Synthetic oligonucleotide
  Antisense strand to SEQ ID NO: 1439342
aaugaugacgccauucuca

SEQ ID NO: 1439344 - RNA, 19 nt, Artificial Sequence
  Description of Artificial Sequence: Synthetic oligonucleotide
  Sense strand starting at position 620 of SEQ ID NO: 1243759
gcgucaucauuacccugua

SEQ ID NO: 1439345 - RNA, 19 nt, Artificial Sequence
  Description of Artificial Sequence: Synthetic oligonucleotide
  Antisense strand to SEQ ID NO: 1439344
uacaggguaaugaugacgc

SEQ ID NO: 1439346 - RNA, 19 nt, Artificial Sequence
  Description of Artificial Sequence: Synthetic oligonucleotide
  Sense strand starting at position 636 of SEQ ID NO: 1243759
guaccugcccuuuagcaaa

SEQ ID NO: 1439347 - RNA, 19 nt, Artificial Sequence
  Description of Artificial Sequence: Synthetic oligonucleotide
  Antisense strand to SEQ ID NO: 1439346
uuugcuaaagggcagguac

SEQ ID NO: 1439348 - RNA, 19 nt, Artificial Sequence
  Description of Artificial Sequence: Synthetic oligonucleotide
  Sense strand starting at position 706 of SEQ ID NO: 1243759
aaggguuaguugggacaau

SEQ ID NO: 1439349 - RNA, 19 nt, Artificial Sequence
  Description of Artificial Sequence: Synthetic oligonucleotide
  Antisense strand to SEQ ID NO: 1439348
auugucccaacuaacccuu

SEQ ID NO: 1439350 - RNA, 19 nt, Artificial Sequence
  Description of Artificial Sequence: Synthetic oligonucleotide
  Sense strand starting at position 707 of SEQ ID NO: 1243759
aggguuaguugggacaaua

SEQ ID NO: 1439351 - RNA, 19 nt, Artificial Sequence
  Description of Artificial Sequence: Synthetic oligonucleotide
  Antisense strand to SEQ ID NO: 1439350
uauugucccaacuaacccu

SEQ ID NO: 1439352 - RNA, 19 nt, Artificial Sequence
  Description of Artificial Sequence: Synthetic oligonucleotide
  Sense strand starting at position 1287 of SEQ ID NO: 1243759
gggugaagagaguguucca

SEQ ID NO: 1439353 - RNA, 19 nt, Artificial Sequence
  Description of Artificial Sequence: Synthetic oligonucleotide
  Antisense strand to SEQ ID NO: 1439352
uggaacacucucuucaccc

SEQ ID NO: 1439354 - RNA, 19 nt, Artificial Sequence
  Description of Artificial Sequence: Synthetic oligonucleotide
  Sense strand starting at position 1292 of SEQ ID NO: 1243759
aagagaguguuccagaacu

SEQ ID NO: 1439355 - RNA, 19 nt, Artificial Sequence
  Description of Artificial Sequence: Synthetic oligonucleotide
  Antisense strand to SEQ ID NO: 1439354
aguucuggaacacucucuu

SEQ ID NO: 1439356 - RNA, 19 nt, Artificial Sequence
  Description of Artificial Sequence: Synthetic oligonucleotide
  Sense strand starting at position 1294 of SEQ ID NO: 1243759
gagaguguuccagaacugu

SEQ ID NO: 1439357 - RNA, 19 nt, Artificial Sequence
  Description of Artificial Sequence: Synthetic oligonucleotide
  Antisense strand to SEQ ID NO: 1439356
acaguucuggaacacucuc

SEQ ID NO: 1439358 - RNA, 19 nt, Artificial Sequence
  Description of Artificial Sequence: Synthetic oligonucleotide
  Sense strand starting at position 1409 of SEQ ID NO: 1243759
gggacuucucccugcagca

SEQ ID NO: 1439359 - RNA, 19 nt, Artificial Sequence
  Description of Artificial Sequence: Synthetic oligonucleotide
  Antisense strand to SEQ ID NO: 1439358
ugcugcagggagaaguccc

SEQ ID NO: 1439360 - RNA, 19 nt, Artificial Sequence
  Description of Artificial Sequence: Synthetic oligonucleotide
  Sense strand starting at position 1472 of SEQ ID NO: 1243759
gcagcuguaagagagguaa

SEQ ID NO: 1439361 - RNA, 19 nt, Artificial Sequence
  Description of Artificial Sequence: Synthetic oligonucleotide
  Antisense strand to SEQ ID NO: 1439360
uuaccucucuuacagcugc

SEQ ID NO: 1439362 - RNA, 19 nt, Artificial Sequence
  Description of Artificial Sequence: Synthetic oligonucleotide
  Sense strand starting at position 1574 of SEQ ID NO: 1243759
ggcugauucuugguaguga

SEQ ID NO: 1439363 - RNA, 19 nt, Artificial Sequence
  Description of Artificial Sequence: Synthetic oligonucleotide
  Antisense strand to SEQ ID NO: 1439362
ucacuaccaagaaucagcc

SEQ ID NO: 1439364 - RNA, 19 nt, Artificial Sequence
  Description of Artificial Sequence: Synthetic oligonucleotide
  Sense strand starting at position 1670 of SEQ ID NO: 1243759
gcccauuucgcagaugggu

SEQ ID NO: 1439365 - RNA, 19 nt, Artificial Sequence
  Description of Artificial Sequence: Synthetic oligonucleotide
  Antisense strand to SEQ ID NO: 1439364
acccaucugcgaaaugggc

SEQ ID NO: 1439366 - RNA, 19 nt, Artificial Sequence
  Description of Artificial Sequence: Synthetic oligonucleotide
  Sense strand starting at position 1709 of SEQ ID NO: 1243759
ugcagaaaucccuggacca

SEQ ID NO: 1439367 - RNA, 19 nt, Artificial Sequence
  Description of Artificial Sequence: Synthetic oligonucleotide
  Antisense strand to SEQ ID NO: 1439366
ugguccagggauuucugca

SEQ ID NO: 1439368 - RNA, 19 nt, Artificial Sequence
  Description of Artificial Sequence: Synthetic oligonucleotide
  Sense strand starting at position 1710 of SEQ ID NO: 1243759
gcagaaaucccuggaccac

SEQ ID NO: 1439369 - RNA, 19 nt, Artificial Sequence
  Description of Artificial Sequence: Synthetic oligonucleotide
  Antisense strand to SEQ ID NO: 1439368
gugguccagggauuucugc

SEQ ID NO: 1439370 - RNA, 19 nt, Artificial Sequence
  Description of Artificial Sequence: Synthetic oligonucleotide
  Sense strand starting at position 2194 of SEQ ID NO: 1243759
ggcuuagacucagcaguca

SEQ ID NO: 1439371 - RNA, 19 nt, Artificial Sequence
  Description of Artificial Sequence: Synthetic oligonucleotide
  Antisense strand to SEQ ID NO: 1439370
ugacugcugagucuaagcc

SEQ ID NO: 1439372 - RNA, 19 nt, Artificial Sequence
  Description of Artificial Sequence: Synthetic oligonucleotide
  Sense strand starting at position 2614 of SEQ ID NO: 1243759
gggaaugaaggcugugagu

SEQ ID NO: 1439373 - RNA, 19 nt, Artificial Sequence
  Description of Artificial Sequence: Synthetic oligonucleotide
  Antisense strand to SEQ ID NO: 1439372
acucacagccuucauuccc

SEQ ID NO: 1439374 - RNA, 19 nt, Artificial Sequence
  Description of Artificial Sequence: Synthetic oligonucleotide
  Sense strand starting at position 2616 of SEQ ID NO: 1243759
gaaugaaggcugugagucu

SEQ ID NO: 1439375 - RNA, 19 nt, Artificial Sequence
  Description of Artificial Sequence: Synthetic oligonucleotide
  Antisense strand to SEQ ID NO: 1439374
agacucacagccuucauuc

SEQ ID NO: 1439376 - RNA, 19 nt, Artificial Sequence
  Description of Artificial Sequence: Synthetic oligonucleotide
  Sense strand starting at position 2623 of SEQ ID NO: 1243759
ggcugugagucuucucauu

SEQ ID NO: 1439377 - RNA, 19 nt, Artificial Sequence
  Description of Artificial Sequence: Synthetic oligonucleotide
  Antisense strand to SEQ ID NO: 1439376
aaugagaagacucacagcc

SEQ ID NO: 1439378 - RNA, 19 nt, Artificial Sequence
  Description of Artificial Sequence: Synthetic oligonucleotide
  Sense strand starting at position 2670 of SEQ ID NO: 1243759
ccaggugacccucauguaa

SEQ ID NO: 1439379 - RNA, 19 nt, Artificial Sequence
  Description of Artificial Sequence: Synthetic oligonucleotide
  Antisense strand to SEQ ID NO: 1439378
uuacaugagggucaccugg

SEQ ID NO: 1439380 - RNA, 19 nt, Artificial Sequence
  Description of Artificial Sequence: Synthetic oligonucleotide
  Sense strand starting at position 2916 of SEQ ID NO: 1243759
ggugggaggucacauggau

SEQ ID NO: 1439381 - RNA, 19 nt, Artificial Sequence
  Description of Artificial Sequence: Synthetic oligonucleotide
  Antisense strand to SEQ ID NO: 1439380
auccaugugaccucccacc

SEQ ID NO: 1439382 - RNA, 19 nt, Artificial Sequence
  Description of Artificial Sequence: Synthetic oligonucleotide
  Sense strand starting at position 2923 of SEQ ID NO: 1243759
ggucacauggauggucauu

SEQ ID NO: 1439383 - RNA, 19 nt, Artificial Sequence
  Description of Artificial Sequence: Synthetic oligonucleotide
  Antisense strand to SEQ ID NO: 1439382
aaugaccauccaugugacc

SEQ ID NO: 1439384 - RNA, 19 nt, Artificial Sequence
  Description of Artificial Sequence: Synthetic oligonucleotide
  Sense strand starting at position 3569 of SEQ ID NO: 1243759
gcagguguccuggagguca

SEQ ID NO: 1439385 - RNA, 19 nt, Artificial Sequence
  Description of Artificial Sequence: Synthetic oligonucleotide
  Antisense strand to SEQ ID NO: 1439384
ugaccuccaggacaccugc

SEQ ID NO: 1439386 - RNA, 19 nt, Artificial Sequence
  Description of Artificial Sequence: Synthetic oligonucleotide
  Sense strand starting at position 3635 of SEQ ID NO: 1243759
gcaugaguccguuucugca

SEQ ID NO: 1439387 - RNA, 19 nt, Artificial Sequence
  Description of Artificial Sequence: Synthetic oligonucleotide
  Antisense strand to SEQ ID NO: 1439386
ugcagaaacggacucaugc

SEQ ID NO: 1439388 - RNA, 19 nt, Artificial Sequence
  Description of Artificial Sequence: Synthetic oligonucleotide
  Sense strand starting at position 3749 of SEQ ID NO: 1243759
uucucuuaguuucuuagua

SEQ ID NO: 1439389 - RNA, 19 nt, Artificial Sequence
  Description of Artificial Sequence: Synthetic oligonucleotide
  Antisense strand to SEQ ID NO: 1439388
uacuaagaaacuaagagaa

SEQ ID NO: 1439390 - RNA, 19 nt, Artificial Sequence
  Description of Artificial Sequence: Synthetic oligonucleotide
  Sense strand starting at position 3750 of SEQ ID NO: 1243759
ucucuuaguuucuuaguaa

SEQ ID NO: 1439391 - RNA, 19 nt, Artificial Sequence
  Description of Artificial Sequence: Synthetic oligonucleotide
  Antisense strand to SEQ ID NO: 1439390
uuacuaagaaacuaagaga

SEQ ID NO: 1439392 - RNA, 19 nt, Artificial Sequence
  Description of Artificial Sequence: Synthetic oligonucleotide
  Sense strand starting at position 3751 of SEQ ID NO: 1243759
cucuuaguuucuuaguaaa

SEQ ID NO: 1439393 - RNA, 19 nt, Artificial Sequence
  Description of Artificial Sequence: Synthetic oligonucleotide
  Antisense strand to SEQ ID NO: 1439392
uuuacuaagaaacuaagag

SEQ ID NO: 1439394 - RNA, 19 nt, Artificial Sequence
  Description of Artificial Sequence: Synthetic oligonucleotide
  Sense strand starting at position 3781 of SEQ ID NO: 1243759
uucccaaagucuguucuca

SEQ ID NO: 1439395 - RNA, 19 nt, Artificial Sequence
  Description of Artificial Sequence: Synthetic oligonucleotide
  Antisense strand to SEQ ID NO: 1439394
ugagaacagacuuugggaa

SEQ ID NO: 1439396 - RNA, 19 nt, Artificial Sequence
  Description of Artificial Sequence: Synthetic oligonucleotide
  Sense strand starting at position 3783 of SEQ ID NO: 1243759
cccaaagucuguucucacu

SEQ ID NO: 1439397 - RNA, 19 nt, Artificial Sequence
  Description of Artificial Sequence: Synthetic oligonucleotide
  Antisense strand to SEQ ID NO: 1439396
agugagaacagacuuuggg

SEQ ID NO: 1439398 - RNA, 19 nt, Artificial Sequence
  Description of Artificial Sequence: Synthetic oligonucleotide
  Sense strand starting at position 2 of SEQ ID NO: 1243760
ugacaacaguguucuagaa

SEQ ID NO: 1439399 - RNA, 19 nt, Artificial Sequence
  Description of Artificial Sequence: Synthetic oligonucleotide
  Antisense strand to SEQ ID NO: 1439398
uucuagaacacuguuguca

SEQ ID NO: 1439400 - RNA, 19 nt, Artificial Sequence
  Description of Artificial Sequence: Synthetic oligonucleotide
  Sense strand starting at position 10 of SEQ ID NO: 1243760
guguucuagaauuagguag

SEQ ID NO: 1439401 - RNA, 19 nt, Artificial Sequence
  Description of Artificial Sequence: Synthetic oligonucleotide
  Antisense strand to SEQ ID NO: 1439400
cuaccuaauucuagaacac

SEQ ID NO: 1439402 - RNA, 19 nt, Artificial Sequence
  Description of Artificial Sequence: Synthetic oligonucleotide
  Sense strand starting at position 42 of SEQ ID NO: 1243760
auaauucugcgaggacuaa

SEQ ID NO: 1439403 - RNA, 19 nt, Artificial Sequence
  Description of Artificial Sequence: Synthetic oligonucleotide
  Antisense strand to SEQ ID NO: 1439402
uuaguccucgcagaauuau

SEQ ID NO: 1439404 - RNA, 19 nt, Artificial Sequence
  Description of Artificial Sequence: Synthetic oligonucleotide
  Sense strand starting at position 372 of SEQ ID NO: 1243760
uuuaguguuagccaggauu

SEQ ID NO: 1439405 - RNA, 19 nt, Artificial Sequence
  Description of Artificial Sequence: Synthetic oligonucleotide
  Antisense strand to SEQ ID NO: 1439404
aauccuggcuaacacuaaa

SEQ ID NO: 1439406 - RNA, 19 nt, Artificial Sequence
  Description of Artificial Sequence: Synthetic oligonucleotide
  Sense strand starting at position 533 of SEQ ID NO: 1243760
guguaaacacuuuaacagu

SEQ ID NO: 1439407 - RNA, 19 nt, Artificial Sequence
  Description of Artificial Sequence: Synthetic oligonucleotide
  Antisense strand to SEQ ID NO: 1439406
acuguuaaaguguuuacac

SEQ ID NO: 1439408 - RNA, 19 nt, Artificial Sequence
  Description of Artificial Sequence: Synthetic oligonucleotide
  Sense strand starting at position 699 of SEQ ID NO: 1243760
uuaucagggcuguaaauca

SEQ ID NO: 1439409 - RNA, 19 nt, Artificial Sequence
  Description of Artificial Sequence: Synthetic oligonucleotide
  Antisense strand to SEQ ID NO: 1439408
ugauuuacagcccugauaa

SEQ ID NO: 1439410 - RNA, 19 nt, Artificial Sequence
  Description of Artificial Sequence: Synthetic oligonucleotide
  Sense strand starting at position 783 of SEQ ID NO: 1243760
cagcaaauuuguguucggu

SEQ ID NO: 1439411 - RNA, 19 nt, Artificial Sequence
  Description of Artificial Sequence: Synthetic oligonucleotide
  Antisense strand to SEQ ID NO: 1439410
accgaacacaaauuugcug

SEQ ID NO: 1439412 - RNA, 19 nt, Artificial Sequence
  Description of Artificial Sequence: Synthetic oligonucleotide
  Sense strand starting at position 785 of SEQ ID NO: 1243760
gcaaauuuguguucgguga

SEQ ID NO: 1439413 - RNA, 19 nt, Artificial Sequence
  Description of Artificial Sequence: Synthetic oligonucleotide
  Antisense strand to SEQ ID NO: 1439412
ucaccgaacacaaauuugc

SEQ ID NO: 1439414 - RNA, 19 nt, Artificial Sequence
  Description of Artificial Sequence: Synthetic oligonucleotide
  Sense strand starting at position 786 of SEQ ID NO: 1243760
caaauuuguguucggugaa

SEQ ID NO: 1439415 - RNA, 19 nt, Artificial Sequence
  Description of Artificial Sequence: Synthetic oligonucleotide
  Antisense strand to SEQ ID NO: 1439414
uucaccgaacacaaauuug

SEQ ID NO: 1439416 - RNA, 19 nt, Artificial Sequence
  Description of Artificial Sequence: Synthetic oligonucleotide
  Sense strand starting at position 789 of SEQ ID NO: 1243760
auuuguguucggugaaugg

SEQ ID NO: 1439417 - RNA, 19 nt, Artificial Sequence
  Description of Artificial Sequence: Synthetic oligonucleotide
  Antisense strand to SEQ ID NO: 1439416
ccauucaccgaacacaaau

SEQ ID NO: 1439418 - RNA, 19 nt, Artificial Sequence
  Description of Artificial Sequence: Synthetic oligonucleotide
  Sense strand starting at position 821 of SEQ ID NO: 1243760
uacgaaguuguccaaauga

SEQ ID NO: 1439419 - RNA, 19 nt, Artificial Sequence
  Description of Artificial Sequence: Synthetic oligonucleotide
  Antisense strand to SEQ ID NO: 1439418
ucauuuggacaacuucgua

SEQ ID NO: 1439420 - RNA, 19 nt, Artificial Sequence
  Description of Artificial Sequence: Synthetic oligonucleotide
  Sense strand starting at position 1150 of SEQ ID NO: 1243760
aggaaagccaguuagucua

SEQ ID NO: 1439421 - RNA, 19 nt, Artificial Sequence
  Description of Artificial Sequence: Synthetic oligonucleotide
  Antisense strand to SEQ ID NO: 1439420
uagacuaacuggcuuuccu

SEQ ID NO: 1439422 - RNA, 19 nt, Artificial Sequence
  Description of Artificial Sequence: Synthetic oligonucleotide
  Sense strand starting at position 1152 of SEQ ID NO: 1243760
gaaagccaguuagucuaaa

SEQ ID NO: 1439423 - RNA, 19 nt, Artificial Sequence
  Description of Artificial Sequence: Synthetic oligonucleotide
  Antisense strand to SEQ ID NO: 1439422
uuuagacuaacuggcuuuc

SEQ ID NO: 1439424 - RNA, 19 nt, Artificial Sequence
  Description of Artificial Sequence: Synthetic oligonucleotide
  Sense strand starting at position 1189 of SEQ ID NO: 1243760
gguuauugcagccagaaac

SEQ ID NO: 1439425 - RNA, 19 nt, Artificial Sequence
  Description of Artificial Sequence: Synthetic oligonucleotide
  Antisense strand to SEQ ID NO: 1439424
guuucuggcugcaauaacc

SEQ ID NO: 1439426 - RNA, 19 nt, Artificial Sequence
  Description of Artificial Sequence: Synthetic oligonucleotide
  Sense strand starting at position 1199 of SEQ ID NO: 1243760
gccagaaaccuggacuguu

SEQ ID NO: 1439427 - RNA, 19 nt, Artificial Sequence
  Description of Artificial Sequence: Synthetic oligonucleotide
  Antisense strand to SEQ ID NO: 1439426
aacaguccagguuucuggc

SEQ ID NO: 1439428 - RNA, 19 nt, Artificial Sequence
  Description of Artificial Sequence: Synthetic oligonucleotide
  Sense strand starting at position 1232 of SEQ ID NO: 1243760
uauuacgguuacucuagaa

SEQ ID NO: 1439429 - RNA, 19 nt, Artificial Sequence
  Description of Artificial Sequence: Synthetic oligonucleotide
  Antisense strand to SEQ ID NO: 1439428
uucuagaguaaccguaaua

SEQ ID NO: 1439430 - RNA, 19 nt, Artificial Sequence
  Description of Artificial Sequence: Synthetic oligonucleotide
  Sense strand starting at position 1348 of SEQ ID NO: 1243760
cgcuauaaaccaggagaau

SEQ ID NO: 1439431 - RNA, 19 nt, Artificial Sequence
  Description of Artificial Sequence: Synthetic oligonucleotide
  Antisense strand to SEQ ID NO: 1439430
auucuccugguuuauagcg

SEQ ID NO: 1439432 - RNA, 19 nt, Artificial Sequence
  Description of Artificial Sequence: Synthetic oligonucleotide
  Sense strand starting at position 1391 of SEQ ID NO: 1243760
acgauauaacuaugcuauu

SEQ ID NO: 1439433 - RNA, 19 nt, Artificial Sequence
  Description of Artificial Sequence: Synthetic oligonucleotide
  Antisense strand to SEQ ID NO: 1439432
aauagcauaguuauaucgu

SEQ ID NO: 1439434 - RNA, 19 nt, Artificial Sequence
  Description of Artificial Sequence: Synthetic oligonucleotide
  Sense strand starting at position 1439 of SEQ ID NO: 1243760
guccacuuucgauagaaua

SEQ ID NO: 1439435 - RNA, 19 nt, Artificial Sequence
  Description of Artificial Sequence: Synthetic oligonucleotide
  Antisense strand to SEQ ID NO: 1439434
uauucuaucgaaaguggac

SEQ ID NO: 1439436 - RNA, 19 nt, Artificial Sequence
  Description of Artificial Sequence: Synthetic oligonucleotide
  Sense strand starting at position 2379 of SEQ ID NO: 1243760
uuacaauguucugugauaa

SEQ ID NO: 1439437 - RNA, 19 nt, Artificial Sequence
  Description of Artificial Sequence: Synthetic oligonucleotide
  Antisense strand to SEQ ID NO: 1439436
uuaucacagaacauuguaa

SEQ ID NO: 1439438 - RNA, 19 nt, Artificial Sequence
  Description of Artificial Sequence: Synthetic oligonucleotide
  Sense strand starting at position 2466 of SEQ ID NO: 1243760
gcaggacucuaaucuccuu

SEQ ID NO: 1439439 - RNA, 19 nt, Artificial Sequence
  Description of Artificial Sequence: Synthetic oligonucleotide
  Antisense strand to SEQ ID NO: 1439438
aaggagauuagaguccugc

SEQ ID NO: 1439440 - RNA, 19 nt, Artificial Sequence
  Description of Artificial Sequence: Synthetic oligonucleotide
  Sense strand starting at position 2491 of SEQ ID NO: 1243760
uucugauuaugggucuuaa

SEQ ID NO: 1439441 - RNA, 19 nt, Artificial Sequence
  Description of Artificial Sequence: Synthetic oligonucleotide
  Antisense strand to SEQ ID NO: 1439440
uuaagacccauaaucagaa

SEQ ID NO: 1439442 - RNA, 19 nt, Artificial Sequence
  Description of Artificial Sequence: Synthetic oligonucleotide
  Sense strand starting at position 2716 of SEQ ID NO: 1243760
uuggucauauccuuuauau

SEQ ID NO: 1439443 - RNA, 19 nt, Artificial Sequence
  Description of Artificial Sequence: Synthetic oligonucleotide
  Antisense strand to SEQ ID NO: 1439442
auauaaaggauaugaccaa

SEQ ID NO: 1439444 - RNA, 19 nt, Artificial Sequence
  Description of Artificial Sequence: Synthetic oligonucleotide
  Sense strand starting at position 2718 of SEQ ID NO: 1243760
ggucauauccuuuauauga

SEQ ID NO: 1439445 - RNA, 19 nt, Artificial Sequence
  Description of Artificial Sequence: Synthetic oligonucleotide
  Antisense strand to SEQ ID NO: 1439444
ucauauaaaggauaugacc

SEQ ID NO: 1439446 - RNA, 19 nt, Artificial Sequence
  Description of Artificial Sequence: Synthetic oligonucleotide
  Sense strand starting at position 2728 of SEQ ID NO: 1243760
uuuauaugaaaccggugaa

SEQ ID NO: 1439447 - RNA, 19 nt, Artificial Sequence
  Description of Artificial Sequence: Synthetic oligonucleotide
  Antisense strand to SEQ ID NO: 1439446
uucaccgguuucauauaaa

SEQ ID NO: 1439448 - RNA, 19 nt, Artificial Sequence
  Description of Artificial Sequence: Synthetic oligonucleotide
  Sense strand starting at position 2729 of SEQ ID NO: 1243760
uuauaugaaaccggugaau

SEQ ID NO: 1439449 - RNA, 19 nt, Artificial Sequence
  Description of Artificial Sequence: Synthetic oligonucleotide
  Antisense strand to SEQ ID NO: 1439448
auucaccgguuucauauaa

SEQ ID NO: 1439450 - RNA, 19 nt, Artificial Sequence
  Description of Artificial Sequence: Synthetic oligonucleotide
  Sense strand starting at position 2731 of SEQ ID NO: 1243760
auaugaaaccggugaaugu

SEQ ID NO: 1439451 - RNA, 19 nt, Artificial Sequence
  Description of Artificial Sequence: Synthetic oligonucleotide
  Antisense strand to SEQ ID NO: 1439450
acauucaccgguuucauau

SEQ ID NO: 1439452 - RNA, 19 nt, Artificial Sequence
  Description of Artificial Sequence: Synthetic oligonucleotide
  Sense strand starting at position 3040 of SEQ ID NO: 1243760
uguuguguugugagagcaa

SEQ ID NO: 1439453 - RNA, 19 nt, Artificial Sequence
  Description of Artificial Sequence: Synthetic oligonucleotide
  Antisense strand to SEQ ID NO: 1439452
uugcucucacaacacaaca

SEQ ID NO: 1439454 - RNA, 19 nt, Artificial Sequence
  Description of Artificial Sequence: Synthetic oligonucleotide
  Sense strand starting at position 3344 of SEQ ID NO: 1243760
uagauaaguccagaggcuu

SEQ ID NO: 1439455 - RNA, 19 nt, Artificial Sequence
  Description of Artificial Sequence: Synthetic oligonucleotide
  Antisense strand to SEQ ID NO: 1439454
aagccucuggacuuaucua

SEQ ID NO: 1439456 - RNA, 19 nt, Artificial Sequence
  Description of Artificial Sequence: Synthetic oligonucleotide
  Sense strand starting at position 3392 of SEQ ID NO: 1243760
agccucugauagcuaaaua

SEQ ID NO: 1439457 - RNA, 19 nt, Artificial Sequence
  Description of Artificial Sequence: Synthetic oligonucleotide
  Antisense strand to SEQ ID NO: 1439456
uauuuagcuaucagaggcu

SEQ ID NO: 1439458 - RNA, 19 nt, Artificial Sequence
  Description of Artificial Sequence: Synthetic oligonucleotide
  Sense strand starting at position 3518 of SEQ ID NO: 1243760
uuuguaugaaaccgguaaa

SEQ ID NO: 1439459 - RNA, 19 nt, Artificial Sequence
  Description of Artificial Sequence: Synthetic oligonucleotide
  Antisense strand to SEQ ID NO: 1439458
uuuaccgguuucauacaaa

SEQ ID NO: 1439460 - RNA, 19 nt, Artificial Sequence
  Description of Artificial Sequence: Synthetic oligonucleotide
  Sense strand starting at position 3519 of SEQ ID NO: 1243760
uuguaugaaaccgguaaau

SEQ ID NO: 1439461 - RNA, 19 nt, Artificial Sequence
  Description of Artificial Sequence: Synthetic oligonucleotide
  Antisense strand to SEQ ID NO: 1439460
auuuaccgguuucauacaa

SEQ ID NO: 1439462 - RNA, 19 nt, Artificial Sequence
  Description of Artificial Sequence: Synthetic oligonucleotide
  Sense strand starting at position 3521 of SEQ ID NO: 1243760
guaugaaaccgguaaaugu

SEQ ID NO: 1439463 - RNA, 19 nt, Artificial Sequence
  Description of Artificial Sequence: Synthetic oligonucleotide
  Antisense strand to SEQ ID NO: 1439462
acauuuaccgguuucauac

SEQ ID NO: 1439464 - RNA, 19 nt, Artificial Sequence
  Description of Artificial Sequence: Synthetic oligonucleotide
  Sense strand starting at position 3791 of SEQ ID NO: 1243760
gaucgucgggugcaaauuu

SEQ ID NO: 1439465 - RNA, 19 nt, Artificial Sequence
  Description of Artificial Sequence: Synthetic oligonucleotide
  Antisense strand to SEQ ID NO: 1439464
aaauuugcacccgacgauc

SEQ ID NO: 1439466 - RNA, 19 nt, Artificial Sequence
  Description of Artificial Sequence: Synthetic oligonucleotide
  Sense strand starting at position 3800 of SEQ ID NO: 1243760
gugcaaauuugagcauuau

SEQ ID NO: 1439467 - RNA, 19 nt, Artificial Sequence
  Description of Artificial Sequence: Synthetic oligonucleotide
  Antisense strand to SEQ ID NO: 1439466
auaaugcucaaauuugcac

SEQ ID NO: 1439468 - RNA, 19 nt, Artificial Sequence
  Description of Artificial Sequence: Synthetic oligonucleotide
  Sense strand starting at position 3823 of SEQ ID NO: 1243760
aagagcuuucuguagaguu

SEQ ID NO: 1439469 - RNA, 19 nt, Artificial Sequence
  Description of Artificial Sequence: Synthetic oligonucleotide
  Antisense strand to SEQ ID NO: 1439468
aacucuacagaaagcucuu

SEQ ID NO: 1439470 - RNA, 19 nt, Artificial Sequence
  Description of Artificial Sequence: Synthetic oligonucleotide
  Sense strand starting at position 3831 of SEQ ID NO: 1243760
ucuguagaguuauuucugu

SEQ ID NO: 1439471 - RNA, 19 nt, Artificial Sequence
  Description of Artificial Sequence: Synthetic oligonucleotide
  Antisense strand to SEQ ID NO: 1439470
acagaaauaacucuacaga

SEQ ID NO: 1439472 - RNA, 19 nt, Artificial Sequence
  Description of Artificial Sequence: Synthetic oligonucleotide
  Sense strand starting at position 3914 of SEQ ID NO: 1243760
ucuaguuaccaaggaauau

SEQ ID NO: 1439473 - RNA, 19 nt, Artificial Sequence
  Description of Artificial Sequence: Synthetic oligonucleotide
  Antisense strand to SEQ ID NO: 1439472
auauuccuugguaacuaga

SEQ ID NO: 1439474 - RNA, 19 nt, Artificial Sequence
  Description of Artificial Sequence: Synthetic oligonucleotide
  Sense strand starting at position 3926 of SEQ ID NO: 1243760
ggaauaucguaucucagau

SEQ ID NO: 1439475 - RNA, 19 nt, Artificial Sequence
  Description of Artificial Sequence: Synthetic oligonucleotide
  Antisense strand to SEQ ID NO: 1439474
aucugagauacgauauucc

SEQ ID NO: 1439476 - RNA, 19 nt, Artificial Sequence
  Description of Artificial Sequence: Synthetic oligonucleotide
  Sense strand starting at position 3958 of SEQ ID NO: 1243760
ucacacuggucuuuaaaga

SEQ ID NO: 1439477 - RNA, 19 nt, Artificial Sequence
  Description of Artificial Sequence: Synthetic oligonucleotide
  Antisense strand to SEQ ID NO: 1439476
ucuuuaaagaccaguguga

SEQ ID NO: 1439478 - RNA, 19 nt, Artificial Sequence
  Description of Artificial Sequence: Synthetic oligonucleotide
  Sense strand starting at position 70 of SEQ ID NO: 1243761
ccaacaaggucuuguaucu

SEQ ID NO: 1439479 - RNA, 19 nt, Artificial Sequence
  Description of Artificial Sequence: Synthetic oligonucleotide
  Antisense strand to SEQ ID NO: 1439478
agauacaagaccuuguugg

SEQ ID NO: 1439480 - RNA, 19 nt, Artificial Sequence
  Description of Artificial Sequence: Synthetic oligonucleotide
  Sense strand starting at position 77 of SEQ ID NO: 1243761
ggucuuguaucuuaaucgu

SEQ ID NO: 1439481 - RNA, 19 nt, Artificial Sequence
  Description of Artificial Sequence: Synthetic oligonucleotide
  Antisense strand to SEQ ID NO: 1439480
acgauuaagauacaagacc

SEQ ID NO: 1439482 - RNA, 19 nt, Artificial Sequence
  Description of Artificial Sequence: Synthetic oligonucleotide
  Sense strand starting at position 81 of SEQ ID NO: 1243761
uuguaucuuaaucgugaga

SEQ ID NO: 1439483 - RNA, 19 nt, Artificial Sequence
  Description of Artificial Sequence: Synthetic oligonucleotide
  Antisense strand to SEQ ID NO: 1439482
ucucacgauuaagauacaa

SEQ ID NO: 1439484 - RNA, 19 nt, Artificial Sequence
  Description of Artificial Sequence: Synthetic oligonucleotide
  Sense strand starting at position 83 of SEQ ID NO: 1243761
guaucuuaaucgugagaga

SEQ ID NO: 1439485 - RNA, 19 nt, Artificial Sequence
  Description of Artificial Sequence: Synthetic oligonucleotide
  Antisense strand to SEQ ID NO: 1439484
ucucucacgauuaagauac

SEQ ID NO: 1439486 - RNA, 19 nt, Artificial Sequence
  Description of Artificial Sequence: Synthetic oligonucleotide
  Sense strand starting at position 84 of SEQ ID NO: 1243761
uaucuuaaucgugagagau

SEQ ID NO: 1439487 - RNA, 19 nt, Artificial Sequence
  Description of Artificial Sequence: Synthetic oligonucleotide
  Antisense strand to SEQ ID NO: 1439486
aucucucacgauuaagaua

SEQ ID NO: 1439488 - RNA, 19 nt, Artificial Sequence
  Description of Artificial Sequence: Synthetic oligonucleotide
  Sense strand starting at position 86 of SEQ ID NO: 1243761
ucuuaaucgugagagauuc

SEQ ID NO: 1439489 - RNA, 19 nt, Artificial Sequence
  Description of Artificial Sequence: Synthetic oligonucleotide
  Antisense strand to SEQ ID NO: 1439488
gaaucucucacgauuaaga

SEQ ID NO: 1439490 - RNA, 19 nt, Artificial Sequence
  Description of Artificial Sequence: Synthetic oligonucleotide
  Sense strand starting at position 94 of SEQ ID NO: 1243761
gugagagauuccuucucaa

SEQ ID NO: 1439491 - RNA, 19 nt, Artificial Sequence
  Description of Artificial Sequence: Synthetic oligonucleotide
  Antisense strand to SEQ ID NO: 1439490
uugagaaggaaucucucac

SEQ ID NO: 1439492 - RNA, 19 nt, Artificial Sequence
  Description of Artificial Sequence: Synthetic oligonucleotide
  Sense strand starting at position 126 of SEQ ID NO: 1243761
agcuuuaguucugaccagu

SEQ ID NO: 1439493 - RNA, 19 nt, Artificial Sequence
  Description of Artificial Sequence: Synthetic oligonucleotide
  Antisense strand to SEQ ID NO: 1439492
acuggucagaacuaaagcu

SEQ ID NO: 1439494 - RNA, 19 nt, Artificial Sequence
  Description of Artificial Sequence: Synthetic oligonucleotide
  Sense strand starting at position 223 of SEQ ID NO: 1243761
gggaggugguaucaagaga

SEQ ID NO: 1439495 - RNA, 19 nt, Artificial Sequence
  Description of Artificial Sequence: Synthetic oligonucleotide
  Antisense strand to SEQ ID NO: 1439494
ucucuugauaccaccuccc

SEQ ID NO: 1439496 - RNA, 19 nt, Artificial Sequence
  Description of Artificial Sequence: Synthetic oligonucleotide
  Sense strand starting at position 606 of SEQ ID NO: 1243761
gggugucagauucgcccaa

SEQ ID NO: 1439497 - RNA, 19 nt, Artificial Sequence
  Description of Artificial Sequence: Synthetic oligonucleotide
  Antisense strand to SEQ ID NO: 1439496
uugggcgaaucugacaccc

SEQ ID NO: 1439498 - RNA, 19 nt, Artificial Sequence
  Description of Artificial Sequence: Synthetic oligonucleotide
  Sense strand starting at position 607 of SEQ ID NO: 1243761
ggugucagauucgcccaau

SEQ ID NO: 1439499 - RNA, 19 nt, Artificial Sequence
  Description of Artificial Sequence: Synthetic oligonucleotide
  Antisense strand to SEQ ID NO: 1439498
auugggcgaaucugacacc

SEQ ID NO: 1439500 - RNA, 19 nt, Artificial Sequence
  Description of Artificial Sequence: Synthetic oligonucleotide
  Sense strand starting at position 608 of SEQ ID NO: 1243761
gugucagauucgcccaaug

SEQ ID NO: 1439501 - RNA, 19 nt, Artificial Sequence
  Description of Artificial Sequence: Synthetic oligonucleotide
  Antisense strand to SEQ ID NO: 1439500
cauugggcgaaucugacac

SEQ ID NO: 1439502 - RNA, 19 nt, Artificial Sequence
  Description of Artificial Sequence: Synthetic oligonucleotide
  Sense strand starting at position 610 of SEQ ID NO: 1243761
gucagauucgcccaauggu

SEQ ID NO: 1439503 - RNA, 19 nt, Artificial Sequence
  Description of Artificial Sequence: Synthetic oligonucleotide
  Antisense strand to SEQ ID NO: 1439502
accauugggcgaaucugac

SEQ ID NO: 1439504 - RNA, 19 nt, Artificial Sequence
  Description of Artificial Sequence: Synthetic oligonucleotide
  Sense strand starting at position 924 of SEQ ID NO: 1243761
ccgcauuuccaguagcguu

SEQ ID NO: 1439505 - RNA, 19 nt, Artificial Sequence
  Description of Artificial Sequence: Synthetic oligonucleotide
  Antisense strand to SEQ ID NO: 1439504
aacgcuacuggaaaugcgg

SEQ ID NO: 1439506 - RNA, 19 nt, Artificial Sequence
  Description of Artificial Sequence: Synthetic oligonucleotide
  Sense strand starting at position 1258 of SEQ ID NO: 1243761
ccgggaauguugcacguaa

SEQ ID NO: 1439507 - RNA, 19 nt, Artificial Sequence
  Description of Artificial Sequence: Synthetic oligonucleotide
  Antisense strand to SEQ ID NO: 1439506
uuacgugcaacauucccgg

SEQ ID NO: 1439508 - RNA, 19 nt, Artificial Sequence
  Description of Artificial Sequence: Synthetic oligonucleotide
  Sense strand starting at position 1259 of SEQ ID NO: 1243761
cgggaauguugcacguaaa

SEQ ID NO: 1439509 - RNA, 19 nt, Artificial Sequence
  Description of Artificial Sequence: Synthetic oligonucleotide
  Antisense strand to SEQ ID NO: 1439508
uuuacgugcaacauucccg

SEQ ID NO: 1439510 - RNA, 19 nt, Artificial Sequence
  Description of Artificial Sequence: Synthetic oligonucleotide
  Sense strand starting at position 1260 of SEQ ID NO: 1243761
gggaauguugcacguaaac

SEQ ID NO: 1439511 - RNA, 19 nt, Artificial Sequence
  Description of Artificial Sequence: Synthetic oligonucleotide
  Antisense strand to SEQ ID NO: 1439510
guuuacgugcaacauuccc

SEQ ID NO: 1439512 - RNA, 19 nt, Artificial Sequence
  Description of Artificial Sequence: Synthetic oligonucleotide
  Sense strand starting at position 1313 of SEQ ID NO: 1243761
uggugaccacgucgucaaa

SEQ ID NO: 1439513 - RNA, 19 nt, Artificial Sequence
  Description of Artificial Sequence: Synthetic oligonucleotide
  Antisense strand to SEQ ID NO: 1439512
uuugacgacguggucacca

SEQ ID NO: 1439514 - RNA, 19 nt, Artificial Sequence
  Description of Artificial Sequence: Synthetic oligonucleotide
  Sense strand starting at position 1315 of SEQ ID NO: 1243761
gugaccacgucgucaaacu

SEQ ID NO: 1439515 - RNA, 19 nt, Artificial Sequence
  Description of Artificial Sequence: Synthetic oligonucleotide
  Antisense strand to SEQ ID NO: 1439514
aguuugacgacguggucac

SEQ ID NO: 1439516 - RNA, 19 nt, Artificial Sequence
  Description of Artificial Sequence: Synthetic oligonucleotide
  Sense strand starting at position 1316 of SEQ ID NO: 1243761
ugaccacgucgucaaacuu

SEQ ID NO: 1439517 - RNA, 19 nt, Artificial Sequence
  Description of Artificial Sequence: Synthetic oligonucleotide
  Antisense strand to SEQ ID NO: 1439516
aaguuugacgacgugguca

SEQ ID NO: 1439518 - RNA, 19 nt, Artificial Sequence
  Description of Artificial Sequence: Synthetic oligonucleotide
  Sense strand starting at position 1329 of SEQ ID NO: 1243761
aaacuugaguaccucguaa

SEQ ID NO: 1439519 - RNA, 19 nt, Artificial Sequence
  Description of Artificial Sequence: Synthetic oligonucleotide
  Antisense strand to SEQ ID NO: 1439518
uuacgagguacucaaguuu

SEQ ID NO: 1439520 - RNA, 19 nt, Artificial Sequence
  Description of Artificial Sequence: Synthetic oligonucleotide
  Sense strand starting at position 2682 of SEQ ID NO: 1243761
ccagauaucggaugaaugc

SEQ ID NO: 1439521 - RNA, 19 nt, Artificial Sequence
  Description of Artificial Sequence: Synthetic oligonucleotide
  Antisense strand to SEQ ID NO: 1439520
gcauucauccgauaucugg

SEQ ID NO: 1439522 - RNA, 19 nt, Artificial Sequence
  Description of Artificial Sequence: Synthetic oligonucleotide
  Sense strand starting at position 2749 of SEQ ID NO: 1243761
ggaucugacuguuccggga

SEQ ID NO: 1439523 - RNA, 19 nt, Artificial Sequence
  Description of Artificial Sequence: Synthetic oligonucleotide
  Antisense strand to SEQ ID NO: 1439522
ucccggaacagucagaucc

SEQ ID NO: 1439524 - RNA, 19 nt, Artificial Sequence
  Description of Artificial Sequence: Synthetic oligonucleotide
  Sense strand starting at position 2951 of SEQ ID NO: 1243761
guuauuucuccaugcugac

SEQ ID NO: 1439525 - RNA, 19 nt, Artificial Sequence
  Description of Artificial Sequence: Synthetic oligonucleotide
  Antisense strand to SEQ ID NO: 1439524
gucagcauggagaaauaac

SEQ ID NO: 1439526 - RNA, 19 nt, Artificial Sequence
  Description of Artificial Sequence: Synthetic oligonucleotide
  Sense strand starting at position 2954 of SEQ ID NO: 1243761
auuucuccaugcugacaga

SEQ ID NO: 1439527 - RNA, 19 nt, Artificial Sequence
  Description of Artificial Sequence: Synthetic oligonucleotide
  Antisense strand to SEQ ID NO: 1439526
ucugucagcauggagaaau

SEQ ID NO: 1439528 - RNA, 19 nt, Artificial Sequence
  Description of Artificial Sequence: Synthetic oligonucleotide
  Sense strand starting at position 3139 of SEQ ID NO: 1243761
caaaguguuuagguugcau

SEQ ID NO: 1439529 - RNA, 19 nt, Artificial Sequence
  Description of Artificial Sequence: Synthetic oligonucleotide
  Antisense strand to SEQ ID NO: 1439528
augcaaccuaaacacuuug

SEQ ID NO: 1439530 - RNA, 19 nt, Artificial Sequence
  Description of Artificial Sequence: Synthetic oligonucleotide
  Sense strand starting at position 3141 of SEQ ID NO: 1243761
aaguguuuagguugcauaa

SEQ ID NO: 1439531 - RNA, 19 nt, Artificial Sequence
  Description of Artificial Sequence: Synthetic oligonucleotide
  Antisense strand to SEQ ID NO: 1439530
uuaugcaaccuaaacacuu

SEQ ID NO: 1439532 - RNA, 19 nt, Artificial Sequence
  Description of Artificial Sequence: Synthetic oligonucleotide
  Sense strand starting at position 3143 of SEQ ID NO: 1243761
guguuuagguugcauaaac

SEQ ID NO: 1439533 - RNA, 19 nt, Artificial Sequence
  Description of Artificial Sequence: Synthetic oligonucleotide
  Antisense strand to SEQ ID NO: 1439532
guuuaugcaaccuaaacac

SEQ ID NO: 1439534 - RNA, 19 nt, Artificial Sequence
  Description of Artificial Sequence: Synthetic oligonucleotide
  Sense strand starting at position 3167 of SEQ ID NO: 1243761
cgugucugcuuccaucaaa

SEQ ID NO: 1439535 - RNA, 19 nt, Artificial Sequence
  Description of Artificial Sequence: Synthetic oligonucleotide
  Antisense strand to SEQ ID NO: 1439534
uuugauggaagcagacacg

SEQ ID NO: 1439536 - RNA, 19 nt, Artificial Sequence
  Description of Artificial Sequence: Synthetic oligonucleotide
  Sense strand starting at position 3583 of SEQ ID NO: 1243761
caggguuuacucugugcua

SEQ ID NO: 1439537 - RNA, 19 nt, Artificial Sequence
  Description of Artificial Sequence: Synthetic oligonucleotide
  Antisense strand to SEQ ID NO: 1439536
uagcacagaguaaacccug

SEQ ID NO: 1439538 - RNA, 19 nt, Artificial Sequence
  Description of Artificial Sequence: Synthetic oligonucleotide
  Sense strand starting at position 3709 of SEQ ID NO: 1243761
cugggaaguuaagagauuu

SEQ ID NO: 1439539 - RNA, 19 nt, Artificial Sequence
  Description of Artificial Sequence: Synthetic oligonucleotide
  Antisense strand to SEQ ID NO: 1439538
aaaucucuuaacuucccag

SEQ ID NO: 1439540 - RNA, 19 nt, Artificial Sequence
  Description of Artificial Sequence: Synthetic oligonucleotide
  Sense strand starting at position 3807 of SEQ ID NO: 1243761
gcgauagagucucuaggua

SEQ ID NO: 1439541 - RNA, 19 nt, Artificial Sequence
  Description of Artificial Sequence: Synthetic oligonucleotide
  Antisense strand to SEQ ID NO: 1439540
uaccuagagacucuaucgc

SEQ ID NO: 1439542 - RNA, 19 nt, Artificial Sequence
  Description of Artificial Sequence: Synthetic oligonucleotide
  Sense strand starting at position 21 of SEQ ID NO: 1243762
cugcucuuuccacaaguga

SEQ ID NO: 1439543 - RNA, 19 nt, Artificial Sequence
  Description of Artificial Sequence: Synthetic oligonucleotide
  Antisense strand to SEQ ID NO: 1439542
ucacuuguggaaagagcag

SEQ ID NO: 1439544 - RNA, 19 nt, Artificial Sequence
  Description of Artificial Sequence: Synthetic oligonucleotide
  Sense strand starting at position 34 of SEQ ID NO: 1243762
aagugagaguucccuugau

SEQ ID NO: 1439545 - RNA, 19 nt, Artificial Sequence
  Description of Artificial Sequence: Synthetic oligonucleotide
  Antisense strand to SEQ ID NO: 1439544
aucaagggaacucucacuu

SEQ ID NO: 1439546 - RNA, 19 nt, Artificial Sequence
  Description of Artificial Sequence: Synthetic oligonucleotide
  Sense strand starting at position 46 of SEQ ID NO: 1243762
ccuugauagaaguguugag

SEQ ID NO: 1439547 - RNA, 19 nt, Artificial Sequence
  Description of Artificial Sequence: Synthetic oligonucleotide
  Antisense strand to SEQ ID NO: 1439546
cucaacacuucuaucaagg

SEQ ID NO: 1439548 - RNA, 19 nt, Artificial Sequence
  Description of Artificial Sequence: Synthetic oligonucleotide
  Sense strand starting at position 459 of SEQ ID NO: 1243762
uguacuuuccugcacuaua

SEQ ID NO: 1439549 - RNA, 19 nt, Artificial Sequence
  Description of Artificial Sequence: Synthetic oligonucleotide
  Antisense strand to SEQ ID NO: 1439548
uauagugcaggaaaguaca

SEQ ID NO: 1439550 - RNA, 19 nt, Artificial Sequence
  Description of Artificial Sequence: Synthetic oligonucleotide
  Sense strand starting at position 615 of SEQ ID NO: 1243762
guugccuccuuuccuagaa

SEQ ID NO: 1439551 - RNA, 19 nt, Artificial Sequence
  Description of Artificial Sequence: Synthetic oligonucleotide
  Antisense strand to SEQ ID NO: 1439550
uucuaggaaaggaggcaac

SEQ ID NO: 1439552 - RNA, 19 nt, Artificial Sequence
  Description of Artificial Sequence: Synthetic oligonucleotide
  Sense strand starting at position 1066 of SEQ ID NO: 1243762
gcgcuuccuauuccgugaa

SEQ ID NO: 1439553 - RNA, 19 nt, Artificial Sequence
  Description of Artificial Sequence: Synthetic oligonucleotide
  Antisense strand to SEQ ID NO: 1439552
uucacggaauaggaagcgc

SEQ ID NO: 1439554 - RNA, 19 nt, Artificial Sequence
  Description of Artificial Sequence: Synthetic oligonucleotide
  Sense strand starting at position 1070 of SEQ ID NO: 1243762
uuccuauuccgugaagguc

SEQ ID NO: 1439555 - RNA, 19 nt, Artificial Sequence
  Description of Artificial Sequence: Synthetic oligonucleotide
  Antisense strand to SEQ ID NO: 1439554
gaccuucacggaauaggaa

SEQ ID NO: 1439556 - RNA, 19 nt, Artificial Sequence
  Description of Artificial Sequence: Synthetic oligonucleotide
  Sense strand starting at position 1293 of SEQ ID NO: 1243762
uuaguauccacgugcagaa

SEQ ID NO: 1439557 - RNA, 19 nt, Artificial Sequence
  Description of Artificial Sequence: Synthetic oligonucleotide
  Antisense strand to SEQ ID NO: 1439556
uucugcacguggauacuaa

SEQ ID NO: 1439558 - RNA, 19 nt, Artificial Sequence
  Description of Artificial Sequence: Synthetic oligonucleotide
  Sense strand starting at position 2064 of SEQ ID NO: 1243762
ggcagauuccgugagucug

SEQ ID NO: 1439559 - RNA, 19 nt, Artificial Sequence
  Description of Artificial Sequence: Synthetic oligonucleotide
  Antisense strand to SEQ ID NO: 1439558
cagacucacggaaucugcc

SEQ ID NO: 1439560 - RNA, 19 nt, Artificial Sequence
  Description of Artificial Sequence: Synthetic oligonucleotide
  Sense strand starting at position 2378 of SEQ ID NO: 1243762
gcgcgcaucaccuuuggaa

SEQ ID NO: 1439561 - RNA, 19 nt, Artificial Sequence
  Description of Artificial Sequence: Synthetic oligonucleotide
  Antisense strand to SEQ ID NO: 1439560
uuccaaaggugaugcgcgc

SEQ ID NO: 1439562 - RNA, 19 nt, Artificial Sequence
  Description of Artificial Sequence: Synthetic oligonucleotide
  Sense strand starting at position 2424 of SEQ ID NO: 1243762
ucuugagagcucugugauc

SEQ ID NO: 1439563 - RNA, 19 nt, Artificial Sequence
  Description of Artificial Sequence: Synthetic oligonucleotide
  Antisense strand to SEQ ID NO: 1439562
gaucacagagcucucaaga

SEQ ID NO: 1439564 - RNA, 19 nt, Artificial Sequence
  Description of Artificial Sequence: Synthetic oligonucleotide
  Sense strand starting at position 2426 of SEQ ID NO: 1243762
uugagagcucugugaucua

SEQ ID NO: 1439565 - RNA, 19 nt, Artificial Sequence
  Description of Artificial Sequence: Synthetic oligonucleotide
  Antisense strand to SEQ ID NO: 1439564
uagaucacagagcucucaa

SEQ ID NO: 1439566 - RNA, 19 nt, Artificial Sequence
  Description of Artificial Sequence: Synthetic oligonucleotide
  Sense strand starting at position 2429 of SEQ ID NO: 1243762
agagcucugugaucuaaag

SEQ ID NO: 1439567 - RNA, 19 nt, Artificial Sequence
  Description of Artificial Sequence: Synthetic oligonucleotide
  Antisense strand to SEQ ID NO: 1439566
cuuuagaucacagagcucu

SEQ ID NO: 1439568 - RNA, 19 nt, Artificial Sequence
  Description of Artificial Sequence: Synthetic oligonucleotide
  Sense strand starting at position 2431 of SEQ ID NO: 1243762
agcucugugaucuaaaggu

SEQ ID NO: 1439569 - RNA, 19 nt, Artificial Sequence
  Description of Artificial Sequence: Synthetic oligonucleotide
  Antisense strand to SEQ ID NO: 1439568
accuuuagaucacagagcu

SEQ ID NO: 1439570 - RNA, 19 nt, Artificial Sequence
  Description of Artificial Sequence: Synthetic oligonucleotide
  Sense strand starting at position 2550 of SEQ ID NO: 1243762
ggccucucauuccuugaua

SEQ ID NO: 1439571 - RNA, 19 nt, Artificial Sequence
  Description of Artificial Sequence: Synthetic oligonucleotide
  Antisense strand to SEQ ID NO: 1439570
uaucaaggaaugagaggcc

SEQ ID NO: 1439572 - RNA, 19 nt, Artificial Sequence
  Description of Artificial Sequence: Synthetic oligonucleotide
  Sense strand starting at position 2775 of SEQ ID NO: 1243762
agaagccagcucugaugau

SEQ ID NO: 1439573 - RNA, 19 nt, Artificial Sequence
  Description of Artificial Sequence: Synthetic oligonucleotide
  Antisense strand to SEQ ID NO: 1439572
aucaucagagcuggcuucu

SEQ ID NO: 1439574 - RNA, 19 nt, Artificial Sequence
  Description of Artificial Sequence: Synthetic oligonucleotide
  Sense strand starting at position 2779 of SEQ ID NO: 1243762
gccagcucugaugauaaca

SEQ ID NO: 1439575 - RNA, 19 nt, Artificial Sequence
  Description of Artificial Sequence: Synthetic oligonucleotide
  Antisense strand to SEQ ID NO: 1439574
uguuaucaucagagcuggc

SEQ ID NO: 1439576 - RNA, 19 nt, Artificial Sequence
  Description of Artificial Sequence: Synthetic oligonucleotide
  Sense strand starting at position 2865 of SEQ ID NO: 1243762
cgauguugcagcuggauuu

SEQ ID NO: 1439577 - RNA, 19 nt, Artificial Sequence
  Description of Artificial Sequence: Synthetic oligonucleotide
  Antisense strand to SEQ ID NO: 1439576
aaauccagcugcaacaucg

SEQ ID NO: 1439578 - RNA, 19 nt, Artificial Sequence
  Description of Artificial Sequence: Synthetic oligonucleotide
  Sense strand starting at position 2908 of SEQ ID NO: 1243762
agggucugucucuggacaa

SEQ ID NO: 1439579 - RNA, 19 nt, Artificial Sequence
  Description of Artificial Sequence: Synthetic oligonucleotide
  Antisense strand to SEQ ID NO: 1439578
uuguccagagacagacccu

SEQ ID NO: 1439580 - RNA, 19 nt, Artificial Sequence
  Description of Artificial Sequence: Synthetic oligonucleotide
  Sense strand starting at position 3233 of SEQ ID NO: 1243762
cugugaguacagggagaaa

SEQ ID NO: 1439581 - RNA, 19 nt, Artificial Sequence
  Description of Artificial Sequence: Synthetic oligonucleotide
  Antisense strand to SEQ ID NO: 1439580
uuucucccuguacucacag

SEQ ID NO: 1439582 - RNA, 19 nt, Artificial Sequence
  Description of Artificial Sequence: Synthetic oligonucleotide
  Sense strand starting at position 3340 of SEQ ID NO: 1243762
cuccgcuaggcuuagaaga

SEQ ID NO: 1439583 - RNA, 19 nt, Artificial Sequence
  Description of Artificial Sequence: Synthetic oligonucleotide
  Antisense strand to SEQ ID NO: 1439582
ucuucuaagccuagcggag

SEQ ID NO: 1439584 - RNA, 19 nt, Artificial Sequence
  Description of Artificial Sequence: Synthetic oligonucleotide
  Sense strand starting at position 3415 of SEQ ID NO: 1243762
ccugguugcuuauugauac

SEQ ID NO: 1439585 - RNA, 19 nt, Artificial Sequence
  Description of Artificial Sequence: Synthetic oligonucleotide
  Antisense strand to SEQ ID NO: 1439584
guaucaauaagcaaccagg

SEQ ID NO: 1439586 - RNA, 19 nt, Artificial Sequence
  Description of Artificial Sequence: Synthetic oligonucleotide
  Sense strand starting at position 3445 of SEQ ID NO: 1243762
gagauaagcuugucuccau

SEQ ID NO: 1439587 - RNA, 19 nt, Artificial Sequence
  Description of Artificial Sequence: Synthetic oligonucleotide
  Antisense strand to SEQ ID NO: 1439586
auggagacaagcuuaucuc

SEQ ID NO: 1439588 - RNA, 19 nt, Artificial Sequence
  Description of Artificial Sequence: Synthetic oligonucleotide
  Sense strand starting at position 3446 of SEQ ID NO: 1243762
agauaagcuugucuccauu

SEQ ID NO: 1439589 - RNA, 19 nt, Artificial Sequence
  Description of Artificial Sequence: Synthetic oligonucleotide
  Antisense strand to SEQ ID NO: 1439588
aauggagacaagcuuaucu

SEQ ID NO: 1439590 - RNA, 19 nt, Artificial Sequence
  Description of Artificial Sequence: Synthetic oligonucleotide
  Sense strand starting at position 3457 of SEQ ID NO: 1243762
ucuccauuccuguaaguga

SEQ ID NO: 1439591 - RNA, 19 nt, Artificial Sequence
  Description of Artificial Sequence: Synthetic oligonucleotide
  Antisense strand to SEQ ID NO: 1439590
ucacuuacaggaauggaga

SEQ ID NO: 1439592 - RNA, 19 nt, Artificial Sequence
  Description of Artificial Sequence: Synthetic oligonucleotide
  Sense strand starting at position 3460 of SEQ ID NO: 1243762
ccauuccuguaagugacau

SEQ ID NO: 1439593 - RNA, 19 nt, Artificial Sequence
  Description of Artificial Sequence: Synthetic oligonucleotide
  Antisense strand to SEQ ID NO: 1439592
augucacuuacaggaaugg

SEQ ID NO: 1439594 - RNA, 19 nt, Artificial Sequence
  Description of Artificial Sequence: Synthetic oligonucleotide
  Sense strand starting at position 3466 of SEQ ID NO: 1243762
cuguaagugacaugaggaa

SEQ ID NO: 1439595 - RNA, 19 nt, Artificial Sequence
  Description of Artificial Sequence: Synthetic oligonucleotide
  Antisense strand to SEQ ID NO: 1439594
uuccucaugucacuuacag

SEQ ID NO: 1439596 - RNA, 19 nt, Artificial Sequence
  Description of Artificial Sequence: Synthetic oligonucleotide
  Sense strand starting at position 3478 of SEQ ID NO: 1243762
ugaggaaguuucccaguca

SEQ ID NO: 1439597 - RNA, 19 nt, Artificial Sequence
  Description of Artificial Sequence: Synthetic oligonucleotide
  Antisense strand to SEQ ID NO: 1439596
ugacugggaaacuuccuca

SEQ ID NO: 1439598 - RNA, 19 nt, Artificial Sequence
  Description of Artificial Sequence: Synthetic oligonucleotide
  Sense strand starting at position 3521 of SEQ ID NO: 1243762
acugaccuuuccuuaguua

SEQ ID NO: 1439599 - RNA, 19 nt, Artificial Sequence
  Description of Artificial Sequence: Synthetic oligonucleotide
  Antisense strand to SEQ ID NO: 1439598
uaacuaaggaaaggucagu

SEQ ID NO: 1439600 - RNA, 19 nt, Artificial Sequence
  Description of Artificial Sequence: Synthetic oligonucleotide
  Sense strand starting at position 3532 of SEQ ID NO: 1243762
cuuaguuacucuguccuca

SEQ ID NO: 1439601 - RNA, 19 nt, Artificial Sequence
  Description of Artificial Sequence: Synthetic oligonucleotide
  Antisense strand to SEQ ID NO: 1439600
ugaggacagaguaacuaag

SEQ ID NO: 1439602 - RNA, 19 nt, Artificial Sequence
  Description of Artificial Sequence: Synthetic oligonucleotide
  Sense strand starting at position 3536 of SEQ ID NO: 1243762
guuacucuguccucaaaua

SEQ ID NO: 1439603 - RNA, 19 nt, Artificial Sequence
  Description of Artificial Sequence: Synthetic oligonucleotide
  Antisense strand to SEQ ID NO: 1439602
uauuugaggacagaguaac

SEQ ID NO: 1439604 - RNA, 19 nt, Artificial Sequence
  Description of Artificial Sequence: Synthetic oligonucleotide
  Sense strand starting at position 3604 of SEQ ID NO: 1243762
uuaugagaccuucguccau

SEQ ID NO: 1439605 - RNA, 19 nt, Artificial Sequence
  Description of Artificial Sequence: Synthetic oligonucleotide
  Antisense strand to SEQ ID NO: 1439604
auggacgaaggucucauaa

SEQ ID NO: 1439606 - RNA, 19 nt, Artificial Sequence
  Description of Artificial Sequence: Synthetic oligonucleotide
  Sense strand starting at position 3606 of SEQ ID NO: 1243762
augagaccuucguccauac

SEQ ID NO: 1439607 - RNA, 19 nt, Artificial Sequence
  Description of Artificial Sequence: Synthetic oligonucleotide
  Antisense strand to SEQ ID NO: 1439606
guauggacgaaggucucau

SEQ ID NO: 1439608 - RNA, 19 nt, Artificial Sequence
  Description of Artificial Sequence: Synthetic oligonucleotide
  Sense strand starting at position 3608 of SEQ ID NO: 1243762
gagaccuucguccauacuu

SEQ ID NO: 1439609 - RNA, 19 nt, Artificial Sequence
  Description of Artificial Sequence: Synthetic oligonucleotide
  Antisense strand to SEQ ID NO: 1439608
aaguauggacgaaggucuc

SEQ ID NO: 1439610 - RNA, 19 nt, Artificial Sequence
  Description of Artificial Sequence: Synthetic oligonucleotide
  Sense strand starting at position 3650 of SEQ ID NO: 1243762
acucuuacgagcuaggaaa

SEQ ID NO: 1439611 - RNA, 19 nt, Artificial Sequence
  Description of Artificial Sequence: Synthetic oligonucleotide
  Antisense strand to SEQ ID NO: 1439610
uuuccuagcucguaagagu

SEQ ID NO: 1439612 - RNA, 19 nt, Artificial Sequence
  Description of Artificial Sequence: Synthetic oligonucleotide
  Sense strand starting at position 3662 of SEQ ID NO: 1243762
uaggaaaucccucagugca

SEQ ID NO: 1439613 - RNA, 19 nt, Artificial Sequence
  Description of Artificial Sequence: Synthetic oligonucleotide
  Antisense strand to SEQ ID NO: 1439612
ugcacugagggauuuccua

SEQ ID NO: 1439614 - RNA, 19 nt, Artificial Sequence
  Description of Artificial Sequence: Synthetic oligonucleotide
  Sense strand starting at position 3664 of SEQ ID NO: 1243762
ggaaaucccucagugcaau

SEQ ID NO: 1439615 - RNA, 19 nt, Artificial Sequence
  Description of Artificial Sequence: Synthetic oligonucleotide
  Antisense strand to SEQ ID NO: 1439614
auugcacugagggauuucc

SEQ ID NO: 1439616 - RNA, 19 nt, Artificial Sequence
  Description of Artificial Sequence: Synthetic oligonucleotide
  Sense strand starting at position 3670 of SEQ ID NO: 1243762
cccucagugcaaugagaag

SEQ ID NO: 1439617 - RNA, 19 nt, Artificial Sequence
  Description of Artificial Sequence: Synthetic oligonucleotide
  Antisense strand to SEQ ID NO: 1439616
cuucucauugcacugaggg

SEQ ID NO: 1439618 - RNA, 19 nt, Artificial Sequence
  Description of Artificial Sequence: Synthetic oligonucleotide
  Sense strand starting at position 3723 of SEQ ID NO: 1243762
aggaaagucgugggcagau

SEQ ID NO: 1439619 - RNA, 19 nt, Artificial Sequence
  Description of Artificial Sequence: Synthetic oligonucleotide
  Antisense strand to SEQ ID NO: 1439618
aucugcccacgacuuuccu

SEQ ID NO: 1439620 - RNA, 19 nt, Artificial Sequence
  Description of Artificial Sequence: Synthetic oligonucleotide
  Sense strand starting at position 3724 of SEQ ID NO: 1243762
ggaaagucgugggcagaua

SEQ ID NO: 1439621 - RNA, 19 nt, Artificial Sequence
  Description of Artificial Sequence: Synthetic oligonucleotide
  Antisense strand to SEQ ID NO: 1439620
uaucugcccacgacuuucc

SEQ ID NO: 1439622 - RNA, 19 nt, Artificial Sequence
  Description of Artificial Sequence: Synthetic oligonucleotide
  Sense strand starting at position 922 of SEQ ID NO: 1243763
ggcagauuccgugagucug

SEQ ID NO: 1439623 - RNA, 19 nt, Artificial Sequence
  Description of Artificial Sequence: Synthetic oligonucleotide
  Antisense strand to SEQ ID NO: 1439622
cagacucacggaaucugcc

SEQ ID NO: 1439624 - RNA, 19 nt, Artificial Sequence
  Description of Artificial Sequence: Synthetic oligonucleotide
  Sense strand starting at position 1236 of SEQ ID NO: 1243763
gcgcgcaucaccuuuggaa

SEQ ID NO: 1439625 - RNA, 19 nt, Artificial Sequence
  Description of Artificial Sequence: Synthetic oligonucleotide
  Antisense strand to SEQ ID NO: 1439624
uuccaaaggugaugcgcgc

SEQ ID NO: 1439626 - RNA, 19 nt, Artificial Sequence
  Description of Artificial Sequence: Synthetic oligonucleotide
  Sense strand starting at position 1284 of SEQ ID NO: 1243763
uugagagcucugugaucua

SEQ ID NO: 1439627 - RNA, 19 nt, Artificial Sequence
  Description of Artificial Sequence: Synthetic oligonucleotide
  Antisense strand to SEQ ID NO: 1439626
uagaucacagagcucucaa

SEQ ID NO: 1439628 - RNA, 19 nt, Artificial Sequence
  Description of Artificial Sequence: Synthetic oligonucleotide
  Sense strand starting at position 1287 of SEQ ID NO: 1243763
agagcucugugaucuaaag

SEQ ID NO: 1439629 - RNA, 19 nt, Artificial Sequence
  Description of Artificial Sequence: Synthetic oligonucleotide
  Antisense strand to SEQ ID NO: 1439628
cuuuagaucacagagcucu

SEQ ID NO: 1439630 - RNA, 19 nt, Artificial Sequence
  Description of Artificial Sequence: Synthetic oligonucleotide
  Sense strand starting at position 1289 of SEQ ID NO: 1243763
agcucugugaucuaaaggu

SEQ ID NO: 1439631 - RNA, 19 nt, Artificial Sequence
  Description of Artificial Sequence: Synthetic oligonucleotide
  Antisense strand to SEQ ID NO: 1439630
accuuuagaucacagagcu

SEQ ID NO: 1439632 - RNA, 19 nt, Artificial Sequence
  Description of Artificial Sequence: Synthetic oligonucleotide
  Sense strand starting at position 1408 of SEQ ID NO: 1243763
ggccucucauuccuugaua

SEQ ID NO: 1439633 - RNA, 19 nt, Artificial Sequence
  Description of Artificial Sequence: Synthetic oligonucleotide
  Antisense strand to SEQ ID NO: 1439632
uaucaaggaaugagaggcc

SEQ ID NO: 1439634 - RNA, 19 nt, Artificial Sequence
  Description of Artificial Sequence: Synthetic oligonucleotide
  Sense strand starting at position 1633 of SEQ ID NO: 1243763
agaagccagcucugaugau

SEQ ID NO: 1439635 - RNA, 19 nt, Artificial Sequence
  Description of Artificial Sequence: Synthetic oligonucleotide
  Antisense strand to SEQ ID NO: 1439634
aucaucagagcuggcuucu

SEQ ID NO: 1439636 - RNA, 19 nt, Artificial Sequence
  Description of Artificial Sequence: Synthetic oligonucleotide
  Sense strand starting at position 1637 of SEQ ID NO: 1243763
gccagcucugaugauaaca

SEQ ID NO: 1439637 - RNA, 19 nt, Artificial Sequence
  Description of Artificial Sequence: Synthetic oligonucleotide
  Antisense strand to SEQ ID NO: 1439636
uguuaucaucagagcuggc

SEQ ID NO: 1439638 - RNA, 19 nt, Artificial Sequence
  Description of Artificial Sequence: Synthetic oligonucleotide
  Sense strand starting at position 1723 of SEQ ID NO: 1243763
cgauguugcagcuggauuu

SEQ ID NO: 1439639 - RNA, 19 nt, Artificial Sequence
  Description of Artificial Sequence: Synthetic oligonucleotide
  Antisense strand to SEQ ID NO: 1439638
aaauccagcugcaacaucg

SEQ ID NO: 1439640 - RNA, 19 nt, Artificial Sequence
  Description of Artificial Sequence: Synthetic oligonucleotide
  Sense strand starting at position 1766 of SEQ ID NO: 1243763
agggucugucucuggacaa

SEQ ID NO: 1439641 - RNA, 19 nt, Artificial Sequence
  Description of Artificial Sequence: Synthetic oligonucleotide
  Antisense strand to SEQ ID NO: 1439640
uuguccagagacagacccu

SEQ ID NO: 1439642 - RNA, 19 nt, Artificial Sequence
  Description of Artificial Sequence: Synthetic oligonucleotide
  Sense strand starting at position 2091 of SEQ ID NO: 1243763
cugugaguacagggagaaa

SEQ ID NO: 1439643 - RNA, 19 nt, Artificial Sequence
  Description of Artificial Sequence: Synthetic oligonucleotide
  Antisense strand to SEQ ID NO: 1439642
uuucucccuguacucacag

SEQ ID NO: 1439644 - RNA, 19 nt, Artificial Sequence
  Description of Artificial Sequence: Synthetic oligonucleotide
  Sense strand starting at position 2198 of SEQ ID NO: 1243763
cuccgcuaggcuuagaaga

SEQ ID NO: 1439645 - RNA, 19 nt, Artificial Sequence
  Description of Artificial Sequence: Synthetic oligonucleotide
  Antisense strand to SEQ ID NO: 1439644
ucuucuaagccuagcggag

SEQ ID NO: 1439646 - RNA, 19 nt, Artificial Sequence
  Description of Artificial Sequence: Synthetic oligonucleotide
  Sense strand starting at position 2303 of SEQ ID NO: 1243763
gagauaagcuugucuccau

SEQ ID NO: 1439647 - RNA, 19 nt, Artificial Sequence
  Description of Artificial Sequence: Synthetic oligonucleotide
  Antisense strand to SEQ ID NO: 1439646
auggagacaagcuuaucuc

SEQ ID NO: 1439648 - RNA, 19 nt, Artificial Sequence
  Description of Artificial Sequence: Synthetic oligonucleotide
  Sense strand starting at position 2304 of SEQ ID NO: 1243763
agauaagcuugucuccauu

SEQ ID NO: 1439649 - RNA, 19 nt, Artificial Sequence
  Description of Artificial Sequence: Synthetic oligonucleotide
  Antisense strand to SEQ ID NO: 1439648
aauggagacaagcuuaucu

SEQ ID NO: 1439650 - RNA, 19 nt, Artificial Sequence
  Description of Artificial Sequence: Synthetic oligonucleotide
  Sense strand starting at position 2315 of SEQ ID NO: 1243763
ucuccauuccuguaaguga

SEQ ID NO: 1439651 - RNA, 19 nt, Artificial Sequence
  Description of Artificial Sequence: Synthetic oligonucleotide
  Antisense strand to SEQ ID NO: 1439650
ucacuuacaggaauggaga

SEQ ID NO: 1439652 - RNA, 19 nt, Artificial Sequence
  Description of Artificial Sequence: Synthetic oligonucleotide
  Sense strand starting at position 2318 of SEQ ID NO: 1243763
ccauuccuguaagugacau

SEQ ID NO: 1439653 - RNA, 19 nt, Artificial Sequence
  Description of Artificial Sequence: Synthetic oligonucleotide
  Antisense strand to SEQ ID NO: 1439652
augucacuuacaggaaugg

SEQ ID NO: 1439654 - RNA, 19 nt, Artificial Sequence
  Description of Artificial Sequence: Synthetic oligonucleotide
  Sense strand starting at position 2324 of SEQ ID NO: 1243763
cuguaagugacaugaggaa

SEQ ID NO: 1439655 - RNA, 19 nt, Artificial Sequence
  Description of Artificial Sequence: Synthetic oligonucleotide
  Antisense strand to SEQ ID NO: 1439654
uuccucaugucacuuacag

SEQ ID NO: 1439656 - RNA, 19 nt, Artificial Sequence
  Description of Artificial Sequence: Synthetic oligonucleotide
  Sense strand starting at position 2336 of SEQ ID NO: 1243763
ugaggaaguuucccaguca

SEQ ID NO: 1439657 - RNA, 19 nt, Artificial Sequence
  Description of Artificial Sequence: Synthetic oligonucleotide
  Antisense strand to SEQ ID NO: 1439656
ugacugggaaacuuccuca

SEQ ID NO: 1439658 - RNA, 19 nt, Artificial Sequence
  Description of Artificial Sequence: Synthetic oligonucleotide
  Sense strand starting at position 2379 of SEQ ID NO: 1243763
acugaccuuuccuuaguua

SEQ ID NO: 1439659 - RNA, 19 nt, Artificial Sequence
  Description of Artificial Sequence: Synthetic oligonucleotide
  Antisense strand to SEQ ID NO: 1439658
uaacuaaggaaaggucagu

SEQ ID NO: 1439660 - RNA, 19 nt, Artificial Sequence
  Description of Artificial Sequence: Synthetic oligonucleotide
  Sense strand starting at position 2394 of SEQ ID NO: 1243763
guuacucuguccucaaaua

SEQ ID NO: 1439661 - RNA, 19 nt, Artificial Sequence
  Description of Artificial Sequence: Synthetic oligonucleotide
  Antisense strand to SEQ ID NO: 1439660
uauuugaggacagaguaac

SEQ ID NO: 1439662 - RNA, 19 nt, Artificial Sequence
  Description of Artificial Sequence: Synthetic oligonucleotide
  Sense strand starting at position 2462 of SEQ ID NO: 1243763
uuaugagaccuucguccau

SEQ ID NO: 1439663 - RNA, 19 nt, Artificial Sequence
  Description of Artificial Sequence: Synthetic oligonucleotide
  Antisense strand to SEQ ID NO: 1439662
auggacgaaggucucauaa

SEQ ID NO: 1439664 - RNA, 19 nt, Artificial Sequence
  Description of Artificial Sequence: Synthetic oligonucleotide
  Sense strand starting at position 2464 of SEQ ID NO: 1243763
augagaccuucguccauac

SEQ ID NO: 1439665 - RNA, 19 nt, Artificial Sequence
  Description of Artificial Sequence: Synthetic oligonucleotide
  Antisense strand to SEQ ID NO: 1439664
guauggacgaaggucucau

SEQ ID NO: 1439666 - RNA, 19 nt, Artificial Sequence
  Description of Artificial Sequence: Synthetic oligonucleotide
  Sense strand starting at position 2466 of SEQ ID NO: 1243763
gagaccuucguccauacuu

SEQ ID NO: 1439667 - RNA, 19 nt, Artificial Sequence
  Description of Artificial Sequence: Synthetic oligonucleotide
  Antisense strand to SEQ ID NO: 1439666
aaguauggacgaaggucuc

SEQ ID NO: 1439668 - RNA, 19 nt, Artificial Sequence
  Description of Artificial Sequence: Synthetic oligonucleotide
  Sense strand starting at position 2508 of SEQ ID NO: 1243763
acucuuacgagcuaggaaa

SEQ ID NO: 1439669 - RNA, 19 nt, Artificial Sequence
  Description of Artificial Sequence: Synthetic oligonucleotide
  Antisense strand to SEQ ID NO: 1439668
uuuccuagcucguaagagu

SEQ ID NO: 1439670 - RNA, 19 nt, Artificial Sequence
  Description of Artificial Sequence: Synthetic oligonucleotide
  Sense strand starting at position 2520 of SEQ ID NO: 1243763
uaggaaaucccucagugca

SEQ ID NO: 1439671 - RNA, 19 nt, Artificial Sequence
  Description of Artificial Sequence: Synthetic oligonucleotide
  Antisense strand to SEQ ID NO: 1439670
ugcacugagggauuuccua

SEQ ID NO: 1439672 - RNA, 19 nt, Artificial Sequence
  Description of Artificial Sequence: Synthetic oligonucleotide
  Sense strand starting at position 2522 of SEQ ID NO: 1243763
ggaaaucccucagugcaau

SEQ ID NO: 1439673 - RNA, 19 nt, Artificial Sequence
  Description of Artificial Sequence: Synthetic oligonucleotide
  Antisense strand to SEQ ID NO: 1439672
auugcacugagggauuucc

SEQ ID NO: 1439674 - RNA, 19 nt, Artificial Sequence
  Description of Artificial Sequence: Synthetic oligonucleotide
  Sense strand starting at position 2528 of SEQ ID NO: 1243763
cccucagugcaaugagaag

SEQ ID NO: 1439675 - RNA, 19 nt, Artificial Sequence
  Description of Artificial Sequence: Synthetic oligonucleotide
  Antisense strand to SEQ ID NO: 1439674
cuucucauugcacugaggg

SEQ ID NO: 1439676 - RNA, 19 nt, Artificial Sequence
  Description of Artificial Sequence: Synthetic oligonucleotide
  Sense strand starting at position 2581 of SEQ ID NO: 1243763
aggaaagucgugggcagau

SEQ ID NO: 1439677 - RNA, 19 nt, Artificial Sequence
  Description of Artificial Sequence: Synthetic oligonucleotide
  Antisense strand to SEQ ID NO: 1439676
aucugcccacgacuuuccu

SEQ ID NO: 1439678 - RNA, 19 nt, Artificial Sequence
  Description of Artificial Sequence: Synthetic oligonucleotide
  Sense strand starting at position 2582 of SEQ ID NO: 1243763
ggaaagucgugggcagaua

SEQ ID NO: 1439679 - RNA, 19 nt, Artificial Sequence
  Description of Artificial Sequence: Synthetic oligonucleotide
  Antisense strand to SEQ ID NO: 1439678
uaucugcccacgacuuucc

SEQ ID NO: 1439680 - RNA, 19 nt, Artificial Sequence
  Description of Artificial Sequence: Synthetic oligonucleotide
  Sense strand starting at position 3068 of SEQ ID NO: 1243763
cccaauauagugcaaaguu

SEQ ID NO: 1439681 - RNA, 19 nt, Artificial Sequence
  Description of Artificial Sequence: Synthetic oligonucleotide
  Antisense strand to SEQ ID NO: 1439680
aacuuugcacuauauuggg

SEQ ID NO: 1439682 - RNA, 19 nt, Artificial Sequence
  Description of Artificial Sequence: Synthetic oligonucleotide
  Sense strand starting at position 3245 of SEQ ID NO: 1243763
cagggucucuuaucuggaa

SEQ ID NO: 1439683 - RNA, 19 nt, Artificial Sequence
  Description of Artificial Sequence: Synthetic oligonucleotide
  Antisense strand to SEQ ID NO: 1439682
uuccagauaagagacccug

SEQ ID NO: 1439684 - RNA, 19 nt, Artificial Sequence
  Description of Artificial Sequence: Synthetic oligonucleotide
  Sense strand starting at position 3249 of SEQ ID NO: 1243763
gucucuuaucuggaaccaa

SEQ ID NO: 1439685 - RNA, 19 nt, Artificial Sequence
  Description of Artificial Sequence: Synthetic oligonucleotide
  Antisense strand to SEQ ID NO: 1439684
uugguuccagauaagagac

SEQ ID NO: 1439686 - RNA, 19 nt, Artificial Sequence
  Description of Artificial Sequence: Synthetic oligonucleotide
  Sense strand starting at position 3346 of SEQ ID NO: 1243763
cguuaaacacuugaauauu

SEQ ID NO: 1439687 - RNA, 19 nt, Artificial Sequence
  Description of Artificial Sequence: Synthetic oligonucleotide
  Antisense strand to SEQ ID NO: 1439686
aauauucaaguguuuaacg

SEQ ID NO: 1439688 - RNA, 19 nt, Artificial Sequence
  Description of Artificial Sequence: Synthetic oligonucleotide
  Sense strand starting at position 3370 of SEQ ID NO: 1243763
gugggaugaaggcauccau

SEQ ID NO: 1439689 - RNA, 19 nt, Artificial Sequence
  Description of Artificial Sequence: Synthetic oligonucleotide
  Antisense strand to SEQ ID NO: 1439688
auggaugccuucaucccac

SEQ ID NO: 1439690 - RNA, 19 nt, Artificial Sequence
  Description of Artificial Sequence: Synthetic oligonucleotide
  Sense strand starting at position 3408 of SEQ ID NO: 1243763
ccacauuguucugucaaau

SEQ ID NO: 1439691 - RNA, 19 nt, Artificial Sequence
  Description of Artificial Sequence: Synthetic oligonucleotide
  Antisense strand to SEQ ID NO: 1439690
auuugacagaacaaugugg

SEQ ID NO: 1439692 - RNA, 19 nt, Artificial Sequence
  Description of Artificial Sequence: Synthetic oligonucleotide
  Sense strand starting at position 3593 of SEQ ID NO: 1243763
uuccauccucuugggaaga

SEQ ID NO: 1439693 - RNA, 19 nt, Artificial Sequence
  Description of Artificial Sequence: Synthetic oligonucleotide
  Antisense strand to SEQ ID NO: 1439692
ucuucccaagaggauggaa

SEQ ID NO: 1439694 - RNA, 19 nt, Artificial Sequence
  Description of Artificial Sequence: Synthetic oligonucleotide
  Sense strand starting at position 3680 of SEQ ID NO: 1243763
agugguaucaaacgguaac

SEQ ID NO: 1439695 - RNA, 19 nt, Artificial Sequence
  Description of Artificial Sequence: Synthetic oligonucleotide
  Antisense strand to SEQ ID NO: 1439694
guuaccguuugauaccacu

SEQ ID NO: 1439696 - RNA, 19 nt, Artificial Sequence
  Description of Artificial Sequence: Synthetic oligonucleotide
  Sense strand starting at position 3681 of SEQ ID NO: 1243763
gugguaucaaacgguaaca

SEQ ID NO: 1439697 - RNA, 19 nt, Artificial Sequence
  Description of Artificial Sequence: Synthetic oligonucleotide
  Antisense strand to SEQ ID NO: 1439696
uguuaccguuugauaccac

SEQ ID NO: 1439698 - RNA, 19 nt, Artificial Sequence
  Description of Artificial Sequence: Synthetic oligonucleotide
  Sense strand starting at position 3718 of SEQ ID NO: 1243763
ccaagaucuugugugagac

SEQ ID NO: 1439699 - RNA, 19 nt, Artificial Sequence
  Description of Artificial Sequence: Synthetic oligonucleotide
  Antisense strand to SEQ ID NO: 1439698
gucucacacaagaucuugg

SEQ ID NO: 1439700 - RNA, 19 nt, Artificial Sequence
  Description of Artificial Sequence: Synthetic oligonucleotide
  Sense strand starting at position 3878 of SEQ ID NO: 1243763
gcuuguccucaauaaagug

SEQ ID NO: 1439701 - RNA, 19 nt, Artificial Sequence
  Description of Artificial Sequence: Synthetic oligonucleotide
  Antisense strand to SEQ ID NO: 1439700
cacuuuauugaggacaagc

SEQ ID NO: 1439702 - RNA, 19 nt, Artificial Sequence
  Description of Artificial Sequence: Synthetic oligonucleotide
  Sense strand starting at position 204 of SEQ ID NO: 1243764
agcucuguucuagauuaaa

SEQ ID NO: 1439703 - RNA, 19 nt, Artificial Sequence
  Description of Artificial Sequence: Synthetic oligonucleotide
  Antisense strand to SEQ ID NO: 1439702
uuuaaucuagaacagagcu

SEQ ID NO: 1439704 - RNA, 19 nt, Artificial Sequence
  Description of Artificial Sequence: Synthetic oligonucleotide
  Sense strand starting at position 269 of SEQ ID NO: 1243764
agaaaucugagaggcguuu

SEQ ID NO: 1439705 - RNA, 19 nt, Artificial Sequence
  Description of Artificial Sequence: Synthetic oligonucleotide
  Antisense strand to SEQ ID NO: 1439704
aaacgccucucagauuucu

SEQ ID NO: 1439706 - RNA, 19 nt, Artificial Sequence
  Description of Artificial Sequence: Synthetic oligonucleotide
  Sense strand starting at position 502 of SEQ ID NO: 1243764
aaggaaacuuggcauaaga

SEQ ID NO: 1439707 - RNA, 19 nt, Artificial Sequence
  Description of Artificial Sequence: Synthetic oligonucleotide
  Antisense strand to SEQ ID NO: 1439706
ucuuaugccaaguuuccuu

SEQ ID NO: 1439708 - RNA, 19 nt, Artificial Sequence
  Description of Artificial Sequence: Synthetic oligonucleotide
  Sense strand starting at position 561 of SEQ ID NO: 1243764
uuggauucaggccagguau

SEQ ID NO: 1439709 - RNA, 19 nt, Artificial Sequence
  Description of Artificial Sequence: Synthetic oligonucleotide
  Antisense strand to SEQ ID NO: 1439708
auaccuggccugaauccaa

SEQ ID NO: 1439710 - RNA, 19 nt, Artificial Sequence
  Description of Artificial Sequence: Synthetic oligonucleotide
  Sense strand starting at position 1026 of SEQ ID NO: 1243764
ugacgucugguagaauucu

SEQ ID NO: 1439711 - RNA, 19 nt, Artificial Sequence
  Description of Artificial Sequence: Synthetic oligonucleotide
  Antisense strand to SEQ ID NO: 1439710
agaauucuaccagacguca

SEQ ID NO: 1439712 - RNA, 19 nt, Artificial Sequence
  Description of Artificial Sequence: Synthetic oligonucleotide
  Sense strand starting at position 1032 of SEQ ID NO: 1243764
cugguagaauucuccuguu

SEQ ID NO: 1439713 - RNA, 19 nt, Artificial Sequence
  Description of Artificial Sequence: Synthetic oligonucleotide
  Antisense strand to SEQ ID NO: 1439712
aacaggagaauucuaccag

SEQ ID NO: 1439714 - RNA, 19 nt, Artificial Sequence
  Description of Artificial Sequence: Synthetic oligonucleotide
  Sense strand starting at position 1132 of SEQ ID NO: 1243764
guccuucugacaggugaca

SEQ ID NO: 1439715 - RNA, 19 nt, Artificial Sequence
  Description of Artificial Sequence: Synthetic oligonucleotide
  Antisense strand to SEQ ID NO: 1439714
ugucaccugucagaaggac

SEQ ID NO: 1439716 - RNA, 19 nt, Artificial Sequence
  Description of Artificial Sequence: Synthetic oligonucleotide
  Sense strand starting at position 1213 of SEQ ID NO: 1243764
accaaacuccuccggugau

SEQ ID NO: 1439717 - RNA, 19 nt, Artificial Sequence
  Description of Artificial Sequence: Synthetic oligonucleotide
  Antisense strand to SEQ ID NO: 1439716
aucaccggaggaguuuggu

SEQ ID NO: 1439718 - RNA, 19 nt, Artificial Sequence
  Description of Artificial Sequence: Synthetic oligonucleotide
  Sense strand starting at position 1246 of SEQ ID NO: 1243764
cagaguggcucccauuuga

SEQ ID NO: 1439719 - RNA, 19 nt, Artificial Sequence
  Description of Artificial Sequence: Synthetic oligonucleotide
  Antisense strand to SEQ ID NO: 1439718
ucaaaugggagccacucug

SEQ ID NO: 1439720 - RNA, 19 nt, Artificial Sequence
  Description of Artificial Sequence: Synthetic oligonucleotide
  Sense strand starting at position 1264 of SEQ ID NO: 1243764
augagugauguguguuuac

SEQ ID NO: 1439721 - RNA, 19 nt, Artificial Sequence
  Description of Artificial Sequence: Synthetic oligonucleotide
  Antisense strand to SEQ ID NO: 1439720
guaaacacacaucacucau

SEQ ID NO: 1439722 - RNA, 19 nt, Artificial Sequence
  Description of Artificial Sequence: Synthetic oligonucleotide
  Sense strand starting at position 1275 of SEQ ID NO: 1243764
guguuuaccucuucuagaa

SEQ ID NO: 1439723 - RNA, 19 nt, Artificial Sequence
  Description of Artificial Sequence: Synthetic oligonucleotide
  Antisense strand to SEQ ID NO: 1439722
uucuagaagagguaaacac

SEQ ID NO: 1439724 - RNA, 19 nt, Artificial Sequence
  Description of Artificial Sequence: Synthetic oligonucleotide
  Sense strand starting at position 1398 of SEQ ID NO: 1243764
aaggaauucucgccagaug

SEQ ID NO: 1439725 - RNA, 19 nt, Artificial Sequence
  Description of Artificial Sequence: Synthetic oligonucleotide
  Antisense strand to SEQ ID NO: 1439724
caucuggcgagaauuccuu

SEQ ID NO: 1439726 - RNA, 19 nt, Artificial Sequence
  Description of Artificial Sequence: Synthetic oligonucleotide
  Sense strand starting at position 1401 of SEQ ID NO: 1243764
gaauucucgccagauggag

SEQ ID NO: 1439727 - RNA, 19 nt, Artificial Sequence
  Description of Artificial Sequence: Synthetic oligonucleotide
  Antisense strand to SEQ ID NO: 1439726
cuccaucuggcgagaauuc

SEQ ID NO: 1439728 - RNA, 19 nt, Artificial Sequence
  Description of Artificial Sequence: Synthetic oligonucleotide
  Sense strand starting at position 1544 of SEQ ID NO: 1243764
uuagguguuuauuugguua

SEQ ID NO: 1439729 - RNA, 19 nt, Artificial Sequence
  Description of Artificial Sequence: Synthetic oligonucleotide
  Antisense strand to SEQ ID NO: 1439728
uaaccaaauaaacaccuaa

SEQ ID NO: 1439730 - RNA, 19 nt, Artificial Sequence
  Description of Artificial Sequence: Synthetic oligonucleotide
  Sense strand starting at position 1547 of SEQ ID NO: 1243764
gguguuuauuugguuacuu

SEQ ID NO: 1439731 - RNA, 19 nt, Artificial Sequence
  Description of Artificial Sequence: Synthetic oligonucleotide
  Antisense strand to SEQ ID NO: 1439730
aaguaaccaaauaaacacc

SEQ ID NO: 1439732 - RNA, 19 nt, Artificial Sequence
  Description of Artificial Sequence: Synthetic oligonucleotide
  Sense strand starting at position 1571 of SEQ ID NO: 1243764
gcccaaguccagggaugaa

SEQ ID NO: 1439733 - RNA, 19 nt, Artificial Sequence
  Description of Artificial Sequence: Synthetic oligonucleotide
  Antisense strand to SEQ ID NO: 1439732
uucaucccuggacuugggc

SEQ ID NO: 1439734 - RNA, 19 nt, Artificial Sequence
  Description of Artificial Sequence: Synthetic oligonucleotide
  Sense strand starting at position 1593 of SEQ ID NO: 1243764
agacucuuccaggguuacu

SEQ ID NO: 1439735 - RNA, 19 nt, Artificial Sequence
  Description of Artificial Sequence: Synthetic oligonucleotide
  Antisense strand to SEQ ID NO: 1439734
aguaacccuggaagagucu

SEQ ID NO: 1439736 - RNA, 19 nt, Artificial Sequence
  Description of Artificial Sequence: Synthetic oligonucleotide
  Sense strand starting at position 1602 of SEQ ID NO: 1243764
caggguuacuugcuacuua

SEQ ID NO: 1439737 - RNA, 19 nt, Artificial Sequence
  Description of Artificial Sequence: Synthetic oligonucleotide
  Antisense strand to SEQ ID NO: 1439736
uaaguagcaaguaacccug

SEQ ID NO: 1439738 - RNA, 19 nt, Artificial Sequence
  Description of Artificial Sequence: Synthetic oligonucleotide
  Sense strand starting at position 1654 of SEQ ID NO: 1243764
ugaggucuggcuugggaca

SEQ ID NO: 1439739 - RNA, 19 nt, Artificial Sequence
  Description of Artificial Sequence: Synthetic oligonucleotide
  Antisense strand to SEQ ID NO: 1439738
ugucccaagccagaccuca

SEQ ID NO: 1439740 - RNA, 19 nt, Artificial Sequence
  Description of Artificial Sequence: Synthetic oligonucleotide
  Sense strand starting at position 1655 of SEQ ID NO: 1243764
gaggucuggcuugggacaa

SEQ ID NO: 1439741 - RNA, 19 nt, Artificial Sequence
  Description of Artificial Sequence: Synthetic oligonucleotide
  Antisense strand to SEQ ID NO: 1439740
uugucccaagccagaccuc

SEQ ID NO: 1439742 - RNA, 19 nt, Artificial Sequence
  Description of Artificial Sequence: Synthetic oligonucleotide
  Sense strand starting at position 1692 of SEQ ID NO: 1243764
ggccaagaauucucccauc

SEQ ID NO: 1439743 - RNA, 19 nt, Artificial Sequence
  Description of Artificial Sequence: Synthetic oligonucleotide
  Antisense strand to SEQ ID NO: 1439742
gaugggagaauucuuggcc

SEQ ID NO: 1439744 - RNA, 19 nt, Artificial Sequence
  Description of Artificial Sequence: Synthetic oligonucleotide
  Sense strand starting at position 1984 of SEQ ID NO: 1243764
cuuugagaaccgugugaga

SEQ ID NO: 1439745 - RNA, 19 nt, Artificial Sequence
  Description of Artificial Sequence: Synthetic oligonucleotide
  Antisense strand to SEQ ID NO: 1439744
ucucacacgguucucaaag

SEQ ID NO: 1439746 - RNA, 19 nt, Artificial Sequence
  Description of Artificial Sequence: Synthetic oligonucleotide
  Sense strand starting at position 1986 of SEQ ID NO: 1243764
uugagaaccgugugagaga

SEQ ID NO: 1439747 - RNA, 19 nt, Artificial Sequence
  Description of Artificial Sequence: Synthetic oligonucleotide
  Antisense strand to SEQ ID NO: 1439746
ucucucacacgguucucaa

SEQ ID NO: 1439748 - RNA, 19 nt, Artificial Sequence
  Description of Artificial Sequence: Synthetic oligonucleotide
  Sense strand starting at position 2124 of SEQ ID NO: 1243764
gaaagaaccugggaauucu

SEQ ID NO: 1439749 - RNA, 19 nt, Artificial Sequence
  Description of Artificial Sequence: Synthetic oligonucleotide
  Antisense strand to SEQ ID NO: 1439748
agaauucccagguucuuuc

SEQ ID NO: 1439750 - RNA, 19 nt, Artificial Sequence
  Description of Artificial Sequence: Synthetic oligonucleotide
  Sense strand starting at position 2253 of SEQ ID NO: 1243764
ggcauaagacagggcuuua

SEQ ID NO: 1439751 - RNA, 19 nt, Artificial Sequence
  Description of Artificial Sequence: Synthetic oligonucleotide
  Antisense strand to SEQ ID NO: 1439750
uaaagcccugucuuaugcc

SEQ ID NO: 1439752 - RNA, 19 nt, Artificial Sequence
  Description of Artificial Sequence: Synthetic oligonucleotide
  Sense strand starting at position 2283 of SEQ ID NO: 1243764
gggcuucuaggucaggaau

SEQ ID NO: 1439753 - RNA, 19 nt, Artificial Sequence
  Description of Artificial Sequence: Synthetic oligonucleotide
  Antisense strand to SEQ ID NO: 1439752
auuccugaccuagaagccc

SEQ ID NO: 1439754 - RNA, 19 nt, Artificial Sequence
  Description of Artificial Sequence: Synthetic oligonucleotide
  Sense strand starting at position 2490 of SEQ ID NO: 1243764
uguuuagccuuccugauca

SEQ ID NO: 1439755 - RNA, 19 nt, Artificial Sequence
  Description of Artificial Sequence: Synthetic oligonucleotide
  Antisense strand to SEQ ID NO: 1439754
ugaucaggaaggcuaaaca

SEQ ID NO: 1439756 - RNA, 19 nt, Artificial Sequence
  Description of Artificial Sequence: Synthetic oligonucleotide
  Sense strand starting at position 2828 of SEQ ID NO: 1243764
ucccaaagcggguaggauu

SEQ ID NO: 1439757 - RNA, 19 nt, Artificial Sequence
  Description of Artificial Sequence: Synthetic oligonucleotide
  Antisense strand to SEQ ID NO: 1439756
aauccuacccgcuuuggga

SEQ ID NO: 1439758 - RNA, 19 nt, Artificial Sequence
  Description of Artificial Sequence: Synthetic oligonucleotide
  Sense strand starting at position 2839 of SEQ ID NO: 1243764
guaggauuaucagcgugaa

SEQ ID NO: 1439759 - RNA, 19 nt, Artificial Sequence
  Description of Artificial Sequence: Synthetic oligonucleotide
  Antisense strand to SEQ ID NO: 1439758
uucacgcugauaauccuac

SEQ ID NO: 1439760 - RNA, 19 nt, Artificial Sequence
  Description of Artificial Sequence: Synthetic oligonucleotide
  Sense strand starting at position 2840 of SEQ ID NO: 1243764
uaggauuaucagcgugaag

SEQ ID NO: 1439761 - RNA, 19 nt, Artificial Sequence
  Description of Artificial Sequence: Synthetic oligonucleotide
  Antisense strand to SEQ ID NO: 1439760
cuucacgcugauaauccua

SEQ ID NO: 1439762 - RNA, 19 nt, Artificial Sequence
  Description of Artificial Sequence: Synthetic oligonucleotide
  Sense strand starting at position 2843 of SEQ ID NO: 1243764
gauuaucagcgugaagcca

SEQ ID NO: 1439763 - RNA, 19 nt, Artificial Sequence
  Description of Artificial Sequence: Synthetic oligonucleotide
  Antisense strand to SEQ ID NO: 1439762
uggcuucacgcugauaauc

SEQ ID NO: 1439764 - RNA, 19 nt, Artificial Sequence
  Description of Artificial Sequence: Synthetic oligonucleotide
  Sense strand starting at position 2960 of SEQ ID NO: 1243764
ugggcuugcaaauguuuaa

SEQ ID NO: 1439765 - RNA, 19 nt, Artificial Sequence
  Description of Artificial Sequence: Synthetic oligonucleotide
  Antisense strand to SEQ ID NO: 1439764
uuaaacauuugcaagccca

SEQ ID NO: 1439766 - RNA, 19 nt, Artificial Sequence
  Description of Artificial Sequence: Synthetic oligonucleotide
  Sense strand starting at position 2971 of SEQ ID NO: 1243764
auguuuaagucaguacagu

SEQ ID NO: 1439767 - RNA, 19 nt, Artificial Sequence
  Description of Artificial Sequence: Synthetic oligonucleotide
  Antisense strand to SEQ ID NO: 1439766
acuguacugacuuaaacau

SEQ ID NO: 1439768 - RNA, 19 nt, Artificial Sequence
  Description of Artificial Sequence: Synthetic oligonucleotide
  Sense strand starting at position 2998 of SEQ ID NO: 1243764
gccacauggagcuauguca

SEQ ID NO: 1439769 - RNA, 19 nt, Artificial Sequence
  Description of Artificial Sequence: Synthetic oligonucleotide
  Antisense strand to SEQ ID NO: 1439768
ugacauagcuccauguggc

SEQ ID NO: 1439770 - RNA, 19 nt, Artificial Sequence
  Description of Artificial Sequence: Synthetic oligonucleotide
  Sense strand starting at position 3005 of SEQ ID NO: 1243764
ggagcuaugucaguuaaac

SEQ ID NO: 1439771 - RNA, 19 nt, Artificial Sequence
  Description of Artificial Sequence: Synthetic oligonucleotide
  Antisense strand to SEQ ID NO: 1439770
guuuaacugacauagcucc

SEQ ID NO: 1439772 - RNA, 19 nt, Artificial Sequence
  Description of Artificial Sequence: Synthetic oligonucleotide
  Sense strand starting at position 3167 of SEQ ID NO: 1243764
augcaaucaucugcugaac

SEQ ID NO: 1439773 - RNA, 19 nt, Artificial Sequence
  Description of Artificial Sequence: Synthetic oligonucleotide
  Antisense strand to SEQ ID NO: 1439772
guucagcagaugauugcau

SEQ ID NO: 1439774 - RNA, 19 nt, Artificial Sequence
  Description of Artificial Sequence: Synthetic oligonucleotide
  Sense strand starting at position 3605 of SEQ ID NO: 1243764
cuuggugaaagcuaugcau

SEQ ID NO: 1439775 - RNA, 19 nt, Artificial Sequence
  Description of Artificial Sequence: Synthetic oligonucleotide
  Antisense strand to SEQ ID NO: 1439774
augcauagcuuucaccaag

SEQ ID NO: 1439776 - RNA, 19 nt, Artificial Sequence
  Description of Artificial Sequence: Synthetic oligonucleotide
  Sense strand starting at position 3849 of SEQ ID NO: 1243764
uuccuaugccaguaaagga

SEQ ID NO: 1439777 - RNA, 19 nt, Artificial Sequence
  Description of Artificial Sequence: Synthetic oligonucleotide
  Antisense strand to SEQ ID NO: 1439776
uccuuuacuggcauaggaa

SEQ ID NO: 1439778 - RNA, 19 nt, Artificial Sequence
  Description of Artificial Sequence: Synthetic oligonucleotide
  Sense strand starting at position 3869 of SEQ ID NO: 1243764
ggaguaagcccugagcguu

SEQ ID NO: 1439779 - RNA, 19 nt, Artificial Sequence
  Description of Artificial Sequence: Synthetic oligonucleotide
  Antisense strand to SEQ ID NO: 1439778
aacgcucagggcuuacucc

SEQ ID NO: 1439780 - RNA, 19 nt, Artificial Sequence
  Description of Artificial Sequence: Synthetic oligonucleotide
  Sense strand starting at position 3911 of SEQ ID NO: 1243764
gcgugagucccuuucaguc

SEQ ID NO: 1439781 - RNA, 19 nt, Artificial Sequence
  Description of Artificial Sequence: Synthetic oligonucleotide
  Antisense strand to SEQ ID NO: 1439780
gacugaaagggacucacgc

SEQ ID NO: 1439782 - RNA, 19 nt, Artificial Sequence
  Description of Artificial Sequence: Synthetic oligonucleotide
  Sense strand starting at position 6 of SEQ ID NO: 1243765
ugcaucacucgacgggaaa

SEQ ID NO: 1439783 - RNA, 19 nt, Artificial Sequence
  Description of Artificial Sequence: Synthetic oligonucleotide
  Antisense strand to SEQ ID NO: 1439782
uuucccgucgagugaugca

SEQ ID NO: 1439784 - RNA, 19 nt, Artificial Sequence
  Description of Artificial Sequence: Synthetic oligonucleotide
  Sense strand starting at position 202 of SEQ ID NO: 1243765
cccagaugugcugacacau

SEQ ID NO: 1439785 - RNA, 19 nt, Artificial Sequence
  Description of Artificial Sequence: Synthetic oligonucleotide
  Antisense strand to SEQ ID NO: 1439784
augugucagcacaucuggg

SEQ ID NO: 1439786 - RNA, 19 nt, Artificial Sequence
  Description of Artificial Sequence: Synthetic oligonucleotide
  Sense strand starting at position 625 of SEQ ID NO: 1243765
cagggauuauugcccgaaa

SEQ ID NO: 1439787 - RNA, 19 nt, Artificial Sequence
  Description of Artificial Sequence: Synthetic oligonucleotide
  Antisense strand to SEQ ID NO: 1439786
uuucgggcaauaaucccug

SEQ ID NO: 1439788 - RNA, 19 nt, Artificial Sequence
  Description of Artificial Sequence: Synthetic oligonucleotide
  Sense strand starting at position 626 of SEQ ID NO: 1243765
agggauuauugcccgaaac

SEQ ID NO: 1439789 - RNA, 19 nt, Artificial Sequence
  Description of Artificial Sequence: Synthetic oligonucleotide
  Antisense strand to SEQ ID NO: 1439788
guuucgggcaauaaucccu

SEQ ID NO: 1439790 - RNA, 19 nt, Artificial Sequence
  Description of Artificial Sequence: Synthetic oligonucleotide
  Sense strand starting at position 627 of SEQ ID NO: 1243765
gggauuauugcccgaaacc

SEQ ID NO: 1439791 - RNA, 19 nt, Artificial Sequence
  Description of Artificial Sequence: Synthetic oligonucleotide
  Antisense strand to SEQ ID NO: 1439790
gguuucgggcaauaauccc

SEQ ID NO: 1439792 - RNA, 19 nt, Artificial Sequence
  Description of Artificial Sequence: Synthetic oligonucleotide
  Sense strand starting at position 1239 of SEQ ID NO: 1243765
ucuguuacccuccaggauu

SEQ ID NO: 1439793 - RNA, 19 nt, Artificial Sequence
  Description of Artificial Sequence: Synthetic oligonucleotide
  Antisense strand to SEQ ID NO: 1439792
aauccuggaggguaacaga

SEQ ID NO: 1439794 - RNA, 19 nt, Artificial Sequence
  Description of Artificial Sequence: Synthetic oligonucleotide
  Sense strand starting at position 1358 of SEQ ID NO: 1243765
cugcgaaauauuggagauu

SEQ ID NO: 1439795 - RNA, 19 nt, Artificial Sequence
  Description of Artificial Sequence: Synthetic oligonucleotide
  Antisense strand to SEQ ID NO: 1439794
aaucuccaauauuucgcag

SEQ ID NO: 1439796 - RNA, 19 nt, Artificial Sequence
  Description of Artificial Sequence: Synthetic oligonucleotide
  Sense strand starting at position 1740 of SEQ ID NO: 1243765
ccaggauacuuuccgccaa

SEQ ID NO: 1439797 - RNA, 19 nt, Artificial Sequence
  Description of Artificial Sequence: Synthetic oligonucleotide
  Antisense strand to SEQ ID NO: 1439796
uuggcggaaaguauccugg

SEQ ID NO: 1439798 - RNA, 19 nt, Artificial Sequence
  Description of Artificial Sequence: Synthetic oligonucleotide
  Sense strand starting at position 2065 of SEQ ID NO: 1243765
ucaacagauuugucugcuu

SEQ ID NO: 1439799 - RNA, 19 nt, Artificial Sequence
  Description of Artificial Sequence: Synthetic oligonucleotide
  Antisense strand to SEQ ID NO: 1439798
aagcagacaaaucuguuga

SEQ ID NO: 1439800 - RNA, 19 nt, Artificial Sequence
  Description of Artificial Sequence: Synthetic oligonucleotide
  Sense strand starting at position 2068 of SEQ ID NO: 1243765
acagauuugucugcuucca

SEQ ID NO: 1439801 - RNA, 19 nt, Artificial Sequence
  Description of Artificial Sequence: Synthetic oligonucleotide
  Antisense strand to SEQ ID NO: 1439800
uggaagcagacaaaucugu

SEQ ID NO: 1439802 - RNA, 19 nt, Artificial Sequence
  Description of Artificial Sequence: Synthetic oligonucleotide
  Sense strand starting at position 2070 of SEQ ID NO: 1243765
agauuugucugcuuccauc

SEQ ID NO: 1439803 - RNA, 19 nt, Artificial Sequence
  Description of Artificial Sequence: Synthetic oligonucleotide
  Antisense strand to SEQ ID NO: 1439802
gauggaagcagacaaaucu

SEQ ID NO: 1439804 - RNA, 19 nt, Artificial Sequence
  Description of Artificial Sequence: Synthetic oligonucleotide
  Sense strand starting at position 2334 of SEQ ID NO: 1243765
aguauaaaccucggucuaa

SEQ ID NO: 1439805 - RNA, 19 nt, Artificial Sequence
  Description of Artificial Sequence: Synthetic oligonucleotide
  Antisense strand to SEQ ID NO: 1439804
uuagaccgagguuuauacu

SEQ ID NO: 1439806 - RNA, 19 nt, Artificial Sequence
  Description of Artificial Sequence: Synthetic oligonucleotide
  Sense strand starting at position 2335 of SEQ ID NO: 1243765
guauaaaccucggucuaag

SEQ ID NO: 1439807 - RNA, 19 nt, Artificial Sequence
  Description of Artificial Sequence: Synthetic oligonucleotide
  Antisense strand to SEQ ID NO: 1439806
cuuagaccgagguuuauac

SEQ ID NO: 1439808 - RNA, 19 nt, Artificial Sequence
  Description of Artificial Sequence: Synthetic oligonucleotide
  Sense strand starting at position 2345 of SEQ ID NO: 1243765
cggucuaagaacugcacaa

SEQ ID NO: 1439809 - RNA, 19 nt, Artificial Sequence
  Description of Artificial Sequence: Synthetic oligonucleotide
  Antisense strand to SEQ ID NO: 1439808
uugugcaguucuuagaccg

SEQ ID NO: 1439810 - RNA, 19 nt, Artificial Sequence
  Description of Artificial Sequence: Synthetic oligonucleotide
  Sense strand starting at position 2367 of SEQ ID NO: 1243765
guagauaaguggagaugga

SEQ ID NO: 1439811 - RNA, 19 nt, Artificial Sequence
  Description of Artificial Sequence: Synthetic oligonucleotide
  Antisense strand to SEQ ID NO: 1439810
uccaucuccacuuaucuac

SEQ ID NO: 1439812 - RNA, 19 nt, Artificial Sequence
  Description of Artificial Sequence: Synthetic oligonucleotide
  Sense strand starting at position 2737 of SEQ ID NO: 1243765
aggagauguggccgugaga

SEQ ID NO: 1439813 - RNA, 19 nt, Artificial Sequence
  Description of Artificial Sequence: Synthetic oligonucleotide
  Antisense strand to SEQ ID NO: 1439812
ucucacggccacaucuccu

SEQ ID NO: 1439814 - RNA, 19 nt, Artificial Sequence
  Description of Artificial Sequence: Synthetic oligonucleotide
  Sense strand starting at position 2740 of SEQ ID NO: 1243765
agauguggccgugagaucu

SEQ ID NO: 1439815 - RNA, 19 nt, Artificial Sequence
  Description of Artificial Sequence: Synthetic oligonucleotide
  Antisense strand to SEQ ID NO: 1439814
agaucucacggccacaucu

SEQ ID NO: 1439816 - RNA, 19 nt, Artificial Sequence
  Description of Artificial Sequence: Synthetic oligonucleotide
  Sense strand starting at position 2752 of SEQ ID NO: 1243765
gagaucuguucugugaaac

SEQ ID NO: 1439817 - RNA, 19 nt, Artificial Sequence
  Description of Artificial Sequence: Synthetic oligonucleotide
  Antisense strand to SEQ ID NO: 1439816
guuucacagaacagaucuc

SEQ ID NO: 1439818 - RNA, 19 nt, Artificial Sequence
  Description of Artificial Sequence: Synthetic oligonucleotide
  Sense strand starting at position 2753 of SEQ ID NO: 1243765
agaucuguucugugaaaca

SEQ ID NO: 1439819 - RNA, 19 nt, Artificial Sequence
  Description of Artificial Sequence: Synthetic oligonucleotide
  Antisense strand to SEQ ID NO: 1439818
uguuucacagaacagaucu

SEQ ID NO: 1439820 - RNA, 19 nt, Artificial Sequence
  Description of Artificial Sequence: Synthetic oligonucleotide
  Sense strand starting at position 2785 of SEQ ID NO: 1243765
cuagguggucaacacauua

SEQ ID NO: 1439821 - RNA, 19 nt, Artificial Sequence
  Description of Artificial Sequence: Synthetic oligonucleotide
  Antisense strand to SEQ ID NO: 1439820
uaauguguugaccaccuag

SEQ ID NO: 1439822 - RNA, 19 nt, Artificial Sequence
  Description of Artificial Sequence: Synthetic oligonucleotide
  Sense strand starting at position 2831 of SEQ ID NO: 1243765
cagcauucuuauguagaga

SEQ ID NO: 1439823 - RNA, 19 nt, Artificial Sequence
  Description of Artificial Sequence: Synthetic oligonucleotide
  Antisense strand to SEQ ID NO: 1439822
ucucuacauaagaaugcug

SEQ ID NO: 1439824 - RNA, 19 nt, Artificial Sequence
  Description of Artificial Sequence: Synthetic oligonucleotide
  Sense strand starting at position 2832 of SEQ ID NO: 1243765
agcauucuuauguagagag

SEQ ID NO: 1439825 - RNA, 19 nt, Artificial Sequence
  Description of Artificial Sequence: Synthetic oligonucleotide
  Antisense strand to SEQ ID NO: 1439824
cucucuacauaagaaugcu

SEQ ID NO: 1439826 - RNA, 19 nt, Artificial Sequence
  Description of Artificial Sequence: Synthetic oligonucleotide
  Sense strand starting at position 2907 of SEQ ID NO: 1243765
uagugagaauuagcccauu

SEQ ID NO: 1439827 - RNA, 19 nt, Artificial Sequence
  Description of Artificial Sequence: Synthetic oligonucleotide
  Antisense strand to SEQ ID NO: 1439826
aaugggcuaauucucacua

SEQ ID NO: 1439828 - RNA, 19 nt, Artificial Sequence
  Description of Artificial Sequence: Synthetic oligonucleotide
  Sense strand starting at position 3206 of SEQ ID NO: 1243765
agaggucucuccucuggaa

SEQ ID NO: 1439829 - RNA, 19 nt, Artificial Sequence
  Description of Artificial Sequence: Synthetic oligonucleotide
  Antisense strand to SEQ ID NO: 1439828
uuccagaggagagaccucu

SEQ ID NO: 1439830 - RNA, 19 nt, Artificial Sequence
  Description of Artificial Sequence: Synthetic oligonucleotide
  Sense strand starting at position 3229 of SEQ ID NO: 1243765
aagcauggugccugaauuu

SEQ ID NO: 1439831 - RNA, 19 nt, Artificial Sequence
  Description of Artificial Sequence: Synthetic oligonucleotide
  Antisense strand to SEQ ID NO: 1439830
aaauucaggcaccaugcuu

SEQ ID NO: 1439832 - RNA, 19 nt, Artificial Sequence
  Description of Artificial Sequence: Synthetic oligonucleotide
  Sense strand starting at position 3565 of SEQ ID NO: 1243765
aaaguuugaguguauugau

SEQ ID NO: 1439833 - RNA, 19 nt, Artificial Sequence
  Description of Artificial Sequence: Synthetic oligonucleotide
  Antisense strand to SEQ ID NO: 1439832
aucaauacacucaaacuuu

SEQ ID NO: 1439834 - RNA, 19 nt, Artificial Sequence
  Description of Artificial Sequence: Synthetic oligonucleotide
  Sense strand starting at position 3593 of SEQ ID NO: 1243765
ugaaguauuauguguauug

SEQ ID NO: 1439835 - RNA, 19 nt, Artificial Sequence
  Description of Artificial Sequence: Synthetic oligonucleotide
  Antisense strand to SEQ ID NO: 1439834
caauacacauaauacuuca

SEQ ID NO: 1439836 - RNA, 19 nt, Artificial Sequence
  Description of Artificial Sequence: Synthetic oligonucleotide
  Sense strand starting at position 3594 of SEQ ID NO: 1243765
gaaguauuauguguauuga

SEQ ID NO: 1439837 - RNA, 19 nt, Artificial Sequence
  Description of Artificial Sequence: Synthetic oligonucleotide
  Antisense strand to SEQ ID NO: 1439836
ucaauacacauaauacuuc

SEQ ID NO: 1439838 - RNA, 19 nt, Artificial Sequence
  Description of Artificial Sequence: Synthetic oligonucleotide
  Sense strand starting at position 3608 of SEQ ID NO: 1243765
auugauuguuaugugugaa

SEQ ID NO: 1439839 - RNA, 19 nt, Artificial Sequence
  Description of Artificial Sequence: Synthetic oligonucleotide
  Antisense strand to SEQ ID NO: 1439838
uucacacauaacaaucaau

SEQ ID NO: 1439840 - RNA, 19 nt, Artificial Sequence
  Description of Artificial Sequence: Synthetic oligonucleotide
  Sense strand starting at position 3611 of SEQ ID NO: 1243765
gauuguuaugugugaagac

SEQ ID NO: 1439841 - RNA, 19 nt, Artificial Sequence
  Description of Artificial Sequence: Synthetic oligonucleotide
  Antisense strand to SEQ ID NO: 1439840
gucuucacacauaacaauc

SEQ ID NO: 1439842 - RNA, 19 nt, Artificial Sequence
  Description of Artificial Sequence: Synthetic oligonucleotide
  Sense strand starting at position 3621 of SEQ ID NO: 1243765
ugugaagacuaugugugaa

SEQ ID NO: 1439843 - RNA, 19 nt, Artificial Sequence
  Description of Artificial Sequence: Synthetic oligonucleotide
  Antisense strand to SEQ ID NO: 1439842
uucacacauagucuucaca

SEQ ID NO: 1439844 - RNA, 19 nt, Artificial Sequence
  Description of Artificial Sequence: Synthetic oligonucleotide
  Sense strand starting at position 3623 of SEQ ID NO: 1243765
ugaagacuaugugugaaga

SEQ ID NO: 1439845 - RNA, 19 nt, Artificial Sequence
  Description of Artificial Sequence: Synthetic oligonucleotide
  Antisense strand to SEQ ID NO: 1439844
ucuucacacauagucuuca

SEQ ID NO: 1439846 - RNA, 19 nt, Artificial Sequence
  Description of Artificial Sequence: Synthetic oligonucleotide
  Sense strand starting at position 3624 of SEQ ID NO: 1243765
gaagacuaugugugaagau

SEQ ID NO: 1439847 - RNA, 19 nt, Artificial Sequence
  Description of Artificial Sequence: Synthetic oligonucleotide
  Antisense strand to SEQ ID NO: 1439846
aucuucacacauagucuuc

SEQ ID NO: 1439848 - RNA, 19 nt, Artificial Sequence
  Description of Artificial Sequence: Synthetic oligonucleotide
  Sense strand starting at position 3678 of SEQ ID NO: 1243765
ucauaaugugauggugaga

SEQ ID NO: 1439849 - RNA, 19 nt, Artificial Sequence
  Description of Artificial Sequence: Synthetic oligonucleotide
  Antisense strand to SEQ ID NO: 1439848
ucucaccaucacauuauga

SEQ ID NO: 1439850 - RNA, 19 nt, Artificial Sequence
  Description of Artificial Sequence: Synthetic oligonucleotide
  Sense strand starting at position 3689 of SEQ ID NO: 1243765
uggugagauaaaugucauu

SEQ ID NO: 1439851 - RNA, 19 nt, Artificial Sequence
  Description of Artificial Sequence: Synthetic oligonucleotide
  Antisense strand to SEQ ID NO: 1439850
aaugacauuuaucucacca

SEQ ID NO: 1439852 - RNA, 19 nt, Artificial Sequence
  Description of Artificial Sequence: Synthetic oligonucleotide
  Sense strand starting at position 3732 of SEQ ID NO: 1243765
aaacaauaccaggguaguu

SEQ ID NO: 1439853 - RNA, 19 nt, Artificial Sequence
  Description of Artificial Sequence: Synthetic oligonucleotide
  Antisense strand to SEQ ID NO: 1439852
aacuacccugguauuguuu

SEQ ID NO: 1439854 - RNA, 19 nt, Artificial Sequence
  Description of Artificial Sequence: Synthetic oligonucleotide
  Sense strand starting at position 3909 of SEQ ID NO: 1243765
acauaugacagcuggaagu

SEQ ID NO: 1439855 - RNA, 19 nt, Artificial Sequence
  Description of Artificial Sequence: Synthetic oligonucleotide
  Antisense strand to SEQ ID NO: 1439854
acuuccagcugucauaugu

SEQ ID NO: 1439856 - RNA, 19 nt, Artificial Sequence
  Description of Artificial Sequence: Synthetic oligonucleotide
  Sense strand starting at position 3926 of SEQ ID NO: 1243765
guuaaucaaaggugguauu

SEQ ID NO: 1439857 - RNA, 19 nt, Artificial Sequence
  Description of Artificial Sequence: Synthetic oligonucleotide
  Antisense strand to SEQ ID NO: 1439856
aauaccaccuuugauuaac

SEQ ID NO: 1439858 - RNA, 19 nt, Artificial Sequence
  Description of Artificial Sequence: Synthetic oligonucleotide
  Sense strand starting at position 3927 of SEQ ID NO: 1243765
uuaaucaaaggugguauua

SEQ ID NO: 1439859 - RNA, 19 nt, Artificial Sequence
  Description of Artificial Sequence: Synthetic oligonucleotide
  Antisense strand to SEQ ID NO: 1439858
uaauaccaccuuugauuaa

SEQ ID NO: 1439860 - RNA, 19 nt, Artificial Sequence
  Description of Artificial Sequence: Synthetic oligonucleotide
  Sense strand starting at position 3980 of SEQ ID NO: 1243765
acuacauuaguugggauaa

SEQ ID NO: 1439861 - RNA, 19 nt, Artificial Sequence
  Description of Artificial Sequence: Synthetic oligonucleotide
  Antisense strand to SEQ ID NO: 1439860
uuaucccaacuaauguagu

SEQ ID NO: 1439862 - RNA, 19 nt, Artificial Sequence
  Description of Artificial Sequence: Synthetic oligonucleotide
  Sense strand starting at position 409 of SEQ ID NO: 1243766
cagggauuauugcccgaaa

SEQ ID NO: 1439863 - RNA, 19 nt, Artificial Sequence
  Description of Artificial Sequence: Synthetic oligonucleotide
  Antisense strand to SEQ ID NO: 1439862
uuucgggcaauaaucccug

SEQ ID NO: 1439864 - RNA, 19 nt, Artificial Sequence
  Description of Artificial Sequence: Synthetic oligonucleotide
  Sense strand starting at position 410 of SEQ ID NO: 1243766
agggauuauugcccgaaac

SEQ ID NO: 1439865 - RNA, 19 nt, Artificial Sequence
  Description of Artificial Sequence: Synthetic oligonucleotide
  Antisense strand to SEQ ID NO: 1439864
guuucgggcaauaaucccu

SEQ ID NO: 1439866 - RNA, 19 nt, Artificial Sequence
  Description of Artificial Sequence: Synthetic oligonucleotide
  Sense strand starting at position 411 of SEQ ID NO: 1243766
gggauuauugcccgaaacc

SEQ ID NO: 1439867 - RNA, 19 nt, Artificial Sequence
  Description of Artificial Sequence: Synthetic oligonucleotide
  Antisense strand to SEQ ID NO: 1439866
gguuucgggcaauaauccc

SEQ ID NO: 1439868 - RNA, 19 nt, Artificial Sequence
  Description of Artificial Sequence: Synthetic oligonucleotide
  Sense strand starting at position 1023 of SEQ ID NO: 1243766
ucuguuacccuccaggauu

SEQ ID NO: 1439869 - RNA, 19 nt, Artificial Sequence
  Description of Artificial Sequence: Synthetic oligonucleotide
  Antisense strand to SEQ ID NO: 1439868
aauccuggaggguaacaga

SEQ ID NO: 1439870 - RNA, 19 nt, Artificial Sequence
  Description of Artificial Sequence: Synthetic oligonucleotide
  Sense strand starting at position 1142 of SEQ ID NO: 1243766
cugcgaaauauuggagauu

SEQ ID NO: 1439871 - RNA, 19 nt, Artificial Sequence
  Description of Artificial Sequence: Synthetic oligonucleotide
  Antisense strand to SEQ ID NO: 1439870
aaucuccaauauuucgcag

SEQ ID NO: 1439872 - RNA, 19 nt, Artificial Sequence
  Description of Artificial Sequence: Synthetic oligonucleotide
  Sense strand starting at position 1524 of SEQ ID NO: 1243766
ccaggauacuuuccgccaa

SEQ ID NO: 1439873 - RNA, 19 nt, Artificial Sequence
  Description of Artificial Sequence: Synthetic oligonucleotide
  Antisense strand to SEQ ID NO: 1439872
uuggcggaaaguauccugg

SEQ ID NO: 1439874 - RNA, 19 nt, Artificial Sequence
  Description of Artificial Sequence: Synthetic oligonucleotide
  Sense strand starting at position 1849 of SEQ ID NO: 1243766
ucaacagauuugucugcuu

SEQ ID NO: 1439875 - RNA, 19 nt, Artificial Sequence
  Description of Artificial Sequence: Synthetic oligonucleotide
  Antisense strand to SEQ ID NO: 1439874
aagcagacaaaucuguuga

SEQ ID NO: 1439876 - RNA, 19 nt, Artificial Sequence
  Description of Artificial Sequence: Synthetic oligonucleotide
  Sense strand starting at position 1852 of SEQ ID NO: 1243766
acagauuugucugcuucca

SEQ ID NO: 1439877 - RNA, 19 nt, Artificial Sequence
  Description of Artificial Sequence: Synthetic oligonucleotide
  Antisense strand to SEQ ID NO: 1439876
uggaagcagacaaaucugu

SEQ ID NO: 1439878 - RNA, 19 nt, Artificial Sequence
  Description of Artificial Sequence: Synthetic oligonucleotide
  Sense strand starting at position 1854 of SEQ ID NO: 1243766
agauuugucugcuuccauc

SEQ ID NO: 1439879 - RNA, 19 nt, Artificial Sequence
  Description of Artificial Sequence: Synthetic oligonucleotide
  Antisense strand to SEQ ID NO: 1439878
gauggaagcagacaaaucu

SEQ ID NO: 1439880 - RNA, 19 nt, Artificial Sequence
  Description of Artificial Sequence: Synthetic oligonucleotide
  Sense strand starting at position 2118 of SEQ ID NO: 1243766
aguauaaaccucggucuaa

SEQ ID NO: 1439881 - RNA, 19 nt, Artificial Sequence
  Description of Artificial Sequence: Synthetic oligonucleotide
  Antisense strand to SEQ ID NO: 1439880
uuagaccgagguuuauacu

SEQ ID NO: 1439882 - RNA, 19 nt, Artificial Sequence
  Description of Artificial Sequence: Synthetic oligonucleotide
  Sense strand starting at position 2119 of SEQ ID NO: 1243766
guauaaaccucggucuaag

SEQ ID NO: 1439883 - RNA, 19 nt, Artificial Sequence
  Description of Artificial Sequence: Synthetic oligonucleotide
  Antisense strand to SEQ ID NO: 1439882
cuuagaccgagguuuauac

SEQ ID NO: 1439884 - RNA, 19 nt, Artificial Sequence
  Description of Artificial Sequence: Synthetic oligonucleotide
  Sense strand starting at position 2129 of SEQ ID NO: 1243766
cggucuaagaacugcacaa

SEQ ID NO: 1439885 - RNA, 19 nt, Artificial Sequence
  Description of Artificial Sequence: Synthetic oligonucleotide
  Antisense strand to SEQ ID NO: 1439884
uugugcaguucuuagaccg

SEQ ID NO: 1439886 - RNA, 19 nt, Artificial Sequence
  Description of Artificial Sequence: Synthetic oligonucleotide
  Sense strand starting at position 2151 of SEQ ID NO: 1243766
guagauaaguggagaugga

SEQ ID NO: 1439887 - RNA, 19 nt, Artificial Sequence
  Description of Artificial Sequence: Synthetic oligonucleotide
  Antisense strand to SEQ ID NO: 1439886
uccaucuccacuuaucuac

SEQ ID NO: 1439888 - RNA, 19 nt, Artificial Sequence
  Description of Artificial Sequence: Synthetic oligonucleotide
  Sense strand starting at position 2524 of SEQ ID NO: 1243766
agauguggccgugagaucu

SEQ ID NO: 1439889 - RNA, 19 nt, Artificial Sequence
  Description of Artificial Sequence: Synthetic oligonucleotide
  Antisense strand to SEQ ID NO: 1439888
agaucucacggccacaucu

SEQ ID NO: 1439890 - RNA, 19 nt, Artificial Sequence
  Description of Artificial Sequence: Synthetic oligonucleotide
  Sense strand starting at position 2536 of SEQ ID NO: 1243766
gagaucuguucugugaaac

SEQ ID NO: 1439891 - RNA, 19 nt, Artificial Sequence
  Description of Artificial Sequence: Synthetic oligonucleotide
  Antisense strand to SEQ ID NO: 1439890
guuucacagaacagaucuc

SEQ ID NO: 1439892 - RNA, 19 nt, Artificial Sequence
  Description of Artificial Sequence: Synthetic oligonucleotide
  Sense strand starting at position 2537 of SEQ ID NO: 1243766
agaucuguucugugaaaca

SEQ ID NO: 1439893 - RNA, 19 nt, Artificial Sequence
  Description of Artificial Sequence: Synthetic oligonucleotide
  Antisense strand to SEQ ID NO: 1439892
uguuucacagaacagaucu

SEQ ID NO: 1439894 - RNA, 19 nt, Artificial Sequence
  Description of Artificial Sequence: Synthetic oligonucleotide
  Sense strand starting at position 2569 of SEQ ID NO: 1243766
cuagguggucaacacauua

SEQ ID NO: 1439895 - RNA, 19 nt, Artificial Sequence
  Description of Artificial Sequence: Synthetic oligonucleotide
  Antisense strand to SEQ ID NO: 1439894
uaauguguugaccaccuag

SEQ ID NO: 1439896 - RNA, 19 nt, Artificial Sequence
  Description of Artificial Sequence: Synthetic oligonucleotide
  Sense strand starting at position 2615 of SEQ ID NO: 1243766
cagcauucuuauguagaga

SEQ ID NO: 1439897 - RNA, 19 nt, Artificial Sequence
  Description of Artificial Sequence: Synthetic oligonucleotide
  Antisense strand to SEQ ID NO: 1439896
ucucuacauaagaaugcug

SEQ ID NO: 1439898 - RNA, 19 nt, Artificial Sequence
  Description of Artificial Sequence: Synthetic oligonucleotide
  Sense strand starting at position 2616 of SEQ ID NO: 1243766
agcauucuuauguagagag

SEQ ID NO: 1439899 - RNA, 19 nt, Artificial Sequence
  Description of Artificial Sequence: Synthetic oligonucleotide
  Antisense strand to SEQ ID NO: 1439898
cucucuacauaagaaugcu

SEQ ID NO: 1439900 - RNA, 19 nt, Artificial Sequence
  Description of Artificial Sequence: Synthetic oligonucleotide
  Sense strand starting at position 2691 of SEQ ID NO: 1243766
uagugagaauuagcccauu

SEQ ID NO: 1439901 - RNA, 19 nt, Artificial Sequence
  Description of Artificial Sequence: Synthetic oligonucleotide
  Antisense strand to SEQ ID NO: 1439900
aaugggcuaauucucacua

SEQ ID NO: 1439902 - RNA, 19 nt, Artificial Sequence
  Description of Artificial Sequence: Synthetic oligonucleotide
  Sense strand starting at position 2990 of SEQ ID NO: 1243766
agaggucucuccucuggaa

SEQ ID NO: 1439903 - RNA, 19 nt, Artificial Sequence
  Description of Artificial Sequence: Synthetic oligonucleotide
  Antisense strand to SEQ ID NO: 1439902
uuccagaggagagaccucu

SEQ ID NO: 1439904 - RNA, 19 nt, Artificial Sequence
  Description of Artificial Sequence: Synthetic oligonucleotide
  Sense strand starting at position 3013 of SEQ ID NO: 1243766
aagcauggugccugaauuu

SEQ ID NO: 1439905 - RNA, 19 nt, Artificial Sequence
  Description of Artificial Sequence: Synthetic oligonucleotide
  Antisense strand to SEQ ID NO: 1439904
aaauucaggcaccaugcuu

SEQ ID NO: 1439906 - RNA, 19 nt, Artificial Sequence
  Description of Artificial Sequence: Synthetic oligonucleotide
  Sense strand starting at position 3349 of SEQ ID NO: 1243766
aaaguuugaguguauugau

SEQ ID NO: 1439907 - RNA, 19 nt, Artificial Sequence
  Description of Artificial Sequence: Synthetic oligonucleotide
  Antisense strand to SEQ ID NO: 1439906
aucaauacacucaaacuuu

SEQ ID NO: 1439908 - RNA, 19 nt, Artificial Sequence
  Description of Artificial Sequence: Synthetic oligonucleotide
  Sense strand starting at position 3377 of SEQ ID NO: 1243766
ugaaguauuauguguauug

SEQ ID NO: 1439909 - RNA, 19 nt, Artificial Sequence
  Description of Artificial Sequence: Synthetic oligonucleotide
  Antisense strand to SEQ ID NO: 1439908
caauacacauaauacuuca

SEQ ID NO: 1439910 - RNA, 19 nt, Artificial Sequence
  Description of Artificial Sequence: Synthetic oligonucleotide
  Sense strand starting at position 3378 of SEQ ID NO: 1243766
gaaguauuauguguauuga

SEQ ID NO: 1439911 - RNA, 19 nt, Artificial Sequence
  Description of Artificial Sequence: Synthetic oligonucleotide
  Antisense strand to SEQ ID NO: 1439910
ucaauacacauaauacuuc

SEQ ID NO: 1439912 - RNA, 19 nt, Artificial Sequence
  Description of Artificial Sequence: Synthetic oligonucleotide
  Sense strand starting at position 3392 of SEQ ID NO: 1243766
auugauuguuaugugugaa

SEQ ID NO: 1439913 - RNA, 19 nt, Artificial Sequence
  Description of Artificial Sequence: Synthetic oligonucleotide
  Antisense strand to SEQ ID NO: 1439912
uucacacauaacaaucaau

SEQ ID NO: 1439914 - RNA, 19 nt, Artificial Sequence
  Description of Artificial Sequence: Synthetic oligonucleotide
  Sense strand starting at position 3395 of SEQ ID NO: 1243766
gauuguuaugugugaagac

SEQ ID NO: 1439915 - RNA, 19 nt, Artificial Sequence
  Description of Artificial Sequence: Synthetic oligonucleotide
  Antisense strand to SEQ ID NO: 1439914
gucuucacacauaacaauc

SEQ ID NO: 1439916 - RNA, 19 nt, Artificial Sequence
  Description of Artificial Sequence: Synthetic oligonucleotide
  Sense strand starting at position 3405 of SEQ ID NO: 1243766
ugugaagacuaugugugaa

SEQ ID NO: 1439917 - RNA, 19 nt, Artificial Sequence
  Description of Artificial Sequence: Synthetic oligonucleotide
  Antisense strand to SEQ ID NO: 1439916
uucacacauagucuucaca

SEQ ID NO: 1439918 - RNA, 19 nt, Artificial Sequence
  Description of Artificial Sequence: Synthetic oligonucleotide
  Sense strand starting at position 3407 of SEQ ID NO: 1243766
ugaagacuaugugugaaga

SEQ ID NO: 1439919 - RNA, 19 nt, Artificial Sequence
  Description of Artificial Sequence: Synthetic oligonucleotide
  Antisense strand to SEQ ID NO: 1439918
ucuucacacauagucuuca

SEQ ID NO: 1439920 - RNA, 19 nt, Artificial Sequence
  Description of Artificial Sequence: Synthetic oligonucleotide
  Sense strand starting at position 3408 of SEQ ID NO: 1243766
gaagacuaugugugaagau

SEQ ID NO: 1439921 - RNA, 19 nt, Artificial Sequence
  Description of Artificial Sequence: Synthetic oligonucleotide
  Antisense strand to SEQ ID NO: 1439920
aucuucacacauagucuuc

SEQ ID NO: 1439922 - RNA, 19 nt, Artificial Sequence
  Description of Artificial Sequence: Synthetic oligonucleotide
  Sense strand starting at position 3462 of SEQ ID NO: 1243766
ucauaaugugauggugaga

SEQ ID NO: 1439923 - RNA, 19 nt, Artificial Sequence
  Description of Artificial Sequence: Synthetic oligonucleotide
  Antisense strand to SEQ ID NO: 1439922
ucucaccaucacauuauga

SEQ ID NO: 1439924 - RNA, 19 nt, Artificial Sequence
  Description of Artificial Sequence: Synthetic oligonucleotide
  Sense strand starting at position 3473 of SEQ ID NO: 1243766
uggugagauaaaugucauu

SEQ ID NO: 1439925 - RNA, 19 nt, Artificial Sequence
  Description of Artificial Sequence: Synthetic oligonucleotide
  Antisense strand to SEQ ID NO: 1439924
aaugacauuuaucucacca

SEQ ID NO: 1439926 - RNA, 19 nt, Artificial Sequence
  Description of Artificial Sequence: Synthetic oligonucleotide
  Sense strand starting at position 3516 of SEQ ID NO: 1243766
aaacaauaccaggguaguu

SEQ ID NO: 1439927 - RNA, 19 nt, Artificial Sequence
  Description of Artificial Sequence: Synthetic oligonucleotide
  Antisense strand to SEQ ID NO: 1439926
aacuacccugguauuguuu

SEQ ID NO: 1439928 - RNA, 19 nt, Artificial Sequence
  Description of Artificial Sequence: Synthetic oligonucleotide
  Sense strand starting at position 3693 of SEQ ID NO: 1243766
acauaugacagcuggaagu

SEQ ID NO: 1439929 - RNA, 19 nt, Artificial Sequence
  Description of Artificial Sequence: Synthetic oligonucleotide
  Antisense strand to SEQ ID NO: 1439928
acuuccagcugucauaugu

SEQ ID NO: 1439930 - RNA, 19 nt, Artificial Sequence
  Description of Artificial Sequence: Synthetic oligonucleotide
  Sense strand starting at position 3710 of SEQ ID NO: 1243766
guuaaucaaaggugguauu

SEQ ID NO: 1439931 - RNA, 19 nt, Artificial Sequence
  Description of Artificial Sequence: Synthetic oligonucleotide
  Antisense strand to SEQ ID NO: 1439930
aauaccaccuuugauuaac

SEQ ID NO: 1439932 - RNA, 19 nt, Artificial Sequence
  Description of Artificial Sequence: Synthetic oligonucleotide
  Sense strand starting at position 3711 of SEQ ID NO: 1243766
uuaaucaaaggugguauua

SEQ ID NO: 1439933 - RNA, 19 nt, Artificial Sequence
  Description of Artificial Sequence: Synthetic oligonucleotide
  Antisense strand to SEQ ID NO: 1439932
uaauaccaccuuugauuaa

SEQ ID NO: 1439934 - RNA, 19 nt, Artificial Sequence
  Description of Artificial Sequence: Synthetic oligonucleotide
  Sense strand starting at position 3764 of SEQ ID NO: 1243766
acuacauuaguugggauaa

SEQ ID NO: 1439935 - RNA, 19 nt, Artificial Sequence
  Description of Artificial Sequence: Synthetic oligonucleotide
  Antisense strand to SEQ ID NO: 1439934
uuaucccaacuaauguagu

SEQ ID NO: 1439936 - RNA, 19 nt, Artificial Sequence
  Description of Artificial Sequence: Synthetic oligonucleotide
  Sense strand starting at position 3816 of SEQ ID NO: 1243766
agcguuucuaaugauagaa

SEQ ID NO: 1439937 - RNA, 19 nt, Artificial Sequence
  Description of Artificial Sequence: Synthetic oligonucleotide
  Antisense strand to SEQ ID NO: 1439936
uucuaucauuagaaacgcu

SEQ ID NO: 1439938 - RNA, 19 nt, Artificial Sequence
  Description of Artificial Sequence: Synthetic oligonucleotide
  Sense strand starting at position 3862 of SEQ ID NO: 1243766
gguucuggcacuuggaaua

SEQ ID NO: 1439939 - RNA, 19 nt, Artificial Sequence
  Description of Artificial Sequence: Synthetic oligonucleotide
  Antisense strand to SEQ ID NO: 1439938
uauuccaagugccagaacc

SEQ ID NO: 1439940 - RNA, 19 nt, Artificial Sequence
  Description of Artificial Sequence: Synthetic oligonucleotide
  Sense strand starting at position 3970 of SEQ ID NO: 1243766
cuacuacauuucuagagua

SEQ ID NO: 1439941 - RNA, 19 nt, Artificial Sequence
  Description of Artificial Sequence: Synthetic oligonucleotide
  Antisense strand to SEQ ID NO: 1439940
uacucuagaaauguaguag

SEQ ID NO: 1439942 - RNA, 19 nt, Artificial Sequence
  Description of Artificial Sequence: Synthetic oligonucleotide
  Sense strand starting at position 285 of SEQ ID NO: 1243767
gacugagaggucugagcca

SEQ ID NO: 1439943 - RNA, 19 nt, Artificial Sequence
  Description of Artificial Sequence: Synthetic oligonucleotide
  Antisense strand to SEQ ID NO: 1439942
uggcucagaccucucaguc

SEQ ID NO: 1439944 - RNA, 19 nt, Artificial Sequence
  Description of Artificial Sequence: Synthetic oligonucleotide
  Sense strand starting at position 340 of SEQ ID NO: 1243767
auguaaagaaagugguauu

SEQ ID NO: 1439945 - RNA, 19 nt, Artificial Sequence
  Description of Artificial Sequence: Synthetic oligonucleotide
  Antisense strand to SEQ ID NO: 1439944
aauaccacuuucuuuacau

SEQ ID NO: 1439946 - RNA, 19 nt, Artificial Sequence
  Description of Artificial Sequence: Synthetic oligonucleotide
  Sense strand starting at position 343 of SEQ ID NO: 1243767
uaaagaaagugguauuugu

SEQ ID NO: 1439947 - RNA, 19 nt, Artificial Sequence
  Description of Artificial Sequence: Synthetic oligonucleotide
  Antisense strand to SEQ ID NO: 1439946
acaaauaccacuuucuuua

SEQ ID NO: 1439948 - RNA, 19 nt, Artificial Sequence
  Description of Artificial Sequence: Synthetic oligonucleotide
  Sense strand starting at position 365 of SEQ ID NO: 1243767
acuguagugcuuuaacaag

SEQ ID NO: 1439949 - RNA, 19 nt, Artificial Sequence
  Description of Artificial Sequence: Synthetic oligonucleotide
  Antisense strand to SEQ ID NO: 1439948
cuuguuaaagcacuacagu

SEQ ID NO: 1439950 - RNA, 19 nt, Artificial Sequence
  Description of Artificial Sequence: Synthetic oligonucleotide
  Sense strand starting at position 431 of SEQ ID NO: 1243767
acaaucaguccugaugugu

SEQ ID NO: 1439951 - RNA, 19 nt, Artificial Sequence
  Description of Artificial Sequence: Synthetic oligonucleotide
  Antisense strand to SEQ ID NO: 1439950
acacaucaggacugauugu

SEQ ID NO: 1439952 - RNA, 19 nt, Artificial Sequence
  Description of Artificial Sequence: Synthetic oligonucleotide
  Sense strand starting at position 518 of SEQ ID NO: 1243767
ucucuugaaagugguuaga

SEQ ID NO: 1439953 - RNA, 19 nt, Artificial Sequence
  Description of Artificial Sequence: Synthetic oligonucleotide
  Antisense strand to SEQ ID NO: 1439952
ucuaaccacuuucaagaga

SEQ ID NO: 1439954 - RNA, 19 nt, Artificial Sequence
  Description of Artificial Sequence: Synthetic oligonucleotide
  Sense strand starting at position 520 of SEQ ID NO: 1243767
ucuugaaagugguuagaua

SEQ ID NO: 1439955 - RNA, 19 nt, Artificial Sequence
  Description of Artificial Sequence: Synthetic oligonucleotide
  Antisense strand to SEQ ID NO: 1439954
uaucuaaccacuuucaaga

SEQ ID NO: 1439956 - RNA, 19 nt, Artificial Sequence
  Description of Artificial Sequence: Synthetic oligonucleotide
  Sense strand starting at position 631 of SEQ ID NO: 1243767
cucggauuucggcgccaga

SEQ ID NO: 1439957 - RNA, 19 nt, Artificial Sequence
  Description of Artificial Sequence: Synthetic oligonucleotide
  Antisense strand to SEQ ID NO: 1439956
ucuggcgccgaaauccgag

SEQ ID NO: 1439958 - RNA, 19 nt, Artificial Sequence
  Description of Artificial Sequence: Synthetic oligonucleotide
  Sense strand starting at position 634 of SEQ ID NO: 1243767
ggauuucggcgccagaguu

SEQ ID NO: 1439959 - RNA, 19 nt, Artificial Sequence
  Description of Artificial Sequence: Synthetic oligonucleotide
  Antisense strand to SEQ ID NO: 1439958
aacucuggcgccgaaaucc

SEQ ID NO: 1439960 - RNA, 19 nt, Artificial Sequence
  Description of Artificial Sequence: Synthetic oligonucleotide
  Sense strand starting at position 941 of SEQ ID NO: 1243767
gcgcgucccguaccugaua

SEQ ID NO: 1439961 - RNA, 19 nt, Artificial Sequence
  Description of Artificial Sequence: Synthetic oligonucleotide
  Antisense strand to SEQ ID NO: 1439960
uaucagguacgggacgcgc

SEQ ID NO: 1439962 - RNA, 19 nt, Artificial Sequence
  Description of Artificial Sequence: Synthetic oligonucleotide
  Sense strand starting at position 954 of SEQ ID NO: 1243767
cugauaugcagacgaugaa

SEQ ID NO: 1439963 - RNA, 19 nt, Artificial Sequence
  Description of Artificial Sequence: Synthetic oligonucleotide
  Antisense strand to SEQ ID NO: 1439962
uucaucgucugcauaucag

SEQ ID NO: 1439964 - RNA, 19 nt, Artificial Sequence
  Description of Artificial Sequence: Synthetic oligonucleotide
  Sense strand starting at position 957 of SEQ ID NO: 1243767
auaugcagacgaugaaauu

SEQ ID NO: 1439965 - RNA, 19 nt, Artificial Sequence
  Description of Artificial Sequence: Synthetic oligonucleotide
  Antisense strand to SEQ ID NO: 1439964
aauuucaucgucugcauau

SEQ ID NO: 1439966 - RNA, 19 nt, Artificial Sequence
  Description of Artificial Sequence: Synthetic oligonucleotide
  Sense strand starting at position 966 of SEQ ID NO: 1243767
cgaugaaauuggcuugaag

SEQ ID NO: 1439967 - RNA, 19 nt, Artificial Sequence
  Description of Artificial Sequence: Synthetic oligonucleotide
  Antisense strand to SEQ ID NO: 1439966
cuucaagccaauuucaucg

SEQ ID NO: 1439968 - RNA, 19 nt, Artificial Sequence
  Description of Artificial Sequence: Synthetic oligonucleotide
  Sense strand starting at position 1035 of SEQ ID NO: 1243767
ugcaucacucgacgggaaa

SEQ ID NO: 1439969 - RNA, 19 nt, Artificial Sequence
  Description of Artificial Sequence: Synthetic oligonucleotide
  Antisense strand to SEQ ID NO: 1439968
uuucccgucgagugaugca

SEQ ID NO: 1439970 - RNA, 19 nt, Artificial Sequence
  Description of Artificial Sequence: Synthetic oligonucleotide
  Sense strand starting at position 1231 of SEQ ID NO: 1243767
cccagaugugcugacacau

SEQ ID NO: 1439971 - RNA, 19 nt, Artificial Sequence
  Description of Artificial Sequence: Synthetic oligonucleotide
  Antisense strand to SEQ ID NO: 1439970
augugucagcacaucuggg

SEQ ID NO: 1439972 - RNA, 19 nt, Artificial Sequence
  Description of Artificial Sequence: Synthetic oligonucleotide
  Sense strand starting at position 1654 of SEQ ID NO: 1243767
cagggauuauugcccgaaa

SEQ ID NO: 1439973 - RNA, 19 nt, Artificial Sequence
  Description of Artificial Sequence: Synthetic oligonucleotide
  Antisense strand to SEQ ID NO: 1439972
uuucgggcaauaaucccug

SEQ ID NO: 1439974 - RNA, 19 nt, Artificial Sequence
  Description of Artificial Sequence: Synthetic oligonucleotide
  Sense strand starting at position 1655 of SEQ ID NO: 1243767
agggauuauugcccgaaac

SEQ ID NO: 1439975 - RNA, 19 nt, Artificial Sequence
  Description of Artificial Sequence: Synthetic oligonucleotide
  Antisense strand to SEQ ID NO: 1439974
guuucgggcaauaaucccu

SEQ ID NO: 1439976 - RNA, 19 nt, Artificial Sequence
  Description of Artificial Sequence: Synthetic oligonucleotide
  Sense strand starting at position 1656 of SEQ ID NO: 1243767
gggauuauugcccgaaacc

SEQ ID NO: 1439977 - RNA, 19 nt, Artificial Sequence
  Description of Artificial Sequence: Synthetic oligonucleotide
  Antisense strand to SEQ ID NO: 1439976
gguuucgggcaauaauccc

SEQ ID NO: 1439978 - RNA, 19 nt, Artificial Sequence
  Description of Artificial Sequence: Synthetic oligonucleotide
  Sense strand starting at position 2268 of SEQ ID NO: 1243767
ucuguuacccuccaggauu

SEQ ID NO: 1439979 - RNA, 19 nt, Artificial Sequence
  Description of Artificial Sequence: Synthetic oligonucleotide
  Antisense strand to SEQ ID NO: 1439978
aauccuggaggguaacaga

SEQ ID NO: 1439980 - RNA, 19 nt, Artificial Sequence
  Description of Artificial Sequence: Synthetic oligonucleotide
  Sense strand starting at position 2288 of SEQ ID NO: 1243767
ucgaguuucucuucuuaaa

SEQ ID NO: 1439981 - RNA, 19 nt, Artificial Sequence
  Description of Artificial Sequence: Synthetic oligonucleotide
  Antisense strand to SEQ ID NO: 1439980
uuuaagaagagaaacucga

SEQ ID NO: 1439982 - RNA, 19 nt, Artificial Sequence
  Description of Artificial Sequence: Synthetic oligonucleotide
  Sense strand starting at position 2387 of SEQ ID NO: 1243767
cugcgaaauauuggagauu

SEQ ID NO: 1439983 - RNA, 19 nt, Artificial Sequence
  Description of Artificial Sequence: Synthetic oligonucleotide
  Antisense strand to SEQ ID NO: 1439982
aaucuccaauauuucgcag

SEQ ID NO: 1439984 - RNA, 19 nt, Artificial Sequence
  Description of Artificial Sequence: Synthetic oligonucleotide
  Sense strand starting at position 2388 of SEQ ID NO: 1243767
ugcgaaauauuggagauuu

SEQ ID NO: 1439985 - RNA, 19 nt, Artificial Sequence
  Description of Artificial Sequence: Synthetic oligonucleotide
  Antisense strand to SEQ ID NO: 1439984
aaaucuccaauauuucgca

SEQ ID NO: 1439986 - RNA, 19 nt, Artificial Sequence
  Description of Artificial Sequence: Synthetic oligonucleotide
  Sense strand starting at position 2769 of SEQ ID NO: 1243767
ccaggauacuuuccgccaa

SEQ ID NO: 1439987 - RNA, 19 nt, Artificial Sequence
  Description of Artificial Sequence: Synthetic oligonucleotide
  Antisense strand to SEQ ID NO: 1439986
uuggcggaaaguauccugg

SEQ ID NO: 1439988 - RNA, 19 nt, Artificial Sequence
  Description of Artificial Sequence: Synthetic oligonucleotide
  Sense strand starting at position 3094 of SEQ ID NO: 1243767
ucaacagauuugucugcuu

SEQ ID NO: 1439989 - RNA, 19 nt, Artificial Sequence
  Description of Artificial Sequence: Synthetic oligonucleotide
  Antisense strand to SEQ ID NO: 1439988
aagcagacaaaucuguuga

SEQ ID NO: 1439990 - RNA, 19 nt, Artificial Sequence
  Description of Artificial Sequence: Synthetic oligonucleotide
  Sense strand starting at position 3097 of SEQ ID NO: 1243767
acagauuugucugcuucca

SEQ ID NO: 1439991 - RNA, 19 nt, Artificial Sequence
  Description of Artificial Sequence: Synthetic oligonucleotide
  Antisense strand to SEQ ID NO: 1439990
uggaagcagacaaaucugu

SEQ ID NO: 1439992 - RNA, 19 nt, Artificial Sequence
  Description of Artificial Sequence: Synthetic oligonucleotide
  Sense strand starting at position 3099 of SEQ ID NO: 1243767
agauuugucugcuuccauc

SEQ ID NO: 1439993 - RNA, 19 nt, Artificial Sequence
  Description of Artificial Sequence: Synthetic oligonucleotide
  Antisense strand to SEQ ID NO: 1439992
gauggaagcagacaaaucu

SEQ ID NO: 1439994 - RNA, 19 nt, Artificial Sequence
  Description of Artificial Sequence: Synthetic oligonucleotide
  Sense strand starting at position 3340 of SEQ ID NO: 1243767
auuugauguuuagaagcua

SEQ ID NO: 1439995 - RNA, 19 nt, Artificial Sequence
  Description of Artificial Sequence: Synthetic oligonucleotide
  Antisense strand to SEQ ID NO: 1439994
uagcuucuaaacaucaaau

SEQ ID NO: 1439996 - RNA, 19 nt, Artificial Sequence
  Description of Artificial Sequence: Synthetic oligonucleotide
  Sense strand starting at position 3362 of SEQ ID NO: 1243767
caguauaaaccucggucua

SEQ ID NO: 1439997 - RNA, 19 nt, Artificial Sequence
  Description of Artificial Sequence: Synthetic oligonucleotide
  Antisense strand to SEQ ID NO: 1439996
uagaccgagguuuauacug

SEQ ID NO: 1439998 - RNA, 19 nt, Artificial Sequence
  Description of Artificial Sequence: Synthetic oligonucleotide
  Sense strand starting at position 3363 of SEQ ID NO: 1243767
aguauaaaccucggucuaa

SEQ ID NO: 1439999 - RNA, 19 nt, Artificial Sequence
  Description of Artificial Sequence: Synthetic oligonucleotide
  Antisense strand to SEQ ID NO: 1439998
uuagaccgagguuuauacu

SEQ ID NO: 1440000 - RNA, 19 nt, Artificial Sequence
  Description of Artificial Sequence: Synthetic oligonucleotide
  Sense strand starting at position 3364 of SEQ ID NO: 1243767
guauaaaccucggucuaag

SEQ ID NO: 1440001 - RNA, 19 nt, Artificial Sequence
  Description of Artificial Sequence: Synthetic oligonucleotide
  Antisense strand to SEQ ID NO: 1440000
cuuagaccgagguuuauac

SEQ ID NO: 1440002 - RNA, 19 nt, Artificial Sequence
  Description of Artificial Sequence: Synthetic oligonucleotide
  Sense strand starting at position 3374 of SEQ ID NO: 1243767
cggucuaagaacugcacaa

SEQ ID NO: 1440003 - RNA, 19 nt, Artificial Sequence
  Description of Artificial Sequence: Synthetic oligonucleotide
  Antisense strand to SEQ ID NO: 1440002
uugugcaguucuuagaccg

SEQ ID NO: 1440004 - RNA, 19 nt, Artificial Sequence
  Description of Artificial Sequence: Synthetic oligonucleotide
  Sense strand starting at position 3396 of SEQ ID NO: 1243767
guagauaaguggagaugga

SEQ ID NO: 1440005 - RNA, 19 nt, Artificial Sequence
  Description of Artificial Sequence: Synthetic oligonucleotide
  Antisense strand to SEQ ID NO: 1440004
uccaucuccacuuaucuac

SEQ ID NO: 1440006 - RNA, 19 nt, Artificial Sequence
  Description of Artificial Sequence: Synthetic oligonucleotide
  Sense strand starting at position 3766 of SEQ ID NO: 1243767
aggagauguggccgugaga

SEQ ID NO: 1440007 - RNA, 19 nt, Artificial Sequence
  Description of Artificial Sequence: Synthetic oligonucleotide
  Antisense strand to SEQ ID NO: 1440006
ucucacggccacaucuccu

SEQ ID NO: 1440008 - RNA, 19 nt, Artificial Sequence
  Description of Artificial Sequence: Synthetic oligonucleotide
  Sense strand starting at position 3769 of SEQ ID NO: 1243767
agauguggccgugagaucu

SEQ ID NO: 1440009 - RNA, 19 nt, Artificial Sequence
  Description of Artificial Sequence: Synthetic oligonucleotide
  Antisense strand to SEQ ID NO: 1440008
agaucucacggccacaucu

SEQ ID NO: 1440010 - RNA, 19 nt, Artificial Sequence
  Description of Artificial Sequence: Synthetic oligonucleotide
  Sense strand starting at position 3781 of SEQ ID NO: 1243767
gagaucuguucugugaaac

SEQ ID NO: 1440011 - RNA, 19 nt, Artificial Sequence
  Description of Artificial Sequence: Synthetic oligonucleotide
  Antisense strand to SEQ ID NO: 1440010
guuucacagaacagaucuc

SEQ ID NO: 1440012 - RNA, 19 nt, Artificial Sequence
  Description of Artificial Sequence: Synthetic oligonucleotide
  Sense strand starting at position 3782 of SEQ ID NO: 1243767
agaucuguucugugaaaca

SEQ ID NO: 1440013 - RNA, 19 nt, Artificial Sequence
  Description of Artificial Sequence: Synthetic oligonucleotide
  Antisense strand to SEQ ID NO: 1440012
uguuucacagaacagaucu

SEQ ID NO: 1440014 - RNA, 19 nt, Artificial Sequence
  Description of Artificial Sequence: Synthetic oligonucleotide
  Sense strand starting at position 3814 of SEQ ID NO: 1243767
cuagguggucaacacauua

SEQ ID NO: 1440015 - RNA, 19 nt, Artificial Sequence
  Description of Artificial Sequence: Synthetic oligonucleotide
  Antisense strand to SEQ ID NO: 1440014
uaauguguugaccaccuag

SEQ ID NO: 1440016 - RNA, 19 nt, Artificial Sequence
  Description of Artificial Sequence: Synthetic oligonucleotide
  Sense strand starting at position 3860 of SEQ ID NO: 1243767
cagcauucuuauguagaga

SEQ ID NO: 1440017 - RNA, 19 nt, Artificial Sequence
  Description of Artificial Sequence: Synthetic oligonucleotide
  Antisense strand to SEQ ID NO: 1440016
ucucuacauaagaaugcug

SEQ ID NO: 1440018 - RNA, 19 nt, Artificial Sequence
  Description of Artificial Sequence: Synthetic oligonucleotide
  Sense strand starting at position 3861 of SEQ ID NO: 1243767
agcauucuuauguagagag

SEQ ID NO: 1440019 - RNA, 19 nt, Artificial Sequence
  Description of Artificial Sequence: Synthetic oligonucleotide
  Antisense strand to SEQ ID NO: 1440018
cucucuacauaagaaugcu

SEQ ID NO: 1440020 - RNA, 19 nt, Artificial Sequence
  Description of Artificial Sequence: Synthetic oligonucleotide
  Sense strand starting at position 3936 of SEQ ID NO: 1243767
uagugagaauuagcccauu

SEQ ID NO: 1440021 - RNA, 19 nt, Artificial Sequence
  Description of Artificial Sequence: Synthetic oligonucleotide
  Antisense strand to SEQ ID NO: 1440020
aaugggcuaauucucacua

SEQ ID NO: 1440022 - RNA, 19 nt, Artificial Sequence
  Description of Artificial Sequence: Synthetic oligonucleotide
  Sense strand starting at position 70 of SEQ ID NO: 1243768
ggccucuugucucaaugga

SEQ ID NO: 1440023 - RNA, 19 nt, Artificial Sequence
  Description of Artificial Sequence: Synthetic oligonucleotide
  Antisense strand to SEQ ID NO: 1440022
uccauugagacaagaggcc

SEQ ID NO: 1440024 - RNA, 19 nt, Artificial Sequence
  Description of Artificial Sequence: Synthetic oligonucleotide
  Sense strand starting at position 134 of SEQ ID NO: 1243768
gcuugaguccuccauaaga

SEQ ID NO: 1440025 - RNA, 19 nt, Artificial Sequence
  Description of Artificial Sequence: Synthetic oligonucleotide
  Antisense strand to SEQ ID NO: 1440024
ucuuauggaggacucaagc

SEQ ID NO: 1440026 - RNA, 19 nt, Artificial Sequence
  Description of Artificial Sequence: Synthetic oligonucleotide
  Sense strand starting at position 139 of SEQ ID NO: 1243768
aguccuccauaagaugaau

SEQ ID NO: 1440027 - RNA, 19 nt, Artificial Sequence
  Description of Artificial Sequence: Synthetic oligonucleotide
  Antisense strand to SEQ ID NO: 1440026
auucaucuuauggaggacu

SEQ ID NO: 1440028 - RNA, 19 nt, Artificial Sequence
  Description of Artificial Sequence: Synthetic oligonucleotide
  Sense strand starting at position 173 of SEQ ID NO: 1243768
gucagaaagccuuggcacu

SEQ ID NO: 1440029 - RNA, 19 nt, Artificial Sequence
  Description of Artificial Sequence: Synthetic oligonucleotide
  Antisense strand to SEQ ID NO: 1440028
agugccaaggcuuucugac

SEQ ID NO: 1440030 - RNA, 19 nt, Artificial Sequence
  Description of Artificial Sequence: Synthetic oligonucleotide
  Sense strand starting at position 174 of SEQ ID NO: 1243768
ucagaaagccuuggcacua

SEQ ID NO: 1440031 - RNA, 19 nt, Artificial Sequence
  Description of Artificial Sequence: Synthetic oligonucleotide
  Antisense strand to SEQ ID NO: 1440030
uagugccaaggcuuucuga

SEQ ID NO: 1440032 - RNA, 19 nt, Artificial Sequence
  Description of Artificial Sequence: Synthetic oligonucleotide
  Sense strand starting at position 266 of SEQ ID NO: 1243768
cccauaaacuugguauaug

SEQ ID NO: 1440033 - RNA, 19 nt, Artificial Sequence
  Description of Artificial Sequence: Synthetic oligonucleotide
  Antisense strand to SEQ ID NO: 1440032
cauauaccaaguuuauggg

SEQ ID NO: 1440034 - RNA, 19 nt, Artificial Sequence
  Description of Artificial Sequence: Synthetic oligonucleotide
  Sense strand starting at position 267 of SEQ ID NO: 1243768
ccauaaacuugguauauga

SEQ ID NO: 1440035 - RNA, 19 nt, Artificial Sequence
  Description of Artificial Sequence: Synthetic oligonucleotide
  Antisense strand to SEQ ID NO: 1440034
ucauauaccaaguuuaugg

SEQ ID NO: 1440036 - RNA, 19 nt, Artificial Sequence
  Description of Artificial Sequence: Synthetic oligonucleotide
  Sense strand starting at position 476 of SEQ ID NO: 1243768
cuuaguagguuuccaaugu

SEQ ID NO: 1440037 - RNA, 19 nt, Artificial Sequence
  Description of Artificial Sequence: Synthetic oligonucleotide
  Antisense strand to SEQ ID NO: 1440036
acauuggaaaccuacuaag

SEQ ID NO: 1440038 - RNA, 19 nt, Artificial Sequence
  Description of Artificial Sequence: Synthetic oligonucleotide
  Sense strand starting at position 480 of SEQ ID NO: 1243768
guagguuuccaauguccaa

SEQ ID NO: 1440039 - RNA, 19 nt, Artificial Sequence
  Description of Artificial Sequence: Synthetic oligonucleotide
  Antisense strand to SEQ ID NO: 1440038
uuggacauuggaaaccuac

SEQ ID NO: 1440040 - RNA, 19 nt, Artificial Sequence
  Description of Artificial Sequence: Synthetic oligonucleotide
  Sense strand starting at position 1555 of SEQ ID NO: 1243768
gacgcauccuuaucaggga

SEQ ID NO: 1440041 - RNA, 19 nt, Artificial Sequence
  Description of Artificial Sequence: Synthetic oligonucleotide
  Antisense strand to SEQ ID NO: 1440040
ucccugauaaggaugcguc

SEQ ID NO: 1440042 - RNA, 19 nt, Artificial Sequence
  Description of Artificial Sequence: Synthetic oligonucleotide
  Sense strand starting at position 2297 of SEQ ID NO: 1243768
ccaugaugacuuugaucau

SEQ ID NO: 1440043 - RNA, 19 nt, Artificial Sequence
  Description of Artificial Sequence: Synthetic oligonucleotide
  Antisense strand to SEQ ID NO: 1440042
augaucaaagucaucaugg

SEQ ID NO: 1440044 - RNA, 19 nt, Artificial Sequence
  Description of Artificial Sequence: Synthetic oligonucleotide
  Sense strand starting at position 2300 of SEQ ID NO: 1243768
ugaugacuuugaucauucu

SEQ ID NO: 1440045 - RNA, 19 nt, Artificial Sequence
  Description of Artificial Sequence: Synthetic oligonucleotide
  Antisense strand to SEQ ID NO: 1440044
agaaugaucaaagucauca

SEQ ID NO: 1440046 - RNA, 19 nt, Artificial Sequence
  Description of Artificial Sequence: Synthetic oligonucleotide
  Sense strand starting at position 2329 of SEQ ID NO: 1243768
cugcgcaguggucuugaau

SEQ ID NO: 1440047 - RNA, 19 nt, Artificial Sequence
  Description of Artificial Sequence: Synthetic oligonucleotide
  Antisense strand to SEQ ID NO: 1440046
auucaagaccacugcgcag

SEQ ID NO: 1440048 - RNA, 19 nt, Artificial Sequence
  Description of Artificial Sequence: Synthetic oligonucleotide
  Sense strand starting at position 2423 of SEQ ID NO: 1243768
gcgugugaugccguuuguu

SEQ ID NO: 1440049 - RNA, 19 nt, Artificial Sequence
  Description of Artificial Sequence: Synthetic oligonucleotide
  Antisense strand to SEQ ID NO: 1440048
aacaaacggcaucacacgc

SEQ ID NO: 1440050 - RNA, 19 nt, Artificial Sequence
  Description of Artificial Sequence: Synthetic oligonucleotide
  Sense strand starting at position 2425 of SEQ ID NO: 1243768
gugugaugccguuuguuga

SEQ ID NO: 1440051 - RNA, 19 nt, Artificial Sequence
  Description of Artificial Sequence: Synthetic oligonucleotide
  Antisense strand to SEQ ID NO: 1440050
ucaacaaacggcaucacac

SEQ ID NO: 1440052 - RNA, 19 nt, Artificial Sequence
  Description of Artificial Sequence: Synthetic oligonucleotide
  Sense strand starting at position 2426 of SEQ ID NO: 1243768
ugugaugccguuuguugaa

SEQ ID NO: 1440053 - RNA, 19 nt, Artificial Sequence
  Description of Artificial Sequence: Synthetic oligonucleotide
  Antisense strand to SEQ ID NO: 1440052
uucaacaaacggcaucaca

SEQ ID NO: 1440054 - RNA, 19 nt, Artificial Sequence
  Description of Artificial Sequence: Synthetic oligonucleotide
  Sense strand starting at position 2490 of SEQ ID NO: 1243768
auugauucucugggucuca

SEQ ID NO: 1440055 - RNA, 19 nt, Artificial Sequence
  Description of Artificial Sequence: Synthetic oligonucleotide
  Antisense strand to SEQ ID NO: 1440054
ugagacccagagaaucaau

SEQ ID NO: 1440056 - RNA, 19 nt, Artificial Sequence
  Description of Artificial Sequence: Synthetic oligonucleotide
  Sense strand starting at position 2500 of SEQ ID NO: 1243768
ugggucucaucucuucuau

SEQ ID NO: 1440057 - RNA, 19 nt, Artificial Sequence
  Description of Artificial Sequence: Synthetic oligonucleotide
  Antisense strand to SEQ ID NO: 1440056
auagaagagaugagaccca

SEQ ID NO: 1440058 - RNA, 19 nt, Artificial Sequence
  Description of Artificial Sequence: Synthetic oligonucleotide
  Sense strand starting at position 2580 of SEQ ID NO: 1243768
gagcaaagcugucccuaaa

SEQ ID NO: 1440059 - RNA, 19 nt, Artificial Sequence
  Description of Artificial Sequence: Synthetic oligonucleotide
  Antisense strand to SEQ ID NO: 1440058
uuuagggacagcuuugcuc

SEQ ID NO: 1440060 - RNA, 19 nt, Artificial Sequence
  Description of Artificial Sequence: Synthetic oligonucleotide
  Sense strand starting at position 2610 of SEQ ID NO: 1243768
gcugguguuuaugugauga

SEQ ID NO: 1440061 - RNA, 19 nt, Artificial Sequence
  Description of Artificial Sequence: Synthetic oligonucleotide
  Antisense strand to SEQ ID NO: 1440060
ucaucacauaaacaccagc

SEQ ID NO: 1440062 - RNA, 19 nt, Artificial Sequence
  Description of Artificial Sequence: Synthetic oligonucleotide
  Sense strand starting at position 2614 of SEQ ID NO: 1243768
guguuuaugugaugaccag

SEQ ID NO: 1440063 - RNA, 19 nt, Artificial Sequence
  Description of Artificial Sequence: Synthetic oligonucleotide
  Antisense strand to SEQ ID NO: 1440062
cuggucaucacauaaacac

SEQ ID NO: 1440064 - RNA, 19 nt, Artificial Sequence
  Description of Artificial Sequence: Synthetic oligonucleotide
  Sense strand starting at position 2659 of SEQ ID NO: 1243768
aauggauuguaagaggauu

SEQ ID NO: 1440065 - RNA, 19 nt, Artificial Sequence
  Description of Artificial Sequence: Synthetic oligonucleotide
  Antisense strand to SEQ ID NO: 1440064
aauccucuuacaauccauu

SEQ ID NO: 1440066 - RNA, 19 nt, Artificial Sequence
  Description of Artificial Sequence: Synthetic oligonucleotide
  Sense strand starting at position 2672 of SEQ ID NO: 1243768
aggauucggugagggagaa

SEQ ID NO: 1440067 - RNA, 19 nt, Artificial Sequence
  Description of Artificial Sequence: Synthetic oligonucleotide
  Antisense strand to SEQ ID NO: 1440066
uucucccucaccgaauccu

SEQ ID NO: 1440068 - RNA, 19 nt, Artificial Sequence
  Description of Artificial Sequence: Synthetic oligonucleotide
  Sense strand starting at position 3251 of SEQ ID NO: 1243768
cagcuuugauccuacagag

SEQ ID NO: 1440069 - RNA, 19 nt, Artificial Sequence
  Description of Artificial Sequence: Synthetic oligonucleotide
  Antisense strand to SEQ ID NO: 1440068
cucuguaggaucaaagcug

SEQ ID NO: 1440070 - RNA, 19 nt, Artificial Sequence
  Description of Artificial Sequence: Synthetic oligonucleotide
  Sense strand starting at position 3318 of SEQ ID NO: 1243768
ugucaacaccacuguauaa

SEQ ID NO: 1440071 - RNA, 19 nt, Artificial Sequence
  Description of Artificial Sequence: Synthetic oligonucleotide
  Antisense strand to SEQ ID NO: 1440070
uuauacagugguguugaca

SEQ ID NO: 1440072 - RNA, 19 nt, Artificial Sequence
  Description of Artificial Sequence: Synthetic oligonucleotide
  Sense strand starting at position 3452 of SEQ ID NO: 1243768
gaagccuguuccugggaau

SEQ ID NO: 1440073 - RNA, 19 nt, Artificial Sequence
  Description of Artificial Sequence: Synthetic oligonucleotide
  Antisense strand to SEQ ID NO: 1440072
auucccaggaacaggcuuc

SEQ ID NO: 1440074 - RNA, 19 nt, Artificial Sequence
  Description of Artificial Sequence: Synthetic oligonucleotide
  Sense strand starting at position 3453 of SEQ ID NO: 1243768
aagccuguuccugggaaua

SEQ ID NO: 1440075 - RNA, 19 nt, Artificial Sequence
  Description of Artificial Sequence: Synthetic oligonucleotide
  Antisense strand to SEQ ID NO: 1440074
uauucccaggaacaggcuu

SEQ ID NO: 1440076 - RNA, 19 nt, Artificial Sequence
  Description of Artificial Sequence: Synthetic oligonucleotide
  Sense strand starting at position 3455 of SEQ ID NO: 1243768
gccuguuccugggaauaaa

SEQ ID NO: 1440077 - RNA, 19 nt, Artificial Sequence
  Description of Artificial Sequence: Synthetic oligonucleotide
  Antisense strand to SEQ ID NO: 1440076
uuuauucccaggaacaggc

SEQ ID NO: 1440078 - RNA, 19 nt, Artificial Sequence
  Description of Artificial Sequence: Synthetic oligonucleotide
  Sense strand starting at position 3550 of SEQ ID NO: 1243768
ggguuaagggacuguugau

SEQ ID NO: 1440079 - RNA, 19 nt, Artificial Sequence
  Description of Artificial Sequence: Synthetic oligonucleotide
  Antisense strand to SEQ ID NO: 1440078
aucaacagucccuuaaccc

SEQ ID NO: 1440080 - RNA, 19 nt, Artificial Sequence
  Description of Artificial Sequence: Synthetic oligonucleotide
  Sense strand starting at position 3560 of SEQ ID NO: 1243768
acuguugaucaaugaucca

SEQ ID NO: 1440081 - RNA, 19 nt, Artificial Sequence
  Description of Artificial Sequence: Synthetic oligonucleotide
  Antisense strand to SEQ ID NO: 1440080
uggaucauugaucaacagu

SEQ ID NO: 1440082 - RNA, 19 nt, Artificial Sequence
  Description of Artificial Sequence: Synthetic oligonucleotide
  Sense strand starting at position 3563 of SEQ ID NO: 1243768
guugaucaaugauccacuu

SEQ ID NO: 1440083 - RNA, 19 nt, Artificial Sequence
  Description of Artificial Sequence: Synthetic oligonucleotide
  Antisense strand to SEQ ID NO: 1440082
aaguggaucauugaucaac

SEQ ID NO: 1440084 - RNA, 19 nt, Artificial Sequence
  Description of Artificial Sequence: Synthetic oligonucleotide
  Sense strand starting at position 3720 of SEQ ID NO: 1243768
cucuuaugggugcaucuua

SEQ ID NO: 1440085 - RNA, 19 nt, Artificial Sequence
  Description of Artificial Sequence: Synthetic oligonucleotide
  Antisense strand to SEQ ID NO: 1440084
uaagaugcacccauaagag

SEQ ID NO: 1440086 - RNA, 19 nt, Artificial Sequence
  Description of Artificial Sequence: Synthetic oligonucleotide
  Sense strand starting at position 3725 of SEQ ID NO: 1243768
augggugcaucuuaauuau

SEQ ID NO: 1440087 - RNA, 19 nt, Artificial Sequence
  Description of Artificial Sequence: Synthetic oligonucleotide
  Antisense strand to SEQ ID NO: 1440086
auaauuaagaugcacccau

SEQ ID NO: 1440088 - RNA, 19 nt, Artificial Sequence
  Description of Artificial Sequence: Synthetic oligonucleotide
  Sense strand starting at position 3844 of SEQ ID NO: 1243768
cuuccuguuccuggucuua

SEQ ID NO: 1440089 - RNA, 19 nt, Artificial Sequence
  Description of Artificial Sequence: Synthetic oligonucleotide
  Antisense strand to SEQ ID NO: 1440088
uaagaccaggaacaggaag

SEQ ID NO: 1440090 - RNA, 19 nt, Artificial Sequence
  Description of Artificial Sequence: Synthetic oligonucleotide
  Sense strand starting at position 3846 of SEQ ID NO: 1243768
uccuguuccuggucuuaac

SEQ ID NO: 1440091 - RNA, 19 nt, Artificial Sequence
  Description of Artificial Sequence: Synthetic oligonucleotide
  Antisense strand to SEQ ID NO: 1440090
guuaagaccaggaacagga

SEQ ID NO: 1440092 - RNA, 19 nt, Artificial Sequence
  Description of Artificial Sequence: Synthetic oligonucleotide
  Sense strand starting at position 3849 of SEQ ID NO: 1243768
uguuccuggucuuaacauu

SEQ ID NO: 1440093 - RNA, 19 nt, Artificial Sequence
  Description of Artificial Sequence: Synthetic oligonucleotide
  Antisense strand to SEQ ID NO: 1440092
aauguuaagaccaggaaca

SEQ ID NO: 1440094 - RNA, 19 nt, Artificial Sequence
  Description of Artificial Sequence: Synthetic oligonucleotide
  Sense strand starting at position 3914 of SEQ ID NO: 1243768
ccagucaccugucacuauu

SEQ ID NO: 1440095 - RNA, 19 nt, Artificial Sequence
  Description of Artificial Sequence: Synthetic oligonucleotide
  Antisense strand to SEQ ID NO: 1440094
aauagugacaggugacugg

SEQ ID NO: 1440096 - RNA, 19 nt, Artificial Sequence
  Description of Artificial Sequence: Synthetic oligonucleotide
  Sense strand starting at position 3975 of SEQ ID NO: 1243768
gauuuagggucguuagagc

SEQ ID NO: 1440097 - RNA, 19 nt, Artificial Sequence
  Description of Artificial Sequence: Synthetic oligonucleotide
  Antisense strand to SEQ ID NO: 1440096
gcucuaacgacccuaaauc

SEQ ID NO: 1440098 - RNA, 19 nt, Artificial Sequence
  Description of Artificial Sequence: Synthetic oligonucleotide
  Sense strand starting at position 3982 of SEQ ID NO: 1243768
ggucguuagagcuggaaug

SEQ ID NO: 1440099 - RNA, 19 nt, Artificial Sequence
  Description of Artificial Sequence: Synthetic oligonucleotide
  Antisense strand to SEQ ID NO: 1440098
cauuccagcucuaacgacc

SEQ ID NO: 1440100 - RNA, 19 nt, Artificial Sequence
  Description of Artificial Sequence: Synthetic oligonucleotide
  Sense strand starting at position 3983 of SEQ ID NO: 1243768
gucguuagagcuggaauga

SEQ ID NO: 1440101 - RNA, 19 nt, Artificial Sequence
  Description of Artificial Sequence: Synthetic oligonucleotide
  Antisense strand to SEQ ID NO: 1440100
ucauuccagcucuaacgac

SEQ ID NO: 1440102 - RNA, 19 nt, Artificial Sequence
  Description of Artificial Sequence: Synthetic oligonucleotide
  Sense strand starting at position 297 of SEQ ID NO: 1243769
aaccuaucugcggagucua

SEQ ID NO: 1440103 - RNA, 19 nt, Artificial Sequence
  Description of Artificial Sequence: Synthetic oligonucleotide
  Antisense strand to SEQ ID NO: 1440102
uagacuccgcagauagguu

SEQ ID NO: 1440104 - RNA, 19 nt, Artificial Sequence
  Description of Artificial Sequence: Synthetic oligonucleotide
  Sense strand starting at position 332 of SEQ ID NO: 1243769
ccgaguccuccuuagugaa

SEQ ID NO: 1440105 - RNA, 19 nt, Artificial Sequence
  Description of Artificial Sequence: Synthetic oligonucleotide
  Antisense strand to SEQ ID NO: 1440104
uucacuaaggaggacucgg

SEQ ID NO: 1440106 - RNA, 19 nt, Artificial Sequence
  Description of Artificial Sequence: Synthetic oligonucleotide
  Sense strand starting at position 334 of SEQ ID NO: 1243769
gaguccuccuuagugaaca

SEQ ID NO: 1440107 - RNA, 19 nt, Artificial Sequence
  Description of Artificial Sequence: Synthetic oligonucleotide
  Antisense strand to SEQ ID NO: 1440106
uguucacuaaggaggacuc

SEQ ID NO: 1440108 - RNA, 19 nt, Artificial Sequence
  Description of Artificial Sequence: Synthetic oligonucleotide
  Sense strand starting at position 347 of SEQ ID NO: 1243769
ugaacacacugacaguauu

SEQ ID NO: 1440109 - RNA, 19 nt, Artificial Sequence
  Description of Artificial Sequence: Synthetic oligonucleotide
  Antisense strand to SEQ ID NO: 1440108
aauacugucaguguguuca

SEQ ID NO: 1440110 - RNA, 19 nt, Artificial Sequence
  Description of Artificial Sequence: Synthetic oligonucleotide
  Sense strand starting at position 423 of SEQ ID NO: 1243769
acucuuuauuugugaaagg

SEQ ID NO: 1440111 - RNA, 19 nt, Artificial Sequence
  Description of Artificial Sequence: Synthetic oligonucleotide
  Antisense strand to SEQ ID NO: 1440110
ccuuucacaaauaaagagu

SEQ ID NO: 1440112 - RNA, 19 nt, Artificial Sequence
  Description of Artificial Sequence: Synthetic oligonucleotide
  Sense strand starting at position 559 of SEQ ID NO: 1243769
cccugcaucgaauggagau

SEQ ID NO: 1440113 - RNA, 19 nt, Artificial Sequence
  Description of Artificial Sequence: Synthetic oligonucleotide
  Antisense strand to SEQ ID NO: 1440112
aucuccauucgaugcaggg

SEQ ID NO: 1440114 - RNA, 19 nt, Artificial Sequence
  Description of Artificial Sequence: Synthetic oligonucleotide
  Sense strand starting at position 700 of SEQ ID NO: 1243769
gccggaaucuccuuguugu

SEQ ID NO: 1440115 - RNA, 19 nt, Artificial Sequence
  Description of Artificial Sequence: Synthetic oligonucleotide
  Antisense strand to SEQ ID NO: 1440114
acaacaaggagauuccggc

SEQ ID NO: 1440116 - RNA, 19 nt, Artificial Sequence
  Description of Artificial Sequence: Synthetic oligonucleotide
  Sense strand starting at position 701 of SEQ ID NO: 1243769
ccggaaucuccuuguugug

SEQ ID NO: 1440117 - RNA, 19 nt, Artificial Sequence
  Description of Artificial Sequence: Synthetic oligonucleotide
  Antisense strand to SEQ ID NO: 1440116
cacaacaaggagauuccgg

SEQ ID NO: 1440118 - RNA, 19 nt, Artificial Sequence
  Description of Artificial Sequence: Synthetic oligonucleotide
  Sense strand starting at position 837 of SEQ ID NO: 1243769
uagaauccgccgcaaacuu

SEQ ID NO: 1440119 - RNA, 19 nt, Artificial Sequence
  Description of Artificial Sequence: Synthetic oligonucleotide
  Antisense strand to SEQ ID NO: 1440118
aaguuugcggcggauucua

SEQ ID NO: 1440120 - RNA, 19 nt, Artificial Sequence
  Description of Artificial Sequence: Synthetic oligonucleotide
  Sense strand starting at position 2664 of SEQ ID NO: 1243769
cccgaagaaucagaguauu

SEQ ID NO: 1440121 - RNA, 19 nt, Artificial Sequence
  Description of Artificial Sequence: Synthetic oligonucleotide
  Antisense strand to SEQ ID NO: 1440120
aauacucugauucuucggg

SEQ ID NO: 1440122 - RNA, 19 nt, Artificial Sequence
  Description of Artificial Sequence: Synthetic oligonucleotide
  Sense strand starting at position 2854 of SEQ ID NO: 1243769
aggucuccaccugguuaau

SEQ ID NO: 1440123 - RNA, 19 nt, Artificial Sequence
  Description of Artificial Sequence: Synthetic oligonucleotide
  Antisense strand to SEQ ID NO: 1440122
auuaaccagguggagaccu

SEQ ID NO: 1440124 - RNA, 19 nt, Artificial Sequence
  Description of Artificial Sequence: Synthetic oligonucleotide
  Sense strand starting at position 2961 of SEQ ID NO: 1243769
gggcccagucuuggagaaa

SEQ ID NO: 1440125 - RNA, 19 nt, Artificial Sequence
  Description of Artificial Sequence: Synthetic oligonucleotide
  Antisense strand to SEQ ID NO: 1440124
uuucuccaagacugggccc

SEQ ID NO: 1440126 - RNA, 19 nt, Artificial Sequence
  Description of Artificial Sequence: Synthetic oligonucleotide
  Sense strand starting at position 2962 of SEQ ID NO: 1243769
ggcccagucuuggagaaac

SEQ ID NO: 1440127 - RNA, 19 nt, Artificial Sequence
  Description of Artificial Sequence: Synthetic oligonucleotide
  Antisense strand to SEQ ID NO: 1440126
guuucuccaagacugggcc

SEQ ID NO: 1440128 - RNA, 19 nt, Artificial Sequence
  Description of Artificial Sequence: Synthetic oligonucleotide
  Sense strand starting at position 3018 of SEQ ID NO: 1243769
gggcguggccuccacaaau

SEQ ID NO: 1440129 - RNA, 19 nt, Artificial Sequence
  Description of Artificial Sequence: Synthetic oligonucleotide
  Antisense strand to SEQ ID NO: 1440128
auuuguggaggccacgccc

SEQ ID NO: 1440130 - RNA, 19 nt, Artificial Sequence
  Description of Artificial Sequence: Synthetic oligonucleotide
  Sense strand starting at position 3029 of SEQ ID NO: 1243769
ccacaaaucucuugggcuu

SEQ ID NO: 1440131 - RNA, 19 nt, Artificial Sequence
  Description of Artificial Sequence: Synthetic oligonucleotide
  Antisense strand to SEQ ID NO: 1440130
aagcccaagagauuugugg

SEQ ID NO: 1440132 - RNA, 19 nt, Artificial Sequence
  Description of Artificial Sequence: Synthetic oligonucleotide
  Sense strand starting at position 3031 of SEQ ID NO: 1243769
acaaaucucuugggcuuau

SEQ ID NO: 1440133 - RNA, 19 nt, Artificial Sequence
  Description of Artificial Sequence: Synthetic oligonucleotide
  Antisense strand to SEQ ID NO: 1440132
auaagcccaagagauuugu

SEQ ID NO: 1440134 - RNA, 19 nt, Artificial Sequence
  Description of Artificial Sequence: Synthetic oligonucleotide
  Sense strand starting at position 3041 of SEQ ID NO: 1243769
ugggcuuauuggucauacu

SEQ ID NO: 1440135 - RNA, 19 nt, Artificial Sequence
  Description of Artificial Sequence: Synthetic oligonucleotide
  Antisense strand to SEQ ID NO: 1440134
aguaugaccaauaagccca

SEQ ID NO: 1440136 - RNA, 19 nt, Artificial Sequence
  Description of Artificial Sequence: Synthetic oligonucleotide
  Sense strand starting at position 3050 of SEQ ID NO: 1243769
uggucauacucccgaguca

SEQ ID NO: 1440137 - RNA, 19 nt, Artificial Sequence
  Description of Artificial Sequence: Synthetic oligonucleotide
  Antisense strand to SEQ ID NO: 1440136
ugacucgggaguaugacca

SEQ ID NO: 1440138 - RNA, 19 nt, Artificial Sequence
  Description of Artificial Sequence: Synthetic oligonucleotide
  Sense strand starting at position 3051 of SEQ ID NO: 1243769
ggucauacucccgagucaa

SEQ ID NO: 1440139 - RNA, 19 nt, Artificial Sequence
  Description of Artificial Sequence: Synthetic oligonucleotide
  Antisense strand to SEQ ID NO: 1440138
uugacucgggaguaugacc

SEQ ID NO: 1440140 - RNA, 19 nt, Artificial Sequence
  Description of Artificial Sequence: Synthetic oligonucleotide
  Sense strand starting at position 3061 of SEQ ID NO: 1243769
ccgagucaauucugagacu

SEQ ID NO: 1440141 - RNA, 19 nt, Artificial Sequence
  Description of Artificial Sequence: Synthetic oligonucleotide
  Antisense strand to SEQ ID NO: 1440140
agucucagaauugacucgg

SEQ ID NO: 1440142 - RNA, 19 nt, Artificial Sequence
  Description of Artificial Sequence: Synthetic oligonucleotide
  Sense strand starting at position 3062 of SEQ ID NO: 1243769
cgagucaauucugagacuu

SEQ ID NO: 1440143 - RNA, 19 nt, Artificial Sequence
  Description of Artificial Sequence: Synthetic oligonucleotide
  Antisense strand to SEQ ID NO: 1440142
aagucucagaauugacucg

SEQ ID NO: 1440144 - RNA, 19 nt, Artificial Sequence
  Description of Artificial Sequence: Synthetic oligonucleotide
  Sense strand starting at position 3342 of SEQ ID NO: 1243769
gcuuuaucgacucgaccuu

SEQ ID NO: 1440145 - RNA, 19 nt, Artificial Sequence
  Description of Artificial Sequence: Synthetic oligonucleotide
  Antisense strand to SEQ ID NO: 1440144
aaggucgagucgauaaagc

SEQ ID NO: 1440146 - RNA, 19 nt, Artificial Sequence
  Description of Artificial Sequence: Synthetic oligonucleotide
  Sense strand starting at position 3395 of SEQ ID NO: 1243769
gccucaguuucucuuaagu

SEQ ID NO: 1440147 - RNA, 19 nt, Artificial Sequence
  Description of Artificial Sequence: Synthetic oligonucleotide
  Antisense strand to SEQ ID NO: 1440146
acuuaagagaaacugaggc

SEQ ID NO: 1440148 - RNA, 19 nt, Artificial Sequence
  Description of Artificial Sequence: Synthetic oligonucleotide
  Sense strand starting at position 3414 of SEQ ID NO: 1243769
cccuauguggcuuagggaa

SEQ ID NO: 1440149 - RNA, 19 nt, Artificial Sequence
  Description of Artificial Sequence: Synthetic oligonucleotide
  Antisense strand to SEQ ID NO: 1440148
uucccuaagccacauaggg

SEQ ID NO: 1440150 - RNA, 19 nt, Artificial Sequence
  Description of Artificial Sequence: Synthetic oligonucleotide
  Sense strand starting at position 3430 of SEQ ID NO: 1243769
gaaagaguguccgcggaac

SEQ ID NO: 1440151 - RNA, 19 nt, Artificial Sequence
  Description of Artificial Sequence: Synthetic oligonucleotide
  Antisense strand to SEQ ID NO: 1440150
guuccgcggacacucuuuc

SEQ ID NO: 1440152 - RNA, 19 nt, Artificial Sequence
  Description of Artificial Sequence: Synthetic oligonucleotide
  Sense strand starting at position 3772 of SEQ ID NO: 1243769
aguucccucuccggagauu

SEQ ID NO: 1440153 - RNA, 19 nt, Artificial Sequence
  Description of Artificial Sequence: Synthetic oligonucleotide
  Antisense strand to SEQ ID NO: 1440152
aaucuccggagagggaacu

SEQ ID NO: 1440154 - RNA, 19 nt, Artificial Sequence
  Description of Artificial Sequence: Synthetic oligonucleotide
  Sense strand starting at position 206 of SEQ ID NO: 1243770
ggaaauaccgccugaccau

SEQ ID NO: 1440155 - RNA, 19 nt, Artificial Sequence
  Description of Artificial Sequence: Synthetic oligonucleotide
  Antisense strand to SEQ ID NO: 1440154
auggucaggcgguauuucc

SEQ ID NO: 1440156 - RNA, 19 nt, Artificial Sequence
  Description of Artificial Sequence: Synthetic oligonucleotide
  Sense strand starting at position 244 of SEQ ID NO: 1243770
gguuaagggcgucagguau

SEQ ID NO: 1440157 - RNA, 19 nt, Artificial Sequence
  Description of Artificial Sequence: Synthetic oligonucleotide
  Antisense strand to SEQ ID NO: 1440156
auaccugacgcccuuaacc

SEQ ID NO: 1440158 - RNA, 19 nt, Artificial Sequence
  Description of Artificial Sequence: Synthetic oligonucleotide
  Sense strand starting at position 399 of SEQ ID NO: 1243770
cuagacuuucuuuggccaa

SEQ ID NO: 1440159 - RNA, 19 nt, Artificial Sequence
  Description of Artificial Sequence: Synthetic oligonucleotide
  Antisense strand to SEQ ID NO: 1440158
uuggccaaagaaagucuag

SEQ ID NO: 1440160 - RNA, 19 nt, Artificial Sequence
  Description of Artificial Sequence: Synthetic oligonucleotide
  Sense strand starting at position 403 of SEQ ID NO: 1243770
acuuucuuuggccaaagaa

SEQ ID NO: 1440161 - RNA, 19 nt, Artificial Sequence
  Description of Artificial Sequence: Synthetic oligonucleotide
  Antisense strand to SEQ ID NO: 1440160
uucuuuggccaaagaaagu

SEQ ID NO: 1440162 - RNA, 19 nt, Artificial Sequence
  Description of Artificial Sequence: Synthetic oligonucleotide
  Sense strand starting at position 576 of SEQ ID NO: 1243770
uugugaugcucccuacaaa

SEQ ID NO: 1440163 - RNA, 19 nt, Artificial Sequence
  Description of Artificial Sequence: Synthetic oligonucleotide
  Antisense strand to SEQ ID NO: 1440162
uuuguagggagcaucacaa

SEQ ID NO: 1440164 - RNA, 19 nt, Artificial Sequence
  Description of Artificial Sequence: Synthetic oligonucleotide
  Sense strand starting at position 577 of SEQ ID NO: 1243770
ugugaugcucccuacaaac

SEQ ID NO: 1440165 - RNA, 19 nt, Artificial Sequence
  Description of Artificial Sequence: Synthetic oligonucleotide
  Antisense strand to SEQ ID NO: 1440164
guuuguagggagcaucaca

SEQ ID NO: 1440166 - RNA, 19 nt, Artificial Sequence
  Description of Artificial Sequence: Synthetic oligonucleotide
  Sense strand starting at position 790 of SEQ ID NO: 1243770
ucacauuaucauggugguu

SEQ ID NO: 1440167 - RNA, 19 nt, Artificial Sequence
  Description of Artificial Sequence: Synthetic oligonucleotide
  Antisense strand to SEQ ID NO: 1440166
aaccaccaugauaauguga

SEQ ID NO: 1440168 - RNA, 19 nt, Artificial Sequence
  Description of Artificial Sequence: Synthetic oligonucleotide
  Sense strand starting at position 793 of SEQ ID NO: 1243770
cauuaucauggugguuaca

SEQ ID NO: 1440169 - RNA, 19 nt, Artificial Sequence
  Description of Artificial Sequence: Synthetic oligonucleotide
  Antisense strand to SEQ ID NO: 1440168
uguaaccaccaugauaaug

SEQ ID NO: 1440170 - RNA, 19 nt, Artificial Sequence
  Description of Artificial Sequence: Synthetic oligonucleotide
  Sense strand starting at position 835 of SEQ ID NO: 1243770
aguuaaugcuauccuugga

SEQ ID NO: 1440171 - RNA, 19 nt, Artificial Sequence
  Description of Artificial Sequence: Synthetic oligonucleotide
  Antisense strand to SEQ ID NO: 1440170
uccaaggauagcauuaacu

SEQ ID NO: 1440172 - RNA, 19 nt, Artificial Sequence
  Description of Artificial Sequence: Synthetic oligonucleotide
  Sense strand starting at position 839 of SEQ ID NO: 1243770
aaugcuauccuuggagaag

SEQ ID NO: 1440173 - RNA, 19 nt, Artificial Sequence
  Description of Artificial Sequence: Synthetic oligonucleotide
  Antisense strand to SEQ ID NO: 1440172
cuucuccaaggauagcauu

SEQ ID NO: 1440174 - RNA, 19 nt, Artificial Sequence
  Description of Artificial Sequence: Synthetic oligonucleotide
  Sense strand starting at position 936 of SEQ ID NO: 1243770
augccacuuccugggagua

SEQ ID NO: 1440175 - RNA, 19 nt, Artificial Sequence
  Description of Artificial Sequence: Synthetic oligonucleotide
  Antisense strand to SEQ ID NO: 1440174
uacucccaggaaguggcau

SEQ ID NO: 1440176 - RNA, 19 nt, Artificial Sequence
  Description of Artificial Sequence: Synthetic oligonucleotide
  Sense strand starting at position 937 of SEQ ID NO: 1243770
ugccacuuccugggaguaa

SEQ ID NO: 1440177 - RNA, 19 nt, Artificial Sequence
  Description of Artificial Sequence: Synthetic oligonucleotide
  Antisense strand to SEQ ID NO: 1440176
uuacucccaggaaguggca

SEQ ID NO: 1440178 - RNA, 19 nt, Artificial Sequence
  Description of Artificial Sequence: Synthetic oligonucleotide
  Sense strand starting at position 1130 of SEQ ID NO: 1243770
gcagguccgacauagagau

SEQ ID NO: 1440179 - RNA, 19 nt, Artificial Sequence
  Description of Artificial Sequence: Synthetic oligonucleotide
  Antisense strand to SEQ ID NO: 1440178
aucucuaugucggaccugc

SEQ ID NO: 1440180 - RNA, 19 nt, Artificial Sequence
  Description of Artificial Sequence: Synthetic oligonucleotide
  Sense strand starting at position 1211 of SEQ ID NO: 1243770
cagugucugcggcuuugaa

SEQ ID NO: 1440181 - RNA, 19 nt, Artificial Sequence
  Description of Artificial Sequence: Synthetic oligonucleotide
  Antisense strand to SEQ ID NO: 1440180
uucaaagccgcagacacug

SEQ ID NO: 1440182 - RNA, 19 nt, Artificial Sequence
  Description of Artificial Sequence: Synthetic oligonucleotide
  Sense strand starting at position 2186 of SEQ ID NO: 1243770
gaaacuaggcguggaacuu

SEQ ID NO: 1440183 - RNA, 19 nt, Artificial Sequence
  Description of Artificial Sequence: Synthetic oligonucleotide
  Antisense strand to SEQ ID NO: 1440182
aaguuccacgccuaguuuc

SEQ ID NO: 1440184 - RNA, 19 nt, Artificial Sequence
  Description of Artificial Sequence: Synthetic oligonucleotide
  Sense strand starting at position 2529 of SEQ ID NO: 1243770
ggaguucugcccuaaucag

SEQ ID NO: 1440185 - RNA, 19 nt, Artificial Sequence
  Description of Artificial Sequence: Synthetic oligonucleotide
  Antisense strand to SEQ ID NO: 1440184
cugauuagggcagaacucc

SEQ ID NO: 1440186 - RNA, 19 nt, Artificial Sequence
  Description of Artificial Sequence: Synthetic oligonucleotide
  Sense strand starting at position 2539 of SEQ ID NO: 1243770
ccuaaucagucacuaggau

SEQ ID NO: 1440187 - RNA, 19 nt, Artificial Sequence
  Description of Artificial Sequence: Synthetic oligonucleotide
  Antisense strand to SEQ ID NO: 1440186
auccuagugacugauuagg

SEQ ID NO: 1440188 - RNA, 19 nt, Artificial Sequence
  Description of Artificial Sequence: Synthetic oligonucleotide
  Sense strand starting at position 2606 of SEQ ID NO: 1243770
gggugaggucccugcucuu

SEQ ID NO: 1440189 - RNA, 19 nt, Artificial Sequence
  Description of Artificial Sequence: Synthetic oligonucleotide
  Antisense strand to SEQ ID NO: 1440188
aagagcagggaccucaccc

SEQ ID NO: 1440190 - RNA, 19 nt, Artificial Sequence
  Description of Artificial Sequence: Synthetic oligonucleotide
  Sense strand starting at position 2698 of SEQ ID NO: 1243770
cuagaauugcgccaccuuu

SEQ ID NO: 1440191 - RNA, 19 nt, Artificial Sequence
  Description of Artificial Sequence: Synthetic oligonucleotide
  Antisense strand to SEQ ID NO: 1440190
aaagguggcgcaauucuag

SEQ ID NO: 1440192 - RNA, 19 nt, Artificial Sequence
  Description of Artificial Sequence: Synthetic oligonucleotide
  Sense strand starting at position 2917 of SEQ ID NO: 1243770
gagucugugucaccuggua

SEQ ID NO: 1440193 - RNA, 19 nt, Artificial Sequence
  Description of Artificial Sequence: Synthetic oligonucleotide
  Antisense strand to SEQ ID NO: 1440192
uaccaggugacacagacuc

SEQ ID NO: 1440194 - RNA, 19 nt, Artificial Sequence
  Description of Artificial Sequence: Synthetic oligonucleotide
  Sense strand starting at position 2929 of SEQ ID NO: 1243770
ccugguauuauugggagga

SEQ ID NO: 1440195 - RNA, 19 nt, Artificial Sequence
  Description of Artificial Sequence: Synthetic oligonucleotide
  Antisense strand to SEQ ID NO: 1440194
uccucccaauaauaccagg

SEQ ID NO: 1440196 - RNA, 19 nt, Artificial Sequence
  Description of Artificial Sequence: Synthetic oligonucleotide
  Sense strand starting at position 2931 of SEQ ID NO: 1243770
ugguauuauugggaggaug

SEQ ID NO: 1440197 - RNA, 19 nt, Artificial Sequence
  Description of Artificial Sequence: Synthetic oligonucleotide
  Antisense strand to SEQ ID NO: 1440196
cauccucccaauaauacca

SEQ ID NO: 1440198 - RNA, 19 nt, Artificial Sequence
  Description of Artificial Sequence: Synthetic oligonucleotide
  Sense strand starting at position 3127 of SEQ ID NO: 1243770
ugcuguguuccgcaggaca

SEQ ID NO: 1440199 - RNA, 19 nt, Artificial Sequence
  Description of Artificial Sequence: Synthetic oligonucleotide
  Antisense strand to SEQ ID NO: 1440198
uguccugcggaacacagca

SEQ ID NO: 1440200 - RNA, 19 nt, Artificial Sequence
  Description of Artificial Sequence: Synthetic oligonucleotide
  Sense strand starting at position 3185 of SEQ ID NO: 1243770
gcaagugaauggucagucu

SEQ ID NO: 1440201 - RNA, 19 nt, Artificial Sequence
  Description of Artificial Sequence: Synthetic oligonucleotide
  Antisense strand to SEQ ID NO: 1440200
agacugaccauucacuugc

SEQ ID NO: 1440202 - RNA, 19 nt, Artificial Sequence
  Description of Artificial Sequence: Synthetic oligonucleotide
  Sense strand starting at position 3200 of SEQ ID NO: 1243770
gucugucauuccucugauc

SEQ ID NO: 1440203 - RNA, 19 nt, Artificial Sequence
  Description of Artificial Sequence: Synthetic oligonucleotide
  Antisense strand to SEQ ID NO: 1440202
gaucagaggaaugacagac

SEQ ID NO: 1440204 - RNA, 19 nt, Artificial Sequence
  Description of Artificial Sequence: Synthetic oligonucleotide
  Sense strand starting at position 3202 of SEQ ID NO: 1243770
cugucauuccucugaucac

SEQ ID NO: 1440205 - RNA, 19 nt, Artificial Sequence
  Description of Artificial Sequence: Synthetic oligonucleotide
  Antisense strand to SEQ ID NO: 1440204
gugaucagaggaaugacag

SEQ ID NO: 1440206 - RNA, 19 nt, Artificial Sequence
  Description of Artificial Sequence: Synthetic oligonucleotide
  Sense strand starting at position 3237 of SEQ ID NO: 1243770
cggagcagugagugaagau

SEQ ID NO: 1440207 - RNA, 19 nt, Artificial Sequence
  Description of Artificial Sequence: Synthetic oligonucleotide
  Antisense strand to SEQ ID NO: 1440206
aucuucacucacugcuccg

SEQ ID NO: 1440208 - RNA, 19 nt, Artificial Sequence
  Description of Artificial Sequence: Synthetic oligonucleotide
  Sense strand starting at position 3266 of SEQ ID NO: 1243770
agaaacguuccaggagagu

SEQ ID NO: 1440209 - RNA, 19 nt, Artificial Sequence
  Description of Artificial Sequence: Synthetic oligonucleotide
  Antisense strand to SEQ ID NO: 1440208
acucuccuggaacguuucu

SEQ ID NO: 1440210 - RNA, 19 nt, Artificial Sequence
  Description of Artificial Sequence: Synthetic oligonucleotide
  Sense strand starting at position 3322 of SEQ ID NO: 1243770
acaagaaaggcuggcauaa

SEQ ID NO: 1440211 - RNA, 19 nt, Artificial Sequence
  Description of Artificial Sequence: Synthetic oligonucleotide
  Antisense strand to SEQ ID NO: 1440210
uuaugccagccuuucuugu

SEQ ID NO: 1440212 - RNA, 19 nt, Artificial Sequence
  Description of Artificial Sequence: Synthetic oligonucleotide
  Sense strand starting at position 3387 of SEQ ID NO: 1243770
cuguuaccuuagcuguaaa

SEQ ID NO: 1440213 - RNA, 19 nt, Artificial Sequence
  Description of Artificial Sequence: Synthetic oligonucleotide
  Antisense strand to SEQ ID NO: 1440212
uuuacagcuaagguaacag

SEQ ID NO: 1440214 - RNA, 19 nt, Artificial Sequence
  Description of Artificial Sequence: Synthetic oligonucleotide
  Sense strand starting at position 3415 of SEQ ID NO: 1243770
acgcuaaucguguuguugu

SEQ ID NO: 1440215 - RNA, 19 nt, Artificial Sequence
  Description of Artificial Sequence: Synthetic oligonucleotide
  Antisense strand to SEQ ID NO: 1440214
acaacaacacgauuagcgu

SEQ ID NO: 1440216 - RNA, 19 nt, Artificial Sequence
  Description of Artificial Sequence: Synthetic oligonucleotide
  Sense strand starting at position 3417 of SEQ ID NO: 1243770
gcuaaucguguuguuguga

SEQ ID NO: 1440217 - RNA, 19 nt, Artificial Sequence
  Description of Artificial Sequence: Synthetic oligonucleotide
  Antisense strand to SEQ ID NO: 1440216
ucacaacaacacgauuagc

SEQ ID NO: 1440218 - RNA, 19 nt, Artificial Sequence
  Description of Artificial Sequence: Synthetic oligonucleotide
  Sense strand starting at position 3423 of SEQ ID NO: 1243770
cguguuguugugaggaagu

SEQ ID NO: 1440219 - RNA, 19 nt, Artificial Sequence
  Description of Artificial Sequence: Synthetic oligonucleotide
  Antisense strand to SEQ ID NO: 1440218
acuuccucacaacaacacg

SEQ ID NO: 1440220 - RNA, 19 nt, Artificial Sequence
  Description of Artificial Sequence: Synthetic oligonucleotide
  Sense strand starting at position 3476 of SEQ ID NO: 1243770
cuuucucagccaggaaagu

SEQ ID NO: 1440221 - RNA, 19 nt, Artificial Sequence
  Description of Artificial Sequence: Synthetic oligonucleotide
  Antisense strand to SEQ ID NO: 1440220
acuuuccuggcugagaaag

SEQ ID NO: 1440222 - RNA, 19 nt, Artificial Sequence
  Description of Artificial Sequence: Synthetic oligonucleotide
  Sense strand starting at position 3477 of SEQ ID NO: 1243770
uuucucagccaggaaaguu

SEQ ID NO: 1440223 - RNA, 19 nt, Artificial Sequence
  Description of Artificial Sequence: Synthetic oligonucleotide
  Antisense strand to SEQ ID NO: 1440222
aacuuuccuggcugagaaa

SEQ ID NO: 1440224 - RNA, 19 nt, Artificial Sequence
  Description of Artificial Sequence: Synthetic oligonucleotide
  Sense strand starting at position 3486 of SEQ ID NO: 1243770
caggaaaguugagaugaaa

SEQ ID NO: 1440225 - RNA, 19 nt, Artificial Sequence
  Description of Artificial Sequence: Synthetic oligonucleotide
  Antisense strand to SEQ ID NO: 1440224
uuucaucucaacuuuccug

SEQ ID NO: 1440226 - RNA, 19 nt, Artificial Sequence
  Description of Artificial Sequence: Synthetic oligonucleotide
  Sense strand starting at position 3576 of SEQ ID NO: 1243770
gaauguucuucuuggauuu

SEQ ID NO: 1440227 - RNA, 19 nt, Artificial Sequence
  Description of Artificial Sequence: Synthetic oligonucleotide
  Antisense strand to SEQ ID NO: 1440226
aaauccaagaagaacauuc

SEQ ID NO: 1440228 - RNA, 19 nt, Artificial Sequence
  Description of Artificial Sequence: Synthetic oligonucleotide
  Sense strand starting at position 3596 of SEQ ID NO: 1243770
uacauuggguguuccagau

SEQ ID NO: 1440229 - RNA, 19 nt, Artificial Sequence
  Description of Artificial Sequence: Synthetic oligonucleotide
  Antisense strand to SEQ ID NO: 1440228
aucuggaacacccaaugua

SEQ ID NO: 1440230 - RNA, 19 nt, Artificial Sequence
  Description of Artificial Sequence: Synthetic oligonucleotide
  Sense strand starting at position 3600 of SEQ ID NO: 1243770
uuggguguuccagaucaga

SEQ ID NO: 1440231 - RNA, 19 nt, Artificial Sequence
  Description of Artificial Sequence: Synthetic oligonucleotide
  Antisense strand to SEQ ID NO: 1440230
ucugaucuggaacacccaa

SEQ ID NO: 1440232 - RNA, 19 nt, Artificial Sequence
  Description of Artificial Sequence: Synthetic oligonucleotide
  Sense strand starting at position 3605 of SEQ ID NO: 1243770
uguuccagaucagaagaaa

SEQ ID NO: 1440233 - RNA, 19 nt, Artificial Sequence
  Description of Artificial Sequence: Synthetic oligonucleotide
  Antisense strand to SEQ ID NO: 1440232
uuucuucugaucuggaaca

SEQ ID NO: 1440234 - RNA, 19 nt, Artificial Sequence
  Description of Artificial Sequence: Synthetic oligonucleotide
  Sense strand starting at position 3 of SEQ ID NO: 1243771
gggacuugguguuucuaca

SEQ ID NO: 1440235 - RNA, 19 nt, Artificial Sequence
  Description of Artificial Sequence: Synthetic oligonucleotide
  Antisense strand to SEQ ID NO: 1440234
uguagaaacaccaaguccc

SEQ ID NO: 1440236 - RNA, 19 nt, Artificial Sequence
  Description of Artificial Sequence: Synthetic oligonucleotide
  Sense strand starting at position 184 of SEQ ID NO: 1243771
ccuaguguccuugaaggac

SEQ ID NO: 1440237 - RNA, 19 nt, Artificial Sequence
  Description of Artificial Sequence: Synthetic oligonucleotide
  Antisense strand to SEQ ID NO: 1440236
guccuucaaggacacuagg

SEQ ID NO: 1440238 - RNA, 19 nt, Artificial Sequence
  Description of Artificial Sequence: Synthetic oligonucleotide
  Sense strand starting at position 211 of SEQ ID NO: 1243771
aggaacaccuagucugaua

SEQ ID NO: 1440239 - RNA, 19 nt, Artificial Sequence
  Description of Artificial Sequence: Synthetic oligonucleotide
  Antisense strand to SEQ ID NO: 1440238
uaucagacuagguguuccu

SEQ ID NO: 1440240 - RNA, 19 nt, Artificial Sequence
  Description of Artificial Sequence: Synthetic oligonucleotide
  Sense strand starting at position 339 of SEQ ID NO: 1243771
gagagucagucccauauuu

SEQ ID NO: 1440241 - RNA, 19 nt, Artificial Sequence
  Description of Artificial Sequence: Synthetic oligonucleotide
  Antisense strand to SEQ ID NO: 1440240
aaauaugggacugacucuc

SEQ ID NO: 1440242 - RNA, 19 nt, Artificial Sequence
  Description of Artificial Sequence: Synthetic oligonucleotide
  Sense strand starting at position 479 of SEQ ID NO: 1243771
agugcuguauuugcuaaga

SEQ ID NO: 1440243 - RNA, 19 nt, Artificial Sequence
  Description of Artificial Sequence: Synthetic oligonucleotide
  Antisense strand to SEQ ID NO: 1440242
ucuuagcaaauacagcacu

SEQ ID NO: 1440244 - RNA, 19 nt, Artificial Sequence
  Description of Artificial Sequence: Synthetic oligonucleotide
  Sense strand starting at position 484 of SEQ ID NO: 1243771
uguauuugcuaagaaucca

SEQ ID NO: 1440245 - RNA, 19 nt, Artificial Sequence
  Description of Artificial Sequence: Synthetic oligonucleotide
  Antisense strand to SEQ ID NO: 1440244
uggauucuuagcaaauaca

SEQ ID NO: 1440246 - RNA, 19 nt, Artificial Sequence
  Description of Artificial Sequence: Synthetic oligonucleotide
  Sense strand starting at position 499 of SEQ ID NO: 1243771
uccagaagccucugcauuu

SEQ ID NO: 1440247 - RNA, 19 nt, Artificial Sequence
  Description of Artificial Sequence: Synthetic oligonucleotide
  Antisense strand to SEQ ID NO: 1440246
aaaugcagaggcuucugga

SEQ ID NO: 1440248 - RNA, 19 nt, Artificial Sequence
  Description of Artificial Sequence: Synthetic oligonucleotide
  Sense strand starting at position 506 of SEQ ID NO: 1243771
gccucugcauuugcagaau

SEQ ID NO: 1440249 - RNA, 19 nt, Artificial Sequence
  Description of Artificial Sequence: Synthetic oligonucleotide
  Antisense strand to SEQ ID NO: 1440248
auucugcaaaugcagaggc

SEQ ID NO: 1440250 - RNA, 19 nt, Artificial Sequence
  Description of Artificial Sequence: Synthetic oligonucleotide
  Sense strand starting at position 631 of SEQ ID NO: 1243771
gaggaaaugcuuuguaacu

SEQ ID NO: 1440251 - RNA, 19 nt, Artificial Sequence
  Description of Artificial Sequence: Synthetic oligonucleotide
  Antisense strand to SEQ ID NO: 1440250
aguuacaaagcauuuccuc

SEQ ID NO: 1440252 - RNA, 19 nt, Artificial Sequence
  Description of Artificial Sequence: Synthetic oligonucleotide
  Sense strand starting at position 632 of SEQ ID NO: 1243771
aggaaaugcuuuguaacuc

SEQ ID NO: 1440253 - RNA, 19 nt, Artificial Sequence
  Description of Artificial Sequence: Synthetic oligonucleotide
  Antisense strand to SEQ ID NO: 1440252
gaguuacaaagcauuuccu

SEQ ID NO: 1440254 - RNA, 19 nt, Artificial Sequence
  Description of Artificial Sequence: Synthetic oligonucleotide
  Sense strand starting at position 972 of SEQ ID NO: 1243771
gagcgacaaaguugucuca

SEQ ID NO: 1440255 - RNA, 19 nt, Artificial Sequence
  Description of Artificial Sequence: Synthetic oligonucleotide
  Antisense strand to SEQ ID NO: 1440254
ugagacaacuuugucgcuc

SEQ ID NO: 1440256 - RNA, 19 nt, Artificial Sequence
  Description of Artificial Sequence: Synthetic oligonucleotide
  Sense strand starting at position 974 of SEQ ID NO: 1243771
gcgacaaaguugucucaaa

SEQ ID NO: 1440257 - RNA, 19 nt, Artificial Sequence
  Description of Artificial Sequence: Synthetic oligonucleotide
  Antisense strand to SEQ ID NO: 1440256
uuugagacaacuuugucgc

SEQ ID NO: 1440258 - RNA, 19 nt, Artificial Sequence
  Description of Artificial Sequence: Synthetic oligonucleotide
  Sense strand starting at position 1134 of SEQ ID NO: 1243771
cugucacugccuugaaauc

SEQ ID NO: 1440259 - RNA, 19 nt, Artificial Sequence
  Description of Artificial Sequence: Synthetic oligonucleotide
  Antisense strand to SEQ ID NO: 1440258
gauuucaaggcagugacag

SEQ ID NO: 1440260 - RNA, 19 nt, Artificial Sequence
  Description of Artificial Sequence: Synthetic oligonucleotide
  Sense strand starting at position 1143 of SEQ ID NO: 1243771
ccuugaaauccuugguaau

SEQ ID NO: 1440261 - RNA, 19 nt, Artificial Sequence
  Description of Artificial Sequence: Synthetic oligonucleotide
  Antisense strand to SEQ ID NO: 1440260
auuaccaaggauuucaagg

SEQ ID NO: 1440262 - RNA, 19 nt, Artificial Sequence
  Description of Artificial Sequence: Synthetic oligonucleotide
  Sense strand starting at position 1144 of SEQ ID NO: 1243771
cuugaaauccuugguaauu

SEQ ID NO: 1440263 - RNA, 19 nt, Artificial Sequence
  Description of Artificial Sequence: Synthetic oligonucleotide
  Antisense strand to SEQ ID NO: 1440262
aauuaccaaggauuucaag

SEQ ID NO: 1440264 - RNA, 19 nt, Artificial Sequence
  Description of Artificial Sequence: Synthetic oligonucleotide
  Sense strand starting at position 1146 of SEQ ID NO: 1243771
ugaaauccuugguaauuug

SEQ ID NO: 1440265 - RNA, 19 nt, Artificial Sequence
  Description of Artificial Sequence: Synthetic oligonucleotide
  Antisense strand to SEQ ID NO: 1440264
caaauuaccaaggauuuca

SEQ ID NO: 1440266 - RNA, 19 nt, Artificial Sequence
  Description of Artificial Sequence: Synthetic oligonucleotide
  Sense strand starting at position 1505 of SEQ ID NO: 1243771
ucuucuucccugggcagaa

SEQ ID NO: 1440267 - RNA, 19 nt, Artificial Sequence
  Description of Artificial Sequence: Synthetic oligonucleotide
  Antisense strand to SEQ ID NO: 1440266
uucugcccagggaagaaga

SEQ ID NO: 1440268 - RNA, 19 nt, Artificial Sequence
  Description of Artificial Sequence: Synthetic oligonucleotide
  Sense strand starting at position 1506 of SEQ ID NO: 1243771
cuucuucccugggcagaaa

SEQ ID NO: 1440269 - RNA, 19 nt, Artificial Sequence
  Description of Artificial Sequence: Synthetic oligonucleotide
  Antisense strand to SEQ ID NO: 1440268
uuucugcccagggaagaag

SEQ ID NO: 1440270 - RNA, 19 nt, Artificial Sequence
  Description of Artificial Sequence: Synthetic oligonucleotide
  Sense strand starting at position 1553 of SEQ ID NO: 1243771
agagaaaccugccuuccuu

SEQ ID NO: 1440271 - RNA, 19 nt, Artificial Sequence
  Description of Artificial Sequence: Synthetic oligonucleotide
  Antisense strand to SEQ ID NO: 1440270
aaggaaggcagguuucucu

SEQ ID NO: 1440272 - RNA, 19 nt, Artificial Sequence
  Description of Artificial Sequence: Synthetic oligonucleotide
  Sense strand starting at position 2214 of SEQ ID NO: 1243771
gaaggcucuggaugguaga

SEQ ID NO: 1440273 - RNA, 19 nt, Artificial Sequence
  Description of Artificial Sequence: Synthetic oligonucleotide
  Antisense strand to SEQ ID NO: 1440272
ucuaccauccagagccuuc

SEQ ID NO: 1440274 - RNA, 19 nt, Artificial Sequence
  Description of Artificial Sequence: Synthetic oligonucleotide
  Sense strand starting at position 2231 of SEQ ID NO: 1243771
gauugaggccucugugagu

SEQ ID NO: 1440275 - RNA, 19 nt, Artificial Sequence
  Description of Artificial Sequence: Synthetic oligonucleotide
  Antisense strand to SEQ ID NO: 1440274
acucacagaggccucaauc

SEQ ID NO: 1440276 - RNA, 19 nt, Artificial Sequence
  Description of Artificial Sequence: Synthetic oligonucleotide
  Sense strand starting at position 2431 of SEQ ID NO: 1243771
gugaguagguucucauccu

SEQ ID NO: 1440277 - RNA, 19 nt, Artificial Sequence
  Description of Artificial Sequence: Synthetic oligonucleotide
  Antisense strand to SEQ ID NO: 1440276
aggaugagaaccuacucac

SEQ ID NO: 1440278 - RNA, 19 nt, Artificial Sequence
  Description of Artificial Sequence: Synthetic oligonucleotide
  Sense strand starting at position 2463 of SEQ ID NO: 1243771
cuaggauucugucuaauga

SEQ ID NO: 1440279 - RNA, 19 nt, Artificial Sequence
  Description of Artificial Sequence: Synthetic oligonucleotide
  Antisense strand to SEQ ID NO: 1440278
ucauuagacagaauccuag

SEQ ID NO: 1440280 - RNA, 19 nt, Artificial Sequence
  Description of Artificial Sequence: Synthetic oligonucleotide
  Sense strand starting at position 2609 of SEQ ID NO: 1243771
cucugaucccuccacgaga

SEQ ID NO: 1440281 - RNA, 19 nt, Artificial Sequence
  Description of Artificial Sequence: Synthetic oligonucleotide
  Antisense strand to SEQ ID NO: 1440280
ucucguggagggaucagag

SEQ ID NO: 1440282 - RNA, 19 nt, Artificial Sequence
  Description of Artificial Sequence: Synthetic oligonucleotide
  Sense strand starting at position 2623 of SEQ ID NO: 1243771
cgagaacauuacuuccuuu

SEQ ID NO: 1440283 - RNA, 19 nt, Artificial Sequence
  Description of Artificial Sequence: Synthetic oligonucleotide
  Antisense strand to SEQ ID NO: 1440282
aaaggaaguaauguucucg

SEQ ID NO: 1440284 - RNA, 19 nt, Artificial Sequence
  Description of Artificial Sequence: Synthetic oligonucleotide
  Sense strand starting at position 2674 of SEQ ID NO: 1243771
agagcaaagcucuguucga

SEQ ID NO: 1440285 - RNA, 19 nt, Artificial Sequence
  Description of Artificial Sequence: Synthetic oligonucleotide
  Antisense strand to SEQ ID NO: 1440284
ucgaacagagcuuugcucu

SEQ ID NO: 1440286 - RNA, 19 nt, Artificial Sequence
  Description of Artificial Sequence: Synthetic oligonucleotide
  Sense strand starting at position 2683 of SEQ ID NO: 1243771
cucuguucgaggucagugu

SEQ ID NO: 1440287 - RNA, 19 nt, Artificial Sequence
  Description of Artificial Sequence: Synthetic oligonucleotide
  Antisense strand to SEQ ID NO: 1440286
acacugaccucgaacagag

SEQ ID NO: 1440288 - RNA, 19 nt, Artificial Sequence
  Description of Artificial Sequence: Synthetic oligonucleotide
  Sense strand starting at position 2702 of SEQ ID NO: 1243771
cauuauugccuguaaagug

SEQ ID NO: 1440289 - RNA, 19 nt, Artificial Sequence
  Description of Artificial Sequence: Synthetic oligonucleotide
  Antisense strand to SEQ ID NO: 1440288
cacuuuacaggcaauaaug

SEQ ID NO: 1440290 - RNA, 19 nt, Artificial Sequence
  Description of Artificial Sequence: Synthetic oligonucleotide
  Sense strand starting at position 2710 of SEQ ID NO: 1243771
ccuguaaaguguccuuuga

SEQ ID NO: 1440291 - RNA, 19 nt, Artificial Sequence
  Description of Artificial Sequence: Synthetic oligonucleotide
  Antisense strand to SEQ ID NO: 1440290
ucaaaggacacuuuacagg

SEQ ID NO: 1440292 - RNA, 19 nt, Artificial Sequence
  Description of Artificial Sequence: Synthetic oligonucleotide
  Sense strand starting at position 2712 of SEQ ID NO: 1243771
uguaaaguguccuuugaaa

SEQ ID NO: 1440293 - RNA, 19 nt, Artificial Sequence
  Description of Artificial Sequence: Synthetic oligonucleotide
  Antisense strand to SEQ ID NO: 1440292
uuucaaaggacacuuuaca

SEQ ID NO: 1440294 - RNA, 19 nt, Artificial Sequence
  Description of Artificial Sequence: Synthetic oligonucleotide
  Sense strand starting at position 2815 of SEQ ID NO: 1243771
cuauuaacagcaggugaua

SEQ ID NO: 1440295 - RNA, 19 nt, Artificial Sequence
  Description of Artificial Sequence: Synthetic oligonucleotide
  Antisense strand to SEQ ID NO: 1440294
uaucaccugcuguuaauag

SEQ ID NO: 1440296 - RNA, 19 nt, Artificial Sequence
  Description of Artificial Sequence: Synthetic oligonucleotide
  Sense strand starting at position 2830 of SEQ ID NO: 1243771
gauaacgacuuuccaguua

SEQ ID NO: 1440297 - RNA, 19 nt, Artificial Sequence
  Description of Artificial Sequence: Synthetic oligonucleotide
  Antisense strand to SEQ ID NO: 1440296
uaacuggaaagucguuauc

SEQ ID NO: 1440298 - RNA, 19 nt, Artificial Sequence
  Description of Artificial Sequence: Synthetic oligonucleotide
  Sense strand starting at position 2842 of SEQ ID NO: 1243771
ccaguuauguuugaauuug

SEQ ID NO: 1440299 - RNA, 19 nt, Artificial Sequence
  Description of Artificial Sequence: Synthetic oligonucleotide
  Antisense strand to SEQ ID NO: 1440298
caaauucaaacauaacugg

SEQ ID NO: 1440300 - RNA, 19 nt, Artificial Sequence
  Description of Artificial Sequence: Synthetic oligonucleotide
  Sense strand starting at position 3187 of SEQ ID NO: 1243771
ugcccauguggacagaaau

SEQ ID NO: 1440301 - RNA, 19 nt, Artificial Sequence
  Description of Artificial Sequence: Synthetic oligonucleotide
  Antisense strand to SEQ ID NO: 1440300
auuucuguccacaugggca

SEQ ID NO: 1440302 - RNA, 19 nt, Artificial Sequence
  Description of Artificial Sequence: Synthetic oligonucleotide
  Sense strand starting at position 3200 of SEQ ID NO: 1243771
agaaauguuucggccucca

SEQ ID NO: 1440303 - RNA, 19 nt, Artificial Sequence
  Description of Artificial Sequence: Synthetic oligonucleotide
  Antisense strand to SEQ ID NO: 1440302
uggaggccgaaacauuucu

SEQ ID NO: 1440304 - RNA, 19 nt, Artificial Sequence
  Description of Artificial Sequence: Synthetic oligonucleotide
  Sense strand starting at position 3245 of SEQ ID NO: 1243771
ugaugauaaucagaacagu

SEQ ID NO: 1440305 - RNA, 19 nt, Artificial Sequence
  Description of Artificial Sequence: Synthetic oligonucleotide
  Antisense strand to SEQ ID NO: 1440304
acuguucugauuaucauca

SEQ ID NO: 1440306 - RNA, 19 nt, Artificial Sequence
  Description of Artificial Sequence: Synthetic oligonucleotide
  Sense strand starting at position 3478 of SEQ ID NO: 1243771
gucauaacgaaugguugga

SEQ ID NO: 1440307 - RNA, 19 nt, Artificial Sequence
  Description of Artificial Sequence: Synthetic oligonucleotide
  Antisense strand to SEQ ID NO: 1440306
uccaaccauucguuaugac

SEQ ID NO: 1440308 - RNA, 19 nt, Artificial Sequence
  Description of Artificial Sequence: Synthetic oligonucleotide
  Sense strand starting at position 3631 of SEQ ID NO: 1243771
gugcuuauugcaguuccau

SEQ ID NO: 1440309 - RNA, 19 nt, Artificial Sequence
  Description of Artificial Sequence: Synthetic oligonucleotide
  Antisense strand to SEQ ID NO: 1440308
auggaacugcaauaagcac

SEQ ID NO: 1440310 - RNA, 19 nt, Artificial Sequence
  Description of Artificial Sequence: Synthetic oligonucleotide
  Sense strand starting at position 3689 of SEQ ID NO: 1243771
uuacaaucuccugagagcu

SEQ ID NO: 1440311 - RNA, 19 nt, Artificial Sequence
  Description of Artificial Sequence: Synthetic oligonucleotide
  Antisense strand to SEQ ID NO: 1440310
agcucucaggagauuguaa

SEQ ID NO: 1440312 - RNA, 19 nt, Artificial Sequence
  Description of Artificial Sequence: Synthetic oligonucleotide
  Sense strand starting at position 3792 of SEQ ID NO: 1243771
cugacugaucacugacuga

SEQ ID NO: 1440313 - RNA, 19 nt, Artificial Sequence
  Description of Artificial Sequence: Synthetic oligonucleotide
  Antisense strand to SEQ ID NO: 1440312
ucagucagugaucagucag

SEQ ID NO: 1440314 - RNA, 19 nt, Artificial Sequence
  Description of Artificial Sequence: Synthetic oligonucleotide
  Sense strand starting at position 3 of SEQ ID NO: 1243772
ugagcaauugcacacuaaa

SEQ ID NO: 1440315 - RNA, 19 nt, Artificial Sequence
  Description of Artificial Sequence: Synthetic oligonucleotide
  Antisense strand to SEQ ID NO: 1440314
uuuagugugcaauugcuca

SEQ ID NO: 1440316 - RNA, 19 nt, Artificial Sequence
  Description of Artificial Sequence: Synthetic oligonucleotide
  Sense strand starting at position 49 of SEQ ID NO: 1243772
gggugugaucaugagccca

SEQ ID NO: 1440317 - RNA, 19 nt, Artificial Sequence
  Description of Artificial Sequence: Synthetic oligonucleotide
  Antisense strand to SEQ ID NO: 1440316
ugggcucaugaucacaccc

SEQ ID NO: 1440318 - RNA, 19 nt, Artificial Sequence
  Description of Artificial Sequence: Synthetic oligonucleotide
  Sense strand starting at position 51 of SEQ ID NO: 1243772
gugugaucaugagcccacu

SEQ ID NO: 1440319 - RNA, 19 nt, Artificial Sequence
  Description of Artificial Sequence: Synthetic oligonucleotide
  Antisense strand to SEQ ID NO: 1440318
agugggcucaugaucacac

SEQ ID NO: 1440320 - RNA, 19 nt, Artificial Sequence
  Description of Artificial Sequence: Synthetic oligonucleotide
  Sense strand starting at position 80 of SEQ ID NO: 1243772
uguggcuguguuucucgaa

SEQ ID NO: 1440321 - RNA, 19 nt, Artificial Sequence
  Description of Artificial Sequence: Synthetic oligonucleotide
  Antisense strand to SEQ ID NO: 1440320
uucgagaaacacagccaca

SEQ ID NO: 1440322 - RNA, 19 nt, Artificial Sequence
  Description of Artificial Sequence: Synthetic oligonucleotide
  Sense strand starting at position 95 of SEQ ID NO: 1243772
cgaacuacugauugcacau

SEQ ID NO: 1440323 - RNA, 19 nt, Artificial Sequence
  Description of Artificial Sequence: Synthetic oligonucleotide
  Antisense strand to SEQ ID NO: 1440322
augugcaaucaguaguucg

SEQ ID NO: 1440324 - RNA, 19 nt, Artificial Sequence
  Description of Artificial Sequence: Synthetic oligonucleotide
  Sense strand starting at position 349 of SEQ ID NO: 1243772
uuaagagcuccuugccaac

SEQ ID NO: 1440325 - RNA, 19 nt, Artificial Sequence
  Description of Artificial Sequence: Synthetic oligonucleotide
  Antisense strand to SEQ ID NO: 1440324
guuggcaaggagcucuuaa

SEQ ID NO: 1440326 - RNA, 19 nt, Artificial Sequence
  Description of Artificial Sequence: Synthetic oligonucleotide
  Sense strand starting at position 502 of SEQ ID NO: 1243772
aggaauucuguccaagggu

SEQ ID NO: 1440327 - RNA, 19 nt, Artificial Sequence
  Description of Artificial Sequence: Synthetic oligonucleotide
  Antisense strand to SEQ ID NO: 1440326
acccuuggacagaauuccu

SEQ ID NO: 1440328 - RNA, 19 nt, Artificial Sequence
  Description of Artificial Sequence: Synthetic oligonucleotide
  Sense strand starting at position 892 of SEQ ID NO: 1243772
cgcagaucgguccugcaca

SEQ ID NO: 1440329 - RNA, 19 nt, Artificial Sequence
  Description of Artificial Sequence: Synthetic oligonucleotide
  Antisense strand to SEQ ID NO: 1440328
ugugcaggaccgaucugcg

SEQ ID NO: 1440330 - RNA, 19 nt, Artificial Sequence
  Description of Artificial Sequence: Synthetic oligonucleotide
  Sense strand starting at position 1420 of SEQ ID NO: 1243772
aguuucgguguguuucauu

SEQ ID NO: 1440331 - RNA, 19 nt, Artificial Sequence
  Description of Artificial Sequence: Synthetic oligonucleotide
  Antisense strand to SEQ ID NO: 1440330
aaugaaacacaccgaaacu

SEQ ID NO: 1440332 - RNA, 19 nt, Artificial Sequence
  Description of Artificial Sequence: Synthetic oligonucleotide
  Sense strand starting at position 1464 of SEQ ID NO: 1243772
cguggagaguuugugggau

SEQ ID NO: 1440333 - RNA, 19 nt, Artificial Sequence
  Description of Artificial Sequence: Synthetic oligonucleotide
  Antisense strand to SEQ ID NO: 1440332
aucccacaaacucuccacg

SEQ ID NO: 1440334 - RNA, 19 nt, Artificial Sequence
  Description of Artificial Sequence: Synthetic oligonucleotide
  Sense strand starting at position 2597 of SEQ ID NO: 1243772
cccugcggauucuuuaauu

SEQ ID NO: 1440335 - RNA, 19 nt, Artificial Sequence
  Description of Artificial Sequence: Synthetic oligonucleotide
  Antisense strand to SEQ ID NO: 1440334
aauuaaagaauccgcaggg

SEQ ID NO: 1440336 - RNA, 19 nt, Artificial Sequence
  Description of Artificial Sequence: Synthetic oligonucleotide
  Sense strand starting at position 2606 of SEQ ID NO: 1243772
uucuuuaauuuguggagga

SEQ ID NO: 1440337 - RNA, 19 nt, Artificial Sequence
  Description of Artificial Sequence: Synthetic oligonucleotide
  Antisense strand to SEQ ID NO: 1440336
uccuccacaaauuaaagaa

SEQ ID NO: 1440338 - RNA, 19 nt, Artificial Sequence
  Description of Artificial Sequence: Synthetic oligonucleotide
  Sense strand starting at position 2607 of SEQ ID NO: 1243772
ucuuuaauuuguggaggag

SEQ ID NO: 1440339 - RNA, 19 nt, Artificial Sequence
  Description of Artificial Sequence: Synthetic oligonucleotide
  Antisense strand to SEQ ID NO: 1440338
cuccuccacaaauuaaaga

SEQ ID NO: 1440340 - RNA, 19 nt, Artificial Sequence
  Description of Artificial Sequence: Synthetic oligonucleotide
  Sense strand starting at position 2661 of SEQ ID NO: 1243772
gccuguucaccuggugaug

SEQ ID NO: 1440341 - RNA, 19 nt, Artificial Sequence
  Description of Artificial Sequence: Synthetic oligonucleotide
  Antisense strand to SEQ ID NO: 1440340
caucaccaggugaacaggc

SEQ ID NO: 1440342 - RNA, 19 nt, Artificial Sequence
  Description of Artificial Sequence: Synthetic oligonucleotide
  Sense strand starting at position 2695 of SEQ ID NO: 1243772
gugcguguucaggucagaa

SEQ ID NO: 1440343 - RNA, 19 nt, Artificial Sequence
  Description of Artificial Sequence: Synthetic oligonucleotide
  Antisense strand to SEQ ID NO: 1440342
uucugaccugaacacgcac

SEQ ID NO: 1440344 - RNA, 19 nt, Artificial Sequence
  Description of Artificial Sequence: Synthetic oligonucleotide
  Sense strand starting at position 2697 of SEQ ID NO: 1243772
gcguguucaggucagaauu

SEQ ID NO: 1440345 - RNA, 19 nt, Artificial Sequence
  Description of Artificial Sequence: Synthetic oligonucleotide
  Antisense strand to SEQ ID NO: 1440344
aauucugaccugaacacgc

SEQ ID NO: 1440346 - RNA, 19 nt, Artificial Sequence
  Description of Artificial Sequence: Synthetic oligonucleotide
  Sense strand starting at position 2705 of SEQ ID NO: 1243772
aggucagaauuccugaaac

SEQ ID NO: 1440347 - RNA, 19 nt, Artificial Sequence
  Description of Artificial Sequence: Synthetic oligonucleotide
  Antisense strand to SEQ ID NO: 1440346
guuucaggaauucugaccu

SEQ ID NO: 1440348 - RNA, 19 nt, Artificial Sequence
  Description of Artificial Sequence: Synthetic oligonucleotide
  Sense strand starting at position 2864 of SEQ ID NO: 1243772
ggcgaugacagcgagaagu

SEQ ID NO: 1440349 - RNA, 19 nt, Artificial Sequence
  Description of Artificial Sequence: Synthetic oligonucleotide
  Antisense strand to SEQ ID NO: 1440348
acuucucgcugucaucgcc

SEQ ID NO: 1440350 - RNA, 19 nt, Artificial Sequence
  Description of Artificial Sequence: Synthetic oligonucleotide
  Sense strand starting at position 2961 of SEQ ID NO: 1243772
ucacauuucugagggucua

SEQ ID NO: 1440351 - RNA, 19 nt, Artificial Sequence
  Description of Artificial Sequence: Synthetic oligonucleotide
  Antisense strand to SEQ ID NO: 1440350
uagacccucagaaauguga

SEQ ID NO: 1440352 - RNA, 19 nt, Artificial Sequence
  Description of Artificial Sequence: Synthetic oligonucleotide
  Sense strand starting at position 2997 of SEQ ID NO: 1243772
ggacacuccaguuguguua

SEQ ID NO: 1440353 - RNA, 19 nt, Artificial Sequence
  Description of Artificial Sequence: Synthetic oligonucleotide
  Antisense strand to SEQ ID NO: 1440352
uaacacaacuggagugucc

SEQ ID NO: 1440354 - RNA, 19 nt, Artificial Sequence
  Description of Artificial Sequence: Synthetic oligonucleotide
  Sense strand starting at position 3000 of SEQ ID NO: 1243772
cacuccaguuguguuagau

SEQ ID NO: 1440355 - RNA, 19 nt, Artificial Sequence
  Description of Artificial Sequence: Synthetic oligonucleotide
  Antisense strand to SEQ ID NO: 1440354
aucuaacacaacuggagug

SEQ ID NO: 1440356 - RNA, 19 nt, Artificial Sequence
  Description of Artificial Sequence: Synthetic oligonucleotide
  Sense strand starting at position 3459 of SEQ ID NO: 1243772
ccguguugaaaucacuguu

SEQ ID NO: 1440357 - RNA, 19 nt, Artificial Sequence
  Description of Artificial Sequence: Synthetic oligonucleotide
  Antisense strand to SEQ ID NO: 1440356
aacagugauuucaacacgg

SEQ ID NO: 1440358 - RNA, 19 nt, Artificial Sequence
  Description of Artificial Sequence: Synthetic oligonucleotide
  Sense strand starting at position 3462 of SEQ ID NO: 1243772
uguugaaaucacuguucuc

SEQ ID NO: 1440359 - RNA, 19 nt, Artificial Sequence
  Description of Artificial Sequence: Synthetic oligonucleotide
  Antisense strand to SEQ ID NO: 1440358
gagaacagugauuucaaca

SEQ ID NO: 1440360 - RNA, 19 nt, Artificial Sequence
  Description of Artificial Sequence: Synthetic oligonucleotide
  Sense strand starting at position 3465 of SEQ ID NO: 1243772
ugaaaucacuguucucugu

SEQ ID NO: 1440361 - RNA, 19 nt, Artificial Sequence
  Description of Artificial Sequence: Synthetic oligonucleotide
  Antisense strand to SEQ ID NO: 1440360
acagagaacagugauuuca

SEQ ID NO: 1440362 - RNA, 19 nt, Artificial Sequence
  Description of Artificial Sequence: Synthetic oligonucleotide
  Sense strand starting at position 3472 of SEQ ID NO: 1243772
acuguucucugucccacaa

SEQ ID NO: 1440363 - RNA, 19 nt, Artificial Sequence
  Description of Artificial Sequence: Synthetic oligonucleotide
  Antisense strand to SEQ ID NO: 1440362
uugugggacagagaacagu

SEQ ID NO: 1440364 - RNA, 19 nt, Artificial Sequence
  Description of Artificial Sequence: Synthetic oligonucleotide
  Sense strand starting at position 3501 of SEQ ID NO: 1243772
cuuuccugugacuggcaua

SEQ ID NO: 1440365 - RNA, 19 nt, Artificial Sequence
  Description of Artificial Sequence: Synthetic oligonucleotide
  Antisense strand to SEQ ID NO: 1440364
uaugccagucacaggaaag

SEQ ID NO: 1440366 - RNA, 19 nt, Artificial Sequence
  Description of Artificial Sequence: Synthetic oligonucleotide
  Sense strand starting at position 3521 of SEQ ID NO: 1243772
augguaagggcuuagcaaa

SEQ ID NO: 1440367 - RNA, 19 nt, Artificial Sequence
  Description of Artificial Sequence: Synthetic oligonucleotide
  Antisense strand to SEQ ID NO: 1440366
uuugcuaagcccuuaccau

SEQ ID NO: 1440368 - RNA, 19 nt, Artificial Sequence
  Description of Artificial Sequence: Synthetic oligonucleotide
  Sense strand starting at position 3539 of SEQ ID NO: 1243772
auguuugcugagugagagu

SEQ ID NO: 1440369 - RNA, 19 nt, Artificial Sequence
  Description of Artificial Sequence: Synthetic oligonucleotide
  Antisense strand to SEQ ID NO: 1440368
acucucacucagcaaacau

SEQ ID NO: 1440370 - RNA, 19 nt, Artificial Sequence
  Description of Artificial Sequence: Synthetic oligonucleotide
  Sense strand starting at position 3546 of SEQ ID NO: 1243772
cugagugagaguuguuucu

SEQ ID NO: 1440371 - RNA, 19 nt, Artificial Sequence
  Description of Artificial Sequence: Synthetic oligonucleotide
  Antisense strand to SEQ ID NO: 1440370
agaaacaacucucacucag

SEQ ID NO: 1440372 - RNA, 19 nt, Artificial Sequence
  Description of Artificial Sequence: Synthetic oligonucleotide
  Sense strand starting at position 3548 of SEQ ID NO: 1243772
gagugagaguuguuucuug

SEQ ID NO: 1440373 - RNA, 19 nt, Artificial Sequence
  Description of Artificial Sequence: Synthetic oligonucleotide
  Antisense strand to SEQ ID NO: 1440372
caagaaacaacucucacuc

SEQ ID NO: 1440374 - RNA, 19 nt, Artificial Sequence
  Description of Artificial Sequence: Synthetic oligonucleotide
  Sense strand starting at position 3552 of SEQ ID NO: 1243772
gagaguuguuucuugccac

SEQ ID NO: 1440375 - RNA, 19 nt, Artificial Sequence
  Description of Artificial Sequence: Synthetic oligonucleotide
  Antisense strand to SEQ ID NO: 1440374
guggcaagaaacaacucuc

SEQ ID NO: 1440376 - RNA, 19 nt, Artificial Sequence
  Description of Artificial Sequence: Synthetic oligonucleotide
  Sense strand starting at position 3578 of SEQ ID NO: 1243772
auuauagucugauugggag

SEQ ID NO: 1440377 - RNA, 19 nt, Artificial Sequence
  Description of Artificial Sequence: Synthetic oligonucleotide
  Antisense strand to SEQ ID NO: 1440376
cucccaaucagacuauaau

SEQ ID NO: 1440378 - RNA, 19 nt, Artificial Sequence
  Description of Artificial Sequence: Synthetic oligonucleotide
  Sense strand starting at position 3595 of SEQ ID NO: 1243772
aggaauagaucauauacau

SEQ ID NO: 1440379 - RNA, 19 nt, Artificial Sequence
  Description of Artificial Sequence: Synthetic oligonucleotide
  Antisense strand to SEQ ID NO: 1440378
auguauaugaucuauuccu

SEQ ID NO: 1440380 - RNA, 19 nt, Artificial Sequence
  Description of Artificial Sequence: Synthetic oligonucleotide
  Sense strand starting at position 3663 of SEQ ID NO: 1243772
ggcugugacagugauuguu

SEQ ID NO: 1440381 - RNA, 19 nt, Artificial Sequence
  Description of Artificial Sequence: Synthetic oligonucleotide
  Antisense strand to SEQ ID NO: 1440380
aacaaucacugucacagcc

SEQ ID NO: 1440382 - RNA, 19 nt, Artificial Sequence
  Description of Artificial Sequence: Synthetic oligonucleotide
  Sense strand starting at position 3799 of SEQ ID NO: 1243772
gugcccaauguaugucuaa

SEQ ID NO: 1440383 - RNA, 19 nt, Artificial Sequence
  Description of Artificial Sequence: Synthetic oligonucleotide
  Antisense strand to SEQ ID NO: 1440382
uuagacauacauugggcac

SEQ ID NO: 1440384 - RNA, 19 nt, Artificial Sequence
  Description of Artificial Sequence: Synthetic oligonucleotide
  Sense strand starting at position 3832 of SEQ ID NO: 1243772
gugagaugguuugcucuga

SEQ ID NO: 1440385 - RNA, 19 nt, Artificial Sequence
  Description of Artificial Sequence: Synthetic oligonucleotide
  Antisense strand to SEQ ID NO: 1440384
ucagagcaaaccaucucac

SEQ ID NO: 1440386 - RNA, 19 nt, Artificial Sequence
  Description of Artificial Sequence: Synthetic oligonucleotide
  Sense strand starting at position 3836 of SEQ ID NO: 1243772
gaugguuugcucugaccca

SEQ ID NO: 1440387 - RNA, 19 nt, Artificial Sequence
  Description of Artificial Sequence: Synthetic oligonucleotide
  Antisense strand to SEQ ID NO: 1440386
ugggucagagcaaaccauc

SEQ ID NO: 1440388 - RNA, 19 nt, Artificial Sequence
  Description of Artificial Sequence: Synthetic oligonucleotide
  Sense strand starting at position 3892 of SEQ ID NO: 1243772
ggauuaagucuagguucug

SEQ ID NO: 1440389 - RNA, 19 nt, Artificial Sequence
  Description of Artificial Sequence: Synthetic oligonucleotide
  Antisense strand to SEQ ID NO: 1440388
cagaaccuagacuuaaucc

SEQ ID NO: 1440390 - RNA, 19 nt, Artificial Sequence
  Description of Artificial Sequence: Synthetic oligonucleotide
  Sense strand starting at position 3893 of SEQ ID NO: 1243772
gauuaagucuagguucugu

SEQ ID NO: 1440391 - RNA, 19 nt, Artificial Sequence
  Description of Artificial Sequence: Synthetic oligonucleotide
  Antisense strand to SEQ ID NO: 1440390
acagaaccuagacuuaauc

SEQ ID NO: 1440392 - RNA, 19 nt, Artificial Sequence
  Description of Artificial Sequence: Synthetic oligonucleotide
  Sense strand starting at position 3902 of SEQ ID NO: 1243772
uagguucuguucucagaaa

SEQ ID NO: 1440393 - RNA, 19 nt, Artificial Sequence
  Description of Artificial Sequence: Synthetic oligonucleotide
  Antisense strand to SEQ ID NO: 1440392
uuucugagaacagaaccua

SEQ ID NO: 1440394 - RNA, 19 nt, Artificial Sequence
  Description of Artificial Sequence: Synthetic oligonucleotide
  Sense strand starting at position 64 of SEQ ID NO: 1243773
ucuaguggaucaucucuaa

SEQ ID NO: 1440395 - RNA, 19 nt, Artificial Sequence
  Description of Artificial Sequence: Synthetic oligonucleotide
  Antisense strand to SEQ ID NO: 1440394
uuagagaugauccacuaga

SEQ ID NO: 1440396 - RNA, 19 nt, Artificial Sequence
  Description of Artificial Sequence: Synthetic oligonucleotide
  Sense strand starting at position 67 of SEQ ID NO: 1243773
aguggaucaucucuaauua

SEQ ID NO: 1440397 - RNA, 19 nt, Artificial Sequence
  Description of Artificial Sequence: Synthetic oligonucleotide
  Antisense strand to SEQ ID NO: 1440396
uaauuagagaugauccacu

SEQ ID NO: 1440398 - RNA, 19 nt, Artificial Sequence
  Description of Artificial Sequence: Synthetic oligonucleotide
  Sense strand starting at position 115 of SEQ ID NO: 1243773
ggcauuccucuugagaaau

SEQ ID NO: 1440399 - RNA, 19 nt, Artificial Sequence
  Description of Artificial Sequence: Synthetic oligonucleotide
  Antisense strand to SEQ ID NO: 1440398
auuucucaagaggaaugcc

SEQ ID NO: 1440400 - RNA, 19 nt, Artificial Sequence
  Description of Artificial Sequence: Synthetic oligonucleotide
  Sense strand starting at position 370 of SEQ ID NO: 1243773
gguauuuccaaguguguuu

SEQ ID NO: 1440401 - RNA, 19 nt, Artificial Sequence
  Description of Artificial Sequence: Synthetic oligonucleotide
  Antisense strand to SEQ ID NO: 1440400
aaacacacuuggaaauacc

SEQ ID NO: 1440402 - RNA, 19 nt, Artificial Sequence
  Description of Artificial Sequence: Synthetic oligonucleotide
  Sense strand starting at position 701 of SEQ ID NO: 1243773
ugucaaccacccuggaaau

SEQ ID NO: 1440403 - RNA, 19 nt, Artificial Sequence
  Description of Artificial Sequence: Synthetic oligonucleotide
  Antisense strand to SEQ ID NO: 1440402
auuuccagggugguugaca

SEQ ID NO: 1440404 - RNA, 19 nt, Artificial Sequence
  Description of Artificial Sequence: Synthetic oligonucleotide
  Sense strand starting at position 841 of SEQ ID NO: 1243773
cugcuaaauacugguagga

SEQ ID NO: 1440405 - RNA, 19 nt, Artificial Sequence
  Description of Artificial Sequence: Synthetic oligonucleotide
  Antisense strand to SEQ ID NO: 1440404
uccuaccaguauuuagcag

SEQ ID NO: 1440406 - RNA, 19 nt, Artificial Sequence
  Description of Artificial Sequence: Synthetic oligonucleotide
  Sense strand starting at position 1025 of SEQ ID NO: 1243773
auucuuguaugacuuggaa

SEQ ID NO: 1440407 - RNA, 19 nt, Artificial Sequence
  Description of Artificial Sequence: Synthetic oligonucleotide
  Antisense strand to SEQ ID NO: 1440406
uuccaagucauacaagaau

SEQ ID NO: 1440408 - RNA, 19 nt, Artificial Sequence
  Description of Artificial Sequence: Synthetic oligonucleotide
  Sense strand starting at position 1028 of SEQ ID NO: 1243773
cuuguaugacuuggaaaug

SEQ ID NO: 1440409 - RNA, 19 nt, Artificial Sequence
  Description of Artificial Sequence: Synthetic oligonucleotide
  Antisense strand to SEQ ID NO: 1440408
cauuuccaagucauacaag

SEQ ID NO: 1440410 - RNA, 19 nt, Artificial Sequence
  Description of Artificial Sequence: Synthetic oligonucleotide
  Sense strand starting at position 1062 of SEQ ID NO: 1243773
cuggucuugggucaugaua

SEQ ID NO: 1440411 - RNA, 19 nt, Artificial Sequence
  Description of Artificial Sequence: Synthetic oligonucleotide
  Antisense strand to SEQ ID NO: 1440410
uaucaugacccaagaccag

SEQ ID NO: 1440412 - RNA, 19 nt, Artificial Sequence
  Description of Artificial Sequence: Synthetic oligonucleotide
  Sense strand starting at position 1096 of SEQ ID NO: 1243773
gaauucuuggagugguaac

SEQ ID NO: 1440413 - RNA, 19 nt, Artificial Sequence
  Description of Artificial Sequence: Synthetic oligonucleotide
  Antisense strand to SEQ ID NO: 1440412
guuaccacuccaagaauuc

SEQ ID NO: 1440414 - RNA, 19 nt, Artificial Sequence
  Description of Artificial Sequence: Synthetic oligonucleotide
  Sense strand starting at position 1109 of SEQ ID NO: 1243773
gguaacuugaaggguuaca

SEQ ID NO: 1440415 - RNA, 19 nt, Artificial Sequence
  Description of Artificial Sequence: Synthetic oligonucleotide
  Antisense strand to SEQ ID NO: 1440414
uguaacccuucaaguuacc

SEQ ID NO: 1440416 - RNA, 19 nt, Artificial Sequence
  Description of Artificial Sequence: Synthetic oligonucleotide
  Sense strand starting at position 1129 of SEQ ID NO: 1243773
ggaagcccuagugaguaaa

SEQ ID NO: 1440417 - RNA, 19 nt, Artificial Sequence
  Description of Artificial Sequence: Synthetic oligonucleotide
  Antisense strand to SEQ ID NO: 1440416
uuuacucacuagggcuucc

SEQ ID NO: 1440418 - RNA, 19 nt, Artificial Sequence
  Description of Artificial Sequence: Synthetic oligonucleotide
  Sense strand starting at position 1148 of SEQ ID NO: 1243773
aagguaggcccagauaagu

SEQ ID NO: 1440419 - RNA, 19 nt, Artificial Sequence
  Description of Artificial Sequence: Synthetic oligonucleotide
  Antisense strand to SEQ ID NO: 1440418
acuuaucugggccuaccuu

SEQ ID NO: 1440420 - RNA, 19 nt, Artificial Sequence
  Description of Artificial Sequence: Synthetic oligonucleotide
  Sense strand starting at position 1429 of SEQ ID NO: 1243773
augaacauuugagaucugu

SEQ ID NO: 1440421 - RNA, 19 nt, Artificial Sequence
  Description of Artificial Sequence: Synthetic oligonucleotide
  Antisense strand to SEQ ID NO: 1440420
acagaucucaaauguucau

SEQ ID NO: 1440422 - RNA, 19 nt, Artificial Sequence
  Description of Artificial Sequence: Synthetic oligonucleotide
  Sense strand starting at position 1435 of SEQ ID NO: 1243773
auuugagaucugugcagug

SEQ ID NO: 1440423 - RNA, 19 nt, Artificial Sequence
  Description of Artificial Sequence: Synthetic oligonucleotide
  Antisense strand to SEQ ID NO: 1440422
cacugcacagaucucaaau

SEQ ID NO: 1440424 - RNA, 19 nt, Artificial Sequence
  Description of Artificial Sequence: Synthetic oligonucleotide
  Sense strand starting at position 1560 of SEQ ID NO: 1243773
agaaucaggacuugaguuu

SEQ ID NO: 1440425 - RNA, 19 nt, Artificial Sequence
  Description of Artificial Sequence: Synthetic oligonucleotide
  Antisense strand to SEQ ID NO: 1440424
aaacucaaguccugauucu

SEQ ID NO: 1440426 - RNA, 19 nt, Artificial Sequence
  Description of Artificial Sequence: Synthetic oligonucleotide
  Sense strand starting at position 2094 of SEQ ID NO: 1243773
ggcucaauggauggguaaa

SEQ ID NO: 1440427 - RNA, 19 nt, Artificial Sequence
  Description of Artificial Sequence: Synthetic oligonucleotide
  Antisense strand to SEQ ID NO: 1440426
uuuacccauccauugagcc

SEQ ID NO: 1440428 - RNA, 19 nt, Artificial Sequence
  Description of Artificial Sequence: Synthetic oligonucleotide
  Sense strand starting at position 2305 of SEQ ID NO: 1243773
gugccagacaugggagaua

SEQ ID NO: 1440429 - RNA, 19 nt, Artificial Sequence
  Description of Artificial Sequence: Synthetic oligonucleotide
  Antisense strand to SEQ ID NO: 1440428
uaucucccaugucuggcac

SEQ ID NO: 1440430 - RNA, 19 nt, Artificial Sequence
  Description of Artificial Sequence: Synthetic oligonucleotide
  Sense strand starting at position 2427 of SEQ ID NO: 1243773
gagaccuguccaggaagua

SEQ ID NO: 1440431 - RNA, 19 nt, Artificial Sequence
  Description of Artificial Sequence: Synthetic oligonucleotide
  Antisense strand to SEQ ID NO: 1440430
uacuuccuggacaggucuc

SEQ ID NO: 1440432 - RNA, 19 nt, Artificial Sequence
  Description of Artificial Sequence: Synthetic oligonucleotide
  Sense strand starting at position 2512 of SEQ ID NO: 1243773
ucaaauagucucugugaga

SEQ ID NO: 1440433 - RNA, 19 nt, Artificial Sequence
  Description of Artificial Sequence: Synthetic oligonucleotide
  Antisense strand to SEQ ID NO: 1440432
ucucacagagacuauuuga

SEQ ID NO: 1440434 - RNA, 19 nt, Artificial Sequence
  Description of Artificial Sequence: Synthetic oligonucleotide
  Sense strand starting at position 2513 of SEQ ID NO: 1243773
caaauagucucugugagag

SEQ ID NO: 1440435 - RNA, 19 nt, Artificial Sequence
  Description of Artificial Sequence: Synthetic oligonucleotide
  Antisense strand to SEQ ID NO: 1440434
cucucacagagacuauuug

SEQ ID NO: 1440436 - RNA, 19 nt, Artificial Sequence
  Description of Artificial Sequence: Synthetic oligonucleotide
  Sense strand starting at position 2601 of SEQ ID NO: 1243773
aggaaaguguccuccucau

SEQ ID NO: 1440437 - RNA, 19 nt, Artificial Sequence
  Description of Artificial Sequence: Synthetic oligonucleotide
  Antisense strand to SEQ ID NO: 1440436
augaggaggacacuuuccu

SEQ ID NO: 1440438 - RNA, 19 nt, Artificial Sequence
  Description of Artificial Sequence: Synthetic oligonucleotide
  Sense strand starting at position 2639 of SEQ ID NO: 1243773
gcacuuggucaacacaagu

SEQ ID NO: 1440439 - RNA, 19 nt, Artificial Sequence
  Description of Artificial Sequence: Synthetic oligonucleotide
  Antisense strand to SEQ ID NO: 1440438
acuuguguugaccaagugc

SEQ ID NO: 1440440 - RNA, 19 nt, Artificial Sequence
  Description of Artificial Sequence: Synthetic oligonucleotide
  Sense strand starting at position 2708 of SEQ ID NO: 1243773
ucagaaaugggcugacucu

SEQ ID NO: 1440441 - RNA, 19 nt, Artificial Sequence
  Description of Artificial Sequence: Synthetic oligonucleotide
  Antisense strand to SEQ ID NO: 1440440
agagucagcccauuucuga

SEQ ID NO: 1440442 - RNA, 19 nt, Artificial Sequence
  Description of Artificial Sequence: Synthetic oligonucleotide
  Sense strand starting at position 2756 of SEQ ID NO: 1243773
gccagcaaugaacgagaaa

SEQ ID NO: 1440443 - RNA, 19 nt, Artificial Sequence
  Description of Artificial Sequence: Synthetic oligonucleotide
  Antisense strand to SEQ ID NO: 1440442
uuucucguucauugcuggc

SEQ ID NO: 1440444 - RNA, 19 nt, Artificial Sequence
  Description of Artificial Sequence: Synthetic oligonucleotide
  Sense strand starting at position 2775 of SEQ ID NO: 1243773
aagagaagcuaagugucua

SEQ ID NO: 1440445 - RNA, 19 nt, Artificial Sequence
  Description of Artificial Sequence: Synthetic oligonucleotide
  Antisense strand to SEQ ID NO: 1440444
uagacacuuagcuucucuu

SEQ ID NO: 1440446 - RNA, 19 nt, Artificial Sequence
  Description of Artificial Sequence: Synthetic oligonucleotide
  Sense strand starting at position 2776 of SEQ ID NO: 1243773
agagaagcuaagugucuaa

SEQ ID NO: 1440447 - RNA, 19 nt, Artificial Sequence
  Description of Artificial Sequence: Synthetic oligonucleotide
  Antisense strand to SEQ ID NO: 1440446
uuagacacuuagcuucucu

SEQ ID NO: 1440448 - RNA, 19 nt, Artificial Sequence
  Description of Artificial Sequence: Synthetic oligonucleotide
  Sense strand starting at position 2924 of SEQ ID NO: 1243773
uucugugcucuggcuguaa

SEQ ID NO: 1440449 - RNA, 19 nt, Artificial Sequence
  Description of Artificial Sequence: Synthetic oligonucleotide
  Antisense strand to SEQ ID NO: 1440448
uuacagccagagcacagaa

SEQ ID NO: 1440450 - RNA, 19 nt, Artificial Sequence
  Description of Artificial Sequence: Synthetic oligonucleotide
  Sense strand starting at position 2935 of SEQ ID NO: 1243773
ggcuguaaucuagaaucac

SEQ ID NO: 1440451 - RNA, 19 nt, Artificial Sequence
  Description of Artificial Sequence: Synthetic oligonucleotide
  Antisense strand to SEQ ID NO: 1440450
gugauucuagauuacagcc

SEQ ID NO: 1440452 - RNA, 19 nt, Artificial Sequence
  Description of Artificial Sequence: Synthetic oligonucleotide
  Sense strand starting at position 3093 of SEQ ID NO: 1243773
acugaucuucgcuacucaa

SEQ ID NO: 1440453 - RNA, 19 nt, Artificial Sequence
  Description of Artificial Sequence: Synthetic oligonucleotide
  Antisense strand to SEQ ID NO: 1440452
uugaguagcgaagaucagu

SEQ ID NO: 1440454 - RNA, 19 nt, Artificial Sequence
  Description of Artificial Sequence: Synthetic oligonucleotide
  Sense strand starting at position 3449 of SEQ ID NO: 1243773
uuugcuauccugucggcau

SEQ ID NO: 1440455 - RNA, 19 nt, Artificial Sequence
  Description of Artificial Sequence: Synthetic oligonucleotide
  Antisense strand to SEQ ID NO: 1440454
augccgacaggauagcaaa

SEQ ID NO: 1440456 - RNA, 19 nt, Artificial Sequence
  Description of Artificial Sequence: Synthetic oligonucleotide
  Sense strand starting at position 3506 of SEQ ID NO: 1243773
uuugaaacuggauguuagu

SEQ ID NO: 1440457 - RNA, 19 nt, Artificial Sequence
  Description of Artificial Sequence: Synthetic oligonucleotide
  Antisense strand to SEQ ID NO: 1440456
acuaacauccaguuucaaa

SEQ ID NO: 1440458 - RNA, 19 nt, Artificial Sequence
  Description of Artificial Sequence: Synthetic oligonucleotide
  Sense strand starting at position 3678 of SEQ ID NO: 1243773
gccagauuugucugcagag

SEQ ID NO: 1440459 - RNA, 19 nt, Artificial Sequence
  Description of Artificial Sequence: Synthetic oligonucleotide
  Antisense strand to SEQ ID NO: 1440458
cucugcagacaaaucuggc

SEQ ID NO: 1440460 - RNA, 19 nt, Artificial Sequence
  Description of Artificial Sequence: Synthetic oligonucleotide
  Sense strand starting at position 3679 of SEQ ID NO: 1243773
ccagauuugucugcagagu

SEQ ID NO: 1440461 - RNA, 19 nt, Artificial Sequence
  Description of Artificial Sequence: Synthetic oligonucleotide
  Antisense strand to SEQ ID NO: 1440460
acucugcagacaaaucugg

SEQ ID NO: 1440462 - RNA, 19 nt, Artificial Sequence
  Description of Artificial Sequence: Synthetic oligonucleotide
  Sense strand starting at position 3714 of SEQ ID NO: 1243773
aggagaguggcagaguuua

SEQ ID NO: 1440463 - RNA, 19 nt, Artificial Sequence
  Description of Artificial Sequence: Synthetic oligonucleotide
  Antisense strand to SEQ ID NO: 1440462
uaaacucugccacucuccu

SEQ ID NO: 1440464 - RNA, 19 nt, Artificial Sequence
  Description of Artificial Sequence: Synthetic oligonucleotide
  Sense strand starting at position 3802 of SEQ ID NO: 1243773
gcaguugaucaugggaaag

SEQ ID NO: 1440465 - RNA, 19 nt, Artificial Sequence
  Description of Artificial Sequence: Synthetic oligonucleotide
  Antisense strand to SEQ ID NO: 1440464
cuuucccaugaucaacugc

SEQ ID NO: 1440466 - RNA, 19 nt, Artificial Sequence
  Description of Artificial Sequence: Synthetic oligonucleotide
  Sense strand starting at position 3813 of SEQ ID NO: 1243773
ugggaaaguugauugaucu

SEQ ID NO: 1440467 - RNA, 19 nt, Artificial Sequence
  Description of Artificial Sequence: Synthetic oligonucleotide
  Antisense strand to SEQ ID NO: 1440466
agaucaaucaacuuuccca

SEQ ID NO: 1440468 - RNA, 19 nt, Artificial Sequence
  Description of Artificial Sequence: Synthetic oligonucleotide
  Sense strand starting at position 3817 of SEQ ID NO: 1243773
aaaguugauugaucuacag

SEQ ID NO: 1440469 - RNA, 19 nt, Artificial Sequence
  Description of Artificial Sequence: Synthetic oligonucleotide
  Antisense strand to SEQ ID NO: 1440468
cuguagaucaaucaacuuu

SEQ ID NO: 1440470 - RNA, 19 nt, Artificial Sequence
  Description of Artificial Sequence: Synthetic oligonucleotide
  Sense strand starting at position 3833 of SEQ ID NO: 1243773
cagagugagccauauauug

SEQ ID NO: 1440471 - RNA, 19 nt, Artificial Sequence
  Description of Artificial Sequence: Synthetic oligonucleotide
  Antisense strand to SEQ ID NO: 1440470
caauauauggcucacucug

SEQ ID NO: 1440472 - RNA, 19 nt, Artificial Sequence
  Description of Artificial Sequence: Synthetic oligonucleotide
  Sense strand starting at position 3908 of SEQ ID NO: 1243773
ggcuuuaagccacaaugau

SEQ ID NO: 1440473 - RNA, 19 nt, Artificial Sequence
  Description of Artificial Sequence: Synthetic oligonucleotide
  Antisense strand to SEQ ID NO: 1440472
aucauuguggcuuaaagcc

SEQ ID NO: 1440474 - RNA, 19 nt, Artificial Sequence
  Description of Artificial Sequence: Synthetic oligonucleotide
  Sense strand starting at position 13 of SEQ ID NO: 1243774
ccaggaggccuuuauuacu

SEQ ID NO: 1440475 - RNA, 19 nt, Artificial Sequence
  Description of Artificial Sequence: Synthetic oligonucleotide
  Antisense strand to SEQ ID NO: 1440474
aguaauaaaggccuccugg

SEQ ID NO: 1440476 - RNA, 19 nt, Artificial Sequence
  Description of Artificial Sequence: Synthetic oligonucleotide
  Sense strand starting at position 49 of SEQ ID NO: 1243774
ugaauuugcuguccagcuu

SEQ ID NO: 1440477 - RNA, 19 nt, Artificial Sequence
  Description of Artificial Sequence: Synthetic oligonucleotide
  Antisense strand to SEQ ID NO: 1440476
aagcuggacagcaaauuca

SEQ ID NO: 1440478 - RNA, 19 nt, Artificial Sequence
  Description of Artificial Sequence: Synthetic oligonucleotide
  Sense strand starting at position 50 of SEQ ID NO: 1243774
gaauuugcuguccagcuuu

SEQ ID NO: 1440479 - RNA, 19 nt, Artificial Sequence
  Description of Artificial Sequence: Synthetic oligonucleotide
  Antisense strand to SEQ ID NO: 1440478
aaagcuggacagcaaauuc

SEQ ID NO: 1440480 - RNA, 19 nt, Artificial Sequence
  Description of Artificial Sequence: Synthetic oligonucleotide
  Sense strand starting at position 184 of SEQ ID NO: 1243774
ggcucaaagcuguguacua

SEQ ID NO: 1440481 - RNA, 19 nt, Artificial Sequence
  Description of Artificial Sequence: Synthetic oligonucleotide
  Antisense strand to SEQ ID NO: 1440480
uaguacacagcuuugagcc

SEQ ID NO: 1440482 - RNA, 19 nt, Artificial Sequence
  Description of Artificial Sequence: Synthetic oligonucleotide
  Sense strand starting at position 185 of SEQ ID NO: 1243774
gcucaaagcuguguacuaa

SEQ ID NO: 1440483 - RNA, 19 nt, Artificial Sequence
  Description of Artificial Sequence: Synthetic oligonucleotide
  Antisense strand to SEQ ID NO: 1440482
uuaguacacagcuuugagc

SEQ ID NO: 1440484 - RNA, 19 nt, Artificial Sequence
  Description of Artificial Sequence: Synthetic oligonucleotide
  Sense strand starting at position 186 of SEQ ID NO: 1243774
cucaaagcuguguacuaau

SEQ ID NO: 1440485 - RNA, 19 nt, Artificial Sequence
  Description of Artificial Sequence: Synthetic oligonucleotide
  Antisense strand to SEQ ID NO: 1440484
auuaguacacagcuuugag

SEQ ID NO: 1440486 - RNA, 19 nt, Artificial Sequence
  Description of Artificial Sequence: Synthetic oligonucleotide
  Sense strand starting at position 256 of SEQ ID NO: 1243774
augccaugucccugugaca

SEQ ID NO: 1440487 - RNA, 19 nt, Artificial Sequence
  Description of Artificial Sequence: Synthetic oligonucleotide
  Antisense strand to SEQ ID NO: 1440486
ugucacagggacauggcau

SEQ ID NO: 1440488 - RNA, 19 nt, Artificial Sequence
  Description of Artificial Sequence: Synthetic oligonucleotide
  Sense strand starting at position 279 of SEQ ID NO: 1243774
cagugacaguguuugaagu

SEQ ID NO: 1440489 - RNA, 19 nt, Artificial Sequence
  Description of Artificial Sequence: Synthetic oligonucleotide
  Antisense strand to SEQ ID NO: 1440488
acuucaaacacugucacug

SEQ ID NO: 1440490 - RNA, 19 nt, Artificial Sequence
  Description of Artificial Sequence: Synthetic oligonucleotide
  Sense strand starting at position 334 of SEQ ID NO: 1243774
cuggguuccuaucuuaguu

SEQ ID NO: 1440491 - RNA, 19 nt, Artificial Sequence
  Description of Artificial Sequence: Synthetic oligonucleotide
  Antisense strand to SEQ ID NO: 1440490
aacuaagauaggaacccag

SEQ ID NO: 1440492 - RNA, 19 nt, Artificial Sequence
  Description of Artificial Sequence: Synthetic oligonucleotide
  Sense strand starting at position 461 of SEQ ID NO: 1243774
uaaugaugauccuaaguga

SEQ ID NO: 1440493 - RNA, 19 nt, Artificial Sequence
  Description of Artificial Sequence: Synthetic oligonucleotide
  Antisense strand to SEQ ID NO: 1440492
ucacuuaggaucaucauua

SEQ ID NO: 1440494 - RNA, 19 nt, Artificial Sequence
  Description of Artificial Sequence: Synthetic oligonucleotide
  Sense strand starting at position 869 of SEQ ID NO: 1243774
gcgccuagucagccaaauu

SEQ ID NO: 1440495 - RNA, 19 nt, Artificial Sequence
  Description of Artificial Sequence: Synthetic oligonucleotide
  Antisense strand to SEQ ID NO: 1440494
aauuuggcugacuaggcgc

SEQ ID NO: 1440496 - RNA, 19 nt, Artificial Sequence
  Description of Artificial Sequence: Synthetic oligonucleotide
  Sense strand starting at position 909 of SEQ ID NO: 1243774
uguacuaucugacucgaaa

SEQ ID NO: 1440497 - RNA, 19 nt, Artificial Sequence
  Description of Artificial Sequence: Synthetic oligonucleotide
  Antisense strand to SEQ ID NO: 1440496
uuucgagucagauaguaca

SEQ ID NO: 1440498 - RNA, 19 nt, Artificial Sequence
  Description of Artificial Sequence: Synthetic oligonucleotide
  Sense strand starting at position 959 of SEQ ID NO: 1243774
aggauuaucgacuaccuuu

SEQ ID NO: 1440499 - RNA, 19 nt, Artificial Sequence
  Description of Artificial Sequence: Synthetic oligonucleotide
  Antisense strand to SEQ ID NO: 1440498
aaagguagucgauaauccu

SEQ ID NO: 1440500 - RNA, 19 nt, Artificial Sequence
  Description of Artificial Sequence: Synthetic oligonucleotide
  Sense strand starting at position 1007 of SEQ ID NO: 1243774
augucugccaaaggauaga

SEQ ID NO: 1440501 - RNA, 19 nt, Artificial Sequence
  Description of Artificial Sequence: Synthetic oligonucleotide
  Antisense strand to SEQ ID NO: 1440500
ucuauccuuuggcagacau

SEQ ID NO: 1440502 - RNA, 19 nt, Artificial Sequence
  Description of Artificial Sequence: Synthetic oligonucleotide
  Sense strand starting at position 1026 of SEQ ID NO: 1243774
guuuccaggucccuugaaa

SEQ ID NO: 1440503 - RNA, 19 nt, Artificial Sequence
  Description of Artificial Sequence: Synthetic oligonucleotide
  Antisense strand to SEQ ID NO: 1440502
uuucaagggaccuggaaac

SEQ ID NO: 1440504 - RNA, 19 nt, Artificial Sequence
  Description of Artificial Sequence: Synthetic oligonucleotide
  Sense strand starting at position 1059 of SEQ ID NO: 1243774
gagccaucuggauauuccu

SEQ ID NO: 1440505 - RNA, 19 nt, Artificial Sequence
  Description of Artificial Sequence: Synthetic oligonucleotide
  Antisense strand to SEQ ID NO: 1440504
aggaauauccagauggcuc

SEQ ID NO: 1440506 - RNA, 19 nt, Artificial Sequence
  Description of Artificial Sequence: Synthetic oligonucleotide
  Sense strand starting at position 1130 of SEQ ID NO: 1243774
uugcaaugguguuuccaau

SEQ ID NO: 1440507 - RNA, 19 nt, Artificial Sequence
  Description of Artificial Sequence: Synthetic oligonucleotide
  Antisense strand to SEQ ID NO: 1440506
auuggaaacaccauugcaa

SEQ ID NO: 1440508 - RNA, 19 nt, Artificial Sequence
  Description of Artificial Sequence: Synthetic oligonucleotide
  Sense strand starting at position 1136 of SEQ ID NO: 1243774
ugguguuuccaauaauaga

SEQ ID NO: 1440509 - RNA, 19 nt, Artificial Sequence
  Description of Artificial Sequence: Synthetic oligonucleotide
  Antisense strand to SEQ ID NO: 1440508
ucuauuauuggaaacacca

SEQ ID NO: 1440510 - RNA, 19 nt, Artificial Sequence
  Description of Artificial Sequence: Synthetic oligonucleotide
  Sense strand starting at position 1208 of SEQ ID NO: 1243774
uugcaugugaagcaagaau

SEQ ID NO: 1440511 - RNA, 19 nt, Artificial Sequence
  Description of Artificial Sequence: Synthetic oligonucleotide
  Antisense strand to SEQ ID NO: 1440510
auucuugcuucacaugcaa

SEQ ID NO: 1440512 - RNA, 19 nt, Artificial Sequence
  Description of Artificial Sequence: Synthetic oligonucleotide
  Sense strand starting at position 1262 of SEQ ID NO: 1243774
guugaaauaauauacgagu

SEQ ID NO: 1440513 - RNA, 19 nt, Artificial Sequence
  Description of Artificial Sequence: Synthetic oligonucleotide
  Antisense strand to SEQ ID NO: 1440512
acucguauauuauuucaac

SEQ ID NO: 1440514 - RNA, 19 nt, Artificial Sequence
  Description of Artificial Sequence: Synthetic oligonucleotide
  Sense strand starting at position 1268 of SEQ ID NO: 1243774
auaauauacgagugggaac

SEQ ID NO: 1440515 - RNA, 19 nt, Artificial Sequence
  Description of Artificial Sequence: Synthetic oligonucleotide
  Antisense strand to SEQ ID NO: 1440514
guucccacucguauauuau

SEQ ID NO: 1440516 - RNA, 19 nt, Artificial Sequence
  Description of Artificial Sequence: Synthetic oligonucleotide
  Sense strand starting at position 1372 of SEQ ID NO: 1243774
ccuagaacgucuucuccga

SEQ ID NO: 1440517 - RNA, 19 nt, Artificial Sequence
  Description of Artificial Sequence: Synthetic oligonucleotide
  Antisense strand to SEQ ID NO: 1440516
ucggagaagacguucuagg

SEQ ID NO: 1440518 - RNA, 19 nt, Artificial Sequence
  Description of Artificial Sequence: Synthetic oligonucleotide
  Sense strand starting at position 1640 of SEQ ID NO: 1243774
gggugucacuucuucccga

SEQ ID NO: 1440519 - RNA, 19 nt, Artificial Sequence
  Description of Artificial Sequence: Synthetic oligonucleotide
  Antisense strand to SEQ ID NO: 1440518
ucgggaagaagugacaccc

SEQ ID NO: 1440520 - RNA, 19 nt, Artificial Sequence
  Description of Artificial Sequence: Synthetic oligonucleotide
  Sense strand starting at position 2059 of SEQ ID NO: 1243774
acuuguaguguucagguga

SEQ ID NO: 1440521 - RNA, 19 nt, Artificial Sequence
  Description of Artificial Sequence: Synthetic oligonucleotide
  Antisense strand to SEQ ID NO: 1440520
ucaccugaacacuacaagu

SEQ ID NO: 1440522 - RNA, 19 nt, Artificial Sequence
  Description of Artificial Sequence: Synthetic oligonucleotide
  Sense strand starting at position 2104 of SEQ ID NO: 1243774
uuugauggcucuccuaagu

SEQ ID NO: 1440523 - RNA, 19 nt, Artificial Sequence
  Description of Artificial Sequence: Synthetic oligonucleotide
  Antisense strand to SEQ ID NO: 1440522
acuuaggagagccaucaaa

SEQ ID NO: 1440524 - RNA, 19 nt, Artificial Sequence
  Description of Artificial Sequence: Synthetic oligonucleotide
  Sense strand starting at position 2128 of SEQ ID NO: 1243774
gcagcaaucucaccgaaau

SEQ ID NO: 1440525 - RNA, 19 nt, Artificial Sequence
  Description of Artificial Sequence: Synthetic oligonucleotide
  Antisense strand to SEQ ID NO: 1440524
auuucggugagauugcugc

SEQ ID NO: 1440526 - RNA, 19 nt, Artificial Sequence
  Description of Artificial Sequence: Synthetic oligonucleotide
  Sense strand starting at position 2165 of SEQ ID NO: 1243774
ggaagaagcuguuuacuuu

SEQ ID NO: 1440527 - RNA, 19 nt, Artificial Sequence
  Description of Artificial Sequence: Synthetic oligonucleotide
  Antisense strand to SEQ ID NO: 1440526
aaaguaaacagcuucuucc

SEQ ID NO: 1440528 - RNA, 19 nt, Artificial Sequence
  Description of Artificial Sequence: Synthetic oligonucleotide
  Sense strand starting at position 2499 of SEQ ID NO: 1243774
gggcuacaucuuuaugucu

SEQ ID NO: 1440529 - RNA, 19 nt, Artificial Sequence
  Description of Artificial Sequence: Synthetic oligonucleotide
  Antisense strand to SEQ ID NO: 1440528
agacauaaagauguagccc

SEQ ID NO: 1440530 - RNA, 19 nt, Artificial Sequence
  Description of Artificial Sequence: Synthetic oligonucleotide
  Sense strand starting at position 2510 of SEQ ID NO: 1243774
uuaugucuuucuucccuga

SEQ ID NO: 1440531 - RNA, 19 nt, Artificial Sequence
  Description of Artificial Sequence: Synthetic oligonucleotide
  Antisense strand to SEQ ID NO: 1440530
ucagggaagaaagacauaa

SEQ ID NO: 1440532 - RNA, 19 nt, Artificial Sequence
  Description of Artificial Sequence: Synthetic oligonucleotide
  Sense strand starting at position 2515 of SEQ ID NO: 1243774
ucuuucuucccugaaugag

SEQ ID NO: 1440533 - RNA, 19 nt, Artificial Sequence
  Description of Artificial Sequence: Synthetic oligonucleotide
  Antisense strand to SEQ ID NO: 1440532
cucauucagggaagaaaga

SEQ ID NO: 1440534 - RNA, 19 nt, Artificial Sequence
  Description of Artificial Sequence: Synthetic oligonucleotide
  Sense strand starting at position 2518 of SEQ ID NO: 1243774
uucuucccugaaugagaaa

SEQ ID NO: 1440535 - RNA, 19 nt, Artificial Sequence
  Description of Artificial Sequence: Synthetic oligonucleotide
  Antisense strand to SEQ ID NO: 1440534
uuucucauucagggaagaa

SEQ ID NO: 1440536 - RNA, 19 nt, Artificial Sequence
  Description of Artificial Sequence: Synthetic oligonucleotide
  Sense strand starting at position 2553 of SEQ ID NO: 1243774
gggccauuaagaggucauc

SEQ ID NO: 1440537 - RNA, 19 nt, Artificial Sequence
  Description of Artificial Sequence: Synthetic oligonucleotide
  Antisense strand to SEQ ID NO: 1440536
gaugaccucuuaauggccc

SEQ ID NO: 1440538 - RNA, 19 nt, Artificial Sequence
  Description of Artificial Sequence: Synthetic oligonucleotide
  Sense strand starting at position 3276 of SEQ ID NO: 1243774
cuguuaaguugguuuaaca

SEQ ID NO: 1440539 - RNA, 19 nt, Artificial Sequence
  Description of Artificial Sequence: Synthetic oligonucleotide
  Antisense strand to SEQ ID NO: 1440538
uguuaaaccaacuuaacag

SEQ ID NO: 1440540 - RNA, 19 nt, Artificial Sequence
  Description of Artificial Sequence: Synthetic oligonucleotide
  Sense strand starting at position 3355 of SEQ ID NO: 1243774
ucccacuugucauuauugu

SEQ ID NO: 1440541 - RNA, 19 nt, Artificial Sequence
  Description of Artificial Sequence: Synthetic oligonucleotide
  Antisense strand to SEQ ID NO: 1440540
acaauaaugacaaguggga

SEQ ID NO: 1440542 - RNA, 19 nt, Artificial Sequence
  Description of Artificial Sequence: Synthetic oligonucleotide
  Sense strand starting at position 3356 of SEQ ID NO: 1243774
cccacuugucauuauugua

SEQ ID NO: 1440543 - RNA, 19 nt, Artificial Sequence
  Description of Artificial Sequence: Synthetic oligonucleotide
  Antisense strand to SEQ ID NO: 1440542
uacaauaaugacaaguggg

SEQ ID NO: 1440544 - RNA, 19 nt, Artificial Sequence
  Description of Artificial Sequence: Synthetic oligonucleotide
  Sense strand starting at position 3396 of SEQ ID NO: 1243774
cccuuugguccugaauaaa

SEQ ID NO: 1440545 - RNA, 19 nt, Artificial Sequence
  Description of Artificial Sequence: Synthetic oligonucleotide
  Antisense strand to SEQ ID NO: 1440544
uuuauucaggaccaaaggg

SEQ ID NO: 1440546 - RNA, 19 nt, Artificial Sequence
  Description of Artificial Sequence: Synthetic oligonucleotide
  Sense strand starting at position 3482 of SEQ ID NO: 1243774
uguauaugcugucuaugaa

SEQ ID NO: 1440547 - RNA, 19 nt, Artificial Sequence
  Description of Artificial Sequence: Synthetic oligonucleotide
  Antisense strand to SEQ ID NO: 1440546
uucauagacagcauauaca

SEQ ID NO: 1440548 - RNA, 19 nt, Artificial Sequence
  Description of Artificial Sequence: Synthetic oligonucleotide
  Sense strand starting at position 3483 of SEQ ID NO: 1243774
guauaugcugucuaugaaa

SEQ ID NO: 1440549 - RNA, 19 nt, Artificial Sequence
  Description of Artificial Sequence: Synthetic oligonucleotide
  Antisense strand to SEQ ID NO: 1440548
uuucauagacagcauauac

SEQ ID NO: 1440550 - RNA, 19 nt, Artificial Sequence
  Description of Artificial Sequence: Synthetic oligonucleotide
  Sense strand starting at position 3485 of SEQ ID NO: 1243774
auaugcugucuaugaaaga

SEQ ID NO: 1440551 - RNA, 19 nt, Artificial Sequence
  Description of Artificial Sequence: Synthetic oligonucleotide
  Antisense strand to SEQ ID NO: 1440550
ucuuucauagacagcauau

SEQ ID NO: 1440552 - RNA, 19 nt, Artificial Sequence
  Description of Artificial Sequence: Synthetic oligonucleotide
  Sense strand starting at position 3530 of SEQ ID NO: 1243774
acuguuuaaauguggaaag

SEQ ID NO: 1440553 - RNA, 19 nt, Artificial Sequence
  Description of Artificial Sequence: Synthetic oligonucleotide
  Antisense strand to SEQ ID NO: 1440552
cuuuccacauuuaaacagu

SEQ ID NO: 1440554 - RNA, 19 nt, Artificial Sequence
  Description of Artificial Sequence: Synthetic oligonucleotide
  Sense strand starting at position 14 of SEQ ID NO: 1243775
ucggaaugucauggauaga

SEQ ID NO: 1440555 - RNA, 19 nt, Artificial Sequence
  Description of Artificial Sequence: Synthetic oligonucleotide
  Antisense strand to SEQ ID NO: 1440554
ucuauccaugacauuccga

SEQ ID NO: 1440556 - RNA, 19 nt, Artificial Sequence
  Description of Artificial Sequence: Synthetic oligonucleotide
  Sense strand starting at position 275 of SEQ ID NO: 1243775
cagauaugauaugucaagu

SEQ ID NO: 1440557 - RNA, 19 nt, Artificial Sequence
  Description of Artificial Sequence: Synthetic oligonucleotide
  Antisense strand to SEQ ID NO: 1440556
acuugacauaucauaucug

SEQ ID NO: 1440558 - RNA, 19 nt, Artificial Sequence
  Description of Artificial Sequence: Synthetic oligonucleotide
  Sense strand starting at position 293 of SEQ ID NO: 1243775
ugguacauauaggaagaaa

SEQ ID NO: 1440559 - RNA, 19 nt, Artificial Sequence
  Description of Artificial Sequence: Synthetic oligonucleotide
  Antisense strand to SEQ ID NO: 1440558
uuucuuccuauauguacca

SEQ ID NO: 1440560 - RNA, 19 nt, Artificial Sequence
  Description of Artificial Sequence: Synthetic oligonucleotide
  Sense strand starting at position 359 of SEQ ID NO: 1243775
gcugauacaguguaguuga

SEQ ID NO: 1440561 - RNA, 19 nt, Artificial Sequence
  Description of Artificial Sequence: Synthetic oligonucleotide
  Antisense strand to SEQ ID NO: 1440560
ucaacuacacuguaucagc

SEQ ID NO: 1440562 - RNA, 19 nt, Artificial Sequence
  Description of Artificial Sequence: Synthetic oligonucleotide
  Sense strand starting at position 502 of SEQ ID NO: 1243775
gacagugcuugcucaguau

SEQ ID NO: 1440563 - RNA, 19 nt, Artificial Sequence
  Description of Artificial Sequence: Synthetic oligonucleotide
  Antisense strand to SEQ ID NO: 1440562
auacugagcaagcacuguc

SEQ ID NO: 1440564 - RNA, 19 nt, Artificial Sequence
  Description of Artificial Sequence: Synthetic oligonucleotide
  Sense strand starting at position 505 of SEQ ID NO: 1243775
agugcuugcucaguaugaa

SEQ ID NO: 1440565 - RNA, 19 nt, Artificial Sequence
  Description of Artificial Sequence: Synthetic oligonucleotide
  Antisense strand to SEQ ID NO: 1440564
uucauacugagcaagcacu

SEQ ID NO: 1440566 - RNA, 19 nt, Artificial Sequence
  Description of Artificial Sequence: Synthetic oligonucleotide
  Sense strand starting at position 506 of SEQ ID NO: 1243775
gugcuugcucaguaugaag

SEQ ID NO: 1440567 - RNA, 19 nt, Artificial Sequence
  Description of Artificial Sequence: Synthetic oligonucleotide
  Antisense strand to SEQ ID NO: 1440566
cuucauacugagcaagcac

SEQ ID NO: 1440568 - RNA, 19 nt, Artificial Sequence
  Description of Artificial Sequence: Synthetic oligonucleotide
  Sense strand starting at position 508 of SEQ ID NO: 1243775
gcuugcucaguaugaagaa

SEQ ID NO: 1440569 - RNA, 19 nt, Artificial Sequence
  Description of Artificial Sequence: Synthetic oligonucleotide
  Antisense strand to SEQ ID NO: 1440568
uucuucauacugagcaagc

SEQ ID NO: 1440570 - RNA, 19 nt, Artificial Sequence
  Description of Artificial Sequence: Synthetic oligonucleotide
  Sense strand starting at position 579 of SEQ ID NO: 1243775
cugauagcaagaggaguua

SEQ ID NO: 1440571 - RNA, 19 nt, Artificial Sequence
  Description of Artificial Sequence: Synthetic oligonucleotide
  Antisense strand to SEQ ID NO: 1440570
uaacuccucuugcuaucag

SEQ ID NO: 1440572 - RNA, 19 nt, Artificial Sequence
  Description of Artificial Sequence: Synthetic oligonucleotide
  Sense strand starting at position 591 of SEQ ID NO: 1243775
ggaguuacaucuggagaga

SEQ ID NO: 1440573 - RNA, 19 nt, Artificial Sequence
  Description of Artificial Sequence: Synthetic oligonucleotide
  Antisense strand to SEQ ID NO: 1440572
ucucuccagauguaacucc

SEQ ID NO: 1440574 - RNA, 19 nt, Artificial Sequence
  Description of Artificial Sequence: Synthetic oligonucleotide
  Sense strand starting at position 670 of SEQ ID NO: 1243775
gcucucuucugagcacuga

SEQ ID NO: 1440575 - RNA, 19 nt, Artificial Sequence
  Description of Artificial Sequence: Synthetic oligonucleotide
  Antisense strand to SEQ ID NO: 1440574
ucagugcucagaagagagc

SEQ ID NO: 1440576 - RNA, 19 nt, Artificial Sequence
  Description of Artificial Sequence: Synthetic oligonucleotide
  Sense strand starting at position 715 of SEQ ID NO: 1243775
ggaaguuugcacugugcau

SEQ ID NO: 1440577 - RNA, 19 nt, Artificial Sequence
  Description of Artificial Sequence: Synthetic oligonucleotide
  Antisense strand to SEQ ID NO: 1440576
augcacagugcaaacuucc

SEQ ID NO: 1440578 - RNA, 19 nt, Artificial Sequence
  Description of Artificial Sequence: Synthetic oligonucleotide
  Sense strand starting at position 717 of SEQ ID NO: 1243775
aaguuugcacugugcauau

SEQ ID NO: 1440579 - RNA, 19 nt, Artificial Sequence
  Description of Artificial Sequence: Synthetic oligonucleotide
  Antisense strand to SEQ ID NO: 1440578
auaugcacagugcaaacuu

SEQ ID NO: 1440580 - RNA, 19 nt, Artificial Sequence
  Description of Artificial Sequence: Synthetic oligonucleotide
  Sense strand starting at position 728 of SEQ ID NO: 1243775
gugcauauaggagagucau

SEQ ID NO: 1440581 - RNA, 19 nt, Artificial Sequence
  Description of Artificial Sequence: Synthetic oligonucleotide
  Antisense strand to SEQ ID NO: 1440580
augacucuccuauaugcac

SEQ ID NO: 1440582 - RNA, 19 nt, Artificial Sequence
  Description of Artificial Sequence: Synthetic oligonucleotide
  Sense strand starting at position 850 of SEQ ID NO: 1243775
cucgguuaggugagguuua

SEQ ID NO: 1440583 - RNA, 19 nt, Artificial Sequence
  Description of Artificial Sequence: Synthetic oligonucleotide
  Antisense strand to SEQ ID NO: 1440582
uaaaccucaccuaaccgag

SEQ ID NO: 1440584 - RNA, 19 nt, Artificial Sequence
  Description of Artificial Sequence: Synthetic oligonucleotide
  Sense strand starting at position 963 of SEQ ID NO: 1243775
ggucaauuuguauguacug

SEQ ID NO: 1440585 - RNA, 19 nt, Artificial Sequence
  Description of Artificial Sequence: Synthetic oligonucleotide
  Antisense strand to SEQ ID NO: 1440584
caguacauacaaauugacc

SEQ ID NO: 1440586 - RNA, 19 nt, Artificial Sequence
  Description of Artificial Sequence: Synthetic oligonucleotide
  Sense strand starting at position 968 of SEQ ID NO: 1243775
auuuguauguacuggagga

SEQ ID NO: 1440587 - RNA, 19 nt, Artificial Sequence
  Description of Artificial Sequence: Synthetic oligonucleotide
  Antisense strand to SEQ ID NO: 1440586
uccuccaguacauacaaau

SEQ ID NO: 1440588 - RNA, 19 nt, Artificial Sequence
  Description of Artificial Sequence: Synthetic oligonucleotide
  Sense strand starting at position 969 of SEQ ID NO: 1243775
uuuguauguacuggaggaa

SEQ ID NO: 1440589 - RNA, 19 nt, Artificial Sequence
  Description of Artificial Sequence: Synthetic oligonucleotide
  Antisense strand to SEQ ID NO: 1440588
uuccuccaguacauacaaa

SEQ ID NO: 1440590 - RNA, 19 nt, Artificial Sequence
  Description of Artificial Sequence: Synthetic oligonucleotide
  Sense strand starting at position 972 of SEQ ID NO: 1243775
guauguacuggaggaaaga

SEQ ID NO: 1440591 - RNA, 19 nt, Artificial Sequence
  Description of Artificial Sequence: Synthetic oligonucleotide
  Antisense strand to SEQ ID NO: 1440590
ucuuuccuccaguacauac

SEQ ID NO: 1440592 - RNA, 19 nt, Artificial Sequence
  Description of Artificial Sequence: Synthetic oligonucleotide
  Sense strand starting at position 1100 of SEQ ID NO: 1243775
gguccuguggccugugaca

SEQ ID NO: 1440593 - RNA, 19 nt, Artificial Sequence
  Description of Artificial Sequence: Synthetic oligonucleotide
  Antisense strand to SEQ ID NO: 1440592
ugucacaggccacaggacc

SEQ ID NO: 1440594 - RNA, 19 nt, Artificial Sequence
  Description of Artificial Sequence: Synthetic oligonucleotide
  Sense strand starting at position 2078 of SEQ ID NO: 1243775
cucauuggucggagcgaac

SEQ ID NO: 1440595 - RNA, 19 nt, Artificial Sequence
  Description of Artificial Sequence: Synthetic oligonucleotide
  Antisense strand to SEQ ID NO: 1440594
guucgcuccgaccaaugag

SEQ ID NO: 1440596 - RNA, 19 nt, Artificial Sequence
  Description of Artificial Sequence: Synthetic oligonucleotide
  Sense strand starting at position 2467 of SEQ ID NO: 1243775
uggcuuagcacagagugaa

SEQ ID NO: 1440597 - RNA, 19 nt, Artificial Sequence
  Description of Artificial Sequence: Synthetic oligonucleotide
  Antisense strand to SEQ ID NO: 1440596
uucacucugugcuaagcca

SEQ ID NO: 1440598 - RNA, 19 nt, Artificial Sequence
  Description of Artificial Sequence: Synthetic oligonucleotide
  Sense strand starting at position 2482 of SEQ ID NO: 1243775
ugaagugcuugcucgguga

SEQ ID NO: 1440599 - RNA, 19 nt, Artificial Sequence
  Description of Artificial Sequence: Synthetic oligonucleotide
  Antisense strand to SEQ ID NO: 1440598
ucaccgagcaagcacuuca

SEQ ID NO: 1440600 - RNA, 19 nt, Artificial Sequence
  Description of Artificial Sequence: Synthetic oligonucleotide
  Sense strand starting at position 2986 of SEQ ID NO: 1243775
uauggcucaccgugagaau

SEQ ID NO: 1440601 - RNA, 19 nt, Artificial Sequence
  Description of Artificial Sequence: Synthetic oligonucleotide
  Antisense strand to SEQ ID NO: 1440600
auucucacggugagccaua

SEQ ID NO: 1440602 - RNA, 19 nt, Artificial Sequence
  Description of Artificial Sequence: Synthetic oligonucleotide
  Sense strand starting at position 2987 of SEQ ID NO: 1243775
auggcucaccgugagaaua

SEQ ID NO: 1440603 - RNA, 19 nt, Artificial Sequence
  Description of Artificial Sequence: Synthetic oligonucleotide
  Antisense strand to SEQ ID NO: 1440602
uauucucacggugagccau

SEQ ID NO: 1440604 - RNA, 19 nt, Artificial Sequence
  Description of Artificial Sequence: Synthetic oligonucleotide
  Sense strand starting at position 2995 of SEQ ID NO: 1243775
ccgugagaauaggucuaau

SEQ ID NO: 1440605 - RNA, 19 nt, Artificial Sequence
  Description of Artificial Sequence: Synthetic oligonucleotide
  Antisense strand to SEQ ID NO: 1440604
auuagaccuauucucacgg

SEQ ID NO: 1440606 - RNA, 19 nt, Artificial Sequence
  Description of Artificial Sequence: Synthetic oligonucleotide
  Sense strand starting at position 3086 of SEQ ID NO: 1243775
uccuacuucugccuggaaa

SEQ ID NO: 1440607 - RNA, 19 nt, Artificial Sequence
  Description of Artificial Sequence: Synthetic oligonucleotide
  Antisense strand to SEQ ID NO: 1440606
uuuccaggcagaaguagga

SEQ ID NO: 1440608 - RNA, 19 nt, Artificial Sequence
  Description of Artificial Sequence: Synthetic oligonucleotide
  Sense strand starting at position 3087 of SEQ ID NO: 1243775
ccuacuucugccuggaaac

SEQ ID NO: 1440609 - RNA, 19 nt, Artificial Sequence
  Description of Artificial Sequence: Synthetic oligonucleotide
  Antisense strand to SEQ ID NO: 1440608
guuuccaggcagaaguagg

SEQ ID NO: 1440610 - RNA, 19 nt, Artificial Sequence
  Description of Artificial Sequence: Synthetic oligonucleotide
  Sense strand starting at position 3098 of SEQ ID NO: 1243775
cuggaaaccuucuccauga

SEQ ID NO: 1440611 - RNA, 19 nt, Artificial Sequence
  Description of Artificial Sequence: Synthetic oligonucleotide
  Antisense strand to SEQ ID NO: 1440610
ucauggagaagguuuccag

SEQ ID NO: 1440612 - RNA, 19 nt, Artificial Sequence
  Description of Artificial Sequence: Synthetic oligonucleotide
  Sense strand starting at position 3232 of SEQ ID NO: 1243775
gccugauucguccagcaca

SEQ ID NO: 1440613 - RNA, 19 nt, Artificial Sequence
  Description of Artificial Sequence: Synthetic oligonucleotide
  Antisense strand to SEQ ID NO: 1440612
ugugcuggacgaaucaggc

SEQ ID NO: 1440614 - RNA, 19 nt, Artificial Sequence
  Description of Artificial Sequence: Synthetic oligonucleotide
  Sense strand starting at position 3440 of SEQ ID NO: 1243775
caggaaaguucccagaagu

SEQ ID NO: 1440615 - RNA, 19 nt, Artificial Sequence
  Description of Artificial Sequence: Synthetic oligonucleotide
  Antisense strand to SEQ ID NO: 1440614
acuucugggaacuuuccug

SEQ ID NO: 1440616 - RNA, 19 nt, Artificial Sequence
  Description of Artificial Sequence: Synthetic oligonucleotide
  Sense strand starting at position 3482 of SEQ ID NO: 1243775
accgcuugagcuuacuuaa

SEQ ID NO: 1440617 - RNA, 19 nt, Artificial Sequence
  Description of Artificial Sequence: Synthetic oligonucleotide
  Antisense strand to SEQ ID NO: 1440616
uuaaguaagcucaagcggu

SEQ ID NO: 1440618 - RNA, 19 nt, Artificial Sequence
  Description of Artificial Sequence: Synthetic oligonucleotide
  Sense strand starting at position 3485 of SEQ ID NO: 1243775
gcuugagcuuacuuaacau

SEQ ID NO: 1440619 - RNA, 19 nt, Artificial Sequence
  Description of Artificial Sequence: Synthetic oligonucleotide
  Antisense strand to SEQ ID NO: 1440618
auguuaaguaagcucaagc

SEQ ID NO: 1440620 - RNA, 19 nt, Artificial Sequence
  Description of Artificial Sequence: Synthetic oligonucleotide
  Sense strand starting at position 3585 of SEQ ID NO: 1243775
ugaauugcuaccgggagaa

SEQ ID NO: 1440621 - RNA, 19 nt, Artificial Sequence
  Description of Artificial Sequence: Synthetic oligonucleotide
  Antisense strand to SEQ ID NO: 1440620
uucucccgguagcaauuca

SEQ ID NO: 1440622 - RNA, 19 nt, Artificial Sequence
  Description of Artificial Sequence: Synthetic oligonucleotide
  Sense strand starting at position 3774 of SEQ ID NO: 1243775
ugagguggagcguaucauu

SEQ ID NO: 1440623 - RNA, 19 nt, Artificial Sequence
  Description of Artificial Sequence: Synthetic oligonucleotide
  Antisense strand to SEQ ID NO: 1440622
aaugauacgcuccaccuca

SEQ ID NO: 1440624 - RNA, 19 nt, Artificial Sequence
  Description of Artificial Sequence: Synthetic oligonucleotide
  Sense strand starting at position 3777 of SEQ ID NO: 1243775
gguggagcguaucauuuga

SEQ ID NO: 1440625 - RNA, 19 nt, Artificial Sequence
  Description of Artificial Sequence: Synthetic oligonucleotide
  Antisense strand to SEQ ID NO: 1440624
ucaaaugauacgcuccacc

SEQ ID NO: 1440626 - RNA, 19 nt, Artificial Sequence
  Description of Artificial Sequence: Synthetic oligonucleotide
  Sense strand starting at position 3870 of SEQ ID NO: 1243775
uuguuauuauccuugacuc

SEQ ID NO: 1440627 - RNA, 19 nt, Artificial Sequence
  Description of Artificial Sequence: Synthetic oligonucleotide
  Antisense strand to SEQ ID NO: 1440626
gagucaaggauaauaacaa

SEQ ID NO: 1440628 - RNA, 19 nt, Artificial Sequence
  Description of Artificial Sequence: Synthetic oligonucleotide
  Sense strand starting at position 3871 of SEQ ID NO: 1243775
uguuauuauccuugacuca

SEQ ID NO: 1440629 - RNA, 19 nt, Artificial Sequence
  Description of Artificial Sequence: Synthetic oligonucleotide
  Antisense strand to SEQ ID NO: 1440628
ugagucaaggauaauaaca

SEQ ID NO: 1440630 - RNA, 19 nt, Artificial Sequence
  Description of Artificial Sequence: Synthetic oligonucleotide
  Sense strand starting at position 3872 of SEQ ID NO: 1243775
guuauuauccuugacucac

SEQ ID NO: 1440631 - RNA, 19 nt, Artificial Sequence
  Description of Artificial Sequence: Synthetic oligonucleotide
  Antisense strand to SEQ ID NO: 1440630
gugagucaaggauaauaac

SEQ ID NO: 1440632 - RNA, 19 nt, Artificial Sequence
  Description of Artificial Sequence: Synthetic oligonucleotide
  Sense strand starting at position 3878 of SEQ ID NO: 1243775
auccuugacucacagagga

SEQ ID NO: 1440633 - RNA, 19 nt, Artificial Sequence
  Description of Artificial Sequence: Synthetic oligonucleotide
  Antisense strand to SEQ ID NO: 1440632
uccucugugagucaaggau

SEQ ID NO: 1440634 - RNA, 19 nt, Artificial Sequence
  Description of Artificial Sequence: Synthetic oligonucleotide
  Sense strand starting at position 284 of SEQ ID NO: 1243776
gcaggucuccguguaccua

SEQ ID NO: 1440635 - RNA, 19 nt, Artificial Sequence
  Description of Artificial Sequence: Synthetic oligonucleotide
  Antisense strand to SEQ ID NO: 1440634
uagguacacggagaccugc

SEQ ID NO: 1440636 - RNA, 19 nt, Artificial Sequence
  Description of Artificial Sequence: Synthetic oligonucleotide
  Sense strand starting at position 495 of SEQ ID NO: 1243776
aagcucaggccuuaguaga

SEQ ID NO: 1440637 - RNA, 19 nt, Artificial Sequence
  Description of Artificial Sequence: Synthetic oligonucleotide
  Antisense strand to SEQ ID NO: 1440636
ucuacuaaggccugagcuu

SEQ ID NO: 1440638 - RNA, 19 nt, Artificial Sequence
  Description of Artificial Sequence: Synthetic oligonucleotide
  Sense strand starting at position 508 of SEQ ID NO: 1243776
aguagauacucuguagaaa

SEQ ID NO: 1440639 - RNA, 19 nt, Artificial Sequence
  Description of Artificial Sequence: Synthetic oligonucleotide
  Antisense strand to SEQ ID NO: 1440638
uuucuacagaguaucuacu

SEQ ID NO: 1440640 - RNA, 19 nt, Artificial Sequence
  Description of Artificial Sequence: Synthetic oligonucleotide
  Sense strand starting at position 524 of SEQ ID NO: 1243776
aaacuuaauucgguggaua

SEQ ID NO: 1440641 - RNA, 19 nt, Artificial Sequence
  Description of Artificial Sequence: Synthetic oligonucleotide
  Antisense strand to SEQ ID NO: 1440640
uauccaccgaauuaaguuu

SEQ ID NO: 1440642 - RNA, 19 nt, Artificial Sequence
  Description of Artificial Sequence: Synthetic oligonucleotide
  Sense strand starting at position 525 of SEQ ID NO: 1243776
aacuuaauucgguggauaa

SEQ ID NO: 1440643 - RNA, 19 nt, Artificial Sequence
  Description of Artificial Sequence: Synthetic oligonucleotide
  Antisense strand to SEQ ID NO: 1440642
uuauccaccgaauuaaguu

SEQ ID NO: 1440644 - RNA, 19 nt, Artificial Sequence
  Description of Artificial Sequence: Synthetic oligonucleotide
  Sense strand starting at position 526 of SEQ ID NO: 1243776
acuuaauucgguggauaac

SEQ ID NO: 1440645 - RNA, 19 nt, Artificial Sequence
  Description of Artificial Sequence: Synthetic oligonucleotide
  Antisense strand to SEQ ID NO: 1440644
guuauccaccgaauuaagu

SEQ ID NO: 1440646 - RNA, 19 nt, Artificial Sequence
  Description of Artificial Sequence: Synthetic oligonucleotide
  Sense strand starting at position 527 of SEQ ID NO: 1243776
cuuaauucgguggauaacu

SEQ ID NO: 1440647 - RNA, 19 nt, Artificial Sequence
  Description of Artificial Sequence: Synthetic oligonucleotide
  Antisense strand to SEQ ID NO: 1440646
aguuauccaccgaauuaag

SEQ ID NO: 1440648 - RNA, 19 nt, Artificial Sequence
  Description of Artificial Sequence: Synthetic oligonucleotide
  Sense strand starting at position 608 of SEQ ID NO: 1243776
gaaggauuccugugggcau

SEQ ID NO: 1440649 - RNA, 19 nt, Artificial Sequence
  Description of Artificial Sequence: Synthetic oligonucleotide
  Antisense strand to SEQ ID NO: 1440648
augcccacaggaauccuuc

SEQ ID NO: 1440650 - RNA, 19 nt, Artificial Sequence
  Description of Artificial Sequence: Synthetic oligonucleotide
  Sense strand starting at position 669 of SEQ ID NO: 1243776
gcccucccucauugggaaa

SEQ ID NO: 1440651 - RNA, 19 nt, Artificial Sequence
  Description of Artificial Sequence: Synthetic oligonucleotide
  Antisense strand to SEQ ID NO: 1440650
uuucccaaugagggagggc

SEQ ID NO: 1440652 - RNA, 19 nt, Artificial Sequence
  Description of Artificial Sequence: Synthetic oligonucleotide
  Sense strand starting at position 879 of SEQ ID NO: 1243776
ggauguggcugugucuaga

SEQ ID NO: 1440653 - RNA, 19 nt, Artificial Sequence
  Description of Artificial Sequence: Synthetic oligonucleotide
  Antisense strand to SEQ ID NO: 1440652
ucuagacacagccacaucc

SEQ ID NO: 1440654 - RNA, 19 nt, Artificial Sequence
  Description of Artificial Sequence: Synthetic oligonucleotide
  Sense strand starting at position 892 of SEQ ID NO: 1243776
ucuagaagcguccaagaga

SEQ ID NO: 1440655 - RNA, 19 nt, Artificial Sequence
  Description of Artificial Sequence: Synthetic oligonucleotide
  Antisense strand to SEQ ID NO: 1440654
ucucuuggacgcuucuaga

SEQ ID NO: 1440656 - RNA, 19 nt, Artificial Sequence
  Description of Artificial Sequence: Synthetic oligonucleotide
  Sense strand starting at position 1072 of SEQ ID NO: 1243776
uggcuucuuccacaggaca

SEQ ID NO: 1440657 - RNA, 19 nt, Artificial Sequence
  Description of Artificial Sequence: Synthetic oligonucleotide
  Antisense strand to SEQ ID NO: 1440656
uguccuguggaagaagcca

SEQ ID NO: 1440658 - RNA, 19 nt, Artificial Sequence
  Description of Artificial Sequence: Synthetic oligonucleotide
  Sense strand starting at position 1397 of SEQ ID NO: 1243776
guuuaugauccuggcgagu

SEQ ID NO: 1440659 - RNA, 19 nt, Artificial Sequence
  Description of Artificial Sequence: Synthetic oligonucleotide
  Antisense strand to SEQ ID NO: 1440658
acucgccaggaucauaaac

SEQ ID NO: 1440660 - RNA, 19 nt, Artificial Sequence
  Description of Artificial Sequence: Synthetic oligonucleotide
  Sense strand starting at position 1817 of SEQ ID NO: 1243776
cucugucuccauugcgaga

SEQ ID NO: 1440661 - RNA, 19 nt, Artificial Sequence
  Description of Artificial Sequence: Synthetic oligonucleotide
  Antisense strand to SEQ ID NO: 1440660
ucucgcaauggagacagag

SEQ ID NO: 1440662 - RNA, 19 nt, Artificial Sequence
  Description of Artificial Sequence: Synthetic oligonucleotide
  Sense strand starting at position 2121 of SEQ ID NO: 1243776
gggugagcucaccaaguca

SEQ ID NO: 1440663 - RNA, 19 nt, Artificial Sequence
  Description of Artificial Sequence: Synthetic oligonucleotide
  Antisense strand to SEQ ID NO: 1440662
ugacuuggugagcucaccc

SEQ ID NO: 1440664 - RNA, 19 nt, Artificial Sequence
  Description of Artificial Sequence: Synthetic oligonucleotide
  Sense strand starting at position 2269 of SEQ ID NO: 1243776
augcaaaugugguuauagu

SEQ ID NO: 1440665 - RNA, 19 nt, Artificial Sequence
  Description of Artificial Sequence: Synthetic oligonucleotide
  Antisense strand to SEQ ID NO: 1440664
acuauaaccacauuugcau

SEQ ID NO: 1440666 - RNA, 19 nt, Artificial Sequence
  Description of Artificial Sequence: Synthetic oligonucleotide
  Sense strand starting at position 2270 of SEQ ID NO: 1243776
ugcaaaugugguuauaguu

SEQ ID NO: 1440667 - RNA, 19 nt, Artificial Sequence
  Description of Artificial Sequence: Synthetic oligonucleotide
  Antisense strand to SEQ ID NO: 1440666
aacuauaaccacauuugca

SEQ ID NO: 1440668 - RNA, 19 nt, Artificial Sequence
  Description of Artificial Sequence: Synthetic oligonucleotide
  Sense strand starting at position 2278 of SEQ ID NO: 1243776
ugguuauaguucucccaga

SEQ ID NO: 1440669 - RNA, 19 nt, Artificial Sequence
  Description of Artificial Sequence: Synthetic oligonucleotide
  Antisense strand to SEQ ID NO: 1440668
ucugggagaacuauaacca

SEQ ID NO: 1440670 - RNA, 19 nt, Artificial Sequence
  Description of Artificial Sequence: Synthetic oligonucleotide
  Sense strand starting at position 2279 of SEQ ID NO: 1243776
gguuauaguucucccagac

SEQ ID NO: 1440671 - RNA, 19 nt, Artificial Sequence
  Description of Artificial Sequence: Synthetic oligonucleotide
  Antisense strand to SEQ ID NO: 1440670
gucugggagaacuauaacc

SEQ ID NO: 1440672 - RNA, 19 nt, Artificial Sequence
  Description of Artificial Sequence: Synthetic oligonucleotide
  Sense strand starting at position 2314 of SEQ ID NO: 1243776
ucggaaugucauggauaga

SEQ ID NO: 1440673 - RNA, 19 nt, Artificial Sequence
  Description of Artificial Sequence: Synthetic oligonucleotide
  Antisense strand to SEQ ID NO: 1440672
ucuauccaugacauuccga

SEQ ID NO: 1440674 - RNA, 19 nt, Artificial Sequence
  Description of Artificial Sequence: Synthetic oligonucleotide
  Sense strand starting at position 2575 of SEQ ID NO: 1243776
cagauaugauaugucaagu

SEQ ID NO: 1440675 - RNA, 19 nt, Artificial Sequence
  Description of Artificial Sequence: Synthetic oligonucleotide
  Antisense strand to SEQ ID NO: 1440674
acuugacauaucauaucug

SEQ ID NO: 1440676 - RNA, 19 nt, Artificial Sequence
  Description of Artificial Sequence: Synthetic oligonucleotide
  Sense strand starting at position 2584 of SEQ ID NO: 1243776
uaugucaagugguacauau

SEQ ID NO: 1440677 - RNA, 19 nt, Artificial Sequence
  Description of Artificial Sequence: Synthetic oligonucleotide
  Antisense strand to SEQ ID NO: 1440676
auauguaccacuugacaua

SEQ ID NO: 1440678 - RNA, 19 nt, Artificial Sequence
  Description of Artificial Sequence: Synthetic oligonucleotide
  Sense strand starting at position 2593 of SEQ ID NO: 1243776
ugguacauauaggaagaaa

SEQ ID NO: 1440679 - RNA, 19 nt, Artificial Sequence
  Description of Artificial Sequence: Synthetic oligonucleotide
  Antisense strand to SEQ ID NO: 1440678
uuucuuccuauauguacca

SEQ ID NO: 1440680 - RNA, 19 nt, Artificial Sequence
  Description of Artificial Sequence: Synthetic oligonucleotide
  Sense strand starting at position 2659 of SEQ ID NO: 1243776
gcugauacaguguaguuga

SEQ ID NO: 1440681 - RNA, 19 nt, Artificial Sequence
  Description of Artificial Sequence: Synthetic oligonucleotide
  Antisense strand to SEQ ID NO: 1440680
ucaacuacacuguaucagc

SEQ ID NO: 1440682 - RNA, 19 nt, Artificial Sequence
  Description of Artificial Sequence: Synthetic oligonucleotide
  Sense strand starting at position 2802 of SEQ ID NO: 1243776
gacagugcuugcucaguau

SEQ ID NO: 1440683 - RNA, 19 nt, Artificial Sequence
  Description of Artificial Sequence: Synthetic oligonucleotide
  Antisense strand to SEQ ID NO: 1440682
auacugagcaagcacuguc

SEQ ID NO: 1440684 - RNA, 19 nt, Artificial Sequence
  Description of Artificial Sequence: Synthetic oligonucleotide
  Sense strand starting at position 2805 of SEQ ID NO: 1243776
agugcuugcucaguaugaa

SEQ ID NO: 1440685 - RNA, 19 nt, Artificial Sequence
  Description of Artificial Sequence: Synthetic oligonucleotide
  Antisense strand to SEQ ID NO: 1440684
uucauacugagcaagcacu

SEQ ID NO: 1440686 - RNA, 19 nt, Artificial Sequence
  Description of Artificial Sequence: Synthetic oligonucleotide
  Sense strand starting at position 2806 of SEQ ID NO: 1243776
gugcuugcucaguaugaag

SEQ ID NO: 1440687 - RNA, 19 nt, Artificial Sequence
  Description of Artificial Sequence: Synthetic oligonucleotide
  Antisense strand to SEQ ID NO: 1440686
cuucauacugagcaagcac

SEQ ID NO: 1440688 - RNA, 19 nt, Artificial Sequence
  Description of Artificial Sequence: Synthetic oligonucleotide
  Sense strand starting at position 2808 of SEQ ID NO: 1243776
gcuugcucaguaugaagaa

SEQ ID NO: 1440689 - RNA, 19 nt, Artificial Sequence
  Description of Artificial Sequence: Synthetic oligonucleotide
  Antisense strand to SEQ ID NO: 1440688
uucuucauacugagcaagc

SEQ ID NO: 1440690 - RNA, 19 nt, Artificial Sequence
  Description of Artificial Sequence: Synthetic oligonucleotide
  Sense strand starting at position 2879 of SEQ ID NO: 1243776
cugauagcaagaggaguua

SEQ ID NO: 1440691 - RNA, 19 nt, Artificial Sequence
  Description of Artificial Sequence: Synthetic oligonucleotide
  Antisense strand to SEQ ID NO: 1440690
uaacuccucuugcuaucag

SEQ ID NO: 1440692 - RNA, 19 nt, Artificial Sequence
  Description of Artificial Sequence: Synthetic oligonucleotide
  Sense strand starting at position 2891 of SEQ ID NO: 1243776
ggaguuacaucuggagaga

SEQ ID NO: 1440693 - RNA, 19 nt, Artificial Sequence
  Description of Artificial Sequence: Synthetic oligonucleotide
  Antisense strand to SEQ ID NO: 1440692
ucucuccagauguaacucc

SEQ ID NO: 1440694 - RNA, 19 nt, Artificial Sequence
  Description of Artificial Sequence: Synthetic oligonucleotide
  Sense strand starting at position 2970 of SEQ ID NO: 1243776
gcucucuucugagcacuga

SEQ ID NO: 1440695 - RNA, 19 nt, Artificial Sequence
  Description of Artificial Sequence: Synthetic oligonucleotide
  Antisense strand to SEQ ID NO: 1440694
ucagugcucagaagagagc

SEQ ID NO: 1440696 - RNA, 19 nt, Artificial Sequence
  Description of Artificial Sequence: Synthetic oligonucleotide
  Sense strand starting at position 3015 of SEQ ID NO: 1243776
ggaaguuugcacugugcau

SEQ ID NO: 1440697 - RNA, 19 nt, Artificial Sequence
  Description of Artificial Sequence: Synthetic oligonucleotide
  Antisense strand to SEQ ID NO: 1440696
augcacagugcaaacuucc

SEQ ID NO: 1440698 - RNA, 19 nt, Artificial Sequence
  Description of Artificial Sequence: Synthetic oligonucleotide
  Sense strand starting at position 3017 of SEQ ID NO: 1243776
aaguuugcacugugcauau

SEQ ID NO: 1440699 - RNA, 19 nt, Artificial Sequence
  Description of Artificial Sequence: Synthetic oligonucleotide
  Antisense strand to SEQ ID NO: 1440698
auaugcacagugcaaacuu

SEQ ID NO: 1440700 - RNA, 19 nt, Artificial Sequence
  Description of Artificial Sequence: Synthetic oligonucleotide
  Sense strand starting at position 3028 of SEQ ID NO: 1243776
gugcauauaggagagucau

SEQ ID NO: 1440701 - RNA, 19 nt, Artificial Sequence
  Description of Artificial Sequence: Synthetic oligonucleotide
  Antisense strand to SEQ ID NO: 1440700
augacucuccuauaugcac

SEQ ID NO: 1440702 - RNA, 19 nt, Artificial Sequence
  Description of Artificial Sequence: Synthetic oligonucleotide
  Sense strand starting at position 3150 of SEQ ID NO: 1243776
cucgguuaggugagguuua

SEQ ID NO: 1440703 - RNA, 19 nt, Artificial Sequence
  Description of Artificial Sequence: Synthetic oligonucleotide
  Antisense strand to SEQ ID NO: 1440702
uaaaccucaccuaaccgag

SEQ ID NO: 1440704 - RNA, 19 nt, Artificial Sequence
  Description of Artificial Sequence: Synthetic oligonucleotide
  Sense strand starting at position 3263 of SEQ ID NO: 1243776
ggucaauuuguauguacug

SEQ ID NO: 1440705 - RNA, 19 nt, Artificial Sequence
  Description of Artificial Sequence: Synthetic oligonucleotide
  Antisense strand to SEQ ID NO: 1440704
caguacauacaaauugacc

SEQ ID NO: 1440706 - RNA, 19 nt, Artificial Sequence
  Description of Artificial Sequence: Synthetic oligonucleotide
  Sense strand starting at position 3268 of SEQ ID NO: 1243776
auuuguauguacuggagga

SEQ ID NO: 1440707 - RNA, 19 nt, Artificial Sequence
  Description of Artificial Sequence: Synthetic oligonucleotide
  Antisense strand to SEQ ID NO: 1440706
uccuccaguacauacaaau

SEQ ID NO: 1440708 - RNA, 19 nt, Artificial Sequence
  Description of Artificial Sequence: Synthetic oligonucleotide
  Sense strand starting at position 3269 of SEQ ID NO: 1243776
uuuguauguacuggaggaa

SEQ ID NO: 1440709 - RNA, 19 nt, Artificial Sequence
  Description of Artificial Sequence: Synthetic oligonucleotide
  Antisense strand to SEQ ID NO: 1440708
uuccuccaguacauacaaa

SEQ ID NO: 1440710 - RNA, 19 nt, Artificial Sequence
  Description of Artificial Sequence: Synthetic oligonucleotide
  Sense strand starting at position 3272 of SEQ ID NO: 1243776
guauguacuggaggaaaga

SEQ ID NO: 1440711 - RNA, 19 nt, Artificial Sequence
  Description of Artificial Sequence: Synthetic oligonucleotide
  Antisense strand to SEQ ID NO: 1440710
ucuuuccuccaguacauac

SEQ ID NO: 1440712 - RNA, 19 nt, Artificial Sequence
  Description of Artificial Sequence: Synthetic oligonucleotide
  Sense strand starting at position 3400 of SEQ ID NO: 1243776
gguccuguggccugugaca

SEQ ID NO: 1440713 - RNA, 19 nt, Artificial Sequence
  Description of Artificial Sequence: Synthetic oligonucleotide
  Antisense strand to SEQ ID NO: 1440712
ugucacaggccacaggacc

SEQ ID NO: 1440714 - RNA, 19 nt, Artificial Sequence
  Description of Artificial Sequence: Synthetic oligonucleotide
  Sense strand starting at position 502 of SEQ ID NO: 1243777
uugggaaccugguuuguga

SEQ ID NO: 1440715 - RNA, 19 nt, Artificial Sequence
  Description of Artificial Sequence: Synthetic oligonucleotide
  Antisense strand to SEQ ID NO: 1440714
ucacaaaccagguucccaa

SEQ ID NO: 1440716 - RNA, 19 nt, Artificial Sequence
  Description of Artificial Sequence: Synthetic oligonucleotide
  Sense strand starting at position 696 of SEQ ID NO: 1243777
ggguauagaacugggucau

SEQ ID NO: 1440717 - RNA, 19 nt, Artificial Sequence
  Description of Artificial Sequence: Synthetic oligonucleotide
  Antisense strand to SEQ ID NO: 1440716
augacccaguucuauaccc

SEQ ID NO: 1440718 - RNA, 19 nt, Artificial Sequence
  Description of Artificial Sequence: Synthetic oligonucleotide
  Sense strand starting at position 697 of SEQ ID NO: 1243777
gguauagaacugggucaua

SEQ ID NO: 1440719 - RNA, 19 nt, Artificial Sequence
  Description of Artificial Sequence: Synthetic oligonucleotide
  Antisense strand to SEQ ID NO: 1440718
uaugacccaguucuauacc

SEQ ID NO: 1440720 - RNA, 19 nt, Artificial Sequence
  Description of Artificial Sequence: Synthetic oligonucleotide
  Sense strand starting at position 708 of SEQ ID NO: 1243777
gggucauaguaucugggaa

SEQ ID NO: 1440721 - RNA, 19 nt, Artificial Sequence
  Description of Artificial Sequence: Synthetic oligonucleotide
  Antisense strand to SEQ ID NO: 1440720
uucccagauacuaugaccc

SEQ ID NO: 1440722 - RNA, 19 nt, Artificial Sequence
  Description of Artificial Sequence: Synthetic oligonucleotide
  Sense strand starting at position 709 of SEQ ID NO: 1243777
ggucauaguaucugggaag

SEQ ID NO: 1440723 - RNA, 19 nt, Artificial Sequence
  Description of Artificial Sequence: Synthetic oligonucleotide
  Antisense strand to SEQ ID NO: 1440722
cuucccagauacuaugacc

SEQ ID NO: 1440724 - RNA, 19 nt, Artificial Sequence
  Description of Artificial Sequence: Synthetic oligonucleotide
  Sense strand starting at position 712 of SEQ ID NO: 1243777
cauaguaucugggaaggau

SEQ ID NO: 1440725 - RNA, 19 nt, Artificial Sequence
  Description of Artificial Sequence: Synthetic oligonucleotide
  Antisense strand to SEQ ID NO: 1440724
auccuucccagauacuaug

SEQ ID NO: 1440726 - RNA, 19 nt, Artificial Sequence
  Description of Artificial Sequence: Synthetic oligonucleotide
  Sense strand starting at position 750 of SEQ ID NO: 1243777
cugacugugaugugacagu

SEQ ID NO: 1440727 - RNA, 19 nt, Artificial Sequence
  Description of Artificial Sequence: Synthetic oligonucleotide
  Antisense strand to SEQ ID NO: 1440726
acugucacaucacagucag

SEQ ID NO: 1440728 - RNA, 19 nt, Artificial Sequence
  Description of Artificial Sequence: Synthetic oligonucleotide
  Sense strand starting at position 798 of SEQ ID NO: 1243777
gccaauaugagugagcaga

SEQ ID NO: 1440729 - RNA, 19 nt, Artificial Sequence
  Description of Artificial Sequence: Synthetic oligonucleotide
  Antisense strand to SEQ ID NO: 1440728
ucugcucacucauauuggc

SEQ ID NO: 1440730 - RNA, 19 nt, Artificial Sequence
  Description of Artificial Sequence: Synthetic oligonucleotide
  Sense strand starting at position 800 of SEQ ID NO: 1243777
caauaugagugagcagacu

SEQ ID NO: 1440731 - RNA, 19 nt, Artificial Sequence
  Description of Artificial Sequence: Synthetic oligonucleotide
  Antisense strand to SEQ ID NO: 1440730
agucugcucacucauauug

SEQ ID NO: 1440732 - RNA, 19 nt, Artificial Sequence
  Description of Artificial Sequence: Synthetic oligonucleotide
  Sense strand starting at position 896 of SEQ ID NO: 1243777
ggcccuaaaccuugagcuu

SEQ ID NO: 1440733 - RNA, 19 nt, Artificial Sequence
  Description of Artificial Sequence: Synthetic oligonucleotide
  Antisense strand to SEQ ID NO: 1440732
aagcucaagguuuagggcc

SEQ ID NO: 1440734 - RNA, 19 nt, Artificial Sequence
  Description of Artificial Sequence: Synthetic oligonucleotide
  Sense strand starting at position 897 of SEQ ID NO: 1243777
gcccuaaaccuugagcuuu

SEQ ID NO: 1440735 - RNA, 19 nt, Artificial Sequence
  Description of Artificial Sequence: Synthetic oligonucleotide
  Antisense strand to SEQ ID NO: 1440734
aaagcucaagguuuagggc

SEQ ID NO: 1440736 - RNA, 19 nt, Artificial Sequence
  Description of Artificial Sequence: Synthetic oligonucleotide
  Sense strand starting at position 1026 of SEQ ID NO: 1243777
agauucuaccuccgguaga

SEQ ID NO: 1440737 - RNA, 19 nt, Artificial Sequence
  Description of Artificial Sequence: Synthetic oligonucleotide
  Antisense strand to SEQ ID NO: 1440736
ucuaccggagguagaaucu

SEQ ID NO: 1440738 - RNA, 19 nt, Artificial Sequence
  Description of Artificial Sequence: Synthetic oligonucleotide
  Sense strand starting at position 1044 of SEQ ID NO: 1243777
aagcuaggccuuuagaaga

SEQ ID NO: 1440739 - RNA, 19 nt, Artificial Sequence
  Description of Artificial Sequence: Synthetic oligonucleotide
  Antisense strand to SEQ ID NO: 1440738
ucuucuaaaggccuagcuu

SEQ ID NO: 1440740 - RNA, 19 nt, Artificial Sequence
  Description of Artificial Sequence: Synthetic oligonucleotide
  Sense strand starting at position 1069 of SEQ ID NO: 1243777
cugaguuccuucucuguuu

SEQ ID NO: 1440741 - RNA, 19 nt, Artificial Sequence
  Description of Artificial Sequence: Synthetic oligonucleotide
  Antisense strand to SEQ ID NO: 1440740
aaacagagaaggaacucag

SEQ ID NO: 1440742 - RNA, 19 nt, Artificial Sequence
  Description of Artificial Sequence: Synthetic oligonucleotide
  Sense strand starting at position 1071 of SEQ ID NO: 1243777
gaguuccuucucuguuuga

SEQ ID NO: 1440743 - RNA, 19 nt, Artificial Sequence
  Description of Artificial Sequence: Synthetic oligonucleotide
  Antisense strand to SEQ ID NO: 1440742
ucaaacagagaaggaacuc

SEQ ID NO: 1440744 - RNA, 19 nt, Artificial Sequence
  Description of Artificial Sequence: Synthetic oligonucleotide
  Sense strand starting at position 1072 of SEQ ID NO: 1243777
aguuccuucucuguuugau

SEQ ID NO: 1440745 - RNA, 19 nt, Artificial Sequence
  Description of Artificial Sequence: Synthetic oligonucleotide
  Antisense strand to SEQ ID NO: 1440744
aucaaacagagaaggaacu

SEQ ID NO: 1440746 - RNA, 19 nt, Artificial Sequence
  Description of Artificial Sequence: Synthetic oligonucleotide
  Sense strand starting at position 1074 of SEQ ID NO: 1243777
uuccuucucuguuugauuu

SEQ ID NO: 1440747 - RNA, 19 nt, Artificial Sequence
  Description of Artificial Sequence: Synthetic oligonucleotide
  Antisense strand to SEQ ID NO: 1440746
aaaucaaacagagaaggaa

SEQ ID NO: 1440748 - RNA, 19 nt, Artificial Sequence
  Description of Artificial Sequence: Synthetic oligonucleotide
  Sense strand starting at position 1148 of SEQ ID NO: 1243777
uugguuaggaccugauaga

SEQ ID NO: 1440749 - RNA, 19 nt, Artificial Sequence
  Description of Artificial Sequence: Synthetic oligonucleotide
  Antisense strand to SEQ ID NO: 1440748
ucuaucagguccuaaccaa

SEQ ID NO: 1440750 - RNA, 19 nt, Artificial Sequence
  Description of Artificial Sequence: Synthetic oligonucleotide
  Sense strand starting at position 2337 of SEQ ID NO: 1243777
ggacaagacuccuugucug

SEQ ID NO: 1440751 - RNA, 19 nt, Artificial Sequence
  Description of Artificial Sequence: Synthetic oligonucleotide
  Antisense strand to SEQ ID NO: 1440750
cagacaaggagucuugucc

SEQ ID NO: 1440752 - RNA, 19 nt, Artificial Sequence
  Description of Artificial Sequence: Synthetic oligonucleotide
  Sense strand starting at position 2377 of SEQ ID NO: 1243777
guagcuggguccucgagaa

SEQ ID NO: 1440753 - RNA, 19 nt, Artificial Sequence
  Description of Artificial Sequence: Synthetic oligonucleotide
  Antisense strand to SEQ ID NO: 1440752
uucucgaggacccagcuac

SEQ ID NO: 1440754 - RNA, 19 nt, Artificial Sequence
  Description of Artificial Sequence: Synthetic oligonucleotide
  Sense strand starting at position 2434 of SEQ ID NO: 1243777
gcugcaucccaagaagaaa

SEQ ID NO: 1440755 - RNA, 19 nt, Artificial Sequence
  Description of Artificial Sequence: Synthetic oligonucleotide
  Antisense strand to SEQ ID NO: 1440754
uuucuucuugggaugcagc

SEQ ID NO: 1440756 - RNA, 19 nt, Artificial Sequence
  Description of Artificial Sequence: Synthetic oligonucleotide
  Sense strand starting at position 2641 of SEQ ID NO: 1243777
gggaaacgccuucauguca

SEQ ID NO: 1440757 - RNA, 19 nt, Artificial Sequence
  Description of Artificial Sequence: Synthetic oligonucleotide
  Antisense strand to SEQ ID NO: 1440756
ugacaugaaggcguuuccc

SEQ ID NO: 1440758 - RNA, 19 nt, Artificial Sequence
  Description of Artificial Sequence: Synthetic oligonucleotide
  Sense strand starting at position 2671 of SEQ ID NO: 1243777
gacucuagugacggaacua

SEQ ID NO: 1440759 - RNA, 19 nt, Artificial Sequence
  Description of Artificial Sequence: Synthetic oligonucleotide
  Antisense strand to SEQ ID NO: 1440758
uaguuccgucacuagaguc

SEQ ID NO: 1440760 - RNA, 19 nt, Artificial Sequence
  Description of Artificial Sequence: Synthetic oligonucleotide
  Sense strand starting at position 2728 of SEQ ID NO: 1243777
ggugguuucuccuuacucu

SEQ ID NO: 1440761 - RNA, 19 nt, Artificial Sequence
  Description of Artificial Sequence: Synthetic oligonucleotide
  Antisense strand to SEQ ID NO: 1440760
agaguaaggagaaaccacc

SEQ ID NO: 1440762 - RNA, 19 nt, Artificial Sequence
  Description of Artificial Sequence: Synthetic oligonucleotide
  Sense strand starting at position 2729 of SEQ ID NO: 1243777
gugguuucuccuuacucuu

SEQ ID NO: 1440763 - RNA, 19 nt, Artificial Sequence
  Description of Artificial Sequence: Synthetic oligonucleotide
  Antisense strand to SEQ ID NO: 1440762
aagaguaaggagaaaccac

SEQ ID NO: 1440764 - RNA, 19 nt, Artificial Sequence
  Description of Artificial Sequence: Synthetic oligonucleotide
  Sense strand starting at position 2843 of SEQ ID NO: 1243777
gcacaagccuccuccugau

SEQ ID NO: 1440765 - RNA, 19 nt, Artificial Sequence
  Description of Artificial Sequence: Synthetic oligonucleotide
  Antisense strand to SEQ ID NO: 1440764
aucaggaggaggcuugugc

SEQ ID NO: 1440766 - RNA, 19 nt, Artificial Sequence
  Description of Artificial Sequence: Synthetic oligonucleotide
  Sense strand starting at position 2885 of SEQ ID NO: 1243777
agcagcugucaagaugaga

SEQ ID NO: 1440767 - RNA, 19 nt, Artificial Sequence
  Description of Artificial Sequence: Synthetic oligonucleotide
  Antisense strand to SEQ ID NO: 1440766
ucucaucuugacagcugcu

SEQ ID NO: 1440768 - RNA, 19 nt, Artificial Sequence
  Description of Artificial Sequence: Synthetic oligonucleotide
  Sense strand starting at position 2890 of SEQ ID NO: 1243777
cugucaagaugagagaaau

SEQ ID NO: 1440769 - RNA, 19 nt, Artificial Sequence
  Description of Artificial Sequence: Synthetic oligonucleotide
  Antisense strand to SEQ ID NO: 1440768
auuucucucaucuugacag

SEQ ID NO: 1440770 - RNA, 19 nt, Artificial Sequence
  Description of Artificial Sequence: Synthetic oligonucleotide
  Sense strand starting at position 2930 of SEQ ID NO: 1243777
aggucuucuuuccagauuu

SEQ ID NO: 1440771 - RNA, 19 nt, Artificial Sequence
  Description of Artificial Sequence: Synthetic oligonucleotide
  Antisense strand to SEQ ID NO: 1440770
aaaucuggaaagaagaccu

SEQ ID NO: 1440772 - RNA, 19 nt, Artificial Sequence
  Description of Artificial Sequence: Synthetic oligonucleotide
  Sense strand starting at position 2984 of SEQ ID NO: 1243777
guucucaccuacguuauuu

SEQ ID NO: 1440773 - RNA, 19 nt, Artificial Sequence
  Description of Artificial Sequence: Synthetic oligonucleotide
  Antisense strand to SEQ ID NO: 1440772
aaauaacguaggugagaac

SEQ ID NO: 1440774 - RNA, 19 nt, Artificial Sequence
  Description of Artificial Sequence: Synthetic oligonucleotide
  Sense strand starting at position 3044 of SEQ ID NO: 1243777
ucugcaucuccaugcaaga

SEQ ID NO: 1440775 - RNA, 19 nt, Artificial Sequence
  Description of Artificial Sequence: Synthetic oligonucleotide
  Antisense strand to SEQ ID NO: 1440774
ucuugcauggagaugcaga

SEQ ID NO: 1440776 - RNA, 19 nt, Artificial Sequence
  Description of Artificial Sequence: Synthetic oligonucleotide
  Sense strand starting at position 3376 of SEQ ID NO: 1243777
acuccagggaguugucauu

SEQ ID NO: 1440777 - RNA, 19 nt, Artificial Sequence
  Description of Artificial Sequence: Synthetic oligonucleotide
  Antisense strand to SEQ ID NO: 1440776
aaugacaacucccuggagu

SEQ ID NO: 1440778 - RNA, 19 nt, Artificial Sequence
  Description of Artificial Sequence: Synthetic oligonucleotide
  Sense strand starting at position 3438 of SEQ ID NO: 1243777
ugaagcauauugucuagga

SEQ ID NO: 1440779 - RNA, 19 nt, Artificial Sequence
  Description of Artificial Sequence: Synthetic oligonucleotide
  Antisense strand to SEQ ID NO: 1440778
uccuagacaauaugcuuca

SEQ ID NO: 1440780 - RNA, 19 nt, Artificial Sequence
  Description of Artificial Sequence: Synthetic oligonucleotide
  Sense strand starting at position 3439 of SEQ ID NO: 1243777
gaagcauauugucuaggaa

SEQ ID NO: 1440781 - RNA, 19 nt, Artificial Sequence
  Description of Artificial Sequence: Synthetic oligonucleotide
  Antisense strand to SEQ ID NO: 1440780
uuccuagacaauaugcuuc

SEQ ID NO: 1440782 - RNA, 19 nt, Artificial Sequence
  Description of Artificial Sequence: Synthetic oligonucleotide
  Sense strand starting at position 3440 of SEQ ID NO: 1243777
aagcauauugucuaggaac

SEQ ID NO: 1440783 - RNA, 19 nt, Artificial Sequence
  Description of Artificial Sequence: Synthetic oligonucleotide
  Antisense strand to SEQ ID NO: 1440782
guuccuagacaauaugcuu

SEQ ID NO: 1440784 - RNA, 19 nt, Artificial Sequence
  Description of Artificial Sequence: Synthetic oligonucleotide
  Sense strand starting at position 3742 of SEQ ID NO: 1243777
ccagaugucucccuuccuu

SEQ ID NO: 1440785 - RNA, 19 nt, Artificial Sequence
  Description of Artificial Sequence: Synthetic oligonucleotide
  Antisense strand to SEQ ID NO: 1440784
aaggaagggagacaucugg

SEQ ID NO: 1440786 - RNA, 19 nt, Artificial Sequence
  Description of Artificial Sequence: Synthetic oligonucleotide
  Sense strand starting at position 3754 of SEQ ID NO: 1243777
cuuccuuacucguugauga

SEQ ID NO: 1440787 - RNA, 19 nt, Artificial Sequence
  Description of Artificial Sequence: Synthetic oligonucleotide
  Antisense strand to SEQ ID NO: 1440786
ucaucaacgaguaaggaag

SEQ ID NO: 1440788 - RNA, 19 nt, Artificial Sequence
  Description of Artificial Sequence: Synthetic oligonucleotide
  Sense strand starting at position 3755 of SEQ ID NO: 1243777
uuccuuacucguugaugau

SEQ ID NO: 1440789 - RNA, 19 nt, Artificial Sequence
  Description of Artificial Sequence: Synthetic oligonucleotide
  Antisense strand to SEQ ID NO: 1440788
aucaucaacgaguaaggaa

SEQ ID NO: 1440790 - RNA, 19 nt, Artificial Sequence
  Description of Artificial Sequence: Synthetic oligonucleotide
  Sense strand starting at position 3756 of SEQ ID NO: 1243777
uccuuacucguugaugaug

SEQ ID NO: 1440791 - RNA, 19 nt, Artificial Sequence
  Description of Artificial Sequence: Synthetic oligonucleotide
  Antisense strand to SEQ ID NO: 1440790
caucaucaacgaguaagga

SEQ ID NO: 1440792 - RNA, 19 nt, Artificial Sequence
  Description of Artificial Sequence: Synthetic oligonucleotide
  Sense strand starting at position 3911 of SEQ ID NO: 1243777
ggagcugcucaggaggaua

SEQ ID NO: 1440793 - RNA, 19 nt, Artificial Sequence
  Description of Artificial Sequence: Synthetic oligonucleotide
  Antisense strand to SEQ ID NO: 1440792
uauccuccugagcagcucc

SEQ ID NO: 1440794 - RNA, 19 nt, Artificial Sequence
  Description of Artificial Sequence: Synthetic oligonucleotide
  Sense strand starting at position 511 of SEQ ID NO: 1243778
ucauuuguauuccaccgua

SEQ ID NO: 1440795 - RNA, 19 nt, Artificial Sequence
  Description of Artificial Sequence: Synthetic oligonucleotide
  Antisense strand to SEQ ID NO: 1440794
uacgguggaauacaaauga

SEQ ID NO: 1440796 - RNA, 19 nt, Artificial Sequence
  Description of Artificial Sequence: Synthetic oligonucleotide
  Sense strand starting at position 797 of SEQ ID NO: 1243778
uugggaaccugguuuguga

SEQ ID NO: 1440797 - RNA, 19 nt, Artificial Sequence
  Description of Artificial Sequence: Synthetic oligonucleotide
  Antisense strand to SEQ ID NO: 1440796
ucacaaaccagguucccaa

SEQ ID NO: 1440798 - RNA, 19 nt, Artificial Sequence
  Description of Artificial Sequence: Synthetic oligonucleotide
  Sense strand starting at position 832 of SEQ ID NO: 1243778
ggugguguccuugguauuc

SEQ ID NO: 1440799 - RNA, 19 nt, Artificial Sequence
  Description of Artificial Sequence: Synthetic oligonucleotide
  Antisense strand to SEQ ID NO: 1440798
gaauaccaaggacaccacc

SEQ ID NO: 1440800 - RNA, 19 nt, Artificial Sequence
  Description of Artificial Sequence: Synthetic oligonucleotide
  Sense strand starting at position 991 of SEQ ID NO: 1243778
ggguauagaacugggucau

SEQ ID NO: 1440801 - RNA, 19 nt, Artificial Sequence
  Description of Artificial Sequence: Synthetic oligonucleotide
  Antisense strand to SEQ ID NO: 1440800
augacccaguucuauaccc

SEQ ID NO: 1440802 - RNA, 19 nt, Artificial Sequence
  Description of Artificial Sequence: Synthetic oligonucleotide
  Sense strand starting at position 992 of SEQ ID NO: 1243778
gguauagaacugggucaua

SEQ ID NO: 1440803 - RNA, 19 nt, Artificial Sequence
  Description of Artificial Sequence: Synthetic oligonucleotide
  Antisense strand to SEQ ID NO: 1440802
uaugacccaguucuauacc

SEQ ID NO: 1440804 - RNA, 19 nt, Artificial Sequence
  Description of Artificial Sequence: Synthetic oligonucleotide
  Sense strand starting at position 1003 of SEQ ID NO: 1243778
gggucauaguaucugggaa

SEQ ID NO: 1440805 - RNA, 19 nt, Artificial Sequence
  Description of Artificial Sequence: Synthetic oligonucleotide
  Antisense strand to SEQ ID NO: 1440804
uucccagauacuaugaccc

SEQ ID NO: 1440806 - RNA, 19 nt, Artificial Sequence
  Description of Artificial Sequence: Synthetic oligonucleotide
  Sense strand starting at position 1004 of SEQ ID NO: 1243778
ggucauaguaucugggaag

SEQ ID NO: 1440807 - RNA, 19 nt, Artificial Sequence
  Description of Artificial Sequence: Synthetic oligonucleotide
  Antisense strand to SEQ ID NO: 1440806
cuucccagauacuaugacc

SEQ ID NO: 1440808 - RNA, 19 nt, Artificial Sequence
  Description of Artificial Sequence: Synthetic oligonucleotide
  Sense strand starting at position 1007 of SEQ ID NO: 1243778
cauaguaucugggaaggau

SEQ ID NO: 1440809 - RNA, 19 nt, Artificial Sequence
  Description of Artificial Sequence: Synthetic oligonucleotide
  Antisense strand to SEQ ID NO: 1440808
auccuucccagauacuaug

SEQ ID NO: 1440810 - RNA, 19 nt, Artificial Sequence
  Description of Artificial Sequence: Synthetic oligonucleotide
  Sense strand starting at position 1045 of SEQ ID NO: 1243778
cugacugugaugugacagu

SEQ ID NO: 1440811 - RNA, 19 nt, Artificial Sequence
  Description of Artificial Sequence: Synthetic oligonucleotide
  Antisense strand to SEQ ID NO: 1440810
acugucacaucacagucag

SEQ ID NO: 1440812 - RNA, 19 nt, Artificial Sequence
  Description of Artificial Sequence: Synthetic oligonucleotide
  Sense strand starting at position 1093 of SEQ ID NO: 1243778
gccaauaugagugagcaga

SEQ ID NO: 1440813 - RNA, 19 nt, Artificial Sequence
  Description of Artificial Sequence: Synthetic oligonucleotide
  Antisense strand to SEQ ID NO: 1440812
ucugcucacucauauuggc

SEQ ID NO: 1440814 - RNA, 19 nt, Artificial Sequence
  Description of Artificial Sequence: Synthetic oligonucleotide
  Sense strand starting at position 1095 of SEQ ID NO: 1243778
caauaugagugagcagacu

SEQ ID NO: 1440815 - RNA, 19 nt, Artificial Sequence
  Description of Artificial Sequence: Synthetic oligonucleotide
  Antisense strand to SEQ ID NO: 1440814
agucugcucacucauauug

SEQ ID NO: 1440816 - RNA, 19 nt, Artificial Sequence
  Description of Artificial Sequence: Synthetic oligonucleotide
  Sense strand starting at position 1191 of SEQ ID NO: 1243778
ggcccuaaaccuugagcuu

SEQ ID NO: 1440817 - RNA, 19 nt, Artificial Sequence
  Description of Artificial Sequence: Synthetic oligonucleotide
  Antisense strand to SEQ ID NO: 1440816
aagcucaagguuuagggcc

SEQ ID NO: 1440818 - RNA, 19 nt, Artificial Sequence
  Description of Artificial Sequence: Synthetic oligonucleotide
  Sense strand starting at position 1192 of SEQ ID NO: 1243778
gcccuaaaccuugagcuuu

SEQ ID NO: 1440819 - RNA, 19 nt, Artificial Sequence
  Description of Artificial Sequence: Synthetic oligonucleotide
  Antisense strand to SEQ ID NO: 1440818
aaagcucaagguuuagggc

SEQ ID NO: 1440820 - RNA, 19 nt, Artificial Sequence
  Description of Artificial Sequence: Synthetic oligonucleotide
  Sense strand starting at position 1321 of SEQ ID NO: 1243778
agauucuaccuccgguaga

SEQ ID NO: 1440821 - RNA, 19 nt, Artificial Sequence
  Description of Artificial Sequence: Synthetic oligonucleotide
  Antisense strand to SEQ ID NO: 1440820
ucuaccggagguagaaucu

SEQ ID NO: 1440822 - RNA, 19 nt, Artificial Sequence
  Description of Artificial Sequence: Synthetic oligonucleotide
  Sense strand starting at position 1339 of SEQ ID NO: 1243778
aagcuaggccuuuagaaga

SEQ ID NO: 1440823 - RNA, 19 nt, Artificial Sequence
  Description of Artificial Sequence: Synthetic oligonucleotide
  Antisense strand to SEQ ID NO: 1440822
ucuucuaaaggccuagcuu

SEQ ID NO: 1440824 - RNA, 19 nt, Artificial Sequence
  Description of Artificial Sequence: Synthetic oligonucleotide
  Sense strand starting at position 1364 of SEQ ID NO: 1243778
cugaguuccuucucuguuu

SEQ ID NO: 1440825 - RNA, 19 nt, Artificial Sequence
  Description of Artificial Sequence: Synthetic oligonucleotide
  Antisense strand to SEQ ID NO: 1440824
aaacagagaaggaacucag

SEQ ID NO: 1440826 - RNA, 19 nt, Artificial Sequence
  Description of Artificial Sequence: Synthetic oligonucleotide
  Sense strand starting at position 1366 of SEQ ID NO: 1243778
gaguuccuucucuguuuga

SEQ ID NO: 1440827 - RNA, 19 nt, Artificial Sequence
  Description of Artificial Sequence: Synthetic oligonucleotide
  Antisense strand to SEQ ID NO: 1440826
ucaaacagagaaggaacuc

SEQ ID NO: 1440828 - RNA, 19 nt, Artificial Sequence
  Description of Artificial Sequence: Synthetic oligonucleotide
  Sense strand starting at position 1367 of SEQ ID NO: 1243778
aguuccuucucuguuugau

SEQ ID NO: 1440829 - RNA, 19 nt, Artificial Sequence
  Description of Artificial Sequence: Synthetic oligonucleotide
  Antisense strand to SEQ ID NO: 1440828
aucaaacagagaaggaacu

SEQ ID NO: 1440830 - RNA, 19 nt, Artificial Sequence
  Description of Artificial Sequence: Synthetic oligonucleotide
  Sense strand starting at position 1369 of SEQ ID NO: 1243778
uuccuucucuguuugauuu

SEQ ID NO: 1440831 - RNA, 19 nt, Artificial Sequence
  Description of Artificial Sequence: Synthetic oligonucleotide
  Antisense strand to SEQ ID NO: 1440830
aaaucaaacagagaaggaa

SEQ ID NO: 1440832 - RNA, 19 nt, Artificial Sequence
  Description of Artificial Sequence: Synthetic oligonucleotide
  Sense strand starting at position 1398 of SEQ ID NO: 1243778
aagggcagaucugauaacu

SEQ ID NO: 1440833 - RNA, 19 nt, Artificial Sequence
  Description of Artificial Sequence: Synthetic oligonucleotide
  Antisense strand to SEQ ID NO: 1440832
aguuaucagaucugcccuu

SEQ ID NO: 1440834 - RNA, 19 nt, Artificial Sequence
  Description of Artificial Sequence: Synthetic oligonucleotide
  Sense strand starting at position 1443 of SEQ ID NO: 1243778
uugguuaggaccugauaga

SEQ ID NO: 1440835 - RNA, 19 nt, Artificial Sequence
  Description of Artificial Sequence: Synthetic oligonucleotide
  Antisense strand to SEQ ID NO: 1440834
ucuaucagguccuaaccaa

SEQ ID NO: 1440836 - RNA, 19 nt, Artificial Sequence
  Description of Artificial Sequence: Synthetic oligonucleotide
  Sense strand starting at position 2632 of SEQ ID NO: 1243778
ggacaagacuccuugucug

SEQ ID NO: 1440837 - RNA, 19 nt, Artificial Sequence
  Description of Artificial Sequence: Synthetic oligonucleotide
  Antisense strand to SEQ ID NO: 1440836
cagacaaggagucuugucc

SEQ ID NO: 1440838 - RNA, 19 nt, Artificial Sequence
  Description of Artificial Sequence: Synthetic oligonucleotide
  Sense strand starting at position 2672 of SEQ ID NO: 1243778
guagcuggguccucgagaa

SEQ ID NO: 1440839 - RNA, 19 nt, Artificial Sequence
  Description of Artificial Sequence: Synthetic oligonucleotide
  Antisense strand to SEQ ID NO: 1440838
uucucgaggacccagcuac

SEQ ID NO: 1440840 - RNA, 19 nt, Artificial Sequence
  Description of Artificial Sequence: Synthetic oligonucleotide
  Sense strand starting at position 2729 of SEQ ID NO: 1243778
gcugcaucccaagaagaaa

SEQ ID NO: 1440841 - RNA, 19 nt, Artificial Sequence
  Description of Artificial Sequence: Synthetic oligonucleotide
  Antisense strand to SEQ ID NO: 1440840
uuucuucuugggaugcagc

SEQ ID NO: 1440842 - RNA, 19 nt, Artificial Sequence
  Description of Artificial Sequence: Synthetic oligonucleotide
  Sense strand starting at position 2936 of SEQ ID NO: 1243778
gggaaacgccuucauguca

SEQ ID NO: 1440843 - RNA, 19 nt, Artificial Sequence
  Description of Artificial Sequence: Synthetic oligonucleotide
  Antisense strand to SEQ ID NO: 1440842
ugacaugaaggcguuuccc

SEQ ID NO: 1440844 - RNA, 19 nt, Artificial Sequence
  Description of Artificial Sequence: Synthetic oligonucleotide
  Sense strand starting at position 2966 of SEQ ID NO: 1243778
gacucuagugacggaacua

SEQ ID NO: 1440845 - RNA, 19 nt, Artificial Sequence
  Description of Artificial Sequence: Synthetic oligonucleotide
  Antisense strand to SEQ ID NO: 1440844
uaguuccgucacuagaguc

SEQ ID NO: 1440846 - RNA, 19 nt, Artificial Sequence
  Description of Artificial Sequence: Synthetic oligonucleotide
  Sense strand starting at position 3023 of SEQ ID NO: 1243778
ggugguuucuccuuacucu

SEQ ID NO: 1440847 - RNA, 19 nt, Artificial Sequence
  Description of Artificial Sequence: Synthetic oligonucleotide
  Antisense strand to SEQ ID NO: 1440846
agaguaaggagaaaccacc

SEQ ID NO: 1440848 - RNA, 19 nt, Artificial Sequence
  Description of Artificial Sequence: Synthetic oligonucleotide
  Sense strand starting at position 3024 of SEQ ID NO: 1243778
gugguuucuccuuacucuu

SEQ ID NO: 1440849 - RNA, 19 nt, Artificial Sequence
  Description of Artificial Sequence: Synthetic oligonucleotide
  Antisense strand to SEQ ID NO: 1440848
aagaguaaggagaaaccac

SEQ ID NO: 1440850 - RNA, 19 nt, Artificial Sequence
  Description of Artificial Sequence: Synthetic oligonucleotide
  Sense strand starting at position 3083 of SEQ ID NO: 1243778
guuccuucuggcugugaca

SEQ ID NO: 1440851 - RNA, 19 nt, Artificial Sequence
  Description of Artificial Sequence: Synthetic oligonucleotide
  Antisense strand to SEQ ID NO: 1440850
ugucacagccagaaggaac

SEQ ID NO: 1440852 - RNA, 19 nt, Artificial Sequence
  Description of Artificial Sequence: Synthetic oligonucleotide
  Sense strand starting at position 3138 of SEQ ID NO: 1243778
gcacaagccuccuccugau

SEQ ID NO: 1440853 - RNA, 19 nt, Artificial Sequence
  Description of Artificial Sequence: Synthetic oligonucleotide
  Antisense strand to SEQ ID NO: 1440852
aucaggaggaggcuugugc

SEQ ID NO: 1440854 - RNA, 19 nt, Artificial Sequence
  Description of Artificial Sequence: Synthetic oligonucleotide
  Sense strand starting at position 3180 of SEQ ID NO: 1243778
agcagcugucaagaugaga

SEQ ID NO: 1440855 - RNA, 19 nt, Artificial Sequence
  Description of Artificial Sequence: Synthetic oligonucleotide
  Antisense strand to SEQ ID NO: 1440854
ucucaucuugacagcugcu

SEQ ID NO: 1440856 - RNA, 19 nt, Artificial Sequence
  Description of Artificial Sequence: Synthetic oligonucleotide
  Sense strand starting at position 3185 of SEQ ID NO: 1243778
cugucaagaugagagaaau

SEQ ID NO: 1440857 - RNA, 19 nt, Artificial Sequence
  Description of Artificial Sequence: Synthetic oligonucleotide
  Antisense strand to SEQ ID NO: 1440856
auuucucucaucuugacag

SEQ ID NO: 1440858 - RNA, 19 nt, Artificial Sequence
  Description of Artificial Sequence: Synthetic oligonucleotide
  Sense strand starting at position 3225 of SEQ ID NO: 1243778
aggucuucuuuccagauuu

SEQ ID NO: 1440859 - RNA, 19 nt, Artificial Sequence
  Description of Artificial Sequence: Synthetic oligonucleotide
  Antisense strand to SEQ ID NO: 1440858
aaaucuggaaagaagaccu

SEQ ID NO: 1440860 - RNA, 19 nt, Artificial Sequence
  Description of Artificial Sequence: Synthetic oligonucleotide
  Sense strand starting at position 3278 of SEQ ID NO: 1243778
gguucucaccuacguuauu

SEQ ID NO: 1440861 - RNA, 19 nt, Artificial Sequence
  Description of Artificial Sequence: Synthetic oligonucleotide
  Antisense strand to SEQ ID NO: 1440860
aauaacguaggugagaacc

SEQ ID NO: 1440862 - RNA, 19 nt, Artificial Sequence
  Description of Artificial Sequence: Synthetic oligonucleotide
  Sense strand starting at position 3279 of SEQ ID NO: 1243778
guucucaccuacguuauuu

SEQ ID NO: 1440863 - RNA, 19 nt, Artificial Sequence
  Description of Artificial Sequence: Synthetic oligonucleotide
  Antisense strand to SEQ ID NO: 1440862
aaauaacguaggugagaac

SEQ ID NO: 1440864 - RNA, 19 nt, Artificial Sequence
  Description of Artificial Sequence: Synthetic oligonucleotide
  Sense strand starting at position 3339 of SEQ ID NO: 1243778
ucugcaucuccaugcaaga

SEQ ID NO: 1440865 - RNA, 19 nt, Artificial Sequence
  Description of Artificial Sequence: Synthetic oligonucleotide
  Antisense strand to SEQ ID NO: 1440864
ucuugcauggagaugcaga

SEQ ID NO: 1440866 - RNA, 19 nt, Artificial Sequence
  Description of Artificial Sequence: Synthetic oligonucleotide
  Sense strand starting at position 3671 of SEQ ID NO: 1243778
acuccagggaguugucauu

SEQ ID NO: 1440867 - RNA, 19 nt, Artificial Sequence
  Description of Artificial Sequence: Synthetic oligonucleotide
  Antisense strand to SEQ ID NO: 1440866
aaugacaacucccuggagu

SEQ ID NO: 1440868 - RNA, 19 nt, Artificial Sequence
  Description of Artificial Sequence: Synthetic oligonucleotide
  Sense strand starting at position 3733 of SEQ ID NO: 1243778
ugaagcauauugucuagga

SEQ ID NO: 1440869 - RNA, 19 nt, Artificial Sequence
  Description of Artificial Sequence: Synthetic oligonucleotide
  Antisense strand to SEQ ID NO: 1440868
uccuagacaauaugcuuca

SEQ ID NO: 1440870 - RNA, 19 nt, Artificial Sequence
  Description of Artificial Sequence: Synthetic oligonucleotide
  Sense strand starting at position 3734 of SEQ ID NO: 1243778
gaagcauauugucuaggaa

SEQ ID NO: 1440871 - RNA, 19 nt, Artificial Sequence
  Description of Artificial Sequence: Synthetic oligonucleotide
  Antisense strand to SEQ ID NO: 1440870
uuccuagacaauaugcuuc

SEQ ID NO: 1440872 - RNA, 19 nt, Artificial Sequence
  Description of Artificial Sequence: Synthetic oligonucleotide
  Sense strand starting at position 3735 of SEQ ID NO: 1243778
aagcauauugucuaggaac

SEQ ID NO: 1440873 - RNA, 19 nt, Artificial Sequence
  Description of Artificial Sequence: Synthetic oligonucleotide
  Antisense strand to SEQ ID NO: 1440872
guuccuagacaauaugcuu

SEQ ID NO: 1440874 - RNA, 19 nt, Artificial Sequence
  Description of Artificial Sequence: Synthetic oligonucleotide
  Sense strand starting at position 11 of SEQ ID NO: 1243779
aaaggagaccucuggcaau

SEQ ID NO: 1440875 - RNA, 19 nt, Artificial Sequence
  Description of Artificial Sequence: Synthetic oligonucleotide
  Antisense strand to SEQ ID NO: 1440874
auugccagaggucuccuuu

SEQ ID NO: 1440876 - RNA, 19 nt, Artificial Sequence
  Description of Artificial Sequence: Synthetic oligonucleotide
  Sense strand starting at position 85 of SEQ ID NO: 1243779
guccuaucccgcugcgagu

SEQ ID NO: 1440877 - RNA, 19 nt, Artificial Sequence
  Description of Artificial Sequence: Synthetic oligonucleotide
  Antisense strand to SEQ ID NO: 1440876
acucgcagcgggauaggac

SEQ ID NO: 1440878 - RNA, 19 nt, Artificial Sequence
  Description of Artificial Sequence: Synthetic oligonucleotide
  Sense strand starting at position 125 of SEQ ID NO: 1243779
ugugacaugucauucucuu

SEQ ID NO: 1440879 - RNA, 19 nt, Artificial Sequence
  Description of Artificial Sequence: Synthetic oligonucleotide
  Antisense strand to SEQ ID NO: 1440878
aagagaaugacaugucaca

SEQ ID NO: 1440880 - RNA, 19 nt, Artificial Sequence
  Description of Artificial Sequence: Synthetic oligonucleotide
  Sense strand starting at position 151 of SEQ ID NO: 1243779
cacguuaauuuggacauga

SEQ ID NO: 1440881 - RNA, 19 nt, Artificial Sequence
  Description of Artificial Sequence: Synthetic oligonucleotide
  Antisense strand to SEQ ID NO: 1440880
ucauguccaaauuaacgug

SEQ ID NO: 1440882 - RNA, 19 nt, Artificial Sequence
  Description of Artificial Sequence: Synthetic oligonucleotide
  Sense strand starting at position 215 of SEQ ID NO: 1243779
augacagugccuggacaaa

SEQ ID NO: 1440883 - RNA, 19 nt, Artificial Sequence
  Description of Artificial Sequence: Synthetic oligonucleotide
  Antisense strand to SEQ ID NO: 1440882
uuuguccaggcacugucau

SEQ ID NO: 1440884 - RNA, 19 nt, Artificial Sequence
  Description of Artificial Sequence: Synthetic oligonucleotide
  Sense strand starting at position 248 of SEQ ID NO: 1243779
gaguccuggccgugaagau

SEQ ID NO: 1440885 - RNA, 19 nt, Artificial Sequence
  Description of Artificial Sequence: Synthetic oligonucleotide
  Antisense strand to SEQ ID NO: 1440884
aucuucacggccaggacuc

SEQ ID NO: 1440886 - RNA, 19 nt, Artificial Sequence
  Description of Artificial Sequence: Synthetic oligonucleotide
  Sense strand starting at position 346 of SEQ ID NO: 1243779
gggcgugugcuaggauaga

SEQ ID NO: 1440887 - RNA, 19 nt, Artificial Sequence
  Description of Artificial Sequence: Synthetic oligonucleotide
  Antisense strand to SEQ ID NO: 1440886
ucuauccuagcacacgccc

SEQ ID NO: 1440888 - RNA, 19 nt, Artificial Sequence
  Description of Artificial Sequence: Synthetic oligonucleotide
  Sense strand starting at position 493 of SEQ ID NO: 1243779
gagggaccuuucucagcaa

SEQ ID NO: 1440889 - RNA, 19 nt, Artificial Sequence
  Description of Artificial Sequence: Synthetic oligonucleotide
  Antisense strand to SEQ ID NO: 1440888
uugcugagaaaggucccuc

SEQ ID NO: 1440890 - RNA, 19 nt, Artificial Sequence
  Description of Artificial Sequence: Synthetic oligonucleotide
  Sense strand starting at position 494 of SEQ ID NO: 1243779
agggaccuuucucagcaaa

SEQ ID NO: 1440891 - RNA, 19 nt, Artificial Sequence
  Description of Artificial Sequence: Synthetic oligonucleotide
  Antisense strand to SEQ ID NO: 1440890
uuugcugagaaaggucccu

SEQ ID NO: 1440892 - RNA, 19 nt, Artificial Sequence
  Description of Artificial Sequence: Synthetic oligonucleotide
  Sense strand starting at position 796 of SEQ ID NO: 1243779
gggaaagguguuugggaga

SEQ ID NO: 1440893 - RNA, 19 nt, Artificial Sequence
  Description of Artificial Sequence: Synthetic oligonucleotide
  Antisense strand to SEQ ID NO: 1440892
ucucccaaacaccuuuccc

SEQ ID NO: 1440894 - RNA, 19 nt, Artificial Sequence
  Description of Artificial Sequence: Synthetic oligonucleotide
  Sense strand starting at position 813 of SEQ ID NO: 1243779
gagagaugugucugcugau

SEQ ID NO: 1440895 - RNA, 19 nt, Artificial Sequence
  Description of Artificial Sequence: Synthetic oligonucleotide
  Antisense strand to SEQ ID NO: 1440894
aucagcagacacaucucuc

SEQ ID NO: 1440896 - RNA, 19 nt, Artificial Sequence
  Description of Artificial Sequence: Synthetic oligonucleotide
  Sense strand starting at position 814 of SEQ ID NO: 1243779
agagaugugucugcugaug

SEQ ID NO: 1440897 - RNA, 19 nt, Artificial Sequence
  Description of Artificial Sequence: Synthetic oligonucleotide
  Antisense strand to SEQ ID NO: 1440896
caucagcagacacaucucu

SEQ ID NO: 1440898 - RNA, 19 nt, Artificial Sequence
  Description of Artificial Sequence: Synthetic oligonucleotide
  Sense strand starting at position 941 of SEQ ID NO: 1243779
gguaccagucuccaaggau

SEQ ID NO: 1440899 - RNA, 19 nt, Artificial Sequence
  Description of Artificial Sequence: Synthetic oligonucleotide
  Antisense strand to SEQ ID NO: 1440898
auccuuggagacugguacc

SEQ ID NO: 1440900 - RNA, 19 nt, Artificial Sequence
  Description of Artificial Sequence: Synthetic oligonucleotide
  Sense strand starting at position 1013 of SEQ ID NO: 1243779
ggcgaaucauuugcaugca

SEQ ID NO: 1440901 - RNA, 19 nt, Artificial Sequence
  Description of Artificial Sequence: Synthetic oligonucleotide
  Antisense strand to SEQ ID NO: 1440900
ugcaugcaaaugauucgcc

SEQ ID NO: 1440902 - RNA, 19 nt, Artificial Sequence
  Description of Artificial Sequence: Synthetic oligonucleotide
  Sense strand starting at position 1046 of SEQ ID NO: 1243779
agcugugugccuggaggaa

SEQ ID NO: 1440903 - RNA, 19 nt, Artificial Sequence
  Description of Artificial Sequence: Synthetic oligonucleotide
  Antisense strand to SEQ ID NO: 1440902
uuccuccaggcacacagcu

SEQ ID NO: 1440904 - RNA, 19 nt, Artificial Sequence
  Description of Artificial Sequence: Synthetic oligonucleotide
  Sense strand starting at position 1121 of SEQ ID NO: 1243779
uggccuguuacagguuuga

SEQ ID NO: 1440905 - RNA, 19 nt, Artificial Sequence
  Description of Artificial Sequence: Synthetic oligonucleotide
  Antisense strand to SEQ ID NO: 1440904
ucaaaccuguaacaggcca

SEQ ID NO: 1440906 - RNA, 19 nt, Artificial Sequence
  Description of Artificial Sequence: Synthetic oligonucleotide
  Sense strand starting at position 1125 of SEQ ID NO: 1243779
cuguuacagguuugaccaa

SEQ ID NO: 1440907 - RNA, 19 nt, Artificial Sequence
  Description of Artificial Sequence: Synthetic oligonucleotide
  Antisense strand to SEQ ID NO: 1440906
uuggucaaaccuguaacag

SEQ ID NO: 1440908 - RNA, 19 nt, Artificial Sequence
  Description of Artificial Sequence: Synthetic oligonucleotide
  Sense strand starting at position 1278 of SEQ ID NO: 1243779
ggaggcgucccacacuaau

SEQ ID NO: 1440909 - RNA, 19 nt, Artificial Sequence
  Description of Artificial Sequence: Synthetic oligonucleotide
  Antisense strand to SEQ ID NO: 1440908
auuagugugggacgccucc

SEQ ID NO: 1440910 - RNA, 19 nt, Artificial Sequence
  Description of Artificial Sequence: Synthetic oligonucleotide
  Sense strand starting at position 1573 of SEQ ID NO: 1243779
acgcuagucccagggauga

SEQ ID NO: 1440911 - RNA, 19 nt, Artificial Sequence
  Description of Artificial Sequence: Synthetic oligonucleotide
  Antisense strand to SEQ ID NO: 1440910
ucaucccugggacuagcgu

SEQ ID NO: 1440912 - RNA, 19 nt, Artificial Sequence
  Description of Artificial Sequence: Synthetic oligonucleotide
  Sense strand starting at position 2038 of SEQ ID NO: 1243779
ggagcugugguuuguguuu

SEQ ID NO: 1440913 - RNA, 19 nt, Artificial Sequence
  Description of Artificial Sequence: Synthetic oligonucleotide
  Antisense strand to SEQ ID NO: 1440912
aaacacaaaccacagcucc

SEQ ID NO: 1440914 - RNA, 19 nt, Artificial Sequence
  Description of Artificial Sequence: Synthetic oligonucleotide
  Sense strand starting at position 2264 of SEQ ID NO: 1243779
gagggaaguucucauucuc

SEQ ID NO: 1440915 - RNA, 19 nt, Artificial Sequence
  Description of Artificial Sequence: Synthetic oligonucleotide
  Antisense strand to SEQ ID NO: 1440914
gagaaugagaacuucccuc

SEQ ID NO: 1440916 - RNA, 19 nt, Artificial Sequence
  Description of Artificial Sequence: Synthetic oligonucleotide
  Sense strand starting at position 2271 of SEQ ID NO: 1243779
guucucauucuccgagcga

SEQ ID NO: 1440917 - RNA, 19 nt, Artificial Sequence
  Description of Artificial Sequence: Synthetic oligonucleotide
  Antisense strand to SEQ ID NO: 1440916
ucgcucggagaaugagaac

SEQ ID NO: 1440918 - RNA, 19 nt, Artificial Sequence
  Description of Artificial Sequence: Synthetic oligonucleotide
  Sense strand starting at position 2628 of SEQ ID NO: 1243779
aucccaaaguucugagaaa

SEQ ID NO: 1440919 - RNA, 19 nt, Artificial Sequence
  Description of Artificial Sequence: Synthetic oligonucleotide
  Antisense strand to SEQ ID NO: 1440918
uuucucagaacuuugggau

SEQ ID NO: 1440920 - RNA, 19 nt, Artificial Sequence
  Description of Artificial Sequence: Synthetic oligonucleotide
  Sense strand starting at position 2813 of SEQ ID NO: 1243779
auaaaugguacgcaaugaa

SEQ ID NO: 1440921 - RNA, 19 nt, Artificial Sequence
  Description of Artificial Sequence: Synthetic oligonucleotide
  Antisense strand to SEQ ID NO: 1440920
uucauugcguaccauuuau

SEQ ID NO: 1440922 - RNA, 19 nt, Artificial Sequence
  Description of Artificial Sequence: Synthetic oligonucleotide
  Sense strand starting at position 2871 of SEQ ID NO: 1243779
aggcgaucacuagauguua

SEQ ID NO: 1440923 - RNA, 19 nt, Artificial Sequence
  Description of Artificial Sequence: Synthetic oligonucleotide
  Antisense strand to SEQ ID NO: 1440922
uaacaucuagugaucgccu

SEQ ID NO: 1440924 - RNA, 19 nt, Artificial Sequence
  Description of Artificial Sequence: Synthetic oligonucleotide
  Sense strand starting at position 2873 of SEQ ID NO: 1243779
gcgaucacuagauguuaua

SEQ ID NO: 1440925 - RNA, 19 nt, Artificial Sequence
  Description of Artificial Sequence: Synthetic oligonucleotide
  Antisense strand to SEQ ID NO: 1440924
uauaacaucuagugaucgc

SEQ ID NO: 1440926 - RNA, 19 nt, Artificial Sequence
  Description of Artificial Sequence: Synthetic oligonucleotide
  Sense strand starting at position 2883 of SEQ ID NO: 1243779
gauguuauaugguauccaa

SEQ ID NO: 1440927 - RNA, 19 nt, Artificial Sequence
  Description of Artificial Sequence: Synthetic oligonucleotide
  Antisense strand to SEQ ID NO: 1440926
uuggauaccauauaacauc

SEQ ID NO: 1440928 - RNA, 19 nt, Artificial Sequence
  Description of Artificial Sequence: Synthetic oligonucleotide
  Sense strand starting at position 2886 of SEQ ID NO: 1243779
guuauaugguauccaaaca

SEQ ID NO: 1440929 - RNA, 19 nt, Artificial Sequence
  Description of Artificial Sequence: Synthetic oligonucleotide
  Antisense strand to SEQ ID NO: 1440928
uguuuggauaccauauaac

SEQ ID NO: 1440930 - RNA, 19 nt, Artificial Sequence
  Description of Artificial Sequence: Synthetic oligonucleotide
  Sense strand starting at position 2941 of SEQ ID NO: 1243779
auagaaaugugcuaaacac

SEQ ID NO: 1440931 - RNA, 19 nt, Artificial Sequence
  Description of Artificial Sequence: Synthetic oligonucleotide
  Antisense strand to SEQ ID NO: 1440930
guguuuagcacauuucuau

SEQ ID NO: 1440932 - RNA, 19 nt, Artificial Sequence
  Description of Artificial Sequence: Synthetic oligonucleotide
  Sense strand starting at position 3013 of SEQ ID NO: 1243779
ucauuaauguuucuuguca

SEQ ID NO: 1440933 - RNA, 19 nt, Artificial Sequence
  Description of Artificial Sequence: Synthetic oligonucleotide
  Antisense strand to SEQ ID NO: 1440932
ugacaagaaacauuaauga

SEQ ID NO: 1440934 - RNA, 19 nt, Artificial Sequence
  Description of Artificial Sequence: Synthetic oligonucleotide
  Sense strand starting at position 3251 of SEQ ID NO: 1243779
aggauaauguacuucguga

SEQ ID NO: 1440935 - RNA, 19 nt, Artificial Sequence
  Description of Artificial Sequence: Synthetic oligonucleotide
  Antisense strand to SEQ ID NO: 1440934
ucacgaaguacauuauccu

SEQ ID NO: 1440936 - RNA, 19 nt, Artificial Sequence
  Description of Artificial Sequence: Synthetic oligonucleotide
  Sense strand starting at position 3253 of SEQ ID NO: 1243779
gauaauguacuucgugaua

SEQ ID NO: 1440937 - RNA, 19 nt, Artificial Sequence
  Description of Artificial Sequence: Synthetic oligonucleotide
  Antisense strand to SEQ ID NO: 1440936
uaucacgaaguacauuauc

SEQ ID NO: 1440938 - RNA, 19 nt, Artificial Sequence
  Description of Artificial Sequence: Synthetic oligonucleotide
  Sense strand starting at position 3516 of SEQ ID NO: 1243779
ggacgcaugugacaauuau

SEQ ID NO: 1440939 - RNA, 19 nt, Artificial Sequence
  Description of Artificial Sequence: Synthetic oligonucleotide
  Antisense strand to SEQ ID NO: 1440938
auaauugucacaugcgucc

SEQ ID NO: 1440940 - RNA, 19 nt, Artificial Sequence
  Description of Artificial Sequence: Synthetic oligonucleotide
  Sense strand starting at position 3656 of SEQ ID NO: 1243779
agaggugguagccacaaua

SEQ ID NO: 1440941 - RNA, 19 nt, Artificial Sequence
  Description of Artificial Sequence: Synthetic oligonucleotide
  Antisense strand to SEQ ID NO: 1440940
uauuguggcuaccaccucu

SEQ ID NO: 1440942 - RNA, 19 nt, Artificial Sequence
  Description of Artificial Sequence: Synthetic oligonucleotide
  Sense strand starting at position 3674 of SEQ ID NO: 1243779
acugaauguuguguuaauc

SEQ ID NO: 1440943 - RNA, 19 nt, Artificial Sequence
  Description of Artificial Sequence: Synthetic oligonucleotide
  Antisense strand to SEQ ID NO: 1440942
gauuaacacaacauucagu

SEQ ID NO: 1440944 - RNA, 19 nt, Artificial Sequence
  Description of Artificial Sequence: Synthetic oligonucleotide
  Sense strand starting at position 3682 of SEQ ID NO: 1243779
uuguguuaaucauucuguu

SEQ ID NO: 1440945 - RNA, 19 nt, Artificial Sequence
  Description of Artificial Sequence: Synthetic oligonucleotide
  Antisense strand to SEQ ID NO: 1440944
aacagaaugauuaacacaa

SEQ ID NO: 1440946 - RNA, 19 nt, Artificial Sequence
  Description of Artificial Sequence: Synthetic oligonucleotide
  Sense strand starting at position 3695 of SEQ ID NO: 1243779
ucuguugccuuacuuuaua

SEQ ID NO: 1440947 - RNA, 19 nt, Artificial Sequence
  Description of Artificial Sequence: Synthetic oligonucleotide
  Antisense strand to SEQ ID NO: 1440946
uauaaaguaaggcaacaga

SEQ ID NO: 1440948 - RNA, 19 nt, Artificial Sequence
  Description of Artificial Sequence: Synthetic oligonucleotide
  Sense strand starting at position 3726 of SEQ ID NO: 1243779
agguauguaucccuaaaca

SEQ ID NO: 1440949 - RNA, 19 nt, Artificial Sequence
  Description of Artificial Sequence: Synthetic oligonucleotide
  Antisense strand to SEQ ID NO: 1440948
uguuuagggauacauaccu

SEQ ID NO: 1440950 - RNA, 19 nt, Artificial Sequence
  Description of Artificial Sequence: Synthetic oligonucleotide
  Sense strand starting at position 3796 of SEQ ID NO: 1243779
guaugcaauaauugagaga

SEQ ID NO: 1440951 - RNA, 19 nt, Artificial Sequence
  Description of Artificial Sequence: Synthetic oligonucleotide
  Antisense strand to SEQ ID NO: 1440950
ucucucaauuauugcauac

SEQ ID NO: 1440952 - RNA, 19 nt, Artificial Sequence
  Description of Artificial Sequence: Synthetic oligonucleotide
  Sense strand starting at position 3861 of SEQ ID NO: 1243779
gaauaagggcuggguaaau

SEQ ID NO: 1440953 - RNA, 19 nt, Artificial Sequence
  Description of Artificial Sequence: Synthetic oligonucleotide
  Antisense strand to SEQ ID NO: 1440952
auuuacccagcccuuauuc

SEQ ID NO: 1440954 - RNA, 19 nt, Artificial Sequence
  Description of Artificial Sequence: Synthetic oligonucleotide
  Sense strand starting at position 220 of SEQ ID NO: 1243780
caggucugucuggacagaa

SEQ ID NO: 1440955 - RNA, 19 nt, Artificial Sequence
  Description of Artificial Sequence: Synthetic oligonucleotide
  Antisense strand to SEQ ID NO: 1440954
uucuguccagacagaccug

SEQ ID NO: 1440956 - RNA, 19 nt, Artificial Sequence
  Description of Artificial Sequence: Synthetic oligonucleotide
  Sense strand starting at position 422 of SEQ ID NO: 1243780
aggccauuagcccauuaau

SEQ ID NO: 1440957 - RNA, 19 nt, Artificial Sequence
  Description of Artificial Sequence: Synthetic oligonucleotide
  Antisense strand to SEQ ID NO: 1440956
auuaaugggcuaauggccu

SEQ ID NO: 1440958 - RNA, 19 nt, Artificial Sequence
  Description of Artificial Sequence: Synthetic oligonucleotide
  Sense strand starting at position 521 of SEQ ID NO: 1243780
acauaucuaccaugcggau

SEQ ID NO: 1440959 - RNA, 19 nt, Artificial Sequence
  Description of Artificial Sequence: Synthetic oligonucleotide
  Antisense strand to SEQ ID NO: 1440958
auccgcaugguagauaugu

SEQ ID NO: 1440960 - RNA, 19 nt, Artificial Sequence
  Description of Artificial Sequence: Synthetic oligonucleotide
  Sense strand starting at position 845 of SEQ ID NO: 1243780
gauggaaucuccguauguu

SEQ ID NO: 1440961 - RNA, 19 nt, Artificial Sequence
  Description of Artificial Sequence: Synthetic oligonucleotide
  Antisense strand to SEQ ID NO: 1440960
aacauacggagauuccauc

SEQ ID NO: 1440962 - RNA, 19 nt, Artificial Sequence
  Description of Artificial Sequence: Synthetic oligonucleotide
  Sense strand starting at position 846 of SEQ ID NO: 1243780
auggaaucuccguauguug

SEQ ID NO: 1440963 - RNA, 19 nt, Artificial Sequence
  Description of Artificial Sequence: Synthetic oligonucleotide
  Antisense strand to SEQ ID NO: 1440962
caacauacggagauuccau

SEQ ID NO: 1440964 - RNA, 19 nt, Artificial Sequence
  Description of Artificial Sequence: Synthetic oligonucleotide
  Sense strand starting at position 927 of SEQ ID NO: 1243780
gggauuacaguccagccua

SEQ ID NO: 1440965 - RNA, 19 nt, Artificial Sequence
  Description of Artificial Sequence: Synthetic oligonucleotide
  Antisense strand to SEQ ID NO: 1440964
uaggcuggacuguaauccc

SEQ ID NO: 1440966 - RNA, 19 nt, Artificial Sequence
  Description of Artificial Sequence: Synthetic oligonucleotide
  Sense strand starting at position 1002 of SEQ ID NO: 1243780
agcaucuuugcaugauacu

SEQ ID NO: 1440967 - RNA, 19 nt, Artificial Sequence
  Description of Artificial Sequence: Synthetic oligonucleotide
  Antisense strand to SEQ ID NO: 1440966
aguaucaugcaaagaugcu

SEQ ID NO: 1440968 - RNA, 19 nt, Artificial Sequence
  Description of Artificial Sequence: Synthetic oligonucleotide
  Sense strand starting at position 1003 of SEQ ID NO: 1243780
gcaucuuugcaugauacuu

SEQ ID NO: 1440969 - RNA, 19 nt, Artificial Sequence
  Description of Artificial Sequence: Synthetic oligonucleotide
  Antisense strand to SEQ ID NO: 1440968
aaguaucaugcaaagaugc

SEQ ID NO: 1440970 - RNA, 19 nt, Artificial Sequence
  Description of Artificial Sequence: Synthetic oligonucleotide
  Sense strand starting at position 1011 of SEQ ID NO: 1243780
gcaugauacuucgugcaga

SEQ ID NO: 1440971 - RNA, 19 nt, Artificial Sequence
  Description of Artificial Sequence: Synthetic oligonucleotide
  Antisense strand to SEQ ID NO: 1440970
ucugcacgaaguaucaugc

SEQ ID NO: 1440972 - RNA, 19 nt, Artificial Sequence
  Description of Artificial Sequence: Synthetic oligonucleotide
  Sense strand starting at position 1032 of SEQ ID NO: 1243780
gcagcuuuacaucaacagu

SEQ ID NO: 1440973 - RNA, 19 nt, Artificial Sequence
  Description of Artificial Sequence: Synthetic oligonucleotide
  Antisense strand to SEQ ID NO: 1440972
acuguugauguaaagcugc

SEQ ID NO: 1440974 - RNA, 19 nt, Artificial Sequence
  Description of Artificial Sequence: Synthetic oligonucleotide
  Sense strand starting at position 1129 of SEQ ID NO: 1243780
auacaugcagcuugauaca

SEQ ID NO: 1440975 - RNA, 19 nt, Artificial Sequence
  Description of Artificial Sequence: Synthetic oligonucleotide
  Antisense strand to SEQ ID NO: 1440974
uguaucaagcugcauguau

SEQ ID NO: 1440976 - RNA, 19 nt, Artificial Sequence
  Description of Artificial Sequence: Synthetic oligonucleotide
  Sense strand starting at position 1222 of SEQ ID NO: 1243780
auaucagguugugccuaau

SEQ ID NO: 1440977 - RNA, 19 nt, Artificial Sequence
  Description of Artificial Sequence: Synthetic oligonucleotide
  Antisense strand to SEQ ID NO: 1440976
auuaggcacaaccugauau

SEQ ID NO: 1440978 - RNA, 19 nt, Artificial Sequence
  Description of Artificial Sequence: Synthetic oligonucleotide
  Sense strand starting at position 1278 of SEQ ID NO: 1243780
uguuaaucuccugggcaca

SEQ ID NO: 1440979 - RNA, 19 nt, Artificial Sequence
  Description of Artificial Sequence: Synthetic oligonucleotide
  Antisense strand to SEQ ID NO: 1440978
ugugcccaggagauuaaca

SEQ ID NO: 1440980 - RNA, 19 nt, Artificial Sequence
  Description of Artificial Sequence: Synthetic oligonucleotide
  Sense strand starting at position 1300 of SEQ ID NO: 1243780
gggagcgauuccuuacaga

SEQ ID NO: 1440981 - RNA, 19 nt, Artificial Sequence
  Description of Artificial Sequence: Synthetic oligonucleotide
  Antisense strand to SEQ ID NO: 1440980
ucuguaaggaaucgcuccc

SEQ ID NO: 1440982 - RNA, 19 nt, Artificial Sequence
  Description of Artificial Sequence: Synthetic oligonucleotide
  Sense strand starting at position 1321 of SEQ ID NO: 1243780
caugaauuccugugacuug

SEQ ID NO: 1440983 - RNA, 19 nt, Artificial Sequence
  Description of Artificial Sequence: Synthetic oligonucleotide
  Antisense strand to SEQ ID NO: 1440982
caagucacaggaauucaug

SEQ ID NO: 1440984 - RNA, 19 nt, Artificial Sequence
  Description of Artificial Sequence: Synthetic oligonucleotide
  Sense strand starting at position 1324 of SEQ ID NO: 1243780
gaauuccugugacuugauu

SEQ ID NO: 1440985 - RNA, 19 nt, Artificial Sequence
  Description of Artificial Sequence: Synthetic oligonucleotide
  Antisense strand to SEQ ID NO: 1440984
aaucaagucacaggaauuc

SEQ ID NO: 1440986 - RNA, 19 nt, Artificial Sequence
  Description of Artificial Sequence: Synthetic oligonucleotide
  Sense strand starting at position 1392 of SEQ ID NO: 1243780
cagggaucuguaugcuaaa

SEQ ID NO: 1440987 - RNA, 19 nt, Artificial Sequence
  Description of Artificial Sequence: Synthetic oligonucleotide
  Antisense strand to SEQ ID NO: 1440986
uuuagcauacagaucccug

SEQ ID NO: 1440988 - RNA, 19 nt, Artificial Sequence
  Description of Artificial Sequence: Synthetic oligonucleotide
  Sense strand starting at position 2021 of SEQ ID NO: 1243780
aggugaauugaccgugauu

SEQ ID NO: 1440989 - RNA, 19 nt, Artificial Sequence
  Description of Artificial Sequence: Synthetic oligonucleotide
  Antisense strand to SEQ ID NO: 1440988
aaucacggucaauucaccu

SEQ ID NO: 1440990 - RNA, 19 nt, Artificial Sequence
  Description of Artificial Sequence: Synthetic oligonucleotide
  Sense strand starting at position 2023 of SEQ ID NO: 1243780
gugaauugaccgugauuuc

SEQ ID NO: 1440991 - RNA, 19 nt, Artificial Sequence
  Description of Artificial Sequence: Synthetic oligonucleotide
  Antisense strand to SEQ ID NO: 1440990
gaaaucacggucaauucac

SEQ ID NO: 1440992 - RNA, 19 nt, Artificial Sequence
  Description of Artificial Sequence: Synthetic oligonucleotide
  Sense strand starting at position 2065 of SEQ ID NO: 1243780
acucaagguucggucacaa

SEQ ID NO: 1440993 - RNA, 19 nt, Artificial Sequence
  Description of Artificial Sequence: Synthetic oligonucleotide
  Antisense strand to SEQ ID NO: 1440992
uugugaccgaaccuugagu

SEQ ID NO: 1440994 - RNA, 19 nt, Artificial Sequence
  Description of Artificial Sequence: Synthetic oligonucleotide
  Sense strand starting at position 2123 of SEQ ID NO: 1243780
cgggaaauaacucgacgga

SEQ ID NO: 1440995 - RNA, 19 nt, Artificial Sequence
  Description of Artificial Sequence: Synthetic oligonucleotide
  Antisense strand to SEQ ID NO: 1440994
uccgucgaguuauuucccg

SEQ ID NO: 1440996 - RNA, 19 nt, Artificial Sequence
  Description of Artificial Sequence: Synthetic oligonucleotide
  Sense strand starting at position 2126 of SEQ ID NO: 1243780
gaaauaacucgacggaccu

SEQ ID NO: 1440997 - RNA, 19 nt, Artificial Sequence
  Description of Artificial Sequence: Synthetic oligonucleotide
  Antisense strand to SEQ ID NO: 1440996
agguccgucgaguuauuuc

SEQ ID NO: 1440998 - RNA, 19 nt, Artificial Sequence
  Description of Artificial Sequence: Synthetic oligonucleotide
  Sense strand starting at position 2219 of SEQ ID NO: 1243780
ggcuuugaacccuagacua

SEQ ID NO: 1440999 - RNA, 19 nt, Artificial Sequence
  Description of Artificial Sequence: Synthetic oligonucleotide
  Antisense strand to SEQ ID NO: 1440998
uagucuaggguucaaagcc

SEQ ID NO: 1441000 - RNA, 19 nt, Artificial Sequence
  Description of Artificial Sequence: Synthetic oligonucleotide
  Sense strand starting at position 2253 of SEQ ID NO: 1243780
aggcgcaguaguuauccaa

SEQ ID NO: 1441001 - RNA, 19 nt, Artificial Sequence
  Description of Artificial Sequence: Synthetic oligonucleotide
  Antisense strand to SEQ ID NO: 1441000
uuggauaacuacugcgccu

SEQ ID NO: 1441002 - RNA, 19 nt, Artificial Sequence
  Description of Artificial Sequence: Synthetic oligonucleotide
  Sense strand starting at position 2459 of SEQ ID NO: 1243780
ccuguuucucacuggaaca

SEQ ID NO: 1441003 - RNA, 19 nt, Artificial Sequence
  Description of Artificial Sequence: Synthetic oligonucleotide
  Antisense strand to SEQ ID NO: 1441002
uguuccagugagaaacagg

SEQ ID NO: 1441004 - RNA, 19 nt, Artificial Sequence
  Description of Artificial Sequence: Synthetic oligonucleotide
  Sense strand starting at position 2565 of SEQ ID NO: 1243780
aggaccucauuugggaaua

SEQ ID NO: 1441005 - RNA, 19 nt, Artificial Sequence
  Description of Artificial Sequence: Synthetic oligonucleotide
  Antisense strand to SEQ ID NO: 1441004
uauucccaaaugagguccu

SEQ ID NO: 1441006 - RNA, 19 nt, Artificial Sequence
  Description of Artificial Sequence: Synthetic oligonucleotide
  Sense strand starting at position 2566 of SEQ ID NO: 1243780
ggaccucauuugggaauaa

SEQ ID NO: 1441007 - RNA, 19 nt, Artificial Sequence
  Description of Artificial Sequence: Synthetic oligonucleotide
  Antisense strand to SEQ ID NO: 1441006
uuauucccaaaugaggucc

SEQ ID NO: 1441008 - RNA, 19 nt, Artificial Sequence
  Description of Artificial Sequence: Synthetic oligonucleotide
  Sense strand starting at position 2567 of SEQ ID NO: 1243780
gaccucauuugggaauaag

SEQ ID NO: 1441009 - RNA, 19 nt, Artificial Sequence
  Description of Artificial Sequence: Synthetic oligonucleotide
  Antisense strand to SEQ ID NO: 1441008
cuuauucccaaaugagguc

SEQ ID NO: 1441010 - RNA, 19 nt, Artificial Sequence
  Description of Artificial Sequence: Synthetic oligonucleotide
  Sense strand starting at position 2577 of SEQ ID NO: 1243780
gggaauaagucucugccaa

SEQ ID NO: 1441011 - RNA, 19 nt, Artificial Sequence
  Description of Artificial Sequence: Synthetic oligonucleotide
  Antisense strand to SEQ ID NO: 1441010
uuggcagagacuuauuccc

SEQ ID NO: 1441012 - RNA, 19 nt, Artificial Sequence
  Description of Artificial Sequence: Synthetic oligonucleotide
  Sense strand starting at position 2578 of SEQ ID NO: 1243780
ggaauaagucucugccaac

SEQ ID NO: 1441013 - RNA, 19 nt, Artificial Sequence
  Description of Artificial Sequence: Synthetic oligonucleotide
  Antisense strand to SEQ ID NO: 1441012
guuggcagagacuuauucc

SEQ ID NO: 1441014 - RNA, 19 nt, Artificial Sequence
  Description of Artificial Sequence: Synthetic oligonucleotide
  Sense strand starting at position 2589 of SEQ ID NO: 1243780
cugccaacguaaucaaguu

SEQ ID NO: 1441015 - RNA, 19 nt, Artificial Sequence
  Description of Artificial Sequence: Synthetic oligonucleotide
  Antisense strand to SEQ ID NO: 1441014
aacuugauuacguuggcag

SEQ ID NO: 1441016 - RNA, 19 nt, Artificial Sequence
  Description of Artificial Sequence: Synthetic oligonucleotide
  Sense strand starting at position 2634 of SEQ ID NO: 1243780
agggaugggugcccuuaua

SEQ ID NO: 1441017 - RNA, 19 nt, Artificial Sequence
  Description of Artificial Sequence: Synthetic oligonucleotide
  Antisense strand to SEQ ID NO: 1441016
uauaagggcacccaucccu

SEQ ID NO: 1441018 - RNA, 19 nt, Artificial Sequence
  Description of Artificial Sequence: Synthetic oligonucleotide
  Sense strand starting at position 3576 of SEQ ID NO: 1243780
uguggaaauuguccgucca

SEQ ID NO: 1441019 - RNA, 19 nt, Artificial Sequence
  Description of Artificial Sequence: Synthetic oligonucleotide
  Antisense strand to SEQ ID NO: 1441018
uggacggacaauuuccaca

SEQ ID NO: 1441020 - RNA, 19 nt, Artificial Sequence
  Description of Artificial Sequence: Synthetic oligonucleotide
  Sense strand starting at position 3577 of SEQ ID NO: 1243780
guggaaauuguccguccau

SEQ ID NO: 1441021 - RNA, 19 nt, Artificial Sequence
  Description of Artificial Sequence: Synthetic oligonucleotide
  Antisense strand to SEQ ID NO: 1441020
auggacggacaauuuccac

SEQ ID NO: 1441022 - RNA, 19 nt, Artificial Sequence
  Description of Artificial Sequence: Synthetic oligonucleotide
  Sense strand starting at position 3578 of SEQ ID NO: 1243780
uggaaauuguccguccauc

SEQ ID NO: 1441023 - RNA, 19 nt, Artificial Sequence
  Description of Artificial Sequence: Synthetic oligonucleotide
  Antisense strand to SEQ ID NO: 1441022
gauggacggacaauuucca

SEQ ID NO: 1441024 - RNA, 19 nt, Artificial Sequence
  Description of Artificial Sequence: Synthetic oligonucleotide
  Sense strand starting at position 3678 of SEQ ID NO: 1243780
gcuagagucugacuccaag

SEQ ID NO: 1441025 - RNA, 19 nt, Artificial Sequence
  Description of Artificial Sequence: Synthetic oligonucleotide
  Antisense strand to SEQ ID NO: 1441024
cuuggagucagacucuagc

SEQ ID NO: 1441026 - RNA, 19 nt, Artificial Sequence
  Description of Artificial Sequence: Synthetic oligonucleotide
  Sense strand starting at position 3688 of SEQ ID NO: 1243780
gacuccaagucagaaugau

SEQ ID NO: 1441027 - RNA, 19 nt, Artificial Sequence
  Description of Artificial Sequence: Synthetic oligonucleotide
  Antisense strand to SEQ ID NO: 1441026
aucauucugacuuggaguc

SEQ ID NO: 1441028 - RNA, 19 nt, Artificial Sequence
  Description of Artificial Sequence: Synthetic oligonucleotide
  Sense strand starting at position 3728 of SEQ ID NO: 1243780
agcuauaucgucuguggag

SEQ ID NO: 1441029 - RNA, 19 nt, Artificial Sequence
  Description of Artificial Sequence: Synthetic oligonucleotide
  Antisense strand to SEQ ID NO: 1441028
cuccacagacgauauagcu

SEQ ID NO: 1441030 - RNA, 19 nt, Artificial Sequence
  Description of Artificial Sequence: Synthetic oligonucleotide
  Sense strand starting at position 3807 of SEQ ID NO: 1243780
agcaauagcgagcaauaaa

SEQ ID NO: 1441031 - RNA, 19 nt, Artificial Sequence
  Description of Artificial Sequence: Synthetic oligonucleotide
  Antisense strand to SEQ ID NO: 1441030
uuuauugcucgcuauugcu

SEQ ID NO: 1441032 - RNA, 19 nt, Artificial Sequence
  Description of Artificial Sequence: Synthetic oligonucleotide
  Sense strand starting at position 3923 of SEQ ID NO: 1243780
ggauguuuccuuuacagau

SEQ ID NO: 1441033 - RNA, 19 nt, Artificial Sequence
  Description of Artificial Sequence: Synthetic oligonucleotide
  Antisense strand to SEQ ID NO: 1441032
aucuguaaaggaaacaucc

SEQ ID NO: 1441034 - RNA, 19 nt, Artificial Sequence
  Description of Artificial Sequence: Synthetic oligonucleotide
  Sense strand starting at position 208 of SEQ ID NO: 1243781
acccaucaugccugggaaa

SEQ ID NO: 1441035 - RNA, 19 nt, Artificial Sequence
  Description of Artificial Sequence: Synthetic oligonucleotide
  Antisense strand to SEQ ID NO: 1441034
uuucccaggcaugaugggu

SEQ ID NO: 1441036 - RNA, 19 nt, Artificial Sequence
  Description of Artificial Sequence: Synthetic oligonucleotide
  Sense strand starting at position 333 of SEQ ID NO: 1243781
gcaguuucacagcgaggga

SEQ ID NO: 1441037 - RNA, 19 nt, Artificial Sequence
  Description of Artificial Sequence: Synthetic oligonucleotide
  Antisense strand to SEQ ID NO: 1441036
ucccucgcugugaaacugc

SEQ ID NO: 1441038 - RNA, 19 nt, Artificial Sequence
  Description of Artificial Sequence: Synthetic oligonucleotide
  Sense strand starting at position 452 of SEQ ID NO: 1243781
cccagugaaugcuuaugga

SEQ ID NO: 1441039 - RNA, 19 nt, Artificial Sequence
  Description of Artificial Sequence: Synthetic oligonucleotide
  Antisense strand to SEQ ID NO: 1441038
uccauaagcauucacuggg

SEQ ID NO: 1441040 - RNA, 19 nt, Artificial Sequence
  Description of Artificial Sequence: Synthetic oligonucleotide
  Sense strand starting at position 460 of SEQ ID NO: 1243781
augcuuauggaaggaauau

SEQ ID NO: 1441041 - RNA, 19 nt, Artificial Sequence
  Description of Artificial Sequence: Synthetic oligonucleotide
  Antisense strand to SEQ ID NO: 1441040
auauuccuuccauaagcau

SEQ ID NO: 1441042 - RNA, 19 nt, Artificial Sequence
  Description of Artificial Sequence: Synthetic oligonucleotide
  Sense strand starting at position 595 of SEQ ID NO: 1243781
ggagucuuuccaggcagaa

SEQ ID NO: 1441043 - RNA, 19 nt, Artificial Sequence
  Description of Artificial Sequence: Synthetic oligonucleotide
  Antisense strand to SEQ ID NO: 1441042
uucugccuggaaagacucc

SEQ ID NO: 1441044 - RNA, 19 nt, Artificial Sequence
  Description of Artificial Sequence: Synthetic oligonucleotide
  Sense strand starting at position 597 of SEQ ID NO: 1243781
agucuuuccaggcagaaag

SEQ ID NO: 1441045 - RNA, 19 nt, Artificial Sequence
  Description of Artificial Sequence: Synthetic oligonucleotide
  Antisense strand to SEQ ID NO: 1441044
cuuucugccuggaaagacu

SEQ ID NO: 1441046 - RNA, 19 nt, Artificial Sequence
  Description of Artificial Sequence: Synthetic oligonucleotide
  Sense strand starting at position 639 of SEQ ID NO: 1243781
cgaaucccaugcuuuacaa

SEQ ID NO: 1441047 - RNA, 19 nt, Artificial Sequence
  Description of Artificial Sequence: Synthetic oligonucleotide
  Antisense strand to SEQ ID NO: 1441046
uuguaaagcaugggauucg

SEQ ID NO: 1441048 - RNA, 19 nt, Artificial Sequence
  Description of Artificial Sequence: Synthetic oligonucleotide
  Sense strand starting at position 1124 of SEQ ID NO: 1243781
ugagaugagucacuaaauu

SEQ ID NO: 1441049 - RNA, 19 nt, Artificial Sequence
  Description of Artificial Sequence: Synthetic oligonucleotide
  Antisense strand to SEQ ID NO: 1441048
aauuuagugacucaucuca

SEQ ID NO: 1441050 - RNA, 19 nt, Artificial Sequence
  Description of Artificial Sequence: Synthetic oligonucleotide
  Sense strand starting at position 1151 of SEQ ID NO: 1243781
uguucuuagccucaccuua

SEQ ID NO: 1441051 - RNA, 19 nt, Artificial Sequence
  Description of Artificial Sequence: Synthetic oligonucleotide
  Antisense strand to SEQ ID NO: 1441050
uaaggugaggcuaagaaca

SEQ ID NO: 1441052 - RNA, 19 nt, Artificial Sequence
  Description of Artificial Sequence: Synthetic oligonucleotide
  Sense strand starting at position 1632 of SEQ ID NO: 1243781
cugucuuauagaugaggca

SEQ ID NO: 1441053 - RNA, 19 nt, Artificial Sequence
  Description of Artificial Sequence: Synthetic oligonucleotide
  Antisense strand to SEQ ID NO: 1441052
ugccucaucuauaagacag

SEQ ID NO: 1441054 - RNA, 19 nt, Artificial Sequence
  Description of Artificial Sequence: Synthetic oligonucleotide
  Sense strand starting at position 1824 of SEQ ID NO: 1243781
ggaaaucaguaagaaguaa

SEQ ID NO: 1441055 - RNA, 19 nt, Artificial Sequence
  Description of Artificial Sequence: Synthetic oligonucleotide
  Antisense strand to SEQ ID NO: 1441054
uuacuucuuacugauuucc

SEQ ID NO: 1441056 - RNA, 19 nt, Artificial Sequence
  Description of Artificial Sequence: Synthetic oligonucleotide
  Sense strand starting at position 2436 of SEQ ID NO: 1243781
ucacaaacacaguguuuga

SEQ ID NO: 1441057 - RNA, 19 nt, Artificial Sequence
  Description of Artificial Sequence: Synthetic oligonucleotide
  Antisense strand to SEQ ID NO: 1441056
ucaaacacuguguuuguga

SEQ ID NO: 1441058 - RNA, 19 nt, Artificial Sequence
  Description of Artificial Sequence: Synthetic oligonucleotide
  Sense strand starting at position 2464 of SEQ ID NO: 1243781
cucagccuugagcaagauu

SEQ ID NO: 1441059 - RNA, 19 nt, Artificial Sequence
  Description of Artificial Sequence: Synthetic oligonucleotide
  Antisense strand to SEQ ID NO: 1441058
aaucuugcucaaggcugag

SEQ ID NO: 1441060 - RNA, 19 nt, Artificial Sequence
  Description of Artificial Sequence: Synthetic oligonucleotide
  Sense strand starting at position 2494 of SEQ ID NO: 1243781
ggaggugaauuacaaacaa

SEQ ID NO: 1441061 - RNA, 19 nt, Artificial Sequence
  Description of Artificial Sequence: Synthetic oligonucleotide
  Antisense strand to SEQ ID NO: 1441060
uuguuuguaauucaccucc

SEQ ID NO: 1441062 - RNA, 19 nt, Artificial Sequence
  Description of Artificial Sequence: Synthetic oligonucleotide
  Sense strand starting at position 2548 of SEQ ID NO: 1243781
gugguaugggcagagugau

SEQ ID NO: 1441063 - RNA, 19 nt, Artificial Sequence
  Description of Artificial Sequence: Synthetic oligonucleotide
  Antisense strand to SEQ ID NO: 1441062
aucacucugcccauaccac

SEQ ID NO: 1441064 - RNA, 19 nt, Artificial Sequence
  Description of Artificial Sequence: Synthetic oligonucleotide
  Sense strand starting at position 2554 of SEQ ID NO: 1243781
ugggcagagugauucugaa

SEQ ID NO: 1441065 - RNA, 19 nt, Artificial Sequence
  Description of Artificial Sequence: Synthetic oligonucleotide
  Antisense strand to SEQ ID NO: 1441064
uucagaaucacucugccca

SEQ ID NO: 1441066 - RNA, 19 nt, Artificial Sequence
  Description of Artificial Sequence: Synthetic oligonucleotide
  Sense strand starting at position 2574 of SEQ ID NO: 1243781
cgauuugagaugugcugca

SEQ ID NO: 1441067 - RNA, 19 nt, Artificial Sequence
  Description of Artificial Sequence: Synthetic oligonucleotide
  Antisense strand to SEQ ID NO: 1441066
ugcagcacaucucaaaucg

SEQ ID NO: 1441068 - RNA, 19 nt, Artificial Sequence
  Description of Artificial Sequence: Synthetic oligonucleotide
  Sense strand starting at position 2695 of SEQ ID NO: 1243781
agggcauggguuggaauua

SEQ ID NO: 1441069 - RNA, 19 nt, Artificial Sequence
  Description of Artificial Sequence: Synthetic oligonucleotide
  Antisense strand to SEQ ID NO: 1441068
uaauuccaacccaugcccu

SEQ ID NO: 1441070 - RNA, 19 nt, Artificial Sequence
  Description of Artificial Sequence: Synthetic oligonucleotide
  Sense strand starting at position 2708 of SEQ ID NO: 1243781
gaauuagagguauggguga

SEQ ID NO: 1441071 - RNA, 19 nt, Artificial Sequence
  Description of Artificial Sequence: Synthetic oligonucleotide
  Antisense strand to SEQ ID NO: 1441070
ucacccauaccucuaauuc

SEQ ID NO: 1441072 - RNA, 19 nt, Artificial Sequence
  Description of Artificial Sequence: Synthetic oligonucleotide
  Sense strand starting at position 2710 of SEQ ID NO: 1243781
auuagagguaugggugaga

SEQ ID NO: 1441073 - RNA, 19 nt, Artificial Sequence
  Description of Artificial Sequence: Synthetic oligonucleotide
  Antisense strand to SEQ ID NO: 1441072
ucucacccauaccucuaau

SEQ ID NO: 1441074 - RNA, 19 nt, Artificial Sequence
  Description of Artificial Sequence: Synthetic oligonucleotide
  Sense strand starting at position 2729 of SEQ ID NO: 1243781
acccaugauuucugaagua

SEQ ID NO: 1441075 - RNA, 19 nt, Artificial Sequence
  Description of Artificial Sequence: Synthetic oligonucleotide
  Antisense strand to SEQ ID NO: 1441074
uacuucagaaaucaugggu

SEQ ID NO: 1441076 - RNA, 19 nt, Artificial Sequence
  Description of Artificial Sequence: Synthetic oligonucleotide
  Sense strand starting at position 2743 of SEQ ID NO: 1243781
aaguaugcacgugaacuau

SEQ ID NO: 1441077 - RNA, 19 nt, Artificial Sequence
  Description of Artificial Sequence: Synthetic oligonucleotide
  Antisense strand to SEQ ID NO: 1441076
auaguucacgugcauacuu

SEQ ID NO: 1441078 - RNA, 19 nt, Artificial Sequence
  Description of Artificial Sequence: Synthetic oligonucleotide
  Sense strand starting at position 2749 of SEQ ID NO: 1243781
gcacgugaacuauauguau

SEQ ID NO: 1441079 - RNA, 19 nt, Artificial Sequence
  Description of Artificial Sequence: Synthetic oligonucleotide
  Antisense strand to SEQ ID NO: 1441078
auacauauaguucacgugc

SEQ ID NO: 1441080 - RNA, 19 nt, Artificial Sequence
  Description of Artificial Sequence: Synthetic oligonucleotide
  Sense strand starting at position 2752 of SEQ ID NO: 1243781
cgugaacuauauguauacu

SEQ ID NO: 1441081 - RNA, 19 nt, Artificial Sequence
  Description of Artificial Sequence: Synthetic oligonucleotide
  Antisense strand to SEQ ID NO: 1441080
aguauacauauaguucacg

SEQ ID NO: 1441082 - RNA, 19 nt, Artificial Sequence
  Description of Artificial Sequence: Synthetic oligonucleotide
  Sense strand starting at position 2763 of SEQ ID NO: 1243781
uguauacuuccaugcauau

SEQ ID NO: 1441083 - RNA, 19 nt, Artificial Sequence
  Description of Artificial Sequence: Synthetic oligonucleotide
  Antisense strand to SEQ ID NO: 1441082
auaugcauggaaguauaca

SEQ ID NO: 1441084 - RNA, 19 nt, Artificial Sequence
  Description of Artificial Sequence: Synthetic oligonucleotide
  Sense strand starting at position 2791 of SEQ ID NO: 1243781
uguguacacagacaaguau

SEQ ID NO: 1441085 - RNA, 19 nt, Artificial Sequence
  Description of Artificial Sequence: Synthetic oligonucleotide
  Antisense strand to SEQ ID NO: 1441084
auacuugucuguguacaca

SEQ ID NO: 1441086 - RNA, 19 nt, Artificial Sequence
  Description of Artificial Sequence: Synthetic oligonucleotide
  Sense strand starting at position 2824 of SEQ ID NO: 1243781
guauguauauguccauaca

SEQ ID NO: 1441087 - RNA, 19 nt, Artificial Sequence
  Description of Artificial Sequence: Synthetic oligonucleotide
  Antisense strand to SEQ ID NO: 1441086
uguauggacauauacauac

SEQ ID NO: 1441088 - RNA, 19 nt, Artificial Sequence
  Description of Artificial Sequence: Synthetic oligonucleotide
  Sense strand starting at position 2827 of SEQ ID NO: 1243781
uguauauguccauacaugu

SEQ ID NO: 1441089 - RNA, 19 nt, Artificial Sequence
  Description of Artificial Sequence: Synthetic oligonucleotide
  Antisense strand to SEQ ID NO: 1441088
acauguauggacauauaca

SEQ ID NO: 1441090 - RNA, 19 nt, Artificial Sequence
  Description of Artificial Sequence: Synthetic oligonucleotide
  Sense strand starting at position 2848 of SEQ ID NO: 1243781
guguguuuccuagcucugu

SEQ ID NO: 1441091 - RNA, 19 nt, Artificial Sequence
  Description of Artificial Sequence: Synthetic oligonucleotide
  Antisense strand to SEQ ID NO: 1441090
acagagcuaggaaacacac

SEQ ID NO: 1441092 - RNA, 19 nt, Artificial Sequence
  Description of Artificial Sequence: Synthetic oligonucleotide
  Sense strand starting at position 2896 of SEQ ID NO: 1243781
ccuaguagugauggacaca

SEQ ID NO: 1441093 - RNA, 19 nt, Artificial Sequence
  Description of Artificial Sequence: Synthetic oligonucleotide
  Antisense strand to SEQ ID NO: 1441092
uguguccaucacuacuagg

SEQ ID NO: 1441094 - RNA, 19 nt, Artificial Sequence
  Description of Artificial Sequence: Synthetic oligonucleotide
  Sense strand starting at position 3421 of SEQ ID NO: 1243781
ggucacaucuggguccauu

SEQ ID NO: 1441095 - RNA, 19 nt, Artificial Sequence
  Description of Artificial Sequence: Synthetic oligonucleotide
  Antisense strand to SEQ ID NO: 1441094
aauggacccagaugugacc

SEQ ID NO: 1441096 - RNA, 19 nt, Artificial Sequence
  Description of Artificial Sequence: Synthetic oligonucleotide
  Sense strand starting at position 3431 of SEQ ID NO: 1243781
ggguccauuugagaccaaa

SEQ ID NO: 1441097 - RNA, 19 nt, Artificial Sequence
  Description of Artificial Sequence: Synthetic oligonucleotide
  Antisense strand to SEQ ID NO: 1441096
uuuggucucaaauggaccc

SEQ ID NO: 1441098 - RNA, 19 nt, Artificial Sequence
  Description of Artificial Sequence: Synthetic oligonucleotide
  Sense strand starting at position 3697 of SEQ ID NO: 1243781
agcuacauccugggaaaug

SEQ ID NO: 1441099 - RNA, 19 nt, Artificial Sequence
  Description of Artificial Sequence: Synthetic oligonucleotide
  Antisense strand to SEQ ID NO: 1441098
cauuucccaggauguagcu

SEQ ID NO: 1441100 - RNA, 19 nt, Artificial Sequence
  Description of Artificial Sequence: Synthetic oligonucleotide
  Sense strand starting at position 3765 of SEQ ID NO: 1243781
auuuaucaguugcagggaa

SEQ ID NO: 1441101 - RNA, 19 nt, Artificial Sequence
  Description of Artificial Sequence: Synthetic oligonucleotide
  Antisense strand to SEQ ID NO: 1441100
uucccugcaacugauaaau

SEQ ID NO: 1441102 - RNA, 19 nt, Artificial Sequence
  Description of Artificial Sequence: Synthetic oligonucleotide
  Sense strand starting at position 3767 of SEQ ID NO: 1243781
uuaucaguugcagggaaga

SEQ ID NO: 1441103 - RNA, 19 nt, Artificial Sequence
  Description of Artificial Sequence: Synthetic oligonucleotide
  Antisense strand to SEQ ID NO: 1441102
ucuucccugcaacugauaa

SEQ ID NO: 1441104 - RNA, 19 nt, Artificial Sequence
  Description of Artificial Sequence: Synthetic oligonucleotide
  Sense strand starting at position 3792 of SEQ ID NO: 1243781
agagccauucugcaguaga

SEQ ID NO: 1441105 - RNA, 19 nt, Artificial Sequence
  Description of Artificial Sequence: Synthetic oligonucleotide
  Antisense strand to SEQ ID NO: 1441104
ucuacugcagaauggcucu

SEQ ID NO: 1441106 - RNA, 19 nt, Artificial Sequence
  Description of Artificial Sequence: Synthetic oligonucleotide
  Sense strand starting at position 3795 of SEQ ID NO: 1243781
gccauucugcaguagagca

SEQ ID NO: 1441107 - RNA, 19 nt, Artificial Sequence
  Description of Artificial Sequence: Synthetic oligonucleotide
  Antisense strand to SEQ ID NO: 1441106
ugcucuacugcagaauggc

SEQ ID NO: 1441108 - RNA, 19 nt, Artificial Sequence
  Description of Artificial Sequence: Synthetic oligonucleotide
  Sense strand starting at position 3816 of SEQ ID NO: 1243781
uggccugcaccuugacaaa

SEQ ID NO: 1441109 - RNA, 19 nt, Artificial Sequence
  Description of Artificial Sequence: Synthetic oligonucleotide
  Antisense strand to SEQ ID NO: 1441108
uuugucaaggugcaggcca

SEQ ID NO: 1441110 - RNA, 19 nt, Artificial Sequence
  Description of Artificial Sequence: Synthetic oligonucleotide
  Sense strand starting at position 3950 of SEQ ID NO: 1243781
ucuguauacaugugggaaa

SEQ ID NO: 1441111 - RNA, 19 nt, Artificial Sequence
  Description of Artificial Sequence: Synthetic oligonucleotide
  Antisense strand to SEQ ID NO: 1441110
uuucccacauguauacaga

SEQ ID NO: 1441112 - RNA, 19 nt, Artificial Sequence
  Description of Artificial Sequence: Synthetic oligonucleotide
  Sense strand starting at position 3952 of SEQ ID NO: 1243781
uguauacaugugggaaaca

SEQ ID NO: 1441113 - RNA, 19 nt, Artificial Sequence
  Description of Artificial Sequence: Synthetic oligonucleotide
  Antisense strand to SEQ ID NO: 1441112
uguuucccacauguauaca

SEQ ID NO: 1441114 - RNA, 19 nt, Artificial Sequence
  Description of Artificial Sequence: Synthetic oligonucleotide
  Sense strand starting at position 165 of SEQ ID NO: 1243782
ucucuaguaguuuauccaa

SEQ ID NO: 1441115 - RNA, 19 nt, Artificial Sequence
  Description of Artificial Sequence: Synthetic oligonucleotide
  Antisense strand to SEQ ID NO: 1441114
uuggauaaacuacuagaga

SEQ ID NO: 1441116 - RNA, 19 nt, Artificial Sequence
  Description of Artificial Sequence: Synthetic oligonucleotide
  Sense strand starting at position 234 of SEQ ID NO: 1243782
auggaugcucuuggcacaa

SEQ ID NO: 1441117 - RNA, 19 nt, Artificial Sequence
  Description of Artificial Sequence: Synthetic oligonucleotide
  Antisense strand to SEQ ID NO: 1441116
uugugccaagagcauccau

SEQ ID NO: 1441118 - RNA, 19 nt, Artificial Sequence
  Description of Artificial Sequence: Synthetic oligonucleotide
  Sense strand starting at position 610 of SEQ ID NO: 1243782
ucugaucuauaccauagga

SEQ ID NO: 1441119 - RNA, 19 nt, Artificial Sequence
  Description of Artificial Sequence: Synthetic oligonucleotide
  Antisense strand to SEQ ID NO: 1441118
uccuaugguauagaucaga

SEQ ID NO: 1441120 - RNA, 19 nt, Artificial Sequence
  Description of Artificial Sequence: Synthetic oligonucleotide
  Sense strand starting at position 635 of SEQ ID NO: 1243782
cugucauacucacuuccga

SEQ ID NO: 1441121 - RNA, 19 nt, Artificial Sequence
  Description of Artificial Sequence: Synthetic oligonucleotide
  Antisense strand to SEQ ID NO: 1441120
ucggaagugaguaugacag

SEQ ID NO: 1441122 - RNA, 19 nt, Artificial Sequence
  Description of Artificial Sequence: Synthetic oligonucleotide
  Sense strand starting at position 841 of SEQ ID NO: 1243782
gaggguaacuugcugaaga

SEQ ID NO: 1441123 - RNA, 19 nt, Artificial Sequence
  Description of Artificial Sequence: Synthetic oligonucleotide
  Antisense strand to SEQ ID NO: 1441122
ucuucagcaaguuacccuc

SEQ ID NO: 1441124 - RNA, 19 nt, Artificial Sequence
  Description of Artificial Sequence: Synthetic oligonucleotide
  Sense strand starting at position 843 of SEQ ID NO: 1243782
ggguaacuugcugaagacu

SEQ ID NO: 1441125 - RNA, 19 nt, Artificial Sequence
  Description of Artificial Sequence: Synthetic oligonucleotide
  Antisense strand to SEQ ID NO: 1441124
agucuucagcaaguuaccc

SEQ ID NO: 1441126 - RNA, 19 nt, Artificial Sequence
  Description of Artificial Sequence: Synthetic oligonucleotide
  Sense strand starting at position 867 of SEQ ID NO: 1243782
gcuaaagccuaugcucuua

SEQ ID NO: 1441127 - RNA, 19 nt, Artificial Sequence
  Description of Artificial Sequence: Synthetic oligonucleotide
  Antisense strand to SEQ ID NO: 1441126
uaagagcauaggcuuuagc

SEQ ID NO: 1441128 - RNA, 19 nt, Artificial Sequence
  Description of Artificial Sequence: Synthetic oligonucleotide
  Sense strand starting at position 915 of SEQ ID NO: 1243782
gcccuaaauccgugacagu

SEQ ID NO: 1441129 - RNA, 19 nt, Artificial Sequence
  Description of Artificial Sequence: Synthetic oligonucleotide
  Antisense strand to SEQ ID NO: 1441128
acugucacggauuuagggc

SEQ ID NO: 1441130 - RNA, 19 nt, Artificial Sequence
  Description of Artificial Sequence: Synthetic oligonucleotide
  Sense strand starting at position 925 of SEQ ID NO: 1243782
cgugacagugugugagaau

SEQ ID NO: 1441131 - RNA, 19 nt, Artificial Sequence
  Description of Artificial Sequence: Synthetic oligonucleotide
  Antisense strand to SEQ ID NO: 1441130
auucucacacacugucacg

SEQ ID NO: 1441132 - RNA, 19 nt, Artificial Sequence
  Description of Artificial Sequence: Synthetic oligonucleotide
  Sense strand starting at position 937 of SEQ ID NO: 1243782
ugagaaugucgauguugga

SEQ ID NO: 1441133 - RNA, 19 nt, Artificial Sequence
  Description of Artificial Sequence: Synthetic oligonucleotide
  Antisense strand to SEQ ID NO: 1441132
uccaacaucgacauucuca

SEQ ID NO: 1441134 - RNA, 19 nt, Artificial Sequence
  Description of Artificial Sequence: Synthetic oligonucleotide
  Sense strand starting at position 941 of SEQ ID NO: 1243782
aaugucgauguuggaaaua

SEQ ID NO: 1441135 - RNA, 19 nt, Artificial Sequence
  Description of Artificial Sequence: Synthetic oligonucleotide
  Antisense strand to SEQ ID NO: 1441134
uauuuccaacaucgacauu

SEQ ID NO: 1441136 - RNA, 19 nt, Artificial Sequence
  Description of Artificial Sequence: Synthetic oligonucleotide
  Sense strand starting at position 961 of SEQ ID NO: 1243782
augaccugaguuuauguua

SEQ ID NO: 1441137 - RNA, 19 nt, Artificial Sequence
  Description of Artificial Sequence: Synthetic oligonucleotide
  Antisense strand to SEQ ID NO: 1441136
uaacauaaacucaggucau

SEQ ID NO: 1441138 - RNA, 19 nt, Artificial Sequence
  Description of Artificial Sequence: Synthetic oligonucleotide
  Sense strand starting at position 1059 of SEQ ID NO: 1243782
gcagaagacauggguuagu

SEQ ID NO: 1441139 - RNA, 19 nt, Artificial Sequence
  Description of Artificial Sequence: Synthetic oligonucleotide
  Antisense strand to SEQ ID NO: 1441138
acuaacccaugucuucugc

SEQ ID NO: 1441140 - RNA, 19 nt, Artificial Sequence
  Description of Artificial Sequence: Synthetic oligonucleotide
  Sense strand starting at position 1069 of SEQ ID NO: 1243782
uggguuaguucugugauuu

SEQ ID NO: 1441141 - RNA, 19 nt, Artificial Sequence
  Description of Artificial Sequence: Synthetic oligonucleotide
  Antisense strand to SEQ ID NO: 1441140
aaaucacagaacuaaccca

SEQ ID NO: 1441142 - RNA, 19 nt, Artificial Sequence
  Description of Artificial Sequence: Synthetic oligonucleotide
  Sense strand starting at position 1070 of SEQ ID NO: 1243782
ggguuaguucugugauuuc

SEQ ID NO: 1441143 - RNA, 19 nt, Artificial Sequence
  Description of Artificial Sequence: Synthetic oligonucleotide
  Antisense strand to SEQ ID NO: 1441142
gaaaucacagaacuaaccc

SEQ ID NO: 1441144 - RNA, 19 nt, Artificial Sequence
  Description of Artificial Sequence: Synthetic oligonucleotide
  Sense strand starting at position 1077 of SEQ ID NO: 1243782
uucugugauuuccagaggu

SEQ ID NO: 1441145 - RNA, 19 nt, Artificial Sequence
  Description of Artificial Sequence: Synthetic oligonucleotide
  Antisense strand to SEQ ID NO: 1441144
accucuggaaaucacagaa

SEQ ID NO: 1441146 - RNA, 19 nt, Artificial Sequence
  Description of Artificial Sequence: Synthetic oligonucleotide
  Sense strand starting at position 1171 of SEQ ID NO: 1243782
gguaaaucuuuaucaagua

SEQ ID NO: 1441147 - RNA, 19 nt, Artificial Sequence
  Description of Artificial Sequence: Synthetic oligonucleotide
  Antisense strand to SEQ ID NO: 1441146
uacuugauaaagauuuacc

SEQ ID NO: 1441148 - RNA, 19 nt, Artificial Sequence
  Description of Artificial Sequence: Synthetic oligonucleotide
  Sense strand starting at position 1321 of SEQ ID NO: 1243782
gcaaacucgcauugggaua

SEQ ID NO: 1441149 - RNA, 19 nt, Artificial Sequence
  Description of Artificial Sequence: Synthetic oligonucleotide
  Antisense strand to SEQ ID NO: 1441148
uaucccaaugcgaguuugc

SEQ ID NO: 1441150 - RNA, 19 nt, Artificial Sequence
  Description of Artificial Sequence: Synthetic oligonucleotide
  Sense strand starting at position 2002 of SEQ ID NO: 1243782
acgucuaucggugauguaa

SEQ ID NO: 1441151 - RNA, 19 nt, Artificial Sequence
  Description of Artificial Sequence: Synthetic oligonucleotide
  Antisense strand to SEQ ID NO: 1441150
uuacaucaccgauagacgu

SEQ ID NO: 1441152 - RNA, 19 nt, Artificial Sequence
  Description of Artificial Sequence: Synthetic oligonucleotide
  Sense strand starting at position 2201 of SEQ ID NO: 1243782
acuucuaccuacguuugaa

SEQ ID NO: 1441153 - RNA, 19 nt, Artificial Sequence
  Description of Artificial Sequence: Synthetic oligonucleotide
  Antisense strand to SEQ ID NO: 1441152
uucaaacguagguagaagu

SEQ ID NO: 1441154 - RNA, 19 nt, Artificial Sequence
  Description of Artificial Sequence: Synthetic oligonucleotide
  Sense strand starting at position 2211 of SEQ ID NO: 1243782
acguuugaagcaggucaau

SEQ ID NO: 1441155 - RNA, 19 nt, Artificial Sequence
  Description of Artificial Sequence: Synthetic oligonucleotide
  Antisense strand to SEQ ID NO: 1441154
auugaccugcuucaaacgu

SEQ ID NO: 1441156 - RNA, 19 nt, Artificial Sequence
  Description of Artificial Sequence: Synthetic oligonucleotide
  Sense strand starting at position 2283 of SEQ ID NO: 1243782
uguagugcugcgucagauu

SEQ ID NO: 1441157 - RNA, 19 nt, Artificial Sequence
  Description of Artificial Sequence: Synthetic oligonucleotide
  Antisense strand to SEQ ID NO: 1441156
aaucugacgcagcacuaca

SEQ ID NO: 1441158 - RNA, 19 nt, Artificial Sequence
  Description of Artificial Sequence: Synthetic oligonucleotide
  Sense strand starting at position 2306 of SEQ ID NO: 1243782
gcaccagccuuguuuaaga

SEQ ID NO: 1441159 - RNA, 19 nt, Artificial Sequence
  Description of Artificial Sequence: Synthetic oligonucleotide
  Antisense strand to SEQ ID NO: 1441158
ucuuaaacaaggcuggugc

SEQ ID NO: 1441160 - RNA, 19 nt, Artificial Sequence
  Description of Artificial Sequence: Synthetic oligonucleotide
  Sense strand starting at position 2308 of SEQ ID NO: 1243782
accagccuuguuuaagaua

SEQ ID NO: 1441161 - RNA, 19 nt, Artificial Sequence
  Description of Artificial Sequence: Synthetic oligonucleotide
  Antisense strand to SEQ ID NO: 1441160
uaucuuaaacaaggcuggu

SEQ ID NO: 1441162 - RNA, 19 nt, Artificial Sequence
  Description of Artificial Sequence: Synthetic oligonucleotide
  Sense strand starting at position 2342 of SEQ ID NO: 1243782
accaguugucugcagugaa

SEQ ID NO: 1441163 - RNA, 19 nt, Artificial Sequence
  Description of Artificial Sequence: Synthetic oligonucleotide
  Antisense strand to SEQ ID NO: 1441162
uucacugcagacaacuggu

SEQ ID NO: 1441164 - RNA, 19 nt, Artificial Sequence
  Description of Artificial Sequence: Synthetic oligonucleotide
  Sense strand starting at position 2458 of SEQ ID NO: 1243782
guaugaugccaguauuacc

SEQ ID NO: 1441165 - RNA, 19 nt, Artificial Sequence
  Description of Artificial Sequence: Synthetic oligonucleotide
  Antisense strand to SEQ ID NO: 1441164
gguaauacuggcaucauac

SEQ ID NO: 1441166 - RNA, 19 nt, Artificial Sequence
  Description of Artificial Sequence: Synthetic oligonucleotide
  Sense strand starting at position 2572 of SEQ ID NO: 1243782
aggugaccuccuugccuua

SEQ ID NO: 1441167 - RNA, 19 nt, Artificial Sequence
  Description of Artificial Sequence: Synthetic oligonucleotide
  Antisense strand to SEQ ID NO: 1441166
uaaggcaaggaggucaccu

SEQ ID NO: 1441168 - RNA, 19 nt, Artificial Sequence
  Description of Artificial Sequence: Synthetic oligonucleotide
  Sense strand starting at position 2593 of SEQ ID NO: 1243782
uuccuuaguaguugggaca

SEQ ID NO: 1441169 - RNA, 19 nt, Artificial Sequence
  Description of Artificial Sequence: Synthetic oligonucleotide
  Antisense strand to SEQ ID NO: 1441168
ugucccaacuacuaaggaa

SEQ ID NO: 1441170 - RNA, 19 nt, Artificial Sequence
  Description of Artificial Sequence: Synthetic oligonucleotide
  Sense strand starting at position 2801 of SEQ ID NO: 1243782
aguagaaacagauguugau

SEQ ID NO: 1441171 - RNA, 19 nt, Artificial Sequence
  Description of Artificial Sequence: Synthetic oligonucleotide
  Antisense strand to SEQ ID NO: 1441170
aucaacaucuguuucuacu

SEQ ID NO: 1441172 - RNA, 19 nt, Artificial Sequence
  Description of Artificial Sequence: Synthetic oligonucleotide
  Sense strand starting at position 2878 of SEQ ID NO: 1243782
ggcauuggccaccauugaa

SEQ ID NO: 1441173 - RNA, 19 nt, Artificial Sequence
  Description of Artificial Sequence: Synthetic oligonucleotide
  Antisense strand to SEQ ID NO: 1441172
uucaaugguggccaaugcc

SEQ ID NO: 1441174 - RNA, 19 nt, Artificial Sequence
  Description of Artificial Sequence: Synthetic oligonucleotide
  Sense strand starting at position 2918 of SEQ ID NO: 1243782
ggaccauuauaaggauaua

SEQ ID NO: 1441175 - RNA, 19 nt, Artificial Sequence
  Description of Artificial Sequence: Synthetic oligonucleotide
  Antisense strand to SEQ ID NO: 1441174
uauauccuuauaauggucc

SEQ ID NO: 1441176 - RNA, 19 nt, Artificial Sequence
  Description of Artificial Sequence: Synthetic oligonucleotide
  Sense strand starting at position 2971 of SEQ ID NO: 1243782
aggagugcacguuaauaau

SEQ ID NO: 1441177 - RNA, 19 nt, Artificial Sequence
  Description of Artificial Sequence: Synthetic oligonucleotide
  Antisense strand to SEQ ID NO: 1441176
auuauuaacgugcacuccu

SEQ ID NO: 1441178 - RNA, 19 nt, Artificial Sequence
  Description of Artificial Sequence: Synthetic oligonucleotide
  Sense strand starting at position 3008 of SEQ ID NO: 1243782
gccaccauggcauagaauu

SEQ ID NO: 1441179 - RNA, 19 nt, Artificial Sequence
  Description of Artificial Sequence: Synthetic oligonucleotide
  Antisense strand to SEQ ID NO: 1441178
aauucuaugccaugguggc

SEQ ID NO: 1441180 - RNA, 19 nt, Artificial Sequence
  Description of Artificial Sequence: Synthetic oligonucleotide
  Sense strand starting at position 3019 of SEQ ID NO: 1243782
auagaauucuucccugagu

SEQ ID NO: 1441181 - RNA, 19 nt, Artificial Sequence
  Description of Artificial Sequence: Synthetic oligonucleotide
  Antisense strand to SEQ ID NO: 1441180
acucagggaagaauucuau

SEQ ID NO: 1441182 - RNA, 19 nt, Artificial Sequence
  Description of Artificial Sequence: Synthetic oligonucleotide
  Sense strand starting at position 3021 of SEQ ID NO: 1243782
agaauucuucccugaguaa

SEQ ID NO: 1441183 - RNA, 19 nt, Artificial Sequence
  Description of Artificial Sequence: Synthetic oligonucleotide
  Antisense strand to SEQ ID NO: 1441182
uuacucagggaagaauucu

SEQ ID NO: 1441184 - RNA, 19 nt, Artificial Sequence
  Description of Artificial Sequence: Synthetic oligonucleotide
  Sense strand starting at position 3337 of SEQ ID NO: 1243782
ccggccuuuccugaguaaa

SEQ ID NO: 1441185 - RNA, 19 nt, Artificial Sequence
  Description of Artificial Sequence: Synthetic oligonucleotide
  Antisense strand to SEQ ID NO: 1441184
uuuacucaggaaaggccgg

SEQ ID NO: 1441186 - RNA, 19 nt, Artificial Sequence
  Description of Artificial Sequence: Synthetic oligonucleotide
  Sense strand starting at position 3379 of SEQ ID NO: 1243782
ggauccugauguuuaucaa

SEQ ID NO: 1441187 - RNA, 19 nt, Artificial Sequence
  Description of Artificial Sequence: Synthetic oligonucleotide
  Antisense strand to SEQ ID NO: 1441186
uugauaaacaucaggaucc

SEQ ID NO: 1441188 - RNA, 19 nt, Artificial Sequence
  Description of Artificial Sequence: Synthetic oligonucleotide
  Sense strand starting at position 3843 of SEQ ID NO: 1243782
aauggaggauaauaugauu

SEQ ID NO: 1441189 - RNA, 19 nt, Artificial Sequence
  Description of Artificial Sequence: Synthetic oligonucleotide
  Antisense strand to SEQ ID NO: 1441188
aaucauauuauccuccauu

SEQ ID NO: 1441190 - RNA, 19 nt, Artificial Sequence
  Description of Artificial Sequence: Synthetic oligonucleotide
  Sense strand starting at position 3906 of SEQ ID NO: 1243782
cagacuaaauuggugcaaa

SEQ ID NO: 1441191 - RNA, 19 nt, Artificial Sequence
  Description of Artificial Sequence: Synthetic oligonucleotide
  Antisense strand to SEQ ID NO: 1441190
uuugcaccaauuuagucug

SEQ ID NO: 1441192 - RNA, 19 nt, Artificial Sequence
  Description of Artificial Sequence: Synthetic oligonucleotide
  Sense strand starting at position 3957 of SEQ ID NO: 1243782
aagugauagucugccacuu

SEQ ID NO: 1441193 - RNA, 19 nt, Artificial Sequence
  Description of Artificial Sequence: Synthetic oligonucleotide
  Antisense strand to SEQ ID NO: 1441192
aaguggcagacuaucacuu

SEQ ID NO: 1441194 - RNA, 19 nt, Artificial Sequence
  Description of Artificial Sequence: Synthetic oligonucleotide
  Sense strand starting at position 228 of SEQ ID NO: 1243783
ggccaagucugagagggaa

SEQ ID NO: 1441195 - RNA, 19 nt, Artificial Sequence
  Description of Artificial Sequence: Synthetic oligonucleotide
  Antisense strand to SEQ ID NO: 1441194
uucccucucagacuuggcc

SEQ ID NO: 1441196 - RNA, 19 nt, Artificial Sequence
  Description of Artificial Sequence: Synthetic oligonucleotide
  Sense strand starting at position 746 of SEQ ID NO: 1243783
cgagucauguuguccuacu

SEQ ID NO: 1441197 - RNA, 19 nt, Artificial Sequence
  Description of Artificial Sequence: Synthetic oligonucleotide
  Antisense strand to SEQ ID NO: 1441196
aguaggacaacaugacucg

SEQ ID NO: 1441198 - RNA, 19 nt, Artificial Sequence
  Description of Artificial Sequence: Synthetic oligonucleotide
  Sense strand starting at position 747 of SEQ ID NO: 1243783
gagucauguuguccuacug

SEQ ID NO: 1441199 - RNA, 19 nt, Artificial Sequence
  Description of Artificial Sequence: Synthetic oligonucleotide
  Antisense strand to SEQ ID NO: 1441198
caguaggacaacaugacuc

SEQ ID NO: 1441200 - RNA, 19 nt, Artificial Sequence
  Description of Artificial Sequence: Synthetic oligonucleotide
  Sense strand starting at position 846 of SEQ ID NO: 1243783
agaggaaggugacauuaga

SEQ ID NO: 1441201 - RNA, 19 nt, Artificial Sequence
  Description of Artificial Sequence: Synthetic oligonucleotide
  Antisense strand to SEQ ID NO: 1441200
ucuaaugucaccuuccucu

SEQ ID NO: 1441202 - RNA, 19 nt, Artificial Sequence
  Description of Artificial Sequence: Synthetic oligonucleotide
  Sense strand starting at position 902 of SEQ ID NO: 1243783
cugugugacugugacaagu

SEQ ID NO: 1441203 - RNA, 19 nt, Artificial Sequence
  Description of Artificial Sequence: Synthetic oligonucleotide
  Antisense strand to SEQ ID NO: 1441202
acuugucacagucacacag

SEQ ID NO: 1441204 - RNA, 19 nt, Artificial Sequence
  Description of Artificial Sequence: Synthetic oligonucleotide
  Sense strand starting at position 904 of SEQ ID NO: 1243783
gugugacugugacaaguca

SEQ ID NO: 1441205 - RNA, 19 nt, Artificial Sequence
  Description of Artificial Sequence: Synthetic oligonucleotide
  Antisense strand to SEQ ID NO: 1441204
ugacuugucacagucacac

SEQ ID NO: 1441206 - RNA, 19 nt, Artificial Sequence
  Description of Artificial Sequence: Synthetic oligonucleotide
  Sense strand starting at position 997 of SEQ ID NO: 1243783
agugccugaccuugucaua

SEQ ID NO: 1441207 - RNA, 19 nt, Artificial Sequence
  Description of Artificial Sequence: Synthetic oligonucleotide
  Antisense strand to SEQ ID NO: 1441206
uaugacaaggucaggcacu

SEQ ID NO: 1441208 - RNA, 19 nt, Artificial Sequence
  Description of Artificial Sequence: Synthetic oligonucleotide
  Sense strand starting at position 1002 of SEQ ID NO: 1243783
cugaccuugucauaugcaa

SEQ ID NO: 1441209 - RNA, 19 nt, Artificial Sequence
  Description of Artificial Sequence: Synthetic oligonucleotide
  Antisense strand to SEQ ID NO: 1441208
uugcauaugacaaggucag

SEQ ID NO: 1441210 - RNA, 19 nt, Artificial Sequence
  Description of Artificial Sequence: Synthetic oligonucleotide
  Sense strand starting at position 1047 of SEQ ID NO: 1243783
uccugacaugugggcaaau

SEQ ID NO: 1441211 - RNA, 19 nt, Artificial Sequence
  Description of Artificial Sequence: Synthetic oligonucleotide
  Antisense strand to SEQ ID NO: 1441210
auuugcccacaugucagga

SEQ ID NO: 1441212 - RNA, 19 nt, Artificial Sequence
  Description of Artificial Sequence: Synthetic oligonucleotide
  Sense strand starting at position 1048 of SEQ ID NO: 1243783
ccugacaugugggcaaaua

SEQ ID NO: 1441213 - RNA, 19 nt, Artificial Sequence
  Description of Artificial Sequence: Synthetic oligonucleotide
  Antisense strand to SEQ ID NO: 1441212
uauuugcccacaugucagg

SEQ ID NO: 1441214 - RNA, 19 nt, Artificial Sequence
  Description of Artificial Sequence: Synthetic oligonucleotide
  Sense strand starting at position 1081 of SEQ ID NO: 1243783
gggcgaugguccuccaaca

SEQ ID NO: 1441215 - RNA, 19 nt, Artificial Sequence
  Description of Artificial Sequence: Synthetic oligonucleotide
  Antisense strand to SEQ ID NO: 1441214
uguuggaggaccaucgccc

SEQ ID NO: 1441216 - RNA, 19 nt, Artificial Sequence
  Description of Artificial Sequence: Synthetic oligonucleotide
  Sense strand starting at position 1193 of SEQ ID NO: 1243783
cagggucuuggcugagaug

SEQ ID NO: 1441217 - RNA, 19 nt, Artificial Sequence
  Description of Artificial Sequence: Synthetic oligonucleotide
  Antisense strand to SEQ ID NO: 1441216
caucucagccaagacccug

SEQ ID NO: 1441218 - RNA, 19 nt, Artificial Sequence
  Description of Artificial Sequence: Synthetic oligonucleotide
  Sense strand starting at position 1290 of SEQ ID NO: 1243783
aggugugcucccugcgaga

SEQ ID NO: 1441219 - RNA, 19 nt, Artificial Sequence
  Description of Artificial Sequence: Synthetic oligonucleotide
  Antisense strand to SEQ ID NO: 1441218
ucucgcagggagcacaccu

SEQ ID NO: 1441220 - RNA, 19 nt, Artificial Sequence
  Description of Artificial Sequence: Synthetic oligonucleotide
  Sense strand starting at position 1323 of SEQ ID NO: 1243783
gggaguggcucuugaagug

SEQ ID NO: 1441221 - RNA, 19 nt, Artificial Sequence
  Description of Artificial Sequence: Synthetic oligonucleotide
  Antisense strand to SEQ ID NO: 1441220
cacuucaagagccacuccc

SEQ ID NO: 1441222 - RNA, 19 nt, Artificial Sequence
  Description of Artificial Sequence: Synthetic oligonucleotide
  Sense strand starting at position 1717 of SEQ ID NO: 1243783
cuuggaaaguccuugucau

SEQ ID NO: 1441223 - RNA, 19 nt, Artificial Sequence
  Description of Artificial Sequence: Synthetic oligonucleotide
  Antisense strand to SEQ ID NO: 1441222
augacaaggacuuuccaag

SEQ ID NO: 1441224 - RNA, 19 nt, Artificial Sequence
  Description of Artificial Sequence: Synthetic oligonucleotide
  Sense strand starting at position 1718 of SEQ ID NO: 1243783
uuggaaaguccuugucaua

SEQ ID NO: 1441225 - RNA, 19 nt, Artificial Sequence
  Description of Artificial Sequence: Synthetic oligonucleotide
  Antisense strand to SEQ ID NO: 1441224
uaugacaaggacuuuccaa

SEQ ID NO: 1441226 - RNA, 19 nt, Artificial Sequence
  Description of Artificial Sequence: Synthetic oligonucleotide
  Sense strand starting at position 1721 of SEQ ID NO: 1243783
gaaaguccuugucauacag

SEQ ID NO: 1441227 - RNA, 19 nt, Artificial Sequence
  Description of Artificial Sequence: Synthetic oligonucleotide
  Antisense strand to SEQ ID NO: 1441226
cuguaugacaaggacuuuc

SEQ ID NO: 1441228 - RNA, 19 nt, Artificial Sequence
  Description of Artificial Sequence: Synthetic oligonucleotide
  Sense strand starting at position 1939 of SEQ ID NO: 1243783
gacaguuugggaugaggca

SEQ ID NO: 1441229 - RNA, 19 nt, Artificial Sequence
  Description of Artificial Sequence: Synthetic oligonucleotide
  Antisense strand to SEQ ID NO: 1441228
ugccucaucccaaacuguc

SEQ ID NO: 1441230 - RNA, 19 nt, Artificial Sequence
  Description of Artificial Sequence: Synthetic oligonucleotide
  Sense strand starting at position 2209 of SEQ ID NO: 1243783
aaggguggcuccugauuua

SEQ ID NO: 1441231 - RNA, 19 nt, Artificial Sequence
  Description of Artificial Sequence: Synthetic oligonucleotide
  Antisense strand to SEQ ID NO: 1441230
uaaaucaggagccacccuu

SEQ ID NO: 1441232 - RNA, 19 nt, Artificial Sequence
  Description of Artificial Sequence: Synthetic oligonucleotide
  Sense strand starting at position 2408 of SEQ ID NO: 1243783
agggaauuggccugauauc

SEQ ID NO: 1441233 - RNA, 19 nt, Artificial Sequence
  Description of Artificial Sequence: Synthetic oligonucleotide
  Antisense strand to SEQ ID NO: 1441232
gauaucaggccaauucccu

SEQ ID NO: 1441234 - RNA, 19 nt, Artificial Sequence
  Description of Artificial Sequence: Synthetic oligonucleotide
  Sense strand starting at position 2469 of SEQ ID NO: 1243783
cucucuggauagcuauaaa

SEQ ID NO: 1441235 - RNA, 19 nt, Artificial Sequence
  Description of Artificial Sequence: Synthetic oligonucleotide
  Antisense strand to SEQ ID NO: 1441234
uuuauagcuauccagagag

SEQ ID NO: 1441236 - RNA, 19 nt, Artificial Sequence
  Description of Artificial Sequence: Synthetic oligonucleotide
  Sense strand starting at position 2559 of SEQ ID NO: 1243783
uacgauauggagcaagagu

SEQ ID NO: 1441237 - RNA, 19 nt, Artificial Sequence
  Description of Artificial Sequence: Synthetic oligonucleotide
  Antisense strand to SEQ ID NO: 1441236
acucuugcuccauaucgua

SEQ ID NO: 1441238 - RNA, 19 nt, Artificial Sequence
  Description of Artificial Sequence: Synthetic oligonucleotide
  Sense strand starting at position 2582 of SEQ ID NO: 1243783
agccucacuucugagaacu

SEQ ID NO: 1441239 - RNA, 19 nt, Artificial Sequence
  Description of Artificial Sequence: Synthetic oligonucleotide
  Antisense strand to SEQ ID NO: 1441238
aguucucagaagugaggcu

SEQ ID NO: 1441240 - RNA, 19 nt, Artificial Sequence
  Description of Artificial Sequence: Synthetic oligonucleotide
  Sense strand starting at position 2590 of SEQ ID NO: 1243783
uucugagaacugcaguaaa

SEQ ID NO: 1441241 - RNA, 19 nt, Artificial Sequence
  Description of Artificial Sequence: Synthetic oligonucleotide
  Antisense strand to SEQ ID NO: 1441240
uuuacugcaguucucagaa

SEQ ID NO: 1441242 - RNA, 19 nt, Artificial Sequence
  Description of Artificial Sequence: Synthetic oligonucleotide
  Sense strand starting at position 2615 of SEQ ID NO: 1243783
gggagaacuuucugauaca

SEQ ID NO: 1441243 - RNA, 19 nt, Artificial Sequence
  Description of Artificial Sequence: Synthetic oligonucleotide
  Antisense strand to SEQ ID NO: 1441242
uguaucagaaaguucuccc

SEQ ID NO: 1441244 - RNA, 19 nt, Artificial Sequence
  Description of Artificial Sequence: Synthetic oligonucleotide
  Sense strand starting at position 2616 of SEQ ID NO: 1243783
ggagaacuuucugauacac

SEQ ID NO: 1441245 - RNA, 19 nt, Artificial Sequence
  Description of Artificial Sequence: Synthetic oligonucleotide
  Antisense strand to SEQ ID NO: 1441244
guguaucagaaaguucucc

SEQ ID NO: 1441246 - RNA, 19 nt, Artificial Sequence
  Description of Artificial Sequence: Synthetic oligonucleotide
  Sense strand starting at position 2676 of SEQ ID NO: 1243783
guccaaggagucuacacuu

SEQ ID NO: 1441247 - RNA, 19 nt, Artificial Sequence
  Description of Artificial Sequence: Synthetic oligonucleotide
  Antisense strand to SEQ ID NO: 1441246
aaguguagacuccuuggac

SEQ ID NO: 1441248 - RNA, 19 nt, Artificial Sequence
  Description of Artificial Sequence: Synthetic oligonucleotide
  Sense strand starting at position 3546 of SEQ ID NO: 1243783
ccaugcuauggcuguguga

SEQ ID NO: 1441249 - RNA, 19 nt, Artificial Sequence
  Description of Artificial Sequence: Synthetic oligonucleotide
  Antisense strand to SEQ ID NO: 1441248
ucacacagccauagcaugg

SEQ ID NO: 1441250 - RNA, 19 nt, Artificial Sequence
  Description of Artificial Sequence: Synthetic oligonucleotide
  Sense strand starting at position 3548 of SEQ ID NO: 1243783
augcuauggcugugugacu

SEQ ID NO: 1441251 - RNA, 19 nt, Artificial Sequence
  Description of Artificial Sequence: Synthetic oligonucleotide
  Antisense strand to SEQ ID NO: 1441250
agucacacagccauagcau

SEQ ID NO: 1441252 - RNA, 19 nt, Artificial Sequence
  Description of Artificial Sequence: Synthetic oligonucleotide
  Sense strand starting at position 3612 of SEQ ID NO: 1243783
cagaacggauauugaaaua

SEQ ID NO: 1441253 - RNA, 19 nt, Artificial Sequence
  Description of Artificial Sequence: Synthetic oligonucleotide
  Antisense strand to SEQ ID NO: 1441252
uauuucaauauccguucug

SEQ ID NO: 1441254 - RNA, 19 nt, Artificial Sequence
  Description of Artificial Sequence: Synthetic oligonucleotide
  Sense strand starting at position 3673 of SEQ ID NO: 1243783
cuauaagguuugcaaaugu

SEQ ID NO: 1441255 - RNA, 19 nt, Artificial Sequence
  Description of Artificial Sequence: Synthetic oligonucleotide
  Antisense strand to SEQ ID NO: 1441254
acauuugcaaaccuuauag

SEQ ID NO: 1441256 - RNA, 19 nt, Artificial Sequence
  Description of Artificial Sequence: Synthetic oligonucleotide
  Sense strand starting at position 3690 of SEQ ID NO: 1243783
gucaccuugugaucucacu

SEQ ID NO: 1441257 - RNA, 19 nt, Artificial Sequence
  Description of Artificial Sequence: Synthetic oligonucleotide
  Antisense strand to SEQ ID NO: 1441256
agugagaucacaaggugac

SEQ ID NO: 1441258 - RNA, 19 nt, Artificial Sequence
  Description of Artificial Sequence: Synthetic oligonucleotide
  Sense strand starting at position 3724 of SEQ ID NO: 1243783
uccagcuucucagaggacu

SEQ ID NO: 1441259 - RNA, 19 nt, Artificial Sequence
  Description of Artificial Sequence: Synthetic oligonucleotide
  Antisense strand to SEQ ID NO: 1441258
aguccucugagaagcugga

SEQ ID NO: 1441260 - RNA, 19 nt, Artificial Sequence
  Description of Artificial Sequence: Synthetic oligonucleotide
  Sense strand starting at position 3788 of SEQ ID NO: 1243783
ccagucaugcugugccuga

SEQ ID NO: 1441261 - RNA, 19 nt, Artificial Sequence
  Description of Artificial Sequence: Synthetic oligonucleotide
  Antisense strand to SEQ ID NO: 1441260
ucaggcacagcaugacugg

SEQ ID NO: 1441262 - RNA, 19 nt, Artificial Sequence
  Description of Artificial Sequence: Synthetic oligonucleotide
  Sense strand starting at position 3821 of SEQ ID NO: 1243783
cagggugaauucuccacuu

SEQ ID NO: 1441263 - RNA, 19 nt, Artificial Sequence
  Description of Artificial Sequence: Synthetic oligonucleotide
  Antisense strand to SEQ ID NO: 1441262
aaguggagaauucacccug

SEQ ID NO: 1441264 - RNA, 19 nt, Artificial Sequence
  Description of Artificial Sequence: Synthetic oligonucleotide
  Sense strand starting at position 3823 of SEQ ID NO: 1243783
gggugaauucuccacuuug

SEQ ID NO: 1441265 - RNA, 19 nt, Artificial Sequence
  Description of Artificial Sequence: Synthetic oligonucleotide
  Antisense strand to SEQ ID NO: 1441264
caaaguggagaauucaccc

SEQ ID NO: 1441266 - RNA, 19 nt, Artificial Sequence
  Description of Artificial Sequence: Synthetic oligonucleotide
  Sense strand starting at position 3893 of SEQ ID NO: 1243783
gggaacuucucggagccua

SEQ ID NO: 1441267 - RNA, 19 nt, Artificial Sequence
  Description of Artificial Sequence: Synthetic oligonucleotide
  Antisense strand to SEQ ID NO: 1441266
uaggcuccgagaaguuccc

SEQ ID NO: 1441268 - RNA, 19 nt, Artificial Sequence
  Description of Artificial Sequence: Synthetic oligonucleotide
  Sense strand starting at position 64 of SEQ ID NO: 1243784
ccaccaagccucugugaac

SEQ ID NO: 1441269 - RNA, 19 nt, Artificial Sequence
  Description of Artificial Sequence: Synthetic oligonucleotide
  Antisense strand to SEQ ID NO: 1441268
guucacagaggcuuggugg

SEQ ID NO: 1441270 - RNA, 19 nt, Artificial Sequence
  Description of Artificial Sequence: Synthetic oligonucleotide
  Sense strand starting at position 170 of SEQ ID NO: 1243784
cggucacaucuccauucuu

SEQ ID NO: 1441271 - RNA, 19 nt, Artificial Sequence
  Description of Artificial Sequence: Synthetic oligonucleotide
  Antisense strand to SEQ ID NO: 1441270
aagaauggagaugugaccg

SEQ ID NO: 1441272 - RNA, 19 nt, Artificial Sequence
  Description of Artificial Sequence: Synthetic oligonucleotide
  Sense strand starting at position 182 of SEQ ID NO: 1243784
cauucuugacggcgaggau

SEQ ID NO: 1441273 - RNA, 19 nt, Artificial Sequence
  Description of Artificial Sequence: Synthetic oligonucleotide
  Antisense strand to SEQ ID NO: 1441272
auccucgccgucaagaaug

SEQ ID NO: 1441274 - RNA, 19 nt, Artificial Sequence
  Description of Artificial Sequence: Synthetic oligonucleotide
  Sense strand starting at position 362 of SEQ ID NO: 1243784
gugggcuccucgucaggua

SEQ ID NO: 1441275 - RNA, 19 nt, Artificial Sequence
  Description of Artificial Sequence: Synthetic oligonucleotide
  Antisense strand to SEQ ID NO: 1441274
uaccugacgaggagcccac

SEQ ID NO: 1441276 - RNA, 19 nt, Artificial Sequence
  Description of Artificial Sequence: Synthetic oligonucleotide
  Sense strand starting at position 383 of SEQ ID NO: 1243784
gagggauacucccaaaggu

SEQ ID NO: 1441277 - RNA, 19 nt, Artificial Sequence
  Description of Artificial Sequence: Synthetic oligonucleotide
  Antisense strand to SEQ ID NO: 1441276
accuuugggaguaucccuc

SEQ ID NO: 1441278 - RNA, 19 nt, Artificial Sequence
  Description of Artificial Sequence: Synthetic oligonucleotide
  Sense strand starting at position 396 of SEQ ID NO: 1243784
aaaggugcuccgugaacug

SEQ ID NO: 1441279 - RNA, 19 nt, Artificial Sequence
  Description of Artificial Sequence: Synthetic oligonucleotide
  Antisense strand to SEQ ID NO: 1441278
caguucacggagcaccuuu

SEQ ID NO: 1441280 - RNA, 19 nt, Artificial Sequence
  Description of Artificial Sequence: Synthetic oligonucleotide
  Sense strand starting at position 784 of SEQ ID NO: 1243784
ggaggaagcugcuaugcau

SEQ ID NO: 1441281 - RNA, 19 nt, Artificial Sequence
  Description of Artificial Sequence: Synthetic oligonucleotide
  Antisense strand to SEQ ID NO: 1441280
augcauagcagcuuccucc

SEQ ID NO: 1441282 - RNA, 19 nt, Artificial Sequence
  Description of Artificial Sequence: Synthetic oligonucleotide
  Sense strand starting at position 791 of SEQ ID NO: 1243784
gcugcuaugcaugagagga

SEQ ID NO: 1441283 - RNA, 19 nt, Artificial Sequence
  Description of Artificial Sequence: Synthetic oligonucleotide
  Antisense strand to SEQ ID NO: 1441282
uccucucaugcauagcagc

SEQ ID NO: 1441284 - RNA, 19 nt, Artificial Sequence
  Description of Artificial Sequence: Synthetic oligonucleotide
  Sense strand starting at position 795 of SEQ ID NO: 1243784
cuaugcaugagaggaguau

SEQ ID NO: 1441285 - RNA, 19 nt, Artificial Sequence
  Description of Artificial Sequence: Synthetic oligonucleotide
  Antisense strand to SEQ ID NO: 1441284
auacuccucucaugcauag

SEQ ID NO: 1441286 - RNA, 19 nt, Artificial Sequence
  Description of Artificial Sequence: Synthetic oligonucleotide
  Sense strand starting at position 799 of SEQ ID NO: 1243784
gcaugagaggaguauuggu

SEQ ID NO: 1441287 - RNA, 19 nt, Artificial Sequence
  Description of Artificial Sequence: Synthetic oligonucleotide
  Antisense strand to SEQ ID NO: 1441286
accaauacuccucucaugc

SEQ ID NO: 1441288 - RNA, 19 nt, Artificial Sequence
  Description of Artificial Sequence: Synthetic oligonucleotide
  Sense strand starting at position 1066 of SEQ ID NO: 1243784
ccagauuccucccuacgga

SEQ ID NO: 1441289 - RNA, 19 nt, Artificial Sequence
  Description of Artificial Sequence: Synthetic oligonucleotide
  Antisense strand to SEQ ID NO: 1441288
uccguagggaggaaucugg

SEQ ID NO: 1441290 - RNA, 19 nt, Artificial Sequence
  Description of Artificial Sequence: Synthetic oligonucleotide
  Sense strand starting at position 1126 of SEQ ID NO: 1243784
aggacucuuugugaacgga

SEQ ID NO: 1441291 - RNA, 19 nt, Artificial Sequence
  Description of Artificial Sequence: Synthetic oligonucleotide
  Antisense strand to SEQ ID NO: 1441290
uccguucacaaagaguccu

SEQ ID NO: 1441292 - RNA, 19 nt, Artificial Sequence
  Description of Artificial Sequence: Synthetic oligonucleotide
  Sense strand starting at position 1355 of SEQ ID NO: 1243784
cagagaagcuuacgucagu

SEQ ID NO: 1441293 - RNA, 19 nt, Artificial Sequence
  Description of Artificial Sequence: Synthetic oligonucleotide
  Antisense strand to SEQ ID NO: 1441292
acugacguaagcuucucug

SEQ ID NO: 1441294 - RNA, 19 nt, Artificial Sequence
  Description of Artificial Sequence: Synthetic oligonucleotide
  Sense strand starting at position 1356 of SEQ ID NO: 1243784
agagaagcuuacgucaguu

SEQ ID NO: 1441295 - RNA, 19 nt, Artificial Sequence
  Description of Artificial Sequence: Synthetic oligonucleotide
  Antisense strand to SEQ ID NO: 1441294
aacugacguaagcuucucu

SEQ ID NO: 1441296 - RNA, 19 nt, Artificial Sequence
  Description of Artificial Sequence: Synthetic oligonucleotide
  Sense strand starting at position 1384 of SEQ ID NO: 1243784
cagcgaauuuacugccaga

SEQ ID NO: 1441297 - RNA, 19 nt, Artificial Sequence
  Description of Artificial Sequence: Synthetic oligonucleotide
  Antisense strand to SEQ ID NO: 1441296
ucuggcaguaaauucgcug

SEQ ID NO: 1441298 - RNA, 19 nt, Artificial Sequence
  Description of Artificial Sequence: Synthetic oligonucleotide
  Sense strand starting at position 1387 of SEQ ID NO: 1243784
cgaauuuacugccagaguc

SEQ ID NO: 1441299 - RNA, 19 nt, Artificial Sequence
  Description of Artificial Sequence: Synthetic oligonucleotide
  Antisense strand to SEQ ID NO: 1441298
gacucuggcaguaaauucg

SEQ ID NO: 1441300 - RNA, 19 nt, Artificial Sequence
  Description of Artificial Sequence: Synthetic oligonucleotide
  Sense strand starting at position 1397 of SEQ ID NO: 1243784
gccagagucuuguggcaug

SEQ ID NO: 1441301 - RNA, 19 nt, Artificial Sequence
  Description of Artificial Sequence: Synthetic oligonucleotide
  Antisense strand to SEQ ID NO: 1441300
caugccacaagacucuggc

SEQ ID NO: 1441302 - RNA, 19 nt, Artificial Sequence
  Description of Artificial Sequence: Synthetic oligonucleotide
  Sense strand starting at position 1400 of SEQ ID NO: 1243784
agagucuuguggcaugaga

SEQ ID NO: 1441303 - RNA, 19 nt, Artificial Sequence
  Description of Artificial Sequence: Synthetic oligonucleotide
  Antisense strand to SEQ ID NO: 1441302
ucucaugccacaagacucu

SEQ ID NO: 1441304 - RNA, 19 nt, Artificial Sequence
  Description of Artificial Sequence: Synthetic oligonucleotide
  Sense strand starting at position 1402 of SEQ ID NO: 1243784
agucuuguggcaugagauc

SEQ ID NO: 1441305 - RNA, 19 nt, Artificial Sequence
  Description of Artificial Sequence: Synthetic oligonucleotide
  Antisense strand to SEQ ID NO: 1441304
gaucucaugccacaagacu

SEQ ID NO: 1441306 - RNA, 19 nt, Artificial Sequence
  Description of Artificial Sequence: Synthetic oligonucleotide
  Sense strand starting at position 2199 of SEQ ID NO: 1243784
gggucugacuggugggaga

SEQ ID NO: 1441307 - RNA, 19 nt, Artificial Sequence
  Description of Artificial Sequence: Synthetic oligonucleotide
  Antisense strand to SEQ ID NO: 1441306
ucucccaccagucagaccc

SEQ ID NO: 1441308 - RNA, 19 nt, Artificial Sequence
  Description of Artificial Sequence: Synthetic oligonucleotide
  Sense strand starting at position 2656 of SEQ ID NO: 1243784
ggucacaagugugaccauu

SEQ ID NO: 1441309 - RNA, 19 nt, Artificial Sequence
  Description of Artificial Sequence: Synthetic oligonucleotide
  Antisense strand to SEQ ID NO: 1441308
aauggucacacuugugacc

SEQ ID NO: 1441310 - RNA, 19 nt, Artificial Sequence
  Description of Artificial Sequence: Synthetic oligonucleotide
  Sense strand starting at position 2701 of SEQ ID NO: 1243784
ucaggcuuuacuggagaga

SEQ ID NO: 1441311 - RNA, 19 nt, Artificial Sequence
  Description of Artificial Sequence: Synthetic oligonucleotide
  Antisense strand to SEQ ID NO: 1441310
ucucuccaguaaagccuga

SEQ ID NO: 1441312 - RNA, 19 nt, Artificial Sequence
  Description of Artificial Sequence: Synthetic oligonucleotide
  Sense strand starting at position 3647 of SEQ ID NO: 1243784
uaucuucuggaguguguaa

SEQ ID NO: 1441313 - RNA, 19 nt, Artificial Sequence
  Description of Artificial Sequence: Synthetic oligonucleotide
  Antisense strand to SEQ ID NO: 1441312
uuacacacuccagaagaua

SEQ ID NO: 1441314 - RNA, 19 nt, Artificial Sequence
  Description of Artificial Sequence: Synthetic oligonucleotide
  Sense strand starting at position 3742 of SEQ ID NO: 1243784
caacccggucuuuagagaa

SEQ ID NO: 1441315 - RNA, 19 nt, Artificial Sequence
  Description of Artificial Sequence: Synthetic oligonucleotide
  Antisense strand to SEQ ID NO: 1441314
uucucuaaagaccggguug

SEQ ID NO: 1441316 - RNA, 19 nt, Artificial Sequence
  Description of Artificial Sequence: Synthetic oligonucleotide
  Sense strand starting at position 3746 of SEQ ID NO: 1243784
ccggucuuuagagaacuga

SEQ ID NO: 1441317 - RNA, 19 nt, Artificial Sequence
  Description of Artificial Sequence: Synthetic oligonucleotide
  Antisense strand to SEQ ID NO: 1441316
ucaguucucuaaagaccgg

SEQ ID NO: 1441318 - RNA, 19 nt, Artificial Sequence
  Description of Artificial Sequence: Synthetic oligonucleotide
  Sense strand starting at position 3892 of SEQ ID NO: 1243784
guaucagagcugggaaguu

SEQ ID NO: 1441319 - RNA, 19 nt, Artificial Sequence
  Description of Artificial Sequence: Synthetic oligonucleotide
  Antisense strand to SEQ ID NO: 1441318
aacuucccagcucugauac

SEQ ID NO: 1441320 - RNA, 19 nt, Artificial Sequence
  Description of Artificial Sequence: Synthetic oligonucleotide
  Sense strand starting at position 156 of SEQ ID NO: 1243785
ugaugugacucuuaacaca

SEQ ID NO: 1441321 - RNA, 19 nt, Artificial Sequence
  Description of Artificial Sequence: Synthetic oligonucleotide
  Antisense strand to SEQ ID NO: 1441320
uguguuaagagucacauca

SEQ ID NO: 1441322 - RNA, 19 nt, Artificial Sequence
  Description of Artificial Sequence: Synthetic oligonucleotide
  Sense strand starting at position 212 of SEQ ID NO: 1243785
guauauaacugauuauagc

SEQ ID NO: 1441323 - RNA, 19 nt, Artificial Sequence
  Description of Artificial Sequence: Synthetic oligonucleotide
  Antisense strand to SEQ ID NO: 1441322
gcuauaaucaguuauauac

SEQ ID NO: 1441324 - RNA, 19 nt, Artificial Sequence
  Description of Artificial Sequence: Synthetic oligonucleotide
  Sense strand starting at position 220 of SEQ ID NO: 1243785
cugauuauagcugaacuuu

SEQ ID NO: 1441325 - RNA, 19 nt, Artificial Sequence
  Description of Artificial Sequence: Synthetic oligonucleotide
  Antisense strand to SEQ ID NO: 1441324
aaaguucagcuauaaucag

SEQ ID NO: 1441326 - RNA, 19 nt, Artificial Sequence
  Description of Artificial Sequence: Synthetic oligonucleotide
  Sense strand starting at position 248 of SEQ ID NO: 1243785
ccaccucaauugcguuaaa

SEQ ID NO: 1441327 - RNA, 19 nt, Artificial Sequence
  Description of Artificial Sequence: Synthetic oligonucleotide
  Antisense strand to SEQ ID NO: 1441326
uuuaacgcaauugaggugg

SEQ ID NO: 1441328 - RNA, 19 nt, Artificial Sequence
  Description of Artificial Sequence: Synthetic oligonucleotide
  Sense strand starting at position 251 of SEQ ID NO: 1243785
ccucaauugcguuaaacca

SEQ ID NO: 1441329 - RNA, 19 nt, Artificial Sequence
  Description of Artificial Sequence: Synthetic oligonucleotide
  Antisense strand to SEQ ID NO: 1441328
ugguuuaacgcaauugagg

SEQ ID NO: 1441330 - RNA, 19 nt, Artificial Sequence
  Description of Artificial Sequence: Synthetic oligonucleotide
  Sense strand starting at position 842 of SEQ ID NO: 1243785
ucaccuuugugagaccagu

SEQ ID NO: 1441331 - RNA, 19 nt, Artificial Sequence
  Description of Artificial Sequence: Synthetic oligonucleotide
  Antisense strand to SEQ ID NO: 1441330
acuggucucacaaagguga

SEQ ID NO: 1441332 - RNA, 19 nt, Artificial Sequence
  Description of Artificial Sequence: Synthetic oligonucleotide
  Sense strand starting at position 940 of SEQ ID NO: 1243785
ggaaucauggagugaaggu

SEQ ID NO: 1441333 - RNA, 19 nt, Artificial Sequence
  Description of Artificial Sequence: Synthetic oligonucleotide
  Antisense strand to SEQ ID NO: 1441332
accuucacuccaugauucc

SEQ ID NO: 1441334 - RNA, 19 nt, Artificial Sequence
  Description of Artificial Sequence: Synthetic oligonucleotide
  Sense strand starting at position 949 of SEQ ID NO: 1243785
gagugaagguaguaggaaa

SEQ ID NO: 1441335 - RNA, 19 nt, Artificial Sequence
  Description of Artificial Sequence: Synthetic oligonucleotide
  Antisense strand to SEQ ID NO: 1441334
uuuccuacuaccuucacuc

SEQ ID NO: 1441336 - RNA, 19 nt, Artificial Sequence
  Description of Artificial Sequence: Synthetic oligonucleotide
  Sense strand starting at position 1091 of SEQ ID NO: 1243785
auagaaauauucucgggau

SEQ ID NO: 1441337 - RNA, 19 nt, Artificial Sequence
  Description of Artificial Sequence: Synthetic oligonucleotide
  Antisense strand to SEQ ID NO: 1441336
aucccgagaauauuucuau

SEQ ID NO: 1441338 - RNA, 19 nt, Artificial Sequence
  Description of Artificial Sequence: Synthetic oligonucleotide
  Sense strand starting at position 1092 of SEQ ID NO: 1243785
uagaaauauucucgggauc

SEQ ID NO: 1441339 - RNA, 19 nt, Artificial Sequence
  Description of Artificial Sequence: Synthetic oligonucleotide
  Antisense strand to SEQ ID NO: 1441338
gaucccgagaauauuucua

SEQ ID NO: 1441340 - RNA, 19 nt, Artificial Sequence
  Description of Artificial Sequence: Synthetic oligonucleotide
  Sense strand starting at position 1093 of SEQ ID NO: 1243785
agaaauauucucgggaucu

SEQ ID NO: 1441341 - RNA, 19 nt, Artificial Sequence
  Description of Artificial Sequence: Synthetic oligonucleotide
  Antisense strand to SEQ ID NO: 1441340
agaucccgagaauauuucu

SEQ ID NO: 1441342 - RNA, 19 nt, Artificial Sequence
  Description of Artificial Sequence: Synthetic oligonucleotide
  Sense strand starting at position 1094 of SEQ ID NO: 1243785
gaaauauucucgggaucuc

SEQ ID NO: 1441343 - RNA, 19 nt, Artificial Sequence
  Description of Artificial Sequence: Synthetic oligonucleotide
  Antisense strand to SEQ ID NO: 1441342
gagaucccgagaauauuuc

SEQ ID NO: 1441344 - RNA, 19 nt, Artificial Sequence
  Description of Artificial Sequence: Synthetic oligonucleotide
  Sense strand starting at position 1106 of SEQ ID NO: 1243785
ggaucuccgcccuacuuau

SEQ ID NO: 1441345 - RNA, 19 nt, Artificial Sequence
  Description of Artificial Sequence: Synthetic oligonucleotide
  Antisense strand to SEQ ID NO: 1441344
auaaguagggcggagaucc

SEQ ID NO: 1441346 - RNA, 19 nt, Artificial Sequence
  Description of Artificial Sequence: Synthetic oligonucleotide
  Sense strand starting at position 1326 of SEQ ID NO: 1243785
cggcgucuuccgaauacag

SEQ ID NO: 1441347 - RNA, 19 nt, Artificial Sequence
  Description of Artificial Sequence: Synthetic oligonucleotide
  Antisense strand to SEQ ID NO: 1441346
cuguauucggaagacgccg

SEQ ID NO: 1441348 - RNA, 19 nt, Artificial Sequence
  Description of Artificial Sequence: Synthetic oligonucleotide
  Sense strand starting at position 1328 of SEQ ID NO: 1243785
gcgucuuccgaauacaguu

SEQ ID NO: 1441349 - RNA, 19 nt, Artificial Sequence
  Description of Artificial Sequence: Synthetic oligonucleotide
  Antisense strand to SEQ ID NO: 1441348
aacuguauucggaagacgc

SEQ ID NO: 1441350 - RNA, 19 nt, Artificial Sequence
  Description of Artificial Sequence: Synthetic oligonucleotide
  Sense strand starting at position 1442 of SEQ ID NO: 1243785
gcaacauuguuccagacca

SEQ ID NO: 1441351 - RNA, 19 nt, Artificial Sequence
  Description of Artificial Sequence: Synthetic oligonucleotide
  Antisense strand to SEQ ID NO: 1441350
uggucuggaacaauguugc

SEQ ID NO: 1441352 - RNA, 19 nt, Artificial Sequence
  Description of Artificial Sequence: Synthetic oligonucleotide
  Sense strand starting at position 2003 of SEQ ID NO: 1243785
gggucuguccaagacuaca

SEQ ID NO: 1441353 - RNA, 19 nt, Artificial Sequence
  Description of Artificial Sequence: Synthetic oligonucleotide
  Antisense strand to SEQ ID NO: 1441352
uguagucuuggacagaccc

SEQ ID NO: 1441354 - RNA, 19 nt, Artificial Sequence
  Description of Artificial Sequence: Synthetic oligonucleotide
  Sense strand starting at position 2064 of SEQ ID NO: 1243785
gugguagggacuuauaguu

SEQ ID NO: 1441355 - RNA, 19 nt, Artificial Sequence
  Description of Artificial Sequence: Synthetic oligonucleotide
  Antisense strand to SEQ ID NO: 1441354
aacuauaagucccuaccac

SEQ ID NO: 1441356 - RNA, 19 nt, Artificial Sequence
  Description of Artificial Sequence: Synthetic oligonucleotide
  Sense strand starting at position 2088 of SEQ ID NO: 1243785
acuguaacgguggagagau

SEQ ID NO: 1441357 - RNA, 19 nt, Artificial Sequence
  Description of Artificial Sequence: Synthetic oligonucleotide
  Antisense strand to SEQ ID NO: 1441356
aucucuccaccguuacagu

SEQ ID NO: 1441358 - RNA, 19 nt, Artificial Sequence
  Description of Artificial Sequence: Synthetic oligonucleotide
  Sense strand starting at position 2089 of SEQ ID NO: 1243785
cuguaacgguggagagauu

SEQ ID NO: 1441359 - RNA, 19 nt, Artificial Sequence
  Description of Artificial Sequence: Synthetic oligonucleotide
  Antisense strand to SEQ ID NO: 1441358
aaucucuccaccguuacag

SEQ ID NO: 1441360 - RNA, 19 nt, Artificial Sequence
  Description of Artificial Sequence: Synthetic oligonucleotide
  Sense strand starting at position 2100 of SEQ ID NO: 1243785
gagagauugcagcguagag

SEQ ID NO: 1441361 - RNA, 19 nt, Artificial Sequence
  Description of Artificial Sequence: Synthetic oligonucleotide
  Antisense strand to SEQ ID NO: 1441360
cucuacgcugcaaucucuc

SEQ ID NO: 1441362 - RNA, 19 nt, Artificial Sequence
  Description of Artificial Sequence: Synthetic oligonucleotide
  Sense strand starting at position 2112 of SEQ ID NO: 1243785
cguagagcguuguaaccua

SEQ ID NO: 1441363 - RNA, 19 nt, Artificial Sequence
  Description of Artificial Sequence: Synthetic oligonucleotide
  Antisense strand to SEQ ID NO: 1441362
uagguuacaacgcucuacg

SEQ ID NO: 1441364 - RNA, 19 nt, Artificial Sequence
  Description of Artificial Sequence: Synthetic oligonucleotide
  Sense strand starting at position 2117 of SEQ ID NO: 1243785
agcguuguaaccuagaaua

SEQ ID NO: 1441365 - RNA, 19 nt, Artificial Sequence
  Description of Artificial Sequence: Synthetic oligonucleotide
  Antisense strand to SEQ ID NO: 1441364
uauucuagguuacaacgcu

SEQ ID NO: 1441366 - RNA, 19 nt, Artificial Sequence
  Description of Artificial Sequence: Synthetic oligonucleotide
  Sense strand starting at position 2119 of SEQ ID NO: 1243785
cguuguaaccuagaauauu

SEQ ID NO: 1441367 - RNA, 19 nt, Artificial Sequence
  Description of Artificial Sequence: Synthetic oligonucleotide
  Antisense strand to SEQ ID NO: 1441366
aauauucuagguuacaacg

SEQ ID NO: 1441368 - RNA, 19 nt, Artificial Sequence
  Description of Artificial Sequence: Synthetic oligonucleotide
  Sense strand starting at position 2983 of SEQ ID NO: 1243785
ggucuucccugauucccua

SEQ ID NO: 1441369 - RNA, 19 nt, Artificial Sequence
  Description of Artificial Sequence: Synthetic oligonucleotide
  Antisense strand to SEQ ID NO: 1441368
uagggaaucagggaagacc

SEQ ID NO: 1441370 - RNA, 19 nt, Artificial Sequence
  Description of Artificial Sequence: Synthetic oligonucleotide
  Sense strand starting at position 2987 of SEQ ID NO: 1243785
uucccugauucccuagagu

SEQ ID NO: 1441371 - RNA, 19 nt, Artificial Sequence
  Description of Artificial Sequence: Synthetic oligonucleotide
  Antisense strand to SEQ ID NO: 1441370
acucuagggaaucagggaa

SEQ ID NO: 1441372 - RNA, 19 nt, Artificial Sequence
  Description of Artificial Sequence: Synthetic oligonucleotide
  Sense strand starting at position 3093 of SEQ ID NO: 1243785
guaaguugugcucaccuuu

SEQ ID NO: 1441373 - RNA, 19 nt, Artificial Sequence
  Description of Artificial Sequence: Synthetic oligonucleotide
  Antisense strand to SEQ ID NO: 1441372
aaaggugagcacaacuuac

SEQ ID NO: 1441374 - RNA, 19 nt, Artificial Sequence
  Description of Artificial Sequence: Synthetic oligonucleotide
  Sense strand starting at position 3119 of SEQ ID NO: 1243785
ucauuaaucuccgucagca

SEQ ID NO: 1441375 - RNA, 19 nt, Artificial Sequence
  Description of Artificial Sequence: Synthetic oligonucleotide
  Antisense strand to SEQ ID NO: 1441374
ugcugacggagauuaauga

SEQ ID NO: 1441376 - RNA, 19 nt, Artificial Sequence
  Description of Artificial Sequence: Synthetic oligonucleotide
  Sense strand starting at position 3235 of SEQ ID NO: 1243785
uccuucuaaucaggaggaa

SEQ ID NO: 1441377 - RNA, 19 nt, Artificial Sequence
  Description of Artificial Sequence: Synthetic oligonucleotide
  Antisense strand to SEQ ID NO: 1441376
uuccuccugauuagaagga

SEQ ID NO: 1441378 - RNA, 19 nt, Artificial Sequence
  Description of Artificial Sequence: Synthetic oligonucleotide
  Sense strand starting at position 3380 of SEQ ID NO: 1243785
uguucacggcucuggagaa

SEQ ID NO: 1441379 - RNA, 19 nt, Artificial Sequence
  Description of Artificial Sequence: Synthetic oligonucleotide
  Antisense strand to SEQ ID NO: 1441378
uucuccagagccgugaaca

SEQ ID NO: 1441380 - RNA, 19 nt, Artificial Sequence
  Description of Artificial Sequence: Synthetic oligonucleotide
  Sense strand starting at position 3393 of SEQ ID NO: 1243785
ggagaacugucauguaaga

SEQ ID NO: 1441381 - RNA, 19 nt, Artificial Sequence
  Description of Artificial Sequence: Synthetic oligonucleotide
  Antisense strand to SEQ ID NO: 1441380
ucuuacaugacaguucucc

SEQ ID NO: 1441382 - RNA, 19 nt, Artificial Sequence
  Description of Artificial Sequence: Synthetic oligonucleotide
  Sense strand starting at position 3425 of SEQ ID NO: 1243785
gcaauaucauaauagaguu

SEQ ID NO: 1441383 - RNA, 19 nt, Artificial Sequence
  Description of Artificial Sequence: Synthetic oligonucleotide
  Antisense strand to SEQ ID NO: 1441382
aacucuauuaugauauugc

SEQ ID NO: 1441384 - RNA, 19 nt, Artificial Sequence
  Description of Artificial Sequence: Synthetic oligonucleotide
  Sense strand starting at position 3871 of SEQ ID NO: 1243785
cgguuuccacgcuauggaa

SEQ ID NO: 1441385 - RNA, 19 nt, Artificial Sequence
  Description of Artificial Sequence: Synthetic oligonucleotide
  Antisense strand to SEQ ID NO: 1441384
uuccauagcguggaaaccg

SEQ ID NO: 1441386 - RNA, 19 nt, Artificial Sequence
  Description of Artificial Sequence: Synthetic oligonucleotide
  Sense strand starting at position 198 of SEQ ID NO: 1243786
gcccgacccuacuauuuau

SEQ ID NO: 1441387 - RNA, 19 nt, Artificial Sequence
  Description of Artificial Sequence: Synthetic oligonucleotide
  Antisense strand to SEQ ID NO: 1441386
auaaauaguagggucgggc

SEQ ID NO: 1441388 - RNA, 19 nt, Artificial Sequence
  Description of Artificial Sequence: Synthetic oligonucleotide
  Sense strand starting at position 227 of SEQ ID NO: 1243786
agaaacaauuuaggauaca

SEQ ID NO: 1441389 - RNA, 19 nt, Artificial Sequence
  Description of Artificial Sequence: Synthetic oligonucleotide
  Antisense strand to SEQ ID NO: 1441388
uguauccuaaauuguuucu

SEQ ID NO: 1441390 - RNA, 19 nt, Artificial Sequence
  Description of Artificial Sequence: Synthetic oligonucleotide
  Sense strand starting at position 309 of SEQ ID NO: 1243786
cgugaagcuucauuaaggu

SEQ ID NO: 1441391 - RNA, 19 nt, Artificial Sequence
  Description of Artificial Sequence: Synthetic oligonucleotide
  Antisense strand to SEQ ID NO: 1441390
accuuaaugaagcuucacg

SEQ ID NO: 1441392 - RNA, 19 nt, Artificial Sequence
  Description of Artificial Sequence: Synthetic oligonucleotide
  Sense strand starting at position 479 of SEQ ID NO: 1243786
ugaugugacucuuaacaca

SEQ ID NO: 1441393 - RNA, 19 nt, Artificial Sequence
  Description of Artificial Sequence: Synthetic oligonucleotide
  Antisense strand to SEQ ID NO: 1441392
uguguuaagagucacauca

SEQ ID NO: 1441394 - RNA, 19 nt, Artificial Sequence
  Description of Artificial Sequence: Synthetic oligonucleotide
  Sense strand starting at position 535 of SEQ ID NO: 1243786
guauauaacugauuauagc

SEQ ID NO: 1441395 - RNA, 19 nt, Artificial Sequence
  Description of Artificial Sequence: Synthetic oligonucleotide
  Antisense strand to SEQ ID NO: 1441394
gcuauaaucaguuauauac

SEQ ID NO: 1441396 - RNA, 19 nt, Artificial Sequence
  Description of Artificial Sequence: Synthetic oligonucleotide
  Sense strand starting at position 543 of SEQ ID NO: 1243786
cugauuauagcugaacuuu

SEQ ID NO: 1441397 - RNA, 19 nt, Artificial Sequence
  Description of Artificial Sequence: Synthetic oligonucleotide
  Antisense strand to SEQ ID NO: 1441396
aaaguucagcuauaaucag

SEQ ID NO: 1441398 - RNA, 19 nt, Artificial Sequence
  Description of Artificial Sequence: Synthetic oligonucleotide
  Sense strand starting at position 571 of SEQ ID NO: 1243786
ccaccucaauugcguuaaa

SEQ ID NO: 1441399 - RNA, 19 nt, Artificial Sequence
  Description of Artificial Sequence: Synthetic oligonucleotide
  Antisense strand to SEQ ID NO: 1441398
uuuaacgcaauugaggugg

SEQ ID NO: 1441400 - RNA, 19 nt, Artificial Sequence
  Description of Artificial Sequence: Synthetic oligonucleotide
  Sense strand starting at position 574 of SEQ ID NO: 1243786
ccucaauugcguuaaacca

SEQ ID NO: 1441401 - RNA, 19 nt, Artificial Sequence
  Description of Artificial Sequence: Synthetic oligonucleotide
  Antisense strand to SEQ ID NO: 1441400
ugguuuaacgcaauugagg

SEQ ID NO: 1441402 - RNA, 19 nt, Artificial Sequence
  Description of Artificial Sequence: Synthetic oligonucleotide
  Sense strand starting at position 1165 of SEQ ID NO: 1243786
ucaccuuugugagaccagu

SEQ ID NO: 1441403 - RNA, 19 nt, Artificial Sequence
  Description of Artificial Sequence: Synthetic oligonucleotide
  Antisense strand to SEQ ID NO: 1441402
acuggucucacaaagguga

SEQ ID NO: 1441404 - RNA, 19 nt, Artificial Sequence
  Description of Artificial Sequence: Synthetic oligonucleotide
  Sense strand starting at position 1263 of SEQ ID NO: 1243786
ggaaucauggagugaaggu

SEQ ID NO: 1441405 - RNA, 19 nt, Artificial Sequence
  Description of Artificial Sequence: Synthetic oligonucleotide
  Antisense strand to SEQ ID NO: 1441404
accuucacuccaugauucc

SEQ ID NO: 1441406 - RNA, 19 nt, Artificial Sequence
  Description of Artificial Sequence: Synthetic oligonucleotide
  Sense strand starting at position 1272 of SEQ ID NO: 1243786
gagugaagguaguaggaaa

SEQ ID NO: 1441407 - RNA, 19 nt, Artificial Sequence
  Description of Artificial Sequence: Synthetic oligonucleotide
  Antisense strand to SEQ ID NO: 1441406
uuuccuacuaccuucacuc

SEQ ID NO: 1441408 - RNA, 19 nt, Artificial Sequence
  Description of Artificial Sequence: Synthetic oligonucleotide
  Sense strand starting at position 1414 of SEQ ID NO: 1243786
auagaaauauucucgggau

SEQ ID NO: 1441409 - RNA, 19 nt, Artificial Sequence
  Description of Artificial Sequence: Synthetic oligonucleotide
  Antisense strand to SEQ ID NO: 1441408
aucccgagaauauuucuau

SEQ ID NO: 1441410 - RNA, 19 nt, Artificial Sequence
  Description of Artificial Sequence: Synthetic oligonucleotide
  Sense strand starting at position 1415 of SEQ ID NO: 1243786
uagaaauauucucgggauc

SEQ ID NO: 1441411 - RNA, 19 nt, Artificial Sequence
  Description of Artificial Sequence: Synthetic oligonucleotide
  Antisense strand to SEQ ID NO: 1441410
gaucccgagaauauuucua

SEQ ID NO: 1441412 - RNA, 19 nt, Artificial Sequence
  Description of Artificial Sequence: Synthetic oligonucleotide
  Sense strand starting at position 1416 of SEQ ID NO: 1243786
agaaauauucucgggaucu

SEQ ID NO: 1441413 - RNA, 19 nt, Artificial Sequence
  Description of Artificial Sequence: Synthetic oligonucleotide
  Antisense strand to SEQ ID NO: 1441412
agaucccgagaauauuucu

SEQ ID NO: 1441414 - RNA, 19 nt, Artificial Sequence
  Description of Artificial Sequence: Synthetic oligonucleotide
  Sense strand starting at position 1417 of SEQ ID NO: 1243786
gaaauauucucgggaucuc

SEQ ID NO: 1441415 - RNA, 19 nt, Artificial Sequence
  Description of Artificial Sequence: Synthetic oligonucleotide
  Antisense strand to SEQ ID NO: 1441414
gagaucccgagaauauuuc

SEQ ID NO: 1441416 - RNA, 19 nt, Artificial Sequence
  Description of Artificial Sequence: Synthetic oligonucleotide
  Sense strand starting at position 1429 of SEQ ID NO: 1243786
ggaucuccgcccuacuuau

SEQ ID NO: 1441417 - RNA, 19 nt, Artificial Sequence
  Description of Artificial Sequence: Synthetic oligonucleotide
  Antisense strand to SEQ ID NO: 1441416
auaaguagggcggagaucc

SEQ ID NO: 1441418 - RNA, 19 nt, Artificial Sequence
  Description of Artificial Sequence: Synthetic oligonucleotide
  Sense strand starting at position 1649 of SEQ ID NO: 1243786
cggcgucuuccgaauacag

SEQ ID NO: 1441419 - RNA, 19 nt, Artificial Sequence
  Description of Artificial Sequence: Synthetic oligonucleotide
  Antisense strand to SEQ ID NO: 1441418
cuguauucggaagacgccg

SEQ ID NO: 1441420 - RNA, 19 nt, Artificial Sequence
  Description of Artificial Sequence: Synthetic oligonucleotide
  Sense strand starting at position 1651 of SEQ ID NO: 1243786
gcgucuuccgaauacaguu

SEQ ID NO: 1441421 - RNA, 19 nt, Artificial Sequence
  Description of Artificial Sequence: Synthetic oligonucleotide
  Antisense strand to SEQ ID NO: 1441420
aacuguauucggaagacgc

SEQ ID NO: 1441422 - RNA, 19 nt, Artificial Sequence
  Description of Artificial Sequence: Synthetic oligonucleotide
  Sense strand starting at position 1765 of SEQ ID NO: 1243786
gcaacauuguuccagacca

SEQ ID NO: 1441423 - RNA, 19 nt, Artificial Sequence
  Description of Artificial Sequence: Synthetic oligonucleotide
  Antisense strand to SEQ ID NO: 1441422
uggucuggaacaauguugc

SEQ ID NO: 1441424 - RNA, 19 nt, Artificial Sequence
  Description of Artificial Sequence: Synthetic oligonucleotide
  Sense strand starting at position 2326 of SEQ ID NO: 1243786
gggucuguccaagacuaca

SEQ ID NO: 1441425 - RNA, 19 nt, Artificial Sequence
  Description of Artificial Sequence: Synthetic oligonucleotide
  Antisense strand to SEQ ID NO: 1441424
uguagucuuggacagaccc

SEQ ID NO: 1441426 - RNA, 19 nt, Artificial Sequence
  Description of Artificial Sequence: Synthetic oligonucleotide
  Sense strand starting at position 2387 of SEQ ID NO: 1243786
gugguagggacuuauaguu

SEQ ID NO: 1441427 - RNA, 19 nt, Artificial Sequence
  Description of Artificial Sequence: Synthetic oligonucleotide
  Antisense strand to SEQ ID NO: 1441426
aacuauaagucccuaccac

SEQ ID NO: 1441428 - RNA, 19 nt, Artificial Sequence
  Description of Artificial Sequence: Synthetic oligonucleotide
  Sense strand starting at position 2411 of SEQ ID NO: 1243786
acuguaacgguggagagau

SEQ ID NO: 1441429 - RNA, 19 nt, Artificial Sequence
  Description of Artificial Sequence: Synthetic oligonucleotide
  Antisense strand to SEQ ID NO: 1441428
aucucuccaccguuacagu

SEQ ID NO: 1441430 - RNA, 19 nt, Artificial Sequence
  Description of Artificial Sequence: Synthetic oligonucleotide
  Sense strand starting at position 2412 of SEQ ID NO: 1243786
cuguaacgguggagagauu

SEQ ID NO: 1441431 - RNA, 19 nt, Artificial Sequence
  Description of Artificial Sequence: Synthetic oligonucleotide
  Antisense strand to SEQ ID NO: 1441430
aaucucuccaccguuacag

SEQ ID NO: 1441432 - RNA, 19 nt, Artificial Sequence
  Description of Artificial Sequence: Synthetic oligonucleotide
  Sense strand starting at position 2423 of SEQ ID NO: 1243786
gagagauugcagcguagag

SEQ ID NO: 1441433 - RNA, 19 nt, Artificial Sequence
  Description of Artificial Sequence: Synthetic oligonucleotide
  Antisense strand to SEQ ID NO: 1441432
cucuacgcugcaaucucuc

SEQ ID NO: 1441434 - RNA, 19 nt, Artificial Sequence
  Description of Artificial Sequence: Synthetic oligonucleotide
  Sense strand starting at position 2435 of SEQ ID NO: 1243786
cguagagcguuguaaccua

SEQ ID NO: 1441435 - RNA, 19 nt, Artificial Sequence
  Description of Artificial Sequence: Synthetic oligonucleotide
  Antisense strand to SEQ ID NO: 1441434
uagguuacaacgcucuacg

SEQ ID NO: 1441436 - RNA, 19 nt, Artificial Sequence
  Description of Artificial Sequence: Synthetic oligonucleotide
  Sense strand starting at position 2440 of SEQ ID NO: 1243786
agcguuguaaccuagaaua

SEQ ID NO: 1441437 - RNA, 19 nt, Artificial Sequence
  Description of Artificial Sequence: Synthetic oligonucleotide
  Antisense strand to SEQ ID NO: 1441436
uauucuagguuacaacgcu

SEQ ID NO: 1441438 - RNA, 19 nt, Artificial Sequence
  Description of Artificial Sequence: Synthetic oligonucleotide
  Sense strand starting at position 2442 of SEQ ID NO: 1243786
cguuguaaccuagaauauu

SEQ ID NO: 1441439 - RNA, 19 nt, Artificial Sequence
  Description of Artificial Sequence: Synthetic oligonucleotide
  Antisense strand to SEQ ID NO: 1441438
aauauucuagguuacaacg

SEQ ID NO: 1441440 - RNA, 19 nt, Artificial Sequence
  Description of Artificial Sequence: Synthetic oligonucleotide
  Sense strand starting at position 3306 of SEQ ID NO: 1243786
ggucuucccugauucccua

SEQ ID NO: 1441441 - RNA, 19 nt, Artificial Sequence
  Description of Artificial Sequence: Synthetic oligonucleotide
  Antisense strand to SEQ ID NO: 1441440
uagggaaucagggaagacc

SEQ ID NO: 1441442 - RNA, 19 nt, Artificial Sequence
  Description of Artificial Sequence: Synthetic oligonucleotide
  Sense strand starting at position 3310 of SEQ ID NO: 1243786
uucccugauucccuagagu

SEQ ID NO: 1441443 - RNA, 19 nt, Artificial Sequence
  Description of Artificial Sequence: Synthetic oligonucleotide
  Antisense strand to SEQ ID NO: 1441442
acucuagggaaucagggaa

SEQ ID NO: 1441444 - RNA, 19 nt, Artificial Sequence
  Description of Artificial Sequence: Synthetic oligonucleotide
  Sense strand starting at position 3416 of SEQ ID NO: 1243786
guaaguugugcucaccuuu

SEQ ID NO: 1441445 - RNA, 19 nt, Artificial Sequence
  Description of Artificial Sequence: Synthetic oligonucleotide
  Antisense strand to SEQ ID NO: 1441444
aaaggugagcacaacuuac

SEQ ID NO: 1441446 - RNA, 19 nt, Artificial Sequence
  Description of Artificial Sequence: Synthetic oligonucleotide
  Sense strand starting at position 3442 of SEQ ID NO: 1243786
ucauuaaucuccgucagca

SEQ ID NO: 1441447 - RNA, 19 nt, Artificial Sequence
  Description of Artificial Sequence: Synthetic oligonucleotide
  Antisense strand to SEQ ID NO: 1441446
ugcugacggagauuaauga

SEQ ID NO: 1441448 - RNA, 19 nt, Artificial Sequence
  Description of Artificial Sequence: Synthetic oligonucleotide
  Sense strand starting at position 3558 of SEQ ID NO: 1243786
uccuucuaaucaggaggaa

SEQ ID NO: 1441449 - RNA, 19 nt, Artificial Sequence
  Description of Artificial Sequence: Synthetic oligonucleotide
  Antisense strand to SEQ ID NO: 1441448
uuccuccugauuagaagga

SEQ ID NO: 1441450 - RNA, 19 nt, Artificial Sequence
  Description of Artificial Sequence: Synthetic oligonucleotide
  Sense strand starting at position 3703 of SEQ ID NO: 1243786
uguucacggcucuggagaa

SEQ ID NO: 1441451 - RNA, 19 nt, Artificial Sequence
  Description of Artificial Sequence: Synthetic oligonucleotide
  Antisense strand to SEQ ID NO: 1441450
uucuccagagccgugaaca

SEQ ID NO: 1441452 - RNA, 19 nt, Artificial Sequence
  Description of Artificial Sequence: Synthetic oligonucleotide
  Sense strand starting at position 3716 of SEQ ID NO: 1243786
ggagaacugucauguaaga

SEQ ID NO: 1441453 - RNA, 19 nt, Artificial Sequence
  Description of Artificial Sequence: Synthetic oligonucleotide
  Antisense strand to SEQ ID NO: 1441452
ucuuacaugacaguucucc

SEQ ID NO: 1441454 - RNA, 19 nt, Artificial Sequence
  Description of Artificial Sequence: Synthetic oligonucleotide
  Sense strand starting at position 3748 of SEQ ID NO: 1243786
gcaauaucauaauagaguu

SEQ ID NO: 1441455 - RNA, 19 nt, Artificial Sequence
  Description of Artificial Sequence: Synthetic oligonucleotide
  Antisense strand to SEQ ID NO: 1441454
aacucuauuaugauauugc

SEQ ID NO: 1441456 - RNA, 19 nt, Artificial Sequence
  Description of Artificial Sequence: Synthetic oligonucleotide
  Sense strand starting at position 20 of SEQ ID NO: 1243787
uugccauugcuugaacagu

SEQ ID NO: 1441457 - RNA, 19 nt, Artificial Sequence
  Description of Artificial Sequence: Synthetic oligonucleotide
  Antisense strand to SEQ ID NO: 1441456
acuguucaagcaauggcaa

SEQ ID NO: 1441458 - RNA, 19 nt, Artificial Sequence
  Description of Artificial Sequence: Synthetic oligonucleotide
  Sense strand starting at position 245 of SEQ ID NO: 1243787
aauguuucuuucuugagag

SEQ ID NO: 1441459 - RNA, 19 nt, Artificial Sequence
  Description of Artificial Sequence: Synthetic oligonucleotide
  Antisense strand to SEQ ID NO: 1441458
cucucaagaaagaaacauu

SEQ ID NO: 1441460 - RNA, 19 nt, Artificial Sequence
  Description of Artificial Sequence: Synthetic oligonucleotide
  Sense strand starting at position 247 of SEQ ID NO: 1243787
uguuucuuucuugagagag

SEQ ID NO: 1441461 - RNA, 19 nt, Artificial Sequence
  Description of Artificial Sequence: Synthetic oligonucleotide
  Antisense strand to SEQ ID NO: 1441460
cucucucaagaaagaaaca

SEQ ID NO: 1441462 - RNA, 19 nt, Artificial Sequence
  Description of Artificial Sequence: Synthetic oligonucleotide
  Sense strand starting at position 412 of SEQ ID NO: 1243787
gcaaauuacucagcagaaa

SEQ ID NO: 1441463 - RNA, 19 nt, Artificial Sequence
  Description of Artificial Sequence: Synthetic oligonucleotide
  Antisense strand to SEQ ID NO: 1441462
uuucugcugaguaauuugc

SEQ ID NO: 1441464 - RNA, 19 nt, Artificial Sequence
  Description of Artificial Sequence: Synthetic oligonucleotide
  Sense strand starting at position 527 of SEQ ID NO: 1243787
gguucuucucagggaugga

SEQ ID NO: 1441465 - RNA, 19 nt, Artificial Sequence
  Description of Artificial Sequence: Synthetic oligonucleotide
  Antisense strand to SEQ ID NO: 1441464
uccaucccugagaagaacc

SEQ ID NO: 1441466 - RNA, 19 nt, Artificial Sequence
  Description of Artificial Sequence: Synthetic oligonucleotide
  Sense strand starting at position 528 of SEQ ID NO: 1243787
guucuucucagggauggau

SEQ ID NO: 1441467 - RNA, 19 nt, Artificial Sequence
  Description of Artificial Sequence: Synthetic oligonucleotide
  Antisense strand to SEQ ID NO: 1441466
auccaucccugagaagaac

SEQ ID NO: 1441468 - RNA, 19 nt, Artificial Sequence
  Description of Artificial Sequence: Synthetic oligonucleotide
  Sense strand starting at position 744 of SEQ ID NO: 1243787
guccucacuucuucuggaa

SEQ ID NO: 1441469 - RNA, 19 nt, Artificial Sequence
  Description of Artificial Sequence: Synthetic oligonucleotide
  Antisense strand to SEQ ID NO: 1441468
uuccagaagaagugaggac

SEQ ID NO: 1441470 - RNA, 19 nt, Artificial Sequence
  Description of Artificial Sequence: Synthetic oligonucleotide
  Sense strand starting at position 809 of SEQ ID NO: 1243787
cuguuaugucugcaaagca

SEQ ID NO: 1441471 - RNA, 19 nt, Artificial Sequence
  Description of Artificial Sequence: Synthetic oligonucleotide
  Antisense strand to SEQ ID NO: 1441470
ugcuuugcagacauaacag

SEQ ID NO: 1441472 - RNA, 19 nt, Artificial Sequence
  Description of Artificial Sequence: Synthetic oligonucleotide
  Sense strand starting at position 1077 of SEQ ID NO: 1243787
acagucucugccugggaga

SEQ ID NO: 1441473 - RNA, 19 nt, Artificial Sequence
  Description of Artificial Sequence: Synthetic oligonucleotide
  Antisense strand to SEQ ID NO: 1441472
ucucccaggcagagacugu

SEQ ID NO: 1441474 - RNA, 19 nt, Artificial Sequence
  Description of Artificial Sequence: Synthetic oligonucleotide
  Sense strand starting at position 1078 of SEQ ID NO: 1243787
cagucucugccugggagaa

SEQ ID NO: 1441475 - RNA, 19 nt, Artificial Sequence
  Description of Artificial Sequence: Synthetic oligonucleotide
  Antisense strand to SEQ ID NO: 1441474
uucucccaggcagagacug

SEQ ID NO: 1441476 - RNA, 19 nt, Artificial Sequence
  Description of Artificial Sequence: Synthetic oligonucleotide
  Sense strand starting at position 1079 of SEQ ID NO: 1243787
agucucugccugggagaaa

SEQ ID NO: 1441477 - RNA, 19 nt, Artificial Sequence
  Description of Artificial Sequence: Synthetic oligonucleotide
  Antisense strand to SEQ ID NO: 1441476
uuucucccaggcagagacu

SEQ ID NO: 1441478 - RNA, 19 nt, Artificial Sequence
  Description of Artificial Sequence: Synthetic oligonucleotide
  Sense strand starting at position 1212 of SEQ ID NO: 1243787
gcccgagauccagaacaau

SEQ ID NO: 1441479 - RNA, 19 nt, Artificial Sequence
  Description of Artificial Sequence: Synthetic oligonucleotide
  Antisense strand to SEQ ID NO: 1441478
auuguucuggaucucgggc

SEQ ID NO: 1441480 - RNA, 19 nt, Artificial Sequence
  Description of Artificial Sequence: Synthetic oligonucleotide
  Sense strand starting at position 3019 of SEQ ID NO: 1243787
gguguuaagauucgaauuc

SEQ ID NO: 1441481 - RNA, 19 nt, Artificial Sequence
  Description of Artificial Sequence: Synthetic oligonucleotide
  Antisense strand to SEQ ID NO: 1441480
gaauucgaaucuuaacacc

SEQ ID NO: 1441482 - RNA, 19 nt, Artificial Sequence
  Description of Artificial Sequence: Synthetic oligonucleotide
  Sense strand starting at position 3134 of SEQ ID NO: 1243787
gcagucuaacuccaugaaa

SEQ ID NO: 1441483 - RNA, 19 nt, Artificial Sequence
  Description of Artificial Sequence: Synthetic oligonucleotide
  Antisense strand to SEQ ID NO: 1441482
uuucauggaguuagacugc

SEQ ID NO: 1441484 - RNA, 19 nt, Artificial Sequence
  Description of Artificial Sequence: Synthetic oligonucleotide
  Sense strand starting at position 3203 of SEQ ID NO: 1243787
uucuguugagcagauccaa

SEQ ID NO: 1441485 - RNA, 19 nt, Artificial Sequence
  Description of Artificial Sequence: Synthetic oligonucleotide
  Antisense strand to SEQ ID NO: 1441484
uuggaucugcucaacagaa

SEQ ID NO: 1441486 - RNA, 19 nt, Artificial Sequence
  Description of Artificial Sequence: Synthetic oligonucleotide
  Sense strand starting at position 3237 of SEQ ID NO: 1243787
guaggagacugucucaaug

SEQ ID NO: 1441487 - RNA, 19 nt, Artificial Sequence
  Description of Artificial Sequence: Synthetic oligonucleotide
  Antisense strand to SEQ ID NO: 1441486
cauugagacagucuccuac

SEQ ID NO: 1441488 - RNA, 19 nt, Artificial Sequence
  Description of Artificial Sequence: Synthetic oligonucleotide
  Sense strand starting at position 3247 of SEQ ID NO: 1243787
gucucaauguaauugugau

SEQ ID NO: 1441489 - RNA, 19 nt, Artificial Sequence
  Description of Artificial Sequence: Synthetic oligonucleotide
  Antisense strand to SEQ ID NO: 1441488
aucacaauuacauugagac

SEQ ID NO: 1441490 - RNA, 19 nt, Artificial Sequence
  Description of Artificial Sequence: Synthetic oligonucleotide
  Sense strand starting at position 3253 of SEQ ID NO: 1243787
auguaauugugaucaucaa

SEQ ID NO: 1441491 - RNA, 19 nt, Artificial Sequence
  Description of Artificial Sequence: Synthetic oligonucleotide
  Antisense strand to SEQ ID NO: 1441490
uugaugaucacaauuacau

SEQ ID NO: 1441492 - RNA, 19 nt, Artificial Sequence
  Description of Artificial Sequence: Synthetic oligonucleotide
  Sense strand starting at position 3254 of SEQ ID NO: 1243787
uguaauugugaucaucaaa

SEQ ID NO: 1441493 - RNA, 19 nt, Artificial Sequence
  Description of Artificial Sequence: Synthetic oligonucleotide
  Antisense strand to SEQ ID NO: 1441492
uuugaugaucacaauuaca

SEQ ID NO: 1441494 - RNA, 19 nt, Artificial Sequence
  Description of Artificial Sequence: Synthetic oligonucleotide
  Sense strand starting at position 3285 of SEQ ID NO: 1243787
aaggguucugcaggagaaa

SEQ ID NO: 1441495 - RNA, 19 nt, Artificial Sequence
  Description of Artificial Sequence: Synthetic oligonucleotide
  Antisense strand to SEQ ID NO: 1441494
uuucuccugcagaacccuu

SEQ ID NO: 1441496 - RNA, 19 nt, Artificial Sequence
  Description of Artificial Sequence: Synthetic oligonucleotide
  Sense strand starting at position 3288 of SEQ ID NO: 1243787
gguucugcaggagaaaugu

SEQ ID NO: 1441497 - RNA, 19 nt, Artificial Sequence
  Description of Artificial Sequence: Synthetic oligonucleotide
  Antisense strand to SEQ ID NO: 1441496
acauuucuccugcagaacc

SEQ ID NO: 1441498 - RNA, 19 nt, Artificial Sequence
  Description of Artificial Sequence: Synthetic oligonucleotide
  Sense strand starting at position 3369 of SEQ ID NO: 1243787
caauuuauggcguguucuu

SEQ ID NO: 1441499 - RNA, 19 nt, Artificial Sequence
  Description of Artificial Sequence: Synthetic oligonucleotide
  Antisense strand to SEQ ID NO: 1441498
aagaacacgccauaaauug

SEQ ID NO: 1441500 - RNA, 19 nt, Artificial Sequence
  Description of Artificial Sequence: Synthetic oligonucleotide
  Sense strand starting at position 3388 of SEQ ID NO: 1243787
caguuucuuugguuagaua

SEQ ID NO: 1441501 - RNA, 19 nt, Artificial Sequence
  Description of Artificial Sequence: Synthetic oligonucleotide
  Antisense strand to SEQ ID NO: 1441500
uaucuaaccaaagaaacug

SEQ ID NO: 1441502 - RNA, 19 nt, Artificial Sequence
  Description of Artificial Sequence: Synthetic oligonucleotide
  Sense strand starting at position 3389 of SEQ ID NO: 1243787
aguuucuuugguuagauag

SEQ ID NO: 1441503 - RNA, 19 nt, Artificial Sequence
  Description of Artificial Sequence: Synthetic oligonucleotide
  Antisense strand to SEQ ID NO: 1441502
cuaucuaaccaaagaaacu

SEQ ID NO: 1441504 - RNA, 19 nt, Artificial Sequence
  Description of Artificial Sequence: Synthetic oligonucleotide
  Sense strand starting at position 3395 of SEQ ID NO: 1243787
uuugguuagauagguuaca

SEQ ID NO: 1441505 - RNA, 19 nt, Artificial Sequence
  Description of Artificial Sequence: Synthetic oligonucleotide
  Antisense strand to SEQ ID NO: 1441504
uguaaccuaucuaaccaaa

SEQ ID NO: 1441506 - RNA, 19 nt, Artificial Sequence
  Description of Artificial Sequence: Synthetic oligonucleotide
  Sense strand starting at position 3396 of SEQ ID NO: 1243787
uugguuagauagguuacau

SEQ ID NO: 1441507 - RNA, 19 nt, Artificial Sequence
  Description of Artificial Sequence: Synthetic oligonucleotide
  Antisense strand to SEQ ID NO: 1441506
auguaaccuaucuaaccaa

SEQ ID NO: 1441508 - RNA, 19 nt, Artificial Sequence
  Description of Artificial Sequence: Synthetic oligonucleotide
  Sense strand starting at position 3446 of SEQ ID NO: 1243787
ucagauguuguuugcaaag

SEQ ID NO: 1441509 - RNA, 19 nt, Artificial Sequence
  Description of Artificial Sequence: Synthetic oligonucleotide
  Antisense strand to SEQ ID NO: 1441508
cuuugcaaacaacaucuga

SEQ ID NO: 1441510 - RNA, 19 nt, Artificial Sequence
  Description of Artificial Sequence: Synthetic oligonucleotide
  Sense strand starting at position 3496 of SEQ ID NO: 1243787
gaagguguuuguuuacuca

SEQ ID NO: 1441511 - RNA, 19 nt, Artificial Sequence
  Description of Artificial Sequence: Synthetic oligonucleotide
  Antisense strand to SEQ ID NO: 1441510
ugaguaaacaaacaccuuc

SEQ ID NO: 1441512 - RNA, 19 nt, Artificial Sequence
  Description of Artificial Sequence: Synthetic oligonucleotide
  Sense strand starting at position 3526 of SEQ ID NO: 1243787
aguaaagaauccuuguguu

SEQ ID NO: 1441513 - RNA, 19 nt, Artificial Sequence
  Description of Artificial Sequence: Synthetic oligonucleotide
  Antisense strand to SEQ ID NO: 1441512
aacacaaggauucuuuacu

SEQ ID NO: 1441514 - RNA, 19 nt, Artificial Sequence
  Description of Artificial Sequence: Synthetic oligonucleotide
  Sense strand starting at position 3530 of SEQ ID NO: 1243787
aagaauccuuguguuggga

SEQ ID NO: 1441515 - RNA, 19 nt, Artificial Sequence
  Description of Artificial Sequence: Synthetic oligonucleotide
  Antisense strand to SEQ ID NO: 1441514
ucccaacacaaggauucuu

SEQ ID NO: 1441516 - RNA, 19 nt, Artificial Sequence
  Description of Artificial Sequence: Synthetic oligonucleotide
  Sense strand starting at position 3533 of SEQ ID NO: 1243787
aauccuuguguugggauaa

SEQ ID NO: 1441517 - RNA, 19 nt, Artificial Sequence
  Description of Artificial Sequence: Synthetic oligonucleotide
  Antisense strand to SEQ ID NO: 1441516
uuaucccaacacaaggauu

SEQ ID NO: 1441518 - RNA, 19 nt, Artificial Sequence
  Description of Artificial Sequence: Synthetic oligonucleotide
  Sense strand starting at position 3621 of SEQ ID NO: 1243787
gcagcuuggcaguaaauug

SEQ ID NO: 1441519 - RNA, 19 nt, Artificial Sequence
  Description of Artificial Sequence: Synthetic oligonucleotide
  Antisense strand to SEQ ID NO: 1441518
caauuuacugccaagcugc

SEQ ID NO: 1441520 - RNA, 19 nt, Artificial Sequence
  Description of Artificial Sequence: Synthetic oligonucleotide
  Sense strand starting at position 3675 of SEQ ID NO: 1243787
uacaaauagcuggaucagu

SEQ ID NO: 1441521 - RNA, 19 nt, Artificial Sequence
  Description of Artificial Sequence: Synthetic oligonucleotide
  Antisense strand to SEQ ID NO: 1441520
acugauccagcuauuugua

SEQ ID NO: 1441522 - RNA, 19 nt, Artificial Sequence
  Description of Artificial Sequence: Synthetic oligonucleotide
  Sense strand starting at position 3719 of SEQ ID NO: 1243787
ucaucuugggucuaagauu

SEQ ID NO: 1441523 - RNA, 19 nt, Artificial Sequence
  Description of Artificial Sequence: Synthetic oligonucleotide
  Antisense strand to SEQ ID NO: 1441522
aaucuuagacccaagauga

SEQ ID NO: 1441524 - RNA, 19 nt, Artificial Sequence
  Description of Artificial Sequence: Synthetic oligonucleotide
  Sense strand starting at position 3750 of SEQ ID NO: 1243787
uuuccaguuuccucuuuga

SEQ ID NO: 1441525 - RNA, 19 nt, Artificial Sequence
  Description of Artificial Sequence: Synthetic oligonucleotide
  Antisense strand to SEQ ID NO: 1441524
ucaaagaggaaacuggaaa

SEQ ID NO: 1441526 - RNA, 19 nt, Artificial Sequence
  Description of Artificial Sequence: Synthetic oligonucleotide
  Sense strand starting at position 3771 of SEQ ID NO: 1243787
caugguaugcugggauacu

SEQ ID NO: 1441527 - RNA, 19 nt, Artificial Sequence
  Description of Artificial Sequence: Synthetic oligonucleotide
  Antisense strand to SEQ ID NO: 1441526
aguaucccagcauaccaug

SEQ ID NO: 1441528 - RNA, 19 nt, Artificial Sequence
  Description of Artificial Sequence: Synthetic oligonucleotide
  Sense strand starting at position 3780 of SEQ ID NO: 1243787
cugggauacuugcuugauu

SEQ ID NO: 1441529 - RNA, 19 nt, Artificial Sequence
  Description of Artificial Sequence: Synthetic oligonucleotide
  Antisense strand to SEQ ID NO: 1441528
aaucaagcaaguaucccag

SEQ ID NO: 1441530 - RNA, 19 nt, Artificial Sequence
  Description of Artificial Sequence: Synthetic oligonucleotide
  Sense strand starting at position 3858 of SEQ ID NO: 1243787
uugcuagaauuugauacua

SEQ ID NO: 1441531 - RNA, 19 nt, Artificial Sequence
  Description of Artificial Sequence: Synthetic oligonucleotide
  Antisense strand to SEQ ID NO: 1441530
uaguaucaaauucuagcaa

SEQ ID NO: 1441532 - RNA, 19 nt, Artificial Sequence
  Description of Artificial Sequence: Synthetic oligonucleotide
  Sense strand starting at position 3860 of SEQ ID NO: 1243787
gcuagaauuugauacuaac

SEQ ID NO: 1441533 - RNA, 19 nt, Artificial Sequence
  Description of Artificial Sequence: Synthetic oligonucleotide
  Antisense strand to SEQ ID NO: 1441532
guuaguaucaaauucuagc

SEQ ID NO: 1441534 - RNA, 19 nt, Artificial Sequence
  Description of Artificial Sequence: Synthetic oligonucleotide
  Sense strand starting at position 3937 of SEQ ID NO: 1243787
cugcaaacaguuuggguaa

SEQ ID NO: 1441535 - RNA, 19 nt, Artificial Sequence
  Description of Artificial Sequence: Synthetic oligonucleotide
  Antisense strand to SEQ ID NO: 1441534
uuacccaaacuguuugcag

SEQ ID NO: 1441536 - RNA, 19 nt, Artificial Sequence
  Description of Artificial Sequence: Synthetic oligonucleotide
  Sense strand starting at position 468 of SEQ ID NO: 1243788
uccgguucccacguguuau

SEQ ID NO: 1441537 - RNA, 19 nt, Artificial Sequence
  Description of Artificial Sequence: Synthetic oligonucleotide
  Antisense strand to SEQ ID NO: 1441536
auaacacgugggaaccgga

SEQ ID NO: 1441538 - RNA, 19 nt, Artificial Sequence
  Description of Artificial Sequence: Synthetic oligonucleotide
  Sense strand starting at position 469 of SEQ ID NO: 1243788
ccgguucccacguguuaua

SEQ ID NO: 1441539 - RNA, 19 nt, Artificial Sequence
  Description of Artificial Sequence: Synthetic oligonucleotide
  Antisense strand to SEQ ID NO: 1441538
uauaacacgugggaaccgg

SEQ ID NO: 1441540 - RNA, 19 nt, Artificial Sequence
  Description of Artificial Sequence: Synthetic oligonucleotide
  Sense strand starting at position 470 of SEQ ID NO: 1243788
cgguucccacguguuauau

SEQ ID NO: 1441541 - RNA, 19 nt, Artificial Sequence
  Description of Artificial Sequence: Synthetic oligonucleotide
  Antisense strand to SEQ ID NO: 1441540
auauaacacgugggaaccg

SEQ ID NO: 1441542 - RNA, 19 nt, Artificial Sequence
  Description of Artificial Sequence: Synthetic oligonucleotide
  Sense strand starting at position 479 of SEQ ID NO: 1243788
cguguuauaucuugcaagg

SEQ ID NO: 1441543 - RNA, 19 nt, Artificial Sequence
  Description of Artificial Sequence: Synthetic oligonucleotide
  Antisense strand to SEQ ID NO: 1441542
ccuugcaagauauaacacg

SEQ ID NO: 1441544 - RNA, 19 nt, Artificial Sequence
  Description of Artificial Sequence: Synthetic oligonucleotide
  Sense strand starting at position 481 of SEQ ID NO: 1243788
uguuauaucuugcaaggga

SEQ ID NO: 1441545 - RNA, 19 nt, Artificial Sequence
  Description of Artificial Sequence: Synthetic oligonucleotide
  Antisense strand to SEQ ID NO: 1441544
ucccuugcaagauauaaca

SEQ ID NO: 1441546 - RNA, 19 nt, Artificial Sequence
  Description of Artificial Sequence: Synthetic oligonucleotide
  Sense strand starting at position 596 of SEQ ID NO: 1243788
aacauuuagccguggaugu

SEQ ID NO: 1441547 - RNA, 19 nt, Artificial Sequence
  Description of Artificial Sequence: Synthetic oligonucleotide
  Antisense strand to SEQ ID NO: 1441546
acauccacggcuaaauguu

SEQ ID NO: 1441548 - RNA, 19 nt, Artificial Sequence
  Description of Artificial Sequence: Synthetic oligonucleotide
  Sense strand starting at position 619 of SEQ ID NO: 1243788
gguagauuuccgcaggccu

SEQ ID NO: 1441549 - RNA, 19 nt, Artificial Sequence
  Description of Artificial Sequence: Synthetic oligonucleotide
  Antisense strand to SEQ ID NO: 1441548
aggccugcggaaaucuacc

SEQ ID NO: 1441550 - RNA, 19 nt, Artificial Sequence
  Description of Artificial Sequence: Synthetic oligonucleotide
  Sense strand starting at position 637 of SEQ ID NO: 1243788
ugacguagucccugauaca

SEQ ID NO: 1441551 - RNA, 19 nt, Artificial Sequence
  Description of Artificial Sequence: Synthetic oligonucleotide
  Antisense strand to SEQ ID NO: 1441550
uguaucagggacuacguca

SEQ ID NO: 1441552 - RNA, 19 nt, Artificial Sequence
  Description of Artificial Sequence: Synthetic oligonucleotide
  Sense strand starting at position 638 of SEQ ID NO: 1243788
gacguagucccugauacac

SEQ ID NO: 1441553 - RNA, 19 nt, Artificial Sequence
  Description of Artificial Sequence: Synthetic oligonucleotide
  Antisense strand to SEQ ID NO: 1441552
guguaucagggacuacguc

SEQ ID NO: 1441554 - RNA, 19 nt, Artificial Sequence
  Description of Artificial Sequence: Synthetic oligonucleotide
  Sense strand starting at position 751 of SEQ ID NO: 1243788
uaagcauguuacugcgaca

SEQ ID NO: 1441555 - RNA, 19 nt, Artificial Sequence
  Description of Artificial Sequence: Synthetic oligonucleotide
  Antisense strand to SEQ ID NO: 1441554
ugucgcaguaacaugcuua

SEQ ID NO: 1441556 - RNA, 19 nt, Artificial Sequence
  Description of Artificial Sequence: Synthetic oligonucleotide
  Sense strand starting at position 754 of SEQ ID NO: 1243788
gcauguuacugcgacaugu

SEQ ID NO: 1441557 - RNA, 19 nt, Artificial Sequence
  Description of Artificial Sequence: Synthetic oligonucleotide
  Antisense strand to SEQ ID NO: 1441556
acaugucgcaguaacaugc

SEQ ID NO: 1441558 - RNA, 19 nt, Artificial Sequence
  Description of Artificial Sequence: Synthetic oligonucleotide
  Sense strand starting at position 780 of SEQ ID NO: 1243788
ccacuuugcucaccaggaa

SEQ ID NO: 1441559 - RNA, 19 nt, Artificial Sequence
  Description of Artificial Sequence: Synthetic oligonucleotide
  Antisense strand to SEQ ID NO: 1441558
uuccuggugagcaaagugg

SEQ ID NO: 1441560 - RNA, 19 nt, Artificial Sequence
  Description of Artificial Sequence: Synthetic oligonucleotide
  Sense strand starting at position 1107 of SEQ ID NO: 1243788
agugacaguucccaacauu

SEQ ID NO: 1441561 - RNA, 19 nt, Artificial Sequence
  Description of Artificial Sequence: Synthetic oligonucleotide
  Antisense strand to SEQ ID NO: 1441560
aauguugggaacugucacu

SEQ ID NO: 1441562 - RNA, 19 nt, Artificial Sequence
  Description of Artificial Sequence: Synthetic oligonucleotide
  Sense strand starting at position 1361 of SEQ ID NO: 1243788
gcauaaauuagugauggca

SEQ ID NO: 1441563 - RNA, 19 nt, Artificial Sequence
  Description of Artificial Sequence: Synthetic oligonucleotide
  Antisense strand to SEQ ID NO: 1441562
ugccaucacuaauuuaugc

SEQ ID NO: 1441564 - RNA, 19 nt, Artificial Sequence
  Description of Artificial Sequence: Synthetic oligonucleotide
  Sense strand starting at position 1363 of SEQ ID NO: 1243788
auaaauuagugauggcauu

SEQ ID NO: 1441565 - RNA, 19 nt, Artificial Sequence
  Description of Artificial Sequence: Synthetic oligonucleotide
  Antisense strand to SEQ ID NO: 1441564
aaugccaucacuaauuuau

SEQ ID NO: 1441566 - RNA, 19 nt, Artificial Sequence
  Description of Artificial Sequence: Synthetic oligonucleotide
  Sense strand starting at position 2400 of SEQ ID NO: 1243788
gcacguucucaguguucac

SEQ ID NO: 1441567 - RNA, 19 nt, Artificial Sequence
  Description of Artificial Sequence: Synthetic oligonucleotide
  Antisense strand to SEQ ID NO: 1441566
gugaacacugagaacgugc

SEQ ID NO: 1441568 - RNA, 19 nt, Artificial Sequence
  Description of Artificial Sequence: Synthetic oligonucleotide
  Sense strand starting at position 2713 of SEQ ID NO: 1243788
ccaagaaccucggcagaaa

SEQ ID NO: 1441569 - RNA, 19 nt, Artificial Sequence
  Description of Artificial Sequence: Synthetic oligonucleotide
  Antisense strand to SEQ ID NO: 1441568
uuucugccgagguucuugg

SEQ ID NO: 1441570 - RNA, 19 nt, Artificial Sequence
  Description of Artificial Sequence: Synthetic oligonucleotide
  Sense strand starting at position 2759 of SEQ ID NO: 1243788
ccucaauggcuccgaauuu

SEQ ID NO: 1441571 - RNA, 19 nt, Artificial Sequence
  Description of Artificial Sequence: Synthetic oligonucleotide
  Antisense strand to SEQ ID NO: 1441570
aaauucggagccauugagg

SEQ ID NO: 1441572 - RNA, 19 nt, Artificial Sequence
  Description of Artificial Sequence: Synthetic oligonucleotide
  Sense strand starting at position 2760 of SEQ ID NO: 1243788
cucaauggcuccgaauuua

SEQ ID NO: 1441573 - RNA, 19 nt, Artificial Sequence
  Description of Artificial Sequence: Synthetic oligonucleotide
  Antisense strand to SEQ ID NO: 1441572
uaaauucggagccauugag

SEQ ID NO: 1441574 - RNA, 19 nt, Artificial Sequence
  Description of Artificial Sequence: Synthetic oligonucleotide
  Sense strand starting at position 3115 of SEQ ID NO: 1243788
gcgagugugaaguuuggca

SEQ ID NO: 1441575 - RNA, 19 nt, Artificial Sequence
  Description of Artificial Sequence: Synthetic oligonucleotide
  Antisense strand to SEQ ID NO: 1441574
ugccaaacuucacacucgc

SEQ ID NO: 1441576 - RNA, 19 nt, Artificial Sequence
  Description of Artificial Sequence: Synthetic oligonucleotide
  Sense strand starting at position 3371 of SEQ ID NO: 1243788
ugcgcaaucccuuggcuga

SEQ ID NO: 1441577 - RNA, 19 nt, Artificial Sequence
  Description of Artificial Sequence: Synthetic oligonucleotide
  Antisense strand to SEQ ID NO: 1441576
ucagccaagggauugcgca

SEQ ID NO: 1441578 - RNA, 19 nt, Artificial Sequence
  Description of Artificial Sequence: Synthetic oligonucleotide
  Sense strand starting at position 3559 of SEQ ID NO: 1243788
gcucguguucgcccaggaa

SEQ ID NO: 1441579 - RNA, 19 nt, Artificial Sequence
  Description of Artificial Sequence: Synthetic oligonucleotide
  Antisense strand to SEQ ID NO: 1441578
uuccugggcgaacacgagc

SEQ ID NO: 1441580 - RNA, 19 nt, Artificial Sequence
  Description of Artificial Sequence: Synthetic oligonucleotide
  Sense strand starting at position 3761 of SEQ ID NO: 1243788
uggguuugcgacugaucuc

SEQ ID NO: 1441581 - RNA, 19 nt, Artificial Sequence
  Description of Artificial Sequence: Synthetic oligonucleotide
  Antisense strand to SEQ ID NO: 1441580
gagaucagucgcaaaccca

SEQ ID NO: 1441582 - RNA, 19 nt, Artificial Sequence
  Description of Artificial Sequence: Synthetic oligonucleotide
  Sense strand starting at position 3762 of SEQ ID NO: 1243788
ggguuugcgacugaucucu

SEQ ID NO: 1441583 - RNA, 19 nt, Artificial Sequence
  Description of Artificial Sequence: Synthetic oligonucleotide
  Antisense strand to SEQ ID NO: 1441582
agagaucagucgcaaaccc

SEQ ID NO: 1441584 - RNA, 19 nt, Artificial Sequence
  Description of Artificial Sequence: Synthetic oligonucleotide
  Sense strand starting at position 3764 of SEQ ID NO: 1243788
guuugcgacugaucucuaa

SEQ ID NO: 1441585 - RNA, 19 nt, Artificial Sequence
  Description of Artificial Sequence: Synthetic oligonucleotide
  Antisense strand to SEQ ID NO: 1441584
uuagagaucagucgcaaac

SEQ ID NO: 1441586 - RNA, 19 nt, Artificial Sequence
  Description of Artificial Sequence: Synthetic oligonucleotide
  Sense strand starting at position 3767 of SEQ ID NO: 1243788
ugcgacugaucucuaacga

SEQ ID NO: 1441587 - RNA, 19 nt, Artificial Sequence
  Description of Artificial Sequence: Synthetic oligonucleotide
  Antisense strand to SEQ ID NO: 1441586
ucguuagagaucagucgca

SEQ ID NO: 1441588 - RNA, 19 nt, Artificial Sequence
  Description of Artificial Sequence: Synthetic oligonucleotide
  Sense strand starting at position 3768 of SEQ ID NO: 1243788
gcgacugaucucuaacgag

SEQ ID NO: 1441589 - RNA, 19 nt, Artificial Sequence
  Description of Artificial Sequence: Synthetic oligonucleotide
  Antisense strand to SEQ ID NO: 1441588
cucguuagagaucagucgc

SEQ ID NO: 1441590 - RNA, 19 nt, Artificial Sequence
  Description of Artificial Sequence: Synthetic oligonucleotide
  Sense strand starting at position 3771 of SEQ ID NO: 1243788
acugaucucuaacgagcuu

SEQ ID NO: 1441591 - RNA, 19 nt, Artificial Sequence
  Description of Artificial Sequence: Synthetic oligonucleotide
  Antisense strand to SEQ ID NO: 1441590
aagcucguuagagaucagu

SEQ ID NO: 1441592 - RNA, 19 nt, Artificial Sequence
  Description of Artificial Sequence: Synthetic oligonucleotide
  Sense strand starting at position 3801 of SEQ ID NO: 1243788
cuaggauucccugaguguu

SEQ ID NO: 1441593 - RNA, 19 nt, Artificial Sequence
  Description of Artificial Sequence: Synthetic oligonucleotide
  Antisense strand to SEQ ID NO: 1441592
aacacucagggaauccuag

SEQ ID NO: 1441594 - RNA, 19 nt, Artificial Sequence
  Description of Artificial Sequence: Synthetic oligonucleotide
  Sense strand starting at position 3860 of SEQ ID NO: 1243788
ccugguuucccugacuagu

SEQ ID NO: 1441595 - RNA, 19 nt, Artificial Sequence
  Description of Artificial Sequence: Synthetic oligonucleotide
  Antisense strand to SEQ ID NO: 1441594
acuagucagggaaaccagg

SEQ ID NO: 1441596 - RNA, 19 nt, Artificial Sequence
  Description of Artificial Sequence: Synthetic oligonucleotide
  Sense strand starting at position 390 of SEQ ID NO: 1243789
cuggcugagucacuucgaa

SEQ ID NO: 1441597 - RNA, 19 nt, Artificial Sequence
  Description of Artificial Sequence: Synthetic oligonucleotide
  Antisense strand to SEQ ID NO: 1441596
uucgaagugacucagccag

SEQ ID NO: 1441598 - RNA, 19 nt, Artificial Sequence
  Description of Artificial Sequence: Synthetic oligonucleotide
  Sense strand starting at position 402 of SEQ ID NO: 1243789
cuucgaaacucguaaguuu

SEQ ID NO: 1441599 - RNA, 19 nt, Artificial Sequence
  Description of Artificial Sequence: Synthetic oligonucleotide
  Antisense strand to SEQ ID NO: 1441598
aaacuuacgaguuucgaag

SEQ ID NO: 1441600 - RNA, 19 nt, Artificial Sequence
  Description of Artificial Sequence: Synthetic oligonucleotide
  Sense strand starting at position 452 of SEQ ID NO: 1243789
agaagauggucucaagagu

SEQ ID NO: 1441601 - RNA, 19 nt, Artificial Sequence
  Description of Artificial Sequence: Synthetic oligonucleotide
  Antisense strand to SEQ ID NO: 1441600
acucuugagaccaucuucu

SEQ ID NO: 1441602 - RNA, 19 nt, Artificial Sequence
  Description of Artificial Sequence: Synthetic oligonucleotide
  Sense strand starting at position 530 of SEQ ID NO: 1243789
acccuaugaugccugggaa

SEQ ID NO: 1441603 - RNA, 19 nt, Artificial Sequence
  Description of Artificial Sequence: Synthetic oligonucleotide
  Antisense strand to SEQ ID NO: 1441602
uucccaggcaucauagggu

SEQ ID NO: 1441604 - RNA, 19 nt, Artificial Sequence
  Description of Artificial Sequence: Synthetic oligonucleotide
  Sense strand starting at position 531 of SEQ ID NO: 1243789
cccuaugaugccugggaau

SEQ ID NO: 1441605 - RNA, 19 nt, Artificial Sequence
  Description of Artificial Sequence: Synthetic oligonucleotide
  Antisense strand to SEQ ID NO: 1441604
auucccaggcaucauaggg

SEQ ID NO: 1441606 - RNA, 19 nt, Artificial Sequence
  Description of Artificial Sequence: Synthetic oligonucleotide
  Sense strand starting at position 702 of SEQ ID NO: 1243789
auuugauuauuguguccau

SEQ ID NO: 1441607 - RNA, 19 nt, Artificial Sequence
  Description of Artificial Sequence: Synthetic oligonucleotide
  Antisense strand to SEQ ID NO: 1441606
auggacacaauaaucaaau

SEQ ID NO: 1441608 - RNA, 19 nt, Artificial Sequence
  Description of Artificial Sequence: Synthetic oligonucleotide
  Sense strand starting at position 703 of SEQ ID NO: 1243789
uuugauuauuguguccauu

SEQ ID NO: 1441609 - RNA, 19 nt, Artificial Sequence
  Description of Artificial Sequence: Synthetic oligonucleotide
  Antisense strand to SEQ ID NO: 1441608
aauggacacaauaaucaaa

SEQ ID NO: 1441610 - RNA, 19 nt, Artificial Sequence
  Description of Artificial Sequence: Synthetic oligonucleotide
  Sense strand starting at position 740 of SEQ ID NO: 1243789
ggaauucuaguguggccaa

SEQ ID NO: 1441611 - RNA, 19 nt, Artificial Sequence
  Description of Artificial Sequence: Synthetic oligonucleotide
  Antisense strand to SEQ ID NO: 1441610
uuggccacacuagaauucc

SEQ ID NO: 1441612 - RNA, 19 nt, Artificial Sequence
  Description of Artificial Sequence: Synthetic oligonucleotide
  Sense strand starting at position 787 of SEQ ID NO: 1243789
gcuacugacuuggugacau

SEQ ID NO: 1441613 - RNA, 19 nt, Artificial Sequence
  Description of Artificial Sequence: Synthetic oligonucleotide
  Antisense strand to SEQ ID NO: 1441612
augucaccaagucaguagc

SEQ ID NO: 1441614 - RNA, 19 nt, Artificial Sequence
  Description of Artificial Sequence: Synthetic oligonucleotide
  Sense strand starting at position 798 of SEQ ID NO: 1243789
ggugacaucuugucaggga

SEQ ID NO: 1441615 - RNA, 19 nt, Artificial Sequence
  Description of Artificial Sequence: Synthetic oligonucleotide
  Antisense strand to SEQ ID NO: 1441614
ucccugacaagaugucacc

SEQ ID NO: 1441616 - RNA, 19 nt, Artificial Sequence
  Description of Artificial Sequence: Synthetic oligonucleotide
  Sense strand starting at position 799 of SEQ ID NO: 1243789
gugacaucuugucagggaa

SEQ ID NO: 1441617 - RNA, 19 nt, Artificial Sequence
  Description of Artificial Sequence: Synthetic oligonucleotide
  Antisense strand to SEQ ID NO: 1441616
uucccugacaagaugucac

SEQ ID NO: 1441618 - RNA, 19 nt, Artificial Sequence
  Description of Artificial Sequence: Synthetic oligonucleotide
  Sense strand starting at position 801 of SEQ ID NO: 1243789
gacaucuugucagggaacu

SEQ ID NO: 1441619 - RNA, 19 nt, Artificial Sequence
  Description of Artificial Sequence: Synthetic oligonucleotide
  Antisense strand to SEQ ID NO: 1441618
aguucccugacaagauguc

SEQ ID NO: 1441620 - RNA, 19 nt, Artificial Sequence
  Description of Artificial Sequence: Synthetic oligonucleotide
  Sense strand starting at position 996 of SEQ ID NO: 1243789
aucucucuuucccuggaga

SEQ ID NO: 1441621 - RNA, 19 nt, Artificial Sequence
  Description of Artificial Sequence: Synthetic oligonucleotide
  Antisense strand to SEQ ID NO: 1441620
ucuccagggaaagagagau

SEQ ID NO: 1441622 - RNA, 19 nt, Artificial Sequence
  Description of Artificial Sequence: Synthetic oligonucleotide
  Sense strand starting at position 1026 of SEQ ID NO: 1243789
gagaaagggugcgugagua

SEQ ID NO: 1441623 - RNA, 19 nt, Artificial Sequence
  Description of Artificial Sequence: Synthetic oligonucleotide
  Antisense strand to SEQ ID NO: 1441622
uacucacgcacccuuucuc

SEQ ID NO: 1441624 - RNA, 19 nt, Artificial Sequence
  Description of Artificial Sequence: Synthetic oligonucleotide
  Sense strand starting at position 1027 of SEQ ID NO: 1243789
agaaagggugcgugaguaa

SEQ ID NO: 1441625 - RNA, 19 nt, Artificial Sequence
  Description of Artificial Sequence: Synthetic oligonucleotide
  Antisense strand to SEQ ID NO: 1441624
uuacucacgcacccuuucu

SEQ ID NO: 1441626 - RNA, 19 nt, Artificial Sequence
  Description of Artificial Sequence: Synthetic oligonucleotide
  Sense strand starting at position 1030 of SEQ ID NO: 1243789
aagggugcgugaguaaaga

SEQ ID NO: 1441627 - RNA, 19 nt, Artificial Sequence
  Description of Artificial Sequence: Synthetic oligonucleotide
  Antisense strand to SEQ ID NO: 1441626
ucuuuacucacgcacccuu

SEQ ID NO: 1441628 - RNA, 19 nt, Artificial Sequence
  Description of Artificial Sequence: Synthetic oligonucleotide
  Sense strand starting at position 1031 of SEQ ID NO: 1243789
agggugcgugaguaaagaa

SEQ ID NO: 1441629 - RNA, 19 nt, Artificial Sequence
  Description of Artificial Sequence: Synthetic oligonucleotide
  Antisense strand to SEQ ID NO: 1441628
uucuuuacucacgcacccu

SEQ ID NO: 1441630 - RNA, 19 nt, Artificial Sequence
  Description of Artificial Sequence: Synthetic oligonucleotide
  Sense strand starting at position 1088 of SEQ ID NO: 1243789
ucuacuuguuucuaaguga

SEQ ID NO: 1441631 - RNA, 19 nt, Artificial Sequence
  Description of Artificial Sequence: Synthetic oligonucleotide
  Antisense strand to SEQ ID NO: 1441630
ucacuuagaaacaaguaga

SEQ ID NO: 1441632 - RNA, 19 nt, Artificial Sequence
  Description of Artificial Sequence: Synthetic oligonucleotide
  Sense strand starting at position 1126 of SEQ ID NO: 1243789
gucuguaccuuuccucaaa

SEQ ID NO: 1441633 - RNA, 19 nt, Artificial Sequence
  Description of Artificial Sequence: Synthetic oligonucleotide
  Antisense strand to SEQ ID NO: 1441632
uuugaggaaagguacagac

SEQ ID NO: 1441634 - RNA, 19 nt, Artificial Sequence
  Description of Artificial Sequence: Synthetic oligonucleotide
  Sense strand starting at position 1157 of SEQ ID NO: 1243789
gcgagcauccaggauguuu

SEQ ID NO: 1441635 - RNA, 19 nt, Artificial Sequence
  Description of Artificial Sequence: Synthetic oligonucleotide
  Antisense strand to SEQ ID NO: 1441634
aaacauccuggaugcucgc

SEQ ID NO: 1441636 - RNA, 19 nt, Artificial Sequence
  Description of Artificial Sequence: Synthetic oligonucleotide
  Sense strand starting at position 1213 of SEQ ID NO: 1243789
ggaagaagugggcaucagu

SEQ ID NO: 1441637 - RNA, 19 nt, Artificial Sequence
  Description of Artificial Sequence: Synthetic oligonucleotide
  Antisense strand to SEQ ID NO: 1441636
acugaugcccacuucuucc

SEQ ID NO: 1441638 - RNA, 19 nt, Artificial Sequence
  Description of Artificial Sequence: Synthetic oligonucleotide
  Sense strand starting at position 1353 of SEQ ID NO: 1243789
gguugagaauugcauauaa

SEQ ID NO: 1441639 - RNA, 19 nt, Artificial Sequence
  Description of Artificial Sequence: Synthetic oligonucleotide
  Antisense strand to SEQ ID NO: 1441638
uuauaugcaauucucaacc

SEQ ID NO: 1441640 - RNA, 19 nt, Artificial Sequence
  Description of Artificial Sequence: Synthetic oligonucleotide
  Sense strand starting at position 1373 of SEQ ID NO: 1243789
cuacuuacuucugcgacca

SEQ ID NO: 1441641 - RNA, 19 nt, Artificial Sequence
  Description of Artificial Sequence: Synthetic oligonucleotide
  Antisense strand to SEQ ID NO: 1441640
uggucgcagaaguaaguag

SEQ ID NO: 1441642 - RNA, 19 nt, Artificial Sequence
  Description of Artificial Sequence: Synthetic oligonucleotide
  Sense strand starting at position 1480 of SEQ ID NO: 1243789
acaagaaaugcaugcgaaa

SEQ ID NO: 1441643 - RNA, 19 nt, Artificial Sequence
  Description of Artificial Sequence: Synthetic oligonucleotide
  Antisense strand to SEQ ID NO: 1441642
uuucgcaugcauuucuugu

SEQ ID NO: 1441644 - RNA, 19 nt, Artificial Sequence
  Description of Artificial Sequence: Synthetic oligonucleotide
  Sense strand starting at position 1499 of SEQ ID NO: 1243789
augcaugcaccagaugaau

SEQ ID NO: 1441645 - RNA, 19 nt, Artificial Sequence
  Description of Artificial Sequence: Synthetic oligonucleotide
  Antisense strand to SEQ ID NO: 1441644
auucaucuggugcaugcau

SEQ ID NO: 1441646 - RNA, 19 nt, Artificial Sequence
  Description of Artificial Sequence: Synthetic oligonucleotide
  Sense strand starting at position 1508 of SEQ ID NO: 1243789
ccagaugaaugcucgaaac

SEQ ID NO: 1441647 - RNA, 19 nt, Artificial Sequence
  Description of Artificial Sequence: Synthetic oligonucleotide
  Antisense strand to SEQ ID NO: 1441646
guuucgagcauucaucugg

SEQ ID NO: 1441648 - RNA, 19 nt, Artificial Sequence
  Description of Artificial Sequence: Synthetic oligonucleotide
  Sense strand starting at position 1868 of SEQ ID NO: 1243789
cgcugaaagcuccauguug

SEQ ID NO: 1441649 - RNA, 19 nt, Artificial Sequence
  Description of Artificial Sequence: Synthetic oligonucleotide
  Antisense strand to SEQ ID NO: 1441648
caacauggagcuuucagcg

SEQ ID NO: 1441650 - RNA, 19 nt, Artificial Sequence
  Description of Artificial Sequence: Synthetic oligonucleotide
  Sense strand starting at position 1870 of SEQ ID NO: 1243789
cugaaagcuccauguugac

SEQ ID NO: 1441651 - RNA, 19 nt, Artificial Sequence
  Description of Artificial Sequence: Synthetic oligonucleotide
  Antisense strand to SEQ ID NO: 1441650
gucaacauggagcuuucag

SEQ ID NO: 1441652 - RNA, 19 nt, Artificial Sequence
  Description of Artificial Sequence: Synthetic oligonucleotide
  Sense strand starting at position 3157 of SEQ ID NO: 1243789
gcggacauccugcgagaaa

SEQ ID NO: 1441653 - RNA, 19 nt, Artificial Sequence
  Description of Artificial Sequence: Synthetic oligonucleotide
  Antisense strand to SEQ ID NO: 1441652
uuucucgcaggauguccgc

SEQ ID NO: 1441654 - RNA, 19 nt, Artificial Sequence
  Description of Artificial Sequence: Synthetic oligonucleotide
  Sense strand starting at position 3158 of SEQ ID NO: 1243789
cggacauccugcgagaaac

SEQ ID NO: 1441655 - RNA, 19 nt, Artificial Sequence
  Description of Artificial Sequence: Synthetic oligonucleotide
  Antisense strand to SEQ ID NO: 1441654
guuucucgcaggauguccg

SEQ ID NO: 1441656 - RNA, 19 nt, Artificial Sequence
  Description of Artificial Sequence: Synthetic oligonucleotide
  Sense strand starting at position 3230 of SEQ ID NO: 1243789
gggucucacgcgcgaagau

SEQ ID NO: 1441657 - RNA, 19 nt, Artificial Sequence
  Description of Artificial Sequence: Synthetic oligonucleotide
  Antisense strand to SEQ ID NO: 1441656
aucuucgcgcgugagaccc

SEQ ID NO: 1441658 - RNA, 19 nt, Artificial Sequence
  Description of Artificial Sequence: Synthetic oligonucleotide
  Sense strand starting at position 3771 of SEQ ID NO: 1243789
uggccuuguuccuaaacuu

SEQ ID NO: 1441659 - RNA, 19 nt, Artificial Sequence
  Description of Artificial Sequence: Synthetic oligonucleotide
  Antisense strand to SEQ ID NO: 1441658
aaguuuaggaacaaggcca

SEQ ID NO: 1441660 - RNA, 19 nt, Artificial Sequence
  Description of Artificial Sequence: Synthetic oligonucleotide
  Sense strand starting at position 3827 of SEQ ID NO: 1243789
ggccguucugucugaacga

SEQ ID NO: 1441661 - RNA, 19 nt, Artificial Sequence
  Description of Artificial Sequence: Synthetic oligonucleotide
  Antisense strand to SEQ ID NO: 1441660
ucguucagacagaacggcc

SEQ ID NO: 1441662 - RNA, 19 nt, Artificial Sequence
  Description of Artificial Sequence: Synthetic oligonucleotide
  Sense strand starting at position 3828 of SEQ ID NO: 1243789
gccguucugucugaacgaa

SEQ ID NO: 1441663 - RNA, 19 nt, Artificial Sequence
  Description of Artificial Sequence: Synthetic oligonucleotide
  Antisense strand to SEQ ID NO: 1441662
uucguucagacagaacggc

SEQ ID NO: 1441664 - RNA, 19 nt, Artificial Sequence
  Description of Artificial Sequence: Synthetic oligonucleotide
  Sense strand starting at position 3914 of SEQ ID NO: 1243789
ccgcguccuuaaucauaaa

SEQ ID NO: 1441665 - RNA, 19 nt, Artificial Sequence
  Description of Artificial Sequence: Synthetic oligonucleotide
  Antisense strand to SEQ ID NO: 1441664
uuuaugauuaaggacgcgg

SEQ ID NO: 1441666 - RNA, 19 nt, Artificial Sequence
  Description of Artificial Sequence: Synthetic oligonucleotide
  Sense strand starting at position 3932 of SEQ ID NO: 1243789
aaagucauucccgguaaca

SEQ ID NO: 1441667 - RNA, 19 nt, Artificial Sequence
  Description of Artificial Sequence: Synthetic oligonucleotide
  Antisense strand to SEQ ID NO: 1441666
uguuaccgggaaugacuuu

SEQ ID NO: 1441668 - RNA, 19 nt, Artificial Sequence
  Description of Artificial Sequence: Synthetic oligonucleotide
  Sense strand starting at position 3934 of SEQ ID NO: 1243789
agucauucccgguaacaaa

SEQ ID NO: 1441669 - RNA, 19 nt, Artificial Sequence
  Description of Artificial Sequence: Synthetic oligonucleotide
  Antisense strand to SEQ ID NO: 1441668
uuuguuaccgggaaugacu

SEQ ID NO: 1441670 - RNA, 19 nt, Artificial Sequence
  Description of Artificial Sequence: Synthetic oligonucleotide
  Sense strand starting at position 3974 of SEQ ID NO: 1243789
gcgauacagcuguuucugu

SEQ ID NO: 1441671 - RNA, 19 nt, Artificial Sequence
  Description of Artificial Sequence: Synthetic oligonucleotide
  Antisense strand to SEQ ID NO: 1441670
acagaaacagcuguaucgc

SEQ ID NO: 1441672 - RNA, 19 nt, Artificial Sequence
  Description of Artificial Sequence: Synthetic oligonucleotide
  Sense strand starting at position 3981 of SEQ ID NO: 1243789
agcuguuucuguuuaagcu

SEQ ID NO: 1441673 - RNA, 19 nt, Artificial Sequence
  Description of Artificial Sequence: Synthetic oligonucleotide
  Antisense strand to SEQ ID NO: 1441672
agcuuaaacagaaacagcu

SEQ ID NO: 1441674 - RNA, 19 nt, Artificial Sequence
  Description of Artificial Sequence: Synthetic oligonucleotide
  Sense strand starting at position 3982 of SEQ ID NO: 1243789
gcuguuucuguuuaagcuu

SEQ ID NO: 1441675 - RNA, 19 nt, Artificial Sequence
  Description of Artificial Sequence: Synthetic oligonucleotide
  Antisense strand to SEQ ID NO: 1441674
aagcuuaaacagaaacagc

SEQ ID NO: 1441676 - RNA, 19 nt, Artificial Sequence
  Description of Artificial Sequence: Synthetic oligonucleotide
  Sense strand starting at position 22 of SEQ ID NO: 1243790
gagaauccugcuggacuaa

SEQ ID NO: 1441677 - RNA, 19 nt, Artificial Sequence
  Description of Artificial Sequence: Synthetic oligonucleotide
  Antisense strand to SEQ ID NO: 1441676
uuaguccagcaggauucuc

SEQ ID NO: 1441678 - RNA, 19 nt, Artificial Sequence
  Description of Artificial Sequence: Synthetic oligonucleotide
  Sense strand starting at position 210 of SEQ ID NO: 1243790
gaaauuaggcaauggacuu

SEQ ID NO: 1441679 - RNA, 19 nt, Artificial Sequence
  Description of Artificial Sequence: Synthetic oligonucleotide
  Antisense strand to SEQ ID NO: 1441678
aaguccauugccuaauuuc

SEQ ID NO: 1441680 - RNA, 19 nt, Artificial Sequence
  Description of Artificial Sequence: Synthetic oligonucleotide
  Sense strand starting at position 245 of SEQ ID NO: 1243790
gugugaggcagcuagacuu

SEQ ID NO: 1441681 - RNA, 19 nt, Artificial Sequence
  Description of Artificial Sequence: Synthetic oligonucleotide
  Antisense strand to SEQ ID NO: 1441680
aagucuagcugccucacac

SEQ ID NO: 1441682 - RNA, 19 nt, Artificial Sequence
  Description of Artificial Sequence: Synthetic oligonucleotide
  Sense strand starting at position 256 of SEQ ID NO: 1243790
cuagacuuugcaugguaua

SEQ ID NO: 1441683 - RNA, 19 nt, Artificial Sequence
  Description of Artificial Sequence: Synthetic oligonucleotide
  Antisense strand to SEQ ID NO: 1441682
uauaccaugcaaagucuag

SEQ ID NO: 1441684 - RNA, 19 nt, Artificial Sequence
  Description of Artificial Sequence: Synthetic oligonucleotide
  Sense strand starting at position 261 of SEQ ID NO: 1243790
cuuugcaugguauaggaua

SEQ ID NO: 1441685 - RNA, 19 nt, Artificial Sequence
  Description of Artificial Sequence: Synthetic oligonucleotide
  Antisense strand to SEQ ID NO: 1441684
uauccuauaccaugcaaag

SEQ ID NO: 1441686 - RNA, 19 nt, Artificial Sequence
  Description of Artificial Sequence: Synthetic oligonucleotide
  Sense strand starting at position 263 of SEQ ID NO: 1243790
uugcaugguauaggauaaa

SEQ ID NO: 1441687 - RNA, 19 nt, Artificial Sequence
  Description of Artificial Sequence: Synthetic oligonucleotide
  Antisense strand to SEQ ID NO: 1441686
uuuauccuauaccaugcaa

SEQ ID NO: 1441688 - RNA, 19 nt, Artificial Sequence
  Description of Artificial Sequence: Synthetic oligonucleotide
  Sense strand starting at position 366 of SEQ ID NO: 1243790
ucagucuuaugugcaagaa

SEQ ID NO: 1441689 - RNA, 19 nt, Artificial Sequence
  Description of Artificial Sequence: Synthetic oligonucleotide
  Antisense strand to SEQ ID NO: 1441688
uucuugcacauaagacuga

SEQ ID NO: 1441690 - RNA, 19 nt, Artificial Sequence
  Description of Artificial Sequence: Synthetic oligonucleotide
  Sense strand starting at position 367 of SEQ ID NO: 1243790
cagucuuaugugcaagaac

SEQ ID NO: 1441691 - RNA, 19 nt, Artificial Sequence
  Description of Artificial Sequence: Synthetic oligonucleotide
  Antisense strand to SEQ ID NO: 1441690
guucuugcacauaagacug

SEQ ID NO: 1441692 - RNA, 19 nt, Artificial Sequence
  Description of Artificial Sequence: Synthetic oligonucleotide
  Sense strand starting at position 370 of SEQ ID NO: 1243790
ucuuaugugcaagaacuca

SEQ ID NO: 1441693 - RNA, 19 nt, Artificial Sequence
  Description of Artificial Sequence: Synthetic oligonucleotide
  Antisense strand to SEQ ID NO: 1441692
ugaguucuugcacauaaga

SEQ ID NO: 1441694 - RNA, 19 nt, Artificial Sequence
  Description of Artificial Sequence: Synthetic oligonucleotide
  Sense strand starting at position 402 of SEQ ID NO: 1243790
guuacuguucuacagauaa

SEQ ID NO: 1441695 - RNA, 19 nt, Artificial Sequence
  Description of Artificial Sequence: Synthetic oligonucleotide
  Antisense strand to SEQ ID NO: 1441694
uuaucuguagaacaguaac

SEQ ID NO: 1441696 - RNA, 19 nt, Artificial Sequence
  Description of Artificial Sequence: Synthetic oligonucleotide
  Sense strand starting at position 490 of SEQ ID NO: 1243790
agcccagaaugguuugauu

SEQ ID NO: 1441697 - RNA, 19 nt, Artificial Sequence
  Description of Artificial Sequence: Synthetic oligonucleotide
  Antisense strand to SEQ ID NO: 1441696
aaucaaaccauucugggcu

SEQ ID NO: 1441698 - RNA, 19 nt, Artificial Sequence
  Description of Artificial Sequence: Synthetic oligonucleotide
  Sense strand starting at position 739 of SEQ ID NO: 1243790
gaauacaugucaguggaca

SEQ ID NO: 1441699 - RNA, 19 nt, Artificial Sequence
  Description of Artificial Sequence: Synthetic oligonucleotide
  Antisense strand to SEQ ID NO: 1441698
uguccacugacauguauuc

SEQ ID NO: 1441700 - RNA, 19 nt, Artificial Sequence
  Description of Artificial Sequence: Synthetic oligonucleotide
  Sense strand starting at position 741 of SEQ ID NO: 1243790
auacaugucaguggacagu

SEQ ID NO: 1441701 - RNA, 19 nt, Artificial Sequence
  Description of Artificial Sequence: Synthetic oligonucleotide
  Antisense strand to SEQ ID NO: 1441700
acuguccacugacauguau

SEQ ID NO: 1441702 - RNA, 19 nt, Artificial Sequence
  Description of Artificial Sequence: Synthetic oligonucleotide
  Sense strand starting at position 840 of SEQ ID NO: 1243790
cucagauugggagguguua

SEQ ID NO: 1441703 - RNA, 19 nt, Artificial Sequence
  Description of Artificial Sequence: Synthetic oligonucleotide
  Antisense strand to SEQ ID NO: 1441702
uaacaccucccaaucugag

SEQ ID NO: 1441704 - RNA, 19 nt, Artificial Sequence
  Description of Artificial Sequence: Synthetic oligonucleotide
  Sense strand starting at position 842 of SEQ ID NO: 1243790
cagauugggagguguuaca

SEQ ID NO: 1441705 - RNA, 19 nt, Artificial Sequence
  Description of Artificial Sequence: Synthetic oligonucleotide
  Antisense strand to SEQ ID NO: 1441704
uguaacaccucccaaucug

SEQ ID NO: 1441706 - RNA, 19 nt, Artificial Sequence
  Description of Artificial Sequence: Synthetic oligonucleotide
  Sense strand starting at position 914 of SEQ ID NO: 1243790
acacaagacuugucccuga

SEQ ID NO: 1441707 - RNA, 19 nt, Artificial Sequence
  Description of Artificial Sequence: Synthetic oligonucleotide
  Antisense strand to SEQ ID NO: 1441706
ucagggacaagucuugugu

SEQ ID NO: 1441708 - RNA, 19 nt, Artificial Sequence
  Description of Artificial Sequence: Synthetic oligonucleotide
  Sense strand starting at position 1017 of SEQ ID NO: 1243790
gcuucagucgaggaggcau

SEQ ID NO: 1441709 - RNA, 19 nt, Artificial Sequence
  Description of Artificial Sequence: Synthetic oligonucleotide
  Antisense strand to SEQ ID NO: 1441708
augccuccucgacugaagc

SEQ ID NO: 1441710 - RNA, 19 nt, Artificial Sequence
  Description of Artificial Sequence: Synthetic oligonucleotide
  Sense strand starting at position 1069 of SEQ ID NO: 1243790
cccauaggauuguucuaca

SEQ ID NO: 1441711 - RNA, 19 nt, Artificial Sequence
  Description of Artificial Sequence: Synthetic oligonucleotide
  Antisense strand to SEQ ID NO: 1441710
uguagaacaauccuauggg

SEQ ID NO: 1441712 - RNA, 19 nt, Artificial Sequence
  Description of Artificial Sequence: Synthetic oligonucleotide
  Sense strand starting at position 1074 of SEQ ID NO: 1243790
aggauuguucuacagcaag

SEQ ID NO: 1441713 - RNA, 19 nt, Artificial Sequence
  Description of Artificial Sequence: Synthetic oligonucleotide
  Antisense strand to SEQ ID NO: 1441712
cuugcuguagaacaauccu

SEQ ID NO: 1441714 - RNA, 19 nt, Artificial Sequence
  Description of Artificial Sequence: Synthetic oligonucleotide
  Sense strand starting at position 1328 of SEQ ID NO: 1243790
gggcaaugccuuuaguucu

SEQ ID NO: 1441715 - RNA, 19 nt, Artificial Sequence
  Description of Artificial Sequence: Synthetic oligonucleotide
  Antisense strand to SEQ ID NO: 1441714
agaacuaaaggcauugccc

SEQ ID NO: 1441716 - RNA, 19 nt, Artificial Sequence
  Description of Artificial Sequence: Synthetic oligonucleotide
  Sense strand starting at position 1339 of SEQ ID NO: 1243790
uuaguucuaucacuguacu

SEQ ID NO: 1441717 - RNA, 19 nt, Artificial Sequence
  Description of Artificial Sequence: Synthetic oligonucleotide
  Antisense strand to SEQ ID NO: 1441716
aguacagugauagaacuaa

SEQ ID NO: 1441718 - RNA, 19 nt, Artificial Sequence
  Description of Artificial Sequence: Synthetic oligonucleotide
  Sense strand starting at position 1361 of SEQ ID NO: 1243790
guaguuucugcauaucuga

SEQ ID NO: 1441719 - RNA, 19 nt, Artificial Sequence
  Description of Artificial Sequence: Synthetic oligonucleotide
  Antisense strand to SEQ ID NO: 1441718
ucagauaugcagaaacuac

SEQ ID NO: 1441720 - RNA, 19 nt, Artificial Sequence
  Description of Artificial Sequence: Synthetic oligonucleotide
  Sense strand starting at position 1509 of SEQ ID NO: 1243790
cgauccugaccucaaguaa

SEQ ID NO: 1441721 - RNA, 19 nt, Artificial Sequence
  Description of Artificial Sequence: Synthetic oligonucleotide
  Antisense strand to SEQ ID NO: 1441720
uuacuugaggucaggaucg

SEQ ID NO: 1441722 - RNA, 19 nt, Artificial Sequence
  Description of Artificial Sequence: Synthetic oligonucleotide
  Sense strand starting at position 1579 of SEQ ID NO: 1243790
cagagagauucucuacgug

SEQ ID NO: 1441723 - RNA, 19 nt, Artificial Sequence
  Description of Artificial Sequence: Synthetic oligonucleotide
  Antisense strand to SEQ ID NO: 1441722
cacguagagaaucucucug

SEQ ID NO: 1441724 - RNA, 19 nt, Artificial Sequence
  Description of Artificial Sequence: Synthetic oligonucleotide
  Sense strand starting at position 2375 of SEQ ID NO: 1243790
gguugcuccaggugggaua

SEQ ID NO: 1441725 - RNA, 19 nt, Artificial Sequence
  Description of Artificial Sequence: Synthetic oligonucleotide
  Antisense strand to SEQ ID NO: 1441724
uaucccaccuggagcaacc

SEQ ID NO: 1441726 - RNA, 19 nt, Artificial Sequence
  Description of Artificial Sequence: Synthetic oligonucleotide
  Sense strand starting at position 2450 of SEQ ID NO: 1243790
cuuuacggaucgguaaauu

SEQ ID NO: 1441727 - RNA, 19 nt, Artificial Sequence
  Description of Artificial Sequence: Synthetic oligonucleotide
  Antisense strand to SEQ ID NO: 1441726
aauuuaccgauccguaaag

SEQ ID NO: 1441728 - RNA, 19 nt, Artificial Sequence
  Description of Artificial Sequence: Synthetic oligonucleotide
  Sense strand starting at position 2728 of SEQ ID NO: 1243790
gcggcagugagguuuguua

SEQ ID NO: 1441729 - RNA, 19 nt, Artificial Sequence
  Description of Artificial Sequence: Synthetic oligonucleotide
  Antisense strand to SEQ ID NO: 1441728
uaacaaaccucacugccgc

SEQ ID NO: 1441730 - RNA, 19 nt, Artificial Sequence
  Description of Artificial Sequence: Synthetic oligonucleotide
  Sense strand starting at position 2732 of SEQ ID NO: 1243790
cagugagguuuguuaccau

SEQ ID NO: 1441731 - RNA, 19 nt, Artificial Sequence
  Description of Artificial Sequence: Synthetic oligonucleotide
  Antisense strand to SEQ ID NO: 1441730
augguaacaaaccucacug

SEQ ID NO: 1441732 - RNA, 19 nt, Artificial Sequence
  Description of Artificial Sequence: Synthetic oligonucleotide
  Sense strand starting at position 2735 of SEQ ID NO: 1243790
ugagguuuguuaccaugag

SEQ ID NO: 1441733 - RNA, 19 nt, Artificial Sequence
  Description of Artificial Sequence: Synthetic oligonucleotide
  Antisense strand to SEQ ID NO: 1441732
cucaugguaacaaaccuca

SEQ ID NO: 1441734 - RNA, 19 nt, Artificial Sequence
  Description of Artificial Sequence: Synthetic oligonucleotide
  Sense strand starting at position 2773 of SEQ ID NO: 1243790
gugggcaaaucagcuauau

SEQ ID NO: 1441735 - RNA, 19 nt, Artificial Sequence
  Description of Artificial Sequence: Synthetic oligonucleotide
  Antisense strand to SEQ ID NO: 1441734
auauagcugauuugcccac

SEQ ID NO: 1441736 - RNA, 19 nt, Artificial Sequence
  Description of Artificial Sequence: Synthetic oligonucleotide
  Sense strand starting at position 2839 of SEQ ID NO: 1243790
gagggcuuagucuaugcua

SEQ ID NO: 1441737 - RNA, 19 nt, Artificial Sequence
  Description of Artificial Sequence: Synthetic oligonucleotide
  Antisense strand to SEQ ID NO: 1441736
uagcauagacuaagcccuc

SEQ ID NO: 1441738 - RNA, 19 nt, Artificial Sequence
  Description of Artificial Sequence: Synthetic oligonucleotide
  Sense strand starting at position 2984 of SEQ ID NO: 1243790
gugggaaguuggagaguau

SEQ ID NO: 1441739 - RNA, 19 nt, Artificial Sequence
  Description of Artificial Sequence: Synthetic oligonucleotide
  Antisense strand to SEQ ID NO: 1441738
auacucuccaacuucccac

SEQ ID NO: 1441740 - RNA, 19 nt, Artificial Sequence
  Description of Artificial Sequence: Synthetic oligonucleotide
  Sense strand starting at position 2988 of SEQ ID NO: 1243790
gaaguuggagaguauguau

SEQ ID NO: 1441741 - RNA, 19 nt, Artificial Sequence
  Description of Artificial Sequence: Synthetic oligonucleotide
  Antisense strand to SEQ ID NO: 1441740
auacauacucuccaacuuc

SEQ ID NO: 1441742 - RNA, 19 nt, Artificial Sequence
  Description of Artificial Sequence: Synthetic oligonucleotide
  Sense strand starting at position 3151 of SEQ ID NO: 1243790
uggcuuguuccaugaacag

SEQ ID NO: 1441743 - RNA, 19 nt, Artificial Sequence
  Description of Artificial Sequence: Synthetic oligonucleotide
  Antisense strand to SEQ ID NO: 1441742
cuguucauggaacaagcca

SEQ ID NO: 1441744 - RNA, 19 nt, Artificial Sequence
  Description of Artificial Sequence: Synthetic oligonucleotide
  Sense strand starting at position 3583 of SEQ ID NO: 1243790
agaauaugcaugugaaagu

SEQ ID NO: 1441745 - RNA, 19 nt, Artificial Sequence
  Description of Artificial Sequence: Synthetic oligonucleotide
  Antisense strand to SEQ ID NO: 1441744
acuuucacaugcauauucu

SEQ ID NO: 1441746 - RNA, 19 nt, Artificial Sequence
  Description of Artificial Sequence: Synthetic oligonucleotide
  Sense strand starting at position 3592 of SEQ ID NO: 1243790
augugaaaguuuccauaau

SEQ ID NO: 1441747 - RNA, 19 nt, Artificial Sequence
  Description of Artificial Sequence: Synthetic oligonucleotide
  Antisense strand to SEQ ID NO: 1441746
auuauggaaacuuucacau

SEQ ID NO: 1441748 - RNA, 19 nt, Artificial Sequence
  Description of Artificial Sequence: Synthetic oligonucleotide
  Sense strand starting at position 3682 of SEQ ID NO: 1243790
gagggaguuggagguauca

SEQ ID NO: 1441749 - RNA, 19 nt, Artificial Sequence
  Description of Artificial Sequence: Synthetic oligonucleotide
  Antisense strand to SEQ ID NO: 1441748
ugauaccuccaacucccuc

SEQ ID NO: 1441750 - RNA, 19 nt, Artificial Sequence
  Description of Artificial Sequence: Synthetic oligonucleotide
  Sense strand starting at position 3684 of SEQ ID NO: 1243790
gggaguuggagguaucagu

SEQ ID NO: 1441751 - RNA, 19 nt, Artificial Sequence
  Description of Artificial Sequence: Synthetic oligonucleotide
  Antisense strand to SEQ ID NO: 1441750
acugauaccuccaacuccc

SEQ ID NO: 1441752 - RNA, 19 nt, Artificial Sequence
  Description of Artificial Sequence: Synthetic oligonucleotide
  Sense strand starting at position 3692 of SEQ ID NO: 1243790
gagguaucagucuaaucca

SEQ ID NO: 1441753 - RNA, 19 nt, Artificial Sequence
  Description of Artificial Sequence: Synthetic oligonucleotide
  Antisense strand to SEQ ID NO: 1441752
uggauuagacugauaccuc

SEQ ID NO: 1441754 - RNA, 19 nt, Artificial Sequence
  Description of Artificial Sequence: Synthetic oligonucleotide
  Sense strand starting at position 3695 of SEQ ID NO: 1243790
guaucagucuaauccaaga

SEQ ID NO: 1441755 - RNA, 19 nt, Artificial Sequence
  Description of Artificial Sequence: Synthetic oligonucleotide
  Antisense strand to SEQ ID NO: 1441754
ucuuggauuagacugauac

SEQ ID NO: 1441756 - RNA, 19 nt, Artificial Sequence
  Description of Artificial Sequence: Synthetic oligonucleotide
  Sense strand starting at position 164 of SEQ ID NO: 1243791
acaagaagccuacaguuua

SEQ ID NO: 1441757 - RNA, 19 nt, Artificial Sequence
  Description of Artificial Sequence: Synthetic oligonucleotide
  Antisense strand to SEQ ID NO: 1441756
uaaacuguaggcuucuugu

SEQ ID NO: 1441758 - RNA, 19 nt, Artificial Sequence
  Description of Artificial Sequence: Synthetic oligonucleotide
  Sense strand starting at position 233 of SEQ ID NO: 1243791
agagaaaugugucuauaag

SEQ ID NO: 1441759 - RNA, 19 nt, Artificial Sequence
  Description of Artificial Sequence: Synthetic oligonucleotide
  Antisense strand to SEQ ID NO: 1441758
cuuauagacacauuucucu

SEQ ID NO: 1441760 - RNA, 19 nt, Artificial Sequence
  Description of Artificial Sequence: Synthetic oligonucleotide
  Sense strand starting at position 234 of SEQ ID NO: 1243791
gagaaaugugucuauaagc

SEQ ID NO: 1441761 - RNA, 19 nt, Artificial Sequence
  Description of Artificial Sequence: Synthetic oligonucleotide
  Antisense strand to SEQ ID NO: 1441760
gcuuauagacacauuucuc

SEQ ID NO: 1441762 - RNA, 19 nt, Artificial Sequence
  Description of Artificial Sequence: Synthetic oligonucleotide
  Sense strand starting at position 281 of SEQ ID NO: 1243791
ccaacaugcccagaguguu

SEQ ID NO: 1441763 - RNA, 19 nt, Artificial Sequence
  Description of Artificial Sequence: Synthetic oligonucleotide
  Antisense strand to SEQ ID NO: 1441762
aacacucugggcauguugg

SEQ ID NO: 1441764 - RNA, 19 nt, Artificial Sequence
  Description of Artificial Sequence: Synthetic oligonucleotide
  Sense strand starting at position 293 of SEQ ID NO: 1243791
gaguguuaccucuggguug

SEQ ID NO: 1441765 - RNA, 19 nt, Artificial Sequence
  Description of Artificial Sequence: Synthetic oligonucleotide
  Antisense strand to SEQ ID NO: 1441764
caacccagagguaacacuc

SEQ ID NO: 1441766 - RNA, 19 nt, Artificial Sequence
  Description of Artificial Sequence: Synthetic oligonucleotide
  Sense strand starting at position 295 of SEQ ID NO: 1243791
guguuaccucuggguugca

SEQ ID NO: 1441767 - RNA, 19 nt, Artificial Sequence
  Description of Artificial Sequence: Synthetic oligonucleotide
  Antisense strand to SEQ ID NO: 1441766
ugcaacccagagguaacac

SEQ ID NO: 1441768 - RNA, 19 nt, Artificial Sequence
  Description of Artificial Sequence: Synthetic oligonucleotide
  Sense strand starting at position 436 of SEQ ID NO: 1243791
gcacucuugucccaagaau

SEQ ID NO: 1441769 - RNA, 19 nt, Artificial Sequence
  Description of Artificial Sequence: Synthetic oligonucleotide
  Antisense strand to SEQ ID NO: 1441768
auucuugggacaagagugc

SEQ ID NO: 1441770 - RNA, 19 nt, Artificial Sequence
  Description of Artificial Sequence: Synthetic oligonucleotide
  Sense strand starting at position 457 of SEQ ID NO: 1243791
uggcuucucccuggcagua

SEQ ID NO: 1441771 - RNA, 19 nt, Artificial Sequence
  Description of Artificial Sequence: Synthetic oligonucleotide
  Antisense strand to SEQ ID NO: 1441770
uacugccagggagaagcca

SEQ ID NO: 1441772 - RNA, 19 nt, Artificial Sequence
  Description of Artificial Sequence: Synthetic oligonucleotide
  Sense strand starting at position 579 of SEQ ID NO: 1243791
ugaugaaucuucgcuacuu

SEQ ID NO: 1441773 - RNA, 19 nt, Artificial Sequence
  Description of Artificial Sequence: Synthetic oligonucleotide
  Antisense strand to SEQ ID NO: 1441772
aaguagcgaagauucauca

SEQ ID NO: 1441774 - RNA, 19 nt, Artificial Sequence
  Description of Artificial Sequence: Synthetic oligonucleotide
  Sense strand starting at position 771 of SEQ ID NO: 1243791
gcauauuuccucugccuga

SEQ ID NO: 1441775 - RNA, 19 nt, Artificial Sequence
  Description of Artificial Sequence: Synthetic oligonucleotide
  Antisense strand to SEQ ID NO: 1441774
ucaggcagaggaaauaugc

SEQ ID NO: 1441776 - RNA, 19 nt, Artificial Sequence
  Description of Artificial Sequence: Synthetic oligonucleotide
  Sense strand starting at position 785 of SEQ ID NO: 1243791
ccugaaacguucugaagua

SEQ ID NO: 1441777 - RNA, 19 nt, Artificial Sequence
  Description of Artificial Sequence: Synthetic oligonucleotide
  Antisense strand to SEQ ID NO: 1441776
uacuucagaacguuucagg

SEQ ID NO: 1441778 - RNA, 19 nt, Artificial Sequence
  Description of Artificial Sequence: Synthetic oligonucleotide
  Sense strand starting at position 786 of SEQ ID NO: 1243791
cugaaacguucugaaguau

SEQ ID NO: 1441779 - RNA, 19 nt, Artificial Sequence
  Description of Artificial Sequence: Synthetic oligonucleotide
  Antisense strand to SEQ ID NO: 1441778
auacuucagaacguuucag

SEQ ID NO: 1441780 - RNA, 19 nt, Artificial Sequence
  Description of Artificial Sequence: Synthetic oligonucleotide
  Sense strand starting at position 794 of SEQ ID NO: 1243791
uucugaaguauuugggcga

SEQ ID NO: 1441781 - RNA, 19 nt, Artificial Sequence
  Description of Artificial Sequence: Synthetic oligonucleotide
  Antisense strand to SEQ ID NO: 1441780
ucgcccaaauacuucagaa

SEQ ID NO: 1441782 - RNA, 19 nt, Artificial Sequence
  Description of Artificial Sequence: Synthetic oligonucleotide
  Sense strand starting at position 795 of SEQ ID NO: 1243791
ucugaaguauuugggcgau

SEQ ID NO: 1441783 - RNA, 19 nt, Artificial Sequence
  Description of Artificial Sequence: Synthetic oligonucleotide
  Antisense strand to SEQ ID NO: 1441782
aucgcccaaauacuucaga

SEQ ID NO: 1441784 - RNA, 19 nt, Artificial Sequence
  Description of Artificial Sequence: Synthetic oligonucleotide
  Sense strand starting at position 994 of SEQ ID NO: 1243791
cuucucuuugcugggagaa

SEQ ID NO: 1441785 - RNA, 19 nt, Artificial Sequence
  Description of Artificial Sequence: Synthetic oligonucleotide
  Antisense strand to SEQ ID NO: 1441784
uucucccagcaaagagaag

SEQ ID NO: 1441786 - RNA, 19 nt, Artificial Sequence
  Description of Artificial Sequence: Synthetic oligonucleotide
  Sense strand starting at position 996 of SEQ ID NO: 1243791
ucucuuugcugggagaaag

SEQ ID NO: 1441787 - RNA, 19 nt, Artificial Sequence
  Description of Artificial Sequence: Synthetic oligonucleotide
  Antisense strand to SEQ ID NO: 1441786
cuuucucccagcaaagaga

SEQ ID NO: 1441788 - RNA, 19 nt, Artificial Sequence
  Description of Artificial Sequence: Synthetic oligonucleotide
  Sense strand starting at position 1071 of SEQ ID NO: 1243791
aauaguugggucuggcaau

SEQ ID NO: 1441789 - RNA, 19 nt, Artificial Sequence
  Description of Artificial Sequence: Synthetic oligonucleotide
  Antisense strand to SEQ ID NO: 1441788
auugccagacccaacuauu

SEQ ID NO: 1441790 - RNA, 19 nt, Artificial Sequence
  Description of Artificial Sequence: Synthetic oligonucleotide
  Sense strand starting at position 2425 of SEQ ID NO: 1243791
gccgcuuagccuugggaga

SEQ ID NO: 1441791 - RNA, 19 nt, Artificial Sequence
  Description of Artificial Sequence: Synthetic oligonucleotide
  Antisense strand to SEQ ID NO: 1441790
ucucccaaggcuaagcggc

SEQ ID NO: 1441792 - RNA, 19 nt, Artificial Sequence
  Description of Artificial Sequence: Synthetic oligonucleotide
  Sense strand starting at position 2566 of SEQ ID NO: 1243791
cuaguuaaauaagugaagu

SEQ ID NO: 1441793 - RNA, 19 nt, Artificial Sequence
  Description of Artificial Sequence: Synthetic oligonucleotide
  Antisense strand to SEQ ID NO: 1441792
acuucacuuauuuaacuag

SEQ ID NO: 1441794 - RNA, 19 nt, Artificial Sequence
  Description of Artificial Sequence: Synthetic oligonucleotide
  Sense strand starting at position 2598 of SEQ ID NO: 1243791
guccgugauccuggguaga

SEQ ID NO: 1441795 - RNA, 19 nt, Artificial Sequence
  Description of Artificial Sequence: Synthetic oligonucleotide
  Antisense strand to SEQ ID NO: 1441794
ucuacccaggaucacggac

SEQ ID NO: 1441796 - RNA, 19 nt, Artificial Sequence
  Description of Artificial Sequence: Synthetic oligonucleotide
  Sense strand starting at position 2600 of SEQ ID NO: 1243791
ccgugauccuggguagaua

SEQ ID NO: 1441797 - RNA, 19 nt, Artificial Sequence
  Description of Artificial Sequence: Synthetic oligonucleotide
  Antisense strand to SEQ ID NO: 1441796
uaucuacccaggaucacgg

SEQ ID NO: 1441798 - RNA, 19 nt, Artificial Sequence
  Description of Artificial Sequence: Synthetic oligonucleotide
  Sense strand starting at position 2649 of SEQ ID NO: 1243791
ggacauucacgcugggaug

SEQ ID NO: 1441799 - RNA, 19 nt, Artificial Sequence
  Description of Artificial Sequence: Synthetic oligonucleotide
  Antisense strand to SEQ ID NO: 1441798
caucccagcgugaaugucc

SEQ ID NO: 1441800 - RNA, 19 nt, Artificial Sequence
  Description of Artificial Sequence: Synthetic oligonucleotide
  Sense strand starting at position 2686 of SEQ ID NO: 1243791
ugggcuuugugacagggaa

SEQ ID NO: 1441801 - RNA, 19 nt, Artificial Sequence
  Description of Artificial Sequence: Synthetic oligonucleotide
  Antisense strand to SEQ ID NO: 1441800
uucccugucacaaagccca

SEQ ID NO: 1441802 - RNA, 19 nt, Artificial Sequence
  Description of Artificial Sequence: Synthetic oligonucleotide
  Sense strand starting at position 2688 of SEQ ID NO: 1243791
ggcuuugugacagggaaac

SEQ ID NO: 1441803 - RNA, 19 nt, Artificial Sequence
  Description of Artificial Sequence: Synthetic oligonucleotide
  Antisense strand to SEQ ID NO: 1441802
guuucccugucacaaagcc

SEQ ID NO: 1441804 - RNA, 19 nt, Artificial Sequence
  Description of Artificial Sequence: Synthetic oligonucleotide
  Sense strand starting at position 2698 of SEQ ID NO: 1243791
cagggaaacuuggauaaag

SEQ ID NO: 1441805 - RNA, 19 nt, Artificial Sequence
  Description of Artificial Sequence: Synthetic oligonucleotide
  Antisense strand to SEQ ID NO: 1441804
cuuuauccaaguuucccug

SEQ ID NO: 1441806 - RNA, 19 nt, Artificial Sequence
  Description of Artificial Sequence: Synthetic oligonucleotide
  Sense strand starting at position 2759 of SEQ ID NO: 1243791
cuugguuauacugguagag

SEQ ID NO: 1441807 - RNA, 19 nt, Artificial Sequence
  Description of Artificial Sequence: Synthetic oligonucleotide
  Antisense strand to SEQ ID NO: 1441806
cucuaccaguauaaccaag

SEQ ID NO: 1441808 - RNA, 19 nt, Artificial Sequence
  Description of Artificial Sequence: Synthetic oligonucleotide
  Sense strand starting at position 2761 of SEQ ID NO: 1243791
ugguuauacugguagaggu

SEQ ID NO: 1441809 - RNA, 19 nt, Artificial Sequence
  Description of Artificial Sequence: Synthetic oligonucleotide
  Antisense strand to SEQ ID NO: 1441808
accucuaccaguauaacca

SEQ ID NO: 1441810 - RNA, 19 nt, Artificial Sequence
  Description of Artificial Sequence: Synthetic oligonucleotide
  Sense strand starting at position 2817 of SEQ ID NO: 1243791
gcauacugguguccacaga

SEQ ID NO: 1441811 - RNA, 19 nt, Artificial Sequence
  Description of Artificial Sequence: Synthetic oligonucleotide
  Antisense strand to SEQ ID NO: 1441810
ucuguggacaccaguaugc

SEQ ID NO: 1441812 - RNA, 19 nt, Artificial Sequence
  Description of Artificial Sequence: Synthetic oligonucleotide
  Sense strand starting at position 2922 of SEQ ID NO: 1243791
ggcacuucuugugaaucac

SEQ ID NO: 1441813 - RNA, 19 nt, Artificial Sequence
  Description of Artificial Sequence: Synthetic oligonucleotide
  Antisense strand to SEQ ID NO: 1441812
gugauucacaagaagugcc

SEQ ID NO: 1441814 - RNA, 19 nt, Artificial Sequence
  Description of Artificial Sequence: Synthetic oligonucleotide
  Sense strand starting at position 2933 of SEQ ID NO: 1243791
ugaaucacaccgugucaua

SEQ ID NO: 1441815 - RNA, 19 nt, Artificial Sequence
  Description of Artificial Sequence: Synthetic oligonucleotide
  Antisense strand to SEQ ID NO: 1441814
uaugacacggugugauuca

SEQ ID NO: 1441816 - RNA, 19 nt, Artificial Sequence
  Description of Artificial Sequence: Synthetic oligonucleotide
  Sense strand starting at position 2944 of SEQ ID NO: 1243791
gugucauacccaugacuuc

SEQ ID NO: 1441817 - RNA, 19 nt, Artificial Sequence
  Description of Artificial Sequence: Synthetic oligonucleotide
  Antisense strand to SEQ ID NO: 1441816
gaagucauggguaugacac

SEQ ID NO: 1441818 - RNA, 19 nt, Artificial Sequence
  Description of Artificial Sequence: Synthetic oligonucleotide
  Sense strand starting at position 2982 of SEQ ID NO: 1243791
ugagucuagagaggugaaa

SEQ ID NO: 1441819 - RNA, 19 nt, Artificial Sequence
  Description of Artificial Sequence: Synthetic oligonucleotide
  Antisense strand to SEQ ID NO: 1441818
uuucaccucucuagacuca

SEQ ID NO: 1441820 - RNA, 19 nt, Artificial Sequence
  Description of Artificial Sequence: Synthetic oligonucleotide
  Sense strand starting at position 3070 of SEQ ID NO: 1243791
cugaaauguccucacugcu

SEQ ID NO: 1441821 - RNA, 19 nt, Artificial Sequence
  Description of Artificial Sequence: Synthetic oligonucleotide
  Antisense strand to SEQ ID NO: 1441820
agcagugaggacauuucag

SEQ ID NO: 1441822 - RNA, 19 nt, Artificial Sequence
  Description of Artificial Sequence: Synthetic oligonucleotide
  Sense strand starting at position 3115 of SEQ ID NO: 1243791
ccuggagagucacauguuu

SEQ ID NO: 1441823 - RNA, 19 nt, Artificial Sequence
  Description of Artificial Sequence: Synthetic oligonucleotide
  Antisense strand to SEQ ID NO: 1441822
aaacaugugacucuccagg

SEQ ID NO: 1441824 - RNA, 19 nt, Artificial Sequence
  Description of Artificial Sequence: Synthetic oligonucleotide
  Sense strand starting at position 3117 of SEQ ID NO: 1243791
uggagagucacauguuugu

SEQ ID NO: 1441825 - RNA, 19 nt, Artificial Sequence
  Description of Artificial Sequence: Synthetic oligonucleotide
  Antisense strand to SEQ ID NO: 1441824
acaaacaugugacucucca

SEQ ID NO: 1441826 - RNA, 19 nt, Artificial Sequence
  Description of Artificial Sequence: Synthetic oligonucleotide
  Sense strand starting at position 3123 of SEQ ID NO: 1243791
gucacauguuugucugcau

SEQ ID NO: 1441827 - RNA, 19 nt, Artificial Sequence
  Description of Artificial Sequence: Synthetic oligonucleotide
  Antisense strand to SEQ ID NO: 1441826
augcagacaaacaugugac

SEQ ID NO: 1441828 - RNA, 19 nt, Artificial Sequence
  Description of Artificial Sequence: Synthetic oligonucleotide
  Sense strand starting at position 3607 of SEQ ID NO: 1243791
acagacuccuuguguccaa

SEQ ID NO: 1441829 - RNA, 19 nt, Artificial Sequence
  Description of Artificial Sequence: Synthetic oligonucleotide
  Antisense strand to SEQ ID NO: 1441828
uuggacacaaggagucugu

SEQ ID NO: 1441830 - RNA, 19 nt, Artificial Sequence
  Description of Artificial Sequence: Synthetic oligonucleotide
  Sense strand starting at position 3614 of SEQ ID NO: 1243791
ccuuguguccaacgggaau

SEQ ID NO: 1441831 - RNA, 19 nt, Artificial Sequence
  Description of Artificial Sequence: Synthetic oligonucleotide
  Antisense strand to SEQ ID NO: 1441830
auucccguuggacacaagg

SEQ ID NO: 1441832 - RNA, 19 nt, Artificial Sequence
  Description of Artificial Sequence: Synthetic oligonucleotide
  Sense strand starting at position 3781 of SEQ ID NO: 1243791
ugugguuguccguaaggcu

SEQ ID NO: 1441833 - RNA, 19 nt, Artificial Sequence
  Description of Artificial Sequence: Synthetic oligonucleotide
  Antisense strand to SEQ ID NO: 1441832
agccuuacggacaaccaca

SEQ ID NO: 1441834 - RNA, 19 nt, Artificial Sequence
  Description of Artificial Sequence: Synthetic oligonucleotide
  Sense strand starting at position 3782 of SEQ ID NO: 1243791
gugguuguccguaaggcuu

SEQ ID NO: 1441835 - RNA, 19 nt, Artificial Sequence
  Description of Artificial Sequence: Synthetic oligonucleotide
  Antisense strand to SEQ ID NO: 1441834
aagccuuacggacaaccac

SEQ ID NO: 1441836 - RNA, 19 nt, Artificial Sequence
  Description of Artificial Sequence: Synthetic oligonucleotide
  Sense strand starting at position 919 of SEQ ID NO: 1243792
acuugagacucagaauucu

SEQ ID NO: 1441837 - RNA, 19 nt, Artificial Sequence
  Description of Artificial Sequence: Synthetic oligonucleotide
  Antisense strand to SEQ ID NO: 1441836
agaauucugagucucaagu

SEQ ID NO: 1441838 - RNA, 19 nt, Artificial Sequence
  Description of Artificial Sequence: Synthetic oligonucleotide
  Sense strand starting at position 1016 of SEQ ID NO: 1243792
cagaucugguagcaaugaa

SEQ ID NO: 1441839 - RNA, 19 nt, Artificial Sequence
  Description of Artificial Sequence: Synthetic oligonucleotide
  Antisense strand to SEQ ID NO: 1441838
uucauugcuaccagaucug

SEQ ID NO: 1441840 - RNA, 19 nt, Artificial Sequence
  Description of Artificial Sequence: Synthetic oligonucleotide
  Sense strand starting at position 1093 of SEQ ID NO: 1243792
gauaauuuaucaugaaggu

SEQ ID NO: 1441841 - RNA, 19 nt, Artificial Sequence
  Description of Artificial Sequence: Synthetic oligonucleotide
  Antisense strand to SEQ ID NO: 1441840
accuucaugauaaauuauc

SEQ ID NO: 1441842 - RNA, 19 nt, Artificial Sequence
  Description of Artificial Sequence: Synthetic oligonucleotide
  Sense strand starting at position 1102 of SEQ ID NO: 1243792
ucaugaaggucuuagcuaa

SEQ ID NO: 1441843 - RNA, 19 nt, Artificial Sequence
  Description of Artificial Sequence: Synthetic oligonucleotide
  Antisense strand to SEQ ID NO: 1441842
uuagcuaagaccuucauga

SEQ ID NO: 1441844 - RNA, 19 nt, Artificial Sequence
  Description of Artificial Sequence: Synthetic oligonucleotide
  Sense strand starting at position 1327 of SEQ ID NO: 1243792
ucagcuuauguuugaugaa

SEQ ID NO: 1441845 - RNA, 19 nt, Artificial Sequence
  Description of Artificial Sequence: Synthetic oligonucleotide
  Antisense strand to SEQ ID NO: 1441844
uucaucaaacauaagcuga

SEQ ID NO: 1441846 - RNA, 19 nt, Artificial Sequence
  Description of Artificial Sequence: Synthetic oligonucleotide
  Sense strand starting at position 1328 of SEQ ID NO: 1243792
cagcuuauguuugaugaau

SEQ ID NO: 1441847 - RNA, 19 nt, Artificial Sequence
  Description of Artificial Sequence: Synthetic oligonucleotide
  Antisense strand to SEQ ID NO: 1441846
auucaucaaacauaagcug

SEQ ID NO: 1441848 - RNA, 19 nt, Artificial Sequence
  Description of Artificial Sequence: Synthetic oligonucleotide
  Sense strand starting at position 2525 of SEQ ID NO: 1243792
gucagauggcugggucaga

SEQ ID NO: 1441849 - RNA, 19 nt, Artificial Sequence
  Description of Artificial Sequence: Synthetic oligonucleotide
  Antisense strand to SEQ ID NO: 1441848
ucugacccagccaucugac

SEQ ID NO: 1441850 - RNA, 19 nt, Artificial Sequence
  Description of Artificial Sequence: Synthetic oligonucleotide
  Sense strand starting at position 3922 of SEQ ID NO: 1243792
ggcauuuagucacacguau

SEQ ID NO: 1441851 - RNA, 19 nt, Artificial Sequence
  Description of Artificial Sequence: Synthetic oligonucleotide
  Antisense strand to SEQ ID NO: 1441850
auacgugugacuaaaugcc

SEQ ID NO: 1441852 - RNA, 19 nt, Artificial Sequence
  Description of Artificial Sequence: Synthetic oligonucleotide
  Sense strand starting at position 3928 of SEQ ID NO: 1243792
uagucacacguaugacauu

SEQ ID NO: 1441853 - RNA, 19 nt, Artificial Sequence
  Description of Artificial Sequence: Synthetic oligonucleotide
  Antisense strand to SEQ ID NO: 1441852
aaugucauacgugugacua

SEQ ID NO: 1441854 - RNA, 19 nt, Artificial Sequence
  Description of Artificial Sequence: Synthetic oligonucleotide
  Sense strand starting at position 3934 of SEQ ID NO: 1243792
cacguaugacauugcacau

SEQ ID NO: 1441855 - RNA, 19 nt, Artificial Sequence
  Description of Artificial Sequence: Synthetic oligonucleotide
  Antisense strand to SEQ ID NO: 1441854
augugcaaugucauacgug

SEQ ID NO: 1441856 - RNA, 19 nt, Artificial Sequence
  Description of Artificial Sequence: Synthetic oligonucleotide
  Sense strand starting at position 168 of SEQ ID NO: 1243793
ccacgaaagacaugcaagu

SEQ ID NO: 1441857 - RNA, 19 nt, Artificial Sequence
  Description of Artificial Sequence: Synthetic oligonucleotide
  Antisense strand to SEQ ID NO: 1441856
acuugcaugucuuucgugg

SEQ ID NO: 1441858 - RNA, 19 nt, Artificial Sequence
  Description of Artificial Sequence: Synthetic oligonucleotide
  Sense strand starting at position 348 of SEQ ID NO: 1243793
uggaacuagucagcaaaua

SEQ ID NO: 1441859 - RNA, 19 nt, Artificial Sequence
  Description of Artificial Sequence: Synthetic oligonucleotide
  Antisense strand to SEQ ID NO: 1441858
uauuugcugacuaguucca

SEQ ID NO: 1441860 - RNA, 19 nt, Artificial Sequence
  Description of Artificial Sequence: Synthetic oligonucleotide
  Sense strand starting at position 833 of SEQ ID NO: 1243793
ggaugagacuuagcucugu

SEQ ID NO: 1441861 - RNA, 19 nt, Artificial Sequence
  Description of Artificial Sequence: Synthetic oligonucleotide
  Antisense strand to SEQ ID NO: 1441860
acagagcuaagucucaucc

SEQ ID NO: 1441862 - RNA, 19 nt, Artificial Sequence
  Description of Artificial Sequence: Synthetic oligonucleotide
  Sense strand starting at position 837 of SEQ ID NO: 1243793
gagacuuagcucuguuaaa

SEQ ID NO: 1441863 - RNA, 19 nt, Artificial Sequence
  Description of Artificial Sequence: Synthetic oligonucleotide
  Antisense strand to SEQ ID NO: 1441862
uuuaacagagcuaagucuc

SEQ ID NO: 1441864 - RNA, 19 nt, Artificial Sequence
  Description of Artificial Sequence: Synthetic oligonucleotide
  Sense strand starting at position 838 of SEQ ID NO: 1243793
agacuuagcucuguuaaau

SEQ ID NO: 1441865 - RNA, 19 nt, Artificial Sequence
  Description of Artificial Sequence: Synthetic oligonucleotide
  Antisense strand to SEQ ID NO: 1441864
auuuaacagagcuaagucu

SEQ ID NO: 1441866 - RNA, 19 nt, Artificial Sequence
  Description of Artificial Sequence: Synthetic oligonucleotide
  Sense strand starting at position 891 of SEQ ID NO: 1243793
agggcuuccugccacaaau

SEQ ID NO: 1441867 - RNA, 19 nt, Artificial Sequence
  Description of Artificial Sequence: Synthetic oligonucleotide
  Antisense strand to SEQ ID NO: 1441866
auuuguggcaggaagcccu

SEQ ID NO: 1441868 - RNA, 19 nt, Artificial Sequence
  Description of Artificial Sequence: Synthetic oligonucleotide
  Sense strand starting at position 902 of SEQ ID NO: 1243793
ccacaaaucugggaaagga

SEQ ID NO: 1441869 - RNA, 19 nt, Artificial Sequence
  Description of Artificial Sequence: Synthetic oligonucleotide
  Antisense strand to SEQ ID NO: 1441868
uccuuucccagauuugugg

SEQ ID NO: 1441870 - RNA, 19 nt, Artificial Sequence
  Description of Artificial Sequence: Synthetic oligonucleotide
  Sense strand starting at position 951 of SEQ ID NO: 1243793
ggguccucagcauacagau

SEQ ID NO: 1441871 - RNA, 19 nt, Artificial Sequence
  Description of Artificial Sequence: Synthetic oligonucleotide
  Antisense strand to SEQ ID NO: 1441870
aucuguaugcugaggaccc

SEQ ID NO: 1441872 - RNA, 19 nt, Artificial Sequence
  Description of Artificial Sequence: Synthetic oligonucleotide
  Sense strand starting at position 985 of SEQ ID NO: 1243793
aaaggaaacucgucucuuu

SEQ ID NO: 1441873 - RNA, 19 nt, Artificial Sequence
  Description of Artificial Sequence: Synthetic oligonucleotide
  Antisense strand to SEQ ID NO: 1441872
aaagagacgaguuuccuuu

SEQ ID NO: 1441874 - RNA, 19 nt, Artificial Sequence
  Description of Artificial Sequence: Synthetic oligonucleotide
  Sense strand starting at position 994 of SEQ ID NO: 1243793
ucgucucuuucugcaacau

SEQ ID NO: 1441875 - RNA, 19 nt, Artificial Sequence
  Description of Artificial Sequence: Synthetic oligonucleotide
  Antisense strand to SEQ ID NO: 1441874
auguugcagaaagagacga

SEQ ID NO: 1441876 - RNA, 19 nt, Artificial Sequence
  Description of Artificial Sequence: Synthetic oligonucleotide
  Sense strand starting at position 995 of SEQ ID NO: 1243793
cgucucuuucugcaacauu

SEQ ID NO: 1441877 - RNA, 19 nt, Artificial Sequence
  Description of Artificial Sequence: Synthetic oligonucleotide
  Antisense strand to SEQ ID NO: 1441876
aauguugcagaaagagacg

SEQ ID NO: 1441878 - RNA, 19 nt, Artificial Sequence
  Description of Artificial Sequence: Synthetic oligonucleotide
  Sense strand starting at position 1212 of SEQ ID NO: 1243793
ugaaguucuuaaggaugga

SEQ ID NO: 1441879 - RNA, 19 nt, Artificial Sequence
  Description of Artificial Sequence: Synthetic oligonucleotide
  Antisense strand to SEQ ID NO: 1441878
uccauccuuaagaacuuca

SEQ ID NO: 1441880 - RNA, 19 nt, Artificial Sequence
  Description of Artificial Sequence: Synthetic oligonucleotide
  Sense strand starting at position 1248 of SEQ ID NO: 1243793
uagaauaugucugcuguac

SEQ ID NO: 1441881 - RNA, 19 nt, Artificial Sequence
  Description of Artificial Sequence: Synthetic oligonucleotide
  Antisense strand to SEQ ID NO: 1441880
guacagcagacauauucua

SEQ ID NO: 1441882 - RNA, 19 nt, Artificial Sequence
  Description of Artificial Sequence: Synthetic oligonucleotide
  Sense strand starting at position 1250 of SEQ ID NO: 1243793
gaauaugucugcuguacaa

SEQ ID NO: 1441883 - RNA, 19 nt, Artificial Sequence
  Description of Artificial Sequence: Synthetic oligonucleotide
  Antisense strand to SEQ ID NO: 1441882
uuguacagcagacauauuc

SEQ ID NO: 1441884 - RNA, 19 nt, Artificial Sequence
  Description of Artificial Sequence: Synthetic oligonucleotide
  Sense strand starting at position 1252 of SEQ ID NO: 1243793
auaugucugcuguacaaua

SEQ ID NO: 1441885 - RNA, 19 nt, Artificial Sequence
  Description of Artificial Sequence: Synthetic oligonucleotide
  Antisense strand to SEQ ID NO: 1441884
uauuguacagcagacauau

SEQ ID NO: 1441886 - RNA, 19 nt, Artificial Sequence
  Description of Artificial Sequence: Synthetic oligonucleotide
  Sense strand starting at position 1486 of SEQ ID NO: 1243793
gccagugucccugacagga

SEQ ID NO: 1441887 - RNA, 19 nt, Artificial Sequence
  Description of Artificial Sequence: Synthetic oligonucleotide
  Antisense strand to SEQ ID NO: 1441886
uccugucagggacacuggc

SEQ ID NO: 1441888 - RNA, 19 nt, Artificial Sequence
  Description of Artificial Sequence: Synthetic oligonucleotide
  Sense strand starting at position 1639 of SEQ ID NO: 1243793
agaucuuccaggcggacau

SEQ ID NO: 1441889 - RNA, 19 nt, Artificial Sequence
  Description of Artificial Sequence: Synthetic oligonucleotide
  Antisense strand to SEQ ID NO: 1441888
auguccgccuggaagaucu

SEQ ID NO: 1441890 - RNA, 19 nt, Artificial Sequence
  Description of Artificial Sequence: Synthetic oligonucleotide
  Sense strand starting at position 2081 of SEQ ID NO: 1243793
caccuuugacgucacugaa

SEQ ID NO: 1441891 - RNA, 19 nt, Artificial Sequence
  Description of Artificial Sequence: Synthetic oligonucleotide
  Antisense strand to SEQ ID NO: 1441890
uucagugacgucaaaggug

SEQ ID NO: 1441892 - RNA, 19 nt, Artificial Sequence
  Description of Artificial Sequence: Synthetic oligonucleotide
  Sense strand starting at position 2380 of SEQ ID NO: 1243793
gucugauggcugggucaga

SEQ ID NO: 1441893 - RNA, 19 nt, Artificial Sequence
  Description of Artificial Sequence: Synthetic oligonucleotide
  Antisense strand to SEQ ID NO: 1441892
ucugacccagccaucagac

SEQ ID NO: 1441894 - RNA, 19 nt, Artificial Sequence
  Description of Artificial Sequence: Synthetic oligonucleotide
  Sense strand starting at position 2489 of SEQ ID NO: 1243793
ugggcauucugcugccuua

SEQ ID NO: 1441895 - RNA, 19 nt, Artificial Sequence
  Description of Artificial Sequence: Synthetic oligonucleotide
  Antisense strand to SEQ ID NO: 1441894
uaaggcagcagaaugccca

SEQ ID NO: 1441896 - RNA, 19 nt, Artificial Sequence
  Description of Artificial Sequence: Synthetic oligonucleotide
  Sense strand starting at position 2492 of SEQ ID NO: 1243793
gcauucugcugccuuagga

SEQ ID NO: 1441897 - RNA, 19 nt, Artificial Sequence
  Description of Artificial Sequence: Synthetic oligonucleotide
  Antisense strand to SEQ ID NO: 1441896
uccuaaggcagcagaaugc

SEQ ID NO: 1441898 - RNA, 19 nt, Artificial Sequence
  Description of Artificial Sequence: Synthetic oligonucleotide
  Sense strand starting at position 2616 of SEQ ID NO: 1243793
ccgggauugcucgccucua

SEQ ID NO: 1441899 - RNA, 19 nt, Artificial Sequence
  Description of Artificial Sequence: Synthetic oligonucleotide
  Antisense strand to SEQ ID NO: 1441898
uagaggcgagcaaucccgg

SEQ ID NO: 1441900 - RNA, 19 nt, Artificial Sequence
  Description of Artificial Sequence: Synthetic oligonucleotide
  Sense strand starting at position 2663 of SEQ ID NO: 1243793
accagugaguuugaagaaa

SEQ ID NO: 1441901 - RNA, 19 nt, Artificial Sequence
  Description of Artificial Sequence: Synthetic oligonucleotide
  Antisense strand to SEQ ID NO: 1441900
uuucuucaaacucacuggu

SEQ ID NO: 1441902 - RNA, 19 nt, Artificial Sequence
  Description of Artificial Sequence: Synthetic oligonucleotide
  Sense strand starting at position 2917 of SEQ ID NO: 1243793
cugauaucgugccaccaaa

SEQ ID NO: 1441903 - RNA, 19 nt, Artificial Sequence
  Description of Artificial Sequence: Synthetic oligonucleotide
  Antisense strand to SEQ ID NO: 1441902
uuugguggcacgauaucag

SEQ ID NO: 1441904 - RNA, 19 nt, Artificial Sequence
  Description of Artificial Sequence: Synthetic oligonucleotide
  Sense strand starting at position 3074 of SEQ ID NO: 1243793
acuaauucuugaggacaau

SEQ ID NO: 1441905 - RNA, 19 nt, Artificial Sequence
  Description of Artificial Sequence: Synthetic oligonucleotide
  Antisense strand to SEQ ID NO: 1441904
auuguccucaagaauuagu

SEQ ID NO: 1441906 - RNA, 19 nt, Artificial Sequence
  Description of Artificial Sequence: Synthetic oligonucleotide
  Sense strand starting at position 3185 of SEQ ID NO: 1243793
cacugagaugaguauugca

SEQ ID NO: 1441907 - RNA, 19 nt, Artificial Sequence
  Description of Artificial Sequence: Synthetic oligonucleotide
  Antisense strand to SEQ ID NO: 1441906
ugcaauacucaucucagug

SEQ ID NO: 1441908 - RNA, 19 nt, Artificial Sequence
  Description of Artificial Sequence: Synthetic oligonucleotide
  Sense strand starting at position 3188 of SEQ ID NO: 1243793
ugagaugaguauugcaaag

SEQ ID NO: 1441909 - RNA, 19 nt, Artificial Sequence
  Description of Artificial Sequence: Synthetic oligonucleotide
  Antisense strand to SEQ ID NO: 1441908
cuuugcaauacucaucuca

SEQ ID NO: 1441910 - RNA, 19 nt, Artificial Sequence
  Description of Artificial Sequence: Synthetic oligonucleotide
  Sense strand starting at position 3190 of SEQ ID NO: 1243793
agaugaguauugcaaagga

SEQ ID NO: 1441911 - RNA, 19 nt, Artificial Sequence
  Description of Artificial Sequence: Synthetic oligonucleotide
  Antisense strand to SEQ ID NO: 1441910
uccuuugcaauacucaucu

SEQ ID NO: 1441912 - RNA, 19 nt, Artificial Sequence
  Description of Artificial Sequence: Synthetic oligonucleotide
  Sense strand starting at position 3347 of SEQ ID NO: 1243793
gugguaaggaagcaaucau

SEQ ID NO: 1441913 - RNA, 19 nt, Artificial Sequence
  Description of Artificial Sequence: Synthetic oligonucleotide
  Antisense strand to SEQ ID NO: 1441912
augauugcuuccuuaccac

SEQ ID NO: 1441914 - RNA, 19 nt, Artificial Sequence
  Description of Artificial Sequence: Synthetic oligonucleotide
  Sense strand starting at position 3756 of SEQ ID NO: 1243793
guuggcauuuagucacaca

SEQ ID NO: 1441915 - RNA, 19 nt, Artificial Sequence
  Description of Artificial Sequence: Synthetic oligonucleotide
  Antisense strand to SEQ ID NO: 1441914
ugugugacuaaaugccaac

SEQ ID NO: 1441916 - RNA, 19 nt, Artificial Sequence
  Description of Artificial Sequence: Synthetic oligonucleotide
  Sense strand starting at position 3759 of SEQ ID NO: 1243793
ggcauuuagucacacauug

SEQ ID NO: 1441917 - RNA, 19 nt, Artificial Sequence
  Description of Artificial Sequence: Synthetic oligonucleotide
  Antisense strand to SEQ ID NO: 1441916
caaugugugacuaaaugcc

SEQ ID NO: 1441918 - RNA, 19 nt, Artificial Sequence
  Description of Artificial Sequence: Synthetic oligonucleotide
  Sense strand starting at position 3777 of SEQ ID NO: 1243793
gcacauaucgugugcacaa

SEQ ID NO: 1441919 - RNA, 19 nt, Artificial Sequence
  Description of Artificial Sequence: Synthetic oligonucleotide
  Antisense strand to SEQ ID NO: 1441918
uugugcacacgauaugugc

SEQ ID NO: 1441920 - RNA, 19 nt, Artificial Sequence
  Description of Artificial Sequence: Synthetic oligonucleotide
  Sense strand starting at position 3823 of SEQ ID NO: 1243793
ggccuugaagggugaucuu

SEQ ID NO: 1441921 - RNA, 19 nt, Artificial Sequence
  Description of Artificial Sequence: Synthetic oligonucleotide
  Antisense strand to SEQ ID NO: 1441920
aagaucacccuucaaggcc

SEQ ID NO: 1441922 - RNA, 19 nt, Artificial Sequence
  Description of Artificial Sequence: Synthetic oligonucleotide
  Sense strand starting at position 3832 of SEQ ID NO: 1243793
gggugaucuucacguaagc

SEQ ID NO: 1441923 - RNA, 19 nt, Artificial Sequence
  Description of Artificial Sequence: Synthetic oligonucleotide
  Antisense strand to SEQ ID NO: 1441922
gcuuacgugaagaucaccc

SEQ ID NO: 1441924 - RNA, 19 nt, Artificial Sequence
  Description of Artificial Sequence: Synthetic oligonucleotide
  Sense strand starting at position 3981 of SEQ ID NO: 1243793
ugaagaugcuggucugaaa

SEQ ID NO: 1441925 - RNA, 19 nt, Artificial Sequence
  Description of Artificial Sequence: Synthetic oligonucleotide
  Antisense strand to SEQ ID NO: 1441924
uuucagaccagcaucuuca

SEQ ID NO: 1441926 - RNA, 19 nt, Artificial Sequence
  Description of Artificial Sequence: Synthetic oligonucleotide
  Sense strand starting at position 75 of SEQ ID NO: 1243794
gugguagauggcuauugga

SEQ ID NO: 1441927 - RNA, 19 nt, Artificial Sequence
  Description of Artificial Sequence: Synthetic oligonucleotide
  Antisense strand to SEQ ID NO: 1441926
uccaauagccaucuaccac

SEQ ID NO: 1441928 - RNA, 19 nt, Artificial Sequence
  Description of Artificial Sequence: Synthetic oligonucleotide
  Sense strand starting at position 84 of SEQ ID NO: 1243794
ggcuauuggauggguauua

SEQ ID NO: 1441929 - RNA, 19 nt, Artificial Sequence
  Description of Artificial Sequence: Synthetic oligonucleotide
  Antisense strand to SEQ ID NO: 1441928
uaauacccauccaauagcc

SEQ ID NO: 1441930 - RNA, 19 nt, Artificial Sequence
  Description of Artificial Sequence: Synthetic oligonucleotide
  Sense strand starting at position 144 of SEQ ID NO: 1243794
uugggaguuccagauguuu

SEQ ID NO: 1441931 - RNA, 19 nt, Artificial Sequence
  Description of Artificial Sequence: Synthetic oligonucleotide
  Antisense strand to SEQ ID NO: 1441930
aaacaucuggaacucccaa

SEQ ID NO: 1441932 - RNA, 19 nt, Artificial Sequence
  Description of Artificial Sequence: Synthetic oligonucleotide
  Sense strand starting at position 146 of SEQ ID NO: 1243794
gggaguuccagauguuuaa

SEQ ID NO: 1441933 - RNA, 19 nt, Artificial Sequence
  Description of Artificial Sequence: Synthetic oligonucleotide
  Antisense strand to SEQ ID NO: 1441932
uuaaacaucuggaacuccc

SEQ ID NO: 1441934 - RNA, 19 nt, Artificial Sequence
  Description of Artificial Sequence: Synthetic oligonucleotide
  Sense strand starting at position 150 of SEQ ID NO: 1243794
guuccagauguuuaaaucu

SEQ ID NO: 1441935 - RNA, 19 nt, Artificial Sequence
  Description of Artificial Sequence: Synthetic oligonucleotide
  Antisense strand to SEQ ID NO: 1441934
agauuuaaacaucuggaac

SEQ ID NO: 1441936 - RNA, 19 nt, Artificial Sequence
  Description of Artificial Sequence: Synthetic oligonucleotide
  Sense strand starting at position 216 of SEQ ID NO: 1243794
cacagaagaucagaggaua

SEQ ID NO: 1441937 - RNA, 19 nt, Artificial Sequence
  Description of Artificial Sequence: Synthetic oligonucleotide
  Antisense strand to SEQ ID NO: 1441936
uauccucugaucuucugug

SEQ ID NO: 1441938 - RNA, 19 nt, Artificial Sequence
  Description of Artificial Sequence: Synthetic oligonucleotide
  Sense strand starting at position 230 of SEQ ID NO: 1243794
ggauauggaaucugcugua

SEQ ID NO: 1441939 - RNA, 19 nt, Artificial Sequence
  Description of Artificial Sequence: Synthetic oligonucleotide
  Antisense strand to SEQ ID NO: 1441938
uacagcagauuccauaucc

SEQ ID NO: 1441940 - RNA, 19 nt, Artificial Sequence
  Description of Artificial Sequence: Synthetic oligonucleotide
  Sense strand starting at position 268 of SEQ ID NO: 1243794
agacuugacuuucuguuga

SEQ ID NO: 1441941 - RNA, 19 nt, Artificial Sequence
  Description of Artificial Sequence: Synthetic oligonucleotide
  Antisense strand to SEQ ID NO: 1441940
ucaacagaaagucaagucu

SEQ ID NO: 1441942 - RNA, 19 nt, Artificial Sequence
  Description of Artificial Sequence: Synthetic oligonucleotide
  Sense strand starting at position 320 of SEQ ID NO: 1243794
ugcuguuuagaggagaauc

SEQ ID NO: 1441943 - RNA, 19 nt, Artificial Sequence
  Description of Artificial Sequence: Synthetic oligonucleotide
  Antisense strand to SEQ ID NO: 1441942
gauucuccucuaaacagca

SEQ ID NO: 1441944 - RNA, 19 nt, Artificial Sequence
  Description of Artificial Sequence: Synthetic oligonucleotide
  Sense strand starting at position 441 of SEQ ID NO: 1243794
ccaagucacccaugugaca

SEQ ID NO: 1441945 - RNA, 19 nt, Artificial Sequence
  Description of Artificial Sequence: Synthetic oligonucleotide
  Antisense strand to SEQ ID NO: 1441944
ugucacaugggugacuugg

SEQ ID NO: 1441946 - RNA, 19 nt, Artificial Sequence
  Description of Artificial Sequence: Synthetic oligonucleotide
  Sense strand starting at position 751 of SEQ ID NO: 1243794
gcuccauggaucgaacaca

SEQ ID NO: 1441947 - RNA, 19 nt, Artificial Sequence
  Description of Artificial Sequence: Synthetic oligonucleotide
  Antisense strand to SEQ ID NO: 1441946
uguguucgauccauggagc

SEQ ID NO: 1441948 - RNA, 19 nt, Artificial Sequence
  Description of Artificial Sequence: Synthetic oligonucleotide
  Sense strand starting at position 1070 of SEQ ID NO: 1243794
guguuacgugaugugguau

SEQ ID NO: 1441949 - RNA, 19 nt, Artificial Sequence
  Description of Artificial Sequence: Synthetic oligonucleotide
  Antisense strand to SEQ ID NO: 1441948
auaccacaucacguaacac

SEQ ID NO: 1441950 - RNA, 19 nt, Artificial Sequence
  Description of Artificial Sequence: Synthetic oligonucleotide
  Sense strand starting at position 1194 of SEQ ID NO: 1243794
agagguauacauugagcaa

SEQ ID NO: 1441951 - RNA, 19 nt, Artificial Sequence
  Description of Artificial Sequence: Synthetic oligonucleotide
  Antisense strand to SEQ ID NO: 1441950
uugcucaauguauaccucu

SEQ ID NO: 1441952 - RNA, 19 nt, Artificial Sequence
  Description of Artificial Sequence: Synthetic oligonucleotide
  Sense strand starting at position 1197 of SEQ ID NO: 1243794
gguauacauugagcaauag

SEQ ID NO: 1441953 - RNA, 19 nt, Artificial Sequence
  Description of Artificial Sequence: Synthetic oligonucleotide
  Antisense strand to SEQ ID NO: 1441952
cuauugcucaauguauacc

SEQ ID NO: 1441954 - RNA, 19 nt, Artificial Sequence
  Description of Artificial Sequence: Synthetic oligonucleotide
  Sense strand starting at position 1198 of SEQ ID NO: 1243794
guauacauugagcaauagu

SEQ ID NO: 1441955 - RNA, 19 nt, Artificial Sequence
  Description of Artificial Sequence: Synthetic oligonucleotide
  Antisense strand to SEQ ID NO: 1441954
acuauugcucaauguauac

SEQ ID NO: 1441956 - RNA, 19 nt, Artificial Sequence
  Description of Artificial Sequence: Synthetic oligonucleotide
  Sense strand starting at position 1279 of SEQ ID NO: 1243794
gccuccuuccuuuagaaug

SEQ ID NO: 1441957 - RNA, 19 nt, Artificial Sequence
  Description of Artificial Sequence: Synthetic oligonucleotide
  Antisense strand to SEQ ID NO: 1441956
cauucuaaaggaaggaggc

SEQ ID NO: 1441958 - RNA, 19 nt, Artificial Sequence
  Description of Artificial Sequence: Synthetic oligonucleotide
  Sense strand starting at position 1896 of SEQ ID NO: 1243794
gguauucaccgucaugaga

SEQ ID NO: 1441959 - RNA, 19 nt, Artificial Sequence
  Description of Artificial Sequence: Synthetic oligonucleotide
  Antisense strand to SEQ ID NO: 1441958
ucucaugacggugaauacc

SEQ ID NO: 1441960 - RNA, 19 nt, Artificial Sequence
  Description of Artificial Sequence: Synthetic oligonucleotide
  Sense strand starting at position 1947 of SEQ ID NO: 1243794
cucuucuacguuggacaaa

SEQ ID NO: 1441961 - RNA, 19 nt, Artificial Sequence
  Description of Artificial Sequence: Synthetic oligonucleotide
  Antisense strand to SEQ ID NO: 1441960
uuuguccaacguagaagag

SEQ ID NO: 1441962 - RNA, 19 nt, Artificial Sequence
  Description of Artificial Sequence: Synthetic oligonucleotide
  Sense strand starting at position 2006 of SEQ ID NO: 1243794
uggcuagagacacgaucau

SEQ ID NO: 1441963 - RNA, 19 nt, Artificial Sequence
  Description of Artificial Sequence: Synthetic oligonucleotide
  Antisense strand to SEQ ID NO: 1441962
augaucgugucucuagcca

SEQ ID NO: 1441964 - RNA, 19 nt, Artificial Sequence
  Description of Artificial Sequence: Synthetic oligonucleotide
  Sense strand starting at position 2019 of SEQ ID NO: 1243794
gaucauucggaguggagaa

SEQ ID NO: 1441965 - RNA, 19 nt, Artificial Sequence
  Description of Artificial Sequence: Synthetic oligonucleotide
  Antisense strand to SEQ ID NO: 1441964
uucuccacuccgaaugauc

SEQ ID NO: 1441966 - RNA, 19 nt, Artificial Sequence
  Description of Artificial Sequence: Synthetic oligonucleotide
  Sense strand starting at position 2020 of SEQ ID NO: 1243794
aucauucggaguggagaaa

SEQ ID NO: 1441967 - RNA, 19 nt, Artificial Sequence
  Description of Artificial Sequence: Synthetic oligonucleotide
  Antisense strand to SEQ ID NO: 1441966
uuucuccacuccgaaugau

SEQ ID NO: 1441968 - RNA, 19 nt, Artificial Sequence
  Description of Artificial Sequence: Synthetic oligonucleotide
  Sense strand starting at position 2369 of SEQ ID NO: 1243794
uuuaguaccucacuaguaa

SEQ ID NO: 1441969 - RNA, 19 nt, Artificial Sequence
  Description of Artificial Sequence: Synthetic oligonucleotide
  Antisense strand to SEQ ID NO: 1441968
uuacuagugagguacuaaa

SEQ ID NO: 1441970 - RNA, 19 nt, Artificial Sequence
  Description of Artificial Sequence: Synthetic oligonucleotide
  Sense strand starting at position 2370 of SEQ ID NO: 1243794
uuaguaccucacuaguaaa

SEQ ID NO: 1441971 - RNA, 19 nt, Artificial Sequence
  Description of Artificial Sequence: Synthetic oligonucleotide
  Antisense strand to SEQ ID NO: 1441970
uuuacuagugagguacuaa

SEQ ID NO: 1441972 - RNA, 19 nt, Artificial Sequence
  Description of Artificial Sequence: Synthetic oligonucleotide
  Sense strand starting at position 2533 of SEQ ID NO: 1243794
ugauguaugguccacagca

SEQ ID NO: 1441973 - RNA, 19 nt, Artificial Sequence
  Description of Artificial Sequence: Synthetic oligonucleotide
  Antisense strand to SEQ ID NO: 1441972
ugcuguggaccauacauca

SEQ ID NO: 1441974 - RNA, 19 nt, Artificial Sequence
  Description of Artificial Sequence: Synthetic oligonucleotide
  Sense strand starting at position 2535 of SEQ ID NO: 1243794
auguaugguccacagcaau

SEQ ID NO: 1441975 - RNA, 19 nt, Artificial Sequence
  Description of Artificial Sequence: Synthetic oligonucleotide
  Antisense strand to SEQ ID NO: 1441974
auugcuguggaccauacau

SEQ ID NO: 1441976 - RNA, 19 nt, Artificial Sequence
  Description of Artificial Sequence: Synthetic oligonucleotide
  Sense strand starting at position 2890 of SEQ ID NO: 1243794
agcugaauuggugaucucu

SEQ ID NO: 1441977 - RNA, 19 nt, Artificial Sequence
  Description of Artificial Sequence: Synthetic oligonucleotide
  Antisense strand to SEQ ID NO: 1441976
agagaucaccaauucagcu

SEQ ID NO: 1441978 - RNA, 19 nt, Artificial Sequence
  Description of Artificial Sequence: Synthetic oligonucleotide
  Sense strand starting at position 2892 of SEQ ID NO: 1243794
cugaauuggugaucucuuu

SEQ ID NO: 1441979 - RNA, 19 nt, Artificial Sequence
  Description of Artificial Sequence: Synthetic oligonucleotide
  Antisense strand to SEQ ID NO: 1441978
aaagagaucaccaauucag

SEQ ID NO: 1441980 - RNA, 19 nt, Artificial Sequence
  Description of Artificial Sequence: Synthetic oligonucleotide
  Sense strand starting at position 2898 of SEQ ID NO: 1243794
uggugaucucuuuacccaa

SEQ ID NO: 1441981 - RNA, 19 nt, Artificial Sequence
  Description of Artificial Sequence: Synthetic oligonucleotide
  Antisense strand to SEQ ID NO: 1441980
uuggguaaagagaucacca

SEQ ID NO: 1441982 - RNA, 19 nt, Artificial Sequence
  Description of Artificial Sequence: Synthetic oligonucleotide
  Sense strand starting at position 3089 of SEQ ID NO: 1243794
agaugauuaggcuacccuu

SEQ ID NO: 1441983 - RNA, 19 nt, Artificial Sequence
  Description of Artificial Sequence: Synthetic oligonucleotide
  Antisense strand to SEQ ID NO: 1441982
aaggguagccuaaucaucu

SEQ ID NO: 1441984 - RNA, 19 nt, Artificial Sequence
  Description of Artificial Sequence: Synthetic oligonucleotide
  Sense strand starting at position 3092 of SEQ ID NO: 1243794
ugauuaggcuacccuuuaa

SEQ ID NO: 1441985 - RNA, 19 nt, Artificial Sequence
  Description of Artificial Sequence: Synthetic oligonucleotide
  Antisense strand to SEQ ID NO: 1441984
uuaaaggguagccuaauca

SEQ ID NO: 1441986 - RNA, 19 nt, Artificial Sequence
  Description of Artificial Sequence: Synthetic oligonucleotide
  Sense strand starting at position 3139 of SEQ ID NO: 1243794
gggagcagguuccuuauaa

SEQ ID NO: 1441987 - RNA, 19 nt, Artificial Sequence
  Description of Artificial Sequence: Synthetic oligonucleotide
  Antisense strand to SEQ ID NO: 1441986
uuauaaggaaccugcuccc

SEQ ID NO: 1441988 - RNA, 19 nt, Artificial Sequence
  Description of Artificial Sequence: Synthetic oligonucleotide
  Sense strand starting at position 3140 of SEQ ID NO: 1243794
ggagcagguuccuuauaag

SEQ ID NO: 1441989 - RNA, 19 nt, Artificial Sequence
  Description of Artificial Sequence: Synthetic oligonucleotide
  Antisense strand to SEQ ID NO: 1441988
cuuauaaggaaccugcucc

SEQ ID NO: 1441990 - RNA, 19 nt, Artificial Sequence
  Description of Artificial Sequence: Synthetic oligonucleotide
  Sense strand starting at position 3146 of SEQ ID NO: 1243794
gguuccuuauaaguggaua

SEQ ID NO: 1441991 - RNA, 19 nt, Artificial Sequence
  Description of Artificial Sequence: Synthetic oligonucleotide
  Antisense strand to SEQ ID NO: 1441990
uauccacuuauaaggaacc

SEQ ID NO: 1441992 - RNA, 19 nt, Artificial Sequence
  Description of Artificial Sequence: Synthetic oligonucleotide
  Sense strand starting at position 3149 of SEQ ID NO: 1243794
uccuuauaaguggauaagu

SEQ ID NO: 1441993 - RNA, 19 nt, Artificial Sequence
  Description of Artificial Sequence: Synthetic oligonucleotide
  Antisense strand to SEQ ID NO: 1441992
acuuauccacuuauaagga

SEQ ID NO: 1441994 - RNA, 19 nt, Artificial Sequence
  Description of Artificial Sequence: Synthetic oligonucleotide
  Sense strand starting at position 3500 of SEQ ID NO: 1243794
ucuaccuaucuuuggcaga

SEQ ID NO: 1441995 - RNA, 19 nt, Artificial Sequence
  Description of Artificial Sequence: Synthetic oligonucleotide
  Antisense strand to SEQ ID NO: 1441994
ucugccaaagauagguaga

SEQ ID NO: 1441996 - RNA, 19 nt, Artificial Sequence
  Description of Artificial Sequence: Synthetic oligonucleotide
  Sense strand starting at position 3780 of SEQ ID NO: 1243794
cuccgagaugcagauuaac

SEQ ID NO: 1441997 - RNA, 19 nt, Artificial Sequence
  Description of Artificial Sequence: Synthetic oligonucleotide
  Antisense strand to SEQ ID NO: 1441996
guuaaucugcaucucggag

SEQ ID NO: 1441998 - RNA, 19 nt, Artificial Sequence
  Description of Artificial Sequence: Synthetic oligonucleotide
  Sense strand starting at position 3783 of SEQ ID NO: 1243794
cgagaugcagauuaaccua

SEQ ID NO: 1441999 - RNA, 19 nt, Artificial Sequence
  Description of Artificial Sequence: Synthetic oligonucleotide
  Antisense strand to SEQ ID NO: 1441998
uagguuaaucugcaucucg

SEQ ID NO: 1442000 - RNA, 19 nt, Artificial Sequence
  Description of Artificial Sequence: Synthetic oligonucleotide
  Sense strand starting at position 3791 of SEQ ID NO: 1243794
agauuaaccuaucuagggu

SEQ ID NO: 1442001 - RNA, 19 nt, Artificial Sequence
  Description of Artificial Sequence: Synthetic oligonucleotide
  Antisense strand to SEQ ID NO: 1442000
acccuagauagguuaaucu

SEQ ID NO: 1442002 - RNA, 19 nt, Artificial Sequence
  Description of Artificial Sequence: Synthetic oligonucleotide
  Sense strand starting at position 3811 of SEQ ID NO: 1243794
ccuuguaguaggcaucaga

SEQ ID NO: 1442003 - RNA, 19 nt, Artificial Sequence
  Description of Artificial Sequence: Synthetic oligonucleotide
  Antisense strand to SEQ ID NO: 1442002
ucugaugccuacuacaagg

SEQ ID NO: 1442004 - RNA, 19 nt, Artificial Sequence
  Description of Artificial Sequence: Synthetic oligonucleotide
  Sense strand starting at position 3845 of SEQ ID NO: 1243794
ggagguucauggcuaaacu

SEQ ID NO: 1442005 - RNA, 19 nt, Artificial Sequence
  Description of Artificial Sequence: Synthetic oligonucleotide
  Antisense strand to SEQ ID NO: 1442004
aguuuagccaugaaccucc

SEQ ID NO: 1442006 - RNA, 19 nt, Artificial Sequence
  Description of Artificial Sequence: Synthetic oligonucleotide
  Sense strand starting at position 578 of SEQ ID NO: 1243795
cugaauucugcacaucugu

SEQ ID NO: 1442007 - RNA, 19 nt, Artificial Sequence
  Description of Artificial Sequence: Synthetic oligonucleotide
  Antisense strand to SEQ ID NO: 1442006
acagaugugcagaauucag

SEQ ID NO: 1442008 - RNA, 19 nt, Artificial Sequence
  Description of Artificial Sequence: Synthetic oligonucleotide
  Sense strand starting at position 585 of SEQ ID NO: 1243795
cugcacaucuguuuauuua

SEQ ID NO: 1442009 - RNA, 19 nt, Artificial Sequence
  Description of Artificial Sequence: Synthetic oligonucleotide
  Antisense strand to SEQ ID NO: 1442008
uaaauaaacagaugugcag

SEQ ID NO: 1442010 - RNA, 19 nt, Artificial Sequence
  Description of Artificial Sequence: Synthetic oligonucleotide
  Sense strand starting at position 640 of SEQ ID NO: 1243795
gucuuuguccuguuuguca

SEQ ID NO: 1442011 - RNA, 19 nt, Artificial Sequence
  Description of Artificial Sequence: Synthetic oligonucleotide
  Antisense strand to SEQ ID NO: 1442010
ugacaaacaggacaaagac

SEQ ID NO: 1442012 - RNA, 19 nt, Artificial Sequence
  Description of Artificial Sequence: Synthetic oligonucleotide
  Sense strand starting at position 644 of SEQ ID NO: 1243795
uuguccuguuugucaggaa

SEQ ID NO: 1442013 - RNA, 19 nt, Artificial Sequence
  Description of Artificial Sequence: Synthetic oligonucleotide
  Antisense strand to SEQ ID NO: 1442012
uuccugacaaacaggacaa

SEQ ID NO: 1442014 - RNA, 19 nt, Artificial Sequence
  Description of Artificial Sequence: Synthetic oligonucleotide
  Sense strand starting at position 648 of SEQ ID NO: 1243795
ccuguuugucaggaaccau

SEQ ID NO: 1442015 - RNA, 19 nt, Artificial Sequence
  Description of Artificial Sequence: Synthetic oligonucleotide
  Antisense strand to SEQ ID NO: 1442014
augguuccugacaaacagg

SEQ ID NO: 1442016 - RNA, 19 nt, Artificial Sequence
  Description of Artificial Sequence: Synthetic oligonucleotide
  Sense strand starting at position 708 of SEQ ID NO: 1243795
agcaaagcuccaugaauga

SEQ ID NO: 1442017 - RNA, 19 nt, Artificial Sequence
  Description of Artificial Sequence: Synthetic oligonucleotide
  Antisense strand to SEQ ID NO: 1442016
ucauucauggagcuuugcu

SEQ ID NO: 1442018 - RNA, 19 nt, Artificial Sequence
  Description of Artificial Sequence: Synthetic oligonucleotide
  Sense strand starting at position 798 of SEQ ID NO: 1243795
auaacuugugucugggaca

SEQ ID NO: 1442019 - RNA, 19 nt, Artificial Sequence
  Description of Artificial Sequence: Synthetic oligonucleotide
  Antisense strand to SEQ ID NO: 1442018
ugucccagacacaaguuau

SEQ ID NO: 1442020 - RNA, 19 nt, Artificial Sequence
  Description of Artificial Sequence: Synthetic oligonucleotide
  Sense strand starting at position 879 of SEQ ID NO: 1243795
cucugaguuucuccacgau

SEQ ID NO: 1442021 - RNA, 19 nt, Artificial Sequence
  Description of Artificial Sequence: Synthetic oligonucleotide
  Antisense strand to SEQ ID NO: 1442020
aucguggagaaacucagag

SEQ ID NO: 1442022 - RNA, 19 nt, Artificial Sequence
  Description of Artificial Sequence: Synthetic oligonucleotide
  Sense strand starting at position 898 of SEQ ID NO: 1243795
uuacguagcacaggaauau

SEQ ID NO: 1442023 - RNA, 19 nt, Artificial Sequence
  Description of Artificial Sequence: Synthetic oligonucleotide
  Antisense strand to SEQ ID NO: 1442022
auauuccugugcuacguaa

SEQ ID NO: 1442024 - RNA, 19 nt, Artificial Sequence
  Description of Artificial Sequence: Synthetic oligonucleotide
  Sense strand starting at position 899 of SEQ ID NO: 1243795
uacguagcacaggaauaua

SEQ ID NO: 1442025 - RNA, 19 nt, Artificial Sequence
  Description of Artificial Sequence: Synthetic oligonucleotide
  Antisense strand to SEQ ID NO: 1442024
uauauuccugugcuacgua

SEQ ID NO: 1442026 - RNA, 19 nt, Artificial Sequence
  Description of Artificial Sequence: Synthetic oligonucleotide
  Sense strand starting at position 1016 of SEQ ID NO: 1243795
agugacaguucccugugau

SEQ ID NO: 1442027 - RNA, 19 nt, Artificial Sequence
  Description of Artificial Sequence: Synthetic oligonucleotide
  Antisense strand to SEQ ID NO: 1442026
aucacagggaacugucacu

SEQ ID NO: 1442028 - RNA, 19 nt, Artificial Sequence
  Description of Artificial Sequence: Synthetic oligonucleotide
  Sense strand starting at position 1017 of SEQ ID NO: 1243795
gugacaguucccugugauc

SEQ ID NO: 1442029 - RNA, 19 nt, Artificial Sequence
  Description of Artificial Sequence: Synthetic oligonucleotide
  Antisense strand to SEQ ID NO: 1442028
gaucacagggaacugucac

SEQ ID NO: 1442030 - RNA, 19 nt, Artificial Sequence
  Description of Artificial Sequence: Synthetic oligonucleotide
  Sense strand starting at position 1019 of SEQ ID NO: 1243795
gacaguucccugugaucuu

SEQ ID NO: 1442031 - RNA, 19 nt, Artificial Sequence
  Description of Artificial Sequence: Synthetic oligonucleotide
  Antisense strand to SEQ ID NO: 1442030
aagaucacagggaacuguc

SEQ ID NO: 1442032 - RNA, 19 nt, Artificial Sequence
  Description of Artificial Sequence: Synthetic oligonucleotide
  Sense strand starting at position 1028 of SEQ ID NO: 1243795
cugugaucuucccuuuccu

SEQ ID NO: 1442033 - RNA, 19 nt, Artificial Sequence
  Description of Artificial Sequence: Synthetic oligonucleotide
  Antisense strand to SEQ ID NO: 1442032
aggaaagggaagaucacag

SEQ ID NO: 1442034 - RNA, 19 nt, Artificial Sequence
  Description of Artificial Sequence: Synthetic oligonucleotide
  Sense strand starting at position 1190 of SEQ ID NO: 1243795
uuagucuuuccaugucaau

SEQ ID NO: 1442035 - RNA, 19 nt, Artificial Sequence
  Description of Artificial Sequence: Synthetic oligonucleotide
  Antisense strand to SEQ ID NO: 1442034
auugacauggaaagacuaa

SEQ ID NO: 1442036 - RNA, 19 nt, Artificial Sequence
  Description of Artificial Sequence: Synthetic oligonucleotide
  Sense strand starting at position 1236 of SEQ ID NO: 1243795
aaacaauaccgaugugucu

SEQ ID NO: 1442037 - RNA, 19 nt, Artificial Sequence
  Description of Artificial Sequence: Synthetic oligonucleotide
  Antisense strand to SEQ ID NO: 1442036
agacacaucgguauuguuu

SEQ ID NO: 1442038 - RNA, 19 nt, Artificial Sequence
  Description of Artificial Sequence: Synthetic oligonucleotide
  Sense strand starting at position 1242 of SEQ ID NO: 1243795
uaccgaugugucuaaggua

SEQ ID NO: 1442039 - RNA, 19 nt, Artificial Sequence
  Description of Artificial Sequence: Synthetic oligonucleotide
  Antisense strand to SEQ ID NO: 1442038
uaccuuagacacaucggua

SEQ ID NO: 1442040 - RNA, 19 nt, Artificial Sequence
  Description of Artificial Sequence: Synthetic oligonucleotide
  Sense strand starting at position 1469 of SEQ ID NO: 1243795
gggaucuguccuugcagga

SEQ ID NO: 1442041 - RNA, 19 nt, Artificial Sequence
  Description of Artificial Sequence: Synthetic oligonucleotide
  Antisense strand to SEQ ID NO: 1442040
uccugcaaggacagauccc

SEQ ID NO: 1442042 - RNA, 19 nt, Artificial Sequence
  Description of Artificial Sequence: Synthetic oligonucleotide
  Sense strand starting at position 2098 of SEQ ID NO: 1243795
cgacgugucgucccuuaga

SEQ ID NO: 1442043 - RNA, 19 nt, Artificial Sequence
  Description of Artificial Sequence: Synthetic oligonucleotide
  Antisense strand to SEQ ID NO: 1442042
ucuaagggacgacacgucg

SEQ ID NO: 1442044 - RNA, 19 nt, Artificial Sequence
  Description of Artificial Sequence: Synthetic oligonucleotide
  Sense strand starting at position 2100 of SEQ ID NO: 1243795
acgugucgucccuuagacu

SEQ ID NO: 1442045 - RNA, 19 nt, Artificial Sequence
  Description of Artificial Sequence: Synthetic oligonucleotide
  Antisense strand to SEQ ID NO: 1442044
agucuaagggacgacacgu

SEQ ID NO: 1442046 - RNA, 19 nt, Artificial Sequence
  Description of Artificial Sequence: Synthetic oligonucleotide
  Sense strand starting at position 2108 of SEQ ID NO: 1243795
ucccuuagacuguaaugau

SEQ ID NO: 1442047 - RNA, 19 nt, Artificial Sequence
  Description of Artificial Sequence: Synthetic oligonucleotide
  Antisense strand to SEQ ID NO: 1442046
aucauuacagucuaaggga

SEQ ID NO: 1442048 - RNA, 19 nt, Artificial Sequence
  Description of Artificial Sequence: Synthetic oligonucleotide
  Sense strand starting at position 2122 of SEQ ID NO: 1243795
augauuagagcacgaccau

SEQ ID NO: 1442049 - RNA, 19 nt, Artificial Sequence
  Description of Artificial Sequence: Synthetic oligonucleotide
  Antisense strand to SEQ ID NO: 1442048
auggucgugcucuaaucau

SEQ ID NO: 1442050 - RNA, 19 nt, Artificial Sequence
  Description of Artificial Sequence: Synthetic oligonucleotide
  Sense strand starting at position 2183 of SEQ ID NO: 1243795
ugcgcucaauuucuguaaa

SEQ ID NO: 1442051 - RNA, 19 nt, Artificial Sequence
  Description of Artificial Sequence: Synthetic oligonucleotide
  Antisense strand to SEQ ID NO: 1442050
uuuacagaaauugagcgca

SEQ ID NO: 1442052 - RNA, 19 nt, Artificial Sequence
  Description of Artificial Sequence: Synthetic oligonucleotide
  Sense strand starting at position 2448 of SEQ ID NO: 1243795
uucccuuccuaguccgaaa

SEQ ID NO: 1442053 - RNA, 19 nt, Artificial Sequence
  Description of Artificial Sequence: Synthetic oligonucleotide
  Antisense strand to SEQ ID NO: 1442052
uuucggacuaggaagggaa

SEQ ID NO: 1442054 - RNA, 19 nt, Artificial Sequence
  Description of Artificial Sequence: Synthetic oligonucleotide
  Sense strand starting at position 2450 of SEQ ID NO: 1243795
cccuuccuaguccgaaaua

SEQ ID NO: 1442055 - RNA, 19 nt, Artificial Sequence
  Description of Artificial Sequence: Synthetic oligonucleotide
  Antisense strand to SEQ ID NO: 1442054
uauuucggacuaggaaggg

SEQ ID NO: 1442056 - RNA, 19 nt, Artificial Sequence
  Description of Artificial Sequence: Synthetic oligonucleotide
  Sense strand starting at position 2469 of SEQ ID NO: 1243795
ggagaaaucucccugcaga

SEQ ID NO: 1442057 - RNA, 19 nt, Artificial Sequence
  Description of Artificial Sequence: Synthetic oligonucleotide
  Antisense strand to SEQ ID NO: 1442056
ucugcagggagauuucucc

SEQ ID NO: 1442058 - RNA, 19 nt, Artificial Sequence
  Description of Artificial Sequence: Synthetic oligonucleotide
  Sense strand starting at position 2470 of SEQ ID NO: 1243795
gagaaaucucccugcagag

SEQ ID NO: 1442059 - RNA, 19 nt, Artificial Sequence
  Description of Artificial Sequence: Synthetic oligonucleotide
  Antisense strand to SEQ ID NO: 1442058
cucugcagggagauuucuc

SEQ ID NO: 1442060 - RNA, 19 nt, Artificial Sequence
  Description of Artificial Sequence: Synthetic oligonucleotide
  Sense strand starting at position 3368 of SEQ ID NO: 1243795
uguucuuuccuuugggaaa

SEQ ID NO: 1442061 - RNA, 19 nt, Artificial Sequence
  Description of Artificial Sequence: Synthetic oligonucleotide
  Antisense strand to SEQ ID NO: 1442060
uuucccaaaggaaagaaca

SEQ ID NO: 1442062 - RNA, 19 nt, Artificial Sequence
  Description of Artificial Sequence: Synthetic oligonucleotide
  Sense strand starting at position 3442 of SEQ ID NO: 1243795
gcaacugaagauugcuaaa

SEQ ID NO: 1442063 - RNA, 19 nt, Artificial Sequence
  Description of Artificial Sequence: Synthetic oligonucleotide
  Antisense strand to SEQ ID NO: 1442062
uuuagcaaucuucaguugc

SEQ ID NO: 1442064 - RNA, 19 nt, Artificial Sequence
  Description of Artificial Sequence: Synthetic oligonucleotide
  Sense strand starting at position 3496 of SEQ ID NO: 1243795
ccugaaauccugugauucc

SEQ ID NO: 1442065 - RNA, 19 nt, Artificial Sequence
  Description of Artificial Sequence: Synthetic oligonucleotide
  Antisense strand to SEQ ID NO: 1442064
ggaaucacaggauuucagg

SEQ ID NO: 1442066 - RNA, 19 nt, Artificial Sequence
  Description of Artificial Sequence: Synthetic oligonucleotide
  Sense strand starting at position 3521 of SEQ ID NO: 1243795
cggaagcuggugucguaua

SEQ ID NO: 1442067 - RNA, 19 nt, Artificial Sequence
  Description of Artificial Sequence: Synthetic oligonucleotide
  Antisense strand to SEQ ID NO: 1442066
uauacgacaccagcuuccg

SEQ ID NO: 1442068 - RNA, 19 nt, Artificial Sequence
  Description of Artificial Sequence: Synthetic oligonucleotide
  Sense strand starting at position 3532 of SEQ ID NO: 1243795
gucguauauuggccacaaa

SEQ ID NO: 1442069 - RNA, 19 nt, Artificial Sequence
  Description of Artificial Sequence: Synthetic oligonucleotide
  Antisense strand to SEQ ID NO: 1442068
uuuguggccaauauacgac

SEQ ID NO: 1442070 - RNA, 19 nt, Artificial Sequence
  Description of Artificial Sequence: Synthetic oligonucleotide
  Sense strand starting at position 3535 of SEQ ID NO: 1243795
guauauuggccacaaagua

SEQ ID NO: 1442071 - RNA, 19 nt, Artificial Sequence
  Description of Artificial Sequence: Synthetic oligonucleotide
  Antisense strand to SEQ ID NO: 1442070
uacuuuguggccaauauac

SEQ ID NO: 1442072 - RNA, 19 nt, Artificial Sequence
  Description of Artificial Sequence: Synthetic oligonucleotide
  Sense strand starting at position 3604 of SEQ ID NO: 1243795
guuagucucgccuuauggu

SEQ ID NO: 1442073 - RNA, 19 nt, Artificial Sequence
  Description of Artificial Sequence: Synthetic oligonucleotide
  Antisense strand to SEQ ID NO: 1442072
accauaaggcgagacuaac

SEQ ID NO: 1442074 - RNA, 19 nt, Artificial Sequence
  Description of Artificial Sequence: Synthetic oligonucleotide
  Sense strand starting at position 3655 of SEQ ID NO: 1243795
augagaagcugggcugauu

SEQ ID NO: 1442075 - RNA, 19 nt, Artificial Sequence
  Description of Artificial Sequence: Synthetic oligonucleotide
  Antisense strand to SEQ ID NO: 1442074
aaucagcccagcuucucau

SEQ ID NO: 1442076 - RNA, 19 nt, Artificial Sequence
  Description of Artificial Sequence: Synthetic oligonucleotide
  Sense strand starting at position 3766 of SEQ ID NO: 1243795
cuuaaagaugcucacguga

SEQ ID NO: 1442077 - RNA, 19 nt, Artificial Sequence
  Description of Artificial Sequence: Synthetic oligonucleotide
  Antisense strand to SEQ ID NO: 1442076
ucacgugagcaucuuuaag

SEQ ID NO: 1442078 - RNA, 19 nt, Artificial Sequence
  Description of Artificial Sequence: Synthetic oligonucleotide
  Sense strand starting at position 3787 of SEQ ID NO: 1243795
cggcauauugccagagggu

SEQ ID NO: 1442079 - RNA, 19 nt, Artificial Sequence
  Description of Artificial Sequence: Synthetic oligonucleotide
  Antisense strand to SEQ ID NO: 1442078
acccucuggcaauaugccg

SEQ ID NO: 1442080 - RNA, 19 nt, Artificial Sequence
  Description of Artificial Sequence: Synthetic oligonucleotide
  Sense strand starting at position 3842 of SEQ ID NO: 1243795
aucuguuacugauugauca

SEQ ID NO: 1442081 - RNA, 19 nt, Artificial Sequence
  Description of Artificial Sequence: Synthetic oligonucleotide
  Antisense strand to SEQ ID NO: 1442080
ugaucaaucaguaacagau

SEQ ID NO: 1442082 - RNA, 19 nt, Artificial Sequence
  Description of Artificial Sequence: Synthetic oligonucleotide
  Sense strand starting at position 3846 of SEQ ID NO: 1243795
guuacugauugaucagaac

SEQ ID NO: 1442083 - RNA, 19 nt, Artificial Sequence
  Description of Artificial Sequence: Synthetic oligonucleotide
  Antisense strand to SEQ ID NO: 1442082
guucugaucaaucaguaac

SEQ ID NO: 1442084 - RNA, 19 nt, Artificial Sequence
  Description of Artificial Sequence: Synthetic oligonucleotide
  Sense strand starting at position 3849 of SEQ ID NO: 1243795
acugauugaucagaacacu

SEQ ID NO: 1442085 - RNA, 19 nt, Artificial Sequence
  Description of Artificial Sequence: Synthetic oligonucleotide
  Antisense strand to SEQ ID NO: 1442084
aguguucugaucaaucagu

SEQ ID NO: 1442086 - RNA, 19 nt, Artificial Sequence
  Description of Artificial Sequence: Synthetic oligonucleotide
  Sense strand starting at position 70 of SEQ ID NO: 1243796
aguguuucucuggcugcua

SEQ ID NO: 1442087 - RNA, 19 nt, Artificial Sequence
  Description of Artificial Sequence: Synthetic oligonucleotide
  Antisense strand to SEQ ID NO: 1442086
uagcagccagagaaacacu

SEQ ID NO: 1442088 - RNA, 19 nt, Artificial Sequence
  Description of Artificial Sequence: Synthetic oligonucleotide
  Sense strand starting at position 106 of SEQ ID NO: 1243796
ggagaaugugcccagucca

SEQ ID NO: 1442089 - RNA, 19 nt, Artificial Sequence
  Description of Artificial Sequence: Synthetic oligonucleotide
  Antisense strand to SEQ ID NO: 1442088
uggacugggcacauucucc

SEQ ID NO: 1442090 - RNA, 19 nt, Artificial Sequence
  Description of Artificial Sequence: Synthetic oligonucleotide
  Sense strand starting at position 296 of SEQ ID NO: 1243796
cgauuaaagugcuccacua

SEQ ID NO: 1442091 - RNA, 19 nt, Artificial Sequence
  Description of Artificial Sequence: Synthetic oligonucleotide
  Antisense strand to SEQ ID NO: 1442090
uaguggagcacuuuaaucg

SEQ ID NO: 1442092 - RNA, 19 nt, Artificial Sequence
  Description of Artificial Sequence: Synthetic oligonucleotide
  Sense strand starting at position 330 of SEQ ID NO: 1243796
gaggaugucuuggaaugga

SEQ ID NO: 1442093 - RNA, 19 nt, Artificial Sequence
  Description of Artificial Sequence: Synthetic oligonucleotide
  Antisense strand to SEQ ID NO: 1442092
uccauuccaagacauccuc

SEQ ID NO: 1442094 - RNA, 19 nt, Artificial Sequence
  Description of Artificial Sequence: Synthetic oligonucleotide
  Sense strand starting at position 457 of SEQ ID NO: 1243796
guauuucccaaguguuuag

SEQ ID NO: 1442095 - RNA, 19 nt, Artificial Sequence
  Description of Artificial Sequence: Synthetic oligonucleotide
  Antisense strand to SEQ ID NO: 1442094
cuaaacacuugggaaauac

SEQ ID NO: 1442096 - RNA, 19 nt, Artificial Sequence
  Description of Artificial Sequence: Synthetic oligonucleotide
  Sense strand starting at position 464 of SEQ ID NO: 1243796
ccaaguguuuaguccuaac

SEQ ID NO: 1442097 - RNA, 19 nt, Artificial Sequence
  Description of Artificial Sequence: Synthetic oligonucleotide
  Antisense strand to SEQ ID NO: 1442096
guuaggacuaaacacuugg

SEQ ID NO: 1442098 - RNA, 19 nt, Artificial Sequence
  Description of Artificial Sequence: Synthetic oligonucleotide
  Sense strand starting at position 646 of SEQ ID NO: 1243796
ggacaugccaggcaauguu

SEQ ID NO: 1442099 - RNA, 19 nt, Artificial Sequence
  Description of Artificial Sequence: Synthetic oligonucleotide
  Antisense strand to SEQ ID NO: 1442098
aacauugccuggcaugucc

SEQ ID NO: 1442100 - RNA, 19 nt, Artificial Sequence
  Description of Artificial Sequence: Synthetic oligonucleotide
  Sense strand starting at position 876 of SEQ ID NO: 1243796
ccauucugcgcugaaacau

SEQ ID NO: 1442101 - RNA, 19 nt, Artificial Sequence
  Description of Artificial Sequence: Synthetic oligonucleotide
  Antisense strand to SEQ ID NO: 1442100
auguuucagcgcagaaugg

SEQ ID NO: 1442102 - RNA, 19 nt, Artificial Sequence
  Description of Artificial Sequence: Synthetic oligonucleotide
  Sense strand starting at position 938 of SEQ ID NO: 1243796
ugacaugaguaccaaggaa

SEQ ID NO: 1442103 - RNA, 19 nt, Artificial Sequence
  Description of Artificial Sequence: Synthetic oligonucleotide
  Antisense strand to SEQ ID NO: 1442102
uuccuugguacucauguca

SEQ ID NO: 1442104 - RNA, 19 nt, Artificial Sequence
  Description of Artificial Sequence: Synthetic oligonucleotide
  Sense strand starting at position 1341 of SEQ ID NO: 1243796
ggaguuuccuguccaagau

SEQ ID NO: 1442105 - RNA, 19 nt, Artificial Sequence
  Description of Artificial Sequence: Synthetic oligonucleotide
  Antisense strand to SEQ ID NO: 1442104
aucuuggacaggaaacucc

SEQ ID NO: 1442106 - RNA, 19 nt, Artificial Sequence
  Description of Artificial Sequence: Synthetic oligonucleotide
  Sense strand starting at position 1342 of SEQ ID NO: 1243796
gaguuuccuguccaagaug

SEQ ID NO: 1442107 - RNA, 19 nt, Artificial Sequence
  Description of Artificial Sequence: Synthetic oligonucleotide
  Antisense strand to SEQ ID NO: 1442106
caucuuggacaggaaacuc

SEQ ID NO: 1442108 - RNA, 19 nt, Artificial Sequence
  Description of Artificial Sequence: Synthetic oligonucleotide
  Sense strand starting at position 1353 of SEQ ID NO: 1243796
ccaagaugugaacgcgaga

SEQ ID NO: 1442109 - RNA, 19 nt, Artificial Sequence
  Description of Artificial Sequence: Synthetic oligonucleotide
  Antisense strand to SEQ ID NO: 1442108
ucucgcguucacaucuugg

SEQ ID NO: 1442110 - RNA, 19 nt, Artificial Sequence
  Description of Artificial Sequence: Synthetic oligonucleotide
  Sense strand starting at position 1408 of SEQ ID NO: 1243796
ggaguaacccguggagaca

SEQ ID NO: 1442111 - RNA, 19 nt, Artificial Sequence
  Description of Artificial Sequence: Synthetic oligonucleotide
  Antisense strand to SEQ ID NO: 1442110
ugucuccacggguuacucc

SEQ ID NO: 1442112 - RNA, 19 nt, Artificial Sequence
  Description of Artificial Sequence: Synthetic oligonucleotide
  Sense strand starting at position 1472 of SEQ ID NO: 1243796
aagggcuguuguguugaga

SEQ ID NO: 1442113 - RNA, 19 nt, Artificial Sequence
  Description of Artificial Sequence: Synthetic oligonucleotide
  Antisense strand to SEQ ID NO: 1442112
ucucaacacaacagcccuu

SEQ ID NO: 1442114 - RNA, 19 nt, Artificial Sequence
  Description of Artificial Sequence: Synthetic oligonucleotide
  Sense strand starting at position 1755 of SEQ ID NO: 1243796
ccaugaugcccagacucau

SEQ ID NO: 1442115 - RNA, 19 nt, Artificial Sequence
  Description of Artificial Sequence: Synthetic oligonucleotide
  Antisense strand to SEQ ID NO: 1442114
augagucugggcaucaugg

SEQ ID NO: 1442116 - RNA, 19 nt, Artificial Sequence
  Description of Artificial Sequence: Synthetic oligonucleotide
  Sense strand starting at position 1814 of SEQ ID NO: 1243796
agugaaauuguggguagca

SEQ ID NO: 1442117 - RNA, 19 nt, Artificial Sequence
  Description of Artificial Sequence: Synthetic oligonucleotide
  Antisense strand to SEQ ID NO: 1442116
ugcuacccacaauuucacu

SEQ ID NO: 1442118 - RNA, 19 nt, Artificial Sequence
  Description of Artificial Sequence: Synthetic oligonucleotide
  Sense strand starting at position 1816 of SEQ ID NO: 1243796
ugaaauuguggguagcaga

SEQ ID NO: 1442119 - RNA, 19 nt, Artificial Sequence
  Description of Artificial Sequence: Synthetic oligonucleotide
  Antisense strand to SEQ ID NO: 1442118
ucugcuacccacaauuuca

SEQ ID NO: 1442120 - RNA, 19 nt, Artificial Sequence
  Description of Artificial Sequence: Synthetic oligonucleotide
  Sense strand starting at position 1900 of SEQ ID NO: 1243796
gaugauggaguuugagacu

SEQ ID NO: 1442121 - RNA, 19 nt, Artificial Sequence
  Description of Artificial Sequence: Synthetic oligonucleotide
  Antisense strand to SEQ ID NO: 1442120
agucucaaacuccaucauc

SEQ ID NO: 1442122 - RNA, 19 nt, Artificial Sequence
  Description of Artificial Sequence: Synthetic oligonucleotide
  Sense strand starting at position 1972 of SEQ ID NO: 1243796
aguuaugggagaugugguu

SEQ ID NO: 1442123 - RNA, 19 nt, Artificial Sequence
  Description of Artificial Sequence: Synthetic oligonucleotide
  Antisense strand to SEQ ID NO: 1442122
aaccacaucucccauaacu

SEQ ID NO: 1442124 - RNA, 19 nt, Artificial Sequence
  Description of Artificial Sequence: Synthetic oligonucleotide
  Sense strand starting at position 1981 of SEQ ID NO: 1243796
agaugugguuaccuagcaa

SEQ ID NO: 1442125 - RNA, 19 nt, Artificial Sequence
  Description of Artificial Sequence: Synthetic oligonucleotide
  Antisense strand to SEQ ID NO: 1442124
uugcuagguaaccacaucu

SEQ ID NO: 1442126 - RNA, 19 nt, Artificial Sequence
  Description of Artificial Sequence: Synthetic oligonucleotide
  Sense strand starting at position 2137 of SEQ ID NO: 1243796
ggcauuaggccugguuaga

SEQ ID NO: 1442127 - RNA, 19 nt, Artificial Sequence
  Description of Artificial Sequence: Synthetic oligonucleotide
  Antisense strand to SEQ ID NO: 1442126
ucuaaccaggccuaaugcc

SEQ ID NO: 1442128 - RNA, 19 nt, Artificial Sequence
  Description of Artificial Sequence: Synthetic oligonucleotide
  Sense strand starting at position 2194 of SEQ ID NO: 1243796
uggugaguguggcugagaa

SEQ ID NO: 1442129 - RNA, 19 nt, Artificial Sequence
  Description of Artificial Sequence: Synthetic oligonucleotide
  Antisense strand to SEQ ID NO: 1442128
uucucagccacacucacca

SEQ ID NO: 1442130 - RNA, 19 nt, Artificial Sequence
  Description of Artificial Sequence: Synthetic oligonucleotide
  Sense strand starting at position 3588 of SEQ ID NO: 1243796
uuccuuguuuauccacaga

SEQ ID NO: 1442131 - RNA, 19 nt, Artificial Sequence
  Description of Artificial Sequence: Synthetic oligonucleotide
  Antisense strand to SEQ ID NO: 1442130
ucuguggauaaacaaggaa

SEQ ID NO: 1442132 - RNA, 19 nt, Artificial Sequence
  Description of Artificial Sequence: Synthetic oligonucleotide
  Sense strand starting at position 3688 of SEQ ID NO: 1243796
gaagccaucuguuucugga

SEQ ID NO: 1442133 - RNA, 19 nt, Artificial Sequence
  Description of Artificial Sequence: Synthetic oligonucleotide
  Antisense strand to SEQ ID NO: 1442132
uccagaaacagauggcuuc

SEQ ID NO: 1442134 - RNA, 19 nt, Artificial Sequence
  Description of Artificial Sequence: Synthetic oligonucleotide
  Sense strand starting at position 3690 of SEQ ID NO: 1243796
agccaucuguuucuggaau

SEQ ID NO: 1442135 - RNA, 19 nt, Artificial Sequence
  Description of Artificial Sequence: Synthetic oligonucleotide
  Antisense strand to SEQ ID NO: 1442134
auuccagaaacagauggcu

SEQ ID NO: 1442136 - RNA, 19 nt, Artificial Sequence
  Description of Artificial Sequence: Synthetic oligonucleotide
  Sense strand starting at position 3729 of SEQ ID NO: 1243796
ugagacauauccuugauug

SEQ ID NO: 1442137 - RNA, 19 nt, Artificial Sequence
  Description of Artificial Sequence: Synthetic oligonucleotide
  Antisense strand to SEQ ID NO: 1442136
caaucaaggauaugucuca

SEQ ID NO: 1442138 - RNA, 19 nt, Artificial Sequence
  Description of Artificial Sequence: Synthetic oligonucleotide
  Sense strand starting at position 3730 of SEQ ID NO: 1243796
gagacauauccuugauugu

SEQ ID NO: 1442139 - RNA, 19 nt, Artificial Sequence
  Description of Artificial Sequence: Synthetic oligonucleotide
  Antisense strand to SEQ ID NO: 1442138
acaaucaaggauaugucuc

SEQ ID NO: 1442140 - RNA, 19 nt, Artificial Sequence
  Description of Artificial Sequence: Synthetic oligonucleotide
  Sense strand starting at position 3731 of SEQ ID NO: 1243796
agacauauccuugauuguc

SEQ ID NO: 1442141 - RNA, 19 nt, Artificial Sequence
  Description of Artificial Sequence: Synthetic oligonucleotide
  Antisense strand to SEQ ID NO: 1442140
gacaaucaaggauaugucu

SEQ ID NO: 1442142 - RNA, 19 nt, Artificial Sequence
  Description of Artificial Sequence: Synthetic oligonucleotide
  Sense strand starting at position 3737 of SEQ ID NO: 1243796
auccuugauuguccgugaa

SEQ ID NO: 1442143 - RNA, 19 nt, Artificial Sequence
  Description of Artificial Sequence: Synthetic oligonucleotide
  Antisense strand to SEQ ID NO: 1442142
uucacggacaaucaaggau

SEQ ID NO: 1442144 - RNA, 19 nt, Artificial Sequence
  Description of Artificial Sequence: Synthetic oligonucleotide
  Sense strand starting at position 3739 of SEQ ID NO: 1243796
ccuugauuguccgugaaau

SEQ ID NO: 1442145 - RNA, 19 nt, Artificial Sequence
  Description of Artificial Sequence: Synthetic oligonucleotide
  Antisense strand to SEQ ID NO: 1442144
auuucacggacaaucaagg

SEQ ID NO: 1442146 - RNA, 19 nt, Artificial Sequence
  Description of Artificial Sequence: Synthetic oligonucleotide
  Sense strand starting at position 3740 of SEQ ID NO: 1243796
cuugauuguccgugaaauc

SEQ ID NO: 1442147 - RNA, 19 nt, Artificial Sequence
  Description of Artificial Sequence: Synthetic oligonucleotide
  Antisense strand to SEQ ID NO: 1442146
gauuucacggacaaucaag

SEQ ID NO: 1442148 - RNA, 19 nt, Artificial Sequence
  Description of Artificial Sequence: Synthetic oligonucleotide
  Sense strand starting at position 3741 of SEQ ID NO: 1243796
uugauuguccgugaaauca

SEQ ID NO: 1442149 - RNA, 19 nt, Artificial Sequence
  Description of Artificial Sequence: Synthetic oligonucleotide
  Antisense strand to SEQ ID NO: 1442148
ugauuucacggacaaucaa

SEQ ID NO: 1442150 - RNA, 19 nt, Artificial Sequence
  Description of Artificial Sequence: Synthetic oligonucleotide
  Sense strand starting at position 3750 of SEQ ID NO: 1243796
cgugaaaucagguggucca

SEQ ID NO: 1442151 - RNA, 19 nt, Artificial Sequence
  Description of Artificial Sequence: Synthetic oligonucleotide
  Antisense strand to SEQ ID NO: 1442150
uggaccaccugauuucacg

SEQ ID NO: 1442152 - RNA, 19 nt, Artificial Sequence
  Description of Artificial Sequence: Synthetic oligonucleotide
  Sense strand starting at position 3773 of SEQ ID NO: 1243796
cagguugguccauagaggu

SEQ ID NO: 1442153 - RNA, 19 nt, Artificial Sequence
  Description of Artificial Sequence: Synthetic oligonucleotide
  Antisense strand to SEQ ID NO: 1442152
accucuauggaccaaccug

SEQ ID NO: 1442154 - RNA, 19 nt, Artificial Sequence
  Description of Artificial Sequence: Synthetic oligonucleotide
  Sense strand starting at position 3783 of SEQ ID NO: 1243796
cauagagguagguguaaga

SEQ ID NO: 1442155 - RNA, 19 nt, Artificial Sequence
  Description of Artificial Sequence: Synthetic oligonucleotide
  Antisense strand to SEQ ID NO: 1442154
ucuuacaccuaccucuaug

SEQ ID NO: 1442156 - RNA, 19 nt, Artificial Sequence
  Description of Artificial Sequence: Synthetic oligonucleotide
  Sense strand starting at position 3856 of SEQ ID NO: 1243796
uugguuugguaccuaucau

SEQ ID NO: 1442157 - RNA, 19 nt, Artificial Sequence
  Description of Artificial Sequence: Synthetic oligonucleotide
  Antisense strand to SEQ ID NO: 1442156
augauagguaccaaaccaa

SEQ ID NO: 1442158 - RNA, 19 nt, Artificial Sequence
  Description of Artificial Sequence: Synthetic oligonucleotide
  Sense strand starting at position 3857 of SEQ ID NO: 1243796
ugguuugguaccuaucaug

SEQ ID NO: 1442159 - RNA, 19 nt, Artificial Sequence
  Description of Artificial Sequence: Synthetic oligonucleotide
  Antisense strand to SEQ ID NO: 1442158
caugauagguaccaaacca

SEQ ID NO: 1442160 - RNA, 19 nt, Artificial Sequence
  Description of Artificial Sequence: Synthetic oligonucleotide
  Sense strand starting at position 3863 of SEQ ID NO: 1243796
gguaccuaucaugggaguu

SEQ ID NO: 1442161 - RNA, 19 nt, Artificial Sequence
  Description of Artificial Sequence: Synthetic oligonucleotide
  Antisense strand to SEQ ID NO: 1442160
aacucccaugauagguacc

SEQ ID NO: 1442162 - RNA, 19 nt, Artificial Sequence
  Description of Artificial Sequence: Synthetic oligonucleotide
  Sense strand starting at position 3864 of SEQ ID NO: 1243796
guaccuaucaugggaguuu

SEQ ID NO: 1442163 - RNA, 19 nt, Artificial Sequence
  Description of Artificial Sequence: Synthetic oligonucleotide
  Antisense strand to SEQ ID NO: 1442162
aaacucccaugauagguac

SEQ ID NO: 1442164 - RNA, 19 nt, Artificial Sequence
  Description of Artificial Sequence: Synthetic oligonucleotide
  Sense strand starting at position 3952 of SEQ ID NO: 1243796
cagggcugucucggauuua

SEQ ID NO: 1442165 - RNA, 19 nt, Artificial Sequence
  Description of Artificial Sequence: Synthetic oligonucleotide
  Antisense strand to SEQ ID NO: 1442164
uaaauccgagacagcccug

SEQ ID NO: 1442166 - RNA, 19 nt, Artificial Sequence
  Description of Artificial Sequence: Synthetic oligonucleotide
  Sense strand starting at position 41 of SEQ ID NO: 1243797
ugucuuguauuuccaguga

SEQ ID NO: 1442167 - RNA, 19 nt, Artificial Sequence
  Description of Artificial Sequence: Synthetic oligonucleotide
  Antisense strand to SEQ ID NO: 1442166
ucacuggaaauacaagaca

SEQ ID NO: 1442168 - RNA, 19 nt, Artificial Sequence
  Description of Artificial Sequence: Synthetic oligonucleotide
  Sense strand starting at position 129 of SEQ ID NO: 1243797
cuggaacucaaauggguua

SEQ ID NO: 1442169 - RNA, 19 nt, Artificial Sequence
  Description of Artificial Sequence: Synthetic oligonucleotide
  Antisense strand to SEQ ID NO: 1442168
uaacccauuugaguuccag

SEQ ID NO: 1442170 - RNA, 19 nt, Artificial Sequence
  Description of Artificial Sequence: Synthetic oligonucleotide
  Sense strand starting at position 755 of SEQ ID NO: 1243797
ggauaaagccuuugaugga

SEQ ID NO: 1442171 - RNA, 19 nt, Artificial Sequence
  Description of Artificial Sequence: Synthetic oligonucleotide
  Antisense strand to SEQ ID NO: 1442170
uccaucaaaggcuuuaucc

SEQ ID NO: 1442172 - RNA, 19 nt, Artificial Sequence
  Description of Artificial Sequence: Synthetic oligonucleotide
  Sense strand starting at position 793 of SEQ ID NO: 1243797
guagcaaucagguauccag

SEQ ID NO: 1442173 - RNA, 19 nt, Artificial Sequence
  Description of Artificial Sequence: Synthetic oligonucleotide
  Antisense strand to SEQ ID NO: 1442172
cuggauaccugauugcuac

SEQ ID NO: 1442174 - RNA, 19 nt, Artificial Sequence
  Description of Artificial Sequence: Synthetic oligonucleotide
  Sense strand starting at position 796 of SEQ ID NO: 1243797
gcaaucagguauccaggau

SEQ ID NO: 1442175 - RNA, 19 nt, Artificial Sequence
  Description of Artificial Sequence: Synthetic oligonucleotide
  Antisense strand to SEQ ID NO: 1442174
auccuggauaccugauugc

SEQ ID NO: 1442176 - RNA, 19 nt, Artificial Sequence
  Description of Artificial Sequence: Synthetic oligonucleotide
  Sense strand starting at position 908 of SEQ ID NO: 1243797
gaaacaauuuguuagacag

SEQ ID NO: 1442177 - RNA, 19 nt, Artificial Sequence
  Description of Artificial Sequence: Synthetic oligonucleotide
  Antisense strand to SEQ ID NO: 1442176
cugucuaacaaauuguuuc

SEQ ID NO: 1442178 - RNA, 19 nt, Artificial Sequence
  Description of Artificial Sequence: Synthetic oligonucleotide
  Sense strand starting at position 1039 of SEQ ID NO: 1243797
guggacaucugggugacuu

SEQ ID NO: 1442179 - RNA, 19 nt, Artificial Sequence
  Description of Artificial Sequence: Synthetic oligonucleotide
  Antisense strand to SEQ ID NO: 1442178
aagucacccagauguccac

SEQ ID NO: 1442180 - RNA, 19 nt, Artificial Sequence
  Description of Artificial Sequence: Synthetic oligonucleotide
  Sense strand starting at position 1040 of SEQ ID NO: 1243797
uggacaucugggugacuua

SEQ ID NO: 1442181 - RNA, 19 nt, Artificial Sequence
  Description of Artificial Sequence: Synthetic oligonucleotide
  Antisense strand to SEQ ID NO: 1442180
uaagucacccagaugucca

SEQ ID NO: 1442182 - RNA, 19 nt, Artificial Sequence
  Description of Artificial Sequence: Synthetic oligonucleotide
  Sense strand starting at position 1050 of SEQ ID NO: 1243797
ggugacuuacuauguaaac

SEQ ID NO: 1442183 - RNA, 19 nt, Artificial Sequence
  Description of Artificial Sequence: Synthetic oligonucleotide
  Antisense strand to SEQ ID NO: 1442182
guuuacauaguaagucacc

SEQ ID NO: 1442184 - RNA, 19 nt, Artificial Sequence
  Description of Artificial Sequence: Synthetic oligonucleotide
  Sense strand starting at position 1051 of SEQ ID NO: 1243797
gugacuuacuauguaaaca

SEQ ID NO: 1442185 - RNA, 19 nt, Artificial Sequence
  Description of Artificial Sequence: Synthetic oligonucleotide
  Antisense strand to SEQ ID NO: 1442184
uguuuacauaguaagucac

SEQ ID NO: 1442186 - RNA, 19 nt, Artificial Sequence
  Description of Artificial Sequence: Synthetic oligonucleotide
  Sense strand starting at position 1063 of SEQ ID NO: 1243797
guaaacauagcuuaaagua

SEQ ID NO: 1442187 - RNA, 19 nt, Artificial Sequence
  Description of Artificial Sequence: Synthetic oligonucleotide
  Antisense strand to SEQ ID NO: 1442186
uacuuuaagcuauguuuac

SEQ ID NO: 1442188 - RNA, 19 nt, Artificial Sequence
  Description of Artificial Sequence: Synthetic oligonucleotide
  Sense strand starting at position 1388 of SEQ ID NO: 1243797
cccagugaacacuguaaac

SEQ ID NO: 1442189 - RNA, 19 nt, Artificial Sequence
  Description of Artificial Sequence: Synthetic oligonucleotide
  Antisense strand to SEQ ID NO: 1442188
guuuacaguguucacuggg

SEQ ID NO: 1442190 - RNA, 19 nt, Artificial Sequence
  Description of Artificial Sequence: Synthetic oligonucleotide
  Sense strand starting at position 1398 of SEQ ID NO: 1243797
acuguaaacggauggaaau

SEQ ID NO: 1442191 - RNA, 19 nt, Artificial Sequence
  Description of Artificial Sequence: Synthetic oligonucleotide
  Antisense strand to SEQ ID NO: 1442190
auuuccauccguuuacagu

SEQ ID NO: 1442192 - RNA, 19 nt, Artificial Sequence
  Description of Artificial Sequence: Synthetic oligonucleotide
  Sense strand starting at position 1414 of SEQ ID NO: 1243797
aauggaauuggucgucaga

SEQ ID NO: 1442193 - RNA, 19 nt, Artificial Sequence
  Description of Artificial Sequence: Synthetic oligonucleotide
  Antisense strand to SEQ ID NO: 1442192
ucugacgaccaauuccauu

SEQ ID NO: 1442194 - RNA, 19 nt, Artificial Sequence
  Description of Artificial Sequence: Synthetic oligonucleotide
  Sense strand starting at position 1417 of SEQ ID NO: 1243797
ggaauuggucgucagauau

SEQ ID NO: 1442195 - RNA, 19 nt, Artificial Sequence
  Description of Artificial Sequence: Synthetic oligonucleotide
  Antisense strand to SEQ ID NO: 1442194
auaucugacgaccaauucc

SEQ ID NO: 1442196 - RNA, 19 nt, Artificial Sequence
  Description of Artificial Sequence: Synthetic oligonucleotide
  Sense strand starting at position 1631 of SEQ ID NO: 1243797
auaccucucccaggugaga

SEQ ID NO: 1442197 - RNA, 19 nt, Artificial Sequence
  Description of Artificial Sequence: Synthetic oligonucleotide
  Antisense strand to SEQ ID NO: 1442196
ucucaccugggagagguau

SEQ ID NO: 1442198 - RNA, 19 nt, Artificial Sequence
  Description of Artificial Sequence: Synthetic oligonucleotide
  Sense strand starting at position 1729 of SEQ ID NO: 1243797
aaggaauguguccaggcua

SEQ ID NO: 1442199 - RNA, 19 nt, Artificial Sequence
  Description of Artificial Sequence: Synthetic oligonucleotide
  Antisense strand to SEQ ID NO: 1442198
uagccuggacacauuccuu

SEQ ID NO: 1442200 - RNA, 19 nt, Artificial Sequence
  Description of Artificial Sequence: Synthetic oligonucleotide
  Sense strand starting at position 1824 of SEQ ID NO: 1243797
agauguaggcuccauaaac

SEQ ID NO: 1442201 - RNA, 19 nt, Artificial Sequence
  Description of Artificial Sequence: Synthetic oligonucleotide
  Antisense strand to SEQ ID NO: 1442200
guuuauggagccuacaucu

SEQ ID NO: 1442202 - RNA, 19 nt, Artificial Sequence
  Description of Artificial Sequence: Synthetic oligonucleotide
  Sense strand starting at position 2100 of SEQ ID NO: 1243797
uugugcuuucuagaugaag

SEQ ID NO: 1442203 - RNA, 19 nt, Artificial Sequence
  Description of Artificial Sequence: Synthetic oligonucleotide
  Antisense strand to SEQ ID NO: 1442202
cuucaucuagaaagcacaa

SEQ ID NO: 1442204 - RNA, 19 nt, Artificial Sequence
  Description of Artificial Sequence: Synthetic oligonucleotide
  Sense strand starting at position 2144 of SEQ ID NO: 1243797
gugaucucacaagaugcuu

SEQ ID NO: 1442205 - RNA, 19 nt, Artificial Sequence
  Description of Artificial Sequence: Synthetic oligonucleotide
  Antisense strand to SEQ ID NO: 1442204
aagcaucuugugagaucac

SEQ ID NO: 1442206 - RNA, 19 nt, Artificial Sequence
  Description of Artificial Sequence: Synthetic oligonucleotide
  Sense strand starting at position 2166 of SEQ ID NO: 1243797
augugaguauucuuaacag

SEQ ID NO: 1442207 - RNA, 19 nt, Artificial Sequence
  Description of Artificial Sequence: Synthetic oligonucleotide
  Antisense strand to SEQ ID NO: 1442206
cuguuaagaauacucacau

SEQ ID NO: 1442208 - RNA, 19 nt, Artificial Sequence
  Description of Artificial Sequence: Synthetic oligonucleotide
  Sense strand starting at position 2207 of SEQ ID NO: 1243797
uugagagaggugcaguaau

SEQ ID NO: 1442209 - RNA, 19 nt, Artificial Sequence
  Description of Artificial Sequence: Synthetic oligonucleotide
  Antisense strand to SEQ ID NO: 1442208
auuacugcaccucucucaa

SEQ ID NO: 1442210 - RNA, 19 nt, Artificial Sequence
  Description of Artificial Sequence: Synthetic oligonucleotide
  Sense strand starting at position 2215 of SEQ ID NO: 1243797
ggugcaguaauuuggccaa

SEQ ID NO: 1442211 - RNA, 19 nt, Artificial Sequence
  Description of Artificial Sequence: Synthetic oligonucleotide
  Antisense strand to SEQ ID NO: 1442210
uuggccaaauuacugcacc

SEQ ID NO: 1442212 - RNA, 19 nt, Artificial Sequence
  Description of Artificial Sequence: Synthetic oligonucleotide
  Sense strand starting at position 2218 of SEQ ID NO: 1243797
gcaguaauuuggccaaagu

SEQ ID NO: 1442213 - RNA, 19 nt, Artificial Sequence
  Description of Artificial Sequence: Synthetic oligonucleotide
  Antisense strand to SEQ ID NO: 1442212
acuuuggccaaauuacugc

SEQ ID NO: 1442214 - RNA, 19 nt, Artificial Sequence
  Description of Artificial Sequence: Synthetic oligonucleotide
  Sense strand starting at position 2443 of SEQ ID NO: 1243797
caaaguaaagguugcagaa

SEQ ID NO: 1442215 - RNA, 19 nt, Artificial Sequence
  Description of Artificial Sequence: Synthetic oligonucleotide
  Antisense strand to SEQ ID NO: 1442214
uucugcaaccuuuacuuug

SEQ ID NO: 1442216 - RNA, 19 nt, Artificial Sequence
  Description of Artificial Sequence: Synthetic oligonucleotide
  Sense strand starting at position 2547 of SEQ ID NO: 1243797
acgggacuauucuuugaga

SEQ ID NO: 1442217 - RNA, 19 nt, Artificial Sequence
  Description of Artificial Sequence: Synthetic oligonucleotide
  Antisense strand to SEQ ID NO: 1442216
ucucaaagaauagucccgu

SEQ ID NO: 1442218 - RNA, 19 nt, Artificial Sequence
  Description of Artificial Sequence: Synthetic oligonucleotide
  Sense strand starting at position 2548 of SEQ ID NO: 1243797
cgggacuauucuuugagaa

SEQ ID NO: 1442219 - RNA, 19 nt, Artificial Sequence
  Description of Artificial Sequence: Synthetic oligonucleotide
  Antisense strand to SEQ ID NO: 1442218
uucucaaagaauagucccg

SEQ ID NO: 1442220 - RNA, 19 nt, Artificial Sequence
  Description of Artificial Sequence: Synthetic oligonucleotide
  Sense strand starting at position 3354 of SEQ ID NO: 1243797
agaacucuucuuuggcaga

SEQ ID NO: 1442221 - RNA, 19 nt, Artificial Sequence
  Description of Artificial Sequence: Synthetic oligonucleotide
  Antisense strand to SEQ ID NO: 1442220
ucugccaaagaagaguucu

SEQ ID NO: 1442222 - RNA, 19 nt, Artificial Sequence
  Description of Artificial Sequence: Synthetic oligonucleotide
  Sense strand starting at position 3666 of SEQ ID NO: 1243797
cggagauugcaguaggaug

SEQ ID NO: 1442223 - RNA, 19 nt, Artificial Sequence
  Description of Artificial Sequence: Synthetic oligonucleotide
  Antisense strand to SEQ ID NO: 1442222
cauccuacugcaaucuccg

SEQ ID NO: 1442224 - RNA, 19 nt, Artificial Sequence
  Description of Artificial Sequence: Synthetic oligonucleotide
  Sense strand starting at position 3683 of SEQ ID NO: 1243797
ugccuagaagauugaguua

SEQ ID NO: 1442225 - RNA, 19 nt, Artificial Sequence
  Description of Artificial Sequence: Synthetic oligonucleotide
  Antisense strand to SEQ ID NO: 1442224
uaacucaaucuucuaggca

SEQ ID NO: 1442226 - RNA, 19 nt, Artificial Sequence
  Description of Artificial Sequence: Synthetic oligonucleotide
  Sense strand starting at position 3686 of SEQ ID NO: 1243797
cuagaagauugaguuaacu

SEQ ID NO: 1442227 - RNA, 19 nt, Artificial Sequence
  Description of Artificial Sequence: Synthetic oligonucleotide
  Antisense strand to SEQ ID NO: 1442226
aguuaacucaaucuucuag

SEQ ID NO: 1442228 - RNA, 19 nt, Artificial Sequence
  Description of Artificial Sequence: Synthetic oligonucleotide
  Sense strand starting at position 3694 of SEQ ID NO: 1243797
uugaguuaacuuuaccugu

SEQ ID NO: 1442229 - RNA, 19 nt, Artificial Sequence
  Description of Artificial Sequence: Synthetic oligonucleotide
  Antisense strand to SEQ ID NO: 1442228
acagguaaaguuaacucaa

SEQ ID NO: 1442230 - RNA, 19 nt, Artificial Sequence
  Description of Artificial Sequence: Synthetic oligonucleotide
  Sense strand starting at position 3761 of SEQ ID NO: 1243797
aaggcuucccaguggagau

SEQ ID NO: 1442231 - RNA, 19 nt, Artificial Sequence
  Description of Artificial Sequence: Synthetic oligonucleotide
  Antisense strand to SEQ ID NO: 1442230
aucuccacugggaagccuu

SEQ ID NO: 1442232 - RNA, 19 nt, Artificial Sequence
  Description of Artificial Sequence: Synthetic oligonucleotide
  Sense strand starting at position 3773 of SEQ ID NO: 1243797
uggagaugaugcuugaacu

SEQ ID NO: 1442233 - RNA, 19 nt, Artificial Sequence
  Description of Artificial Sequence: Synthetic oligonucleotide
  Antisense strand to SEQ ID NO: 1442232
aguucaagcaucaucucca

SEQ ID NO: 1442234 - RNA, 19 nt, Artificial Sequence
  Description of Artificial Sequence: Synthetic oligonucleotide
  Sense strand starting at position 3774 of SEQ ID NO: 1243797
ggagaugaugcuugaacuu

SEQ ID NO: 1442235 - RNA, 19 nt, Artificial Sequence
  Description of Artificial Sequence: Synthetic oligonucleotide
  Antisense strand to SEQ ID NO: 1442234
aaguucaagcaucaucucc

SEQ ID NO: 1442236 - RNA, 19 nt, Artificial Sequence
  Description of Artificial Sequence: Synthetic oligonucleotide
  Sense strand starting at position 3783 of SEQ ID NO: 1243797
gcuugaacuuucuugaaga

SEQ ID NO: 1442237 - RNA, 19 nt, Artificial Sequence
  Description of Artificial Sequence: Synthetic oligonucleotide
  Antisense strand to SEQ ID NO: 1442236
ucuucaagaaaguucaagc

SEQ ID NO: 1442238 - RNA, 19 nt, Artificial Sequence
  Description of Artificial Sequence: Synthetic oligonucleotide
  Sense strand starting at position 3805 of SEQ ID NO: 1243797
guaggaguucuuuacauaa

SEQ ID NO: 1442239 - RNA, 19 nt, Artificial Sequence
  Description of Artificial Sequence: Synthetic oligonucleotide
  Antisense strand to SEQ ID NO: 1442238
uuauguaaagaacuccuac

SEQ ID NO: 1442240 - RNA, 19 nt, Artificial Sequence
  Description of Artificial Sequence: Synthetic oligonucleotide
  Sense strand starting at position 3898 of SEQ ID NO: 1243797
cagagagucauguauggcu

SEQ ID NO: 1442241 - RNA, 19 nt, Artificial Sequence
  Description of Artificial Sequence: Synthetic oligonucleotide
  Antisense strand to SEQ ID NO: 1442240
agccauacaugacucucug

SEQ ID NO: 1442242 - RNA, 19 nt, Artificial Sequence
  Description of Artificial Sequence: Synthetic oligonucleotide
  Sense strand starting at position 3912 of SEQ ID NO: 1243797
uggcuugagcuacaggauu

SEQ ID NO: 1442243 - RNA, 19 nt, Artificial Sequence
  Description of Artificial Sequence: Synthetic oligonucleotide
  Antisense strand to SEQ ID NO: 1442242
aauccuguagcucaagcca

SEQ ID NO: 1442244 - RNA, 19 nt, Artificial Sequence
  Description of Artificial Sequence: Synthetic oligonucleotide
  Sense strand starting at position 3969 of SEQ ID NO: 1243797
aggaaaggaguuuguauac

SEQ ID NO: 1442245 - RNA, 19 nt, Artificial Sequence
  Description of Artificial Sequence: Synthetic oligonucleotide
  Antisense strand to SEQ ID NO: 1442244
guauacaaacuccuuuccu

SEQ ID NO: 1442246 - RNA, 19 nt, Artificial Sequence
  Description of Artificial Sequence: Synthetic oligonucleotide
  Sense strand starting at position 26 of SEQ ID NO: 1243798
gcacauacuuuggugaaau

SEQ ID NO: 1442247 - RNA, 19 nt, Artificial Sequence
  Description of Artificial Sequence: Synthetic oligonucleotide
  Antisense strand to SEQ ID NO: 1442246
auuucaccaaaguaugugc

SEQ ID NO: 1442248 - RNA, 19 nt, Artificial Sequence
  Description of Artificial Sequence: Synthetic oligonucleotide
  Sense strand starting at position 40 of SEQ ID NO: 1243798
gaaauuagacuugguuuaa

SEQ ID NO: 1442249 - RNA, 19 nt, Artificial Sequence
  Description of Artificial Sequence: Synthetic oligonucleotide
  Antisense strand to SEQ ID NO: 1442248
uuaaaccaagucuaauuuc

SEQ ID NO: 1442250 - RNA, 19 nt, Artificial Sequence
  Description of Artificial Sequence: Synthetic oligonucleotide
  Sense strand starting at position 403 of SEQ ID NO: 1243798
gcaauaugaccuuagccua

SEQ ID NO: 1442251 - RNA, 19 nt, Artificial Sequence
  Description of Artificial Sequence: Synthetic oligonucleotide
  Antisense strand to SEQ ID NO: 1442250
uaggcuaaggucauauugc

SEQ ID NO: 1442252 - RNA, 19 nt, Artificial Sequence
  Description of Artificial Sequence: Synthetic oligonucleotide
  Sense strand starting at position 493 of SEQ ID NO: 1243798
guggguauuacgggagaua

SEQ ID NO: 1442253 - RNA, 19 nt, Artificial Sequence
  Description of Artificial Sequence: Synthetic oligonucleotide
  Antisense strand to SEQ ID NO: 1442252
uaucucccguaauacccac

SEQ ID NO: 1442254 - RNA, 19 nt, Artificial Sequence
  Description of Artificial Sequence: Synthetic oligonucleotide
  Sense strand starting at position 496 of SEQ ID NO: 1243798
gguauuacgggagauaugu

SEQ ID NO: 1442255 - RNA, 19 nt, Artificial Sequence
  Description of Artificial Sequence: Synthetic oligonucleotide
  Antisense strand to SEQ ID NO: 1442254
acauaucucccguaauacc

SEQ ID NO: 1442256 - RNA, 19 nt, Artificial Sequence
  Description of Artificial Sequence: Synthetic oligonucleotide
  Sense strand starting at position 876 of SEQ ID NO: 1243798
aaguuaacaccggaacagu

SEQ ID NO: 1442257 - RNA, 19 nt, Artificial Sequence
  Description of Artificial Sequence: Synthetic oligonucleotide
  Antisense strand to SEQ ID NO: 1442256
acuguuccgguguuaacuu

SEQ ID NO: 1442258 - RNA, 19 nt, Artificial Sequence
  Description of Artificial Sequence: Synthetic oligonucleotide
  Sense strand starting at position 967 of SEQ ID NO: 1243798
agaaacacuucugagauaa

SEQ ID NO: 1442259 - RNA, 19 nt, Artificial Sequence
  Description of Artificial Sequence: Synthetic oligonucleotide
  Antisense strand to SEQ ID NO: 1442258
uuaucucagaaguguuucu

SEQ ID NO: 1442260 - RNA, 19 nt, Artificial Sequence
  Description of Artificial Sequence: Synthetic oligonucleotide
  Sense strand starting at position 978 of SEQ ID NO: 1243798
ugagauaacucagcacuau

SEQ ID NO: 1442261 - RNA, 19 nt, Artificial Sequence
  Description of Artificial Sequence: Synthetic oligonucleotide
  Antisense strand to SEQ ID NO: 1442260
auagugcugaguuaucuca

SEQ ID NO: 1442262 - RNA, 19 nt, Artificial Sequence
  Description of Artificial Sequence: Synthetic oligonucleotide
  Sense strand starting at position 1175 of SEQ ID NO: 1243798
gcgcuaacaagucugguuu

SEQ ID NO: 1442263 - RNA, 19 nt, Artificial Sequence
  Description of Artificial Sequence: Synthetic oligonucleotide
  Antisense strand to SEQ ID NO: 1442262
aaaccagacuuguuagcgc

SEQ ID NO: 1442264 - RNA, 19 nt, Artificial Sequence
  Description of Artificial Sequence: Synthetic oligonucleotide
  Sense strand starting at position 1179 of SEQ ID NO: 1243798
uaacaagucugguuugauu

SEQ ID NO: 1442265 - RNA, 19 nt, Artificial Sequence
  Description of Artificial Sequence: Synthetic oligonucleotide
  Antisense strand to SEQ ID NO: 1442264
aaucaaaccagacuuguua

SEQ ID NO: 1442266 - RNA, 19 nt, Artificial Sequence
  Description of Artificial Sequence: Synthetic oligonucleotide
  Sense strand starting at position 1181 of SEQ ID NO: 1243798
acaagucugguuugauuau

SEQ ID NO: 1442267 - RNA, 19 nt, Artificial Sequence
  Description of Artificial Sequence: Synthetic oligonucleotide
  Antisense strand to SEQ ID NO: 1442266
auaaucaaaccagacuugu

SEQ ID NO: 1442268 - RNA, 19 nt, Artificial Sequence
  Description of Artificial Sequence: Synthetic oligonucleotide
  Sense strand starting at position 1215 of SEQ ID NO: 1243798
ccaauaguuccucagcgac

SEQ ID NO: 1442269 - RNA, 19 nt, Artificial Sequence
  Description of Artificial Sequence: Synthetic oligonucleotide
  Antisense strand to SEQ ID NO: 1442268
gucgcugaggaacuauugg

SEQ ID NO: 1442270 - RNA, 19 nt, Artificial Sequence
  Description of Artificial Sequence: Synthetic oligonucleotide
  Sense strand starting at position 1291 of SEQ ID NO: 1243798
uagauuaggucuuccugac

SEQ ID NO: 1442271 - RNA, 19 nt, Artificial Sequence
  Description of Artificial Sequence: Synthetic oligonucleotide
  Antisense strand to SEQ ID NO: 1442270
gucaggaagaccuaaucua

SEQ ID NO: 1442272 - RNA, 19 nt, Artificial Sequence
  Description of Artificial Sequence: Synthetic oligonucleotide
  Sense strand starting at position 1359 of SEQ ID NO: 1243798
uuuauauguguuggauaca

SEQ ID NO: 1442273 - RNA, 19 nt, Artificial Sequence
  Description of Artificial Sequence: Synthetic oligonucleotide
  Antisense strand to SEQ ID NO: 1442272
uguauccaacacauauaaa

SEQ ID NO: 1442274 - RNA, 19 nt, Artificial Sequence
  Description of Artificial Sequence: Synthetic oligonucleotide
  Sense strand starting at position 1535 of SEQ ID NO: 1243798
uggcuaucauuugcucaca

SEQ ID NO: 1442275 - RNA, 19 nt, Artificial Sequence
  Description of Artificial Sequence: Synthetic oligonucleotide
  Antisense strand to SEQ ID NO: 1442274
ugugagcaaaugauagcca

SEQ ID NO: 1442276 - RNA, 19 nt, Artificial Sequence
  Description of Artificial Sequence: Synthetic oligonucleotide
  Sense strand starting at position 2048 of SEQ ID NO: 1243798
cuaggauuccgucaaguug

SEQ ID NO: 1442277 - RNA, 19 nt, Artificial Sequence
  Description of Artificial Sequence: Synthetic oligonucleotide
  Antisense strand to SEQ ID NO: 1442276
caacuugacggaauccuag

SEQ ID NO: 1442278 - RNA, 19 nt, Artificial Sequence
  Description of Artificial Sequence: Synthetic oligonucleotide
  Sense strand starting at position 2139 of SEQ ID NO: 1243798
agugucgcucuaguaguau

SEQ ID NO: 1442279 - RNA, 19 nt, Artificial Sequence
  Description of Artificial Sequence: Synthetic oligonucleotide
  Antisense strand to SEQ ID NO: 1442278
auacuacuagagcgacacu

SEQ ID NO: 1442280 - RNA, 19 nt, Artificial Sequence
  Description of Artificial Sequence: Synthetic oligonucleotide
  Sense strand starting at position 2145 of SEQ ID NO: 1243798
gcucuaguaguauaugcaa

SEQ ID NO: 1442281 - RNA, 19 nt, Artificial Sequence
  Description of Artificial Sequence: Synthetic oligonucleotide
  Antisense strand to SEQ ID NO: 1442280
uugcauauacuacuagagc

SEQ ID NO: 1442282 - RNA, 19 nt, Artificial Sequence
  Description of Artificial Sequence: Synthetic oligonucleotide
  Sense strand starting at position 2274 of SEQ ID NO: 1243798
cuuucuagaugggucauga

SEQ ID NO: 1442283 - RNA, 19 nt, Artificial Sequence
  Description of Artificial Sequence: Synthetic oligonucleotide
  Antisense strand to SEQ ID NO: 1442282
ucaugacccaucuagaaag

SEQ ID NO: 1442284 - RNA, 19 nt, Artificial Sequence
  Description of Artificial Sequence: Synthetic oligonucleotide
  Sense strand starting at position 2309 of SEQ ID NO: 1243798
ugcaguuucccgucagagu

SEQ ID NO: 1442285 - RNA, 19 nt, Artificial Sequence
  Description of Artificial Sequence: Synthetic oligonucleotide
  Antisense strand to SEQ ID NO: 1442284
acucugacgggaaacugca

SEQ ID NO: 1442286 - RNA, 19 nt, Artificial Sequence
  Description of Artificial Sequence: Synthetic oligonucleotide
  Sense strand starting at position 2812 of SEQ ID NO: 1243798
ggcugaggccucuaggguu

SEQ ID NO: 1442287 - RNA, 19 nt, Artificial Sequence
  Description of Artificial Sequence: Synthetic oligonucleotide
  Antisense strand to SEQ ID NO: 1442286
aacccuagaggccucagcc

SEQ ID NO: 1442288 - RNA, 19 nt, Artificial Sequence
  Description of Artificial Sequence: Synthetic oligonucleotide
  Sense strand starting at position 3010 of SEQ ID NO: 1243798
gaugcaggccuccgaauuu

SEQ ID NO: 1442289 - RNA, 19 nt, Artificial Sequence
  Description of Artificial Sequence: Synthetic oligonucleotide
  Antisense strand to SEQ ID NO: 1442288
aaauucggaggccugcauc

SEQ ID NO: 1442290 - RNA, 19 nt, Artificial Sequence
  Description of Artificial Sequence: Synthetic oligonucleotide
  Sense strand starting at position 3071 of SEQ ID NO: 1243798
agauauaggcgaugaucuu

SEQ ID NO: 1442291 - RNA, 19 nt, Artificial Sequence
  Description of Artificial Sequence: Synthetic oligonucleotide
  Antisense strand to SEQ ID NO: 1442290
aagaucaucgccuauaucu

SEQ ID NO: 1442292 - RNA, 19 nt, Artificial Sequence
  Description of Artificial Sequence: Synthetic oligonucleotide
  Sense strand starting at position 3072 of SEQ ID NO: 1243798
gauauaggcgaugaucuuu

SEQ ID NO: 1442293 - RNA, 19 nt, Artificial Sequence
  Description of Artificial Sequence: Synthetic oligonucleotide
  Antisense strand to SEQ ID NO: 1442292
aaagaucaucgccuauauc

SEQ ID NO: 1442294 - RNA, 19 nt, Artificial Sequence
  Description of Artificial Sequence: Synthetic oligonucleotide
  Sense strand starting at position 3084 of SEQ ID NO: 1243798
gaucuuugugcagcguuga

SEQ ID NO: 1442295 - RNA, 19 nt, Artificial Sequence
  Description of Artificial Sequence: Synthetic oligonucleotide
  Antisense strand to SEQ ID NO: 1442294
ucaacgcugcacaaagauc

SEQ ID NO: 1442296 - RNA, 19 nt, Artificial Sequence
  Description of Artificial Sequence: Synthetic oligonucleotide
  Sense strand starting at position 3087 of SEQ ID NO: 1243798
cuuugugcagcguugagua

SEQ ID NO: 1442297 - RNA, 19 nt, Artificial Sequence
  Description of Artificial Sequence: Synthetic oligonucleotide
  Antisense strand to SEQ ID NO: 1442296
uacucaacgcugcacaaag

SEQ ID NO: 1442298 - RNA, 19 nt, Artificial Sequence
  Description of Artificial Sequence: Synthetic oligonucleotide
  Sense strand starting at position 3219 of SEQ ID NO: 1243798
ggagaagcugucgagaguu

SEQ ID NO: 1442299 - RNA, 19 nt, Artificial Sequence
  Description of Artificial Sequence: Synthetic oligonucleotide
  Antisense strand to SEQ ID NO: 1442298
aacucucgacagcuucucc

SEQ ID NO: 1442300 - RNA, 19 nt, Artificial Sequence
  Description of Artificial Sequence: Synthetic oligonucleotide
  Sense strand starting at position 3334 of SEQ ID NO: 1243798
ugucaaugauguuucuaug

SEQ ID NO: 1442301 - RNA, 19 nt, Artificial Sequence
  Description of Artificial Sequence: Synthetic oligonucleotide
  Antisense strand to SEQ ID NO: 1442300
cauagaaacaucauugaca

SEQ ID NO: 1442302 - RNA, 19 nt, Artificial Sequence
  Description of Artificial Sequence: Synthetic oligonucleotide
  Sense strand starting at position 3350 of SEQ ID NO: 1243798
augucuguccucucucgua

SEQ ID NO: 1442303 - RNA, 19 nt, Artificial Sequence
  Description of Artificial Sequence: Synthetic oligonucleotide
  Antisense strand to SEQ ID NO: 1442302
uacgagagaggacagacau

SEQ ID NO: 1442304 - RNA, 19 nt, Artificial Sequence
  Description of Artificial Sequence: Synthetic oligonucleotide
  Sense strand starting at position 3352 of SEQ ID NO: 1243798
gucuguccucucucguaua

SEQ ID NO: 1442305 - RNA, 19 nt, Artificial Sequence
  Description of Artificial Sequence: Synthetic oligonucleotide
  Antisense strand to SEQ ID NO: 1442304
uauacgagagaggacagac

SEQ ID NO: 1442306 - RNA, 19 nt, Artificial Sequence
  Description of Artificial Sequence: Synthetic oligonucleotide
  Sense strand starting at position 3440 of SEQ ID NO: 1243798
gcacauaagaggugagcaa

SEQ ID NO: 1442307 - RNA, 19 nt, Artificial Sequence
  Description of Artificial Sequence: Synthetic oligonucleotide
  Antisense strand to SEQ ID NO: 1442306
uugcucaccucuuaugugc

SEQ ID NO: 1442308 - RNA, 19 nt, Artificial Sequence
  Description of Artificial Sequence: Synthetic oligonucleotide
  Sense strand starting at position 3533 of SEQ ID NO: 1243798
agaagcauuguguagccua

SEQ ID NO: 1442309 - RNA, 19 nt, Artificial Sequence
  Description of Artificial Sequence: Synthetic oligonucleotide
  Antisense strand to SEQ ID NO: 1442308
uaggcuacacaaugcuucu

SEQ ID NO: 1442310 - RNA, 19 nt, Artificial Sequence
  Description of Artificial Sequence: Synthetic oligonucleotide
  Sense strand starting at position 3614 of SEQ ID NO: 1243798
gugauagggauagguguua

SEQ ID NO: 1442311 - RNA, 19 nt, Artificial Sequence
  Description of Artificial Sequence: Synthetic oligonucleotide
  Antisense strand to SEQ ID NO: 1442310
uaacaccuaucccuaucac

SEQ ID NO: 1442312 - RNA, 19 nt, Artificial Sequence
  Description of Artificial Sequence: Synthetic oligonucleotide
  Sense strand starting at position 3707 of SEQ ID NO: 1243798
guuagaagaugaucaguau

SEQ ID NO: 1442313 - RNA, 19 nt, Artificial Sequence
  Description of Artificial Sequence: Synthetic oligonucleotide
  Antisense strand to SEQ ID NO: 1442312
auacugaucaucuucuaac

SEQ ID NO: 1442314 - RNA, 19 nt, Artificial Sequence
  Description of Artificial Sequence: Synthetic oligonucleotide
  Sense strand starting at position 3710 of SEQ ID NO: 1243798
agaagaugaucaguaucuu

SEQ ID NO: 1442315 - RNA, 19 nt, Artificial Sequence
  Description of Artificial Sequence: Synthetic oligonucleotide
  Antisense strand to SEQ ID NO: 1442314
aagauacugaucaucuucu

SEQ ID NO: 1442316 - RNA, 19 nt, Artificial Sequence
  Description of Artificial Sequence: Synthetic oligonucleotide
  Sense strand starting at position 3761 of SEQ ID NO: 1243798
gguggugguguuggaauuu

SEQ ID NO: 1442317 - RNA, 19 nt, Artificial Sequence
  Description of Artificial Sequence: Synthetic oligonucleotide
  Antisense strand to SEQ ID NO: 1442316
aaauuccaacaccaccacc

SEQ ID NO: 1442318 - RNA, 19 nt, Artificial Sequence
  Description of Artificial Sequence: Synthetic oligonucleotide
  Sense strand starting at position 3780 of SEQ ID NO: 1243798
gcaauaaaguggucaggga

SEQ ID NO: 1442319 - RNA, 19 nt, Artificial Sequence
  Description of Artificial Sequence: Synthetic oligonucleotide
  Antisense strand to SEQ ID NO: 1442318
ucccugaccacuuuauugc

SEQ ID NO: 1442320 - RNA, 19 nt, Artificial Sequence
  Description of Artificial Sequence: Synthetic oligonucleotide
  Sense strand starting at position 3814 of SEQ ID NO: 1243798
gcugauauuuaagcggacu

SEQ ID NO: 1442321 - RNA, 19 nt, Artificial Sequence
  Description of Artificial Sequence: Synthetic oligonucleotide
  Antisense strand to SEQ ID NO: 1442320
aguccgcuuaaauaucagc

SEQ ID NO: 1442322 - RNA, 19 nt, Artificial Sequence
  Description of Artificial Sequence: Synthetic oligonucleotide
  Sense strand starting at position 3874 of SEQ ID NO: 1243798
cguuccaagcuagagaaua

SEQ ID NO: 1442323 - RNA, 19 nt, Artificial Sequence
  Description of Artificial Sequence: Synthetic oligonucleotide
  Antisense strand to SEQ ID NO: 1442322
uauucucuagcuuggaacg

SEQ ID NO: 1442324 - RNA, 19 nt, Artificial Sequence
  Description of Artificial Sequence: Synthetic oligonucleotide
  Sense strand starting at position 3928 of SEQ ID NO: 1243798
ccguuaagagugugaagac

SEQ ID NO: 1442325 - RNA, 19 nt, Artificial Sequence
  Description of Artificial Sequence: Synthetic oligonucleotide
  Antisense strand to SEQ ID NO: 1442324
gucuucacacucuuaacgg

SEQ ID NO: 1442326 - RNA, 19 nt, Artificial Sequence
  Description of Artificial Sequence: Synthetic oligonucleotide
  Sense strand starting at position 164 of SEQ ID NO: 1243799
aagagagacuccgucuuaa

SEQ ID NO: 1442327 - RNA, 19 nt, Artificial Sequence
  Description of Artificial Sequence: Synthetic oligonucleotide
  Antisense strand to SEQ ID NO: 1442326
uuaagacggagucucucuu

SEQ ID NO: 1442328 - RNA, 19 nt, Artificial Sequence
  Description of Artificial Sequence: Synthetic oligonucleotide
  Sense strand starting at position 240 of SEQ ID NO: 1243799
uuuacauaguggcaagaua

SEQ ID NO: 1442329 - RNA, 19 nt, Artificial Sequence
  Description of Artificial Sequence: Synthetic oligonucleotide
  Antisense strand to SEQ ID NO: 1442328
uaucuugccacuauguaaa

SEQ ID NO: 1442330 - RNA, 19 nt, Artificial Sequence
  Description of Artificial Sequence: Synthetic oligonucleotide
  Sense strand starting at position 370 of SEQ ID NO: 1243799
cauccugugucucguaaga

SEQ ID NO: 1442331 - RNA, 19 nt, Artificial Sequence
  Description of Artificial Sequence: Synthetic oligonucleotide
  Antisense strand to SEQ ID NO: 1442330
ucuuacgagacacaggaug

SEQ ID NO: 1442332 - RNA, 19 nt, Artificial Sequence
  Description of Artificial Sequence: Synthetic oligonucleotide
  Sense strand starting at position 403 of SEQ ID NO: 1243799
caauuucccuguugagguu

SEQ ID NO: 1442333 - RNA, 19 nt, Artificial Sequence
  Description of Artificial Sequence: Synthetic oligonucleotide
  Antisense strand to SEQ ID NO: 1442332
aaccucaacagggaaauug

SEQ ID NO: 1442334 - RNA, 19 nt, Artificial Sequence
  Description of Artificial Sequence: Synthetic oligonucleotide
  Sense strand starting at position 533 of SEQ ID NO: 1243799
acgguaaagucauccauga

SEQ ID NO: 1442335 - RNA, 19 nt, Artificial Sequence
  Description of Artificial Sequence: Synthetic oligonucleotide
  Antisense strand to SEQ ID NO: 1442334
ucauggaugacuuuaccgu

SEQ ID NO: 1442336 - RNA, 19 nt, Artificial Sequence
  Description of Artificial Sequence: Synthetic oligonucleotide
  Sense strand starting at position 537 of SEQ ID NO: 1243799
uaaagucauccaugaggua

SEQ ID NO: 1442337 - RNA, 19 nt, Artificial Sequence
  Description of Artificial Sequence: Synthetic oligonucleotide
  Antisense strand to SEQ ID NO: 1442336
uaccucauggaugacuuua

SEQ ID NO: 1442338 - RNA, 19 nt, Artificial Sequence
  Description of Artificial Sequence: Synthetic oligonucleotide
  Sense strand starting at position 553 of SEQ ID NO: 1243799
guagcugcuaagcaagaau

SEQ ID NO: 1442339 - RNA, 19 nt, Artificial Sequence
  Description of Artificial Sequence: Synthetic oligonucleotide
  Antisense strand to SEQ ID NO: 1442338
auucuugcuuagcagcuac

SEQ ID NO: 1442340 - RNA, 19 nt, Artificial Sequence
  Description of Artificial Sequence: Synthetic oligonucleotide
  Sense strand starting at position 556 of SEQ ID NO: 1243799
gcugcuaagcaagaauaaa

SEQ ID NO: 1442341 - RNA, 19 nt, Artificial Sequence
  Description of Artificial Sequence: Synthetic oligonucleotide
  Antisense strand to SEQ ID NO: 1442340
uuuauucuugcuuagcagc

SEQ ID NO: 1442342 - RNA, 19 nt, Artificial Sequence
  Description of Artificial Sequence: Synthetic oligonucleotide
  Sense strand starting at position 583 of SEQ ID NO: 1243799
accagaucaugggaugaua

SEQ ID NO: 1442343 - RNA, 19 nt, Artificial Sequence
  Description of Artificial Sequence: Synthetic oligonucleotide
  Antisense strand to SEQ ID NO: 1442342
uaucaucccaugaucuggu

SEQ ID NO: 1442344 - RNA, 19 nt, Artificial Sequence
  Description of Artificial Sequence: Synthetic oligonucleotide
  Sense strand starting at position 617 of SEQ ID NO: 1243799
gcgucuacauguugcugaa

SEQ ID NO: 1442345 - RNA, 19 nt, Artificial Sequence
  Description of Artificial Sequence: Synthetic oligonucleotide
  Antisense strand to SEQ ID NO: 1442344
uucagcaacauguagacgc

SEQ ID NO: 1442346 - RNA, 19 nt, Artificial Sequence
  Description of Artificial Sequence: Synthetic oligonucleotide
  Sense strand starting at position 620 of SEQ ID NO: 1243799
ucuacauguugcugaauga

SEQ ID NO: 1442347 - RNA, 19 nt, Artificial Sequence
  Description of Artificial Sequence: Synthetic oligonucleotide
  Antisense strand to SEQ ID NO: 1442346
ucauucagcaacauguaga

SEQ ID NO: 1442348 - RNA, 19 nt, Artificial Sequence
  Description of Artificial Sequence: Synthetic oligonucleotide
  Sense strand starting at position 621 of SEQ ID NO: 1243799
cuacauguugcugaaugaa

SEQ ID NO: 1442349 - RNA, 19 nt, Artificial Sequence
  Description of Artificial Sequence: Synthetic oligonucleotide
  Antisense strand to SEQ ID NO: 1442348
uucauucagcaacauguag

SEQ ID NO: 1442350 - RNA, 19 nt, Artificial Sequence
  Description of Artificial Sequence: Synthetic oligonucleotide
  Sense strand starting at position 634 of SEQ ID NO: 1243799
aaugaacugugguucucua

SEQ ID NO: 1442351 - RNA, 19 nt, Artificial Sequence
  Description of Artificial Sequence: Synthetic oligonucleotide
  Antisense strand to SEQ ID NO: 1442350
uagagaaccacaguucauu

SEQ ID NO: 1442352 - RNA, 19 nt, Artificial Sequence
  Description of Artificial Sequence: Synthetic oligonucleotide
  Sense strand starting at position 638 of SEQ ID NO: 1243799
aacugugguucucuaagag

SEQ ID NO: 1442353 - RNA, 19 nt, Artificial Sequence
  Description of Artificial Sequence: Synthetic oligonucleotide
  Antisense strand to SEQ ID NO: 1442352
cucuuagagaaccacaguu

SEQ ID NO: 1442354 - RNA, 19 nt, Artificial Sequence
  Description of Artificial Sequence: Synthetic oligonucleotide
  Sense strand starting at position 642 of SEQ ID NO: 1243799
gugguucucuaagagguca

SEQ ID NO: 1442355 - RNA, 19 nt, Artificial Sequence
  Description of Artificial Sequence: Synthetic oligonucleotide
  Antisense strand to SEQ ID NO: 1442354
ugaccucuuagagaaccac

SEQ ID NO: 1442356 - RNA, 19 nt, Artificial Sequence
  Description of Artificial Sequence: Synthetic oligonucleotide
  Sense strand starting at position 647 of SEQ ID NO: 1243799
ucucuaagaggucagcauu

SEQ ID NO: 1442357 - RNA, 19 nt, Artificial Sequence
  Description of Artificial Sequence: Synthetic oligonucleotide
  Antisense strand to SEQ ID NO: 1442356
aaugcugaccucuuagaga

SEQ ID NO: 1442358 - RNA, 19 nt, Artificial Sequence
  Description of Artificial Sequence: Synthetic oligonucleotide
  Sense strand starting at position 650 of SEQ ID NO: 1243799
cuaagaggucagcauucua

SEQ ID NO: 1442359 - RNA, 19 nt, Artificial Sequence
  Description of Artificial Sequence: Synthetic oligonucleotide
  Antisense strand to SEQ ID NO: 1442358
uagaaugcugaccucuuag

SEQ ID NO: 1442360 - RNA, 19 nt, Artificial Sequence
  Description of Artificial Sequence: Synthetic oligonucleotide
  Sense strand starting at position 690 of SEQ ID NO: 1243799
acgggaaaucugugcuccu

SEQ ID NO: 1442361 - RNA, 19 nt, Artificial Sequence
  Description of Artificial Sequence: Synthetic oligonucleotide
  Antisense strand to SEQ ID NO: 1442360
aggagcacagauuucccgu

SEQ ID NO: 1442362 - RNA, 19 nt, Artificial Sequence
  Description of Artificial Sequence: Synthetic oligonucleotide
  Sense strand starting at position 691 of SEQ ID NO: 1243799
cgggaaaucugugcuccuu

SEQ ID NO: 1442363 - RNA, 19 nt, Artificial Sequence
  Description of Artificial Sequence: Synthetic oligonucleotide
  Antisense strand to SEQ ID NO: 1442362
aaggagcacagauuucccg

SEQ ID NO: 1442364 - RNA, 19 nt, Artificial Sequence
  Description of Artificial Sequence: Synthetic oligonucleotide
  Sense strand starting at position 976 of SEQ ID NO: 1243799
gaaugcgcuuacugauaaa

SEQ ID NO: 1442365 - RNA, 19 nt, Artificial Sequence
  Description of Artificial Sequence: Synthetic oligonucleotide
  Antisense strand to SEQ ID NO: 1442364
uuuaucaguaagcgcauuc

SEQ ID NO: 1442366 - RNA, 19 nt, Artificial Sequence
  Description of Artificial Sequence: Synthetic oligonucleotide
  Sense strand starting at position 1284 of SEQ ID NO: 1243799
cugucagucgcuggcaaua

SEQ ID NO: 1442367 - RNA, 19 nt, Artificial Sequence
  Description of Artificial Sequence: Synthetic oligonucleotide
  Antisense strand to SEQ ID NO: 1442366
uauugccagcgacugacag

SEQ ID NO: 1442368 - RNA, 19 nt, Artificial Sequence
  Description of Artificial Sequence: Synthetic oligonucleotide
  Sense strand starting at position 1307 of SEQ ID NO: 1243799
acuccugaguagucucaga

SEQ ID NO: 1442369 - RNA, 19 nt, Artificial Sequence
  Description of Artificial Sequence: Synthetic oligonucleotide
  Antisense strand to SEQ ID NO: 1442368
ucugagacuacucaggagu

SEQ ID NO: 1442370 - RNA, 19 nt, Artificial Sequence
  Description of Artificial Sequence: Synthetic oligonucleotide
  Sense strand starting at position 1312 of SEQ ID NO: 1243799
ugaguagucucagagugug

SEQ ID NO: 1442371 - RNA, 19 nt, Artificial Sequence
  Description of Artificial Sequence: Synthetic oligonucleotide
  Antisense strand to SEQ ID NO: 1442370
cacacucugagacuacuca

SEQ ID NO: 1442372 - RNA, 19 nt, Artificial Sequence
  Description of Artificial Sequence: Synthetic oligonucleotide
  Sense strand starting at position 2691 of SEQ ID NO: 1243799
uccguauccaucugcggau

SEQ ID NO: 1442373 - RNA, 19 nt, Artificial Sequence
  Description of Artificial Sequence: Synthetic oligonucleotide
  Antisense strand to SEQ ID NO: 1442372
auccgcagauggauacgga

SEQ ID NO: 1442374 - RNA, 19 nt, Artificial Sequence
  Description of Artificial Sequence: Synthetic oligonucleotide
  Sense strand starting at position 2695 of SEQ ID NO: 1243799
uauccaucugcggauggau

SEQ ID NO: 1442375 - RNA, 19 nt, Artificial Sequence
  Description of Artificial Sequence: Synthetic oligonucleotide
  Antisense strand to SEQ ID NO: 1442374
auccauccgcagauggaua

SEQ ID NO: 1442376 - RNA, 19 nt, Artificial Sequence
  Description of Artificial Sequence: Synthetic oligonucleotide
  Sense strand starting at position 2765 of SEQ ID NO: 1243799
cccgcaauucugcguggga

SEQ ID NO: 1442377 - RNA, 19 nt, Artificial Sequence
  Description of Artificial Sequence: Synthetic oligonucleotide
  Antisense strand to SEQ ID NO: 1442376
ucccacgcagaauugcggg

SEQ ID NO: 1442378 - RNA, 19 nt, Artificial Sequence
  Description of Artificial Sequence: Synthetic oligonucleotide
  Sense strand starting at position 2767 of SEQ ID NO: 1243799
cgcaauucugcgugggagu

SEQ ID NO: 1442379 - RNA, 19 nt, Artificial Sequence
  Description of Artificial Sequence: Synthetic oligonucleotide
  Antisense strand to SEQ ID NO: 1442378
acucccacgcagaauugcg

SEQ ID NO: 1442380 - RNA, 19 nt, Artificial Sequence
  Description of Artificial Sequence: Synthetic oligonucleotide
  Sense strand starting at position 2792 of SEQ ID NO: 1243799
gguguuuggugucugggaa

SEQ ID NO: 1442381 - RNA, 19 nt, Artificial Sequence
  Description of Artificial Sequence: Synthetic oligonucleotide
  Antisense strand to SEQ ID NO: 1442380
uucccagacaccaaacacc

SEQ ID NO: 1442382 - RNA, 19 nt, Artificial Sequence
  Description of Artificial Sequence: Synthetic oligonucleotide
  Sense strand starting at position 2793 of SEQ ID NO: 1243799
guguuuggugucugggaau

SEQ ID NO: 1442383 - RNA, 19 nt, Artificial Sequence
  Description of Artificial Sequence: Synthetic oligonucleotide
  Antisense strand to SEQ ID NO: 1442382
auucccagacaccaaacac

SEQ ID NO: 1442384 - RNA, 19 nt, Artificial Sequence
  Description of Artificial Sequence: Synthetic oligonucleotide
  Sense strand starting at position 2932 of SEQ ID NO: 1243799
aaccaugcguccugguaga

SEQ ID NO: 1442385 - RNA, 19 nt, Artificial Sequence
  Description of Artificial Sequence: Synthetic oligonucleotide
  Antisense strand to SEQ ID NO: 1442384
ucuaccaggacgcaugguu

SEQ ID NO: 1442386 - RNA, 19 nt, Artificial Sequence
  Description of Artificial Sequence: Synthetic oligonucleotide
  Sense strand starting at position 3328 of SEQ ID NO: 1243799
ucaucagacuugucacucu

SEQ ID NO: 1442387 - RNA, 19 nt, Artificial Sequence
  Description of Artificial Sequence: Synthetic oligonucleotide
  Antisense strand to SEQ ID NO: 1442386
agagugacaagucugauga

SEQ ID NO: 1442388 - RNA, 19 nt, Artificial Sequence
  Description of Artificial Sequence: Synthetic oligonucleotide
  Sense strand starting at position 3331 of SEQ ID NO: 1243799
ucagacuugucacucuauu

SEQ ID NO: 1442389 - RNA, 19 nt, Artificial Sequence
  Description of Artificial Sequence: Synthetic oligonucleotide
  Antisense strand to SEQ ID NO: 1442388
aauagagugacaagucuga

SEQ ID NO: 1442390 - RNA, 19 nt, Artificial Sequence
  Description of Artificial Sequence: Synthetic oligonucleotide
  Sense strand starting at position 3619 of SEQ ID NO: 1243799
ggacuugcuuggucuguau

SEQ ID NO: 1442391 - RNA, 19 nt, Artificial Sequence
  Description of Artificial Sequence: Synthetic oligonucleotide
  Antisense strand to SEQ ID NO: 1442390
auacagaccaagcaagucc

SEQ ID NO: 1442392 - RNA, 19 nt, Artificial Sequence
  Description of Artificial Sequence: Synthetic oligonucleotide
  Sense strand starting at position 3655 of SEQ ID NO: 1243799
cagugucccugccuguaaa

SEQ ID NO: 1442393 - RNA, 19 nt, Artificial Sequence
  Description of Artificial Sequence: Synthetic oligonucleotide
  Antisense strand to SEQ ID NO: 1442392
uuuacaggcagggacacug

SEQ ID NO: 1442394 - RNA, 19 nt, Artificial Sequence
  Description of Artificial Sequence: Synthetic oligonucleotide
  Sense strand starting at position 3665 of SEQ ID NO: 1243799
gccuguaaagugggaucua

SEQ ID NO: 1442395 - RNA, 19 nt, Artificial Sequence
  Description of Artificial Sequence: Synthetic oligonucleotide
  Antisense strand to SEQ ID NO: 1442394
uagaucccacuuuacaggc

SEQ ID NO: 1442396 - RNA, 19 nt, Artificial Sequence
  Description of Artificial Sequence: Synthetic oligonucleotide
  Sense strand starting at position 3666 of SEQ ID NO: 1243799
ccuguaaagugggaucuau

SEQ ID NO: 1442397 - RNA, 19 nt, Artificial Sequence
  Description of Artificial Sequence: Synthetic oligonucleotide
  Antisense strand to SEQ ID NO: 1442396
auagaucccacuuuacagg

SEQ ID NO: 1442398 - RNA, 19 nt, Artificial Sequence
  Description of Artificial Sequence: Synthetic oligonucleotide
  Sense strand starting at position 3756 of SEQ ID NO: 1243799
auccuuugagcucgggaga

SEQ ID NO: 1442399 - RNA, 19 nt, Artificial Sequence
  Description of Artificial Sequence: Synthetic oligonucleotide
  Antisense strand to SEQ ID NO: 1442398
ucucccgagcucaaaggau

SEQ ID NO: 1442400 - RNA, 19 nt, Artificial Sequence
  Description of Artificial Sequence: Synthetic oligonucleotide
  Sense strand starting at position 44 of SEQ ID NO: 1243800
aauacugacugguuuguga

SEQ ID NO: 1442401 - RNA, 19 nt, Artificial Sequence
  Description of Artificial Sequence: Synthetic oligonucleotide
  Antisense strand to SEQ ID NO: 1442400
ucacaaaccagucaguauu

SEQ ID NO: 1442402 - RNA, 19 nt, Artificial Sequence
  Description of Artificial Sequence: Synthetic oligonucleotide
  Sense strand starting at position 46 of SEQ ID NO: 1243800
uacugacugguuugugaaa

SEQ ID NO: 1442403 - RNA, 19 nt, Artificial Sequence
  Description of Artificial Sequence: Synthetic oligonucleotide
  Antisense strand to SEQ ID NO: 1442402
uuucacaaaccagucagua

SEQ ID NO: 1442404 - RNA, 19 nt, Artificial Sequence
  Description of Artificial Sequence: Synthetic oligonucleotide
  Sense strand starting at position 70 of SEQ ID NO: 1243800
uccaauuaaguuuguaaag

SEQ ID NO: 1442405 - RNA, 19 nt, Artificial Sequence
  Description of Artificial Sequence: Synthetic oligonucleotide
  Antisense strand to SEQ ID NO: 1442404
cuuuacaaacuuaauugga

SEQ ID NO: 1442406 - RNA, 19 nt, Artificial Sequence
  Description of Artificial Sequence: Synthetic oligonucleotide
  Sense strand starting at position 71 of SEQ ID NO: 1243800
ccaauuaaguuuguaaaga

SEQ ID NO: 1442407 - RNA, 19 nt, Artificial Sequence
  Description of Artificial Sequence: Synthetic oligonucleotide
  Antisense strand to SEQ ID NO: 1442406
ucuuuacaaacuuaauugg

SEQ ID NO: 1442408 - RNA, 19 nt, Artificial Sequence
  Description of Artificial Sequence: Synthetic oligonucleotide
  Sense strand starting at position 81 of SEQ ID NO: 1243800
uuguaaagacccugugaua

SEQ ID NO: 1442409 - RNA, 19 nt, Artificial Sequence
  Description of Artificial Sequence: Synthetic oligonucleotide
  Antisense strand to SEQ ID NO: 1442408
uaucacagggucuuuacaa

SEQ ID NO: 1442410 - RNA, 19 nt, Artificial Sequence
  Description of Artificial Sequence: Synthetic oligonucleotide
  Sense strand starting at position 187 of SEQ ID NO: 1243800
ccaagacuauggguuccaa

SEQ ID NO: 1442411 - RNA, 19 nt, Artificial Sequence
  Description of Artificial Sequence: Synthetic oligonucleotide
  Antisense strand to SEQ ID NO: 1442410
uuggaacccauagucuugg

SEQ ID NO: 1442412 - RNA, 19 nt, Artificial Sequence
  Description of Artificial Sequence: Synthetic oligonucleotide
  Sense strand starting at position 287 of SEQ ID NO: 1243800
cucauaaugcugggauaca

SEQ ID NO: 1442413 - RNA, 19 nt, Artificial Sequence
  Description of Artificial Sequence: Synthetic oligonucleotide
  Antisense strand to SEQ ID NO: 1442412
uguaucccagcauuaugag

SEQ ID NO: 1442414 - RNA, 19 nt, Artificial Sequence
  Description of Artificial Sequence: Synthetic oligonucleotide
  Sense strand starting at position 550 of SEQ ID NO: 1243800
acauuaagcccucauugga

SEQ ID NO: 1442415 - RNA, 19 nt, Artificial Sequence
  Description of Artificial Sequence: Synthetic oligonucleotide
  Antisense strand to SEQ ID NO: 1442414
uccaaugagggcuuaaugu

SEQ ID NO: 1442416 - RNA, 19 nt, Artificial Sequence
  Description of Artificial Sequence: Synthetic oligonucleotide
  Sense strand starting at position 569 of SEQ ID NO: 1243800
gcagauggagcugguauuu

SEQ ID NO: 1442417 - RNA, 19 nt, Artificial Sequence
  Description of Artificial Sequence: Synthetic oligonucleotide
  Antisense strand to SEQ ID NO: 1442416
aaauaccagcuccaucugc

SEQ ID NO: 1442418 - RNA, 19 nt, Artificial Sequence
  Description of Artificial Sequence: Synthetic oligonucleotide
  Sense strand starting at position 578 of SEQ ID NO: 1243800
gcugguauuucuguaacac

SEQ ID NO: 1442419 - RNA, 19 nt, Artificial Sequence
  Description of Artificial Sequence: Synthetic oligonucleotide
  Antisense strand to SEQ ID NO: 1442418
guguuacagaaauaccagc

SEQ ID NO: 1442420 - RNA, 19 nt, Artificial Sequence
  Description of Artificial Sequence: Synthetic oligonucleotide
  Sense strand starting at position 1065 of SEQ ID NO: 1243800
guuagucugaugcaggaca

SEQ ID NO: 1442421 - RNA, 19 nt, Artificial Sequence
  Description of Artificial Sequence: Synthetic oligonucleotide
  Antisense strand to SEQ ID NO: 1442420
uguccugcaucagacuaac

SEQ ID NO: 1442422 - RNA, 19 nt, Artificial Sequence
  Description of Artificial Sequence: Synthetic oligonucleotide
  Sense strand starting at position 1080 of SEQ ID NO: 1243800
gacacagugguccacaguu

SEQ ID NO: 1442423 - RNA, 19 nt, Artificial Sequence
  Description of Artificial Sequence: Synthetic oligonucleotide
  Antisense strand to SEQ ID NO: 1442422
aacuguggaccacuguguc

SEQ ID NO: 1442424 - RNA, 19 nt, Artificial Sequence
  Description of Artificial Sequence: Synthetic oligonucleotide
  Sense strand starting at position 1121 of SEQ ID NO: 1243800
uuaggaauuguucgaggag

SEQ ID NO: 1442425 - RNA, 19 nt, Artificial Sequence
  Description of Artificial Sequence: Synthetic oligonucleotide
  Antisense strand to SEQ ID NO: 1442424
cuccucgaacaauuccuaa

SEQ ID NO: 1442426 - RNA, 19 nt, Artificial Sequence
  Description of Artificial Sequence: Synthetic oligonucleotide
  Sense strand starting at position 1295 of SEQ ID NO: 1243800
gcaagagaccugcauucca

SEQ ID NO: 1442427 - RNA, 19 nt, Artificial Sequence
  Description of Artificial Sequence: Synthetic oligonucleotide
  Antisense strand to SEQ ID NO: 1442426
uggaaugcaggucucuugc

SEQ ID NO: 1442428 - RNA, 19 nt, Artificial Sequence
  Description of Artificial Sequence: Synthetic oligonucleotide
  Sense strand starting at position 1372 of SEQ ID NO: 1243800
guugguauucuccaaacag

SEQ ID NO: 1442429 - RNA, 19 nt, Artificial Sequence
  Description of Artificial Sequence: Synthetic oligonucleotide
  Antisense strand to SEQ ID NO: 1442428
cuguuuggagaauaccaac

SEQ ID NO: 1442430 - RNA, 19 nt, Artificial Sequence
  Description of Artificial Sequence: Synthetic oligonucleotide
  Sense strand starting at position 1453 of SEQ ID NO: 1243800
aagugacuugcccaagagu

SEQ ID NO: 1442431 - RNA, 19 nt, Artificial Sequence
  Description of Artificial Sequence: Synthetic oligonucleotide
  Antisense strand to SEQ ID NO: 1442430
acucuugggcaagucacuu

SEQ ID NO: 1442432 - RNA, 19 nt, Artificial Sequence
  Description of Artificial Sequence: Synthetic oligonucleotide
  Sense strand starting at position 1746 of SEQ ID NO: 1243800
ggagauagaguuggugagu

SEQ ID NO: 1442433 - RNA, 19 nt, Artificial Sequence
  Description of Artificial Sequence: Synthetic oligonucleotide
  Antisense strand to SEQ ID NO: 1442432
acucaccaacucuaucucc

SEQ ID NO: 1442434 - RNA, 19 nt, Artificial Sequence
  Description of Artificial Sequence: Synthetic oligonucleotide
  Sense strand starting at position 1747 of SEQ ID NO: 1243800
gagauagaguuggugaguu

SEQ ID NO: 1442435 - RNA, 19 nt, Artificial Sequence
  Description of Artificial Sequence: Synthetic oligonucleotide
  Antisense strand to SEQ ID NO: 1442434
aacucaccaacucuaucuc

SEQ ID NO: 1442436 - RNA, 19 nt, Artificial Sequence
  Description of Artificial Sequence: Synthetic oligonucleotide
  Sense strand starting at position 1749 of SEQ ID NO: 1243800
gauagaguuggugaguuca

SEQ ID NO: 1442437 - RNA, 19 nt, Artificial Sequence
  Description of Artificial Sequence: Synthetic oligonucleotide
  Antisense strand to SEQ ID NO: 1442436
ugaacucaccaacucuauc

SEQ ID NO: 1442438 - RNA, 19 nt, Artificial Sequence
  Description of Artificial Sequence: Synthetic oligonucleotide
  Sense strand starting at position 1757 of SEQ ID NO: 1243800
uggugaguucaaggagaag

SEQ ID NO: 1442439 - RNA, 19 nt, Artificial Sequence
  Description of Artificial Sequence: Synthetic oligonucleotide
  Antisense strand to SEQ ID NO: 1442438
cuucuccuugaacucacca

SEQ ID NO: 1442440 - RNA, 19 nt, Artificial Sequence
  Description of Artificial Sequence: Synthetic oligonucleotide
  Sense strand starting at position 2169 of SEQ ID NO: 1243800
gauggauugauagguugca

SEQ ID NO: 1442441 - RNA, 19 nt, Artificial Sequence
  Description of Artificial Sequence: Synthetic oligonucleotide
  Antisense strand to SEQ ID NO: 1442440
ugcaaccuaucaauccauc

SEQ ID NO: 1442442 - RNA, 19 nt, Artificial Sequence
  Description of Artificial Sequence: Synthetic oligonucleotide
  Sense strand starting at position 2189 of SEQ ID NO: 1243800
ugggaacuucccuaagugu

SEQ ID NO: 1442443 - RNA, 19 nt, Artificial Sequence
  Description of Artificial Sequence: Synthetic oligonucleotide
  Antisense strand to SEQ ID NO: 1442442
acacuuagggaaguuccca

SEQ ID NO: 1442444 - RNA, 19 nt, Artificial Sequence
  Description of Artificial Sequence: Synthetic oligonucleotide
  Sense strand starting at position 2471 of SEQ ID NO: 1243800
aaggacgugcgauaagaau

SEQ ID NO: 1442445 - RNA, 19 nt, Artificial Sequence
  Description of Artificial Sequence: Synthetic oligonucleotide
  Antisense strand to SEQ ID NO: 1442444
auucuuaucgcacguccuu

SEQ ID NO: 1442446 - RNA, 19 nt, Artificial Sequence
  Description of Artificial Sequence: Synthetic oligonucleotide
  Sense strand starting at position 2616 of SEQ ID NO: 1243800
ggcaguuaccaaugaggag

SEQ ID NO: 1442447 - RNA, 19 nt, Artificial Sequence
  Description of Artificial Sequence: Synthetic oligonucleotide
  Antisense strand to SEQ ID NO: 1442446
cuccucauugguaacugcc

SEQ ID NO: 1442448 - RNA, 19 nt, Artificial Sequence
  Description of Artificial Sequence: Synthetic oligonucleotide
  Sense strand starting at position 2704 of SEQ ID NO: 1243800
cagagauagauguguuaug

SEQ ID NO: 1442449 - RNA, 19 nt, Artificial Sequence
  Description of Artificial Sequence: Synthetic oligonucleotide
  Antisense strand to SEQ ID NO: 1442448
cauaacacaucuaucucug

SEQ ID NO: 1442450 - RNA, 19 nt, Artificial Sequence
  Description of Artificial Sequence: Synthetic oligonucleotide
  Sense strand starting at position 2705 of SEQ ID NO: 1243800
agagauagauguguuaugu

SEQ ID NO: 1442451 - RNA, 19 nt, Artificial Sequence
  Description of Artificial Sequence: Synthetic oligonucleotide
  Antisense strand to SEQ ID NO: 1442450
acauaacacaucuaucucu

SEQ ID NO: 1442452 - RNA, 19 nt, Artificial Sequence
  Description of Artificial Sequence: Synthetic oligonucleotide
  Sense strand starting at position 2718 of SEQ ID NO: 1243800
uuauguuuggguuacagag

SEQ ID NO: 1442453 - RNA, 19 nt, Artificial Sequence
  Description of Artificial Sequence: Synthetic oligonucleotide
  Antisense strand to SEQ ID NO: 1442452
cucuguaacccaaacauaa

SEQ ID NO: 1442454 - RNA, 19 nt, Artificial Sequence
  Description of Artificial Sequence: Synthetic oligonucleotide
  Sense strand starting at position 3210 of SEQ ID NO: 1243800
aggagaauguucuuuaagc

SEQ ID NO: 1442455 - RNA, 19 nt, Artificial Sequence
  Description of Artificial Sequence: Synthetic oligonucleotide
  Antisense strand to SEQ ID NO: 1442454
gcuuaaagaacauucuccu

SEQ ID NO: 1442456 - RNA, 19 nt, Artificial Sequence
  Description of Artificial Sequence: Synthetic oligonucleotide
  Sense strand starting at position 3211 of SEQ ID NO: 1243800
ggagaauguucuuuaagca

SEQ ID NO: 1442457 - RNA, 19 nt, Artificial Sequence
  Description of Artificial Sequence: Synthetic oligonucleotide
  Antisense strand to SEQ ID NO: 1442456
ugcuuaaagaacauucucc

SEQ ID NO: 1442458 - RNA, 19 nt, Artificial Sequence
  Description of Artificial Sequence: Synthetic oligonucleotide
  Sense strand starting at position 3227 of SEQ ID NO: 1243800
gcaauaucuccugugugcu

SEQ ID NO: 1442459 - RNA, 19 nt, Artificial Sequence
  Description of Artificial Sequence: Synthetic oligonucleotide
  Antisense strand to SEQ ID NO: 1442458
agcacacaggagauauugc

SEQ ID NO: 1442460 - RNA, 19 nt, Artificial Sequence
  Description of Artificial Sequence: Synthetic oligonucleotide
  Sense strand starting at position 3271 of SEQ ID NO: 1243800
gaggcagggucuucuauga

SEQ ID NO: 1442461 - RNA, 19 nt, Artificial Sequence
  Description of Artificial Sequence: Synthetic oligonucleotide
  Antisense strand to SEQ ID NO: 1442460
ucauagaagacccugccuc

SEQ ID NO: 1442462 - RNA, 19 nt, Artificial Sequence
  Description of Artificial Sequence: Synthetic oligonucleotide
  Sense strand starting at position 3379 of SEQ ID NO: 1243800
agugguugcagagagaugu

SEQ ID NO: 1442463 - RNA, 19 nt, Artificial Sequence
  Description of Artificial Sequence: Synthetic oligonucleotide
  Antisense strand to SEQ ID NO: 1442462
acaucucucugcaaccacu

SEQ ID NO: 1442464 - RNA, 19 nt, Artificial Sequence
  Description of Artificial Sequence: Synthetic oligonucleotide
  Sense strand starting at position 3424 of SEQ ID NO: 1243800
gucauaaagauguaugcag

SEQ ID NO: 1442465 - RNA, 19 nt, Artificial Sequence
  Description of Artificial Sequence: Synthetic oligonucleotide
  Antisense strand to SEQ ID NO: 1442464
cugcauacaucuuuaugac

SEQ ID NO: 1442466 - RNA, 19 nt, Artificial Sequence
  Description of Artificial Sequence: Synthetic oligonucleotide
  Sense strand starting at position 3490 of SEQ ID NO: 1243800
agccaaaucuaggcauuga

SEQ ID NO: 1442467 - RNA, 19 nt, Artificial Sequence
  Description of Artificial Sequence: Synthetic oligonucleotide
  Antisense strand to SEQ ID NO: 1442466
ucaaugccuagauuuggcu

SEQ ID NO: 1442468 - RNA, 19 nt, Artificial Sequence
  Description of Artificial Sequence: Synthetic oligonucleotide
  Sense strand starting at position 3524 of SEQ ID NO: 1243800
gugcauuauauagagugau

SEQ ID NO: 1442469 - RNA, 19 nt, Artificial Sequence
  Description of Artificial Sequence: Synthetic oligonucleotide
  Antisense strand to SEQ ID NO: 1442468
aucacucuauauaaugcac

SEQ ID NO: 1442470 - RNA, 19 nt, Artificial Sequence
  Description of Artificial Sequence: Synthetic oligonucleotide
  Sense strand starting at position 3536 of SEQ ID NO: 1243800
gagugauggcuagacugau

SEQ ID NO: 1442471 - RNA, 19 nt, Artificial Sequence
  Description of Artificial Sequence: Synthetic oligonucleotide
  Antisense strand to SEQ ID NO: 1442470
aucagucuagccaucacuc

SEQ ID NO: 1442472 - RNA, 19 nt, Artificial Sequence
  Description of Artificial Sequence: Synthetic oligonucleotide
  Sense strand starting at position 3626 of SEQ ID NO: 1243800
agcuacucaccuggauauu

SEQ ID NO: 1442473 - RNA, 19 nt, Artificial Sequence
  Description of Artificial Sequence: Synthetic oligonucleotide
  Antisense strand to SEQ ID NO: 1442472
aauauccaggugaguagcu

SEQ ID NO: 1442474 - RNA, 19 nt, Artificial Sequence
  Description of Artificial Sequence: Synthetic oligonucleotide
  Sense strand starting at position 3692 of SEQ ID NO: 1243800
auugcaauuccugauugca

SEQ ID NO: 1442475 - RNA, 19 nt, Artificial Sequence
  Description of Artificial Sequence: Synthetic oligonucleotide
  Antisense strand to SEQ ID NO: 1442474
ugcaaucaggaauugcaau

SEQ ID NO: 1442476 - RNA, 19 nt, Artificial Sequence
  Description of Artificial Sequence: Synthetic oligonucleotide
  Sense strand starting at position 3819 of SEQ ID NO: 1243800
ugucauugucuccacaaag

SEQ ID NO: 1442477 - RNA, 19 nt, Artificial Sequence
  Description of Artificial Sequence: Synthetic oligonucleotide
  Antisense strand to SEQ ID NO: 1442476
cuuuguggagacaaugaca

SEQ ID NO: 1442478 - RNA, 19 nt, Artificial Sequence
  Description of Artificial Sequence: Synthetic oligonucleotide
  Sense strand starting at position 3893 of SEQ ID NO: 1243800
ccuggauugccauacaauu

SEQ ID NO: 1442479 - RNA, 19 nt, Artificial Sequence
  Description of Artificial Sequence: Synthetic oligonucleotide
  Antisense strand to SEQ ID NO: 1442478
aauuguauggcaauccagg

SEQ ID NO: 1442480 - RNA, 19 nt, Artificial Sequence
  Description of Artificial Sequence: Synthetic oligonucleotide
  Sense strand starting at position 78 of SEQ ID NO: 1243801
cuugaagcugugggagaua

SEQ ID NO: 1442481 - RNA, 19 nt, Artificial Sequence
  Description of Artificial Sequence: Synthetic oligonucleotide
  Antisense strand to SEQ ID NO: 1442480
uaucucccacagcuucaag

SEQ ID NO: 1442482 - RNA, 19 nt, Artificial Sequence
  Description of Artificial Sequence: Synthetic oligonucleotide
  Sense strand starting at position 227 of SEQ ID NO: 1243801
cucuuaaaggcccaguaaa

SEQ ID NO: 1442483 - RNA, 19 nt, Artificial Sequence
  Description of Artificial Sequence: Synthetic oligonucleotide
  Antisense strand to SEQ ID NO: 1442482
uuuacugggccuuuaagag

SEQ ID NO: 1442484 - RNA, 19 nt, Artificial Sequence
  Description of Artificial Sequence: Synthetic oligonucleotide
  Sense strand starting at position 312 of SEQ ID NO: 1243801
agugaacacucacuuguga

SEQ ID NO: 1442485 - RNA, 19 nt, Artificial Sequence
  Description of Artificial Sequence: Synthetic oligonucleotide
  Antisense strand to SEQ ID NO: 1442484
ucacaagugaguguucacu

SEQ ID NO: 1442486 - RNA, 19 nt, Artificial Sequence
  Description of Artificial Sequence: Synthetic oligonucleotide
  Sense strand starting at position 640 of SEQ ID NO: 1243801
caagcaugacuuuguaaag

SEQ ID NO: 1442487 - RNA, 19 nt, Artificial Sequence
  Description of Artificial Sequence: Synthetic oligonucleotide
  Antisense strand to SEQ ID NO: 1442486
cuuuacaaagucaugcuug

SEQ ID NO: 1442488 - RNA, 19 nt, Artificial Sequence
  Description of Artificial Sequence: Synthetic oligonucleotide
  Sense strand starting at position 646 of SEQ ID NO: 1243801
ugacuuuguaaaggaaguu

SEQ ID NO: 1442489 - RNA, 19 nt, Artificial Sequence
  Description of Artificial Sequence: Synthetic oligonucleotide
  Antisense strand to SEQ ID NO: 1442488
aacuuccuuuacaaaguca

SEQ ID NO: 1442490 - RNA, 19 nt, Artificial Sequence
  Description of Artificial Sequence: Synthetic oligonucleotide
  Sense strand starting at position 773 of SEQ ID NO: 1243801
gaggacucaucauuacugu

SEQ ID NO: 1442491 - RNA, 19 nt, Artificial Sequence
  Description of Artificial Sequence: Synthetic oligonucleotide
  Antisense strand to SEQ ID NO: 1442490
acaguaaugaugaguccuc

SEQ ID NO: 1442492 - RNA, 19 nt, Artificial Sequence
  Description of Artificial Sequence: Synthetic oligonucleotide
  Sense strand starting at position 781 of SEQ ID NO: 1243801
aucauuacuguagagugua

SEQ ID NO: 1442493 - RNA, 19 nt, Artificial Sequence
  Description of Artificial Sequence: Synthetic oligonucleotide
  Antisense strand to SEQ ID NO: 1442492
uacacucuacaguaaugau

SEQ ID NO: 1442494 - RNA, 19 nt, Artificial Sequence
  Description of Artificial Sequence: Synthetic oligonucleotide
  Sense strand starting at position 801 of SEQ ID NO: 1243801
ggacaaagcuuggucaaug

SEQ ID NO: 1442495 - RNA, 19 nt, Artificial Sequence
  Description of Artificial Sequence: Synthetic oligonucleotide
  Antisense strand to SEQ ID NO: 1442494
cauugaccaagcuuugucc

SEQ ID NO: 1442496 - RNA, 19 nt, Artificial Sequence
  Description of Artificial Sequence: Synthetic oligonucleotide
  Sense strand starting at position 859 of SEQ ID NO: 1243801
ccaugugauggucauggua

SEQ ID NO: 1442497 - RNA, 19 nt, Artificial Sequence
  Description of Artificial Sequence: Synthetic oligonucleotide
  Antisense strand to SEQ ID NO: 1442496
uaccaugaccaucacaugg

SEQ ID NO: 1442498 - RNA, 19 nt, Artificial Sequence
  Description of Artificial Sequence: Synthetic oligonucleotide
  Sense strand starting at position 948 of SEQ ID NO: 1243801
uuugguuggaggcauuaau

SEQ ID NO: 1442499 - RNA, 19 nt, Artificial Sequence
  Description of Artificial Sequence: Synthetic oligonucleotide
  Antisense strand to SEQ ID NO: 1442498
auuaaugccuccaaccaaa

SEQ ID NO: 1442500 - RNA, 19 nt, Artificial Sequence
  Description of Artificial Sequence: Synthetic oligonucleotide
  Sense strand starting at position 1269 of SEQ ID NO: 1243801
ccgauacacucaguaaauu

SEQ ID NO: 1442501 - RNA, 19 nt, Artificial Sequence
  Description of Artificial Sequence: Synthetic oligonucleotide
  Antisense strand to SEQ ID NO: 1442500
aauuuacugaguguaucgg

SEQ ID NO: 1442502 - RNA, 19 nt, Artificial Sequence
  Description of Artificial Sequence: Synthetic oligonucleotide
  Sense strand starting at position 1338 of SEQ ID NO: 1243801
uuucccaaagagugucaaa

SEQ ID NO: 1442503 - RNA, 19 nt, Artificial Sequence
  Description of Artificial Sequence: Synthetic oligonucleotide
  Antisense strand to SEQ ID NO: 1442502
uuugacacucuuugggaaa

SEQ ID NO: 1442504 - RNA, 19 nt, Artificial Sequence
  Description of Artificial Sequence: Synthetic oligonucleotide
  Sense strand starting at position 1420 of SEQ ID NO: 1243801
uguccuggagucgaauuaa

SEQ ID NO: 1442505 - RNA, 19 nt, Artificial Sequence
  Description of Artificial Sequence: Synthetic oligonucleotide
  Antisense strand to SEQ ID NO: 1442504
uuaauucgacuccaggaca

SEQ ID NO: 1442506 - RNA, 19 nt, Artificial Sequence
  Description of Artificial Sequence: Synthetic oligonucleotide
  Sense strand starting at position 1645 of SEQ ID NO: 1243801
ggcauuucuuguccaccca

SEQ ID NO: 1442507 - RNA, 19 nt, Artificial Sequence
  Description of Artificial Sequence: Synthetic oligonucleotide
  Antisense strand to SEQ ID NO: 1442506
uggguggacaagaaaugcc

SEQ ID NO: 1442508 - RNA, 19 nt, Artificial Sequence
  Description of Artificial Sequence: Synthetic oligonucleotide
  Sense strand starting at position 1753 of SEQ ID NO: 1243801
uuaccuuuccuguaaggag

SEQ ID NO: 1442509 - RNA, 19 nt, Artificial Sequence
  Description of Artificial Sequence: Synthetic oligonucleotide
  Antisense strand to SEQ ID NO: 1442508
cuccuuacaggaaagguaa

SEQ ID NO: 1442510 - RNA, 19 nt, Artificial Sequence
  Description of Artificial Sequence: Synthetic oligonucleotide
  Sense strand starting at position 2018 of SEQ ID NO: 1243801
agggauuccugauugcuga

SEQ ID NO: 1442511 - RNA, 19 nt, Artificial Sequence
  Description of Artificial Sequence: Synthetic oligonucleotide
  Antisense strand to SEQ ID NO: 1442510
ucagcaaucaggaaucccu

SEQ ID NO: 1442512 - RNA, 19 nt, Artificial Sequence
  Description of Artificial Sequence: Synthetic oligonucleotide
  Sense strand starting at position 2143 of SEQ ID NO: 1243801
gggaauaugugguuaugaa

SEQ ID NO: 1442513 - RNA, 19 nt, Artificial Sequence
  Description of Artificial Sequence: Synthetic oligonucleotide
  Antisense strand to SEQ ID NO: 1442512
uucauaaccacauauuccc

SEQ ID NO: 1442514 - RNA, 19 nt, Artificial Sequence
  Description of Artificial Sequence: Synthetic oligonucleotide
  Sense strand starting at position 2318 of SEQ ID NO: 1243801
caugguggucuugaggauu

SEQ ID NO: 1442515 - RNA, 19 nt, Artificial Sequence
  Description of Artificial Sequence: Synthetic oligonucleotide
  Antisense strand to SEQ ID NO: 1442514
aauccucaagaccaccaug

SEQ ID NO: 1442516 - RNA, 19 nt, Artificial Sequence
  Description of Artificial Sequence: Synthetic oligonucleotide
  Sense strand starting at position 2482 of SEQ ID NO: 1243801
acagaaucuuagucccuga

SEQ ID NO: 1442517 - RNA, 19 nt, Artificial Sequence
  Description of Artificial Sequence: Synthetic oligonucleotide
  Antisense strand to SEQ ID NO: 1442516
ucagggacuaagauucugu

SEQ ID NO: 1442518 - RNA, 19 nt, Artificial Sequence
  Description of Artificial Sequence: Synthetic oligonucleotide
  Sense strand starting at position 2523 of SEQ ID NO: 1243801
agaacuggauaguuucuau

SEQ ID NO: 1442519 - RNA, 19 nt, Artificial Sequence
  Description of Artificial Sequence: Synthetic oligonucleotide
  Antisense strand to SEQ ID NO: 1442518
auagaaacuauccaguucu

SEQ ID NO: 1442520 - RNA, 19 nt, Artificial Sequence
  Description of Artificial Sequence: Synthetic oligonucleotide
  Sense strand starting at position 2526 of SEQ ID NO: 1243801
acuggauaguuucuauuaa

SEQ ID NO: 1442521 - RNA, 19 nt, Artificial Sequence
  Description of Artificial Sequence: Synthetic oligonucleotide
  Antisense strand to SEQ ID NO: 1442520
uuaauagaaacuauccagu

SEQ ID NO: 1442522 - RNA, 19 nt, Artificial Sequence
  Description of Artificial Sequence: Synthetic oligonucleotide
  Sense strand starting at position 2774 of SEQ ID NO: 1243801
aagguaucugauggcuaaa

SEQ ID NO: 1442523 - RNA, 19 nt, Artificial Sequence
  Description of Artificial Sequence: Synthetic oligonucleotide
  Antisense strand to SEQ ID NO: 1442522
uuuagccaucagauaccuu

SEQ ID NO: 1442524 - RNA, 19 nt, Artificial Sequence
  Description of Artificial Sequence: Synthetic oligonucleotide
  Sense strand starting at position 2856 of SEQ ID NO: 1243801
ccuaguuggagaggguaua

SEQ ID NO: 1442525 - RNA, 19 nt, Artificial Sequence
  Description of Artificial Sequence: Synthetic oligonucleotide
  Antisense strand to SEQ ID NO: 1442524
uauacccucuccaacuagg

SEQ ID NO: 1442526 - RNA, 19 nt, Artificial Sequence
  Description of Artificial Sequence: Synthetic oligonucleotide
  Sense strand starting at position 2906 of SEQ ID NO: 1243801
agcggauuacagcauugaa

SEQ ID NO: 1442527 - RNA, 19 nt, Artificial Sequence
  Description of Artificial Sequence: Synthetic oligonucleotide
  Antisense strand to SEQ ID NO: 1442526
uucaaugcuguaauccgcu

SEQ ID NO: 1442528 - RNA, 19 nt, Artificial Sequence
  Description of Artificial Sequence: Synthetic oligonucleotide
  Sense strand starting at position 2909 of SEQ ID NO: 1243801
ggauuacagcauugaauac

SEQ ID NO: 1442529 - RNA, 19 nt, Artificial Sequence
  Description of Artificial Sequence: Synthetic oligonucleotide
  Antisense strand to SEQ ID NO: 1442528
guauucaaugcuguaaucc

SEQ ID NO: 1442530 - RNA, 19 nt, Artificial Sequence
  Description of Artificial Sequence: Synthetic oligonucleotide
  Sense strand starting at position 3083 of SEQ ID NO: 1243801
cugucaugggcacaggauu

SEQ ID NO: 1442531 - RNA, 19 nt, Artificial Sequence
  Description of Artificial Sequence: Synthetic oligonucleotide
  Antisense strand to SEQ ID NO: 1442530
aauccugugcccaugacag

SEQ ID NO: 1442532 - RNA, 19 nt, Artificial Sequence
  Description of Artificial Sequence: Synthetic oligonucleotide
  Sense strand starting at position 3109 of SEQ ID NO: 1243801
gcucuugcuguccugcaaa

SEQ ID NO: 1442533 - RNA, 19 nt, Artificial Sequence
  Description of Artificial Sequence: Synthetic oligonucleotide
  Antisense strand to SEQ ID NO: 1442532
uuugcaggacagcaagagc

SEQ ID NO: 1442534 - RNA, 19 nt, Artificial Sequence
  Description of Artificial Sequence: Synthetic oligonucleotide
  Sense strand starting at position 3111 of SEQ ID NO: 1243801
ucuugcuguccugcaaagu

SEQ ID NO: 1442535 - RNA, 19 nt, Artificial Sequence
  Description of Artificial Sequence: Synthetic oligonucleotide
  Antisense strand to SEQ ID NO: 1442534
acuuugcaggacagcaaga

SEQ ID NO: 1442536 - RNA, 19 nt, Artificial Sequence
  Description of Artificial Sequence: Synthetic oligonucleotide
  Sense strand starting at position 3144 of SEQ ID NO: 1243801
cuaggauaauuggucuaua

SEQ ID NO: 1442537 - RNA, 19 nt, Artificial Sequence
  Description of Artificial Sequence: Synthetic oligonucleotide
  Antisense strand to SEQ ID NO: 1442536
uauagaccaauuauccuag

SEQ ID NO: 1442538 - RNA, 19 nt, Artificial Sequence
  Description of Artificial Sequence: Synthetic oligonucleotide
  Sense strand starting at position 3145 of SEQ ID NO: 1243801
uaggauaauuggucuauaa

SEQ ID NO: 1442539 - RNA, 19 nt, Artificial Sequence
  Description of Artificial Sequence: Synthetic oligonucleotide
  Antisense strand to SEQ ID NO: 1442538
uuauagaccaauuauccua

SEQ ID NO: 1442540 - RNA, 19 nt, Artificial Sequence
  Description of Artificial Sequence: Synthetic oligonucleotide
  Sense strand starting at position 3314 of SEQ ID NO: 1243801
cugugauaccauggacaac

SEQ ID NO: 1442541 - RNA, 19 nt, Artificial Sequence
  Description of Artificial Sequence: Synthetic oligonucleotide
  Antisense strand to SEQ ID NO: 1442540
guuguccaugguaucacag

SEQ ID NO: 1442542 - RNA, 19 nt, Artificial Sequence
  Description of Artificial Sequence: Synthetic oligonucleotide
  Sense strand starting at position 3362 of SEQ ID NO: 1243801
gcaggauacuaaucaugug

SEQ ID NO: 1442543 - RNA, 19 nt, Artificial Sequence
  Description of Artificial Sequence: Synthetic oligonucleotide
  Antisense strand to SEQ ID NO: 1442542
cacaugauuaguauccugc

SEQ ID NO: 1442544 - RNA, 19 nt, Artificial Sequence
  Description of Artificial Sequence: Synthetic oligonucleotide
  Sense strand starting at position 3369 of SEQ ID NO: 1243801
acuaaucauguguacuuua

SEQ ID NO: 1442545 - RNA, 19 nt, Artificial Sequence
  Description of Artificial Sequence: Synthetic oligonucleotide
  Antisense strand to SEQ ID NO: 1442544
uaaaguacacaugauuagu

SEQ ID NO: 1442546 - RNA, 19 nt, Artificial Sequence
  Description of Artificial Sequence: Synthetic oligonucleotide
  Sense strand starting at position 3374 of SEQ ID NO: 1243801
ucauguguacuuuagggaa

SEQ ID NO: 1442547 - RNA, 19 nt, Artificial Sequence
  Description of Artificial Sequence: Synthetic oligonucleotide
  Antisense strand to SEQ ID NO: 1442546
uucccuaaaguacacauga

SEQ ID NO: 1442548 - RNA, 19 nt, Artificial Sequence
  Description of Artificial Sequence: Synthetic oligonucleotide
  Sense strand starting at position 3378 of SEQ ID NO: 1243801
guguacuuuagggaauugu

SEQ ID NO: 1442549 - RNA, 19 nt, Artificial Sequence
  Description of Artificial Sequence: Synthetic oligonucleotide
  Antisense strand to SEQ ID NO: 1442548
acaauucccuaaaguacac

SEQ ID NO: 1442550 - RNA, 19 nt, Artificial Sequence
  Description of Artificial Sequence: Synthetic oligonucleotide
  Sense strand starting at position 3429 of SEQ ID NO: 1243801
ugcuuagaagaaugacuaa

SEQ ID NO: 1442551 - RNA, 19 nt, Artificial Sequence
  Description of Artificial Sequence: Synthetic oligonucleotide
  Antisense strand to SEQ ID NO: 1442550
uuagucauucuucuaagca

SEQ ID NO: 1442552 - RNA, 19 nt, Artificial Sequence
  Description of Artificial Sequence: Synthetic oligonucleotide
  Sense strand starting at position 3441 of SEQ ID NO: 1243801
ugacuaaaucacuguaggu

SEQ ID NO: 1442553 - RNA, 19 nt, Artificial Sequence
  Description of Artificial Sequence: Synthetic oligonucleotide
  Antisense strand to SEQ ID NO: 1442552
accuacagugauuuaguca

SEQ ID NO: 1442554 - RNA, 19 nt, Artificial Sequence
  Description of Artificial Sequence: Synthetic oligonucleotide
  Sense strand starting at position 3455 of SEQ ID NO: 1243801
uagguacucagugaguaga

SEQ ID NO: 1442555 - RNA, 19 nt, Artificial Sequence
  Description of Artificial Sequence: Synthetic oligonucleotide
  Antisense strand to SEQ ID NO: 1442554
ucuacucacugaguaccua

SEQ ID NO: 1442556 - RNA, 19 nt, Artificial Sequence
  Description of Artificial Sequence: Synthetic oligonucleotide
  Sense strand starting at position 3458 of SEQ ID NO: 1243801
guacucagugaguagaagu

SEQ ID NO: 1442557 - RNA, 19 nt, Artificial Sequence
  Description of Artificial Sequence: Synthetic oligonucleotide
  Antisense strand to SEQ ID NO: 1442556
acuucuacucacugaguac

SEQ ID NO: 1442558 - RNA, 19 nt, Artificial Sequence
  Description of Artificial Sequence: Synthetic oligonucleotide
  Sense strand starting at position 3828 of SEQ ID NO: 1243801
gaccucagagucuggauau

SEQ ID NO: 1442559 - RNA, 19 nt, Artificial Sequence
  Description of Artificial Sequence: Synthetic oligonucleotide
  Antisense strand to SEQ ID NO: 1442558
auauccagacucugagguc

SEQ ID NO: 1442560 - RNA, 19 nt, Artificial Sequence
  Description of Artificial Sequence: Synthetic oligonucleotide
  Sense strand starting at position 457 of SEQ ID NO: 1243802
gauggaacccuuugagggu

SEQ ID NO: 1442561 - RNA, 19 nt, Artificial Sequence
  Description of Artificial Sequence: Synthetic oligonucleotide
  Antisense strand to SEQ ID NO: 1442560
acccucaaaggguuccauc

SEQ ID NO: 1442562 - RNA, 19 nt, Artificial Sequence
  Description of Artificial Sequence: Synthetic oligonucleotide
  Sense strand starting at position 471 of SEQ ID NO: 1243802
aggguuuacccaggagaug

SEQ ID NO: 1442563 - RNA, 19 nt, Artificial Sequence
  Description of Artificial Sequence: Synthetic oligonucleotide
  Antisense strand to SEQ ID NO: 1442562
caucuccuggguaaacccu

SEQ ID NO: 1442564 - RNA, 19 nt, Artificial Sequence
  Description of Artificial Sequence: Synthetic oligonucleotide
  Sense strand starting at position 667 of SEQ ID NO: 1243802
gaaacaaggugugggaaau

SEQ ID NO: 1442565 - RNA, 19 nt, Artificial Sequence
  Description of Artificial Sequence: Synthetic oligonucleotide
  Antisense strand to SEQ ID NO: 1442564
auuucccacaccuuguuuc

SEQ ID NO: 1442566 - RNA, 19 nt, Artificial Sequence
  Description of Artificial Sequence: Synthetic oligonucleotide
  Sense strand starting at position 679 of SEQ ID NO: 1243802
gggaaauuauagguccucu

SEQ ID NO: 1442567 - RNA, 19 nt, Artificial Sequence
  Description of Artificial Sequence: Synthetic oligonucleotide
  Antisense strand to SEQ ID NO: 1442566
agaggaccuauaauuuccc

SEQ ID NO: 1442568 - RNA, 19 nt, Artificial Sequence
  Description of Artificial Sequence: Synthetic oligonucleotide
  Sense strand starting at position 1046 of SEQ ID NO: 1243802
ggagcaucuguaugggaug

SEQ ID NO: 1442569 - RNA, 19 nt, Artificial Sequence
  Description of Artificial Sequence: Synthetic oligonucleotide
  Antisense strand to SEQ ID NO: 1442568
caucccauacagaugcucc

SEQ ID NO: 1442570 - RNA, 19 nt, Artificial Sequence
  Description of Artificial Sequence: Synthetic oligonucleotide
  Sense strand starting at position 1147 of SEQ ID NO: 1243802
ugacaugugccucaggauc

SEQ ID NO: 1442571 - RNA, 19 nt, Artificial Sequence
  Description of Artificial Sequence: Synthetic oligonucleotide
  Antisense strand to SEQ ID NO: 1442570
gauccugaggcacauguca

SEQ ID NO: 1442572 - RNA, 19 nt, Artificial Sequence
  Description of Artificial Sequence: Synthetic oligonucleotide
  Sense strand starting at position 1252 of SEQ ID NO: 1243802
gucccagaucugcagaguu

SEQ ID NO: 1442573 - RNA, 19 nt, Artificial Sequence
  Description of Artificial Sequence: Synthetic oligonucleotide
  Antisense strand to SEQ ID NO: 1442572
aacucugcagaucugggac

SEQ ID NO: 1442574 - RNA, 19 nt, Artificial Sequence
  Description of Artificial Sequence: Synthetic oligonucleotide
  Sense strand starting at position 1446 of SEQ ID NO: 1243802
uacuauucuggugggcuua

SEQ ID NO: 1442575 - RNA, 19 nt, Artificial Sequence
  Description of Artificial Sequence: Synthetic oligonucleotide
  Antisense strand to SEQ ID NO: 1442574
uaagcccaccagaauagua

SEQ ID NO: 1442576 - RNA, 19 nt, Artificial Sequence
  Description of Artificial Sequence: Synthetic oligonucleotide
  Sense strand starting at position 1448 of SEQ ID NO: 1243802
cuauucuggugggcuuaga

SEQ ID NO: 1442577 - RNA, 19 nt, Artificial Sequence
  Description of Artificial Sequence: Synthetic oligonucleotide
  Antisense strand to SEQ ID NO: 1442576
ucuaagcccaccagaauag

SEQ ID NO: 1442578 - RNA, 19 nt, Artificial Sequence
  Description of Artificial Sequence: Synthetic oligonucleotide
  Sense strand starting at position 1738 of SEQ ID NO: 1243802
gcaacauaaugagacucaa

SEQ ID NO: 1442579 - RNA, 19 nt, Artificial Sequence
  Description of Artificial Sequence: Synthetic oligonucleotide
  Antisense strand to SEQ ID NO: 1442578
uugagucucauuauguugc

SEQ ID NO: 1442580 - RNA, 19 nt, Artificial Sequence
  Description of Artificial Sequence: Synthetic oligonucleotide
  Sense strand starting at position 1783 of SEQ ID NO: 1243802
gggcuuaggucuuccuuga

SEQ ID NO: 1442581 - RNA, 19 nt, Artificial Sequence
  Description of Artificial Sequence: Synthetic oligonucleotide
  Antisense strand to SEQ ID NO: 1442580
ucaaggaagaccuaagccc

SEQ ID NO: 1442582 - RNA, 19 nt, Artificial Sequence
  Description of Artificial Sequence: Synthetic oligonucleotide
  Sense strand starting at position 1787 of SEQ ID NO: 1243802
uuaggucuuccuugaauag

SEQ ID NO: 1442583 - RNA, 19 nt, Artificial Sequence
  Description of Artificial Sequence: Synthetic oligonucleotide
  Antisense strand to SEQ ID NO: 1442582
cuauucaaggaagaccuaa

SEQ ID NO: 1442584 - RNA, 19 nt, Artificial Sequence
  Description of Artificial Sequence: Synthetic oligonucleotide
  Sense strand starting at position 1840 of SEQ ID NO: 1243802
aggugacuuaccuggcuga

SEQ ID NO: 1442585 - RNA, 19 nt, Artificial Sequence
  Description of Artificial Sequence: Synthetic oligonucleotide
  Antisense strand to SEQ ID NO: 1442584
ucagccagguaagucaccu

SEQ ID NO: 1442586 - RNA, 19 nt, Artificial Sequence
  Description of Artificial Sequence: Synthetic oligonucleotide
  Sense strand starting at position 1844 of SEQ ID NO: 1243802
gacuuaccuggcugagcaa

SEQ ID NO: 1442587 - RNA, 19 nt, Artificial Sequence
  Description of Artificial Sequence: Synthetic oligonucleotide
  Antisense strand to SEQ ID NO: 1442586
uugcucagccagguaaguc

SEQ ID NO: 1442588 - RNA, 19 nt, Artificial Sequence
  Description of Artificial Sequence: Synthetic oligonucleotide
  Sense strand starting at position 2322 of SEQ ID NO: 1243802
gaaagagugcugugcuaag

SEQ ID NO: 1442589 - RNA, 19 nt, Artificial Sequence
  Description of Artificial Sequence: Synthetic oligonucleotide
  Antisense strand to SEQ ID NO: 1442588
cuuagcacagcacucuuuc

SEQ ID NO: 1442590 - RNA, 19 nt, Artificial Sequence
  Description of Artificial Sequence: Synthetic oligonucleotide
  Sense strand starting at position 2362 of SEQ ID NO: 1243802
uuaguuugaggagguacau

SEQ ID NO: 1442591 - RNA, 19 nt, Artificial Sequence
  Description of Artificial Sequence: Synthetic oligonucleotide
  Antisense strand to SEQ ID NO: 1442590
auguaccuccucaaacuaa

SEQ ID NO: 1442592 - RNA, 19 nt, Artificial Sequence
  Description of Artificial Sequence: Synthetic oligonucleotide
  Sense strand starting at position 2371 of SEQ ID NO: 1243802
ggagguacauaccauuauu

SEQ ID NO: 1442593 - RNA, 19 nt, Artificial Sequence
  Description of Artificial Sequence: Synthetic oligonucleotide
  Antisense strand to SEQ ID NO: 1442592
aauaaugguauguaccucc

SEQ ID NO: 1442594 - RNA, 19 nt, Artificial Sequence
  Description of Artificial Sequence: Synthetic oligonucleotide
  Sense strand starting at position 2479 of SEQ ID NO: 1243802
agagaaagcuggucugcuu

SEQ ID NO: 1442595 - RNA, 19 nt, Artificial Sequence
  Description of Artificial Sequence: Synthetic oligonucleotide
  Antisense strand to SEQ ID NO: 1442594
aagcagaccagcuuucucu

SEQ ID NO: 1442596 - RNA, 19 nt, Artificial Sequence
  Description of Artificial Sequence: Synthetic oligonucleotide
  Sense strand starting at position 2482 of SEQ ID NO: 1243802
gaaagcuggucugcuuaua

SEQ ID NO: 1442597 - RNA, 19 nt, Artificial Sequence
  Description of Artificial Sequence: Synthetic oligonucleotide
  Antisense strand to SEQ ID NO: 1442596
uauaagcagaccagcuuuc

SEQ ID NO: 1442598 - RNA, 19 nt, Artificial Sequence
  Description of Artificial Sequence: Synthetic oligonucleotide
  Sense strand starting at position 2526 of SEQ ID NO: 1243802
uuuguuuagcagcagaagu

SEQ ID NO: 1442599 - RNA, 19 nt, Artificial Sequence
  Description of Artificial Sequence: Synthetic oligonucleotide
  Antisense strand to SEQ ID NO: 1442598
acuucugcugcuaaacaaa

SEQ ID NO: 1442600 - RNA, 19 nt, Artificial Sequence
  Description of Artificial Sequence: Synthetic oligonucleotide
  Sense strand starting at position 2567 of SEQ ID NO: 1243802
guggaagucuaauaucuga

SEQ ID NO: 1442601 - RNA, 19 nt, Artificial Sequence
  Description of Artificial Sequence: Synthetic oligonucleotide
  Antisense strand to SEQ ID NO: 1442600
ucagauauuagacuuccac

SEQ ID NO: 1442602 - RNA, 19 nt, Artificial Sequence
  Description of Artificial Sequence: Synthetic oligonucleotide
  Sense strand starting at position 2572 of SEQ ID NO: 1243802
agucuaauaucugaaacag

SEQ ID NO: 1442603 - RNA, 19 nt, Artificial Sequence
  Description of Artificial Sequence: Synthetic oligonucleotide
  Antisense strand to SEQ ID NO: 1442602
cuguuucagauauuagacu

SEQ ID NO: 1442604 - RNA, 19 nt, Artificial Sequence
  Description of Artificial Sequence: Synthetic oligonucleotide
  Sense strand starting at position 2594 of SEQ ID NO: 1243802
aagucagauuucugaugac

SEQ ID NO: 1442605 - RNA, 19 nt, Artificial Sequence
  Description of Artificial Sequence: Synthetic oligonucleotide
  Antisense strand to SEQ ID NO: 1442604
gucaucagaaaucugacuu

SEQ ID NO: 1442606 - RNA, 19 nt, Artificial Sequence
  Description of Artificial Sequence: Synthetic oligonucleotide
  Sense strand starting at position 2597 of SEQ ID NO: 1243802
ucagauuucugaugacagg

SEQ ID NO: 1442607 - RNA, 19 nt, Artificial Sequence
  Description of Artificial Sequence: Synthetic oligonucleotide
  Antisense strand to SEQ ID NO: 1442606
ccugucaucagaaaucuga

SEQ ID NO: 1442608 - RNA, 19 nt, Artificial Sequence
  Description of Artificial Sequence: Synthetic oligonucleotide
  Sense strand starting at position 2700 of SEQ ID NO: 1243802
ccguguuuccaggaaggac

SEQ ID NO: 1442609 - RNA, 19 nt, Artificial Sequence
  Description of Artificial Sequence: Synthetic oligonucleotide
  Antisense strand to SEQ ID NO: 1442608
guccuuccuggaaacacgg

SEQ ID NO: 1442610 - RNA, 19 nt, Artificial Sequence
  Description of Artificial Sequence: Synthetic oligonucleotide
  Sense strand starting at position 2724 of SEQ ID NO: 1243802
gguuucuagagcuguugau

SEQ ID NO: 1442611 - RNA, 19 nt, Artificial Sequence
  Description of Artificial Sequence: Synthetic oligonucleotide
  Antisense strand to SEQ ID NO: 1442610
aucaacagcucuagaaacc

SEQ ID NO: 1442612 - RNA, 19 nt, Artificial Sequence
  Description of Artificial Sequence: Synthetic oligonucleotide
  Sense strand starting at position 2915 of SEQ ID NO: 1243802
ugugccuuccuggaauacu

SEQ ID NO: 1442613 - RNA, 19 nt, Artificial Sequence
  Description of Artificial Sequence: Synthetic oligonucleotide
  Antisense strand to SEQ ID NO: 1442612
aguauuccaggaaggcaca

SEQ ID NO: 1442614 - RNA, 19 nt, Artificial Sequence
  Description of Artificial Sequence: Synthetic oligonucleotide
  Sense strand starting at position 2959 of SEQ ID NO: 1243802
aaauaagcccagugaaagu

SEQ ID NO: 1442615 - RNA, 19 nt, Artificial Sequence
  Description of Artificial Sequence: Synthetic oligonucleotide
  Antisense strand to SEQ ID NO: 1442614
acuuucacugggcuuauuu

SEQ ID NO: 1442616 - RNA, 19 nt, Artificial Sequence
  Description of Artificial Sequence: Synthetic oligonucleotide
  Sense strand starting at position 2994 of SEQ ID NO: 1243802
gagcuaggauuagagaaau

SEQ ID NO: 1442617 - RNA, 19 nt, Artificial Sequence
  Description of Artificial Sequence: Synthetic oligonucleotide
  Antisense strand to SEQ ID NO: 1442616
auuucucuaauccuagcuc

SEQ ID NO: 1442618 - RNA, 19 nt, Artificial Sequence
  Description of Artificial Sequence: Synthetic oligonucleotide
  Sense strand starting at position 3046 of SEQ ID NO: 1243802
gcccaaagcugguucugua

SEQ ID NO: 1442619 - RNA, 19 nt, Artificial Sequence
  Description of Artificial Sequence: Synthetic oligonucleotide
  Antisense strand to SEQ ID NO: 1442618
uacagaaccagcuuugggc

SEQ ID NO: 1442620 - RNA, 19 nt, Artificial Sequence
  Description of Artificial Sequence: Synthetic oligonucleotide
  Sense strand starting at position 3054 of SEQ ID NO: 1243802
cugguucuguagccuauaa

SEQ ID NO: 1442621 - RNA, 19 nt, Artificial Sequence
  Description of Artificial Sequence: Synthetic oligonucleotide
  Antisense strand to SEQ ID NO: 1442620
uuauaggcuacagaaccag

SEQ ID NO: 1442622 - RNA, 19 nt, Artificial Sequence
  Description of Artificial Sequence: Synthetic oligonucleotide
  Sense strand starting at position 3056 of SEQ ID NO: 1243802
gguucuguagccuauaauu

SEQ ID NO: 1442623 - RNA, 19 nt, Artificial Sequence
  Description of Artificial Sequence: Synthetic oligonucleotide
  Antisense strand to SEQ ID NO: 1442622
aauuauaggcuacagaacc

SEQ ID NO: 1442624 - RNA, 19 nt, Artificial Sequence
  Description of Artificial Sequence: Synthetic oligonucleotide
  Sense strand starting at position 3348 of SEQ ID NO: 1243802
guaggacucugucccagaa

SEQ ID NO: 1442625 - RNA, 19 nt, Artificial Sequence
  Description of Artificial Sequence: Synthetic oligonucleotide
  Antisense strand to SEQ ID NO: 1442624
uucugggacagaguccuac

SEQ ID NO: 1442626 - RNA, 19 nt, Artificial Sequence
  Description of Artificial Sequence: Synthetic oligonucleotide
  Sense strand starting at position 3640 of SEQ ID NO: 1243802
acugaaggaaguggucauu

SEQ ID NO: 1442627 - RNA, 19 nt, Artificial Sequence
  Description of Artificial Sequence: Synthetic oligonucleotide
  Antisense strand to SEQ ID NO: 1442626
aaugaccacuuccuucagu

SEQ ID NO: 1442628 - RNA, 19 nt, Artificial Sequence
  Description of Artificial Sequence: Synthetic oligonucleotide
  Sense strand starting at position 3749 of SEQ ID NO: 1243802
ugucaagacucaccugaga

SEQ ID NO: 1442629 - RNA, 19 nt, Artificial Sequence
  Description of Artificial Sequence: Synthetic oligonucleotide
  Antisense strand to SEQ ID NO: 1442628
ucucaggugagucuugaca

SEQ ID NO: 1442630 - RNA, 19 nt, Artificial Sequence
  Description of Artificial Sequence: Synthetic oligonucleotide
  Sense strand starting at position 3840 of SEQ ID NO: 1243802
ccaaucuugguggguuaca

SEQ ID NO: 1442631 - RNA, 19 nt, Artificial Sequence
  Description of Artificial Sequence: Synthetic oligonucleotide
  Antisense strand to SEQ ID NO: 1442630
uguaacccaccaagauugg

SEQ ID NO: 1442632 - RNA, 19 nt, Artificial Sequence
  Description of Artificial Sequence: Synthetic oligonucleotide
  Sense strand starting at position 3841 of SEQ ID NO: 1243802
caaucuugguggguuacau

SEQ ID NO: 1442633 - RNA, 19 nt, Artificial Sequence
  Description of Artificial Sequence: Synthetic oligonucleotide
  Antisense strand to SEQ ID NO: 1442632
auguaacccaccaagauug

SEQ ID NO: 1442634 - RNA, 19 nt, Artificial Sequence
  Description of Artificial Sequence: Synthetic oligonucleotide
  Sense strand starting at position 3850 of SEQ ID NO: 1243802
uggguuacaucagugaggu

SEQ ID NO: 1442635 - RNA, 19 nt, Artificial Sequence
  Description of Artificial Sequence: Synthetic oligonucleotide
  Antisense strand to SEQ ID NO: 1442634
accucacugauguaaccca

SEQ ID NO: 1442636 - RNA, 19 nt, Artificial Sequence
  Description of Artificial Sequence: Synthetic oligonucleotide
  Sense strand starting at position 3851 of SEQ ID NO: 1243802
ggguuacaucagugagguu

SEQ ID NO: 1442637 - RNA, 19 nt, Artificial Sequence
  Description of Artificial Sequence: Synthetic oligonucleotide
  Antisense strand to SEQ ID NO: 1442636
aaccucacugauguaaccc

SEQ ID NO: 1442638 - RNA, 19 nt, Artificial Sequence
  Description of Artificial Sequence: Synthetic oligonucleotide
  Sense strand starting at position 3932 of SEQ ID NO: 1243802
ggagaagaguuaaguugag

SEQ ID NO: 1442639 - RNA, 19 nt, Artificial Sequence
  Description of Artificial Sequence: Synthetic oligonucleotide
  Antisense strand to SEQ ID NO: 1442638
cucaacuuaacucuucucc

SEQ ID NO: 1442640 - RNA, 19 nt, Artificial Sequence
  Description of Artificial Sequence: Synthetic oligonucleotide
  Sense strand starting at position 88 of SEQ ID NO: 1243803
ugccuuauucgggaaaggu

SEQ ID NO: 1442641 - RNA, 19 nt, Artificial Sequence
  Description of Artificial Sequence: Synthetic oligonucleotide
  Antisense strand to SEQ ID NO: 1442640
accuuucccgaauaaggca

SEQ ID NO: 1442642 - RNA, 19 nt, Artificial Sequence
  Description of Artificial Sequence: Synthetic oligonucleotide
  Sense strand starting at position 97 of SEQ ID NO: 1243803
cgggaaaggugcuccaaau

SEQ ID NO: 1442643 - RNA, 19 nt, Artificial Sequence
  Description of Artificial Sequence: Synthetic oligonucleotide
  Antisense strand to SEQ ID NO: 1442642
auuuggagcaccuuucccg

SEQ ID NO: 1442644 - RNA, 19 nt, Artificial Sequence
  Description of Artificial Sequence: Synthetic oligonucleotide
  Sense strand starting at position 117 of SEQ ID NO: 1243803
ggaggaauauuuggaagaa

SEQ ID NO: 1442645 - RNA, 19 nt, Artificial Sequence
  Description of Artificial Sequence: Synthetic oligonucleotide
  Antisense strand to SEQ ID NO: 1442644
uucuuccaaauauuccucc

SEQ ID NO: 1442646 - RNA, 19 nt, Artificial Sequence
  Description of Artificial Sequence: Synthetic oligonucleotide
  Sense strand starting at position 449 of SEQ ID NO: 1243803
ccuugcugcauuugagagu

SEQ ID NO: 1442647 - RNA, 19 nt, Artificial Sequence
  Description of Artificial Sequence: Synthetic oligonucleotide
  Antisense strand to SEQ ID NO: 1442646
acucucaaaugcagcaagg

SEQ ID NO: 1442648 - RNA, 19 nt, Artificial Sequence
  Description of Artificial Sequence: Synthetic oligonucleotide
  Sense strand starting at position 456 of SEQ ID NO: 1243803
gcauuugagaguggugucu

SEQ ID NO: 1442649 - RNA, 19 nt, Artificial Sequence
  Description of Artificial Sequence: Synthetic oligonucleotide
  Antisense strand to SEQ ID NO: 1442648
agacaccacucucaaaugc

SEQ ID NO: 1442650 - RNA, 19 nt, Artificial Sequence
  Description of Artificial Sequence: Synthetic oligonucleotide
  Sense strand starting at position 470 of SEQ ID NO: 1243803
ugucuuguacccuacucaa

SEQ ID NO: 1442651 - RNA, 19 nt, Artificial Sequence
  Description of Artificial Sequence: Synthetic oligonucleotide
  Antisense strand to SEQ ID NO: 1442650
uugaguaggguacaagaca

SEQ ID NO: 1442652 - RNA, 19 nt, Artificial Sequence
  Description of Artificial Sequence: Synthetic oligonucleotide
  Sense strand starting at position 512 of SEQ ID NO: 1243803
ugggccucuguggaagaua

SEQ ID NO: 1442653 - RNA, 19 nt, Artificial Sequence
  Description of Artificial Sequence: Synthetic oligonucleotide
  Antisense strand to SEQ ID NO: 1442652
uaucuuccacagaggccca

SEQ ID NO: 1442654 - RNA, 19 nt, Artificial Sequence
  Description of Artificial Sequence: Synthetic oligonucleotide
  Sense strand starting at position 665 of SEQ ID NO: 1243803
uugaauuauagagguagca

SEQ ID NO: 1442655 - RNA, 19 nt, Artificial Sequence
  Description of Artificial Sequence: Synthetic oligonucleotide
  Antisense strand to SEQ ID NO: 1442654
ugcuaccucuauaauucaa

SEQ ID NO: 1442656 - RNA, 19 nt, Artificial Sequence
  Description of Artificial Sequence: Synthetic oligonucleotide
  Sense strand starting at position 730 of SEQ ID NO: 1243803
gugguuauggaguggagaa

SEQ ID NO: 1442657 - RNA, 19 nt, Artificial Sequence
  Description of Artificial Sequence: Synthetic oligonucleotide
  Antisense strand to SEQ ID NO: 1442656
uucuccacuccauaaccac

SEQ ID NO: 1442658 - RNA, 19 nt, Artificial Sequence
  Description of Artificial Sequence: Synthetic oligonucleotide
  Sense strand starting at position 731 of SEQ ID NO: 1243803
ugguuauggaguggagaaa

SEQ ID NO: 1442659 - RNA, 19 nt, Artificial Sequence
  Description of Artificial Sequence: Synthetic oligonucleotide
  Antisense strand to SEQ ID NO: 1442658
uuucuccacuccauaacca

SEQ ID NO: 1442660 - RNA, 19 nt, Artificial Sequence
  Description of Artificial Sequence: Synthetic oligonucleotide
  Sense strand starting at position 752 of SEQ ID NO: 1243803
aggugugugcauguuaugu

SEQ ID NO: 1442661 - RNA, 19 nt, Artificial Sequence
  Description of Artificial Sequence: Synthetic oligonucleotide
  Antisense strand to SEQ ID NO: 1442660
acauaacaugcacacaccu

SEQ ID NO: 1442662 - RNA, 19 nt, Artificial Sequence
  Description of Artificial Sequence: Synthetic oligonucleotide
  Sense strand starting at position 783 of SEQ ID NO: 1243803
uagaaucauggaugugcau

SEQ ID NO: 1442663 - RNA, 19 nt, Artificial Sequence
  Description of Artificial Sequence: Synthetic oligonucleotide
  Antisense strand to SEQ ID NO: 1442662
augcacauccaugauucua

SEQ ID NO: 1442664 - RNA, 19 nt, Artificial Sequence
  Description of Artificial Sequence: Synthetic oligonucleotide
  Sense strand starting at position 832 of SEQ ID NO: 1243803
ccagaugucuggguggaag

SEQ ID NO: 1442665 - RNA, 19 nt, Artificial Sequence
  Description of Artificial Sequence: Synthetic oligonucleotide
  Antisense strand to SEQ ID NO: 1442664
cuuccacccagacaucugg

SEQ ID NO: 1442666 - RNA, 19 nt, Artificial Sequence
  Description of Artificial Sequence: Synthetic oligonucleotide
  Sense strand starting at position 966 of SEQ ID NO: 1243803
uuccucugagcugacaaau

SEQ ID NO: 1442667 - RNA, 19 nt, Artificial Sequence
  Description of Artificial Sequence: Synthetic oligonucleotide
  Antisense strand to SEQ ID NO: 1442666
auuugucagcucagaggaa

SEQ ID NO: 1442668 - RNA, 19 nt, Artificial Sequence
  Description of Artificial Sequence: Synthetic oligonucleotide
  Sense strand starting at position 1310 of SEQ ID NO: 1243803
cuccuaaucucccugagga

SEQ ID NO: 1442669 - RNA, 19 nt, Artificial Sequence
  Description of Artificial Sequence: Synthetic oligonucleotide
  Antisense strand to SEQ ID NO: 1442668
uccucagggagauuaggag

SEQ ID NO: 1442670 - RNA, 19 nt, Artificial Sequence
  Description of Artificial Sequence: Synthetic oligonucleotide
  Sense strand starting at position 1311 of SEQ ID NO: 1243803
uccuaaucucccugaggaa

SEQ ID NO: 1442671 - RNA, 19 nt, Artificial Sequence
  Description of Artificial Sequence: Synthetic oligonucleotide
  Antisense strand to SEQ ID NO: 1442670
uuccucagggagauuagga

SEQ ID NO: 1442672 - RNA, 19 nt, Artificial Sequence
  Description of Artificial Sequence: Synthetic oligonucleotide
  Sense strand starting at position 1671 of SEQ ID NO: 1243803
uggugcucaguagauaauu

SEQ ID NO: 1442673 - RNA, 19 nt, Artificial Sequence
  Description of Artificial Sequence: Synthetic oligonucleotide
  Antisense strand to SEQ ID NO: 1442672
aauuaucuacugagcacca

SEQ ID NO: 1442674 - RNA, 19 nt, Artificial Sequence
  Description of Artificial Sequence: Synthetic oligonucleotide
  Sense strand starting at position 1973 of SEQ ID NO: 1243803
gcuccugcggugaggaauu

SEQ ID NO: 1442675 - RNA, 19 nt, Artificial Sequence
  Description of Artificial Sequence: Synthetic oligonucleotide
  Antisense strand to SEQ ID NO: 1442674
aauuccucaccgcaggagc

SEQ ID NO: 1442676 - RNA, 19 nt, Artificial Sequence
  Description of Artificial Sequence: Synthetic oligonucleotide
  Sense strand starting at position 2066 of SEQ ID NO: 1243803
agugaugccucagcaauuu

SEQ ID NO: 1442677 - RNA, 19 nt, Artificial Sequence
  Description of Artificial Sequence: Synthetic oligonucleotide
  Antisense strand to SEQ ID NO: 1442676
aaauugcugaggcaucacu

SEQ ID NO: 1442678 - RNA, 19 nt, Artificial Sequence
  Description of Artificial Sequence: Synthetic oligonucleotide
  Sense strand starting at position 2271 of SEQ ID NO: 1243803
ggauguguccuguauccaa

SEQ ID NO: 1442679 - RNA, 19 nt, Artificial Sequence
  Description of Artificial Sequence: Synthetic oligonucleotide
  Antisense strand to SEQ ID NO: 1442678
uuggauacaggacacaucc

SEQ ID NO: 1442680 - RNA, 19 nt, Artificial Sequence
  Description of Artificial Sequence: Synthetic oligonucleotide
  Sense strand starting at position 2385 of SEQ ID NO: 1243803
ccaggacuccuccaaguca

SEQ ID NO: 1442681 - RNA, 19 nt, Artificial Sequence
  Description of Artificial Sequence: Synthetic oligonucleotide
  Antisense strand to SEQ ID NO: 1442680
ugacuuggaggaguccugg

SEQ ID NO: 1442682 - RNA, 19 nt, Artificial Sequence
  Description of Artificial Sequence: Synthetic oligonucleotide
  Sense strand starting at position 2401 of SEQ ID NO: 1243803
ucaggucucauuggucaag

SEQ ID NO: 1442683 - RNA, 19 nt, Artificial Sequence
  Description of Artificial Sequence: Synthetic oligonucleotide
  Antisense strand to SEQ ID NO: 1442682
cuugaccaaugagaccuga

SEQ ID NO: 1442684 - RNA, 19 nt, Artificial Sequence
  Description of Artificial Sequence: Synthetic oligonucleotide
  Sense strand starting at position 2404 of SEQ ID NO: 1243803
ggucucauuggucaaggga

SEQ ID NO: 1442685 - RNA, 19 nt, Artificial Sequence
  Description of Artificial Sequence: Synthetic oligonucleotide
  Antisense strand to SEQ ID NO: 1442684
ucccuugaccaaugagacc

SEQ ID NO: 1442686 - RNA, 19 nt, Artificial Sequence
  Description of Artificial Sequence: Synthetic oligonucleotide
  Sense strand starting at position 2407 of SEQ ID NO: 1243803
cucauuggucaagggaaau

SEQ ID NO: 1442687 - RNA, 19 nt, Artificial Sequence
  Description of Artificial Sequence: Synthetic oligonucleotide
  Antisense strand to SEQ ID NO: 1442686
auuucccuugaccaaugag

SEQ ID NO: 1442688 - RNA, 19 nt, Artificial Sequence
  Description of Artificial Sequence: Synthetic oligonucleotide
  Sense strand starting at position 2533 of SEQ ID NO: 1243803
auauaaugguugcuauaca

SEQ ID NO: 1442689 - RNA, 19 nt, Artificial Sequence
  Description of Artificial Sequence: Synthetic oligonucleotide
  Antisense strand to SEQ ID NO: 1442688
uguauagcaaccauuauau

SEQ ID NO: 1442690 - RNA, 19 nt, Artificial Sequence
  Description of Artificial Sequence: Synthetic oligonucleotide
  Sense strand starting at position 2913 of SEQ ID NO: 1243803
gguuucauugauuaguggu

SEQ ID NO: 1442691 - RNA, 19 nt, Artificial Sequence
  Description of Artificial Sequence: Synthetic oligonucleotide
  Antisense strand to SEQ ID NO: 1442690
accacuaaucaaugaaacc

SEQ ID NO: 1442692 - RNA, 19 nt, Artificial Sequence
  Description of Artificial Sequence: Synthetic oligonucleotide
  Sense strand starting at position 2943 of SEQ ID NO: 1243803
cuguguuggaaaugauucu

SEQ ID NO: 1442693 - RNA, 19 nt, Artificial Sequence
  Description of Artificial Sequence: Synthetic oligonucleotide
  Antisense strand to SEQ ID NO: 1442692
agaaucauuuccaacacag

SEQ ID NO: 1442694 - RNA, 19 nt, Artificial Sequence
  Description of Artificial Sequence: Synthetic oligonucleotide
  Sense strand starting at position 2985 of SEQ ID NO: 1243803
gaagauacgcugugaccaa

SEQ ID NO: 1442695 - RNA, 19 nt, Artificial Sequence
  Description of Artificial Sequence: Synthetic oligonucleotide
  Antisense strand to SEQ ID NO: 1442694
uuggucacagcguaucuuc

SEQ ID NO: 1442696 - RNA, 19 nt, Artificial Sequence
  Description of Artificial Sequence: Synthetic oligonucleotide
  Sense strand starting at position 3024 of SEQ ID NO: 1243803
gcagcuugcaugcuaugua

SEQ ID NO: 1442697 - RNA, 19 nt, Artificial Sequence
  Description of Artificial Sequence: Synthetic oligonucleotide
  Antisense strand to SEQ ID NO: 1442696
uacauagcaugcaagcugc

SEQ ID NO: 1442698 - RNA, 19 nt, Artificial Sequence
  Description of Artificial Sequence: Synthetic oligonucleotide
  Sense strand starting at position 3332 of SEQ ID NO: 1243803
gugcuuuaugaauauacau

SEQ ID NO: 1442699 - RNA, 19 nt, Artificial Sequence
  Description of Artificial Sequence: Synthetic oligonucleotide
  Antisense strand to SEQ ID NO: 1442698
auguauauucauaaagcac

SEQ ID NO: 1442700 - RNA, 19 nt, Artificial Sequence
  Description of Artificial Sequence: Synthetic oligonucleotide
  Sense strand starting at position 3378 of SEQ ID NO: 1243803
gagccaggucuacauaugu

SEQ ID NO: 1442701 - RNA, 19 nt, Artificial Sequence
  Description of Artificial Sequence: Synthetic oligonucleotide
  Antisense strand to SEQ ID NO: 1442700
acauauguagaccuggcuc

SEQ ID NO: 1442702 - RNA, 19 nt, Artificial Sequence
  Description of Artificial Sequence: Synthetic oligonucleotide
  Sense strand starting at position 3386 of SEQ ID NO: 1243803
ucuacauauguguaucuua

SEQ ID NO: 1442703 - RNA, 19 nt, Artificial Sequence
  Description of Artificial Sequence: Synthetic oligonucleotide
  Antisense strand to SEQ ID NO: 1442702
uaagauacacauauguaga

SEQ ID NO: 1442704 - RNA, 19 nt, Artificial Sequence
  Description of Artificial Sequence: Synthetic oligonucleotide
  Sense strand starting at position 3389 of SEQ ID NO: 1243803
acauauguguaucuuauag

SEQ ID NO: 1442705 - RNA, 19 nt, Artificial Sequence
  Description of Artificial Sequence: Synthetic oligonucleotide
  Antisense strand to SEQ ID NO: 1442704
cuauaagauacacauaugu

SEQ ID NO: 1442706 - RNA, 19 nt, Artificial Sequence
  Description of Artificial Sequence: Synthetic oligonucleotide
  Sense strand starting at position 3415 of SEQ ID NO: 1243803
cugaaaucucaugguuagu

SEQ ID NO: 1442707 - RNA, 19 nt, Artificial Sequence
  Description of Artificial Sequence: Synthetic oligonucleotide
  Antisense strand to SEQ ID NO: 1442706
acuaaccaugagauuucag

SEQ ID NO: 1442708 - RNA, 19 nt, Artificial Sequence
  Description of Artificial Sequence: Synthetic oligonucleotide
  Sense strand starting at position 3417 of SEQ ID NO: 1243803
gaaaucucaugguuaguug

SEQ ID NO: 1442709 - RNA, 19 nt, Artificial Sequence
  Description of Artificial Sequence: Synthetic oligonucleotide
  Antisense strand to SEQ ID NO: 1442708
caacuaaccaugagauuuc

SEQ ID NO: 1442710 - RNA, 19 nt, Artificial Sequence
  Description of Artificial Sequence: Synthetic oligonucleotide
  Sense strand starting at position 3436 of SEQ ID NO: 1243803
uggagacagucaucaauua

SEQ ID NO: 1442711 - RNA, 19 nt, Artificial Sequence
  Description of Artificial Sequence: Synthetic oligonucleotide
  Antisense strand to SEQ ID NO: 1442710
uaauugaugacugucucca

SEQ ID NO: 1442712 - RNA, 19 nt, Artificial Sequence
  Description of Artificial Sequence: Synthetic oligonucleotide
  Sense strand starting at position 3543 of SEQ ID NO: 1243803
ggaaacaaguuguuuauag

SEQ ID NO: 1442713 - RNA, 19 nt, Artificial Sequence
  Description of Artificial Sequence: Synthetic oligonucleotide
  Antisense strand to SEQ ID NO: 1442712
cuauaaacaacuuguuucc

SEQ ID NO: 1442714 - RNA, 19 nt, Artificial Sequence
  Description of Artificial Sequence: Synthetic oligonucleotide
  Sense strand starting at position 3676 of SEQ ID NO: 1243803
uugaguuccuaccuacauu

SEQ ID NO: 1442715 - RNA, 19 nt, Artificial Sequence
  Description of Artificial Sequence: Synthetic oligonucleotide
  Antisense strand to SEQ ID NO: 1442714
aauguagguaggaacucaa

SEQ ID NO: 1442716 - RNA, 19 nt, Artificial Sequence
  Description of Artificial Sequence: Synthetic oligonucleotide
  Sense strand starting at position 3782 of SEQ ID NO: 1243803
gggucaguagugggaugau

SEQ ID NO: 1442717 - RNA, 19 nt, Artificial Sequence
  Description of Artificial Sequence: Synthetic oligonucleotide
  Antisense strand to SEQ ID NO: 1442716
aucaucccacuacugaccc

SEQ ID NO: 1442718 - RNA, 19 nt, Artificial Sequence
  Description of Artificial Sequence: Synthetic oligonucleotide
  Sense strand starting at position 3883 of SEQ ID NO: 1243803
gccuccaagcuugauacaa

SEQ ID NO: 1442719 - RNA, 19 nt, Artificial Sequence
  Description of Artificial Sequence: Synthetic oligonucleotide
  Antisense strand to SEQ ID NO: 1442718
uuguaucaagcuuggaggc

SEQ ID NO: 1442720 - RNA, 19 nt, Artificial Sequence
  Description of Artificial Sequence: Synthetic oligonucleotide
  Sense strand starting at position 638 of SEQ ID NO: 1243804
gcuagagacuaucccuaua

SEQ ID NO: 1442721 - RNA, 19 nt, Artificial Sequence
  Description of Artificial Sequence: Synthetic oligonucleotide
  Antisense strand to SEQ ID NO: 1442720
uauagggauagucucuagc

SEQ ID NO: 1442722 - RNA, 19 nt, Artificial Sequence
  Description of Artificial Sequence: Synthetic oligonucleotide
  Sense strand starting at position 856 of SEQ ID NO: 1243804
ccuccuucucuugggaaau

SEQ ID NO: 1442723 - RNA, 19 nt, Artificial Sequence
  Description of Artificial Sequence: Synthetic oligonucleotide
  Antisense strand to SEQ ID NO: 1442722
auuucccaagagaaggagg

SEQ ID NO: 1442724 - RNA, 19 nt, Artificial Sequence
  Description of Artificial Sequence: Synthetic oligonucleotide
  Sense strand starting at position 964 of SEQ ID NO: 1243804
cagugaucuugggugaguc

SEQ ID NO: 1442725 - RNA, 19 nt, Artificial Sequence
  Description of Artificial Sequence: Synthetic oligonucleotide
  Antisense strand to SEQ ID NO: 1442724
gacucacccaagaucacug

SEQ ID NO: 1442726 - RNA, 19 nt, Artificial Sequence
  Description of Artificial Sequence: Synthetic oligonucleotide
  Sense strand starting at position 965 of SEQ ID NO: 1243804
agugaucuugggugaguca

SEQ ID NO: 1442727 - RNA, 19 nt, Artificial Sequence
  Description of Artificial Sequence: Synthetic oligonucleotide
  Antisense strand to SEQ ID NO: 1442726
ugacucacccaagaucacu

SEQ ID NO: 1442728 - RNA, 19 nt, Artificial Sequence
  Description of Artificial Sequence: Synthetic oligonucleotide
  Sense strand starting at position 1190 of SEQ ID NO: 1243804
cagucaucuguguaccuuu

SEQ ID NO: 1442729 - RNA, 19 nt, Artificial Sequence
  Description of Artificial Sequence: Synthetic oligonucleotide
  Antisense strand to SEQ ID NO: 1442728
aaagguacacagaugacug

SEQ ID NO: 1442730 - RNA, 19 nt, Artificial Sequence
  Description of Artificial Sequence: Synthetic oligonucleotide
  Sense strand starting at position 1231 of SEQ ID NO: 1243804
cagacagagccaggucuau

SEQ ID NO: 1442731 - RNA, 19 nt, Artificial Sequence
  Description of Artificial Sequence: Synthetic oligonucleotide
  Antisense strand to SEQ ID NO: 1442730
auagaccuggcucugucug

SEQ ID NO: 1442732 - RNA, 19 nt, Artificial Sequence
  Description of Artificial Sequence: Synthetic oligonucleotide
  Sense strand starting at position 1293 of SEQ ID NO: 1243804
gcuggagaguagucacaac

SEQ ID NO: 1442733 - RNA, 19 nt, Artificial Sequence
  Description of Artificial Sequence: Synthetic oligonucleotide
  Antisense strand to SEQ ID NO: 1442732
guugugacuacucuccagc

SEQ ID NO: 1442734 - RNA, 19 nt, Artificial Sequence
  Description of Artificial Sequence: Synthetic oligonucleotide
  Sense strand starting at position 1345 of SEQ ID NO: 1243804
ccuggucaccugggagaaa

SEQ ID NO: 1442735 - RNA, 19 nt, Artificial Sequence
  Description of Artificial Sequence: Synthetic oligonucleotide
  Antisense strand to SEQ ID NO: 1442734
uuucucccaggugaccagg

SEQ ID NO: 1442736 - RNA, 19 nt, Artificial Sequence
  Description of Artificial Sequence: Synthetic oligonucleotide
  Sense strand starting at position 1357 of SEQ ID NO: 1243804
ggagaaagcucacuggacu

SEQ ID NO: 1442737 - RNA, 19 nt, Artificial Sequence
  Description of Artificial Sequence: Synthetic oligonucleotide
  Antisense strand to SEQ ID NO: 1442736
aguccagugagcuuucucc

SEQ ID NO: 1442738 - RNA, 19 nt, Artificial Sequence
  Description of Artificial Sequence: Synthetic oligonucleotide
  Sense strand starting at position 1577 of SEQ ID NO: 1243804
aggucagaaugcucuucuu

SEQ ID NO: 1442739 - RNA, 19 nt, Artificial Sequence
  Description of Artificial Sequence: Synthetic oligonucleotide
  Antisense strand to SEQ ID NO: 1442738
aagaagagcauucugaccu

SEQ ID NO: 1442740 - RNA, 19 nt, Artificial Sequence
  Description of Artificial Sequence: Synthetic oligonucleotide
  Sense strand starting at position 1580 of SEQ ID NO: 1243804
ucagaaugcucuucuuuag

SEQ ID NO: 1442741 - RNA, 19 nt, Artificial Sequence
  Description of Artificial Sequence: Synthetic oligonucleotide
  Antisense strand to SEQ ID NO: 1442740
cuaaagaagagcauucuga

SEQ ID NO: 1442742 - RNA, 19 nt, Artificial Sequence
  Description of Artificial Sequence: Synthetic oligonucleotide
  Sense strand starting at position 1677 of SEQ ID NO: 1243804
uugaacugucccuguggau

SEQ ID NO: 1442743 - RNA, 19 nt, Artificial Sequence
  Description of Artificial Sequence: Synthetic oligonucleotide
  Antisense strand to SEQ ID NO: 1442742
auccacagggacaguucaa

SEQ ID NO: 1442744 - RNA, 19 nt, Artificial Sequence
  Description of Artificial Sequence: Synthetic oligonucleotide
  Sense strand starting at position 1745 of SEQ ID NO: 1243804
ggaagagucuucccuccag

SEQ ID NO: 1442745 - RNA, 19 nt, Artificial Sequence
  Description of Artificial Sequence: Synthetic oligonucleotide
  Antisense strand to SEQ ID NO: 1442744
cuggagggaagacucuucc

SEQ ID NO: 1442746 - RNA, 19 nt, Artificial Sequence
  Description of Artificial Sequence: Synthetic oligonucleotide
  Sense strand starting at position 1751 of SEQ ID NO: 1243804
gucuucccuccaggagauu

SEQ ID NO: 1442747 - RNA, 19 nt, Artificial Sequence
  Description of Artificial Sequence: Synthetic oligonucleotide
  Antisense strand to SEQ ID NO: 1442746
aaucuccuggagggaagac

SEQ ID NO: 1442748 - RNA, 19 nt, Artificial Sequence
  Description of Artificial Sequence: Synthetic oligonucleotide
  Sense strand starting at position 1776 of SEQ ID NO: 1243804
auccucuaagccugagaua

SEQ ID NO: 1442749 - RNA, 19 nt, Artificial Sequence
  Description of Artificial Sequence: Synthetic oligonucleotide
  Antisense strand to SEQ ID NO: 1442748
uaucucaggcuuagaggau

SEQ ID NO: 1442750 - RNA, 19 nt, Artificial Sequence
  Description of Artificial Sequence: Synthetic oligonucleotide
  Sense strand starting at position 1827 of SEQ ID NO: 1243804
aggauugggauguggugaa

SEQ ID NO: 1442751 - RNA, 19 nt, Artificial Sequence
  Description of Artificial Sequence: Synthetic oligonucleotide
  Antisense strand to SEQ ID NO: 1442750
uucaccacaucccaauccu

SEQ ID NO: 1442752 - RNA, 19 nt, Artificial Sequence
  Description of Artificial Sequence: Synthetic oligonucleotide
  Sense strand starting at position 2050 of SEQ ID NO: 1243804
gcaggugacuggagagauu

SEQ ID NO: 1442753 - RNA, 19 nt, Artificial Sequence
  Description of Artificial Sequence: Synthetic oligonucleotide
  Antisense strand to SEQ ID NO: 1442752
aaucucuccagucaccugc

SEQ ID NO: 1442754 - RNA, 19 nt, Artificial Sequence
  Description of Artificial Sequence: Synthetic oligonucleotide
  Sense strand starting at position 2197 of SEQ ID NO: 1243804
aggcauuccuucuugacca

SEQ ID NO: 1442755 - RNA, 19 nt, Artificial Sequence
  Description of Artificial Sequence: Synthetic oligonucleotide
  Antisense strand to SEQ ID NO: 1442754
uggucaagaaggaaugccu

SEQ ID NO: 1442756 - RNA, 19 nt, Artificial Sequence
  Description of Artificial Sequence: Synthetic oligonucleotide
  Sense strand starting at position 2219 of SEQ ID NO: 1243804
aaguguuccuaggucacau

SEQ ID NO: 1442757 - RNA, 19 nt, Artificial Sequence
  Description of Artificial Sequence: Synthetic oligonucleotide
  Antisense strand to SEQ ID NO: 1442756
augugaccuaggaacacuu

SEQ ID NO: 1442758 - RNA, 19 nt, Artificial Sequence
  Description of Artificial Sequence: Synthetic oligonucleotide
  Sense strand starting at position 2314 of SEQ ID NO: 1243804
gaaacuguugaucaccagu

SEQ ID NO: 1442759 - RNA, 19 nt, Artificial Sequence
  Description of Artificial Sequence: Synthetic oligonucleotide
  Antisense strand to SEQ ID NO: 1442758
acuggugaucaacaguuuc

SEQ ID NO: 1442760 - RNA, 19 nt, Artificial Sequence
  Description of Artificial Sequence: Synthetic oligonucleotide
  Sense strand starting at position 2322 of SEQ ID NO: 1243804
ugaucaccaguuugagaua

SEQ ID NO: 1442761 - RNA, 19 nt, Artificial Sequence
  Description of Artificial Sequence: Synthetic oligonucleotide
  Antisense strand to SEQ ID NO: 1442760
uaucucaaacuggugauca

SEQ ID NO: 1442762 - RNA, 19 nt, Artificial Sequence
  Description of Artificial Sequence: Synthetic oligonucleotide
  Sense strand starting at position 2325 of SEQ ID NO: 1243804
ucaccaguuugagauauuu

SEQ ID NO: 1442763 - RNA, 19 nt, Artificial Sequence
  Description of Artificial Sequence: Synthetic oligonucleotide
  Antisense strand to SEQ ID NO: 1442762
aaauaucucaaacugguga

SEQ ID NO: 1442764 - RNA, 19 nt, Artificial Sequence
  Description of Artificial Sequence: Synthetic oligonucleotide
  Sense strand starting at position 2427 of SEQ ID NO: 1243804
ucaucugaugguugucuga

SEQ ID NO: 1442765 - RNA, 19 nt, Artificial Sequence
  Description of Artificial Sequence: Synthetic oligonucleotide
  Antisense strand to SEQ ID NO: 1442764
ucagacaaccaucagauga

SEQ ID NO: 1442766 - RNA, 19 nt, Artificial Sequence
  Description of Artificial Sequence: Synthetic oligonucleotide
  Sense strand starting at position 2429 of SEQ ID NO: 1243804
aucugaugguugucugaca

SEQ ID NO: 1442767 - RNA, 19 nt, Artificial Sequence
  Description of Artificial Sequence: Synthetic oligonucleotide
  Antisense strand to SEQ ID NO: 1442766
ugucagacaaccaucagau

SEQ ID NO: 1442768 - RNA, 19 nt, Artificial Sequence
  Description of Artificial Sequence: Synthetic oligonucleotide
  Sense strand starting at position 2430 of SEQ ID NO: 1243804
ucugaugguugucugacau

SEQ ID NO: 1442769 - RNA, 19 nt, Artificial Sequence
  Description of Artificial Sequence: Synthetic oligonucleotide
  Antisense strand to SEQ ID NO: 1442768
augucagacaaccaucaga

SEQ ID NO: 1442770 - RNA, 19 nt, Artificial Sequence
  Description of Artificial Sequence: Synthetic oligonucleotide
  Sense strand starting at position 2476 of SEQ ID NO: 1243804
ccugcucaugucugaauaa

SEQ ID NO: 1442771 - RNA, 19 nt, Artificial Sequence
  Description of Artificial Sequence: Synthetic oligonucleotide
  Antisense strand to SEQ ID NO: 1442770
uuauucagacaugagcagg

SEQ ID NO: 1442772 - RNA, 19 nt, Artificial Sequence
  Description of Artificial Sequence: Synthetic oligonucleotide
  Sense strand starting at position 2792 of SEQ ID NO: 1243804
guaagaaugagucaagcug

SEQ ID NO: 1442773 - RNA, 19 nt, Artificial Sequence
  Description of Artificial Sequence: Synthetic oligonucleotide
  Antisense strand to SEQ ID NO: 1442772
cagcuugacucauucuuac

SEQ ID NO: 1442774 - RNA, 19 nt, Artificial Sequence
  Description of Artificial Sequence: Synthetic oligonucleotide
  Sense strand starting at position 2920 of SEQ ID NO: 1243804
gccuccaaagccuaugaua

SEQ ID NO: 1442775 - RNA, 19 nt, Artificial Sequence
  Description of Artificial Sequence: Synthetic oligonucleotide
  Antisense strand to SEQ ID NO: 1442774
uaucauaggcuuuggaggc

SEQ ID NO: 1442776 - RNA, 19 nt, Artificial Sequence
  Description of Artificial Sequence: Synthetic oligonucleotide
  Sense strand starting at position 2956 of SEQ ID NO: 1243804
ggaauucucuaaucugcga

SEQ ID NO: 1442777 - RNA, 19 nt, Artificial Sequence
  Description of Artificial Sequence: Synthetic oligonucleotide
  Antisense strand to SEQ ID NO: 1442776
ucgcagauuagagaauucc

SEQ ID NO: 1442778 - RNA, 19 nt, Artificial Sequence
  Description of Artificial Sequence: Synthetic oligonucleotide
  Sense strand starting at position 3024 of SEQ ID NO: 1243804
uugagucaacuccaagguu

SEQ ID NO: 1442779 - RNA, 19 nt, Artificial Sequence
  Description of Artificial Sequence: Synthetic oligonucleotide
  Antisense strand to SEQ ID NO: 1442778
aaccuuggaguugacucaa

SEQ ID NO: 1442780 - RNA, 19 nt, Artificial Sequence
  Description of Artificial Sequence: Synthetic oligonucleotide
  Sense strand starting at position 3043 of SEQ ID NO: 1243804
uguguaugaguguagaaag

SEQ ID NO: 1442781 - RNA, 19 nt, Artificial Sequence
  Description of Artificial Sequence: Synthetic oligonucleotide
  Antisense strand to SEQ ID NO: 1442780
cuuucuacacucauacaca

SEQ ID NO: 1442782 - RNA, 19 nt, Artificial Sequence
  Description of Artificial Sequence: Synthetic oligonucleotide
  Sense strand starting at position 3068 of SEQ ID NO: 1243804
agaauaggguucuccuuau

SEQ ID NO: 1442783 - RNA, 19 nt, Artificial Sequence
  Description of Artificial Sequence: Synthetic oligonucleotide
  Antisense strand to SEQ ID NO: 1442782
auaaggagaacccuauucu

SEQ ID NO: 1442784 - RNA, 19 nt, Artificial Sequence
  Description of Artificial Sequence: Synthetic oligonucleotide
  Sense strand starting at position 3240 of SEQ ID NO: 1243804
ggcccugugcaauacuaau

SEQ ID NO: 1442785 - RNA, 19 nt, Artificial Sequence
  Description of Artificial Sequence: Synthetic oligonucleotide
  Antisense strand to SEQ ID NO: 1442784
auuaguauugcacagggcc

SEQ ID NO: 1442786 - RNA, 19 nt, Artificial Sequence
  Description of Artificial Sequence: Synthetic oligonucleotide
  Sense strand starting at position 3552 of SEQ ID NO: 1243804
gcacuuaagcuugagcuca

SEQ ID NO: 1442787 - RNA, 19 nt, Artificial Sequence
  Description of Artificial Sequence: Synthetic oligonucleotide
  Antisense strand to SEQ ID NO: 1442786
ugagcucaagcuuaagugc

SEQ ID NO: 1442788 - RNA, 19 nt, Artificial Sequence
  Description of Artificial Sequence: Synthetic oligonucleotide
  Sense strand starting at position 3839 of SEQ ID NO: 1243804
guuacaagguccuugaaga

SEQ ID NO: 1442789 - RNA, 19 nt, Artificial Sequence
  Description of Artificial Sequence: Synthetic oligonucleotide
  Antisense strand to SEQ ID NO: 1442788
ucuucaaggaccuuguaac

SEQ ID NO: 1442790 - RNA, 19 nt, Artificial Sequence
  Description of Artificial Sequence: Synthetic oligonucleotide
  Sense strand starting at position 3840 of SEQ ID NO: 1243804
uuacaagguccuugaagaa

SEQ ID NO: 1442791 - RNA, 19 nt, Artificial Sequence
  Description of Artificial Sequence: Synthetic oligonucleotide
  Antisense strand to SEQ ID NO: 1442790
uucuucaaggaccuuguaa

SEQ ID NO: 1442792 - RNA, 19 nt, Artificial Sequence
  Description of Artificial Sequence: Synthetic oligonucleotide
  Sense strand starting at position 3853 of SEQ ID NO: 1243804
gaagaaugucuccaacggu

SEQ ID NO: 1442793 - RNA, 19 nt, Artificial Sequence
  Description of Artificial Sequence: Synthetic oligonucleotide
  Antisense strand to SEQ ID NO: 1442792
accguuggagacauucuuc

SEQ ID NO: 1442794 - RNA, 19 nt, Artificial Sequence
  Description of Artificial Sequence: Synthetic oligonucleotide
  Sense strand starting at position 3859 of SEQ ID NO: 1243804
ugucuccaacggugagaua

SEQ ID NO: 1442795 - RNA, 19 nt, Artificial Sequence
  Description of Artificial Sequence: Synthetic oligonucleotide
  Antisense strand to SEQ ID NO: 1442794
uaucucaccguuggagaca

SEQ ID NO: 1442796 - RNA, 19 nt, Artificial Sequence
  Description of Artificial Sequence: Synthetic oligonucleotide
  Sense strand starting at position 3868 of SEQ ID NO: 1243804
cggugagauagauaccgua

SEQ ID NO: 1442797 - RNA, 19 nt, Artificial Sequence
  Description of Artificial Sequence: Synthetic oligonucleotide
  Antisense strand to SEQ ID NO: 1442796
uacgguaucuaucucaccg

SEQ ID NO: 1442798 - RNA, 19 nt, Artificial Sequence
  Description of Artificial Sequence: Synthetic oligonucleotide
  Sense strand starting at position 3914 of SEQ ID NO: 1243804
aguaaagaguuauuacuca

SEQ ID NO: 1442799 - RNA, 19 nt, Artificial Sequence
  Description of Artificial Sequence: Synthetic oligonucleotide
  Antisense strand to SEQ ID NO: 1442798
ugaguaauaacucuuuacu

SEQ ID NO: 1442800 - RNA, 19 nt, Artificial Sequence
  Description of Artificial Sequence: Synthetic oligonucleotide
  Sense strand starting at position 18 of SEQ ID NO: 1243805
cuugaaucaugggcaaauu

SEQ ID NO: 1442801 - RNA, 19 nt, Artificial Sequence
  Description of Artificial Sequence: Synthetic oligonucleotide
  Antisense strand to SEQ ID NO: 1442800
aauuugcccaugauucaag

SEQ ID NO: 1442802 - RNA, 19 nt, Artificial Sequence
  Description of Artificial Sequence: Synthetic oligonucleotide
  Sense strand starting at position 80 of SEQ ID NO: 1243805
gguaaaugauacuuacuug

SEQ ID NO: 1442803 - RNA, 19 nt, Artificial Sequence
  Description of Artificial Sequence: Synthetic oligonucleotide
  Antisense strand to SEQ ID NO: 1442802
caaguaaguaucauuuacc

SEQ ID NO: 1442804 - RNA, 19 nt, Artificial Sequence
  Description of Artificial Sequence: Synthetic oligonucleotide
  Sense strand starting at position 94 of SEQ ID NO: 1243805
acuuguauccuaggaucau

SEQ ID NO: 1442805 - RNA, 19 nt, Artificial Sequence
  Description of Artificial Sequence: Synthetic oligonucleotide
  Antisense strand to SEQ ID NO: 1442804
augauccuaggauacaagu

SEQ ID NO: 1442806 - RNA, 19 nt, Artificial Sequence
  Description of Artificial Sequence: Synthetic oligonucleotide
  Sense strand starting at position 103 of SEQ ID NO: 1243805
cuaggaucaugguuagaau

SEQ ID NO: 1442807 - RNA, 19 nt, Artificial Sequence
  Description of Artificial Sequence: Synthetic oligonucleotide
  Antisense strand to SEQ ID NO: 1442806
auucuaaccaugauccuag

SEQ ID NO: 1442808 - RNA, 19 nt, Artificial Sequence
  Description of Artificial Sequence: Synthetic oligonucleotide
  Sense strand starting at position 114 of SEQ ID NO: 1243805
guuagaauucggugagaaa

SEQ ID NO: 1442809 - RNA, 19 nt, Artificial Sequence
  Description of Artificial Sequence: Synthetic oligonucleotide
  Antisense strand to SEQ ID NO: 1442808
uuucucaccgaauucuaac

SEQ ID NO: 1442810 - RNA, 19 nt, Artificial Sequence
  Description of Artificial Sequence: Synthetic oligonucleotide
  Sense strand starting at position 137 of SEQ ID NO: 1243805
uuggaaagcccuuaacuca

SEQ ID NO: 1442811 - RNA, 19 nt, Artificial Sequence
  Description of Artificial Sequence: Synthetic oligonucleotide
  Antisense strand to SEQ ID NO: 1442810
ugaguuaagggcuuuccaa

SEQ ID NO: 1442812 - RNA, 19 nt, Artificial Sequence
  Description of Artificial Sequence: Synthetic oligonucleotide
  Sense strand starting at position 259 of SEQ ID NO: 1243805
cuuugauguaugcaggaua

SEQ ID NO: 1442813 - RNA, 19 nt, Artificial Sequence
  Description of Artificial Sequence: Synthetic oligonucleotide
  Antisense strand to SEQ ID NO: 1442812
uauccugcauacaucaaag

SEQ ID NO: 1442814 - RNA, 19 nt, Artificial Sequence
  Description of Artificial Sequence: Synthetic oligonucleotide
  Sense strand starting at position 277 of SEQ ID NO: 1243805
acuggacuugauugguuau

SEQ ID NO: 1442815 - RNA, 19 nt, Artificial Sequence
  Description of Artificial Sequence: Synthetic oligonucleotide
  Antisense strand to SEQ ID NO: 1442814
auaaccaaucaaguccagu

SEQ ID NO: 1442816 - RNA, 19 nt, Artificial Sequence
  Description of Artificial Sequence: Synthetic oligonucleotide
  Sense strand starting at position 278 of SEQ ID NO: 1243805
cuggacuugauugguuauu

SEQ ID NO: 1442817 - RNA, 19 nt, Artificial Sequence
  Description of Artificial Sequence: Synthetic oligonucleotide
  Antisense strand to SEQ ID NO: 1442816
aauaaccaaucaaguccag

SEQ ID NO: 1442818 - RNA, 19 nt, Artificial Sequence
  Description of Artificial Sequence: Synthetic oligonucleotide
  Sense strand starting at position 354 of SEQ ID NO: 1243805
gaggucaguccagagaucu

SEQ ID NO: 1442819 - RNA, 19 nt, Artificial Sequence
  Description of Artificial Sequence: Synthetic oligonucleotide
  Antisense strand to SEQ ID NO: 1442818
agaucucuggacugaccuc

SEQ ID NO: 1442820 - RNA, 19 nt, Artificial Sequence
  Description of Artificial Sequence: Synthetic oligonucleotide
  Sense strand starting at position 535 of SEQ ID NO: 1243805
cugauugacucucccaaag

SEQ ID NO: 1442821 - RNA, 19 nt, Artificial Sequence
  Description of Artificial Sequence: Synthetic oligonucleotide
  Antisense strand to SEQ ID NO: 1442820
cuuugggagagucaaucag

SEQ ID NO: 1442822 - RNA, 19 nt, Artificial Sequence
  Description of Artificial Sequence: Synthetic oligonucleotide
  Sense strand starting at position 586 of SEQ ID NO: 1243805
guaagugaugcucauauca

SEQ ID NO: 1442823 - RNA, 19 nt, Artificial Sequence
  Description of Artificial Sequence: Synthetic oligonucleotide
  Antisense strand to SEQ ID NO: 1442822
ugauaugagcaucacuuac

SEQ ID NO: 1442824 - RNA, 19 nt, Artificial Sequence
  Description of Artificial Sequence: Synthetic oligonucleotide
  Sense strand starting at position 634 of SEQ ID NO: 1243805
cagggucauccugagagua

SEQ ID NO: 1442825 - RNA, 19 nt, Artificial Sequence
  Description of Artificial Sequence: Synthetic oligonucleotide
  Antisense strand to SEQ ID NO: 1442824
uacucucaggaugacccug

SEQ ID NO: 1442826 - RNA, 19 nt, Artificial Sequence
  Description of Artificial Sequence: Synthetic oligonucleotide
  Sense strand starting at position 647 of SEQ ID NO: 1243805
agaguaugugggcagauua

SEQ ID NO: 1442827 - RNA, 19 nt, Artificial Sequence
  Description of Artificial Sequence: Synthetic oligonucleotide
  Antisense strand to SEQ ID NO: 1442826
uaaucugcccacauacucu

SEQ ID NO: 1442828 - RNA, 19 nt, Artificial Sequence
  Description of Artificial Sequence: Synthetic oligonucleotide
  Sense strand starting at position 1154 of SEQ ID NO: 1243805
gguccucguaaacaaugau

SEQ ID NO: 1442829 - RNA, 19 nt, Artificial Sequence
  Description of Artificial Sequence: Synthetic oligonucleotide
  Antisense strand to SEQ ID NO: 1442828
aucauuguuuacgaggacc

SEQ ID NO: 1442830 - RNA, 19 nt, Artificial Sequence
  Description of Artificial Sequence: Synthetic oligonucleotide
  Sense strand starting at position 1157 of SEQ ID NO: 1243805
ccucguaaacaaugauaga

SEQ ID NO: 1442831 - RNA, 19 nt, Artificial Sequence
  Description of Artificial Sequence: Synthetic oligonucleotide
  Antisense strand to SEQ ID NO: 1442830
ucuaucauuguuuacgagg

SEQ ID NO: 1442832 - RNA, 19 nt, Artificial Sequence
  Description of Artificial Sequence: Synthetic oligonucleotide
  Sense strand starting at position 1441 of SEQ ID NO: 1243805
gacccacaugauuguuuga

SEQ ID NO: 1442833 - RNA, 19 nt, Artificial Sequence
  Description of Artificial Sequence: Synthetic oligonucleotide
  Antisense strand to SEQ ID NO: 1442832
ucaaacaaucauguggguc

SEQ ID NO: 1442834 - RNA, 19 nt, Artificial Sequence
  Description of Artificial Sequence: Synthetic oligonucleotide
  Sense strand starting at position 1443 of SEQ ID NO: 1243805
cccacaugauuguuugaac

SEQ ID NO: 1442835 - RNA, 19 nt, Artificial Sequence
  Description of Artificial Sequence: Synthetic oligonucleotide
  Antisense strand to SEQ ID NO: 1442834
guucaaacaaucauguggg

SEQ ID NO: 1442836 - RNA, 19 nt, Artificial Sequence
  Description of Artificial Sequence: Synthetic oligonucleotide
  Sense strand starting at position 1580 of SEQ ID NO: 1243805
gccucuccuccugaaugau

SEQ ID NO: 1442837 - RNA, 19 nt, Artificial Sequence
  Description of Artificial Sequence: Synthetic oligonucleotide
  Antisense strand to SEQ ID NO: 1442836
aucauucaggaggagaggc

SEQ ID NO: 1442838 - RNA, 19 nt, Artificial Sequence
  Description of Artificial Sequence: Synthetic oligonucleotide
  Sense strand starting at position 1960 of SEQ ID NO: 1243805
gggagagccgaaugaagau

SEQ ID NO: 1442839 - RNA, 19 nt, Artificial Sequence
  Description of Artificial Sequence: Synthetic oligonucleotide
  Antisense strand to SEQ ID NO: 1442838
aucuucauucggcucuccc

SEQ ID NO: 1442840 - RNA, 19 nt, Artificial Sequence
  Description of Artificial Sequence: Synthetic oligonucleotide
  Sense strand starting at position 2023 of SEQ ID NO: 1243805
ggaccuugaccgcaucaga

SEQ ID NO: 1442841 - RNA, 19 nt, Artificial Sequence
  Description of Artificial Sequence: Synthetic oligonucleotide
  Antisense strand to SEQ ID NO: 1442840
ucugaugcggucaaggucc

SEQ ID NO: 1442842 - RNA, 19 nt, Artificial Sequence
  Description of Artificial Sequence: Synthetic oligonucleotide
  Sense strand starting at position 2147 of SEQ ID NO: 1243805
ugaagaaaugggcgaaugu

SEQ ID NO: 1442843 - RNA, 19 nt, Artificial Sequence
  Description of Artificial Sequence: Synthetic oligonucleotide
  Antisense strand to SEQ ID NO: 1442842
acauucgcccauuucuuca

SEQ ID NO: 1442844 - RNA, 19 nt, Artificial Sequence
  Description of Artificial Sequence: Synthetic oligonucleotide
  Sense strand starting at position 2157 of SEQ ID NO: 1243805
ggcgaaugugugucagcua

SEQ ID NO: 1442845 - RNA, 19 nt, Artificial Sequence
  Description of Artificial Sequence: Synthetic oligonucleotide
  Antisense strand to SEQ ID NO: 1442844
uagcugacacacauucgcc

SEQ ID NO: 1442846 - RNA, 19 nt, Artificial Sequence
  Description of Artificial Sequence: Synthetic oligonucleotide
  Sense strand starting at position 2211 of SEQ ID NO: 1243805
gugaauagcgauuauuacu

SEQ ID NO: 1442847 - RNA, 19 nt, Artificial Sequence
  Description of Artificial Sequence: Synthetic oligonucleotide
  Antisense strand to SEQ ID NO: 1442846
aguaauaaucgcuauucac

SEQ ID NO: 1442848 - RNA, 19 nt, Artificial Sequence
  Description of Artificial Sequence: Synthetic oligonucleotide
  Sense strand starting at position 2220 of SEQ ID NO: 1243805
gauuauuacuucccuggga

SEQ ID NO: 1442849 - RNA, 19 nt, Artificial Sequence
  Description of Artificial Sequence: Synthetic oligonucleotide
  Antisense strand to SEQ ID NO: 1442848
ucccagggaaguaauaauc

SEQ ID NO: 1442850 - RNA, 19 nt, Artificial Sequence
  Description of Artificial Sequence: Synthetic oligonucleotide
  Sense strand starting at position 2222 of SEQ ID NO: 1243805
uuauuacuucccugggacu

SEQ ID NO: 1442851 - RNA, 19 nt, Artificial Sequence
  Description of Artificial Sequence: Synthetic oligonucleotide
  Antisense strand to SEQ ID NO: 1442850
agucccagggaaguaauaa

SEQ ID NO: 1442852 - RNA, 19 nt, Artificial Sequence
  Description of Artificial Sequence: Synthetic oligonucleotide
  Sense strand starting at position 2492 of SEQ ID NO: 1243805
aguccaaggccacaugauu

SEQ ID NO: 1442853 - RNA, 19 nt, Artificial Sequence
  Description of Artificial Sequence: Synthetic oligonucleotide
  Antisense strand to SEQ ID NO: 1442852
aaucauguggccuuggacu

SEQ ID NO: 1442854 - RNA, 19 nt, Artificial Sequence
  Description of Artificial Sequence: Synthetic oligonucleotide
  Sense strand starting at position 2501 of SEQ ID NO: 1243805
ccacaugauugagcucaca

SEQ ID NO: 1442855 - RNA, 19 nt, Artificial Sequence
  Description of Artificial Sequence: Synthetic oligonucleotide
  Antisense strand to SEQ ID NO: 1442854
ugugagcucaaucaugugg

SEQ ID NO: 1442856 - RNA, 19 nt, Artificial Sequence
  Description of Artificial Sequence: Synthetic oligonucleotide
  Sense strand starting at position 2605 of SEQ ID NO: 1243805
ccguuugacuuauuuguca

SEQ ID NO: 1442857 - RNA, 19 nt, Artificial Sequence
  Description of Artificial Sequence: Synthetic oligonucleotide
  Antisense strand to SEQ ID NO: 1442856
ugacaaauaagucaaacgg

SEQ ID NO: 1442858 - RNA, 19 nt, Artificial Sequence
  Description of Artificial Sequence: Synthetic oligonucleotide
  Sense strand starting at position 2930 of SEQ ID NO: 1243805
gcuuuagaggcauagguga

SEQ ID NO: 1442859 - RNA, 19 nt, Artificial Sequence
  Description of Artificial Sequence: Synthetic oligonucleotide
  Antisense strand to SEQ ID NO: 1442858
ucaccuaugccucuaaagc

SEQ ID NO: 1442860 - RNA, 19 nt, Artificial Sequence
  Description of Artificial Sequence: Synthetic oligonucleotide
  Sense strand starting at position 3044 of SEQ ID NO: 1243805
auagguaaaccguauaaug

SEQ ID NO: 1442861 - RNA, 19 nt, Artificial Sequence
  Description of Artificial Sequence: Synthetic oligonucleotide
  Antisense strand to SEQ ID NO: 1442860
cauuauacgguuuaccuau

SEQ ID NO: 1442862 - RNA, 19 nt, Artificial Sequence
  Description of Artificial Sequence: Synthetic oligonucleotide
  Sense strand starting at position 3046 of SEQ ID NO: 1243805
agguaaaccguauaaugca

SEQ ID NO: 1442863 - RNA, 19 nt, Artificial Sequence
  Description of Artificial Sequence: Synthetic oligonucleotide
  Antisense strand to SEQ ID NO: 1442862
ugcauuauacgguuuaccu

SEQ ID NO: 1442864 - RNA, 19 nt, Artificial Sequence
  Description of Artificial Sequence: Synthetic oligonucleotide
  Sense strand starting at position 3159 of SEQ ID NO: 1243805
ucuguuuauggaggugaca

SEQ ID NO: 1442865 - RNA, 19 nt, Artificial Sequence
  Description of Artificial Sequence: Synthetic oligonucleotide
  Antisense strand to SEQ ID NO: 1442864
ugucaccuccauaaacaga

SEQ ID NO: 1442866 - RNA, 19 nt, Artificial Sequence
  Description of Artificial Sequence: Synthetic oligonucleotide
  Sense strand starting at position 3161 of SEQ ID NO: 1243805
uguuuauggaggugacaag

SEQ ID NO: 1442867 - RNA, 19 nt, Artificial Sequence
  Description of Artificial Sequence: Synthetic oligonucleotide
  Antisense strand to SEQ ID NO: 1442866
cuugucaccuccauaaaca

SEQ ID NO: 1442868 - RNA, 19 nt, Artificial Sequence
  Description of Artificial Sequence: Synthetic oligonucleotide
  Sense strand starting at position 3274 of SEQ ID NO: 1243805
ccaggaaaggguggucaua

SEQ ID NO: 1442869 - RNA, 19 nt, Artificial Sequence
  Description of Artificial Sequence: Synthetic oligonucleotide
  Antisense strand to SEQ ID NO: 1442868
uaugaccacccuuuccugg

SEQ ID NO: 1442870 - RNA, 19 nt, Artificial Sequence
  Description of Artificial Sequence: Synthetic oligonucleotide
  Sense strand starting at position 3359 of SEQ ID NO: 1243805
uugagagcuuauucuugga

SEQ ID NO: 1442871 - RNA, 19 nt, Artificial Sequence
  Description of Artificial Sequence: Synthetic oligonucleotide
  Antisense strand to SEQ ID NO: 1442870
uccaagaauaagcucucaa

SEQ ID NO: 1442872 - RNA, 19 nt, Artificial Sequence
  Description of Artificial Sequence: Synthetic oligonucleotide
  Sense strand starting at position 3800 of SEQ ID NO: 1243805
guuugacugcuauagagag

SEQ ID NO: 1442873 - RNA, 19 nt, Artificial Sequence
  Description of Artificial Sequence: Synthetic oligonucleotide
  Antisense strand to SEQ ID NO: 1442872
cucucuauagcagucaaac

SEQ ID NO: 1442874 - RNA, 19 nt, Artificial Sequence
  Description of Artificial Sequence: Synthetic oligonucleotide
  Sense strand starting at position 3873 of SEQ ID NO: 1243805
ugucaugaagcuuaaauaa

SEQ ID NO: 1442875 - RNA, 19 nt, Artificial Sequence
  Description of Artificial Sequence: Synthetic oligonucleotide
  Antisense strand to SEQ ID NO: 1442874
uuauuuaagcuucaugaca

SEQ ID NO: 1442876 - RNA, 19 nt, Artificial Sequence
  Description of Artificial Sequence: Synthetic oligonucleotide
  Sense strand starting at position 3917 of SEQ ID NO: 1243805
gagugcuuggaguauagaa

SEQ ID NO: 1442877 - RNA, 19 nt, Artificial Sequence
  Description of Artificial Sequence: Synthetic oligonucleotide
  Antisense strand to SEQ ID NO: 1442876
uucuauacuccaagcacuc

SEQ ID NO: 1442878 - RNA, 19 nt, Artificial Sequence
  Description of Artificial Sequence: Synthetic oligonucleotide
  Sense strand starting at position 3976 of SEQ ID NO: 1243805
aggagacggucuuuacacu

SEQ ID NO: 1442879 - RNA, 19 nt, Artificial Sequence
  Description of Artificial Sequence: Synthetic oligonucleotide
  Antisense strand to SEQ ID NO: 1442878
aguguaaagaccgucuccu

SEQ ID NO: 1442880 - RNA, 19 nt, Artificial Sequence
  Description of Artificial Sequence: Synthetic oligonucleotide
  Sense strand starting at position 33 of SEQ ID NO: 1243806
cuaugcucuggacagacau

SEQ ID NO: 1442881 - RNA, 19 nt, Artificial Sequence
  Description of Artificial Sequence: Synthetic oligonucleotide
  Antisense strand to SEQ ID NO: 1442880
augucuguccagagcauag

SEQ ID NO: 1442882 - RNA, 19 nt, Artificial Sequence
  Description of Artificial Sequence: Synthetic oligonucleotide
  Sense strand starting at position 77 of SEQ ID NO: 1243806
ggauuaagauucucuaagu

SEQ ID NO: 1442883 - RNA, 19 nt, Artificial Sequence
  Description of Artificial Sequence: Synthetic oligonucleotide
  Antisense strand to SEQ ID NO: 1442882
acuuagagaaucuuaaucc

SEQ ID NO: 1442884 - RNA, 19 nt, Artificial Sequence
  Description of Artificial Sequence: Synthetic oligonucleotide
  Sense strand starting at position 193 of SEQ ID NO: 1243806
gacccauuguuaguuggga

SEQ ID NO: 1442885 - RNA, 19 nt, Artificial Sequence
  Description of Artificial Sequence: Synthetic oligonucleotide
  Antisense strand to SEQ ID NO: 1442884
ucccaacuaacaauggguc

SEQ ID NO: 1442886 - RNA, 19 nt, Artificial Sequence
  Description of Artificial Sequence: Synthetic oligonucleotide
  Sense strand starting at position 194 of SEQ ID NO: 1243806
acccauuguuaguugggaa

SEQ ID NO: 1442887 - RNA, 19 nt, Artificial Sequence
  Description of Artificial Sequence: Synthetic oligonucleotide
  Antisense strand to SEQ ID NO: 1442886
uucccaacuaacaaugggu

SEQ ID NO: 1442888 - RNA, 19 nt, Artificial Sequence
  Description of Artificial Sequence: Synthetic oligonucleotide
  Sense strand starting at position 195 of SEQ ID NO: 1243806
cccauuguuaguugggaaa

SEQ ID NO: 1442889 - RNA, 19 nt, Artificial Sequence
  Description of Artificial Sequence: Synthetic oligonucleotide
  Antisense strand to SEQ ID NO: 1442888
uuucccaacuaacaauggg

SEQ ID NO: 1442890 - RNA, 19 nt, Artificial Sequence
  Description of Artificial Sequence: Synthetic oligonucleotide
  Sense strand starting at position 325 of SEQ ID NO: 1243806
gcgauuuagagacgauggu

SEQ ID NO: 1442891 - RNA, 19 nt, Artificial Sequence
  Description of Artificial Sequence: Synthetic oligonucleotide
  Antisense strand to SEQ ID NO: 1442890
accaucgucucuaaaucgc

SEQ ID NO: 1442892 - RNA, 19 nt, Artificial Sequence
  Description of Artificial Sequence: Synthetic oligonucleotide
  Sense strand starting at position 359 of SEQ ID NO: 1243806
gucucuguagacugaauga

SEQ ID NO: 1442893 - RNA, 19 nt, Artificial Sequence
  Description of Artificial Sequence: Synthetic oligonucleotide
  Antisense strand to SEQ ID NO: 1442892
ucauucagucuacagagac

SEQ ID NO: 1442894 - RNA, 19 nt, Artificial Sequence
  Description of Artificial Sequence: Synthetic oligonucleotide
  Sense strand starting at position 422 of SEQ ID NO: 1243806
agcuauacucccugaagag

SEQ ID NO: 1442895 - RNA, 19 nt, Artificial Sequence
  Description of Artificial Sequence: Synthetic oligonucleotide
  Antisense strand to SEQ ID NO: 1442894
cucuucagggaguauagcu

SEQ ID NO: 1442896 - RNA, 19 nt, Artificial Sequence
  Description of Artificial Sequence: Synthetic oligonucleotide
  Sense strand starting at position 727 of SEQ ID NO: 1243806
gcucuuacccuggcguaau

SEQ ID NO: 1442897 - RNA, 19 nt, Artificial Sequence
  Description of Artificial Sequence: Synthetic oligonucleotide
  Antisense strand to SEQ ID NO: 1442896
auuacgccaggguaagagc

SEQ ID NO: 1442898 - RNA, 19 nt, Artificial Sequence
  Description of Artificial Sequence: Synthetic oligonucleotide
  Sense strand starting at position 891 of SEQ ID NO: 1243806
ugaagacauuuccaagcaa

SEQ ID NO: 1442899 - RNA, 19 nt, Artificial Sequence
  Description of Artificial Sequence: Synthetic oligonucleotide
  Antisense strand to SEQ ID NO: 1442898
uugcuuggaaaugucuuca

SEQ ID NO: 1442900 - RNA, 19 nt, Artificial Sequence
  Description of Artificial Sequence: Synthetic oligonucleotide
  Sense strand starting at position 999 of SEQ ID NO: 1243806
ggagcucagagaugcagaa

SEQ ID NO: 1442901 - RNA, 19 nt, Artificial Sequence
  Description of Artificial Sequence: Synthetic oligonucleotide
  Antisense strand to SEQ ID NO: 1442900
uucugcaucucugagcucc

SEQ ID NO: 1442902 - RNA, 19 nt, Artificial Sequence
  Description of Artificial Sequence: Synthetic oligonucleotide
  Sense strand starting at position 1202 of SEQ ID NO: 1243806
gugugaaucuuaucugagg

SEQ ID NO: 1442903 - RNA, 19 nt, Artificial Sequence
  Description of Artificial Sequence: Synthetic oligonucleotide
  Antisense strand to SEQ ID NO: 1442902
ccucagauaagauucacac

SEQ ID NO: 1442904 - RNA, 19 nt, Artificial Sequence
  Description of Artificial Sequence: Synthetic oligonucleotide
  Sense strand starting at position 1204 of SEQ ID NO: 1243806
gugaaucuuaucugaggga

SEQ ID NO: 1442905 - RNA, 19 nt, Artificial Sequence
  Description of Artificial Sequence: Synthetic oligonucleotide
  Antisense strand to SEQ ID NO: 1442904
ucccucagauaagauucac

SEQ ID NO: 1442906 - RNA, 19 nt, Artificial Sequence
  Description of Artificial Sequence: Synthetic oligonucleotide
  Sense strand starting at position 1285 of SEQ ID NO: 1243806
gacagcauagcucagaguu

SEQ ID NO: 1442907 - RNA, 19 nt, Artificial Sequence
  Description of Artificial Sequence: Synthetic oligonucleotide
  Antisense strand to SEQ ID NO: 1442906
aacucugagcuaugcuguc

SEQ ID NO: 1442908 - RNA, 19 nt, Artificial Sequence
  Description of Artificial Sequence: Synthetic oligonucleotide
  Sense strand starting at position 1300 of SEQ ID NO: 1243806
aguugaggccugcaggaaa

SEQ ID NO: 1442909 - RNA, 19 nt, Artificial Sequence
  Description of Artificial Sequence: Synthetic oligonucleotide
  Antisense strand to SEQ ID NO: 1442908
uuuccugcaggccucaacu

SEQ ID NO: 1442910 - RNA, 19 nt, Artificial Sequence
  Description of Artificial Sequence: Synthetic oligonucleotide
  Sense strand starting at position 1531 of SEQ ID NO: 1243806
gguugaacucuaggagacu

SEQ ID NO: 1442911 - RNA, 19 nt, Artificial Sequence
  Description of Artificial Sequence: Synthetic oligonucleotide
  Antisense strand to SEQ ID NO: 1442910
agucuccuagaguucaacc

SEQ ID NO: 1442912 - RNA, 19 nt, Artificial Sequence
  Description of Artificial Sequence: Synthetic oligonucleotide
  Sense strand starting at position 1546 of SEQ ID NO: 1243806
gacugcugaggucauugua

SEQ ID NO: 1442913 - RNA, 19 nt, Artificial Sequence
  Description of Artificial Sequence: Synthetic oligonucleotide
  Antisense strand to SEQ ID NO: 1442912
uacaaugaccucagcaguc

SEQ ID NO: 1442914 - RNA, 19 nt, Artificial Sequence
  Description of Artificial Sequence: Synthetic oligonucleotide
  Sense strand starting at position 2050 of SEQ ID NO: 1243806
gaacauuggaggugcugau

SEQ ID NO: 1442915 - RNA, 19 nt, Artificial Sequence
  Description of Artificial Sequence: Synthetic oligonucleotide
  Antisense strand to SEQ ID NO: 1442914
aucagcaccuccaauguuc

SEQ ID NO: 1442916 - RNA, 19 nt, Artificial Sequence
  Description of Artificial Sequence: Synthetic oligonucleotide
  Sense strand starting at position 2119 of SEQ ID NO: 1243806
gccuaugguuacuugaaag

SEQ ID NO: 1442917 - RNA, 19 nt, Artificial Sequence
  Description of Artificial Sequence: Synthetic oligonucleotide
  Antisense strand to SEQ ID NO: 1442916
cuuucaaguaaccauaggc

SEQ ID NO: 1442918 - RNA, 19 nt, Artificial Sequence
  Description of Artificial Sequence: Synthetic oligonucleotide
  Sense strand starting at position 2189 of SEQ ID NO: 1243806
gaaguuguaucuccagaug

SEQ ID NO: 1442919 - RNA, 19 nt, Artificial Sequence
  Description of Artificial Sequence: Synthetic oligonucleotide
  Antisense strand to SEQ ID NO: 1442918
caucuggagauacaacuuc

SEQ ID NO: 1442920 - RNA, 19 nt, Artificial Sequence
  Description of Artificial Sequence: Synthetic oligonucleotide
  Sense strand starting at position 2222 of SEQ ID NO: 1243806
ggaagcacccagggauuau

SEQ ID NO: 1442921 - RNA, 19 nt, Artificial Sequence
  Description of Artificial Sequence: Synthetic oligonucleotide
  Antisense strand to SEQ ID NO: 1442920
auaaucccugggugcuucc

SEQ ID NO: 1442922 - RNA, 19 nt, Artificial Sequence
  Description of Artificial Sequence: Synthetic oligonucleotide
  Sense strand starting at position 2231 of SEQ ID NO: 1243806
cagggauuaugcuuaggau

SEQ ID NO: 1442923 - RNA, 19 nt, Artificial Sequence
  Description of Artificial Sequence: Synthetic oligonucleotide
  Antisense strand to SEQ ID NO: 1442922
auccuaagcauaaucccug

SEQ ID NO: 1442924 - RNA, 19 nt, Artificial Sequence
  Description of Artificial Sequence: Synthetic oligonucleotide
  Sense strand starting at position 2293 of SEQ ID NO: 1243806
ucagaaaugaguggucaca

SEQ ID NO: 1442925 - RNA, 19 nt, Artificial Sequence
  Description of Artificial Sequence: Synthetic oligonucleotide
  Antisense strand to SEQ ID NO: 1442924
ugugaccacucauuucuga

SEQ ID NO: 1442926 - RNA, 19 nt, Artificial Sequence
  Description of Artificial Sequence: Synthetic oligonucleotide
  Sense strand starting at position 2321 of SEQ ID NO: 1243806
gauagagcagaaugcuuua

SEQ ID NO: 1442927 - RNA, 19 nt, Artificial Sequence
  Description of Artificial Sequence: Synthetic oligonucleotide
  Antisense strand to SEQ ID NO: 1442926
uaaagcauucugcucuauc

SEQ ID NO: 1442928 - RNA, 19 nt, Artificial Sequence
  Description of Artificial Sequence: Synthetic oligonucleotide
  Sense strand starting at position 2324 of SEQ ID NO: 1243806
agagcagaaugcuuuaaug

SEQ ID NO: 1442929 - RNA, 19 nt, Artificial Sequence
  Description of Artificial Sequence: Synthetic oligonucleotide
  Antisense strand to SEQ ID NO: 1442928
cauuaaagcauucugcucu

SEQ ID NO: 1442930 - RNA, 19 nt, Artificial Sequence
  Description of Artificial Sequence: Synthetic oligonucleotide
  Sense strand starting at position 2326 of SEQ ID NO: 1243806
agcagaaugcuuuaaugga

SEQ ID NO: 1442931 - RNA, 19 nt, Artificial Sequence
  Description of Artificial Sequence: Synthetic oligonucleotide
  Antisense strand to SEQ ID NO: 1442930
uccauuaaagcauucugcu

SEQ ID NO: 1442932 - RNA, 19 nt, Artificial Sequence
  Description of Artificial Sequence: Synthetic oligonucleotide
  Sense strand starting at position 2407 of SEQ ID NO: 1243806
ccuuucgugaucuaaugag

SEQ ID NO: 1442933 - RNA, 19 nt, Artificial Sequence
  Description of Artificial Sequence: Synthetic oligonucleotide
  Antisense strand to SEQ ID NO: 1442932
cucauuagaucacgaaagg

SEQ ID NO: 1442934 - RNA, 19 nt, Artificial Sequence
  Description of Artificial Sequence: Synthetic oligonucleotide
  Sense strand starting at position 2597 of SEQ ID NO: 1243806
uggcaacucauugguaaga

SEQ ID NO: 1442935 - RNA, 19 nt, Artificial Sequence
  Description of Artificial Sequence: Synthetic oligonucleotide
  Antisense strand to SEQ ID NO: 1442934
ucuuaccaaugaguugcca

SEQ ID NO: 1442936 - RNA, 19 nt, Artificial Sequence
  Description of Artificial Sequence: Synthetic oligonucleotide
  Sense strand starting at position 2608 of SEQ ID NO: 1243806
ugguaagaccauuguauaa

SEQ ID NO: 1442937 - RNA, 19 nt, Artificial Sequence
  Description of Artificial Sequence: Synthetic oligonucleotide
  Antisense strand to SEQ ID NO: 1442936
uuauacaauggucuuacca

SEQ ID NO: 1442938 - RNA, 19 nt, Artificial Sequence
  Description of Artificial Sequence: Synthetic oligonucleotide
  Sense strand starting at position 2680 of SEQ ID NO: 1243806
auuagagaauuggcucauu

SEQ ID NO: 1442939 - RNA, 19 nt, Artificial Sequence
  Description of Artificial Sequence: Synthetic oligonucleotide
  Antisense strand to SEQ ID NO: 1442938
aaugagccaauucucuaau

SEQ ID NO: 1442940 - RNA, 19 nt, Artificial Sequence
  Description of Artificial Sequence: Synthetic oligonucleotide
  Sense strand starting at position 2767 of SEQ ID NO: 1243806
gcuaguguagucccaguuu

SEQ ID NO: 1442941 - RNA, 19 nt, Artificial Sequence
  Description of Artificial Sequence: Synthetic oligonucleotide
  Antisense strand to SEQ ID NO: 1442940
aaacugggacuacacuagc

SEQ ID NO: 1442942 - RNA, 19 nt, Artificial Sequence
  Description of Artificial Sequence: Synthetic oligonucleotide
  Sense strand starting at position 2799 of SEQ ID NO: 1243806
ugagaaugggcaggcuuaa

SEQ ID NO: 1442943 - RNA, 19 nt, Artificial Sequence
  Description of Artificial Sequence: Synthetic oligonucleotide
  Antisense strand to SEQ ID NO: 1442942
uuaagccugcccauucuca

SEQ ID NO: 1442944 - RNA, 19 nt, Artificial Sequence
  Description of Artificial Sequence: Synthetic oligonucleotide
  Sense strand starting at position 3038 of SEQ ID NO: 1243806
uuuggaauuucuguucugu

SEQ ID NO: 1442945 - RNA, 19 nt, Artificial Sequence
  Description of Artificial Sequence: Synthetic oligonucleotide
  Antisense strand to SEQ ID NO: 1442944
acagaacagaaauuccaaa

SEQ ID NO: 1442946 - RNA, 19 nt, Artificial Sequence
  Description of Artificial Sequence: Synthetic oligonucleotide
  Sense strand starting at position 3082 of SEQ ID NO: 1243806
gugcuaauacauuauguua

SEQ ID NO: 1442947 - RNA, 19 nt, Artificial Sequence
  Description of Artificial Sequence: Synthetic oligonucleotide
  Antisense strand to SEQ ID NO: 1442946
uaacauaauguauuagcac

SEQ ID NO: 1442948 - RNA, 19 nt, Artificial Sequence
  Description of Artificial Sequence: Synthetic oligonucleotide
  Sense strand starting at position 3283 of SEQ ID NO: 1243806
cgcucuugucaucuagguu

SEQ ID NO: 1442949 - RNA, 19 nt, Artificial Sequence
  Description of Artificial Sequence: Synthetic oligonucleotide
  Antisense strand to SEQ ID NO: 1442948
aaccuagaugacaagagcg

SEQ ID NO: 1442950 - RNA, 19 nt, Artificial Sequence
  Description of Artificial Sequence: Synthetic oligonucleotide
  Sense strand starting at position 3566 of SEQ ID NO: 1243806
cuuacagaguguccaacau

SEQ ID NO: 1442951 - RNA, 19 nt, Artificial Sequence
  Description of Artificial Sequence: Synthetic oligonucleotide
  Antisense strand to SEQ ID NO: 1442950
auguuggacacucuguaag

SEQ ID NO: 1442952 - RNA, 19 nt, Artificial Sequence
  Description of Artificial Sequence: Synthetic oligonucleotide
  Sense strand starting at position 3619 of SEQ ID NO: 1243806
ugaugucaccaauguaaug

SEQ ID NO: 1442953 - RNA, 19 nt, Artificial Sequence
  Description of Artificial Sequence: Synthetic oligonucleotide
  Antisense strand to SEQ ID NO: 1442952
cauuacauuggugacauca

SEQ ID NO: 1442954 - RNA, 19 nt, Artificial Sequence
  Description of Artificial Sequence: Synthetic oligonucleotide
  Sense strand starting at position 3705 of SEQ ID NO: 1243806
gagaguuaauagucuacag

SEQ ID NO: 1442955 - RNA, 19 nt, Artificial Sequence
  Description of Artificial Sequence: Synthetic oligonucleotide
  Antisense strand to SEQ ID NO: 1442954
cuguagacuauuaacucuc

SEQ ID NO: 1442956 - RNA, 19 nt, Artificial Sequence
  Description of Artificial Sequence: Synthetic oligonucleotide
  Sense strand starting at position 3784 of SEQ ID NO: 1243806
cuacuuguuaugggacaga

SEQ ID NO: 1442957 - RNA, 19 nt, Artificial Sequence
  Description of Artificial Sequence: Synthetic oligonucleotide
  Antisense strand to SEQ ID NO: 1442956
ucugucccauaacaaguag

SEQ ID NO: 1442958 - RNA, 19 nt, Artificial Sequence
  Description of Artificial Sequence: Synthetic oligonucleotide
  Sense strand starting at position 3856 of SEQ ID NO: 1243806
ucaguaccugguuauagaa

SEQ ID NO: 1442959 - RNA, 19 nt, Artificial Sequence
  Description of Artificial Sequence: Synthetic oligonucleotide
  Antisense strand to SEQ ID NO: 1442958
uucuauaaccagguacuga

SEQ ID NO: 1442960 - RNA, 19 nt, Artificial Sequence
  Description of Artificial Sequence: Synthetic oligonucleotide
  Sense strand starting at position 571 of SEQ ID NO: 1243807
gacagaguuagaugaaguu

SEQ ID NO: 1442961 - RNA, 19 nt, Artificial Sequence
  Description of Artificial Sequence: Synthetic oligonucleotide
  Antisense strand to SEQ ID NO: 1442960
aacuucaucuaacucuguc

SEQ ID NO: 1442962 - RNA, 19 nt, Artificial Sequence
  Description of Artificial Sequence: Synthetic oligonucleotide
  Sense strand starting at position 820 of SEQ ID NO: 1243807
uugggaaccuuuguacauu

SEQ ID NO: 1442963 - RNA, 19 nt, Artificial Sequence
  Description of Artificial Sequence: Synthetic oligonucleotide
  Antisense strand to SEQ ID NO: 1442962
aauguacaaagguucccaa

SEQ ID NO: 1442964 - RNA, 19 nt, Artificial Sequence
  Description of Artificial Sequence: Synthetic oligonucleotide
  Sense strand starting at position 826 of SEQ ID NO: 1243807
accuuuguacauuaaguua

SEQ ID NO: 1442965 - RNA, 19 nt, Artificial Sequence
  Description of Artificial Sequence: Synthetic oligonucleotide
  Antisense strand to SEQ ID NO: 1442964
uaacuuaauguacaaaggu

SEQ ID NO: 1442966 - RNA, 19 nt, Artificial Sequence
  Description of Artificial Sequence: Synthetic oligonucleotide
  Sense strand starting at position 1093 of SEQ ID NO: 1243807
ugaacuggauuauucugau

SEQ ID NO: 1442967 - RNA, 19 nt, Artificial Sequence
  Description of Artificial Sequence: Synthetic oligonucleotide
  Antisense strand to SEQ ID NO: 1442966
aucagaauaauccaguuca

SEQ ID NO: 1442968 - RNA, 19 nt, Artificial Sequence
  Description of Artificial Sequence: Synthetic oligonucleotide
  Sense strand starting at position 1099 of SEQ ID NO: 1243807
ggauuauucugaucuuaag

SEQ ID NO: 1442969 - RNA, 19 nt, Artificial Sequence
  Description of Artificial Sequence: Synthetic oligonucleotide
  Antisense strand to SEQ ID NO: 1442968
cuuaagaucagaauaaucc

SEQ ID NO: 1442970 - RNA, 19 nt, Artificial Sequence
  Description of Artificial Sequence: Synthetic oligonucleotide
  Sense strand starting at position 1205 of SEQ ID NO: 1243807
agagcuagaaugugaucuu

SEQ ID NO: 1442971 - RNA, 19 nt, Artificial Sequence
  Description of Artificial Sequence: Synthetic oligonucleotide
  Antisense strand to SEQ ID NO: 1442970
aagaucacauucuagcucu

SEQ ID NO: 1442972 - RNA, 19 nt, Artificial Sequence
  Description of Artificial Sequence: Synthetic oligonucleotide
  Sense strand starting at position 1212 of SEQ ID NO: 1243807
gaaugugaucuuugaccca

SEQ ID NO: 1442973 - RNA, 19 nt, Artificial Sequence
  Description of Artificial Sequence: Synthetic oligonucleotide
  Antisense strand to SEQ ID NO: 1442972
ugggucaaagaucacauuc

SEQ ID NO: 1442974 - RNA, 19 nt, Artificial Sequence
  Description of Artificial Sequence: Synthetic oligonucleotide
  Sense strand starting at position 1215 of SEQ ID NO: 1243807
ugugaucuuugacccaaug

SEQ ID NO: 1442975 - RNA, 19 nt, Artificial Sequence
  Description of Artificial Sequence: Synthetic oligonucleotide
  Antisense strand to SEQ ID NO: 1442974
cauugggucaaagaucaca

SEQ ID NO: 1442976 - RNA, 19 nt, Artificial Sequence
  Description of Artificial Sequence: Synthetic oligonucleotide
  Sense strand starting at position 1297 of SEQ ID NO: 1243807
cuguuaaagcuagauaaug

SEQ ID NO: 1442977 - RNA, 19 nt, Artificial Sequence
  Description of Artificial Sequence: Synthetic oligonucleotide
  Antisense strand to SEQ ID NO: 1442976
cauuaucuagcuuuaacag

SEQ ID NO: 1442978 - RNA, 19 nt, Artificial Sequence
  Description of Artificial Sequence: Synthetic oligonucleotide
  Sense strand starting at position 1305 of SEQ ID NO: 1243807
gcuagauaaugccuacaag

SEQ ID NO: 1442979 - RNA, 19 nt, Artificial Sequence
  Description of Artificial Sequence: Synthetic oligonucleotide
  Antisense strand to SEQ ID NO: 1442978
cuuguaggcauuaucuagc

SEQ ID NO: 1442980 - RNA, 19 nt, Artificial Sequence
  Description of Artificial Sequence: Synthetic oligonucleotide
  Sense strand starting at position 1306 of SEQ ID NO: 1243807
cuagauaaugccuacaagu

SEQ ID NO: 1442981 - RNA, 19 nt, Artificial Sequence
  Description of Artificial Sequence: Synthetic oligonucleotide
  Antisense strand to SEQ ID NO: 1442980
acuuguaggcauuaucuag

SEQ ID NO: 1442982 - RNA, 19 nt, Artificial Sequence
  Description of Artificial Sequence: Synthetic oligonucleotide
  Sense strand starting at position 1308 of SEQ ID NO: 1243807
agauaaugccuacaagugu

SEQ ID NO: 1442983 - RNA, 19 nt, Artificial Sequence
  Description of Artificial Sequence: Synthetic oligonucleotide
  Antisense strand to SEQ ID NO: 1442982
acacuuguaggcauuaucu

SEQ ID NO: 1442984 - RNA, 19 nt, Artificial Sequence
  Description of Artificial Sequence: Synthetic oligonucleotide
  Sense strand starting at position 1317 of SEQ ID NO: 1243807
cuacaagugucauuaagac

SEQ ID NO: 1442985 - RNA, 19 nt, Artificial Sequence
  Description of Artificial Sequence: Synthetic oligonucleotide
  Antisense strand to SEQ ID NO: 1442984
gucuuaaugacacuuguag

SEQ ID NO: 1442986 - RNA, 19 nt, Artificial Sequence
  Description of Artificial Sequence: Synthetic oligonucleotide
  Sense strand starting at position 1430 of SEQ ID NO: 1243807
augaguuucccugauacuc

SEQ ID NO: 1442987 - RNA, 19 nt, Artificial Sequence
  Description of Artificial Sequence: Synthetic oligonucleotide
  Antisense strand to SEQ ID NO: 1442986
gaguaucagggaaacucau

SEQ ID NO: 1442988 - RNA, 19 nt, Artificial Sequence
  Description of Artificial Sequence: Synthetic oligonucleotide
  Sense strand starting at position 1729 of SEQ ID NO: 1243807
ugagucaccuuaucuugga

SEQ ID NO: 1442989 - RNA, 19 nt, Artificial Sequence
  Description of Artificial Sequence: Synthetic oligonucleotide
  Antisense strand to SEQ ID NO: 1442988
uccaagauaaggugacuca

SEQ ID NO: 1442990 - RNA, 19 nt, Artificial Sequence
  Description of Artificial Sequence: Synthetic oligonucleotide
  Sense strand starting at position 1730 of SEQ ID NO: 1243807
gagucaccuuaucuuggaa

SEQ ID NO: 1442991 - RNA, 19 nt, Artificial Sequence
  Description of Artificial Sequence: Synthetic oligonucleotide
  Antisense strand to SEQ ID NO: 1442990
uuccaagauaaggugacuc

SEQ ID NO: 1442992 - RNA, 19 nt, Artificial Sequence
  Description of Artificial Sequence: Synthetic oligonucleotide
  Sense strand starting at position 1787 of SEQ ID NO: 1243807
uuggaugguccaugauaac

SEQ ID NO: 1442993 - RNA, 19 nt, Artificial Sequence
  Description of Artificial Sequence: Synthetic oligonucleotide
  Antisense strand to SEQ ID NO: 1442992
guuaucauggaccauccaa

SEQ ID NO: 1442994 - RNA, 19 nt, Artificial Sequence
  Description of Artificial Sequence: Synthetic oligonucleotide
  Sense strand starting at position 2007 of SEQ ID NO: 1243807
gcugucucugccucuuauu

SEQ ID NO: 1442995 - RNA, 19 nt, Artificial Sequence
  Description of Artificial Sequence: Synthetic oligonucleotide
  Antisense strand to SEQ ID NO: 1442994
aauaagaggcagagacagc

SEQ ID NO: 1442996 - RNA, 19 nt, Artificial Sequence
  Description of Artificial Sequence: Synthetic oligonucleotide
  Sense strand starting at position 2067 of SEQ ID NO: 1243807
agggaucuuccaugaguga

SEQ ID NO: 1442997 - RNA, 19 nt, Artificial Sequence
  Description of Artificial Sequence: Synthetic oligonucleotide
  Antisense strand to SEQ ID NO: 1442996
ucacucauggaagaucccu

SEQ ID NO: 1442998 - RNA, 19 nt, Artificial Sequence
  Description of Artificial Sequence: Synthetic oligonucleotide
  Sense strand starting at position 2070 of SEQ ID NO: 1243807
gaucuuccaugagugauaa

SEQ ID NO: 1442999 - RNA, 19 nt, Artificial Sequence
  Description of Artificial Sequence: Synthetic oligonucleotide
  Antisense strand to SEQ ID NO: 1442998
uuaucacucauggaagauc

SEQ ID NO: 1443000 - RNA, 19 nt, Artificial Sequence
  Description of Artificial Sequence: Synthetic oligonucleotide
  Sense strand starting at position 2071 of SEQ ID NO: 1243807
aucuuccaugagugauaag

SEQ ID NO: 1443001 - RNA, 19 nt, Artificial Sequence
  Description of Artificial Sequence: Synthetic oligonucleotide
  Antisense strand to SEQ ID NO: 1443000
cuuaucacucauggaagau

SEQ ID NO: 1443002 - RNA, 19 nt, Artificial Sequence
  Description of Artificial Sequence: Synthetic oligonucleotide
  Sense strand starting at position 2096 of SEQ ID NO: 1243807
guuaaaucugcugagcaaa

SEQ ID NO: 1443003 - RNA, 19 nt, Artificial Sequence
  Description of Artificial Sequence: Synthetic oligonucleotide
  Antisense strand to SEQ ID NO: 1443002
uuugcucagcagauuuaac

SEQ ID NO: 1443004 - RNA, 19 nt, Artificial Sequence
  Description of Artificial Sequence: Synthetic oligonucleotide
  Sense strand starting at position 2115 of SEQ ID NO: 1243807
ugcagcauccuguggauuu

SEQ ID NO: 1443005 - RNA, 19 nt, Artificial Sequence
  Description of Artificial Sequence: Synthetic oligonucleotide
  Antisense strand to SEQ ID NO: 1443004
aaauccacaggaugcugca

SEQ ID NO: 1443006 - RNA, 19 nt, Artificial Sequence
  Description of Artificial Sequence: Synthetic oligonucleotide
  Sense strand starting at position 2251 of SEQ ID NO: 1243807
ugugaacuaagaggguuau

SEQ ID NO: 1443007 - RNA, 19 nt, Artificial Sequence
  Description of Artificial Sequence: Synthetic oligonucleotide
  Antisense strand to SEQ ID NO: 1443006
auaacccucuuaguucaca

SEQ ID NO: 1443008 - RNA, 19 nt, Artificial Sequence
  Description of Artificial Sequence: Synthetic oligonucleotide
  Sense strand starting at position 2252 of SEQ ID NO: 1243807
gugaacuaagaggguuauu

SEQ ID NO: 1443009 - RNA, 19 nt, Artificial Sequence
  Description of Artificial Sequence: Synthetic oligonucleotide
  Antisense strand to SEQ ID NO: 1443008
aauaacccucuuaguucac

SEQ ID NO: 1443010 - RNA, 19 nt, Artificial Sequence
  Description of Artificial Sequence: Synthetic oligonucleotide
  Sense strand starting at position 2487 of SEQ ID NO: 1243807
cuagcagaacuguaggauu

SEQ ID NO: 1443011 - RNA, 19 nt, Artificial Sequence
  Description of Artificial Sequence: Synthetic oligonucleotide
  Antisense strand to SEQ ID NO: 1443010
aauccuacaguucugcuag

SEQ ID NO: 1443012 - RNA, 19 nt, Artificial Sequence
  Description of Artificial Sequence: Synthetic oligonucleotide
  Sense strand starting at position 2616 of SEQ ID NO: 1243807
uuacucugccaggaauauu

SEQ ID NO: 1443013 - RNA, 19 nt, Artificial Sequence
  Description of Artificial Sequence: Synthetic oligonucleotide
  Antisense strand to SEQ ID NO: 1443012
aauauuccuggcagaguaa

SEQ ID NO: 1443014 - RNA, 19 nt, Artificial Sequence
  Description of Artificial Sequence: Synthetic oligonucleotide
  Sense strand starting at position 2809 of SEQ ID NO: 1243807
ugacauacugcuggaagga

SEQ ID NO: 1443015 - RNA, 19 nt, Artificial Sequence
  Description of Artificial Sequence: Synthetic oligonucleotide
  Antisense strand to SEQ ID NO: 1443014
uccuuccagcaguauguca

SEQ ID NO: 1443016 - RNA, 19 nt, Artificial Sequence
  Description of Artificial Sequence: Synthetic oligonucleotide
  Sense strand starting at position 2822 of SEQ ID NO: 1243807
gaaggaaacguguacaagu

SEQ ID NO: 1443017 - RNA, 19 nt, Artificial Sequence
  Description of Artificial Sequence: Synthetic oligonucleotide
  Antisense strand to SEQ ID NO: 1443016
acuuguacacguuuccuuc

SEQ ID NO: 1443018 - RNA, 19 nt, Artificial Sequence
  Description of Artificial Sequence: Synthetic oligonucleotide
  Sense strand starting at position 2919 of SEQ ID NO: 1243807
agaaacauuccucauggcu

SEQ ID NO: 1443019 - RNA, 19 nt, Artificial Sequence
  Description of Artificial Sequence: Synthetic oligonucleotide
  Antisense strand to SEQ ID NO: 1443018
agccaugaggaauguuucu

SEQ ID NO: 1443020 - RNA, 19 nt, Artificial Sequence
  Description of Artificial Sequence: Synthetic oligonucleotide
  Sense strand starting at position 2932 of SEQ ID NO: 1243807
auggcuaagucauuaugag

SEQ ID NO: 1443021 - RNA, 19 nt, Artificial Sequence
  Description of Artificial Sequence: Synthetic oligonucleotide
  Antisense strand to SEQ ID NO: 1443020
cucauaaugacuuagccau

SEQ ID NO: 1443022 - RNA, 19 nt, Artificial Sequence
  Description of Artificial Sequence: Synthetic oligonucleotide
  Sense strand starting at position 2938 of SEQ ID NO: 1243807
aagucauuaugaguuagga

SEQ ID NO: 1443023 - RNA, 19 nt, Artificial Sequence
  Description of Artificial Sequence: Synthetic oligonucleotide
  Antisense strand to SEQ ID NO: 1443022
uccuaacucauaaugacuu

SEQ ID NO: 1443024 - RNA, 19 nt, Artificial Sequence
  Description of Artificial Sequence: Synthetic oligonucleotide
  Sense strand starting at position 3031 of SEQ ID NO: 1243807
cuucuuaauuuccaaggga

SEQ ID NO: 1443025 - RNA, 19 nt, Artificial Sequence
  Description of Artificial Sequence: Synthetic oligonucleotide
  Antisense strand to SEQ ID NO: 1443024
ucccuuggaaauuaagaag

SEQ ID NO: 1443026 - RNA, 19 nt, Artificial Sequence
  Description of Artificial Sequence: Synthetic oligonucleotide
  Sense strand starting at position 3357 of SEQ ID NO: 1243807
ugaggcaaugucuauaaau

SEQ ID NO: 1443027 - RNA, 19 nt, Artificial Sequence
  Description of Artificial Sequence: Synthetic oligonucleotide
  Antisense strand to SEQ ID NO: 1443026
auuuauagacauugccuca

SEQ ID NO: 1443028 - RNA, 19 nt, Artificial Sequence
  Description of Artificial Sequence: Synthetic oligonucleotide
  Sense strand starting at position 3609 of SEQ ID NO: 1243807
aauaguagaugugcugaga

SEQ ID NO: 1443029 - RNA, 19 nt, Artificial Sequence
  Description of Artificial Sequence: Synthetic oligonucleotide
  Antisense strand to SEQ ID NO: 1443028
ucucagcacaucuacuauu

SEQ ID NO: 1443030 - RNA, 19 nt, Artificial Sequence
  Description of Artificial Sequence: Synthetic oligonucleotide
  Sense strand starting at position 3674 of SEQ ID NO: 1243807
uagacuugaugucucauga

SEQ ID NO: 1443031 - RNA, 19 nt, Artificial Sequence
  Description of Artificial Sequence: Synthetic oligonucleotide
  Antisense strand to SEQ ID NO: 1443030
ucaugagacaucaagucua

SEQ ID NO: 1443032 - RNA, 19 nt, Artificial Sequence
  Description of Artificial Sequence: Synthetic oligonucleotide
  Sense strand starting at position 3682 of SEQ ID NO: 1243807
augucucaugauggauauu

SEQ ID NO: 1443033 - RNA, 19 nt, Artificial Sequence
  Description of Artificial Sequence: Synthetic oligonucleotide
  Antisense strand to SEQ ID NO: 1443032
aauauccaucaugagacau

SEQ ID NO: 1443034 - RNA, 19 nt, Artificial Sequence
  Description of Artificial Sequence: Synthetic oligonucleotide
  Sense strand starting at position 3695 of SEQ ID NO: 1243807
gauauugguuuccuggaga

SEQ ID NO: 1443035 - RNA, 19 nt, Artificial Sequence
  Description of Artificial Sequence: Synthetic oligonucleotide
  Antisense strand to SEQ ID NO: 1443034
ucuccaggaaaccaauauc

SEQ ID NO: 1443036 - RNA, 19 nt, Artificial Sequence
  Description of Artificial Sequence: Synthetic oligonucleotide
  Sense strand starting at position 3747 of SEQ ID NO: 1243807
ucagacucugguggaauua

SEQ ID NO: 1443037 - RNA, 19 nt, Artificial Sequence
  Description of Artificial Sequence: Synthetic oligonucleotide
  Antisense strand to SEQ ID NO: 1443036
uaauuccaccagagucuga

SEQ ID NO: 1443038 - RNA, 19 nt, Artificial Sequence
  Description of Artificial Sequence: Synthetic oligonucleotide
  Sense strand starting at position 3977 of SEQ ID NO: 1243807
ugcaacuuuguguaggaau

SEQ ID NO: 1443039 - RNA, 19 nt, Artificial Sequence
  Description of Artificial Sequence: Synthetic oligonucleotide
  Antisense strand to SEQ ID NO: 1443038
auuccuacacaaaguugca

SEQ ID NO: 1443040 - RNA, 19 nt, Artificial Sequence
  Description of Artificial Sequence: Synthetic oligonucleotide
  Sense strand starting at position 868 of SEQ ID NO: 1243808
uaaagcuggcuuuaaaguu

SEQ ID NO: 1443041 - RNA, 19 nt, Artificial Sequence
  Description of Artificial Sequence: Synthetic oligonucleotide
  Antisense strand to SEQ ID NO: 1443040
aacuuuaaagccagcuuua

SEQ ID NO: 1443042 - RNA, 19 nt, Artificial Sequence
  Description of Artificial Sequence: Synthetic oligonucleotide
  Sense strand starting at position 1012 of SEQ ID NO: 1243808
uguaaugagacaugugggu

SEQ ID NO: 1443043 - RNA, 19 nt, Artificial Sequence
  Description of Artificial Sequence: Synthetic oligonucleotide
  Antisense strand to SEQ ID NO: 1443042
acccacaugucucauuaca

SEQ ID NO: 1443044 - RNA, 19 nt, Artificial Sequence
  Description of Artificial Sequence: Synthetic oligonucleotide
  Sense strand starting at position 1014 of SEQ ID NO: 1243808
uaaugagacauguggguau

SEQ ID NO: 1443045 - RNA, 19 nt, Artificial Sequence
  Description of Artificial Sequence: Synthetic oligonucleotide
  Antisense strand to SEQ ID NO: 1443044
auacccacaugucucauua

SEQ ID NO: 1443046 - RNA, 19 nt, Artificial Sequence
  Description of Artificial Sequence: Synthetic oligonucleotide
  Sense strand starting at position 1016 of SEQ ID NO: 1243808
augagacauguggguauau

SEQ ID NO: 1443047 - RNA, 19 nt, Artificial Sequence
  Description of Artificial Sequence: Synthetic oligonucleotide
  Antisense strand to SEQ ID NO: 1443046
auauacccacaugucucau

SEQ ID NO: 1443048 - RNA, 19 nt, Artificial Sequence
  Description of Artificial Sequence: Synthetic oligonucleotide
  Sense strand starting at position 1017 of SEQ ID NO: 1243808
ugagacauguggguauauu

SEQ ID NO: 1443049 - RNA, 19 nt, Artificial Sequence
  Description of Artificial Sequence: Synthetic oligonucleotide
  Antisense strand to SEQ ID NO: 1443048
aauauacccacaugucuca

SEQ ID NO: 1443050 - RNA, 19 nt, Artificial Sequence
  Description of Artificial Sequence: Synthetic oligonucleotide
  Sense strand starting at position 1044 of SEQ ID NO: 1243808
cucaauaugguuuggguaa

SEQ ID NO: 1443051 - RNA, 19 nt, Artificial Sequence
  Description of Artificial Sequence: Synthetic oligonucleotide
  Antisense strand to SEQ ID NO: 1443050
uuacccaaaccauauugag

SEQ ID NO: 1443052 - RNA, 19 nt, Artificial Sequence
  Description of Artificial Sequence: Synthetic oligonucleotide
  Sense strand starting at position 1143 of SEQ ID NO: 1243808
aguugugugaucuaccaag

SEQ ID NO: 1443053 - RNA, 19 nt, Artificial Sequence
  Description of Artificial Sequence: Synthetic oligonucleotide
  Antisense strand to SEQ ID NO: 1443052
cuugguagaucacacaacu

SEQ ID NO: 1443054 - RNA, 19 nt, Artificial Sequence
  Description of Artificial Sequence: Synthetic oligonucleotide
  Sense strand starting at position 1154 of SEQ ID NO: 1243808
cuaccaaguuaucuaaggu

SEQ ID NO: 1443055 - RNA, 19 nt, Artificial Sequence
  Description of Artificial Sequence: Synthetic oligonucleotide
  Antisense strand to SEQ ID NO: 1443054
accuuagauaacuugguag

SEQ ID NO: 1443056 - RNA, 19 nt, Artificial Sequence
  Description of Artificial Sequence: Synthetic oligonucleotide
  Sense strand starting at position 1307 of SEQ ID NO: 1243808
gguuguuagguggaacuga

SEQ ID NO: 1443057 - RNA, 19 nt, Artificial Sequence
  Description of Artificial Sequence: Synthetic oligonucleotide
  Antisense strand to SEQ ID NO: 1443056
ucaguuccaccuaacaacc

SEQ ID NO: 1443058 - RNA, 19 nt, Artificial Sequence
  Description of Artificial Sequence: Synthetic oligonucleotide
  Sense strand starting at position 1317 of SEQ ID NO: 1243808
uggaacugauguguuaaua

SEQ ID NO: 1443059 - RNA, 19 nt, Artificial Sequence
  Description of Artificial Sequence: Synthetic oligonucleotide
  Antisense strand to SEQ ID NO: 1443058
uauuaacacaucaguucca

SEQ ID NO: 1443060 - RNA, 19 nt, Artificial Sequence
  Description of Artificial Sequence: Synthetic oligonucleotide
  Sense strand starting at position 1328 of SEQ ID NO: 1243808
uguuaauaucuguaagaca

SEQ ID NO: 1443061 - RNA, 19 nt, Artificial Sequence
  Description of Artificial Sequence: Synthetic oligonucleotide
  Antisense strand to SEQ ID NO: 1443060
ugucuuacagauauuaaca

SEQ ID NO: 1443062 - RNA, 19 nt, Artificial Sequence
  Description of Artificial Sequence: Synthetic oligonucleotide
  Sense strand starting at position 1427 of SEQ ID NO: 1243808
uugguugagucauuugugu

SEQ ID NO: 1443063 - RNA, 19 nt, Artificial Sequence
  Description of Artificial Sequence: Synthetic oligonucleotide
  Antisense strand to SEQ ID NO: 1443062
acacaaaugacucaaccaa

SEQ ID NO: 1443064 - RNA, 19 nt, Artificial Sequence
  Description of Artificial Sequence: Synthetic oligonucleotide
  Sense strand starting at position 1429 of SEQ ID NO: 1243808
gguugagucauuugugugg

SEQ ID NO: 1443065 - RNA, 19 nt, Artificial Sequence
  Description of Artificial Sequence: Synthetic oligonucleotide
  Antisense strand to SEQ ID NO: 1443064
ccacacaaaugacucaacc

SEQ ID NO: 1443066 - RNA, 19 nt, Artificial Sequence
  Description of Artificial Sequence: Synthetic oligonucleotide
  Sense strand starting at position 1432 of SEQ ID NO: 1243808
ugagucauuuguguggcuu

SEQ ID NO: 1443067 - RNA, 19 nt, Artificial Sequence
  Description of Artificial Sequence: Synthetic oligonucleotide
  Antisense strand to SEQ ID NO: 1443066
aagccacacaaaugacuca

SEQ ID NO: 1443068 - RNA, 19 nt, Artificial Sequence
  Description of Artificial Sequence: Synthetic oligonucleotide
  Sense strand starting at position 1433 of SEQ ID NO: 1243808
gagucauuuguguggcuug

SEQ ID NO: 1443069 - RNA, 19 nt, Artificial Sequence
  Description of Artificial Sequence: Synthetic oligonucleotide
  Antisense strand to SEQ ID NO: 1443068
caagccacacaaaugacuc

SEQ ID NO: 1443070 - RNA, 19 nt, Artificial Sequence
  Description of Artificial Sequence: Synthetic oligonucleotide
  Sense strand starting at position 1488 of SEQ ID NO: 1243808
cuagaugguauguaacagu

SEQ ID NO: 1443071 - RNA, 19 nt, Artificial Sequence
  Description of Artificial Sequence: Synthetic oligonucleotide
  Antisense strand to SEQ ID NO: 1443070
acuguuacauaccaucuag

SEQ ID NO: 1443072 - RNA, 19 nt, Artificial Sequence
  Description of Artificial Sequence: Synthetic oligonucleotide
  Sense strand starting at position 1699 of SEQ ID NO: 1243808
cagacagaaccaggucuau

SEQ ID NO: 1443073 - RNA, 19 nt, Artificial Sequence
  Description of Artificial Sequence: Synthetic oligonucleotide
  Antisense strand to SEQ ID NO: 1443072
auagaccugguucugucug

SEQ ID NO: 1443074 - RNA, 19 nt, Artificial Sequence
  Description of Artificial Sequence: Synthetic oligonucleotide
  Sense strand starting at position 1801 of SEQ ID NO: 1243808
gagcuugaguuaccaugaa

SEQ ID NO: 1443075 - RNA, 19 nt, Artificial Sequence
  Description of Artificial Sequence: Synthetic oligonucleotide
  Antisense strand to SEQ ID NO: 1443074
uucaugguaacucaagcuc

SEQ ID NO: 1443076 - RNA, 19 nt, Artificial Sequence
  Description of Artificial Sequence: Synthetic oligonucleotide
  Sense strand starting at position 1816 of SEQ ID NO: 1243808
ugaaccuggucaucugaga

SEQ ID NO: 1443077 - RNA, 19 nt, Artificial Sequence
  Description of Artificial Sequence: Synthetic oligonucleotide
  Antisense strand to SEQ ID NO: 1443076
ucucagaugaccagguuca

SEQ ID NO: 1443078 - RNA, 19 nt, Artificial Sequence
  Description of Artificial Sequence: Synthetic oligonucleotide
  Sense strand starting at position 1832 of SEQ ID NO: 1243808
agagaaagcucacuggacu

SEQ ID NO: 1443079 - RNA, 19 nt, Artificial Sequence
  Description of Artificial Sequence: Synthetic oligonucleotide
  Antisense strand to SEQ ID NO: 1443078
aguccagugagcuuucucu

SEQ ID NO: 1443080 - RNA, 19 nt, Artificial Sequence
  Description of Artificial Sequence: Synthetic oligonucleotide
  Sense strand starting at position 1996 of SEQ ID NO: 1243808
gccaguucugcccuuguau

SEQ ID NO: 1443081 - RNA, 19 nt, Artificial Sequence
  Description of Artificial Sequence: Synthetic oligonucleotide
  Antisense strand to SEQ ID NO: 1443080
auacaagggcagaacuggc

SEQ ID NO: 1443082 - RNA, 19 nt, Artificial Sequence
  Description of Artificial Sequence: Synthetic oligonucleotide
  Sense strand starting at position 2065 of SEQ ID NO: 1243808
gacuuaugauaguuaacag

SEQ ID NO: 1443083 - RNA, 19 nt, Artificial Sequence
  Description of Artificial Sequence: Synthetic oligonucleotide
  Antisense strand to SEQ ID NO: 1443082
cuguuaacuaucauaaguc

SEQ ID NO: 1443084 - RNA, 19 nt, Artificial Sequence
  Description of Artificial Sequence: Synthetic oligonucleotide
  Sense strand starting at position 2103 of SEQ ID NO: 1243808
caaggcugagaaugcaaua

SEQ ID NO: 1443085 - RNA, 19 nt, Artificial Sequence
  Description of Artificial Sequence: Synthetic oligonucleotide
  Antisense strand to SEQ ID NO: 1443084
uauugcauucucagccuug

SEQ ID NO: 1443086 - RNA, 19 nt, Artificial Sequence
  Description of Artificial Sequence: Synthetic oligonucleotide
  Sense strand starting at position 2202 of SEQ ID NO: 1243808
auacuuuaugauggauacu

SEQ ID NO: 1443087 - RNA, 19 nt, Artificial Sequence
  Description of Artificial Sequence: Synthetic oligonucleotide
  Antisense strand to SEQ ID NO: 1443086
aguauccaucauaaaguau

SEQ ID NO: 1443088 - RNA, 19 nt, Artificial Sequence
  Description of Artificial Sequence: Synthetic oligonucleotide
  Sense strand starting at position 2215 of SEQ ID NO: 1243808
gauacuucccucugggaga

SEQ ID NO: 1443089 - RNA, 19 nt, Artificial Sequence
  Description of Artificial Sequence: Synthetic oligonucleotide
  Antisense strand to SEQ ID NO: 1443088
ucucccagagggaaguauc

SEQ ID NO: 1443090 - RNA, 19 nt, Artificial Sequence
  Description of Artificial Sequence: Synthetic oligonucleotide
  Sense strand starting at position 2409 of SEQ ID NO: 1243808
guacucacacagcaugauu

SEQ ID NO: 1443091 - RNA, 19 nt, Artificial Sequence
  Description of Artificial Sequence: Synthetic oligonucleotide
  Antisense strand to SEQ ID NO: 1443090
aaucaugcugugugaguac

SEQ ID NO: 1443092 - RNA, 19 nt, Artificial Sequence
  Description of Artificial Sequence: Synthetic oligonucleotide
  Sense strand starting at position 2578 of SEQ ID NO: 1243808
agugucuggagauauccuu

SEQ ID NO: 1443093 - RNA, 19 nt, Artificial Sequence
  Description of Artificial Sequence: Synthetic oligonucleotide
  Antisense strand to SEQ ID NO: 1443092
aaggauaucuccagacacu

SEQ ID NO: 1443094 - RNA, 19 nt, Artificial Sequence
  Description of Artificial Sequence: Synthetic oligonucleotide
  Sense strand starting at position 2584 of SEQ ID NO: 1243808
uggagauauccuugacucc

SEQ ID NO: 1443095 - RNA, 19 nt, Artificial Sequence
  Description of Artificial Sequence: Synthetic oligonucleotide
  Antisense strand to SEQ ID NO: 1443094
ggagucaaggauaucucca

SEQ ID NO: 1443096 - RNA, 19 nt, Artificial Sequence
  Description of Artificial Sequence: Synthetic oligonucleotide
  Sense strand starting at position 2753 of SEQ ID NO: 1243808
gguguuagcauagaccaca

SEQ ID NO: 1443097 - RNA, 19 nt, Artificial Sequence
  Description of Artificial Sequence: Synthetic oligonucleotide
  Antisense strand to SEQ ID NO: 1443096
uguggucuaugcuaacacc

SEQ ID NO: 1443098 - RNA, 19 nt, Artificial Sequence
  Description of Artificial Sequence: Synthetic oligonucleotide
  Sense strand starting at position 2857 of SEQ ID NO: 1243808
guuugacuuggcuacacau

SEQ ID NO: 1443099 - RNA, 19 nt, Artificial Sequence
  Description of Artificial Sequence: Synthetic oligonucleotide
  Antisense strand to SEQ ID NO: 1443098
auguguagccaagucaaac

SEQ ID NO: 1443100 - RNA, 19 nt, Artificial Sequence
  Description of Artificial Sequence: Synthetic oligonucleotide
  Sense strand starting at position 2864 of SEQ ID NO: 1243808
uuggcuacacaucagaauu

SEQ ID NO: 1443101 - RNA, 19 nt, Artificial Sequence
  Description of Artificial Sequence: Synthetic oligonucleotide
  Antisense strand to SEQ ID NO: 1443100
aauucugauguguagccaa

SEQ ID NO: 1443102 - RNA, 19 nt, Artificial Sequence
  Description of Artificial Sequence: Synthetic oligonucleotide
  Sense strand starting at position 2945 of SEQ ID NO: 1243808
guuuacuuacaggguuaua

SEQ ID NO: 1443103 - RNA, 19 nt, Artificial Sequence
  Description of Artificial Sequence: Synthetic oligonucleotide
  Antisense strand to SEQ ID NO: 1443102
uauaacccuguaaguaaac

SEQ ID NO: 1443104 - RNA, 19 nt, Artificial Sequence
  Description of Artificial Sequence: Synthetic oligonucleotide
  Sense strand starting at position 2992 of SEQ ID NO: 1243808
aggucaaugagaugcauag

SEQ ID NO: 1443105 - RNA, 19 nt, Artificial Sequence
  Description of Artificial Sequence: Synthetic oligonucleotide
  Antisense strand to SEQ ID NO: 1443104
cuaugcaucucauugaccu

SEQ ID NO: 1443106 - RNA, 19 nt, Artificial Sequence
  Description of Artificial Sequence: Synthetic oligonucleotide
  Sense strand starting at position 3334 of SEQ ID NO: 1243808
ucaggugugguaggaacua

SEQ ID NO: 1443107 - RNA, 19 nt, Artificial Sequence
  Description of Artificial Sequence: Synthetic oligonucleotide
  Antisense strand to SEQ ID NO: 1443106
uaguuccuaccacaccuga

SEQ ID NO: 1443108 - RNA, 19 nt, Artificial Sequence
  Description of Artificial Sequence: Synthetic oligonucleotide
  Sense strand starting at position 3346 of SEQ ID NO: 1243808
ggaacuacuuguccagacu

SEQ ID NO: 1443109 - RNA, 19 nt, Artificial Sequence
  Description of Artificial Sequence: Synthetic oligonucleotide
  Antisense strand to SEQ ID NO: 1443108
agucuggacaaguaguucc

SEQ ID NO: 1443110 - RNA, 19 nt, Artificial Sequence
  Description of Artificial Sequence: Synthetic oligonucleotide
  Sense strand starting at position 3383 of SEQ ID NO: 1243808
gaguaaugagcugauccuu

SEQ ID NO: 1443111 - RNA, 19 nt, Artificial Sequence
  Description of Artificial Sequence: Synthetic oligonucleotide
  Antisense strand to SEQ ID NO: 1443110
aaggaucagcucauuacuc

SEQ ID NO: 1443112 - RNA, 19 nt, Artificial Sequence
  Description of Artificial Sequence: Synthetic oligonucleotide
  Sense strand starting at position 3530 of SEQ ID NO: 1243808
gguggcuagagucagagau

SEQ ID NO: 1443113 - RNA, 19 nt, Artificial Sequence
  Description of Artificial Sequence: Synthetic oligonucleotide
  Antisense strand to SEQ ID NO: 1443112
aucucugacucuagccacc

SEQ ID NO: 1443114 - RNA, 19 nt, Artificial Sequence
  Description of Artificial Sequence: Synthetic oligonucleotide
  Sense strand starting at position 3556 of SEQ ID NO: 1243808
auagaauggaaguggugua

SEQ ID NO: 1443115 - RNA, 19 nt, Artificial Sequence
  Description of Artificial Sequence: Synthetic oligonucleotide
  Antisense strand to SEQ ID NO: 1443114
uacaccacuuccauucuau

SEQ ID NO: 1443116 - RNA, 19 nt, Artificial Sequence
  Description of Artificial Sequence: Synthetic oligonucleotide
  Sense strand starting at position 3649 of SEQ ID NO: 1243808
accaaucaguauguugauu

SEQ ID NO: 1443117 - RNA, 19 nt, Artificial Sequence
  Description of Artificial Sequence: Synthetic oligonucleotide
  Antisense strand to SEQ ID NO: 1443116
aaucaacauacugauuggu

SEQ ID NO: 1443118 - RNA, 19 nt, Artificial Sequence
  Description of Artificial Sequence: Synthetic oligonucleotide
  Sense strand starting at position 3654 of SEQ ID NO: 1243808
ucaguauguugauuacaca

SEQ ID NO: 1443119 - RNA, 19 nt, Artificial Sequence
  Description of Artificial Sequence: Synthetic oligonucleotide
  Antisense strand to SEQ ID NO: 1443118
uguguaaucaacauacuga

SEQ ID NO: 1443120 - RNA, 19 nt, Artificial Sequence
  Description of Artificial Sequence: Synthetic oligonucleotide
  Sense strand starting at position 731 of SEQ ID NO: 1243809
gccuaucucugucuagaga

SEQ ID NO: 1443121 - RNA, 19 nt, Artificial Sequence
  Description of Artificial Sequence: Synthetic oligonucleotide
  Antisense strand to SEQ ID NO: 1443120
ucucuagacagagauaggc

SEQ ID NO: 1443122 - RNA, 19 nt, Artificial Sequence
  Description of Artificial Sequence: Synthetic oligonucleotide
  Sense strand starting at position 749 of SEQ ID NO: 1243809
agcuucucucagugacuca

SEQ ID NO: 1443123 - RNA, 19 nt, Artificial Sequence
  Description of Artificial Sequence: Synthetic oligonucleotide
  Antisense strand to SEQ ID NO: 1443122
ugagucacugagagaagcu

SEQ ID NO: 1443124 - RNA, 19 nt, Artificial Sequence
  Description of Artificial Sequence: Synthetic oligonucleotide
  Sense strand starting at position 1152 of SEQ ID NO: 1243809
agagaaugagcccgaguca

SEQ ID NO: 1443125 - RNA, 19 nt, Artificial Sequence
  Description of Artificial Sequence: Synthetic oligonucleotide
  Antisense strand to SEQ ID NO: 1443124
ugacucgggcucauucucu

SEQ ID NO: 1443126 - RNA, 19 nt, Artificial Sequence
  Description of Artificial Sequence: Synthetic oligonucleotide
  Sense strand starting at position 1339 of SEQ ID NO: 1243809
uucucugugugauccagau

SEQ ID NO: 1443127 - RNA, 19 nt, Artificial Sequence
  Description of Artificial Sequence: Synthetic oligonucleotide
  Antisense strand to SEQ ID NO: 1443126
aucuggaucacacagagaa

SEQ ID NO: 1443128 - RNA, 19 nt, Artificial Sequence
  Description of Artificial Sequence: Synthetic oligonucleotide
  Sense strand starting at position 1343 of SEQ ID NO: 1243809
cugugugauccagauaccu

SEQ ID NO: 1443129 - RNA, 19 nt, Artificial Sequence
  Description of Artificial Sequence: Synthetic oligonucleotide
  Antisense strand to SEQ ID NO: 1443128
agguaucuggaucacacag

SEQ ID NO: 1443130 - RNA, 19 nt, Artificial Sequence
  Description of Artificial Sequence: Synthetic oligonucleotide
  Sense strand starting at position 1345 of SEQ ID NO: 1243809
gugugauccagauaccuga

SEQ ID NO: 1443131 - RNA, 19 nt, Artificial Sequence
  Description of Artificial Sequence: Synthetic oligonucleotide
  Antisense strand to SEQ ID NO: 1443130
ucagguaucuggaucacac

SEQ ID NO: 1443132 - RNA, 19 nt, Artificial Sequence
  Description of Artificial Sequence: Synthetic oligonucleotide
  Sense strand starting at position 1433 of SEQ ID NO: 1243809
aagagaagccuuggacauc

SEQ ID NO: 1443133 - RNA, 19 nt, Artificial Sequence
  Description of Artificial Sequence: Synthetic oligonucleotide
  Antisense strand to SEQ ID NO: 1443132
gauguccaaggcuucucuu

SEQ ID NO: 1443134 - RNA, 19 nt, Artificial Sequence
  Description of Artificial Sequence: Synthetic oligonucleotide
  Sense strand starting at position 1558 of SEQ ID NO: 1243809
cuaacugauucguuucgaa

SEQ ID NO: 1443135 - RNA, 19 nt, Artificial Sequence
  Description of Artificial Sequence: Synthetic oligonucleotide
  Antisense strand to SEQ ID NO: 1443134
uucgaaacgaaucaguuag

SEQ ID NO: 1443136 - RNA, 19 nt, Artificial Sequence
  Description of Artificial Sequence: Synthetic oligonucleotide
  Sense strand starting at position 1766 of SEQ ID NO: 1243809
auugauguggucuaaccau

SEQ ID NO: 1443137 - RNA, 19 nt, Artificial Sequence
  Description of Artificial Sequence: Synthetic oligonucleotide
  Antisense strand to SEQ ID NO: 1443136
augguuagaccacaucaau

SEQ ID NO: 1443138 - RNA, 19 nt, Artificial Sequence
  Description of Artificial Sequence: Synthetic oligonucleotide
  Sense strand starting at position 1822 of SEQ ID NO: 1243809
ucacgugaugcagagaacu

SEQ ID NO: 1443139 - RNA, 19 nt, Artificial Sequence
  Description of Artificial Sequence: Synthetic oligonucleotide
  Antisense strand to SEQ ID NO: 1443138
aguucucugcaucacguga

SEQ ID NO: 1443140 - RNA, 19 nt, Artificial Sequence
  Description of Artificial Sequence: Synthetic oligonucleotide
  Sense strand starting at position 1886 of SEQ ID NO: 1243809
uggagaccugcaugauucu

SEQ ID NO: 1443141 - RNA, 19 nt, Artificial Sequence
  Description of Artificial Sequence: Synthetic oligonucleotide
  Antisense strand to SEQ ID NO: 1443140
agaaucaugcaggucucca

SEQ ID NO: 1443142 - RNA, 19 nt, Artificial Sequence
  Description of Artificial Sequence: Synthetic oligonucleotide
  Sense strand starting at position 1895 of SEQ ID NO: 1243809
gcaugauucugagcaggug

SEQ ID NO: 1443143 - RNA, 19 nt, Artificial Sequence
  Description of Artificial Sequence: Synthetic oligonucleotide
  Antisense strand to SEQ ID NO: 1443142
caccugcucagaaucaugc

SEQ ID NO: 1443144 - RNA, 19 nt, Artificial Sequence
  Description of Artificial Sequence: Synthetic oligonucleotide
  Sense strand starting at position 1896 of SEQ ID NO: 1243809
caugauucugagcagguga

SEQ ID NO: 1443145 - RNA, 19 nt, Artificial Sequence
  Description of Artificial Sequence: Synthetic oligonucleotide
  Antisense strand to SEQ ID NO: 1443144
ucaccugcucagaaucaug

SEQ ID NO: 1443146 - RNA, 19 nt, Artificial Sequence
  Description of Artificial Sequence: Synthetic oligonucleotide
  Sense strand starting at position 1970 of SEQ ID NO: 1243809
gcccguguccuucugaagu

SEQ ID NO: 1443147 - RNA, 19 nt, Artificial Sequence
  Description of Artificial Sequence: Synthetic oligonucleotide
  Antisense strand to SEQ ID NO: 1443146
acuucagaaggacacgggc

SEQ ID NO: 1443148 - RNA, 19 nt, Artificial Sequence
  Description of Artificial Sequence: Synthetic oligonucleotide
  Sense strand starting at position 2067 of SEQ ID NO: 1243809
agcguagugaugcugucau

SEQ ID NO: 1443149 - RNA, 19 nt, Artificial Sequence
  Description of Artificial Sequence: Synthetic oligonucleotide
  Antisense strand to SEQ ID NO: 1443148
augacagcaucacuacgcu

SEQ ID NO: 1443150 - RNA, 19 nt, Artificial Sequence
  Description of Artificial Sequence: Synthetic oligonucleotide
  Sense strand starting at position 2139 of SEQ ID NO: 1243809
agaauagcaucuuugagcu

SEQ ID NO: 1443151 - RNA, 19 nt, Artificial Sequence
  Description of Artificial Sequence: Synthetic oligonucleotide
  Antisense strand to SEQ ID NO: 1443150
agcucaaagaugcuauucu

SEQ ID NO: 1443152 - RNA, 19 nt, Artificial Sequence
  Description of Artificial Sequence: Synthetic oligonucleotide
  Sense strand starting at position 2180 of SEQ ID NO: 1243809
acucaugacuuguuauagu

SEQ ID NO: 1443153 - RNA, 19 nt, Artificial Sequence
  Description of Artificial Sequence: Synthetic oligonucleotide
  Antisense strand to SEQ ID NO: 1443152
acuauaacaagucaugagu

SEQ ID NO: 1443154 - RNA, 19 nt, Artificial Sequence
  Description of Artificial Sequence: Synthetic oligonucleotide
  Sense strand starting at position 2205 of SEQ ID NO: 1243809
gggaaaugguuucuccugu

SEQ ID NO: 1443155 - RNA, 19 nt, Artificial Sequence
  Description of Artificial Sequence: Synthetic oligonucleotide
  Antisense strand to SEQ ID NO: 1443154
acaggagaaaccauuuccc

SEQ ID NO: 1443156 - RNA, 19 nt, Artificial Sequence
  Description of Artificial Sequence: Synthetic oligonucleotide
  Sense strand starting at position 2265 of SEQ ID NO: 1243809
gucagucccuucucauaag

SEQ ID NO: 1443157 - RNA, 19 nt, Artificial Sequence
  Description of Artificial Sequence: Synthetic oligonucleotide
  Antisense strand to SEQ ID NO: 1443156
cuuaugagaagggacugac

SEQ ID NO: 1443158 - RNA, 19 nt, Artificial Sequence
  Description of Artificial Sequence: Synthetic oligonucleotide
  Sense strand starting at position 2280 of SEQ ID NO: 1243809
uaagaacuggucugugcau

SEQ ID NO: 1443159 - RNA, 19 nt, Artificial Sequence
  Description of Artificial Sequence: Synthetic oligonucleotide
  Antisense strand to SEQ ID NO: 1443158
augcacagaccaguucuua

SEQ ID NO: 1443160 - RNA, 19 nt, Artificial Sequence
  Description of Artificial Sequence: Synthetic oligonucleotide
  Sense strand starting at position 2282 of SEQ ID NO: 1243809
agaacuggucugugcauga

SEQ ID NO: 1443161 - RNA, 19 nt, Artificial Sequence
  Description of Artificial Sequence: Synthetic oligonucleotide
  Antisense strand to SEQ ID NO: 1443160
ucaugcacagaccaguucu

SEQ ID NO: 1443162 - RNA, 19 nt, Artificial Sequence
  Description of Artificial Sequence: Synthetic oligonucleotide
  Sense strand starting at position 2454 of SEQ ID NO: 1243809
aaagcaugaggucauguuu

SEQ ID NO: 1443163 - RNA, 19 nt, Artificial Sequence
  Description of Artificial Sequence: Synthetic oligonucleotide
  Antisense strand to SEQ ID NO: 1443162
aaacaugaccucaugcuuu

SEQ ID NO: 1443164 - RNA, 19 nt, Artificial Sequence
  Description of Artificial Sequence: Synthetic oligonucleotide
  Sense strand starting at position 2482 of SEQ ID NO: 1243809
gucuauuuauuagucaugu

SEQ ID NO: 1443165 - RNA, 19 nt, Artificial Sequence
  Description of Artificial Sequence: Synthetic oligonucleotide
  Antisense strand to SEQ ID NO: 1443164
acaugacuaauaaauagac

SEQ ID NO: 1443166 - RNA, 19 nt, Artificial Sequence
  Description of Artificial Sequence: Synthetic oligonucleotide
  Sense strand starting at position 2488 of SEQ ID NO: 1243809
uuauuagucauguagugac

SEQ ID NO: 1443167 - RNA, 19 nt, Artificial Sequence
  Description of Artificial Sequence: Synthetic oligonucleotide
  Antisense strand to SEQ ID NO: 1443166
gucacuacaugacuaauaa

SEQ ID NO: 1443168 - RNA, 19 nt, Artificial Sequence
  Description of Artificial Sequence: Synthetic oligonucleotide
  Sense strand starting at position 2549 of SEQ ID NO: 1243809
uuuagaggugggugucaau

SEQ ID NO: 1443169 - RNA, 19 nt, Artificial Sequence
  Description of Artificial Sequence: Synthetic oligonucleotide
  Antisense strand to SEQ ID NO: 1443168
auugacacccaccucuaaa

SEQ ID NO: 1443170 - RNA, 19 nt, Artificial Sequence
  Description of Artificial Sequence: Synthetic oligonucleotide
  Sense strand starting at position 2579 of SEQ ID NO: 1243809
cuagaaauaucuguagcca

SEQ ID NO: 1443171 - RNA, 19 nt, Artificial Sequence
  Description of Artificial Sequence: Synthetic oligonucleotide
  Antisense strand to SEQ ID NO: 1443170
uggcuacagauauuucuag

SEQ ID NO: 1443172 - RNA, 19 nt, Artificial Sequence
  Description of Artificial Sequence: Synthetic oligonucleotide
  Sense strand starting at position 2610 of SEQ ID NO: 1243809
aagcauuucuaggaaagag

SEQ ID NO: 1443173 - RNA, 19 nt, Artificial Sequence
  Description of Artificial Sequence: Synthetic oligonucleotide
  Antisense strand to SEQ ID NO: 1443172
cucuuuccuagaaaugcuu

SEQ ID NO: 1443174 - RNA, 19 nt, Artificial Sequence
  Description of Artificial Sequence: Synthetic oligonucleotide
  Sense strand starting at position 2680 of SEQ ID NO: 1243809
gacccagcaucguuuauaa

SEQ ID NO: 1443175 - RNA, 19 nt, Artificial Sequence
  Description of Artificial Sequence: Synthetic oligonucleotide
  Antisense strand to SEQ ID NO: 1443174
uuauaaacgaugcuggguc

SEQ ID NO: 1443176 - RNA, 19 nt, Artificial Sequence
  Description of Artificial Sequence: Synthetic oligonucleotide
  Sense strand starting at position 2682 of SEQ ID NO: 1243809
cccagcaucguuuauaacu

SEQ ID NO: 1443177 - RNA, 19 nt, Artificial Sequence
  Description of Artificial Sequence: Synthetic oligonucleotide
  Antisense strand to SEQ ID NO: 1443176
aguuauaaacgaugcuggg

SEQ ID NO: 1443178 - RNA, 19 nt, Artificial Sequence
  Description of Artificial Sequence: Synthetic oligonucleotide
  Sense strand starting at position 3021 of SEQ ID NO: 1243809
aguucuuauauuuguguga

SEQ ID NO: 1443179 - RNA, 19 nt, Artificial Sequence
  Description of Artificial Sequence: Synthetic oligonucleotide
  Antisense strand to SEQ ID NO: 1443178
ucacacaaauauaagaacu

SEQ ID NO: 1443180 - RNA, 19 nt, Artificial Sequence
  Description of Artificial Sequence: Synthetic oligonucleotide
  Sense strand starting at position 3022 of SEQ ID NO: 1243809
guucuuauauuugugugau

SEQ ID NO: 1443181 - RNA, 19 nt, Artificial Sequence
  Description of Artificial Sequence: Synthetic oligonucleotide
  Antisense strand to SEQ ID NO: 1443180
aucacacaaauauaagaac

SEQ ID NO: 1443182 - RNA, 19 nt, Artificial Sequence
  Description of Artificial Sequence: Synthetic oligonucleotide
  Sense strand starting at position 3036 of SEQ ID NO: 1243809
gugauaggucccuggguga

SEQ ID NO: 1443183 - RNA, 19 nt, Artificial Sequence
  Description of Artificial Sequence: Synthetic oligonucleotide
  Antisense strand to SEQ ID NO: 1443182
ucacccagggaccuaucac

SEQ ID NO: 1443184 - RNA, 19 nt, Artificial Sequence
  Description of Artificial Sequence: Synthetic oligonucleotide
  Sense strand starting at position 3226 of SEQ ID NO: 1243809
gauaaauaugcugaaguuu

SEQ ID NO: 1443185 - RNA, 19 nt, Artificial Sequence
  Description of Artificial Sequence: Synthetic oligonucleotide
  Antisense strand to SEQ ID NO: 1443184
aaacuucagcauauuuauc

SEQ ID NO: 1443186 - RNA, 19 nt, Artificial Sequence
  Description of Artificial Sequence: Synthetic oligonucleotide
  Sense strand starting at position 3581 of SEQ ID NO: 1243809
guagcauuuagccgaaagu

SEQ ID NO: 1443187 - RNA, 19 nt, Artificial Sequence
  Description of Artificial Sequence: Synthetic oligonucleotide
  Antisense strand to SEQ ID NO: 1443186
acuuucggcuaaaugcuac

SEQ ID NO: 1443188 - RNA, 19 nt, Artificial Sequence
  Description of Artificial Sequence: Synthetic oligonucleotide
  Sense strand starting at position 3767 of SEQ ID NO: 1243809
cagaguccugagugugaca

SEQ ID NO: 1443189 - RNA, 19 nt, Artificial Sequence
  Description of Artificial Sequence: Synthetic oligonucleotide
  Antisense strand to SEQ ID NO: 1443188
ugucacacucaggacucug

SEQ ID NO: 1443190 - RNA, 19 nt, Artificial Sequence
  Description of Artificial Sequence: Synthetic oligonucleotide
  Sense strand starting at position 3769 of SEQ ID NO: 1243809
gaguccugagugugacauu

SEQ ID NO: 1443191 - RNA, 19 nt, Artificial Sequence
  Description of Artificial Sequence: Synthetic oligonucleotide
  Antisense strand to SEQ ID NO: 1443190
aaugucacacucaggacuc

SEQ ID NO: 1443192 - RNA, 19 nt, Artificial Sequence
  Description of Artificial Sequence: Synthetic oligonucleotide
  Sense strand starting at position 3780 of SEQ ID NO: 1243809
gugacauuguggguucaga

SEQ ID NO: 1443193 - RNA, 19 nt, Artificial Sequence
  Description of Artificial Sequence: Synthetic oligonucleotide
  Antisense strand to SEQ ID NO: 1443192
ucugaacccacaaugucac

SEQ ID NO: 1443194 - RNA, 19 nt, Artificial Sequence
  Description of Artificial Sequence: Synthetic oligonucleotide
  Sense strand starting at position 3917 of SEQ ID NO: 1243809
uacauuugaugcuggagaa

SEQ ID NO: 1443195 - RNA, 19 nt, Artificial Sequence
  Description of Artificial Sequence: Synthetic oligonucleotide
  Antisense strand to SEQ ID NO: 1443194
uucuccagcaucaaaugua

SEQ ID NO: 1443196 - RNA, 19 nt, Artificial Sequence
  Description of Artificial Sequence: Synthetic oligonucleotide
  Sense strand starting at position 3959 of SEQ ID NO: 1243809
cgaccaugccuuuggaauu

SEQ ID NO: 1443197 - RNA, 19 nt, Artificial Sequence
  Description of Artificial Sequence: Synthetic oligonucleotide
  Antisense strand to SEQ ID NO: 1443196
aauuccaaaggcauggucg

SEQ ID NO: 1443198 - RNA, 19 nt, Artificial Sequence
  Description of Artificial Sequence: Synthetic oligonucleotide
  Sense strand starting at position 3972 of SEQ ID NO: 1243809
ggaauucuguccuuucuaa

SEQ ID NO: 1443199 - RNA, 19 nt, Artificial Sequence
  Description of Artificial Sequence: Synthetic oligonucleotide
  Antisense strand to SEQ ID NO: 1443198
uuagaaaggacagaauucc

SEQ ID NO: 1443200 - RNA, 19 nt, Artificial Sequence
  Description of Artificial Sequence: Synthetic oligonucleotide
  Sense strand starting at position 599 of SEQ ID NO: 1243810
ggccucucuugguuaggaa

SEQ ID NO: 1443201 - RNA, 19 nt, Artificial Sequence
  Description of Artificial Sequence: Synthetic oligonucleotide
  Antisense strand to SEQ ID NO: 1443200
uuccuaaccaagagaggcc

SEQ ID NO: 1443202 - RNA, 19 nt, Artificial Sequence
  Description of Artificial Sequence: Synthetic oligonucleotide
  Sense strand starting at position 745 of SEQ ID NO: 1243810
cugccuaucuccgucuaga

SEQ ID NO: 1443203 - RNA, 19 nt, Artificial Sequence
  Description of Artificial Sequence: Synthetic oligonucleotide
  Antisense strand to SEQ ID NO: 1443202
ucuagacggagauaggcag

SEQ ID NO: 1443204 - RNA, 19 nt, Artificial Sequence
  Description of Artificial Sequence: Synthetic oligonucleotide
  Sense strand starting at position 1098 of SEQ ID NO: 1243810
guggaaucugucgggaggu

SEQ ID NO: 1443205 - RNA, 19 nt, Artificial Sequence
  Description of Artificial Sequence: Synthetic oligonucleotide
  Antisense strand to SEQ ID NO: 1443204
accucccgacagauuccac

SEQ ID NO: 1443206 - RNA, 19 nt, Artificial Sequence
  Description of Artificial Sequence: Synthetic oligonucleotide
  Sense strand starting at position 1100 of SEQ ID NO: 1243810
ggaaucugucgggaggugu

SEQ ID NO: 1443207 - RNA, 19 nt, Artificial Sequence
  Description of Artificial Sequence: Synthetic oligonucleotide
  Antisense strand to SEQ ID NO: 1443206
acaccucccgacagauucc

SEQ ID NO: 1443208 - RNA, 19 nt, Artificial Sequence
  Description of Artificial Sequence: Synthetic oligonucleotide
  Sense strand starting at position 1168 of SEQ ID NO: 1243810
agagaauaagcccgaguca

SEQ ID NO: 1443209 - RNA, 19 nt, Artificial Sequence
  Description of Artificial Sequence: Synthetic oligonucleotide
  Antisense strand to SEQ ID NO: 1443208
ugacucgggcuuauucucu

SEQ ID NO: 1443210 - RNA, 19 nt, Artificial Sequence
  Description of Artificial Sequence: Synthetic oligonucleotide
  Sense strand starting at position 1207 of SEQ ID NO: 1243810
ggcagcuucugaucccuga

SEQ ID NO: 1443211 - RNA, 19 nt, Artificial Sequence
  Description of Artificial Sequence: Synthetic oligonucleotide
  Antisense strand to SEQ ID NO: 1443210
ucagggaucagaagcugcc

SEQ ID NO: 1443212 - RNA, 19 nt, Artificial Sequence
  Description of Artificial Sequence: Synthetic oligonucleotide
  Sense strand starting at position 1287 of SEQ ID NO: 1243810
agagaaaugucucuuuguu

SEQ ID NO: 1443213 - RNA, 19 nt, Artificial Sequence
  Description of Artificial Sequence: Synthetic oligonucleotide
  Antisense strand to SEQ ID NO: 1443212
aacaaagagacauuucucu

SEQ ID NO: 1443214 - RNA, 19 nt, Artificial Sequence
  Description of Artificial Sequence: Synthetic oligonucleotide
  Sense strand starting at position 1297 of SEQ ID NO: 1243810
cucuuuguuucugucuaua

SEQ ID NO: 1443215 - RNA, 19 nt, Artificial Sequence
  Description of Artificial Sequence: Synthetic oligonucleotide
  Antisense strand to SEQ ID NO: 1443214
uauagacagaaacaaagag

SEQ ID NO: 1443216 - RNA, 19 nt, Artificial Sequence
  Description of Artificial Sequence: Synthetic oligonucleotide
  Sense strand starting at position 1299 of SEQ ID NO: 1243810
cuuuguuucugucuauauu

SEQ ID NO: 1443217 - RNA, 19 nt, Artificial Sequence
  Description of Artificial Sequence: Synthetic oligonucleotide
  Antisense strand to SEQ ID NO: 1443216
aauauagacagaaacaaag

SEQ ID NO: 1443218 - RNA, 19 nt, Artificial Sequence
  Description of Artificial Sequence: Synthetic oligonucleotide
  Sense strand starting at position 1343 of SEQ ID NO: 1243810
uggguucucuguuucucua

SEQ ID NO: 1443219 - RNA, 19 nt, Artificial Sequence
  Description of Artificial Sequence: Synthetic oligonucleotide
  Antisense strand to SEQ ID NO: 1443218
uagagaaacagagaaccca

SEQ ID NO: 1443220 - RNA, 19 nt, Artificial Sequence
  Description of Artificial Sequence: Synthetic oligonucleotide
  Sense strand starting at position 1350 of SEQ ID NO: 1243810
ucuguuucucuaugugauc

SEQ ID NO: 1443221 - RNA, 19 nt, Artificial Sequence
  Description of Artificial Sequence: Synthetic oligonucleotide
  Antisense strand to SEQ ID NO: 1443220
gaucacauagagaaacaga

SEQ ID NO: 1443222 - RNA, 19 nt, Artificial Sequence
  Description of Artificial Sequence: Synthetic oligonucleotide
  Sense strand starting at position 1355 of SEQ ID NO: 1243810
uucucuaugugauccagau

SEQ ID NO: 1443223 - RNA, 19 nt, Artificial Sequence
  Description of Artificial Sequence: Synthetic oligonucleotide
  Antisense strand to SEQ ID NO: 1443222
aucuggaucacauagagaa

SEQ ID NO: 1443224 - RNA, 19 nt, Artificial Sequence
  Description of Artificial Sequence: Synthetic oligonucleotide
  Sense strand starting at position 1359 of SEQ ID NO: 1243810
cuaugugauccagauaccu

SEQ ID NO: 1443225 - RNA, 19 nt, Artificial Sequence
  Description of Artificial Sequence: Synthetic oligonucleotide
  Antisense strand to SEQ ID NO: 1443224
agguaucuggaucacauag

SEQ ID NO: 1443226 - RNA, 19 nt, Artificial Sequence
  Description of Artificial Sequence: Synthetic oligonucleotide
  Sense strand starting at position 1453 of SEQ ID NO: 1243810
cuggacaucucucauaaga

SEQ ID NO: 1443227 - RNA, 19 nt, Artificial Sequence
  Description of Artificial Sequence: Synthetic oligonucleotide
  Antisense strand to SEQ ID NO: 1443226
ucuuaugagagauguccag

SEQ ID NO: 1443228 - RNA, 19 nt, Artificial Sequence
  Description of Artificial Sequence: Synthetic oligonucleotide
  Sense strand starting at position 1715 of SEQ ID NO: 1243810
guguuuggcagcgcuuuaa

SEQ ID NO: 1443229 - RNA, 19 nt, Artificial Sequence
  Description of Artificial Sequence: Synthetic oligonucleotide
  Antisense strand to SEQ ID NO: 1443228
uuaaagcgcugccaaacac

SEQ ID NO: 1443230 - RNA, 19 nt, Artificial Sequence
  Description of Artificial Sequence: Synthetic oligonucleotide
  Sense strand starting at position 1779 of SEQ ID NO: 1243810
acugauguggucuaaccau

SEQ ID NO: 1443231 - RNA, 19 nt, Artificial Sequence
  Description of Artificial Sequence: Synthetic oligonucleotide
  Antisense strand to SEQ ID NO: 1443230
augguuagaccacaucagu

SEQ ID NO: 1443232 - RNA, 19 nt, Artificial Sequence
  Description of Artificial Sequence: Synthetic oligonucleotide
  Sense strand starting at position 2104 of SEQ ID NO: 1243810
cugaguguugcacaacuca

SEQ ID NO: 1443233 - RNA, 19 nt, Artificial Sequence
  Description of Artificial Sequence: Synthetic oligonucleotide
  Antisense strand to SEQ ID NO: 1443232
ugaguugugcaacacucag

SEQ ID NO: 1443234 - RNA, 19 nt, Artificial Sequence
  Description of Artificial Sequence: Synthetic oligonucleotide
  Sense strand starting at position 2224 of SEQ ID NO: 1243810
ggguuucuccugugagugu

SEQ ID NO: 1443235 - RNA, 19 nt, Artificial Sequence
  Description of Artificial Sequence: Synthetic oligonucleotide
  Antisense strand to SEQ ID NO: 1443234
acacucacaggagaaaccc

SEQ ID NO: 1443236 - RNA, 19 nt, Artificial Sequence
  Description of Artificial Sequence: Synthetic oligonucleotide
  Sense strand starting at position 2255 of SEQ ID NO: 1243810
gugucaacccaaggcuauu

SEQ ID NO: 1443237 - RNA, 19 nt, Artificial Sequence
  Description of Artificial Sequence: Synthetic oligonucleotide
  Antisense strand to SEQ ID NO: 1443236
aauagccuuggguugacac

SEQ ID NO: 1443238 - RNA, 19 nt, Artificial Sequence
  Description of Artificial Sequence: Synthetic oligonucleotide
  Sense strand starting at position 2266 of SEQ ID NO: 1243810
aggcuauucuuaguugauc

SEQ ID NO: 1443239 - RNA, 19 nt, Artificial Sequence
  Description of Artificial Sequence: Synthetic oligonucleotide
  Antisense strand to SEQ ID NO: 1443238
gaucaacuaagaauagccu

SEQ ID NO: 1443240 - RNA, 19 nt, Artificial Sequence
  Description of Artificial Sequence: Synthetic oligonucleotide
  Sense strand starting at position 2274 of SEQ ID NO: 1243810
cuuaguugaucccuucuca

SEQ ID NO: 1443241 - RNA, 19 nt, Artificial Sequence
  Description of Artificial Sequence: Synthetic oligonucleotide
  Antisense strand to SEQ ID NO: 1443240
ugagaagggaucaacuaag

SEQ ID NO: 1443242 - RNA, 19 nt, Artificial Sequence
  Description of Artificial Sequence: Synthetic oligonucleotide
  Sense strand starting at position 2278 of SEQ ID NO: 1243810
guugaucccuucucauaag

SEQ ID NO: 1443243 - RNA, 19 nt, Artificial Sequence
  Description of Artificial Sequence: Synthetic oligonucleotide
  Antisense strand to SEQ ID NO: 1443242
cuuaugagaagggaucaac

SEQ ID NO: 1443244 - RNA, 19 nt, Artificial Sequence
  Description of Artificial Sequence: Synthetic oligonucleotide
  Sense strand starting at position 2607 of SEQ ID NO: 1243810
aaagaauuggucuaugcau

SEQ ID NO: 1443245 - RNA, 19 nt, Artificial Sequence
  Description of Artificial Sequence: Synthetic oligonucleotide
  Antisense strand to SEQ ID NO: 1443244
augcauagaccaauucuuu

SEQ ID NO: 1443246 - RNA, 19 nt, Artificial Sequence
  Description of Artificial Sequence: Synthetic oligonucleotide
  Sense strand starting at position 2609 of SEQ ID NO: 1243810
agaauuggucuaugcauga

SEQ ID NO: 1443247 - RNA, 19 nt, Artificial Sequence
  Description of Artificial Sequence: Synthetic oligonucleotide
  Antisense strand to SEQ ID NO: 1443246
ucaugcauagaccaauucu

SEQ ID NO: 1443248 - RNA, 19 nt, Artificial Sequence
  Description of Artificial Sequence: Synthetic oligonucleotide
  Sense strand starting at position 2648 of SEQ ID NO: 1243810
cccacagagcuguaauucu

SEQ ID NO: 1443249 - RNA, 19 nt, Artificial Sequence
  Description of Artificial Sequence: Synthetic oligonucleotide
  Antisense strand to SEQ ID NO: 1443248
agaauuacagcucuguggg

SEQ ID NO: 1443250 - RNA, 19 nt, Artificial Sequence
  Description of Artificial Sequence: Synthetic oligonucleotide
  Sense strand starting at position 2790 of SEQ ID NO: 1243810
ggucacguuucagucauuu

SEQ ID NO: 1443251 - RNA, 19 nt, Artificial Sequence
  Description of Artificial Sequence: Synthetic oligonucleotide
  Antisense strand to SEQ ID NO: 1443250
aaaugacugaaacgugacc

SEQ ID NO: 1443252 - RNA, 19 nt, Artificial Sequence
  Description of Artificial Sequence: Synthetic oligonucleotide
  Sense strand starting at position 2814 of SEQ ID NO: 1243810
uuuauuagucucggaguga

SEQ ID NO: 1443253 - RNA, 19 nt, Artificial Sequence
  Description of Artificial Sequence: Synthetic oligonucleotide
  Antisense strand to SEQ ID NO: 1443252
ucacuccgagacuaauaaa

SEQ ID NO: 1443254 - RNA, 19 nt, Artificial Sequence
  Description of Artificial Sequence: Synthetic oligonucleotide
  Sense strand starting at position 2882 of SEQ ID NO: 1243810
ggugggugucaguauguca

SEQ ID NO: 1443255 - RNA, 19 nt, Artificial Sequence
  Description of Artificial Sequence: Synthetic oligonucleotide
  Antisense strand to SEQ ID NO: 1443254
ugacauacugacacccacc

SEQ ID NO: 1443256 - RNA, 19 nt, Artificial Sequence
  Description of Artificial Sequence: Synthetic oligonucleotide
  Sense strand starting at position 2906 of SEQ ID NO: 1243810
cuagaaauauguguagcca

SEQ ID NO: 1443257 - RNA, 19 nt, Artificial Sequence
  Description of Artificial Sequence: Synthetic oligonucleotide
  Antisense strand to SEQ ID NO: 1443256
uggcuacacauauuucuag

SEQ ID NO: 1443258 - RNA, 19 nt, Artificial Sequence
  Description of Artificial Sequence: Synthetic oligonucleotide
  Sense strand starting at position 2907 of SEQ ID NO: 1243810
uagaaauauguguagccau

SEQ ID NO: 1443259 - RNA, 19 nt, Artificial Sequence
  Description of Artificial Sequence: Synthetic oligonucleotide
  Antisense strand to SEQ ID NO: 1443258
auggcuacacauauuucua

SEQ ID NO: 1443260 - RNA, 19 nt, Artificial Sequence
  Description of Artificial Sequence: Synthetic oligonucleotide
  Sense strand starting at position 2914 of SEQ ID NO: 1243810
auguguagccauuaaccua

SEQ ID NO: 1443261 - RNA, 19 nt, Artificial Sequence
  Description of Artificial Sequence: Synthetic oligonucleotide
  Antisense strand to SEQ ID NO: 1443260
uagguuaauggcuacacau

SEQ ID NO: 1443262 - RNA, 19 nt, Artificial Sequence
  Description of Artificial Sequence: Synthetic oligonucleotide
  Sense strand starting at position 3050 of SEQ ID NO: 1243810
uuucucuaucagggaauga

SEQ ID NO: 1443263 - RNA, 19 nt, Artificial Sequence
  Description of Artificial Sequence: Synthetic oligonucleotide
  Antisense strand to SEQ ID NO: 1443262
ucauucccugauagagaaa

SEQ ID NO: 1443264 - RNA, 19 nt, Artificial Sequence
  Description of Artificial Sequence: Synthetic oligonucleotide
  Sense strand starting at position 3091 of SEQ ID NO: 1243810
auuauuaagucucuaacgu

SEQ ID NO: 1443265 - RNA, 19 nt, Artificial Sequence
  Description of Artificial Sequence: Synthetic oligonucleotide
  Antisense strand to SEQ ID NO: 1443264
acguuagagacuuaauaau

SEQ ID NO: 1443266 - RNA, 19 nt, Artificial Sequence
  Description of Artificial Sequence: Synthetic oligonucleotide
  Sense strand starting at position 3092 of SEQ ID NO: 1243810
uuauuaagucucuaacgug

SEQ ID NO: 1443267 - RNA, 19 nt, Artificial Sequence
  Description of Artificial Sequence: Synthetic oligonucleotide
  Antisense strand to SEQ ID NO: 1443266
cacguuagagacuuaauaa

SEQ ID NO: 1443268 - RNA, 19 nt, Artificial Sequence
  Description of Artificial Sequence: Synthetic oligonucleotide
  Sense strand starting at position 3098 of SEQ ID NO: 1243810
agucucuaacgugaaugaa

SEQ ID NO: 1443269 - RNA, 19 nt, Artificial Sequence
  Description of Artificial Sequence: Synthetic oligonucleotide
  Antisense strand to SEQ ID NO: 1443268
uucauucacguuagagacu

SEQ ID NO: 1443270 - RNA, 19 nt, Artificial Sequence
  Description of Artificial Sequence: Synthetic oligonucleotide
  Sense strand starting at position 3106 of SEQ ID NO: 1243810
acgugaaugaaguggcaua

SEQ ID NO: 1443271 - RNA, 19 nt, Artificial Sequence
  Description of Artificial Sequence: Synthetic oligonucleotide
  Antisense strand to SEQ ID NO: 1443270
uaugccacuucauucacgu

SEQ ID NO: 1443272 - RNA, 19 nt, Artificial Sequence
  Description of Artificial Sequence: Synthetic oligonucleotide
  Sense strand starting at position 3107 of SEQ ID NO: 1243810
cgugaaugaaguggcauaa

SEQ ID NO: 1443273 - RNA, 19 nt, Artificial Sequence
  Description of Artificial Sequence: Synthetic oligonucleotide
  Antisense strand to SEQ ID NO: 1443272
uuaugccacuucauucacg

SEQ ID NO: 1443274 - RNA, 19 nt, Artificial Sequence
  Description of Artificial Sequence: Synthetic oligonucleotide
  Sense strand starting at position 3277 of SEQ ID NO: 1243810
aaugaauagugcuuagauc

SEQ ID NO: 1443275 - RNA, 19 nt, Artificial Sequence
  Description of Artificial Sequence: Synthetic oligonucleotide
  Antisense strand to SEQ ID NO: 1443274
gaucuaagcacuauucauu

SEQ ID NO: 1443276 - RNA, 19 nt, Artificial Sequence
  Description of Artificial Sequence: Synthetic oligonucleotide
  Sense strand starting at position 3286 of SEQ ID NO: 1243810
ugcuuagauccauggguga

SEQ ID NO: 1443277 - RNA, 19 nt, Artificial Sequence
  Description of Artificial Sequence: Synthetic oligonucleotide
  Antisense strand to SEQ ID NO: 1443276
ucacccauggaucuaagca

SEQ ID NO: 1443278 - RNA, 19 nt, Artificial Sequence
  Description of Artificial Sequence: Synthetic oligonucleotide
  Sense strand starting at position 3288 of SEQ ID NO: 1243810
cuuagauccaugggugauu

SEQ ID NO: 1443279 - RNA, 19 nt, Artificial Sequence
  Description of Artificial Sequence: Synthetic oligonucleotide
  Antisense strand to SEQ ID NO: 1443278
aaucacccauggaucuaag

SEQ ID NO: 1443280 - RNA, 19 nt, Artificial Sequence
  Description of Artificial Sequence: Synthetic oligonucleotide
  Sense strand starting at position 609 of SEQ ID NO: 1243811
ggccucucuugguuaggaa

SEQ ID NO: 1443281 - RNA, 19 nt, Artificial Sequence
  Description of Artificial Sequence: Synthetic oligonucleotide
  Antisense strand to SEQ ID NO: 1443280
uuccuaaccaagagaggcc

SEQ ID NO: 1443282 - RNA, 19 nt, Artificial Sequence
  Description of Artificial Sequence: Synthetic oligonucleotide
  Sense strand starting at position 755 of SEQ ID NO: 1243811
cugccuaucuccgucuaga

SEQ ID NO: 1443283 - RNA, 19 nt, Artificial Sequence
  Description of Artificial Sequence: Synthetic oligonucleotide
  Antisense strand to SEQ ID NO: 1443282
ucuagacggagauaggcag

SEQ ID NO: 1443284 - RNA, 19 nt, Artificial Sequence
  Description of Artificial Sequence: Synthetic oligonucleotide
  Sense strand starting at position 1108 of SEQ ID NO: 1243811
guggaaucugucgggaggu

SEQ ID NO: 1443285 - RNA, 19 nt, Artificial Sequence
  Description of Artificial Sequence: Synthetic oligonucleotide
  Antisense strand to SEQ ID NO: 1443284
accucccgacagauuccac

SEQ ID NO: 1443286 - RNA, 19 nt, Artificial Sequence
  Description of Artificial Sequence: Synthetic oligonucleotide
  Sense strand starting at position 1110 of SEQ ID NO: 1243811
ggaaucugucgggaggugu

SEQ ID NO: 1443287 - RNA, 19 nt, Artificial Sequence
  Description of Artificial Sequence: Synthetic oligonucleotide
  Antisense strand to SEQ ID NO: 1443286
acaccucccgacagauucc

SEQ ID NO: 1443288 - RNA, 19 nt, Artificial Sequence
  Description of Artificial Sequence: Synthetic oligonucleotide
  Sense strand starting at position 1178 of SEQ ID NO: 1243811
agagaauaagcccgaguca

SEQ ID NO: 1443289 - RNA, 19 nt, Artificial Sequence
  Description of Artificial Sequence: Synthetic oligonucleotide
  Antisense strand to SEQ ID NO: 1443288
ugacucgggcuuauucucu

SEQ ID NO: 1443290 - RNA, 19 nt, Artificial Sequence
  Description of Artificial Sequence: Synthetic oligonucleotide
  Sense strand starting at position 1217 of SEQ ID NO: 1243811
ggcagcuucugaucccuga

SEQ ID NO: 1443291 - RNA, 19 nt, Artificial Sequence
  Description of Artificial Sequence: Synthetic oligonucleotide
  Antisense strand to SEQ ID NO: 1443290
ucagggaucagaagcugcc

SEQ ID NO: 1443292 - RNA, 19 nt, Artificial Sequence
  Description of Artificial Sequence: Synthetic oligonucleotide
  Sense strand starting at position 1297 of SEQ ID NO: 1243811
agagaaaugucucuuuguu

SEQ ID NO: 1443293 - RNA, 19 nt, Artificial Sequence
  Description of Artificial Sequence: Synthetic oligonucleotide
  Antisense strand to SEQ ID NO: 1443292
aacaaagagacauuucucu

SEQ ID NO: 1443294 - RNA, 19 nt, Artificial Sequence
  Description of Artificial Sequence: Synthetic oligonucleotide
  Sense strand starting at position 1307 of SEQ ID NO: 1243811
cucuuuguuucugucuaua

SEQ ID NO: 1443295 - RNA, 19 nt, Artificial Sequence
  Description of Artificial Sequence: Synthetic oligonucleotide
  Antisense strand to SEQ ID NO: 1443294
uauagacagaaacaaagag

SEQ ID NO: 1443296 - RNA, 19 nt, Artificial Sequence
  Description of Artificial Sequence: Synthetic oligonucleotide
  Sense strand starting at position 1309 of SEQ ID NO: 1243811
cuuuguuucugucuauauu

SEQ ID NO: 1443297 - RNA, 19 nt, Artificial Sequence
  Description of Artificial Sequence: Synthetic oligonucleotide
  Antisense strand to SEQ ID NO: 1443296
aauauagacagaaacaaag

SEQ ID NO: 1443298 - RNA, 19 nt, Artificial Sequence
  Description of Artificial Sequence: Synthetic oligonucleotide
  Sense strand starting at position 1353 of SEQ ID NO: 1243811
uggguucucuguuucucua

SEQ ID NO: 1443299 - RNA, 19 nt, Artificial Sequence
  Description of Artificial Sequence: Synthetic oligonucleotide
  Antisense strand to SEQ ID NO: 1443298
uagagaaacagagaaccca

SEQ ID NO: 1443300 - RNA, 19 nt, Artificial Sequence
  Description of Artificial Sequence: Synthetic oligonucleotide
  Sense strand starting at position 1360 of SEQ ID NO: 1243811
ucuguuucucuaugugauc

SEQ ID NO: 1443301 - RNA, 19 nt, Artificial Sequence
  Description of Artificial Sequence: Synthetic oligonucleotide
  Antisense strand to SEQ ID NO: 1443300
gaucacauagagaaacaga

SEQ ID NO: 1443302 - RNA, 19 nt, Artificial Sequence
  Description of Artificial Sequence: Synthetic oligonucleotide
  Sense strand starting at position 1365 of SEQ ID NO: 1243811
uucucuaugugauccagau

SEQ ID NO: 1443303 - RNA, 19 nt, Artificial Sequence
  Description of Artificial Sequence: Synthetic oligonucleotide
  Antisense strand to SEQ ID NO: 1443302
aucuggaucacauagagaa

SEQ ID NO: 1443304 - RNA, 19 nt, Artificial Sequence
  Description of Artificial Sequence: Synthetic oligonucleotide
  Sense strand starting at position 1369 of SEQ ID NO: 1243811
cuaugugauccagauaccu

SEQ ID NO: 1443305 - RNA, 19 nt, Artificial Sequence
  Description of Artificial Sequence: Synthetic oligonucleotide
  Antisense strand to SEQ ID NO: 1443304
agguaucuggaucacauag

SEQ ID NO: 1443306 - RNA, 19 nt, Artificial Sequence
  Description of Artificial Sequence: Synthetic oligonucleotide
  Sense strand starting at position 1463 of SEQ ID NO: 1243811
cuggacaucucucauaaga

SEQ ID NO: 1443307 - RNA, 19 nt, Artificial Sequence
  Description of Artificial Sequence: Synthetic oligonucleotide
  Antisense strand to SEQ ID NO: 1443306
ucuuaugagagauguccag

SEQ ID NO: 1443308 - RNA, 19 nt, Artificial Sequence
  Description of Artificial Sequence: Synthetic oligonucleotide
  Sense strand starting at position 1725 of SEQ ID NO: 1243811
guguuuggcagcgcuuuaa

SEQ ID NO: 1443309 - RNA, 19 nt, Artificial Sequence
  Description of Artificial Sequence: Synthetic oligonucleotide
  Antisense strand to SEQ ID NO: 1443308
uuaaagcgcugccaaacac

SEQ ID NO: 1443310 - RNA, 19 nt, Artificial Sequence
  Description of Artificial Sequence: Synthetic oligonucleotide
  Sense strand starting at position 1789 of SEQ ID NO: 1243811
acugauguggucuaaccau

SEQ ID NO: 1443311 - RNA, 19 nt, Artificial Sequence
  Description of Artificial Sequence: Synthetic oligonucleotide
  Antisense strand to SEQ ID NO: 1443310
augguuagaccacaucagu

SEQ ID NO: 1443312 - RNA, 19 nt, Artificial Sequence
  Description of Artificial Sequence: Synthetic oligonucleotide
  Sense strand starting at position 2114 of SEQ ID NO: 1243811
cugaguguugcacaacuca

SEQ ID NO: 1443313 - RNA, 19 nt, Artificial Sequence
  Description of Artificial Sequence: Synthetic oligonucleotide
  Antisense strand to SEQ ID NO: 1443312
ugaguugugcaacacucag

SEQ ID NO: 1443314 - RNA, 19 nt, Artificial Sequence
  Description of Artificial Sequence: Synthetic oligonucleotide
  Sense strand starting at position 2234 of SEQ ID NO: 1243811
ggguuucuccugugagugu

SEQ ID NO: 1443315 - RNA, 19 nt, Artificial Sequence
  Description of Artificial Sequence: Synthetic oligonucleotide
  Antisense strand to SEQ ID NO: 1443314
acacucacaggagaaaccc

SEQ ID NO: 1443316 - RNA, 19 nt, Artificial Sequence
  Description of Artificial Sequence: Synthetic oligonucleotide
  Sense strand starting at position 2265 of SEQ ID NO: 1243811
gugucaacccaaggcuauu

SEQ ID NO: 1443317 - RNA, 19 nt, Artificial Sequence
  Description of Artificial Sequence: Synthetic oligonucleotide
  Antisense strand to SEQ ID NO: 1443316
aauagccuuggguugacac

SEQ ID NO: 1443318 - RNA, 19 nt, Artificial Sequence
  Description of Artificial Sequence: Synthetic oligonucleotide
  Sense strand starting at position 2276 of SEQ ID NO: 1243811
aggcuauucuuaguugauc

SEQ ID NO: 1443319 - RNA, 19 nt, Artificial Sequence
  Description of Artificial Sequence: Synthetic oligonucleotide
  Antisense strand to SEQ ID NO: 1443318
gaucaacuaagaauagccu

SEQ ID NO: 1443320 - RNA, 19 nt, Artificial Sequence
  Description of Artificial Sequence: Synthetic oligonucleotide
  Sense strand starting at position 2284 of SEQ ID NO: 1243811
cuuaguugaucccuucuca

SEQ ID NO: 1443321 - RNA, 19 nt, Artificial Sequence
  Description of Artificial Sequence: Synthetic oligonucleotide
  Antisense strand to SEQ ID NO: 1443320
ugagaagggaucaacuaag

SEQ ID NO: 1443322 - RNA, 19 nt, Artificial Sequence
  Description of Artificial Sequence: Synthetic oligonucleotide
  Sense strand starting at position 2288 of SEQ ID NO: 1243811
guugaucccuucucauaag

SEQ ID NO: 1443323 - RNA, 19 nt, Artificial Sequence
  Description of Artificial Sequence: Synthetic oligonucleotide
  Antisense strand to SEQ ID NO: 1443322
cuuaugagaagggaucaac

SEQ ID NO: 1443324 - RNA, 19 nt, Artificial Sequence
  Description of Artificial Sequence: Synthetic oligonucleotide
  Sense strand starting at position 2617 of SEQ ID NO: 1243811
aaagaauuggucuaugcau

SEQ ID NO: 1443325 - RNA, 19 nt, Artificial Sequence
  Description of Artificial Sequence: Synthetic oligonucleotide
  Antisense strand to SEQ ID NO: 1443324
augcauagaccaauucuuu

SEQ ID NO: 1443326 - RNA, 19 nt, Artificial Sequence
  Description of Artificial Sequence: Synthetic oligonucleotide
  Sense strand starting at position 2619 of SEQ ID NO: 1243811
agaauuggucuaugcauga

SEQ ID NO: 1443327 - RNA, 19 nt, Artificial Sequence
  Description of Artificial Sequence: Synthetic oligonucleotide
  Antisense strand to SEQ ID NO: 1443326
ucaugcauagaccaauucu

SEQ ID NO: 1443328 - RNA, 19 nt, Artificial Sequence
  Description of Artificial Sequence: Synthetic oligonucleotide
  Sense strand starting at position 2658 of SEQ ID NO: 1243811
cccacagagcuguaauucu

SEQ ID NO: 1443329 - RNA, 19 nt, Artificial Sequence
  Description of Artificial Sequence: Synthetic oligonucleotide
  Antisense strand to SEQ ID NO: 1443328
agaauuacagcucuguggg

SEQ ID NO: 1443330 - RNA, 19 nt, Artificial Sequence
  Description of Artificial Sequence: Synthetic oligonucleotide
  Sense strand starting at position 2800 of SEQ ID NO: 1243811
ggucacguuucagucauuu

SEQ ID NO: 1443331 - RNA, 19 nt, Artificial Sequence
  Description of Artificial Sequence: Synthetic oligonucleotide
  Antisense strand to SEQ ID NO: 1443330
aaaugacugaaacgugacc

SEQ ID NO: 1443332 - RNA, 19 nt, Artificial Sequence
  Description of Artificial Sequence: Synthetic oligonucleotide
  Sense strand starting at position 2824 of SEQ ID NO: 1243811
uuuauuagucucggaguga

SEQ ID NO: 1443333 - RNA, 19 nt, Artificial Sequence
  Description of Artificial Sequence: Synthetic oligonucleotide
  Antisense strand to SEQ ID NO: 1443332
ucacuccgagacuaauaaa

SEQ ID NO: 1443334 - RNA, 19 nt, Artificial Sequence
  Description of Artificial Sequence: Synthetic oligonucleotide
  Sense strand starting at position 2892 of SEQ ID NO: 1243811
ggugggugucaguauguca

SEQ ID NO: 1443335 - RNA, 19 nt, Artificial Sequence
  Description of Artificial Sequence: Synthetic oligonucleotide
  Antisense strand to SEQ ID NO: 1443334
ugacauacugacacccacc

SEQ ID NO: 1443336 - RNA, 19 nt, Artificial Sequence
  Description of Artificial Sequence: Synthetic oligonucleotide
  Sense strand starting at position 2916 of SEQ ID NO: 1243811
cuagaaauauguguagcca

SEQ ID NO: 1443337 - RNA, 19 nt, Artificial Sequence
  Description of Artificial Sequence: Synthetic oligonucleotide
  Antisense strand to SEQ ID NO: 1443336
uggcuacacauauuucuag

SEQ ID NO: 1443338 - RNA, 19 nt, Artificial Sequence
  Description of Artificial Sequence: Synthetic oligonucleotide
  Sense strand starting at position 2917 of SEQ ID NO: 1243811
uagaaauauguguagccau

SEQ ID NO: 1443339 - RNA, 19 nt, Artificial Sequence
  Description of Artificial Sequence: Synthetic oligonucleotide
  Antisense strand to SEQ ID NO: 1443338
auggcuacacauauuucua

SEQ ID NO: 1443340 - RNA, 19 nt, Artificial Sequence
  Description of Artificial Sequence: Synthetic oligonucleotide
  Sense strand starting at position 2924 of SEQ ID NO: 1243811
auguguagccauuaaccua

SEQ ID NO: 1443341 - RNA, 19 nt, Artificial Sequence
  Description of Artificial Sequence: Synthetic oligonucleotide
  Antisense strand to SEQ ID NO: 1443340
uagguuaauggcuacacau

SEQ ID NO: 1443342 - RNA, 19 nt, Artificial Sequence
  Description of Artificial Sequence: Synthetic oligonucleotide
  Sense strand starting at position 3060 of SEQ ID NO: 1243811
uuucucuaucagggaauga

SEQ ID NO: 1443343 - RNA, 19 nt, Artificial Sequence
  Description of Artificial Sequence: Synthetic oligonucleotide
  Antisense strand to SEQ ID NO: 1443342
ucauucccugauagagaaa

SEQ ID NO: 1443344 - RNA, 19 nt, Artificial Sequence
  Description of Artificial Sequence: Synthetic oligonucleotide
  Sense strand starting at position 3101 of SEQ ID NO: 1243811
auuauuaagucucuaacgu

SEQ ID NO: 1443345 - RNA, 19 nt, Artificial Sequence
  Description of Artificial Sequence: Synthetic oligonucleotide
  Antisense strand to SEQ ID NO: 1443344
acguuagagacuuaauaau

SEQ ID NO: 1443346 - RNA, 19 nt, Artificial Sequence
  Description of Artificial Sequence: Synthetic oligonucleotide
  Sense strand starting at position 3102 of SEQ ID NO: 1243811
uuauuaagucucuaacgug

SEQ ID NO: 1443347 - RNA, 19 nt, Artificial Sequence
  Description of Artificial Sequence: Synthetic oligonucleotide
  Antisense strand to SEQ ID NO: 1443346
cacguuagagacuuaauaa

SEQ ID NO: 1443348 - RNA, 19 nt, Artificial Sequence
  Description of Artificial Sequence: Synthetic oligonucleotide
  Sense strand starting at position 3108 of SEQ ID NO: 1243811
agucucuaacgugaaugaa

SEQ ID NO: 1443349 - RNA, 19 nt, Artificial Sequence
  Description of Artificial Sequence: Synthetic oligonucleotide
  Antisense strand to SEQ ID NO: 1443348
uucauucacguuagagacu

SEQ ID NO: 1443350 - RNA, 19 nt, Artificial Sequence
  Description of Artificial Sequence: Synthetic oligonucleotide
  Sense strand starting at position 3116 of SEQ ID NO: 1243811
acgugaaugaaguggcaua

SEQ ID NO: 1443351 - RNA, 19 nt, Artificial Sequence
  Description of Artificial Sequence: Synthetic oligonucleotide
  Antisense strand to SEQ ID NO: 1443350
uaugccacuucauucacgu

SEQ ID NO: 1443352 - RNA, 19 nt, Artificial Sequence
  Description of Artificial Sequence: Synthetic oligonucleotide
  Sense strand starting at position 3117 of SEQ ID NO: 1243811
cgugaaugaaguggcauaa

SEQ ID NO: 1443353 - RNA, 19 nt, Artificial Sequence
  Description of Artificial Sequence: Synthetic oligonucleotide
  Antisense strand to SEQ ID NO: 1443352
uuaugccacuucauucacg

SEQ ID NO: 1443354 - RNA, 19 nt, Artificial Sequence
  Description of Artificial Sequence: Synthetic oligonucleotide
  Sense strand starting at position 3287 of SEQ ID NO: 1243811
aaugaauagugcuuagauc

SEQ ID NO: 1443355 - RNA, 19 nt, Artificial Sequence
  Description of Artificial Sequence: Synthetic oligonucleotide
  Antisense strand to SEQ ID NO: 1443354
gaucuaagcacuauucauu

SEQ ID NO: 1443356 - RNA, 19 nt, Artificial Sequence
  Description of Artificial Sequence: Synthetic oligonucleotide
  Sense strand starting at position 3296 of SEQ ID NO: 1243811
ugcuuagauccauggguga

SEQ ID NO: 1443357 - RNA, 19 nt, Artificial Sequence
  Description of Artificial Sequence: Synthetic oligonucleotide
  Antisense strand to SEQ ID NO: 1443356
ucacccauggaucuaagca

SEQ ID NO: 1443358 - RNA, 19 nt, Artificial Sequence
  Description of Artificial Sequence: Synthetic oligonucleotide
  Sense strand starting at position 3298 of SEQ ID NO: 1243811
cuuagauccaugggugauu

SEQ ID NO: 1443359 - RNA, 19 nt, Artificial Sequence
  Description of Artificial Sequence: Synthetic oligonucleotide
  Antisense strand to SEQ ID NO: 1443358
aaucacccauggaucuaag

SEQ ID NO: 1443360 - RNA, 19 nt, Artificial Sequence
  Description of Artificial Sequence: Synthetic oligonucleotide
  Sense strand starting at position 24 of SEQ ID NO: 1243812
gcuuuaguagaccaugagu

SEQ ID NO: 1443361 - RNA, 19 nt, Artificial Sequence
  Description of Artificial Sequence: Synthetic oligonucleotide
  Antisense strand to SEQ ID NO: 1443360
acucauggucuacuaaagc

SEQ ID NO: 1443362 - RNA, 19 nt, Artificial Sequence
  Description of Artificial Sequence: Synthetic oligonucleotide
  Sense strand starting at position 26 of SEQ ID NO: 1243812
uuuaguagaccaugagucu

SEQ ID NO: 1443363 - RNA, 19 nt, Artificial Sequence
  Description of Artificial Sequence: Synthetic oligonucleotide
  Antisense strand to SEQ ID NO: 1443362
agacucauggucuacuaaa

SEQ ID NO: 1443364 - RNA, 19 nt, Artificial Sequence
  Description of Artificial Sequence: Synthetic oligonucleotide
  Sense strand starting at position 27 of SEQ ID NO: 1243812
uuaguagaccaugagucua

SEQ ID NO: 1443365 - RNA, 19 nt, Artificial Sequence
  Description of Artificial Sequence: Synthetic oligonucleotide
  Antisense strand to SEQ ID NO: 1443364
uagacucauggucuacuaa

SEQ ID NO: 1443366 - RNA, 19 nt, Artificial Sequence
  Description of Artificial Sequence: Synthetic oligonucleotide
  Sense strand starting at position 41 of SEQ ID NO: 1243812
gucuauguccuguggauca

SEQ ID NO: 1443367 - RNA, 19 nt, Artificial Sequence
  Description of Artificial Sequence: Synthetic oligonucleotide
  Antisense strand to SEQ ID NO: 1443366
ugauccacaggacauagac

SEQ ID NO: 1443368 - RNA, 19 nt, Artificial Sequence
  Description of Artificial Sequence: Synthetic oligonucleotide
  Sense strand starting at position 92 of SEQ ID NO: 1243812
ccauguagucucugaccca

SEQ ID NO: 1443369 - RNA, 19 nt, Artificial Sequence
  Description of Artificial Sequence: Synthetic oligonucleotide
  Antisense strand to SEQ ID NO: 1443368
ugggucagagacuacaugg

SEQ ID NO: 1443370 - RNA, 19 nt, Artificial Sequence
  Description of Artificial Sequence: Synthetic oligonucleotide
  Sense strand starting at position 99 of SEQ ID NO: 1243812
gucucugacccauggaaug

SEQ ID NO: 1443371 - RNA, 19 nt, Artificial Sequence
  Description of Artificial Sequence: Synthetic oligonucleotide
  Antisense strand to SEQ ID NO: 1443370
cauuccaugggucagagac

SEQ ID NO: 1443372 - RNA, 19 nt, Artificial Sequence
  Description of Artificial Sequence: Synthetic oligonucleotide
  Sense strand starting at position 198 of SEQ ID NO: 1243812
uccuucugucaucaugaca

SEQ ID NO: 1443373 - RNA, 19 nt, Artificial Sequence
  Description of Artificial Sequence: Synthetic oligonucleotide
  Antisense strand to SEQ ID NO: 1443372
ugucaugaugacagaagga

SEQ ID NO: 1443374 - RNA, 19 nt, Artificial Sequence
  Description of Artificial Sequence: Synthetic oligonucleotide
  Sense strand starting at position 223 of SEQ ID NO: 1243812
cacaguaacuugggcuuua

SEQ ID NO: 1443375 - RNA, 19 nt, Artificial Sequence
  Description of Artificial Sequence: Synthetic oligonucleotide
  Antisense strand to SEQ ID NO: 1443374
uaaagcccaaguuacugug

SEQ ID NO: 1443376 - RNA, 19 nt, Artificial Sequence
  Description of Artificial Sequence: Synthetic oligonucleotide
  Sense strand starting at position 233 of SEQ ID NO: 1243812
ugggcuuuagagugcugau

SEQ ID NO: 1443377 - RNA, 19 nt, Artificial Sequence
  Description of Artificial Sequence: Synthetic oligonucleotide
  Antisense strand to SEQ ID NO: 1443376
aucagcacucuaaagccca

SEQ ID NO: 1443378 - RNA, 19 nt, Artificial Sequence
  Description of Artificial Sequence: Synthetic oligonucleotide
  Sense strand starting at position 278 of SEQ ID NO: 1243812
ugaugauccugacaauugu

SEQ ID NO: 1443379 - RNA, 19 nt, Artificial Sequence
  Description of Artificial Sequence: Synthetic oligonucleotide
  Antisense strand to SEQ ID NO: 1443378
acaauugucaggaucauca

SEQ ID NO: 1443380 - RNA, 19 nt, Artificial Sequence
  Description of Artificial Sequence: Synthetic oligonucleotide
  Sense strand starting at position 287 of SEQ ID NO: 1243812
ugacaauuguuagguccau

SEQ ID NO: 1443381 - RNA, 19 nt, Artificial Sequence
  Description of Artificial Sequence: Synthetic oligonucleotide
  Antisense strand to SEQ ID NO: 1443380
auggaccuaacaauuguca

SEQ ID NO: 1443382 - RNA, 19 nt, Artificial Sequence
  Description of Artificial Sequence: Synthetic oligonucleotide
  Sense strand starting at position 288 of SEQ ID NO: 1243812
gacaauuguuagguccauu

SEQ ID NO: 1443383 - RNA, 19 nt, Artificial Sequence
  Description of Artificial Sequence: Synthetic oligonucleotide
  Antisense strand to SEQ ID NO: 1443382
aauggaccuaacaauuguc

SEQ ID NO: 1443384 - RNA, 19 nt, Artificial Sequence
  Description of Artificial Sequence: Synthetic oligonucleotide
  Sense strand starting at position 363 of SEQ ID NO: 1243812
ucccaugaugggugcuuua

SEQ ID NO: 1443385 - RNA, 19 nt, Artificial Sequence
  Description of Artificial Sequence: Synthetic oligonucleotide
  Antisense strand to SEQ ID NO: 1443384
uaaagcacccaucauggga

SEQ ID NO: 1443386 - RNA, 19 nt, Artificial Sequence
  Description of Artificial Sequence: Synthetic oligonucleotide
  Sense strand starting at position 410 of SEQ ID NO: 1243812
ggguuaauauuaucuacau

SEQ ID NO: 1443387 - RNA, 19 nt, Artificial Sequence
  Description of Artificial Sequence: Synthetic oligonucleotide
  Antisense strand to SEQ ID NO: 1443386
auguagauaauauuaaccc

SEQ ID NO: 1443388 - RNA, 19 nt, Artificial Sequence
  Description of Artificial Sequence: Synthetic oligonucleotide
  Sense strand starting at position 437 of SEQ ID NO: 1243812
ugugaacacugaggucuaa

SEQ ID NO: 1443389 - RNA, 19 nt, Artificial Sequence
  Description of Artificial Sequence: Synthetic oligonucleotide
  Antisense strand to SEQ ID NO: 1443388
uuagaccucaguguucaca

SEQ ID NO: 1443390 - RNA, 19 nt, Artificial Sequence
  Description of Artificial Sequence: Synthetic oligonucleotide
  Sense strand starting at position 471 of SEQ ID NO: 1243812
uucccaauguuaugcugau

SEQ ID NO: 1443391 - RNA, 19 nt, Artificial Sequence
  Description of Artificial Sequence: Synthetic oligonucleotide
  Antisense strand to SEQ ID NO: 1443390
aucagcauaacauugggaa

SEQ ID NO: 1443392 - RNA, 19 nt, Artificial Sequence
  Description of Artificial Sequence: Synthetic oligonucleotide
  Sense strand starting at position 472 of SEQ ID NO: 1243812
ucccaauguuaugcugaua

SEQ ID NO: 1443393 - RNA, 19 nt, Artificial Sequence
  Description of Artificial Sequence: Synthetic oligonucleotide
  Antisense strand to SEQ ID NO: 1443392
uaucagcauaacauuggga

SEQ ID NO: 1443394 - RNA, 19 nt, Artificial Sequence
  Description of Artificial Sequence: Synthetic oligonucleotide
  Sense strand starting at position 747 of SEQ ID NO: 1243812
gagaucauguauuaagagu

SEQ ID NO: 1443395 - RNA, 19 nt, Artificial Sequence
  Description of Artificial Sequence: Synthetic oligonucleotide
  Antisense strand to SEQ ID NO: 1443394
acucuuaauacaugaucuc

SEQ ID NO: 1443396 - RNA, 19 nt, Artificial Sequence
  Description of Artificial Sequence: Synthetic oligonucleotide
  Sense strand starting at position 793 of SEQ ID NO: 1243812
ucagcaauugcgcauucuu

SEQ ID NO: 1443397 - RNA, 19 nt, Artificial Sequence
  Description of Artificial Sequence: Synthetic oligonucleotide
  Antisense strand to SEQ ID NO: 1443396
aagaaugcgcaauugcuga

SEQ ID NO: 1443398 - RNA, 19 nt, Artificial Sequence
  Description of Artificial Sequence: Synthetic oligonucleotide
  Sense strand starting at position 796 of SEQ ID NO: 1243812
gcaauugcgcauucuuacu

SEQ ID NO: 1443399 - RNA, 19 nt, Artificial Sequence
  Description of Artificial Sequence: Synthetic oligonucleotide
  Antisense strand to SEQ ID NO: 1443398
aguaagaaugcgcaauugc

SEQ ID NO: 1443400 - RNA, 19 nt, Artificial Sequence
  Description of Artificial Sequence: Synthetic oligonucleotide
  Sense strand starting at position 801 of SEQ ID NO: 1243812
ugcgcauucuuacugcuuu

SEQ ID NO: 1443401 - RNA, 19 nt, Artificial Sequence
  Description of Artificial Sequence: Synthetic oligonucleotide
  Antisense strand to SEQ ID NO: 1443400
aaagcaguaagaaugcgca

SEQ ID NO: 1443402 - RNA, 19 nt, Artificial Sequence
  Description of Artificial Sequence: Synthetic oligonucleotide
  Sense strand starting at position 2034 of SEQ ID NO: 1243812
gcccaugggagcuguuuau

SEQ ID NO: 1443403 - RNA, 19 nt, Artificial Sequence
  Description of Artificial Sequence: Synthetic oligonucleotide
  Antisense strand to SEQ ID NO: 1443402
auaaacagcucccaugggc

SEQ ID NO: 1443404 - RNA, 19 nt, Artificial Sequence
  Description of Artificial Sequence: Synthetic oligonucleotide
  Sense strand starting at position 2146 of SEQ ID NO: 1243812
gcaggagucuuauucugaa

SEQ ID NO: 1443405 - RNA, 19 nt, Artificial Sequence
  Description of Artificial Sequence: Synthetic oligonucleotide
  Antisense strand to SEQ ID NO: 1443404
uucagaauaagacuccugc

SEQ ID NO: 1443406 - RNA, 19 nt, Artificial Sequence
  Description of Artificial Sequence: Synthetic oligonucleotide
  Sense strand starting at position 2149 of SEQ ID NO: 1243812
ggagucuuauucugaauag

SEQ ID NO: 1443407 - RNA, 19 nt, Artificial Sequence
  Description of Artificial Sequence: Synthetic oligonucleotide
  Antisense strand to SEQ ID NO: 1443406
cuauucagaauaagacucc

SEQ ID NO: 1443408 - RNA, 19 nt, Artificial Sequence
  Description of Artificial Sequence: Synthetic oligonucleotide
  Sense strand starting at position 2150 of SEQ ID NO: 1243812
gagucuuauucugaauagu

SEQ ID NO: 1443409 - RNA, 19 nt, Artificial Sequence
  Description of Artificial Sequence: Synthetic oligonucleotide
  Antisense strand to SEQ ID NO: 1443408
acuauucagaauaagacuc

SEQ ID NO: 1443410 - RNA, 19 nt, Artificial Sequence
  Description of Artificial Sequence: Synthetic oligonucleotide
  Sense strand starting at position 2382 of SEQ ID NO: 1243812
uaggaacuugaauguuacu

SEQ ID NO: 1443411 - RNA, 19 nt, Artificial Sequence
  Description of Artificial Sequence: Synthetic oligonucleotide
  Antisense strand to SEQ ID NO: 1443410
aguaacauucaaguuccua

SEQ ID NO: 1443412 - RNA, 19 nt, Artificial Sequence
  Description of Artificial Sequence: Synthetic oligonucleotide
  Sense strand starting at position 2387 of SEQ ID NO: 1243812
acuugaauguuacugaaua

SEQ ID NO: 1443413 - RNA, 19 nt, Artificial Sequence
  Description of Artificial Sequence: Synthetic oligonucleotide
  Antisense strand to SEQ ID NO: 1443412
uauucaguaacauucaagu

SEQ ID NO: 1443414 - RNA, 19 nt, Artificial Sequence
  Description of Artificial Sequence: Synthetic oligonucleotide
  Sense strand starting at position 2388 of SEQ ID NO: 1243812
cuugaauguuacugaauau

SEQ ID NO: 1443415 - RNA, 19 nt, Artificial Sequence
  Description of Artificial Sequence: Synthetic oligonucleotide
  Antisense strand to SEQ ID NO: 1443414
auauucaguaacauucaag

SEQ ID NO: 1443416 - RNA, 19 nt, Artificial Sequence
  Description of Artificial Sequence: Synthetic oligonucleotide
  Sense strand starting at position 3190 of SEQ ID NO: 1243812
cuauauguuuccuugggca

SEQ ID NO: 1443417 - RNA, 19 nt, Artificial Sequence
  Description of Artificial Sequence: Synthetic oligonucleotide
  Antisense strand to SEQ ID NO: 1443416
ugcccaaggaaacauauag

SEQ ID NO: 1443418 - RNA, 19 nt, Artificial Sequence
  Description of Artificial Sequence: Synthetic oligonucleotide
  Sense strand starting at position 3263 of SEQ ID NO: 1243812
uuuguaaguucuuauugga

SEQ ID NO: 1443419 - RNA, 19 nt, Artificial Sequence
  Description of Artificial Sequence: Synthetic oligonucleotide
  Antisense strand to SEQ ID NO: 1443418
uccaauaagaacuuacaaa

SEQ ID NO: 1443420 - RNA, 19 nt, Artificial Sequence
  Description of Artificial Sequence: Synthetic oligonucleotide
  Sense strand starting at position 3266 of SEQ ID NO: 1243812
guaaguucuuauuggacac

SEQ ID NO: 1443421 - RNA, 19 nt, Artificial Sequence
  Description of Artificial Sequence: Synthetic oligonucleotide
  Antisense strand to SEQ ID NO: 1443420
guguccaauaagaacuuac

SEQ ID NO: 1443422 - RNA, 19 nt, Artificial Sequence
  Description of Artificial Sequence: Synthetic oligonucleotide
  Sense strand starting at position 3302 of SEQ ID NO: 1243812
cugggaaagcuguguuaca

SEQ ID NO: 1443423 - RNA, 19 nt, Artificial Sequence
  Description of Artificial Sequence: Synthetic oligonucleotide
  Antisense strand to SEQ ID NO: 1443422
uguaacacagcuuucccag

SEQ ID NO: 1443424 - RNA, 19 nt, Artificial Sequence
  Description of Artificial Sequence: Synthetic oligonucleotide
  Sense strand starting at position 3303 of SEQ ID NO: 1243812
ugggaaagcuguguuacac

SEQ ID NO: 1443425 - RNA, 19 nt, Artificial Sequence
  Description of Artificial Sequence: Synthetic oligonucleotide
  Antisense strand to SEQ ID NO: 1443424
guguaacacagcuuuccca

SEQ ID NO: 1443426 - RNA, 19 nt, Artificial Sequence
  Description of Artificial Sequence: Synthetic oligonucleotide
  Sense strand starting at position 3512 of SEQ ID NO: 1243812
ugcuguagucuccagaaua

SEQ ID NO: 1443427 - RNA, 19 nt, Artificial Sequence
  Description of Artificial Sequence: Synthetic oligonucleotide
  Antisense strand to SEQ ID NO: 1443426
uauucuggagacuacagca

SEQ ID NO: 1443428 - RNA, 19 nt, Artificial Sequence
  Description of Artificial Sequence: Synthetic oligonucleotide
  Sense strand starting at position 3533 of SEQ ID NO: 1243812
cauagagugugaccacaaa

SEQ ID NO: 1443429 - RNA, 19 nt, Artificial Sequence
  Description of Artificial Sequence: Synthetic oligonucleotide
  Antisense strand to SEQ ID NO: 1443428
uuuguggucacacucuaug

SEQ ID NO: 1443430 - RNA, 19 nt, Artificial Sequence
  Description of Artificial Sequence: Synthetic oligonucleotide
  Sense strand starting at position 3599 of SEQ ID NO: 1243812
gaccgauuauacucagacu

SEQ ID NO: 1443431 - RNA, 19 nt, Artificial Sequence
  Description of Artificial Sequence: Synthetic oligonucleotide
  Antisense strand to SEQ ID NO: 1443430
agucugaguauaaucgguc

SEQ ID NO: 1443432 - RNA, 19 nt, Artificial Sequence
  Description of Artificial Sequence: Synthetic oligonucleotide
  Sense strand starting at position 3602 of SEQ ID NO: 1243812
cgauuauacucagacuuaa

SEQ ID NO: 1443433 - RNA, 19 nt, Artificial Sequence
  Description of Artificial Sequence: Synthetic oligonucleotide
  Antisense strand to SEQ ID NO: 1443432
uuaagucugaguauaaucg

SEQ ID NO: 1443434 - RNA, 19 nt, Artificial Sequence
  Description of Artificial Sequence: Synthetic oligonucleotide
  Sense strand starting at position 3783 of SEQ ID NO: 1243812
acagaauugagcuggguac

SEQ ID NO: 1443435 - RNA, 19 nt, Artificial Sequence
  Description of Artificial Sequence: Synthetic oligonucleotide
  Antisense strand to SEQ ID NO: 1443434
guacccagcucaauucugu

SEQ ID NO: 1443436 - RNA, 19 nt, Artificial Sequence
  Description of Artificial Sequence: Synthetic oligonucleotide
  Sense strand starting at position 3784 of SEQ ID NO: 1243812
cagaauugagcuggguaca

SEQ ID NO: 1443437 - RNA, 19 nt, Artificial Sequence
  Description of Artificial Sequence: Synthetic oligonucleotide
  Antisense strand to SEQ ID NO: 1443436
uguacccagcucaauucug

SEQ ID NO: 1443438 - RNA, 19 nt, Artificial Sequence
  Description of Artificial Sequence: Synthetic oligonucleotide
  Sense strand starting at position 3937 of SEQ ID NO: 1243812
uugacugggaguggugaua

SEQ ID NO: 1443439 - RNA, 19 nt, Artificial Sequence
  Description of Artificial Sequence: Synthetic oligonucleotide
  Antisense strand to SEQ ID NO: 1443438
uaucaccacucccagucaa

SEQ ID NO: 1443440 - RNA, 19 nt, Artificial Sequence
  Description of Artificial Sequence: Synthetic oligonucleotide
  Sense strand starting at position 470 of SEQ ID NO: 1243813
agauuagaaucucaugaga

SEQ ID NO: 1443441 - RNA, 19 nt, Artificial Sequence
  Description of Artificial Sequence: Synthetic oligonucleotide
  Antisense strand to SEQ ID NO: 1443440
ucucaugagauucuaaucu

SEQ ID NO: 1443442 - RNA, 19 nt, Artificial Sequence
  Description of Artificial Sequence: Synthetic oligonucleotide
  Sense strand starting at position 472 of SEQ ID NO: 1243813
auuagaaucucaugagacc

SEQ ID NO: 1443443 - RNA, 19 nt, Artificial Sequence
  Description of Artificial Sequence: Synthetic oligonucleotide
  Antisense strand to SEQ ID NO: 1443442
ggucucaugagauucuaau

SEQ ID NO: 1443444 - RNA, 19 nt, Artificial Sequence
  Description of Artificial Sequence: Synthetic oligonucleotide
  Sense strand starting at position 475 of SEQ ID NO: 1243813
agaaucucaugagaccuuu

SEQ ID NO: 1443445 - RNA, 19 nt, Artificial Sequence
  Description of Artificial Sequence: Synthetic oligonucleotide
  Antisense strand to SEQ ID NO: 1443444
aaaggucucaugagauucu

SEQ ID NO: 1443446 - RNA, 19 nt, Artificial Sequence
  Description of Artificial Sequence: Synthetic oligonucleotide
  Sense strand starting at position 481 of SEQ ID NO: 1243813
ucaugagaccuuugagguc

SEQ ID NO: 1443447 - RNA, 19 nt, Artificial Sequence
  Description of Artificial Sequence: Synthetic oligonucleotide
  Antisense strand to SEQ ID NO: 1443446
gaccucaaaggucucauga

SEQ ID NO: 1443448 - RNA, 19 nt, Artificial Sequence
  Description of Artificial Sequence: Synthetic oligonucleotide
  Sense strand starting at position 502 of SEQ ID NO: 1243813
cuggcuuuauccuuugcau

SEQ ID NO: 1443449 - RNA, 19 nt, Artificial Sequence
  Description of Artificial Sequence: Synthetic oligonucleotide
  Antisense strand to SEQ ID NO: 1443448
augcaaaggauaaagccag

SEQ ID NO: 1443450 - RNA, 19 nt, Artificial Sequence
  Description of Artificial Sequence: Synthetic oligonucleotide
  Sense strand starting at position 504 of SEQ ID NO: 1243813
ggcuuuauccuuugcaucu

SEQ ID NO: 1443451 - RNA, 19 nt, Artificial Sequence
  Description of Artificial Sequence: Synthetic oligonucleotide
  Antisense strand to SEQ ID NO: 1443450
agaugcaaaggauaaagcc

SEQ ID NO: 1443452 - RNA, 19 nt, Artificial Sequence
  Description of Artificial Sequence: Synthetic oligonucleotide
  Sense strand starting at position 731 of SEQ ID NO: 1243813
gucuuucuagcacgguuua

SEQ ID NO: 1443453 - RNA, 19 nt, Artificial Sequence
  Description of Artificial Sequence: Synthetic oligonucleotide
  Antisense strand to SEQ ID NO: 1443452
uaaaccgugcuagaaagac

SEQ ID NO: 1443454 - RNA, 19 nt, Artificial Sequence
  Description of Artificial Sequence: Synthetic oligonucleotide
  Sense strand starting at position 732 of SEQ ID NO: 1243813
ucuuucuagcacgguuuaa

SEQ ID NO: 1443455 - RNA, 19 nt, Artificial Sequence
  Description of Artificial Sequence: Synthetic oligonucleotide
  Antisense strand to SEQ ID NO: 1443454
uuaaaccgugcuagaaaga

SEQ ID NO: 1443456 - RNA, 19 nt, Artificial Sequence
  Description of Artificial Sequence: Synthetic oligonucleotide
  Sense strand starting at position 1179 of SEQ ID NO: 1243813
gcccgugggagcuguuuau

SEQ ID NO: 1443457 - RNA, 19 nt, Artificial Sequence
  Description of Artificial Sequence: Synthetic oligonucleotide
  Antisense strand to SEQ ID NO: 1443456
auaaacagcucccacgggc

SEQ ID NO: 1443458 - RNA, 19 nt, Artificial Sequence
  Description of Artificial Sequence: Synthetic oligonucleotide
  Sense strand starting at position 1515 of SEQ ID NO: 1243813
uaggaacuugaauguuauu

SEQ ID NO: 1443459 - RNA, 19 nt, Artificial Sequence
  Description of Artificial Sequence: Synthetic oligonucleotide
  Antisense strand to SEQ ID NO: 1443458
aauaacauucaaguuccua

SEQ ID NO: 1443460 - RNA, 19 nt, Artificial Sequence
  Description of Artificial Sequence: Synthetic oligonucleotide
  Sense strand starting at position 1943 of SEQ ID NO: 1243813
acgucaugcuccugaagcu

SEQ ID NO: 1443461 - RNA, 19 nt, Artificial Sequence
  Description of Artificial Sequence: Synthetic oligonucleotide
  Antisense strand to SEQ ID NO: 1443460
agcuucaggagcaugacgu

SEQ ID NO: 1443462 - RNA, 19 nt, Artificial Sequence
  Description of Artificial Sequence: Synthetic oligonucleotide
  Sense strand starting at position 1944 of SEQ ID NO: 1243813
cgucaugcuccugaagcua

SEQ ID NO: 1443463 - RNA, 19 nt, Artificial Sequence
  Description of Artificial Sequence: Synthetic oligonucleotide
  Antisense strand to SEQ ID NO: 1443462
uagcuucaggagcaugacg

SEQ ID NO: 1443464 - RNA, 19 nt, Artificial Sequence
  Description of Artificial Sequence: Synthetic oligonucleotide
  Sense strand starting at position 2322 of SEQ ID NO: 1243813
uuauauguuuccuugggca

SEQ ID NO: 1443465 - RNA, 19 nt, Artificial Sequence
  Description of Artificial Sequence: Synthetic oligonucleotide
  Antisense strand to SEQ ID NO: 1443464
ugcccaaggaaacauauaa

SEQ ID NO: 1443466 - RNA, 19 nt, Artificial Sequence
  Description of Artificial Sequence: Synthetic oligonucleotide
  Sense strand starting at position 2395 of SEQ ID NO: 1243813
uuuguaacuucuuauugga

SEQ ID NO: 1443467 - RNA, 19 nt, Artificial Sequence
  Description of Artificial Sequence: Synthetic oligonucleotide
  Antisense strand to SEQ ID NO: 1443466
uccaauaagaaguuacaaa

SEQ ID NO: 1443468 - RNA, 19 nt, Artificial Sequence
  Description of Artificial Sequence: Synthetic oligonucleotide
  Sense strand starting at position 2397 of SEQ ID NO: 1243813
uguaacuucuuauuggaca

SEQ ID NO: 1443469 - RNA, 19 nt, Artificial Sequence
  Description of Artificial Sequence: Synthetic oligonucleotide
  Antisense strand to SEQ ID NO: 1443468
uguccaauaagaaguuaca

SEQ ID NO: 1443470 - RNA, 19 nt, Artificial Sequence
  Description of Artificial Sequence: Synthetic oligonucleotide
  Sense strand starting at position 2632 of SEQ ID NO: 1243813
gcuguagucuccugaauaa

SEQ ID NO: 1443471 - RNA, 19 nt, Artificial Sequence
  Description of Artificial Sequence: Synthetic oligonucleotide
  Antisense strand to SEQ ID NO: 1443470
uuauucaggagacuacagc

SEQ ID NO: 1443472 - RNA, 19 nt, Artificial Sequence
  Description of Artificial Sequence: Synthetic oligonucleotide
  Sense strand starting at position 2669 of SEQ ID NO: 1243813
aagagaacccguugacuga

SEQ ID NO: 1443473 - RNA, 19 nt, Artificial Sequence
  Description of Artificial Sequence: Synthetic oligonucleotide
  Antisense strand to SEQ ID NO: 1443472
ucagucaacggguucucuu

SEQ ID NO: 1443474 - RNA, 19 nt, Artificial Sequence
  Description of Artificial Sequence: Synthetic oligonucleotide
  Sense strand starting at position 2673 of SEQ ID NO: 1243813
gaacccguugacugauaga

SEQ ID NO: 1443475 - RNA, 19 nt, Artificial Sequence
  Description of Artificial Sequence: Synthetic oligonucleotide
  Antisense strand to SEQ ID NO: 1443474
ucuaucagucaacggguuc

SEQ ID NO: 1443476 - RNA, 19 nt, Artificial Sequence
  Description of Artificial Sequence: Synthetic oligonucleotide
  Sense strand starting at position 2720 of SEQ ID NO: 1243813
cugacuauauucggacuua

SEQ ID NO: 1443477 - RNA, 19 nt, Artificial Sequence
  Description of Artificial Sequence: Synthetic oligonucleotide
  Antisense strand to SEQ ID NO: 1443476
uaaguccgaauauagucag

SEQ ID NO: 1443478 - RNA, 19 nt, Artificial Sequence
  Description of Artificial Sequence: Synthetic oligonucleotide
  Sense strand starting at position 2721 of SEQ ID NO: 1243813
ugacuauauucggacuuaa

SEQ ID NO: 1443479 - RNA, 19 nt, Artificial Sequence
  Description of Artificial Sequence: Synthetic oligonucleotide
  Antisense strand to SEQ ID NO: 1443478
uuaaguccgaauauaguca

SEQ ID NO: 1443480 - RNA, 19 nt, Artificial Sequence
  Description of Artificial Sequence: Synthetic oligonucleotide
  Sense strand starting at position 2903 of SEQ ID NO: 1243813
caggauugagcuggguaca

SEQ ID NO: 1443481 - RNA, 19 nt, Artificial Sequence
  Description of Artificial Sequence: Synthetic oligonucleotide
  Antisense strand to SEQ ID NO: 1443480
uguacccagcucaauccug

SEQ ID NO: 1443482 - RNA, 19 nt, Artificial Sequence
  Description of Artificial Sequence: Synthetic oligonucleotide
  Sense strand starting at position 3158 of SEQ ID NO: 1243813
ucccgcuuguuugacagaa

SEQ ID NO: 1443483 - RNA, 19 nt, Artificial Sequence
  Description of Artificial Sequence: Synthetic oligonucleotide
  Antisense strand to SEQ ID NO: 1443482
uucugucaaacaagcggga

SEQ ID NO: 1443484 - RNA, 19 nt, Artificial Sequence
  Description of Artificial Sequence: Synthetic oligonucleotide
  Sense strand starting at position 3160 of SEQ ID NO: 1243813
ccgcuuguuugacagaaug

SEQ ID NO: 1443485 - RNA, 19 nt, Artificial Sequence
  Description of Artificial Sequence: Synthetic oligonucleotide
  Antisense strand to SEQ ID NO: 1443484
cauucugucaaacaagcgg

SEQ ID NO: 1443486 - RNA, 19 nt, Artificial Sequence
  Description of Artificial Sequence: Synthetic oligonucleotide
  Sense strand starting at position 3233 of SEQ ID NO: 1243813
ccuaguaauuaguuuaucu

SEQ ID NO: 1443487 - RNA, 19 nt, Artificial Sequence
  Description of Artificial Sequence: Synthetic oligonucleotide
  Antisense strand to SEQ ID NO: 1443486
agauaaacuaauuacuagg

SEQ ID NO: 1443488 - RNA, 19 nt, Artificial Sequence
  Description of Artificial Sequence: Synthetic oligonucleotide
  Sense strand starting at position 1166 of SEQ ID NO: 1243814
gcccaugggagcuguuuau

SEQ ID NO: 1443489 - RNA, 19 nt, Artificial Sequence
  Description of Artificial Sequence: Synthetic oligonucleotide
  Antisense strand to SEQ ID NO: 1443488
auaaacagcucccaugggc

SEQ ID NO: 1443490 - RNA, 19 nt, Artificial Sequence
  Description of Artificial Sequence: Synthetic oligonucleotide
  Sense strand starting at position 1278 of SEQ ID NO: 1243814
gcaggagucuuauucugaa

SEQ ID NO: 1443491 - RNA, 19 nt, Artificial Sequence
  Description of Artificial Sequence: Synthetic oligonucleotide
  Antisense strand to SEQ ID NO: 1443490
uucagaauaagacuccugc

SEQ ID NO: 1443492 - RNA, 19 nt, Artificial Sequence
  Description of Artificial Sequence: Synthetic oligonucleotide
  Sense strand starting at position 1281 of SEQ ID NO: 1243814
ggagucuuauucugaauag

SEQ ID NO: 1443493 - RNA, 19 nt, Artificial Sequence
  Description of Artificial Sequence: Synthetic oligonucleotide
  Antisense strand to SEQ ID NO: 1443492
cuauucagaauaagacucc

SEQ ID NO: 1443494 - RNA, 19 nt, Artificial Sequence
  Description of Artificial Sequence: Synthetic oligonucleotide
  Sense strand starting at position 1282 of SEQ ID NO: 1243814
gagucuuauucugaauagu

SEQ ID NO: 1443495 - RNA, 19 nt, Artificial Sequence
  Description of Artificial Sequence: Synthetic oligonucleotide
  Antisense strand to SEQ ID NO: 1443494
acuauucagaauaagacuc

SEQ ID NO: 1443496 - RNA, 19 nt, Artificial Sequence
  Description of Artificial Sequence: Synthetic oligonucleotide
  Sense strand starting at position 1514 of SEQ ID NO: 1243814
uaggaacuugaauguuacu

SEQ ID NO: 1443497 - RNA, 19 nt, Artificial Sequence
  Description of Artificial Sequence: Synthetic oligonucleotide
  Antisense strand to SEQ ID NO: 1443496
aguaacauucaaguuccua

SEQ ID NO: 1443498 - RNA, 19 nt, Artificial Sequence
  Description of Artificial Sequence: Synthetic oligonucleotide
  Sense strand starting at position 1519 of SEQ ID NO: 1243814
acuugaauguuacugaaua

SEQ ID NO: 1443499 - RNA, 19 nt, Artificial Sequence
  Description of Artificial Sequence: Synthetic oligonucleotide
  Antisense strand to SEQ ID NO: 1443498
uauucaguaacauucaagu

SEQ ID NO: 1443500 - RNA, 19 nt, Artificial Sequence
  Description of Artificial Sequence: Synthetic oligonucleotide
  Sense strand starting at position 1520 of SEQ ID NO: 1243814
cuugaauguuacugaauau

SEQ ID NO: 1443501 - RNA, 19 nt, Artificial Sequence
  Description of Artificial Sequence: Synthetic oligonucleotide
  Antisense strand to SEQ ID NO: 1443500
auauucaguaacauucaag

SEQ ID NO: 1443502 - RNA, 19 nt, Artificial Sequence
  Description of Artificial Sequence: Synthetic oligonucleotide
  Sense strand starting at position 1687 of SEQ ID NO: 1243814
cuuacuuggugcugagagu

SEQ ID NO: 1443503 - RNA, 19 nt, Artificial Sequence
  Description of Artificial Sequence: Synthetic oligonucleotide
  Antisense strand to SEQ ID NO: 1443502
acucucagcaccaaguaag

SEQ ID NO: 1443504 - RNA, 19 nt, Artificial Sequence
  Description of Artificial Sequence: Synthetic oligonucleotide
  Sense strand starting at position 2322 of SEQ ID NO: 1243814
cuauauguuuccuugggca

SEQ ID NO: 1443505 - RNA, 19 nt, Artificial Sequence
  Description of Artificial Sequence: Synthetic oligonucleotide
  Antisense strand to SEQ ID NO: 1443504
ugcccaaggaaacauauag

SEQ ID NO: 1443506 - RNA, 19 nt, Artificial Sequence
  Description of Artificial Sequence: Synthetic oligonucleotide
  Sense strand starting at position 2395 of SEQ ID NO: 1243814
uuuguaaguucuuauugga

SEQ ID NO: 1443507 - RNA, 19 nt, Artificial Sequence
  Description of Artificial Sequence: Synthetic oligonucleotide
  Antisense strand to SEQ ID NO: 1443506
uccaauaagaacuuacaaa

SEQ ID NO: 1443508 - RNA, 19 nt, Artificial Sequence
  Description of Artificial Sequence: Synthetic oligonucleotide
  Sense strand starting at position 2398 of SEQ ID NO: 1243814
guaaguucuuauuggacac

SEQ ID NO: 1443509 - RNA, 19 nt, Artificial Sequence
  Description of Artificial Sequence: Synthetic oligonucleotide
  Antisense strand to SEQ ID NO: 1443508
guguccaauaagaacuuac

SEQ ID NO: 1443510 - RNA, 19 nt, Artificial Sequence
  Description of Artificial Sequence: Synthetic oligonucleotide
  Sense strand starting at position 2434 of SEQ ID NO: 1243814
cugggaaagcuguguuaca

SEQ ID NO: 1443511 - RNA, 19 nt, Artificial Sequence
  Description of Artificial Sequence: Synthetic oligonucleotide
  Antisense strand to SEQ ID NO: 1443510
uguaacacagcuuucccag

SEQ ID NO: 1443512 - RNA, 19 nt, Artificial Sequence
  Description of Artificial Sequence: Synthetic oligonucleotide
  Sense strand starting at position 2435 of SEQ ID NO: 1243814
ugggaaagcuguguuacac

SEQ ID NO: 1443513 - RNA, 19 nt, Artificial Sequence
  Description of Artificial Sequence: Synthetic oligonucleotide
  Antisense strand to SEQ ID NO: 1443512
guguaacacagcuuuccca

SEQ ID NO: 1443514 - RNA, 19 nt, Artificial Sequence
  Description of Artificial Sequence: Synthetic oligonucleotide
  Sense strand starting at position 2644 of SEQ ID NO: 1243814
ugcuguagucuccagaaua

SEQ ID NO: 1443515 - RNA, 19 nt, Artificial Sequence
  Description of Artificial Sequence: Synthetic oligonucleotide
  Antisense strand to SEQ ID NO: 1443514
uauucuggagacuacagca

SEQ ID NO: 1443516 - RNA, 19 nt, Artificial Sequence
  Description of Artificial Sequence: Synthetic oligonucleotide
  Sense strand starting at position 2665 of SEQ ID NO: 1243814
cauagagugugaccacaaa

SEQ ID NO: 1443517 - RNA, 19 nt, Artificial Sequence
  Description of Artificial Sequence: Synthetic oligonucleotide
  Antisense strand to SEQ ID NO: 1443516
uuuguggucacacucuaug

SEQ ID NO: 1443518 - RNA, 19 nt, Artificial Sequence
  Description of Artificial Sequence: Synthetic oligonucleotide
  Sense strand starting at position 2731 of SEQ ID NO: 1243814
gaccgauuauacucagacu

SEQ ID NO: 1443519 - RNA, 19 nt, Artificial Sequence
  Description of Artificial Sequence: Synthetic oligonucleotide
  Antisense strand to SEQ ID NO: 1443518
agucugaguauaaucgguc

SEQ ID NO: 1443520 - RNA, 19 nt, Artificial Sequence
  Description of Artificial Sequence: Synthetic oligonucleotide
  Sense strand starting at position 2734 of SEQ ID NO: 1243814
cgauuauacucagacuuaa

SEQ ID NO: 1443521 - RNA, 19 nt, Artificial Sequence
  Description of Artificial Sequence: Synthetic oligonucleotide
  Antisense strand to SEQ ID NO: 1443520
uuaagucugaguauaaucg

SEQ ID NO: 1443522 - RNA, 19 nt, Artificial Sequence
  Description of Artificial Sequence: Synthetic oligonucleotide
  Sense strand starting at position 2915 of SEQ ID NO: 1243814
acagaauugagcuggguac

SEQ ID NO: 1443523 - RNA, 19 nt, Artificial Sequence
  Description of Artificial Sequence: Synthetic oligonucleotide
  Antisense strand to SEQ ID NO: 1443522
guacccagcucaauucugu

SEQ ID NO: 1443524 - RNA, 19 nt, Artificial Sequence
  Description of Artificial Sequence: Synthetic oligonucleotide
  Sense strand starting at position 2916 of SEQ ID NO: 1243814
cagaauugagcuggguaca

SEQ ID NO: 1443525 - RNA, 19 nt, Artificial Sequence
  Description of Artificial Sequence: Synthetic oligonucleotide
  Antisense strand to SEQ ID NO: 1443524
uguacccagcucaauucug

SEQ ID NO: 1443526 - RNA, 19 nt, Artificial Sequence
  Description of Artificial Sequence: Synthetic oligonucleotide
  Sense strand starting at position 3069 of SEQ ID NO: 1243814
uugacugggaguggugaua

SEQ ID NO: 1443527 - RNA, 19 nt, Artificial Sequence
  Description of Artificial Sequence: Synthetic oligonucleotide
  Antisense strand to SEQ ID NO: 1443526
uaucaccacucccagucaa

SEQ ID NO: 1443528 - RNA, 19 nt, Artificial Sequence
  Description of Artificial Sequence: Synthetic oligonucleotide
  Sense strand starting at position 3186 of SEQ ID NO: 1243814
uccagcuuguuugacagaa

SEQ ID NO: 1443529 - RNA, 19 nt, Artificial Sequence
  Description of Artificial Sequence: Synthetic oligonucleotide
  Antisense strand to SEQ ID NO: 1443528
uucugucaaacaagcugga

SEQ ID NO: 1443530 - RNA, 19 nt, Artificial Sequence
  Description of Artificial Sequence: Synthetic oligonucleotide
  Sense strand starting at position 3188 of SEQ ID NO: 1243814
cagcuuguuugacagaaug

SEQ ID NO: 1443531 - RNA, 19 nt, Artificial Sequence
  Description of Artificial Sequence: Synthetic oligonucleotide
  Antisense strand to SEQ ID NO: 1443530
cauucugucaaacaagcug

SEQ ID NO: 1443532 - RNA, 19 nt, Artificial Sequence
  Description of Artificial Sequence: Synthetic oligonucleotide
  Sense strand starting at position 3279 of SEQ ID NO: 1243814
uuauauaccuaguaaugag

SEQ ID NO: 1443533 - RNA, 19 nt, Artificial Sequence
  Description of Artificial Sequence: Synthetic oligonucleotide
  Antisense strand to SEQ ID NO: 1443532
cucauuacuagguauauaa

SEQ ID NO: 1443534 - RNA, 19 nt, Artificial Sequence
  Description of Artificial Sequence: Synthetic oligonucleotide
  Sense strand starting at position 3294 of SEQ ID NO: 1243814
ugaguuuaucuauguuaca

SEQ ID NO: 1443535 - RNA, 19 nt, Artificial Sequence
  Description of Artificial Sequence: Synthetic oligonucleotide
  Antisense strand to SEQ ID NO: 1443534
uguaacauagauaaacuca

SEQ ID NO: 1443536 - RNA, 19 nt, Artificial Sequence
  Description of Artificial Sequence: Synthetic oligonucleotide
  Sense strand starting at position 3295 of SEQ ID NO: 1243814
gaguuuaucuauguuacag

SEQ ID NO: 1443537 - RNA, 19 nt, Artificial Sequence
  Description of Artificial Sequence: Synthetic oligonucleotide
  Antisense strand to SEQ ID NO: 1443536
cuguaacauagauaaacuc

SEQ ID NO: 1443538 - RNA, 19 nt, Artificial Sequence
  Description of Artificial Sequence: Synthetic oligonucleotide
  Sense strand starting at position 52 of SEQ ID NO: 1243815
cgcagugagaucguguauu

SEQ ID NO: 1443539 - RNA, 19 nt, Artificial Sequence
  Description of Artificial Sequence: Synthetic oligonucleotide
  Antisense strand to SEQ ID NO: 1443538
aauacacgaucucacugcg

SEQ ID NO: 1443540 - RNA, 19 nt, Artificial Sequence
  Description of Artificial Sequence: Synthetic oligonucleotide
  Sense strand starting at position 58 of SEQ ID NO: 1243815
gagaucguguauuaagagu

SEQ ID NO: 1443541 - RNA, 19 nt, Artificial Sequence
  Description of Artificial Sequence: Synthetic oligonucleotide
  Antisense strand to SEQ ID NO: 1443540
acucuuaauacacgaucuc

SEQ ID NO: 1443542 - RNA, 19 nt, Artificial Sequence
  Description of Artificial Sequence: Synthetic oligonucleotide
  Sense strand starting at position 64 of SEQ ID NO: 1243815
guguauuaagaguguucag

SEQ ID NO: 1443543 - RNA, 19 nt, Artificial Sequence
  Description of Artificial Sequence: Synthetic oligonucleotide
  Antisense strand to SEQ ID NO: 1443542
cugaacacucuuaauacac

SEQ ID NO: 1443544 - RNA, 19 nt, Artificial Sequence
  Description of Artificial Sequence: Synthetic oligonucleotide
  Sense strand starting at position 138 of SEQ ID NO: 1243815
uguaguuugucccucccaa

SEQ ID NO: 1443545 - RNA, 19 nt, Artificial Sequence
  Description of Artificial Sequence: Synthetic oligonucleotide
  Antisense strand to SEQ ID NO: 1443544
uugggagggacaaacuaca

SEQ ID NO: 1443546 - RNA, 19 nt, Artificial Sequence
  Description of Artificial Sequence: Synthetic oligonucleotide
  Sense strand starting at position 624 of SEQ ID NO: 1243815
agauuagaaucucaugaga

SEQ ID NO: 1443547 - RNA, 19 nt, Artificial Sequence
  Description of Artificial Sequence: Synthetic oligonucleotide
  Antisense strand to SEQ ID NO: 1443546
ucucaugagauucuaaucu

SEQ ID NO: 1443548 - RNA, 19 nt, Artificial Sequence
  Description of Artificial Sequence: Synthetic oligonucleotide
  Sense strand starting at position 626 of SEQ ID NO: 1243815
auuagaaucucaugagacc

SEQ ID NO: 1443549 - RNA, 19 nt, Artificial Sequence
  Description of Artificial Sequence: Synthetic oligonucleotide
  Antisense strand to SEQ ID NO: 1443548
ggucucaugagauucuaau

SEQ ID NO: 1443550 - RNA, 19 nt, Artificial Sequence
  Description of Artificial Sequence: Synthetic oligonucleotide
  Sense strand starting at position 629 of SEQ ID NO: 1243815
agaaucucaugagaccuuu

SEQ ID NO: 1443551 - RNA, 19 nt, Artificial Sequence
  Description of Artificial Sequence: Synthetic oligonucleotide
  Antisense strand to SEQ ID NO: 1443550
aaaggucucaugagauucu

SEQ ID NO: 1443552 - RNA, 19 nt, Artificial Sequence
  Description of Artificial Sequence: Synthetic oligonucleotide
  Sense strand starting at position 635 of SEQ ID NO: 1243815
ucaugagaccuuugagguc

SEQ ID NO: 1443553 - RNA, 19 nt, Artificial Sequence
  Description of Artificial Sequence: Synthetic oligonucleotide
  Antisense strand to SEQ ID NO: 1443552
gaccucaaaggucucauga

SEQ ID NO: 1443554 - RNA, 19 nt, Artificial Sequence
  Description of Artificial Sequence: Synthetic oligonucleotide
  Sense strand starting at position 656 of SEQ ID NO: 1243815
cuggcuuuauccuuugcau

SEQ ID NO: 1443555 - RNA, 19 nt, Artificial Sequence
  Description of Artificial Sequence: Synthetic oligonucleotide
  Antisense strand to SEQ ID NO: 1443554
augcaaaggauaaagccag

SEQ ID NO: 1443556 - RNA, 19 nt, Artificial Sequence
  Description of Artificial Sequence: Synthetic oligonucleotide
  Sense strand starting at position 658 of SEQ ID NO: 1243815
ggcuuuauccuuugcaucu

SEQ ID NO: 1443557 - RNA, 19 nt, Artificial Sequence
  Description of Artificial Sequence: Synthetic oligonucleotide
  Antisense strand to SEQ ID NO: 1443556
agaugcaaaggauaaagcc

SEQ ID NO: 1443558 - RNA, 19 nt, Artificial Sequence
  Description of Artificial Sequence: Synthetic oligonucleotide
  Sense strand starting at position 885 of SEQ ID NO: 1243815
gucuuucuagcacgguuua

SEQ ID NO: 1443559 - RNA, 19 nt, Artificial Sequence
  Description of Artificial Sequence: Synthetic oligonucleotide
  Antisense strand to SEQ ID NO: 1443558
uaaaccgugcuagaaagac

SEQ ID NO: 1443560 - RNA, 19 nt, Artificial Sequence
  Description of Artificial Sequence: Synthetic oligonucleotide
  Sense strand starting at position 886 of SEQ ID NO: 1243815
ucuuucuagcacgguuuaa

SEQ ID NO: 1443561 - RNA, 19 nt, Artificial Sequence
  Description of Artificial Sequence: Synthetic oligonucleotide
  Antisense strand to SEQ ID NO: 1443560
uuaaaccgugcuagaaaga

SEQ ID NO: 1443562 - RNA, 19 nt, Artificial Sequence
  Description of Artificial Sequence: Synthetic oligonucleotide
  Sense strand starting at position 1333 of SEQ ID NO: 1243815
gcccgugggagcuguuuau

SEQ ID NO: 1443563 - RNA, 19 nt, Artificial Sequence
  Description of Artificial Sequence: Synthetic oligonucleotide
  Antisense strand to SEQ ID NO: 1443562
auaaacagcucccacgggc

SEQ ID NO: 1443564 - RNA, 19 nt, Artificial Sequence
  Description of Artificial Sequence: Synthetic oligonucleotide
  Sense strand starting at position 1669 of SEQ ID NO: 1243815
uaggaacuugaauguuauu

SEQ ID NO: 1443565 - RNA, 19 nt, Artificial Sequence
  Description of Artificial Sequence: Synthetic oligonucleotide
  Antisense strand to SEQ ID NO: 1443564
aauaacauucaaguuccua

SEQ ID NO: 1443566 - RNA, 19 nt, Artificial Sequence
  Description of Artificial Sequence: Synthetic oligonucleotide
  Sense strand starting at position 2097 of SEQ ID NO: 1243815
acgucaugcuccugaagcu

SEQ ID NO: 1443567 - RNA, 19 nt, Artificial Sequence
  Description of Artificial Sequence: Synthetic oligonucleotide
  Antisense strand to SEQ ID NO: 1443566
agcuucaggagcaugacgu

SEQ ID NO: 1443568 - RNA, 19 nt, Artificial Sequence
  Description of Artificial Sequence: Synthetic oligonucleotide
  Sense strand starting at position 2098 of SEQ ID NO: 1243815
cgucaugcuccugaagcua

SEQ ID NO: 1443569 - RNA, 19 nt, Artificial Sequence
  Description of Artificial Sequence: Synthetic oligonucleotide
  Antisense strand to SEQ ID NO: 1443568
uagcuucaggagcaugacg

SEQ ID NO: 1443570 - RNA, 19 nt, Artificial Sequence
  Description of Artificial Sequence: Synthetic oligonucleotide
  Sense strand starting at position 2476 of SEQ ID NO: 1243815
uuauauguuuccuugggca

SEQ ID NO: 1443571 - RNA, 19 nt, Artificial Sequence
  Description of Artificial Sequence: Synthetic oligonucleotide
  Antisense strand to SEQ ID NO: 1443570
ugcccaaggaaacauauaa

SEQ ID NO: 1443572 - RNA, 19 nt, Artificial Sequence
  Description of Artificial Sequence: Synthetic oligonucleotide
  Sense strand starting at position 2549 of SEQ ID NO: 1243815
uuuguaacuucuuauugga

SEQ ID NO: 1443573 - RNA, 19 nt, Artificial Sequence
  Description of Artificial Sequence: Synthetic oligonucleotide
  Antisense strand to SEQ ID NO: 1443572
uccaauaagaaguuacaaa

SEQ ID NO: 1443574 - RNA, 19 nt, Artificial Sequence
  Description of Artificial Sequence: Synthetic oligonucleotide
  Sense strand starting at position 2551 of SEQ ID NO: 1243815
uguaacuucuuauuggaca

SEQ ID NO: 1443575 - RNA, 19 nt, Artificial Sequence
  Description of Artificial Sequence: Synthetic oligonucleotide
  Antisense strand to SEQ ID NO: 1443574
uguccaauaagaaguuaca

SEQ ID NO: 1443576 - RNA, 19 nt, Artificial Sequence
  Description of Artificial Sequence: Synthetic oligonucleotide
  Sense strand starting at position 2786 of SEQ ID NO: 1243815
gcuguagucuccugaauaa

SEQ ID NO: 1443577 - RNA, 19 nt, Artificial Sequence
  Description of Artificial Sequence: Synthetic oligonucleotide
  Antisense strand to SEQ ID NO: 1443576
uuauucaggagacuacagc

SEQ ID NO: 1443578 - RNA, 19 nt, Artificial Sequence
  Description of Artificial Sequence: Synthetic oligonucleotide
  Sense strand starting at position 2823 of SEQ ID NO: 1243815
aagagaacccguugacuga

SEQ ID NO: 1443579 - RNA, 19 nt, Artificial Sequence
  Description of Artificial Sequence: Synthetic oligonucleotide
  Antisense strand to SEQ ID NO: 1443578
ucagucaacggguucucuu

SEQ ID NO: 1443580 - RNA, 19 nt, Artificial Sequence
  Description of Artificial Sequence: Synthetic oligonucleotide
  Sense strand starting at position 2827 of SEQ ID NO: 1243815
gaacccguugacugauaga

SEQ ID NO: 1443581 - RNA, 19 nt, Artificial Sequence
  Description of Artificial Sequence: Synthetic oligonucleotide
  Antisense strand to SEQ ID NO: 1443580
ucuaucagucaacggguuc

SEQ ID NO: 1443582 - RNA, 19 nt, Artificial Sequence
  Description of Artificial Sequence: Synthetic oligonucleotide
  Sense strand starting at position 2874 of SEQ ID NO: 1243815
cugacuauauucggacuua

SEQ ID NO: 1443583 - RNA, 19 nt, Artificial Sequence
  Description of Artificial Sequence: Synthetic oligonucleotide
  Antisense strand to SEQ ID NO: 1443582
uaaguccgaauauagucag

SEQ ID NO: 1443584 - RNA, 19 nt, Artificial Sequence
  Description of Artificial Sequence: Synthetic oligonucleotide
  Sense strand starting at position 2875 of SEQ ID NO: 1243815
ugacuauauucggacuuaa

SEQ ID NO: 1443585 - RNA, 19 nt, Artificial Sequence
  Description of Artificial Sequence: Synthetic oligonucleotide
  Antisense strand to SEQ ID NO: 1443584
uuaaguccgaauauaguca

SEQ ID NO: 1443586 - RNA, 19 nt, Artificial Sequence
  Description of Artificial Sequence: Synthetic oligonucleotide
  Sense strand starting at position 3057 of SEQ ID NO: 1243815
caggauugagcuggguaca

SEQ ID NO: 1443587 - RNA, 19 nt, Artificial Sequence
  Description of Artificial Sequence: Synthetic oligonucleotide
  Antisense strand to SEQ ID NO: 1443586
uguacccagcucaauccug

SEQ ID NO: 1443588 - RNA, 19 nt, Artificial Sequence
  Description of Artificial Sequence: Synthetic oligonucleotide
  Sense strand starting at position 3312 of SEQ ID NO: 1243815
ucccgcuuguuugacagaa

SEQ ID NO: 1443589 - RNA, 19 nt, Artificial Sequence
  Description of Artificial Sequence: Synthetic oligonucleotide
  Antisense strand to SEQ ID NO: 1443588
uucugucaaacaagcggga

SEQ ID NO: 1443590 - RNA, 19 nt, Artificial Sequence
  Description of Artificial Sequence: Synthetic oligonucleotide
  Sense strand starting at position 3314 of SEQ ID NO: 1243815
ccgcuuguuugacagaaug

SEQ ID NO: 1443591 - RNA, 19 nt, Artificial Sequence
  Description of Artificial Sequence: Synthetic oligonucleotide
  Antisense strand to SEQ ID NO: 1443590
cauucugucaaacaagcgg

SEQ ID NO: 1443592 - RNA, 19 nt, Artificial Sequence
  Description of Artificial Sequence: Synthetic oligonucleotide
  Sense strand starting at position 3387 of SEQ ID NO: 1243815
ccuaguaauuaguuuaucu

SEQ ID NO: 1443593 - RNA, 19 nt, Artificial Sequence
  Description of Artificial Sequence: Synthetic oligonucleotide
  Antisense strand to SEQ ID NO: 1443592
agauaaacuaauuacuagg

SEQ ID NO: 1443594 - RNA, 19 nt, Artificial Sequence
  Description of Artificial Sequence: Synthetic oligonucleotide
  Sense strand starting at position 34 of SEQ ID NO: 1243816
gagaucauguauuaagagu

SEQ ID NO: 1443595 - RNA, 19 nt, Artificial Sequence
  Description of Artificial Sequence: Synthetic oligonucleotide
  Antisense strand to SEQ ID NO: 1443594
acucuuaauacaugaucuc

SEQ ID NO: 1443596 - RNA, 19 nt, Artificial Sequence
  Description of Artificial Sequence: Synthetic oligonucleotide
  Sense strand starting at position 80 of SEQ ID NO: 1243816
ucagcaauugcgcauucuu

SEQ ID NO: 1443597 - RNA, 19 nt, Artificial Sequence
  Description of Artificial Sequence: Synthetic oligonucleotide
  Antisense strand to SEQ ID NO: 1443596
aagaaugcgcaauugcuga

SEQ ID NO: 1443598 - RNA, 19 nt, Artificial Sequence
  Description of Artificial Sequence: Synthetic oligonucleotide
  Sense strand starting at position 83 of SEQ ID NO: 1243816
gcaauugcgcauucuuacu

SEQ ID NO: 1443599 - RNA, 19 nt, Artificial Sequence
  Description of Artificial Sequence: Synthetic oligonucleotide
  Antisense strand to SEQ ID NO: 1443598
aguaagaaugcgcaauugc

SEQ ID NO: 1443600 - RNA, 19 nt, Artificial Sequence
  Description of Artificial Sequence: Synthetic oligonucleotide
  Sense strand starting at position 88 of SEQ ID NO: 1243816
ugcgcauucuuacugcuuu

SEQ ID NO: 1443601 - RNA, 19 nt, Artificial Sequence
  Description of Artificial Sequence: Synthetic oligonucleotide
  Antisense strand to SEQ ID NO: 1443600
aaagcaguaagaaugcgca

SEQ ID NO: 1443602 - RNA, 19 nt, Artificial Sequence
  Description of Artificial Sequence: Synthetic oligonucleotide
  Sense strand starting at position 1321 of SEQ ID NO: 1243816
gcccaugggagcuguuuau

SEQ ID NO: 1443603 - RNA, 19 nt, Artificial Sequence
  Description of Artificial Sequence: Synthetic oligonucleotide
  Antisense strand to SEQ ID NO: 1443602
auaaacagcucccaugggc

SEQ ID NO: 1443604 - RNA, 19 nt, Artificial Sequence
  Description of Artificial Sequence: Synthetic oligonucleotide
  Sense strand starting at position 1433 of SEQ ID NO: 1243816
gcaggagucuuauucugaa

SEQ ID NO: 1443605 - RNA, 19 nt, Artificial Sequence
  Description of Artificial Sequence: Synthetic oligonucleotide
  Antisense strand to SEQ ID NO: 1443604
uucagaauaagacuccugc

SEQ ID NO: 1443606 - RNA, 19 nt, Artificial Sequence
  Description of Artificial Sequence: Synthetic oligonucleotide
  Sense strand starting at position 1436 of SEQ ID NO: 1243816
ggagucuuauucugaauag

SEQ ID NO: 1443607 - RNA, 19 nt, Artificial Sequence
  Description of Artificial Sequence: Synthetic oligonucleotide
  Antisense strand to SEQ ID NO: 1443606
cuauucagaauaagacucc

SEQ ID NO: 1443608 - RNA, 19 nt, Artificial Sequence
  Description of Artificial Sequence: Synthetic oligonucleotide
  Sense strand starting at position 1437 of SEQ ID NO: 1243816
gagucuuauucugaauagu

SEQ ID NO: 1443609 - RNA, 19 nt, Artificial Sequence
  Description of Artificial Sequence: Synthetic oligonucleotide
  Antisense strand to SEQ ID NO: 1443608
acuauucagaauaagacuc

SEQ ID NO: 1443610 - RNA, 19 nt, Artificial Sequence
  Description of Artificial Sequence: Synthetic oligonucleotide
  Sense strand starting at position 1669 of SEQ ID NO: 1243816
uaggaacuugaauguuacu

SEQ ID NO: 1443611 - RNA, 19 nt, Artificial Sequence
  Description of Artificial Sequence: Synthetic oligonucleotide
  Antisense strand to SEQ ID NO: 1443610
aguaacauucaaguuccua

SEQ ID NO: 1443612 - RNA, 19 nt, Artificial Sequence
  Description of Artificial Sequence: Synthetic oligonucleotide
  Sense strand starting at position 1674 of SEQ ID NO: 1243816
acuugaauguuacugaaua

SEQ ID NO: 1443613 - RNA, 19 nt, Artificial Sequence
  Description of Artificial Sequence: Synthetic oligonucleotide
  Antisense strand to SEQ ID NO: 1443612
uauucaguaacauucaagu

SEQ ID NO: 1443614 - RNA, 19 nt, Artificial Sequence
  Description of Artificial Sequence: Synthetic oligonucleotide
  Sense strand starting at position 1675 of SEQ ID NO: 1243816
cuugaauguuacugaauau

SEQ ID NO: 1443615 - RNA, 19 nt, Artificial Sequence
  Description of Artificial Sequence: Synthetic oligonucleotide
  Antisense strand to SEQ ID NO: 1443614
auauucaguaacauucaag

SEQ ID NO: 1443616 - RNA, 19 nt, Artificial Sequence
  Description of Artificial Sequence: Synthetic oligonucleotide
  Sense strand starting at position 1842 of SEQ ID NO: 1243816
cuuacuuggugcugagagu

SEQ ID NO: 1443617 - RNA, 19 nt, Artificial Sequence
  Description of Artificial Sequence: Synthetic oligonucleotide
  Antisense strand to SEQ ID NO: 1443616
acucucagcaccaaguaag

SEQ ID NO: 1443618 - RNA, 19 nt, Artificial Sequence
  Description of Artificial Sequence: Synthetic oligonucleotide
  Sense strand starting at position 2477 of SEQ ID NO: 1243816
cuauauguuuccuugggca

SEQ ID NO: 1443619 - RNA, 19 nt, Artificial Sequence
  Description of Artificial Sequence: Synthetic oligonucleotide
  Antisense strand to SEQ ID NO: 1443618
ugcccaaggaaacauauag

SEQ ID NO: 1443620 - RNA, 19 nt, Artificial Sequence
  Description of Artificial Sequence: Synthetic oligonucleotide
  Sense strand starting at position 2550 of SEQ ID NO: 1243816
uuuguaaguucuuauugga

SEQ ID NO: 1443621 - RNA, 19 nt, Artificial Sequence
  Description of Artificial Sequence: Synthetic oligonucleotide
  Antisense strand to SEQ ID NO: 1443620
uccaauaagaacuuacaaa

SEQ ID NO: 1443622 - RNA, 19 nt, Artificial Sequence
  Description of Artificial Sequence: Synthetic oligonucleotide
  Sense strand starting at position 2553 of SEQ ID NO: 1243816
guaaguucuuauuggacac

SEQ ID NO: 1443623 - RNA, 19 nt, Artificial Sequence
  Description of Artificial Sequence: Synthetic oligonucleotide
  Antisense strand to SEQ ID NO: 1443622
guguccaauaagaacuuac

SEQ ID NO: 1443624 - RNA, 19 nt, Artificial Sequence
  Description of Artificial Sequence: Synthetic oligonucleotide
  Sense strand starting at position 2589 of SEQ ID NO: 1243816
cugggaaagcuguguuaca

SEQ ID NO: 1443625 - RNA, 19 nt, Artificial Sequence
  Description of Artificial Sequence: Synthetic oligonucleotide
  Antisense strand to SEQ ID NO: 1443624
uguaacacagcuuucccag

SEQ ID NO: 1443626 - RNA, 19 nt, Artificial Sequence
  Description of Artificial Sequence: Synthetic oligonucleotide
  Sense strand starting at position 2590 of SEQ ID NO: 1243816
ugggaaagcuguguuacac

SEQ ID NO: 1443627 - RNA, 19 nt, Artificial Sequence
  Description of Artificial Sequence: Synthetic oligonucleotide
  Antisense strand to SEQ ID NO: 1443626
guguaacacagcuuuccca

SEQ ID NO: 1443628 - RNA, 19 nt, Artificial Sequence
  Description of Artificial Sequence: Synthetic oligonucleotide
  Sense strand starting at position 2799 of SEQ ID NO: 1243816
ugcuguagucuccagaaua

SEQ ID NO: 1443629 - RNA, 19 nt, Artificial Sequence
  Description of Artificial Sequence: Synthetic oligonucleotide
  Antisense strand to SEQ ID NO: 1443628
uauucuggagacuacagca

SEQ ID NO: 1443630 - RNA, 19 nt, Artificial Sequence
  Description of Artificial Sequence: Synthetic oligonucleotide
  Sense strand starting at position 2820 of SEQ ID NO: 1243816
cauagagugugaccacaaa

SEQ ID NO: 1443631 - RNA, 19 nt, Artificial Sequence
  Description of Artificial Sequence: Synthetic oligonucleotide
  Antisense strand to SEQ ID NO: 1443630
uuuguggucacacucuaug

SEQ ID NO: 1443632 - RNA, 19 nt, Artificial Sequence
  Description of Artificial Sequence: Synthetic oligonucleotide
  Sense strand starting at position 2886 of SEQ ID NO: 1243816
gaccgauuauacucagacu

SEQ ID NO: 1443633 - RNA, 19 nt, Artificial Sequence
  Description of Artificial Sequence: Synthetic oligonucleotide
  Antisense strand to SEQ ID NO: 1443632
agucugaguauaaucgguc

SEQ ID NO: 1443634 - RNA, 19 nt, Artificial Sequence
  Description of Artificial Sequence: Synthetic oligonucleotide
  Sense strand starting at position 2889 of SEQ ID NO: 1243816
cgauuauacucagacuuaa

SEQ ID NO: 1443635 - RNA, 19 nt, Artificial Sequence
  Description of Artificial Sequence: Synthetic oligonucleotide
  Antisense strand to SEQ ID NO: 1443634
uuaagucugaguauaaucg

SEQ ID NO: 1443636 - RNA, 19 nt, Artificial Sequence
  Description of Artificial Sequence: Synthetic oligonucleotide
  Sense strand starting at position 3070 of SEQ ID NO: 1243816
acagaauugagcuggguac

SEQ ID NO: 1443637 - RNA, 19 nt, Artificial Sequence
  Description of Artificial Sequence: Synthetic oligonucleotide
  Antisense strand to SEQ ID NO: 1443636
guacccagcucaauucugu

SEQ ID NO: 1443638 - RNA, 19 nt, Artificial Sequence
  Description of Artificial Sequence: Synthetic oligonucleotide
  Sense strand starting at position 3071 of SEQ ID NO: 1243816
cagaauugagcuggguaca

SEQ ID NO: 1443639 - RNA, 19 nt, Artificial Sequence
  Description of Artificial Sequence: Synthetic oligonucleotide
  Antisense strand to SEQ ID NO: 1443638
uguacccagcucaauucug

SEQ ID NO: 1443640 - RNA, 19 nt, Artificial Sequence
  Description of Artificial Sequence: Synthetic oligonucleotide
  Sense strand starting at position 3224 of SEQ ID NO: 1243816
uugacugggaguggugaua

SEQ ID NO: 1443641 - RNA, 19 nt, Artificial Sequence
  Description of Artificial Sequence: Synthetic oligonucleotide
  Antisense strand to SEQ ID NO: 1443640
uaucaccacucccagucaa

SEQ ID NO: 1443642 - RNA, 19 nt, Artificial Sequence
  Description of Artificial Sequence: Synthetic oligonucleotide
  Sense strand starting at position 3341 of SEQ ID NO: 1243816
uccagcuuguuugacagaa

SEQ ID NO: 1443643 - RNA, 19 nt, Artificial Sequence
  Description of Artificial Sequence: Synthetic oligonucleotide
  Antisense strand to SEQ ID NO: 1443642
uucugucaaacaagcugga

SEQ ID NO: 1443644 - RNA, 19 nt, Artificial Sequence
  Description of Artificial Sequence: Synthetic oligonucleotide
  Sense strand starting at position 3343 of SEQ ID NO: 1243816
cagcuuguuugacagaaug

SEQ ID NO: 1443645 - RNA, 19 nt, Artificial Sequence
  Description of Artificial Sequence: Synthetic oligonucleotide
  Antisense strand to SEQ ID NO: 1443644
cauucugucaaacaagcug

SEQ ID NO: 1443646 - RNA, 19 nt, Artificial Sequence
  Description of Artificial Sequence: Synthetic oligonucleotide
  Sense strand starting at position 3434 of SEQ ID NO: 1243816
uuauauaccuaguaaugag

SEQ ID NO: 1443647 - RNA, 19 nt, Artificial Sequence
  Description of Artificial Sequence: Synthetic oligonucleotide
  Antisense strand to SEQ ID NO: 1443646
cucauuacuagguauauaa

SEQ ID NO: 1443648 - RNA, 19 nt, Artificial Sequence
  Description of Artificial Sequence: Synthetic oligonucleotide
  Sense strand starting at position 3449 of SEQ ID NO: 1243816
ugaguuuaucuauguuaca

SEQ ID NO: 1443649 - RNA, 19 nt, Artificial Sequence
  Description of Artificial Sequence: Synthetic oligonucleotide
  Antisense strand to SEQ ID NO: 1443648
uguaacauagauaaacuca

SEQ ID NO: 1443650 - RNA, 19 nt, Artificial Sequence
  Description of Artificial Sequence: Synthetic oligonucleotide
  Sense strand starting at position 3450 of SEQ ID NO: 1243816
gaguuuaucuauguuacag

SEQ ID NO: 1443651 - RNA, 19 nt, Artificial Sequence
  Description of Artificial Sequence: Synthetic oligonucleotide
  Antisense strand to SEQ ID NO: 1443650
cuguaacauagauaaacuc

SEQ ID NO: 1443652 - RNA, 19 nt, Artificial Sequence
  Description of Artificial Sequence: Synthetic oligonucleotide
  Sense strand starting at position 176 of SEQ ID NO: 1243817
uugccacugguguagaaau

SEQ ID NO: 1443653 - RNA, 19 nt, Artificial Sequence
  Description of Artificial Sequence: Synthetic oligonucleotide
  Antisense strand to SEQ ID NO: 1443652
auuucuacaccaguggcaa

SEQ ID NO: 1443654 - RNA, 19 nt, Artificial Sequence
  Description of Artificial Sequence: Synthetic oligonucleotide
  Sense strand starting at position 189 of SEQ ID NO: 1243817
agaaauacuccuugaugug

SEQ ID NO: 1443655 - RNA, 19 nt, Artificial Sequence
  Description of Artificial Sequence: Synthetic oligonucleotide
  Antisense strand to SEQ ID NO: 1443654
cacaucaaggaguauuucu

SEQ ID NO: 1443656 - RNA, 19 nt, Artificial Sequence
  Description of Artificial Sequence: Synthetic oligonucleotide
  Sense strand starting at position 256 of SEQ ID NO: 1243817
guccgaggaaucuggaaga

SEQ ID NO: 1443657 - RNA, 19 nt, Artificial Sequence
  Description of Artificial Sequence: Synthetic oligonucleotide
  Antisense strand to SEQ ID NO: 1443656
ucuuccagauuccucggac

SEQ ID NO: 1443658 - RNA, 19 nt, Artificial Sequence
  Description of Artificial Sequence: Synthetic oligonucleotide
  Sense strand starting at position 321 of SEQ ID NO: 1243817
gacauugugcuggacacuu

SEQ ID NO: 1443659 - RNA, 19 nt, Artificial Sequence
  Description of Artificial Sequence: Synthetic oligonucleotide
  Antisense strand to SEQ ID NO: 1443658
aaguguccagcacaauguc

SEQ ID NO: 1443660 - RNA, 19 nt, Artificial Sequence
  Description of Artificial Sequence: Synthetic oligonucleotide
  Sense strand starting at position 361 of SEQ ID NO: 1243817
acuguuaucuuccuugaca

SEQ ID NO: 1443661 - RNA, 19 nt, Artificial Sequence
  Description of Artificial Sequence: Synthetic oligonucleotide
  Antisense strand to SEQ ID NO: 1443660
ugucaaggaagauaacagu

SEQ ID NO: 1443662 - RNA, 19 nt, Artificial Sequence
  Description of Artificial Sequence: Synthetic oligonucleotide
  Sense strand starting at position 363 of SEQ ID NO: 1243817
uguuaucuuccuugacaga

SEQ ID NO: 1443663 - RNA, 19 nt, Artificial Sequence
  Description of Artificial Sequence: Synthetic oligonucleotide
  Antisense strand to SEQ ID NO: 1443662
ucugucaaggaagauaaca

SEQ ID NO: 1443664 - RNA, 19 nt, Artificial Sequence
  Description of Artificial Sequence: Synthetic oligonucleotide
  Sense strand starting at position 364 of SEQ ID NO: 1243817
guuaucuuccuugacagaa

SEQ ID NO: 1443665 - RNA, 19 nt, Artificial Sequence
  Description of Artificial Sequence: Synthetic oligonucleotide
  Antisense strand to SEQ ID NO: 1443664
uucugucaaggaagauaac

SEQ ID NO: 1443666 - RNA, 19 nt, Artificial Sequence
  Description of Artificial Sequence: Synthetic oligonucleotide
  Sense strand starting at position 402 of SEQ ID NO: 1243817
aagucacuuggccauggau

SEQ ID NO: 1443667 - RNA, 19 nt, Artificial Sequence
  Description of Artificial Sequence: Synthetic oligonucleotide
  Antisense strand to SEQ ID NO: 1443666
auccauggccaagugacuu

SEQ ID NO: 1443668 - RNA, 19 nt, Artificial Sequence
  Description of Artificial Sequence: Synthetic oligonucleotide
  Sense strand starting at position 404 of SEQ ID NO: 1243817
gucacuuggccauggauaa

SEQ ID NO: 1443669 - RNA, 19 nt, Artificial Sequence
  Description of Artificial Sequence: Synthetic oligonucleotide
  Antisense strand to SEQ ID NO: 1443668
uuauccauggccaagugac

SEQ ID NO: 1443670 - RNA, 19 nt, Artificial Sequence
  Description of Artificial Sequence: Synthetic oligonucleotide
  Sense strand starting at position 405 of SEQ ID NO: 1243817
ucacuuggccauggauaaa

SEQ ID NO: 1443671 - RNA, 19 nt, Artificial Sequence
  Description of Artificial Sequence: Synthetic oligonucleotide
  Antisense strand to SEQ ID NO: 1443670
uuuauccauggccaaguga

SEQ ID NO: 1443672 - RNA, 19 nt, Artificial Sequence
  Description of Artificial Sequence: Synthetic oligonucleotide
  Sense strand starting at position 588 of SEQ ID NO: 1243817
gaacuugguuucuuugaga

SEQ ID NO: 1443673 - RNA, 19 nt, Artificial Sequence
  Description of Artificial Sequence: Synthetic oligonucleotide
  Antisense strand to SEQ ID NO: 1443672
ucucaaagaaaccaaguuc

SEQ ID NO: 1443674 - RNA, 19 nt, Artificial Sequence
  Description of Artificial Sequence: Synthetic oligonucleotide
  Sense strand starting at position 675 of SEQ ID NO: 1243817
ccuggagaugcauauugua

SEQ ID NO: 1443675 - RNA, 19 nt, Artificial Sequence
  Description of Artificial Sequence: Synthetic oligonucleotide
  Antisense strand to SEQ ID NO: 1443674
uacaauaugcaucuccagg

SEQ ID NO: 1443676 - RNA, 19 nt, Artificial Sequence
  Description of Artificial Sequence: Synthetic oligonucleotide
  Sense strand starting at position 738 of SEQ ID NO: 1243817
gagaacuucuuguugguca

SEQ ID NO: 1443677 - RNA, 19 nt, Artificial Sequence
  Description of Artificial Sequence: Synthetic oligonucleotide
  Antisense strand to SEQ ID NO: 1443676
ugaccaacaagaaguucuc

SEQ ID NO: 1443678 - RNA, 19 nt, Artificial Sequence
  Description of Artificial Sequence: Synthetic oligonucleotide
  Sense strand starting at position 944 of SEQ ID NO: 1243817
aaggguuguggguauuaaa

SEQ ID NO: 1443679 - RNA, 19 nt, Artificial Sequence
  Description of Artificial Sequence: Synthetic oligonucleotide
  Antisense strand to SEQ ID NO: 1443678
uuuaauacccacaacccuu

SEQ ID NO: 1443680 - RNA, 19 nt, Artificial Sequence
  Description of Artificial Sequence: Synthetic oligonucleotide
  Sense strand starting at position 1301 of SEQ ID NO: 1243817
agcacaaugccugauccau

SEQ ID NO: 1443681 - RNA, 19 nt, Artificial Sequence
  Description of Artificial Sequence: Synthetic oligonucleotide
  Antisense strand to SEQ ID NO: 1443680
auggaucaggcauugugcu

SEQ ID NO: 1443682 - RNA, 19 nt, Artificial Sequence
  Description of Artificial Sequence: Synthetic oligonucleotide
  Sense strand starting at position 1307 of SEQ ID NO: 1243817
augccugauccauaguaac

SEQ ID NO: 1443683 - RNA, 19 nt, Artificial Sequence
  Description of Artificial Sequence: Synthetic oligonucleotide
  Antisense strand to SEQ ID NO: 1443682
guuacuauggaucaggcau

SEQ ID NO: 1443684 - RNA, 19 nt, Artificial Sequence
  Description of Artificial Sequence: Synthetic oligonucleotide
  Sense strand starting at position 1442 of SEQ ID NO: 1243817
agagaauauggcugucuca

SEQ ID NO: 1443685 - RNA, 19 nt, Artificial Sequence
  Description of Artificial Sequence: Synthetic oligonucleotide
  Antisense strand to SEQ ID NO: 1443684
ugagacagccauauucucu

SEQ ID NO: 1443686 - RNA, 19 nt, Artificial Sequence
  Description of Artificial Sequence: Synthetic oligonucleotide
  Sense strand starting at position 1776 of SEQ ID NO: 1243817
gugggacagucauugggau

SEQ ID NO: 1443687 - RNA, 19 nt, Artificial Sequence
  Description of Artificial Sequence: Synthetic oligonucleotide
  Antisense strand to SEQ ID NO: 1443686
aucccaaugacugucccac

SEQ ID NO: 1443688 - RNA, 19 nt, Artificial Sequence
  Description of Artificial Sequence: Synthetic oligonucleotide
  Sense strand starting at position 1837 of SEQ ID NO: 1243817
uggucaagaccaggacuua

SEQ ID NO: 1443689 - RNA, 19 nt, Artificial Sequence
  Description of Artificial Sequence: Synthetic oligonucleotide
  Antisense strand to SEQ ID NO: 1443688
uaaguccuggucuugacca

SEQ ID NO: 1443690 - RNA, 19 nt, Artificial Sequence
  Description of Artificial Sequence: Synthetic oligonucleotide
  Sense strand starting at position 1971 of SEQ ID NO: 1243817
ucuugauccucugcaggaa

SEQ ID NO: 1443691 - RNA, 19 nt, Artificial Sequence
  Description of Artificial Sequence: Synthetic oligonucleotide
  Antisense strand to SEQ ID NO: 1443690
uuccugcagaggaucaaga

SEQ ID NO: 1443692 - RNA, 19 nt, Artificial Sequence
  Description of Artificial Sequence: Synthetic oligonucleotide
  Sense strand starting at position 1972 of SEQ ID NO: 1243817
cuugauccucugcaggaau

SEQ ID NO: 1443693 - RNA, 19 nt, Artificial Sequence
  Description of Artificial Sequence: Synthetic oligonucleotide
  Antisense strand to SEQ ID NO: 1443692
auuccugcagaggaucaag

SEQ ID NO: 1443694 - RNA, 19 nt, Artificial Sequence
  Description of Artificial Sequence: Synthetic oligonucleotide
  Sense strand starting at position 2076 of SEQ ID NO: 1243817
ccgguaucauaagugaaau

SEQ ID NO: 1443695 - RNA, 19 nt, Artificial Sequence
  Description of Artificial Sequence: Synthetic oligonucleotide
  Antisense strand to SEQ ID NO: 1443694
auuucacuuaugauaccgg

SEQ ID NO: 1443696 - RNA, 19 nt, Artificial Sequence
  Description of Artificial Sequence: Synthetic oligonucleotide
  Sense strand starting at position 2077 of SEQ ID NO: 1243817
cgguaucauaagugaaauu

SEQ ID NO: 1443697 - RNA, 19 nt, Artificial Sequence
  Description of Artificial Sequence: Synthetic oligonucleotide
  Antisense strand to SEQ ID NO: 1443696
aauuucacuuaugauaccg

SEQ ID NO: 1443698 - RNA, 19 nt, Artificial Sequence
  Description of Artificial Sequence: Synthetic oligonucleotide
  Sense strand starting at position 2117 of SEQ ID NO: 1243817
ugaaauagccuccggaaau

SEQ ID NO: 1443699 - RNA, 19 nt, Artificial Sequence
  Description of Artificial Sequence: Synthetic oligonucleotide
  Antisense strand to SEQ ID NO: 1443698
auuuccggaggcuauuuca

SEQ ID NO: 1443700 - RNA, 19 nt, Artificial Sequence
  Description of Artificial Sequence: Synthetic oligonucleotide
  Sense strand starting at position 2326 of SEQ ID NO: 1243817
aucagaagucacugagucu

SEQ ID NO: 1443701 - RNA, 19 nt, Artificial Sequence
  Description of Artificial Sequence: Synthetic oligonucleotide
  Antisense strand to SEQ ID NO: 1443700
agacucagugacuucugau

SEQ ID NO: 1443702 - RNA, 19 nt, Artificial Sequence
  Description of Artificial Sequence: Synthetic oligonucleotide
  Sense strand starting at position 2329 of SEQ ID NO: 1243817
agaagucacugagucuuua

SEQ ID NO: 1443703 - RNA, 19 nt, Artificial Sequence
  Description of Artificial Sequence: Synthetic oligonucleotide
  Antisense strand to SEQ ID NO: 1443702
uaaagacucagugacuucu

SEQ ID NO: 1443704 - RNA, 19 nt, Artificial Sequence
  Description of Artificial Sequence: Synthetic oligonucleotide
  Sense strand starting at position 2340 of SEQ ID NO: 1243817
agucuuuauuacucacuga

SEQ ID NO: 1443705 - RNA, 19 nt, Artificial Sequence
  Description of Artificial Sequence: Synthetic oligonucleotide
  Antisense strand to SEQ ID NO: 1443704
ucagugaguaauaaagacu

SEQ ID NO: 1443706 - RNA, 19 nt, Artificial Sequence
  Description of Artificial Sequence: Synthetic oligonucleotide
  Sense strand starting at position 2343 of SEQ ID NO: 1243817
cuuuauuacucacugaguc

SEQ ID NO: 1443707 - RNA, 19 nt, Artificial Sequence
  Description of Artificial Sequence: Synthetic oligonucleotide
  Antisense strand to SEQ ID NO: 1443706
gacucagugaguaauaaag

SEQ ID NO: 1443708 - RNA, 19 nt, Artificial Sequence
  Description of Artificial Sequence: Synthetic oligonucleotide
  Sense strand starting at position 2344 of SEQ ID NO: 1243817
uuuauuacucacugaguca

SEQ ID NO: 1443709 - RNA, 19 nt, Artificial Sequence
  Description of Artificial Sequence: Synthetic oligonucleotide
  Antisense strand to SEQ ID NO: 1443708
ugacucagugaguaauaaa

SEQ ID NO: 1443710 - RNA, 19 nt, Artificial Sequence
  Description of Artificial Sequence: Synthetic oligonucleotide
  Sense strand starting at position 2420 of SEQ ID NO: 1243817
auggaaggauguuauuuau

SEQ ID NO: 1443711 - RNA, 19 nt, Artificial Sequence
  Description of Artificial Sequence: Synthetic oligonucleotide
  Antisense strand to SEQ ID NO: 1443710
auaaauaacauccuuccau

SEQ ID NO: 1443712 - RNA, 19 nt, Artificial Sequence
  Description of Artificial Sequence: Synthetic oligonucleotide
  Sense strand starting at position 2451 of SEQ ID NO: 1243817
ugaggaggguccucuggau

SEQ ID NO: 1443713 - RNA, 19 nt, Artificial Sequence
  Description of Artificial Sequence: Synthetic oligonucleotide
  Antisense strand to SEQ ID NO: 1443712
auccagaggacccuccuca

SEQ ID NO: 1443714 - RNA, 19 nt, Artificial Sequence
  Description of Artificial Sequence: Synthetic oligonucleotide
  Sense strand starting at position 2630 of SEQ ID NO: 1243817
cuaagcgaccuuugggaaa

SEQ ID NO: 1443715 - RNA, 19 nt, Artificial Sequence
  Description of Artificial Sequence: Synthetic oligonucleotide
  Antisense strand to SEQ ID NO: 1443714
uuucccaaaggucgcuuag

SEQ ID NO: 1443716 - RNA, 19 nt, Artificial Sequence
  Description of Artificial Sequence: Synthetic oligonucleotide
  Sense strand starting at position 2664 of SEQ ID NO: 1243817
ugaguucuauuuccuuguu

SEQ ID NO: 1443717 - RNA, 19 nt, Artificial Sequence
  Description of Artificial Sequence: Synthetic oligonucleotide
  Antisense strand to SEQ ID NO: 1443716
aacaaggaaauagaacuca

SEQ ID NO: 1443718 - RNA, 19 nt, Artificial Sequence
  Description of Artificial Sequence: Synthetic oligonucleotide
  Sense strand starting at position 2666 of SEQ ID NO: 1243817
aguucuauuuccuuguuua

SEQ ID NO: 1443719 - RNA, 19 nt, Artificial Sequence
  Description of Artificial Sequence: Synthetic oligonucleotide
  Antisense strand to SEQ ID NO: 1443718
uaaacaaggaaauagaacu

SEQ ID NO: 1443720 - RNA, 19 nt, Artificial Sequence
  Description of Artificial Sequence: Synthetic oligonucleotide
  Sense strand starting at position 2667 of SEQ ID NO: 1243817
guucuauuuccuuguuuau

SEQ ID NO: 1443721 - RNA, 19 nt, Artificial Sequence
  Description of Artificial Sequence: Synthetic oligonucleotide
  Antisense strand to SEQ ID NO: 1443720
auaaacaaggaaauagaac

SEQ ID NO: 1443722 - RNA, 19 nt, Artificial Sequence
  Description of Artificial Sequence: Synthetic oligonucleotide
  Sense strand starting at position 2699 of SEQ ID NO: 1243817
ugauuagagacuuguugag

SEQ ID NO: 1443723 - RNA, 19 nt, Artificial Sequence
  Description of Artificial Sequence: Synthetic oligonucleotide
  Antisense strand to SEQ ID NO: 1443722
cucaacaagucucuaauca

SEQ ID NO: 1443724 - RNA, 19 nt, Artificial Sequence
  Description of Artificial Sequence: Synthetic oligonucleotide
  Sense strand starting at position 2781 of SEQ ID NO: 1243817
ggcuuaucugugccagcca

SEQ ID NO: 1443725 - RNA, 19 nt, Artificial Sequence
  Description of Artificial Sequence: Synthetic oligonucleotide
  Antisense strand to SEQ ID NO: 1443724
uggcuggcacagauaagcc

SEQ ID NO: 1443726 - RNA, 19 nt, Artificial Sequence
  Description of Artificial Sequence: Synthetic oligonucleotide
  Sense strand starting at position 2819 of SEQ ID NO: 1243817
cgugucaacucauuuacua

SEQ ID NO: 1443727 - RNA, 19 nt, Artificial Sequence
  Description of Artificial Sequence: Synthetic oligonucleotide
  Antisense strand to SEQ ID NO: 1443726
uaguaaaugaguugacacg

SEQ ID NO: 1443728 - RNA, 19 nt, Artificial Sequence
  Description of Artificial Sequence: Synthetic oligonucleotide
  Sense strand starting at position 3121 of SEQ ID NO: 1243817
ggguucgugguuaggagua

SEQ ID NO: 1443729 - RNA, 19 nt, Artificial Sequence
  Description of Artificial Sequence: Synthetic oligonucleotide
  Antisense strand to SEQ ID NO: 1443728
uacuccuaaccacgaaccc

SEQ ID NO: 1443730 - RNA, 19 nt, Artificial Sequence
  Description of Artificial Sequence: Synthetic oligonucleotide
  Sense strand starting at position 3631 of SEQ ID NO: 1243817
guuuauugagagugacaaa

SEQ ID NO: 1443731 - RNA, 19 nt, Artificial Sequence
  Description of Artificial Sequence: Synthetic oligonucleotide
  Antisense strand to SEQ ID NO: 1443730
uuugucacucucaauaaac

SEQ ID NO: 1443732 - RNA, 19 nt, Artificial Sequence
  Description of Artificial Sequence: Synthetic oligonucleotide
  Sense strand starting at position 592 of SEQ ID NO: 1243818
gggaaaucugucuagccca

SEQ ID NO: 1443733 - RNA, 19 nt, Artificial Sequence
  Description of Artificial Sequence: Synthetic oligonucleotide
  Antisense strand to SEQ ID NO: 1443732
ugggcuagacagauuuccc

SEQ ID NO: 1443734 - RNA, 19 nt, Artificial Sequence
  Description of Artificial Sequence: Synthetic oligonucleotide
  Sense strand starting at position 701 of SEQ ID NO: 1243818
aagugaaucucucuugguu

SEQ ID NO: 1443735 - RNA, 19 nt, Artificial Sequence
  Description of Artificial Sequence: Synthetic oligonucleotide
  Antisense strand to SEQ ID NO: 1443734
aaccaagagagauucacuu

SEQ ID NO: 1443736 - RNA, 19 nt, Artificial Sequence
  Description of Artificial Sequence: Synthetic oligonucleotide
  Sense strand starting at position 813 of SEQ ID NO: 1243818
ggcaaaugucugggauaag

SEQ ID NO: 1443737 - RNA, 19 nt, Artificial Sequence
  Description of Artificial Sequence: Synthetic oligonucleotide
  Antisense strand to SEQ ID NO: 1443736
cuuaucccagacauuugcc

SEQ ID NO: 1443738 - RNA, 19 nt, Artificial Sequence
  Description of Artificial Sequence: Synthetic oligonucleotide
  Sense strand starting at position 828 of SEQ ID NO: 1243818
uaagguuagagaugcugua

SEQ ID NO: 1443739 - RNA, 19 nt, Artificial Sequence
  Description of Artificial Sequence: Synthetic oligonucleotide
  Antisense strand to SEQ ID NO: 1443738
uacagcaucucuaaccuua

SEQ ID NO: 1443740 - RNA, 19 nt, Artificial Sequence
  Description of Artificial Sequence: Synthetic oligonucleotide
  Sense strand starting at position 874 of SEQ ID NO: 1243818
uucugauacuaguccuauu

SEQ ID NO: 1443741 - RNA, 19 nt, Artificial Sequence
  Description of Artificial Sequence: Synthetic oligonucleotide
  Antisense strand to SEQ ID NO: 1443740
aauaggacuaguaucagaa

SEQ ID NO: 1443742 - RNA, 19 nt, Artificial Sequence
  Description of Artificial Sequence: Synthetic oligonucleotide
  Sense strand starting at position 937 of SEQ ID NO: 1243818
ggucaucguccacauacau

SEQ ID NO: 1443743 - RNA, 19 nt, Artificial Sequence
  Description of Artificial Sequence: Synthetic oligonucleotide
  Antisense strand to SEQ ID NO: 1443742
auguauguggacgaugacc

SEQ ID NO: 1443744 - RNA, 19 nt, Artificial Sequence
  Description of Artificial Sequence: Synthetic oligonucleotide
  Sense strand starting at position 1299 of SEQ ID NO: 1243818
agaggaauugauggcuacu

SEQ ID NO: 1443745 - RNA, 19 nt, Artificial Sequence
  Description of Artificial Sequence: Synthetic oligonucleotide
  Antisense strand to SEQ ID NO: 1443744
aguagccaucaauuccucu

SEQ ID NO: 1443746 - RNA, 19 nt, Artificial Sequence
  Description of Artificial Sequence: Synthetic oligonucleotide
  Sense strand starting at position 1421 of SEQ ID NO: 1243818
augaguuucccugauacgu

SEQ ID NO: 1443747 - RNA, 19 nt, Artificial Sequence
  Description of Artificial Sequence: Synthetic oligonucleotide
  Antisense strand to SEQ ID NO: 1443746
acguaucagggaaacucau

SEQ ID NO: 1443748 - RNA, 19 nt, Artificial Sequence
  Description of Artificial Sequence: Synthetic oligonucleotide
  Sense strand starting at position 1546 of SEQ ID NO: 1243818
ugucuuugaucacccugau

SEQ ID NO: 1443749 - RNA, 19 nt, Artificial Sequence
  Description of Artificial Sequence: Synthetic oligonucleotide
  Antisense strand to SEQ ID NO: 1443748
aucagggugaucaaagaca

SEQ ID NO: 1443750 - RNA, 19 nt, Artificial Sequence
  Description of Artificial Sequence: Synthetic oligonucleotide
  Sense strand starting at position 1563 of SEQ ID NO: 1243818
aucccaaauucugcuggaa

SEQ ID NO: 1443751 - RNA, 19 nt, Artificial Sequence
  Description of Artificial Sequence: Synthetic oligonucleotide
  Antisense strand to SEQ ID NO: 1443750
uuccagcagaauuugggau

SEQ ID NO: 1443752 - RNA, 19 nt, Artificial Sequence
  Description of Artificial Sequence: Synthetic oligonucleotide
  Sense strand starting at position 1566 of SEQ ID NO: 1243818
ccaaauucugcuggaagca

SEQ ID NO: 1443753 - RNA, 19 nt, Artificial Sequence
  Description of Artificial Sequence: Synthetic oligonucleotide
  Antisense strand to SEQ ID NO: 1443752
ugcuuccagcagaauuugg

SEQ ID NO: 1443754 - RNA, 19 nt, Artificial Sequence
  Description of Artificial Sequence: Synthetic oligonucleotide
  Sense strand starting at position 1770 of SEQ ID NO: 1243818
gguaucaggucuucuugau

SEQ ID NO: 1443755 - RNA, 19 nt, Artificial Sequence
  Description of Artificial Sequence: Synthetic oligonucleotide
  Antisense strand to SEQ ID NO: 1443754
aucaagaagaccugauacc

SEQ ID NO: 1443756 - RNA, 19 nt, Artificial Sequence
  Description of Artificial Sequence: Synthetic oligonucleotide
  Sense strand starting at position 1780 of SEQ ID NO: 1243818
cuucuugauugguccagga

SEQ ID NO: 1443757 - RNA, 19 nt, Artificial Sequence
  Description of Artificial Sequence: Synthetic oligonucleotide
  Antisense strand to SEQ ID NO: 1443756
uccuggaccaaucaagaag

SEQ ID NO: 1443758 - RNA, 19 nt, Artificial Sequence
  Description of Artificial Sequence: Synthetic oligonucleotide
  Sense strand starting at position 1784 of SEQ ID NO: 1243818
uugauugguccaggauaac

SEQ ID NO: 1443759 - RNA, 19 nt, Artificial Sequence
  Description of Artificial Sequence: Synthetic oligonucleotide
  Antisense strand to SEQ ID NO: 1443758
guuauccuggaccaaucaa

SEQ ID NO: 1443760 - RNA, 19 nt, Artificial Sequence
  Description of Artificial Sequence: Synthetic oligonucleotide
  Sense strand starting at position 2036 of SEQ ID NO: 1243818
gaggaugaaucauagaaug

SEQ ID NO: 1443761 - RNA, 19 nt, Artificial Sequence
  Description of Artificial Sequence: Synthetic oligonucleotide
  Antisense strand to SEQ ID NO: 1443760
cauucuaugauucauccuc

SEQ ID NO: 1443762 - RNA, 19 nt, Artificial Sequence
  Description of Artificial Sequence: Synthetic oligonucleotide
  Sense strand starting at position 2057 of SEQ ID NO: 1243818
guaauaaaucuauggagua

SEQ ID NO: 1443763 - RNA, 19 nt, Artificial Sequence
  Description of Artificial Sequence: Synthetic oligonucleotide
  Antisense strand to SEQ ID NO: 1443762
uacuccauagauuuauuac

SEQ ID NO: 1443764 - RNA, 19 nt, Artificial Sequence
  Description of Artificial Sequence: Synthetic oligonucleotide
  Sense strand starting at position 2121 of SEQ ID NO: 1243818
acaguaugagucgaggcua

SEQ ID NO: 1443765 - RNA, 19 nt, Artificial Sequence
  Description of Artificial Sequence: Synthetic oligonucleotide
  Antisense strand to SEQ ID NO: 1443764
uagccucgacucauacugu

SEQ ID NO: 1443766 - RNA, 19 nt, Artificial Sequence
  Description of Artificial Sequence: Synthetic oligonucleotide
  Sense strand starting at position 2161 of SEQ ID NO: 1243818
aggagugguaggugaggua

SEQ ID NO: 1443767 - RNA, 19 nt, Artificial Sequence
  Description of Artificial Sequence: Synthetic oligonucleotide
  Antisense strand to SEQ ID NO: 1443766
uaccucaccuaccacuccu

SEQ ID NO: 1443768 - RNA, 19 nt, Artificial Sequence
  Description of Artificial Sequence: Synthetic oligonucleotide
  Sense strand starting at position 2180 of SEQ ID NO: 1243818
gggucuauguagaggaaga

SEQ ID NO: 1443769 - RNA, 19 nt, Artificial Sequence
  Description of Artificial Sequence: Synthetic oligonucleotide
  Antisense strand to SEQ ID NO: 1443768
ucuuccucuacauagaccc

SEQ ID NO: 1443770 - RNA, 19 nt, Artificial Sequence
  Description of Artificial Sequence: Synthetic oligonucleotide
  Sense strand starting at position 2207 of SEQ ID NO: 1243818
uguaaucuauggcuauuau

SEQ ID NO: 1443771 - RNA, 19 nt, Artificial Sequence
  Description of Artificial Sequence: Synthetic oligonucleotide
  Antisense strand to SEQ ID NO: 1443770
auaauagccauagauuaca

SEQ ID NO: 1443772 - RNA, 19 nt, Artificial Sequence
  Description of Artificial Sequence: Synthetic oligonucleotide
  Sense strand starting at position 2208 of SEQ ID NO: 1243818
guaaucuauggcuauuauc

SEQ ID NO: 1443773 - RNA, 19 nt, Artificial Sequence
  Description of Artificial Sequence: Synthetic oligonucleotide
  Antisense strand to SEQ ID NO: 1443772
gauaauagccauagauuac

SEQ ID NO: 1443774 - RNA, 19 nt, Artificial Sequence
  Description of Artificial Sequence: Synthetic oligonucleotide
  Sense strand starting at position 2229 of SEQ ID NO: 1243818
gagaccaguuucucugaaa

SEQ ID NO: 1443775 - RNA, 19 nt, Artificial Sequence
  Description of Artificial Sequence: Synthetic oligonucleotide
  Antisense strand to SEQ ID NO: 1443774
uuucagagaaacuggucuc

SEQ ID NO: 1443776 - RNA, 19 nt, Artificial Sequence
  Description of Artificial Sequence: Synthetic oligonucleotide
  Sense strand starting at position 2230 of SEQ ID NO: 1243818
agaccaguuucucugaaau

SEQ ID NO: 1443777 - RNA, 19 nt, Artificial Sequence
  Description of Artificial Sequence: Synthetic oligonucleotide
  Antisense strand to SEQ ID NO: 1443776
auuucagagaaacuggucu

SEQ ID NO: 1443778 - RNA, 19 nt, Artificial Sequence
  Description of Artificial Sequence: Synthetic oligonucleotide
  Sense strand starting at position 2773 of SEQ ID NO: 1243818
ccuccacauggcuagauau

SEQ ID NO: 1443779 - RNA, 19 nt, Artificial Sequence
  Description of Artificial Sequence: Synthetic oligonucleotide
  Antisense strand to SEQ ID NO: 1443778
auaucuagccauguggagg

SEQ ID NO: 1443780 - RNA, 19 nt, Artificial Sequence
  Description of Artificial Sequence: Synthetic oligonucleotide
  Sense strand starting at position 3055 of SEQ ID NO: 1243818
acaagagacuucuugucau

SEQ ID NO: 1443781 - RNA, 19 nt, Artificial Sequence
  Description of Artificial Sequence: Synthetic oligonucleotide
  Antisense strand to SEQ ID NO: 1443780
augacaagaagucucuugu

SEQ ID NO: 1443782 - RNA, 19 nt, Artificial Sequence
  Description of Artificial Sequence: Synthetic oligonucleotide
  Sense strand starting at position 3058 of SEQ ID NO: 1243818
agagacuucuugucauucu

SEQ ID NO: 1443783 - RNA, 19 nt, Artificial Sequence
  Description of Artificial Sequence: Synthetic oligonucleotide
  Antisense strand to SEQ ID NO: 1443782
agaaugacaagaagucucu

SEQ ID NO: 1443784 - RNA, 19 nt, Artificial Sequence
  Description of Artificial Sequence: Synthetic oligonucleotide
  Sense strand starting at position 3243 of SEQ ID NO: 1243818
gguccucaugccuauaacu

SEQ ID NO: 1443785 - RNA, 19 nt, Artificial Sequence
  Description of Artificial Sequence: Synthetic oligonucleotide
  Antisense strand to SEQ ID NO: 1443784
aguuauaggcaugaggacc

SEQ ID NO: 1443786 - RNA, 19 nt, Artificial Sequence
  Description of Artificial Sequence: Synthetic oligonucleotide
  Sense strand starting at position 3336 of SEQ ID NO: 1243818
gaauauuaauuugggagca

SEQ ID NO: 1443787 - RNA, 19 nt, Artificial Sequence
  Description of Artificial Sequence: Synthetic oligonucleotide
  Antisense strand to SEQ ID NO: 1443786
ugcucccaaauuaauauuc

SEQ ID NO: 1443788 - RNA, 19 nt, Artificial Sequence
  Description of Artificial Sequence: Synthetic oligonucleotide
  Sense strand starting at position 3338 of SEQ ID NO: 1243818
auauuaauuugggagcaau

SEQ ID NO: 1443789 - RNA, 19 nt, Artificial Sequence
  Description of Artificial Sequence: Synthetic oligonucleotide
  Antisense strand to SEQ ID NO: 1443788
auugcucccaaauuaauau

SEQ ID NO: 1443790 - RNA, 19 nt, Artificial Sequence
  Description of Artificial Sequence: Synthetic oligonucleotide
  Sense strand starting at position 3609 of SEQ ID NO: 1243818
gcagaauccuuuccuuuga

SEQ ID NO: 1443791 - RNA, 19 nt, Artificial Sequence
  Description of Artificial Sequence: Synthetic oligonucleotide
  Antisense strand to SEQ ID NO: 1443790
ucaaaggaaaggauucugc

SEQ ID NO: 1443792 - RNA, 19 nt, Artificial Sequence
  Description of Artificial Sequence: Synthetic oligonucleotide
  Sense strand starting at position 3682 of SEQ ID NO: 1243818
ccugcugaaugaucgauga

SEQ ID NO: 1443793 - RNA, 19 nt, Artificial Sequence
  Description of Artificial Sequence: Synthetic oligonucleotide
  Antisense strand to SEQ ID NO: 1443792
ucaucgaucauucagcagg

SEQ ID NO: 1443794 - RNA, 19 nt, Artificial Sequence
  Description of Artificial Sequence: Synthetic oligonucleotide
  Sense strand starting at position 3686 of SEQ ID NO: 1243818
cugaaugaucgaugaaguu

SEQ ID NO: 1443795 - RNA, 19 nt, Artificial Sequence
  Description of Artificial Sequence: Synthetic oligonucleotide
  Antisense strand to SEQ ID NO: 1443794
aacuucaucgaucauucag

SEQ ID NO: 1443796 - RNA, 19 nt, Artificial Sequence
  Description of Artificial Sequence: Synthetic oligonucleotide
  Sense strand starting at position 3692 of SEQ ID NO: 1243818
gaucgaugaaguuggagua

SEQ ID NO: 1443797 - RNA, 19 nt, Artificial Sequence
  Description of Artificial Sequence: Synthetic oligonucleotide
  Antisense strand to SEQ ID NO: 1443796
uacuccaacuucaucgauc

SEQ ID NO: 1443798 - RNA, 19 nt, Artificial Sequence
  Description of Artificial Sequence: Synthetic oligonucleotide
  Sense strand starting at position 3695 of SEQ ID NO: 1243818
cgaugaaguuggaguagaa

SEQ ID NO: 1443799 - RNA, 19 nt, Artificial Sequence
  Description of Artificial Sequence: Synthetic oligonucleotide
  Antisense strand to SEQ ID NO: 1443798
uucuacuccaacuucaucg

SEQ ID NO: 1443800 - RNA, 19 nt, Artificial Sequence
  Description of Artificial Sequence: Synthetic oligonucleotide
  Sense strand starting at position 3817 of SEQ ID NO: 1243818
agaugucccugccuaagau

SEQ ID NO: 1443801 - RNA, 19 nt, Artificial Sequence
  Description of Artificial Sequence: Synthetic oligonucleotide
  Antisense strand to SEQ ID NO: 1443800
aucuuaggcagggacaucu

SEQ ID NO: 1443802 - RNA, 19 nt, Artificial Sequence
  Description of Artificial Sequence: Synthetic oligonucleotide
  Sense strand starting at position 3848 of SEQ ID NO: 1243818
gccugcuuauauuuaugau

SEQ ID NO: 1443803 - RNA, 19 nt, Artificial Sequence
  Description of Artificial Sequence: Synthetic oligonucleotide
  Antisense strand to SEQ ID NO: 1443802
aucauaaauauaagcaggc

SEQ ID NO: 1443804 - RNA, 19 nt, Artificial Sequence
  Description of Artificial Sequence: Synthetic oligonucleotide
  Sense strand starting at position 3924 of SEQ ID NO: 1243818
ugaauuguugcagaauguu

SEQ ID NO: 1443805 - RNA, 19 nt, Artificial Sequence
  Description of Artificial Sequence: Synthetic oligonucleotide
  Antisense strand to SEQ ID NO: 1443804
aacauucugcaacaauuca

SEQ ID NO: 1443806 - RNA, 19 nt, Artificial Sequence
  Description of Artificial Sequence: Synthetic oligonucleotide
  Sense strand starting at position 3968 of SEQ ID NO: 1243818
acaauauaagcugguugua

SEQ ID NO: 1443807 - RNA, 19 nt, Artificial Sequence
  Description of Artificial Sequence: Synthetic oligonucleotide
  Antisense strand to SEQ ID NO: 1443806
uacaaccagcuuauauugu

SEQ ID NO: 1443808 - RNA, 19 nt, Artificial Sequence
  Description of Artificial Sequence: Synthetic oligonucleotide
  Sense strand starting at position 3970 of SEQ ID NO: 1243818
aauauaagcugguuguaga

SEQ ID NO: 1443809 - RNA, 19 nt, Artificial Sequence
  Description of Artificial Sequence: Synthetic oligonucleotide
  Antisense strand to SEQ ID NO: 1443808
ucuacaaccagcuuauauu

SEQ ID NO: 1443810 - RNA, 19 nt, Artificial Sequence
  Description of Artificial Sequence: Synthetic oligonucleotide
  Sense strand starting at position 3971 of SEQ ID NO: 1243818
auauaagcugguuguagaa

SEQ ID NO: 1443811 - RNA, 19 nt, Artificial Sequence
  Description of Artificial Sequence: Synthetic oligonucleotide
  Antisense strand to SEQ ID NO: 1443810
uucuacaaccagcuuauau

SEQ ID NO: 1443812 - RNA, 19 nt, Artificial Sequence
  Description of Artificial Sequence: Synthetic oligonucleotide
  Sense strand starting at position 307 of SEQ ID NO: 1243819
ggccauuggucccuagaac

SEQ ID NO: 1443813 - RNA, 19 nt, Artificial Sequence
  Description of Artificial Sequence: Synthetic oligonucleotide
  Antisense strand to SEQ ID NO: 1443812
guucuagggaccaauggcc

SEQ ID NO: 1443814 - RNA, 19 nt, Artificial Sequence
  Description of Artificial Sequence: Synthetic oligonucleotide
  Sense strand starting at position 308 of SEQ ID NO: 1243819
gccauuggucccuagaacu

SEQ ID NO: 1443815 - RNA, 19 nt, Artificial Sequence
  Description of Artificial Sequence: Synthetic oligonucleotide
  Antisense strand to SEQ ID NO: 1443814
aguucuagggaccaauggc

SEQ ID NO: 1443816 - RNA, 19 nt, Artificial Sequence
  Description of Artificial Sequence: Synthetic oligonucleotide
  Sense strand starting at position 442 of SEQ ID NO: 1243819
caggguccuggcuacagau

SEQ ID NO: 1443817 - RNA, 19 nt, Artificial Sequence
  Description of Artificial Sequence: Synthetic oligonucleotide
  Antisense strand to SEQ ID NO: 1443816
aucuguagccaggacccug

SEQ ID NO: 1443818 - RNA, 19 nt, Artificial Sequence
  Description of Artificial Sequence: Synthetic oligonucleotide
  Sense strand starting at position 444 of SEQ ID NO: 1243819
ggguccuggcuacagauau

SEQ ID NO: 1443819 - RNA, 19 nt, Artificial Sequence
  Description of Artificial Sequence: Synthetic oligonucleotide
  Antisense strand to SEQ ID NO: 1443818
auaucuguagccaggaccc

SEQ ID NO: 1443820 - RNA, 19 nt, Artificial Sequence
  Description of Artificial Sequence: Synthetic oligonucleotide
  Sense strand starting at position 454 of SEQ ID NO: 1243819
uacagauauuggguuaguu

SEQ ID NO: 1443821 - RNA, 19 nt, Artificial Sequence
  Description of Artificial Sequence: Synthetic oligonucleotide
  Antisense strand to SEQ ID NO: 1443820
aacuaacccaauaucugua

SEQ ID NO: 1443822 - RNA, 19 nt, Artificial Sequence
  Description of Artificial Sequence: Synthetic oligonucleotide
  Sense strand starting at position 456 of SEQ ID NO: 1243819
cagauauuggguuaguuuc

SEQ ID NO: 1443823 - RNA, 19 nt, Artificial Sequence
  Description of Artificial Sequence: Synthetic oligonucleotide
  Antisense strand to SEQ ID NO: 1443822
gaaacuaacccaauaucug

SEQ ID NO: 1443824 - RNA, 19 nt, Artificial Sequence
  Description of Artificial Sequence: Synthetic oligonucleotide
  Sense strand starting at position 491 of SEQ ID NO: 1243819
ggaauccuagagcaguuau

SEQ ID NO: 1443825 - RNA, 19 nt, Artificial Sequence
  Description of Artificial Sequence: Synthetic oligonucleotide
  Antisense strand to SEQ ID NO: 1443824
auaacugcucuaggauucc

SEQ ID NO: 1443826 - RNA, 19 nt, Artificial Sequence
  Description of Artificial Sequence: Synthetic oligonucleotide
  Sense strand starting at position 516 of SEQ ID NO: 1243819
cuucucauggacugaguuu

SEQ ID NO: 1443827 - RNA, 19 nt, Artificial Sequence
  Description of Artificial Sequence: Synthetic oligonucleotide
  Antisense strand to SEQ ID NO: 1443826
aaacucaguccaugagaag

SEQ ID NO: 1443828 - RNA, 19 nt, Artificial Sequence
  Description of Artificial Sequence: Synthetic oligonucleotide
  Sense strand starting at position 550 of SEQ ID NO: 1243819
gggcccuuuggauagaagu

SEQ ID NO: 1443829 - RNA, 19 nt, Artificial Sequence
  Description of Artificial Sequence: Synthetic oligonucleotide
  Antisense strand to SEQ ID NO: 1443828
acuucuauccaaagggccc

SEQ ID NO: 1443830 - RNA, 19 nt, Artificial Sequence
  Description of Artificial Sequence: Synthetic oligonucleotide
  Sense strand starting at position 552 of SEQ ID NO: 1243819
gcccuuuggauagaaguua

SEQ ID NO: 1443831 - RNA, 19 nt, Artificial Sequence
  Description of Artificial Sequence: Synthetic oligonucleotide
  Antisense strand to SEQ ID NO: 1443830
uaacuucuauccaaagggc

SEQ ID NO: 1443832 - RNA, 19 nt, Artificial Sequence
  Description of Artificial Sequence: Synthetic oligonucleotide
  Sense strand starting at position 563 of SEQ ID NO: 1243819
agaaguuauaugcauccga

SEQ ID NO: 1443833 - RNA, 19 nt, Artificial Sequence
  Description of Artificial Sequence: Synthetic oligonucleotide
  Antisense strand to SEQ ID NO: 1443832
ucggaugcauauaacuucu

SEQ ID NO: 1443834 - RNA, 19 nt, Artificial Sequence
  Description of Artificial Sequence: Synthetic oligonucleotide
  Sense strand starting at position 598 of SEQ ID NO: 1243819
ucuugacuucucuauguug

SEQ ID NO: 1443835 - RNA, 19 nt, Artificial Sequence
  Description of Artificial Sequence: Synthetic oligonucleotide
  Antisense strand to SEQ ID NO: 1443834
caacauagagaagucaaga

SEQ ID NO: 1443836 - RNA, 19 nt, Artificial Sequence
  Description of Artificial Sequence: Synthetic oligonucleotide
  Sense strand starting at position 607 of SEQ ID NO: 1243819
cucuauguuguccaucaga

SEQ ID NO: 1443837 - RNA, 19 nt, Artificial Sequence
  Description of Artificial Sequence: Synthetic oligonucleotide
  Antisense strand to SEQ ID NO: 1443836
ucugauggacaacauagag

SEQ ID NO: 1443838 - RNA, 19 nt, Artificial Sequence
  Description of Artificial Sequence: Synthetic oligonucleotide
  Sense strand starting at position 892 of SEQ ID NO: 1243819
ugucuuaguccagauccca

SEQ ID NO: 1443839 - RNA, 19 nt, Artificial Sequence
  Description of Artificial Sequence: Synthetic oligonucleotide
  Antisense strand to SEQ ID NO: 1443838
ugggaucuggacuaagaca

SEQ ID NO: 1443840 - RNA, 19 nt, Artificial Sequence
  Description of Artificial Sequence: Synthetic oligonucleotide
  Sense strand starting at position 1078 of SEQ ID NO: 1243819
ccucaugggcuuuagaguu

SEQ ID NO: 1443841 - RNA, 19 nt, Artificial Sequence
  Description of Artificial Sequence: Synthetic oligonucleotide
  Antisense strand to SEQ ID NO: 1443840
aacucuaaagcccaugagg

SEQ ID NO: 1443842 - RNA, 19 nt, Artificial Sequence
  Description of Artificial Sequence: Synthetic oligonucleotide
  Sense strand starting at position 1084 of SEQ ID NO: 1243819
gggcuuuagaguuagccua

SEQ ID NO: 1443843 - RNA, 19 nt, Artificial Sequence
  Description of Artificial Sequence: Synthetic oligonucleotide
  Antisense strand to SEQ ID NO: 1443842
uaggcuaacucuaaagccc

SEQ ID NO: 1443844 - RNA, 19 nt, Artificial Sequence
  Description of Artificial Sequence: Synthetic oligonucleotide
  Sense strand starting at position 1147 of SEQ ID NO: 1243819
gccacuguucuggaaggua

SEQ ID NO: 1443845 - RNA, 19 nt, Artificial Sequence
  Description of Artificial Sequence: Synthetic oligonucleotide
  Antisense strand to SEQ ID NO: 1443844
uaccuuccagaacaguggc

SEQ ID NO: 1443846 - RNA, 19 nt, Artificial Sequence
  Description of Artificial Sequence: Synthetic oligonucleotide
  Sense strand starting at position 1216 of SEQ ID NO: 1243819
ccacuacggccugaaaugu

SEQ ID NO: 1443847 - RNA, 19 nt, Artificial Sequence
  Description of Artificial Sequence: Synthetic oligonucleotide
  Antisense strand to SEQ ID NO: 1443846
acauuucaggccguagugg

SEQ ID NO: 1443848 - RNA, 19 nt, Artificial Sequence
  Description of Artificial Sequence: Synthetic oligonucleotide
  Sense strand starting at position 1398 of SEQ ID NO: 1243819
ccuaaugagcugugacaua

SEQ ID NO: 1443849 - RNA, 19 nt, Artificial Sequence
  Description of Artificial Sequence: Synthetic oligonucleotide
  Antisense strand to SEQ ID NO: 1443848
uaugucacagcucauuagg

SEQ ID NO: 1443850 - RNA, 19 nt, Artificial Sequence
  Description of Artificial Sequence: Synthetic oligonucleotide
  Sense strand starting at position 1460 of SEQ ID NO: 1243819
agaggucuuaccuggcuga

SEQ ID NO: 1443851 - RNA, 19 nt, Artificial Sequence
  Description of Artificial Sequence: Synthetic oligonucleotide
  Antisense strand to SEQ ID NO: 1443850
ucagccagguaagaccucu

SEQ ID NO: 1443852 - RNA, 19 nt, Artificial Sequence
  Description of Artificial Sequence: Synthetic oligonucleotide
  Sense strand starting at position 1987 of SEQ ID NO: 1243819
ggugcucuccaucacacua

SEQ ID NO: 1443853 - RNA, 19 nt, Artificial Sequence
  Description of Artificial Sequence: Synthetic oligonucleotide
  Antisense strand to SEQ ID NO: 1443852
uagugugauggagagcacc

SEQ ID NO: 1443854 - RNA, 19 nt, Artificial Sequence
  Description of Artificial Sequence: Synthetic oligonucleotide
  Sense strand starting at position 2053 of SEQ ID NO: 1243819
cacagaacguuggcagaau

SEQ ID NO: 1443855 - RNA, 19 nt, Artificial Sequence
  Description of Artificial Sequence: Synthetic oligonucleotide
  Antisense strand to SEQ ID NO: 1443854
auucugccaacguucugug

SEQ ID NO: 1443856 - RNA, 19 nt, Artificial Sequence
  Description of Artificial Sequence: Synthetic oligonucleotide
  Sense strand starting at position 2109 of SEQ ID NO: 1243819
cuuacuguugcagagggua

SEQ ID NO: 1443857 - RNA, 19 nt, Artificial Sequence
  Description of Artificial Sequence: Synthetic oligonucleotide
  Antisense strand to SEQ ID NO: 1443856
uacccucugcaacaguaag

SEQ ID NO: 1443858 - RNA, 19 nt, Artificial Sequence
  Description of Artificial Sequence: Synthetic oligonucleotide
  Sense strand starting at position 2226 of SEQ ID NO: 1243819
ccaauaugucauggagauu

SEQ ID NO: 1443859 - RNA, 19 nt, Artificial Sequence
  Description of Artificial Sequence: Synthetic oligonucleotide
  Antisense strand to SEQ ID NO: 1443858
aaucuccaugacauauugg

SEQ ID NO: 1443860 - RNA, 19 nt, Artificial Sequence
  Description of Artificial Sequence: Synthetic oligonucleotide
  Sense strand starting at position 2524 of SEQ ID NO: 1243819
ucauaugcauaguuggaau

SEQ ID NO: 1443861 - RNA, 19 nt, Artificial Sequence
  Description of Artificial Sequence: Synthetic oligonucleotide
  Antisense strand to SEQ ID NO: 1443860
auuccaacuaugcauauga

SEQ ID NO: 1443862 - RNA, 19 nt, Artificial Sequence
  Description of Artificial Sequence: Synthetic oligonucleotide
  Sense strand starting at position 2794 of SEQ ID NO: 1243819
accuauugaucuccaguuu

SEQ ID NO: 1443863 - RNA, 19 nt, Artificial Sequence
  Description of Artificial Sequence: Synthetic oligonucleotide
  Antisense strand to SEQ ID NO: 1443862
aaacuggagaucaauaggu

SEQ ID NO: 1443864 - RNA, 19 nt, Artificial Sequence
  Description of Artificial Sequence: Synthetic oligonucleotide
  Sense strand starting at position 2878 of SEQ ID NO: 1243819
uaccucaugugagugaaau

SEQ ID NO: 1443865 - RNA, 19 nt, Artificial Sequence
  Description of Artificial Sequence: Synthetic oligonucleotide
  Antisense strand to SEQ ID NO: 1443864
auuucacucacaugaggua

SEQ ID NO: 1443866 - RNA, 19 nt, Artificial Sequence
  Description of Artificial Sequence: Synthetic oligonucleotide
  Sense strand starting at position 2879 of SEQ ID NO: 1243819
accucaugugagugaaauc

SEQ ID NO: 1443867 - RNA, 19 nt, Artificial Sequence
  Description of Artificial Sequence: Synthetic oligonucleotide
  Antisense strand to SEQ ID NO: 1443866
gauuucacucacaugaggu

SEQ ID NO: 1443868 - RNA, 19 nt, Artificial Sequence
  Description of Artificial Sequence: Synthetic oligonucleotide
  Sense strand starting at position 2923 of SEQ ID NO: 1243819
gcuuaugucauuuagcgua

SEQ ID NO: 1443869 - RNA, 19 nt, Artificial Sequence
  Description of Artificial Sequence: Synthetic oligonucleotide
  Antisense strand to SEQ ID NO: 1443868
uacgcuaaaugacauaagc

SEQ ID NO: 1443870 - RNA, 19 nt, Artificial Sequence
  Description of Artificial Sequence: Synthetic oligonucleotide
  Sense strand starting at position 2980 of SEQ ID NO: 1243819
gcuacauauccuuaaggcu

SEQ ID NO: 1443871 - RNA, 19 nt, Artificial Sequence
  Description of Artificial Sequence: Synthetic oligonucleotide
  Antisense strand to SEQ ID NO: 1443870
agccuuaaggauauguagc

SEQ ID NO: 1443872 - RNA, 19 nt, Artificial Sequence
  Description of Artificial Sequence: Synthetic oligonucleotide
  Sense strand starting at position 2986 of SEQ ID NO: 1243819
uauccuuaaggcugaguaa

SEQ ID NO: 1443873 - RNA, 19 nt, Artificial Sequence
  Description of Artificial Sequence: Synthetic oligonucleotide
  Antisense strand to SEQ ID NO: 1443872
uuacucagccuuaaggaua

SEQ ID NO: 1443874 - RNA, 19 nt, Artificial Sequence
  Description of Artificial Sequence: Synthetic oligonucleotide
  Sense strand starting at position 2987 of SEQ ID NO: 1243819
auccuuaaggcugaguaau

SEQ ID NO: 1443875 - RNA, 19 nt, Artificial Sequence
  Description of Artificial Sequence: Synthetic oligonucleotide
  Antisense strand to SEQ ID NO: 1443874
auuacucagccuuaaggau

SEQ ID NO: 1443876 - RNA, 19 nt, Artificial Sequence
  Description of Artificial Sequence: Synthetic oligonucleotide
  Sense strand starting at position 2989 of SEQ ID NO: 1243819
ccuuaaggcugaguaauau

SEQ ID NO: 1443877 - RNA, 19 nt, Artificial Sequence
  Description of Artificial Sequence: Synthetic oligonucleotide
  Antisense strand to SEQ ID NO: 1443876
auauuacucagccuuaagg

SEQ ID NO: 1443878 - RNA, 19 nt, Artificial Sequence
  Description of Artificial Sequence: Synthetic oligonucleotide
  Sense strand starting at position 3275 of SEQ ID NO: 1243819
ugggauuguguugaaggua

SEQ ID NO: 1443879 - RNA, 19 nt, Artificial Sequence
  Description of Artificial Sequence: Synthetic oligonucleotide
  Antisense strand to SEQ ID NO: 1443878
uaccuucaacacaauccca

SEQ ID NO: 1443880 - RNA, 19 nt, Artificial Sequence
  Description of Artificial Sequence: Synthetic oligonucleotide
  Sense strand starting at position 3280 of SEQ ID NO: 1243819
uuguguugaagguacagau

SEQ ID NO: 1443881 - RNA, 19 nt, Artificial Sequence
  Description of Artificial Sequence: Synthetic oligonucleotide
  Antisense strand to SEQ ID NO: 1443880
aucuguaccuucaacacaa

SEQ ID NO: 1443882 - RNA, 19 nt, Artificial Sequence
  Description of Artificial Sequence: Synthetic oligonucleotide
  Sense strand starting at position 3373 of SEQ ID NO: 1243819
uuagaucgucuuuaaucuu

SEQ ID NO: 1443883 - RNA, 19 nt, Artificial Sequence
  Description of Artificial Sequence: Synthetic oligonucleotide
  Antisense strand to SEQ ID NO: 1443882
aagauuaaagacgaucuaa

SEQ ID NO: 1443884 - RNA, 19 nt, Artificial Sequence
  Description of Artificial Sequence: Synthetic oligonucleotide
  Sense strand starting at position 3404 of SEQ ID NO: 1243819
uguaguuucccucauauau

SEQ ID NO: 1443885 - RNA, 19 nt, Artificial Sequence
  Description of Artificial Sequence: Synthetic oligonucleotide
  Antisense strand to SEQ ID NO: 1443884
auauaugagggaaacuaca

SEQ ID NO: 1443886 - RNA, 19 nt, Artificial Sequence
  Description of Artificial Sequence: Synthetic oligonucleotide
  Sense strand starting at position 3604 of SEQ ID NO: 1243819
ugcugauucucuguaauuu

SEQ ID NO: 1443887 - RNA, 19 nt, Artificial Sequence
  Description of Artificial Sequence: Synthetic oligonucleotide
  Antisense strand to SEQ ID NO: 1443886
aaauuacagagaaucagca

SEQ ID NO: 1443888 - RNA, 19 nt, Artificial Sequence
  Description of Artificial Sequence: Synthetic oligonucleotide
  Sense strand starting at position 3724 of SEQ ID NO: 1243819
uaggccuuccaguauuaug

SEQ ID NO: 1443889 - RNA, 19 nt, Artificial Sequence
  Description of Artificial Sequence: Synthetic oligonucleotide
  Antisense strand to SEQ ID NO: 1443888
cauaauacuggaaggccua

SEQ ID NO: 1443890 - RNA, 19 nt, Artificial Sequence
  Description of Artificial Sequence: Synthetic oligonucleotide
  Sense strand starting at position 3867 of SEQ ID NO: 1243819
gaggaaguaucccucuauu

SEQ ID NO: 1443891 - RNA, 19 nt, Artificial Sequence
  Description of Artificial Sequence: Synthetic oligonucleotide
  Antisense strand to SEQ ID NO: 1443890
aauagagggauacuuccuc

SEQ ID NO: 1443892 - RNA, 19 nt, Artificial Sequence
  Description of Artificial Sequence: Synthetic oligonucleotide
  Sense strand starting at position 746 of SEQ ID NO: 1243820
cgaguaugcguccucuuca

SEQ ID NO: 1443893 - RNA, 19 nt, Artificial Sequence
  Description of Artificial Sequence: Synthetic oligonucleotide
  Antisense strand to SEQ ID NO: 1443892
ugaagaggacgcauacucg

SEQ ID NO: 1443894 - RNA, 19 nt, Artificial Sequence
  Description of Artificial Sequence: Synthetic oligonucleotide
  Sense strand starting at position 802 of SEQ ID NO: 1243820
aaaugagaggcgggaucuu

SEQ ID NO: 1443895 - RNA, 19 nt, Artificial Sequence
  Description of Artificial Sequence: Synthetic oligonucleotide
  Antisense strand to SEQ ID NO: 1443894
aagaucccgccucucauuu

SEQ ID NO: 1443896 - RNA, 19 nt, Artificial Sequence
  Description of Artificial Sequence: Synthetic oligonucleotide
  Sense strand starting at position 813 of SEQ ID NO: 1243820
gggaucuuaugagacacau

SEQ ID NO: 1443897 - RNA, 19 nt, Artificial Sequence
  Description of Artificial Sequence: Synthetic oligonucleotide
  Antisense strand to SEQ ID NO: 1443896
augugucucauaagauccc

SEQ ID NO: 1443898 - RNA, 19 nt, Artificial Sequence
  Description of Artificial Sequence: Synthetic oligonucleotide
  Sense strand starting at position 1018 of SEQ ID NO: 1243820
gccacuugcucuuucuaga

SEQ ID NO: 1443899 - RNA, 19 nt, Artificial Sequence
  Description of Artificial Sequence: Synthetic oligonucleotide
  Antisense strand to SEQ ID NO: 1443898
ucuagaaagagcaaguggc

SEQ ID NO: 1443900 - RNA, 19 nt, Artificial Sequence
  Description of Artificial Sequence: Synthetic oligonucleotide
  Sense strand starting at position 1039 of SEQ ID NO: 1243820
ucaguuaccuaaccuguaa

SEQ ID NO: 1443901 - RNA, 19 nt, Artificial Sequence
  Description of Artificial Sequence: Synthetic oligonucleotide
  Antisense strand to SEQ ID NO: 1443900
uuacagguuagguaacuga

SEQ ID NO: 1443902 - RNA, 19 nt, Artificial Sequence
  Description of Artificial Sequence: Synthetic oligonucleotide
  Sense strand starting at position 1043 of SEQ ID NO: 1243820
uuaccuaaccuguaauguu

SEQ ID NO: 1443903 - RNA, 19 nt, Artificial Sequence
  Description of Artificial Sequence: Synthetic oligonucleotide
  Antisense strand to SEQ ID NO: 1443902
aacauuacagguuagguaa

SEQ ID NO: 1443904 - RNA, 19 nt, Artificial Sequence
  Description of Artificial Sequence: Synthetic oligonucleotide
  Sense strand starting at position 1050 of SEQ ID NO: 1243820
accuguaauguugagauua

SEQ ID NO: 1443905 - RNA, 19 nt, Artificial Sequence
  Description of Artificial Sequence: Synthetic oligonucleotide
  Antisense strand to SEQ ID NO: 1443904
uaaucucaacauuacaggu

SEQ ID NO: 1443906 - RNA, 19 nt, Artificial Sequence
  Description of Artificial Sequence: Synthetic oligonucleotide
  Sense strand starting at position 1089 of SEQ ID NO: 1243820
ucucaagguuugcugugaa

SEQ ID NO: 1443907 - RNA, 19 nt, Artificial Sequence
  Description of Artificial Sequence: Synthetic oligonucleotide
  Antisense strand to SEQ ID NO: 1443906
uucacagcaaaccuugaga

SEQ ID NO: 1443908 - RNA, 19 nt, Artificial Sequence
  Description of Artificial Sequence: Synthetic oligonucleotide
  Sense strand starting at position 1092 of SEQ ID NO: 1243820
caagguuugcugugaagau

SEQ ID NO: 1443909 - RNA, 19 nt, Artificial Sequence
  Description of Artificial Sequence: Synthetic oligonucleotide
  Antisense strand to SEQ ID NO: 1443908
aucuucacagcaaaccuug

SEQ ID NO: 1443910 - RNA, 19 nt, Artificial Sequence
  Description of Artificial Sequence: Synthetic oligonucleotide
  Sense strand starting at position 1099 of SEQ ID NO: 1243820
ugcugugaagauggcaaua

SEQ ID NO: 1443911 - RNA, 19 nt, Artificial Sequence
  Description of Artificial Sequence: Synthetic oligonucleotide
  Antisense strand to SEQ ID NO: 1443910
uauugccaucuucacagca

SEQ ID NO: 1443912 - RNA, 19 nt, Artificial Sequence
  Description of Artificial Sequence: Synthetic oligonucleotide
  Sense strand starting at position 1485 of SEQ ID NO: 1243820
agcccaaaguuuguauuau

SEQ ID NO: 1443913 - RNA, 19 nt, Artificial Sequence
  Description of Artificial Sequence: Synthetic oligonucleotide
  Antisense strand to SEQ ID NO: 1443912
auaauacaaacuuugggcu

SEQ ID NO: 1443914 - RNA, 19 nt, Artificial Sequence
  Description of Artificial Sequence: Synthetic oligonucleotide
  Sense strand starting at position 1537 of SEQ ID NO: 1243820
cgcccucuccuggaaggau

SEQ ID NO: 1443915 - RNA, 19 nt, Artificial Sequence
  Description of Artificial Sequence: Synthetic oligonucleotide
  Antisense strand to SEQ ID NO: 1443914
auccuuccaggagagggcg

SEQ ID NO: 1443916 - RNA, 19 nt, Artificial Sequence
  Description of Artificial Sequence: Synthetic oligonucleotide
  Sense strand starting at position 1549 of SEQ ID NO: 1243820
gaaggaugcccauaugcag

SEQ ID NO: 1443917 - RNA, 19 nt, Artificial Sequence
  Description of Artificial Sequence: Synthetic oligonucleotide
  Antisense strand to SEQ ID NO: 1443916
cugcauaugggcauccuuc

SEQ ID NO: 1443918 - RNA, 19 nt, Artificial Sequence
  Description of Artificial Sequence: Synthetic oligonucleotide
  Sense strand starting at position 2289 of SEQ ID NO: 1243820
auuuacugucuuugucagu

SEQ ID NO: 1443919 - RNA, 19 nt, Artificial Sequence
  Description of Artificial Sequence: Synthetic oligonucleotide
  Antisense strand to SEQ ID NO: 1443918
acugacaaagacaguaaau

SEQ ID NO: 1443920 - RNA, 19 nt, Artificial Sequence
  Description of Artificial Sequence: Synthetic oligonucleotide
  Sense strand starting at position 2294 of SEQ ID NO: 1243820
cugucuuugucagugaaga

SEQ ID NO: 1443921 - RNA, 19 nt, Artificial Sequence
  Description of Artificial Sequence: Synthetic oligonucleotide
  Antisense strand to SEQ ID NO: 1443920
ucuucacugacaaagacag

SEQ ID NO: 1443922 - RNA, 19 nt, Artificial Sequence
  Description of Artificial Sequence: Synthetic oligonucleotide
  Sense strand starting at position 2295 of SEQ ID NO: 1243820
ugucuuugucagugaagaa

SEQ ID NO: 1443923 - RNA, 19 nt, Artificial Sequence
  Description of Artificial Sequence: Synthetic oligonucleotide
  Antisense strand to SEQ ID NO: 1443922
uucuucacugacaaagaca

SEQ ID NO: 1443924 - RNA, 19 nt, Artificial Sequence
  Description of Artificial Sequence: Synthetic oligonucleotide
  Sense strand starting at position 2296 of SEQ ID NO: 1243820
gucuuugucagugaagaaa

SEQ ID NO: 1443925 - RNA, 19 nt, Artificial Sequence
  Description of Artificial Sequence: Synthetic oligonucleotide
  Antisense strand to SEQ ID NO: 1443924
uuucuucacugacaaagac

SEQ ID NO: 1443926 - RNA, 19 nt, Artificial Sequence
  Description of Artificial Sequence: Synthetic oligonucleotide
  Sense strand starting at position 2318 of SEQ ID NO: 1243820
cgggcuucggaauauaauc

SEQ ID NO: 1443927 - RNA, 19 nt, Artificial Sequence
  Description of Artificial Sequence: Synthetic oligonucleotide
  Antisense strand to SEQ ID NO: 1443926
gauuauauuccgaagcccg

SEQ ID NO: 1443928 - RNA, 19 nt, Artificial Sequence
  Description of Artificial Sequence: Synthetic oligonucleotide
  Sense strand starting at position 2333 of SEQ ID NO: 1243820
aaucauuugcugugugaua

SEQ ID NO: 1443929 - RNA, 19 nt, Artificial Sequence
  Description of Artificial Sequence: Synthetic oligonucleotide
  Antisense strand to SEQ ID NO: 1443928
uaucacacagcaaaugauu

SEQ ID NO: 1443930 - RNA, 19 nt, Artificial Sequence
  Description of Artificial Sequence: Synthetic oligonucleotide
  Sense strand starting at position 2334 of SEQ ID NO: 1243820
aucauuugcugugugauau

SEQ ID NO: 1443931 - RNA, 19 nt, Artificial Sequence
  Description of Artificial Sequence: Synthetic oligonucleotide
  Antisense strand to SEQ ID NO: 1443930
auaucacacagcaaaugau

SEQ ID NO: 1443932 - RNA, 19 nt, Artificial Sequence
  Description of Artificial Sequence: Synthetic oligonucleotide
  Sense strand starting at position 2335 of SEQ ID NO: 1243820
ucauuugcugugugauauu

SEQ ID NO: 1443933 - RNA, 19 nt, Artificial Sequence
  Description of Artificial Sequence: Synthetic oligonucleotide
  Antisense strand to SEQ ID NO: 1443932
aauaucacacagcaaauga

SEQ ID NO: 1443934 - RNA, 19 nt, Artificial Sequence
  Description of Artificial Sequence: Synthetic oligonucleotide
  Sense strand starting at position 2342 of SEQ ID NO: 1243820
cugugugauauugacuaag

SEQ ID NO: 1443935 - RNA, 19 nt, Artificial Sequence
  Description of Artificial Sequence: Synthetic oligonucleotide
  Antisense strand to SEQ ID NO: 1443934
cuuagucaauaucacacag

SEQ ID NO: 1443936 - RNA, 19 nt, Artificial Sequence
  Description of Artificial Sequence: Synthetic oligonucleotide
  Sense strand starting at position 2344 of SEQ ID NO: 1243820
gugugauauugacuaaguu

SEQ ID NO: 1443937 - RNA, 19 nt, Artificial Sequence
  Description of Artificial Sequence: Synthetic oligonucleotide
  Antisense strand to SEQ ID NO: 1443936
aacuuagucaauaucacac

SEQ ID NO: 1443938 - RNA, 19 nt, Artificial Sequence
  Description of Artificial Sequence: Synthetic oligonucleotide
  Sense strand starting at position 2345 of SEQ ID NO: 1243820
ugugauauugacuaaguuu

SEQ ID NO: 1443939 - RNA, 19 nt, Artificial Sequence
  Description of Artificial Sequence: Synthetic oligonucleotide
  Antisense strand to SEQ ID NO: 1443938
aaacuuagucaauaucaca

SEQ ID NO: 1443940 - RNA, 19 nt, Artificial Sequence
  Description of Artificial Sequence: Synthetic oligonucleotide
  Sense strand starting at position 2353 of SEQ ID NO: 1243820
ugacuaaguuucuugaccu

SEQ ID NO: 1443941 - RNA, 19 nt, Artificial Sequence
  Description of Artificial Sequence: Synthetic oligonucleotide
  Antisense strand to SEQ ID NO: 1443940
aggucaagaaacuuaguca

SEQ ID NO: 1443942 - RNA, 19 nt, Artificial Sequence
  Description of Artificial Sequence: Synthetic oligonucleotide
  Sense strand starting at position 2438 of SEQ ID NO: 1243820
gcaccacuccuagagcaua

SEQ ID NO: 1443943 - RNA, 19 nt, Artificial Sequence
  Description of Artificial Sequence: Synthetic oligonucleotide
  Antisense strand to SEQ ID NO: 1443942
uaugcucuaggaguggugc

SEQ ID NO: 1443944 - RNA, 19 nt, Artificial Sequence
  Description of Artificial Sequence: Synthetic oligonucleotide
  Sense strand starting at position 2451 of SEQ ID NO: 1243820
agcauaauuugccuuccga

SEQ ID NO: 1443945 - RNA, 19 nt, Artificial Sequence
  Description of Artificial Sequence: Synthetic oligonucleotide
  Antisense strand to SEQ ID NO: 1443944
ucggaaggcaaauuaugcu

SEQ ID NO: 1443946 - RNA, 19 nt, Artificial Sequence
  Description of Artificial Sequence: Synthetic oligonucleotide
  Sense strand starting at position 3359 of SEQ ID NO: 1243820
gggauaaguguauacuggu

SEQ ID NO: 1443947 - RNA, 19 nt, Artificial Sequence
  Description of Artificial Sequence: Synthetic oligonucleotide
  Antisense strand to SEQ ID NO: 1443946
accaguauacacuuauccc

SEQ ID NO: 1443948 - RNA, 19 nt, Artificial Sequence
  Description of Artificial Sequence: Synthetic oligonucleotide
  Sense strand starting at position 3366 of SEQ ID NO: 1243820
guguauacuggugaccgau

SEQ ID NO: 1443949 - RNA, 19 nt, Artificial Sequence
  Description of Artificial Sequence: Synthetic oligonucleotide
  Antisense strand to SEQ ID NO: 1443948
aucggucaccaguauacac

SEQ ID NO: 1443950 - RNA, 19 nt, Artificial Sequence
  Description of Artificial Sequence: Synthetic oligonucleotide
  Sense strand starting at position 3378 of SEQ ID NO: 1243820
gaccgauacuaggauuaag

SEQ ID NO: 1443951 - RNA, 19 nt, Artificial Sequence
  Description of Artificial Sequence: Synthetic oligonucleotide
  Antisense strand to SEQ ID NO: 1443950
cuuaauccuaguaucgguc

SEQ ID NO: 1443952 - RNA, 19 nt, Artificial Sequence
  Description of Artificial Sequence: Synthetic oligonucleotide
  Sense strand starting at position 3576 of SEQ ID NO: 1243820
gggugcaaggccuguauuu

SEQ ID NO: 1443953 - RNA, 19 nt, Artificial Sequence
  Description of Artificial Sequence: Synthetic oligonucleotide
  Antisense strand to SEQ ID NO: 1443952
aaauacaggccuugcaccc

SEQ ID NO: 1443954 - RNA, 19 nt, Artificial Sequence
  Description of Artificial Sequence: Synthetic oligonucleotide
  Sense strand starting at position 3618 of SEQ ID NO: 1243820
ccgaguuggauugaggcua

SEQ ID NO: 1443955 - RNA, 19 nt, Artificial Sequence
  Description of Artificial Sequence: Synthetic oligonucleotide
  Antisense strand to SEQ ID NO: 1443954
uagccucaauccaacucgg

SEQ ID NO: 1443956 - RNA, 19 nt, Artificial Sequence
  Description of Artificial Sequence: Synthetic oligonucleotide
  Sense strand starting at position 3653 of SEQ ID NO: 1243820
ggugucuuggguugacuua

SEQ ID NO: 1443957 - RNA, 19 nt, Artificial Sequence
  Description of Artificial Sequence: Synthetic oligonucleotide
  Antisense strand to SEQ ID NO: 1443956
uaagucaacccaagacacc

SEQ ID NO: 1443958 - RNA, 19 nt, Artificial Sequence
  Description of Artificial Sequence: Synthetic oligonucleotide
  Sense strand starting at position 3663 of SEQ ID NO: 1243820
guugacuuagguuguggaa

SEQ ID NO: 1443959 - RNA, 19 nt, Artificial Sequence
  Description of Artificial Sequence: Synthetic oligonucleotide
  Antisense strand to SEQ ID NO: 1443958
uuccacaaccuaagucaac

SEQ ID NO: 1443960 - RNA, 19 nt, Artificial Sequence
  Description of Artificial Sequence: Synthetic oligonucleotide
  Sense strand starting at position 3682 of SEQ ID NO: 1243820
gaugcugagguuuaggauu

SEQ ID NO: 1443961 - RNA, 19 nt, Artificial Sequence
  Description of Artificial Sequence: Synthetic oligonucleotide
  Antisense strand to SEQ ID NO: 1443960
aauccuaaaccucagcauc

SEQ ID NO: 1443962 - RNA, 19 nt, Artificial Sequence
  Description of Artificial Sequence: Synthetic oligonucleotide
  Sense strand starting at position 3688 of SEQ ID NO: 1243820
gagguuuaggauugaguuu

SEQ ID NO: 1443963 - RNA, 19 nt, Artificial Sequence
  Description of Artificial Sequence: Synthetic oligonucleotide
  Antisense strand to SEQ ID NO: 1443962
aaacucaauccuaaaccuc

SEQ ID NO: 1443964 - RNA, 19 nt, Artificial Sequence
  Description of Artificial Sequence: Synthetic oligonucleotide
  Sense strand starting at position 3705 of SEQ ID NO: 1243820
uugggaaaguacuaaacca

SEQ ID NO: 1443965 - RNA, 19 nt, Artificial Sequence
  Description of Artificial Sequence: Synthetic oligonucleotide
  Antisense strand to SEQ ID NO: 1443964
ugguuuaguacuuucccaa

SEQ ID NO: 1443966 - RNA, 19 nt, Artificial Sequence
  Description of Artificial Sequence: Synthetic oligonucleotide
  Sense strand starting at position 3782 of SEQ ID NO: 1243820
ggguuugccuagaaggaga

SEQ ID NO: 1443967 - RNA, 19 nt, Artificial Sequence
  Description of Artificial Sequence: Synthetic oligonucleotide
  Antisense strand to SEQ ID NO: 1443966
ucuccuucuaggcaaaccc

SEQ ID NO: 1443968 - RNA, 19 nt, Artificial Sequence
  Description of Artificial Sequence: Synthetic oligonucleotide
  Sense strand starting at position 3841 of SEQ ID NO: 1243820
gauugaauagauggcuuua

SEQ ID NO: 1443969 - RNA, 19 nt, Artificial Sequence
  Description of Artificial Sequence: Synthetic oligonucleotide
  Antisense strand to SEQ ID NO: 1443968
uaaagccaucuauucaauc

SEQ ID NO: 1443970 - RNA, 19 nt, Artificial Sequence
  Description of Artificial Sequence: Synthetic oligonucleotide
  Sense strand starting at position 3910 of SEQ ID NO: 1243820
gaagcuucggucgcuaagu

SEQ ID NO: 1443971 - RNA, 19 nt, Artificial Sequence
  Description of Artificial Sequence: Synthetic oligonucleotide
  Antisense strand to SEQ ID NO: 1443970
acuuagcgaccgaagcuuc

SEQ ID NO: 1443972 - RNA, 19 nt, Artificial Sequence
  Description of Artificial Sequence: Synthetic oligonucleotide
  Sense strand starting at position 188 of SEQ ID NO: 1243821
accaguauuucggguuuga

SEQ ID NO: 1443973 - RNA, 19 nt, Artificial Sequence
  Description of Artificial Sequence: Synthetic oligonucleotide
  Antisense strand to SEQ ID NO: 1443972
ucaaacccgaaauacuggu

SEQ ID NO: 1443974 - RNA, 19 nt, Artificial Sequence
  Description of Artificial Sequence: Synthetic oligonucleotide
  Sense strand starting at position 215 of SEQ ID NO: 1243821
gcucucucaaguugaguga

SEQ ID NO: 1443975 - RNA, 19 nt, Artificial Sequence
  Description of Artificial Sequence: Synthetic oligonucleotide
  Antisense strand to SEQ ID NO: 1443974
ucacucaacuugagagagc

SEQ ID NO: 1443976 - RNA, 19 nt, Artificial Sequence
  Description of Artificial Sequence: Synthetic oligonucleotide
  Sense strand starting at position 218 of SEQ ID NO: 1243821
cucucaaguugagugaagu

SEQ ID NO: 1443977 - RNA, 19 nt, Artificial Sequence
  Description of Artificial Sequence: Synthetic oligonucleotide
  Antisense strand to SEQ ID NO: 1443976
acuucacucaacuugagag

SEQ ID NO: 1443978 - RNA, 19 nt, Artificial Sequence
  Description of Artificial Sequence: Synthetic oligonucleotide
  Sense strand starting at position 368 of SEQ ID NO: 1243821
uguagauggcuugaaauca

SEQ ID NO: 1443979 - RNA, 19 nt, Artificial Sequence
  Description of Artificial Sequence: Synthetic oligonucleotide
  Antisense strand to SEQ ID NO: 1443978
ugauuucaagccaucuaca

SEQ ID NO: 1443980 - RNA, 19 nt, Artificial Sequence
  Description of Artificial Sequence: Synthetic oligonucleotide
  Sense strand starting at position 588 of SEQ ID NO: 1243821
acgucuguacugugggauu

SEQ ID NO: 1443981 - RNA, 19 nt, Artificial Sequence
  Description of Artificial Sequence: Synthetic oligonucleotide
  Antisense strand to SEQ ID NO: 1443980
aaucccacaguacagacgu

SEQ ID NO: 1443982 - RNA, 19 nt, Artificial Sequence
  Description of Artificial Sequence: Synthetic oligonucleotide
  Sense strand starting at position 651 of SEQ ID NO: 1243821
gguagauuggcugggaaau

SEQ ID NO: 1443983 - RNA, 19 nt, Artificial Sequence
  Description of Artificial Sequence: Synthetic oligonucleotide
  Antisense strand to SEQ ID NO: 1443982
auuucccagccaaucuacc

SEQ ID NO: 1443984 - RNA, 19 nt, Artificial Sequence
  Description of Artificial Sequence: Synthetic oligonucleotide
  Sense strand starting at position 652 of SEQ ID NO: 1243821
guagauuggcugggaaaug

SEQ ID NO: 1443985 - RNA, 19 nt, Artificial Sequence
  Description of Artificial Sequence: Synthetic oligonucleotide
  Antisense strand to SEQ ID NO: 1443984
cauuucccagccaaucuac

SEQ ID NO: 1443986 - RNA, 19 nt, Artificial Sequence
  Description of Artificial Sequence: Synthetic oligonucleotide
  Sense strand starting at position 653 of SEQ ID NO: 1243821
uagauuggcugggaaauga

SEQ ID NO: 1443987 - RNA, 19 nt, Artificial Sequence
  Description of Artificial Sequence: Synthetic oligonucleotide
  Antisense strand to SEQ ID NO: 1443986
ucauuucccagccaaucua

SEQ ID NO: 1443988 - RNA, 19 nt, Artificial Sequence
  Description of Artificial Sequence: Synthetic oligonucleotide
  Sense strand starting at position 695 of SEQ ID NO: 1243821
aacuaaacucuacggaguu

SEQ ID NO: 1443989 - RNA, 19 nt, Artificial Sequence
  Description of Artificial Sequence: Synthetic oligonucleotide
  Antisense strand to SEQ ID NO: 1443988
aacuccguagaguuuaguu

SEQ ID NO: 1443990 - RNA, 19 nt, Artificial Sequence
  Description of Artificial Sequence: Synthetic oligonucleotide
  Sense strand starting at position 709 of SEQ ID NO: 1243821
gaguucuugauacggugua

SEQ ID NO: 1443991 - RNA, 19 nt, Artificial Sequence
  Description of Artificial Sequence: Synthetic oligonucleotide
  Antisense strand to SEQ ID NO: 1443990
uacaccguaucaagaacuc

SEQ ID NO: 1443992 - RNA, 19 nt, Artificial Sequence
  Description of Artificial Sequence: Synthetic oligonucleotide
  Sense strand starting at position 834 of SEQ ID NO: 1243821
gcuguuugcuggguccaga

SEQ ID NO: 1443993 - RNA, 19 nt, Artificial Sequence
  Description of Artificial Sequence: Synthetic oligonucleotide
  Antisense strand to SEQ ID NO: 1443992
ucuggacccagcaaacagc

SEQ ID NO: 1443994 - RNA, 19 nt, Artificial Sequence
  Description of Artificial Sequence: Synthetic oligonucleotide
  Sense strand starting at position 988 of SEQ ID NO: 1243821
gugcauuguuugcugguga

SEQ ID NO: 1443995 - RNA, 19 nt, Artificial Sequence
  Description of Artificial Sequence: Synthetic oligonucleotide
  Antisense strand to SEQ ID NO: 1443994
ucaccagcaaacaaugcac

SEQ ID NO: 1443996 - RNA, 19 nt, Artificial Sequence
  Description of Artificial Sequence: Synthetic oligonucleotide
  Sense strand starting at position 993 of SEQ ID NO: 1243821
uuguuugcuggugagacaa

SEQ ID NO: 1443997 - RNA, 19 nt, Artificial Sequence
  Description of Artificial Sequence: Synthetic oligonucleotide
  Antisense strand to SEQ ID NO: 1443996
uugucucaccagcaaacaa

SEQ ID NO: 1443998 - RNA, 19 nt, Artificial Sequence
  Description of Artificial Sequence: Synthetic oligonucleotide
  Sense strand starting at position 1054 of SEQ ID NO: 1243821
cuccacagcugagauuuau

SEQ ID NO: 1443999 - RNA, 19 nt, Artificial Sequence
  Description of Artificial Sequence: Synthetic oligonucleotide
  Antisense strand to SEQ ID NO: 1443998
auaaaucucagcuguggag

SEQ ID NO: 1444000 - RNA, 19 nt, Artificial Sequence
  Description of Artificial Sequence: Synthetic oligonucleotide
  Sense strand starting at position 1159 of SEQ ID NO: 1243821
cuuucuaaagaguagaguu

SEQ ID NO: 1444001 - RNA, 19 nt, Artificial Sequence
  Description of Artificial Sequence: Synthetic oligonucleotide
  Antisense strand to SEQ ID NO: 1444000
aacucuacucuuuagaaag

SEQ ID NO: 1444002 - RNA, 19 nt, Artificial Sequence
  Description of Artificial Sequence: Synthetic oligonucleotide
  Sense strand starting at position 1187 of SEQ ID NO: 1243821
ggcagagugcgugagguuu

SEQ ID NO: 1444003 - RNA, 19 nt, Artificial Sequence
  Description of Artificial Sequence: Synthetic oligonucleotide
  Antisense strand to SEQ ID NO: 1444002
aaaccucacgcacucugcc

SEQ ID NO: 1444004 - RNA, 19 nt, Artificial Sequence
  Description of Artificial Sequence: Synthetic oligonucleotide
  Sense strand starting at position 1504 of SEQ ID NO: 1243821
guccuaagcucucuaggga

SEQ ID NO: 1444005 - RNA, 19 nt, Artificial Sequence
  Description of Artificial Sequence: Synthetic oligonucleotide
  Antisense strand to SEQ ID NO: 1444004
ucccuagagagcuuaggac

SEQ ID NO: 1444006 - RNA, 19 nt, Artificial Sequence
  Description of Artificial Sequence: Synthetic oligonucleotide
  Sense strand starting at position 1507 of SEQ ID NO: 1243821
cuaagcucucuagggagaa

SEQ ID NO: 1444007 - RNA, 19 nt, Artificial Sequence
  Description of Artificial Sequence: Synthetic oligonucleotide
  Antisense strand to SEQ ID NO: 1444006
uucucccuagagagcuuag

SEQ ID NO: 1444008 - RNA, 19 nt, Artificial Sequence
  Description of Artificial Sequence: Synthetic oligonucleotide
  Sense strand starting at position 1751 of SEQ ID NO: 1243821
gggcauucucuggaaguag

SEQ ID NO: 1444009 - RNA, 19 nt, Artificial Sequence
  Description of Artificial Sequence: Synthetic oligonucleotide
  Antisense strand to SEQ ID NO: 1444008
cuacuuccagagaaugccc

SEQ ID NO: 1444010 - RNA, 19 nt, Artificial Sequence
  Description of Artificial Sequence: Synthetic oligonucleotide
  Sense strand starting at position 1927 of SEQ ID NO: 1243821
acgcucucugggcgguaaa

SEQ ID NO: 1444011 - RNA, 19 nt, Artificial Sequence
  Description of Artificial Sequence: Synthetic oligonucleotide
  Antisense strand to SEQ ID NO: 1444010
uuuaccgcccagagagcgu

SEQ ID NO: 1444012 - RNA, 19 nt, Artificial Sequence
  Description of Artificial Sequence: Synthetic oligonucleotide
  Sense strand starting at position 2015 of SEQ ID NO: 1243821
uaaguugucggagaagcca

SEQ ID NO: 1444013 - RNA, 19 nt, Artificial Sequence
  Description of Artificial Sequence: Synthetic oligonucleotide
  Antisense strand to SEQ ID NO: 1444012
uggcuucuccgacaacuua

SEQ ID NO: 1444014 - RNA, 19 nt, Artificial Sequence
  Description of Artificial Sequence: Synthetic oligonucleotide
  Sense strand starting at position 2144 of SEQ ID NO: 1243821
gugacagucgcuggucaua

SEQ ID NO: 1444015 - RNA, 19 nt, Artificial Sequence
  Description of Artificial Sequence: Synthetic oligonucleotide
  Antisense strand to SEQ ID NO: 1444014
uaugaccagcgacugucac

SEQ ID NO: 1444016 - RNA, 19 nt, Artificial Sequence
  Description of Artificial Sequence: Synthetic oligonucleotide
  Sense strand starting at position 2300 of SEQ ID NO: 1243821
gggagucagagauguguga

SEQ ID NO: 1444017 - RNA, 19 nt, Artificial Sequence
  Description of Artificial Sequence: Synthetic oligonucleotide
  Antisense strand to SEQ ID NO: 1444016
ucacacaucucugacuccc

SEQ ID NO: 1444018 - RNA, 19 nt, Artificial Sequence
  Description of Artificial Sequence: Synthetic oligonucleotide
  Sense strand starting at position 2302 of SEQ ID NO: 1243821
gagucagagaugugugaga

SEQ ID NO: 1444019 - RNA, 19 nt, Artificial Sequence
  Description of Artificial Sequence: Synthetic oligonucleotide
  Antisense strand to SEQ ID NO: 1444018
ucucacacaucucugacuc

SEQ ID NO: 1444020 - RNA, 19 nt, Artificial Sequence
  Description of Artificial Sequence: Synthetic oligonucleotide
  Sense strand starting at position 2304 of SEQ ID NO: 1243821
gucagagaugugugagaga

SEQ ID NO: 1444021 - RNA, 19 nt, Artificial Sequence
  Description of Artificial Sequence: Synthetic oligonucleotide
  Antisense strand to SEQ ID NO: 1444020
ucucucacacaucucugac

SEQ ID NO: 1444022 - RNA, 19 nt, Artificial Sequence
  Description of Artificial Sequence: Synthetic oligonucleotide
  Sense strand starting at position 2307 of SEQ ID NO: 1243821
agagaugugugagagaagu

SEQ ID NO: 1444023 - RNA, 19 nt, Artificial Sequence
  Description of Artificial Sequence: Synthetic oligonucleotide
  Antisense strand to SEQ ID NO: 1444022
acuucucucacacaucucu

SEQ ID NO: 1444024 - RNA, 19 nt, Artificial Sequence
  Description of Artificial Sequence: Synthetic oligonucleotide
  Sense strand starting at position 2352 of SEQ ID NO: 1243821
agugucacaguggaauaua

SEQ ID NO: 1444025 - RNA, 19 nt, Artificial Sequence
  Description of Artificial Sequence: Synthetic oligonucleotide
  Antisense strand to SEQ ID NO: 1444024
uauauuccacugugacacu

SEQ ID NO: 1444026 - RNA, 19 nt, Artificial Sequence
  Description of Artificial Sequence: Synthetic oligonucleotide
  Sense strand starting at position 2360 of SEQ ID NO: 1243821
aguggaauauagucccaaa

SEQ ID NO: 1444027 - RNA, 19 nt, Artificial Sequence
  Description of Artificial Sequence: Synthetic oligonucleotide
  Antisense strand to SEQ ID NO: 1444026
uuugggacuauauuccacu

SEQ ID NO: 1444028 - RNA, 19 nt, Artificial Sequence
  Description of Artificial Sequence: Synthetic oligonucleotide
  Sense strand starting at position 2390 of SEQ ID NO: 1243821
cuggcuucuggguaguuua

SEQ ID NO: 1444029 - RNA, 19 nt, Artificial Sequence
  Description of Artificial Sequence: Synthetic oligonucleotide
  Antisense strand to SEQ ID NO: 1444028
uaaacuacccagaagccag

SEQ ID NO: 1444030 - RNA, 19 nt, Artificial Sequence
  Description of Artificial Sequence: Synthetic oligonucleotide
  Sense strand starting at position 2426 of SEQ ID NO: 1243821
gacacauaaugacagguaa

SEQ ID NO: 1444031 - RNA, 19 nt, Artificial Sequence
  Description of Artificial Sequence: Synthetic oligonucleotide
  Antisense strand to SEQ ID NO: 1444030
uuaccugucauuauguguc

SEQ ID NO: 1444032 - RNA, 19 nt, Artificial Sequence
  Description of Artificial Sequence: Synthetic oligonucleotide
  Sense strand starting at position 2451 of SEQ ID NO: 1243821
agagauaugccacgaugua

SEQ ID NO: 1444033 - RNA, 19 nt, Artificial Sequence
  Description of Artificial Sequence: Synthetic oligonucleotide
  Antisense strand to SEQ ID NO: 1444032
uacaucguggcauaucucu

SEQ ID NO: 1444034 - RNA, 19 nt, Artificial Sequence
  Description of Artificial Sequence: Synthetic oligonucleotide
  Sense strand starting at position 2452 of SEQ ID NO: 1243821
gagauaugccacgauguau

SEQ ID NO: 1444035 - RNA, 19 nt, Artificial Sequence
  Description of Artificial Sequence: Synthetic oligonucleotide
  Antisense strand to SEQ ID NO: 1444034
auacaucguggcauaucuc

SEQ ID NO: 1444036 - RNA, 19 nt, Artificial Sequence
  Description of Artificial Sequence: Synthetic oligonucleotide
  Sense strand starting at position 2764 of SEQ ID NO: 1243821
acuuucuggcucuauagau

SEQ ID NO: 1444037 - RNA, 19 nt, Artificial Sequence
  Description of Artificial Sequence: Synthetic oligonucleotide
  Antisense strand to SEQ ID NO: 1444036
aucuauagagccagaaagu

SEQ ID NO: 1444038 - RNA, 19 nt, Artificial Sequence
  Description of Artificial Sequence: Synthetic oligonucleotide
  Sense strand starting at position 2954 of SEQ ID NO: 1243821
ucugucaucaguuggaugu

SEQ ID NO: 1444039 - RNA, 19 nt, Artificial Sequence
  Description of Artificial Sequence: Synthetic oligonucleotide
  Antisense strand to SEQ ID NO: 1444038
acauccaacugaugacaga

SEQ ID NO: 1444040 - RNA, 19 nt, Artificial Sequence
  Description of Artificial Sequence: Synthetic oligonucleotide
  Sense strand starting at position 2955 of SEQ ID NO: 1243821
cugucaucaguuggauguu

SEQ ID NO: 1444041 - RNA, 19 nt, Artificial Sequence
  Description of Artificial Sequence: Synthetic oligonucleotide
  Antisense strand to SEQ ID NO: 1444040
aacauccaacugaugacag

SEQ ID NO: 1444042 - RNA, 19 nt, Artificial Sequence
  Description of Artificial Sequence: Synthetic oligonucleotide
  Sense strand starting at position 3049 of SEQ ID NO: 1243821
ugcuuuauuucucuugggu

SEQ ID NO: 1444043 - RNA, 19 nt, Artificial Sequence
  Description of Artificial Sequence: Synthetic oligonucleotide
  Antisense strand to SEQ ID NO: 1444042
acccaagagaaauaaagca

SEQ ID NO: 1444044 - RNA, 19 nt, Artificial Sequence
  Description of Artificial Sequence: Synthetic oligonucleotide
  Sense strand starting at position 3187 of SEQ ID NO: 1243821
gguuccacauugucaacaa

SEQ ID NO: 1444045 - RNA, 19 nt, Artificial Sequence
  Description of Artificial Sequence: Synthetic oligonucleotide
  Antisense strand to SEQ ID NO: 1444044
uuguugacaauguggaacc

SEQ ID NO: 1444046 - RNA, 19 nt, Artificial Sequence
  Description of Artificial Sequence: Synthetic oligonucleotide
  Sense strand starting at position 3188 of SEQ ID NO: 1243821
guuccacauugucaacaaa

SEQ ID NO: 1444047 - RNA, 19 nt, Artificial Sequence
  Description of Artificial Sequence: Synthetic oligonucleotide
  Antisense strand to SEQ ID NO: 1444046
uuuguugacaauguggaac

SEQ ID NO: 1444048 - RNA, 19 nt, Artificial Sequence
  Description of Artificial Sequence: Synthetic oligonucleotide
  Sense strand starting at position 3830 of SEQ ID NO: 1243821
uugauagcguccuuugaag

SEQ ID NO: 1444049 - RNA, 19 nt, Artificial Sequence
  Description of Artificial Sequence: Synthetic oligonucleotide
  Antisense strand to SEQ ID NO: 1444048
cuucaaaggacgcuaucaa

SEQ ID NO: 1444050 - RNA, 19 nt, Artificial Sequence
  Description of Artificial Sequence: Synthetic oligonucleotide
  Sense strand starting at position 3832 of SEQ ID NO: 1243821
gauagcguccuuugaagca

SEQ ID NO: 1444051 - RNA, 19 nt, Artificial Sequence
  Description of Artificial Sequence: Synthetic oligonucleotide
  Antisense strand to SEQ ID NO: 1444050
ugcuucaaaggacgcuauc

SEQ ID NO: 1444052 - RNA, 19 nt, Artificial Sequence
  Description of Artificial Sequence: Synthetic oligonucleotide
  Sense strand starting at position 13 of SEQ ID NO: 1243822
uugggaacuuuccucccaa

SEQ ID NO: 1444053 - RNA, 19 nt, Artificial Sequence
  Description of Artificial Sequence: Synthetic oligonucleotide
  Antisense strand to SEQ ID NO: 1444052
uugggaggaaaguucccaa

SEQ ID NO: 1444054 - RNA, 19 nt, Artificial Sequence
  Description of Artificial Sequence: Synthetic oligonucleotide
  Sense strand starting at position 14 of SEQ ID NO: 1243822
ugggaacuuuccucccaag

SEQ ID NO: 1444055 - RNA, 19 nt, Artificial Sequence
  Description of Artificial Sequence: Synthetic oligonucleotide
  Antisense strand to SEQ ID NO: 1444054
cuugggaggaaaguuccca

SEQ ID NO: 1444056 - RNA, 19 nt, Artificial Sequence
  Description of Artificial Sequence: Synthetic oligonucleotide
  Sense strand starting at position 69 of SEQ ID NO: 1243822
accagauugugccuuugaa

SEQ ID NO: 1444057 - RNA, 19 nt, Artificial Sequence
  Description of Artificial Sequence: Synthetic oligonucleotide
  Antisense strand to SEQ ID NO: 1444056
uucaaaggcacaaucuggu

SEQ ID NO: 1444058 - RNA, 19 nt, Artificial Sequence
  Description of Artificial Sequence: Synthetic oligonucleotide
  Sense strand starting at position 232 of SEQ ID NO: 1243822
ggaagucuucucuagccca

SEQ ID NO: 1444059 - RNA, 19 nt, Artificial Sequence
  Description of Artificial Sequence: Synthetic oligonucleotide
  Antisense strand to SEQ ID NO: 1444058
ugggcuagagaagacuucc

SEQ ID NO: 1444060 - RNA, 19 nt, Artificial Sequence
  Description of Artificial Sequence: Synthetic oligonucleotide
  Sense strand starting at position 644 of SEQ ID NO: 1243822
cugccuuugggacagagau

SEQ ID NO: 1444061 - RNA, 19 nt, Artificial Sequence
  Description of Artificial Sequence: Synthetic oligonucleotide
  Antisense strand to SEQ ID NO: 1444060
aucucugucccaaaggcag

SEQ ID NO: 1444062 - RNA, 19 nt, Artificial Sequence
  Description of Artificial Sequence: Synthetic oligonucleotide
  Sense strand starting at position 713 of SEQ ID NO: 1243822
uugugugcugaugaauaua

SEQ ID NO: 1444063 - RNA, 19 nt, Artificial Sequence
  Description of Artificial Sequence: Synthetic oligonucleotide
  Antisense strand to SEQ ID NO: 1444062
uauauucaucagcacacaa

SEQ ID NO: 1444064 - RNA, 19 nt, Artificial Sequence
  Description of Artificial Sequence: Synthetic oligonucleotide
  Sense strand starting at position 716 of SEQ ID NO: 1243822
ugugcugaugaauauauga

SEQ ID NO: 1444065 - RNA, 19 nt, Artificial Sequence
  Description of Artificial Sequence: Synthetic oligonucleotide
  Antisense strand to SEQ ID NO: 1444064
ucauauauucaucagcaca

SEQ ID NO: 1444066 - RNA, 19 nt, Artificial Sequence
  Description of Artificial Sequence: Synthetic oligonucleotide
  Sense strand starting at position 761 of SEQ ID NO: 1243822
auacaugaaugacaaguaa

SEQ ID NO: 1444067 - RNA, 19 nt, Artificial Sequence
  Description of Artificial Sequence: Synthetic oligonucleotide
  Antisense strand to SEQ ID NO: 1444066
uuacuugucauucauguau

SEQ ID NO: 1444068 - RNA, 19 nt, Artificial Sequence
  Description of Artificial Sequence: Synthetic oligonucleotide
  Sense strand starting at position 872 of SEQ ID NO: 1243822
acgcucuuuccugauguca

SEQ ID NO: 1444069 - RNA, 19 nt, Artificial Sequence
  Description of Artificial Sequence: Synthetic oligonucleotide
  Antisense strand to SEQ ID NO: 1444068
ugacaucaggaaagagcgu

SEQ ID NO: 1444070 - RNA, 19 nt, Artificial Sequence
  Description of Artificial Sequence: Synthetic oligonucleotide
  Sense strand starting at position 886 of SEQ ID NO: 1243822
ugucacgacuucuuuauuu

SEQ ID NO: 1444071 - RNA, 19 nt, Artificial Sequence
  Description of Artificial Sequence: Synthetic oligonucleotide
  Antisense strand to SEQ ID NO: 1444070
aaauaaagaagucgugaca

SEQ ID NO: 1444072 - RNA, 19 nt, Artificial Sequence
  Description of Artificial Sequence: Synthetic oligonucleotide
  Sense strand starting at position 1331 of SEQ ID NO: 1243822
gcucaauagcgccaggaaa

SEQ ID NO: 1444073 - RNA, 19 nt, Artificial Sequence
  Description of Artificial Sequence: Synthetic oligonucleotide
  Antisense strand to SEQ ID NO: 1444072
uuuccuggcgcuauugagc

SEQ ID NO: 1444074 - RNA, 19 nt, Artificial Sequence
  Description of Artificial Sequence: Synthetic oligonucleotide
  Sense strand starting at position 1501 of SEQ ID NO: 1243822
guguaaagccagggauucu

SEQ ID NO: 1444075 - RNA, 19 nt, Artificial Sequence
  Description of Artificial Sequence: Synthetic oligonucleotide
  Antisense strand to SEQ ID NO: 1444074
agaaucccuggcuuuacac

SEQ ID NO: 1444076 - RNA, 19 nt, Artificial Sequence
  Description of Artificial Sequence: Synthetic oligonucleotide
  Sense strand starting at position 1527 of SEQ ID NO: 1243822
ggaguuccuccgggaagga

SEQ ID NO: 1444077 - RNA, 19 nt, Artificial Sequence
  Description of Artificial Sequence: Synthetic oligonucleotide
  Antisense strand to SEQ ID NO: 1444076
uccuucccggaggaacucc

SEQ ID NO: 1444078 - RNA, 19 nt, Artificial Sequence
  Description of Artificial Sequence: Synthetic oligonucleotide
  Sense strand starting at position 1549 of SEQ ID NO: 1243822
acugcaucgggcuacauaa

SEQ ID NO: 1444079 - RNA, 19 nt, Artificial Sequence
  Description of Artificial Sequence: Synthetic oligonucleotide
  Antisense strand to SEQ ID NO: 1444078
uuauguagcccgaugcagu

SEQ ID NO: 1444080 - RNA, 19 nt, Artificial Sequence
  Description of Artificial Sequence: Synthetic oligonucleotide
  Sense strand starting at position 1551 of SEQ ID NO: 1243822
ugcaucgggcuacauaaau

SEQ ID NO: 1444081 - RNA, 19 nt, Artificial Sequence
  Description of Artificial Sequence: Synthetic oligonucleotide
  Antisense strand to SEQ ID NO: 1444080
auuuauguagcccgaugca

SEQ ID NO: 1444082 - RNA, 19 nt, Artificial Sequence
  Description of Artificial Sequence: Synthetic oligonucleotide
  Sense strand starting at position 1835 of SEQ ID NO: 1243822
uuuguaguccugcugcgau

SEQ ID NO: 1444083 - RNA, 19 nt, Artificial Sequence
  Description of Artificial Sequence: Synthetic oligonucleotide
  Antisense strand to SEQ ID NO: 1444082
aucgcagcaggacuacaaa

SEQ ID NO: 1444084 - RNA, 19 nt, Artificial Sequence
  Description of Artificial Sequence: Synthetic oligonucleotide
  Sense strand starting at position 1910 of SEQ ID NO: 1243822
cccuuagcuccugaguuua

SEQ ID NO: 1444085 - RNA, 19 nt, Artificial Sequence
  Description of Artificial Sequence: Synthetic oligonucleotide
  Antisense strand to SEQ ID NO: 1444084
uaaacucaggagcuaaggg

SEQ ID NO: 1444086 - RNA, 19 nt, Artificial Sequence
  Description of Artificial Sequence: Synthetic oligonucleotide
  Sense strand starting at position 1921 of SEQ ID NO: 1243822
ugaguuuaaguccacguuu

SEQ ID NO: 1444087 - RNA, 19 nt, Artificial Sequence
  Description of Artificial Sequence: Synthetic oligonucleotide
  Antisense strand to SEQ ID NO: 1444086
aaacguggacuuaaacuca

SEQ ID NO: 1444088 - RNA, 19 nt, Artificial Sequence
  Description of Artificial Sequence: Synthetic oligonucleotide
  Sense strand starting at position 2127 of SEQ ID NO: 1243822
aggagcaagaacuguguuu

SEQ ID NO: 1444089 - RNA, 19 nt, Artificial Sequence
  Description of Artificial Sequence: Synthetic oligonucleotide
  Antisense strand to SEQ ID NO: 1444088
aaacacaguucuugcuccu

SEQ ID NO: 1444090 - RNA, 19 nt, Artificial Sequence
  Description of Artificial Sequence: Synthetic oligonucleotide
  Sense strand starting at position 2129 of SEQ ID NO: 1243822
gagcaagaacuguguuucu

SEQ ID NO: 1444091 - RNA, 19 nt, Artificial Sequence
  Description of Artificial Sequence: Synthetic oligonucleotide
  Antisense strand to SEQ ID NO: 1444090
agaaacacaguucuugcuc

SEQ ID NO: 1444092 - RNA, 19 nt, Artificial Sequence
  Description of Artificial Sequence: Synthetic oligonucleotide
  Sense strand starting at position 2132 of SEQ ID NO: 1243822
caagaacuguguuucuguu

SEQ ID NO: 1444093 - RNA, 19 nt, Artificial Sequence
  Description of Artificial Sequence: Synthetic oligonucleotide
  Antisense strand to SEQ ID NO: 1444092
aacagaaacacaguucuug

SEQ ID NO: 1444094 - RNA, 19 nt, Artificial Sequence
  Description of Artificial Sequence: Synthetic oligonucleotide
  Sense strand starting at position 2134 of SEQ ID NO: 1243822
agaacuguguuucuguuga

SEQ ID NO: 1444095 - RNA, 19 nt, Artificial Sequence
  Description of Artificial Sequence: Synthetic oligonucleotide
  Antisense strand to SEQ ID NO: 1444094
ucaacagaaacacaguucu

SEQ ID NO: 1444096 - RNA, 19 nt, Artificial Sequence
  Description of Artificial Sequence: Synthetic oligonucleotide
  Sense strand starting at position 2136 of SEQ ID NO: 1243822
aacuguguuucuguugaac

SEQ ID NO: 1444097 - RNA, 19 nt, Artificial Sequence
  Description of Artificial Sequence: Synthetic oligonucleotide
  Antisense strand to SEQ ID NO: 1444096
guucaacagaaacacaguu

SEQ ID NO: 1444098 - RNA, 19 nt, Artificial Sequence
  Description of Artificial Sequence: Synthetic oligonucleotide
  Sense strand starting at position 2145 of SEQ ID NO: 1243822
ucuguugaacucuguugau

SEQ ID NO: 1444099 - RNA, 19 nt, Artificial Sequence
  Description of Artificial Sequence: Synthetic oligonucleotide
  Antisense strand to SEQ ID NO: 1444098
aucaacagaguucaacaga

SEQ ID NO: 1444100 - RNA, 19 nt, Artificial Sequence
  Description of Artificial Sequence: Synthetic oligonucleotide
  Sense strand starting at position 2237 of SEQ ID NO: 1243822
gugugccugugauuucuca

SEQ ID NO: 1444101 - RNA, 19 nt, Artificial Sequence
  Description of Artificial Sequence: Synthetic oligonucleotide
  Antisense strand to SEQ ID NO: 1444100
ugagaaaucacaggcacac

SEQ ID NO: 1444102 - RNA, 19 nt, Artificial Sequence
  Description of Artificial Sequence: Synthetic oligonucleotide
  Sense strand starting at position 2287 of SEQ ID NO: 1243822
agggucuuguagguccaaa

SEQ ID NO: 1444103 - RNA, 19 nt, Artificial Sequence
  Description of Artificial Sequence: Synthetic oligonucleotide
  Antisense strand to SEQ ID NO: 1444102
uuuggaccuacaagacccu

SEQ ID NO: 1444104 - RNA, 19 nt, Artificial Sequence
  Description of Artificial Sequence: Synthetic oligonucleotide
  Sense strand starting at position 2344 of SEQ ID NO: 1243822
ggaacucuuguauguggca

SEQ ID NO: 1444105 - RNA, 19 nt, Artificial Sequence
  Description of Artificial Sequence: Synthetic oligonucleotide
  Antisense strand to SEQ ID NO: 1444104
ugccacauacaagaguucc

SEQ ID NO: 1444106 - RNA, 19 nt, Artificial Sequence
  Description of Artificial Sequence: Synthetic oligonucleotide
  Sense strand starting at position 2345 of SEQ ID NO: 1243822
gaacucuuguauguggcaa

SEQ ID NO: 1444107 - RNA, 19 nt, Artificial Sequence
  Description of Artificial Sequence: Synthetic oligonucleotide
  Antisense strand to SEQ ID NO: 1444106
uugccacauacaagaguuc

SEQ ID NO: 1444108 - RNA, 19 nt, Artificial Sequence
  Description of Artificial Sequence: Synthetic oligonucleotide
  Sense strand starting at position 2379 of SEQ ID NO: 1243822
guggccuugagucagauca

SEQ ID NO: 1444109 - RNA, 19 nt, Artificial Sequence
  Description of Artificial Sequence: Synthetic oligonucleotide
  Antisense strand to SEQ ID NO: 1444108
ugaucugacucaaggccac

SEQ ID NO: 1444110 - RNA, 19 nt, Artificial Sequence
  Description of Artificial Sequence: Synthetic oligonucleotide
  Sense strand starting at position 2395 of SEQ ID NO: 1243822
ucaucccugucuguuacaa

SEQ ID NO: 1444111 - RNA, 19 nt, Artificial Sequence
  Description of Artificial Sequence: Synthetic oligonucleotide
  Antisense strand to SEQ ID NO: 1444110
uuguaacagacagggauga

SEQ ID NO: 1444112 - RNA, 19 nt, Artificial Sequence
  Description of Artificial Sequence: Synthetic oligonucleotide
  Sense strand starting at position 2447 of SEQ ID NO: 1243822
cagugagaccaaugaaguu

SEQ ID NO: 1444113 - RNA, 19 nt, Artificial Sequence
  Description of Artificial Sequence: Synthetic oligonucleotide
  Antisense strand to SEQ ID NO: 1444112
aacuucauuggucucacug

SEQ ID NO: 1444114 - RNA, 19 nt, Artificial Sequence
  Description of Artificial Sequence: Synthetic oligonucleotide
  Sense strand starting at position 2483 of SEQ ID NO: 1243822
aggagugguugaccuagau

SEQ ID NO: 1444115 - RNA, 19 nt, Artificial Sequence
  Description of Artificial Sequence: Synthetic oligonucleotide
  Antisense strand to SEQ ID NO: 1444114
aucuaggucaaccacuccu

SEQ ID NO: 1444116 - RNA, 19 nt, Artificial Sequence
  Description of Artificial Sequence: Synthetic oligonucleotide
  Sense strand starting at position 2887 of SEQ ID NO: 1243822
ccugguagaccuugcauuu

SEQ ID NO: 1444117 - RNA, 19 nt, Artificial Sequence
  Description of Artificial Sequence: Synthetic oligonucleotide
  Antisense strand to SEQ ID NO: 1444116
aaaugcaaggucuaccagg

SEQ ID NO: 1444118 - RNA, 19 nt, Artificial Sequence
  Description of Artificial Sequence: Synthetic oligonucleotide
  Sense strand starting at position 2920 of SEQ ID NO: 1243822
ugcuguauccaaugagaua

SEQ ID NO: 1444119 - RNA, 19 nt, Artificial Sequence
  Description of Artificial Sequence: Synthetic oligonucleotide
  Antisense strand to SEQ ID NO: 1444118
uaucucauuggauacagca

SEQ ID NO: 1444120 - RNA, 19 nt, Artificial Sequence
  Description of Artificial Sequence: Synthetic oligonucleotide
  Sense strand starting at position 3016 of SEQ ID NO: 1243822
ugagguaggcgcuacuauu

SEQ ID NO: 1444121 - RNA, 19 nt, Artificial Sequence
  Description of Artificial Sequence: Synthetic oligonucleotide
  Antisense strand to SEQ ID NO: 1444120
aauaguagcgccuaccuca

SEQ ID NO: 1444122 - RNA, 19 nt, Artificial Sequence
  Description of Artificial Sequence: Synthetic oligonucleotide
  Sense strand starting at position 3067 of SEQ ID NO: 1243822
gcaaguaacuuucucagag

SEQ ID NO: 1444123 - RNA, 19 nt, Artificial Sequence
  Description of Artificial Sequence: Synthetic oligonucleotide
  Antisense strand to SEQ ID NO: 1444122
cucugagaaaguuacuugc

SEQ ID NO: 1444124 - RNA, 19 nt, Artificial Sequence
  Description of Artificial Sequence: Synthetic oligonucleotide
  Sense strand starting at position 3179 of SEQ ID NO: 1243822
augugucucucccucauaa

SEQ ID NO: 1444125 - RNA, 19 nt, Artificial Sequence
  Description of Artificial Sequence: Synthetic oligonucleotide
  Antisense strand to SEQ ID NO: 1444124
uuaugagggagagacacau

SEQ ID NO: 1444126 - RNA, 19 nt, Artificial Sequence
  Description of Artificial Sequence: Synthetic oligonucleotide
  Sense strand starting at position 3181 of SEQ ID NO: 1243822
gugucucucccucauaaca

SEQ ID NO: 1444127 - RNA, 19 nt, Artificial Sequence
  Description of Artificial Sequence: Synthetic oligonucleotide
  Antisense strand to SEQ ID NO: 1444126
uguuaugagggagagacac

SEQ ID NO: 1444128 - RNA, 19 nt, Artificial Sequence
  Description of Artificial Sequence: Synthetic oligonucleotide
  Sense strand starting at position 3213 of SEQ ID NO: 1243822
ccuggugauccucaucuua

SEQ ID NO: 1444129 - RNA, 19 nt, Artificial Sequence
  Description of Artificial Sequence: Synthetic oligonucleotide
  Antisense strand to SEQ ID NO: 1444128
uaagaugaggaucaccagg

SEQ ID NO: 1444130 - RNA, 19 nt, Artificial Sequence
  Description of Artificial Sequence: Synthetic oligonucleotide
  Sense strand starting at position 3215 of SEQ ID NO: 1243822
uggugauccucaucuuaga

SEQ ID NO: 1444131 - RNA, 19 nt, Artificial Sequence
  Description of Artificial Sequence: Synthetic oligonucleotide
  Antisense strand to SEQ ID NO: 1444130
ucuaagaugaggaucacca

SEQ ID NO: 1444132 - RNA, 19 nt, Artificial Sequence
  Description of Artificial Sequence: Synthetic oligonucleotide
  Sense strand starting at position 51 of SEQ ID NO: 1243823
gagggaagccuuuggguga

SEQ ID NO: 1444133 - RNA, 19 nt, Artificial Sequence
  Description of Artificial Sequence: Synthetic oligonucleotide
  Antisense strand to SEQ ID NO: 1444132
ucacccaaaggcuucccuc

SEQ ID NO: 1444134 - RNA, 19 nt, Artificial Sequence
  Description of Artificial Sequence: Synthetic oligonucleotide
  Sense strand starting at position 55 of SEQ ID NO: 1243823
gaagccuuugggugaaggu

SEQ ID NO: 1444135 - RNA, 19 nt, Artificial Sequence
  Description of Artificial Sequence: Synthetic oligonucleotide
  Antisense strand to SEQ ID NO: 1444134
accuucacccaaaggcuuc

SEQ ID NO: 1444136 - RNA, 19 nt, Artificial Sequence
  Description of Artificial Sequence: Synthetic oligonucleotide
  Sense strand starting at position 471 of SEQ ID NO: 1243823
cagagcuuuccuuggcaga

SEQ ID NO: 1444137 - RNA, 19 nt, Artificial Sequence
  Description of Artificial Sequence: Synthetic oligonucleotide
  Antisense strand to SEQ ID NO: 1444136
ucugccaaggaaagcucug

SEQ ID NO: 1444138 - RNA, 19 nt, Artificial Sequence
  Description of Artificial Sequence: Synthetic oligonucleotide
  Sense strand starting at position 472 of SEQ ID NO: 1243823
agagcuuuccuuggcagag

SEQ ID NO: 1444139 - RNA, 19 nt, Artificial Sequence
  Description of Artificial Sequence: Synthetic oligonucleotide
  Antisense strand to SEQ ID NO: 1444138
cucugccaaggaaagcucu

SEQ ID NO: 1444140 - RNA, 19 nt, Artificial Sequence
  Description of Artificial Sequence: Synthetic oligonucleotide
  Sense strand starting at position 473 of SEQ ID NO: 1243823
gagcuuuccuuggcagaga

SEQ ID NO: 1444141 - RNA, 19 nt, Artificial Sequence
  Description of Artificial Sequence: Synthetic oligonucleotide
  Antisense strand to SEQ ID NO: 1444140
ucucugccaaggaaagcuc

SEQ ID NO: 1444142 - RNA, 19 nt, Artificial Sequence
  Description of Artificial Sequence: Synthetic oligonucleotide
  Sense strand starting at position 540 of SEQ ID NO: 1243823
uugguuucccuguaggaga

SEQ ID NO: 1444143 - RNA, 19 nt, Artificial Sequence
  Description of Artificial Sequence: Synthetic oligonucleotide
  Antisense strand to SEQ ID NO: 1444142
ucuccuacagggaaaccaa

SEQ ID NO: 1444144 - RNA, 19 nt, Artificial Sequence
  Description of Artificial Sequence: Synthetic oligonucleotide
  Sense strand starting at position 567 of SEQ ID NO: 1243823
gaaaguuauugcuuggcag

SEQ ID NO: 1444145 - RNA, 19 nt, Artificial Sequence
  Description of Artificial Sequence: Synthetic oligonucleotide
  Antisense strand to SEQ ID NO: 1444144
cugccaagcaauaacuuuc

SEQ ID NO: 1444146 - RNA, 19 nt, Artificial Sequence
  Description of Artificial Sequence: Synthetic oligonucleotide
  Sense strand starting at position 584 of SEQ ID NO: 1243823
agggacaagucuuuguuau

SEQ ID NO: 1444147 - RNA, 19 nt, Artificial Sequence
  Description of Artificial Sequence: Synthetic oligonucleotide
  Antisense strand to SEQ ID NO: 1444146
auaacaaagacuugucccu

SEQ ID NO: 1444148 - RNA, 19 nt, Artificial Sequence
  Description of Artificial Sequence: Synthetic oligonucleotide
  Sense strand starting at position 585 of SEQ ID NO: 1243823
gggacaagucuuuguuauu

SEQ ID NO: 1444149 - RNA, 19 nt, Artificial Sequence
  Description of Artificial Sequence: Synthetic oligonucleotide
  Antisense strand to SEQ ID NO: 1444148
aauaacaaagacuuguccc

SEQ ID NO: 1444150 - RNA, 19 nt, Artificial Sequence
  Description of Artificial Sequence: Synthetic oligonucleotide
  Sense strand starting at position 586 of SEQ ID NO: 1243823
ggacaagucuuuguuauua

SEQ ID NO: 1444151 - RNA, 19 nt, Artificial Sequence
  Description of Artificial Sequence: Synthetic oligonucleotide
  Antisense strand to SEQ ID NO: 1444150
uaauaacaaagacuugucc

SEQ ID NO: 1444152 - RNA, 19 nt, Artificial Sequence
  Description of Artificial Sequence: Synthetic oligonucleotide
  Sense strand starting at position 632 of SEQ ID NO: 1243823
uugggaacuuuccucccaa

SEQ ID NO: 1444153 - RNA, 19 nt, Artificial Sequence
  Description of Artificial Sequence: Synthetic oligonucleotide
  Antisense strand to SEQ ID NO: 1444152
uugggaggaaaguucccaa

SEQ ID NO: 1444154 - RNA, 19 nt, Artificial Sequence
  Description of Artificial Sequence: Synthetic oligonucleotide
  Sense strand starting at position 633 of SEQ ID NO: 1243823
ugggaacuuuccucccaag

SEQ ID NO: 1444155 - RNA, 19 nt, Artificial Sequence
  Description of Artificial Sequence: Synthetic oligonucleotide
  Antisense strand to SEQ ID NO: 1444154
cuugggaggaaaguuccca

SEQ ID NO: 1444156 - RNA, 19 nt, Artificial Sequence
  Description of Artificial Sequence: Synthetic oligonucleotide
  Sense strand starting at position 688 of SEQ ID NO: 1243823
accagauugugccuuugaa

SEQ ID NO: 1444157 - RNA, 19 nt, Artificial Sequence
  Description of Artificial Sequence: Synthetic oligonucleotide
  Antisense strand to SEQ ID NO: 1444156
uucaaaggcacaaucuggu

SEQ ID NO: 1444158 - RNA, 19 nt, Artificial Sequence
  Description of Artificial Sequence: Synthetic oligonucleotide
  Sense strand starting at position 851 of SEQ ID NO: 1243823
ggaagucuucucuagccca

SEQ ID NO: 1444159 - RNA, 19 nt, Artificial Sequence
  Description of Artificial Sequence: Synthetic oligonucleotide
  Antisense strand to SEQ ID NO: 1444158
ugggcuagagaagacuucc

SEQ ID NO: 1444160 - RNA, 19 nt, Artificial Sequence
  Description of Artificial Sequence: Synthetic oligonucleotide
  Sense strand starting at position 1263 of SEQ ID NO: 1243823
cugccuuugggacagagau

SEQ ID NO: 1444161 - RNA, 19 nt, Artificial Sequence
  Description of Artificial Sequence: Synthetic oligonucleotide
  Antisense strand to SEQ ID NO: 1444160
aucucugucccaaaggcag

SEQ ID NO: 1444162 - RNA, 19 nt, Artificial Sequence
  Description of Artificial Sequence: Synthetic oligonucleotide
  Sense strand starting at position 1332 of SEQ ID NO: 1243823
uugugugcugaugaauaua

SEQ ID NO: 1444163 - RNA, 19 nt, Artificial Sequence
  Description of Artificial Sequence: Synthetic oligonucleotide
  Antisense strand to SEQ ID NO: 1444162
uauauucaucagcacacaa

SEQ ID NO: 1444164 - RNA, 19 nt, Artificial Sequence
  Description of Artificial Sequence: Synthetic oligonucleotide
  Sense strand starting at position 1335 of SEQ ID NO: 1243823
ugugcugaugaauauauga

SEQ ID NO: 1444165 - RNA, 19 nt, Artificial Sequence
  Description of Artificial Sequence: Synthetic oligonucleotide
  Antisense strand to SEQ ID NO: 1444164
ucauauauucaucagcaca

SEQ ID NO: 1444166 - RNA, 19 nt, Artificial Sequence
  Description of Artificial Sequence: Synthetic oligonucleotide
  Sense strand starting at position 1505 of SEQ ID NO: 1243823
ugucacgacuucuuuauuu

SEQ ID NO: 1444167 - RNA, 19 nt, Artificial Sequence
  Description of Artificial Sequence: Synthetic oligonucleotide
  Antisense strand to SEQ ID NO: 1444166
aaauaaagaagucgugaca

SEQ ID NO: 1444168 - RNA, 19 nt, Artificial Sequence
  Description of Artificial Sequence: Synthetic oligonucleotide
  Sense strand starting at position 1950 of SEQ ID NO: 1243823
gcucaauagcgccaggaaa

SEQ ID NO: 1444169 - RNA, 19 nt, Artificial Sequence
  Description of Artificial Sequence: Synthetic oligonucleotide
  Antisense strand to SEQ ID NO: 1444168
uuuccuggcgcuauugagc

SEQ ID NO: 1444170 - RNA, 19 nt, Artificial Sequence
  Description of Artificial Sequence: Synthetic oligonucleotide
  Sense strand starting at position 2120 of SEQ ID NO: 1243823
guguaaagccagggauucu

SEQ ID NO: 1444171 - RNA, 19 nt, Artificial Sequence
  Description of Artificial Sequence: Synthetic oligonucleotide
  Antisense strand to SEQ ID NO: 1444170
agaaucccuggcuuuacac

SEQ ID NO: 1444172 - RNA, 19 nt, Artificial Sequence
  Description of Artificial Sequence: Synthetic oligonucleotide
  Sense strand starting at position 2146 of SEQ ID NO: 1243823
ggaguuccuccgggaagga

SEQ ID NO: 1444173 - RNA, 19 nt, Artificial Sequence
  Description of Artificial Sequence: Synthetic oligonucleotide
  Antisense strand to SEQ ID NO: 1444172
uccuucccggaggaacucc

SEQ ID NO: 1444174 - RNA, 19 nt, Artificial Sequence
  Description of Artificial Sequence: Synthetic oligonucleotide
  Sense strand starting at position 2168 of SEQ ID NO: 1243823
acugcaucgggcuacauaa

SEQ ID NO: 1444175 - RNA, 19 nt, Artificial Sequence
  Description of Artificial Sequence: Synthetic oligonucleotide
  Antisense strand to SEQ ID NO: 1444174
uuauguagcccgaugcagu

SEQ ID NO: 1444176 - RNA, 19 nt, Artificial Sequence
  Description of Artificial Sequence: Synthetic oligonucleotide
  Sense strand starting at position 2170 of SEQ ID NO: 1243823
ugcaucgggcuacauaaau

SEQ ID NO: 1444177 - RNA, 19 nt, Artificial Sequence
  Description of Artificial Sequence: Synthetic oligonucleotide
  Antisense strand to SEQ ID NO: 1444176
auuuauguagcccgaugca

SEQ ID NO: 1444178 - RNA, 19 nt, Artificial Sequence
  Description of Artificial Sequence: Synthetic oligonucleotide
  Sense strand starting at position 2454 of SEQ ID NO: 1243823
uuuguaguccugcugcgau

SEQ ID NO: 1444179 - RNA, 19 nt, Artificial Sequence
  Description of Artificial Sequence: Synthetic oligonucleotide
  Antisense strand to SEQ ID NO: 1444178
aucgcagcaggacuacaaa

SEQ ID NO: 1444180 - RNA, 19 nt, Artificial Sequence
  Description of Artificial Sequence: Synthetic oligonucleotide
  Sense strand starting at position 2529 of SEQ ID NO: 1243823
cccuuagcuccugaguuua

SEQ ID NO: 1444181 - RNA, 19 nt, Artificial Sequence
  Description of Artificial Sequence: Synthetic oligonucleotide
  Antisense strand to SEQ ID NO: 1444180
uaaacucaggagcuaaggg

SEQ ID NO: 1444182 - RNA, 19 nt, Artificial Sequence
  Description of Artificial Sequence: Synthetic oligonucleotide
  Sense strand starting at position 2746 of SEQ ID NO: 1243823
aggagcaagaacuguguuu

SEQ ID NO: 1444183 - RNA, 19 nt, Artificial Sequence
  Description of Artificial Sequence: Synthetic oligonucleotide
  Antisense strand to SEQ ID NO: 1444182
aaacacaguucuugcuccu

SEQ ID NO: 1444184 - RNA, 19 nt, Artificial Sequence
  Description of Artificial Sequence: Synthetic oligonucleotide
  Sense strand starting at position 2753 of SEQ ID NO: 1243823
agaacuguguuucuguuga

SEQ ID NO: 1444185 - RNA, 19 nt, Artificial Sequence
  Description of Artificial Sequence: Synthetic oligonucleotide
  Antisense strand to SEQ ID NO: 1444184
ucaacagaaacacaguucu

SEQ ID NO: 1444186 - RNA, 19 nt, Artificial Sequence
  Description of Artificial Sequence: Synthetic oligonucleotide
  Sense strand starting at position 2764 of SEQ ID NO: 1243823
ucuguugaacucuguugau

SEQ ID NO: 1444187 - RNA, 19 nt, Artificial Sequence
  Description of Artificial Sequence: Synthetic oligonucleotide
  Antisense strand to SEQ ID NO: 1444186
aucaacagaguucaacaga

SEQ ID NO: 1444188 - RNA, 19 nt, Artificial Sequence
  Description of Artificial Sequence: Synthetic oligonucleotide
  Sense strand starting at position 2856 of SEQ ID NO: 1243823
gugugccugugauuucuca

SEQ ID NO: 1444189 - RNA, 19 nt, Artificial Sequence
  Description of Artificial Sequence: Synthetic oligonucleotide
  Antisense strand to SEQ ID NO: 1444188
ugagaaaucacaggcacac

SEQ ID NO: 1444190 - RNA, 19 nt, Artificial Sequence
  Description of Artificial Sequence: Synthetic oligonucleotide
  Sense strand starting at position 2906 of SEQ ID NO: 1243823
agggucuuguagguccaaa

SEQ ID NO: 1444191 - RNA, 19 nt, Artificial Sequence
  Description of Artificial Sequence: Synthetic oligonucleotide
  Antisense strand to SEQ ID NO: 1444190
uuuggaccuacaagacccu

SEQ ID NO: 1444192 - RNA, 19 nt, Artificial Sequence
  Description of Artificial Sequence: Synthetic oligonucleotide
  Sense strand starting at position 2964 of SEQ ID NO: 1243823
gaacucuuguauguggcaa

SEQ ID NO: 1444193 - RNA, 19 nt, Artificial Sequence
  Description of Artificial Sequence: Synthetic oligonucleotide
  Antisense strand to SEQ ID NO: 1444192
uugccacauacaagaguuc

SEQ ID NO: 1444194 - RNA, 19 nt, Artificial Sequence
  Description of Artificial Sequence: Synthetic oligonucleotide
  Sense strand starting at position 2998 of SEQ ID NO: 1243823
guggccuugagucagauca

SEQ ID NO: 1444195 - RNA, 19 nt, Artificial Sequence
  Description of Artificial Sequence: Synthetic oligonucleotide
  Antisense strand to SEQ ID NO: 1444194
ugaucugacucaaggccac

SEQ ID NO: 1444196 - RNA, 19 nt, Artificial Sequence
  Description of Artificial Sequence: Synthetic oligonucleotide
  Sense strand starting at position 3066 of SEQ ID NO: 1243823
cagugagaccaaugaaguu

SEQ ID NO: 1444197 - RNA, 19 nt, Artificial Sequence
  Description of Artificial Sequence: Synthetic oligonucleotide
  Antisense strand to SEQ ID NO: 1444196
aacuucauuggucucacug

SEQ ID NO: 1444198 - RNA, 19 nt, Artificial Sequence
  Description of Artificial Sequence: Synthetic oligonucleotide
  Sense strand starting at position 3102 of SEQ ID NO: 1243823
aggagugguugaccuagau

SEQ ID NO: 1444199 - RNA, 19 nt, Artificial Sequence
  Description of Artificial Sequence: Synthetic oligonucleotide
  Antisense strand to SEQ ID NO: 1444198
aucuaggucaaccacuccu

SEQ ID NO: 1444200 - RNA, 19 nt, Artificial Sequence
  Description of Artificial Sequence: Synthetic oligonucleotide
  Sense strand starting at position 3506 of SEQ ID NO: 1243823
ccugguagaccuugcauuu

SEQ ID NO: 1444201 - RNA, 19 nt, Artificial Sequence
  Description of Artificial Sequence: Synthetic oligonucleotide
  Antisense strand to SEQ ID NO: 1444200
aaaugcaaggucuaccagg

SEQ ID NO: 1444202 - RNA, 19 nt, Artificial Sequence
  Description of Artificial Sequence: Synthetic oligonucleotide
  Sense strand starting at position 3539 of SEQ ID NO: 1243823
ugcuguauccaaugagaua

SEQ ID NO: 1444203 - RNA, 19 nt, Artificial Sequence
  Description of Artificial Sequence: Synthetic oligonucleotide
  Antisense strand to SEQ ID NO: 1444202
uaucucauuggauacagca

SEQ ID NO: 1444204 - RNA, 19 nt, Artificial Sequence
  Description of Artificial Sequence: Synthetic oligonucleotide
  Sense strand starting at position 3686 of SEQ ID NO: 1243823
gcaaguaacuuucucagag

SEQ ID NO: 1444205 - RNA, 19 nt, Artificial Sequence
  Description of Artificial Sequence: Synthetic oligonucleotide
  Antisense strand to SEQ ID NO: 1444204
cucugagaaaguuacuugc

SEQ ID NO: 1444206 - RNA, 19 nt, Artificial Sequence
  Description of Artificial Sequence: Synthetic oligonucleotide
  Sense strand starting at position 3800 of SEQ ID NO: 1243823
gugucucucccucauaaca

SEQ ID NO: 1444207 - RNA, 19 nt, Artificial Sequence
  Description of Artificial Sequence: Synthetic oligonucleotide
  Antisense strand to SEQ ID NO: 1444206
uguuaugagggagagacac

SEQ ID NO: 1444208 - RNA, 19 nt, Artificial Sequence
  Description of Artificial Sequence: Synthetic oligonucleotide
  Sense strand starting at position 3832 of SEQ ID NO: 1243823
ccuggugauccucaucuua

SEQ ID NO: 1444209 - RNA, 19 nt, Artificial Sequence
  Description of Artificial Sequence: Synthetic oligonucleotide
  Antisense strand to SEQ ID NO: 1444208
uaagaugaggaucaccagg

SEQ ID NO: 1444210 - RNA, 19 nt, Artificial Sequence
  Description of Artificial Sequence: Synthetic oligonucleotide
  Sense strand starting at position 3834 of SEQ ID NO: 1243823
uggugauccucaucuuaga

SEQ ID NO: 1444211 - RNA, 19 nt, Artificial Sequence
  Description of Artificial Sequence: Synthetic oligonucleotide
  Antisense strand to SEQ ID NO: 1444210
ucuaagaugaggaucacca

SEQ ID NO: 1444212 - RNA, 19 nt, Artificial Sequence
  Description of Artificial Sequence: Synthetic oligonucleotide
  Sense strand starting at position 51 of SEQ ID NO: 1243824
uuauuaaagucagcagcau

SEQ ID NO: 1444213 - RNA, 19 nt, Artificial Sequence
  Description of Artificial Sequence: Synthetic oligonucleotide
  Antisense strand to SEQ ID NO: 1444212
augcugcugacuuuaauaa

SEQ ID NO: 1444214 - RNA, 19 nt, Artificial Sequence
  Description of Artificial Sequence: Synthetic oligonucleotide
  Sense strand starting at position 101 of SEQ ID NO: 1243824
caucuuuggugaguuugau

SEQ ID NO: 1444215 - RNA, 19 nt, Artificial Sequence
  Description of Artificial Sequence: Synthetic oligonucleotide
  Antisense strand to SEQ ID NO: 1444214
aucaaacucaccaaagaug

SEQ ID NO: 1444216 - RNA, 19 nt, Artificial Sequence
  Description of Artificial Sequence: Synthetic oligonucleotide
  Sense strand starting at position 148 of SEQ ID NO: 1243824
agagaagaaugauauuaac

SEQ ID NO: 1444217 - RNA, 19 nt, Artificial Sequence
  Description of Artificial Sequence: Synthetic oligonucleotide
  Antisense strand to SEQ ID NO: 1444216
guuaauaucauucuucucu

SEQ ID NO: 1444218 - RNA, 19 nt, Artificial Sequence
  Description of Artificial Sequence: Synthetic oligonucleotide
  Sense strand starting at position 242 of SEQ ID NO: 1243824
uccacuguaccaugggaau

SEQ ID NO: 1444219 - RNA, 19 nt, Artificial Sequence
  Description of Artificial Sequence: Synthetic oligonucleotide
  Antisense strand to SEQ ID NO: 1444218
auucccaugguacagugga

SEQ ID NO: 1444220 - RNA, 19 nt, Artificial Sequence
  Description of Artificial Sequence: Synthetic oligonucleotide
  Sense strand starting at position 255 of SEQ ID NO: 1243824
gggaauaugccaugguaau

SEQ ID NO: 1444221 - RNA, 19 nt, Artificial Sequence
  Description of Artificial Sequence: Synthetic oligonucleotide
  Antisense strand to SEQ ID NO: 1444220
auuaccauggcauauuccc

SEQ ID NO: 1444222 - RNA, 19 nt, Artificial Sequence
  Description of Artificial Sequence: Synthetic oligonucleotide
  Sense strand starting at position 256 of SEQ ID NO: 1243824
ggaauaugccaugguaauu

SEQ ID NO: 1444223 - RNA, 19 nt, Artificial Sequence
  Description of Artificial Sequence: Synthetic oligonucleotide
  Antisense strand to SEQ ID NO: 1444222
aauuaccauggcauauucc

SEQ ID NO: 1444224 - RNA, 19 nt, Artificial Sequence
  Description of Artificial Sequence: Synthetic oligonucleotide
  Sense strand starting at position 369 of SEQ ID NO: 1243824
agcacuugaugaguuacga

SEQ ID NO: 1444225 - RNA, 19 nt, Artificial Sequence
  Description of Artificial Sequence: Synthetic oligonucleotide
  Antisense strand to SEQ ID NO: 1444224
ucguaacucaucaagugcu

SEQ ID NO: 1444226 - RNA, 19 nt, Artificial Sequence
  Description of Artificial Sequence: Synthetic oligonucleotide
  Sense strand starting at position 378 of SEQ ID NO: 1243824
ugaguuacgaacugugguu

SEQ ID NO: 1444227 - RNA, 19 nt, Artificial Sequence
  Description of Artificial Sequence: Synthetic oligonucleotide
  Antisense strand to SEQ ID NO: 1444226
aaccacaguucguaacuca

SEQ ID NO: 1444228 - RNA, 19 nt, Artificial Sequence
  Description of Artificial Sequence: Synthetic oligonucleotide
  Sense strand starting at position 385 of SEQ ID NO: 1243824
cgaacugugguuuggucaa

SEQ ID NO: 1444229 - RNA, 19 nt, Artificial Sequence
  Description of Artificial Sequence: Synthetic oligonucleotide
  Antisense strand to SEQ ID NO: 1444228
uugaccaaaccacaguucg

SEQ ID NO: 1444230 - RNA, 19 nt, Artificial Sequence
  Description of Artificial Sequence: Synthetic oligonucleotide
  Sense strand starting at position 617 of SEQ ID NO: 1243824
uccggauaucuccaaacuu

SEQ ID NO: 1444231 - RNA, 19 nt, Artificial Sequence
  Description of Artificial Sequence: Synthetic oligonucleotide
  Antisense strand to SEQ ID NO: 1444230
aaguuuggagauauccgga

SEQ ID NO: 1444232 - RNA, 19 nt, Artificial Sequence
  Description of Artificial Sequence: Synthetic oligonucleotide
  Sense strand starting at position 680 of SEQ ID NO: 1243824
ucagucaguucccugauca

SEQ ID NO: 1444233 - RNA, 19 nt, Artificial Sequence
  Description of Artificial Sequence: Synthetic oligonucleotide
  Antisense strand to SEQ ID NO: 1444232
ugaucagggaacugacuga

SEQ ID NO: 1444234 - RNA, 19 nt, Artificial Sequence
  Description of Artificial Sequence: Synthetic oligonucleotide
  Sense strand starting at position 875 of SEQ ID NO: 1243824
uggucuuucuuauuccuga

SEQ ID NO: 1444235 - RNA, 19 nt, Artificial Sequence
  Description of Artificial Sequence: Synthetic oligonucleotide
  Antisense strand to SEQ ID NO: 1444234
ucaggaauaagaaagacca

SEQ ID NO: 1444236 - RNA, 19 nt, Artificial Sequence
  Description of Artificial Sequence: Synthetic oligonucleotide
  Sense strand starting at position 876 of SEQ ID NO: 1243824
ggucuuucuuauuccugaa

SEQ ID NO: 1444237 - RNA, 19 nt, Artificial Sequence
  Description of Artificial Sequence: Synthetic oligonucleotide
  Antisense strand to SEQ ID NO: 1444236
uucaggaauaagaaagacc

SEQ ID NO: 1444238 - RNA, 19 nt, Artificial Sequence
  Description of Artificial Sequence: Synthetic oligonucleotide
  Sense strand starting at position 931 of SEQ ID NO: 1243824
agugaagucuuauucuucu

SEQ ID NO: 1444239 - RNA, 19 nt, Artificial Sequence
  Description of Artificial Sequence: Synthetic oligonucleotide
  Antisense strand to SEQ ID NO: 1444238
agaagaauaagacuucacu

SEQ ID NO: 1444240 - RNA, 19 nt, Artificial Sequence
  Description of Artificial Sequence: Synthetic oligonucleotide
  Sense strand starting at position 1087 of SEQ ID NO: 1243824
aacagaaaccguuaucuug

SEQ ID NO: 1444241 - RNA, 19 nt, Artificial Sequence
  Description of Artificial Sequence: Synthetic oligonucleotide
  Antisense strand to SEQ ID NO: 1444240
caagauaacgguuucuguu

SEQ ID NO: 1444242 - RNA, 19 nt, Artificial Sequence
  Description of Artificial Sequence: Synthetic oligonucleotide
  Sense strand starting at position 1089 of SEQ ID NO: 1243824
cagaaaccguuaucuugau

SEQ ID NO: 1444243 - RNA, 19 nt, Artificial Sequence
  Description of Artificial Sequence: Synthetic oligonucleotide
  Antisense strand to SEQ ID NO: 1444242
aucaagauaacgguuucug

SEQ ID NO: 1444244 - RNA, 19 nt, Artificial Sequence
  Description of Artificial Sequence: Synthetic oligonucleotide
  Sense strand starting at position 1095 of SEQ ID NO: 1243824
ccguuaucuugaucauuuc

SEQ ID NO: 1444245 - RNA, 19 nt, Artificial Sequence
  Description of Artificial Sequence: Synthetic oligonucleotide
  Antisense strand to SEQ ID NO: 1444244
gaaaugaucaagauaacgg

SEQ ID NO: 1444246 - RNA, 19 nt, Artificial Sequence
  Description of Artificial Sequence: Synthetic oligonucleotide
  Sense strand starting at position 1104 of SEQ ID NO: 1243824
ugaucauuucuguguccca

SEQ ID NO: 1444247 - RNA, 19 nt, Artificial Sequence
  Description of Artificial Sequence: Synthetic oligonucleotide
  Antisense strand to SEQ ID NO: 1444246
ugggacacagaaaugauca

SEQ ID NO: 1444248 - RNA, 19 nt, Artificial Sequence
  Description of Artificial Sequence: Synthetic oligonucleotide
  Sense strand starting at position 1181 of SEQ ID NO: 1243824
ggaugugucucuccucuua

SEQ ID NO: 1444249 - RNA, 19 nt, Artificial Sequence
  Description of Artificial Sequence: Synthetic oligonucleotide
  Antisense strand to SEQ ID NO: 1444248
uaagaggagagacacaucc

SEQ ID NO: 1444250 - RNA, 19 nt, Artificial Sequence
  Description of Artificial Sequence: Synthetic oligonucleotide
  Sense strand starting at position 1183 of SEQ ID NO: 1243824
augugucucuccucuuaua

SEQ ID NO: 1444251 - RNA, 19 nt, Artificial Sequence
  Description of Artificial Sequence: Synthetic oligonucleotide
  Antisense strand to SEQ ID NO: 1444250
uauaagaggagagacacau

SEQ ID NO: 1444252 - RNA, 19 nt, Artificial Sequence
  Description of Artificial Sequence: Synthetic oligonucleotide
  Sense strand starting at position 1228 of SEQ ID NO: 1243824
ccucacucuugucuauaga

SEQ ID NO: 1444253 - RNA, 19 nt, Artificial Sequence
  Description of Artificial Sequence: Synthetic oligonucleotide
  Antisense strand to SEQ ID NO: 1444252
ucuauagacaagagugagg

SEQ ID NO: 1444254 - RNA, 19 nt, Artificial Sequence
  Description of Artificial Sequence: Synthetic oligonucleotide
  Sense strand starting at position 1274 of SEQ ID NO: 1243824
augaauagaucugaacaac

SEQ ID NO: 1444255 - RNA, 19 nt, Artificial Sequence
  Description of Artificial Sequence: Synthetic oligonucleotide
  Antisense strand to SEQ ID NO: 1444254
guuguucagaucuauucau

SEQ ID NO: 1444256 - RNA, 19 nt, Artificial Sequence
  Description of Artificial Sequence: Synthetic oligonucleotide
  Sense strand starting at position 1334 of SEQ ID NO: 1243824
augccuuccuggcuccaaa

SEQ ID NO: 1444257 - RNA, 19 nt, Artificial Sequence
  Description of Artificial Sequence: Synthetic oligonucleotide
  Antisense strand to SEQ ID NO: 1444256
uuuggagccaggaaggcau

SEQ ID NO: 1444258 - RNA, 19 nt, Artificial Sequence
  Description of Artificial Sequence: Synthetic oligonucleotide
  Sense strand starting at position 1404 of SEQ ID NO: 1243824
uguugaauuuauggaccaa

SEQ ID NO: 1444259 - RNA, 19 nt, Artificial Sequence
  Description of Artificial Sequence: Synthetic oligonucleotide
  Antisense strand to SEQ ID NO: 1444258
uugguccauaaauucaaca

SEQ ID NO: 1444260 - RNA, 19 nt, Artificial Sequence
  Description of Artificial Sequence: Synthetic oligonucleotide
  Sense strand starting at position 1447 of SEQ ID NO: 1243824
ggaguuaaaugcuuuguuu

SEQ ID NO: 1444261 - RNA, 19 nt, Artificial Sequence
  Description of Artificial Sequence: Synthetic oligonucleotide
  Antisense strand to SEQ ID NO: 1444260
aaacaaagcauuuaacucc

SEQ ID NO: 1444262 - RNA, 19 nt, Artificial Sequence
  Description of Artificial Sequence: Synthetic oligonucleotide
  Sense strand starting at position 1458 of SEQ ID NO: 1243824
cuuuguuuccaaugagaca

SEQ ID NO: 1444263 - RNA, 19 nt, Artificial Sequence
  Description of Artificial Sequence: Synthetic oligonucleotide
  Antisense strand to SEQ ID NO: 1444262
ugucucauuggaaacaaag

SEQ ID NO: 1444264 - RNA, 19 nt, Artificial Sequence
  Description of Artificial Sequence: Synthetic oligonucleotide
  Sense strand starting at position 1622 of SEQ ID NO: 1243824
ggaugagaaugagggaaau

SEQ ID NO: 1444265 - RNA, 19 nt, Artificial Sequence
  Description of Artificial Sequence: Synthetic oligonucleotide
  Antisense strand to SEQ ID NO: 1444264
auuucccucauucucaucc

SEQ ID NO: 1444266 - RNA, 19 nt, Artificial Sequence
  Description of Artificial Sequence: Synthetic oligonucleotide
  Sense strand starting at position 1635 of SEQ ID NO: 1243824
ggaaaucaagcucgcaaga

SEQ ID NO: 1444267 - RNA, 19 nt, Artificial Sequence
  Description of Artificial Sequence: Synthetic oligonucleotide
  Antisense strand to SEQ ID NO: 1444266
ucuugcgagcuugauuucc

SEQ ID NO: 1444268 - RNA, 19 nt, Artificial Sequence
  Description of Artificial Sequence: Synthetic oligonucleotide
  Sense strand starting at position 1717 of SEQ ID NO: 1243824
cgcguaauggccgcuccaa

SEQ ID NO: 1444269 - RNA, 19 nt, Artificial Sequence
  Description of Artificial Sequence: Synthetic oligonucleotide
  Antisense strand to SEQ ID NO: 1444268
uuggagcggccauuacgcg

SEQ ID NO: 1444270 - RNA, 19 nt, Artificial Sequence
  Description of Artificial Sequence: Synthetic oligonucleotide
  Sense strand starting at position 3660 of SEQ ID NO: 1243824
uaagucauuguagguuaau

SEQ ID NO: 1444271 - RNA, 19 nt, Artificial Sequence
  Description of Artificial Sequence: Synthetic oligonucleotide
  Antisense strand to SEQ ID NO: 1444270
auuaaccuacaaugacuua

SEQ ID NO: 1444272 - RNA, 19 nt, Artificial Sequence
  Description of Artificial Sequence: Synthetic oligonucleotide
  Sense strand starting at position 3661 of SEQ ID NO: 1243824
aagucauuguagguuaauc

SEQ ID NO: 1444273 - RNA, 19 nt, Artificial Sequence
  Description of Artificial Sequence: Synthetic oligonucleotide
  Antisense strand to SEQ ID NO: 1444272
gauuaaccuacaaugacuu

SEQ ID NO: 1444274 - RNA, 19 nt, Artificial Sequence
  Description of Artificial Sequence: Synthetic oligonucleotide
  Sense strand starting at position 3669 of SEQ ID NO: 1243824
guagguuaaucaguucucu

SEQ ID NO: 1444275 - RNA, 19 nt, Artificial Sequence
  Description of Artificial Sequence: Synthetic oligonucleotide
  Antisense strand to SEQ ID NO: 1444274
agagaacugauuaaccuac

SEQ ID NO: 1444276 - RNA, 19 nt, Artificial Sequence
  Description of Artificial Sequence: Synthetic oligonucleotide
  Sense strand starting at position 3673 of SEQ ID NO: 1243824
guuaaucaguucucuuagu

SEQ ID NO: 1444277 - RNA, 19 nt, Artificial Sequence
  Description of Artificial Sequence: Synthetic oligonucleotide
  Antisense strand to SEQ ID NO: 1444276
acuaagagaacugauuaac

SEQ ID NO: 1444278 - RNA, 19 nt, Artificial Sequence
  Description of Artificial Sequence: Synthetic oligonucleotide
  Sense strand starting at position 3684 of SEQ ID NO: 1243824
cucuuagugugcuuuauuu

SEQ ID NO: 1444279 - RNA, 19 nt, Artificial Sequence
  Description of Artificial Sequence: Synthetic oligonucleotide
  Antisense strand to SEQ ID NO: 1444278
aaauaaagcacacuaagag

SEQ ID NO: 1444280 - RNA, 19 nt, Artificial Sequence
  Description of Artificial Sequence: Synthetic oligonucleotide
  Sense strand starting at position 3765 of SEQ ID NO: 1243824
acaugagagucaccuauga

SEQ ID NO: 1444281 - RNA, 19 nt, Artificial Sequence
  Description of Artificial Sequence: Synthetic oligonucleotide
  Antisense strand to SEQ ID NO: 1444280
ucauaggugacucucaugu

SEQ ID NO: 1444282 - RNA, 19 nt, Artificial Sequence
  Description of Artificial Sequence: Synthetic oligonucleotide
  Sense strand starting at position 3769 of SEQ ID NO: 1243824
gagagucaccuaugaagca

SEQ ID NO: 1444283 - RNA, 19 nt, Artificial Sequence
  Description of Artificial Sequence: Synthetic oligonucleotide
  Antisense strand to SEQ ID NO: 1444282
ugcuucauaggugacucuc

SEQ ID NO: 1444284 - RNA, 19 nt, Artificial Sequence
  Description of Artificial Sequence: Synthetic oligonucleotide
  Sense strand starting at position 3863 of SEQ ID NO: 1243824
gcacccagguuauucuaau

SEQ ID NO: 1444285 - RNA, 19 nt, Artificial Sequence
  Description of Artificial Sequence: Synthetic oligonucleotide
  Antisense strand to SEQ ID NO: 1444284
auuagaauaaccugggugc

SEQ ID NO: 1444286 - RNA, 19 nt, Artificial Sequence
  Description of Artificial Sequence: Synthetic oligonucleotide
  Sense strand starting at position 3878 of SEQ ID NO: 1243824
uaauauaugccaggguuag

SEQ ID NO: 1444287 - RNA, 19 nt, Artificial Sequence
  Description of Artificial Sequence: Synthetic oligonucleotide
  Antisense strand to SEQ ID NO: 1444286
cuaacccuggcauauauua

SEQ ID NO: 1444288 - RNA, 19 nt, Artificial Sequence
  Description of Artificial Sequence: Synthetic oligonucleotide
  Sense strand starting at position 3896 of SEQ ID NO: 1243824
gagaguaacugcccuaaau

SEQ ID NO: 1444289 - RNA, 19 nt, Artificial Sequence
  Description of Artificial Sequence: Synthetic oligonucleotide
  Antisense strand to SEQ ID NO: 1444288
auuuagggcaguuacucuc

SEQ ID NO: 1444290 - RNA, 19 nt, Artificial Sequence
  Description of Artificial Sequence: Synthetic oligonucleotide
  Sense strand starting at position 3979 of SEQ ID NO: 1243824
cuguuucuugaaugaagga

SEQ ID NO: 1444291 - RNA, 19 nt, Artificial Sequence
  Description of Artificial Sequence: Synthetic oligonucleotide
  Antisense strand to SEQ ID NO: 1444290
uccuucauucaagaaacag

SEQ ID NO: 1444292 - RNA, 19 nt, Artificial Sequence
  Description of Artificial Sequence: Synthetic oligonucleotide
  Sense strand starting at position 382 of SEQ ID NO: 1243825
augcuuugugaauagucau

SEQ ID NO: 1444293 - RNA, 19 nt, Artificial Sequence
  Description of Artificial Sequence: Synthetic oligonucleotide
  Antisense strand to SEQ ID NO: 1444292
augacuauucacaaagcau

SEQ ID NO: 1444294 - RNA, 19 nt, Artificial Sequence
  Description of Artificial Sequence: Synthetic oligonucleotide
  Sense strand starting at position 389 of SEQ ID NO: 1243825
gugaauagucauuggugga

SEQ ID NO: 1444295 - RNA, 19 nt, Artificial Sequence
  Description of Artificial Sequence: Synthetic oligonucleotide
  Antisense strand to SEQ ID NO: 1444294
uccaccaaugacuauucac

SEQ ID NO: 1444296 - RNA, 19 nt, Artificial Sequence
  Description of Artificial Sequence: Synthetic oligonucleotide
  Sense strand starting at position 390 of SEQ ID NO: 1243825
ugaauagucauugguggau

SEQ ID NO: 1444297 - RNA, 19 nt, Artificial Sequence
  Description of Artificial Sequence: Synthetic oligonucleotide
  Antisense strand to SEQ ID NO: 1444296
auccaccaaugacuauuca

SEQ ID NO: 1444298 - RNA, 19 nt, Artificial Sequence
  Description of Artificial Sequence: Synthetic oligonucleotide
  Sense strand starting at position 403 of SEQ ID NO: 1243825
guggaucccuucuuccuaa

SEQ ID NO: 1444299 - RNA, 19 nt, Artificial Sequence
  Description of Artificial Sequence: Synthetic oligonucleotide
  Antisense strand to SEQ ID NO: 1444298
uuaggaagaagggauccac

SEQ ID NO: 1444300 - RNA, 19 nt, Artificial Sequence
  Description of Artificial Sequence: Synthetic oligonucleotide
  Sense strand starting at position 424 of SEQ ID NO: 1243825
augagaagcucugguccuu

SEQ ID NO: 1444301 - RNA, 19 nt, Artificial Sequence
  Description of Artificial Sequence: Synthetic oligonucleotide
  Antisense strand to SEQ ID NO: 1444300
aaggaccagagcuucucau

SEQ ID NO: 1444302 - RNA, 19 nt, Artificial Sequence
  Description of Artificial Sequence: Synthetic oligonucleotide
  Sense strand starting at position 623 of SEQ ID NO: 1243825
gcaccuguuaugggaggau

SEQ ID NO: 1444303 - RNA, 19 nt, Artificial Sequence
  Description of Artificial Sequence: Synthetic oligonucleotide
  Antisense strand to SEQ ID NO: 1444302
auccucccauaacaggugc

SEQ ID NO: 1444304 - RNA, 19 nt, Artificial Sequence
  Description of Artificial Sequence: Synthetic oligonucleotide
  Sense strand starting at position 718 of SEQ ID NO: 1243825
accuccgaucuguaaggaa

SEQ ID NO: 1444305 - RNA, 19 nt, Artificial Sequence
  Description of Artificial Sequence: Synthetic oligonucleotide
  Antisense strand to SEQ ID NO: 1444304
uuccuuacagaucggaggu

SEQ ID NO: 1444306 - RNA, 19 nt, Artificial Sequence
  Description of Artificial Sequence: Synthetic oligonucleotide
  Sense strand starting at position 835 of SEQ ID NO: 1243825
gugacucugcgggaggaau

SEQ ID NO: 1444307 - RNA, 19 nt, Artificial Sequence
  Description of Artificial Sequence: Synthetic oligonucleotide
  Antisense strand to SEQ ID NO: 1444306
auuccucccgcagagucac

SEQ ID NO: 1444308 - RNA, 19 nt, Artificial Sequence
  Description of Artificial Sequence: Synthetic oligonucleotide
  Sense strand starting at position 883 of SEQ ID NO: 1243825
ccacgcuucucccuaaaga

SEQ ID NO: 1444309 - RNA, 19 nt, Artificial Sequence
  Description of Artificial Sequence: Synthetic oligonucleotide
  Antisense strand to SEQ ID NO: 1444308
ucuuuagggagaagcgugg

SEQ ID NO: 1444310 - RNA, 19 nt, Artificial Sequence
  Description of Artificial Sequence: Synthetic oligonucleotide
  Sense strand starting at position 899 of SEQ ID NO: 1243825
agaagaucucagcgcuucu

SEQ ID NO: 1444311 - RNA, 19 nt, Artificial Sequence
  Description of Artificial Sequence: Synthetic oligonucleotide
  Antisense strand to SEQ ID NO: 1444310
agaagcgcugagaucuucu

SEQ ID NO: 1444312 - RNA, 19 nt, Artificial Sequence
  Description of Artificial Sequence: Synthetic oligonucleotide
  Sense strand starting at position 912 of SEQ ID NO: 1243825
gcuucucugcccgaucuuu

SEQ ID NO: 1444313 - RNA, 19 nt, Artificial Sequence
  Description of Artificial Sequence: Synthetic oligonucleotide
  Antisense strand to SEQ ID NO: 1444312
aaagaucgggcagagaagc

SEQ ID NO: 1444314 - RNA, 19 nt, Artificial Sequence
  Description of Artificial Sequence: Synthetic oligonucleotide
  Sense strand starting at position 1079 of SEQ ID NO: 1243825
cugggcugcccugguuaaa

SEQ ID NO: 1444315 - RNA, 19 nt, Artificial Sequence
  Description of Artificial Sequence: Synthetic oligonucleotide
  Antisense strand to SEQ ID NO: 1444314
uuuaaccagggcagcccag

SEQ ID NO: 1444316 - RNA, 19 nt, Artificial Sequence
  Description of Artificial Sequence: Synthetic oligonucleotide
  Sense strand starting at position 1089 of SEQ ID NO: 1243825
cugguuaaaucuccgcauu

SEQ ID NO: 1444317 - RNA, 19 nt, Artificial Sequence
  Description of Artificial Sequence: Synthetic oligonucleotide
  Antisense strand to SEQ ID NO: 1444316
aaugcggagauuuaaccag

SEQ ID NO: 1444318 - RNA, 19 nt, Artificial Sequence
  Description of Artificial Sequence: Synthetic oligonucleotide
  Sense strand starting at position 1090 of SEQ ID NO: 1243825
ugguuaaaucuccgcauuc

SEQ ID NO: 1444319 - RNA, 19 nt, Artificial Sequence
  Description of Artificial Sequence: Synthetic oligonucleotide
  Antisense strand to SEQ ID NO: 1444318
gaaugcggagauuuaacca

SEQ ID NO: 1444320 - RNA, 19 nt, Artificial Sequence
  Description of Artificial Sequence: Synthetic oligonucleotide
  Sense strand starting at position 1092 of SEQ ID NO: 1243825
guuaaaucuccgcauucca

SEQ ID NO: 1444321 - RNA, 19 nt, Artificial Sequence
  Description of Artificial Sequence: Synthetic oligonucleotide
  Antisense strand to SEQ ID NO: 1444320
uggaaugcggagauuuaac

SEQ ID NO: 1444322 - RNA, 19 nt, Artificial Sequence
  Description of Artificial Sequence: Synthetic oligonucleotide
  Sense strand starting at position 1099 of SEQ ID NO: 1243825
cuccgcauuccagagacua

SEQ ID NO: 1444323 - RNA, 19 nt, Artificial Sequence
  Description of Artificial Sequence: Synthetic oligonucleotide
  Antisense strand to SEQ ID NO: 1444322
uagucucuggaaugcggag

SEQ ID NO: 1444324 - RNA, 19 nt, Artificial Sequence
  Description of Artificial Sequence: Synthetic oligonucleotide
  Sense strand starting at position 1489 of SEQ ID NO: 1243825
cuguccaucuuauguggua

SEQ ID NO: 1444325 - RNA, 19 nt, Artificial Sequence
  Description of Artificial Sequence: Synthetic oligonucleotide
  Antisense strand to SEQ ID NO: 1444324
uaccacauaagauggacag

SEQ ID NO: 1444326 - RNA, 19 nt, Artificial Sequence
  Description of Artificial Sequence: Synthetic oligonucleotide
  Sense strand starting at position 1491 of SEQ ID NO: 1243825
guccaucuuaugugguaga

SEQ ID NO: 1444327 - RNA, 19 nt, Artificial Sequence
  Description of Artificial Sequence: Synthetic oligonucleotide
  Antisense strand to SEQ ID NO: 1444326
ucuaccacauaagauggac

SEQ ID NO: 1444328 - RNA, 19 nt, Artificial Sequence
  Description of Artificial Sequence: Synthetic oligonucleotide
  Sense strand starting at position 2037 of SEQ ID NO: 1243825
cuccuuuccuuguggucaa

SEQ ID NO: 1444329 - RNA, 19 nt, Artificial Sequence
  Description of Artificial Sequence: Synthetic oligonucleotide
  Antisense strand to SEQ ID NO: 1444328
uugaccacaaggaaaggag

SEQ ID NO: 1444330 - RNA, 19 nt, Artificial Sequence
  Description of Artificial Sequence: Synthetic oligonucleotide
  Sense strand starting at position 2207 of SEQ ID NO: 1243825
gggaguugucaucgugacu

SEQ ID NO: 1444331 - RNA, 19 nt, Artificial Sequence
  Description of Artificial Sequence: Synthetic oligonucleotide
  Antisense strand to SEQ ID NO: 1444330
agucacgaugacaacuccc

SEQ ID NO: 1444332 - RNA, 19 nt, Artificial Sequence
  Description of Artificial Sequence: Synthetic oligonucleotide
  Sense strand starting at position 2212 of SEQ ID NO: 1243825
uugucaucgugacuccaga

SEQ ID NO: 1444333 - RNA, 19 nt, Artificial Sequence
  Description of Artificial Sequence: Synthetic oligonucleotide
  Antisense strand to SEQ ID NO: 1444332
ucuggagucacgaugacaa

SEQ ID NO: 1444334 - RNA, 19 nt, Artificial Sequence
  Description of Artificial Sequence: Synthetic oligonucleotide
  Sense strand starting at position 2225 of SEQ ID NO: 1243825
uccagagucccugaauggu

SEQ ID NO: 1444335 - RNA, 19 nt, Artificial Sequence
  Description of Artificial Sequence: Synthetic oligonucleotide
  Antisense strand to SEQ ID NO: 1444334
accauucagggacucugga

SEQ ID NO: 1444336 - RNA, 19 nt, Artificial Sequence
  Description of Artificial Sequence: Synthetic oligonucleotide
  Sense strand starting at position 2234 of SEQ ID NO: 1243825
ccugaaugguuccuagucu

SEQ ID NO: 1444337 - RNA, 19 nt, Artificial Sequence
  Description of Artificial Sequence: Synthetic oligonucleotide
  Antisense strand to SEQ ID NO: 1444336
agacuaggaaccauucagg

SEQ ID NO: 1444338 - RNA, 19 nt, Artificial Sequence
  Description of Artificial Sequence: Synthetic oligonucleotide
  Sense strand starting at position 2235 of SEQ ID NO: 1243825
cugaaugguuccuagucuu

SEQ ID NO: 1444339 - RNA, 19 nt, Artificial Sequence
  Description of Artificial Sequence: Synthetic oligonucleotide
  Antisense strand to SEQ ID NO: 1444338
aagacuaggaaccauucag

SEQ ID NO: 1444340 - RNA, 19 nt, Artificial Sequence
  Description of Artificial Sequence: Synthetic oligonucleotide
  Sense strand starting at position 2238 of SEQ ID NO: 1243825
aaugguuccuagucuugga

SEQ ID NO: 1444341 - RNA, 19 nt, Artificial Sequence
  Description of Artificial Sequence: Synthetic oligonucleotide
  Antisense strand to SEQ ID NO: 1444340
uccaagacuaggaaccauu

SEQ ID NO: 1444342 - RNA, 19 nt, Artificial Sequence
  Description of Artificial Sequence: Synthetic oligonucleotide
  Sense strand starting at position 2241 of SEQ ID NO: 1243825
gguuccuagucuuggaaau

SEQ ID NO: 1444343 - RNA, 19 nt, Artificial Sequence
  Description of Artificial Sequence: Synthetic oligonucleotide
  Antisense strand to SEQ ID NO: 1444342
auuuccaagacuaggaacc

SEQ ID NO: 1444344 - RNA, 19 nt, Artificial Sequence
  Description of Artificial Sequence: Synthetic oligonucleotide
  Sense strand starting at position 2242 of SEQ ID NO: 1243825
guuccuagucuuggaaaug

SEQ ID NO: 1444345 - RNA, 19 nt, Artificial Sequence
  Description of Artificial Sequence: Synthetic oligonucleotide
  Antisense strand to SEQ ID NO: 1444344
cauuuccaagacuaggaac

SEQ ID NO: 1444346 - RNA, 19 nt, Artificial Sequence
  Description of Artificial Sequence: Synthetic oligonucleotide
  Sense strand starting at position 2243 of SEQ ID NO: 1243825
uuccuagucuuggaaaugu

SEQ ID NO: 1444347 - RNA, 19 nt, Artificial Sequence
  Description of Artificial Sequence: Synthetic oligonucleotide
  Antisense strand to SEQ ID NO: 1444346
acauuuccaagacuaggaa

SEQ ID NO: 1444348 - RNA, 19 nt, Artificial Sequence
  Description of Artificial Sequence: Synthetic oligonucleotide
  Sense strand starting at position 2252 of SEQ ID NO: 1243825
uuggaaauguguccucaac

SEQ ID NO: 1444349 - RNA, 19 nt, Artificial Sequence
  Description of Artificial Sequence: Synthetic oligonucleotide
  Antisense strand to SEQ ID NO: 1444348
guugaggacacauuuccaa

SEQ ID NO: 1444350 - RNA, 19 nt, Artificial Sequence
  Description of Artificial Sequence: Synthetic oligonucleotide
  Sense strand starting at position 2254 of SEQ ID NO: 1243825
ggaaauguguccucaacuu

SEQ ID NO: 1444351 - RNA, 19 nt, Artificial Sequence
  Description of Artificial Sequence: Synthetic oligonucleotide
  Antisense strand to SEQ ID NO: 1444350
aaguugaggacacauuucc

SEQ ID NO: 1444352 - RNA, 19 nt, Artificial Sequence
  Description of Artificial Sequence: Synthetic oligonucleotide
  Sense strand starting at position 3475 of SEQ ID NO: 1243825
ugccacuccuaauguguaa

SEQ ID NO: 1444353 - RNA, 19 nt, Artificial Sequence
  Description of Artificial Sequence: Synthetic oligonucleotide
  Antisense strand to SEQ ID NO: 1444352
uuacacauuaggaguggca

SEQ ID NO: 1444354 - RNA, 19 nt, Artificial Sequence
  Description of Artificial Sequence: Synthetic oligonucleotide
  Sense strand starting at position 3678 of SEQ ID NO: 1243825
gggcucugcugcuggaaga

SEQ ID NO: 1444355 - RNA, 19 nt, Artificial Sequence
  Description of Artificial Sequence: Synthetic oligonucleotide
  Antisense strand to SEQ ID NO: 1444354
ucuuccagcagcagagccc

SEQ ID NO: 1444356 - RNA, 19 nt, Artificial Sequence
  Description of Artificial Sequence: Synthetic oligonucleotide
  Sense strand starting at position 3703 of SEQ ID NO: 1243825
gacaaagccugguggacau

SEQ ID NO: 1444357 - RNA, 19 nt, Artificial Sequence
  Description of Artificial Sequence: Synthetic oligonucleotide
  Antisense strand to SEQ ID NO: 1444356
auguccaccaggcuuuguc

SEQ ID NO: 1444358 - RNA, 19 nt, Artificial Sequence
  Description of Artificial Sequence: Synthetic oligonucleotide
  Sense strand starting at position 3713 of SEQ ID NO: 1243825
gguggacauuguggaaauu

SEQ ID NO: 1444359 - RNA, 19 nt, Artificial Sequence
  Description of Artificial Sequence: Synthetic oligonucleotide
  Antisense strand to SEQ ID NO: 1444358
aauuuccacaauguccacc

SEQ ID NO: 1444360 - RNA, 19 nt, Artificial Sequence
  Description of Artificial Sequence: Synthetic oligonucleotide
  Sense strand starting at position 3736 of SEQ ID NO: 1243825
ugaugaugcagucauagau

SEQ ID NO: 1444361 - RNA, 19 nt, Artificial Sequence
  Description of Artificial Sequence: Synthetic oligonucleotide
  Antisense strand to SEQ ID NO: 1444360
aucuaugacugcaucauca

SEQ ID NO: 1444362 - RNA, 19 nt, Artificial Sequence
  Description of Artificial Sequence: Synthetic oligonucleotide
  Sense strand starting at position 3743 of SEQ ID NO: 1243825
gcagucauagauuaacuaa

SEQ ID NO: 1444363 - RNA, 19 nt, Artificial Sequence
  Description of Artificial Sequence: Synthetic oligonucleotide
  Antisense strand to SEQ ID NO: 1444362
uuaguuaaucuaugacugc

SEQ ID NO: 1444364 - RNA, 19 nt, Artificial Sequence
  Description of Artificial Sequence: Synthetic oligonucleotide
  Sense strand starting at position 50 of SEQ ID NO: 1243826
ggauccggcccuugucaau

SEQ ID NO: 1444365 - RNA, 19 nt, Artificial Sequence
  Description of Artificial Sequence: Synthetic oligonucleotide
  Antisense strand to SEQ ID NO: 1444364
auugacaagggccggaucc

SEQ ID NO: 1444366 - RNA, 19 nt, Artificial Sequence
  Description of Artificial Sequence: Synthetic oligonucleotide
  Sense strand starting at position 61 of SEQ ID NO: 1243826
uugucaauacagggaggua

SEQ ID NO: 1444367 - RNA, 19 nt, Artificial Sequence
  Description of Artificial Sequence: Synthetic oligonucleotide
  Antisense strand to SEQ ID NO: 1444366
uaccucccuguauugacaa

SEQ ID NO: 1444368 - RNA, 19 nt, Artificial Sequence
  Description of Artificial Sequence: Synthetic oligonucleotide
  Sense strand starting at position 122 of SEQ ID NO: 1243826
aggaaaguuucaggccuga

SEQ ID NO: 1444369 - RNA, 19 nt, Artificial Sequence
  Description of Artificial Sequence: Synthetic oligonucleotide
  Antisense strand to SEQ ID NO: 1444368
ucaggccugaaacuuuccu

SEQ ID NO: 1444370 - RNA, 19 nt, Artificial Sequence
  Description of Artificial Sequence: Synthetic oligonucleotide
  Sense strand starting at position 523 of SEQ ID NO: 1243826
ugcguccuccucugugaga

SEQ ID NO: 1444371 - RNA, 19 nt, Artificial Sequence
  Description of Artificial Sequence: Synthetic oligonucleotide
  Antisense strand to SEQ ID NO: 1444370
ucucacagaggaggacgca

SEQ ID NO: 1444372 - RNA, 19 nt, Artificial Sequence
  Description of Artificial Sequence: Synthetic oligonucleotide
  Sense strand starting at position 524 of SEQ ID NO: 1243826
gcguccuccucugugagau

SEQ ID NO: 1444373 - RNA, 19 nt, Artificial Sequence
  Description of Artificial Sequence: Synthetic oligonucleotide
  Antisense strand to SEQ ID NO: 1444372
aucucacagaggaggacgc

SEQ ID NO: 1444374 - RNA, 19 nt, Artificial Sequence
  Description of Artificial Sequence: Synthetic oligonucleotide
  Sense strand starting at position 525 of SEQ ID NO: 1243826
cguccuccucugugagauu

SEQ ID NO: 1444375 - RNA, 19 nt, Artificial Sequence
  Description of Artificial Sequence: Synthetic oligonucleotide
  Antisense strand to SEQ ID NO: 1444374
aaucucacagaggaggacg

SEQ ID NO: 1444376 - RNA, 19 nt, Artificial Sequence
  Description of Artificial Sequence: Synthetic oligonucleotide
  Sense strand starting at position 534 of SEQ ID NO: 1243826
cugugagauucuccagggu

SEQ ID NO: 1444377 - RNA, 19 nt, Artificial Sequence
  Description of Artificial Sequence: Synthetic oligonucleotide
  Antisense strand to SEQ ID NO: 1444376
acccuggagaaucucacag

SEQ ID NO: 1444378 - RNA, 19 nt, Artificial Sequence
  Description of Artificial Sequence: Synthetic oligonucleotide
  Sense strand starting at position 538 of SEQ ID NO: 1243826
gagauucuccagggucacu

SEQ ID NO: 1444379 - RNA, 19 nt, Artificial Sequence
  Description of Artificial Sequence: Synthetic oligonucleotide
  Antisense strand to SEQ ID NO: 1444378
agugacccuggagaaucuc

SEQ ID NO: 1444380 - RNA, 19 nt, Artificial Sequence
  Description of Artificial Sequence: Synthetic oligonucleotide
  Sense strand starting at position 632 of SEQ ID NO: 1243826
acaaucuugucacaucgga

SEQ ID NO: 1444381 - RNA, 19 nt, Artificial Sequence
  Description of Artificial Sequence: Synthetic oligonucleotide
  Antisense strand to SEQ ID NO: 1444380
uccgaugugacaagauugu

SEQ ID NO: 1444382 - RNA, 19 nt, Artificial Sequence
  Description of Artificial Sequence: Synthetic oligonucleotide
  Sense strand starting at position 636 of SEQ ID NO: 1243826
ucuugucacaucggagaau

SEQ ID NO: 1444383 - RNA, 19 nt, Artificial Sequence
  Description of Artificial Sequence: Synthetic oligonucleotide
  Antisense strand to SEQ ID NO: 1444382
auucuccgaugugacaaga

SEQ ID NO: 1444384 - RNA, 19 nt, Artificial Sequence
  Description of Artificial Sequence: Synthetic oligonucleotide
  Sense strand starting at position 669 of SEQ ID NO: 1243826
accagaauuuguugagggu

SEQ ID NO: 1444385 - RNA, 19 nt, Artificial Sequence
  Description of Artificial Sequence: Synthetic oligonucleotide
  Antisense strand to SEQ ID NO: 1444384
acccucaacaaauucuggu

SEQ ID NO: 1444386 - RNA, 19 nt, Artificial Sequence
  Description of Artificial Sequence: Synthetic oligonucleotide
  Sense strand starting at position 961 of SEQ ID NO: 1243826
ggaaguuuccauggagacu

SEQ ID NO: 1444387 - RNA, 19 nt, Artificial Sequence
  Description of Artificial Sequence: Synthetic oligonucleotide
  Antisense strand to SEQ ID NO: 1444386
agucuccauggaaacuucc

SEQ ID NO: 1444388 - RNA, 19 nt, Artificial Sequence
  Description of Artificial Sequence: Synthetic oligonucleotide
  Sense strand starting at position 1282 of SEQ ID NO: 1243826
auuggauaacuuuggcaau

SEQ ID NO: 1444389 - RNA, 19 nt, Artificial Sequence
  Description of Artificial Sequence: Synthetic oligonucleotide
  Antisense strand to SEQ ID NO: 1444388
auugccaaaguuauccaau

SEQ ID NO: 1444390 - RNA, 19 nt, Artificial Sequence
  Description of Artificial Sequence: Synthetic oligonucleotide
  Sense strand starting at position 1284 of SEQ ID NO: 1243826
uggauaacuuuggcaauga

SEQ ID NO: 1444391 - RNA, 19 nt, Artificial Sequence
  Description of Artificial Sequence: Synthetic oligonucleotide
  Antisense strand to SEQ ID NO: 1444390
ucauugccaaaguuaucca

SEQ ID NO: 1444392 - RNA, 19 nt, Artificial Sequence
  Description of Artificial Sequence: Synthetic oligonucleotide
  Sense strand starting at position 1285 of SEQ ID NO: 1243826
ggauaacuuuggcaaugac

SEQ ID NO: 1444393 - RNA, 19 nt, Artificial Sequence
  Description of Artificial Sequence: Synthetic oligonucleotide
  Antisense strand to SEQ ID NO: 1444392
gucauugccaaaguuaucc

SEQ ID NO: 1444394 - RNA, 19 nt, Artificial Sequence
  Description of Artificial Sequence: Synthetic oligonucleotide
  Sense strand starting at position 1288 of SEQ ID NO: 1243826
uaacuuuggcaaugacagu

SEQ ID NO: 1444395 - RNA, 19 nt, Artificial Sequence
  Description of Artificial Sequence: Synthetic oligonucleotide
  Antisense strand to SEQ ID NO: 1444394
acugucauugccaaaguua

SEQ ID NO: 1444396 - RNA, 19 nt, Artificial Sequence
  Description of Artificial Sequence: Synthetic oligonucleotide
  Sense strand starting at position 1605 of SEQ ID NO: 1243826
cagucauuccuguaacacg

SEQ ID NO: 1444397 - RNA, 19 nt, Artificial Sequence
  Description of Artificial Sequence: Synthetic oligonucleotide
  Antisense strand to SEQ ID NO: 1444396
cguguuacaggaaugacug

SEQ ID NO: 1444398 - RNA, 19 nt, Artificial Sequence
  Description of Artificial Sequence: Synthetic oligonucleotide
  Sense strand starting at position 1608 of SEQ ID NO: 1243826
ucauuccuguaacacgaau

SEQ ID NO: 1444399 - RNA, 19 nt, Artificial Sequence
  Description of Artificial Sequence: Synthetic oligonucleotide
  Antisense strand to SEQ ID NO: 1444398
auucguguuacaggaauga

SEQ ID NO: 1444400 - RNA, 19 nt, Artificial Sequence
  Description of Artificial Sequence: Synthetic oligonucleotide
  Sense strand starting at position 1847 of SEQ ID NO: 1243826
aacccugacgucuggcaaa

SEQ ID NO: 1444401 - RNA, 19 nt, Artificial Sequence
  Description of Artificial Sequence: Synthetic oligonucleotide
  Antisense strand to SEQ ID NO: 1444400
uuugccagacgucaggguu

SEQ ID NO: 1444402 - RNA, 19 nt, Artificial Sequence
  Description of Artificial Sequence: Synthetic oligonucleotide
  Sense strand starting at position 2083 of SEQ ID NO: 1243826
gagagagguugugucccuu

SEQ ID NO: 1444403 - RNA, 19 nt, Artificial Sequence
  Description of Artificial Sequence: Synthetic oligonucleotide
  Antisense strand to SEQ ID NO: 1444402
aagggacacaaccucucuc

SEQ ID NO: 1444404 - RNA, 19 nt, Artificial Sequence
  Description of Artificial Sequence: Synthetic oligonucleotide
  Sense strand starting at position 2087 of SEQ ID NO: 1243826
gagguugugucccuuaauc

SEQ ID NO: 1444405 - RNA, 19 nt, Artificial Sequence
  Description of Artificial Sequence: Synthetic oligonucleotide
  Antisense strand to SEQ ID NO: 1444404
gauuaagggacacaaccuc

SEQ ID NO: 1444406 - RNA, 19 nt, Artificial Sequence
  Description of Artificial Sequence: Synthetic oligonucleotide
  Sense strand starting at position 2089 of SEQ ID NO: 1243826
gguugugucccuuaaucuu

SEQ ID NO: 1444407 - RNA, 19 nt, Artificial Sequence
  Description of Artificial Sequence: Synthetic oligonucleotide
  Antisense strand to SEQ ID NO: 1444406
aagauuaagggacacaacc

SEQ ID NO: 1444408 - RNA, 19 nt, Artificial Sequence
  Description of Artificial Sequence: Synthetic oligonucleotide
  Sense strand starting at position 2150 of SEQ ID NO: 1243826
cucuucuucuggccucaga

SEQ ID NO: 1444409 - RNA, 19 nt, Artificial Sequence
  Description of Artificial Sequence: Synthetic oligonucleotide
  Antisense strand to SEQ ID NO: 1444408
ucugaggccagaagaagag

SEQ ID NO: 1444410 - RNA, 19 nt, Artificial Sequence
  Description of Artificial Sequence: Synthetic oligonucleotide
  Sense strand starting at position 2166 of SEQ ID NO: 1243826
agaaguuagcgcuaugaac

SEQ ID NO: 1444411 - RNA, 19 nt, Artificial Sequence
  Description of Artificial Sequence: Synthetic oligonucleotide
  Antisense strand to SEQ ID NO: 1444410
guucauagcgcuaacuucu

SEQ ID NO: 1444412 - RNA, 19 nt, Artificial Sequence
  Description of Artificial Sequence: Synthetic oligonucleotide
  Sense strand starting at position 2420 of SEQ ID NO: 1243826
gugggacuuuguggaggau

SEQ ID NO: 1444413 - RNA, 19 nt, Artificial Sequence
  Description of Artificial Sequence: Synthetic oligonucleotide
  Antisense strand to SEQ ID NO: 1444412
auccuccacaaagucccac

SEQ ID NO: 1444414 - RNA, 19 nt, Artificial Sequence
  Description of Artificial Sequence: Synthetic oligonucleotide
  Sense strand starting at position 2422 of SEQ ID NO: 1243826
gggacuuuguggaggaugu

SEQ ID NO: 1444415 - RNA, 19 nt, Artificial Sequence
  Description of Artificial Sequence: Synthetic oligonucleotide
  Antisense strand to SEQ ID NO: 1444414
acauccuccacaaaguccc

SEQ ID NO: 1444416 - RNA, 19 nt, Artificial Sequence
  Description of Artificial Sequence: Synthetic oligonucleotide
  Sense strand starting at position 2484 of SEQ ID NO: 1243826
gguguuuggugacugagag

SEQ ID NO: 1444417 - RNA, 19 nt, Artificial Sequence
  Description of Artificial Sequence: Synthetic oligonucleotide
  Antisense strand to SEQ ID NO: 1444416
cucucagucaccaaacacc

SEQ ID NO: 1444418 - RNA, 19 nt, Artificial Sequence
  Description of Artificial Sequence: Synthetic oligonucleotide
  Sense strand starting at position 2499 of SEQ ID NO: 1243826
agaggacaguuugucauga

SEQ ID NO: 1444419 - RNA, 19 nt, Artificial Sequence
  Description of Artificial Sequence: Synthetic oligonucleotide
  Antisense strand to SEQ ID NO: 1444418
ucaugacaaacuguccucu

SEQ ID NO: 1444420 - RNA, 19 nt, Artificial Sequence
  Description of Artificial Sequence: Synthetic oligonucleotide
  Sense strand starting at position 2639 of SEQ ID NO: 1243826
gcugguucuccugacguga

SEQ ID NO: 1444421 - RNA, 19 nt, Artificial Sequence
  Description of Artificial Sequence: Synthetic oligonucleotide
  Antisense strand to SEQ ID NO: 1444420
ucacgucaggagaaccagc

SEQ ID NO: 1444422 - RNA, 19 nt, Artificial Sequence
  Description of Artificial Sequence: Synthetic oligonucleotide
  Sense strand starting at position 2696 of SEQ ID NO: 1243826
gcuagucagacacaggauu

SEQ ID NO: 1444423 - RNA, 19 nt, Artificial Sequence
  Description of Artificial Sequence: Synthetic oligonucleotide
  Antisense strand to SEQ ID NO: 1444422
aauccugugucugacuagc

SEQ ID NO: 1444424 - RNA, 19 nt, Artificial Sequence
  Description of Artificial Sequence: Synthetic oligonucleotide
  Sense strand starting at position 2710 of SEQ ID NO: 1243826
ggauuuaccuccugucugu

SEQ ID NO: 1444425 - RNA, 19 nt, Artificial Sequence
  Description of Artificial Sequence: Synthetic oligonucleotide
  Antisense strand to SEQ ID NO: 1444424
acagacaggagguaaaucc

SEQ ID NO: 1444426 - RNA, 19 nt, Artificial Sequence
  Description of Artificial Sequence: Synthetic oligonucleotide
  Sense strand starting at position 3161 of SEQ ID NO: 1243826
cagaaucagcaaugugauc

SEQ ID NO: 1444427 - RNA, 19 nt, Artificial Sequence
  Description of Artificial Sequence: Synthetic oligonucleotide
  Antisense strand to SEQ ID NO: 1444426
gaucacauugcugauucug

SEQ ID NO: 1444428 - RNA, 19 nt, Artificial Sequence
  Description of Artificial Sequence: Synthetic oligonucleotide
  Sense strand starting at position 3166 of SEQ ID NO: 1243826
ucagcaaugugaucccuga

SEQ ID NO: 1444429 - RNA, 19 nt, Artificial Sequence
  Description of Artificial Sequence: Synthetic oligonucleotide
  Antisense strand to SEQ ID NO: 1444428
ucagggaucacauugcuga

SEQ ID NO: 1444430 - RNA, 19 nt, Artificial Sequence
  Description of Artificial Sequence: Synthetic oligonucleotide
  Sense strand starting at position 3509 of SEQ ID NO: 1243826
agucuuucuguuggcgagu

SEQ ID NO: 1444431 - RNA, 19 nt, Artificial Sequence
  Description of Artificial Sequence: Synthetic oligonucleotide
  Antisense strand to SEQ ID NO: 1444430
acucgccaacagaaagacu

SEQ ID NO: 1444432 - RNA, 19 nt, Artificial Sequence
  Description of Artificial Sequence: Synthetic oligonucleotide
  Sense strand starting at position 3512 of SEQ ID NO: 1243826
cuuucuguuggcgagucaa

SEQ ID NO: 1444433 - RNA, 19 nt, Artificial Sequence
  Description of Artificial Sequence: Synthetic oligonucleotide
  Antisense strand to SEQ ID NO: 1444432
uugacucgccaacagaaag

SEQ ID NO: 1444434 - RNA, 19 nt, Artificial Sequence
  Description of Artificial Sequence: Synthetic oligonucleotide
  Sense strand starting at position 3524 of SEQ ID NO: 1243826
gagucaaugucugcuccca

SEQ ID NO: 1444435 - RNA, 19 nt, Artificial Sequence
  Description of Artificial Sequence: Synthetic oligonucleotide
  Antisense strand to SEQ ID NO: 1444434
ugggagcagacauugacuc

SEQ ID NO: 1444436 - RNA, 19 nt, Artificial Sequence
  Description of Artificial Sequence: Synthetic oligonucleotide
  Sense strand starting at position 3591 of SEQ ID NO: 1243826
acagcugugcccguuauca

SEQ ID NO: 1444437 - RNA, 19 nt, Artificial Sequence
  Description of Artificial Sequence: Synthetic oligonucleotide
  Antisense strand to SEQ ID NO: 1444436
ugauaacgggcacagcugu

SEQ ID NO: 1444438 - RNA, 19 nt, Artificial Sequence
  Description of Artificial Sequence: Synthetic oligonucleotide
  Sense strand starting at position 3593 of SEQ ID NO: 1243826
agcugugcccguuaucauu

SEQ ID NO: 1444439 - RNA, 19 nt, Artificial Sequence
  Description of Artificial Sequence: Synthetic oligonucleotide
  Antisense strand to SEQ ID NO: 1444438
aaugauaacgggcacagcu

SEQ ID NO: 1444440 - RNA, 19 nt, Artificial Sequence
  Description of Artificial Sequence: Synthetic oligonucleotide
  Sense strand starting at position 3622 of SEQ ID NO: 1243826
ccaagugcaguuuaacaaa

SEQ ID NO: 1444441 - RNA, 19 nt, Artificial Sequence
  Description of Artificial Sequence: Synthetic oligonucleotide
  Antisense strand to SEQ ID NO: 1444440
uuuguuaaacugcacuugg

SEQ ID NO: 1444442 - RNA, 19 nt, Artificial Sequence
  Description of Artificial Sequence: Synthetic oligonucleotide
  Sense strand starting at position 3704 of SEQ ID NO: 1243826
aggacuuagucauccaaag

SEQ ID NO: 1444443 - RNA, 19 nt, Artificial Sequence
  Description of Artificial Sequence: Synthetic oligonucleotide
  Antisense strand to SEQ ID NO: 1444442
cuuuggaugacuaaguccu

SEQ ID NO: 1444444 - RNA, 19 nt, Artificial Sequence
  Description of Artificial Sequence: Synthetic oligonucleotide
  Sense strand starting at position 32 of SEQ ID NO: 1243827
guucuuaugucaucagauc

SEQ ID NO: 1444445 - RNA, 19 nt, Artificial Sequence
  Description of Artificial Sequence: Synthetic oligonucleotide
  Antisense strand to SEQ ID NO: 1444444
gaucugaugacauaagaac

SEQ ID NO: 1444446 - RNA, 19 nt, Artificial Sequence
  Description of Artificial Sequence: Synthetic oligonucleotide
  Sense strand starting at position 33 of SEQ ID NO: 1243827
uucuuaugucaucagaucu

SEQ ID NO: 1444447 - RNA, 19 nt, Artificial Sequence
  Description of Artificial Sequence: Synthetic oligonucleotide
  Antisense strand to SEQ ID NO: 1444446
agaucugaugacauaagaa

SEQ ID NO: 1444448 - RNA, 19 nt, Artificial Sequence
  Description of Artificial Sequence: Synthetic oligonucleotide
  Sense strand starting at position 111 of SEQ ID NO: 1243827
aacugcucagaggguuaaa

SEQ ID NO: 1444449 - RNA, 19 nt, Artificial Sequence
  Description of Artificial Sequence: Synthetic oligonucleotide
  Antisense strand to SEQ ID NO: 1444448
uuuaacccucugagcaguu

SEQ ID NO: 1444450 - RNA, 19 nt, Artificial Sequence
  Description of Artificial Sequence: Synthetic oligonucleotide
  Sense strand starting at position 142 of SEQ ID NO: 1243827
uuuggaaguguuuauaggu

SEQ ID NO: 1444451 - RNA, 19 nt, Artificial Sequence
  Description of Artificial Sequence: Synthetic oligonucleotide
  Antisense strand to SEQ ID NO: 1444450
accuauaaacacuuccaaa

SEQ ID NO: 1444452 - RNA, 19 nt, Artificial Sequence
  Description of Artificial Sequence: Synthetic oligonucleotide
  Sense strand starting at position 558 of SEQ ID NO: 1243827
gagcaaacauugguugagu

SEQ ID NO: 1444453 - RNA, 19 nt, Artificial Sequence
  Description of Artificial Sequence: Synthetic oligonucleotide
  Antisense strand to SEQ ID NO: 1444452
acucaaccaauguuugcuc

SEQ ID NO: 1444454 - RNA, 19 nt, Artificial Sequence
  Description of Artificial Sequence: Synthetic oligonucleotide
  Sense strand starting at position 642 of SEQ ID NO: 1243827
cgaguuuggguccauguca

SEQ ID NO: 1444455 - RNA, 19 nt, Artificial Sequence
  Description of Artificial Sequence: Synthetic oligonucleotide
  Antisense strand to SEQ ID NO: 1444454
ugacauggacccaaacucg

SEQ ID NO: 1444456 - RNA, 19 nt, Artificial Sequence
  Description of Artificial Sequence: Synthetic oligonucleotide
  Sense strand starting at position 721 of SEQ ID NO: 1243827
uugucauuacauugggcaa

SEQ ID NO: 1444457 - RNA, 19 nt, Artificial Sequence
  Description of Artificial Sequence: Synthetic oligonucleotide
  Antisense strand to SEQ ID NO: 1444456
uugcccaauguaaugacaa

SEQ ID NO: 1444458 - RNA, 19 nt, Artificial Sequence
  Description of Artificial Sequence: Synthetic oligonucleotide
  Sense strand starting at position 789 of SEQ ID NO: 1243827
ugaagaauguccucuaauu

SEQ ID NO: 1444459 - RNA, 19 nt, Artificial Sequence
  Description of Artificial Sequence: Synthetic oligonucleotide
  Antisense strand to SEQ ID NO: 1444458
aauuagaggacauucuuca

SEQ ID NO: 1444460 - RNA, 19 nt, Artificial Sequence
  Description of Artificial Sequence: Synthetic oligonucleotide
  Sense strand starting at position 877 of SEQ ID NO: 1243827
auaagaguuucucuucuga

SEQ ID NO: 1444461 - RNA, 19 nt, Artificial Sequence
  Description of Artificial Sequence: Synthetic oligonucleotide
  Antisense strand to SEQ ID NO: 1444460
ucagaagagaaacucuuau

SEQ ID NO: 1444462 - RNA, 19 nt, Artificial Sequence
  Description of Artificial Sequence: Synthetic oligonucleotide
  Sense strand starting at position 879 of SEQ ID NO: 1243827
aagaguuucucuucugaag

SEQ ID NO: 1444463 - RNA, 19 nt, Artificial Sequence
  Description of Artificial Sequence: Synthetic oligonucleotide
  Antisense strand to SEQ ID NO: 1444462
cuucagaagagaaacucuu

SEQ ID NO: 1444464 - RNA, 19 nt, Artificial Sequence
  Description of Artificial Sequence: Synthetic oligonucleotide
  Sense strand starting at position 939 of SEQ ID NO: 1243827
caccuuguuccgggaagga

SEQ ID NO: 1444465 - RNA, 19 nt, Artificial Sequence
  Description of Artificial Sequence: Synthetic oligonucleotide
  Antisense strand to SEQ ID NO: 1444464
uccuucccggaacaaggug

SEQ ID NO: 1444466 - RNA, 19 nt, Artificial Sequence
  Description of Artificial Sequence: Synthetic oligonucleotide
  Sense strand starting at position 966 of SEQ ID NO: 1243827
agauguugaggauggcauu

SEQ ID NO: 1444467 - RNA, 19 nt, Artificial Sequence
  Description of Artificial Sequence: Synthetic oligonucleotide
  Antisense strand to SEQ ID NO: 1444466
aaugccauccucaacaucu

SEQ ID NO: 1444468 - RNA, 19 nt, Artificial Sequence
  Description of Artificial Sequence: Synthetic oligonucleotide
  Sense strand starting at position 1366 of SEQ ID NO: 1243827
ggucuuuaauguccucaca

SEQ ID NO: 1444469 - RNA, 19 nt, Artificial Sequence
  Description of Artificial Sequence: Synthetic oligonucleotide
  Antisense strand to SEQ ID NO: 1444468
ugugaggacauuaaagacc

SEQ ID NO: 1444470 - RNA, 19 nt, Artificial Sequence
  Description of Artificial Sequence: Synthetic oligonucleotide
  Sense strand starting at position 1447 of SEQ ID NO: 1243827
aaugaagccucagugacau

SEQ ID NO: 1444471 - RNA, 19 nt, Artificial Sequence
  Description of Artificial Sequence: Synthetic oligonucleotide
  Antisense strand to SEQ ID NO: 1444470
augucacugaggcuucauu

SEQ ID NO: 1444472 - RNA, 19 nt, Artificial Sequence
  Description of Artificial Sequence: Synthetic oligonucleotide
  Sense strand starting at position 1518 of SEQ ID NO: 1243827
ccacaugaaugagucucua

SEQ ID NO: 1444473 - RNA, 19 nt, Artificial Sequence
  Description of Artificial Sequence: Synthetic oligonucleotide
  Antisense strand to SEQ ID NO: 1444472
uagagacucauucaugugg

SEQ ID NO: 1444474 - RNA, 19 nt, Artificial Sequence
  Description of Artificial Sequence: Synthetic oligonucleotide
  Sense strand starting at position 1522 of SEQ ID NO: 1243827
augaaugagucucuacaac

SEQ ID NO: 1444475 - RNA, 19 nt, Artificial Sequence
  Description of Artificial Sequence: Synthetic oligonucleotide
  Antisense strand to SEQ ID NO: 1444474
guuguagagacucauucau

SEQ ID NO: 1444476 - RNA, 19 nt, Artificial Sequence
  Description of Artificial Sequence: Synthetic oligonucleotide
  Sense strand starting at position 1554 of SEQ ID NO: 1243827
uuguauuguaguuaguuga

SEQ ID NO: 1444477 - RNA, 19 nt, Artificial Sequence
  Description of Artificial Sequence: Synthetic oligonucleotide
  Antisense strand to SEQ ID NO: 1444476
ucaacuaacuacaauacaa

SEQ ID NO: 1444478 - RNA, 19 nt, Artificial Sequence
  Description of Artificial Sequence: Synthetic oligonucleotide
  Sense strand starting at position 1651 of SEQ ID NO: 1243827
guaggauccguggaugaau

SEQ ID NO: 1444479 - RNA, 19 nt, Artificial Sequence
  Description of Artificial Sequence: Synthetic oligonucleotide
  Antisense strand to SEQ ID NO: 1444478
auucauccacggauccuac

SEQ ID NO: 1444480 - RNA, 19 nt, Artificial Sequence
  Description of Artificial Sequence: Synthetic oligonucleotide
  Sense strand starting at position 1683 of SEQ ID NO: 1243827
gaaggaugcacaggugaau

SEQ ID NO: 1444481 - RNA, 19 nt, Artificial Sequence
  Description of Artificial Sequence: Synthetic oligonucleotide
  Antisense strand to SEQ ID NO: 1444480
auucaccugugcauccuuc

SEQ ID NO: 1444482 - RNA, 19 nt, Artificial Sequence
  Description of Artificial Sequence: Synthetic oligonucleotide
  Sense strand starting at position 1694 of SEQ ID NO: 1243827
aggugaaugaacggaugua

SEQ ID NO: 1444483 - RNA, 19 nt, Artificial Sequence
  Description of Artificial Sequence: Synthetic oligonucleotide
  Antisense strand to SEQ ID NO: 1444482
uacauccguucauucaccu

SEQ ID NO: 1444484 - RNA, 19 nt, Artificial Sequence
  Description of Artificial Sequence: Synthetic oligonucleotide
  Sense strand starting at position 1695 of SEQ ID NO: 1243827
ggugaaugaacggauguau

SEQ ID NO: 1444485 - RNA, 19 nt, Artificial Sequence
  Description of Artificial Sequence: Synthetic oligonucleotide
  Antisense strand to SEQ ID NO: 1444484
auacauccguucauucacc

SEQ ID NO: 1444486 - RNA, 19 nt, Artificial Sequence
  Description of Artificial Sequence: Synthetic oligonucleotide
  Sense strand starting at position 1949 of SEQ ID NO: 1243827
uuucuacuuguccaaguuu

SEQ ID NO: 1444487 - RNA, 19 nt, Artificial Sequence
  Description of Artificial Sequence: Synthetic oligonucleotide
  Antisense strand to SEQ ID NO: 1444486
aaacuuggacaaguagaaa

SEQ ID NO: 1444488 - RNA, 19 nt, Artificial Sequence
  Description of Artificial Sequence: Synthetic oligonucleotide
  Sense strand starting at position 2460 of SEQ ID NO: 1243827
ggaagcuccaccugguuau

SEQ ID NO: 1444489 - RNA, 19 nt, Artificial Sequence
  Description of Artificial Sequence: Synthetic oligonucleotide
  Antisense strand to SEQ ID NO: 1444488
auaaccagguggagcuucc

SEQ ID NO: 1444490 - RNA, 19 nt, Artificial Sequence
  Description of Artificial Sequence: Synthetic oligonucleotide
  Sense strand starting at position 2461 of SEQ ID NO: 1243827
gaagcuccaccugguuaua

SEQ ID NO: 1444491 - RNA, 19 nt, Artificial Sequence
  Description of Artificial Sequence: Synthetic oligonucleotide
  Antisense strand to SEQ ID NO: 1444490
uauaaccagguggagcuuc

SEQ ID NO: 1444492 - RNA, 19 nt, Artificial Sequence
  Description of Artificial Sequence: Synthetic oligonucleotide
  Sense strand starting at position 2471 of SEQ ID NO: 1243827
cugguuauacacuguuaac

SEQ ID NO: 1444493 - RNA, 19 nt, Artificial Sequence
  Description of Artificial Sequence: Synthetic oligonucleotide
  Antisense strand to SEQ ID NO: 1444492
guuaacaguguauaaccag

SEQ ID NO: 1444494 - RNA, 19 nt, Artificial Sequence
  Description of Artificial Sequence: Synthetic oligonucleotide
  Sense strand starting at position 2505 of SEQ ID NO: 1243827
ggucauggucaacagcaua

SEQ ID NO: 1444495 - RNA, 19 nt, Artificial Sequence
  Description of Artificial Sequence: Synthetic oligonucleotide
  Antisense strand to SEQ ID NO: 1444494
uaugcuguugaccaugacc

SEQ ID NO: 1444496 - RNA, 19 nt, Artificial Sequence
  Description of Artificial Sequence: Synthetic oligonucleotide
  Sense strand starting at position 2659 of SEQ ID NO: 1243827
aggguugccacaggaaaua

SEQ ID NO: 1444497 - RNA, 19 nt, Artificial Sequence
  Description of Artificial Sequence: Synthetic oligonucleotide
  Antisense strand to SEQ ID NO: 1444496
uauuuccuguggcaacccu

SEQ ID NO: 1444498 - RNA, 19 nt, Artificial Sequence
  Description of Artificial Sequence: Synthetic oligonucleotide
  Sense strand starting at position 2690 of SEQ ID NO: 1243827
uaaguaaagugcuugauac

SEQ ID NO: 1444499 - RNA, 19 nt, Artificial Sequence
  Description of Artificial Sequence: Synthetic oligonucleotide
  Antisense strand to SEQ ID NO: 1444498
guaucaagcacuuuacuua

SEQ ID NO: 1444500 - RNA, 19 nt, Artificial Sequence
  Description of Artificial Sequence: Synthetic oligonucleotide
  Sense strand starting at position 2691 of SEQ ID NO: 1243827
aaguaaagugcuugauaca

SEQ ID NO: 1444501 - RNA, 19 nt, Artificial Sequence
  Description of Artificial Sequence: Synthetic oligonucleotide
  Antisense strand to SEQ ID NO: 1444500
uguaucaagcacuuuacuu

SEQ ID NO: 1444502 - RNA, 19 nt, Artificial Sequence
  Description of Artificial Sequence: Synthetic oligonucleotide
  Sense strand starting at position 2692 of SEQ ID NO: 1243827
aguaaagugcuugauacag

SEQ ID NO: 1444503 - RNA, 19 nt, Artificial Sequence
  Description of Artificial Sequence: Synthetic oligonucleotide
  Antisense strand to SEQ ID NO: 1444502
cuguaucaagcacuuuacu

SEQ ID NO: 1444504 - RNA, 19 nt, Artificial Sequence
  Description of Artificial Sequence: Synthetic oligonucleotide
  Sense strand starting at position 2704 of SEQ ID NO: 1243827
gauacagugccuggaacau

SEQ ID NO: 1444505 - RNA, 19 nt, Artificial Sequence
  Description of Artificial Sequence: Synthetic oligonucleotide
  Antisense strand to SEQ ID NO: 1444504
auguuccaggcacuguauc

SEQ ID NO: 1444506 - RNA, 19 nt, Artificial Sequence
  Description of Artificial Sequence: Synthetic oligonucleotide
  Sense strand starting at position 2721 of SEQ ID NO: 1243827
auaguaacugcccaguuaa

SEQ ID NO: 1444507 - RNA, 19 nt, Artificial Sequence
  Description of Artificial Sequence: Synthetic oligonucleotide
  Antisense strand to SEQ ID NO: 1444506
uuaacugggcaguuacuau

SEQ ID NO: 1444508 - RNA, 19 nt, Artificial Sequence
  Description of Artificial Sequence: Synthetic oligonucleotide
  Sense strand starting at position 2749 of SEQ ID NO: 1243827
ccuuuagaauaguccugga

SEQ ID NO: 1444509 - RNA, 19 nt, Artificial Sequence
  Description of Artificial Sequence: Synthetic oligonucleotide
  Antisense strand to SEQ ID NO: 1444508
uccaggacuauucuaaagg

SEQ ID NO: 1444510 - RNA, 19 nt, Artificial Sequence
  Description of Artificial Sequence: Synthetic oligonucleotide
  Sense strand starting at position 2753 of SEQ ID NO: 1243827
uagaauaguccuggaccau

SEQ ID NO: 1444511 - RNA, 19 nt, Artificial Sequence
  Description of Artificial Sequence: Synthetic oligonucleotide
  Antisense strand to SEQ ID NO: 1444510
augguccaggacuauucua

SEQ ID NO: 1444512 - RNA, 19 nt, Artificial Sequence
  Description of Artificial Sequence: Synthetic oligonucleotide
  Sense strand starting at position 2772 of SEQ ID NO: 1243827
ugaaauagcuucucaucug

SEQ ID NO: 1444513 - RNA, 19 nt, Artificial Sequence
  Description of Artificial Sequence: Synthetic oligonucleotide
  Antisense strand to SEQ ID NO: 1444512
cagaugagaagcuauuuca

SEQ ID NO: 1444514 - RNA, 19 nt, Artificial Sequence
  Description of Artificial Sequence: Synthetic oligonucleotide
  Sense strand starting at position 2953 of SEQ ID NO: 1243827
ucuacuggaucaucugaua

SEQ ID NO: 1444515 - RNA, 19 nt, Artificial Sequence
  Description of Artificial Sequence: Synthetic oligonucleotide
  Antisense strand to SEQ ID NO: 1444514
uaucagaugauccaguaga

SEQ ID NO: 1444516 - RNA, 19 nt, Artificial Sequence
  Description of Artificial Sequence: Synthetic oligonucleotide
  Sense strand starting at position 2956 of SEQ ID NO: 1243827
acuggaucaucugauauuu

SEQ ID NO: 1444517 - RNA, 19 nt, Artificial Sequence
  Description of Artificial Sequence: Synthetic oligonucleotide
  Antisense strand to SEQ ID NO: 1444516
aaauaucagaugauccagu

SEQ ID NO: 1444518 - RNA, 19 nt, Artificial Sequence
  Description of Artificial Sequence: Synthetic oligonucleotide
  Sense strand starting at position 3033 of SEQ ID NO: 1243827
aguauuauauagccaggca

SEQ ID NO: 1444519 - RNA, 19 nt, Artificial Sequence
  Description of Artificial Sequence: Synthetic oligonucleotide
  Antisense strand to SEQ ID NO: 1444518
ugccuggcuauauaauacu

SEQ ID NO: 1444520 - RNA, 19 nt, Artificial Sequence
  Description of Artificial Sequence: Synthetic oligonucleotide
  Sense strand starting at position 3307 of SEQ ID NO: 1243827
ccaugugugacaugagcca

SEQ ID NO: 1444521 - RNA, 19 nt, Artificial Sequence
  Description of Artificial Sequence: Synthetic oligonucleotide
  Antisense strand to SEQ ID NO: 1444520
uggcucaugucacacaugg

SEQ ID NO: 1444522 - RNA, 19 nt, Artificial Sequence
  Description of Artificial Sequence: Synthetic oligonucleotide
  Sense strand starting at position 3761 of SEQ ID NO: 1243827
cuuccuagcuuucugaaga

SEQ ID NO: 1444523 - RNA, 19 nt, Artificial Sequence
  Description of Artificial Sequence: Synthetic oligonucleotide
  Antisense strand to SEQ ID NO: 1444522
ucuucagaaagcuaggaag

SEQ ID NO: 1444524 - RNA, 19 nt, Artificial Sequence
  Description of Artificial Sequence: Synthetic oligonucleotide
  Sense strand starting at position 448 of SEQ ID NO: 1243828
cuguaaauggcucacgaug

SEQ ID NO: 1444525 - RNA, 19 nt, Artificial Sequence
  Description of Artificial Sequence: Synthetic oligonucleotide
  Antisense strand to SEQ ID NO: 1444524
caucgugagccauuuacag

SEQ ID NO: 1444526 - RNA, 19 nt, Artificial Sequence
  Description of Artificial Sequence: Synthetic oligonucleotide
  Sense strand starting at position 453 of SEQ ID NO: 1243828
aauggcucacgauguaauu

SEQ ID NO: 1444527 - RNA, 19 nt, Artificial Sequence
  Description of Artificial Sequence: Synthetic oligonucleotide
  Antisense strand to SEQ ID NO: 1444526
aauuacaucgugagccauu

SEQ ID NO: 1444528 - RNA, 19 nt, Artificial Sequence
  Description of Artificial Sequence: Synthetic oligonucleotide
  Sense strand starting at position 496 of SEQ ID NO: 1243828
ggguuucucuaaccacaga

SEQ ID NO: 1444529 - RNA, 19 nt, Artificial Sequence
  Description of Artificial Sequence: Synthetic oligonucleotide
  Antisense strand to SEQ ID NO: 1444528
ucugugguuagagaaaccc

SEQ ID NO: 1444530 - RNA, 19 nt, Artificial Sequence
  Description of Artificial Sequence: Synthetic oligonucleotide
  Sense strand starting at position 513 of SEQ ID NO: 1243828
gaauaugauggcuggaacu

SEQ ID NO: 1444531 - RNA, 19 nt, Artificial Sequence
  Description of Artificial Sequence: Synthetic oligonucleotide
  Antisense strand to SEQ ID NO: 1444530
aguuccagccaucauauuc

SEQ ID NO: 1444532 - RNA, 19 nt, Artificial Sequence
  Description of Artificial Sequence: Synthetic oligonucleotide
  Sense strand starting at position 543 of SEQ ID NO: 1243828
uucuauauguugucaagag

SEQ ID NO: 1444533 - RNA, 19 nt, Artificial Sequence
  Description of Artificial Sequence: Synthetic oligonucleotide
  Antisense strand to SEQ ID NO: 1444532
cucuugacaacauauagaa

SEQ ID NO: 1444534 - RNA, 19 nt, Artificial Sequence
  Description of Artificial Sequence: Synthetic oligonucleotide
  Sense strand starting at position 552 of SEQ ID NO: 1243828
uugucaagaguugguauga

SEQ ID NO: 1444535 - RNA, 19 nt, Artificial Sequence
  Description of Artificial Sequence: Synthetic oligonucleotide
  Antisense strand to SEQ ID NO: 1444534
ucauaccaacucuugacaa

SEQ ID NO: 1444536 - RNA, 19 nt, Artificial Sequence
  Description of Artificial Sequence: Synthetic oligonucleotide
  Sense strand starting at position 563 of SEQ ID NO: 1243828
ugguaugaggaacgauaga

SEQ ID NO: 1444537 - RNA, 19 nt, Artificial Sequence
  Description of Artificial Sequence: Synthetic oligonucleotide
  Antisense strand to SEQ ID NO: 1444536
ucuaucguuccucauacca

SEQ ID NO: 1444538 - RNA, 19 nt, Artificial Sequence
  Description of Artificial Sequence: Synthetic oligonucleotide
  Sense strand starting at position 729 of SEQ ID NO: 1243828
gccagauggucagucccua

SEQ ID NO: 1444539 - RNA, 19 nt, Artificial Sequence
  Description of Artificial Sequence: Synthetic oligonucleotide
  Antisense strand to SEQ ID NO: 1444538
uagggacugaccaucuggc

SEQ ID NO: 1444540 - RNA, 19 nt, Artificial Sequence
  Description of Artificial Sequence: Synthetic oligonucleotide
  Sense strand starting at position 824 of SEQ ID NO: 1243828
cuagguguccaccaagguu

SEQ ID NO: 1444541 - RNA, 19 nt, Artificial Sequence
  Description of Artificial Sequence: Synthetic oligonucleotide
  Antisense strand to SEQ ID NO: 1444540
aaccuugguggacaccuag

SEQ ID NO: 1444542 - RNA, 19 nt, Artificial Sequence
  Description of Artificial Sequence: Synthetic oligonucleotide
  Sense strand starting at position 836 of SEQ ID NO: 1243828
caagguuugccauggagaa

SEQ ID NO: 1444543 - RNA, 19 nt, Artificial Sequence
  Description of Artificial Sequence: Synthetic oligonucleotide
  Antisense strand to SEQ ID NO: 1444542
uucuccauggcaaaccuug

SEQ ID NO: 1444544 - RNA, 19 nt, Artificial Sequence
  Description of Artificial Sequence: Synthetic oligonucleotide
  Sense strand starting at position 878 of SEQ ID NO: 1243828
ccaccuggguucuugagaa

SEQ ID NO: 1444545 - RNA, 19 nt, Artificial Sequence
  Description of Artificial Sequence: Synthetic oligonucleotide
  Antisense strand to SEQ ID NO: 1444544
uucucaagaacccaggugg

SEQ ID NO: 1444546 - RNA, 19 nt, Artificial Sequence
  Description of Artificial Sequence: Synthetic oligonucleotide
  Sense strand starting at position 1208 of SEQ ID NO: 1243828
uuucucuagucaccagaga

SEQ ID NO: 1444547 - RNA, 19 nt, Artificial Sequence
  Description of Artificial Sequence: Synthetic oligonucleotide
  Antisense strand to SEQ ID NO: 1444546
ucucuggugacuagagaaa

SEQ ID NO: 1444548 - RNA, 19 nt, Artificial Sequence
  Description of Artificial Sequence: Synthetic oligonucleotide
  Sense strand starting at position 1261 of SEQ ID NO: 1243828
ugccuuauuguguccugca

SEQ ID NO: 1444549 - RNA, 19 nt, Artificial Sequence
  Description of Artificial Sequence: Synthetic oligonucleotide
  Antisense strand to SEQ ID NO: 1444548
ugcaggacacaauaaggca

SEQ ID NO: 1444550 - RNA, 19 nt, Artificial Sequence
  Description of Artificial Sequence: Synthetic oligonucleotide
  Sense strand starting at position 1296 of SEQ ID NO: 1243828
guguaugucucacccacua

SEQ ID NO: 1444551 - RNA, 19 nt, Artificial Sequence
  Description of Artificial Sequence: Synthetic oligonucleotide
  Antisense strand to SEQ ID NO: 1444550
uagugggugagacauacac

SEQ ID NO: 1444552 - RNA, 19 nt, Artificial Sequence
  Description of Artificial Sequence: Synthetic oligonucleotide
  Sense strand starting at position 1394 of SEQ ID NO: 1243828
cgaucauaacucugcagaa

SEQ ID NO: 1444553 - RNA, 19 nt, Artificial Sequence
  Description of Artificial Sequence: Synthetic oligonucleotide
  Antisense strand to SEQ ID NO: 1444552
uucugcagaguuaugaucg

SEQ ID NO: 1444554 - RNA, 19 nt, Artificial Sequence
  Description of Artificial Sequence: Synthetic oligonucleotide
  Sense strand starting at position 1629 of SEQ ID NO: 1243828
ccuggagucuucuuuaaug

SEQ ID NO: 1444555 - RNA, 19 nt, Artificial Sequence
  Description of Artificial Sequence: Synthetic oligonucleotide
  Antisense strand to SEQ ID NO: 1444554
cauuaaagaagacuccagg

SEQ ID NO: 1444556 - RNA, 19 nt, Artificial Sequence
  Description of Artificial Sequence: Synthetic oligonucleotide
  Sense strand starting at position 1935 of SEQ ID NO: 1243828
ccagaugcacucuggaagu

SEQ ID NO: 1444557 - RNA, 19 nt, Artificial Sequence
  Description of Artificial Sequence: Synthetic oligonucleotide
  Antisense strand to SEQ ID NO: 1444556
acuuccagagugcaucugg

SEQ ID NO: 1444558 - RNA, 19 nt, Artificial Sequence
  Description of Artificial Sequence: Synthetic oligonucleotide
  Sense strand starting at position 2105 of SEQ ID NO: 1243828
aagcaucgucacuauguaa

SEQ ID NO: 1444559 - RNA, 19 nt, Artificial Sequence
  Description of Artificial Sequence: Synthetic oligonucleotide
  Antisense strand to SEQ ID NO: 1444558
uuacauagugacgaugcuu

SEQ ID NO: 1444560 - RNA, 19 nt, Artificial Sequence
  Description of Artificial Sequence: Synthetic oligonucleotide
  Sense strand starting at position 2165 of SEQ ID NO: 1243828
gggagauacgucugcagaa

SEQ ID NO: 1444561 - RNA, 19 nt, Artificial Sequence
  Description of Artificial Sequence: Synthetic oligonucleotide
  Antisense strand to SEQ ID NO: 1444560
uucugcagacguaucuccc

SEQ ID NO: 1444562 - RNA, 19 nt, Artificial Sequence
  Description of Artificial Sequence: Synthetic oligonucleotide
  Sense strand starting at position 2166 of SEQ ID NO: 1243828
ggagauacgucugcagaag

SEQ ID NO: 1444563 - RNA, 19 nt, Artificial Sequence
  Description of Artificial Sequence: Synthetic oligonucleotide
  Antisense strand to SEQ ID NO: 1444562
cuucugcagacguaucucc

SEQ ID NO: 1444564 - RNA, 19 nt, Artificial Sequence
  Description of Artificial Sequence: Synthetic oligonucleotide
  Sense strand starting at position 2230 of SEQ ID NO: 1243828
gguauaacacucugggagu

SEQ ID NO: 1444565 - RNA, 19 nt, Artificial Sequence
  Description of Artificial Sequence: Synthetic oligonucleotide
  Antisense strand to SEQ ID NO: 1444564
acucccagaguguuauacc

SEQ ID NO: 1444566 - RNA, 19 nt, Artificial Sequence
  Description of Artificial Sequence: Synthetic oligonucleotide
  Sense strand starting at position 2256 of SEQ ID NO: 1243828
agagcuguucuauaccaca

SEQ ID NO: 1444567 - RNA, 19 nt, Artificial Sequence
  Description of Artificial Sequence: Synthetic oligonucleotide
  Antisense strand to SEQ ID NO: 1444566
ugugguauagaacagcucu

SEQ ID NO: 1444568 - RNA, 19 nt, Artificial Sequence
  Description of Artificial Sequence: Synthetic oligonucleotide
  Sense strand starting at position 2470 of SEQ ID NO: 1243828
ucuauuaacugggcucaua

SEQ ID NO: 1444569 - RNA, 19 nt, Artificial Sequence
  Description of Artificial Sequence: Synthetic oligonucleotide
  Antisense strand to SEQ ID NO: 1444568
uaugagcccaguuaauaga

SEQ ID NO: 1444570 - RNA, 19 nt, Artificial Sequence
  Description of Artificial Sequence: Synthetic oligonucleotide
  Sense strand starting at position 2495 of SEQ ID NO: 1243828
guuguuguuauaggaguua

SEQ ID NO: 1444571 - RNA, 19 nt, Artificial Sequence
  Description of Artificial Sequence: Synthetic oligonucleotide
  Antisense strand to SEQ ID NO: 1444570
uaacuccuauaacaacaac

SEQ ID NO: 1444572 - RNA, 19 nt, Artificial Sequence
  Description of Artificial Sequence: Synthetic oligonucleotide
  Sense strand starting at position 2583 of SEQ ID NO: 1243828
ccauaaauguuucuugucu

SEQ ID NO: 1444573 - RNA, 19 nt, Artificial Sequence
  Description of Artificial Sequence: Synthetic oligonucleotide
  Antisense strand to SEQ ID NO: 1444572
agacaagaaacauuuaugg

SEQ ID NO: 1444574 - RNA, 19 nt, Artificial Sequence
  Description of Artificial Sequence: Synthetic oligonucleotide
  Sense strand starting at position 2588 of SEQ ID NO: 1243828
aauguuucuugucuagaag

SEQ ID NO: 1444575 - RNA, 19 nt, Artificial Sequence
  Description of Artificial Sequence: Synthetic oligonucleotide
  Antisense strand to SEQ ID NO: 1444574
cuucuagacaagaaacauu

SEQ ID NO: 1444576 - RNA, 19 nt, Artificial Sequence
  Description of Artificial Sequence: Synthetic oligonucleotide
  Sense strand starting at position 2589 of SEQ ID NO: 1243828
auguuucuugucuagaaga

SEQ ID NO: 1444577 - RNA, 19 nt, Artificial Sequence
  Description of Artificial Sequence: Synthetic oligonucleotide
  Antisense strand to SEQ ID NO: 1444576
ucuucuagacaagaaacau

SEQ ID NO: 1444578 - RNA, 19 nt, Artificial Sequence
  Description of Artificial Sequence: Synthetic oligonucleotide
  Sense strand starting at position 2591 of SEQ ID NO: 1243828
guuucuugucuagaagaaa

SEQ ID NO: 1444579 - RNA, 19 nt, Artificial Sequence
  Description of Artificial Sequence: Synthetic oligonucleotide
  Antisense strand to SEQ ID NO: 1444578
uuucuucuagacaagaaac

SEQ ID NO: 1444580 - RNA, 19 nt, Artificial Sequence
  Description of Artificial Sequence: Synthetic oligonucleotide
  Sense strand starting at position 2748 of SEQ ID NO: 1243828
cacccauguguguagaaca

SEQ ID NO: 1444581 - RNA, 19 nt, Artificial Sequence
  Description of Artificial Sequence: Synthetic oligonucleotide
  Antisense strand to SEQ ID NO: 1444580
uguucuacacacaugggug

SEQ ID NO: 1444582 - RNA, 19 nt, Artificial Sequence
  Description of Artificial Sequence: Synthetic oligonucleotide
  Sense strand starting at position 3078 of SEQ ID NO: 1243828
gaccaaggacccuaguguu

SEQ ID NO: 1444583 - RNA, 19 nt, Artificial Sequence
  Description of Artificial Sequence: Synthetic oligonucleotide
  Antisense strand to SEQ ID NO: 1444582
aacacuaggguccuugguc

SEQ ID NO: 1444584 - RNA, 19 nt, Artificial Sequence
  Description of Artificial Sequence: Synthetic oligonucleotide
  Sense strand starting at position 3148 of SEQ ID NO: 1243828
guacgacacucaucggagu

SEQ ID NO: 1444585 - RNA, 19 nt, Artificial Sequence
  Description of Artificial Sequence: Synthetic oligonucleotide
  Antisense strand to SEQ ID NO: 1444584
acuccgaugagugucguac

SEQ ID NO: 1444586 - RNA, 19 nt, Artificial Sequence
  Description of Artificial Sequence: Synthetic oligonucleotide
  Sense strand starting at position 3154 of SEQ ID NO: 1243828
cacucaucggagugguaag

SEQ ID NO: 1444587 - RNA, 19 nt, Artificial Sequence
  Description of Artificial Sequence: Synthetic oligonucleotide
  Antisense strand to SEQ ID NO: 1444586
cuuaccacuccgaugagug

SEQ ID NO: 1444588 - RNA, 19 nt, Artificial Sequence
  Description of Artificial Sequence: Synthetic oligonucleotide
  Sense strand starting at position 3265 of SEQ ID NO: 1243828
gguacauacacuuaguguu

SEQ ID NO: 1444589 - RNA, 19 nt, Artificial Sequence
  Description of Artificial Sequence: Synthetic oligonucleotide
  Antisense strand to SEQ ID NO: 1444588
aacacuaaguguauguacc

SEQ ID NO: 1444590 - RNA, 19 nt, Artificial Sequence
  Description of Artificial Sequence: Synthetic oligonucleotide
  Sense strand starting at position 3311 of SEQ ID NO: 1243828
aggcuugcugcugagaaca

SEQ ID NO: 1444591 - RNA, 19 nt, Artificial Sequence
  Description of Artificial Sequence: Synthetic oligonucleotide
  Antisense strand to SEQ ID NO: 1444590
uguucucagcagcaagccu

SEQ ID NO: 1444592 - RNA, 19 nt, Artificial Sequence
  Description of Artificial Sequence: Synthetic oligonucleotide
  Sense strand starting at position 3396 of SEQ ID NO: 1243828
acgggaagaccucgccauu

SEQ ID NO: 1444593 - RNA, 19 nt, Artificial Sequence
  Description of Artificial Sequence: Synthetic oligonucleotide
  Antisense strand to SEQ ID NO: 1444592
aauggcgaggucuucccgu

SEQ ID NO: 1444594 - RNA, 19 nt, Artificial Sequence
  Description of Artificial Sequence: Synthetic oligonucleotide
  Sense strand starting at position 3444 of SEQ ID NO: 1243828
cuaacaauuucuggccaga

SEQ ID NO: 1444595 - RNA, 19 nt, Artificial Sequence
  Description of Artificial Sequence: Synthetic oligonucleotide
  Antisense strand to SEQ ID NO: 1444594
ucuggccagaaauuguuag

SEQ ID NO: 1444596 - RNA, 19 nt, Artificial Sequence
  Description of Artificial Sequence: Synthetic oligonucleotide
  Sense strand starting at position 3530 of SEQ ID NO: 1243828
ggcaaagaauccucaacua

SEQ ID NO: 1444597 - RNA, 19 nt, Artificial Sequence
  Description of Artificial Sequence: Synthetic oligonucleotide
  Antisense strand to SEQ ID NO: 1444596
uaguugaggauucuuugcc

SEQ ID NO: 1444598 - RNA, 19 nt, Artificial Sequence
  Description of Artificial Sequence: Synthetic oligonucleotide
  Sense strand starting at position 3590 of SEQ ID NO: 1243828
uuacacuuucuuuguguga

SEQ ID NO: 1444599 - RNA, 19 nt, Artificial Sequence
  Description of Artificial Sequence: Synthetic oligonucleotide
  Antisense strand to SEQ ID NO: 1444598
ucacacaaagaaaguguaa

SEQ ID NO: 1444600 - RNA, 19 nt, Artificial Sequence
  Description of Artificial Sequence: Synthetic oligonucleotide
  Sense strand starting at position 3631 of SEQ ID NO: 1243828
cuaggaaaguaauccuguu

SEQ ID NO: 1444601 - RNA, 19 nt, Artificial Sequence
  Description of Artificial Sequence: Synthetic oligonucleotide
  Antisense strand to SEQ ID NO: 1444600
aacaggauuacuuuccuag

SEQ ID NO: 1444602 - RNA, 19 nt, Artificial Sequence
  Description of Artificial Sequence: Synthetic oligonucleotide
  Sense strand starting at position 3661 of SEQ ID NO: 1243828
ggaagaugcccuugcaauc

SEQ ID NO: 1444603 - RNA, 19 nt, Artificial Sequence
  Description of Artificial Sequence: Synthetic oligonucleotide
  Antisense strand to SEQ ID NO: 1444602
gauugcaagggcaucuucc

SEQ ID NO: 1444604 - RNA, 19 nt, Artificial Sequence
  Description of Artificial Sequence: Synthetic oligonucleotide
  Sense strand starting at position 84 of SEQ ID NO: 1243829
uguguaauuuacucagucu

SEQ ID NO: 1444605 - RNA, 19 nt, Artificial Sequence
  Description of Artificial Sequence: Synthetic oligonucleotide
  Antisense strand to SEQ ID NO: 1444604
agacugaguaaauuacaca

SEQ ID NO: 1444606 - RNA, 19 nt, Artificial Sequence
  Description of Artificial Sequence: Synthetic oligonucleotide
  Sense strand starting at position 133 of SEQ ID NO: 1243829
ggacuaauacacugugacu

SEQ ID NO: 1444607 - RNA, 19 nt, Artificial Sequence
  Description of Artificial Sequence: Synthetic oligonucleotide
  Antisense strand to SEQ ID NO: 1444606
agucacaguguauuagucc

SEQ ID NO: 1444608 - RNA, 19 nt, Artificial Sequence
  Description of Artificial Sequence: Synthetic oligonucleotide
  Sense strand starting at position 156 of SEQ ID NO: 1243829
uuucuauaagugggaauag

SEQ ID NO: 1444609 - RNA, 19 nt, Artificial Sequence
  Description of Artificial Sequence: Synthetic oligonucleotide
  Antisense strand to SEQ ID NO: 1444608
cuauucccacuuauagaaa

SEQ ID NO: 1444610 - RNA, 19 nt, Artificial Sequence
  Description of Artificial Sequence: Synthetic oligonucleotide
  Sense strand starting at position 157 of SEQ ID NO: 1243829
uucuauaagugggaauagu

SEQ ID NO: 1444611 - RNA, 19 nt, Artificial Sequence
  Description of Artificial Sequence: Synthetic oligonucleotide
  Antisense strand to SEQ ID NO: 1444610
acuauucccacuuauagaa

SEQ ID NO: 1444612 - RNA, 19 nt, Artificial Sequence
  Description of Artificial Sequence: Synthetic oligonucleotide
  Sense strand starting at position 179 of SEQ ID NO: 1243829
ggcaucuaccucuauguua

SEQ ID NO: 1444613 - RNA, 19 nt, Artificial Sequence
  Description of Artificial Sequence: Synthetic oligonucleotide
  Antisense strand to SEQ ID NO: 1444612
uaacauagagguagaugcc

SEQ ID NO: 1444614 - RNA, 19 nt, Artificial Sequence
  Description of Artificial Sequence: Synthetic oligonucleotide
  Sense strand starting at position 658 of SEQ ID NO: 1243829
gcaacauagcgagacuaaa

SEQ ID NO: 1444615 - RNA, 19 nt, Artificial Sequence
  Description of Artificial Sequence: Synthetic oligonucleotide
  Antisense strand to SEQ ID NO: 1444614
uuuagucucgcuauguugc

SEQ ID NO: 1444616 - RNA, 19 nt, Artificial Sequence
  Description of Artificial Sequence: Synthetic oligonucleotide
  Sense strand starting at position 832 of SEQ ID NO: 1243829
cacccugucucagaaggaa

SEQ ID NO: 1444617 - RNA, 19 nt, Artificial Sequence
  Description of Artificial Sequence: Synthetic oligonucleotide
  Antisense strand to SEQ ID NO: 1444616
uuccuucugagacagggug

SEQ ID NO: 1444618 - RNA, 19 nt, Artificial Sequence
  Description of Artificial Sequence: Synthetic oligonucleotide
  Sense strand starting at position 994 of SEQ ID NO: 1243829
gcaugaaagugaguccuca

SEQ ID NO: 1444619 - RNA, 19 nt, Artificial Sequence
  Description of Artificial Sequence: Synthetic oligonucleotide
  Antisense strand to SEQ ID NO: 1444618
ugaggacucacuuucaugc

SEQ ID NO: 1444620 - RNA, 19 nt, Artificial Sequence
  Description of Artificial Sequence: Synthetic oligonucleotide
  Sense strand starting at position 998 of SEQ ID NO: 1243829
gaaagugaguccucaucuc

SEQ ID NO: 1444621 - RNA, 19 nt, Artificial Sequence
  Description of Artificial Sequence: Synthetic oligonucleotide
  Antisense strand to SEQ ID NO: 1444620
gagaugaggacucacuuuc

SEQ ID NO: 1444622 - RNA, 19 nt, Artificial Sequence
  Description of Artificial Sequence: Synthetic oligonucleotide
  Sense strand starting at position 1106 of SEQ ID NO: 1243829
cuuacaaagcuugaucuga

SEQ ID NO: 1444623 - RNA, 19 nt, Artificial Sequence
  Description of Artificial Sequence: Synthetic oligonucleotide
  Antisense strand to SEQ ID NO: 1444622
ucagaucaagcuuuguaag

SEQ ID NO: 1444624 - RNA, 19 nt, Artificial Sequence
  Description of Artificial Sequence: Synthetic oligonucleotide
  Sense strand starting at position 1108 of SEQ ID NO: 1243829
uacaaagcuugaucugagu

SEQ ID NO: 1444625 - RNA, 19 nt, Artificial Sequence
  Description of Artificial Sequence: Synthetic oligonucleotide
  Antisense strand to SEQ ID NO: 1444624
acucagaucaagcuuugua

SEQ ID NO: 1444626 - RNA, 19 nt, Artificial Sequence
  Description of Artificial Sequence: Synthetic oligonucleotide
  Sense strand starting at position 1111 of SEQ ID NO: 1243829
aaagcuugaucugaguaua

SEQ ID NO: 1444627 - RNA, 19 nt, Artificial Sequence
  Description of Artificial Sequence: Synthetic oligonucleotide
  Antisense strand to SEQ ID NO: 1444626
uauacucagaucaagcuuu

SEQ ID NO: 1444628 - RNA, 19 nt, Artificial Sequence
  Description of Artificial Sequence: Synthetic oligonucleotide
  Sense strand starting at position 1114 of SEQ ID NO: 1243829
gcuugaucugaguauagau

SEQ ID NO: 1444629 - RNA, 19 nt, Artificial Sequence
  Description of Artificial Sequence: Synthetic oligonucleotide
  Antisense strand to SEQ ID NO: 1444628
aucuauacucagaucaagc

SEQ ID NO: 1444630 - RNA, 19 nt, Artificial Sequence
  Description of Artificial Sequence: Synthetic oligonucleotide
  Sense strand starting at position 1244 of SEQ ID NO: 1243829
aagguuugaugcuuccuca

SEQ ID NO: 1444631 - RNA, 19 nt, Artificial Sequence
  Description of Artificial Sequence: Synthetic oligonucleotide
  Antisense strand to SEQ ID NO: 1444630
ugaggaagcaucaaaccuu

SEQ ID NO: 1444632 - RNA, 19 nt, Artificial Sequence
  Description of Artificial Sequence: Synthetic oligonucleotide
  Sense strand starting at position 1486 of SEQ ID NO: 1243829
gaaugaagcuuugauuugu

SEQ ID NO: 1444633 - RNA, 19 nt, Artificial Sequence
  Description of Artificial Sequence: Synthetic oligonucleotide
  Antisense strand to SEQ ID NO: 1444632
acaaaucaaagcuucauuc

SEQ ID NO: 1444634 - RNA, 19 nt, Artificial Sequence
  Description of Artificial Sequence: Synthetic oligonucleotide
  Sense strand starting at position 1492 of SEQ ID NO: 1243829
agcuuugauuugugcuaca

SEQ ID NO: 1444635 - RNA, 19 nt, Artificial Sequence
  Description of Artificial Sequence: Synthetic oligonucleotide
  Antisense strand to SEQ ID NO: 1444634
uguagcacaaaucaaagcu

SEQ ID NO: 1444636 - RNA, 19 nt, Artificial Sequence
  Description of Artificial Sequence: Synthetic oligonucleotide
  Sense strand starting at position 1495 of SEQ ID NO: 1243829
uuugauuugugcuacaaca

SEQ ID NO: 1444637 - RNA, 19 nt, Artificial Sequence
  Description of Artificial Sequence: Synthetic oligonucleotide
  Antisense strand to SEQ ID NO: 1444636
uguuguagcacaaaucaaa

SEQ ID NO: 1444638 - RNA, 19 nt, Artificial Sequence
  Description of Artificial Sequence: Synthetic oligonucleotide
  Sense strand starting at position 1523 of SEQ ID NO: 1243829
cuugaaacaucaugcuaag

SEQ ID NO: 1444639 - RNA, 19 nt, Artificial Sequence
  Description of Artificial Sequence: Synthetic oligonucleotide
  Antisense strand to SEQ ID NO: 1444638
cuuagcaugauguuucaag

SEQ ID NO: 1444640 - RNA, 19 nt, Artificial Sequence
  Description of Artificial Sequence: Synthetic oligonucleotide
  Sense strand starting at position 1741 of SEQ ID NO: 1243829
uuguuucugcagcaucuaa

SEQ ID NO: 1444641 - RNA, 19 nt, Artificial Sequence
  Description of Artificial Sequence: Synthetic oligonucleotide
  Antisense strand to SEQ ID NO: 1444640
uuagaugcugcagaaacaa

SEQ ID NO: 1444642 - RNA, 19 nt, Artificial Sequence
  Description of Artificial Sequence: Synthetic oligonucleotide
  Sense strand starting at position 3976 of SEQ ID NO: 1243829
gccaaauuguuugaacccu

SEQ ID NO: 1444643 - RNA, 19 nt, Artificial Sequence
  Description of Artificial Sequence: Synthetic oligonucleotide
  Antisense strand to SEQ ID NO: 1444642
aggguucaaacaauuuggc

SEQ ID NO: 1444644 - RNA, 19 nt, Artificial Sequence
  Description of Artificial Sequence: Synthetic oligonucleotide
  Sense strand starting at position 74 of SEQ ID NO: 1243830
caaacuuccggauggguau

SEQ ID NO: 1444645 - RNA, 19 nt, Artificial Sequence
  Description of Artificial Sequence: Synthetic oligonucleotide
  Antisense strand to SEQ ID NO: 1444644
auacccauccggaaguuug

SEQ ID NO: 1444646 - RNA, 19 nt, Artificial Sequence
  Description of Artificial Sequence: Synthetic oligonucleotide
  Sense strand starting at position 168 of SEQ ID NO: 1243830
guggaaguucugcaggaga

SEQ ID NO: 1444647 - RNA, 19 nt, Artificial Sequence
  Description of Artificial Sequence: Synthetic oligonucleotide
  Antisense strand to SEQ ID NO: 1444646
ucuccugcagaacuuccac

SEQ ID NO: 1444648 - RNA, 19 nt, Artificial Sequence
  Description of Artificial Sequence: Synthetic oligonucleotide
  Sense strand starting at position 208 of SEQ ID NO: 1243830
gcagguucacagugguauc

SEQ ID NO: 1444649 - RNA, 19 nt, Artificial Sequence
  Description of Artificial Sequence: Synthetic oligonucleotide
  Antisense strand to SEQ ID NO: 1444648
gauaccacugugaaccugc

SEQ ID NO: 1444650 - RNA, 19 nt, Artificial Sequence
  Description of Artificial Sequence: Synthetic oligonucleotide
  Sense strand starting at position 343 of SEQ ID NO: 1243830
cucucauuuccagguguca

SEQ ID NO: 1444651 - RNA, 19 nt, Artificial Sequence
  Description of Artificial Sequence: Synthetic oligonucleotide
  Antisense strand to SEQ ID NO: 1444650
ugacaccuggaaaugagag

SEQ ID NO: 1444652 - RNA, 19 nt, Artificial Sequence
  Description of Artificial Sequence: Synthetic oligonucleotide
  Sense strand starting at position 504 of SEQ ID NO: 1243830
cuagcaguccuggacaagu

SEQ ID NO: 1444653 - RNA, 19 nt, Artificial Sequence
  Description of Artificial Sequence: Synthetic oligonucleotide
  Antisense strand to SEQ ID NO: 1444652
acuuguccaggacugcuag

SEQ ID NO: 1444654 - RNA, 19 nt, Artificial Sequence
  Description of Artificial Sequence: Synthetic oligonucleotide
  Sense strand starting at position 561 of SEQ ID NO: 1243830
ccaggaucuucugaagcau

SEQ ID NO: 1444655 - RNA, 19 nt, Artificial Sequence
  Description of Artificial Sequence: Synthetic oligonucleotide
  Antisense strand to SEQ ID NO: 1444654
augcuucagaagauccugg

SEQ ID NO: 1444656 - RNA, 19 nt, Artificial Sequence
  Description of Artificial Sequence: Synthetic oligonucleotide
  Sense strand starting at position 673 of SEQ ID NO: 1243830
cuggaaagcuggucccgau

SEQ ID NO: 1444657 - RNA, 19 nt, Artificial Sequence
  Description of Artificial Sequence: Synthetic oligonucleotide
  Antisense strand to SEQ ID NO: 1444656
aucgggaccagcuuuccag

SEQ ID NO: 1444658 - RNA, 19 nt, Artificial Sequence
  Description of Artificial Sequence: Synthetic oligonucleotide
  Sense strand starting at position 685 of SEQ ID NO: 1243830
ucccgauccugugucugau

SEQ ID NO: 1444659 - RNA, 19 nt, Artificial Sequence
  Description of Artificial Sequence: Synthetic oligonucleotide
  Antisense strand to SEQ ID NO: 1444658
aucagacacaggaucggga

SEQ ID NO: 1444660 - RNA, 19 nt, Artificial Sequence
  Description of Artificial Sequence: Synthetic oligonucleotide
  Sense strand starting at position 689 of SEQ ID NO: 1243830
gauccugugucugauccuu

SEQ ID NO: 1444661 - RNA, 19 nt, Artificial Sequence
  Description of Artificial Sequence: Synthetic oligonucleotide
  Antisense strand to SEQ ID NO: 1444660
aaggaucagacacaggauc

SEQ ID NO: 1444662 - RNA, 19 nt, Artificial Sequence
  Description of Artificial Sequence: Synthetic oligonucleotide
  Sense strand starting at position 803 of SEQ ID NO: 1243830
uguaacauaucaucuuguu

SEQ ID NO: 1444663 - RNA, 19 nt, Artificial Sequence
  Description of Artificial Sequence: Synthetic oligonucleotide
  Antisense strand to SEQ ID NO: 1444662
aacaagaugauauguuaca

SEQ ID NO: 1444664 - RNA, 19 nt, Artificial Sequence
  Description of Artificial Sequence: Synthetic oligonucleotide
  Sense strand starting at position 809 of SEQ ID NO: 1243830
auaucaucuuguucuguuu

SEQ ID NO: 1444665 - RNA, 19 nt, Artificial Sequence
  Description of Artificial Sequence: Synthetic oligonucleotide
  Antisense strand to SEQ ID NO: 1444664
aaacagaacaagaugauau

SEQ ID NO: 1444666 - RNA, 19 nt, Artificial Sequence
  Description of Artificial Sequence: Synthetic oligonucleotide
  Sense strand starting at position 958 of SEQ ID NO: 1243830
gcaguagugugauuacagg

SEQ ID NO: 1444667 - RNA, 19 nt, Artificial Sequence
  Description of Artificial Sequence: Synthetic oligonucleotide
  Antisense strand to SEQ ID NO: 1444666
ccuguaaucacacuacugc

SEQ ID NO: 1444668 - RNA, 19 nt, Artificial Sequence
  Description of Artificial Sequence: Synthetic oligonucleotide
  Sense strand starting at position 1303 of SEQ ID NO: 1243830
agucuuaucuccucuugac

SEQ ID NO: 1444669 - RNA, 19 nt, Artificial Sequence
  Description of Artificial Sequence: Synthetic oligonucleotide
  Antisense strand to SEQ ID NO: 1444668
gucaagaggagauaagacu

SEQ ID NO: 1444670 - RNA, 19 nt, Artificial Sequence
  Description of Artificial Sequence: Synthetic oligonucleotide
  Sense strand starting at position 1611 of SEQ ID NO: 1243830
ggaauucugccuugcacug

SEQ ID NO: 1444671 - RNA, 19 nt, Artificial Sequence
  Description of Artificial Sequence: Synthetic oligonucleotide
  Antisense strand to SEQ ID NO: 1444670
cagugcaaggcagaauucc

SEQ ID NO: 1444672 - RNA, 19 nt, Artificial Sequence
  Description of Artificial Sequence: Synthetic oligonucleotide
  Sense strand starting at position 1660 of SEQ ID NO: 1243830
cugccuuggcaacggaaau

SEQ ID NO: 1444673 - RNA, 19 nt, Artificial Sequence
  Description of Artificial Sequence: Synthetic oligonucleotide
  Antisense strand to SEQ ID NO: 1444672
auuuccguugccaaggcag

SEQ ID NO: 1444674 - RNA, 19 nt, Artificial Sequence
  Description of Artificial Sequence: Synthetic oligonucleotide
  Sense strand starting at position 1671 of SEQ ID NO: 1243830
acggaaaugcuaggugaau

SEQ ID NO: 1444675 - RNA, 19 nt, Artificial Sequence
  Description of Artificial Sequence: Synthetic oligonucleotide
  Antisense strand to SEQ ID NO: 1444674
auucaccuagcauuuccgu

SEQ ID NO: 1444676 - RNA, 19 nt, Artificial Sequence
  Description of Artificial Sequence: Synthetic oligonucleotide
  Sense strand starting at position 1672 of SEQ ID NO: 1243830
cggaaaugcuaggugaaug

SEQ ID NO: 1444677 - RNA, 19 nt, Artificial Sequence
  Description of Artificial Sequence: Synthetic oligonucleotide
  Antisense strand to SEQ ID NO: 1444676
cauucaccuagcauuuccg

SEQ ID NO: 1444678 - RNA, 19 nt, Artificial Sequence
  Description of Artificial Sequence: Synthetic oligonucleotide
  Sense strand starting at position 1682 of SEQ ID NO: 1243830
aggugaaugguggguaugu

SEQ ID NO: 1444679 - RNA, 19 nt, Artificial Sequence
  Description of Artificial Sequence: Synthetic oligonucleotide
  Antisense strand to SEQ ID NO: 1444678
acauacccaccauucaccu

SEQ ID NO: 1444680 - RNA, 19 nt, Artificial Sequence
  Description of Artificial Sequence: Synthetic oligonucleotide
  Sense strand starting at position 1690 of SEQ ID NO: 1243830
gguggguauguggaugaaa

SEQ ID NO: 1444681 - RNA, 19 nt, Artificial Sequence
  Description of Artificial Sequence: Synthetic oligonucleotide
  Antisense strand to SEQ ID NO: 1444680
uuucauccacauacccacc

SEQ ID NO: 1444682 - RNA, 19 nt, Artificial Sequence
  Description of Artificial Sequence: Synthetic oligonucleotide
  Sense strand starting at position 1978 of SEQ ID NO: 1243830
agucacuucccauggguga

SEQ ID NO: 1444683 - RNA, 19 nt, Artificial Sequence
  Description of Artificial Sequence: Synthetic oligonucleotide
  Antisense strand to SEQ ID NO: 1444682
ucacccaugggaagugacu

SEQ ID NO: 1444684 - RNA, 19 nt, Artificial Sequence
  Description of Artificial Sequence: Synthetic oligonucleotide
  Sense strand starting at position 1979 of SEQ ID NO: 1243830
gucacuucccaugggugaa

SEQ ID NO: 1444685 - RNA, 19 nt, Artificial Sequence
  Description of Artificial Sequence: Synthetic oligonucleotide
  Antisense strand to SEQ ID NO: 1444684
uucacccaugggaagugac

SEQ ID NO: 1444686 - RNA, 19 nt, Artificial Sequence
  Description of Artificial Sequence: Synthetic oligonucleotide
  Sense strand starting at position 2350 of SEQ ID NO: 1243830
gggugaaauuucgaggcag

SEQ ID NO: 1444687 - RNA, 19 nt, Artificial Sequence
  Description of Artificial Sequence: Synthetic oligonucleotide
  Antisense strand to SEQ ID NO: 1444686
cugccucgaaauuucaccc

SEQ ID NO: 1444688 - RNA, 19 nt, Artificial Sequence
  Description of Artificial Sequence: Synthetic oligonucleotide
  Sense strand starting at position 2351 of SEQ ID NO: 1243830
ggugaaauuucgaggcagu

SEQ ID NO: 1444689 - RNA, 19 nt, Artificial Sequence
  Description of Artificial Sequence: Synthetic oligonucleotide
  Antisense strand to SEQ ID NO: 1444688
acugccucgaaauuucacc

SEQ ID NO: 1444690 - RNA, 19 nt, Artificial Sequence
  Description of Artificial Sequence: Synthetic oligonucleotide
  Sense strand starting at position 2352 of SEQ ID NO: 1243830
gugaaauuucgaggcaguu

SEQ ID NO: 1444691 - RNA, 19 nt, Artificial Sequence
  Description of Artificial Sequence: Synthetic oligonucleotide
  Antisense strand to SEQ ID NO: 1444690
aacugccucgaaauuucac

SEQ ID NO: 1444692 - RNA, 19 nt, Artificial Sequence
  Description of Artificial Sequence: Synthetic oligonucleotide
  Sense strand starting at position 2358 of SEQ ID NO: 1243830
uuucgaggcaguugacaau

SEQ ID NO: 1444693 - RNA, 19 nt, Artificial Sequence
  Description of Artificial Sequence: Synthetic oligonucleotide
  Antisense strand to SEQ ID NO: 1444692
auugucaacugccucgaaa

SEQ ID NO: 1444694 - RNA, 19 nt, Artificial Sequence
  Description of Artificial Sequence: Synthetic oligonucleotide
  Sense strand starting at position 2394 of SEQ ID NO: 1243830
ucaucagcuucugagaagu

SEQ ID NO: 1444695 - RNA, 19 nt, Artificial Sequence
  Description of Artificial Sequence: Synthetic oligonucleotide
  Antisense strand to SEQ ID NO: 1444694
acuucucagaagcugauga

SEQ ID NO: 1444696 - RNA, 19 nt, Artificial Sequence
  Description of Artificial Sequence: Synthetic oligonucleotide
  Sense strand starting at position 2407 of SEQ ID NO: 1243830
agaaguaccucucuguaca

SEQ ID NO: 1444697 - RNA, 19 nt, Artificial Sequence
  Description of Artificial Sequence: Synthetic oligonucleotide
  Antisense strand to SEQ ID NO: 1444696
uguacagagagguacuucu

SEQ ID NO: 1444698 - RNA, 19 nt, Artificial Sequence
  Description of Artificial Sequence: Synthetic oligonucleotide
  Sense strand starting at position 2462 of SEQ ID NO: 1243830
gcuccucugucauguggaa

SEQ ID NO: 1444699 - RNA, 19 nt, Artificial Sequence
  Description of Artificial Sequence: Synthetic oligonucleotide
  Antisense strand to SEQ ID NO: 1444698
uuccacaugacagaggagc

SEQ ID NO: 1444700 - RNA, 19 nt, Artificial Sequence
  Description of Artificial Sequence: Synthetic oligonucleotide
  Sense strand starting at position 2682 of SEQ ID NO: 1243830
gggcacuuguggccaaagu

SEQ ID NO: 1444701 - RNA, 19 nt, Artificial Sequence
  Description of Artificial Sequence: Synthetic oligonucleotide
  Antisense strand to SEQ ID NO: 1444700
acuuuggccacaagugccc

SEQ ID NO: 1444702 - RNA, 19 nt, Artificial Sequence
  Description of Artificial Sequence: Synthetic oligonucleotide
  Sense strand starting at position 2745 of SEQ ID NO: 1243830
cuaugaggagauuggguau

SEQ ID NO: 1444703 - RNA, 19 nt, Artificial Sequence
  Description of Artificial Sequence: Synthetic oligonucleotide
  Antisense strand to SEQ ID NO: 1444702
auacccaaucuccucauag

SEQ ID NO: 1444704 - RNA, 19 nt, Artificial Sequence
  Description of Artificial Sequence: Synthetic oligonucleotide
  Sense strand starting at position 3232 of SEQ ID NO: 1243830
aauaauuaguucugcagag

SEQ ID NO: 1444705 - RNA, 19 nt, Artificial Sequence
  Description of Artificial Sequence: Synthetic oligonucleotide
  Antisense strand to SEQ ID NO: 1444704
cucugcagaacuaauuauu

SEQ ID NO: 1444706 - RNA, 19 nt, Artificial Sequence
  Description of Artificial Sequence: Synthetic oligonucleotide
  Sense strand starting at position 3233 of SEQ ID NO: 1243830
auaauuaguucugcagagu

SEQ ID NO: 1444707 - RNA, 19 nt, Artificial Sequence
  Description of Artificial Sequence: Synthetic oligonucleotide
  Antisense strand to SEQ ID NO: 1444706
acucugcagaacuaauuau

SEQ ID NO: 1444708 - RNA, 19 nt, Artificial Sequence
  Description of Artificial Sequence: Synthetic oligonucleotide
  Sense strand starting at position 3234 of SEQ ID NO: 1243830
uaauuaguucugcagaguc

SEQ ID NO: 1444709 - RNA, 19 nt, Artificial Sequence
  Description of Artificial Sequence: Synthetic oligonucleotide
  Antisense strand to SEQ ID NO: 1444708
gacucugcagaacuaauua

SEQ ID NO: 1444710 - RNA, 19 nt, Artificial Sequence
  Description of Artificial Sequence: Synthetic oligonucleotide
  Sense strand starting at position 3236 of SEQ ID NO: 1243830
auuaguucugcagagucau

SEQ ID NO: 1444711 - RNA, 19 nt, Artificial Sequence
  Description of Artificial Sequence: Synthetic oligonucleotide
  Antisense strand to SEQ ID NO: 1444710
augacucugcagaacuaau

SEQ ID NO: 1444712 - RNA, 19 nt, Artificial Sequence
  Description of Artificial Sequence: Synthetic oligonucleotide
  Sense strand starting at position 3269 of SEQ ID NO: 1243830
caagcaaucugggaagcua

SEQ ID NO: 1444713 - RNA, 19 nt, Artificial Sequence
  Description of Artificial Sequence: Synthetic oligonucleotide
  Antisense strand to SEQ ID NO: 1444712
uagcuucccagauugcuug

SEQ ID NO: 1444714 - RNA, 19 nt, Artificial Sequence
  Description of Artificial Sequence: Synthetic oligonucleotide
  Sense strand starting at position 3281 of SEQ ID NO: 1243830
gaagcuaaggccugaggau

SEQ ID NO: 1444715 - RNA, 19 nt, Artificial Sequence
  Description of Artificial Sequence: Synthetic oligonucleotide
  Antisense strand to SEQ ID NO: 1444714
auccucaggccuuagcuuc

SEQ ID NO: 1444716 - RNA, 19 nt, Artificial Sequence
  Description of Artificial Sequence: Synthetic oligonucleotide
  Sense strand starting at position 3282 of SEQ ID NO: 1243830
aagcuaaggccugaggauu

SEQ ID NO: 1444717 - RNA, 19 nt, Artificial Sequence
  Description of Artificial Sequence: Synthetic oligonucleotide
  Antisense strand to SEQ ID NO: 1444716
aauccucaggccuuagcuu

SEQ ID NO: 1444718 - RNA, 19 nt, Artificial Sequence
  Description of Artificial Sequence: Synthetic oligonucleotide
  Sense strand starting at position 3381 of SEQ ID NO: 1243830
gacgcugucucuuuaaaca

SEQ ID NO: 1444719 - RNA, 19 nt, Artificial Sequence
  Description of Artificial Sequence: Synthetic oligonucleotide
  Antisense strand to SEQ ID NO: 1444718
uguuuaaagagacagcguc

SEQ ID NO: 1444720 - RNA, 19 nt, Artificial Sequence
  Description of Artificial Sequence: Synthetic oligonucleotide
  Sense strand starting at position 3501 of SEQ ID NO: 1243830
gcgcuuuguccugagaaca

SEQ ID NO: 1444721 - RNA, 19 nt, Artificial Sequence
  Description of Artificial Sequence: Synthetic oligonucleotide
  Antisense strand to SEQ ID NO: 1444720
uguucucaggacaaagcgc

SEQ ID NO: 1444722 - RNA, 19 nt, Artificial Sequence
  Description of Artificial Sequence: Synthetic oligonucleotide
  Sense strand starting at position 3591 of SEQ ID NO: 1243830
ccagaaaccuguccauugu

SEQ ID NO: 1444723 - RNA, 19 nt, Artificial Sequence
  Description of Artificial Sequence: Synthetic oligonucleotide
  Antisense strand to SEQ ID NO: 1444722
acaauggacagguuucugg

SEQ ID NO: 1444724 - RNA, 19 nt, Artificial Sequence
  Description of Artificial Sequence: Synthetic oligonucleotide
  Sense strand starting at position 136 of SEQ ID NO: 1243831
gcaugaucucccugaggac

SEQ ID NO: 1444725 - RNA, 19 nt, Artificial Sequence
  Description of Artificial Sequence: Synthetic oligonucleotide
  Antisense strand to SEQ ID NO: 1444724
guccucagggagaucaugc

SEQ ID NO: 1444726 - RNA, 19 nt, Artificial Sequence
  Description of Artificial Sequence: Synthetic oligonucleotide
  Sense strand starting at position 150 of SEQ ID NO: 1243831
aggacucagugcccauaau

SEQ ID NO: 1444727 - RNA, 19 nt, Artificial Sequence
  Description of Artificial Sequence: Synthetic oligonucleotide
  Antisense strand to SEQ ID NO: 1444726
auuaugggcacugaguccu

SEQ ID NO: 1444728 - RNA, 19 nt, Artificial Sequence
  Description of Artificial Sequence: Synthetic oligonucleotide
  Sense strand starting at position 165 of SEQ ID NO: 1243831
uaauguugguaccaggauu

SEQ ID NO: 1444729 - RNA, 19 nt, Artificial Sequence
  Description of Artificial Sequence: Synthetic oligonucleotide
  Antisense strand to SEQ ID NO: 1444728
aauccugguaccaacauua

SEQ ID NO: 1444730 - RNA, 19 nt, Artificial Sequence
  Description of Artificial Sequence: Synthetic oligonucleotide
  Sense strand starting at position 243 of SEQ ID NO: 1243831
agauaucuguuaccuggaa

SEQ ID NO: 1444731 - RNA, 19 nt, Artificial Sequence
  Description of Artificial Sequence: Synthetic oligonucleotide
  Antisense strand to SEQ ID NO: 1444730
uuccagguaacagauaucu

SEQ ID NO: 1444732 - RNA, 19 nt, Artificial Sequence
  Description of Artificial Sequence: Synthetic oligonucleotide
  Sense strand starting at position 244 of SEQ ID NO: 1243831
gauaucuguuaccuggaaa

SEQ ID NO: 1444733 - RNA, 19 nt, Artificial Sequence
  Description of Artificial Sequence: Synthetic oligonucleotide
  Antisense strand to SEQ ID NO: 1444732
uuuccagguaacagauauc

SEQ ID NO: 1444734 - RNA, 19 nt, Artificial Sequence
  Description of Artificial Sequence: Synthetic oligonucleotide
  Sense strand starting at position 950 of SEQ ID NO: 1243831
cccgaugucugcucacuga

SEQ ID NO: 1444735 - RNA, 19 nt, Artificial Sequence
  Description of Artificial Sequence: Synthetic oligonucleotide
  Antisense strand to SEQ ID NO: 1444734
ucagugagcagacaucggg

SEQ ID NO: 1444736 - RNA, 19 nt, Artificial Sequence
  Description of Artificial Sequence: Synthetic oligonucleotide
  Sense strand starting at position 954 of SEQ ID NO: 1243831
augucugcucacugaaacu

SEQ ID NO: 1444737 - RNA, 19 nt, Artificial Sequence
  Description of Artificial Sequence: Synthetic oligonucleotide
  Antisense strand to SEQ ID NO: 1444736
aguuucagugagcagacau

SEQ ID NO: 1444738 - RNA, 19 nt, Artificial Sequence
  Description of Artificial Sequence: Synthetic oligonucleotide
  Sense strand starting at position 1409 of SEQ ID NO: 1243831
acugacaucaguuguagga

SEQ ID NO: 1444739 - RNA, 19 nt, Artificial Sequence
  Description of Artificial Sequence: Synthetic oligonucleotide
  Antisense strand to SEQ ID NO: 1444738
uccuacaacugaugucagu

SEQ ID NO: 1444740 - RNA, 19 nt, Artificial Sequence
  Description of Artificial Sequence: Synthetic oligonucleotide
  Sense strand starting at position 1411 of SEQ ID NO: 1243831
ugacaucaguuguaggauu

SEQ ID NO: 1444741 - RNA, 19 nt, Artificial Sequence
  Description of Artificial Sequence: Synthetic oligonucleotide
  Antisense strand to SEQ ID NO: 1444740
aauccuacaacugauguca

SEQ ID NO: 1444742 - RNA, 19 nt, Artificial Sequence
  Description of Artificial Sequence: Synthetic oligonucleotide
  Sense strand starting at position 1477 of SEQ ID NO: 1243831
auugaugaaacgugauaau

SEQ ID NO: 1444743 - RNA, 19 nt, Artificial Sequence
  Description of Artificial Sequence: Synthetic oligonucleotide
  Antisense strand to SEQ ID NO: 1444742
auuaucacguuucaucaau

SEQ ID NO: 1444744 - RNA, 19 nt, Artificial Sequence
  Description of Artificial Sequence: Synthetic oligonucleotide
  Sense strand starting at position 1480 of SEQ ID NO: 1243831
gaugaaacgugauaauucu

SEQ ID NO: 1444745 - RNA, 19 nt, Artificial Sequence
  Description of Artificial Sequence: Synthetic oligonucleotide
  Antisense strand to SEQ ID NO: 1444744
agaauuaucacguuucauc

SEQ ID NO: 1444746 - RNA, 19 nt, Artificial Sequence
  Description of Artificial Sequence: Synthetic oligonucleotide
  Sense strand starting at position 1670 of SEQ ID NO: 1243831
acccacaggucuggagaaa

SEQ ID NO: 1444747 - RNA, 19 nt, Artificial Sequence
  Description of Artificial Sequence: Synthetic oligonucleotide
  Antisense strand to SEQ ID NO: 1444746
uuucuccagaccugugggu

SEQ ID NO: 1444748 - RNA, 19 nt, Artificial Sequence
  Description of Artificial Sequence: Synthetic oligonucleotide
  Sense strand starting at position 1805 of SEQ ID NO: 1243831
ggcuaucagucagucaaga

SEQ ID NO: 1444749 - RNA, 19 nt, Artificial Sequence
  Description of Artificial Sequence: Synthetic oligonucleotide
  Antisense strand to SEQ ID NO: 1444748
ucuugacugacugauagcc

SEQ ID NO: 1444750 - RNA, 19 nt, Artificial Sequence
  Description of Artificial Sequence: Synthetic oligonucleotide
  Sense strand starting at position 1996 of SEQ ID NO: 1243831
gucuuuaacuuucucuagu

SEQ ID NO: 1444751 - RNA, 19 nt, Artificial Sequence
  Description of Artificial Sequence: Synthetic oligonucleotide
  Antisense strand to SEQ ID NO: 1444750
acuagagaaaguuaaagac

SEQ ID NO: 1444752 - RNA, 19 nt, Artificial Sequence
  Description of Artificial Sequence: Synthetic oligonucleotide
  Sense strand starting at position 2006 of SEQ ID NO: 1243831
uucucuagucgcgugaaac

SEQ ID NO: 1444753 - RNA, 19 nt, Artificial Sequence
  Description of Artificial Sequence: Synthetic oligonucleotide
  Antisense strand to SEQ ID NO: 1444752
guuucacgcgacuagagaa

SEQ ID NO: 1444754 - RNA, 19 nt, Artificial Sequence
  Description of Artificial Sequence: Synthetic oligonucleotide
  Sense strand starting at position 2007 of SEQ ID NO: 1243831
ucucuagucgcgugaaacc

SEQ ID NO: 1444755 - RNA, 19 nt, Artificial Sequence
  Description of Artificial Sequence: Synthetic oligonucleotide
  Antisense strand to SEQ ID NO: 1444754
gguuucacgcgacuagaga

SEQ ID NO: 1444756 - RNA, 19 nt, Artificial Sequence
  Description of Artificial Sequence: Synthetic oligonucleotide
  Sense strand starting at position 2237 of SEQ ID NO: 1243831
gucgaauucgcaugggaaa

SEQ ID NO: 1444757 - RNA, 19 nt, Artificial Sequence
  Description of Artificial Sequence: Synthetic oligonucleotide
  Antisense strand to SEQ ID NO: 1444756
uuucccaugcgaauucgac

SEQ ID NO: 1444758 - RNA, 19 nt, Artificial Sequence
  Description of Artificial Sequence: Synthetic oligonucleotide
  Sense strand starting at position 2365 of SEQ ID NO: 1243831
ggcacaucaaguuguggau

SEQ ID NO: 1444759 - RNA, 19 nt, Artificial Sequence
  Description of Artificial Sequence: Synthetic oligonucleotide
  Antisense strand to SEQ ID NO: 1444758
auccacaacuugaugugcc

SEQ ID NO: 1444760 - RNA, 19 nt, Artificial Sequence
  Description of Artificial Sequence: Synthetic oligonucleotide
  Sense strand starting at position 2367 of SEQ ID NO: 1243831
cacaucaaguuguggauau

SEQ ID NO: 1444761 - RNA, 19 nt, Artificial Sequence
  Description of Artificial Sequence: Synthetic oligonucleotide
  Antisense strand to SEQ ID NO: 1444760
auauccacaacuugaugug

SEQ ID NO: 1444762 - RNA, 19 nt, Artificial Sequence
  Description of Artificial Sequence: Synthetic oligonucleotide
  Sense strand starting at position 2369 of SEQ ID NO: 1243831
caucaaguuguggauaucu

SEQ ID NO: 1444763 - RNA, 19 nt, Artificial Sequence
  Description of Artificial Sequence: Synthetic oligonucleotide
  Antisense strand to SEQ ID NO: 1444762
agauauccacaacuugaug

SEQ ID NO: 1444764 - RNA, 19 nt, Artificial Sequence
  Description of Artificial Sequence: Synthetic oligonucleotide
  Sense strand starting at position 2374 of SEQ ID NO: 1243831
aguuguggauaucucgaaa

SEQ ID NO: 1444765 - RNA, 19 nt, Artificial Sequence
  Description of Artificial Sequence: Synthetic oligonucleotide
  Antisense strand to SEQ ID NO: 1444764
uuucgagauauccacaacu

SEQ ID NO: 1444766 - RNA, 19 nt, Artificial Sequence
  Description of Artificial Sequence: Synthetic oligonucleotide
  Sense strand starting at position 2377 of SEQ ID NO: 1243831
uguggauaucucgaaacgu

SEQ ID NO: 1444767 - RNA, 19 nt, Artificial Sequence
  Description of Artificial Sequence: Synthetic oligonucleotide
  Antisense strand to SEQ ID NO: 1444766
acguuucgagauauccaca

SEQ ID NO: 1444768 - RNA, 19 nt, Artificial Sequence
  Description of Artificial Sequence: Synthetic oligonucleotide
  Sense strand starting at position 2383 of SEQ ID NO: 1243831
uaucucgaaacgucgugua

SEQ ID NO: 1444769 - RNA, 19 nt, Artificial Sequence
  Description of Artificial Sequence: Synthetic oligonucleotide
  Antisense strand to SEQ ID NO: 1444768
uacacgacguuucgagaua

SEQ ID NO: 1444770 - RNA, 19 nt, Artificial Sequence
  Description of Artificial Sequence: Synthetic oligonucleotide
  Sense strand starting at position 2385 of SEQ ID NO: 1243831
ucucgaaacgucguguaua

SEQ ID NO: 1444771 - RNA, 19 nt, Artificial Sequence
  Description of Artificial Sequence: Synthetic oligonucleotide
  Antisense strand to SEQ ID NO: 1444770
uauacacgacguuucgaga

SEQ ID NO: 1444772 - RNA, 19 nt, Artificial Sequence
  Description of Artificial Sequence: Synthetic oligonucleotide
  Sense strand starting at position 2450 of SEQ ID NO: 1243831
gcugguuauuuacaauaau

SEQ ID NO: 1444773 - RNA, 19 nt, Artificial Sequence
  Description of Artificial Sequence: Synthetic oligonucleotide
  Antisense strand to SEQ ID NO: 1444772
auuauuguaaauaaccagc

SEQ ID NO: 1444774 - RNA, 19 nt, Artificial Sequence
  Description of Artificial Sequence: Synthetic oligonucleotide
  Sense strand starting at position 2468 of SEQ ID NO: 1243831
ugaaacggcuauuauuaua

SEQ ID NO: 1444775 - RNA, 19 nt, Artificial Sequence
  Description of Artificial Sequence: Synthetic oligonucleotide
  Antisense strand to SEQ ID NO: 1444774
uauaauaauagccguuuca

SEQ ID NO: 1444776 - RNA, 19 nt, Artificial Sequence
  Description of Artificial Sequence: Synthetic oligonucleotide
  Sense strand starting at position 2473 of SEQ ID NO: 1243831
cggcuauuauuauauuaca

SEQ ID NO: 1444777 - RNA, 19 nt, Artificial Sequence
  Description of Artificial Sequence: Synthetic oligonucleotide
  Antisense strand to SEQ ID NO: 1444776
uguaauauaauaauagccg

SEQ ID NO: 1444778 - RNA, 19 nt, Artificial Sequence
  Description of Artificial Sequence: Synthetic oligonucleotide
  Sense strand starting at position 2514 of SEQ ID NO: 1243831
ucaucucaccaguauuagu

SEQ ID NO: 1444779 - RNA, 19 nt, Artificial Sequence
  Description of Artificial Sequence: Synthetic oligonucleotide
  Antisense strand to SEQ ID NO: 1444778
acuaauacuggugagauga

SEQ ID NO: 1444780 - RNA, 19 nt, Artificial Sequence
  Description of Artificial Sequence: Synthetic oligonucleotide
  Sense strand starting at position 2571 of SEQ ID NO: 1243831
cgccauuauacugagagag

SEQ ID NO: 1444781 - RNA, 19 nt, Artificial Sequence
  Description of Artificial Sequence: Synthetic oligonucleotide
  Antisense strand to SEQ ID NO: 1444780
cucucucaguauaauggcg

SEQ ID NO: 1444782 - RNA, 19 nt, Artificial Sequence
  Description of Artificial Sequence: Synthetic oligonucleotide
  Sense strand starting at position 2614 of SEQ ID NO: 1243831
ccauguggucagugggaca

SEQ ID NO: 1444783 - RNA, 19 nt, Artificial Sequence
  Description of Artificial Sequence: Synthetic oligonucleotide
  Antisense strand to SEQ ID NO: 1444782
ugucccacugaccacaugg

SEQ ID NO: 1444784 - RNA, 19 nt, Artificial Sequence
  Description of Artificial Sequence: Synthetic oligonucleotide
  Sense strand starting at position 2872 of SEQ ID NO: 1243831
agacuugaauccuccuuga

SEQ ID NO: 1444785 - RNA, 19 nt, Artificial Sequence
  Description of Artificial Sequence: Synthetic oligonucleotide
  Antisense strand to SEQ ID NO: 1444784
ucaaggaggauucaagucu

SEQ ID NO: 1444786 - RNA, 19 nt, Artificial Sequence
  Description of Artificial Sequence: Synthetic oligonucleotide
  Sense strand starting at position 2875 of SEQ ID NO: 1243831
cuugaauccuccuugaaag

SEQ ID NO: 1444787 - RNA, 19 nt, Artificial Sequence
  Description of Artificial Sequence: Synthetic oligonucleotide
  Antisense strand to SEQ ID NO: 1444786
cuuucaaggaggauucaag

SEQ ID NO: 1444788 - RNA, 19 nt, Artificial Sequence
  Description of Artificial Sequence: Synthetic oligonucleotide
  Sense strand starting at position 2876 of SEQ ID NO: 1243831
uugaauccuccuugaaagg

SEQ ID NO: 1444789 - RNA, 19 nt, Artificial Sequence
  Description of Artificial Sequence: Synthetic oligonucleotide
  Antisense strand to SEQ ID NO: 1444788
ccuuucaaggaggauucaa

SEQ ID NO: 1444790 - RNA, 19 nt, Artificial Sequence
  Description of Artificial Sequence: Synthetic oligonucleotide
  Sense strand starting at position 3124 of SEQ ID NO: 1243831
uuuacugacuugucagguu

SEQ ID NO: 1444791 - RNA, 19 nt, Artificial Sequence
  Description of Artificial Sequence: Synthetic oligonucleotide
  Antisense strand to SEQ ID NO: 1444790
aaccugacaagucaguaaa

SEQ ID NO: 1444792 - RNA, 19 nt, Artificial Sequence
  Description of Artificial Sequence: Synthetic oligonucleotide
  Sense strand starting at position 3133 of SEQ ID NO: 1243831
uugucagguuaauaucuga

SEQ ID NO: 1444793 - RNA, 19 nt, Artificial Sequence
  Description of Artificial Sequence: Synthetic oligonucleotide
  Antisense strand to SEQ ID NO: 1444792
ucagauauuaaccugacaa

SEQ ID NO: 1444794 - RNA, 19 nt, Artificial Sequence
  Description of Artificial Sequence: Synthetic oligonucleotide
  Sense strand starting at position 3138 of SEQ ID NO: 1243831
agguuaauaucugaagcau

SEQ ID NO: 1444795 - RNA, 19 nt, Artificial Sequence
  Description of Artificial Sequence: Synthetic oligonucleotide
  Antisense strand to SEQ ID NO: 1444794
augcuucagauauuaaccu

SEQ ID NO: 1444796 - RNA, 19 nt, Artificial Sequence
  Description of Artificial Sequence: Synthetic oligonucleotide
  Sense strand starting at position 3153 of SEQ ID NO: 1243831
gcauuaacucagugguucu

SEQ ID NO: 1444797 - RNA, 19 nt, Artificial Sequence
  Description of Artificial Sequence: Synthetic oligonucleotide
  Antisense strand to SEQ ID NO: 1444796
agaaccacugaguuaaugc

SEQ ID NO: 1444798 - RNA, 19 nt, Artificial Sequence
  Description of Artificial Sequence: Synthetic oligonucleotide
  Sense strand starting at position 3849 of SEQ ID NO: 1243831
accacuguugccuggcuaa

SEQ ID NO: 1444799 - RNA, 19 nt, Artificial Sequence
  Description of Artificial Sequence: Synthetic oligonucleotide
  Antisense strand to SEQ ID NO: 1444798
uuagccaggcaacaguggu

SEQ ID NO: 1444800 - RNA, 19 nt, Artificial Sequence
  Description of Artificial Sequence: Synthetic oligonucleotide
  Sense strand starting at position 3852 of SEQ ID NO: 1243831
acuguugccuggcuaauuu

SEQ ID NO: 1444801 - RNA, 19 nt, Artificial Sequence
  Description of Artificial Sequence: Synthetic oligonucleotide
  Antisense strand to SEQ ID NO: 1444800
aaauuagccaggcaacagu

SEQ ID NO: 1444802 - RNA, 19 nt, Artificial Sequence
  Description of Artificial Sequence: Synthetic oligonucleotide
  Sense strand starting at position 3894 of SEQ ID NO: 1243831
cuuguuauguugucaggcu

SEQ ID NO: 1444803 - RNA, 19 nt, Artificial Sequence
  Description of Artificial Sequence: Synthetic oligonucleotide
  Antisense strand to SEQ ID NO: 1444802
agccugacaacauaacaag

SEQ ID NO: 1444804 - RNA, 19 nt, Artificial Sequence
  Description of Artificial Sequence: Synthetic oligonucleotide
  Sense strand starting at position 146 of SEQ ID NO: 1243832
ugacgugcugguugggaua

SEQ ID NO: 1444805 - RNA, 19 nt, Artificial Sequence
  Description of Artificial Sequence: Synthetic oligonucleotide
  Antisense strand to SEQ ID NO: 1444804
uaucccaaccagcacguca

SEQ ID NO: 1444806 - RNA, 19 nt, Artificial Sequence
  Description of Artificial Sequence: Synthetic oligonucleotide
  Sense strand starting at position 148 of SEQ ID NO: 1243832
acgugcugguugggauaaa

SEQ ID NO: 1444807 - RNA, 19 nt, Artificial Sequence
  Description of Artificial Sequence: Synthetic oligonucleotide
  Antisense strand to SEQ ID NO: 1444806
uuuaucccaaccagcacgu

SEQ ID NO: 1444808 - RNA, 19 nt, Artificial Sequence
  Description of Artificial Sequence: Synthetic oligonucleotide
  Sense strand starting at position 227 of SEQ ID NO: 1243832
gugacucagcagugauaaa

SEQ ID NO: 1444809 - RNA, 19 nt, Artificial Sequence
  Description of Artificial Sequence: Synthetic oligonucleotide
  Antisense strand to SEQ ID NO: 1444808
uuuaucacugcugagucac

SEQ ID NO: 1444810 - RNA, 19 nt, Artificial Sequence
  Description of Artificial Sequence: Synthetic oligonucleotide
  Sense strand starting at position 255 of SEQ ID NO: 1243832
cuggcagagucuuguagag

SEQ ID NO: 1444811 - RNA, 19 nt, Artificial Sequence
  Description of Artificial Sequence: Synthetic oligonucleotide
  Antisense strand to SEQ ID NO: 1444810
cucuacaagacucugccag

SEQ ID NO: 1444812 - RNA, 19 nt, Artificial Sequence
  Description of Artificial Sequence: Synthetic oligonucleotide
  Sense strand starting at position 257 of SEQ ID NO: 1243832
ggcagagucuuguagagga

SEQ ID NO: 1444813 - RNA, 19 nt, Artificial Sequence
  Description of Artificial Sequence: Synthetic oligonucleotide
  Antisense strand to SEQ ID NO: 1444812
uccucuacaagacucugcc

SEQ ID NO: 1444814 - RNA, 19 nt, Artificial Sequence
  Description of Artificial Sequence: Synthetic oligonucleotide
  Sense strand starting at position 261 of SEQ ID NO: 1243832
gagucuuguagaggaugga

SEQ ID NO: 1444815 - RNA, 19 nt, Artificial Sequence
  Description of Artificial Sequence: Synthetic oligonucleotide
  Antisense strand to SEQ ID NO: 1444814
uccauccucuacaagacuc

SEQ ID NO: 1444816 - RNA, 19 nt, Artificial Sequence
  Description of Artificial Sequence: Synthetic oligonucleotide
  Sense strand starting at position 336 of SEQ ID NO: 1243832
aagagagaugaguggcuua

SEQ ID NO: 1444817 - RNA, 19 nt, Artificial Sequence
  Description of Artificial Sequence: Synthetic oligonucleotide
  Antisense strand to SEQ ID NO: 1444816
uaagccacucaucucucuu

SEQ ID NO: 1444818 - RNA, 19 nt, Artificial Sequence
  Description of Artificial Sequence: Synthetic oligonucleotide
  Sense strand starting at position 386 of SEQ ID NO: 1243832
ggaggauucuaggagggaa

SEQ ID NO: 1444819 - RNA, 19 nt, Artificial Sequence
  Description of Artificial Sequence: Synthetic oligonucleotide
  Antisense strand to SEQ ID NO: 1444818
uucccuccuagaauccucc

SEQ ID NO: 1444820 - RNA, 19 nt, Artificial Sequence
  Description of Artificial Sequence: Synthetic oligonucleotide
  Sense strand starting at position 414 of SEQ ID NO: 1243832
aggucuuacuuugcccaaa

SEQ ID NO: 1444821 - RNA, 19 nt, Artificial Sequence
  Description of Artificial Sequence: Synthetic oligonucleotide
  Antisense strand to SEQ ID NO: 1444820
uuugggcaaaguaagaccu

SEQ ID NO: 1444822 - RNA, 19 nt, Artificial Sequence
  Description of Artificial Sequence: Synthetic oligonucleotide
  Sense strand starting at position 416 of SEQ ID NO: 1243832
gucuuacuuugcccaaaga

SEQ ID NO: 1444823 - RNA, 19 nt, Artificial Sequence
  Description of Artificial Sequence: Synthetic oligonucleotide
  Antisense strand to SEQ ID NO: 1444822
ucuuugggcaaaguaagac

SEQ ID NO: 1444824 - RNA, 19 nt, Artificial Sequence
  Description of Artificial Sequence: Synthetic oligonucleotide
  Sense strand starting at position 604 of SEQ ID NO: 1243832
gaggaagggucagauccua

SEQ ID NO: 1444825 - RNA, 19 nt, Artificial Sequence
  Description of Artificial Sequence: Synthetic oligonucleotide
  Antisense strand to SEQ ID NO: 1444824
uaggaucugacccuuccuc

SEQ ID NO: 1444826 - RNA, 19 nt, Artificial Sequence
  Description of Artificial Sequence: Synthetic oligonucleotide
  Sense strand starting at position 663 of SEQ ID NO: 1243832
ggcgucuagugguagcaau

SEQ ID NO: 1444827 - RNA, 19 nt, Artificial Sequence
  Description of Artificial Sequence: Synthetic oligonucleotide
  Antisense strand to SEQ ID NO: 1444826
auugcuaccacuagacgcc

SEQ ID NO: 1444828 - RNA, 19 nt, Artificial Sequence
  Description of Artificial Sequence: Synthetic oligonucleotide
  Sense strand starting at position 805 of SEQ ID NO: 1243832
ugguaucccucuccacaga

SEQ ID NO: 1444829 - RNA, 19 nt, Artificial Sequence
  Description of Artificial Sequence: Synthetic oligonucleotide
  Antisense strand to SEQ ID NO: 1444828
ucuguggagagggauacca

SEQ ID NO: 1444830 - RNA, 19 nt, Artificial Sequence
  Description of Artificial Sequence: Synthetic oligonucleotide
  Sense strand starting at position 827 of SEQ ID NO: 1243832
aggaguagcgugugggauu

SEQ ID NO: 1444831 - RNA, 19 nt, Artificial Sequence
  Description of Artificial Sequence: Synthetic oligonucleotide
  Antisense strand to SEQ ID NO: 1444830
aaucccacacgcuacuccu

SEQ ID NO: 1444832 - RNA, 19 nt, Artificial Sequence
  Description of Artificial Sequence: Synthetic oligonucleotide
  Sense strand starting at position 884 of SEQ ID NO: 1243832
gacugaggucauggcuaua

SEQ ID NO: 1444833 - RNA, 19 nt, Artificial Sequence
  Description of Artificial Sequence: Synthetic oligonucleotide
  Antisense strand to SEQ ID NO: 1444832
uauagccaugaccucaguc

SEQ ID NO: 1444834 - RNA, 19 nt, Artificial Sequence
  Description of Artificial Sequence: Synthetic oligonucleotide
  Sense strand starting at position 895 of SEQ ID NO: 1243832
uggcuauaccugcaugaau

SEQ ID NO: 1444835 - RNA, 19 nt, Artificial Sequence
  Description of Artificial Sequence: Synthetic oligonucleotide
  Antisense strand to SEQ ID NO: 1444834
auucaugcagguauagcca

SEQ ID NO: 1444836 - RNA, 19 nt, Artificial Sequence
  Description of Artificial Sequence: Synthetic oligonucleotide
  Sense strand starting at position 1039 of SEQ ID NO: 1243832
acuggaaggucacaagacu

SEQ ID NO: 1444837 - RNA, 19 nt, Artificial Sequence
  Description of Artificial Sequence: Synthetic oligonucleotide
  Antisense strand to SEQ ID NO: 1444836
agucuugugaccuuccagu

SEQ ID NO: 1444838 - RNA, 19 nt, Artificial Sequence
  Description of Artificial Sequence: Synthetic oligonucleotide
  Sense strand starting at position 2076 of SEQ ID NO: 1243832
gcaguugauccacagggau

SEQ ID NO: 1444839 - RNA, 19 nt, Artificial Sequence
  Description of Artificial Sequence: Synthetic oligonucleotide
  Antisense strand to SEQ ID NO: 1444838
aucccuguggaucaacugc

SEQ ID NO: 1444840 - RNA, 19 nt, Artificial Sequence
  Description of Artificial Sequence: Synthetic oligonucleotide
  Sense strand starting at position 2100 of SEQ ID NO: 1243832
ugucaaacucagcgaaacu

SEQ ID NO: 1444841 - RNA, 19 nt, Artificial Sequence
  Description of Artificial Sequence: Synthetic oligonucleotide
  Antisense strand to SEQ ID NO: 1444840
aguuucgcugaguuugaca

SEQ ID NO: 1444842 - RNA, 19 nt, Artificial Sequence
  Description of Artificial Sequence: Synthetic oligonucleotide
  Sense strand starting at position 2111 of SEQ ID NO: 1243832
gcgaaacuugcuuggcagu

SEQ ID NO: 1444843 - RNA, 19 nt, Artificial Sequence
  Description of Artificial Sequence: Synthetic oligonucleotide
  Antisense strand to SEQ ID NO: 1444842
acugccaagcaaguuucgc

SEQ ID NO: 1444844 - RNA, 19 nt, Artificial Sequence
  Description of Artificial Sequence: Synthetic oligonucleotide
  Sense strand starting at position 2112 of SEQ ID NO: 1243832
cgaaacuugcuuggcaguu

SEQ ID NO: 1444845 - RNA, 19 nt, Artificial Sequence
  Description of Artificial Sequence: Synthetic oligonucleotide
  Antisense strand to SEQ ID NO: 1444844
aacugccaagcaaguuucg

SEQ ID NO: 1444846 - RNA, 19 nt, Artificial Sequence
  Description of Artificial Sequence: Synthetic oligonucleotide
  Sense strand starting at position 2134 of SEQ ID NO: 1243832
gcaaguagcuaugggaaca

SEQ ID NO: 1444847 - RNA, 19 nt, Artificial Sequence
  Description of Artificial Sequence: Synthetic oligonucleotide
  Antisense strand to SEQ ID NO: 1444846
uguucccauagcuacuugc

SEQ ID NO: 1444848 - RNA, 19 nt, Artificial Sequence
  Description of Artificial Sequence: Synthetic oligonucleotide
  Sense strand starting at position 2304 of SEQ ID NO: 1243832
uccagucagcauugucauu

SEQ ID NO: 1444849 - RNA, 19 nt, Artificial Sequence
  Description of Artificial Sequence: Synthetic oligonucleotide
  Antisense strand to SEQ ID NO: 1444848
aaugacaaugcugacugga

SEQ ID NO: 1444850 - RNA, 19 nt, Artificial Sequence
  Description of Artificial Sequence: Synthetic oligonucleotide
  Sense strand starting at position 2343 of SEQ ID NO: 1243832
uuuccagcgucugagaacu

SEQ ID NO: 1444851 - RNA, 19 nt, Artificial Sequence
  Description of Artificial Sequence: Synthetic oligonucleotide
  Antisense strand to SEQ ID NO: 1444850
aguucucagacgcuggaaa

SEQ ID NO: 1444852 - RNA, 19 nt, Artificial Sequence
  Description of Artificial Sequence: Synthetic oligonucleotide
  Sense strand starting at position 2360 of SEQ ID NO: 1243832
cucagauggugacaagaaa

SEQ ID NO: 1444853 - RNA, 19 nt, Artificial Sequence
  Description of Artificial Sequence: Synthetic oligonucleotide
  Antisense strand to SEQ ID NO: 1444852
uuucuugucaccaucugag

SEQ ID NO: 1444854 - RNA, 19 nt, Artificial Sequence
  Description of Artificial Sequence: Synthetic oligonucleotide
  Sense strand starting at position 3220 of SEQ ID NO: 1243832
gggaguguuccagaucuac

SEQ ID NO: 1444855 - RNA, 19 nt, Artificial Sequence
  Description of Artificial Sequence: Synthetic oligonucleotide
  Antisense strand to SEQ ID NO: 1444854
guagaucuggaacacuccc

SEQ ID NO: 1444856 - RNA, 19 nt, Artificial Sequence
  Description of Artificial Sequence: Synthetic oligonucleotide
  Sense strand starting at position 3236 of SEQ ID NO: 1243832
uacgcuuaccuguggauau

SEQ ID NO: 1444857 - RNA, 19 nt, Artificial Sequence
  Description of Artificial Sequence: Synthetic oligonucleotide
  Antisense strand to SEQ ID NO: 1444856
auauccacagguaagcgua

SEQ ID NO: 1444858 - RNA, 19 nt, Artificial Sequence
  Description of Artificial Sequence: Synthetic oligonucleotide
  Sense strand starting at position 3237 of SEQ ID NO: 1243832
acgcuuaccuguggauaua

SEQ ID NO: 1444859 - RNA, 19 nt, Artificial Sequence
  Description of Artificial Sequence: Synthetic oligonucleotide
  Antisense strand to SEQ ID NO: 1444858
uauauccacagguaagcgu

SEQ ID NO: 1444860 - RNA, 19 nt, Artificial Sequence
  Description of Artificial Sequence: Synthetic oligonucleotide
  Sense strand starting at position 3649 of SEQ ID NO: 1243832
uccauaucuccaugcugga

SEQ ID NO: 1444861 - RNA, 19 nt, Artificial Sequence
  Description of Artificial Sequence: Synthetic oligonucleotide
  Antisense strand to SEQ ID NO: 1444860
uccagcauggagauaugga

SEQ ID NO: 1444862 - RNA, 19 nt, Artificial Sequence
  Description of Artificial Sequence: Synthetic oligonucleotide
  Sense strand starting at position 3652 of SEQ ID NO: 1243832
auaucuccaugcuggaaga

SEQ ID NO: 1444863 - RNA, 19 nt, Artificial Sequence
  Description of Artificial Sequence: Synthetic oligonucleotide
  Antisense strand to SEQ ID NO: 1444862
ucuuccagcauggagauau

SEQ ID NO: 1444864 - RNA, 19 nt, Artificial Sequence
  Description of Artificial Sequence: Synthetic oligonucleotide
  Sense strand starting at position 3733 of SEQ ID NO: 1243832
gacacuucugacgggcaga

SEQ ID NO: 1444865 - RNA, 19 nt, Artificial Sequence
  Description of Artificial Sequence: Synthetic oligonucleotide
  Antisense strand to SEQ ID NO: 1444864
ucugcccgucagaaguguc

SEQ ID NO: 1444866 - RNA, 19 nt, Artificial Sequence
  Description of Artificial Sequence: Synthetic oligonucleotide
  Sense strand starting at position 145 of SEQ ID NO: 1243833
ugacgugcugguugggaua

SEQ ID NO: 1444867 - RNA, 19 nt, Artificial Sequence
  Description of Artificial Sequence: Synthetic oligonucleotide
  Antisense strand to SEQ ID NO: 1444866
uaucccaaccagcacguca

SEQ ID NO: 1444868 - RNA, 19 nt, Artificial Sequence
  Description of Artificial Sequence: Synthetic oligonucleotide
  Sense strand starting at position 147 of SEQ ID NO: 1243833
acgugcugguugggauaaa

SEQ ID NO: 1444869 - RNA, 19 nt, Artificial Sequence
  Description of Artificial Sequence: Synthetic oligonucleotide
  Antisense strand to SEQ ID NO: 1444868
uuuaucccaaccagcacgu

SEQ ID NO: 1444870 - RNA, 19 nt, Artificial Sequence
  Description of Artificial Sequence: Synthetic oligonucleotide
  Sense strand starting at position 226 of SEQ ID NO: 1243833
gugacucagcagugauaaa

SEQ ID NO: 1444871 - RNA, 19 nt, Artificial Sequence
  Description of Artificial Sequence: Synthetic oligonucleotide
  Antisense strand to SEQ ID NO: 1444870
uuuaucacugcugagucac

SEQ ID NO: 1444872 - RNA, 19 nt, Artificial Sequence
  Description of Artificial Sequence: Synthetic oligonucleotide
  Sense strand starting at position 254 of SEQ ID NO: 1243833
cuggcagagucuuguagag

SEQ ID NO: 1444873 - RNA, 19 nt, Artificial Sequence
  Description of Artificial Sequence: Synthetic oligonucleotide
  Antisense strand to SEQ ID NO: 1444872
cucuacaagacucugccag

SEQ ID NO: 1444874 - RNA, 19 nt, Artificial Sequence
  Description of Artificial Sequence: Synthetic oligonucleotide
  Sense strand starting at position 256 of SEQ ID NO: 1243833
ggcagagucuuguagagga

SEQ ID NO: 1444875 - RNA, 19 nt, Artificial Sequence
  Description of Artificial Sequence: Synthetic oligonucleotide
  Antisense strand to SEQ ID NO: 1444874
uccucuacaagacucugcc

SEQ ID NO: 1444876 - RNA, 19 nt, Artificial Sequence
  Description of Artificial Sequence: Synthetic oligonucleotide
  Sense strand starting at position 260 of SEQ ID NO: 1243833
gagucuuguagaggaugga

SEQ ID NO: 1444877 - RNA, 19 nt, Artificial Sequence
  Description of Artificial Sequence: Synthetic oligonucleotide
  Antisense strand to SEQ ID NO: 1444876
uccauccucuacaagacuc

SEQ ID NO: 1444878 - RNA, 19 nt, Artificial Sequence
  Description of Artificial Sequence: Synthetic oligonucleotide
  Sense strand starting at position 335 of SEQ ID NO: 1243833
aagagagaugaguggcuua

SEQ ID NO: 1444879 - RNA, 19 nt, Artificial Sequence
  Description of Artificial Sequence: Synthetic oligonucleotide
  Antisense strand to SEQ ID NO: 1444878
uaagccacucaucucucuu

SEQ ID NO: 1444880 - RNA, 19 nt, Artificial Sequence
  Description of Artificial Sequence: Synthetic oligonucleotide
  Sense strand starting at position 385 of SEQ ID NO: 1243833
ggaggauucuaggagggaa

SEQ ID NO: 1444881 - RNA, 19 nt, Artificial Sequence
  Description of Artificial Sequence: Synthetic oligonucleotide
  Antisense strand to SEQ ID NO: 1444880
uucccuccuagaauccucc

SEQ ID NO: 1444882 - RNA, 19 nt, Artificial Sequence
  Description of Artificial Sequence: Synthetic oligonucleotide
  Sense strand starting at position 413 of SEQ ID NO: 1243833
aggucuuacuuugcccaaa

SEQ ID NO: 1444883 - RNA, 19 nt, Artificial Sequence
  Description of Artificial Sequence: Synthetic oligonucleotide
  Antisense strand to SEQ ID NO: 1444882
uuugggcaaaguaagaccu

SEQ ID NO: 1444884 - RNA, 19 nt, Artificial Sequence
  Description of Artificial Sequence: Synthetic oligonucleotide
  Sense strand starting at position 415 of SEQ ID NO: 1243833
gucuuacuuugcccaaaga

SEQ ID NO: 1444885 - RNA, 19 nt, Artificial Sequence
  Description of Artificial Sequence: Synthetic oligonucleotide
  Antisense strand to SEQ ID NO: 1444884
ucuuugggcaaaguaagac

SEQ ID NO: 1444886 - RNA, 19 nt, Artificial Sequence
  Description of Artificial Sequence: Synthetic oligonucleotide
  Sense strand starting at position 603 of SEQ ID NO: 1243833
gaggaagggucagauccua

SEQ ID NO: 1444887 - RNA, 19 nt, Artificial Sequence
  Description of Artificial Sequence: Synthetic oligonucleotide
  Antisense strand to SEQ ID NO: 1444886
uaggaucugacccuuccuc

SEQ ID NO: 1444888 - RNA, 19 nt, Artificial Sequence
  Description of Artificial Sequence: Synthetic oligonucleotide
  Sense strand starting at position 662 of SEQ ID NO: 1243833
ggcgucuagugguagcaau

SEQ ID NO: 1444889 - RNA, 19 nt, Artificial Sequence
  Description of Artificial Sequence: Synthetic oligonucleotide
  Antisense strand to SEQ ID NO: 1444888
auugcuaccacuagacgcc

SEQ ID NO: 1444890 - RNA, 19 nt, Artificial Sequence
  Description of Artificial Sequence: Synthetic oligonucleotide
  Sense strand starting at position 804 of SEQ ID NO: 1243833
ugguaucccucuccacaga

SEQ ID NO: 1444891 - RNA, 19 nt, Artificial Sequence
  Description of Artificial Sequence: Synthetic oligonucleotide
  Antisense strand to SEQ ID NO: 1444890
ucuguggagagggauacca

SEQ ID NO: 1444892 - RNA, 19 nt, Artificial Sequence
  Description of Artificial Sequence: Synthetic oligonucleotide
  Sense strand starting at position 826 of SEQ ID NO: 1243833
aggaguagcgugugggauu

SEQ ID NO: 1444893 - RNA, 19 nt, Artificial Sequence
  Description of Artificial Sequence: Synthetic oligonucleotide
  Antisense strand to SEQ ID NO: 1444892
aaucccacacgcuacuccu

SEQ ID NO: 1444894 - RNA, 19 nt, Artificial Sequence
  Description of Artificial Sequence: Synthetic oligonucleotide
  Sense strand starting at position 883 of SEQ ID NO: 1243833
gacugaggucauggcuaua

SEQ ID NO: 1444895 - RNA, 19 nt, Artificial Sequence
  Description of Artificial Sequence: Synthetic oligonucleotide
  Antisense strand to SEQ ID NO: 1444894
uauagccaugaccucaguc

SEQ ID NO: 1444896 - RNA, 19 nt, Artificial Sequence
  Description of Artificial Sequence: Synthetic oligonucleotide
  Sense strand starting at position 894 of SEQ ID NO: 1243833
uggcuauaccugcaugaau

SEQ ID NO: 1444897 - RNA, 19 nt, Artificial Sequence
  Description of Artificial Sequence: Synthetic oligonucleotide
  Antisense strand to SEQ ID NO: 1444896
auucaugcagguauagcca

SEQ ID NO: 1444898 - RNA, 19 nt, Artificial Sequence
  Description of Artificial Sequence: Synthetic oligonucleotide
  Sense strand starting at position 1038 of SEQ ID NO: 1243833
acuggaaggucacaagacu

SEQ ID NO: 1444899 - RNA, 19 nt, Artificial Sequence
  Description of Artificial Sequence: Synthetic oligonucleotide
  Antisense strand to SEQ ID NO: 1444898
agucuugugaccuuccagu

SEQ ID NO: 1444900 - RNA, 19 nt, Artificial Sequence
  Description of Artificial Sequence: Synthetic oligonucleotide
  Sense strand starting at position 2075 of SEQ ID NO: 1243833
gcaguugauccacagggau

SEQ ID NO: 1444901 - RNA, 19 nt, Artificial Sequence
  Description of Artificial Sequence: Synthetic oligonucleotide
  Antisense strand to SEQ ID NO: 1444900
aucccuguggaucaacugc

SEQ ID NO: 1444902 - RNA, 19 nt, Artificial Sequence
  Description of Artificial Sequence: Synthetic oligonucleotide
  Sense strand starting at position 2099 of SEQ ID NO: 1243833
ugucaaacucagcgaaacu

SEQ ID NO: 1444903 - RNA, 19 nt, Artificial Sequence
  Description of Artificial Sequence: Synthetic oligonucleotide
  Antisense strand to SEQ ID NO: 1444902
aguuucgcugaguuugaca

SEQ ID NO: 1444904 - RNA, 19 nt, Artificial Sequence
  Description of Artificial Sequence: Synthetic oligonucleotide
  Sense strand starting at position 2110 of SEQ ID NO: 1243833
gcgaaacuugcuuggcagu

SEQ ID NO: 1444905 - RNA, 19 nt, Artificial Sequence
  Description of Artificial Sequence: Synthetic oligonucleotide
  Antisense strand to SEQ ID NO: 1444904
acugccaagcaaguuucgc

SEQ ID NO: 1444906 - RNA, 19 nt, Artificial Sequence
  Description of Artificial Sequence: Synthetic oligonucleotide
  Sense strand starting at position 2111 of SEQ ID NO: 1243833
cgaaacuugcuuggcaguu

SEQ ID NO: 1444907 - RNA, 19 nt, Artificial Sequence
  Description of Artificial Sequence: Synthetic oligonucleotide
  Antisense strand to SEQ ID NO: 1444906
aacugccaagcaaguuucg

SEQ ID NO: 1444908 - RNA, 19 nt, Artificial Sequence
  Description of Artificial Sequence: Synthetic oligonucleotide
  Sense strand starting at position 2133 of SEQ ID NO: 1243833
gcaaguagcuaugggaaca

SEQ ID NO: 1444909 - RNA, 19 nt, Artificial Sequence
  Description of Artificial Sequence: Synthetic oligonucleotide
  Antisense strand to SEQ ID NO: 1444908
uguucccauagcuacuugc

SEQ ID NO: 1444910 - RNA, 19 nt, Artificial Sequence
  Description of Artificial Sequence: Synthetic oligonucleotide
  Sense strand starting at position 2303 of SEQ ID NO: 1243833
uccagucagcauugucauu

SEQ ID NO: 1444911 - RNA, 19 nt, Artificial Sequence
  Description of Artificial Sequence: Synthetic oligonucleotide
  Antisense strand to SEQ ID NO: 1444910
aaugacaaugcugacugga

SEQ ID NO: 1444912 - RNA, 19 nt, Artificial Sequence
  Description of Artificial Sequence: Synthetic oligonucleotide
  Sense strand starting at position 2342 of SEQ ID NO: 1243833
uuuccagcgucugagaacu

SEQ ID NO: 1444913 - RNA, 19 nt, Artificial Sequence
  Description of Artificial Sequence: Synthetic oligonucleotide
  Antisense strand to SEQ ID NO: 1444912
aguucucagacgcuggaaa

SEQ ID NO: 1444914 - RNA, 19 nt, Artificial Sequence
  Description of Artificial Sequence: Synthetic oligonucleotide
  Sense strand starting at position 2359 of SEQ ID NO: 1243833
cucagauggugacaagaaa

SEQ ID NO: 1444915 - RNA, 19 nt, Artificial Sequence
  Description of Artificial Sequence: Synthetic oligonucleotide
  Antisense strand to SEQ ID NO: 1444914
uuucuugucaccaucugag

SEQ ID NO: 1444916 - RNA, 19 nt, Artificial Sequence
  Description of Artificial Sequence: Synthetic oligonucleotide
  Sense strand starting at position 3219 of SEQ ID NO: 1243833
gggaguguuccagaucuac

SEQ ID NO: 1444917 - RNA, 19 nt, Artificial Sequence
  Description of Artificial Sequence: Synthetic oligonucleotide
  Antisense strand to SEQ ID NO: 1444916
guagaucuggaacacuccc

SEQ ID NO: 1444918 - RNA, 19 nt, Artificial Sequence
  Description of Artificial Sequence: Synthetic oligonucleotide
  Sense strand starting at position 3235 of SEQ ID NO: 1243833
uacgcuuaccuguggauau

SEQ ID NO: 1444919 - RNA, 19 nt, Artificial Sequence
  Description of Artificial Sequence: Synthetic oligonucleotide
  Antisense strand to SEQ ID NO: 1444918
auauccacagguaagcgua

SEQ ID NO: 1444920 - RNA, 19 nt, Artificial Sequence
  Description of Artificial Sequence: Synthetic oligonucleotide
  Sense strand starting at position 3236 of SEQ ID NO: 1243833
acgcuuaccuguggauaua

SEQ ID NO: 1444921 - RNA, 19 nt, Artificial Sequence
  Description of Artificial Sequence: Synthetic oligonucleotide
  Antisense strand to SEQ ID NO: 1444920
uauauccacagguaagcgu

SEQ ID NO: 1444922 - RNA, 19 nt, Artificial Sequence
  Description of Artificial Sequence: Synthetic oligonucleotide
  Sense strand starting at position 3648 of SEQ ID NO: 1243833
uccauaucuccaugcugga

SEQ ID NO: 1444923 - RNA, 19 nt, Artificial Sequence
  Description of Artificial Sequence: Synthetic oligonucleotide
  Antisense strand to SEQ ID NO: 1444922
uccagcauggagauaugga

SEQ ID NO: 1444924 - RNA, 19 nt, Artificial Sequence
  Description of Artificial Sequence: Synthetic oligonucleotide
  Sense strand starting at position 3651 of SEQ ID NO: 1243833
auaucuccaugcuggaaga

SEQ ID NO: 1444925 - RNA, 19 nt, Artificial Sequence
  Description of Artificial Sequence: Synthetic oligonucleotide
  Antisense strand to SEQ ID NO: 1444924
ucuuccagcauggagauau

SEQ ID NO: 1444926 - RNA, 19 nt, Artificial Sequence
  Description of Artificial Sequence: Synthetic oligonucleotide
  Sense strand starting at position 3732 of SEQ ID NO: 1243833
gacacuucugacgggcaga

SEQ ID NO: 1444927 - RNA, 19 nt, Artificial Sequence
  Description of Artificial Sequence: Synthetic oligonucleotide
  Antisense strand to SEQ ID NO: 1444926
ucugcccgucagaaguguc

SEQ ID NO: 1444928 - RNA, 19 nt, Artificial Sequence
  Description of Artificial Sequence: Synthetic oligonucleotide
  Sense strand starting at position 203 of SEQ ID NO: 1243834
cacgcacaguccucagaga

SEQ ID NO: 1444929 - RNA, 19 nt, Artificial Sequence
  Description of Artificial Sequence: Synthetic oligonucleotide
  Antisense strand to SEQ ID NO: 1444928
ucucugaggacugugcgug

SEQ ID NO: 1444930 - RNA, 19 nt, Artificial Sequence
  Description of Artificial Sequence: Synthetic oligonucleotide
  Sense strand starting at position 204 of SEQ ID NO: 1243834
acgcacaguccucagagau

SEQ ID NO: 1444931 - RNA, 19 nt, Artificial Sequence
  Description of Artificial Sequence: Synthetic oligonucleotide
  Antisense strand to SEQ ID NO: 1444930
aucucugaggacugugcgu

SEQ ID NO: 1444932 - RNA, 19 nt, Artificial Sequence
  Description of Artificial Sequence: Synthetic oligonucleotide
  Sense strand starting at position 447 of SEQ ID NO: 1243834
ccacuuccacccugagagu

SEQ ID NO: 1444933 - RNA, 19 nt, Artificial Sequence
  Description of Artificial Sequence: Synthetic oligonucleotide
  Antisense strand to SEQ ID NO: 1444932
acucucaggguggaagugg

SEQ ID NO: 1444934 - RNA, 19 nt, Artificial Sequence
  Description of Artificial Sequence: Synthetic oligonucleotide
  Sense strand starting at position 793 of SEQ ID NO: 1243834
ugggacuguuccucugaga

SEQ ID NO: 1444935 - RNA, 19 nt, Artificial Sequence
  Description of Artificial Sequence: Synthetic oligonucleotide
  Antisense strand to SEQ ID NO: 1444934
ucucagaggaacaguccca

SEQ ID NO: 1444936 - RNA, 19 nt, Artificial Sequence
  Description of Artificial Sequence: Synthetic oligonucleotide
  Sense strand starting at position 796 of SEQ ID NO: 1243834
gacuguuccucugagaagg

SEQ ID NO: 1444937 - RNA, 19 nt, Artificial Sequence
  Description of Artificial Sequence: Synthetic oligonucleotide
  Antisense strand to SEQ ID NO: 1444936
ccuucucagaggaacaguc

SEQ ID NO: 1444938 - RNA, 19 nt, Artificial Sequence
  Description of Artificial Sequence: Synthetic oligonucleotide
  Sense strand starting at position 798 of SEQ ID NO: 1243834
cuguuccucugagaaggaa

SEQ ID NO: 1444939 - RNA, 19 nt, Artificial Sequence
  Description of Artificial Sequence: Synthetic oligonucleotide
  Antisense strand to SEQ ID NO: 1444938
uuccuucucagaggaacag

SEQ ID NO: 1444940 - RNA, 19 nt, Artificial Sequence
  Description of Artificial Sequence: Synthetic oligonucleotide
  Sense strand starting at position 826 of SEQ ID NO: 1243834
aagggauucucccggugga

SEQ ID NO: 1444941 - RNA, 19 nt, Artificial Sequence
  Description of Artificial Sequence: Synthetic oligonucleotide
  Antisense strand to SEQ ID NO: 1444940
uccaccgggagaaucccuu

SEQ ID NO: 1444942 - RNA, 19 nt, Artificial Sequence
  Description of Artificial Sequence: Synthetic oligonucleotide
  Sense strand starting at position 829 of SEQ ID NO: 1243834
ggauucucccgguggagaa

SEQ ID NO: 1444943 - RNA, 19 nt, Artificial Sequence
  Description of Artificial Sequence: Synthetic oligonucleotide
  Antisense strand to SEQ ID NO: 1444942
uucuccaccgggagaaucc

SEQ ID NO: 1444944 - RNA, 19 nt, Artificial Sequence
  Description of Artificial Sequence: Synthetic oligonucleotide
  Sense strand starting at position 1236 of SEQ ID NO: 1243834
ccguccucguaguaaauga

SEQ ID NO: 1444945 - RNA, 19 nt, Artificial Sequence
  Description of Artificial Sequence: Synthetic oligonucleotide
  Antisense strand to SEQ ID NO: 1444944
ucauuuacuacgaggacgg

SEQ ID NO: 1444946 - RNA, 19 nt, Artificial Sequence
  Description of Artificial Sequence: Synthetic oligonucleotide
  Sense strand starting at position 1273 of SEQ ID NO: 1243834
cgagcugccucagguagau

SEQ ID NO: 1444947 - RNA, 19 nt, Artificial Sequence
  Description of Artificial Sequence: Synthetic oligonucleotide
  Antisense strand to SEQ ID NO: 1444946
aucuaccugaggcagcucg

SEQ ID NO: 1444948 - RNA, 19 nt, Artificial Sequence
  Description of Artificial Sequence: Synthetic oligonucleotide
  Sense strand starting at position 1483 of SEQ ID NO: 1243834
gcugacaugucgccaaaga

SEQ ID NO: 1444949 - RNA, 19 nt, Artificial Sequence
  Description of Artificial Sequence: Synthetic oligonucleotide
  Antisense strand to SEQ ID NO: 1444948
ucuuuggcgacaugucagc

SEQ ID NO: 1444950 - RNA, 19 nt, Artificial Sequence
  Description of Artificial Sequence: Synthetic oligonucleotide
  Sense strand starting at position 1484 of SEQ ID NO: 1243834
cugacaugucgccaaagac

SEQ ID NO: 1444951 - RNA, 19 nt, Artificial Sequence
  Description of Artificial Sequence: Synthetic oligonucleotide
  Antisense strand to SEQ ID NO: 1444950
gucuuuggcgacaugucag

SEQ ID NO: 1444952 - RNA, 19 nt, Artificial Sequence
  Description of Artificial Sequence: Synthetic oligonucleotide
  Sense strand starting at position 1562 of SEQ ID NO: 1243834
cuguccucguguuccgaga

SEQ ID NO: 1444953 - RNA, 19 nt, Artificial Sequence
  Description of Artificial Sequence: Synthetic oligonucleotide
  Antisense strand to SEQ ID NO: 1444952
ucucggaacacgaggacag

SEQ ID NO: 1444954 - RNA, 19 nt, Artificial Sequence
  Description of Artificial Sequence: Synthetic oligonucleotide
  Sense strand starting at position 1566 of SEQ ID NO: 1243834
ccucguguuccgagacugu

SEQ ID NO: 1444955 - RNA, 19 nt, Artificial Sequence
  Description of Artificial Sequence: Synthetic oligonucleotide
  Antisense strand to SEQ ID NO: 1444954
acagucucggaacacgagg

SEQ ID NO: 1444956 - RNA, 19 nt, Artificial Sequence
  Description of Artificial Sequence: Synthetic oligonucleotide
  Sense strand starting at position 1584 of SEQ ID NO: 1243834
ugggcuucuuccucccaaa

SEQ ID NO: 1444957 - RNA, 19 nt, Artificial Sequence
  Description of Artificial Sequence: Synthetic oligonucleotide
  Antisense strand to SEQ ID NO: 1444956
uuugggaggaagaagccca

SEQ ID NO: 1444958 - RNA, 19 nt, Artificial Sequence
  Description of Artificial Sequence: Synthetic oligonucleotide
  Sense strand starting at position 1665 of SEQ ID NO: 1243834
uuaaaugaguccucagaca

SEQ ID NO: 1444959 - RNA, 19 nt, Artificial Sequence
  Description of Artificial Sequence: Synthetic oligonucleotide
  Antisense strand to SEQ ID NO: 1444958
ugucugaggacucauuuaa

SEQ ID NO: 1444960 - RNA, 19 nt, Artificial Sequence
  Description of Artificial Sequence: Synthetic oligonucleotide
  Sense strand starting at position 2483 of SEQ ID NO: 1243834
ggcgggaggucugagguau

SEQ ID NO: 1444961 - RNA, 19 nt, Artificial Sequence
  Description of Artificial Sequence: Synthetic oligonucleotide
  Antisense strand to SEQ ID NO: 1444960
auaccucagaccucccgcc

SEQ ID NO: 1444962 - RNA, 19 nt, Artificial Sequence
  Description of Artificial Sequence: Synthetic oligonucleotide
  Sense strand starting at position 2606 of SEQ ID NO: 1243834
gugacugaguccucuggga

SEQ ID NO: 1444963 - RNA, 19 nt, Artificial Sequence
  Description of Artificial Sequence: Synthetic oligonucleotide
  Antisense strand to SEQ ID NO: 1444962
ucccagaggacucagucac

SEQ ID NO: 1444964 - RNA, 19 nt, Artificial Sequence
  Description of Artificial Sequence: Synthetic oligonucleotide
  Sense strand starting at position 3084 of SEQ ID NO: 1243834
gagacgugugcguguggau

SEQ ID NO: 1444965 - RNA, 19 nt, Artificial Sequence
  Description of Artificial Sequence: Synthetic oligonucleotide
  Antisense strand to SEQ ID NO: 1444964
auccacacgcacacgucuc

SEQ ID NO: 1444966 - RNA, 19 nt, Artificial Sequence
  Description of Artificial Sequence: Synthetic oligonucleotide
  Sense strand starting at position 3572 of SEQ ID NO: 1243834
ccaugcaugugugcagaga

SEQ ID NO: 1444967 - RNA, 19 nt, Artificial Sequence
  Description of Artificial Sequence: Synthetic oligonucleotide
  Antisense strand to SEQ ID NO: 1444966
ucucugcacacaugcaugg

SEQ ID NO: 1444968 - RNA, 19 nt, Artificial Sequence
  Description of Artificial Sequence: Synthetic oligonucleotide
  Sense strand starting at position 3608 of SEQ ID NO: 1243834
gcgugugugcagagaugga

SEQ ID NO: 1444969 - RNA, 19 nt, Artificial Sequence
  Description of Artificial Sequence: Synthetic oligonucleotide
  Antisense strand to SEQ ID NO: 1444968
uccaucucugcacacacgc

SEQ ID NO: 1444970 - RNA, 19 nt, Artificial Sequence
  Description of Artificial Sequence: Synthetic oligonucleotide
  Sense strand starting at position 3724 of SEQ ID NO: 1243834
gcgcgugauuccacgcaug

SEQ ID NO: 1444971 - RNA, 19 nt, Artificial Sequence
  Description of Artificial Sequence: Synthetic oligonucleotide
  Antisense strand to SEQ ID NO: 1444970
caugcguggaaucacgcgc

SEQ ID NO: 1444972 - RNA, 19 nt, Artificial Sequence
  Description of Artificial Sequence: Synthetic oligonucleotide
  Sense strand starting at position 3726 of SEQ ID NO: 1243834
gcgugauuccacgcaugug

SEQ ID NO: 1444973 - RNA, 19 nt, Artificial Sequence
  Description of Artificial Sequence: Synthetic oligonucleotide
  Antisense strand to SEQ ID NO: 1444972
cacaugcguggaaucacgc

SEQ ID NO: 1444974 - RNA, 19 nt, Artificial Sequence
  Description of Artificial Sequence: Synthetic oligonucleotide
  Sense strand starting at position 3727 of SEQ ID NO: 1243834
cgugauuccacgcaugugu

SEQ ID NO: 1444975 - RNA, 19 nt, Artificial Sequence
  Description of Artificial Sequence: Synthetic oligonucleotide
  Antisense strand to SEQ ID NO: 1444974
acacaugcguggaaucacg

SEQ ID NO: 1444976 - RNA, 19 nt, Artificial Sequence
  Description of Artificial Sequence: Synthetic oligonucleotide
  Sense strand starting at position 3965 of SEQ ID NO: 1243834
acgcguguguacagagaua

SEQ ID NO: 1444977 - RNA, 19 nt, Artificial Sequence
  Description of Artificial Sequence: Synthetic oligonucleotide
  Antisense strand to SEQ ID NO: 1444976
uaucucuguacacacgcgu

SEQ ID NO: 1444978 - RNA, 19 nt, Artificial Sequence
  Description of Artificial Sequence: Synthetic oligonucleotide
  Sense strand starting at position 16 of SEQ ID NO: 1243835
cugccagauccgcgaacaa

SEQ ID NO: 1444979 - RNA, 19 nt, Artificial Sequence
  Description of Artificial Sequence: Synthetic oligonucleotide
  Antisense strand to SEQ ID NO: 1444978
uuguucgcggaucuggcag

SEQ ID NO: 1444980 - RNA, 19 nt, Artificial Sequence
  Description of Artificial Sequence: Synthetic oligonucleotide
  Sense strand starting at position 63 of SEQ ID NO: 1243835
ucagcauuccgcuuggcau

SEQ ID NO: 1444981 - RNA, 19 nt, Artificial Sequence
  Description of Artificial Sequence: Synthetic oligonucleotide
  Antisense strand to SEQ ID NO: 1444980
augccaagcggaaugcuga

SEQ ID NO: 1444982 - RNA, 19 nt, Artificial Sequence
  Description of Artificial Sequence: Synthetic oligonucleotide
  Sense strand starting at position 138 of SEQ ID NO: 1243835
gggcuuaguccuugcuucu

SEQ ID NO: 1444983 - RNA, 19 nt, Artificial Sequence
  Description of Artificial Sequence: Synthetic oligonucleotide
  Antisense strand to SEQ ID NO: 1444982
agaagcaaggacuaagccc

SEQ ID NO: 1444984 - RNA, 19 nt, Artificial Sequence
  Description of Artificial Sequence: Synthetic oligonucleotide
  Sense strand starting at position 422 of SEQ ID NO: 1243835
gcuugaaauccucagucuc

SEQ ID NO: 1444985 - RNA, 19 nt, Artificial Sequence
  Description of Artificial Sequence: Synthetic oligonucleotide
  Antisense strand to SEQ ID NO: 1444984
gagacugaggauuucaagc

SEQ ID NO: 1444986 - RNA, 19 nt, Artificial Sequence
  Description of Artificial Sequence: Synthetic oligonucleotide
  Sense strand starting at position 442 of SEQ ID NO: 1243835
cccguuccuccagggauaa

SEQ ID NO: 1444987 - RNA, 19 nt, Artificial Sequence
  Description of Artificial Sequence: Synthetic oligonucleotide
  Antisense strand to SEQ ID NO: 1444986
uuaucccuggaggaacggg

SEQ ID NO: 1444988 - RNA, 19 nt, Artificial Sequence
  Description of Artificial Sequence: Synthetic oligonucleotide
  Sense strand starting at position 443 of SEQ ID NO: 1243835
ccguuccuccagggauaaa

SEQ ID NO: 1444989 - RNA, 19 nt, Artificial Sequence
  Description of Artificial Sequence: Synthetic oligonucleotide
  Antisense strand to SEQ ID NO: 1444988
uuuaucccuggaggaacgg

SEQ ID NO: 1444990 - RNA, 19 nt, Artificial Sequence
  Description of Artificial Sequence: Synthetic oligonucleotide
  Sense strand starting at position 464 of SEQ ID NO: 1243835
ccaaauuccuagucuguca

SEQ ID NO: 1444991 - RNA, 19 nt, Artificial Sequence
  Description of Artificial Sequence: Synthetic oligonucleotide
  Antisense strand to SEQ ID NO: 1444990
ugacagacuaggaauuugg

SEQ ID NO: 1444992 - RNA, 19 nt, Artificial Sequence
  Description of Artificial Sequence: Synthetic oligonucleotide
  Sense strand starting at position 561 of SEQ ID NO: 1243835
guccacuucuuguuccaga

SEQ ID NO: 1444993 - RNA, 19 nt, Artificial Sequence
  Description of Artificial Sequence: Synthetic oligonucleotide
  Antisense strand to SEQ ID NO: 1444992
ucuggaacaagaaguggac

SEQ ID NO: 1444994 - RNA, 19 nt, Artificial Sequence
  Description of Artificial Sequence: Synthetic oligonucleotide
  Sense strand starting at position 598 of SEQ ID NO: 1243835
acugccuuguucuuaguga

SEQ ID NO: 1444995 - RNA, 19 nt, Artificial Sequence
  Description of Artificial Sequence: Synthetic oligonucleotide
  Antisense strand to SEQ ID NO: 1444994
ucacuaagaacaaggcagu

SEQ ID NO: 1444996 - RNA, 19 nt, Artificial Sequence
  Description of Artificial Sequence: Synthetic oligonucleotide
  Sense strand starting at position 711 of SEQ ID NO: 1243835
gccugaguccuagaggaac

SEQ ID NO: 1444997 - RNA, 19 nt, Artificial Sequence
  Description of Artificial Sequence: Synthetic oligonucleotide
  Antisense strand to SEQ ID NO: 1444996
guuccucuaggacucaggc

SEQ ID NO: 1444998 - RNA, 19 nt, Artificial Sequence
  Description of Artificial Sequence: Synthetic oligonucleotide
  Sense strand starting at position 743 of SEQ ID NO: 1243835
ugcuaugacccagaguuua

SEQ ID NO: 1444999 - RNA, 19 nt, Artificial Sequence
  Description of Artificial Sequence: Synthetic oligonucleotide
  Antisense strand to SEQ ID NO: 1444998
uaaacucugggucauagca

SEQ ID NO: 1445000 - RNA, 19 nt, Artificial Sequence
  Description of Artificial Sequence: Synthetic oligonucleotide
  Sense strand starting at position 788 of SEQ ID NO: 1243835
gagggcaugugucugauga

SEQ ID NO: 1445001 - RNA, 19 nt, Artificial Sequence
  Description of Artificial Sequence: Synthetic oligonucleotide
  Antisense strand to SEQ ID NO: 1445000
ucaucagacacaugcccuc

SEQ ID NO: 1445002 - RNA, 19 nt, Artificial Sequence
  Description of Artificial Sequence: Synthetic oligonucleotide
  Sense strand starting at position 798 of SEQ ID NO: 1243835
gucugaugaggaugacagu

SEQ ID NO: 1445003 - RNA, 19 nt, Artificial Sequence
  Description of Artificial Sequence: Synthetic oligonucleotide
  Antisense strand to SEQ ID NO: 1445002
acugucauccucaucagac

SEQ ID NO: 1445004 - RNA, 19 nt, Artificial Sequence
  Description of Artificial Sequence: Synthetic oligonucleotide
  Sense strand starting at position 940 of SEQ ID NO: 1243835
gacauagucgcacacaacu

SEQ ID NO: 1445005 - RNA, 19 nt, Artificial Sequence
  Description of Artificial Sequence: Synthetic oligonucleotide
  Antisense strand to SEQ ID NO: 1445004
aguugugugcgacuauguc

SEQ ID NO: 1445006 - RNA, 19 nt, Artificial Sequence
  Description of Artificial Sequence: Synthetic oligonucleotide
  Sense strand starting at position 982 of SEQ ID NO: 1243835
gcuacugaccuuugggauu

SEQ ID NO: 1445007 - RNA, 19 nt, Artificial Sequence
  Description of Artificial Sequence: Synthetic oligonucleotide
  Antisense strand to SEQ ID NO: 1445006
aaucccaaaggucaguagc

SEQ ID NO: 1445008 - RNA, 19 nt, Artificial Sequence
  Description of Artificial Sequence: Synthetic oligonucleotide
  Sense strand starting at position 1115 of SEQ ID NO: 1243835
cucuauguucccggagcua

SEQ ID NO: 1445009 - RNA, 19 nt, Artificial Sequence
  Description of Artificial Sequence: Synthetic oligonucleotide
  Antisense strand to SEQ ID NO: 1445008
uagcuccgggaacauagag

SEQ ID NO: 1445010 - RNA, 19 nt, Artificial Sequence
  Description of Artificial Sequence: Synthetic oligonucleotide
  Sense strand starting at position 1270 of SEQ ID NO: 1243835
ugagcaggcaucugaauga

SEQ ID NO: 1445011 - RNA, 19 nt, Artificial Sequence
  Description of Artificial Sequence: Synthetic oligonucleotide
  Antisense strand to SEQ ID NO: 1445010
ucauucagaugccugcuca

SEQ ID NO: 1445012 - RNA, 19 nt, Artificial Sequence
  Description of Artificial Sequence: Synthetic oligonucleotide
  Sense strand starting at position 1274 of SEQ ID NO: 1243835
caggcaucugaaugagaca

SEQ ID NO: 1445013 - RNA, 19 nt, Artificial Sequence
  Description of Artificial Sequence: Synthetic oligonucleotide
  Antisense strand to SEQ ID NO: 1445012
ugucucauucagaugccug

SEQ ID NO: 1445014 - RNA, 19 nt, Artificial Sequence
  Description of Artificial Sequence: Synthetic oligonucleotide
  Sense strand starting at position 1735 of SEQ ID NO: 1243835
ggcgguaaagagugagaga

SEQ ID NO: 1445015 - RNA, 19 nt, Artificial Sequence
  Description of Artificial Sequence: Synthetic oligonucleotide
  Antisense strand to SEQ ID NO: 1445014
ucucucacucuuuaccgcc

SEQ ID NO: 1445016 - RNA, 19 nt, Artificial Sequence
  Description of Artificial Sequence: Synthetic oligonucleotide
  Sense strand starting at position 1841 of SEQ ID NO: 1243835
gguucuguaccugagagca

SEQ ID NO: 1445017 - RNA, 19 nt, Artificial Sequence
  Description of Artificial Sequence: Synthetic oligonucleotide
  Antisense strand to SEQ ID NO: 1445016
ugcucucagguacagaacc

SEQ ID NO: 1445018 - RNA, 19 nt, Artificial Sequence
  Description of Artificial Sequence: Synthetic oligonucleotide
  Sense strand starting at position 1959 of SEQ ID NO: 1243835
cgaggcuccuuggaggaaa

SEQ ID NO: 1445019 - RNA, 19 nt, Artificial Sequence
  Description of Artificial Sequence: Synthetic oligonucleotide
  Antisense strand to SEQ ID NO: 1445018
uuuccuccaaggagccucg

SEQ ID NO: 1445020 - RNA, 19 nt, Artificial Sequence
  Description of Artificial Sequence: Synthetic oligonucleotide
  Sense strand starting at position 2343 of SEQ ID NO: 1243835
gcaccuguccuaugaauga

SEQ ID NO: 1445021 - RNA, 19 nt, Artificial Sequence
  Description of Artificial Sequence: Synthetic oligonucleotide
  Antisense strand to SEQ ID NO: 1445020
ucauucauaggacaggugc

SEQ ID NO: 1445022 - RNA, 19 nt, Artificial Sequence
  Description of Artificial Sequence: Synthetic oligonucleotide
  Sense strand starting at position 2593 of SEQ ID NO: 1243835
aguccaggucuuggugaga

SEQ ID NO: 1445023 - RNA, 19 nt, Artificial Sequence
  Description of Artificial Sequence: Synthetic oligonucleotide
  Antisense strand to SEQ ID NO: 1445022
ucucaccaagaccuggacu

SEQ ID NO: 1445024 - RNA, 19 nt, Artificial Sequence
  Description of Artificial Sequence: Synthetic oligonucleotide
  Sense strand starting at position 2620 of SEQ ID NO: 1243835
uuccucaugcugugaaaga

SEQ ID NO: 1445025 - RNA, 19 nt, Artificial Sequence
  Description of Artificial Sequence: Synthetic oligonucleotide
  Antisense strand to SEQ ID NO: 1445024
ucuuucacagcaugaggaa

SEQ ID NO: 1445026 - RNA, 19 nt, Artificial Sequence
  Description of Artificial Sequence: Synthetic oligonucleotide
  Sense strand starting at position 2724 of SEQ ID NO: 1243835
ggaguucuuaacuguggga

SEQ ID NO: 1445027 - RNA, 19 nt, Artificial Sequence
  Description of Artificial Sequence: Synthetic oligonucleotide
  Antisense strand to SEQ ID NO: 1445026
ucccacaguuaagaacucc

SEQ ID NO: 1445028 - RNA, 19 nt, Artificial Sequence
  Description of Artificial Sequence: Synthetic oligonucleotide
  Sense strand starting at position 2726 of SEQ ID NO: 1243835
aguucuuaacugugggacu

SEQ ID NO: 1445029 - RNA, 19 nt, Artificial Sequence
  Description of Artificial Sequence: Synthetic oligonucleotide
  Antisense strand to SEQ ID NO: 1445028
agucccacaguuaagaacu

SEQ ID NO: 1445030 - RNA, 19 nt, Artificial Sequence
  Description of Artificial Sequence: Synthetic oligonucleotide
  Sense strand starting at position 2740 of SEQ ID NO: 1243835
ggacucugagugcguugaa

SEQ ID NO: 1445031 - RNA, 19 nt, Artificial Sequence
  Description of Artificial Sequence: Synthetic oligonucleotide
  Antisense strand to SEQ ID NO: 1445030
uucaacgcacucagagucc

SEQ ID NO: 1445032 - RNA, 19 nt, Artificial Sequence
  Description of Artificial Sequence: Synthetic oligonucleotide
  Sense strand starting at position 2741 of SEQ ID NO: 1243835
gacucugagugcguugaau

SEQ ID NO: 1445033 - RNA, 19 nt, Artificial Sequence
  Description of Artificial Sequence: Synthetic oligonucleotide
  Antisense strand to SEQ ID NO: 1445032
auucaacgcacucagaguc

SEQ ID NO: 1445034 - RNA, 19 nt, Artificial Sequence
  Description of Artificial Sequence: Synthetic oligonucleotide
  Sense strand starting at position 2743 of SEQ ID NO: 1243835
cucugagugcguugaauug

SEQ ID NO: 1445035 - RNA, 19 nt, Artificial Sequence
  Description of Artificial Sequence: Synthetic oligonucleotide
  Antisense strand to SEQ ID NO: 1445034
caauucaacgcacucagag

SEQ ID NO: 1445036 - RNA, 19 nt, Artificial Sequence
  Description of Artificial Sequence: Synthetic oligonucleotide
  Sense strand starting at position 2752 of SEQ ID NO: 1243835
cguugaauuguugucugca

SEQ ID NO: 1445037 - RNA, 19 nt, Artificial Sequence
  Description of Artificial Sequence: Synthetic oligonucleotide
  Antisense strand to SEQ ID NO: 1445036
ugcagacaacaauucaacg

SEQ ID NO: 1445038 - RNA, 19 nt, Artificial Sequence
  Description of Artificial Sequence: Synthetic oligonucleotide
  Sense strand starting at position 2753 of SEQ ID NO: 1243835
guugaauuguugucugcag

SEQ ID NO: 1445039 - RNA, 19 nt, Artificial Sequence
  Description of Artificial Sequence: Synthetic oligonucleotide
  Antisense strand to SEQ ID NO: 1445038
cugcagacaacaauucaac

SEQ ID NO: 1445040 - RNA, 19 nt, Artificial Sequence
  Description of Artificial Sequence: Synthetic oligonucleotide
  Sense strand starting at position 2755 of SEQ ID NO: 1243835
ugaauuguugucugcaggu

SEQ ID NO: 1445041 - RNA, 19 nt, Artificial Sequence
  Description of Artificial Sequence: Synthetic oligonucleotide
  Antisense strand to SEQ ID NO: 1445040
accugcagacaacaauuca

SEQ ID NO: 1445042 - RNA, 19 nt, Artificial Sequence
  Description of Artificial Sequence: Synthetic oligonucleotide
  Sense strand starting at position 2872 of SEQ ID NO: 1243835
gugcucaggaacugauaua

SEQ ID NO: 1445043 - RNA, 19 nt, Artificial Sequence
  Description of Artificial Sequence: Synthetic oligonucleotide
  Antisense strand to SEQ ID NO: 1445042
uauaucaguuccugagcac

SEQ ID NO: 1445044 - RNA, 19 nt, Artificial Sequence
  Description of Artificial Sequence: Synthetic oligonucleotide
  Sense strand starting at position 2935 of SEQ ID NO: 1243835
cagagaugcccuugugcag

SEQ ID NO: 1445045 - RNA, 19 nt, Artificial Sequence
  Description of Artificial Sequence: Synthetic oligonucleotide
  Antisense strand to SEQ ID NO: 1445044
cugcacaagggcaucucug

SEQ ID NO: 1445046 - RNA, 19 nt, Artificial Sequence
  Description of Artificial Sequence: Synthetic oligonucleotide
  Sense strand starting at position 3004 of SEQ ID NO: 1243835
agcugagcccucugaauuu

SEQ ID NO: 1445047 - RNA, 19 nt, Artificial Sequence
  Description of Artificial Sequence: Synthetic oligonucleotide
  Antisense strand to SEQ ID NO: 1445046
aaauucagagggcucagcu

SEQ ID NO: 1445048 - RNA, 19 nt, Artificial Sequence
  Description of Artificial Sequence: Synthetic oligonucleotide
  Sense strand starting at position 3223 of SEQ ID NO: 1243835
gguggucccucuuuagauc

SEQ ID NO: 1445049 - RNA, 19 nt, Artificial Sequence
  Description of Artificial Sequence: Synthetic oligonucleotide
  Antisense strand to SEQ ID NO: 1445048
gaucuaaagagggaccacc

SEQ ID NO: 1445050 - RNA, 19 nt, Artificial Sequence
  Description of Artificial Sequence: Synthetic oligonucleotide
  Sense strand starting at position 3335 of SEQ ID NO: 1243835
gguuucauccgaggaacag

SEQ ID NO: 1445051 - RNA, 19 nt, Artificial Sequence
  Description of Artificial Sequence: Synthetic oligonucleotide
  Antisense strand to SEQ ID NO: 1445050
cuguuccucggaugaaacc

SEQ ID NO: 1445052 - RNA, 19 nt, Artificial Sequence
  Description of Artificial Sequence: Synthetic oligonucleotide
  Sense strand starting at position 3376 of SEQ ID NO: 1243835
guucuuucuuguuuccaga

SEQ ID NO: 1445053 - RNA, 19 nt, Artificial Sequence
  Description of Artificial Sequence: Synthetic oligonucleotide
  Antisense strand to SEQ ID NO: 1445052
ucuggaaacaagaaagaac

SEQ ID NO: 1445054 - RNA, 19 nt, Artificial Sequence
  Description of Artificial Sequence: Synthetic oligonucleotide
  Sense strand starting at position 3386 of SEQ ID NO: 1243835
guuuccagauguuccaaau

SEQ ID NO: 1445055 - RNA, 19 nt, Artificial Sequence
  Description of Artificial Sequence: Synthetic oligonucleotide
  Antisense strand to SEQ ID NO: 1445054
auuuggaacaucuggaaac

SEQ ID NO: 1445056 - RNA, 19 nt, Artificial Sequence
  Description of Artificial Sequence: Synthetic oligonucleotide
  Sense strand starting at position 3564 of SEQ ID NO: 1243835
ggagucucaugguuuagga

SEQ ID NO: 1445057 - RNA, 19 nt, Artificial Sequence
  Description of Artificial Sequence: Synthetic oligonucleotide
  Antisense strand to SEQ ID NO: 1445056
uccuaaaccaugagacucc

SEQ ID NO: 1445058 - RNA, 19 nt, Artificial Sequence
  Description of Artificial Sequence: Synthetic oligonucleotide
  Sense strand starting at position 328 of SEQ ID NO: 1243836
gugguuauagucuaucaau

SEQ ID NO: 1445059 - RNA, 19 nt, Artificial Sequence
  Description of Artificial Sequence: Synthetic oligonucleotide
  Antisense strand to SEQ ID NO: 1445058
auugauagacuauaaccac

SEQ ID NO: 1445060 - RNA, 19 nt, Artificial Sequence
  Description of Artificial Sequence: Synthetic oligonucleotide
  Sense strand starting at position 350 of SEQ ID NO: 1243836
acuaguuuaucacuuuaga

SEQ ID NO: 1445061 - RNA, 19 nt, Artificial Sequence
  Description of Artificial Sequence: Synthetic oligonucleotide
  Antisense strand to SEQ ID NO: 1445060
ucuaaagugauaaacuagu

SEQ ID NO: 1445062 - RNA, 19 nt, Artificial Sequence
  Description of Artificial Sequence: Synthetic oligonucleotide
  Sense strand starting at position 683 of SEQ ID NO: 1243836
auguaaacagcuggagaaa

SEQ ID NO: 1445063 - RNA, 19 nt, Artificial Sequence
  Description of Artificial Sequence: Synthetic oligonucleotide
  Antisense strand to SEQ ID NO: 1445062
uuucuccagcuguuuacau

SEQ ID NO: 1445064 - RNA, 19 nt, Artificial Sequence
  Description of Artificial Sequence: Synthetic oligonucleotide
  Sense strand starting at position 886 of SEQ ID NO: 1243836
guugauagaggucaauucu

SEQ ID NO: 1445065 - RNA, 19 nt, Artificial Sequence
  Description of Artificial Sequence: Synthetic oligonucleotide
  Antisense strand to SEQ ID NO: 1445064
agaauugaccucuaucaac

SEQ ID NO: 1445066 - RNA, 19 nt, Artificial Sequence
  Description of Artificial Sequence: Synthetic oligonucleotide
  Sense strand starting at position 895 of SEQ ID NO: 1243836
ggucaauucugaucaaguu

SEQ ID NO: 1445067 - RNA, 19 nt, Artificial Sequence
  Description of Artificial Sequence: Synthetic oligonucleotide
  Antisense strand to SEQ ID NO: 1445066
aacuugaucagaauugacc

SEQ ID NO: 1445068 - RNA, 19 nt, Artificial Sequence
  Description of Artificial Sequence: Synthetic oligonucleotide
  Sense strand starting at position 896 of SEQ ID NO: 1243836
gucaauucugaucaaguua

SEQ ID NO: 1445069 - RNA, 19 nt, Artificial Sequence
  Description of Artificial Sequence: Synthetic oligonucleotide
  Antisense strand to SEQ ID NO: 1445068
uaacuugaucagaauugac

SEQ ID NO: 1445070 - RNA, 19 nt, Artificial Sequence
  Description of Artificial Sequence: Synthetic oligonucleotide
  Sense strand starting at position 970 of SEQ ID NO: 1243836
agauacaguuucuccagau

SEQ ID NO: 1445071 - RNA, 19 nt, Artificial Sequence
  Description of Artificial Sequence: Synthetic oligonucleotide
  Antisense strand to SEQ ID NO: 1445070
aucuggagaaacuguaucu

SEQ ID NO: 1445072 - RNA, 19 nt, Artificial Sequence
  Description of Artificial Sequence: Synthetic oligonucleotide
  Sense strand starting at position 971 of SEQ ID NO: 1243836
gauacaguuucuccagaug

SEQ ID NO: 1445073 - RNA, 19 nt, Artificial Sequence
  Description of Artificial Sequence: Synthetic oligonucleotide
  Antisense strand to SEQ ID NO: 1445072
caucuggagaaacuguauc

SEQ ID NO: 1445074 - RNA, 19 nt, Artificial Sequence
  Description of Artificial Sequence: Synthetic oligonucleotide
  Sense strand starting at position 974 of SEQ ID NO: 1243836
acaguuucuccagauguca

SEQ ID NO: 1445075 - RNA, 19 nt, Artificial Sequence
  Description of Artificial Sequence: Synthetic oligonucleotide
  Antisense strand to SEQ ID NO: 1445074
ugacaucuggagaaacugu

SEQ ID NO: 1445076 - RNA, 19 nt, Artificial Sequence
  Description of Artificial Sequence: Synthetic oligonucleotide
  Sense strand starting at position 1033 of SEQ ID NO: 1243836
ccaauaggguuccuuuaau

SEQ ID NO: 1445077 - RNA, 19 nt, Artificial Sequence
  Description of Artificial Sequence: Synthetic oligonucleotide
  Antisense strand to SEQ ID NO: 1445076
auuaaaggaacccuauugg

SEQ ID NO: 1445078 - RNA, 19 nt, Artificial Sequence
  Description of Artificial Sequence: Synthetic oligonucleotide
  Sense strand starting at position 1292 of SEQ ID NO: 1243836
gugggaaauucaccgagaa

SEQ ID NO: 1445079 - RNA, 19 nt, Artificial Sequence
  Description of Artificial Sequence: Synthetic oligonucleotide
  Antisense strand to SEQ ID NO: 1445078
uucucggugaauuucccac

SEQ ID NO: 1445080 - RNA, 19 nt, Artificial Sequence
  Description of Artificial Sequence: Synthetic oligonucleotide
  Sense strand starting at position 2112 of SEQ ID NO: 1243836
ccggaaauugucgaagauu

SEQ ID NO: 1445081 - RNA, 19 nt, Artificial Sequence
  Description of Artificial Sequence: Synthetic oligonucleotide
  Antisense strand to SEQ ID NO: 1445080
aaucuucgacaauuuccgg

SEQ ID NO: 1445082 - RNA, 19 nt, Artificial Sequence
  Description of Artificial Sequence: Synthetic oligonucleotide
  Sense strand starting at position 2123 of SEQ ID NO: 1243836
cgaagauuaccggaagcua

SEQ ID NO: 1445083 - RNA, 19 nt, Artificial Sequence
  Description of Artificial Sequence: Synthetic oligonucleotide
  Antisense strand to SEQ ID NO: 1445082
uagcuuccgguaaucuucg

SEQ ID NO: 1445084 - RNA, 19 nt, Artificial Sequence
  Description of Artificial Sequence: Synthetic oligonucleotide
  Sense strand starting at position 2415 of SEQ ID NO: 1243836
gucuauugaguuuagauca

SEQ ID NO: 1445085 - RNA, 19 nt, Artificial Sequence
  Description of Artificial Sequence: Synthetic oligonucleotide
  Antisense strand to SEQ ID NO: 1445084
ugaucuaaacucaauagac

SEQ ID NO: 1445086 - RNA, 19 nt, Artificial Sequence
  Description of Artificial Sequence: Synthetic oligonucleotide
  Sense strand starting at position 2428 of SEQ ID NO: 1243836
agaucauucguccauucca

SEQ ID NO: 1445087 - RNA, 19 nt, Artificial Sequence
  Description of Artificial Sequence: Synthetic oligonucleotide
  Antisense strand to SEQ ID NO: 1445086
uggaauggacgaaugaucu

SEQ ID NO: 1445088 - RNA, 19 nt, Artificial Sequence
  Description of Artificial Sequence: Synthetic oligonucleotide
  Sense strand starting at position 2586 of SEQ ID NO: 1243836
uuauauggugccuauuaua

SEQ ID NO: 1445089 - RNA, 19 nt, Artificial Sequence
  Description of Artificial Sequence: Synthetic oligonucleotide
  Antisense strand to SEQ ID NO: 1445088
uauaauaggcaccauauaa

SEQ ID NO: 1445090 - RNA, 19 nt, Artificial Sequence
  Description of Artificial Sequence: Synthetic oligonucleotide
  Sense strand starting at position 2682 of SEQ ID NO: 1243836
gaguuugaaggauggguaa

SEQ ID NO: 1445091 - RNA, 19 nt, Artificial Sequence
  Description of Artificial Sequence: Synthetic oligonucleotide
  Antisense strand to SEQ ID NO: 1445090
uuacccauccuucaaacuc

SEQ ID NO: 1445092 - RNA, 19 nt, Artificial Sequence
  Description of Artificial Sequence: Synthetic oligonucleotide
  Sense strand starting at position 2743 of SEQ ID NO: 1243836
augggaucagucugcuaag

SEQ ID NO: 1445093 - RNA, 19 nt, Artificial Sequence
  Description of Artificial Sequence: Synthetic oligonucleotide
  Antisense strand to SEQ ID NO: 1445092
cuuagcagacugaucccau

SEQ ID NO: 1445094 - RNA, 19 nt, Artificial Sequence
  Description of Artificial Sequence: Synthetic oligonucleotide
  Sense strand starting at position 2744 of SEQ ID NO: 1243836
ugggaucagucugcuaaga

SEQ ID NO: 1445095 - RNA, 19 nt, Artificial Sequence
  Description of Artificial Sequence: Synthetic oligonucleotide
  Antisense strand to SEQ ID NO: 1445094
ucuuagcagacugauccca

SEQ ID NO: 1445096 - RNA, 19 nt, Artificial Sequence
  Description of Artificial Sequence: Synthetic oligonucleotide
  Sense strand starting at position 2773 of SEQ ID NO: 1243836
uggaaauaguuacuuaggu

SEQ ID NO: 1445097 - RNA, 19 nt, Artificial Sequence
  Description of Artificial Sequence: Synthetic oligonucleotide
  Antisense strand to SEQ ID NO: 1445096
accuaaguaacuauuucca

SEQ ID NO: 1445098 - RNA, 19 nt, Artificial Sequence
  Description of Artificial Sequence: Synthetic oligonucleotide
  Sense strand starting at position 2778 of SEQ ID NO: 1243836
auaguuacuuaggugaaga

SEQ ID NO: 1445099 - RNA, 19 nt, Artificial Sequence
  Description of Artificial Sequence: Synthetic oligonucleotide
  Antisense strand to SEQ ID NO: 1445098
ucuucaccuaaguaacuau

SEQ ID NO: 1445100 - RNA, 19 nt, Artificial Sequence
  Description of Artificial Sequence: Synthetic oligonucleotide
  Sense strand starting at position 2779 of SEQ ID NO: 1243836
uaguuacuuaggugaagag

SEQ ID NO: 1445101 - RNA, 19 nt, Artificial Sequence
  Description of Artificial Sequence: Synthetic oligonucleotide
  Antisense strand to SEQ ID NO: 1445100
cucuucaccuaaguaacua

SEQ ID NO: 1445102 - RNA, 19 nt, Artificial Sequence
  Description of Artificial Sequence: Synthetic oligonucleotide
  Sense strand starting at position 2808 of SEQ ID NO: 1243836
agcucaauaggccauuaga

SEQ ID NO: 1445103 - RNA, 19 nt, Artificial Sequence
  Description of Artificial Sequence: Synthetic oligonucleotide
  Antisense strand to SEQ ID NO: 1445102
ucuaauggccuauugagcu

SEQ ID NO: 1445104 - RNA, 19 nt, Artificial Sequence
  Description of Artificial Sequence: Synthetic oligonucleotide
  Sense strand starting at position 2992 of SEQ ID NO: 1243836
aagagaauucgauguauua

SEQ ID NO: 1445105 - RNA, 19 nt, Artificial Sequence
  Description of Artificial Sequence: Synthetic oligonucleotide
  Antisense strand to SEQ ID NO: 1445104
uaauacaucgaauucucuu

SEQ ID NO: 1445106 - RNA, 19 nt, Artificial Sequence
  Description of Artificial Sequence: Synthetic oligonucleotide
  Sense strand starting at position 3159 of SEQ ID NO: 1243836
ucaggagcucucuaggcua

SEQ ID NO: 1445107 - RNA, 19 nt, Artificial Sequence
  Description of Artificial Sequence: Synthetic oligonucleotide
  Antisense strand to SEQ ID NO: 1445106
uagccuagagagcuccuga

SEQ ID NO: 1445108 - RNA, 19 nt, Artificial Sequence
  Description of Artificial Sequence: Synthetic oligonucleotide
  Sense strand starting at position 3170 of SEQ ID NO: 1243836
cuaggcuagaugugagaau

SEQ ID NO: 1445109 - RNA, 19 nt, Artificial Sequence
  Description of Artificial Sequence: Synthetic oligonucleotide
  Antisense strand to SEQ ID NO: 1445108
auucucacaucuagccuag

SEQ ID NO: 1445110 - RNA, 19 nt, Artificial Sequence
  Description of Artificial Sequence: Synthetic oligonucleotide
  Sense strand starting at position 3195 of SEQ ID NO: 1243836
auauuccauugcuuggaaa

SEQ ID NO: 1445111 - RNA, 19 nt, Artificial Sequence
  Description of Artificial Sequence: Synthetic oligonucleotide
  Antisense strand to SEQ ID NO: 1445110
uuuccaagcaauggaauau

SEQ ID NO: 1445112 - RNA, 19 nt, Artificial Sequence
  Description of Artificial Sequence: Synthetic oligonucleotide
  Sense strand starting at position 3215 of SEQ ID NO: 1243836
uucccuuugggugauguua

SEQ ID NO: 1445113 - RNA, 19 nt, Artificial Sequence
  Description of Artificial Sequence: Synthetic oligonucleotide
  Antisense strand to SEQ ID NO: 1445112
uaacaucacccaaagggaa

SEQ ID NO: 1445114 - RNA, 19 nt, Artificial Sequence
  Description of Artificial Sequence: Synthetic oligonucleotide
  Sense strand starting at position 3223 of SEQ ID NO: 1243836
gggugauguuagagggaga

SEQ ID NO: 1445115 - RNA, 19 nt, Artificial Sequence
  Description of Artificial Sequence: Synthetic oligonucleotide
  Antisense strand to SEQ ID NO: 1445114
ucucccucuaacaucaccc

SEQ ID NO: 1445116 - RNA, 19 nt, Artificial Sequence
  Description of Artificial Sequence: Synthetic oligonucleotide
  Sense strand starting at position 3224 of SEQ ID NO: 1243836
ggugauguuagagggagau

SEQ ID NO: 1445117 - RNA, 19 nt, Artificial Sequence
  Description of Artificial Sequence: Synthetic oligonucleotide
  Antisense strand to SEQ ID NO: 1445116
aucucccucuaacaucacc

SEQ ID NO: 1445118 - RNA, 19 nt, Artificial Sequence
  Description of Artificial Sequence: Synthetic oligonucleotide
  Sense strand starting at position 3403 of SEQ ID NO: 1243836
ggaugacuugagugguaac

SEQ ID NO: 1445119 - RNA, 19 nt, Artificial Sequence
  Description of Artificial Sequence: Synthetic oligonucleotide
  Antisense strand to SEQ ID NO: 1445118
guuaccacucaagucaucc

SEQ ID NO: 1445120 - RNA, 19 nt, Artificial Sequence
  Description of Artificial Sequence: Synthetic oligonucleotide
  Sense strand starting at position 3404 of SEQ ID NO: 1243836
gaugacuugagugguaaca

SEQ ID NO: 1445121 - RNA, 19 nt, Artificial Sequence
  Description of Artificial Sequence: Synthetic oligonucleotide
  Antisense strand to SEQ ID NO: 1445120
uguuaccacucaagucauc

SEQ ID NO: 1445122 - RNA, 19 nt, Artificial Sequence
  Description of Artificial Sequence: Synthetic oligonucleotide
  Sense strand starting at position 3429 of SEQ ID NO: 1243836
uacacuggccuggaaagua

SEQ ID NO: 1445123 - RNA, 19 nt, Artificial Sequence
  Description of Artificial Sequence: Synthetic oligonucleotide
  Antisense strand to SEQ ID NO: 1445122
uacuuuccaggccagugua

SEQ ID NO: 1445124 - RNA, 19 nt, Artificial Sequence
  Description of Artificial Sequence: Synthetic oligonucleotide
  Sense strand starting at position 3441 of SEQ ID NO: 1243836
gaaaguagccauuagcuau

SEQ ID NO: 1445125 - RNA, 19 nt, Artificial Sequence
  Description of Artificial Sequence: Synthetic oligonucleotide
  Antisense strand to SEQ ID NO: 1445124
auagcuaauggcuacuuuc

SEQ ID NO: 1445126 - RNA, 19 nt, Artificial Sequence
  Description of Artificial Sequence: Synthetic oligonucleotide
  Sense strand starting at position 3448 of SEQ ID NO: 1243836
gccauuagcuauuuaaagu

SEQ ID NO: 1445127 - RNA, 19 nt, Artificial Sequence
  Description of Artificial Sequence: Synthetic oligonucleotide
  Antisense strand to SEQ ID NO: 1445126
acuuuaaauagcuaauggc

SEQ ID NO: 1445128 - RNA, 19 nt, Artificial Sequence
  Description of Artificial Sequence: Synthetic oligonucleotide
  Sense strand starting at position 3604 of SEQ ID NO: 1243836
uuggcuagggcugaaagau

SEQ ID NO: 1445129 - RNA, 19 nt, Artificial Sequence
  Description of Artificial Sequence: Synthetic oligonucleotide
  Antisense strand to SEQ ID NO: 1445128
aucuuucagcccuagccaa

SEQ ID NO: 1445130 - RNA, 19 nt, Artificial Sequence
  Description of Artificial Sequence: Synthetic oligonucleotide
  Sense strand starting at position 3650 of SEQ ID NO: 1243836
ggugucagugguagcuauu

SEQ ID NO: 1445131 - RNA, 19 nt, Artificial Sequence
  Description of Artificial Sequence: Synthetic oligonucleotide
  Antisense strand to SEQ ID NO: 1445130
aauagcuaccacugacacc

SEQ ID NO: 1445132 - RNA, 19 nt, Artificial Sequence
  Description of Artificial Sequence: Synthetic oligonucleotide
  Sense strand starting at position 3750 of SEQ ID NO: 1243836
uugacuuggugguugacaa

SEQ ID NO: 1445133 - RNA, 19 nt, Artificial Sequence
  Description of Artificial Sequence: Synthetic oligonucleotide
  Antisense strand to SEQ ID NO: 1445132
uugucaaccaccaagucaa

SEQ ID NO: 1445134 - RNA, 19 nt, Artificial Sequence
  Description of Artificial Sequence: Synthetic oligonucleotide
  Sense strand starting at position 3875 of SEQ ID NO: 1243836
ggaauagucuacuucuuaa

SEQ ID NO: 1445135 - RNA, 19 nt, Artificial Sequence
  Description of Artificial Sequence: Synthetic oligonucleotide
  Antisense strand to SEQ ID NO: 1445134
uuaagaaguagacuauucc

SEQ ID NO: 1445136 - RNA, 19 nt, Artificial Sequence
  Description of Artificial Sequence: Synthetic oligonucleotide
  Sense strand starting at position 3947 of SEQ ID NO: 1243836
uugggucaucuuuggaaac

SEQ ID NO: 1445137 - RNA, 19 nt, Artificial Sequence
  Description of Artificial Sequence: Synthetic oligonucleotide
  Antisense strand to SEQ ID NO: 1445136
guuuccaaagaugacccaa

SEQ ID NO: 1445138 - RNA, 19 nt, Artificial Sequence
  Description of Artificial Sequence: Synthetic oligonucleotide
  Sense strand starting at position 16 of SEQ ID NO: 1243837
acuggcuucucagcagaga

SEQ ID NO: 1445139 - RNA, 19 nt, Artificial Sequence
  Description of Artificial Sequence: Synthetic oligonucleotide
  Antisense strand to SEQ ID NO: 1445138
ucucugcugagaagccagu

SEQ ID NO: 1445140 - RNA, 19 nt, Artificial Sequence
  Description of Artificial Sequence: Synthetic oligonucleotide
  Sense strand starting at position 17 of SEQ ID NO: 1243837
cuggcuucucagcagagau

SEQ ID NO: 1445141 - RNA, 19 nt, Artificial Sequence
  Description of Artificial Sequence: Synthetic oligonucleotide
  Antisense strand to SEQ ID NO: 1445140
aucucugcugagaagccag

SEQ ID NO: 1445142 - RNA, 19 nt, Artificial Sequence
  Description of Artificial Sequence: Synthetic oligonucleotide
  Sense strand starting at position 19 of SEQ ID NO: 1243837
ggcuucucagcagagauag

SEQ ID NO: 1445143 - RNA, 19 nt, Artificial Sequence
  Description of Artificial Sequence: Synthetic oligonucleotide
  Antisense strand to SEQ ID NO: 1445142
cuaucucugcugagaagcc

SEQ ID NO: 1445144 - RNA, 19 nt, Artificial Sequence
  Description of Artificial Sequence: Synthetic oligonucleotide
  Sense strand starting at position 42 of SEQ ID NO: 1243837
ucaggagauccugguggau

SEQ ID NO: 1445145 - RNA, 19 nt, Artificial Sequence
  Description of Artificial Sequence: Synthetic oligonucleotide
  Antisense strand to SEQ ID NO: 1445144
auccaccaggaucuccuga

SEQ ID NO: 1445146 - RNA, 19 nt, Artificial Sequence
  Description of Artificial Sequence: Synthetic oligonucleotide
  Sense strand starting at position 131 of SEQ ID NO: 1243837
acucccgauuucugggaga

SEQ ID NO: 1445147 - RNA, 19 nt, Artificial Sequence
  Description of Artificial Sequence: Synthetic oligonucleotide
  Antisense strand to SEQ ID NO: 1445146
ucucccagaaaucgggagu

SEQ ID NO: 1445148 - RNA, 19 nt, Artificial Sequence
  Description of Artificial Sequence: Synthetic oligonucleotide
  Sense strand starting at position 134 of SEQ ID NO: 1243837
cccgauuucugggagaaau

SEQ ID NO: 1445149 - RNA, 19 nt, Artificial Sequence
  Description of Artificial Sequence: Synthetic oligonucleotide
  Antisense strand to SEQ ID NO: 1445148
auuucucccagaaaucggg

SEQ ID NO: 1445150 - RNA, 19 nt, Artificial Sequence
  Description of Artificial Sequence: Synthetic oligonucleotide
  Sense strand starting at position 151 of SEQ ID NO: 1243837
aucagaaauccgcagcuca

SEQ ID NO: 1445151 - RNA, 19 nt, Artificial Sequence
  Description of Artificial Sequence: Synthetic oligonucleotide
  Antisense strand to SEQ ID NO: 1445150
ugagcugcggauuucugau

SEQ ID NO: 1445152 - RNA, 19 nt, Artificial Sequence
  Description of Artificial Sequence: Synthetic oligonucleotide
  Sense strand starting at position 360 of SEQ ID NO: 1243837
ggacauuucucugguacag

SEQ ID NO: 1445153 - RNA, 19 nt, Artificial Sequence
  Description of Artificial Sequence: Synthetic oligonucleotide
  Antisense strand to SEQ ID NO: 1445152
cuguaccagagaaaugucc

SEQ ID NO: 1445154 - RNA, 19 nt, Artificial Sequence
  Description of Artificial Sequence: Synthetic oligonucleotide
  Sense strand starting at position 362 of SEQ ID NO: 1243837
acauuucucugguacagau

SEQ ID NO: 1445155 - RNA, 19 nt, Artificial Sequence
  Description of Artificial Sequence: Synthetic oligonucleotide
  Antisense strand to SEQ ID NO: 1445154
aucuguaccagagaaaugu

SEQ ID NO: 1445156 - RNA, 19 nt, Artificial Sequence
  Description of Artificial Sequence: Synthetic oligonucleotide
  Sense strand starting at position 498 of SEQ ID NO: 1243837
ucagcuaucugggcaaaca

SEQ ID NO: 1445157 - RNA, 19 nt, Artificial Sequence
  Description of Artificial Sequence: Synthetic oligonucleotide
  Antisense strand to SEQ ID NO: 1445156
uguuugcccagauagcuga

SEQ ID NO: 1445158 - RNA, 19 nt, Artificial Sequence
  Description of Artificial Sequence: Synthetic oligonucleotide
  Sense strand starting at position 568 of SEQ ID NO: 1243837
ggugggagucguggagaga

SEQ ID NO: 1445159 - RNA, 19 nt, Artificial Sequence
  Description of Artificial Sequence: Synthetic oligonucleotide
  Antisense strand to SEQ ID NO: 1445158
ucucuccacgacucccacc

SEQ ID NO: 1445160 - RNA, 19 nt, Artificial Sequence
  Description of Artificial Sequence: Synthetic oligonucleotide
  Sense strand starting at position 634 of SEQ ID NO: 1243837
uccauucucccagggagaa

SEQ ID NO: 1445161 - RNA, 19 nt, Artificial Sequence
  Description of Artificial Sequence: Synthetic oligonucleotide
  Antisense strand to SEQ ID NO: 1445160
uucucccugggagaaugga

SEQ ID NO: 1445162 - RNA, 19 nt, Artificial Sequence
  Description of Artificial Sequence: Synthetic oligonucleotide
  Sense strand starting at position 674 of SEQ ID NO: 1243837
ggccgcagucacugggaaa

SEQ ID NO: 1445163 - RNA, 19 nt, Artificial Sequence
  Description of Artificial Sequence: Synthetic oligonucleotide
  Antisense strand to SEQ ID NO: 1445162
uuucccagugacugcggcc

SEQ ID NO: 1445164 - RNA, 19 nt, Artificial Sequence
  Description of Artificial Sequence: Synthetic oligonucleotide
  Sense strand starting at position 696 of SEQ ID NO: 1243837
cagggaaccugguuugagu

SEQ ID NO: 1445165 - RNA, 19 nt, Artificial Sequence
  Description of Artificial Sequence: Synthetic oligonucleotide
  Antisense strand to SEQ ID NO: 1445164
acucaaaccagguucccug

SEQ ID NO: 1445166 - RNA, 19 nt, Artificial Sequence
  Description of Artificial Sequence: Synthetic oligonucleotide
  Sense strand starting at position 698 of SEQ ID NO: 1243837
gggaaccugguuugaguua

SEQ ID NO: 1445167 - RNA, 19 nt, Artificial Sequence
  Description of Artificial Sequence: Synthetic oligonucleotide
  Antisense strand to SEQ ID NO: 1445166
uaacucaaaccagguuccc

SEQ ID NO: 1445168 - RNA, 19 nt, Artificial Sequence
  Description of Artificial Sequence: Synthetic oligonucleotide
  Sense strand starting at position 2151 of SEQ ID NO: 1243837
ucggccuccucgguucaaa

SEQ ID NO: 1445169 - RNA, 19 nt, Artificial Sequence
  Description of Artificial Sequence: Synthetic oligonucleotide
  Antisense strand to SEQ ID NO: 1445168
uuugaaccgaggaggccga

SEQ ID NO: 1445170 - RNA, 19 nt, Artificial Sequence
  Description of Artificial Sequence: Synthetic oligonucleotide
  Sense strand starting at position 2176 of SEQ ID NO: 1243837
gccugagacuuucccaacu

SEQ ID NO: 1445171 - RNA, 19 nt, Artificial Sequence
  Description of Artificial Sequence: Synthetic oligonucleotide
  Antisense strand to SEQ ID NO: 1445170
aguugggaaagucucaggc

SEQ ID NO: 1445172 - RNA, 19 nt, Artificial Sequence
  Description of Artificial Sequence: Synthetic oligonucleotide
  Sense strand starting at position 2431 of SEQ ID NO: 1243837
ugcaguacugucgggagau

SEQ ID NO: 1445173 - RNA, 19 nt, Artificial Sequence
  Description of Artificial Sequence: Synthetic oligonucleotide
  Antisense strand to SEQ ID NO: 1445172
aucucccgacaguacugca

SEQ ID NO: 1445174 - RNA, 19 nt, Artificial Sequence
  Description of Artificial Sequence: Synthetic oligonucleotide
  Sense strand starting at position 2490 of SEQ ID NO: 1243837
cccagacucucgcuguaaa

SEQ ID NO: 1445175 - RNA, 19 nt, Artificial Sequence
  Description of Artificial Sequence: Synthetic oligonucleotide
  Antisense strand to SEQ ID NO: 1445174
uuuacagcgagagucuggg

SEQ ID NO: 1445176 - RNA, 19 nt, Artificial Sequence
  Description of Artificial Sequence: Synthetic oligonucleotide
  Sense strand starting at position 2491 of SEQ ID NO: 1243837
ccagacucucgcuguaaac

SEQ ID NO: 1445177 - RNA, 19 nt, Artificial Sequence
  Description of Artificial Sequence: Synthetic oligonucleotide
  Antisense strand to SEQ ID NO: 1445176
guuuacagcgagagucugg

SEQ ID NO: 1445178 - RNA, 19 nt, Artificial Sequence
  Description of Artificial Sequence: Synthetic oligonucleotide
  Sense strand starting at position 2493 of SEQ ID NO: 1243837
agacucucgcuguaaacga

SEQ ID NO: 1445179 - RNA, 19 nt, Artificial Sequence
  Description of Artificial Sequence: Synthetic oligonucleotide
  Antisense strand to SEQ ID NO: 1445178
ucguuuacagcgagagucu

SEQ ID NO: 1445180 - RNA, 19 nt, Artificial Sequence
  Description of Artificial Sequence: Synthetic oligonucleotide
  Sense strand starting at position 2550 of SEQ ID NO: 1243837
uggacugggcgucagaaau

SEQ ID NO: 1445181 - RNA, 19 nt, Artificial Sequence
  Description of Artificial Sequence: Synthetic oligonucleotide
  Antisense strand to SEQ ID NO: 1445180
auuucugacgcccagucca

SEQ ID NO: 1445182 - RNA, 19 nt, Artificial Sequence
  Description of Artificial Sequence: Synthetic oligonucleotide
  Sense strand starting at position 2556 of SEQ ID NO: 1243837
gggcgucagaaauguuucu

SEQ ID NO: 1445183 - RNA, 19 nt, Artificial Sequence
  Description of Artificial Sequence: Synthetic oligonucleotide
  Antisense strand to SEQ ID NO: 1445182
agaaacauuucugacgccc

SEQ ID NO: 1445184 - RNA, 19 nt, Artificial Sequence
  Description of Artificial Sequence: Synthetic oligonucleotide
  Sense strand starting at position 2567 of SEQ ID NO: 1243837
auguuucuacagggugaca

SEQ ID NO: 1445185 - RNA, 19 nt, Artificial Sequence
  Description of Artificial Sequence: Synthetic oligonucleotide
  Antisense strand to SEQ ID NO: 1445184
ugucacccuguagaaacau

SEQ ID NO: 1445186 - RNA, 19 nt, Artificial Sequence
  Description of Artificial Sequence: Synthetic oligonucleotide
  Sense strand starting at position 2626 of SEQ ID NO: 1243837
cuaaguaucagcugaggcu

SEQ ID NO: 1445187 - RNA, 19 nt, Artificial Sequence
  Description of Artificial Sequence: Synthetic oligonucleotide
  Antisense strand to SEQ ID NO: 1445186
agccucagcugauacuuag

SEQ ID NO: 1445188 - RNA, 19 nt, Artificial Sequence
  Description of Artificial Sequence: Synthetic oligonucleotide
  Sense strand starting at position 2782 of SEQ ID NO: 1243837
cugcgaaguagucaacuaa

SEQ ID NO: 1445189 - RNA, 19 nt, Artificial Sequence
  Description of Artificial Sequence: Synthetic oligonucleotide
  Antisense strand to SEQ ID NO: 1445188
uuaguugacuacuucgcag

SEQ ID NO: 1445190 - RNA, 19 nt, Artificial Sequence
  Description of Artificial Sequence: Synthetic oligonucleotide
  Sense strand starting at position 2982 of SEQ ID NO: 1243837
accagcucuugagagcuaa

SEQ ID NO: 1445191 - RNA, 19 nt, Artificial Sequence
  Description of Artificial Sequence: Synthetic oligonucleotide
  Antisense strand to SEQ ID NO: 1445190
uuagcucucaagagcuggu

SEQ ID NO: 1445192 - RNA, 19 nt, Artificial Sequence
  Description of Artificial Sequence: Synthetic oligonucleotide
  Sense strand starting at position 2986 of SEQ ID NO: 1243837
gcucuugagagcuaauggu

SEQ ID NO: 1445193 - RNA, 19 nt, Artificial Sequence
  Description of Artificial Sequence: Synthetic oligonucleotide
  Antisense strand to SEQ ID NO: 1445192
accauuagcucucaagagc

SEQ ID NO: 1445194 - RNA, 19 nt, Artificial Sequence
  Description of Artificial Sequence: Synthetic oligonucleotide
  Sense strand starting at position 3442 of SEQ ID NO: 1243837
gguuaucauggauguaaac

SEQ ID NO: 1445195 - RNA, 19 nt, Artificial Sequence
  Description of Artificial Sequence: Synthetic oligonucleotide
  Antisense strand to SEQ ID NO: 1445194
guuuacauccaugauaacc

SEQ ID NO: 1445196 - RNA, 19 nt, Artificial Sequence
  Description of Artificial Sequence: Synthetic oligonucleotide
  Sense strand starting at position 3467 of SEQ ID NO: 1243837
gugacuaaggcagaucuca

SEQ ID NO: 1445197 - RNA, 19 nt, Artificial Sequence
  Description of Artificial Sequence: Synthetic oligonucleotide
  Antisense strand to SEQ ID NO: 1445196
ugagaucugccuuagucac

SEQ ID NO: 1445198 - RNA, 19 nt, Artificial Sequence
  Description of Artificial Sequence: Synthetic oligonucleotide
  Sense strand starting at position 3496 of SEQ ID NO: 1243837
gguuuaguuagccaagguu

SEQ ID NO: 1445199 - RNA, 19 nt, Artificial Sequence
  Description of Artificial Sequence: Synthetic oligonucleotide
  Antisense strand to SEQ ID NO: 1445198
aaccuuggcuaacuaaacc

SEQ ID NO: 1445200 - RNA, 19 nt, Artificial Sequence
  Description of Artificial Sequence: Synthetic oligonucleotide
  Sense strand starting at position 3645 of SEQ ID NO: 1243837
gugugaggcucugauuuag

SEQ ID NO: 1445201 - RNA, 19 nt, Artificial Sequence
  Description of Artificial Sequence: Synthetic oligonucleotide
  Antisense strand to SEQ ID NO: 1445200
cuaaaucagagccucacac

SEQ ID NO: 1445202 - RNA, 19 nt, Artificial Sequence
  Description of Artificial Sequence: Synthetic oligonucleotide
  Sense strand starting at position 3656 of SEQ ID NO: 1243837
ugauuuagugucuguaagu

SEQ ID NO: 1445203 - RNA, 19 nt, Artificial Sequence
  Description of Artificial Sequence: Synthetic oligonucleotide
  Antisense strand to SEQ ID NO: 1445202
acuuacagacacuaaauca

SEQ ID NO: 1445204 - RNA, 19 nt, Artificial Sequence
  Description of Artificial Sequence: Synthetic oligonucleotide
  Sense strand starting at position 3657 of SEQ ID NO: 1243837
gauuuagugucuguaaguc

SEQ ID NO: 1445205 - RNA, 19 nt, Artificial Sequence
  Description of Artificial Sequence: Synthetic oligonucleotide
  Antisense strand to SEQ ID NO: 1445204
gacuuacagacacuaaauc

SEQ ID NO: 1445206 - RNA, 19 nt, Artificial Sequence
  Description of Artificial Sequence: Synthetic oligonucleotide
  Sense strand starting at position 3754 of SEQ ID NO: 1243837
aaggaaacccugugucaac

SEQ ID NO: 1445207 - RNA, 19 nt, Artificial Sequence
  Description of Artificial Sequence: Synthetic oligonucleotide
  Antisense strand to SEQ ID NO: 1445206
guugacacaggguuuccuu

SEQ ID NO: 1445208 - RNA, 19 nt, Artificial Sequence
  Description of Artificial Sequence: Synthetic oligonucleotide
  Sense strand starting at position 3766 of SEQ ID NO: 1243837
ugucaacaggguugugaaa

SEQ ID NO: 1445209 - RNA, 19 nt, Artificial Sequence
  Description of Artificial Sequence: Synthetic oligonucleotide
  Antisense strand to SEQ ID NO: 1445208
uuucacaacccuguugaca

SEQ ID NO: 1445210 - RNA, 19 nt, Artificial Sequence
  Description of Artificial Sequence: Synthetic oligonucleotide
  Sense strand starting at position 3786 of SEQ ID NO: 1243837
ugcagcuaucugggaacaa

SEQ ID NO: 1445211 - RNA, 19 nt, Artificial Sequence
  Description of Artificial Sequence: Synthetic oligonucleotide
  Antisense strand to SEQ ID NO: 1445210
uuguucccagauagcugca

SEQ ID NO: 1445212 - RNA, 19 nt, Artificial Sequence
  Description of Artificial Sequence: Synthetic oligonucleotide
  Sense strand starting at position 3787 of SEQ ID NO: 1243837
gcagcuaucugggaacaaa

SEQ ID NO: 1445213 - RNA, 19 nt, Artificial Sequence
  Description of Artificial Sequence: Synthetic oligonucleotide
  Antisense strand to SEQ ID NO: 1445212
uuuguucccagauagcugc

SEQ ID NO: 1445214 - RNA, 19 nt, Artificial Sequence
  Description of Artificial Sequence: Synthetic oligonucleotide
  Sense strand starting at position 3813 of SEQ ID NO: 1243837
cagcuucugugguuuccaa

SEQ ID NO: 1445215 - RNA, 19 nt, Artificial Sequence
  Description of Artificial Sequence: Synthetic oligonucleotide
  Antisense strand to SEQ ID NO: 1445214
uuggaaaccacagaagcug

SEQ ID NO: 1445216 - RNA, 19 nt, Artificial Sequence
  Description of Artificial Sequence: Synthetic oligonucleotide
  Sense strand starting at position 3913 of SEQ ID NO: 1243837
cugcaaucguagcucacua

SEQ ID NO: 1445217 - RNA, 19 nt, Artificial Sequence
  Description of Artificial Sequence: Synthetic oligonucleotide
  Antisense strand to SEQ ID NO: 1445216
uagugagcuacgauugcag

SEQ ID NO: 1445218 - RNA, 19 nt, Artificial Sequence
  Description of Artificial Sequence: Synthetic oligonucleotide
  Sense strand starting at position 277 of SEQ ID NO: 1243838
ugauauaauggaugguuua

SEQ ID NO: 1445219 - RNA, 19 nt, Artificial Sequence
  Description of Artificial Sequence: Synthetic oligonucleotide
  Antisense strand to SEQ ID NO: 1445218
uaaaccauccauuauauca

SEQ ID NO: 1445220 - RNA, 19 nt, Artificial Sequence
  Description of Artificial Sequence: Synthetic oligonucleotide
  Sense strand starting at position 278 of SEQ ID NO: 1243838
gauauaauggaugguuuac

SEQ ID NO: 1445221 - RNA, 19 nt, Artificial Sequence
  Description of Artificial Sequence: Synthetic oligonucleotide
  Antisense strand to SEQ ID NO: 1445220
guaaaccauccauuauauc

SEQ ID NO: 1445222 - RNA, 19 nt, Artificial Sequence
  Description of Artificial Sequence: Synthetic oligonucleotide
  Sense strand starting at position 288 of SEQ ID NO: 1243838
augguuuacccagacguuu

SEQ ID NO: 1445223 - RNA, 19 nt, Artificial Sequence
  Description of Artificial Sequence: Synthetic oligonucleotide
  Antisense strand to SEQ ID NO: 1445222
aaacgucuggguaaaccau

SEQ ID NO: 1445224 - RNA, 19 nt, Artificial Sequence
  Description of Artificial Sequence: Synthetic oligonucleotide
  Sense strand starting at position 653 of SEQ ID NO: 1243838
agcugacauuuguugucua

SEQ ID NO: 1445225 - RNA, 19 nt, Artificial Sequence
  Description of Artificial Sequence: Synthetic oligonucleotide
  Antisense strand to SEQ ID NO: 1445224
uagacaacaaaugucagcu

SEQ ID NO: 1445226 - RNA, 19 nt, Artificial Sequence
  Description of Artificial Sequence: Synthetic oligonucleotide
  Sense strand starting at position 656 of SEQ ID NO: 1243838
ugacauuuguugucuaccu

SEQ ID NO: 1445227 - RNA, 19 nt, Artificial Sequence
  Description of Artificial Sequence: Synthetic oligonucleotide
  Antisense strand to SEQ ID NO: 1445226
agguagacaacaaauguca

SEQ ID NO: 1445228 - RNA, 19 nt, Artificial Sequence
  Description of Artificial Sequence: Synthetic oligonucleotide
  Sense strand starting at position 679 of SEQ ID NO: 1243838
cguggaagggcgcuguuau

SEQ ID NO: 1445229 - RNA, 19 nt, Artificial Sequence
  Description of Artificial Sequence: Synthetic oligonucleotide
  Antisense strand to SEQ ID NO: 1445228
auaacagcgcccuuccacg

SEQ ID NO: 1445230 - RNA, 19 nt, Artificial Sequence
  Description of Artificial Sequence: Synthetic oligonucleotide
  Sense strand starting at position 708 of SEQ ID NO: 1243838
gguaccaacucguuuaaca

SEQ ID NO: 1445231 - RNA, 19 nt, Artificial Sequence
  Description of Artificial Sequence: Synthetic oligonucleotide
  Antisense strand to SEQ ID NO: 1445230
uguuaaacgaguugguacc

SEQ ID NO: 1445232 - RNA, 19 nt, Artificial Sequence
  Description of Artificial Sequence: Synthetic oligonucleotide
  Sense strand starting at position 743 of SEQ ID NO: 1243838
guacuauuauuagccuuua

SEQ ID NO: 1445233 - RNA, 19 nt, Artificial Sequence
  Description of Artificial Sequence: Synthetic oligonucleotide
  Antisense strand to SEQ ID NO: 1445232
uaaaggcuaauaauaguac

SEQ ID NO: 1445234 - RNA, 19 nt, Artificial Sequence
  Description of Artificial Sequence: Synthetic oligonucleotide
  Sense strand starting at position 859 of SEQ ID NO: 1243838
ccaauugagcgaugcaaua

SEQ ID NO: 1445235 - RNA, 19 nt, Artificial Sequence
  Description of Artificial Sequence: Synthetic oligonucleotide
  Antisense strand to SEQ ID NO: 1445234
uauugcaucgcucaauugg

SEQ ID NO: 1445236 - RNA, 19 nt, Artificial Sequence
  Description of Artificial Sequence: Synthetic oligonucleotide
  Sense strand starting at position 1631 of SEQ ID NO: 1243838
gcacucaguccucauucua

SEQ ID NO: 1445237 - RNA, 19 nt, Artificial Sequence
  Description of Artificial Sequence: Synthetic oligonucleotide
  Antisense strand to SEQ ID NO: 1445236
uagaaugaggacugagugc

SEQ ID NO: 1445238 - RNA, 19 nt, Artificial Sequence
  Description of Artificial Sequence: Synthetic oligonucleotide
  Sense strand starting at position 1711 of SEQ ID NO: 1243838
gcauaacugcuagaacuac

SEQ ID NO: 1445239 - RNA, 19 nt, Artificial Sequence
  Description of Artificial Sequence: Synthetic oligonucleotide
  Antisense strand to SEQ ID NO: 1445238
guaguucuagcaguuaugc

SEQ ID NO: 1445240 - RNA, 19 nt, Artificial Sequence
  Description of Artificial Sequence: Synthetic oligonucleotide
  Sense strand starting at position 2066 of SEQ ID NO: 1243838
gcuguagucacagagccuu

SEQ ID NO: 1445241 - RNA, 19 nt, Artificial Sequence
  Description of Artificial Sequence: Synthetic oligonucleotide
  Antisense strand to SEQ ID NO: 1445240
aaggcucugugacuacagc

SEQ ID NO: 1445242 - RNA, 19 nt, Artificial Sequence
  Description of Artificial Sequence: Synthetic oligonucleotide
  Sense strand starting at position 2112 of SEQ ID NO: 1243838
cuaccaauccaguggaaga

SEQ ID NO: 1445243 - RNA, 19 nt, Artificial Sequence
  Description of Artificial Sequence: Synthetic oligonucleotide
  Antisense strand to SEQ ID NO: 1445242
ucuuccacuggauugguag

SEQ ID NO: 1445244 - RNA, 19 nt, Artificial Sequence
  Description of Artificial Sequence: Synthetic oligonucleotide
  Sense strand starting at position 2130 of SEQ ID NO: 1243838
aguuacagccaaugagaga

SEQ ID NO: 1445245 - RNA, 19 nt, Artificial Sequence
  Description of Artificial Sequence: Synthetic oligonucleotide
  Antisense strand to SEQ ID NO: 1445244
ucucucauuggcuguaacu

SEQ ID NO: 1445246 - RNA, 19 nt, Artificial Sequence
  Description of Artificial Sequence: Synthetic oligonucleotide
  Sense strand starting at position 2438 of SEQ ID NO: 1243838
ggguucugugcgccaggua

SEQ ID NO: 1445247 - RNA, 19 nt, Artificial Sequence
  Description of Artificial Sequence: Synthetic oligonucleotide
  Antisense strand to SEQ ID NO: 1445246
uaccuggcgcacagaaccc

SEQ ID NO: 1445248 - RNA, 19 nt, Artificial Sequence
  Description of Artificial Sequence: Synthetic oligonucleotide
  Sense strand starting at position 2514 of SEQ ID NO: 1243838
acuucuauacaagguuaga

SEQ ID NO: 1445249 - RNA, 19 nt, Artificial Sequence
  Description of Artificial Sequence: Synthetic oligonucleotide
  Antisense strand to SEQ ID NO: 1445248
ucuaaccuuguauagaagu

SEQ ID NO: 1445250 - RNA, 19 nt, Artificial Sequence
  Description of Artificial Sequence: Synthetic oligonucleotide
  Sense strand starting at position 2569 of SEQ ID NO: 1243838
uccagaucuccugauggcu

SEQ ID NO: 1445251 - RNA, 19 nt, Artificial Sequence
  Description of Artificial Sequence: Synthetic oligonucleotide
  Antisense strand to SEQ ID NO: 1445250
agccaucaggagaucugga

SEQ ID NO: 1445252 - RNA, 19 nt, Artificial Sequence
  Description of Artificial Sequence: Synthetic oligonucleotide
  Sense strand starting at position 2575 of SEQ ID NO: 1243838
ucuccugauggcugaacua

SEQ ID NO: 1445253 - RNA, 19 nt, Artificial Sequence
  Description of Artificial Sequence: Synthetic oligonucleotide
  Antisense strand to SEQ ID NO: 1445252
uaguucagccaucaggaga

SEQ ID NO: 1445254 - RNA, 19 nt, Artificial Sequence
  Description of Artificial Sequence: Synthetic oligonucleotide
  Sense strand starting at position 2605 of SEQ ID NO: 1243838
gguaaaguucuacacaccu

SEQ ID NO: 1445255 - RNA, 19 nt, Artificial Sequence
  Description of Artificial Sequence: Synthetic oligonucleotide
  Antisense strand to SEQ ID NO: 1445254
agguguguagaacuuuacc

SEQ ID NO: 1445256 - RNA, 19 nt, Artificial Sequence
  Description of Artificial Sequence: Synthetic oligonucleotide
  Sense strand starting at position 2644 of SEQ ID NO: 1243838
ucaucauaguaucucuuga

SEQ ID NO: 1445257 - RNA, 19 nt, Artificial Sequence
  Description of Artificial Sequence: Synthetic oligonucleotide
  Antisense strand to SEQ ID NO: 1445256
ucaagagauacuaugauga

SEQ ID NO: 1445258 - RNA, 19 nt, Artificial Sequence
  Description of Artificial Sequence: Synthetic oligonucleotide
  Sense strand starting at position 2646 of SEQ ID NO: 1243838
aucauaguaucucuugauu

SEQ ID NO: 1445259 - RNA, 19 nt, Artificial Sequence
  Description of Artificial Sequence: Synthetic oligonucleotide
  Antisense strand to SEQ ID NO: 1445258
aaucaagagauacuaugau

SEQ ID NO: 1445260 - RNA, 19 nt, Artificial Sequence
  Description of Artificial Sequence: Synthetic oligonucleotide
  Sense strand starting at position 2881 of SEQ ID NO: 1243838
uauaaauuagcgcaguaau

SEQ ID NO: 1445261 - RNA, 19 nt, Artificial Sequence
  Description of Artificial Sequence: Synthetic oligonucleotide
  Antisense strand to SEQ ID NO: 1445260
auuacugcgcuaauuuaua

SEQ ID NO: 1445262 - RNA, 19 nt, Artificial Sequence
  Description of Artificial Sequence: Synthetic oligonucleotide
  Sense strand starting at position 2960 of SEQ ID NO: 1243838
aacccaauucuaggugaug

SEQ ID NO: 1445263 - RNA, 19 nt, Artificial Sequence
  Description of Artificial Sequence: Synthetic oligonucleotide
  Antisense strand to SEQ ID NO: 1445262
caucaccuagaauuggguu

SEQ ID NO: 1445264 - RNA, 19 nt, Artificial Sequence
  Description of Artificial Sequence: Synthetic oligonucleotide
  Sense strand starting at position 2962 of SEQ ID NO: 1243838
cccaauucuaggugauggu

SEQ ID NO: 1445265 - RNA, 19 nt, Artificial Sequence
  Description of Artificial Sequence: Synthetic oligonucleotide
  Antisense strand to SEQ ID NO: 1445264
accaucaccuagaauuggg

SEQ ID NO: 1445266 - RNA, 19 nt, Artificial Sequence
  Description of Artificial Sequence: Synthetic oligonucleotide
  Sense strand starting at position 2963 of SEQ ID NO: 1243838
ccaauucuaggugauggua

SEQ ID NO: 1445267 - RNA, 19 nt, Artificial Sequence
  Description of Artificial Sequence: Synthetic oligonucleotide
  Antisense strand to SEQ ID NO: 1445266
uaccaucaccuagaauugg

SEQ ID NO: 1445268 - RNA, 19 nt, Artificial Sequence
  Description of Artificial Sequence: Synthetic oligonucleotide
  Sense strand starting at position 3051 of SEQ ID NO: 1243838
auauuacgaucaucaguga

SEQ ID NO: 1445269 - RNA, 19 nt, Artificial Sequence
  Description of Artificial Sequence: Synthetic oligonucleotide
  Antisense strand to SEQ ID NO: 1445268
ucacugaugaucguaauau

SEQ ID NO: 1445270 - RNA, 19 nt, Artificial Sequence
  Description of Artificial Sequence: Synthetic oligonucleotide
  Sense strand starting at position 3052 of SEQ ID NO: 1243838
uauuacgaucaucagugaa

SEQ ID NO: 1445271 - RNA, 19 nt, Artificial Sequence
  Description of Artificial Sequence: Synthetic oligonucleotide
  Antisense strand to SEQ ID NO: 1445270
uucacugaugaucguaaua

SEQ ID NO: 1445272 - RNA, 19 nt, Artificial Sequence
  Description of Artificial Sequence: Synthetic oligonucleotide
  Sense strand starting at position 3054 of SEQ ID NO: 1243838
uuacgaucaucagugaauu

SEQ ID NO: 1445273 - RNA, 19 nt, Artificial Sequence
  Description of Artificial Sequence: Synthetic oligonucleotide
  Antisense strand to SEQ ID NO: 1445272
aauucacugaugaucguaa

SEQ ID NO: 1445274 - RNA, 19 nt, Artificial Sequence
  Description of Artificial Sequence: Synthetic oligonucleotide
  Sense strand starting at position 3055 of SEQ ID NO: 1243838
uacgaucaucagugaauug

SEQ ID NO: 1445275 - RNA, 19 nt, Artificial Sequence
  Description of Artificial Sequence: Synthetic oligonucleotide
  Antisense strand to SEQ ID NO: 1445274
caauucacugaugaucgua

SEQ ID NO: 1445276 - RNA, 19 nt, Artificial Sequence
  Description of Artificial Sequence: Synthetic oligonucleotide
  Sense strand starting at position 3062 of SEQ ID NO: 1243838
aucagugaauugguaccua

SEQ ID NO: 1445277 - RNA, 19 nt, Artificial Sequence
  Description of Artificial Sequence: Synthetic oligonucleotide
  Antisense strand to SEQ ID NO: 1445276
uagguaccaauucacugau

SEQ ID NO: 1445278 - RNA, 19 nt, Artificial Sequence
  Description of Artificial Sequence: Synthetic oligonucleotide
  Sense strand starting at position 3093 of SEQ ID NO: 1243838
agccaauauugagugcuua

SEQ ID NO: 1445279 - RNA, 19 nt, Artificial Sequence
  Description of Artificial Sequence: Synthetic oligonucleotide
  Antisense strand to SEQ ID NO: 1445278
uaagcacucaauauuggcu

SEQ ID NO: 1445280 - RNA, 19 nt, Artificial Sequence
  Description of Artificial Sequence: Synthetic oligonucleotide
  Sense strand starting at position 3094 of SEQ ID NO: 1243838
gccaauauugagugcuuaa

SEQ ID NO: 1445281 - RNA, 19 nt, Artificial Sequence
  Description of Artificial Sequence: Synthetic oligonucleotide
  Antisense strand to SEQ ID NO: 1445280
uuaagcacucaauauuggc

SEQ ID NO: 1445282 - RNA, 19 nt, Artificial Sequence
  Description of Artificial Sequence: Synthetic oligonucleotide
  Sense strand starting at position 3097 of SEQ ID NO: 1243838
aauauugagugcuuaagug

SEQ ID NO: 1445283 - RNA, 19 nt, Artificial Sequence
  Description of Artificial Sequence: Synthetic oligonucleotide
  Antisense strand to SEQ ID NO: 1445282
cacuuaagcacucaauauu

SEQ ID NO: 1445284 - RNA, 19 nt, Artificial Sequence
  Description of Artificial Sequence: Synthetic oligonucleotide
  Sense strand starting at position 3234 of SEQ ID NO: 1243838
gaguaaacuugcccaaggu

SEQ ID NO: 1445285 - RNA, 19 nt, Artificial Sequence
  Description of Artificial Sequence: Synthetic oligonucleotide
  Antisense strand to SEQ ID NO: 1445284
accuugggcaaguuuacuc

SEQ ID NO: 1445286 - RNA, 19 nt, Artificial Sequence
  Description of Artificial Sequence: Synthetic oligonucleotide
  Sense strand starting at position 3448 of SEQ ID NO: 1243838
ggagaaaguuaccacacaa

SEQ ID NO: 1445287 - RNA, 19 nt, Artificial Sequence
  Description of Artificial Sequence: Synthetic oligonucleotide
  Antisense strand to SEQ ID NO: 1445286
uugugugguaacuuucucc

SEQ ID NO: 1445288 - RNA, 19 nt, Artificial Sequence
  Description of Artificial Sequence: Synthetic oligonucleotide
  Sense strand starting at position 3803 of SEQ ID NO: 1243838
ucugaugucuuaguaggau

SEQ ID NO: 1445289 - RNA, 19 nt, Artificial Sequence
  Description of Artificial Sequence: Synthetic oligonucleotide
  Antisense strand to SEQ ID NO: 1445288
auccuacuaagacaucaga

SEQ ID NO: 1445290 - RNA, 19 nt, Artificial Sequence
  Description of Artificial Sequence: Synthetic oligonucleotide
  Sense strand starting at position 3806 of SEQ ID NO: 1243838
gaugucuuaguaggauagu

SEQ ID NO: 1445291 - RNA, 19 nt, Artificial Sequence
  Description of Artificial Sequence: Synthetic oligonucleotide
  Antisense strand to SEQ ID NO: 1445290
acuauccuacuaagacauc

SEQ ID NO: 1445292 - RNA, 19 nt, Artificial Sequence
  Description of Artificial Sequence: Synthetic oligonucleotide
  Sense strand starting at position 3809 of SEQ ID NO: 1243838
gucuuaguaggauaguaga

SEQ ID NO: 1445293 - RNA, 19 nt, Artificial Sequence
  Description of Artificial Sequence: Synthetic oligonucleotide
  Antisense strand to SEQ ID NO: 1445292
ucuacuauccuacuaagac

SEQ ID NO: 1445294 - RNA, 19 nt, Artificial Sequence
  Description of Artificial Sequence: Synthetic oligonucleotide
  Sense strand starting at position 3955 of SEQ ID NO: 1243838
agcuaugaguacuuagcau

SEQ ID NO: 1445295 - RNA, 19 nt, Artificial Sequence
  Description of Artificial Sequence: Synthetic oligonucleotide
  Antisense strand to SEQ ID NO: 1445294
augcuaaguacucauagcu

SEQ ID NO: 1445296 - RNA, 19 nt, Artificial Sequence
  Description of Artificial Sequence: Synthetic oligonucleotide
  Sense strand starting at position 3961 of SEQ ID NO: 1243838
gaguacuuagcaugcauau

SEQ ID NO: 1445297 - RNA, 19 nt, Artificial Sequence
  Description of Artificial Sequence: Synthetic oligonucleotide
  Antisense strand to SEQ ID NO: 1445296
auaugcaugcuaaguacuc

SEQ ID NO: 1445298 - RNA, 19 nt, Artificial Sequence
  Description of Artificial Sequence: Synthetic oligonucleotide
  Sense strand starting at position 79 of SEQ ID NO: 1243839
agacaugcucugggaacua

SEQ ID NO: 1445299 - RNA, 19 nt, Artificial Sequence
  Description of Artificial Sequence: Synthetic oligonucleotide
  Antisense strand to SEQ ID NO: 1445298
uaguucccagagcaugucu

SEQ ID NO: 1445300 - RNA, 19 nt, Artificial Sequence
  Description of Artificial Sequence: Synthetic oligonucleotide
  Sense strand starting at position 121 of SEQ ID NO: 1243839
agcagaagccuuugacguu

SEQ ID NO: 1445301 - RNA, 19 nt, Artificial Sequence
  Description of Artificial Sequence: Synthetic oligonucleotide
  Antisense strand to SEQ ID NO: 1445300
aacgucaaaggcuucugcu

SEQ ID NO: 1445302 - RNA, 19 nt, Artificial Sequence
  Description of Artificial Sequence: Synthetic oligonucleotide
  Sense strand starting at position 130 of SEQ ID NO: 1243839
cuuugacguuucucacuca

SEQ ID NO: 1445303 - RNA, 19 nt, Artificial Sequence
  Description of Artificial Sequence: Synthetic oligonucleotide
  Antisense strand to SEQ ID NO: 1445302
ugagugagaaacgucaaag

SEQ ID NO: 1445304 - RNA, 19 nt, Artificial Sequence
  Description of Artificial Sequence: Synthetic oligonucleotide
  Sense strand starting at position 133 of SEQ ID NO: 1243839
ugacguuucucacucagaa

SEQ ID NO: 1445305 - RNA, 19 nt, Artificial Sequence
  Description of Artificial Sequence: Synthetic oligonucleotide
  Antisense strand to SEQ ID NO: 1445304
uucugagugagaaacguca

SEQ ID NO: 1445306 - RNA, 19 nt, Artificial Sequence
  Description of Artificial Sequence: Synthetic oligonucleotide
  Sense strand starting at position 222 of SEQ ID NO: 1243839
ucucgaauucuggguuaag

SEQ ID NO: 1445307 - RNA, 19 nt, Artificial Sequence
  Description of Artificial Sequence: Synthetic oligonucleotide
  Antisense strand to SEQ ID NO: 1445306
cuuaacccagaauucgaga

SEQ ID NO: 1445308 - RNA, 19 nt, Artificial Sequence
  Description of Artificial Sequence: Synthetic oligonucleotide
  Sense strand starting at position 223 of SEQ ID NO: 1243839
cucgaauucuggguuaagg

SEQ ID NO: 1445309 - RNA, 19 nt, Artificial Sequence
  Description of Artificial Sequence: Synthetic oligonucleotide
  Antisense strand to SEQ ID NO: 1445308
ccuuaacccagaauucgag

SEQ ID NO: 1445310 - RNA, 19 nt, Artificial Sequence
  Description of Artificial Sequence: Synthetic oligonucleotide
  Sense strand starting at position 284 of SEQ ID NO: 1243839
uguucuagucaaugaugaa

SEQ ID NO: 1445311 - RNA, 19 nt, Artificial Sequence
  Description of Artificial Sequence: Synthetic oligonucleotide
  Antisense strand to SEQ ID NO: 1445310
uucaucauugacuagaaca

SEQ ID NO: 1445312 - RNA, 19 nt, Artificial Sequence
  Description of Artificial Sequence: Synthetic oligonucleotide
  Sense strand starting at position 308 of SEQ ID NO: 1243839
cgggcuuccagacaauguu

SEQ ID NO: 1445313 - RNA, 19 nt, Artificial Sequence
  Description of Artificial Sequence: Synthetic oligonucleotide
  Antisense strand to SEQ ID NO: 1445312
aacauugucuggaagcccg

SEQ ID NO: 1445314 - RNA, 19 nt, Artificial Sequence
  Description of Artificial Sequence: Synthetic oligonucleotide
  Sense strand starting at position 369 of SEQ ID NO: 1243839
gaaggacuguuagacaaau

SEQ ID NO: 1445315 - RNA, 19 nt, Artificial Sequence
  Description of Artificial Sequence: Synthetic oligonucleotide
  Antisense strand to SEQ ID NO: 1445314
auuugucuaacaguccuuc

SEQ ID NO: 1445316 - RNA, 19 nt, Artificial Sequence
  Description of Artificial Sequence: Synthetic oligonucleotide
  Sense strand starting at position 2048 of SEQ ID NO: 1243839
cccagaaaucgucgcgaga

SEQ ID NO: 1445317 - RNA, 19 nt, Artificial Sequence
  Description of Artificial Sequence: Synthetic oligonucleotide
  Antisense strand to SEQ ID NO: 1445316
ucucgcgacgauuucuggg

SEQ ID NO: 1445318 - RNA, 19 nt, Artificial Sequence
  Description of Artificial Sequence: Synthetic oligonucleotide
  Sense strand starting at position 2134 of SEQ ID NO: 1243839
gagaucaggucccaaacua

SEQ ID NO: 1445319 - RNA, 19 nt, Artificial Sequence
  Description of Artificial Sequence: Synthetic oligonucleotide
  Antisense strand to SEQ ID NO: 1445318
uaguuugggaccugaucuc

SEQ ID NO: 1445320 - RNA, 19 nt, Artificial Sequence
  Description of Artificial Sequence: Synthetic oligonucleotide
  Sense strand starting at position 2202 of SEQ ID NO: 1243839
ugagcaaagcuuuauugaa

SEQ ID NO: 1445321 - RNA, 19 nt, Artificial Sequence
  Description of Artificial Sequence: Synthetic oligonucleotide
  Antisense strand to SEQ ID NO: 1445320
uucaauaaagcuuugcuca

SEQ ID NO: 1445322 - RNA, 19 nt, Artificial Sequence
  Description of Artificial Sequence: Synthetic oligonucleotide
  Sense strand starting at position 2204 of SEQ ID NO: 1243839
agcaaagcuuuauugaaac

SEQ ID NO: 1445323 - RNA, 19 nt, Artificial Sequence
  Description of Artificial Sequence: Synthetic oligonucleotide
  Antisense strand to SEQ ID NO: 1445322
guuucaauaaagcuuugcu

SEQ ID NO: 1445324 - RNA, 19 nt, Artificial Sequence
  Description of Artificial Sequence: Synthetic oligonucleotide
  Sense strand starting at position 2253 of SEQ ID NO: 1243839
aaacuuuaucgguaacuga

SEQ ID NO: 1445325 - RNA, 19 nt, Artificial Sequence
  Description of Artificial Sequence: Synthetic oligonucleotide
  Antisense strand to SEQ ID NO: 1445324
ucaguuaccgauaaaguuu

SEQ ID NO: 1445326 - RNA, 19 nt, Artificial Sequence
  Description of Artificial Sequence: Synthetic oligonucleotide
  Sense strand starting at position 2256 of SEQ ID NO: 1243839
cuuuaucgguaacugauua

SEQ ID NO: 1445327 - RNA, 19 nt, Artificial Sequence
  Description of Artificial Sequence: Synthetic oligonucleotide
  Antisense strand to SEQ ID NO: 1445326
uaaucaguuaccgauaaag

SEQ ID NO: 1445328 - RNA, 19 nt, Artificial Sequence
  Description of Artificial Sequence: Synthetic oligonucleotide
  Sense strand starting at position 2260 of SEQ ID NO: 1243839
aucgguaacugauuaaaca

SEQ ID NO: 1445329 - RNA, 19 nt, Artificial Sequence
  Description of Artificial Sequence: Synthetic oligonucleotide
  Antisense strand to SEQ ID NO: 1445328
uguuuaaucaguuaccgau

SEQ ID NO: 1445330 - RNA, 19 nt, Artificial Sequence
  Description of Artificial Sequence: Synthetic oligonucleotide
  Sense strand starting at position 2409 of SEQ ID NO: 1243839
ggaguguuaguggcgcgau

SEQ ID NO: 1445331 - RNA, 19 nt, Artificial Sequence
  Description of Artificial Sequence: Synthetic oligonucleotide
  Antisense strand to SEQ ID NO: 1445330
aucgcgccacuaacacucc

SEQ ID NO: 1445332 - RNA, 19 nt, Artificial Sequence
  Description of Artificial Sequence: Synthetic oligonucleotide
  Sense strand starting at position 2781 of SEQ ID NO: 1243839
ugccgaguacuuggaacua

SEQ ID NO: 1445333 - RNA, 19 nt, Artificial Sequence
  Description of Artificial Sequence: Synthetic oligonucleotide
  Antisense strand to SEQ ID NO: 1445332
uaguuccaaguacucggca

SEQ ID NO: 1445334 - RNA, 19 nt, Artificial Sequence
  Description of Artificial Sequence: Synthetic oligonucleotide
  Sense strand starting at position 2818 of SEQ ID NO: 1243839
ccgugcuaauuuguuucua

SEQ ID NO: 1445335 - RNA, 19 nt, Artificial Sequence
  Description of Artificial Sequence: Synthetic oligonucleotide
  Antisense strand to SEQ ID NO: 1445334
uagaaacaaauuagcacgg

SEQ ID NO: 1445336 - RNA, 19 nt, Artificial Sequence
  Description of Artificial Sequence: Synthetic oligonucleotide
  Sense strand starting at position 2819 of SEQ ID NO: 1243839
cgugcuaauuuguuucuau

SEQ ID NO: 1445337 - RNA, 19 nt, Artificial Sequence
  Description of Artificial Sequence: Synthetic oligonucleotide
  Antisense strand to SEQ ID NO: 1445336
auagaaacaaauuagcacg

SEQ ID NO: 1445338 - RNA, 19 nt, Artificial Sequence
  Description of Artificial Sequence: Synthetic oligonucleotide
  Sense strand starting at position 2820 of SEQ ID NO: 1243839
gugcuaauuuguuucuauu

SEQ ID NO: 1445339 - RNA, 19 nt, Artificial Sequence
  Description of Artificial Sequence: Synthetic oligonucleotide
  Antisense strand to SEQ ID NO: 1445338
aauagaaacaaauuagcac

SEQ ID NO: 1445340 - RNA, 19 nt, Artificial Sequence
  Description of Artificial Sequence: Synthetic oligonucleotide
  Sense strand starting at position 2831 of SEQ ID NO: 1243839
uuucuauuauucguaguga

SEQ ID NO: 1445341 - RNA, 19 nt, Artificial Sequence
  Description of Artificial Sequence: Synthetic oligonucleotide
  Antisense strand to SEQ ID NO: 1445340
ucacuacgaauaauagaaa

SEQ ID NO: 1445342 - RNA, 19 nt, Artificial Sequence
  Description of Artificial Sequence: Synthetic oligonucleotide
  Sense strand starting at position 2895 of SEQ ID NO: 1243839
caagcaauccgcgauccuu

SEQ ID NO: 1445343 - RNA, 19 nt, Artificial Sequence
  Description of Artificial Sequence: Synthetic oligonucleotide
  Antisense strand to SEQ ID NO: 1445342
aaggaucgcggauugcuug

SEQ ID NO: 1445344 - RNA, 19 nt, Artificial Sequence
  Description of Artificial Sequence: Synthetic oligonucleotide
  Sense strand starting at position 2903 of SEQ ID NO: 1243839
ccgcgauccuuggucuuga

SEQ ID NO: 1445345 - RNA, 19 nt, Artificial Sequence
  Description of Artificial Sequence: Synthetic oligonucleotide
  Antisense strand to SEQ ID NO: 1445344
ucaagaccaaggaucgcgg

SEQ ID NO: 1445346 - RNA, 19 nt, Artificial Sequence
  Description of Artificial Sequence: Synthetic oligonucleotide
  Sense strand starting at position 2904 of SEQ ID NO: 1243839
cgcgauccuuggucuugaa

SEQ ID NO: 1445347 - RNA, 19 nt, Artificial Sequence
  Description of Artificial Sequence: Synthetic oligonucleotide
  Antisense strand to SEQ ID NO: 1445346
uucaagaccaaggaucgcg

SEQ ID NO: 1445348 - RNA, 19 nt, Artificial Sequence
  Description of Artificial Sequence: Synthetic oligonucleotide
  Sense strand starting at position 2944 of SEQ ID NO: 1243839
cccgucugguccucccaaa

SEQ ID NO: 1445349 - RNA, 19 nt, Artificial Sequence
  Description of Artificial Sequence: Synthetic oligonucleotide
  Antisense strand to SEQ ID NO: 1445348
uuugggaggaccagacggg

SEQ ID NO: 1445350 - RNA, 19 nt, Artificial Sequence
  Description of Artificial Sequence: Synthetic oligonucleotide
  Sense strand starting at position 3022 of SEQ ID NO: 1243839
aagacaaaugucgggacau

SEQ ID NO: 1445351 - RNA, 19 nt, Artificial Sequence
  Description of Artificial Sequence: Synthetic oligonucleotide
  Antisense strand to SEQ ID NO: 1445350
augucccgacauuugucuu

SEQ ID NO: 1445352 - RNA, 19 nt, Artificial Sequence
  Description of Artificial Sequence: Synthetic oligonucleotide
  Sense strand starting at position 3023 of SEQ ID NO: 1243839
agacaaaugucgggacauu

SEQ ID NO: 1445353 - RNA, 19 nt, Artificial Sequence
  Description of Artificial Sequence: Synthetic oligonucleotide
  Antisense strand to SEQ ID NO: 1445352
aaugucccgacauuugucu

SEQ ID NO: 1445354 - RNA, 19 nt, Artificial Sequence
  Description of Artificial Sequence: Synthetic oligonucleotide
  Sense strand starting at position 3045 of SEQ ID NO: 1243839
acccaagucccugaguguu

SEQ ID NO: 1445355 - RNA, 19 nt, Artificial Sequence
  Description of Artificial Sequence: Synthetic oligonucleotide
  Antisense strand to SEQ ID NO: 1445354
aacacucagggacuugggu

SEQ ID NO: 1445356 - RNA, 19 nt, Artificial Sequence
  Description of Artificial Sequence: Synthetic oligonucleotide
  Sense strand starting at position 3203 of SEQ ID NO: 1243839
guugaauaauuugguccaa

SEQ ID NO: 1445357 - RNA, 19 nt, Artificial Sequence
  Description of Artificial Sequence: Synthetic oligonucleotide
  Antisense strand to SEQ ID NO: 1445356
uuggaccaaauuauucaac

SEQ ID NO: 1445358 - RNA, 19 nt, Artificial Sequence
  Description of Artificial Sequence: Synthetic oligonucleotide
  Sense strand starting at position 3247 of SEQ ID NO: 1243839
ucaugucuuucugagacua

SEQ ID NO: 1445359 - RNA, 19 nt, Artificial Sequence
  Description of Artificial Sequence: Synthetic oligonucleotide
  Antisense strand to SEQ ID NO: 1445358
uagucucagaaagacauga

SEQ ID NO: 1445360 - RNA, 19 nt, Artificial Sequence
  Description of Artificial Sequence: Synthetic oligonucleotide
  Sense strand starting at position 3249 of SEQ ID NO: 1243839
augucuuucugagacuaaa

SEQ ID NO: 1445361 - RNA, 19 nt, Artificial Sequence
  Description of Artificial Sequence: Synthetic oligonucleotide
  Antisense strand to SEQ ID NO: 1445360
uuuagucucagaaagacau

SEQ ID NO: 1445362 - RNA, 19 nt, Artificial Sequence
  Description of Artificial Sequence: Synthetic oligonucleotide
  Sense strand starting at position 3289 of SEQ ID NO: 1243839
gguguugucuccuuaccaa

SEQ ID NO: 1445363 - RNA, 19 nt, Artificial Sequence
  Description of Artificial Sequence: Synthetic oligonucleotide
  Antisense strand to SEQ ID NO: 1445362
uugguaaggagacaacacc

SEQ ID NO: 1445364 - RNA, 19 nt, Artificial Sequence
  Description of Artificial Sequence: Synthetic oligonucleotide
  Sense strand starting at position 3361 of SEQ ID NO: 1243839
auggccguuauuggauaau

SEQ ID NO: 1445365 - RNA, 19 nt, Artificial Sequence
  Description of Artificial Sequence: Synthetic oligonucleotide
  Antisense strand to SEQ ID NO: 1445364
auuauccaauaacggccau

SEQ ID NO: 1445366 - RNA, 19 nt, Artificial Sequence
  Description of Artificial Sequence: Synthetic oligonucleotide
  Sense strand starting at position 3535 of SEQ ID NO: 1243839
ucugaaauagguuguauaa

SEQ ID NO: 1445367 - RNA, 19 nt, Artificial Sequence
  Description of Artificial Sequence: Synthetic oligonucleotide
  Antisense strand to SEQ ID NO: 1445366
uuauacaaccuauuucaga

SEQ ID NO: 1445368 - RNA, 19 nt, Artificial Sequence
  Description of Artificial Sequence: Synthetic oligonucleotide
  Sense strand starting at position 3537 of SEQ ID NO: 1243839
ugaaauagguuguauaagu

SEQ ID NO: 1445369 - RNA, 19 nt, Artificial Sequence
  Description of Artificial Sequence: Synthetic oligonucleotide
  Antisense strand to SEQ ID NO: 1445368
acuuauacaaccuauuuca

SEQ ID NO: 1445370 - RNA, 19 nt, Artificial Sequence
  Description of Artificial Sequence: Synthetic oligonucleotide
  Sense strand starting at position 3542 of SEQ ID NO: 1243839
uagguuguauaagugagaa

SEQ ID NO: 1445371 - RNA, 19 nt, Artificial Sequence
  Description of Artificial Sequence: Synthetic oligonucleotide
  Antisense strand to SEQ ID NO: 1445370
uucucacuuauacaaccua

SEQ ID NO: 1445372 - RNA, 19 nt, Artificial Sequence
  Description of Artificial Sequence: Synthetic oligonucleotide
  Sense strand starting at position 3598 of SEQ ID NO: 1243839
cggagaaguucagcuggua

SEQ ID NO: 1445373 - RNA, 19 nt, Artificial Sequence
  Description of Artificial Sequence: Synthetic oligonucleotide
  Antisense strand to SEQ ID NO: 1445372
uaccagcugaacuucuccg

SEQ ID NO: 1445374 - RNA, 19 nt, Artificial Sequence
  Description of Artificial Sequence: Synthetic oligonucleotide
  Sense strand starting at position 3640 of SEQ ID NO: 1243839
gaauuaagguagucucaau

SEQ ID NO: 1445375 - RNA, 19 nt, Artificial Sequence
  Description of Artificial Sequence: Synthetic oligonucleotide
  Antisense strand to SEQ ID NO: 1445374
auugagacuaccuuaauuc

SEQ ID NO: 1445376 - RNA, 19 nt, Artificial Sequence
  Description of Artificial Sequence: Synthetic oligonucleotide
  Sense strand starting at position 3673 of SEQ ID NO: 1243839
cucuguaaauguucuuguu

SEQ ID NO: 1445377 - RNA, 19 nt, Artificial Sequence
  Description of Artificial Sequence: Synthetic oligonucleotide
  Antisense strand to SEQ ID NO: 1445376
aacaagaacauuuacagag

SEQ ID NO: 1445378 - RNA, 19 nt, Artificial Sequence
  Description of Artificial Sequence: Synthetic oligonucleotide
  Sense strand starting at position 650 of SEQ ID NO: 1243840
agagguagcucuggagaaa

SEQ ID NO: 1445379 - RNA, 19 nt, Artificial Sequence
  Description of Artificial Sequence: Synthetic oligonucleotide
  Antisense strand to SEQ ID NO: 1445378
uuucuccagagcuaccucu

SEQ ID NO: 1445380 - RNA, 19 nt, Artificial Sequence
  Description of Artificial Sequence: Synthetic oligonucleotide
  Sense strand starting at position 880 of SEQ ID NO: 1243840
agcagucugacagggagau

SEQ ID NO: 1445381 - RNA, 19 nt, Artificial Sequence
  Description of Artificial Sequence: Synthetic oligonucleotide
  Antisense strand to SEQ ID NO: 1445380
aucucccugucagacugcu

SEQ ID NO: 1445382 - RNA, 19 nt, Artificial Sequence
  Description of Artificial Sequence: Synthetic oligonucleotide
  Sense strand starting at position 1098 of SEQ ID NO: 1243840
gggaucggcuucuccuuaa

SEQ ID NO: 1445383 - RNA, 19 nt, Artificial Sequence
  Description of Artificial Sequence: Synthetic oligonucleotide
  Antisense strand to SEQ ID NO: 1445382
uuaaggagaagccgauccc

SEQ ID NO: 1445384 - RNA, 19 nt, Artificial Sequence
  Description of Artificial Sequence: Synthetic oligonucleotide
  Sense strand starting at position 1268 of SEQ ID NO: 1243840
gaguuaaacguggacucca

SEQ ID NO: 1445385 - RNA, 19 nt, Artificial Sequence
  Description of Artificial Sequence: Synthetic oligonucleotide
  Antisense strand to SEQ ID NO: 1445384
uggaguccacguuuaacuc

SEQ ID NO: 1445386 - RNA, 19 nt, Artificial Sequence
  Description of Artificial Sequence: Synthetic oligonucleotide
  Sense strand starting at position 2756 of SEQ ID NO: 1243840
ggagccucugucugcaaga

SEQ ID NO: 1445387 - RNA, 19 nt, Artificial Sequence
  Description of Artificial Sequence: Synthetic oligonucleotide
  Antisense strand to SEQ ID NO: 1445386
ucuugcagacagaggcucc

SEQ ID NO: 1445388 - RNA, 19 nt, Artificial Sequence
  Description of Artificial Sequence: Synthetic oligonucleotide
  Sense strand starting at position 2758 of SEQ ID NO: 1243840
agccucugucugcaagaca

SEQ ID NO: 1445389 - RNA, 19 nt, Artificial Sequence
  Description of Artificial Sequence: Synthetic oligonucleotide
  Antisense strand to SEQ ID NO: 1445388
ugucuugcagacagaggcu

SEQ ID NO: 1445390 - RNA, 19 nt, Artificial Sequence
  Description of Artificial Sequence: Synthetic oligonucleotide
  Sense strand starting at position 2875 of SEQ ID NO: 1243840
gcaagugauguggacaaua

SEQ ID NO: 1445391 - RNA, 19 nt, Artificial Sequence
  Description of Artificial Sequence: Synthetic oligonucleotide
  Antisense strand to SEQ ID NO: 1445390
uauuguccacaucacuugc

SEQ ID NO: 1445392 - RNA, 19 nt, Artificial Sequence
  Description of Artificial Sequence: Synthetic oligonucleotide
  Sense strand starting at position 2974 of SEQ ID NO: 1243840
cuuagcagguggucagaaa

SEQ ID NO: 1445393 - RNA, 19 nt, Artificial Sequence
  Description of Artificial Sequence: Synthetic oligonucleotide
  Antisense strand to SEQ ID NO: 1445392
uuucugaccaccugcuaag

SEQ ID NO: 1445394 - RNA, 19 nt, Artificial Sequence
  Description of Artificial Sequence: Synthetic oligonucleotide
  Sense strand starting at position 3090 of SEQ ID NO: 1243840
gacugagcucccgguaagu

SEQ ID NO: 1445395 - RNA, 19 nt, Artificial Sequence
  Description of Artificial Sequence: Synthetic oligonucleotide
  Antisense strand to SEQ ID NO: 1445394
acuuaccgggagcucaguc

SEQ ID NO: 1445396 - RNA, 19 nt, Artificial Sequence
  Description of Artificial Sequence: Synthetic oligonucleotide
  Sense strand starting at position 3092 of SEQ ID NO: 1243840
cugagcucccgguaaguuu

SEQ ID NO: 1445397 - RNA, 19 nt, Artificial Sequence
  Description of Artificial Sequence: Synthetic oligonucleotide
  Antisense strand to SEQ ID NO: 1445396
aaacuuaccgggagcucag

SEQ ID NO: 1445398 - RNA, 19 nt, Artificial Sequence
  Description of Artificial Sequence: Synthetic oligonucleotide
  Sense strand starting at position 3099 of SEQ ID NO: 1243840
cccgguaaguuuggcuuua

SEQ ID NO: 1445399 - RNA, 19 nt, Artificial Sequence
  Description of Artificial Sequence: Synthetic oligonucleotide
  Antisense strand to SEQ ID NO: 1445398
uaaagccaaacuuaccggg

SEQ ID NO: 1445400 - RNA, 19 nt, Artificial Sequence
  Description of Artificial Sequence: Synthetic oligonucleotide
  Sense strand starting at position 3100 of SEQ ID NO: 1243840
ccgguaaguuuggcuuuau

SEQ ID NO: 1445401 - RNA, 19 nt, Artificial Sequence
  Description of Artificial Sequence: Synthetic oligonucleotide
  Antisense strand to SEQ ID NO: 1445400
auaaagccaaacuuaccgg

SEQ ID NO: 1445402 - RNA, 19 nt, Artificial Sequence
  Description of Artificial Sequence: Synthetic oligonucleotide
  Sense strand starting at position 3101 of SEQ ID NO: 1243840
cgguaaguuuggcuuuaua

SEQ ID NO: 1445403 - RNA, 19 nt, Artificial Sequence
  Description of Artificial Sequence: Synthetic oligonucleotide
  Antisense strand to SEQ ID NO: 1445402
uauaaagccaaacuuaccg

SEQ ID NO: 1445404 - RNA, 19 nt, Artificial Sequence
  Description of Artificial Sequence: Synthetic oligonucleotide
  Sense strand starting at position 3104 of SEQ ID NO: 1243840
uaaguuuggcuuuauagga

SEQ ID NO: 1445405 - RNA, 19 nt, Artificial Sequence
  Description of Artificial Sequence: Synthetic oligonucleotide
  Antisense strand to SEQ ID NO: 1445404
uccuauaaagccaaacuua

SEQ ID NO: 1445406 - RNA, 19 nt, Artificial Sequence
  Description of Artificial Sequence: Synthetic oligonucleotide
  Sense strand starting at position 3185 of SEQ ID NO: 1243840
auggaaagguuugccacua

SEQ ID NO: 1445407 - RNA, 19 nt, Artificial Sequence
  Description of Artificial Sequence: Synthetic oligonucleotide
  Antisense strand to SEQ ID NO: 1445406
uaguggcaaaccuuuccau

SEQ ID NO: 1445408 - RNA, 19 nt, Artificial Sequence
  Description of Artificial Sequence: Synthetic oligonucleotide
  Sense strand starting at position 3186 of SEQ ID NO: 1243840
uggaaagguuugccacuau

SEQ ID NO: 1445409 - RNA, 19 nt, Artificial Sequence
  Description of Artificial Sequence: Synthetic oligonucleotide
  Antisense strand to SEQ ID NO: 1445408
auaguggcaaaccuuucca

SEQ ID NO: 1445410 - RNA, 19 nt, Artificial Sequence
  Description of Artificial Sequence: Synthetic oligonucleotide
  Sense strand starting at position 3224 of SEQ ID NO: 1243840
aaagacaucuccgagagac

SEQ ID NO: 1445411 - RNA, 19 nt, Artificial Sequence
  Description of Artificial Sequence: Synthetic oligonucleotide
  Antisense strand to SEQ ID NO: 1445410
gucucucggagaugucuuu

SEQ ID NO: 1445412 - RNA, 19 nt, Artificial Sequence
  Description of Artificial Sequence: Synthetic oligonucleotide
  Sense strand starting at position 3610 of SEQ ID NO: 1243840
ucaaucauggcucaaugua

SEQ ID NO: 1445413 - RNA, 19 nt, Artificial Sequence
  Description of Artificial Sequence: Synthetic oligonucleotide
  Antisense strand to SEQ ID NO: 1445412
uacauugagccaugauuga

SEQ ID NO: 1445414 - RNA, 19 nt, Artificial Sequence
  Description of Artificial Sequence: Synthetic oligonucleotide
  Sense strand starting at position 3800 of SEQ ID NO: 1243840
ucccaacaugcauggauua

SEQ ID NO: 1445415 - RNA, 19 nt, Artificial Sequence
  Description of Artificial Sequence: Synthetic oligonucleotide
  Antisense strand to SEQ ID NO: 1445414
uaauccaugcauguuggga

SEQ ID NO: 1445416 - RNA, 19 nt, Artificial Sequence
  Description of Artificial Sequence: Synthetic oligonucleotide
  Sense strand starting at position 3822 of SEQ ID NO: 1243840
gcgugagccacugugcauu

SEQ ID NO: 1445417 - RNA, 19 nt, Artificial Sequence
  Description of Artificial Sequence: Synthetic oligonucleotide
  Antisense strand to SEQ ID NO: 1445416
aaugcacaguggcucacgc

SEQ ID NO: 1445418 - RNA, 19 nt, Artificial Sequence
  Description of Artificial Sequence: Synthetic oligonucleotide
  Sense strand starting at position 3832 of SEQ ID NO: 1243840
cugugcauugcugacauuu

SEQ ID NO: 1445419 - RNA, 19 nt, Artificial Sequence
  Description of Artificial Sequence: Synthetic oligonucleotide
  Antisense strand to SEQ ID NO: 1445418
aaaugucagcaaugcacag

SEQ ID NO: 1445420 - RNA, 19 nt, Artificial Sequence
  Description of Artificial Sequence: Synthetic oligonucleotide
  Sense strand starting at position 3871 of SEQ ID NO: 1243840
ccagucauagcuugcaaga

SEQ ID NO: 1445421 - RNA, 19 nt, Artificial Sequence
  Description of Artificial Sequence: Synthetic oligonucleotide
  Antisense strand to SEQ ID NO: 1445420
ucuugcaagcuaugacugg

SEQ ID NO: 1445422 - RNA, 19 nt, Artificial Sequence
  Description of Artificial Sequence: Synthetic oligonucleotide
  Sense strand starting at position 3873 of SEQ ID NO: 1243840
agucauagcuugcaagaga

SEQ ID NO: 1445423 - RNA, 19 nt, Artificial Sequence
  Description of Artificial Sequence: Synthetic oligonucleotide
  Antisense strand to SEQ ID NO: 1445422
ucucuugcaagcuaugacu

SEQ ID NO: 1445424 - RNA, 19 nt, Artificial Sequence
  Description of Artificial Sequence: Synthetic oligonucleotide
  Sense strand starting at position 3940 of SEQ ID NO: 1243840
ugagcacuuuaauaaauag

SEQ ID NO: 1445425 - RNA, 19 nt, Artificial Sequence
  Description of Artificial Sequence: Synthetic oligonucleotide
  Antisense strand to SEQ ID NO: 1445424
cuauuuauuaaagugcuca

SEQ ID NO: 1445426 - RNA, 19 nt, Artificial Sequence
  Description of Artificial Sequence: Synthetic oligonucleotide
  Sense strand starting at position 3952 of SEQ ID NO: 1243840
uaaauagauuuccgagaug

SEQ ID NO: 1445427 - RNA, 19 nt, Artificial Sequence
  Description of Artificial Sequence: Synthetic oligonucleotide
  Antisense strand to SEQ ID NO: 1445426
caucucggaaaucuauuua

SEQ ID NO: 1445428 - RNA, 19 nt, Artificial Sequence
  Description of Artificial Sequence: Synthetic oligonucleotide
  Sense strand starting at position 2086 of SEQ ID NO: 1243841
gggagcuucuguccaaggu

SEQ ID NO: 1445429 - RNA, 19 nt, Artificial Sequence
  Description of Artificial Sequence: Synthetic oligonucleotide
  Antisense strand to SEQ ID NO: 1445428
accuuggacagaagcuccc

SEQ ID NO: 1445430 - RNA, 19 nt, Artificial Sequence
  Description of Artificial Sequence: Synthetic oligonucleotide
  Sense strand starting at position 2087 of SEQ ID NO: 1243841
ggagcuucuguccaagguu

SEQ ID NO: 1445431 - RNA, 19 nt, Artificial Sequence
  Description of Artificial Sequence: Synthetic oligonucleotide
  Antisense strand to SEQ ID NO: 1445430
aaccuuggacagaagcucc

SEQ ID NO: 1445432 - RNA, 19 nt, Artificial Sequence
  Description of Artificial Sequence: Synthetic oligonucleotide
  Sense strand starting at position 2927 of SEQ ID NO: 1243841
cgaagugggccucagagau

SEQ ID NO: 1445433 - RNA, 19 nt, Artificial Sequence
  Description of Artificial Sequence: Synthetic oligonucleotide
  Antisense strand to SEQ ID NO: 1445432
aucucugaggcccacuucg

SEQ ID NO: 1445434 - RNA, 19 nt, Artificial Sequence
  Description of Artificial Sequence: Synthetic oligonucleotide
  Sense strand starting at position 2976 of SEQ ID NO: 1243841
gccugagcccgucacaaau

SEQ ID NO: 1445435 - RNA, 19 nt, Artificial Sequence
  Description of Artificial Sequence: Synthetic oligonucleotide
  Antisense strand to SEQ ID NO: 1445434
auuugugacgggcucaggc

SEQ ID NO: 1445436 - RNA, 19 nt, Artificial Sequence
  Description of Artificial Sequence: Synthetic oligonucleotide
  Sense strand starting at position 2978 of SEQ ID NO: 1243841
cugagcccgucacaaauau

SEQ ID NO: 1445437 - RNA, 19 nt, Artificial Sequence
  Description of Artificial Sequence: Synthetic oligonucleotide
  Antisense strand to SEQ ID NO: 1445436
auauuugugacgggcucag

SEQ ID NO: 1445438 - RNA, 19 nt, Artificial Sequence
  Description of Artificial Sequence: Synthetic oligonucleotide
  Sense strand starting at position 3016 of SEQ ID NO: 1243841
gcccucuuauuugucauau

SEQ ID NO: 1445439 - RNA, 19 nt, Artificial Sequence
  Description of Artificial Sequence: Synthetic oligonucleotide
  Antisense strand to SEQ ID NO: 1445438
auaugacaaauaagagggc

SEQ ID NO: 1445440 - RNA, 19 nt, Artificial Sequence
  Description of Artificial Sequence: Synthetic oligonucleotide
  Sense strand starting at position 3101 of SEQ ID NO: 1243841
uguauaauuugagaacuug

SEQ ID NO: 1445441 - RNA, 19 nt, Artificial Sequence
  Description of Artificial Sequence: Synthetic oligonucleotide
  Antisense strand to SEQ ID NO: 1445440
caaguucucaaauuauaca

SEQ ID NO: 1445442 - RNA, 19 nt, Artificial Sequence
  Description of Artificial Sequence: Synthetic oligonucleotide
  Sense strand starting at position 3112 of SEQ ID NO: 1243841
agaacuugaugcuagcgaa

SEQ ID NO: 1445443 - RNA, 19 nt, Artificial Sequence
  Description of Artificial Sequence: Synthetic oligonucleotide
  Antisense strand to SEQ ID NO: 1445442
uucgcuagcaucaaguucu

SEQ ID NO: 1445444 - RNA, 19 nt, Artificial Sequence
  Description of Artificial Sequence: Synthetic oligonucleotide
  Sense strand starting at position 3115 of SEQ ID NO: 1243841
acuugaugcuagcgaaauu

SEQ ID NO: 1445445 - RNA, 19 nt, Artificial Sequence
  Description of Artificial Sequence: Synthetic oligonucleotide
  Antisense strand to SEQ ID NO: 1445444
aauuucgcuagcaucaagu

SEQ ID NO: 1445446 - RNA, 19 nt, Artificial Sequence
  Description of Artificial Sequence: Synthetic oligonucleotide
  Sense strand starting at position 3122 of SEQ ID NO: 1243841
gcuagcgaaauugaguaaa

SEQ ID NO: 1445447 - RNA, 19 nt, Artificial Sequence
  Description of Artificial Sequence: Synthetic oligonucleotide
  Antisense strand to SEQ ID NO: 1445446
uuuacucaauuucgcuagc

SEQ ID NO: 1445448 - RNA, 19 nt, Artificial Sequence
  Description of Artificial Sequence: Synthetic oligonucleotide
  Sense strand starting at position 3152 of SEQ ID NO: 1243841
gaaagcuguuccugucaga

SEQ ID NO: 1445449 - RNA, 19 nt, Artificial Sequence
  Description of Artificial Sequence: Synthetic oligonucleotide
  Antisense strand to SEQ ID NO: 1445448
ucugacaggaacagcuuuc

SEQ ID NO: 1445450 - RNA, 19 nt, Artificial Sequence
  Description of Artificial Sequence: Synthetic oligonucleotide
  Sense strand starting at position 3155 of SEQ ID NO: 1243841
agcuguuccugucagaugu

SEQ ID NO: 1445451 - RNA, 19 nt, Artificial Sequence
  Description of Artificial Sequence: Synthetic oligonucleotide
  Antisense strand to SEQ ID NO: 1445450
acaucugacaggaacagcu

SEQ ID NO: 1445452 - RNA, 19 nt, Artificial Sequence
  Description of Artificial Sequence: Synthetic oligonucleotide
  Sense strand starting at position 3157 of SEQ ID NO: 1243841
cuguuccugucagauguga

SEQ ID NO: 1445453 - RNA, 19 nt, Artificial Sequence
  Description of Artificial Sequence: Synthetic oligonucleotide
  Antisense strand to SEQ ID NO: 1445452
ucacaucugacaggaacag

SEQ ID NO: 1445454 - RNA, 19 nt, Artificial Sequence
  Description of Artificial Sequence: Synthetic oligonucleotide
  Sense strand starting at position 3159 of SEQ ID NO: 1243841
guuccugucagaugugaau

SEQ ID NO: 1445455 - RNA, 19 nt, Artificial Sequence
  Description of Artificial Sequence: Synthetic oligonucleotide
  Antisense strand to SEQ ID NO: 1445454
auucacaucugacaggaac

SEQ ID NO: 1445456 - RNA, 19 nt, Artificial Sequence
  Description of Artificial Sequence: Synthetic oligonucleotide
  Sense strand starting at position 3215 of SEQ ID NO: 1243841
uuaccuuguuucuggagau

SEQ ID NO: 1445457 - RNA, 19 nt, Artificial Sequence
  Description of Artificial Sequence: Synthetic oligonucleotide
  Antisense strand to SEQ ID NO: 1445456
aucuccagaaacaagguaa

SEQ ID NO: 1445458 - RNA, 19 nt, Artificial Sequence
  Description of Artificial Sequence: Synthetic oligonucleotide
  Sense strand starting at position 3216 of SEQ ID NO: 1243841
uaccuuguuucuggagauc

SEQ ID NO: 1445459 - RNA, 19 nt, Artificial Sequence
  Description of Artificial Sequence: Synthetic oligonucleotide
  Antisense strand to SEQ ID NO: 1445458
gaucuccagaaacaaggua

SEQ ID NO: 1445460 - RNA, 19 nt, Artificial Sequence
  Description of Artificial Sequence: Synthetic oligonucleotide
  Sense strand starting at position 3289 of SEQ ID NO: 1243841
ccagauuaucucuggaccu

SEQ ID NO: 1445461 - RNA, 19 nt, Artificial Sequence
  Description of Artificial Sequence: Synthetic oligonucleotide
  Antisense strand to SEQ ID NO: 1445460
agguccagagauaaucugg

SEQ ID NO: 1445462 - RNA, 19 nt, Artificial Sequence
  Description of Artificial Sequence: Synthetic oligonucleotide
  Sense strand starting at position 3415 of SEQ ID NO: 1243841
aagggaaucuggcaucauu

SEQ ID NO: 1445463 - RNA, 19 nt, Artificial Sequence
  Description of Artificial Sequence: Synthetic oligonucleotide
  Antisense strand to SEQ ID NO: 1445462
aaugaugccagauucccuu

SEQ ID NO: 1445464 - RNA, 19 nt, Artificial Sequence
  Description of Artificial Sequence: Synthetic oligonucleotide
  Sense strand starting at position 3484 of SEQ ID NO: 1243841
ucagauuucugucaauagg

SEQ ID NO: 1445465 - RNA, 19 nt, Artificial Sequence
  Description of Artificial Sequence: Synthetic oligonucleotide
  Antisense strand to SEQ ID NO: 1445464
ccuauugacagaaaucuga

SEQ ID NO: 1445466 - RNA, 19 nt, Artificial Sequence
  Description of Artificial Sequence: Synthetic oligonucleotide
  Sense strand starting at position 3498 of SEQ ID NO: 1243841
auaggaauuccaggcuuua

SEQ ID NO: 1445467 - RNA, 19 nt, Artificial Sequence
  Description of Artificial Sequence: Synthetic oligonucleotide
  Antisense strand to SEQ ID NO: 1445466
uaaagccuggaauuccuau

SEQ ID NO: 1445468 - RNA, 19 nt, Artificial Sequence
  Description of Artificial Sequence: Synthetic oligonucleotide
  Sense strand starting at position 3664 of SEQ ID NO: 1243841
cugugaauguuccucagug

SEQ ID NO: 1445469 - RNA, 19 nt, Artificial Sequence
  Description of Artificial Sequence: Synthetic oligonucleotide
  Antisense strand to SEQ ID NO: 1445468
cacugaggaacauucacag

SEQ ID NO: 1445470 - RNA, 19 nt, Artificial Sequence
  Description of Artificial Sequence: Synthetic oligonucleotide
  Sense strand starting at position 3665 of SEQ ID NO: 1243841
ugugaauguuccucagugu

SEQ ID NO: 1445471 - RNA, 19 nt, Artificial Sequence
  Description of Artificial Sequence: Synthetic oligonucleotide
  Antisense strand to SEQ ID NO: 1445470
acacugaggaacauucaca

SEQ ID NO: 1445472 - RNA, 19 nt, Artificial Sequence
  Description of Artificial Sequence: Synthetic oligonucleotide
  Sense strand starting at position 3666 of SEQ ID NO: 1243841
gugaauguuccucagugua

SEQ ID NO: 1445473 - RNA, 19 nt, Artificial Sequence
  Description of Artificial Sequence: Synthetic oligonucleotide
  Antisense strand to SEQ ID NO: 1445472
uacacugaggaacauucac

SEQ ID NO: 1445474 - RNA, 19 nt, Artificial Sequence
  Description of Artificial Sequence: Synthetic oligonucleotide
  Sense strand starting at position 3668 of SEQ ID NO: 1243841
gaauguuccucaguguaca

SEQ ID NO: 1445475 - RNA, 19 nt, Artificial Sequence
  Description of Artificial Sequence: Synthetic oligonucleotide
  Antisense strand to SEQ ID NO: 1445474
uguacacugaggaacauuc

SEQ ID NO: 1445476 - RNA, 19 nt, Artificial Sequence
  Description of Artificial Sequence: Synthetic oligonucleotide
  Sense strand starting at position 11 of SEQ ID NO: 1243842
gcacuacagaguggugaau

SEQ ID NO: 1445477 - RNA, 19 nt, Artificial Sequence
  Description of Artificial Sequence: Synthetic oligonucleotide
  Antisense strand to SEQ ID NO: 1445476
auucaccacucuguagugc

SEQ ID NO: 1445478 - RNA, 19 nt, Artificial Sequence
  Description of Artificial Sequence: Synthetic oligonucleotide
  Sense strand starting at position 72 of SEQ ID NO: 1243842
acacuaguaucaguuauac

SEQ ID NO: 1445479 - RNA, 19 nt, Artificial Sequence
  Description of Artificial Sequence: Synthetic oligonucleotide
  Antisense strand to SEQ ID NO: 1445478
guauaacugauacuagugu

SEQ ID NO: 1445480 - RNA, 19 nt, Artificial Sequence
  Description of Artificial Sequence: Synthetic oligonucleotide
  Sense strand starting at position 98 of SEQ ID NO: 1243842
gcuauauuccuguaaaguu

SEQ ID NO: 1445481 - RNA, 19 nt, Artificial Sequence
  Description of Artificial Sequence: Synthetic oligonucleotide
  Antisense strand to SEQ ID NO: 1445480
aacuuuacaggaauauagc

SEQ ID NO: 1445482 - RNA, 19 nt, Artificial Sequence
  Description of Artificial Sequence: Synthetic oligonucleotide
  Sense strand starting at position 193 of SEQ ID NO: 1243842
ggacaagauuggcaucaaa

SEQ ID NO: 1445483 - RNA, 19 nt, Artificial Sequence
  Description of Artificial Sequence: Synthetic oligonucleotide
  Antisense strand to SEQ ID NO: 1445482
uuugaugccaaucuugucc

SEQ ID NO: 1445484 - RNA, 19 nt, Artificial Sequence
  Description of Artificial Sequence: Synthetic oligonucleotide
  Sense strand starting at position 244 of SEQ ID NO: 1243842
ggagcugugugaucagaug

SEQ ID NO: 1445485 - RNA, 19 nt, Artificial Sequence
  Description of Artificial Sequence: Synthetic oligonucleotide
  Antisense strand to SEQ ID NO: 1445484
caucugaucacacagcucc

SEQ ID NO: 1445486 - RNA, 19 nt, Artificial Sequence
  Description of Artificial Sequence: Synthetic oligonucleotide
  Sense strand starting at position 267 of SEQ ID NO: 1243842
ggccuucccugacuaugaa

SEQ ID NO: 1445487 - RNA, 19 nt, Artificial Sequence
  Description of Artificial Sequence: Synthetic oligonucleotide
  Antisense strand to SEQ ID NO: 1445486
uucauagucagggaaggcc

SEQ ID NO: 1445488 - RNA, 19 nt, Artificial Sequence
  Description of Artificial Sequence: Synthetic oligonucleotide
  Sense strand starting at position 870 of SEQ ID NO: 1243842
uuauccugucccugaauga

SEQ ID NO: 1445489 - RNA, 19 nt, Artificial Sequence
  Description of Artificial Sequence: Synthetic oligonucleotide
  Antisense strand to SEQ ID NO: 1445488
ucauucagggacaggauaa

SEQ ID NO: 1445490 - RNA, 19 nt, Artificial Sequence
  Description of Artificial Sequence: Synthetic oligonucleotide
  Sense strand starting at position 880 of SEQ ID NO: 1243842
ccugaaugauacgauaaca

SEQ ID NO: 1445491 - RNA, 19 nt, Artificial Sequence
  Description of Artificial Sequence: Synthetic oligonucleotide
  Antisense strand to SEQ ID NO: 1445490
uguuaucguaucauucagg

SEQ ID NO: 1445492 - RNA, 19 nt, Artificial Sequence
  Description of Artificial Sequence: Synthetic oligonucleotide
  Sense strand starting at position 923 of SEQ ID NO: 1243842
ggucaaacagacuguacau

SEQ ID NO: 1445493 - RNA, 19 nt, Artificial Sequence
  Description of Artificial Sequence: Synthetic oligonucleotide
  Antisense strand to SEQ ID NO: 1445492
auguacagucuguuugacc

SEQ ID NO: 1445494 - RNA, 19 nt, Artificial Sequence
  Description of Artificial Sequence: Synthetic oligonucleotide
  Sense strand starting at position 1038 of SEQ ID NO: 1243842
gucagagcucccggcuauu

SEQ ID NO: 1445495 - RNA, 19 nt, Artificial Sequence
  Description of Artificial Sequence: Synthetic oligonucleotide
  Antisense strand to SEQ ID NO: 1445494
aauagccgggagcucugac

SEQ ID NO: 1445496 - RNA, 19 nt, Artificial Sequence
  Description of Artificial Sequence: Synthetic oligonucleotide
  Sense strand starting at position 1733 of SEQ ID NO: 1243842
gggucuucuccacgcagau

SEQ ID NO: 1445497 - RNA, 19 nt, Artificial Sequence
  Description of Artificial Sequence: Synthetic oligonucleotide
  Antisense strand to SEQ ID NO: 1445496
aucugcguggagaagaccc

SEQ ID NO: 1445498 - RNA, 19 nt, Artificial Sequence
  Description of Artificial Sequence: Synthetic oligonucleotide
  Sense strand starting at position 1785 of SEQ ID NO: 1243842
cugggaggccguugcaaau

SEQ ID NO: 1445499 - RNA, 19 nt, Artificial Sequence
  Description of Artificial Sequence: Synthetic oligonucleotide
  Antisense strand to SEQ ID NO: 1445498
auuugcaacggccucccag

SEQ ID NO: 1445500 - RNA, 19 nt, Artificial Sequence
  Description of Artificial Sequence: Synthetic oligonucleotide
  Sense strand starting at position 1989 of SEQ ID NO: 1243842
cuacauugagucuaaacga

SEQ ID NO: 1445501 - RNA, 19 nt, Artificial Sequence
  Description of Artificial Sequence: Synthetic oligonucleotide
  Antisense strand to SEQ ID NO: 1445500
ucguuuagacucaauguag

SEQ ID NO: 1445502 - RNA, 19 nt, Artificial Sequence
  Description of Artificial Sequence: Synthetic oligonucleotide
  Sense strand starting at position 2013 of SEQ ID NO: 1243842
ugaagauagcugggugaug

SEQ ID NO: 1445503 - RNA, 19 nt, Artificial Sequence
  Description of Artificial Sequence: Synthetic oligonucleotide
  Antisense strand to SEQ ID NO: 1445502
caucacccagcuaucuuca

SEQ ID NO: 1445504 - RNA, 19 nt, Artificial Sequence
  Description of Artificial Sequence: Synthetic oligonucleotide
  Sense strand starting at position 2014 of SEQ ID NO: 1243842
gaagauagcugggugaugu

SEQ ID NO: 1445505 - RNA, 19 nt, Artificial Sequence
  Description of Artificial Sequence: Synthetic oligonucleotide
  Antisense strand to SEQ ID NO: 1445504
acaucacccagcuaucuuc

SEQ ID NO: 1445506 - RNA, 19 nt, Artificial Sequence
  Description of Artificial Sequence: Synthetic oligonucleotide
  Sense strand starting at position 2295 of SEQ ID NO: 1243842
gccauaucaaagggagacu

SEQ ID NO: 1445507 - RNA, 19 nt, Artificial Sequence
  Description of Artificial Sequence: Synthetic oligonucleotide
  Antisense strand to SEQ ID NO: 1445506
agucucccuuugauauggc

SEQ ID NO: 1445508 - RNA, 19 nt, Artificial Sequence
  Description of Artificial Sequence: Synthetic oligonucleotide
  Sense strand starting at position 2445 of SEQ ID NO: 1243842
ggaaggagguuguuaucga

SEQ ID NO: 1445509 - RNA, 19 nt, Artificial Sequence
  Description of Artificial Sequence: Synthetic oligonucleotide
  Antisense strand to SEQ ID NO: 1445508
ucgauaacaaccuccuucc

SEQ ID NO: 1445510 - RNA, 19 nt, Artificial Sequence
  Description of Artificial Sequence: Synthetic oligonucleotide
  Sense strand starting at position 2450 of SEQ ID NO: 1243842
gagguuguuaucgagggau

SEQ ID NO: 1445511 - RNA, 19 nt, Artificial Sequence
  Description of Artificial Sequence: Synthetic oligonucleotide
  Antisense strand to SEQ ID NO: 1445510
aucccucgauaacaaccuc

SEQ ID NO: 1445512 - RNA, 19 nt, Artificial Sequence
  Description of Artificial Sequence: Synthetic oligonucleotide
  Sense strand starting at position 2452 of SEQ ID NO: 1243842
gguuguuaucgagggauua

SEQ ID NO: 1445513 - RNA, 19 nt, Artificial Sequence
  Description of Artificial Sequence: Synthetic oligonucleotide
  Antisense strand to SEQ ID NO: 1445512
uaaucccucgauaacaacc

SEQ ID NO: 1445514 - RNA, 19 nt, Artificial Sequence
  Description of Artificial Sequence: Synthetic oligonucleotide
  Sense strand starting at position 2453 of SEQ ID NO: 1243842
guuguuaucgagggauuau

SEQ ID NO: 1445515 - RNA, 19 nt, Artificial Sequence
  Description of Artificial Sequence: Synthetic oligonucleotide
  Antisense strand to SEQ ID NO: 1445514
auaaucccucgauaacaac

SEQ ID NO: 1445516 - RNA, 19 nt, Artificial Sequence
  Description of Artificial Sequence: Synthetic oligonucleotide
  Sense strand starting at position 2454 of SEQ ID NO: 1243842
uuguuaucgagggauuaua

SEQ ID NO: 1445517 - RNA, 19 nt, Artificial Sequence
  Description of Artificial Sequence: Synthetic oligonucleotide
  Antisense strand to SEQ ID NO: 1445516
uauaaucccucgauaacaa

SEQ ID NO: 1445518 - RNA, 19 nt, Artificial Sequence
  Description of Artificial Sequence: Synthetic oligonucleotide
  Sense strand starting at position 2464 of SEQ ID NO: 1243842
gggauuauagccugagcug

SEQ ID NO: 1445519 - RNA, 19 nt, Artificial Sequence
  Description of Artificial Sequence: Synthetic oligonucleotide
  Antisense strand to SEQ ID NO: 1445518
cagcucaggcuauaauccc

SEQ ID NO: 1445520 - RNA, 19 nt, Artificial Sequence
  Description of Artificial Sequence: Synthetic oligonucleotide
  Sense strand starting at position 2510 of SEQ ID NO: 1243842
agggcuggaucugaggaau

SEQ ID NO: 1445521 - RNA, 19 nt, Artificial Sequence
  Description of Artificial Sequence: Synthetic oligonucleotide
  Antisense strand to SEQ ID NO: 1445520
auuccucagauccagcccu

SEQ ID NO: 1445522 - RNA, 19 nt, Artificial Sequence
  Description of Artificial Sequence: Synthetic oligonucleotide
  Sense strand starting at position 2522 of SEQ ID NO: 1243842
gaggaauauuuaggaggaa

SEQ ID NO: 1445523 - RNA, 19 nt, Artificial Sequence
  Description of Artificial Sequence: Synthetic oligonucleotide
  Antisense strand to SEQ ID NO: 1445522
uuccuccuaaauauuccuc

SEQ ID NO: 1445524 - RNA, 19 nt, Artificial Sequence
  Description of Artificial Sequence: Synthetic oligonucleotide
  Sense strand starting at position 2542 of SEQ ID NO: 1243842
auguauaggacuuggcaau

SEQ ID NO: 1445525 - RNA, 19 nt, Artificial Sequence
  Description of Artificial Sequence: Synthetic oligonucleotide
  Antisense strand to SEQ ID NO: 1445524
auugccaaguccuauacau

SEQ ID NO: 1445526 - RNA, 19 nt, Artificial Sequence
  Description of Artificial Sequence: Synthetic oligonucleotide
  Sense strand starting at position 2543 of SEQ ID NO: 1243842
uguauaggacuuggcaauu

SEQ ID NO: 1445527 - RNA, 19 nt, Artificial Sequence
  Description of Artificial Sequence: Synthetic oligonucleotide
  Antisense strand to SEQ ID NO: 1445526
aauugccaaguccuauaca

SEQ ID NO: 1445528 - RNA, 19 nt, Artificial Sequence
  Description of Artificial Sequence: Synthetic oligonucleotide
  Sense strand starting at position 2596 of SEQ ID NO: 1243842
ggaugacaccuaggugauu

SEQ ID NO: 1445529 - RNA, 19 nt, Artificial Sequence
  Description of Artificial Sequence: Synthetic oligonucleotide
  Antisense strand to SEQ ID NO: 1445528
aaucaccuaggugucaucc

SEQ ID NO: 1445530 - RNA, 19 nt, Artificial Sequence
  Description of Artificial Sequence: Synthetic oligonucleotide
  Sense strand starting at position 2597 of SEQ ID NO: 1243842
gaugacaccuaggugauua

SEQ ID NO: 1445531 - RNA, 19 nt, Artificial Sequence
  Description of Artificial Sequence: Synthetic oligonucleotide
  Antisense strand to SEQ ID NO: 1445530
uaaucaccuaggugucauc

SEQ ID NO: 1445532 - RNA, 19 nt, Artificial Sequence
  Description of Artificial Sequence: Synthetic oligonucleotide
  Sense strand starting at position 2737 of SEQ ID NO: 1243842
ggcacuugggucuauaauu

SEQ ID NO: 1445533 - RNA, 19 nt, Artificial Sequence
  Description of Artificial Sequence: Synthetic oligonucleotide
  Antisense strand to SEQ ID NO: 1445532
aauuauagacccaagugcc

SEQ ID NO: 1445534 - RNA, 19 nt, Artificial Sequence
  Description of Artificial Sequence: Synthetic oligonucleotide
  Sense strand starting at position 2755 of SEQ ID NO: 1243842
uuuggaguucgagggaguu

SEQ ID NO: 1445535 - RNA, 19 nt, Artificial Sequence
  Description of Artificial Sequence: Synthetic oligonucleotide
  Antisense strand to SEQ ID NO: 1445534
aacucccucgaacuccaaa

SEQ ID NO: 1445536 - RNA, 19 nt, Artificial Sequence
  Description of Artificial Sequence: Synthetic oligonucleotide
  Sense strand starting at position 2812 of SEQ ID NO: 1243842
gcuaaucugugguccgagu

SEQ ID NO: 1445537 - RNA, 19 nt, Artificial Sequence
  Description of Artificial Sequence: Synthetic oligonucleotide
  Antisense strand to SEQ ID NO: 1445536
acucggaccacagauuagc

SEQ ID NO: 1445538 - RNA, 19 nt, Artificial Sequence
  Description of Artificial Sequence: Synthetic oligonucleotide
  Sense strand starting at position 2826 of SEQ ID NO: 1243842
cgagugguggcugaagcua

SEQ ID NO: 1445539 - RNA, 19 nt, Artificial Sequence
  Description of Artificial Sequence: Synthetic oligonucleotide
  Antisense strand to SEQ ID NO: 1445538
uagcuucagccaccacucg

SEQ ID NO: 1445540 - RNA, 19 nt, Artificial Sequence
  Description of Artificial Sequence: Synthetic oligonucleotide
  Sense strand starting at position 2852 of SEQ ID NO: 1243842
gucugagauuggccaagaa

SEQ ID NO: 1445541 - RNA, 19 nt, Artificial Sequence
  Description of Artificial Sequence: Synthetic oligonucleotide
  Antisense strand to SEQ ID NO: 1445540
uucuuggccaaucucagac

SEQ ID NO: 1445542 - RNA, 19 nt, Artificial Sequence
  Description of Artificial Sequence: Synthetic oligonucleotide
  Sense strand starting at position 3309 of SEQ ID NO: 1243842
acacuugaggcuuaguaaa

SEQ ID NO: 1445543 - RNA, 19 nt, Artificial Sequence
  Description of Artificial Sequence: Synthetic oligonucleotide
  Antisense strand to SEQ ID NO: 1445542
uuuacuaagccucaagugu

SEQ ID NO: 1445544 - RNA, 19 nt, Artificial Sequence
  Description of Artificial Sequence: Synthetic oligonucleotide
  Sense strand starting at position 3311 of SEQ ID NO: 1243842
acuugaggcuuaguaaauu

SEQ ID NO: 1445545 - RNA, 19 nt, Artificial Sequence
  Description of Artificial Sequence: Synthetic oligonucleotide
  Antisense strand to SEQ ID NO: 1445544
aauuuacuaagccucaagu

SEQ ID NO: 1445546 - RNA, 19 nt, Artificial Sequence
  Description of Artificial Sequence: Synthetic oligonucleotide
  Sense strand starting at position 3338 of SEQ ID NO: 1243842
aaaugcauagugugauaca

SEQ ID NO: 1445547 - RNA, 19 nt, Artificial Sequence
  Description of Artificial Sequence: Synthetic oligonucleotide
  Antisense strand to SEQ ID NO: 1445546
uguaucacacuaugcauuu

SEQ ID NO: 1445548 - RNA, 19 nt, Artificial Sequence
  Description of Artificial Sequence: Synthetic oligonucleotide
  Sense strand starting at position 3369 of SEQ ID NO: 1243842
ccuagauucugcccaguga

SEQ ID NO: 1445549 - RNA, 19 nt, Artificial Sequence
  Description of Artificial Sequence: Synthetic oligonucleotide
  Antisense strand to SEQ ID NO: 1445548
ucacugggcagaaucuagg

SEQ ID NO: 1445550 - RNA, 19 nt, Artificial Sequence
  Description of Artificial Sequence: Synthetic oligonucleotide
  Sense strand starting at position 3382 of SEQ ID NO: 1243842
cagugaggucuuggaccau

SEQ ID NO: 1445551 - RNA, 19 nt, Artificial Sequence
  Description of Artificial Sequence: Synthetic oligonucleotide
  Antisense strand to SEQ ID NO: 1445550
augguccaagaccucacug

SEQ ID NO: 1445552 - RNA, 19 nt, Artificial Sequence
  Description of Artificial Sequence: Synthetic oligonucleotide
  Sense strand starting at position 3495 of SEQ ID NO: 1243842
cuaguaacucaugacaguu

SEQ ID NO: 1445553 - RNA, 19 nt, Artificial Sequence
  Description of Artificial Sequence: Synthetic oligonucleotide
  Antisense strand to SEQ ID NO: 1445552
aacugucaugaguuacuag

SEQ ID NO: 1445554 - RNA, 19 nt, Artificial Sequence
  Description of Artificial Sequence: Synthetic oligonucleotide
  Sense strand starting at position 3497 of SEQ ID NO: 1243842
aguaacucaugacaguuua

SEQ ID NO: 1445555 - RNA, 19 nt, Artificial Sequence
  Description of Artificial Sequence: Synthetic oligonucleotide
  Antisense strand to SEQ ID NO: 1445554
uaaacugucaugaguuacu

SEQ ID NO: 1445556 - RNA, 19 nt, Artificial Sequence
  Description of Artificial Sequence: Synthetic oligonucleotide
  Sense strand starting at position 40 of SEQ ID NO: 1243843
gagcuaagagcugagcuuu

SEQ ID NO: 1445557 - RNA, 19 nt, Artificial Sequence
  Description of Artificial Sequence: Synthetic oligonucleotide
  Antisense strand to SEQ ID NO: 1445556
aaagcucagcucuuagcuc

SEQ ID NO: 1445558 - RNA, 19 nt, Artificial Sequence
  Description of Artificial Sequence: Synthetic oligonucleotide
  Sense strand starting at position 51 of SEQ ID NO: 1243843
ugagcuuuguggucagaug

SEQ ID NO: 1445559 - RNA, 19 nt, Artificial Sequence
  Description of Artificial Sequence: Synthetic oligonucleotide
  Antisense strand to SEQ ID NO: 1445558
caucugaccacaaagcuca

SEQ ID NO: 1445560 - RNA, 19 nt, Artificial Sequence
  Description of Artificial Sequence: Synthetic oligonucleotide
  Sense strand starting at position 73 of SEQ ID NO: 1243843
cuggguucucguuaucaag

SEQ ID NO: 1445561 - RNA, 19 nt, Artificial Sequence
  Description of Artificial Sequence: Synthetic oligonucleotide
  Antisense strand to SEQ ID NO: 1445560
cuugauaacgagaacccag

SEQ ID NO: 1445562 - RNA, 19 nt, Artificial Sequence
  Description of Artificial Sequence: Synthetic oligonucleotide
  Sense strand starting at position 84 of SEQ ID NO: 1243843
uuaucaaguuucuugagca

SEQ ID NO: 1445563 - RNA, 19 nt, Artificial Sequence
  Description of Artificial Sequence: Synthetic oligonucleotide
  Antisense strand to SEQ ID NO: 1445562
ugcucaagaaacuugauaa

SEQ ID NO: 1445564 - RNA, 19 nt, Artificial Sequence
  Description of Artificial Sequence: Synthetic oligonucleotide
  Sense strand starting at position 88 of SEQ ID NO: 1243843
caaguuucuugagcaaguc

SEQ ID NO: 1445565 - RNA, 19 nt, Artificial Sequence
  Description of Artificial Sequence: Synthetic oligonucleotide
  Antisense strand to SEQ ID NO: 1445564
gacuugcucaagaaacuug

SEQ ID NO: 1445566 - RNA, 19 nt, Artificial Sequence
  Description of Artificial Sequence: Synthetic oligonucleotide
  Sense strand starting at position 105 of SEQ ID NO: 1243843
ucuacuauucugugccuca

SEQ ID NO: 1445567 - RNA, 19 nt, Artificial Sequence
  Description of Artificial Sequence: Synthetic oligonucleotide
  Antisense strand to SEQ ID NO: 1445566
ugaggcacagaauaguaga

SEQ ID NO: 1445568 - RNA, 19 nt, Artificial Sequence
  Description of Artificial Sequence: Synthetic oligonucleotide
  Sense strand starting at position 439 of SEQ ID NO: 1243843
gcacuacagaguggugaau

SEQ ID NO: 1445569 - RNA, 19 nt, Artificial Sequence
  Description of Artificial Sequence: Synthetic oligonucleotide
  Antisense strand to SEQ ID NO: 1445568
auucaccacucuguagugc

SEQ ID NO: 1445570 - RNA, 19 nt, Artificial Sequence
  Description of Artificial Sequence: Synthetic oligonucleotide
  Sense strand starting at position 500 of SEQ ID NO: 1243843
acacuaguaucaguuauac

SEQ ID NO: 1445571 - RNA, 19 nt, Artificial Sequence
  Description of Artificial Sequence: Synthetic oligonucleotide
  Antisense strand to SEQ ID NO: 1445570
guauaacugauacuagugu

SEQ ID NO: 1445572 - RNA, 19 nt, Artificial Sequence
  Description of Artificial Sequence: Synthetic oligonucleotide
  Sense strand starting at position 526 of SEQ ID NO: 1243843
gcuauauuccuguaaaguu

SEQ ID NO: 1445573 - RNA, 19 nt, Artificial Sequence
  Description of Artificial Sequence: Synthetic oligonucleotide
  Antisense strand to SEQ ID NO: 1445572
aacuuuacaggaauauagc

SEQ ID NO: 1445574 - RNA, 19 nt, Artificial Sequence
  Description of Artificial Sequence: Synthetic oligonucleotide
  Sense strand starting at position 621 of SEQ ID NO: 1243843
ggacaagauuggcaucaaa

SEQ ID NO: 1445575 - RNA, 19 nt, Artificial Sequence
  Description of Artificial Sequence: Synthetic oligonucleotide
  Antisense strand to SEQ ID NO: 1445574
uuugaugccaaucuugucc

SEQ ID NO: 1445576 - RNA, 19 nt, Artificial Sequence
  Description of Artificial Sequence: Synthetic oligonucleotide
  Sense strand starting at position 672 of SEQ ID NO: 1243843
ggagcugugugaucagaug

SEQ ID NO: 1445577 - RNA, 19 nt, Artificial Sequence
  Description of Artificial Sequence: Synthetic oligonucleotide
  Antisense strand to SEQ ID NO: 1445576
caucugaucacacagcucc

SEQ ID NO: 1445578 - RNA, 19 nt, Artificial Sequence
  Description of Artificial Sequence: Synthetic oligonucleotide
  Sense strand starting at position 695 of SEQ ID NO: 1243843
ggccuucccugacuaugaa

SEQ ID NO: 1445579 - RNA, 19 nt, Artificial Sequence
  Description of Artificial Sequence: Synthetic oligonucleotide
  Antisense strand to SEQ ID NO: 1445578
uucauagucagggaaggcc

SEQ ID NO: 1445580 - RNA, 19 nt, Artificial Sequence
  Description of Artificial Sequence: Synthetic oligonucleotide
  Sense strand starting at position 1298 of SEQ ID NO: 1243843
uuauccugucccugaauga

SEQ ID NO: 1445581 - RNA, 19 nt, Artificial Sequence
  Description of Artificial Sequence: Synthetic oligonucleotide
  Antisense strand to SEQ ID NO: 1445580
ucauucagggacaggauaa

SEQ ID NO: 1445582 - RNA, 19 nt, Artificial Sequence
  Description of Artificial Sequence: Synthetic oligonucleotide
  Sense strand starting at position 1351 of SEQ ID NO: 1243843
ggucaaacagacuguacau

SEQ ID NO: 1445583 - RNA, 19 nt, Artificial Sequence
  Description of Artificial Sequence: Synthetic oligonucleotide
  Antisense strand to SEQ ID NO: 1445582
auguacagucuguuugacc

SEQ ID NO: 1445584 - RNA, 19 nt, Artificial Sequence
  Description of Artificial Sequence: Synthetic oligonucleotide
  Sense strand starting at position 2161 of SEQ ID NO: 1243843
gggucuucuccacgcagau

SEQ ID NO: 1445585 - RNA, 19 nt, Artificial Sequence
  Description of Artificial Sequence: Synthetic oligonucleotide
  Antisense strand to SEQ ID NO: 1445584
aucugcguggagaagaccc

SEQ ID NO: 1445586 - RNA, 19 nt, Artificial Sequence
  Description of Artificial Sequence: Synthetic oligonucleotide
  Sense strand starting at position 2417 of SEQ ID NO: 1243843
cuacauugagucuaaacga

SEQ ID NO: 1445587 - RNA, 19 nt, Artificial Sequence
  Description of Artificial Sequence: Synthetic oligonucleotide
  Antisense strand to SEQ ID NO: 1445586
ucguuuagacucaauguag

SEQ ID NO: 1445588 - RNA, 19 nt, Artificial Sequence
  Description of Artificial Sequence: Synthetic oligonucleotide
  Sense strand starting at position 2441 of SEQ ID NO: 1243843
ugaagauagcugggugaug

SEQ ID NO: 1445589 - RNA, 19 nt, Artificial Sequence
  Description of Artificial Sequence: Synthetic oligonucleotide
  Antisense strand to SEQ ID NO: 1445588
caucacccagcuaucuuca

SEQ ID NO: 1445590 - RNA, 19 nt, Artificial Sequence
  Description of Artificial Sequence: Synthetic oligonucleotide
  Sense strand starting at position 2442 of SEQ ID NO: 1243843
gaagauagcugggugaugu

SEQ ID NO: 1445591 - RNA, 19 nt, Artificial Sequence
  Description of Artificial Sequence: Synthetic oligonucleotide
  Antisense strand to SEQ ID NO: 1445590
acaucacccagcuaucuuc

SEQ ID NO: 1445592 - RNA, 19 nt, Artificial Sequence
  Description of Artificial Sequence: Synthetic oligonucleotide
  Sense strand starting at position 2723 of SEQ ID NO: 1243843
gccauaucaaagggagacu

SEQ ID NO: 1445593 - RNA, 19 nt, Artificial Sequence
  Description of Artificial Sequence: Synthetic oligonucleotide
  Antisense strand to SEQ ID NO: 1445592
agucucccuuugauauggc

SEQ ID NO: 1445594 - RNA, 19 nt, Artificial Sequence
  Description of Artificial Sequence: Synthetic oligonucleotide
  Sense strand starting at position 2873 of SEQ ID NO: 1243843
ggaaggagguuguuaucga

SEQ ID NO: 1445595 - RNA, 19 nt, Artificial Sequence
  Description of Artificial Sequence: Synthetic oligonucleotide
  Antisense strand to SEQ ID NO: 1445594
ucgauaacaaccuccuucc

SEQ ID NO: 1445596 - RNA, 19 nt, Artificial Sequence
  Description of Artificial Sequence: Synthetic oligonucleotide
  Sense strand starting at position 2878 of SEQ ID NO: 1243843
gagguuguuaucgagggau

SEQ ID NO: 1445597 - RNA, 19 nt, Artificial Sequence
  Description of Artificial Sequence: Synthetic oligonucleotide
  Antisense strand to SEQ ID NO: 1445596
aucccucgauaacaaccuc

SEQ ID NO: 1445598 - RNA, 19 nt, Artificial Sequence
  Description of Artificial Sequence: Synthetic oligonucleotide
  Sense strand starting at position 2880 of SEQ ID NO: 1243843
gguuguuaucgagggauua

SEQ ID NO: 1445599 - RNA, 19 nt, Artificial Sequence
  Description of Artificial Sequence: Synthetic oligonucleotide
  Antisense strand to SEQ ID NO: 1445598
uaaucccucgauaacaacc

SEQ ID NO: 1445600 - RNA, 19 nt, Artificial Sequence
  Description of Artificial Sequence: Synthetic oligonucleotide
  Sense strand starting at position 2881 of SEQ ID NO: 1243843
guuguuaucgagggauuau

SEQ ID NO: 1445601 - RNA, 19 nt, Artificial Sequence
  Description of Artificial Sequence: Synthetic oligonucleotide
  Antisense strand to SEQ ID NO: 1445600
auaaucccucgauaacaac

SEQ ID NO: 1445602 - RNA, 19 nt, Artificial Sequence
  Description of Artificial Sequence: Synthetic oligonucleotide
  Sense strand starting at position 2882 of SEQ ID NO: 1243843
uuguuaucgagggauuaua

SEQ ID NO: 1445603 - RNA, 19 nt, Artificial Sequence
  Description of Artificial Sequence: Synthetic oligonucleotide
  Antisense strand to SEQ ID NO: 1445602
uauaaucccucgauaacaa

SEQ ID NO: 1445604 - RNA, 19 nt, Artificial Sequence
  Description of Artificial Sequence: Synthetic oligonucleotide
  Sense strand starting at position 2892 of SEQ ID NO: 1243843
gggauuauagccugagcug

SEQ ID NO: 1445605 - RNA, 19 nt, Artificial Sequence
  Description of Artificial Sequence: Synthetic oligonucleotide
  Antisense strand to SEQ ID NO: 1445604
cagcucaggcuauaauccc

SEQ ID NO: 1445606 - RNA, 19 nt, Artificial Sequence
  Description of Artificial Sequence: Synthetic oligonucleotide
  Sense strand starting at position 2950 of SEQ ID NO: 1243843
gaggaauauuuaggaggaa

SEQ ID NO: 1445607 - RNA, 19 nt, Artificial Sequence
  Description of Artificial Sequence: Synthetic oligonucleotide
  Antisense strand to SEQ ID NO: 1445606
uuccuccuaaauauuccuc

SEQ ID NO: 1445608 - RNA, 19 nt, Artificial Sequence
  Description of Artificial Sequence: Synthetic oligonucleotide
  Sense strand starting at position 2970 of SEQ ID NO: 1243843
auguauaggacuuggcaau

SEQ ID NO: 1445609 - RNA, 19 nt, Artificial Sequence
  Description of Artificial Sequence: Synthetic oligonucleotide
  Antisense strand to SEQ ID NO: 1445608
auugccaaguccuauacau

SEQ ID NO: 1445610 - RNA, 19 nt, Artificial Sequence
  Description of Artificial Sequence: Synthetic oligonucleotide
  Sense strand starting at position 2971 of SEQ ID NO: 1243843
uguauaggacuuggcaauu

SEQ ID NO: 1445611 - RNA, 19 nt, Artificial Sequence
  Description of Artificial Sequence: Synthetic oligonucleotide
  Antisense strand to SEQ ID NO: 1445610
aauugccaaguccuauaca

SEQ ID NO: 1445612 - RNA, 19 nt, Artificial Sequence
  Description of Artificial Sequence: Synthetic oligonucleotide
  Sense strand starting at position 3024 of SEQ ID NO: 1243843
ggaugacaccuaggugauu

SEQ ID NO: 1445613 - RNA, 19 nt, Artificial Sequence
  Description of Artificial Sequence: Synthetic oligonucleotide
  Antisense strand to SEQ ID NO: 1445612
aaucaccuaggugucaucc

SEQ ID NO: 1445614 - RNA, 19 nt, Artificial Sequence
  Description of Artificial Sequence: Synthetic oligonucleotide
  Sense strand starting at position 3025 of SEQ ID NO: 1243843
gaugacaccuaggugauua

SEQ ID NO: 1445615 - RNA, 19 nt, Artificial Sequence
  Description of Artificial Sequence: Synthetic oligonucleotide
  Antisense strand to SEQ ID NO: 1445614
uaaucaccuaggugucauc

SEQ ID NO: 1445616 - RNA, 19 nt, Artificial Sequence
  Description of Artificial Sequence: Synthetic oligonucleotide
  Sense strand starting at position 3165 of SEQ ID NO: 1243843
ggcacuugggucuauaauu

SEQ ID NO: 1445617 - RNA, 19 nt, Artificial Sequence
  Description of Artificial Sequence: Synthetic oligonucleotide
  Antisense strand to SEQ ID NO: 1445616
aauuauagacccaagugcc

SEQ ID NO: 1445618 - RNA, 19 nt, Artificial Sequence
  Description of Artificial Sequence: Synthetic oligonucleotide
  Sense strand starting at position 3183 of SEQ ID NO: 1243843
uuuggaguucgagggaguu

SEQ ID NO: 1445619 - RNA, 19 nt, Artificial Sequence
  Description of Artificial Sequence: Synthetic oligonucleotide
  Antisense strand to SEQ ID NO: 1445618
aacucccucgaacuccaaa

SEQ ID NO: 1445620 - RNA, 19 nt, Artificial Sequence
  Description of Artificial Sequence: Synthetic oligonucleotide
  Sense strand starting at position 3254 of SEQ ID NO: 1243843
cgagugguggcugaagcua

SEQ ID NO: 1445621 - RNA, 19 nt, Artificial Sequence
  Description of Artificial Sequence: Synthetic oligonucleotide
  Antisense strand to SEQ ID NO: 1445620
uagcuucagccaccacucg

SEQ ID NO: 1445622 - RNA, 19 nt, Artificial Sequence
  Description of Artificial Sequence: Synthetic oligonucleotide
  Sense strand starting at position 3280 of SEQ ID NO: 1243843
gucugagauuggccaagaa

SEQ ID NO: 1445623 - RNA, 19 nt, Artificial Sequence
  Description of Artificial Sequence: Synthetic oligonucleotide
  Antisense strand to SEQ ID NO: 1445622
uucuuggccaaucucagac

SEQ ID NO: 1445624 - RNA, 19 nt, Artificial Sequence
  Description of Artificial Sequence: Synthetic oligonucleotide
  Sense strand starting at position 3737 of SEQ ID NO: 1243843
acacuugaggcuuaguaaa

SEQ ID NO: 1445625 - RNA, 19 nt, Artificial Sequence
  Description of Artificial Sequence: Synthetic oligonucleotide
  Antisense strand to SEQ ID NO: 1445624
uuuacuaagccucaagugu

SEQ ID NO: 1445626 - RNA, 19 nt, Artificial Sequence
  Description of Artificial Sequence: Synthetic oligonucleotide
  Sense strand starting at position 3739 of SEQ ID NO: 1243843
acuugaggcuuaguaaauu

SEQ ID NO: 1445627 - RNA, 19 nt, Artificial Sequence
  Description of Artificial Sequence: Synthetic oligonucleotide
  Antisense strand to SEQ ID NO: 1445626
aauuuacuaagccucaagu

SEQ ID NO: 1445628 - RNA, 19 nt, Artificial Sequence
  Description of Artificial Sequence: Synthetic oligonucleotide
  Sense strand starting at position 3766 of SEQ ID NO: 1243843
aaaugcauagugugauaca

SEQ ID NO: 1445629 - RNA, 19 nt, Artificial Sequence
  Description of Artificial Sequence: Synthetic oligonucleotide
  Antisense strand to SEQ ID NO: 1445628
uguaucacacuaugcauuu

SEQ ID NO: 1445630 - RNA, 19 nt, Artificial Sequence
  Description of Artificial Sequence: Synthetic oligonucleotide
  Sense strand starting at position 3797 of SEQ ID NO: 1243843
ccuagauucugcccaguga

SEQ ID NO: 1445631 - RNA, 19 nt, Artificial Sequence
  Description of Artificial Sequence: Synthetic oligonucleotide
  Antisense strand to SEQ ID NO: 1445630
ucacugggcagaaucuagg

SEQ ID NO: 1445632 - RNA, 19 nt, Artificial Sequence
  Description of Artificial Sequence: Synthetic oligonucleotide
  Sense strand starting at position 3810 of SEQ ID NO: 1243843
cagugaggucuuggaccau

SEQ ID NO: 1445633 - RNA, 19 nt, Artificial Sequence
  Description of Artificial Sequence: Synthetic oligonucleotide
  Antisense strand to SEQ ID NO: 1445632
augguccaagaccucacug

SEQ ID NO: 1445634 - RNA, 19 nt, Artificial Sequence
  Description of Artificial Sequence: Synthetic oligonucleotide
  Sense strand starting at position 3923 of SEQ ID NO: 1243843
cuaguaacucaugacaguu

SEQ ID NO: 1445635 - RNA, 19 nt, Artificial Sequence
  Description of Artificial Sequence: Synthetic oligonucleotide
  Antisense strand to SEQ ID NO: 1445634
aacugucaugaguuacuag

SEQ ID NO: 1445636 - RNA, 19 nt, Artificial Sequence
  Description of Artificial Sequence: Synthetic oligonucleotide
  Sense strand starting at position 576 of SEQ ID NO: 1243844
ggucacuucucccuggaca

SEQ ID NO: 1445637 - RNA, 19 nt, Artificial Sequence
  Description of Artificial Sequence: Synthetic oligonucleotide
  Antisense strand to SEQ ID NO: 1445636
uguccagggagaagugacc

SEQ ID NO: 1445638 - RNA, 19 nt, Artificial Sequence
  Description of Artificial Sequence: Synthetic oligonucleotide
  Sense strand starting at position 577 of SEQ ID NO: 1243844
gucacuucucccuggacau

SEQ ID NO: 1445639 - RNA, 19 nt, Artificial Sequence
  Description of Artificial Sequence: Synthetic oligonucleotide
  Antisense strand to SEQ ID NO: 1445638
auguccagggagaagugac

SEQ ID NO: 1445640 - RNA, 19 nt, Artificial Sequence
  Description of Artificial Sequence: Synthetic oligonucleotide
  Sense strand starting at position 578 of SEQ ID NO: 1243844
ucacuucucccuggacaug

SEQ ID NO: 1445641 - RNA, 19 nt, Artificial Sequence
  Description of Artificial Sequence: Synthetic oligonucleotide
  Antisense strand to SEQ ID NO: 1445640
cauguccagggagaaguga

SEQ ID NO: 1445642 - RNA, 19 nt, Artificial Sequence
  Description of Artificial Sequence: Synthetic oligonucleotide
  Sense strand starting at position 776 of SEQ ID NO: 1243844
cccuuucuguccucagaug

SEQ ID NO: 1445643 - RNA, 19 nt, Artificial Sequence
  Description of Artificial Sequence: Synthetic oligonucleotide
  Antisense strand to SEQ ID NO: 1445642
caucugaggacagaaaggg

SEQ ID NO: 1445644 - RNA, 19 nt, Artificial Sequence
  Description of Artificial Sequence: Synthetic oligonucleotide
  Sense strand starting at position 810 of SEQ ID NO: 1243844
ggagauguaucccucuuua

SEQ ID NO: 1445645 - RNA, 19 nt, Artificial Sequence
  Description of Artificial Sequence: Synthetic oligonucleotide
  Antisense strand to SEQ ID NO: 1445644
uaaagagggauacaucucc

SEQ ID NO: 1445646 - RNA, 19 nt, Artificial Sequence
  Description of Artificial Sequence: Synthetic oligonucleotide
  Sense strand starting at position 993 of SEQ ID NO: 1243844
accacuucucccugaguag

SEQ ID NO: 1445647 - RNA, 19 nt, Artificial Sequence
  Description of Artificial Sequence: Synthetic oligonucleotide
  Antisense strand to SEQ ID NO: 1445646
cuacucagggagaaguggu

SEQ ID NO: 1445648 - RNA, 19 nt, Artificial Sequence
  Description of Artificial Sequence: Synthetic oligonucleotide
  Sense strand starting at position 996 of SEQ ID NO: 1243844
acuucucccugaguaggaa

SEQ ID NO: 1445649 - RNA, 19 nt, Artificial Sequence
  Description of Artificial Sequence: Synthetic oligonucleotide
  Antisense strand to SEQ ID NO: 1445648
uuccuacucagggagaagu

SEQ ID NO: 1445650 - RNA, 19 nt, Artificial Sequence
  Description of Artificial Sequence: Synthetic oligonucleotide
  Sense strand starting at position 1004 of SEQ ID NO: 1243844
cugaguaggaagcgaguua

SEQ ID NO: 1445651 - RNA, 19 nt, Artificial Sequence
  Description of Artificial Sequence: Synthetic oligonucleotide
  Antisense strand to SEQ ID NO: 1445650
uaacucgcuuccuacucag

SEQ ID NO: 1445652 - RNA, 19 nt, Artificial Sequence
  Description of Artificial Sequence: Synthetic oligonucleotide
  Sense strand starting at position 1013 of SEQ ID NO: 1243844
aagcgaguuagggaaacuu

SEQ ID NO: 1445653 - RNA, 19 nt, Artificial Sequence
  Description of Artificial Sequence: Synthetic oligonucleotide
  Antisense strand to SEQ ID NO: 1445652
aaguuucccuaacucgcuu

SEQ ID NO: 1445654 - RNA, 19 nt, Artificial Sequence
  Description of Artificial Sequence: Synthetic oligonucleotide
  Sense strand starting at position 1024 of SEQ ID NO: 1243844
ggaaacuuucuaggagucu

SEQ ID NO: 1445655 - RNA, 19 nt, Artificial Sequence
  Description of Artificial Sequence: Synthetic oligonucleotide
  Antisense strand to SEQ ID NO: 1445654
agacuccuagaaaguuucc

SEQ ID NO: 1445656 - RNA, 19 nt, Artificial Sequence
  Description of Artificial Sequence: Synthetic oligonucleotide
  Sense strand starting at position 1038 of SEQ ID NO: 1243844
agucuuagagcucauaauu

SEQ ID NO: 1445657 - RNA, 19 nt, Artificial Sequence
  Description of Artificial Sequence: Synthetic oligonucleotide
  Antisense strand to SEQ ID NO: 1445656
aauuaugagcucuaagacu

SEQ ID NO: 1445658 - RNA, 19 nt, Artificial Sequence
  Description of Artificial Sequence: Synthetic oligonucleotide
  Sense strand starting at position 1428 of SEQ ID NO: 1243844
ggugauagcgcccaacaau

SEQ ID NO: 1445659 - RNA, 19 nt, Artificial Sequence
  Description of Artificial Sequence: Synthetic oligonucleotide
  Antisense strand to SEQ ID NO: 1445658
auuguugggcgcuaucacc

SEQ ID NO: 1445660 - RNA, 19 nt, Artificial Sequence
  Description of Artificial Sequence: Synthetic oligonucleotide
  Sense strand starting at position 2067 of SEQ ID NO: 1243844
ucaggagauguaugcaaag

SEQ ID NO: 1445661 - RNA, 19 nt, Artificial Sequence
  Description of Artificial Sequence: Synthetic oligonucleotide
  Antisense strand to SEQ ID NO: 1445660
cuuugcauacaucuccuga

SEQ ID NO: 1445662 - RNA, 19 nt, Artificial Sequence
  Description of Artificial Sequence: Synthetic oligonucleotide
  Sense strand starting at position 2069 of SEQ ID NO: 1243844
aggagauguaugcaaagcu

SEQ ID NO: 1445663 - RNA, 19 nt, Artificial Sequence
  Description of Artificial Sequence: Synthetic oligonucleotide
  Antisense strand to SEQ ID NO: 1445662
agcuuugcauacaucuccu

SEQ ID NO: 1445664 - RNA, 19 nt, Artificial Sequence
  Description of Artificial Sequence: Synthetic oligonucleotide
  Sense strand starting at position 2119 of SEQ ID NO: 1243844
ugucuuggucugggaauug

SEQ ID NO: 1445665 - RNA, 19 nt, Artificial Sequence
  Description of Artificial Sequence: Synthetic oligonucleotide
  Antisense strand to SEQ ID NO: 1445664
caauucccagaccaagaca

SEQ ID NO: 1445666 - RNA, 19 nt, Artificial Sequence
  Description of Artificial Sequence: Synthetic oligonucleotide
  Sense strand starting at position 2128 of SEQ ID NO: 1243844
cugggaauugcuugaucaa

SEQ ID NO: 1445667 - RNA, 19 nt, Artificial Sequence
  Description of Artificial Sequence: Synthetic oligonucleotide
  Antisense strand to SEQ ID NO: 1445666
uugaucaagcaauucccag

SEQ ID NO: 1445668 - RNA, 19 nt, Artificial Sequence
  Description of Artificial Sequence: Synthetic oligonucleotide
  Sense strand starting at position 2227 of SEQ ID NO: 1243844
ucuccuagaucuccuggaa

SEQ ID NO: 1445669 - RNA, 19 nt, Artificial Sequence
  Description of Artificial Sequence: Synthetic oligonucleotide
  Antisense strand to SEQ ID NO: 1445668
uuccaggagaucuaggaga

SEQ ID NO: 1445670 - RNA, 19 nt, Artificial Sequence
  Description of Artificial Sequence: Synthetic oligonucleotide
  Sense strand starting at position 2230 of SEQ ID NO: 1243844
ccuagaucuccuggaagca

SEQ ID NO: 1445671 - RNA, 19 nt, Artificial Sequence
  Description of Artificial Sequence: Synthetic oligonucleotide
  Antisense strand to SEQ ID NO: 1445670
ugcuuccaggagaucuagg

SEQ ID NO: 1445672 - RNA, 19 nt, Artificial Sequence
  Description of Artificial Sequence: Synthetic oligonucleotide
  Sense strand starting at position 2246 of SEQ ID NO: 1243844
gcaagaauauuguuucucu

SEQ ID NO: 1445673 - RNA, 19 nt, Artificial Sequence
  Description of Artificial Sequence: Synthetic oligonucleotide
  Antisense strand to SEQ ID NO: 1445672
agagaaacaauauucuugc

SEQ ID NO: 1445674 - RNA, 19 nt, Artificial Sequence
  Description of Artificial Sequence: Synthetic oligonucleotide
  Sense strand starting at position 2601 of SEQ ID NO: 1243844
acaacaugcuggucauuga

SEQ ID NO: 1445675 - RNA, 19 nt, Artificial Sequence
  Description of Artificial Sequence: Synthetic oligonucleotide
  Antisense strand to SEQ ID NO: 1445674
ucaaugaccagcauguugu

SEQ ID NO: 1445676 - RNA, 19 nt, Artificial Sequence
  Description of Artificial Sequence: Synthetic oligonucleotide
  Sense strand starting at position 2602 of SEQ ID NO: 1243844
caacaugcuggucauugau

SEQ ID NO: 1445677 - RNA, 19 nt, Artificial Sequence
  Description of Artificial Sequence: Synthetic oligonucleotide
  Antisense strand to SEQ ID NO: 1445676
aucaaugaccagcauguug

SEQ ID NO: 1445678 - RNA, 19 nt, Artificial Sequence
  Description of Artificial Sequence: Synthetic oligonucleotide
  Sense strand starting at position 2611 of SEQ ID NO: 1243844
ggucauugauaccuuccau

SEQ ID NO: 1445679 - RNA, 19 nt, Artificial Sequence
  Description of Artificial Sequence: Synthetic oligonucleotide
  Antisense strand to SEQ ID NO: 1445678
auggaagguaucaaugacc

SEQ ID NO: 1445680 - RNA, 19 nt, Artificial Sequence
  Description of Artificial Sequence: Synthetic oligonucleotide
  Sense strand starting at position 2628 of SEQ ID NO: 1243844
aucgacauucuuugaauga

SEQ ID NO: 1445681 - RNA, 19 nt, Artificial Sequence
  Description of Artificial Sequence: Synthetic oligonucleotide
  Antisense strand to SEQ ID NO: 1445680
ucauucaaagaaugucgau

SEQ ID NO: 1445682 - RNA, 19 nt, Artificial Sequence
  Description of Artificial Sequence: Synthetic oligonucleotide
  Sense strand starting at position 2660 of SEQ ID NO: 1243844
uacaguugccuuugggaac

SEQ ID NO: 1445683 - RNA, 19 nt, Artificial Sequence
  Description of Artificial Sequence: Synthetic oligonucleotide
  Antisense strand to SEQ ID NO: 1445682
guucccaaaggcaacugua

SEQ ID NO: 1445684 - RNA, 19 nt, Artificial Sequence
  Description of Artificial Sequence: Synthetic oligonucleotide
  Sense strand starting at position 2684 of SEQ ID NO: 1243844
guuuaagugcuuguggcua

SEQ ID NO: 1445685 - RNA, 19 nt, Artificial Sequence
  Description of Artificial Sequence: Synthetic oligonucleotide
  Antisense strand to SEQ ID NO: 1445684
uagccacaagcacuuaaac

SEQ ID NO: 1445686 - RNA, 19 nt, Artificial Sequence
  Description of Artificial Sequence: Synthetic oligonucleotide
  Sense strand starting at position 2689 of SEQ ID NO: 1243844
agugcuuguggcuagaaac

SEQ ID NO: 1445687 - RNA, 19 nt, Artificial Sequence
  Description of Artificial Sequence: Synthetic oligonucleotide
  Antisense strand to SEQ ID NO: 1445686
guuucuagccacaagcacu

SEQ ID NO: 1445688 - RNA, 19 nt, Artificial Sequence
  Description of Artificial Sequence: Synthetic oligonucleotide
  Sense strand starting at position 2725 of SEQ ID NO: 1243844
aaaguuugaggguguguua

SEQ ID NO: 1445689 - RNA, 19 nt, Artificial Sequence
  Description of Artificial Sequence: Synthetic oligonucleotide
  Antisense strand to SEQ ID NO: 1445688
uaacacacccucaaacuuu

SEQ ID NO: 1445690 - RNA, 19 nt, Artificial Sequence
  Description of Artificial Sequence: Synthetic oligonucleotide
  Sense strand starting at position 2835 of SEQ ID NO: 1243844
agcauucuuuccuuagaag

SEQ ID NO: 1445691 - RNA, 19 nt, Artificial Sequence
  Description of Artificial Sequence: Synthetic oligonucleotide
  Antisense strand to SEQ ID NO: 1445690
cuucuaaggaaagaaugcu

SEQ ID NO: 1445692 - RNA, 19 nt, Artificial Sequence
  Description of Artificial Sequence: Synthetic oligonucleotide
  Sense strand starting at position 2836 of SEQ ID NO: 1243844
gcauucuuuccuuagaaga

SEQ ID NO: 1445693 - RNA, 19 nt, Artificial Sequence
  Description of Artificial Sequence: Synthetic oligonucleotide
  Antisense strand to SEQ ID NO: 1445692
ucuucuaaggaaagaaugc

SEQ ID NO: 1445694 - RNA, 19 nt, Artificial Sequence
  Description of Artificial Sequence: Synthetic oligonucleotide
  Sense strand starting at position 2847 of SEQ ID NO: 1243844
uuagaagaguguucggacu

SEQ ID NO: 1445695 - RNA, 19 nt, Artificial Sequence
  Description of Artificial Sequence: Synthetic oligonucleotide
  Antisense strand to SEQ ID NO: 1445694
aguccgaacacucuucuaa

SEQ ID NO: 1445696 - RNA, 19 nt, Artificial Sequence
  Description of Artificial Sequence: Synthetic oligonucleotide
  Sense strand starting at position 2854 of SEQ ID NO: 1243844
aguguucggacucaagcau

SEQ ID NO: 1445697 - RNA, 19 nt, Artificial Sequence
  Description of Artificial Sequence: Synthetic oligonucleotide
  Antisense strand to SEQ ID NO: 1445696
augcuugaguccgaacacu

SEQ ID NO: 1445698 - RNA, 19 nt, Artificial Sequence
  Description of Artificial Sequence: Synthetic oligonucleotide
  Sense strand starting at position 2904 of SEQ ID NO: 1243844
gugcuggugccguugagaa

SEQ ID NO: 1445699 - RNA, 19 nt, Artificial Sequence
  Description of Artificial Sequence: Synthetic oligonucleotide
  Antisense strand to SEQ ID NO: 1445698
uucucaacggcaccagcac

SEQ ID NO: 1445700 - RNA, 19 nt, Artificial Sequence
  Description of Artificial Sequence: Synthetic oligonucleotide
  Sense strand starting at position 2914 of SEQ ID NO: 1243844
cguugagaaucucugaaua

SEQ ID NO: 1445701 - RNA, 19 nt, Artificial Sequence
  Description of Artificial Sequence: Synthetic oligonucleotide
  Antisense strand to SEQ ID NO: 1445700
uauucagagauucucaacg

SEQ ID NO: 1445702 - RNA, 19 nt, Artificial Sequence
  Description of Artificial Sequence: Synthetic oligonucleotide
  Sense strand starting at position 2975 of SEQ ID NO: 1243844
gaaagaacaucugcauagu

SEQ ID NO: 1445703 - RNA, 19 nt, Artificial Sequence
  Description of Artificial Sequence: Synthetic oligonucleotide
  Antisense strand to SEQ ID NO: 1445702
acuaugcagauguucuuuc

SEQ ID NO: 1445704 - RNA, 19 nt, Artificial Sequence
  Description of Artificial Sequence: Synthetic oligonucleotide
  Sense strand starting at position 2978 of SEQ ID NO: 1243844
agaacaucugcauagucau

SEQ ID NO: 1445705 - RNA, 19 nt, Artificial Sequence
  Description of Artificial Sequence: Synthetic oligonucleotide
  Antisense strand to SEQ ID NO: 1445704
augacuaugcagauguucu

SEQ ID NO: 1445706 - RNA, 19 nt, Artificial Sequence
  Description of Artificial Sequence: Synthetic oligonucleotide
  Sense strand starting at position 3530 of SEQ ID NO: 1243844
uaccuaguauuggcaagaa

SEQ ID NO: 1445707 - RNA, 19 nt, Artificial Sequence
  Description of Artificial Sequence: Synthetic oligonucleotide
  Antisense strand to SEQ ID NO: 1445706
uucuugccaauacuaggua

SEQ ID NO: 1445708 - RNA, 19 nt, Artificial Sequence
  Description of Artificial Sequence: Synthetic oligonucleotide
  Sense strand starting at position 3534 of SEQ ID NO: 1243844
uaguauuggcaagaauguu

SEQ ID NO: 1445709 - RNA, 19 nt, Artificial Sequence
  Description of Artificial Sequence: Synthetic oligonucleotide
  Antisense strand to SEQ ID NO: 1445708
aacauucuugccaauacua

SEQ ID NO: 1445710 - RNA, 19 nt, Artificial Sequence
  Description of Artificial Sequence: Synthetic oligonucleotide
  Sense strand starting at position 3918 of SEQ ID NO: 1243844
acugcuugauaaccaugaa

SEQ ID NO: 1445711 - RNA, 19 nt, Artificial Sequence
  Description of Artificial Sequence: Synthetic oligonucleotide
  Antisense strand to SEQ ID NO: 1445710
uucaugguuaucaagcagu

SEQ ID NO: 1445712 - RNA, 19 nt, Artificial Sequence
  Description of Artificial Sequence: Synthetic oligonucleotide
  Sense strand starting at position 3921 of SEQ ID NO: 1243844
gcuugauaaccaugaaagc

SEQ ID NO: 1445713 - RNA, 19 nt, Artificial Sequence
  Description of Artificial Sequence: Synthetic oligonucleotide
  Antisense strand to SEQ ID NO: 1445712
gcuuucaugguuaucaagc

SEQ ID NO: 1445714 - RNA, 19 nt, Artificial Sequence
  Description of Artificial Sequence: Synthetic oligonucleotide
  Sense strand starting at position 3932 of SEQ ID NO: 1243844
augaaagcugaauaacgua

SEQ ID NO: 1445715 - RNA, 19 nt, Artificial Sequence
  Description of Artificial Sequence: Synthetic oligonucleotide
  Antisense strand to SEQ ID NO: 1445714
uacguuauucagcuuucau

SEQ ID NO: 1445716 - RNA, 19 nt, Artificial Sequence
  Description of Artificial Sequence: Synthetic oligonucleotide
  Sense strand starting at position 10 of SEQ ID NO: 1243845
guugauuucccuugcauuc

SEQ ID NO: 1445717 - RNA, 19 nt, Artificial Sequence
  Description of Artificial Sequence: Synthetic oligonucleotide
  Antisense strand to SEQ ID NO: 1445716
gaaugcaagggaaaucaac

SEQ ID NO: 1445718 - RNA, 19 nt, Artificial Sequence
  Description of Artificial Sequence: Synthetic oligonucleotide
  Sense strand starting at position 221 of SEQ ID NO: 1243845
ugaacuaucuggccaaaca

SEQ ID NO: 1445719 - RNA, 19 nt, Artificial Sequence
  Description of Artificial Sequence: Synthetic oligonucleotide
  Antisense strand to SEQ ID NO: 1445718
uguuuggccagauaguuca

SEQ ID NO: 1445720 - RNA, 19 nt, Artificial Sequence
  Description of Artificial Sequence: Synthetic oligonucleotide
  Sense strand starting at position 332 of SEQ ID NO: 1243845
uacagaaucccugguugag

SEQ ID NO: 1445721 - RNA, 19 nt, Artificial Sequence
  Description of Artificial Sequence: Synthetic oligonucleotide
  Antisense strand to SEQ ID NO: 1445720
cucaaccagggauucugua

SEQ ID NO: 1445722 - RNA, 19 nt, Artificial Sequence
  Description of Artificial Sequence: Synthetic oligonucleotide
  Sense strand starting at position 780 of SEQ ID NO: 1243845
aucuccagccuuggagaaa

SEQ ID NO: 1445723 - RNA, 19 nt, Artificial Sequence
  Description of Artificial Sequence: Synthetic oligonucleotide
  Antisense strand to SEQ ID NO: 1445722
uuucuccaaggcuggagau

SEQ ID NO: 1445724 - RNA, 19 nt, Artificial Sequence
  Description of Artificial Sequence: Synthetic oligonucleotide
  Sense strand starting at position 1021 of SEQ ID NO: 1243845
gggccuaugaaaugcagaa

SEQ ID NO: 1445725 - RNA, 19 nt, Artificial Sequence
  Description of Artificial Sequence: Synthetic oligonucleotide
  Antisense strand to SEQ ID NO: 1445724
uucugcauuucauaggccc

SEQ ID NO: 1445726 - RNA, 19 nt, Artificial Sequence
  Description of Artificial Sequence: Synthetic oligonucleotide
  Sense strand starting at position 1118 of SEQ ID NO: 1243845
agucauuucuccuuuggua

SEQ ID NO: 1445727 - RNA, 19 nt, Artificial Sequence
  Description of Artificial Sequence: Synthetic oligonucleotide
  Antisense strand to SEQ ID NO: 1445726
uaccaaaggagaaaugacu

SEQ ID NO: 1445728 - RNA, 19 nt, Artificial Sequence
  Description of Artificial Sequence: Synthetic oligonucleotide
  Sense strand starting at position 1207 of SEQ ID NO: 1243845
accuauguugucuacaacu

SEQ ID NO: 1445729 - RNA, 19 nt, Artificial Sequence
  Description of Artificial Sequence: Synthetic oligonucleotide
  Antisense strand to SEQ ID NO: 1445728
aguuguagacaacauaggu

SEQ ID NO: 1445730 - RNA, 19 nt, Artificial Sequence
  Description of Artificial Sequence: Synthetic oligonucleotide
  Sense strand starting at position 1223 of SEQ ID NO: 1243845
acugcaguuccuuacagau

SEQ ID NO: 1445731 - RNA, 19 nt, Artificial Sequence
  Description of Artificial Sequence: Synthetic oligonucleotide
  Antisense strand to SEQ ID NO: 1445730
aucuguaaggaacugcagu

SEQ ID NO: 1445732 - RNA, 19 nt, Artificial Sequence
  Description of Artificial Sequence: Synthetic oligonucleotide
  Sense strand starting at position 1294 of SEQ ID NO: 1243845
ccuuguuuaccugagauau

SEQ ID NO: 1445733 - RNA, 19 nt, Artificial Sequence
  Description of Artificial Sequence: Synthetic oligonucleotide
  Antisense strand to SEQ ID NO: 1445732
auaucucagguaaacaagg

SEQ ID NO: 1445734 - RNA, 19 nt, Artificial Sequence
  Description of Artificial Sequence: Synthetic oligonucleotide
  Sense strand starting at position 1304 of SEQ ID NO: 1243845
cugagauauuguucuccuc

SEQ ID NO: 1445735 - RNA, 19 nt, Artificial Sequence
  Description of Artificial Sequence: Synthetic oligonucleotide
  Antisense strand to SEQ ID NO: 1445734
gaggagaacaauaucucag

SEQ ID NO: 1445736 - RNA, 19 nt, Artificial Sequence
  Description of Artificial Sequence: Synthetic oligonucleotide
  Sense strand starting at position 1385 of SEQ ID NO: 1243845
gcagcaguaagagaguaua

SEQ ID NO: 1445737 - RNA, 19 nt, Artificial Sequence
  Description of Artificial Sequence: Synthetic oligonucleotide
  Antisense strand to SEQ ID NO: 1445736
uauacucucuuacugcugc

SEQ ID NO: 1445738 - RNA, 19 nt, Artificial Sequence
  Description of Artificial Sequence: Synthetic oligonucleotide
  Sense strand starting at position 1388 of SEQ ID NO: 1243845
gcaguaagagaguauaauu

SEQ ID NO: 1445739 - RNA, 19 nt, Artificial Sequence
  Description of Artificial Sequence: Synthetic oligonucleotide
  Antisense strand to SEQ ID NO: 1445738
aauuauacucucuuacugc

SEQ ID NO: 1445740 - RNA, 19 nt, Artificial Sequence
  Description of Artificial Sequence: Synthetic oligonucleotide
  Sense strand starting at position 1637 of SEQ ID NO: 1243845
cuagaaaccuccucuguga

SEQ ID NO: 1445741 - RNA, 19 nt, Artificial Sequence
  Description of Artificial Sequence: Synthetic oligonucleotide
  Antisense strand to SEQ ID NO: 1445740
ucacagaggagguuucuag

SEQ ID NO: 1445742 - RNA, 19 nt, Artificial Sequence
  Description of Artificial Sequence: Synthetic oligonucleotide
  Sense strand starting at position 1639 of SEQ ID NO: 1243845
agaaaccuccucugugaua

SEQ ID NO: 1445743 - RNA, 19 nt, Artificial Sequence
  Description of Artificial Sequence: Synthetic oligonucleotide
  Antisense strand to SEQ ID NO: 1445742
uaucacagaggagguuucu

SEQ ID NO: 1445744 - RNA, 19 nt, Artificial Sequence
  Description of Artificial Sequence: Synthetic oligonucleotide
  Sense strand starting at position 1673 of SEQ ID NO: 1243845
agaaccacucuuugguaga

SEQ ID NO: 1445745 - RNA, 19 nt, Artificial Sequence
  Description of Artificial Sequence: Synthetic oligonucleotide
  Antisense strand to SEQ ID NO: 1445744
ucuaccaaagagugguucu

SEQ ID NO: 1445746 - RNA, 19 nt, Artificial Sequence
  Description of Artificial Sequence: Synthetic oligonucleotide
  Sense strand starting at position 1675 of SEQ ID NO: 1243845
aaccacucuuugguagaga

SEQ ID NO: 1445747 - RNA, 19 nt, Artificial Sequence
  Description of Artificial Sequence: Synthetic oligonucleotide
  Antisense strand to SEQ ID NO: 1445746
ucucuaccaaagagugguu

SEQ ID NO: 1445748 - RNA, 19 nt, Artificial Sequence
  Description of Artificial Sequence: Synthetic oligonucleotide
  Sense strand starting at position 1692 of SEQ ID NO: 1243845
gaagaucuuccaggcuaag

SEQ ID NO: 1445749 - RNA, 19 nt, Artificial Sequence
  Description of Artificial Sequence: Synthetic oligonucleotide
  Antisense strand to SEQ ID NO: 1445748
cuuagccuggaagaucuuc

SEQ ID NO: 1445750 - RNA, 19 nt, Artificial Sequence
  Description of Artificial Sequence: Synthetic oligonucleotide
  Sense strand starting at position 1923 of SEQ ID NO: 1243845
aaacgucucccagagcaaa

SEQ ID NO: 1445751 - RNA, 19 nt, Artificial Sequence
  Description of Artificial Sequence: Synthetic oligonucleotide
  Antisense strand to SEQ ID NO: 1445750
uuugcucugggagacguuu

SEQ ID NO: 1445752 - RNA, 19 nt, Artificial Sequence
  Description of Artificial Sequence: Synthetic oligonucleotide
  Sense strand starting at position 2024 of SEQ ID NO: 1243845
gaaacauggcuuuaccgua

SEQ ID NO: 1445753 - RNA, 19 nt, Artificial Sequence
  Description of Artificial Sequence: Synthetic oligonucleotide
  Antisense strand to SEQ ID NO: 1445752
uacgguaaagccauguuuc

SEQ ID NO: 1445754 - RNA, 19 nt, Artificial Sequence
  Description of Artificial Sequence: Synthetic oligonucleotide
  Sense strand starting at position 2029 of SEQ ID NO: 1243845
auggcuuuaccguaaaucu

SEQ ID NO: 1445755 - RNA, 19 nt, Artificial Sequence
  Description of Artificial Sequence: Synthetic oligonucleotide
  Antisense strand to SEQ ID NO: 1445754
agauuuacgguaaagccau

SEQ ID NO: 1445756 - RNA, 19 nt, Artificial Sequence
  Description of Artificial Sequence: Synthetic oligonucleotide
  Sense strand starting at position 2090 of SEQ ID NO: 1243845
uucugaaagagcuggucau

SEQ ID NO: 1445757 - RNA, 19 nt, Artificial Sequence
  Description of Artificial Sequence: Synthetic oligonucleotide
  Antisense strand to SEQ ID NO: 1445756
augaccagcucuuucagaa

SEQ ID NO: 1445758 - RNA, 19 nt, Artificial Sequence
  Description of Artificial Sequence: Synthetic oligonucleotide
  Sense strand starting at position 2094 of SEQ ID NO: 1243845
gaaagagcuggucaucuca

SEQ ID NO: 1445759 - RNA, 19 nt, Artificial Sequence
  Description of Artificial Sequence: Synthetic oligonucleotide
  Antisense strand to SEQ ID NO: 1445758
ugagaugaccagcucuuuc

SEQ ID NO: 1445760 - RNA, 19 nt, Artificial Sequence
  Description of Artificial Sequence: Synthetic oligonucleotide
  Sense strand starting at position 2096 of SEQ ID NO: 1243845
aagagcuggucaucucauu

SEQ ID NO: 1445761 - RNA, 19 nt, Artificial Sequence
  Description of Artificial Sequence: Synthetic oligonucleotide
  Antisense strand to SEQ ID NO: 1445760
aaugagaugaccagcucuu

SEQ ID NO: 1445762 - RNA, 19 nt, Artificial Sequence
  Description of Artificial Sequence: Synthetic oligonucleotide
  Sense strand starting at position 2127 of SEQ ID NO: 1243845
agaauacuguuagucaaau

SEQ ID NO: 1445763 - RNA, 19 nt, Artificial Sequence
  Description of Artificial Sequence: Synthetic oligonucleotide
  Antisense strand to SEQ ID NO: 1445762
auuugacuaacaguauucu

SEQ ID NO: 1445764 - RNA, 19 nt, Artificial Sequence
  Description of Artificial Sequence: Synthetic oligonucleotide
  Sense strand starting at position 2167 of SEQ ID NO: 1243845
acugguguugcgcuuuaau

SEQ ID NO: 1445765 - RNA, 19 nt, Artificial Sequence
  Description of Artificial Sequence: Synthetic oligonucleotide
  Antisense strand to SEQ ID NO: 1445764
auuaaagcgcaacaccagu

SEQ ID NO: 1445766 - RNA, 19 nt, Artificial Sequence
  Description of Artificial Sequence: Synthetic oligonucleotide
  Sense strand starting at position 2169 of SEQ ID NO: 1243845
ugguguugcgcuuuaauua

SEQ ID NO: 1445767 - RNA, 19 nt, Artificial Sequence
  Description of Artificial Sequence: Synthetic oligonucleotide
  Antisense strand to SEQ ID NO: 1445766
uaauuaaagcgcaacacca

SEQ ID NO: 1445768 - RNA, 19 nt, Artificial Sequence
  Description of Artificial Sequence: Synthetic oligonucleotide
  Sense strand starting at position 2386 of SEQ ID NO: 1243845
ccagaaaucucacuguagu

SEQ ID NO: 1445769 - RNA, 19 nt, Artificial Sequence
  Description of Artificial Sequence: Synthetic oligonucleotide
  Antisense strand to SEQ ID NO: 1445768
acuacagugagauuucugg

SEQ ID NO: 1445770 - RNA, 19 nt, Artificial Sequence
  Description of Artificial Sequence: Synthetic oligonucleotide
  Sense strand starting at position 2482 of SEQ ID NO: 1243845
agguaagacucgguucaaa

SEQ ID NO: 1445771 - RNA, 19 nt, Artificial Sequence
  Description of Artificial Sequence: Synthetic oligonucleotide
  Antisense strand to SEQ ID NO: 1445770
uuugaaccgagucuuaccu

SEQ ID NO: 1445772 - RNA, 19 nt, Artificial Sequence
  Description of Artificial Sequence: Synthetic oligonucleotide
  Sense strand starting at position 2519 of SEQ ID NO: 1243845
ggagcuauauggucuugag

SEQ ID NO: 1445773 - RNA, 19 nt, Artificial Sequence
  Description of Artificial Sequence: Synthetic oligonucleotide
  Antisense strand to SEQ ID NO: 1445772
cucaagaccauauagcucc

SEQ ID NO: 1445774 - RNA, 19 nt, Artificial Sequence
  Description of Artificial Sequence: Synthetic oligonucleotide
  Sense strand starting at position 2523 of SEQ ID NO: 1243845
cuauauggucuugagcaag

SEQ ID NO: 1445775 - RNA, 19 nt, Artificial Sequence
  Description of Artificial Sequence: Synthetic oligonucleotide
  Antisense strand to SEQ ID NO: 1445774
cuugcucaagaccauauag

SEQ ID NO: 1445776 - RNA, 19 nt, Artificial Sequence
  Description of Artificial Sequence: Synthetic oligonucleotide
  Sense strand starting at position 2526 of SEQ ID NO: 1243845
uauggucuugagcaagcaa

SEQ ID NO: 1445777 - RNA, 19 nt, Artificial Sequence
  Description of Artificial Sequence: Synthetic oligonucleotide
  Antisense strand to SEQ ID NO: 1445776
uugcuugcucaagaccaua

SEQ ID NO: 1445778 - RNA, 19 nt, Artificial Sequence
  Description of Artificial Sequence: Synthetic oligonucleotide
  Sense strand starting at position 2568 of SEQ ID NO: 1243845
ucuccauccuaguuaugag

SEQ ID NO: 1445779 - RNA, 19 nt, Artificial Sequence
  Description of Artificial Sequence: Synthetic oligonucleotide
  Antisense strand to SEQ ID NO: 1445778
cucauaacuaggauggaga

SEQ ID NO: 1445780 - RNA, 19 nt, Artificial Sequence
  Description of Artificial Sequence: Synthetic oligonucleotide
  Sense strand starting at position 2625 of SEQ ID NO: 1243845
accuucuaggauugcauua

SEQ ID NO: 1445781 - RNA, 19 nt, Artificial Sequence
  Description of Artificial Sequence: Synthetic oligonucleotide
  Antisense strand to SEQ ID NO: 1445780
uaaugcaauccuagaaggu

SEQ ID NO: 1445782 - RNA, 19 nt, Artificial Sequence
  Description of Artificial Sequence: Synthetic oligonucleotide
  Sense strand starting at position 2877 of SEQ ID NO: 1243845
accucuucugucugaagag

SEQ ID NO: 1445783 - RNA, 19 nt, Artificial Sequence
  Description of Artificial Sequence: Synthetic oligonucleotide
  Antisense strand to SEQ ID NO: 1445782
cucuucagacagaagaggu

SEQ ID NO: 1445784 - RNA, 19 nt, Artificial Sequence
  Description of Artificial Sequence: Synthetic oligonucleotide
  Sense strand starting at position 2911 of SEQ ID NO: 1243845
gcaugaguagauuaauauu

SEQ ID NO: 1445785 - RNA, 19 nt, Artificial Sequence
  Description of Artificial Sequence: Synthetic oligonucleotide
  Antisense strand to SEQ ID NO: 1445784
aauauuaaucuacucaugc

SEQ ID NO: 1445786 - RNA, 19 nt, Artificial Sequence
  Description of Artificial Sequence: Synthetic oligonucleotide
  Sense strand starting at position 2982 of SEQ ID NO: 1243845
gaagcagacucuuuggauc

SEQ ID NO: 1445787 - RNA, 19 nt, Artificial Sequence
  Description of Artificial Sequence: Synthetic oligonucleotide
  Antisense strand to SEQ ID NO: 1445786
gauccaaagagucugcuuc

SEQ ID NO: 1445788 - RNA, 19 nt, Artificial Sequence
  Description of Artificial Sequence: Synthetic oligonucleotide
  Sense strand starting at position 3022 of SEQ ID NO: 1243845
uaagaagugcugcaaguua

SEQ ID NO: 1445789 - RNA, 19 nt, Artificial Sequence
  Description of Artificial Sequence: Synthetic oligonucleotide
  Antisense strand to SEQ ID NO: 1445788
uaacuugcagcacuucuua

SEQ ID NO: 1445790 - RNA, 19 nt, Artificial Sequence
  Description of Artificial Sequence: Synthetic oligonucleotide
  Sense strand starting at position 3138 of SEQ ID NO: 1243845
uaucuaugaggcugacauu

SEQ ID NO: 1445791 - RNA, 19 nt, Artificial Sequence
  Description of Artificial Sequence: Synthetic oligonucleotide
  Antisense strand to SEQ ID NO: 1445790
aaugucagccucauagaua

SEQ ID NO: 1445792 - RNA, 19 nt, Artificial Sequence
  Description of Artificial Sequence: Synthetic oligonucleotide
  Sense strand starting at position 3665 of SEQ ID NO: 1243845
cuaaacagcuucuuugaga

SEQ ID NO: 1445793 - RNA, 19 nt, Artificial Sequence
  Description of Artificial Sequence: Synthetic oligonucleotide
  Antisense strand to SEQ ID NO: 1445792
ucucaaagaagcuguuuag

SEQ ID NO: 1445794 - RNA, 19 nt, Artificial Sequence
  Description of Artificial Sequence: Synthetic oligonucleotide
  Sense strand starting at position 3839 of SEQ ID NO: 1243845
gaagccauuugggaucuga

SEQ ID NO: 1445795 - RNA, 19 nt, Artificial Sequence
  Description of Artificial Sequence: Synthetic oligonucleotide
  Antisense strand to SEQ ID NO: 1445794
ucagaucccaaauggcuuc

SEQ ID NO: 1445796 - RNA, 19 nt, Artificial Sequence
  Description of Artificial Sequence: Synthetic oligonucleotide
  Sense strand starting at position 130 of SEQ ID NO: 1243846
gcaaauacuuaacaggaga

SEQ ID NO: 1445797 - RNA, 19 nt, Artificial Sequence
  Description of Artificial Sequence: Synthetic oligonucleotide
  Antisense strand to SEQ ID NO: 1445796
ucuccuguuaaguauuugc

SEQ ID NO: 1445798 - RNA, 19 nt, Artificial Sequence
  Description of Artificial Sequence: Synthetic oligonucleotide
  Sense strand starting at position 154 of SEQ ID NO: 1243846
gauuuccugugagugcaua

SEQ ID NO: 1445799 - RNA, 19 nt, Artificial Sequence
  Description of Artificial Sequence: Synthetic oligonucleotide
  Antisense strand to SEQ ID NO: 1445798
uaugcacucacaggaaauc

SEQ ID NO: 1445800 - RNA, 19 nt, Artificial Sequence
  Description of Artificial Sequence: Synthetic oligonucleotide
  Sense strand starting at position 155 of SEQ ID NO: 1243846
auuuccugugagugcauau

SEQ ID NO: 1445801 - RNA, 19 nt, Artificial Sequence
  Description of Artificial Sequence: Synthetic oligonucleotide
  Antisense strand to SEQ ID NO: 1445800
auaugcacucacaggaaau

SEQ ID NO: 1445802 - RNA, 19 nt, Artificial Sequence
  Description of Artificial Sequence: Synthetic oligonucleotide
  Sense strand starting at position 204 of SEQ ID NO: 1243846
auguuauuguccuccuuaa

SEQ ID NO: 1445803 - RNA, 19 nt, Artificial Sequence
  Description of Artificial Sequence: Synthetic oligonucleotide
  Antisense strand to SEQ ID NO: 1445802
uuaaggaggacaauaacau

SEQ ID NO: 1445804 - RNA, 19 nt, Artificial Sequence
  Description of Artificial Sequence: Synthetic oligonucleotide
  Sense strand starting at position 231 of SEQ ID NO: 1243846
guugaauucuaauucuaug

SEQ ID NO: 1445805 - RNA, 19 nt, Artificial Sequence
  Description of Artificial Sequence: Synthetic oligonucleotide
  Antisense strand to SEQ ID NO: 1445804
cauagaauuagaauucaac

SEQ ID NO: 1445806 - RNA, 19 nt, Artificial Sequence
  Description of Artificial Sequence: Synthetic oligonucleotide
  Sense strand starting at position 236 of SEQ ID NO: 1243846
auucuaauucuaugugaug

SEQ ID NO: 1445807 - RNA, 19 nt, Artificial Sequence
  Description of Artificial Sequence: Synthetic oligonucleotide
  Antisense strand to SEQ ID NO: 1445806
caucacauagaauuagaau

SEQ ID NO: 1445808 - RNA, 19 nt, Artificial Sequence
  Description of Artificial Sequence: Synthetic oligonucleotide
  Sense strand starting at position 421 of SEQ ID NO: 1243846
acggaaucugcugacaauu

SEQ ID NO: 1445809 - RNA, 19 nt, Artificial Sequence
  Description of Artificial Sequence: Synthetic oligonucleotide
  Antisense strand to SEQ ID NO: 1445808
aauugucagcagauuccgu

SEQ ID NO: 1445810 - RNA, 19 nt, Artificial Sequence
  Description of Artificial Sequence: Synthetic oligonucleotide
  Sense strand starting at position 579 of SEQ ID NO: 1243846
ugccaaauccuugauggca

SEQ ID NO: 1445811 - RNA, 19 nt, Artificial Sequence
  Description of Artificial Sequence: Synthetic oligonucleotide
  Antisense strand to SEQ ID NO: 1445810
ugccaucaaggauuuggca

SEQ ID NO: 1445812 - RNA, 19 nt, Artificial Sequence
  Description of Artificial Sequence: Synthetic oligonucleotide
  Sense strand starting at position 604 of SEQ ID NO: 1243846
gauugaucugccggagaca

SEQ ID NO: 1445813 - RNA, 19 nt, Artificial Sequence
  Description of Artificial Sequence: Synthetic oligonucleotide
  Antisense strand to SEQ ID NO: 1445812
ugucuccggcagaucaauc

SEQ ID NO: 1445814 - RNA, 19 nt, Artificial Sequence
  Description of Artificial Sequence: Synthetic oligonucleotide
  Sense strand starting at position 605 of SEQ ID NO: 1243846
auugaucugccggagacau

SEQ ID NO: 1445815 - RNA, 19 nt, Artificial Sequence
  Description of Artificial Sequence: Synthetic oligonucleotide
  Antisense strand to SEQ ID NO: 1445814
augucuccggcagaucaau

SEQ ID NO: 1445816 - RNA, 19 nt, Artificial Sequence
  Description of Artificial Sequence: Synthetic oligonucleotide
  Sense strand starting at position 705 of SEQ ID NO: 1243846
ccugaaagguuuccaauaa

SEQ ID NO: 1445817 - RNA, 19 nt, Artificial Sequence
  Description of Artificial Sequence: Synthetic oligonucleotide
  Antisense strand to SEQ ID NO: 1445816
uuauuggaaaccuuucagg

SEQ ID NO: 1445818 - RNA, 19 nt, Artificial Sequence
  Description of Artificial Sequence: Synthetic oligonucleotide
  Sense strand starting at position 725 of SEQ ID NO: 1243846
agaugacucgaugguaauu

SEQ ID NO: 1445819 - RNA, 19 nt, Artificial Sequence
  Description of Artificial Sequence: Synthetic oligonucleotide
  Antisense strand to SEQ ID NO: 1445818
aauuaccaucgagucaucu

SEQ ID NO: 1445820 - RNA, 19 nt, Artificial Sequence
  Description of Artificial Sequence: Synthetic oligonucleotide
  Sense strand starting at position 943 of SEQ ID NO: 1243846
gcacaacggcugucguuaa

SEQ ID NO: 1445821 - RNA, 19 nt, Artificial Sequence
  Description of Artificial Sequence: Synthetic oligonucleotide
  Antisense strand to SEQ ID NO: 1445820
uuaacgacagccguugugc

SEQ ID NO: 1445822 - RNA, 19 nt, Artificial Sequence
  Description of Artificial Sequence: Synthetic oligonucleotide
  Sense strand starting at position 1191 of SEQ ID NO: 1243846
aaaccaggaucaggagaau

SEQ ID NO: 1445823 - RNA, 19 nt, Artificial Sequence
  Description of Artificial Sequence: Synthetic oligonucleotide
  Antisense strand to SEQ ID NO: 1445822
auucuccugauccugguuu

SEQ ID NO: 1445824 - RNA, 19 nt, Artificial Sequence
  Description of Artificial Sequence: Synthetic oligonucleotide
  Sense strand starting at position 1233 of SEQ ID NO: 1243846
ugugguucuagugaaugag

SEQ ID NO: 1445825 - RNA, 19 nt, Artificial Sequence
  Description of Artificial Sequence: Synthetic oligonucleotide
  Antisense strand to SEQ ID NO: 1445824
cucauucacuagaaccaca

SEQ ID NO: 1445826 - RNA, 19 nt, Artificial Sequence
  Description of Artificial Sequence: Synthetic oligonucleotide
  Sense strand starting at position 1236 of SEQ ID NO: 1243846
gguucuagugaaugagaga

SEQ ID NO: 1445827 - RNA, 19 nt, Artificial Sequence
  Description of Artificial Sequence: Synthetic oligonucleotide
  Antisense strand to SEQ ID NO: 1445826
ucucucauucacuagaacc

SEQ ID NO: 1445828 - RNA, 19 nt, Artificial Sequence
  Description of Artificial Sequence: Synthetic oligonucleotide
  Sense strand starting at position 1763 of SEQ ID NO: 1243846
ccugaaucuccuggacaag

SEQ ID NO: 1445829 - RNA, 19 nt, Artificial Sequence
  Description of Artificial Sequence: Synthetic oligonucleotide
  Antisense strand to SEQ ID NO: 1445828
cuuguccaggagauucagg

SEQ ID NO: 1445830 - RNA, 19 nt, Artificial Sequence
  Description of Artificial Sequence: Synthetic oligonucleotide
  Sense strand starting at position 1863 of SEQ ID NO: 1243846
cuggaugcgccuuauuaca

SEQ ID NO: 1445831 - RNA, 19 nt, Artificial Sequence
  Description of Artificial Sequence: Synthetic oligonucleotide
  Antisense strand to SEQ ID NO: 1445830
uguaauaaggcgcauccag

SEQ ID NO: 1445832 - RNA, 19 nt, Artificial Sequence
  Description of Artificial Sequence: Synthetic oligonucleotide
  Sense strand starting at position 2040 of SEQ ID NO: 1243846
cggcgcugacucuaggaua

SEQ ID NO: 1445833 - RNA, 19 nt, Artificial Sequence
  Description of Artificial Sequence: Synthetic oligonucleotide
  Antisense strand to SEQ ID NO: 1445832
uauccuagagucagcgccg

SEQ ID NO: 1445834 - RNA, 19 nt, Artificial Sequence
  Description of Artificial Sequence: Synthetic oligonucleotide
  Sense strand starting at position 2079 of SEQ ID NO: 1243846
uucuaaguucuguucgugu

SEQ ID NO: 1445835 - RNA, 19 nt, Artificial Sequence
  Description of Artificial Sequence: Synthetic oligonucleotide
  Antisense strand to SEQ ID NO: 1445834
acacgaacagaacuuagaa

SEQ ID NO: 1445836 - RNA, 19 nt, Artificial Sequence
  Description of Artificial Sequence: Synthetic oligonucleotide
  Sense strand starting at position 2084 of SEQ ID NO: 1243846
aguucuguucgugugguca

SEQ ID NO: 1445837 - RNA, 19 nt, Artificial Sequence
  Description of Artificial Sequence: Synthetic oligonucleotide
  Antisense strand to SEQ ID NO: 1445836
ugaccacacgaacagaacu

SEQ ID NO: 1445838 - RNA, 19 nt, Artificial Sequence
  Description of Artificial Sequence: Synthetic oligonucleotide
  Sense strand starting at position 2098 of SEQ ID NO: 1243846
ggucaucauccaggaagug

SEQ ID NO: 1445839 - RNA, 19 nt, Artificial Sequence
  Description of Artificial Sequence: Synthetic oligonucleotide
  Antisense strand to SEQ ID NO: 1445838
cacuuccuggaugaugacc

SEQ ID NO: 1445840 - RNA, 19 nt, Artificial Sequence
  Description of Artificial Sequence: Synthetic oligonucleotide
  Sense strand starting at position 2625 of SEQ ID NO: 1243846
gccugauguccucaugagu

SEQ ID NO: 1445841 - RNA, 19 nt, Artificial Sequence
  Description of Artificial Sequence: Synthetic oligonucleotide
  Antisense strand to SEQ ID NO: 1445840
acucaugaggacaucaggc

SEQ ID NO: 1445842 - RNA, 19 nt, Artificial Sequence
  Description of Artificial Sequence: Synthetic oligonucleotide
  Sense strand starting at position 3032 of SEQ ID NO: 1243846
gacacuuucgccuaaggcu

SEQ ID NO: 1445843 - RNA, 19 nt, Artificial Sequence
  Description of Artificial Sequence: Synthetic oligonucleotide
  Antisense strand to SEQ ID NO: 1445842
agccuuaggcgaaaguguc

SEQ ID NO: 1445844 - RNA, 19 nt, Artificial Sequence
  Description of Artificial Sequence: Synthetic oligonucleotide
  Sense strand starting at position 3139 of SEQ ID NO: 1243846
gcugucaucuccuugauaa

SEQ ID NO: 1445845 - RNA, 19 nt, Artificial Sequence
  Description of Artificial Sequence: Synthetic oligonucleotide
  Antisense strand to SEQ ID NO: 1445844
uuaucaaggagaugacagc

SEQ ID NO: 1445846 - RNA, 19 nt, Artificial Sequence
  Description of Artificial Sequence: Synthetic oligonucleotide
  Sense strand starting at position 3140 of SEQ ID NO: 1243846
cugucaucuccuugauaag

SEQ ID NO: 1445847 - RNA, 19 nt, Artificial Sequence
  Description of Artificial Sequence: Synthetic oligonucleotide
  Antisense strand to SEQ ID NO: 1445846
cuuaucaaggagaugacag

SEQ ID NO: 1445848 - RNA, 19 nt, Artificial Sequence
  Description of Artificial Sequence: Synthetic oligonucleotide
  Sense strand starting at position 3141 of SEQ ID NO: 1243846
ugucaucuccuugauaaga

SEQ ID NO: 1445849 - RNA, 19 nt, Artificial Sequence
  Description of Artificial Sequence: Synthetic oligonucleotide
  Antisense strand to SEQ ID NO: 1445848
ucuuaucaaggagaugaca

SEQ ID NO: 1445850 - RNA, 19 nt, Artificial Sequence
  Description of Artificial Sequence: Synthetic oligonucleotide
  Sense strand starting at position 3372 of SEQ ID NO: 1243846
cucugugguguccaaugaa

SEQ ID NO: 1445851 - RNA, 19 nt, Artificial Sequence
  Description of Artificial Sequence: Synthetic oligonucleotide
  Antisense strand to SEQ ID NO: 1445850
uucauuggacaccacagag

SEQ ID NO: 1445852 - RNA, 19 nt, Artificial Sequence
  Description of Artificial Sequence: Synthetic oligonucleotide
  Sense strand starting at position 3375 of SEQ ID NO: 1243846
ugugguguccaaugaaucu

SEQ ID NO: 1445853 - RNA, 19 nt, Artificial Sequence
  Description of Artificial Sequence: Synthetic oligonucleotide
  Antisense strand to SEQ ID NO: 1445852
agauucauuggacaccaca

SEQ ID NO: 1445854 - RNA, 19 nt, Artificial Sequence
  Description of Artificial Sequence: Synthetic oligonucleotide
  Sense strand starting at position 3510 of SEQ ID NO: 1243846
ggaaauauucccugaggcc

SEQ ID NO: 1445855 - RNA, 19 nt, Artificial Sequence
  Description of Artificial Sequence: Synthetic oligonucleotide
  Antisense strand to SEQ ID NO: 1445854
ggccucagggaauauuucc

SEQ ID NO: 1445856 - RNA, 19 nt, Artificial Sequence
  Description of Artificial Sequence: Synthetic oligonucleotide
  Sense strand starting at position 3759 of SEQ ID NO: 1243846
ggaggcugccuugagacua

SEQ ID NO: 1445857 - RNA, 19 nt, Artificial Sequence
  Description of Artificial Sequence: Synthetic oligonucleotide
  Antisense strand to SEQ ID NO: 1445856
uagucucaaggcagccucc

SEQ ID NO: 1445858 - RNA, 19 nt, Artificial Sequence
  Description of Artificial Sequence: Synthetic oligonucleotide
  Sense strand starting at position 3823 of SEQ ID NO: 1243846
accagagauugccuggacu

SEQ ID NO: 1445859 - RNA, 19 nt, Artificial Sequence
  Description of Artificial Sequence: Synthetic oligonucleotide
  Antisense strand to SEQ ID NO: 1445858
aguccaggcaaucucuggu

SEQ ID NO: 1445860 - RNA, 19 nt, Artificial Sequence
  Description of Artificial Sequence: Synthetic oligonucleotide
  Sense strand starting at position 3845 of SEQ ID NO: 1243846
cguuuaauccaucacuuug

SEQ ID NO: 1445861 - RNA, 19 nt, Artificial Sequence
  Description of Artificial Sequence: Synthetic oligonucleotide
  Antisense strand to SEQ ID NO: 1445860
caaagugauggauuaaacg

SEQ ID NO: 1445862 - RNA, 19 nt, Artificial Sequence
  Description of Artificial Sequence: Synthetic oligonucleotide
  Sense strand starting at position 3857 of SEQ ID NO: 1243846
cacuuuggcccuugaguua

SEQ ID NO: 1445863 - RNA, 19 nt, Artificial Sequence
  Description of Artificial Sequence: Synthetic oligonucleotide
  Antisense strand to SEQ ID NO: 1445862
uaacucaagggccaaagug

SEQ ID NO: 1445864 - RNA, 19 nt, Artificial Sequence
  Description of Artificial Sequence: Synthetic oligonucleotide
  Sense strand starting at position 3864 of SEQ ID NO: 1243846
gcccuugaguuacuaacau

SEQ ID NO: 1445865 - RNA, 19 nt, Artificial Sequence
  Description of Artificial Sequence: Synthetic oligonucleotide
  Antisense strand to SEQ ID NO: 1445864
auguuaguaacucaagggc

SEQ ID NO: 1445866 - RNA, 19 nt, Artificial Sequence
  Description of Artificial Sequence: Synthetic oligonucleotide
  Sense strand starting at position 3884 of SEQ ID NO: 1243846
guugcaacuguccaaaguu

SEQ ID NO: 1445867 - RNA, 19 nt, Artificial Sequence
  Description of Artificial Sequence: Synthetic oligonucleotide
  Antisense strand to SEQ ID NO: 1445866
aacuuuggacaguugcaac

SEQ ID NO: 1445868 - RNA, 19 nt, Artificial Sequence
  Description of Artificial Sequence: Synthetic oligonucleotide
  Sense strand starting at position 3941 of SEQ ID NO: 1243846
cuaagauggcaacaucagu

SEQ ID NO: 1445869 - RNA, 19 nt, Artificial Sequence
  Description of Artificial Sequence: Synthetic oligonucleotide
  Antisense strand to SEQ ID NO: 1445868
acugauguugccaucuuag

SEQ ID NO: 1445870 - RNA, 19 nt, Artificial Sequence
  Description of Artificial Sequence: Synthetic oligonucleotide
  Sense strand starting at position 3947 of SEQ ID NO: 1243846
uggcaacaucaguaucagu

SEQ ID NO: 1445871 - RNA, 19 nt, Artificial Sequence
  Description of Artificial Sequence: Synthetic oligonucleotide
  Antisense strand to SEQ ID NO: 1445870
acugauacugauguugcca

SEQ ID NO: 1445872 - RNA, 19 nt, Artificial Sequence
  Description of Artificial Sequence: Synthetic oligonucleotide
  Sense strand starting at position 3952 of SEQ ID NO: 1243846
acaucaguaucagucaaau

SEQ ID NO: 1445873 - RNA, 19 nt, Artificial Sequence
  Description of Artificial Sequence: Synthetic oligonucleotide
  Antisense strand to SEQ ID NO: 1445872
auuugacugauacugaugu

SEQ ID NO: 1445874 - RNA, 19 nt, Artificial Sequence
  Description of Artificial Sequence: Synthetic oligonucleotide
  Sense strand starting at position 3973 of SEQ ID NO: 1243846
agcaacacgcguuaacuua

SEQ ID NO: 1445875 - RNA, 19 nt, Artificial Sequence
  Description of Artificial Sequence: Synthetic oligonucleotide
  Antisense strand to SEQ ID NO: 1445874
uaaguuaacgcguguugcu

SEQ ID NO: 1445876 - RNA, 19 nt, Artificial Sequence
  Description of Artificial Sequence: Synthetic oligonucleotide
  Sense strand starting at position 199 of SEQ ID NO: 1243847
ugcguuggauucuauguga

SEQ ID NO: 1445877 - RNA, 19 nt, Artificial Sequence
  Description of Artificial Sequence: Synthetic oligonucleotide
  Antisense strand to SEQ ID NO: 1445876
ucacauagaauccaacgca

SEQ ID NO: 1445878 - RNA, 19 nt, Artificial Sequence
  Description of Artificial Sequence: Synthetic oligonucleotide
  Sense strand starting at position 241 of SEQ ID NO: 1243847
gaaggugauucgguucaug

SEQ ID NO: 1445879 - RNA, 19 nt, Artificial Sequence
  Description of Artificial Sequence: Synthetic oligonucleotide
  Antisense strand to SEQ ID NO: 1445878
caugaaccgaaucaccuuc

SEQ ID NO: 1445880 - RNA, 19 nt, Artificial Sequence
  Description of Artificial Sequence: Synthetic oligonucleotide
  Sense strand starting at position 244 of SEQ ID NO: 1243847
ggugauucgguucaugaag

SEQ ID NO: 1445881 - RNA, 19 nt, Artificial Sequence
  Description of Artificial Sequence: Synthetic oligonucleotide
  Antisense strand to SEQ ID NO: 1445880
cuucaugaaccgaaucacc

SEQ ID NO: 1445882 - RNA, 19 nt, Artificial Sequence
  Description of Artificial Sequence: Synthetic oligonucleotide
  Sense strand starting at position 2060 of SEQ ID NO: 1243847
uucuaaguucucuucgugu

SEQ ID NO: 1445883 - RNA, 19 nt, Artificial Sequence
  Description of Artificial Sequence: Synthetic oligonucleotide
  Antisense strand to SEQ ID NO: 1445882
acacgaagagaacuuagaa

SEQ ID NO: 1445884 - RNA, 19 nt, Artificial Sequence
  Description of Artificial Sequence: Synthetic oligonucleotide
  Sense strand starting at position 2062 of SEQ ID NO: 1243847
cuaaguucucuucgugugu

SEQ ID NO: 1445885 - RNA, 19 nt, Artificial Sequence
  Description of Artificial Sequence: Synthetic oligonucleotide
  Antisense strand to SEQ ID NO: 1445884
acacacgaagagaacuuag

SEQ ID NO: 1445886 - RNA, 19 nt, Artificial Sequence
  Description of Artificial Sequence: Synthetic oligonucleotide
  Sense strand starting at position 2152 of SEQ ID NO: 1243847
ucaggacuccacuggguua

SEQ ID NO: 1445887 - RNA, 19 nt, Artificial Sequence
  Description of Artificial Sequence: Synthetic oligonucleotide
  Antisense strand to SEQ ID NO: 1445886
uaacccaguggaguccuga

SEQ ID NO: 1445888 - RNA, 19 nt, Artificial Sequence
  Description of Artificial Sequence: Synthetic oligonucleotide
  Sense strand starting at position 2307 of SEQ ID NO: 1243847
ugaugucugccuuggccua

SEQ ID NO: 1445889 - RNA, 19 nt, Artificial Sequence
  Description of Artificial Sequence: Synthetic oligonucleotide
  Antisense strand to SEQ ID NO: 1445888
uaggccaaggcagacauca

SEQ ID NO: 1445890 - RNA, 19 nt, Artificial Sequence
  Description of Artificial Sequence: Synthetic oligonucleotide
  Sense strand starting at position 3195 of SEQ ID NO: 1243847
auuugaaucccacguugca

SEQ ID NO: 1445891 - RNA, 19 nt, Artificial Sequence
  Description of Artificial Sequence: Synthetic oligonucleotide
  Antisense strand to SEQ ID NO: 1445890
ugcaacgugggauucaaau

SEQ ID NO: 1445892 - RNA, 19 nt, Artificial Sequence
  Description of Artificial Sequence: Synthetic oligonucleotide
  Sense strand starting at position 315 of SEQ ID NO: 1243848
ggcagauccaguuguuaca

SEQ ID NO: 1445893 - RNA, 19 nt, Artificial Sequence
  Description of Artificial Sequence: Synthetic oligonucleotide
  Antisense strand to SEQ ID NO: 1445892
uguaacaacuggaucugcc

SEQ ID NO: 1445894 - RNA, 19 nt, Artificial Sequence
  Description of Artificial Sequence: Synthetic oligonucleotide
  Sense strand starting at position 386 of SEQ ID NO: 1243848
gugguaagcacuuagaaga

SEQ ID NO: 1445895 - RNA, 19 nt, Artificial Sequence
  Description of Artificial Sequence: Synthetic oligonucleotide
  Antisense strand to SEQ ID NO: 1445894
ucuucuaagugcuuaccac

SEQ ID NO: 1445896 - RNA, 19 nt, Artificial Sequence
  Description of Artificial Sequence: Synthetic oligonucleotide
  Sense strand starting at position 774 of SEQ ID NO: 1243848
gccucaucugcagaaacga

SEQ ID NO: 1445897 - RNA, 19 nt, Artificial Sequence
  Description of Artificial Sequence: Synthetic oligonucleotide
  Antisense strand to SEQ ID NO: 1445896
ucguuucugcagaugaggc

SEQ ID NO: 1445898 - RNA, 19 nt, Artificial Sequence
  Description of Artificial Sequence: Synthetic oligonucleotide
  Sense strand starting at position 846 of SEQ ID NO: 1243848
aucgcaagguuucuuacua

SEQ ID NO: 1445899 - RNA, 19 nt, Artificial Sequence
  Description of Artificial Sequence: Synthetic oligonucleotide
  Antisense strand to SEQ ID NO: 1445898
uaguaagaaaccuugcgau

SEQ ID NO: 1445900 - RNA, 19 nt, Artificial Sequence
  Description of Artificial Sequence: Synthetic oligonucleotide
  Sense strand starting at position 847 of SEQ ID NO: 1243848
ucgcaagguuucuuacuaa

SEQ ID NO: 1445901 - RNA, 19 nt, Artificial Sequence
  Description of Artificial Sequence: Synthetic oligonucleotide
  Antisense strand to SEQ ID NO: 1445900
uuaguaagaaaccuugcga

SEQ ID NO: 1445902 - RNA, 19 nt, Artificial Sequence
  Description of Artificial Sequence: Synthetic oligonucleotide
  Sense strand starting at position 1179 of SEQ ID NO: 1243848
aguucucggccucaaacaa

SEQ ID NO: 1445903 - RNA, 19 nt, Artificial Sequence
  Description of Artificial Sequence: Synthetic oligonucleotide
  Antisense strand to SEQ ID NO: 1445902
uuguuugaggccgagaacu

SEQ ID NO: 1445904 - RNA, 19 nt, Artificial Sequence
  Description of Artificial Sequence: Synthetic oligonucleotide
  Sense strand starting at position 1227 of SEQ ID NO: 1243848
ggauuacaagcaugauuaa

SEQ ID NO: 1445905 - RNA, 19 nt, Artificial Sequence
  Description of Artificial Sequence: Synthetic oligonucleotide
  Antisense strand to SEQ ID NO: 1445904
uuaaucaugcuuguaaucc

SEQ ID NO: 1445906 - RNA, 19 nt, Artificial Sequence
  Description of Artificial Sequence: Synthetic oligonucleotide
  Sense strand starting at position 1260 of SEQ ID NO: 1243848
gugacuugauuauuauugu

SEQ ID NO: 1445907 - RNA, 19 nt, Artificial Sequence
  Description of Artificial Sequence: Synthetic oligonucleotide
  Antisense strand to SEQ ID NO: 1445906
acaauaauaaucaagucac

SEQ ID NO: 1445908 - RNA, 19 nt, Artificial Sequence
  Description of Artificial Sequence: Synthetic oligonucleotide
  Sense strand starting at position 1315 of SEQ ID NO: 1243848
gguuucuauaggugcuuaa

SEQ ID NO: 1445909 - RNA, 19 nt, Artificial Sequence
  Description of Artificial Sequence: Synthetic oligonucleotide
  Antisense strand to SEQ ID NO: 1445908
uuaagcaccuauagaaacc

SEQ ID NO: 1445910 - RNA, 19 nt, Artificial Sequence
  Description of Artificial Sequence: Synthetic oligonucleotide
  Sense strand starting at position 1318 of SEQ ID NO: 1243848
uucuauaggugcuuaauaa

SEQ ID NO: 1445911 - RNA, 19 nt, Artificial Sequence
  Description of Artificial Sequence: Synthetic oligonucleotide
  Antisense strand to SEQ ID NO: 1445910
uuauuaagcaccuauagaa

SEQ ID NO: 1445912 - RNA, 19 nt, Artificial Sequence
  Description of Artificial Sequence: Synthetic oligonucleotide
  Sense strand starting at position 1319 of SEQ ID NO: 1243848
ucuauaggugcuuaauaau

SEQ ID NO: 1445913 - RNA, 19 nt, Artificial Sequence
  Description of Artificial Sequence: Synthetic oligonucleotide
  Antisense strand to SEQ ID NO: 1445912
auuauuaagcaccuauaga

SEQ ID NO: 1445914 - RNA, 19 nt, Artificial Sequence
  Description of Artificial Sequence: Synthetic oligonucleotide
  Sense strand starting at position 1353 of SEQ ID NO: 1243848
accaguucuggcuaaacau

SEQ ID NO: 1445915 - RNA, 19 nt, Artificial Sequence
  Description of Artificial Sequence: Synthetic oligonucleotide
  Antisense strand to SEQ ID NO: 1445914
auguuuagccagaacuggu

SEQ ID NO: 1445916 - RNA, 19 nt, Artificial Sequence
  Description of Artificial Sequence: Synthetic oligonucleotide
  Sense strand starting at position 1384 of SEQ ID NO: 1243848
gagcucuguggagagguaa

SEQ ID NO: 1445917 - RNA, 19 nt, Artificial Sequence
  Description of Artificial Sequence: Synthetic oligonucleotide
  Antisense strand to SEQ ID NO: 1445916
uuaccucuccacagagcuc

SEQ ID NO: 1445918 - RNA, 19 nt, Artificial Sequence
  Description of Artificial Sequence: Synthetic oligonucleotide
  Sense strand starting at position 1397 of SEQ ID NO: 1243848
agguaaugcaucuguggga

SEQ ID NO: 1445919 - RNA, 19 nt, Artificial Sequence
  Description of Artificial Sequence: Synthetic oligonucleotide
  Antisense strand to SEQ ID NO: 1445918
ucccacagaugcauuaccu

SEQ ID NO: 1445920 - RNA, 19 nt, Artificial Sequence
  Description of Artificial Sequence: Synthetic oligonucleotide
  Sense strand starting at position 1398 of SEQ ID NO: 1243848
gguaaugcaucugugggaa

SEQ ID NO: 1445921 - RNA, 19 nt, Artificial Sequence
  Description of Artificial Sequence: Synthetic oligonucleotide
  Antisense strand to SEQ ID NO: 1445920
uucccacagaugcauuacc

SEQ ID NO: 1445922 - RNA, 19 nt, Artificial Sequence
  Description of Artificial Sequence: Synthetic oligonucleotide
  Sense strand starting at position 1401 of SEQ ID NO: 1243848
aaugcaucugugggaacau

SEQ ID NO: 1445923 - RNA, 19 nt, Artificial Sequence
  Description of Artificial Sequence: Synthetic oligonucleotide
  Antisense strand to SEQ ID NO: 1445922
auguucccacagaugcauu

SEQ ID NO: 1445924 - RNA, 19 nt, Artificial Sequence
  Description of Artificial Sequence: Synthetic oligonucleotide
  Sense strand starting at position 1506 of SEQ ID NO: 1243848
guggucagcccugagugua

SEQ ID NO: 1445925 - RNA, 19 nt, Artificial Sequence
  Description of Artificial Sequence: Synthetic oligonucleotide
  Antisense strand to SEQ ID NO: 1445924
uacacucagggcugaccac

SEQ ID NO: 1445926 - RNA, 19 nt, Artificial Sequence
  Description of Artificial Sequence: Synthetic oligonucleotide
  Sense strand starting at position 1511 of SEQ ID NO: 1243848
cagcccugaguguacaaua

SEQ ID NO: 1445927 - RNA, 19 nt, Artificial Sequence
  Description of Artificial Sequence: Synthetic oligonucleotide
  Antisense strand to SEQ ID NO: 1445926
uauuguacacucagggcug

SEQ ID NO: 1445928 - RNA, 19 nt, Artificial Sequence
  Description of Artificial Sequence: Synthetic oligonucleotide
  Sense strand starting at position 1530 of SEQ ID NO: 1243848
gaaucaccuggcugucauu

SEQ ID NO: 1445929 - RNA, 19 nt, Artificial Sequence
  Description of Artificial Sequence: Synthetic oligonucleotide
  Antisense strand to SEQ ID NO: 1445928
aaugacagccaggugauuc

SEQ ID NO: 1445930 - RNA, 19 nt, Artificial Sequence
  Description of Artificial Sequence: Synthetic oligonucleotide
  Sense strand starting at position 1721 of SEQ ID NO: 1243848
ccuuuaauggcaggauuau

SEQ ID NO: 1445931 - RNA, 19 nt, Artificial Sequence
  Description of Artificial Sequence: Synthetic oligonucleotide
  Antisense strand to SEQ ID NO: 1445930
auaauccugccauuaaagg

SEQ ID NO: 1445932 - RNA, 19 nt, Artificial Sequence
  Description of Artificial Sequence: Synthetic oligonucleotide
  Sense strand starting at position 1722 of SEQ ID NO: 1243848
cuuuaauggcaggauuauu

SEQ ID NO: 1445933 - RNA, 19 nt, Artificial Sequence
  Description of Artificial Sequence: Synthetic oligonucleotide
  Antisense strand to SEQ ID NO: 1445932
aauaauccugccauuaaag

SEQ ID NO: 1445934 - RNA, 19 nt, Artificial Sequence
  Description of Artificial Sequence: Synthetic oligonucleotide
  Sense strand starting at position 1730 of SEQ ID NO: 1243848
gcaggauuauucuuugaug

SEQ ID NO: 1445935 - RNA, 19 nt, Artificial Sequence
  Description of Artificial Sequence: Synthetic oligonucleotide
  Antisense strand to SEQ ID NO: 1445934
caucaaagaauaauccugc

SEQ ID NO: 1445936 - RNA, 19 nt, Artificial Sequence
  Description of Artificial Sequence: Synthetic oligonucleotide
  Sense strand starting at position 1731 of SEQ ID NO: 1243848
caggauuauucuuugauga

SEQ ID NO: 1445937 - RNA, 19 nt, Artificial Sequence
  Description of Artificial Sequence: Synthetic oligonucleotide
  Antisense strand to SEQ ID NO: 1445936
ucaucaaagaauaauccug

SEQ ID NO: 1445938 - RNA, 19 nt, Artificial Sequence
  Description of Artificial Sequence: Synthetic oligonucleotide
  Sense strand starting at position 1756 of SEQ ID NO: 1243848
ugaccuucuccuggaaguu

SEQ ID NO: 1445939 - RNA, 19 nt, Artificial Sequence
  Description of Artificial Sequence: Synthetic oligonucleotide
  Antisense strand to SEQ ID NO: 1445938
aacuuccaggagaagguca

SEQ ID NO: 1445940 - RNA, 19 nt, Artificial Sequence
  Description of Artificial Sequence: Synthetic oligonucleotide
  Sense strand starting at position 1836 of SEQ ID NO: 1243848
cccagacuguuaccugaga

SEQ ID NO: 1445941 - RNA, 19 nt, Artificial Sequence
  Description of Artificial Sequence: Synthetic oligonucleotide
  Antisense strand to SEQ ID NO: 1445940
ucucagguaacagucuggg

SEQ ID NO: 1445942 - RNA, 19 nt, Artificial Sequence
  Description of Artificial Sequence: Synthetic oligonucleotide
  Sense strand starting at position 1837 of SEQ ID NO: 1243848
ccagacuguuaccugagaa

SEQ ID NO: 1445943 - RNA, 19 nt, Artificial Sequence
  Description of Artificial Sequence: Synthetic oligonucleotide
  Antisense strand to SEQ ID NO: 1445942
uucucagguaacagucugg

SEQ ID NO: 1445944 - RNA, 19 nt, Artificial Sequence
  Description of Artificial Sequence: Synthetic oligonucleotide
  Sense strand starting at position 1850 of SEQ ID NO: 1243848
ugagaaguuucugugauuc

SEQ ID NO: 1445945 - RNA, 19 nt, Artificial Sequence
  Description of Artificial Sequence: Synthetic oligonucleotide
  Antisense strand to SEQ ID NO: 1445944
gaaucacagaaacuucuca

SEQ ID NO: 1445946 - RNA, 19 nt, Artificial Sequence
  Description of Artificial Sequence: Synthetic oligonucleotide
  Sense strand starting at position 2020 of SEQ ID NO: 1243848
gccagaagucaggagugaa

SEQ ID NO: 1445947 - RNA, 19 nt, Artificial Sequence
  Description of Artificial Sequence: Synthetic oligonucleotide
  Antisense strand to SEQ ID NO: 1445946
uucacuccugacuucuggc

SEQ ID NO: 1445948 - RNA, 19 nt, Artificial Sequence
  Description of Artificial Sequence: Synthetic oligonucleotide
  Sense strand starting at position 2149 of SEQ ID NO: 1243848
cggacauuagagugauuau

SEQ ID NO: 1445949 - RNA, 19 nt, Artificial Sequence
  Description of Artificial Sequence: Synthetic oligonucleotide
  Antisense strand to SEQ ID NO: 1445948
auaaucacucuaauguccg

SEQ ID NO: 1445950 - RNA, 19 nt, Artificial Sequence
  Description of Artificial Sequence: Synthetic oligonucleotide
  Sense strand starting at position 2394 of SEQ ID NO: 1243848
aaggucuauuaagacagau

SEQ ID NO: 1445951 - RNA, 19 nt, Artificial Sequence
  Description of Artificial Sequence: Synthetic oligonucleotide
  Antisense strand to SEQ ID NO: 1445950
aucugucuuaauagaccuu

SEQ ID NO: 1445952 - RNA, 19 nt, Artificial Sequence
  Description of Artificial Sequence: Synthetic oligonucleotide
  Sense strand starting at position 2763 of SEQ ID NO: 1243848
cuugcucucccuguguuau

SEQ ID NO: 1445953 - RNA, 19 nt, Artificial Sequence
  Description of Artificial Sequence: Synthetic oligonucleotide
  Antisense strand to SEQ ID NO: 1445952
auaacacagggagagcaag

SEQ ID NO: 1445954 - RNA, 19 nt, Artificial Sequence
  Description of Artificial Sequence: Synthetic oligonucleotide
  Sense strand starting at position 2769 of SEQ ID NO: 1243848
cucccuguguuaucaucau

SEQ ID NO: 1445955 - RNA, 19 nt, Artificial Sequence
  Description of Artificial Sequence: Synthetic oligonucleotide
  Antisense strand to SEQ ID NO: 1445954
augaugauaacacagggag

SEQ ID NO: 1445956 - RNA, 19 nt, Artificial Sequence
  Description of Artificial Sequence: Synthetic oligonucleotide
  Sense strand starting at position 2792 of SEQ ID NO: 1243848
uguugacaauccuuugaaa

SEQ ID NO: 1445957 - RNA, 19 nt, Artificial Sequence
  Description of Artificial Sequence: Synthetic oligonucleotide
  Antisense strand to SEQ ID NO: 1445956
uuucaaaggauugucaaca

SEQ ID NO: 1445958 - RNA, 19 nt, Artificial Sequence
  Description of Artificial Sequence: Synthetic oligonucleotide
  Sense strand starting at position 2794 of SEQ ID NO: 1243848
uugacaauccuuugaaaug

SEQ ID NO: 1445959 - RNA, 19 nt, Artificial Sequence
  Description of Artificial Sequence: Synthetic oligonucleotide
  Antisense strand to SEQ ID NO: 1445958
cauuucaaaggauugucaa

SEQ ID NO: 1445960 - RNA, 19 nt, Artificial Sequence
  Description of Artificial Sequence: Synthetic oligonucleotide
  Sense strand starting at position 3398 of SEQ ID NO: 1243848
agggaaggaucugagcaaa

SEQ ID NO: 1445961 - RNA, 19 nt, Artificial Sequence
  Description of Artificial Sequence: Synthetic oligonucleotide
  Antisense strand to SEQ ID NO: 1445960
uuugcucagauccuucccu

SEQ ID NO: 1445962 - RNA, 19 nt, Artificial Sequence
  Description of Artificial Sequence: Synthetic oligonucleotide
  Sense strand starting at position 3446 of SEQ ID NO: 1243848
cuggaaaugcuacgggaaa

SEQ ID NO: 1445963 - RNA, 19 nt, Artificial Sequence
  Description of Artificial Sequence: Synthetic oligonucleotide
  Antisense strand to SEQ ID NO: 1445962
uuucccguagcauuuccag

SEQ ID NO: 1445964 - RNA, 19 nt, Artificial Sequence
  Description of Artificial Sequence: Synthetic oligonucleotide
  Sense strand starting at position 3448 of SEQ ID NO: 1243848
ggaaaugcuacgggaaaug

SEQ ID NO: 1445965 - RNA, 19 nt, Artificial Sequence
  Description of Artificial Sequence: Synthetic oligonucleotide
  Antisense strand to SEQ ID NO: 1445964
cauuucccguagcauuucc

SEQ ID NO: 1445966 - RNA, 19 nt, Artificial Sequence
  Description of Artificial Sequence: Synthetic oligonucleotide
  Sense strand starting at position 3553 of SEQ ID NO: 1243848
ggacaucuuugagugcaca

SEQ ID NO: 1445967 - RNA, 19 nt, Artificial Sequence
  Description of Artificial Sequence: Synthetic oligonucleotide
  Antisense strand to SEQ ID NO: 1445966
ugugcacucaaagaugucc

SEQ ID NO: 1445968 - RNA, 19 nt, Artificial Sequence
  Description of Artificial Sequence: Synthetic oligonucleotide
  Sense strand starting at position 3733 of SEQ ID NO: 1243848
gacccucggacucgagaaa

SEQ ID NO: 1445969 - RNA, 19 nt, Artificial Sequence
  Description of Artificial Sequence: Synthetic oligonucleotide
  Antisense strand to SEQ ID NO: 1445968
uuucucgaguccgaggguc

SEQ ID NO: 1445970 - RNA, 19 nt, Artificial Sequence
  Description of Artificial Sequence: Synthetic oligonucleotide
  Sense strand starting at position 3909 of SEQ ID NO: 1243848
gcuugccuggccuuugauu

SEQ ID NO: 1445971 - RNA, 19 nt, Artificial Sequence
  Description of Artificial Sequence: Synthetic oligonucleotide
  Antisense strand to SEQ ID NO: 1445970
aaucaaaggccaggcaagc

SEQ ID NO: 1445972 - RNA, 19 nt, Artificial Sequence
  Description of Artificial Sequence: Synthetic oligonucleotide
  Sense strand starting at position 192 of SEQ ID NO: 1243849
guacaaagucauggcaauc

SEQ ID NO: 1445973 - RNA, 19 nt, Artificial Sequence
  Description of Artificial Sequence: Synthetic oligonucleotide
  Antisense strand to SEQ ID NO: 1445972
gauugccaugacuuuguac

SEQ ID NO: 1445974 - RNA, 19 nt, Artificial Sequence
  Description of Artificial Sequence: Synthetic oligonucleotide
  Sense strand starting at position 203 of SEQ ID NO: 1243849
uggcaaucuagugggagaa

SEQ ID NO: 1445975 - RNA, 19 nt, Artificial Sequence
  Description of Artificial Sequence: Synthetic oligonucleotide
  Antisense strand to SEQ ID NO: 1445974
uucucccacuagauugcca

SEQ ID NO: 1445976 - RNA, 19 nt, Artificial Sequence
  Description of Artificial Sequence: Synthetic oligonucleotide
  Sense strand starting at position 204 of SEQ ID NO: 1243849
ggcaaucuagugggagaaa

SEQ ID NO: 1445977 - RNA, 19 nt, Artificial Sequence
  Description of Artificial Sequence: Synthetic oligonucleotide
  Antisense strand to SEQ ID NO: 1445976
uuucucccacuagauugcc

SEQ ID NO: 1445978 - RNA, 19 nt, Artificial Sequence
  Description of Artificial Sequence: Synthetic oligonucleotide
  Sense strand starting at position 327 of SEQ ID NO: 1243849
uucuguaugccuugaagac

SEQ ID NO: 1445979 - RNA, 19 nt, Artificial Sequence
  Description of Artificial Sequence: Synthetic oligonucleotide
  Antisense strand to SEQ ID NO: 1445978
gucuucaaggcauacagaa

SEQ ID NO: 1445980 - RNA, 19 nt, Artificial Sequence
  Description of Artificial Sequence: Synthetic oligonucleotide
  Sense strand starting at position 328 of SEQ ID NO: 1243849
ucuguaugccuugaagaca

SEQ ID NO: 1445981 - RNA, 19 nt, Artificial Sequence
  Description of Artificial Sequence: Synthetic oligonucleotide
  Antisense strand to SEQ ID NO: 1445980
ugucuucaaggcauacaga

SEQ ID NO: 1445982 - RNA, 19 nt, Artificial Sequence
  Description of Artificial Sequence: Synthetic oligonucleotide
  Sense strand starting at position 362 of SEQ ID NO: 1243849
uccuaaggaucuucguauu

SEQ ID NO: 1445983 - RNA, 19 nt, Artificial Sequence
  Description of Artificial Sequence: Synthetic oligonucleotide
  Antisense strand to SEQ ID NO: 1445982
aauacgaagauccuuagga

SEQ ID NO: 1445984 - RNA, 19 nt, Artificial Sequence
  Description of Artificial Sequence: Synthetic oligonucleotide
  Sense strand starting at position 405 of SEQ ID NO: 1243849
cccuauaggugcucaaaug

SEQ ID NO: 1445985 - RNA, 19 nt, Artificial Sequence
  Description of Artificial Sequence: Synthetic oligonucleotide
  Antisense strand to SEQ ID NO: 1445984
cauuugagcaccuauaggg

SEQ ID NO: 1445986 - RNA, 19 nt, Artificial Sequence
  Description of Artificial Sequence: Synthetic oligonucleotide
  Sense strand starting at position 406 of SEQ ID NO: 1243849
ccuauaggugcucaaaugu

SEQ ID NO: 1445987 - RNA, 19 nt, Artificial Sequence
  Description of Artificial Sequence: Synthetic oligonucleotide
  Antisense strand to SEQ ID NO: 1445986
acauuugagcaccuauagg

SEQ ID NO: 1445988 - RNA, 19 nt, Artificial Sequence
  Description of Artificial Sequence: Synthetic oligonucleotide
  Sense strand starting at position 414 of SEQ ID NO: 1243849
ugcucaaauguuugaugga

SEQ ID NO: 1445989 - RNA, 19 nt, Artificial Sequence
  Description of Artificial Sequence: Synthetic oligonucleotide
  Antisense strand to SEQ ID NO: 1445988
uccaucaaacauuugagca

SEQ ID NO: 1445990 - RNA, 19 nt, Artificial Sequence
  Description of Artificial Sequence: Synthetic oligonucleotide
  Sense strand starting at position 421 of SEQ ID NO: 1243849
auguuugauggaugaacgu

SEQ ID NO: 1445991 - RNA, 19 nt, Artificial Sequence
  Description of Artificial Sequence: Synthetic oligonucleotide
  Antisense strand to SEQ ID NO: 1445990
acguucauccaucaaacau

SEQ ID NO: 1445992 - RNA, 19 nt, Artificial Sequence
  Description of Artificial Sequence: Synthetic oligonucleotide
  Sense strand starting at position 455 of SEQ ID NO: 1243849
ugugcaguccaagaugaaa

SEQ ID NO: 1445993 - RNA, 19 nt, Artificial Sequence
  Description of Artificial Sequence: Synthetic oligonucleotide
  Antisense strand to SEQ ID NO: 1445992
uuucaucuuggacugcaca

SEQ ID NO: 1445994 - RNA, 19 nt, Artificial Sequence
  Description of Artificial Sequence: Synthetic oligonucleotide
  Sense strand starting at position 500 of SEQ ID NO: 1243849
ccaaauauguaucuucugu

SEQ ID NO: 1445995 - RNA, 19 nt, Artificial Sequence
  Description of Artificial Sequence: Synthetic oligonucleotide
  Antisense strand to SEQ ID NO: 1445994
acagaagauacauauuugg

SEQ ID NO: 1445996 - RNA, 19 nt, Artificial Sequence
  Description of Artificial Sequence: Synthetic oligonucleotide
  Sense strand starting at position 600 of SEQ ID NO: 1243849
augcaauugcuagguuauu

SEQ ID NO: 1445997 - RNA, 19 nt, Artificial Sequence
  Description of Artificial Sequence: Synthetic oligonucleotide
  Antisense strand to SEQ ID NO: 1445996
aauaaccuagcaauugcau

SEQ ID NO: 1445998 - RNA, 19 nt, Artificial Sequence
  Description of Artificial Sequence: Synthetic oligonucleotide
  Sense strand starting at position 682 of SEQ ID NO: 1243849
auauaauaucagggcguua

SEQ ID NO: 1445999 - RNA, 19 nt, Artificial Sequence
  Description of Artificial Sequence: Synthetic oligonucleotide
  Antisense strand to SEQ ID NO: 1445998
uaacgcccugauauuauau

SEQ ID NO: 1446000 - RNA, 19 nt, Artificial Sequence
  Description of Artificial Sequence: Synthetic oligonucleotide
  Sense strand starting at position 684 of SEQ ID NO: 1243849
auaauaucagggcguuaaa

SEQ ID NO: 1446001 - RNA, 19 nt, Artificial Sequence
  Description of Artificial Sequence: Synthetic oligonucleotide
  Antisense strand to SEQ ID NO: 1446000
uuuaacgcccugauauuau

SEQ ID NO: 1446002 - RNA, 19 nt, Artificial Sequence
  Description of Artificial Sequence: Synthetic oligonucleotide
  Sense strand starting at position 743 of SEQ ID NO: 1243849
cagaucgcauuuggagaaa

SEQ ID NO: 1446003 - RNA, 19 nt, Artificial Sequence
  Description of Artificial Sequence: Synthetic oligonucleotide
  Antisense strand to SEQ ID NO: 1446002
uuucuccaaaugcgaucug

SEQ ID NO: 1446004 - RNA, 19 nt, Artificial Sequence
  Description of Artificial Sequence: Synthetic oligonucleotide
  Sense strand starting at position 874 of SEQ ID NO: 1243849
gggagcauuagcuggcuga

SEQ ID NO: 1446005 - RNA, 19 nt, Artificial Sequence
  Description of Artificial Sequence: Synthetic oligonucleotide
  Antisense strand to SEQ ID NO: 1446004
ucagccagcuaaugcuccc

SEQ ID NO: 1446006 - RNA, 19 nt, Artificial Sequence
  Description of Artificial Sequence: Synthetic oligonucleotide
  Sense strand starting at position 960 of SEQ ID NO: 1243849
gcuucucucccggaucaau

SEQ ID NO: 1446007 - RNA, 19 nt, Artificial Sequence
  Description of Artificial Sequence: Synthetic oligonucleotide
  Antisense strand to SEQ ID NO: 1446006
auugauccgggagagaagc

SEQ ID NO: 1446008 - RNA, 19 nt, Artificial Sequence
  Description of Artificial Sequence: Synthetic oligonucleotide
  Sense strand starting at position 1143 of SEQ ID NO: 1243849
aagagaaagccgugggauu

SEQ ID NO: 1446009 - RNA, 19 nt, Artificial Sequence
  Description of Artificial Sequence: Synthetic oligonucleotide
  Antisense strand to SEQ ID NO: 1446008
aaucccacggcuuucucuu

SEQ ID NO: 1446010 - RNA, 19 nt, Artificial Sequence
  Description of Artificial Sequence: Synthetic oligonucleotide
  Sense strand starting at position 1231 of SEQ ID NO: 1243849
gaugcuuauggccgggaaa

SEQ ID NO: 1446011 - RNA, 19 nt, Artificial Sequence
  Description of Artificial Sequence: Synthetic oligonucleotide
  Antisense strand to SEQ ID NO: 1446010
uuucccggccauaagcauc

SEQ ID NO: 1446012 - RNA, 19 nt, Artificial Sequence
  Description of Artificial Sequence: Synthetic oligonucleotide
  Sense strand starting at position 1233 of SEQ ID NO: 1243849
ugcuuauggccgggaaaga

SEQ ID NO: 1446013 - RNA, 19 nt, Artificial Sequence
  Description of Artificial Sequence: Synthetic oligonucleotide
  Antisense strand to SEQ ID NO: 1446012
ucuuucccggccauaagca

SEQ ID NO: 1446014 - RNA, 19 nt, Artificial Sequence
  Description of Artificial Sequence: Synthetic oligonucleotide
  Sense strand starting at position 1244 of SEQ ID NO: 1243849
gggaaagacucuuuguguc

SEQ ID NO: 1446015 - RNA, 19 nt, Artificial Sequence
  Description of Artificial Sequence: Synthetic oligonucleotide
  Antisense strand to SEQ ID NO: 1446014
gacacaaagagucuuuccc

SEQ ID NO: 1446016 - RNA, 19 nt, Artificial Sequence
  Description of Artificial Sequence: Synthetic oligonucleotide
  Sense strand starting at position 1250 of SEQ ID NO: 1243849
gacucuuugugucccaaga

SEQ ID NO: 1446017 - RNA, 19 nt, Artificial Sequence
  Description of Artificial Sequence: Synthetic oligonucleotide
  Antisense strand to SEQ ID NO: 1446016
ucuugggacacaaagaguc

SEQ ID NO: 1446018 - RNA, 19 nt, Artificial Sequence
  Description of Artificial Sequence: Synthetic oligonucleotide
  Sense strand starting at position 2177 of SEQ ID NO: 1243849
ucgcgauacccagaaucca

SEQ ID NO: 1446019 - RNA, 19 nt, Artificial Sequence
  Description of Artificial Sequence: Synthetic oligonucleotide
  Antisense strand to SEQ ID NO: 1446018
uggauucuggguaucgcga

SEQ ID NO: 1446020 - RNA, 19 nt, Artificial Sequence
  Description of Artificial Sequence: Synthetic oligonucleotide
  Sense strand starting at position 2334 of SEQ ID NO: 1243849
acgagcuaauuuguguaaa

SEQ ID NO: 1446021 - RNA, 19 nt, Artificial Sequence
  Description of Artificial Sequence: Synthetic oligonucleotide
  Antisense strand to SEQ ID NO: 1446020
uuuacacaaauuagcucgu

SEQ ID NO: 1446022 - RNA, 19 nt, Artificial Sequence
  Description of Artificial Sequence: Synthetic oligonucleotide
  Sense strand starting at position 2426 of SEQ ID NO: 1243849
auuauagaacagugucaug

SEQ ID NO: 1446023 - RNA, 19 nt, Artificial Sequence
  Description of Artificial Sequence: Synthetic oligonucleotide
  Antisense strand to SEQ ID NO: 1446022
caugacacuguucuauaau

SEQ ID NO: 1446024 - RNA, 19 nt, Artificial Sequence
  Description of Artificial Sequence: Synthetic oligonucleotide
  Sense strand starting at position 2562 of SEQ ID NO: 1243849
acgagaaucguugauggaa

SEQ ID NO: 1446025 - RNA, 19 nt, Artificial Sequence
  Description of Artificial Sequence: Synthetic oligonucleotide
  Antisense strand to SEQ ID NO: 1446024
uuccaucaacgauucucgu

SEQ ID NO: 1446026 - RNA, 19 nt, Artificial Sequence
  Description of Artificial Sequence: Synthetic oligonucleotide
  Sense strand starting at position 2822 of SEQ ID NO: 1243849
ccgaauacucccgaccuca

SEQ ID NO: 1446027 - RNA, 19 nt, Artificial Sequence
  Description of Artificial Sequence: Synthetic oligonucleotide
  Antisense strand to SEQ ID NO: 1446026
ugaggucgggaguauucgg

SEQ ID NO: 1446028 - RNA, 19 nt, Artificial Sequence
  Description of Artificial Sequence: Synthetic oligonucleotide
  Sense strand starting at position 3173 of SEQ ID NO: 1243849
gggaucucggcucagugua

SEQ ID NO: 1446029 - RNA, 19 nt, Artificial Sequence
  Description of Artificial Sequence: Synthetic oligonucleotide
  Antisense strand to SEQ ID NO: 1446028
uacacugagccgagauccc

SEQ ID NO: 1446030 - RNA, 19 nt, Artificial Sequence
  Description of Artificial Sequence: Synthetic oligonucleotide
  Sense strand starting at position 3181 of SEQ ID NO: 1243849
ggcucaguguagccaagaa

SEQ ID NO: 1446031 - RNA, 19 nt, Artificial Sequence
  Description of Artificial Sequence: Synthetic oligonucleotide
  Antisense strand to SEQ ID NO: 1446030
uucuuggcuacacugagcc

SEQ ID NO: 1446032 - RNA, 19 nt, Artificial Sequence
  Description of Artificial Sequence: Synthetic oligonucleotide
  Sense strand starting at position 3455 of SEQ ID NO: 1243849
uguuguuggaauuaugguu

SEQ ID NO: 1446033 - RNA, 19 nt, Artificial Sequence
  Description of Artificial Sequence: Synthetic oligonucleotide
  Antisense strand to SEQ ID NO: 1446032
aaccauaauuccaacaaca

SEQ ID NO: 1446034 - RNA, 19 nt, Artificial Sequence
  Description of Artificial Sequence: Synthetic oligonucleotide
  Sense strand starting at position 3460 of SEQ ID NO: 1243849
uuggaauuaugguuuacac

SEQ ID NO: 1446035 - RNA, 19 nt, Artificial Sequence
  Description of Artificial Sequence: Synthetic oligonucleotide
  Antisense strand to SEQ ID NO: 1446034
guguaaaccauaauuccaa

SEQ ID NO: 1446036 - RNA, 19 nt, Artificial Sequence
  Description of Artificial Sequence: Synthetic oligonucleotide
  Sense strand starting at position 3485 of SEQ ID NO: 1243849
acgugcaaauaucuuagau

SEQ ID NO: 1446037 - RNA, 19 nt, Artificial Sequence
  Description of Artificial Sequence: Synthetic oligonucleotide
  Antisense strand to SEQ ID NO: 1446036
aucuaagauauuugcacgu

SEQ ID NO: 1446038 - RNA, 19 nt, Artificial Sequence
  Description of Artificial Sequence: Synthetic oligonucleotide
  Sense strand starting at position 3495 of SEQ ID NO: 1243849
aucuuagauguacagcuua

SEQ ID NO: 1446039 - RNA, 19 nt, Artificial Sequence
  Description of Artificial Sequence: Synthetic oligonucleotide
  Antisense strand to SEQ ID NO: 1446038
uaagcuguacaucuaagau

SEQ ID NO: 1446040 - RNA, 19 nt, Artificial Sequence
  Description of Artificial Sequence: Synthetic oligonucleotide
  Sense strand starting at position 3500 of SEQ ID NO: 1243849
agauguacagcuuauguga

SEQ ID NO: 1446041 - RNA, 19 nt, Artificial Sequence
  Description of Artificial Sequence: Synthetic oligonucleotide
  Antisense strand to SEQ ID NO: 1446040
ucacauaagcuguacaucu

SEQ ID NO: 1446042 - RNA, 19 nt, Artificial Sequence
  Description of Artificial Sequence: Synthetic oligonucleotide
  Sense strand starting at position 3780 of SEQ ID NO: 1243849
cauauucuacucuggguga

SEQ ID NO: 1446043 - RNA, 19 nt, Artificial Sequence
  Description of Artificial Sequence: Synthetic oligonucleotide
  Antisense strand to SEQ ID NO: 1446042
ucacccagaguagaauaug

SEQ ID NO: 1446044 - RNA, 19 nt, Artificial Sequence
  Description of Artificial Sequence: Synthetic oligonucleotide
  Sense strand starting at position 3782 of SEQ ID NO: 1243849
uauucuacucugggugaca

SEQ ID NO: 1446045 - RNA, 19 nt, Artificial Sequence
  Description of Artificial Sequence: Synthetic oligonucleotide
  Antisense strand to SEQ ID NO: 1446044
ugucacccagaguagaaua

SEQ ID NO: 1446046 - RNA, 19 nt, Artificial Sequence
  Description of Artificial Sequence: Synthetic oligonucleotide
  Sense strand starting at position 3854 of SEQ ID NO: 1243849
agugguuauccuugaggag

SEQ ID NO: 1446047 - RNA, 19 nt, Artificial Sequence
  Description of Artificial Sequence: Synthetic oligonucleotide
  Antisense strand to SEQ ID NO: 1446046
cuccucaaggauaaccacu

SEQ ID NO: 1446048 - RNA, 19 nt, Artificial Sequence
  Description of Artificial Sequence: Synthetic oligonucleotide
  Sense strand starting at position 3855 of SEQ ID NO: 1243849
gugguuauccuugaggaga

SEQ ID NO: 1446049 - RNA, 19 nt, Artificial Sequence
  Description of Artificial Sequence: Synthetic oligonucleotide
  Antisense strand to SEQ ID NO: 1446048
ucuccucaaggauaaccac

SEQ ID NO: 1446050 - RNA, 19 nt, Artificial Sequence
  Description of Artificial Sequence: Synthetic oligonucleotide
  Sense strand starting at position 3902 of SEQ ID NO: 1243849
uucuaagaugcuggauaug

SEQ ID NO: 1446051 - RNA, 19 nt, Artificial Sequence
  Description of Artificial Sequence: Synthetic oligonucleotide
  Antisense strand to SEQ ID NO: 1446050
cauauccagcaucuuagaa

SEQ ID NO: 1446052 - RNA, 19 nt, Artificial Sequence
  Description of Artificial Sequence: Synthetic oligonucleotide
  Sense strand starting at position 7 of SEQ ID NO: 1243850
aaugaagaguuagaggaau

SEQ ID NO: 1446053 - RNA, 19 nt, Artificial Sequence
  Description of Artificial Sequence: Synthetic oligonucleotide
  Antisense strand to SEQ ID NO: 1446052
auuccucuaacucuucauu

SEQ ID NO: 1446054 - RNA, 19 nt, Artificial Sequence
  Description of Artificial Sequence: Synthetic oligonucleotide
  Sense strand starting at position 49 of SEQ ID NO: 1243850
ugaguugguguggaaagga

SEQ ID NO: 1446055 - RNA, 19 nt, Artificial Sequence
  Description of Artificial Sequence: Synthetic oligonucleotide
  Antisense strand to SEQ ID NO: 1446054
uccuuuccacaccaacuca

SEQ ID NO: 1446056 - RNA, 19 nt, Artificial Sequence
  Description of Artificial Sequence: Synthetic oligonucleotide
  Sense strand starting at position 142 of SEQ ID NO: 1243850
gccacaaacggagauuguu

SEQ ID NO: 1446057 - RNA, 19 nt, Artificial Sequence
  Description of Artificial Sequence: Synthetic oligonucleotide
  Antisense strand to SEQ ID NO: 1446056
aacaaucuccguuuguggc

SEQ ID NO: 1446058 - RNA, 19 nt, Artificial Sequence
  Description of Artificial Sequence: Synthetic oligonucleotide
  Sense strand starting at position 179 of SEQ ID NO: 1243850
aacagaguugucugggagu

SEQ ID NO: 1446059 - RNA, 19 nt, Artificial Sequence
  Description of Artificial Sequence: Synthetic oligonucleotide
  Antisense strand to SEQ ID NO: 1446058
acucccagacaacucuguu

SEQ ID NO: 1446060 - RNA, 19 nt, Artificial Sequence
  Description of Artificial Sequence: Synthetic oligonucleotide
  Sense strand starting at position 215 of SEQ ID NO: 1243850
uuaucuguggugggagaga

SEQ ID NO: 1446061 - RNA, 19 nt, Artificial Sequence
  Description of Artificial Sequence: Synthetic oligonucleotide
  Antisense strand to SEQ ID NO: 1446060
ucucucccaccacagauaa

SEQ ID NO: 1446062 - RNA, 19 nt, Artificial Sequence
  Description of Artificial Sequence: Synthetic oligonucleotide
  Sense strand starting at position 277 of SEQ ID NO: 1243850
gguuauuauaaacaguguu

SEQ ID NO: 1446063 - RNA, 19 nt, Artificial Sequence
  Description of Artificial Sequence: Synthetic oligonucleotide
  Antisense strand to SEQ ID NO: 1446062
aacacuguuuauaauaacc

SEQ ID NO: 1446064 - RNA, 19 nt, Artificial Sequence
  Description of Artificial Sequence: Synthetic oligonucleotide
  Sense strand starting at position 294 of SEQ ID NO: 1243850
uuggcaaucauguggagaa

SEQ ID NO: 1446065 - RNA, 19 nt, Artificial Sequence
  Description of Artificial Sequence: Synthetic oligonucleotide
  Antisense strand to SEQ ID NO: 1446064
uucuccacaugauugccaa

SEQ ID NO: 1446066 - RNA, 19 nt, Artificial Sequence
  Description of Artificial Sequence: Synthetic oligonucleotide
  Sense strand starting at position 572 of SEQ ID NO: 1243850
gugguauacacaugcaaug

SEQ ID NO: 1446067 - RNA, 19 nt, Artificial Sequence
  Description of Artificial Sequence: Synthetic oligonucleotide
  Antisense strand to SEQ ID NO: 1446066
cauugcauguguauaccac

SEQ ID NO: 1446068 - RNA, 19 nt, Artificial Sequence
  Description of Artificial Sequence: Synthetic oligonucleotide
  Sense strand starting at position 1219 of SEQ ID NO: 1243850
gcaaaucuuuggccagaca

SEQ ID NO: 1446069 - RNA, 19 nt, Artificial Sequence
  Description of Artificial Sequence: Synthetic oligonucleotide
  Antisense strand to SEQ ID NO: 1446068
ugucuggccaaagauuugc

SEQ ID NO: 1446070 - RNA, 19 nt, Artificial Sequence
  Description of Artificial Sequence: Synthetic oligonucleotide
  Sense strand starting at position 1336 of SEQ ID NO: 1243850
ccagaaaguucugccagau

SEQ ID NO: 1446071 - RNA, 19 nt, Artificial Sequence
  Description of Artificial Sequence: Synthetic oligonucleotide
  Antisense strand to SEQ ID NO: 1446070
aucuggcagaacuuucugg

SEQ ID NO: 1446072 - RNA, 19 nt, Artificial Sequence
  Description of Artificial Sequence: Synthetic oligonucleotide
  Sense strand starting at position 1522 of SEQ ID NO: 1243850
ucagcucagcaaugagauu

SEQ ID NO: 1446073 - RNA, 19 nt, Artificial Sequence
  Description of Artificial Sequence: Synthetic oligonucleotide
  Antisense strand to SEQ ID NO: 1446072
aaucucauugcugagcuga

SEQ ID NO: 1446074 - RNA, 19 nt, Artificial Sequence
  Description of Artificial Sequence: Synthetic oligonucleotide
  Sense strand starting at position 1551 of SEQ ID NO: 1243850
gcaagaucccuaugucagg

SEQ ID NO: 1446075 - RNA, 19 nt, Artificial Sequence
  Description of Artificial Sequence: Synthetic oligonucleotide
  Antisense strand to SEQ ID NO: 1446074
ccugacauagggaucuugc

SEQ ID NO: 1446076 - RNA, 19 nt, Artificial Sequence
  Description of Artificial Sequence: Synthetic oligonucleotide
  Sense strand starting at position 1572 of SEQ ID NO: 1243850
gacagagguugucuuguuc

SEQ ID NO: 1446077 - RNA, 19 nt, Artificial Sequence
  Description of Artificial Sequence: Synthetic oligonucleotide
  Antisense strand to SEQ ID NO: 1446076
gaacaagacaaccucuguc

SEQ ID NO: 1446078 - RNA, 19 nt, Artificial Sequence
  Description of Artificial Sequence: Synthetic oligonucleotide
  Sense strand starting at position 1722 of SEQ ID NO: 1243850
gcagauggauggucuaaac

SEQ ID NO: 1446079 - RNA, 19 nt, Artificial Sequence
  Description of Artificial Sequence: Synthetic oligonucleotide
  Antisense strand to SEQ ID NO: 1446078
guuuagaccauccaucugc

SEQ ID NO: 1446080 - RNA, 19 nt, Artificial Sequence
  Description of Artificial Sequence: Synthetic oligonucleotide
  Sense strand starting at position 1866 of SEQ ID NO: 1243850
cccugauagaaaggugacu

SEQ ID NO: 1446081 - RNA, 19 nt, Artificial Sequence
  Description of Artificial Sequence: Synthetic oligonucleotide
  Antisense strand to SEQ ID NO: 1446080
agucaccuuucuaucaggg

SEQ ID NO: 1446082 - RNA, 19 nt, Artificial Sequence
  Description of Artificial Sequence: Synthetic oligonucleotide
  Sense strand starting at position 1895 of SEQ ID NO: 1243850
ggguuagagugucugagau

SEQ ID NO: 1446083 - RNA, 19 nt, Artificial Sequence
  Description of Artificial Sequence: Synthetic oligonucleotide
  Antisense strand to SEQ ID NO: 1446082
aucucagacacucuaaccc

SEQ ID NO: 1446084 - RNA, 19 nt, Artificial Sequence
  Description of Artificial Sequence: Synthetic oligonucleotide
  Sense strand starting at position 1976 of SEQ ID NO: 1243850
ggcucaguuccugauguca

SEQ ID NO: 1446085 - RNA, 19 nt, Artificial Sequence
  Description of Artificial Sequence: Synthetic oligonucleotide
  Antisense strand to SEQ ID NO: 1446084
ugacaucaggaacugagcc

SEQ ID NO: 1446086 - RNA, 19 nt, Artificial Sequence
  Description of Artificial Sequence: Synthetic oligonucleotide
  Sense strand starting at position 1999 of SEQ ID NO: 1243850
augugaugccagggcuaaa

SEQ ID NO: 1446087 - RNA, 19 nt, Artificial Sequence
  Description of Artificial Sequence: Synthetic oligonucleotide
  Antisense strand to SEQ ID NO: 1446086
uuuagcccuggcaucacau

SEQ ID NO: 1446088 - RNA, 19 nt, Artificial Sequence
  Description of Artificial Sequence: Synthetic oligonucleotide
  Sense strand starting at position 2023 of SEQ ID NO: 1243850
agcacaccuucuuugugau

SEQ ID NO: 1446089 - RNA, 19 nt, Artificial Sequence
  Description of Artificial Sequence: Synthetic oligonucleotide
  Antisense strand to SEQ ID NO: 1446088
aucacaaagaaggugugcu

SEQ ID NO: 1446090 - RNA, 19 nt, Artificial Sequence
  Description of Artificial Sequence: Synthetic oligonucleotide
  Sense strand starting at position 2148 of SEQ ID NO: 1243850
gcuuacaaagugcauaaua

SEQ ID NO: 1446091 - RNA, 19 nt, Artificial Sequence
  Description of Artificial Sequence: Synthetic oligonucleotide
  Antisense strand to SEQ ID NO: 1446090
uauuaugcacuuuguaagc

SEQ ID NO: 1446092 - RNA, 19 nt, Artificial Sequence
  Description of Artificial Sequence: Synthetic oligonucleotide
  Sense strand starting at position 2166 of SEQ ID NO: 1243850
agagaacauuucgaaauac

SEQ ID NO: 1446093 - RNA, 19 nt, Artificial Sequence
  Description of Artificial Sequence: Synthetic oligonucleotide
  Antisense strand to SEQ ID NO: 1446092
guauuucgaaauguucucu

SEQ ID NO: 1446094 - RNA, 19 nt, Artificial Sequence
  Description of Artificial Sequence: Synthetic oligonucleotide
  Sense strand starting at position 3036 of SEQ ID NO: 1243850
uuuaaagccuaagucagau

SEQ ID NO: 1446095 - RNA, 19 nt, Artificial Sequence
  Description of Artificial Sequence: Synthetic oligonucleotide
  Antisense strand to SEQ ID NO: 1446094
aucugacuuaggcuuuaaa

SEQ ID NO: 1446096 - RNA, 19 nt, Artificial Sequence
  Description of Artificial Sequence: Synthetic oligonucleotide
  Sense strand starting at position 3085 of SEQ ID NO: 1243850
cucucucauuacucagagu

SEQ ID NO: 1446097 - RNA, 19 nt, Artificial Sequence
  Description of Artificial Sequence: Synthetic oligonucleotide
  Antisense strand to SEQ ID NO: 1446096
acucugaguaaugagagag

SEQ ID NO: 1446098 - RNA, 19 nt, Artificial Sequence
  Description of Artificial Sequence: Synthetic oligonucleotide
  Sense strand starting at position 3106 of SEQ ID NO: 1243850
aagucaaagucauuggaac

SEQ ID NO: 1446099 - RNA, 19 nt, Artificial Sequence
  Description of Artificial Sequence: Synthetic oligonucleotide
  Antisense strand to SEQ ID NO: 1446098
guuccaaugacuuugacuu

SEQ ID NO: 1446100 - RNA, 19 nt, Artificial Sequence
  Description of Artificial Sequence: Synthetic oligonucleotide
  Sense strand starting at position 3107 of SEQ ID NO: 1243850
agucaaagucauuggaaca

SEQ ID NO: 1446101 - RNA, 19 nt, Artificial Sequence
  Description of Artificial Sequence: Synthetic oligonucleotide
  Antisense strand to SEQ ID NO: 1446100
uguuccaaugacuuugacu

SEQ ID NO: 1446102 - RNA, 19 nt, Artificial Sequence
  Description of Artificial Sequence: Synthetic oligonucleotide
  Sense strand starting at position 3108 of SEQ ID NO: 1243850
gucaaagucauuggaacag

SEQ ID NO: 1446103 - RNA, 19 nt, Artificial Sequence
  Description of Artificial Sequence: Synthetic oligonucleotide
  Antisense strand to SEQ ID NO: 1446102
cuguuccaaugacuuugac

SEQ ID NO: 1446104 - RNA, 19 nt, Artificial Sequence
  Description of Artificial Sequence: Synthetic oligonucleotide
  Sense strand starting at position 3153 of SEQ ID NO: 1243850
uuggaaugccucuaauguc

SEQ ID NO: 1446105 - RNA, 19 nt, Artificial Sequence
  Description of Artificial Sequence: Synthetic oligonucleotide
  Antisense strand to SEQ ID NO: 1446104
gacauuagaggcauuccaa

SEQ ID NO: 1446106 - RNA, 19 nt, Artificial Sequence
  Description of Artificial Sequence: Synthetic oligonucleotide
  Sense strand starting at position 3287 of SEQ ID NO: 1243850
gcaauuucuuccuccgaau

SEQ ID NO: 1446107 - RNA, 19 nt, Artificial Sequence
  Description of Artificial Sequence: Synthetic oligonucleotide
  Antisense strand to SEQ ID NO: 1446106
auucggaggaagaaauugc

SEQ ID NO: 1446108 - RNA, 19 nt, Artificial Sequence
  Description of Artificial Sequence: Synthetic oligonucleotide
  Sense strand starting at position 3338 of SEQ ID NO: 1243850
guuugaauguuaccuucuu

SEQ ID NO: 1446109 - RNA, 19 nt, Artificial Sequence
  Description of Artificial Sequence: Synthetic oligonucleotide
  Antisense strand to SEQ ID NO: 1446108
aagaagguaacauucaaac

SEQ ID NO: 1446110 - RNA, 19 nt, Artificial Sequence
  Description of Artificial Sequence: Synthetic oligonucleotide
  Sense strand starting at position 3404 of SEQ ID NO: 1243850
acucgagagucucccugaa

SEQ ID NO: 1446111 - RNA, 19 nt, Artificial Sequence
  Description of Artificial Sequence: Synthetic oligonucleotide
  Antisense strand to SEQ ID NO: 1446110
uucagggagacucucgagu

SEQ ID NO: 1446112 - RNA, 19 nt, Artificial Sequence
  Description of Artificial Sequence: Synthetic oligonucleotide
  Sense strand starting at position 3406 of SEQ ID NO: 1243850
ucgagagucucccugaauc

SEQ ID NO: 1446113 - RNA, 19 nt, Artificial Sequence
  Description of Artificial Sequence: Synthetic oligonucleotide
  Antisense strand to SEQ ID NO: 1446112
gauucagggagacucucga

SEQ ID NO: 1446114 - RNA, 19 nt, Artificial Sequence
  Description of Artificial Sequence: Synthetic oligonucleotide
  Sense strand starting at position 3408 of SEQ ID NO: 1243850
gagagucucccugaaucuu

SEQ ID NO: 1446115 - RNA, 19 nt, Artificial Sequence
  Description of Artificial Sequence: Synthetic oligonucleotide
  Antisense strand to SEQ ID NO: 1446114
aagauucagggagacucuc

SEQ ID NO: 1446116 - RNA, 19 nt, Artificial Sequence
  Description of Artificial Sequence: Synthetic oligonucleotide
  Sense strand starting at position 3632 of SEQ ID NO: 1243850
gggugugugccauuagucu

SEQ ID NO: 1446117 - RNA, 19 nt, Artificial Sequence
  Description of Artificial Sequence: Synthetic oligonucleotide
  Antisense strand to SEQ ID NO: 1446116
agacuaauggcacacaccc

SEQ ID NO: 1446118 - RNA, 19 nt, Artificial Sequence
  Description of Artificial Sequence: Synthetic oligonucleotide
  Sense strand starting at position 3794 of SEQ ID NO: 1243850
gcacaacuuccauggcaau

SEQ ID NO: 1446119 - RNA, 19 nt, Artificial Sequence
  Description of Artificial Sequence: Synthetic oligonucleotide
  Antisense strand to SEQ ID NO: 1446118
auugccauggaaguugugc

SEQ ID NO: 1446120 - RNA, 19 nt, Artificial Sequence
  Description of Artificial Sequence: Synthetic oligonucleotide
  Sense strand starting at position 3853 of SEQ ID NO: 1243850
ucuuccugcugguuaagaa

SEQ ID NO: 1446121 - RNA, 19 nt, Artificial Sequence
  Description of Artificial Sequence: Synthetic oligonucleotide
  Antisense strand to SEQ ID NO: 1446120
uucuuaaccagcaggaaga

SEQ ID NO: 1446122 - RNA, 19 nt, Artificial Sequence
  Description of Artificial Sequence: Synthetic oligonucleotide
  Sense strand starting at position 3854 of SEQ ID NO: 1243850
cuuccugcugguuaagaaa

SEQ ID NO: 1446123 - RNA, 19 nt, Artificial Sequence
  Description of Artificial Sequence: Synthetic oligonucleotide
  Antisense strand to SEQ ID NO: 1446122
uuucuuaaccagcaggaag

SEQ ID NO: 1446124 - RNA, 19 nt, Artificial Sequence
  Description of Artificial Sequence: Synthetic oligonucleotide
  Sense strand starting at position 3915 of SEQ ID NO: 1243850
caguauguugaggaugacu

SEQ ID NO: 1446125 - RNA, 19 nt, Artificial Sequence
  Description of Artificial Sequence: Synthetic oligonucleotide
  Antisense strand to SEQ ID NO: 1446124
agucauccucaacauacug

SEQ ID NO: 1446126 - RNA, 19 nt, Artificial Sequence
  Description of Artificial Sequence: Synthetic oligonucleotide
  Sense strand starting at position 3917 of SEQ ID NO: 1243850
guauguugaggaugacuga

SEQ ID NO: 1446127 - RNA, 19 nt, Artificial Sequence
  Description of Artificial Sequence: Synthetic oligonucleotide
  Antisense strand to SEQ ID NO: 1446126
ucagucauccucaacauac

SEQ ID NO: 1446128 - RNA, 19 nt, Artificial Sequence
  Description of Artificial Sequence: Synthetic oligonucleotide
  Sense strand starting at position 3933 of SEQ ID NO: 1243850
ugaggaaucucacuaguca

SEQ ID NO: 1446129 - RNA, 19 nt, Artificial Sequence
  Description of Artificial Sequence: Synthetic oligonucleotide
  Antisense strand to SEQ ID NO: 1446128
ugacuagugagauuccuca

SEQ ID NO: 1446130 - RNA, 19 nt, Artificial Sequence
  Description of Artificial Sequence: Synthetic oligonucleotide
  Sense strand starting at position 3979 of SEQ ID NO: 1243850
agagaaccauuugauccua

SEQ ID NO: 1446131 - RNA, 19 nt, Artificial Sequence
  Description of Artificial Sequence: Synthetic oligonucleotide
  Antisense strand to SEQ ID NO: 1446130
uaggaucaaaugguucucu

SEQ ID NO: 1446132 - RNA, 19 nt, Artificial Sequence
  Description of Artificial Sequence: Synthetic oligonucleotide
  Sense strand starting at position 338 of SEQ ID NO: 1243851
uuggcuuaggcuuagagua

SEQ ID NO: 1446133 - RNA, 19 nt, Artificial Sequence
  Description of Artificial Sequence: Synthetic oligonucleotide
  Antisense strand to SEQ ID NO: 1446132
uacucuaagccuaagccaa

SEQ ID NO: 1446134 - RNA, 19 nt, Artificial Sequence
  Description of Artificial Sequence: Synthetic oligonucleotide
  Sense strand starting at position 343 of SEQ ID NO: 1243851
uuaggcuuagaguaauuau

SEQ ID NO: 1446135 - RNA, 19 nt, Artificial Sequence
  Description of Artificial Sequence: Synthetic oligonucleotide
  Antisense strand to SEQ ID NO: 1446134
auaauuacucuaagccuaa

SEQ ID NO: 1446136 - RNA, 19 nt, Artificial Sequence
  Description of Artificial Sequence: Synthetic oligonucleotide
  Sense strand starting at position 346 of SEQ ID NO: 1243851
ggcuuagaguaauuauagu

SEQ ID NO: 1446137 - RNA, 19 nt, Artificial Sequence
  Description of Artificial Sequence: Synthetic oligonucleotide
  Antisense strand to SEQ ID NO: 1446136
acuauaauuacucuaagcc

SEQ ID NO: 1446138 - RNA, 19 nt, Artificial Sequence
  Description of Artificial Sequence: Synthetic oligonucleotide
  Sense strand starting at position 513 of SEQ ID NO: 1243851
aaguaaauugggugacucu

SEQ ID NO: 1446139 - RNA, 19 nt, Artificial Sequence
  Description of Artificial Sequence: Synthetic oligonucleotide
  Antisense strand to SEQ ID NO: 1446138
agagucacccaauuuacuu

SEQ ID NO: 1446140 - RNA, 19 nt, Artificial Sequence
  Description of Artificial Sequence: Synthetic oligonucleotide
  Sense strand starting at position 514 of SEQ ID NO: 1243851
aguaaauugggugacucuu

SEQ ID NO: 1446141 - RNA, 19 nt, Artificial Sequence
  Description of Artificial Sequence: Synthetic oligonucleotide
  Antisense strand to SEQ ID NO: 1446140
aagagucacccaauuuacu

SEQ ID NO: 1446142 - RNA, 19 nt, Artificial Sequence
  Description of Artificial Sequence: Synthetic oligonucleotide
  Sense strand starting at position 522 of SEQ ID NO: 1243851
gggugacucuugcuuauag

SEQ ID NO: 1446143 - RNA, 19 nt, Artificial Sequence
  Description of Artificial Sequence: Synthetic oligonucleotide
  Antisense strand to SEQ ID NO: 1446142
cuauaagcaagagucaccc

SEQ ID NO: 1446144 - RNA, 19 nt, Artificial Sequence
  Description of Artificial Sequence: Synthetic oligonucleotide
  Sense strand starting at position 753 of SEQ ID NO: 1243851
acaaacguucuuggaaguu

SEQ ID NO: 1446145 - RNA, 19 nt, Artificial Sequence
  Description of Artificial Sequence: Synthetic oligonucleotide
  Antisense strand to SEQ ID NO: 1446144
aacuuccaagaacguuugu

SEQ ID NO: 1446146 - RNA, 19 nt, Artificial Sequence
  Description of Artificial Sequence: Synthetic oligonucleotide
  Sense strand starting at position 811 of SEQ ID NO: 1243851
uauauugugggucauuaaa

SEQ ID NO: 1446147 - RNA, 19 nt, Artificial Sequence
  Description of Artificial Sequence: Synthetic oligonucleotide
  Antisense strand to SEQ ID NO: 1446146
uuuaaugacccacaauaua

SEQ ID NO: 1446148 - RNA, 19 nt, Artificial Sequence
  Description of Artificial Sequence: Synthetic oligonucleotide
  Sense strand starting at position 834 of SEQ ID NO: 1243851
acuggaaacgucgacaaau

SEQ ID NO: 1446149 - RNA, 19 nt, Artificial Sequence
  Description of Artificial Sequence: Synthetic oligonucleotide
  Antisense strand to SEQ ID NO: 1446148
auuugucgacguuuccagu

SEQ ID NO: 1446150 - RNA, 19 nt, Artificial Sequence
  Description of Artificial Sequence: Synthetic oligonucleotide
  Sense strand starting at position 836 of SEQ ID NO: 1243851
uggaaacgucgacaaauua

SEQ ID NO: 1446151 - RNA, 19 nt, Artificial Sequence
  Description of Artificial Sequence: Synthetic oligonucleotide
  Antisense strand to SEQ ID NO: 1446150
uaauuugucgacguuucca

SEQ ID NO: 1446152 - RNA, 19 nt, Artificial Sequence
  Description of Artificial Sequence: Synthetic oligonucleotide
  Sense strand starting at position 859 of SEQ ID NO: 1243851
ggauuagaggugcacguuu

SEQ ID NO: 1446153 - RNA, 19 nt, Artificial Sequence
  Description of Artificial Sequence: Synthetic oligonucleotide
  Antisense strand to SEQ ID NO: 1446152
aaacgugcaccucuaaucc

SEQ ID NO: 1446154 - RNA, 19 nt, Artificial Sequence
  Description of Artificial Sequence: Synthetic oligonucleotide
  Sense strand starting at position 909 of SEQ ID NO: 1243851
agagccuucccugacucua

SEQ ID NO: 1446155 - RNA, 19 nt, Artificial Sequence
  Description of Artificial Sequence: Synthetic oligonucleotide
  Antisense strand to SEQ ID NO: 1446154
uagagucagggaaggcucu

SEQ ID NO: 1446156 - RNA, 19 nt, Artificial Sequence
  Description of Artificial Sequence: Synthetic oligonucleotide
  Sense strand starting at position 937 of SEQ ID NO: 1243851
cagugugugcuuuagaaac

SEQ ID NO: 1446157 - RNA, 19 nt, Artificial Sequence
  Description of Artificial Sequence: Synthetic oligonucleotide
  Antisense strand to SEQ ID NO: 1446156
guuucuaaagcacacacug

SEQ ID NO: 1446158 - RNA, 19 nt, Artificial Sequence
  Description of Artificial Sequence: Synthetic oligonucleotide
  Sense strand starting at position 995 of SEQ ID NO: 1243851
gcaccauuuccauggucau

SEQ ID NO: 1446159 - RNA, 19 nt, Artificial Sequence
  Description of Artificial Sequence: Synthetic oligonucleotide
  Antisense strand to SEQ ID NO: 1446158
augaccauggaaauggugc

SEQ ID NO: 1446160 - RNA, 19 nt, Artificial Sequence
  Description of Artificial Sequence: Synthetic oligonucleotide
  Sense strand starting at position 1030 of SEQ ID NO: 1243851
gaagcugaggcuuaaguga

SEQ ID NO: 1446161 - RNA, 19 nt, Artificial Sequence
  Description of Artificial Sequence: Synthetic oligonucleotide
  Antisense strand to SEQ ID NO: 1446160
ucacuuaagccucagcuuc

SEQ ID NO: 1446162 - RNA, 19 nt, Artificial Sequence
  Description of Artificial Sequence: Synthetic oligonucleotide
  Sense strand starting at position 1048 of SEQ ID NO: 1243851
aggugaagucacugaccua

SEQ ID NO: 1446163 - RNA, 19 nt, Artificial Sequence
  Description of Artificial Sequence: Synthetic oligonucleotide
  Antisense strand to SEQ ID NO: 1446162
uaggucagugacuucaccu

SEQ ID NO: 1446164 - RNA, 19 nt, Artificial Sequence
  Description of Artificial Sequence: Synthetic oligonucleotide
  Sense strand starting at position 1093 of SEQ ID NO: 1243851
gccugaacacugcacaaau

SEQ ID NO: 1446165 - RNA, 19 nt, Artificial Sequence
  Description of Artificial Sequence: Synthetic oligonucleotide
  Antisense strand to SEQ ID NO: 1446164
auuugugcaguguucaggc

SEQ ID NO: 1446166 - RNA, 19 nt, Artificial Sequence
  Description of Artificial Sequence: Synthetic oligonucleotide
  Sense strand starting at position 1274 of SEQ ID NO: 1243851
cguucucuugaacacuuaa

SEQ ID NO: 1446167 - RNA, 19 nt, Artificial Sequence
  Description of Artificial Sequence: Synthetic oligonucleotide
  Antisense strand to SEQ ID NO: 1446166
uuaaguguucaagagaacg

SEQ ID NO: 1446168 - RNA, 19 nt, Artificial Sequence
  Description of Artificial Sequence: Synthetic oligonucleotide
  Sense strand starting at position 1414 of SEQ ID NO: 1243851
ccagcugauuguucugaga

SEQ ID NO: 1446169 - RNA, 19 nt, Artificial Sequence
  Description of Artificial Sequence: Synthetic oligonucleotide
  Antisense strand to SEQ ID NO: 1446168
ucucagaacaaucagcugg

SEQ ID NO: 1446170 - RNA, 19 nt, Artificial Sequence
  Description of Artificial Sequence: Synthetic oligonucleotide
  Sense strand starting at position 1524 of SEQ ID NO: 1243851
cuaccuuguccaggacaca

SEQ ID NO: 1446171 - RNA, 19 nt, Artificial Sequence
  Description of Artificial Sequence: Synthetic oligonucleotide
  Antisense strand to SEQ ID NO: 1446170
uguguccuggacaagguag

SEQ ID NO: 1446172 - RNA, 19 nt, Artificial Sequence
  Description of Artificial Sequence: Synthetic oligonucleotide
  Sense strand starting at position 1586 of SEQ ID NO: 1243851
ccacgucagaccgaucaaa

SEQ ID NO: 1446173 - RNA, 19 nt, Artificial Sequence
  Description of Artificial Sequence: Synthetic oligonucleotide
  Antisense strand to SEQ ID NO: 1446172
uuugaucggucugacgugg

SEQ ID NO: 1446174 - RNA, 19 nt, Artificial Sequence
  Description of Artificial Sequence: Synthetic oligonucleotide
  Sense strand starting at position 1598 of SEQ ID NO: 1243851
gaucaaaccggcugaucaa

SEQ ID NO: 1446175 - RNA, 19 nt, Artificial Sequence
  Description of Artificial Sequence: Synthetic oligonucleotide
  Antisense strand to SEQ ID NO: 1446174
uugaucagccgguuugauc

SEQ ID NO: 1446176 - RNA, 19 nt, Artificial Sequence
  Description of Artificial Sequence: Synthetic oligonucleotide
  Sense strand starting at position 1994 of SEQ ID NO: 1243851
gggacuuucgcgcucgcau

SEQ ID NO: 1446177 - RNA, 19 nt, Artificial Sequence
  Description of Artificial Sequence: Synthetic oligonucleotide
  Antisense strand to SEQ ID NO: 1446176
augcgagcgcgaaaguccc

SEQ ID NO: 1446178 - RNA, 19 nt, Artificial Sequence
  Description of Artificial Sequence: Synthetic oligonucleotide
  Sense strand starting at position 1995 of SEQ ID NO: 1243851
ggacuuucgcgcucgcauu

SEQ ID NO: 1446179 - RNA, 19 nt, Artificial Sequence
  Description of Artificial Sequence: Synthetic oligonucleotide
  Antisense strand to SEQ ID NO: 1446178
aaugcgagcgcgaaagucc

SEQ ID NO: 1446180 - RNA, 19 nt, Artificial Sequence
  Description of Artificial Sequence: Synthetic oligonucleotide
  Sense strand starting at position 2307 of SEQ ID NO: 1243851
gucgcuuaugaucaccuua

SEQ ID NO: 1446181 - RNA, 19 nt, Artificial Sequence
  Description of Artificial Sequence: Synthetic oligonucleotide
  Antisense strand to SEQ ID NO: 1446180
uaaggugaucauaagcgac

SEQ ID NO: 1446182 - RNA, 19 nt, Artificial Sequence
  Description of Artificial Sequence: Synthetic oligonucleotide
  Sense strand starting at position 2366 of SEQ ID NO: 1243851
gcuggaggauguucacaaa

SEQ ID NO: 1446183 - RNA, 19 nt, Artificial Sequence
  Description of Artificial Sequence: Synthetic oligonucleotide
  Antisense strand to SEQ ID NO: 1446182
uuugugaacauccuccagc

SEQ ID NO: 1446184 - RNA, 19 nt, Artificial Sequence
  Description of Artificial Sequence: Synthetic oligonucleotide
  Sense strand starting at position 2394 of SEQ ID NO: 1243851
ccguuauguggacagacau

SEQ ID NO: 1446185 - RNA, 19 nt, Artificial Sequence
  Description of Artificial Sequence: Synthetic oligonucleotide
  Antisense strand to SEQ ID NO: 1446184
augucuguccacauaacgg

SEQ ID NO: 1446186 - RNA, 19 nt, Artificial Sequence
  Description of Artificial Sequence: Synthetic oligonucleotide
  Sense strand starting at position 2413 of SEQ ID NO: 1243851
cagaguugaaugggucuca

SEQ ID NO: 1446187 - RNA, 19 nt, Artificial Sequence
  Description of Artificial Sequence: Synthetic oligonucleotide
  Antisense strand to SEQ ID NO: 1446186
ugagacccauucaacucug

SEQ ID NO: 1446188 - RNA, 19 nt, Artificial Sequence
  Description of Artificial Sequence: Synthetic oligonucleotide
  Sense strand starting at position 2414 of SEQ ID NO: 1243851
agaguugaaugggucucaa

SEQ ID NO: 1446189 - RNA, 19 nt, Artificial Sequence
  Description of Artificial Sequence: Synthetic oligonucleotide
  Antisense strand to SEQ ID NO: 1446188
uugagacccauucaacucu

SEQ ID NO: 1446190 - RNA, 19 nt, Artificial Sequence
  Description of Artificial Sequence: Synthetic oligonucleotide
  Sense strand starting at position 2624 of SEQ ID NO: 1243851
acauguuuauaacuaggga

SEQ ID NO: 1446191 - RNA, 19 nt, Artificial Sequence
  Description of Artificial Sequence: Synthetic oligonucleotide
  Antisense strand to SEQ ID NO: 1446190
ucccuaguuauaaacaugu

SEQ ID NO: 1446192 - RNA, 19 nt, Artificial Sequence
  Description of Artificial Sequence: Synthetic oligonucleotide
  Sense strand starting at position 2627 of SEQ ID NO: 1243851
uguuuauaacuagggaaug

SEQ ID NO: 1446193 - RNA, 19 nt, Artificial Sequence
  Description of Artificial Sequence: Synthetic oligonucleotide
  Antisense strand to SEQ ID NO: 1446192
cauucccuaguuauaaaca

SEQ ID NO: 1446194 - RNA, 19 nt, Artificial Sequence
  Description of Artificial Sequence: Synthetic oligonucleotide
  Sense strand starting at position 2654 of SEQ ID NO: 1243851
uccagauaauuaguacuga

SEQ ID NO: 1446195 - RNA, 19 nt, Artificial Sequence
  Description of Artificial Sequence: Synthetic oligonucleotide
  Antisense strand to SEQ ID NO: 1446194
ucaguacuaauuaucugga

SEQ ID NO: 1446196 - RNA, 19 nt, Artificial Sequence
  Description of Artificial Sequence: Synthetic oligonucleotide
  Sense strand starting at position 2711 of SEQ ID NO: 1243851
uuuaaccagucaguuaaua

SEQ ID NO: 1446197 - RNA, 19 nt, Artificial Sequence
  Description of Artificial Sequence: Synthetic oligonucleotide
  Antisense strand to SEQ ID NO: 1446196
uauuaacugacugguuaaa

SEQ ID NO: 1446198 - RNA, 19 nt, Artificial Sequence
  Description of Artificial Sequence: Synthetic oligonucleotide
  Sense strand starting at position 3114 of SEQ ID NO: 1243851
gaauaagucuaagcgaucu

SEQ ID NO: 1446199 - RNA, 19 nt, Artificial Sequence
  Description of Artificial Sequence: Synthetic oligonucleotide
  Antisense strand to SEQ ID NO: 1446198
agaucgcuuagacuuauuc

SEQ ID NO: 1446200 - RNA, 19 nt, Artificial Sequence
  Description of Artificial Sequence: Synthetic oligonucleotide
  Sense strand starting at position 3139 of SEQ ID NO: 1243851
caacguggugaccauagua

SEQ ID NO: 1446201 - RNA, 19 nt, Artificial Sequence
  Description of Artificial Sequence: Synthetic oligonucleotide
  Antisense strand to SEQ ID NO: 1446200
uacuauggucaccacguug

SEQ ID NO: 1446202 - RNA, 19 nt, Artificial Sequence
  Description of Artificial Sequence: Synthetic oligonucleotide
  Sense strand starting at position 3353 of SEQ ID NO: 1243851
gacaaauggugucuaaaua

SEQ ID NO: 1446203 - RNA, 19 nt, Artificial Sequence
  Description of Artificial Sequence: Synthetic oligonucleotide
  Antisense strand to SEQ ID NO: 1446202
uauuuagacaccauuuguc

SEQ ID NO: 1446204 - RNA, 19 nt, Artificial Sequence
  Description of Artificial Sequence: Synthetic oligonucleotide
  Sense strand starting at position 3433 of SEQ ID NO: 1243851
agcucaagcucaucucaga

SEQ ID NO: 1446205 - RNA, 19 nt, Artificial Sequence
  Description of Artificial Sequence: Synthetic oligonucleotide
  Antisense strand to SEQ ID NO: 1446204
ucugagaugagcuugagcu

SEQ ID NO: 1446206 - RNA, 19 nt, Artificial Sequence
  Description of Artificial Sequence: Synthetic oligonucleotide
  Sense strand starting at position 3557 of SEQ ID NO: 1243851
agaacaagcugauugucau

SEQ ID NO: 1446207 - RNA, 19 nt, Artificial Sequence
  Description of Artificial Sequence: Synthetic oligonucleotide
  Antisense strand to SEQ ID NO: 1446206
augacaaucagcuuguucu

SEQ ID NO: 1446208 - RNA, 19 nt, Artificial Sequence
  Description of Artificial Sequence: Synthetic oligonucleotide
  Sense strand starting at position 3558 of SEQ ID NO: 1243851
gaacaagcugauugucauu

SEQ ID NO: 1446209 - RNA, 19 nt, Artificial Sequence
  Description of Artificial Sequence: Synthetic oligonucleotide
  Antisense strand to SEQ ID NO: 1446208
aaugacaaucagcuuguuc

SEQ ID NO: 1446210 - RNA, 19 nt, Artificial Sequence
  Description of Artificial Sequence: Synthetic oligonucleotide
  Sense strand starting at position 3752 of SEQ ID NO: 1243851
acaugucauguuuagacga

SEQ ID NO: 1446211 - RNA, 19 nt, Artificial Sequence
  Description of Artificial Sequence: Synthetic oligonucleotide
  Antisense strand to SEQ ID NO: 1446210
ucgucuaaacaugacaugu

SEQ ID NO: 1446212 - RNA, 19 nt, Artificial Sequence
  Description of Artificial Sequence: Synthetic oligonucleotide
  Sense strand starting at position 260 of SEQ ID NO: 1243852
agacaagccuggccaauua

SEQ ID NO: 1446213 - RNA, 19 nt, Artificial Sequence
  Description of Artificial Sequence: Synthetic oligonucleotide
  Antisense strand to SEQ ID NO: 1446212
uaauuggccaggcuugucu

SEQ ID NO: 1446214 - RNA, 19 nt, Artificial Sequence
  Description of Artificial Sequence: Synthetic oligonucleotide
  Sense strand starting at position 600 of SEQ ID NO: 1243852
uuggcuuaggcuuagagua

SEQ ID NO: 1446215 - RNA, 19 nt, Artificial Sequence
  Description of Artificial Sequence: Synthetic oligonucleotide
  Antisense strand to SEQ ID NO: 1446214
uacucuaagccuaagccaa

SEQ ID NO: 1446216 - RNA, 19 nt, Artificial Sequence
  Description of Artificial Sequence: Synthetic oligonucleotide
  Sense strand starting at position 605 of SEQ ID NO: 1243852
uuaggcuuagaguaauuau

SEQ ID NO: 1446217 - RNA, 19 nt, Artificial Sequence
  Description of Artificial Sequence: Synthetic oligonucleotide
  Antisense strand to SEQ ID NO: 1446216
auaauuacucuaagccuaa

SEQ ID NO: 1446218 - RNA, 19 nt, Artificial Sequence
  Description of Artificial Sequence: Synthetic oligonucleotide
  Sense strand starting at position 608 of SEQ ID NO: 1243852
ggcuuagaguaauuauagu

SEQ ID NO: 1446219 - RNA, 19 nt, Artificial Sequence
  Description of Artificial Sequence: Synthetic oligonucleotide
  Antisense strand to SEQ ID NO: 1446218
acuauaauuacucuaagcc

SEQ ID NO: 1446220 - RNA, 19 nt, Artificial Sequence
  Description of Artificial Sequence: Synthetic oligonucleotide
  Sense strand starting at position 775 of SEQ ID NO: 1243852
aaguaaauugggugacucu

SEQ ID NO: 1446221 - RNA, 19 nt, Artificial Sequence
  Description of Artificial Sequence: Synthetic oligonucleotide
  Antisense strand to SEQ ID NO: 1446220
agagucacccaauuuacuu

SEQ ID NO: 1446222 - RNA, 19 nt, Artificial Sequence
  Description of Artificial Sequence: Synthetic oligonucleotide
  Sense strand starting at position 776 of SEQ ID NO: 1243852
aguaaauugggugacucuu

SEQ ID NO: 1446223 - RNA, 19 nt, Artificial Sequence
  Description of Artificial Sequence: Synthetic oligonucleotide
  Antisense strand to SEQ ID NO: 1446222
aagagucacccaauuuacu

SEQ ID NO: 1446224 - RNA, 19 nt, Artificial Sequence
  Description of Artificial Sequence: Synthetic oligonucleotide
  Sense strand starting at position 784 of SEQ ID NO: 1243852
gggugacucuugcuuauag

SEQ ID NO: 1446225 - RNA, 19 nt, Artificial Sequence
  Description of Artificial Sequence: Synthetic oligonucleotide
  Antisense strand to SEQ ID NO: 1446224
cuauaagcaagagucaccc

SEQ ID NO: 1446226 - RNA, 19 nt, Artificial Sequence
  Description of Artificial Sequence: Synthetic oligonucleotide
  Sense strand starting at position 1015 of SEQ ID NO: 1243852
acaaacguucuuggaaguu

SEQ ID NO: 1446227 - RNA, 19 nt, Artificial Sequence
  Description of Artificial Sequence: Synthetic oligonucleotide
  Antisense strand to SEQ ID NO: 1446226
aacuuccaagaacguuugu

SEQ ID NO: 1446228 - RNA, 19 nt, Artificial Sequence
  Description of Artificial Sequence: Synthetic oligonucleotide
  Sense strand starting at position 1073 of SEQ ID NO: 1243852
uauauugugggucauuaaa

SEQ ID NO: 1446229 - RNA, 19 nt, Artificial Sequence
  Description of Artificial Sequence: Synthetic oligonucleotide
  Antisense strand to SEQ ID NO: 1446228
uuuaaugacccacaauaua

SEQ ID NO: 1446230 - RNA, 19 nt, Artificial Sequence
  Description of Artificial Sequence: Synthetic oligonucleotide
  Sense strand starting at position 1096 of SEQ ID NO: 1243852
acuggaaacgucgacaaau

SEQ ID NO: 1446231 - RNA, 19 nt, Artificial Sequence
  Description of Artificial Sequence: Synthetic oligonucleotide
  Antisense strand to SEQ ID NO: 1446230
auuugucgacguuuccagu

SEQ ID NO: 1446232 - RNA, 19 nt, Artificial Sequence
  Description of Artificial Sequence: Synthetic oligonucleotide
  Sense strand starting at position 1098 of SEQ ID NO: 1243852
uggaaacgucgacaaauua

SEQ ID NO: 1446233 - RNA, 19 nt, Artificial Sequence
  Description of Artificial Sequence: Synthetic oligonucleotide
  Antisense strand to SEQ ID NO: 1446232
uaauuugucgacguuucca

SEQ ID NO: 1446234 - RNA, 19 nt, Artificial Sequence
  Description of Artificial Sequence: Synthetic oligonucleotide
  Sense strand starting at position 1121 of SEQ ID NO: 1243852
ggauuagaggugcacguuu

SEQ ID NO: 1446235 - RNA, 19 nt, Artificial Sequence
  Description of Artificial Sequence: Synthetic oligonucleotide
  Antisense strand to SEQ ID NO: 1446234
aaacgugcaccucuaaucc

SEQ ID NO: 1446236 - RNA, 19 nt, Artificial Sequence
  Description of Artificial Sequence: Synthetic oligonucleotide
  Sense strand starting at position 1171 of SEQ ID NO: 1243852
agagccuucccugacucua

SEQ ID NO: 1446237 - RNA, 19 nt, Artificial Sequence
  Description of Artificial Sequence: Synthetic oligonucleotide
  Antisense strand to SEQ ID NO: 1446236
uagagucagggaaggcucu

SEQ ID NO: 1446238 - RNA, 19 nt, Artificial Sequence
  Description of Artificial Sequence: Synthetic oligonucleotide
  Sense strand starting at position 1199 of SEQ ID NO: 1243852
cagugugugcuuuagaaac

SEQ ID NO: 1446239 - RNA, 19 nt, Artificial Sequence
  Description of Artificial Sequence: Synthetic oligonucleotide
  Antisense strand to SEQ ID NO: 1446238
guuucuaaagcacacacug

SEQ ID NO: 1446240 - RNA, 19 nt, Artificial Sequence
  Description of Artificial Sequence: Synthetic oligonucleotide
  Sense strand starting at position 1257 of SEQ ID NO: 1243852
gcaccauuuccauggucau

SEQ ID NO: 1446241 - RNA, 19 nt, Artificial Sequence
  Description of Artificial Sequence: Synthetic oligonucleotide
  Antisense strand to SEQ ID NO: 1446240
augaccauggaaauggugc

SEQ ID NO: 1446242 - RNA, 19 nt, Artificial Sequence
  Description of Artificial Sequence: Synthetic oligonucleotide
  Sense strand starting at position 1292 of SEQ ID NO: 1243852
gaagcugaggcuuaaguga

SEQ ID NO: 1446243 - RNA, 19 nt, Artificial Sequence
  Description of Artificial Sequence: Synthetic oligonucleotide
  Antisense strand to SEQ ID NO: 1446242
ucacuuaagccucagcuuc

SEQ ID NO: 1446244 - RNA, 19 nt, Artificial Sequence
  Description of Artificial Sequence: Synthetic oligonucleotide
  Sense strand starting at position 1310 of SEQ ID NO: 1243852
aggugaagucacugaccua

SEQ ID NO: 1446245 - RNA, 19 nt, Artificial Sequence
  Description of Artificial Sequence: Synthetic oligonucleotide
  Antisense strand to SEQ ID NO: 1446244
uaggucagugacuucaccu

SEQ ID NO: 1446246 - RNA, 19 nt, Artificial Sequence
  Description of Artificial Sequence: Synthetic oligonucleotide
  Sense strand starting at position 1355 of SEQ ID NO: 1243852
gccugaacacugcacaaau

SEQ ID NO: 1446247 - RNA, 19 nt, Artificial Sequence
  Description of Artificial Sequence: Synthetic oligonucleotide
  Antisense strand to SEQ ID NO: 1446246
auuugugcaguguucaggc

SEQ ID NO: 1446248 - RNA, 19 nt, Artificial Sequence
  Description of Artificial Sequence: Synthetic oligonucleotide
  Sense strand starting at position 1536 of SEQ ID NO: 1243852
cguucucuugaacacuuaa

SEQ ID NO: 1446249 - RNA, 19 nt, Artificial Sequence
  Description of Artificial Sequence: Synthetic oligonucleotide
  Antisense strand to SEQ ID NO: 1446248
uuaaguguucaagagaacg

SEQ ID NO: 1446250 - RNA, 19 nt, Artificial Sequence
  Description of Artificial Sequence: Synthetic oligonucleotide
  Sense strand starting at position 1676 of SEQ ID NO: 1243852
ccagcugauuguucugaga

SEQ ID NO: 1446251 - RNA, 19 nt, Artificial Sequence
  Description of Artificial Sequence: Synthetic oligonucleotide
  Antisense strand to SEQ ID NO: 1446250
ucucagaacaaucagcugg

SEQ ID NO: 1446252 - RNA, 19 nt, Artificial Sequence
  Description of Artificial Sequence: Synthetic oligonucleotide
  Sense strand starting at position 1786 of SEQ ID NO: 1243852
cuaccuuguccaggacaca

SEQ ID NO: 1446253 - RNA, 19 nt, Artificial Sequence
  Description of Artificial Sequence: Synthetic oligonucleotide
  Antisense strand to SEQ ID NO: 1446252
uguguccuggacaagguag

SEQ ID NO: 1446254 - RNA, 19 nt, Artificial Sequence
  Description of Artificial Sequence: Synthetic oligonucleotide
  Sense strand starting at position 1848 of SEQ ID NO: 1243852
ccacgucagaccgaucaaa

SEQ ID NO: 1446255 - RNA, 19 nt, Artificial Sequence
  Description of Artificial Sequence: Synthetic oligonucleotide
  Antisense strand to SEQ ID NO: 1446254
uuugaucggucugacgugg

SEQ ID NO: 1446256 - RNA, 19 nt, Artificial Sequence
  Description of Artificial Sequence: Synthetic oligonucleotide
  Sense strand starting at position 1860 of SEQ ID NO: 1243852
gaucaaaccggcugaucaa

SEQ ID NO: 1446257 - RNA, 19 nt, Artificial Sequence
  Description of Artificial Sequence: Synthetic oligonucleotide
  Antisense strand to SEQ ID NO: 1446256
uugaucagccgguuugauc

SEQ ID NO: 1446258 - RNA, 19 nt, Artificial Sequence
  Description of Artificial Sequence: Synthetic oligonucleotide
  Sense strand starting at position 2256 of SEQ ID NO: 1243852
gggacuuucgcgcucgcau

SEQ ID NO: 1446259 - RNA, 19 nt, Artificial Sequence
  Description of Artificial Sequence: Synthetic oligonucleotide
  Antisense strand to SEQ ID NO: 1446258
augcgagcgcgaaaguccc

SEQ ID NO: 1446260 - RNA, 19 nt, Artificial Sequence
  Description of Artificial Sequence: Synthetic oligonucleotide
  Sense strand starting at position 2257 of SEQ ID NO: 1243852
ggacuuucgcgcucgcauu

SEQ ID NO: 1446261 - RNA, 19 nt, Artificial Sequence
  Description of Artificial Sequence: Synthetic oligonucleotide
  Antisense strand to SEQ ID NO: 1446260
aaugcgagcgcgaaagucc

SEQ ID NO: 1446262 - RNA, 19 nt, Artificial Sequence
  Description of Artificial Sequence: Synthetic oligonucleotide
  Sense strand starting at position 2569 of SEQ ID NO: 1243852
gucgcuuaugaucaccuua

SEQ ID NO: 1446263 - RNA, 19 nt, Artificial Sequence
  Description of Artificial Sequence: Synthetic oligonucleotide
  Antisense strand to SEQ ID NO: 1446262
uaaggugaucauaagcgac

SEQ ID NO: 1446264 - RNA, 19 nt, Artificial Sequence
  Description of Artificial Sequence: Synthetic oligonucleotide
  Sense strand starting at position 2628 of SEQ ID NO: 1243852
gcuggaggauguucacaaa

SEQ ID NO: 1446265 - RNA, 19 nt, Artificial Sequence
  Description of Artificial Sequence: Synthetic oligonucleotide
  Antisense strand to SEQ ID NO: 1446264
uuugugaacauccuccagc

SEQ ID NO: 1446266 - RNA, 19 nt, Artificial Sequence
  Description of Artificial Sequence: Synthetic oligonucleotide
  Sense strand starting at position 2656 of SEQ ID NO: 1243852
ccguuauguggacagacau

SEQ ID NO: 1446267 - RNA, 19 nt, Artificial Sequence
  Description of Artificial Sequence: Synthetic oligonucleotide
  Antisense strand to SEQ ID NO: 1446266
augucuguccacauaacgg

SEQ ID NO: 1446268 - RNA, 19 nt, Artificial Sequence
  Description of Artificial Sequence: Synthetic oligonucleotide
  Sense strand starting at position 2675 of SEQ ID NO: 1243852
cagaguugaaugggucuca

SEQ ID NO: 1446269 - RNA, 19 nt, Artificial Sequence
  Description of Artificial Sequence: Synthetic oligonucleotide
  Antisense strand to SEQ ID NO: 1446268
ugagacccauucaacucug

SEQ ID NO: 1446270 - RNA, 19 nt, Artificial Sequence
  Description of Artificial Sequence: Synthetic oligonucleotide
  Sense strand starting at position 2676 of SEQ ID NO: 1243852
agaguugaaugggucucaa

SEQ ID NO: 1446271 - RNA, 19 nt, Artificial Sequence
  Description of Artificial Sequence: Synthetic oligonucleotide
  Antisense strand to SEQ ID NO: 1446270
uugagacccauucaacucu

SEQ ID NO: 1446272 - RNA, 19 nt, Artificial Sequence
  Description of Artificial Sequence: Synthetic oligonucleotide
  Sense strand starting at position 2886 of SEQ ID NO: 1243852
acauguuuauaacuaggga

SEQ ID NO: 1446273 - RNA, 19 nt, Artificial Sequence
  Description of Artificial Sequence: Synthetic oligonucleotide
  Antisense strand to SEQ ID NO: 1446272
ucccuaguuauaaacaugu

SEQ ID NO: 1446274 - RNA, 19 nt, Artificial Sequence
  Description of Artificial Sequence: Synthetic oligonucleotide
  Sense strand starting at position 2889 of SEQ ID NO: 1243852
uguuuauaacuagggaaug

SEQ ID NO: 1446275 - RNA, 19 nt, Artificial Sequence
  Description of Artificial Sequence: Synthetic oligonucleotide
  Antisense strand to SEQ ID NO: 1446274
cauucccuaguuauaaaca

SEQ ID NO: 1446276 - RNA, 19 nt, Artificial Sequence
  Description of Artificial Sequence: Synthetic oligonucleotide
  Sense strand starting at position 2916 of SEQ ID NO: 1243852
uccagauaauuaguacuga

SEQ ID NO: 1446277 - RNA, 19 nt, Artificial Sequence
  Description of Artificial Sequence: Synthetic oligonucleotide
  Antisense strand to SEQ ID NO: 1446276
ucaguacuaauuaucugga

SEQ ID NO: 1446278 - RNA, 19 nt, Artificial Sequence
  Description of Artificial Sequence: Synthetic oligonucleotide
  Sense strand starting at position 2973 of SEQ ID NO: 1243852
uuuaaccagucaguuaaua

SEQ ID NO: 1446279 - RNA, 19 nt, Artificial Sequence
  Description of Artificial Sequence: Synthetic oligonucleotide
  Antisense strand to SEQ ID NO: 1446278
uauuaacugacugguuaaa

SEQ ID NO: 1446280 - RNA, 19 nt, Artificial Sequence
  Description of Artificial Sequence: Synthetic oligonucleotide
  Sense strand starting at position 3376 of SEQ ID NO: 1243852
gaauaagucuaagcgaucu

SEQ ID NO: 1446281 - RNA, 19 nt, Artificial Sequence
  Description of Artificial Sequence: Synthetic oligonucleotide
  Antisense strand to SEQ ID NO: 1446280
agaucgcuuagacuuauuc

SEQ ID NO: 1446282 - RNA, 19 nt, Artificial Sequence
  Description of Artificial Sequence: Synthetic oligonucleotide
  Sense strand starting at position 3401 of SEQ ID NO: 1243852
caacguggugaccauagua

SEQ ID NO: 1446283 - RNA, 19 nt, Artificial Sequence
  Description of Artificial Sequence: Synthetic oligonucleotide
  Antisense strand to SEQ ID NO: 1446282
uacuauggucaccacguug

SEQ ID NO: 1446284 - RNA, 19 nt, Artificial Sequence
  Description of Artificial Sequence: Synthetic oligonucleotide
  Sense strand starting at position 3615 of SEQ ID NO: 1243852
gacaaauggugucuaaaua

SEQ ID NO: 1446285 - RNA, 19 nt, Artificial Sequence
  Description of Artificial Sequence: Synthetic oligonucleotide
  Antisense strand to SEQ ID NO: 1446284
uauuuagacaccauuuguc

SEQ ID NO: 1446286 - RNA, 19 nt, Artificial Sequence
  Description of Artificial Sequence: Synthetic oligonucleotide
  Sense strand starting at position 3695 of SEQ ID NO: 1243852
agcucaagcucaucucaga

SEQ ID NO: 1446287 - RNA, 19 nt, Artificial Sequence
  Description of Artificial Sequence: Synthetic oligonucleotide
  Antisense strand to SEQ ID NO: 1446286
ucugagaugagcuugagcu

SEQ ID NO: 1446288 - RNA, 19 nt, Artificial Sequence
  Description of Artificial Sequence: Synthetic oligonucleotide
  Sense strand starting at position 3819 of SEQ ID NO: 1243852
agaacaagcugauugucau

SEQ ID NO: 1446289 - RNA, 19 nt, Artificial Sequence
  Description of Artificial Sequence: Synthetic oligonucleotide
  Antisense strand to SEQ ID NO: 1446288
augacaaucagcuuguucu

SEQ ID NO: 1446290 - RNA, 19 nt, Artificial Sequence
  Description of Artificial Sequence: Synthetic oligonucleotide
  Sense strand starting at position 3820 of SEQ ID NO: 1243852
gaacaagcugauugucauu

SEQ ID NO: 1446291 - RNA, 19 nt, Artificial Sequence
  Description of Artificial Sequence: Synthetic oligonucleotide
  Antisense strand to SEQ ID NO: 1446290
aaugacaaucagcuuguuc

SEQ ID NO: 1446292 - RNA, 19 nt, Artificial Sequence
  Description of Artificial Sequence: Synthetic oligonucleotide
  Sense strand starting at position 222 of SEQ ID NO: 1243853
acaagaugcuggucucaag

SEQ ID NO: 1446293 - RNA, 19 nt, Artificial Sequence
  Description of Artificial Sequence: Synthetic oligonucleotide
  Antisense strand to SEQ ID NO: 1446292
cuugagaccagcaucuugu

SEQ ID NO: 1446294 - RNA, 19 nt, Artificial Sequence
  Description of Artificial Sequence: Synthetic oligonucleotide
  Sense strand starting at position 259 of SEQ ID NO: 1243853
gcaaacacucccuggguaa

SEQ ID NO: 1446295 - RNA, 19 nt, Artificial Sequence
  Description of Artificial Sequence: Synthetic oligonucleotide
  Antisense strand to SEQ ID NO: 1446294
uuacccagggaguguuugc

SEQ ID NO: 1446296 - RNA, 19 nt, Artificial Sequence
  Description of Artificial Sequence: Synthetic oligonucleotide
  Sense strand starting at position 271 of SEQ ID NO: 1243853
uggguaauguguuauucca

SEQ ID NO: 1446297 - RNA, 19 nt, Artificial Sequence
  Description of Artificial Sequence: Synthetic oligonucleotide
  Antisense strand to SEQ ID NO: 1446296
uggaauaacacauuaccca

SEQ ID NO: 1446298 - RNA, 19 nt, Artificial Sequence
  Description of Artificial Sequence: Synthetic oligonucleotide
  Sense strand starting at position 302 of SEQ ID NO: 1243853
gguucugacgaucgaucga

SEQ ID NO: 1446299 - RNA, 19 nt, Artificial Sequence
  Description of Artificial Sequence: Synthetic oligonucleotide
  Antisense strand to SEQ ID NO: 1446298
ucgaucgaucgucagaacc

SEQ ID NO: 1446300 - RNA, 19 nt, Artificial Sequence
  Description of Artificial Sequence: Synthetic oligonucleotide
  Sense strand starting at position 341 of SEQ ID NO: 1243853
uggcuuccuuacuuuggaa

SEQ ID NO: 1446301 - RNA, 19 nt, Artificial Sequence
  Description of Artificial Sequence: Synthetic oligonucleotide
  Antisense strand to SEQ ID NO: 1446300
uuccaaaguaaggaagcca

SEQ ID NO: 1446302 - RNA, 19 nt, Artificial Sequence
  Description of Artificial Sequence: Synthetic oligonucleotide
  Sense strand starting at position 353 of SEQ ID NO: 1243853
uuuggaacuucucagagca

SEQ ID NO: 1446303 - RNA, 19 nt, Artificial Sequence
  Description of Artificial Sequence: Synthetic oligonucleotide
  Antisense strand to SEQ ID NO: 1446302
ugcucugagaaguuccaaa

SEQ ID NO: 1446304 - RNA, 19 nt, Artificial Sequence
  Description of Artificial Sequence: Synthetic oligonucleotide
  Sense strand starting at position 355 of SEQ ID NO: 1243853
uggaacuucucagagcaaa

SEQ ID NO: 1446305 - RNA, 19 nt, Artificial Sequence
  Description of Artificial Sequence: Synthetic oligonucleotide
  Antisense strand to SEQ ID NO: 1446304
uuugcucugagaaguucca

SEQ ID NO: 1446306 - RNA, 19 nt, Artificial Sequence
  Description of Artificial Sequence: Synthetic oligonucleotide
  Sense strand starting at position 403 of SEQ ID NO: 1243853
ggcaccucuuucugaacga

SEQ ID NO: 1446307 - RNA, 19 nt, Artificial Sequence
  Description of Artificial Sequence: Synthetic oligonucleotide
  Antisense strand to SEQ ID NO: 1446306
ucguucagaaagaggugcc

SEQ ID NO: 1446308 - RNA, 19 nt, Artificial Sequence
  Description of Artificial Sequence: Synthetic oligonucleotide
  Sense strand starting at position 407 of SEQ ID NO: 1243853
ccucuuucugaacgagucu

SEQ ID NO: 1446309 - RNA, 19 nt, Artificial Sequence
  Description of Artificial Sequence: Synthetic oligonucleotide
  Antisense strand to SEQ ID NO: 1446308
agacucguucagaaagagg

SEQ ID NO: 1446310 - RNA, 19 nt, Artificial Sequence
  Description of Artificial Sequence: Synthetic oligonucleotide
  Sense strand starting at position 414 of SEQ ID NO: 1243853
cugaacgagucuuucugau

SEQ ID NO: 1446311 - RNA, 19 nt, Artificial Sequence
  Description of Artificial Sequence: Synthetic oligonucleotide
  Antisense strand to SEQ ID NO: 1446310
aucagaaagacucguucag

SEQ ID NO: 1446312 - RNA, 19 nt, Artificial Sequence
  Description of Artificial Sequence: Synthetic oligonucleotide
  Sense strand starting at position 416 of SEQ ID NO: 1243853
gaacgagucuuucugaucu

SEQ ID NO: 1446313 - RNA, 19 nt, Artificial Sequence
  Description of Artificial Sequence: Synthetic oligonucleotide
  Antisense strand to SEQ ID NO: 1446312
agaucagaaagacucguuc

SEQ ID NO: 1446314 - RNA, 19 nt, Artificial Sequence
  Description of Artificial Sequence: Synthetic oligonucleotide
  Sense strand starting at position 418 of SEQ ID NO: 1243853
acgagucuuucugaucuuu

SEQ ID NO: 1446315 - RNA, 19 nt, Artificial Sequence
  Description of Artificial Sequence: Synthetic oligonucleotide
  Antisense strand to SEQ ID NO: 1446314
aaagaucagaaagacucgu

SEQ ID NO: 1446316 - RNA, 19 nt, Artificial Sequence
  Description of Artificial Sequence: Synthetic oligonucleotide
  Sense strand starting at position 658 of SEQ ID NO: 1243853
gccucuaggucucaggaca

SEQ ID NO: 1446317 - RNA, 19 nt, Artificial Sequence
  Description of Artificial Sequence: Synthetic oligonucleotide
  Antisense strand to SEQ ID NO: 1446316
uguccugagaccuagaggc

SEQ ID NO: 1446318 - RNA, 19 nt, Artificial Sequence
  Description of Artificial Sequence: Synthetic oligonucleotide
  Sense strand starting at position 759 of SEQ ID NO: 1243853
gcacacaguugguuuauga

SEQ ID NO: 1446319 - RNA, 19 nt, Artificial Sequence
  Description of Artificial Sequence: Synthetic oligonucleotide
  Antisense strand to SEQ ID NO: 1446318
ucauaaaccaacugugugc

SEQ ID NO: 1446320 - RNA, 19 nt, Artificial Sequence
  Description of Artificial Sequence: Synthetic oligonucleotide
  Sense strand starting at position 775 of SEQ ID NO: 1243853
ugaauuguguggcuccuga

SEQ ID NO: 1446321 - RNA, 19 nt, Artificial Sequence
  Description of Artificial Sequence: Synthetic oligonucleotide
  Antisense strand to SEQ ID NO: 1446320
ucaggagccacacaauuca

SEQ ID NO: 1446322 - RNA, 19 nt, Artificial Sequence
  Description of Artificial Sequence: Synthetic oligonucleotide
  Sense strand starting at position 779 of SEQ ID NO: 1243853
uuguguggcuccugagcaa

SEQ ID NO: 1446323 - RNA, 19 nt, Artificial Sequence
  Description of Artificial Sequence: Synthetic oligonucleotide
  Antisense strand to SEQ ID NO: 1446322
uugcucaggagccacacaa

SEQ ID NO: 1446324 - RNA, 19 nt, Artificial Sequence
  Description of Artificial Sequence: Synthetic oligonucleotide
  Sense strand starting at position 1047 of SEQ ID NO: 1243853
ggucccaguccucaguuau

SEQ ID NO: 1446325 - RNA, 19 nt, Artificial Sequence
  Description of Artificial Sequence: Synthetic oligonucleotide
  Antisense strand to SEQ ID NO: 1446324
auaacugaggacugggacc

SEQ ID NO: 1446326 - RNA, 19 nt, Artificial Sequence
  Description of Artificial Sequence: Synthetic oligonucleotide
  Sense strand starting at position 1255 of SEQ ID NO: 1243853
gccacuacaucuuggauaa

SEQ ID NO: 1446327 - RNA, 19 nt, Artificial Sequence
  Description of Artificial Sequence: Synthetic oligonucleotide
  Antisense strand to SEQ ID NO: 1446326
uuauccaagauguaguggc

SEQ ID NO: 1446328 - RNA, 19 nt, Artificial Sequence
  Description of Artificial Sequence: Synthetic oligonucleotide
  Sense strand starting at position 2138 of SEQ ID NO: 1243853
ggcuguccuucgggaaguu

SEQ ID NO: 1446329 - RNA, 19 nt, Artificial Sequence
  Description of Artificial Sequence: Synthetic oligonucleotide
  Antisense strand to SEQ ID NO: 1446328
aacuucccgaaggacagcc

SEQ ID NO: 1446330 - RNA, 19 nt, Artificial Sequence
  Description of Artificial Sequence: Synthetic oligonucleotide
  Sense strand starting at position 2540 of SEQ ID NO: 1243853
cucguuacucaguacgacu

SEQ ID NO: 1446331 - RNA, 19 nt, Artificial Sequence
  Description of Artificial Sequence: Synthetic oligonucleotide
  Antisense strand to SEQ ID NO: 1446330
agucguacugaguaacgag

SEQ ID NO: 1446332 - RNA, 19 nt, Artificial Sequence
  Description of Artificial Sequence: Synthetic oligonucleotide
  Sense strand starting at position 2658 of SEQ ID NO: 1243853
gugcguagccgcucuguga

SEQ ID NO: 1446333 - RNA, 19 nt, Artificial Sequence
  Description of Artificial Sequence: Synthetic oligonucleotide
  Antisense strand to SEQ ID NO: 1446332
ucacagagcggcuacgcac

SEQ ID NO: 1446334 - RNA, 19 nt, Artificial Sequence
  Description of Artificial Sequence: Synthetic oligonucleotide
  Sense strand starting at position 2786 of SEQ ID NO: 1243853
aaaguccagugcucuguaa

SEQ ID NO: 1446335 - RNA, 19 nt, Artificial Sequence
  Description of Artificial Sequence: Synthetic oligonucleotide
  Antisense strand to SEQ ID NO: 1446334
uuacagagcacuggacuuu

SEQ ID NO: 1446336 - RNA, 19 nt, Artificial Sequence
  Description of Artificial Sequence: Synthetic oligonucleotide
  Sense strand starting at position 2844 of SEQ ID NO: 1243853
ugugcaguggaguugugua

SEQ ID NO: 1446337 - RNA, 19 nt, Artificial Sequence
  Description of Artificial Sequence: Synthetic oligonucleotide
  Antisense strand to SEQ ID NO: 1446336
uacacaacuccacugcaca

SEQ ID NO: 1446338 - RNA, 19 nt, Artificial Sequence
  Description of Artificial Sequence: Synthetic oligonucleotide
  Sense strand starting at position 2849 of SEQ ID NO: 1243853
aguggaguuguguaacuuu

SEQ ID NO: 1446339 - RNA, 19 nt, Artificial Sequence
  Description of Artificial Sequence: Synthetic oligonucleotide
  Antisense strand to SEQ ID NO: 1446338
aaaguuacacaacuccacu

SEQ ID NO: 1446340 - RNA, 19 nt, Artificial Sequence
  Description of Artificial Sequence: Synthetic oligonucleotide
  Sense strand starting at position 2852 of SEQ ID NO: 1243853
ggaguuguguaacuuuagu

SEQ ID NO: 1446341 - RNA, 19 nt, Artificial Sequence
  Description of Artificial Sequence: Synthetic oligonucleotide
  Antisense strand to SEQ ID NO: 1446340
acuaaaguuacacaacucc

SEQ ID NO: 1446342 - RNA, 19 nt, Artificial Sequence
  Description of Artificial Sequence: Synthetic oligonucleotide
  Sense strand starting at position 2858 of SEQ ID NO: 1243853
guguaacuuuaguuacaga

SEQ ID NO: 1446343 - RNA, 19 nt, Artificial Sequence
  Description of Artificial Sequence: Synthetic oligonucleotide
  Antisense strand to SEQ ID NO: 1446342
ucuguaacuaaaguuacac

SEQ ID NO: 1446344 - RNA, 19 nt, Artificial Sequence
  Description of Artificial Sequence: Synthetic oligonucleotide
  Sense strand starting at position 3064 of SEQ ID NO: 1243853
gugguauccuguaaccggu

SEQ ID NO: 1446345 - RNA, 19 nt, Artificial Sequence
  Description of Artificial Sequence: Synthetic oligonucleotide
  Antisense strand to SEQ ID NO: 1446344
accgguuacaggauaccac

SEQ ID NO: 1446346 - RNA, 19 nt, Artificial Sequence
  Description of Artificial Sequence: Synthetic oligonucleotide
  Sense strand starting at position 3070 of SEQ ID NO: 1243853
uccuguaaccggugugaac

SEQ ID NO: 1446347 - RNA, 19 nt, Artificial Sequence
  Description of Artificial Sequence: Synthetic oligonucleotide
  Antisense strand to SEQ ID NO: 1446346
guucacaccgguuacagga

SEQ ID NO: 1446348 - RNA, 19 nt, Artificial Sequence
  Description of Artificial Sequence: Synthetic oligonucleotide
  Sense strand starting at position 3135 of SEQ ID NO: 1243853
gaaggacgcagagauuguu

SEQ ID NO: 1446349 - RNA, 19 nt, Artificial Sequence
  Description of Artificial Sequence: Synthetic oligonucleotide
  Antisense strand to SEQ ID NO: 1446348
aacaaucucugcguccuuc

SEQ ID NO: 1446350 - RNA, 19 nt, Artificial Sequence
  Description of Artificial Sequence: Synthetic oligonucleotide
  Sense strand starting at position 3141 of SEQ ID NO: 1243853
cgcagagauuguuccuggu

SEQ ID NO: 1446351 - RNA, 19 nt, Artificial Sequence
  Description of Artificial Sequence: Synthetic oligonucleotide
  Antisense strand to SEQ ID NO: 1446350
accaggaacaaucucugcg

SEQ ID NO: 1446352 - RNA, 19 nt, Artificial Sequence
  Description of Artificial Sequence: Synthetic oligonucleotide
  Sense strand starting at position 3145 of SEQ ID NO: 1243853
gagauuguuccuggugcuu

SEQ ID NO: 1446353 - RNA, 19 nt, Artificial Sequence
  Description of Artificial Sequence: Synthetic oligonucleotide
  Antisense strand to SEQ ID NO: 1446352
aagcaccaggaacaaucuc

SEQ ID NO: 1446354 - RNA, 19 nt, Artificial Sequence
  Description of Artificial Sequence: Synthetic oligonucleotide
  Sense strand starting at position 3154 of SEQ ID NO: 1243853
ccuggugcuuggcaauuau

SEQ ID NO: 1446355 - RNA, 19 nt, Artificial Sequence
  Description of Artificial Sequence: Synthetic oligonucleotide
  Antisense strand to SEQ ID NO: 1446354
auaauugccaagcaccagg

SEQ ID NO: 1446356 - RNA, 19 nt, Artificial Sequence
  Description of Artificial Sequence: Synthetic oligonucleotide
  Sense strand starting at position 3158 of SEQ ID NO: 1243853
gugcuuggcaauuaugaau

SEQ ID NO: 1446357 - RNA, 19 nt, Artificial Sequence
  Description of Artificial Sequence: Synthetic oligonucleotide
  Antisense strand to SEQ ID NO: 1446356
auucauaauugccaagcac

SEQ ID NO: 1446358 - RNA, 19 nt, Artificial Sequence
  Description of Artificial Sequence: Synthetic oligonucleotide
  Sense strand starting at position 3164 of SEQ ID NO: 1243853
ggcaauuaugaaugacgcu

SEQ ID NO: 1446359 - RNA, 19 nt, Artificial Sequence
  Description of Artificial Sequence: Synthetic oligonucleotide
  Antisense strand to SEQ ID NO: 1446358
agcgucauucauaauugcc

SEQ ID NO: 1446360 - RNA, 19 nt, Artificial Sequence
  Description of Artificial Sequence: Synthetic oligonucleotide
  Sense strand starting at position 3261 of SEQ ID NO: 1243853
gcuggaucaaaugauuguu

SEQ ID NO: 1446361 - RNA, 19 nt, Artificial Sequence
  Description of Artificial Sequence: Synthetic oligonucleotide
  Antisense strand to SEQ ID NO: 1446360
aacaaucauuugauccagc

SEQ ID NO: 1446362 - RNA, 19 nt, Artificial Sequence
  Description of Artificial Sequence: Synthetic oligonucleotide
  Sense strand starting at position 3263 of SEQ ID NO: 1243853
uggaucaaaugauuguuua

SEQ ID NO: 1446363 - RNA, 19 nt, Artificial Sequence
  Description of Artificial Sequence: Synthetic oligonucleotide
  Antisense strand to SEQ ID NO: 1446362
uaaacaaucauuugaucca

SEQ ID NO: 1446364 - RNA, 19 nt, Artificial Sequence
  Description of Artificial Sequence: Synthetic oligonucleotide
  Sense strand starting at position 3264 of SEQ ID NO: 1243853
ggaucaaaugauuguuuau

SEQ ID NO: 1446365 - RNA, 19 nt, Artificial Sequence
  Description of Artificial Sequence: Synthetic oligonucleotide
  Antisense strand to SEQ ID NO: 1446364
auaaacaaucauuugaucc

SEQ ID NO: 1446366 - RNA, 19 nt, Artificial Sequence
  Description of Artificial Sequence: Synthetic oligonucleotide
  Sense strand starting at position 3273 of SEQ ID NO: 1243853
gauuguuuauaagaaacug

SEQ ID NO: 1446367 - RNA, 19 nt, Artificial Sequence
  Description of Artificial Sequence: Synthetic oligonucleotide
  Antisense strand to SEQ ID NO: 1446366
caguuucuuauaaacaauc

SEQ ID NO: 1446368 - RNA, 19 nt, Artificial Sequence
  Description of Artificial Sequence: Synthetic oligonucleotide
  Sense strand starting at position 3305 of SEQ ID NO: 1243853
gugggucccaccuguaauu

SEQ ID NO: 1446369 - RNA, 19 nt, Artificial Sequence
  Description of Artificial Sequence: Synthetic oligonucleotide
  Antisense strand to SEQ ID NO: 1446368
aauuacaggugggacccac

SEQ ID NO: 1446370 - RNA, 19 nt, Artificial Sequence
  Description of Artificial Sequence: Synthetic oligonucleotide
  Sense strand starting at position 3323 of SEQ ID NO: 1243853
uccagaacuuugggacacu

SEQ ID NO: 1446371 - RNA, 19 nt, Artificial Sequence
  Description of Artificial Sequence: Synthetic oligonucleotide
  Antisense strand to SEQ ID NO: 1446370
agugucccaaaguucugga

SEQ ID NO: 1446372 - RNA, 19 nt, Artificial Sequence
  Description of Artificial Sequence: Synthetic oligonucleotide
  Sense strand starting at position 63 of SEQ ID NO: 1243854
uuauuaugaguggguucca

SEQ ID NO: 1446373 - RNA, 19 nt, Artificial Sequence
  Description of Artificial Sequence: Synthetic oligonucleotide
  Antisense strand to SEQ ID NO: 1446372
uggaacccacucauaauaa

SEQ ID NO: 1446374 - RNA, 19 nt, Artificial Sequence
  Description of Artificial Sequence: Synthetic oligonucleotide
  Sense strand starting at position 560 of SEQ ID NO: 1243854
ugcagaagauaaggaauuu

SEQ ID NO: 1446375 - RNA, 19 nt, Artificial Sequence
  Description of Artificial Sequence: Synthetic oligonucleotide
  Antisense strand to SEQ ID NO: 1446374
aaauuccuuaucuucugca

SEQ ID NO: 1446376 - RNA, 19 nt, Artificial Sequence
  Description of Artificial Sequence: Synthetic oligonucleotide
  Sense strand starting at position 573 of SEQ ID NO: 1243854
gaauuugauuguuagagaa

SEQ ID NO: 1446377 - RNA, 19 nt, Artificial Sequence
  Description of Artificial Sequence: Synthetic oligonucleotide
  Antisense strand to SEQ ID NO: 1446376
uucucuaacaaucaaauuc

SEQ ID NO: 1446378 - RNA, 19 nt, Artificial Sequence
  Description of Artificial Sequence: Synthetic oligonucleotide
  Sense strand starting at position 632 of SEQ ID NO: 1243854
uuaauuucuugggaugauu

SEQ ID NO: 1446379 - RNA, 19 nt, Artificial Sequence
  Description of Artificial Sequence: Synthetic oligonucleotide
  Antisense strand to SEQ ID NO: 1446378
aaucaucccaagaaauuaa

SEQ ID NO: 1446380 - RNA, 19 nt, Artificial Sequence
  Description of Artificial Sequence: Synthetic oligonucleotide
  Sense strand starting at position 641 of SEQ ID NO: 1243854
ugggaugauuuccagagug

SEQ ID NO: 1446381 - RNA, 19 nt, Artificial Sequence
  Description of Artificial Sequence: Synthetic oligonucleotide
  Antisense strand to SEQ ID NO: 1446380
cacucuggaaaucauccca

SEQ ID NO: 1446382 - RNA, 19 nt, Artificial Sequence
  Description of Artificial Sequence: Synthetic oligonucleotide
  Sense strand starting at position 646 of SEQ ID NO: 1243854
ugauuuccagagugcugua

SEQ ID NO: 1446383 - RNA, 19 nt, Artificial Sequence
  Description of Artificial Sequence: Synthetic oligonucleotide
  Antisense strand to SEQ ID NO: 1446382
uacagcacucuggaaauca

SEQ ID NO: 1446384 - RNA, 19 nt, Artificial Sequence
  Description of Artificial Sequence: Synthetic oligonucleotide
  Sense strand starting at position 939 of SEQ ID NO: 1243854
gauuaaacuuaggcuguua

SEQ ID NO: 1446385 - RNA, 19 nt, Artificial Sequence
  Description of Artificial Sequence: Synthetic oligonucleotide
  Antisense strand to SEQ ID NO: 1446384
uaacagccuaaguuuaauc

SEQ ID NO: 1446386 - RNA, 19 nt, Artificial Sequence
  Description of Artificial Sequence: Synthetic oligonucleotide
  Sense strand starting at position 951 of SEQ ID NO: 1243854
gcuguuaagaacugguaua

SEQ ID NO: 1446387 - RNA, 19 nt, Artificial Sequence
  Description of Artificial Sequence: Synthetic oligonucleotide
  Antisense strand to SEQ ID NO: 1446386
uauaccaguucuuaacagc

SEQ ID NO: 1446388 - RNA, 19 nt, Artificial Sequence
  Description of Artificial Sequence: Synthetic oligonucleotide
  Sense strand starting at position 983 of SEQ ID NO: 1243854
cgguaaugcauuuguuagu

SEQ ID NO: 1446389 - RNA, 19 nt, Artificial Sequence
  Description of Artificial Sequence: Synthetic oligonucleotide
  Antisense strand to SEQ ID NO: 1446388
acuaacaaaugcauuaccg

SEQ ID NO: 1446390 - RNA, 19 nt, Artificial Sequence
  Description of Artificial Sequence: Synthetic oligonucleotide
  Sense strand starting at position 1047 of SEQ ID NO: 1243854
guacaugaagcucagaauu

SEQ ID NO: 1446391 - RNA, 19 nt, Artificial Sequence
  Description of Artificial Sequence: Synthetic oligonucleotide
  Antisense strand to SEQ ID NO: 1446390
aauucugagcuucauguac

SEQ ID NO: 1446392 - RNA, 19 nt, Artificial Sequence
  Description of Artificial Sequence: Synthetic oligonucleotide
  Sense strand starting at position 1172 of SEQ ID NO: 1243854
auacuuguuccuugaaaug

SEQ ID NO: 1446393 - RNA, 19 nt, Artificial Sequence
  Description of Artificial Sequence: Synthetic oligonucleotide
  Antisense strand to SEQ ID NO: 1446392
cauuucaaggaacaaguau

SEQ ID NO: 1446394 - RNA, 19 nt, Artificial Sequence
  Description of Artificial Sequence: Synthetic oligonucleotide
  Sense strand starting at position 1181 of SEQ ID NO: 1243854
ccuugaaaugccugggaau

SEQ ID NO: 1446395 - RNA, 19 nt, Artificial Sequence
  Description of Artificial Sequence: Synthetic oligonucleotide
  Antisense strand to SEQ ID NO: 1446394
auucccaggcauuucaagg

SEQ ID NO: 1446396 - RNA, 19 nt, Artificial Sequence
  Description of Artificial Sequence: Synthetic oligonucleotide
  Sense strand starting at position 1182 of SEQ ID NO: 1243854
cuugaaaugccugggaauu

SEQ ID NO: 1446397 - RNA, 19 nt, Artificial Sequence
  Description of Artificial Sequence: Synthetic oligonucleotide
  Antisense strand to SEQ ID NO: 1446396
aauucccaggcauuucaag

SEQ ID NO: 1446398 - RNA, 19 nt, Artificial Sequence
  Description of Artificial Sequence: Synthetic oligonucleotide
  Sense strand starting at position 1183 of SEQ ID NO: 1243854
uugaaaugccugggaauug

SEQ ID NO: 1446399 - RNA, 19 nt, Artificial Sequence
  Description of Artificial Sequence: Synthetic oligonucleotide
  Antisense strand to SEQ ID NO: 1446398
caauucccaggcauuucaa

SEQ ID NO: 1446400 - RNA, 19 nt, Artificial Sequence
  Description of Artificial Sequence: Synthetic oligonucleotide
  Sense strand starting at position 1245 of SEQ ID NO: 1243854
cuauguucuggacacguaa

SEQ ID NO: 1446401 - RNA, 19 nt, Artificial Sequence
  Description of Artificial Sequence: Synthetic oligonucleotide
  Antisense strand to SEQ ID NO: 1446400
uuacguguccagaacauag

SEQ ID NO: 1446402 - RNA, 19 nt, Artificial Sequence
  Description of Artificial Sequence: Synthetic oligonucleotide
  Sense strand starting at position 1267 of SEQ ID NO: 1243854
ucuggaaacgaaugagagu

SEQ ID NO: 1446403 - RNA, 19 nt, Artificial Sequence
  Description of Artificial Sequence: Synthetic oligonucleotide
  Antisense strand to SEQ ID NO: 1446402
acucucauucguuuccaga

SEQ ID NO: 1446404 - RNA, 19 nt, Artificial Sequence
  Description of Artificial Sequence: Synthetic oligonucleotide
  Sense strand starting at position 1529 of SEQ ID NO: 1243854
gaaugcuguuccuuuaaag

SEQ ID NO: 1446405 - RNA, 19 nt, Artificial Sequence
  Description of Artificial Sequence: Synthetic oligonucleotide
  Antisense strand to SEQ ID NO: 1446404
cuuuaaaggaacagcauuc

SEQ ID NO: 1446406 - RNA, 19 nt, Artificial Sequence
  Description of Artificial Sequence: Synthetic oligonucleotide
  Sense strand starting at position 2094 of SEQ ID NO: 1243854
gagcuucucgccgcugauu

SEQ ID NO: 1446407 - RNA, 19 nt, Artificial Sequence
  Description of Artificial Sequence: Synthetic oligonucleotide
  Antisense strand to SEQ ID NO: 1446406
aaucagcggcgagaagcuc

SEQ ID NO: 1446408 - RNA, 19 nt, Artificial Sequence
  Description of Artificial Sequence: Synthetic oligonucleotide
  Sense strand starting at position 2106 of SEQ ID NO: 1243854
gcugauuggucaucagagg

SEQ ID NO: 1446409 - RNA, 19 nt, Artificial Sequence
  Description of Artificial Sequence: Synthetic oligonucleotide
  Antisense strand to SEQ ID NO: 1446408
ccucugaugaccaaucagc

SEQ ID NO: 1446410 - RNA, 19 nt, Artificial Sequence
  Description of Artificial Sequence: Synthetic oligonucleotide
  Sense strand starting at position 2316 of SEQ ID NO: 1243854
cgacgucaacgggaaagua

SEQ ID NO: 1446411 - RNA, 19 nt, Artificial Sequence
  Description of Artificial Sequence: Synthetic oligonucleotide
  Antisense strand to SEQ ID NO: 1446410
uacuuucccguugacgucg

SEQ ID NO: 1446412 - RNA, 19 nt, Artificial Sequence
  Description of Artificial Sequence: Synthetic oligonucleotide
  Sense strand starting at position 2424 of SEQ ID NO: 1243854
gggcucuuuggagacguaa

SEQ ID NO: 1446413 - RNA, 19 nt, Artificial Sequence
  Description of Artificial Sequence: Synthetic oligonucleotide
  Antisense strand to SEQ ID NO: 1446412
uuacgucuccaaagagccc

SEQ ID NO: 1446414 - RNA, 19 nt, Artificial Sequence
  Description of Artificial Sequence: Synthetic oligonucleotide
  Sense strand starting at position 2498 of SEQ ID NO: 1243854
uugcuugagguguggaaag

SEQ ID NO: 1446415 - RNA, 19 nt, Artificial Sequence
  Description of Artificial Sequence: Synthetic oligonucleotide
  Antisense strand to SEQ ID NO: 1446414
cuuuccacaccucaagcaa

SEQ ID NO: 1446416 - RNA, 19 nt, Artificial Sequence
  Description of Artificial Sequence: Synthetic oligonucleotide
  Sense strand starting at position 2662 of SEQ ID NO: 1243854
gggcgauuaggucauagag

SEQ ID NO: 1446417 - RNA, 19 nt, Artificial Sequence
  Description of Artificial Sequence: Synthetic oligonucleotide
  Antisense strand to SEQ ID NO: 1446416
cucuaugaccuaaucgccc

SEQ ID NO: 1446418 - RNA, 19 nt, Artificial Sequence
  Description of Artificial Sequence: Synthetic oligonucleotide
  Sense strand starting at position 2707 of SEQ ID NO: 1243854
ggaggcgguccagacuaua

SEQ ID NO: 1446419 - RNA, 19 nt, Artificial Sequence
  Description of Artificial Sequence: Synthetic oligonucleotide
  Antisense strand to SEQ ID NO: 1446418
uauagucuggaccgccucc

SEQ ID NO: 1446420 - RNA, 19 nt, Artificial Sequence
  Description of Artificial Sequence: Synthetic oligonucleotide
  Sense strand starting at position 2832 of SEQ ID NO: 1243854
aaggcuucgccgucaucga

SEQ ID NO: 1446421 - RNA, 19 nt, Artificial Sequence
  Description of Artificial Sequence: Synthetic oligonucleotide
  Antisense strand to SEQ ID NO: 1446420
ucgaugacggcgaagccuu

SEQ ID NO: 1446422 - RNA, 19 nt, Artificial Sequence
  Description of Artificial Sequence: Synthetic oligonucleotide
  Sense strand starting at position 3117 of SEQ ID NO: 1243854
ucacgucacagugauugga

SEQ ID NO: 1446423 - RNA, 19 nt, Artificial Sequence
  Description of Artificial Sequence: Synthetic oligonucleotide
  Antisense strand to SEQ ID NO: 1446422
uccaaucacugugacguga

SEQ ID NO: 1446424 - RNA, 19 nt, Artificial Sequence
  Description of Artificial Sequence: Synthetic oligonucleotide
  Sense strand starting at position 3120 of SEQ ID NO: 1243854
cgucacagugauuggaaga

SEQ ID NO: 1446425 - RNA, 19 nt, Artificial Sequence
  Description of Artificial Sequence: Synthetic oligonucleotide
  Antisense strand to SEQ ID NO: 1446424
ucuuccaaucacugugacg

SEQ ID NO: 1446426 - RNA, 19 nt, Artificial Sequence
  Description of Artificial Sequence: Synthetic oligonucleotide
  Sense strand starting at position 3279 of SEQ ID NO: 1243854
gaaggaacaucuguuaggu

SEQ ID NO: 1446427 - RNA, 19 nt, Artificial Sequence
  Description of Artificial Sequence: Synthetic oligonucleotide
  Antisense strand to SEQ ID NO: 1446426
accuaacagauguuccuuc

SEQ ID NO: 1446428 - RNA, 19 nt, Artificial Sequence
  Description of Artificial Sequence: Synthetic oligonucleotide
  Sense strand starting at position 3410 of SEQ ID NO: 1243854
ggcugagucgcgaguacaa

SEQ ID NO: 1446429 - RNA, 19 nt, Artificial Sequence
  Description of Artificial Sequence: Synthetic oligonucleotide
  Antisense strand to SEQ ID NO: 1446428
uuguacucgcgacucagcc

SEQ ID NO: 1446430 - RNA, 19 nt, Artificial Sequence
  Description of Artificial Sequence: Synthetic oligonucleotide
  Sense strand starting at position 3701 of SEQ ID NO: 1243854
gcagaaguguuucugagaa

SEQ ID NO: 1446431 - RNA, 19 nt, Artificial Sequence
  Description of Artificial Sequence: Synthetic oligonucleotide
  Antisense strand to SEQ ID NO: 1446430
uucucagaaacacuucugc

SEQ ID NO: 1446432 - RNA, 19 nt, Artificial Sequence
  Description of Artificial Sequence: Synthetic oligonucleotide
  Sense strand starting at position 3726 of SEQ ID NO: 1243854
uguucuguuaucgcugacu

SEQ ID NO: 1446433 - RNA, 19 nt, Artificial Sequence
  Description of Artificial Sequence: Synthetic oligonucleotide
  Antisense strand to SEQ ID NO: 1446432
agucagcgauaacagaaca

SEQ ID NO: 1446434 - RNA, 19 nt, Artificial Sequence
  Description of Artificial Sequence: Synthetic oligonucleotide
  Sense strand starting at position 3755 of SEQ ID NO: 1243854
gguucuuaccacuaaagcu

SEQ ID NO: 1446435 - RNA, 19 nt, Artificial Sequence
  Description of Artificial Sequence: Synthetic oligonucleotide
  Antisense strand to SEQ ID NO: 1446434
agcuuuagugguaagaacc

SEQ ID NO: 1446436 - RNA, 19 nt, Artificial Sequence
  Description of Artificial Sequence: Synthetic oligonucleotide
  Sense strand starting at position 3788 of SEQ ID NO: 1243854
cggccauaugaguaacauc

SEQ ID NO: 1446437 - RNA, 19 nt, Artificial Sequence
  Description of Artificial Sequence: Synthetic oligonucleotide
  Antisense strand to SEQ ID NO: 1446436
gauguuacucauauggccg

SEQ ID NO: 1446438 - RNA, 19 nt, Artificial Sequence
  Description of Artificial Sequence: Synthetic oligonucleotide
  Sense strand starting at position 3929 of SEQ ID NO: 1243854
ggugacaaguuuccgacau

SEQ ID NO: 1446439 - RNA, 19 nt, Artificial Sequence
  Description of Artificial Sequence: Synthetic oligonucleotide
  Antisense strand to SEQ ID NO: 1446438
augucggaaacuugucacc

SEQ ID NO: 1446440 - RNA, 19 nt, Artificial Sequence
  Description of Artificial Sequence: Synthetic oligonucleotide
  Sense strand starting at position 3933 of SEQ ID NO: 1243854
acaaguuuccgacaugaua

SEQ ID NO: 1446441 - RNA, 19 nt, Artificial Sequence
  Description of Artificial Sequence: Synthetic oligonucleotide
  Antisense strand to SEQ ID NO: 1446440
uaucaugucggaaacuugu

SEQ ID NO: 1446442 - RNA, 19 nt, Artificial Sequence
  Description of Artificial Sequence: Synthetic oligonucleotide
  Sense strand starting at position 3936 of SEQ ID NO: 1243854
aguuuccgacaugauaaau

SEQ ID NO: 1446443 - RNA, 19 nt, Artificial Sequence
  Description of Artificial Sequence: Synthetic oligonucleotide
  Antisense strand to SEQ ID NO: 1446442
auuuaucaugucggaaacu

SEQ ID NO: 1446444 - RNA, 19 nt, Artificial Sequence
  Description of Artificial Sequence: Synthetic oligonucleotide
  Sense strand starting at position 3956 of SEQ ID NO: 1243854
cccggcuuccgacaugaua

SEQ ID NO: 1446445 - RNA, 19 nt, Artificial Sequence
  Description of Artificial Sequence: Synthetic oligonucleotide
  Antisense strand to SEQ ID NO: 1446444
uaucaugucggaagccggg

SEQ ID NO: 1446446 - RNA, 19 nt, Artificial Sequence
  Description of Artificial Sequence: Synthetic oligonucleotide
  Sense strand starting at position 3959 of SEQ ID NO: 1243854
ggcuuccgacaugauaaau

SEQ ID NO: 1446447 - RNA, 19 nt, Artificial Sequence
  Description of Artificial Sequence: Synthetic oligonucleotide
  Antisense strand to SEQ ID NO: 1446446
auuuaucaugucggaagcc

SEQ ID NO: 1446448 - RNA, 19 nt, Artificial Sequence
  Description of Artificial Sequence: Synthetic oligonucleotide
  Sense strand starting at position 3970 of SEQ ID NO: 1243854
ugauaaaucccaggcuguu

SEQ ID NO: 1446449 - RNA, 19 nt, Artificial Sequence
  Description of Artificial Sequence: Synthetic oligonucleotide
  Antisense strand to SEQ ID NO: 1446448
aacagccugggauuuauca

SEQ ID NO: 1446450 - RNA, 19 nt, Artificial Sequence
  Description of Artificial Sequence: Synthetic oligonucleotide
  Sense strand starting at position 3982 of SEQ ID NO: 1243854
ggcuguuuacaugaccuaa

SEQ ID NO: 1446451 - RNA, 19 nt, Artificial Sequence
  Description of Artificial Sequence: Synthetic oligonucleotide
  Antisense strand to SEQ ID NO: 1446450
uuaggucauguaaacagcc

SEQ ID NO: 1446452 - RNA, 19 nt, Artificial Sequence
  Description of Artificial Sequence: Synthetic oligonucleotide
  Sense strand starting at position 119 of SEQ ID NO: 1243855
acaagcacuuaucuugaga

SEQ ID NO: 1446453 - RNA, 19 nt, Artificial Sequence
  Description of Artificial Sequence: Synthetic oligonucleotide
  Antisense strand to SEQ ID NO: 1446452
ucucaagauaagugcuugu

SEQ ID NO: 1446454 - RNA, 19 nt, Artificial Sequence
  Description of Artificial Sequence: Synthetic oligonucleotide
  Sense strand starting at position 249 of SEQ ID NO: 1243855
uaauguucuccuggcaaga

SEQ ID NO: 1446455 - RNA, 19 nt, Artificial Sequence
  Description of Artificial Sequence: Synthetic oligonucleotide
  Antisense strand to SEQ ID NO: 1446454
ucuugccaggagaacauua

SEQ ID NO: 1446456 - RNA, 19 nt, Artificial Sequence
  Description of Artificial Sequence: Synthetic oligonucleotide
  Sense strand starting at position 389 of SEQ ID NO: 1243855
ucuccaucccaaggugaau

SEQ ID NO: 1446457 - RNA, 19 nt, Artificial Sequence
  Description of Artificial Sequence: Synthetic oligonucleotide
  Antisense strand to SEQ ID NO: 1446456
auucaccuugggauggaga

SEQ ID NO: 1446458 - RNA, 19 nt, Artificial Sequence
  Description of Artificial Sequence: Synthetic oligonucleotide
  Sense strand starting at position 400 of SEQ ID NO: 1243855
aggugaauaugagugauau

SEQ ID NO: 1446459 - RNA, 19 nt, Artificial Sequence
  Description of Artificial Sequence: Synthetic oligonucleotide
  Antisense strand to SEQ ID NO: 1446458
auaucacucauauucaccu

SEQ ID NO: 1446460 - RNA, 19 nt, Artificial Sequence
  Description of Artificial Sequence: Synthetic oligonucleotide
  Sense strand starting at position 401 of SEQ ID NO: 1243855
ggugaauaugagugauaua

SEQ ID NO: 1446461 - RNA, 19 nt, Artificial Sequence
  Description of Artificial Sequence: Synthetic oligonucleotide
  Antisense strand to SEQ ID NO: 1446460
uauaucacucauauucacc

SEQ ID NO: 1446462 - RNA, 19 nt, Artificial Sequence
  Description of Artificial Sequence: Synthetic oligonucleotide
  Sense strand starting at position 899 of SEQ ID NO: 1243855
guuucucaaugaucuugua

SEQ ID NO: 1446463 - RNA, 19 nt, Artificial Sequence
  Description of Artificial Sequence: Synthetic oligonucleotide
  Antisense strand to SEQ ID NO: 1446462
uacaagaucauugagaaac

SEQ ID NO: 1446464 - RNA, 19 nt, Artificial Sequence
  Description of Artificial Sequence: Synthetic oligonucleotide
  Sense strand starting at position 940 of SEQ ID NO: 1243855
auccgaaauguauaaagca

SEQ ID NO: 1446465 - RNA, 19 nt, Artificial Sequence
  Description of Artificial Sequence: Synthetic oligonucleotide
  Antisense strand to SEQ ID NO: 1446464
ugcuuuauacauuucggau

SEQ ID NO: 1446466 - RNA, 19 nt, Artificial Sequence
  Description of Artificial Sequence: Synthetic oligonucleotide
  Sense strand starting at position 966 of SEQ ID NO: 1243855
ucuauuggagacuguuaaa

SEQ ID NO: 1446467 - RNA, 19 nt, Artificial Sequence
  Description of Artificial Sequence: Synthetic oligonucleotide
  Antisense strand to SEQ ID NO: 1446466
uuuaacagucuccaauaga

SEQ ID NO: 1446468 - RNA, 19 nt, Artificial Sequence
  Description of Artificial Sequence: Synthetic oligonucleotide
  Sense strand starting at position 1003 of SEQ ID NO: 1243855
agcuaaguccuagaguaug

SEQ ID NO: 1446469 - RNA, 19 nt, Artificial Sequence
  Description of Artificial Sequence: Synthetic oligonucleotide
  Antisense strand to SEQ ID NO: 1446468
cauacucuaggacuuagcu

SEQ ID NO: 1446470 - RNA, 19 nt, Artificial Sequence
  Description of Artificial Sequence: Synthetic oligonucleotide
  Sense strand starting at position 1027 of SEQ ID NO: 1243855
aacuuuagacagugauugu

SEQ ID NO: 1446471 - RNA, 19 nt, Artificial Sequence
  Description of Artificial Sequence: Synthetic oligonucleotide
  Antisense strand to SEQ ID NO: 1446470
acaaucacugucuaaaguu

SEQ ID NO: 1446472 - RNA, 19 nt, Artificial Sequence
  Description of Artificial Sequence: Synthetic oligonucleotide
  Sense strand starting at position 1624 of SEQ ID NO: 1243855
gcgcuuguccgagcuggua

SEQ ID NO: 1446473 - RNA, 19 nt, Artificial Sequence
  Description of Artificial Sequence: Synthetic oligonucleotide
  Antisense strand to SEQ ID NO: 1446472
uaccagcucggacaagcgc

SEQ ID NO: 1446474 - RNA, 19 nt, Artificial Sequence
  Description of Artificial Sequence: Synthetic oligonucleotide
  Sense strand starting at position 1660 of SEQ ID NO: 1243855
ugaggcuuggaucgaggaa

SEQ ID NO: 1446475 - RNA, 19 nt, Artificial Sequence
  Description of Artificial Sequence: Synthetic oligonucleotide
  Antisense strand to SEQ ID NO: 1446474
uuccucgauccaagccuca

SEQ ID NO: 1446476 - RNA, 19 nt, Artificial Sequence
  Description of Artificial Sequence: Synthetic oligonucleotide
  Sense strand starting at position 2049 of SEQ ID NO: 1243855
ugccgaguucgaguucauu

SEQ ID NO: 1446477 - RNA, 19 nt, Artificial Sequence
  Description of Artificial Sequence: Synthetic oligonucleotide
  Antisense strand to SEQ ID NO: 1446476
aaugaacucgaacucggca

SEQ ID NO: 1446478 - RNA, 19 nt, Artificial Sequence
  Description of Artificial Sequence: Synthetic oligonucleotide
  Sense strand starting at position 2063 of SEQ ID NO: 1243855
ucauuagcauucuuggaaa

SEQ ID NO: 1446479 - RNA, 19 nt, Artificial Sequence
  Description of Artificial Sequence: Synthetic oligonucleotide
  Antisense strand to SEQ ID NO: 1446478
uuuccaagaaugcuaauga

SEQ ID NO: 1446480 - RNA, 19 nt, Artificial Sequence
  Description of Artificial Sequence: Synthetic oligonucleotide
  Sense strand starting at position 2065 of SEQ ID NO: 1243855
auuagcauucuuggaaaug

SEQ ID NO: 1446481 - RNA, 19 nt, Artificial Sequence
  Description of Artificial Sequence: Synthetic oligonucleotide
  Antisense strand to SEQ ID NO: 1446480
cauuuccaagaaugcuaau

SEQ ID NO: 1446482 - RNA, 19 nt, Artificial Sequence
  Description of Artificial Sequence: Synthetic oligonucleotide
  Sense strand starting at position 2136 of SEQ ID NO: 1243855
uugugcuauuucucuggaa

SEQ ID NO: 1446483 - RNA, 19 nt, Artificial Sequence
  Description of Artificial Sequence: Synthetic oligonucleotide
  Antisense strand to SEQ ID NO: 1446482
uuccagagaaauagcacaa

SEQ ID NO: 1446484 - RNA, 19 nt, Artificial Sequence
  Description of Artificial Sequence: Synthetic oligonucleotide
  Sense strand starting at position 2206 of SEQ ID NO: 1243855
uagagucugugacuucuua

SEQ ID NO: 1446485 - RNA, 19 nt, Artificial Sequence
  Description of Artificial Sequence: Synthetic oligonucleotide
  Antisense strand to SEQ ID NO: 1446484
uaagaagucacagacucua

SEQ ID NO: 1446486 - RNA, 19 nt, Artificial Sequence
  Description of Artificial Sequence: Synthetic oligonucleotide
  Sense strand starting at position 2244 of SEQ ID NO: 1243855
ccgaaugaauggcauuuaa

SEQ ID NO: 1446487 - RNA, 19 nt, Artificial Sequence
  Description of Artificial Sequence: Synthetic oligonucleotide
  Antisense strand to SEQ ID NO: 1446486
uuaaaugccauucauucgg

SEQ ID NO: 1446488 - RNA, 19 nt, Artificial Sequence
  Description of Artificial Sequence: Synthetic oligonucleotide
  Sense strand starting at position 2429 of SEQ ID NO: 1243855
guuguagugaguuuacgca

SEQ ID NO: 1446489 - RNA, 19 nt, Artificial Sequence
  Description of Artificial Sequence: Synthetic oligonucleotide
  Antisense strand to SEQ ID NO: 1446488
ugcguaaacucacuacaac

SEQ ID NO: 1446490 - RNA, 19 nt, Artificial Sequence
  Description of Artificial Sequence: Synthetic oligonucleotide
  Sense strand starting at position 2621 of SEQ ID NO: 1243855
ggaguagauugcuccagug

SEQ ID NO: 1446491 - RNA, 19 nt, Artificial Sequence
  Description of Artificial Sequence: Synthetic oligonucleotide
  Antisense strand to SEQ ID NO: 1446490
cacuggagcaaucuacucc

SEQ ID NO: 1446492 - RNA, 19 nt, Artificial Sequence
  Description of Artificial Sequence: Synthetic oligonucleotide
  Sense strand starting at position 2623 of SEQ ID NO: 1243855
aguagauugcuccagugua

SEQ ID NO: 1446493 - RNA, 19 nt, Artificial Sequence
  Description of Artificial Sequence: Synthetic oligonucleotide
  Antisense strand to SEQ ID NO: 1446492
uacacuggagcaaucuacu

SEQ ID NO: 1446494 - RNA, 19 nt, Artificial Sequence
  Description of Artificial Sequence: Synthetic oligonucleotide
  Sense strand starting at position 2655 of SEQ ID NO: 1243855
agcgcuuugcuuucucuga

SEQ ID NO: 1446495 - RNA, 19 nt, Artificial Sequence
  Description of Artificial Sequence: Synthetic oligonucleotide
  Antisense strand to SEQ ID NO: 1446494
ucagagaaagcaaagcgcu

SEQ ID NO: 1446496 - RNA, 19 nt, Artificial Sequence
  Description of Artificial Sequence: Synthetic oligonucleotide
  Sense strand starting at position 2663 of SEQ ID NO: 1243855
gcuuucucugauuauaguu

SEQ ID NO: 1446497 - RNA, 19 nt, Artificial Sequence
  Description of Artificial Sequence: Synthetic oligonucleotide
  Antisense strand to SEQ ID NO: 1446496
aacuauaaucagagaaagc

SEQ ID NO: 1446498 - RNA, 19 nt, Artificial Sequence
  Description of Artificial Sequence: Synthetic oligonucleotide
  Sense strand starting at position 2763 of SEQ ID NO: 1243855
cgccguagucagcugcuaa

SEQ ID NO: 1446499 - RNA, 19 nt, Artificial Sequence
  Description of Artificial Sequence: Synthetic oligonucleotide
  Antisense strand to SEQ ID NO: 1446498
uuagcagcugacuacggcg

SEQ ID NO: 1446500 - RNA, 19 nt, Artificial Sequence
  Description of Artificial Sequence: Synthetic oligonucleotide
  Sense strand starting at position 3056 of SEQ ID NO: 1243855
gaggacuuacgccaaaucu

SEQ ID NO: 1446501 - RNA, 19 nt, Artificial Sequence
  Description of Artificial Sequence: Synthetic oligonucleotide
  Antisense strand to SEQ ID NO: 1446500
agauuuggcguaaguccuc

SEQ ID NO: 1446502 - RNA, 19 nt, Artificial Sequence
  Description of Artificial Sequence: Synthetic oligonucleotide
  Sense strand starting at position 3064 of SEQ ID NO: 1243855
acgccaaaucucugaauau

SEQ ID NO: 1446503 - RNA, 19 nt, Artificial Sequence
  Description of Artificial Sequence: Synthetic oligonucleotide
  Antisense strand to SEQ ID NO: 1446502
auauucagagauuuggcgu

SEQ ID NO: 1446504 - RNA, 19 nt, Artificial Sequence
  Description of Artificial Sequence: Synthetic oligonucleotide
  Sense strand starting at position 3350 of SEQ ID NO: 1243855
agggaaauugugcacuugu

SEQ ID NO: 1446505 - RNA, 19 nt, Artificial Sequence
  Description of Artificial Sequence: Synthetic oligonucleotide
  Antisense strand to SEQ ID NO: 1446504
acaagugcacaauuucccu

SEQ ID NO: 1446506 - RNA, 19 nt, Artificial Sequence
  Description of Artificial Sequence: Synthetic oligonucleotide
  Sense strand starting at position 3381 of SEQ ID NO: 1243855
uugcacuuucuugaguuaa

SEQ ID NO: 1446507 - RNA, 19 nt, Artificial Sequence
  Description of Artificial Sequence: Synthetic oligonucleotide
  Antisense strand to SEQ ID NO: 1446506
uuaacucaagaaagugcaa

SEQ ID NO: 1446508 - RNA, 19 nt, Artificial Sequence
  Description of Artificial Sequence: Synthetic oligonucleotide
  Sense strand starting at position 3383 of SEQ ID NO: 1243855
gcacuuucuugaguuaaua

SEQ ID NO: 1446509 - RNA, 19 nt, Artificial Sequence
  Description of Artificial Sequence: Synthetic oligonucleotide
  Antisense strand to SEQ ID NO: 1446508
uauuaacucaagaaagugc

SEQ ID NO: 1446510 - RNA, 19 nt, Artificial Sequence
  Description of Artificial Sequence: Synthetic oligonucleotide
  Sense strand starting at position 3394 of SEQ ID NO: 1243855
aguuaauaucaugaagucu

SEQ ID NO: 1446511 - RNA, 19 nt, Artificial Sequence
  Description of Artificial Sequence: Synthetic oligonucleotide
  Antisense strand to SEQ ID NO: 1446510
agacuucaugauauuaacu

SEQ ID NO: 1446512 - RNA, 19 nt, Artificial Sequence
  Description of Artificial Sequence: Synthetic oligonucleotide
  Sense strand starting at position 3445 of SEQ ID NO: 1243855
auagcugauaagggugauu

SEQ ID NO: 1446513 - RNA, 19 nt, Artificial Sequence
  Description of Artificial Sequence: Synthetic oligonucleotide
  Antisense strand to SEQ ID NO: 1446512
aaucacccuuaucagcuau

SEQ ID NO: 1446514 - RNA, 19 nt, Artificial Sequence
  Description of Artificial Sequence: Synthetic oligonucleotide
  Sense strand starting at position 3530 of SEQ ID NO: 1243855
guuugaucccaaggaacgu

SEQ ID NO: 1446515 - RNA, 19 nt, Artificial Sequence
  Description of Artificial Sequence: Synthetic oligonucleotide
  Antisense strand to SEQ ID NO: 1446514
acguuccuugggaucaaac

SEQ ID NO: 1446516 - RNA, 19 nt, Artificial Sequence
  Description of Artificial Sequence: Synthetic oligonucleotide
  Sense strand starting at position 3541 of SEQ ID NO: 1243855
aggaacguauuguuauuga

SEQ ID NO: 1446517 - RNA, 19 nt, Artificial Sequence
  Description of Artificial Sequence: Synthetic oligonucleotide
  Antisense strand to SEQ ID NO: 1446516
ucaauaacaauacguuccu

SEQ ID NO: 1446518 - RNA, 19 nt, Artificial Sequence
  Description of Artificial Sequence: Synthetic oligonucleotide
  Sense strand starting at position 3544 of SEQ ID NO: 1243855
aacguauuguuauugaaca

SEQ ID NO: 1446519 - RNA, 19 nt, Artificial Sequence
  Description of Artificial Sequence: Synthetic oligonucleotide
  Antisense strand to SEQ ID NO: 1446518
uguucaauaacaauacguu

SEQ ID NO: 1446520 - RNA, 19 nt, Artificial Sequence
  Description of Artificial Sequence: Synthetic oligonucleotide
  Sense strand starting at position 3598 of SEQ ID NO: 1243855
auuacagcucuauaacguu

SEQ ID NO: 1446521 - RNA, 19 nt, Artificial Sequence
  Description of Artificial Sequence: Synthetic oligonucleotide
  Antisense strand to SEQ ID NO: 1446520
aacguuauagagcuguaau

SEQ ID NO: 1446522 - RNA, 19 nt, Artificial Sequence
  Description of Artificial Sequence: Synthetic oligonucleotide
  Sense strand starting at position 3675 of SEQ ID NO: 1243855
ugcccacauccuggauauu

SEQ ID NO: 1446523 - RNA, 19 nt, Artificial Sequence
  Description of Artificial Sequence: Synthetic oligonucleotide
  Antisense strand to SEQ ID NO: 1446522
aauauccaggaugugggca

SEQ ID NO: 1446524 - RNA, 19 nt, Artificial Sequence
  Description of Artificial Sequence: Synthetic oligonucleotide
  Sense strand starting at position 3676 of SEQ ID NO: 1243855
gcccacauccuggauauua

SEQ ID NO: 1446525 - RNA, 19 nt, Artificial Sequence
  Description of Artificial Sequence: Synthetic oligonucleotide
  Antisense strand to SEQ ID NO: 1446524
uaauauccaggaugugggc

SEQ ID NO: 1446526 - RNA, 19 nt, Artificial Sequence
  Description of Artificial Sequence: Synthetic oligonucleotide
  Sense strand starting at position 3711 of SEQ ID NO: 1243855
gaacaaaguugaguuaccu

SEQ ID NO: 1446527 - RNA, 19 nt, Artificial Sequence
  Description of Artificial Sequence: Synthetic oligonucleotide
  Antisense strand to SEQ ID NO: 1446526
agguaacucaacuuuguuc

SEQ ID NO: 1446528 - RNA, 19 nt, Artificial Sequence
  Description of Artificial Sequence: Synthetic oligonucleotide
  Sense strand starting at position 3715 of SEQ ID NO: 1243855
aaaguugaguuaccuggaa

SEQ ID NO: 1446529 - RNA, 19 nt, Artificial Sequence
  Description of Artificial Sequence: Synthetic oligonucleotide
  Antisense strand to SEQ ID NO: 1446528
uuccagguaacucaacuuu

SEQ ID NO: 1446530 - RNA, 19 nt, Artificial Sequence
  Description of Artificial Sequence: Synthetic oligonucleotide
  Sense strand starting at position 3717 of SEQ ID NO: 1243855
aguugaguuaccuggaauc

SEQ ID NO: 1446531 - RNA, 19 nt, Artificial Sequence
  Description of Artificial Sequence: Synthetic oligonucleotide
  Antisense strand to SEQ ID NO: 1446530
gauuccagguaacucaacu

SEQ ID NO: 1446532 - RNA, 19 nt, Artificial Sequence
  Description of Artificial Sequence: Synthetic oligonucleotide
  Sense strand starting at position 109 of SEQ ID NO: 1243856
aagugagauucugcccaca

SEQ ID NO: 1446533 - RNA, 19 nt, Artificial Sequence
  Description of Artificial Sequence: Synthetic oligonucleotide
  Antisense strand to SEQ ID NO: 1446532
ugugggcagaaucucacuu

SEQ ID NO: 1446534 - RNA, 19 nt, Artificial Sequence
  Description of Artificial Sequence: Synthetic oligonucleotide
  Sense strand starting at position 111 of SEQ ID NO: 1243856
gugagauucugcccacauc

SEQ ID NO: 1446535 - RNA, 19 nt, Artificial Sequence
  Description of Artificial Sequence: Synthetic oligonucleotide
  Antisense strand to SEQ ID NO: 1446534
gaugugggcagaaucucac

SEQ ID NO: 1446536 - RNA, 19 nt, Artificial Sequence
  Description of Artificial Sequence: Synthetic oligonucleotide
  Sense strand starting at position 112 of SEQ ID NO: 1243856
ugagauucugcccacaucu

SEQ ID NO: 1446537 - RNA, 19 nt, Artificial Sequence
  Description of Artificial Sequence: Synthetic oligonucleotide
  Antisense strand to SEQ ID NO: 1446536
agaugugggcagaaucuca

SEQ ID NO: 1446538 - RNA, 19 nt, Artificial Sequence
  Description of Artificial Sequence: Synthetic oligonucleotide
  Sense strand starting at position 166 of SEQ ID NO: 1243856
guaugaaggucuccaguaa

SEQ ID NO: 1446539 - RNA, 19 nt, Artificial Sequence
  Description of Artificial Sequence: Synthetic oligonucleotide
  Antisense strand to SEQ ID NO: 1446538
uuacuggagaccuucauac

SEQ ID NO: 1446540 - RNA, 19 nt, Artificial Sequence
  Description of Artificial Sequence: Synthetic oligonucleotide
  Sense strand starting at position 270 of SEQ ID NO: 1243856
aagggauucugcucugauc

SEQ ID NO: 1446541 - RNA, 19 nt, Artificial Sequence
  Description of Artificial Sequence: Synthetic oligonucleotide
  Antisense strand to SEQ ID NO: 1446540
gaucagagcagaaucccuu

SEQ ID NO: 1446542 - RNA, 19 nt, Artificial Sequence
  Description of Artificial Sequence: Synthetic oligonucleotide
  Sense strand starting at position 272 of SEQ ID NO: 1243856
gggauucugcucugaucca

SEQ ID NO: 1446543 - RNA, 19 nt, Artificial Sequence
  Description of Artificial Sequence: Synthetic oligonucleotide
  Antisense strand to SEQ ID NO: 1446542
uggaucagagcagaauccc

SEQ ID NO: 1446544 - RNA, 19 nt, Artificial Sequence
  Description of Artificial Sequence: Synthetic oligonucleotide
  Sense strand starting at position 421 of SEQ ID NO: 1243856
ccagucuucucuguggaga

SEQ ID NO: 1446545 - RNA, 19 nt, Artificial Sequence
  Description of Artificial Sequence: Synthetic oligonucleotide
  Antisense strand to SEQ ID NO: 1446544
ucuccacagagaagacugg

SEQ ID NO: 1446546 - RNA, 19 nt, Artificial Sequence
  Description of Artificial Sequence: Synthetic oligonucleotide
  Sense strand starting at position 422 of SEQ ID NO: 1243856
cagucuucucuguggagag

SEQ ID NO: 1446547 - RNA, 19 nt, Artificial Sequence
  Description of Artificial Sequence: Synthetic oligonucleotide
  Antisense strand to SEQ ID NO: 1446546
cucuccacagagaagacug

SEQ ID NO: 1446548 - RNA, 19 nt, Artificial Sequence
  Description of Artificial Sequence: Synthetic oligonucleotide
  Sense strand starting at position 568 of SEQ ID NO: 1243856
uugagaaugcagugaauug

SEQ ID NO: 1446549 - RNA, 19 nt, Artificial Sequence
  Description of Artificial Sequence: Synthetic oligonucleotide
  Antisense strand to SEQ ID NO: 1446548
caauucacugcauucucaa

SEQ ID NO: 1446550 - RNA, 19 nt, Artificial Sequence
  Description of Artificial Sequence: Synthetic oligonucleotide
  Sense strand starting at position 569 of SEQ ID NO: 1243856
ugagaaugcagugaauugu

SEQ ID NO: 1446551 - RNA, 19 nt, Artificial Sequence
  Description of Artificial Sequence: Synthetic oligonucleotide
  Antisense strand to SEQ ID NO: 1446550
acaauucacugcauucuca

SEQ ID NO: 1446552 - RNA, 19 nt, Artificial Sequence
  Description of Artificial Sequence: Synthetic oligonucleotide
  Sense strand starting at position 635 of SEQ ID NO: 1243856
uggagaaugucuuccucag

SEQ ID NO: 1446553 - RNA, 19 nt, Artificial Sequence
  Description of Artificial Sequence: Synthetic oligonucleotide
  Antisense strand to SEQ ID NO: 1446552
cugaggaagacauucucca

SEQ ID NO: 1446554 - RNA, 19 nt, Artificial Sequence
  Description of Artificial Sequence: Synthetic oligonucleotide
  Sense strand starting at position 639 of SEQ ID NO: 1243856
gaaugucuuccucaggcau

SEQ ID NO: 1446555 - RNA, 19 nt, Artificial Sequence
  Description of Artificial Sequence: Synthetic oligonucleotide
  Antisense strand to SEQ ID NO: 1446554
augccugaggaagacauuc

SEQ ID NO: 1446556 - RNA, 19 nt, Artificial Sequence
  Description of Artificial Sequence: Synthetic oligonucleotide
  Sense strand starting at position 759 of SEQ ID NO: 1243856
cuggaaggcuccucaauaa

SEQ ID NO: 1446557 - RNA, 19 nt, Artificial Sequence
  Description of Artificial Sequence: Synthetic oligonucleotide
  Antisense strand to SEQ ID NO: 1446556
uuauugaggagccuuccag

SEQ ID NO: 1446558 - RNA, 19 nt, Artificial Sequence
  Description of Artificial Sequence: Synthetic oligonucleotide
  Sense strand starting at position 797 of SEQ ID NO: 1243856
gugguagguuuacuggaga

SEQ ID NO: 1446559 - RNA, 19 nt, Artificial Sequence
  Description of Artificial Sequence: Synthetic oligonucleotide
  Antisense strand to SEQ ID NO: 1446558
ucuccaguaaaccuaccac

SEQ ID NO: 1446560 - RNA, 19 nt, Artificial Sequence
  Description of Artificial Sequence: Synthetic oligonucleotide
  Sense strand starting at position 1041 of SEQ ID NO: 1243856
gcugcucaccuuggagaua

SEQ ID NO: 1446561 - RNA, 19 nt, Artificial Sequence
  Description of Artificial Sequence: Synthetic oligonucleotide
  Antisense strand to SEQ ID NO: 1446560
uaucuccaaggugagcagc

SEQ ID NO: 1446562 - RNA, 19 nt, Artificial Sequence
  Description of Artificial Sequence: Synthetic oligonucleotide
  Sense strand starting at position 1335 of SEQ ID NO: 1243856
uccuguccacguggaauuu

SEQ ID NO: 1446563 - RNA, 19 nt, Artificial Sequence
  Description of Artificial Sequence: Synthetic oligonucleotide
  Antisense strand to SEQ ID NO: 1446562
aaauuccacguggacagga

SEQ ID NO: 1446564 - RNA, 19 nt, Artificial Sequence
  Description of Artificial Sequence: Synthetic oligonucleotide
  Sense strand starting at position 1620 of SEQ ID NO: 1243856
cguuaugggacagguacaa

SEQ ID NO: 1446565 - RNA, 19 nt, Artificial Sequence
  Description of Artificial Sequence: Synthetic oligonucleotide
  Antisense strand to SEQ ID NO: 1446564
uuguaccugucccauaacg

SEQ ID NO: 1446566 - RNA, 19 nt, Artificial Sequence
  Description of Artificial Sequence: Synthetic oligonucleotide
  Sense strand starting at position 1704 of SEQ ID NO: 1243856
ggugcaaugacacgagguu

SEQ ID NO: 1446567 - RNA, 19 nt, Artificial Sequence
  Description of Artificial Sequence: Synthetic oligonucleotide
  Antisense strand to SEQ ID NO: 1446566
aaccucgugucauugcacc

SEQ ID NO: 1446568 - RNA, 19 nt, Artificial Sequence
  Description of Artificial Sequence: Synthetic oligonucleotide
  Sense strand starting at position 2025 of SEQ ID NO: 1243856
gucugccgcccucuuuaua

SEQ ID NO: 1446569 - RNA, 19 nt, Artificial Sequence
  Description of Artificial Sequence: Synthetic oligonucleotide
  Antisense strand to SEQ ID NO: 1446568
uauaaagagggcggcagac

SEQ ID NO: 1446570 - RNA, 19 nt, Artificial Sequence
  Description of Artificial Sequence: Synthetic oligonucleotide
  Sense strand starting at position 2304 of SEQ ID NO: 1243856
gggaauaguuaugucugga

SEQ ID NO: 1446571 - RNA, 19 nt, Artificial Sequence
  Description of Artificial Sequence: Synthetic oligonucleotide
  Antisense strand to SEQ ID NO: 1446570
uccagacauaacuauuccc

SEQ ID NO: 1446572 - RNA, 19 nt, Artificial Sequence
  Description of Artificial Sequence: Synthetic oligonucleotide
  Sense strand starting at position 2326 of SEQ ID NO: 1243856
ccgaguuuacaucggagag

SEQ ID NO: 1446573 - RNA, 19 nt, Artificial Sequence
  Description of Artificial Sequence: Synthetic oligonucleotide
  Antisense strand to SEQ ID NO: 1446572
cucuccgauguaaacucgg

SEQ ID NO: 1446574 - RNA, 19 nt, Artificial Sequence
  Description of Artificial Sequence: Synthetic oligonucleotide
  Sense strand starting at position 2327 of SEQ ID NO: 1243856
cgaguuuacaucggagaga

SEQ ID NO: 1446575 - RNA, 19 nt, Artificial Sequence
  Description of Artificial Sequence: Synthetic oligonucleotide
  Antisense strand to SEQ ID NO: 1446574
ucucuccgauguaaacucg

SEQ ID NO: 1446576 - RNA, 19 nt, Artificial Sequence
  Description of Artificial Sequence: Synthetic oligonucleotide
  Sense strand starting at position 2364 of SEQ ID NO: 1243856
uuauuuguuugcucagguu

SEQ ID NO: 1446577 - RNA, 19 nt, Artificial Sequence
  Description of Artificial Sequence: Synthetic oligonucleotide
  Antisense strand to SEQ ID NO: 1446576
aaccugagcaaacaaauaa

SEQ ID NO: 1446578 - RNA, 19 nt, Artificial Sequence
  Description of Artificial Sequence: Synthetic oligonucleotide
  Sense strand starting at position 3043 of SEQ ID NO: 1243856
ccagauuucugugugccca

SEQ ID NO: 1446579 - RNA, 19 nt, Artificial Sequence
  Description of Artificial Sequence: Synthetic oligonucleotide
  Antisense strand to SEQ ID NO: 1446578
ugggcacacagaaaucugg

SEQ ID NO: 1446580 - RNA, 19 nt, Artificial Sequence
  Description of Artificial Sequence: Synthetic oligonucleotide
  Sense strand starting at position 3070 of SEQ ID NO: 1243856
ccacgauguccggauuccu

SEQ ID NO: 1446581 - RNA, 19 nt, Artificial Sequence
  Description of Artificial Sequence: Synthetic oligonucleotide
  Antisense strand to SEQ ID NO: 1446580
aggaauccggacaucgugg

SEQ ID NO: 1446582 - RNA, 19 nt, Artificial Sequence
  Description of Artificial Sequence: Synthetic oligonucleotide
  Sense strand starting at position 3078 of SEQ ID NO: 1243856
uccggauuccuguggaaag

SEQ ID NO: 1446583 - RNA, 19 nt, Artificial Sequence
  Description of Artificial Sequence: Synthetic oligonucleotide
  Antisense strand to SEQ ID NO: 1446582
cuuuccacaggaauccgga

SEQ ID NO: 1446584 - RNA, 19 nt, Artificial Sequence
  Description of Artificial Sequence: Synthetic oligonucleotide
  Sense strand starting at position 3157 of SEQ ID NO: 1243856
acaggauauugucugugau

SEQ ID NO: 1446585 - RNA, 19 nt, Artificial Sequence
  Description of Artificial Sequence: Synthetic oligonucleotide
  Antisense strand to SEQ ID NO: 1446584
aucacagacaauauccugu

SEQ ID NO: 1446586 - RNA, 19 nt, Artificial Sequence
  Description of Artificial Sequence: Synthetic oligonucleotide
  Sense strand starting at position 3158 of SEQ ID NO: 1243856
caggauauugucugugaug

SEQ ID NO: 1446587 - RNA, 19 nt, Artificial Sequence
  Description of Artificial Sequence: Synthetic oligonucleotide
  Antisense strand to SEQ ID NO: 1446586
caucacagacaauauccug

SEQ ID NO: 1446588 - RNA, 19 nt, Artificial Sequence
  Description of Artificial Sequence: Synthetic oligonucleotide
  Sense strand starting at position 3159 of SEQ ID NO: 1243856
aggauauugucugugauga

SEQ ID NO: 1446589 - RNA, 19 nt, Artificial Sequence
  Description of Artificial Sequence: Synthetic oligonucleotide
  Antisense strand to SEQ ID NO: 1446588
ucaucacagacaauauccu

SEQ ID NO: 1446590 - RNA, 19 nt, Artificial Sequence
  Description of Artificial Sequence: Synthetic oligonucleotide
  Sense strand starting at position 3160 of SEQ ID NO: 1243856
ggauauugucugugaugag

SEQ ID NO: 1446591 - RNA, 19 nt, Artificial Sequence
  Description of Artificial Sequence: Synthetic oligonucleotide
  Antisense strand to SEQ ID NO: 1446590
cucaucacagacaauaucc

SEQ ID NO: 1446592 - RNA, 19 nt, Artificial Sequence
  Description of Artificial Sequence: Synthetic oligonucleotide
  Sense strand starting at position 3275 of SEQ ID NO: 1243856
auggaugagaucugguauc

SEQ ID NO: 1446593 - RNA, 19 nt, Artificial Sequence
  Description of Artificial Sequence: Synthetic oligonucleotide
  Antisense strand to SEQ ID NO: 1446592
gauaccagaucucauccau

SEQ ID NO: 1446594 - RNA, 19 nt, Artificial Sequence
  Description of Artificial Sequence: Synthetic oligonucleotide
  Sense strand starting at position 3282 of SEQ ID NO: 1243856
agaucugguauccguugau

SEQ ID NO: 1446595 - RNA, 19 nt, Artificial Sequence
  Description of Artificial Sequence: Synthetic oligonucleotide
  Antisense strand to SEQ ID NO: 1446594
aucaacggauaccagaucu

SEQ ID NO: 1446596 - RNA, 19 nt, Artificial Sequence
  Description of Artificial Sequence: Synthetic oligonucleotide
  Sense strand starting at position 3285 of SEQ ID NO: 1243856
ucugguauccguugauuaa

SEQ ID NO: 1446597 - RNA, 19 nt, Artificial Sequence
  Description of Artificial Sequence: Synthetic oligonucleotide
  Antisense strand to SEQ ID NO: 1446596
uuaaucaacggauaccaga

SEQ ID NO: 1446598 - RNA, 19 nt, Artificial Sequence
  Description of Artificial Sequence: Synthetic oligonucleotide
  Sense strand starting at position 3286 of SEQ ID NO: 1243856
cugguauccguugauuaaa

SEQ ID NO: 1446599 - RNA, 19 nt, Artificial Sequence
  Description of Artificial Sequence: Synthetic oligonucleotide
  Antisense strand to SEQ ID NO: 1446598
uuuaaucaacggauaccag

SEQ ID NO: 1446600 - RNA, 19 nt, Artificial Sequence
  Description of Artificial Sequence: Synthetic oligonucleotide
  Sense strand starting at position 3426 of SEQ ID NO: 1243856
gggucauacuuggccuaga

SEQ ID NO: 1446601 - RNA, 19 nt, Artificial Sequence
  Description of Artificial Sequence: Synthetic oligonucleotide
  Antisense strand to SEQ ID NO: 1446600
ucuaggccaaguaugaccc

SEQ ID NO: 1446602 - RNA, 19 nt, Artificial Sequence
  Description of Artificial Sequence: Synthetic oligonucleotide
  Sense strand starting at position 3431 of SEQ ID NO: 1243856
auacuuggccuagaccauu

SEQ ID NO: 1446603 - RNA, 19 nt, Artificial Sequence
  Description of Artificial Sequence: Synthetic oligonucleotide
  Antisense strand to SEQ ID NO: 1446602
aauggucuaggccaaguau

SEQ ID NO: 1446604 - RNA, 19 nt, Artificial Sequence
  Description of Artificial Sequence: Synthetic oligonucleotide
  Sense strand starting at position 3654 of SEQ ID NO: 1243856
uguucaggguuugcagaau

SEQ ID NO: 1446605 - RNA, 19 nt, Artificial Sequence
  Description of Artificial Sequence: Synthetic oligonucleotide
  Antisense strand to SEQ ID NO: 1446604
auucugcaaacccugaaca

SEQ ID NO: 1446606 - RNA, 19 nt, Artificial Sequence
  Description of Artificial Sequence: Synthetic oligonucleotide
  Sense strand starting at position 3722 of SEQ ID NO: 1243856
uggcuuucucaucaaguuu

SEQ ID NO: 1446607 - RNA, 19 nt, Artificial Sequence
  Description of Artificial Sequence: Synthetic oligonucleotide
  Antisense strand to SEQ ID NO: 1446606
aaacuugaugagaaagcca

SEQ ID NO: 1446608 - RNA, 19 nt, Artificial Sequence
  Description of Artificial Sequence: Synthetic oligonucleotide
  Sense strand starting at position 3900 of SEQ ID NO: 1243856
gagagcuccagcuggaaga

SEQ ID NO: 1446609 - RNA, 19 nt, Artificial Sequence
  Description of Artificial Sequence: Synthetic oligonucleotide
  Antisense strand to SEQ ID NO: 1446608
ucuuccagcuggagcucuc

SEQ ID NO: 1446610 - RNA, 19 nt, Artificial Sequence
  Description of Artificial Sequence: Synthetic oligonucleotide
  Sense strand starting at position 3966 of SEQ ID NO: 1243856
gagaucuagucugcucacu

SEQ ID NO: 1446611 - RNA, 19 nt, Artificial Sequence
  Description of Artificial Sequence: Synthetic oligonucleotide
  Antisense strand to SEQ ID NO: 1446610
agugagcagacuagaucuc

SEQ ID NO: 1446612 - RNA, 19 nt, Artificial Sequence
  Description of Artificial Sequence: Synthetic oligonucleotide
  Sense strand starting at position 151 of SEQ ID NO: 1243857
ggcucucugggagaacuuu

SEQ ID NO: 1446613 - RNA, 19 nt, Artificial Sequence
  Description of Artificial Sequence: Synthetic oligonucleotide
  Antisense strand to SEQ ID NO: 1446612
aaaguucucccagagagcc

SEQ ID NO: 1446614 - RNA, 19 nt, Artificial Sequence
  Description of Artificial Sequence: Synthetic oligonucleotide
  Sense strand starting at position 209 of SEQ ID NO: 1243857
gggagacuuuauccaguuu

SEQ ID NO: 1446615 - RNA, 19 nt, Artificial Sequence
  Description of Artificial Sequence: Synthetic oligonucleotide
  Antisense strand to SEQ ID NO: 1446614
aaacuggauaaagucuccc

SEQ ID NO: 1446616 - RNA, 19 nt, Artificial Sequence
  Description of Artificial Sequence: Synthetic oligonucleotide
  Sense strand starting at position 281 of SEQ ID NO: 1243857
aaaggucgucucggcuaga

SEQ ID NO: 1446617 - RNA, 19 nt, Artificial Sequence
  Description of Artificial Sequence: Synthetic oligonucleotide
  Antisense strand to SEQ ID NO: 1446616
ucuagccgagacgaccuuu

SEQ ID NO: 1446618 - RNA, 19 nt, Artificial Sequence
  Description of Artificial Sequence: Synthetic oligonucleotide
  Sense strand starting at position 301 of SEQ ID NO: 1243857
aggaacguuugccacagaa

SEQ ID NO: 1446619 - RNA, 19 nt, Artificial Sequence
  Description of Artificial Sequence: Synthetic oligonucleotide
  Antisense strand to SEQ ID NO: 1446618
uucuguggcaaacguuccu

SEQ ID NO: 1446620 - RNA, 19 nt, Artificial Sequence
  Description of Artificial Sequence: Synthetic oligonucleotide
  Sense strand starting at position 369 of SEQ ID NO: 1243857
uuugaaguuuggugcauuu

SEQ ID NO: 1446621 - RNA, 19 nt, Artificial Sequence
  Description of Artificial Sequence: Synthetic oligonucleotide
  Antisense strand to SEQ ID NO: 1446620
aaaugcaccaaacuucaaa

SEQ ID NO: 1446622 - RNA, 19 nt, Artificial Sequence
  Description of Artificial Sequence: Synthetic oligonucleotide
  Sense strand starting at position 382 of SEQ ID NO: 1243857
gcauuugugccgcauggca

SEQ ID NO: 1446623 - RNA, 19 nt, Artificial Sequence
  Description of Artificial Sequence: Synthetic oligonucleotide
  Antisense strand to SEQ ID NO: 1446622
ugccaugcggcacaaaugc

SEQ ID NO: 1446624 - RNA, 19 nt, Artificial Sequence
  Description of Artificial Sequence: Synthetic oligonucleotide
  Sense strand starting at position 683 of SEQ ID NO: 1243857
ggugguuucagcgagagag

SEQ ID NO: 1446625 - RNA, 19 nt, Artificial Sequence
  Description of Artificial Sequence: Synthetic oligonucleotide
  Antisense strand to SEQ ID NO: 1446624
cucucucgcugaaaccacc

SEQ ID NO: 1446626 - RNA, 19 nt, Artificial Sequence
  Description of Artificial Sequence: Synthetic oligonucleotide
  Sense strand starting at position 942 of SEQ ID NO: 1243857
ugccuuauuccaggaagug

SEQ ID NO: 1446627 - RNA, 19 nt, Artificial Sequence
  Description of Artificial Sequence: Synthetic oligonucleotide
  Antisense strand to SEQ ID NO: 1446626
cacuuccuggaauaaggca

SEQ ID NO: 1446628 - RNA, 19 nt, Artificial Sequence
  Description of Artificial Sequence: Synthetic oligonucleotide
  Sense strand starting at position 2384 of SEQ ID NO: 1243857
cccucuccguugcuuuaaa

SEQ ID NO: 1446629 - RNA, 19 nt, Artificial Sequence
  Description of Artificial Sequence: Synthetic oligonucleotide
  Antisense strand to SEQ ID NO: 1446628
uuuaaagcaacggagaggg

SEQ ID NO: 1446630 - RNA, 19 nt, Artificial Sequence
  Description of Artificial Sequence: Synthetic oligonucleotide
  Sense strand starting at position 2385 of SEQ ID NO: 1243857
ccucuccguugcuuuaaau

SEQ ID NO: 1446631 - RNA, 19 nt, Artificial Sequence
  Description of Artificial Sequence: Synthetic oligonucleotide
  Antisense strand to SEQ ID NO: 1446630
auuuaaagcaacggagagg

SEQ ID NO: 1446632 - RNA, 19 nt, Artificial Sequence
  Description of Artificial Sequence: Synthetic oligonucleotide
  Sense strand starting at position 2459 of SEQ ID NO: 1243857
gauggccgccuugaaauua

SEQ ID NO: 1446633 - RNA, 19 nt, Artificial Sequence
  Description of Artificial Sequence: Synthetic oligonucleotide
  Antisense strand to SEQ ID NO: 1446632
uaauuucaaggcggccauc

SEQ ID NO: 1446634 - RNA, 19 nt, Artificial Sequence
  Description of Artificial Sequence: Synthetic oligonucleotide
  Sense strand starting at position 2663 of SEQ ID NO: 1243857
aacugauuagugcacagau

SEQ ID NO: 1446635 - RNA, 19 nt, Artificial Sequence
  Description of Artificial Sequence: Synthetic oligonucleotide
  Antisense strand to SEQ ID NO: 1446634
aucugugcacuaaucaguu

SEQ ID NO: 1446636 - RNA, 19 nt, Artificial Sequence
  Description of Artificial Sequence: Synthetic oligonucleotide
  Sense strand starting at position 2665 of SEQ ID NO: 1243857
cugauuagugcacagauua

SEQ ID NO: 1446637 - RNA, 19 nt, Artificial Sequence
  Description of Artificial Sequence: Synthetic oligonucleotide
  Antisense strand to SEQ ID NO: 1446636
uaaucugugcacuaaucag

SEQ ID NO: 1446638 - RNA, 19 nt, Artificial Sequence
  Description of Artificial Sequence: Synthetic oligonucleotide
  Sense strand starting at position 2816 of SEQ ID NO: 1243857
gggcauuaaucaguacuca

SEQ ID NO: 1446639 - RNA, 19 nt, Artificial Sequence
  Description of Artificial Sequence: Synthetic oligonucleotide
  Antisense strand to SEQ ID NO: 1446638
ugaguacugauuaaugccc

SEQ ID NO: 1446640 - RNA, 19 nt, Artificial Sequence
  Description of Artificial Sequence: Synthetic oligonucleotide
  Sense strand starting at position 2817 of SEQ ID NO: 1243857
ggcauuaaucaguacucau

SEQ ID NO: 1446641 - RNA, 19 nt, Artificial Sequence
  Description of Artificial Sequence: Synthetic oligonucleotide
  Antisense strand to SEQ ID NO: 1446640
augaguacugauuaaugcc

SEQ ID NO: 1446642 - RNA, 19 nt, Artificial Sequence
  Description of Artificial Sequence: Synthetic oligonucleotide
  Sense strand starting at position 2838 of SEQ ID NO: 1243857
ucagucugacaucagcaua

SEQ ID NO: 1446643 - RNA, 19 nt, Artificial Sequence
  Description of Artificial Sequence: Synthetic oligonucleotide
  Antisense strand to SEQ ID NO: 1446642
uaugcugaugucagacuga

SEQ ID NO: 1446644 - RNA, 19 nt, Artificial Sequence
  Description of Artificial Sequence: Synthetic oligonucleotide
  Sense strand starting at position 2841 of SEQ ID NO: 1243857
gucugacaucagcauaaau

SEQ ID NO: 1446645 - RNA, 19 nt, Artificial Sequence
  Description of Artificial Sequence: Synthetic oligonucleotide
  Antisense strand to SEQ ID NO: 1446644
auuuaugcugaugucagac

SEQ ID NO: 1446646 - RNA, 19 nt, Artificial Sequence
  Description of Artificial Sequence: Synthetic oligonucleotide
  Sense strand starting at position 2851 of SEQ ID NO: 1243857
agcauaaauuguuaaaggu

SEQ ID NO: 1446647 - RNA, 19 nt, Artificial Sequence
  Description of Artificial Sequence: Synthetic oligonucleotide
  Antisense strand to SEQ ID NO: 1446646
accuuuaacaauuuaugcu

SEQ ID NO: 1446648 - RNA, 19 nt, Artificial Sequence
  Description of Artificial Sequence: Synthetic oligonucleotide
  Sense strand starting at position 2861 of SEQ ID NO: 1243857
guuaaagguuaacuaguua

SEQ ID NO: 1446649 - RNA, 19 nt, Artificial Sequence
  Description of Artificial Sequence: Synthetic oligonucleotide
  Antisense strand to SEQ ID NO: 1446648
uaacuaguuaaccuuuaac

SEQ ID NO: 1446650 - RNA, 19 nt, Artificial Sequence
  Description of Artificial Sequence: Synthetic oligonucleotide
  Sense strand starting at position 2865 of SEQ ID NO: 1243857
aagguuaacuaguuagaua

SEQ ID NO: 1446651 - RNA, 19 nt, Artificial Sequence
  Description of Artificial Sequence: Synthetic oligonucleotide
  Antisense strand to SEQ ID NO: 1446650
uaucuaacuaguuaaccuu

SEQ ID NO: 1446652 - RNA, 19 nt, Artificial Sequence
  Description of Artificial Sequence: Synthetic oligonucleotide
  Sense strand starting at position 2868 of SEQ ID NO: 1243857
guuaacuaguuagauacua

SEQ ID NO: 1446653 - RNA, 19 nt, Artificial Sequence
  Description of Artificial Sequence: Synthetic oligonucleotide
  Antisense strand to SEQ ID NO: 1446652
uaguaucuaacuaguuaac

SEQ ID NO: 1446654 - RNA, 19 nt, Artificial Sequence
  Description of Artificial Sequence: Synthetic oligonucleotide
  Sense strand starting at position 2876 of SEQ ID NO: 1243857
guuagauacuaguccaacu

SEQ ID NO: 1446655 - RNA, 19 nt, Artificial Sequence
  Description of Artificial Sequence: Synthetic oligonucleotide
  Antisense strand to SEQ ID NO: 1446654
aguuggacuaguaucuaac

SEQ ID NO: 1446656 - RNA, 19 nt, Artificial Sequence
  Description of Artificial Sequence: Synthetic oligonucleotide
  Sense strand starting at position 2985 of SEQ ID NO: 1243857
agggagugguuugauguga

SEQ ID NO: 1446657 - RNA, 19 nt, Artificial Sequence
  Description of Artificial Sequence: Synthetic oligonucleotide
  Antisense strand to SEQ ID NO: 1446656
ucacaucaaaccacucccu

SEQ ID NO: 1446658 - RNA, 19 nt, Artificial Sequence
  Description of Artificial Sequence: Synthetic oligonucleotide
  Sense strand starting at position 2989 of SEQ ID NO: 1243857
agugguuugaugugaaggu

SEQ ID NO: 1446659 - RNA, 19 nt, Artificial Sequence
  Description of Artificial Sequence: Synthetic oligonucleotide
  Antisense strand to SEQ ID NO: 1446658
accuucacaucaaaccacu

SEQ ID NO: 1446660 - RNA, 19 nt, Artificial Sequence
  Description of Artificial Sequence: Synthetic oligonucleotide
  Sense strand starting at position 3093 of SEQ ID NO: 1243857
caacgcauuuaauugugua

SEQ ID NO: 1446661 - RNA, 19 nt, Artificial Sequence
  Description of Artificial Sequence: Synthetic oligonucleotide
  Antisense strand to SEQ ID NO: 1446660
uacacaauuaaaugcguug

SEQ ID NO: 1446662 - RNA, 19 nt, Artificial Sequence
  Description of Artificial Sequence: Synthetic oligonucleotide
  Sense strand starting at position 3202 of SEQ ID NO: 1243857
augaauagauacgaugauu

SEQ ID NO: 1446663 - RNA, 19 nt, Artificial Sequence
  Description of Artificial Sequence: Synthetic oligonucleotide
  Antisense strand to SEQ ID NO: 1446662
aaucaucguaucuauucau

SEQ ID NO: 1446664 - RNA, 19 nt, Artificial Sequence
  Description of Artificial Sequence: Synthetic oligonucleotide
  Sense strand starting at position 3207 of SEQ ID NO: 1243857
uagauacgaugauugaguu

SEQ ID NO: 1446665 - RNA, 19 nt, Artificial Sequence
  Description of Artificial Sequence: Synthetic oligonucleotide
  Antisense strand to SEQ ID NO: 1446664
aacucaaucaucguaucua

SEQ ID NO: 1446666 - RNA, 19 nt, Artificial Sequence
  Description of Artificial Sequence: Synthetic oligonucleotide
  Sense strand starting at position 3208 of SEQ ID NO: 1243857
agauacgaugauugaguuu

SEQ ID NO: 1446667 - RNA, 19 nt, Artificial Sequence
  Description of Artificial Sequence: Synthetic oligonucleotide
  Antisense strand to SEQ ID NO: 1446666
aaacucaaucaucguaucu

SEQ ID NO: 1446668 - RNA, 19 nt, Artificial Sequence
  Description of Artificial Sequence: Synthetic oligonucleotide
  Sense strand starting at position 3337 of SEQ ID NO: 1243857
cuccaauuguuagaaugua

SEQ ID NO: 1446669 - RNA, 19 nt, Artificial Sequence
  Description of Artificial Sequence: Synthetic oligonucleotide
  Antisense strand to SEQ ID NO: 1446668
uacauucuaacaauuggag

SEQ ID NO: 1446670 - RNA, 19 nt, Artificial Sequence
  Description of Artificial Sequence: Synthetic oligonucleotide
  Sense strand starting at position 3420 of SEQ ID NO: 1243857
agagucaaaucugaagauc

SEQ ID NO: 1446671 - RNA, 19 nt, Artificial Sequence
  Description of Artificial Sequence: Synthetic oligonucleotide
  Antisense strand to SEQ ID NO: 1446670
gaucuucagauuugacucu

SEQ ID NO: 1446672 - RNA, 19 nt, Artificial Sequence
  Description of Artificial Sequence: Synthetic oligonucleotide
  Sense strand starting at position 3426 of SEQ ID NO: 1243857
aaaucugaagaucgugaaa

SEQ ID NO: 1446673 - RNA, 19 nt, Artificial Sequence
  Description of Artificial Sequence: Synthetic oligonucleotide
  Antisense strand to SEQ ID NO: 1446672
uuucacgaucuucagauuu

SEQ ID NO: 1446674 - RNA, 19 nt, Artificial Sequence
  Description of Artificial Sequence: Synthetic oligonucleotide
  Sense strand starting at position 3437 of SEQ ID NO: 1243857
ucgugaaauuauguucucu

SEQ ID NO: 1446675 - RNA, 19 nt, Artificial Sequence
  Description of Artificial Sequence: Synthetic oligonucleotide
  Antisense strand to SEQ ID NO: 1446674
agagaacauaauuucacga

SEQ ID NO: 1446676 - RNA, 19 nt, Artificial Sequence
  Description of Artificial Sequence: Synthetic oligonucleotide
  Sense strand starting at position 3439 of SEQ ID NO: 1243857
gugaaauuauguucucuuu

SEQ ID NO: 1446677 - RNA, 19 nt, Artificial Sequence
  Description of Artificial Sequence: Synthetic oligonucleotide
  Antisense strand to SEQ ID NO: 1446676
aaagagaacauaauuucac

SEQ ID NO: 1446678 - RNA, 19 nt, Artificial Sequence
  Description of Artificial Sequence: Synthetic oligonucleotide
  Sense strand starting at position 3576 of SEQ ID NO: 1243857
ggguuauacccaggcguuu

SEQ ID NO: 1446679 - RNA, 19 nt, Artificial Sequence
  Description of Artificial Sequence: Synthetic oligonucleotide
  Antisense strand to SEQ ID NO: 1446678
aaacgccuggguauaaccc

SEQ ID NO: 1446680 - RNA, 19 nt, Artificial Sequence
  Description of Artificial Sequence: Synthetic oligonucleotide
  Sense strand starting at position 3599 of SEQ ID NO: 1243857
cuaacuuucugaccuguga

SEQ ID NO: 1446681 - RNA, 19 nt, Artificial Sequence
  Description of Artificial Sequence: Synthetic oligonucleotide
  Antisense strand to SEQ ID NO: 1446680
ucacaggucagaaaguuag

SEQ ID NO: 1446682 - RNA, 19 nt, Artificial Sequence
  Description of Artificial Sequence: Synthetic oligonucleotide
  Sense strand starting at position 3765 of SEQ ID NO: 1243857
gggcaaauagcucaguucu

SEQ ID NO: 1446683 - RNA, 19 nt, Artificial Sequence
  Description of Artificial Sequence: Synthetic oligonucleotide
  Antisense strand to SEQ ID NO: 1446682
agaacugagcuauuugccc

SEQ ID NO: 1446684 - RNA, 19 nt, Artificial Sequence
  Description of Artificial Sequence: Synthetic oligonucleotide
  Sense strand starting at position 3767 of SEQ ID NO: 1243857
gcaaauagcucaguucuac

SEQ ID NO: 1446685 - RNA, 19 nt, Artificial Sequence
  Description of Artificial Sequence: Synthetic oligonucleotide
  Antisense strand to SEQ ID NO: 1446684
guagaacugagcuauuugc

SEQ ID NO: 1446686 - RNA, 19 nt, Artificial Sequence
  Description of Artificial Sequence: Synthetic oligonucleotide
  Sense strand starting at position 3895 of SEQ ID NO: 1243857
cuggguuauuccucuaccu

SEQ ID NO: 1446687 - RNA, 19 nt, Artificial Sequence
  Description of Artificial Sequence: Synthetic oligonucleotide
  Antisense strand to SEQ ID NO: 1446686
agguagaggaauaacccag

SEQ ID NO: 1446688 - RNA, 19 nt, Artificial Sequence
  Description of Artificial Sequence: Synthetic oligonucleotide
  Sense strand starting at position 3897 of SEQ ID NO: 1243857
ggguuauuccucuaccucu

SEQ ID NO: 1446689 - RNA, 19 nt, Artificial Sequence
  Description of Artificial Sequence: Synthetic oligonucleotide
  Antisense strand to SEQ ID NO: 1446688
agagguagaggaauaaccc

SEQ ID NO: 1446690 - RNA, 19 nt, Artificial Sequence
  Description of Artificial Sequence: Synthetic oligonucleotide
  Sense strand starting at position 3908 of SEQ ID NO: 1243857
cuaccucuccaguguaacu

SEQ ID NO: 1446691 - RNA, 19 nt, Artificial Sequence
  Description of Artificial Sequence: Synthetic oligonucleotide
  Antisense strand to SEQ ID NO: 1446690
aguuacacuggagagguag

SEQ ID NO: 1446692 - RNA, 19 nt, Artificial Sequence
  Description of Artificial Sequence: Synthetic oligonucleotide
  Sense strand starting at position 62 of SEQ ID NO: 1243858
gcccgucuuuaaugcagau

SEQ ID NO: 1446693 - RNA, 19 nt, Artificial Sequence
  Description of Artificial Sequence: Synthetic oligonucleotide
  Antisense strand to SEQ ID NO: 1446692
aucugcauuaaagacgggc

SEQ ID NO: 1446694 - RNA, 19 nt, Artificial Sequence
  Description of Artificial Sequence: Synthetic oligonucleotide
  Sense strand starting at position 271 of SEQ ID NO: 1243858
uccucacuguccuaagaga

SEQ ID NO: 1446695 - RNA, 19 nt, Artificial Sequence
  Description of Artificial Sequence: Synthetic oligonucleotide
  Antisense strand to SEQ ID NO: 1446694
ucucuuaggacagugagga

SEQ ID NO: 1446696 - RNA, 19 nt, Artificial Sequence
  Description of Artificial Sequence: Synthetic oligonucleotide
  Sense strand starting at position 318 of SEQ ID NO: 1243858
cuaccauugccagaaacug

SEQ ID NO: 1446697 - RNA, 19 nt, Artificial Sequence
  Description of Artificial Sequence: Synthetic oligonucleotide
  Antisense strand to SEQ ID NO: 1446696
caguuucuggcaaugguag

SEQ ID NO: 1446698 - RNA, 19 nt, Artificial Sequence
  Description of Artificial Sequence: Synthetic oligonucleotide
  Sense strand starting at position 329 of SEQ ID NO: 1243858
agaaacuguucucagcaca

SEQ ID NO: 1446699 - RNA, 19 nt, Artificial Sequence
  Description of Artificial Sequence: Synthetic oligonucleotide
  Antisense strand to SEQ ID NO: 1446698
ugugcugagaacaguuucu

SEQ ID NO: 1446700 - RNA, 19 nt, Artificial Sequence
  Description of Artificial Sequence: Synthetic oligonucleotide
  Sense strand starting at position 375 of SEQ ID NO: 1243858
acaacaauccugugauagu

SEQ ID NO: 1446701 - RNA, 19 nt, Artificial Sequence
  Description of Artificial Sequence: Synthetic oligonucleotide
  Antisense strand to SEQ ID NO: 1446700
acuaucacaggauuguugu

SEQ ID NO: 1446702 - RNA, 19 nt, Artificial Sequence
  Description of Artificial Sequence: Synthetic oligonucleotide
  Sense strand starting at position 873 of SEQ ID NO: 1243858
cuagguugcagugaaugaa

SEQ ID NO: 1446703 - RNA, 19 nt, Artificial Sequence
  Description of Artificial Sequence: Synthetic oligonucleotide
  Antisense strand to SEQ ID NO: 1446702
uucauucacugcaaccuag

SEQ ID NO: 1446704 - RNA, 19 nt, Artificial Sequence
  Description of Artificial Sequence: Synthetic oligonucleotide
  Sense strand starting at position 876 of SEQ ID NO: 1243858
gguugcagugaaugaaguu

SEQ ID NO: 1446705 - RNA, 19 nt, Artificial Sequence
  Description of Artificial Sequence: Synthetic oligonucleotide
  Antisense strand to SEQ ID NO: 1446704
aacuucauucacugcaacc

SEQ ID NO: 1446706 - RNA, 19 nt, Artificial Sequence
  Description of Artificial Sequence: Synthetic oligonucleotide
  Sense strand starting at position 877 of SEQ ID NO: 1243858
guugcagugaaugaaguua

SEQ ID NO: 1446707 - RNA, 19 nt, Artificial Sequence
  Description of Artificial Sequence: Synthetic oligonucleotide
  Antisense strand to SEQ ID NO: 1446706
uaacuucauucacugcaac

SEQ ID NO: 1446708 - RNA, 19 nt, Artificial Sequence
  Description of Artificial Sequence: Synthetic oligonucleotide
  Sense strand starting at position 897 of SEQ ID NO: 1243858
ggucccagaucccugagau

SEQ ID NO: 1446709 - RNA, 19 nt, Artificial Sequence
  Description of Artificial Sequence: Synthetic oligonucleotide
  Antisense strand to SEQ ID NO: 1446708
aucucagggaucugggacc

SEQ ID NO: 1446710 - RNA, 19 nt, Artificial Sequence
  Description of Artificial Sequence: Synthetic oligonucleotide
  Sense strand starting at position 898 of SEQ ID NO: 1243858
gucccagaucccugagaua

SEQ ID NO: 1446711 - RNA, 19 nt, Artificial Sequence
  Description of Artificial Sequence: Synthetic oligonucleotide
  Antisense strand to SEQ ID NO: 1446710
uaucucagggaucugggac

SEQ ID NO: 1446712 - RNA, 19 nt, Artificial Sequence
  Description of Artificial Sequence: Synthetic oligonucleotide
  Sense strand starting at position 1010 of SEQ ID NO: 1243858
aaauguaggucucugagaa

SEQ ID NO: 1446713 - RNA, 19 nt, Artificial Sequence
  Description of Artificial Sequence: Synthetic oligonucleotide
  Antisense strand to SEQ ID NO: 1446712
uucucagagaccuacauuu

SEQ ID NO: 1446714 - RNA, 19 nt, Artificial Sequence
  Description of Artificial Sequence: Synthetic oligonucleotide
  Sense strand starting at position 1011 of SEQ ID NO: 1243858
aauguaggucucugagaau

SEQ ID NO: 1446715 - RNA, 19 nt, Artificial Sequence
  Description of Artificial Sequence: Synthetic oligonucleotide
  Antisense strand to SEQ ID NO: 1446714
auucucagagaccuacauu

SEQ ID NO: 1446716 - RNA, 19 nt, Artificial Sequence
  Description of Artificial Sequence: Synthetic oligonucleotide
  Sense strand starting at position 1033 of SEQ ID NO: 1243858
ucucuugagccuugccaca

SEQ ID NO: 1446717 - RNA, 19 nt, Artificial Sequence
  Description of Artificial Sequence: Synthetic oligonucleotide
  Antisense strand to SEQ ID NO: 1446716
uguggcaaggcucaagaga

SEQ ID NO: 1446718 - RNA, 19 nt, Artificial Sequence
  Description of Artificial Sequence: Synthetic oligonucleotide
  Sense strand starting at position 1044 of SEQ ID NO: 1243858
uugccacagaguuaggaau

SEQ ID NO: 1446719 - RNA, 19 nt, Artificial Sequence
  Description of Artificial Sequence: Synthetic oligonucleotide
  Antisense strand to SEQ ID NO: 1446718
auuccuaacucuguggcaa

SEQ ID NO: 1446720 - RNA, 19 nt, Artificial Sequence
  Description of Artificial Sequence: Synthetic oligonucleotide
  Sense strand starting at position 1057 of SEQ ID NO: 1243858
aggaauucuugacacuuac

SEQ ID NO: 1446721 - RNA, 19 nt, Artificial Sequence
  Description of Artificial Sequence: Synthetic oligonucleotide
  Antisense strand to SEQ ID NO: 1446720
guaagugucaagaauuccu

SEQ ID NO: 1446722 - RNA, 19 nt, Artificial Sequence
  Description of Artificial Sequence: Synthetic oligonucleotide
  Sense strand starting at position 1334 of SEQ ID NO: 1243858
aacagaaaguguuucgagu

SEQ ID NO: 1446723 - RNA, 19 nt, Artificial Sequence
  Description of Artificial Sequence: Synthetic oligonucleotide
  Antisense strand to SEQ ID NO: 1446722
acucgaaacacuuucuguu

SEQ ID NO: 1446724 - RNA, 19 nt, Artificial Sequence
  Description of Artificial Sequence: Synthetic oligonucleotide
  Sense strand starting at position 1336 of SEQ ID NO: 1243858
cagaaaguguuucgaguac

SEQ ID NO: 1446725 - RNA, 19 nt, Artificial Sequence
  Description of Artificial Sequence: Synthetic oligonucleotide
  Antisense strand to SEQ ID NO: 1446724
guacucgaaacacuuucug

SEQ ID NO: 1446726 - RNA, 19 nt, Artificial Sequence
  Description of Artificial Sequence: Synthetic oligonucleotide
  Sense strand starting at position 1340 of SEQ ID NO: 1243858
aaguguuucgaguacucug

SEQ ID NO: 1446727 - RNA, 19 nt, Artificial Sequence
  Description of Artificial Sequence: Synthetic oligonucleotide
  Antisense strand to SEQ ID NO: 1446726
cagaguacucgaaacacuu

SEQ ID NO: 1446728 - RNA, 19 nt, Artificial Sequence
  Description of Artificial Sequence: Synthetic oligonucleotide
  Sense strand starting at position 1345 of SEQ ID NO: 1243858
uuucgaguacucugggaug

SEQ ID NO: 1446729 - RNA, 19 nt, Artificial Sequence
  Description of Artificial Sequence: Synthetic oligonucleotide
  Antisense strand to SEQ ID NO: 1446728
caucccagaguacucgaaa

SEQ ID NO: 1446730 - RNA, 19 nt, Artificial Sequence
  Description of Artificial Sequence: Synthetic oligonucleotide
  Sense strand starting at position 1347 of SEQ ID NO: 1243858
ucgaguacucugggaugcu

SEQ ID NO: 1446731 - RNA, 19 nt, Artificial Sequence
  Description of Artificial Sequence: Synthetic oligonucleotide
  Antisense strand to SEQ ID NO: 1446730
agcaucccagaguacucga

SEQ ID NO: 1446732 - RNA, 19 nt, Artificial Sequence
  Description of Artificial Sequence: Synthetic oligonucleotide
  Sense strand starting at position 1740 of SEQ ID NO: 1243858
ucggauaauuaccaggcau

SEQ ID NO: 1446733 - RNA, 19 nt, Artificial Sequence
  Description of Artificial Sequence: Synthetic oligonucleotide
  Antisense strand to SEQ ID NO: 1446732
augccugguaauuauccga

SEQ ID NO: 1446734 - RNA, 19 nt, Artificial Sequence
  Description of Artificial Sequence: Synthetic oligonucleotide
  Sense strand starting at position 2185 of SEQ ID NO: 1243858
agggauaggucccuggcuu

SEQ ID NO: 1446735 - RNA, 19 nt, Artificial Sequence
  Description of Artificial Sequence: Synthetic oligonucleotide
  Antisense strand to SEQ ID NO: 1446734
aagccagggaccuaucccu

SEQ ID NO: 1446736 - RNA, 19 nt, Artificial Sequence
  Description of Artificial Sequence: Synthetic oligonucleotide
  Sense strand starting at position 2186 of SEQ ID NO: 1243858
gggauaggucccuggcuuu

SEQ ID NO: 1446737 - RNA, 19 nt, Artificial Sequence
  Description of Artificial Sequence: Synthetic oligonucleotide
  Antisense strand to SEQ ID NO: 1446736
aaagccagggaccuauccc

SEQ ID NO: 1446738 - RNA, 19 nt, Artificial Sequence
  Description of Artificial Sequence: Synthetic oligonucleotide
  Sense strand starting at position 2209 of SEQ ID NO: 1243858
ccagaugucucugccagag

SEQ ID NO: 1446739 - RNA, 19 nt, Artificial Sequence
  Description of Artificial Sequence: Synthetic oligonucleotide
  Antisense strand to SEQ ID NO: 1446738
cucuggcagagacaucugg

SEQ ID NO: 1446740 - RNA, 19 nt, Artificial Sequence
  Description of Artificial Sequence: Synthetic oligonucleotide
  Sense strand starting at position 2211 of SEQ ID NO: 1243858
agaugucucugccagagga

SEQ ID NO: 1446741 - RNA, 19 nt, Artificial Sequence
  Description of Artificial Sequence: Synthetic oligonucleotide
  Antisense strand to SEQ ID NO: 1446740
uccucuggcagagacaucu

SEQ ID NO: 1446742 - RNA, 19 nt, Artificial Sequence
  Description of Artificial Sequence: Synthetic oligonucleotide
  Sense strand starting at position 2245 of SEQ ID NO: 1243858
cccauuaucugugaaggug

SEQ ID NO: 1446743 - RNA, 19 nt, Artificial Sequence
  Description of Artificial Sequence: Synthetic oligonucleotide
  Antisense strand to SEQ ID NO: 1446742
caccuucacagauaauggg

SEQ ID NO: 1446744 - RNA, 19 nt, Artificial Sequence
  Description of Artificial Sequence: Synthetic oligonucleotide
  Sense strand starting at position 2392 of SEQ ID NO: 1243858
gccagaccugucuaguaca

SEQ ID NO: 1446745 - RNA, 19 nt, Artificial Sequence
  Description of Artificial Sequence: Synthetic oligonucleotide
  Antisense strand to SEQ ID NO: 1446744
uguacuagacaggucuggc

SEQ ID NO: 1446746 - RNA, 19 nt, Artificial Sequence
  Description of Artificial Sequence: Synthetic oligonucleotide
  Sense strand starting at position 2761 of SEQ ID NO: 1243858
gggacuucgguugacuuga

SEQ ID NO: 1446747 - RNA, 19 nt, Artificial Sequence
  Description of Artificial Sequence: Synthetic oligonucleotide
  Antisense strand to SEQ ID NO: 1446746
ucaagucaaccgaaguccc

SEQ ID NO: 1446748 - RNA, 19 nt, Artificial Sequence
  Description of Artificial Sequence: Synthetic oligonucleotide
  Sense strand starting at position 2906 of SEQ ID NO: 1243858
gcgggagguucccgaacuu

SEQ ID NO: 1446749 - RNA, 19 nt, Artificial Sequence
  Description of Artificial Sequence: Synthetic oligonucleotide
  Antisense strand to SEQ ID NO: 1446748
aaguucgggaaccucccgc

SEQ ID NO: 1446750 - RNA, 19 nt, Artificial Sequence
  Description of Artificial Sequence: Synthetic oligonucleotide
  Sense strand starting at position 3144 of SEQ ID NO: 1243858
gggaggagucucggccgaa

SEQ ID NO: 1446751 - RNA, 19 nt, Artificial Sequence
  Description of Artificial Sequence: Synthetic oligonucleotide
  Antisense strand to SEQ ID NO: 1446750
uucggccgagacuccuccc

SEQ ID NO: 1446752 - RNA, 19 nt, Artificial Sequence
  Description of Artificial Sequence: Synthetic oligonucleotide
  Sense strand starting at position 3145 of SEQ ID NO: 1243858
ggaggagucucggccgaag

SEQ ID NO: 1446753 - RNA, 19 nt, Artificial Sequence
  Description of Artificial Sequence: Synthetic oligonucleotide
  Antisense strand to SEQ ID NO: 1446752
cuucggccgagacuccucc

SEQ ID NO: 1446754 - RNA, 19 nt, Artificial Sequence
  Description of Artificial Sequence: Synthetic oligonucleotide
  Sense strand starting at position 3267 of SEQ ID NO: 1243858
ccauaauaggucugcugca

SEQ ID NO: 1446755 - RNA, 19 nt, Artificial Sequence
  Description of Artificial Sequence: Synthetic oligonucleotide
  Antisense strand to SEQ ID NO: 1446754
ugcagcagaccuauuaugg

SEQ ID NO: 1446756 - RNA, 19 nt, Artificial Sequence
  Description of Artificial Sequence: Synthetic oligonucleotide
  Sense strand starting at position 3562 of SEQ ID NO: 1243858
ggucuugaguaagaaugua

SEQ ID NO: 1446757 - RNA, 19 nt, Artificial Sequence
  Description of Artificial Sequence: Synthetic oligonucleotide
  Antisense strand to SEQ ID NO: 1446756
uacauucuuacucaagacc

SEQ ID NO: 1446758 - RNA, 19 nt, Artificial Sequence
  Description of Artificial Sequence: Synthetic oligonucleotide
  Sense strand starting at position 3624 of SEQ ID NO: 1243858
ggaaaucucuccugugcac

SEQ ID NO: 1446759 - RNA, 19 nt, Artificial Sequence
  Description of Artificial Sequence: Synthetic oligonucleotide
  Antisense strand to SEQ ID NO: 1446758
gugcacaggagagauuucc

SEQ ID NO: 1446760 - RNA, 19 nt, Artificial Sequence
  Description of Artificial Sequence: Synthetic oligonucleotide
  Sense strand starting at position 3729 of SEQ ID NO: 1243858
agaaauaaugagugugcua

SEQ ID NO: 1446761 - RNA, 19 nt, Artificial Sequence
  Description of Artificial Sequence: Synthetic oligonucleotide
  Antisense strand to SEQ ID NO: 1446760
uagcacacucauuauuucu

SEQ ID NO: 1446762 - RNA, 19 nt, Artificial Sequence
  Description of Artificial Sequence: Synthetic oligonucleotide
  Sense strand starting at position 3731 of SEQ ID NO: 1243858
aaauaaugagugugcuaaa

SEQ ID NO: 1446763 - RNA, 19 nt, Artificial Sequence
  Description of Artificial Sequence: Synthetic oligonucleotide
  Antisense strand to SEQ ID NO: 1446762
uuuagcacacucauuauuu

SEQ ID NO: 1446764 - RNA, 19 nt, Artificial Sequence
  Description of Artificial Sequence: Synthetic oligonucleotide
  Sense strand starting at position 3792 of SEQ ID NO: 1243858
guguaucugggucacucau

SEQ ID NO: 1446765 - RNA, 19 nt, Artificial Sequence
  Description of Artificial Sequence: Synthetic oligonucleotide
  Antisense strand to SEQ ID NO: 1446764
augagugacccagauacac

SEQ ID NO: 1446766 - RNA, 19 nt, Artificial Sequence
  Description of Artificial Sequence: Synthetic oligonucleotide
  Sense strand starting at position 3800 of SEQ ID NO: 1243858
gggucacucauucgacuug

SEQ ID NO: 1446767 - RNA, 19 nt, Artificial Sequence
  Description of Artificial Sequence: Synthetic oligonucleotide
  Antisense strand to SEQ ID NO: 1446766
caagucgaaugagugaccc

SEQ ID NO: 1446768 - RNA, 19 nt, Artificial Sequence
  Description of Artificial Sequence: Synthetic oligonucleotide
  Sense strand starting at position 3901 of SEQ ID NO: 1243858
ugacgucucuucuggucua

SEQ ID NO: 1446769 - RNA, 19 nt, Artificial Sequence
  Description of Artificial Sequence: Synthetic oligonucleotide
  Antisense strand to SEQ ID NO: 1446768
uagaccagaagagacguca

SEQ ID NO: 1446770 - RNA, 19 nt, Artificial Sequence
  Description of Artificial Sequence: Synthetic oligonucleotide
  Sense strand starting at position 3902 of SEQ ID NO: 1243858
gacgucucuucuggucuau

SEQ ID NO: 1446771 - RNA, 19 nt, Artificial Sequence
  Description of Artificial Sequence: Synthetic oligonucleotide
  Antisense strand to SEQ ID NO: 1446770
auagaccagaagagacguc

SEQ ID NO: 1446772 - RNA, 19 nt, Artificial Sequence
  Description of Artificial Sequence: Synthetic oligonucleotide
  Sense strand starting at position 111 of SEQ ID NO: 1243859
aucugugugccgucccaga

SEQ ID NO: 1446773 - RNA, 19 nt, Artificial Sequence
  Description of Artificial Sequence: Synthetic oligonucleotide
  Antisense strand to SEQ ID NO: 1446772
ucugggacggcacacagau

SEQ ID NO: 1446774 - RNA, 19 nt, Artificial Sequence
  Description of Artificial Sequence: Synthetic oligonucleotide
  Sense strand starting at position 169 of SEQ ID NO: 1243859
ucuaucagguccuuaaguu

SEQ ID NO: 1446775 - RNA, 19 nt, Artificial Sequence
  Description of Artificial Sequence: Synthetic oligonucleotide
  Antisense strand to SEQ ID NO: 1446774
aacuuaaggaccugauaga

SEQ ID NO: 1446776 - RNA, 19 nt, Artificial Sequence
  Description of Artificial Sequence: Synthetic oligonucleotide
  Sense strand starting at position 170 of SEQ ID NO: 1243859
cuaucagguccuuaaguuu

SEQ ID NO: 1446777 - RNA, 19 nt, Artificial Sequence
  Description of Artificial Sequence: Synthetic oligonucleotide
  Antisense strand to SEQ ID NO: 1446776
aaacuuaaggaccugauag

SEQ ID NO: 1446778 - RNA, 19 nt, Artificial Sequence
  Description of Artificial Sequence: Synthetic oligonucleotide
  Sense strand starting at position 232 of SEQ ID NO: 1243859
cagggauuauggccuuaag

SEQ ID NO: 1446779 - RNA, 19 nt, Artificial Sequence
  Description of Artificial Sequence: Synthetic oligonucleotide
  Antisense strand to SEQ ID NO: 1446778
cuuaaggccauaaucccug

SEQ ID NO: 1446780 - RNA, 19 nt, Artificial Sequence
  Description of Artificial Sequence: Synthetic oligonucleotide
  Sense strand starting at position 235 of SEQ ID NO: 1243859
ggauuauggccuuaaggca

SEQ ID NO: 1446781 - RNA, 19 nt, Artificial Sequence
  Description of Artificial Sequence: Synthetic oligonucleotide
  Antisense strand to SEQ ID NO: 1446780
ugccuuaaggccauaaucc

SEQ ID NO: 1446782 - RNA, 19 nt, Artificial Sequence
  Description of Artificial Sequence: Synthetic oligonucleotide
  Sense strand starting at position 260 of SEQ ID NO: 1243859
ugaggagaauuagcucagu

SEQ ID NO: 1446783 - RNA, 19 nt, Artificial Sequence
  Description of Artificial Sequence: Synthetic oligonucleotide
  Antisense strand to SEQ ID NO: 1446782
acugagcuaauucuccuca

SEQ ID NO: 1446784 - RNA, 19 nt, Artificial Sequence
  Description of Artificial Sequence: Synthetic oligonucleotide
  Sense strand starting at position 283 of SEQ ID NO: 1243859
gccugugugccucuuuaag

SEQ ID NO: 1446785 - RNA, 19 nt, Artificial Sequence
  Description of Artificial Sequence: Synthetic oligonucleotide
  Antisense strand to SEQ ID NO: 1446784
cuuaaagaggcacacaggc

SEQ ID NO: 1446786 - RNA, 19 nt, Artificial Sequence
  Description of Artificial Sequence: Synthetic oligonucleotide
  Sense strand starting at position 285 of SEQ ID NO: 1243859
cugugugccucuuuaagac

SEQ ID NO: 1446787 - RNA, 19 nt, Artificial Sequence
  Description of Artificial Sequence: Synthetic oligonucleotide
  Antisense strand to SEQ ID NO: 1446786
gucuuaaagaggcacacag

SEQ ID NO: 1446788 - RNA, 19 nt, Artificial Sequence
  Description of Artificial Sequence: Synthetic oligonucleotide
  Sense strand starting at position 696 of SEQ ID NO: 1243859
aguggaaagcugugcuuga

SEQ ID NO: 1446789 - RNA, 19 nt, Artificial Sequence
  Description of Artificial Sequence: Synthetic oligonucleotide
  Antisense strand to SEQ ID NO: 1446788
ucaagcacagcuuuccacu

SEQ ID NO: 1446790 - RNA, 19 nt, Artificial Sequence
  Description of Artificial Sequence: Synthetic oligonucleotide
  Sense strand starting at position 697 of SEQ ID NO: 1243859
guggaaagcugugcuugaa

SEQ ID NO: 1446791 - RNA, 19 nt, Artificial Sequence
  Description of Artificial Sequence: Synthetic oligonucleotide
  Antisense strand to SEQ ID NO: 1446790
uucaagcacagcuuuccac

SEQ ID NO: 1446792 - RNA, 19 nt, Artificial Sequence
  Description of Artificial Sequence: Synthetic oligonucleotide
  Sense strand starting at position 700 of SEQ ID NO: 1243859
gaaagcugugcuugaagag

SEQ ID NO: 1446793 - RNA, 19 nt, Artificial Sequence
  Description of Artificial Sequence: Synthetic oligonucleotide
  Antisense strand to SEQ ID NO: 1446792
cucuucaagcacagcuuuc

SEQ ID NO: 1446794 - RNA, 19 nt, Artificial Sequence
  Description of Artificial Sequence: Synthetic oligonucleotide
  Sense strand starting at position 701 of SEQ ID NO: 1243859
aaagcugugcuugaagaga

SEQ ID NO: 1446795 - RNA, 19 nt, Artificial Sequence
  Description of Artificial Sequence: Synthetic oligonucleotide
  Antisense strand to SEQ ID NO: 1446794
ucucuucaagcacagcuuu

SEQ ID NO: 1446796 - RNA, 19 nt, Artificial Sequence
  Description of Artificial Sequence: Synthetic oligonucleotide
  Sense strand starting at position 848 of SEQ ID NO: 1243859
ccaucuucucuagggacaa

SEQ ID NO: 1446797 - RNA, 19 nt, Artificial Sequence
  Description of Artificial Sequence: Synthetic oligonucleotide
  Antisense strand to SEQ ID NO: 1446796
uugucccuagagaagaugg

SEQ ID NO: 1446798 - RNA, 19 nt, Artificial Sequence
  Description of Artificial Sequence: Synthetic oligonucleotide
  Sense strand starting at position 863 of SEQ ID NO: 1243859
acaaaugugcccguuguuu

SEQ ID NO: 1446799 - RNA, 19 nt, Artificial Sequence
  Description of Artificial Sequence: Synthetic oligonucleotide
  Antisense strand to SEQ ID NO: 1446798
aaacaacgggcacauuugu

SEQ ID NO: 1446800 - RNA, 19 nt, Artificial Sequence
  Description of Artificial Sequence: Synthetic oligonucleotide
  Sense strand starting at position 900 of SEQ ID NO: 1243859
cucagaugccaacguaaga

SEQ ID NO: 1446801 - RNA, 19 nt, Artificial Sequence
  Description of Artificial Sequence: Synthetic oligonucleotide
  Antisense strand to SEQ ID NO: 1446800
ucuuacguuggcaucugag

SEQ ID NO: 1446802 - RNA, 19 nt, Artificial Sequence
  Description of Artificial Sequence: Synthetic oligonucleotide
  Sense strand starting at position 911 of SEQ ID NO: 1243859
acguaagauucccucuuuc

SEQ ID NO: 1446803 - RNA, 19 nt, Artificial Sequence
  Description of Artificial Sequence: Synthetic oligonucleotide
  Antisense strand to SEQ ID NO: 1446802
gaaagagggaaucuuacgu

SEQ ID NO: 1446804 - RNA, 19 nt, Artificial Sequence
  Description of Artificial Sequence: Synthetic oligonucleotide
  Sense strand starting at position 1042 of SEQ ID NO: 1243859
ugacacguuuaucucguua

SEQ ID NO: 1446805 - RNA, 19 nt, Artificial Sequence
  Description of Artificial Sequence: Synthetic oligonucleotide
  Antisense strand to SEQ ID NO: 1446804
uaacgagauaaacguguca

SEQ ID NO: 1446806 - RNA, 19 nt, Artificial Sequence
  Description of Artificial Sequence: Synthetic oligonucleotide
  Sense strand starting at position 1046 of SEQ ID NO: 1243859
acguuuaucucguuacaaa

SEQ ID NO: 1446807 - RNA, 19 nt, Artificial Sequence
  Description of Artificial Sequence: Synthetic oligonucleotide
  Antisense strand to SEQ ID NO: 1446806
uuuguaacgagauaaacgu

SEQ ID NO: 1446808 - RNA, 19 nt, Artificial Sequence
  Description of Artificial Sequence: Synthetic oligonucleotide
  Sense strand starting at position 1104 of SEQ ID NO: 1243859
ggcgauuccuccuccuaca

SEQ ID NO: 1446809 - RNA, 19 nt, Artificial Sequence
  Description of Artificial Sequence: Synthetic oligonucleotide
  Antisense strand to SEQ ID NO: 1446808
uguaggaggaggaaucgcc

SEQ ID NO: 1446810 - RNA, 19 nt, Artificial Sequence
  Description of Artificial Sequence: Synthetic oligonucleotide
  Sense strand starting at position 2160 of SEQ ID NO: 1243859
cacggauaccuggauguua

SEQ ID NO: 1446811 - RNA, 19 nt, Artificial Sequence
  Description of Artificial Sequence: Synthetic oligonucleotide
  Antisense strand to SEQ ID NO: 1446810
uaacauccagguauccgug

SEQ ID NO: 1446812 - RNA, 19 nt, Artificial Sequence
  Description of Artificial Sequence: Synthetic oligonucleotide
  Sense strand starting at position 2201 of SEQ ID NO: 1243859
ggauguucuaaaugacgug

SEQ ID NO: 1446813 - RNA, 19 nt, Artificial Sequence
  Description of Artificial Sequence: Synthetic oligonucleotide
  Antisense strand to SEQ ID NO: 1446812
cacgucauuuagaacaucc

SEQ ID NO: 1446814 - RNA, 19 nt, Artificial Sequence
  Description of Artificial Sequence: Synthetic oligonucleotide
  Sense strand starting at position 2265 of SEQ ID NO: 1243859
cuccuaauuaggugggauc

SEQ ID NO: 1446815 - RNA, 19 nt, Artificial Sequence
  Description of Artificial Sequence: Synthetic oligonucleotide
  Antisense strand to SEQ ID NO: 1446814
gaucccaccuaauuaggag

SEQ ID NO: 1446816 - RNA, 19 nt, Artificial Sequence
  Description of Artificial Sequence: Synthetic oligonucleotide
  Sense strand starting at position 2320 of SEQ ID NO: 1243859
caggaaucuugugcaggaa

SEQ ID NO: 1446817 - RNA, 19 nt, Artificial Sequence
  Description of Artificial Sequence: Synthetic oligonucleotide
  Antisense strand to SEQ ID NO: 1446816
uuccugcacaagauuccug

SEQ ID NO: 1446818 - RNA, 19 nt, Artificial Sequence
  Description of Artificial Sequence: Synthetic oligonucleotide
  Sense strand starting at position 2323 of SEQ ID NO: 1243859
gaaucuugugcaggaauca

SEQ ID NO: 1446819 - RNA, 19 nt, Artificial Sequence
  Description of Artificial Sequence: Synthetic oligonucleotide
  Antisense strand to SEQ ID NO: 1446818
ugauuccugcacaagauuc

SEQ ID NO: 1446820 - RNA, 19 nt, Artificial Sequence
  Description of Artificial Sequence: Synthetic oligonucleotide
  Sense strand starting at position 2379 of SEQ ID NO: 1243859
ugaugugauauccaacguu

SEQ ID NO: 1446821 - RNA, 19 nt, Artificial Sequence
  Description of Artificial Sequence: Synthetic oligonucleotide
  Antisense strand to SEQ ID NO: 1446820
aacguuggauaucacauca

SEQ ID NO: 1446822 - RNA, 19 nt, Artificial Sequence
  Description of Artificial Sequence: Synthetic oligonucleotide
  Sense strand starting at position 2568 of SEQ ID NO: 1243859
ggcuaauguuuguuaguag

SEQ ID NO: 1446823 - RNA, 19 nt, Artificial Sequence
  Description of Artificial Sequence: Synthetic oligonucleotide
  Antisense strand to SEQ ID NO: 1446822
cuacuaacaaacauuagcc

SEQ ID NO: 1446824 - RNA, 19 nt, Artificial Sequence
  Description of Artificial Sequence: Synthetic oligonucleotide
  Sense strand starting at position 2571 of SEQ ID NO: 1243859
uaauguuuguuaguagaga

SEQ ID NO: 1446825 - RNA, 19 nt, Artificial Sequence
  Description of Artificial Sequence: Synthetic oligonucleotide
  Antisense strand to SEQ ID NO: 1446824
ucucuacuaacaaacauua

SEQ ID NO: 1446826 - RNA, 19 nt, Artificial Sequence
  Description of Artificial Sequence: Synthetic oligonucleotide
  Sense strand starting at position 2697 of SEQ ID NO: 1243859
gcccgcuuugcacuuuaaa

SEQ ID NO: 1446827 - RNA, 19 nt, Artificial Sequence
  Description of Artificial Sequence: Synthetic oligonucleotide
  Antisense strand to SEQ ID NO: 1446826
uuuaaagugcaaagcgggc

SEQ ID NO: 1446828 - RNA, 19 nt, Artificial Sequence
  Description of Artificial Sequence: Synthetic oligonucleotide
  Sense strand starting at position 2792 of SEQ ID NO: 1243859
gcucccugucuguagauca

SEQ ID NO: 1446829 - RNA, 19 nt, Artificial Sequence
  Description of Artificial Sequence: Synthetic oligonucleotide
  Antisense strand to SEQ ID NO: 1446828
ugaucuacagacagggagc

SEQ ID NO: 1446830 - RNA, 19 nt, Artificial Sequence
  Description of Artificial Sequence: Synthetic oligonucleotide
  Sense strand starting at position 2961 of SEQ ID NO: 1243859
ugaguauccugacuguggu

SEQ ID NO: 1446831 - RNA, 19 nt, Artificial Sequence
  Description of Artificial Sequence: Synthetic oligonucleotide
  Antisense strand to SEQ ID NO: 1446830
accacagucaggauacuca

SEQ ID NO: 1446832 - RNA, 19 nt, Artificial Sequence
  Description of Artificial Sequence: Synthetic oligonucleotide
  Sense strand starting at position 2962 of SEQ ID NO: 1243859
gaguauccugacugugguu

SEQ ID NO: 1446833 - RNA, 19 nt, Artificial Sequence
  Description of Artificial Sequence: Synthetic oligonucleotide
  Antisense strand to SEQ ID NO: 1446832
aaccacagucaggauacuc

SEQ ID NO: 1446834 - RNA, 19 nt, Artificial Sequence
  Description of Artificial Sequence: Synthetic oligonucleotide
  Sense strand starting at position 3205 of SEQ ID NO: 1243859
ucugauuugucucaccaag

SEQ ID NO: 1446835 - RNA, 19 nt, Artificial Sequence
  Description of Artificial Sequence: Synthetic oligonucleotide
  Antisense strand to SEQ ID NO: 1446834
cuuggugagacaaaucaga

SEQ ID NO: 1446836 - RNA, 19 nt, Artificial Sequence
  Description of Artificial Sequence: Synthetic oligonucleotide
  Sense strand starting at position 3330 of SEQ ID NO: 1243859
agaggaaggcgugauccuu

SEQ ID NO: 1446837 - RNA, 19 nt, Artificial Sequence
  Description of Artificial Sequence: Synthetic oligonucleotide
  Antisense strand to SEQ ID NO: 1446836
aaggaucacgccuuccucu

SEQ ID NO: 1446838 - RNA, 19 nt, Artificial Sequence
  Description of Artificial Sequence: Synthetic oligonucleotide
  Sense strand starting at position 3340 of SEQ ID NO: 1243859
gugauccuuggcuagggau

SEQ ID NO: 1446839 - RNA, 19 nt, Artificial Sequence
  Description of Artificial Sequence: Synthetic oligonucleotide
  Antisense strand to SEQ ID NO: 1446838
aucccuagccaaggaucac

SEQ ID NO: 1446840 - RNA, 19 nt, Artificial Sequence
  Description of Artificial Sequence: Synthetic oligonucleotide
  Sense strand starting at position 3608 of SEQ ID NO: 1243859
uggaccgugucucuacaaa

SEQ ID NO: 1446841 - RNA, 19 nt, Artificial Sequence
  Description of Artificial Sequence: Synthetic oligonucleotide
  Antisense strand to SEQ ID NO: 1446840
uuuguagagacacggucca

SEQ ID NO: 1446842 - RNA, 19 nt, Artificial Sequence
  Description of Artificial Sequence: Synthetic oligonucleotide
  Sense strand starting at position 3769 of SEQ ID NO: 1243859
gugugauacucugucucca

SEQ ID NO: 1446843 - RNA, 19 nt, Artificial Sequence
  Description of Artificial Sequence: Synthetic oligonucleotide
  Antisense strand to SEQ ID NO: 1446842
uggagacagaguaucacac

SEQ ID NO: 1446844 - RNA, 19 nt, Artificial Sequence
  Description of Artificial Sequence: Synthetic oligonucleotide
  Sense strand starting at position 3834 of SEQ ID NO: 1243859
agugucuugucauuccuga

SEQ ID NO: 1446845 - RNA, 19 nt, Artificial Sequence
  Description of Artificial Sequence: Synthetic oligonucleotide
  Antisense strand to SEQ ID NO: 1446844
ucaggaaugacaagacacu

SEQ ID NO: 1446846 - RNA, 19 nt, Artificial Sequence
  Description of Artificial Sequence: Synthetic oligonucleotide
  Sense strand starting at position 3847 of SEQ ID NO: 1243859
uccugagacgcuugaguau

SEQ ID NO: 1446847 - RNA, 19 nt, Artificial Sequence
  Description of Artificial Sequence: Synthetic oligonucleotide
  Antisense strand to SEQ ID NO: 1446846
auacucaagcgucucagga

SEQ ID NO: 1446848 - RNA, 19 nt, Artificial Sequence
  Description of Artificial Sequence: Synthetic oligonucleotide
  Sense strand starting at position 3883 of SEQ ID NO: 1243859
acaguuacuuugguaaaca

SEQ ID NO: 1446849 - RNA, 19 nt, Artificial Sequence
  Description of Artificial Sequence: Synthetic oligonucleotide
  Antisense strand to SEQ ID NO: 1446848
uguuuaccaaaguaacugu

SEQ ID NO: 1446850 - RNA, 19 nt, Artificial Sequence
  Description of Artificial Sequence: Synthetic oligonucleotide
  Sense strand starting at position 3931 of SEQ ID NO: 1243859
guggcuuugcugcuguauu

SEQ ID NO: 1446851 - RNA, 19 nt, Artificial Sequence
  Description of Artificial Sequence: Synthetic oligonucleotide
  Antisense strand to SEQ ID NO: 1446850
aauacagcagcaaagccac

SEQ ID NO: 1446852 - RNA, 19 nt, Artificial Sequence
  Description of Artificial Sequence: Synthetic oligonucleotide
  Sense strand starting at position 37 of SEQ ID NO: 1243860
ccaucauugcugcagagaa

SEQ ID NO: 1446853 - RNA, 19 nt, Artificial Sequence
  Description of Artificial Sequence: Synthetic oligonucleotide
  Antisense strand to SEQ ID NO: 1446852
uucucugcagcaaugaugg

SEQ ID NO: 1446854 - RNA, 19 nt, Artificial Sequence
  Description of Artificial Sequence: Synthetic oligonucleotide
  Sense strand starting at position 56 of SEQ ID NO: 1243860
gggaucucaucagggauca

SEQ ID NO: 1446855 - RNA, 19 nt, Artificial Sequence
  Description of Artificial Sequence: Synthetic oligonucleotide
  Antisense strand to SEQ ID NO: 1446854
ugaucccugaugagauccc

SEQ ID NO: 1446856 - RNA, 19 nt, Artificial Sequence
  Description of Artificial Sequence: Synthetic oligonucleotide
  Sense strand starting at position 129 of SEQ ID NO: 1243860
uuuggaaguucuccuacuu

SEQ ID NO: 1446857 - RNA, 19 nt, Artificial Sequence
  Description of Artificial Sequence: Synthetic oligonucleotide
  Antisense strand to SEQ ID NO: 1446856
aaguaggagaacuuccaaa

SEQ ID NO: 1446858 - RNA, 19 nt, Artificial Sequence
  Description of Artificial Sequence: Synthetic oligonucleotide
  Sense strand starting at position 245 of SEQ ID NO: 1243860
ucaguccacuccuagugaa

SEQ ID NO: 1446859 - RNA, 19 nt, Artificial Sequence
  Description of Artificial Sequence: Synthetic oligonucleotide
  Antisense strand to SEQ ID NO: 1446858
uucacuaggaguggacuga

SEQ ID NO: 1446860 - RNA, 19 nt, Artificial Sequence
  Description of Artificial Sequence: Synthetic oligonucleotide
  Sense strand starting at position 248 of SEQ ID NO: 1243860
guccacuccuagugaagca

SEQ ID NO: 1446861 - RNA, 19 nt, Artificial Sequence
  Description of Artificial Sequence: Synthetic oligonucleotide
  Antisense strand to SEQ ID NO: 1446860
ugcuucacuaggaguggac

SEQ ID NO: 1446862 - RNA, 19 nt, Artificial Sequence
  Description of Artificial Sequence: Synthetic oligonucleotide
  Sense strand starting at position 361 of SEQ ID NO: 1243860
ggcauaaacugugggucaa

SEQ ID NO: 1446863 - RNA, 19 nt, Artificial Sequence
  Description of Artificial Sequence: Synthetic oligonucleotide
  Antisense strand to SEQ ID NO: 1446862
uugacccacaguuuaugcc

SEQ ID NO: 1446864 - RNA, 19 nt, Artificial Sequence
  Description of Artificial Sequence: Synthetic oligonucleotide
  Sense strand starting at position 420 of SEQ ID NO: 1243860
ggauccacaucagcuaauu

SEQ ID NO: 1446865 - RNA, 19 nt, Artificial Sequence
  Description of Artificial Sequence: Synthetic oligonucleotide
  Antisense strand to SEQ ID NO: 1446864
aauuagcugauguggaucc

SEQ ID NO: 1446866 - RNA, 19 nt, Artificial Sequence
  Description of Artificial Sequence: Synthetic oligonucleotide
  Sense strand starting at position 528 of SEQ ID NO: 1243860
uucgcaauccuuuagugga

SEQ ID NO: 1446867 - RNA, 19 nt, Artificial Sequence
  Description of Artificial Sequence: Synthetic oligonucleotide
  Antisense strand to SEQ ID NO: 1446866
uccacuaaaggauugcgaa

SEQ ID NO: 1446868 - RNA, 19 nt, Artificial Sequence
  Description of Artificial Sequence: Synthetic oligonucleotide
  Sense strand starting at position 807 of SEQ ID NO: 1243860
ggguguaacuccuguagua

SEQ ID NO: 1446869 - RNA, 19 nt, Artificial Sequence
  Description of Artificial Sequence: Synthetic oligonucleotide
  Antisense strand to SEQ ID NO: 1446868
uacuacaggaguuacaccc

SEQ ID NO: 1446870 - RNA, 19 nt, Artificial Sequence
  Description of Artificial Sequence: Synthetic oligonucleotide
  Sense strand starting at position 809 of SEQ ID NO: 1243860
guguaacuccuguaguaaa

SEQ ID NO: 1446871 - RNA, 19 nt, Artificial Sequence
  Description of Artificial Sequence: Synthetic oligonucleotide
  Antisense strand to SEQ ID NO: 1446870
uuuacuacaggaguuacac

SEQ ID NO: 1446872 - RNA, 19 nt, Artificial Sequence
  Description of Artificial Sequence: Synthetic oligonucleotide
  Sense strand starting at position 822 of SEQ ID NO: 1243860
aguaaaguuaaguguuguu

SEQ ID NO: 1446873 - RNA, 19 nt, Artificial Sequence
  Description of Artificial Sequence: Synthetic oligonucleotide
  Antisense strand to SEQ ID NO: 1446872
aacaacacuuaacuuuacu

SEQ ID NO: 1446874 - RNA, 19 nt, Artificial Sequence
  Description of Artificial Sequence: Synthetic oligonucleotide
  Sense strand starting at position 825 of SEQ ID NO: 1243860
aaaguuaaguguuguuucu

SEQ ID NO: 1446875 - RNA, 19 nt, Artificial Sequence
  Description of Artificial Sequence: Synthetic oligonucleotide
  Antisense strand to SEQ ID NO: 1446874
agaaacaacacuuaacuuu

SEQ ID NO: 1446876 - RNA, 19 nt, Artificial Sequence
  Description of Artificial Sequence: Synthetic oligonucleotide
  Sense strand starting at position 832 of SEQ ID NO: 1243860
aguguuguuucuucgagcu

SEQ ID NO: 1446877 - RNA, 19 nt, Artificial Sequence
  Description of Artificial Sequence: Synthetic oligonucleotide
  Antisense strand to SEQ ID NO: 1446876
agcucgaagaaacaacacu

SEQ ID NO: 1446878 - RNA, 19 nt, Artificial Sequence
  Description of Artificial Sequence: Synthetic oligonucleotide
  Sense strand starting at position 834 of SEQ ID NO: 1243860
uguuguuucuucgagcuuu

SEQ ID NO: 1446879 - RNA, 19 nt, Artificial Sequence
  Description of Artificial Sequence: Synthetic oligonucleotide
  Antisense strand to SEQ ID NO: 1446878
aaagcucgaagaaacaaca

SEQ ID NO: 1446880 - RNA, 19 nt, Artificial Sequence
  Description of Artificial Sequence: Synthetic oligonucleotide
  Sense strand starting at position 863 of SEQ ID NO: 1243860
auaaacguguuaucuaaag

SEQ ID NO: 1446881 - RNA, 19 nt, Artificial Sequence
  Description of Artificial Sequence: Synthetic oligonucleotide
  Antisense strand to SEQ ID NO: 1446880
cuuuagauaacacguuuau

SEQ ID NO: 1446882 - RNA, 19 nt, Artificial Sequence
  Description of Artificial Sequence: Synthetic oligonucleotide
  Sense strand starting at position 899 of SEQ ID NO: 1243860
uucuuacugggcuggauau

SEQ ID NO: 1446883 - RNA, 19 nt, Artificial Sequence
  Description of Artificial Sequence: Synthetic oligonucleotide
  Antisense strand to SEQ ID NO: 1446882
auauccagcccaguaagaa

SEQ ID NO: 1446884 - RNA, 19 nt, Artificial Sequence
  Description of Artificial Sequence: Synthetic oligonucleotide
  Sense strand starting at position 900 of SEQ ID NO: 1243860
ucuuacugggcuggauauu

SEQ ID NO: 1446885 - RNA, 19 nt, Artificial Sequence
  Description of Artificial Sequence: Synthetic oligonucleotide
  Antisense strand to SEQ ID NO: 1446884
aauauccagcccaguaaga

SEQ ID NO: 1446886 - RNA, 19 nt, Artificial Sequence
  Description of Artificial Sequence: Synthetic oligonucleotide
  Sense strand starting at position 919 of SEQ ID NO: 1243860
caaggaaauugucaaggca

SEQ ID NO: 1446887 - RNA, 19 nt, Artificial Sequence
  Description of Artificial Sequence: Synthetic oligonucleotide
  Antisense strand to SEQ ID NO: 1446886
ugccuugacaauuuccuug

SEQ ID NO: 1446888 - RNA, 19 nt, Artificial Sequence
  Description of Artificial Sequence: Synthetic oligonucleotide
  Sense strand starting at position 922 of SEQ ID NO: 1243860
ggaaauugucaaggcagag

SEQ ID NO: 1446889 - RNA, 19 nt, Artificial Sequence
  Description of Artificial Sequence: Synthetic oligonucleotide
  Antisense strand to SEQ ID NO: 1446888
cucugccuugacaauuucc

SEQ ID NO: 1446890 - RNA, 19 nt, Artificial Sequence
  Description of Artificial Sequence: Synthetic oligonucleotide
  Sense strand starting at position 965 of SEQ ID NO: 1243860
gucuccauaccaggucuaa

SEQ ID NO: 1446891 - RNA, 19 nt, Artificial Sequence
  Description of Artificial Sequence: Synthetic oligonucleotide
  Antisense strand to SEQ ID NO: 1446890
uuagaccugguauggagac

SEQ ID NO: 1446892 - RNA, 19 nt, Artificial Sequence
  Description of Artificial Sequence: Synthetic oligonucleotide
  Sense strand starting at position 1006 of SEQ ID NO: 1243860
ucauccuucucguucuaga

SEQ ID NO: 1446893 - RNA, 19 nt, Artificial Sequence
  Description of Artificial Sequence: Synthetic oligonucleotide
  Antisense strand to SEQ ID NO: 1446892
ucuagaacgagaaggauga

SEQ ID NO: 1446894 - RNA, 19 nt, Artificial Sequence
  Description of Artificial Sequence: Synthetic oligonucleotide
  Sense strand starting at position 1154 of SEQ ID NO: 1243860
ccagaagcggcguuaguuu

SEQ ID NO: 1446895 - RNA, 19 nt, Artificial Sequence
  Description of Artificial Sequence: Synthetic oligonucleotide
  Antisense strand to SEQ ID NO: 1446894
aaacuaacgccgcuucugg

SEQ ID NO: 1446896 - RNA, 19 nt, Artificial Sequence
  Description of Artificial Sequence: Synthetic oligonucleotide
  Sense strand starting at position 1436 of SEQ ID NO: 1243860
acuuuaagguccgaucaca

SEQ ID NO: 1446897 - RNA, 19 nt, Artificial Sequence
  Description of Artificial Sequence: Synthetic oligonucleotide
  Antisense strand to SEQ ID NO: 1446896
ugugaucggaccuuaaagu

SEQ ID NO: 1446898 - RNA, 19 nt, Artificial Sequence
  Description of Artificial Sequence: Synthetic oligonucleotide
  Sense strand starting at position 1514 of SEQ ID NO: 1243860
cuuguccauuggucugauu

SEQ ID NO: 1446899 - RNA, 19 nt, Artificial Sequence
  Description of Artificial Sequence: Synthetic oligonucleotide
  Antisense strand to SEQ ID NO: 1446898
aaucagaccaauggacaag

SEQ ID NO: 1446900 - RNA, 19 nt, Artificial Sequence
  Description of Artificial Sequence: Synthetic oligonucleotide
  Sense strand starting at position 1516 of SEQ ID NO: 1243860
uguccauuggucugauuuc

SEQ ID NO: 1446901 - RNA, 19 nt, Artificial Sequence
  Description of Artificial Sequence: Synthetic oligonucleotide
  Antisense strand to SEQ ID NO: 1446900
gaaaucagaccaauggaca

SEQ ID NO: 1446902 - RNA, 19 nt, Artificial Sequence
  Description of Artificial Sequence: Synthetic oligonucleotide
  Sense strand starting at position 1523 of SEQ ID NO: 1243860
uggucugauuucgauccaa

SEQ ID NO: 1446903 - RNA, 19 nt, Artificial Sequence
  Description of Artificial Sequence: Synthetic oligonucleotide
  Antisense strand to SEQ ID NO: 1446902
uuggaucgaaaucagacca

SEQ ID NO: 1446904 - RNA, 19 nt, Artificial Sequence
  Description of Artificial Sequence: Synthetic oligonucleotide
  Sense strand starting at position 2154 of SEQ ID NO: 1243860
aguuguauaaaucgucuuu

SEQ ID NO: 1446905 - RNA, 19 nt, Artificial Sequence
  Description of Artificial Sequence: Synthetic oligonucleotide
  Antisense strand to SEQ ID NO: 1446904
aaagacgauuuauacaacu

SEQ ID NO: 1446906 - RNA, 19 nt, Artificial Sequence
  Description of Artificial Sequence: Synthetic oligonucleotide
  Sense strand starting at position 1846 of SEQ ID NO: 1243861
gugucuaagucuccaucuu

SEQ ID NO: 1446907 - RNA, 19 nt, Artificial Sequence
  Description of Artificial Sequence: Synthetic oligonucleotide
  Antisense strand to SEQ ID NO: 1446906
aagauggagacuuagacac

SEQ ID NO: 1446908 - RNA, 19 nt, Artificial Sequence
  Description of Artificial Sequence: Synthetic oligonucleotide
  Sense strand starting at position 1997 of SEQ ID NO: 1243861
cgugguucucaggguuauu

SEQ ID NO: 1446909 - RNA, 19 nt, Artificial Sequence
  Description of Artificial Sequence: Synthetic oligonucleotide
  Antisense strand to SEQ ID NO: 1446908
aauaacccugagaaccacg

SEQ ID NO: 1446910 - RNA, 19 nt, Artificial Sequence
  Description of Artificial Sequence: Synthetic oligonucleotide
  Sense strand starting at position 2074 of SEQ ID NO: 1243861
guguuaguuccgggcuguu

SEQ ID NO: 1446911 - RNA, 19 nt, Artificial Sequence
  Description of Artificial Sequence: Synthetic oligonucleotide
  Antisense strand to SEQ ID NO: 1446910
aacagcccggaacuaacac

SEQ ID NO: 1446912 - RNA, 19 nt, Artificial Sequence
  Description of Artificial Sequence: Synthetic oligonucleotide
  Sense strand starting at position 2207 of SEQ ID NO: 1243861
gcguccuuugccugguauu

SEQ ID NO: 1446913 - RNA, 19 nt, Artificial Sequence
  Description of Artificial Sequence: Synthetic oligonucleotide
  Antisense strand to SEQ ID NO: 1446912
aauaccaggcaaaggacgc

SEQ ID NO: 1446914 - RNA, 19 nt, Artificial Sequence
  Description of Artificial Sequence: Synthetic oligonucleotide
  Sense strand starting at position 2208 of SEQ ID NO: 1243861
cguccuuugccugguauuu

SEQ ID NO: 1446915 - RNA, 19 nt, Artificial Sequence
  Description of Artificial Sequence: Synthetic oligonucleotide
  Antisense strand to SEQ ID NO: 1446914
aaauaccaggcaaaggacg

SEQ ID NO: 1446916 - RNA, 19 nt, Artificial Sequence
  Description of Artificial Sequence: Synthetic oligonucleotide
  Sense strand starting at position 2251 of SEQ ID NO: 1243861
gggcgucuccugagaggca

SEQ ID NO: 1446917 - RNA, 19 nt, Artificial Sequence
  Description of Artificial Sequence: Synthetic oligonucleotide
  Antisense strand to SEQ ID NO: 1446916
ugccucucaggagacgccc

SEQ ID NO: 1446918 - RNA, 19 nt, Artificial Sequence
  Description of Artificial Sequence: Synthetic oligonucleotide
  Sense strand starting at position 2323 of SEQ ID NO: 1243861
acuguuguccuuugaguaa

SEQ ID NO: 1446919 - RNA, 19 nt, Artificial Sequence
  Description of Artificial Sequence: Synthetic oligonucleotide
  Antisense strand to SEQ ID NO: 1446918
uuacucaaaggacaacagu

SEQ ID NO: 1446920 - RNA, 19 nt, Artificial Sequence
  Description of Artificial Sequence: Synthetic oligonucleotide
  Sense strand starting at position 2352 of SEQ ID NO: 1243861
guaggugacccugacugau

SEQ ID NO: 1446921 - RNA, 19 nt, Artificial Sequence
  Description of Artificial Sequence: Synthetic oligonucleotide
  Antisense strand to SEQ ID NO: 1446920
aucagucagggucaccuac

SEQ ID NO: 1446922 - RNA, 19 nt, Artificial Sequence
  Description of Artificial Sequence: Synthetic oligonucleotide
  Sense strand starting at position 2355 of SEQ ID NO: 1243861
ggugacccugacugaugaa

SEQ ID NO: 1446923 - RNA, 19 nt, Artificial Sequence
  Description of Artificial Sequence: Synthetic oligonucleotide
  Antisense strand to SEQ ID NO: 1446922
uucaucagucagggucacc

SEQ ID NO: 1446924 - RNA, 19 nt, Artificial Sequence
  Description of Artificial Sequence: Synthetic oligonucleotide
  Sense strand starting at position 2526 of SEQ ID NO: 1243861
ggauuagcccugcgguaca

SEQ ID NO: 1446925 - RNA, 19 nt, Artificial Sequence
  Description of Artificial Sequence: Synthetic oligonucleotide
  Antisense strand to SEQ ID NO: 1446924
uguaccgcagggcuaaucc

SEQ ID NO: 1446926 - RNA, 19 nt, Artificial Sequence
  Description of Artificial Sequence: Synthetic oligonucleotide
  Sense strand starting at position 2638 of SEQ ID NO: 1243861
gagacuuguuucuccuugu

SEQ ID NO: 1446927 - RNA, 19 nt, Artificial Sequence
  Description of Artificial Sequence: Synthetic oligonucleotide
  Antisense strand to SEQ ID NO: 1446926
acaaggagaaacaagucuc

SEQ ID NO: 1446928 - RNA, 19 nt, Artificial Sequence
  Description of Artificial Sequence: Synthetic oligonucleotide
  Sense strand starting at position 2641 of SEQ ID NO: 1243861
acuuguuucuccuugucua

SEQ ID NO: 1446929 - RNA, 19 nt, Artificial Sequence
  Description of Artificial Sequence: Synthetic oligonucleotide
  Antisense strand to SEQ ID NO: 1446928
uagacaaggagaaacaagu

SEQ ID NO: 1446930 - RNA, 19 nt, Artificial Sequence
  Description of Artificial Sequence: Synthetic oligonucleotide
  Sense strand starting at position 2642 of SEQ ID NO: 1243861
cuuguuucuccuugucuau

SEQ ID NO: 1446931 - RNA, 19 nt, Artificial Sequence
  Description of Artificial Sequence: Synthetic oligonucleotide
  Antisense strand to SEQ ID NO: 1446930
auagacaaggagaaacaag

SEQ ID NO: 1446932 - RNA, 19 nt, Artificial Sequence
  Description of Artificial Sequence: Synthetic oligonucleotide
  Sense strand starting at position 2668 of SEQ ID NO: 1243861
gccaccuuguggucacaga

SEQ ID NO: 1446933 - RNA, 19 nt, Artificial Sequence
  Description of Artificial Sequence: Synthetic oligonucleotide
  Antisense strand to SEQ ID NO: 1446932
ucugugaccacaagguggc

SEQ ID NO: 1446934 - RNA, 19 nt, Artificial Sequence
  Description of Artificial Sequence: Synthetic oligonucleotide
  Sense strand starting at position 2669 of SEQ ID NO: 1243861
ccaccuuguggucacagau

SEQ ID NO: 1446935 - RNA, 19 nt, Artificial Sequence
  Description of Artificial Sequence: Synthetic oligonucleotide
  Antisense strand to SEQ ID NO: 1446934
aucugugaccacaaggugg

SEQ ID NO: 1446936 - RNA, 19 nt, Artificial Sequence
  Description of Artificial Sequence: Synthetic oligonucleotide
  Sense strand starting at position 2675 of SEQ ID NO: 1243861
uguggucacagaugauagu

SEQ ID NO: 1446937 - RNA, 19 nt, Artificial Sequence
  Description of Artificial Sequence: Synthetic oligonucleotide
  Antisense strand to SEQ ID NO: 1446936
acuaucaucugugaccaca

SEQ ID NO: 1446938 - RNA, 19 nt, Artificial Sequence
  Description of Artificial Sequence: Synthetic oligonucleotide
  Sense strand starting at position 2676 of SEQ ID NO: 1243861
guggucacagaugauagua

SEQ ID NO: 1446939 - RNA, 19 nt, Artificial Sequence
  Description of Artificial Sequence: Synthetic oligonucleotide
  Antisense strand to SEQ ID NO: 1446938
uacuaucaucugugaccac

SEQ ID NO: 1446940 - RNA, 19 nt, Artificial Sequence
  Description of Artificial Sequence: Synthetic oligonucleotide
  Sense strand starting at position 3351 of SEQ ID NO: 1243861
ucagauuccuaggcuccau

SEQ ID NO: 1446941 - RNA, 19 nt, Artificial Sequence
  Description of Artificial Sequence: Synthetic oligonucleotide
  Antisense strand to SEQ ID NO: 1446940
auggagccuaggaaucuga

SEQ ID NO: 1446942 - RNA, 19 nt, Artificial Sequence
  Description of Artificial Sequence: Synthetic oligonucleotide
  Sense strand starting at position 3363 of SEQ ID NO: 1243861
gcuccauucccagagaauu

SEQ ID NO: 1446943 - RNA, 19 nt, Artificial Sequence
  Description of Artificial Sequence: Synthetic oligonucleotide
  Antisense strand to SEQ ID NO: 1446942
aauucucugggaauggagc

SEQ ID NO: 1446944 - RNA, 19 nt, Artificial Sequence
  Description of Artificial Sequence: Synthetic oligonucleotide
  Sense strand starting at position 3371 of SEQ ID NO: 1243861
cccagagaauuaugauuuc

SEQ ID NO: 1446945 - RNA, 19 nt, Artificial Sequence
  Description of Artificial Sequence: Synthetic oligonucleotide
  Antisense strand to SEQ ID NO: 1446944
gaaaucauaauucucuggg

SEQ ID NO: 1446946 - RNA, 19 nt, Artificial Sequence
  Description of Artificial Sequence: Synthetic oligonucleotide
  Sense strand starting at position 3377 of SEQ ID NO: 1243861
gaauuaugauuucgggacu

SEQ ID NO: 1446947 - RNA, 19 nt, Artificial Sequence
  Description of Artificial Sequence: Synthetic oligonucleotide
  Antisense strand to SEQ ID NO: 1446946
agucccgaaaucauaauuc

SEQ ID NO: 1446948 - RNA, 19 nt, Artificial Sequence
  Description of Artificial Sequence: Synthetic oligonucleotide
  Sense strand starting at position 3378 of SEQ ID NO: 1243861
aauuaugauuucgggacua

SEQ ID NO: 1446949 - RNA, 19 nt, Artificial Sequence
  Description of Artificial Sequence: Synthetic oligonucleotide
  Antisense strand to SEQ ID NO: 1446948
uagucccgaaaucauaauu

SEQ ID NO: 1446950 - RNA, 19 nt, Artificial Sequence
  Description of Artificial Sequence: Synthetic oligonucleotide
  Sense strand starting at position 3399 of SEQ ID NO: 1243861
gugccaggaaucuguauuu

SEQ ID NO: 1446951 - RNA, 19 nt, Artificial Sequence
  Description of Artificial Sequence: Synthetic oligonucleotide
  Antisense strand to SEQ ID NO: 1446950
aaauacagauuccuggcac

SEQ ID NO: 1446952 - RNA, 19 nt, Artificial Sequence
  Description of Artificial Sequence: Synthetic oligonucleotide
  Sense strand starting at position 3517 of SEQ ID NO: 1243861
ugaucacuguccugaauac

SEQ ID NO: 1446953 - RNA, 19 nt, Artificial Sequence
  Description of Artificial Sequence: Synthetic oligonucleotide
  Antisense strand to SEQ ID NO: 1446952
guauucaggacagugauca

SEQ ID NO: 1446954 - RNA, 19 nt, Artificial Sequence
  Description of Artificial Sequence: Synthetic oligonucleotide
  Sense strand starting at position 3570 of SEQ ID NO: 1243861
acacaaguagauuggcaau

SEQ ID NO: 1446955 - RNA, 19 nt, Artificial Sequence
  Description of Artificial Sequence: Synthetic oligonucleotide
  Antisense strand to SEQ ID NO: 1446954
auugccaaucuacuugugu

SEQ ID NO: 1446956 - RNA, 19 nt, Artificial Sequence
  Description of Artificial Sequence: Synthetic oligonucleotide
  Sense strand starting at position 3572 of SEQ ID NO: 1243861
acaaguagauuggcaauaa

SEQ ID NO: 1446957 - RNA, 19 nt, Artificial Sequence
  Description of Artificial Sequence: Synthetic oligonucleotide
  Antisense strand to SEQ ID NO: 1446956
uuauugccaaucuacuugu

SEQ ID NO: 1446958 - RNA, 19 nt, Artificial Sequence
  Description of Artificial Sequence: Synthetic oligonucleotide
  Sense strand starting at position 3576 of SEQ ID NO: 1243861
guagauuggcaauaaugca

SEQ ID NO: 1446959 - RNA, 19 nt, Artificial Sequence
  Description of Artificial Sequence: Synthetic oligonucleotide
  Antisense strand to SEQ ID NO: 1446958
ugcauuauugccaaucuac

SEQ ID NO: 1446960 - RNA, 19 nt, Artificial Sequence
  Description of Artificial Sequence: Synthetic oligonucleotide
  Sense strand starting at position 3583 of SEQ ID NO: 1243861
ggcaauaaugcaugagacu

SEQ ID NO: 1446961 - RNA, 19 nt, Artificial Sequence
  Description of Artificial Sequence: Synthetic oligonucleotide
  Antisense strand to SEQ ID NO: 1446960
agucucaugcauuauugcc

SEQ ID NO: 1446962 - RNA, 19 nt, Artificial Sequence
  Description of Artificial Sequence: Synthetic oligonucleotide
  Sense strand starting at position 3584 of SEQ ID NO: 1243861
gcaauaaugcaugagacuu

SEQ ID NO: 1446963 - RNA, 19 nt, Artificial Sequence
  Description of Artificial Sequence: Synthetic oligonucleotide
  Antisense strand to SEQ ID NO: 1446962
aagucucaugcauuauugc

SEQ ID NO: 1446964 - RNA, 19 nt, Artificial Sequence
  Description of Artificial Sequence: Synthetic oligonucleotide
  Sense strand starting at position 3592 of SEQ ID NO: 1243861
gcaugagacuuaucaauca

SEQ ID NO: 1446965 - RNA, 19 nt, Artificial Sequence
  Description of Artificial Sequence: Synthetic oligonucleotide
  Antisense strand to SEQ ID NO: 1446964
ugauugauaagucucaugc

SEQ ID NO: 1446966 - RNA, 19 nt, Artificial Sequence
  Description of Artificial Sequence: Synthetic oligonucleotide
  Sense strand starting at position 3622 of SEQ ID NO: 1243861
cucgcacaccuguguuuau

SEQ ID NO: 1446967 - RNA, 19 nt, Artificial Sequence
  Description of Artificial Sequence: Synthetic oligonucleotide
  Antisense strand to SEQ ID NO: 1446966
auaaacacaggugugcgag

SEQ ID NO: 1446968 - RNA, 19 nt, Artificial Sequence
  Description of Artificial Sequence: Synthetic oligonucleotide
  Sense strand starting at position 3623 of SEQ ID NO: 1243861
ucgcacaccuguguuuauu

SEQ ID NO: 1446969 - RNA, 19 nt, Artificial Sequence
  Description of Artificial Sequence: Synthetic oligonucleotide
  Antisense strand to SEQ ID NO: 1446968
aauaaacacaggugugcga

SEQ ID NO: 1446970 - RNA, 19 nt, Artificial Sequence
  Description of Artificial Sequence: Synthetic oligonucleotide
  Sense strand starting at position 3694 of SEQ ID NO: 1243861
accuaugagguaggucaua

SEQ ID NO: 1446971 - RNA, 19 nt, Artificial Sequence
  Description of Artificial Sequence: Synthetic oligonucleotide
  Antisense strand to SEQ ID NO: 1446970
uaugaccuaccucauaggu

SEQ ID NO: 1446972 - RNA, 19 nt, Artificial Sequence
  Description of Artificial Sequence: Synthetic oligonucleotide
  Sense strand starting at position 3699 of SEQ ID NO: 1243861
ugagguaggucauaaucac

SEQ ID NO: 1446973 - RNA, 19 nt, Artificial Sequence
  Description of Artificial Sequence: Synthetic oligonucleotide
  Antisense strand to SEQ ID NO: 1446972
gugauuaugaccuaccuca

SEQ ID NO: 1446974 - RNA, 19 nt, Artificial Sequence
  Description of Artificial Sequence: Synthetic oligonucleotide
  Sense strand starting at position 3748 of SEQ ID NO: 1243861
aacagaguguccuccuagu

SEQ ID NO: 1446975 - RNA, 19 nt, Artificial Sequence
  Description of Artificial Sequence: Synthetic oligonucleotide
  Antisense strand to SEQ ID NO: 1446974
acuaggaggacacucuguu

SEQ ID NO: 1446976 - RNA, 19 nt, Artificial Sequence
  Description of Artificial Sequence: Synthetic oligonucleotide
  Sense strand starting at position 3892 of SEQ ID NO: 1243861
uggacuaagucucaaaucu

SEQ ID NO: 1446977 - RNA, 19 nt, Artificial Sequence
  Description of Artificial Sequence: Synthetic oligonucleotide
  Antisense strand to SEQ ID NO: 1446976
agauuugagacuuagucca

SEQ ID NO: 1446978 - RNA, 19 nt, Artificial Sequence
  Description of Artificial Sequence: Synthetic oligonucleotide
  Sense strand starting at position 3900 of SEQ ID NO: 1243861
gucucaaaucugugcugcu

SEQ ID NO: 1446979 - RNA, 19 nt, Artificial Sequence
  Description of Artificial Sequence: Synthetic oligonucleotide
  Antisense strand to SEQ ID NO: 1446978
agcagcacagauuugagac

SEQ ID NO: 1446980 - RNA, 19 nt, Artificial Sequence
  Description of Artificial Sequence: Synthetic oligonucleotide
  Sense strand starting at position 3917 of SEQ ID NO: 1243861
cugcuuauuccagagcuuc

SEQ ID NO: 1446981 - RNA, 19 nt, Artificial Sequence
  Description of Artificial Sequence: Synthetic oligonucleotide
  Antisense strand to SEQ ID NO: 1446980
gaagcucuggaauaagcag

SEQ ID NO: 1446982 - RNA, 19 nt, Artificial Sequence
  Description of Artificial Sequence: Synthetic oligonucleotide
  Sense strand starting at position 3925 of SEQ ID NO: 1243861
uccagagcuuccgcgucaa

SEQ ID NO: 1446983 - RNA, 19 nt, Artificial Sequence
  Description of Artificial Sequence: Synthetic oligonucleotide
  Antisense strand to SEQ ID NO: 1446982
uugacgcggaagcucugga

SEQ ID NO: 1446984 - RNA, 19 nt, Artificial Sequence
  Description of Artificial Sequence: Synthetic oligonucleotide
  Sense strand starting at position 3950 of SEQ ID NO: 1243861
ggacaagaauugugauaaa

SEQ ID NO: 1446985 - RNA, 19 nt, Artificial Sequence
  Description of Artificial Sequence: Synthetic oligonucleotide
  Antisense strand to SEQ ID NO: 1446984
uuuaucacaauucuugucc

SEQ ID NO: 1446986 - RNA, 19 nt, Artificial Sequence
  Description of Artificial Sequence: Synthetic oligonucleotide
  Sense strand starting at position 51 of SEQ ID NO: 1243862
gccacauagcuugaaggaa

SEQ ID NO: 1446987 - RNA, 19 nt, Artificial Sequence
  Description of Artificial Sequence: Synthetic oligonucleotide
  Antisense strand to SEQ ID NO: 1446986
uuccuucaagcuauguggc

SEQ ID NO: 1446988 - RNA, 19 nt, Artificial Sequence
  Description of Artificial Sequence: Synthetic oligonucleotide
  Sense strand starting at position 79 of SEQ ID NO: 1243862
gagcucugcucaggaagga

SEQ ID NO: 1446989 - RNA, 19 nt, Artificial Sequence
  Description of Artificial Sequence: Synthetic oligonucleotide
  Antisense strand to SEQ ID NO: 1446988
uccuuccugagcagagcuc

SEQ ID NO: 1446990 - RNA, 19 nt, Artificial Sequence
  Description of Artificial Sequence: Synthetic oligonucleotide
  Sense strand starting at position 128 of SEQ ID NO: 1243862
gguuccugcugggacgaaa

SEQ ID NO: 1446991 - RNA, 19 nt, Artificial Sequence
  Description of Artificial Sequence: Synthetic oligonucleotide
  Antisense strand to SEQ ID NO: 1446990
uuucgucccagcaggaacc

SEQ ID NO: 1446992 - RNA, 19 nt, Artificial Sequence
  Description of Artificial Sequence: Synthetic oligonucleotide
  Sense strand starting at position 228 of SEQ ID NO: 1243862
cccauaaacugagaaggaa

SEQ ID NO: 1446993 - RNA, 19 nt, Artificial Sequence
  Description of Artificial Sequence: Synthetic oligonucleotide
  Antisense strand to SEQ ID NO: 1446992
uuccuucucaguuuauggg

SEQ ID NO: 1446994 - RNA, 19 nt, Artificial Sequence
  Description of Artificial Sequence: Synthetic oligonucleotide
  Sense strand starting at position 332 of SEQ ID NO: 1243862
caaugugucuauggccaua

SEQ ID NO: 1446995 - RNA, 19 nt, Artificial Sequence
  Description of Artificial Sequence: Synthetic oligonucleotide
  Antisense strand to SEQ ID NO: 1446994
uauggccauagacacauug

SEQ ID NO: 1446996 - RNA, 19 nt, Artificial Sequence
  Description of Artificial Sequence: Synthetic oligonucleotide
  Sense strand starting at position 422 of SEQ ID NO: 1243862
ggaagaccgccaggaaaua

SEQ ID NO: 1446997 - RNA, 19 nt, Artificial Sequence
  Description of Artificial Sequence: Synthetic oligonucleotide
  Antisense strand to SEQ ID NO: 1446996
uauuuccuggcggucuucc

SEQ ID NO: 1446998 - RNA, 19 nt, Artificial Sequence
  Description of Artificial Sequence: Synthetic oligonucleotide
  Sense strand starting at position 434 of SEQ ID NO: 1243862
ggaaauaccaggugcugua

SEQ ID NO: 1446999 - RNA, 19 nt, Artificial Sequence
  Description of Artificial Sequence: Synthetic oligonucleotide
  Antisense strand to SEQ ID NO: 1446998
uacagcaccugguauuucc

SEQ ID NO: 1447000 - RNA, 19 nt, Artificial Sequence
  Description of Artificial Sequence: Synthetic oligonucleotide
  Sense strand starting at position 490 of SEQ ID NO: 1243862
ggcgcuuccuggaaggaga

SEQ ID NO: 1447001 - RNA, 19 nt, Artificial Sequence
  Description of Artificial Sequence: Synthetic oligonucleotide
  Antisense strand to SEQ ID NO: 1447000
ucuccuuccaggaagcgcc

SEQ ID NO: 1447002 - RNA, 19 nt, Artificial Sequence
  Description of Artificial Sequence: Synthetic oligonucleotide
  Sense strand starting at position 540 of SEQ ID NO: 1243862
gugcaccucugagaaacaa

SEQ ID NO: 1447003 - RNA, 19 nt, Artificial Sequence
  Description of Artificial Sequence: Synthetic oligonucleotide
  Antisense strand to SEQ ID NO: 1447002
uuguuucucagaggugcac

SEQ ID NO: 1447004 - RNA, 19 nt, Artificial Sequence
  Description of Artificial Sequence: Synthetic oligonucleotide
  Sense strand starting at position 645 of SEQ ID NO: 1243862
gguagaugcagugagcuua

SEQ ID NO: 1447005 - RNA, 19 nt, Artificial Sequence
  Description of Artificial Sequence: Synthetic oligonucleotide
  Antisense strand to SEQ ID NO: 1447004
uaagcucacugcaucuacc

SEQ ID NO: 1447006 - RNA, 19 nt, Artificial Sequence
  Description of Artificial Sequence: Synthetic oligonucleotide
  Sense strand starting at position 702 of SEQ ID NO: 1243862
cuuggugucccucagguau

SEQ ID NO: 1447007 - RNA, 19 nt, Artificial Sequence
  Description of Artificial Sequence: Synthetic oligonucleotide
  Antisense strand to SEQ ID NO: 1447006
auaccugagggacaccaag

SEQ ID NO: 1447008 - RNA, 19 nt, Artificial Sequence
  Description of Artificial Sequence: Synthetic oligonucleotide
  Sense strand starting at position 713 of SEQ ID NO: 1243862
ucagguaugugugggaaga

SEQ ID NO: 1447009 - RNA, 19 nt, Artificial Sequence
  Description of Artificial Sequence: Synthetic oligonucleotide
  Antisense strand to SEQ ID NO: 1447008
ucuucccacacauaccuga

SEQ ID NO: 1447010 - RNA, 19 nt, Artificial Sequence
  Description of Artificial Sequence: Synthetic oligonucleotide
  Sense strand starting at position 714 of SEQ ID NO: 1243862
cagguaugugugggaagaa

SEQ ID NO: 1447011 - RNA, 19 nt, Artificial Sequence
  Description of Artificial Sequence: Synthetic oligonucleotide
  Antisense strand to SEQ ID NO: 1447010
uucuucccacacauaccug

SEQ ID NO: 1447012 - RNA, 19 nt, Artificial Sequence
  Description of Artificial Sequence: Synthetic oligonucleotide
  Sense strand starting at position 715 of SEQ ID NO: 1243862
agguaugugugggaagaau

SEQ ID NO: 1447013 - RNA, 19 nt, Artificial Sequence
  Description of Artificial Sequence: Synthetic oligonucleotide
  Antisense strand to SEQ ID NO: 1447012
auucuucccacacauaccu

SEQ ID NO: 1447014 - RNA, 19 nt, Artificial Sequence
  Description of Artificial Sequence: Synthetic oligonucleotide
  Sense strand starting at position 773 of SEQ ID NO: 1243862
uguuccuagccagagguau

SEQ ID NO: 1447015 - RNA, 19 nt, Artificial Sequence
  Description of Artificial Sequence: Synthetic oligonucleotide
  Antisense strand to SEQ ID NO: 1447014
auaccucuggcuaggaaca

SEQ ID NO: 1447016 - RNA, 19 nt, Artificial Sequence
  Description of Artificial Sequence: Synthetic oligonucleotide
  Sense strand starting at position 937 of SEQ ID NO: 1243862
gccuguggccagggaagau

SEQ ID NO: 1447017 - RNA, 19 nt, Artificial Sequence
  Description of Artificial Sequence: Synthetic oligonucleotide
  Antisense strand to SEQ ID NO: 1447016
aucuucccuggccacaggc

SEQ ID NO: 1447018 - RNA, 19 nt, Artificial Sequence
  Description of Artificial Sequence: Synthetic oligonucleotide
  Sense strand starting at position 1035 of SEQ ID NO: 1243862
guggcagguuuccucuaca

SEQ ID NO: 1447019 - RNA, 19 nt, Artificial Sequence
  Description of Artificial Sequence: Synthetic oligonucleotide
  Antisense strand to SEQ ID NO: 1447018
uguagaggaaaccugccac

SEQ ID NO: 1447020 - RNA, 19 nt, Artificial Sequence
  Description of Artificial Sequence: Synthetic oligonucleotide
  Sense strand starting at position 1038 of SEQ ID NO: 1243862
gcagguuuccucuacaaga

SEQ ID NO: 1447021 - RNA, 19 nt, Artificial Sequence
  Description of Artificial Sequence: Synthetic oligonucleotide
  Antisense strand to SEQ ID NO: 1447020
ucuuguagaggaaaccugc

SEQ ID NO: 1447022 - RNA, 19 nt, Artificial Sequence
  Description of Artificial Sequence: Synthetic oligonucleotide
  Sense strand starting at position 1110 of SEQ ID NO: 1243862
gagcuuuggacagggagau

SEQ ID NO: 1447023 - RNA, 19 nt, Artificial Sequence
  Description of Artificial Sequence: Synthetic oligonucleotide
  Antisense strand to SEQ ID NO: 1447022
aucucccuguccaaagcuc

SEQ ID NO: 1447024 - RNA, 19 nt, Artificial Sequence
  Description of Artificial Sequence: Synthetic oligonucleotide
  Sense strand starting at position 1111 of SEQ ID NO: 1243862
agcuuuggacagggagauu

SEQ ID NO: 1447025 - RNA, 19 nt, Artificial Sequence
  Description of Artificial Sequence: Synthetic oligonucleotide
  Antisense strand to SEQ ID NO: 1447024
aaucucccuguccaaagcu

SEQ ID NO: 1447026 - RNA, 19 nt, Artificial Sequence
  Description of Artificial Sequence: Synthetic oligonucleotide
  Sense strand starting at position 1215 of SEQ ID NO: 1243862
cugggauccuuccagccua

SEQ ID NO: 1447027 - RNA, 19 nt, Artificial Sequence
  Description of Artificial Sequence: Synthetic oligonucleotide
  Antisense strand to SEQ ID NO: 1447026
uaggcuggaaggaucccag

SEQ ID NO: 1447028 - RNA, 19 nt, Artificial Sequence
  Description of Artificial Sequence: Synthetic oligonucleotide
  Sense strand starting at position 1274 of SEQ ID NO: 1243862
ugcuguccucaguacagaa

SEQ ID NO: 1447029 - RNA, 19 nt, Artificial Sequence
  Description of Artificial Sequence: Synthetic oligonucleotide
  Antisense strand to SEQ ID NO: 1447028
uucuguacugaggacagca

SEQ ID NO: 1447030 - RNA, 19 nt, Artificial Sequence
  Description of Artificial Sequence: Synthetic oligonucleotide
  Sense strand starting at position 1346 of SEQ ID NO: 1243862
gggcuaacuccagggaaua

SEQ ID NO: 1447031 - RNA, 19 nt, Artificial Sequence
  Description of Artificial Sequence: Synthetic oligonucleotide
  Antisense strand to SEQ ID NO: 1447030
uauucccuggaguuagccc

SEQ ID NO: 1447032 - RNA, 19 nt, Artificial Sequence
  Description of Artificial Sequence: Synthetic oligonucleotide
  Sense strand starting at position 1347 of SEQ ID NO: 1243862
ggcuaacuccagggaauag

SEQ ID NO: 1447033 - RNA, 19 nt, Artificial Sequence
  Description of Artificial Sequence: Synthetic oligonucleotide
  Antisense strand to SEQ ID NO: 1447032
cuauucccuggaguuagcc

SEQ ID NO: 1447034 - RNA, 19 nt, Artificial Sequence
  Description of Artificial Sequence: Synthetic oligonucleotide
  Sense strand starting at position 1357 of SEQ ID NO: 1243862
agggaauaggccuguacuc

SEQ ID NO: 1447035 - RNA, 19 nt, Artificial Sequence
  Description of Artificial Sequence: Synthetic oligonucleotide
  Antisense strand to SEQ ID NO: 1447034
gaguacaggccuauucccu

SEQ ID NO: 1447036 - RNA, 19 nt, Artificial Sequence
  Description of Artificial Sequence: Synthetic oligonucleotide
  Sense strand starting at position 1359 of SEQ ID NO: 1243862
ggaauaggccuguacucuu

SEQ ID NO: 1447037 - RNA, 19 nt, Artificial Sequence
  Description of Artificial Sequence: Synthetic oligonucleotide
  Antisense strand to SEQ ID NO: 1447036
aagaguacaggccuauucc

SEQ ID NO: 1447038 - RNA, 19 nt, Artificial Sequence
  Description of Artificial Sequence: Synthetic oligonucleotide
  Sense strand starting at position 1393 of SEQ ID NO: 1243862
uguuucugccuuugagauc

SEQ ID NO: 1447039 - RNA, 19 nt, Artificial Sequence
  Description of Artificial Sequence: Synthetic oligonucleotide
  Antisense strand to SEQ ID NO: 1447038
gaucucaaaggcagaaaca

SEQ ID NO: 1447040 - RNA, 19 nt, Artificial Sequence
  Description of Artificial Sequence: Synthetic oligonucleotide
  Sense strand starting at position 1394 of SEQ ID NO: 1243862
guuucugccuuugagaucu

SEQ ID NO: 1447041 - RNA, 19 nt, Artificial Sequence
  Description of Artificial Sequence: Synthetic oligonucleotide
  Antisense strand to SEQ ID NO: 1447040
agaucucaaaggcagaaac

SEQ ID NO: 1447042 - RNA, 19 nt, Artificial Sequence
  Description of Artificial Sequence: Synthetic oligonucleotide
  Sense strand starting at position 1402 of SEQ ID NO: 1243862
cuuugagaucuccgugccu

SEQ ID NO: 1447043 - RNA, 19 nt, Artificial Sequence
  Description of Artificial Sequence: Synthetic oligonucleotide
  Antisense strand to SEQ ID NO: 1447042
aggcacggagaucucaaag

SEQ ID NO: 1447044 - RNA, 19 nt, Artificial Sequence
  Description of Artificial Sequence: Synthetic oligonucleotide
  Sense strand starting at position 40 of SEQ ID NO: 1243863
cggugaaacugcccuggau

SEQ ID NO: 1447045 - RNA, 19 nt, Artificial Sequence
  Description of Artificial Sequence: Synthetic oligonucleotide
  Antisense strand to SEQ ID NO: 1447044
auccagggcaguuucaccg

SEQ ID NO: 1447046 - RNA, 19 nt, Artificial Sequence
  Description of Artificial Sequence: Synthetic oligonucleotide
  Sense strand starting at position 42 of SEQ ID NO: 1243863
gugaaacugcccuggauag

SEQ ID NO: 1447047 - RNA, 19 nt, Artificial Sequence
  Description of Artificial Sequence: Synthetic oligonucleotide
  Antisense strand to SEQ ID NO: 1447046
cuauccagggcaguuucac

SEQ ID NO: 1447048 - RNA, 19 nt, Artificial Sequence
  Description of Artificial Sequence: Synthetic oligonucleotide
  Sense strand starting at position 171 of SEQ ID NO: 1243863
ggguuuguggcuucggcua

SEQ ID NO: 1447049 - RNA, 19 nt, Artificial Sequence
  Description of Artificial Sequence: Synthetic oligonucleotide
  Antisense strand to SEQ ID NO: 1447048
uagccgaagccacaaaccc

SEQ ID NO: 1447050 - RNA, 19 nt, Artificial Sequence
  Description of Artificial Sequence: Synthetic oligonucleotide
  Sense strand starting at position 173 of SEQ ID NO: 1243863
guuuguggcuucggcuaau

SEQ ID NO: 1447051 - RNA, 19 nt, Artificial Sequence
  Description of Artificial Sequence: Synthetic oligonucleotide
  Antisense strand to SEQ ID NO: 1447050
auuagccgaagccacaaac

SEQ ID NO: 1447052 - RNA, 19 nt, Artificial Sequence
  Description of Artificial Sequence: Synthetic oligonucleotide
  Sense strand starting at position 184 of SEQ ID NO: 1243863
cggcuaaucggccgauaag

SEQ ID NO: 1447053 - RNA, 19 nt, Artificial Sequence
  Description of Artificial Sequence: Synthetic oligonucleotide
  Antisense strand to SEQ ID NO: 1447052
cuuaucggccgauuagccg

SEQ ID NO: 1447054 - RNA, 19 nt, Artificial Sequence
  Description of Artificial Sequence: Synthetic oligonucleotide
  Sense strand starting at position 185 of SEQ ID NO: 1243863
ggcuaaucggccgauaaga

SEQ ID NO: 1447055 - RNA, 19 nt, Artificial Sequence
  Description of Artificial Sequence: Synthetic oligonucleotide
  Antisense strand to SEQ ID NO: 1447054
ucuuaucggccgauuagcc

SEQ ID NO: 1447056 - RNA, 19 nt, Artificial Sequence
  Description of Artificial Sequence: Synthetic oligonucleotide
  Sense strand starting at position 187 of SEQ ID NO: 1243863
cuaaucggccgauaagauu

SEQ ID NO: 1447057 - RNA, 19 nt, Artificial Sequence
  Description of Artificial Sequence: Synthetic oligonucleotide
  Antisense strand to SEQ ID NO: 1447056
aaucuuaucggccgauuag

SEQ ID NO: 1447058 - RNA, 19 nt, Artificial Sequence
  Description of Artificial Sequence: Synthetic oligonucleotide
  Sense strand starting at position 285 of SEQ ID NO: 1243863
ggccguuucugucugagaa

SEQ ID NO: 1447059 - RNA, 19 nt, Artificial Sequence
  Description of Artificial Sequence: Synthetic oligonucleotide
  Antisense strand to SEQ ID NO: 1447058
uucucagacagaaacggcc

SEQ ID NO: 1447060 - RNA, 19 nt, Artificial Sequence
  Description of Artificial Sequence: Synthetic oligonucleotide
  Sense strand starting at position 286 of SEQ ID NO: 1243863
gccguuucugucugagaaa

SEQ ID NO: 1447061 - RNA, 19 nt, Artificial Sequence
  Description of Artificial Sequence: Synthetic oligonucleotide
  Antisense strand to SEQ ID NO: 1447060
uuucucagacagaaacggc

SEQ ID NO: 1447062 - RNA, 19 nt, Artificial Sequence
  Description of Artificial Sequence: Synthetic oligonucleotide
  Sense strand starting at position 639 of SEQ ID NO: 1243863
agcaccgagucguacauuu

SEQ ID NO: 1447063 - RNA, 19 nt, Artificial Sequence
  Description of Artificial Sequence: Synthetic oligonucleotide
  Antisense strand to SEQ ID NO: 1447062
aaauguacgacucggugcu

SEQ ID NO: 1447064 - RNA, 19 nt, Artificial Sequence
  Description of Artificial Sequence: Synthetic oligonucleotide
  Sense strand starting at position 715 of SEQ ID NO: 1243863
uggccugggccgugaugau

SEQ ID NO: 1447065 - RNA, 19 nt, Artificial Sequence
  Description of Artificial Sequence: Synthetic oligonucleotide
  Antisense strand to SEQ ID NO: 1447064
aucaucacggcccaggcca

SEQ ID NO: 1447066 - RNA, 19 nt, Artificial Sequence
  Description of Artificial Sequence: Synthetic oligonucleotide
  Sense strand starting at position 733 of SEQ ID NO: 1243863
uguugucacccgcauagga

SEQ ID NO: 1447067 - RNA, 19 nt, Artificial Sequence
  Description of Artificial Sequence: Synthetic oligonucleotide
  Antisense strand to SEQ ID NO: 1447066
uccuaugcgggugacaaca

SEQ ID NO: 1447068 - RNA, 19 nt, Artificial Sequence
  Description of Artificial Sequence: Synthetic oligonucleotide
  Sense strand starting at position 979 of SEQ ID NO: 1243863
ggguuugggccaggugaau

SEQ ID NO: 1447069 - RNA, 19 nt, Artificial Sequence
  Description of Artificial Sequence: Synthetic oligonucleotide
  Antisense strand to SEQ ID NO: 1447068
auucaccuggcccaaaccc

SEQ ID NO: 1447070 - RNA, 19 nt, Artificial Sequence
  Description of Artificial Sequence: Synthetic oligonucleotide
  Sense strand starting at position 985 of SEQ ID NO: 1243863
gggccaggugaaugcaaau

SEQ ID NO: 1447071 - RNA, 19 nt, Artificial Sequence
  Description of Artificial Sequence: Synthetic oligonucleotide
  Antisense strand to SEQ ID NO: 1447070
auuugcauucaccuggccc

SEQ ID NO: 1447072 - RNA, 19 nt, Artificial Sequence
  Description of Artificial Sequence: Synthetic oligonucleotide
  Sense strand starting at position 1209 of SEQ ID NO: 1243863
caaaguauccugggcugua

SEQ ID NO: 1447073 - RNA, 19 nt, Artificial Sequence
  Description of Artificial Sequence: Synthetic oligonucleotide
  Antisense strand to SEQ ID NO: 1447072
uacagcccaggauacuuug

SEQ ID NO: 1447074 - RNA, 19 nt, Artificial Sequence
  Description of Artificial Sequence: Synthetic oligonucleotide
  Sense strand starting at position 1790 of SEQ ID NO: 1243863
uggcucgaucccugagagu

SEQ ID NO: 1447075 - RNA, 19 nt, Artificial Sequence
  Description of Artificial Sequence: Synthetic oligonucleotide
  Antisense strand to SEQ ID NO: 1447074
acucucagggaucgagcca

SEQ ID NO: 1447076 - RNA, 19 nt, Artificial Sequence
  Description of Artificial Sequence: Synthetic oligonucleotide
  Sense strand starting at position 2422 of SEQ ID NO: 1243863
uguuguuguuugagaggag

SEQ ID NO: 1447077 - RNA, 19 nt, Artificial Sequence
  Description of Artificial Sequence: Synthetic oligonucleotide
  Antisense strand to SEQ ID NO: 1447076
cuccucucaaacaacaaca

SEQ ID NO: 1447078 - RNA, 19 nt, Artificial Sequence
  Description of Artificial Sequence: Synthetic oligonucleotide
  Sense strand starting at position 2425 of SEQ ID NO: 1243863
uguuguuugagaggaggaa

SEQ ID NO: 1447079 - RNA, 19 nt, Artificial Sequence
  Description of Artificial Sequence: Synthetic oligonucleotide
  Antisense strand to SEQ ID NO: 1447078
uuccuccucucaaacaaca

SEQ ID NO: 1447080 - RNA, 19 nt, Artificial Sequence
  Description of Artificial Sequence: Synthetic oligonucleotide
  Sense strand starting at position 2437 of SEQ ID NO: 1243863
ggaggaagucuguguuacc

SEQ ID NO: 1447081 - RNA, 19 nt, Artificial Sequence
  Description of Artificial Sequence: Synthetic oligonucleotide
  Antisense strand to SEQ ID NO: 1447080
gguaacacagacuuccucc

SEQ ID NO: 1447082 - RNA, 19 nt, Artificial Sequence
  Description of Artificial Sequence: Synthetic oligonucleotide
  Sense strand starting at position 3000 of SEQ ID NO: 1243863
cugucuuuccuucguuuau

SEQ ID NO: 1447083 - RNA, 19 nt, Artificial Sequence
  Description of Artificial Sequence: Synthetic oligonucleotide
  Antisense strand to SEQ ID NO: 1447082
auaaacgaaggaaagacag

SEQ ID NO: 1447084 - RNA, 19 nt, Artificial Sequence
  Description of Artificial Sequence: Synthetic oligonucleotide
  Sense strand starting at position 3001 of SEQ ID NO: 1243863
ugucuuuccuucguuuauu

SEQ ID NO: 1447085 - RNA, 19 nt, Artificial Sequence
  Description of Artificial Sequence: Synthetic oligonucleotide
  Antisense strand to SEQ ID NO: 1447084
aauaaacgaaggaaagaca

SEQ ID NO: 1447086 - RNA, 19 nt, Artificial Sequence
  Description of Artificial Sequence: Synthetic oligonucleotide
  Sense strand starting at position 3007 of SEQ ID NO: 1243863
uccuucguuuauucgcuaa

SEQ ID NO: 1447087 - RNA, 19 nt, Artificial Sequence
  Description of Artificial Sequence: Synthetic oligonucleotide
  Antisense strand to SEQ ID NO: 1447086
uuagcgaauaaacgaagga

SEQ ID NO: 1447088 - RNA, 19 nt, Artificial Sequence
  Description of Artificial Sequence: Synthetic oligonucleotide
  Sense strand starting at position 3009 of SEQ ID NO: 1243863
cuucguuuauucgcuaaac

SEQ ID NO: 1447089 - RNA, 19 nt, Artificial Sequence
  Description of Artificial Sequence: Synthetic oligonucleotide
  Antisense strand to SEQ ID NO: 1447088
guuuagcgaauaaacgaag

SEQ ID NO: 1447090 - RNA, 19 nt, Artificial Sequence
  Description of Artificial Sequence: Synthetic oligonucleotide
  Sense strand starting at position 3010 of SEQ ID NO: 1243863
uucguuuauucgcuaaaca

SEQ ID NO: 1447091 - RNA, 19 nt, Artificial Sequence
  Description of Artificial Sequence: Synthetic oligonucleotide
  Antisense strand to SEQ ID NO: 1447090
uguuuagcgaauaaacgaa

SEQ ID NO: 1447092 - RNA, 19 nt, Artificial Sequence
  Description of Artificial Sequence: Synthetic oligonucleotide
  Sense strand starting at position 3011 of SEQ ID NO: 1243863
ucguuuauucgcuaaacau

SEQ ID NO: 1447093 - RNA, 19 nt, Artificial Sequence
  Description of Artificial Sequence: Synthetic oligonucleotide
  Antisense strand to SEQ ID NO: 1447092
auguuuagcgaauaaacga

SEQ ID NO: 1447094 - RNA, 19 nt, Artificial Sequence
  Description of Artificial Sequence: Synthetic oligonucleotide
  Sense strand starting at position 3294 of SEQ ID NO: 1243863
ccguguuagccaggcagau

SEQ ID NO: 1447095 - RNA, 19 nt, Artificial Sequence
  Description of Artificial Sequence: Synthetic oligonucleotide
  Antisense strand to SEQ ID NO: 1447094
aucugccuggcuaacacgg

SEQ ID NO: 1447096 - RNA, 19 nt, Artificial Sequence
  Description of Artificial Sequence: Synthetic oligonucleotide
  Sense strand starting at position 3396 of SEQ ID NO: 1243863
ccaugaacuguuuguuauu

SEQ ID NO: 1447097 - RNA, 19 nt, Artificial Sequence
  Description of Artificial Sequence: Synthetic oligonucleotide
  Antisense strand to SEQ ID NO: 1447096
aauaacaaacaguucaugg

SEQ ID NO: 1447098 - RNA, 19 nt, Artificial Sequence
  Description of Artificial Sequence: Synthetic oligonucleotide
  Sense strand starting at position 3401 of SEQ ID NO: 1243863
aacuguuuguuauucguuu

SEQ ID NO: 1447099 - RNA, 19 nt, Artificial Sequence
  Description of Artificial Sequence: Synthetic oligonucleotide
  Antisense strand to SEQ ID NO: 1447098
aaacgaauaacaaacaguu

SEQ ID NO: 1447100 - RNA, 19 nt, Artificial Sequence
  Description of Artificial Sequence: Synthetic oligonucleotide
  Sense strand starting at position 3455 of SEQ ID NO: 1243863
ggauuaauguacucuuaga

SEQ ID NO: 1447101 - RNA, 19 nt, Artificial Sequence
  Description of Artificial Sequence: Synthetic oligonucleotide
  Antisense strand to SEQ ID NO: 1447100
ucuaagaguacauuaaucc

SEQ ID NO: 1447102 - RNA, 19 nt, Artificial Sequence
  Description of Artificial Sequence: Synthetic oligonucleotide
  Sense strand starting at position 3603 of SEQ ID NO: 1243863
ucaucauuguucuggcuuu

SEQ ID NO: 1447103 - RNA, 19 nt, Artificial Sequence
  Description of Artificial Sequence: Synthetic oligonucleotide
  Antisense strand to SEQ ID NO: 1447102
aaagccagaacaaugauga

SEQ ID NO: 1447104 - RNA, 19 nt, Artificial Sequence
  Description of Artificial Sequence: Synthetic oligonucleotide
  Sense strand starting at position 52 of SEQ ID NO: 1243864
gggaaagggcgccgucauu

SEQ ID NO: 1447105 - RNA, 19 nt, Artificial Sequence
  Description of Artificial Sequence: Synthetic oligonucleotide
  Antisense strand to SEQ ID NO: 1447104
aaugacggcgcccuuuccc

SEQ ID NO: 1447106 - RNA, 19 nt, Artificial Sequence
  Description of Artificial Sequence: Synthetic oligonucleotide
  Sense strand starting at position 61 of SEQ ID NO: 1243864
cgccgucauugcuggaaau

SEQ ID NO: 1447107 - RNA, 19 nt, Artificial Sequence
  Description of Artificial Sequence: Synthetic oligonucleotide
  Antisense strand to SEQ ID NO: 1447106
auuuccagcaaugacggcg

SEQ ID NO: 1447108 - RNA, 19 nt, Artificial Sequence
  Description of Artificial Sequence: Synthetic oligonucleotide
  Sense strand starting at position 62 of SEQ ID NO: 1243864
gccgucauugcuggaaaug

SEQ ID NO: 1447109 - RNA, 19 nt, Artificial Sequence
  Description of Artificial Sequence: Synthetic oligonucleotide
  Antisense strand to SEQ ID NO: 1447108
cauuuccagcaaugacggc

SEQ ID NO: 1447110 - RNA, 19 nt, Artificial Sequence
  Description of Artificial Sequence: Synthetic oligonucleotide
  Sense strand starting at position 288 of SEQ ID NO: 1243864
cggugaaacugcccuggau

SEQ ID NO: 1447111 - RNA, 19 nt, Artificial Sequence
  Description of Artificial Sequence: Synthetic oligonucleotide
  Antisense strand to SEQ ID NO: 1447110
auccagggcaguuucaccg

SEQ ID NO: 1447112 - RNA, 19 nt, Artificial Sequence
  Description of Artificial Sequence: Synthetic oligonucleotide
  Sense strand starting at position 290 of SEQ ID NO: 1243864
gugaaacugcccuggauag

SEQ ID NO: 1447113 - RNA, 19 nt, Artificial Sequence
  Description of Artificial Sequence: Synthetic oligonucleotide
  Antisense strand to SEQ ID NO: 1447112
cuauccagggcaguuucac

SEQ ID NO: 1447114 - RNA, 19 nt, Artificial Sequence
  Description of Artificial Sequence: Synthetic oligonucleotide
  Sense strand starting at position 419 of SEQ ID NO: 1243864
ggguuuguggcuucggcua

SEQ ID NO: 1447115 - RNA, 19 nt, Artificial Sequence
  Description of Artificial Sequence: Synthetic oligonucleotide
  Antisense strand to SEQ ID NO: 1447114
uagccgaagccacaaaccc

SEQ ID NO: 1447116 - RNA, 19 nt, Artificial Sequence
  Description of Artificial Sequence: Synthetic oligonucleotide
  Sense strand starting at position 421 of SEQ ID NO: 1243864
guuuguggcuucggcuaau

SEQ ID NO: 1447117 - RNA, 19 nt, Artificial Sequence
  Description of Artificial Sequence: Synthetic oligonucleotide
  Antisense strand to SEQ ID NO: 1447116
auuagccgaagccacaaac

SEQ ID NO: 1447118 - RNA, 19 nt, Artificial Sequence
  Description of Artificial Sequence: Synthetic oligonucleotide
  Sense strand starting at position 432 of SEQ ID NO: 1243864
cggcuaaucggccgauaag

SEQ ID NO: 1447119 - RNA, 19 nt, Artificial Sequence
  Description of Artificial Sequence: Synthetic oligonucleotide
  Antisense strand to SEQ ID NO: 1447118
cuuaucggccgauuagccg

SEQ ID NO: 1447120 - RNA, 19 nt, Artificial Sequence
  Description of Artificial Sequence: Synthetic oligonucleotide
  Sense strand starting at position 433 of SEQ ID NO: 1243864
ggcuaaucggccgauaaga

SEQ ID NO: 1447121 - RNA, 19 nt, Artificial Sequence
  Description of Artificial Sequence: Synthetic oligonucleotide
  Antisense strand to SEQ ID NO: 1447120
ucuuaucggccgauuagcc

SEQ ID NO: 1447122 - RNA, 19 nt, Artificial Sequence
  Description of Artificial Sequence: Synthetic oligonucleotide
  Sense strand starting at position 435 of SEQ ID NO: 1243864
cuaaucggccgauaagauu

SEQ ID NO: 1447123 - RNA, 19 nt, Artificial Sequence
  Description of Artificial Sequence: Synthetic oligonucleotide
  Antisense strand to SEQ ID NO: 1447122
aaucuuaucggccgauuag

SEQ ID NO: 1447124 - RNA, 19 nt, Artificial Sequence
  Description of Artificial Sequence: Synthetic oligonucleotide
  Sense strand starting at position 533 of SEQ ID NO: 1243864
ggccguuucugucugagaa

SEQ ID NO: 1447125 - RNA, 19 nt, Artificial Sequence
  Description of Artificial Sequence: Synthetic oligonucleotide
  Antisense strand to SEQ ID NO: 1447124
uucucagacagaaacggcc

SEQ ID NO: 1447126 - RNA, 19 nt, Artificial Sequence
  Description of Artificial Sequence: Synthetic oligonucleotide
  Sense strand starting at position 534 of SEQ ID NO: 1243864
gccguuucugucugagaaa

SEQ ID NO: 1447127 - RNA, 19 nt, Artificial Sequence
  Description of Artificial Sequence: Synthetic oligonucleotide
  Antisense strand to SEQ ID NO: 1447126
uuucucagacagaaacggc

SEQ ID NO: 1447128 - RNA, 19 nt, Artificial Sequence
  Description of Artificial Sequence: Synthetic oligonucleotide
  Sense strand starting at position 887 of SEQ ID NO: 1243864
agcaccgagucguacauuu

SEQ ID NO: 1447129 - RNA, 19 nt, Artificial Sequence
  Description of Artificial Sequence: Synthetic oligonucleotide
  Antisense strand to SEQ ID NO: 1447128
aaauguacgacucggugcu

SEQ ID NO: 1447130 - RNA, 19 nt, Artificial Sequence
  Description of Artificial Sequence: Synthetic oligonucleotide
  Sense strand starting at position 963 of SEQ ID NO: 1243864
uggccugggccgugaugau

SEQ ID NO: 1447131 - RNA, 19 nt, Artificial Sequence
  Description of Artificial Sequence: Synthetic oligonucleotide
  Antisense strand to SEQ ID NO: 1447130
aucaucacggcccaggcca

SEQ ID NO: 1447132 - RNA, 19 nt, Artificial Sequence
  Description of Artificial Sequence: Synthetic oligonucleotide
  Sense strand starting at position 981 of SEQ ID NO: 1243864
uguugucacccgcauagga

SEQ ID NO: 1447133 - RNA, 19 nt, Artificial Sequence
  Description of Artificial Sequence: Synthetic oligonucleotide
  Antisense strand to SEQ ID NO: 1447132
uccuaugcgggugacaaca

SEQ ID NO: 1447134 - RNA, 19 nt, Artificial Sequence
  Description of Artificial Sequence: Synthetic oligonucleotide
  Sense strand starting at position 1227 of SEQ ID NO: 1243864
ggguuugggccaggugaau

SEQ ID NO: 1447135 - RNA, 19 nt, Artificial Sequence
  Description of Artificial Sequence: Synthetic oligonucleotide
  Antisense strand to SEQ ID NO: 1447134
auucaccuggcccaaaccc

SEQ ID NO: 1447136 - RNA, 19 nt, Artificial Sequence
  Description of Artificial Sequence: Synthetic oligonucleotide
  Sense strand starting at position 1233 of SEQ ID NO: 1243864
gggccaggugaaugcaaau

SEQ ID NO: 1447137 - RNA, 19 nt, Artificial Sequence
  Description of Artificial Sequence: Synthetic oligonucleotide
  Antisense strand to SEQ ID NO: 1447136
auuugcauucaccuggccc

SEQ ID NO: 1447138 - RNA, 19 nt, Artificial Sequence
  Description of Artificial Sequence: Synthetic oligonucleotide
  Sense strand starting at position 1457 of SEQ ID NO: 1243864
caaaguauccugggcugua

SEQ ID NO: 1447139 - RNA, 19 nt, Artificial Sequence
  Description of Artificial Sequence: Synthetic oligonucleotide
  Antisense strand to SEQ ID NO: 1447138
uacagcccaggauacuuug

SEQ ID NO: 1447140 - RNA, 19 nt, Artificial Sequence
  Description of Artificial Sequence: Synthetic oligonucleotide
  Sense strand starting at position 2038 of SEQ ID NO: 1243864
uggcucgaucccugagagu

SEQ ID NO: 1447141 - RNA, 19 nt, Artificial Sequence
  Description of Artificial Sequence: Synthetic oligonucleotide
  Antisense strand to SEQ ID NO: 1447140
acucucagggaucgagcca

SEQ ID NO: 1447142 - RNA, 19 nt, Artificial Sequence
  Description of Artificial Sequence: Synthetic oligonucleotide
  Sense strand starting at position 2670 of SEQ ID NO: 1243864
uguuguuguuugagaggag

SEQ ID NO: 1447143 - RNA, 19 nt, Artificial Sequence
  Description of Artificial Sequence: Synthetic oligonucleotide
  Antisense strand to SEQ ID NO: 1447142
cuccucucaaacaacaaca

SEQ ID NO: 1447144 - RNA, 19 nt, Artificial Sequence
  Description of Artificial Sequence: Synthetic oligonucleotide
  Sense strand starting at position 2673 of SEQ ID NO: 1243864
uguuguuugagaggaggaa

SEQ ID NO: 1447145 - RNA, 19 nt, Artificial Sequence
  Description of Artificial Sequence: Synthetic oligonucleotide
  Antisense strand to SEQ ID NO: 1447144
uuccuccucucaaacaaca

SEQ ID NO: 1447146 - RNA, 19 nt, Artificial Sequence
  Description of Artificial Sequence: Synthetic oligonucleotide
  Sense strand starting at position 2685 of SEQ ID NO: 1243864
ggaggaagucuguguuacc

SEQ ID NO: 1447147 - RNA, 19 nt, Artificial Sequence
  Description of Artificial Sequence: Synthetic oligonucleotide
  Antisense strand to SEQ ID NO: 1447146
gguaacacagacuuccucc

SEQ ID NO: 1447148 - RNA, 19 nt, Artificial Sequence
  Description of Artificial Sequence: Synthetic oligonucleotide
  Sense strand starting at position 3248 of SEQ ID NO: 1243864
cugucuuuccuucguuuau

SEQ ID NO: 1447149 - RNA, 19 nt, Artificial Sequence
  Description of Artificial Sequence: Synthetic oligonucleotide
  Antisense strand to SEQ ID NO: 1447148
auaaacgaaggaaagacag

SEQ ID NO: 1447150 - RNA, 19 nt, Artificial Sequence
  Description of Artificial Sequence: Synthetic oligonucleotide
  Sense strand starting at position 3249 of SEQ ID NO: 1243864
ugucuuuccuucguuuauu

SEQ ID NO: 1447151 - RNA, 19 nt, Artificial Sequence
  Description of Artificial Sequence: Synthetic oligonucleotide
  Antisense strand to SEQ ID NO: 1447150
aauaaacgaaggaaagaca

SEQ ID NO: 1447152 - RNA, 19 nt, Artificial Sequence
  Description of Artificial Sequence: Synthetic oligonucleotide
  Sense strand starting at position 3255 of SEQ ID NO: 1243864
uccuucguuuauucgcuaa

SEQ ID NO: 1447153 - RNA, 19 nt, Artificial Sequence
  Description of Artificial Sequence: Synthetic oligonucleotide
  Antisense strand to SEQ ID NO: 1447152
uuagcgaauaaacgaagga

SEQ ID NO: 1447154 - RNA, 19 nt, Artificial Sequence
  Description of Artificial Sequence: Synthetic oligonucleotide
  Sense strand starting at position 3257 of SEQ ID NO: 1243864
cuucguuuauucgcuaaac

SEQ ID NO: 1447155 - RNA, 19 nt, Artificial Sequence
  Description of Artificial Sequence: Synthetic oligonucleotide
  Antisense strand to SEQ ID NO: 1447154
guuuagcgaauaaacgaag

SEQ ID NO: 1447156 - RNA, 19 nt, Artificial Sequence
  Description of Artificial Sequence: Synthetic oligonucleotide
  Sense strand starting at position 3258 of SEQ ID NO: 1243864
uucguuuauucgcuaaaca

SEQ ID NO: 1447157 - RNA, 19 nt, Artificial Sequence
  Description of Artificial Sequence: Synthetic oligonucleotide
  Antisense strand to SEQ ID NO: 1447156
uguuuagcgaauaaacgaa

SEQ ID NO: 1447158 - RNA, 19 nt, Artificial Sequence
  Description of Artificial Sequence: Synthetic oligonucleotide
  Sense strand starting at position 3259 of SEQ ID NO: 1243864
ucguuuauucgcuaaacau

SEQ ID NO: 1447159 - RNA, 19 nt, Artificial Sequence
  Description of Artificial Sequence: Synthetic oligonucleotide
  Antisense strand to SEQ ID NO: 1447158
auguuuagcgaauaaacga

SEQ ID NO: 1447160 - RNA, 19 nt, Artificial Sequence
  Description of Artificial Sequence: Synthetic oligonucleotide
  Sense strand starting at position 3542 of SEQ ID NO: 1243864
ccguguuagccaggcagau

SEQ ID NO: 1447161 - RNA, 19 nt, Artificial Sequence
  Description of Artificial Sequence: Synthetic oligonucleotide
  Antisense strand to SEQ ID NO: 1447160
aucugccuggcuaacacgg

SEQ ID NO: 1447162 - RNA, 19 nt, Artificial Sequence
  Description of Artificial Sequence: Synthetic oligonucleotide
  Sense strand starting at position 3644 of SEQ ID NO: 1243864
ccaugaacuguuuguuauu

SEQ ID NO: 1447163 - RNA, 19 nt, Artificial Sequence
  Description of Artificial Sequence: Synthetic oligonucleotide
  Antisense strand to SEQ ID NO: 1447162
aauaacaaacaguucaugg

SEQ ID NO: 1447164 - RNA, 19 nt, Artificial Sequence
  Description of Artificial Sequence: Synthetic oligonucleotide
  Sense strand starting at position 3649 of SEQ ID NO: 1243864
aacuguuuguuauucguuu

SEQ ID NO: 1447165 - RNA, 19 nt, Artificial Sequence
  Description of Artificial Sequence: Synthetic oligonucleotide
  Antisense strand to SEQ ID NO: 1447164
aaacgaauaacaaacaguu

SEQ ID NO: 1447166 - RNA, 19 nt, Artificial Sequence
  Description of Artificial Sequence: Synthetic oligonucleotide
  Sense strand starting at position 3703 of SEQ ID NO: 1243864
ggauuaauguacucuuaga

SEQ ID NO: 1447167 - RNA, 19 nt, Artificial Sequence
  Description of Artificial Sequence: Synthetic oligonucleotide
  Antisense strand to SEQ ID NO: 1447166
ucuaagaguacauuaaucc

SEQ ID NO: 1447168 - RNA, 19 nt, Artificial Sequence
  Description of Artificial Sequence: Synthetic oligonucleotide
  Sense strand starting at position 3851 of SEQ ID NO: 1243864
ucaucauuguucuggcuuu

SEQ ID NO: 1447169 - RNA, 19 nt, Artificial Sequence
  Description of Artificial Sequence: Synthetic oligonucleotide
  Antisense strand to SEQ ID NO: 1447168
aaagccagaacaaugauga

SEQ ID NO: 1447170 - RNA, 19 nt, Artificial Sequence
  Description of Artificial Sequence: Synthetic oligonucleotide
  Sense strand starting at position 49 of SEQ ID NO: 1243865
ccacgugauagcgauauga

SEQ ID NO: 1447171 - RNA, 19 nt, Artificial Sequence
  Description of Artificial Sequence: Synthetic oligonucleotide
  Antisense strand to SEQ ID NO: 1447170
ucauaucgcuaucacgugg

SEQ ID NO: 1447172 - RNA, 19 nt, Artificial Sequence
  Description of Artificial Sequence: Synthetic oligonucleotide
  Sense strand starting at position 51 of SEQ ID NO: 1243865
acgugauagcgauaugagg

SEQ ID NO: 1447173 - RNA, 19 nt, Artificial Sequence
  Description of Artificial Sequence: Synthetic oligonucleotide
  Antisense strand to SEQ ID NO: 1447172
ccucauaucgcuaucacgu

SEQ ID NO: 1447174 - RNA, 19 nt, Artificial Sequence
  Description of Artificial Sequence: Synthetic oligonucleotide
  Sense strand starting at position 287 of SEQ ID NO: 1243865
gucccagucuuucuagaga

SEQ ID NO: 1447175 - RNA, 19 nt, Artificial Sequence
  Description of Artificial Sequence: Synthetic oligonucleotide
  Antisense strand to SEQ ID NO: 1447174
ucucuagaaagacugggac

SEQ ID NO: 1447176 - RNA, 19 nt, Artificial Sequence
  Description of Artificial Sequence: Synthetic oligonucleotide
  Sense strand starting at position 290 of SEQ ID NO: 1243865
ccagucuuucuagagaccu

SEQ ID NO: 1447177 - RNA, 19 nt, Artificial Sequence
  Description of Artificial Sequence: Synthetic oligonucleotide
  Antisense strand to SEQ ID NO: 1447176
aggucucuagaaagacugg

SEQ ID NO: 1447178 - RNA, 19 nt, Artificial Sequence
  Description of Artificial Sequence: Synthetic oligonucleotide
  Sense strand starting at position 345 of SEQ ID NO: 1243865
gccugaccuccucagaguu

SEQ ID NO: 1447179 - RNA, 19 nt, Artificial Sequence
  Description of Artificial Sequence: Synthetic oligonucleotide
  Antisense strand to SEQ ID NO: 1447178
aacucugaggaggucaggc

SEQ ID NO: 1447180 - RNA, 19 nt, Artificial Sequence
  Description of Artificial Sequence: Synthetic oligonucleotide
  Sense strand starting at position 496 of SEQ ID NO: 1243865
cuccaaguacuggaaguuu

SEQ ID NO: 1447181 - RNA, 19 nt, Artificial Sequence
  Description of Artificial Sequence: Synthetic oligonucleotide
  Antisense strand to SEQ ID NO: 1447180
aaacuuccaguacuuggag

SEQ ID NO: 1447182 - RNA, 19 nt, Artificial Sequence
  Description of Artificial Sequence: Synthetic oligonucleotide
  Sense strand starting at position 650 of SEQ ID NO: 1243865
ugacguugaguugggagau

SEQ ID NO: 1447183 - RNA, 19 nt, Artificial Sequence
  Description of Artificial Sequence: Synthetic oligonucleotide
  Antisense strand to SEQ ID NO: 1447182
aucucccaacucaacguca

SEQ ID NO: 1447184 - RNA, 19 nt, Artificial Sequence
  Description of Artificial Sequence: Synthetic oligonucleotide
  Sense strand starting at position 668 of SEQ ID NO: 1243865
ugaggcucagguugagaau

SEQ ID NO: 1447185 - RNA, 19 nt, Artificial Sequence
  Description of Artificial Sequence: Synthetic oligonucleotide
  Antisense strand to SEQ ID NO: 1447184
auucucaaccugagccuca

SEQ ID NO: 1447186 - RNA, 19 nt, Artificial Sequence
  Description of Artificial Sequence: Synthetic oligonucleotide
  Sense strand starting at position 680 of SEQ ID NO: 1243865
ugagaaugagcccaggguu

SEQ ID NO: 1447187 - RNA, 19 nt, Artificial Sequence
  Description of Artificial Sequence: Synthetic oligonucleotide
  Antisense strand to SEQ ID NO: 1447186
aacccugggcucauucuca

SEQ ID NO: 1447188 - RNA, 19 nt, Artificial Sequence
  Description of Artificial Sequence: Synthetic oligonucleotide
  Sense strand starting at position 683 of SEQ ID NO: 1243865
gaaugagcccaggguuaag

SEQ ID NO: 1447189 - RNA, 19 nt, Artificial Sequence
  Description of Artificial Sequence: Synthetic oligonucleotide
  Antisense strand to SEQ ID NO: 1447188
cuuaacccugggcucauuc

SEQ ID NO: 1447190 - RNA, 19 nt, Artificial Sequence
  Description of Artificial Sequence: Synthetic oligonucleotide
  Sense strand starting at position 703 of SEQ ID NO: 1243865
cggaaaugagccuggguuu

SEQ ID NO: 1447191 - RNA, 19 nt, Artificial Sequence
  Description of Artificial Sequence: Synthetic oligonucleotide
  Antisense strand to SEQ ID NO: 1447190
aaacccaggcucauuuccg

SEQ ID NO: 1447192 - RNA, 19 nt, Artificial Sequence
  Description of Artificial Sequence: Synthetic oligonucleotide
  Sense strand starting at position 714 of SEQ ID NO: 1243865
cuggguuugcagucgaguu

SEQ ID NO: 1447193 - RNA, 19 nt, Artificial Sequence
  Description of Artificial Sequence: Synthetic oligonucleotide
  Antisense strand to SEQ ID NO: 1447192
aacucgacugcaaacccag

SEQ ID NO: 1447194 - RNA, 19 nt, Artificial Sequence
  Description of Artificial Sequence: Synthetic oligonucleotide
  Sense strand starting at position 749 of SEQ ID NO: 1243865
ugaguuugggagugaaacu

SEQ ID NO: 1447195 - RNA, 19 nt, Artificial Sequence
  Description of Artificial Sequence: Synthetic oligonucleotide
  Antisense strand to SEQ ID NO: 1447194
aguuucacucccaaacuca

SEQ ID NO: 1447196 - RNA, 19 nt, Artificial Sequence
  Description of Artificial Sequence: Synthetic oligonucleotide
  Sense strand starting at position 769 of SEQ ID NO: 1243865
gaggguaacguuggagcua

SEQ ID NO: 1447197 - RNA, 19 nt, Artificial Sequence
  Description of Artificial Sequence: Synthetic oligonucleotide
  Antisense strand to SEQ ID NO: 1447196
uagcuccaacguuacccuc

SEQ ID NO: 1447198 - RNA, 19 nt, Artificial Sequence
  Description of Artificial Sequence: Synthetic oligonucleotide
  Sense strand starting at position 871 of SEQ ID NO: 1243865
gcacguuggagccauggau

SEQ ID NO: 1447199 - RNA, 19 nt, Artificial Sequence
  Description of Artificial Sequence: Synthetic oligonucleotide
  Antisense strand to SEQ ID NO: 1447198
auccauggcuccaacgugc

SEQ ID NO: 1447200 - RNA, 19 nt, Artificial Sequence
  Description of Artificial Sequence: Synthetic oligonucleotide
  Sense strand starting at position 897 of SEQ ID NO: 1243865
ggguuaacuuuggugguga

SEQ ID NO: 1447201 - RNA, 19 nt, Artificial Sequence
  Description of Artificial Sequence: Synthetic oligonucleotide
  Antisense strand to SEQ ID NO: 1447200
ucaccaccaaaguuaaccc

SEQ ID NO: 1447202 - RNA, 19 nt, Artificial Sequence
  Description of Artificial Sequence: Synthetic oligonucleotide
  Sense strand starting at position 899 of SEQ ID NO: 1243865
guuaacuuugguggugaau

SEQ ID NO: 1447203 - RNA, 19 nt, Artificial Sequence
  Description of Artificial Sequence: Synthetic oligonucleotide
  Antisense strand to SEQ ID NO: 1447202
auucaccaccaaaguuaac

SEQ ID NO: 1447204 - RNA, 19 nt, Artificial Sequence
  Description of Artificial Sequence: Synthetic oligonucleotide
  Sense strand starting at position 908 of SEQ ID NO: 1243865
gguggugaauuuggaaaca

SEQ ID NO: 1447205 - RNA, 19 nt, Artificial Sequence
  Description of Artificial Sequence: Synthetic oligonucleotide
  Antisense strand to SEQ ID NO: 1447204
uguuuccaaauucaccacc

SEQ ID NO: 1447206 - RNA, 19 nt, Artificial Sequence
  Description of Artificial Sequence: Synthetic oligonucleotide
  Sense strand starting at position 924 of SEQ ID NO: 1243865
acagaauagagucgagguu

SEQ ID NO: 1447207 - RNA, 19 nt, Artificial Sequence
  Description of Artificial Sequence: Synthetic oligonucleotide
  Antisense strand to SEQ ID NO: 1447206
aaccucgacucuauucugu

SEQ ID NO: 1447208 - RNA, 19 nt, Artificial Sequence
  Description of Artificial Sequence: Synthetic oligonucleotide
  Sense strand starting at position 1396 of SEQ ID NO: 1243865
ggcugagucugagucuuag

SEQ ID NO: 1447209 - RNA, 19 nt, Artificial Sequence
  Description of Artificial Sequence: Synthetic oligonucleotide
  Antisense strand to SEQ ID NO: 1447208
cuaagacucagacucagcc

SEQ ID NO: 1447210 - RNA, 19 nt, Artificial Sequence
  Description of Artificial Sequence: Synthetic oligonucleotide
  Sense strand starting at position 1552 of SEQ ID NO: 1243865
ggagucuuaguuuaugaca

SEQ ID NO: 1447211 - RNA, 19 nt, Artificial Sequence
  Description of Artificial Sequence: Synthetic oligonucleotide
  Antisense strand to SEQ ID NO: 1447210
ugucauaaacuaagacucc

SEQ ID NO: 1447212 - RNA, 19 nt, Artificial Sequence
  Description of Artificial Sequence: Synthetic oligonucleotide
  Sense strand starting at position 1620 of SEQ ID NO: 1243865
agucucaaaucuccacgua

SEQ ID NO: 1447213 - RNA, 19 nt, Artificial Sequence
  Description of Artificial Sequence: Synthetic oligonucleotide
  Antisense strand to SEQ ID NO: 1447212
uacguggagauuugagacu

SEQ ID NO: 1447214 - RNA, 19 nt, Artificial Sequence
  Description of Artificial Sequence: Synthetic oligonucleotide
  Sense strand starting at position 1623 of SEQ ID NO: 1243865
cucaaaucuccacguagua

SEQ ID NO: 1447215 - RNA, 19 nt, Artificial Sequence
  Description of Artificial Sequence: Synthetic oligonucleotide
  Antisense strand to SEQ ID NO: 1447214
uacuacguggagauuugag

SEQ ID NO: 1447216 - RNA, 19 nt, Artificial Sequence
  Description of Artificial Sequence: Synthetic oligonucleotide
  Sense strand starting at position 1778 of SEQ ID NO: 1243865
aggucuggagggugugauu

SEQ ID NO: 1447217 - RNA, 19 nt, Artificial Sequence
  Description of Artificial Sequence: Synthetic oligonucleotide
  Antisense strand to SEQ ID NO: 1447216
aaucacacccuccagaccu

SEQ ID NO: 1447218 - RNA, 19 nt, Artificial Sequence
  Description of Artificial Sequence: Synthetic oligonucleotide
  Sense strand starting at position 1828 of SEQ ID NO: 1243865
ugggacgucacucagaguu

SEQ ID NO: 1447219 - RNA, 19 nt, Artificial Sequence
  Description of Artificial Sequence: Synthetic oligonucleotide
  Antisense strand to SEQ ID NO: 1447218
aacucugagugacguccca

SEQ ID NO: 1447220 - RNA, 19 nt, Artificial Sequence
  Description of Artificial Sequence: Synthetic oligonucleotide
  Sense strand starting at position 1896 of SEQ ID NO: 1243865
uggucuugggucugaaauc

SEQ ID NO: 1447221 - RNA, 19 nt, Artificial Sequence
  Description of Artificial Sequence: Synthetic oligonucleotide
  Antisense strand to SEQ ID NO: 1447220
gauuucagacccaagacca

SEQ ID NO: 1447222 - RNA, 19 nt, Artificial Sequence
  Description of Artificial Sequence: Synthetic oligonucleotide
  Sense strand starting at position 1922 of SEQ ID NO: 1243865
cccuaucaucugggacauc

SEQ ID NO: 1447223 - RNA, 19 nt, Artificial Sequence
  Description of Artificial Sequence: Synthetic oligonucleotide
  Antisense strand to SEQ ID NO: 1447222
gaugucccagaugauaggg

SEQ ID NO: 1447224 - RNA, 19 nt, Artificial Sequence
  Description of Artificial Sequence: Synthetic oligonucleotide
  Sense strand starting at position 2187 of SEQ ID NO: 1243865
cagaauuguugggucucca

SEQ ID NO: 1447225 - RNA, 19 nt, Artificial Sequence
  Description of Artificial Sequence: Synthetic oligonucleotide
  Antisense strand to SEQ ID NO: 1447224
uggagacccaacaauucug

SEQ ID NO: 1447226 - RNA, 19 nt, Artificial Sequence
  Description of Artificial Sequence: Synthetic oligonucleotide
  Sense strand starting at position 2191 of SEQ ID NO: 1243865
auuguugggucuccaucau

SEQ ID NO: 1447227 - RNA, 19 nt, Artificial Sequence
  Description of Artificial Sequence: Synthetic oligonucleotide
  Antisense strand to SEQ ID NO: 1447226
augauggagacccaacaau

SEQ ID NO: 1447228 - RNA, 19 nt, Artificial Sequence
  Description of Artificial Sequence: Synthetic oligonucleotide
  Sense strand starting at position 2368 of SEQ ID NO: 1243865
agaacuucuuggcccuaau

SEQ ID NO: 1447229 - RNA, 19 nt, Artificial Sequence
  Description of Artificial Sequence: Synthetic oligonucleotide
  Antisense strand to SEQ ID NO: 1447228
auuagggccaagaaguucu

SEQ ID NO: 1447230 - RNA, 19 nt, Artificial Sequence
  Description of Artificial Sequence: Synthetic oligonucleotide
  Sense strand starting at position 2418 of SEQ ID NO: 1243865
uuuauugaguaaucuguga

SEQ ID NO: 1447231 - RNA, 19 nt, Artificial Sequence
  Description of Artificial Sequence: Synthetic oligonucleotide
  Antisense strand to SEQ ID NO: 1447230
ucacagauuacucaauaaa

SEQ ID NO: 1447232 - RNA, 19 nt, Artificial Sequence
  Description of Artificial Sequence: Synthetic oligonucleotide
  Sense strand starting at position 2422 of SEQ ID NO: 1243865
uugaguaaucugugauagg

SEQ ID NO: 1447233 - RNA, 19 nt, Artificial Sequence
  Description of Artificial Sequence: Synthetic oligonucleotide
  Antisense strand to SEQ ID NO: 1447232
ccuaucacagauuacucaa

SEQ ID NO: 1447234 - RNA, 19 nt, Artificial Sequence
  Description of Artificial Sequence: Synthetic oligonucleotide
  Sense strand starting at position 2431 of SEQ ID NO: 1243865
cugugauaggauuaugcca

SEQ ID NO: 1447235 - RNA, 19 nt, Artificial Sequence
  Description of Artificial Sequence: Synthetic oligonucleotide
  Antisense strand to SEQ ID NO: 1447234
uggcauaauccuaucacag

SEQ ID NO: 1447236 - RNA, 19 nt, Artificial Sequence
  Description of Artificial Sequence: Synthetic oligonucleotide
  Sense strand starting at position 2757 of SEQ ID NO: 1243865
gguuguguucugcuaugug

SEQ ID NO: 1447237 - RNA, 19 nt, Artificial Sequence
  Description of Artificial Sequence: Synthetic oligonucleotide
  Antisense strand to SEQ ID NO: 1447236
cacauagcagaacacaacc

SEQ ID NO: 1447238 - RNA, 19 nt, Artificial Sequence
  Description of Artificial Sequence: Synthetic oligonucleotide
  Sense strand starting at position 2868 of SEQ ID NO: 1243865
caucauaggcaccguaauu

SEQ ID NO: 1447239 - RNA, 19 nt, Artificial Sequence
  Description of Artificial Sequence: Synthetic oligonucleotide
  Antisense strand to SEQ ID NO: 1447238
aauuacggugccuaugaug

SEQ ID NO: 1447240 - RNA, 19 nt, Artificial Sequence
  Description of Artificial Sequence: Synthetic oligonucleotide
  Sense strand starting at position 3276 of SEQ ID NO: 1243865
uuuauuugguauucgguau

SEQ ID NO: 1447241 - RNA, 19 nt, Artificial Sequence
  Description of Artificial Sequence: Synthetic oligonucleotide
  Antisense strand to SEQ ID NO: 1447240
auaccgaauaccaaauaaa

SEQ ID NO: 1447242 - RNA, 19 nt, Artificial Sequence
  Description of Artificial Sequence: Synthetic oligonucleotide
  Sense strand starting at position 3277 of SEQ ID NO: 1243865
uuauuugguauucgguauu

SEQ ID NO: 1447243 - RNA, 19 nt, Artificial Sequence
  Description of Artificial Sequence: Synthetic oligonucleotide
  Antisense strand to SEQ ID NO: 1447242
aauaccgaauaccaaauaa

SEQ ID NO: 1447244 - RNA, 19 nt, Artificial Sequence
  Description of Artificial Sequence: Synthetic oligonucleotide
  Sense strand starting at position 3360 of SEQ ID NO: 1243865
agcuauuuauuagggauua

SEQ ID NO: 1447245 - RNA, 19 nt, Artificial Sequence
  Description of Artificial Sequence: Synthetic oligonucleotide
  Antisense strand to SEQ ID NO: 1447244
uaaucccuaauaaauagcu

SEQ ID NO: 1447246 - RNA, 19 nt, Artificial Sequence
  Description of Artificial Sequence: Synthetic oligonucleotide
  Sense strand starting at position 3494 of SEQ ID NO: 1243865
ggagcuguccagcauugga

SEQ ID NO: 1447247 - RNA, 19 nt, Artificial Sequence
  Description of Artificial Sequence: Synthetic oligonucleotide
  Antisense strand to SEQ ID NO: 1447246
uccaaugcuggacagcucc

SEQ ID NO: 1447248 - RNA, 19 nt, Artificial Sequence
  Description of Artificial Sequence: Synthetic oligonucleotide
  Sense strand starting at position 3727 of SEQ ID NO: 1243865
auuguugaaucuuccauga

SEQ ID NO: 1447249 - RNA, 19 nt, Artificial Sequence
  Description of Artificial Sequence: Synthetic oligonucleotide
  Antisense strand to SEQ ID NO: 1447248
ucauggaagauucaacaau

SEQ ID NO: 1447250 - RNA, 19 nt, Artificial Sequence
  Description of Artificial Sequence: Synthetic oligonucleotide
  Sense strand starting at position 124 of SEQ ID NO: 1243866
uagugcaaacaugguaaua

SEQ ID NO: 1447251 - RNA, 19 nt, Artificial Sequence
  Description of Artificial Sequence: Synthetic oligonucleotide
  Antisense strand to SEQ ID NO: 1447250
uauuaccauguuugcacua

SEQ ID NO: 1447252 - RNA, 19 nt, Artificial Sequence
  Description of Artificial Sequence: Synthetic oligonucleotide
  Sense strand starting at position 259 of SEQ ID NO: 1243866
augguaaagugucuaauag

SEQ ID NO: 1447253 - RNA, 19 nt, Artificial Sequence
  Description of Artificial Sequence: Synthetic oligonucleotide
  Antisense strand to SEQ ID NO: 1447252
cuauuagacacuuuaccau

SEQ ID NO: 1447254 - RNA, 19 nt, Artificial Sequence
  Description of Artificial Sequence: Synthetic oligonucleotide
  Sense strand starting at position 268 of SEQ ID NO: 1243866
ugucuaauaggucacugau

SEQ ID NO: 1447255 - RNA, 19 nt, Artificial Sequence
  Description of Artificial Sequence: Synthetic oligonucleotide
  Antisense strand to SEQ ID NO: 1447254
aucagugaccuauuagaca

SEQ ID NO: 1447256 - RNA, 19 nt, Artificial Sequence
  Description of Artificial Sequence: Synthetic oligonucleotide
  Sense strand starting at position 270 of SEQ ID NO: 1243866
ucuaauaggucacugauau

SEQ ID NO: 1447257 - RNA, 19 nt, Artificial Sequence
  Description of Artificial Sequence: Synthetic oligonucleotide
  Antisense strand to SEQ ID NO: 1447256
auaucagugaccuauuaga

SEQ ID NO: 1447258 - RNA, 19 nt, Artificial Sequence
  Description of Artificial Sequence: Synthetic oligonucleotide
  Sense strand starting at position 271 of SEQ ID NO: 1243866
cuaauaggucacugauauc

SEQ ID NO: 1447259 - RNA, 19 nt, Artificial Sequence
  Description of Artificial Sequence: Synthetic oligonucleotide
  Antisense strand to SEQ ID NO: 1447258
gauaucagugaccuauuag

SEQ ID NO: 1447260 - RNA, 19 nt, Artificial Sequence
  Description of Artificial Sequence: Synthetic oligonucleotide
  Sense strand starting at position 280 of SEQ ID NO: 1243866
cacugauaucagugucaug

SEQ ID NO: 1447261 - RNA, 19 nt, Artificial Sequence
  Description of Artificial Sequence: Synthetic oligonucleotide
  Antisense strand to SEQ ID NO: 1447260
caugacacugauaucagug

SEQ ID NO: 1447262 - RNA, 19 nt, Artificial Sequence
  Description of Artificial Sequence: Synthetic oligonucleotide
  Sense strand starting at position 311 of SEQ ID NO: 1243866
auucccugucauuauggaa

SEQ ID NO: 1447263 - RNA, 19 nt, Artificial Sequence
  Description of Artificial Sequence: Synthetic oligonucleotide
  Antisense strand to SEQ ID NO: 1447262
uuccauaaugacagggaau

SEQ ID NO: 1447264 - RNA, 19 nt, Artificial Sequence
  Description of Artificial Sequence: Synthetic oligonucleotide
  Sense strand starting at position 526 of SEQ ID NO: 1243866
gccagauaacaauauguug

SEQ ID NO: 1447265 - RNA, 19 nt, Artificial Sequence
  Description of Artificial Sequence: Synthetic oligonucleotide
  Antisense strand to SEQ ID NO: 1447264
caacauauuguuaucuggc

SEQ ID NO: 1447266 - RNA, 19 nt, Artificial Sequence
  Description of Artificial Sequence: Synthetic oligonucleotide
  Sense strand starting at position 537 of SEQ ID NO: 1243866
auauguugccuccaggaua

SEQ ID NO: 1447267 - RNA, 19 nt, Artificial Sequence
  Description of Artificial Sequence: Synthetic oligonucleotide
  Antisense strand to SEQ ID NO: 1447266
uauccuggaggcaacauau

SEQ ID NO: 1447268 - RNA, 19 nt, Artificial Sequence
  Description of Artificial Sequence: Synthetic oligonucleotide
  Sense strand starting at position 696 of SEQ ID NO: 1243866
accugcuacuacucgagaa

SEQ ID NO: 1447269 - RNA, 19 nt, Artificial Sequence
  Description of Artificial Sequence: Synthetic oligonucleotide
  Antisense strand to SEQ ID NO: 1447268
uucucgaguaguagcaggu

SEQ ID NO: 1447270 - RNA, 19 nt, Artificial Sequence
  Description of Artificial Sequence: Synthetic oligonucleotide
  Sense strand starting at position 698 of SEQ ID NO: 1243866
cugcuacuacucgagaaga

SEQ ID NO: 1447271 - RNA, 19 nt, Artificial Sequence
  Description of Artificial Sequence: Synthetic oligonucleotide
  Antisense strand to SEQ ID NO: 1447270
ucuucucgaguaguagcag

SEQ ID NO: 1447272 - RNA, 19 nt, Artificial Sequence
  Description of Artificial Sequence: Synthetic oligonucleotide
  Sense strand starting at position 700 of SEQ ID NO: 1243866
gcuacuacucgagaagacu

SEQ ID NO: 1447273 - RNA, 19 nt, Artificial Sequence
  Description of Artificial Sequence: Synthetic oligonucleotide
  Antisense strand to SEQ ID NO: 1447272
agucuucucgaguaguagc

SEQ ID NO: 1447274 - RNA, 19 nt, Artificial Sequence
  Description of Artificial Sequence: Synthetic oligonucleotide
  Sense strand starting at position 818 of SEQ ID NO: 1243866
gcgaguuuccuuagggagu

SEQ ID NO: 1447275 - RNA, 19 nt, Artificial Sequence
  Description of Artificial Sequence: Synthetic oligonucleotide
  Antisense strand to SEQ ID NO: 1447274
acucccuaaggaaacucgc

SEQ ID NO: 1447276 - RNA, 19 nt, Artificial Sequence
  Description of Artificial Sequence: Synthetic oligonucleotide
  Sense strand starting at position 898 of SEQ ID NO: 1243866
cguuccguucuuucaguga

SEQ ID NO: 1447277 - RNA, 19 nt, Artificial Sequence
  Description of Artificial Sequence: Synthetic oligonucleotide
  Antisense strand to SEQ ID NO: 1447276
ucacugaaagaacggaacg

SEQ ID NO: 1447278 - RNA, 19 nt, Artificial Sequence
  Description of Artificial Sequence: Synthetic oligonucleotide
  Sense strand starting at position 1141 of SEQ ID NO: 1243866
ggauaagaauccuugcucu

SEQ ID NO: 1447279 - RNA, 19 nt, Artificial Sequence
  Description of Artificial Sequence: Synthetic oligonucleotide
  Antisense strand to SEQ ID NO: 1447278
agagcaaggauucuuaucc

SEQ ID NO: 1447280 - RNA, 19 nt, Artificial Sequence
  Description of Artificial Sequence: Synthetic oligonucleotide
  Sense strand starting at position 1145 of SEQ ID NO: 1243866
aagaauccuugcucuggua

SEQ ID NO: 1447281 - RNA, 19 nt, Artificial Sequence
  Description of Artificial Sequence: Synthetic oligonucleotide
  Antisense strand to SEQ ID NO: 1447280
uaccagagcaaggauucuu

SEQ ID NO: 1447282 - RNA, 19 nt, Artificial Sequence
  Description of Artificial Sequence: Synthetic oligonucleotide
  Sense strand starting at position 1152 of SEQ ID NO: 1243866
cuugcucugguagaaacaa

SEQ ID NO: 1447283 - RNA, 19 nt, Artificial Sequence
  Description of Artificial Sequence: Synthetic oligonucleotide
  Antisense strand to SEQ ID NO: 1447282
uuguuucuaccagagcaag

SEQ ID NO: 1447284 - RNA, 19 nt, Artificial Sequence
  Description of Artificial Sequence: Synthetic oligonucleotide
  Sense strand starting at position 1360 of SEQ ID NO: 1243866
uaagcuuuccaagauagug

SEQ ID NO: 1447285 - RNA, 19 nt, Artificial Sequence
  Description of Artificial Sequence: Synthetic oligonucleotide
  Antisense strand to SEQ ID NO: 1447284
cacuaucuuggaaagcuua

SEQ ID NO: 1447286 - RNA, 19 nt, Artificial Sequence
  Description of Artificial Sequence: Synthetic oligonucleotide
  Sense strand starting at position 2534 of SEQ ID NO: 1243866
ucggguguuagauaauuaa

SEQ ID NO: 1447287 - RNA, 19 nt, Artificial Sequence
  Description of Artificial Sequence: Synthetic oligonucleotide
  Antisense strand to SEQ ID NO: 1447286
uuaauuaucuaacacccga

SEQ ID NO: 1447288 - RNA, 19 nt, Artificial Sequence
  Description of Artificial Sequence: Synthetic oligonucleotide
  Sense strand starting at position 2537 of SEQ ID NO: 1243866
gguguuagauaauuaacuc

SEQ ID NO: 1447289 - RNA, 19 nt, Artificial Sequence
  Description of Artificial Sequence: Synthetic oligonucleotide
  Antisense strand to SEQ ID NO: 1447288
gaguuaauuaucuaacacc

SEQ ID NO: 1447290 - RNA, 19 nt, Artificial Sequence
  Description of Artificial Sequence: Synthetic oligonucleotide
  Sense strand starting at position 2587 of SEQ ID NO: 1243866
ucaagcuggccuuaugaca

SEQ ID NO: 1447291 - RNA, 19 nt, Artificial Sequence
  Description of Artificial Sequence: Synthetic oligonucleotide
  Antisense strand to SEQ ID NO: 1447290
ugucauaaggccagcuuga

SEQ ID NO: 1447292 - RNA, 19 nt, Artificial Sequence
  Description of Artificial Sequence: Synthetic oligonucleotide
  Sense strand starting at position 2615 of SEQ ID NO: 1243866
aacguuucugcggacauuu

SEQ ID NO: 1447293 - RNA, 19 nt, Artificial Sequence
  Description of Artificial Sequence: Synthetic oligonucleotide
  Antisense strand to SEQ ID NO: 1447292
aaauguccgcagaaacguu

SEQ ID NO: 1447294 - RNA, 19 nt, Artificial Sequence
  Description of Artificial Sequence: Synthetic oligonucleotide
  Sense strand starting at position 2661 of SEQ ID NO: 1243866
ugaucaguuucguuaaaga

SEQ ID NO: 1447295 - RNA, 19 nt, Artificial Sequence
  Description of Artificial Sequence: Synthetic oligonucleotide
  Antisense strand to SEQ ID NO: 1447294
ucuuuaacgaaacugauca

SEQ ID NO: 1447296 - RNA, 19 nt, Artificial Sequence
  Description of Artificial Sequence: Synthetic oligonucleotide
  Sense strand starting at position 2672 of SEQ ID NO: 1243866
guuaaagaauuugaguauc

SEQ ID NO: 1447297 - RNA, 19 nt, Artificial Sequence
  Description of Artificial Sequence: Synthetic oligonucleotide
  Antisense strand to SEQ ID NO: 1447296
gauacucaaauucuuuaac

SEQ ID NO: 1447298 - RNA, 19 nt, Artificial Sequence
  Description of Artificial Sequence: Synthetic oligonucleotide
  Sense strand starting at position 2712 of SEQ ID NO: 1243866
uaaauucuagcaggaggau

SEQ ID NO: 1447299 - RNA, 19 nt, Artificial Sequence
  Description of Artificial Sequence: Synthetic oligonucleotide
  Antisense strand to SEQ ID NO: 1447298
auccuccugcuagaauuua

SEQ ID NO: 1447300 - RNA, 19 nt, Artificial Sequence
  Description of Artificial Sequence: Synthetic oligonucleotide
  Sense strand starting at position 2777 of SEQ ID NO: 1243866
ggguaaggaugcuuaguaa

SEQ ID NO: 1447301 - RNA, 19 nt, Artificial Sequence
  Description of Artificial Sequence: Synthetic oligonucleotide
  Antisense strand to SEQ ID NO: 1447300
uuacuaagcauccuuaccc

SEQ ID NO: 1447302 - RNA, 19 nt, Artificial Sequence
  Description of Artificial Sequence: Synthetic oligonucleotide
  Sense strand starting at position 2909 of SEQ ID NO: 1243866
aacuauuagccguguauuu

SEQ ID NO: 1447303 - RNA, 19 nt, Artificial Sequence
  Description of Artificial Sequence: Synthetic oligonucleotide
  Antisense strand to SEQ ID NO: 1447302
aaauacacggcuaauaguu

SEQ ID NO: 1447304 - RNA, 19 nt, Artificial Sequence
  Description of Artificial Sequence: Synthetic oligonucleotide
  Sense strand starting at position 2920 of SEQ ID NO: 1243866
guguauuucggugggacca

SEQ ID NO: 1447305 - RNA, 19 nt, Artificial Sequence
  Description of Artificial Sequence: Synthetic oligonucleotide
  Antisense strand to SEQ ID NO: 1447304
uggucccaccgaaauacac

SEQ ID NO: 1447306 - RNA, 19 nt, Artificial Sequence
  Description of Artificial Sequence: Synthetic oligonucleotide
  Sense strand starting at position 2960 of SEQ ID NO: 1243866
guuagcaauguagaaaugu

SEQ ID NO: 1447307 - RNA, 19 nt, Artificial Sequence
  Description of Artificial Sequence: Synthetic oligonucleotide
  Antisense strand to SEQ ID NO: 1447306
acauuucuacauugcuaac

SEQ ID NO: 1447308 - RNA, 19 nt, Artificial Sequence
  Description of Artificial Sequence: Synthetic oligonucleotide
  Sense strand starting at position 3073 of SEQ ID NO: 1243866
gcuaaaguauaagccauaa

SEQ ID NO: 1447309 - RNA, 19 nt, Artificial Sequence
  Description of Artificial Sequence: Synthetic oligonucleotide
  Antisense strand to SEQ ID NO: 1447308
uuauggcuuauacuuuagc

SEQ ID NO: 1447310 - RNA, 19 nt, Artificial Sequence
  Description of Artificial Sequence: Synthetic oligonucleotide
  Sense strand starting at position 3124 of SEQ ID NO: 1243866
gaugaaagacguuaguucu

SEQ ID NO: 1447311 - RNA, 19 nt, Artificial Sequence
  Description of Artificial Sequence: Synthetic oligonucleotide
  Antisense strand to SEQ ID NO: 1447310
agaacuaacgucuuucauc

SEQ ID NO: 1447312 - RNA, 19 nt, Artificial Sequence
  Description of Artificial Sequence: Synthetic oligonucleotide
  Sense strand starting at position 3154 of SEQ ID NO: 1243866
cuuuguaagagaggugauu

SEQ ID NO: 1447313 - RNA, 19 nt, Artificial Sequence
  Description of Artificial Sequence: Synthetic oligonucleotide
  Antisense strand to SEQ ID NO: 1447312
aaucaccucucuuacaaag

SEQ ID NO: 1447314 - RNA, 19 nt, Artificial Sequence
  Description of Artificial Sequence: Synthetic oligonucleotide
  Sense strand starting at position 3156 of SEQ ID NO: 1243866
uuguaagagaggugauucu

SEQ ID NO: 1447315 - RNA, 19 nt, Artificial Sequence
  Description of Artificial Sequence: Synthetic oligonucleotide
  Antisense strand to SEQ ID NO: 1447314
agaaucaccucucuuacaa

SEQ ID NO: 1447316 - RNA, 19 nt, Artificial Sequence
  Description of Artificial Sequence: Synthetic oligonucleotide
  Sense strand starting at position 3263 of SEQ ID NO: 1243866
cccuauuggguagacgaua

SEQ ID NO: 1447317 - RNA, 19 nt, Artificial Sequence
  Description of Artificial Sequence: Synthetic oligonucleotide
  Antisense strand to SEQ ID NO: 1447316
uaucgucuacccaauaggg

SEQ ID NO: 1447318 - RNA, 19 nt, Artificial Sequence
  Description of Artificial Sequence: Synthetic oligonucleotide
  Sense strand starting at position 3301 of SEQ ID NO: 1243866
uuagguuacagugagaagu

SEQ ID NO: 1447319 - RNA, 19 nt, Artificial Sequence
  Description of Artificial Sequence: Synthetic oligonucleotide
  Antisense strand to SEQ ID NO: 1447318
acuucucacuguaaccuaa

SEQ ID NO: 1447320 - RNA, 19 nt, Artificial Sequence
  Description of Artificial Sequence: Synthetic oligonucleotide
  Sense strand starting at position 3413 of SEQ ID NO: 1243866
aaagauuguucugcaaaga

SEQ ID NO: 1447321 - RNA, 19 nt, Artificial Sequence
  Description of Artificial Sequence: Synthetic oligonucleotide
  Antisense strand to SEQ ID NO: 1447320
ucuuugcagaacaaucuuu

SEQ ID NO: 1447322 - RNA, 19 nt, Artificial Sequence
  Description of Artificial Sequence: Synthetic oligonucleotide
  Sense strand starting at position 3447 of SEQ ID NO: 1243866
uguuguaagagugaauauu

SEQ ID NO: 1447323 - RNA, 19 nt, Artificial Sequence
  Description of Artificial Sequence: Synthetic oligonucleotide
  Antisense strand to SEQ ID NO: 1447322
aauauucacucuuacaaca

SEQ ID NO: 1447324 - RNA, 19 nt, Artificial Sequence
  Description of Artificial Sequence: Synthetic oligonucleotide
  Sense strand starting at position 3457 of SEQ ID NO: 1243866
gugaauauuuaugcuugca

SEQ ID NO: 1447325 - RNA, 19 nt, Artificial Sequence
  Description of Artificial Sequence: Synthetic oligonucleotide
  Antisense strand to SEQ ID NO: 1447324
ugcaagcauaaauauucac

SEQ ID NO: 1447326 - RNA, 19 nt, Artificial Sequence
  Description of Artificial Sequence: Synthetic oligonucleotide
  Sense strand starting at position 3639 of SEQ ID NO: 1243866
ucaauagcuugaucaaguc

SEQ ID NO: 1447327 - RNA, 19 nt, Artificial Sequence
  Description of Artificial Sequence: Synthetic oligonucleotide
  Antisense strand to SEQ ID NO: 1447326
gacuugaucaagcuauuga

SEQ ID NO: 1447328 - RNA, 19 nt, Artificial Sequence
  Description of Artificial Sequence: Synthetic oligonucleotide
  Sense strand starting at position 3749 of SEQ ID NO: 1243866
cuguaacuuuaaguacauu

SEQ ID NO: 1447329 - RNA, 19 nt, Artificial Sequence
  Description of Artificial Sequence: Synthetic oligonucleotide
  Antisense strand to SEQ ID NO: 1447328
aauguacuuaaaguuacag

SEQ ID NO: 1447330 - RNA, 19 nt, Artificial Sequence
  Description of Artificial Sequence: Synthetic oligonucleotide
  Sense strand starting at position 36 of SEQ ID NO: 1243867
cccucaauggccuagauca

SEQ ID NO: 1447331 - RNA, 19 nt, Artificial Sequence
  Description of Artificial Sequence: Synthetic oligonucleotide
  Antisense strand to SEQ ID NO: 1447330
ugaucuaggccauugaggg

SEQ ID NO: 1447332 - RNA, 19 nt, Artificial Sequence
  Description of Artificial Sequence: Synthetic oligonucleotide
  Sense strand starting at position 254 of SEQ ID NO: 1243867
ccacgaguaugcucccagu

SEQ ID NO: 1447333 - RNA, 19 nt, Artificial Sequence
  Description of Artificial Sequence: Synthetic oligonucleotide
  Antisense strand to SEQ ID NO: 1447332
acugggagcauacucgugg

SEQ ID NO: 1447334 - RNA, 19 nt, Artificial Sequence
  Description of Artificial Sequence: Synthetic oligonucleotide
  Sense strand starting at position 257 of SEQ ID NO: 1243867
cgaguaugcucccaguuuc

SEQ ID NO: 1447335 - RNA, 19 nt, Artificial Sequence
  Description of Artificial Sequence: Synthetic oligonucleotide
  Antisense strand to SEQ ID NO: 1447334
gaaacugggagcauacucg

SEQ ID NO: 1447336 - RNA, 19 nt, Artificial Sequence
  Description of Artificial Sequence: Synthetic oligonucleotide
  Sense strand starting at position 406 of SEQ ID NO: 1243867
ccuaguucucagcacggga

SEQ ID NO: 1447337 - RNA, 19 nt, Artificial Sequence
  Description of Artificial Sequence: Synthetic oligonucleotide
  Antisense strand to SEQ ID NO: 1447336
ucccgugcugagaacuagg

SEQ ID NO: 1447338 - RNA, 19 nt, Artificial Sequence
  Description of Artificial Sequence: Synthetic oligonucleotide
  Sense strand starting at position 519 of SEQ ID NO: 1243867
cagcuaaaucgcuguguga

SEQ ID NO: 1447339 - RNA, 19 nt, Artificial Sequence
  Description of Artificial Sequence: Synthetic oligonucleotide
  Antisense strand to SEQ ID NO: 1447338
ucacacagcgauuuagcug

SEQ ID NO: 1447340 - RNA, 19 nt, Artificial Sequence
  Description of Artificial Sequence: Synthetic oligonucleotide
  Sense strand starting at position 521 of SEQ ID NO: 1243867
gcuaaaucgcugugugacc

SEQ ID NO: 1447341 - RNA, 19 nt, Artificial Sequence
  Description of Artificial Sequence: Synthetic oligonucleotide
  Antisense strand to SEQ ID NO: 1447340
ggucacacagcgauuuagc

SEQ ID NO: 1447342 - RNA, 19 nt, Artificial Sequence
  Description of Artificial Sequence: Synthetic oligonucleotide
  Sense strand starting at position 544 of SEQ ID NO: 1243867
gcaagucacuucgacucuu

SEQ ID NO: 1447343 - RNA, 19 nt, Artificial Sequence
  Description of Artificial Sequence: Synthetic oligonucleotide
  Antisense strand to SEQ ID NO: 1447342
aagagucgaagugacuugc

SEQ ID NO: 1447344 - RNA, 19 nt, Artificial Sequence
  Description of Artificial Sequence: Synthetic oligonucleotide
  Sense strand starting at position 688 of SEQ ID NO: 1243867
cuuggccuugucuagacaa

SEQ ID NO: 1447345 - RNA, 19 nt, Artificial Sequence
  Description of Artificial Sequence: Synthetic oligonucleotide
  Antisense strand to SEQ ID NO: 1447344
uugucuagacaaggccaag

SEQ ID NO: 1447346 - RNA, 19 nt, Artificial Sequence
  Description of Artificial Sequence: Synthetic oligonucleotide
  Sense strand starting at position 690 of SEQ ID NO: 1243867
uggccuugucuagacaauc

SEQ ID NO: 1447347 - RNA, 19 nt, Artificial Sequence
  Description of Artificial Sequence: Synthetic oligonucleotide
  Antisense strand to SEQ ID NO: 1447346
gauugucuagacaaggcca

SEQ ID NO: 1447348 - RNA, 19 nt, Artificial Sequence
  Description of Artificial Sequence: Synthetic oligonucleotide
  Sense strand starting at position 743 of SEQ ID NO: 1243867
aggcaacuccgcuaugaug

SEQ ID NO: 1447349 - RNA, 19 nt, Artificial Sequence
  Description of Artificial Sequence: Synthetic oligonucleotide
  Antisense strand to SEQ ID NO: 1447348
caucauagcggaguugccu

SEQ ID NO: 1447350 - RNA, 19 nt, Artificial Sequence
  Description of Artificial Sequence: Synthetic oligonucleotide
  Sense strand starting at position 840 of SEQ ID NO: 1243867
gggagaugaugaggcguua

SEQ ID NO: 1447351 - RNA, 19 nt, Artificial Sequence
  Description of Artificial Sequence: Synthetic oligonucleotide
  Antisense strand to SEQ ID NO: 1447350
uaacgccucaucaucuccc

SEQ ID NO: 1447352 - RNA, 19 nt, Artificial Sequence
  Description of Artificial Sequence: Synthetic oligonucleotide
  Sense strand starting at position 1141 of SEQ ID NO: 1243867
ggagcuugacuccacacua

SEQ ID NO: 1447353 - RNA, 19 nt, Artificial Sequence
  Description of Artificial Sequence: Synthetic oligonucleotide
  Antisense strand to SEQ ID NO: 1447352
uaguguggagucaagcucc

SEQ ID NO: 1447354 - RNA, 19 nt, Artificial Sequence
  Description of Artificial Sequence: Synthetic oligonucleotide
  Sense strand starting at position 1205 of SEQ ID NO: 1243867
cgcaauaaggcagguuaau

SEQ ID NO: 1447355 - RNA, 19 nt, Artificial Sequence
  Description of Artificial Sequence: Synthetic oligonucleotide
  Antisense strand to SEQ ID NO: 1447354
auuaaccugccuuauugcg

SEQ ID NO: 1447356 - RNA, 19 nt, Artificial Sequence
  Description of Artificial Sequence: Synthetic oligonucleotide
  Sense strand starting at position 1211 of SEQ ID NO: 1243867
aaggcagguuaaugaucaa

SEQ ID NO: 1447357 - RNA, 19 nt, Artificial Sequence
  Description of Artificial Sequence: Synthetic oligonucleotide
  Antisense strand to SEQ ID NO: 1447356
uugaucauuaaccugccuu

SEQ ID NO: 1447358 - RNA, 19 nt, Artificial Sequence
  Description of Artificial Sequence: Synthetic oligonucleotide
  Sense strand starting at position 1214 of SEQ ID NO: 1243867
gcagguuaaugaucaaguu

SEQ ID NO: 1447359 - RNA, 19 nt, Artificial Sequence
  Description of Artificial Sequence: Synthetic oligonucleotide
  Antisense strand to SEQ ID NO: 1447358
aacuugaucauuaaccugc

SEQ ID NO: 1447360 - RNA, 19 nt, Artificial Sequence
  Description of Artificial Sequence: Synthetic oligonucleotide
  Sense strand starting at position 1223 of SEQ ID NO: 1243867
ugaucaaguucuggcacaa

SEQ ID NO: 1447361 - RNA, 19 nt, Artificial Sequence
  Description of Artificial Sequence: Synthetic oligonucleotide
  Antisense strand to SEQ ID NO: 1447360
uugugccagaacuugauca

SEQ ID NO: 1447362 - RNA, 19 nt, Artificial Sequence
  Description of Artificial Sequence: Synthetic oligonucleotide
  Sense strand starting at position 1347 of SEQ ID NO: 1243867
ccugaagaccugcgguuau

SEQ ID NO: 1447363 - RNA, 19 nt, Artificial Sequence
  Description of Artificial Sequence: Synthetic oligonucleotide
  Antisense strand to SEQ ID NO: 1447362
auaaccgcaggucuucagg

SEQ ID NO: 1447364 - RNA, 19 nt, Artificial Sequence
  Description of Artificial Sequence: Synthetic oligonucleotide
  Sense strand starting at position 2004 of SEQ ID NO: 1243867
gcaacucguccgucuugau

SEQ ID NO: 1447365 - RNA, 19 nt, Artificial Sequence
  Description of Artificial Sequence: Synthetic oligonucleotide
  Antisense strand to SEQ ID NO: 1447364
aucaagacggacgaguugc

SEQ ID NO: 1447366 - RNA, 19 nt, Artificial Sequence
  Description of Artificial Sequence: Synthetic oligonucleotide
  Sense strand starting at position 2007 of SEQ ID NO: 1243867
acucguccgucuugauaac

SEQ ID NO: 1447367 - RNA, 19 nt, Artificial Sequence
  Description of Artificial Sequence: Synthetic oligonucleotide
  Antisense strand to SEQ ID NO: 1447366
guuaucaagacggacgagu

SEQ ID NO: 1447368 - RNA, 19 nt, Artificial Sequence
  Description of Artificial Sequence: Synthetic oligonucleotide
  Sense strand starting at position 2265 of SEQ ID NO: 1243867
gacuuuccagaacgucuua

SEQ ID NO: 1447369 - RNA, 19 nt, Artificial Sequence
  Description of Artificial Sequence: Synthetic oligonucleotide
  Antisense strand to SEQ ID NO: 1447368
uaagacguucuggaaaguc

SEQ ID NO: 1447370 - RNA, 19 nt, Artificial Sequence
  Description of Artificial Sequence: Synthetic oligonucleotide
  Sense strand starting at position 2395 of SEQ ID NO: 1243867
gguggagacuggucugguu

SEQ ID NO: 1447371 - RNA, 19 nt, Artificial Sequence
  Description of Artificial Sequence: Synthetic oligonucleotide
  Antisense strand to SEQ ID NO: 1447370
aaccagaccagucuccacc

SEQ ID NO: 1447372 - RNA, 19 nt, Artificial Sequence
  Description of Artificial Sequence: Synthetic oligonucleotide
  Sense strand starting at position 2408 of SEQ ID NO: 1243867
cugguucugccauggcuaa

SEQ ID NO: 1447373 - RNA, 19 nt, Artificial Sequence
  Description of Artificial Sequence: Synthetic oligonucleotide
  Antisense strand to SEQ ID NO: 1447372
uuagccauggcagaaccag

SEQ ID NO: 1447374 - RNA, 19 nt, Artificial Sequence
  Description of Artificial Sequence: Synthetic oligonucleotide
  Sense strand starting at position 2409 of SEQ ID NO: 1243867
ugguucugccauggcuaau

SEQ ID NO: 1447375 - RNA, 19 nt, Artificial Sequence
  Description of Artificial Sequence: Synthetic oligonucleotide
  Antisense strand to SEQ ID NO: 1447374
auuagccauggcagaacca

SEQ ID NO: 1447376 - RNA, 19 nt, Artificial Sequence
  Description of Artificial Sequence: Synthetic oligonucleotide
  Sense strand starting at position 2485 of SEQ ID NO: 1243867
gucugucaucugcgguguu

SEQ ID NO: 1447377 - RNA, 19 nt, Artificial Sequence
  Description of Artificial Sequence: Synthetic oligonucleotide
  Antisense strand to SEQ ID NO: 1447376
aacaccgcagaugacagac

SEQ ID NO: 1447378 - RNA, 19 nt, Artificial Sequence
  Description of Artificial Sequence: Synthetic oligonucleotide
  Sense strand starting at position 2561 of SEQ ID NO: 1243867
gcuggauuauugagggagu

SEQ ID NO: 1447379 - RNA, 19 nt, Artificial Sequence
  Description of Artificial Sequence: Synthetic oligonucleotide
  Antisense strand to SEQ ID NO: 1447378
acucccucaauaauccagc

SEQ ID NO: 1447380 - RNA, 19 nt, Artificial Sequence
  Description of Artificial Sequence: Synthetic oligonucleotide
  Sense strand starting at position 2635 of SEQ ID NO: 1243867
gaucaagagucagaaugga

SEQ ID NO: 1447381 - RNA, 19 nt, Artificial Sequence
  Description of Artificial Sequence: Synthetic oligonucleotide
  Antisense strand to SEQ ID NO: 1447380
uccauucugacucuugauc

SEQ ID NO: 1447382 - RNA, 19 nt, Artificial Sequence
  Description of Artificial Sequence: Synthetic oligonucleotide
  Sense strand starting at position 2908 of SEQ ID NO: 1243867
aggucuugcagugaguuga

SEQ ID NO: 1447383 - RNA, 19 nt, Artificial Sequence
  Description of Artificial Sequence: Synthetic oligonucleotide
  Antisense strand to SEQ ID NO: 1447382
ucaacucacugcaagaccu

SEQ ID NO: 1447384 - RNA, 19 nt, Artificial Sequence
  Description of Artificial Sequence: Synthetic oligonucleotide
  Sense strand starting at position 3014 of SEQ ID NO: 1243867
agcguuugucaagcucuaa

SEQ ID NO: 1447385 - RNA, 19 nt, Artificial Sequence
  Description of Artificial Sequence: Synthetic oligonucleotide
  Antisense strand to SEQ ID NO: 1447384
uuagagcuugacaaacgcu

SEQ ID NO: 1447386 - RNA, 19 nt, Artificial Sequence
  Description of Artificial Sequence: Synthetic oligonucleotide
  Sense strand starting at position 3015 of SEQ ID NO: 1243867
gcguuugucaagcucuaau

SEQ ID NO: 1447387 - RNA, 19 nt, Artificial Sequence
  Description of Artificial Sequence: Synthetic oligonucleotide
  Antisense strand to SEQ ID NO: 1447386
auuagagcuugacaaacgc

SEQ ID NO: 1447388 - RNA, 19 nt, Artificial Sequence
  Description of Artificial Sequence: Synthetic oligonucleotide
  Sense strand starting at position 3114 of SEQ ID NO: 1243867
gaccuuguucuggagagca

SEQ ID NO: 1447389 - RNA, 19 nt, Artificial Sequence
  Description of Artificial Sequence: Synthetic oligonucleotide
  Antisense strand to SEQ ID NO: 1447388
ugcucuccagaacaagguc

SEQ ID NO: 1447390 - RNA, 19 nt, Artificial Sequence
  Description of Artificial Sequence: Synthetic oligonucleotide
  Sense strand starting at position 3149 of SEQ ID NO: 1243867
agcgacuugaugugagcau

SEQ ID NO: 1447391 - RNA, 19 nt, Artificial Sequence
  Description of Artificial Sequence: Synthetic oligonucleotide
  Antisense strand to SEQ ID NO: 1447390
augcucacaucaagucgcu

SEQ ID NO: 1447392 - RNA, 19 nt, Artificial Sequence
  Description of Artificial Sequence: Synthetic oligonucleotide
  Sense strand starting at position 3150 of SEQ ID NO: 1243867
gcgacuugaugugagcauu

SEQ ID NO: 1447393 - RNA, 19 nt, Artificial Sequence
  Description of Artificial Sequence: Synthetic oligonucleotide
  Antisense strand to SEQ ID NO: 1447392
aaugcucacaucaagucgc

SEQ ID NO: 1447394 - RNA, 19 nt, Artificial Sequence
  Description of Artificial Sequence: Synthetic oligonucleotide
  Sense strand starting at position 3189 of SEQ ID NO: 1243867
gagaacugguaagauucuu

SEQ ID NO: 1447395 - RNA, 19 nt, Artificial Sequence
  Description of Artificial Sequence: Synthetic oligonucleotide
  Antisense strand to SEQ ID NO: 1447394
aagaaucuuaccaguucuc

SEQ ID NO: 1447396 - RNA, 19 nt, Artificial Sequence
  Description of Artificial Sequence: Synthetic oligonucleotide
  Sense strand starting at position 659 of SEQ ID NO: 1243868
gggagaagccucuguucug

SEQ ID NO: 1447397 - RNA, 19 nt, Artificial Sequence
  Description of Artificial Sequence: Synthetic oligonucleotide
  Antisense strand to SEQ ID NO: 1447396
cagaacagaggcuucuccc

SEQ ID NO: 1447398 - RNA, 19 nt, Artificial Sequence
  Description of Artificial Sequence: Synthetic oligonucleotide
  Sense strand starting at position 660 of SEQ ID NO: 1243868
ggagaagccucuguucugu

SEQ ID NO: 1447399 - RNA, 19 nt, Artificial Sequence
  Description of Artificial Sequence: Synthetic oligonucleotide
  Antisense strand to SEQ ID NO: 1447398
acagaacagaggcuucucc

SEQ ID NO: 1447400 - RNA, 19 nt, Artificial Sequence
  Description of Artificial Sequence: Synthetic oligonucleotide
  Sense strand starting at position 664 of SEQ ID NO: 1243868
aagccucuguucuguguaa

SEQ ID NO: 1447401 - RNA, 19 nt, Artificial Sequence
  Description of Artificial Sequence: Synthetic oligonucleotide
  Antisense strand to SEQ ID NO: 1447400
uuacacagaacagaggcuu

SEQ ID NO: 1447402 - RNA, 19 nt, Artificial Sequence
  Description of Artificial Sequence: Synthetic oligonucleotide
  Sense strand starting at position 668 of SEQ ID NO: 1243868
cucuguucuguguaaggag

SEQ ID NO: 1447403 - RNA, 19 nt, Artificial Sequence
  Description of Artificial Sequence: Synthetic oligonucleotide
  Antisense strand to SEQ ID NO: 1447402
cuccuuacacagaacagag

SEQ ID NO: 1447404 - RNA, 19 nt, Artificial Sequence
  Description of Artificial Sequence: Synthetic oligonucleotide
  Sense strand starting at position 844 of SEQ ID NO: 1243868
gagggaagcuugucugaag

SEQ ID NO: 1447405 - RNA, 19 nt, Artificial Sequence
  Description of Artificial Sequence: Synthetic oligonucleotide
  Antisense strand to SEQ ID NO: 1447404
cuucagacaagcuucccuc

SEQ ID NO: 1447406 - RNA, 19 nt, Artificial Sequence
  Description of Artificial Sequence: Synthetic oligonucleotide
  Sense strand starting at position 969 of SEQ ID NO: 1243868
cuuauaugcuuggcaccua

SEQ ID NO: 1447407 - RNA, 19 nt, Artificial Sequence
  Description of Artificial Sequence: Synthetic oligonucleotide
  Antisense strand to SEQ ID NO: 1447406
uaggugccaagcauauaag

SEQ ID NO: 1447408 - RNA, 19 nt, Artificial Sequence
  Description of Artificial Sequence: Synthetic oligonucleotide
  Sense strand starting at position 1155 of SEQ ID NO: 1243868
guacaauggucccacagaa

SEQ ID NO: 1447409 - RNA, 19 nt, Artificial Sequence
  Description of Artificial Sequence: Synthetic oligonucleotide
  Antisense strand to SEQ ID NO: 1447408
uucugugggaccauuguac

SEQ ID NO: 1447410 - RNA, 19 nt, Artificial Sequence
  Description of Artificial Sequence: Synthetic oligonucleotide
  Sense strand starting at position 1261 of SEQ ID NO: 1243868
cccacaaagucguggucuu

SEQ ID NO: 1447411 - RNA, 19 nt, Artificial Sequence
  Description of Artificial Sequence: Synthetic oligonucleotide
  Antisense strand to SEQ ID NO: 1447410
aagaccacgacuuuguggg

SEQ ID NO: 1447412 - RNA, 19 nt, Artificial Sequence
  Description of Artificial Sequence: Synthetic oligonucleotide
  Sense strand starting at position 1262 of SEQ ID NO: 1243868
ccacaaagucguggucuuu

SEQ ID NO: 1447413 - RNA, 19 nt, Artificial Sequence
  Description of Artificial Sequence: Synthetic oligonucleotide
  Antisense strand to SEQ ID NO: 1447412
aaagaccacgacuuugugg

SEQ ID NO: 1447414 - RNA, 19 nt, Artificial Sequence
  Description of Artificial Sequence: Synthetic oligonucleotide
  Sense strand starting at position 1340 of SEQ ID NO: 1243868
cgcugugcugugugucaga

SEQ ID NO: 1447415 - RNA, 19 nt, Artificial Sequence
  Description of Artificial Sequence: Synthetic oligonucleotide
  Antisense strand to SEQ ID NO: 1447414
ucugacacacagcacagcg

SEQ ID NO: 1447416 - RNA, 19 nt, Artificial Sequence
  Description of Artificial Sequence: Synthetic oligonucleotide
  Sense strand starting at position 1481 of SEQ ID NO: 1243868
agcgguuccgcgugaugag

SEQ ID NO: 1447417 - RNA, 19 nt, Artificial Sequence
  Description of Artificial Sequence: Synthetic oligonucleotide
  Antisense strand to SEQ ID NO: 1447416
cucaucacgcggaaccgcu

SEQ ID NO: 1447418 - RNA, 19 nt, Artificial Sequence
  Description of Artificial Sequence: Synthetic oligonucleotide
  Sense strand starting at position 1482 of SEQ ID NO: 1243868
gcgguuccgcgugaugaga

SEQ ID NO: 1447419 - RNA, 19 nt, Artificial Sequence
  Description of Artificial Sequence: Synthetic oligonucleotide
  Antisense strand to SEQ ID NO: 1447418
ucucaucacgcggaaccgc

SEQ ID NO: 1447420 - RNA, 19 nt, Artificial Sequence
  Description of Artificial Sequence: Synthetic oligonucleotide
  Sense strand starting at position 1627 of SEQ ID NO: 1243868
cgaguucccuccugagaaa

SEQ ID NO: 1447421 - RNA, 19 nt, Artificial Sequence
  Description of Artificial Sequence: Synthetic oligonucleotide
  Antisense strand to SEQ ID NO: 1447420
uuucucaggagggaacucg

SEQ ID NO: 1447422 - RNA, 19 nt, Artificial Sequence
  Description of Artificial Sequence: Synthetic oligonucleotide
  Sense strand starting at position 1717 of SEQ ID NO: 1243868
cgcccugaguaccaagaaa

SEQ ID NO: 1447423 - RNA, 19 nt, Artificial Sequence
  Description of Artificial Sequence: Synthetic oligonucleotide
  Antisense strand to SEQ ID NO: 1447422
uuucuugguacucagggcg

SEQ ID NO: 1447424 - RNA, 19 nt, Artificial Sequence
  Description of Artificial Sequence: Synthetic oligonucleotide
  Sense strand starting at position 1759 of SEQ ID NO: 1243868
cggguccucguuugcaaga

SEQ ID NO: 1447425 - RNA, 19 nt, Artificial Sequence
  Description of Artificial Sequence: Synthetic oligonucleotide
  Antisense strand to SEQ ID NO: 1447424
ucuugcaaacgaggacccg

SEQ ID NO: 1447426 - RNA, 19 nt, Artificial Sequence
  Description of Artificial Sequence: Synthetic oligonucleotide
  Sense strand starting at position 2209 of SEQ ID NO: 1243868
guggauuagcaggaaguga

SEQ ID NO: 1447427 - RNA, 19 nt, Artificial Sequence
  Description of Artificial Sequence: Synthetic oligonucleotide
  Antisense strand to SEQ ID NO: 1447426
ucacuuccugcuaauccac

SEQ ID NO: 1447428 - RNA, 19 nt, Artificial Sequence
  Description of Artificial Sequence: Synthetic oligonucleotide
  Sense strand starting at position 2248 of SEQ ID NO: 1243868
gucggauccugucuuuaau

SEQ ID NO: 1447429 - RNA, 19 nt, Artificial Sequence
  Description of Artificial Sequence: Synthetic oligonucleotide
  Antisense strand to SEQ ID NO: 1447428
auuaaagacaggauccgac

SEQ ID NO: 1447430 - RNA, 19 nt, Artificial Sequence
  Description of Artificial Sequence: Synthetic oligonucleotide
  Sense strand starting at position 2250 of SEQ ID NO: 1243868
cggauccugucuuuaauuu

SEQ ID NO: 1447431 - RNA, 19 nt, Artificial Sequence
  Description of Artificial Sequence: Synthetic oligonucleotide
  Antisense strand to SEQ ID NO: 1447430
aaauuaaagacaggauccg

SEQ ID NO: 1447432 - RNA, 19 nt, Artificial Sequence
  Description of Artificial Sequence: Synthetic oligonucleotide
  Sense strand starting at position 2364 of SEQ ID NO: 1243868
cgguaaacucugcaucuga

SEQ ID NO: 1447433 - RNA, 19 nt, Artificial Sequence
  Description of Artificial Sequence: Synthetic oligonucleotide
  Antisense strand to SEQ ID NO: 1447432
ucagaugcagaguuuaccg

SEQ ID NO: 1447434 - RNA, 19 nt, Artificial Sequence
  Description of Artificial Sequence: Synthetic oligonucleotide
  Sense strand starting at position 2502 of SEQ ID NO: 1243868
ugaguaacggagugaaauc

SEQ ID NO: 1447435 - RNA, 19 nt, Artificial Sequence
  Description of Artificial Sequence: Synthetic oligonucleotide
  Antisense strand to SEQ ID NO: 1447434
gauuucacuccguuacuca

SEQ ID NO: 1447436 - RNA, 19 nt, Artificial Sequence
  Description of Artificial Sequence: Synthetic oligonucleotide
  Sense strand starting at position 2570 of SEQ ID NO: 1243868
cacugagagcuccguugga

SEQ ID NO: 1447437 - RNA, 19 nt, Artificial Sequence
  Description of Artificial Sequence: Synthetic oligonucleotide
  Antisense strand to SEQ ID NO: 1447436
uccaacggagcucucagug

SEQ ID NO: 1447438 - RNA, 19 nt, Artificial Sequence
  Description of Artificial Sequence: Synthetic oligonucleotide
  Sense strand starting at position 2593 of SEQ ID NO: 1243868
ugaguuuccuguccaagug

SEQ ID NO: 1447439 - RNA, 19 nt, Artificial Sequence
  Description of Artificial Sequence: Synthetic oligonucleotide
  Antisense strand to SEQ ID NO: 1447438
cacuuggacaggaaacuca

SEQ ID NO: 1447440 - RNA, 19 nt, Artificial Sequence
  Description of Artificial Sequence: Synthetic oligonucleotide
  Sense strand starting at position 2602 of SEQ ID NO: 1243868
uguccaagugcugugcuaa

SEQ ID NO: 1447441 - RNA, 19 nt, Artificial Sequence
  Description of Artificial Sequence: Synthetic oligonucleotide
  Antisense strand to SEQ ID NO: 1447440
uuagcacagcacuuggaca

SEQ ID NO: 1447442 - RNA, 19 nt, Artificial Sequence
  Description of Artificial Sequence: Synthetic oligonucleotide
  Sense strand starting at position 2603 of SEQ ID NO: 1243868
guccaagugcugugcuaag

SEQ ID NO: 1447443 - RNA, 19 nt, Artificial Sequence
  Description of Artificial Sequence: Synthetic oligonucleotide
  Antisense strand to SEQ ID NO: 1447442
cuuagcacagcacuuggac

SEQ ID NO: 1447444 - RNA, 19 nt, Artificial Sequence
  Description of Artificial Sequence: Synthetic oligonucleotide
  Sense strand starting at position 2785 of SEQ ID NO: 1243868
ccagcauucgcuugguucu

SEQ ID NO: 1447445 - RNA, 19 nt, Artificial Sequence
  Description of Artificial Sequence: Synthetic oligonucleotide
  Antisense strand to SEQ ID NO: 1447444
agaaccaagcgaaugcugg

SEQ ID NO: 1447446 - RNA, 19 nt, Artificial Sequence
  Description of Artificial Sequence: Synthetic oligonucleotide
  Sense strand starting at position 2809 of SEQ ID NO: 1243868
gcggcauucuccuaccugu

SEQ ID NO: 1447447 - RNA, 19 nt, Artificial Sequence
  Description of Artificial Sequence: Synthetic oligonucleotide
  Antisense strand to SEQ ID NO: 1447446
acagguaggagaaugccgc

SEQ ID NO: 1447448 - RNA, 19 nt, Artificial Sequence
  Description of Artificial Sequence: Synthetic oligonucleotide
  Sense strand starting at position 3023 of SEQ ID NO: 1243868
ucucauuucuuccacgaug

SEQ ID NO: 1447449 - RNA, 19 nt, Artificial Sequence
  Description of Artificial Sequence: Synthetic oligonucleotide
  Antisense strand to SEQ ID NO: 1447448
caucguggaagaaaugaga

SEQ ID NO: 1447450 - RNA, 19 nt, Artificial Sequence
  Description of Artificial Sequence: Synthetic oligonucleotide
  Sense strand starting at position 3025 of SEQ ID NO: 1243868
ucauuucuuccacgaugcu

SEQ ID NO: 1447451 - RNA, 19 nt, Artificial Sequence
  Description of Artificial Sequence: Synthetic oligonucleotide
  Antisense strand to SEQ ID NO: 1447450
agcaucguggaagaaauga

SEQ ID NO: 1447452 - RNA, 19 nt, Artificial Sequence
  Description of Artificial Sequence: Synthetic oligonucleotide
  Sense strand starting at position 3034 of SEQ ID NO: 1243868
ccacgaugcucuuccaaga

SEQ ID NO: 1447453 - RNA, 19 nt, Artificial Sequence
  Description of Artificial Sequence: Synthetic oligonucleotide
  Antisense strand to SEQ ID NO: 1447452
ucuuggaagagcaucgugg

SEQ ID NO: 1447454 - RNA, 19 nt, Artificial Sequence
  Description of Artificial Sequence: Synthetic oligonucleotide
  Sense strand starting at position 3086 of SEQ ID NO: 1243868
caggguuugcaagagugaa

SEQ ID NO: 1447455 - RNA, 19 nt, Artificial Sequence
  Description of Artificial Sequence: Synthetic oligonucleotide
  Antisense strand to SEQ ID NO: 1447454
uucacucuugcaaacccug

SEQ ID NO: 1447456 - RNA, 19 nt, Artificial Sequence
  Description of Artificial Sequence: Synthetic oligonucleotide
  Sense strand starting at position 43 of SEQ ID NO: 1243869
ccuagacuuugccucuaga

SEQ ID NO: 1447457 - RNA, 19 nt, Artificial Sequence
  Description of Artificial Sequence: Synthetic oligonucleotide
  Antisense strand to SEQ ID NO: 1447456
ucuagaggcaaagucuagg

SEQ ID NO: 1447458 - RNA, 19 nt, Artificial Sequence
  Description of Artificial Sequence: Synthetic oligonucleotide
  Sense strand starting at position 46 of SEQ ID NO: 1243869
agacuuugccucuagaaug

SEQ ID NO: 1447459 - RNA, 19 nt, Artificial Sequence
  Description of Artificial Sequence: Synthetic oligonucleotide
  Antisense strand to SEQ ID NO: 1447458
cauucuagaggcaaagucu

SEQ ID NO: 1447460 - RNA, 19 nt, Artificial Sequence
  Description of Artificial Sequence: Synthetic oligonucleotide
  Sense strand starting at position 273 of SEQ ID NO: 1243869
augucuucuugguuuccua

SEQ ID NO: 1447461 - RNA, 19 nt, Artificial Sequence
  Description of Artificial Sequence: Synthetic oligonucleotide
  Antisense strand to SEQ ID NO: 1447460
uaggaaaccaagaagacau

SEQ ID NO: 1447462 - RNA, 19 nt, Artificial Sequence
  Description of Artificial Sequence: Synthetic oligonucleotide
  Sense strand starting at position 528 of SEQ ID NO: 1243869
caaggucugccugaaaugu

SEQ ID NO: 1447463 - RNA, 19 nt, Artificial Sequence
  Description of Artificial Sequence: Synthetic oligonucleotide
  Antisense strand to SEQ ID NO: 1447462
acauuucaggcagaccuug

SEQ ID NO: 1447464 - RNA, 19 nt, Artificial Sequence
  Description of Artificial Sequence: Synthetic oligonucleotide
  Sense strand starting at position 538 of SEQ ID NO: 1243869
cugaaaugucccgaugccu

SEQ ID NO: 1447465 - RNA, 19 nt, Artificial Sequence
  Description of Artificial Sequence: Synthetic oligonucleotide
  Antisense strand to SEQ ID NO: 1447464
aggcaucgggacauuucag

SEQ ID NO: 1447466 - RNA, 19 nt, Artificial Sequence
  Description of Artificial Sequence: Synthetic oligonucleotide
  Sense strand starting at position 652 of SEQ ID NO: 1243869
aguaccuagucauugcaua

SEQ ID NO: 1447467 - RNA, 19 nt, Artificial Sequence
  Description of Artificial Sequence: Synthetic oligonucleotide
  Antisense strand to SEQ ID NO: 1447466
uaugcaaugacuagguacu

SEQ ID NO: 1447468 - RNA, 19 nt, Artificial Sequence
  Description of Artificial Sequence: Synthetic oligonucleotide
  Sense strand starting at position 709 of SEQ ID NO: 1243869
aggcaagaccucuaucucu

SEQ ID NO: 1447469 - RNA, 19 nt, Artificial Sequence
  Description of Artificial Sequence: Synthetic oligonucleotide
  Antisense strand to SEQ ID NO: 1447468
agagauagaggucuugccu

SEQ ID NO: 1447470 - RNA, 19 nt, Artificial Sequence
  Description of Artificial Sequence: Synthetic oligonucleotide
  Sense strand starting at position 1401 of SEQ ID NO: 1243869
ucaaguauuccauacaugu

SEQ ID NO: 1447471 - RNA, 19 nt, Artificial Sequence
  Description of Artificial Sequence: Synthetic oligonucleotide
  Antisense strand to SEQ ID NO: 1447470
acauguauggaauacuuga

SEQ ID NO: 1447472 - RNA, 19 nt, Artificial Sequence
  Description of Artificial Sequence: Synthetic oligonucleotide
  Sense strand starting at position 1443 of SEQ ID NO: 1243869
uguugugacuuauccauca

SEQ ID NO: 1447473 - RNA, 19 nt, Artificial Sequence
  Description of Artificial Sequence: Synthetic oligonucleotide
  Antisense strand to SEQ ID NO: 1447472
ugauggauaagucacaaca

SEQ ID NO: 1447474 - RNA, 19 nt, Artificial Sequence
  Description of Artificial Sequence: Synthetic oligonucleotide
  Sense strand starting at position 1493 of SEQ ID NO: 1243869
agcaaacauucucugaaug

SEQ ID NO: 1447475 - RNA, 19 nt, Artificial Sequence
  Description of Artificial Sequence: Synthetic oligonucleotide
  Antisense strand to SEQ ID NO: 1447474
cauucagagaauguuugcu

SEQ ID NO: 1447476 - RNA, 19 nt, Artificial Sequence
  Description of Artificial Sequence: Synthetic oligonucleotide
  Sense strand starting at position 1494 of SEQ ID NO: 1243869
gcaaacauucucugaauga

SEQ ID NO: 1447477 - RNA, 19 nt, Artificial Sequence
  Description of Artificial Sequence: Synthetic oligonucleotide
  Antisense strand to SEQ ID NO: 1447476
ucauucagagaauguuugc

SEQ ID NO: 1447478 - RNA, 19 nt, Artificial Sequence
  Description of Artificial Sequence: Synthetic oligonucleotide
  Sense strand starting at position 1532 of SEQ ID NO: 1243869
aaggucggugccugaaaga

SEQ ID NO: 1447479 - RNA, 19 nt, Artificial Sequence
  Description of Artificial Sequence: Synthetic oligonucleotide
  Antisense strand to SEQ ID NO: 1447478
ucuuucaggcaccgaccuu

SEQ ID NO: 1447480 - RNA, 19 nt, Artificial Sequence
  Description of Artificial Sequence: Synthetic oligonucleotide
  Sense strand starting at position 2182 of SEQ ID NO: 1243869
ucuggauucuaagcgugga

SEQ ID NO: 1447481 - RNA, 19 nt, Artificial Sequence
  Description of Artificial Sequence: Synthetic oligonucleotide
  Antisense strand to SEQ ID NO: 1447480
uccacgcuuagaauccaga

SEQ ID NO: 1447482 - RNA, 19 nt, Artificial Sequence
  Description of Artificial Sequence: Synthetic oligonucleotide
  Sense strand starting at position 2376 of SEQ ID NO: 1243869
guccguguuguagacucaa

SEQ ID NO: 1447483 - RNA, 19 nt, Artificial Sequence
  Description of Artificial Sequence: Synthetic oligonucleotide
  Antisense strand to SEQ ID NO: 1447482
uugagucuacaacacggac

SEQ ID NO: 1447484 - RNA, 19 nt, Artificial Sequence
  Description of Artificial Sequence: Synthetic oligonucleotide
  Sense strand starting at position 2436 of SEQ ID NO: 1243869
ggcugaaccacccguuuaa

SEQ ID NO: 1447485 - RNA, 19 nt, Artificial Sequence
  Description of Artificial Sequence: Synthetic oligonucleotide
  Antisense strand to SEQ ID NO: 1447484
uuaaacgggugguucagcc

SEQ ID NO: 1447486 - RNA, 19 nt, Artificial Sequence
  Description of Artificial Sequence: Synthetic oligonucleotide
  Sense strand starting at position 2473 of SEQ ID NO: 1243869
aguacuuuccuuuguuauu

SEQ ID NO: 1447487 - RNA, 19 nt, Artificial Sequence
  Description of Artificial Sequence: Synthetic oligonucleotide
  Antisense strand to SEQ ID NO: 1447486
aauaacaaaggaaaguacu

SEQ ID NO: 1447488 - RNA, 19 nt, Artificial Sequence
  Description of Artificial Sequence: Synthetic oligonucleotide
  Sense strand starting at position 2576 of SEQ ID NO: 1243869
aucacugauuugggagagu

SEQ ID NO: 1447489 - RNA, 19 nt, Artificial Sequence
  Description of Artificial Sequence: Synthetic oligonucleotide
  Antisense strand to SEQ ID NO: 1447488
acucucccaaaucagugau

SEQ ID NO: 1447490 - RNA, 19 nt, Artificial Sequence
  Description of Artificial Sequence: Synthetic oligonucleotide
  Sense strand starting at position 2591 of SEQ ID NO: 1243869
gaguaacaagagugguaga

SEQ ID NO: 1447491 - RNA, 19 nt, Artificial Sequence
  Description of Artificial Sequence: Synthetic oligonucleotide
  Antisense strand to SEQ ID NO: 1447490
ucuaccacucuuguuacuc

SEQ ID NO: 1447492 - RNA, 19 nt, Artificial Sequence
  Description of Artificial Sequence: Synthetic oligonucleotide
  Sense strand starting at position 2687 of SEQ ID NO: 1243869
ucgauuucccaggagcguu

SEQ ID NO: 1447493 - RNA, 19 nt, Artificial Sequence
  Description of Artificial Sequence: Synthetic oligonucleotide
  Antisense strand to SEQ ID NO: 1447492
aacgcuccugggaaaucga

SEQ ID NO: 1447494 - RNA, 19 nt, Artificial Sequence
  Description of Artificial Sequence: Synthetic oligonucleotide
  Sense strand starting at position 2695 of SEQ ID NO: 1243869
ccaggagcguuuccuagau

SEQ ID NO: 1447495 - RNA, 19 nt, Artificial Sequence
  Description of Artificial Sequence: Synthetic oligonucleotide
  Antisense strand to SEQ ID NO: 1447494
aucuaggaaacgcuccugg

SEQ ID NO: 1447496 - RNA, 19 nt, Artificial Sequence
  Description of Artificial Sequence: Synthetic oligonucleotide
  Sense strand starting at position 2699 of SEQ ID NO: 1243869
gagcguuuccuagaugagc

SEQ ID NO: 1447497 - RNA, 19 nt, Artificial Sequence
  Description of Artificial Sequence: Synthetic oligonucleotide
  Antisense strand to SEQ ID NO: 1447496
gcucaucuaggaaacgcuc

SEQ ID NO: 1447498 - RNA, 19 nt, Artificial Sequence
  Description of Artificial Sequence: Synthetic oligonucleotide
  Sense strand starting at position 2771 of SEQ ID NO: 1243869
uccuaaucuggauggguau

SEQ ID NO: 1447499 - RNA, 19 nt, Artificial Sequence
  Description of Artificial Sequence: Synthetic oligonucleotide
  Antisense strand to SEQ ID NO: 1447498
auacccauccagauuagga

SEQ ID NO: 1447500 - RNA, 19 nt, Artificial Sequence
  Description of Artificial Sequence: Synthetic oligonucleotide
  Sense strand starting at position 2772 of SEQ ID NO: 1243869
ccuaaucuggauggguauu

SEQ ID NO: 1447501 - RNA, 19 nt, Artificial Sequence
  Description of Artificial Sequence: Synthetic oligonucleotide
  Antisense strand to SEQ ID NO: 1447500
aauacccauccagauuagg

SEQ ID NO: 1447502 - RNA, 19 nt, Artificial Sequence
  Description of Artificial Sequence: Synthetic oligonucleotide
  Sense strand starting at position 2888 of SEQ ID NO: 1243869
cuaaccuuggaccgugauu

SEQ ID NO: 1447503 - RNA, 19 nt, Artificial Sequence
  Description of Artificial Sequence: Synthetic oligonucleotide
  Antisense strand to SEQ ID NO: 1447502
aaucacgguccaagguuag

SEQ ID NO: 1447504 - RNA, 19 nt, Artificial Sequence
  Description of Artificial Sequence: Synthetic oligonucleotide
  Sense strand starting at position 2890 of SEQ ID NO: 1243869
aaccuuggaccgugauuga

SEQ ID NO: 1447505 - RNA, 19 nt, Artificial Sequence
  Description of Artificial Sequence: Synthetic oligonucleotide
  Antisense strand to SEQ ID NO: 1447504
ucaaucacgguccaagguu

SEQ ID NO: 1447506 - RNA, 19 nt, Artificial Sequence
  Description of Artificial Sequence: Synthetic oligonucleotide
  Sense strand starting at position 2900 of SEQ ID NO: 1243869
cgugauugagcccaagaaa

SEQ ID NO: 1447507 - RNA, 19 nt, Artificial Sequence
  Description of Artificial Sequence: Synthetic oligonucleotide
  Antisense strand to SEQ ID NO: 1447506
uuucuugggcucaaucacg

SEQ ID NO: 1447508 - RNA, 19 nt, Artificial Sequence
  Description of Artificial Sequence: Synthetic oligonucleotide
  Sense strand starting at position 2931 of SEQ ID NO: 1243869
gcauuuggccaaugucaaa

SEQ ID NO: 1447509 - RNA, 19 nt, Artificial Sequence
  Description of Artificial Sequence: Synthetic oligonucleotide
  Antisense strand to SEQ ID NO: 1447508
uuugacauuggccaaaugc

SEQ ID NO: 1447510 - RNA, 19 nt, Artificial Sequence
  Description of Artificial Sequence: Synthetic oligonucleotide
  Sense strand starting at position 3152 of SEQ ID NO: 1243869
gugggauacauagggucaa

SEQ ID NO: 1447511 - RNA, 19 nt, Artificial Sequence
  Description of Artificial Sequence: Synthetic oligonucleotide
  Antisense strand to SEQ ID NO: 1447510
uugacccuauguaucccac

SEQ ID NO: 1447512 - RNA, 19 nt, Artificial Sequence
  Description of Artificial Sequence: Synthetic oligonucleotide
  Sense strand starting at position 3164 of SEQ ID NO: 1243869
gggucaaauugagaauaau

SEQ ID NO: 1447513 - RNA, 19 nt, Artificial Sequence
  Description of Artificial Sequence: Synthetic oligonucleotide
  Antisense strand to SEQ ID NO: 1447512
auuauucucaauuugaccc

SEQ ID NO: 1447514 - RNA, 19 nt, Artificial Sequence
  Description of Artificial Sequence: Synthetic oligonucleotide
  Sense strand starting at position 3189 of SEQ ID NO: 1243869
agucauucuccuggaguca

SEQ ID NO: 1447515 - RNA, 19 nt, Artificial Sequence
  Description of Artificial Sequence: Synthetic oligonucleotide
  Antisense strand to SEQ ID NO: 1447514
ugacuccaggagaaugacu

SEQ ID NO: 1447516 - RNA, 19 nt, Artificial Sequence
  Description of Artificial Sequence: Synthetic oligonucleotide
  Sense strand starting at position 3190 of SEQ ID NO: 1243869
gucauucuccuggagucaa

SEQ ID NO: 1447517 - RNA, 19 nt, Artificial Sequence
  Description of Artificial Sequence: Synthetic oligonucleotide
  Antisense strand to SEQ ID NO: 1447516
uugacuccaggagaaugac

SEQ ID NO: 1447518 - RNA, 19 nt, Artificial Sequence
  Description of Artificial Sequence: Synthetic oligonucleotide
  Sense strand starting at position 3198 of SEQ ID NO: 1243869
ccuggagucaagugaguau

SEQ ID NO: 1447519 - RNA, 19 nt, Artificial Sequence
  Description of Artificial Sequence: Synthetic oligonucleotide
  Antisense strand to SEQ ID NO: 1447518
auacucacuugacuccagg

SEQ ID NO: 1447520 - RNA, 19 nt, Artificial Sequence
  Description of Artificial Sequence: Synthetic oligonucleotide
  Sense strand starting at position 3294 of SEQ ID NO: 1243869
gggagcuguaaauguuuaa

SEQ ID NO: 1447521 - RNA, 19 nt, Artificial Sequence
  Description of Artificial Sequence: Synthetic oligonucleotide
  Antisense strand to SEQ ID NO: 1447520
uuaaacauuuacagcuccc

SEQ ID NO: 1447522 - RNA, 19 nt, Artificial Sequence
  Description of Artificial Sequence: Synthetic oligonucleotide
  Sense strand starting at position 3297 of SEQ ID NO: 1243869
agcuguaaauguuuaacua

SEQ ID NO: 1447523 - RNA, 19 nt, Artificial Sequence
  Description of Artificial Sequence: Synthetic oligonucleotide
  Antisense strand to SEQ ID NO: 1447522
uaguuaaacauuuacagcu

SEQ ID NO: 1447524 - RNA, 19 nt, Artificial Sequence
  Description of Artificial Sequence: Synthetic oligonucleotide
  Sense strand starting at position 3298 of SEQ ID NO: 1243869
gcuguaaauguuuaacuag

SEQ ID NO: 1447525 - RNA, 19 nt, Artificial Sequence
  Description of Artificial Sequence: Synthetic oligonucleotide
  Antisense strand to SEQ ID NO: 1447524
cuaguuaaacauuuacagc

SEQ ID NO: 1447526 - RNA, 19 nt, Artificial Sequence
  Description of Artificial Sequence: Synthetic oligonucleotide
  Sense strand starting at position 3356 of SEQ ID NO: 1243869
gagagaucacugggcaguu

SEQ ID NO: 1447527 - RNA, 19 nt, Artificial Sequence
  Description of Artificial Sequence: Synthetic oligonucleotide
  Antisense strand to SEQ ID NO: 1447526
aacugcccagugaucucuc

SEQ ID NO: 1447528 - RNA, 19 nt, Artificial Sequence
  Description of Artificial Sequence: Synthetic oligonucleotide
  Sense strand starting at position 3357 of SEQ ID NO: 1243869
agagaucacugggcaguuu

SEQ ID NO: 1447529 - RNA, 19 nt, Artificial Sequence
  Description of Artificial Sequence: Synthetic oligonucleotide
  Antisense strand to SEQ ID NO: 1447528
aaacugcccagugaucucu

SEQ ID NO: 1447530 - RNA, 19 nt, Artificial Sequence
  Description of Artificial Sequence: Synthetic oligonucleotide
  Sense strand starting at position 3611 of SEQ ID NO: 1243869
gcaguuuccucauuaacug

SEQ ID NO: 1447531 - RNA, 19 nt, Artificial Sequence
  Description of Artificial Sequence: Synthetic oligonucleotide
  Antisense strand to SEQ ID NO: 1447530
caguuaaugaggaaacugc

SEQ ID NO: 1447532 - RNA, 19 nt, Artificial Sequence
  Description of Artificial Sequence: Synthetic oligonucleotide
  Sense strand starting at position 3665 of SEQ ID NO: 1243869
ccugccucccauugugaaa

SEQ ID NO: 1447533 - RNA, 19 nt, Artificial Sequence
  Description of Artificial Sequence: Synthetic oligonucleotide
  Antisense strand to SEQ ID NO: 1447532
uuucacaaugggaggcagg

SEQ ID NO: 1447534 - RNA, 19 nt, Artificial Sequence
  Description of Artificial Sequence: Synthetic oligonucleotide
  Sense strand starting at position 3739 of SEQ ID NO: 1243869
auuccuaaggcauggcaua

SEQ ID NO: 1447535 - RNA, 19 nt, Artificial Sequence
  Description of Artificial Sequence: Synthetic oligonucleotide
  Antisense strand to SEQ ID NO: 1447534
uaugccaugccuuaggaau

SEQ ID NO: 1447536 - RNA, 19 nt, Artificial Sequence
  Description of Artificial Sequence: Synthetic oligonucleotide
  Sense strand starting at position 25 of SEQ ID NO: 1243870
aaucucgacuucuggaaag

SEQ ID NO: 1447537 - RNA, 19 nt, Artificial Sequence
  Description of Artificial Sequence: Synthetic oligonucleotide
  Antisense strand to SEQ ID NO: 1447536
cuuuccagaagucgagauu

SEQ ID NO: 1447538 - RNA, 19 nt, Artificial Sequence
  Description of Artificial Sequence: Synthetic oligonucleotide
  Sense strand starting at position 27 of SEQ ID NO: 1243870
ucucgacuucuggaaagua

SEQ ID NO: 1447539 - RNA, 19 nt, Artificial Sequence
  Description of Artificial Sequence: Synthetic oligonucleotide
  Antisense strand to SEQ ID NO: 1447538
uacuuuccagaagucgaga

SEQ ID NO: 1447540 - RNA, 19 nt, Artificial Sequence
  Description of Artificial Sequence: Synthetic oligonucleotide
  Sense strand starting at position 43 of SEQ ID NO: 1243870
guaaacacuccuuggucuu

SEQ ID NO: 1447541 - RNA, 19 nt, Artificial Sequence
  Description of Artificial Sequence: Synthetic oligonucleotide
  Antisense strand to SEQ ID NO: 1447540
aagaccaaggaguguuuac

SEQ ID NO: 1447542 - RNA, 19 nt, Artificial Sequence
  Description of Artificial Sequence: Synthetic oligonucleotide
  Sense strand starting at position 80 of SEQ ID NO: 1243870
cccgcacaguuuccauaaa

SEQ ID NO: 1447543 - RNA, 19 nt, Artificial Sequence
  Description of Artificial Sequence: Synthetic oligonucleotide
  Antisense strand to SEQ ID NO: 1447542
uuuauggaaacugugcggg

SEQ ID NO: 1447544 - RNA, 19 nt, Artificial Sequence
  Description of Artificial Sequence: Synthetic oligonucleotide
  Sense strand starting at position 177 of SEQ ID NO: 1243870
acccuaaaguguguuaaac

SEQ ID NO: 1447545 - RNA, 19 nt, Artificial Sequence
  Description of Artificial Sequence: Synthetic oligonucleotide
  Antisense strand to SEQ ID NO: 1447544
guuuaacacacuuuagggu

SEQ ID NO: 1447546 - RNA, 19 nt, Artificial Sequence
  Description of Artificial Sequence: Synthetic oligonucleotide
  Sense strand starting at position 186 of SEQ ID NO: 1243870
uguguuaaacccugugaac

SEQ ID NO: 1447547 - RNA, 19 nt, Artificial Sequence
  Description of Artificial Sequence: Synthetic oligonucleotide
  Antisense strand to SEQ ID NO: 1447546
guucacaggguuuaacaca

SEQ ID NO: 1447548 - RNA, 19 nt, Artificial Sequence
  Description of Artificial Sequence: Synthetic oligonucleotide
  Sense strand starting at position 204 of SEQ ID NO: 1243870
ccgaguguuucgcgcacgu

SEQ ID NO: 1447549 - RNA, 19 nt, Artificial Sequence
  Description of Artificial Sequence: Synthetic oligonucleotide
  Antisense strand to SEQ ID NO: 1447548
acgugcgcgaaacacucgg

SEQ ID NO: 1447550 - RNA, 19 nt, Artificial Sequence
  Description of Artificial Sequence: Synthetic oligonucleotide
  Sense strand starting at position 568 of SEQ ID NO: 1243870
acccgcuuaugccuauaga

SEQ ID NO: 1447551 - RNA, 19 nt, Artificial Sequence
  Description of Artificial Sequence: Synthetic oligonucleotide
  Antisense strand to SEQ ID NO: 1447550
ucuauaggcauaagcgggu

SEQ ID NO: 1447552 - RNA, 19 nt, Artificial Sequence
  Description of Artificial Sequence: Synthetic oligonucleotide
  Sense strand starting at position 569 of SEQ ID NO: 1243870
cccgcuuaugccuauagaa

SEQ ID NO: 1447553 - RNA, 19 nt, Artificial Sequence
  Description of Artificial Sequence: Synthetic oligonucleotide
  Antisense strand to SEQ ID NO: 1447552
uucuauaggcauaagcggg

SEQ ID NO: 1447554 - RNA, 19 nt, Artificial Sequence
  Description of Artificial Sequence: Synthetic oligonucleotide
  Sense strand starting at position 571 of SEQ ID NO: 1243870
cgcuuaugccuauagaaag

SEQ ID NO: 1447555 - RNA, 19 nt, Artificial Sequence
  Description of Artificial Sequence: Synthetic oligonucleotide
  Antisense strand to SEQ ID NO: 1447554
cuuucuauaggcauaagcg

SEQ ID NO: 1447556 - RNA, 19 nt, Artificial Sequence
  Description of Artificial Sequence: Synthetic oligonucleotide
  Sense strand starting at position 802 of SEQ ID NO: 1243870
agggaaaccgacuguuagu

SEQ ID NO: 1447557 - RNA, 19 nt, Artificial Sequence
  Description of Artificial Sequence: Synthetic oligonucleotide
  Antisense strand to SEQ ID NO: 1447556
acuaacagucgguuucccu

SEQ ID NO: 1447558 - RNA, 19 nt, Artificial Sequence
  Description of Artificial Sequence: Synthetic oligonucleotide
  Sense strand starting at position 1371 of SEQ ID NO: 1243870
agccuuaagcccuggcaaa

SEQ ID NO: 1447559 - RNA, 19 nt, Artificial Sequence
  Description of Artificial Sequence: Synthetic oligonucleotide
  Antisense strand to SEQ ID NO: 1447558
uuugccagggcuuaaggcu

SEQ ID NO: 1447560 - RNA, 19 nt, Artificial Sequence
  Description of Artificial Sequence: Synthetic oligonucleotide
  Sense strand starting at position 1391 of SEQ ID NO: 1243870
ccuuaauccuaguaucggu

SEQ ID NO: 1447561 - RNA, 19 nt, Artificial Sequence
  Description of Artificial Sequence: Synthetic oligonucleotide
  Antisense strand to SEQ ID NO: 1447560
accgauacuaggauuaagg

SEQ ID NO: 1447562 - RNA, 19 nt, Artificial Sequence
  Description of Artificial Sequence: Synthetic oligonucleotide
  Sense strand starting at position 1398 of SEQ ID NO: 1243870
ccuaguaucggucaccagu

SEQ ID NO: 1447563 - RNA, 19 nt, Artificial Sequence
  Description of Artificial Sequence: Synthetic oligonucleotide
  Antisense strand to SEQ ID NO: 1447562
acuggugaccgauacuagg

SEQ ID NO: 1447564 - RNA, 19 nt, Artificial Sequence
  Description of Artificial Sequence: Synthetic oligonucleotide
  Sense strand starting at position 1400 of SEQ ID NO: 1243870
uaguaucggucaccaguau

SEQ ID NO: 1447565 - RNA, 19 nt, Artificial Sequence
  Description of Artificial Sequence: Synthetic oligonucleotide
  Antisense strand to SEQ ID NO: 1447564
auacuggugaccgauacua

SEQ ID NO: 1447566 - RNA, 19 nt, Artificial Sequence
  Description of Artificial Sequence: Synthetic oligonucleotide
  Sense strand starting at position 1401 of SEQ ID NO: 1243870
aguaucggucaccaguaua

SEQ ID NO: 1447567 - RNA, 19 nt, Artificial Sequence
  Description of Artificial Sequence: Synthetic oligonucleotide
  Antisense strand to SEQ ID NO: 1447566
uauacuggugaccgauacu

SEQ ID NO: 1447568 - RNA, 19 nt, Artificial Sequence
  Description of Artificial Sequence: Synthetic oligonucleotide
  Sense strand starting at position 2327 of SEQ ID NO: 1243870
caaauuaugcucuaggagu

SEQ ID NO: 1447569 - RNA, 19 nt, Artificial Sequence
  Description of Artificial Sequence: Synthetic oligonucleotide
  Antisense strand to SEQ ID NO: 1447568
acuccuagagcauaauuug

SEQ ID NO: 1447570 - RNA, 19 nt, Artificial Sequence
  Description of Artificial Sequence: Synthetic oligonucleotide
  Sense strand starting at position 2382 of SEQ ID NO: 1243870
cuccacuuugcagaugaaa

SEQ ID NO: 1447571 - RNA, 19 nt, Artificial Sequence
  Description of Artificial Sequence: Synthetic oligonucleotide
  Antisense strand to SEQ ID NO: 1447570
uuucaucugcaaaguggag

SEQ ID NO: 1447572 - RNA, 19 nt, Artificial Sequence
  Description of Artificial Sequence: Synthetic oligonucleotide
  Sense strand starting at position 2759 of SEQ ID NO: 1243870
guggcuauaccucagaaac

SEQ ID NO: 1447573 - RNA, 19 nt, Artificial Sequence
  Description of Artificial Sequence: Synthetic oligonucleotide
  Antisense strand to SEQ ID NO: 1447572
guuucugagguauagccac

SEQ ID NO: 1447574 - RNA, 19 nt, Artificial Sequence
  Description of Artificial Sequence: Synthetic oligonucleotide
  Sense strand starting at position 2761 of SEQ ID NO: 1243870
ggcuauaccucagaaaccu

SEQ ID NO: 1447575 - RNA, 19 nt, Artificial Sequence
  Description of Artificial Sequence: Synthetic oligonucleotide
  Antisense strand to SEQ ID NO: 1447574
agguuucugagguauagcc

SEQ ID NO: 1447576 - RNA, 19 nt, Artificial Sequence
  Description of Artificial Sequence: Synthetic oligonucleotide
  Sense strand starting at position 3097 of SEQ ID NO: 1243870
gcaugagugguucagugug

SEQ ID NO: 1447577 - RNA, 19 nt, Artificial Sequence
  Description of Artificial Sequence: Synthetic oligonucleotide
  Antisense strand to SEQ ID NO: 1447576
cacacugaaccacucaugc

SEQ ID NO: 1447578 - RNA, 19 nt, Artificial Sequence
  Description of Artificial Sequence: Synthetic oligonucleotide
  Sense strand starting at position 3103 of SEQ ID NO: 1243870
gugguucagugugcuggua

SEQ ID NO: 1447579 - RNA, 19 nt, Artificial Sequence
  Description of Artificial Sequence: Synthetic oligonucleotide
  Antisense strand to SEQ ID NO: 1447578
uaccagcacacugaaccac

SEQ ID NO: 1447580 - RNA, 19 nt, Artificial Sequence
  Description of Artificial Sequence: Synthetic oligonucleotide
  Sense strand starting at position 3105 of SEQ ID NO: 1243870
gguucagugugcugguauu

SEQ ID NO: 1447581 - RNA, 19 nt, Artificial Sequence
  Description of Artificial Sequence: Synthetic oligonucleotide
  Antisense strand to SEQ ID NO: 1447580
aauaccagcacacugaacc

SEQ ID NO: 1447582 - RNA, 19 nt, Artificial Sequence
  Description of Artificial Sequence: Synthetic oligonucleotide
  Sense strand starting at position 3228 of SEQ ID NO: 1243870
ugggcauccuuccaggaga

SEQ ID NO: 1447583 - RNA, 19 nt, Artificial Sequence
  Description of Artificial Sequence: Synthetic oligonucleotide
  Antisense strand to SEQ ID NO: 1447582
ucuccuggaaggaugccca

SEQ ID NO: 1447584 - RNA, 19 nt, Artificial Sequence
  Description of Artificial Sequence: Synthetic oligonucleotide
  Sense strand starting at position 3623 of SEQ ID NO: 1243870
uauuauggccuuuggagaa

SEQ ID NO: 1447585 - RNA, 19 nt, Artificial Sequence
  Description of Artificial Sequence: Synthetic oligonucleotide
  Antisense strand to SEQ ID NO: 1447584
uucuccaaaggccauaaua

SEQ ID NO: 1447586 - RNA, 19 nt, Artificial Sequence
  Description of Artificial Sequence: Synthetic oligonucleotide
  Sense strand starting at position 3701 of SEQ ID NO: 1243870
gugggcuggucaggauuua

SEQ ID NO: 1447587 - RNA, 19 nt, Artificial Sequence
  Description of Artificial Sequence: Synthetic oligonucleotide
  Antisense strand to SEQ ID NO: 1447586
uaaauccugaccagcccac

SEQ ID NO: 1447588 - RNA, 19 nt, Artificial Sequence
  Description of Artificial Sequence: Synthetic oligonucleotide
  Sense strand starting at position 3760 of SEQ ID NO: 1243870
gagcaaguggcuugcucaa

SEQ ID NO: 1447589 - RNA, 19 nt, Artificial Sequence
  Description of Artificial Sequence: Synthetic oligonucleotide
  Antisense strand to SEQ ID NO: 1447588
uugagcaagccacuugcuc

SEQ ID NO: 1447590 - RNA, 19 nt, Artificial Sequence
  Description of Artificial Sequence: Synthetic oligonucleotide
  Sense strand starting at position 3848 of SEQ ID NO: 1243870
uaggaagagucuggagaag

SEQ ID NO: 1447591 - RNA, 19 nt, Artificial Sequence
  Description of Artificial Sequence: Synthetic oligonucleotide
  Antisense strand to SEQ ID NO: 1447590
cuucuccagacucuuccua

SEQ ID NO: 1447592 - RNA, 19 nt, Artificial Sequence
  Description of Artificial Sequence: Synthetic oligonucleotide
  Sense strand starting at position 3850 of SEQ ID NO: 1243870
ggaagagucuggagaagag

SEQ ID NO: 1447593 - RNA, 19 nt, Artificial Sequence
  Description of Artificial Sequence: Synthetic oligonucleotide
  Antisense strand to SEQ ID NO: 1447592
cucuucuccagacucuucc

SEQ ID NO: 1447594 - RNA, 19 nt, Artificial Sequence
  Description of Artificial Sequence: Synthetic oligonucleotide
  Sense strand starting at position 3859 of SEQ ID NO: 1243870
uggagaagagcuuaugucu

SEQ ID NO: 1447595 - RNA, 19 nt, Artificial Sequence
  Description of Artificial Sequence: Synthetic oligonucleotide
  Antisense strand to SEQ ID NO: 1447594
agacauaagcucuucucca

SEQ ID NO: 1447596 - RNA, 19 nt, Artificial Sequence
  Description of Artificial Sequence: Synthetic oligonucleotide
  Sense strand starting at position 3941 of SEQ ID NO: 1243870
ggaguuguguggucagaug

SEQ ID NO: 1447597 - RNA, 19 nt, Artificial Sequence
  Description of Artificial Sequence: Synthetic oligonucleotide
  Antisense strand to SEQ ID NO: 1447596
caucugaccacacaacucc

SEQ ID NO: 1447598 - RNA, 19 nt, Artificial Sequence
  Description of Artificial Sequence: Synthetic oligonucleotide
  Sense strand starting at position 3943 of SEQ ID NO: 1243870
aguuguguggucagaugug

SEQ ID NO: 1447599 - RNA, 19 nt, Artificial Sequence
  Description of Artificial Sequence: Synthetic oligonucleotide
  Antisense strand to SEQ ID NO: 1447598
cacaucugaccacacaacu

SEQ ID NO: 1447600 - RNA, 19 nt, Artificial Sequence
  Description of Artificial Sequence: Synthetic oligonucleotide
  Sense strand starting at position 3944 of SEQ ID NO: 1243870
guuguguggucagaugugu

SEQ ID NO: 1447601 - RNA, 19 nt, Artificial Sequence
  Description of Artificial Sequence: Synthetic oligonucleotide
  Antisense strand to SEQ ID NO: 1447600
acacaucugaccacacaac

SEQ ID NO: 1447602 - RNA, 19 nt, Artificial Sequence
  Description of Artificial Sequence: Synthetic oligonucleotide
  Sense strand starting at position 3948 of SEQ ID NO: 1243870
uguggucagaugugucuca

SEQ ID NO: 1447603 - RNA, 19 nt, Artificial Sequence
  Description of Artificial Sequence: Synthetic oligonucleotide
  Antisense strand to SEQ ID NO: 1447602
ugagacacaucugaccaca

SEQ ID NO: 1447604 - RNA, 19 nt, Artificial Sequence
  Description of Artificial Sequence: Synthetic oligonucleotide
  Sense strand starting at position 3953 of SEQ ID NO: 1243870
ucagaugugucucauaaga

SEQ ID NO: 1447605 - RNA, 19 nt, Artificial Sequence
  Description of Artificial Sequence: Synthetic oligonucleotide
  Antisense strand to SEQ ID NO: 1447604
ucuuaugagacacaucuga

SEQ ID NO: 1447606 - RNA, 19 nt, Artificial Sequence
  Description of Artificial Sequence: Synthetic oligonucleotide
  Sense strand starting at position 3955 of SEQ ID NO: 1243870
agaugugucucauaagauc

SEQ ID NO: 1447607 - RNA, 19 nt, Artificial Sequence
  Description of Artificial Sequence: Synthetic oligonucleotide
  Antisense strand to SEQ ID NO: 1447606
gaucuuaugagacacaucu

SEQ ID NO: 1447608 - RNA, 19 nt, Artificial Sequence
  Description of Artificial Sequence: Synthetic oligonucleotide
  Sense strand starting at position 38 of SEQ ID NO: 1243871
uaccuauugccaggguaga

SEQ ID NO: 1447609 - RNA, 19 nt, Artificial Sequence
  Description of Artificial Sequence: Synthetic oligonucleotide
  Antisense strand to SEQ ID NO: 1447608
ucuacccuggcaauaggua

SEQ ID NO: 1447610 - RNA, 19 nt, Artificial Sequence
  Description of Artificial Sequence: Synthetic oligonucleotide
  Sense strand starting at position 39 of SEQ ID NO: 1243871
accuauugccaggguagaa

SEQ ID NO: 1447611 - RNA, 19 nt, Artificial Sequence
  Description of Artificial Sequence: Synthetic oligonucleotide
  Antisense strand to SEQ ID NO: 1447610
uucuacccuggcaauaggu

SEQ ID NO: 1447612 - RNA, 19 nt, Artificial Sequence
  Description of Artificial Sequence: Synthetic oligonucleotide
  Sense strand starting at position 100 of SEQ ID NO: 1243871
uccaauaagggauguccua

SEQ ID NO: 1447613 - RNA, 19 nt, Artificial Sequence
  Description of Artificial Sequence: Synthetic oligonucleotide
  Antisense strand to SEQ ID NO: 1447612
uaggacaucccuuauugga

SEQ ID NO: 1447614 - RNA, 19 nt, Artificial Sequence
  Description of Artificial Sequence: Synthetic oligonucleotide
  Sense strand starting at position 194 of SEQ ID NO: 1243871
aagaguugcggagauucuu

SEQ ID NO: 1447615 - RNA, 19 nt, Artificial Sequence
  Description of Artificial Sequence: Synthetic oligonucleotide
  Antisense strand to SEQ ID NO: 1447614
aagaaucuccgcaacucuu

SEQ ID NO: 1447616 - RNA, 19 nt, Artificial Sequence
  Description of Artificial Sequence: Synthetic oligonucleotide
  Sense strand starting at position 242 of SEQ ID NO: 1243871
auggcuuauggcuaucauu

SEQ ID NO: 1447617 - RNA, 19 nt, Artificial Sequence
  Description of Artificial Sequence: Synthetic oligonucleotide
  Antisense strand to SEQ ID NO: 1447616
aaugauagccauaagccau

SEQ ID NO: 1447618 - RNA, 19 nt, Artificial Sequence
  Description of Artificial Sequence: Synthetic oligonucleotide
  Sense strand starting at position 343 of SEQ ID NO: 1243871
acauguuguaguugacuaa

SEQ ID NO: 1447619 - RNA, 19 nt, Artificial Sequence
  Description of Artificial Sequence: Synthetic oligonucleotide
  Antisense strand to SEQ ID NO: 1447618
uuagucaacuacaacaugu

SEQ ID NO: 1447620 - RNA, 19 nt, Artificial Sequence
  Description of Artificial Sequence: Synthetic oligonucleotide
  Sense strand starting at position 347 of SEQ ID NO: 1243871
guuguaguugacuaagcua

SEQ ID NO: 1447621 - RNA, 19 nt, Artificial Sequence
  Description of Artificial Sequence: Synthetic oligonucleotide
  Antisense strand to SEQ ID NO: 1447620
uagcuuagucaacuacaac

SEQ ID NO: 1447622 - RNA, 19 nt, Artificial Sequence
  Description of Artificial Sequence: Synthetic oligonucleotide
  Sense strand starting at position 354 of SEQ ID NO: 1243871
uugacuaagcuaugucuua

SEQ ID NO: 1447623 - RNA, 19 nt, Artificial Sequence
  Description of Artificial Sequence: Synthetic oligonucleotide
  Antisense strand to SEQ ID NO: 1447622
uaagacauagcuuagucaa

SEQ ID NO: 1447624 - RNA, 19 nt, Artificial Sequence
  Description of Artificial Sequence: Synthetic oligonucleotide
  Sense strand starting at position 355 of SEQ ID NO: 1243871
ugacuaagcuaugucuuaa

SEQ ID NO: 1447625 - RNA, 19 nt, Artificial Sequence
  Description of Artificial Sequence: Synthetic oligonucleotide
  Antisense strand to SEQ ID NO: 1447624
uuaagacauagcuuaguca

SEQ ID NO: 1447626 - RNA, 19 nt, Artificial Sequence
  Description of Artificial Sequence: Synthetic oligonucleotide
  Sense strand starting at position 411 of SEQ ID NO: 1243871
uaguguugagcuggaagga

SEQ ID NO: 1447627 - RNA, 19 nt, Artificial Sequence
  Description of Artificial Sequence: Synthetic oligonucleotide
  Antisense strand to SEQ ID NO: 1447626
uccuuccagcucaacacua

SEQ ID NO: 1447628 - RNA, 19 nt, Artificial Sequence
  Description of Artificial Sequence: Synthetic oligonucleotide
  Sense strand starting at position 412 of SEQ ID NO: 1243871
aguguugagcuggaaggau

SEQ ID NO: 1447629 - RNA, 19 nt, Artificial Sequence
  Description of Artificial Sequence: Synthetic oligonucleotide
  Antisense strand to SEQ ID NO: 1447628
auccuuccagcucaacacu

SEQ ID NO: 1447630 - RNA, 19 nt, Artificial Sequence
  Description of Artificial Sequence: Synthetic oligonucleotide
  Sense strand starting at position 497 of SEQ ID NO: 1243871
cgggaaauagcucaccaac

SEQ ID NO: 1447631 - RNA, 19 nt, Artificial Sequence
  Description of Artificial Sequence: Synthetic oligonucleotide
  Antisense strand to SEQ ID NO: 1447630
guuggugagcuauuucccg

SEQ ID NO: 1447632 - RNA, 19 nt, Artificial Sequence
  Description of Artificial Sequence: Synthetic oligonucleotide
  Sense strand starting at position 499 of SEQ ID NO: 1243871
ggaaauagcucaccaaccu

SEQ ID NO: 1447633 - RNA, 19 nt, Artificial Sequence
  Description of Artificial Sequence: Synthetic oligonucleotide
  Antisense strand to SEQ ID NO: 1447632
agguuggugagcuauuucc

SEQ ID NO: 1447634 - RNA, 19 nt, Artificial Sequence
  Description of Artificial Sequence: Synthetic oligonucleotide
  Sense strand starting at position 523 of SEQ ID NO: 1243871
auagguuugcucuaucuac

SEQ ID NO: 1447635 - RNA, 19 nt, Artificial Sequence
  Description of Artificial Sequence: Synthetic oligonucleotide
  Antisense strand to SEQ ID NO: 1447634
guagauagagcaaaccuau

SEQ ID NO: 1447636 - RNA, 19 nt, Artificial Sequence
  Description of Artificial Sequence: Synthetic oligonucleotide
  Sense strand starting at position 2292 of SEQ ID NO: 1243871
gcagaugacuguccacaac

SEQ ID NO: 1447637 - RNA, 19 nt, Artificial Sequence
  Description of Artificial Sequence: Synthetic oligonucleotide
  Antisense strand to SEQ ID NO: 1447636
guuguggacagucaucugc

SEQ ID NO: 1447638 - RNA, 19 nt, Artificial Sequence
  Description of Artificial Sequence: Synthetic oligonucleotide
  Sense strand starting at position 2313 of SEQ ID NO: 1243871
guaccuguuugaccggaau

SEQ ID NO: 1447639 - RNA, 19 nt, Artificial Sequence
  Description of Artificial Sequence: Synthetic oligonucleotide
  Antisense strand to SEQ ID NO: 1447638
auuccggucaaacagguac

SEQ ID NO: 1447640 - RNA, 19 nt, Artificial Sequence
  Description of Artificial Sequence: Synthetic oligonucleotide
  Sense strand starting at position 2316 of SEQ ID NO: 1243871
ccuguuugaccggaaugga

SEQ ID NO: 1447641 - RNA, 19 nt, Artificial Sequence
  Description of Artificial Sequence: Synthetic oligonucleotide
  Antisense strand to SEQ ID NO: 1447640
uccauuccggucaaacagg

SEQ ID NO: 1447642 - RNA, 19 nt, Artificial Sequence
  Description of Artificial Sequence: Synthetic oligonucleotide
  Sense strand starting at position 2510 of SEQ ID NO: 1243871
cgcaucaaccgagagcuaa

SEQ ID NO: 1447643 - RNA, 19 nt, Artificial Sequence
  Description of Artificial Sequence: Synthetic oligonucleotide
  Antisense strand to SEQ ID NO: 1447642
uuagcucucgguugaugcg

SEQ ID NO: 1447644 - RNA, 19 nt, Artificial Sequence
  Description of Artificial Sequence: Synthetic oligonucleotide
  Sense strand starting at position 2537 of SEQ ID NO: 1243871
cucucccuccaggaguaua

SEQ ID NO: 1447645 - RNA, 19 nt, Artificial Sequence
  Description of Artificial Sequence: Synthetic oligonucleotide
  Antisense strand to SEQ ID NO: 1447644
uauacuccuggagggagag

SEQ ID NO: 1447646 - RNA, 19 nt, Artificial Sequence
  Description of Artificial Sequence: Synthetic oligonucleotide
  Sense strand starting at position 2547 of SEQ ID NO: 1243871
aggaguauaagcugaugua

SEQ ID NO: 1447647 - RNA, 19 nt, Artificial Sequence
  Description of Artificial Sequence: Synthetic oligonucleotide
  Antisense strand to SEQ ID NO: 1447646
uacaucagcuuauacuccu

SEQ ID NO: 1447648 - RNA, 19 nt, Artificial Sequence
  Description of Artificial Sequence: Synthetic oligonucleotide
  Sense strand starting at position 2548 of SEQ ID NO: 1243871
ggaguauaagcugauguac

SEQ ID NO: 1447649 - RNA, 19 nt, Artificial Sequence
  Description of Artificial Sequence: Synthetic oligonucleotide
  Antisense strand to SEQ ID NO: 1447648
guacaucagcuuauacucc

SEQ ID NO: 1447650 - RNA, 19 nt, Artificial Sequence
  Description of Artificial Sequence: Synthetic oligonucleotide
  Sense strand starting at position 2616 of SEQ ID NO: 1243871
acauguacgcggagucaga

SEQ ID NO: 1447651 - RNA, 19 nt, Artificial Sequence
  Description of Artificial Sequence: Synthetic oligonucleotide
  Antisense strand to SEQ ID NO: 1447650
ucugacuccgcguacaugu

SEQ ID NO: 1447652 - RNA, 19 nt, Artificial Sequence
  Description of Artificial Sequence: Synthetic oligonucleotide
  Sense strand starting at position 2649 of SEQ ID NO: 1243871
gagggcuagccuugggaau

SEQ ID NO: 1447653 - RNA, 19 nt, Artificial Sequence
  Description of Artificial Sequence: Synthetic oligonucleotide
  Antisense strand to SEQ ID NO: 1447652
auucccaaggcuagcccuc

SEQ ID NO: 1447654 - RNA, 19 nt, Artificial Sequence
  Description of Artificial Sequence: Synthetic oligonucleotide
  Sense strand starting at position 2650 of SEQ ID NO: 1243871
agggcuagccuugggaauu

SEQ ID NO: 1447655 - RNA, 19 nt, Artificial Sequence
  Description of Artificial Sequence: Synthetic oligonucleotide
  Antisense strand to SEQ ID NO: 1447654
aauucccaaggcuagcccu

SEQ ID NO: 1447656 - RNA, 19 nt, Artificial Sequence
  Description of Artificial Sequence: Synthetic oligonucleotide
  Sense strand starting at position 2839 of SEQ ID NO: 1243871
gggcgaugucuuuacucaa

SEQ ID NO: 1447657 - RNA, 19 nt, Artificial Sequence
  Description of Artificial Sequence: Synthetic oligonucleotide
  Antisense strand to SEQ ID NO: 1447656
uugaguaaagacaucgccc

SEQ ID NO: 1447658 - RNA, 19 nt, Artificial Sequence
  Description of Artificial Sequence: Synthetic oligonucleotide
  Sense strand starting at position 2842 of SEQ ID NO: 1243871
cgaugucuuuacucaacca

SEQ ID NO: 1447659 - RNA, 19 nt, Artificial Sequence
  Description of Artificial Sequence: Synthetic oligonucleotide
  Antisense strand to SEQ ID NO: 1447658
ugguugaguaaagacaucg

SEQ ID NO: 1447660 - RNA, 19 nt, Artificial Sequence
  Description of Artificial Sequence: Synthetic oligonucleotide
  Sense strand starting at position 2915 of SEQ ID NO: 1243871
agaagugucucuuugggag

SEQ ID NO: 1447661 - RNA, 19 nt, Artificial Sequence
  Description of Artificial Sequence: Synthetic oligonucleotide
  Antisense strand to SEQ ID NO: 1447660
cucccaaagagacacuucu

SEQ ID NO: 1447662 - RNA, 19 nt, Artificial Sequence
  Description of Artificial Sequence: Synthetic oligonucleotide
  Sense strand starting at position 2921 of SEQ ID NO: 1243871
gucucuuugggagagauuc

SEQ ID NO: 1447663 - RNA, 19 nt, Artificial Sequence
  Description of Artificial Sequence: Synthetic oligonucleotide
  Antisense strand to SEQ ID NO: 1447662
gaaucucucccaaagagac

SEQ ID NO: 1447664 - RNA, 19 nt, Artificial Sequence
  Description of Artificial Sequence: Synthetic oligonucleotide
  Sense strand starting at position 2929 of SEQ ID NO: 1243871
gggagagauucugcuccca

SEQ ID NO: 1447665 - RNA, 19 nt, Artificial Sequence
  Description of Artificial Sequence: Synthetic oligonucleotide
  Antisense strand to SEQ ID NO: 1447664
ugggagcagaaucucuccc

SEQ ID NO: 1447666 - RNA, 19 nt, Artificial Sequence
  Description of Artificial Sequence: Synthetic oligonucleotide
  Sense strand starting at position 2931 of SEQ ID NO: 1243871
gagagauucugcucccauu

SEQ ID NO: 1447667 - RNA, 19 nt, Artificial Sequence
  Description of Artificial Sequence: Synthetic oligonucleotide
  Antisense strand to SEQ ID NO: 1447666
aaugggagcagaaucucuc

SEQ ID NO: 1447668 - RNA, 19 nt, Artificial Sequence
  Description of Artificial Sequence: Synthetic oligonucleotide
  Sense strand starting at position 3033 of SEQ ID NO: 1243871
gcccacugggaucaaaguu

SEQ ID NO: 1447669 - RNA, 19 nt, Artificial Sequence
  Description of Artificial Sequence: Synthetic oligonucleotide
  Antisense strand to SEQ ID NO: 1447668
aacuuugaucccagugggc

SEQ ID NO: 1447670 - RNA, 19 nt, Artificial Sequence
  Description of Artificial Sequence: Synthetic oligonucleotide
  Sense strand starting at position 3039 of SEQ ID NO: 1243871
ugggaucaaaguugucaug

SEQ ID NO: 1447671 - RNA, 19 nt, Artificial Sequence
  Description of Artificial Sequence: Synthetic oligonucleotide
  Antisense strand to SEQ ID NO: 1447670
caugacaacuuugauccca

SEQ ID NO: 1447672 - RNA, 19 nt, Artificial Sequence
  Description of Artificial Sequence: Synthetic oligonucleotide
  Sense strand starting at position 3041 of SEQ ID NO: 1243871
ggaucaaaguugucaugaa

SEQ ID NO: 1447673 - RNA, 19 nt, Artificial Sequence
  Description of Artificial Sequence: Synthetic oligonucleotide
  Antisense strand to SEQ ID NO: 1447672
uucaugacaacuuugaucc

SEQ ID NO: 1447674 - RNA, 19 nt, Artificial Sequence
  Description of Artificial Sequence: Synthetic oligonucleotide
  Sense strand starting at position 3399 of SEQ ID NO: 1243871
ggagcugguggugaagaau

SEQ ID NO: 1447675 - RNA, 19 nt, Artificial Sequence
  Description of Artificial Sequence: Synthetic oligonucleotide
  Antisense strand to SEQ ID NO: 1447674
auucuucaccaccagcucc

SEQ ID NO: 1447676 - RNA, 19 nt, Artificial Sequence
  Description of Artificial Sequence: Synthetic oligonucleotide
  Sense strand starting at position 3741 of SEQ ID NO: 1243871
cugcgagaagcacagaaua

SEQ ID NO: 1447677 - RNA, 19 nt, Artificial Sequence
  Description of Artificial Sequence: Synthetic oligonucleotide
  Antisense strand to SEQ ID NO: 1447676
uauucugugcuucucgcag

SEQ ID NO: 1447678 - RNA, 19 nt, Artificial Sequence
  Description of Artificial Sequence: Synthetic oligonucleotide
  Sense strand starting at position 3886 of SEQ ID NO: 1243871
ggguuucucaaccguggga

SEQ ID NO: 1447679 - RNA, 19 nt, Artificial Sequence
  Description of Artificial Sequence: Synthetic oligonucleotide
  Antisense strand to SEQ ID NO: 1447678
ucccacgguugagaaaccc

SEQ ID NO: 1447680 - RNA, 19 nt, Artificial Sequence
  Description of Artificial Sequence: Synthetic oligonucleotide
  Sense strand starting at position 3889 of SEQ ID NO: 1243871
uuucucaaccgugggaaua

SEQ ID NO: 1447681 - RNA, 19 nt, Artificial Sequence
  Description of Artificial Sequence: Synthetic oligonucleotide
  Antisense strand to SEQ ID NO: 1447680
uauucccacgguugagaaa

SEQ ID NO: 1447682 - RNA, 19 nt, Artificial Sequence
  Description of Artificial Sequence: Synthetic oligonucleotide
  Sense strand starting at position 3911 of SEQ ID NO: 1243871
augcuuugagcuggauaau

SEQ ID NO: 1447683 - RNA, 19 nt, Artificial Sequence
  Description of Artificial Sequence: Synthetic oligonucleotide
  Antisense strand to SEQ ID NO: 1447682
auuauccagcucaaagcau

SEQ ID NO: 1447684 - RNA, 19 nt, Artificial Sequence
  Description of Artificial Sequence: Synthetic oligonucleotide
  Sense strand starting at position 3912 of SEQ ID NO: 1243871
ugcuuugagcuggauaauu

SEQ ID NO: 1447685 - RNA, 19 nt, Artificial Sequence
  Description of Artificial Sequence: Synthetic oligonucleotide
  Antisense strand to SEQ ID NO: 1447684
aauuauccagcucaaagca

SEQ ID NO: 1447686 - RNA, 19 nt, Artificial Sequence
  Description of Artificial Sequence: Synthetic oligonucleotide
  Sense strand starting at position 3914 of SEQ ID NO: 1243871
cuuugagcuggauaauucu

SEQ ID NO: 1447687 - RNA, 19 nt, Artificial Sequence
  Description of Artificial Sequence: Synthetic oligonucleotide
  Antisense strand to SEQ ID NO: 1447686
agaauuauccagcucaaag

SEQ ID NO: 1447688 - RNA, 19 nt, Artificial Sequence
  Description of Artificial Sequence: Synthetic oligonucleotide
  Sense strand starting at position 333 of SEQ ID NO: 1243872
aaacaagaacgccgugaau

SEQ ID NO: 1447689 - RNA, 19 nt, Artificial Sequence
  Description of Artificial Sequence: Synthetic oligonucleotide
  Antisense strand to SEQ ID NO: 1447688
auucacggcguucuuguuu

SEQ ID NO: 1447690 - RNA, 19 nt, Artificial Sequence
  Description of Artificial Sequence: Synthetic oligonucleotide
  Sense strand starting at position 345 of SEQ ID NO: 1243872
cgugaauccauaugccaug

SEQ ID NO: 1447691 - RNA, 19 nt, Artificial Sequence
  Description of Artificial Sequence: Synthetic oligonucleotide
  Antisense strand to SEQ ID NO: 1447690
cauggcauauggauucacg

SEQ ID NO: 1447692 - RNA, 19 nt, Artificial Sequence
  Description of Artificial Sequence: Synthetic oligonucleotide
  Sense strand starting at position 471 of SEQ ID NO: 1243872
gcuuccugccaucaguuaa

SEQ ID NO: 1447693 - RNA, 19 nt, Artificial Sequence
  Description of Artificial Sequence: Synthetic oligonucleotide
  Antisense strand to SEQ ID NO: 1447692
uuaacugauggcaggaagc

SEQ ID NO: 1447694 - RNA, 19 nt, Artificial Sequence
  Description of Artificial Sequence: Synthetic oligonucleotide
  Sense strand starting at position 498 of SEQ ID NO: 1243872
cugcaaggucagugaucca

SEQ ID NO: 1447695 - RNA, 19 nt, Artificial Sequence
  Description of Artificial Sequence: Synthetic oligonucleotide
  Antisense strand to SEQ ID NO: 1447694
uggaucacugaccuugcag

SEQ ID NO: 1447696 - RNA, 19 nt, Artificial Sequence
  Description of Artificial Sequence: Synthetic oligonucleotide
  Sense strand starting at position 501 of SEQ ID NO: 1243872
caaggucagugauccacuu

SEQ ID NO: 1447697 - RNA, 19 nt, Artificial Sequence
  Description of Artificial Sequence: Synthetic oligonucleotide
  Antisense strand to SEQ ID NO: 1447696
aaguggaucacugaccuug

SEQ ID NO: 1447698 - RNA, 19 nt, Artificial Sequence
  Description of Artificial Sequence: Synthetic oligonucleotide
  Sense strand starting at position 514 of SEQ ID NO: 1243872
ccacuugacuaaguuagga

SEQ ID NO: 1447699 - RNA, 19 nt, Artificial Sequence
  Description of Artificial Sequence: Synthetic oligonucleotide
  Antisense strand to SEQ ID NO: 1447698
uccuaacuuagucaagugg

SEQ ID NO: 1447700 - RNA, 19 nt, Artificial Sequence
  Description of Artificial Sequence: Synthetic oligonucleotide
  Sense strand starting at position 565 of SEQ ID NO: 1243872
gcagguaccagggaaaguu

SEQ ID NO: 1447701 - RNA, 19 nt, Artificial Sequence
  Description of Artificial Sequence: Synthetic oligonucleotide
  Antisense strand to SEQ ID NO: 1447700
aacuuucccugguaccugc

SEQ ID NO: 1447702 - RNA, 19 nt, Artificial Sequence
  Description of Artificial Sequence: Synthetic oligonucleotide
  Sense strand starting at position 663 of SEQ ID NO: 1243872
agaguuacaguauguucuu

SEQ ID NO: 1447703 - RNA, 19 nt, Artificial Sequence
  Description of Artificial Sequence: Synthetic oligonucleotide
  Antisense strand to SEQ ID NO: 1447702
aagaacauacuguaacucu

SEQ ID NO: 1447704 - RNA, 19 nt, Artificial Sequence
  Description of Artificial Sequence: Synthetic oligonucleotide
  Sense strand starting at position 675 of SEQ ID NO: 1243872
uguucuuguggguagagga

SEQ ID NO: 1447705 - RNA, 19 nt, Artificial Sequence
  Description of Artificial Sequence: Synthetic oligonucleotide
  Antisense strand to SEQ ID NO: 1447704
uccucuacccacaagaaca

SEQ ID NO: 1447706 - RNA, 19 nt, Artificial Sequence
  Description of Artificial Sequence: Synthetic oligonucleotide
  Sense strand starting at position 733 of SEQ ID NO: 1243872
ucucaaacugcccagugau

SEQ ID NO: 1447707 - RNA, 19 nt, Artificial Sequence
  Description of Artificial Sequence: Synthetic oligonucleotide
  Antisense strand to SEQ ID NO: 1447706
aucacugggcaguuugaga

SEQ ID NO: 1447708 - RNA, 19 nt, Artificial Sequence
  Description of Artificial Sequence: Synthetic oligonucleotide
  Sense strand starting at position 852 of SEQ ID NO: 1243872
gaagcuuuccagcaugaag

SEQ ID NO: 1447709 - RNA, 19 nt, Artificial Sequence
  Description of Artificial Sequence: Synthetic oligonucleotide
  Antisense strand to SEQ ID NO: 1447708
cuucaugcuggaaagcuuc

SEQ ID NO: 1447710 - RNA, 19 nt, Artificial Sequence
  Description of Artificial Sequence: Synthetic oligonucleotide
  Sense strand starting at position 910 of SEQ ID NO: 1243872
ccaggagaaugacucaguu

SEQ ID NO: 1447711 - RNA, 19 nt, Artificial Sequence
  Description of Artificial Sequence: Synthetic oligonucleotide
  Antisense strand to SEQ ID NO: 1447710
aacugagucauucuccugg

SEQ ID NO: 1447712 - RNA, 19 nt, Artificial Sequence
  Description of Artificial Sequence: Synthetic oligonucleotide
  Sense strand starting at position 1112 of SEQ ID NO: 1243872
agggcucagucauuguaca

SEQ ID NO: 1447713 - RNA, 19 nt, Artificial Sequence
  Description of Artificial Sequence: Synthetic oligonucleotide
  Antisense strand to SEQ ID NO: 1447712
uguacaaugacugagcccu

SEQ ID NO: 1447714 - RNA, 19 nt, Artificial Sequence
  Description of Artificial Sequence: Synthetic oligonucleotide
  Sense strand starting at position 1212 of SEQ ID NO: 1243872
gguccaagguuaguaagaa

SEQ ID NO: 1447715 - RNA, 19 nt, Artificial Sequence
  Description of Artificial Sequence: Synthetic oligonucleotide
  Antisense strand to SEQ ID NO: 1447714
uucuuacuaaccuuggacc

SEQ ID NO: 1447716 - RNA, 19 nt, Artificial Sequence
  Description of Artificial Sequence: Synthetic oligonucleotide
  Sense strand starting at position 1240 of SEQ ID NO: 1243872
uguugugagcaggauucaa

SEQ ID NO: 1447717 - RNA, 19 nt, Artificial Sequence
  Description of Artificial Sequence: Synthetic oligonucleotide
  Antisense strand to SEQ ID NO: 1447716
uugaauccugcucacaaca

SEQ ID NO: 1447718 - RNA, 19 nt, Artificial Sequence
  Description of Artificial Sequence: Synthetic oligonucleotide
  Sense strand starting at position 1305 of SEQ ID NO: 1243872
gcagguuggacaugaucaa

SEQ ID NO: 1447719 - RNA, 19 nt, Artificial Sequence
  Description of Artificial Sequence: Synthetic oligonucleotide
  Antisense strand to SEQ ID NO: 1447718
uugaucauguccaaccugc

SEQ ID NO: 1447720 - RNA, 19 nt, Artificial Sequence
  Description of Artificial Sequence: Synthetic oligonucleotide
  Sense strand starting at position 1404 of SEQ ID NO: 1243872
ggaaacgcuccugggaaau

SEQ ID NO: 1447721 - RNA, 19 nt, Artificial Sequence
  Description of Artificial Sequence: Synthetic oligonucleotide
  Antisense strand to SEQ ID NO: 1447720
auuucccaggagcguuucc

SEQ ID NO: 1447722 - RNA, 19 nt, Artificial Sequence
  Description of Artificial Sequence: Synthetic oligonucleotide
  Sense strand starting at position 1420 of SEQ ID NO: 1243872
aaucgaguagaagguguaa

SEQ ID NO: 1447723 - RNA, 19 nt, Artificial Sequence
  Description of Artificial Sequence: Synthetic oligonucleotide
  Antisense strand to SEQ ID NO: 1447722
uuacaccuucuacucgauu

SEQ ID NO: 1447724 - RNA, 19 nt, Artificial Sequence
  Description of Artificial Sequence: Synthetic oligonucleotide
  Sense strand starting at position 2568 of SEQ ID NO: 1243872
aggcaccgaccuugagauu

SEQ ID NO: 1447725 - RNA, 19 nt, Artificial Sequence
  Description of Artificial Sequence: Synthetic oligonucleotide
  Antisense strand to SEQ ID NO: 1447724
aaucucaaggucggugccu

SEQ ID NO: 1447726 - RNA, 19 nt, Artificial Sequence
  Description of Artificial Sequence: Synthetic oligonucleotide
  Sense strand starting at position 2577 of SEQ ID NO: 1243872
ccuugagauuccguugauu

SEQ ID NO: 1447727 - RNA, 19 nt, Artificial Sequence
  Description of Artificial Sequence: Synthetic oligonucleotide
  Antisense strand to SEQ ID NO: 1447726
aaucaacggaaucucaagg

SEQ ID NO: 1447728 - RNA, 19 nt, Artificial Sequence
  Description of Artificial Sequence: Synthetic oligonucleotide
  Sense strand starting at position 2605 of SEQ ID NO: 1243872
cagagaauguuugcuaaca

SEQ ID NO: 1447729 - RNA, 19 nt, Artificial Sequence
  Description of Artificial Sequence: Synthetic oligonucleotide
  Antisense strand to SEQ ID NO: 1447728
uguuagcaaacauucucug

SEQ ID NO: 1447730 - RNA, 19 nt, Artificial Sequence
  Description of Artificial Sequence: Synthetic oligonucleotide
  Sense strand starting at position 2606 of SEQ ID NO: 1243872
agagaauguuugcuaacac

SEQ ID NO: 1447731 - RNA, 19 nt, Artificial Sequence
  Description of Artificial Sequence: Synthetic oligonucleotide
  Antisense strand to SEQ ID NO: 1447730
guguuagcaaacauucucu

SEQ ID NO: 1447732 - RNA, 19 nt, Artificial Sequence
  Description of Artificial Sequence: Synthetic oligonucleotide
  Sense strand starting at position 2649 of SEQ ID NO: 1243872
agugauggauaagucacaa

SEQ ID NO: 1447733 - RNA, 19 nt, Artificial Sequence
  Description of Artificial Sequence: Synthetic oligonucleotide
  Antisense strand to SEQ ID NO: 1447732
uugugacuuauccaucacu

SEQ ID NO: 1447734 - RNA, 19 nt, Artificial Sequence
  Description of Artificial Sequence: Synthetic oligonucleotide
  Sense strand starting at position 2686 of SEQ ID NO: 1243872
uucuucgacauguauggaa

SEQ ID NO: 1447735 - RNA, 19 nt, Artificial Sequence
  Description of Artificial Sequence: Synthetic oligonucleotide
  Antisense strand to SEQ ID NO: 1447734
uuccauacaugucgaagaa

SEQ ID NO: 1447736 - RNA, 19 nt, Artificial Sequence
  Description of Artificial Sequence: Synthetic oligonucleotide
  Sense strand starting at position 2688 of SEQ ID NO: 1243872
cuucgacauguauggaaua

SEQ ID NO: 1447737 - RNA, 19 nt, Artificial Sequence
  Description of Artificial Sequence: Synthetic oligonucleotide
  Antisense strand to SEQ ID NO: 1447736
uauuccauacaugucgaag

SEQ ID NO: 1447738 - RNA, 19 nt, Artificial Sequence
  Description of Artificial Sequence: Synthetic oligonucleotide
  Sense strand starting at position 2690 of SEQ ID NO: 1243872
ucgacauguauggaauacu

SEQ ID NO: 1447739 - RNA, 19 nt, Artificial Sequence
  Description of Artificial Sequence: Synthetic oligonucleotide
  Antisense strand to SEQ ID NO: 1447738
aguauuccauacaugucga

SEQ ID NO: 1447740 - RNA, 19 nt, Artificial Sequence
  Description of Artificial Sequence: Synthetic oligonucleotide
  Sense strand starting at position 2717 of SEQ ID NO: 1243872
accgcuuggcuagaaagau

SEQ ID NO: 1447741 - RNA, 19 nt, Artificial Sequence
  Description of Artificial Sequence: Synthetic oligonucleotide
  Antisense strand to SEQ ID NO: 1447740
aucuuucuagccaagcggu

SEQ ID NO: 1447742 - RNA, 19 nt, Artificial Sequence
  Description of Artificial Sequence: Synthetic oligonucleotide
  Sense strand starting at position 3453 of SEQ ID NO: 1243872
uagguacuaugguuagaua

SEQ ID NO: 1447743 - RNA, 19 nt, Artificial Sequence
  Description of Artificial Sequence: Synthetic oligonucleotide
  Antisense strand to SEQ ID NO: 1447742
uaucuaaccauaguaccua

SEQ ID NO: 1447744 - RNA, 19 nt, Artificial Sequence
  Description of Artificial Sequence: Synthetic oligonucleotide
  Sense strand starting at position 3465 of SEQ ID NO: 1243872
uuagauaagagacgucaga

SEQ ID NO: 1447745 - RNA, 19 nt, Artificial Sequence
  Description of Artificial Sequence: Synthetic oligonucleotide
  Antisense strand to SEQ ID NO: 1447744
ucugacgucucuuaucuaa

SEQ ID NO: 1447746 - RNA, 19 nt, Artificial Sequence
  Description of Artificial Sequence: Synthetic oligonucleotide
  Sense strand starting at position 3593 of SEQ ID NO: 1243872
aggacauuggguuggugaa

SEQ ID NO: 1447747 - RNA, 19 nt, Artificial Sequence
  Description of Artificial Sequence: Synthetic oligonucleotide
  Antisense strand to SEQ ID NO: 1447746
uucaccaacccaauguccu

SEQ ID NO: 1447748 - RNA, 19 nt, Artificial Sequence
  Description of Artificial Sequence: Synthetic oligonucleotide
  Sense strand starting at position 3623 of SEQ ID NO: 1243872
gagacaguguuucuaccaa

SEQ ID NO: 1447749 - RNA, 19 nt, Artificial Sequence
  Description of Artificial Sequence: Synthetic oligonucleotide
  Antisense strand to SEQ ID NO: 1447748
uugguagaaacacugucuc

SEQ ID NO: 1447750 - RNA, 19 nt, Artificial Sequence
  Description of Artificial Sequence: Synthetic oligonucleotide
  Sense strand starting at position 3654 of SEQ ID NO: 1243872
ugaguaaagcuauggaaau

SEQ ID NO: 1447751 - RNA, 19 nt, Artificial Sequence
  Description of Artificial Sequence: Synthetic oligonucleotide
  Antisense strand to SEQ ID NO: 1447750
auuuccauagcuuuacuca

SEQ ID NO: 1447752 - RNA, 19 nt, Artificial Sequence
  Description of Artificial Sequence: Synthetic oligonucleotide
  Sense strand starting at position 3719 of SEQ ID NO: 1243872
gugcauguggaagaauagu

SEQ ID NO: 1447753 - RNA, 19 nt, Artificial Sequence
  Description of Artificial Sequence: Synthetic oligonucleotide
  Antisense strand to SEQ ID NO: 1447752
acuauucuuccacaugcac

SEQ ID NO: 1447754 - RNA, 19 nt, Artificial Sequence
  Description of Artificial Sequence: Synthetic oligonucleotide
  Sense strand starting at position 3757 of SEQ ID NO: 1243872
guaguuuggagacauucca

SEQ ID NO: 1447755 - RNA, 19 nt, Artificial Sequence
  Description of Artificial Sequence: Synthetic oligonucleotide
  Antisense strand to SEQ ID NO: 1447754
uggaaugucuccaaacuac

SEQ ID NO: 1447756 - RNA, 19 nt, Artificial Sequence
  Description of Artificial Sequence: Synthetic oligonucleotide
  Sense strand starting at position 3766 of SEQ ID NO: 1243872
agacauuccauguggaagu

SEQ ID NO: 1447757 - RNA, 19 nt, Artificial Sequence
  Description of Artificial Sequence: Synthetic oligonucleotide
  Antisense strand to SEQ ID NO: 1447756
acuuccacauggaaugucu

SEQ ID NO: 1447758 - RNA, 19 nt, Artificial Sequence
  Description of Artificial Sequence: Synthetic oligonucleotide
  Sense strand starting at position 3798 of SEQ ID NO: 1243872
ggaagaguuuauccuuggu

SEQ ID NO: 1447759 - RNA, 19 nt, Artificial Sequence
  Description of Artificial Sequence: Synthetic oligonucleotide
  Antisense strand to SEQ ID NO: 1447758
accaaggauaaacucuucc

SEQ ID NO: 1447760 - RNA, 19 nt, Artificial Sequence
  Description of Artificial Sequence: Synthetic oligonucleotide
  Sense strand starting at position 3800 of SEQ ID NO: 1243872
aagaguuuauccuugguuu

SEQ ID NO: 1447761 - RNA, 19 nt, Artificial Sequence
  Description of Artificial Sequence: Synthetic oligonucleotide
  Antisense strand to SEQ ID NO: 1447760
aaaccaaggauaaacucuu

SEQ ID NO: 1447762 - RNA, 19 nt, Artificial Sequence
  Description of Artificial Sequence: Synthetic oligonucleotide
  Sense strand starting at position 3801 of SEQ ID NO: 1243872
agaguuuauccuugguuug

SEQ ID NO: 1447763 - RNA, 19 nt, Artificial Sequence
  Description of Artificial Sequence: Synthetic oligonucleotide
  Antisense strand to SEQ ID NO: 1447762
caaaccaaggauaaacucu

SEQ ID NO: 1447764 - RNA, 19 nt, Artificial Sequence
  Description of Artificial Sequence: Synthetic oligonucleotide
  Sense strand starting at position 3890 of SEQ ID NO: 1243872
guaacccugccuuaguaaa

SEQ ID NO: 1447765 - RNA, 19 nt, Artificial Sequence
  Description of Artificial Sequence: Synthetic oligonucleotide
  Antisense strand to SEQ ID NO: 1447764
uuuacuaaggcaggguuac

SEQ ID NO: 1447766 - RNA, 19 nt, Artificial Sequence
  Description of Artificial Sequence: Synthetic oligonucleotide
  Sense strand starting at position 3920 of SEQ ID NO: 1243872
cagugauguaaaggaggua

SEQ ID NO: 1447767 - RNA, 19 nt, Artificial Sequence
  Description of Artificial Sequence: Synthetic oligonucleotide
  Antisense strand to SEQ ID NO: 1447766
uaccuccuuuacaucacug

SEQ ID NO: 1447768 - RNA, 19 nt, Artificial Sequence
  Description of Artificial Sequence: Synthetic oligonucleotide
  Sense strand starting at position 131 of SEQ ID NO: 1243873
gaagaacagugagaucuuu

SEQ ID NO: 1447769 - RNA, 19 nt, Artificial Sequence
  Description of Artificial Sequence: Synthetic oligonucleotide
  Antisense strand to SEQ ID NO: 1447768
aaagaucucacuguucuuc

SEQ ID NO: 1447770 - RNA, 19 nt, Artificial Sequence
  Description of Artificial Sequence: Synthetic oligonucleotide
  Sense strand starting at position 236 of SEQ ID NO: 1243873
ugguaaggccuauggugau

SEQ ID NO: 1447771 - RNA, 19 nt, Artificial Sequence
  Description of Artificial Sequence: Synthetic oligonucleotide
  Antisense strand to SEQ ID NO: 1447770
aucaccauaggccuuacca

SEQ ID NO: 1447772 - RNA, 19 nt, Artificial Sequence
  Description of Artificial Sequence: Synthetic oligonucleotide
  Sense strand starting at position 289 of SEQ ID NO: 1243873
gcacaauagucacuccaag

SEQ ID NO: 1447773 - RNA, 19 nt, Artificial Sequence
  Description of Artificial Sequence: Synthetic oligonucleotide
  Antisense strand to SEQ ID NO: 1447772
cuuggagugacuauugugc

SEQ ID NO: 1447774 - RNA, 19 nt, Artificial Sequence
  Description of Artificial Sequence: Synthetic oligonucleotide
  Sense strand starting at position 309 of SEQ ID NO: 1243873
gcuggcauguguccagaga

SEQ ID NO: 1447775 - RNA, 19 nt, Artificial Sequence
  Description of Artificial Sequence: Synthetic oligonucleotide
  Antisense strand to SEQ ID NO: 1447774
ucucuggacacaugccagc

SEQ ID NO: 1447776 - RNA, 19 nt, Artificial Sequence
  Description of Artificial Sequence: Synthetic oligonucleotide
  Sense strand starting at position 310 of SEQ ID NO: 1243873
cuggcauguguccagagaa

SEQ ID NO: 1447777 - RNA, 19 nt, Artificial Sequence
  Description of Artificial Sequence: Synthetic oligonucleotide
  Antisense strand to SEQ ID NO: 1447776
uucucuggacacaugccag

SEQ ID NO: 1447778 - RNA, 19 nt, Artificial Sequence
  Description of Artificial Sequence: Synthetic oligonucleotide
  Sense strand starting at position 472 of SEQ ID NO: 1243873
cccagugucucauuagggu

SEQ ID NO: 1447779 - RNA, 19 nt, Artificial Sequence
  Description of Artificial Sequence: Synthetic oligonucleotide
  Antisense strand to SEQ ID NO: 1447778
acccuaaugagacacuggg

SEQ ID NO: 1447780 - RNA, 19 nt, Artificial Sequence
  Description of Artificial Sequence: Synthetic oligonucleotide
  Sense strand starting at position 478 of SEQ ID NO: 1243873
gucucauuaggguguauca

SEQ ID NO: 1447781 - RNA, 19 nt, Artificial Sequence
  Description of Artificial Sequence: Synthetic oligonucleotide
  Antisense strand to SEQ ID NO: 1447780
ugauacacccuaaugagac

SEQ ID NO: 1447782 - RNA, 19 nt, Artificial Sequence
  Description of Artificial Sequence: Synthetic oligonucleotide
  Sense strand starting at position 485 of SEQ ID NO: 1243873
uaggguguaucaccuggaa

SEQ ID NO: 1447783 - RNA, 19 nt, Artificial Sequence
  Description of Artificial Sequence: Synthetic oligonucleotide
  Antisense strand to SEQ ID NO: 1447782
uuccaggugauacacccua

SEQ ID NO: 1447784 - RNA, 19 nt, Artificial Sequence
  Description of Artificial Sequence: Synthetic oligonucleotide
  Sense strand starting at position 542 of SEQ ID NO: 1243873
gguauucugauugaguggu

SEQ ID NO: 1447785 - RNA, 19 nt, Artificial Sequence
  Description of Artificial Sequence: Synthetic oligonucleotide
  Antisense strand to SEQ ID NO: 1447784
accacucaaucagaauacc

SEQ ID NO: 1447786 - RNA, 19 nt, Artificial Sequence
  Description of Artificial Sequence: Synthetic oligonucleotide
  Sense strand starting at position 544 of SEQ ID NO: 1243873
uauucugauugagugguga

SEQ ID NO: 1447787 - RNA, 19 nt, Artificial Sequence
  Description of Artificial Sequence: Synthetic oligonucleotide
  Antisense strand to SEQ ID NO: 1447786
ucaccacucaaucagaaua

SEQ ID NO: 1447788 - RNA, 19 nt, Artificial Sequence
  Description of Artificial Sequence: Synthetic oligonucleotide
  Sense strand starting at position 546 of SEQ ID NO: 1243873
uucugauugaguggugacu

SEQ ID NO: 1447789 - RNA, 19 nt, Artificial Sequence
  Description of Artificial Sequence: Synthetic oligonucleotide
  Antisense strand to SEQ ID NO: 1447788
agucaccacucaaucagaa

SEQ ID NO: 1447790 - RNA, 19 nt, Artificial Sequence
  Description of Artificial Sequence: Synthetic oligonucleotide
  Sense strand starting at position 609 of SEQ ID NO: 1243873
gcaccaauugagugucaac

SEQ ID NO: 1447791 - RNA, 19 nt, Artificial Sequence
  Description of Artificial Sequence: Synthetic oligonucleotide
  Antisense strand to SEQ ID NO: 1447790
guugacacucaauuggugc

SEQ ID NO: 1447792 - RNA, 19 nt, Artificial Sequence
  Description of Artificial Sequence: Synthetic oligonucleotide
  Sense strand starting at position 619 of SEQ ID NO: 1243873
agugucaaccacugugaca

SEQ ID NO: 1447793 - RNA, 19 nt, Artificial Sequence
  Description of Artificial Sequence: Synthetic oligonucleotide
  Antisense strand to SEQ ID NO: 1447792
ugucacagugguugacacu

SEQ ID NO: 1447794 - RNA, 19 nt, Artificial Sequence
  Description of Artificial Sequence: Synthetic oligonucleotide
  Sense strand starting at position 621 of SEQ ID NO: 1243873
ugucaaccacugugacauu

SEQ ID NO: 1447795 - RNA, 19 nt, Artificial Sequence
  Description of Artificial Sequence: Synthetic oligonucleotide
  Antisense strand to SEQ ID NO: 1447794
aaugucacagugguugaca

SEQ ID NO: 1447796 - RNA, 19 nt, Artificial Sequence
  Description of Artificial Sequence: Synthetic oligonucleotide
  Sense strand starting at position 674 of SEQ ID NO: 1243873
uuccuugaucucggcauaa

SEQ ID NO: 1447797 - RNA, 19 nt, Artificial Sequence
  Description of Artificial Sequence: Synthetic oligonucleotide
  Antisense strand to SEQ ID NO: 1447796
uuaugccgagaucaaggaa

SEQ ID NO: 1447798 - RNA, 19 nt, Artificial Sequence
  Description of Artificial Sequence: Synthetic oligonucleotide
  Sense strand starting at position 1991 of SEQ ID NO: 1243873
cgcgggauucucgcgagau

SEQ ID NO: 1447799 - RNA, 19 nt, Artificial Sequence
  Description of Artificial Sequence: Synthetic oligonucleotide
  Antisense strand to SEQ ID NO: 1447798
aucucgcgagaaucccgcg

SEQ ID NO: 1447800 - RNA, 19 nt, Artificial Sequence
  Description of Artificial Sequence: Synthetic oligonucleotide
  Sense strand starting at position 1993 of SEQ ID NO: 1243873
cgggauucucgcgagauuu

SEQ ID NO: 1447801 - RNA, 19 nt, Artificial Sequence
  Description of Artificial Sequence: Synthetic oligonucleotide
  Antisense strand to SEQ ID NO: 1447800
aaaucucgcgagaaucccg

SEQ ID NO: 1447802 - RNA, 19 nt, Artificial Sequence
  Description of Artificial Sequence: Synthetic oligonucleotide
  Sense strand starting at position 2302 of SEQ ID NO: 1243873
cucucaguccgaggauucu

SEQ ID NO: 1447803 - RNA, 19 nt, Artificial Sequence
  Description of Artificial Sequence: Synthetic oligonucleotide
  Antisense strand to SEQ ID NO: 1447802
agaauccucggacugagag

SEQ ID NO: 1447804 - RNA, 19 nt, Artificial Sequence
  Description of Artificial Sequence: Synthetic oligonucleotide
  Sense strand starting at position 2308 of SEQ ID NO: 1243873
guccgaggauucucacaug

SEQ ID NO: 1447805 - RNA, 19 nt, Artificial Sequence
  Description of Artificial Sequence: Synthetic oligonucleotide
  Antisense strand to SEQ ID NO: 1447804
caugugagaauccucggac

SEQ ID NO: 1447806 - RNA, 19 nt, Artificial Sequence
  Description of Artificial Sequence: Synthetic oligonucleotide
  Sense strand starting at position 2311 of SEQ ID NO: 1243873
cgaggauucucacauggga

SEQ ID NO: 1447807 - RNA, 19 nt, Artificial Sequence
  Description of Artificial Sequence: Synthetic oligonucleotide
  Antisense strand to SEQ ID NO: 1447806
ucccaugugagaauccucg

SEQ ID NO: 1447808 - RNA, 19 nt, Artificial Sequence
  Description of Artificial Sequence: Synthetic oligonucleotide
  Sense strand starting at position 3122 of SEQ ID NO: 1243873
auaccuagugugggagauu

SEQ ID NO: 1447809 - RNA, 19 nt, Artificial Sequence
  Description of Artificial Sequence: Synthetic oligonucleotide
  Antisense strand to SEQ ID NO: 1447808
aaucucccacacuagguau

SEQ ID NO: 1447810 - RNA, 19 nt, Artificial Sequence
  Description of Artificial Sequence: Synthetic oligonucleotide
  Sense strand starting at position 3123 of SEQ ID NO: 1243873
uaccuagugugggagauuu

SEQ ID NO: 1447811 - RNA, 19 nt, Artificial Sequence
  Description of Artificial Sequence: Synthetic oligonucleotide
  Antisense strand to SEQ ID NO: 1447810
aaaucucccacacuaggua

SEQ ID NO: 1447812 - RNA, 19 nt, Artificial Sequence
  Description of Artificial Sequence: Synthetic oligonucleotide
  Sense strand starting at position 3135 of SEQ ID NO: 1243873
gagauuuacugcgaagcua

SEQ ID NO: 1447813 - RNA, 19 nt, Artificial Sequence
  Description of Artificial Sequence: Synthetic oligonucleotide
  Antisense strand to SEQ ID NO: 1447812
uagcuucgcaguaaaucuc

SEQ ID NO: 1447814 - RNA, 19 nt, Artificial Sequence
  Description of Artificial Sequence: Synthetic oligonucleotide
  Sense strand starting at position 3215 of SEQ ID NO: 1243873
guaaguugugcauggagau

SEQ ID NO: 1447815 - RNA, 19 nt, Artificial Sequence
  Description of Artificial Sequence: Synthetic oligonucleotide
  Antisense strand to SEQ ID NO: 1447814
aucuccaugcacaacuuac

SEQ ID NO: 1447816 - RNA, 19 nt, Artificial Sequence
  Description of Artificial Sequence: Synthetic oligonucleotide
  Sense strand starting at position 3216 of SEQ ID NO: 1243873
uaaguugugcauggagauc

SEQ ID NO: 1447817 - RNA, 19 nt, Artificial Sequence
  Description of Artificial Sequence: Synthetic oligonucleotide
  Antisense strand to SEQ ID NO: 1447816
gaucuccaugcacaacuua

SEQ ID NO: 1447818 - RNA, 19 nt, Artificial Sequence
  Description of Artificial Sequence: Synthetic oligonucleotide
  Sense strand starting at position 3245 of SEQ ID NO: 1243873
gaagccagucuccaagauu

SEQ ID NO: 1447819 - RNA, 19 nt, Artificial Sequence
  Description of Artificial Sequence: Synthetic oligonucleotide
  Antisense strand to SEQ ID NO: 1447818
aaucuuggagacuggcuuc

SEQ ID NO: 1447820 - RNA, 19 nt, Artificial Sequence
  Description of Artificial Sequence: Synthetic oligonucleotide
  Sense strand starting at position 3248 of SEQ ID NO: 1243873
gccagucuccaagauucca

SEQ ID NO: 1447821 - RNA, 19 nt, Artificial Sequence
  Description of Artificial Sequence: Synthetic oligonucleotide
  Antisense strand to SEQ ID NO: 1447820
uggaaucuuggagacuggc

SEQ ID NO: 1447822 - RNA, 19 nt, Artificial Sequence
  Description of Artificial Sequence: Synthetic oligonucleotide
  Sense strand starting at position 3265 of SEQ ID NO: 1243873
caguaaugugccgugguau

SEQ ID NO: 1447823 - RNA, 19 nt, Artificial Sequence
  Description of Artificial Sequence: Synthetic oligonucleotide
  Antisense strand to SEQ ID NO: 1447822
auaccacggcacauuacug

SEQ ID NO: 1447824 - RNA, 19 nt, Artificial Sequence
  Description of Artificial Sequence: Synthetic oligonucleotide
  Sense strand starting at position 3266 of SEQ ID NO: 1243873
aguaaugugccgugguauc

SEQ ID NO: 1447825 - RNA, 19 nt, Artificial Sequence
  Description of Artificial Sequence: Synthetic oligonucleotide
  Antisense strand to SEQ ID NO: 1447824
gauaccacggcacauuacu

SEQ ID NO: 1447826 - RNA, 19 nt, Artificial Sequence
  Description of Artificial Sequence: Synthetic oligonucleotide
  Sense strand starting at position 3273 of SEQ ID NO: 1243873
ugccgugguauccgaaacu

SEQ ID NO: 1447827 - RNA, 19 nt, Artificial Sequence
  Description of Artificial Sequence: Synthetic oligonucleotide
  Antisense strand to SEQ ID NO: 1447826
aguuucggauaccacggca

SEQ ID NO: 1447828 - RNA, 19 nt, Artificial Sequence
  Description of Artificial Sequence: Synthetic oligonucleotide
  Sense strand starting at position 3396 of SEQ ID NO: 1243873
ugggcuuaugauggagaaa

SEQ ID NO: 1447829 - RNA, 19 nt, Artificial Sequence
  Description of Artificial Sequence: Synthetic oligonucleotide
  Antisense strand to SEQ ID NO: 1447828
uuucuccaucauaagccca

SEQ ID NO: 1447830 - RNA, 19 nt, Artificial Sequence
  Description of Artificial Sequence: Synthetic oligonucleotide
  Sense strand starting at position 3502 of SEQ ID NO: 1243873
ccacaaagguauuaaggga

SEQ ID NO: 1447831 - RNA, 19 nt, Artificial Sequence
  Description of Artificial Sequence: Synthetic oligonucleotide
  Antisense strand to SEQ ID NO: 1447830
ucccuuaauaccuuugugg

SEQ ID NO: 1447832 - RNA, 19 nt, Artificial Sequence
  Description of Artificial Sequence: Synthetic oligonucleotide
  Sense strand starting at position 3521 of SEQ ID NO: 1243873
ccaggcuucucacaggaga

SEQ ID NO: 1447833 - RNA, 19 nt, Artificial Sequence
  Description of Artificial Sequence: Synthetic oligonucleotide
  Antisense strand to SEQ ID NO: 1447832
ucuccugugagaagccugg

SEQ ID NO: 1447834 - RNA, 19 nt, Artificial Sequence
  Description of Artificial Sequence: Synthetic oligonucleotide
  Sense strand starting at position 3523 of SEQ ID NO: 1243873
aggcuucucacaggagaca

SEQ ID NO: 1447835 - RNA, 19 nt, Artificial Sequence
  Description of Artificial Sequence: Synthetic oligonucleotide
  Antisense strand to SEQ ID NO: 1447834
ugucuccugugagaagccu

SEQ ID NO: 1447836 - RNA, 19 nt, Artificial Sequence
  Description of Artificial Sequence: Synthetic oligonucleotide
  Sense strand starting at position 3535 of SEQ ID NO: 1243873
ggagacauguuagauuuaa

SEQ ID NO: 1447837 - RNA, 19 nt, Artificial Sequence
  Description of Artificial Sequence: Synthetic oligonucleotide
  Antisense strand to SEQ ID NO: 1447836
uuaaaucuaacaugucucc

SEQ ID NO: 1447838 - RNA, 19 nt, Artificial Sequence
  Description of Artificial Sequence: Synthetic oligonucleotide
  Sense strand starting at position 3553 of SEQ ID NO: 1243873
aagauagggucugauuuga

SEQ ID NO: 1447839 - RNA, 19 nt, Artificial Sequence
  Description of Artificial Sequence: Synthetic oligonucleotide
  Antisense strand to SEQ ID NO: 1447838
ucaaaucagacccuaucuu

SEQ ID NO: 1447840 - RNA, 19 nt, Artificial Sequence
  Description of Artificial Sequence: Synthetic oligonucleotide
  Sense strand starting at position 3558 of SEQ ID NO: 1243873
agggucugauuugaagaca

SEQ ID NO: 1447841 - RNA, 19 nt, Artificial Sequence
  Description of Artificial Sequence: Synthetic oligonucleotide
  Antisense strand to SEQ ID NO: 1447840
ugucuucaaaucagacccu

SEQ ID NO: 1447842 - RNA, 19 nt, Artificial Sequence
  Description of Artificial Sequence: Synthetic oligonucleotide
  Sense strand starting at position 3594 of SEQ ID NO: 1243873
cagagaaugucccaagaca

SEQ ID NO: 1447843 - RNA, 19 nt, Artificial Sequence
  Description of Artificial Sequence: Synthetic oligonucleotide
  Antisense strand to SEQ ID NO: 1447842
ugucuugggacauucucug

SEQ ID NO: 1447844 - RNA, 19 nt, Artificial Sequence
  Description of Artificial Sequence: Synthetic oligonucleotide
  Sense strand starting at position 3731 of SEQ ID NO: 1243873
uauagaguacugugugucu

SEQ ID NO: 1447845 - RNA, 19 nt, Artificial Sequence
  Description of Artificial Sequence: Synthetic oligonucleotide
  Antisense strand to SEQ ID NO: 1447844
agacacacaguacucuaua

SEQ ID NO: 1447846 - RNA, 19 nt, Artificial Sequence
  Description of Artificial Sequence: Synthetic oligonucleotide
  Sense strand starting at position 3945 of SEQ ID NO: 1243873
gguggcgguacuugugauu

SEQ ID NO: 1447847 - RNA, 19 nt, Artificial Sequence
  Description of Artificial Sequence: Synthetic oligonucleotide
  Antisense strand to SEQ ID NO: 1447846
aaucacaaguaccgccacc

SEQ ID NO: 1447848 - RNA, 19 nt, Artificial Sequence
  Description of Artificial Sequence: Synthetic oligonucleotide
  Sense strand starting at position 173 of SEQ ID NO: 1243874
uaaguucucccaggcuguu

SEQ ID NO: 1447849 - RNA, 19 nt, Artificial Sequence
  Description of Artificial Sequence: Synthetic oligonucleotide
  Antisense strand to SEQ ID NO: 1447848
aacagccugggagaacuua

SEQ ID NO: 1447850 - RNA, 19 nt, Artificial Sequence
  Description of Artificial Sequence: Synthetic oligonucleotide
  Sense strand starting at position 176 of SEQ ID NO: 1243874
guucucccaggcuguuaaa

SEQ ID NO: 1447851 - RNA, 19 nt, Artificial Sequence
  Description of Artificial Sequence: Synthetic oligonucleotide
  Antisense strand to SEQ ID NO: 1447850
uuuaacagccugggagaac

SEQ ID NO: 1447852 - RNA, 19 nt, Artificial Sequence
  Description of Artificial Sequence: Synthetic oligonucleotide
  Sense strand starting at position 246 of SEQ ID NO: 1243874
uugcuaggucuauauucuu

SEQ ID NO: 1447853 - RNA, 19 nt, Artificial Sequence
  Description of Artificial Sequence: Synthetic oligonucleotide
  Antisense strand to SEQ ID NO: 1447852
aagaauauagaccuagcaa

SEQ ID NO: 1447854 - RNA, 19 nt, Artificial Sequence
  Description of Artificial Sequence: Synthetic oligonucleotide
  Sense strand starting at position 282 of SEQ ID NO: 1243874
uggcucucgcgccuguaau

SEQ ID NO: 1447855 - RNA, 19 nt, Artificial Sequence
  Description of Artificial Sequence: Synthetic oligonucleotide
  Antisense strand to SEQ ID NO: 1447854
auuacaggcgcgagagcca

SEQ ID NO: 1447856 - RNA, 19 nt, Artificial Sequence
  Description of Artificial Sequence: Synthetic oligonucleotide
  Sense strand starting at position 908 of SEQ ID NO: 1243874
ccaauaugaggauguguuu

SEQ ID NO: 1447857 - RNA, 19 nt, Artificial Sequence
  Description of Artificial Sequence: Synthetic oligonucleotide
  Antisense strand to SEQ ID NO: 1447856
aaacacauccucauauugg

SEQ ID NO: 1447858 - RNA, 19 nt, Artificial Sequence
  Description of Artificial Sequence: Synthetic oligonucleotide
  Sense strand starting at position 911 of SEQ ID NO: 1243874
auaugaggauguguuuguu

SEQ ID NO: 1447859 - RNA, 19 nt, Artificial Sequence
  Description of Artificial Sequence: Synthetic oligonucleotide
  Antisense strand to SEQ ID NO: 1447858
aacaaacacauccucauau

SEQ ID NO: 1447860 - RNA, 19 nt, Artificial Sequence
  Description of Artificial Sequence: Synthetic oligonucleotide
  Sense strand starting at position 914 of SEQ ID NO: 1243874
ugaggauguguuuguuuac

SEQ ID NO: 1447861 - RNA, 19 nt, Artificial Sequence
  Description of Artificial Sequence: Synthetic oligonucleotide
  Antisense strand to SEQ ID NO: 1447860
guaaacaaacacauccuca

SEQ ID NO: 1447862 - RNA, 19 nt, Artificial Sequence
  Description of Artificial Sequence: Synthetic oligonucleotide
  Sense strand starting at position 917 of SEQ ID NO: 1243874
ggauguguuuguuuaccuc

SEQ ID NO: 1447863 - RNA, 19 nt, Artificial Sequence
  Description of Artificial Sequence: Synthetic oligonucleotide
  Antisense strand to SEQ ID NO: 1447862
gagguaaacaaacacaucc

SEQ ID NO: 1447864 - RNA, 19 nt, Artificial Sequence
  Description of Artificial Sequence: Synthetic oligonucleotide
  Sense strand starting at position 944 of SEQ ID NO: 1243874
ccucauugugucuaaucaa

SEQ ID NO: 1447865 - RNA, 19 nt, Artificial Sequence
  Description of Artificial Sequence: Synthetic oligonucleotide
  Antisense strand to SEQ ID NO: 1447864
uugauuagacacaaugagg

SEQ ID NO: 1447866 - RNA, 19 nt, Artificial Sequence
  Description of Artificial Sequence: Synthetic oligonucleotide
  Sense strand starting at position 951 of SEQ ID NO: 1243874
gugucuaaucaauagcguu

SEQ ID NO: 1447867 - RNA, 19 nt, Artificial Sequence
  Description of Artificial Sequence: Synthetic oligonucleotide
  Antisense strand to SEQ ID NO: 1447866
aacgcuauugauuagacac

SEQ ID NO: 1447868 - RNA, 19 nt, Artificial Sequence
  Description of Artificial Sequence: Synthetic oligonucleotide
  Sense strand starting at position 1188 of SEQ ID NO: 1243874
gguuguggaaguuauucuu

SEQ ID NO: 1447869 - RNA, 19 nt, Artificial Sequence
  Description of Artificial Sequence: Synthetic oligonucleotide
  Antisense strand to SEQ ID NO: 1447868
aagaauaacuuccacaacc

SEQ ID NO: 1447870 - RNA, 19 nt, Artificial Sequence
  Description of Artificial Sequence: Synthetic oligonucleotide
  Sense strand starting at position 1305 of SEQ ID NO: 1243874
uauauaggugagcguugaa

SEQ ID NO: 1447871 - RNA, 19 nt, Artificial Sequence
  Description of Artificial Sequence: Synthetic oligonucleotide
  Antisense strand to SEQ ID NO: 1447870
uucaacgcucaccuauaua

SEQ ID NO: 1447872 - RNA, 19 nt, Artificial Sequence
  Description of Artificial Sequence: Synthetic oligonucleotide
  Sense strand starting at position 1332 of SEQ ID NO: 1243874
acagaaacuccuggcguuu

SEQ ID NO: 1447873 - RNA, 19 nt, Artificial Sequence
  Description of Artificial Sequence: Synthetic oligonucleotide
  Antisense strand to SEQ ID NO: 1447872
aaacgccaggaguuucugu

SEQ ID NO: 1447874 - RNA, 19 nt, Artificial Sequence
  Description of Artificial Sequence: Synthetic oligonucleotide
  Sense strand starting at position 1371 of SEQ ID NO: 1243874
cccagugagguguaggaau

SEQ ID NO: 1447875 - RNA, 19 nt, Artificial Sequence
  Description of Artificial Sequence: Synthetic oligonucleotide
  Antisense strand to SEQ ID NO: 1447874
auuccuacaccucacuggg

SEQ ID NO: 1447876 - RNA, 19 nt, Artificial Sequence
  Description of Artificial Sequence: Synthetic oligonucleotide
  Sense strand starting at position 1373 of SEQ ID NO: 1243874
cagugagguguaggaauca

SEQ ID NO: 1447877 - RNA, 19 nt, Artificial Sequence
  Description of Artificial Sequence: Synthetic oligonucleotide
  Antisense strand to SEQ ID NO: 1447876
ugauuccuacaccucacug

SEQ ID NO: 1447878 - RNA, 19 nt, Artificial Sequence
  Description of Artificial Sequence: Synthetic oligonucleotide
  Sense strand starting at position 1407 of SEQ ID NO: 1243874
gggaaagcgccugaagaaa

SEQ ID NO: 1447879 - RNA, 19 nt, Artificial Sequence
  Description of Artificial Sequence: Synthetic oligonucleotide
  Antisense strand to SEQ ID NO: 1447878
uuucuucaggcgcuuuccc

SEQ ID NO: 1447880 - RNA, 19 nt, Artificial Sequence
  Description of Artificial Sequence: Synthetic oligonucleotide
  Sense strand starting at position 1415 of SEQ ID NO: 1243874
gccugaagaaacuguugaa

SEQ ID NO: 1447881 - RNA, 19 nt, Artificial Sequence
  Description of Artificial Sequence: Synthetic oligonucleotide
  Antisense strand to SEQ ID NO: 1447880
uucaacaguuucuucaggc

SEQ ID NO: 1447882 - RNA, 19 nt, Artificial Sequence
  Description of Artificial Sequence: Synthetic oligonucleotide
  Sense strand starting at position 1422 of SEQ ID NO: 1243874
gaaacuguugaauggcauu

SEQ ID NO: 1447883 - RNA, 19 nt, Artificial Sequence
  Description of Artificial Sequence: Synthetic oligonucleotide
  Antisense strand to SEQ ID NO: 1447882
aaugccauucaacaguuuc

SEQ ID NO: 1447884 - RNA, 19 nt, Artificial Sequence
  Description of Artificial Sequence: Synthetic oligonucleotide
  Sense strand starting at position 1458 of SEQ ID NO: 1243874
gccgcauaugugcaaggaa

SEQ ID NO: 1447885 - RNA, 19 nt, Artificial Sequence
  Description of Artificial Sequence: Synthetic oligonucleotide
  Antisense strand to SEQ ID NO: 1447884
uuccuugcacauaugcggc

SEQ ID NO: 1447886 - RNA, 19 nt, Artificial Sequence
  Description of Artificial Sequence: Synthetic oligonucleotide
  Sense strand starting at position 2331 of SEQ ID NO: 1243874
cagagcuucucuguggagu

SEQ ID NO: 1447887 - RNA, 19 nt, Artificial Sequence
  Description of Artificial Sequence: Synthetic oligonucleotide
  Antisense strand to SEQ ID NO: 1447886
acuccacagagaagcucug

SEQ ID NO: 1447888 - RNA, 19 nt, Artificial Sequence
  Description of Artificial Sequence: Synthetic oligonucleotide
  Sense strand starting at position 2332 of SEQ ID NO: 1243874
agagcuucucuguggaguu

SEQ ID NO: 1447889 - RNA, 19 nt, Artificial Sequence
  Description of Artificial Sequence: Synthetic oligonucleotide
  Antisense strand to SEQ ID NO: 1447888
aacuccacagagaagcucu

SEQ ID NO: 1447890 - RNA, 19 nt, Artificial Sequence
  Description of Artificial Sequence: Synthetic oligonucleotide
  Sense strand starting at position 2552 of SEQ ID NO: 1243874
ggguucugagcgcuuguuu

SEQ ID NO: 1447891 - RNA, 19 nt, Artificial Sequence
  Description of Artificial Sequence: Synthetic oligonucleotide
  Antisense strand to SEQ ID NO: 1447890
aaacaagcgcucagaaccc

SEQ ID NO: 1447892 - RNA, 19 nt, Artificial Sequence
  Description of Artificial Sequence: Synthetic oligonucleotide
  Sense strand starting at position 2788 of SEQ ID NO: 1243874
uggagauuguggcuuguuu

SEQ ID NO: 1447893 - RNA, 19 nt, Artificial Sequence
  Description of Artificial Sequence: Synthetic oligonucleotide
  Antisense strand to SEQ ID NO: 1447892
aaacaagccacaaucucca

SEQ ID NO: 1447894 - RNA, 19 nt, Artificial Sequence
  Description of Artificial Sequence: Synthetic oligonucleotide
  Sense strand starting at position 2790 of SEQ ID NO: 1243874
gagauuguggcuuguuucu

SEQ ID NO: 1447895 - RNA, 19 nt, Artificial Sequence
  Description of Artificial Sequence: Synthetic oligonucleotide
  Antisense strand to SEQ ID NO: 1447894
agaaacaagccacaaucuc

SEQ ID NO: 1447896 - RNA, 19 nt, Artificial Sequence
  Description of Artificial Sequence: Synthetic oligonucleotide
  Sense strand starting at position 3054 of SEQ ID NO: 1243874
cggcguagggaguaucauu

SEQ ID NO: 1447897 - RNA, 19 nt, Artificial Sequence
  Description of Artificial Sequence: Synthetic oligonucleotide
  Antisense strand to SEQ ID NO: 1447896
aaugauacucccuacgccg

SEQ ID NO: 1447898 - RNA, 19 nt, Artificial Sequence
  Description of Artificial Sequence: Synthetic oligonucleotide
  Sense strand starting at position 3059 of SEQ ID NO: 1243874
uagggaguaucauucucac

SEQ ID NO: 1447899 - RNA, 19 nt, Artificial Sequence
  Description of Artificial Sequence: Synthetic oligonucleotide
  Antisense strand to SEQ ID NO: 1447898
gugagaaugauacucccua

SEQ ID NO: 1447900 - RNA, 19 nt, Artificial Sequence
  Description of Artificial Sequence: Synthetic oligonucleotide
  Sense strand starting at position 3062 of SEQ ID NO: 1243874
ggaguaucauucucacuuu

SEQ ID NO: 1447901 - RNA, 19 nt, Artificial Sequence
  Description of Artificial Sequence: Synthetic oligonucleotide
  Antisense strand to SEQ ID NO: 1447900
aaagugagaaugauacucc

SEQ ID NO: 1447902 - RNA, 19 nt, Artificial Sequence
  Description of Artificial Sequence: Synthetic oligonucleotide
  Sense strand starting at position 3158 of SEQ ID NO: 1243874
agagccuguccacgagauu

SEQ ID NO: 1447903 - RNA, 19 nt, Artificial Sequence
  Description of Artificial Sequence: Synthetic oligonucleotide
  Antisense strand to SEQ ID NO: 1447902
aaucucguggacaggcucu

SEQ ID NO: 1447904 - RNA, 19 nt, Artificial Sequence
  Description of Artificial Sequence: Synthetic oligonucleotide
  Sense strand starting at position 3159 of SEQ ID NO: 1243874
gagccuguccacgagauua

SEQ ID NO: 1447905 - RNA, 19 nt, Artificial Sequence
  Description of Artificial Sequence: Synthetic oligonucleotide
  Antisense strand to SEQ ID NO: 1447904
uaaucucguggacaggcuc

SEQ ID NO: 1447906 - RNA, 19 nt, Artificial Sequence
  Description of Artificial Sequence: Synthetic oligonucleotide
  Sense strand starting at position 3161 of SEQ ID NO: 1243874
gccuguccacgagauuauc

SEQ ID NO: 1447907 - RNA, 19 nt, Artificial Sequence
  Description of Artificial Sequence: Synthetic oligonucleotide
  Antisense strand to SEQ ID NO: 1447906
gauaaucucguggacaggc

SEQ ID NO: 1447908 - RNA, 19 nt, Artificial Sequence
  Description of Artificial Sequence: Synthetic oligonucleotide
  Sense strand starting at position 3227 of SEQ ID NO: 1243874
cuaguccauuuaugaggaa

SEQ ID NO: 1447909 - RNA, 19 nt, Artificial Sequence
  Description of Artificial Sequence: Synthetic oligonucleotide
  Antisense strand to SEQ ID NO: 1447908
uuccucauaaauggacuag

SEQ ID NO: 1447910 - RNA, 19 nt, Artificial Sequence
  Description of Artificial Sequence: Synthetic oligonucleotide
  Sense strand starting at position 3228 of SEQ ID NO: 1243874
uaguccauuuaugaggaaa

SEQ ID NO: 1447911 - RNA, 19 nt, Artificial Sequence
  Description of Artificial Sequence: Synthetic oligonucleotide
  Antisense strand to SEQ ID NO: 1447910
uuuccucauaaauggacua

SEQ ID NO: 1447912 - RNA, 19 nt, Artificial Sequence
  Description of Artificial Sequence: Synthetic oligonucleotide
  Sense strand starting at position 3297 of SEQ ID NO: 1243874
aggugacccagugaguauu

SEQ ID NO: 1447913 - RNA, 19 nt, Artificial Sequence
  Description of Artificial Sequence: Synthetic oligonucleotide
  Antisense strand to SEQ ID NO: 1447912
aauacucacugggucaccu

SEQ ID NO: 1447914 - RNA, 19 nt, Artificial Sequence
  Description of Artificial Sequence: Synthetic oligonucleotide
  Sense strand starting at position 3308 of SEQ ID NO: 1243874
ugaguauuuggacgucgau

SEQ ID NO: 1447915 - RNA, 19 nt, Artificial Sequence
  Description of Artificial Sequence: Synthetic oligonucleotide
  Antisense strand to SEQ ID NO: 1447914
aucgacguccaaauacuca

SEQ ID NO: 1447916 - RNA, 19 nt, Artificial Sequence
  Description of Artificial Sequence: Synthetic oligonucleotide
  Sense strand starting at position 3433 of SEQ ID NO: 1243874
gggacacuuacugguauuc

SEQ ID NO: 1447917 - RNA, 19 nt, Artificial Sequence
  Description of Artificial Sequence: Synthetic oligonucleotide
  Antisense strand to SEQ ID NO: 1447916
gaauaccaguaaguguccc

SEQ ID NO: 1447918 - RNA, 19 nt, Artificial Sequence
  Description of Artificial Sequence: Synthetic oligonucleotide
  Sense strand starting at position 3443 of SEQ ID NO: 1243874
cugguauucggcugauaag

SEQ ID NO: 1447919 - RNA, 19 nt, Artificial Sequence
  Description of Artificial Sequence: Synthetic oligonucleotide
  Antisense strand to SEQ ID NO: 1447918
cuuaucagccgaauaccag

SEQ ID NO: 1447920 - RNA, 19 nt, Artificial Sequence
  Description of Artificial Sequence: Synthetic oligonucleotide
  Sense strand starting at position 3454 of SEQ ID NO: 1243874
cugauaagcauccgcagua

SEQ ID NO: 1447921 - RNA, 19 nt, Artificial Sequence
  Description of Artificial Sequence: Synthetic oligonucleotide
  Antisense strand to SEQ ID NO: 1447920
uacugcggaugcuuaucag

SEQ ID NO: 1447922 - RNA, 19 nt, Artificial Sequence
  Description of Artificial Sequence: Synthetic oligonucleotide
  Sense strand starting at position 3455 of SEQ ID NO: 1243874
ugauaagcauccgcaguau

SEQ ID NO: 1447923 - RNA, 19 nt, Artificial Sequence
  Description of Artificial Sequence: Synthetic oligonucleotide
  Antisense strand to SEQ ID NO: 1447922
auacugcggaugcuuauca

SEQ ID NO: 1447924 - RNA, 19 nt, Artificial Sequence
  Description of Artificial Sequence: Synthetic oligonucleotide
  Sense strand starting at position 3591 of SEQ ID NO: 1243874
ggacuugggugaagaguua

SEQ ID NO: 1447925 - RNA, 19 nt, Artificial Sequence
  Description of Artificial Sequence: Synthetic oligonucleotide
  Antisense strand to SEQ ID NO: 1447924
uaacucuucacccaagucc

SEQ ID NO: 1447926 - RNA, 19 nt, Artificial Sequence
  Description of Artificial Sequence: Synthetic oligonucleotide
  Sense strand starting at position 3598 of SEQ ID NO: 1243874
ggugaagaguuagugacau

SEQ ID NO: 1447927 - RNA, 19 nt, Artificial Sequence
  Description of Artificial Sequence: Synthetic oligonucleotide
  Antisense strand to SEQ ID NO: 1447926
augucacuaacucuucacc

SEQ ID NO: 1447928 - RNA, 19 nt, Artificial Sequence
  Description of Artificial Sequence: Synthetic oligonucleotide
  Sense strand starting at position 348 of SEQ ID NO: 1243875
cuggaaugaucagauacca

SEQ ID NO: 1447929 - RNA, 19 nt, Artificial Sequence
  Description of Artificial Sequence: Synthetic oligonucleotide
  Antisense strand to SEQ ID NO: 1447928
ugguaucugaucauuccag

SEQ ID NO: 1447930 - RNA, 19 nt, Artificial Sequence
  Description of Artificial Sequence: Synthetic oligonucleotide
  Sense strand starting at position 411 of SEQ ID NO: 1243875
acaauugcuccuggauacu

SEQ ID NO: 1447931 - RNA, 19 nt, Artificial Sequence
  Description of Artificial Sequence: Synthetic oligonucleotide
  Antisense strand to SEQ ID NO: 1447930
aguauccaggagcaauugu

SEQ ID NO: 1447932 - RNA, 19 nt, Artificial Sequence
  Description of Artificial Sequence: Synthetic oligonucleotide
  Sense strand starting at position 514 of SEQ ID NO: 1243875
acacuuauuugagagaauc

SEQ ID NO: 1447933 - RNA, 19 nt, Artificial Sequence
  Description of Artificial Sequence: Synthetic oligonucleotide
  Antisense strand to SEQ ID NO: 1447932
gauucucucaaauaagugu

SEQ ID NO: 1447934 - RNA, 19 nt, Artificial Sequence
  Description of Artificial Sequence: Synthetic oligonucleotide
  Sense strand starting at position 616 of SEQ ID NO: 1243875
acagcagguuaugaagaaa

SEQ ID NO: 1447935 - RNA, 19 nt, Artificial Sequence
  Description of Artificial Sequence: Synthetic oligonucleotide
  Antisense strand to SEQ ID NO: 1447934
uuucuucauaaccugcugu

SEQ ID NO: 1447936 - RNA, 19 nt, Artificial Sequence
  Description of Artificial Sequence: Synthetic oligonucleotide
  Sense strand starting at position 764 of SEQ ID NO: 1243875
gugcuaaaucaaggcugaa

SEQ ID NO: 1447937 - RNA, 19 nt, Artificial Sequence
  Description of Artificial Sequence: Synthetic oligonucleotide
  Antisense strand to SEQ ID NO: 1447936
uucagccuugauuuagcac

SEQ ID NO: 1447938 - RNA, 19 nt, Artificial Sequence
  Description of Artificial Sequence: Synthetic oligonucleotide
  Sense strand starting at position 843 of SEQ ID NO: 1243875
agaagcaucccgggaagga

SEQ ID NO: 1447939 - RNA, 19 nt, Artificial Sequence
  Description of Artificial Sequence: Synthetic oligonucleotide
  Antisense strand to SEQ ID NO: 1447938
uccuucccgggaugcuucu

SEQ ID NO: 1447940 - RNA, 19 nt, Artificial Sequence
  Description of Artificial Sequence: Synthetic oligonucleotide
  Sense strand starting at position 856 of SEQ ID NO: 1243875
gaaggaugcucguuacacu

SEQ ID NO: 1447941 - RNA, 19 nt, Artificial Sequence
  Description of Artificial Sequence: Synthetic oligonucleotide
  Antisense strand to SEQ ID NO: 1447940
aguguaacgagcauccuuc

SEQ ID NO: 1447942 - RNA, 19 nt, Artificial Sequence
  Description of Artificial Sequence: Synthetic oligonucleotide
  Sense strand starting at position 1730 of SEQ ID NO: 1243875
gcagucguugucucucaca

SEQ ID NO: 1447943 - RNA, 19 nt, Artificial Sequence
  Description of Artificial Sequence: Synthetic oligonucleotide
  Antisense strand to SEQ ID NO: 1447942
ugugagagacaacgacugc

SEQ ID NO: 1447944 - RNA, 19 nt, Artificial Sequence
  Description of Artificial Sequence: Synthetic oligonucleotide
  Sense strand starting at position 1834 of SEQ ID NO: 1243875
ggaugagacuaaugagauc

SEQ ID NO: 1447945 - RNA, 19 nt, Artificial Sequence
  Description of Artificial Sequence: Synthetic oligonucleotide
  Antisense strand to SEQ ID NO: 1447944
gaucucauuagucucaucc

SEQ ID NO: 1447946 - RNA, 19 nt, Artificial Sequence
  Description of Artificial Sequence: Synthetic oligonucleotide
  Sense strand starting at position 1843 of SEQ ID NO: 1243875
uaaugagaucugugacgac

SEQ ID NO: 1447947 - RNA, 19 nt, Artificial Sequence
  Description of Artificial Sequence: Synthetic oligonucleotide
  Antisense strand to SEQ ID NO: 1447946
gucgucacagaucucauua

SEQ ID NO: 1447948 - RNA, 19 nt, Artificial Sequence
  Description of Artificial Sequence: Synthetic oligonucleotide
  Sense strand starting at position 2060 of SEQ ID NO: 1243875
gugccaccuaguggugaaa

SEQ ID NO: 1447949 - RNA, 19 nt, Artificial Sequence
  Description of Artificial Sequence: Synthetic oligonucleotide
  Antisense strand to SEQ ID NO: 1447948
uuucaccacuagguggcac

SEQ ID NO: 1447950 - RNA, 19 nt, Artificial Sequence
  Description of Artificial Sequence: Synthetic oligonucleotide
  Sense strand starting at position 2072 of SEQ ID NO: 1243875
ggugaaaccuggcuacuac

SEQ ID NO: 1447951 - RNA, 19 nt, Artificial Sequence
  Description of Artificial Sequence: Synthetic oligonucleotide
  Antisense strand to SEQ ID NO: 1447950
guaguagccagguuucacc

SEQ ID NO: 1447952 - RNA, 19 nt, Artificial Sequence
  Description of Artificial Sequence: Synthetic oligonucleotide
  Sense strand starting at position 2073 of SEQ ID NO: 1243875
gugaaaccuggcuacuaca

SEQ ID NO: 1447953 - RNA, 19 nt, Artificial Sequence
  Description of Artificial Sequence: Synthetic oligonucleotide
  Antisense strand to SEQ ID NO: 1447952
uguaguagccagguuucac

SEQ ID NO: 1447954 - RNA, 19 nt, Artificial Sequence
  Description of Artificial Sequence: Synthetic oligonucleotide
  Sense strand starting at position 2111 of SEQ ID NO: 1243875
cucggagcgugguugauuu

SEQ ID NO: 1447955 - RNA, 19 nt, Artificial Sequence
  Description of Artificial Sequence: Synthetic oligonucleotide
  Antisense strand to SEQ ID NO: 1447954
aaaucaaccacgcuccgag

SEQ ID NO: 1447956 - RNA, 19 nt, Artificial Sequence
  Description of Artificial Sequence: Synthetic oligonucleotide
  Sense strand starting at position 2115 of SEQ ID NO: 1243875
gagcgugguugauuucauu

SEQ ID NO: 1447957 - RNA, 19 nt, Artificial Sequence
  Description of Artificial Sequence: Synthetic oligonucleotide
  Antisense strand to SEQ ID NO: 1447956
aaugaaaucaaccacgcuc

SEQ ID NO: 1447958 - RNA, 19 nt, Artificial Sequence
  Description of Artificial Sequence: Synthetic oligonucleotide
  Sense strand starting at position 2170 of SEQ ID NO: 1243875
gugaaaugccuuuauuaca

SEQ ID NO: 1447959 - RNA, 19 nt, Artificial Sequence
  Description of Artificial Sequence: Synthetic oligonucleotide
  Antisense strand to SEQ ID NO: 1447958
uguaauaaaggcauuucac

SEQ ID NO: 1447960 - RNA, 19 nt, Artificial Sequence
  Description of Artificial Sequence: Synthetic oligonucleotide
  Sense strand starting at position 2203 of SEQ ID NO: 1243875
uauguagggucuccuaauu

SEQ ID NO: 1447961 - RNA, 19 nt, Artificial Sequence
  Description of Artificial Sequence: Synthetic oligonucleotide
  Antisense strand to SEQ ID NO: 1447960
aauuaggagacccuacaua

SEQ ID NO: 1447962 - RNA, 19 nt, Artificial Sequence
  Description of Artificial Sequence: Synthetic oligonucleotide
  Sense strand starting at position 2223 of SEQ ID NO: 1243875
aggcaacucucuggauaaa

SEQ ID NO: 1447963 - RNA, 19 nt, Artificial Sequence
  Description of Artificial Sequence: Synthetic oligonucleotide
  Antisense strand to SEQ ID NO: 1447962
uuuauccagagaguugccu

SEQ ID NO: 1447964 - RNA, 19 nt, Artificial Sequence
  Description of Artificial Sequence: Synthetic oligonucleotide
  Sense strand starting at position 2260 of SEQ ID NO: 1243875
guagucuucuaagauauuu

SEQ ID NO: 1447965 - RNA, 19 nt, Artificial Sequence
  Description of Artificial Sequence: Synthetic oligonucleotide
  Antisense strand to SEQ ID NO: 1447964
aaauaucuuagaagacuac

SEQ ID NO: 1447966 - RNA, 19 nt, Artificial Sequence
  Description of Artificial Sequence: Synthetic oligonucleotide
  Sense strand starting at position 2272 of SEQ ID NO: 1243875
gauauuugcucaucgacgu

SEQ ID NO: 1447967 - RNA, 19 nt, Artificial Sequence
  Description of Artificial Sequence: Synthetic oligonucleotide
  Antisense strand to SEQ ID NO: 1447966
acgucgaugagcaaauauc

SEQ ID NO: 1447968 - RNA, 19 nt, Artificial Sequence
  Description of Artificial Sequence: Synthetic oligonucleotide
  Sense strand starting at position 2276 of SEQ ID NO: 1243875
uuugcucaucgacgugaaa

SEQ ID NO: 1447969 - RNA, 19 nt, Artificial Sequence
  Description of Artificial Sequence: Synthetic oligonucleotide
  Antisense strand to SEQ ID NO: 1447968
uuucacgucgaugagcaaa

SEQ ID NO: 1447970 - RNA, 19 nt, Artificial Sequence
  Description of Artificial Sequence: Synthetic oligonucleotide
  Sense strand starting at position 2278 of SEQ ID NO: 1243875
ugcucaucgacgugaaaga

SEQ ID NO: 1447971 - RNA, 19 nt, Artificial Sequence
  Description of Artificial Sequence: Synthetic oligonucleotide
  Antisense strand to SEQ ID NO: 1447970
ucuuucacgucgaugagca

SEQ ID NO: 1447972 - RNA, 19 nt, Artificial Sequence
  Description of Artificial Sequence: Synthetic oligonucleotide
  Sense strand starting at position 2279 of SEQ ID NO: 1243875
gcucaucgacgugaaagau

SEQ ID NO: 1447973 - RNA, 19 nt, Artificial Sequence
  Description of Artificial Sequence: Synthetic oligonucleotide
  Antisense strand to SEQ ID NO: 1447972
aucuuucacgucgaugagc

SEQ ID NO: 1447974 - RNA, 19 nt, Artificial Sequence
  Description of Artificial Sequence: Synthetic oligonucleotide
  Sense strand starting at position 2339 of SEQ ID NO: 1243875
ucaucaugaugaguugaaa

SEQ ID NO: 1447975 - RNA, 19 nt, Artificial Sequence
  Description of Artificial Sequence: Synthetic oligonucleotide
  Antisense strand to SEQ ID NO: 1447974
uuucaacucaucaugauga

SEQ ID NO: 1447976 - RNA, 19 nt, Artificial Sequence
  Description of Artificial Sequence: Synthetic oligonucleotide
  Sense strand starting at position 2367 of SEQ ID NO: 1243875
guccuaguguguucucaau

SEQ ID NO: 1447977 - RNA, 19 nt, Artificial Sequence
  Description of Artificial Sequence: Synthetic oligonucleotide
  Antisense strand to SEQ ID NO: 1447976
auugagaacacacuaggac

SEQ ID NO: 1447978 - RNA, 19 nt, Artificial Sequence
  Description of Artificial Sequence: Synthetic oligonucleotide
  Sense strand starting at position 2369 of SEQ ID NO: 1243875
ccuaguguguucucaaugu

SEQ ID NO: 1447979 - RNA, 19 nt, Artificial Sequence
  Description of Artificial Sequence: Synthetic oligonucleotide
  Antisense strand to SEQ ID NO: 1447978
acauugagaacacacuagg

SEQ ID NO: 1447980 - RNA, 19 nt, Artificial Sequence
  Description of Artificial Sequence: Synthetic oligonucleotide
  Sense strand starting at position 2657 of SEQ ID NO: 1243875
cagagaguuuaagaaguaa

SEQ ID NO: 1447981 - RNA, 19 nt, Artificial Sequence
  Description of Artificial Sequence: Synthetic oligonucleotide
  Antisense strand to SEQ ID NO: 1447980
uuacuucuuaaacucucug

SEQ ID NO: 1447982 - RNA, 19 nt, Artificial Sequence
  Description of Artificial Sequence: Synthetic oligonucleotide
  Sense strand starting at position 2994 of SEQ ID NO: 1243875
ucacuagacuaguuaaguu

SEQ ID NO: 1447983 - RNA, 19 nt, Artificial Sequence
  Description of Artificial Sequence: Synthetic oligonucleotide
  Antisense strand to SEQ ID NO: 1447982
aacuuaacuagucuaguga

SEQ ID NO: 1447984 - RNA, 19 nt, Artificial Sequence
  Description of Artificial Sequence: Synthetic oligonucleotide
  Sense strand starting at position 3004 of SEQ ID NO: 1243875
aguuaaguuguagauacca

SEQ ID NO: 1447985 - RNA, 19 nt, Artificial Sequence
  Description of Artificial Sequence: Synthetic oligonucleotide
  Antisense strand to SEQ ID NO: 1447984
ugguaucuacaacuuaacu

SEQ ID NO: 1447986 - RNA, 19 nt, Artificial Sequence
  Description of Artificial Sequence: Synthetic oligonucleotide
  Sense strand starting at position 3012 of SEQ ID NO: 1243875
uguagauaccagggaguca

SEQ ID NO: 1447987 - RNA, 19 nt, Artificial Sequence
  Description of Artificial Sequence: Synthetic oligonucleotide
  Antisense strand to SEQ ID NO: 1447986
ugacucccugguaucuaca

SEQ ID NO: 1447988 - RNA, 19 nt, Artificial Sequence
  Description of Artificial Sequence: Synthetic oligonucleotide
  Sense strand starting at position 3024 of SEQ ID NO: 1243875
ggagucaguagaugaauug

SEQ ID NO: 1447989 - RNA, 19 nt, Artificial Sequence
  Description of Artificial Sequence: Synthetic oligonucleotide
  Antisense strand to SEQ ID NO: 1447988
caauucaucuacugacucc

SEQ ID NO: 1447990 - RNA, 19 nt, Artificial Sequence
  Description of Artificial Sequence: Synthetic oligonucleotide
  Sense strand starting at position 3276 of SEQ ID NO: 1243875
ccugaauuccagcaaucug

SEQ ID NO: 1447991 - RNA, 19 nt, Artificial Sequence
  Description of Artificial Sequence: Synthetic oligonucleotide
  Antisense strand to SEQ ID NO: 1447990
cagauugcuggaauucagg

SEQ ID NO: 1447992 - RNA, 19 nt, Artificial Sequence
  Description of Artificial Sequence: Synthetic oligonucleotide
  Sense strand starting at position 3436 of SEQ ID NO: 1243875
agucaaguauacuuauagu

SEQ ID NO: 1447993 - RNA, 19 nt, Artificial Sequence
  Description of Artificial Sequence: Synthetic oligonucleotide
  Antisense strand to SEQ ID NO: 1447992
acuauaaguauacuugacu

SEQ ID NO: 1447994 - RNA, 19 nt, Artificial Sequence
  Description of Artificial Sequence: Synthetic oligonucleotide
  Sense strand starting at position 3456 of SEQ ID NO: 1243875
acuucuugacuguaugcua

SEQ ID NO: 1447995 - RNA, 19 nt, Artificial Sequence
  Description of Artificial Sequence: Synthetic oligonucleotide
  Antisense strand to SEQ ID NO: 1447994
uagcauacagucaagaagu

SEQ ID NO: 1447996 - RNA, 19 nt, Artificial Sequence
  Description of Artificial Sequence: Synthetic oligonucleotide
  Sense strand starting at position 3526 of SEQ ID NO: 1243875
ggauuucccucagaacuga

SEQ ID NO: 1447997 - RNA, 19 nt, Artificial Sequence
  Description of Artificial Sequence: Synthetic oligonucleotide
  Antisense strand to SEQ ID NO: 1447996
ucaguucugagggaaaucc

SEQ ID NO: 1447998 - RNA, 19 nt, Artificial Sequence
  Description of Artificial Sequence: Synthetic oligonucleotide
  Sense strand starting at position 3534 of SEQ ID NO: 1243875
cucagaacugaggguuacu

SEQ ID NO: 1447999 - RNA, 19 nt, Artificial Sequence
  Description of Artificial Sequence: Synthetic oligonucleotide
  Antisense strand to SEQ ID NO: 1447998
aguaacccucaguucugag

SEQ ID NO: 1448000 - RNA, 19 nt, Artificial Sequence
  Description of Artificial Sequence: Synthetic oligonucleotide
  Sense strand starting at position 3738 of SEQ ID NO: 1243875
gucucauuaugucuccagu

SEQ ID NO: 1448001 - RNA, 19 nt, Artificial Sequence
  Description of Artificial Sequence: Synthetic oligonucleotide
  Antisense strand to SEQ ID NO: 1448000
acuggagacauaaugagac

SEQ ID NO: 1448002 - RNA, 19 nt, Artificial Sequence
  Description of Artificial Sequence: Synthetic oligonucleotide
  Sense strand starting at position 3741 of SEQ ID NO: 1243875
ucauuaugucuccagugcu

SEQ ID NO: 1448003 - RNA, 19 nt, Artificial Sequence
  Description of Artificial Sequence: Synthetic oligonucleotide
  Antisense strand to SEQ ID NO: 1448002
agcacuggagacauaauga

SEQ ID NO: 1448004 - RNA, 19 nt, Artificial Sequence
  Description of Artificial Sequence: Synthetic oligonucleotide
  Sense strand starting at position 3744 of SEQ ID NO: 1243875
uuaugucuccagugcugaa

SEQ ID NO: 1448005 - RNA, 19 nt, Artificial Sequence
  Description of Artificial Sequence: Synthetic oligonucleotide
  Antisense strand to SEQ ID NO: 1448004
uucagcacuggagacauaa

SEQ ID NO: 1448006 - RNA, 19 nt, Artificial Sequence
  Description of Artificial Sequence: Synthetic oligonucleotide
  Sense strand starting at position 3883 of SEQ ID NO: 1243875
uuuguaaucuuuguagaga

SEQ ID NO: 1448007 - RNA, 19 nt, Artificial Sequence
  Description of Artificial Sequence: Synthetic oligonucleotide
  Antisense strand to SEQ ID NO: 1448006
ucucuacaaagauuacaaa

SEQ ID NO: 1448008 - RNA, 19 nt, Artificial Sequence
  Description of Artificial Sequence: Synthetic oligonucleotide
  Sense strand starting at position 255 of SEQ ID NO: 1243876
acacgucucggucauggua

SEQ ID NO: 1448009 - RNA, 19 nt, Artificial Sequence
  Description of Artificial Sequence: Synthetic oligonucleotide
  Antisense strand to SEQ ID NO: 1448008
uaccaugaccgagacgugu

SEQ ID NO: 1448010 - RNA, 19 nt, Artificial Sequence
  Description of Artificial Sequence: Synthetic oligonucleotide
  Sense strand starting at position 327 of SEQ ID NO: 1243876
gggcguugucaguagugac

SEQ ID NO: 1448011 - RNA, 19 nt, Artificial Sequence
  Description of Artificial Sequence: Synthetic oligonucleotide
  Antisense strand to SEQ ID NO: 1448010
gucacuacugacaacgccc

SEQ ID NO: 1448012 - RNA, 19 nt, Artificial Sequence
  Description of Artificial Sequence: Synthetic oligonucleotide
  Sense strand starting at position 503 of SEQ ID NO: 1243876
ggcuguaacucuuuccagu

SEQ ID NO: 1448013 - RNA, 19 nt, Artificial Sequence
  Description of Artificial Sequence: Synthetic oligonucleotide
  Antisense strand to SEQ ID NO: 1448012
acuggaaagaguuacagcc

SEQ ID NO: 1448014 - RNA, 19 nt, Artificial Sequence
  Description of Artificial Sequence: Synthetic oligonucleotide
  Sense strand starting at position 512 of SEQ ID NO: 1243876
ucuuuccaguucucaggaa

SEQ ID NO: 1448015 - RNA, 19 nt, Artificial Sequence
  Description of Artificial Sequence: Synthetic oligonucleotide
  Antisense strand to SEQ ID NO: 1448014
uuccugagaacuggaaaga

SEQ ID NO: 1448016 - RNA, 19 nt, Artificial Sequence
  Description of Artificial Sequence: Synthetic oligonucleotide
  Sense strand starting at position 586 of SEQ ID NO: 1243876
gcugaagccaagugaaaua

SEQ ID NO: 1448017 - RNA, 19 nt, Artificial Sequence
  Description of Artificial Sequence: Synthetic oligonucleotide
  Antisense strand to SEQ ID NO: 1448016
uauuucacuuggcuucagc

SEQ ID NO: 1448018 - RNA, 19 nt, Artificial Sequence
  Description of Artificial Sequence: Synthetic oligonucleotide
  Sense strand starting at position 679 of SEQ ID NO: 1243876
guggcuugcgugguagaga

SEQ ID NO: 1448019 - RNA, 19 nt, Artificial Sequence
  Description of Artificial Sequence: Synthetic oligonucleotide
  Antisense strand to SEQ ID NO: 1448018
ucucuaccacgcaagccac

SEQ ID NO: 1448020 - RNA, 19 nt, Artificial Sequence
  Description of Artificial Sequence: Synthetic oligonucleotide
  Sense strand starting at position 968 of SEQ ID NO: 1243876
ccgcaaauaguccagaagu

SEQ ID NO: 1448021 - RNA, 19 nt, Artificial Sequence
  Description of Artificial Sequence: Synthetic oligonucleotide
  Antisense strand to SEQ ID NO: 1448020
acuucuggacuauuugcgg

SEQ ID NO: 1448022 - RNA, 19 nt, Artificial Sequence
  Description of Artificial Sequence: Synthetic oligonucleotide
  Sense strand starting at position 970 of SEQ ID NO: 1243876
gcaaauaguccagaaguua

SEQ ID NO: 1448023 - RNA, 19 nt, Artificial Sequence
  Description of Artificial Sequence: Synthetic oligonucleotide
  Antisense strand to SEQ ID NO: 1448022
uaacuucuggacuauuugc

SEQ ID NO: 1448024 - RNA, 19 nt, Artificial Sequence
  Description of Artificial Sequence: Synthetic oligonucleotide
  Sense strand starting at position 978 of SEQ ID NO: 1243876
uccagaaguuagcuaacca

SEQ ID NO: 1448025 - RNA, 19 nt, Artificial Sequence
  Description of Artificial Sequence: Synthetic oligonucleotide
  Antisense strand to SEQ ID NO: 1448024
ugguuagcuaacuucugga

SEQ ID NO: 1448026 - RNA, 19 nt, Artificial Sequence
  Description of Artificial Sequence: Synthetic oligonucleotide
  Sense strand starting at position 1085 of SEQ ID NO: 1243876
ccgacuaccucuuuaagag

SEQ ID NO: 1448027 - RNA, 19 nt, Artificial Sequence
  Description of Artificial Sequence: Synthetic oligonucleotide
  Antisense strand to SEQ ID NO: 1448026
cucuuaaagagguagucgg

SEQ ID NO: 1448028 - RNA, 19 nt, Artificial Sequence
  Description of Artificial Sequence: Synthetic oligonucleotide
  Sense strand starting at position 1123 of SEQ ID NO: 1243876
uggcuuuacuuuccagauc

SEQ ID NO: 1448029 - RNA, 19 nt, Artificial Sequence
  Description of Artificial Sequence: Synthetic oligonucleotide
  Antisense strand to SEQ ID NO: 1448028
gaucuggaaaguaaagcca

SEQ ID NO: 1448030 - RNA, 19 nt, Artificial Sequence
  Description of Artificial Sequence: Synthetic oligonucleotide
  Sense strand starting at position 1374 of SEQ ID NO: 1243876
agggcaaucuuuccuuaug

SEQ ID NO: 1448031 - RNA, 19 nt, Artificial Sequence
  Description of Artificial Sequence: Synthetic oligonucleotide
  Antisense strand to SEQ ID NO: 1448030
cauaaggaaagauugcccu

SEQ ID NO: 1448032 - RNA, 19 nt, Artificial Sequence
  Description of Artificial Sequence: Synthetic oligonucleotide
  Sense strand starting at position 1375 of SEQ ID NO: 1243876
gggcaaucuuuccuuauga

SEQ ID NO: 1448033 - RNA, 19 nt, Artificial Sequence
  Description of Artificial Sequence: Synthetic oligonucleotide
  Antisense strand to SEQ ID NO: 1448032
ucauaaggaaagauugccc

SEQ ID NO: 1448034 - RNA, 19 nt, Artificial Sequence
  Description of Artificial Sequence: Synthetic oligonucleotide
  Sense strand starting at position 1376 of SEQ ID NO: 1243876
ggcaaucuuuccuuaugaa

SEQ ID NO: 1448035 - RNA, 19 nt, Artificial Sequence
  Description of Artificial Sequence: Synthetic oligonucleotide
  Antisense strand to SEQ ID NO: 1448034
uucauaaggaaagauugcc

SEQ ID NO: 1448036 - RNA, 19 nt, Artificial Sequence
  Description of Artificial Sequence: Synthetic oligonucleotide
  Sense strand starting at position 1521 of SEQ ID NO: 1243876
ucgggauucucucuugcac

SEQ ID NO: 1448037 - RNA, 19 nt, Artificial Sequence
  Description of Artificial Sequence: Synthetic oligonucleotide
  Antisense strand to SEQ ID NO: 1448036
gugcaagagagaaucccga

SEQ ID NO: 1448038 - RNA, 19 nt, Artificial Sequence
  Description of Artificial Sequence: Synthetic oligonucleotide
  Sense strand starting at position 1728 of SEQ ID NO: 1243876
cgcgauauagaguauccuu

SEQ ID NO: 1448039 - RNA, 19 nt, Artificial Sequence
  Description of Artificial Sequence: Synthetic oligonucleotide
  Antisense strand to SEQ ID NO: 1448038
aaggauacucuauaucgcg

SEQ ID NO: 1448040 - RNA, 19 nt, Artificial Sequence
  Description of Artificial Sequence: Synthetic oligonucleotide
  Sense strand starting at position 1731 of SEQ ID NO: 1243876
gauauagaguauccuugca

SEQ ID NO: 1448041 - RNA, 19 nt, Artificial Sequence
  Description of Artificial Sequence: Synthetic oligonucleotide
  Antisense strand to SEQ ID NO: 1448040
ugcaaggauacucuauauc

SEQ ID NO: 1448042 - RNA, 19 nt, Artificial Sequence
  Description of Artificial Sequence: Synthetic oligonucleotide
  Sense strand starting at position 1765 of SEQ ID NO: 1243876
gacuuacugucuucgucuu

SEQ ID NO: 1448043 - RNA, 19 nt, Artificial Sequence
  Description of Artificial Sequence: Synthetic oligonucleotide
  Antisense strand to SEQ ID NO: 1448042
aagacgaagacaguaaguc

SEQ ID NO: 1448044 - RNA, 19 nt, Artificial Sequence
  Description of Artificial Sequence: Synthetic oligonucleotide
  Sense strand starting at position 2244 of SEQ ID NO: 1243876
gcagcuggguccucagaau

SEQ ID NO: 1448045 - RNA, 19 nt, Artificial Sequence
  Description of Artificial Sequence: Synthetic oligonucleotide
  Antisense strand to SEQ ID NO: 1448044
auucugaggacccagcugc

SEQ ID NO: 1448046 - RNA, 19 nt, Artificial Sequence
  Description of Artificial Sequence: Synthetic oligonucleotide
  Sense strand starting at position 2420 of SEQ ID NO: 1243876
ccagucacccucugauauc

SEQ ID NO: 1448047 - RNA, 19 nt, Artificial Sequence
  Description of Artificial Sequence: Synthetic oligonucleotide
  Antisense strand to SEQ ID NO: 1448046
gauaucagagggugacugg

SEQ ID NO: 1448048 - RNA, 19 nt, Artificial Sequence
  Description of Artificial Sequence: Synthetic oligonucleotide
  Sense strand starting at position 2429 of SEQ ID NO: 1243876
cucugauauccuggcaaga

SEQ ID NO: 1448049 - RNA, 19 nt, Artificial Sequence
  Description of Artificial Sequence: Synthetic oligonucleotide
  Antisense strand to SEQ ID NO: 1448048
ucuugccaggauaucagag

SEQ ID NO: 1448050 - RNA, 19 nt, Artificial Sequence
  Description of Artificial Sequence: Synthetic oligonucleotide
  Sense strand starting at position 2555 of SEQ ID NO: 1243876
gauggagcuuaggaauauu

SEQ ID NO: 1448051 - RNA, 19 nt, Artificial Sequence
  Description of Artificial Sequence: Synthetic oligonucleotide
  Antisense strand to SEQ ID NO: 1448050
aauauuccuaagcuccauc

SEQ ID NO: 1448052 - RNA, 19 nt, Artificial Sequence
  Description of Artificial Sequence: Synthetic oligonucleotide
  Sense strand starting at position 2674 of SEQ ID NO: 1243876
ugcugugcuccagaacaga

SEQ ID NO: 1448053 - RNA, 19 nt, Artificial Sequence
  Description of Artificial Sequence: Synthetic oligonucleotide
  Antisense strand to SEQ ID NO: 1448052
ucuguucuggagcacagca

SEQ ID NO: 1448054 - RNA, 19 nt, Artificial Sequence
  Description of Artificial Sequence: Synthetic oligonucleotide
  Sense strand starting at position 2771 of SEQ ID NO: 1243876
cuagguggccucugcagaa

SEQ ID NO: 1448055 - RNA, 19 nt, Artificial Sequence
  Description of Artificial Sequence: Synthetic oligonucleotide
  Antisense strand to SEQ ID NO: 1448054
uucugcagaggccaccuag

SEQ ID NO: 1448056 - RNA, 19 nt, Artificial Sequence
  Description of Artificial Sequence: Synthetic oligonucleotide
  Sense strand starting at position 2775 of SEQ ID NO: 1243876
guggccucugcagaagaaa

SEQ ID NO: 1448057 - RNA, 19 nt, Artificial Sequence
  Description of Artificial Sequence: Synthetic oligonucleotide
  Antisense strand to SEQ ID NO: 1448056
uuucuucugcagaggccac

SEQ ID NO: 1448058 - RNA, 19 nt, Artificial Sequence
  Description of Artificial Sequence: Synthetic oligonucleotide
  Sense strand starting at position 2786 of SEQ ID NO: 1243876
agaagaaagcuuugguggu

SEQ ID NO: 1448059 - RNA, 19 nt, Artificial Sequence
  Description of Artificial Sequence: Synthetic oligonucleotide
  Antisense strand to SEQ ID NO: 1448058
accaccaaagcuuucuucu

SEQ ID NO: 1448060 - RNA, 19 nt, Artificial Sequence
  Description of Artificial Sequence: Synthetic oligonucleotide
  Sense strand starting at position 2931 of SEQ ID NO: 1243876
gugggaggccugugaucau

SEQ ID NO: 1448061 - RNA, 19 nt, Artificial Sequence
  Description of Artificial Sequence: Synthetic oligonucleotide
  Antisense strand to SEQ ID NO: 1448060
augaucacaggccucccac

SEQ ID NO: 1448062 - RNA, 19 nt, Artificial Sequence
  Description of Artificial Sequence: Synthetic oligonucleotide
  Sense strand starting at position 2938 of SEQ ID NO: 1243876
gccugugaucauuggugac

SEQ ID NO: 1448063 - RNA, 19 nt, Artificial Sequence
  Description of Artificial Sequence: Synthetic oligonucleotide
  Antisense strand to SEQ ID NO: 1448062
gucaccaaugaucacaggc

SEQ ID NO: 1448064 - RNA, 19 nt, Artificial Sequence
  Description of Artificial Sequence: Synthetic oligonucleotide
  Sense strand starting at position 2940 of SEQ ID NO: 1243876
cugugaucauuggugacuu

SEQ ID NO: 1448065 - RNA, 19 nt, Artificial Sequence
  Description of Artificial Sequence: Synthetic oligonucleotide
  Antisense strand to SEQ ID NO: 1448064
aagucaccaaugaucacag

SEQ ID NO: 1448066 - RNA, 19 nt, Artificial Sequence
  Description of Artificial Sequence: Synthetic oligonucleotide
  Sense strand starting at position 2944 of SEQ ID NO: 1243876
gaucauuggugacuuagag

SEQ ID NO: 1448067 - RNA, 19 nt, Artificial Sequence
  Description of Artificial Sequence: Synthetic oligonucleotide
  Antisense strand to SEQ ID NO: 1448066
cucuaagucaccaaugauc

SEQ ID NO: 1448068 - RNA, 19 nt, Artificial Sequence
  Description of Artificial Sequence: Synthetic oligonucleotide
  Sense strand starting at position 3105 of SEQ ID NO: 1243876
ccaguuguaccuggacuca

SEQ ID NO: 1448069 - RNA, 19 nt, Artificial Sequence
  Description of Artificial Sequence: Synthetic oligonucleotide
  Antisense strand to SEQ ID NO: 1448068
ugaguccagguacaacugg

SEQ ID NO: 1448070 - RNA, 19 nt, Artificial Sequence
  Description of Artificial Sequence: Synthetic oligonucleotide
  Sense strand starting at position 3149 of SEQ ID NO: 1243876
gggugucugggugaaacuu

SEQ ID NO: 1448071 - RNA, 19 nt, Artificial Sequence
  Description of Artificial Sequence: Synthetic oligonucleotide
  Antisense strand to SEQ ID NO: 1448070
aaguuucacccagacaccc

SEQ ID NO: 1448072 - RNA, 19 nt, Artificial Sequence
  Description of Artificial Sequence: Synthetic oligonucleotide
  Sense strand starting at position 3195 of SEQ ID NO: 1243876
gaggaugauugacuuuguu

SEQ ID NO: 1448073 - RNA, 19 nt, Artificial Sequence
  Description of Artificial Sequence: Synthetic oligonucleotide
  Antisense strand to SEQ ID NO: 1448072
aacaaagucaaucauccuc

SEQ ID NO: 1448074 - RNA, 19 nt, Artificial Sequence
  Description of Artificial Sequence: Synthetic oligonucleotide
  Sense strand starting at position 3257 of SEQ ID NO: 1243876
cggucauugcucuaugccu

SEQ ID NO: 1448075 - RNA, 19 nt, Artificial Sequence
  Description of Artificial Sequence: Synthetic oligonucleotide
  Antisense strand to SEQ ID NO: 1448074
aggcauagagcaaugaccg

SEQ ID NO: 1448076 - RNA, 19 nt, Artificial Sequence
  Description of Artificial Sequence: Synthetic oligonucleotide
  Sense strand starting at position 3259 of SEQ ID NO: 1243876
gucauugcucuaugccuua

SEQ ID NO: 1448077 - RNA, 19 nt, Artificial Sequence
  Description of Artificial Sequence: Synthetic oligonucleotide
  Antisense strand to SEQ ID NO: 1448076
uaaggcauagagcaaugac

SEQ ID NO: 1448078 - RNA, 19 nt, Artificial Sequence
  Description of Artificial Sequence: Synthetic oligonucleotide
  Sense strand starting at position 3264 of SEQ ID NO: 1243876
ugcucuaugccuuaggaac

SEQ ID NO: 1448079 - RNA, 19 nt, Artificial Sequence
  Description of Artificial Sequence: Synthetic oligonucleotide
  Antisense strand to SEQ ID NO: 1448078
guuccuaaggcauagagca

SEQ ID NO: 1448080 - RNA, 19 nt, Artificial Sequence
  Description of Artificial Sequence: Synthetic oligonucleotide
  Sense strand starting at position 3283 of SEQ ID NO: 1243876
cagagagaaucaucuguac

SEQ ID NO: 1448081 - RNA, 19 nt, Artificial Sequence
  Description of Artificial Sequence: Synthetic oligonucleotide
  Antisense strand to SEQ ID NO: 1448080
guacagaugauucucucug

SEQ ID NO: 1448082 - RNA, 19 nt, Artificial Sequence
  Description of Artificial Sequence: Synthetic oligonucleotide
  Sense strand starting at position 3286 of SEQ ID NO: 1243876
agagaaucaucuguacacu

SEQ ID NO: 1448083 - RNA, 19 nt, Artificial Sequence
  Description of Artificial Sequence: Synthetic oligonucleotide
  Antisense strand to SEQ ID NO: 1448082
aguguacagaugauucucu

SEQ ID NO: 1448084 - RNA, 19 nt, Artificial Sequence
  Description of Artificial Sequence: Synthetic oligonucleotide
  Sense strand starting at position 3426 of SEQ ID NO: 1243876
cuaccucguccugagaaac

SEQ ID NO: 1448085 - RNA, 19 nt, Artificial Sequence
  Description of Artificial Sequence: Synthetic oligonucleotide
  Antisense strand to SEQ ID NO: 1448084
guuucucaggacgagguag

SEQ ID NO: 1448086 - RNA, 19 nt, Artificial Sequence
  Description of Artificial Sequence: Synthetic oligonucleotide
  Sense strand starting at position 3444 of SEQ ID NO: 1243876
cucuguagggcugagagaa

SEQ ID NO: 1448087 - RNA, 19 nt, Artificial Sequence
  Description of Artificial Sequence: Synthetic oligonucleotide
  Antisense strand to SEQ ID NO: 1448086
uucucucagcccuacagag

SEQ ID NO: 1448088 - RNA, 19 nt, Artificial Sequence
  Description of Artificial Sequence: Synthetic oligonucleotide
  Sense strand starting at position 411 of SEQ ID NO: 1243877
caauuacugugccugaguu

SEQ ID NO: 1448089 - RNA, 19 nt, Artificial Sequence
  Description of Artificial Sequence: Synthetic oligonucleotide
  Antisense strand to SEQ ID NO: 1448088
aacucaggcacaguaauug

SEQ ID NO: 1448090 - RNA, 19 nt, Artificial Sequence
  Description of Artificial Sequence: Synthetic oligonucleotide
  Sense strand starting at position 412 of SEQ ID NO: 1243877
aauuacugugccugaguuu

SEQ ID NO: 1448091 - RNA, 19 nt, Artificial Sequence
  Description of Artificial Sequence: Synthetic oligonucleotide
  Antisense strand to SEQ ID NO: 1448090
aaacucaggcacaguaauu

SEQ ID NO: 1448092 - RNA, 19 nt, Artificial Sequence
  Description of Artificial Sequence: Synthetic oligonucleotide
  Sense strand starting at position 512 of SEQ ID NO: 1243877
guggcaagaauguaacauu

SEQ ID NO: 1448093 - RNA, 19 nt, Artificial Sequence
  Description of Artificial Sequence: Synthetic oligonucleotide
  Antisense strand to SEQ ID NO: 1448092
aauguuacauucuugccac

SEQ ID NO: 1448094 - RNA, 19 nt, Artificial Sequence
  Description of Artificial Sequence: Synthetic oligonucleotide
  Sense strand starting at position 515 of SEQ ID NO: 1243877
gcaagaauguaacauuucu

SEQ ID NO: 1448095 - RNA, 19 nt, Artificial Sequence
  Description of Artificial Sequence: Synthetic oligonucleotide
  Antisense strand to SEQ ID NO: 1448094
agaaauguuacauucuugc

SEQ ID NO: 1448096 - RNA, 19 nt, Artificial Sequence
  Description of Artificial Sequence: Synthetic oligonucleotide
  Sense strand starting at position 605 of SEQ ID NO: 1243877
uagucaugucuggguuuaa

SEQ ID NO: 1448097 - RNA, 19 nt, Artificial Sequence
  Description of Artificial Sequence: Synthetic oligonucleotide
  Antisense strand to SEQ ID NO: 1448096
uuaaacccagacaugacua

SEQ ID NO: 1448098 - RNA, 19 nt, Artificial Sequence
  Description of Artificial Sequence: Synthetic oligonucleotide
  Sense strand starting at position 606 of SEQ ID NO: 1243877
agucaugucuggguuuaau

SEQ ID NO: 1448099 - RNA, 19 nt, Artificial Sequence
  Description of Artificial Sequence: Synthetic oligonucleotide
  Antisense strand to SEQ ID NO: 1448098
auuaaacccagacaugacu

SEQ ID NO: 1448100 - RNA, 19 nt, Artificial Sequence
  Description of Artificial Sequence: Synthetic oligonucleotide
  Sense strand starting at position 609 of SEQ ID NO: 1243877
caugucuggguuuaauaau

SEQ ID NO: 1448101 - RNA, 19 nt, Artificial Sequence
  Description of Artificial Sequence: Synthetic oligonucleotide
  Antisense strand to SEQ ID NO: 1448100
auuauuaaacccagacaug

SEQ ID NO: 1448102 - RNA, 19 nt, Artificial Sequence
  Description of Artificial Sequence: Synthetic oligonucleotide
  Sense strand starting at position 868 of SEQ ID NO: 1243877
gagcauaguucucugcaug

SEQ ID NO: 1448103 - RNA, 19 nt, Artificial Sequence
  Description of Artificial Sequence: Synthetic oligonucleotide
  Antisense strand to SEQ ID NO: 1448102
caugcagagaacuaugcuc

SEQ ID NO: 1448104 - RNA, 19 nt, Artificial Sequence
  Description of Artificial Sequence: Synthetic oligonucleotide
  Sense strand starting at position 975 of SEQ ID NO: 1243877
ccugcuaugcccugacaaa

SEQ ID NO: 1448105 - RNA, 19 nt, Artificial Sequence
  Description of Artificial Sequence: Synthetic oligonucleotide
  Antisense strand to SEQ ID NO: 1448104
uuugucagggcauagcagg

SEQ ID NO: 1448106 - RNA, 19 nt, Artificial Sequence
  Description of Artificial Sequence: Synthetic oligonucleotide
  Sense strand starting at position 1032 of SEQ ID NO: 1243877
uuuguaagugucgcugcau

SEQ ID NO: 1448107 - RNA, 19 nt, Artificial Sequence
  Description of Artificial Sequence: Synthetic oligonucleotide
  Antisense strand to SEQ ID NO: 1448106
augcagcgacacuuacaaa

SEQ ID NO: 1448108 - RNA, 19 nt, Artificial Sequence
  Description of Artificial Sequence: Synthetic oligonucleotide
  Sense strand starting at position 1058 of SEQ ID NO: 1243877
aucuuacuuuggcuaagua

SEQ ID NO: 1448109 - RNA, 19 nt, Artificial Sequence
  Description of Artificial Sequence: Synthetic oligonucleotide
  Antisense strand to SEQ ID NO: 1448108
uacuuagccaaaguaagau

SEQ ID NO: 1448110 - RNA, 19 nt, Artificial Sequence
  Description of Artificial Sequence: Synthetic oligonucleotide
  Sense strand starting at position 1240 of SEQ ID NO: 1243877
ucuguaacguucucgggaa

SEQ ID NO: 1448111 - RNA, 19 nt, Artificial Sequence
  Description of Artificial Sequence: Synthetic oligonucleotide
  Antisense strand to SEQ ID NO: 1448110
uucccgagaacguuacaga

SEQ ID NO: 1448112 - RNA, 19 nt, Artificial Sequence
  Description of Artificial Sequence: Synthetic oligonucleotide
  Sense strand starting at position 1261 of SEQ ID NO: 1243877
ccaggagcugucuagcuua

SEQ ID NO: 1448113 - RNA, 19 nt, Artificial Sequence
  Description of Artificial Sequence: Synthetic oligonucleotide
  Antisense strand to SEQ ID NO: 1448112
uaagcuagacagcuccugg

SEQ ID NO: 1448114 - RNA, 19 nt, Artificial Sequence
  Description of Artificial Sequence: Synthetic oligonucleotide
  Sense strand starting at position 1264 of SEQ ID NO: 1243877
ggagcugucuagcuuacau

SEQ ID NO: 1448115 - RNA, 19 nt, Artificial Sequence
  Description of Artificial Sequence: Synthetic oligonucleotide
  Antisense strand to SEQ ID NO: 1448114
auguaagcuagacagcucc

SEQ ID NO: 1448116 - RNA, 19 nt, Artificial Sequence
  Description of Artificial Sequence: Synthetic oligonucleotide
  Sense strand starting at position 1266 of SEQ ID NO: 1243877
agcugucuagcuuacauga

SEQ ID NO: 1448117 - RNA, 19 nt, Artificial Sequence
  Description of Artificial Sequence: Synthetic oligonucleotide
  Antisense strand to SEQ ID NO: 1448116
ucauguaagcuagacagcu

SEQ ID NO: 1448118 - RNA, 19 nt, Artificial Sequence
  Description of Artificial Sequence: Synthetic oligonucleotide
  Sense strand starting at position 1295 of SEQ ID NO: 1243877
cuggaaacccugcgucaaa

SEQ ID NO: 1448119 - RNA, 19 nt, Artificial Sequence
  Description of Artificial Sequence: Synthetic oligonucleotide
  Antisense strand to SEQ ID NO: 1448118
uuugacgcaggguuuccag

SEQ ID NO: 1448120 - RNA, 19 nt, Artificial Sequence
  Description of Artificial Sequence: Synthetic oligonucleotide
  Sense strand starting at position 1405 of SEQ ID NO: 1243877
gguccacaggucuguaaag

SEQ ID NO: 1448121 - RNA, 19 nt, Artificial Sequence
  Description of Artificial Sequence: Synthetic oligonucleotide
  Antisense strand to SEQ ID NO: 1448120
cuuuacagaccuguggacc

SEQ ID NO: 1448122 - RNA, 19 nt, Artificial Sequence
  Description of Artificial Sequence: Synthetic oligonucleotide
  Sense strand starting at position 1406 of SEQ ID NO: 1243877
guccacaggucuguaaagu

SEQ ID NO: 1448123 - RNA, 19 nt, Artificial Sequence
  Description of Artificial Sequence: Synthetic oligonucleotide
  Antisense strand to SEQ ID NO: 1448122
acuuuacagaccuguggac

SEQ ID NO: 1448124 - RNA, 19 nt, Artificial Sequence
  Description of Artificial Sequence: Synthetic oligonucleotide
  Sense strand starting at position 2191 of SEQ ID NO: 1243877
gugugaaacgccaagcgua

SEQ ID NO: 1448125 - RNA, 19 nt, Artificial Sequence
  Description of Artificial Sequence: Synthetic oligonucleotide
  Antisense strand to SEQ ID NO: 1448124
uacgcuuggcguuucacac

SEQ ID NO: 1448126 - RNA, 19 nt, Artificial Sequence
  Description of Artificial Sequence: Synthetic oligonucleotide
  Sense strand starting at position 2256 of SEQ ID NO: 1243877
ggguaagacacaugagcaa

SEQ ID NO: 1448127 - RNA, 19 nt, Artificial Sequence
  Description of Artificial Sequence: Synthetic oligonucleotide
  Antisense strand to SEQ ID NO: 1448126
uugcucaugugucuuaccc

SEQ ID NO: 1448128 - RNA, 19 nt, Artificial Sequence
  Description of Artificial Sequence: Synthetic oligonucleotide
  Sense strand starting at position 2292 of SEQ ID NO: 1243877
ugagcuaaugaucgucuuu

SEQ ID NO: 1448129 - RNA, 19 nt, Artificial Sequence
  Description of Artificial Sequence: Synthetic oligonucleotide
  Antisense strand to SEQ ID NO: 1448128
aaagacgaucauuagcuca

SEQ ID NO: 1448130 - RNA, 19 nt, Artificial Sequence
  Description of Artificial Sequence: Synthetic oligonucleotide
  Sense strand starting at position 2294 of SEQ ID NO: 1243877
agcuaaugaucgucuuuga

SEQ ID NO: 1448131 - RNA, 19 nt, Artificial Sequence
  Description of Artificial Sequence: Synthetic oligonucleotide
  Antisense strand to SEQ ID NO: 1448130
ucaaagacgaucauuagcu

SEQ ID NO: 1448132 - RNA, 19 nt, Artificial Sequence
  Description of Artificial Sequence: Synthetic oligonucleotide
  Sense strand starting at position 2297 of SEQ ID NO: 1243877
uaaugaucgucuuugaagu

SEQ ID NO: 1448133 - RNA, 19 nt, Artificial Sequence
  Description of Artificial Sequence: Synthetic oligonucleotide
  Antisense strand to SEQ ID NO: 1448132
acuucaaagacgaucauua

SEQ ID NO: 1448134 - RNA, 19 nt, Artificial Sequence
  Description of Artificial Sequence: Synthetic oligonucleotide
  Sense strand starting at position 2298 of SEQ ID NO: 1243877
aaugaucgucuuugaaguu

SEQ ID NO: 1448135 - RNA, 19 nt, Artificial Sequence
  Description of Artificial Sequence: Synthetic oligonucleotide
  Antisense strand to SEQ ID NO: 1448134
aacuucaaagacgaucauu

SEQ ID NO: 1448136 - RNA, 19 nt, Artificial Sequence
  Description of Artificial Sequence: Synthetic oligonucleotide
  Sense strand starting at position 2335 of SEQ ID NO: 1243877
auagaugauuaagacacaa

SEQ ID NO: 1448137 - RNA, 19 nt, Artificial Sequence
  Description of Artificial Sequence: Synthetic oligonucleotide
  Antisense strand to SEQ ID NO: 1448136
uugugucuuaaucaucuau

SEQ ID NO: 1448138 - RNA, 19 nt, Artificial Sequence
  Description of Artificial Sequence: Synthetic oligonucleotide
  Sense strand starting at position 2357 of SEQ ID NO: 1243877
gcaauaugcaguggacaca

SEQ ID NO: 1448139 - RNA, 19 nt, Artificial Sequence
  Description of Artificial Sequence: Synthetic oligonucleotide
  Antisense strand to SEQ ID NO: 1448138
uguguccacugcauauugc

SEQ ID NO: 1448140 - RNA, 19 nt, Artificial Sequence
  Description of Artificial Sequence: Synthetic oligonucleotide
  Sense strand starting at position 2385 of SEQ ID NO: 1243877
ccacgacgcuuacucauaa

SEQ ID NO: 1448141 - RNA, 19 nt, Artificial Sequence
  Description of Artificial Sequence: Synthetic oligonucleotide
  Antisense strand to SEQ ID NO: 1448140
uuaugaguaagcgucgugg

SEQ ID NO: 1448142 - RNA, 19 nt, Artificial Sequence
  Description of Artificial Sequence: Synthetic oligonucleotide
  Sense strand starting at position 2445 of SEQ ID NO: 1243877
gccugauaccgacaaccua

SEQ ID NO: 1448143 - RNA, 19 nt, Artificial Sequence
  Description of Artificial Sequence: Synthetic oligonucleotide
  Antisense strand to SEQ ID NO: 1448142
uagguugucgguaucaggc

SEQ ID NO: 1448144 - RNA, 19 nt, Artificial Sequence
  Description of Artificial Sequence: Synthetic oligonucleotide
  Sense strand starting at position 2647 of SEQ ID NO: 1243877
ccucaaagacuguguuguu

SEQ ID NO: 1448145 - RNA, 19 nt, Artificial Sequence
  Description of Artificial Sequence: Synthetic oligonucleotide
  Antisense strand to SEQ ID NO: 1448144
aacaacacagucuuugagg

SEQ ID NO: 1448146 - RNA, 19 nt, Artificial Sequence
  Description of Artificial Sequence: Synthetic oligonucleotide
  Sense strand starting at position 2648 of SEQ ID NO: 1243877
cucaaagacuguguuguuu

SEQ ID NO: 1448147 - RNA, 19 nt, Artificial Sequence
  Description of Artificial Sequence: Synthetic oligonucleotide
  Antisense strand to SEQ ID NO: 1448146
aaacaacacagucuuugag

SEQ ID NO: 1448148 - RNA, 19 nt, Artificial Sequence
  Description of Artificial Sequence: Synthetic oligonucleotide
  Sense strand starting at position 2739 of SEQ ID NO: 1243877
auauguagauguuccuaca

SEQ ID NO: 1448149 - RNA, 19 nt, Artificial Sequence
  Description of Artificial Sequence: Synthetic oligonucleotide
  Antisense strand to SEQ ID NO: 1448148
uguaggaacaucuacauau

SEQ ID NO: 1448150 - RNA, 19 nt, Artificial Sequence
  Description of Artificial Sequence: Synthetic oligonucleotide
  Sense strand starting at position 2793 of SEQ ID NO: 1243877
gucagcaauguccaauaga

SEQ ID NO: 1448151 - RNA, 19 nt, Artificial Sequence
  Description of Artificial Sequence: Synthetic oligonucleotide
  Antisense strand to SEQ ID NO: 1448150
ucuauuggacauugcugac

SEQ ID NO: 1448152 - RNA, 19 nt, Artificial Sequence
  Description of Artificial Sequence: Synthetic oligonucleotide
  Sense strand starting at position 2812 of SEQ ID NO: 1243877
acguucuuuaaugguggaa

SEQ ID NO: 1448153 - RNA, 19 nt, Artificial Sequence
  Description of Artificial Sequence: Synthetic oligonucleotide
  Antisense strand to SEQ ID NO: 1448152
uuccaccauuaaagaacgu

SEQ ID NO: 1448154 - RNA, 19 nt, Artificial Sequence
  Description of Artificial Sequence: Synthetic oligonucleotide
  Sense strand starting at position 2851 of SEQ ID NO: 1243877
aucuguacuguccaauaua

SEQ ID NO: 1448155 - RNA, 19 nt, Artificial Sequence
  Description of Artificial Sequence: Synthetic oligonucleotide
  Antisense strand to SEQ ID NO: 1448154
uauauuggacaguacagau

SEQ ID NO: 1448156 - RNA, 19 nt, Artificial Sequence
  Description of Artificial Sequence: Synthetic oligonucleotide
  Sense strand starting at position 2854 of SEQ ID NO: 1243877
uguacuguccaauauagua

SEQ ID NO: 1448157 - RNA, 19 nt, Artificial Sequence
  Description of Artificial Sequence: Synthetic oligonucleotide
  Antisense strand to SEQ ID NO: 1448156
uacuauauuggacaguaca

SEQ ID NO: 1448158 - RNA, 19 nt, Artificial Sequence
  Description of Artificial Sequence: Synthetic oligonucleotide
  Sense strand starting at position 2959 of SEQ ID NO: 1243877
gagcuacuguuucuaacag

SEQ ID NO: 1448159 - RNA, 19 nt, Artificial Sequence
  Description of Artificial Sequence: Synthetic oligonucleotide
  Antisense strand to SEQ ID NO: 1448158
cuguuagaaacaguagcuc

SEQ ID NO: 1448160 - RNA, 19 nt, Artificial Sequence
  Description of Artificial Sequence: Synthetic oligonucleotide
  Sense strand starting at position 2987 of SEQ ID NO: 1243877
agguguacuagcuagaugu

SEQ ID NO: 1448161 - RNA, 19 nt, Artificial Sequence
  Description of Artificial Sequence: Synthetic oligonucleotide
  Antisense strand to SEQ ID NO: 1448160
acaucuagcuaguacaccu

SEQ ID NO: 1448162 - RNA, 19 nt, Artificial Sequence
  Description of Artificial Sequence: Synthetic oligonucleotide
  Sense strand starting at position 2989 of SEQ ID NO: 1243877
guguacuagcuagaugugu

SEQ ID NO: 1448163 - RNA, 19 nt, Artificial Sequence
  Description of Artificial Sequence: Synthetic oligonucleotide
  Antisense strand to SEQ ID NO: 1448162
acacaucuagcuaguacac

SEQ ID NO: 1448164 - RNA, 19 nt, Artificial Sequence
  Description of Artificial Sequence: Synthetic oligonucleotide
  Sense strand starting at position 3075 of SEQ ID NO: 1243877
ccuuguguuaaggagacua

SEQ ID NO: 1448165 - RNA, 19 nt, Artificial Sequence
  Description of Artificial Sequence: Synthetic oligonucleotide
  Antisense strand to SEQ ID NO: 1448164
uagucuccuuaacacaagg

SEQ ID NO: 1448166 - RNA, 19 nt, Artificial Sequence
  Description of Artificial Sequence: Synthetic oligonucleotide
  Sense strand starting at position 3826 of SEQ ID NO: 1243877
gaggcuuuggcagggagaa

SEQ ID NO: 1448167 - RNA, 19 nt, Artificial Sequence
  Description of Artificial Sequence: Synthetic oligonucleotide
  Antisense strand to SEQ ID NO: 1448166
uucucccugccaaagccuc

SEQ ID NO: 1448168 - RNA, 19 nt, Artificial Sequence
  Description of Artificial Sequence: Synthetic oligonucleotide
  Sense strand starting at position 22 of SEQ ID NO: 1243878
cccaguugagacugaaaua

SEQ ID NO: 1448169 - RNA, 19 nt, Artificial Sequence
  Description of Artificial Sequence: Synthetic oligonucleotide
  Antisense strand to SEQ ID NO: 1448168
uauuucagucucaacuggg

SEQ ID NO: 1448170 - RNA, 19 nt, Artificial Sequence
  Description of Artificial Sequence: Synthetic oligonucleotide
  Sense strand starting at position 41 of SEQ ID NO: 1243878
aaagcugggucacuaugaa

SEQ ID NO: 1448171 - RNA, 19 nt, Artificial Sequence
  Description of Artificial Sequence: Synthetic oligonucleotide
  Antisense strand to SEQ ID NO: 1448170
uucauagugacccagcuuu

SEQ ID NO: 1448172 - RNA, 19 nt, Artificial Sequence
  Description of Artificial Sequence: Synthetic oligonucleotide
  Sense strand starting at position 113 of SEQ ID NO: 1243878
uuaagugucacagagugca

SEQ ID NO: 1448173 - RNA, 19 nt, Artificial Sequence
  Description of Artificial Sequence: Synthetic oligonucleotide
  Antisense strand to SEQ ID NO: 1448172
ugcacucugugacacuuaa

SEQ ID NO: 1448174 - RNA, 19 nt, Artificial Sequence
  Description of Artificial Sequence: Synthetic oligonucleotide
  Sense strand starting at position 123 of SEQ ID NO: 1243878
cagagugcauuugaaauca

SEQ ID NO: 1448175 - RNA, 19 nt, Artificial Sequence
  Description of Artificial Sequence: Synthetic oligonucleotide
  Antisense strand to SEQ ID NO: 1448174
ugauuucaaaugcacucug

SEQ ID NO: 1448176 - RNA, 19 nt, Artificial Sequence
  Description of Artificial Sequence: Synthetic oligonucleotide
  Sense strand starting at position 544 of SEQ ID NO: 1243878
uuuaucucugucuagcaga

SEQ ID NO: 1448177 - RNA, 19 nt, Artificial Sequence
  Description of Artificial Sequence: Synthetic oligonucleotide
  Antisense strand to SEQ ID NO: 1448176
ucugcuagacagagauaaa

SEQ ID NO: 1448178 - RNA, 19 nt, Artificial Sequence
  Description of Artificial Sequence: Synthetic oligonucleotide
  Sense strand starting at position 555 of SEQ ID NO: 1243878
cuagcagacuguuccuaua

SEQ ID NO: 1448179 - RNA, 19 nt, Artificial Sequence
  Description of Artificial Sequence: Synthetic oligonucleotide
  Antisense strand to SEQ ID NO: 1448178
uauaggaacagucugcuag

SEQ ID NO: 1448180 - RNA, 19 nt, Artificial Sequence
  Description of Artificial Sequence: Synthetic oligonucleotide
  Sense strand starting at position 662 of SEQ ID NO: 1243878
aagugaccgcgacaggauu

SEQ ID NO: 1448181 - RNA, 19 nt, Artificial Sequence
  Description of Artificial Sequence: Synthetic oligonucleotide
  Antisense strand to SEQ ID NO: 1448180
aauccugucgcggucacuu

SEQ ID NO: 1448182 - RNA, 19 nt, Artificial Sequence
  Description of Artificial Sequence: Synthetic oligonucleotide
  Sense strand starting at position 851 of SEQ ID NO: 1243878
agugcagcuccauaucaga

SEQ ID NO: 1448183 - RNA, 19 nt, Artificial Sequence
  Description of Artificial Sequence: Synthetic oligonucleotide
  Antisense strand to SEQ ID NO: 1448182
ucugauauggagcugcacu

SEQ ID NO: 1448184 - RNA, 19 nt, Artificial Sequence
  Description of Artificial Sequence: Synthetic oligonucleotide
  Sense strand starting at position 876 of SEQ ID NO: 1243878
gucuuacaccagugaggua

SEQ ID NO: 1448185 - RNA, 19 nt, Artificial Sequence
  Description of Artificial Sequence: Synthetic oligonucleotide
  Antisense strand to SEQ ID NO: 1448184
uaccucacugguguaagac

SEQ ID NO: 1448186 - RNA, 19 nt, Artificial Sequence
  Description of Artificial Sequence: Synthetic oligonucleotide
  Sense strand starting at position 983 of SEQ ID NO: 1243878
gcaauuaaugacgguaaca

SEQ ID NO: 1448187 - RNA, 19 nt, Artificial Sequence
  Description of Artificial Sequence: Synthetic oligonucleotide
  Antisense strand to SEQ ID NO: 1448186
uguuaccgucauuaauugc

SEQ ID NO: 1448188 - RNA, 19 nt, Artificial Sequence
  Description of Artificial Sequence: Synthetic oligonucleotide
  Sense strand starting at position 1058 of SEQ ID NO: 1243878
uuacaugguuucucucauu

SEQ ID NO: 1448189 - RNA, 19 nt, Artificial Sequence
  Description of Artificial Sequence: Synthetic oligonucleotide
  Antisense strand to SEQ ID NO: 1448188
aaugagagaaaccauguaa

SEQ ID NO: 1448190 - RNA, 19 nt, Artificial Sequence
  Description of Artificial Sequence: Synthetic oligonucleotide
  Sense strand starting at position 1063 of SEQ ID NO: 1243878
ugguuucucucauugaauc

SEQ ID NO: 1448191 - RNA, 19 nt, Artificial Sequence
  Description of Artificial Sequence: Synthetic oligonucleotide
  Antisense strand to SEQ ID NO: 1448190
gauucaaugagagaaacca

SEQ ID NO: 1448192 - RNA, 19 nt, Artificial Sequence
  Description of Artificial Sequence: Synthetic oligonucleotide
  Sense strand starting at position 1064 of SEQ ID NO: 1243878
gguuucucucauugaaucu

SEQ ID NO: 1448193 - RNA, 19 nt, Artificial Sequence
  Description of Artificial Sequence: Synthetic oligonucleotide
  Antisense strand to SEQ ID NO: 1448192
agauucaaugagagaaacc

SEQ ID NO: 1448194 - RNA, 19 nt, Artificial Sequence
  Description of Artificial Sequence: Synthetic oligonucleotide
  Sense strand starting at position 1164 of SEQ ID NO: 1243878
agcaucuaaucauucgaau

SEQ ID NO: 1448195 - RNA, 19 nt, Artificial Sequence
  Description of Artificial Sequence: Synthetic oligonucleotide
  Antisense strand to SEQ ID NO: 1448194
auucgaaugauuagaugcu

SEQ ID NO: 1448196 - RNA, 19 nt, Artificial Sequence
  Description of Artificial Sequence: Synthetic oligonucleotide
  Sense strand starting at position 1189 of SEQ ID NO: 1243878
uccagaauucgguacauuc

SEQ ID NO: 1448197 - RNA, 19 nt, Artificial Sequence
  Description of Artificial Sequence: Synthetic oligonucleotide
  Antisense strand to SEQ ID NO: 1448196
gaauguaccgaauucugga

SEQ ID NO: 1448198 - RNA, 19 nt, Artificial Sequence
  Description of Artificial Sequence: Synthetic oligonucleotide
  Sense strand starting at position 1494 of SEQ ID NO: 1243878
accugagaucaagguucga

SEQ ID NO: 1448199 - RNA, 19 nt, Artificial Sequence
  Description of Artificial Sequence: Synthetic oligonucleotide
  Antisense strand to SEQ ID NO: 1448198
ucgaaccuugaucucaggu

SEQ ID NO: 1448200 - RNA, 19 nt, Artificial Sequence
  Description of Artificial Sequence: Synthetic oligonucleotide
  Sense strand starting at position 1891 of SEQ ID NO: 1243878
cagcauucuguaggaccaa

SEQ ID NO: 1448201 - RNA, 19 nt, Artificial Sequence
  Description of Artificial Sequence: Synthetic oligonucleotide
  Antisense strand to SEQ ID NO: 1448200
uugguccuacagaaugcug

SEQ ID NO: 1448202 - RNA, 19 nt, Artificial Sequence
  Description of Artificial Sequence: Synthetic oligonucleotide
  Sense strand starting at position 2277 of SEQ ID NO: 1243878
cgauccugcccugaucuaa

SEQ ID NO: 1448203 - RNA, 19 nt, Artificial Sequence
  Description of Artificial Sequence: Synthetic oligonucleotide
  Antisense strand to SEQ ID NO: 1448202
uuagaucagggcaggaucg

SEQ ID NO: 1448204 - RNA, 19 nt, Artificial Sequence
  Description of Artificial Sequence: Synthetic oligonucleotide
  Sense strand starting at position 2678 of SEQ ID NO: 1243878
gccguagccggaaauuagu

SEQ ID NO: 1448205 - RNA, 19 nt, Artificial Sequence
  Description of Artificial Sequence: Synthetic oligonucleotide
  Antisense strand to SEQ ID NO: 1448204
acuaauuuccggcuacggc

SEQ ID NO: 1448206 - RNA, 19 nt, Artificial Sequence
  Description of Artificial Sequence: Synthetic oligonucleotide
  Sense strand starting at position 2687 of SEQ ID NO: 1243878
ggaaauuaguguuccauag

SEQ ID NO: 1448207 - RNA, 19 nt, Artificial Sequence
  Description of Artificial Sequence: Synthetic oligonucleotide
  Antisense strand to SEQ ID NO: 1448206
cuauggaacacuaauuucc

SEQ ID NO: 1448208 - RNA, 19 nt, Artificial Sequence
  Description of Artificial Sequence: Synthetic oligonucleotide
  Sense strand starting at position 2735 of SEQ ID NO: 1243878
gaaaucccuccgcagguua

SEQ ID NO: 1448209 - RNA, 19 nt, Artificial Sequence
  Description of Artificial Sequence: Synthetic oligonucleotide
  Antisense strand to SEQ ID NO: 1448208
uaaccugcggagggauuuc

SEQ ID NO: 1448210 - RNA, 19 nt, Artificial Sequence
  Description of Artificial Sequence: Synthetic oligonucleotide
  Sense strand starting at position 3029 of SEQ ID NO: 1243878
aucuuaguguccuuaacca

SEQ ID NO: 1448211 - RNA, 19 nt, Artificial Sequence
  Description of Artificial Sequence: Synthetic oligonucleotide
  Antisense strand to SEQ ID NO: 1448210
ugguuaaggacacuaagau

SEQ ID NO: 1448212 - RNA, 19 nt, Artificial Sequence
  Description of Artificial Sequence: Synthetic oligonucleotide
  Sense strand starting at position 3102 of SEQ ID NO: 1243878
caagguguacguugaauga

SEQ ID NO: 1448213 - RNA, 19 nt, Artificial Sequence
  Description of Artificial Sequence: Synthetic oligonucleotide
  Antisense strand to SEQ ID NO: 1448212
ucauucaacguacaccuug

SEQ ID NO: 1448214 - RNA, 19 nt, Artificial Sequence
  Description of Artificial Sequence: Synthetic oligonucleotide
  Sense strand starting at position 3268 of SEQ ID NO: 1243878
acagaaaugugucucuaua

SEQ ID NO: 1448215 - RNA, 19 nt, Artificial Sequence
  Description of Artificial Sequence: Synthetic oligonucleotide
  Antisense strand to SEQ ID NO: 1448214
uauagagacacauuucugu

SEQ ID NO: 1448216 - RNA, 19 nt, Artificial Sequence
  Description of Artificial Sequence: Synthetic oligonucleotide
  Sense strand starting at position 3270 of SEQ ID NO: 1243878
agaaaugugucucuauagu

SEQ ID NO: 1448217 - RNA, 19 nt, Artificial Sequence
  Description of Artificial Sequence: Synthetic oligonucleotide
  Antisense strand to SEQ ID NO: 1448216
acuauagagacacauuucu

SEQ ID NO: 1448218 - RNA, 19 nt, Artificial Sequence
  Description of Artificial Sequence: Synthetic oligonucleotide
  Sense strand starting at position 3278 of SEQ ID NO: 1243878
gucucuauaguccauguga

SEQ ID NO: 1448219 - RNA, 19 nt, Artificial Sequence
  Description of Artificial Sequence: Synthetic oligonucleotide
  Antisense strand to SEQ ID NO: 1448218
ucacauggacuauagagac

SEQ ID NO: 1448220 - RNA, 19 nt, Artificial Sequence
  Description of Artificial Sequence: Synthetic oligonucleotide
  Sense strand starting at position 3280 of SEQ ID NO: 1243878
cucuauaguccaugugaua

SEQ ID NO: 1448221 - RNA, 19 nt, Artificial Sequence
  Description of Artificial Sequence: Synthetic oligonucleotide
  Antisense strand to SEQ ID NO: 1448220
uaucacauggacuauagag

SEQ ID NO: 1448222 - RNA, 19 nt, Artificial Sequence
  Description of Artificial Sequence: Synthetic oligonucleotide
  Sense strand starting at position 3291 of SEQ ID NO: 1243878
augugauaucuguaaacca

SEQ ID NO: 1448223 - RNA, 19 nt, Artificial Sequence
  Description of Artificial Sequence: Synthetic oligonucleotide
  Antisense strand to SEQ ID NO: 1448222
ugguuuacagauaucacau

SEQ ID NO: 1448224 - RNA, 19 nt, Artificial Sequence
  Description of Artificial Sequence: Synthetic oligonucleotide
  Sense strand starting at position 3463 of SEQ ID NO: 1243878
acucaagacugauaagaaa

SEQ ID NO: 1448225 - RNA, 19 nt, Artificial Sequence
  Description of Artificial Sequence: Synthetic oligonucleotide
  Antisense strand to SEQ ID NO: 1448224
uuucuuaucagucuugagu

SEQ ID NO: 1448226 - RNA, 19 nt, Artificial Sequence
  Description of Artificial Sequence: Synthetic oligonucleotide
  Sense strand starting at position 3490 of SEQ ID NO: 1243878
aucuauucugucugaauag

SEQ ID NO: 1448227 - RNA, 19 nt, Artificial Sequence
  Description of Artificial Sequence: Synthetic oligonucleotide
  Antisense strand to SEQ ID NO: 1448226
cuauucagacagaauagau

SEQ ID NO: 1448228 - RNA, 19 nt, Artificial Sequence
  Description of Artificial Sequence: Synthetic oligonucleotide
  Sense strand starting at position 3595 of SEQ ID NO: 1243878
acuuccaggucuuuagaua

SEQ ID NO: 1448229 - RNA, 19 nt, Artificial Sequence
  Description of Artificial Sequence: Synthetic oligonucleotide
  Antisense strand to SEQ ID NO: 1448228
uaucuaaagaccuggaagu

SEQ ID NO: 1448230 - RNA, 19 nt, Artificial Sequence
  Description of Artificial Sequence: Synthetic oligonucleotide
  Sense strand starting at position 3727 of SEQ ID NO: 1243878
acauguauugaucgaugac

SEQ ID NO: 1448231 - RNA, 19 nt, Artificial Sequence
  Description of Artificial Sequence: Synthetic oligonucleotide
  Antisense strand to SEQ ID NO: 1448230
gucaucgaucaauacaugu

SEQ ID NO: 1448232 - RNA, 19 nt, Artificial Sequence
  Description of Artificial Sequence: Synthetic oligonucleotide
  Sense strand starting at position 3730 of SEQ ID NO: 1243878
uguauugaucgaugacuca

SEQ ID NO: 1448233 - RNA, 19 nt, Artificial Sequence
  Description of Artificial Sequence: Synthetic oligonucleotide
  Antisense strand to SEQ ID NO: 1448232
ugagucaucgaucaauaca

SEQ ID NO: 1448234 - RNA, 19 nt, Artificial Sequence
  Description of Artificial Sequence: Synthetic oligonucleotide
  Sense strand starting at position 3809 of SEQ ID NO: 1243878
gcuccugaggccguguuau

SEQ ID NO: 1448235 - RNA, 19 nt, Artificial Sequence
  Description of Artificial Sequence: Synthetic oligonucleotide
  Antisense strand to SEQ ID NO: 1448234
auaacacggccucaggagc

SEQ ID NO: 1448236 - RNA, 19 nt, Artificial Sequence
  Description of Artificial Sequence: Synthetic oligonucleotide
  Sense strand starting at position 3820 of SEQ ID NO: 1243878
cguguuaucaucgcauccu

SEQ ID NO: 1448237 - RNA, 19 nt, Artificial Sequence
  Description of Artificial Sequence: Synthetic oligonucleotide
  Antisense strand to SEQ ID NO: 1448236
aggaugcgaugauaacacg

SEQ ID NO: 1448238 - RNA, 19 nt, Artificial Sequence
  Description of Artificial Sequence: Synthetic oligonucleotide
  Sense strand starting at position 3850 of SEQ ID NO: 1243878
auauaaacuuucucgauug

SEQ ID NO: 1448239 - RNA, 19 nt, Artificial Sequence
  Description of Artificial Sequence: Synthetic oligonucleotide
  Antisense strand to SEQ ID NO: 1448238
caaucgagaaaguuuauau

SEQ ID NO: 1448240 - RNA, 19 nt, Artificial Sequence
  Description of Artificial Sequence: Synthetic oligonucleotide
  Sense strand starting at position 3862 of SEQ ID NO: 1243878
ucgauugagacuggucuca

SEQ ID NO: 1448241 - RNA, 19 nt, Artificial Sequence
  Description of Artificial Sequence: Synthetic oligonucleotide
  Antisense strand to SEQ ID NO: 1448240
ugagaccagucucaaucga

SEQ ID NO: 1448242 - RNA, 19 nt, Artificial Sequence
  Description of Artificial Sequence: Synthetic oligonucleotide
  Sense strand starting at position 3864 of SEQ ID NO: 1243878
gauugagacuggucucaga

SEQ ID NO: 1448243 - RNA, 19 nt, Artificial Sequence
  Description of Artificial Sequence: Synthetic oligonucleotide
  Antisense strand to SEQ ID NO: 1448242
ucugagaccagucucaauc

SEQ ID NO: 1448244 - RNA, 19 nt, Artificial Sequence
  Description of Artificial Sequence: Synthetic oligonucleotide
  Sense strand starting at position 3918 of SEQ ID NO: 1243878
cauggaguuccuuaagguc

SEQ ID NO: 1448245 - RNA, 19 nt, Artificial Sequence
  Description of Artificial Sequence: Synthetic oligonucleotide
  Antisense strand to SEQ ID NO: 1448244
gaccuuaaggaacuccaug

SEQ ID NO: 1448246 - RNA, 19 nt, Artificial Sequence
  Description of Artificial Sequence: Synthetic oligonucleotide
  Sense strand starting at position 3924 of SEQ ID NO: 1243878
guuccuuaaggucaagcau

SEQ ID NO: 1448247 - RNA, 19 nt, Artificial Sequence
  Description of Artificial Sequence: Synthetic oligonucleotide
  Antisense strand to SEQ ID NO: 1448246
augcuugaccuuaaggaac

SEQ ID NO: 1448248 - RNA, 19 nt, Artificial Sequence
  Description of Artificial Sequence: Synthetic oligonucleotide
  Sense strand starting at position 57 of SEQ ID NO: 1243879
aagugaccgcgacaggauu

SEQ ID NO: 1448249 - RNA, 19 nt, Artificial Sequence
  Description of Artificial Sequence: Synthetic oligonucleotide
  Antisense strand to SEQ ID NO: 1448248
aauccugucgcggucacuu

SEQ ID NO: 1448250 - RNA, 19 nt, Artificial Sequence
  Description of Artificial Sequence: Synthetic oligonucleotide
  Sense strand starting at position 246 of SEQ ID NO: 1243879
agugcagcuccauaucaga

SEQ ID NO: 1448251 - RNA, 19 nt, Artificial Sequence
  Description of Artificial Sequence: Synthetic oligonucleotide
  Antisense strand to SEQ ID NO: 1448250
ucugauauggagcugcacu

SEQ ID NO: 1448252 - RNA, 19 nt, Artificial Sequence
  Description of Artificial Sequence: Synthetic oligonucleotide
  Sense strand starting at position 378 of SEQ ID NO: 1243879
gcaauuaaugacgguaaca

SEQ ID NO: 1448253 - RNA, 19 nt, Artificial Sequence
  Description of Artificial Sequence: Synthetic oligonucleotide
  Antisense strand to SEQ ID NO: 1448252
uguuaccgucauuaauugc

SEQ ID NO: 1448254 - RNA, 19 nt, Artificial Sequence
  Description of Artificial Sequence: Synthetic oligonucleotide
  Sense strand starting at position 453 of SEQ ID NO: 1243879
uuacaugguuucucucauu

SEQ ID NO: 1448255 - RNA, 19 nt, Artificial Sequence
  Description of Artificial Sequence: Synthetic oligonucleotide
  Antisense strand to SEQ ID NO: 1448254
aaugagagaaaccauguaa

SEQ ID NO: 1448256 - RNA, 19 nt, Artificial Sequence
  Description of Artificial Sequence: Synthetic oligonucleotide
  Sense strand starting at position 458 of SEQ ID NO: 1243879
ugguuucucucauugaauc

SEQ ID NO: 1448257 - RNA, 19 nt, Artificial Sequence
  Description of Artificial Sequence: Synthetic oligonucleotide
  Antisense strand to SEQ ID NO: 1448256
gauucaaugagagaaacca

SEQ ID NO: 1448258 - RNA, 19 nt, Artificial Sequence
  Description of Artificial Sequence: Synthetic oligonucleotide
  Sense strand starting at position 459 of SEQ ID NO: 1243879
gguuucucucauugaaucu

SEQ ID NO: 1448259 - RNA, 19 nt, Artificial Sequence
  Description of Artificial Sequence: Synthetic oligonucleotide
  Antisense strand to SEQ ID NO: 1448258
agauucaaugagagaaacc

SEQ ID NO: 1448260 - RNA, 19 nt, Artificial Sequence
  Description of Artificial Sequence: Synthetic oligonucleotide
  Sense strand starting at position 559 of SEQ ID NO: 1243879
agcaucuaaucauucgaau

SEQ ID NO: 1448261 - RNA, 19 nt, Artificial Sequence
  Description of Artificial Sequence: Synthetic oligonucleotide
  Antisense strand to SEQ ID NO: 1448260
auucgaaugauuagaugcu

SEQ ID NO: 1448262 - RNA, 19 nt, Artificial Sequence
  Description of Artificial Sequence: Synthetic oligonucleotide
  Sense strand starting at position 584 of SEQ ID NO: 1243879
uccagaauucgguacauuc

SEQ ID NO: 1448263 - RNA, 19 nt, Artificial Sequence
  Description of Artificial Sequence: Synthetic oligonucleotide
  Antisense strand to SEQ ID NO: 1448262
gaauguaccgaauucugga

SEQ ID NO: 1448264 - RNA, 19 nt, Artificial Sequence
  Description of Artificial Sequence: Synthetic oligonucleotide
  Sense strand starting at position 889 of SEQ ID NO: 1243879
accugagaucaagguucga

SEQ ID NO: 1448265 - RNA, 19 nt, Artificial Sequence
  Description of Artificial Sequence: Synthetic oligonucleotide
  Antisense strand to SEQ ID NO: 1448264
ucgaaccuugaucucaggu

SEQ ID NO: 1448266 - RNA, 19 nt, Artificial Sequence
  Description of Artificial Sequence: Synthetic oligonucleotide
  Sense strand starting at position 1286 of SEQ ID NO: 1243879
cagcauucuguaggaccaa

SEQ ID NO: 1448267 - RNA, 19 nt, Artificial Sequence
  Description of Artificial Sequence: Synthetic oligonucleotide
  Antisense strand to SEQ ID NO: 1448266
uugguccuacagaaugcug

SEQ ID NO: 1448268 - RNA, 19 nt, Artificial Sequence
  Description of Artificial Sequence: Synthetic oligonucleotide
  Sense strand starting at position 1672 of SEQ ID NO: 1243879
cgauccugcccugaucuaa

SEQ ID NO: 1448269 - RNA, 19 nt, Artificial Sequence
  Description of Artificial Sequence: Synthetic oligonucleotide
  Antisense strand to SEQ ID NO: 1448268
uuagaucagggcaggaucg

SEQ ID NO: 1448270 - RNA, 19 nt, Artificial Sequence
  Description of Artificial Sequence: Synthetic oligonucleotide
  Sense strand starting at position 2073 of SEQ ID NO: 1243879
gccguagccggaaauuagu

SEQ ID NO: 1448271 - RNA, 19 nt, Artificial Sequence
  Description of Artificial Sequence: Synthetic oligonucleotide
  Antisense strand to SEQ ID NO: 1448270
acuaauuuccggcuacggc

SEQ ID NO: 1448272 - RNA, 19 nt, Artificial Sequence
  Description of Artificial Sequence: Synthetic oligonucleotide
  Sense strand starting at position 2082 of SEQ ID NO: 1243879
ggaaauuaguguuccauag

SEQ ID NO: 1448273 - RNA, 19 nt, Artificial Sequence
  Description of Artificial Sequence: Synthetic oligonucleotide
  Antisense strand to SEQ ID NO: 1448272
cuauggaacacuaauuucc

SEQ ID NO: 1448274 - RNA, 19 nt, Artificial Sequence
  Description of Artificial Sequence: Synthetic oligonucleotide
  Sense strand starting at position 2130 of SEQ ID NO: 1243879
gaaaucccuccgcagguua

SEQ ID NO: 1448275 - RNA, 19 nt, Artificial Sequence
  Description of Artificial Sequence: Synthetic oligonucleotide
  Antisense strand to SEQ ID NO: 1448274
uaaccugcggagggauuuc

SEQ ID NO: 1448276 - RNA, 19 nt, Artificial Sequence
  Description of Artificial Sequence: Synthetic oligonucleotide
  Sense strand starting at position 2424 of SEQ ID NO: 1243879
aucuuaguguccuuaacca

SEQ ID NO: 1448277 - RNA, 19 nt, Artificial Sequence
  Description of Artificial Sequence: Synthetic oligonucleotide
  Antisense strand to SEQ ID NO: 1448276
ugguuaaggacacuaagau

SEQ ID NO: 1448278 - RNA, 19 nt, Artificial Sequence
  Description of Artificial Sequence: Synthetic oligonucleotide
  Sense strand starting at position 2663 of SEQ ID NO: 1243879
acagaaaugugucucuaua

SEQ ID NO: 1448279 - RNA, 19 nt, Artificial Sequence
  Description of Artificial Sequence: Synthetic oligonucleotide
  Antisense strand to SEQ ID NO: 1448278
uauagagacacauuucugu

SEQ ID NO: 1448280 - RNA, 19 nt, Artificial Sequence
  Description of Artificial Sequence: Synthetic oligonucleotide
  Sense strand starting at position 2665 of SEQ ID NO: 1243879
agaaaugugucucuauagu

SEQ ID NO: 1448281 - RNA, 19 nt, Artificial Sequence
  Description of Artificial Sequence: Synthetic oligonucleotide
  Antisense strand to SEQ ID NO: 1448280
acuauagagacacauuucu

SEQ ID NO: 1448282 - RNA, 19 nt, Artificial Sequence
  Description of Artificial Sequence: Synthetic oligonucleotide
  Sense strand starting at position 2673 of SEQ ID NO: 1243879
gucucuauaguccauguga

SEQ ID NO: 1448283 - RNA, 19 nt, Artificial Sequence
  Description of Artificial Sequence: Synthetic oligonucleotide
  Antisense strand to SEQ ID NO: 1448282
ucacauggacuauagagac

SEQ ID NO: 1448284 - RNA, 19 nt, Artificial Sequence
  Description of Artificial Sequence: Synthetic oligonucleotide
  Sense strand starting at position 2675 of SEQ ID NO: 1243879
cucuauaguccaugugaua

SEQ ID NO: 1448285 - RNA, 19 nt, Artificial Sequence
  Description of Artificial Sequence: Synthetic oligonucleotide
  Antisense strand to SEQ ID NO: 1448284
uaucacauggacuauagag

SEQ ID NO: 1448286 - RNA, 19 nt, Artificial Sequence
  Description of Artificial Sequence: Synthetic oligonucleotide
  Sense strand starting at position 2686 of SEQ ID NO: 1243879
augugauaucuguaaacca

SEQ ID NO: 1448287 - RNA, 19 nt, Artificial Sequence
  Description of Artificial Sequence: Synthetic oligonucleotide
  Antisense strand to SEQ ID NO: 1448286
ugguuuacagauaucacau

SEQ ID NO: 1448288 - RNA, 19 nt, Artificial Sequence
  Description of Artificial Sequence: Synthetic oligonucleotide
  Sense strand starting at position 2858 of SEQ ID NO: 1243879
acucaagacugauaagaaa

SEQ ID NO: 1448289 - RNA, 19 nt, Artificial Sequence
  Description of Artificial Sequence: Synthetic oligonucleotide
  Antisense strand to SEQ ID NO: 1448288
uuucuuaucagucuugagu

SEQ ID NO: 1448290 - RNA, 19 nt, Artificial Sequence
  Description of Artificial Sequence: Synthetic oligonucleotide
  Sense strand starting at position 2885 of SEQ ID NO: 1243879
aucuauucugucugaauag

SEQ ID NO: 1448291 - RNA, 19 nt, Artificial Sequence
  Description of Artificial Sequence: Synthetic oligonucleotide
  Antisense strand to SEQ ID NO: 1448290
cuauucagacagaauagau
